United States Patent Application Publication US 2022/0162320 A1 - sequence listing, part 3

SEQ ID NO: 39118 - protein, 10 aa, Homo sapiens
  misc_feature: Table A; Target 39118; HLA-C*04:01; MAGEA3,MAGEA6; ENSG00000221867,ENSG00000197172; CTA,CTA
ASSLPTTMNY

SEQ ID NO: 39119 - protein, 10 aa, Homo sapiens
  misc_feature: Table A; Target 39119; HLA-C*16:02; MAGEA3,MAGEA6; ENSG00000221867,ENSG00000197172; CTA,CTA
ASSLPTTMNY

SEQ ID NO: 39120 - protein, 10 aa, Homo sapiens
  misc_feature: Table A; Target 39120; HLA-C*16:04; MAGEA3,MAGEA6; ENSG00000221867,ENSG00000197172; CTA,CTA
ASSLPTTMNY

SEQ ID NO: 39121 - protein, 8 aa, Homo sapiens
  misc_feature: Table A; Target 39121; HLA-A*01:01; MAGEA3,MAGEA6; ENSG00000221867,ENSG00000197172; CTA,CTA
ATCLGLSY

SEQ ID NO: 39122 - protein, 8 aa, Homo sapiens
  misc_feature: Table A; Target 39122; HLA-C*07:01; MAGEA3,MAGEA6; ENSG00000221867,ENSG00000197172; CTA,CTA
ATCLGLSY

SEQ ID NO: 39123 - protein, 10 aa, Homo sapiens
  misc_feature: Table A; Target 39123; HLA-B*35:03; MAGEA3,MAGEA6; ENSG00000221867,ENSG00000197172; CTA,CTA
DGLLGDNQIM

SEQ ID NO: 39124 - protein, 9 aa, Homo sapiens
  misc_feature: Table A; Target 39124; HLA-A*25:01; MAGEA3,MAGEA6; ENSG00000221867,ENSG00000197172; CTA,CTA
EAASSSSTL

SEQ ID NO: 39125 - protein, 9 aa, Homo sapiens
  misc_feature: Table A; Target 39125; HLA-A*26:01; MAGEA3,MAGEA6; ENSG00000221867,ENSG00000197172; CTA,CTA
EAASSSSTL

SEQ ID NO: 39126 - protein, 9 aa, Homo sapiens
  misc_feature: Table A; Target 39126; HLA-A*33:03; MAGEA3,MAGEA6; ENSG00000221867,ENSG00000197172; CTA,CTA
EAASSSSTL

SEQ ID NO: 39127 - protein, 9 aa, Homo sapiens
  misc_feature: Table A; Target 39127; HLA-A*68:01; MAGEA3,MAGEA6; ENSG00000221867,ENSG00000197172; CTA,CTA
EAASSSSTL

SEQ ID NO: 39128 - protein, 9 aa, Homo sapiens
  misc_feature: Table A; Target 39128; HLA-B*07:02; MAGEA3,MAGEA6; ENSG00000221867,ENSG00000197172; CTA,CTA
EAASSSSTL

SEQ ID NO: 39129 - protein, 9 aa, Homo sapiens
  misc_feature: Table A; Target 39129; HLA-B*35:01; MAGEA3,MAGEA6; ENSG00000221867,ENSG00000197172; CTA,CTA
EAASSSSTL

SEQ ID NO: 39130 - protein, 9 aa, Homo sapiens
  misc_feature: Table A; Target 39130; HLA-B*35:03; MAGEA3,MAGEA6; ENSG00000221867,ENSG00000197172; CTA,CTA
EAASSSSTL

SEQ ID NO: 39131 - protein, 9 aa, Homo sapiens
  misc_feature: Table A; Target 39131; HLA-B*38:01; MAGEA3,MAGEA6; ENSG00000221867,ENSG00000197172; CTA,CTA
EAASSSSTL

SEQ ID NO: 39132 - protein, 9 aa, Homo sapiens
  misc_feature: Table A; Target 39132; HLA-B*39:01; MAGEA3,MAGEA6; ENSG00000221867,ENSG00000197172; CTA,CTA
EAASSSSTL

SEQ ID NO: 39133 - protein, 9 aa, Homo sapiens
  misc_feature: Table A; Target 39133; HLA-B*51:01; MAGEA3,MAGEA6; ENSG00000221867,ENSG00000197172; CTA,CTA
EAASSSSTL

SEQ ID NO: 39134 - protein, 9 aa, Homo sapiens
  misc_feature: Table A; Target 39134; HLA-C*01:02; MAGEA3,MAGEA6; ENSG00000221867,ENSG00000197172; CTA,CTA
EAASSSSTL

SEQ ID NO: 39135 - protein, 9 aa, Homo sapiens
  misc_feature: Table A; Target 39135; HLA-C*03:03; MAGEA3,MAGEA6; ENSG00000221867,ENSG00000197172; CTA,CTA
EAASSSSTL

SEQ ID NO: 39136 - protein, 9 aa, Homo sapiens
  misc_feature: Table A; Target 39136; HLA-C*03:04; MAGEA3,MAGEA6; ENSG00000221867,ENSG00000197172; CTA,CTA
EAASSSSTL

SEQ ID NO: 39137 - protein, 9 aa, Homo sapiens
  misc_feature: Table A; Target 39137; HLA-C*05:01; MAGEA3,MAGEA6; ENSG00000221867,ENSG00000197172; CTA,CTA
EAASSSSTL

SEQ ID NO: 39138 - protein, 9 aa, Homo sapiens
  misc_feature: Table A; Target 39138; HLA-C*07:02; MAGEA3,MAGEA6; ENSG00000221867,ENSG00000197172; CTA,CTA
EAASSSSTL

SEQ ID NO: 39139 - protein, 9 aa, Homo sapiens
  misc_feature: Table A; Target 39139; HLA-C*07:06; MAGEA3,MAGEA6; ENSG00000221867,ENSG00000197172; CTA,CTA
EAASSSSTL

SEQ ID NO: 39140 - protein, 9 aa, Homo sapiens
  misc_feature: Table A; Target 39140; HLA-C*12:03; MAGEA3,MAGEA6; ENSG00000221867,ENSG00000197172; CTA,CTA
EAASSSSTL

SEQ ID NO: 39141 - protein, 8 aa, Homo sapiens
  misc_feature: Table A; Target 39141; HLA-B*54:01; MAGEA3,MAGEA6; ENSG00000221867,ENSG00000197172; CTA,CTA
EALGLVGA

SEQ ID NO: 39142 - protein, 9 aa, Homo sapiens
  misc_feature: Table A; Target 39142; HLA-A*26:01; MAGEA3,MAGEA6; ENSG00000221867,ENSG00000197172; CTA,CTA
EALGLVGAQ

SEQ ID NO: 39143 - protein, 9 aa, Homo sapiens
  misc_feature: Table A; Target 39143; HLA-A*33:01; MAGEA3,MAGEA6; ENSG00000221867,ENSG00000197172; CTA,CTA
EALGLVGAQ

SEQ ID NO: 39144 - protein, 9 aa, Homo sapiens
  misc_feature: Table A; Target 39144; HLA-A*33:03; MAGEA3,MAGEA6; ENSG00000221867,ENSG00000197172; CTA,CTA
EALGLVGAQ

SEQ ID NO: 39145 - protein, 9 aa, Homo sapiens
  misc_feature: Table A; Target 39145; HLA-C*04:01; MAGEA3,MAGEA6; ENSG00000221867,ENSG00000197172; CTA,CTA
EALGLVGAQ

SEQ ID NO: 39146 - protein, 9 aa, Homo sapiens
  misc_feature: Table A; Target 39146; HLA-C*07:01; MAGEA3,MAGEA6; ENSG00000221867,ENSG00000197172; CTA,CTA
EALGLVGAQ

SEQ ID NO: 39147 - protein, 9 aa, Homo sapiens
  misc_feature: Table A; Target 39147; HLA-C*12:03; MAGEA3,MAGEA6; ENSG00000221867,ENSG00000197172; CTA,CTA
EALGLVGAQ

SEQ ID NO: 39148 - protein, 10 aa, Homo sapiens
  misc_feature: Table A; Target 39148; HLA-A*33:03; MAGEA3,MAGEA6; ENSG00000221867,ENSG00000197172; CTA,CTA
EALGLVGAQA

SEQ ID NO: 39149 - protein, 10 aa, Homo sapiens
  misc_feature: Table A; Target 39149; HLA-B*54:01; MAGEA3,MAGEA6; ENSG00000221867,ENSG00000197172; CTA,CTA
EALGLVGAQA

SEQ ID NO: 39150 - protein, 10 aa, Homo sapiens
  misc_feature: Table A; Target 39150; HLA-C*07:06; MAGEA3,MAGEA6; ENSG00000221867,ENSG00000197172; CTA,CTA
EALGLVGAQA

SEQ ID NO: 39151 - protein, 9 aa, Homo sapiens
  misc_feature: Table A; Target 39151; HLA-A*25:01; MAGEA3,MAGEA6; ENSG00000221867,ENSG00000197172; CTA,CTA
EARGEALGL

SEQ ID NO: 39152 - protein, 9 aa, Homo sapiens
  misc_feature: Table A; Target 39152; HLA-A*26:01; MAGEA3,MAGEA6; ENSG00000221867,ENSG00000197172; CTA,CTA
EARGEALGL

SEQ ID NO: 39153 - protein, 9 aa, Homo sapiens
  misc_feature: Table A; Target 39153; HLA-A*33:03; MAGEA3,MAGEA6; ENSG00000221867,ENSG00000197172; CTA,CTA
EARGEALGL

SEQ ID NO: 39154 - protein, 9 aa, Homo sapiens
  misc_feature: Table A; Target 39154; HLA-A*68:01; MAGEA3,MAGEA6; ENSG00000221867,ENSG00000197172; CTA,CTA
EARGEALGL

SEQ ID NO: 39155 - protein, 9 aa, Homo sapiens
  misc_feature: Table A; Target 39155; HLA-C*07:06; MAGEA3,MAGEA6; ENSG00000221867,ENSG00000197172; CTA,CTA
EARGEALGL

SEQ ID NO: 39156 - protein, 8 aa, Homo sapiens
  misc_feature: Table A; Target 39156; HLA-B*18:01; MAGEA3,MAGEA6; ENSG00000221867,ENSG00000197172; CTA,CTA
EEEGPSTF

SEQ ID NO: 39157 - protein, 11 aa, Homo sapiens
  misc_feature: Table A; Target 39157; HLA-B*39:01; MAGEA3,MAGEA6; ENSG00000221867,ENSG00000197172; CTA,CTA
EEEGPSTFPDL

SEQ ID NO: 39158 - protein, 11 aa, Homo sapiens
  misc_feature: Table A; Target 39158; HLA-B*40:01; MAGEA3,MAGEA6; ENSG00000221867,ENSG00000197172; CTA,CTA
EEEGPSTFPDL

SEQ ID NO: 39159 - protein, 11 aa, Homo sapiens
  misc_feature: Table A; Target 39159; HLA-B*40:01; MAGEA3,MAGEA6; ENSG00000221867,ENSG00000197172; CTA,CTA
EEGLEARGEAL

SEQ ID NO: 39160 - protein, 11 aa, Homo sapiens
  misc_feature: Table A; Target 39160; HLA-B*44:03; MAGEA3,MAGEA6; ENSG00000221867,ENSG00000197172; CTA,CTA
EEGLEARGEAL

SEQ ID NO: 39161 - protein, 10 aa, Homo sapiens
  misc_feature: Table A; Target 39161; HLA-A*30:01; MAGEA3,MAGEA6; ENSG00000221867,ENSG00000197172; CTA,CTA
EEGPSTFPDL

SEQ ID NO: 39162 - protein, 10 aa, Homo sapiens
  misc_feature: Table A; Target 39162; HLA-B*40:01; MAGEA3,MAGEA6; ENSG00000221867,ENSG00000197172; CTA,CTA
EEGPSTFPDL

SEQ ID NO: 39163 - protein, 10 aa, Homo sapiens
  misc_feature: Table A; Target 39163; HLA-B*40:02; MAGEA3,MAGEA6; ENSG00000221867,ENSG00000197172; CTA,CTA
EEGPSTFPDL

SEQ ID NO: 39164 - protein, 10 aa, Homo sapiens
  misc_feature: Table A; Target 39164; HLA-B*44:02; MAGEA3,MAGEA6; ENSG00000221867,ENSG00000197172; CTA,CTA
EEGPSTFPDL

SEQ ID NO: 39165 - protein, 10 aa, Homo sapiens
  misc_feature: Table A; Target 39165; HLA-B*44:03; MAGEA3,MAGEA6; ENSG00000221867,ENSG00000197172; CTA,CTA
EEGPSTFPDL

SEQ ID NO: 39166 - protein, 10 aa, Homo sapiens
  misc_feature: Table A; Target 39166; HLA-C*16:04; MAGEA3,MAGEA6; ENSG00000221867,ENSG00000197172; CTA,CTA
EEGPSTFPDL

SEQ ID NO: 39167 - protein, 8 aa, Homo sapiens
  misc_feature: Table A; Target 39167; HLA-B*18:01; MAGEA3,MAGEA6; ENSG00000221867,ENSG00000197172; CTA,CTA
EELSVLEV

SEQ ID NO: 39168 - protein, 8 aa, Homo sapiens
  misc_feature: Table A; Target 39168; HLA-B*49:01; MAGEA3,MAGEA6; ENSG00000221867,ENSG00000197172; CTA,CTA
EELSVLEV

SEQ ID NO: 39169 - protein, 8 aa, Homo sapiens
  misc_feature: Table A; Target 39169; HLA-B*51:01; MAGEA3,MAGEA6; ENSG00000221867,ENSG00000197172; CTA,CTA
EELSVLEV

SEQ ID NO: 39170 - protein, 9 aa, Homo sapiens
  misc_feature: Table A; Target 39170; HLA-A*23:01; MAGEA3,MAGEA6; ENSG00000221867,ENSG00000197172; CTA,CTA
EELSVLEVF

SEQ ID NO: 39171 - protein, 9 aa, Homo sapiens
  misc_feature: Table A; Target 39171; HLA-A*30:01; MAGEA3,MAGEA6; ENSG00000221867,ENSG00000197172; CTA,CTA
EELSVLEVF

SEQ ID NO: 39172 - protein, 9 aa, Homo sapiens
  misc_feature: Table A; Target 39172; HLA-B*18:01; MAGEA3,MAGEA6; ENSG00000221867,ENSG00000197172; CTA,CTA
EELSVLEVF

SEQ ID NO: 39173 - protein, 9 aa, Homo sapiens
  misc_feature: Table A; Target 39173; HLA-B*40:01; MAGEA3,MAGEA6; ENSG00000221867,ENSG00000197172; CTA,CTA
EELSVLEVF

SEQ ID NO: 39174 - protein, 9 aa, Homo sapiens
  misc_feature: Table A; Target 39174; HLA-B*44:02; MAGEA3,MAGEA6; ENSG00000221867,ENSG00000197172; CTA,CTA
EELSVLEVF

SEQ ID NO: 39175 - protein, 9 aa, Homo sapiens
  misc_feature: Table A; Target 39175; HLA-B*44:03; MAGEA3,MAGEA6; ENSG00000221867,ENSG00000197172; CTA,CTA
EELSVLEVF

SEQ ID NO: 39176 - protein, 9 aa, Homo sapiens
  misc_feature: Table A; Target 39176; HLA-C*16:04; MAGEA3,MAGEA6; ENSG00000221867,ENSG00000197172; CTA,CTA
EELSVLEVF

SEQ ID NO: 39177 - protein, 8 aa, Homo sapiens
  misc_feature: Table A; Target 39177; HLA-A*33:01; MAGEA3,MAGEA6; ENSG00000221867,ENSG00000197172; CTA,CTA
EFQAALSR

SEQ ID NO: 39178 - protein, 8 aa, Homo sapiens
  misc_feature: Table A; Target 39178; HLA-A*33:03; MAGEA3,MAGEA6; ENSG00000221867,ENSG00000197172; CTA,CTA
EFQAALSR

SEQ ID NO: 39179 - protein, 9 aa, Homo sapiens
  misc_feature: Table A; Target 39179; HLA-A*33:03; MAGEA3,MAGEA6; ENSG00000221867,ENSG00000197172; CTA,CTA
EFQAALSRK

SEQ ID NO: 39180 - protein, 10 aa, Homo sapiens
  misc_feature: Table A; Target 39180; HLA-B*40:01; MAGEA3,MAGEA6; ENSG00000221867,ENSG00000197172; CTA,CTA
EGLEARGEAL

SEQ ID NO: 39181 - protein, 9 aa, Homo sapiens
  misc_feature: Table A; Target 39181; HLA-C*01:02; MAGEA3,MAGEA6; ENSG00000221867,ENSG00000197172; CTA,CTA
EGPSTFPDL

SEQ ID NO: 39182 - protein, 10 aa, Homo sapiens
  misc_feature: Table A; Target 39182; HLA-A*25:01; MAGEA3,MAGEA6; ENSG00000221867,ENSG00000197172; CTA,CTA
ELMEVDPIGH

SEQ ID NO: 39183 - protein, 10 aa, Homo sapiens
  misc_feature: Table A; Target 39183; HLA-A*68:01; MAGEA3,MAGEA6; ENSG00000221867,ENSG00000197172; CTA,CTA
ELMEVDPIGH

SEQ ID NO: 39184 - protein, 10 aa, Homo sapiens
  misc_feature: Table A; Target 39184; HLA-A*25:01; MAGEA3,MAGEA6; ENSG00000221867,ENSG00000197172; CTA,CTA
EMLGSVVGNW

SEQ ID NO: 39185 - protein, 10 aa, Homo sapiens
  misc_feature: Table A; Target 39185; HLA-A*26:01; MAGEA3,MAGEA6; ENSG00000221867,ENSG00000197172; CTA,CTA
EMLGSVVGNW

SEQ ID NO: 39186 - protein, 10 aa, Homo sapiens
  misc_feature: Table A; Target 39186; HLA-A*33:01; MAGEA3,MAGEA6; ENSG00000221867,ENSG00000197172; CTA,CTA
EMLGSVVGNW

SEQ ID NO: 39187 - protein, 10 aa, Homo sapiens
  misc_feature: Table A; Target 39187; HLA-A*33:03; MAGEA3,MAGEA6; ENSG00000221867,ENSG00000197172; CTA,CTA
EMLGSVVGNW

SEQ ID NO: 39188 - protein, 10 aa, Homo sapiens
  misc_feature: Table A; Target 39188; HLA-B*44:02; MAGEA3,MAGEA6; ENSG00000221867,ENSG00000197172; CTA,CTA
EMLGSVVGNW

SEQ ID NO: 39189 - protein, 10 aa, Homo sapiens
  misc_feature: Table A; Target 39189; HLA-B*44:03; MAGEA3,MAGEA6; ENSG00000221867,ENSG00000197172; CTA,CTA
EMLGSVVGNW

SEQ ID NO: 39190 - protein, 10 aa, Homo sapiens
  misc_feature: Table A; Target 39190; HLA-B*57:01; MAGEA3,MAGEA6; ENSG00000221867,ENSG00000197172; CTA,CTA
EMLGSVVGNW

SEQ ID NO: 39191 - protein, 9 aa, Homo sapiens
  misc_feature: Table A; Target 39191; HLA-A*68:01; MAGEA3,MAGEA6; ENSG00000221867,ENSG00000197172; CTA,CTA
EPVTKAEML

SEQ ID NO: 39192 - protein, 11 aa, Homo sapiens
  misc_feature: Table A; Target 39192; HLA-B*38:01; MAGEA3,MAGEA6; ENSG00000221867,ENSG00000197172; CTA,CTA
EQEAASSSSTL

SEQ ID NO: 39193 - protein, 11 aa, Homo sapiens
  misc_feature: Table A; Target 39193; HLA-B*39:01; MAGEA3,MAGEA6; ENSG00000221867,ENSG00000197172; CTA,CTA
EQEAASSSSTL

SEQ ID NO: 39194 - protein, 10 aa, Homo sapiens
  misc_feature: Table A; Target 39194; HLA-A*68:01; MAGEA3,MAGEA6; ENSG00000221867,ENSG00000197172; CTA,CTA
ESEFQAALSR

SEQ ID NO: 39195 - protein, 10 aa, Homo sapiens
  misc_feature: Table A; Target 39195; HLA-C*07:06; MAGEA3,MAGEA6; ENSG00000221867,ENSG00000197172; CTA,CTA
ESEFQAALSR

SEQ ID NO: 39196 - protein, 11 aa, Homo sapiens
  misc_feature: Table A; Target 39196; HLA-A*01:01; MAGEA3,MAGEA6; ENSG00000221867,ENSG00000197172; CTA,CTA
ESEFQAALSRK

SEQ ID NO: 39197 - protein, 11 aa, Homo sapiens
  misc_feature: Table A; Target 39197; HLA-A*68:01; MAGEA3,MAGEA6; ENSG00000221867,ENSG00000197172; CTA,CTA
ESEFQAALSRK

SEQ ID NO: 39198 - protein, 9 aa, Homo sapiens
  misc_feature: Table A; Target 39198; HLA-A*33:01; MAGEA3,MAGEA6; ENSG00000221867,ENSG00000197172; CTA,CTA
ETSYVKVLH

SEQ ID NO: 39199 - protein, 9 aa, Homo sapiens
  misc_feature: Table A; Target 39199; HLA-A*33:03; MAGEA3,MAGEA6; ENSG00000221867,ENSG00000197172; CTA,CTA
ETSYVKVLH

SEQ ID NO: 39200 - protein, 9 aa, Homo sapiens
  misc_feature: Table A; Target 39200; HLA-A*68:01; MAGEA3,MAGEA6; ENSG00000221867,ENSG00000197172; CTA,CTA
ETSYVKVLH

SEQ ID NO: 39201 - protein, 9 aa, Homo sapiens
  misc_feature: Table A; Target 39201; HLA-A*68:02; MAGEA3,MAGEA6; ENSG00000221867,ENSG00000197172; CTA,CTA
ETSYVKVLH

SEQ ID NO: 39202 - protein, 10 aa, Homo sapiens
  misc_feature: Table A; Target 39202; HLA-A*25:01; MAGEA3,MAGEA6; ENSG00000221867,ENSG00000197172; CTA,CTA
EVFEGREDSI

SEQ ID NO: 39203 - protein, 10 aa, Homo sapiens
  misc_feature: Table A; Target 39203; HLA-A*26:01; MAGEA3,MAGEA6; ENSG00000221867,ENSG00000197172; CTA,CTA
EVFEGREDSI

SEQ ID NO: 39204 - protein, 10 aa, Homo sapiens
  misc_feature: Table A; Target 39204; HLA-A*32:01; MAGEA3,MAGEA6; ENSG00000221867,ENSG00000197172; CTA,CTA
EVFEGREDSI

SEQ ID NO: 39205 - protein, 10 aa, Homo sapiens
  misc_feature: Table A; Target 39205; HLA-A*33:01; MAGEA3,MAGEA6; ENSG00000221867,ENSG00000197172; CTA,CTA
EVFEGREDSI

SEQ ID NO: 39206 - protein, 10 aa, Homo sapiens
  misc_feature: Table A; Target 39206; HLA-A*33:03; MAGEA3,MAGEA6; ENSG00000221867,ENSG00000197172; CTA,CTA
EVFEGREDSI

SEQ ID NO: 39207 - protein, 10 aa, Homo sapiens
  misc_feature: Table A; Target 39207; HLA-A*68:01; MAGEA3,MAGEA6; ENSG00000221867,ENSG00000197172; CTA,CTA
EVFEGREDSI

SEQ ID NO: 39208 - protein, 10 aa, Homo sapiens
  misc_feature: Table A; Target 39208; HLA-B*08:01; MAGEA3,MAGEA6; ENSG00000221867,ENSG00000197172; CTA,CTA
EVFEGREDSI

SEQ ID NO: 39209 - protein, 10 aa, Homo sapiens
  misc_feature: Table A; Target 39209; HLA-B*35:01; MAGEA3,MAGEA6; ENSG00000221867,ENSG00000197172; CTA,CTA
EVFEGREDSI

SEQ ID NO: 39210 - protein, 10 aa, Homo sapiens
  misc_feature: Table A; Target 39210; HLA-B*35:03; MAGEA3,MAGEA6; ENSG00000221867,ENSG00000197172; CTA,CTA
EVFEGREDSI

SEQ ID NO: 39211 - protein, 10 aa, Homo sapiens
  misc_feature: Table A; Target 39211; HLA-B*38:01; MAGEA3,MAGEA6; ENSG00000221867,ENSG00000197172; CTA,CTA
EVFEGREDSI

SEQ ID NO: 39212 - protein, 10 aa, Homo sapiens
  misc_feature: Table A; Target 39212; HLA-B*39:01; MAGEA3,MAGEA6; ENSG00000221867,ENSG00000197172; CTA,CTA
EVFEGREDSI

SEQ ID NO: 39213 - protein, 10 aa, Homo sapiens
  misc_feature: Table A; Target 39213; HLA-B*51:01; MAGEA3,MAGEA6; ENSG00000221867,ENSG00000197172; CTA,CTA
EVFEGREDSI

SEQ ID NO: 39214 - protein, 10 aa, Homo sapiens
  misc_feature: Table A; Target 39214; HLA-C*07:01; MAGEA3,MAGEA6; ENSG00000221867,ENSG00000197172; CTA,CTA
EVFEGREDSI

SEQ ID NO: 39215 - protein, 10 aa, Homo sapiens
  misc_feature: Table A; Target 39215; HLA-C*07:06; MAGEA3,MAGEA6; ENSG00000221867,ENSG00000197172; CTA,CTA
EVFEGREDSI

SEQ ID NO: 39216 - protein, 10 aa, Homo sapiens
  misc_feature: Table A; Target 39216; HLA-A*25:01; MAGEA3,MAGEA6; ENSG00000221867,ENSG00000197172; CTA,CTA
EVTLGEVPAA

SEQ ID NO: 39217 - protein, 10 aa, Homo sapiens
  misc_feature: Table A; Target 39217; HLA-A*26:01; MAGEA3,MAGEA6; ENSG00000221867,ENSG00000197172; CTA,CTA
EVTLGEVPAA

SEQ ID NO: 39218 - protein, 9 aa, Homo sapiens
  misc_feature: Table A; Target 39218; HLA-A*01:01; MAGEA3,MAGEA6; ENSG00000221867,ENSG00000197172; CTA,CTA
FATCLGLSY

SEQ ID NO: 39219 - protein, 9 aa, Homo sapiens
  misc_feature: Table A; Target 39219; HLA-A*26:01; MAGEA3,MAGEA6; ENSG00000221867,ENSG00000197172; CTA,CTA
FATCLGLSY

SEQ ID NO: 39220 - protein, 9 aa, Homo sapiens
  misc_feature: Table A; Target 39220; HLA-A*29:02; MAGEA3,MAGEA6; ENSG00000221867,ENSG00000197172; CTA,CTA
FATCLGLSY

SEQ ID NO: 39221 - protein, 9 aa, Homo sapiens
  misc_feature: Table A; Target 39221; HLA-A*30:02; MAGEA3,MAGEA6; ENSG00000221867,ENSG00000197172; CTA,CTA
FATCLGLSY

SEQ ID NO: 39222 - protein, 9 aa, Homo sapiens
  misc_feature: Table A; Target 39222; HLA-B*15:03; MAGEA3,MAGEA6; ENSG00000221867,ENSG00000197172; CTA,CTA
FATCLGLSY

SEQ ID NO: 39223 - protein, 9 aa, Homo sapiens
  misc_feature: Table A; Target 39223; HLA-B*35:01; MAGEA3,MAGEA6; ENSG00000221867,ENSG00000197172; CTA,CTA
FATCLGLSY

SEQ ID NO: 39224 - protein, 9 aa, Homo sapiens
  misc_feature: Table A; Target 39224; HLA-B*46:01; MAGEA3,MAGEA6; ENSG00000221867,ENSG00000197172; CTA,CTA
FATCLGLSY

SEQ ID NO: 39225 - protein, 9 aa, Homo sapiens
  misc_feature: Table A; Target 39225; HLA-C*02:02; MAGEA3,MAGEA6; ENSG00000221867,ENSG00000197172; CTA,CTA
FATCLGLSY

SEQ ID NO: 39226 - protein, 9 aa, Homo sapiens
  misc_feature: Table A; Target 39226; HLA-C*16:01; MAGEA3,MAGEA6; ENSG00000221867,ENSG00000197172; CTA,CTA
FATCLGLSY

SEQ ID NO: 39227 - protein, 9 aa, Homo sapiens
  misc_feature: Table A; Target 39227; HLA-A*02:07; MAGEA3,MAGEA6; ENSG00000221867,ENSG00000197172; CTA,CTA
FFPVIFSKA

SEQ ID NO: 39228 - protein, 9 aa, Homo sapiens
  misc_feature: Table A; Target 39228; HLA-A*29:02; MAGEA3,MAGEA6; ENSG00000221867,ENSG00000197172; CTA,CTA
FFPVIFSKA

SEQ ID NO: 39229 - protein, 8 aa, Homo sapiens
  misc_feature: Table A; Target 39229; HLA-B*51:01; MAGEA3,MAGEA6; ENSG00000221867,ENSG00000197172; CTA,CTA
FGIELMEV

SEQ ID NO: 39230 - protein, 8 aa, Homo sapiens
  misc_feature: Table A; Target 39230; HLA-B*54:01; MAGEA3,MAGEA6; ENSG00000221867,ENSG00000197172; CTA,CTA
FGIELMEV

SEQ ID NO: 39231 - protein, 8 aa, Homo sapiens
  misc_feature: Table A; Target 39231; HLA-B*35:01; MAGEA3,MAGEA6; ENSG00000221867,ENSG00000197172; CTA,CTA
FPDLESEF

SEQ ID NO: 39232 - protein, 8 aa, Homo sapiens
  misc_feature: Table A; Target 39232; HLA-B*35:03; MAGEA3,MAGEA6; ENSG00000221867,ENSG00000197172; CTA,CTA
FPDLESEF

SEQ ID NO: 39233 - protein, 8 aa, Homo sapiens
  misc_feature: Table A; Target 39233; HLA-C*03:03; MAGEA3,MAGEA6; ENSG00000221867,ENSG00000197172; CTA,CTA
FPDLESEF

SEQ ID NO: 39234 - protein, 8 aa, Homo sapiens
  misc_feature: Table A; Target 39234; HLA-C*04:01; MAGEA3,MAGEA6; ENSG00000221867,ENSG00000197172; CTA,CTA
FPDLESEF

SEQ ID NO: 39235 - protein, 8 aa, Homo sapiens
  misc_feature: Table A; Target 39235; HLA-C*05:01; MAGEA3,MAGEA6; ENSG00000221867,ENSG00000197172; CTA,CTA
FPDLESEF

SEQ ID NO: 39236 - protein, 10 aa, Homo sapiens
  misc_feature: Table A; Target 39236; HLA-B*35:03; MAGEA3,MAGEA6; ENSG00000221867,ENSG00000197172; CTA,CTA
FPDLESEFQA

SEQ ID NO: 39237 - protein, 10 aa, Homo sapiens
  misc_feature: Table A; Target 39237; HLA-B*54:01; MAGEA3,MAGEA6; ENSG00000221867,ENSG00000197172; CTA,CTA
FPDLESEFQA

SEQ ID NO: 39238 - protein, 10 aa, Homo sapiens
  misc_feature: Table A; Target 39238; HLA-B*55:01; MAGEA3,MAGEA6; ENSG00000221867,ENSG00000197172; CTA,CTA
FPDLESEFQA

SEQ ID NO: 39239 - protein, 11 aa, Homo sapiens
  misc_feature: Table A; Target 39239; HLA-B*35:03; MAGEA3,MAGEA6; ENSG00000221867,ENSG00000197172; CTA,CTA
FPDLESEFQAA

SEQ ID NO: 39240 - protein, 11 aa, Homo sapiens
  misc_feature: Table A; Target 39240; HLA-B*54:01; MAGEA3,MAGEA6; ENSG00000221867,ENSG00000197172; CTA,CTA
FPDLESEFQAA

SEQ ID NO: 39241 - protein, 11 aa, Homo sapiens
  misc_feature: Table A; Target 39241; HLA-B*55:01; MAGEA3,MAGEA6; ENSG00000221867,ENSG00000197172; CTA,CTA
FPDLESEFQAA

SEQ ID NO: 39242 - protein, 8 aa, Homo sapiens
  misc_feature: Table A; Target 39242; HLA-B*51:01; MAGEA3,MAGEA6; ENSG00000221867,ENSG00000197172; CTA,CTA
FPVIFSKA

SEQ ID NO: 39243 - protein, 8 aa, Homo sapiens
  misc_feature: Table A; Target 39243; HLA-B*54:01; MAGEA3,MAGEA6; ENSG00000221867,ENSG00000197172; CTA,CTA
FPVIFSKA

SEQ ID NO: 39244 - protein, 8 aa, Homo sapiens
  misc_feature: Table A; Target 39244; HLA-B*55:01; MAGEA3,MAGEA6; ENSG00000221867,ENSG00000197172; CTA,CTA
FPVIFSKA

SEQ ID NO: 39245 - protein, 8 aa, Homo sapiens
  misc_feature: Table A; Target 39245; HLA-B*56:01; MAGEA3,MAGEA6; ENSG00000221867,ENSG00000197172; CTA,CTA
FPVIFSKA

SEQ ID NO: 39246 - protein, 9 aa, Homo sapiens
  misc_feature: Table A; Target 39246; HLA-B*54:01; MAGEA3,MAGEA6; ENSG00000221867,ENSG00000197172; CTA,CTA
FPVIFSKAS

SEQ ID NO: 39247 - protein, 9 aa, Homo sapiens
  misc_feature: Table A; Target 39247; HLA-A*02:03; MAGEA3,MAGEA6; ENSG00000221867,ENSG00000197172; CTA,CTA
FQAALSRKV

SEQ ID NO: 39248 - protein, 9 aa, Homo sapiens
  misc_feature: Table A; Target 39248; HLA-B*13:02; MAGEA3,MAGEA6; ENSG00000221867,ENSG00000197172; CTA,CTA
FQAALSRKV

SEQ ID NO: 39249 - protein, 9 aa, Homo sapiens
  misc_feature: Table A; Target 39249; HLA-C*02:02; MAGEA3,MAGEA6; ENSG00000221867,ENSG00000197172; CTA,CTA
FQAALSRKV

SEQ ID NO: 39250 - protein, 9 aa, Homo sapiens
  misc_feature: Table A; Target 39250; HLA-C*06:02; MAGEA3,MAGEA6; ENSG00000221867,ENSG00000197172; CTA,CTA
FQAALSRKV

SEQ ID NO: 39251 - protein, 9 aa, Homo sapiens
  misc_feature: Table A; Target 39251; HLA-A*01:01; MAGEA3,MAGEA6; ENSG00000221867,ENSG00000197172; CTA,CTA
FVQENYLEY

SEQ ID NO: 39252 - protein, 9 aa, Homo sapiens
  misc_feature: Table A; Target 39252; HLA-A*03:01; MAGEA3,MAGEA6; ENSG00000221867,ENSG00000197172; CTA,CTA
FVQENYLEY

SEQ ID NO: 39253 - protein, 9 aa, Homo sapiens
  misc_feature: Table A; Target 39253; HLA-A*03:02; MAGEA3,MAGEA6; ENSG00000221867,ENSG00000197172; CTA,CTA
FVQENYLEY

SEQ ID NO: 39254 - protein, 9 aa, Homo sapiens
  misc_feature: Table A; Target 39254; HLA-A*11:01; MAGEA3,MAGEA6; ENSG00000221867,ENSG00000197172; CTA,CTA
FVQENYLEY

SEQ ID NO: 39255 - protein, 9 aa, Homo sapiens
  misc_feature: Table A; Target 39255; HLA-A*25:01; MAGEA3,MAGEA6; ENSG00000221867,ENSG00000197172; CTA,CTA
FVQENYLEY

SEQ ID NO: 39256 - protein, 9 aa, Homo sapiens
  misc_feature: Table A; Target 39256; HLA-A*30:02; MAGEA3,MAGEA6; ENSG00000221867,ENSG00000197172; CTA,CTA
FVQENYLEY

SEQ ID NO: 39257 - protein, 9 aa, Homo sapiens
  misc_feature: Table A; Target 39257; HLA-A*32:01; MAGEA3,MAGEA6; ENSG00000221867,ENSG00000197172; CTA,CTA
FVQENYLEY

SEQ ID NO: 39258 - protein, 9 aa, Homo sapiens
  misc_feature: Table A; Target 39258; HLA-A*33:01; MAGEA3,MAGEA6; ENSG00000221867,ENSG00000197172; CTA,CTA
FVQENYLEY

SEQ ID NO: 39259 - protein, 9 aa, Homo sapiens
  misc_feature: Table A; Target 39259; HLA-A*33:03; MAGEA3,MAGEA6; ENSG00000221867,ENSG00000197172; CTA,CTA
FVQENYLEY

SEQ ID NO: 39260 - protein, 9 aa, Homo sapiens
  misc_feature: Table A; Target 39260; HLA-A*68:01; MAGEA3,MAGEA6; ENSG00000221867,ENSG00000197172; CTA,CTA
FVQENYLEY

SEQ ID NO: 39261 - protein, 9 aa, Homo sapiens
  misc_feature: Table A; Target 39261; HLA-B*15:01; MAGEA3,MAGEA6; ENSG00000221867,ENSG00000197172; CTA,CTA
FVQENYLEY

SEQ ID NO: 39262 - protein, 9 aa, Homo sapiens
  misc_feature: Table A; Target 39262; HLA-B*15:03; MAGEA3,MAGEA6; ENSG00000221867,ENSG00000197172; CTA,CTA
FVQENYLEY

SEQ ID NO: 39263 - protein, 9 aa, Homo sapiens
  misc_feature: Table A; Target 39263; HLA-B*18:01; MAGEA3,MAGEA6; ENSG00000221867,ENSG00000197172; CTA,CTA
FVQENYLEY

SEQ ID NO: 39264 - protein, 9 aa, Homo sapiens
  misc_feature: Table A; Target 39264; HLA-B*27:02; MAGEA3,MAGEA6; ENSG00000221867,ENSG00000197172; CTA,CTA
FVQENYLEY

SEQ ID NO: 39265 - protein, 9 aa, Homo sapiens
  misc_feature: Table A; Target 39265; HLA-B*39:01; MAGEA3,MAGEA6; ENSG00000221867,ENSG00000197172; CTA,CTA
FVQENYLEY

SEQ ID NO: 39266 - protein, 9 aa, Homo sapiens
  misc_feature: Table A; Target 39266; HLA-B*46:01; MAGEA3,MAGEA6; ENSG00000221867,ENSG00000197172; CTA,CTA
FVQENYLEY

SEQ ID NO: 39267 - protein, 9 aa, Homo sapiens
  misc_feature: Table A; Target 39267; HLA-B*55:01; MAGEA3,MAGEA6; ENSG00000221867,ENSG00000197172; CTA,CTA
FVQENYLEY

SEQ ID NO: 39268 - protein, 9 aa, Homo sapiens
  misc_feature: Table A; Target 39268; HLA-B*58:01; MAGEA3,MAGEA6; ENSG00000221867,ENSG00000197172; CTA,CTA
FVQENYLEY

SEQ ID NO: 39269 - protein, 9 aa, Homo sapiens
  misc_feature: Table A; Target 39269; HLA-C*01:02; MAGEA3,MAGEA6; ENSG00000221867,ENSG00000197172; CTA,CTA
FVQENYLEY

SEQ ID NO: 39270 - protein, 9 aa, Homo sapiens
  misc_feature: Table A; Target 39270; HLA-C*02:02; MAGEA3,MAGEA6; ENSG00000221867,ENSG00000197172; CTA,CTA
FVQENYLEY

SEQ ID NO: 39271 - protein, 9 aa, Homo sapiens
  misc_feature: Table A; Target 39271; HLA-C*03:03; MAGEA3,MAGEA6; ENSG00000221867,ENSG00000197172; CTA,CTA
FVQENYLEY

SEQ ID NO: 39272 - protein, 9 aa, Homo sapiens
  misc_feature: Table A; Target 39272; HLA-C*03:04; MAGEA3,MAGEA6; ENSG00000221867,ENSG00000197172; CTA,CTA
FVQENYLEY

SEQ ID NO: 39273 - protein, 9 aa, Homo sapiens
  misc_feature: Table A; Target 39273; HLA-C*05:01; MAGEA3,MAGEA6; ENSG00000221867,ENSG00000197172; CTA,CTA
FVQENYLEY

SEQ ID NO: 39274 - protein, 9 aa, Homo sapiens
  misc_feature: Table A; Target 39274; HLA-C*07:01; MAGEA3,MAGEA6; ENSG00000221867,ENSG00000197172; CTA,CTA
FVQENYLEY

SEQ ID NO: 39275 - protein, 9 aa, Homo sapiens
  misc_feature: Table A; Target 39275; HLA-C*07:04; MAGEA3,MAGEA6; ENSG00000221867,ENSG00000197172; CTA,CTA
FVQENYLEY

SEQ ID NO: 39276 - protein, 9 aa, Homo sapiens
  misc_feature: Table A; Target 39276; HLA-C*07:06; MAGEA3,MAGEA6; ENSG00000221867,ENSG00000197172; CTA,CTA
FVQENYLEY

SEQ ID NO: 39277 - protein, 9 aa, Homo sapiens
  misc_feature: Table A; Target 39277; HLA-C*12:03; MAGEA3,MAGEA6; ENSG00000221867,ENSG00000197172; CTA,CTA
FVQENYLEY

SEQ ID NO: 39278 - protein, 9 aa, Homo sapiens
  misc_feature: Table A; Target 39278; HLA-C*14:02; MAGEA3,MAGEA6; ENSG00000221867,ENSG00000197172; CTA,CTA
FVQENYLEY

SEQ ID NO: 39279 - protein, 9 aa, Homo sapiens
  misc_feature: Table A; Target 39279; HLA-C*16:01; MAGEA3,MAGEA6; ENSG00000221867,ENSG00000197172; CTA,CTA
FVQENYLEY

SEQ ID NO: 39280 - protein, 9 aa, Homo sapiens
  misc_feature: Table A; Target 39280; HLA-C*16:02; MAGEA3,MAGEA6; ENSG00000221867,ENSG00000197172; CTA,CTA
FVQENYLEY

SEQ ID NO: 39281 - protein, 9 aa, Homo sapiens
  misc_feature: Table A; Target 39281; HLA-C*16:04; MAGEA3,MAGEA6; ENSG00000221867,ENSG00000197172; CTA,CTA
FVQENYLEY

SEQ ID NO: 39282 - protein, 10 aa, Homo sapiens
  misc_feature: Table A; Target 39282; HLA-A*31:01; MAGEA3,MAGEA6; ENSG00000221867,ENSG00000197172; CTA,CTA
FVQENYLEYR

SEQ ID NO: 39283 - protein, 10 aa, Homo sapiens
  misc_feature: Table A; Target 39283; HLA-A*33:01; MAGEA3,MAGEA6; ENSG00000221867,ENSG00000197172; CTA,CTA
FVQENYLEYR

SEQ ID NO: 39284 - protein, 10 aa, Homo sapiens
  misc_feature: Table A; Target 39284; HLA-A*33:03; MAGEA3,MAGEA6; ENSG00000221867,ENSG00000197172; CTA,CTA
FVQENYLEYR

SEQ ID NO: 39285 - protein, 10 aa, Homo sapiens
  misc_feature: Table A; Target 39285; HLA-A*68:01; MAGEA3,MAGEA6; ENSG00000221867,ENSG00000197172; CTA,CTA
FVQENYLEYR

SEQ ID NO: 39286 - protein, 10 aa, Homo sapiens
  misc_feature: Table A; Target 39286; HLA-A*68:02; MAGEA3,MAGEA6; ENSG00000221867,ENSG00000197172; CTA,CTA
FVQENYLEYR

SEQ ID NO: 39287 - protein, 10 aa, Homo sapiens
  misc_feature: Table A; Target 39287; HLA-B*27:02; MAGEA3,MAGEA6; ENSG00000221867,ENSG00000197172; CTA,CTA
FVQENYLEYR

SEQ ID NO: 39288 - protein, 9 aa, Homo sapiens
  misc_feature: Table A; Target 39288; HLA-A*30:02; MAGEA3,MAGEA6; ENSG00000221867,ENSG00000197172; CTA,CTA
GASSLPTTM

SEQ ID NO: 39289 - protein, 9 aa, Homo sapiens
  misc_feature: Table A; Target 39289; HLA-A*32:01; MAGEA3,MAGEA6; ENSG00000221867,ENSG00000197172; CTA,CTA
GASSLPTTM

SEQ ID NO: 39290 - protein, 9 aa, Homo sapiens
  misc_feature: Table A; Target 39290; HLA-B*13:02; MAGEA3,MAGEA6; ENSG00000221867,ENSG00000197172; CTA,CTA
GASSLPTTM

SEQ ID NO: 39291 - protein, 9 aa, Homo sapiens
  misc_feature: Table A; Target 39291; HLA-B*15:01; MAGEA3,MAGEA6; ENSG00000221867,ENSG00000197172; CTA,CTA
GASSLPTTM

SEQ ID NO: 39292 - protein, 9 aa, Homo sapiens
  misc_feature: Table A; Target 39292; HLA-B*15:03; MAGEA3,MAGEA6; ENSG00000221867,ENSG00000197172; CTA,CTA
GASSLPTTM

SEQ ID NO: 39293 - protein, 9 aa, Homo sapiens
  misc_feature: Table A; Target 39293; HLA-B*35:01; MAGEA3,MAGEA6; ENSG00000221867,ENSG00000197172; CTA,CTA
GASSLPTTM

SEQ ID NO: 39294 - protein, 9 aa, Homo sapiens
  misc_feature: Table A; Target 39294; HLA-B*35:03; MAGEA3,MAGEA6; ENSG00000221867,ENSG00000197172; CTA,CTA
GASSLPTTM

SEQ ID NO: 39295 - protein, 9 aa, Homo sapiens
  misc_feature: Table A; Target 39295; HLA-B*39:01; MAGEA3,MAGEA6; ENSG00000221867,ENSG00000197172; CTA,CTA
GASSLPTTM

SEQ ID NO: 39296 - protein, 9 aa, Homo sapiens
  misc_feature: Table A; Target 39296; HLA-C*02:02; MAGEA3,MAGEA6; ENSG00000221867,ENSG00000197172; CTA,CTA
GASSLPTTM

SEQ ID NO: 39297 - protein, 9 aa, Homo sapiens
  misc_feature: Table A; Target 39297; HLA-C*03:03; MAGEA3,MAGEA6; ENSG00000221867,ENSG00000197172; CTA,CTA
GASSLPTTM

SEQ ID NO: 39298 - protein, 9 aa, Homo sapiens
  misc_feature: Table A; Target 39298; HLA-C*03:04; MAGEA3,MAGEA6; ENSG00000221867,ENSG00000197172; CTA,CTA
GASSLPTTM

SEQ ID NO: 39299 - protein, 9 aa, Homo sapiens
  misc_feature: Table A; Target 39299; HLA-C*05:01; MAGEA3,MAGEA6; ENSG00000221867,ENSG00000197172; CTA,CTA
GASSLPTTM

SEQ ID NO: 39300 - protein, 9 aa, Homo sapiens
  misc_feature: Table A; Target 39300; HLA-C*07:04; MAGEA3,MAGEA6; ENSG00000221867,ENSG00000197172; CTA,CTA
GASSLPTTM

SEQ ID NO: 39301 - protein, 9 aa, Homo sapiens
  misc_feature: Table A; Target 39301; HLA-C*12:03; MAGEA3,MAGEA6; ENSG00000221867,ENSG00000197172; CTA,CTA
GASSLPTTM

SEQ ID NO: 39302 - protein, 9 aa, Homo sapiens
  misc_feature: Table A; Target 39302; HLA-C*16:01; MAGEA3,MAGEA6; ENSG00000221867,ENSG00000197172; CTA,CTA
GASSLPTTM

SEQ ID NO: 39303 - protein, 9 aa, Homo sapiens
  misc_feature: Table A; Target 39303; HLA-C*16:02; MAGEA3,MAGEA6; ENSG00000221867,ENSG00000197172; CTA,CTA
GASSLPTTM

SEQ ID NO: 39304 - protein, 9 aa, Homo sapiens
  misc_feature: Table A; Target 39304; HLA-C*16:04; MAGEA3,MAGEA6; ENSG00000221867,ENSG00000197172; CTA,CTA
GASSLPTTM

SEQ ID NO: 39305 - protein, 11 aa, Homo sapiens
  misc_feature: Table A; Target 39305; HLA-A*26:01; MAGEA3,MAGEA6; ENSG00000221867,ENSG00000197172; CTA,CTA
GASSLPTTMNY

SEQ ID NO: 39306 - protein, 11 aa, Homo sapiens
  misc_feature: Table A; Target 39306; HLA-A*29:02; MAGEA3,MAGEA6; ENSG00000221867,ENSG00000197172; CTA,CTA
GASSLPTTMNY

SEQ ID NO: 39307 - protein, 11 aa, Homo sapiens
  misc_feature: Table A; Target 39307; HLA-A*30:02; MAGEA3,MAGEA6; ENSG00000221867,ENSG00000197172; CTA,CTA
GASSLPTTMNY

SEQ ID NO: 39308 - protein, 11 aa, Homo sapiens
  misc_feature: Table A; Target 39308; HLA-C*02:02; MAGEA3,MAGEA6; ENSG00000221867,ENSG00000197172; CTA,CTA
GASSLPTTMNY

SEQ ID NO: 39309 - protein, 11 aa, Homo sapiens
  misc_feature: Table A; Target 39309; HLA-C*16:04; MAGEA3,MAGEA6; ENSG00000221867,ENSG00000197172; CTA,CTA
GASSLPTTMNY

SEQ ID NO: 39310 - protein, 9 aa, Homo sapiens
  misc_feature: Table A; Target 39310; HLA-A*30:01; MAGEA3,MAGEA6; ENSG00000221867,ENSG00000197172; CTA,CTA
GEALGLVGA

SEQ ID NO: 39311 - protein, 9 aa, Homo sapiens
  misc_feature: Table A; Target 39311; HLA-B*13:02; MAGEA3,MAGEA6; ENSG00000221867,ENSG00000197172; CTA,CTA
GEALGLVGA

SEQ ID NO: 39312 - protein, 9 aa, Homo sapiens
  misc_feature: Table A; Target 39312; HLA-B*37:01; MAGEA3,MAGEA6; ENSG00000221867,ENSG00000197172; CTA,CTA
GEALGLVGA

SEQ ID NO: 39313 - protein, 9 aa, Homo sapiens
  misc_feature: Table A; Target 39313; HLA-B*40:01; MAGEA3,MAGEA6; ENSG00000221867,ENSG00000197172; CTA,CTA
GEALGLVGA

SEQ ID NO: 39314 - protein, 9 aa, Homo sapiens
  misc_feature: Table A; Target 39314; HLA-B*40:02; MAGEA3,MAGEA6; ENSG00000221867,ENSG00000197172; CTA,CTA
GEALGLVGA

SEQ ID NO: 39315 - protein, 9 aa, Homo sapiens
  misc_feature: Table A; Target 39315; HLA-B*49:01; MAGEA3,MAGEA6; ENSG00000221867,ENSG00000197172; CTA,CTA
GEALGLVGA

SEQ ID NO: 39316 - protein, 9 aa, Homo sapiens
  misc_feature: Table A; Target 39316; HLA-B*56:01; MAGEA3,MAGEA6; ENSG00000221867,ENSG00000197172; CTA,CTA
GEALGLVGA

SEQ ID NO: 39317 - protein, 11 aa, Homo sapiens
  misc_feature: Table A; Target 39317; HLA-A*30:01; MAGEA3,MAGEA6; ENSG00000221867,ENSG00000197172; CTA,CTA
GEALGLVGAQA

SEQ ID NO: 39318 - protein, 11 aa, Homo sapiens
  misc_feature: Table A; Target 39318; HLA-B*27:05; MAGEA3,MAGEA6; ENSG00000221867,ENSG00000197172; CTA,CTA
GEALGLVGAQA

SEQ ID NO: 39319 - protein, 11 aa, Homo sapiens
  misc_feature: Table A; Target 39319; HLA-B*40:01; MAGEA3,MAGEA6; ENSG00000221867,ENSG00000197172; CTA,CTA
GEALGLVGAQA

SEQ ID NO: 39320 - protein, 11 aa, Homo sapiens
  misc_feature: Table A; Target 39320; HLA-B*40:02; MAGEA3,MAGEA6; ENSG00000221867,ENSG00000197172; CTA,CTA
GEALGLVGAQA

SEQ ID NO: 39321 - protein, 11 aa, Homo sapiens
  misc_feature: Table A; Target 39321; HLA-B*49:01; MAGEA3,MAGEA6; ENSG00000221867,ENSG00000197172; CTA,CTA
GEALGLVGAQA

SEQ ID NO: 39322 - protein, 9 aa, Homo sapiens
  misc_feature: Table A; Target 39322; HLA-A*30:01; MAGEA3,MAGEA6; ENSG00000221867,ENSG00000197172; CTA,CTA
GEVPAAESP

SEQ ID NO: 39323 - protein, 9 aa, Homo sapiens
  misc_feature: Table A; Target 39323; HLA-B*40:01; MAGEA3,MAGEA6; ENSG00000221867,ENSG00000197172; CTA,CTA
GEVPAAESP

SEQ ID NO: 39324 - protein, 9 aa, Homo sapiens
  misc_feature: Table A; Target 39324; HLA-B*40:02; MAGEA3,MAGEA6; ENSG00000221867,ENSG00000197172; CTA,CTA
GEVPAAESP

SEQ ID NO: 39325 - protein, 9 aa, Homo sapiens
  misc_feature: Table A; Target 39325; HLA-B*49:01; MAGEA3,MAGEA6; ENSG00000221867,ENSG00000197172; CTA,CTA
GEVPAAESP

SEQ ID NO: 39326 - protein, 9 aa, Homo sapiens
  misc_feature: Table A; Target 39326; HLA-C*01:02; MAGEA3,MAGEA6; ENSG00000221867,ENSG00000197172; CTA,CTA
GLEARGEAL

SEQ ID NO: 39327 - protein, 9 aa, Homo sapiens
  misc_feature: Table A; Target 39327; HLA-B*15:01; MAGEA3,MAGEA6; ENSG00000221867,ENSG00000197172; CTA,CTA
GLLGDNQIM

SEQ ID NO: 39328 - protein, 8 aa, Homo sapiens
  misc_feature: Table A; Target 39328; HLA-B*07:02; MAGEA3,MAGEA6; ENSG00000221867,ENSG00000197172; CTA,CTA
GPSTFPDL

SEQ ID NO: 39329 - protein, 9 aa, Homo sapiens
  misc_feature: Table A; Target 39329; HLA-A*01:01; MAGEA3,MAGEA6; ENSG00000221867,ENSG00000197172; CTA,CTA
GSDPACYEF

SEQ ID NO: 39330 - protein, 9 aa, Homo sapiens
  misc_feature: Table A; Target 39330; HLA-B*27:05; MAGEA3,MAGEA6; ENSG00000221867,ENSG00000197172; CTA,CTA
GSDPACYEF

SEQ ID NO: 39331 - protein, 9 aa, Homo sapiens
  misc_feature: Table A; Target 39331; HLA-B*38:01; MAGEA3,MAGEA6; ENSG00000221867,ENSG00000197172; CTA,CTA
GSDPACYEF

SEQ ID NO: 39332 - protein, 9 aa, Homo sapiens
  misc_feature: Table A; Target 39332; HLA-B*57:01; MAGEA3,MAGEA6; ENSG00000221867,ENSG00000197172; CTA,CTA
GSDPACYEF

SEQ ID NO: 39333 - protein, 9 aa, Homo sapiens
  misc_feature: Table A; Target 39333; HLA-B*58:01; MAGEA3,MAGEA6; ENSG00000221867,ENSG00000197172; CTA,CTA
GSDPACYEF

SEQ ID NO: 39334 - protein, 9 aa, Homo sapiens
  misc_feature: Table A; Target 39334; HLA-C*05:01; MAGEA3,MAGEA6; ENSG00000221867,ENSG00000197172; CTA,CTA
GSDPACYEF

SEQ ID NO: 39335 - protein, 9 aa, Homo sapiens
  misc_feature: Table A; Target 39335; HLA-A*01:01; MAGEA3,MAGEA6; ENSG00000221867,ENSG00000197172; CTA,CTA
GSVVGNWQY

SEQ ID NO: 39336 - protein, 9 aa, Homo sapiens
  misc_feature: Table A; Target 39336; HLA-A*29:02; MAGEA3,MAGEA6; ENSG00000221867,ENSG00000197172; CTA,CTA
GSVVGNWQY

SEQ ID NO: 39337 - protein, 9 aa, Homo sapiens
  misc_feature: Table A; Target 39337; HLA-A*30:02; MAGEA3,MAGEA6; ENSG00000221867,ENSG00000197172; CTA,CTA
GSVVGNWQY

SEQ ID NO: 39338 - protein, 9 aa, Homo sapiens
  misc_feature: Table A; Target 39338; HLA-B*15:01; MAGEA3,MAGEA6; ENSG00000221867,ENSG00000197172; CTA,CTA
GSVVGNWQY

SEQ ID NO: 39339 - protein, 9 aa, Homo sapiens
  misc_feature: Table A; Target 39339; HLA-B*15:03; MAGEA3,MAGEA6; ENSG00000221867,ENSG00000197172; CTA,CTA
GSVVGNWQY

SEQ ID NO: 39340 - protein, 9 aa, Homo sapiens
  misc_feature: Table A; Target 39340; HLA-B*57:01; MAGEA3,MAGEA6; ENSG00000221867,ENSG00000197172; CTA,CTA
GSVVGNWQY

SEQ ID NO: 39341 - protein, 9 aa, Homo sapiens
  misc_feature: Table A; Target 39341; HLA-B*58:01; MAGEA3,MAGEA6; ENSG00000221867,ENSG00000197172; CTA,CTA
GSVVGNWQY

SEQ ID NO: 39342 - protein, 9 aa, Homo sapiens
  misc_feature: Table A; Target 39342; HLA-C*16:04; MAGEA3,MAGEA6; ENSG00000221867,ENSG00000197172; CTA,CTA
GSVVGNWQY

SEQ ID NO: 39343 - protein, 11 aa, Homo sapiens
  misc_feature: Table A; Target 39343; HLA-A*31:01; MAGEA3,MAGEA6; ENSG00000221867,ENSG00000197172; CTA,CTA
HCKPEEGLEAR

SEQ ID NO: 39344 - protein, 11 aa, Homo sapiens
  misc_feature: Table A; Target 39344; HLA-A*33:01; MAGEA3,MAGEA6; ENSG00000221867,ENSG00000197172; CTA,CTA
HCKPEEGLEAR

SEQ ID NO: 39345 - protein, 11 aa, Homo sapiens
  misc_feature: Table A; Target 39345; HLA-A*33:03; MAGEA3,MAGEA6; ENSG00000221867,ENSG00000197172; CTA,CTA
HCKPEEGLEAR

SEQ ID NO: 39346 - protein, 9 aa, Homo sapiens
  misc_feature: Table A; Target 39346; HLA-B*40:01; MAGEA3,MAGEA6; ENSG00000221867,ENSG00000197172; CTA,CTA
IELMEVDPI

SEQ ID NO: 39347 - protein, 9 aa, Homo sapiens
  misc_feature: Table A; Target 39347; HLA-B*40:02; MAGEA3,MAGEA6; ENSG00000221867,ENSG00000197172; CTA,CTA
IELMEVDPI

SEQ ID NO: 39348 - protein, 9 aa, Homo sapiens
  misc_feature: Table A; Target 39348; HLA-B*49:01; MAGEA3,MAGEA6; ENSG00000221867,ENSG00000197172; CTA,CTA
IELMEVDPI

SEQ ID NO: 39349 - protein, 10 aa, Homo sapiens
  misc_feature: Table A; Target 39349; HLA-A*29:02; MAGEA3,MAGEA6; ENSG00000221867,ENSG00000197172; CTA,CTA
IFATCLGLSY

SEQ ID NO: 39350 - protein, 9 aa, Homo sapiens
  misc_feature: Table A; Target 39350; HLA-C*05:01; MAGEA3,MAGEA6; ENSG00000221867,ENSG00000197172; CTA,CTA
KAEMLGSVV

SEQ ID NO: 39351 - protein, 9 aa, Homo sapiens
  misc_feature: Table A; Target 39351; HLA-A*02:04; MAGEA3,MAGEA6; ENSG00000221867,ENSG00000197172; CTA,CTA
KIWEELSVL

SEQ ID NO: 39352 - protein, 9 aa, Homo sapiens
  misc_feature: Table A; Target 39352; HLA-A*02:07; MAGEA3,MAGEA6; ENSG00000221867,ENSG00000197172; CTA,CTA
KIWEELSVL

SEQ ID NO: 39353 - protein, 11 aa, Homo sapiens
  misc_feature: Table A; Target 39353; HLA-A*02:01; MAGEA3,MAGEA6; ENSG00000221867,ENSG00000197172; CTA,CTA
KIWEELSVLEV

SEQ ID NO: 39354 - protein, 11 aa, Homo sapiens
  misc_feature: Table A; Target 39354; HLA-A*02:03; MAGEA3,MAGEA6; ENSG00000221867,ENSG00000197172; CTA,CTA
KIWEELSVLEV

SEQ ID NO: 39355 - protein, 11 aa, Homo sapiens
  misc_feature: Table A; Target 39355; HLA-A*02:04; MAGEA3,MAGEA6; ENSG00000221867,ENSG00000197172; CTA,CTA
KIWEELSVLEV

SEQ ID NO: 39356 - protein, 11 aa, Homo sapiens
  misc_feature: Table A; Target 39356; HLA-A*02:07; MAGEA3,MAGEA6; ENSG00000221867,ENSG00000197172; CTA,CTA
KIWEELSVLEV

SEQ ID NO: 39357 - protein, 8 aa, Homo sapiens
  misc_feature: Table A; Target 39357; HLA-A*30:01; MAGEA3,MAGEA6; ENSG00000221867,ENSG00000197172; CTA,CTA
LEARGEAL

SEQ ID NO: 39358 - protein, 8 aa, Homo sapiens
  misc_feature: Table A; Target 39358; HLA-B*18:01; MAGEA3,MAGEA6; ENSG00000221867,ENSG00000197172; CTA,CTA
LEARGEAL

SEQ ID NO: 39359 - protein, 8 aa, Homo sapiens
  misc_feature: Table A; Target 39359; HLA-B*37:01; MAGEA3,MAGEA6; ENSG00000221867,ENSG00000197172; CTA,CTA
LEARGEAL

SEQ ID NO: 39360 - protein, 8 aa, Homo sapiens
  misc_feature: Table A; Target 39360; HLA-B*40:01; MAGEA3,MAGEA6; ENSG00000221867,ENSG00000197172; CTA,CTA
LEARGEAL

SEQ ID NO: 39361 - protein, 8 aa, Homo sapiens
  misc_feature: Table A; Target 39361; HLA-B*40:02; MAGEA3,MAGEA6; ENSG00000221867,ENSG00000197172; CTA,CTA
LEARGEAL

SEQ ID NO: 39362 - protein, 8 aa, Homo sapiens
  misc_feature: Table A; Target 39362; HLA-C*03:03; MAGEA3,MAGEA6; ENSG00000221867,ENSG00000197172; CTA,CTA
LEARGEAL

SEQ ID NO: 39363 - protein, 8 aa, Homo sapiens
  misc_feature: Table A; Target 39363; HLA-C*03:04; MAGEA3,MAGEA6; ENSG00000221867,ENSG00000197172; CTA,CTA
LEARGEAL

SEQ ID NO: 39364 - protein, 10 aa, Homo sapiens
  misc_feature: Table A; Target 39364; HLA-A*30:01; MAGEA3,MAGEA6; ENSG00000221867,ENSG00000197172; CTA,CTA
LEARGEALGL

SEQ ID NO: 39365 - protein, 10 aa, Homo sapiens
  misc_feature: Table A; Target 39365; HLA-B*40:01; MAGEA3,MAGEA6; ENSG00000221867,ENSG00000197172; CTA,CTA
LEARGEALGL

SEQ ID NO: 39366 - protein, 10 aa, Homo sapiens
  misc_feature: Table A; Target 39366; HLA-B*40:02; MAGEA3,MAGEA6; ENSG00000221867,ENSG00000197172; CTA,CTA
LEARGEALGL

SEQ ID NO: 39367 - protein, 11 aa, Homo sapiens
  misc_feature: Table A; Target 39367; HLA-B*49:01; MAGEA3,MAGEA6; ENSG00000221867,ENSG00000197172; CTA,CTA
LEARGEALGLV

SEQ ID NO: 39368 - protein, 8 aa, Homo sapiens
  misc_feature: Table A; Target 39368; HLA-B*18:01; MAGEA3,MAGEA6; ENSG00000221867,ENSG00000197172; CTA,CTA
LESEFQAA

SEQ ID NO: 39369 - protein, 8 aa, Homo sapiens
  misc_feature: Table A; Target 39369; HLA-B*49:01; MAGEA3,MAGEA6; ENSG00000221867,ENSG00000197172; CTA,CTA
LESEFQAA

SEQ ID NO: 39370 - protein, 9 aa, Homo sapiens
  misc_feature: Table A; Target 39370; HLA-B*15:03; MAGEA3,MAGEA6; ENSG00000221867,ENSG00000197172; CTA,CTA
LESEFQAAL

SEQ ID NO: 39371 - protein, 9 aa, Homo sapiens
  misc_feature: Table A; Target 39371; HLA-B*18:01; MAGEA3,MAGEA6; ENSG00000221867,ENSG00000197172; CTA,CTA
LESEFQAAL

SEQ ID NO: 39372 - protein, 9 aa, Homo sapiens
  misc_feature: Table A; Target 39372; HLA-B*27:02; MAGEA3,MAGEA6; ENSG00000221867,ENSG00000197172; CTA,CTA
LESEFQAAL

SEQ ID NO: 39373 - protein, 9 aa, Homo sapiens
  misc_feature: Table A; Target 39373; HLA-B*27:05; MAGEA3,MAGEA6; ENSG00000221867,ENSG00000197172; CTA,CTA
LESEFQAAL

SEQ ID NO: 39374 - protein, 9 aa, Homo sapiens
  misc_feature: Table A; Target 39374; HLA-B*37:01; MAGEA3,MAGEA6; ENSG00000221867,ENSG00000197172; CTA,CTA
LESEFQAAL

SEQ ID NO: 39375 - protein, 9 aa, Homo sapiens
  misc_feature: Table A; Target 39375; HLA-B*38:01; MAGEA3,MAGEA6; ENSG00000221867,ENSG00000197172; CTA,CTA
LESEFQAAL

SEQ ID NO: 39376 - protein, 9 aa, Homo sapiens
  misc_feature: Table A; Target 39376; HLA-B*39:01; MAGEA3,MAGEA6; ENSG00000221867,ENSG00000197172; CTA,CTA
LESEFQAAL

SEQ ID NO: 39377 - protein, 9 aa, Homo sapiens
  misc_feature: Table A; Target 39377; HLA-B*40:02; MAGEA3,MAGEA6; ENSG00000221867,ENSG00000197172; CTA,CTA
LESEFQAAL

SEQ ID NO: 39378 - protein, 9 aa, Homo sapiens
  misc_feature: Table A; Target 39378; HLA-B*44:02; MAGEA3,MAGEA6; ENSG00000221867,ENSG00000197172; CTA,CTA
LESEFQAAL

SEQ ID NO: 39379 - protein, 9 aa, Homo sapiens
  misc_feature: Table A; Target 39379; HLA-B*44:03; MAGEA3,MAGEA6; ENSG00000221867,ENSG00000197172; CTA,CTA
LESEFQAAL

SEQ ID NO: 39380 - protein, 9 aa, Homo sapiens
  misc_feature: Table A; Target 39380; HLA-C*02:02; MAGEA3,MAGEA6; ENSG00000221867,ENSG00000197172; CTA,CTA
LESEFQAAL

SEQ ID NO: 39381 - protein, 9 aa, Homo sapiens
  misc_feature: Table A; Target 39381; HLA-C*03:03; MAGEA3,MAGEA6; ENSG00000221867,ENSG00000197172; CTA,CTA
LESEFQAAL

SEQ ID NO: 39382 - protein, 9 aa, Homo sapiens
  misc_feature: Table A; Target 39382; HLA-C*03:04; MAGEA3,MAGEA6; ENSG00000221867,ENSG00000197172; CTA,CTA
LESEFQAAL

SEQ ID NO: 39383 - protein, 9 aa, Homo sapiens
  misc_feature: Table A; Target 39383; HLA-C*07:04; MAGEA3,MAGEA6; ENSG00000221867,ENSG00000197172; CTA,CTA
LESEFQAAL

SEQ ID NO: 39384 - protein, 9 aa, Homo sapiens
  misc_feature: Table A; Target 39384; HLA-C*14:02; MAGEA3,MAGEA6; ENSG00000221867,ENSG00000197172; CTA,CTA
LESEFQAAL

SEQ ID NO: 39385 - protein, 9 aa, Homo sapiens
  misc_feature: Table A; Target 39385; HLA-C*16:04; MAGEA3,MAGEA6; ENSG00000221867,ENSG00000197172; CTA,CTA
LESEFQAAL

SEQ ID NO: 39386 - protein, 10 aa, Homo sapiens
  misc_feature: Table A; Target 39386; HLA-C*01:02; MAGEA3,MAGEA6; ENSG00000221867,ENSG00000197172; CTA,CTA
LGLVGAQAPA

SEQ ID NO: 39387 - protein, 10 aa, Homo sapiens
  misc_feature: Table A; Target 39387; HLA-A*01:01; MAGEA3,MAGEA6; ENSG00000221867,ENSG00000197172; CTA,CTA
LGSVVGNWQY

SEQ ID NO: 39388 - protein, 10 aa, Homo sapiens
  misc_feature: Table A; Target 39388; HLA-C*04:01; MAGEA3,MAGEA6; ENSG00000221867,ENSG00000197172; CTA,CTA
LGSVVGNWQY

SEQ ID NO: 39389 - protein, 9 aa, Homo sapiens
  misc_feature: Table A; Target 39389; HLA-B*35:01; MAGEA3,MAGEA6; ENSG00000221867,ENSG00000197172; CTA,CTA
LPTTMNYPL

SEQ ID NO: 39390 - protein, 9 aa, Homo sapiens
  misc_feature: Table A; Target 39390; HLA-B*35:03; MAGEA3,MAGEA6; ENSG00000221867,ENSG00000197172; CTA,CTA
LPTTMNYPL

SEQ ID NO: 39391 - protein, 10 aa, Homo sapiens
  misc_feature: Table A; Target 39391; HLA-A*24:02; MAGEA3,MAGEA6; ENSG00000221867,ENSG00000197172; CTA,CTA
LPTTMNYPLW

SEQ ID NO: 39392 - protein, 10 aa, Homo sapiens
  misc_feature: Table A; Target 39392; HLA-B*07:02; MAGEA3,MAGEA6; ENSG00000221867,ENSG00000197172; CTA,CTA
LPTTMNYPLW

SEQ ID NO: 39393 - protein, 10 aa, Homo sapiens
  misc_feature: Table A; Target 39393; HLA-B*27:02; MAGEA3,MAGEA6; ENSG00000221867,ENSG00000197172; CTA,CTA
LPTTMNYPLW

SEQ ID NO: 39394 - protein, 10 aa, Homo sapiens
  misc_feature: Table A; Target 39394; HLA-B*57:01; MAGEA3,MAGEA6; ENSG00000221867,ENSG00000197172; CTA,CTA
LPTTMNYPLW

SEQ ID NO: 39395 - protein, 9 aa, Homo sapiens
  misc_feature: Table A; Target 39395; HLA-A*02:01; MAGEA3,MAGEA6; ENSG00000221867,ENSG00000197172; CTA,CTA
LQLVFGIEL

SEQ ID NO: 39396 - protein, 9 aa, Homo sapiens
  misc_feature: Table A; Target 39396; HLA-A*02:04; MAGEA3,MAGEA6; ENSG00000221867,ENSG00000197172; CTA,CTA
LQLVFGIEL

SEQ ID NO: 39397 - protein, 9 aa, Homo sapiens
  misc_feature: Table A; Target 39397; HLA-B*13:02; MAGEA3,MAGEA6; ENSG00000221867,ENSG00000197172; CTA,CTA
LQLVFGIEL

SEQ ID NO: 39398 - protein, 9 aa, Homo sapiens
  misc_feature: Table A; Target 39398; HLA-C*03:04; MAGEA3,MAGEA6; ENSG00000221867,ENSG00000197172; CTA,CTA
LQLVFGIEL

SEQ ID NO: 39399 - protein, 10 aa, Homo sapiens
  misc_feature: Table A; Target 39399; HLA-B*27:02; MAGEA3,MAGEA6; ENSG00000221867,ENSG00000197172; CTA,CTA
LSVLEVFEGR

SEQ ID NO: 39400 - protein, 10 aa, Homo sapiens
  misc_feature: Table A; Target 39400; HLA-B*57:01; MAGEA3,MAGEA6; ENSG00000221867,ENSG00000197172; CTA,CTA
LSVLEVFEGR

SEQ ID NO: 39401 - protein, 9 aa, Homo sapiens
  misc_feature: Table A; Target 39401; HLA-C*05:01; MAGEA3,MAGEA6; ENSG00000221867,ENSG00000197172; CTA,CTA
LVEVTLGEV

SEQ ID NO: 39402 - protein, 10 aa, Homo sapiens
  misc_feature: Table A; Target 39402; HLA-A*02:01; MAGEA3,MAGEA6; ENSG00000221867,ENSG00000197172; CTA,CTA
LVFGIELMEV

SEQ ID NO: 39403 - protein, 10 aa, Homo sapiens
  misc_feature: Table A; Target 39403; HLA-A*02:03; MAGEA3,MAGEA6; ENSG00000221867,ENSG00000197172; CTA,CTA
LVFGIELMEV

SEQ ID NO: 39404 - protein, 10 aa, Homo sapiens
  misc_feature: Table A; Target 39404; HLA-A*02:04; MAGEA3,MAGEA6; ENSG00000221867,ENSG00000197172; CTA,CTA
LVFGIELMEV

SEQ ID NO: 39405 - protein, 10 aa, Homo sapiens
  misc_feature: Table A; Target 39405; HLA-A*02:07; MAGEA3,MAGEA6; ENSG00000221867,ENSG00000197172; CTA,CTA
LVFGIELMEV

SEQ ID NO: 39406 - protein, 10 aa, Homo sapiens
  misc_feature: Table A; Target 39406; HLA-A*68:02; MAGEA3,MAGEA6; ENSG00000221867,ENSG00000197172; CTA,CTA
LVFGIELMEV

SEQ ID NO: 39407 - protein, 9 aa, Homo sapiens
  misc_feature: Table A; Target 39407; HLA-A*01:01; MAGEA3,MAGEA6; ENSG00000221867,ENSG00000197172; CTA,CTA
LVHFLLLKY

SEQ ID NO: 39408 - protein, 9 aa, Homo sapiens
  misc_feature: Table A; Target 39408; HLA-B*57:01; MAGEA3,MAGEA6; ENSG00000221867,ENSG00000197172; CTA,CTA
LVHFLLLKY

SEQ ID NO: 39409 - protein, 8 aa, Homo sapiens
  misc_feature: Table A; Target 39409; HLA-B*18:01; MAGEA3,MAGEA6; ENSG00000221867,ENSG00000197172; CTA,CTA
MEVDPIGH

SEQ ID NO: 39410 - protein, 9 aa, Homo sapiens
  misc_feature: Table A; Target 39410; HLA-A*23:01; MAGEA3,MAGEA6; ENSG00000221867,ENSG00000197172; CTA,CTA
MLGSVVGNW

SEQ ID NO: 39411 - protein, 9 aa, Homo sapiens
  misc_feature: Table A; Target 39411; HLA-A*24:02; MAGEA3,MAGEA6; ENSG00000221867,ENSG00000197172; CTA,CTA
MLGSVVGNW

SEQ ID NO: 39412 - protein, 9 aa, Homo sapiens
  misc_feature: Table A; Target 39412; HLA-A*25:01; MAGEA3,MAGEA6; ENSG00000221867,ENSG00000197172; CTA,CTA
MLGSVVGNW

SEQ ID NO: 39413 - protein, 9 aa, Homo sapiens
  misc_feature: Table A; Target 39413; HLA-A*32:01; MAGEA3,MAGEA6; ENSG00000221867,ENSG00000197172; CTA,CTA
MLGSVVGNW

SEQ ID NO: 39414 - protein, 9 aa, Homo sapiens
  misc_feature: Table A; Target 39414; HLA-A*33:03; MAGEA3,MAGEA6; ENSG00000221867,ENSG00000197172; CTA,CTA
MLGSVVGNW

SEQ ID NO: 39415 - protein, 9 aa, Homo sapiens
  misc_feature: Table A; Target 39415; HLA-B*44:02; MAGEA3,MAGEA6; ENSG00000221867,ENSG00000197172; CTA,CTA
MLGSVVGNW

SEQ ID NO: 39416 - protein, 9 aa, Homo sapiens
  misc_feature: Table A; Target 39416; HLA-B*44:03; MAGEA3,MAGEA6; ENSG00000221867,ENSG00000197172; CTA,CTA
MLGSVVGNW

SEQ ID NO: 39417 - protein, 9 aa, Homo sapiens
  misc_feature: Table A; Target 39417; HLA-B*57:01; MAGEA3,MAGEA6; ENSG00000221867,ENSG00000197172; CTA,CTA
MLGSVVGNW

SEQ ID NO: 39418 - protein, 9 aa, Homo sapiens
  misc_feature: Table A; Target 39418; HLA-B*58:01; MAGEA3,MAGEA6; ENSG00000221867,ENSG00000197172; CTA,CTA
MLGSVVGNW

SEQ ID NO: 39419 - protein, 9 aa, Homo sapiens
  misc_feature: Table A; Target 39419; HLA-C*07:04; MAGEA3,MAGEA6; ENSG00000221867,ENSG00000197172; CTA,CTA
MLGSVVGNW

SEQ ID NO: 39420 - protein, 11 aa, Homo sapiens
  misc_feature: Table A; Target 39420; HLA-A*01:01; MAGEA3,MAGEA6; ENSG00000221867,ENSG00000197172; CTA,CTA
MLGSVVGNWQY

SEQ ID NO: 39421 - protein, 11 aa, Homo sapiens
  misc_feature: Table A; Target 39421; HLA-A*29:02; MAGEA3,MAGEA6; ENSG00000221867,ENSG00000197172; CTA,CTA
MLGSVVGNWQY

SEQ ID NO: 39422 - protein, 10 aa, Homo sapiens
  misc_feature: Table A; Target 39422; HLA-A*29:02; MAGEA3,MAGEA6; ENSG00000221867,ENSG00000197172; CTA,CTA
MNYPLWSQSY

SEQ ID NO: 39423 - protein, 10 aa, Homo sapiens
  misc_feature: Table A; Target 39423; HLA-B*38:01; MAGEA3,MAGEA6; ENSG00000221867,ENSG00000197172; CTA,CTA
NQEEEGPSTF

SEQ ID NO: 39424 - protein, 10 aa, Homo sapiens
  misc_feature: Table A; Target 39424; HLA-B*39:01; MAGEA3,MAGEA6; ENSG00000221867,ENSG00000197172; CTA,CTA
NQEEEGPSTF

SEQ ID NO: 39425 - protein, 10 aa, Homo sapiens
  misc_feature: Table A; Target 39425; HLA-C*05:01; MAGEA3,MAGEA6; ENSG00000221867,ENSG00000197172; CTA,CTA
NQEEEGPSTF

SEQ ID NO: 39426 - protein, 9 aa, Homo sapiens
  misc_feature: Table A; Target 39426; HLA-A*23:01; MAGEA3,MAGEA6; ENSG00000221867,ENSG00000197172; CTA,CTA
NYPLWSQSY

SEQ ID NO: 39427 - protein, 9 aa, Homo sapiens
  misc_feature: Table A; Target 39427; HLA-A*24:02; MAGEA3,MAGEA6; ENSG00000221867,ENSG00000197172; CTA,CTA
NYPLWSQSY

SEQ ID NO: 39428 - protein, 9 aa, Homo sapiens
  misc_feature: Table A; Target 39428; HLA-A*29:02; MAGEA3,MAGEA6; ENSG00000221867,ENSG00000197172; CTA,CTA
NYPLWSQSY

SEQ ID NO: 39429 - protein, 9 aa, Homo sapiens
  misc_feature: Table A; Target 39429; HLA-A*30:02; MAGEA3,MAGEA6; ENSG00000221867,ENSG00000197172; CTA,CTA
NYPLWSQSY

SEQ ID NO: 39430 - protein, 9 aa, Homo sapiens
  misc_feature: Table A; Target 39430; HLA-B*15:03; MAGEA3,MAGEA6; ENSG00000221867,ENSG00000197172; CTA,CTA
NYPLWSQSY

SEQ ID NO: 39431 - protein, 9 aa, Homo sapiens
  misc_feature: Table A; Target 39431; HLA-C*01:02; MAGEA3,MAGEA6; ENSG00000221867,ENSG00000197172; CTA,CTA
NYPLWSQSY

SEQ ID NO: 39432 - protein, 9 aa, Homo sapiens
  misc_feature: Table A; Target 39432; HLA-C*14:02; MAGEA3,MAGEA6; ENSG00000221867,ENSG00000197172; CTA,CTA
NYPLWSQSY

SEQ ID NO: 39433 - protein, 8 aa, Homo sapiens
  misc_feature: Table A; Target 39433; HLA-C*04:01; MAGEA3,MAGEA6; ENSG00000221867,ENSG00000197172; CTA,CTA
PVTKAEML

SEQ ID NO: 39434 - protein, 8 aa, Homo sapiens
  misc_feature: Table A; Target 39434; HLA-C*07:02; MAGEA3,MAGEA6; ENSG00000221867,ENSG00000197172; CTA,CTA
PVTKAEML

SEQ ID NO: 39435 - protein, 8 aa, Homo sapiens
  misc_feature: Table A; Target 39435; HLA-B*08:01; MAGEA3,MAGEA6; ENSG00000221867,ENSG00000197172; CTA,CTA
QAALSRKV

SEQ ID NO: 39436 - protein, 8 aa, Homo sapiens
  misc_feature: Table A; Target 39436; HLA-B*51:01; MAGEA3,MAGEA6; ENSG00000221867,ENSG00000197172; CTA,CTA
QAALSRKV

SEQ ID NO: 39437 - protein, 8 aa, Homo sapiens
  misc_feature: Table A; Target 39437; HLA-C*03:04; MAGEA3,MAGEA6; ENSG00000221867,ENSG00000197172; CTA,CTA
QAALSRKV

SEQ ID NO: 39438 - protein, 8 aa, Homo sapiens
  misc_feature: Table A; Target 39438; HLA-C*06:02; MAGEA3,MAGEA6; ENSG00000221867,ENSG00000197172; CTA,CTA
QAALSRKV

SEQ ID NO: 39439 - protein, 8 aa, Homo sapiens
  misc_feature: Table A; Target 39439; HLA-C*16:01; MAGEA3,MAGEA6; ENSG00000221867,ENSG00000197172; CTA,CTA
QAALSRKV

SEQ ID NO: 39440 - protein, 8 aa, Homo sapiens
  misc_feature: Table A; Target 39440; HLA-C*16:02; MAGEA3,MAGEA6; ENSG00000221867,ENSG00000197172; CTA,CTA
QAALSRKV

SEQ ID NO: 39441 - protein, 9 aa, Homo sapiens
  misc_feature: Table A; Target 39441; HLA-B*54:01; MAGEA3,MAGEA6; ENSG00000221867,ENSG00000197172; CTA,CTA
QAALSRKVA

SEQ ID NO: 39442 - protein, 10 aa, Homo sapiens
  misc_feature: Table A; Target 39442; HLA-A*30:01; MAGEA3,MAGEA6; ENSG00000221867,ENSG00000197172; CTA,CTA
QEAASSSSTL

SEQ ID NO: 39443 - protein, 10 aa, Homo sapiens
  misc_feature: Table A; Target 39443; HLA-B*38:01; MAGEA3,MAGEA6; ENSG00000221867,ENSG00000197172; CTA,CTA
QEAASSSSTL

SEQ ID NO: 39444 - protein, 10 aa, Homo sapiens
  misc_feature: Table A; Target 39444; HLA-B*40:02; MAGEA3,MAGEA6; ENSG00000221867,ENSG00000197172; CTA,CTA
QEAASSSSTL

SEQ ID NO: 39445 - protein, 10 aa, Homo sapiens
  misc_feature: Table A; Target 39445; HLA-B*44:03; MAGEA3,MAGEA6; ENSG00000221867,ENSG00000197172; CTA,CTA
QEAASSSSTL

SEQ ID NO: 39446 - protein, 10 aa, Homo sapiens
  misc_feature: Table A; Target 39446; HLA-B*49:01; MAGEA3,MAGEA6; ENSG00000221867,ENSG00000197172; CTA,CTA
QEAASSSSTL

SEQ ID NO: 39447 - protein, 11 aa, Homo sapiens
  misc_feature: Table A; Target 39447; HLA-B*49:01; MAGEA3,MAGEA6; ENSG00000221867,ENSG00000197172; CTA,CTA
QEAASSSSTLV

SEQ ID NO: 39448 - protein, 9 aa, Homo sapiens
  misc_feature: Table A; Target 39448; HLA-A*30:01; MAGEA3,MAGEA6; ENSG00000221867,ENSG00000197172; CTA,CTA
QEEEGPSTF

SEQ ID NO: 39449 - protein, 9 aa, Homo sapiens
  misc_feature: Table A; Target 39449; HLA-B*18:01; MAGEA3,MAGEA6; ENSG00000221867,ENSG00000197172; CTA,CTA
QEEEGPSTF

SEQ ID NO: 39450 - protein, 9 aa, Homo sapiens
  misc_feature: Table A; Target 39450; HLA-B*37:01; MAGEA3,MAGEA6; ENSG00000221867,ENSG00000197172; CTA,CTA
QEEEGPSTF

SEQ ID NO: 39451 - protein, 9 aa, Homo sapiens
  misc_feature: Table A; Target 39451; HLA-B*38:01; MAGEA3,MAGEA6; ENSG00000221867,ENSG00000197172; CTA,CTA
QEEEGPSTF

SEQ ID NO: 39452 - protein, 9 aa, Homo sapiens
  misc_feature: Table A; Target 39452; HLA-B*40:01; MAGEA3,MAGEA6; ENSG00000221867,ENSG00000197172; CTA,CTA
QEEEGPSTF

SEQ ID NO: 39453 - protein, 9 aa, Homo sapiens
  misc_feature: Table A; Target 39453; HLA-B*44:02; MAGEA3,MAGEA6; ENSG00000221867,ENSG00000197172; CTA,CTA
QEEEGPSTF

SEQ ID NO: 39454 - protein, 9 aa, Homo sapiens
  misc_feature: Table A; Target 39454; HLA-B*44:03; MAGEA3,MAGEA6; ENSG00000221867,ENSG00000197172; CTA,CTA
QEEEGPSTF

SEQ ID NO: 39455 - protein, 9 aa, Homo sapiens
  misc_feature: Table A; Target 39455; HLA-B*49:01; MAGEA3,MAGEA6; ENSG00000221867,ENSG00000197172; CTA,CTA
QEEEGPSTF

SEQ ID NO: 39456 - protein, 9 aa, Homo sapiens
  misc_feature: Table A; Target 39456; HLA-C*02:02; MAGEA3,MAGEA6; ENSG00000221867,ENSG00000197172; CTA,CTA
QEEEGPSTF

SEQ ID NO: 39457 - protein, 9 aa, Homo sapiens
  misc_feature: Table A; Target 39457; HLA-C*05:01; MAGEA3,MAGEA6; ENSG00000221867,ENSG00000197172; CTA,CTA
QEEEGPSTF

SEQ ID NO: 39458 - protein, 9 aa, Homo sapiens
  misc_feature: Table A; Target 39458; HLA-C*16:04; MAGEA3,MAGEA6; ENSG00000221867,ENSG00000197172; CTA,CTA
QEEEGPSTF

SEQ ID NO: 39459 - protein, 11 aa, Homo sapiens
  misc_feature: Table A; Target 39459; HLA-A*02:01; MAGEA3,MAGEA6; ENSG00000221867,ENSG00000197172; CTA,CTA
QLVFGIELMEV

SEQ ID NO: 39460 - protein, 10 aa, Homo sapiens
  misc_feature: Table A; Target 39460; HLA-A*25:01; MAGEA3,MAGEA6; ENSG00000221867,ENSG00000197172; CTA,CTA
QVPGSDPACY

SEQ ID NO: 39461 - protein, 10 aa, Homo sapiens
  misc_feature: Table A; Target 39461; HLA-A*26:01; MAGEA3,MAGEA6; ENSG00000221867,ENSG00000197172; CTA,CTA
QVPGSDPACY

SEQ ID NO: 39462 - protein, 10 aa, Homo sapiens
  misc_feature: Table A; Target 39462; HLA-A*29:02; MAGEA3,MAGEA6; ENSG00000221867,ENSG00000197172; CTA,CTA
QVPGSDPACY

SEQ ID NO: 39463 - protein, 10 aa, Homo sapiens
  misc_feature: Table A; Target 39463; HLA-A*30:02; MAGEA3,MAGEA6; ENSG00000221867,ENSG00000197172; CTA,CTA
QVPGSDPACY

SEQ ID NO: 39464 - protein, 10 aa, Homo sapiens
  misc_feature: Table A; Target 39464; HLA-C*07:04; MAGEA3,MAGEA6; ENSG00000221867,ENSG00000197172; CTA,CTA
QVPGSDPACY

SEQ ID NO: 39465 - protein, 8 aa, Homo sapiens
  misc_feature: Table A; Target 39465; HLA-A*24:02; MAGEA3,MAGEA6; ENSG00000221867,ENSG00000197172; CTA,CTA
QYFFPVIF

SEQ ID NO: 39466 - protein, 10 aa, Homo sapiens
  misc_feature: Table A; Target 39466; HLA-B*27:02; MAGEA3,MAGEA6; ENSG00000221867,ENSG00000197172; CTA,CTA
QYFFPVIFSK

SEQ ID NO: 39467 - protein, 9 aa, Homo sapiens
  misc_feature: Table A; Target 39467; HLA-C*07:02; MAGEA3,MAGEA6; ENSG00000221867,ENSG00000197172; CTA,CTA
RAREPVTKA

SEQ ID NO: 39468 - protein, 9 aa, Homo sapiens
  misc_feature: Table A; Target 39468; HLA-B*07:02; MAGEA3,MAGEA6; ENSG00000221867,ENSG00000197172; CTA,CTA
REPVTKAEM

SEQ ID NO: 39469 - protein, 9 aa, Homo sapiens
  misc_feature: Table A; Target 39469; HLA-C*16:04; MAGEA3,MAGEA6; ENSG00000221867,ENSG00000197172; CTA,CTA
REPVTKAEM

SEQ ID NO: 39470 - protein, 11 aa, Homo sapiens
  misc_feature: Table A; Target 39470; HLA-A*32:01; MAGEA3,MAGEA6; ENSG00000221867,ENSG00000197172; CTA,CTA
RQVPGSDPACY

SEQ ID NO: 39471 - protein, 11 aa, Homo sapiens
  misc_feature: Table A; Target 39471; HLA-B*15:03; MAGEA3,MAGEA6; ENSG00000221867,ENSG00000197172; CTA,CTA
RQVPGSDPACY

SEQ ID NO: 39472 - protein, 11 aa, Homo sapiens
  misc_feature: Table A; Target 39472; HLA-B*39:01; MAGEA3,MAGEA6; ENSG00000221867,ENSG00000197172; CTA,CTA
RQVPGSDPACY

SEQ ID NO: 39473 - protein, 11 aa, Homo sapiens
  misc_feature: Table A; Target 39473; HLA-B*58:01; MAGEA3,MAGEA6; ENSG00000221867,ENSG00000197172; CTA,CTA
RQVPGSDPACY

SEQ ID NO: 39474 - protein, 11 aa, Homo sapiens
  misc_feature: Table A; Target 39474; HLA-C*07:04; MAGEA3,MAGEA6; ENSG00000221867,ENSG00000197172; CTA,CTA
RQVPGSDPACY

SEQ ID NO: 39475 - protein, 11 aa, Homo sapiens
  misc_feature: Table A; Target 39475; HLA-C*16:04; MAGEA3,MAGEA6; ENSG00000221867,ENSG00000197172; CTA,CTA
RQVPGSDPACY

SEQ ID NO: 39476 - protein, 8 aa, Homo sapiens
  misc_feature: Table A; Target 39476; HLA-B*37:01; MAGEA3,MAGEA6; ENSG00000221867,ENSG00000197172; CTA,CTA
SDPACYEF

SEQ ID NO: 39477 - protein, 9 aa, Homo sapiens
  misc_feature: Table A; Target 39477; HLA-B*18:01; MAGEA3,MAGEA6; ENSG00000221867,ENSG00000197172; CTA,CTA
SEFQAALSR

SEQ ID NO: 39478 - protein, 9 aa, Homo sapiens
  misc_feature: Table A; Target 39478; HLA-B*27:02; MAGEA3,MAGEA6; ENSG00000221867,ENSG00000197172; CTA,CTA
SEFQAALSR

SEQ ID NO: 39479 - protein, 9 aa, Homo sapiens
  misc_feature: Table A; Target 39479; HLA-B*27:05; MAGEA3,MAGEA6; ENSG00000221867,ENSG00000197172; CTA,CTA
SEFQAALSR

SEQ ID NO: 39480 - protein, 9 aa, Homo sapiens
  misc_feature: Table A; Target 39480; HLA-B*44:02; MAGEA3,MAGEA6; ENSG00000221867,ENSG00000197172; CTA,CTA
SEFQAALSR

SEQ ID NO: 39481 - protein, 9 aa, Homo sapiens
  misc_feature: Table A; Target 39481; HLA-B*44:03; MAGEA3,MAGEA6; ENSG00000221867,ENSG00000197172; CTA,CTA
SEFQAALSR

SEQ ID NO: 39482 - protein, 9 aa, Homo sapiens
  misc_feature: Table A; Target 39482; HLA-B*49:01; MAGEA3,MAGEA6; ENSG00000221867,ENSG00000197172; CTA,CTA
SEFQAALSR

SEQ ID NO: 39483 - protein, 9 aa, Homo sapiens
  misc_feature: Table A; Target 39483; HLA-C*07:06; MAGEA3,MAGEA6; ENSG00000221867,ENSG00000197172; CTA,CTA
SEFQAALSR

SEQ ID NO: 39484 - protein, 9 aa, Homo sapiens
  misc_feature: Table A; Target 39484; HLA-C*16:04; MAGEA3,MAGEA6; ENSG00000221867,ENSG00000197172; CTA,CTA
SEFQAALSR

SEQ ID NO: 39485 - protein, 8 aa, Homo sapiens
  misc_feature: Table A; Target 39485; HLA-A*29:02; MAGEA3,MAGEA6; ENSG00000221867,ENSG00000197172; CTA,CTA
SLPTTMNY

SEQ ID NO: 39486 - protein, 8 aa, Homo sapiens
  misc_feature: Table A; Target 39486; HLA-A*30:02; MAGEA3,MAGEA6; ENSG00000221867,ENSG00000197172; CTA,CTA
SLPTTMNY

SEQ ID NO: 39487 - protein, 8 aa, Homo sapiens
  misc_feature: Table A; Target 39487; HLA-B*15:01; MAGEA3,MAGEA6; ENSG00000221867,ENSG00000197172; CTA,CTA
SLPTTMNY

SEQ ID NO: 39488 - protein, 8 aa, Homo sapiens
  misc_feature: Table A; Target 39488; HLA-B*46:01; MAGEA3,MAGEA6; ENSG00000221867,ENSG00000197172; CTA,CTA
SLPTTMNY

SEQ ID NO: 39489 - protein, 8 aa, Homo sapiens
  misc_feature: Table A; Target 39489; HLA-C*01:02; MAGEA3,MAGEA6; ENSG00000221867,ENSG00000197172; CTA,CTA
SLPTTMNY

SEQ ID NO: 39490 - protein, 8 aa, Homo sapiens
  misc_feature: Table A; Target 39490; HLA-C*14:02; MAGEA3,MAGEA6; ENSG00000221867,ENSG00000197172; CTA,CTA
SLPTTMNY

SEQ ID NO: 39491 - protein, 10 aa, Homo sapiens
  misc_feature: Table A; Target 39491; HLA-A*02:07; MAGEA3,MAGEA6; ENSG00000221867,ENSG00000197172; CTA,CTA
SLPTTMNYPL

SEQ ID NO: 39492 - protein, 11 aa, Homo sapiens
  misc_feature: Table A; Target 39492; HLA-A*24:02; MAGEA3,MAGEA6; ENSG00000221867,ENSG00000197172; CTA,CTA
SLPTTMNYPLW

SEQ ID NO: 39493 - protein, 10 aa, Homo sapiens
  misc_feature: Table A; Target 39493; HLA-A*02:04; MAGEA3,MAGEA6; ENSG00000221867,ENSG00000197172; CTA,CTA
SLQLVFGIEL

SEQ ID NO: 39494 - protein, 10 aa, Homo sapiens
  misc_feature: Table A; Target 39494; HLA-A*02:07; MAGEA3,MAGEA6; ENSG00000221867,ENSG00000197172; CTA,CTA
SLQLVFGIEL

SEQ ID NO: 39495 - protein, 11 aa, Homo sapiens
  misc_feature: Table A; Target 39495; HLA-C*05:01; MAGEA3,MAGEA6; ENSG00000221867,ENSG00000197172; CTA,CTA
SNQEEEGPSTF

SEQ ID NO: 39496 - protein, 11 aa, Homo sapiens
  misc_feature: Table A; Target 39496; HLA-B*56:01; MAGEA3,MAGEA6; ENSG00000221867,ENSG00000197172; CTA,CTA
SPDPPQSPQGA

SEQ ID NO: 39497 - protein, 8 aa, Homo sapiens
  misc_feature: Table A; Target 39497; HLA-B*07:02; MAGEA3,MAGEA6; ENSG00000221867,ENSG00000197172; CTA,CTA
SPQGASSL

SEQ ID NO: 39498 - protein, 8 aa, Homo sapiens
  misc_feature: Table A; Target 39498; HLA-C*07:02; MAGEA3,MAGEA6; ENSG00000221867,ENSG00000197172; CTA,CTA
SPQGASSL

SEQ ID NO: 39499 - protein, 9 aa, Homo sapiens
  misc_feature: Table A; Target 39499; HLA-A*01:01; MAGEA3,MAGEA6; ENSG00000221867,ENSG00000197172; CTA,CTA
SSLPTTMNY

SEQ ID NO: 39500 - protein, 9 aa, Homo sapiens
  misc_feature: Table A; Target 39500; HLA-A*03:01; MAGEA3,MAGEA6; ENSG00000221867,ENSG00000197172; CTA,CTA
SSLPTTMNY

SEQ ID NO: 39501 - protein, 9 aa, Homo sapiens
  misc_feature: Table A; Target 39501; HLA-A*03:02; MAGEA3,MAGEA6; ENSG00000221867,ENSG00000197172; CTA,CTA
SSLPTTMNY

SEQ ID NO: 39502 - protein, 9 aa, Homo sapiens
  misc_feature: Table A; Target 39502; HLA-A*11:01; MAGEA3,MAGEA6; ENSG00000221867,ENSG00000197172; CTA,CTA
SSLPTTMNY

SEQ ID NO: 39503 - protein, 9 aa, Homo sapiens
  misc_feature: Table A; Target 39503; HLA-A*23:01; MAGEA3,MAGEA6; ENSG00000221867,ENSG00000197172; CTA,CTA
SSLPTTMNY

SEQ ID NO: 39504 - protein, 9 aa, Homo sapiens
  misc_feature: Table A; Target 39504; HLA-A*25:01; MAGEA3,MAGEA6; ENSG00000221867,ENSG00000197172; CTA,CTA
SSLPTTMNY

SEQ ID NO: 39505 - protein, 9 aa, Homo sapiens
  misc_feature: Table A; Target 39505; HLA-A*26:01; MAGEA3,MAGEA6; ENSG00000221867,ENSG00000197172; CTA,CTA
SSLPTTMNY

SEQ ID NO: 39506 - protein, 9 aa, Homo sapiens
  misc_feature: Table A; Target 39506; HLA-A*29:02; MAGEA3,MAGEA6; ENSG00000221867,ENSG00000197172; CTA,CTA
SSLPTTMNY

SEQ ID NO: 39507 - protein, 9 aa, Homo sapiens
  misc_feature: Table A; Target 39507; HLA-A*31:01; MAGEA3,MAGEA6; ENSG00000221867,ENSG00000197172; CTA,CTA
SSLPTTMNY

SEQ ID NO: 39508 - protein, 9 aa, Homo sapiens
  misc_feature: Table A; Target 39508; HLA-A*32:01; MAGEA3,MAGEA6; ENSG00000221867,ENSG00000197172; CTA,CTA
SSLPTTMNY

SEQ ID NO: 39509 - protein, 9 aa, Homo sapiens
  misc_feature: Table A; Target 39509; HLA-B*15:01; MAGEA3,MAGEA6; ENSG00000221867,ENSG00000197172; CTA,CTA
SSLPTTMNY

SEQ ID NO: 39510 - protein, 9 aa, Homo sapiens
  misc_feature: Table A; Target 39510; HLA-B*15:03; MAGEA3,MAGEA6; ENSG00000221867,ENSG00000197172; CTA,CTA
SSLPTTMNY

SEQ ID NO: 39511 - protein, 9 aa, Homo sapiens
  misc_feature: Table A; Target 39511; HLA-B*35:01; MAGEA3,MAGEA6; ENSG00000221867,ENSG00000197172; CTA,CTA
SSLPTTMNY

SEQ ID NO: 39512 - protein, 9 aa, Homo sapiens
  misc_feature: Table A; Target 39512; HLA-B*44:03; MAGEA3,MAGEA6; ENSG00000221867,ENSG00000197172; CTA,CTA
SSLPTTMNY

SEQ ID NO: 39513 - protein, 9 aa, Homo sapiens
  misc_feature: Table A; Target 39513; HLA-B*46:01; MAGEA3,MAGEA6; ENSG00000221867,ENSG00000197172; CTA,CTA
SSLPTTMNY

SEQ ID NO: 39514 - protein, 9 aa, Homo sapiens
  misc_feature: Table A; Target 39514; HLA-B*57:01; MAGEA3,MAGEA6; ENSG00000221867,ENSG00000197172; CTA,CTA
SSLPTTMNY

SEQ ID NO: 39515 - protein, 9 aa, Homo sapiens
  misc_feature: Table A; Target 39515; HLA-C*01:02; MAGEA3,MAGEA6; ENSG00000221867,ENSG00000197172; CTA,CTA
SSLPTTMNY

SEQ ID NO: 39516 - protein, 9 aa, Homo sapiens
  misc_feature: Table A; Target 39516; HLA-C*02:02; MAGEA3,MAGEA6; ENSG00000221867,ENSG00000197172; CTA,CTA
SSLPTTMNY

SEQ ID NO: 39517 - protein, 9 aa, Homo sapiens
  misc_feature: Table A; Target 39517; HLA-C*06:02; MAGEA3,MAGEA6; ENSG00000221867,ENSG00000197172; CTA,CTA
SSLPTTMNY

SEQ ID NO: 39518 - protein, 9 aa, Homo sapiens
  misc_feature: Table A; Target 39518; HLA-C*07:01; MAGEA3,MAGEA6; ENSG00000221867,ENSG00000197172; CTA,CTA
SSLPTTMNY

SEQ ID NO: 39519 - protein, 9 aa, Homo sapiens
  misc_feature: Table A; Target 39519; HLA-C*07:04; MAGEA3,MAGEA6; ENSG00000221867,ENSG00000197172; CTA,CTA
SSLPTTMNY

SEQ ID NO: 39520 - protein, 9 aa, Homo sapiens
  misc_feature: Table A; Target 39520; HLA-C*07:06; MAGEA3,MAGEA6; ENSG00000221867,ENSG00000197172; CTA,CTA
SSLPTTMNY

SEQ ID NO: 39521 - protein, 9 aa, Homo sapiens
  misc_feature: Table A; Target 39521; HLA-C*12:03; MAGEA3,MAGEA6; ENSG00000221867,ENSG00000197172; CTA,CTA
SSLPTTMNY

SEQ ID NO: 39522 - protein, 9 aa, Homo sapiens
  misc_feature: Table A; Target 39522; HLA-C*16:01; MAGEA3,MAGEA6; ENSG00000221867,ENSG00000197172; CTA,CTA
SSLPTTMNY

SEQ ID NO: 39523 - protein, 9 aa, Homo sapiens
  misc_feature: Table A; Target 39523; HLA-C*16:02; MAGEA3,MAGEA6; ENSG00000221867,ENSG00000197172; CTA,CTA
SSLPTTMNY

SEQ ID NO: 39524 - protein, 9 aa, Homo sapiens
  misc_feature: Table A; Target 39524; HLA-C*16:04; MAGEA3,MAGEA6; ENSG00000221867,ENSG00000197172; CTA,CTA
SSLPTTMNY

SEQ ID NO: 39525 - protein, 9 aa, Homo sapiens
  misc_feature: Table A; Target 39525; HLA-A*02:01; MAGEA3,MAGEA6; ENSG00000221867,ENSG00000197172; CTA,CTA
SSSSTLVEV

SEQ ID NO: 39526 - protein, 9 aa, Homo sapiens
  misc_feature: Table A; Target 39526; HLA-A*02:03; MAGEA3,MAGEA6; ENSG00000221867,ENSG00000197172; CTA,CTA
SSSSTLVEV

SEQ ID NO: 39527 - protein, 9 aa, Homo sapiens
  misc_feature: Table A; Target 39527; HLA-A*68:02; MAGEA3,MAGEA6; ENSG00000221867,ENSG00000197172; CTA,CTA
SSSSTLVEV

SEQ ID NO: 39528 - protein, 9 aa, Homo sapiens
  misc_feature: Table A; Target 39528; HLA-B*13:02; MAGEA3,MAGEA6; ENSG00000221867,ENSG00000197172; CTA,CTA
SSSSTLVEV

SEQ ID NO: 39529 - protein, 9 aa, Homo sapiens
  misc_feature: Table A; Target 39529; HLA-B*56:01; MAGEA3,MAGEA6; ENSG00000221867,ENSG00000197172; CTA,CTA
SSSSTLVEV

SEQ ID NO: 39530 - protein, 9 aa, Homo sapiens
  misc_feature: Table A; Target 39530; HLA-C*02:02; MAGEA3,MAGEA6; ENSG00000221867,ENSG00000197172; CTA,CTA
SSSSTLVEV

SEQ ID NO: 39531 - protein, 9 aa, Homo sapiens
  misc_feature: Table A; Target 39531; HLA-C*16:02; MAGEA3,MAGEA6; ENSG00000221867,ENSG00000197172; CTA,CTA
SSSSTLVEV

SEQ ID NO: 39532 - protein, 11 aa, Homo sapiens
  misc_feature: Table A; Target 39532; HLA-B*38:01; MAGEA3,MAGEA6; ENSG00000221867,ENSG00000197172; CTA,CTA
SSSSTLVEVTL

SEQ ID NO: 39533 - protein, 10 aa, Homo sapiens
  misc_feature: Table A; Target 39533; HLA-A*68:02; MAGEA3,MAGEA6; ENSG00000221867,ENSG00000197172; CTA,CTA
SSSTLVEVTL

SEQ ID NO: 39534 - protein, 10 aa, Homo sapiens
  misc_feature: Table A; Target 39534; HLA-C*07:06; MAGEA3,MAGEA6; ENSG00000221867,ENSG00000197172; CTA,CTA
SSSTLVEVTL

SEQ ID NO: 39535 - protein, 9 aa, Homo sapiens
  misc_feature: Table A; Target 39535; HLA-A*23:01; MAGEA3,MAGEA6; ENSG00000221867,ENSG00000197172; CTA,CTA
SSTLVEVTL

SEQ ID NO: 39536 - protein, 9 aa, Homo sapiens
  misc_feature: Table A; Target 39536; HLA-A*30:01; MAGEA3,MAGEA6; ENSG00000221867,ENSG00000197172; CTA,CTA
SSTLVEVTL

SEQ ID NO: 39537 - protein, 9 aa, Homo sapiens
  misc_feature: Table A; Target 39537; HLA-A*68:02; MAGEA3,MAGEA6; ENSG00000221867,ENSG00000197172; CTA,CTA
SSTLVEVTL

SEQ ID NO: 39538 - protein, 9 aa, Homo sapiens
  misc_feature: Table A; Target 39538; HLA-B*13:02; MAGEA3,MAGEA6; ENSG00000221867,ENSG00000197172; CTA,CTA
SSTLVEVTL

SEQ ID NO: 39539 - protein, 9 aa, Homo sapiens
  misc_feature: Table A; Target 39539; HLA-B*35:03; MAGEA3,MAGEA6; ENSG00000221867,ENSG00000197172; CTA,CTA
SSTLVEVTL

SEQ ID NO: 39540 - protein, 9 aa, Homo sapiens
  misc_feature: Table A; Target 39540; HLA-B*38:01; MAGEA3,MAGEA6; ENSG00000221867,ENSG00000197172; CTA,CTA
SSTLVEVTL

SEQ ID NO: 39541 - protein, 9 aa, Homo sapiens
  misc_feature: Table A; Target 39541; HLA-B*39:01; MAGEA3,MAGEA6; ENSG00000221867,ENSG00000197172; CTA,CTA
SSTLVEVTL

SEQ ID NO: 39542 - protein, 9 aa, Homo sapiens
  misc_feature: Table A; Target 39542; HLA-B*40:01; MAGEA3,MAGEA6; ENSG00000221867,ENSG00000197172; CTA,CTA
SSTLVEVTL

SEQ ID NO: 39543 - protein, 9 aa, Homo sapiens
  misc_feature: Table A; Target 39543; HLA-B*57:01; MAGEA3,MAGEA6; ENSG00000221867,ENSG00000197172; CTA,CTA
SSTLVEVTL

SEQ ID NO: 39544 - protein, 9 aa, Homo sapiens
  misc_feature: Table A; Target 39544; HLA-B*58:01; MAGEA3,MAGEA6; ENSG00000221867,ENSG00000197172; CTA,CTA
SSTLVEVTL

SEQ ID NO: 39545 - protein, 9 aa, Homo sapiens
  misc_feature: Table A; Target 39545; HLA-C*02:02; MAGEA3,MAGEA6; ENSG00000221867,ENSG00000197172; CTA,CTA
SSTLVEVTL

SEQ ID NO: 39546 - protein, 9 aa, Homo sapiens
  misc_feature: Table A; Target 39546; HLA-C*03:03; MAGEA3,MAGEA6; ENSG00000221867,ENSG00000197172; CTA,CTA
SSTLVEVTL

SEQ ID NO: 39547 - protein, 9 aa, Homo sapiens
  misc_feature: Table A; Target 39547; HLA-C*03:04; MAGEA3,MAGEA6; ENSG00000221867,ENSG00000197172; CTA,CTA
SSTLVEVTL

SEQ ID NO: 39548 - protein, 9 aa, Homo sapiens
  misc_feature: Table A; Target 39548; HLA-C*04:01; MAGEA3,MAGEA6; ENSG00000221867,ENSG00000197172; CTA,CTA
SSTLVEVTL

SEQ ID NO: 39549 - protein, 9 aa, Homo sapiens
  misc_feature: Table A; Target 39549; HLA-C*05:01; MAGEA3,MAGEA6; ENSG00000221867,ENSG00000197172; CTA,CTA
SSTLVEVTL

SEQ ID NO: 39550 - protein, 9 aa, Homo sapiens
  misc_feature: Table A; Target 39550; HLA-C*07:04; MAGEA3,MAGEA6; ENSG00000221867,ENSG00000197172; CTA,CTA
SSTLVEVTL

SEQ ID NO: 39551 - protein, 9 aa, Homo sapiens
  misc_feature: Table A; Target 39551; HLA-C*07:06; MAGEA3,MAGEA6; ENSG00000221867,ENSG00000197172; CTA,CTA
SSTLVEVTL

SEQ ID NO: 39552 - protein, 9 aa, Homo sapiens
  misc_feature: Table A; Target 39552; HLA-C*12:03; MAGEA3,MAGEA6; ENSG00000221867,ENSG00000197172; CTA,CTA
SSTLVEVTL

SEQ ID NO: 39553 - protein, 9 aa, Homo sapiens
  misc_feature: Table A; Target 39553; HLA-C*16:01; MAGEA3,MAGEA6; ENSG00000221867,ENSG00000197172; CTA,CTA
SSTLVEVTL

SEQ ID NO: 39554 - protein, 9 aa, Homo sapiens
  misc_feature: Table A; Target 39554; HLA-C*16:02; MAGEA3,MAGEA6; ENSG00000221867,ENSG00000197172; CTA,CTA
SSTLVEVTL

SEQ ID NO: 39555 - protein, 9 aa, Homo sapiens
  misc_feature: Table A; Target 39555; HLA-C*16:04; MAGEA3,MAGEA6; ENSG00000221867,ENSG00000197172; CTA,CTA
SSTLVEVTL

SEQ ID NO: 39556 - protein, 10 aa, Homo sapiens
  misc_feature: Table A; Target 39556; HLA-A*25:01; MAGEA3,MAGEA6; ENSG00000221867,ENSG00000197172; CTA,CTA
STFPDLESEF

SEQ ID NO: 39557 - protein, 10 aa, Homo sapiens
  misc_feature: Table A; Target 39557; HLA-A*26:01; MAGEA3,MAGEA6; ENSG00000221867,ENSG00000197172; CTA,CTA
STFPDLESEF

SEQ ID NO: 39558 - protein, 10 aa, Homo sapiens
  misc_feature: Table A; Target 39558; HLA-A*30:02; MAGEA3,MAGEA6; ENSG00000221867,ENSG00000197172; CTA,CTA
STFPDLESEF

SEQ ID NO: 39559 - protein, 10 aa, Homo sapiens
  misc_feature: Table A; Target 39559; HLA-B*57:01; MAGEA3,MAGEA6; ENSG00000221867,ENSG00000197172; CTA,CTA
STFPDLESEF

SEQ ID NO: 39560 - protein, 10 aa, Homo sapiens
  misc_feature: Table A; Target 39560; HLA-B*58:01; MAGEA3,MAGEA6; ENSG00000221867,ENSG00000197172; CTA,CTA
STFPDLESEF

SEQ ID NO: 39561 - protein, 8 aa, Homo sapiens
  misc_feature: Table A; Target 39561; HLA-C*03:03; MAGEA3,MAGEA6; ENSG00000221867,ENSG00000197172; CTA,CTA
STLVEVTL

SEQ ID NO: 39562 - protein, 9 aa, Homo sapiens
  misc_feature: Table A; Target 39562; HLA-A*02:04; MAGEA3,MAGEA6; ENSG00000221867,ENSG00000197172; CTA,CTA
SVLEVFEGR

SEQ ID NO: 39563 - protein, 9 aa, Homo sapiens
  misc_feature: Table A; Target 39563; HLA-A*02:07; MAGEA3,MAGEA6; ENSG00000221867,ENSG00000197172; CTA,CTA
SVLEVFEGR

SEQ ID NO: 39564 - protein, 9 aa, Homo sapiens
  misc_feature: Table A; Target 39564; HLA-A*03:01; MAGEA3,MAGEA6; ENSG00000221867,ENSG00000197172; CTA,CTA
SVLEVFEGR

SEQ ID NO: 39565 - protein, 9 aa, Homo sapiens
  misc_feature: Table A; Target 39565; HLA-A*03:02; MAGEA3,MAGEA6; ENSG00000221867,ENSG00000197172; CTA,CTA
SVLEVFEGR

SEQ ID NO: 39566 - protein, 9 aa, Homo sapiens
  misc_feature: Table A; Target 39566; HLA-A*11:01; MAGEA3,MAGEA6; ENSG00000221867,ENSG00000197172; CTA,CTA
SVLEVFEGR

SEQ ID NO: 39567 - protein, 9 aa, Homo sapiens
  misc_feature: Table A; Target 39567; HLA-A*25:01; MAGEA3,MAGEA6; ENSG00000221867,ENSG00000197172; CTA,CTA
SVLEVFEGR

SEQ ID NO: 39568 - protein, 9 aa, Homo sapiens
  misc_feature: Table A; Target 39568; HLA-A*31:01; MAGEA3,MAGEA6; ENSG00000221867,ENSG00000197172; CTA,CTA
SVLEVFEGR

SEQ ID NO: 39569 - protein, 9 aa, Homo sapiens
  misc_feature: Table A; Target 39569; HLA-A*33:01; MAGEA3,MAGEA6; ENSG00000221867,ENSG00000197172; CTA,CTA
SVLEVFEGR

SEQ ID NO: 39570 - protein, 9 aa, Homo sapiens
  misc_feature: Table A; Target 39570; HLA-A*33:03; MAGEA3,MAGEA6; ENSG00000221867,ENSG00000197172; CTA,CTA
SVLEVFEGR

SEQ ID NO: 39571 - protein, 9 aa, Homo sapiens
  misc_feature: Table A; Target 39571; HLA-A*68:01; MAGEA3,MAGEA6; ENSG00000221867,ENSG00000197172; CTA,CTA
SVLEVFEGR

SEQ ID NO: 39572 - protein, 9 aa, Homo sapiens
  misc_feature: Table A; Target 39572; HLA-A*68:02; MAGEA3,MAGEA6; ENSG00000221867,ENSG00000197172; CTA,CTA
SVLEVFEGR

SEQ ID NO: 39573 - protein, 9 aa, Homo sapiens
  misc_feature: Table A; Target 39573; HLA-B*57:01; MAGEA3,MAGEA6; ENSG00000221867,ENSG00000197172; CTA,CTA
SVLEVFEGR

SEQ ID NO: 39574 - protein, 9 aa, Homo sapiens
  misc_feature: Table A; Target 39574; HLA-C*07:06; MAGEA3,MAGEA6; ENSG00000221867,ENSG00000197172; CTA,CTA
SVLEVFEGR

SEQ ID NO: 39575 - protein, 9 aa, Homo sapiens
  misc_feature: Table A; Target 39575; HLA-A*26:01; MAGEA3,MAGEA6; ENSG00000221867,ENSG00000197172; CTA,CTA
SVVGNWQYF

SEQ ID NO: 39576 - protein, 9 aa, Homo sapiens
  misc_feature: Table A; Target 39576; HLA-A*23:01; MAGEA3,MAGEA6; ENSG00000221867,ENSG00000197172; CTA,CTA
SYVKVLHHM

SEQ ID NO: 39577 - protein, 9 aa, Homo sapiens
  misc_feature: Table A; Target 39577; HLA-A*24:02; MAGEA3,MAGEA6; ENSG00000221867,ENSG00000197172; CTA,CTA
SYVKVLHHM

SEQ ID NO: 39578 - protein, 9 aa, Homo sapiens
  misc_feature: Table A; Target 39578; HLA-A*23:01; MAGEA3,MAGEA6; ENSG00000221867,ENSG00000197172; CTA,CTA
TFPDLESEF

SEQ ID NO: 39579 - protein, 9 aa, Homo sapiens
  misc_feature: Table A; Target 39579; HLA-A*24:02; MAGEA3,MAGEA6; ENSG00000221867,ENSG00000197172; CTA,CTA
TFPDLESEF

SEQ ID NO: 39580 - protein, 9 aa, Homo sapiens
  misc_feature: Table A; Target 39580; HLA-A*29:02; MAGEA3,MAGEA6; ENSG00000221867,ENSG00000197172; CTA,CTA
TFPDLESEF

SEQ ID NO: 39581 - protein, 9 aa, Homo sapiens
  misc_feature: Table A; Target 39581; HLA-C*01:02; MAGEA3,MAGEA6; ENSG00000221867,ENSG00000197172; CTA,CTA
TFPDLESEF

SEQ ID NO: 39582 - protein, 9 aa, Homo sapiens
  misc_feature: Table A; Target 39582; HLA-C*04:01; MAGEA3,MAGEA6; ENSG00000221867,ENSG00000197172; CTA,CTA
TFPDLESEF

SEQ ID NO: 39583 - protein, 9 aa, Homo sapiens
  misc_feature: Table A; Target 39583; HLA-C*14:02; MAGEA3,MAGEA6; ENSG00000221867,ENSG00000197172; CTA,CTA
TFPDLESEF

SEQ ID NO: 39584 - protein, 8 aa, Homo sapiens
  misc_feature: Table A; Target 39584; HLA-A*02:01; MAGEA3,MAGEA6; ENSG00000221867,ENSG00000197172; CTA,CTA
TLGEVPAA

SEQ ID NO: 39585 - protein, 8 aa, Homo sapiens
  misc_feature: Table A; Target 39585; HLA-A*02:03; MAGEA3,MAGEA6; ENSG00000221867,ENSG00000197172; CTA,CTA
TLGEVPAA

SEQ ID NO: 39586 - protein, 8 aa, Homo sapiens
  misc_feature: Table A; Target 39586; HLA-B*55:01; MAGEA3,MAGEA6; ENSG00000221867,ENSG00000197172; CTA,CTA
TLGEVPAA

SEQ ID NO: 39587 - protein, 10 aa, Homo sapiens
  misc_feature: Table A; Target 39587; HLA-A*02:01; MAGEA3,MAGEA6; ENSG00000221867,ENSG00000197172; CTA,CTA
TLVEVTLGEV

SEQ ID NO: 39588 - protein, 10 aa, Homo sapiens
  misc_feature: Table A; Target 39588; HLA-A*02:03; MAGEA3,MAGEA6; ENSG00000221867,ENSG00000197172; CTA,CTA
TLVEVTLGEV

SEQ ID NO: 39589 - protein, 10 aa, Homo sapiens
  misc_feature: Table A; Target 39589; HLA-A*02:07; MAGEA3,MAGEA6; ENSG00000221867,ENSG00000197172; CTA,CTA
TLVEVTLGEV

SEQ ID NO: 39590 - protein, 10 aa, Homo sapiens
  misc_feature: Table A; Target 39590; HLA-A*68:02; MAGEA3,MAGEA6; ENSG00000221867,ENSG00000197172; CTA,CTA
TLVEVTLGEV

SEQ ID NO: 39591 - protein, 10 aa, Homo sapiens
  misc_feature: Table A; Target 39591; HLA-B*55:01; MAGEA3,MAGEA6; ENSG00000221867,ENSG00000197172; CTA,CTA
TLVEVTLGEV

SEQ ID NO: 39592 - protein, 9 aa, Homo sapiens
  misc_feature: Table A; Target 39592; HLA-A*03:01; MAGEA3,MAGEA6; ENSG00000221867,ENSG00000197172; CTA,CTA
TSYVKVLHH

SEQ ID NO: 39593 - protein, 8 aa, Homo sapiens
  misc_feature: Table A; Target 39593; HLA-A*30:01; MAGEA3,MAGEA6; ENSG00000221867,ENSG00000197172; CTA,CTA
VEVTLGEV

SEQ ID NO: 39594 - protein, 8 aa, Homo sapiens
  misc_feature: Table A; Target 39594; HLA-B*18:01; MAGEA3,MAGEA6; ENSG00000221867,ENSG00000197172; CTA,CTA
VEVTLGEV

SEQ ID NO: 39595 - protein, 8 aa, Homo sapiens
  misc_feature: Table A; Target 39595; HLA-B*40:02; MAGEA3,MAGEA6; ENSG00000221867,ENSG00000197172; CTA,CTA
VEVTLGEV

SEQ ID NO: 39596 - protein, 8 aa, Homo sapiens
  misc_feature: Table A; Target 39596; HLA-B*49:01; MAGEA3,MAGEA6; ENSG00000221867,ENSG00000197172; CTA,CTA
VEVTLGEV

SEQ ID NO: 39597 - protein, 9 aa, Homo sapiens
  misc_feature: Table A; Target 39597; HLA-B*18:01; MAGEA3,MAGEA6; ENSG00000221867,ENSG00000197172; CTA,CTA
VEVTLGEVP

SEQ ID NO: 39598 - protein, 9 aa, Homo sapiens
  misc_feature: Table A; Target 39598; HLA-B*40:01; MAGEA3,MAGEA6; ENSG00000221867,ENSG00000197172; CTA,CTA
VEVTLGEVP

SEQ ID NO: 39599 - protein, 9 aa, Homo sapiens
  misc_feature: Table A; Target 39599; HLA-B*40:02; MAGEA3,MAGEA6; ENSG00000221867,ENSG00000197172; CTA,CTA
VEVTLGEVP

SEQ ID NO: 39600 - protein, 9 aa, Homo sapiens
  misc_feature: Table A; Target 39600; HLA-B*49:01; MAGEA3,MAGEA6; ENSG00000221867,ENSG00000197172; CTA,CTA
VEVTLGEVP

SEQ ID NO: 39601 - protein, 10 aa, Homo sapiens
  misc_feature: Table A; Target 39601; HLA-A*30:01; MAGEA3,MAGEA6; ENSG00000221867,ENSG00000197172; CTA,CTA
VEVTLGEVPA

SEQ ID NO: 39602 - protein, 10 aa, Homo sapiens
  misc_feature: Table A; Target 39602; HLA-B*18:01; MAGEA3,MAGEA6; ENSG00000221867,ENSG00000197172; CTA,CTA
VEVTLGEVPA

SEQ ID NO: 39603 - protein, 10 aa, Homo sapiens
  misc_feature: Table A; Target 39603; HLA-B*40:02; MAGEA3,MAGEA6; ENSG00000221867,ENSG00000197172; CTA,CTA
VEVTLGEVPA

SEQ ID NO: 39604 - protein, 11 aa, Homo sapiens
  misc_feature: Table A; Target 39604; HLA-A*30:01; MAGEA3,MAGEA6; ENSG00000221867,ENSG00000197172; CTA,CTA
VEVTLGEVPAA

SEQ ID NO: 39605 - protein, 11 aa, Homo sapiens
  misc_feature: Table A; Target 39605; HLA-B*40:02; MAGEA3,MAGEA6; ENSG00000221867,ENSG00000197172; CTA,CTA
VEVTLGEVPAA

SEQ ID NO: 39606 - protein, 8 aa, Homo sapiens
  misc_feature: Table A; Target 39606; HLA-A*29:02; MAGEA3,MAGEA6; ENSG00000221867,ENSG00000197172; CTA,CTA
VHFLLLKY

SEQ ID NO: 39607 - protein, 8 aa, Homo sapiens
  misc_feature: Table A; Target 39607; HLA-C*07:01; MAGEA3,MAGEA6; ENSG00000221867,ENSG00000197172; CTA,CTA
VHFLLLKY

SEQ ID NO: 39608 - protein, 11 aa, Homo sapiens
  misc_feature: Table A; Target 39608; HLA-C*03:03; MAGEA3,MAGEA6; ENSG00000221867,ENSG00000197172; CTA,CTA
VPAAESPDPPQ

SEQ ID NO: 39609 - protein, 8 aa, Homo sapiens
  misc_feature: Table A; Target 39609; HLA-B*55:01; MAGEA3,MAGEA6; ENSG00000221867,ENSG00000197172; CTA,CTA
VPGSDPAC

SEQ ID NO: 39610 - protein, 9 aa, Homo sapiens
  misc_feature: Table A; Target 39610; HLA-A*30:02; MAGEA3,MAGEA6; ENSG00000221867,ENSG00000197172; CTA,CTA
VPGSDPACY

SEQ ID NO: 39611 - protein, 9 aa, Homo sapiens
  misc_feature: Table A; Target 39611; HLA-B*35:01; MAGEA3,MAGEA6; ENSG00000221867,ENSG00000197172; CTA,CTA
VPGSDPACY

SEQ ID NO: 39612 - protein, 9 aa, Homo sapiens
  misc_feature: Table A; Target 39612; HLA-B*35:03; MAGEA3,MAGEA6; ENSG00000221867,ENSG00000197172; CTA,CTA
VPGSDPACY

SEQ ID NO: 39613 - protein, 9 aa, Homo sapiens
  misc_feature: Table A; Target 39613; HLA-B*55:01; MAGEA3,MAGEA6; ENSG00000221867,ENSG00000197172; CTA,CTA
VPGSDPACY

SEQ ID NO: 39614 - protein, 9 aa, Homo sapiens
  misc_feature: Table A; Target 39614; HLA-C*03:03; MAGEA3,MAGEA6; ENSG00000221867,ENSG00000197172; CTA,CTA
VPGSDPACY

SEQ ID NO: 39615 - protein, 11 aa, Homo sapiens
  misc_feature: Table A; Target 39615; HLA-B*35:01; MAGEA3,MAGEA6; ENSG00000221867,ENSG00000197172; CTA,CTA
VPGSDPACYEF

SEQ ID NO: 39616 - protein, 10 aa, Homo sapiens
  misc_feature: Table A; Target 39616; HLA-A*02:03; MAGEA3,MAGEA6; ENSG00000221867,ENSG00000197172; CTA,CTA
VTKAEMLGSV

SEQ ID NO: 39617 - protein, 10 aa, Homo sapiens
  misc_feature: Table A; Target 39617; HLA-B*40:02; MAGEA3,MAGEA6; ENSG00000221867,ENSG00000197172; CTA,CTA
VTKAEMLGSV

SEQ ID NO: 39618 - protein, 10 aa, Homo sapiens
  misc_feature: Table A; Target 39618; HLA-C*06:02; MAGEA3,MAGEA6; ENSG00000221867,ENSG00000197172; CTA,CTA
VTKAEMLGSV

SEQ ID NO: 39619 - protein, 9 aa, Homo sapiens
  misc_feature: Table A; Target 39619; HLA-A*02:01; MAGEA3,MAGEA6; ENSG00000221867,ENSG00000197172; CTA,CTA
VTLGEVPAA

SEQ ID NO: 39620 - protein, 9 aa, Homo sapiens
  misc_feature: Table A; Target 39620; HLA-A*02:03; MAGEA3,MAGEA6; ENSG00000221867,ENSG00000197172; CTA,CTA
VTLGEVPAA

SEQ ID NO: 39621 - protein, 9 aa, Homo sapiens
  misc_feature: Table A; Target 39621; HLA-A*02:04; MAGEA3,MAGEA6; ENSG00000221867,ENSG00000197172; CTA,CTA
VTLGEVPAA

SEQ ID NO: 39622 - protein, 9 aa, Homo sapiens
  misc_feature: Table A; Target 39622; HLA-B*54:01; MAGEA3,MAGEA6; ENSG00000221867,ENSG00000197172; CTA,CTA
VTLGEVPAA

SEQ ID NO: 39623 - protein, 9 aa, Homo sapiens
  misc_feature: Table A; Target 39623; HLA-B*55:01; MAGEA3,MAGEA6; ENSG00000221867,ENSG00000197172; CTA,CTA
VTLGEVPAA

SEQ ID NO: 39624 - protein, 9 aa, Homo sapiens
  misc_feature: Table A; Target 39624; HLA-B*56:01; MAGEA3,MAGEA6; ENSG00000221867,ENSG00000197172; CTA,CTA
VTLGEVPAA

SEQ ID NO: 39625 - protein, 9 aa, Homo sapiens
  misc_feature: Table A; Target 39625; HLA-A*24:02; MAGEA3,MAGEA6; ENSG00000221867,ENSG00000197172; CTA,CTA
VVGNWQYFF

SEQ ID NO: 39626 - protein, 9 aa, Homo sapiens
  misc_feature: Table A; Target 39626; HLA-B*49:01; MAGEA3,MAGEA6; ENSG00000221867,ENSG00000197172; CTA,CTA
WEELSVLEV

SEQ ID NO: 39627 - protein, 9 aa, Homo sapiens
  misc_feature: Table A; Target 39627; HLA-A*29:02; MAGEA3,MAGEA6; ENSG00000221867,ENSG00000197172; CTA,CTA
YFFPVIFSK

SEQ ID NO: 39628 - protein, 10 aa, Homo sapiens
  misc_feature: Table A; Target 39628; HLA-A*68:02; MAGEA3,MAGEA6; ENSG00000221867,ENSG00000197172; CTA,CTA
YFFPVIFSKA

SEQ ID NO: 39629 - protein, 9 aa, Homo sapiens
  misc_feature: Table A; Target 39629; HLA-A*02:07; MAGEA3,MAGEA6; ENSG00000221867,ENSG00000197172; CTA,CTA
YIFATCLGL

SEQ ID NO: 39630 - protein, 9 aa, Homo sapiens
  misc_feature: Table A; Target 39630; HLA-B*13:02; MAGEA3,MAGEA6; ENSG00000221867,ENSG00000197172; CTA,CTA
YIFATCLGL

SEQ ID NO: 39631 - protein, 8 aa, Homo sapiens
  misc_feature: Table A; Target 39631; HLA-B*35:01; MAGEA3,MAGEA6; ENSG00000221867,ENSG00000197172; CTA,CTA
YPLWSQSY

SEQ ID NO: 39632 - protein, 8 aa, Homo sapiens
  misc_feature: Table A; Target 39632; HLA-B*51:01; MAGEA3,MAGEA6; ENSG00000221867,ENSG00000197172; CTA,CTA
YPLWSQSY

SEQ ID NO: 39633 - protein, 9 aa, Homo sapiens
  misc_feature: Table A; Target 39633; HLA-C*06:02; MAGEA3,MAGEA6; ENSG00000221867,ENSG00000197172; CTA,CTA
YRAREPVTK

SEQ ID NO: 39634 - protein, 8 aa, Homo sapiens
  misc_feature: Table A; Target 39634; HLA-B*08:01; MAGEA3,MAGEA6; ENSG00000221867,ENSG00000197172; CTA,CTA
YVKVLHHM

SEQ ID NO: 39635 - protein, 9 aa, Homo sapiens
  misc_feature: Table A; Target 39635; HLA-A*68:02; MAGEA3,MAGEA6; ENSG00000221867,ENSG00000197172; CTA,CTA
YVKVLHHMV

SEQ ID NO: 39636 - protein, 8 aa, Homo sapiens
  misc_feature: Table A; Target 39636; HLA-C*03:03; MAGEA3,MAGEA6,MAGEA8; ENSG00000221867,ENSG00000197172,ENSG00000156009; CTA,CTA,TAA
AASSSSTL

SEQ ID NO: 39637 - protein, 8 aa, Homo sapiens
  misc_feature: Table A; Target 39637; HLA-C*03:04; MAGEA3,MAGEA6,MAGEA8; ENSG00000221867,ENSG00000197172,ENSG00000156009; CTA,CTA,TAA
AASSSSTL

SEQ ID NO: 39638 - protein, 8 aa, Homo sapiens
  misc_feature: Table A; Target 39638; HLA-C*05:01; MAGEA3,MAGEA6,MAGEA8; ENSG00000221867,ENSG00000197172,ENSG00000156009; CTA,CTA,TAA
AASSSSTL

SEQ ID NO: 39639 - protein, 8 aa, Homo sapiens
  misc_feature: Table A; Target 39639; HLA-C*16:01; MAGEA3,MAGEA6,MAGEA8; ENSG00000221867,ENSG00000197172,ENSG00000156009; CTA,CTA,TAA
AASSSSTL

SEQ ID NO: 39640 - protein, 8 aa, Homo sapiens
  misc_feature: Table A; Target 39640; HLA-B*15:03; MAGEA3,MAGEA6,MAGEA8; ENSG00000221867,ENSG00000197172,ENSG00000156009; CTA,CTA,TAA
VQENYLEY

SEQ ID NO: 39641 - protein, 8 aa, Homo sapiens
  misc_feature: Table A; Target 39641; HLA-A*01:01; MAGEA3,MAGEA6,MAGEA8,MAGEA9; ENSG00000221867,ENSG00000197172,ENSG00000156009,ENSG00000123584; CTA,CTA,TAA,CTA
VQENYLEY

SEQ ID NO: 39642 - protein, 8 aa, Homo sapiens
  misc_feature: Table A; Target 39642; HLA-B*39:01; MAGEA3,MAGEA6,MAGEA8,MAGEA9; ENSG00000221867,ENSG00000197172,ENSG00000156009,ENSG00000123584; CTA,CTA,TAA,CTA
VQENYLEY

SEQ ID NO: 39643 - protein, 8 aa, Homo sapiens
  misc_feature: Table A; Target 39643; HLA-B*37:01; MAGEA3,MAGEA9; ENSG00000221867,ENSG00000123584; CTA,CTA
AELVHFLL

SEQ ID NO: 39644 - protein, 8 aa, Homo sapiens
  misc_feature: Table A; Target 39644; HLA-B*44:02; MAGEA3,MAGEA9; ENSG00000221867,ENSG00000123584; CTA,CTA
AELVHFLL

SEQ ID NO: 39645 - protein, 9 aa, Homo sapiens
  misc_feature: Table A; Target 39645; HLA-A*02:01; MAGEA3,MAGEA9; ENSG00000221867,ENSG00000123584; CTA,CTA
KVAELVHFL

SEQ ID NO: 39646 - protein, 9 aa, Homo sapiens
  misc_feature: Table A; Target 39646; HLA-A*02:03; MAGEA3,MAGEA9; ENSG00000221867,ENSG00000123584; CTA,CTA
KVAELVHFL

SEQ ID NO: 39647 - protein, 9 aa, Homo sapiens
  misc_feature: Table A; Target 39647; HLA-A*02:04; MAGEA3,MAGEA9; ENSG00000221867,ENSG00000123584; CTA,CTA
KVAELVHFL

SEQ ID NO: 39648 - protein, 9 aa, Homo sapiens
  misc_feature: Table A; Target 39648; HLA-A*02:07; MAGEA3,MAGEA9; ENSG00000221867,ENSG00000123584; CTA,CTA
KVAELVHFL

SEQ ID NO: 39649 - protein, 9 aa, Homo sapiens
  misc_feature: Table A; Target 39649; HLA-A*31:01; MAGEA3,MAGEA9; ENSG00000221867,ENSG00000123584; CTA,CTA
KVAELVHFL

SEQ ID NO: 39650 - protein, 9 aa, Homo sapiens
  misc_feature: Table A; Target 39650; HLA-A*32:01; MAGEA3,MAGEA9; ENSG00000221867,ENSG00000123584; CTA,CTA
KVAELVHFL

SEQ ID NO: 39651 - protein, 9 aa, Homo sapiens
  misc_feature: Table A; Target 39651; HLA-B*27:05; MAGEA3,MAGEA9; ENSG00000221867,ENSG00000123584; CTA,CTA
KVAELVHFL

SEQ ID NO: 39652 - protein, 9 aa, Homo sapiens
  misc_feature: Table A; Target 39652; HLA-B*57:01; MAGEA3,MAGEA9; ENSG00000221867,ENSG00000123584; CTA,CTA
KVAELVHFL

SEQ ID NO: 39653 - protein, 9 aa, Homo sapiens
  misc_feature: Table A; Target 39653; HLA-B*58:01; MAGEA3,MAGEA9; ENSG00000221867,ENSG00000123584; CTA,CTA
KVAELVHFL

SEQ ID NO: 39654 - protein, 10 aa, Homo sapiens
  misc_feature: Table A; Target 39654; HLA-A*02:04; MAGEA3,MAGEA9; ENSG00000221867,ENSG00000123584; CTA,CTA
KVAELVHFLL

SEQ ID NO: 39655 - protein, 10 aa, Homo sapiens
  misc_feature: Table A; Target 39655; HLA-A*02:07; MAGEA3,MAGEA9; ENSG00000221867,ENSG00000123584; CTA,CTA
KVAELVHFLL

SEQ ID NO: 39656 - protein, 10 aa, Homo sapiens
  misc_feature: Table A; Target 39656; HLA-A*31:01; MAGEA3,MAGEA9; ENSG00000221867,ENSG00000123584; CTA,CTA
KVAELVHFLL

SEQ ID NO: 39657 - protein, 10 aa, Homo sapiens
  misc_feature: Table A; Target 39657; HLA-A*68:02; MAGEA3,MAGEA9; ENSG00000221867,ENSG00000123584; CTA,CTA
KVAELVHFLL

SEQ ID NO: 39658 - protein, 8 aa, Homo sapiens
  misc_feature: Table A; Target 39658; HLA-C*05:01; MAGEA3,MAGEA9; ENSG00000221867,ENSG00000123584; CTA,CTA
VAELVHFL

SEQ ID NO: 39659 - protein, 9 aa, Homo sapiens
  misc_feature: Table A; Target 39659; HLA-A*02:07; MAGEA3,MAGEA9; ENSG00000221867,ENSG00000123584; CTA,CTA
VAELVHFLL

SEQ ID NO: 39660 - protein, 9 aa, Homo sapiens
  misc_feature: Table A; Target 39660; HLA-B*15:03; MAGEA4; ENSG00000147381; TAA
AAVSSSSPL

SEQ ID NO: 39661 - protein, 9 aa, Homo sapiens
  misc_feature: Table A; Target 39661; HLA-C*05:01; MAGEA4; ENSG00000147381; TAA
AAVSSSSPL

SEQ ID NO: 39662 - protein, 9 aa, Homo sapiens
  misc_feature: Table A; Target 39662; HLA-C*07:04; MAGEA4; ENSG00000147381; TAA
AAVSSSSPL

SEQ ID NO: 39663 - protein, 9 aa, Homo sapiens
  misc_feature: Table A; Target 39663; HLA-C*16:02; MAGEA4; ENSG00000147381; TAA
AAVSSSSPL

SEQ ID NO: 39664 - protein, 8 aa, Homo sapiens
  misc_feature: Table A; Target 39664; HLA-A*30:01; MAGEA4; ENSG00000147381; TAA
AEMLERVI

SEQ ID NO: 39665 - protein, 8 aa, Homo sapiens
  misc_feature: Table A; Target 39665; HLA-B*13:02; MAGEA4; ENSG00000147381; TAA
AEMLERVI

SEQ ID NO: 39666 - protein, 8 aa, Homo sapiens
  misc_feature: Table A; Target 39666; HLA-B*40:02; MAGEA4; ENSG00000147381; TAA
AEMLERVI

SEQ ID NO: 39667 - protein, 9 aa, Homo sapiens
  misc_feature: Table A; Target 39667; HLA-B*44:02; MAGEA4; ENSG00000147381; TAA
AEMLERVIK

SEQ ID NO: 39668 - protein, 11 aa, Homo sapiens
  misc_feature: Table A; Target 39668; HLA-A*30:01; MAGEA4; ENSG00000147381; TAA
AEMLERVIKNY

SEQ ID NO: 39669 - protein, 11 aa, Homo sapiens
  misc_feature: Table A; Target 39669; HLA-C*12:03; MAGEA4; ENSG00000147381; TAA
AEMLERVIKNY

SEQ ID NO: 39670 - protein, 10 aa, Homo sapiens
  misc_feature: Table A; Target 39670; HLA-A*30:01; MAGEA4; ENSG00000147381; TAA
AESAGPPQSP

SEQ ID NO: 39671 - protein, 10 aa, Homo sapiens
  misc_feature: Table A; Target 39671; HLA-B*27:05; MAGEA4; ENSG00000147381; TAA
AESAGPPQSP

SEQ ID NO: 39672 - protein, 8 aa, Homo sapiens
  misc_feature: Table A; Target 39672; HLA-B*49:01; MAGEA4; ENSG00000147381; TAA
AESLFREA

SEQ ID NO: 39673 - protein, 9 aa, Homo sapiens
  misc_feature: Table A; Target 39673; HLA-C*07:02; MAGEA4; ENSG00000147381; TAA
AESLFREAL

SEQ ID NO: 39674 - protein, 9 aa, Homo sapiens
  misc_feature: Table A; Target 39674; HLA-C*16:01; MAGEA4; ENSG00000147381; TAA
AESLFREAL

SEQ ID NO: 39675 - protein, 8 aa, Homo sapiens
  misc_feature: Table A; Target 39675; HLA-B*40:01; MAGEA4; ENSG00000147381; TAA
AETSYVKV

SEQ ID NO: 39676 - protein, 8 aa, Homo sapiens
  misc_feature: Table A; Target 39676; HLA-B*40:02; MAGEA4; ENSG00000147381; TAA
AETSYVKV

SEQ ID NO: 39677 - protein, 8 aa, Homo sapiens
  misc_feature: Table A; Target 39677; HLA-B*44:03; MAGEA4; ENSG00000147381; TAA
AETSYVKV

SEQ ID NO: 39678 - protein, 8 aa, Homo sapiens
  misc_feature: Table A; Target 39678; HLA-C*16:02; MAGEA4; ENSG00000147381; TAA
AETSYVKV

SEQ ID NO: 39679 - protein, 9 aa, Homo sapiens
  misc_feature: Table A; Target 39679; HLA-C*06:02; MAGEA4; ENSG00000147381; TAA
AETSYVKVL

SEQ ID NO: 39680 - protein, 10 aa, Homo sapiens
  misc_feature: Table A; Target 39680; HLA-C*04:01; MAGEA4; ENSG00000147381; TAA
AGPPQSPQGA

SEQ ID NO: 39681 - protein, 10 aa, Homo sapiens
  misc_feature: Table A; Target 39681; HLA-C*07:02; MAGEA4; ENSG00000147381; TAA
AGPPQSPQGA

SEQ ID NO: 39682 - protein, 8 aa, Homo sapiens
  misc_feature: Table A; Target 39682; HLA-B*13:02; MAGEA4; ENSG00000147381; TAA
ALAETSYV

SEQ ID NO: 39683 - protein, 8 aa, Homo sapiens
  misc_feature: Table A; Target 39683; HLA-C*05:01; MAGEA4; ENSG00000147381; TAA
ALAETSYV

SEQ ID NO: 39684 - protein, 9 aa, Homo sapiens
  misc_feature: Table A; Target 39684; HLA-A*02:01; MAGEA4; ENSG00000147381; TAA
ALAETSYVK

SEQ ID NO: 39685 - protein, 9 aa, Homo sapiens
  misc_feature: Table A; Target 39685; HLA-A*30:02; MAGEA4; ENSG00000147381; TAA
ALAETSYVK

SEQ ID NO: 39686 - protein, 9 aa, Homo sapiens
  misc_feature: Table A; Target 39686; HLA-A*32:01; MAGEA4; ENSG00000147381; TAA
ALAETSYVK

SEQ ID NO: 39687 - protein, 9 aa, Homo sapiens
  misc_feature: Table A; Target 39687; HLA-B*46:01; MAGEA4; ENSG00000147381; TAA
ALAETSYVK

SEQ ID NO: 39688 - protein, 9 aa, Homo sapiens
  misc_feature: Table A; Target 39688; HLA-C*01:02; MAGEA4; ENSG00000147381; TAA
ALAETSYVK

SEQ ID NO: 39689 - protein, 9 aa, Homo sapiens
  misc_feature: Table A; Target 39689; HLA-C*06:02; MAGEA4; ENSG00000147381; TAA
ALAETSYVK

SEQ ID NO: 39690 - protein, 10 aa, Homo sapiens
  misc_feature: Table A; Target 39690; HLA-B*13:02; MAGEA4; ENSG00000147381; TAA
ALAETSYVKV

SEQ ID NO: 39691 - protein, 11 aa, Homo sapiens
  misc_feature: Table A; Target 39691; HLA-A*02:01; MAGEA4; ENSG00000147381; TAA
ALAETSYVKVL

SEQ ID NO: 39692 - protein, 9 aa, Homo sapiens
  misc_feature: Table A; Target 39692; HLA-C*06:02; MAGEA4; ENSG00000147381; TAA
ALLEEEEGV

SEQ ID NO: 39693 - protein, 8 aa, Homo sapiens
  misc_feature: Table A; Target 39693; HLA-A*02:07; MAGEA4; ENSG00000147381; TAA
ALPTTISF

SEQ ID NO: 39694 - protein, 8 aa, Homo sapiens
  misc_feature: Table A; Target 39694; HLA-A*24:02; MAGEA4; ENSG00000147381; TAA
ALPTTISF

SEQ ID NO: 39695 - protein, 8 aa, Homo sapiens
  misc_feature: Table A; Target 39695; HLA-B*08:01; MAGEA4; ENSG00000147381; TAA
ALPTTISF

SEQ ID NO: 39696 - protein, 8 aa, Homo sapiens
  misc_feature: Table A; Target 39696; HLA-B*15:03; MAGEA4; ENSG00000147381; TAA
ALPTTISF

SEQ ID NO: 39697 - protein, 9 aa, Homo sapiens
  misc_feature: Table A; Target 39697; HLA-A*02:03; MAGEA4; ENSG00000147381; TAA
ALPTTISFT

SEQ ID NO: 39698 - protein, 9 aa, Homo sapiens
  misc_feature: Table A; Target 39698; HLA-A*02:07; MAGEA4; ENSG00000147381; TAA
ALPTTISFT

SEQ ID NO: 39699 - protein, 9 aa, Homo sapiens
  misc_feature: Table A; Target 39699; HLA-B*08:01; MAGEA4; ENSG00000147381; TAA
ALSNKVDEL

SEQ ID NO: 39700 - protein, 9 aa, Homo sapiens
  misc_feature: Table A; Target 39700; HLA-B*27:05; MAGEA4; ENSG00000147381; TAA
ALSNKVDEL

SEQ ID NO: 39701 - protein, 9 aa, Homo sapiens
  misc_feature: Table A; Target 39701; HLA-B*39:01; MAGEA4; ENSG00000147381; TAA
ALSNKVDEL

SEQ ID NO: 39702 - protein, 9 aa, Homo sapiens
  misc_feature: Table A; Target 39702; HLA-C*14:02; MAGEA4; ENSG00000147381; TAA
ALSNKVDEL

SEQ ID NO: 39703 - protein, 10 aa, Homo sapiens
  misc_feature: Table A; Target 39703; HLA-B*56:01; MAGEA4; ENSG00000147381; TAA
APTTEEQEAA

SEQ ID NO: 39704 - protein, 9 aa, Homo sapiens
  misc_feature: Table A; Target 39704; HLA-B*27:05; MAGEA4; ENSG00000147381; TAA
AQAPTTEEQ

SEQ ID NO: 39705 - protein, 9 aa, Homo sapiens
  misc_feature: Table A; Target 39705; HLA-B*39:01; MAGEA4; ENSG00000147381; TAA
AQAPTTEEQ

SEQ ID NO: 39706 - protein, 11 aa, Homo sapiens
  misc_feature: Table A; Target 39706; HLA-B*13:02; MAGEA4; ENSG00000147381; TAA
AQAPTTEEQEA

SEQ ID NO: 39707 - protein, 11 aa, Homo sapiens
  misc_feature: Table A; Target 39707; HLA-B*38:01; MAGEA4; ENSG00000147381; TAA
AQAPTTEEQEA

SEQ ID NO: 39708 - protein, 11 aa, Homo sapiens
  misc_feature: Table A; Target 39708; HLA-B*39:01; MAGEA4; ENSG00000147381; TAA
AQAPTTEEQEA

SEQ ID NO: 39709 - protein, 8 aa, Homo sapiens
  misc_feature: Table A; Target 39709; HLA-C*05:01; MAGEA4; ENSG00000147381; TAA
AQEEALGL

SEQ ID NO: 39710 - protein, 9 aa, Homo sapiens
  misc_feature: Table A; Target 39710; HLA-C*05:01; MAGEA4; ENSG00000147381; TAA
AQEEALGLV

SEQ ID NO: 39711 - protein, 10 aa, Homo sapiens
  misc_feature: Table A; Target 39711; HLA-A*11:01; MAGEA4; ENSG00000147381; TAA
ASALPTTISF

SEQ ID NO: 39712 - protein, 10 aa, Homo sapiens
  misc_feature: Table A; Target 39712; HLA-A*25:01; MAGEA4; ENSG00000147381; TAA
ASALPTTISF

SEQ ID NO: 39713 - protein, 10 aa, Homo sapiens
  misc_feature: Table A; Target 39713; HLA-B*15:01; MAGEA4; ENSG00000147381; TAA
ASALPTTISF

SEQ ID NO: 39714 - protein, 10 aa, Homo sapiens
  misc_feature: Table A; Target 39714; HLA-B*15:03; MAGEA4; ENSG00000147381; TAA
ASALPTTISF

SEQ ID NO: 39715 - protein, 10 aa, Homo sapiens
  misc_feature: Table A; Target 39715; HLA-C*02:02; MAGEA4; ENSG00000147381; TAA
ASALPTTISF

SEQ ID NO: 39716 - protein, 9 aa, Homo sapiens
  misc_feature: Table A; Target 39716; HLA-C*16:01; MAGEA4; ENSG00000147381; TAA
ASESLKMIF

SEQ ID NO: 39717 - protein, 9 aa, Homo sapiens
  misc_feature: Table A; Target 39717; HLA-C*16:02; MAGEA4; ENSG00000147381; TAA
ASNTYTLVT

SEQ ID NO: 39718 - protein, 8 aa, Homo sapiens
  misc_feature: Table A; Target 39718; HLA-B*37:01; MAGEA4; ENSG00000147381; TAA
AVSSSSPL

SEQ ID NO: 39719 - protein, 9 aa, Homo sapiens
  misc_feature: Table A; Target 39719; HLA-A*02:04; MAGEA4; ENSG00000147381; TAA
AVSSSSPLV

SEQ ID NO: 39720 - protein, 9 aa, Homo sapiens
  misc_feature: Table A; Target 39720; HLA-A*68:02; MAGEA4; ENSG00000147381; TAA
AVSSSSPLV

SEQ ID NO: 39721 - protein, 9 aa, Homo sapiens
  misc_feature: Table A; Target 39721; HLA-B*38:01; MAGEA4; ENSG00000147381; TAA
AVSSSSPLV

SEQ ID NO: 39722 - protein, 9 aa, Homo sapiens
  misc_feature: Table A; Target 39722; HLA-C*04:01; MAGEA4; ENSG00000147381; TAA
AVSSSSPLV

SEQ ID NO: 39723 - protein, 9 aa, Homo sapiens
  misc_feature: Table A; Target 39723; HLA-C*07:04; MAGEA4; ENSG00000147381; TAA
AVSSSSPLV

SEQ ID NO: 39724 - protein, 9 aa, Homo sapiens
  misc_feature: Table A; Target 39724; HLA-C*12:03; MAGEA4; ENSG00000147381; TAA
AVSSSSPLV

SEQ ID NO: 39725 - protein, 9 aa, Homo sapiens
  misc_feature: Table A; Target 39725; HLA-C*16:04; MAGEA4; ENSG00000147381; TAA
AVSSSSPLV

SEQ ID NO: 39726 - protein, 11 aa, Homo sapiens
  misc_feature: Table A; Target 39726; HLA-A*31:01; MAGEA4; ENSG00000147381; TAA
AVSSSSPLVPG

SEQ ID NO: 39727 - protein, 9 aa, Homo sapiens
  misc_feature: Table A; Target 39727; HLA-A*33:01; MAGEA4; ENSG00000147381; TAA
DAESLFREA

SEQ ID NO: 39728 - protein, 8 aa, Homo sapiens
  misc_feature: Table A; Target 39728; HLA-B*08:01; MAGEA4; ENSG00000147381; TAA
DELAHFLL

SEQ ID NO: 39729 - protein, 8 aa, Homo sapiens
  misc_feature: Table A; Target 39729; HLA-B*44:03; MAGEA4; ENSG00000147381; TAA
DELAHFLL

SEQ ID NO: 39730 - protein, 8 aa, Homo sapiens
  misc_feature: Table A; Target 39730; HLA-C*07:01; MAGEA4; ENSG00000147381; TAA
DELAHFLL

SEQ ID NO: 39731 - protein, 10 aa, Homo sapiens
  misc_feature: Table A; Target 39731; HLA-C*07:01; MAGEA4; ENSG00000147381; TAA
DGLLGNNQIF

SEQ ID NO: 39732 - protein, 8 aa, Homo sapiens
  misc_feature: Table A; Target 39732; HLA-B*15:03; MAGEA4; ENSG00000147381; TAA
DGREHTVY

SEQ ID NO: 39733 - protein, 8 aa, Homo sapiens
  misc_feature: Table A; Target 39733; HLA-C*07:01; MAGEA4; ENSG00000147381; TAA
DGREHTVY

SEQ ID NO: 39734 - protein, 9 aa, Homo sapiens
  misc_feature: Table A; Target 39734; HLA-A*25:01; MAGEA4; ENSG00000147381; TAA
DPASNTYTL

SEQ ID NO: 39735 - protein, 9 aa, Homo sapiens
  misc_feature: Table A; Target 39735; HLA-A*33:01; MAGEA4; ENSG00000147381; TAA
DPASNTYTL

SEQ ID NO: 39736 - protein, 9 aa, Homo sapiens
  misc_feature: Table A; Target 39736; HLA-A*68:02; MAGEA4; ENSG00000147381; TAA
DPASNTYTL

SEQ ID NO: 39737 - protein, 9 aa, Homo sapiens
  misc_feature: Table A; Target 39737; HLA-B*08:01; MAGEA4; ENSG00000147381; TAA
DPASNTYTL

SEQ ID NO: 39738 - protein, 9 aa, Homo sapiens
  misc_feature: Table A; Target 39738; HLA-B*54:01; MAGEA4; ENSG00000147381; TAA
DPASNTYTL

SEQ ID NO: 39739 - protein, 9 aa, Homo sapiens
  misc_feature: Table A; Target 39739; HLA-C*07:06; MAGEA4; ENSG00000147381; TAA
DPASNTYTL

SEQ ID NO: 39740 - protein, 11 aa, Homo sapiens
  misc_feature: Table A; Target 39740; HLA-B*27:02; MAGEA4; ENSG00000147381; TAA
DPASNTYTLVT

SEQ ID NO: 39741 - protein, 10 aa, Homo sapiens
  misc_feature: Table A; Target 39741; HLA-A*33:03; MAGEA4; ENSG00000147381; TAA
DVKEVDPASN

SEQ ID NO: 39742 - protein, 11 aa, Homo sapiens
  misc_feature: Table A; Target 39742; HLA-A*68:02; MAGEA4; ENSG00000147381; TAA
EAALLEEEEGV

SEQ ID NO: 39743 - protein, 11 aa, Homo sapiens
  misc_feature: Table A; Target 39743; HLA-B*27:02; MAGEA4; ENSG00000147381; TAA
EAALLEEEEGV

SEQ ID NO: 39744 - protein, 11 aa, Homo sapiens
  misc_feature: Table A; Target 39744; HLA-C*07:01; MAGEA4; ENSG00000147381; TAA
EAALLEEEEGV

SEQ ID NO: 39745 - protein, 10 aa, Homo sapiens
  misc_feature: Table A; Target 39745; HLA-A*25:01; MAGEA4; ENSG00000147381; TAA
EALSNKVDEL

SEQ ID NO: 39746 - protein, 10 aa, Homo sapiens
  misc_feature: Table A; Target 39746; HLA-A*33:03; MAGEA4; ENSG00000147381; TAA
EALSNKVDEL

SEQ ID NO: 39747 - protein, 10 aa, Homo sapiens
  misc_feature: Table A; Target 39747; HLA-A*68:01; MAGEA4; ENSG00000147381; TAA
EALSNKVDEL

SEQ ID NO: 39748 - protein, 9 aa, Homo sapiens
  misc_feature: Table A; Target 39748; HLA-A*33:01; MAGEA4; ENSG00000147381; TAA
EAQEEALGL

SEQ ID NO: 39749 - protein, 9 aa, Homo sapiens
  misc_feature: Table A; Target 39749; HLA-A*33:03; MAGEA4; ENSG00000147381; TAA
EAQEEALGL

SEQ ID NO: 39750 - protein, 9 aa, Homo sapiens
  misc_feature: Table A; Target 39750; HLA-C*05:01; MAGEA4; ENSG00000147381; TAA
EAQEEALGL

SEQ ID NO: 39751 - protein, 9 aa, Homo sapiens
  misc_feature: Table A; Target 39751; HLA-B*44:02; MAGEA4; ENSG00000147381; TAA
EEALGLVGA

SEQ ID NO: 39752 - protein, 10 aa, Homo sapiens
  misc_feature: Table A; Target 39752; HLA-B*07:02; MAGEA4; ENSG00000147381; TAA
EEALGLVGAQ

SEQ ID NO: 39753 - protein, 10 aa, Homo sapiens
  misc_feature: Table A; Target 39753; HLA-C*07:01; MAGEA4; ENSG00000147381; TAA
EEALGLVGAQ

SEQ ID NO: 39754 - protein, 11 aa, Homo sapiens
  misc_feature: Table A; Target 39754; HLA-A*30:01; MAGEA4; ENSG00000147381; TAA
EEALGLVGAQA

SEQ ID NO: 39755 - protein, 11 aa, Homo sapiens
  misc_feature: Table A; Target 39755; HLA-B*44:02; MAGEA4; ENSG00000147381; TAA
EEALGLVGAQA

SEQ ID NO: 39756 - protein, 11 aa, Homo sapiens
  misc_feature: Table A; Target 39756; HLA-B*40:01; MAGEA4; ENSG00000147381; TAA
EEGVEAQEEAL

SEQ ID NO: 39757 - protein, 9 aa, Homo sapiens
  misc_feature: Table A; Target 39757; HLA-A*29:02; MAGEA4; ENSG00000147381; TAA
EELGVMGVY

SEQ ID NO: 39758 - protein, 9 aa, Homo sapiens
  misc_feature: Table A; Target 39758; HLA-A*30:01; MAGEA4; ENSG00000147381; TAA
EELGVMGVY

SEQ ID NO: 39759 - protein, 9 aa, Homo sapiens
  misc_feature: Table A; Target 39759; HLA-A*33:03; MAGEA4; ENSG00000147381; TAA
EELGVMGVY

SEQ ID NO: 39760 - protein, 9 aa, Homo sapiens
  misc_feature: Table A; Target 39760; HLA-B*27:05; MAGEA4; ENSG00000147381; TAA
EELGVMGVY

SEQ ID NO: 39761 - protein, 9 aa, Homo sapiens
  misc_feature: Table A; Target 39761; HLA-B*35:01; MAGEA4; ENSG00000147381; TAA
EELGVMGVY

SEQ ID NO: 39762 - protein, 9 aa, Homo sapiens
  misc_feature: Table A; Target 39762; HLA-B*39:01; MAGEA4; ENSG00000147381; TAA
EELGVMGVY

SEQ ID NO: 39763 - protein, 9 aa, Homo sapiens
  misc_feature: Table A; Target 39763; HLA-B*40:02; MAGEA4; ENSG00000147381; TAA
EELGVMGVY

SEQ ID NO: 39764 - protein, 9 aa, Homo sapiens
  misc_feature: Table A; Target 39764; HLA-B*49:01; MAGEA4; ENSG00000147381; TAA
EELGVMGVY

SEQ ID NO: 39765 - protein, 9 aa, Homo sapiens
  misc_feature: Table A; Target 39765; HLA-C*07:01; MAGEA4; ENSG00000147381; TAA
EELGVMGVY

SEQ ID NO: 39766 - protein, 9 aa, Homo sapiens
  misc_feature: Table A; Target 39766; HLA-C*07:06; MAGEA4; ENSG00000147381; TAA
EELGVMGVY

SEQ ID NO: 39767 - protein, 8 aa, Homo sapiens
  misc_feature: Table A; Target 39767; HLA-B*18:01; MAGEA4; ENSG00000147381; TAA
EEVPAAES

SEQ ID NO: 39768 - protein, 9 aa, Homo sapiens
  misc_feature: Table A; Target 39768; HLA-A*68:01; MAGEA4; ENSG00000147381; TAA
EHTVYGEPR

SEQ ID NO: 39769 - protein, 9 aa, Homo sapiens
  misc_feature: Table A; Target 39769; HLA-C*07:06; MAGEA4; ENSG00000147381; TAA
EHTVYGEPR

SEQ ID NO: 39770 - protein, 9 aa, Homo sapiens
  misc_feature: Table A; Target 39770; HLA-A*33:01; MAGEA4; ENSG00000147381; TAA
EHVVRVNAR

SEQ ID NO: 39771 - protein, 9 aa, Homo sapiens
  misc_feature: Table A; Target 39771; HLA-A*26:01; MAGEA4; ENSG00000147381; TAA
EIWEELGVM

SEQ ID NO: 39772 - protein, 11 aa, Homo sapiens
  misc_feature: Table A; Target 39772; HLA-A*02:01; MAGEA4; ENSG00000147381; TAA
EIWEELGVMGV

SEQ ID NO: 39773 - protein, 11 aa, Homo sapiens
  misc_feature: Table A; Target 39773; HLA-A*02:07; MAGEA4; ENSG00000147381; TAA
EIWEELGVMGV

SEQ ID NO: 39774 - protein, 9 aa, Homo sapiens
  misc_feature: Table A; Target 39774; HLA-A*03:01; MAGEA4; ENSG00000147381; TAA
ELAHFLLRK

SEQ ID NO: 39775 - protein, 10 aa, Homo sapiens
  misc_feature: Table A; Target 39775; HLA-A*26:01; MAGEA4; ENSG00000147381; TAA
ELAHFLLRKY

SEQ ID NO: 39776 - protein, 10 aa, Homo sapiens
  misc_feature: Table A; Target 39776; HLA-A*29:02; MAGEA4; ENSG00000147381; TAA
ELAHFLLRKY

SEQ ID NO: 39777 - protein, 8 aa, Homo sapiens
  misc_feature: Table A; Target 39777; HLA-B*18:01; MAGEA4; ENSG00000147381; TAA
ELGVMGVY

SEQ ID NO: 39778 - protein, 8 aa, Homo sapiens
  misc_feature: Table A; Target 39778; HLA-B*39:01; MAGEA4; ENSG00000147381; TAA
ELGVMGVY

SEQ ID NO: 39779 - protein, 8 aa, Homo sapiens
  misc_feature: Table A; Target 39779; HLA-C*12:03; MAGEA4; ENSG00000147381; TAA
ELGVMGVY

SEQ ID NO: 39780 - protein, 10 aa, Homo sapiens
  misc_feature: Table A; Target 39780; HLA-C*07:01; MAGEA4; ENSG00000147381; TAA
ELGVMGVYDG

SEQ ID NO: 39781 - protein, 8 aa, Homo sapiens
  misc_feature: Table A; Target 39781; HLA-C*16:01; MAGEA4; ENSG00000147381; TAA
ELVTKAEM

SEQ ID NO: 39782 - protein, 9 aa, Homo sapiens
  misc_feature: Table A; Target 39782; HLA-A*24:02; MAGEA4; ENSG00000147381; TAA
ELVTKAEML

SEQ ID NO: 39783 - protein, 11 aa, Homo sapiens
  misc_feature: Table A; Target 39783; HLA-A*33:03; MAGEA4; ENSG00000147381; TAA
ELVTKAEMLER

SEQ ID NO: 39784 - protein, 11 aa, Homo sapiens
  misc_feature: Table A; Target 39784; HLA-A*68:01; MAGEA4; ENSG00000147381; TAA
ELVTKAEMLER

SEQ ID NO: 39785 - protein, 10 aa, Homo sapiens
  misc_feature: Table A; Target 39785; HLA-A*26:01; MAGEA4; ENSG00000147381; TAA
EMLERVIKNY

SEQ ID NO: 39786 - protein, 10 aa, Homo sapiens
  misc_feature: Table A; Target 39786; HLA-B*44:03; MAGEA4; ENSG00000147381; TAA
EMLERVIKNY

SEQ ID NO: 39787 - protein, 9 aa, Homo sapiens
  misc_feature: Table A; Target 39787; HLA-A*33:03; MAGEA4; ENSG00000147381; TAA
ENYLEYRQV

SEQ ID NO: 39788 - protein, 9 aa, Homo sapiens
  misc_feature: Table A; Target 39788; HLA-B*51:01; MAGEA4; ENSG00000147381; TAA
ENYLEYRQV

SEQ ID NO: 39789 - protein, 11 aa, Homo sapiens
  misc_feature: Table A; Target 39789; HLA-C*07:01; MAGEA4; ENSG00000147381; TAA
ESAGPPQSPQG

SEQ ID NO: 39790 - protein, 11 aa, Homo sapiens
  misc_feature: Table A; Target 39790; HLA-A*33:03; MAGEA4; ENSG00000147381; TAA
ESLFREALSNK

SEQ ID NO: 39791 - protein, 8 aa, Homo sapiens
  misc_feature: Table A; Target 39791; HLA-C*12:03; MAGEA4; ENSG00000147381; TAA
ETSYVKVL

SEQ ID NO: 39792 - protein, 10 aa, Homo sapiens
  misc_feature: Table A; Target 39792; HLA-A*26:01; MAGEA4; ENSG00000147381; TAA
ETSYVKVLEH

SEQ ID NO: 39793 - protein, 10 aa, Homo sapiens
  misc_feature: Table A; Target 39793; HLA-A*33:03; MAGEA4; ENSG00000147381; TAA
ETSYVKVLEH

SEQ ID NO: 39794 - protein, 9 aa, Homo sapiens
  misc_feature: Table A; Target 39794; HLA-A*11:01; MAGEA4; ENSG00000147381; TAA
EVDPASNTY

SEQ ID NO: 39795 - protein, 9 aa, Homo sapiens
  misc_feature: Table A; Target 39795; HLA-B*27:05; MAGEA4; ENSG00000147381; TAA
EVDPASNTY

SEQ ID NO: 39796 - protein, 9 aa, Homo sapiens
  misc_feature: Table A; Target 39796; HLA-C*01:02; MAGEA4; ENSG00000147381; TAA
EVDPASNTY

SEQ ID NO: 39797 - protein, 9 aa, Homo sapiens
  misc_feature: Table A; Target 39797; HLA-C*03:04; MAGEA4; ENSG00000147381; TAA
EVDPASNTY

SEQ ID NO: 39798 - protein, 9 aa, Homo sapiens
  misc_feature: Table A; Target 39798; HLA-C*04:01; MAGEA4; ENSG00000147381; TAA
EVDPASNTY

SEQ ID NO: 39799 - protein, 9 aa, Homo sapiens
  misc_feature: Table A; Target 39799; HLA-C*16:01; MAGEA4; ENSG00000147381; TAA
EVDPASNTY

SEQ ID NO: 39800 - protein, 10 aa, Homo sapiens
  misc_feature: Table A; Target 39800; HLA-A*01:01; MAGEA4; ENSG00000147381; TAA
EVDPASNTYT

SEQ ID NO: 39801 - protein, 11 aa, Homo sapiens
  misc_feature: Table A; Target 39801; HLA-A*03:02; MAGEA4; ENSG00000147381; TAA
EVDPASNTYTL

SEQ ID NO: 39802 - protein, 11 aa, Homo sapiens
  misc_feature: Table A; Target 39802; HLA-A*23:01; MAGEA4; ENSG00000147381; TAA
EVDPASNTYTL

SEQ ID NO: 39803 - protein, 11 aa, Homo sapiens
  misc_feature: Table A; Target 39803; HLA-A*33:01; MAGEA4; ENSG00000147381; TAA
EVDPASNTYTL

SEQ ID NO: 39804 - protein, 11 aa, Homo sapiens
  misc_feature: Table A; Target 39804; HLA-B*27:02; MAGEA4; ENSG00000147381; TAA
EVDPASNTYTL

SEQ ID NO: 39805 - protein, 11 aa, Homo sapiens
  misc_feature: Table A; Target 39805; HLA-B*35:01; MAGEA4; ENSG00000147381; TAA
EVDPASNTYTL

SEQ ID NO: 39806 - protein, 11 aa, Homo sapiens
  misc_feature: Table A; Target 39806; HLA-B*55:01; MAGEA4; ENSG00000147381; TAA
EVDPASNTYTL

SEQ ID NO: 39807 - protein, 11 aa, Homo sapiens
  misc_feature: Table A; Target 39807; HLA-B*58:01; MAGEA4; ENSG00000147381; TAA
EVDPASNTYTL

SEQ ID NO: 39808 - protein, 11 aa, Homo sapiens
  misc_feature: Table A; Target 39808; HLA-C*03:04; MAGEA4; ENSG00000147381; TAA
EVDPASNTYTL

SEQ ID NO: 39809 - protein, 11 aa, Homo sapiens
  misc_feature: Table A; Target 39809; HLA-C*07:04; MAGEA4; ENSG00000147381; TAA
EVDPASNTYTL

SEQ ID NO: 39810 - protein, 8 aa, Homo sapiens
  misc_feature: Table A; Target 39810; HLA-C*03:03; MAGEA4; ENSG00000147381; TAA
FGIDVKEV

SEQ ID NO: 39811 - protein, 8 aa, Homo sapiens
  misc_feature: Table A; Target 39811; HLA-C*06:02; MAGEA4; ENSG00000147381; TAA
FGIDVKEV

SEQ ID NO: 39812 - protein, 8 aa, Homo sapiens
  misc_feature: Table A; Target 39812; HLA-B*40:02; MAGEA4; ENSG00000147381; TAA
FGKASESL

SEQ ID NO: 39813 - protein, 8 aa, Homo sapiens
  misc_feature: Table A; Target 39813; HLA-C*03:03; MAGEA4; ENSG00000147381; TAA
FGKASESL

SEQ ID NO: 39814 - protein, 8 aa, Homo sapiens
  misc_feature: Table A; Target 39814; HLA-C*12:03; MAGEA4; ENSG00000147381; TAA
FGKASESL

SEQ ID NO: 39815 - protein, 8 aa, Homo sapiens
  misc_feature: Table A; Target 39815; HLA-C*16:01; MAGEA4; ENSG00000147381; TAA
FGKASESL

SEQ ID NO: 39816 - protein, 9 aa, Homo sapiens
  misc_feature: Table A; Target 39816; HLA-C*04:01; MAGEA4; ENSG00000147381; TAA
FGKASESLK

SEQ ID NO: 39817 - protein, 8 aa, Homo sapiens
  misc_feature: Table A; Target 39817; HLA-A*02:07; MAGEA4; ENSG00000147381; TAA
FLWGPRAL

SEQ ID NO: 39818 - protein, 9 aa, Homo sapiens
  misc_feature: Table A; Target 39818; HLA-A*02:03; MAGEA4; ENSG00000147381; TAA
FLWGPRALA

SEQ ID NO: 39819 - protein, 9 aa, Homo sapiens
  misc_feature: Table A; Target 39819; HLA-A*02:07; MAGEA4; ENSG00000147381; TAA
FLWGPRALA

SEQ ID NO: 39820 - protein, 9 aa, Homo sapiens
  misc_feature: Table A; Target 39820; HLA-B*54:01; MAGEA4; ENSG00000147381; TAA
FLWGPRALA

SEQ ID NO: 39821 - protein, 8 aa, Homo sapiens
  misc_feature: Table A; Target 39821; HLA-B*08:01; MAGEA4; ENSG00000147381; TAA
FPKTGLLI

SEQ ID NO: 39822 - protein, 10 aa, Homo sapiens
  misc_feature: Table A; Target 39822; HLA-B*54:01; MAGEA4; ENSG00000147381; TAA
FPKTGLLIIV

SEQ ID NO: 39823 - protein, 8 aa, Homo sapiens
  misc_feature: Table A; Target 39823; HLA-B*51:01; MAGEA4; ENSG00000147381; TAA
FPVIFGKA

SEQ ID NO: 39824 - protein, 9 aa, Homo sapiens
  misc_feature: Table A; Target 39824; HLA-B*56:01; MAGEA4; ENSG00000147381; TAA
FPVIFGKAS

SEQ ID NO: 39825 - protein, 11 aa, Homo sapiens
  misc_feature: Table A; Target 39825; HLA-B*54:01; MAGEA4; ENSG00000147381; TAA
FPVIFGKASES

SEQ ID NO: 39826 - protein, 9 aa, Homo sapiens
  misc_feature: Table A; Target 39826; HLA-B*27:05; MAGEA4; ENSG00000147381; TAA
FREALSNKV

SEQ ID NO: 39827 - protein, 9 aa, Homo sapiens
  misc_feature: Table A; Target 39827; HLA-B*38:01; MAGEA4; ENSG00000147381; TAA
FREALSNKV

SEQ ID NO: 39828 - protein, 9 aa, Homo sapiens
  misc_feature: Table A; Target 39828; HLA-A*02:03; MAGEA4; ENSG00000147381; TAA
GASALPTTI

SEQ ID NO: 39829 - protein, 9 aa, Homo sapiens
  misc_feature: Table A; Target 39829; HLA-A*30:01; MAGEA4; ENSG00000147381; TAA
GASALPTTI

SEQ ID NO: 39830 - protein, 11 aa, Homo sapiens
  misc_feature: Table A; Target 39830; HLA-B*44:02; MAGEA4; ENSG00000147381; TAA
GEPRKLLTQDW

SEQ ID NO: 39831 - protein, 9 aa, Homo sapiens
  misc_feature: Table A; Target 39831; HLA-A*23:01; MAGEA4; ENSG00000147381; TAA
GLLGNNQIF

SEQ ID NO: 39832 - protein, 9 aa, Homo sapiens
  misc_feature: Table A; Target 39832; HLA-A*29:02; MAGEA4; ENSG00000147381; TAA
GLLGNNQIF

SEQ ID NO: 39833 - protein, 9 aa, Homo sapiens
  misc_feature: Table A; Target 39833; HLA-B*15:03; MAGEA4; ENSG00000147381; TAA
GLLGNNQIF

SEQ ID NO: 39834 - protein, 11 aa, Homo sapiens
  misc_feature: Table A; Target 39834; HLA-A*02:04; MAGEA4; ENSG00000147381; TAA
GLLGNNQIFPK

SEQ ID NO: 39835 - protein, 11 aa, Homo sapiens
  misc_feature: Table A; Target 39835; HLA-A*29:02; MAGEA4; ENSG00000147381; TAA
GLLGNNQIFPK

SEQ ID NO: 39836 - protein, 11 aa, Homo sapiens
  misc_feature: Table A; Target 39836; HLA-B*27:02; MAGEA4; ENSG00000147381; TAA
GLLGNNQIFPK

SEQ ID NO: 39837 - protein, 8 aa, Homo sapiens
  misc_feature: Table A; Target 39837; HLA-A*11:01; MAGEA4; ENSG00000147381; TAA
GNNQIFPK

SEQ ID NO: 39838 - protein, 9 aa, Homo sapiens
  misc_feature: Table A; Target 39838; HLA-B*56:01; MAGEA4; ENSG00000147381; TAA
GPPQSPQGA

SEQ ID NO: 39839 - protein, 11 aa, Homo sapiens
  misc_feature: Table A; Target 39839; HLA-B*07:02; MAGEA4; ENSG00000147381; TAA
GPRALAETSYV

SEQ ID NO: 39840 - protein, 9 aa, Homo sapiens
  misc_feature: Table A; Target 39840; HLA-A*24:02; MAGEA4; ENSG00000147381; TAA
GSNPARYEF

SEQ ID NO: 39841 - protein, 9 aa, Homo sapiens
  misc_feature: Table A; Target 39841; HLA-B*07:02; MAGEA4; ENSG00000147381; TAA
GSNPARYEF

SEQ ID NO: 39842 - protein, 9 aa, Homo sapiens
  misc_feature: Table A; Target 39842; HLA-B*27:05; MAGEA4; ENSG00000147381; TAA
GSNPARYEF

SEQ ID NO: 39843 - protein, 9 aa, Homo sapiens
  misc_feature: Table A; Target 39843; HLA-B*37:01; MAGEA4; ENSG00000147381; TAA
GSNPARYEF

SEQ ID NO: 39844 - protein, 9 aa, Homo sapiens
  misc_feature: Table A; Target 39844; HLA-C*07:02; MAGEA4; ENSG00000147381; TAA
GSNPARYEF

SEQ ID NO: 39845 - protein, 9 aa, Homo sapiens
  misc_feature: Table A; Target 39845; HLA-C*16:02; MAGEA4; ENSG00000147381; TAA
GSNPARYEF

SEQ ID NO: 39846 - protein, 10 aa, Homo sapiens
  misc_feature: Table A; Target 39846; HLA-B*27:05; MAGEA4; ENSG00000147381; TAA
GTIAMEGDSA

SEQ ID NO: 39847 - protein, 9 aa, Homo sapiens
  misc_feature: Table A; Target 39847; HLA-A*33:01; MAGEA4; ENSG00000147381; TAA
GVMGVYDGR

SEQ ID NO: 39848 - protein, 10 aa, Homo sapiens
  misc_feature: Table A; Target 39848; HLA-A*03:02; MAGEA4; ENSG00000147381; TAA
GVYDGREHTV

SEQ ID NO: 39849 - protein, 10 aa, Homo sapiens
  misc_feature: Table A; Target 39849; HLA-A*11:01; MAGEA4; ENSG00000147381; TAA
GVYDGREHTV

SEQ ID NO: 39850 - protein, 10 aa, Homo sapiens
  misc_feature: Table A; Target 39850; HLA-A*23:01; MAGEA4; ENSG00000147381; TAA
GVYDGREHTV

SEQ ID NO: 39851 - protein, 10 aa, Homo sapiens
  misc_feature: Table A; Target 39851; HLA-B*08:01; MAGEA4; ENSG00000147381; TAA
GVYDGREHTV

SEQ ID NO: 39852 - protein, 10 aa, Homo sapiens
  misc_feature: Table A; Target 39852; HLA-B*15:03; MAGEA4; ENSG00000147381; TAA
GVYDGREHTV

SEQ ID NO: 39853 - protein, 10 aa, Homo sapiens
  misc_feature: Table A; Target 39853; HLA-B*38:01; MAGEA4; ENSG00000147381; TAA
GVYDGREHTV

SEQ ID NO: 39854 - protein, 10 aa, Homo sapiens
  misc_feature: Table A; Target 39854; HLA-C*05:01; MAGEA4; ENSG00000147381; TAA
GVYDGREHTV

SEQ ID NO: 39855 - protein, 10 aa, Homo sapiens
  misc_feature: Table A; Target 39855; HLA-C*07:04; MAGEA4; ENSG00000147381; TAA
GVYDGREHTV

SEQ ID NO: 39856 - protein, 10 aa, Homo sapiens
  misc_feature: Table A; Target 39856; HLA-C*16:01; MAGEA4; ENSG00000147381; TAA
GVYDGREHTV

SEQ ID NO: 39857 - protein, 11 aa, Homo sapiens
  misc_feature: Table A; Target 39857; HLA-B*44:03; MAGEA4; ENSG00000147381; TAA
GVYDGREHTVY

SEQ ID NO: 39858 - protein, 11 aa, Homo sapiens
  misc_feature: Table A; Target 39858; HLA-B*57:01; MAGEA4; ENSG00000147381; TAA
GVYDGREHTVY

SEQ ID NO: 39859 - protein, 10 aa, Homo sapiens
  misc_feature: Table A; Target 39859; HLA-B*55:01; MAGEA4; ENSG00000147381; TAA
HCKPEEGVEA

SEQ ID NO: 39860 - protein, 8 aa, Homo sapiens
  misc_feature: Table A; Target 39860; HLA-C*07:06; MAGEA4; ENSG00000147381; TAA
HTVYGEPR

SEQ ID NO: 39861 - protein, 8 aa, Homo sapiens
  misc_feature: Table A; Target 39861; HLA-A*68:01; MAGEA4; ENSG00000147381; TAA
HVVRVNAR

SEQ ID NO: 39862 - protein, 8 aa, Homo sapiens
  misc_feature: Table A; Target 39862; HLA-B*46:01; MAGEA4; ENSG00000147381; TAA
IAMEGDSA

SEQ ID NO: 39863 - protein, 8 aa, Homo sapiens
  misc_feature: Table A; Target 39863; HLA-B*56:01; MAGEA4; ENSG00000147381; TAA
IAMEGDSA

SEQ ID NO: 39864 - protein, 8 aa, Homo sapiens
  misc_feature: Table A; Target 39864; HLA-C*06:02; MAGEA4; ENSG00000147381; TAA
IAYPSLRE

SEQ ID NO: 39865 - protein, 8 aa, Homo sapiens
  misc_feature: Table A; Target 39865; HLA-C*07:01; MAGEA4; ENSG00000147381; TAA
IAYPSLRE

SEQ ID NO: 39866 - protein, 9 aa, Homo sapiens
  misc_feature: Table A; Target 39866; HLA-A*02:04; MAGEA4; ENSG00000147381; TAA
IAYPSLREA

SEQ ID NO: 39867 - protein, 9 aa, Homo sapiens
  misc_feature: Table A; Target 39867; HLA-A*02:07; MAGEA4; ENSG00000147381; TAA
IAYPSLREA

SEQ ID NO: 39868 - protein, 9 aa, Homo sapiens
  misc_feature: Table A; Target 39868; HLA-A*32:01; MAGEA4; ENSG00000147381; TAA
IAYPSLREA

SEQ ID NO: 39869 - protein, 9 aa, Homo sapiens
  misc_feature: Table A; Target 39869; HLA-B*13:02; MAGEA4; ENSG00000147381; TAA
IAYPSLREA

SEQ ID NO: 39870 - protein, 9 aa, Homo sapiens
  misc_feature: Table A; Target 39870; HLA-B*40:02; MAGEA4; ENSG00000147381; TAA
IAYPSLREA

SEQ ID NO: 39871 - protein, 9 aa, Homo sapiens
  misc_feature: Table A; Target 39871; HLA-C*01:02; MAGEA4; ENSG00000147381; TAA
IAYPSLREA

SEQ ID NO: 39872 - protein, 9 aa, Homo sapiens
  misc_feature: Table A; Target 39872; HLA-C*16:04; MAGEA4; ENSG00000147381; TAA
IAYPSLREA

SEQ ID NO: 39873 - protein, 11 aa, Homo sapiens
  misc_feature: Table A; Target 39873; HLA-A*24:02; MAGEA4; ENSG00000147381; TAA
IAYPSLREAAL

SEQ ID NO: 39874 - protein, 11 aa, Homo sapiens
  misc_feature: Table A; Target 39874; HLA-B*08:01; MAGEA4; ENSG00000147381; TAA
IAYPSLREAAL

SEQ ID NO: 39875 - protein, 11 aa, Homo sapiens
  misc_feature: Table A; Target 39875; HLA-B*35:01; MAGEA4; ENSG00000147381; TAA
IAYPSLREAAL

SEQ ID NO: 39876 - protein, 11 aa, Homo sapiens
  misc_feature: Table A; Target 39876; HLA-B*40:01; MAGEA4; ENSG00000147381; TAA
IAYPSLREAAL

SEQ ID NO: 39877 - protein, 11 aa, Homo sapiens
  misc_feature: Table A; Target 39877; HLA-B*40:02; MAGEA4; ENSG00000147381; TAA
IAYPSLREAAL

SEQ ID NO: 39878 - protein, 11 aa, Homo sapiens
  misc_feature: Table A; Target 39878; HLA-B*51:01; MAGEA4; ENSG00000147381; TAA
IAYPSLREAAL

SEQ ID NO: 39879 - protein, 11 aa, Homo sapiens
  misc_feature: Table A; Target 39879; HLA-B*54:01; MAGEA4; ENSG00000147381; TAA
IAYPSLREAAL

SEQ ID NO: 39880 - protein, 11 aa, Homo sapiens
  misc_feature: Table A; Target 39880; HLA-B*58:01; MAGEA4; ENSG00000147381; TAA
IAYPSLREAAL

SEQ ID NO: 39881 - protein, 11 aa, Homo sapiens
  misc_feature: Table A; Target 39881; HLA-C*12:03; MAGEA4; ENSG00000147381; TAA
IAYPSLREAAL

SEQ ID NO: 39882 - protein, 11 aa, Homo sapiens
  misc_feature: Table A; Target 39882; HLA-C*16:04; MAGEA4; ENSG00000147381; TAA
IAYPSLREAAL

SEQ ID NO: 39883 - protein, 8 aa, Homo sapiens
  misc_feature: Table A; Target 39883; HLA-C*06:02; MAGEA4; ENSG00000147381; TAA
IDVKEVDP

SEQ ID NO: 39884 - protein, 9 aa, Homo sapiens
  misc_feature: Table A; Target 39884; HLA-A*24:02; MAGEA4; ENSG00000147381; TAA
IFGKASESL

SEQ ID NO: 39885 - protein, 10 aa, Homo sapiens
  misc_feature: Table A; Target 39885; HLA-A*23:01; MAGEA4; ENSG00000147381; TAA
IFPKTGLLII

SEQ ID NO: 39886 - protein, 9 aa, Homo sapiens
  misc_feature: Table A; Target 39886; HLA-B*07:02; MAGEA4; ENSG00000147381; TAA
IIVLGTIAM

SEQ ID NO: 39887 - protein, 9 aa, Homo sapiens
  misc_feature: Table A; Target 39887; HLA-B*15:03; MAGEA4; ENSG00000147381; TAA
IIVLGTIAM

SEQ ID NO: 39888 - protein, 9 aa, Homo sapiens
  misc_feature: Table A; Target 39888; HLA-C*02:02; MAGEA4; ENSG00000147381; TAA
IIVLGTIAM

SEQ ID NO: 39889 - protein, 8 aa, Homo sapiens
  misc_feature: Table A; Target 39889; HLA-B*08:01; MAGEA4; ENSG00000147381; TAA
IVLGTIAM

SEQ ID NO: 39890 - protein, 8 aa, Homo sapiens
  misc_feature: Table A; Target 39890; HLA-B*15:01; MAGEA4; ENSG00000147381; TAA
IVLGTIAM

SEQ ID NO: 39891 - protein, 8 aa, Homo sapiens
  misc_feature: Table A; Target 39891; HLA-B*35:01; MAGEA4; ENSG00000147381; TAA
IVLGTIAM

SEQ ID NO: 39892 - protein, 8 aa, Homo sapiens
  misc_feature: Table A; Target 39892; HLA-B*35:03; MAGEA4; ENSG00000147381; TAA
IVLGTIAM

SEQ ID NO: 39893 - protein, 8 aa, Homo sapiens
  misc_feature: Table A; Target 39893; HLA-B*37:01; MAGEA4; ENSG00000147381; TAA
IVLGTIAM

SEQ ID NO: 39894 - protein, 8 aa, Homo sapiens
  misc_feature: Table A; Target 39894; HLA-B*39:01; MAGEA4; ENSG00000147381; TAA
IVLGTIAM

SEQ ID NO: 39895 - protein, 8 aa, Homo sapiens
  misc_feature: Table A; Target 39895; HLA-C*03:04; MAGEA4; ENSG00000147381; TAA
IVLGTIAM

SEQ ID NO: 39896 - protein, 8 aa, Homo sapiens
  misc_feature: Table A; Target 39896; HLA-C*04:01; MAGEA4; ENSG00000147381; TAA
IVLGTIAM

SEQ ID NO: 39897 - protein, 8 aa, Homo sapiens
  misc_feature: Table A; Target 39897; HLA-C*07:04; MAGEA4; ENSG00000147381; TAA
IVLGTIAM

SEQ ID NO: 39898 - protein, 10 aa, Homo sapiens
  misc_feature: Table A; Target 39898; HLA-C*07:01; MAGEA4; ENSG00000147381; TAA
IVLGTIAMEG

SEQ ID NO: 39899 - protein, 10 aa, Homo sapiens
  misc_feature: Table A; Target 39899; HLA-C*07:02; MAGEA4; ENSG00000147381; TAA
IVLGTIAMEG

SEQ ID NO: 39900 - protein, 8 aa, Homo sapiens
  misc_feature: Table A; Target 39900; HLA-C*03:03; MAGEA4; ENSG00000147381; TAA
KASESLKM

SEQ ID NO: 39901 - protein, 8 aa, Homo sapiens
  misc_feature: Table A; Target 39901; HLA-C*05:01; MAGEA4; ENSG00000147381; TAA
KASESLKM

SEQ ID NO: 39902 - protein, 9 aa, Homo sapiens
  misc_feature: Table A; Target 39902; HLA-B*58:01; MAGEA4; ENSG00000147381; TAA
KASESLKMI

SEQ ID NO: 39903 - protein, 9 aa, Homo sapiens
  misc_feature: Table A; Target 39903; HLA-C*06:02; MAGEA4; ENSG00000147381; TAA
KASESLKMI

SEQ ID NO: 39904 - protein, 9 aa, Homo sapiens
  misc_feature: Table A; Target 39904; HLA-C*12:03; MAGEA4; ENSG00000147381; TAA
KASESLKMI

SEQ ID NO: 39905 - protein, 10 aa, Homo sapiens
  misc_feature: Table A; Target 39905; HLA-B*58:01; MAGEA4; ENSG00000147381; TAA
KASESLKMIF

SEQ ID NO: 39906 - protein, 10 aa, Homo sapiens
  misc_feature: Table A; Target 39906; HLA-C*04:01; MAGEA4; ENSG00000147381; TAA
KASESLKMIF

SEQ ID NO: 39907 - protein, 10 aa, Homo sapiens
  misc_feature: Table A; Target 39907; HLA-C*12:03; MAGEA4; ENSG00000147381; TAA
KASESLKMIF

SEQ ID NO: 39908 - protein, 9 aa, Homo sapiens
  misc_feature: Table A; Target 39908; HLA-C*16:04; MAGEA4; ENSG00000147381; TAA
KELVTKAEM

SEQ ID NO: 39909 - protein, 9 aa, Homo sapiens
  misc_feature: Table A; Target 39909; HLA-A*30:01; MAGEA4; ENSG00000147381; TAA
KEVDPASNT

SEQ ID NO: 39910 - protein, 9 aa, Homo sapiens
  misc_feature: Table A; Target 39910; HLA-B*40:02; MAGEA4; ENSG00000147381; TAA
KEVDPASNT

SEQ ID NO: 39911 - protein, 9 aa, Homo sapiens
  misc_feature: Table A; Target 39911; HLA-B*44:03; MAGEA4; ENSG00000147381; TAA
KEVDPASNT

SEQ ID NO: 39912 - protein, 9 aa, Homo sapiens
  misc_feature: Table A; Target 39912; HLA-C*16:04; MAGEA4; ENSG00000147381; TAA
KEVDPASNT

SEQ ID NO: 39913 - protein, 10 aa, Homo sapiens
  misc_feature: Table A; Target 39913; HLA-A*23:01; MAGEA4; ENSG00000147381; TAA
KEVDPASNTY

SEQ ID NO: 39914 - protein, 10 aa, Homo sapiens
  misc_feature: Table A; Target 39914; HLA-C*04:01; MAGEA4; ENSG00000147381; TAA
KEVDPASNTY

SEQ ID NO: 39915 - protein, 10 aa, Homo sapiens
  misc_feature: Table A; Target 39915; HLA-C*07:04; MAGEA4; ENSG00000147381; TAA
KEVDPASNTY

SEQ ID NO: 39916 - protein, 11 aa, Homo sapiens
  misc_feature: Table A; Target 39916; HLA-B*40:02; MAGEA4; ENSG00000147381; TAA
KEVDPASNTYT

SEQ ID NO: 39917 - protein, 11 aa, Homo sapiens
  misc_feature: Table A; Target 39917; HLA-C*04:01; MAGEA4; ENSG00000147381; TAA
KEVDPASNTYT

SEQ ID NO: 39918 - protein, 9 aa, Homo sapiens
  misc_feature: Table A; Target 39918; HLA-A*03:01; MAGEA4; ENSG00000147381; TAA
KMIFGIDVK

SEQ ID NO: 39919 - protein, 9 aa, Homo sapiens
  misc_feature: Table A; Target 39919; HLA-A*03:02; MAGEA4; ENSG00000147381; TAA
KMIFGIDVK

SEQ ID NO: 39920 - protein, 11 aa, Homo sapiens
  misc_feature: Table A; Target 39920; HLA-A*02:03; MAGEA4; ENSG00000147381; TAA
KMIFGIDVKEV

SEQ ID NO: 39921 - protein, 8 aa, Homo sapiens
  misc_feature: Table A; Target 39921; HLA-B*55:01; MAGEA4; ENSG00000147381; TAA
KPEEGVEA

SEQ ID NO: 39922 - protein, 8 aa, Homo sapiens
  misc_feature: Table A; Target 39922; HLA-B*56:01; MAGEA4; ENSG00000147381; TAA
KPEEGVEA

SEQ ID NO: 39923 - protein, 8 aa, Homo sapiens
  misc_feature: Table A; Target 39923; HLA-A*02:07; MAGEA4; ENSG00000147381; TAA
KVDELAHF

SEQ ID NO: 39924 - protein, 9 aa, Homo sapiens
  misc_feature: Table A; Target 39924; HLA-A*01:01; MAGEA4; ENSG00000147381; TAA
KVDELAHFL

SEQ ID NO: 39925 - protein, 9 aa, Homo sapiens
  misc_feature: Table A; Target 39925; HLA-A*03:01; MAGEA4; ENSG00000147381; TAA
KVDELAHFL

SEQ ID NO: 39926 - protein, 9 aa, Homo sapiens
  misc_feature: Table A; Target 39926; HLA-B*40:01; MAGEA4; ENSG00000147381; TAA
KVDELAHFL

SEQ ID NO: 39927 - protein, 9 aa, Homo sapiens
  misc_feature: Table A; Target 39927; HLA-B*55:01; MAGEA4; ENSG00000147381; TAA
KVDELAHFL

SEQ ID NO: 39928 - protein, 9 aa, Homo sapiens
  misc_feature: Table A; Target 39928; HLA-C*02:02; MAGEA4; ENSG00000147381; TAA
KVDELAHFL

SEQ ID NO: 39929 - protein, 10 aa, Homo sapiens
  misc_feature: Table A; Target 39929; HLA-A*03:01; MAGEA4; ENSG00000147381; TAA
KVDELAHFLL

SEQ ID NO: 39930 - protein, 10 aa, Homo sapiens
  misc_feature: Table A; Target 39930; HLA-A*68:02; MAGEA4; ENSG00000147381; TAA
KVDELAHFLL

SEQ ID NO: 39931 - protein, 8 aa, Homo sapiens
  misc_feature: Table A; Target 39931; HLA-B*08:01; MAGEA4; ENSG00000147381; TAA
KVLEHVVR

SEQ ID NO: 39932 - protein, 8 aa, Homo sapiens
  misc_feature: Table A; Target 39932; HLA-B*57:01; MAGEA4; ENSG00000147381; TAA
KVLEHVVR

SEQ ID NO: 39933 - protein, 9 aa, Homo sapiens
  misc_feature: Table A; Target 39933; HLA-A*32:01; MAGEA4; ENSG00000147381; TAA
KVLEHVVRV

SEQ ID NO: 39934 - protein, 9 aa, Homo sapiens
  misc_feature: Table A; Target 39934; HLA-C*12:03; MAGEA4; ENSG00000147381; TAA
KVLEHVVRV

SEQ ID NO: 39935 - protein, 10 aa, Homo sapiens
  misc_feature: Table A; Target 39935; HLA-A*03:01; MAGEA4; ENSG00000147381; TAA
KVLEHVVRVN

SEQ ID NO: 39936 - protein, 10 aa, Homo sapiens
  misc_feature: Table A; Target 39936; HLA-A*31:01; MAGEA4; ENSG00000147381; TAA
KYRAKELVTK

SEQ ID NO: 39937 - protein, 9 aa, Homo sapiens
  misc_feature: Table A; Target 39937; HLA-A*01:01; MAGEA4; ENSG00000147381; TAA
LAETSYVKV

SEQ ID NO: 39938 - protein, 9 aa, Homo sapiens
  misc_feature: Table A; Target 39938; HLA-B*51:01; MAGEA4; ENSG00000147381; TAA
LAETSYVKV

SEQ ID NO: 39939 - protein, 9 aa, Homo sapiens
  misc_feature: Table A; Target 39939; HLA-B*57:01; MAGEA4; ENSG00000147381; TAA
LAHFLLRKY

SEQ ID NO: 39940 - protein, 9 aa, Homo sapiens
  misc_feature: Table A; Target 39940; HLA-B*18:01; MAGEA4; ENSG00000147381; TAA
LEHVVRVNA

SEQ ID NO: 39941 - protein, 9 aa, Homo sapiens
  misc_feature: Table A; Target 39941; HLA-B*49:01; MAGEA4; ENSG00000147381; TAA
LEHVVRVNA

SEQ ID NO: 39942 - protein, 8 aa, Homo sapiens
  misc_feature: Table A; Target 39942; HLA-B*37:01; MAGEA4; ENSG00000147381; TAA
LERVIKNY

SEQ ID NO: 39943 - protein, 11 aa, Homo sapiens
  misc_feature: Table A; Target 39943; HLA-C*06:02; MAGEA4; ENSG00000147381; TAA
LGLVGAQAPTT

SEQ ID NO: 39944 - protein, 9 aa, Homo sapiens
  misc_feature: Table A; Target 39944; HLA-A*68:01; MAGEA4; ENSG00000147381; TAA
LGNNQIFPK

SEQ ID NO: 39945 - protein, 10 aa, Homo sapiens
  misc_feature: Table A; Target 39945; HLA-C*01:02; MAGEA4; ENSG00000147381; TAA
LIIVLGTIAM

SEQ ID NO: 39946 - protein, 8 aa, Homo sapiens
  misc_feature: Table A; Target 39946; HLA-C*05:01; MAGEA4; ENSG00000147381; TAA
LLEEEEGV

SEQ ID NO: 39947 - protein, 10 aa, Homo sapiens
  misc_feature: Table A; Target 39947; HLA-A*11:01; MAGEA4; ENSG00000147381; TAA
LLGNNQIFPK

SEQ ID NO: 39948 - protein, 9 aa, Homo sapiens
  misc_feature: Table A; Target 39948; HLA-A*02:04; MAGEA4; ENSG00000147381; TAA
LLIIVLGTI

SEQ ID NO: 39949 - protein, 9 aa, Homo sapiens
  misc_feature: Table A; Target 39949; HLA-A*02:07; MAGEA4; ENSG00000147381; TAA
LLIIVLGTI

SEQ ID NO: 39950 - protein, 9 aa, Homo sapiens
  misc_feature: Table A; Target 39950; HLA-B*35:01; MAGEA4; ENSG00000147381; TAA
LPTTISFTC

SEQ ID NO: 39951 - protein, 8 aa, Homo sapiens
  misc_feature: Table A; Target 39951; HLA-B*58:01; MAGEA4; ENSG00000147381; TAA
LSNKVDEL

SEQ ID NO: 39952 - protein, 8 aa, Homo sapiens
  misc_feature: Table A; Target 39952; HLA-C*03:04; MAGEA4; ENSG00000147381; TAA
LSNKVDEL

SEQ ID NO: 39953 - protein, 8 aa, Homo sapiens
  misc_feature: Table A; Target 39953; HLA-C*12:03; MAGEA4; ENSG00000147381; TAA
LSNKVDEL

SEQ ID NO: 39954 - protein, 8 aa, Homo sapiens
  misc_feature: Table A; Target 39954; HLA-C*16:01; MAGEA4; ENSG00000147381; TAA
LSNKVDEL

SEQ ID NO: 39955 - protein, 9 aa, Homo sapiens
  misc_feature: Table A; Target 39955; HLA-C*06:02; MAGEA4; ENSG00000147381; TAA
LSYDGLLGN

SEQ ID NO: 39956 - protein, 9 aa, Homo sapiens
  misc_feature: Table A; Target 39956; HLA-C*07:01; MAGEA4; ENSG00000147381; TAA
LSYDGLLGN

SEQ ID NO: 39957 - protein, 9 aa, Homo sapiens
  misc_feature: Table A; Target 39957; HLA-C*12:03; MAGEA4; ENSG00000147381; TAA
LSYDGLLGN

SEQ ID NO: 39958 - protein, 10 aa, Homo sapiens
  misc_feature: Table A; Target 39958; HLA-C*07:01; MAGEA4; ENSG00000147381; TAA
LSYDGLLGNN

SEQ ID NO: 39959 - protein, 10 aa, Homo sapiens
  misc_feature: Table A; Target 39959; HLA-C*04:01; MAGEA4; ENSG00000147381; TAA
LTQDWVQENY

SEQ ID NO: 39960 - protein, 9 aa, Homo sapiens
  misc_feature: Table A; Target 39960; HLA-A*02:03; MAGEA4; ENSG00000147381; TAA
LVPGTLEEV

SEQ ID NO: 39961 - protein, 8 aa, Homo sapiens
  misc_feature: Table A; Target 39961; HLA-B*27:02; MAGEA4; ENSG00000147381; TAA
MIFGIDVK

SEQ ID NO: 39962 - protein, 9 aa, Homo sapiens
  misc_feature: Table A; Target 39962; HLA-A*68:02; MAGEA4; ENSG00000147381; TAA
MIFGIDVKE

SEQ ID NO: 39963 - protein, 10 aa, Homo sapiens
  misc_feature: Table A; Target 39963; HLA-A*26:01; MAGEA4; ENSG00000147381; TAA
MIFGIDVKEV

SEQ ID NO: 39964 - protein, 9 aa, Homo sapiens
  misc_feature: Table A; Target 39964; HLA-A*02:07; MAGEA4; ENSG00000147381; TAA
MLERVIKNY

SEQ ID NO: 39965 - protein, 9 aa, Homo sapiens
  misc_feature: Table A; Target 39965; HLA-A*32:01; MAGEA4; ENSG00000147381; TAA
MLERVIKNY

SEQ ID NO: 39966 - protein, 9 aa, Homo sapiens
  misc_feature: Table A; Target 39966; HLA-B*44:03; MAGEA4; ENSG00000147381; TAA
MLERVIKNY

SEQ ID NO: 39967 - protein, 9 aa, Homo sapiens
  misc_feature: Table A; Target 39967; HLA-B*57:01; MAGEA4; ENSG00000147381; TAA
MLERVIKNY

SEQ ID NO: 39968 - protein, 9 aa, Homo sapiens
  misc_feature: Table A; Target 39968; HLA-C*03:03; MAGEA4; ENSG00000147381; TAA
MLERVIKNY

SEQ ID NO: 39969 - protein, 9 aa, Homo sapiens
  misc_feature: Table A; Target 39969; HLA-C*06:02; MAGEA4; ENSG00000147381; TAA
MLERVIKNY

SEQ ID NO: 39970 - protein, 9 aa, Homo sapiens
  misc_feature: Table A; Target 39970; HLA-C*07:01; MAGEA4; ENSG00000147381; TAA
MLERVIKNY

SEQ ID NO: 39971 - protein, 8 aa, Homo sapiens
  misc_feature: Table A; Target 39971; HLA-B*08:01; MAGEA4; ENSG00000147381; TAA
NARVRIAY

SEQ ID NO: 39972 - protein, 8 aa, Homo sapiens
  misc_feature: Table A; Target 39972; HLA-B*46:01; MAGEA4; ENSG00000147381; TAA
NARVRIAY

SEQ ID NO: 39973 - protein, 9 aa, Homo sapiens
  misc_feature: Table A; Target 39973; HLA-B*07:02; MAGEA4; ENSG00000147381; TAA
NQIFPKTGL

SEQ ID NO: 39974 - protein, 9 aa, Homo sapiens
  misc_feature: Table A; Target 39974; HLA-C*01:02; MAGEA4; ENSG00000147381; TAA
NQIFPKTGL

SEQ ID NO: 39975 - protein, 9 aa, Homo sapiens
  misc_feature: Table A; Target 39975; HLA-C*07:04; MAGEA4; ENSG00000147381; TAA
NQIFPKTGL

SEQ ID NO: 39976 - protein, 9 aa, Homo sapiens
  misc_feature: Table A; Target 39976; HLA-C*14:02; MAGEA4; ENSG00000147381; TAA
NQIFPKTGL

SEQ ID NO: 39977 - protein, 8 aa, Homo sapiens
  misc_feature: Table A; Target 39977; HLA-C*12:03; MAGEA4; ENSG00000147381; TAA
NTYTLVTC

SEQ ID NO: 39978 - protein, 9 aa, Homo sapiens
  misc_feature: Table A; Target 39978; HLA-A*33:03; MAGEA4; ENSG00000147381; TAA
NTYTLVTCL

SEQ ID NO: 39979 - protein, 9 aa, Homo sapiens
  misc_feature: Table A; Target 39979; HLA-B*13:02; MAGEA4; ENSG00000147381; TAA
NTYTLVTCL

SEQ ID NO: 39980 - protein, 9 aa, Homo sapiens
  misc_feature: Table A; Target 39980; HLA-B*35:01; MAGEA4; ENSG00000147381; TAA
NTYTLVTCL

SEQ ID NO: 39981 - protein, 9 aa, Homo sapiens
  misc_feature: Table A; Target 39981; HLA-B*35:03; MAGEA4; ENSG00000147381; TAA
NTYTLVTCL

SEQ ID NO: 39982 - protein, 9 aa, Homo sapiens
  misc_feature: Table A; Target 39982; HLA-B*40:02; MAGEA4; ENSG00000147381; TAA
NTYTLVTCL

SEQ ID NO: 39983 - protein, 9 aa, Homo sapiens
  misc_feature: Table A; Target 39983; HLA-B*51:01; MAGEA4; ENSG00000147381; TAA
NTYTLVTCL

SEQ ID NO: 39984 - protein, 9 aa, Homo sapiens
  misc_feature: Table A; Target 39984; HLA-C*01:02; MAGEA4; ENSG00000147381; TAA
NTYTLVTCL

SEQ ID NO: 39985 - protein, 9 aa, Homo sapiens
  misc_feature: Table A; Target 39985; HLA-C*02:02; MAGEA4; ENSG00000147381; TAA
NTYTLVTCL

SEQ ID NO: 39986 - protein, 9 aa, Homo sapiens
  misc_feature: Table A; Target 39986; HLA-C*03:03; MAGEA4; ENSG00000147381; TAA
NTYTLVTCL

SEQ ID NO: 39987 - protein, 9 aa, Homo sapiens
  misc_feature: Table A; Target 39987; HLA-C*07:04; MAGEA4; ENSG00000147381; TAA
NTYTLVTCL

SEQ ID NO: 39988 - protein, 8 aa, Homo sapiens
  misc_feature: Table A; Target 39988; HLA-A*23:01; MAGEA4; ENSG00000147381; TAA
PASNTYTL

SEQ ID NO: 39989 - protein, 8 aa, Homo sapiens
  misc_feature: Table A; Target 39989; HLA-A*30:02; MAGEA4; ENSG00000147381; TAA
PGSNPARY

SEQ ID NO: 39990 - protein, 10 aa, Homo sapiens
  misc_feature: Table A; Target 39990; HLA-B*56:01; MAGEA4; ENSG00000147381; TAA
PPQSPQGASA

SEQ ID NO: 39991 - protein, 11 aa, Homo sapiens
  misc_feature: Table A; Target 39991; HLA-B*07:02; MAGEA4; ENSG00000147381; TAA
PPQSPQGASAL

SEQ ID NO: 39992 - protein, 11 aa, Homo sapiens
  misc_feature: Table A; Target 39992; HLA-C*07:02; MAGEA4; ENSG00000147381; TAA
PPQSPQGASAL

SEQ ID NO: 39993 - protein, 9 aa, Homo sapiens
  misc_feature: Table A; Target 39993; HLA-B*07:02; MAGEA4; ENSG00000147381; TAA
PRALAETSY

SEQ ID NO: 39994 - protein, 9 aa, Homo sapiens
  misc_feature: Table A; Target 39994; HLA-C*06:02; MAGEA4; ENSG00000147381; TAA
PRALAETSY

SEQ ID NO: 39995 - protein, 9 aa, Homo sapiens
  misc_feature: Table A; Target 39995; HLA-C*07:02; MAGEA4; ENSG00000147381; TAA
PRALAETSY

SEQ ID NO: 39996 - protein, 9 aa, Homo sapiens
  misc_feature: Table A; Target 39996; HLA-C*16:04; MAGEA4; ENSG00000147381; TAA
PRALAETSY

SEQ ID NO: 39997 - protein, 11 aa, Homo sapiens
  misc_feature: Table A; Target 39997; HLA-C*07:01; MAGEA4; ENSG00000147381; TAA
PSTSPDAESLF

SEQ ID NO: 39998 - protein, 8 aa, Homo sapiens
  misc_feature: Table A; Target 39998; HLA-C*07:01; MAGEA4; ENSG00000147381; TAA
QDWVQENY

SEQ ID NO: 39999 - protein, 11 aa, Homo sapiens
  misc_feature: Table A; Target 39999; HLA-B*49:01; MAGEA4; ENSG00000147381; TAA
QEAAVSSSSPL

SEQ ID NO: 40000 - protein, 10 aa, Homo sapiens
  misc_feature: Table A; Target 40000; HLA-B*40:01; MAGEA4; ENSG00000147381; TAA
QEEALGLVGA

SEQ ID NO: 40001 - protein, 10 aa, Homo sapiens
  misc_feature: Table A; Target 40001; HLA-B*44:02; MAGEA4; ENSG00000147381; TAA
QENYLEYRQV

SEQ ID NO: 40002 - protein, 9 aa, Homo sapiens
  misc_feature: Table A; Target 40002; HLA-B*08:01; MAGEA4; ENSG00000147381; TAA
QIFPKTGLL

SEQ ID NO: 40003 - protein, 9 aa, Homo sapiens
  misc_feature: Table A; Target 40003; HLA-B*15:03; MAGEA4; ENSG00000147381; TAA
QIFPKTGLL

SEQ ID NO: 40004 - protein, 10 aa, Homo sapiens
  misc_feature: Table A; Target 40004; HLA-A*02:03; MAGEA4; ENSG00000147381; TAA
QIFPKTGLLI

SEQ ID NO: 40005 - protein, 9 aa, Homo sapiens
  misc_feature: Table A; Target 40005; HLA-C*07:06; MAGEA4; ENSG00000147381; TAA
QVPGSNPAR

SEQ ID NO: 40006 - protein, 10 aa, Homo sapiens
  misc_feature: Table A; Target 40006; HLA-B*15:01; MAGEA4; ENSG00000147381; TAA
QVPGSNPARY

SEQ ID NO: 40007 - protein, 8 aa, Homo sapiens
  misc_feature: Table A; Target 40007; HLA-B*57:01; MAGEA4; ENSG00000147381; TAA
RAKELVTK

SEQ ID NO: 40008 - protein, 8 aa, Homo sapiens
  misc_feature: Table A; Target 40008; HLA-B*58:01; MAGEA4; ENSG00000147381; TAA
RAKELVTK

SEQ ID NO: 40009 - protein, 9 aa, Homo sapiens
  misc_feature: Table A; Target 40009; HLA-A*02:03; MAGEA4; ENSG00000147381; TAA
RAKELVTKA

SEQ ID NO: 40010 - protein, 9 aa, Homo sapiens
  misc_feature: Table A; Target 40010; HLA-A*32:01; MAGEA4; ENSG00000147381; TAA
RAKELVTKA

SEQ ID NO: 40011 - protein, 9 aa, Homo sapiens
  misc_feature: Table A; Target 40011; HLA-B*56:01; MAGEA4; ENSG00000147381; TAA
RAKELVTKA

SEQ ID NO: 40012 - protein, 8 aa, Homo sapiens
  misc_feature: Table A; Target 40012; HLA-B*15:01; MAGEA4; ENSG00000147381; TAA
RALAETSY

SEQ ID NO: 40013 - protein, 9 aa, Homo sapiens
  misc_feature: Table A; Target 40013; HLA-C*05:01; MAGEA4; ENSG00000147381; TAA
RALAETSYV

SEQ ID NO: 40014 - protein, 10 aa, Homo sapiens
  misc_feature: Table A; Target 40014; HLA-A*03:01; MAGEA4; ENSG00000147381; TAA
RALAETSYVK

SEQ ID NO: 40015 - protein, 11 aa, Homo sapiens
  misc_feature: Table A; Target 40015; HLA-B*40:02; MAGEA4; ENSG00000147381; TAA
REALSNKVDEL

SEQ ID NO: 40016 - protein, 9 aa, Homo sapiens
  misc_feature: Table A; Target 40016; HLA-A*03:01; MAGEA4; ENSG00000147381; TAA
RIAYPSLRE

SEQ ID NO: 40017 - protein, 9 aa, Homo sapiens
  misc_feature: Table A; Target 40017; HLA-B*15:01; MAGEA4; ENSG00000147381; TAA
RQVPGSNPA

SEQ ID NO: 40018 - protein, 9 aa, Homo sapiens
  misc_feature: Table A; Target 40018; HLA-C*07:04; MAGEA4; ENSG00000147381; TAA
RQVPGSNPA

SEQ ID NO: 40019 - protein, 10 aa, Homo sapiens
  misc_feature: Table A; Target 40019; HLA-A*30:02; MAGEA4; ENSG00000147381; TAA
RQVPGSNPAR

SEQ ID NO: 40020 - protein, 10 aa, Homo sapiens
  misc_feature: Table A; Target 40020; HLA-B*27:05; MAGEA4; ENSG00000147381; TAA
RQVPGSNPAR

SEQ ID NO: 40021 - protein, 11 aa, Homo sapiens
  misc_feature: Table A; Target 40021; HLA-C*16:01; MAGEA4; ENSG00000147381; TAA
RQVPGSNPARY

SEQ ID NO: 40022 - protein, 10 aa, Homo sapiens
  misc_feature: Table A; Target 40022; HLA-A*03:01; MAGEA4; ENSG00000147381; TAA
RVNARVRIAY

SEQ ID NO: 40023 - protein, 10 aa, Homo sapiens
  misc_feature: Table A; Target 40023; HLA-A*30:02; MAGEA4; ENSG00000147381; TAA
RVNARVRIAY

SEQ ID NO: 40024 - protein, 9 aa, Homo sapiens
  misc_feature: Table A; Target 40024; HLA-A*31:01; MAGEA4; ENSG00000147381; TAA
RVRIAYPSL

SEQ ID NO: 40025 - protein, 9 aa, Homo sapiens
  misc_feature: Table A; Target 40025; HLA-B*57:01; MAGEA4; ENSG00000147381; TAA
RVRIAYPSL

SEQ ID NO: 40026 - protein, 9 aa, Homo sapiens
  misc_feature: Table A; Target 40026; HLA-C*07:02; MAGEA4; ENSG00000147381; TAA
RVRIAYPSL

SEQ ID NO: 40027 - protein, 9 aa, Homo sapiens
  misc_feature: Table A; Target 40027; HLA-C*01:02; MAGEA4; ENSG00000147381; TAA
SAGPPQSPQ

SEQ ID NO: 40028 - protein, 9 aa, Homo sapiens
  misc_feature: Table A; Target 40028; HLA-C*04:01; MAGEA4; ENSG00000147381; TAA
SAGPPQSPQ

SEQ ID NO: 40029 - protein, 9 aa, Homo sapiens
  misc_feature: Table A; Target 40029; HLA-A*68:02; MAGEA4; ENSG00000147381; TAA
SALPTTISF

SEQ ID NO: 40030 - protein, 9 aa, Homo sapiens
  misc_feature: Table A; Target 40030; HLA-B*13:02; MAGEA4; ENSG00000147381; TAA
SALPTTISF

SEQ ID NO: 40031 - protein, 9 aa, Homo sapiens
  misc_feature: Table A; Target 40031; HLA-B*27:05; MAGEA4; ENSG00000147381; TAA
SALPTTISF

SEQ ID NO: 40032 - protein, 9 aa, Homo sapiens
  misc_feature: Table A; Target 40032; HLA-B*40:01; MAGEA4; ENSG00000147381; TAA
SALPTTISF

SEQ ID NO: 40033 - protein, 9 aa, Homo sapiens
  misc_feature: Table A; Target 40033; HLA-B*40:02; MAGEA4; ENSG00000147381; TAA
SALPTTISF

SEQ ID NO: 40034 - protein, 10 aa, Homo sapiens
  misc_feature: Table A; Target 40034; HLA-A*02:03; MAGEA4; ENSG00000147381; TAA
SLKMIFGIDV

SEQ ID NO: 40035 - protein, 9 aa, Homo sapiens
  misc_feature: Table A; Target 40035; HLA-C*07:06; MAGEA4; ENSG00000147381; TAA
SPDAESLFR

SEQ ID NO: 40036 - protein, 8 aa, Homo sapiens
  misc_feature: Table A; Target 40036; HLA-B*35:03; MAGEA4; ENSG00000147381; TAA
SPLVPGTL

SEQ ID NO: 40037 - protein, 11 aa, Homo sapiens
  misc_feature: Table A; Target 40037; HLA-B*54:01; MAGEA4; ENSG00000147381; TAA
SPLVPGTLEEV

SEQ ID NO: 40038 - protein, 9 aa, Homo sapiens
  misc_feature: Table A; Target 40038; HLA-B*39:01; MAGEA4; ENSG00000147381; TAA
SQEEEGPST

SEQ ID NO: 40039 - protein, 9 aa, Homo sapiens
  misc_feature: Table A; Target 40039; HLA-A*02:07; MAGEA4; ENSG00000147381; TAA
SSPLVPGTL

SEQ ID NO: 40040 - protein, 9 aa, Homo sapiens
  misc_feature: Table A; Target 40040; HLA-A*31:01; MAGEA4; ENSG00000147381; TAA
SSPLVPGTL

SEQ ID NO: 40041 - protein, 9 aa, Homo sapiens
  misc_feature: Table A; Target 40041; HLA-A*32:01; MAGEA4; ENSG00000147381; TAA
SSPLVPGTL

SEQ ID NO: 40042 - protein, 9 aa, Homo sapiens
  misc_feature: Table A; Target 40042; HLA-B*15:03; MAGEA4; ENSG00000147381; TAA
SSPLVPGTL

SEQ ID NO: 40043 - protein, 9 aa, Homo sapiens
  misc_feature: Table A; Target 40043; HLA-B*40:01; MAGEA4; ENSG00000147381; TAA
SSPLVPGTL

SEQ ID NO: 40044 - protein, 9 aa, Homo sapiens
  misc_feature: Table A; Target 40044; HLA-B*40:02; MAGEA4; ENSG00000147381; TAA
SSPLVPGTL

SEQ ID NO: 40045 - protein, 9 aa, Homo sapiens
  misc_feature: Table A; Target 40045; HLA-C*03:03; MAGEA4; ENSG00000147381; TAA
SSPLVPGTL

SEQ ID NO: 40046 - protein, 9 aa, Homo sapiens
  misc_feature: Table A; Target 40046; HLA-C*05:01; MAGEA4; ENSG00000147381; TAA
SSPLVPGTL

SEQ ID NO: 40047 - protein, 9 aa, Homo sapiens
  misc_feature: Table A; Target 40047; HLA-C*06:02; MAGEA4; ENSG00000147381; TAA
SSPLVPGTL

SEQ ID NO: 40048 - protein, 10 aa, Homo sapiens
  misc_feature: Table A; Target 40048; HLA-A*30:02; MAGEA4; ENSG00000147381; TAA
SSSPLVPGTL

SEQ ID NO: 40049 - protein, 9 aa, Homo sapiens
  misc_feature: Table A; Target 40049; HLA-C*03:03; MAGEA4; ENSG00000147381; TAA
STSPDAESL

SEQ ID NO: 40050 - protein, 9 aa, Homo sapiens
  misc_feature: Table A; Target 40050; HLA-C*03:04; MAGEA4; ENSG00000147381; TAA
STSPDAESL

SEQ ID NO: 40051 - protein, 10 aa, Homo sapiens
  misc_feature: Table A; Target 40051; HLA-B*57:01; MAGEA4; ENSG00000147381; TAA
STSPDAESLF

SEQ ID NO: 40052 - protein, 11 aa, Homo sapiens
  misc_feature: Table A; Target 40052; HLA-B*27:02; MAGEA4; ENSG00000147381; TAA
STSPDAESLFR

SEQ ID NO: 40053 - protein, 11 aa, Homo sapiens
  misc_feature: Table A; Target 40053; HLA-B*27:05; MAGEA4; ENSG00000147381; TAA
SYDGLLGNNQI

SEQ ID NO: 40054 - protein, 11 aa, Homo sapiens
  misc_feature: Table A; Target 40054; HLA-B*55:01; MAGEA4; ENSG00000147381; TAA
SYDGLLGNNQI

SEQ ID NO: 40055 - protein, 8 aa, Homo sapiens
  misc_feature: Table A; Target 40055; HLA-C*07:01; MAGEA4; ENSG00000147381; TAA
SYVKVLEH

SEQ ID NO: 40056 - protein, 9 aa, Homo sapiens
  misc_feature: Table A; Target 40056; HLA-A*68:02; MAGEA4; ENSG00000147381; TAA
SYVKVLEHV

SEQ ID NO: 40057 - protein, 10 aa, Homo sapiens
  misc_feature: Table A; Target 40057; HLA-A*24:02; MAGEA4; ENSG00000147381; TAA
SYVKVLEHVV

SEQ ID NO: 40058 - protein, 9 aa, Homo sapiens
  misc_feature: Table A; Target 40058; HLA-B*39:01; MAGEA4; ENSG00000147381; TAA
TIAMEGDSA

SEQ ID NO: 40059 - protein, 9 aa, Homo sapiens
  misc_feature: Table A; Target 40059; HLA-A*32:01; MAGEA4; ENSG00000147381; TAA
TQDWVQENY

SEQ ID NO: 40060 - protein, 9 aa, Homo sapiens
  misc_feature: Table A; Target 40060; HLA-B*27:05; MAGEA4; ENSG00000147381; TAA
TQDWVQENY

SEQ ID NO: 40061 - protein, 10 aa, Homo sapiens
  misc_feature: Table A; Target 40061; HLA-C*07:06; MAGEA4; ENSG00000147381; TAA
TSPDAESLFR

SEQ ID NO: 40062 - protein, 8 aa, Homo sapiens
  misc_feature: Table A; Target 40062; HLA-C*04:01; MAGEA4; ENSG00000147381; TAA
TSYVKVLE

SEQ ID NO: 40063 - protein, 8 aa, Homo sapiens
  misc_feature: Table A; Target 40063; HLA-C*06:02; MAGEA4; ENSG00000147381; TAA
TSYVKVLE

SEQ ID NO: 40064 - protein, 8 aa, Homo sapiens
  misc_feature: Table A; Target 40064; HLA-C*07:01; MAGEA4; ENSG00000147381; TAA
TSYVKVLE

SEQ ID NO: 40065 - protein, 8 aa, Homo sapiens
  misc_feature: Table A; Target 40065; HLA-C*12:03; MAGEA4; ENSG00000147381; TAA
TSYVKVLE

SEQ ID NO: 40066 - protein, 9 aa, Homo sapiens
  misc_feature: Table A; Target 40066; HLA-A*33:01; MAGEA4; ENSG00000147381; TAA
TSYVKVLEH

SEQ ID NO: 40067 - protein, 9 aa, Homo sapiens
  misc_feature: Table A; Target 40067; HLA-C*07:01; MAGEA4; ENSG00000147381; TAA
TSYVKVLEH

SEQ ID NO: 40068 - protein, 9 aa, Homo sapiens
  misc_feature: Table A; Target 40068; HLA-C*16:02; MAGEA4; ENSG00000147381; TAA
TSYVKVLEH

SEQ ID NO: 40069 - protein, 10 aa, Homo sapiens
  misc_feature: Table A; Target 40069; HLA-A*02:03; MAGEA4; ENSG00000147381; TAA
TSYVKVLEHV

SEQ ID NO: 40070 - protein, 9 aa, Homo sapiens
  misc_feature: Table A; Target 40070; HLA-A*03:02; MAGEA4; ENSG00000147381; TAA
TVYGEPRKL

SEQ ID NO: 40071 - protein, 9 aa, Homo sapiens
  misc_feature: Table A; Target 40071; HLA-A*11:01; MAGEA4; ENSG00000147381; TAA
TVYGEPRKL

SEQ ID NO: 40072 - protein, 9 aa, Homo sapiens
  misc_feature: Table A; Target 40072; HLA-A*25:01; MAGEA4; ENSG00000147381; TAA
TVYGEPRKL

SEQ ID NO: 40073 - protein, 9 aa, Homo sapiens
  misc_feature: Table A; Target 40073; HLA-A*31:01; MAGEA4; ENSG00000147381; TAA
TVYGEPRKL

SEQ ID NO: 40074 - protein, 9 aa, Homo sapiens
  misc_feature: Table A; Target 40074; HLA-A*68:01; MAGEA4; ENSG00000147381; TAA
TVYGEPRKL

SEQ ID NO: 40075 - protein, 9 aa, Homo sapiens
  misc_feature: Table A; Target 40075; HLA-C*03:03; MAGEA4; ENSG00000147381; TAA
TVYGEPRKL

SEQ ID NO: 40076 - protein, 9 aa, Homo sapiens
  misc_feature: Table A; Target 40076; HLA-C*07:06; MAGEA4; ENSG00000147381; TAA
TVYGEPRKL

SEQ ID NO: 40077 - protein, 9 aa, Homo sapiens
  misc_feature: Table A; Target 40077; HLA-C*16:02; MAGEA4; ENSG00000147381; TAA
TVYGEPRKL

SEQ ID NO: 40078 - protein, 8 aa, Homo sapiens
  misc_feature: Table A; Target 40078; HLA-C*04:01; MAGEA4; ENSG00000147381; TAA
TYTLVTCL

SEQ ID NO: 40079 - protein, 8 aa, Homo sapiens
  misc_feature: Table A; Target 40079; HLA-C*07:04; MAGEA4; ENSG00000147381; TAA
TYTLVTCL

SEQ ID NO: 40080 - protein, 9 aa, Homo sapiens
  misc_feature: Table A; Target 40080; HLA-C*07:01; MAGEA4; ENSG00000147381; TAA
TYTLVTCLG

SEQ ID NO: 40081 - protein, 10 aa, Homo sapiens
  misc_feature: Table A; Target 40081; HLA-C*07:01; MAGEA4; ENSG00000147381; TAA
TYTLVTCLGL

SEQ ID NO: 40082 - protein, 8 aa, Homo sapiens
  misc_feature: Table A; Target 40082; HLA-A*30:01; MAGEA4; ENSG00000147381; TAA
VDELAHFL

SEQ ID NO: 40083 - protein, 8 aa, Homo sapiens
  misc_feature: Table A; Target 40083; HLA-C*06:02; MAGEA4; ENSG00000147381; TAA
VDELAHFL

SEQ ID NO: 40084 - protein, 8 aa, Homo sapiens
  misc_feature: Table A; Target 40084; HLA-C*07:01; MAGEA4; ENSG00000147381; TAA
VDELAHFL

SEQ ID NO: 40085 - protein, 9 aa, Homo sapiens
  misc_feature: Table A; Target 40085; HLA-B*37:01; MAGEA4; ENSG00000147381; TAA
VDELAHFLL

SEQ ID NO: 40086 - protein, 8 aa, Homo sapiens
  misc_feature: Table A; Target 40086; HLA-C*06:02; MAGEA4; ENSG00000147381; TAA
VDPASNTY

SEQ ID NO: 40087 - protein, 8 aa, Homo sapiens
  misc_feature: Table A; Target 40087; HLA-C*07:02; MAGEA4; ENSG00000147381; TAA
VDPASNTY

SEQ ID NO: 40088 - protein, 10 aa, Homo sapiens
  misc_feature: Table A; Target 40088; HLA-B*07:02; MAGEA4; ENSG00000147381; TAA
VDPASNTYTL

SEQ ID NO: 40089 - protein, 10 aa, Homo sapiens
  misc_feature: Table A; Target 40089; HLA-C*01:02; MAGEA4; ENSG00000147381; TAA
VDPASNTYTL

SEQ ID NO: 40090 - protein, 10 aa, Homo sapiens
  misc_feature: Table A; Target 40090; HLA-C*07:02; MAGEA4; ENSG00000147381; TAA
VDPASNTYTL

SEQ ID NO: 40091 - protein, 10 aa, Homo sapiens
  misc_feature: Table A; Target 40091; HLA-B*40:02; MAGEA4; ENSG00000147381; TAA
VEAQEEALGL

SEQ ID NO: 40092 - protein, 10 aa, Homo sapiens
  misc_feature: Table A; Target 40092; HLA-B*44:03; MAGEA4; ENSG00000147381; TAA
VEAQEEALGL

SEQ ID NO: 40093 - protein, 10 aa, Homo sapiens
  misc_feature: Table A; Target 40093; HLA-B*49:01; MAGEA4; ENSG00000147381; TAA
VEAQEEALGL

SEQ ID NO: 40094 - protein, 10 aa, Homo sapiens
  misc_feature: Table A; Target 40094; HLA-B*15:01; MAGEA4; ENSG00000147381; TAA
VIFGKASESL

SEQ ID NO: 40095 - protein, 10 aa, Homo sapiens
  misc_feature: Table A; Target 40095; HLA-B*46:01; MAGEA4; ENSG00000147381; TAA
VIFGKASESL

SEQ ID NO: 40096 - protein, 11 aa, Homo sapiens
  misc_feature: Table A; Target 40096; HLA-C*07:01; MAGEA4; ENSG00000147381; TAA
VKEVDPASNTY

SEQ ID NO: 40097 - protein, 9 aa, Homo sapiens
  misc_feature: Table A; Target 40097; HLA-C*07:01; MAGEA4; ENSG00000147381; TAA
VLEHVVRVN

SEQ ID NO: 40098 - protein, 10 aa, Homo sapiens
  misc_feature: Table A; Target 40098; HLA-A*02:07; MAGEA4; ENSG00000147381; TAA
VLEHVVRVNA

SEQ ID NO: 40099 - protein, 9 aa, Homo sapiens
  misc_feature: Table A; Target 40099; HLA-A*30:02; MAGEA4; ENSG00000147381; TAA
VNARVRIAY

SEQ ID NO: 40100 - protein, 9 aa, Homo sapiens
  misc_feature: Table A; Target 40100; HLA-B*46:01; MAGEA4; ENSG00000147381; TAA
VNARVRIAY

SEQ ID NO: 40101 - protein, 9 aa, Homo sapiens
  misc_feature: Table A; Target 40101; HLA-B*57:01; MAGEA4; ENSG00000147381; TAA
VNARVRIAY

SEQ ID NO: 40102 - protein, 9 aa, Homo sapiens
  misc_feature: Table A; Target 40102; HLA-A*01:01; MAGEA4; ENSG00000147381; TAA
VPGSNPARY

SEQ ID NO: 40103 - protein, 9 aa, Homo sapiens
  misc_feature: Table A; Target 40103; HLA-C*03:03; MAGEA4; ENSG00000147381; TAA
VPGSNPARY

SEQ ID NO: 40104 - protein, 9 aa, Homo sapiens
  misc_feature: Table A; Target 40104; HLA-C*07:04; MAGEA4; ENSG00000147381; TAA
VPGSNPARY

SEQ ID NO: 40105 - protein, 8 aa, Homo sapiens
  misc_feature: Table A; Target 40105; HLA-B*51:01; MAGEA4; ENSG00000147381; TAA
VPGTLEEV

SEQ ID NO: 40106 - protein, 10 aa, Homo sapiens
  misc_feature: Table A; Target 40106; HLA-B*55:01; MAGEA4; ENSG00000147381; TAA
VPGTLEEVPA

SEQ ID NO: 40107 - protein, 11 aa, Homo sapiens
  misc_feature: Table A; Target 40107; HLA-B*56:01; MAGEA4; ENSG00000147381; TAA
VPGTLEEVPAA

SEQ ID NO: 40108 - protein, 8 aa, Homo sapiens
  misc_feature: Table A; Target 40108; HLA-C*07:02; MAGEA4; ENSG00000147381; TAA
VRIAYPSL

SEQ ID NO: 40109 - protein, 9 aa, Homo sapiens
  misc_feature: Table A; Target 40109; HLA-A*31:01; MAGEA4; ENSG00000147381; TAA
VRIAYPSLR

SEQ ID NO: 40110 - protein, 9 aa, Homo sapiens
  misc_feature: Table A; Target 40110; HLA-C*06:02; MAGEA4; ENSG00000147381; TAA
VRIAYPSLR

SEQ ID NO: 40111 - protein, 8 aa, Homo sapiens
  misc_feature: Table A; Target 40111; HLA-C*04:01; MAGEA4; ENSG00000147381; TAA
VSSSSPLV

SEQ ID NO: 40112 - protein, 8 aa, Homo sapiens
  misc_feature: Table A; Target 40112; HLA-C*06:02; MAGEA4; ENSG00000147381; TAA
VSSSSPLV

SEQ ID NO: 40113 - protein, 8 aa, Homo sapiens
  misc_feature: Table A; Target 40113; HLA-B*46:01; MAGEA4; ENSG00000147381; TAA
VTCLGLSY

SEQ ID NO: 40114 - protein, 9 aa, Homo sapiens
  misc_feature: Table A; Target 40114; HLA-B*40:02; MAGEA4; ENSG00000147381; TAA
VTKAEMLER

SEQ ID NO: 40115 - protein, 9 aa, Homo sapiens
  misc_feature: Table A; Target 40115; HLA-C*06:02; MAGEA4; ENSG00000147381; TAA
VTKAEMLER

SEQ ID NO: 40116 - protein, 10 aa, Homo sapiens
  misc_feature: Table A; Target 40116; HLA-A*02:03; MAGEA4; ENSG00000147381; TAA
VTKAEMLERV

SEQ ID NO: 40117 - protein, 9 aa, Homo sapiens
  misc_feature: Table A; Target 40117; HLA-A*31:01; MAGEA4; ENSG00000147381; TAA
VVRVNARVR

SEQ ID NO: 40118 - protein, 9 aa, Homo sapiens
  misc_feature: Table A; Target 40118; HLA-B*37:01; MAGEA4; ENSG00000147381; TAA
VYDGREHTV

SEQ ID NO: 40119 - protein, 9 aa, Homo sapiens
  misc_feature: Table A; Target 40119; HLA-B*39:01; MAGEA4; ENSG00000147381; TAA
VYDGREHTV

SEQ ID NO: 40120 - protein, 9 aa, Homo sapiens
  misc_feature: Table A; Target 40120; HLA-C*03:03; MAGEA4; ENSG00000147381; TAA
VYDGREHTV

SEQ ID NO: 40121 - protein, 9 aa, Homo sapiens
  misc_feature: Table A; Target 40121; HLA-C*06:02; MAGEA4; ENSG00000147381; TAA
VYDGREHTV

SEQ ID NO: 40122 - protein, 9 aa, Homo sapiens
  misc_feature: Table A; Target 40122; HLA-C*07:04; MAGEA4; ENSG00000147381; TAA
VYDGREHTV

SEQ ID NO: 40123 - protein, 9 aa, Homo sapiens
  misc_feature: Table A; Target 40123; HLA-C*12:03; MAGEA4; ENSG00000147381; TAA
VYDGREHTV

SEQ ID NO: 40124 - protein, 10 aa, Homo sapiens
  misc_feature: Table A; Target 40124; HLA-A*01:01; MAGEA4; ENSG00000147381; TAA
VYDGREHTVY

SEQ ID NO: 40125 - protein, 10 aa, Homo sapiens
  misc_feature: Table A; Target 40125; HLA-A*23:01; MAGEA4; ENSG00000147381; TAA
VYDGREHTVY

SEQ ID NO: 40126 - protein, 10 aa, Homo sapiens
  misc_feature: Table A; Target 40126; HLA-B*15:01; MAGEA4; ENSG00000147381; TAA
VYDGREHTVY

SEQ ID NO: 40127 - protein, 8 aa, Homo sapiens
  misc_feature: Table A; Target 40127; HLA-C*14:02; MAGEA4; ENSG00000147381; TAA
VYGEPRKL

SEQ ID NO: 40128 - protein, 8 aa, Homo sapiens
  misc_feature: Table A; Target 40128; HLA-C*16:01; MAGEA4; ENSG00000147381; TAA
VYGEPRKL

SEQ ID NO: 40129 - protein, 9 aa, Homo sapiens
  misc_feature: Table A; Target 40129; HLA-C*02:02; MAGEA4; ENSG00000147381; TAA
WVQENYLEY

SEQ ID NO: 40130 - protein, 9 aa, Homo sapiens
  misc_feature: Table A; Target 40130; HLA-C*03:03; MAGEA4; ENSG00000147381; TAA
WVQENYLEY

SEQ ID NO: 40131 - protein, 9 aa, Homo sapiens
  misc_feature: Table A; Target 40131; HLA-C*07:01; MAGEA4; ENSG00000147381; TAA
WVQENYLEY

SEQ ID NO: 40132 - protein, 9 aa, Homo sapiens
  misc_feature: Table A; Target 40132; HLA-C*14:02; MAGEA4; ENSG00000147381; TAA
WVQENYLEY

SEQ ID NO: 40133 - protein, 8 aa, Homo sapiens
  misc_feature: Table A; Target 40133; HLA-C*07:01; MAGEA4; ENSG00000147381; TAA
YDGLLGNN

SEQ ID NO: 40134 - protein, 8 aa, Homo sapiens
  misc_feature: Table A; Target 40134; HLA-B*40:02; MAGEA4; ENSG00000147381; TAA
YDGREHTV

SEQ ID NO: 40135 - protein, 8 aa, Homo sapiens
  misc_feature: Table A; Target 40135; HLA-C*04:01; MAGEA4; ENSG00000147381; TAA
YDGREHTV

SEQ ID NO: 40136 - protein, 8 aa, Homo sapiens
  misc_feature: Table A; Target 40136; HLA-C*12:03; MAGEA4; ENSG00000147381; TAA
YDGREHTV

SEQ ID NO: 40137 - protein, 8 aa, Homo sapiens
  misc_feature: Table A; Target 40137; HLA-C*16:02; MAGEA4; ENSG00000147381; TAA
YDGREHTV

SEQ ID NO: 40138 - protein, 9 aa, Homo sapiens
  misc_feature: Table A; Target 40138; HLA-B*15:01; MAGEA4; ENSG00000147381; TAA
YDGREHTVY

SEQ ID NO: 40139 - protein, 9 aa, Homo sapiens
  misc_feature: Table A; Target 40139; HLA-B*15:03; MAGEA4; ENSG00000147381; TAA
YDGREHTVY

SEQ ID NO: 40140 - protein, 9 aa, Homo sapiens
  misc_feature: Table A; Target 40140; HLA-C*07:04; MAGEA4; ENSG00000147381; TAA
YDGREHTVY

SEQ ID NO: 40141 - protein, 9 aa, Homo sapiens
  misc_feature: Table A; Target 40141; HLA-C*12:03; MAGEA4; ENSG00000147381; TAA
YDGREHTVY

SEQ ID NO: 40142 - protein, 9 aa, Homo sapiens
  misc_feature: Table A; Target 40142; HLA-B*49:01; MAGEA4; ENSG00000147381; TAA
YEFLWGPRA

SEQ ID NO: 40143 - protein, 10 aa, Homo sapiens
  misc_feature: Table A; Target 40143; HLA-A*30:01; MAGEA4; ENSG00000147381; TAA
YEFLWGPRAL

SEQ ID NO: 40144 - protein, 10 aa, Homo sapiens
  misc_feature: Table A; Target 40144; HLA-B*40:02; MAGEA4; ENSG00000147381; TAA
YEFLWGPRAL

SEQ ID NO: 40145 - protein, 9 aa, Homo sapiens
  misc_feature: Table A; Target 40145; HLA-B*40:02; MAGEA4; ENSG00000147381; TAA
YPSLREAAL

SEQ ID NO: 40146 - protein, 9 aa, Homo sapiens
  misc_feature: Table A; Target 40146; HLA-C*05:01; MAGEA4; ENSG00000147381; TAA
YPSLREAAL

SEQ ID NO: 40147 - protein, 9 aa, Homo sapiens
  misc_feature: Table A; Target 40147; HLA-C*16:02; MAGEA4; ENSG00000147381; TAA
YPSLREAAL

SEQ ID NO: 40148 - protein, 10 aa, Homo sapiens
  misc_feature: Table A; Target 40148; HLA-B*35:03; MAGEA4; ENSG00000147381; TAA
YPSLREAALL

SEQ ID NO: 40149 - protein, 9 aa, Homo sapiens
  misc_feature: Table A; Target 40149; HLA-C*07:02; MAGEA4; ENSG00000147381; TAA
YRAKELVTK

SEQ ID NO: 40150 - protein, 10 aa, Homo sapiens
  misc_feature: Table A; Target 40150; HLA-B*27:05; MAGEA4; ENSG00000147381; TAA
YRQVPGSNPA

SEQ ID NO: 40151 - protein, 8 aa, Homo sapiens
  misc_feature: Table A; Target 40151; HLA-A*68:02; MAGEA4; ENSG00000147381; TAA
YVKVLEHV

SEQ ID NO: 40152 - protein, 8 aa, Homo sapiens
  misc_feature: Table A; Target 40152; HLA-B*13:02; MAGEA4; ENSG00000147381; TAA
YVKVLEHV

SEQ ID NO: 40153 - protein, 8 aa, Homo sapiens
  misc_feature: Table A; Target 40153; HLA-B*40:02; MAGEA4; ENSG00000147381; TAA
YVKVLEHV

SEQ ID NO: 40154 - protein, 8 aa, Homo sapiens
  misc_feature: Table A; Target 40154; HLA-C*06:02; MAGEA4; ENSG00000147381; TAA
YVKVLEHV

SEQ ID NO: 40155 - protein, 8 aa, Homo sapiens
  misc_feature: Table A; Target 40155; HLA-C*12:03; MAGEA4; ENSG00000147381; TAA
YVKVLEHV

SEQ ID NO: 40156 - protein, 9 aa, Homo sapiens
  misc_feature: Table A; Target 40156; HLA-A*31:01; MAGEA4; ENSG00000147381; TAA
YVKVLEHVV

SEQ ID NO: 40157 - protein, 9 aa, Homo sapiens
  misc_feature: Table A; Target 40157; HLA-B*55:01; MAGEA4; ENSG00000147381; TAA
YVKVLEHVV

SEQ ID NO: 40158 - protein, 9 aa, Homo sapiens
  misc_feature: Table A; Target 40158; HLA-B*57:01; MAGEA4; ENSG00000147381; TAA
YVKVLEHVV

SEQ ID NO: 40159 - protein, 9 aa, Homo sapiens
  misc_feature: Table A; Target 40159; HLA-C*06:02; MAGEA4; ENSG00000147381; TAA
YVKVLEHVV

SEQ ID NO: 40160 - protein, 10 aa, Homo sapiens
  misc_feature: Table A; Target 40160; HLA-A*33:03; MAGEA4; ENSG00000147381; TAA
YVKVLEHVVR

SEQ ID NO: 40161 - protein, 9 aa, Homo sapiens
  misc_feature: Table A; Target 40161; HLA-A*33:01; MAGEA4,MAGEA6; ENSG00000147381,ENSG00000197172; TAA,CTA
ENYLEYRQV

SEQ ID NO: 40162 - protein, 8 aa, Homo sapiens
  misc_feature: Table A; Target 40162; HLA-C*12:03; MAGEA4,MAGEA6; ENSG00000147381,ENSG00000197172; TAA,CTA
VQENYLEY

SEQ ID NO: 40163 - protein, 10 aa, Homo sapiens
  misc_feature: Table A; Target 40163; HLA-C*07:02; MAGEA4,MAGEA8; ENSG00000147381,ENSG00000156009; TAA,TAA
GPRALAETSY

SEQ ID NO: 40164 - protein, 9 aa, Homo sapiens
  misc_feature: Table A; Target 40164; HLA-B*40:02; MAGEA4,MAGEA8; ENSG00000147381,ENSG00000156009; TAA,TAA
KVLEHVVRV

SEQ ID NO: 40165 - protein, 10 aa, Homo sapiens
  misc_feature: Table A; Target 40165; HLA-A*11:01; MAGEA4,MAGEA8; ENSG00000147381,ENSG00000156009; TAA,TAA
RALAETSYVK

SEQ ID NO: 40166 - protein, 11 aa, Homo sapiens
  misc_feature: Table A; Target 40166; HLA-A*31:01; MAGEA4,MAGEA8; ENSG00000147381,ENSG00000156009; TAA,TAA
SYVKVLEHVVR

SEQ ID NO: 40167 - protein, 10 aa, Homo sapiens
  misc_feature: Table A; Target 40167; HLA-A*31:01; MAGEA4,MAGEA8; ENSG00000147381,ENSG00000156009; TAA,TAA
WVQENYLEYR

SEQ ID NO: 40168 - protein, 9 aa, Homo sapiens
  misc_feature: Table A; Target 40168; HLA-B*58:01; MAGEA4,MAGEA8; ENSG00000147381,ENSG00000156009; TAA,TAA
YVKVLEHVV

SEQ ID NO: 40169 - protein, 9 aa, Homo sapiens
  misc_feature: Table A; Target 40169; HLA-C*07:02; MAGEA4,MAGEA8; ENSG00000147381,ENSG00000156009; TAA,TAA
YVKVLEHVV

SEQ ID NO: 40170 - protein, 9 aa, Homo sapiens
  misc_feature: Table A; Target 40170; HLA-C*16:01; MAGEA4,MAGEA8; ENSG00000147381,ENSG00000156009; TAA,TAA
YVKVLEHVV

SEQ ID NO: 40171 - protein, 9 aa, Homo sapiens
  misc_feature: Table A; Target 40171; HLA-B*08:01; MAGEA6; ENSG00000197172; CTA
AALSRKVAK

SEQ ID NO: 40172 - protein, 9 aa, Homo sapiens
  misc_feature: Table A; Target 40172; HLA-C*16:01; MAGEA6; ENSG00000197172; CTA
AALSRKVAK

SEQ ID NO: 40173 - protein, 8 aa, Homo sapiens
  misc_feature: Table A; Target 40173; HLA-A*02:01; MAGEA6; ENSG00000197172; CTA
ALIETSYV

SEQ ID NO: 40174 - protein, 8 aa, Homo sapiens
  misc_feature: Table A; Target 40174; HLA-A*02:03; MAGEA6; ENSG00000197172; CTA
ALIETSYV

SEQ ID NO: 40175 - protein, 8 aa, Homo sapiens
  misc_feature: Table A; Target 40175; HLA-A*02:07; MAGEA6; ENSG00000197172; CTA
ALIETSYV

SEQ ID NO: 40176 - protein, 8 aa, Homo sapiens
  misc_feature: Table A; Target 40176; HLA-B*13:02; MAGEA6; ENSG00000197172; CTA
ALIETSYV

SEQ ID NO: 40177 - protein, 8 aa, Homo sapiens
  misc_feature: Table A; Target 40177; HLA-B*49:01; MAGEA6; ENSG00000197172; CTA
ALIETSYV

SEQ ID NO: 40178 - protein, 8 aa, Homo sapiens
  misc_feature: Table A; Target 40178; HLA-B*55:01; MAGEA6; ENSG00000197172; CTA
ALIETSYV

SEQ ID NO: 40179 - protein, 9 aa, Homo sapiens
  misc_feature: Table A; Target 40179; HLA-A*01:01; MAGEA6; ENSG00000197172; CTA
ALIETSYVK

SEQ ID NO: 40180 - protein, 9 aa, Homo sapiens
  misc_feature: Table A; Target 40180; HLA-A*03:01; MAGEA6; ENSG00000197172; CTA
ALIETSYVK

SEQ ID NO: 40181 - protein, 9 aa, Homo sapiens
  misc_feature: Table A; Target 40181; HLA-A*03:02; MAGEA6; ENSG00000197172; CTA
ALIETSYVK

SEQ ID NO: 40182 - protein, 9 aa, Homo sapiens
  misc_feature: Table A; Target 40182; HLA-A*11:01; MAGEA6; ENSG00000197172; CTA
ALIETSYVK

SEQ ID NO: 40183 - protein, 9 aa, Homo sapiens
  misc_feature: Table A; Target 40183; HLA-A*29:02; MAGEA6; ENSG00000197172; CTA
ALIETSYVK

SEQ ID NO: 40184 - protein, 9 aa, Homo sapiens
  misc_feature: Table A; Target 40184; HLA-B*46:01; MAGEA6; ENSG00000197172; CTA
ALIETSYVK

SEQ ID NO: 40185 - protein, 10 aa, Homo sapiens
  misc_feature: Table A; Target 40185; HLA-A*02:01; MAGEA6; ENSG00000197172; CTA
ALIETSYVKV

SEQ ID NO: 40186 - protein, 10 aa, Homo sapiens
  misc_feature: Table A; Target 40186; HLA-A*02:03; MAGEA6; ENSG00000197172; CTA
ALIETSYVKV

SEQ ID NO: 40187 - protein, 10 aa, Homo sapiens
  misc_feature: Table A; Target 40187; HLA-A*02:04; MAGEA6; ENSG00000197172; CTA
ALIETSYVKV

SEQ ID NO: 40188 - protein, 10 aa, Homo sapiens
  misc_feature: Table A; Target 40188; HLA-A*02:07; MAGEA6; ENSG00000197172; CTA
ALIETSYVKV

SEQ ID NO: 40189 - protein, 10 aa, Homo sapiens
  misc_feature: Table A; Target 40189; HLA-B*13:02; MAGEA6; ENSG00000197172; CTA
ALIETSYVKV

SEQ ID NO: 40190 - protein, 10 aa, Homo sapiens
  misc_feature: Table A; Target 40190; HLA-B*55:01; MAGEA6; ENSG00000197172; CTA
ALIETSYVKV

SEQ ID NO: 40191 - protein, 11 aa, Homo sapiens
  misc_feature: Table A; Target 40191; HLA-A*02:01; MAGEA6; ENSG00000197172; CTA
ALIETSYVKVL

SEQ ID NO: 40192 - protein, 11 aa, Homo sapiens
  misc_feature: Table A; Target 40192; HLA-A*02:03; MAGEA6; ENSG00000197172; CTA
ALIETSYVKVL

SEQ ID NO: 40193 - protein, 11 aa, Homo sapiens
  misc_feature: Table A; Target 40193; HLA-A*02:04; MAGEA6; ENSG00000197172; CTA
ALIETSYVKVL

SEQ ID NO: 40194 - protein, 11 aa, Homo sapiens
  misc_feature: Table A; Target 40194; HLA-A*02:07; MAGEA6; ENSG00000197172; CTA
ALIETSYVKVL

SEQ ID NO: 40195 - protein, 11 aa, Homo sapiens
  misc_feature: Table A; Target 40195; HLA-C*16:02; MAGEA6; ENSG00000197172; CTA
ALIETSYVKVL

SEQ ID NO: 40196 - protein, 9 aa, Homo sapiens
  misc_feature: Table A; Target 40196; HLA-A*02:03; MAGEA6; ENSG00000197172; CTA
ALSRKVAKL

SEQ ID NO: 40197 - protein, 9 aa, Homo sapiens
  misc_feature: Table A; Target 40197; HLA-A*02:04; MAGEA6; ENSG00000197172; CTA
ALSRKVAKL

SEQ ID NO: 40198 - protein, 8 aa, Homo sapiens
  misc_feature: Table A; Target 40198; HLA-C*05:01; MAGEA6; ENSG00000197172; CTA
ASDSLQLV

SEQ ID NO: 40199 - protein, 9 aa, Homo sapiens
  misc_feature: Table A; Target 40199; HLA-A*01:01; MAGEA6; ENSG00000197172; CTA
ASDSLQLVF

SEQ ID NO: 40200 - protein, 9 aa, Homo sapiens
  misc_feature: Table A; Target 40200; HLA-A*02:07; MAGEA6; ENSG00000197172; CTA
ASDSLQLVF

SEQ ID NO: 40201 - protein, 9 aa, Homo sapiens
  misc_feature: Table A; Target 40201; HLA-A*11:01; MAGEA6; ENSG00000197172; CTA
ASDSLQLVF

SEQ ID NO: 40202 - protein, 9 aa, Homo sapiens
  misc_feature: Table A; Target 40202; HLA-A*29:02; MAGEA6; ENSG00000197172; CTA
ASDSLQLVF

SEQ ID NO: 40203 - protein, 9 aa, Homo sapiens
  misc_feature: Table A; Target 40203; HLA-A*32:01; MAGEA6; ENSG00000197172; CTA
ASDSLQLVF

SEQ ID NO: 40204 - protein, 9 aa, Homo sapiens
  misc_feature: Table A; Target 40204; HLA-B*27:05; MAGEA6; ENSG00000197172; CTA
ASDSLQLVF

SEQ ID NO: 40205 - protein, 9 aa, Homo sapiens
  misc_feature: Table A; Target 40205; HLA-B*35:01; MAGEA6; ENSG00000197172; CTA
ASDSLQLVF

SEQ ID NO: 40206 - protein, 9 aa, Homo sapiens
  misc_feature: Table A; Target 40206; HLA-B*38:01; MAGEA6; ENSG00000197172; CTA
ASDSLQLVF

SEQ ID NO: 40207 - protein, 9 aa, Homo sapiens
  misc_feature: Table A; Target 40207; HLA-B*44:03; MAGEA6; ENSG00000197172; CTA
ASDSLQLVF

SEQ ID NO: 40208 - protein, 9 aa, Homo sapiens
  misc_feature: Table A; Target 40208; HLA-B*57:01; MAGEA6; ENSG00000197172; CTA
ASDSLQLVF

SEQ ID NO: 40209 - protein, 9 aa, Homo sapiens
  misc_feature: Table A; Target 40209; HLA-B*58:01; MAGEA6; ENSG00000197172; CTA
ASDSLQLVF

SEQ ID NO: 40210 - protein, 9 aa, Homo sapiens
  misc_feature: Table A; Target 40210; HLA-C*02:02; MAGEA6; ENSG00000197172; CTA
ASDSLQLVF

SEQ ID NO: 40211 - protein, 9 aa, Homo sapiens
  misc_feature: Table A; Target 40211; HLA-C*03:04; MAGEA6; ENSG00000197172; CTA
ASDSLQLVF

SEQ ID NO: 40212 - protein, 9 aa, Homo sapiens
  misc_feature: Table A; Target 40212; HLA-C*04:01; MAGEA6; ENSG00000197172; CTA
ASDSLQLVF

SEQ ID NO: 40213 - protein, 9 aa, Homo sapiens
  misc_feature: Table A; Target 40213; HLA-C*05:01; MAGEA6; ENSG00000197172; CTA
ASDSLQLVF

SEQ ID NO: 40214 - protein, 9 aa, Homo sapiens
  misc_feature: Table A; Target 40214; HLA-C*12:03; MAGEA6; ENSG00000197172; CTA
ASDSLQLVF

SEQ ID NO: 40215 - protein, 9 aa, Homo sapiens
  misc_feature: Table A; Target 40215; HLA-C*16:04; MAGEA6; ENSG00000197172; CTA
ASDSLQLVF

SEQ ID NO: 40216 - protein, 8 aa, Homo sapiens
  misc_feature: Table A; Target 40216; HLA-B*08:01; MAGEA6; ENSG00000197172; CTA
DPIGHVYI

SEQ ID NO: 40217 - protein, 8 aa, Homo sapiens
  misc_feature: Table A; Target 40217; HLA-B*51:01; MAGEA6; ENSG00000197172; CTA
DPIGHVYI

SEQ ID NO: 40218 - protein, 9 aa, Homo sapiens
  misc_feature: Table A; Target 40218; HLA-A*25:01; MAGEA6; ENSG00000197172; CTA
DPIGHVYIF

SEQ ID NO: 40219 - protein, 9 aa, Homo sapiens
  misc_feature: Table A; Target 40219; HLA-A*26:01; MAGEA6; ENSG00000197172; CTA
DPIGHVYIF

SEQ ID NO: 40220 - protein, 9 aa, Homo sapiens
  misc_feature: Table A; Target 40220; HLA-A*33:01; MAGEA6; ENSG00000197172; CTA
DPIGHVYIF

SEQ ID NO: 40221 - protein, 9 aa, Homo sapiens
  misc_feature: Table A; Target 40221; HLA-B*35:01; MAGEA6; ENSG00000197172; CTA
DPIGHVYIF

SEQ ID NO: 40222 - protein, 9 aa, Homo sapiens
  misc_feature: Table A; Target 40222; HLA-B*35:03; MAGEA6; ENSG00000197172; CTA
DPIGHVYIF

SEQ ID NO: 40223 - protein, 9 aa, Homo sapiens
  misc_feature: Table A; Target 40223; HLA-B*51:01; MAGEA6; ENSG00000197172; CTA
DPIGHVYIF

SEQ ID NO: 40224 - protein, 10 aa, Homo sapiens
  misc_feature: Table A; Target 40224; HLA-B*54:01; MAGEA6; ENSG00000197172; CTA
DPIGHVYIFA

SEQ ID NO: 40225 - protein, 9 aa, Homo sapiens
  misc_feature: Table A; Target 40225; HLA-A*26:01; MAGEA6; ENSG00000197172; CTA
DPKKLLTQY

SEQ ID NO: 40226 - protein, 9 aa, Homo sapiens
  misc_feature: Table A; Target 40226; HLA-A*33:01; MAGEA6; ENSG00000197172; CTA
DPKKLLTQY

SEQ ID NO: 40227 - protein, 9 aa, Homo sapiens
  misc_feature: Table A; Target 40227; HLA-B*18:01; MAGEA6; ENSG00000197172; CTA
DPKKLLTQY

SEQ ID NO: 40228 - protein, 9 aa, Homo sapiens
  misc_feature: Table A; Target 40228; HLA-B*35:01; MAGEA6; ENSG00000197172; CTA
DPKKLLTQY

SEQ ID NO: 40229 - protein, 8 aa, Homo sapiens
  misc_feature: Table A; Target 40229; HLA-A*33:01; MAGEA6; ENSG00000197172; CTA
DSIFGDPK

SEQ ID NO: 40230 - protein, 8 aa, Homo sapiens
  misc_feature: Table A; Target 40230; HLA-A*68:01; MAGEA6; ENSG00000197172; CTA
DSIFGDPK

SEQ ID NO: 40231 - protein, 9 aa, Homo sapiens
  misc_feature: Table A; Target 40231; HLA-A*33:01; MAGEA6; ENSG00000197172; CTA
DSIFGDPKK

SEQ ID NO: 40232 - protein, 9 aa, Homo sapiens
  misc_feature: Table A; Target 40232; HLA-A*68:01; MAGEA6; ENSG00000197172; CTA
DSIFGDPKK

SEQ ID NO: 40233 - protein, 10 aa, Homo sapiens
  misc_feature: Table A; Target 40233; HLA-A*68:01; MAGEA6; ENSG00000197172; CTA
DSIFGDPKKL

SEQ ID NO: 40234 - protein, 9 aa, Homo sapiens
  misc_feature: Table A; Target 40234; HLA-B*27:02; MAGEA6; ENSG00000197172; CTA
EDSIFGDPK

SEQ ID NO: 40235 - protein, 9 aa, Homo sapiens
  misc_feature: Table A; Target 40235; HLA-A*33:01; MAGEA6; ENSG00000197172; CTA
EFQAALSRK

SEQ ID NO: 40236 - protein, 10 aa, Homo sapiens
  misc_feature: Table A; Target 40236; HLA-A*26:01; MAGEA6; ENSG00000197172; CTA
ELMEVDPIGH

SEQ ID NO: 40237 - protein, 11 aa, Homo sapiens
  misc_feature: Table A; Target 40237; HLA-A*68:02; MAGEA6; ENSG00000197172; CTA
ELMEVDPIGHV

SEQ ID NO: 40238 - protein, 8 aa, Homo sapiens
  misc_feature: Table A; Target 40238; HLA-C*04:01; MAGEA6; ENSG00000197172; CTA
EVDPIGHV

SEQ ID NO: 40239 - protein, 8 aa, Homo sapiens
  misc_feature: Table A; Target 40239; HLA-C*05:01; MAGEA6; ENSG00000197172; CTA
EVDPIGHV

SEQ ID NO: 40240 - protein, 9 aa, Homo sapiens
  misc_feature: Table A; Target 40240; HLA-A*02:07; MAGEA6; ENSG00000197172; CTA
EVDPIGHVY

SEQ ID NO: 40241 - protein, 9 aa, Homo sapiens
  misc_feature: Table A; Target 40241; HLA-A*03:02; MAGEA6; ENSG00000197172; CTA
EVDPIGHVY

SEQ ID NO: 40242 - protein, 9 aa, Homo sapiens
  misc_feature: Table A; Target 40242; HLA-A*11:01; MAGEA6; ENSG00000197172; CTA
EVDPIGHVY

SEQ ID NO: 40243 - protein, 9 aa, Homo sapiens
  misc_feature: Table A; Target 40243; HLA-A*23:01; MAGEA6; ENSG00000197172; CTA
EVDPIGHVY

SEQ ID NO: 40244 - protein, 9 aa, Homo sapiens
  misc_feature: Table A; Target 40244; HLA-A*25:01; MAGEA6; ENSG00000197172; CTA
EVDPIGHVY

SEQ ID NO: 40245 - protein, 9 aa, Homo sapiens
  misc_feature: Table A; Target 40245; HLA-A*29:02; MAGEA6; ENSG00000197172; CTA
EVDPIGHVY

SEQ ID NO: 40246 - protein, 9 aa, Homo sapiens
  misc_feature: Table A; Target 40246; HLA-A*32:01; MAGEA6; ENSG00000197172; CTA
EVDPIGHVY

SEQ ID NO: 40247 - protein, 9 aa, Homo sapiens
  misc_feature: Table A; Target 40247; HLA-A*33:01; MAGEA6; ENSG00000197172; CTA
EVDPIGHVY

SEQ ID NO: 40248 - protein, 9 aa, Homo sapiens
  misc_feature: Table A; Target 40248; HLA-A*33:03; MAGEA6; ENSG00000197172; CTA
EVDPIGHVY

SEQ ID NO: 40249 - protein, 9 aa, Homo sapiens
  misc_feature: Table A; Target 40249; HLA-A*68:01; MAGEA6; ENSG00000197172; CTA
EVDPIGHVY

SEQ ID NO: 40250 - protein, 9 aa, Homo sapiens
  misc_feature: Table A; Target 40250; HLA-A*68:02; MAGEA6; ENSG00000197172; CTA
EVDPIGHVY

SEQ ID NO: 40251 - protein, 9 aa, Homo sapiens
  misc_feature: Table A; Target 40251; HLA-B*15:01; MAGEA6; ENSG00000197172; CTA
EVDPIGHVY

SEQ ID NO: 40252 - protein, 9 aa, Homo sapiens
  misc_feature: Table A; Target 40252; HLA-B*15:03; MAGEA6; ENSG00000197172; CTA
EVDPIGHVY

SEQ ID NO: 40253 - protein, 9 aa, Homo sapiens
  misc_feature: Table A; Target 40253; HLA-B*18:01; MAGEA6; ENSG00000197172; CTA
EVDPIGHVY

SEQ ID NO: 40254 - protein, 9 aa, Homo sapiens
  misc_feature: Table A; Target 40254; HLA-B*27:02; MAGEA6; ENSG00000197172; CTA
EVDPIGHVY

SEQ ID NO: 40255 - protein, 9 aa, Homo sapiens
  misc_feature: Table A; Target 40255; HLA-B*27:05; MAGEA6; ENSG00000197172; CTA
EVDPIGHVY

SEQ ID NO: 40256 - protein, 9 aa, Homo sapiens
  misc_feature: Table A; Target 40256; HLA-B*35:03; MAGEA6; ENSG00000197172; CTA
EVDPIGHVY

SEQ ID NO: 40257 - protein, 9 aa, Homo sapiens
  misc_feature: Table A; Target 40257; HLA-B*38:01; MAGEA6; ENSG00000197172; CTA
EVDPIGHVY

SEQ ID NO: 40258 - protein, 9 aa, Homo sapiens
  misc_feature: Table A; Target 40258; HLA-B*39:01; MAGEA6; ENSG00000197172; CTA
EVDPIGHVY

SEQ ID NO: 40259 - protein, 9 aa, Homo sapiens
  misc_feature: Table A; Target 40259; HLA-B*44:02; MAGEA6; ENSG00000197172; CTA
EVDPIGHVY

SEQ ID NO: 40260 - protein, 9 aa, Homo sapiens
  misc_feature: Table A; Target 40260; HLA-B*44:03; MAGEA6; ENSG00000197172; CTA
EVDPIGHVY

SEQ ID NO: 40261 - protein, 9 aa, Homo sapiens
  misc_feature: Table A; Target 40261; HLA-B*46:01; MAGEA6; ENSG00000197172; CTA
EVDPIGHVY

SEQ ID NO: 40262 - protein, 9 aa, Homo sapiens
  misc_feature: Table A; Target 40262; HLA-B*55:01; MAGEA6; ENSG00000197172; CTA
EVDPIGHVY

SEQ ID NO: 40263 - protein, 9 aa, Homo sapiens
  misc_feature: Table A; Target 40263; HLA-B*57:01; MAGEA6; ENSG00000197172; CTA
EVDPIGHVY

SEQ ID NO: 40264 - protein, 9 aa, Homo sapiens
  misc_feature: Table A; Target 40264; HLA-B*58:01; MAGEA6; ENSG00000197172; CTA
EVDPIGHVY

SEQ ID NO: 40265 - protein, 9 aa, Homo sapiens
  misc_feature: Table A; Target 40265; HLA-C*02:02; MAGEA6; ENSG00000197172; CTA
EVDPIGHVY

SEQ ID NO: 40266 - protein, 9 aa, Homo sapiens
  misc_feature: Table A; Target 40266; HLA-C*03:03; MAGEA6; ENSG00000197172; CTA
EVDPIGHVY

SEQ ID NO: 40267 - protein, 9 aa, Homo sapiens
  misc_feature: Table A; Target 40267; HLA-C*03:04; MAGEA6; ENSG00000197172; CTA
EVDPIGHVY

SEQ ID NO: 40268 - protein, 9 aa, Homo sapiens
  misc_feature: Table A; Target 40268; HLA-C*04:01; MAGEA6; ENSG00000197172; CTA
EVDPIGHVY

SEQ ID NO: 40269 - protein, 9 aa, Homo sapiens
  misc_feature: Table A; Target 40269; HLA-C*05:01; MAGEA6; ENSG00000197172; CTA
EVDPIGHVY

SEQ ID NO: 40270 - protein, 9 aa, Homo sapiens
  misc_feature: Table A; Target 40270; HLA-C*07:04; MAGEA6; ENSG00000197172; CTA
EVDPIGHVY

SEQ ID NO: 40271 - protein, 9 aa, Homo sapiens
  misc_feature: Table A; Target 40271; HLA-C*07:06; MAGEA6; ENSG00000197172; CTA
EVDPIGHVY

SEQ ID NO: 40272 - protein, 9 aa, Homo sapiens
  misc_feature: Table A; Target 40272; HLA-C*12:03; MAGEA6; ENSG00000197172; CTA
EVDPIGHVY

SEQ ID NO: 40273 - protein, 9 aa, Homo sapiens
  misc_feature: Table A; Target 40273; HLA-C*16:01; MAGEA6; ENSG00000197172; CTA
EVDPIGHVY

SEQ ID NO: 40274 - protein, 9 aa, Homo sapiens
  misc_feature: Table A; Target 40274; HLA-C*16:02; MAGEA6; ENSG00000197172; CTA
EVDPIGHVY

SEQ ID NO: 40275 - protein, 9 aa, Homo sapiens
  misc_feature: Table A; Target 40275; HLA-C*16:04; MAGEA6; ENSG00000197172; CTA
EVDPIGHVY

SEQ ID NO: 40276 - protein, 10 aa, Homo sapiens
  misc_feature: Table A; Target 40276; HLA-A*01:01; MAGEA6; ENSG00000197172; CTA
EVDPIGHVYI

SEQ ID NO: 40277 - protein, 10 aa, Homo sapiens
  misc_feature: Table A; Target 40277; HLA-A*02:07; MAGEA6; ENSG00000197172; CTA
EVDPIGHVYI

SEQ ID NO: 40278 - protein, 10 aa, Homo sapiens
  misc_feature: Table A; Target 40278; HLA-A*68:01; MAGEA6; ENSG00000197172; CTA
EVDPIGHVYI

SEQ ID NO: 40279 - protein, 10 aa, Homo sapiens
  misc_feature: Table A; Target 40279; HLA-B*13:02; MAGEA6; ENSG00000197172; CTA
EVDPIGHVYI

SEQ ID NO: 40280 - protein, 10 aa, Homo sapiens
  misc_feature: Table A; Target 40280; HLA-B*38:01; MAGEA6; ENSG00000197172; CTA
EVDPIGHVYI

SEQ ID NO: 40281 - protein, 10 aa, Homo sapiens
  misc_feature: Table A; Target 40281; HLA-C*05:01; MAGEA6; ENSG00000197172; CTA
EVDPIGHVYI

SEQ ID NO: 40282 - protein, 11 aa, Homo sapiens
  misc_feature: Table A; Target 40282; HLA-A*01:01; MAGEA6; ENSG00000197172; CTA
EVDPIGHVYIF

SEQ ID NO: 40283 - protein, 11 aa, Homo sapiens
  misc_feature: Table A; Target 40283; HLA-A*02:07; MAGEA6; ENSG00000197172; CTA
EVDPIGHVYIF

SEQ ID NO: 40284 - protein, 11 aa, Homo sapiens
  misc_feature: Table A; Target 40284; HLA-A*68:02; MAGEA6; ENSG00000197172; CTA
EVDPIGHVYIF

SEQ ID NO: 40285 - protein, 11 aa, Homo sapiens
  misc_feature: Table A; Target 40285; HLA-A*25:01; MAGEA6; ENSG00000197172; CTA
EVFEGREDSIF

SEQ ID NO: 40286 - protein, 11 aa, Homo sapiens
  misc_feature: Table A; Target 40286; HLA-A*26:01; MAGEA6; ENSG00000197172; CTA
EVFEGREDSIF

SEQ ID NO: 40287 - protein, 11 aa, Homo sapiens
  misc_feature: Table A; Target 40287; HLA-B*35:01; MAGEA6; ENSG00000197172; CTA
EVFEGREDSIF

SEQ ID NO: 40288 - protein, 11 aa, Homo sapiens
  misc_feature: Table A; Target 40288; HLA-C*12:03; MAGEA6; ENSG00000197172; CTA
EVFEGREDSIF

SEQ ID NO: 40289 - protein, 8 aa, Homo sapiens
  misc_feature: Table A; Target 40289; HLA-B*08:01; MAGEA6; ENSG00000197172; CTA
FGDPKKLL

SEQ ID NO: 40290 - protein, 8 aa, Homo sapiens
  misc_feature: Table A; Target 40290; HLA-C*04:01; MAGEA6; ENSG00000197172; CTA
FGDPKKLL

SEQ ID NO: 40291 - protein, 11 aa, Homo sapiens
  misc_feature: Table A; Target 40291; HLA-A*01:01; MAGEA6; ENSG00000197172; CTA
FGDPKKLLTQY

SEQ ID NO: 40292 - protein, 9 aa, Homo sapiens
  misc_feature: Table A; Target 40292; HLA-A*02:03; MAGEA6; ENSG00000197172; CTA
FLIIILAII

SEQ ID NO: 40293 - protein, 9 aa, Homo sapiens
  misc_feature: Table A; Target 40293; HLA-A*02:04; MAGEA6; ENSG00000197172; CTA
FLIIILAII

SEQ ID NO: 40294 - protein, 9 aa, Homo sapiens
  misc_feature: Table A; Target 40294; HLA-A*02:01; MAGEA6; ENSG00000197172; CTA
FLWGPRALI

SEQ ID NO: 40295 - protein, 9 aa, Homo sapiens
  misc_feature: Table A; Target 40295; HLA-A*02:04; MAGEA6; ENSG00000197172; CTA
FLWGPRALI

SEQ ID NO: 40296 - protein, 9 aa, Homo sapiens
  misc_feature: Table A; Target 40296; HLA-A*02:07; MAGEA6; ENSG00000197172; CTA
FLWGPRALI

SEQ ID NO: 40297 - protein, 11 aa, Homo sapiens
  misc_feature: Table A; Target 40297; HLA-A*02:01; MAGEA6; ENSG00000197172; CTA
FLWGPRALIET

SEQ ID NO: 40298 - protein, 11 aa, Homo sapiens
  misc_feature: Table A; Target 40298; HLA-A*02:04; MAGEA6; ENSG00000197172; CTA
FLWGPRALIET

SEQ ID NO: 40299 - protein, 11 aa, Homo sapiens
  misc_feature: Table A; Target 40299; HLA-A*02:07; MAGEA6; ENSG00000197172; CTA
FLWGPRALIET

SEQ ID NO: 40300 - protein, 9 aa, Homo sapiens
  misc_feature: Table A; Target 40300; HLA-A*68:02; MAGEA6; ENSG00000197172; CTA
FQAALSRKV

SEQ ID NO: 40301 - protein, 9 aa, Homo sapiens
  misc_feature: Table A; Target 40301; HLA-B*27:05; MAGEA6; ENSG00000197172; CTA
FQAALSRKV

SEQ ID NO: 40302 - protein, 9 aa, Homo sapiens
  misc_feature: Table A; Target 40302; HLA-C*16:02; MAGEA6; ENSG00000197172; CTA
FQAALSRKV

SEQ ID NO: 40303 - protein, 8 aa, Homo sapiens
  misc_feature: Table A; Target 40303; HLA-C*03:03; MAGEA6; ENSG00000197172; CTA
FSKASDSL

SEQ ID NO: 40304 - protein, 8 aa, Homo sapiens
  misc_feature: Table A; Target 40304; HLA-C*03:04; MAGEA6; ENSG00000197172; CTA
FSKASDSL

SEQ ID NO: 40305 - protein, 8 aa, Homo sapiens
  misc_feature: Table A; Target 40305; HLA-C*12:03; MAGEA6; ENSG00000197172; CTA
FSKASDSL

SEQ ID NO: 40306 - protein, 8 aa, Homo sapiens
  misc_feature: Table A; Target 40306; HLA-C*16:01; MAGEA6; ENSG00000197172; CTA
FSKASDSL

SEQ ID NO: 40307 - protein, 9 aa, Homo sapiens
  misc_feature: Table A; Target 40307; HLA-A*02:07; MAGEA6; ENSG00000197172; CTA
FVQENYLEY

SEQ ID NO: 40308 - protein, 9 aa, Homo sapiens
  misc_feature: Table A; Target 40308; HLA-B*13:02; MAGEA6; ENSG00000197172; CTA
FVQENYLEY

SEQ ID NO: 40309 - protein, 9 aa, Homo sapiens
  misc_feature: Table A; Target 40309; HLA-B*27:05; MAGEA6; ENSG00000197172; CTA
FVQENYLEY

SEQ ID NO: 40310 - protein, 9 aa, Homo sapiens
  misc_feature: Table A; Target 40310; HLA-B*35:03; MAGEA6; ENSG00000197172; CTA
FVQENYLEY

SEQ ID NO: 40311 - protein, 9 aa, Homo sapiens
  misc_feature: Table A; Target 40311; HLA-B*57:01; MAGEA6; ENSG00000197172; CTA
FVQENYLEY

SEQ ID NO: 40312 - protein, 10 aa, Homo sapiens
  misc_feature: Table A; Target 40312; HLA-C*07:06; MAGEA6; ENSG00000197172; CTA
FVQENYLEYR

SEQ ID NO: 40313 - protein, 10 aa, Homo sapiens
  misc_feature: Table A; Target 40313; HLA-A*30:02; MAGEA6; ENSG00000197172; CTA
GPRALIETSY

SEQ ID NO: 40314 - protein, 10 aa, Homo sapiens
  misc_feature: Table A; Target 40314; HLA-B*07:02; MAGEA6; ENSG00000197172; CTA
GPRALIETSY

SEQ ID NO: 40315 - protein, 10 aa, Homo sapiens
  misc_feature: Table A; Target 40315; HLA-B*15:01; MAGEA6; ENSG00000197172; CTA
GPRALIETSY

SEQ ID NO: 40316 - protein, 10 aa, Homo sapiens
  misc_feature: Table A; Target 40316; HLA-B*15:03; MAGEA6; ENSG00000197172; CTA
GPRALIETSY

SEQ ID NO: 40317 - protein, 10 aa, Homo sapiens
  misc_feature: Table A; Target 40317; HLA-B*35:01; MAGEA6; ENSG00000197172; CTA
GPRALIETSY

SEQ ID NO: 40318 - protein, 10 aa, Homo sapiens
  misc_feature: Table A; Target 40318; HLA-B*55:01; MAGEA6; ENSG00000197172; CTA
GPRALIETSY

SEQ ID NO: 40319 - protein, 9 aa, Homo sapiens
  misc_feature: Table A; Target 40319; HLA-B*07:02; MAGEA6; ENSG00000197172; CTA
GPRISYPLL

SEQ ID NO: 40320 - protein, 9 aa, Homo sapiens
  misc_feature: Table A; Target 40320; HLA-C*07:02; MAGEA6; ENSG00000197172; CTA
GPRISYPLL

SEQ ID NO: 40321 - protein, 11 aa, Homo sapiens
  misc_feature: Table A; Target 40321; HLA-B*27:05; MAGEA6; ENSG00000197172; CTA
GREDSIFGDPK

SEQ ID NO: 40322 - protein, 10 aa, Homo sapiens
  misc_feature: Table A; Target 40322; HLA-A*33:01; MAGEA6; ENSG00000197172; CTA
HMVKISGGPR

SEQ ID NO: 40323 - protein, 9 aa, Homo sapiens
  misc_feature: Table A; Target 40323; HLA-A*68:02; MAGEA6; ENSG00000197172; CTA
HVYIFATCL

SEQ ID NO: 40324 - protein, 8 aa, Homo sapiens
  misc_feature: Table A; Target 40324; HLA-A*30:01; MAGEA6; ENSG00000197172; CTA
IETSYVKV

SEQ ID NO: 40325 - protein, 8 aa, Homo sapiens
  misc_feature: Table A; Target 40325; HLA-B*18:01; MAGEA6; ENSG00000197172; CTA
IETSYVKV

SEQ ID NO: 40326 - protein, 8 aa, Homo sapiens
  misc_feature: Table A; Target 40326; HLA-B*37:01; MAGEA6; ENSG00000197172; CTA
IETSYVKV

SEQ ID NO: 40327 - protein, 8 aa, Homo sapiens
  misc_feature: Table A; Target 40327; HLA-B*40:02; MAGEA6; ENSG00000197172; CTA
IETSYVKV

SEQ ID NO: 40328 - protein, 8 aa, Homo sapiens
  misc_feature: Table A; Target 40328; HLA-B*49:01; MAGEA6; ENSG00000197172; CTA
IETSYVKV

SEQ ID NO: 40329 - protein, 9 aa, Homo sapiens
  misc_feature: Table A; Target 40329; HLA-B*18:01; MAGEA6; ENSG00000197172; CTA
IETSYVKVL

SEQ ID NO: 40330 - protein, 9 aa, Homo sapiens
  misc_feature: Table A; Target 40330; HLA-B*27:05; MAGEA6; ENSG00000197172; CTA
IETSYVKVL

SEQ ID NO: 40331 - protein, 9 aa, Homo sapiens
  misc_feature: Table A; Target 40331; HLA-B*37:01; MAGEA6; ENSG00000197172; CTA
IETSYVKVL

SEQ ID NO: 40332 - protein, 9 aa, Homo sapiens
  misc_feature: Table A; Target 40332; HLA-B*40:02; MAGEA6; ENSG00000197172; CTA
IETSYVKVL

SEQ ID NO: 40333 - protein, 9 aa, Homo sapiens
  misc_feature: Table A; Target 40333; HLA-B*44:02; MAGEA6; ENSG00000197172; CTA
IETSYVKVL

SEQ ID NO: 40334 - protein, 9 aa, Homo sapiens
  misc_feature: Table A; Target 40334; HLA-B*49:01; MAGEA6; ENSG00000197172; CTA
IETSYVKVL

SEQ ID NO: 40335 - protein, 9 aa, Homo sapiens
  misc_feature: Table A; Target 40335; HLA-C*02:02; MAGEA6; ENSG00000197172; CTA
IETSYVKVL

SEQ ID NO: 40336 - protein, 9 aa, Homo sapiens
  misc_feature: Table A; Target 40336; HLA-C*06:02; MAGEA6; ENSG00000197172; CTA
IETSYVKVL

SEQ ID NO: 40337 - protein, 9 aa, Homo sapiens
  misc_feature: Table A; Target 40337; HLA-C*07:01; MAGEA6; ENSG00000197172; CTA
IETSYVKVL

SEQ ID NO: 40338 - protein, 9 aa, Homo sapiens
  misc_feature: Table A; Target 40338; HLA-C*07:04; MAGEA6; ENSG00000197172; CTA
IETSYVKVL

SEQ ID NO: 40339 - protein, 9 aa, Homo sapiens
  misc_feature: Table A; Target 40339; HLA-C*12:03; MAGEA6; ENSG00000197172; CTA
IETSYVKVL

SEQ ID NO: 40340 - protein, 9 aa, Homo sapiens
  misc_feature: Table A; Target 40340; HLA-C*14:02; MAGEA6; ENSG00000197172; CTA
IETSYVKVL

SEQ ID NO: 40341 - protein, 9 aa, Homo sapiens
  misc_feature: Table A; Target 40341; HLA-C*16:01; MAGEA6; ENSG00000197172; CTA
IETSYVKVL

SEQ ID NO: 40342 - protein, 9 aa, Homo sapiens
  misc_feature: Table A; Target 40342; HLA-C*16:02; MAGEA6; ENSG00000197172; CTA
IETSYVKVL

SEQ ID NO: 40343 - protein, 9 aa, Homo sapiens
  misc_feature: Table A; Target 40343; HLA-C*16:04; MAGEA6; ENSG00000197172; CTA
IETSYVKVL

SEQ ID NO: 40344 - protein, 10 aa, Homo sapiens
  misc_feature: Table A; Target 40344; HLA-C*04:01; MAGEA6; ENSG00000197172; CTA
IETSYVKVLH

SEQ ID NO: 40345 - protein, 9 aa, Homo sapiens
  misc_feature: Table A; Target 40345; HLA-C*14:02; MAGEA6; ENSG00000197172; CTA
IFSKASDSL

SEQ ID NO: 40346 - protein, 9 aa, Homo sapiens
  misc_feature: Table A; Target 40346; HLA-A*03:01; MAGEA6; ENSG00000197172; CTA
IIILAIIAK

SEQ ID NO: 40347 - protein, 9 aa, Homo sapiens
  misc_feature: Table A; Target 40347; HLA-A*03:02; MAGEA6; ENSG00000197172; CTA
IIILAIIAK

SEQ ID NO: 40348 - protein, 9 aa, Homo sapiens
  misc_feature: Table A; Target 40348; HLA-A*11:01; MAGEA6; ENSG00000197172; CTA
IIILAIIAK

SEQ ID NO: 40349 - protein, 8 aa, Homo sapiens
  misc_feature: Table A; Target 40349; HLA-A*03:01; MAGEA6; ENSG00000197172; CTA
IILAIIAK

SEQ ID NO: 40350 - protein, 8 aa, Homo sapiens
  misc_feature: Table A; Target 40350; HLA-A*03:02; MAGEA6; ENSG00000197172; CTA
IILAIIAK

SEQ ID NO: 40351 - protein, 8 aa, Homo sapiens
  misc_feature: Table A; Target 40351; HLA-A*11:01; MAGEA6; ENSG00000197172; CTA
IILAIIAK

SEQ ID NO: 40352 - protein, 8 aa, Homo sapiens
  misc_feature: Table A; Target 40352; HLA-B*27:02; MAGEA6; ENSG00000197172; CTA
IILAIIAK

SEQ ID NO: 40353 - protein, 9 aa, Homo sapiens
  misc_feature: Table A; Target 40353; HLA-A*01:01; MAGEA6; ENSG00000197172; CTA
ISGGPRISY

SEQ ID NO: 40354 - protein, 9 aa, Homo sapiens
  misc_feature: Table A; Target 40354; HLA-A*25:01; MAGEA6; ENSG00000197172; CTA
ISGGPRISY

SEQ ID NO: 40355 - protein, 9 aa, Homo sapiens
  misc_feature: Table A; Target 40355; HLA-A*29:02; MAGEA6; ENSG00000197172; CTA
ISGGPRISY

SEQ ID NO: 40356 - protein, 9 aa, Homo sapiens
  misc_feature: Table A; Target 40356; HLA-A*30:02; MAGEA6; ENSG00000197172; CTA
ISGGPRISY

SEQ ID NO: 40357 - protein, 9 aa, Homo sapiens
  misc_feature: Table A; Target 40357; HLA-A*32:01; MAGEA6; ENSG00000197172; CTA
ISGGPRISY

SEQ ID NO: 40358 - protein, 9 aa, Homo sapiens
  misc_feature: Table A; Target 40358; HLA-B*15:01; MAGEA6; ENSG00000197172; CTA
ISGGPRISY

SEQ ID NO: 40359 - protein, 9 aa, Homo sapiens
  misc_feature: Table A; Target 40359; HLA-B*15:03; MAGEA6; ENSG00000197172; CTA
ISGGPRISY

SEQ ID NO: 40360 - protein, 9 aa, Homo sapiens
  misc_feature: Table A; Target 40360; HLA-B*35:01; MAGEA6; ENSG00000197172; CTA
ISGGPRISY

SEQ ID NO: 40361 - protein, 9 aa, Homo sapiens
  misc_feature: Table A; Target 40361; HLA-B*46:01; MAGEA6; ENSG00000197172; CTA
ISGGPRISY

SEQ ID NO: 40362 - protein, 9 aa, Homo sapiens
  misc_feature: Table A; Target 40362; HLA-B*57:01; MAGEA6; ENSG00000197172; CTA
ISGGPRISY

SEQ ID NO: 40363 - protein, 9 aa, Homo sapiens
  misc_feature: Table A; Target 40363; HLA-B*58:01; MAGEA6; ENSG00000197172; CTA
ISGGPRISY

SEQ ID NO: 40364 - protein, 9 aa, Homo sapiens
  misc_feature: Table A; Target 40364; HLA-C*01:02; MAGEA6; ENSG00000197172; CTA
ISGGPRISY

SEQ ID NO: 40365 - protein, 9 aa, Homo sapiens
  misc_feature: Table A; Target 40365; HLA-C*02:02; MAGEA6; ENSG00000197172; CTA
ISGGPRISY

SEQ ID NO: 40366 - protein, 9 aa, Homo sapiens
  misc_feature: Table A; Target 40366; HLA-C*07:01; MAGEA6; ENSG00000197172; CTA
ISGGPRISY

SEQ ID NO: 40367 - protein, 9 aa, Homo sapiens
  misc_feature: Table A; Target 40367; HLA-C*07:04; MAGEA6; ENSG00000197172; CTA
ISGGPRISY

SEQ ID NO: 40368 - protein, 9 aa, Homo sapiens
  misc_feature: Table A; Target 40368; HLA-C*12:03; MAGEA6; ENSG00000197172; CTA
ISGGPRISY

SEQ ID NO: 40369 - protein, 9 aa, Homo sapiens
  misc_feature: Table A; Target 40369; HLA-C*16:02; MAGEA6; ENSG00000197172; CTA
ISGGPRISY

SEQ ID NO: 40370 - protein, 9 aa, Homo sapiens
  misc_feature: Table A; Target 40370; HLA-C*16:04; MAGEA6; ENSG00000197172; CTA
ISGGPRISY

SEQ ID NO: 40371 - protein, 10 aa, Homo sapiens
  misc_feature: Table A; Target 40371; HLA-C*07:02; MAGEA6; ENSG00000197172; CTA
ISGGPRISYP

SEQ ID NO: 40372 - protein, 9 aa, Homo sapiens
  misc_feature: Table A; Target 40372; HLA-A*24:02; MAGEA6; ENSG00000197172; CTA
ISYPLLHEW

SEQ ID NO: 40373 - protein, 9 aa, Homo sapiens
  misc_feature: Table A; Target 40373; HLA-A*25:01; MAGEA6; ENSG00000197172; CTA
ISYPLLHEW

SEQ ID NO: 40374 - protein, 9 aa, Homo sapiens
  misc_feature: Table A; Target 40374; HLA-A*31:01; MAGEA6; ENSG00000197172; CTA
ISYPLLHEW

SEQ ID NO: 40375 - protein, 9 aa, Homo sapiens
  misc_feature: Table A; Target 40375; HLA-A*33:01; MAGEA6; ENSG00000197172; CTA
ISYPLLHEW

SEQ ID NO: 40376 - protein, 9 aa, Homo sapiens
  misc_feature: Table A; Target 40376; HLA-B*44:02; MAGEA6; ENSG00000197172; CTA
ISYPLLHEW

SEQ ID NO: 40377 - protein, 9 aa, Homo sapiens
  misc_feature: Table A; Target 40377; HLA-B*58:01; MAGEA6; ENSG00000197172; CTA
ISYPLLHEW

SEQ ID NO: 40378 - protein, 9 aa, Homo sapiens
  misc_feature: Table A; Target 40378; HLA-C*02:02; MAGEA6; ENSG00000197172; CTA
ISYPLLHEW

SEQ ID NO: 40379 - protein, 8 aa, Homo sapiens
  misc_feature: Table A; Target 40379; HLA-C*03:04; MAGEA6; ENSG00000197172; CTA
KASDSLQL

SEQ ID NO: 40380 - protein, 9 aa, Homo sapiens
  misc_feature: Table A; Target 40380; HLA-A*02:03; MAGEA6; ENSG00000197172; CTA
KASDSLQLV

SEQ ID NO: 40381 - protein, 9 aa, Homo sapiens
  misc_feature: Table A; Target 40381; HLA-A*03:02; MAGEA6; ENSG00000197172; CTA
KASDSLQLV

SEQ ID NO: 40382 - protein, 9 aa, Homo sapiens
  misc_feature: Table A; Target 40382; HLA-B*13:02; MAGEA6; ENSG00000197172; CTA
KASDSLQLV

SEQ ID NO: 40383 - protein, 9 aa, Homo sapiens
  misc_feature: Table A; Target 40383; HLA-B*58:01; MAGEA6; ENSG00000197172; CTA
KASDSLQLV

SEQ ID NO: 40384 - protein, 9 aa, Homo sapiens
  misc_feature: Table A; Target 40384; HLA-C*02:02; MAGEA6; ENSG00000197172; CTA
KASDSLQLV

SEQ ID NO: 40385 - protein, 9 aa, Homo sapiens
  misc_feature: Table A; Target 40385; HLA-C*12:03; MAGEA6; ENSG00000197172; CTA
KASDSLQLV

SEQ ID NO: 40386 - protein, 9 aa, Homo sapiens
  misc_feature: Table A; Target 40386; HLA-C*16:02; MAGEA6; ENSG00000197172; CTA
KASDSLQLV

SEQ ID NO: 40387 - protein, 10 aa, Homo sapiens
  misc_feature: Table A; Target 40387; HLA-A*03:01; MAGEA6; ENSG00000197172; CTA
KASDSLQLVF

SEQ ID NO: 40388 - protein, 10 aa, Homo sapiens
  misc_feature: Table A; Target 40388; HLA-A*23:01; MAGEA6; ENSG00000197172; CTA
KASDSLQLVF

SEQ ID NO: 40389 - protein, 10 aa, Homo sapiens
  misc_feature: Table A; Target 40389; HLA-A*24:02; MAGEA6; ENSG00000197172; CTA
KASDSLQLVF

SEQ ID NO: 40390 - protein, 10 aa, Homo sapiens
  misc_feature: Table A; Target 40390; HLA-A*29:02; MAGEA6; ENSG00000197172; CTA
KASDSLQLVF

SEQ ID NO: 40391 - protein, 10 aa, Homo sapiens
  misc_feature: Table A; Target 40391; HLA-A*30:02; MAGEA6; ENSG00000197172; CTA
KASDSLQLVF

SEQ ID NO: 40392 - protein, 10 aa, Homo sapiens
  misc_feature: Table A; Target 40392; HLA-A*32:01; MAGEA6; ENSG00000197172; CTA
KASDSLQLVF

SEQ ID NO: 40393 - protein, 10 aa, Homo sapiens
  misc_feature: Table A; Target 40393; HLA-B*15:03; MAGEA6; ENSG00000197172; CTA
KASDSLQLVF

SEQ ID NO: 40394 - protein, 10 aa, Homo sapiens
  misc_feature: Table A; Target 40394; HLA-B*27:02; MAGEA6; ENSG00000197172; CTA
KASDSLQLVF

SEQ ID NO: 40395 - protein, 10 aa, Homo sapiens
  misc_feature: Table A; Target 40395; HLA-B*35:01; MAGEA6; ENSG00000197172; CTA
KASDSLQLVF

SEQ ID NO: 40396 - protein, 10 aa, Homo sapiens
  misc_feature: Table A; Target 40396; HLA-B*44:03; MAGEA6; ENSG00000197172; CTA
KASDSLQLVF

SEQ ID NO: 40397 - protein, 10 aa, Homo sapiens
  misc_feature: Table A; Target 40397; HLA-B*57:01; MAGEA6; ENSG00000197172; CTA
KASDSLQLVF

SEQ ID NO: 40398 - protein, 10 aa, Homo sapiens
  misc_feature: Table A; Target 40398; HLA-B*58:01; MAGEA6; ENSG00000197172; CTA
KASDSLQLVF

SEQ ID NO: 40399 - protein, 10 aa, Homo sapiens
  misc_feature: Table A; Target 40399; HLA-C*02:02; MAGEA6; ENSG00000197172; CTA
KASDSLQLVF

SEQ ID NO: 40400 - protein, 10 aa, Homo sapiens
  misc_feature: Table A; Target 40400; HLA-C*12:03; MAGEA6; ENSG00000197172; CTA
KASDSLQLVF

SEQ ID NO: 40401 - protein, 10 aa, Homo sapiens
  misc_feature: Table A; Target 40401; HLA-C*16:04; MAGEA6; ENSG00000197172; CTA
KASDSLQLVF

SEQ ID NO: 40402 - protein, 10 aa, Homo sapiens
  misc_feature: Table A; Target 40402; HLA-A*03:01; MAGEA6; ENSG00000197172; CTA
KISGGPRISY

SEQ ID NO: 40403 - protein, 10 aa, Homo sapiens
  misc_feature: Table A; Target 40403; HLA-A*30:02; MAGEA6; ENSG00000197172; CTA
KISGGPRISY

SEQ ID NO: 40404 - protein, 10 aa, Homo sapiens
  misc_feature: Table A; Target 40404; HLA-A*32:01; MAGEA6; ENSG00000197172; CTA
KISGGPRISY

SEQ ID NO: 40405 - protein, 10 aa, Homo sapiens
  misc_feature: Table A; Target 40405; HLA-B*15:01; MAGEA6; ENSG00000197172; CTA
KISGGPRISY

SEQ ID NO: 40406 - protein, 10 aa, Homo sapiens
  misc_feature: Table A; Target 40406; HLA-B*15:03; MAGEA6; ENSG00000197172; CTA
KISGGPRISY

SEQ ID NO: 40407 - protein, 10 aa, Homo sapiens
  misc_feature: Table A; Target 40407; HLA-C*16:01; MAGEA6; ENSG00000197172; CTA
KISGGPRISY

SEQ ID NO: 40408 - protein, 9 aa, Homo sapiens
  misc_feature: Table A; Target 40408; HLA-A*03:01; MAGEA6; ENSG00000197172; CTA
KLVHFLLLK

SEQ ID NO: 40409 - protein, 10 aa, Homo sapiens
  misc_feature: Table A; Target 40409; HLA-A*03:01; MAGEA6; ENSG00000197172; CTA
KLVHFLLLKY

SEQ ID NO: 40410 - protein, 10 aa, Homo sapiens
  misc_feature: Table A; Target 40410; HLA-A*29:02; MAGEA6; ENSG00000197172; CTA
KLVHFLLLKY

SEQ ID NO: 40411 - protein, 10 aa, Homo sapiens
  misc_feature: Table A; Target 40411; HLA-B*57:01; MAGEA6; ENSG00000197172; CTA
KLVHFLLLKY

SEQ ID NO: 40412 - protein, 8 aa, Homo sapiens
  misc_feature: Table A; Target 40412; HLA-B*57:01; MAGEA6; ENSG00000197172; CTA
KVAKLVHF

SEQ ID NO: 40413 - protein, 9 aa, Homo sapiens
  misc_feature: Table A; Target 40413; HLA-A*02:03; MAGEA6; ENSG00000197172; CTA
KVAKLVHFL

SEQ ID NO: 40414 - protein, 9 aa, Homo sapiens
  misc_feature: Table A; Target 40414; HLA-A*02:04; MAGEA6; ENSG00000197172; CTA
KVAKLVHFL

SEQ ID NO: 40415 - protein, 9 aa, Homo sapiens
  misc_feature: Table A; Target 40415; HLA-A*68:02; MAGEA6; ENSG00000197172; CTA
KVAKLVHFL

SEQ ID NO: 40416 - protein, 8 aa, Homo sapiens
  misc_feature: Table A; Target 40416; HLA-B*27:02; MAGEA6; ENSG00000197172; CTA
LIETSYVK

SEQ ID NO: 40417 - protein, 9 aa, Homo sapiens
  misc_feature: Table A; Target 40417; HLA-A*02:07; MAGEA6; ENSG00000197172; CTA
LIETSYVKV

SEQ ID NO: 40418 - protein, 9 aa, Homo sapiens
  misc_feature: Table A; Target 40418; HLA-C*05:01; MAGEA6; ENSG00000197172; CTA
LIETSYVKV

SEQ ID NO: 40419 - protein, 10 aa, Homo sapiens
  misc_feature: Table A; Target 40419; HLA-B*27:02; MAGEA6; ENSG00000197172; CTA
LIIILAIIAK

SEQ ID NO: 40420 - protein, 11 aa, Homo sapiens
  misc_feature: Table A; Target 40420; HLA-A*01:01; MAGEA6; ENSG00000197172; CTA
LMEVDPIGHVY

SEQ ID NO: 40421 - protein, 11 aa, Homo sapiens
  misc_feature: Table A; Target 40421; HLA-A*29:02; MAGEA6; ENSG00000197172; CTA
LMEVDPIGHVY

SEQ ID NO: 40422 - protein, 11 aa, Homo sapiens
  misc_feature: Table A; Target 40422; HLA-A*30:02; MAGEA6; ENSG00000197172; CTA
LMEVDPIGHVY

SEQ ID NO: 40423 - protein, 10 aa, Homo sapiens
  misc_feature: Table A; Target 40423; HLA-A*01:01; MAGEA6; ENSG00000197172; CTA
LTQYFVQENY

SEQ ID NO: 40424 - protein, 10 aa, Homo sapiens
  misc_feature: Table A; Target 40424; HLA-A*30:02; MAGEA6; ENSG00000197172; CTA
LTQYFVQENY

SEQ ID NO: 40425 - protein, 10 aa, Homo sapiens
  misc_feature: Table A; Target 40425; HLA-B*57:01; MAGEA6; ENSG00000197172; CTA
LTQYFVQENY

SEQ ID NO: 40426 - protein, 9 aa, Homo sapiens
  misc_feature: Table A; Target 40426; HLA-A*30:01; MAGEA6; ENSG00000197172; CTA
MEVDPIGHV

SEQ ID NO: 40427 - protein, 9 aa, Homo sapiens
  misc_feature: Table A; Target 40427; HLA-A*68:02; MAGEA6; ENSG00000197172; CTA
MEVDPIGHV

SEQ ID NO: 40428 - protein, 9 aa, Homo sapiens
  misc_feature: Table A; Target 40428; HLA-B*13:02; MAGEA6; ENSG00000197172; CTA
MEVDPIGHV

SEQ ID NO: 40429 - protein, 9 aa, Homo sapiens
  misc_feature: Table A; Target 40429; HLA-B*18:01; MAGEA6; ENSG00000197172; CTA
MEVDPIGHV

SEQ ID NO: 40430 - protein, 9 aa, Homo sapiens
  misc_feature: Table A; Target 40430; HLA-B*40:01; MAGEA6; ENSG00000197172; CTA
MEVDPIGHV

SEQ ID NO: 40431 - protein, 9 aa, Homo sapiens
  misc_feature: Table A; Target 40431; HLA-B*40:02; MAGEA6; ENSG00000197172; CTA
MEVDPIGHV

SEQ ID NO: 40432 - protein, 9 aa, Homo sapiens
  misc_feature: Table A; Target 40432; HLA-B*44:02; MAGEA6; ENSG00000197172; CTA
MEVDPIGHV

SEQ ID NO: 40433 - protein, 9 aa, Homo sapiens
  misc_feature: Table A; Target 40433; HLA-B*44:03; MAGEA6; ENSG00000197172; CTA
MEVDPIGHV

SEQ ID NO: 40434 - protein, 9 aa, Homo sapiens
  misc_feature: Table A; Target 40434; HLA-C*16:04; MAGEA6; ENSG00000197172; CTA
MEVDPIGHV

SEQ ID NO: 40435 - protein, 10 aa, Homo sapiens
  misc_feature: Table A; Target 40435; HLA-A*01:01; MAGEA6; ENSG00000197172; CTA
MEVDPIGHVY

SEQ ID NO: 40436 - protein, 10 aa, Homo sapiens
  misc_feature: Table A; Target 40436; HLA-A*23:01; MAGEA6; ENSG00000197172; CTA
MEVDPIGHVY

SEQ ID NO: 40437 - protein, 10 aa, Homo sapiens
  misc_feature: Table A; Target 40437; HLA-A*25:01; MAGEA6; ENSG00000197172; CTA
MEVDPIGHVY

SEQ ID NO: 40438 - protein, 10 aa, Homo sapiens
  misc_feature: Table A; Target 40438; HLA-A*26:01; MAGEA6; ENSG00000197172; CTA
MEVDPIGHVY

SEQ ID NO: 40439 - protein, 10 aa, Homo sapiens
  misc_feature: Table A; Target 40439; HLA-A*29:02; MAGEA6; ENSG00000197172; CTA
MEVDPIGHVY

SEQ ID NO: 40440 - protein, 10 aa, Homo sapiens
  misc_feature: Table A; Target 40440; HLA-A*30:01; MAGEA6; ENSG00000197172; CTA
MEVDPIGHVY

SEQ ID NO: 40441 - protein, 10 aa, Homo sapiens
  misc_feature: Table A; Target 40441; HLA-A*30:02; MAGEA6; ENSG00000197172; CTA
MEVDPIGHVY

SEQ ID NO: 40442 - protein, 10 aa, Homo sapiens
  misc_feature: Table A; Target 40442; HLA-A*32:01; MAGEA6; ENSG00000197172; CTA
MEVDPIGHVY

SEQ ID NO: 40443 - protein, 10 aa, Homo sapiens
  misc_feature: Table A; Target 40443; HLA-A*33:03; MAGEA6; ENSG00000197172; CTA
MEVDPIGHVY

SEQ ID NO: 40444 - protein, 10 aa, Homo sapiens
  misc_feature: Table A; Target 40444; HLA-A*68:02; MAGEA6; ENSG00000197172; CTA
MEVDPIGHVY

SEQ ID NO: 40445 - protein, 10 aa, Homo sapiens
  misc_feature: Table A; Target 40445; HLA-B*15:01; MAGEA6; ENSG00000197172; CTA
MEVDPIGHVY

SEQ ID NO: 40446 - protein, 10 aa, Homo sapiens
  misc_feature: Table A; Target 40446; HLA-B*15:03; MAGEA6; ENSG00000197172; CTA
MEVDPIGHVY

SEQ ID NO: 40447 - protein, 10 aa, Homo sapiens
  misc_feature: Table A; Target 40447; HLA-B*27:02; MAGEA6; ENSG00000197172; CTA
MEVDPIGHVY

SEQ ID NO: 40448 - protein, 10 aa, Homo sapiens
  misc_feature: Table A; Target 40448; HLA-B*27:05; MAGEA6; ENSG00000197172; CTA
MEVDPIGHVY

SEQ ID NO: 40449 - protein, 10 aa, Homo sapiens
  misc_feature: Table A; Target 40449; HLA-B*35:01; MAGEA6; ENSG00000197172; CTA
MEVDPIGHVY

SEQ ID NO: 40450 - protein, 10 aa, Homo sapiens
  misc_feature: Table A; Target 40450; HLA-B*37:01; MAGEA6; ENSG00000197172; CTA
MEVDPIGHVY

SEQ ID NO: 40451 - protein, 10 aa, Homo sapiens
  misc_feature: Table A; Target 40451; HLA-B*38:01; MAGEA6; ENSG00000197172; CTA
MEVDPIGHVY

SEQ ID NO: 40452 - protein, 10 aa, Homo sapiens
  misc_feature: Table A; Target 40452; HLA-B*39:01; MAGEA6; ENSG00000197172; CTA
MEVDPIGHVY

SEQ ID NO: 40453 - protein, 10 aa, Homo sapiens
  misc_feature: Table A; Target 40453; HLA-B*40:01; MAGEA6; ENSG00000197172; CTA
MEVDPIGHVY

SEQ ID NO: 40454 - protein, 10 aa, Homo sapiens
  misc_feature: Table A; Target 40454; HLA-B*40:02; MAGEA6; ENSG00000197172; CTA
MEVDPIGHVY

SEQ ID NO: 40455 - protein, 10 aa, Homo sapiens
  misc_feature: Table A; Target 40455; HLA-B*49:01; MAGEA6; ENSG00000197172; CTA
MEVDPIGHVY

SEQ ID NO: 40456 - protein, 10 aa, Homo sapiens
  misc_feature: Table A; Target 40456; HLA-B*57:01; MAGEA6; ENSG00000197172; CTA
MEVDPIGHVY

SEQ ID NO: 40457 - protein, 10 aa, Homo sapiens
  misc_feature: Table A; Target 40457; HLA-C*02:02; MAGEA6; ENSG00000197172; CTA
MEVDPIGHVY

SEQ ID NO: 40458 - protein, 10 aa, Homo sapiens
  misc_feature: Table A; Target 40458; HLA-C*07:04; MAGEA6; ENSG00000197172; CTA
MEVDPIGHVY

SEQ ID NO: 40459 - protein, 10 aa, Homo sapiens
  misc_feature: Table A; Target 40459; HLA-C*07:06; MAGEA6; ENSG00000197172; CTA
MEVDPIGHVY

SEQ ID NO: 40460 - protein, 10 aa, Homo sapiens
  misc_feature: Table A; Target 40460; HLA-C*12:03; MAGEA6; ENSG00000197172; CTA
MEVDPIGHVY

SEQ ID NO: 40461 - protein, 10 aa, Homo sapiens
  misc_feature: Table A; Target 40461; HLA-C*14:02; MAGEA6; ENSG00000197172; CTA
MEVDPIGHVY

SEQ ID NO: 40462 - protein, 10 aa, Homo sapiens
  misc_feature: Table A; Target 40462; HLA-C*16:01; MAGEA6; ENSG00000197172; CTA
MEVDPIGHVY

SEQ ID NO: 40463 - protein, 10 aa, Homo sapiens
  misc_feature: Table A; Target 40463; HLA-C*16:02; MAGEA6; ENSG00000197172; CTA
MEVDPIGHVY

SEQ ID NO: 40464 - protein, 10 aa, Homo sapiens
  misc_feature: Table A; Target 40464; HLA-C*16:04; MAGEA6; ENSG00000197172; CTA
MEVDPIGHVY

SEQ ID NO: 40465 - protein, 11 aa, Homo sapiens
  misc_feature: Table A; Target 40465; HLA-A*30:01; MAGEA6; ENSG00000197172; CTA
MEVDPIGHVYI

SEQ ID NO: 40466 - protein, 11 aa, Homo sapiens
  misc_feature: Table A; Target 40466; HLA-A*68:02; MAGEA6; ENSG00000197172; CTA
MEVDPIGHVYI

SEQ ID NO: 40467 - protein, 11 aa, Homo sapiens
  misc_feature: Table A; Target 40467; HLA-B*38:01; MAGEA6; ENSG00000197172; CTA
MEVDPIGHVYI

SEQ ID NO: 40468 - protein, 11 aa, Homo sapiens
  misc_feature: Table A; Target 40468; HLA-B*40:01; MAGEA6; ENSG00000197172; CTA
MEVDPIGHVYI

SEQ ID NO: 40469 - protein, 11 aa, Homo sapiens
  misc_feature: Table A; Target 40469; HLA-B*44:02; MAGEA6; ENSG00000197172; CTA
MEVDPIGHVYI

SEQ ID NO: 40470 - protein, 11 aa, Homo sapiens
  misc_feature: Table A; Target 40470; HLA-B*44:03; MAGEA6; ENSG00000197172; CTA
MEVDPIGHVYI

SEQ ID NO: 40471 - protein, 11 aa, Homo sapiens
  misc_feature: Table A; Target 40471; HLA-B*49:01; MAGEA6; ENSG00000197172; CTA
MEVDPIGHVYI

SEQ ID NO: 40472 - protein, 8 aa, Homo sapiens
  misc_feature: Table A; Target 40472; HLA-B*54:01; MAGEA6; ENSG00000197172; CTA
MPKTGFLI

SEQ ID NO: 40473 - protein, 9 aa, Homo sapiens
  misc_feature: Table A; Target 40473; HLA-B*07:02; MAGEA6; ENSG00000197172; CTA
MPKTGFLII

SEQ ID NO: 40474 - protein, 9 aa, Homo sapiens
  misc_feature: Table A; Target 40474; HLA-A*31:01; MAGEA6; ENSG00000197172; CTA
MVKISGGPR

SEQ ID NO: 40475 - protein, 9 aa, Homo sapiens
  misc_feature: Table A; Target 40475; HLA-A*33:01; MAGEA6; ENSG00000197172; CTA
MVKISGGPR

SEQ ID NO: 40476 - protein, 9 aa, Homo sapiens
  misc_feature: Table A; Target 40476; HLA-A*33:03; MAGEA6; ENSG00000197172; CTA
MVKISGGPR

SEQ ID NO: 40477 - protein, 9 aa, Homo sapiens
  misc_feature: Table A; Target 40477; HLA-A*68:01; MAGEA6; ENSG00000197172; CTA
MVKISGGPR

SEQ ID NO: 40478 - protein, 9 aa, Homo sapiens
  misc_feature: Table A; Target 40478; HLA-C*04:01; MAGEA6; ENSG00000197172; CTA
MVKISGGPR

SEQ ID NO: 40479 - protein, 9 aa, Homo sapiens
  misc_feature: Table A; Target 40479; HLA-C*16:01; MAGEA6; ENSG00000197172; CTA
NQIMPKTGF

SEQ ID NO: 40480 - protein, 9 aa, Homo sapiens
  misc_feature: Table A; Target 40480; HLA-B*07:02; MAGEA6; ENSG00000197172; CTA
PRALIETSY

SEQ ID NO: 40481 - protein, 9 aa, Homo sapiens
  misc_feature: Table A; Target 40481; HLA-B*27:02; MAGEA6; ENSG00000197172; CTA
PRALIETSY

SEQ ID NO: 40482 - protein, 9 aa, Homo sapiens
  misc_feature: Table A; Target 40482; HLA-B*27:05; MAGEA6; ENSG00000197172; CTA
PRALIETSY

SEQ ID NO: 40483 - protein, 9 aa, Homo sapiens
  misc_feature: Table A; Target 40483; HLA-C*07:01; MAGEA6; ENSG00000197172; CTA
PRALIETSY

SEQ ID NO: 40484 - protein, 9 aa, Homo sapiens
  misc_feature: Table A; Target 40484; HLA-C*07:02; MAGEA6; ENSG00000197172; CTA
PRALIETSY

SEQ ID NO: 40485 - protein, 9 aa, Homo sapiens
  misc_feature: Table A; Target 40485; HLA-C*16:04; MAGEA6; ENSG00000197172; CTA
PRALIETSY

SEQ ID NO: 40486 - protein, 9 aa, Homo sapiens
  misc_feature: Table A; Target 40486; HLA-C*16:01; MAGEA6; ENSG00000197172; CTA
QAALSRKVA

SEQ ID NO: 40487 - protein, 8 aa, Homo sapiens
  misc_feature: Table A; Target 40487; HLA-A*30:02; MAGEA6; ENSG00000197172; CTA
QYFVQENY

SEQ ID NO: 40488 - protein, 8 aa, Homo sapiens
  misc_feature: Table A; Target 40488; HLA-B*15:03; MAGEA6; ENSG00000197172; CTA
QYFVQENY

SEQ ID NO: 40489 - protein, 8 aa, Homo sapiens
  misc_feature: Table A; Target 40489; HLA-C*14:02; MAGEA6; ENSG00000197172; CTA
QYFVQENY

SEQ ID NO: 40490 - protein, 9 aa, Homo sapiens
  misc_feature: Table A; Target 40490; HLA-A*23:01; MAGEA6; ENSG00000197172; CTA
QYFVQENYL

SEQ ID NO: 40491 - protein, 9 aa, Homo sapiens
  misc_feature: Table A; Target 40491; HLA-A*24:02; MAGEA6; ENSG00000197172; CTA
QYFVQENYL

SEQ ID NO: 40492 - protein, 9 aa, Homo sapiens
  misc_feature: Table A; Target 40492; HLA-C*04:01; MAGEA6; ENSG00000197172; CTA
QYFVQENYL

SEQ ID NO: 40493 - protein, 9 aa, Homo sapiens
  misc_feature: Table A; Target 40493; HLA-C*14:02; MAGEA6; ENSG00000197172; CTA
QYFVQENYL

SEQ ID NO: 40494 - protein, 11 aa, Homo sapiens
  misc_feature: Table A; Target 40494; HLA-A*29:02; MAGEA6; ENSG00000197172; CTA
QYFVQENYLEY

SEQ ID NO: 40495 - protein, 8 aa, Homo sapiens
  misc_feature: Table A; Target 40495; HLA-B*15:01; MAGEA6; ENSG00000197172; CTA
RALIETSY

SEQ ID NO: 40496 - protein, 10 aa, Homo sapiens
  misc_feature: Table A; Target 40496; HLA-B*57:01; MAGEA6; ENSG00000197172; CTA
RISYPLLHEW

SEQ ID NO: 40497 - protein, 8 aa, Homo sapiens
  misc_feature: Table A; Target 40497; HLA-A*30:01; MAGEA6; ENSG00000197172; CTA
SDSLQLVF

SEQ ID NO: 40498 - protein, 8 aa, Homo sapiens
  misc_feature: Table A; Target 40498; HLA-B*18:01; MAGEA6; ENSG00000197172; CTA
SDSLQLVF

SEQ ID NO: 40499 - protein, 8 aa, Homo sapiens
  misc_feature: Table A; Target 40499; HLA-B*37:01; MAGEA6; ENSG00000197172; CTA
SDSLQLVF

SEQ ID NO: 40500 - protein, 8 aa, Homo sapiens
  misc_feature: Table A; Target 40500; HLA-C*07:01; MAGEA6; ENSG00000197172; CTA
SDSLQLVF

SEQ ID NO: 40501 - protein, 8 aa, Homo sapiens
  misc_feature: Table A; Target 40501; HLA-C*07:04; MAGEA6; ENSG00000197172; CTA
SDSLQLVF

SEQ ID NO: 40502 - protein, 11 aa, Homo sapiens
  misc_feature: Table A; Target 40502; HLA-B*49:01; MAGEA6; ENSG00000197172; CTA
SEFQAALSRKV

SEQ ID NO: 40503 - protein, 8 aa, Homo sapiens
  misc_feature: Table A; Target 40503; HLA-A*30:02; MAGEA6; ENSG00000197172; CTA
SGGPRISY

SEQ ID NO: 40504 - protein, 8 aa, Homo sapiens
  misc_feature: Table A; Target 40504; HLA-A*32:01; MAGEA6; ENSG00000197172; CTA
SGGPRISY

SEQ ID NO: 40505 - protein, 8 aa, Homo sapiens
  misc_feature: Table A; Target 40505; HLA-B*08:01; MAGEA6; ENSG00000197172; CTA
SGGPRISY

SEQ ID NO: 40506 - protein, 8 aa, Homo sapiens
  misc_feature: Table A; Target 40506; HLA-B*15:01; MAGEA6; ENSG00000197172; CTA
SGGPRISY

SEQ ID NO: 40507 - protein, 8 aa, Homo sapiens
  misc_feature: Table A; Target 40507; HLA-B*15:03; MAGEA6; ENSG00000197172; CTA
SGGPRISY

SEQ ID NO: 40508 - protein, 8 aa, Homo sapiens
  misc_feature: Table A; Target 40508; HLA-C*01:02; MAGEA6; ENSG00000197172; CTA
SGGPRISY

SEQ ID NO: 40509 - protein, 8 aa, Homo sapiens
  misc_feature: Table A; Target 40509; HLA-C*06:02; MAGEA6; ENSG00000197172; CTA
SGGPRISY

SEQ ID NO: 40510 - protein, 8 aa, Homo sapiens
  misc_feature: Table A; Target 40510; HLA-C*07:01; MAGEA6; ENSG00000197172; CTA
SGGPRISY

SEQ ID NO: 40511 - protein, 8 aa, Homo sapiens
  misc_feature: Table A; Target 40511; HLA-C*07:04; MAGEA6; ENSG00000197172; CTA
SGGPRISY

SEQ ID NO: 40512 - protein, 8 aa, Homo sapiens
  misc_feature: Table A; Target 40512; HLA-C*12:03; MAGEA6; ENSG00000197172; CTA
SGGPRISY

SEQ ID NO: 40513 - protein, 8 aa, Homo sapiens
  misc_feature: Table A; Target 40513; HLA-C*16:02; MAGEA6; ENSG00000197172; CTA
SGGPRISY

SEQ ID NO: 40514 - protein, 9 aa, Homo sapiens
  misc_feature: Table A; Target 40514; HLA-A*02:03; MAGEA6; ENSG00000197172; CTA
SIFGDPKKL

SEQ ID NO: 40515 - protein, 9 aa, Homo sapiens
  misc_feature: Table A; Target 40515; HLA-A*02:04; MAGEA6; ENSG00000197172; CTA
SIFGDPKKL

SEQ ID NO: 40516 - protein, 9 aa, Homo sapiens
  misc_feature: Table A; Target 40516; HLA-A*03:02; MAGEA6; ENSG00000197172; CTA
SIFGDPKKL

SEQ ID NO: 40517 - protein, 9 aa, Homo sapiens
  misc_feature: Table A; Target 40517; HLA-A*68:02; MAGEA6; ENSG00000197172; CTA
SIFGDPKKL

SEQ ID NO: 40518 - protein, 9 aa, Homo sapiens
  misc_feature: Table A; Target 40518; HLA-B*44:03; MAGEA6; ENSG00000197172; CTA
SIFGDPKKL

SEQ ID NO: 40519 - protein, 9 aa, Homo sapiens
  misc_feature: Table A; Target 40519; HLA-C*02:02; MAGEA6; ENSG00000197172; CTA
SIFGDPKKL

SEQ ID NO: 40520 - protein, 9 aa, Homo sapiens
  misc_feature: Table A; Target 40520; HLA-C*12:03; MAGEA6; ENSG00000197172; CTA
SIFGDPKKL

SEQ ID NO: 40521 - protein, 9 aa, Homo sapiens
  misc_feature: Table A; Target 40521; HLA-C*16:02; MAGEA6; ENSG00000197172; CTA
SIFGDPKKL

SEQ ID NO: 40522 - protein, 9 aa, Homo sapiens
  misc_feature: Table A; Target 40522; HLA-C*16:04; MAGEA6; ENSG00000197172; CTA
SIFGDPKKL

SEQ ID NO: 40523 - protein, 9 aa, Homo sapiens
  misc_feature: Table A; Target 40523; HLA-B*38:01; MAGEA6; ENSG00000197172; CTA
SKASDSLQL

SEQ ID NO: 40524 - protein, 11 aa, Homo sapiens
  misc_feature: Table A; Target 40524; HLA-B*15:03; MAGEA6; ENSG00000197172; CTA
SKASDSLQLVF

SEQ ID NO: 40525 - protein, 8 aa, Homo sapiens
  misc_feature: Table A; Target 40525; HLA-A*24:02; MAGEA6; ENSG00000197172; CTA
SYPLLHEW

SEQ ID NO: 40526 - protein, 10 aa, Homo sapiens
  misc_feature: Table A; Target 40526; HLA-A*24:02; MAGEA6; ENSG00000197172; CTA
SYPLLHEWAL

SEQ ID NO: 40527 - protein, 9 aa, Homo sapiens
  misc_feature: Table A; Target 40527; HLA-B*54:01; MAGEA6; ENSG00000197172; CTA
TGFLIIILA

SEQ ID NO: 40528 - protein, 9 aa, Homo sapiens
  misc_feature: Table A; Target 40528; HLA-A*26:01; MAGEA6; ENSG00000197172; CTA
TQYFVQENY

SEQ ID NO: 40529 - protein, 9 aa, Homo sapiens
  misc_feature: Table A; Target 40529; HLA-A*29:02; MAGEA6; ENSG00000197172; CTA
TQYFVQENY

SEQ ID NO: 40530 - protein, 9 aa, Homo sapiens
  misc_feature: Table A; Target 40530; HLA-A*30:02; MAGEA6; ENSG00000197172; CTA
TQYFVQENY

SEQ ID NO: 40531 - protein, 9 aa, Homo sapiens
  misc_feature: Table A; Target 40531; HLA-A*32:01; MAGEA6; ENSG00000197172; CTA
TQYFVQENY

SEQ ID NO: 40532 - protein, 9 aa, Homo sapiens
  misc_feature: Table A; Target 40532; HLA-B*13:02; MAGEA6; ENSG00000197172; CTA
TQYFVQENY

SEQ ID NO: 40533 - protein, 9 aa, Homo sapiens
  misc_feature: Table A; Target 40533; HLA-B*18:01; MAGEA6; ENSG00000197172; CTA
TQYFVQENY

SEQ ID NO: 40534 - protein, 9 aa, Homo sapiens
  misc_feature: Table A; Target 40534; HLA-B*27:02; MAGEA6; ENSG00000197172; CTA
TQYFVQENY

SEQ ID NO: 40535 - protein, 9 aa, Homo sapiens
  misc_feature: Table A; Target 40535; HLA-B*27:05; MAGEA6; ENSG00000197172; CTA
TQYFVQENY

SEQ ID NO: 40536 - protein, 9 aa, Homo sapiens
  misc_feature: Table A; Target 40536; HLA-B*35:01; MAGEA6; ENSG00000197172; CTA
TQYFVQENY

SEQ ID NO: 40537 - protein, 9 aa, Homo sapiens
  misc_feature: Table A; Target 40537; HLA-B*38:01; MAGEA6; ENSG00000197172; CTA
TQYFVQENY

SEQ ID NO: 40538 - protein, 9 aa, Homo sapiens
  misc_feature: Table A; Target 40538; HLA-B*39:01; MAGEA6; ENSG00000197172; CTA
TQYFVQENY

SEQ ID NO: 40539 - protein, 9 aa, Homo sapiens
  misc_feature: Table A; Target 40539; HLA-B*44:02; MAGEA6; ENSG00000197172; CTA
TQYFVQENY

SEQ ID NO: 40540 - protein, 9 aa, Homo sapiens
  misc_feature: Table A; Target 40540; HLA-B*44:03; MAGEA6; ENSG00000197172; CTA
TQYFVQENY

SEQ ID NO: 40541 - protein, 9 aa, Homo sapiens
  misc_feature: Table A; Target 40541; HLA-B*46:01; MAGEA6; ENSG00000197172; CTA
TQYFVQENY

SEQ ID NO: 40542 - protein, 9 aa, Homo sapiens
  misc_feature: Table A; Target 40542; HLA-B*58:01; MAGEA6; ENSG00000197172; CTA
TQYFVQENY

SEQ ID NO: 40543 - protein, 9 aa, Homo sapiens
  misc_feature: Table A; Target 40543; HLA-C*02:02; MAGEA6; ENSG00000197172; CTA
TQYFVQENY

SEQ ID NO: 40544 - protein, 9 aa, Homo sapiens
  misc_feature: Table A; Target 40544; HLA-C*07:04; MAGEA6; ENSG00000197172; CTA
TQYFVQENY

SEQ ID NO: 40545 - protein, 9 aa, Homo sapiens
  misc_feature: Table A; Target 40545; HLA-C*07:06; MAGEA6; ENSG00000197172; CTA
TQYFVQENY

SEQ ID NO: 40546 - protein, 9 aa, Homo sapiens
  misc_feature: Table A; Target 40546; HLA-C*16:02; MAGEA6; ENSG00000197172; CTA
TQYFVQENY

SEQ ID NO: 40547 - protein, 9 aa, Homo sapiens
  misc_feature: Table A; Target 40547; HLA-C*16:04; MAGEA6; ENSG00000197172; CTA
TQYFVQENY

SEQ ID NO: 40548 - protein, 10 aa, Homo sapiens
  misc_feature: Table A; Target 40548; HLA-A*68:02; MAGEA6; ENSG00000197172; CTA
TQYFVQENYL

SEQ ID NO: 40549 - protein, 10 aa, Homo sapiens
  misc_feature: Table A; Target 40549; HLA-B*13:02; MAGEA6; ENSG00000197172; CTA
TQYFVQENYL

SEQ ID NO: 40550 - protein, 10 aa, Homo sapiens
  misc_feature: Table A; Target 40550; HLA-B*27:05; MAGEA6; ENSG00000197172; CTA
TQYFVQENYL

SEQ ID NO: 40551 - protein, 10 aa, Homo sapiens
  misc_feature: Table A; Target 40551; HLA-B*38:01; MAGEA6; ENSG00000197172; CTA
TQYFVQENYL

SEQ ID NO: 40552 - protein, 8 aa, Homo sapiens
  misc_feature: Table A; Target 40552; HLA-B*08:01; MAGEA6; ENSG00000197172; CTA
VAKLVHFL

SEQ ID NO: 40553 - protein, 8 aa, Homo sapiens
  misc_feature: Table A; Target 40553; HLA-B*15:03; MAGEA6; ENSG00000197172; CTA
VDPIGHVY

SEQ ID NO: 40554 - protein, 8 aa, Homo sapiens
  misc_feature: Table A; Target 40554; HLA-B*18:01; MAGEA6; ENSG00000197172; CTA
VDPIGHVY

SEQ ID NO: 40555 - protein, 8 aa, Homo sapiens
  misc_feature: Table A; Target 40555; HLA-B*37:01; MAGEA6; ENSG00000197172; CTA
VDPIGHVY

SEQ ID NO: 40556 - protein, 8 aa, Homo sapiens
  misc_feature: Table A; Target 40556; HLA-C*01:02; MAGEA6; ENSG00000197172; CTA
VDPIGHVY

SEQ ID NO: 40557 - protein, 8 aa, Homo sapiens
  misc_feature: Table A; Target 40557; HLA-C*04:01; MAGEA6; ENSG00000197172; CTA
VDPIGHVY

SEQ ID NO: 40558 - protein, 8 aa, Homo sapiens
  misc_feature: Table A; Target 40558; HLA-C*06:02; MAGEA6; ENSG00000197172; CTA
VDPIGHVY

SEQ ID NO: 40559 - protein, 8 aa, Homo sapiens
  misc_feature: Table A; Target 40559; HLA-C*07:01; MAGEA6; ENSG00000197172; CTA
VDPIGHVY

SEQ ID NO: 40560 - protein, 8 aa, Homo sapiens
  misc_feature: Table A; Target 40560; HLA-C*07:04; MAGEA6; ENSG00000197172; CTA
VDPIGHVY

SEQ ID NO: 40561 - protein, 8 aa, Homo sapiens
  misc_feature: Table A; Target 40561; HLA-C*12:03; MAGEA6; ENSG00000197172; CTA
VDPIGHVY

SEQ ID NO: 40562 - protein, 8 aa, Homo sapiens
  misc_feature: Table A; Target 40562; HLA-C*14:02; MAGEA6; ENSG00000197172; CTA
VDPIGHVY

SEQ ID NO: 40563 - protein, 8 aa, Homo sapiens
  misc_feature: Table A; Target 40563; HLA-C*16:01; MAGEA6; ENSG00000197172; CTA
VDPIGHVY

SEQ ID NO: 40564 - protein, 9 aa, Homo sapiens
  misc_feature: Table A; Target 40564; HLA-A*24:02; MAGEA6; ENSG00000197172; CTA
VDPIGHVYI

SEQ ID NO: 40565 - protein, 11 aa, Homo sapiens
  misc_feature: Table A; Target 40565; HLA-B*15:03; MAGEA6; ENSG00000197172; CTA
VKISGGPRISY

SEQ ID NO: 40566 - protein, 8 aa, Homo sapiens
  misc_feature: Table A; Target 40566; HLA-A*30:02; MAGEA6; ENSG00000197172; CTA
VQENYLEY

SEQ ID NO: 40567 - protein, 8 aa, Homo sapiens
  misc_feature: Table A; Target 40567; HLA-A*23:01; MAGEA6; ENSG00000197172; CTA
VYIFATCL

SEQ ID NO: 40568 - protein, 8 aa, Homo sapiens
  misc_feature: Table A; Target 40568; HLA-A*24:02; MAGEA6; ENSG00000197172; CTA
VYIFATCL

SEQ ID NO: 40569 - protein, 8 aa, Homo sapiens
  misc_feature: Table A; Target 40569; HLA-C*14:02; MAGEA6; ENSG00000197172; CTA
VYIFATCL

SEQ ID NO: 40570 - protein, 10 aa, Homo sapiens
  misc_feature: Table A; Target 40570; HLA-A*23:01; MAGEA6; ENSG00000197172; CTA
YFVQENYLEY

SEQ ID NO: 40571 - protein, 8 aa, Homo sapiens
  misc_feature: Table A; Target 40571; HLA-B*54:01; MAGEA6; ENSG00000197172; CTA
YPLLHEWA

SEQ ID NO: 40572 - protein, 9 aa, Homo sapiens
  misc_feature: Table A; Target 40572; HLA-B*08:01; MAGEA6; ENSG00000197172; CTA
YPLLHEWAL

SEQ ID NO: 40573 - protein, 9 aa, Homo sapiens
  misc_feature: Table A; Target 40573; HLA-B*35:01; MAGEA6; ENSG00000197172; CTA
YPLLHEWAL

SEQ ID NO: 40574 - protein, 9 aa, Homo sapiens
  misc_feature: Table A; Target 40574; HLA-B*35:03; MAGEA6; ENSG00000197172; CTA
YPLLHEWAL

SEQ ID NO: 40575 - protein, 9 aa, Homo sapiens
  misc_feature: Table A; Target 40575; HLA-B*51:01; MAGEA6; ENSG00000197172; CTA
YPLLHEWAL

SEQ ID NO: 40576 - protein, 9 aa, Homo sapiens
  misc_feature: Table A; Target 40576; HLA-B*54:01; MAGEA6; ENSG00000197172; CTA
YPLLHEWAL

SEQ ID NO: 40577 - protein, 9 aa, Homo sapiens
  misc_feature: Table A; Target 40577; HLA-B*55:01; MAGEA6; ENSG00000197172; CTA
YPLLHEWAL

SEQ ID NO: 40578 - protein, 9 aa, Homo sapiens
  misc_feature: Table A; Target 40578; HLA-B*56:01; MAGEA6; ENSG00000197172; CTA
YPLLHEWAL

SEQ ID NO: 40579 - protein, 9 aa, Homo sapiens
  misc_feature: Table A; Target 40579; HLA-B*13:02; MAGEA8; ENSG00000156009; TAA
AASSSSTLI

SEQ ID NO: 40580 - protein, 9 aa, Homo sapiens
  misc_feature: Table A; Target 40580; HLA-B*38:01; MAGEA8; ENSG00000156009; TAA
AASSSSTLI

SEQ ID NO: 40581 - protein, 9 aa, Homo sapiens
  misc_feature: Table A; Target 40581; HLA-B*49:01; MAGEA8; ENSG00000156009; TAA
AASSSSTLI

SEQ ID NO: 40582 - protein, 9 aa, Homo sapiens
  misc_feature: Table A; Target 40582; HLA-C*02:02; MAGEA8; ENSG00000156009; TAA
AASSSSTLI

SEQ ID NO: 40583 - protein, 9 aa, Homo sapiens
  misc_feature: Table A; Target 40583; HLA-C*16:02; MAGEA8; ENSG00000156009; TAA
AASSSSTLI

SEQ ID NO: 40584 - protein, 10 aa, Homo sapiens
  misc_feature: Table A; Target 40584; HLA-C*03:03; MAGEA8; ENSG00000156009; TAA
AASSSSTLIM

SEQ ID NO: 40585 - protein, 10 aa, Homo sapiens
  misc_feature: Table A; Target 40585; HLA-C*03:04; MAGEA8; ENSG00000156009; TAA
AASSSSTLIM

SEQ ID NO: 40586 - protein, 8 aa, Homo sapiens
  misc_feature: Table A; Target 40586; HLA-B*37:01; MAGEA8; ENSG00000156009; TAA
AELVRFLL

SEQ ID NO: 40587 - protein, 8 aa, Homo sapiens
  misc_feature: Table A; Target 40587; HLA-B*44:02; MAGEA8; ENSG00000156009; TAA
AELVRFLL

SEQ ID NO: 40588 - protein, 8 aa, Homo sapiens
  misc_feature: Table A; Target 40588; HLA-B*44:03; MAGEA8; ENSG00000156009; TAA
AELVRFLL

SEQ ID NO: 40589 - protein, 9 aa, Homo sapiens
  misc_feature: Table A; Target 40589; HLA-B*44:02; MAGEA8; ENSG00000156009; TAA
AELVRFLLR

SEQ ID NO: 40590 - protein, 11 aa, Homo sapiens
  misc_feature: Table A; Target 40590; HLA-B*15:01; MAGEA8; ENSG00000156009; TAA
AEMLESVIKNY

SEQ ID NO: 40591 - protein, 11 aa, Homo sapiens
  misc_feature: Table A; Target 40591; HLA-B*40:02; MAGEA8; ENSG00000156009; TAA
AEMLESVIKNY

SEQ ID NO: 40592 - protein, 11 aa, Homo sapiens
  misc_feature: Table A; Target 40592; HLA-B*57:01; MAGEA8; ENSG00000156009; TAA
AEMLESVIKNY

SEQ ID NO: 40593 - protein, 11 aa, Homo sapiens
  misc_feature: Table A; Target 40593; HLA-C*12:03; MAGEA8; ENSG00000156009; TAA
AEMLESVIKNY

SEQ ID NO: 40594 - protein, 9 aa, Homo sapiens
  misc_feature: Table A; Target 40594; HLA-A*30:01; MAGEA8; ENSG00000156009; TAA
AETSYVKVL

SEQ ID NO: 40595 - protein, 9 aa, Homo sapiens
  misc_feature: Table A; Target 40595; HLA-B*46:01; MAGEA8; ENSG00000156009; TAA
AIWEALSVM

SEQ ID NO: 40596 - protein, 11 aa, Homo sapiens
  misc_feature: Table A; Target 40596; HLA-A*02:04; MAGEA8; ENSG00000156009; TAA
AIWEALSVMGL

SEQ ID NO: 40597 - protein, 11 aa, Homo sapiens
  misc_feature: Table A; Target 40597; HLA-A*02:07; MAGEA8; ENSG00000156009; TAA
AIWEALSVMGL

SEQ ID NO: 40598 - protein, 9 aa, Homo sapiens
  misc_feature: Table A; Target 40598; HLA-A*11:01; MAGEA8; ENSG00000156009; TAA
ALAETSYVK

SEQ ID NO: 40599 - protein, 9 aa, Homo sapiens
  misc_feature: Table A; Target 40599; HLA-A*68:01; MAGEA8; ENSG00000156009; TAA
ALAETSYVK

SEQ ID NO: 40600 - protein, 9 aa, Homo sapiens
  misc_feature: Table A; Target 40600; HLA-B*27:02; MAGEA8; ENSG00000156009; TAA
ALAETSYVK

SEQ ID NO: 40601 - protein, 9 aa, Homo sapiens
  misc_feature: Table A; Target 40601; HLA-A*01:01; MAGEA8; ENSG00000156009; TAA
ALDEKVAEL

SEQ ID NO: 40602 - protein, 9 aa, Homo sapiens
  misc_feature: Table A; Target 40602; HLA-A*02:03; MAGEA8; ENSG00000156009; TAA
ALDEKVAEL

SEQ ID NO: 40603 - protein, 9 aa, Homo sapiens
  misc_feature: Table A; Target 40603; HLA-A*02:04; MAGEA8; ENSG00000156009; TAA
ALDEKVAEL

SEQ ID NO: 40604 - protein, 9 aa, Homo sapiens
  misc_feature: Table A; Target 40604; HLA-A*02:07; MAGEA8; ENSG00000156009; TAA
ALDEKVAEL

SEQ ID NO: 40605 - protein, 9 aa, Homo sapiens
  misc_feature: Table A; Target 40605; HLA-A*03:02; MAGEA8; ENSG00000156009; TAA
ALDEKVAEL

SEQ ID NO: 40606 - protein, 9 aa, Homo sapiens
  misc_feature: Table A; Target 40606; HLA-A*32:01; MAGEA8; ENSG00000156009; TAA
ALDEKVAEL

SEQ ID NO: 40607 - protein, 9 aa, Homo sapiens
  misc_feature: Table A; Target 40607; HLA-B*07:02; MAGEA8; ENSG00000156009; TAA
ALDEKVAEL

SEQ ID NO: 40608 - protein, 9 aa, Homo sapiens
  misc_feature: Table A; Target 40608; HLA-B*08:01; MAGEA8; ENSG00000156009; TAA
ALDEKVAEL

SEQ ID NO: 40609 - protein, 9 aa, Homo sapiens
  misc_feature: Table A; Target 40609; HLA-B*35:03; MAGEA8; ENSG00000156009; TAA
ALDEKVAEL

SEQ ID NO: 40610 - protein, 9 aa, Homo sapiens
  misc_feature: Table A; Target 40610; HLA-B*38:01; MAGEA8; ENSG00000156009; TAA
ALDEKVAEL

SEQ ID NO: 40611 - protein, 9 aa, Homo sapiens
  misc_feature: Table A; Target 40611; HLA-B*39:01; MAGEA8; ENSG00000156009; TAA
ALDEKVAEL

SEQ ID NO: 40612 - protein, 9 aa, Homo sapiens
  misc_feature: Table A; Target 40612; HLA-B*40:01; MAGEA8; ENSG00000156009; TAA
ALDEKVAEL

SEQ ID NO: 40613 - protein, 9 aa, Homo sapiens
  misc_feature: Table A; Target 40613; HLA-B*46:01; MAGEA8; ENSG00000156009; TAA
ALDEKVAEL

SEQ ID NO: 40614 - protein, 9 aa, Homo sapiens
  misc_feature: Table A; Target 40614; HLA-B*55:01; MAGEA8; ENSG00000156009; TAA
ALDEKVAEL

SEQ ID NO: 40615 - protein, 9 aa, Homo sapiens
  misc_feature: Table A; Target 40615; HLA-C*01:02; MAGEA8; ENSG00000156009; TAA
ALDEKVAEL

SEQ ID NO: 40616 - protein, 9 aa, Homo sapiens
  misc_feature: Table A; Target 40616; HLA-C*04:01; MAGEA8; ENSG00000156009; TAA
ALDEKVAEL

SEQ ID NO: 40617 - protein, 9 aa, Homo sapiens
  misc_feature: Table A; Target 40617; HLA-C*05:01; MAGEA8; ENSG00000156009; TAA
ALDEKVAEL

SEQ ID NO: 40618 - protein, 9 aa, Homo sapiens
  misc_feature: Table A; Target 40618; HLA-C*07:04; MAGEA8; ENSG00000156009; TAA
ALDEKVAEL

SEQ ID NO: 40619 - protein, 9 aa, Homo sapiens
  misc_feature: Table A; Target 40619; HLA-C*14:02; MAGEA8; ENSG00000156009; TAA
ALDEKVAEL

SEQ ID NO: 40620 - protein, 9 aa, Homo sapiens
  misc_feature: Table A; Target 40620; HLA-C*16:02; MAGEA8; ENSG00000156009; TAA
ALDEKVAEL

SEQ ID NO: 40621 - protein, 10 aa, Homo sapiens
  misc_feature: Table A; Target 40621; HLA-A*02:01; MAGEA8; ENSG00000156009; TAA
ALDEKVAELV

SEQ ID NO: 40622 - protein, 10 aa, Homo sapiens
  misc_feature: Table A; Target 40622; HLA-A*02:07; MAGEA8; ENSG00000156009; TAA
ALDEKVAELV

SEQ ID NO: 40623 - protein, 10 aa, Homo sapiens
  misc_feature: Table A; Target 40623; HLA-B*55:01; MAGEA8; ENSG00000156009; TAA
ALDEKVAELV

SEQ ID NO: 40624 - protein, 8 aa, Homo sapiens
  misc_feature: Table A; Target 40624; HLA-A*02:01; MAGEA8; ENSG00000156009; TAA
ALGEEKGV

SEQ ID NO: 40625 - protein, 8 aa, Homo sapiens
  misc_feature: Table A; Target 40625; HLA-A*02:03; MAGEA8; ENSG00000156009; TAA
ALGEEKGV

SEQ ID NO: 40626 - protein, 8 aa, Homo sapiens
  misc_feature: Table A; Target 40626; HLA-B*55:01; MAGEA8; ENSG00000156009; TAA
ALGEEKGV

SEQ ID NO: 40627 - protein, 8 aa, Homo sapiens
  misc_feature: Table A; Target 40627; HLA-A*30:02; MAGEA8; ENSG00000156009; TAA
ALSVMGLY

SEQ ID NO: 40628 - protein, 8 aa, Homo sapiens
  misc_feature: Table A; Target 40628; HLA-B*15:01; MAGEA8; ENSG00000156009; TAA
ALSVMGLY

SEQ ID NO: 40629 - protein, 9 aa, Homo sapiens
  misc_feature: Table A; Target 40629; HLA-B*35:03; MAGEA8; ENSG00000156009; TAA
APEEAIWEA

SEQ ID NO: 40630 - protein, 9 aa, Homo sapiens
  misc_feature: Table A; Target 40630; HLA-B*54:01; MAGEA8; ENSG00000156009; TAA
APEEAIWEA

SEQ ID NO: 40631 - protein, 9 aa, Homo sapiens
  misc_feature: Table A; Target 40631; HLA-B*55:01; MAGEA8; ENSG00000156009; TAA
APEEAIWEA

SEQ ID NO: 40632 - protein, 9 aa, Homo sapiens
  misc_feature: Table A; Target 40632; HLA-B*56:01; MAGEA8; ENSG00000156009; TAA
APEEAIWEA

SEQ ID NO: 40633 - protein, 10 aa, Homo sapiens
  misc_feature: Table A; Target 40633; HLA-B*35:03; MAGEA8; ENSG00000156009; TAA
APEEAIWEAL

SEQ ID NO: 40634 - protein, 9 aa, Homo sapiens
  misc_feature: Table A; Target 40634; HLA-B*35:03; MAGEA8; ENSG00000156009; TAA
APGLMDVQI

SEQ ID NO: 40635 - protein, 9 aa, Homo sapiens
  misc_feature: Table A; Target 40635; HLA-A*01:01; MAGEA8; ENSG00000156009; TAA
APGSDPVRY

SEQ ID NO: 40636 - protein, 9 aa, Homo sapiens
  misc_feature: Table A; Target 40636; HLA-A*29:02; MAGEA8; ENSG00000156009; TAA
APGSDPVRY

SEQ ID NO: 40637 - protein, 9 aa, Homo sapiens
  misc_feature: Table A; Target 40637; HLA-A*30:02; MAGEA8; ENSG00000156009; TAA
APGSDPVRY

SEQ ID NO: 40638 - protein, 9 aa, Homo sapiens
  misc_feature: Table A; Target 40638; HLA-B*15:01; MAGEA8; ENSG00000156009; TAA
APGSDPVRY

SEQ ID NO: 40639 - protein, 9 aa, Homo sapiens
  misc_feature: Table A; Target 40639; HLA-B*35:01; MAGEA8; ENSG00000156009; TAA
APGSDPVRY

SEQ ID NO: 40640 - protein, 9 aa, Homo sapiens
  misc_feature: Table A; Target 40640; HLA-B*44:03; MAGEA8; ENSG00000156009; TAA
APGSDPVRY

SEQ ID NO: 40641 - protein, 9 aa, Homo sapiens
  misc_feature: Table A; Target 40641; HLA-B*55:01; MAGEA8; ENSG00000156009; TAA
APGSDPVRY

SEQ ID NO: 40642 - protein, 9 aa, Homo sapiens
  misc_feature: Table A; Target 40642; HLA-C*03:03; MAGEA8; ENSG00000156009; TAA
APGSDPVRY

SEQ ID NO: 40643 - protein, 11 aa, Homo sapiens
  misc_feature: Table A; Target 40643; HLA-B*07:02; MAGEA8; ENSG00000156009; TAA
APGSDPVRYEF

SEQ ID NO: 40644 - protein, 11 aa, Homo sapiens
  misc_feature: Table A; Target 40644; HLA-B*35:01; MAGEA8; ENSG00000156009; TAA
APGSDPVRYEF

SEQ ID NO: 40645 - protein, 11 aa, Homo sapiens
  misc_feature: Table A; Target 40645; HLA-B*55:01; MAGEA8; ENSG00000156009; TAA
APGSDPVRYEF

SEQ ID NO: 40646 - protein, 8 aa, Homo sapiens
  misc_feature: Table A; Target 40646; HLA-B*13:02; MAGEA8; ENSG00000156009; TAA
AQGEAPGL

SEQ ID NO: 40647 - protein, 8 aa, Homo sapiens
  misc_feature: Table A; Target 40647; HLA-B*27:05; MAGEA8; ENSG00000156009; TAA
AQGEAPGL

SEQ ID NO: 40648 - protein, 8 aa, Homo sapiens
  misc_feature: Table A; Target 40648; HLA-B*39:01; MAGEA8; ENSG00000156009; TAA
AQGEAPGL

SEQ ID NO: 40649 - protein, 9 aa, Homo sapiens
  misc_feature: Table A; Target 40649; HLA-B*27:05; MAGEA8; ENSG00000156009; TAA
AQGEAPGLM

SEQ ID NO: 40650 - protein, 9 aa, Homo sapiens
  misc_feature: Table A; Target 40650; HLA-C*05:01; MAGEA8; ENSG00000156009; TAA
AQGEAPGLM

SEQ ID NO: 40651 - protein, 11 aa, Homo sapiens
  misc_feature: Table A; Target 40651; HLA-A*02:01; MAGEA8; ENSG00000156009; TAA
AQGEAPGLMDV

SEQ ID NO: 40652 - protein, 11 aa, Homo sapiens
  misc_feature: Table A; Target 40652; HLA-B*13:02; MAGEA8; ENSG00000156009; TAA
AQGEAPGLMDV

SEQ ID NO: 40653 - protein, 9 aa, Homo sapiens
  misc_feature: Table A; Target 40653; HLA-B*58:01; MAGEA8; ENSG00000156009; TAA
ASECMQVIF

SEQ ID NO: 40654 - protein, 9 aa, Homo sapiens
  misc_feature: Table A; Target 40654; HLA-A*01:01; MAGEA8; ENSG00000156009; TAA
ASSSSTLIM

SEQ ID NO: 40655 - protein, 9 aa, Homo sapiens
  misc_feature: Table A; Target 40655; HLA-A*03:01; MAGEA8; ENSG00000156009; TAA
ASSSSTLIM

SEQ ID NO: 40656 - protein, 9 aa, Homo sapiens
  misc_feature: Table A; Target 40656; HLA-A*11:01; MAGEA8; ENSG00000156009; TAA
ASSSSTLIM

SEQ ID NO: 40657 - protein, 9 aa, Homo sapiens
  misc_feature: Table A; Target 40657; HLA-B*46:01; MAGEA8; ENSG00000156009; TAA
ASSSSTLIM

SEQ ID NO: 40658 - protein, 9 aa, Homo sapiens
  misc_feature: Table A; Target 40658; HLA-B*58:01; MAGEA8; ENSG00000156009; TAA
ASSSSTLIM

SEQ ID NO: 40659 - protein, 9 aa, Homo sapiens
  misc_feature: Table A; Target 40659; HLA-C*01:02; MAGEA8; ENSG00000156009; TAA
ASSSSTLIM

SEQ ID NO: 40660 - protein, 9 aa, Homo sapiens
  misc_feature: Table A; Target 40660; HLA-C*02:02; MAGEA8; ENSG00000156009; TAA
ASSSSTLIM

SEQ ID NO: 40661 - protein, 9 aa, Homo sapiens
  misc_feature: Table A; Target 40661; HLA-C*03:03; MAGEA8; ENSG00000156009; TAA
ASSSSTLIM

SEQ ID NO: 40662 - protein, 9 aa, Homo sapiens
  misc_feature: Table A; Target 40662; HLA-C*03:04; MAGEA8; ENSG00000156009; TAA
ASSSSTLIM

SEQ ID NO: 40663 - protein, 9 aa, Homo sapiens
  misc_feature: Table A; Target 40663; HLA-C*07:04; MAGEA8; ENSG00000156009; TAA
ASSSSTLIM

SEQ ID NO: 40664 - protein, 9 aa, Homo sapiens
  misc_feature: Table A; Target 40664; HLA-C*12:03; MAGEA8; ENSG00000156009; TAA
ASSSSTLIM

SEQ ID NO: 40665 - protein, 9 aa, Homo sapiens
  misc_feature: Table A; Target 40665; HLA-C*14:02; MAGEA8; ENSG00000156009; TAA
ASSSSTLIM

SEQ ID NO: 40666 - protein, 9 aa, Homo sapiens
  misc_feature: Table A; Target 40666; HLA-C*16:01; MAGEA8; ENSG00000156009; TAA
ASSSSTLIM

SEQ ID NO: 40667 - protein, 9 aa, Homo sapiens
  misc_feature: Table A; Target 40667; HLA-C*16:02; MAGEA8; ENSG00000156009; TAA
ASSSSTLIM

SEQ ID NO: 40668 - protein, 9 aa, Homo sapiens
  misc_feature: Table A; Target 40668; HLA-C*16:04; MAGEA8; ENSG00000156009; TAA
ASSSSTLIM

SEQ ID NO: 40669 - protein, 8 aa, Homo sapiens
  misc_feature: Table A; Target 40669; HLA-B*49:01; MAGEA8; ENSG00000156009; TAA
DEKVAELV

SEQ ID NO: 40670 - protein, 8 aa, Homo sapiens
  misc_feature: Table A; Target 40670; HLA-B*51:01; MAGEA8; ENSG00000156009; TAA
DEKVAELV

SEQ ID NO: 40671 - protein, 9 aa, Homo sapiens
  misc_feature: Table A; Target 40671; HLA-A*33:01; MAGEA8; ENSG00000156009; TAA
DEKVAELVR

SEQ ID NO: 40672 - protein, 9 aa, Homo sapiens
  misc_feature: Table A; Target 40672; HLA-B*18:01; MAGEA8; ENSG00000156009; TAA
DEKVAELVR

SEQ ID NO: 40673 - protein, 10 aa, Homo sapiens
  misc_feature: Table A; Target 40673; HLA-B*18:01; MAGEA8; ENSG00000156009; TAA
DEKVAELVRF

SEQ ID NO: 40674 - protein, 10 aa, Homo sapiens
  misc_feature: Table A; Target 40674; HLA-B*44:02; MAGEA8; ENSG00000156009; TAA
DEKVAELVRF

SEQ ID NO: 40675 - protein, 8 aa, Homo sapiens
  misc_feature: Table A; Target 40675; HLA-B*08:01; MAGEA8; ENSG00000156009; TAA
DGREHSVY

SEQ ID NO: 40676 - protein, 8 aa, Homo sapiens
  misc_feature: Table A; Target 40676; HLA-B*18:01; MAGEA8; ENSG00000156009; TAA
DGREHSVY

SEQ ID NO: 40677 - protein, 9 aa, Homo sapiens
  misc_feature: Table A; Target 40677; HLA-A*33:01; MAGEA8; ENSG00000156009; TAA
DGREHSVYW

SEQ ID NO: 40678 - protein, 10 aa, Homo sapiens
  misc_feature: Table A; Target 40678; HLA-B*51:01; MAGEA8; ENSG00000156009; TAA
DPAGHSYILV

SEQ ID NO: 40679 - protein, 8 aa, Homo sapiens
  misc_feature: Table A; Target 40679; HLA-B*35:03; MAGEA8; ENSG00000156009; TAA
DPAHLESL

SEQ ID NO: 40680 - protein, 9 aa, Homo sapiens
  misc_feature: Table A; Target 40680; HLA-A*26:01; MAGEA8; ENSG00000156009; TAA
DPAHLESLF

SEQ ID NO: 40681 - protein, 9 aa, Homo sapiens
  misc_feature: Table A; Target 40681; HLA-B*35:01; MAGEA8; ENSG00000156009; TAA
DPAHLESLF

SEQ ID NO: 40682 - protein, 9 aa, Homo sapiens
  misc_feature: Table A; Target 40682; HLA-B*38:01; MAGEA8; ENSG00000156009; TAA
DQSTPKTGL

SEQ ID NO: 40683 - protein, 9 aa, Homo sapiens
  misc_feature: Table A; Target 40683; HLA-B*39:01; MAGEA8; ENSG00000156009; TAA
DQSTPKTGL

SEQ ID NO: 40684 - protein, 10 aa, Homo sapiens
  misc_feature: Table A; Target 40684; HLA-C*07:06; MAGEA8; ENSG00000156009; TAA
DVKEVDPAGH

SEQ ID NO: 40685 - protein, 11 aa, Homo sapiens
  misc_feature: Table A; Target 40685; HLA-A*03:02; MAGEA8; ENSG00000156009; TAA
DVQIPTAEEQK

SEQ ID NO: 40686 - protein, 11 aa, Homo sapiens
  misc_feature: Table A; Target 40686; HLA-A*33:01; MAGEA8; ENSG00000156009; TAA
DVQIPTAEEQK

SEQ ID NO: 40687 - protein, 11 aa, Homo sapiens
  misc_feature: Table A; Target 40687; HLA-A*68:01; MAGEA8; ENSG00000156009; TAA
DVQIPTAEEQK

SEQ ID NO: 40688 - protein, 11 aa, Homo sapiens
  misc_feature: Table A; Target 40688; HLA-B*27:02; MAGEA8; ENSG00000156009; TAA
DVQIPTAEEQK

SEQ ID NO: 40689 - protein, 9 aa, Homo sapiens
  misc_feature: Table A; Target 40689; HLA-A*26:01; MAGEA8; ENSG00000156009; TAA
EAIWEALSV

SEQ ID NO: 40690 - protein, 9 aa, Homo sapiens
  misc_feature: Table A; Target 40690; HLA-A*68:02; MAGEA8; ENSG00000156009; TAA
EAIWEALSV

SEQ ID NO: 40691 - protein, 9 aa, Homo sapiens
  misc_feature: Table A; Target 40691; HLA-B*51:01; MAGEA8; ENSG00000156009; TAA
EAIWEALSV

SEQ ID NO: 40692 - protein, 9 aa, Homo sapiens
  misc_feature: Table A; Target 40692; HLA-B*54:01; MAGEA8; ENSG00000156009; TAA
EAIWEALSV

SEQ ID NO: 40693 - protein, 10 aa, Homo sapiens
  misc_feature: Table A; Target 40693; HLA-A*25:01; MAGEA8; ENSG00000156009; TAA
EAIWEALSVM

SEQ ID NO: 40694 - protein, 10 aa, Homo sapiens
  misc_feature: Table A; Target 40694; HLA-A*26:01; MAGEA8; ENSG00000156009; TAA
EAIWEALSVM

SEQ ID NO: 40695 - protein, 10 aa, Homo sapiens
  misc_feature: Table A; Target 40695; HLA-B*35:01; MAGEA8; ENSG00000156009; TAA
EAIWEALSVM

SEQ ID NO: 40696 - protein, 10 aa, Homo sapiens
  misc_feature: Table A; Target 40696; HLA-A*25:01; MAGEA8; ENSG00000156009; TAA
EALDEKVAEL

SEQ ID NO: 40697 - protein, 10 aa, Homo sapiens
  misc_feature: Table A; Target 40697; HLA-A*26:01; MAGEA8; ENSG00000156009; TAA
EALDEKVAEL

SEQ ID NO: 40698 - protein, 10 aa, Homo sapiens
  misc_feature: Table A; Target 40698; HLA-A*33:01; MAGEA8; ENSG00000156009; TAA
EALDEKVAEL

SEQ ID NO: 40699 - protein, 10 aa, Homo sapiens
  misc_feature: Table A; Target 40699; HLA-A*33:03; MAGEA8; ENSG00000156009; TAA
EALDEKVAEL

SEQ ID NO: 40700 - protein, 10 aa, Homo sapiens
  misc_feature: Table A; Target 40700; HLA-A*68:01; MAGEA8; ENSG00000156009; TAA
EALDEKVAEL

SEQ ID NO: 40701 - protein, 10 aa, Homo sapiens
  misc_feature: Table A; Target 40701; HLA-B*35:03; MAGEA8; ENSG00000156009; TAA
EALDEKVAEL

SEQ ID NO: 40702 - protein, 10 aa, Homo sapiens
  misc_feature: Table A; Target 40702; HLA-C*07:06; MAGEA8; ENSG00000156009; TAA
EALDEKVAEL

SEQ ID NO: 40703 - protein, 11 aa, Homo sapiens
  misc_feature: Table A; Target 40703; HLA-A*68:02; MAGEA8; ENSG00000156009; TAA
EALDEKVAELV

SEQ ID NO: 40704 - protein, 9 aa, Homo sapiens
  misc_feature: Table A; Target 40704; HLA-B*51:01; MAGEA8; ENSG00000156009; TAA
EALGEEKGV

SEQ ID NO: 40705 - protein, 8 aa, Homo sapiens
  misc_feature: Table A; Target 40705; HLA-B*51:01; MAGEA8; ENSG00000156009; TAA
EALSVMGL

SEQ ID NO: 40706 - protein, 9 aa, Homo sapiens
  misc_feature: Table A; Target 40706; HLA-A*01:01; MAGEA8; ENSG00000156009; TAA
EALSVMGLY

SEQ ID NO: 40707 - protein, 9 aa, Homo sapiens
  misc_feature: Table A; Target 40707; HLA-A*25:01; MAGEA8; ENSG00000156009; TAA
EALSVMGLY

SEQ ID NO: 40708 - protein, 9 aa, Homo sapiens
  misc_feature: Table A; Target 40708; HLA-A*26:01; MAGEA8; ENSG00000156009; TAA
EALSVMGLY

SEQ ID NO: 40709 - protein, 9 aa, Homo sapiens
  misc_feature: Table A; Target 40709; HLA-A*29:02; MAGEA8; ENSG00000156009; TAA
EALSVMGLY

SEQ ID NO: 40710 - protein, 9 aa, Homo sapiens
  misc_feature: Table A; Target 40710; HLA-A*30:02; MAGEA8; ENSG00000156009; TAA
EALSVMGLY

SEQ ID NO: 40711 - protein, 9 aa, Homo sapiens
  misc_feature: Table A; Target 40711; HLA-A*33:01; MAGEA8; ENSG00000156009; TAA
EALSVMGLY

SEQ ID NO: 40712 - protein, 9 aa, Homo sapiens
  misc_feature: Table A; Target 40712; HLA-A*33:03; MAGEA8; ENSG00000156009; TAA
EALSVMGLY

SEQ ID NO: 40713 - protein, 9 aa, Homo sapiens
  misc_feature: Table A; Target 40713; HLA-B*35:01; MAGEA8; ENSG00000156009; TAA
EALSVMGLY

SEQ ID NO: 40714 - protein, 9 aa, Homo sapiens
  misc_feature: Table A; Target 40714; HLA-B*44:03; MAGEA8; ENSG00000156009; TAA
EALSVMGLY

SEQ ID NO: 40715 - protein, 8 aa, Homo sapiens
  misc_feature: Table A; Target 40715; HLA-B*51:01; MAGEA8; ENSG00000156009; TAA
EAPGLMDV

SEQ ID NO: 40716 - protein, 10 aa, Homo sapiens
  misc_feature: Table A; Target 40716; HLA-A*68:01; MAGEA8; ENSG00000156009; TAA
EAPGLMDVQI

SEQ ID NO: 40717 - protein, 10 aa, Homo sapiens
  misc_feature: Table A; Target 40717; HLA-A*68:02; MAGEA8; ENSG00000156009; TAA
EAPGLMDVQI

SEQ ID NO: 40718 - protein, 8 aa, Homo sapiens
  misc_feature: Table A; Target 40718; HLA-B*18:01; MAGEA8; ENSG00000156009; TAA
EEAIWEAL

SEQ ID NO: 40719 - protein, 10 aa, Homo sapiens
  misc_feature: Table A; Target 40719; HLA-B*44:02; MAGEA8; ENSG00000156009; TAA
EEALGEEKGV

SEQ ID NO: 40720 - protein, 10 aa, Homo sapiens
  misc_feature: Table A; Target 40720; HLA-B*44:03; MAGEA8; ENSG00000156009; TAA
EEALGEEKGV

SEQ ID NO: 40721 - protein, 10 aa, Homo sapiens
  misc_feature: Table A; Target 40721; HLA-B*49:01; MAGEA8; ENSG00000156009; TAA
EEALGEEKGV

SEQ ID NO: 40722 - protein, 9 aa, Homo sapiens
  misc_feature: Table A; Target 40722; HLA-B*39:01; MAGEA8; ENSG00000156009; TAA
EEEGPSTSP

SEQ ID NO: 40723 - protein, 11 aa, Homo sapiens
  misc_feature: Table A; Target 40723; HLA-B*39:01; MAGEA8; ENSG00000156009; TAA
EEEGPSTSPDP

SEQ ID NO: 40724 - protein, 11 aa, Homo sapiens
  misc_feature: Table A; Target 40724; HLA-B*39:01; MAGEA8; ENSG00000156009; TAA
EEGPSTSPDPA

SEQ ID NO: 40725 - protein, 9 aa, Homo sapiens
  misc_feature: Table A; Target 40725; HLA-B*51:01; MAGEA8; ENSG00000156009; TAA
EGASSSLTV

SEQ ID NO: 40726 - protein, 9 aa, Homo sapiens
  misc_feature: Table A; Target 40726; HLA-A*33:03; MAGEA8; ENSG00000156009; TAA
EHVVRVNAR

SEQ ID NO: 40727 - protein, 8 aa, Homo sapiens
  misc_feature: Table A; Target 40727; HLA-B*08:01; MAGEA8; ENSG00000156009; TAA
ESLFREAL

SEQ ID NO: 40728 - protein, 11 aa, Homo sapiens
  misc_feature: Table A; Target 40728; HLA-A*33:01; MAGEA8; ENSG00000156009; TAA
ESLFREALDEK

SEQ ID NO: 40729 - protein, 9 aa, Homo sapiens
  misc_feature: Table A; Target 40729; HLA-A*68:02; MAGEA8; ENSG00000156009; TAA
ETSYVKVLE

SEQ ID NO: 40730 - protein, 10 aa, Homo sapiens
  misc_feature: Table A; Target 40730; HLA-A*68:01; MAGEA8; ENSG00000156009; TAA
ETSYVKVLEH

SEQ ID NO: 40731 - protein, 11 aa, Homo sapiens
  misc_feature: Table A; Target 40731; HLA-A*68:02; MAGEA8; ENSG00000156009; TAA
ETSYVKVLEHV

SEQ ID NO: 40732 - protein, 9 aa, Homo sapiens
  misc_feature: Table A; Target 40732; HLA-B*38:01; MAGEA8; ENSG00000156009; TAA
EVDPAGHSY

SEQ ID NO: 40733 - protein, 9 aa, Homo sapiens
  misc_feature: Table A; Target 40733; HLA-B*46:01; MAGEA8; ENSG00000156009; TAA
EVDPAGHSY

SEQ ID NO: 40734 - protein, 9 aa, Homo sapiens
  misc_feature: Table A; Target 40734; HLA-B*55:01; MAGEA8; ENSG00000156009; TAA
EVDPAGHSY

SEQ ID NO: 40735 - protein, 9 aa, Homo sapiens
  misc_feature: Table A; Target 40735; HLA-C*02:02; MAGEA8; ENSG00000156009; TAA
EVDPAGHSY

SEQ ID NO: 40736 - protein, 10 aa, Homo sapiens
  misc_feature: Table A; Target 40736; HLA-A*26:01; MAGEA8; ENSG00000156009; TAA
EVDPAGHSYI

SEQ ID NO: 40737 - protein, 11 aa, Homo sapiens
  misc_feature: Table A; Target 40737; HLA-B*35:03; MAGEA8; ENSG00000156009; TAA
EVDPAGHSYIL

SEQ ID NO: 40738 - protein, 8 aa, Homo sapiens
  misc_feature: Table A; Target 40738; HLA-B*54:01; MAGEA8; ENSG00000156009; TAA
FPDIFSKA

SEQ ID NO: 40739 - protein, 8 aa, Homo sapiens
  misc_feature: Table A; Target 40739; HLA-B*55:01; MAGEA8; ENSG00000156009; TAA
FPDIFSKA

SEQ ID NO: 40740 - protein, 8 aa, Homo sapiens
  misc_feature: Table A; Target 40740; HLA-B*56:01; MAGEA8; ENSG00000156009; TAA
FPDIFSKA

SEQ ID NO: 40741 - protein, 8 aa, Homo sapiens
  misc_feature: Table A; Target 40741; HLA-A*11:01; MAGEA8; ENSG00000156009; TAA
GDDQSTPK

SEQ ID NO: 40742 - protein, 11 aa, Homo sapiens
  misc_feature: Table A; Target 40742; HLA-B*40:01; MAGEA8; ENSG00000156009; TAA
GDDQSTPKTGL

SEQ ID NO: 40743 - protein, 9 aa, Homo sapiens
  misc_feature: Table A; Target 40743; HLA-A*30:01; MAGEA8; ENSG00000156009; TAA
GEAPGLMDV

SEQ ID NO: 40744 - protein, 9 aa, Homo sapiens
  misc_feature: Table A; Target 40744; HLA-B*13:02; MAGEA8; ENSG00000156009; TAA
GEAPGLMDV

SEQ ID NO: 40745 - protein, 9 aa, Homo sapiens
  misc_feature: Table A; Target 40745; HLA-B*18:01; MAGEA8; ENSG00000156009; TAA
GEAPGLMDV

SEQ ID NO: 40746 - protein, 9 aa, Homo sapiens
  misc_feature: Table A; Target 40746; HLA-B*37:01; MAGEA8; ENSG00000156009; TAA
GEAPGLMDV

SEQ ID NO: 40747 - protein, 9 aa, Homo sapiens
  misc_feature: Table A; Target 40747; HLA-B*40:01; MAGEA8; ENSG00000156009; TAA
GEAPGLMDV

SEQ ID NO: 40748 - protein, 9 aa, Homo sapiens
  misc_feature: Table A; Target 40748; HLA-B*40:02; MAGEA8; ENSG00000156009; TAA
GEAPGLMDV

SEQ ID NO: 40749 - protein, 9 aa, Homo sapiens
  misc_feature: Table A; Target 40749; HLA-B*44:03; MAGEA8; ENSG00000156009; TAA
GEAPGLMDV

SEQ ID NO: 40750 - protein, 9 aa, Homo sapiens
  misc_feature: Table A; Target 40750; HLA-B*49:01; MAGEA8; ENSG00000156009; TAA
GEAPGLMDV

SEQ ID NO: 40751 - protein, 9 aa, Homo sapiens
  misc_feature: Table A; Target 40751; HLA-C*02:02; MAGEA8; ENSG00000156009; TAA
GEAPGLMDV

SEQ ID NO: 40752 - protein, 9 aa, Homo sapiens
  misc_feature: Table A; Target 40752; HLA-C*16:04; MAGEA8; ENSG00000156009; TAA
GEAPGLMDV

SEQ ID NO: 40753 - protein, 11 aa, Homo sapiens
  misc_feature: Table A; Target 40753; HLA-A*30:01; MAGEA8; ENSG00000156009; TAA
GEAPGLMDVQI

SEQ ID NO: 40754 - protein, 11 aa, Homo sapiens
  misc_feature: Table A; Target 40754; HLA-B*40:01; MAGEA8; ENSG00000156009; TAA
GEAPGLMDVQI

SEQ ID NO: 40755 - protein, 11 aa, Homo sapiens
  misc_feature: Table A; Target 40755; HLA-B*44:02; MAGEA8; ENSG00000156009; TAA
GEAPGLMDVQI

SEQ ID NO: 40756 - protein, 11 aa, Homo sapiens
  misc_feature: Table A; Target 40756; HLA-B*44:03; MAGEA8; ENSG00000156009; TAA
GEAPGLMDVQI

SEQ ID NO: 40757 - protein, 11 aa, Homo sapiens
  misc_feature: Table A; Target 40757; HLA-B*49:01; MAGEA8; ENSG00000156009; TAA
GEAPGLMDVQI

SEQ ID NO: 40758 - protein, 11 aa, Homo sapiens
  misc_feature: Table A; Target 40758; HLA-A*03:01; MAGEA8; ENSG00000156009; TAA
GLLGDDQSTPK

SEQ ID NO: 40759 - protein, 11 aa, Homo sapiens
  misc_feature: Table A; Target 40759; HLA-A*03:02; MAGEA8; ENSG00000156009; TAA
GLLGDDQSTPK

SEQ ID NO: 40760 - protein, 11 aa, Homo sapiens
  misc_feature: Table A; Target 40760; HLA-A*11:01; MAGEA8; ENSG00000156009; TAA
GLLGDDQSTPK

SEQ ID NO: 40761 - protein, 11 aa, Homo sapiens
  misc_feature: Table A; Target 40761; HLA-B*27:02; MAGEA8; ENSG00000156009; TAA
GLLGDDQSTPK

SEQ ID NO: 40762 - protein, 11 aa, Homo sapiens
  misc_feature: Table A; Target 40762; HLA-B*27:05; MAGEA8; ENSG00000156009; TAA
GLLGDDQSTPK

SEQ ID NO: 40763 - protein, 9 aa, Homo sapiens
  misc_feature: Table A; Target 40763; HLA-A*02:01; MAGEA8; ENSG00000156009; TAA
GLMDVQIPT

SEQ ID NO: 40764 - protein, 10 aa, Homo sapiens
  misc_feature: Table A; Target 40764; HLA-A*02:01; MAGEA8; ENSG00000156009; TAA
GLMDVQIPTA

SEQ ID NO: 40765 - protein, 10 aa, Homo sapiens
  misc_feature: Table A; Target 40765; HLA-A*02:03; MAGEA8; ENSG00000156009; TAA
GLMDVQIPTA

SEQ ID NO: 40766 - protein, 10 aa, Homo sapiens
  misc_feature: Table A; Target 40766; HLA-A*02:04; MAGEA8; ENSG00000156009; TAA
GLMDVQIPTA

SEQ ID NO: 40767 - protein, 10 aa, Homo sapiens
  misc_feature: Table A; Target 40767; HLA-A*02:07; MAGEA8; ENSG00000156009; TAA
GLMDVQIPTA

SEQ ID NO: 40768 - protein, 10 aa, Homo sapiens
  misc_feature: Table A; Target 40768; HLA-B*55:01; MAGEA8; ENSG00000156009; TAA
GLMDVQIPTA

SEQ ID NO: 40769 - protein, 10 aa, Homo sapiens
  misc_feature: Table A; Target 40769; HLA-B*56:01; MAGEA8; ENSG00000156009; TAA
GLMDVQIPTA

SEQ ID NO: 40770 - protein, 11 aa, Homo sapiens
  misc_feature: Table A; Target 40770; HLA-A*02:01; MAGEA8; ENSG00000156009; TAA
GLQAQGEAPGL

SEQ ID NO: 40771 - protein, 11 aa, Homo sapiens
  misc_feature: Table A; Target 40771; HLA-A*02:04; MAGEA8; ENSG00000156009; TAA
GLQAQGEAPGL

SEQ ID NO: 40772 - protein, 11 aa, Homo sapiens
  misc_feature: Table A; Target 40772; HLA-B*27:05; MAGEA8; ENSG00000156009; TAA
GLQAQGEAPGL

SEQ ID NO: 40773 - protein, 10 aa, Homo sapiens
  misc_feature: Table A; Target 40773; HLA-A*02:03; MAGEA8; ENSG00000156009; TAA
GLYDGREHSV

SEQ ID NO: 40774 - protein, 10 aa, Homo sapiens
  misc_feature: Table A; Target 40774; HLA-A*02:04; MAGEA8; ENSG00000156009; TAA
GLYDGREHSV

SEQ ID NO: 40775 - protein, 10 aa, Homo sapiens
  misc_feature: Table A; Target 40775; HLA-A*02:07; MAGEA8; ENSG00000156009; TAA
GLYDGREHSV

SEQ ID NO: 40776 - protein, 10 aa, Homo sapiens
  misc_feature: Table A; Target 40776; HLA-A*03:01; MAGEA8; ENSG00000156009; TAA
GLYDGREHSV

SEQ ID NO: 40777 - protein, 10 aa, Homo sapiens
  misc_feature: Table A; Target 40777; HLA-A*30:01; MAGEA8; ENSG00000156009; TAA
GLYDGREHSV

SEQ ID NO: 40778 - protein, 10 aa, Homo sapiens
  misc_feature: Table A; Target 40778; HLA-A*32:01; MAGEA8; ENSG00000156009; TAA
GLYDGREHSV

SEQ ID NO: 40779 - protein, 10 aa, Homo sapiens
  misc_feature: Table A; Target 40779; HLA-B*08:01; MAGEA8; ENSG00000156009; TAA
GLYDGREHSV

SEQ ID NO: 40780 - protein, 10 aa, Homo sapiens
  misc_feature: Table A; Target 40780; HLA-B*13:02; MAGEA8; ENSG00000156009; TAA
GLYDGREHSV

SEQ ID NO: 40781 - protein, 10 aa, Homo sapiens
  misc_feature: Table A; Target 40781; HLA-B*15:01; MAGEA8; ENSG00000156009; TAA
GLYDGREHSV

SEQ ID NO: 40782 - protein, 10 aa, Homo sapiens
  misc_feature: Table A; Target 40782; HLA-B*37:01; MAGEA8; ENSG00000156009; TAA
GLYDGREHSV

SEQ ID NO: 40783 - protein, 10 aa, Homo sapiens
  misc_feature: Table A; Target 40783; HLA-B*46:01; MAGEA8; ENSG00000156009; TAA
GLYDGREHSV

SEQ ID NO: 40784 - protein, 10 aa, Homo sapiens
  misc_feature: Table A; Target 40784; HLA-B*55:01; MAGEA8; ENSG00000156009; TAA
GLYDGREHSV

SEQ ID NO: 40785 - protein, 10 aa, Homo sapiens
  misc_feature: Table A; Target 40785; HLA-C*01:02; MAGEA8; ENSG00000156009; TAA
GLYDGREHSV

SEQ ID NO: 40786 - protein, 10 aa, Homo sapiens
  misc_feature: Table A; Target 40786; HLA-C*02:02; MAGEA8; ENSG00000156009; TAA
GLYDGREHSV

SEQ ID NO: 40787 - protein, 10 aa, Homo sapiens
  misc_feature: Table A; Target 40787; HLA-C*06:02; MAGEA8; ENSG00000156009; TAA
GLYDGREHSV

SEQ ID NO: 40788 - protein, 10 aa, Homo sapiens
  misc_feature: Table A; Target 40788; HLA-C*12:03; MAGEA8; ENSG00000156009; TAA
GLYDGREHSV

SEQ ID NO: 40789 - protein, 10 aa, Homo sapiens
  misc_feature: Table A; Target 40789; HLA-C*16:02; MAGEA8; ENSG00000156009; TAA
GLYDGREHSV

SEQ ID NO: 40790 - protein, 10 aa, Homo sapiens
  misc_feature: Table A; Target 40790; HLA-C*16:04; MAGEA8; ENSG00000156009; TAA
GLYDGREHSV

SEQ ID NO: 40791 - protein, 11 aa, Homo sapiens
  misc_feature: Table A; Target 40791; HLA-A*01:01; MAGEA8; ENSG00000156009; TAA
GLYDGREHSVY

SEQ ID NO: 40792 - protein, 11 aa, Homo sapiens
  misc_feature: Table A; Target 40792; HLA-A*03:01; MAGEA8; ENSG00000156009; TAA
GLYDGREHSVY

SEQ ID NO: 40793 - protein, 11 aa, Homo sapiens
  misc_feature: Table A; Target 40793; HLA-A*26:01; MAGEA8; ENSG00000156009; TAA
GLYDGREHSVY

SEQ ID NO: 40794 - protein, 11 aa, Homo sapiens
  misc_feature: Table A; Target 40794; HLA-A*29:02; MAGEA8; ENSG00000156009; TAA
GLYDGREHSVY

SEQ ID NO: 40795 - protein, 11 aa, Homo sapiens
  misc_feature: Table A; Target 40795; HLA-A*30:02; MAGEA8; ENSG00000156009; TAA
GLYDGREHSVY

SEQ ID NO: 40796 - protein, 11 aa, Homo sapiens
  misc_feature: Table A; Target 40796; HLA-A*32:01; MAGEA8; ENSG00000156009; TAA
GLYDGREHSVY

SEQ ID NO: 40797 - protein, 11 aa, Homo sapiens
  misc_feature: Table A; Target 40797; HLA-B*15:01; MAGEA8; ENSG00000156009; TAA
GLYDGREHSVY

SEQ ID NO: 40798 - protein, 11 aa, Homo sapiens
  misc_feature: Table A; Target 40798; HLA-B*15:03; MAGEA8; ENSG00000156009; TAA
GLYDGREHSVY

SEQ ID NO: 40799 - protein, 11 aa, Homo sapiens
  misc_feature: Table A; Target 40799; HLA-B*46:01; MAGEA8; ENSG00000156009; TAA
GLYDGREHSVY

SEQ ID NO: 40800 - protein, 11 aa, Homo sapiens
  misc_feature: Table A; Target 40800; HLA-C*02:02; MAGEA8; ENSG00000156009; TAA
GLYDGREHSVY

SEQ ID NO: 40801 - protein, 11 aa, Homo sapiens
  misc_feature: Table A; Target 40801; HLA-C*07:04; MAGEA8; ENSG00000156009; TAA
GLYDGREHSVY

SEQ ID NO: 40802 - protein, 11 aa, Homo sapiens
  misc_feature: Table A; Target 40802; HLA-C*12:03; MAGEA8; ENSG00000156009; TAA
GLYDGREHSVY

SEQ ID NO: 40803 - protein, 11 aa, Homo sapiens
  misc_feature: Table A; Target 40803; HLA-C*16:04; MAGEA8; ENSG00000156009; TAA
GLYDGREHSVY

SEQ ID NO: 40804 - protein, 9 aa, Homo sapiens
  misc_feature: Table A; Target 40804; HLA-A*01:01; MAGEA8; ENSG00000156009; TAA
GSDPVRYEF

SEQ ID NO: 40805 - protein, 9 aa, Homo sapiens
  misc_feature: Table A; Target 40805; HLA-A*02:07; MAGEA8; ENSG00000156009; TAA
GSDPVRYEF

SEQ ID NO: 40806 - protein, 9 aa, Homo sapiens
  misc_feature: Table A; Target 40806; HLA-A*23:01; MAGEA8; ENSG00000156009; TAA
GSDPVRYEF

SEQ ID NO: 40807 - protein, 9 aa, Homo sapiens
  misc_feature: Table A; Target 40807; HLA-A*24:02; MAGEA8; ENSG00000156009; TAA
GSDPVRYEF

SEQ ID NO: 40808 - protein, 9 aa, Homo sapiens
  misc_feature: Table A; Target 40808; HLA-A*29:02; MAGEA8; ENSG00000156009; TAA
GSDPVRYEF

SEQ ID NO: 40809 - protein, 9 aa, Homo sapiens
  misc_feature: Table A; Target 40809; HLA-A*30:02; MAGEA8; ENSG00000156009; TAA
GSDPVRYEF

SEQ ID NO: 40810 - protein, 9 aa, Homo sapiens
  misc_feature: Table A; Target 40810; HLA-A*31:01; MAGEA8; ENSG00000156009; TAA
GSDPVRYEF

SEQ ID NO: 40811 - protein, 9 aa, Homo sapiens
  misc_feature: Table A; Target 40811; HLA-A*32:01; MAGEA8; ENSG00000156009; TAA
GSDPVRYEF

SEQ ID NO: 40812 - protein, 9 aa, Homo sapiens
  misc_feature: Table A; Target 40812; HLA-B*15:01; MAGEA8; ENSG00000156009; TAA
GSDPVRYEF

SEQ ID NO: 40813 - protein, 9 aa, Homo sapiens
  misc_feature: Table A; Target 40813; HLA-B*35:01; MAGEA8; ENSG00000156009; TAA
GSDPVRYEF

SEQ ID NO: 40814 - protein, 9 aa, Homo sapiens
  misc_feature: Table A; Target 40814; HLA-B*38:01; MAGEA8; ENSG00000156009; TAA
GSDPVRYEF

SEQ ID NO: 40815 - protein, 9 aa, Homo sapiens
  misc_feature: Table A; Target 40815; HLA-B*44:03; MAGEA8; ENSG00000156009; TAA
GSDPVRYEF

SEQ ID NO: 40816 - protein, 9 aa, Homo sapiens
  misc_feature: Table A; Target 40816; HLA-B*57:01; MAGEA8; ENSG00000156009; TAA
GSDPVRYEF

SEQ ID NO: 40817 - protein, 9 aa, Homo sapiens
  misc_feature: Table A; Target 40817; HLA-B*58:01; MAGEA8; ENSG00000156009; TAA
GSDPVRYEF

SEQ ID NO: 40818 - protein, 9 aa, Homo sapiens
  misc_feature: Table A; Target 40818; HLA-C*02:02; MAGEA8; ENSG00000156009; TAA
GSDPVRYEF

SEQ ID NO: 40819 - protein, 9 aa, Homo sapiens
  misc_feature: Table A; Target 40819; HLA-C*03:03; MAGEA8; ENSG00000156009; TAA
GSDPVRYEF

SEQ ID NO: 40820 - protein, 9 aa, Homo sapiens
  misc_feature: Table A; Target 40820; HLA-C*03:04; MAGEA8; ENSG00000156009; TAA
GSDPVRYEF

SEQ ID NO: 40821 - protein, 9 aa, Homo sapiens
  misc_feature: Table A; Target 40821; HLA-C*04:01; MAGEA8; ENSG00000156009; TAA
GSDPVRYEF

SEQ ID NO: 40822 - protein, 9 aa, Homo sapiens
  misc_feature: Table A; Target 40822; HLA-C*05:01; MAGEA8; ENSG00000156009; TAA
GSDPVRYEF

SEQ ID NO: 40823 - protein, 9 aa, Homo sapiens
  misc_feature: Table A; Target 40823; HLA-C*16:01; MAGEA8; ENSG00000156009; TAA
GSDPVRYEF

SEQ ID NO: 40824 - protein, 9 aa, Homo sapiens
  misc_feature: Table A; Target 40824; HLA-C*16:02; MAGEA8; ENSG00000156009; TAA
GSDPVRYEF

SEQ ID NO: 40825 - protein, 9 aa, Homo sapiens
  misc_feature: Table A; Target 40825; HLA-C*16:04; MAGEA8; ENSG00000156009; TAA
GSDPVRYEF

SEQ ID NO: 40826 - protein, 10 aa, Homo sapiens
  misc_feature: Table A; Target 40826; HLA-B*57:01; MAGEA8; ENSG00000156009; TAA
GSRAPEEAIW

SEQ ID NO: 40827 - protein, 11 aa, Homo sapiens
  misc_feature: Table A; Target 40827; HLA-A*30:01; MAGEA8; ENSG00000156009; TAA
HEEALGEEKGV

SEQ ID NO: 40828 - protein, 11 aa, Homo sapiens
  misc_feature: Table A; Target 40828; HLA-B*40:02; MAGEA8; ENSG00000156009; TAA
HEEALGEEKGV

SEQ ID NO: 40829 - protein, 11 aa, Homo sapiens
  misc_feature: Table A; Target 40829; HLA-B*44:03; MAGEA8; ENSG00000156009; TAA
HEEALGEEKGV

SEQ ID NO: 40830 - protein, 11 aa, Homo sapiens
  misc_feature: Table A; Target 40830; HLA-B*49:01; MAGEA8; ENSG00000156009; TAA
HEEALGEEKGV

SEQ ID NO: 40831 - protein, 9 aa, Homo sapiens
  misc_feature: Table A; Target 40831; HLA-A*02:07; MAGEA8; ENSG00000156009; TAA
HFPDIFSKA

SEQ ID NO: 40832 - protein, 9 aa, Homo sapiens
  misc_feature: Table A; Target 40832; HLA-A*24:02; MAGEA8; ENSG00000156009; TAA
HFPDIFSKA

SEQ ID NO: 40833 - protein, 9 aa, Homo sapiens
  misc_feature: Table A; Target 40833; HLA-A*29:02; MAGEA8; ENSG00000156009; TAA
HFPDIFSKA

SEQ ID NO: 40834 - protein, 9 aa, Homo sapiens
  misc_feature: Table A; Target 40834; HLA-A*68:02; MAGEA8; ENSG00000156009; TAA
HFPDIFSKA

SEQ ID NO: 40835 - protein, 9 aa, Homo sapiens
  misc_feature: Table A; Target 40835; HLA-B*54:01; MAGEA8; ENSG00000156009; TAA
HFPDIFSKA

SEQ ID NO: 40836 - protein, 9 aa, Homo sapiens
  misc_feature: Table A; Target 40836; HLA-B*40:02; MAGEA8; ENSG00000156009; TAA
HSYILVTCL

SEQ ID NO: 40837 - protein, 9 aa, Homo sapiens
  misc_feature: Table A; Target 40837; HLA-A*68:02; MAGEA8; ENSG00000156009; TAA
HVVRVNARV

SEQ ID NO: 40838 - protein, 8 aa, Homo sapiens
  misc_feature: Table A; Target 40838; HLA-C*03:03; MAGEA8; ENSG00000156009; TAA
IIVLGMIL

SEQ ID NO: 40839 - protein, 8 aa, Homo sapiens
  misc_feature: Table A; Target 40839; HLA-C*03:04; MAGEA8; ENSG00000156009; TAA
IIVLGMIL

SEQ ID NO: 40840 - protein, 10 aa, Homo sapiens
  misc_feature: Table A; Target 40840; HLA-A*29:02; MAGEA8; ENSG00000156009; TAA
ILVTCLGLSY

SEQ ID NO: 40841 - protein, 8 aa, Homo sapiens
  misc_feature: Table A; Target 40841; HLA-A*02:01; MAGEA8; ENSG00000156009; TAA
IMGTLEEV

SEQ ID NO: 40842 - protein, 8 aa, Homo sapiens
  misc_feature: Table A; Target 40842; HLA-A*02:03; MAGEA8; ENSG00000156009; TAA
IMGTLEEV

SEQ ID NO: 40843 - protein, 8 aa, Homo sapiens
  misc_feature: Table A; Target 40843; HLA-B*46:01; MAGEA8; ENSG00000156009; TAA
IMGTLEEV

SEQ ID NO: 40844 - protein, 8 aa, Homo sapiens
  misc_feature: Table A; Target 40844; HLA-B*55:01; MAGEA8; ENSG00000156009; TAA
IMGTLEEV

SEQ ID NO: 40845 - protein, 9 aa, Homo sapiens
  misc_feature: Table A; Target 40845; HLA-B*35:03; MAGEA8; ENSG00000156009; TAA
IPTAEEQKA

SEQ ID NO: 40846 - protein, 9 aa, Homo sapiens
  misc_feature: Table A; Target 40846; HLA-B*54:01; MAGEA8; ENSG00000156009; TAA
IPTAEEQKA

SEQ ID NO: 40847 - protein, 9 aa, Homo sapiens
  misc_feature: Table A; Target 40847; HLA-B*55:01; MAGEA8; ENSG00000156009; TAA
IPTAEEQKA

SEQ ID NO: 40848 - protein, 9 aa, Homo sapiens
  misc_feature: Table A; Target 40848; HLA-B*56:01; MAGEA8; ENSG00000156009; TAA
IPTAEEQKA

SEQ ID NO: 40849 - protein, 10 aa, Homo sapiens
  misc_feature: Table A; Target 40849; HLA-B*54:01; MAGEA8; ENSG00000156009; TAA
IPTAEEQKAA

SEQ ID NO: 40850 - protein, 10 aa, Homo sapiens
  misc_feature: Table A; Target 40850; HLA-B*55:01; MAGEA8; ENSG00000156009; TAA
IPTAEEQKAA

SEQ ID NO: 40851 - protein, 10 aa, Homo sapiens
  misc_feature: Table A; Target 40851; HLA-B*56:01; MAGEA8; ENSG00000156009; TAA
IPTAEEQKAA

SEQ ID NO: 40852 - protein, 11 aa, Homo sapiens
  misc_feature: Table A; Target 40852; HLA-B*27:05; MAGEA8; ENSG00000156009; TAA
ISYPSLHEEAL

SEQ ID NO: 40853 - protein, 11 aa, Homo sapiens
  misc_feature: Table A; Target 40853; HLA-B*46:01; MAGEA8; ENSG00000156009; TAA
ISYPSLHEEAL

SEQ ID NO: 40854 - protein, 11 aa, Homo sapiens
  misc_feature: Table A; Target 40854; HLA-B*57:01; MAGEA8; ENSG00000156009; TAA
ISYPSLHEEAL

SEQ ID NO: 40855 - protein, 11 aa, Homo sapiens
  misc_feature: Table A; Target 40855; HLA-B*58:01; MAGEA8; ENSG00000156009; TAA
ISYPSLHEEAL

SEQ ID NO: 40856 - protein, 11 aa, Homo sapiens
  misc_feature: Table A; Target 40856; HLA-C*03:04; MAGEA8; ENSG00000156009; TAA
ISYPSLHEEAL

SEQ ID NO: 40857 - protein, 11 aa, Homo sapiens
  misc_feature: Table A; Target 40857; HLA-A*29:02; MAGEA8; ENSG00000156009; TAA
IWEALSVMGLY

SEQ ID NO: 40858 - protein, 9 aa, Homo sapiens
  misc_feature: Table A; Target 40858; HLA-A*32:01; MAGEA8; ENSG00000156009; TAA
KAASSSSTL

SEQ ID NO: 40859 - protein, 9 aa, Homo sapiens
  misc_feature: Table A; Target 40859; HLA-B*07:02; MAGEA8; ENSG00000156009; TAA
KAASSSSTL

SEQ ID NO: 40860 - protein, 9 aa, Homo sapiens
  misc_feature: Table A; Target 40860; HLA-B*15:01; MAGEA8; ENSG00000156009; TAA
KAASSSSTL

SEQ ID NO: 40861 - protein, 9 aa, Homo sapiens
  misc_feature: Table A; Target 40861; HLA-B*15:03; MAGEA8; ENSG00000156009; TAA
KAASSSSTL

SEQ ID NO: 40862 - protein, 9 aa, Homo sapiens
  misc_feature: Table A; Target 40862; HLA-B*35:03; MAGEA8; ENSG00000156009; TAA
KAASSSSTL

SEQ ID NO: 40863 - protein, 9 aa, Homo sapiens
  misc_feature: Table A; Target 40863; HLA-B*40:01; MAGEA8; ENSG00000156009; TAA
KAASSSSTL

SEQ ID NO: 40864 - protein, 9 aa, Homo sapiens
  misc_feature: Table A; Target 40864; HLA-B*40:02; MAGEA8; ENSG00000156009; TAA
KAASSSSTL

SEQ ID NO: 40865 - protein, 9 aa, Homo sapiens
  misc_feature: Table A; Target 40865; HLA-B*46:01; MAGEA8; ENSG00000156009; TAA
KAASSSSTL

SEQ ID NO: 40866 - protein, 9 aa, Homo sapiens
  misc_feature: Table A; Target 40866; HLA-B*58:01; MAGEA8; ENSG00000156009; TAA
KAASSSSTL

SEQ ID NO: 40867 - protein, 9 aa, Homo sapiens
  misc_feature: Table A; Target 40867; HLA-C*01:02; MAGEA8; ENSG00000156009; TAA
KAASSSSTL

SEQ ID NO: 40868 - protein, 9 aa, Homo sapiens
  misc_feature: Table A; Target 40868; HLA-C*02:02; MAGEA8; ENSG00000156009; TAA
KAASSSSTL

SEQ ID NO: 40869 - protein, 9 aa, Homo sapiens
  misc_feature: Table A; Target 40869; HLA-C*03:03; MAGEA8; ENSG00000156009; TAA
KAASSSSTL

SEQ ID NO: 40870 - protein, 9 aa, Homo sapiens
  misc_feature: Table A; Target 40870; HLA-C*03:04; MAGEA8; ENSG00000156009; TAA
KAASSSSTL

SEQ ID NO: 40871 - protein, 9 aa, Homo sapiens
  misc_feature: Table A; Target 40871; HLA-C*05:01; MAGEA8; ENSG00000156009; TAA
KAASSSSTL

SEQ ID NO: 40872 - protein, 9 aa, Homo sapiens
  misc_feature: Table A; Target 40872; HLA-C*07:02; MAGEA8; ENSG00000156009; TAA
KAASSSSTL

SEQ ID NO: 40873 - protein, 9 aa, Homo sapiens
  misc_feature: Table A; Target 40873; HLA-C*12:03; MAGEA8; ENSG00000156009; TAA
KAASSSSTL

SEQ ID NO: 40874 - protein, 9 aa, Homo sapiens
  misc_feature: Table A; Target 40874; HLA-C*14:02; MAGEA8; ENSG00000156009; TAA
KAASSSSTL

SEQ ID NO: 40875 - protein, 9 aa, Homo sapiens
  misc_feature: Table A; Target 40875; HLA-C*16:01; MAGEA8; ENSG00000156009; TAA
KAASSSSTL

SEQ ID NO: 40876 - protein, 9 aa, Homo sapiens
  misc_feature: Table A; Target 40876; HLA-C*16:02; MAGEA8; ENSG00000156009; TAA
KAASSSSTL

SEQ ID NO: 40877 - protein, 9 aa, Homo sapiens
  misc_feature: Table A; Target 40877; HLA-C*16:04; MAGEA8; ENSG00000156009; TAA
KAASSSSTL

SEQ ID NO: 40878 - protein, 10 aa, Homo sapiens
  misc_feature: Table A; Target 40878; HLA-B*07:02; MAGEA8; ENSG00000156009; TAA
KAASSSSTLI

SEQ ID NO: 40879 - protein, 10 aa, Homo sapiens
  misc_feature: Table A; Target 40879; HLA-B*58:01; MAGEA8; ENSG00000156009; TAA
KAASSSSTLI

SEQ ID NO: 40880 - protein, 11 aa, Homo sapiens
  misc_feature: Table A; Target 40880; HLA-C*03:04; MAGEA8; ENSG00000156009; TAA
KAASSSSTLIM

SEQ ID NO: 40881 - protein, 8 aa, Homo sapiens
  misc_feature: Table A; Target 40881; HLA-C*05:01; MAGEA8; ENSG00000156009; TAA
KAEEGLQA

SEQ ID NO: 40882 - protein, 9 aa, Homo sapiens
  misc_feature: Table A; Target 40882; HLA-B*58:01; MAGEA8; ENSG00000156009; TAA
KASECMQVI

SEQ ID NO: 40883 - protein, 9 aa, Homo sapiens
  misc_feature: Table A; Target 40883; HLA-C*12:03; MAGEA8; ENSG00000156009; TAA
KASECMQVI

SEQ ID NO: 40884 - protein, 9 aa, Homo sapiens
  misc_feature: Table A; Target 40884; HLA-C*16:02; MAGEA8; ENSG00000156009; TAA
KASECMQVI

SEQ ID NO: 40885 - protein, 9 aa, Homo sapiens
  misc_feature: Table A; Target 40885; HLA-B*40:02; MAGEA8; ENSG00000156009; TAA
KEPVTKAEM

SEQ ID NO: 40886 - protein, 9 aa, Homo sapiens
  misc_feature: Table A; Target 40886; HLA-B*44:03; MAGEA8; ENSG00000156009; TAA
KEPVTKAEM

SEQ ID NO: 40887 - protein, 9 aa, Homo sapiens
  misc_feature: Table A; Target 40887; HLA-C*01:02; MAGEA8; ENSG00000156009; TAA
KEPVTKAEM

SEQ ID NO: 40888 - protein, 10 aa, Homo sapiens
  misc_feature: Table A; Target 40888; HLA-B*40:02; MAGEA8; ENSG00000156009; TAA
KEPVTKAEML

SEQ ID NO: 40889 - protein, 10 aa, Homo sapiens
  misc_feature: Table A; Target 40889; HLA-A*26:01; MAGEA8; ENSG00000156009; TAA
KEVDPAGHSY

SEQ ID NO: 40890 - protein, 10 aa, Homo sapiens
  misc_feature: Table A; Target 40890; HLA-B*39:01; MAGEA8; ENSG00000156009; TAA
KEVDPAGHSY

SEQ ID NO: 40891 - protein, 10 aa, Homo sapiens
  misc_feature: Table A; Target 40891; HLA-B*40:02; MAGEA8; ENSG00000156009; TAA
KEVDPAGHSY

SEQ ID NO: 40892 - protein, 10 aa, Homo sapiens
  misc_feature: Table A; Target 40892; HLA-B*49:01; MAGEA8; ENSG00000156009; TAA
KEVDPAGHSY

SEQ ID NO: 40893 - protein, 10 aa, Homo sapiens
  misc_feature: Table A; Target 40893; HLA-B*57:01; MAGEA8; ENSG00000156009; TAA
KEVDPAGHSY

SEQ ID NO: 40894 - protein, 10 aa, Homo sapiens
  misc_feature: Table A; Target 40894; HLA-B*58:01; MAGEA8; ENSG00000156009; TAA
KEVDPAGHSY

SEQ ID NO: 40895 - protein, 10 aa, Homo sapiens
  misc_feature: Table A; Target 40895; HLA-C*14:02; MAGEA8; ENSG00000156009; TAA
KEVDPAGHSY

SEQ ID NO: 40896 - protein, 10 aa, Homo sapiens
  misc_feature: Table A; Target 40896; HLA-B*57:01; MAGEA8; ENSG00000156009; TAA
KLRKLLTQEW

SEQ ID NO: 40897 - protein, 8 aa, Homo sapiens
  misc_feature: Table A; Target 40897; HLA-B*57:01; MAGEA8; ENSG00000156009; TAA
KVAELVRF

SEQ ID NO: 40898 - protein, 9 aa, Homo sapiens
  misc_feature: Table A; Target 40898; HLA-A*02:03; MAGEA8; ENSG00000156009; TAA
KVAELVRFL

SEQ ID NO: 40899 - protein, 9 aa, Homo sapiens
  misc_feature: Table A; Target 40899; HLA-A*02:04; MAGEA8; ENSG00000156009; TAA
KVAELVRFL

SEQ ID NO: 40900 - protein, 9 aa, Homo sapiens
  misc_feature: Table A; Target 40900; HLA-A*02:07; MAGEA8; ENSG00000156009; TAA
KVAELVRFL

SEQ ID NO: 40901 - protein, 9 aa, Homo sapiens
  misc_feature: Table A; Target 40901; HLA-A*03:01; MAGEA8; ENSG00000156009; TAA
KVAELVRFL

SEQ ID NO: 40902 - protein, 9 aa, Homo sapiens
  misc_feature: Table A; Target 40902; HLA-A*31:01; MAGEA8; ENSG00000156009; TAA
KVAELVRFL

SEQ ID NO: 40903 - protein, 9 aa, Homo sapiens
  misc_feature: Table A; Target 40903; HLA-A*32:01; MAGEA8; ENSG00000156009; TAA
KVAELVRFL

SEQ ID NO: 40904 - protein, 9 aa, Homo sapiens
  misc_feature: Table A; Target 40904; HLA-A*68:02; MAGEA8; ENSG00000156009; TAA
KVAELVRFL

SEQ ID NO: 40905 - protein, 9 aa, Homo sapiens
  misc_feature: Table A; Target 40905; HLA-B*27:05; MAGEA8; ENSG00000156009; TAA
KVAELVRFL

SEQ ID NO: 40906 - protein, 9 aa, Homo sapiens
  misc_feature: Table A; Target 40906; HLA-B*57:01; MAGEA8; ENSG00000156009; TAA
KVAELVRFL

SEQ ID NO: 40907 - protein, 9 aa, Homo sapiens
  misc_feature: Table A; Target 40907; HLA-C*06:02; MAGEA8; ENSG00000156009; TAA
KVAELVRFL

SEQ ID NO: 40908 - protein, 10 aa, Homo sapiens
  misc_feature: Table A; Target 40908; HLA-A*02:04; MAGEA8; ENSG00000156009; TAA
KVAELVRFLL

SEQ ID NO: 40909 - protein, 10 aa, Homo sapiens
  misc_feature: Table A; Target 40909; HLA-A*02:07; MAGEA8; ENSG00000156009; TAA
KVAELVRFLL

SEQ ID NO: 40910 - protein, 10 aa, Homo sapiens
  misc_feature: Table A; Target 40910; HLA-A*31:01; MAGEA8; ENSG00000156009; TAA
KVAELVRFLL

SEQ ID NO: 40911 - protein, 10 aa, Homo sapiens
  misc_feature: Table A; Target 40911; HLA-B*57:01; MAGEA8; ENSG00000156009; TAA
KVAELVRFLL

SEQ ID NO: 40912 - protein, 11 aa, Homo sapiens
  misc_feature: Table A; Target 40912; HLA-A*31:01; MAGEA8; ENSG00000156009; TAA
KVAELVRFLLR

SEQ ID NO: 40913 - protein, 8 aa, Homo sapiens
  misc_feature: Table A; Target 40913; HLA-A*31:01; MAGEA8; ENSG00000156009; TAA
KVLEHVVR

SEQ ID NO: 40914 - protein, 9 aa, Homo sapiens
  misc_feature: Table A; Target 40914; HLA-A*02:03; MAGEA8; ENSG00000156009; TAA
KVLEHVVRV

SEQ ID NO: 40915 - protein, 9 aa, Homo sapiens
  misc_feature: Table A; Target 40915; HLA-A*02:04; MAGEA8; ENSG00000156009; TAA
KVLEHVVRV

SEQ ID NO: 40916 - protein, 9 aa, Homo sapiens
  misc_feature: Table A; Target 40916; HLA-A*02:07; MAGEA8; ENSG00000156009; TAA
KVLEHVVRV

SEQ ID NO: 40917 - protein, 9 aa, Homo sapiens
  misc_feature: Table A; Target 40917; HLA-A*03:01; MAGEA8; ENSG00000156009; TAA
KVLEHVVRV

SEQ ID NO: 40918 - protein, 9 aa, Homo sapiens
  misc_feature: Table A; Target 40918; HLA-A*03:02; MAGEA8; ENSG00000156009; TAA
KVLEHVVRV

SEQ ID NO: 40919 - protein, 9 aa, Homo sapiens
  misc_feature: Table A; Target 40919; HLA-A*31:01; MAGEA8; ENSG00000156009; TAA
KVLEHVVRV

SEQ ID NO: 40920 - protein, 9 aa, Homo sapiens
  misc_feature: Table A; Target 40920; HLA-A*68:02; MAGEA8; ENSG00000156009; TAA
KVLEHVVRV

SEQ ID NO: 40921 - protein, 9 aa, Homo sapiens
  misc_feature: Table A; Target 40921; HLA-B*13:02; MAGEA8; ENSG00000156009; TAA
KVLEHVVRV

SEQ ID NO: 40922 - protein, 9 aa, Homo sapiens
  misc_feature: Table A; Target 40922; HLA-B*37:01; MAGEA8; ENSG00000156009; TAA
KVLEHVVRV

SEQ ID NO: 40923 - protein, 9 aa, Homo sapiens
  misc_feature: Table A; Target 40923; HLA-B*55:01; MAGEA8; ENSG00000156009; TAA
KVLEHVVRV

SEQ ID NO: 40924 - protein, 9 aa, Homo sapiens
  misc_feature: Table A; Target 40924; HLA-C*02:02; MAGEA8; ENSG00000156009; TAA
KVLEHVVRV

SEQ ID NO: 40925 - protein, 11 aa, Homo sapiens
  misc_feature: Table A; Target 40925; HLA-A*31:01; MAGEA8; ENSG00000156009; TAA
KVLEHVVRVNA

SEQ ID NO: 40926 - protein, 10 aa, Homo sapiens
  misc_feature: Table A; Target 40926; HLA-A*03:02; MAGEA8; ENSG00000156009; TAA
KYQIKEPVTK

SEQ ID NO: 40927 - protein, 10 aa, Homo sapiens
  misc_feature: Table A; Target 40927; HLA-A*31:01; MAGEA8; ENSG00000156009; TAA
KYQIKEPVTK

SEQ ID NO: 40928 - protein, 10 aa, Homo sapiens
  misc_feature: Table A; Target 40928; HLA-C*06:02; MAGEA8; ENSG00000156009; TAA
KYQIKEPVTK

SEQ ID NO: 40929 - protein, 10 aa, Homo sapiens
  misc_feature: Table A; Target 40929; HLA-C*07:02; MAGEA8; ENSG00000156009; TAA
KYQIKEPVTK

SEQ ID NO: 40930 - protein, 8 aa, Homo sapiens
  misc_feature: Table A; Target 40930; HLA-A*30:01; MAGEA8; ENSG00000156009; TAA
LDEKVAEL

SEQ ID NO: 40931 - protein, 8 aa, Homo sapiens
  misc_feature: Table A; Target 40931; HLA-B*18:01; MAGEA8; ENSG00000156009; TAA
LDEKVAEL

SEQ ID NO: 40932 - protein, 8 aa, Homo sapiens
  misc_feature: Table A; Target 40932; HLA-B*40:01; MAGEA8; ENSG00000156009; TAA
LDEKVAEL

SEQ ID NO: 40933 - protein, 8 aa, Homo sapiens
  misc_feature: Table A; Target 40933; HLA-B*40:02; MAGEA8; ENSG00000156009; TAA
LDEKVAEL

SEQ ID NO: 40934 - protein, 8 aa, Homo sapiens
  misc_feature: Table A; Target 40934; HLA-C*07:04; MAGEA8; ENSG00000156009; TAA
LDEKVAEL

SEQ ID NO: 40935 - protein, 9 aa, Homo sapiens
  misc_feature: Table A; Target 40935; HLA-B*40:02; MAGEA8; ENSG00000156009; TAA
LEHVVRVNA

SEQ ID NO: 40936 - protein, 9 aa, Homo sapiens
  misc_feature: Table A; Target 40936; HLA-A*30:01; MAGEA8; ENSG00000156009; TAA
LESLFREAL

SEQ ID NO: 40937 - protein, 9 aa, Homo sapiens
  misc_feature: Table A; Target 40937; HLA-B*18:01; MAGEA8; ENSG00000156009; TAA
LESLFREAL

SEQ ID NO: 40938 - protein, 9 aa, Homo sapiens
  misc_feature: Table A; Target 40938; HLA-B*37:01; MAGEA8; ENSG00000156009; TAA
LESLFREAL

SEQ ID NO: 40939 - protein, 9 aa, Homo sapiens
  misc_feature: Table A; Target 40939; HLA-B*40:01; MAGEA8; ENSG00000156009; TAA
LESLFREAL

SEQ ID NO: 40940 - protein, 8 aa, Homo sapiens
  misc_feature: Table A; Target 40940; HLA-B*15:01; MAGEA8; ENSG00000156009; TAA
LESVIKNY

SEQ ID NO: 40941 - protein, 9 aa, Homo sapiens
  misc_feature: Table A; Target 40941; HLA-A*03:02; MAGEA8; ENSG00000156009; TAA
LGDDQSTPK

SEQ ID NO: 40942 - protein, 9 aa, Homo sapiens
  misc_feature: Table A; Target 40942; HLA-A*11:01; MAGEA8; ENSG00000156009; TAA
LGDDQSTPK

SEQ ID NO: 40943 - protein, 9 aa, Homo sapiens
  misc_feature: Table A; Target 40943; HLA-B*27:02; MAGEA8; ENSG00000156009; TAA
LGDDQSTPK

SEQ ID NO: 40944 - protein, 9 aa, Homo sapiens
  misc_feature: Table A; Target 40944; HLA-C*05:01; MAGEA8; ENSG00000156009; TAA
LGDDQSTPK

SEQ ID NO: 40945 - protein, 9 aa, Homo sapiens
  misc_feature: Table A; Target 40945; HLA-A*02:01; MAGEA8; ENSG00000156009; TAA
LIMGTLEEV

SEQ ID NO: 40946 - protein, 9 aa, Homo sapiens
  misc_feature: Table A; Target 40946; HLA-A*02:03; MAGEA8; ENSG00000156009; TAA
LIMGTLEEV

SEQ ID NO: 40947 - protein, 9 aa, Homo sapiens
  misc_feature: Table A; Target 40947; HLA-A*02:04; MAGEA8; ENSG00000156009; TAA
LIMGTLEEV

SEQ ID NO: 40948 - protein, 9 aa, Homo sapiens
  misc_feature: Table A; Target 40948; HLA-A*02:07; MAGEA8; ENSG00000156009; TAA
LIMGTLEEV

SEQ ID NO: 40949 - protein, 9 aa, Homo sapiens
  misc_feature: Table A; Target 40949; HLA-A*68:02; MAGEA8; ENSG00000156009; TAA
LIMGTLEEV

SEQ ID NO: 40950 - protein, 9 aa, Homo sapiens
  misc_feature: Table A; Target 40950; HLA-B*13:02; MAGEA8; ENSG00000156009; TAA
LIMGTLEEV

SEQ ID NO: 40951 - protein, 9 aa, Homo sapiens
  misc_feature: Table A; Target 40951; HLA-B*46:01; MAGEA8; ENSG00000156009; TAA
LIMGTLEEV

SEQ ID NO: 40952 - protein, 9 aa, Homo sapiens
  misc_feature: Table A; Target 40952; HLA-B*55:01; MAGEA8; ENSG00000156009; TAA
LIMGTLEEV

SEQ ID NO: 40953 - protein, 10 aa, Homo sapiens
  misc_feature: Table A; Target 40953; HLA-A*03:01; MAGEA8; ENSG00000156009; TAA
LLGDDQSTPK

SEQ ID NO: 40954 - protein, 10 aa, Homo sapiens
  misc_feature: Table A; Target 40954; HLA-A*03:02; MAGEA8; ENSG00000156009; TAA
LLGDDQSTPK

SEQ ID NO: 40955 - protein, 10 aa, Homo sapiens
  misc_feature: Table A; Target 40955; HLA-A*11:01; MAGEA8; ENSG00000156009; TAA
LLGDDQSTPK

SEQ ID NO: 40956 - protein, 10 aa, Homo sapiens
  misc_feature: Table A; Target 40956; HLA-B*27:02; MAGEA8; ENSG00000156009; TAA
LLGDDQSTPK

SEQ ID NO: 40957 - protein, 9 aa, Homo sapiens
  misc_feature: Table A; Target 40957; HLA-A*01:01; MAGEA8; ENSG00000156009; TAA
LLGQKSQRY

SEQ ID NO: 40958 - protein, 9 aa, Homo sapiens
  misc_feature: Table A; Target 40958; HLA-A*29:02; MAGEA8; ENSG00000156009; TAA
LLGQKSQRY

SEQ ID NO: 40959 - protein, 10 aa, Homo sapiens
  misc_feature: Table A; Target 40959; HLA-A*03:01; MAGEA8; ENSG00000156009; TAA
LLGQKSQRYK

SEQ ID NO: 40960 - protein, 9 aa, Homo sapiens
  misc_feature: Table A; Target 40960; HLA-A*02:01; MAGEA8; ENSG00000156009; TAA
LMDVQIPTA

SEQ ID NO: 40961 - protein, 10 aa, Homo sapiens
  misc_feature: Table A; Target 40961; HLA-B*27:05; MAGEA8; ENSG00000156009; TAA
LQAQGEAPGL

SEQ ID NO: 40962 - protein, 10 aa, Homo sapiens
  misc_feature: Table A; Target 40962; HLA-B*38:01; MAGEA8; ENSG00000156009; TAA
LQAQGEAPGL

SEQ ID NO: 40963 - protein, 10 aa, Homo sapiens
  misc_feature: Table A; Target 40963; HLA-B*39:01; MAGEA8; ENSG00000156009; TAA
LQAQGEAPGL

SEQ ID NO: 40964 - protein, 10 aa, Homo sapiens
  misc_feature: Table A; Target 40964; HLA-B*27:02; MAGEA8; ENSG00000156009; TAA
LSVMGLYDGR

SEQ ID NO: 40965 - protein, 10 aa, Homo sapiens
  misc_feature: Table A; Target 40965; HLA-A*01:01; MAGEA8; ENSG00000156009; TAA
LTQEWVQENY

SEQ ID NO: 40966 - protein, 10 aa, Homo sapiens
  misc_feature: Table A; Target 40966; HLA-A*29:02; MAGEA8; ENSG00000156009; TAA
LTQEWVQENY

SEQ ID NO: 40967 - protein, 10 aa, Homo sapiens
  misc_feature: Table A; Target 40967; HLA-A*30:02; MAGEA8; ENSG00000156009; TAA
LTQEWVQENY

SEQ ID NO: 40968 - protein, 10 aa, Homo sapiens
  misc_feature: Table A; Target 40968; HLA-B*57:01; MAGEA8; ENSG00000156009; TAA
LTQEWVQENY

SEQ ID NO: 40969 - protein, 10 aa, Homo sapiens
  misc_feature: Table A; Target 40969; HLA-B*58:01; MAGEA8; ENSG00000156009; TAA
LTQEWVQENY

SEQ ID NO: 40970 - protein, 11 aa, Homo sapiens
  misc_feature: Table A; Target 40970; HLA-C*04:01; MAGEA8; ENSG00000156009; TAA
LTQEWVQENYL

SEQ ID NO: 40971 - protein, 8 aa, Homo sapiens
  misc_feature: Table A; Target 40971; HLA-C*03:04; MAGEA8; ENSG00000156009; TAA
LTVTDSTL

SEQ ID NO: 40972 - protein, 9 aa, Homo sapiens
  misc_feature: Table A; Target 40972; HLA-A*25:01; MAGEA8; ENSG00000156009; TAA
LTVTDSTLW

SEQ ID NO: 40973 - protein, 9 aa, Homo sapiens
  misc_feature: Table A; Target 40973; HLA-A*32:01; MAGEA8; ENSG00000156009; TAA
LTVTDSTLW

SEQ ID NO: 40974 - protein, 9 aa, Homo sapiens
  misc_feature: Table A; Target 40974; HLA-B*57:01; MAGEA8; ENSG00000156009; TAA
LTVTDSTLW

SEQ ID NO: 40975 - protein, 9 aa, Homo sapiens
  misc_feature: Table A; Target 40975; HLA-B*58:01; MAGEA8; ENSG00000156009; TAA
LTVTDSTLW

SEQ ID NO: 40976 - protein, 9 aa, Homo sapiens
  misc_feature: Table A; Target 40976; HLA-C*16:04; MAGEA8; ENSG00000156009; TAA
LTVTDSTLW

SEQ ID NO: 40977 - protein, 9 aa, Homo sapiens
  misc_feature: Table A; Target 40977; HLA-A*24:02; MAGEA8; ENSG00000156009; TAA
LYDGREHSV

SEQ ID NO: 40978 - protein, 9 aa, Homo sapiens
  misc_feature: Table A; Target 40978; HLA-C*04:01; MAGEA8; ENSG00000156009; TAA
LYDGREHSV

SEQ ID NO: 40979 - protein, 9 aa, Homo sapiens
  misc_feature: Table A; Target 40979; HLA-C*14:02; MAGEA8; ENSG00000156009; TAA
LYDGREHSV

SEQ ID NO: 40980 - protein, 10 aa, Homo sapiens
  misc_feature: Table A; Target 40980; HLA-A*29:02; MAGEA8; ENSG00000156009; TAA
LYDGREHSVY

SEQ ID NO: 40981 - protein, 11 aa, Homo sapiens
  misc_feature: Table A; Target 40981; HLA-A*24:02; MAGEA8; ENSG00000156009; TAA
LYDGREHSVYW

SEQ ID NO: 40982 - protein, 8 aa, Homo sapiens
  misc_feature: Table A; Target 40982; HLA-A*30:01; MAGEA8; ENSG00000156009; TAA
MDVQIPTA

SEQ ID NO: 40983 - protein, 8 aa, Homo sapiens
  misc_feature: Table A; Target 40983; HLA-B*40:02; MAGEA8; ENSG00000156009; TAA
MDVQIPTA

SEQ ID NO: 40984 - protein, 8 aa, Homo sapiens
  misc_feature: Table A; Target 40984; HLA-B*54:01; MAGEA8; ENSG00000156009; TAA
MDVQIPTA

SEQ ID NO: 40985 - protein, 10 aa, Homo sapiens
  misc_feature: Table A; Target 40985; HLA-A*29:02; MAGEA8; ENSG00000156009; TAA
MLLGQKSQRY

SEQ ID NO: 40986 - protein, 10 aa, Homo sapiens
  misc_feature: Table A; Target 40986; HLA-A*30:02; MAGEA8; ENSG00000156009; TAA
MLLGQKSQRY

SEQ ID NO: 40987 - protein, 11 aa, Homo sapiens
  misc_feature: Table A; Target 40987; HLA-A*03:01; MAGEA8; ENSG00000156009; TAA
MLLGQKSQRYK

SEQ ID NO: 40988 - protein, 9 aa, Homo sapiens
  misc_feature: Table A; Target 40988; HLA-A*30:01; MAGEA8; ENSG00000156009; TAA
MQVIFGIDV

SEQ ID NO: 40989 - protein, 9 aa, Homo sapiens
  misc_feature: Table A; Target 40989; HLA-A*68:02; MAGEA8; ENSG00000156009; TAA
MQVIFGIDV

SEQ ID NO: 40990 - protein, 9 aa, Homo sapiens
  misc_feature: Table A; Target 40990; HLA-B*13:02; MAGEA8; ENSG00000156009; TAA
MQVIFGIDV

SEQ ID NO: 40991 - protein, 9 aa, Homo sapiens
  misc_feature: Table A; Target 40991; HLA-B*15:03; MAGEA8; ENSG00000156009; TAA
MQVIFGIDV

SEQ ID NO: 40992 - protein, 9 aa, Homo sapiens
  misc_feature: Table A; Target 40992; HLA-B*40:02; MAGEA8; ENSG00000156009; TAA
MQVIFGIDV

SEQ ID NO: 40993 - protein, 9 aa, Homo sapiens
  misc_feature: Table A; Target 40993; HLA-C*04:01; MAGEA8; ENSG00000156009; TAA
MQVIFGIDV

SEQ ID NO: 40994 - protein, 9 aa, Homo sapiens
  misc_feature: Table A; Target 40994; HLA-C*06:02; MAGEA8; ENSG00000156009; TAA
MQVIFGIDV

SEQ ID NO: 40995 - protein, 8 aa, Homo sapiens
  misc_feature: Table A; Target 40995; HLA-B*08:01; MAGEA8; ENSG00000156009; TAA
NARVRISY

SEQ ID NO: 40996 - protein, 8 aa, Homo sapiens
  misc_feature: Table A; Target 40996; HLA-C*16:01; MAGEA8; ENSG00000156009; TAA
NARVRISY

SEQ ID NO: 40997 - protein, 9 aa, Homo sapiens
  misc_feature: Table A; Target 40997; HLA-A*31:01; MAGEA8; ENSG00000156009; TAA
NHFPDIFSK

SEQ ID NO: 40998 - protein, 9 aa, Homo sapiens
  misc_feature: Table A; Target 40998; HLA-A*68:02; MAGEA8; ENSG00000156009; TAA
NHFPDIFSK

SEQ ID NO: 40999 - protein, 9 aa, Homo sapiens
  misc_feature: Table A; Target 40999; HLA-B*27:05; MAGEA8; ENSG00000156009; TAA
NHFPDIFSK

SEQ ID NO: 41000 - protein, 9 aa, Homo sapiens
  misc_feature: Table A; Target 41000; HLA-A*24:02; MAGEA8; ENSG00000156009; TAA
NYKNHFPDI

SEQ ID NO: 41001 - protein, 10 aa, Homo sapiens
  misc_feature: Table A; Target 41001; HLA-A*24:02; MAGEA8; ENSG00000156009; TAA
NYKNHFPDIF

SEQ ID NO: 41002 - protein, 9 aa, Homo sapiens
  misc_feature: Table A; Target 41002; HLA-C*14:02; MAGEA8; ENSG00000156009; TAA
NYLEYRQAP

SEQ ID NO: 41003 - protein, 9 aa, Homo sapiens
  misc_feature: Table A; Target 41003; HLA-B*07:02; MAGEA8; ENSG00000156009; TAA
PDPAHLESL

SEQ ID NO: 41004 - protein, 10 aa, Homo sapiens
  misc_feature: Table A; Target 41004; HLA-A*24:02; MAGEA8; ENSG00000156009; TAA
PGSDPVRYEF

SEQ ID NO: 41005 - protein, 10 aa, Homo sapiens
  misc_feature: Table A; Target 41005; HLA-B*07:02; MAGEA8; ENSG00000156009; TAA
PGSDPVRYEF

SEQ ID NO: 41006 - protein, 9 aa, Homo sapiens
  misc_feature: Table A; Target 41006; HLA-A*68:01; MAGEA8; ENSG00000156009; TAA
QAPGSDPVR

SEQ ID NO: 41007 - protein, 10 aa, Homo sapiens
  misc_feature: Table A; Target 41007; HLA-A*01:01; MAGEA8; ENSG00000156009; TAA
QAPGSDPVRY

SEQ ID NO: 41008 - protein, 10 aa, Homo sapiens
  misc_feature: Table A; Target 41008; HLA-A*26:01; MAGEA8; ENSG00000156009; TAA
QAPGSDPVRY

SEQ ID NO: 41009 - protein, 10 aa, Homo sapiens
  misc_feature: Table A; Target 41009; HLA-A*29:02; MAGEA8; ENSG00000156009; TAA
QAPGSDPVRY

SEQ ID NO: 41010 - protein, 10 aa, Homo sapiens
  misc_feature: Table A; Target 41010; HLA-A*30:02; MAGEA8; ENSG00000156009; TAA
QAPGSDPVRY

SEQ ID NO: 41011 - protein, 10 aa, Homo sapiens
  misc_feature: Table A; Target 41011; HLA-B*35:01; MAGEA8; ENSG00000156009; TAA
QAPGSDPVRY

SEQ ID NO: 41012 - protein, 10 aa, Homo sapiens
  misc_feature: Table A; Target 41012; HLA-B*55:01; MAGEA8; ENSG00000156009; TAA
QAPGSDPVRY

SEQ ID NO: 41013 - protein, 9 aa, Homo sapiens
  misc_feature: Table A; Target 41013; HLA-B*35:03; MAGEA8; ENSG00000156009; TAA
QAQGEAPGL

SEQ ID NO: 41014 - protein, 9 aa, Homo sapiens
  misc_feature: Table A; Target 41014; HLA-B*38:01; MAGEA8; ENSG00000156009; TAA
QAQGEAPGL

SEQ ID NO: 41015 - protein, 9 aa, Homo sapiens
  misc_feature: Table A; Target 41015; HLA-C*03:03; MAGEA8; ENSG00000156009; TAA
QAQGEAPGL

SEQ ID NO: 41016 - protein, 9 aa, Homo sapiens
  misc_feature: Table A; Target 41016; HLA-C*03:04; MAGEA8; ENSG00000156009; TAA
QAQGEAPGL

SEQ ID NO: 41017 - protein, 10 aa, Homo sapiens
  misc_feature: Table A; Target 41017; HLA-B*39:01; MAGEA8; ENSG00000156009; TAA
QAQGEAPGLM

SEQ ID NO: 41018 - protein, 10 aa, Homo sapiens
  misc_feature: Table A; Target 41018; HLA-C*07:01; MAGEA8; ENSG00000156009; TAA
QAQGEAPGLM

SEQ ID NO: 41019 - protein, 8 aa, Homo sapiens
  misc_feature: Table A; Target 41019; HLA-B*18:01; MAGEA8; ENSG00000156009; TAA
QEWVQENY

SEQ ID NO: 41020 - protein, 8 aa, Homo sapiens
  misc_feature: Table A; Target 41020; HLA-B*44:03; MAGEA8; ENSG00000156009; TAA
QEWVQENY

SEQ ID NO: 41021 - protein, 9 aa, Homo sapiens
  misc_feature: Table A; Target 41021; HLA-A*30:01; MAGEA8; ENSG00000156009; TAA
QEWVQENYL

SEQ ID NO: 41022 - protein, 9 aa, Homo sapiens
  misc_feature: Table A; Target 41022; HLA-B*18:01; MAGEA8; ENSG00000156009; TAA
QEWVQENYL

SEQ ID NO: 41023 - protein, 9 aa, Homo sapiens
  misc_feature: Table A; Target 41023; HLA-B*37:01; MAGEA8; ENSG00000156009; TAA
QEWVQENYL

SEQ ID NO: 41024 - protein, 9 aa, Homo sapiens
  misc_feature: Table A; Target 41024; HLA-B*40:01; MAGEA8; ENSG00000156009; TAA
QEWVQENYL

SEQ ID NO: 41025 - protein, 9 aa, Homo sapiens
  misc_feature: Table A; Target 41025; HLA-B*40:02; MAGEA8; ENSG00000156009; TAA
QEWVQENYL

SEQ ID NO: 41026 - protein, 9 aa, Homo sapiens
  misc_feature: Table A; Target 41026; HLA-B*44:02; MAGEA8; ENSG00000156009; TAA
QEWVQENYL

SEQ ID NO: 41027 - protein, 9 aa, Homo sapiens
  misc_feature: Table A; Target 41027; HLA-B*44:03; MAGEA8; ENSG00000156009; TAA
QEWVQENYL

SEQ ID NO: 41028 - protein, 9 aa, Homo sapiens
  misc_feature: Table A; Target 41028; HLA-B*49:01; MAGEA8; ENSG00000156009; TAA
QEWVQENYL

SEQ ID NO: 41029 - protein, 11 aa, Homo sapiens
  misc_feature: Table A; Target 41029; HLA-B*44:02; MAGEA8; ENSG00000156009; TAA
QEWVQENYLEY

SEQ ID NO: 41030 - protein, 11 aa, Homo sapiens
  misc_feature: Table A; Target 41030; HLA-B*44:03; MAGEA8; ENSG00000156009; TAA
QEWVQENYLEY

SEQ ID NO: 41031 - protein, 8 aa, Homo sapiens
  misc_feature: Table A; Target 41031; HLA-A*03:01; MAGEA8; ENSG00000156009; TAA
QIKEPVTK

SEQ ID NO: 41032 - protein, 8 aa, Homo sapiens
  misc_feature: Table A; Target 41032; HLA-A*03:02; MAGEA8; ENSG00000156009; TAA
QIKEPVTK

SEQ ID NO: 41033 - protein, 8 aa, Homo sapiens
  misc_feature: Table A; Target 41033; HLA-A*11:01; MAGEA8; ENSG00000156009; TAA
QIKEPVTK

SEQ ID NO: 41034 - protein, 8 aa, Homo sapiens
  misc_feature: Table A; Target 41034; HLA-A*31:01; MAGEA8; ENSG00000156009; TAA
QIKEPVTK

SEQ ID NO: 41035 - protein, 8 aa, Homo sapiens
  misc_feature: Table A; Target 41035; HLA-C*04:01; MAGEA8; ENSG00000156009; TAA
QIKEPVTK

SEQ ID NO: 41036 - protein, 8 aa, Homo sapiens
  misc_feature: Table A; Target 41036; HLA-C*06:02; MAGEA8; ENSG00000156009; TAA
QIKEPVTK

SEQ ID NO: 41037 - protein, 8 aa, Homo sapiens
  misc_feature: Table A; Target 41037; HLA-C*07:01; MAGEA8; ENSG00000156009; TAA
QIKEPVTK

SEQ ID NO: 41038 - protein, 8 aa, Homo sapiens
  misc_feature: Table A; Target 41038; HLA-C*07:02; MAGEA8; ENSG00000156009; TAA
QIKEPVTK

SEQ ID NO: 41039 - protein, 8 aa, Homo sapiens
  misc_feature: Table A; Target 41039; HLA-C*16:01; MAGEA8; ENSG00000156009; TAA
QIKEPVTK

SEQ ID NO: 41040 - protein, 9 aa, Homo sapiens
  misc_feature: Table A; Target 41040; HLA-A*02:03; MAGEA8; ENSG00000156009; TAA
QIKEPVTKA

SEQ ID NO: 41041 - protein, 9 aa, Homo sapiens
  misc_feature: Table A; Target 41041; HLA-A*31:01; MAGEA8; ENSG00000156009; TAA
QIKEPVTKA

SEQ ID NO: 41042 - protein, 9 aa, Homo sapiens
  misc_feature: Table A; Target 41042; HLA-A*32:01; MAGEA8; ENSG00000156009; TAA
QIKEPVTKA

SEQ ID NO: 41043 - protein, 9 aa, Homo sapiens
  misc_feature: Table A; Target 41043; HLA-B*08:01; MAGEA8; ENSG00000156009; TAA
QIKEPVTKA

SEQ ID NO: 41044 - protein, 9 aa, Homo sapiens
  misc_feature: Table A; Target 41044; HLA-B*54:01; MAGEA8; ENSG00000156009; TAA
QIKEPVTKA

SEQ ID NO: 41045 - protein, 9 aa, Homo sapiens
  misc_feature: Table A; Target 41045; HLA-B*55:01; MAGEA8; ENSG00000156009; TAA
QIKEPVTKA

SEQ ID NO: 41046 - protein, 9 aa, Homo sapiens
  misc_feature: Table A; Target 41046; HLA-B*27:05; MAGEA8; ENSG00000156009; TAA
QRYKAEEGL

SEQ ID NO: 41047 - protein, 9 aa, Homo sapiens
  misc_feature: Table A; Target 41047; HLA-B*38:01; MAGEA8; ENSG00000156009; TAA
QRYKAEEGL

SEQ ID NO: 41048 - protein, 9 aa, Homo sapiens
  misc_feature: Table A; Target 41048; HLA-C*06:02; MAGEA8; ENSG00000156009; TAA
QRYKAEEGL

SEQ ID NO: 41049 - protein, 9 aa, Homo sapiens
  misc_feature: Table A; Target 41049; HLA-C*07:01; MAGEA8; ENSG00000156009; TAA
QRYKAEEGL

SEQ ID NO: 41050 - protein, 9 aa, Homo sapiens
  misc_feature: Table A; Target 41050; HLA-C*07:04; MAGEA8; ENSG00000156009; TAA
QRYKAEEGL

SEQ ID NO: 41051 - protein, 9 aa, Homo sapiens
  misc_feature: Table A; Target 41051; HLA-C*05:01; MAGEA8; ENSG00000156009; TAA
QSDEGSSSN

SEQ ID NO: 41052 - protein, 10 aa, Homo sapiens
  misc_feature: Table A; Target 41052; HLA-C*01:02; MAGEA8; ENSG00000156009; TAA
QSPEGASSSL

SEQ ID NO: 41053 - protein, 8 aa, Homo sapiens
  misc_feature: Table A; Target 41053; HLA-B*08:01; MAGEA8; ENSG00000156009; TAA
QSTPKTGL

SEQ ID NO: 41054 - protein, 9 aa, Homo sapiens
  misc_feature: Table A; Target 41054; HLA-C*16:02; MAGEA8; ENSG00000156009; TAA
QSTPKTGLL

SEQ ID NO: 41055 - protein, 9 aa, Homo sapiens
  misc_feature: Table A; Target 41055; HLA-A*03:02; MAGEA8; ENSG00000156009; TAA
QVIFGIDVK

SEQ ID NO: 41056 - protein, 9 aa, Homo sapiens
  misc_feature: Table A; Target 41056; HLA-A*11:01; MAGEA8; ENSG00000156009; TAA
QVIFGIDVK

SEQ ID NO: 41057 - protein, 9 aa, Homo sapiens
  misc_feature: Table A; Target 41057; HLA-A*68:01; MAGEA8; ENSG00000156009; TAA
QVIFGIDVK

SEQ ID NO: 41058 - protein, 9 aa, Homo sapiens
  misc_feature: Table A; Target 41058; HLA-C*07:06; MAGEA8; ENSG00000156009; TAA
QVIFGIDVK

SEQ ID NO: 41059 - protein, 11 aa, Homo sapiens
  misc_feature: Table A; Target 41059; HLA-A*30:01; MAGEA8; ENSG00000156009; TAA
REALDEKVAEL

SEQ ID NO: 41060 - protein, 11 aa, Homo sapiens
  misc_feature: Table A; Target 41060; HLA-B*40:01; MAGEA8; ENSG00000156009; TAA
REALDEKVAEL

SEQ ID NO: 41061 - protein, 9 aa, Homo sapiens
  misc_feature: Table A; Target 41061; HLA-B*44:02; MAGEA8; ENSG00000156009; TAA
REHSVYWKL

SEQ ID NO: 41062 - protein, 9 aa, Homo sapiens
  misc_feature: Table A; Target 41062; HLA-B*44:03; MAGEA8; ENSG00000156009; TAA
REHSVYWKL

SEQ ID NO: 41063 - protein, 9 aa, Homo sapiens
  misc_feature: Table A; Target 41063; HLA-A*02:01; MAGEA8; ENSG00000156009; TAA
RQAPGSDPV

SEQ ID NO: 41064 - protein, 9 aa, Homo sapiens
  misc_feature: Table A; Target 41064; HLA-B*13:02; MAGEA8; ENSG00000156009; TAA
RQAPGSDPV

SEQ ID NO: 41065 - protein, 9 aa, Homo sapiens
  misc_feature: Table A; Target 41065; HLA-B*27:05; MAGEA8; ENSG00000156009; TAA
RQAPGSDPV

SEQ ID NO: 41066 - protein, 9 aa, Homo sapiens
  misc_feature: Table A; Target 41066; HLA-B*39:01; MAGEA8; ENSG00000156009; TAA
RQAPGSDPV

SEQ ID NO: 41067 - protein, 9 aa, Homo sapiens
  misc_feature: Table A; Target 41067; HLA-C*06:02; MAGEA8; ENSG00000156009; TAA
RQAPGSDPV

SEQ ID NO: 41068 - protein, 11 aa, Homo sapiens
  misc_feature: Table A; Target 41068; HLA-A*03:02; MAGEA8; ENSG00000156009; TAA
RQAPGSDPVRY

SEQ ID NO: 41069 - protein, 11 aa, Homo sapiens
  misc_feature: Table A; Target 41069; HLA-A*29:02; MAGEA8; ENSG00000156009; TAA
RQAPGSDPVRY

SEQ ID NO: 41070 - protein, 11 aa, Homo sapiens
  misc_feature: Table A; Target 41070; HLA-A*30:02; MAGEA8; ENSG00000156009; TAA
RQAPGSDPVRY

SEQ ID NO: 41071 - protein, 11 aa, Homo sapiens
  misc_feature: Table A; Target 41071; HLA-A*32:01; MAGEA8; ENSG00000156009; TAA
RQAPGSDPVRY

SEQ ID NO: 41072 - protein, 11 aa, Homo sapiens
  misc_feature: Table A; Target 41072; HLA-B*15:01; MAGEA8; ENSG00000156009; TAA
RQAPGSDPVRY

SEQ ID NO: 41073 - protein, 11 aa, Homo sapiens
  misc_feature: Table A; Target 41073; HLA-B*15:03; MAGEA8; ENSG00000156009; TAA
RQAPGSDPVRY

SEQ ID NO: 41074 - protein, 11 aa, Homo sapiens
  misc_feature: Table A; Target 41074; HLA-B*44:03; MAGEA8; ENSG00000156009; TAA
RQAPGSDPVRY

SEQ ID NO: 41075 - protein, 11 aa, Homo sapiens
  misc_feature: Table A; Target 41075; HLA-B*57:01; MAGEA8; ENSG00000156009; TAA
RQAPGSDPVRY

SEQ ID NO: 41076 - protein, 11 aa, Homo sapiens
  misc_feature: Table A; Target 41076; HLA-B*58:01; MAGEA8; ENSG00000156009; TAA
RQAPGSDPVRY

SEQ ID NO: 41077 - protein, 11 aa, Homo sapiens
  misc_feature: Table A; Target 41077; HLA-C*02:02; MAGEA8; ENSG00000156009; TAA
RQAPGSDPVRY

SEQ ID NO: 41078 - protein, 11 aa, Homo sapiens
  misc_feature: Table A; Target 41078; HLA-C*07:04; MAGEA8; ENSG00000156009; TAA
RQAPGSDPVRY

SEQ ID NO: 41079 - protein, 11 aa, Homo sapiens
  misc_feature: Table A; Target 41079; HLA-C*16:04; MAGEA8; ENSG00000156009; TAA
RQAPGSDPVRY

SEQ ID NO: 41080 - protein, 10 aa, Homo sapiens
  misc_feature: Table A; Target 41080; HLA-A*30:02; MAGEA8; ENSG00000156009; TAA
RVNARVRISY

SEQ ID NO: 41081 - protein, 10 aa, Homo sapiens
  misc_feature: Table A; Target 41081; HLA-A*32:01; MAGEA8; ENSG00000156009; TAA
RVNARVRISY

SEQ ID NO: 41082 - protein, 9 aa, Homo sapiens
  misc_feature: Table A; Target 41082; HLA-B*07:02; MAGEA8; ENSG00000156009; TAA
RVRISYPSL

SEQ ID NO: 41083 - protein, 8 aa, Homo sapiens
  misc_feature: Table A; Target 41083; HLA-B*37:01; MAGEA8; ENSG00000156009; TAA
SDPVRYEF

SEQ ID NO: 41084 - protein, 8 aa, Homo sapiens
  misc_feature: Table A; Target 41084; HLA-B*18:01; MAGEA8; ENSG00000156009; TAA
SECMQVIF

SEQ ID NO: 41085 - protein, 9 aa, Homo sapiens
  misc_feature: Table A; Target 41085; HLA-C*14:02; MAGEA8; ENSG00000156009; TAA
SLTVTDSTL

SEQ ID NO: 41086 - protein, 10 aa, Homo sapiens
  misc_feature: Table A; Target 41086; HLA-B*07:02; MAGEA8; ENSG00000156009; TAA
SPDPAHLESL

SEQ ID NO: 41087 - protein, 10 aa, Homo sapiens
  misc_feature: Table A; Target 41087; HLA-B*35:01; MAGEA8; ENSG00000156009; TAA
SPDPAHLESL

SEQ ID NO: 41088 - protein, 10 aa, Homo sapiens
  misc_feature: Table A; Target 41088; HLA-B*35:03; MAGEA8; ENSG00000156009; TAA
SPDPAHLESL

SEQ ID NO: 41089 - protein, 10 aa, Homo sapiens
  misc_feature: Table A; Target 41089; HLA-B*38:01; MAGEA8; ENSG00000156009; TAA
SPDPAHLESL

SEQ ID NO: 41090 - protein, 10 aa, Homo sapiens
  misc_feature: Table A; Target 41090; HLA-B*55:01; MAGEA8; ENSG00000156009; TAA
SPDPAHLESL

SEQ ID NO: 41091 - protein, 10 aa, Homo sapiens
  misc_feature: Table A; Target 41091; HLA-C*07:02; MAGEA8; ENSG00000156009; TAA
SPDPAHLESL

SEQ ID NO: 41092 - protein, 11 aa, Homo sapiens
  misc_feature: Table A; Target 41092; HLA-B*55:01; MAGEA8; ENSG00000156009; TAA
SPDPAHLESLF

SEQ ID NO: 41093 - protein, 9 aa, Homo sapiens
  misc_feature: Table A; Target 41093; HLA-B*07:02; MAGEA8; ENSG00000156009; TAA
SPEGASSSL

SEQ ID NO: 41094 - protein, 9 aa, Homo sapiens
  misc_feature: Table A; Target 41094; HLA-B*35:01; MAGEA8; ENSG00000156009; TAA
SPEGASSSL

SEQ ID NO: 41095 - protein, 9 aa, Homo sapiens
  misc_feature: Table A; Target 41095; HLA-B*35:03; MAGEA8; ENSG00000156009; TAA
SPEGASSSL

SEQ ID NO: 41096 - protein, 9 aa, Homo sapiens
  misc_feature: Table A; Target 41096; HLA-C*05:01; MAGEA8; ENSG00000156009; TAA
SPEGASSSL

SEQ ID NO: 41097 - protein, 9 aa, Homo sapiens
  misc_feature: Table A; Target 41097; HLA-C*07:02; MAGEA8; ENSG00000156009; TAA
SPEGASSSL

SEQ ID NO: 41098 - protein, 10 aa, Homo sapiens
  misc_feature: Table A; Target 41098; HLA-B*56:01; MAGEA8; ENSG00000156009; TAA
SPSPPQSPEG

SEQ ID NO: 41099 - protein, 11 aa, Homo sapiens
  misc_feature: Table A; Target 41099; HLA-B*56:01; MAGEA8; ENSG00000156009; TAA
SPSPPQSPEGA

SEQ ID NO: 41100 - protein, 11 aa, Homo sapiens
  misc_feature: Table A; Target 41100; HLA-A*25:01; MAGEA8; ENSG00000156009; TAA
SSLTVTDSTLW

SEQ ID NO: 41101 - protein, 11 aa, Homo sapiens
  misc_feature: Table A; Target 41101; HLA-B*57:01; MAGEA8; ENSG00000156009; TAA
SSLTVTDSTLW

SEQ ID NO: 41102 - protein, 11 aa, Homo sapiens
  misc_feature: Table A; Target 41102; HLA-B*58:01; MAGEA8; ENSG00000156009; TAA
SSLTVTDSTLW

SEQ ID NO: 41103 - protein, 8 aa, Homo sapiens
  misc_feature: Table A; Target 41103; HLA-C*16:01; MAGEA8; ENSG00000156009; TAA
SSSSTLIM

SEQ ID NO: 41104 - protein, 9 aa, Homo sapiens
  misc_feature: Table A; Target 41104; HLA-B*58:01; MAGEA8; ENSG00000156009; TAA
SSTLIMGTL

SEQ ID NO: 41105 - protein, 9 aa, Homo sapiens
  misc_feature: Table A; Target 41105; HLA-A*68:02; MAGEA8; ENSG00000156009; TAA
STSPDPAHL

SEQ ID NO: 41106 - protein, 9 aa, Homo sapiens
  misc_feature: Table A; Target 41106; HLA-A*03:02; MAGEA8; ENSG00000156009; TAA
SVMGLYDGR

SEQ ID NO: 41107 - protein, 9 aa, Homo sapiens
  misc_feature: Table A; Target 41107; HLA-A*11:01; MAGEA8; ENSG00000156009; TAA
SVMGLYDGR

SEQ ID NO: 41108 - protein, 9 aa, Homo sapiens
  misc_feature: Table A; Target 41108; HLA-A*26:01; MAGEA8; ENSG00000156009; TAA
SVMGLYDGR

SEQ ID NO: 41109 - protein, 9 aa, Homo sapiens
  misc_feature: Table A; Target 41109; HLA-A*31:01; MAGEA8; ENSG00000156009; TAA
SVMGLYDGR

SEQ ID NO: 41110 - protein, 9 aa, Homo sapiens
  misc_feature: Table A; Target 41110; HLA-A*33:01; MAGEA8; ENSG00000156009; TAA
SVMGLYDGR

SEQ ID NO: 41111 - protein, 9 aa, Homo sapiens
  misc_feature: Table A; Target 41111; HLA-A*33:03; MAGEA8; ENSG00000156009; TAA
SVMGLYDGR

SEQ ID NO: 41112 - protein, 9 aa, Homo sapiens
  misc_feature: Table A; Target 41112; HLA-A*68:01; MAGEA8; ENSG00000156009; TAA
SVMGLYDGR

SEQ ID NO: 41113 - protein, 9 aa, Homo sapiens
  misc_feature: Table A; Target 41113; HLA-C*07:06; MAGEA8; ENSG00000156009; TAA
SVMGLYDGR

SEQ ID NO: 41114 - protein, 8 aa, Homo sapiens
  misc_feature: Table A; Target 41114; HLA-A*23:01; MAGEA8; ENSG00000156009; TAA
SYILVTCL

SEQ ID NO: 41115 - protein, 8 aa, Homo sapiens
  misc_feature: Table A; Target 41115; HLA-A*24:02; MAGEA8; ENSG00000156009; TAA
SYILVTCL

SEQ ID NO: 41116 - protein, 8 aa, Homo sapiens
  misc_feature: Table A; Target 41116; HLA-C*14:02; MAGEA8; ENSG00000156009; TAA
SYILVTCL

SEQ ID NO: 41117 - protein, 9 aa, Homo sapiens
  misc_feature: Table A; Target 41117; HLA-A*23:01; MAGEA8; ENSG00000156009; TAA
SYVKVLEHV

SEQ ID NO: 41118 - protein, 9 aa, Homo sapiens
  misc_feature: Table A; Target 41118; HLA-A*24:02; MAGEA8; ENSG00000156009; TAA
SYVKVLEHV

SEQ ID NO: 41119 - protein, 9 aa, Homo sapiens
  misc_feature: Table A; Target 41119; HLA-C*04:01; MAGEA8; ENSG00000156009; TAA
TDSGSPSPP

SEQ ID NO: 41120 - protein, 9 aa, Homo sapiens
  misc_feature: Table A; Target 41120; HLA-C*07:04; MAGEA8; ENSG00000156009; TAA
TDSGSPSPP

SEQ ID NO: 41121 - protein, 10 aa, Homo sapiens
  misc_feature: Table A; Target 41121; HLA-C*04:01; MAGEA8; ENSG00000156009; TAA
TDSGSPSPPQ

SEQ ID NO: 41122 - protein, 10 aa, Homo sapiens
  misc_feature: Table A; Target 41122; HLA-A*02:01; MAGEA8; ENSG00000156009; TAA
TLIMGTLEEV

SEQ ID NO: 41123 - protein, 10 aa, Homo sapiens
  misc_feature: Table A; Target 41123; HLA-A*02:03; MAGEA8; ENSG00000156009; TAA
TLIMGTLEEV

SEQ ID NO: 41124 - protein, 10 aa, Homo sapiens
  misc_feature: Table A; Target 41124; HLA-A*02:04; MAGEA8; ENSG00000156009; TAA
TLIMGTLEEV

SEQ ID NO: 41125 - protein, 10 aa, Homo sapiens
  misc_feature: Table A; Target 41125; HLA-B*55:01; MAGEA8; ENSG00000156009; TAA
TLIMGTLEEV

SEQ ID NO: 41126 - protein, 8 aa, Homo sapiens
  misc_feature: Table A; Target 41126; HLA-B*51:01; MAGEA8; ENSG00000156009; TAA
TPKTGLLI

SEQ ID NO: 41127 - protein, 9 aa, Homo sapiens
  misc_feature: Table A; Target 41127; HLA-B*07:02; MAGEA8; ENSG00000156009; TAA
TPKTGLLII

SEQ ID NO: 41128 - protein, 9 aa, Homo sapiens
  misc_feature: Table A; Target 41128; HLA-B*51:01; MAGEA8; ENSG00000156009; TAA
TPKTGLLII

SEQ ID NO: 41129 - protein, 9 aa, Homo sapiens
  misc_feature: Table A; Target 41129; HLA-C*07:02; MAGEA8; ENSG00000156009; TAA
TPKTGLLII

SEQ ID NO: 41130 - protein, 9 aa, Homo sapiens
  misc_feature: Table A; Target 41130; HLA-A*30:02; MAGEA8; ENSG00000156009; TAA
TQEWVQENY

SEQ ID NO: 41131 - protein, 9 aa, Homo sapiens
  misc_feature: Table A; Target 41131; HLA-B*15:01; MAGEA8; ENSG00000156009; TAA
TQEWVQENY

SEQ ID NO: 41132 - protein, 9 aa, Homo sapiens
  misc_feature: Table A; Target 41132; HLA-B*15:03; MAGEA8; ENSG00000156009; TAA
TQEWVQENY

SEQ ID NO: 41133 - protein, 10 aa, Homo sapiens
  misc_feature: Table A; Target 41133; HLA-B*38:01; MAGEA8; ENSG00000156009; TAA
TQEWVQENYL

SEQ ID NO: 41134 - protein, 11 aa, Homo sapiens
  misc_feature: Table A; Target 41134; HLA-A*02:07; MAGEA8; ENSG00000156009; TAA
TSPDPAHLESL

SEQ ID NO: 41135 - protein, 9 aa, Homo sapiens
  misc_feature: Table A; Target 41135; HLA-A*03:01; MAGEA8; ENSG00000156009; TAA
TSYVKVLEH

SEQ ID NO: 41136 - protein, 9 aa, Homo sapiens
  misc_feature: Table A; Target 41136; HLA-A*11:01; MAGEA8; ENSG00000156009; TAA
TSYVKVLEH

SEQ ID NO: 41137 - protein, 9 aa, Homo sapiens
  misc_feature: Table A; Target 41137; HLA-C*02:02; MAGEA8; ENSG00000156009; TAA
TSYVKVLEH

SEQ ID NO: 41138 - protein, 9 aa, Homo sapiens
  misc_feature: Table A; Target 41138; HLA-C*07:06; MAGEA8; ENSG00000156009; TAA
TSYVKVLEH

SEQ ID NO: 41139 - protein, 9 aa, Homo sapiens
  misc_feature: Table A; Target 41139; HLA-C*12:03; MAGEA8; ENSG00000156009; TAA
TSYVKVLEH

SEQ ID NO: 41140 - protein, 10 aa, Homo sapiens
  misc_feature: Table A; Target 41140; HLA-A*68:02; MAGEA8; ENSG00000156009; TAA
TSYVKVLEHV

SEQ ID NO: 41141 - protein, 8 aa, Homo sapiens
  misc_feature: Table A; Target 41141; HLA-A*25:01; MAGEA8; ENSG00000156009; TAA
TVTDSTLW

SEQ ID NO: 41142 - protein, 8 aa, Homo sapiens
  misc_feature: Table A; Target 41142; HLA-A*32:01; MAGEA8; ENSG00000156009; TAA
TVTDSTLW

SEQ ID NO: 41143 - protein, 8 aa, Homo sapiens
  misc_feature: Table A; Target 41143; HLA-B*57:01; MAGEA8; ENSG00000156009; TAA
TVTDSTLW

SEQ ID NO: 41144 - protein, 8 aa, Homo sapiens
  misc_feature: Table A; Target 41144; HLA-B*58:01; MAGEA8; ENSG00000156009; TAA
TVTDSTLW

SEQ ID NO: 41145 - protein, 8 aa, Homo sapiens
  misc_feature: Table A; Target 41145; HLA-C*03:04; MAGEA8; ENSG00000156009; TAA
VAELVRFL

SEQ ID NO: 41146 - protein, 8 aa, Homo sapiens
  misc_feature: Table A; Target 41146; HLA-B*15:03; MAGEA8; ENSG00000156009; TAA
VDPAGHSY

SEQ ID NO: 41147 - protein, 8 aa, Homo sapiens
  misc_feature: Table A; Target 41147; HLA-C*07:01; MAGEA8; ENSG00000156009; TAA
VDPAGHSY

SEQ ID NO: 41148 - protein, 8 aa, Homo sapiens
  misc_feature: Table A; Target 41148; HLA-C*16:02; MAGEA8; ENSG00000156009; TAA
VDPAGHSY

SEQ ID NO: 41149 - protein, 10 aa, Homo sapiens
  misc_feature: Table A; Target 41149; HLA-A*02:01; MAGEA8; ENSG00000156009; TAA
VIFGIDVKEV

SEQ ID NO: 41150 - protein, 10 aa, Homo sapiens
  misc_feature: Table A; Target 41150; HLA-A*02:03; MAGEA8; ENSG00000156009; TAA
VIFGIDVKEV

SEQ ID NO: 41151 - protein, 10 aa, Homo sapiens
  misc_feature: Table A; Target 41151; HLA-A*02:04; MAGEA8; ENSG00000156009; TAA
VIFGIDVKEV

SEQ ID NO: 41152 - protein, 10 aa, Homo sapiens
  misc_feature: Table A; Target 41152; HLA-A*02:07; MAGEA8; ENSG00000156009; TAA
VIFGIDVKEV

SEQ ID NO: 41153 - protein, 10 aa, Homo sapiens
  misc_feature: Table A; Target 41153; HLA-A*68:02; MAGEA8; ENSG00000156009; TAA
VIFGIDVKEV

SEQ ID NO: 41154 - protein, 9 aa, Homo sapiens
  misc_feature: Table A; Target 41154; HLA-A*32:01; MAGEA8; ENSG00000156009; TAA
VNARVRISY

SEQ ID NO: 41155 - protein, 9 aa, Homo sapiens
  misc_feature: Table A; Target 41155; HLA-B*15:03; MAGEA8; ENSG00000156009; TAA
VNARVRISY

SEQ ID NO: 41156 - protein, 9 aa, Homo sapiens
  misc_feature: Table A; Target 41156; HLA-B*57:01; MAGEA8; ENSG00000156009; TAA
VNARVRISY

SEQ ID NO: 41157 - protein, 9 aa, Homo sapiens
  misc_feature: Table A; Target 41157; HLA-C*16:01; MAGEA8; ENSG00000156009; TAA
VNARVRISY

SEQ ID NO: 41158 - protein, 8 aa, Homo sapiens
  misc_feature: Table A; Target 41158; HLA-B*39:01; MAGEA8; ENSG00000156009; TAA
VQIPTAEE

SEQ ID NO: 41159 - protein, 9 aa, Homo sapiens
  misc_feature: Table A; Target 41159; HLA-B*13:02; MAGEA8; ENSG00000156009; TAA
VQIPTAEEQ

SEQ ID NO: 41160 - protein, 9 aa, Homo sapiens
  misc_feature: Table A; Target 41160; HLA-B*15:01; MAGEA8; ENSG00000156009; TAA
VQIPTAEEQ

SEQ ID NO: 41161 - protein, 9 aa, Homo sapiens
  misc_feature: Table A; Target 41161; HLA-B*15:03; MAGEA8; ENSG00000156009; TAA
VQIPTAEEQ

SEQ ID NO: 41162 - protein, 9 aa, Homo sapiens
  misc_feature: Table A; Target 41162; HLA-B*27:05; MAGEA8; ENSG00000156009; TAA
VQIPTAEEQ

SEQ ID NO: 41163 - protein, 9 aa, Homo sapiens
  misc_feature: Table A; Target 41163; HLA-B*39:01; MAGEA8; ENSG00000156009; TAA
VQIPTAEEQ

SEQ ID NO: 41164 - protein, 9 aa, Homo sapiens
  misc_feature: Table A; Target 41164; HLA-B*46:01; MAGEA8; ENSG00000156009; TAA
VQIPTAEEQ

SEQ ID NO: 41165 - protein, 9 aa, Homo sapiens
  misc_feature: Table A; Target 41165; HLA-C*07:04; MAGEA8; ENSG00000156009; TAA
VQIPTAEEQ

SEQ ID NO: 41166 - protein, 10 aa, Homo sapiens
  misc_feature: Table A; Target 41166; HLA-A*03:02; MAGEA8; ENSG00000156009; TAA
VQIPTAEEQK

SEQ ID NO: 41167 - protein, 10 aa, Homo sapiens
  misc_feature: Table A; Target 41167; HLA-A*11:01; MAGEA8; ENSG00000156009; TAA
VQIPTAEEQK

SEQ ID NO: 41168 - protein, 10 aa, Homo sapiens
  misc_feature: Table A; Target 41168; HLA-B*27:02; MAGEA8; ENSG00000156009; TAA
VQIPTAEEQK

SEQ ID NO: 41169 - protein, 10 aa, Homo sapiens
  misc_feature: Table A; Target 41169; HLA-B*27:05; MAGEA8; ENSG00000156009; TAA
VQIPTAEEQK

SEQ ID NO: 41170 - protein, 10 aa, Homo sapiens
  misc_feature: Table A; Target 41170; HLA-C*04:01; MAGEA8; ENSG00000156009; TAA
VQIPTAEEQK

SEQ ID NO: 41171 - protein, 11 aa, Homo sapiens
  misc_feature: Table A; Target 41171; HLA-A*30:01; MAGEA8; ENSG00000156009; TAA
VQIPTAEEQKA

SEQ ID NO: 41172 - protein, 11 aa, Homo sapiens
  misc_feature: Table A; Target 41172; HLA-B*13:02; MAGEA8; ENSG00000156009; TAA
VQIPTAEEQKA

SEQ ID NO: 41173 - protein, 11 aa, Homo sapiens
  misc_feature: Table A; Target 41173; HLA-B*27:05; MAGEA8; ENSG00000156009; TAA
VQIPTAEEQKA

SEQ ID NO: 41174 - protein, 11 aa, Homo sapiens
  misc_feature: Table A; Target 41174; HLA-C*06:02; MAGEA8; ENSG00000156009; TAA
VQIPTAEEQKA

SEQ ID NO: 41175 - protein, 10 aa, Homo sapiens
  misc_feature: Table A; Target 41175; HLA-A*01:01; MAGEA8; ENSG00000156009; TAA
VTDSGSPSPP

SEQ ID NO: 41176 - protein, 11 aa, Homo sapiens
  misc_feature: Table A; Target 41176; HLA-A*01:01; MAGEA8; ENSG00000156009; TAA
VTDSGSPSPPQ

SEQ ID NO: 41177 - protein, 11 aa, Homo sapiens
  misc_feature: Table A; Target 41177; HLA-A*03:02; MAGEA8; ENSG00000156009; TAA
VTDSGSPSPPQ

SEQ ID NO: 41178 - protein, 11 aa, Homo sapiens
  misc_feature: Table A; Target 41178; HLA-A*11:01; MAGEA8; ENSG00000156009; TAA
VTDSGSPSPPQ

SEQ ID NO: 41179 - protein, 11 aa, Homo sapiens
  misc_feature: Table A; Target 41179; HLA-B*27:05; MAGEA8; ENSG00000156009; TAA
VTDSGSPSPPQ

SEQ ID NO: 41180 - protein, 9 aa, Homo sapiens
  misc_feature: Table A; Target 41180; HLA-A*30:01; MAGEA8; ENSG00000156009; TAA
WEALSVMGL

SEQ ID NO: 41181 - protein, 9 aa, Homo sapiens
  misc_feature: Table A; Target 41181; HLA-B*37:01; MAGEA8; ENSG00000156009; TAA
WEALSVMGL

SEQ ID NO: 41182 - protein, 9 aa, Homo sapiens
  misc_feature: Table A; Target 41182; HLA-B*40:01; MAGEA8; ENSG00000156009; TAA
WEALSVMGL

SEQ ID NO: 41183 - protein, 9 aa, Homo sapiens
  misc_feature: Table A; Target 41183; HLA-B*40:02; MAGEA8; ENSG00000156009; TAA
WEALSVMGL

SEQ ID NO: 41184 - protein, 9 aa, Homo sapiens
  misc_feature: Table A; Target 41184; HLA-B*49:01; MAGEA8; ENSG00000156009; TAA
WEALSVMGL

SEQ ID NO: 41185 - protein, 9 aa, Homo sapiens
  misc_feature: Table A; Target 41185; HLA-B*46:01; MAGEA8; ENSG00000156009; TAA
WVQENYLEY

SEQ ID NO: 41186 - protein, 9 aa, Homo sapiens
  misc_feature: Table A; Target 41186; HLA-C*07:04; MAGEA8; ENSG00000156009; TAA
WVQENYLEY

SEQ ID NO: 41187 - protein, 8 aa, Homo sapiens
  misc_feature: Table A; Target 41187; HLA-C*06:02; MAGEA8; ENSG00000156009; TAA
YDGREHSV

SEQ ID NO: 41188 - protein, 8 aa, Homo sapiens
  misc_feature: Table A; Target 41188; HLA-C*07:01; MAGEA8; ENSG00000156009; TAA
YDGREHSV

SEQ ID NO: 41189 - protein, 8 aa, Homo sapiens
  misc_feature: Table A; Target 41189; HLA-C*07:04; MAGEA8; ENSG00000156009; TAA
YDGREHSV

SEQ ID NO: 41190 - protein, 9 aa, Homo sapiens
  misc_feature: Table A; Target 41190; HLA-A*01:01; MAGEA8; ENSG00000156009; TAA
YDGREHSVY

SEQ ID NO: 41191 - protein, 9 aa, Homo sapiens
  misc_feature: Table A; Target 41191; HLA-C*07:01; MAGEA8; ENSG00000156009; TAA
YDGREHSVY

SEQ ID NO: 41192 - protein, 9 aa, Homo sapiens
  misc_feature: Table A; Target 41192; HLA-B*15:03; MAGEA8; ENSG00000156009; TAA
YKAEEGLQA

SEQ ID NO: 41193 - protein, 9 aa, Homo sapiens
  misc_feature: Table A; Target 41193; HLA-B*39:01; MAGEA8; ENSG00000156009; TAA
YKAEEGLQA

SEQ ID NO: 41194 - protein, 8 aa, Homo sapiens
  misc_feature: Table A; Target 41194; HLA-B*54:01; MAGEA8; ENSG00000156009; TAA
YPSLHEEA

SEQ ID NO: 41195 - protein, 8 aa, Homo sapiens
  misc_feature: Table A; Target 41195; HLA-B*55:01; MAGEA8; ENSG00000156009; TAA
YPSLHEEA

SEQ ID NO: 41196 - protein, 8 aa, Homo sapiens
  misc_feature: Table A; Target 41196; HLA-B*56:01; MAGEA8; ENSG00000156009; TAA
YPSLHEEA

SEQ ID NO: 41197 - protein, 9 aa, Homo sapiens
  misc_feature: Table A; Target 41197; HLA-A*30:01; MAGEA8; ENSG00000156009; TAA
YPSLHEEAL

SEQ ID NO: 41198 - protein, 9 aa, Homo sapiens
  misc_feature: Table A; Target 41198; HLA-B*07:02; MAGEA8; ENSG00000156009; TAA
YPSLHEEAL

SEQ ID NO: 41199 - protein, 9 aa, Homo sapiens
  misc_feature: Table A; Target 41199; HLA-B*08:01; MAGEA8; ENSG00000156009; TAA
YPSLHEEAL

SEQ ID NO: 41200 - protein, 9 aa, Homo sapiens
  misc_feature: Table A; Target 41200; HLA-B*27:05; MAGEA8; ENSG00000156009; TAA
YPSLHEEAL

SEQ ID NO: 41201 - protein, 9 aa, Homo sapiens
  misc_feature: Table A; Target 41201; HLA-B*35:01; MAGEA8; ENSG00000156009; TAA
YPSLHEEAL

SEQ ID NO: 41202 - protein, 9 aa, Homo sapiens
  misc_feature: Table A; Target 41202; HLA-B*35:03; MAGEA8; ENSG00000156009; TAA
YPSLHEEAL

SEQ ID NO: 41203 - protein, 9 aa, Homo sapiens
  misc_feature: Table A; Target 41203; HLA-B*37:01; MAGEA8; ENSG00000156009; TAA
YPSLHEEAL

SEQ ID NO: 41204 - protein, 9 aa, Homo sapiens
  misc_feature: Table A; Target 41204; HLA-B*38:01; MAGEA8; ENSG00000156009; TAA
YPSLHEEAL

SEQ ID NO: 41205 - protein, 9 aa, Homo sapiens
  misc_feature: Table A; Target 41205; HLA-B*39:01; MAGEA8; ENSG00000156009; TAA
YPSLHEEAL

SEQ ID NO: 41206 - protein, 9 aa, Homo sapiens
  misc_feature: Table A; Target 41206; HLA-B*40:01; MAGEA8; ENSG00000156009; TAA
YPSLHEEAL

SEQ ID NO: 41207 - protein, 9 aa, Homo sapiens
  misc_feature: Table A; Target 41207; HLA-B*40:02; MAGEA8; ENSG00000156009; TAA
YPSLHEEAL

SEQ ID NO: 41208 - protein, 9 aa, Homo sapiens
  misc_feature: Table A; Target 41208; HLA-B*51:01; MAGEA8; ENSG00000156009; TAA
YPSLHEEAL

SEQ ID NO: 41209 - protein, 9 aa, Homo sapiens
  misc_feature: Table A; Target 41209; HLA-B*54:01; MAGEA8; ENSG00000156009; TAA
YPSLHEEAL

SEQ ID NO: 41210 - protein, 9 aa, Homo sapiens
  misc_feature: Table A; Target 41210; HLA-B*55:01; MAGEA8; ENSG00000156009; TAA
YPSLHEEAL

SEQ ID NO: 41211 - protein, 9 aa, Homo sapiens
  misc_feature: Table A; Target 41211; HLA-B*56:01; MAGEA8; ENSG00000156009; TAA
YPSLHEEAL

SEQ ID NO: 41212 - protein, 9 aa, Homo sapiens
  misc_feature: Table A; Target 41212; HLA-C*01:02; MAGEA8; ENSG00000156009; TAA
YPSLHEEAL

SEQ ID NO: 41213 - protein, 9 aa, Homo sapiens
  misc_feature: Table A; Target 41213; HLA-C*03:03; MAGEA8; ENSG00000156009; TAA
YPSLHEEAL

SEQ ID NO: 41214 - protein, 9 aa, Homo sapiens
  misc_feature: Table A; Target 41214; HLA-C*03:04; MAGEA8; ENSG00000156009; TAA
YPSLHEEAL

SEQ ID NO: 41215 - protein, 9 aa, Homo sapiens
  misc_feature: Table A; Target 41215; HLA-C*05:01; MAGEA8; ENSG00000156009; TAA
YPSLHEEAL

SEQ ID NO: 41216 - protein, 9 aa, Homo sapiens
  misc_feature: Table A; Target 41216; HLA-C*07:02; MAGEA8; ENSG00000156009; TAA
YPSLHEEAL

SEQ ID NO: 41217 - protein, 9 aa, Homo sapiens
  misc_feature: Table A; Target 41217; HLA-C*14:02; MAGEA8; ENSG00000156009; TAA
YPSLHEEAL

SEQ ID NO: 41218 - protein, 9 aa, Homo sapiens
  misc_feature: Table A; Target 41218; HLA-C*16:01; MAGEA8; ENSG00000156009; TAA
YPSLHEEAL

SEQ ID NO: 41219 - protein, 8 aa, Homo sapiens
  misc_feature: Table A; Target 41219; HLA-B*13:02; MAGEA8; ENSG00000156009; TAA
YQIKEPVT

SEQ ID NO: 41220 - protein, 9 aa, Homo sapiens
  misc_feature: Table A; Target 41220; HLA-A*02:01; MAGEA8; ENSG00000156009; TAA
YQIKEPVTK

SEQ ID NO: 41221 - protein, 9 aa, Homo sapiens
  misc_feature: Table A; Target 41221; HLA-A*02:03; MAGEA8; ENSG00000156009; TAA
YQIKEPVTK

SEQ ID NO: 41222 - protein, 9 aa, Homo sapiens
  misc_feature: Table A; Target 41222; HLA-A*03:01; MAGEA8; ENSG00000156009; TAA
YQIKEPVTK

SEQ ID NO: 41223 - protein, 9 aa, Homo sapiens
  misc_feature: Table A; Target 41223; HLA-A*03:02; MAGEA8; ENSG00000156009; TAA
YQIKEPVTK

SEQ ID NO: 41224 - protein, 9 aa, Homo sapiens
  misc_feature: Table A; Target 41224; HLA-A*11:01; MAGEA8; ENSG00000156009; TAA
YQIKEPVTK

SEQ ID NO: 41225 - protein, 9 aa, Homo sapiens
  misc_feature: Table A; Target 41225; HLA-A*31:01; MAGEA8; ENSG00000156009; TAA
YQIKEPVTK

SEQ ID NO: 41226 - protein, 9 aa, Homo sapiens
  misc_feature: Table A; Target 41226; HLA-A*32:01; MAGEA8; ENSG00000156009; TAA
YQIKEPVTK

SEQ ID NO: 41227 - protein, 9 aa, Homo sapiens
  misc_feature: Table A; Target 41227; HLA-A*68:02; MAGEA8; ENSG00000156009; TAA
YQIKEPVTK

SEQ ID NO: 41228 - protein, 9 aa, Homo sapiens
  misc_feature: Table A; Target 41228; HLA-B*13:02; MAGEA8; ENSG00000156009; TAA
YQIKEPVTK

SEQ ID NO: 41229 - protein, 9 aa, Homo sapiens
  misc_feature: Table A; Target 41229; HLA-B*15:01; MAGEA8; ENSG00000156009; TAA
YQIKEPVTK

SEQ ID NO: 41230 - protein, 9 aa, Homo sapiens
  misc_feature: Table A; Target 41230; HLA-B*15:03; MAGEA8; ENSG00000156009; TAA
YQIKEPVTK

SEQ ID NO: 41231 - protein, 9 aa, Homo sapiens
  misc_feature: Table A; Target 41231; HLA-B*27:05; MAGEA8; ENSG00000156009; TAA
YQIKEPVTK

SEQ ID NO: 41232 - protein, 9 aa, Homo sapiens
  misc_feature: Table A; Target 41232; HLA-B*38:01; MAGEA8; ENSG00000156009; TAA
YQIKEPVTK

SEQ ID NO: 41233 - protein, 9 aa, Homo sapiens
  misc_feature: Table A; Target 41233; HLA-B*39:01; MAGEA8; ENSG00000156009; TAA
YQIKEPVTK

SEQ ID NO: 41234 - protein, 9 aa, Homo sapiens
  misc_feature: Table A; Target 41234; HLA-B*40:02; MAGEA8; ENSG00000156009; TAA
YQIKEPVTK

SEQ ID NO: 41235 - protein, 9 aa, Homo sapiens
  misc_feature: Table A; Target 41235; HLA-B*49:01; MAGEA8; ENSG00000156009; TAA
YQIKEPVTK

SEQ ID NO: 41236 - protein, 9 aa, Homo sapiens
  misc_feature: Table A; Target 41236; HLA-B*57:01; MAGEA8; ENSG00000156009; TAA
YQIKEPVTK

SEQ ID NO: 41237 - protein, 9 aa, Homo sapiens
  misc_feature: Table A; Target 41237; HLA-B*58:01; MAGEA8; ENSG00000156009; TAA
YQIKEPVTK

SEQ ID NO: 41238 - protein, 9 aa, Homo sapiens
  misc_feature: Table A; Target 41238; HLA-C*02:02; MAGEA8; ENSG00000156009; TAA
YQIKEPVTK

SEQ ID NO: 41239 - protein, 9 aa, Homo sapiens
  misc_feature: Table A; Target 41239; HLA-C*03:03; MAGEA8; ENSG00000156009; TAA
YQIKEPVTK

SEQ ID NO: 41240 - protein, 9 aa, Homo sapiens
  misc_feature: Table A; Target 41240; HLA-C*03:04; MAGEA8; ENSG00000156009; TAA
YQIKEPVTK

SEQ ID NO: 41241 - protein, 9 aa, Homo sapiens
  misc_feature: Table A; Target 41241; HLA-C*05:01; MAGEA8; ENSG00000156009; TAA
YQIKEPVTK

SEQ ID NO: 41242 - protein, 9 aa, Homo sapiens
  misc_feature: Table A; Target 41242; HLA-C*06:02; MAGEA8; ENSG00000156009; TAA
YQIKEPVTK

SEQ ID NO: 41243 - protein, 9 aa, Homo sapiens
  misc_feature: Table A; Target 41243; HLA-C*07:04; MAGEA8; ENSG00000156009; TAA
YQIKEPVTK

SEQ ID NO: 41244 - protein, 9 aa, Homo sapiens
  misc_feature: Table A; Target 41244; HLA-C*07:06; MAGEA8; ENSG00000156009; TAA
YQIKEPVTK

SEQ ID NO: 41245 - protein, 9 aa, Homo sapiens
  misc_feature: Table A; Target 41245; HLA-C*12:03; MAGEA8; ENSG00000156009; TAA
YQIKEPVTK

SEQ ID NO: 41246 - protein, 9 aa, Homo sapiens
  misc_feature: Table A; Target 41246; HLA-C*16:04; MAGEA8; ENSG00000156009; TAA
YQIKEPVTK

SEQ ID NO: 41247 - protein, 10 aa, Homo sapiens
  misc_feature: Table A; Target 41247; HLA-A*02:03; MAGEA8; ENSG00000156009; TAA
YQIKEPVTKA

SEQ ID NO: 41248 - protein, 10 aa, Homo sapiens
  misc_feature: Table A; Target 41248; HLA-B*13:02; MAGEA8; ENSG00000156009; TAA
YQIKEPVTKA

SEQ ID NO: 41249 - protein, 10 aa, Homo sapiens
  misc_feature: Table A; Target 41249; HLA-B*54:01; MAGEA8; ENSG00000156009; TAA
YQIKEPVTKA

SEQ ID NO: 41250 - protein, 11 aa, Homo sapiens
  misc_feature: Table A; Target 41250; HLA-B*27:05; MAGEA8; ENSG00000156009; TAA
YRQAPGSDPVR

SEQ ID NO: 41251 - protein, 8 aa, Homo sapiens
  misc_feature: Table A; Target 41251; HLA-A*02:03; MAGEA8; ENSG00000156009; TAA
YVKVLEHV

SEQ ID NO: 41252 - protein, 8 aa, Homo sapiens
  misc_feature: Table A; Target 41252; HLA-B*08:01; MAGEA8; ENSG00000156009; TAA
YVKVLEHV

SEQ ID NO: 41253 - protein, 8 aa, Homo sapiens
  misc_feature: Table A; Target 41253; HLA-B*54:01; MAGEA8; ENSG00000156009; TAA
YVKVLEHV

SEQ ID NO: 41254 - protein, 9 aa, Homo sapiens
  misc_feature: Table A; Target 41254; HLA-A*02:01; MAGEA8; ENSG00000156009; TAA
YVKVLEHVV

SEQ ID NO: 41255 - protein, 9 aa, Homo sapiens
  misc_feature: Table A; Target 41255; HLA-A*02:03; MAGEA8; ENSG00000156009; TAA
YVKVLEHVV

SEQ ID NO: 41256 - protein, 9 aa, Homo sapiens
  misc_feature: Table A; Target 41256; HLA-A*02:04; MAGEA8; ENSG00000156009; TAA
YVKVLEHVV

SEQ ID NO: 41257 - protein, 9 aa, Homo sapiens
  misc_feature: Table A; Target 41257; HLA-A*02:07; MAGEA8; ENSG00000156009; TAA
YVKVLEHVV

SEQ ID NO: 41258 - protein, 9 aa, Homo sapiens
  misc_feature: Table A; Target 41258; HLA-A*30:01; MAGEA8; ENSG00000156009; TAA
YVKVLEHVV

SEQ ID NO: 41259 - protein, 9 aa, Homo sapiens
  misc_feature: Table A; Target 41259; HLA-A*32:01; MAGEA8; ENSG00000156009; TAA
YVKVLEHVV

SEQ ID NO: 41260 - protein, 9 aa, Homo sapiens
  misc_feature: Table A; Target 41260; HLA-A*68:02; MAGEA8; ENSG00000156009; TAA
YVKVLEHVV

SEQ ID NO: 41261 - protein, 9 aa, Homo sapiens
  misc_feature: Table A; Target 41261; HLA-B*08:01; MAGEA8; ENSG00000156009; TAA
YVKVLEHVV

SEQ ID NO: 41262 - protein, 9 aa, Homo sapiens
  misc_feature: Table A; Target 41262; HLA-B*13:02; MAGEA8; ENSG00000156009; TAA
YVKVLEHVV

SEQ ID NO: 41263 - protein, 9 aa, Homo sapiens
  misc_feature: Table A; Target 41263; HLA-B*40:02; MAGEA8; ENSG00000156009; TAA
YVKVLEHVV

SEQ ID NO: 41264 - protein, 9 aa, Homo sapiens
  misc_feature: Table A; Target 41264; HLA-B*51:01; MAGEA8; ENSG00000156009; TAA
YVKVLEHVV

SEQ ID NO: 41265 - protein, 9 aa, Homo sapiens
  misc_feature: Table A; Target 41265; HLA-B*54:01; MAGEA8; ENSG00000156009; TAA
YVKVLEHVV

SEQ ID NO: 41266 - protein, 9 aa, Homo sapiens
  misc_feature: Table A; Target 41266; HLA-C*02:02; MAGEA8; ENSG00000156009; TAA
YVKVLEHVV

SEQ ID NO: 41267 - protein, 9 aa, Homo sapiens
  misc_feature: Table A; Target 41267; HLA-C*04:01; MAGEA8; ENSG00000156009; TAA
YVKVLEHVV

SEQ ID NO: 41268 - protein, 9 aa, Homo sapiens
  misc_feature: Table A; Target 41268; HLA-C*07:01; MAGEA8; ENSG00000156009; TAA
YVKVLEHVV

SEQ ID NO: 41269 - protein, 9 aa, Homo sapiens
  misc_feature: Table A; Target 41269; HLA-C*07:04; MAGEA8; ENSG00000156009; TAA
YVKVLEHVV

SEQ ID NO: 41270 - protein, 9 aa, Homo sapiens
  misc_feature: Table A; Target 41270; HLA-C*12:03; MAGEA8; ENSG00000156009; TAA
YVKVLEHVV

SEQ ID NO: 41271 - protein, 9 aa, Homo sapiens
  misc_feature: Table A; Target 41271; HLA-C*16:02; MAGEA8; ENSG00000156009; TAA
YVKVLEHVV

SEQ ID NO: 41272 - protein, 10 aa, Homo sapiens
  misc_feature: Table A; Target 41272; HLA-A*31:01; MAGEA8; ENSG00000156009; TAA
YVKVLEHVVR

SEQ ID NO: 41273 - protein, 10 aa, Homo sapiens
  misc_feature: Table A; Target 41273; HLA-A*33:01; MAGEA8; ENSG00000156009; TAA
YVKVLEHVVR

SEQ ID NO: 41274 - protein, 8 aa, Homo sapiens
  misc_feature: Table A; Target 41274; HLA-B*51:01; MAGEA8,MAGEA9; ENSG00000156009,ENSG00000123584; TAA,CTA
DPAGHSYI

SEQ ID NO: 41275 - protein, 9 aa, Homo sapiens
  misc_feature: Table A; Target 41275; HLA-B*08:01; MAGEA8,MAGEA9; ENSG00000156009,ENSG00000123584; TAA,CTA
DPAGHSYIL

SEQ ID NO: 41276 - protein, 9 aa, Homo sapiens
  misc_feature: Table A; Target 41276; HLA-B*35:01; MAGEA8,MAGEA9; ENSG00000156009,ENSG00000123584; TAA,CTA
DPAGHSYIL

SEQ ID NO: 41277 - protein, 9 aa, Homo sapiens
  misc_feature: Table A; Target 41277; HLA-B*35:03; MAGEA8,MAGEA9; ENSG00000156009,ENSG00000123584; TAA,CTA
DPAGHSYIL

SEQ ID NO: 41278 - protein, 9 aa, Homo sapiens
  misc_feature: Table A; Target 41278; HLA-C*07:02; MAGEA8,MAGEA9; ENSG00000156009,ENSG00000123584; TAA,CTA
DPAGHSYIL

SEQ ID NO: 41279 - protein, 10 aa, Homo sapiens
  misc_feature: Table A; Target 41279; HLA-A*26:01; MAGEA8,MAGEA9; ENSG00000156009,ENSG00000123584; TAA,CTA
DVKEVDPAGH

SEQ ID NO: 41280 - protein, 10 aa, Homo sapiens
  misc_feature: Table A; Target 41280; HLA-A*68:01; MAGEA8,MAGEA9; ENSG00000156009,ENSG00000123584; TAA,CTA
DVKEVDPAGH

SEQ ID NO: 41281 - protein, 9 aa, Homo sapiens
  misc_feature: Table A; Target 41281; HLA-A*25:01; MAGEA8,MAGEA9; ENSG00000156009,ENSG00000123584; TAA,CTA
EVDPAGHSY

SEQ ID NO: 41282 - protein, 9 aa, Homo sapiens
  misc_feature: Table A; Target 41282; HLA-A*26:01; MAGEA8,MAGEA9; ENSG00000156009,ENSG00000123584; TAA,CTA
EVDPAGHSY

SEQ ID NO: 41283 - protein, 9 aa, Homo sapiens
  misc_feature: Table A; Target 41283; HLA-A*29:02; MAGEA8,MAGEA9; ENSG00000156009,ENSG00000123584; TAA,CTA
EVDPAGHSY

SEQ ID NO: 41284 - protein, 9 aa, Homo sapiens
  misc_feature: Table A; Target 41284; HLA-A*30:02; MAGEA8,MAGEA9; ENSG00000156009,ENSG00000123584; TAA,CTA
EVDPAGHSY

SEQ ID NO: 41285 - protein, 9 aa, Homo sapiens
  misc_feature: Table A; Target 41285; HLA-A*32:01; MAGEA8,MAGEA9; ENSG00000156009,ENSG00000123584; TAA,CTA
EVDPAGHSY

SEQ ID NO: 41286 - protein, 9 aa, Homo sapiens
  misc_feature: Table A; Target 41286; HLA-A*33:03; MAGEA8,MAGEA9; ENSG00000156009,ENSG00000123584; TAA,CTA
EVDPAGHSY

SEQ ID NO: 41287 - protein, 9 aa, Homo sapiens
  misc_feature: Table A; Target 41287; HLA-A*68:01; MAGEA8,MAGEA9; ENSG00000156009,ENSG00000123584; TAA,CTA
EVDPAGHSY

SEQ ID NO: 41288 - protein, 9 aa, Homo sapiens
  misc_feature: Table A; Target 41288; HLA-B*15:01; MAGEA8,MAGEA9; ENSG00000156009,ENSG00000123584; TAA,CTA
EVDPAGHSY

SEQ ID NO: 41289 - protein, 9 aa, Homo sapiens
  misc_feature: Table A; Target 41289; HLA-B*15:03; MAGEA8,MAGEA9; ENSG00000156009,ENSG00000123584; TAA,CTA
EVDPAGHSY

SEQ ID NO: 41290 - protein, 9 aa, Homo sapiens
  misc_feature: Table A; Target 41290; HLA-B*18:01; MAGEA8,MAGEA9; ENSG00000156009,ENSG00000123584; TAA,CTA
EVDPAGHSY

SEQ ID NO: 41291 - protein, 9 aa, Homo sapiens
  misc_feature: Table A; Target 41291; HLA-B*35:01; MAGEA8,MAGEA9; ENSG00000156009,ENSG00000123584; TAA,CTA
EVDPAGHSY

SEQ ID NO: 41292 - protein, 9 aa, Homo sapiens
  misc_feature: Table A; Target 41292; HLA-B*39:01; MAGEA8,MAGEA9; ENSG00000156009,ENSG00000123584; TAA,CTA
EVDPAGHSY

SEQ ID NO: 41293 - protein, 9 aa, Homo sapiens
  misc_feature: Table A; Target 41293; HLA-B*44:02; MAGEA8,MAGEA9; ENSG00000156009,ENSG00000123584; TAA,CTA
EVDPAGHSY

SEQ ID NO: 41294 - protein, 9 aa, Homo sapiens
  misc_feature: Table A; Target 41294; HLA-B*44:03; MAGEA8,MAGEA9; ENSG00000156009,ENSG00000123584; TAA,CTA
EVDPAGHSY

SEQ ID NO: 41295 - protein, 9 aa, Homo sapiens
  misc_feature: Table A; Target 41295; HLA-B*58:01; MAGEA8,MAGEA9; ENSG00000156009,ENSG00000123584; TAA,CTA
EVDPAGHSY

SEQ ID NO: 41296 - protein, 9 aa, Homo sapiens
  misc_feature: Table A; Target 41296; HLA-C*03:03; MAGEA8,MAGEA9; ENSG00000156009,ENSG00000123584; TAA,CTA
EVDPAGHSY

SEQ ID NO: 41297 - protein, 9 aa, Homo sapiens
  misc_feature: Table A; Target 41297; HLA-C*03:04; MAGEA8,MAGEA9; ENSG00000156009,ENSG00000123584; TAA,CTA
EVDPAGHSY

SEQ ID NO: 41298 - protein, 9 aa, Homo sapiens
  misc_feature: Table A; Target 41298; HLA-C*05:01; MAGEA8,MAGEA9; ENSG00000156009,ENSG00000123584; TAA,CTA
EVDPAGHSY

SEQ ID NO: 41299 - protein, 9 aa, Homo sapiens
  misc_feature: Table A; Target 41299; HLA-C*07:04; MAGEA8,MAGEA9; ENSG00000156009,ENSG00000123584; TAA,CTA
EVDPAGHSY

SEQ ID NO: 41300 - protein, 9 aa, Homo sapiens
  misc_feature: Table A; Target 41300; HLA-C*07:06; MAGEA8,MAGEA9; ENSG00000156009,ENSG00000123584; TAA,CTA
EVDPAGHSY

SEQ ID NO: 41301 - protein, 9 aa, Homo sapiens
  misc_feature: Table A; Target 41301; HLA-C*16:01; MAGEA8,MAGEA9; ENSG00000156009,ENSG00000123584; TAA,CTA
EVDPAGHSY

SEQ ID NO: 41302 - protein, 9 aa, Homo sapiens
  misc_feature: Table A; Target 41302; HLA-C*16:02; MAGEA8,MAGEA9; ENSG00000156009,ENSG00000123584; TAA,CTA
EVDPAGHSY

SEQ ID NO: 41303 - protein, 9 aa, Homo sapiens
  misc_feature: Table A; Target 41303; HLA-C*16:04; MAGEA8,MAGEA9; ENSG00000156009,ENSG00000123584; TAA,CTA
EVDPAGHSY

SEQ ID NO: 41304 - protein, 10 aa, Homo sapiens
  misc_feature: Table A; Target 41304; HLA-A*01:01; MAGEA8,MAGEA9; ENSG00000156009,ENSG00000123584; TAA,CTA
EVDPAGHSYI

SEQ ID NO: 41305 - protein, 10 aa, Homo sapiens
  misc_feature: Table A; Target 41305; HLA-A*25:01; MAGEA8,MAGEA9; ENSG00000156009,ENSG00000123584; TAA,CTA
EVDPAGHSYI

SEQ ID NO: 41306 - protein, 10 aa, Homo sapiens
  misc_feature: Table A; Target 41306; HLA-A*68:02; MAGEA8,MAGEA9; ENSG00000156009,ENSG00000123584; TAA,CTA
EVDPAGHSYI

SEQ ID NO: 41307 - protein, 10 aa, Homo sapiens
  misc_feature: Table A; Target 41307; HLA-B*38:01; MAGEA8,MAGEA9; ENSG00000156009,ENSG00000123584; TAA,CTA
EVDPAGHSYI

SEQ ID NO: 41308 - protein, 10 aa, Homo sapiens
  misc_feature: Table A; Target 41308; HLA-C*05:01; MAGEA8,MAGEA9; ENSG00000156009,ENSG00000123584; TAA,CTA
EVDPAGHSYI

SEQ ID NO: 41309 - protein, 11 aa, Homo sapiens
  misc_feature: Table A; Target 41309; HLA-A*01:01; MAGEA8,MAGEA9; ENSG00000156009,ENSG00000123584; TAA,CTA
EVDPAGHSYIL

SEQ ID NO: 41310 - protein, 11 aa, Homo sapiens
  misc_feature: Table A; Target 41310; HLA-A*02:07; MAGEA8,MAGEA9; ENSG00000156009,ENSG00000123584; TAA,CTA
EVDPAGHSYIL

SEQ ID NO: 41311 - protein, 11 aa, Homo sapiens
  misc_feature: Table A; Target 41311; HLA-B*38:01; MAGEA8,MAGEA9; ENSG00000156009,ENSG00000123584; TAA,CTA
EVDPAGHSYIL

SEQ ID NO: 41312 - protein, 9 aa, Homo sapiens
  misc_feature: Table A; Target 41312; HLA-B*37:01; MAGEA8,MAGEA9; ENSG00000156009,ENSG00000123584; TAA,CTA
KEPVTKAEM

SEQ ID NO: 41313 - protein, 9 aa, Homo sapiens
  misc_feature: Table A; Target 41313; HLA-B*40:01; MAGEA8,MAGEA9; ENSG00000156009,ENSG00000123584; TAA,CTA
KEPVTKAEM

SEQ ID NO: 41314 - protein, 10 aa, Homo sapiens
  misc_feature: Table A; Target 41314; HLA-B*40:01; MAGEA8,MAGEA9; ENSG00000156009,ENSG00000123584; TAA,CTA
KEPVTKAEML

SEQ ID NO: 41315 - protein, 10 aa, Homo sapiens
  misc_feature: Table A; Target 41315; HLA-A*25:01; MAGEA8,MAGEA9; ENSG00000156009,ENSG00000123584; TAA,CTA
KEVDPAGHSY

SEQ ID NO: 41316 - protein, 10 aa, Homo sapiens
  misc_feature: Table A; Target 41316; HLA-A*29:02; MAGEA8,MAGEA9; ENSG00000156009,ENSG00000123584; TAA,CTA
KEVDPAGHSY

SEQ ID NO: 41317 - protein, 10 aa, Homo sapiens
  misc_feature: Table A; Target 41317; HLA-A*30:01; MAGEA8,MAGEA9; ENSG00000156009,ENSG00000123584; TAA,CTA
KEVDPAGHSY

SEQ ID NO: 41318 - protein, 10 aa, Homo sapiens
  misc_feature: Table A; Target 41318; HLA-A*30:02; MAGEA8,MAGEA9; ENSG00000156009,ENSG00000123584; TAA,CTA
KEVDPAGHSY

SEQ ID NO: 41319 - protein, 10 aa, Homo sapiens
  misc_feature: Table A; Target 41319; HLA-A*32:01; MAGEA8,MAGEA9; ENSG00000156009,ENSG00000123584; TAA,CTA
KEVDPAGHSY

SEQ ID NO: 41320 - protein, 10 aa, Homo sapiens
  misc_feature: Table A; Target 41320; HLA-B*15:01; MAGEA8,MAGEA9; ENSG00000156009,ENSG00000123584; TAA,CTA
KEVDPAGHSY

SEQ ID NO: 41321 - protein, 10 aa, Homo sapiens
  misc_feature: Table A; Target 41321; HLA-B*15:03; MAGEA8,MAGEA9; ENSG00000156009,ENSG00000123584; TAA,CTA
KEVDPAGHSY

SEQ ID NO: 41322 - protein, 10 aa, Homo sapiens
  misc_feature: Table A; Target 41322; HLA-B*18:01; MAGEA8,MAGEA9; ENSG00000156009,ENSG00000123584; TAA,CTA
KEVDPAGHSY

SEQ ID NO: 41323 - protein, 10 aa, Homo sapiens
  misc_feature: Table A; Target 41323; HLA-B*27:02; MAGEA8,MAGEA9; ENSG00000156009,ENSG00000123584; TAA,CTA
KEVDPAGHSY

SEQ ID NO: 41324 - protein, 10 aa, Homo sapiens
  misc_feature: Table A; Target 41324; HLA-B*27:05; MAGEA8,MAGEA9; ENSG00000156009,ENSG00000123584; TAA,CTA
KEVDPAGHSY

SEQ ID NO: 41325 - protein, 10 aa, Homo sapiens
  misc_feature: Table A; Target 41325; HLA-B*37:01; MAGEA8,MAGEA9; ENSG00000156009,ENSG00000123584; TAA,CTA
KEVDPAGHSY

SEQ ID NO: 41326 - protein, 10 aa, Homo sapiens
  misc_feature: Table A; Target 41326; HLA-B*40:01; MAGEA8,MAGEA9; ENSG00000156009,ENSG00000123584; TAA,CTA
KEVDPAGHSY

SEQ ID NO: 41327 - protein, 10 aa, Homo sapiens
  misc_feature: Table A; Target 41327; HLA-C*02:02; MAGEA8,MAGEA9; ENSG00000156009,ENSG00000123584; TAA,CTA
KEVDPAGHSY

SEQ ID NO: 41328 - protein, 10 aa, Homo sapiens
  misc_feature: Table A; Target 41328; HLA-C*16:01; MAGEA8,MAGEA9; ENSG00000156009,ENSG00000123584; TAA,CTA
KEVDPAGHSY

SEQ ID NO: 41329 - protein, 10 aa, Homo sapiens
  misc_feature: Table A; Target 41329; HLA-C*16:02; MAGEA8,MAGEA9; ENSG00000156009,ENSG00000123584; TAA,CTA
KEVDPAGHSY

SEQ ID NO: 41330 - protein, 10 aa, Homo sapiens
  misc_feature: Table A; Target 41330; HLA-C*16:04; MAGEA8,MAGEA9; ENSG00000156009,ENSG00000123584; TAA,CTA
KEVDPAGHSY

SEQ ID NO: 41331 - protein, 11 aa, Homo sapiens
  misc_feature: Table A; Target 41331; HLA-B*40:01; MAGEA8,MAGEA9; ENSG00000156009,ENSG00000123584; TAA,CTA
KEVDPAGHSYI

SEQ ID NO: 41332 - protein, 11 aa, Homo sapiens
  misc_feature: Table A; Target 41332; HLA-B*49:01; MAGEA8,MAGEA9; ENSG00000156009,ENSG00000123584; TAA,CTA
KEVDPAGHSYI

SEQ ID NO: 41333 - protein, 8 aa, Homo sapiens
  misc_feature: Table A; Target 41333; HLA-B*18:01; MAGEA8,MAGEA9; ENSG00000156009,ENSG00000123584; TAA,CTA
LESVIKNY

SEQ ID NO: 41334 - protein, 8 aa, Homo sapiens
  misc_feature: Table A; Target 41334; HLA-A*30:02; MAGEA8,MAGEA9; ENSG00000156009,ENSG00000123584; TAA,CTA
VDPAGHSY

SEQ ID NO: 41335 - protein, 8 aa, Homo sapiens
  misc_feature: Table A; Target 41335; HLA-B*37:01; MAGEA8,MAGEA9; ENSG00000156009,ENSG00000123584; TAA,CTA
VDPAGHSY

SEQ ID NO: 41336 - protein, 8 aa, Homo sapiens
  misc_feature: Table A; Target 41336; HLA-C*01:02; MAGEA8,MAGEA9; ENSG00000156009,ENSG00000123584; TAA,CTA
VDPAGHSY

SEQ ID NO: 41337 - protein, 8 aa, Homo sapiens
  misc_feature: Table A; Target 41337; HLA-C*14:02; MAGEA8,MAGEA9; ENSG00000156009,ENSG00000123584; TAA,CTA
VDPAGHSY

SEQ ID NO: 41338 - protein, 11 aa, Homo sapiens
  misc_feature: Table A; Target 41338; HLA-B*15:03; MAGEA8,MAGEA9; ENSG00000156009,ENSG00000123584; TAA,CTA
VKEVDPAGHSY

SEQ ID NO: 41339 - protein, 9 aa, Homo sapiens
  misc_feature: Table A; Target 41339; HLA-A*01:01; MAGEA8,MAGEA9; ENSG00000156009,ENSG00000123584; TAA,CTA
WVQENYLEY

SEQ ID NO: 41340 - protein, 9 aa, Homo sapiens
  misc_feature: Table A; Target 41340; HLA-A*25:01; MAGEA8,MAGEA9; ENSG00000156009,ENSG00000123584; TAA,CTA
WVQENYLEY

SEQ ID NO: 41341 - protein, 9 aa, Homo sapiens
  misc_feature: Table A; Target 41341; HLA-A*26:01; MAGEA8,MAGEA9; ENSG00000156009,ENSG00000123584; TAA,CTA
WVQENYLEY

SEQ ID NO: 41342 - protein, 9 aa, Homo sapiens
  misc_feature: Table A; Target 41342; HLA-A*29:02; MAGEA8,MAGEA9; ENSG00000156009,ENSG00000123584; TAA,CTA
WVQENYLEY

SEQ ID NO: 41343 - protein, 9 aa, Homo sapiens
  misc_feature: Table A; Target 41343; HLA-A*30:02; MAGEA8,MAGEA9; ENSG00000156009,ENSG00000123584; TAA,CTA
WVQENYLEY

SEQ ID NO: 41344 - protein, 9 aa, Homo sapiens
  misc_feature: Table A; Target 41344; HLA-B*15:01; MAGEA8,MAGEA9; ENSG00000156009,ENSG00000123584; TAA,CTA
WVQENYLEY

SEQ ID NO: 41345 - protein, 9 aa, Homo sapiens
  misc_feature: Table A; Target 41345; HLA-B*35:01; MAGEA8,MAGEA9; ENSG00000156009,ENSG00000123584; TAA,CTA
WVQENYLEY

SEQ ID NO: 41346 - protein, 8 aa, Homo sapiens
  misc_feature: Table A; Target 41346; HLA-B*18:01; MAGEA8,MAGEC2; ENSG00000156009,ENSG00000046774; TAA,CTA
DEKVAELV

SEQ ID NO: 41347 - protein, 8 aa, Homo sapiens
  misc_feature: Table A; Target 41347; HLA-B*37:01; MAGEA8,MAGEC2; ENSG00000156009,ENSG00000046774; TAA,CTA
LDEKVAEL

SEQ ID NO: 41348 - protein, 11 aa, Homo sapiens
  misc_feature: Table A; Target 41348; HLA-B*44:02; MAGEA9; ENSG00000123584; CTA
AELVHFLLHKY

SEQ ID NO: 41349 - protein, 11 aa, Homo sapiens
  misc_feature: Table A; Target 41349; HLA-B*44:02; MAGEA9; ENSG00000123584; CTA
AEMLESVIKNY

SEQ ID NO: 41350 - protein, 11 aa, Homo sapiens
  misc_feature: Table A; Target 41350; HLA-B*44:03; MAGEA9; ENSG00000123584; CTA
AEMLESVIKNY

SEQ ID NO: 41351 - protein, 8 aa, Homo sapiens
  misc_feature: Table A; Target 41351; HLA-B*49:01; MAGEA9; ENSG00000123584; CTA
AETSYEKV

SEQ ID NO: 41352 - protein, 9 aa, Homo sapiens
  misc_feature: Table A; Target 41352; HLA-A*30:01; MAGEA9; ENSG00000123584; CTA
AETSYEKVI

SEQ ID NO: 41353 - protein, 9 aa, Homo sapiens
  misc_feature: Table A; Target 41353; HLA-B*13:02; MAGEA9; ENSG00000123584; CTA
AETSYEKVI

SEQ ID NO: 41354 - protein, 9 aa, Homo sapiens
  misc_feature: Table A; Target 41354; HLA-B*27:02; MAGEA9; ENSG00000123584; CTA
AETSYEKVI

SEQ ID NO: 41355 - protein, 9 aa, Homo sapiens
  misc_feature: Table A; Target 41355; HLA-B*40:01; MAGEA9; ENSG00000123584; CTA
AETSYEKVI

SEQ ID NO: 41356 - protein, 9 aa, Homo sapiens
  misc_feature: Table A; Target 41356; HLA-B*40:02; MAGEA9; ENSG00000123584; CTA
AETSYEKVI

SEQ ID NO: 41357 - protein, 9 aa, Homo sapiens
  misc_feature: Table A; Target 41357; HLA-B*44:02; MAGEA9; ENSG00000123584; CTA
AETSYEKVI

SEQ ID NO: 41358 - protein, 9 aa, Homo sapiens
  misc_feature: Table A; Target 41358; HLA-B*44:03; MAGEA9; ENSG00000123584; CTA
AETSYEKVI

SEQ ID NO: 41359 - protein, 9 aa, Homo sapiens
  misc_feature: Table A; Target 41359; HLA-B*49:01; MAGEA9; ENSG00000123584; CTA
AETSYEKVI

SEQ ID NO: 41360 - protein, 9 aa, Homo sapiens
  misc_feature: Table A; Target 41360; HLA-C*16:02; MAGEA9; ENSG00000123584; CTA
AETSYEKVI

SEQ ID NO: 41361 - protein, 9 aa, Homo sapiens
  misc_feature: Table A; Target 41361; HLA-C*16:04; MAGEA9; ENSG00000123584; CTA
AETSYEKVI

SEQ ID NO: 41362 - protein, 11 aa, Homo sapiens
  misc_feature: Table A; Target 41362; HLA-B*44:02; MAGEA9; ENSG00000123584; CTA
AETSYEKVINY

SEQ ID NO: 41363 - protein, 11 aa, Homo sapiens
  misc_feature: Table A; Target 41363; HLA-B*44:03; MAGEA9; ENSG00000123584; CTA
AETSYEKVINY

SEQ ID NO: 41364 - protein, 9 aa, Homo sapiens
  misc_feature: Table A; Target 41364; HLA-A*03:02; MAGEA9; ENSG00000123584; CTA
AHAETSYEK

SEQ ID NO: 41365 - protein, 9 aa, Homo sapiens
  misc_feature: Table A; Target 41365; HLA-A*11:01; MAGEA9; ENSG00000123584; CTA
AHAETSYEK

SEQ ID NO: 41366 - protein, 9 aa, Homo sapiens
  misc_feature: Table A; Target 41366; HLA-B*27:05; MAGEA9; ENSG00000123584; CTA
AHAETSYEK

SEQ ID NO: 41367 - protein, 10 aa, Homo sapiens
  misc_feature: Table A; Target 41367; HLA-B*38:01; MAGEA9; ENSG00000123584; CTA
AHAETSYEKV

SEQ ID NO: 41368 - protein, 11 aa, Homo sapiens
  misc_feature: Table A; Target 41368; HLA-B*38:01; MAGEA9; ENSG00000123584; CTA
AHAETSYEKVI

SEQ ID NO: 41369 - protein, 9 aa, Homo sapiens
  misc_feature: Table A; Target 41369; HLA-A*02:03; MAGEA9; ENSG00000123584; CTA
ALKLKVAEL

SEQ ID NO: 41370 - protein, 9 aa, Homo sapiens
  misc_feature: Table A; Target 41370; HLA-A*02:04; MAGEA9; ENSG00000123584; CTA
ALKLKVAEL

SEQ ID NO: 41371 - protein, 9 aa, Homo sapiens
  misc_feature: Table A; Target 41371; HLA-B*08:01; MAGEA9; ENSG00000123584; CTA
ALKLKVAEL

SEQ ID NO: 41372 - protein, 9 aa, Homo sapiens
  misc_feature: Table A; Target 41372; HLA-A*02:01; MAGEA9; ENSG00000123584; CTA
ALLIIVLGV

SEQ ID NO: 41373 - protein, 9 aa, Homo sapiens
  misc_feature: Table A; Target 41373; HLA-A*02:03; MAGEA9; ENSG00000123584; CTA
ALLIIVLGV

SEQ ID NO: 41374 - protein, 9 aa, Homo sapiens
  misc_feature: Table A; Target 41374; HLA-A*02:04; MAGEA9; ENSG00000123584; CTA
ALLIIVLGV

SEQ ID NO: 41375 - protein, 9 aa, Homo sapiens
  misc_feature: Table A; Target 41375; HLA-A*02:07; MAGEA9; ENSG00000123584; CTA
ALLIIVLGV

SEQ ID NO: 41376 - protein, 8 aa, Homo sapiens
  misc_feature: Table A; Target 41376; HLA-A*30:02; MAGEA9; ENSG00000123584; CTA
ALSVMGVY

SEQ ID NO: 41377 - protein, 8 aa, Homo sapiens
  misc_feature: Table A; Target 41377; HLA-B*15:01; MAGEA9; ENSG00000123584; CTA
ALSVMGVY

SEQ ID NO: 41378 - protein, 8 aa, Homo sapiens
  misc_feature: Table A; Target 41378; HLA-B*15:03; MAGEA9; ENSG00000123584; CTA
ALSVMGVY

SEQ ID NO: 41379 - protein, 9 aa, Homo sapiens
  misc_feature: Table A; Target 41379; HLA-A*02:01; MAGEA9; ENSG00000123584; CTA
ALSVMGVYV

SEQ ID NO: 41380 - protein, 9 aa, Homo sapiens
  misc_feature: Table A; Target 41380; HLA-A*02:03; MAGEA9; ENSG00000123584; CTA
ALSVMGVYV

SEQ ID NO: 41381 - protein, 9 aa, Homo sapiens
  misc_feature: Table A; Target 41381; HLA-A*02:04; MAGEA9; ENSG00000123584; CTA
ALSVMGVYV

SEQ ID NO: 41382 - protein, 9 aa, Homo sapiens
  misc_feature: Table A; Target 41382; HLA-A*02:07; MAGEA9; ENSG00000123584; CTA
ALSVMGVYV

SEQ ID NO: 41383 - protein, 9 aa, Homo sapiens
  misc_feature: Table A; Target 41383; HLA-B*13:02; MAGEA9; ENSG00000123584; CTA
ALSVMGVYV

SEQ ID NO: 41384 - protein, 9 aa, Homo sapiens
  misc_feature: Table A; Target 41384; HLA-B*37:01; MAGEA9; ENSG00000123584; CTA
ALSVMGVYV

SEQ ID NO: 41385 - protein, 9 aa, Homo sapiens
  misc_feature: Table A; Target 41385; HLA-B*55:01; MAGEA9; ENSG00000123584; CTA
ALSVMGVYV

SEQ ID NO: 41386 - protein, 9 aa, Homo sapiens
  misc_feature: Table A; Target 41386; HLA-C*04:01; MAGEA9; ENSG00000123584; CTA
ALSVMGVYV

SEQ ID NO: 41387 - protein, 11 aa, Homo sapiens
  misc_feature: Table A; Target 41387; HLA-A*03:01; MAGEA9; ENSG00000123584; CTA
ALSVMGVYVGK

SEQ ID NO: 41388 - protein, 11 aa, Homo sapiens
  misc_feature: Table A; Target 41388; HLA-A*03:02; MAGEA9; ENSG00000123584; CTA
ALSVMGVYVGK

SEQ ID NO: 41389 - protein, 9 aa, Homo sapiens
  misc_feature: Table A; Target 41389; HLA-B*54:01; MAGEA9; ENSG00000123584; CTA
APEEVIWEA

SEQ ID NO: 41390 - protein, 9 aa, Homo sapiens
  misc_feature: Table A; Target 41390; HLA-B*56:01; MAGEA9; ENSG00000123584; CTA
APEEVIWEA

SEQ ID NO: 41391 - protein, 10 aa, Homo sapiens
  misc_feature: Table A; Target 41391; HLA-B*35:03; MAGEA9; ENSG00000123584; CTA
APEEVIWEAL

SEQ ID NO: 41392 - protein, 8 aa, Homo sapiens
  misc_feature: Table A; Target 41392; HLA-A*30:02; MAGEA9; ENSG00000123584; CTA
ASSSISVY

SEQ ID NO: 41393 - protein, 8 aa, Homo sapiens
  misc_feature: Table A; Target 41393; HLA-B*15:01; MAGEA9; ENSG00000123584; CTA
ASSSISVY

SEQ ID NO: 41394 - protein, 8 aa, Homo sapiens
  misc_feature: Table A; Target 41394; HLA-B*15:03; MAGEA9; ENSG00000123584; CTA
ASSSISVY

SEQ ID NO: 41395 - protein, 8 aa, Homo sapiens
  misc_feature: Table A; Target 41395; HLA-C*16:01; MAGEA9; ENSG00000123584; CTA
ASSSISVY

SEQ ID NO: 41396 - protein, 9 aa, Homo sapiens
  misc_feature: Table A; Target 41396; HLA-A*01:01; MAGEA9; ENSG00000123584; CTA
ASSSISVYY

SEQ ID NO: 41397 - protein, 9 aa, Homo sapiens
  misc_feature: Table A; Target 41397; HLA-A*03:01; MAGEA9; ENSG00000123584; CTA
ASSSISVYY

SEQ ID NO: 41398 - protein, 9 aa, Homo sapiens
  misc_feature: Table A; Target 41398; HLA-A*03:02; MAGEA9; ENSG00000123584; CTA
ASSSISVYY

SEQ ID NO: 41399 - protein, 9 aa, Homo sapiens
  misc_feature: Table A; Target 41399; HLA-A*11:01; MAGEA9; ENSG00000123584; CTA
ASSSISVYY

SEQ ID NO: 41400 - protein, 9 aa, Homo sapiens
  misc_feature: Table A; Target 41400; HLA-A*26:01; MAGEA9; ENSG00000123584; CTA
ASSSISVYY

SEQ ID NO: 41401 - protein, 9 aa, Homo sapiens
  misc_feature: Table A; Target 41401; HLA-A*29:02; MAGEA9; ENSG00000123584; CTA
ASSSISVYY

SEQ ID NO: 41402 - protein, 9 aa, Homo sapiens
  misc_feature: Table A; Target 41402; HLA-A*30:02; MAGEA9; ENSG00000123584; CTA
ASSSISVYY

SEQ ID NO: 41403 - protein, 9 aa, Homo sapiens
  misc_feature: Table A; Target 41403; HLA-A*31:01; MAGEA9; ENSG00000123584; CTA
ASSSISVYY

SEQ ID NO: 41404 - protein, 9 aa, Homo sapiens
  misc_feature: Table A; Target 41404; HLA-A*32:01; MAGEA9; ENSG00000123584; CTA
ASSSISVYY

SEQ ID NO: 41405 - protein, 9 aa, Homo sapiens
  misc_feature: Table A; Target 41405; HLA-A*68:01; MAGEA9; ENSG00000123584; CTA
ASSSISVYY

SEQ ID NO: 41406 - protein, 9 aa, Homo sapiens
  misc_feature: Table A; Target 41406; HLA-B*15:01; MAGEA9; ENSG00000123584; CTA
ASSSISVYY

SEQ ID NO: 41407 - protein, 9 aa, Homo sapiens
  misc_feature: Table A; Target 41407; HLA-B*15:03; MAGEA9; ENSG00000123584; CTA
ASSSISVYY

SEQ ID NO: 41408 - protein, 9 aa, Homo sapiens
  misc_feature: Table A; Target 41408; HLA-B*27:02; MAGEA9; ENSG00000123584; CTA
ASSSISVYY

SEQ ID NO: 41409 - protein, 9 aa, Homo sapiens
  misc_feature: Table A; Target 41409; HLA-B*27:05; MAGEA9; ENSG00000123584; CTA
ASSSISVYY

SEQ ID NO: 41410 - protein, 9 aa, Homo sapiens
  misc_feature: Table A; Target 41410; HLA-B*44:03; MAGEA9; ENSG00000123584; CTA
ASSSISVYY

SEQ ID NO: 41411 - protein, 9 aa, Homo sapiens
  misc_feature: Table A; Target 41411; HLA-B*46:01; MAGEA9; ENSG00000123584; CTA
ASSSISVYY

SEQ ID NO: 41412 - protein, 9 aa, Homo sapiens
  misc_feature: Table A; Target 41412; HLA-B*57:01; MAGEA9; ENSG00000123584; CTA
ASSSISVYY

SEQ ID NO: 41413 - protein, 9 aa, Homo sapiens
  misc_feature: Table A; Target 41413; HLA-B*58:01; MAGEA9; ENSG00000123584; CTA
ASSSISVYY

SEQ ID NO: 41414 - protein, 9 aa, Homo sapiens
  misc_feature: Table A; Target 41414; HLA-C*02:02; MAGEA9; ENSG00000123584; CTA
ASSSISVYY

SEQ ID NO: 41415 - protein, 9 aa, Homo sapiens
  misc_feature: Table A; Target 41415; HLA-C*07:04; MAGEA9; ENSG00000123584; CTA
ASSSISVYY

SEQ ID NO: 41416 - protein, 9 aa, Homo sapiens
  misc_feature: Table A; Target 41416; HLA-C*07:06; MAGEA9; ENSG00000123584; CTA
ASSSISVYY

SEQ ID NO: 41417 - protein, 9 aa, Homo sapiens
  misc_feature: Table A; Target 41417; HLA-C*12:03; MAGEA9; ENSG00000123584; CTA
ASSSISVYY

SEQ ID NO: 41418 - protein, 9 aa, Homo sapiens
  misc_feature: Table A; Target 41418; HLA-C*16:01; MAGEA9; ENSG00000123584; CTA
ASSSISVYY

SEQ ID NO: 41419 - protein, 9 aa, Homo sapiens
  misc_feature: Table A; Target 41419; HLA-C*16:02; MAGEA9; ENSG00000123584; CTA
ASSSISVYY

SEQ ID NO: 41420 - protein, 9 aa, Homo sapiens
  misc_feature: Table A; Target 41420; HLA-C*16:04; MAGEA9; ENSG00000123584; CTA
ASSSISVYY

SEQ ID NO: 41421 - protein, 9 aa, Homo sapiens
  misc_feature: Table A; Target 41421; HLA-B*35:01; MAGEA9; ENSG00000123584; CTA
DPAQLEFMF

SEQ ID NO: 41422 - protein, 9 aa, Homo sapiens
  misc_feature: Table A; Target 41422; HLA-B*35:03; MAGEA9; ENSG00000123584; CTA
DPAQLEFMF

SEQ ID NO: 41423 - protein, 10 aa, Homo sapiens
  misc_feature: Table A; Target 41423; HLA-A*25:01; MAGEA9; ENSG00000123584; CTA
DSMLGDGHSM

SEQ ID NO: 41424 - protein, 10 aa, Homo sapiens
  misc_feature: Table A; Target 41424; HLA-A*26:01; MAGEA9; ENSG00000123584; CTA
DSMLGDGHSM

SEQ ID NO: 41425 - protein, 10 aa, Homo sapiens
  misc_feature: Table A; Target 41425; HLA-A*33:01; MAGEA9; ENSG00000123584; CTA
DSMLGDGHSM

SEQ ID NO: 41426 - protein, 10 aa, Homo sapiens
  misc_feature: Table A; Target 41426; HLA-C*03:03; MAGEA9; ENSG00000123584; CTA
DSMLGDGHSM

SEQ ID NO: 41427 - protein, 10 aa, Homo sapiens
  misc_feature: Table A; Target 41427; HLA-C*07:06; MAGEA9; ENSG00000123584; CTA
DSMLGDGHSM

SEQ ID NO: 41428 - protein, 8 aa, Homo sapiens
  misc_feature: Table A; Target 41428; HLA-B*51:01; MAGEA9; ENSG00000123584; CTA
EALSVMGV

SEQ ID NO: 41429 - protein, 9 aa, Homo sapiens
  misc_feature: Table A; Target 41429; HLA-A*25:01; MAGEA9; ENSG00000123584; CTA
EALSVMGVY

SEQ ID NO: 41430 - protein, 9 aa, Homo sapiens
  misc_feature: Table A; Target 41430; HLA-A*26:01; MAGEA9; ENSG00000123584; CTA
EALSVMGVY

SEQ ID NO: 41431 - protein, 9 aa, Homo sapiens
  misc_feature: Table A; Target 41431; HLA-A*29:02; MAGEA9; ENSG00000123584; CTA
EALSVMGVY

SEQ ID NO: 41432 - protein, 9 aa, Homo sapiens
  misc_feature: Table A; Target 41432; HLA-A*30:02; MAGEA9; ENSG00000123584; CTA
EALSVMGVY

SEQ ID NO: 41433 - protein, 9 aa, Homo sapiens
  misc_feature: Table A; Target 41433; HLA-A*33:01; MAGEA9; ENSG00000123584; CTA
EALSVMGVY

SEQ ID NO: 41434 - protein, 9 aa, Homo sapiens
  misc_feature: Table A; Target 41434; HLA-A*33:03; MAGEA9; ENSG00000123584; CTA
EALSVMGVY

SEQ ID NO: 41435 - protein, 9 aa, Homo sapiens
  misc_feature: Table A; Target 41435; HLA-B*18:01; MAGEA9; ENSG00000123584; CTA
EALSVMGVY

SEQ ID NO: 41436 - protein, 9 aa, Homo sapiens
  misc_feature: Table A; Target 41436; HLA-B*35:01; MAGEA9; ENSG00000123584; CTA
EALSVMGVY

SEQ ID NO: 41437 - protein, 9 aa, Homo sapiens
  misc_feature: Table A; Target 41437; HLA-C*07:06; MAGEA9; ENSG00000123584; CTA
EALSVMGVY

SEQ ID NO: 41438 - protein, 10 aa, Homo sapiens
  misc_feature: Table A; Target 41438; HLA-A*68:01; MAGEA9; ENSG00000123584; CTA
EALSVMGVYV

SEQ ID NO: 41439 - protein, 10 aa, Homo sapiens
  misc_feature: Table A; Target 41439; HLA-A*68:02; MAGEA9; ENSG00000123584; CTA
EALSVMGVYV

SEQ ID NO: 41440 - protein, 9 aa, Homo sapiens
  misc_feature: Table A; Target 41440; HLA-B*35:03; MAGEA9; ENSG00000123584; CTA
EAQGEDLGL

SEQ ID NO: 41441 - protein, 9 aa, Homo sapiens
  misc_feature: Table A; Target 41441; HLA-B*49:01; MAGEA9; ENSG00000123584; CTA
EEEEPSSSV

SEQ ID NO: 41442 - protein, 8 aa, Homo sapiens
  misc_feature: Table A; Target 41442; HLA-B*18:01; MAGEA9; ENSG00000123584; CTA
EEVIWEAL

SEQ ID NO: 41443 - protein, 10 aa, Homo sapiens
  misc_feature: Table A; Target 41443; HLA-A*29:02; MAGEA9; ENSG00000123584; CTA
ELVHFLLHKY

SEQ ID NO: 41444 - protein, 9 aa, Homo sapiens
  misc_feature: Table A; Target 41444; HLA-A*26:01; MAGEA9; ENSG00000123584; CTA
EPICYPSLY

SEQ ID NO: 41445 - protein, 9 aa, Homo sapiens
  misc_feature: Table A; Target 41445; HLA-B*35:01; MAGEA9; ENSG00000123584; CTA
EPICYPSLY

SEQ ID NO: 41446 - protein, 9 aa, Homo sapiens
  misc_feature: Table A; Target 41446; HLA-A*33:03; MAGEA9; ENSG00000123584; CTA
ESVIKNYKR

SEQ ID NO: 41447 - protein, 9 aa, Homo sapiens
  misc_feature: Table A; Target 41447; HLA-A*68:01; MAGEA9; ENSG00000123584; CTA
ESVIKNYKR

SEQ ID NO: 41448 - protein, 10 aa, Homo sapiens
  misc_feature: Table A; Target 41448; HLA-A*01:01; MAGEA9; ENSG00000123584; CTA
ETSYEKVINY

SEQ ID NO: 41449 - protein, 10 aa, Homo sapiens
  misc_feature: Table A; Target 41449; HLA-A*25:01; MAGEA9; ENSG00000123584; CTA
ETSYEKVINY

SEQ ID NO: 41450 - protein, 10 aa, Homo sapiens
  misc_feature: Table A; Target 41450; HLA-A*26:01; MAGEA9; ENSG00000123584; CTA
ETSYEKVINY

SEQ ID NO: 41451 - protein, 10 aa, Homo sapiens
  misc_feature: Table A; Target 41451; HLA-A*33:03; MAGEA9; ENSG00000123584; CTA
ETSYEKVINY

SEQ ID NO: 41452 - protein, 10 aa, Homo sapiens
  misc_feature: Table A; Target 41452; HLA-A*68:01; MAGEA9; ENSG00000123584; CTA
ETSYEKVINY

SEQ ID NO: 41453 - protein, 11 aa, Homo sapiens
  misc_feature: Table A; Target 41453; HLA-A*68:01; MAGEA9; ENSG00000123584; CTA
ETSYEKVINYL

SEQ ID NO: 41454 - protein, 11 aa, Homo sapiens
  misc_feature: Table A; Target 41454; HLA-A*68:02; MAGEA9; ENSG00000123584; CTA
ETSYEKVINYL

SEQ ID NO: 41455 - protein, 9 aa, Homo sapiens
  misc_feature: Table A; Target 41455; HLA-A*01:01; MAGEA9; ENSG00000123584; CTA
EVDPAGHSY

SEQ ID NO: 41456 - protein, 9 aa, Homo sapiens
  misc_feature: Table A; Target 41456; HLA-A*25:01; MAGEA9; ENSG00000123584; CTA
EVIWEALSV

SEQ ID NO: 41457 - protein, 9 aa, Homo sapiens
  misc_feature: Table A; Target 41457; HLA-A*26:01; MAGEA9; ENSG00000123584; CTA
EVIWEALSV

SEQ ID NO: 41458 - protein, 9 aa, Homo sapiens
  misc_feature: Table A; Target 41458; HLA-A*68:02; MAGEA9; ENSG00000123584; CTA
EVIWEALSV

SEQ ID NO: 41459 - protein, 10 aa, Homo sapiens
  misc_feature: Table A; Target 41459; HLA-A*25:01; MAGEA9; ENSG00000123584; CTA
EVIWEALSVM

SEQ ID NO: 41460 - protein, 10 aa, Homo sapiens
  misc_feature: Table A; Target 41460; HLA-A*26:01; MAGEA9; ENSG00000123584; CTA
EVIWEALSVM

SEQ ID NO: 41461 - protein, 10 aa, Homo sapiens
  misc_feature: Table A; Target 41461; HLA-A*26:01; MAGEA9; ENSG00000123584; CTA
EVLGEEQEGV

SEQ ID NO: 41462 - protein, 8 aa, Homo sapiens
  misc_feature: Table A; Target 41462; HLA-C*03:04; MAGEA9; ENSG00000123584; CTA
FGTDVKEV

SEQ ID NO: 41463 - protein, 8 aa, Homo sapiens
  misc_feature: Table A; Target 41463; HLA-C*16:01; MAGEA9; ENSG00000123584; CTA
FGTDVKEV

SEQ ID NO: 41464 - protein, 8 aa, Homo sapiens
  misc_feature: Table A; Target 41464; HLA-C*16:02; MAGEA9; ENSG00000123584; CTA
FGTDVKEV

SEQ ID NO: 41465 - protein, 9 aa, Homo sapiens
  misc_feature: Table A; Target 41465; HLA-A*02:01; MAGEA9; ENSG00000123584; CTA
FMFQEALKL

SEQ ID NO: 41466 - protein, 9 aa, Homo sapiens
  misc_feature: Table A; Target 41466; HLA-A*02:03; MAGEA9; ENSG00000123584; CTA
FMFQEALKL

SEQ ID NO: 41467 - protein, 9 aa, Homo sapiens
  misc_feature: Table A; Target 41467; HLA-A*02:04; MAGEA9; ENSG00000123584; CTA
FMFQEALKL

SEQ ID NO: 41468 - protein, 9 aa, Homo sapiens
  misc_feature: Table A; Target 41468; HLA-A*02:07; MAGEA9; ENSG00000123584; CTA
FMFQEALKL

SEQ ID NO: 41469 - protein, 9 aa, Homo sapiens
  misc_feature: Table A; Target 41469; HLA-A*29:02; MAGEA9; ENSG00000123584; CTA
FMFQEALKL

SEQ ID NO: 41470 - protein, 9 aa, Homo sapiens
  misc_feature: Table A; Target 41470; HLA-B*13:02; MAGEA9; ENSG00000123584; CTA
FMFQEALKL

SEQ ID NO: 41471 - protein, 9 aa, Homo sapiens
  misc_feature: Table A; Target 41471; HLA-C*02:02; MAGEA9; ENSG00000123584; CTA
FMFQEALKL

SEQ ID NO: 41472 - protein, 8 aa, Homo sapiens
  misc_feature: Table A; Target 41472; HLA-B*54:01; MAGEA9; ENSG00000123584; CTA
FPVIFGKA

SEQ ID NO: 41473 - protein, 8 aa, Homo sapiens
  misc_feature: Table A; Target 41473; HLA-B*56:01; MAGEA9; ENSG00000123584; CTA
FPVIFGKA

SEQ ID NO: 41474 - protein, 9 aa, Homo sapiens
  misc_feature: Table A; Target 41474; HLA-B*54:01; MAGEA9; ENSG00000123584; CTA
FPVIFGKAS

SEQ ID NO: 41475 - protein, 11 aa, Homo sapiens
  misc_feature: Table A; Target 41475; HLA-B*35:01; MAGEA9; ENSG00000123584; CTA
FPVIFGKASEF

SEQ ID NO: 41476 - protein, 9 aa, Homo sapiens
  misc_feature: Table A; Target 41476; HLA-B*13:02; MAGEA9; ENSG00000123584; CTA
FQEALKLKV

SEQ ID NO: 41477 - protein, 9 aa, Homo sapiens
  misc_feature: Table A; Target 41477; HLA-A*24:02; MAGEA9; ENSG00000123584; CTA
FYGEPRKLL

SEQ ID NO: 41478 - protein, 9 aa, Homo sapiens
  misc_feature: Table A; Target 41478; HLA-A*25:01; MAGEA9; ENSG00000123584; CTA
GASSSISVY

SEQ ID NO: 41479 - protein, 9 aa, Homo sapiens
  misc_feature: Table A; Target 41479; HLA-A*26:01; MAGEA9; ENSG00000123584; CTA
GASSSISVY

SEQ ID NO: 41480 - protein, 9 aa, Homo sapiens
  misc_feature: Table A; Target 41480; HLA-A*29:02; MAGEA9; ENSG00000123584; CTA
GASSSISVY

SEQ ID NO: 41481 - protein, 9 aa, Homo sapiens
  misc_feature: Table A; Target 41481; HLA-A*30:02; MAGEA9; ENSG00000123584; CTA
GASSSISVY

SEQ ID NO: 41482 - protein, 9 aa, Homo sapiens
  misc_feature: Table A; Target 41482; HLA-A*32:01; MAGEA9; ENSG00000123584; CTA
GASSSISVY

SEQ ID NO: 41483 - protein, 9 aa, Homo sapiens
  misc_feature: Table A; Target 41483; HLA-B*15:01; MAGEA9; ENSG00000123584; CTA
GASSSISVY

SEQ ID NO: 41484 - protein, 9 aa, Homo sapiens
  misc_feature: Table A; Target 41484; HLA-B*15:03; MAGEA9; ENSG00000123584; CTA
GASSSISVY

SEQ ID NO: 41485 - protein, 9 aa, Homo sapiens
  misc_feature: Table A; Target 41485; HLA-B*27:02; MAGEA9; ENSG00000123584; CTA
GASSSISVY

SEQ ID NO: 41486 - protein, 9 aa, Homo sapiens
  misc_feature: Table A; Target 41486; HLA-B*27:05; MAGEA9; ENSG00000123584; CTA
GASSSISVY

SEQ ID NO: 41487 - protein, 9 aa, Homo sapiens
  misc_feature: Table A; Target 41487; HLA-B*35:01; MAGEA9; ENSG00000123584; CTA
GASSSISVY

SEQ ID NO: 41488 - protein, 9 aa, Homo sapiens
  misc_feature: Table A; Target 41488; HLA-B*39:01; MAGEA9; ENSG00000123584; CTA
GASSSISVY

SEQ ID NO: 41489 - protein, 9 aa, Homo sapiens
  misc_feature: Table A; Target 41489; HLA-B*46:01; MAGEA9; ENSG00000123584; CTA
GASSSISVY

SEQ ID NO: 41490 - protein, 9 aa, Homo sapiens
  misc_feature: Table A; Target 41490; HLA-B*58:01; MAGEA9; ENSG00000123584; CTA
GASSSISVY

SEQ ID NO: 41491 - protein, 9 aa, Homo sapiens
  misc_feature: Table A; Target 41491; HLA-C*02:02; MAGEA9; ENSG00000123584; CTA
GASSSISVY

SEQ ID NO: 41492 - protein, 9 aa, Homo sapiens
  misc_feature: Table A; Target 41492; HLA-C*03:03; MAGEA9; ENSG00000123584; CTA
GASSSISVY

SEQ ID NO: 41493 - protein, 9 aa, Homo sapiens
  misc_feature: Table A; Target 41493; HLA-C*07:04; MAGEA9; ENSG00000123584; CTA
GASSSISVY

SEQ ID NO: 41494 - protein, 9 aa, Homo sapiens
  misc_feature: Table A; Target 41494; HLA-C*07:06; MAGEA9; ENSG00000123584; CTA
GASSSISVY

SEQ ID NO: 41495 - protein, 9 aa, Homo sapiens
  misc_feature: Table A; Target 41495; HLA-C*12:03; MAGEA9; ENSG00000123584; CTA
GASSSISVY

SEQ ID NO: 41496 - protein, 9 aa, Homo sapiens
  misc_feature: Table A; Target 41496; HLA-C*14:02; MAGEA9; ENSG00000123584; CTA
GASSSISVY

SEQ ID NO: 41497 - protein, 9 aa, Homo sapiens
  misc_feature: Table A; Target 41497; HLA-C*16:01; MAGEA9; ENSG00000123584; CTA
GASSSISVY

SEQ ID NO: 41498 - protein, 9 aa, Homo sapiens
  misc_feature: Table A; Target 41498; HLA-C*16:02; MAGEA9; ENSG00000123584; CTA
GASSSISVY

SEQ ID NO: 41499 - protein, 9 aa, Homo sapiens
  misc_feature: Table A; Target 41499; HLA-C*16:04; MAGEA9; ENSG00000123584; CTA
GASSSISVY

SEQ ID NO: 41500 - protein, 10 aa, Homo sapiens
  misc_feature: Table A; Target 41500; HLA-A*01:01; MAGEA9; ENSG00000123584; CTA
GASSSISVYY

SEQ ID NO: 41501 - protein, 10 aa, Homo sapiens
  misc_feature: Table A; Target 41501; HLA-A*26:01; MAGEA9; ENSG00000123584; CTA
GASSSISVYY

SEQ ID NO: 41502 - protein, 10 aa, Homo sapiens
  misc_feature: Table A; Target 41502; HLA-A*29:02; MAGEA9; ENSG00000123584; CTA
GASSSISVYY

SEQ ID NO: 41503 - protein, 10 aa, Homo sapiens
  misc_feature: Table A; Target 41503; HLA-A*30:02; MAGEA9; ENSG00000123584; CTA
GASSSISVYY

SEQ ID NO: 41504 - protein, 10 aa, Homo sapiens
  misc_feature: Table A; Target 41504; HLA-B*15:01; MAGEA9; ENSG00000123584; CTA
GASSSISVYY

SEQ ID NO: 41505 - protein, 10 aa, Homo sapiens
  misc_feature: Table A; Target 41505; HLA-B*15:03; MAGEA9; ENSG00000123584; CTA
GASSSISVYY

SEQ ID NO: 41506 - protein, 10 aa, Homo sapiens
  misc_feature: Table A; Target 41506; HLA-B*27:05; MAGEA9; ENSG00000123584; CTA
GASSSISVYY

SEQ ID NO: 41507 - protein, 10 aa, Homo sapiens
  misc_feature: Table A; Target 41507; HLA-B*58:01; MAGEA9; ENSG00000123584; CTA
GASSSISVYY

SEQ ID NO: 41508 - protein, 10 aa, Homo sapiens
  misc_feature: Table A; Target 41508; HLA-C*02:02; MAGEA9; ENSG00000123584; CTA
GASSSISVYY

SEQ ID NO: 41509 - protein, 10 aa, Homo sapiens
  misc_feature: Table A; Target 41509; HLA-C*03:03; MAGEA9; ENSG00000123584; CTA
GASSSISVYY

SEQ ID NO: 41510 - protein, 10 aa, Homo sapiens
  misc_feature: Table A; Target 41510; HLA-C*07:04; MAGEA9; ENSG00000123584; CTA
GASSSISVYY

SEQ ID NO: 41511 - protein, 10 aa, Homo sapiens
  misc_feature: Table A; Target 41511; HLA-C*07:06; MAGEA9; ENSG00000123584; CTA
GASSSISVYY

SEQ ID NO: 41512 - protein, 10 aa, Homo sapiens
  misc_feature: Table A; Target 41512; HLA-C*12:03; MAGEA9; ENSG00000123584; CTA
GASSSISVYY

SEQ ID NO: 41513 - protein, 10 aa, Homo sapiens
  misc_feature: Table A; Target 41513; HLA-C*16:04; MAGEA9; ENSG00000123584; CTA
GASSSISVYY

SEQ ID NO: 41514 - protein, 8 aa, Homo sapiens
  misc_feature: Table A; Target 41514; HLA-A*03:02; MAGEA9; ENSG00000123584; CTA
GDGHSMPK

SEQ ID NO: 41515 - protein, 8 aa, Homo sapiens
  misc_feature: Table A; Target 41515; HLA-A*11:01; MAGEA9; ENSG00000123584; CTA
GDGHSMPK

SEQ ID NO: 41516 - protein, 9 aa, Homo sapiens
  misc_feature: Table A; Target 41516; HLA-B*49:01; MAGEA9; ENSG00000123584; CTA
GEDLGLMGA

SEQ ID NO: 41517 - protein, 10 aa, Homo sapiens
  misc_feature: Table A; Target 41517; HLA-A*30:02; MAGEA9; ENSG00000123584; CTA
GGASSSISVY

SEQ ID NO: 41518 - protein, 10 aa, Homo sapiens
  misc_feature: Table A; Target 41518; HLA-B*15:01; MAGEA9; ENSG00000123584; CTA
GGASSSISVY

SEQ ID NO: 41519 - protein, 11 aa, Homo sapiens
  misc_feature: Table A; Target 41519; HLA-A*30:02; MAGEA9; ENSG00000123584; CTA
GGASSSISVYY

SEQ ID NO: 41520 - protein, 11 aa, Homo sapiens
  misc_feature: Table A; Target 41520; HLA-B*27:05; MAGEA9; ENSG00000123584; CTA
GGASSSISVYY

SEQ ID NO: 41521 - protein, 9 aa, Homo sapiens
  misc_feature: Table A; Target 41521; HLA-B*38:01; MAGEA9; ENSG00000123584; CTA
GHSMPKAAL

SEQ ID NO: 41522 - protein, 9 aa, Homo sapiens
  misc_feature: Table A; Target 41522; HLA-B*39:01; MAGEA9; ENSG00000123584; CTA
GHSMPKAAL

SEQ ID NO: 41523 - protein, 9 aa, Homo sapiens
  misc_feature: Table A; Target 41523; HLA-A*01:01; MAGEA9; ENSG00000123584; CTA
GSDPAHYEF

SEQ ID NO: 41524 - protein, 9 aa, Homo sapiens
  misc_feature: Table A; Target 41524; HLA-A*30:02; MAGEA9; ENSG00000123584; CTA
GSDPAHYEF

SEQ ID NO: 41525 - protein, 9 aa, Homo sapiens
  misc_feature: Table A; Target 41525; HLA-A*32:01; MAGEA9; ENSG00000123584; CTA
GSDPAHYEF

SEQ ID NO: 41526 - protein, 9 aa, Homo sapiens
  misc_feature: Table A; Target 41526; HLA-B*15:01; MAGEA9; ENSG00000123584; CTA
GSDPAHYEF

SEQ ID NO: 41527 - protein, 9 aa, Homo sapiens
  misc_feature: Table A; Target 41527; HLA-B*57:01; MAGEA9; ENSG00000123584; CTA
GSDPAHYEF

SEQ ID NO: 41528 - protein, 9 aa, Homo sapiens
  misc_feature: Table A; Target 41528; HLA-B*58:01; MAGEA9; ENSG00000123584; CTA
GSDPAHYEF

SEQ ID NO: 41529 - protein, 9 aa, Homo sapiens
  misc_feature: Table A; Target 41529; HLA-C*02:02; MAGEA9; ENSG00000123584; CTA
GSDPAHYEF

SEQ ID NO: 41530 - protein, 9 aa, Homo sapiens
  misc_feature: Table A; Target 41530; HLA-C*03:04; MAGEA9; ENSG00000123584; CTA
GSDPAHYEF

SEQ ID NO: 41531 - protein, 9 aa, Homo sapiens
  misc_feature: Table A; Target 41531; HLA-C*05:01; MAGEA9; ENSG00000123584; CTA
GSDPAHYEF

SEQ ID NO: 41532 - protein, 9 aa, Homo sapiens
  misc_feature: Table A; Target 41532; HLA-C*16:01; MAGEA9; ENSG00000123584; CTA
GSDPAHYEF

SEQ ID NO: 41533 - protein, 9 aa, Homo sapiens
  misc_feature: Table A; Target 41533; HLA-C*16:04; MAGEA9; ENSG00000123584; CTA
GSDPAHYEF

SEQ ID NO: 41534 - protein, 10 aa, Homo sapiens
  misc_feature: Table A; Target 41534; HLA-A*01:01; MAGEA9; ENSG00000123584; CTA
GSDPAHYEFL

SEQ ID NO: 41535 - protein, 11 aa, Homo sapiens
  misc_feature: Table A; Target 41535; HLA-B*57:01; MAGEA9; ENSG00000123584; CTA
GSDPAHYEFLW

SEQ ID NO: 41536 - protein, 10 aa, Homo sapiens
  misc_feature: Table A; Target 41536; HLA-A*30:02; MAGEA9; ENSG00000123584; CTA
GSKAHAETSY

SEQ ID NO: 41537 - protein, 10 aa, Homo sapiens
  misc_feature: Table A; Target 41537; HLA-A*32:01; MAGEA9; ENSG00000123584; CTA
GSKAHAETSY

SEQ ID NO: 41538 - protein, 10 aa, Homo sapiens
  misc_feature: Table A; Target 41538; HLA-B*15:01; MAGEA9; ENSG00000123584; CTA
GSKAHAETSY

SEQ ID NO: 41539 - protein, 10 aa, Homo sapiens
  misc_feature: Table A; Target 41539; HLA-B*15:03; MAGEA9; ENSG00000123584; CTA
GSKAHAETSY

SEQ ID NO: 41540 - protein, 10 aa, Homo sapiens
  misc_feature: Table A; Target 41540; HLA-B*46:01; MAGEA9; ENSG00000123584; CTA
GSKAHAETSY

SEQ ID NO: 41541 - protein, 10 aa, Homo sapiens
  misc_feature: Table A; Target 41541; HLA-B*58:01; MAGEA9; ENSG00000123584; CTA
GSKAHAETSY

SEQ ID NO: 41542 - protein, 10 aa, Homo sapiens
  misc_feature: Table A; Target 41542; HLA-C*02:02; MAGEA9; ENSG00000123584; CTA
GVYVGKEHMF

SEQ ID NO: 41543 - protein, 11 aa, Homo sapiens
  misc_feature: Table A; Target 41543; HLA-A*29:02; MAGEA9; ENSG00000123584; CTA
GVYVGKEHMFY

SEQ ID NO: 41544 - protein, 8 aa, Homo sapiens
  misc_feature: Table A; Target 41544; HLA-B*27:02; MAGEA9; ENSG00000123584; CTA
HAETSYEK

SEQ ID NO: 41545 - protein, 9 aa, Homo sapiens
  misc_feature: Table A; Target 41545; HLA-A*01:01; MAGEA9; ENSG00000123584; CTA
HAETSYEKV

SEQ ID NO: 41546 - protein, 9 aa, Homo sapiens
  misc_feature: Table A; Target 41546; HLA-C*05:01; MAGEA9; ENSG00000123584; CTA
HAETSYEKV

SEQ ID NO: 41547 - protein, 8 aa, Homo sapiens
  misc_feature: Table A; Target 41547; HLA-B*08:01; MAGEA9; ENSG00000123584; CTA
HSMPKAAL

SEQ ID NO: 41548 - protein, 8 aa, Homo sapiens
  misc_feature: Table A; Target 41548; HLA-C*16:01; MAGEA9; ENSG00000123584; CTA
HSMPKAAL

SEQ ID NO: 41549 - protein, 9 aa, Homo sapiens
  misc_feature: Table A; Target 41549; HLA-B*08:01; MAGEA9; ENSG00000123584; CTA
HSMPKAALL

SEQ ID NO: 41550 - protein, 8 aa, Homo sapiens
  misc_feature: Table A; Target 41550; HLA-B*54:01; MAGEA9; ENSG00000123584; CTA
HSYILVTA

SEQ ID NO: 41551 - protein, 9 aa, Homo sapiens
  misc_feature: Table A; Target 41551; HLA-B*15:03; MAGEA9; ENSG00000123584; CTA
HSYILVTAL

SEQ ID NO: 41552 - protein, 9 aa, Homo sapiens
  misc_feature: Table A; Target 41552; HLA-B*18:01; MAGEA9; ENSG00000123584; CTA
HSYILVTAL

SEQ ID NO: 41553 - protein, 9 aa, Homo sapiens
  misc_feature: Table A; Target 41553; HLA-B*40:02; MAGEA9; ENSG00000123584; CTA
HSYILVTAL

SEQ ID NO: 41554 - protein, 9 aa, Homo sapiens
  misc_feature: Table A; Target 41554; HLA-B*51:01; MAGEA9; ENSG00000123584; CTA
HSYILVTAL

SEQ ID NO: 41555 - protein, 9 aa, Homo sapiens
  misc_feature: Table A; Target 41555; HLA-C*03:03; MAGEA9; ENSG00000123584; CTA
HSYILVTAL

SEQ ID NO: 41556 - protein, 9 aa, Homo sapiens
  misc_feature: Table A; Target 41556; HLA-C*03:04; MAGEA9; ENSG00000123584; CTA
HSYILVTAL

SEQ ID NO: 41557 - protein, 9 aa, Homo sapiens
  misc_feature: Table A; Target 41557; HLA-C*12:03; MAGEA9; ENSG00000123584; CTA
HSYILVTAL

SEQ ID NO: 41558 - protein, 8 aa, Homo sapiens
  misc_feature: Table A; Target 41558; HLA-A*23:01; MAGEA9; ENSG00000123584; CTA
IFGKASEF

SEQ ID NO: 41559 - protein, 8 aa, Homo sapiens
  misc_feature: Table A; Target 41559; HLA-C*14:02; MAGEA9; ENSG00000123584; CTA
IFGKASEF

SEQ ID NO: 41560 - protein, 8 aa, Homo sapiens
  misc_feature: Table A; Target 41560; HLA-B*57:01; MAGEA9; ENSG00000123584; CTA
ISVYYTLW

SEQ ID NO: 41561 - protein, 9 aa, Homo sapiens
  misc_feature: Table A; Target 41561; HLA-A*03:01; MAGEA9; ENSG00000123584; CTA
IVLGVILTK

SEQ ID NO: 41562 - protein, 9 aa, Homo sapiens
  misc_feature: Table A; Target 41562; HLA-A*03:02; MAGEA9; ENSG00000123584; CTA
IVLGVILTK

SEQ ID NO: 41563 - protein, 9 aa, Homo sapiens
  misc_feature: Table A; Target 41563; HLA-A*11:01; MAGEA9; ENSG00000123584; CTA
IVLGVILTK

SEQ ID NO: 41564 - protein, 9 aa, Homo sapiens
  misc_feature: Table A; Target 41564; HLA-B*57:01; MAGEA9; ENSG00000123584; CTA
IVLGVILTK

SEQ ID NO: 41565 - protein, 9 aa, Homo sapiens
  misc_feature: Table A; Target 41565; HLA-C*07:06; MAGEA9; ENSG00000123584; CTA
IVLGVILTK

SEQ ID NO: 41566 - protein, 8 aa, Homo sapiens
  misc_feature: Table A; Target 41566; HLA-A*30:02; MAGEA9; ENSG00000123584; CTA
KAHAETSY

SEQ ID NO: 41567 - protein, 8 aa, Homo sapiens
  misc_feature: Table A; Target 41567; HLA-A*32:01; MAGEA9; ENSG00000123584; CTA
KAHAETSY

SEQ ID NO: 41568 - protein, 8 aa, Homo sapiens
  misc_feature: Table A; Target 41568; HLA-B*15:01; MAGEA9; ENSG00000123584; CTA
KAHAETSY

SEQ ID NO: 41569 - protein, 8 aa, Homo sapiens
  misc_feature: Table A; Target 41569; HLA-B*46:01; MAGEA9; ENSG00000123584; CTA
KAHAETSY

SEQ ID NO: 41570 - protein, 8 aa, Homo sapiens
  misc_feature: Table A; Target 41570; HLA-B*58:01; MAGEA9; ENSG00000123584; CTA
KAHAETSY

SEQ ID NO: 41571 - protein, 8 aa, Homo sapiens
  misc_feature: Table A; Target 41571; HLA-C*16:02; MAGEA9; ENSG00000123584; CTA
KAHAETSY

SEQ ID NO: 41572 - protein, 9 aa, Homo sapiens
  misc_feature: Table A; Target 41572; HLA-B*13:02; MAGEA9; ENSG00000123584; CTA
KASEFMQVI

SEQ ID NO: 41573 - protein, 9 aa, Homo sapiens
  misc_feature: Table A; Target 41573; HLA-B*49:01; MAGEA9; ENSG00000123584; CTA
KASEFMQVI

SEQ ID NO: 41574 - protein, 9 aa, Homo sapiens
  misc_feature: Table A; Target 41574; HLA-B*58:01; MAGEA9; ENSG00000123584; CTA
KASEFMQVI

SEQ ID NO: 41575 - protein, 9 aa, Homo sapiens
  misc_feature: Table A; Target 41575; HLA-C*02:02; MAGEA9; ENSG00000123584; CTA
KASEFMQVI

SEQ ID NO: 41576 - protein, 9 aa, Homo sapiens
  misc_feature: Table A; Target 41576; HLA-C*12:03; MAGEA9; ENSG00000123584; CTA
KASEFMQVI

SEQ ID NO: 41577 - protein, 9 aa, Homo sapiens
  misc_feature: Table A; Target 41577; HLA-C*16:02; MAGEA9; ENSG00000123584; CTA
KASEFMQVI

SEQ ID NO: 41578 - protein, 9 aa, Homo sapiens
  misc_feature: Table A; Target 41578; HLA-C*16:04; MAGEA9; ENSG00000123584; CTA
KASEFMQVI

SEQ ID NO: 41579 - protein, 10 aa, Homo sapiens
  misc_feature: Table A; Target 41579; HLA-B*57:01; MAGEA9; ENSG00000123584; CTA
KASEFMQVIF

SEQ ID NO: 41580 - protein, 10 aa, Homo sapiens
  misc_feature: Table A; Target 41580; HLA-C*02:02; MAGEA9; ENSG00000123584; CTA
KASEFMQVIF

SEQ ID NO: 41581 - protein, 10 aa, Homo sapiens
  misc_feature: Table A; Target 41581; HLA-B*44:02; MAGEA9; ENSG00000123584; CTA
KEVDPAGHSY

SEQ ID NO: 41582 - protein, 10 aa, Homo sapiens
  misc_feature: Table A; Target 41582; HLA-B*44:03; MAGEA9; ENSG00000123584; CTA
KEVDPAGHSY

SEQ ID NO: 41583 - protein, 9 aa, Homo sapiens
  misc_feature: Table A; Target 41583; HLA-A*68:02; MAGEA9; ENSG00000123584; CTA
KVAELVHFL

SEQ ID NO: 41584 - protein, 9 aa, Homo sapiens
  misc_feature: Table A; Target 41584; HLA-A*02:01; MAGEA9; ENSG00000123584; CTA
KVINYLVML

SEQ ID NO: 41585 - protein, 9 aa, Homo sapiens
  misc_feature: Table A; Target 41585; HLA-A*02:04; MAGEA9; ENSG00000123584; CTA
KVINYLVML

SEQ ID NO: 41586 - protein, 9 aa, Homo sapiens
  misc_feature: Table A; Target 41586; HLA-A*02:07; MAGEA9; ENSG00000123584; CTA
KVINYLVML

SEQ ID NO: 41587 - protein, 8 aa, Homo sapiens
  misc_feature: Table A; Target 41587; HLA-B*40:01; MAGEA9; ENSG00000123584; CTA
LEAQGEDL

SEQ ID NO: 41588 - protein, 10 aa, Homo sapiens
  misc_feature: Table A; Target 41588; HLA-B*40:01; MAGEA9; ENSG00000123584; CTA
LEAQGEDLGL

SEQ ID NO: 41589 - protein, 8 aa, Homo sapiens
  misc_feature: Table A; Target 41589; HLA-B*18:01; MAGEA9; ENSG00000123584; CTA
LEFMFQEA

SEQ ID NO: 41590 - protein, 8 aa, Homo sapiens
  misc_feature: Table A; Target 41590; HLA-B*49:01; MAGEA9; ENSG00000123584; CTA
LEFMFQEA

SEQ ID NO: 41591 - protein, 9 aa, Homo sapiens
  misc_feature: Table A; Target 41591; HLA-A*30:01; MAGEA9; ENSG00000123584; CTA
LEFMFQEAL

SEQ ID NO: 41592 - protein, 9 aa, Homo sapiens
  misc_feature: Table A; Target 41592; HLA-B*18:01; MAGEA9; ENSG00000123584; CTA
LEFMFQEAL

SEQ ID NO: 41593 - protein, 9 aa, Homo sapiens
  misc_feature: Table A; Target 41593; HLA-B*40:01; MAGEA9; ENSG00000123584; CTA
LEFMFQEAL

SEQ ID NO: 41594 - protein, 9 aa, Homo sapiens
  misc_feature: Table A; Target 41594; HLA-B*40:02; MAGEA9; ENSG00000123584; CTA
LEFMFQEAL

SEQ ID NO: 41595 - protein, 9 aa, Homo sapiens
  misc_feature: Table A; Target 41595; HLA-B*49:01; MAGEA9; ENSG00000123584; CTA
LEFMFQEAL

SEQ ID NO: 41596 - protein, 9 aa, Homo sapiens
  misc_feature: Table A; Target 41596; HLA-A*03:01; MAGEA9; ENSG00000123584; CTA
LGDGHSMPK

SEQ ID NO: 41597 - protein, 9 aa, Homo sapiens
  misc_feature: Table A; Target 41597; HLA-A*03:02; MAGEA9; ENSG00000123584; CTA
LGDGHSMPK

SEQ ID NO: 41598 - protein, 9 aa, Homo sapiens
  misc_feature: Table A; Target 41598; HLA-A*11:01; MAGEA9; ENSG00000123584; CTA
LGDGHSMPK

SEQ ID NO: 41599 - protein, 10 aa, Homo sapiens
  misc_feature: Table A; Target 41599; HLA-B*27:02; MAGEA9; ENSG00000123584; CTA
LSVMGVYVGK

SEQ ID NO: 41600 - protein, 10 aa, Homo sapiens
  misc_feature: Table A; Target 41600; HLA-A*01:01; MAGEA9; ENSG00000123584; CTA
LTQDWVQENY

SEQ ID NO: 41601 - protein, 10 aa, Homo sapiens
  misc_feature: Table A; Target 41601; HLA-A*29:02; MAGEA9; ENSG00000123584; CTA
LTQDWVQENY

SEQ ID NO: 41602 - protein, 10 aa, Homo sapiens
  misc_feature: Table A; Target 41602; HLA-A*30:02; MAGEA9; ENSG00000123584; CTA
LTQDWVQENY

SEQ ID NO: 41603 - protein, 10 aa, Homo sapiens
  misc_feature: Table A; Target 41603; HLA-B*57:01; MAGEA9; ENSG00000123584; CTA
LTQDWVQENY

SEQ ID NO: 41604 - protein, 10 aa, Homo sapiens
  misc_feature: Table A; Target 41604; HLA-B*58:01; MAGEA9; ENSG00000123584; CTA
LTQDWVQENY

SEQ ID NO: 41605 - protein, 11 aa, Homo sapiens
  misc_feature: Table A; Target 41605; HLA-C*04:01; MAGEA9; ENSG00000123584; CTA
LTQDWVQENYL

SEQ ID NO: 41606 - protein, 9 aa, Homo sapiens
  misc_feature: Table A; Target 41606; HLA-A*29:02; MAGEA9; ENSG00000123584; CTA
LVHFLLHKY

SEQ ID NO: 41607 - protein, 8 aa, Homo sapiens
  misc_feature: Table A; Target 41607; HLA-C*14:02; MAGEA9; ENSG00000123584; CTA
MFQEALKL

SEQ ID NO: 41608 - protein, 8 aa, Homo sapiens
  misc_feature: Table A; Target 41608; HLA-A*32:01; MAGEA9; ENSG00000123584; CTA
MLGDGHSM

SEQ ID NO: 41609 - protein, 8 aa, Homo sapiens
  misc_feature: Table A; Target 41609; HLA-C*01:02; MAGEA9; ENSG00000123584; CTA
MLGDGHSM

SEQ ID NO: 41610 - protein, 8 aa, Homo sapiens
  misc_feature: Table A; Target 41610; HLA-C*14:02; MAGEA9; ENSG00000123584; CTA
MLGDGHSM

SEQ ID NO: 41611 - protein, 10 aa, Homo sapiens
  misc_feature: Table A; Target 41611; HLA-A*03:01; MAGEA9; ENSG00000123584; CTA
MLGDGHSMPK

SEQ ID NO: 41612 - protein, 10 aa, Homo sapiens
  misc_feature: Table A; Target 41612; HLA-A*03:02; MAGEA9; ENSG00000123584; CTA
MLGDGHSMPK

SEQ ID NO: 41613 - protein, 10 aa, Homo sapiens
  misc_feature: Table A; Target 41613; HLA-A*11:01; MAGEA9; ENSG00000123584; CTA
MLGDGHSMPK

SEQ ID NO: 41614 - protein, 10 aa, Homo sapiens
  misc_feature: Table A; Target 41614; HLA-C*06:02; MAGEA9; ENSG00000123584; CTA
MLGDGHSMPK

SEQ ID NO: 41615 - protein, 8 aa, Homo sapiens
  misc_feature: Table A; Target 41615; HLA-B*51:01; MAGEA9; ENSG00000123584; CTA
MPKAALLI

SEQ ID NO: 41616 - protein, 9 aa, Homo sapiens
  misc_feature: Table A; Target 41616; HLA-B*51:01; MAGEA9; ENSG00000123584; CTA
MPKAALLII

SEQ ID NO: 41617 - protein, 9 aa, Homo sapiens
  misc_feature: Table A; Target 41617; HLA-B*54:01; MAGEA9; ENSG00000123584; CTA
MPKAALLII

SEQ ID NO: 41618 - protein, 10 aa, Homo sapiens
  misc_feature: Table A; Target 41618; HLA-B*54:01; MAGEA9; ENSG00000123584; CTA
MPKAALLIIV

SEQ ID NO: 41619 - protein, 9 aa, Homo sapiens
  misc_feature: Table A; Target 41619; HLA-A*30:01; MAGEA9; ENSG00000123584; CTA
MQVIFGTDV

SEQ ID NO: 41620 - protein, 9 aa, Homo sapiens
  misc_feature: Table A; Target 41620; HLA-B*13:02; MAGEA9; ENSG00000123584; CTA
MQVIFGTDV

SEQ ID NO: 41621 - protein, 9 aa, Homo sapiens
  misc_feature: Table A; Target 41621; HLA-B*15:03; MAGEA9; ENSG00000123584; CTA
MQVIFGTDV

SEQ ID NO: 41622 - protein, 9 aa, Homo sapiens
  misc_feature: Table A; Target 41622; HLA-B*39:01; MAGEA9; ENSG00000123584; CTA
MQVIFGTDV

SEQ ID NO: 41623 - protein, 9 aa, Homo sapiens
  misc_feature: Table A; Target 41623; HLA-C*04:01; MAGEA9; ENSG00000123584; CTA
MQVIFGTDV

SEQ ID NO: 41624 - protein, 9 aa, Homo sapiens
  misc_feature: Table A; Target 41624; HLA-C*06:02; MAGEA9; ENSG00000123584; CTA
MQVIFGTDV

SEQ ID NO: 41625 - protein, 9 aa, Homo sapiens
  misc_feature: Table A; Target 41625; HLA-A*24:02; MAGEA9; ENSG00000123584; CTA
NYKRYFPVI

SEQ ID NO: 41626 - protein, 9 aa, Homo sapiens
  misc_feature: Table A; Target 41626; HLA-A*33:01; MAGEA9; ENSG00000123584; CTA
NYLVMLNAR

SEQ ID NO: 41627 - protein, 9 aa, Homo sapiens
  misc_feature: Table A; Target 41627; HLA-A*33:03; MAGEA9; ENSG00000123584; CTA
NYLVMLNAR

SEQ ID NO: 41628 - protein, 9 aa, Homo sapiens
  misc_feature: Table A; Target 41628; HLA-C*04:01; MAGEA9; ENSG00000123584; CTA
QFDEGSSSQ

SEQ ID NO: 41629 - protein, 11 aa, Homo sapiens
  misc_feature: Table A; Target 41629; HLA-A*30:02; MAGEA9; ENSG00000123584; CTA
QGGASSSISVY

SEQ ID NO: 41630 - protein, 9 aa, Homo sapiens
  misc_feature: Table A; Target 41630; HLA-A*03:02; MAGEA9; ENSG00000123584; CTA
QVIFGTDVK

SEQ ID NO: 41631 - protein, 9 aa, Homo sapiens
  misc_feature: Table A; Target 41631; HLA-A*11:01; MAGEA9; ENSG00000123584; CTA
QVIFGTDVK

SEQ ID NO: 41632 - protein, 10 aa, Homo sapiens
  misc_feature: Table A; Target 41632; HLA-A*01:01; MAGEA9; ENSG00000123584; CTA
QVPGSDPAHY

SEQ ID NO: 41633 - protein, 10 aa, Homo sapiens
  misc_feature: Table A; Target 41633; HLA-A*25:01; MAGEA9; ENSG00000123584; CTA
QVPGSDPAHY

SEQ ID NO: 41634 - protein, 10 aa, Homo sapiens
  misc_feature: Table A; Target 41634; HLA-A*26:01; MAGEA9; ENSG00000123584; CTA
QVPGSDPAHY

SEQ ID NO: 41635 - protein, 10 aa, Homo sapiens
  misc_feature: Table A; Target 41635; HLA-A*29:02; MAGEA9; ENSG00000123584; CTA
QVPGSDPAHY

SEQ ID NO: 41636 - protein, 10 aa, Homo sapiens
  misc_feature: Table A; Target 41636; HLA-A*30:02; MAGEA9; ENSG00000123584; CTA
QVPGSDPAHY

SEQ ID NO: 41637 - protein, 11 aa, Homo sapiens
  misc_feature: Table A; Target 41637; HLA-A*30:02; MAGEA9; ENSG00000123584; CTA
RQVPGSDPAHY

SEQ ID NO: 41638 - protein, 11 aa, Homo sapiens
  misc_feature: Table A; Target 41638; HLA-A*32:01; MAGEA9; ENSG00000123584; CTA
RQVPGSDPAHY

SEQ ID NO: 41639 - protein, 11 aa, Homo sapiens
  misc_feature: Table A; Target 41639; HLA-B*15:01; MAGEA9; ENSG00000123584; CTA
RQVPGSDPAHY

SEQ ID NO: 41640 - protein, 11 aa, Homo sapiens
  misc_feature: Table A; Target 41640; HLA-B*15:03; MAGEA9; ENSG00000123584; CTA
RQVPGSDPAHY

SEQ ID NO: 41641 - protein, 11 aa, Homo sapiens
  misc_feature: Table A; Target 41641; HLA-B*58:01; MAGEA9; ENSG00000123584; CTA
RQVPGSDPAHY

SEQ ID NO: 41642 - protein, 11 aa, Homo sapiens
  misc_feature: Table A; Target 41642; HLA-C*16:04; MAGEA9; ENSG00000123584; CTA
RQVPGSDPAHY

SEQ ID NO: 41643 - protein, 8 aa, Homo sapiens
  misc_feature: Table A; Target 41643; HLA-A*03:01; MAGEA9; ENSG00000123584; CTA
RVKEPVTK

SEQ ID NO: 41644 - protein, 8 aa, Homo sapiens
  misc_feature: Table A; Target 41644; HLA-A*03:02; MAGEA9; ENSG00000123584; CTA
RVKEPVTK

SEQ ID NO: 41645 - protein, 8 aa, Homo sapiens
  misc_feature: Table A; Target 41645; HLA-A*11:01; MAGEA9; ENSG00000123584; CTA
RVKEPVTK

SEQ ID NO: 41646 - protein, 8 aa, Homo sapiens
  misc_feature: Table A; Target 41646; HLA-A*31:01; MAGEA9; ENSG00000123584; CTA
RVKEPVTK

SEQ ID NO: 41647 - protein, 8 aa, Homo sapiens
  misc_feature: Table A; Target 41647; HLA-B*57:01; MAGEA9; ENSG00000123584; CTA
RVKEPVTK

SEQ ID NO: 41648 - protein, 9 aa, Homo sapiens
  misc_feature: Table A; Target 41648; HLA-A*02:03; MAGEA9; ENSG00000123584; CTA
RVKEPVTKA

SEQ ID NO: 41649 - protein, 9 aa, Homo sapiens
  misc_feature: Table A; Target 41649; HLA-A*32:01; MAGEA9; ENSG00000123584; CTA
RVKEPVTKA

SEQ ID NO: 41650 - protein, 9 aa, Homo sapiens
  misc_feature: Table A; Target 41650; HLA-B*55:01; MAGEA9; ENSG00000123584; CTA
RVKEPVTKA

SEQ ID NO: 41651 - protein, 9 aa, Homo sapiens
  misc_feature: Table A; Target 41651; HLA-B*56:01; MAGEA9; ENSG00000123584; CTA
RVKEPVTKA

SEQ ID NO: 41652 - protein, 9 aa, Homo sapiens
  misc_feature: Table A; Target 41652; HLA-A*03:01; MAGEA9; ENSG00000123584; CTA
RYFPVIFGK

SEQ ID NO: 41653 - protein, 9 aa, Homo sapiens
  misc_feature: Table A; Target 41653; HLA-A*31:01; MAGEA9; ENSG00000123584; CTA
RYFPVIFGK

SEQ ID NO: 41654 - protein, 9 aa, Homo sapiens
  misc_feature: Table A; Target 41654; HLA-B*57:01; MAGEA9; ENSG00000123584; CTA
RYFPVIFGK

SEQ ID NO: 41655 - protein, 8 aa, Homo sapiens
  misc_feature: Table A; Target 41655; HLA-B*37:01; MAGEA9; ENSG00000123584; CTA
SDPAHYEF

SEQ ID NO: 41656 - protein, 8 aa, Homo sapiens
  misc_feature: Table A; Target 41656; HLA-B*18:01; MAGEA9; ENSG00000123584; CTA
SEFMQVIF

SEQ ID NO: 41657 - protein, 8 aa, Homo sapiens
  misc_feature: Table A; Target 41657; HLA-B*37:01; MAGEA9; ENSG00000123584; CTA
SEFMQVIF

SEQ ID NO: 41658 - protein, 8 aa, Homo sapiens
  misc_feature: Table A; Target 41658; HLA-B*44:02; MAGEA9; ENSG00000123584; CTA
SEFMQVIF

SEQ ID NO: 41659 - protein, 8 aa, Homo sapiens
  misc_feature: Table A; Target 41659; HLA-B*44:03; MAGEA9; ENSG00000123584; CTA
SEFMQVIF

SEQ ID NO: 41660 - protein, 9 aa, Homo sapiens
  misc_feature: Table A; Target 41660; HLA-B*15:03; MAGEA9; ENSG00000123584; CTA
SKAHAETSY

SEQ ID NO: 41661 - protein, 9 aa, Homo sapiens
  misc_feature: Table A; Target 41661; HLA-A*32:01; MAGEA9; ENSG00000123584; CTA
SMLGDGHSM

SEQ ID NO: 41662 - protein, 9 aa, Homo sapiens
  misc_feature: Table A; Target 41662; HLA-B*08:01; MAGEA9; ENSG00000123584; CTA
SMLGDGHSM

SEQ ID NO: 41663 - protein, 9 aa, Homo sapiens
  misc_feature: Table A; Target 41663; HLA-B*15:01; MAGEA9; ENSG00000123584; CTA
SMLGDGHSM

SEQ ID NO: 41664 - protein, 9 aa, Homo sapiens
  misc_feature: Table A; Target 41664; HLA-B*35:03; MAGEA9; ENSG00000123584; CTA
SMLGDGHSM

SEQ ID NO: 41665 - protein, 9 aa, Homo sapiens
  misc_feature: Table A; Target 41665; HLA-B*37:01; MAGEA9; ENSG00000123584; CTA
SMLGDGHSM

SEQ ID NO: 41666 - protein, 9 aa, Homo sapiens
  misc_feature: Table A; Target 41666; HLA-B*46:01; MAGEA9; ENSG00000123584; CTA
SMLGDGHSM

SEQ ID NO: 41667 - protein, 9 aa, Homo sapiens
  misc_feature: Table A; Target 41667; HLA-B*55:01; MAGEA9; ENSG00000123584; CTA
SMLGDGHSM

SEQ ID NO: 41668 - protein, 9 aa, Homo sapiens
  misc_feature: Table A; Target 41668; HLA-C*01:02; MAGEA9; ENSG00000123584; CTA
SMLGDGHSM

SEQ ID NO: 41669 - protein, 9 aa, Homo sapiens
  misc_feature: Table A; Target 41669; HLA-C*03:03; MAGEA9; ENSG00000123584; CTA
SMLGDGHSM

SEQ ID NO: 41670 - protein, 9 aa, Homo sapiens
  misc_feature: Table A; Target 41670; HLA-C*14:02; MAGEA9; ENSG00000123584; CTA
SMLGDGHSM

SEQ ID NO: 41671 - protein, 11 aa, Homo sapiens
  misc_feature: Table A; Target 41671; HLA-A*03:01; MAGEA9; ENSG00000123584; CTA
SMLGDGHSMPK

SEQ ID NO: 41672 - protein, 11 aa, Homo sapiens
  misc_feature: Table A; Target 41672; HLA-A*03:02; MAGEA9; ENSG00000123584; CTA
SMLGDGHSMPK

SEQ ID NO: 41673 - protein, 11 aa, Homo sapiens
  misc_feature: Table A; Target 41673; HLA-A*11:01; MAGEA9; ENSG00000123584; CTA
SMLGDGHSMPK

SEQ ID NO: 41674 - protein, 10 aa, Homo sapiens
  misc_feature: Table A; Target 41674; HLA-B*07:02; MAGEA9; ENSG00000123584; CTA
SPQGGASSSI

SEQ ID NO: 41675 - protein, 10 aa, Homo sapiens
  misc_feature: Table A; Target 41675; HLA-C*07:02; MAGEA9; ENSG00000123584; CTA
SPQGGASSSI

SEQ ID NO: 41676 - protein, 10 aa, Homo sapiens
  misc_feature: Table A; Target 41676; HLA-B*39:01; MAGEA9; ENSG00000123584; CTA
SQFDEGSSSQ

SEQ ID NO: 41677 - protein, 9 aa, Homo sapiens
  misc_feature: Table A; Target 41677; HLA-C*05:01; MAGEA9; ENSG00000123584; CTA
SSDSKEEEV

SEQ ID NO: 41678 - protein, 9 aa, Homo sapiens
  misc_feature: Table A; Target 41678; HLA-A*23:01; MAGEA9; ENSG00000123584; CTA
SSISVYYTL

SEQ ID NO: 41679 - protein, 9 aa, Homo sapiens
  misc_feature: Table A; Target 41679; HLA-B*58:01; MAGEA9; ENSG00000123584; CTA
SSISVYYTL

SEQ ID NO: 41680 - protein, 9 aa, Homo sapiens
  misc_feature: Table A; Target 41680; HLA-C*02:02; MAGEA9; ENSG00000123584; CTA
SSISVYYTL

SEQ ID NO: 41681 - protein, 9 aa, Homo sapiens
  misc_feature: Table A; Target 41681; HLA-C*03:03; MAGEA9; ENSG00000123584; CTA
SSISVYYTL

SEQ ID NO: 41682 - protein, 9 aa, Homo sapiens
  misc_feature: Table A; Target 41682; HLA-C*03:04; MAGEA9; ENSG00000123584; CTA
SSISVYYTL

SEQ ID NO: 41683 - protein, 9 aa, Homo sapiens
  misc_feature: Table A; Target 41683; HLA-C*16:04; MAGEA9; ENSG00000123584; CTA
SSISVYYTL

SEQ ID NO: 41684 - protein, 10 aa, Homo sapiens
  misc_feature: Table A; Target 41684; HLA-A*25:01; MAGEA9; ENSG00000123584; CTA
SSISVYYTLW

SEQ ID NO: 41685 - protein, 10 aa, Homo sapiens
  misc_feature: Table A; Target 41685; HLA-B*57:01; MAGEA9; ENSG00000123584; CTA
SSISVYYTLW

SEQ ID NO: 41686 - protein, 8 aa, Homo sapiens
  misc_feature: Table A; Target 41686; HLA-A*30:02; MAGEA9; ENSG00000123584; CTA
SSSISVYY

SEQ ID NO: 41687 - protein, 8 aa, Homo sapiens
  misc_feature: Table A; Target 41687; HLA-C*16:01; MAGEA9; ENSG00000123584; CTA
SSSISVYY

SEQ ID NO: 41688 - protein, 10 aa, Homo sapiens
  misc_feature: Table A; Target 41688; HLA-B*58:01; MAGEA9; ENSG00000123584; CTA
SSVDPAQLEF

SEQ ID NO: 41689 - protein, 9 aa, Homo sapiens
  misc_feature: Table A; Target 41689; HLA-A*01:01; MAGEA9; ENSG00000123584; CTA
SVDPAQLEF

SEQ ID NO: 41690 - protein, 9 aa, Homo sapiens
  misc_feature: Table A; Target 41690; HLA-A*02:07; MAGEA9; ENSG00000123584; CTA
SVDPAQLEF

SEQ ID NO: 41691 - protein, 9 aa, Homo sapiens
  misc_feature: Table A; Target 41691; HLA-A*11:01; MAGEA9; ENSG00000123584; CTA
SVDPAQLEF

SEQ ID NO: 41692 - protein, 9 aa, Homo sapiens
  misc_feature: Table A; Target 41692; HLA-A*25:01; MAGEA9; ENSG00000123584; CTA
SVDPAQLEF

SEQ ID NO: 41693 - protein, 9 aa, Homo sapiens
  misc_feature: Table A; Target 41693; HLA-A*26:01; MAGEA9; ENSG00000123584; CTA
SVDPAQLEF

SEQ ID NO: 41694 - protein, 9 aa, Homo sapiens
  misc_feature: Table A; Target 41694; HLA-A*29:02; MAGEA9; ENSG00000123584; CTA
SVDPAQLEF

SEQ ID NO: 41695 - protein, 9 aa, Homo sapiens
  misc_feature: Table A; Target 41695; HLA-A*32:01; MAGEA9; ENSG00000123584; CTA
SVDPAQLEF

SEQ ID NO: 41696 - protein, 9 aa, Homo sapiens
  misc_feature: Table A; Target 41696; HLA-B*15:01; MAGEA9; ENSG00000123584; CTA
SVDPAQLEF

SEQ ID NO: 41697 - protein, 9 aa, Homo sapiens
  misc_feature: Table A; Target 41697; HLA-B*15:03; MAGEA9; ENSG00000123584; CTA
SVDPAQLEF

SEQ ID NO: 41698 - protein, 9 aa, Homo sapiens
  misc_feature: Table A; Target 41698; HLA-B*35:01; MAGEA9; ENSG00000123584; CTA
SVDPAQLEF

SEQ ID NO: 41699 - protein, 9 aa, Homo sapiens
  misc_feature: Table A; Target 41699; HLA-B*35:03; MAGEA9; ENSG00000123584; CTA
SVDPAQLEF

SEQ ID NO: 41700 - protein, 9 aa, Homo sapiens
  misc_feature: Table A; Target 41700; HLA-B*38:01; MAGEA9; ENSG00000123584; CTA
SVDPAQLEF

SEQ ID NO: 41701 - protein, 9 aa, Homo sapiens
  misc_feature: Table A; Target 41701; HLA-B*46:01; MAGEA9; ENSG00000123584; CTA
SVDPAQLEF

SEQ ID NO: 41702 - protein, 9 aa, Homo sapiens
  misc_feature: Table A; Target 41702; HLA-B*58:01; MAGEA9; ENSG00000123584; CTA
SVDPAQLEF

SEQ ID NO: 41703 - protein, 9 aa, Homo sapiens
  misc_feature: Table A; Target 41703; HLA-C*02:02; MAGEA9; ENSG00000123584; CTA
SVDPAQLEF

SEQ ID NO: 41704 - protein, 9 aa, Homo sapiens
  misc_feature: Table A; Target 41704; HLA-C*03:03; MAGEA9; ENSG00000123584; CTA
SVDPAQLEF

SEQ ID NO: 41705 - protein, 9 aa, Homo sapiens
  misc_feature: Table A; Target 41705; HLA-C*03:04; MAGEA9; ENSG00000123584; CTA
SVDPAQLEF

SEQ ID NO: 41706 - protein, 9 aa, Homo sapiens
  misc_feature: Table A; Target 41706; HLA-C*04:01; MAGEA9; ENSG00000123584; CTA
SVDPAQLEF

SEQ ID NO: 41707 - protein, 9 aa, Homo sapiens
  misc_feature: Table A; Target 41707; HLA-C*05:01; MAGEA9; ENSG00000123584; CTA
SVDPAQLEF

SEQ ID NO: 41708 - protein, 9 aa, Homo sapiens
  misc_feature: Table A; Target 41708; HLA-C*07:04; MAGEA9; ENSG00000123584; CTA
SVDPAQLEF

SEQ ID NO: 41709 - protein, 9 aa, Homo sapiens
  misc_feature: Table A; Target 41709; HLA-C*07:06; MAGEA9; ENSG00000123584; CTA
SVDPAQLEF

SEQ ID NO: 41710 - protein, 9 aa, Homo sapiens
  misc_feature: Table A; Target 41710; HLA-C*16:01; MAGEA9; ENSG00000123584; CTA
SVDPAQLEF

SEQ ID NO: 41711 - protein, 10 aa, Homo sapiens
  misc_feature: Table A; Target 41711; HLA-A*01:01; MAGEA9; ENSG00000123584; CTA
SVDPAQLEFM

SEQ ID NO: 41712 - protein, 10 aa, Homo sapiens
  misc_feature: Table A; Target 41712; HLA-A*02:07; MAGEA9; ENSG00000123584; CTA
SVDPAQLEFM

SEQ ID NO: 41713 - protein, 10 aa, Homo sapiens
  misc_feature: Table A; Target 41713; HLA-C*05:01; MAGEA9; ENSG00000123584; CTA
SVDPAQLEFM

SEQ ID NO: 41714 - protein, 11 aa, Homo sapiens
  misc_feature: Table A; Target 41714; HLA-A*02:07; MAGEA9; ENSG00000123584; CTA
SVDPAQLEFMF

SEQ ID NO: 41715 - protein, 9 aa, Homo sapiens
  misc_feature: Table A; Target 41715; HLA-A*03:01; MAGEA9; ENSG00000123584; CTA
SVMGVYVGK

SEQ ID NO: 41716 - protein, 9 aa, Homo sapiens
  misc_feature: Table A; Target 41716; HLA-A*03:02; MAGEA9; ENSG00000123584; CTA
SVMGVYVGK

SEQ ID NO: 41717 - protein, 9 aa, Homo sapiens
  misc_feature: Table A; Target 41717; HLA-A*11:01; MAGEA9; ENSG00000123584; CTA
SVMGVYVGK

SEQ ID NO: 41718 - protein, 9 aa, Homo sapiens
  misc_feature: Table A; Target 41718; HLA-A*31:01; MAGEA9; ENSG00000123584; CTA
SVMGVYVGK

SEQ ID NO: 41719 - protein, 9 aa, Homo sapiens
  misc_feature: Table A; Target 41719; HLA-A*33:01; MAGEA9; ENSG00000123584; CTA
SVMGVYVGK

SEQ ID NO: 41720 - protein, 9 aa, Homo sapiens
  misc_feature: Table A; Target 41720; HLA-A*33:03; MAGEA9; ENSG00000123584; CTA
SVMGVYVGK

SEQ ID NO: 41721 - protein, 9 aa, Homo sapiens
  misc_feature: Table A; Target 41721; HLA-A*68:01; MAGEA9; ENSG00000123584; CTA
SVMGVYVGK

SEQ ID NO: 41722 - protein, 9 aa, Homo sapiens
  misc_feature: Table A; Target 41722; HLA-C*07:06; MAGEA9; ENSG00000123584; CTA
SVMGVYVGK

SEQ ID NO: 41723 - protein, 10 aa, Homo sapiens
  misc_feature: Table A; Target 41723; HLA-C*06:02; MAGEA9; ENSG00000123584; CTA
SVMGVYVGKE

SEQ ID NO: 41724 - protein, 9 aa, Homo sapiens
  misc_feature: Table A; Target 41724; HLA-A*23:01; MAGEA9; ENSG00000123584; CTA
SYEKVINYL

SEQ ID NO: 41725 - protein, 9 aa, Homo sapiens
  misc_feature: Table A; Target 41725; HLA-A*24:02; MAGEA9; ENSG00000123584; CTA
SYEKVINYL

SEQ ID NO: 41726 - protein, 8 aa, Homo sapiens
  misc_feature: Table A; Target 41726; HLA-A*23:01; MAGEA9; ENSG00000123584; CTA
SYILVTAL

SEQ ID NO: 41727 - protein, 8 aa, Homo sapiens
  misc_feature: Table A; Target 41727; HLA-A*24:02; MAGEA9; ENSG00000123584; CTA
SYILVTAL

SEQ ID NO: 41728 - protein, 8 aa, Homo sapiens
  misc_feature: Table A; Target 41728; HLA-C*14:02; MAGEA9; ENSG00000123584; CTA
SYILVTAL

SEQ ID NO: 41729 - protein, 10 aa, Homo sapiens
  misc_feature: Table A; Target 41729; HLA-A*23:01; MAGEA9; ENSG00000123584; CTA
SYILVTALGL

SEQ ID NO: 41730 - protein, 10 aa, Homo sapiens
  misc_feature: Table A; Target 41730; HLA-A*24:02; MAGEA9; ENSG00000123584; CTA
SYILVTALGL

SEQ ID NO: 41731 - protein, 10 aa, Homo sapiens
  misc_feature: Table A; Target 41731; HLA-C*14:02; MAGEA9; ENSG00000123584; CTA
SYILVTALGL

SEQ ID NO: 41732 - protein, 9 aa, Homo sapiens
  misc_feature: Table A; Target 41732; HLA-A*01:01; MAGEA9; ENSG00000123584; CTA
TQDWVQENY

SEQ ID NO: 41733 - protein, 9 aa, Homo sapiens
  misc_feature: Table A; Target 41733; HLA-A*30:02; MAGEA9; ENSG00000123584; CTA
TQDWVQENY

SEQ ID NO: 41734 - protein, 10 aa, Homo sapiens
  misc_feature: Table A; Target 41734; HLA-B*38:01; MAGEA9; ENSG00000123584; CTA
TQDWVQENYL

SEQ ID NO: 41735 - protein, 9 aa, Homo sapiens
  misc_feature: Table A; Target 41735; HLA-A*01:01; MAGEA9; ENSG00000123584; CTA
TSYEKVINY

SEQ ID NO: 41736 - protein, 9 aa, Homo sapiens
  misc_feature: Table A; Target 41736; HLA-A*03:01; MAGEA9; ENSG00000123584; CTA
TSYEKVINY

SEQ ID NO: 41737 - protein, 9 aa, Homo sapiens
  misc_feature: Table A; Target 41737; HLA-A*11:01; MAGEA9; ENSG00000123584; CTA
TSYEKVINY

SEQ ID NO: 41738 - protein, 9 aa, Homo sapiens
  misc_feature: Table A; Target 41738; HLA-A*25:01; MAGEA9; ENSG00000123584; CTA
TSYEKVINY

SEQ ID NO: 41739 - protein, 9 aa, Homo sapiens
  misc_feature: Table A; Target 41739; HLA-A*26:01; MAGEA9; ENSG00000123584; CTA
TSYEKVINY

SEQ ID NO: 41740 - protein, 9 aa, Homo sapiens
  misc_feature: Table A; Target 41740; HLA-A*29:02; MAGEA9; ENSG00000123584; CTA
TSYEKVINY

SEQ ID NO: 41741 - protein, 9 aa, Homo sapiens
  misc_feature: Table A; Target 41741; HLA-A*30:02; MAGEA9; ENSG00000123584; CTA
TSYEKVINY

SEQ ID NO: 41742 - protein, 9 aa, Homo sapiens
  misc_feature: Table A; Target 41742; HLA-A*32:01; MAGEA9; ENSG00000123584; CTA
TSYEKVINY

SEQ ID NO: 41743 - protein, 9 aa, Homo sapiens
  misc_feature: Table A; Target 41743; HLA-A*33:01; MAGEA9; ENSG00000123584; CTA
TSYEKVINY

SEQ ID NO: 41744 - protein, 9 aa, Homo sapiens
  misc_feature: Table A; Target 41744; HLA-A*33:03; MAGEA9; ENSG00000123584; CTA
TSYEKVINY

SEQ ID NO: 41745 - protein, 9 aa, Homo sapiens
  misc_feature: Table A; Target 41745; HLA-A*68:01; MAGEA9; ENSG00000123584; CTA
TSYEKVINY

SEQ ID NO: 41746 - protein, 9 aa, Homo sapiens
  misc_feature: Table A; Target 41746; HLA-B*08:01; MAGEA9; ENSG00000123584; CTA
TSYEKVINY

SEQ ID NO: 41747 - protein, 9 aa, Homo sapiens
  misc_feature: Table A; Target 41747; HLA-B*15:01; MAGEA9; ENSG00000123584; CTA
TSYEKVINY

SEQ ID NO: 41748 - protein, 9 aa, Homo sapiens
  misc_feature: Table A; Target 41748; HLA-B*15:03; MAGEA9; ENSG00000123584; CTA
TSYEKVINY

SEQ ID NO: 41749 - protein, 9 aa, Homo sapiens
  misc_feature: Table A; Target 41749; HLA-B*18:01; MAGEA9; ENSG00000123584; CTA
TSYEKVINY

SEQ ID NO: 41750 - protein, 9 aa, Homo sapiens
  misc_feature: Table A; Target 41750; HLA-B*35:01; MAGEA9; ENSG00000123584; CTA
TSYEKVINY

SEQ ID NO: 41751 - protein, 9 aa, Homo sapiens
  misc_feature: Table A; Target 41751; HLA-B*39:01; MAGEA9; ENSG00000123584; CTA
TSYEKVINY

SEQ ID NO: 41752 - protein, 9 aa, Homo sapiens
  misc_feature: Table A; Target 41752; HLA-B*44:03; MAGEA9; ENSG00000123584; CTA
TSYEKVINY

SEQ ID NO: 41753 - protein, 9 aa, Homo sapiens
  misc_feature: Table A; Target 41753; HLA-B*46:01; MAGEA9; ENSG00000123584; CTA
TSYEKVINY

SEQ ID NO: 41754 - protein, 9 aa, Homo sapiens
  misc_feature: Table A; Target 41754; HLA-B*57:01; MAGEA9; ENSG00000123584; CTA
TSYEKVINY

SEQ ID NO: 41755 - protein, 9 aa, Homo sapiens
  misc_feature: Table A; Target 41755; HLA-B*58:01; MAGEA9; ENSG00000123584; CTA
TSYEKVINY

SEQ ID NO: 41756 - protein, 9 aa, Homo sapiens
  misc_feature: Table A; Target 41756; HLA-C*01:02; MAGEA9; ENSG00000123584; CTA
TSYEKVINY

SEQ ID NO: 41757 - protein, 9 aa, Homo sapiens
  misc_feature: Table A; Target 41757; HLA-C*02:02; MAGEA9; ENSG00000123584; CTA
TSYEKVINY

SEQ ID NO: 41758 - protein, 9 aa, Homo sapiens
  misc_feature: Table A; Target 41758; HLA-C*07:04; MAGEA9; ENSG00000123584; CTA
TSYEKVINY

SEQ ID NO: 41759 - protein, 9 aa, Homo sapiens
  misc_feature: Table A; Target 41759; HLA-C*07:06; MAGEA9; ENSG00000123584; CTA
TSYEKVINY

SEQ ID NO: 41760 - protein, 9 aa, Homo sapiens
  misc_feature: Table A; Target 41760; HLA-C*12:03; MAGEA9; ENSG00000123584; CTA
TSYEKVINY

SEQ ID NO: 41761 - protein, 9 aa, Homo sapiens
  misc_feature: Table A; Target 41761; HLA-C*14:02; MAGEA9; ENSG00000123584; CTA
TSYEKVINY

SEQ ID NO: 41762 - protein, 9 aa, Homo sapiens
  misc_feature: Table A; Target 41762; HLA-C*16:01; MAGEA9; ENSG00000123584; CTA
TSYEKVINY

SEQ ID NO: 41763 - protein, 9 aa, Homo sapiens
  misc_feature: Table A; Target 41763; HLA-C*16:02; MAGEA9; ENSG00000123584; CTA
TSYEKVINY

SEQ ID NO: 41764 - protein, 9 aa, Homo sapiens
  misc_feature: Table A; Target 41764; HLA-C*16:04; MAGEA9; ENSG00000123584; CTA
TSYEKVINY

SEQ ID NO: 41765 - protein, 10 aa, Homo sapiens
  misc_feature: Table A; Target 41765; HLA-A*68:02; MAGEA9; ENSG00000123584; CTA
TSYEKVINYL

SEQ ID NO: 41766 - protein, 11 aa, Homo sapiens
  misc_feature: Table A; Target 41766; HLA-A*68:02; MAGEA9; ENSG00000123584; CTA
TSYEKVINYLV

SEQ ID NO: 41767 - protein, 9 aa, Homo sapiens
  misc_feature: Table A; Target 41767; HLA-A*26:01; MAGEA9; ENSG00000123584; CTA
VIFGKASEF

SEQ ID NO: 41768 - protein, 9 aa, Homo sapiens
  misc_feature: Table A; Target 41768; HLA-A*30:02; MAGEA9; ENSG00000123584; CTA
VIFGKASEF

SEQ ID NO: 41769 - protein, 9 aa, Homo sapiens
  misc_feature: Table A; Target 41769; HLA-A*32:01; MAGEA9; ENSG00000123584; CTA
VIFGKASEF

SEQ ID NO: 41770 - protein, 9 aa, Homo sapiens
  misc_feature: Table A; Target 41770; HLA-B*15:01; MAGEA9; ENSG00000123584; CTA
VIFGKASEF

SEQ ID NO: 41771 - protein, 9 aa, Homo sapiens
  misc_feature: Table A; Target 41771; HLA-B*15:03; MAGEA9; ENSG00000123584; CTA
VIFGKASEF

SEQ ID NO: 41772 - protein, 9 aa, Homo sapiens
  misc_feature: Table A; Target 41772; HLA-B*46:01; MAGEA9; ENSG00000123584; CTA
VIFGKASEF

SEQ ID NO: 41773 - protein, 9 aa, Homo sapiens
  misc_feature: Table A; Target 41773; HLA-C*02:02; MAGEA9; ENSG00000123584; CTA
VIFGKASEF

SEQ ID NO: 41774 - protein, 9 aa, Homo sapiens
  misc_feature: Table A; Target 41774; HLA-C*07:04; MAGEA9; ENSG00000123584; CTA
VIFGKASEF

SEQ ID NO: 41775 - protein, 10 aa, Homo sapiens
  misc_feature: Table A; Target 41775; HLA-A*02:03; MAGEA9; ENSG00000123584; CTA
VIFGTDVKEV

SEQ ID NO: 41776 - protein, 10 aa, Homo sapiens
  misc_feature: Table A; Target 41776; HLA-C*16:02; MAGEA9; ENSG00000123584; CTA
VIFGTDVKEV

SEQ ID NO: 41777 - protein, 11 aa, Homo sapiens
  misc_feature: Table A; Target 41777; HLA-A*02:07; MAGEA9; ENSG00000123584; CTA
VIWEALSVMGV

SEQ ID NO: 41778 - protein, 10 aa, Homo sapiens
  misc_feature: Table A; Target 41778; HLA-B*15:03; MAGEA9; ENSG00000123584; CTA
VKEPVTKAEM

SEQ ID NO: 41779 - protein, 9 aa, Homo sapiens
  misc_feature: Table A; Target 41779; HLA-A*02:01; MAGEA9; ENSG00000123584; CTA
VLGEEQEGV

SEQ ID NO: 41780 - protein, 9 aa, Homo sapiens
  misc_feature: Table A; Target 41780; HLA-A*02:03; MAGEA9; ENSG00000123584; CTA
VLGEEQEGV

SEQ ID NO: 41781 - protein, 9 aa, Homo sapiens
  misc_feature: Table A; Target 41781; HLA-A*02:07; MAGEA9; ENSG00000123584; CTA
VLGEEQEGV

SEQ ID NO: 41782 - protein, 9 aa, Homo sapiens
  misc_feature: Table A; Target 41782; HLA-B*13:02; MAGEA9; ENSG00000123584; CTA
VLGEEQEGV

SEQ ID NO: 41783 - protein, 9 aa, Homo sapiens
  misc_feature: Table A; Target 41783; HLA-B*55:01; MAGEA9; ENSG00000123584; CTA
VLGEEQEGV

SEQ ID NO: 41784 - protein, 8 aa, Homo sapiens
  misc_feature: Table A; Target 41784; HLA-A*03:01; MAGEA9; ENSG00000123584; CTA
VLGVILTK

SEQ ID NO: 41785 - protein, 8 aa, Homo sapiens
  misc_feature: Table A; Target 41785; HLA-A*03:02; MAGEA9; ENSG00000123584; CTA
VLGVILTK

SEQ ID NO: 41786 - protein, 8 aa, Homo sapiens
  misc_feature: Table A; Target 41786; HLA-A*03:02; MAGEA9; ENSG00000123584; CTA
VMGVYVGK

SEQ ID NO: 41787 - protein, 9 aa, Homo sapiens
  misc_feature: Table A; Target 41787; HLA-A*23:01; MAGEA9; ENSG00000123584; CTA
VMLNAREPI

SEQ ID NO: 41788 - protein, 11 aa, Homo sapiens
  misc_feature: Table A; Target 41788; HLA-A*29:02; MAGEA9; ENSG00000123584; CTA
VMLNAREPICY

SEQ ID NO: 41789 - protein, 9 aa, Homo sapiens
  misc_feature: Table A; Target 41789; HLA-A*30:02; MAGEA9; ENSG00000123584; CTA
VPGSDPAHY

SEQ ID NO: 41790 - protein, 9 aa, Homo sapiens
  misc_feature: Table A; Target 41790; HLA-B*35:01; MAGEA9; ENSG00000123584; CTA
VPGSDPAHY

SEQ ID NO: 41791 - protein, 9 aa, Homo sapiens
  misc_feature: Table A; Target 41791; HLA-B*55:01; MAGEA9; ENSG00000123584; CTA
VPGSDPAHY

SEQ ID NO: 41792 - protein, 9 aa, Homo sapiens
  misc_feature: Table A; Target 41792; HLA-C*03:03; MAGEA9; ENSG00000123584; CTA
VPGSDPAHY

SEQ ID NO: 41793 - protein, 11 aa, Homo sapiens
  misc_feature: Table A; Target 41793; HLA-B*35:01; MAGEA9; ENSG00000123584; CTA
VPGSDPAHYEF

SEQ ID NO: 41794 - protein, 11 aa, Homo sapiens
  misc_feature: Table A; Target 41794; HLA-B*55:01; MAGEA9; ENSG00000123584; CTA
VPGSDPAHYEF

SEQ ID NO: 41795 - protein, 9 aa, Homo sapiens
  misc_feature: Table A; Target 41795; HLA-A*23:01; MAGEA9; ENSG00000123584; CTA
VYVGKEHMF

SEQ ID NO: 41796 - protein, 9 aa, Homo sapiens
  misc_feature: Table A; Target 41796; HLA-A*24:02; MAGEA9; ENSG00000123584; CTA
VYVGKEHMF

SEQ ID NO: 41797 - protein, 10 aa, Homo sapiens
  misc_feature: Table A; Target 41797; HLA-A*29:02; MAGEA9; ENSG00000123584; CTA
VYVGKEHMFY

SEQ ID NO: 41798 - protein, 9 aa, Homo sapiens
  misc_feature: Table A; Target 41798; HLA-A*23:01; MAGEA9; ENSG00000123584; CTA
VYYTLWSQF

SEQ ID NO: 41799 - protein, 9 aa, Homo sapiens
  misc_feature: Table A; Target 41799; HLA-A*24:02; MAGEA9; ENSG00000123584; CTA
VYYTLWSQF

SEQ ID NO: 41800 - protein, 9 aa, Homo sapiens
  misc_feature: Table A; Target 41800; HLA-B*49:01; MAGEA9; ENSG00000123584; CTA
WEALSVMGV

SEQ ID NO: 41801 - protein, 9 aa, Homo sapiens
  misc_feature: Table A; Target 41801; HLA-B*49:01; MAGEA9; ENSG00000123584; CTA
YEFLWGSKA

SEQ ID NO: 41802 - protein, 8 aa, Homo sapiens
  misc_feature: Table A; Target 41802; HLA-A*30:01; MAGEA9; ENSG00000123584; CTA
YEKVINYL

SEQ ID NO: 41803 - protein, 8 aa, Homo sapiens
  misc_feature: Table A; Target 41803; HLA-B*08:01; MAGEA9; ENSG00000123584; CTA
YEKVINYL

SEQ ID NO: 41804 - protein, 8 aa, Homo sapiens
  misc_feature: Table A; Target 41804; HLA-B*18:01; MAGEA9; ENSG00000123584; CTA
YEKVINYL

SEQ ID NO: 41805 - protein, 8 aa, Homo sapiens
  misc_feature: Table A; Target 41805; HLA-B*37:01; MAGEA9; ENSG00000123584; CTA
YEKVINYL

SEQ ID NO: 41806 - protein, 8 aa, Homo sapiens
  misc_feature: Table A; Target 41806; HLA-B*40:02; MAGEA9; ENSG00000123584; CTA
YEKVINYL

SEQ ID NO: 41807 - protein, 8 aa, Homo sapiens
  misc_feature: Table A; Target 41807; HLA-B*49:01; MAGEA9; ENSG00000123584; CTA
YEKVINYL

SEQ ID NO: 41808 - protein, 9 aa, Homo sapiens
  misc_feature: Table A; Target 41808; HLA-B*49:01; MAGEA9; ENSG00000123584; CTA
YEKVINYLV

SEQ ID NO: 41809 - protein, 8 aa, Homo sapiens
  misc_feature: Table A; Target 41809; HLA-B*54:01; MAGEA9; ENSG00000123584; CTA
YPSLYEEV

SEQ ID NO: 41810 - protein, 8 aa, Homo sapiens
  misc_feature: Table A; Target 41810; HLA-B*56:01; MAGEA9; ENSG00000123584; CTA
YPSLYEEV

SEQ ID NO: 41811 - protein, 9 aa, Homo sapiens
  misc_feature: Table A; Target 41811; HLA-B*35:01; MAGEA9; ENSG00000123584; CTA
YPSLYEEVL

SEQ ID NO: 41812 - protein, 9 aa, Homo sapiens
  misc_feature: Table A; Target 41812; HLA-B*35:03; MAGEA9; ENSG00000123584; CTA
YPSLYEEVL

SEQ ID NO: 41813 - protein, 9 aa, Homo sapiens
  misc_feature: Table A; Target 41813; HLA-B*38:01; MAGEA9; ENSG00000123584; CTA
YPSLYEEVL

SEQ ID NO: 41814 - protein, 9 aa, Homo sapiens
  misc_feature: Table A; Target 41814; HLA-B*55:01; MAGEA9; ENSG00000123584; CTA
YPSLYEEVL

SEQ ID NO: 41815 - protein, 9 aa, Homo sapiens
  misc_feature: Table A; Target 41815; HLA-C*03:03; MAGEA9; ENSG00000123584; CTA
YPSLYEEVL

SEQ ID NO: 41816 - protein, 9 aa, Homo sapiens
  misc_feature: Table A; Target 41816; HLA-B*27:02; MAGEA9; ENSG00000123584; CTA
YRVKEPVTK

SEQ ID NO: 41817 - protein, 9 aa, Homo sapiens
  misc_feature: Table A; Target 41817; HLA-B*27:05; MAGEA9; ENSG00000123584; CTA
YRVKEPVTK

SEQ ID NO: 41818 - protein, 9 aa, Homo sapiens
  misc_feature: Table A; Target 41818; HLA-A*01:01; MAGEA9; ENSG00000123584; CTA
YVGKEHMFY

SEQ ID NO: 41819 - protein, 9 aa, Homo sapiens
  misc_feature: Table A; Target 41819; HLA-A*29:02; MAGEA9; ENSG00000123584; CTA
YVGKEHMFY

SEQ ID NO: 41820 - protein, 8 aa, Homo sapiens
  misc_feature: Table A; Target 41820; HLA-A*24:02; MAGEA9; ENSG00000123584; CTA
YYTLWSQF

SEQ ID NO: 41821 - protein, 8 aa, Homo sapiens
  misc_feature: Table A; Target 41821; HLA-B*37:01; MAGEB1; ENSG00000214107; CTA
AETTKMKV

SEQ ID NO: 41822 - protein, 8 aa, Homo sapiens
  misc_feature: Table A; Target 41822; HLA-B*49:01; MAGEB1; ENSG00000214107; CTA
AETTKMKV

SEQ ID NO: 41823 - protein, 9 aa, Homo sapiens
  misc_feature: Table A; Target 41823; HLA-A*30:01; MAGEB1; ENSG00000214107; CTA
AETTKMKVL

SEQ ID NO: 41824 - protein, 9 aa, Homo sapiens
  misc_feature: Table A; Target 41824; HLA-B*37:01; MAGEB1; ENSG00000214107; CTA
AETTKMKVL

SEQ ID NO: 41825 - protein, 9 aa, Homo sapiens
  misc_feature: Table A; Target 41825; HLA-B*40:01; MAGEB1; ENSG00000214107; CTA
AETTKMKVL

SEQ ID NO: 41826 - protein, 9 aa, Homo sapiens
  misc_feature: Table A; Target 41826; HLA-B*40:02; MAGEB1; ENSG00000214107; CTA
AETTKMKVL

SEQ ID NO: 41827 - protein, 9 aa, Homo sapiens
  misc_feature: Table A; Target 41827; HLA-B*44:02; MAGEB1; ENSG00000214107; CTA
AETTKMKVL

SEQ ID NO: 41828 - protein, 9 aa, Homo sapiens
  misc_feature: Table A; Target 41828; HLA-B*44:03; MAGEB1; ENSG00000214107; CTA
AETTKMKVL

SEQ ID NO: 41829 - protein, 9 aa, Homo sapiens
  misc_feature: Table A; Target 41829; HLA-B*49:01; MAGEB1; ENSG00000214107; CTA
AETTKMKVL

SEQ ID NO: 41830 - protein, 9 aa, Homo sapiens
  misc_feature: Table A; Target 41830; HLA-C*16:02; MAGEB1; ENSG00000214107; CTA
AETTKMKVL

SEQ ID NO: 41831 - protein, 9 aa, Homo sapiens
  misc_feature: Table A; Target 41831; HLA-C*16:04; MAGEB1; ENSG00000214107; CTA
AETTKMKVL

SEQ ID NO: 41832 - protein, 11 aa, Homo sapiens
  misc_feature: Table A; Target 41832; HLA-A*02:01; MAGEB1; ENSG00000214107; CTA
ALRDEEERAQV

SEQ ID NO: 41833 - protein, 11 aa, Homo sapiens
  misc_feature: Table A; Target 41833; HLA-A*02:03; MAGEB1; ENSG00000214107; CTA
ALRDEEERAQV

SEQ ID NO: 41834 - protein, 11 aa, Homo sapiens
  misc_feature: Table A; Target 41834; HLA-B*55:01; MAGEB1; ENSG00000214107; CTA
ALRDEEERAQV

SEQ ID NO: 41835 - protein, 8 aa, Homo sapiens
  misc_feature: Table A; Target 41835; HLA-B*07:02; MAGEB1; ENSG00000214107; CTA
APFSRSSH

SEQ ID NO: 41836 - protein, 9 aa, Homo sapiens
  misc_feature: Table A; Target 41836; HLA-B*07:02; MAGEB1; ENSG00000214107; CTA
APFSRSSHP

SEQ ID NO: 41837 - protein, 9 aa, Homo sapiens
  misc_feature: Table A; Target 41837; HLA-B*55:01; MAGEB1; ENSG00000214107; CTA
APFSRSSHP

SEQ ID NO: 41838 - protein, 9 aa, Homo sapiens
  misc_feature: Table A; Target 41838; HLA-B*56:01; MAGEB1; ENSG00000214107; CTA
APFSRSSHP

SEQ ID NO: 41839 - protein, 9 aa, Homo sapiens
  misc_feature: Table A; Target 41839; HLA-C*07:02; MAGEB1; ENSG00000214107; CTA
APFSRSSHP

SEQ ID NO: 41840 - protein, 10 aa, Homo sapiens
  misc_feature: Table A; Target 41840; HLA-B*08:01; MAGEB1; ENSG00000214107; CTA
APFSRSSHPM

SEQ ID NO: 41841 - protein, 10 aa, Homo sapiens
  misc_feature: Table A; Target 41841; HLA-B*35:01; MAGEB1; ENSG00000214107; CTA
APFSRSSHPM

SEQ ID NO: 41842 - protein, 10 aa, Homo sapiens
  misc_feature: Table A; Target 41842; HLA-B*35:03; MAGEB1; ENSG00000214107; CTA
APFSRSSHPM

SEQ ID NO: 41843 - protein, 10 aa, Homo sapiens
  misc_feature: Table A; Target 41843; HLA-B*40:02; MAGEB1; ENSG00000214107; CTA
APFSRSSHPM

SEQ ID NO: 41844 - protein, 10 aa, Homo sapiens
  misc_feature: Table A; Target 41844; HLA-B*54:01; MAGEB1; ENSG00000214107; CTA
APFSRSSHPM

SEQ ID NO: 41845 - protein, 10 aa, Homo sapiens
  misc_feature: Table A; Target 41845; HLA-B*55:01; MAGEB1; ENSG00000214107; CTA
APFSRSSHPM

SEQ ID NO: 41846 - protein, 10 aa, Homo sapiens
  misc_feature: Table A; Target 41846; HLA-B*56:01; MAGEB1; ENSG00000214107; CTA
APFSRSSHPM

SEQ ID NO: 41847 - protein, 10 aa, Homo sapiens
  misc_feature: Table A; Target 41847; HLA-C*04:01; MAGEB1; ENSG00000214107; CTA
APFSRSSHPM

SEQ ID NO: 41848 - protein, 10 aa, Homo sapiens
  misc_feature: Table A; Target 41848; HLA-C*06:02; MAGEB1; ENSG00000214107; CTA
APFSRSSHPM

SEQ ID NO: 41849 - protein, 10 aa, Homo sapiens
  misc_feature: Table A; Target 41849; HLA-C*07:01; MAGEB1; ENSG00000214107; CTA
APFSRSSHPM

SEQ ID NO: 41850 - protein, 10 aa, Homo sapiens
  misc_feature: Table A; Target 41850; HLA-C*07:02; MAGEB1; ENSG00000214107; CTA
APFSRSSHPM

SEQ ID NO: 41851 - protein, 8 aa, Homo sapiens
  misc_feature: Table A; Target 41851; HLA-B*56:01; MAGEB1; ENSG00000214107; CTA
APPTTTAA

SEQ ID NO: 41852 - protein, 9 aa, Homo sapiens
  misc_feature: Table A; Target 41852; HLA-B*07:02; MAGEB1; ENSG00000214107; CTA
APPTTTAAA

SEQ ID NO: 41853 - protein, 9 aa, Homo sapiens
  misc_feature: Table A; Target 41853; HLA-B*54:01; MAGEB1; ENSG00000214107; CTA
APPTTTAAA

SEQ ID NO: 41854 - protein, 9 aa, Homo sapiens
  misc_feature: Table A; Target 41854; HLA-B*55:01; MAGEB1; ENSG00000214107; CTA
APPTTTAAA

SEQ ID NO: 41855 - protein, 9 aa, Homo sapiens
  misc_feature: Table A; Target 41855; HLA-B*56:01; MAGEB1; ENSG00000214107; CTA
APPTTTAAA

SEQ ID NO: 41856 - protein, 9 aa, Homo sapiens
  misc_feature: Table A; Target 41856; HLA-C*01:02; MAGEB1; ENSG00000214107; CTA
APPTTTAAA

SEQ ID NO: 41857 - protein, 9 aa, Homo sapiens
  misc_feature: Table A; Target 41857; HLA-C*14:02; MAGEB1; ENSG00000214107; CTA
APPTTTAAA

SEQ ID NO: 41858 - protein, 10 aa, Homo sapiens
  misc_feature: Table A; Target 41858; HLA-B*56:01; MAGEB1; ENSG00000214107; CTA
APPTTTAAAA

SEQ ID NO: 41859 - protein, 11 aa, Homo sapiens
  misc_feature: Table A; Target 41859; HLA-B*07:02; MAGEB1; ENSG00000214107; CTA
APPTTTAAAAV

SEQ ID NO: 41860 - protein, 11 aa, Homo sapiens
  misc_feature: Table A; Target 41860; HLA-B*56:01; MAGEB1; ENSG00000214107; CTA
APPTTTAAAAV

SEQ ID NO: 41861 - protein, 11 aa, Homo sapiens
  misc_feature: Table A; Target 41861; HLA-C*07:02; MAGEB1; ENSG00000214107; CTA
APPTTTAAAAV

SEQ ID NO: 41862 - protein, 9 aa, Homo sapiens
  misc_feature: Table A; Target 41862; HLA-B*27:05; MAGEB1; ENSG00000214107; CTA
ARSRAPFSR

SEQ ID NO: 41863 - protein, 10 aa, Homo sapiens
  misc_feature: Table A; Target 41863; HLA-C*04:01; MAGEB1; ENSG00000214107; CTA
ASFSQATTST

SEQ ID NO: 41864 - protein, 9 aa, Homo sapiens
  misc_feature: Table A; Target 41864; HLA-B*57:01; MAGEB1; ENSG00000214107; CTA
ASRRLELVF

SEQ ID NO: 41865 - protein, 9 aa, Homo sapiens
  misc_feature: Table A; Target 41865; HLA-C*05:01; MAGEB1; ENSG00000214107; CTA
ATEEEIWKF

SEQ ID NO: 41866 - protein, 10 aa, Homo sapiens
  misc_feature: Table A; Target 41866; HLA-A*01:01; MAGEB1; ENSG00000214107; CTA
ATPRDFPSHY

SEQ ID NO: 41867 - protein, 10 aa, Homo sapiens
  misc_feature: Table A; Target 41867; HLA-A*30:02; MAGEB1; ENSG00000214107; CTA
ATPRDFPSHY

SEQ ID NO: 41868 - protein, 9 aa, Homo sapiens
  misc_feature: Table A; Target 41868; HLA-C*16:01; MAGEB1; ENSG00000214107; CTA
ATTFRARSR

SEQ ID NO: 41869 - protein, 9 aa, Homo sapiens
  misc_feature: Table A; Target 41869; HLA-B*13:02; MAGEB1; ENSG00000214107; CTA
ATTSTESSV

SEQ ID NO: 41870 - protein, 9 aa, Homo sapiens
  misc_feature: Table A; Target 41870; HLA-C*16:02; MAGEB1; ENSG00000214107; CTA
ATTSTESSV

SEQ ID NO: 41871 - protein, 10 aa, Homo sapiens
  misc_feature: Table A; Target 41871; HLA-A*03:02; MAGEB1; ENSG00000214107; CTA
ATTSTESSVK

SEQ ID NO: 41872 - protein, 10 aa, Homo sapiens
  misc_feature: Table A; Target 41872; HLA-A*11:01; MAGEB1; ENSG00000214107; CTA
ATTSTESSVK

SEQ ID NO: 41873 - protein, 10 aa, Homo sapiens
  misc_feature: Table A; Target 41873; HLA-A*24:02; MAGEB1; ENSG00000214107; CTA
AWEAGMLMHF

SEQ ID NO: 41874 - protein, 8 aa, Homo sapiens
  misc_feature: Table A; Target 41874; HLA-A*32:01; MAGEB1; ENSG00000214107; CTA
AYAETTKM

SEQ ID NO: 41875 - protein, 8 aa, Homo sapiens
  misc_feature: Table A; Target 41875; HLA-C*16:02; MAGEB1; ENSG00000214107; CTA
AYAETTKM

SEQ ID NO: 41876 - protein, 9 aa, Homo sapiens
  misc_feature: Table A; Target 41876; HLA-A*03:02; MAGEB1; ENSG00000214107; CTA
AYAETTKMK

SEQ ID NO: 41877 - protein, 9 aa, Homo sapiens
  misc_feature: Table A; Target 41877; HLA-A*33:03; MAGEB1; ENSG00000214107; CTA
AYAETTKMK

SEQ ID NO: 41878 - protein, 9 aa, Homo sapiens
  misc_feature: Table A; Target 41878; HLA-C*16:02; MAGEB1; ENSG00000214107; CTA
AYAETTKMK

SEQ ID NO: 41879 - protein, 11 aa, Homo sapiens
  misc_feature: Table A; Target 41879; HLA-A*24:02; MAGEB1; ENSG00000214107; CTA
AYAETTKMKVL

SEQ ID NO: 41880 - protein, 8 aa, Homo sapiens
  misc_feature: Table A; Target 41880; HLA-C*04:01; MAGEB1; ENSG00000214107; CTA
AYDGEEHL

SEQ ID NO: 41881 - protein, 9 aa, Homo sapiens
  misc_feature: Table A; Target 41881; HLA-A*23:01; MAGEB1; ENSG00000214107; CTA
AYDGEEHLI

SEQ ID NO: 41882 - protein, 9 aa, Homo sapiens
  misc_feature: Table A; Target 41882; HLA-A*24:02; MAGEB1; ENSG00000214107; CTA
AYDGEEHLI

SEQ ID NO: 41883 - protein, 9 aa, Homo sapiens
  misc_feature: Table A; Target 41883; HLA-B*35:03; MAGEB1; ENSG00000214107; CTA
AYDGEEHLI

SEQ ID NO: 41884 - protein, 9 aa, Homo sapiens
  misc_feature: Table A; Target 41884; HLA-B*38:01; MAGEB1; ENSG00000214107; CTA
AYDGEEHLI

SEQ ID NO: 41885 - protein, 9 aa, Homo sapiens
  misc_feature: Table A; Target 41885; HLA-B*55:01; MAGEB1; ENSG00000214107; CTA
AYDGEEHLI

SEQ ID NO: 41886 - protein, 9 aa, Homo sapiens
  misc_feature: Table A; Target 41886; HLA-C*04:01; MAGEB1; ENSG00000214107; CTA
AYDGEEHLI

SEQ ID NO: 41887 - protein, 9 aa, Homo sapiens
  misc_feature: Table A; Target 41887; HLA-C*05:01; MAGEB1; ENSG00000214107; CTA
AYDGEEHLI

SEQ ID NO: 41888 - protein, 9 aa, Homo sapiens
  misc_feature: Table A; Target 41888; HLA-C*07:04; MAGEB1; ENSG00000214107; CTA
AYDGEEHLI

SEQ ID NO: 41889 - protein, 10 aa, Homo sapiens
  misc_feature: Table A; Target 41889; HLA-A*01:01; MAGEB1; ENSG00000214107; CTA
AYDGEEHLIY

SEQ ID NO: 41890 - protein, 10 aa, Homo sapiens
  misc_feature: Table A; Target 41890; HLA-A*29:02; MAGEB1; ENSG00000214107; CTA
AYDGEEHLIY

SEQ ID NO: 41891 - protein, 10 aa, Homo sapiens
  misc_feature: Table A; Target 41891; HLA-A*30:02; MAGEB1; ENSG00000214107; CTA
AYDGEEHLIY

SEQ ID NO: 41892 - protein, 8 aa, Homo sapiens
  misc_feature: Table A; Target 41892; HLA-B*07:02; MAGEB1; ENSG00000214107; CTA
CPSSSPVL

SEQ ID NO: 41893 - protein, 8 aa, Homo sapiens
  misc_feature: Table A; Target 41893; HLA-B*35:01; MAGEB1; ENSG00000214107; CTA
CPSSSPVL

SEQ ID NO: 41894 - protein, 8 aa, Homo sapiens
  misc_feature: Table A; Target 41894; HLA-B*35:03; MAGEB1; ENSG00000214107; CTA
CPSSSPVL

SEQ ID NO: 41895 - protein, 8 aa, Homo sapiens
  misc_feature: Table A; Target 41895; HLA-C*07:02; MAGEB1; ENSG00000214107; CTA
CPSSSPVL

SEQ ID NO: 41896 - protein, 9 aa, Homo sapiens
  misc_feature: Table A; Target 41896; HLA-A*32:01; MAGEB1; ENSG00000214107; CTA
CQGEENASF

SEQ ID NO: 41897 - protein, 9 aa, Homo sapiens
  misc_feature: Table A; Target 41897; HLA-B*15:01; MAGEB1; ENSG00000214107; CTA
CQGEENASF

SEQ ID NO: 41898 - protein, 9 aa, Homo sapiens
  misc_feature: Table A; Target 41898; HLA-B*15:03; MAGEB1; ENSG00000214107; CTA
CQGEENASF

SEQ ID NO: 41899 - protein, 9 aa, Homo sapiens
  misc_feature: Table A; Target 41899; HLA-B*27:05; MAGEB1; ENSG00000214107; CTA
CQGEENASF

SEQ ID NO: 41900 - protein, 9 aa, Homo sapiens
  misc_feature: Table A; Target 41900; HLA-B*38:01; MAGEB1; ENSG00000214107; CTA
CQGEENASF

SEQ ID NO: 41901 - protein, 9 aa, Homo sapiens
  misc_feature: Table A; Target 41901; HLA-C*07:04; MAGEB1; ENSG00000214107; CTA
CQGEENASF

SEQ ID NO: 41902 - protein, 8 aa, Homo sapiens
  misc_feature: Table A; Target 41902; HLA-B*18:01; MAGEB1; ENSG00000214107; CTA
DEEERAQV

SEQ ID NO: 41903 - protein, 9 aa, Homo sapiens
  misc_feature: Table A; Target 41903; HLA-B*18:01; MAGEB1; ENSG00000214107; CTA
DEEERAQVR

SEQ ID NO: 41904 - protein, 10 aa, Homo sapiens
  misc_feature: Table A; Target 41904; HLA-B*39:01; MAGEB1; ENSG00000214107; CTA
DHFTEILNGA

SEQ ID NO: 41905 - protein, 9 aa, Homo sapiens
  misc_feature: Table A; Target 41905; HLA-A*33:01; MAGEB1; ENSG00000214107; CTA
DLVQEKYLK

SEQ ID NO: 41906 - protein, 10 aa, Homo sapiens
  misc_feature: Table A; Target 41906; HLA-A*25:01; MAGEB1; ENSG00000214107; CTA
DLVQEKYLKY

SEQ ID NO: 41907 - protein, 10 aa, Homo sapiens
  misc_feature: Table A; Target 41907; HLA-A*26:01; MAGEB1; ENSG00000214107; CTA
DLVQEKYLKY

SEQ ID NO: 41908 - protein, 9 aa, Homo sapiens
  misc_feature: Table A; Target 41908; HLA-A*33:01; MAGEB1; ENSG00000214107; CTA
DMLKVVDEK

SEQ ID NO: 41909 - protein, 10 aa, Homo sapiens
  misc_feature: Table A; Target 41909; HLA-A*01:01; MAGEB1; ENSG00000214107; CTA
DMLKVVDEKY

SEQ ID NO: 41910 - protein, 10 aa, Homo sapiens
  misc_feature: Table A; Target 41910; HLA-B*18:01; MAGEB1; ENSG00000214107; CTA
DMLKVVDEKY

SEQ ID NO: 41911 - protein, 8 aa, Homo sapiens
  misc_feature: Table A; Target 41911; HLA-C*03:03; MAGEB1; ENSG00000214107; CTA
DNPSGHTY

SEQ ID NO: 41912 - protein, 8 aa, Homo sapiens
  misc_feature: Table A; Target 41912; HLA-C*07:01; MAGEB1; ENSG00000214107; CTA
DNPSGHTY

SEQ ID NO: 41913 - protein, 9 aa, Homo sapiens
  misc_feature: Table A; Target 41913; HLA-B*35:01; MAGEB1; ENSG00000214107; CTA
DPVAWEAGM

SEQ ID NO: 41914 - protein, 9 aa, Homo sapiens
  misc_feature: Table A; Target 41914; HLA-B*35:03; MAGEB1; ENSG00000214107; CTA
DPVAWEAGM

SEQ ID NO: 41915 - protein, 9 aa, Homo sapiens
  misc_feature: Table A; Target 41915; HLA-A*26:01; MAGEB1; ENSG00000214107; CTA
DTPTSSPAA

SEQ ID NO: 41916 - protein, 8 aa, Homo sapiens
  misc_feature: Table A; Target 41916; HLA-C*07:01; MAGEB1; ENSG00000214107; CTA
EAGMLMHF

SEQ ID NO: 41917 - protein, 9 aa, Homo sapiens
  misc_feature: Table A; Target 41917; HLA-A*25:01; MAGEB1; ENSG00000214107; CTA
EDNPSGHTY

SEQ ID NO: 41918 - protein, 9 aa, Homo sapiens
  misc_feature: Table A; Target 41918; HLA-A*26:01; MAGEB1; ENSG00000214107; CTA
EDNPSGHTY

SEQ ID NO: 41919 - protein, 9 aa, Homo sapiens
  misc_feature: Table A; Target 41919; HLA-A*29:02; MAGEB1; ENSG00000214107; CTA
EDNPSGHTY

SEQ ID NO: 41920 - protein, 9 aa, Homo sapiens
  misc_feature: Table A; Target 41920; HLA-A*30:02; MAGEB1; ENSG00000214107; CTA
EDNPSGHTY

SEQ ID NO: 41921 - protein, 9 aa, Homo sapiens
  misc_feature: Table A; Target 41921; HLA-A*32:01; MAGEB1; ENSG00000214107; CTA
EDNPSGHTY

SEQ ID NO: 41922 - protein, 9 aa, Homo sapiens
  misc_feature: Table A; Target 41922; HLA-A*33:01; MAGEB1; ENSG00000214107; CTA
EDNPSGHTY

SEQ ID NO: 41923 - protein, 9 aa, Homo sapiens
  misc_feature: Table A; Target 41923; HLA-A*33:03; MAGEB1; ENSG00000214107; CTA
EDNPSGHTY

SEQ ID NO: 41924 - protein, 9 aa, Homo sapiens
  misc_feature: Table A; Target 41924; HLA-B*15:01; MAGEB1; ENSG00000214107; CTA
EDNPSGHTY

SEQ ID NO: 41925 - protein, 9 aa, Homo sapiens
  misc_feature: Table A; Target 41925; HLA-B*15:03; MAGEB1; ENSG00000214107; CTA
EDNPSGHTY

SEQ ID NO: 41926 - protein, 9 aa, Homo sapiens
  misc_feature: Table A; Target 41926; HLA-B*18:01; MAGEB1; ENSG00000214107; CTA
EDNPSGHTY

SEQ ID NO: 41927 - protein, 9 aa, Homo sapiens
  misc_feature: Table A; Target 41927; HLA-B*27:02; MAGEB1; ENSG00000214107; CTA
EDNPSGHTY

SEQ ID NO: 41928 - protein, 9 aa, Homo sapiens
  misc_feature: Table A; Target 41928; HLA-B*35:01; MAGEB1; ENSG00000214107; CTA
EDNPSGHTY

SEQ ID NO: 41929 - protein, 9 aa, Homo sapiens
  misc_feature: Table A; Target 41929; HLA-B*37:01; MAGEB1; ENSG00000214107; CTA
EDNPSGHTY

SEQ ID NO: 41930 - protein, 9 aa, Homo sapiens
  misc_feature: Table A; Target 41930; HLA-B*38:01; MAGEB1; ENSG00000214107; CTA
EDNPSGHTY

SEQ ID NO: 41931 - protein, 9 aa, Homo sapiens
  misc_feature: Table A; Target 41931; HLA-B*44:02; MAGEB1; ENSG00000214107; CTA
EDNPSGHTY

SEQ ID NO: 41932 - protein, 9 aa, Homo sapiens
  misc_feature: Table A; Target 41932; HLA-B*44:03; MAGEB1; ENSG00000214107; CTA
EDNPSGHTY

SEQ ID NO: 41933 - protein, 9 aa, Homo sapiens
  misc_feature: Table A; Target 41933; HLA-C*04:01; MAGEB1; ENSG00000214107; CTA
EDNPSGHTY

SEQ ID NO: 41934 - protein, 9 aa, Homo sapiens
  misc_feature: Table A; Target 41934; HLA-C*07:01; MAGEB1; ENSG00000214107; CTA
EDNPSGHTY

SEQ ID NO: 41935 - protein, 9 aa, Homo sapiens
  misc_feature: Table A; Target 41935; HLA-C*07:04; MAGEB1; ENSG00000214107; CTA
EDNPSGHTY

SEQ ID NO: 41936 - protein, 9 aa, Homo sapiens
  misc_feature: Table A; Target 41936; HLA-C*07:06; MAGEB1; ENSG00000214107; CTA
EDNPSGHTY

SEQ ID NO: 41937 - protein, 9 aa, Homo sapiens
  misc_feature: Table A; Target 41937; HLA-C*14:02; MAGEB1; ENSG00000214107; CTA
EDNPSGHTY

SEQ ID NO: 41938 - protein, 9 aa, Homo sapiens
  misc_feature: Table A; Target 41938; HLA-C*16:01; MAGEB1; ENSG00000214107; CTA
EDNPSGHTY

SEQ ID NO: 41939 - protein, 9 aa, Homo sapiens
  misc_feature: Table A; Target 41939; HLA-C*16:02; MAGEB1; ENSG00000214107; CTA
EDNPSGHTY

SEQ ID NO: 41940 - protein, 9 aa, Homo sapiens
  misc_feature: Table A; Target 41940; HLA-C*16:04; MAGEB1; ENSG00000214107; CTA
EDNPSGHTY

SEQ ID NO: 41941 - protein, 11 aa, Homo sapiens
  misc_feature: Table A; Target 41941; HLA-A*23:01; MAGEB1; ENSG00000214107; CTA
EDNPSGHTYTL

SEQ ID NO: 41942 - protein, 11 aa, Homo sapiens
  misc_feature: Table A; Target 41942; HLA-A*30:01; MAGEB1; ENSG00000214107; CTA
EDNPSGHTYTL

SEQ ID NO: 41943 - protein, 11 aa, Homo sapiens
  misc_feature: Table A; Target 41943; HLA-A*33:03; MAGEB1; ENSG00000214107; CTA
EDNPSGHTYTL

SEQ ID NO: 41944 - protein, 11 aa, Homo sapiens
  misc_feature: Table A; Target 41944; HLA-B*07:02; MAGEB1; ENSG00000214107; CTA
EDNPSGHTYTL

SEQ ID NO: 41945 - protein, 11 aa, Homo sapiens
  misc_feature: Table A; Target 41945; HLA-B*37:01; MAGEB1; ENSG00000214107; CTA
EDNPSGHTYTL

SEQ ID NO: 41946 - protein, 11 aa, Homo sapiens
  misc_feature: Table A; Target 41946; HLA-B*38:01; MAGEB1; ENSG00000214107; CTA
EDNPSGHTYTL

SEQ ID NO: 41947 - protein, 11 aa, Homo sapiens
  misc_feature: Table A; Target 41947; HLA-B*44:02; MAGEB1; ENSG00000214107; CTA
EDNPSGHTYTL

SEQ ID NO: 41948 - protein, 9 aa, Homo sapiens
  misc_feature: Table A; Target 41948; HLA-B*49:01; MAGEB1; ENSG00000214107; CTA
EECPSSSPV

SEQ ID NO: 41949 - protein, 10 aa, Homo sapiens
  misc_feature: Table A; Target 41949; HLA-A*30:01; MAGEB1; ENSG00000214107; CTA
EECPSSSPVL

SEQ ID NO: 41950 - protein, 10 aa, Homo sapiens
  misc_feature: Table A; Target 41950; HLA-B*38:01; MAGEB1; ENSG00000214107; CTA
EECPSSSPVL

SEQ ID NO: 41951 - protein, 10 aa, Homo sapiens
  misc_feature: Table A; Target 41951; HLA-B*40:01; MAGEB1; ENSG00000214107; CTA
EECPSSSPVL

SEQ ID NO: 41952 - protein, 10 aa, Homo sapiens
  misc_feature: Table A; Target 41952; HLA-B*40:02; MAGEB1; ENSG00000214107; CTA
EECPSSSPVL

SEQ ID NO: 41953 - protein, 10 aa, Homo sapiens
  misc_feature: Table A; Target 41953; HLA-B*44:02; MAGEB1; ENSG00000214107; CTA
EECPSSSPVL

SEQ ID NO: 41954 - protein, 10 aa, Homo sapiens
  misc_feature: Table A; Target 41954; HLA-B*44:03; MAGEB1; ENSG00000214107; CTA
EECPSSSPVL

SEQ ID NO: 41955 - protein, 9 aa, Homo sapiens
  misc_feature: Table A; Target 41955; HLA-A*68:02; MAGEB1; ENSG00000214107; CTA
EEIWKFMNV

SEQ ID NO: 41956 - protein, 9 aa, Homo sapiens
  misc_feature: Table A; Target 41956; HLA-B*49:01; MAGEB1; ENSG00000214107; CTA
EEIWKFMNV

SEQ ID NO: 41957 - protein, 9 aa, Homo sapiens
  misc_feature: Table A; Target 41957; HLA-A*30:01; MAGEB1; ENSG00000214107; CTA
EENASFSQA

SEQ ID NO: 41958 - protein, 9 aa, Homo sapiens
  misc_feature: Table A; Target 41958; HLA-B*18:01; MAGEB1; ENSG00000214107; CTA
EENASFSQA

SEQ ID NO: 41959 - protein, 9 aa, Homo sapiens
  misc_feature: Table A; Target 41959; HLA-B*40:02; MAGEB1; ENSG00000214107; CTA
EENASFSQA

SEQ ID NO: 41960 - protein, 9 aa, Homo sapiens
  misc_feature: Table A; Target 41960; HLA-B*44:02; MAGEB1; ENSG00000214107; CTA
EENASFSQA

SEQ ID NO: 41961 - protein, 9 aa, Homo sapiens
  misc_feature: Table A; Target 41961; HLA-B*49:01; MAGEB1; ENSG00000214107; CTA
EENASFSQA

SEQ ID NO: 41962 - protein, 8 aa, Homo sapiens
  misc_feature: Table A; Target 41962; HLA-B*18:01; MAGEB1; ENSG00000214107; CTA
EETQGLKV

SEQ ID NO: 41963 - protein, 8 aa, Homo sapiens
  misc_feature: Table A; Target 41963; HLA-B*40:02; MAGEB1; ENSG00000214107; CTA
EETQGLKV

SEQ ID NO: 41964 - protein, 8 aa, Homo sapiens
  misc_feature: Table A; Target 41964; HLA-B*44:03; MAGEB1; ENSG00000214107; CTA
EETQGLKV

SEQ ID NO: 41965 - protein, 8 aa, Homo sapiens
  misc_feature: Table A; Target 41965; HLA-B*49:01; MAGEB1; ENSG00000214107; CTA
EETQGLKV

SEQ ID NO: 41966 - protein, 9 aa, Homo sapiens
  misc_feature: Table A; Target 41966; HLA-A*30:01; MAGEB1; ENSG00000214107; CTA
EETQGLKVA

SEQ ID NO: 41967 - protein, 9 aa, Homo sapiens
  misc_feature: Table A; Target 41967; HLA-B*18:01; MAGEB1; ENSG00000214107; CTA
EETQGLKVA

SEQ ID NO: 41968 - protein, 9 aa, Homo sapiens
  misc_feature: Table A; Target 41968; HLA-B*44:02; MAGEB1; ENSG00000214107; CTA
EETQGLKVA

SEQ ID NO: 41969 - protein, 9 aa, Homo sapiens
  misc_feature: Table A; Target 41969; HLA-B*44:03; MAGEB1; ENSG00000214107; CTA
EETQGLKVA

SEQ ID NO: 41970 - protein, 9 aa, Homo sapiens
  misc_feature: Table A; Target 41970; HLA-B*49:01; MAGEB1; ENSG00000214107; CTA
EETQGLKVA

SEQ ID NO: 41971 - protein, 10 aa, Homo sapiens
  misc_feature: Table A; Target 41971; HLA-B*18:01; MAGEB1; ENSG00000214107; CTA
EETQGLKVAH

SEQ ID NO: 41972 - protein, 10 aa, Homo sapiens
  misc_feature: Table A; Target 41972; HLA-B*40:02; MAGEB1; ENSG00000214107; CTA
EETQGLKVAH

SEQ ID NO: 41973 - protein, 10 aa, Homo sapiens
  misc_feature: Table A; Target 41973; HLA-B*44:02; MAGEB1; ENSG00000214107; CTA
EETQGLKVAH

SEQ ID NO: 41974 - protein, 10 aa, Homo sapiens
  misc_feature: Table A; Target 41974; HLA-B*44:03; MAGEB1; ENSG00000214107; CTA
EETQGLKVAH

SEQ ID NO: 41975 - protein, 9 aa, Homo sapiens
  misc_feature: Table A; Target 41975; HLA-A*33:01; MAGEB1; ENSG00000214107; CTA
EHLIYGEPR

SEQ ID NO: 41976 - protein, 9 aa, Homo sapiens
  misc_feature: Table A; Target 41976; HLA-A*33:03; MAGEB1; ENSG00000214107; CTA
EHLIYGEPR

SEQ ID NO: 41977 - protein, 8 aa, Homo sapiens
  misc_feature: Table A; Target 41977; HLA-A*33:01; MAGEB1; ENSG00000214107; CTA
EILNGASR

SEQ ID NO: 41978 - protein, 8 aa, Homo sapiens
  misc_feature: Table A; Target 41978; HLA-A*33:03; MAGEB1; ENSG00000214107; CTA
EILNGASR

SEQ ID NO: 41979 - protein, 9 aa, Homo sapiens
  misc_feature: Table A; Target 41979; HLA-A*33:01; MAGEB1; ENSG00000214107; CTA
EILNGASRR

SEQ ID NO: 41980 - protein, 9 aa, Homo sapiens
  misc_feature: Table A; Target 41980; HLA-A*33:03; MAGEB1; ENSG00000214107; CTA
EILNGASRR

SEQ ID NO: 41981 - protein, 9 aa, Homo sapiens
  misc_feature: Table A; Target 41981; HLA-A*68:02; MAGEB1; ENSG00000214107; CTA
EIWKFMNVL

SEQ ID NO: 41982 - protein, 8 aa, Homo sapiens
  misc_feature: Table A; Target 41982; HLA-B*08:01; MAGEB1; ENSG00000214107; CTA
EPIMKADM

SEQ ID NO: 41983 - protein, 9 aa, Homo sapiens
  misc_feature: Table A; Target 41983; HLA-B*07:02; MAGEB1; ENSG00000214107; CTA
EPIMKADML

SEQ ID NO: 41984 - protein, 9 aa, Homo sapiens
  misc_feature: Table A; Target 41984; HLA-B*08:01; MAGEB1; ENSG00000214107; CTA
EPIMKADML

SEQ ID NO: 41985 - protein, 9 aa, Homo sapiens
  misc_feature: Table A; Target 41985; HLA-B*35:01; MAGEB1; ENSG00000214107; CTA
EPIMKADML

SEQ ID NO: 41986 - protein, 9 aa, Homo sapiens
  misc_feature: Table A; Target 41986; HLA-B*35:03; MAGEB1; ENSG00000214107; CTA
EPIMKADML

SEQ ID NO: 41987 - protein, 9 aa, Homo sapiens
  misc_feature: Table A; Target 41987; HLA-C*07:02; MAGEB1; ENSG00000214107; CTA
EPIMKADML

SEQ ID NO: 41988 - protein, 10 aa, Homo sapiens
  misc_feature: Table A; Target 41988; HLA-A*33:03; MAGEB1; ENSG00000214107; CTA
EQVPNSDPPR

SEQ ID NO: 41989 - protein, 10 aa, Homo sapiens
  misc_feature: Table A; Target 41989; HLA-A*68:01; MAGEB1; ENSG00000214107; CTA
EQVPNSDPPR

SEQ ID NO: 41990 - protein, 10 aa, Homo sapiens
  misc_feature: Table A; Target 41990; HLA-B*27:02; MAGEB1; ENSG00000214107; CTA
EQVPNSDPPR

SEQ ID NO: 41991 - protein, 10 aa, Homo sapiens
  misc_feature: Table A; Target 41991; HLA-B*39:01; MAGEB1; ENSG00000214107; CTA
EQVPNSDPPR

SEQ ID NO: 41992 - protein, 10 aa, Homo sapiens
  misc_feature: Table A; Target 41992; HLA-C*07:06; MAGEB1; ENSG00000214107; CTA
EQVPNSDPPR

SEQ ID NO: 41993 - protein, 11 aa, Homo sapiens
  misc_feature: Table A; Target 41993; HLA-A*25:01; MAGEB1; ENSG00000214107; CTA
EQVPNSDPPRY

SEQ ID NO: 41994 - protein, 11 aa, Homo sapiens
  misc_feature: Table A; Target 41994; HLA-A*26:01; MAGEB1; ENSG00000214107; CTA
EQVPNSDPPRY

SEQ ID NO: 41995 - protein, 11 aa, Homo sapiens
  misc_feature: Table A; Target 41995; HLA-A*29:02; MAGEB1; ENSG00000214107; CTA
EQVPNSDPPRY

SEQ ID NO: 41996 - protein, 11 aa, Homo sapiens
  misc_feature: Table A; Target 41996; HLA-A*30:02; MAGEB1; ENSG00000214107; CTA
EQVPNSDPPRY

SEQ ID NO: 41997 - protein, 11 aa, Homo sapiens
  misc_feature: Table A; Target 41997; HLA-B*15:01; MAGEB1; ENSG00000214107; CTA
EQVPNSDPPRY

SEQ ID NO: 41998 - protein, 11 aa, Homo sapiens
  misc_feature: Table A; Target 41998; HLA-B*38:01; MAGEB1; ENSG00000214107; CTA
EQVPNSDPPRY

SEQ ID NO: 41999 - protein, 11 aa, Homo sapiens
  misc_feature: Table A; Target 41999; HLA-B*39:01; MAGEB1; ENSG00000214107; CTA
EQVPNSDPPRY

SEQ ID NO: 42000 - protein, 11 aa, Homo sapiens
  misc_feature: Table A; Target 42000; HLA-B*44:02; MAGEB1; ENSG00000214107; CTA
EQVPNSDPPRY

SEQ ID NO: 42001 - protein, 11 aa, Homo sapiens
  misc_feature: Table A; Target 42001; HLA-B*44:03; MAGEB1; ENSG00000214107; CTA
EQVPNSDPPRY

SEQ ID NO: 42002 - protein, 11 aa, Homo sapiens
  misc_feature: Table A; Target 42002; HLA-B*58:01; MAGEB1; ENSG00000214107; CTA
EQVPNSDPPRY

SEQ ID NO: 42003 - protein, 11 aa, Homo sapiens
  misc_feature: Table A; Target 42003; HLA-C*16:04; MAGEB1; ENSG00000214107; CTA
EQVPNSDPPRY

SEQ ID NO: 42004 - protein, 9 aa, Homo sapiens
  misc_feature: Table A; Target 42004; HLA-C*06:02; MAGEB1; ENSG00000214107; CTA
ERAQVRSSV

SEQ ID NO: 42005 - protein, 8 aa, Homo sapiens
  misc_feature: Table A; Target 42005; HLA-C*05:01; MAGEB1; ENSG00000214107; CTA
ESDEGAKC

SEQ ID NO: 42006 - protein, 10 aa, Homo sapiens
  misc_feature: Table A; Target 42006; HLA-A*25:01; MAGEB1; ENSG00000214107; CTA
ESSVKDPVAW

SEQ ID NO: 42007 - protein, 10 aa, Homo sapiens
  misc_feature: Table A; Target 42007; HLA-B*57:01; MAGEB1; ENSG00000214107; CTA
ESSVKDPVAW

SEQ ID NO: 42008 - protein, 9 aa, Homo sapiens
  misc_feature: Table A; Target 42008; HLA-A*33:01; MAGEB1; ENSG00000214107; CTA
ETQGLKVAH

SEQ ID NO: 42009 - protein, 9 aa, Homo sapiens
  misc_feature: Table A; Target 42009; HLA-A*33:03; MAGEB1; ENSG00000214107; CTA
ETQGLKVAH

SEQ ID NO: 42010 - protein, 8 aa, Homo sapiens
  misc_feature: Table A; Target 42010; HLA-B*08:01; MAGEB1; ENSG00000214107; CTA
ETTKMKVL

SEQ ID NO: 42011 - protein, 10 aa, Homo sapiens
  misc_feature: Table A; Target 42011; HLA-A*25:01; MAGEB1; ENSG00000214107; CTA
ETTKMKVLEF

SEQ ID NO: 42012 - protein, 10 aa, Homo sapiens
  misc_feature: Table A; Target 42012; HLA-A*26:01; MAGEB1; ENSG00000214107; CTA
ETTKMKVLEF

SEQ ID NO: 42013 - protein, 10 aa, Homo sapiens
  misc_feature: Table A; Target 42013; HLA-B*27:02; MAGEB1; ENSG00000214107; CTA
FITQDLVQEK

SEQ ID NO: 42014 - protein, 11 aa, Homo sapiens
  misc_feature: Table A; Target 42014; HLA-A*29:02; MAGEB1; ENSG00000214107; CTA
FITQDLVQEKY

SEQ ID NO: 42015 - protein, 8 aa, Homo sapiens
  misc_feature: Table A; Target 42015; HLA-A*30:02; MAGEB1; ENSG00000214107; CTA
FMNVLGAY

SEQ ID NO: 42016 - protein, 8 aa, Homo sapiens
  misc_feature: Table A; Target 42016; HLA-B*15:01; MAGEB1; ENSG00000214107; CTA
FMNVLGAY

SEQ ID NO: 42017 - protein, 8 aa, Homo sapiens
  misc_feature: Table A; Target 42017; HLA-B*46:01; MAGEB1; ENSG00000214107; CTA
FMNVLGAY

SEQ ID NO: 42018 - protein, 8 aa, Homo sapiens
  misc_feature: Table A; Target 42018; HLA-C*14:02; MAGEB1; ENSG00000214107; CTA
FMNVLGAY

SEQ ID NO: 42019 - protein, 9 aa, Homo sapiens
  misc_feature: Table A; Target 42019; HLA-B*54:01; MAGEB1; ENSG00000214107; CTA
FPRNGLLMP

SEQ ID NO: 42020 - protein, 9 aa, Homo sapiens
  misc_feature: Table A; Target 42020; HLA-B*56:01; MAGEB1; ENSG00000214107; CTA
FPRNGLLMP

SEQ ID NO: 42021 - protein, 8 aa, Homo sapiens
  misc_feature: Table A; Target 42021; HLA-B*54:01; MAGEB1; ENSG00000214107; CTA
FPSHYEEA

SEQ ID NO: 42022 - protein, 9 aa, Homo sapiens
  misc_feature: Table A; Target 42022; HLA-B*07:02; MAGEB1; ENSG00000214107; CTA
FPSHYEEAL

SEQ ID NO: 42023 - protein, 9 aa, Homo sapiens
  misc_feature: Table A; Target 42023; HLA-B*35:01; MAGEB1; ENSG00000214107; CTA
FPSHYEEAL

SEQ ID NO: 42024 - protein, 9 aa, Homo sapiens
  misc_feature: Table A; Target 42024; HLA-B*35:03; MAGEB1; ENSG00000214107; CTA
FPSHYEEAL

SEQ ID NO: 42025 - protein, 9 aa, Homo sapiens
  misc_feature: Table A; Target 42025; HLA-B*38:01; MAGEB1; ENSG00000214107; CTA
FPSHYEEAL

SEQ ID NO: 42026 - protein, 9 aa, Homo sapiens
  misc_feature: Table A; Target 42026; HLA-B*39:01; MAGEB1; ENSG00000214107; CTA
FPSHYEEAL

SEQ ID NO: 42027 - protein, 9 aa, Homo sapiens
  misc_feature: Table A; Target 42027; HLA-B*54:01; MAGEB1; ENSG00000214107; CTA
FPSHYEEAL

SEQ ID NO: 42028 - protein, 9 aa, Homo sapiens
  misc_feature: Table A; Target 42028; HLA-B*55:01; MAGEB1; ENSG00000214107; CTA
FPSHYEEAL

SEQ ID NO: 42029 - protein, 9 aa, Homo sapiens
  misc_feature: Table A; Target 42029; HLA-B*56:01; MAGEB1; ENSG00000214107; CTA
FPSHYEEAL

SEQ ID NO: 42030 - protein, 9 aa, Homo sapiens
  misc_feature: Table A; Target 42030; HLA-C*03:03; MAGEB1; ENSG00000214107; CTA
FPSHYEEAL

SEQ ID NO: 42031 - protein, 9 aa, Homo sapiens
  misc_feature: Table A; Target 42031; HLA-C*03:04; MAGEB1; ENSG00000214107; CTA
FPSHYEEAL

SEQ ID NO: 42032 - protein, 8 aa, Homo sapiens
  misc_feature: Table A; Target 42032; HLA-C*16:01; MAGEB1; ENSG00000214107; CTA
FSRSSHPM

SEQ ID NO: 42033 - protein, 10 aa, Homo sapiens
  misc_feature: Table A; Target 42033; HLA-A*01:01; MAGEB1; ENSG00000214107; CTA
FTEILNGASR

SEQ ID NO: 42034 - protein, 10 aa, Homo sapiens
  misc_feature: Table A; Target 42034; HLA-A*33:01; MAGEB1; ENSG00000214107; CTA
FTEILNGASR

SEQ ID NO: 42035 - protein, 10 aa, Homo sapiens
  misc_feature: Table A; Target 42035; HLA-A*33:03; MAGEB1; ENSG00000214107; CTA
FTEILNGASR

SEQ ID NO: 42036 - protein, 10 aa, Homo sapiens
  misc_feature: Table A; Target 42036; HLA-A*68:01; MAGEB1; ENSG00000214107; CTA
FTEILNGASR

SEQ ID NO: 42037 - protein, 10 aa, Homo sapiens
  misc_feature: Table A; Target 42037; HLA-B*27:02; MAGEB1; ENSG00000214107; CTA
FTEILNGASR

SEQ ID NO: 42038 - protein, 10 aa, Homo sapiens
  misc_feature: Table A; Target 42038; HLA-C*07:06; MAGEB1; ENSG00000214107; CTA
FTEILNGASR

SEQ ID NO: 42039 - protein, 11 aa, Homo sapiens
  misc_feature: Table A; Target 42039; HLA-A*01:01; MAGEB1; ENSG00000214107; CTA
FTEILNGASRR

SEQ ID NO: 42040 - protein, 9 aa, Homo sapiens
  misc_feature: Table A; Target 42040; HLA-B*46:01; MAGEB1; ENSG00000214107; CTA
GAPPTTTAA

SEQ ID NO: 42041 - protein, 9 aa, Homo sapiens
  misc_feature: Table A; Target 42041; HLA-C*01:02; MAGEB1; ENSG00000214107; CTA
GAPPTTTAA

SEQ ID NO: 42042 - protein, 9 aa, Homo sapiens
  misc_feature: Table A; Target 42042; HLA-C*14:02; MAGEB1; ENSG00000214107; CTA
GAPPTTTAA

SEQ ID NO: 42043 - protein, 8 aa, Homo sapiens
  misc_feature: Table A; Target 42043; HLA-B*07:02; MAGEB1; ENSG00000214107; CTA
GASRRLEL

SEQ ID NO: 42044 - protein, 8 aa, Homo sapiens
  misc_feature: Table A; Target 42044; HLA-C*16:01; MAGEB1; ENSG00000214107; CTA
GASRRLEL

SEQ ID NO: 42045 - protein, 9 aa, Homo sapiens
  misc_feature: Table A; Target 42045; HLA-A*02:01; MAGEB1; ENSG00000214107; CTA
GAYDGEEHL

SEQ ID NO: 42046 - protein, 9 aa, Homo sapiens
  misc_feature: Table A; Target 42046; HLA-A*32:01; MAGEB1; ENSG00000214107; CTA
GAYDGEEHL

SEQ ID NO: 42047 - protein, 9 aa, Homo sapiens
  misc_feature: Table A; Target 42047; HLA-B*13:02; MAGEB1; ENSG00000214107; CTA
GAYDGEEHL

SEQ ID NO: 42048 - protein, 9 aa, Homo sapiens
  misc_feature: Table A; Target 42048; HLA-B*15:01; MAGEB1; ENSG00000214107; CTA
GAYDGEEHL

SEQ ID NO: 42049 - protein, 9 aa, Homo sapiens
  misc_feature: Table A; Target 42049; HLA-B*15:03; MAGEB1; ENSG00000214107; CTA
GAYDGEEHL

SEQ ID NO: 42050 - protein, 9 aa, Homo sapiens
  misc_feature: Table A; Target 42050; HLA-B*27:05; MAGEB1; ENSG00000214107; CTA
GAYDGEEHL

SEQ ID NO: 42051 - protein, 9 aa, Homo sapiens
  misc_feature: Table A; Target 42051; HLA-B*35:03; MAGEB1; ENSG00000214107; CTA
GAYDGEEHL

SEQ ID NO: 42052 - protein, 9 aa, Homo sapiens
  misc_feature: Table A; Target 42052; HLA-B*38:01; MAGEB1; ENSG00000214107; CTA
GAYDGEEHL

SEQ ID NO: 42053 - protein, 9 aa, Homo sapiens
  misc_feature: Table A; Target 42053; HLA-B*39:01; MAGEB1; ENSG00000214107; CTA
GAYDGEEHL

SEQ ID NO: 42054 - protein, 9 aa, Homo sapiens
  misc_feature: Table A; Target 42054; HLA-B*40:01; MAGEB1; ENSG00000214107; CTA
GAYDGEEHL

SEQ ID NO: 42055 - protein, 9 aa, Homo sapiens
  misc_feature: Table A; Target 42055; HLA-B*46:01; MAGEB1; ENSG00000214107; CTA
GAYDGEEHL

SEQ ID NO: 42056 - protein, 9 aa, Homo sapiens
  misc_feature: Table A; Target 42056; HLA-B*55:01; MAGEB1; ENSG00000214107; CTA
GAYDGEEHL

SEQ ID NO: 42057 - protein, 9 aa, Homo sapiens
  misc_feature: Table A; Target 42057; HLA-B*58:01; MAGEB1; ENSG00000214107; CTA
GAYDGEEHL

SEQ ID NO: 42058 - protein, 9 aa, Homo sapiens
  misc_feature: Table A; Target 42058; HLA-C*01:02; MAGEB1; ENSG00000214107; CTA
GAYDGEEHL

SEQ ID NO: 42059 - protein, 9 aa, Homo sapiens
  misc_feature: Table A; Target 42059; HLA-C*02:02; MAGEB1; ENSG00000214107; CTA
GAYDGEEHL

SEQ ID NO: 42060 - protein, 9 aa, Homo sapiens
  misc_feature: Table A; Target 42060; HLA-C*03:03; MAGEB1; ENSG00000214107; CTA
GAYDGEEHL

SEQ ID NO: 42061 - protein, 9 aa, Homo sapiens
  misc_feature: Table A; Target 42061; HLA-C*03:04; MAGEB1; ENSG00000214107; CTA
GAYDGEEHL

SEQ ID NO: 42062 - protein, 9 aa, Homo sapiens
  misc_feature: Table A; Target 42062; HLA-C*05:01; MAGEB1; ENSG00000214107; CTA
GAYDGEEHL

SEQ ID NO: 42063 - protein, 9 aa, Homo sapiens
  misc_feature: Table A; Target 42063; HLA-C*12:03; MAGEB1; ENSG00000214107; CTA
GAYDGEEHL

SEQ ID NO: 42064 - protein, 9 aa, Homo sapiens
  misc_feature: Table A; Target 42064; HLA-C*16:02; MAGEB1; ENSG00000214107; CTA
GAYDGEEHL

SEQ ID NO: 42065 - protein, 9 aa, Homo sapiens
  misc_feature: Table A; Target 42065; HLA-C*16:04; MAGEB1; ENSG00000214107; CTA
GAYDGEEHL

SEQ ID NO: 42066 - protein, 10 aa, Homo sapiens
  misc_feature: Table A; Target 42066; HLA-A*02:01; MAGEB1; ENSG00000214107; CTA
GAYDGEEHLI

SEQ ID NO: 42067 - protein, 10 aa, Homo sapiens
  misc_feature: Table A; Target 42067; HLA-A*23:01; MAGEB1; ENSG00000214107; CTA
GAYDGEEHLI

SEQ ID NO: 42068 - protein, 10 aa, Homo sapiens
  misc_feature: Table A; Target 42068; HLA-A*25:01; MAGEB1; ENSG00000214107; CTA
GAYDGEEHLI

SEQ ID NO: 42069 - protein, 10 aa, Homo sapiens
  misc_feature: Table A; Target 42069; HLA-A*30:01; MAGEB1; ENSG00000214107; CTA
GAYDGEEHLI

SEQ ID NO: 42070 - protein, 10 aa, Homo sapiens
  misc_feature: Table A; Target 42070; HLA-B*13:02; MAGEB1; ENSG00000214107; CTA
GAYDGEEHLI

SEQ ID NO: 42071 - protein, 10 aa, Homo sapiens
  misc_feature: Table A; Target 42071; HLA-B*27:05; MAGEB1; ENSG00000214107; CTA
GAYDGEEHLI

SEQ ID NO: 42072 - protein, 10 aa, Homo sapiens
  misc_feature: Table A; Target 42072; HLA-B*38:01; MAGEB1; ENSG00000214107; CTA
GAYDGEEHLI

SEQ ID NO: 42073 - protein, 10 aa, Homo sapiens
  misc_feature: Table A; Target 42073; HLA-B*40:01; MAGEB1; ENSG00000214107; CTA
GAYDGEEHLI

SEQ ID NO: 42074 - protein, 10 aa, Homo sapiens
  misc_feature: Table A; Target 42074; HLA-B*49:01; MAGEB1; ENSG00000214107; CTA
GAYDGEEHLI

SEQ ID NO: 42075 - protein, 10 aa, Homo sapiens
  misc_feature: Table A; Target 42075; HLA-B*51:01; MAGEB1; ENSG00000214107; CTA
GAYDGEEHLI

SEQ ID NO: 42076 - protein, 10 aa, Homo sapiens
  misc_feature: Table A; Target 42076; HLA-B*57:01; MAGEB1; ENSG00000214107; CTA
GAYDGEEHLI

SEQ ID NO: 42077 - protein, 10 aa, Homo sapiens
  misc_feature: Table A; Target 42077; HLA-B*58:01; MAGEB1; ENSG00000214107; CTA
GAYDGEEHLI

SEQ ID NO: 42078 - protein, 10 aa, Homo sapiens
  misc_feature: Table A; Target 42078; HLA-C*02:02; MAGEB1; ENSG00000214107; CTA
GAYDGEEHLI

SEQ ID NO: 42079 - protein, 10 aa, Homo sapiens
  misc_feature: Table A; Target 42079; HLA-C*05:01; MAGEB1; ENSG00000214107; CTA
GAYDGEEHLI

SEQ ID NO: 42080 - protein, 10 aa, Homo sapiens
  misc_feature: Table A; Target 42080; HLA-C*06:02; MAGEB1; ENSG00000214107; CTA
GAYDGEEHLI

SEQ ID NO: 42081 - protein, 10 aa, Homo sapiens
  misc_feature: Table A; Target 42081; HLA-C*12:03; MAGEB1; ENSG00000214107; CTA
GAYDGEEHLI

SEQ ID NO: 42082 - protein, 10 aa, Homo sapiens
  misc_feature: Table A; Target 42082; HLA-C*16:02; MAGEB1; ENSG00000214107; CTA
GAYDGEEHLI

SEQ ID NO: 42083 - protein, 10 aa, Homo sapiens
  misc_feature: Table A; Target 42083; HLA-C*16:04; MAGEB1; ENSG00000214107; CTA
GAYDGEEHLI

SEQ ID NO: 42084 - protein, 11 aa, Homo sapiens
  misc_feature: Table A; Target 42084; HLA-A*01:01; MAGEB1; ENSG00000214107; CTA
GAYDGEEHLIY

SEQ ID NO: 42085 - protein, 11 aa, Homo sapiens
  misc_feature: Table A; Target 42085; HLA-A*11:01; MAGEB1; ENSG00000214107; CTA
GAYDGEEHLIY

SEQ ID NO: 42086 - protein, 11 aa, Homo sapiens
  misc_feature: Table A; Target 42086; HLA-A*25:01; MAGEB1; ENSG00000214107; CTA
GAYDGEEHLIY

SEQ ID NO: 42087 - protein, 11 aa, Homo sapiens
  misc_feature: Table A; Target 42087; HLA-A*26:01; MAGEB1; ENSG00000214107; CTA
GAYDGEEHLIY

SEQ ID NO: 42088 - protein, 11 aa, Homo sapiens
  misc_feature: Table A; Target 42088; HLA-A*29:02; MAGEB1; ENSG00000214107; CTA
GAYDGEEHLIY

SEQ ID NO: 42089 - protein, 11 aa, Homo sapiens
  misc_feature: Table A; Target 42089; HLA-A*30:02; MAGEB1; ENSG00000214107; CTA
GAYDGEEHLIY

SEQ ID NO: 42090 - protein, 11 aa, Homo sapiens
  misc_feature: Table A; Target 42090; HLA-B*15:01; MAGEB1; ENSG00000214107; CTA
GAYDGEEHLIY

SEQ ID NO: 42091 - protein, 11 aa, Homo sapiens
  misc_feature: Table A; Target 42091; HLA-B*15:03; MAGEB1; ENSG00000214107; CTA
GAYDGEEHLIY

SEQ ID NO: 42092 - protein, 11 aa, Homo sapiens
  misc_feature: Table A; Target 42092; HLA-B*35:01; MAGEB1; ENSG00000214107; CTA
GAYDGEEHLIY

SEQ ID NO: 42093 - protein, 11 aa, Homo sapiens
  misc_feature: Table A; Target 42093; HLA-B*46:01; MAGEB1; ENSG00000214107; CTA
GAYDGEEHLIY

SEQ ID NO: 42094 - protein, 11 aa, Homo sapiens
  misc_feature: Table A; Target 42094; HLA-B*55:01; MAGEB1; ENSG00000214107; CTA
GAYDGEEHLIY

SEQ ID NO: 42095 - protein, 11 aa, Homo sapiens
  misc_feature: Table A; Target 42095; HLA-B*57:01; MAGEB1; ENSG00000214107; CTA
GAYDGEEHLIY

SEQ ID NO: 42096 - protein, 11 aa, Homo sapiens
  misc_feature: Table A; Target 42096; HLA-C*02:02; MAGEB1; ENSG00000214107; CTA
GAYDGEEHLIY

SEQ ID NO: 42097 - protein, 11 aa, Homo sapiens
  misc_feature: Table A; Target 42097; HLA-C*03:03; MAGEB1; ENSG00000214107; CTA
GAYDGEEHLIY

SEQ ID NO: 42098 - protein, 11 aa, Homo sapiens
  misc_feature: Table A; Target 42098; HLA-C*07:01; MAGEB1; ENSG00000214107; CTA
GAYDGEEHLIY

SEQ ID NO: 42099 - protein, 11 aa, Homo sapiens
  misc_feature: Table A; Target 42099; HLA-C*12:03; MAGEB1; ENSG00000214107; CTA
GAYDGEEHLIY

SEQ ID NO: 42100 - protein, 11 aa, Homo sapiens
  misc_feature: Table A; Target 42100; HLA-C*16:01; MAGEB1; ENSG00000214107; CTA
GAYDGEEHLIY

SEQ ID NO: 42101 - protein, 11 aa, Homo sapiens
  misc_feature: Table A; Target 42101; HLA-C*16:04; MAGEB1; ENSG00000214107; CTA
GAYDGEEHLIY

SEQ ID NO: 42102 - protein, 10 aa, Homo sapiens
  misc_feature: Table A; Target 42102; HLA-A*30:01; MAGEB1; ENSG00000214107; CTA
GEENASFSQA

SEQ ID NO: 42103 - protein, 10 aa, Homo sapiens
  misc_feature: Table A; Target 42103; HLA-B*40:01; MAGEB1; ENSG00000214107; CTA
GEENASFSQA

SEQ ID NO: 42104 - protein, 10 aa, Homo sapiens
  misc_feature: Table A; Target 42104; HLA-B*49:01; MAGEB1; ENSG00000214107; CTA
GEENASFSQA

SEQ ID NO: 42105 - protein, 9 aa, Homo sapiens
  misc_feature: Table A; Target 42105; HLA-A*03:02; MAGEB1; ENSG00000214107; CTA
GHTYTLVSK

SEQ ID NO: 42106 - protein, 9 aa, Homo sapiens
  misc_feature: Table A; Target 42106; HLA-B*27:05; MAGEB1; ENSG00000214107; CTA
GHTYTLVSK

SEQ ID NO: 42107 - protein, 9 aa, Homo sapiens
  misc_feature: Table A; Target 42107; HLA-A*02:03; MAGEB1; ENSG00000214107; CTA
GLKVAHATA

SEQ ID NO: 42108 - protein, 9 aa, Homo sapiens
  misc_feature: Table A; Target 42108; HLA-B*08:01; MAGEB1; ENSG00000214107; CTA
GLKVAHATA

SEQ ID NO: 42109 - protein, 10 aa, Homo sapiens
  misc_feature: Table A; Target 42109; HLA-A*02:03; MAGEB1; ENSG00000214107; CTA
GLKVAHATAA

SEQ ID NO: 42110 - protein, 9 aa, Homo sapiens
  misc_feature: Table A; Target 42110; HLA-A*02:01; MAGEB1; ENSG00000214107; CTA
GLLMPLLGV

SEQ ID NO: 42111 - protein, 9 aa, Homo sapiens
  misc_feature: Table A; Target 42111; HLA-A*02:04; MAGEB1; ENSG00000214107; CTA
GLLMPLLGV

SEQ ID NO: 42112 - protein, 9 aa, Homo sapiens
  misc_feature: Table A; Target 42112; HLA-A*31:01; MAGEB1; ENSG00000214107; CTA
GMLMHFILR

SEQ ID NO: 42113 - protein, 10 aa, Homo sapiens
  misc_feature: Table A; Target 42113; HLA-B*07:02; MAGEB1; ENSG00000214107; CTA
GPRAYAETTK

SEQ ID NO: 42114 - protein, 10 aa, Homo sapiens
  misc_feature: Table A; Target 42114; HLA-B*56:01; MAGEB1; ENSG00000214107; CTA
GVIFLKGNSA

SEQ ID NO: 42115 - protein, 9 aa, Homo sapiens
  misc_feature: Table A; Target 42115; HLA-B*54:01; MAGEB1; ENSG00000214107; CTA
HFTEILNGA

SEQ ID NO: 42116 - protein, 9 aa, Homo sapiens
  misc_feature: Table A; Target 42116; HLA-B*55:01; MAGEB1; ENSG00000214107; CTA
HFTEILNGA

SEQ ID NO: 42117 - protein, 8 aa, Homo sapiens
  misc_feature: Table A; Target 42117; HLA-A*03:01; MAGEB1; ENSG00000214107; CTA
HTYTLVSK

SEQ ID NO: 42118 - protein, 8 aa, Homo sapiens
  misc_feature: Table A; Target 42118; HLA-A*03:02; MAGEB1; ENSG00000214107; CTA
HTYTLVSK

SEQ ID NO: 42119 - protein, 8 aa, Homo sapiens
  misc_feature: Table A; Target 42119; HLA-A*11:01; MAGEB1; ENSG00000214107; CTA
HTYTLVSK

SEQ ID NO: 42120 - protein, 9 aa, Homo sapiens
  misc_feature: Table A; Target 42120; HLA-A*02:03; MAGEB1; ENSG00000214107; CTA
HTYTLVSKL

SEQ ID NO: 42121 - protein, 9 aa, Homo sapiens
  misc_feature: Table A; Target 42121; HLA-A*03:01; MAGEB1; ENSG00000214107; CTA
HTYTLVSKL

SEQ ID NO: 42122 - protein, 9 aa, Homo sapiens
  misc_feature: Table A; Target 42122; HLA-A*25:01; MAGEB1; ENSG00000214107; CTA
HTYTLVSKL

SEQ ID NO: 42123 - protein, 9 aa, Homo sapiens
  misc_feature: Table A; Target 42123; HLA-A*26:01; MAGEB1; ENSG00000214107; CTA
HTYTLVSKL

SEQ ID NO: 42124 - protein, 9 aa, Homo sapiens
  misc_feature: Table A; Target 42124; HLA-A*31:01; MAGEB1; ENSG00000214107; CTA
HTYTLVSKL

SEQ ID NO: 42125 - protein, 9 aa, Homo sapiens
  misc_feature: Table A; Target 42125; HLA-A*33:01; MAGEB1; ENSG00000214107; CTA
HTYTLVSKL

SEQ ID NO: 42126 - protein, 9 aa, Homo sapiens
  misc_feature: Table A; Target 42126; HLA-A*33:03; MAGEB1; ENSG00000214107; CTA
HTYTLVSKL

SEQ ID NO: 42127 - protein, 9 aa, Homo sapiens
  misc_feature: Table A; Target 42127; HLA-A*68:01; MAGEB1; ENSG00000214107; CTA
HTYTLVSKL

SEQ ID NO: 42128 - protein, 9 aa, Homo sapiens
  misc_feature: Table A; Target 42128; HLA-A*68:02; MAGEB1; ENSG00000214107; CTA
HTYTLVSKL

SEQ ID NO: 42129 - protein, 9 aa, Homo sapiens
  misc_feature: Table A; Target 42129; HLA-B*27:05; MAGEB1; ENSG00000214107; CTA
HTYTLVSKL

SEQ ID NO: 42130 - protein, 9 aa, Homo sapiens
  misc_feature: Table A; Target 42130; HLA-B*40:02; MAGEB1; ENSG00000214107; CTA
HTYTLVSKL

SEQ ID NO: 42131 - protein, 9 aa, Homo sapiens
  misc_feature: Table A; Target 42131; HLA-B*57:01; MAGEB1; ENSG00000214107; CTA
HTYTLVSKL

SEQ ID NO: 42132 - protein, 9 aa, Homo sapiens
  misc_feature: Table A; Target 42132; HLA-B*58:01; MAGEB1; ENSG00000214107; CTA
HTYTLVSKL

SEQ ID NO: 42133 - protein, 9 aa, Homo sapiens
  misc_feature: Table A; Target 42133; HLA-C*02:02; MAGEB1; ENSG00000214107; CTA
HTYTLVSKL

SEQ ID NO: 42134 - protein, 9 aa, Homo sapiens
  misc_feature: Table A; Target 42134; HLA-C*07:06; MAGEB1; ENSG00000214107; CTA
HTYTLVSKL

SEQ ID NO: 42135 - protein, 9 aa, Homo sapiens
  misc_feature: Table A; Target 42135; HLA-C*12:03; MAGEB1; ENSG00000214107; CTA
HTYTLVSKL

SEQ ID NO: 42136 - protein, 8 aa, Homo sapiens
  misc_feature: Table A; Target 42136; HLA-C*14:02; MAGEB1; ENSG00000214107; CTA
IFLKGNSA

SEQ ID NO: 42137 - protein, 9 aa, Homo sapiens
  misc_feature: Table A; Target 42137; HLA-A*02:03; MAGEB1; ENSG00000214107; CTA
IMKADMLKV

SEQ ID NO: 42138 - protein, 8 aa, Homo sapiens
  misc_feature: Table A; Target 42138; HLA-B*56:01; MAGEB1; ENSG00000214107; CTA
IPQKPQGA

SEQ ID NO: 42139 - protein, 9 aa, Homo sapiens
  misc_feature: Table A; Target 42139; HLA-B*07:02; MAGEB1; ENSG00000214107; CTA
IPQKPQGAP

SEQ ID NO: 42140 - protein, 9 aa, Homo sapiens
  misc_feature: Table A; Target 42140; HLA-B*56:01; MAGEB1; ENSG00000214107; CTA
IPQKPQGAP

SEQ ID NO: 42141 - protein, 10 aa, Homo sapiens
  misc_feature: Table A; Target 42141; HLA-B*54:01; MAGEB1; ENSG00000214107; CTA
IPQKPQGAPP

SEQ ID NO: 42142 - protein, 10 aa, Homo sapiens
  misc_feature: Table A; Target 42142; HLA-B*56:01; MAGEB1; ENSG00000214107; CTA
IPQKPQGAPP

SEQ ID NO: 42143 - protein, 10 aa, Homo sapiens
  misc_feature: Table A; Target 42143; HLA-A*03:02; MAGEB1; ENSG00000214107; CTA
ITQDLVQEKY

SEQ ID NO: 42144 - protein, 10 aa, Homo sapiens
  misc_feature: Table A; Target 42144; HLA-C*07:06; MAGEB1; ENSG00000214107; CTA
ITQDLVQEKY

SEQ ID NO: 42145 - protein, 10 aa, Homo sapiens
  misc_feature: Table A; Target 42145; HLA-C*16:04; MAGEB1; ENSG00000214107; CTA
ITQDLVQEKY

SEQ ID NO: 42146 - protein, 8 aa, Homo sapiens
  misc_feature: Table A; Target 42146; HLA-A*24:02; MAGEB1; ENSG00000214107; CTA
IYGEPRKF

SEQ ID NO: 42147 - protein, 9 aa, Homo sapiens
  misc_feature: Table A; Target 42147; HLA-A*24:02; MAGEB1; ENSG00000214107; CTA
IYGEPRKFI

SEQ ID NO: 42148 - protein, 9 aa, Homo sapiens
  misc_feature: Table A; Target 42148; HLA-B*07:02; MAGEB1; ENSG00000214107; CTA
KAREETQGL

SEQ ID NO: 42149 - protein, 9 aa, Homo sapiens
  misc_feature: Table A; Target 42149; HLA-B*40:02; MAGEB1; ENSG00000214107; CTA
KAREETQGL

SEQ ID NO: 42150 - protein, 9 aa, Homo sapiens
  misc_feature: Table A; Target 42150; HLA-B*57:01; MAGEB1; ENSG00000214107; CTA
KAREETQGL

SEQ ID NO: 42151 - protein, 9 aa, Homo sapiens
  misc_feature: Table A; Target 42151; HLA-B*58:01; MAGEB1; ENSG00000214107; CTA
KAREETQGL

SEQ ID NO: 42152 - protein, 9 aa, Homo sapiens
  misc_feature: Table A; Target 42152; HLA-C*03:04; MAGEB1; ENSG00000214107; CTA
KAREETQGL

SEQ ID NO: 42153 - protein, 9 aa, Homo sapiens
  misc_feature: Table A; Target 42153; HLA-C*07:02; MAGEB1; ENSG00000214107; CTA
KAREETQGL

SEQ ID NO: 42154 - protein, 10 aa, Homo sapiens
  misc_feature: Table A; Target 42154; HLA-A*03:01; MAGEB1; ENSG00000214107; CTA
KAREETQGLK

SEQ ID NO: 42155 - protein, 10 aa, Homo sapiens
  misc_feature: Table A; Target 42155; HLA-A*30:02; MAGEB1; ENSG00000214107; CTA
KCQGEENASF

SEQ ID NO: 42156 - protein, 10 aa, Homo sapiens
  misc_feature: Table A; Target 42156; HLA-A*32:01; MAGEB1; ENSG00000214107; CTA
KCQGEENASF

SEQ ID NO: 42157 - protein, 10 aa, Homo sapiens
  misc_feature: Table A; Target 42157; HLA-B*15:01; MAGEB1; ENSG00000214107; CTA
KCQGEENASF

SEQ ID NO: 42158 - protein, 10 aa, Homo sapiens
  misc_feature: Table A; Target 42158; HLA-B*58:01; MAGEB1; ENSG00000214107; CTA
KCQGEENASF

SEQ ID NO: 42159 - protein, 10 aa, Homo sapiens
  misc_feature: Table A; Target 42159; HLA-A*01:01; MAGEB1; ENSG00000214107; CTA
KEDNPSGHTY

SEQ ID NO: 42160 - protein, 10 aa, Homo sapiens
  misc_feature: Table A; Target 42160; HLA-A*25:01; MAGEB1; ENSG00000214107; CTA
KEDNPSGHTY

SEQ ID NO: 42161 - protein, 10 aa, Homo sapiens
  misc_feature: Table A; Target 42161; HLA-A*29:02; MAGEB1; ENSG00000214107; CTA
KEDNPSGHTY

SEQ ID NO: 42162 - protein, 10 aa, Homo sapiens
  misc_feature: Table A; Target 42162; HLA-A*30:01; MAGEB1; ENSG00000214107; CTA
KEDNPSGHTY

SEQ ID NO: 42163 - protein, 10 aa, Homo sapiens
  misc_feature: Table A; Target 42163; HLA-A*30:02; MAGEB1; ENSG00000214107; CTA
KEDNPSGHTY

SEQ ID NO: 42164 - protein, 10 aa, Homo sapiens
  misc_feature: Table A; Target 42164; HLA-A*32:01; MAGEB1; ENSG00000214107; CTA
KEDNPSGHTY

SEQ ID NO: 42165 - protein, 10 aa, Homo sapiens
  misc_feature: Table A; Target 42165; HLA-B*15:01; MAGEB1; ENSG00000214107; CTA
KEDNPSGHTY

SEQ ID NO: 42166 - protein, 10 aa, Homo sapiens
  misc_feature: Table A; Target 42166; HLA-B*15:03; MAGEB1; ENSG00000214107; CTA
KEDNPSGHTY

SEQ ID NO: 42167 - protein, 10 aa, Homo sapiens
  misc_feature: Table A; Target 42167; HLA-B*18:01; MAGEB1; ENSG00000214107; CTA
KEDNPSGHTY

SEQ ID NO: 42168 - protein, 10 aa, Homo sapiens
  misc_feature: Table A; Target 42168; HLA-B*27:02; MAGEB1; ENSG00000214107; CTA
KEDNPSGHTY

SEQ ID NO: 42169 - protein, 10 aa, Homo sapiens
  misc_feature: Table A; Target 42169; HLA-B*27:05; MAGEB1; ENSG00000214107; CTA
KEDNPSGHTY

SEQ ID NO: 42170 - protein, 10 aa, Homo sapiens
  misc_feature: Table A; Target 42170; HLA-B*37:01; MAGEB1; ENSG00000214107; CTA
KEDNPSGHTY

SEQ ID NO: 42171 - protein, 10 aa, Homo sapiens
  misc_feature: Table A; Target 42171; HLA-B*39:01; MAGEB1; ENSG00000214107; CTA
KEDNPSGHTY

SEQ ID NO: 42172 - protein, 10 aa, Homo sapiens
  misc_feature: Table A; Target 42172; HLA-B*40:01; MAGEB1; ENSG00000214107; CTA
KEDNPSGHTY

SEQ ID NO: 42173 - protein, 10 aa, Homo sapiens
  misc_feature: Table A; Target 42173; HLA-B*40:02; MAGEB1; ENSG00000214107; CTA
KEDNPSGHTY

SEQ ID NO: 42174 - protein, 10 aa, Homo sapiens
  misc_feature: Table A; Target 42174; HLA-B*49:01; MAGEB1; ENSG00000214107; CTA
KEDNPSGHTY

SEQ ID NO: 42175 - protein, 10 aa, Homo sapiens
  misc_feature: Table A; Target 42175; HLA-B*57:01; MAGEB1; ENSG00000214107; CTA
KEDNPSGHTY

SEQ ID NO: 42176 - protein, 10 aa, Homo sapiens
  misc_feature: Table A; Target 42176; HLA-B*58:01; MAGEB1; ENSG00000214107; CTA
KEDNPSGHTY

SEQ ID NO: 42177 - protein, 10 aa, Homo sapiens
  misc_feature: Table A; Target 42177; HLA-C*02:02; MAGEB1; ENSG00000214107; CTA
KEDNPSGHTY

SEQ ID NO: 42178 - protein, 10 aa, Homo sapiens
  misc_feature: Table A; Target 42178; HLA-C*07:04; MAGEB1; ENSG00000214107; CTA
KEDNPSGHTY

SEQ ID NO: 42179 - protein, 10 aa, Homo sapiens
  misc_feature: Table A; Target 42179; HLA-C*12:03; MAGEB1; ENSG00000214107; CTA
KEDNPSGHTY

SEQ ID NO: 42180 - protein, 10 aa, Homo sapiens
  misc_feature: Table A; Target 42180; HLA-C*16:02; MAGEB1; ENSG00000214107; CTA
KEDNPSGHTY

SEQ ID NO: 42181 - protein, 10 aa, Homo sapiens
  misc_feature: Table A; Target 42181; HLA-C*16:04; MAGEB1; ENSG00000214107; CTA
KEDNPSGHTY

SEQ ID NO: 42182 - protein, 11 aa, Homo sapiens
  misc_feature: Table A; Target 42182; HLA-A*30:01; MAGEB1; ENSG00000214107; CTA
KEECPSSSPVL

SEQ ID NO: 42183 - protein, 11 aa, Homo sapiens
  misc_feature: Table A; Target 42183; HLA-B*40:01; MAGEB1; ENSG00000214107; CTA
KEECPSSSPVL

SEQ ID NO: 42184 - protein, 11 aa, Homo sapiens
  misc_feature: Table A; Target 42184; HLA-B*40:02; MAGEB1; ENSG00000214107; CTA
KEECPSSSPVL

SEQ ID NO: 42185 - protein, 9 aa, Homo sapiens
  misc_feature: Table A; Target 42185; HLA-A*23:01; MAGEB1; ENSG00000214107; CTA
KFMNVLGAY

SEQ ID NO: 42186 - protein, 9 aa, Homo sapiens
  misc_feature: Table A; Target 42186; HLA-A*29:02; MAGEB1; ENSG00000214107; CTA
KFMNVLGAY

SEQ ID NO: 42187 - protein, 9 aa, Homo sapiens
  misc_feature: Table A; Target 42187; HLA-A*30:02; MAGEB1; ENSG00000214107; CTA
KFMNVLGAY

SEQ ID NO: 42188 - protein, 9 aa, Homo sapiens
  misc_feature: Table A; Target 42188; HLA-B*15:03; MAGEB1; ENSG00000214107; CTA
KFMNVLGAY

SEQ ID NO: 42189 - protein, 9 aa, Homo sapiens
  misc_feature: Table A; Target 42189; HLA-B*46:01; MAGEB1; ENSG00000214107; CTA
KFMNVLGAY

SEQ ID NO: 42190 - protein, 9 aa, Homo sapiens
  misc_feature: Table A; Target 42190; HLA-C*14:02; MAGEB1; ENSG00000214107; CTA
KFMNVLGAY

SEQ ID NO: 42191 - protein, 11 aa, Homo sapiens
  misc_feature: Table A; Target 42191; HLA-B*57:01; MAGEB1; ENSG00000214107; CTA
KGNSATEEEIW

SEQ ID NO: 42192 - protein, 11 aa, Homo sapiens
  misc_feature: Table A; Target 42192; HLA-B*58:01; MAGEB1; ENSG00000214107; CTA
KGNSATEEEIW

SEQ ID NO: 42193 - protein, 8 aa, Homo sapiens
  misc_feature: Table A; Target 42193; HLA-A*31:01; MAGEB1; ENSG00000214107; CTA
KMNGATPR

SEQ ID NO: 42194 - protein, 10 aa, Homo sapiens
  misc_feature: Table A; Target 42194; HLA-A*30:02; MAGEB1; ENSG00000214107; CTA
KMNGATPRDF

SEQ ID NO: 42195 - protein, 8 aa, Homo sapiens
  misc_feature: Table A; Target 42195; HLA-A*03:01; MAGEB1; ENSG00000214107; CTA
KMREPIMK

SEQ ID NO: 42196 - protein, 9 aa, Homo sapiens
  misc_feature: Table A; Target 42196; HLA-A*02:03; MAGEB1; ENSG00000214107; CTA
KMREPIMKA

SEQ ID NO: 42197 - protein, 9 aa, Homo sapiens
  misc_feature: Table A; Target 42197; HLA-B*07:02; MAGEB1; ENSG00000214107; CTA
KPQGAPPTT

SEQ ID NO: 42198 - protein, 9 aa, Homo sapiens
  misc_feature: Table A; Target 42198; HLA-B*56:01; MAGEB1; ENSG00000214107; CTA
KPQGAPPTT

SEQ ID NO: 42199 - protein, 10 aa, Homo sapiens
  misc_feature: Table A; Target 42199; HLA-B*07:02; MAGEB1; ENSG00000214107; CTA
KPQGAPPTTT

SEQ ID NO: 42200 - protein, 10 aa, Homo sapiens
  misc_feature: Table A; Target 42200; HLA-B*56:01; MAGEB1; ENSG00000214107; CTA
KPQGAPPTTT

SEQ ID NO: 42201 - protein, 10 aa, Homo sapiens
  misc_feature: Table A; Target 42201; HLA-C*07:02; MAGEB1; ENSG00000214107; CTA
KPQGAPPTTT

SEQ ID NO: 42202 - protein, 11 aa, Homo sapiens
  misc_feature: Table A; Target 42202; HLA-B*07:02; MAGEB1; ENSG00000214107; CTA
KPQGAPPTTTA

SEQ ID NO: 42203 - protein, 11 aa, Homo sapiens
  misc_feature: Table A; Target 42203; HLA-B*54:01; MAGEB1; ENSG00000214107; CTA
KPQGAPPTTTA

SEQ ID NO: 42204 - protein, 11 aa, Homo sapiens
  misc_feature: Table A; Target 42204; HLA-B*55:01; MAGEB1; ENSG00000214107; CTA
KPQGAPPTTTA

SEQ ID NO: 42205 - protein, 11 aa, Homo sapiens
  misc_feature: Table A; Target 42205; HLA-B*56:01; MAGEB1; ENSG00000214107; CTA
KPQGAPPTTTA

SEQ ID NO: 42206 - protein, 10 aa, Homo sapiens
  misc_feature: Table A; Target 42206; HLA-A*03:01; MAGEB1; ENSG00000214107; CTA
KVAHATAAEK

SEQ ID NO: 42207 - protein, 10 aa, Homo sapiens
  misc_feature: Table A; Target 42207; HLA-A*03:02; MAGEB1; ENSG00000214107; CTA
KVAHATAAEK

SEQ ID NO: 42208 - protein, 10 aa, Homo sapiens
  misc_feature: Table A; Target 42208; HLA-A*11:01; MAGEB1; ENSG00000214107; CTA
KVAHATAAEK

SEQ ID NO: 42209 - protein, 9 aa, Homo sapiens
  misc_feature: Table A; Target 42209; HLA-A*02:01; MAGEB1; ENSG00000214107; CTA
KVLEFLAKM

SEQ ID NO: 42210 - protein, 9 aa, Homo sapiens
  misc_feature: Table A; Target 42210; HLA-A*02:04; MAGEB1; ENSG00000214107; CTA
KVLEFLAKM

SEQ ID NO: 42211 - protein, 9 aa, Homo sapiens
  misc_feature: Table A; Target 42211; HLA-A*02:07; MAGEB1; ENSG00000214107; CTA
KVLEFLAKM

SEQ ID NO: 42212 - protein, 9 aa, Homo sapiens
  misc_feature: Table A; Target 42212; HLA-A*03:01; MAGEB1; ENSG00000214107; CTA
KVLEFLAKM

SEQ ID NO: 42213 - protein, 9 aa, Homo sapiens
  misc_feature: Table A; Target 42213; HLA-A*29:02; MAGEB1; ENSG00000214107; CTA
KVLEFLAKM

SEQ ID NO: 42214 - protein, 9 aa, Homo sapiens
  misc_feature: Table A; Target 42214; HLA-A*31:01; MAGEB1; ENSG00000214107; CTA
KVLEFLAKM

SEQ ID NO: 42215 - protein, 9 aa, Homo sapiens
  misc_feature: Table A; Target 42215; HLA-B*57:01; MAGEB1; ENSG00000214107; CTA
KVLEFLAKM

SEQ ID NO: 42216 - protein, 9 aa, Homo sapiens
  misc_feature: Table A; Target 42216; HLA-A*23:01; MAGEB1; ENSG00000214107; CTA
KYKDHFTEI

SEQ ID NO: 42217 - protein, 9 aa, Homo sapiens
  misc_feature: Table A; Target 42217; HLA-A*24:02; MAGEB1; ENSG00000214107; CTA
KYKDHFTEI

SEQ ID NO: 42218 - protein, 9 aa, Homo sapiens
  misc_feature: Table A; Target 42218; HLA-A*31:01; MAGEB1; ENSG00000214107; CTA
KYKDHFTEI

SEQ ID NO: 42219 - protein, 10 aa, Homo sapiens
  misc_feature: Table A; Target 42219; HLA-A*24:02; MAGEB1; ENSG00000214107; CTA
KYKDHFTEIL

SEQ ID NO: 42220 - protein, 9 aa, Homo sapiens
  misc_feature: Table A; Target 42220; HLA-A*30:01; MAGEB1; ENSG00000214107; CTA
LELVFGLDL

SEQ ID NO: 42221 - protein, 9 aa, Homo sapiens
  misc_feature: Table A; Target 42221; HLA-B*40:01; MAGEB1; ENSG00000214107; CTA
LELVFGLDL

SEQ ID NO: 42222 - protein, 9 aa, Homo sapiens
  misc_feature: Table A; Target 42222; HLA-B*40:02; MAGEB1; ENSG00000214107; CTA
LELVFGLDL

SEQ ID NO: 42223 - protein, 9 aa, Homo sapiens
  misc_feature: Table A; Target 42223; HLA-B*49:01; MAGEB1; ENSG00000214107; CTA
LELVFGLDL

SEQ ID NO: 42224 - protein, 9 aa, Homo sapiens
  misc_feature: Table A; Target 42224; HLA-C*05:01; MAGEB1; ENSG00000214107; CTA
LGDTPTSSP

SEQ ID NO: 42225 - protein, 9 aa, Homo sapiens
  misc_feature: Table A; Target 42225; HLA-A*03:01; MAGEB1; ENSG00000214107; CTA
LIYGEPRKF

SEQ ID NO: 42226 - protein, 9 aa, Homo sapiens
  misc_feature: Table A; Target 42226; HLA-B*57:01; MAGEB1; ENSG00000214107; CTA
LIYGEPRKF

SEQ ID NO: 42227 - protein, 9 aa, Homo sapiens
  misc_feature: Table A; Target 42227; HLA-C*02:02; MAGEB1; ENSG00000214107; CTA
LIYGEPRKF

SEQ ID NO: 42228 - protein, 11 aa, Homo sapiens
  misc_feature: Table A; Target 42228; HLA-A*30:02; MAGEB1; ENSG00000214107; CTA
LKEDNPSGHTY

SEQ ID NO: 42229 - protein, 11 aa, Homo sapiens
  misc_feature: Table A; Target 42229; HLA-B*15:03; MAGEB1; ENSG00000214107; CTA
LKEDNPSGHTY

SEQ ID NO: 42230 - protein, 9 aa, Homo sapiens
  misc_feature: Table A; Target 42230; HLA-B*15:03; MAGEB1; ENSG00000214107; CTA
LKVAHATAA

SEQ ID NO: 42231 - protein, 8 aa, Homo sapiens
  misc_feature: Table A; Target 42231; HLA-B*15:03; MAGEB1; ENSG00000214107; CTA
LKVVDEKY

SEQ ID NO: 42232 - protein, 9 aa, Homo sapiens
  misc_feature: Table A; Target 42232; HLA-A*29:02; MAGEB1; ENSG00000214107; CTA
LMHFILRKY

SEQ ID NO: 42233 - protein, 9 aa, Homo sapiens
  misc_feature: Table A; Target 42233; HLA-A*31:01; MAGEB1; ENSG00000214107; CTA
LSNDWDFPR

SEQ ID NO: 42234 - protein, 9 aa, Homo sapiens
  misc_feature: Table A; Target 42234; HLA-A*33:01; MAGEB1; ENSG00000214107; CTA
LSNDWDFPR

SEQ ID NO: 42235 - protein, 11 aa, Homo sapiens
  misc_feature: Table A; Target 42235; HLA-B*57:01; MAGEB1; ENSG00000214107; CTA
LTNDGNLSNDW

SEQ ID NO: 42236 - protein, 11 aa, Homo sapiens
  misc_feature: Table A; Target 42236; HLA-B*58:01; MAGEB1; ENSG00000214107; CTA
LTNDGNLSNDW

SEQ ID NO: 42237 - protein, 9 aa, Homo sapiens
  misc_feature: Table A; Target 42237; HLA-A*01:01; MAGEB1; ENSG00000214107; CTA
LVQEKYLKY

SEQ ID NO: 42238 - protein, 9 aa, Homo sapiens
  misc_feature: Table A; Target 42238; HLA-A*03:01; MAGEB1; ENSG00000214107; CTA
LVQEKYLKY

SEQ ID NO: 42239 - protein, 9 aa, Homo sapiens
  misc_feature: Table A; Target 42239; HLA-A*25:01; MAGEB1; ENSG00000214107; CTA
LVQEKYLKY

SEQ ID NO: 42240 - protein, 9 aa, Homo sapiens
  misc_feature: Table A; Target 42240; HLA-A*26:01; MAGEB1; ENSG00000214107; CTA
LVQEKYLKY

SEQ ID NO: 42241 - protein, 9 aa, Homo sapiens
  misc_feature: Table A; Target 42241; HLA-A*29:02; MAGEB1; ENSG00000214107; CTA
LVQEKYLKY

SEQ ID NO: 42242 - protein, 9 aa, Homo sapiens
  misc_feature: Table A; Target 42242; HLA-A*30:02; MAGEB1; ENSG00000214107; CTA
LVQEKYLKY

SEQ ID NO: 42243 - protein, 9 aa, Homo sapiens
  misc_feature: Table A; Target 42243; HLA-A*32:01; MAGEB1; ENSG00000214107; CTA
LVQEKYLKY

SEQ ID NO: 42244 - protein, 9 aa, Homo sapiens
  misc_feature: Table A; Target 42244; HLA-B*15:01; MAGEB1; ENSG00000214107; CTA
LVQEKYLKY

SEQ ID NO: 42245 - protein, 9 aa, Homo sapiens
  misc_feature: Table A; Target 42245; HLA-C*02:02; MAGEB1; ENSG00000214107; CTA
LVQEKYLKY

SEQ ID NO: 42246 - protein, 8 aa, Homo sapiens
  misc_feature: Table A; Target 42246; HLA-B*08:01; MAGEB1; ENSG00000214107; CTA
MLKVVDEK

SEQ ID NO: 42247 - protein, 8 aa, Homo sapiens
  misc_feature: Table A; Target 42247; HLA-C*07:01; MAGEB1; ENSG00000214107; CTA
MLKVVDEK

SEQ ID NO: 42248 - protein, 9 aa, Homo sapiens
  misc_feature: Table A; Target 42248; HLA-A*01:01; MAGEB1; ENSG00000214107; CTA
MLKVVDEKY

SEQ ID NO: 42249 - protein, 9 aa, Homo sapiens
  misc_feature: Table A; Target 42249; HLA-A*29:02; MAGEB1; ENSG00000214107; CTA
MLKVVDEKY

SEQ ID NO: 42250 - protein, 9 aa, Homo sapiens
  misc_feature: Table A; Target 42250; HLA-A*30:02; MAGEB1; ENSG00000214107; CTA
MLKVVDEKY

SEQ ID NO: 42251 - protein, 9 aa, Homo sapiens
  misc_feature: Table A; Target 42251; HLA-A*32:01; MAGEB1; ENSG00000214107; CTA
MLKVVDEKY

SEQ ID NO: 42252 - protein, 9 aa, Homo sapiens
  misc_feature: Table A; Target 42252; HLA-B*15:01; MAGEB1; ENSG00000214107; CTA
MLKVVDEKY

SEQ ID NO: 42253 - protein, 9 aa, Homo sapiens
  misc_feature: Table A; Target 42253; HLA-B*15:03; MAGEB1; ENSG00000214107; CTA
MLKVVDEKY

SEQ ID NO: 42254 - protein, 9 aa, Homo sapiens
  misc_feature: Table A; Target 42254; HLA-B*18:01; MAGEB1; ENSG00000214107; CTA
MLKVVDEKY

SEQ ID NO: 42255 - protein, 9 aa, Homo sapiens
  misc_feature: Table A; Target 42255; HLA-B*35:01; MAGEB1; ENSG00000214107; CTA
MLKVVDEKY

SEQ ID NO: 42256 - protein, 9 aa, Homo sapiens
  misc_feature: Table A; Target 42256; HLA-B*44:02; MAGEB1; ENSG00000214107; CTA
MLKVVDEKY

SEQ ID NO: 42257 - protein, 9 aa, Homo sapiens
  misc_feature: Table A; Target 42257; HLA-B*46:01; MAGEB1; ENSG00000214107; CTA
MLKVVDEKY

SEQ ID NO: 42258 - protein, 9 aa, Homo sapiens
  misc_feature: Table A; Target 42258; HLA-B*57:01; MAGEB1; ENSG00000214107; CTA
MLKVVDEKY

SEQ ID NO: 42259 - protein, 9 aa, Homo sapiens
  misc_feature: Table A; Target 42259; HLA-C*04:01; MAGEB1; ENSG00000214107; CTA
MLKVVDEKY

SEQ ID NO: 42260 - protein, 9 aa, Homo sapiens
  misc_feature: Table A; Target 42260; HLA-C*07:01; MAGEB1; ENSG00000214107; CTA
MLKVVDEKY

SEQ ID NO: 42261 - protein, 9 aa, Homo sapiens
  misc_feature: Table A; Target 42261; HLA-C*07:04; MAGEB1; ENSG00000214107; CTA
MLKVVDEKY

SEQ ID NO: 42262 - protein, 9 aa, Homo sapiens
  misc_feature: Table A; Target 42262; HLA-C*16:04; MAGEB1; ENSG00000214107; CTA
MLKVVDEKY

SEQ ID NO: 42263 - protein, 10 aa, Homo sapiens
  misc_feature: Table A; Target 42263; HLA-C*04:01; MAGEB1; ENSG00000214107; CTA
MLKVVDEKYK

SEQ ID NO: 42264 - protein, 9 aa, Homo sapiens
  misc_feature: Table A; Target 42264; HLA-A*03:01; MAGEB1; ENSG00000214107; CTA
MLMHFILRK

SEQ ID NO: 42265 - protein, 10 aa, Homo sapiens
  misc_feature: Table A; Target 42265; HLA-A*29:02; MAGEB1; ENSG00000214107; CTA
MLMHFILRKY

SEQ ID NO: 42266 - protein, 8 aa, Homo sapiens
  misc_feature: Table A; Target 42266; HLA-B*54:01; MAGEB1; ENSG00000214107; CTA
MPLLGVIF

SEQ ID NO: 42267 - protein, 9 aa, Homo sapiens
  misc_feature: Table A; Target 42267; HLA-B*07:02; MAGEB1; ENSG00000214107; CTA
MPLLGVIFL

SEQ ID NO: 42268 - protein, 11 aa, Homo sapiens
  misc_feature: Table A; Target 42268; HLA-B*54:01; MAGEB1; ENSG00000214107; CTA
MPLLGVIFLKG

SEQ ID NO: 42269 - protein, 9 aa, Homo sapiens
  misc_feature: Table A; Target 42269; HLA-B*44:03; MAGEB1; ENSG00000214107; CTA
NDGNLSNDW

SEQ ID NO: 42270 - protein, 9 aa, Homo sapiens
  misc_feature: Table A; Target 42270; HLA-B*07:02; MAGEB1; ENSG00000214107; CTA
NGASRRLEL

SEQ ID NO: 42271 - protein, 9 aa, Homo sapiens
  misc_feature: Table A; Target 42271; HLA-B*08:01; MAGEB1; ENSG00000214107; CTA
NGASRRLEL

SEQ ID NO: 42272 - protein, 9 aa, Homo sapiens
  misc_feature: Table A; Target 42272; HLA-C*07:02; MAGEB1; ENSG00000214107; CTA
NGASRRLEL

SEQ ID NO: 42273 - protein, 9 aa, Homo sapiens
  misc_feature: Table A; Target 42273; HLA-C*16:01; MAGEB1; ENSG00000214107; CTA
NGASRRLEL

SEQ ID NO: 42274 - protein, 9 aa, Homo sapiens
  misc_feature: Table A; Target 42274; HLA-A*68:01; MAGEB1; ENSG00000214107; CTA
NPSGHTYTL

SEQ ID NO: 42275 - protein, 9 aa, Homo sapiens
  misc_feature: Table A; Target 42275; HLA-A*68:02; MAGEB1; ENSG00000214107; CTA
NPSGHTYTL

SEQ ID NO: 42276 - protein, 9 aa, Homo sapiens
  misc_feature: Table A; Target 42276; HLA-B*08:01; MAGEB1; ENSG00000214107; CTA
NPSGHTYTL

SEQ ID NO: 42277 - protein, 9 aa, Homo sapiens
  misc_feature: Table A; Target 42277; HLA-B*35:01; MAGEB1; ENSG00000214107; CTA
NPSGHTYTL

SEQ ID NO: 42278 - protein, 9 aa, Homo sapiens
  misc_feature: Table A; Target 42278; HLA-B*35:03; MAGEB1; ENSG00000214107; CTA
NPSGHTYTL

SEQ ID NO: 42279 - protein, 9 aa, Homo sapiens
  misc_feature: Table A; Target 42279; HLA-B*37:01; MAGEB1; ENSG00000214107; CTA
NPSGHTYTL

SEQ ID NO: 42280 - protein, 9 aa, Homo sapiens
  misc_feature: Table A; Target 42280; HLA-B*38:01; MAGEB1; ENSG00000214107; CTA
NPSGHTYTL

SEQ ID NO: 42281 - protein, 9 aa, Homo sapiens
  misc_feature: Table A; Target 42281; HLA-B*39:01; MAGEB1; ENSG00000214107; CTA
NPSGHTYTL

SEQ ID NO: 42282 - protein, 9 aa, Homo sapiens
  misc_feature: Table A; Target 42282; HLA-B*40:01; MAGEB1; ENSG00000214107; CTA
NPSGHTYTL

SEQ ID NO: 42283 - protein, 9 aa, Homo sapiens
  misc_feature: Table A; Target 42283; HLA-B*51:01; MAGEB1; ENSG00000214107; CTA
NPSGHTYTL

SEQ ID NO: 42284 - protein, 9 aa, Homo sapiens
  misc_feature: Table A; Target 42284; HLA-B*54:01; MAGEB1; ENSG00000214107; CTA
NPSGHTYTL

SEQ ID NO: 42285 - protein, 9 aa, Homo sapiens
  misc_feature: Table A; Target 42285; HLA-B*55:01; MAGEB1; ENSG00000214107; CTA
NPSGHTYTL

SEQ ID NO: 42286 - protein, 9 aa, Homo sapiens
  misc_feature: Table A; Target 42286; HLA-B*56:01; MAGEB1; ENSG00000214107; CTA
NPSGHTYTL

SEQ ID NO: 42287 - protein, 9 aa, Homo sapiens
  misc_feature: Table A; Target 42287; HLA-C*03:03; MAGEB1; ENSG00000214107; CTA
NPSGHTYTL

SEQ ID NO: 42288 - protein, 9 aa, Homo sapiens
  misc_feature: Table A; Target 42288; HLA-C*07:02; MAGEB1; ENSG00000214107; CTA
NPSGHTYTL

SEQ ID NO: 42289 - protein, 9 aa, Homo sapiens
  misc_feature: Table A; Target 42289; HLA-C*14:02; MAGEB1; ENSG00000214107; CTA
NPSGHTYTL

SEQ ID NO: 42290 - protein, 9 aa, Homo sapiens
  misc_feature: Table A; Target 42290; HLA-C*16:01; MAGEB1; ENSG00000214107; CTA
NPSGHTYTL

SEQ ID NO: 42291 - protein, 9 aa, Homo sapiens
  misc_feature: Table A; Target 42291; HLA-C*16:02; MAGEB1; ENSG00000214107; CTA
NPSGHTYTL

SEQ ID NO: 42292 - protein, 9 aa, Homo sapiens
  misc_feature: Table A; Target 42292; HLA-B*57:01; MAGEB1; ENSG00000214107; CTA
NSATEEEIW

SEQ ID NO: 42293 - protein, 9 aa, Homo sapiens
  misc_feature: Table A; Target 42293; HLA-A*02:07; MAGEB1; ENSG00000214107; CTA
NSDPPRYQF

SEQ ID NO: 42294 - protein, 9 aa, Homo sapiens
  misc_feature: Table A; Target 42294; HLA-A*29:02; MAGEB1; ENSG00000214107; CTA
NSDPPRYQF

SEQ ID NO: 42295 - protein, 9 aa, Homo sapiens
  misc_feature: Table A; Target 42295; HLA-B*38:01; MAGEB1; ENSG00000214107; CTA
NSDPPRYQF

SEQ ID NO: 42296 - protein, 9 aa, Homo sapiens
  misc_feature: Table A; Target 42296; HLA-C*04:01; MAGEB1; ENSG00000214107; CTA
NSDPPRYQF

SEQ ID NO: 42297 - protein, 8 aa, Homo sapiens
  misc_feature: Table A; Target 42297; HLA-A*03:02; MAGEB1; ENSG00000214107; CTA
PAAGIPQK

SEQ ID NO: 42298 - protein, 8 aa, Homo sapiens
  misc_feature: Table A; Target 42298; HLA-A*11:01; MAGEB1; ENSG00000214107; CTA
PAAGIPQK

SEQ ID NO: 42299 - protein, 8 aa, Homo sapiens
  misc_feature: Table A; Target 42299; HLA-B*27:02; MAGEB1; ENSG00000214107; CTA
PAAGIPQK

SEQ ID NO: 42300 - protein, 9 aa, Homo sapiens
  misc_feature: Table A; Target 42300; HLA-C*06:02; MAGEB1; ENSG00000214107; CTA
PAAGIPQKP

SEQ ID NO: 42301 - protein, 9 aa, Homo sapiens
  misc_feature: Table A; Target 42301; HLA-C*16:02; MAGEB1; ENSG00000214107; CTA
PAAGIPQKP

SEQ ID NO: 42302 - protein, 8 aa, Homo sapiens
  misc_feature: Table A; Target 42302; HLA-B*56:01; MAGEB1; ENSG00000214107; CTA
PPTTTAAA

SEQ ID NO: 42303 - protein, 8 aa, Homo sapiens
  misc_feature: Table A; Target 42303; HLA-B*07:02; MAGEB1; ENSG00000214107; CTA
PSGHTYTL

SEQ ID NO: 42304 - protein, 8 aa, Homo sapiens
  misc_feature: Table A; Target 42304; HLA-C*07:01; MAGEB1; ENSG00000214107; CTA
PSGHTYTL

SEQ ID NO: 42305 - protein, 8 aa, Homo sapiens
  misc_feature: Table A; Target 42305; HLA-C*07:02; MAGEB1; ENSG00000214107; CTA
PSGHTYTL

SEQ ID NO: 42306 - protein, 8 aa, Homo sapiens
  misc_feature: Table A; Target 42306; HLA-C*07:04; MAGEB1; ENSG00000214107; CTA
PSGHTYTL

SEQ ID NO: 42307 - protein, 8 aa, Homo sapiens
  misc_feature: Table A; Target 42307; HLA-C*12:03; MAGEB1; ENSG00000214107; CTA
PSGHTYTL

SEQ ID NO: 42308 - protein, 8 aa, Homo sapiens
  misc_feature: Table A; Target 42308; HLA-B*07:02; MAGEB1; ENSG00000214107; CTA
PSHYEEAL

SEQ ID NO: 42309 - protein, 11 aa, Homo sapiens
  misc_feature: Table A; Target 42309; HLA-C*04:01; MAGEB1; ENSG00000214107; CTA
PVLGDTPTSSP

SEQ ID NO: 42310 - protein, 11 aa, Homo sapiens
  misc_feature: Table A; Target 42310; HLA-C*07:02; MAGEB1; ENSG00000214107; CTA
PVLGDTPTSSP

SEQ ID NO: 42311 - protein, 11 aa, Homo sapiens
  misc_feature: Table A; Target 42311; HLA-C*07:06; MAGEB1; ENSG00000214107; CTA
QATTSTESSVK

SEQ ID NO: 42312 - protein, 9 aa, Homo sapiens
  misc_feature: Table A; Target 42312; HLA-A*02:03; MAGEB1; ENSG00000214107; CTA
QGAPPTTTA

SEQ ID NO: 42313 - protein, 9 aa, Homo sapiens
  misc_feature: Table A; Target 42313; HLA-B*15:01; MAGEB1; ENSG00000214107; CTA
QGAPPTTTA

SEQ ID NO: 42314 - protein, 9 aa, Homo sapiens
  misc_feature: Table A; Target 42314; HLA-B*39:01; MAGEB1; ENSG00000214107; CTA
QGAPPTTTA

SEQ ID NO: 42315 - protein, 9 aa, Homo sapiens
  misc_feature: Table A; Target 42315; HLA-B*46:01; MAGEB1; ENSG00000214107; CTA
QGAPPTTTA

SEQ ID NO: 42316 - protein, 9 aa, Homo sapiens
  misc_feature: Table A; Target 42316; HLA-B*54:01; MAGEB1; ENSG00000214107; CTA
QGAPPTTTA

SEQ ID NO: 42317 - protein, 9 aa, Homo sapiens
  misc_feature: Table A; Target 42317; HLA-B*56:01; MAGEB1; ENSG00000214107; CTA
QGAPPTTTA

SEQ ID NO: 42318 - protein, 9 aa, Homo sapiens
  misc_feature: Table A; Target 42318; HLA-C*03:04; MAGEB1; ENSG00000214107; CTA
QGAPPTTTA

SEQ ID NO: 42319 - protein, 9 aa, Homo sapiens
  misc_feature: Table A; Target 42319; HLA-C*05:01; MAGEB1; ENSG00000214107; CTA
QGAPPTTTA

SEQ ID NO: 42320 - protein, 8 aa, Homo sapiens
  misc_feature: Table A; Target 42320; HLA-C*05:01; MAGEB1; ENSG00000214107; CTA
QGEENASF

SEQ ID NO: 42321 - protein, 9 aa, Homo sapiens
  misc_feature: Table A; Target 42321; HLA-A*11:01; MAGEB1; ENSG00000214107; CTA
QVPNSDPPR

SEQ ID NO: 42322 - protein, 9 aa, Homo sapiens
  misc_feature: Table A; Target 42322; HLA-C*07:06; MAGEB1; ENSG00000214107; CTA
QVPNSDPPR

SEQ ID NO: 42323 - protein, 10 aa, Homo sapiens
  misc_feature: Table A; Target 42323; HLA-B*58:01; MAGEB1; ENSG00000214107; CTA
QVPNSDPPRY

SEQ ID NO: 42324 - protein, 9 aa, Homo sapiens
  misc_feature: Table A; Target 42324; HLA-A*03:01; MAGEB1; ENSG00000214107; CTA
QVRSSVRAR

SEQ ID NO: 42325 - protein, 9 aa, Homo sapiens
  misc_feature: Table A; Target 42325; HLA-A*31:01; MAGEB1; ENSG00000214107; CTA
QVRSSVRAR

SEQ ID NO: 42326 - protein, 9 aa, Homo sapiens
  misc_feature: Table A; Target 42326; HLA-A*33:01; MAGEB1; ENSG00000214107; CTA
QVRSSVRAR

SEQ ID NO: 42327 - protein, 9 aa, Homo sapiens
  misc_feature: Table A; Target 42327; HLA-A*33:03; MAGEB1; ENSG00000214107; CTA
QVRSSVRAR

SEQ ID NO: 42328 - protein, 8 aa, Homo sapiens
  misc_feature: Table A; Target 42328; HLA-B*07:02; MAGEB1; ENSG00000214107; CTA
RAQVRSSV

SEQ ID NO: 42329 - protein, 8 aa, Homo sapiens
  misc_feature: Table A; Target 42329; HLA-B*08:01; MAGEB1; ENSG00000214107; CTA
RAQVRSSV

SEQ ID NO: 42330 - protein, 8 aa, Homo sapiens
  misc_feature: Table A; Target 42330; HLA-C*16:01; MAGEB1; ENSG00000214107; CTA
RAQVRSSV

SEQ ID NO: 42331 - protein, 9 aa, Homo sapiens
  misc_feature: Table A; Target 42331; HLA-A*31:01; MAGEB1; ENSG00000214107; CTA
RAQVRSSVR

SEQ ID NO: 42332 - protein, 11 aa, Homo sapiens
  misc_feature: Table A; Target 42332; HLA-A*31:01; MAGEB1; ENSG00000214107; CTA
RAQVRSSVRAR

SEQ ID NO: 42333 - protein, 10 aa, Homo sapiens
  misc_feature: Table A; Target 42333; HLA-A*31:01; MAGEB1; ENSG00000214107; CTA
RARSRAPFSR

SEQ ID NO: 42334 - protein, 9 aa, Homo sapiens
  misc_feature: Table A; Target 42334; HLA-A*03:01; MAGEB1; ENSG00000214107; CTA
RAYAETTKM

SEQ ID NO: 42335 - protein, 9 aa, Homo sapiens
  misc_feature: Table A; Target 42335; HLA-B*07:02; MAGEB1; ENSG00000214107; CTA
RAYAETTKM

SEQ ID NO: 42336 - protein, 9 aa, Homo sapiens
  misc_feature: Table A; Target 42336; HLA-B*37:01; MAGEB1; ENSG00000214107; CTA
RAYAETTKM

SEQ ID NO: 42337 - protein, 9 aa, Homo sapiens
  misc_feature: Table A; Target 42337; HLA-B*40:01; MAGEB1; ENSG00000214107; CTA
RAYAETTKM

SEQ ID NO: 42338 - protein, 9 aa, Homo sapiens
  misc_feature: Table A; Target 42338; HLA-B*55:01; MAGEB1; ENSG00000214107; CTA
RAYAETTKM

SEQ ID NO: 42339 - protein, 9 aa, Homo sapiens
  misc_feature: Table A; Target 42339; HLA-C*16:01; MAGEB1; ENSG00000214107; CTA
RAYAETTKM

SEQ ID NO: 42340 - protein, 10 aa, Homo sapiens
  misc_feature: Table A; Target 42340; HLA-A*03:01; MAGEB1; ENSG00000214107; CTA
RAYAETTKMK

SEQ ID NO: 42341 - protein, 9 aa, Homo sapiens
  misc_feature: Table A; Target 42341; HLA-A*30:01; MAGEB1; ENSG00000214107; CTA
REETQGLKV

SEQ ID NO: 42342 - protein, 9 aa, Homo sapiens
  misc_feature: Table A; Target 42342; HLA-B*37:01; MAGEB1; ENSG00000214107; CTA
REETQGLKV

SEQ ID NO: 42343 - protein, 9 aa, Homo sapiens
  misc_feature: Table A; Target 42343; HLA-B*40:01; MAGEB1; ENSG00000214107; CTA
REETQGLKV

SEQ ID NO: 42344 - protein, 9 aa, Homo sapiens
  misc_feature: Table A; Target 42344; HLA-B*40:02; MAGEB1; ENSG00000214107; CTA
REETQGLKV

SEQ ID NO: 42345 - protein, 9 aa, Homo sapiens
  misc_feature: Table A; Target 42345; HLA-B*44:02; MAGEB1; ENSG00000214107; CTA
REETQGLKV

SEQ ID NO: 42346 - protein, 9 aa, Homo sapiens
  misc_feature: Table A; Target 42346; HLA-B*44:03; MAGEB1; ENSG00000214107; CTA
REETQGLKV

SEQ ID NO: 42347 - protein, 9 aa, Homo sapiens
  misc_feature: Table A; Target 42347; HLA-B*49:01; MAGEB1; ENSG00000214107; CTA
REETQGLKV

SEQ ID NO: 42348 - protein, 10 aa, Homo sapiens
  misc_feature: Table A; Target 42348; HLA-B*40:02; MAGEB1; ENSG00000214107; CTA
REETQGLKVA

SEQ ID NO: 42349 - protein, 9 aa, Homo sapiens
  misc_feature: Table A; Target 42349; HLA-B*37:01; MAGEB1; ENSG00000214107; CTA
REPIMKADM

SEQ ID NO: 42350 - protein, 10 aa, Homo sapiens
  misc_feature: Table A; Target 42350; HLA-B*40:01; MAGEB1; ENSG00000214107; CTA
REPIMKADML

SEQ ID NO: 42351 - protein, 8 aa, Homo sapiens
  misc_feature: Table A; Target 42351; HLA-B*37:01; MAGEB1; ENSG00000214107; CTA
RRTTATTF

SEQ ID NO: 42352 - protein, 9 aa, Homo sapiens
  misc_feature: Table A; Target 42352; HLA-B*27:05; MAGEB1; ENSG00000214107; CTA
RRTTATTFR

SEQ ID NO: 42353 - protein, 8 aa, Homo sapiens
  misc_feature: Table A; Target 42353; HLA-A*31:01; MAGEB1; ENSG00000214107; CTA
RSRAPFSR

SEQ ID NO: 42354 - protein, 8 aa, Homo sapiens
  misc_feature: Table A; Target 42354; HLA-A*31:01; MAGEB1; ENSG00000214107; CTA
RTTATTFR

SEQ ID NO: 42355 - protein, 9 aa, Homo sapiens
  misc_feature: Table A; Target 42355; HLA-A*32:01; MAGEB1; ENSG00000214107; CTA
RTTATTFRA

SEQ ID NO: 42356 - protein, 10 aa, Homo sapiens
  misc_feature: Table A; Target 42356; HLA-A*03:01; MAGEB1; ENSG00000214107; CTA
RTTATTFRAR

SEQ ID NO: 42357 - protein, 10 aa, Homo sapiens
  misc_feature: Table A; Target 42357; HLA-A*31:01; MAGEB1; ENSG00000214107; CTA
RTTATTFRAR

SEQ ID NO: 42358 - protein, 10 aa, Homo sapiens
  misc_feature: Table A; Target 42358; HLA-B*57:01; MAGEB1; ENSG00000214107; CTA
RTTATTFRAR

SEQ ID NO: 42359 - protein, 9 aa, Homo sapiens
  misc_feature: Table A; Target 42359; HLA-C*14:02; MAGEB1; ENSG00000214107; CTA
SFSQATTST

SEQ ID NO: 42360 - protein, 10 aa, Homo sapiens
  misc_feature: Table A; Target 42360; HLA-A*11:01; MAGEB1; ENSG00000214107; CTA
SGHTYTLVSK

SEQ ID NO: 42361 - protein, 9 aa, Homo sapiens
  misc_feature: Table A; Target 42361; HLA-A*03:02; MAGEB1; ENSG00000214107; CTA
SPAAGIPQK

SEQ ID NO: 42362 - protein, 9 aa, Homo sapiens
  misc_feature: Table A; Target 42362; HLA-A*11:01; MAGEB1; ENSG00000214107; CTA
SPAAGIPQK

SEQ ID NO: 42363 - protein, 9 aa, Homo sapiens
  misc_feature: Table A; Target 42363; HLA-B*56:01; MAGEB1; ENSG00000214107; CTA
SPAAGIPQK

SEQ ID NO: 42364 - protein, 10 aa, Homo sapiens
  misc_feature: Table A; Target 42364; HLA-B*56:01; MAGEB1; ENSG00000214107; CTA
SPAAGIPQKP

SEQ ID NO: 42365 - protein, 9 aa, Homo sapiens
  misc_feature: Table A; Target 42365; HLA-B*35:03; MAGEB1; ENSG00000214107; CTA
SPVLGDTPT

SEQ ID NO: 42366 - protein, 10 aa, Homo sapiens
  misc_feature: Table A; Target 42366; HLA-B*56:01; MAGEB1; ENSG00000214107; CTA
SPVLGDTPTS

SEQ ID NO: 42367 - protein, 11 aa, Homo sapiens
  misc_feature: Table A; Target 42367; HLA-B*13:02; MAGEB1; ENSG00000214107; CTA
SQATTSTESSV

SEQ ID NO: 42368 - protein, 11 aa, Homo sapiens
  misc_feature: Table A; Target 42368; HLA-B*27:05; MAGEB1; ENSG00000214107; CTA
SQATTSTESSV

SEQ ID NO: 42369 - protein, 10 aa, Homo sapiens
  misc_feature: Table A; Target 42369; HLA-A*11:01; MAGEB1; ENSG00000214107; CTA
SSPAAGIPQK

SEQ ID NO: 42370 - protein, 9 aa, Homo sapiens
  misc_feature: Table A; Target 42370; HLA-A*25:01; MAGEB1; ENSG00000214107; CTA
SSVKDPVAW

SEQ ID NO: 42371 - protein, 9 aa, Homo sapiens
  misc_feature: Table A; Target 42371; HLA-A*32:01; MAGEB1; ENSG00000214107; CTA
SSVKDPVAW

SEQ ID NO: 42372 - protein, 9 aa, Homo sapiens
  misc_feature: Table A; Target 42372; HLA-B*44:02; MAGEB1; ENSG00000214107; CTA
SSVKDPVAW

SEQ ID NO: 42373 - protein, 9 aa, Homo sapiens
  misc_feature: Table A; Target 42373; HLA-B*44:03; MAGEB1; ENSG00000214107; CTA
SSVKDPVAW

SEQ ID NO: 42374 - protein, 9 aa, Homo sapiens
  misc_feature: Table A; Target 42374; HLA-B*58:01; MAGEB1; ENSG00000214107; CTA
SSVKDPVAW

SEQ ID NO: 42375 - protein, 9 aa, Homo sapiens
  misc_feature: Table A; Target 42375; HLA-C*07:06; MAGEB1; ENSG00000214107; CTA
SSVKDPVAW

SEQ ID NO: 42376 - protein, 9 aa, Homo sapiens
  misc_feature: Table A; Target 42376; HLA-C*16:01; MAGEB1; ENSG00000214107; CTA
SSVKDPVAW

SEQ ID NO: 42377 - protein, 9 aa, Homo sapiens
  misc_feature: Table A; Target 42377; HLA-C*16:04; MAGEB1; ENSG00000214107; CTA
SSVKDPVAW

SEQ ID NO: 42378 - protein, 8 aa, Homo sapiens
  misc_feature: Table A; Target 42378; HLA-A*25:01; MAGEB1; ENSG00000214107; CTA
SVKDPVAW

SEQ ID NO: 42379 - protein, 8 aa, Homo sapiens
  misc_feature: Table A; Target 42379; HLA-A*32:01; MAGEB1; ENSG00000214107; CTA
SVKDPVAW

SEQ ID NO: 42380 - protein, 8 aa, Homo sapiens
  misc_feature: Table A; Target 42380; HLA-B*08:01; MAGEB1; ENSG00000214107; CTA
SVKDPVAW

SEQ ID NO: 42381 - protein, 8 aa, Homo sapiens
  misc_feature: Table A; Target 42381; HLA-B*57:01; MAGEB1; ENSG00000214107; CTA
SVKDPVAW

SEQ ID NO: 42382 - protein, 8 aa, Homo sapiens
  misc_feature: Table A; Target 42382; HLA-B*58:01; MAGEB1; ENSG00000214107; CTA
SVKDPVAW

SEQ ID NO: 42383 - protein, 10 aa, Homo sapiens
  misc_feature: Table A; Target 42383; HLA-A*31:01; MAGEB1; ENSG00000214107; CTA
SVKDPVAWEA

SEQ ID NO: 42384 - protein, 10 aa, Homo sapiens
  misc_feature: Table A; Target 42384; HLA-B*54:01; MAGEB1; ENSG00000214107; CTA
SVKDPVAWEA

SEQ ID NO: 42385 - protein, 10 aa, Homo sapiens
  misc_feature: Table A; Target 42385; HLA-B*56:01; MAGEB1; ENSG00000214107; CTA
SVKDPVAWEA

SEQ ID NO: 42386 - protein, 8 aa, Homo sapiens
  misc_feature: Table A; Target 42386; HLA-A*31:01; MAGEB1; ENSG00000214107; CTA
TATTFRAR

SEQ ID NO: 42387 - protein, 8 aa, Homo sapiens
  misc_feature: Table A; Target 42387; HLA-A*33:03; MAGEB1; ENSG00000214107; CTA
TATTFRAR

SEQ ID NO: 42388 - protein, 8 aa, Homo sapiens
  misc_feature: Table A; Target 42388; HLA-C*16:01; MAGEB1; ENSG00000214107; CTA
TATTFRAR

SEQ ID NO: 42389 - protein, 8 aa, Homo sapiens
  misc_feature: Table A; Target 42389; HLA-C*16:02; MAGEB1; ENSG00000214107; CTA
TATTFRAR

SEQ ID NO: 42390 - protein, 8 aa, Homo sapiens
  misc_feature: Table A; Target 42390; HLA-B*18:01; MAGEB1; ENSG00000214107; CTA
TEEEIWKF

SEQ ID NO: 42391 - protein, 8 aa, Homo sapiens
  misc_feature: Table A; Target 42391; HLA-B*44:02; MAGEB1; ENSG00000214107; CTA
TEEEIWKF

SEQ ID NO: 42392 - protein, 9 aa, Homo sapiens
  misc_feature: Table A; Target 42392; HLA-B*44:02; MAGEB1; ENSG00000214107; CTA
TEEEIWKFM

SEQ ID NO: 42393 - protein, 9 aa, Homo sapiens
  misc_feature: Table A; Target 42393; HLA-A*30:01; MAGEB1; ENSG00000214107; CTA
TEILNGASR

SEQ ID NO: 42394 - protein, 9 aa, Homo sapiens
  misc_feature: Table A; Target 42394; HLA-A*33:03; MAGEB1; ENSG00000214107; CTA
TEILNGASR

SEQ ID NO: 42395 - protein, 9 aa, Homo sapiens
  misc_feature: Table A; Target 42395; HLA-A*68:01; MAGEB1; ENSG00000214107; CTA
TEILNGASR

SEQ ID NO: 42396 - protein, 9 aa, Homo sapiens
  misc_feature: Table A; Target 42396; HLA-B*40:01; MAGEB1; ENSG00000214107; CTA
TEILNGASR

SEQ ID NO: 42397 - protein, 9 aa, Homo sapiens
  misc_feature: Table A; Target 42397; HLA-B*44:02; MAGEB1; ENSG00000214107; CTA
TEILNGASR

SEQ ID NO: 42398 - protein, 9 aa, Homo sapiens
  misc_feature: Table A; Target 42398; HLA-B*44:03; MAGEB1; ENSG00000214107; CTA
TEILNGASR

SEQ ID NO: 42399 - protein, 10 aa, Homo sapiens
  misc_feature: Table A; Target 42399; HLA-B*44:03; MAGEB1; ENSG00000214107; CTA
TEILNGASRR

SEQ ID NO: 42400 - protein, 11 aa, Homo sapiens
  misc_feature: Table A; Target 42400; HLA-B*44:02; MAGEB1; ENSG00000214107; CTA
TEILNGASRRL

SEQ ID NO: 42401 - protein, 11 aa, Homo sapiens
  misc_feature: Table A; Target 42401; HLA-B*44:03; MAGEB1; ENSG00000214107; CTA
TEILNGASRRL

SEQ ID NO: 42402 - protein, 9 aa, Homo sapiens
  misc_feature: Table A; Target 42402; HLA-B*49:01; MAGEB1; ENSG00000214107; CTA
TESDEGAKC

SEQ ID NO: 42403 - protein, 9 aa, Homo sapiens
  misc_feature: Table A; Target 42403; HLA-A*30:01; MAGEB1; ENSG00000214107; CTA
TESSVKDPV

SEQ ID NO: 42404 - protein, 9 aa, Homo sapiens
  misc_feature: Table A; Target 42404; HLA-A*68:02; MAGEB1; ENSG00000214107; CTA
TESSVKDPV

SEQ ID NO: 42405 - protein, 9 aa, Homo sapiens
  misc_feature: Table A; Target 42405; HLA-B*18:01; MAGEB1; ENSG00000214107; CTA
TESSVKDPV

SEQ ID NO: 42406 - protein, 9 aa, Homo sapiens
  misc_feature: Table A; Target 42406; HLA-B*37:01; MAGEB1; ENSG00000214107; CTA
TESSVKDPV

SEQ ID NO: 42407 - protein, 9 aa, Homo sapiens
  misc_feature: Table A; Target 42407; HLA-B*39:01; MAGEB1; ENSG00000214107; CTA
TESSVKDPV

SEQ ID NO: 42408 - protein, 9 aa, Homo sapiens
  misc_feature: Table A; Target 42408; HLA-B*40:01; MAGEB1; ENSG00000214107; CTA
TESSVKDPV

SEQ ID NO: 42409 - protein, 9 aa, Homo sapiens
  misc_feature: Table A; Target 42409; HLA-B*40:02; MAGEB1; ENSG00000214107; CTA
TESSVKDPV

SEQ ID NO: 42410 - protein, 9 aa, Homo sapiens
  misc_feature: Table A; Target 42410; HLA-B*44:03; MAGEB1; ENSG00000214107; CTA
TESSVKDPV

SEQ ID NO: 42411 - protein, 9 aa, Homo sapiens
  misc_feature: Table A; Target 42411; HLA-B*49:01; MAGEB1; ENSG00000214107; CTA
TESSVKDPV

SEQ ID NO: 42412 - protein, 9 aa, Homo sapiens
  misc_feature: Table A; Target 42412; HLA-C*04:01; MAGEB1; ENSG00000214107; CTA
TESSVKDPV

SEQ ID NO: 42413 - protein, 9 aa, Homo sapiens
  misc_feature: Table A; Target 42413; HLA-C*06:02; MAGEB1; ENSG00000214107; CTA
TESSVKDPV

SEQ ID NO: 42414 - protein, 9 aa, Homo sapiens
  misc_feature: Table A; Target 42414; HLA-C*16:04; MAGEB1; ENSG00000214107; CTA
TESSVKDPV

SEQ ID NO: 42415 - protein, 11 aa, Homo sapiens
  misc_feature: Table A; Target 42415; HLA-B*18:01; MAGEB1; ENSG00000214107; CTA
TESSVKDPVAW

SEQ ID NO: 42416 - protein, 11 aa, Homo sapiens
  misc_feature: Table A; Target 42416; HLA-B*27:02; MAGEB1; ENSG00000214107; CTA
TESSVKDPVAW

SEQ ID NO: 42417 - protein, 11 aa, Homo sapiens
  misc_feature: Table A; Target 42417; HLA-B*38:01; MAGEB1; ENSG00000214107; CTA
TESSVKDPVAW

SEQ ID NO: 42418 - protein, 11 aa, Homo sapiens
  misc_feature: Table A; Target 42418; HLA-B*40:01; MAGEB1; ENSG00000214107; CTA
TESSVKDPVAW

SEQ ID NO: 42419 - protein, 11 aa, Homo sapiens
  misc_feature: Table A; Target 42419; HLA-B*44:02; MAGEB1; ENSG00000214107; CTA
TESSVKDPVAW

SEQ ID NO: 42420 - protein, 11 aa, Homo sapiens
  misc_feature: Table A; Target 42420; HLA-B*44:03; MAGEB1; ENSG00000214107; CTA
TESSVKDPVAW

SEQ ID NO: 42421 - protein, 11 aa, Homo sapiens
  misc_feature: Table A; Target 42421; HLA-B*57:01; MAGEB1; ENSG00000214107; CTA
TESSVKDPVAW

SEQ ID NO: 42422 - protein, 11 aa, Homo sapiens
  misc_feature: Table A; Target 42422; HLA-C*16:04; MAGEB1; ENSG00000214107; CTA
TESSVKDPVAW

SEQ ID NO: 42423 - protein, 8 aa, Homo sapiens
  misc_feature: Table A; Target 42423; HLA-B*15:03; MAGEB1; ENSG00000214107; CTA
TKMKVLEF

SEQ ID NO: 42424 - protein, 8 aa, Homo sapiens
  misc_feature: Table A; Target 42424; HLA-B*08:01; MAGEB1; ENSG00000214107; CTA
TLVSKLNL

SEQ ID NO: 42425 - protein, 9 aa, Homo sapiens
  misc_feature: Table A; Target 42425; HLA-A*02:03; MAGEB1; ENSG00000214107; CTA
TLVSKLNLT

SEQ ID NO: 42426 - protein, 9 aa, Homo sapiens
  misc_feature: Table A; Target 42426; HLA-A*30:02; MAGEB1; ENSG00000214107; CTA
TPRDFPSHY

SEQ ID NO: 42427 - protein, 9 aa, Homo sapiens
  misc_feature: Table A; Target 42427; HLA-B*07:02; MAGEB1; ENSG00000214107; CTA
TPRDFPSHY

SEQ ID NO: 42428 - protein, 9 aa, Homo sapiens
  misc_feature: Table A; Target 42428; HLA-B*35:01; MAGEB1; ENSG00000214107; CTA
TPRDFPSHY

SEQ ID NO: 42429 - protein, 8 aa, Homo sapiens
  misc_feature: Table A; Target 42429; HLA-B*54:01; MAGEB1; ENSG00000214107; CTA
TPTSSPAA

SEQ ID NO: 42430 - protein, 8 aa, Homo sapiens
  misc_feature: Table A; Target 42430; HLA-B*55:01; MAGEB1; ENSG00000214107; CTA
TPTSSPAA

SEQ ID NO: 42431 - protein, 8 aa, Homo sapiens
  misc_feature: Table A; Target 42431; HLA-B*56:01; MAGEB1; ENSG00000214107; CTA
TPTSSPAA

SEQ ID NO: 42432 - protein, 10 aa, Homo sapiens
  misc_feature: Table A; Target 42432; HLA-C*04:01; MAGEB1; ENSG00000214107; CTA
TQDLVQEKYL

SEQ ID NO: 42433 - protein, 11 aa, Homo sapiens
  misc_feature: Table A; Target 42433; HLA-A*03:02; MAGEB1; ENSG00000214107; CTA
TSSPAAGIPQK

SEQ ID NO: 42434 - protein, 11 aa, Homo sapiens
  misc_feature: Table A; Target 42434; HLA-A*11:01; MAGEB1; ENSG00000214107; CTA
TSSPAAGIPQK

SEQ ID NO: 42435 - protein, 11 aa, Homo sapiens
  misc_feature: Table A; Target 42435; HLA-A*68:01; MAGEB1; ENSG00000214107; CTA
TSSPAAGIPQK

SEQ ID NO: 42436 - protein, 11 aa, Homo sapiens
  misc_feature: Table A; Target 42436; HLA-C*07:06; MAGEB1; ENSG00000214107; CTA
TSSPAAGIPQK

SEQ ID NO: 42437 - protein, 8 aa, Homo sapiens
  misc_feature: Table A; Target 42437; HLA-C*06:02; MAGEB1; ENSG00000214107; CTA
TTATTFRA

SEQ ID NO: 42438 - protein, 9 aa, Homo sapiens
  misc_feature: Table A; Target 42438; HLA-A*03:01; MAGEB1; ENSG00000214107; CTA
TTATTFRAR

SEQ ID NO: 42439 - protein, 9 aa, Homo sapiens
  misc_feature: Table A; Target 42439; HLA-A*11:01; MAGEB1; ENSG00000214107; CTA
TTATTFRAR

SEQ ID NO: 42440 - protein, 9 aa, Homo sapiens
  misc_feature: Table A; Target 42440; HLA-A*31:01; MAGEB1; ENSG00000214107; CTA
TTATTFRAR

SEQ ID NO: 42441 - protein, 9 aa, Homo sapiens
  misc_feature: Table A; Target 42441; HLA-A*33:01; MAGEB1; ENSG00000214107; CTA
TTATTFRAR

SEQ ID NO: 42442 - protein, 9 aa, Homo sapiens
  misc_feature: Table A; Target 42442; HLA-A*33:03; MAGEB1; ENSG00000214107; CTA
TTATTFRAR

SEQ ID NO: 42443 - protein, 9 aa, Homo sapiens
  misc_feature: Table A; Target 42443; HLA-A*68:01; MAGEB1; ENSG00000214107; CTA
TTATTFRAR

SEQ ID NO: 42444 - protein, 9 aa, Homo sapiens
  misc_feature: Table A; Target 42444; HLA-B*57:01; MAGEB1; ENSG00000214107; CTA
TTATTFRAR

SEQ ID NO: 42445 - protein, 9 aa, Homo sapiens
  misc_feature: Table A; Target 42445; HLA-C*06:02; MAGEB1; ENSG00000214107; CTA
TTATTFRAR

SEQ ID NO: 42446 - protein, 9 aa, Homo sapiens
  misc_feature: Table A; Target 42446; HLA-C*07:06; MAGEB1; ENSG00000214107; CTA
TTATTFRAR

SEQ ID NO: 42447 - protein, 9 aa, Homo sapiens
  misc_feature: Table A; Target 42447; HLA-C*16:01; MAGEB1; ENSG00000214107; CTA
TTATTFRAR

SEQ ID NO: 42448 - protein, 9 aa, Homo sapiens
  misc_feature: Table A; Target 42448; HLA-A*25:01; MAGEB1; ENSG00000214107; CTA
TTKMKVLEF

SEQ ID NO: 42449 - protein, 9 aa, Homo sapiens
  misc_feature: Table A; Target 42449; HLA-A*33:01; MAGEB1; ENSG00000214107; CTA
TTKMKVLEF

SEQ ID NO: 42450 - protein, 9 aa, Homo sapiens
  misc_feature: Table A; Target 42450; HLA-A*33:03; MAGEB1; ENSG00000214107; CTA
TTKMKVLEF

SEQ ID NO: 42451 - protein, 9 aa, Homo sapiens
  misc_feature: Table A; Target 42451; HLA-B*08:01; MAGEB1; ENSG00000214107; CTA
TTKMKVLEF

SEQ ID NO: 42452 - protein, 9 aa, Homo sapiens
  misc_feature: Table A; Target 42452; HLA-B*37:01; MAGEB1; ENSG00000214107; CTA
TTKMKVLEF

SEQ ID NO: 42453 - protein, 9 aa, Homo sapiens
  misc_feature: Table A; Target 42453; HLA-B*57:01; MAGEB1; ENSG00000214107; CTA
TTKMKVLEF

SEQ ID NO: 42454 - protein, 9 aa, Homo sapiens
  misc_feature: Table A; Target 42454; HLA-A*03:02; MAGEB1; ENSG00000214107; CTA
TTSTESSVK

SEQ ID NO: 42455 - protein, 9 aa, Homo sapiens
  misc_feature: Table A; Target 42455; HLA-A*11:01; MAGEB1; ENSG00000214107; CTA
TTSTESSVK

SEQ ID NO: 42456 - protein, 9 aa, Homo sapiens
  misc_feature: Table A; Target 42456; HLA-A*68:01; MAGEB1; ENSG00000214107; CTA
TTSTESSVK

SEQ ID NO: 42457 - protein, 9 aa, Homo sapiens
  misc_feature: Table A; Target 42457; HLA-C*07:06; MAGEB1; ENSG00000214107; CTA
TTSTESSVK

SEQ ID NO: 42458 - protein, 8 aa, Homo sapiens
  misc_feature: Table A; Target 42458; HLA-A*23:01; MAGEB1; ENSG00000214107; CTA
TYTLVSKL

SEQ ID NO: 42459 - protein, 8 aa, Homo sapiens
  misc_feature: Table A; Target 42459; HLA-A*24:02; MAGEB1; ENSG00000214107; CTA
TYTLVSKL

SEQ ID NO: 42460 - protein, 8 aa, Homo sapiens
  misc_feature: Table A; Target 42460; HLA-B*37:01; MAGEB1; ENSG00000214107; CTA
TYTLVSKL

SEQ ID NO: 42461 - protein, 8 aa, Homo sapiens
  misc_feature: Table A; Target 42461; HLA-C*01:02; MAGEB1; ENSG00000214107; CTA
TYTLVSKL

SEQ ID NO: 42462 - protein, 8 aa, Homo sapiens
  misc_feature: Table A; Target 42462; HLA-C*04:01; MAGEB1; ENSG00000214107; CTA
TYTLVSKL

SEQ ID NO: 42463 - protein, 8 aa, Homo sapiens
  misc_feature: Table A; Target 42463; HLA-C*06:02; MAGEB1; ENSG00000214107; CTA
TYTLVSKL

SEQ ID NO: 42464 - protein, 8 aa, Homo sapiens
  misc_feature: Table A; Target 42464; HLA-C*07:01; MAGEB1; ENSG00000214107; CTA
TYTLVSKL

SEQ ID NO: 42465 - protein, 8 aa, Homo sapiens
  misc_feature: Table A; Target 42465; HLA-C*07:02; MAGEB1; ENSG00000214107; CTA
TYTLVSKL

SEQ ID NO: 42466 - protein, 8 aa, Homo sapiens
  misc_feature: Table A; Target 42466; HLA-C*14:02; MAGEB1; ENSG00000214107; CTA
TYTLVSKL

SEQ ID NO: 42467 - protein, 8 aa, Homo sapiens
  misc_feature: Table A; Target 42467; HLA-C*16:02; MAGEB1; ENSG00000214107; CTA
TYTLVSKL

SEQ ID NO: 42468 - protein, 10 aa, Homo sapiens
  misc_feature: Table A; Target 42468; HLA-A*23:01; MAGEB1; ENSG00000214107; CTA
TYTLVSKLNL

SEQ ID NO: 42469 - protein, 10 aa, Homo sapiens
  misc_feature: Table A; Target 42469; HLA-A*24:02; MAGEB1; ENSG00000214107; CTA
TYTLVSKLNL

SEQ ID NO: 42470 - protein, 9 aa, Homo sapiens
  misc_feature: Table A; Target 42470; HLA-A*03:01; MAGEB1; ENSG00000214107; CTA
VAHATAAEK

SEQ ID NO: 42471 - protein, 9 aa, Homo sapiens
  misc_feature: Table A; Target 42471; HLA-A*03:02; MAGEB1; ENSG00000214107; CTA
VAHATAAEK

SEQ ID NO: 42472 - protein, 9 aa, Homo sapiens
  misc_feature: Table A; Target 42472; HLA-A*11:01; MAGEB1; ENSG00000214107; CTA
VAHATAAEK

SEQ ID NO: 42473 - protein, 9 aa, Homo sapiens
  misc_feature: Table A; Target 42473; HLA-A*33:01; MAGEB1; ENSG00000214107; CTA
VAHATAAEK

SEQ ID NO: 42474 - protein, 9 aa, Homo sapiens
  misc_feature: Table A; Target 42474; HLA-B*46:01; MAGEB1; ENSG00000214107; CTA
VAHATAAEK

SEQ ID NO: 42475 - protein, 9 aa, Homo sapiens
  misc_feature: Table A; Target 42475; HLA-C*07:06; MAGEB1; ENSG00000214107; CTA
VAHATAAEK

SEQ ID NO: 42476 - protein, 8 aa, Homo sapiens
  misc_feature: Table A; Target 42476; HLA-C*03:03; MAGEB1; ENSG00000214107; CTA
VAWEAGML

SEQ ID NO: 42477 - protein, 8 aa, Homo sapiens
  misc_feature: Table A; Target 42477; HLA-C*03:04; MAGEB1; ENSG00000214107; CTA
VAWEAGML

SEQ ID NO: 42478 - protein, 9 aa, Homo sapiens
  misc_feature: Table A; Target 42478; HLA-B*15:03; MAGEB1; ENSG00000214107; CTA
VAWEAGMLM

SEQ ID NO: 42479 - protein, 9 aa, Homo sapiens
  misc_feature: Table A; Target 42479; HLA-B*35:01; MAGEB1; ENSG00000214107; CTA
VAWEAGMLM

SEQ ID NO: 42480 - protein, 9 aa, Homo sapiens
  misc_feature: Table A; Target 42480; HLA-B*46:01; MAGEB1; ENSG00000214107; CTA
VAWEAGMLM

SEQ ID NO: 42481 - protein, 9 aa, Homo sapiens
  misc_feature: Table A; Target 42481; HLA-B*51:01; MAGEB1; ENSG00000214107; CTA
VAWEAGMLM

SEQ ID NO: 42482 - protein, 9 aa, Homo sapiens
  misc_feature: Table A; Target 42482; HLA-C*02:02; MAGEB1; ENSG00000214107; CTA
VAWEAGMLM

SEQ ID NO: 42483 - protein, 9 aa, Homo sapiens
  misc_feature: Table A; Target 42483; HLA-C*03:04; MAGEB1; ENSG00000214107; CTA
VAWEAGMLM

SEQ ID NO: 42484 - protein, 9 aa, Homo sapiens
  misc_feature: Table A; Target 42484; HLA-C*05:01; MAGEB1; ENSG00000214107; CTA
VAWEAGMLM

SEQ ID NO: 42485 - protein, 9 aa, Homo sapiens
  misc_feature: Table A; Target 42485; HLA-A*32:01; MAGEB1; ENSG00000214107; CTA
VIFLKGNSA

SEQ ID NO: 42486 - protein, 9 aa, Homo sapiens
  misc_feature: Table A; Target 42486; HLA-B*08:01; MAGEB1; ENSG00000214107; CTA
VIFLKGNSA

SEQ ID NO: 42487 - protein, 9 aa, Homo sapiens
  misc_feature: Table A; Target 42487; HLA-B*54:01; MAGEB1; ENSG00000214107; CTA
VIFLKGNSA

SEQ ID NO: 42488 - protein, 9 aa, Homo sapiens
  misc_feature: Table A; Target 42488; HLA-B*56:01; MAGEB1; ENSG00000214107; CTA
VIFLKGNSA

SEQ ID NO: 42489 - protein, 9 aa, Homo sapiens
  misc_feature: Table A; Target 42489; HLA-A*01:01; MAGEB1; ENSG00000214107; CTA
VPNSDPPRY

SEQ ID NO: 42490 - protein, 9 aa, Homo sapiens
  misc_feature: Table A; Target 42490; HLA-B*15:01; MAGEB1; ENSG00000214107; CTA
VPNSDPPRY

SEQ ID NO: 42491 - protein, 9 aa, Homo sapiens
  misc_feature: Table A; Target 42491; HLA-B*56:01; MAGEB1; ENSG00000214107; CTA
VPNSDPPRY

SEQ ID NO: 42492 - protein, 8 aa, Homo sapiens
  misc_feature: Table A; Target 42492; HLA-A*01:01; MAGEB1; ENSG00000214107; CTA
VQEKYLKY

SEQ ID NO: 42493 - protein, 8 aa, Homo sapiens
  misc_feature: Table A; Target 42493; HLA-C*07:01; MAGEB1; ENSG00000214107; CTA
VQEKYLKY

SEQ ID NO: 42494 - protein, 9 aa, Homo sapiens
  misc_feature: Table A; Target 42494; HLA-A*01:01; MAGEB1; ENSG00000214107; CTA
YAETTKMKV

SEQ ID NO: 42495 - protein, 9 aa, Homo sapiens
  misc_feature: Table A; Target 42495; HLA-B*51:01; MAGEB1; ENSG00000214107; CTA
YAETTKMKV

SEQ ID NO: 42496 - protein, 9 aa, Homo sapiens
  misc_feature: Table A; Target 42496; HLA-C*05:01; MAGEB1; ENSG00000214107; CTA
YAETTKMKV

SEQ ID NO: 42497 - protein, 9 aa, Homo sapiens
  misc_feature: Table A; Target 42497; HLA-C*16:02; MAGEB1; ENSG00000214107; CTA
YAETTKMKV

SEQ ID NO: 42498 - protein, 8 aa, Homo sapiens
  misc_feature: Table A; Target 42498; HLA-B*38:01; MAGEB1; ENSG00000214107; CTA
YDGEEHLI

SEQ ID NO: 42499 - protein, 8 aa, Homo sapiens
  misc_feature: Table A; Target 42499; HLA-C*07:01; MAGEB1; ENSG00000214107; CTA
YDGEEHLI

SEQ ID NO: 42500 - protein, 8 aa, Homo sapiens
  misc_feature: Table A; Target 42500; HLA-C*07:04; MAGEB1; ENSG00000214107; CTA
YDGEEHLI

SEQ ID NO: 42501 - protein, 9 aa, Homo sapiens
  misc_feature: Table A; Target 42501; HLA-A*01:01; MAGEB1; ENSG00000214107; CTA
YDGEEHLIY

SEQ ID NO: 42502 - protein, 9 aa, Homo sapiens
  misc_feature: Table A; Target 42502; HLA-A*29:02; MAGEB1; ENSG00000214107; CTA
YDGEEHLIY

SEQ ID NO: 42503 - protein, 9 aa, Homo sapiens
  misc_feature: Table A; Target 42503; HLA-C*07:01; MAGEB1; ENSG00000214107; CTA
YDGEEHLIY

SEQ ID NO: 42504 - protein, 11 aa, Homo sapiens
  misc_feature: Table A; Target 42504; HLA-B*27:02; MAGEB1; ENSG00000214107; CTA
YEQVPNSDPPR

SEQ ID NO: 42505 - protein, 9 aa, Homo sapiens
  misc_feature: Table A; Target 42505; HLA-A*02:04; MAGEB1; ENSG00000214107; CTA
YTLVSKLNL

SEQ ID NO: 42506 - protein, 9 aa, Homo sapiens
  misc_feature: Table A; Target 42506; HLA-A*23:01; MAGEB1; ENSG00000214107; CTA
YTLVSKLNL

SEQ ID NO: 42507 - protein, 9 aa, Homo sapiens
  misc_feature: Table A; Target 42507; HLA-A*24:02; MAGEB1; ENSG00000214107; CTA
YTLVSKLNL

SEQ ID NO: 42508 - protein, 9 aa, Homo sapiens
  misc_feature: Table A; Target 42508; HLA-C*03:03; MAGEB1; ENSG00000214107; CTA
YTLVSKLNL

SEQ ID NO: 42509 - protein, 9 aa, Homo sapiens
  misc_feature: Table A; Target 42509; HLA-C*03:04; MAGEB1; ENSG00000214107; CTA
YTLVSKLNL

SEQ ID NO: 42510 - protein, 8 aa, Homo sapiens
  misc_feature: Table A; Target 42510; HLA-A*29:02; MAGEB1,MAGEB2; ENSG00000214107,ENSG00000099399; CTA,CTA
FLWGPRAY

SEQ ID NO: 42511 - protein, 10 aa, Homo sapiens
  misc_feature: Table A; Target 42511; HLA-A*03:01; MAGEB1,MAGEB2; ENSG00000214107,ENSG00000099399; CTA,CTA
KMKVLEFLAK

SEQ ID NO: 42512 - protein, 8 aa, Homo sapiens
  misc_feature: Table A; Target 42512; HLA-A*11:01; MAGEB1,MAGEB2; ENSG00000214107,ENSG00000099399; CTA,CTA
KVLEFLAK

SEQ ID NO: 42513 - protein, 9 aa, Homo sapiens
  misc_feature: Table A; Target 42513; HLA-A*02:01; MAGEB1,MAGEB2; ENSG00000214107,ENSG00000099399; CTA,CTA
LLMPLLGVI

SEQ ID NO: 42514 - protein, 9 aa, Homo sapiens
  misc_feature: Table A; Target 42514; HLA-A*02:03; MAGEB1,MAGEB2; ENSG00000214107,ENSG00000099399; CTA,CTA
LLMPLLGVI

SEQ ID NO: 42515 - protein, 9 aa, Homo sapiens
  misc_feature: Table A; Target 42515; HLA-A*02:04; MAGEB1,MAGEB2; ENSG00000214107,ENSG00000099399; CTA,CTA
LLMPLLGVI

SEQ ID NO: 42516 - protein, 11 aa, Homo sapiens
  misc_feature: Table A; Target 42516; HLA-A*02:01; MAGEB1,MAGEB2; ENSG00000214107,ENSG00000099399; CTA,CTA
LLMPLLGVIFL

SEQ ID NO: 42517 - protein, 11 aa, Homo sapiens
  misc_feature: Table A; Target 42517; HLA-A*02:04; MAGEB1,MAGEB2; ENSG00000214107,ENSG00000099399; CTA,CTA
LLMPLLGVIFL

SEQ ID NO: 42518 - protein, 9 aa, Homo sapiens
  misc_feature: Table A; Target 42518; HLA-A*24:02; MAGEB1,MAGEB2; ENSG00000214107,ENSG00000099399; CTA,CTA
LMPLLGVIF

SEQ ID NO: 42519 - protein, 10 aa, Homo sapiens
  misc_feature: Table A; Target 42519; HLA-A*02:07; MAGEB1,MAGEB2; ENSG00000214107,ENSG00000099399; CTA,CTA
LMPLLGVIFL

SEQ ID NO: 42520 - protein, 8 aa, Homo sapiens
  misc_feature: Table A; Target 42520; HLA-B*35:01; MAGEB1,MAGEB2; ENSG00000214107,ENSG00000099399; CTA,CTA
MPLLGVIF

SEQ ID NO: 42521 - protein, 8 aa, Homo sapiens
  misc_feature: Table A; Target 42521; HLA-B*35:03; MAGEB1,MAGEB2; ENSG00000214107,ENSG00000099399; CTA,CTA
MPLLGVIF

SEQ ID NO: 42522 - protein, 9 aa, Homo sapiens
  misc_feature: Table A; Target 42522; HLA-B*35:01; MAGEB1,MAGEB2; ENSG00000214107,ENSG00000099399; CTA,CTA
MPLLGVIFL

SEQ ID NO: 42523 - protein, 9 aa, Homo sapiens
  misc_feature: Table A; Target 42523; HLA-B*35:03; MAGEB1,MAGEB2; ENSG00000214107,ENSG00000099399; CTA,CTA
MPLLGVIFL

SEQ ID NO: 42524 - protein, 9 aa, Homo sapiens
  misc_feature: Table A; Target 42524; HLA-B*51:01; MAGEB1,MAGEB2; ENSG00000214107,ENSG00000099399; CTA,CTA
MPLLGVIFL

SEQ ID NO: 42525 - protein, 9 aa, Homo sapiens
  misc_feature: Table A; Target 42525; HLA-B*54:01; MAGEB1,MAGEB2; ENSG00000214107,ENSG00000099399; CTA,CTA
MPLLGVIFL

SEQ ID NO: 42526 - protein, 9 aa, Homo sapiens
  misc_feature: Table A; Target 42526; HLA-B*58:01; MAGEB1,MAGEB2; ENSG00000214107,ENSG00000099399; CTA,CTA
NSATEEEIW

SEQ ID NO: 42527 - protein, 9 aa, Homo sapiens
  misc_feature: Table A; Target 42527; HLA-A*29:02; MAGEB1,MAGEB2; ENSG00000214107,ENSG00000099399; CTA,CTA
QFLWGPRAY

SEQ ID NO: 42528 - protein, 9 aa, Homo sapiens
  misc_feature: Table A; Target 42528; HLA-C*01:02; MAGEB1,MAGEB2; ENSG00000214107,ENSG00000099399; CTA,CTA
SSPAAGIPQ

SEQ ID NO: 42529 - protein, 9 aa, Homo sapiens
  misc_feature: Table A; Target 42529; HLA-B*07:02; MAGEB1,MAGEB2,MAGEB4; ENSG00000214107,ENSG00000099399,ENSG00000120289; CTA,CTA,CTA
MPRGQKSKL

SEQ ID NO: 42530 - protein, 9 aa, Homo sapiens
  misc_feature: Table A; Target 42530; HLA-C*07:02; MAGEB1,MAGEB2,MAGEB4; ENSG00000214107,ENSG00000099399,ENSG00000120289; CTA,CTA,CTA
MPRGQKSKL

SEQ ID NO: 42531 - protein, 8 aa, Homo sapiens
  misc_feature: Table A; Target 42531; HLA-A*03:01; MAGEB1,MAGEB2,MAGEB4,MAGEC2; ENSG00000214107,ENSG00000099399,ENSG00000120289,ENSG00000046774; CTA,CTA,CTA,CTA
KVLEFLAK

SEQ ID NO: 42532 - protein, 9 aa, Homo sapiens
  misc_feature: Table A; Target 42532; HLA-A*33:01; MAGEB1,MAGEB4; ENSG00000214107,ENSG00000120289; CTA,CTA
EALRDEEER

SEQ ID NO: 42533 - protein, 9 aa, Homo sapiens
  misc_feature: Table A; Target 42533; HLA-A*33:03; MAGEB1,MAGEB4; ENSG00000214107,ENSG00000120289; CTA,CTA
EALRDEEER

SEQ ID NO: 42534 - protein, 9 aa, Homo sapiens
  misc_feature: Table A; Target 42534; HLA-A*01:01; MAGEB1,MAGEB4; ENSG00000214107,ENSG00000120289; CTA,CTA
ITQDLVQEK

SEQ ID NO: 42535 - protein, 9 aa, Homo sapiens
  misc_feature: Table A; Target 42535; HLA-A*03:01; MAGEB1,MAGEB4; ENSG00000214107,ENSG00000120289; CTA,CTA
ITQDLVQEK

SEQ ID NO: 42536 - protein, 9 aa, Homo sapiens
  misc_feature: Table A; Target 42536; HLA-A*03:02; MAGEB1,MAGEB4; ENSG00000214107,ENSG00000120289; CTA,CTA
ITQDLVQEK

SEQ ID NO: 42537 - protein, 9 aa, Homo sapiens
  misc_feature: Table A; Target 42537; HLA-A*31:01; MAGEB1,MAGEB4; ENSG00000214107,ENSG00000120289; CTA,CTA
ITQDLVQEK

SEQ ID NO: 42538 - protein, 9 aa, Homo sapiens
  misc_feature: Table A; Target 42538; HLA-A*33:01; MAGEB1,MAGEB4; ENSG00000214107,ENSG00000120289; CTA,CTA
ITQDLVQEK

SEQ ID NO: 42539 - protein, 9 aa, Homo sapiens
  misc_feature: Table A; Target 42539; HLA-A*33:03; MAGEB1,MAGEB4; ENSG00000214107,ENSG00000120289; CTA,CTA
ITQDLVQEK

SEQ ID NO: 42540 - protein, 9 aa, Homo sapiens
  misc_feature: Table A; Target 42540; HLA-A*68:01; MAGEB1,MAGEB4; ENSG00000214107,ENSG00000120289; CTA,CTA
ITQDLVQEK

SEQ ID NO: 42541 - protein, 9 aa, Homo sapiens
  misc_feature: Table A; Target 42541; HLA-B*27:02; MAGEB1,MAGEB4; ENSG00000214107,ENSG00000120289; CTA,CTA
ITQDLVQEK

SEQ ID NO: 42542 - protein, 9 aa, Homo sapiens
  misc_feature: Table A; Target 42542; HLA-C*07:06; MAGEB1,MAGEB4; ENSG00000214107,ENSG00000120289; CTA,CTA
ITQDLVQEK

SEQ ID NO: 42543 - protein, 9 aa, Homo sapiens
  misc_feature: Table A; Target 42543; HLA-C*16:02; MAGEB1,MAGEB4; ENSG00000214107,ENSG00000120289; CTA,CTA
ITQDLVQEK

SEQ ID NO: 42544 - protein, 10 aa, Homo sapiens
  misc_feature: Table A; Target 42544; HLA-A*01:01; MAGEB1,MAGEB4; ENSG00000214107,ENSG00000120289; CTA,CTA
ITQDLVQEKY

SEQ ID NO: 42545 - protein, 10 aa, Homo sapiens
  misc_feature: Table A; Target 42545; HLA-A*25:01; MAGEB1,MAGEB4; ENSG00000214107,ENSG00000120289; CTA,CTA
ITQDLVQEKY

SEQ ID NO: 42546 - protein, 10 aa, Homo sapiens
  misc_feature: Table A; Target 42546; HLA-A*26:01; MAGEB1,MAGEB4; ENSG00000214107,ENSG00000120289; CTA,CTA
ITQDLVQEKY

SEQ ID NO: 42547 - protein, 10 aa, Homo sapiens
  misc_feature: Table A; Target 42547; HLA-A*29:02; MAGEB1,MAGEB4; ENSG00000214107,ENSG00000120289; CTA,CTA
ITQDLVQEKY

SEQ ID NO: 42548 - protein, 10 aa, Homo sapiens
  misc_feature: Table A; Target 42548; HLA-A*30:02; MAGEB1,MAGEB4; ENSG00000214107,ENSG00000120289; CTA,CTA
ITQDLVQEKY

SEQ ID NO: 42549 - protein, 10 aa, Homo sapiens
  misc_feature: Table A; Target 42549; HLA-A*32:01; MAGEB1,MAGEB4; ENSG00000214107,ENSG00000120289; CTA,CTA
ITQDLVQEKY

SEQ ID NO: 42550 - protein, 10 aa, Homo sapiens
  misc_feature: Table A; Target 42550; HLA-B*15:01; MAGEB1,MAGEB4; ENSG00000214107,ENSG00000120289; CTA,CTA
ITQDLVQEKY

SEQ ID NO: 42551 - protein, 10 aa, Homo sapiens
  misc_feature: Table A; Target 42551; HLA-B*57:01; MAGEB1,MAGEB4; ENSG00000214107,ENSG00000120289; CTA,CTA
ITQDLVQEKY

SEQ ID NO: 42552 - protein, 10 aa, Homo sapiens
  misc_feature: Table A; Target 42552; HLA-B*58:01; MAGEB1,MAGEB4; ENSG00000214107,ENSG00000120289; CTA,CTA
ITQDLVQEKY

SEQ ID NO: 42553 - protein, 10 aa, Homo sapiens
  misc_feature: Table A; Target 42553; HLA-C*16:01; MAGEB1,MAGEB4; ENSG00000214107,ENSG00000120289; CTA,CTA
ITQDLVQEKY

SEQ ID NO: 42554 - protein, 10 aa, Homo sapiens
  misc_feature: Table A; Target 42554; HLA-C*16:02; MAGEB1,MAGEB4; ENSG00000214107,ENSG00000120289; CTA,CTA
ITQDLVQEKY

SEQ ID NO: 42555 - protein, 9 aa, Homo sapiens
  misc_feature: Table A; Target 42555; HLA-A*01:01; MAGEB1,MAGEB4; ENSG00000214107,ENSG00000120289; CTA,CTA
NSDPPRYQF

SEQ ID NO: 42556 - protein, 9 aa, Homo sapiens
  misc_feature: Table A; Target 42556; HLA-A*32:01; MAGEB1,MAGEB4; ENSG00000214107,ENSG00000120289; CTA,CTA
NSDPPRYQF

SEQ ID NO: 42557 - protein, 9 aa, Homo sapiens
  misc_feature: Table A; Target 42557; HLA-B*35:01; MAGEB1,MAGEB4; ENSG00000214107,ENSG00000120289; CTA,CTA
NSDPPRYQF

SEQ ID NO: 42558 - protein, 9 aa, Homo sapiens
  misc_feature: Table A; Target 42558; HLA-B*57:01; MAGEB1,MAGEB4; ENSG00000214107,ENSG00000120289; CTA,CTA
NSDPPRYQF

SEQ ID NO: 42559 - protein, 9 aa, Homo sapiens
  misc_feature: Table A; Target 42559; HLA-B*58:01; MAGEB1,MAGEB4; ENSG00000214107,ENSG00000120289; CTA,CTA
NSDPPRYQF

SEQ ID NO: 42560 - protein, 9 aa, Homo sapiens
  misc_feature: Table A; Target 42560; HLA-C*03:04; MAGEB1,MAGEB4; ENSG00000214107,ENSG00000120289; CTA,CTA
NSDPPRYQF

SEQ ID NO: 42561 - protein, 9 aa, Homo sapiens
  misc_feature: Table A; Target 42561; HLA-C*05:01; MAGEB1,MAGEB4; ENSG00000214107,ENSG00000120289; CTA,CTA
NSDPPRYQF

SEQ ID NO: 42562 - protein, 9 aa, Homo sapiens
  misc_feature: Table A; Target 42562; HLA-C*16:01; MAGEB1,MAGEB4; ENSG00000214107,ENSG00000120289; CTA,CTA
NSDPPRYQF

SEQ ID NO: 42563 - protein, 9 aa, Homo sapiens
  misc_feature: Table A; Target 42563; HLA-A*68:01; MAGEB1,MAGEB4; ENSG00000214107,ENSG00000120289; CTA,CTA
QVPNSDPPR

SEQ ID NO: 42564 - protein, 10 aa, Homo sapiens
  misc_feature: Table A; Target 42564; HLA-A*01:01; MAGEB1,MAGEB4; ENSG00000214107,ENSG00000120289; CTA,CTA
QVPNSDPPRY

SEQ ID NO: 42565 - protein, 10 aa, Homo sapiens
  misc_feature: Table A; Target 42565; HLA-A*25:01; MAGEB1,MAGEB4; ENSG00000214107,ENSG00000120289; CTA,CTA
QVPNSDPPRY

SEQ ID NO: 42566 - protein, 10 aa, Homo sapiens
  misc_feature: Table A; Target 42566; HLA-A*26:01; MAGEB1,MAGEB4; ENSG00000214107,ENSG00000120289; CTA,CTA
QVPNSDPPRY

SEQ ID NO: 42567 - protein, 10 aa, Homo sapiens
  misc_feature: Table A; Target 42567; HLA-A*29:02; MAGEB1,MAGEB4; ENSG00000214107,ENSG00000120289; CTA,CTA
QVPNSDPPRY

SEQ ID NO: 42568 - protein, 10 aa, Homo sapiens
  misc_feature: Table A; Target 42568; HLA-A*30:02; MAGEB1,MAGEB4; ENSG00000214107,ENSG00000120289; CTA,CTA
QVPNSDPPRY

SEQ ID NO: 42569 - protein, 8 aa, Homo sapiens
  misc_feature: Table A; Target 42569; HLA-B*37:01; MAGEB1,MAGEB4; ENSG00000214107,ENSG00000120289; CTA,CTA
SDPPRYQF

SEQ ID NO: 42570 - protein, 9 aa, Homo sapiens
  misc_feature: Table A; Target 42570; HLA-B*37:01; MAGEB1,MAGEB4; ENSG00000214107,ENSG00000120289; CTA,CTA
SDPPRYQFL

SEQ ID NO: 42571 - protein, 9 aa, Homo sapiens
  misc_feature: Table A; Target 42571; HLA-A*29:02; MAGEB1,MAGEB4; ENSG00000214107,ENSG00000120289; CTA,CTA
VPNSDPPRY

SEQ ID NO: 42572 - protein, 9 aa, Homo sapiens
  misc_feature: Table A; Target 42572; HLA-A*30:02; MAGEB1,MAGEB4; ENSG00000214107,ENSG00000120289; CTA,CTA
VPNSDPPRY

SEQ ID NO: 42573 - protein, 9 aa, Homo sapiens
  misc_feature: Table A; Target 42573; HLA-B*35:01; MAGEB1,MAGEB4; ENSG00000214107,ENSG00000120289; CTA,CTA
VPNSDPPRY

SEQ ID NO: 42574 - protein, 9 aa, Homo sapiens
  misc_feature: Table A; Target 42574; HLA-B*35:03; MAGEB1,MAGEB4; ENSG00000214107,ENSG00000120289; CTA,CTA
VPNSDPPRY

SEQ ID NO: 42575 - protein, 9 aa, Homo sapiens
  misc_feature: Table A; Target 42575; HLA-B*55:01; MAGEB1,MAGEB4; ENSG00000214107,ENSG00000120289; CTA,CTA
VPNSDPPRY

SEQ ID NO: 42576 - protein, 9 aa, Homo sapiens
  misc_feature: Table A; Target 42576; HLA-C*16:01; MAGEB1,MAGEB4; ENSG00000214107,ENSG00000120289; CTA,CTA
VPNSDPPRY

SEQ ID NO: 42577 - protein, 9 aa, Homo sapiens
  misc_feature: Table A; Target 42577; HLA-C*16:02; MAGEB1,MAGEB4; ENSG00000214107,ENSG00000120289; CTA,CTA
VPNSDPPRY

SEQ ID NO: 42578 - protein, 11 aa, Homo sapiens
  misc_feature: Table A; Target 42578; HLA-A*23:01; MAGEB1,MAGEB4; ENSG00000214107,ENSG00000120289; CTA,CTA
VPNSDPPRYQF

SEQ ID NO: 42579 - protein, 11 aa, Homo sapiens
  misc_feature: Table A; Target 42579; HLA-B*07:02; MAGEB1,MAGEB4; ENSG00000214107,ENSG00000120289; CTA,CTA
VPNSDPPRYQF

SEQ ID NO: 42580 - protein, 11 aa, Homo sapiens
  misc_feature: Table A; Target 42580; HLA-B*35:01; MAGEB1,MAGEB4; ENSG00000214107,ENSG00000120289; CTA,CTA
VPNSDPPRYQF

SEQ ID NO: 42581 - protein, 11 aa, Homo sapiens
  misc_feature: Table A; Target 42581; HLA-B*55:01; MAGEB1,MAGEB4; ENSG00000214107,ENSG00000120289; CTA,CTA
VPNSDPPRYQF

SEQ ID NO: 42582 - protein, 9 aa, Homo sapiens
  misc_feature: Table A; Target 42582; HLA-A*02:04; MAGEB1,MAGEB4; ENSG00000214107,ENSG00000120289; CTA,CTA
YQFLWGPRA

SEQ ID NO: 42583 - protein, 8 aa, Homo sapiens
  misc_feature: Table A; Target 42583; HLA-A*23:01; MAGEB1,MAGEB6; ENSG00000214107,ENSG00000176746; CTA,CTA
AYAETTKM

SEQ ID NO: 42584 - protein, 8 aa, Homo sapiens
  misc_feature: Table A; Target 42584; HLA-A*24:02; MAGEB1,MAGEB6; ENSG00000214107,ENSG00000176746; CTA,CTA
AYAETTKM

SEQ ID NO: 42585 - protein, 8 aa, Homo sapiens
  misc_feature: Table A; Target 42585; HLA-B*46:01; MAGEB1,MAGEB6; ENSG00000214107,ENSG00000176746; CTA,CTA
AYAETTKM

SEQ ID NO: 42586 - protein, 8 aa, Homo sapiens
  misc_feature: Table A; Target 42586; HLA-C*01:02; MAGEB1,MAGEB6; ENSG00000214107,ENSG00000176746; CTA,CTA
AYAETTKM

SEQ ID NO: 42587 - protein, 8 aa, Homo sapiens
  misc_feature: Table A; Target 42587; HLA-C*04:01; MAGEB1,MAGEB6; ENSG00000214107,ENSG00000176746; CTA,CTA
AYAETTKM

SEQ ID NO: 42588 - protein, 8 aa, Homo sapiens
  misc_feature: Table A; Target 42588; HLA-C*14:02; MAGEB1,MAGEB6; ENSG00000214107,ENSG00000176746; CTA,CTA
AYAETTKM

SEQ ID NO: 42589 - protein, 11 aa, Homo sapiens
  misc_feature: Table A; Target 42589; HLA-B*07:02; MAGEB1,MAGEB6; ENSG00000214107,ENSG00000176746; CTA,CTA
GPRAYAETTKM

SEQ ID NO: 42590 - protein, 11 aa, Homo sapiens
  misc_feature: Table A; Target 42590; HLA-C*07:02; MAGEB1,MAGEB6; ENSG00000214107,ENSG00000176746; CTA,CTA
GPRAYAETTKM

SEQ ID NO: 42591 - protein, 9 aa, Homo sapiens
  misc_feature: Table A; Target 42591; HLA-A*32:01; MAGEB1,MAGEB6; ENSG00000214107,ENSG00000176746; CTA,CTA
RAYAETTKM

SEQ ID NO: 42592 - protein, 9 aa, Homo sapiens
  misc_feature: Table A; Target 42592; HLA-B*15:01; MAGEB1,MAGEB6; ENSG00000214107,ENSG00000176746; CTA,CTA
RAYAETTKM

SEQ ID NO: 42593 - protein, 9 aa, Homo sapiens
  misc_feature: Table A; Target 42593; HLA-B*15:03; MAGEB1,MAGEB6; ENSG00000214107,ENSG00000176746; CTA,CTA
RAYAETTKM

SEQ ID NO: 42594 - protein, 9 aa, Homo sapiens
  misc_feature: Table A; Target 42594; HLA-B*46:01; MAGEB1,MAGEB6; ENSG00000214107,ENSG00000176746; CTA,CTA
RAYAETTKM

SEQ ID NO: 42595 - protein, 9 aa, Homo sapiens
  misc_feature: Table A; Target 42595; HLA-B*58:01; MAGEB1,MAGEB6; ENSG00000214107,ENSG00000176746; CTA,CTA
RAYAETTKM

SEQ ID NO: 42596 - protein, 9 aa, Homo sapiens
  misc_feature: Table A; Target 42596; HLA-C*02:02; MAGEB1,MAGEB6; ENSG00000214107,ENSG00000176746; CTA,CTA
RAYAETTKM

SEQ ID NO: 42597 - protein, 9 aa, Homo sapiens
  misc_feature: Table A; Target 42597; HLA-C*03:03; MAGEB1,MAGEB6; ENSG00000214107,ENSG00000176746; CTA,CTA
RAYAETTKM

SEQ ID NO: 42598 - protein, 9 aa, Homo sapiens
  misc_feature: Table A; Target 42598; HLA-C*03:04; MAGEB1,MAGEB6; ENSG00000214107,ENSG00000176746; CTA,CTA
RAYAETTKM

SEQ ID NO: 42599 - protein, 9 aa, Homo sapiens
  misc_feature: Table A; Target 42599; HLA-C*05:01; MAGEB1,MAGEB6; ENSG00000214107,ENSG00000176746; CTA,CTA
RAYAETTKM

SEQ ID NO: 42600 - protein, 9 aa, Homo sapiens
  misc_feature: Table A; Target 42600; HLA-C*12:03; MAGEB1,MAGEB6; ENSG00000214107,ENSG00000176746; CTA,CTA
RAYAETTKM

SEQ ID NO: 42601 - protein, 9 aa, Homo sapiens
  misc_feature: Table A; Target 42601; HLA-C*16:02; MAGEB1,MAGEB6; ENSG00000214107,ENSG00000176746; CTA,CTA
RAYAETTKM

SEQ ID NO: 42602 - protein, 9 aa, Homo sapiens
  misc_feature: Table A; Target 42602; HLA-C*16:04; MAGEB1,MAGEB6; ENSG00000214107,ENSG00000176746; CTA,CTA
RAYAETTKM

SEQ ID NO: 42603 - protein, 9 aa, Homo sapiens
  misc_feature: Table A; Target 42603; HLA-B*46:01; MAGEB2; ENSG00000099399; CTA
AAAAAGVSS

SEQ ID NO: 42604 - protein, 9 aa, Homo sapiens
  misc_feature: Table A; Target 42604; HLA-C*03:04; MAGEB2; ENSG00000099399; CTA
AAAAAGVSS

SEQ ID NO: 42605 - protein, 11 aa, Homo sapiens
  misc_feature: Table A; Target 42605; HLA-A*03:01; MAGEB2; ENSG00000099399; CTA
AAAAAGVSSTK

SEQ ID NO: 42606 - protein, 11 aa, Homo sapiens
  misc_feature: Table A; Target 42606; HLA-A*03:02; MAGEB2; ENSG00000099399; CTA
AAAAAGVSSTK

SEQ ID NO: 42607 - protein, 11 aa, Homo sapiens
  misc_feature: Table A; Target 42607; HLA-A*11:01; MAGEB2; ENSG00000099399; CTA
AAAAAGVSSTK

SEQ ID NO: 42608 - protein, 11 aa, Homo sapiens
  misc_feature: Table A; Target 42608; HLA-A*31:01; MAGEB2; ENSG00000099399; CTA
AAAAAGVSSTK

SEQ ID NO: 42609 - protein, 11 aa, Homo sapiens
  misc_feature: Table A; Target 42609; HLA-A*68:01; MAGEB2; ENSG00000099399; CTA
AAAAAGVSSTK

SEQ ID NO: 42610 - protein, 11 aa, Homo sapiens
  misc_feature: Table A; Target 42610; HLA-B*27:02; MAGEB2; ENSG00000099399; CTA
AAAAAGVSSTK

SEQ ID NO: 42611 - protein, 11 aa, Homo sapiens
  misc_feature: Table A; Target 42611; HLA-B*27:05; MAGEB2; ENSG00000099399; CTA
AAAAAGVSSTK

SEQ ID NO: 42612 - protein, 11 aa, Homo sapiens
  misc_feature: Table A; Target 42612; HLA-B*57:01; MAGEB2; ENSG00000099399; CTA
AAAAAGVSSTK

SEQ ID NO: 42613 - protein, 11 aa, Homo sapiens
  misc_feature: Table A; Target 42613; HLA-B*58:01; MAGEB2; ENSG00000099399; CTA
AAAAAGVSSTK

SEQ ID NO: 42614 - protein, 11 aa, Homo sapiens
  misc_feature: Table A; Target 42614; HLA-C*02:02; MAGEB2; ENSG00000099399; CTA
AAAAAGVSSTK

SEQ ID NO: 42615 - protein, 11 aa, Homo sapiens
  misc_feature: Table A; Target 42615; HLA-C*03:03; MAGEB2; ENSG00000099399; CTA
AAAAAGVSSTK

SEQ ID NO: 42616 - protein, 11 aa, Homo sapiens
  misc_feature: Table A; Target 42616; HLA-C*03:04; MAGEB2; ENSG00000099399; CTA
AAAAAGVSSTK

SEQ ID NO: 42617 - protein, 11 aa, Homo sapiens
  misc_feature: Table A; Target 42617; HLA-C*05:01; MAGEB2; ENSG00000099399; CTA
AAAAAGVSSTK

SEQ ID NO: 42618 - protein, 11 aa, Homo sapiens
  misc_feature: Table A; Target 42618; HLA-C*06:02; MAGEB2; ENSG00000099399; CTA
AAAAAGVSSTK

SEQ ID NO: 42619 - protein, 11 aa, Homo sapiens
  misc_feature: Table A; Target 42619; HLA-C*07:02; MAGEB2; ENSG00000099399; CTA
AAAAAGVSSTK

SEQ ID NO: 42620 - protein, 11 aa, Homo sapiens
  misc_feature: Table A; Target 42620; HLA-C*07:06; MAGEB2; ENSG00000099399; CTA
AAAAAGVSSTK

SEQ ID NO: 42621 - protein, 11 aa, Homo sapiens
  misc_feature: Table A; Target 42621; HLA-C*12:03; MAGEB2; ENSG00000099399; CTA
AAAAAGVSSTK

SEQ ID NO: 42622 - protein, 11 aa, Homo sapiens
  misc_feature: Table A; Target 42622; HLA-C*16:02; MAGEB2; ENSG00000099399; CTA
AAAAAGVSSTK

SEQ ID NO: 42623 - protein, 11 aa, Homo sapiens
  misc_feature: Table A; Target 42623; HLA-C*16:04; MAGEB2; ENSG00000099399; CTA
AAAAAGVSSTK

SEQ ID NO: 42624 - protein, 9 aa, Homo sapiens
  misc_feature: Table A; Target 42624; HLA-A*32:01; MAGEB2; ENSG00000099399; CTA
AAAAGVSST

SEQ ID NO: 42625 - protein, 9 aa, Homo sapiens
  misc_feature: Table A; Target 42625; HLA-C*03:04; MAGEB2; ENSG00000099399; CTA
AAAAGVSST

SEQ ID NO: 42626 - protein, 9 aa, Homo sapiens
  misc_feature: Table A; Target 42626; HLA-C*05:01; MAGEB2; ENSG00000099399; CTA
AAAAGVSST

SEQ ID NO: 42627 - protein, 9 aa, Homo sapiens
  misc_feature: Table A; Target 42627; HLA-C*16:02; MAGEB2; ENSG00000099399; CTA
AAAAGVSST

SEQ ID NO: 42628 - protein, 10 aa, Homo sapiens
  misc_feature: Table A; Target 42628; HLA-A*03:01; MAGEB2; ENSG00000099399; CTA
AAAAGVSSTK

SEQ ID NO: 42629 - protein, 10 aa, Homo sapiens
  misc_feature: Table A; Target 42629; HLA-A*03:02; MAGEB2; ENSG00000099399; CTA
AAAAGVSSTK

SEQ ID NO: 42630 - protein, 10 aa, Homo sapiens
  misc_feature: Table A; Target 42630; HLA-A*11:01; MAGEB2; ENSG00000099399; CTA
AAAAGVSSTK

SEQ ID NO: 42631 - protein, 10 aa, Homo sapiens
  misc_feature: Table A; Target 42631; HLA-A*68:01; MAGEB2; ENSG00000099399; CTA
AAAAGVSSTK

SEQ ID NO: 42632 - protein, 10 aa, Homo sapiens
  misc_feature: Table A; Target 42632; HLA-B*27:02; MAGEB2; ENSG00000099399; CTA
AAAAGVSSTK

SEQ ID NO: 42633 - protein, 10 aa, Homo sapiens
  misc_feature: Table A; Target 42633; HLA-B*27:05; MAGEB2; ENSG00000099399; CTA
AAAAGVSSTK

SEQ ID NO: 42634 - protein, 10 aa, Homo sapiens
  misc_feature: Table A; Target 42634; HLA-C*02:02; MAGEB2; ENSG00000099399; CTA
AAAAGVSSTK

SEQ ID NO: 42635 - protein, 10 aa, Homo sapiens
  misc_feature: Table A; Target 42635; HLA-C*06:02; MAGEB2; ENSG00000099399; CTA
AAAAGVSSTK

SEQ ID NO: 42636 - protein, 10 aa, Homo sapiens
  misc_feature: Table A; Target 42636; HLA-C*07:06; MAGEB2; ENSG00000099399; CTA
AAAAGVSSTK

SEQ ID NO: 42637 - protein, 9 aa, Homo sapiens
  misc_feature: Table A; Target 42637; HLA-A*03:01; MAGEB2; ENSG00000099399; CTA
AAAGVSSTK

SEQ ID NO: 42638 - protein, 9 aa, Homo sapiens
  misc_feature: Table A; Target 42638; HLA-A*03:02; MAGEB2; ENSG00000099399; CTA
AAAGVSSTK

SEQ ID NO: 42639 - protein, 9 aa, Homo sapiens
  misc_feature: Table A; Target 42639; HLA-A*25:01; MAGEB2; ENSG00000099399; CTA
AAAGVSSTK

SEQ ID NO: 42640 - protein, 9 aa, Homo sapiens
  misc_feature: Table A; Target 42640; HLA-A*31:01; MAGEB2; ENSG00000099399; CTA
AAAGVSSTK

SEQ ID NO: 42641 - protein, 9 aa, Homo sapiens
  misc_feature: Table A; Target 42641; HLA-A*32:01; MAGEB2; ENSG00000099399; CTA
AAAGVSSTK

SEQ ID NO: 42642 - protein, 9 aa, Homo sapiens
  misc_feature: Table A; Target 42642; HLA-A*33:03; MAGEB2; ENSG00000099399; CTA
AAAGVSSTK

SEQ ID NO: 42643 - protein, 9 aa, Homo sapiens
  misc_feature: Table A; Target 42643; HLA-A*68:01; MAGEB2; ENSG00000099399; CTA
AAAGVSSTK

SEQ ID NO: 42644 - protein, 9 aa, Homo sapiens
  misc_feature: Table A; Target 42644; HLA-B*13:02; MAGEB2; ENSG00000099399; CTA
AAAGVSSTK

SEQ ID NO: 42645 - protein, 9 aa, Homo sapiens
  misc_feature: Table A; Target 42645; HLA-B*15:01; MAGEB2; ENSG00000099399; CTA
AAAGVSSTK

SEQ ID NO: 42646 - protein, 9 aa, Homo sapiens
  misc_feature: Table A; Target 42646; HLA-B*27:02; MAGEB2; ENSG00000099399; CTA
AAAGVSSTK

SEQ ID NO: 42647 - protein, 9 aa, Homo sapiens
  misc_feature: Table A; Target 42647; HLA-B*27:05; MAGEB2; ENSG00000099399; CTA
AAAGVSSTK

SEQ ID NO: 42648 - protein, 9 aa, Homo sapiens
  misc_feature: Table A; Target 42648; HLA-B*39:01; MAGEB2; ENSG00000099399; CTA
AAAGVSSTK

SEQ ID NO: 42649 - protein, 9 aa, Homo sapiens
  misc_feature: Table A; Target 42649; HLA-B*46:01; MAGEB2; ENSG00000099399; CTA
AAAGVSSTK

SEQ ID NO: 42650 - protein, 9 aa, Homo sapiens
  misc_feature: Table A; Target 42650; HLA-B*51:01; MAGEB2; ENSG00000099399; CTA
AAAGVSSTK

SEQ ID NO: 42651 - protein, 9 aa, Homo sapiens
  misc_feature: Table A; Target 42651; HLA-B*56:01; MAGEB2; ENSG00000099399; CTA
AAAGVSSTK

SEQ ID NO: 42652 - protein, 9 aa, Homo sapiens
  misc_feature: Table A; Target 42652; HLA-B*57:01; MAGEB2; ENSG00000099399; CTA
AAAGVSSTK

SEQ ID NO: 42653 - protein, 9 aa, Homo sapiens
  misc_feature: Table A; Target 42653; HLA-B*58:01; MAGEB2; ENSG00000099399; CTA
AAAGVSSTK

SEQ ID NO: 42654 - protein, 9 aa, Homo sapiens
  misc_feature: Table A; Target 42654; HLA-C*02:02; MAGEB2; ENSG00000099399; CTA
AAAGVSSTK

SEQ ID NO: 42655 - protein, 9 aa, Homo sapiens
  misc_feature: Table A; Target 42655; HLA-C*03:03; MAGEB2; ENSG00000099399; CTA
AAAGVSSTK

SEQ ID NO: 42656 - protein, 9 aa, Homo sapiens
  misc_feature: Table A; Target 42656; HLA-C*03:04; MAGEB2; ENSG00000099399; CTA
AAAGVSSTK

SEQ ID NO: 42657 - protein, 9 aa, Homo sapiens
  misc_feature: Table A; Target 42657; HLA-C*04:01; MAGEB2; ENSG00000099399; CTA
AAAGVSSTK

SEQ ID NO: 42658 - protein, 9 aa, Homo sapiens
  misc_feature: Table A; Target 42658; HLA-C*05:01; MAGEB2; ENSG00000099399; CTA
AAAGVSSTK

SEQ ID NO: 42659 - protein, 9 aa, Homo sapiens
  misc_feature: Table A; Target 42659; HLA-C*06:02; MAGEB2; ENSG00000099399; CTA
AAAGVSSTK

SEQ ID NO: 42660 - protein, 9 aa, Homo sapiens
  misc_feature: Table A; Target 42660; HLA-C*07:04; MAGEB2; ENSG00000099399; CTA
AAAGVSSTK

SEQ ID NO: 42661 - protein, 9 aa, Homo sapiens
  misc_feature: Table A; Target 42661; HLA-C*07:06; MAGEB2; ENSG00000099399; CTA
AAAGVSSTK

SEQ ID NO: 42662 - protein, 9 aa, Homo sapiens
  misc_feature: Table A; Target 42662; HLA-C*12:03; MAGEB2; ENSG00000099399; CTA
AAAGVSSTK

SEQ ID NO: 42663 - protein, 9 aa, Homo sapiens
  misc_feature: Table A; Target 42663; HLA-C*16:01; MAGEB2; ENSG00000099399; CTA
AAAGVSSTK

SEQ ID NO: 42664 - protein, 9 aa, Homo sapiens
  misc_feature: Table A; Target 42664; HLA-C*16:02; MAGEB2; ENSG00000099399; CTA
AAAGVSSTK

SEQ ID NO: 42665 - protein, 9 aa, Homo sapiens
  misc_feature: Table A; Target 42665; HLA-C*16:04; MAGEB2; ENSG00000099399; CTA
AAAGVSSTK

SEQ ID NO: 42666 - protein, 10 aa, Homo sapiens
  misc_feature: Table A; Target 42666; HLA-C*06:02; MAGEB2; ENSG00000099399; CTA
AAAGVSSTKS

SEQ ID NO: 42667 - protein, 11 aa, Homo sapiens
  misc_feature: Table A; Target 42667; HLA-A*03:01; MAGEB2; ENSG00000099399; CTA
AAAGVSSTKSK

SEQ ID NO: 42668 - protein, 11 aa, Homo sapiens
  misc_feature: Table A; Target 42668; HLA-A*03:02; MAGEB2; ENSG00000099399; CTA
AAAGVSSTKSK

SEQ ID NO: 42669 - protein, 11 aa, Homo sapiens
  misc_feature: Table A; Target 42669; HLA-A*11:01; MAGEB2; ENSG00000099399; CTA
AAAGVSSTKSK

SEQ ID NO: 42670 - protein, 11 aa, Homo sapiens
  misc_feature: Table A; Target 42670; HLA-A*31:01; MAGEB2; ENSG00000099399; CTA
AAAGVSSTKSK

SEQ ID NO: 42671 - protein, 11 aa, Homo sapiens
  misc_feature: Table A; Target 42671; HLA-A*68:01; MAGEB2; ENSG00000099399; CTA
AAAGVSSTKSK

SEQ ID NO: 42672 - protein, 11 aa, Homo sapiens
  misc_feature: Table A; Target 42672; HLA-B*27:05; MAGEB2; ENSG00000099399; CTA
AAAGVSSTKSK

SEQ ID NO: 42673 - protein, 11 aa, Homo sapiens
  misc_feature: Table A; Target 42673; HLA-C*04:01; MAGEB2; ENSG00000099399; CTA
AAAGVSSTKSK

SEQ ID NO: 42674 - protein, 11 aa, Homo sapiens
  misc_feature: Table A; Target 42674; HLA-C*06:02; MAGEB2; ENSG00000099399; CTA
AAAGVSSTKSK

SEQ ID NO: 42675 - protein, 11 aa, Homo sapiens
  misc_feature: Table A; Target 42675; HLA-C*07:06; MAGEB2; ENSG00000099399; CTA
AAAGVSSTKSK

SEQ ID NO: 42676 - protein, 11 aa, Homo sapiens
  misc_feature: Table A; Target 42676; HLA-C*12:03; MAGEB2; ENSG00000099399; CTA
AAAGVSSTKSK

SEQ ID NO: 42677 - protein, 11 aa, Homo sapiens
  misc_feature: Table A; Target 42677; HLA-C*16:01; MAGEB2; ENSG00000099399; CTA
AAAGVSSTKSK

SEQ ID NO: 42678 - protein, 11 aa, Homo sapiens
  misc_feature: Table A; Target 42678; HLA-C*16:02; MAGEB2; ENSG00000099399; CTA
AAAGVSSTKSK

SEQ ID NO: 42679 - protein, 8 aa, Homo sapiens
  misc_feature: Table A; Target 42679; HLA-A*03:02; MAGEB2; ENSG00000099399; CTA
AAGVSSTK

SEQ ID NO: 42680 - protein, 8 aa, Homo sapiens
  misc_feature: Table A; Target 42680; HLA-A*11:01; MAGEB2; ENSG00000099399; CTA
AAGVSSTK

SEQ ID NO: 42681 - protein, 8 aa, Homo sapiens
  misc_feature: Table A; Target 42681; HLA-B*27:02; MAGEB2; ENSG00000099399; CTA
AAGVSSTK

SEQ ID NO: 42682 - protein, 8 aa, Homo sapiens
  misc_feature: Table A; Target 42682; HLA-C*04:01; MAGEB2; ENSG00000099399; CTA
AAGVSSTK

SEQ ID NO: 42683 - protein, 8 aa, Homo sapiens
  misc_feature: Table A; Target 42683; HLA-C*05:01; MAGEB2; ENSG00000099399; CTA
AAGVSSTK

SEQ ID NO: 42684 - protein, 8 aa, Homo sapiens
  misc_feature: Table A; Target 42684; HLA-C*06:02; MAGEB2; ENSG00000099399; CTA
AAGVSSTK

SEQ ID NO: 42685 - protein, 8 aa, Homo sapiens
  misc_feature: Table A; Target 42685; HLA-C*07:01; MAGEB2; ENSG00000099399; CTA
AAGVSSTK

SEQ ID NO: 42686 - protein, 8 aa, Homo sapiens
  misc_feature: Table A; Target 42686; HLA-C*07:06; MAGEB2; ENSG00000099399; CTA
AAGVSSTK

SEQ ID NO: 42687 - protein, 8 aa, Homo sapiens
  misc_feature: Table A; Target 42687; HLA-C*12:03; MAGEB2; ENSG00000099399; CTA
AAGVSSTK

SEQ ID NO: 42688 - protein, 10 aa, Homo sapiens
  misc_feature: Table A; Target 42688; HLA-C*04:01; MAGEB2; ENSG00000099399; CTA
AAGVSSTKSK

SEQ ID NO: 42689 - protein, 10 aa, Homo sapiens
  misc_feature: Table A; Target 42689; HLA-C*07:01; MAGEB2; ENSG00000099399; CTA
AAGVSSTKSK

SEQ ID NO: 42690 - protein, 10 aa, Homo sapiens
  misc_feature: Table A; Target 42690; HLA-C*07:02; MAGEB2; ENSG00000099399; CTA
AAGVSSTKSK

SEQ ID NO: 42691 - protein, 8 aa, Homo sapiens
  misc_feature: Table A; Target 42691; HLA-B*56:01; MAGEB2; ENSG00000099399; CTA
AASSSPAA

SEQ ID NO: 42692 - protein, 9 aa, Homo sapiens
  misc_feature: Table A; Target 42692; HLA-A*30:01; MAGEB2; ENSG00000099399; CTA
AEEEEAPCC

SEQ ID NO: 42693 - protein, 9 aa, Homo sapiens
  misc_feature: Table A; Target 42693; HLA-B*49:01; MAGEB2; ENSG00000099399; CTA
AEEEEAPCC

SEQ ID NO: 42694 - protein, 8 aa, Homo sapiens
  misc_feature: Table A; Target 42694; HLA-B*44:03; MAGEB2; ENSG00000099399; CTA
AETSKMKV

SEQ ID NO: 42695 - protein, 9 aa, Homo sapiens
  misc_feature: Table A; Target 42695; HLA-C*16:01; MAGEB2; ENSG00000099399; CTA
AETSKMKVL

SEQ ID NO: 42696 - protein, 9 aa, Homo sapiens
  misc_feature: Table A; Target 42696; HLA-C*16:02; MAGEB2; ENSG00000099399; CTA
AETSKMKVL

SEQ ID NO: 42697 - protein, 10 aa, Homo sapiens
  misc_feature: Table A; Target 42697; HLA-C*01:02; MAGEB2; ENSG00000099399; CTA
AFPTHYEEAL

SEQ ID NO: 42698 - protein, 9 aa, Homo sapiens
  misc_feature: Table A; Target 42698; HLA-A*31:01; MAGEB2; ENSG00000099399; CTA
AGIPQEPQR

SEQ ID NO: 42699 - protein, 9 aa, Homo sapiens
  misc_feature: Table A; Target 42699; HLA-A*11:01; MAGEB2; ENSG00000099399; CTA
AGVSSTKSK

SEQ ID NO: 42700 - protein, 9 aa, Homo sapiens
  misc_feature: Table A; Target 42700; HLA-C*01:02; MAGEB2; ENSG00000099399; CTA
AGVSSTKSK

SEQ ID NO: 42701 - protein, 9 aa, Homo sapiens
  misc_feature: Table A; Target 42701; HLA-C*04:01; MAGEB2; ENSG00000099399; CTA
AGVSSTKSK

SEQ ID NO: 42702 - protein, 9 aa, Homo sapiens
  misc_feature: Table A; Target 42702; HLA-C*06:02; MAGEB2; ENSG00000099399; CTA
AGVSSTKSK

SEQ ID NO: 42703 - protein, 9 aa, Homo sapiens
  misc_feature: Table A; Target 42703; HLA-C*16:02; MAGEB2; ENSG00000099399; CTA
AGVSSTKSK

SEQ ID NO: 42704 - protein, 9 aa, Homo sapiens
  misc_feature: Table A; Target 42704; HLA-B*15:03; MAGEB2; ENSG00000099399; CTA
AKVNGTTPC

SEQ ID NO: 42705 - protein, 11 aa, Homo sapiens
  misc_feature: Table A; Target 42705; HLA-B*15:03; MAGEB2; ENSG00000099399; CTA
AKVNGTTPCAF

SEQ ID NO: 42706 - protein, 10 aa, Homo sapiens
  misc_feature: Table A; Target 42706; HLA-A*02:01; MAGEB2; ENSG00000099399; CTA
ALKDEEKAGV

SEQ ID NO: 42707 - protein, 10 aa, Homo sapiens
  misc_feature: Table A; Target 42707; HLA-A*02:03; MAGEB2; ENSG00000099399; CTA
ALKDEEKAGV

SEQ ID NO: 42708 - protein, 10 aa, Homo sapiens
  misc_feature: Table A; Target 42708; HLA-B*55:01; MAGEB2; ENSG00000099399; CTA
ALKDEEKAGV

SEQ ID NO: 42709 - protein, 8 aa, Homo sapiens
  misc_feature: Table A; Target 42709; HLA-B*55:01; MAGEB2; ENSG00000099399; CTA
APTTAAAA

SEQ ID NO: 42710 - protein, 8 aa, Homo sapiens
  misc_feature: Table A; Target 42710; HLA-B*56:01; MAGEB2; ENSG00000099399; CTA
APTTAAAA

SEQ ID NO: 42711 - protein, 9 aa, Homo sapiens
  misc_feature: Table A; Target 42711; HLA-B*07:02; MAGEB2; ENSG00000099399; CTA
APTTAAAAA

SEQ ID NO: 42712 - protein, 9 aa, Homo sapiens
  misc_feature: Table A; Target 42712; HLA-B*35:03; MAGEB2; ENSG00000099399; CTA
APTTAAAAA

SEQ ID NO: 42713 - protein, 9 aa, Homo sapiens
  misc_feature: Table A; Target 42713; HLA-B*54:01; MAGEB2; ENSG00000099399; CTA
APTTAAAAA

SEQ ID NO: 42714 - protein, 9 aa, Homo sapiens
  misc_feature: Table A; Target 42714; HLA-B*55:01; MAGEB2; ENSG00000099399; CTA
APTTAAAAA

SEQ ID NO: 42715 - protein, 9 aa, Homo sapiens
  misc_feature: Table A; Target 42715; HLA-B*56:01; MAGEB2; ENSG00000099399; CTA
APTTAAAAA

SEQ ID NO: 42716 - protein, 9 aa, Homo sapiens
  misc_feature: Table A; Target 42716; HLA-C*07:02; MAGEB2; ENSG00000099399; CTA
APTTAAAAA

SEQ ID NO: 42717 - protein, 9 aa, Homo sapiens
  misc_feature: Table A; Target 42717; HLA-C*14:02; MAGEB2; ENSG00000099399; CTA
APTTAAAAA

SEQ ID NO: 42718 - protein, 10 aa, Homo sapiens
  misc_feature: Table A; Target 42718; HLA-B*54:01; MAGEB2; ENSG00000099399; CTA
APTTAAAAAA

SEQ ID NO: 42719 - protein, 10 aa, Homo sapiens
  misc_feature: Table A; Target 42719; HLA-B*56:01; MAGEB2; ENSG00000099399; CTA
APTTAAAAAA

SEQ ID NO: 42720 - protein, 11 aa, Homo sapiens
  misc_feature: Table A; Target 42720; HLA-B*56:01; MAGEB2; ENSG00000099399; CTA
APTTAAAAAAG

SEQ ID NO: 42721 - protein, 9 aa, Homo sapiens
  misc_feature: Table A; Target 42721; HLA-A*01:01; MAGEB2; ENSG00000099399; CTA
ASEGLSVVF

SEQ ID NO: 42722 - protein, 9 aa, Homo sapiens
  misc_feature: Table A; Target 42722; HLA-B*15:01; MAGEB2; ENSG00000099399; CTA
ASEGLSVVF

SEQ ID NO: 42723 - protein, 9 aa, Homo sapiens
  misc_feature: Table A; Target 42723; HLA-B*15:03; MAGEB2; ENSG00000099399; CTA
ASEGLSVVF

SEQ ID NO: 42724 - protein, 9 aa, Homo sapiens
  misc_feature: Table A; Target 42724; HLA-B*38:01; MAGEB2; ENSG00000099399; CTA
ASEGLSVVF

SEQ ID NO: 42725 - protein, 9 aa, Homo sapiens
  misc_feature: Table A; Target 42725; HLA-B*57:01; MAGEB2; ENSG00000099399; CTA
ASEGLSVVF

SEQ ID NO: 42726 - protein, 9 aa, Homo sapiens
  misc_feature: Table A; Target 42726; HLA-B*58:01; MAGEB2; ENSG00000099399; CTA
ASEGLSVVF

SEQ ID NO: 42727 - protein, 9 aa, Homo sapiens
  misc_feature: Table A; Target 42727; HLA-C*02:02; MAGEB2; ENSG00000099399; CTA
ASEGLSVVF

SEQ ID NO: 42728 - protein, 9 aa, Homo sapiens
  misc_feature: Table A; Target 42728; HLA-C*04:01; MAGEB2; ENSG00000099399; CTA
ASEGLSVVF

SEQ ID NO: 42729 - protein, 9 aa, Homo sapiens
  misc_feature: Table A; Target 42729; HLA-C*05:01; MAGEB2; ENSG00000099399; CTA
ASEGLSVVF

SEQ ID NO: 42730 - protein, 9 aa, Homo sapiens
  misc_feature: Table A; Target 42730; HLA-C*07:04; MAGEB2; ENSG00000099399; CTA
ASEGLSVVF

SEQ ID NO: 42731 - protein, 9 aa, Homo sapiens
  misc_feature: Table A; Target 42731; HLA-C*12:03; MAGEB2; ENSG00000099399; CTA
ASEGLSVVF

SEQ ID NO: 42732 - protein, 9 aa, Homo sapiens
  misc_feature: Table A; Target 42732; HLA-C*16:04; MAGEB2; ENSG00000099399; CTA
ASEGLSVVF

SEQ ID NO: 42733 - protein, 9 aa, Homo sapiens
  misc_feature: Table A; Target 42733; HLA-B*13:02; MAGEB2; ENSG00000099399; CTA
ASSSPAAGI

SEQ ID NO: 42734 - protein, 11 aa, Homo sapiens
  misc_feature: Table A; Target 42734; HLA-A*03:01; MAGEB2; ENSG00000099399; CTA
ASSSQASTSTK

SEQ ID NO: 42735 - protein, 11 aa, Homo sapiens
  misc_feature: Table A; Target 42735; HLA-A*03:02; MAGEB2; ENSG00000099399; CTA
ASSSQASTSTK

SEQ ID NO: 42736 - protein, 11 aa, Homo sapiens
  misc_feature: Table A; Target 42736; HLA-A*11:01; MAGEB2; ENSG00000099399; CTA
ASSSQASTSTK

SEQ ID NO: 42737 - protein, 11 aa, Homo sapiens
  misc_feature: Table A; Target 42737; HLA-C*04:01; MAGEB2; ENSG00000099399; CTA
ASSSQASTSTK

SEQ ID NO: 42738 - protein, 9 aa, Homo sapiens
  misc_feature: Table A; Target 42738; HLA-C*05:01; MAGEB2; ENSG00000099399; CTA
ATEEEIWEF

SEQ ID NO: 42739 - protein, 8 aa, Homo sapiens
  misc_feature: Table A; Target 42739; HLA-A*23:01; MAGEB2; ENSG00000099399; CTA
AYAETSKM

SEQ ID NO: 42740 - protein, 8 aa, Homo sapiens
  misc_feature: Table A; Target 42740; HLA-A*24:02; MAGEB2; ENSG00000099399; CTA
AYAETSKM

SEQ ID NO: 42741 - protein, 8 aa, Homo sapiens
  misc_feature: Table A; Target 42741; HLA-B*46:01; MAGEB2; ENSG00000099399; CTA
AYAETSKM

SEQ ID NO: 42742 - protein, 8 aa, Homo sapiens
  misc_feature: Table A; Target 42742; HLA-C*01:02; MAGEB2; ENSG00000099399; CTA
AYAETSKM

SEQ ID NO: 42743 - protein, 8 aa, Homo sapiens
  misc_feature: Table A; Target 42743; HLA-C*04:01; MAGEB2; ENSG00000099399; CTA
AYAETSKM

SEQ ID NO: 42744 - protein, 8 aa, Homo sapiens
  misc_feature: Table A; Target 42744; HLA-C*14:02; MAGEB2; ENSG00000099399; CTA
AYAETSKM

SEQ ID NO: 42745 - protein, 8 aa, Homo sapiens
  misc_feature: Table A; Target 42745; HLA-C*16:01; MAGEB2; ENSG00000099399; CTA
AYAETSKM

SEQ ID NO: 42746 - protein, 8 aa, Homo sapiens
  misc_feature: Table A; Target 42746; HLA-C*16:02; MAGEB2; ENSG00000099399; CTA
AYAETSKM

SEQ ID NO: 42747 - protein, 9 aa, Homo sapiens
  misc_feature: Table A; Target 42747; HLA-A*33:03; MAGEB2; ENSG00000099399; CTA
AYAETSKMK

SEQ ID NO: 42748 - protein, 9 aa, Homo sapiens
  misc_feature: Table A; Target 42748; HLA-C*16:02; MAGEB2; ENSG00000099399; CTA
AYAETSKMK

SEQ ID NO: 42749 - protein, 10 aa, Homo sapiens
  misc_feature: Table A; Target 42749; HLA-C*16:02; MAGEB2; ENSG00000099399; CTA
AYAETSKMKV

SEQ ID NO: 42750 - protein, 11 aa, Homo sapiens
  misc_feature: Table A; Target 42750; HLA-A*24:02; MAGEB2; ENSG00000099399; CTA
AYAETSKMKVL

SEQ ID NO: 42751 - protein, 9 aa, Homo sapiens
  misc_feature: Table A; Target 42751; HLA-A*25:01; MAGEB2; ENSG00000099399; CTA
DEESLLSSW

SEQ ID NO: 42752 - protein, 9 aa, Homo sapiens
  misc_feature: Table A; Target 42752; HLA-B*18:01; MAGEB2; ENSG00000099399; CTA
DEESLLSSW

SEQ ID NO: 42753 - protein, 9 aa, Homo sapiens
  misc_feature: Table A; Target 42753; HLA-B*44:02; MAGEB2; ENSG00000099399; CTA
DEESLLSSW

SEQ ID NO: 42754 - protein, 9 aa, Homo sapiens
  misc_feature: Table A; Target 42754; HLA-B*44:03; MAGEB2; ENSG00000099399; CTA
DEESLLSSW

SEQ ID NO: 42755 - protein, 9 aa, Homo sapiens
  misc_feature: Table A; Target 42755; HLA-C*16:04; MAGEB2; ENSG00000099399; CTA
DEESLLSSW

SEQ ID NO: 42756 - protein, 8 aa, Homo sapiens
  misc_feature: Table A; Target 42756; HLA-B*18:01; MAGEB2; ENSG00000099399; CTA
DETRGLNV

SEQ ID NO: 42757 - protein, 8 aa, Homo sapiens
  misc_feature: Table A; Target 42757; HLA-B*49:01; MAGEB2; ENSG00000099399; CTA
DETRGLNV

SEQ ID NO: 42758 - protein, 8 aa, Homo sapiens
  misc_feature: Table A; Target 42758; HLA-B*51:01; MAGEB2; ENSG00000099399; CTA
DETRGLNV

SEQ ID NO: 42759 - protein, 11 aa, Homo sapiens
  misc_feature: Table A; Target 42759; HLA-B*38:01; MAGEB2; ENSG00000099399; CTA
DKVDLTDEESL

SEQ ID NO: 42760 - protein, 10 aa, Homo sapiens
  misc_feature: Table A; Target 42760; HLA-B*18:01; MAGEB2; ENSG00000099399; CTA
DLVQEKYLEY

SEQ ID NO: 42761 - protein, 10 aa, Homo sapiens
  misc_feature: Table A; Target 42761; HLA-B*08:01; MAGEB2; ENSG00000099399; CTA
DPLTRKSGSL

SEQ ID NO: 42762 - protein, 8 aa, Homo sapiens
  misc_feature: Table A; Target 42762; HLA-B*51:01; MAGEB2; ENSG00000099399; CTA
DPPRFQFL

SEQ ID NO: 42763 - protein, 9 aa, Homo sapiens
  misc_feature: Table A; Target 42763; HLA-B*51:01; MAGEB2; ENSG00000099399; CTA
EAPCCSSSV

SEQ ID NO: 42764 - protein, 10 aa, Homo sapiens
  misc_feature: Table A; Target 42764; HLA-B*18:01; MAGEB2; ENSG00000099399; CTA
EEHSVFGEPW

SEQ ID NO: 42765 - protein, 10 aa, Homo sapiens
  misc_feature: Table A; Target 42765; HLA-B*44:02; MAGEB2; ENSG00000099399; CTA
EEHSVFGEPW

SEQ ID NO: 42766 - protein, 10 aa, Homo sapiens
  misc_feature: Table A; Target 42766; HLA-B*44:03; MAGEB2; ENSG00000099399; CTA
EEHSVFGEPW

SEQ ID NO: 42767 - protein, 10 aa, Homo sapiens
  misc_feature: Table A; Target 42767; HLA-C*16:04; MAGEB2; ENSG00000099399; CTA
EEHSVFGEPW

SEQ ID NO: 42768 - protein, 8 aa, Homo sapiens
  misc_feature: Table A; Target 42768; HLA-B*18:01; MAGEB2; ENSG00000099399; CTA
EESLLSSW

SEQ ID NO: 42769 - protein, 8 aa, Homo sapiens
  misc_feature: Table A; Target 42769; HLA-B*44:02; MAGEB2; ENSG00000099399; CTA
EESLLSSW

SEQ ID NO: 42770 - protein, 8 aa, Homo sapiens
  misc_feature: Table A; Target 42770; HLA-B*44:03; MAGEB2; ENSG00000099399; CTA
EESLLSSW

SEQ ID NO: 42771 - protein, 10 aa, Homo sapiens
  misc_feature: Table A; Target 42771; HLA-B*44:02; MAGEB2; ENSG00000099399; CTA
EESLLSSWDF

SEQ ID NO: 42772 - protein, 9 aa, Homo sapiens
  misc_feature: Table A; Target 42772; HLA-A*29:02; MAGEB2; ENSG00000099399; CTA
EFLNMLGVY

SEQ ID NO: 42773 - protein, 9 aa, Homo sapiens
  misc_feature: Table A; Target 42773; HLA-A*33:03; MAGEB2; ENSG00000099399; CTA
EGLSVVFGL

SEQ ID NO: 42774 - protein, 9 aa, Homo sapiens
  misc_feature: Table A; Target 42774; HLA-A*33:03; MAGEB2; ENSG00000099399; CTA
EHFPEILKK

SEQ ID NO: 42775 - protein, 9 aa, Homo sapiens
  misc_feature: Table A; Target 42775; HLA-A*68:02; MAGEB2; ENSG00000099399; CTA
EHFPEILKK

SEQ ID NO: 42776 - protein, 9 aa, Homo sapiens
  misc_feature: Table A; Target 42776; HLA-B*38:01; MAGEB2; ENSG00000099399; CTA
EHFPEILKK

SEQ ID NO: 42777 - protein, 10 aa, Homo sapiens
  misc_feature: Table A; Target 42777; HLA-A*68:02; MAGEB2; ENSG00000099399; CTA
EHFPEILKKA

SEQ ID NO: 42778 - protein, 9 aa, Homo sapiens
  misc_feature: Table A; Target 42778; HLA-B*38:01; MAGEB2; ENSG00000099399; CTA
EHSVFGEPW

SEQ ID NO: 42779 - protein, 9 aa, Homo sapiens
  misc_feature: Table A; Target 42779; HLA-A*02:04; MAGEB2; ENSG00000099399; CTA
EIWEFLNML

SEQ ID NO: 42780 - protein, 8 aa, Homo sapiens
  misc_feature: Table A; Target 42780; HLA-A*33:01; MAGEB2; ENSG00000099399; CTA
EMLKIVGK

SEQ ID NO: 42781 - protein, 8 aa, Homo sapiens
  misc_feature: Table A; Target 42781; HLA-A*33:03; MAGEB2; ENSG00000099399; CTA
EMLKIVGK

SEQ ID NO: 42782 - protein, 9 aa, Homo sapiens
  misc_feature: Table A; Target 42782; HLA-A*33:01; MAGEB2; ENSG00000099399; CTA
EMLKIVGKR

SEQ ID NO: 42783 - protein, 9 aa, Homo sapiens
  misc_feature: Table A; Target 42783; HLA-A*33:03; MAGEB2; ENSG00000099399; CTA
EMLKIVGKR

SEQ ID NO: 42784 - protein, 9 aa, Homo sapiens
  misc_feature: Table A; Target 42784; HLA-B*54:01; MAGEB2; ENSG00000099399; CTA
EPQRAPTTA

SEQ ID NO: 42785 - protein, 9 aa, Homo sapiens
  misc_feature: Table A; Target 42785; HLA-B*56:01; MAGEB2; ENSG00000099399; CTA
EPQRAPTTA

SEQ ID NO: 42786 - protein, 10 aa, Homo sapiens
  misc_feature: Table A; Target 42786; HLA-B*07:02; MAGEB2; ENSG00000099399; CTA
EPQRAPTTAA

SEQ ID NO: 42787 - protein, 10 aa, Homo sapiens
  misc_feature: Table A; Target 42787; HLA-B*54:01; MAGEB2; ENSG00000099399; CTA
EPQRAPTTAA

SEQ ID NO: 42788 - protein, 10 aa, Homo sapiens
  misc_feature: Table A; Target 42788; HLA-B*55:01; MAGEB2; ENSG00000099399; CTA
EPQRAPTTAA

SEQ ID NO: 42789 - protein, 10 aa, Homo sapiens
  misc_feature: Table A; Target 42789; HLA-B*56:01; MAGEB2; ENSG00000099399; CTA
EPQRAPTTAA

SEQ ID NO: 42790 - protein, 11 aa, Homo sapiens
  misc_feature: Table A; Target 42790; HLA-B*56:01; MAGEB2; ENSG00000099399; CTA
EPQRAPTTAAA

SEQ ID NO: 42791 - protein, 11 aa, Homo sapiens
  misc_feature: Table A; Target 42791; HLA-A*33:01; MAGEB2; ENSG00000099399; CTA
ESLLSSWDFPR

SEQ ID NO: 42792 - protein, 10 aa, Homo sapiens
  misc_feature: Table A; Target 42792; HLA-A*26:01; MAGEB2; ENSG00000099399; CTA
ETRGLNVPQV

SEQ ID NO: 42793 - protein, 8 aa, Homo sapiens
  misc_feature: Table A; Target 42793; HLA-B*51:01; MAGEB2; ENSG00000099399; CTA
FGLELNKV

SEQ ID NO: 42794 - protein, 8 aa, Homo sapiens
  misc_feature: Table A; Target 42794; HLA-B*54:01; MAGEB2; ENSG00000099399; CTA
FPEILKKA

SEQ ID NO: 42795 - protein, 8 aa, Homo sapiens
  misc_feature: Table A; Target 42795; HLA-B*54:01; MAGEB2; ENSG00000099399; CTA
FPTHYEEA

SEQ ID NO: 42796 - protein, 8 aa, Homo sapiens
  misc_feature: Table A; Target 42796; HLA-B*56:01; MAGEB2; ENSG00000099399; CTA
FPTHYEEA

SEQ ID NO: 42797 - protein, 9 aa, Homo sapiens
  misc_feature: Table A; Target 42797; HLA-B*07:02; MAGEB2; ENSG00000099399; CTA
FPTHYEEAL

SEQ ID NO: 42798 - protein, 9 aa, Homo sapiens
  misc_feature: Table A; Target 42798; HLA-B*38:01; MAGEB2; ENSG00000099399; CTA
FPTHYEEAL

SEQ ID NO: 42799 - protein, 9 aa, Homo sapiens
  misc_feature: Table A; Target 42799; HLA-B*39:01; MAGEB2; ENSG00000099399; CTA
FPTHYEEAL

SEQ ID NO: 42800 - protein, 9 aa, Homo sapiens
  misc_feature: Table A; Target 42800; HLA-B*51:01; MAGEB2; ENSG00000099399; CTA
FPTHYEEAL

SEQ ID NO: 42801 - protein, 9 aa, Homo sapiens
  misc_feature: Table A; Target 42801; HLA-B*54:01; MAGEB2; ENSG00000099399; CTA
FPTHYEEAL

SEQ ID NO: 42802 - protein, 9 aa, Homo sapiens
  misc_feature: Table A; Target 42802; HLA-B*55:01; MAGEB2; ENSG00000099399; CTA
FPTHYEEAL

SEQ ID NO: 42803 - protein, 9 aa, Homo sapiens
  misc_feature: Table A; Target 42803; HLA-B*56:01; MAGEB2; ENSG00000099399; CTA
FPTHYEEAL

SEQ ID NO: 42804 - protein, 9 aa, Homo sapiens
  misc_feature: Table A; Target 42804; HLA-C*03:03; MAGEB2; ENSG00000099399; CTA
FPTHYEEAL

SEQ ID NO: 42805 - protein, 9 aa, Homo sapiens
  misc_feature: Table A; Target 42805; HLA-C*03:04; MAGEB2; ENSG00000099399; CTA
FPTHYEEAL

SEQ ID NO: 42806 - protein, 9 aa, Homo sapiens
  misc_feature: Table A; Target 42806; HLA-C*07:02; MAGEB2; ENSG00000099399; CTA
FPTHYEEAL

SEQ ID NO: 42807 - protein, 9 aa, Homo sapiens
  misc_feature: Table A; Target 42807; HLA-C*16:01; MAGEB2; ENSG00000099399; CTA
FPTHYEEAL

SEQ ID NO: 42808 - protein, 9 aa, Homo sapiens
  misc_feature: Table A; Target 42808; HLA-A*02:04; MAGEB2; ENSG00000099399; CTA
FQFLWGPRA

SEQ ID NO: 42809 - protein, 9 aa, Homo sapiens
  misc_feature: Table A; Target 42809; HLA-B*27:05; MAGEB2; ENSG00000099399; CTA
GAASSSPAA

SEQ ID NO: 42810 - protein, 9 aa, Homo sapiens
  misc_feature: Table A; Target 42810; HLA-B*39:01; MAGEB2; ENSG00000099399; CTA
GAASSSPAA

SEQ ID NO: 42811 - protein, 9 aa, Homo sapiens
  misc_feature: Table A; Target 42811; HLA-B*46:01; MAGEB2; ENSG00000099399; CTA
GAASSSPAA

SEQ ID NO: 42812 - protein, 9 aa, Homo sapiens
  misc_feature: Table A; Target 42812; HLA-B*54:01; MAGEB2; ENSG00000099399; CTA
GAASSSPAA

SEQ ID NO: 42813 - protein, 9 aa, Homo sapiens
  misc_feature: Table A; Target 42813; HLA-B*55:01; MAGEB2; ENSG00000099399; CTA
GAASSSPAA

SEQ ID NO: 42814 - protein, 9 aa, Homo sapiens
  misc_feature: Table A; Target 42814; HLA-B*56:01; MAGEB2; ENSG00000099399; CTA
GAASSSPAA

SEQ ID NO: 42815 - protein, 9 aa, Homo sapiens
  misc_feature: Table A; Target 42815; HLA-C*03:03; MAGEB2; ENSG00000099399; CTA
GAASSSPAA

SEQ ID NO: 42816 - protein, 9 aa, Homo sapiens
  misc_feature: Table A; Target 42816; HLA-C*03:04; MAGEB2; ENSG00000099399; CTA
GAASSSPAA

SEQ ID NO: 42817 - protein, 11 aa, Homo sapiens
  misc_feature: Table A; Target 42817; HLA-B*44:02; MAGEB2; ENSG00000099399; CTA
GEEHSVFGEPW

SEQ ID NO: 42818 - protein, 11 aa, Homo sapiens
  misc_feature: Table A; Target 42818; HLA-B*44:03; MAGEB2; ENSG00000099399; CTA
GEEHSVFGEPW

SEQ ID NO: 42819 - protein, 10 aa, Homo sapiens
  misc_feature: Table A; Target 42819; HLA-A*30:01; MAGEB2; ENSG00000099399; CTA
GEKNASSSQA

SEQ ID NO: 42820 - protein, 10 aa, Homo sapiens
  misc_feature: Table A; Target 42820; HLA-B*40:02; MAGEB2; ENSG00000099399; CTA
GEKNASSSQA

SEQ ID NO: 42821 - protein, 10 aa, Homo sapiens
  misc_feature: Table A; Target 42821; HLA-B*49:01; MAGEB2; ENSG00000099399; CTA
GEKNASSSQA

SEQ ID NO: 42822 - protein, 9 aa, Homo sapiens
  misc_feature: Table A; Target 42822; HLA-B*37:01; MAGEB2; ENSG00000099399; CTA
GEMLKIVGK

SEQ ID NO: 42823 - protein, 9 aa, Homo sapiens
  misc_feature: Table A; Target 42823; HLA-B*44:02; MAGEB2; ENSG00000099399; CTA
GEMLKIVGK

SEQ ID NO: 42824 - protein, 11 aa, Homo sapiens
  misc_feature: Table A; Target 42824; HLA-B*44:02; MAGEB2; ENSG00000099399; CTA
GEMLKIVGKRF

SEQ ID NO: 42825 - protein, 11 aa, Homo sapiens
  misc_feature: Table A; Target 42825; HLA-B*44:03; MAGEB2; ENSG00000099399; CTA
GEMLKIVGKRF

SEQ ID NO: 42826 - protein, 10 aa, Homo sapiens
  misc_feature: Table A; Target 42826; HLA-A*02:03; MAGEB2; ENSG00000099399; CTA
GLNVPQVTEA

SEQ ID NO: 42827 - protein, 8 aa, Homo sapiens
  misc_feature: Table A; Target 42827; HLA-A*02:04; MAGEB2; ENSG00000099399; CTA
GLSVVFGL

SEQ ID NO: 42828 - protein, 8 aa, Homo sapiens
  misc_feature: Table A; Target 42828; HLA-B*37:01; MAGEB2; ENSG00000099399; CTA
GLSVVFGL

SEQ ID NO: 42829 - protein, 10 aa, Homo sapiens
  misc_feature: Table A; Target 42829; HLA-A*02:01; MAGEB2; ENSG00000099399; CTA
GLSVVFGLEL

SEQ ID NO: 42830 - protein, 10 aa, Homo sapiens
  misc_feature: Table A; Target 42830; HLA-A*02:03; MAGEB2; ENSG00000099399; CTA
GLSVVFGLEL

SEQ ID NO: 42831 - protein, 10 aa, Homo sapiens
  misc_feature: Table A; Target 42831; HLA-A*02:04; MAGEB2; ENSG00000099399; CTA
GLSVVFGLEL

SEQ ID NO: 42832 - protein, 10 aa, Homo sapiens
  misc_feature: Table A; Target 42832; HLA-B*07:02; MAGEB2; ENSG00000099399; CTA
GPRAYAETSK

SEQ ID NO: 42833 - protein, 11 aa, Homo sapiens
  misc_feature: Table A; Target 42833; HLA-B*07:02; MAGEB2; ENSG00000099399; CTA
GPRAYAETSKM

SEQ ID NO: 42834 - protein, 11 aa, Homo sapiens
  misc_feature: Table A; Target 42834; HLA-C*07:02; MAGEB2; ENSG00000099399; CTA
GPRAYAETSKM

SEQ ID NO: 42835 - protein, 9 aa, Homo sapiens
  misc_feature: Table A; Target 42835; HLA-A*01:01; MAGEB2; ENSG00000099399; CTA
GSLVQFLLY

SEQ ID NO: 42836 - protein, 9 aa, Homo sapiens
  misc_feature: Table A; Target 42836; HLA-A*03:01; MAGEB2; ENSG00000099399; CTA
GSLVQFLLY

SEQ ID NO: 42837 - protein, 9 aa, Homo sapiens
  misc_feature: Table A; Target 42837; HLA-A*11:01; MAGEB2; ENSG00000099399; CTA
GSLVQFLLY

SEQ ID NO: 42838 - protein, 9 aa, Homo sapiens
  misc_feature: Table A; Target 42838; HLA-A*29:02; MAGEB2; ENSG00000099399; CTA
GSLVQFLLY

SEQ ID NO: 42839 - protein, 9 aa, Homo sapiens
  misc_feature: Table A; Target 42839; HLA-A*30:02; MAGEB2; ENSG00000099399; CTA
GSLVQFLLY

SEQ ID NO: 42840 - protein, 9 aa, Homo sapiens
  misc_feature: Table A; Target 42840; HLA-B*57:01; MAGEB2; ENSG00000099399; CTA
GSLVQFLLY

SEQ ID NO: 42841 - protein, 9 aa, Homo sapiens
  misc_feature: Table A; Target 42841; HLA-B*58:01; MAGEB2; ENSG00000099399; CTA
GSLVQFLLY

SEQ ID NO: 42842 - protein, 10 aa, Homo sapiens
  misc_feature: Table A; Target 42842; HLA-A*03:01; MAGEB2; ENSG00000099399; CTA
GSLVQFLLYK

SEQ ID NO: 42843 - protein, 10 aa, Homo sapiens
  misc_feature: Table A; Target 42843; HLA-A*11:01; MAGEB2; ENSG00000099399; CTA
GSLVQFLLYK

SEQ ID NO: 42844 - protein, 11 aa, Homo sapiens
  misc_feature: Table A; Target 42844; HLA-A*29:02; MAGEB2; ENSG00000099399; CTA
GSLVQFLLYKY

SEQ ID NO: 42845 - protein, 10 aa, Homo sapiens
  misc_feature: Table A; Target 42845; HLA-B*56:01; MAGEB2; ENSG00000099399; CTA
GVIFLNGNSA

SEQ ID NO: 42846 - protein, 8 aa, Homo sapiens
  misc_feature: Table A; Target 42846; HLA-A*03:02; MAGEB2; ENSG00000099399; CTA
GVSSTKSK

SEQ ID NO: 42847 - protein, 9 aa, Homo sapiens
  misc_feature: Table A; Target 42847; HLA-A*03:01; MAGEB2; ENSG00000099399; CTA
GVSSTKSKK

SEQ ID NO: 42848 - protein, 9 aa, Homo sapiens
  misc_feature: Table A; Target 42848; HLA-A*03:02; MAGEB2; ENSG00000099399; CTA
GVSSTKSKK

SEQ ID NO: 42849 - protein, 9 aa, Homo sapiens
  misc_feature: Table A; Target 42849; HLA-A*11:01; MAGEB2; ENSG00000099399; CTA
GVSSTKSKK

SEQ ID NO: 42850 - protein, 10 aa, Homo sapiens
  misc_feature: Table A; Target 42850; HLA-A*02:03; MAGEB2; ENSG00000099399; CTA
GVYDGEEHSV

SEQ ID NO: 42851 - protein, 10 aa, Homo sapiens
  misc_feature: Table A; Target 42851; HLA-A*02:04; MAGEB2; ENSG00000099399; CTA
GVYDGEEHSV

SEQ ID NO: 42852 - protein, 10 aa, Homo sapiens
  misc_feature: Table A; Target 42852; HLA-A*02:07; MAGEB2; ENSG00000099399; CTA
GVYDGEEHSV

SEQ ID NO: 42853 - protein, 10 aa, Homo sapiens
  misc_feature: Table A; Target 42853; HLA-A*03:01; MAGEB2; ENSG00000099399; CTA
GVYDGEEHSV

SEQ ID NO: 42854 - protein, 10 aa, Homo sapiens
  misc_feature: Table A; Target 42854; HLA-A*03:02; MAGEB2; ENSG00000099399; CTA
GVYDGEEHSV

SEQ ID NO: 42855 - protein, 10 aa, Homo sapiens
  misc_feature: Table A; Target 42855; HLA-A*11:01; MAGEB2; ENSG00000099399; CTA
GVYDGEEHSV

SEQ ID NO: 42856 - protein, 10 aa, Homo sapiens
  misc_feature: Table A; Target 42856; HLA-A*23:01; MAGEB2; ENSG00000099399; CTA
GVYDGEEHSV

SEQ ID NO: 42857 - protein, 10 aa, Homo sapiens
  misc_feature: Table A; Target 42857; HLA-A*25:01; MAGEB2; ENSG00000099399; CTA
GVYDGEEHSV

SEQ ID NO: 42858 - protein, 10 aa, Homo sapiens
  misc_feature: Table A; Target 42858; HLA-A*26:01; MAGEB2; ENSG00000099399; CTA
GVYDGEEHSV

SEQ ID NO: 42859 - protein, 10 aa, Homo sapiens
  misc_feature: Table A; Target 42859; HLA-A*29:02; MAGEB2; ENSG00000099399; CTA
GVYDGEEHSV

SEQ ID NO: 42860 - protein, 10 aa, Homo sapiens
  misc_feature: Table A; Target 42860; HLA-A*30:01; MAGEB2; ENSG00000099399; CTA
GVYDGEEHSV

SEQ ID NO: 42861 - protein, 10 aa, Homo sapiens
  misc_feature: Table A; Target 42861; HLA-A*32:01; MAGEB2; ENSG00000099399; CTA
GVYDGEEHSV

SEQ ID NO: 42862 - protein, 10 aa, Homo sapiens
  misc_feature: Table A; Target 42862; HLA-A*68:02; MAGEB2; ENSG00000099399; CTA
GVYDGEEHSV

SEQ ID NO: 42863 - protein, 10 aa, Homo sapiens
  misc_feature: Table A; Target 42863; HLA-B*13:02; MAGEB2; ENSG00000099399; CTA
GVYDGEEHSV

SEQ ID NO: 42864 - protein, 10 aa, Homo sapiens
  misc_feature: Table A; Target 42864; HLA-B*15:01; MAGEB2; ENSG00000099399; CTA
GVYDGEEHSV

SEQ ID NO: 42865 - protein, 10 aa, Homo sapiens
  misc_feature: Table A; Target 42865; HLA-B*15:03; MAGEB2; ENSG00000099399; CTA
GVYDGEEHSV

SEQ ID NO: 42866 - protein, 10 aa, Homo sapiens
  misc_feature: Table A; Target 42866; HLA-B*27:05; MAGEB2; ENSG00000099399; CTA
GVYDGEEHSV

SEQ ID NO: 42867 - protein, 10 aa, Homo sapiens
  misc_feature: Table A; Target 42867; HLA-B*38:01; MAGEB2; ENSG00000099399; CTA
GVYDGEEHSV

SEQ ID NO: 42868 - protein, 10 aa, Homo sapiens
  misc_feature: Table A; Target 42868; HLA-B*39:01; MAGEB2; ENSG00000099399; CTA
GVYDGEEHSV

SEQ ID NO: 42869 - protein, 10 aa, Homo sapiens
  misc_feature: Table A; Target 42869; HLA-B*40:01; MAGEB2; ENSG00000099399; CTA
GVYDGEEHSV

SEQ ID NO: 42870 - protein, 10 aa, Homo sapiens
  misc_feature: Table A; Target 42870; HLA-B*40:02; MAGEB2; ENSG00000099399; CTA
GVYDGEEHSV

SEQ ID NO: 42871 - protein, 10 aa, Homo sapiens
  misc_feature: Table A; Target 42871; HLA-B*46:01; MAGEB2; ENSG00000099399; CTA
GVYDGEEHSV

SEQ ID NO: 42872 - protein, 10 aa, Homo sapiens
  misc_feature: Table A; Target 42872; HLA-B*49:01; MAGEB2; ENSG00000099399; CTA
GVYDGEEHSV

SEQ ID NO: 42873 - protein, 10 aa, Homo sapiens
  misc_feature: Table A; Target 42873; HLA-B*56:01; MAGEB2; ENSG00000099399; CTA
GVYDGEEHSV

SEQ ID NO: 42874 - protein, 10 aa, Homo sapiens
  misc_feature: Table A; Target 42874; HLA-B*58:01; MAGEB2; ENSG00000099399; CTA
GVYDGEEHSV

SEQ ID NO: 42875 - protein, 10 aa, Homo sapiens
  misc_feature: Table A; Target 42875; HLA-C*01:02; MAGEB2; ENSG00000099399; CTA
GVYDGEEHSV

SEQ ID NO: 42876 - protein, 10 aa, Homo sapiens
  misc_feature: Table A; Target 42876; HLA-C*02:02; MAGEB2; ENSG00000099399; CTA
GVYDGEEHSV

SEQ ID NO: 42877 - protein, 10 aa, Homo sapiens
  misc_feature: Table A; Target 42877; HLA-C*03:03; MAGEB2; ENSG00000099399; CTA
GVYDGEEHSV

SEQ ID NO: 42878 - protein, 10 aa, Homo sapiens
  misc_feature: Table A; Target 42878; HLA-C*03:04; MAGEB2; ENSG00000099399; CTA
GVYDGEEHSV

SEQ ID NO: 42879 - protein, 10 aa, Homo sapiens
  misc_feature: Table A; Target 42879; HLA-C*05:01; MAGEB2; ENSG00000099399; CTA
GVYDGEEHSV

SEQ ID NO: 42880 - protein, 10 aa, Homo sapiens
  misc_feature: Table A; Target 42880; HLA-C*06:02; MAGEB2; ENSG00000099399; CTA
GVYDGEEHSV

SEQ ID NO: 42881 - protein, 10 aa, Homo sapiens
  misc_feature: Table A; Target 42881; HLA-C*07:04; MAGEB2; ENSG00000099399; CTA
GVYDGEEHSV

SEQ ID NO: 42882 - protein, 10 aa, Homo sapiens
  misc_feature: Table A; Target 42882; HLA-C*12:03; MAGEB2; ENSG00000099399; CTA
GVYDGEEHSV

SEQ ID NO: 42883 - protein, 10 aa, Homo sapiens
  misc_feature: Table A; Target 42883; HLA-C*16:02; MAGEB2; ENSG00000099399; CTA
GVYDGEEHSV

SEQ ID NO: 42884 - protein, 10 aa, Homo sapiens
  misc_feature: Table A; Target 42884; HLA-C*16:04; MAGEB2; ENSG00000099399; CTA
GVYDGEEHSV

SEQ ID NO: 42885 - protein, 11 aa, Homo sapiens
  misc_feature: Table A; Target 42885; HLA-A*02:07; MAGEB2; ENSG00000099399; CTA
GVYDGEEHSVF

SEQ ID NO: 42886 - protein, 11 aa, Homo sapiens
  misc_feature: Table A; Target 42886; HLA-A*03:01; MAGEB2; ENSG00000099399; CTA
GVYDGEEHSVF

SEQ ID NO: 42887 - protein, 11 aa, Homo sapiens
  misc_feature: Table A; Target 42887; HLA-A*03:02; MAGEB2; ENSG00000099399; CTA
GVYDGEEHSVF

SEQ ID NO: 42888 - protein, 11 aa, Homo sapiens
  misc_feature: Table A; Target 42888; HLA-A*11:01; MAGEB2; ENSG00000099399; CTA
GVYDGEEHSVF

SEQ ID NO: 42889 - protein, 11 aa, Homo sapiens
  misc_feature: Table A; Target 42889; HLA-A*25:01; MAGEB2; ENSG00000099399; CTA
GVYDGEEHSVF

SEQ ID NO: 42890 - protein, 11 aa, Homo sapiens
  misc_feature: Table A; Target 42890; HLA-A*26:01; MAGEB2; ENSG00000099399; CTA
GVYDGEEHSVF

SEQ ID NO: 42891 - protein, 11 aa, Homo sapiens
  misc_feature: Table A; Target 42891; HLA-A*29:02; MAGEB2; ENSG00000099399; CTA
GVYDGEEHSVF

SEQ ID NO: 42892 - protein, 11 aa, Homo sapiens
  misc_feature: Table A; Target 42892; HLA-A*30:02; MAGEB2; ENSG00000099399; CTA
GVYDGEEHSVF

SEQ ID NO: 42893 - protein, 11 aa, Homo sapiens
  misc_feature: Table A; Target 42893; HLA-A*31:01; MAGEB2; ENSG00000099399; CTA
GVYDGEEHSVF

SEQ ID NO: 42894 - protein, 11 aa, Homo sapiens
  misc_feature: Table A; Target 42894; HLA-A*32:01; MAGEB2; ENSG00000099399; CTA
GVYDGEEHSVF

SEQ ID NO: 42895 - protein, 11 aa, Homo sapiens
  misc_feature: Table A; Target 42895; HLA-A*68:02; MAGEB2; ENSG00000099399; CTA
GVYDGEEHSVF

SEQ ID NO: 42896 - protein, 11 aa, Homo sapiens
  misc_feature: Table A; Target 42896; HLA-B*15:03; MAGEB2; ENSG00000099399; CTA
GVYDGEEHSVF

SEQ ID NO: 42897 - protein, 11 aa, Homo sapiens
  misc_feature: Table A; Target 42897; HLA-B*27:02; MAGEB2; ENSG00000099399; CTA
GVYDGEEHSVF

SEQ ID NO: 42898 - protein, 11 aa, Homo sapiens
  misc_feature: Table A; Target 42898; HLA-B*27:05; MAGEB2; ENSG00000099399; CTA
GVYDGEEHSVF

SEQ ID NO: 42899 - protein, 11 aa, Homo sapiens
  misc_feature: Table A; Target 42899; HLA-B*35:01; MAGEB2; ENSG00000099399; CTA
GVYDGEEHSVF

SEQ ID NO: 42900 - protein, 11 aa, Homo sapiens
  misc_feature: Table A; Target 42900; HLA-B*38:01; MAGEB2; ENSG00000099399; CTA
GVYDGEEHSVF

SEQ ID NO: 42901 - protein, 11 aa, Homo sapiens
  misc_feature: Table A; Target 42901; HLA-B*46:01; MAGEB2; ENSG00000099399; CTA
GVYDGEEHSVF

SEQ ID NO: 42902 - protein, 11 aa, Homo sapiens
  misc_feature: Table A; Target 42902; HLA-B*55:01; MAGEB2; ENSG00000099399; CTA
GVYDGEEHSVF

SEQ ID NO: 42903 - protein, 11 aa, Homo sapiens
  misc_feature: Table A; Target 42903; HLA-B*57:01; MAGEB2; ENSG00000099399; CTA
GVYDGEEHSVF

SEQ ID NO: 42904 - protein, 11 aa, Homo sapiens
  misc_feature: Table A; Target 42904; HLA-B*58:01; MAGEB2; ENSG00000099399; CTA
GVYDGEEHSVF

SEQ ID NO: 42905 - protein, 11 aa, Homo sapiens
  misc_feature: Table A; Target 42905; HLA-C*02:02; MAGEB2; ENSG00000099399; CTA
GVYDGEEHSVF

SEQ ID NO: 42906 - protein, 11 aa, Homo sapiens
  misc_feature: Table A; Target 42906; HLA-C*05:01; MAGEB2; ENSG00000099399; CTA
GVYDGEEHSVF

SEQ ID NO: 42907 - protein, 11 aa, Homo sapiens
  misc_feature: Table A; Target 42907; HLA-C*07:04; MAGEB2; ENSG00000099399; CTA
GVYDGEEHSVF

SEQ ID NO: 42908 - protein, 11 aa, Homo sapiens
  misc_feature: Table A; Target 42908; HLA-C*07:06; MAGEB2; ENSG00000099399; CTA
GVYDGEEHSVF

SEQ ID NO: 42909 - protein, 11 aa, Homo sapiens
  misc_feature: Table A; Target 42909; HLA-C*12:03; MAGEB2; ENSG00000099399; CTA
GVYDGEEHSVF

SEQ ID NO: 42910 - protein, 11 aa, Homo sapiens
  misc_feature: Table A; Target 42910; HLA-C*16:04; MAGEB2; ENSG00000099399; CTA
GVYDGEEHSVF

SEQ ID NO: 42911 - protein, 8 aa, Homo sapiens
  misc_feature: Table A; Target 42911; HLA-A*03:01; MAGEB2; ENSG00000099399; CTA
HTYTFIDK

SEQ ID NO: 42912 - protein, 9 aa, Homo sapiens
  misc_feature: Table A; Target 42912; HLA-A*02:03; MAGEB2; ENSG00000099399; CTA
HTYTFIDKV

SEQ ID NO: 42913 - protein, 9 aa, Homo sapiens
  misc_feature: Table A; Target 42913; HLA-A*02:04; MAGEB2; ENSG00000099399; CTA
HTYTFIDKV

SEQ ID NO: 42914 - protein, 8 aa, Homo sapiens
  misc_feature: Table A; Target 42914; HLA-C*14:02; MAGEB2; ENSG00000099399; CTA
IFLNGNSA

SEQ ID NO: 42915 - protein, 9 aa, Homo sapiens
  misc_feature: Table A; Target 42915; HLA-C*14:02; MAGEB2; ENSG00000099399; CTA
IFLNGNSAT

SEQ ID NO: 42916 - protein, 9 aa, Homo sapiens
  misc_feature: Table A; Target 42916; HLA-A*02:03; MAGEB2; ENSG00000099399; CTA
ILKKASEGL

SEQ ID NO: 42917 - protein, 9 aa, Homo sapiens
  misc_feature: Table A; Target 42917; HLA-B*08:01; MAGEB2; ENSG00000099399; CTA
ILKKASEGL

SEQ ID NO: 42918 - protein, 8 aa, Homo sapiens
  misc_feature: Table A; Target 42918; HLA-B*56:01; MAGEB2; ENSG00000099399; CTA
IPQEPQRA

SEQ ID NO: 42919 - protein, 9 aa, Homo sapiens
  misc_feature: Table A; Target 42919; HLA-B*07:02; MAGEB2; ENSG00000099399; CTA
IPQEPQRAP

SEQ ID NO: 42920 - protein, 9 aa, Homo sapiens
  misc_feature: Table A; Target 42920; HLA-B*54:01; MAGEB2; ENSG00000099399; CTA
IPQEPQRAP

SEQ ID NO: 42921 - protein, 9 aa, Homo sapiens
  misc_feature: Table A; Target 42921; HLA-B*55:01; MAGEB2; ENSG00000099399; CTA
IPQEPQRAP

SEQ ID NO: 42922 - protein, 9 aa, Homo sapiens
  misc_feature: Table A; Target 42922; HLA-B*56:01; MAGEB2; ENSG00000099399; CTA
IPQEPQRAP

SEQ ID NO: 42923 - protein, 9 aa, Homo sapiens
  misc_feature: Table A; Target 42923; HLA-C*07:02; MAGEB2; ENSG00000099399; CTA
IPQEPQRAP

SEQ ID NO: 42924 - protein, 10 aa, Homo sapiens
  misc_feature: Table A; Target 42924; HLA-B*54:01; MAGEB2; ENSG00000099399; CTA
IPQEPQRAPT

SEQ ID NO: 42925 - protein, 10 aa, Homo sapiens
  misc_feature: Table A; Target 42925; HLA-B*56:01; MAGEB2; ENSG00000099399; CTA
IPQEPQRAPT

SEQ ID NO: 42926 - protein, 10 aa, Homo sapiens
  misc_feature: Table A; Target 42926; HLA-C*16:02; MAGEB2; ENSG00000099399; CTA
IPQEPQRAPT

SEQ ID NO: 42927 - protein, 9 aa, Homo sapiens
  misc_feature: Table A; Target 42927; HLA-A*03:01; MAGEB2; ENSG00000099399; CTA
ITKDLVQEK

SEQ ID NO: 42928 - protein, 9 aa, Homo sapiens
  misc_feature: Table A; Target 42928; HLA-A*03:02; MAGEB2; ENSG00000099399; CTA
ITKDLVQEK

SEQ ID NO: 42929 - protein, 9 aa, Homo sapiens
  misc_feature: Table A; Target 42929; HLA-A*11:01; MAGEB2; ENSG00000099399; CTA
ITKDLVQEK

SEQ ID NO: 42930 - protein, 9 aa, Homo sapiens
  misc_feature: Table A; Target 42930; HLA-A*26:01; MAGEB2; ENSG00000099399; CTA
ITKDLVQEK

SEQ ID NO: 42931 - protein, 9 aa, Homo sapiens
  misc_feature: Table A; Target 42931; HLA-A*29:02; MAGEB2; ENSG00000099399; CTA
ITKDLVQEK

SEQ ID NO: 42932 - protein, 9 aa, Homo sapiens
  misc_feature: Table A; Target 42932; HLA-A*30:02; MAGEB2; ENSG00000099399; CTA
ITKDLVQEK

SEQ ID NO: 42933 - protein, 9 aa, Homo sapiens
  misc_feature: Table A; Target 42933; HLA-A*31:01; MAGEB2; ENSG00000099399; CTA
ITKDLVQEK

SEQ ID NO: 42934 - protein, 9 aa, Homo sapiens
  misc_feature: Table A; Target 42934; HLA-A*33:01; MAGEB2; ENSG00000099399; CTA
ITKDLVQEK

SEQ ID NO: 42935 - protein, 9 aa, Homo sapiens
  misc_feature: Table A; Target 42935; HLA-A*33:03; MAGEB2; ENSG00000099399; CTA
ITKDLVQEK

SEQ ID NO: 42936 - protein, 9 aa, Homo sapiens
  misc_feature: Table A; Target 42936; HLA-A*68:01; MAGEB2; ENSG00000099399; CTA
ITKDLVQEK

SEQ ID NO: 42937 - protein, 9 aa, Homo sapiens
  misc_feature: Table A; Target 42937; HLA-B*27:02; MAGEB2; ENSG00000099399; CTA
ITKDLVQEK

SEQ ID NO: 42938 - protein, 9 aa, Homo sapiens
  misc_feature: Table A; Target 42938; HLA-B*40:02; MAGEB2; ENSG00000099399; CTA
ITKDLVQEK

SEQ ID NO: 42939 - protein, 9 aa, Homo sapiens
  misc_feature: Table A; Target 42939; HLA-B*46:01; MAGEB2; ENSG00000099399; CTA
ITKDLVQEK

SEQ ID NO: 42940 - protein, 9 aa, Homo sapiens
  misc_feature: Table A; Target 42940; HLA-B*57:01; MAGEB2; ENSG00000099399; CTA
ITKDLVQEK

SEQ ID NO: 42941 - protein, 9 aa, Homo sapiens
  misc_feature: Table A; Target 42941; HLA-C*02:02; MAGEB2; ENSG00000099399; CTA
ITKDLVQEK

SEQ ID NO: 42942 - protein, 9 aa, Homo sapiens
  misc_feature: Table A; Target 42942; HLA-C*06:02; MAGEB2; ENSG00000099399; CTA
ITKDLVQEK

SEQ ID NO: 42943 - protein, 9 aa, Homo sapiens
  misc_feature: Table A; Target 42943; HLA-C*07:06; MAGEB2; ENSG00000099399; CTA
ITKDLVQEK

SEQ ID NO: 42944 - protein, 9 aa, Homo sapiens
  misc_feature: Table A; Target 42944; HLA-C*12:03; MAGEB2; ENSG00000099399; CTA
ITKDLVQEK

SEQ ID NO: 42945 - protein, 9 aa, Homo sapiens
  misc_feature: Table A; Target 42945; HLA-C*16:01; MAGEB2; ENSG00000099399; CTA
ITKDLVQEK

SEQ ID NO: 42946 - protein, 9 aa, Homo sapiens
  misc_feature: Table A; Target 42946; HLA-C*16:02; MAGEB2; ENSG00000099399; CTA
ITKDLVQEK

SEQ ID NO: 42947 - protein, 10 aa, Homo sapiens
  misc_feature: Table A; Target 42947; HLA-A*01:01; MAGEB2; ENSG00000099399; CTA
ITKDLVQEKY

SEQ ID NO: 42948 - protein, 10 aa, Homo sapiens
  misc_feature: Table A; Target 42948; HLA-A*25:01; MAGEB2; ENSG00000099399; CTA
ITKDLVQEKY

SEQ ID NO: 42949 - protein, 10 aa, Homo sapiens
  misc_feature: Table A; Target 42949; HLA-A*26:01; MAGEB2; ENSG00000099399; CTA
ITKDLVQEKY

SEQ ID NO: 42950 - protein, 10 aa, Homo sapiens
  misc_feature: Table A; Target 42950; HLA-A*29:02; MAGEB2; ENSG00000099399; CTA
ITKDLVQEKY

SEQ ID NO: 42951 - protein, 10 aa, Homo sapiens
  misc_feature: Table A; Target 42951; HLA-A*30:02; MAGEB2; ENSG00000099399; CTA
ITKDLVQEKY

SEQ ID NO: 42952 - protein, 10 aa, Homo sapiens
  misc_feature: Table A; Target 42952; HLA-A*32:01; MAGEB2; ENSG00000099399; CTA
ITKDLVQEKY

SEQ ID NO: 42953 - protein, 10 aa, Homo sapiens
  misc_feature: Table A; Target 42953; HLA-B*15:01; MAGEB2; ENSG00000099399; CTA
ITKDLVQEKY

SEQ ID NO: 42954 - protein, 10 aa, Homo sapiens
  misc_feature: Table A; Target 42954; HLA-B*46:01; MAGEB2; ENSG00000099399; CTA
ITKDLVQEKY

SEQ ID NO: 42955 - protein, 10 aa, Homo sapiens
  misc_feature: Table A; Target 42955; HLA-B*57:01; MAGEB2; ENSG00000099399; CTA
ITKDLVQEKY

SEQ ID NO: 42956 - protein, 10 aa, Homo sapiens
  misc_feature: Table A; Target 42956; HLA-B*58:01; MAGEB2; ENSG00000099399; CTA
ITKDLVQEKY

SEQ ID NO: 42957 - protein, 9 aa, Homo sapiens
  misc_feature: Table A; Target 42957; HLA-B*07:02; MAGEB2; ENSG00000099399; CTA
KARDETRGL

SEQ ID NO: 42958 - protein, 9 aa, Homo sapiens
  misc_feature: Table A; Target 42958; HLA-C*06:02; MAGEB2; ENSG00000099399; CTA
KARDETRGL

SEQ ID NO: 42959 - protein, 9 aa, Homo sapiens
  misc_feature: Table A; Target 42959; HLA-C*16:02; MAGEB2; ENSG00000099399; CTA
KARDETRGL

SEQ ID NO: 42960 - protein, 8 aa, Homo sapiens
  misc_feature: Table A; Target 42960; HLA-C*03:04; MAGEB2; ENSG00000099399; CTA
KASEGLSV

SEQ ID NO: 42961 - protein, 8 aa, Homo sapiens
  misc_feature: Table A; Target 42961; HLA-C*05:01; MAGEB2; ENSG00000099399; CTA
KASEGLSV

SEQ ID NO: 42962 - protein, 8 aa, Homo sapiens
  misc_feature: Table A; Target 42962; HLA-C*16:01; MAGEB2; ENSG00000099399; CTA
KASEGLSV

SEQ ID NO: 42963 - protein, 8 aa, Homo sapiens
  misc_feature: Table A; Target 42963; HLA-C*16:02; MAGEB2; ENSG00000099399; CTA
KASEGLSV

SEQ ID NO: 42964 - protein, 9 aa, Homo sapiens
  misc_feature: Table A; Target 42964; HLA-A*02:03; MAGEB2; ENSG00000099399; CTA
KASEGLSVV

SEQ ID NO: 42965 - protein, 9 aa, Homo sapiens
  misc_feature: Table A; Target 42965; HLA-A*32:01; MAGEB2; ENSG00000099399; CTA
KASEGLSVV

SEQ ID NO: 42966 - protein, 9 aa, Homo sapiens
  misc_feature: Table A; Target 42966; HLA-B*46:01; MAGEB2; ENSG00000099399; CTA
KASEGLSVV

SEQ ID NO: 42967 - protein, 9 aa, Homo sapiens
  misc_feature: Table A; Target 42967; HLA-B*49:01; MAGEB2; ENSG00000099399; CTA
KASEGLSVV

SEQ ID NO: 42968 - protein, 9 aa, Homo sapiens
  misc_feature: Table A; Target 42968; HLA-B*55:01; MAGEB2; ENSG00000099399; CTA
KASEGLSVV

SEQ ID NO: 42969 - protein, 9 aa, Homo sapiens
  misc_feature: Table A; Target 42969; HLA-C*02:02; MAGEB2; ENSG00000099399; CTA
KASEGLSVV

SEQ ID NO: 42970 - protein, 9 aa, Homo sapiens
  misc_feature: Table A; Target 42970; HLA-C*03:04; MAGEB2; ENSG00000099399; CTA
KASEGLSVV

SEQ ID NO: 42971 - protein, 9 aa, Homo sapiens
  misc_feature: Table A; Target 42971; HLA-C*05:01; MAGEB2; ENSG00000099399; CTA
KASEGLSVV

SEQ ID NO: 42972 - protein, 9 aa, Homo sapiens
  misc_feature: Table A; Target 42972; HLA-C*12:03; MAGEB2; ENSG00000099399; CTA
KASEGLSVV

SEQ ID NO: 42973 - protein, 9 aa, Homo sapiens
  misc_feature: Table A; Target 42973; HLA-C*16:02; MAGEB2; ENSG00000099399; CTA
KASEGLSVV

SEQ ID NO: 42974 - protein, 9 aa, Homo sapiens
  misc_feature: Table A; Target 42974; HLA-C*16:04; MAGEB2; ENSG00000099399; CTA
KASEGLSVV

SEQ ID NO: 42975 - protein, 10 aa, Homo sapiens
  misc_feature: Table A; Target 42975; HLA-A*23:01; MAGEB2; ENSG00000099399; CTA
KASEGLSVVF

SEQ ID NO: 42976 - protein, 10 aa, Homo sapiens
  misc_feature: Table A; Target 42976; HLA-A*30:02; MAGEB2; ENSG00000099399; CTA
KASEGLSVVF

SEQ ID NO: 42977 - protein, 10 aa, Homo sapiens
  misc_feature: Table A; Target 42977; HLA-A*32:01; MAGEB2; ENSG00000099399; CTA
KASEGLSVVF

SEQ ID NO: 42978 - protein, 10 aa, Homo sapiens
  misc_feature: Table A; Target 42978; HLA-B*15:01; MAGEB2; ENSG00000099399; CTA
KASEGLSVVF

SEQ ID NO: 42979 - protein, 10 aa, Homo sapiens
  misc_feature: Table A; Target 42979; HLA-B*15:03; MAGEB2; ENSG00000099399; CTA
KASEGLSVVF

SEQ ID NO: 42980 - protein, 10 aa, Homo sapiens
  misc_feature: Table A; Target 42980; HLA-B*27:02; MAGEB2; ENSG00000099399; CTA
KASEGLSVVF

SEQ ID NO: 42981 - protein, 10 aa, Homo sapiens
  misc_feature: Table A; Target 42981; HLA-B*27:05; MAGEB2; ENSG00000099399; CTA
KASEGLSVVF

SEQ ID NO: 42982 - protein, 10 aa, Homo sapiens
  misc_feature: Table A; Target 42982; HLA-B*35:01; MAGEB2; ENSG00000099399; CTA
KASEGLSVVF

SEQ ID NO: 42983 - protein, 10 aa, Homo sapiens
  misc_feature: Table A; Target 42983; HLA-B*40:01; MAGEB2; ENSG00000099399; CTA
KASEGLSVVF

SEQ ID NO: 42984 - protein, 10 aa, Homo sapiens
  misc_feature: Table A; Target 42984; HLA-B*55:01; MAGEB2; ENSG00000099399; CTA
KASEGLSVVF

SEQ ID NO: 42985 - protein, 10 aa, Homo sapiens
  misc_feature: Table A; Target 42985; HLA-B*57:01; MAGEB2; ENSG00000099399; CTA
KASEGLSVVF

SEQ ID NO: 42986 - protein, 10 aa, Homo sapiens
  misc_feature: Table A; Target 42986; HLA-B*58:01; MAGEB2; ENSG00000099399; CTA
KASEGLSVVF

SEQ ID NO: 42987 - protein, 10 aa, Homo sapiens
  misc_feature: Table A; Target 42987; HLA-C*02:02; MAGEB2; ENSG00000099399; CTA
KASEGLSVVF

SEQ ID NO: 42988 - protein, 10 aa, Homo sapiens
  misc_feature: Table A; Target 42988; HLA-C*05:01; MAGEB2; ENSG00000099399; CTA
KASEGLSVVF

SEQ ID NO: 42989 - protein, 10 aa, Homo sapiens
  misc_feature: Table A; Target 42989; HLA-C*07:06; MAGEB2; ENSG00000099399; CTA
KASEGLSVVF

SEQ ID NO: 42990 - protein, 10 aa, Homo sapiens
  misc_feature: Table A; Target 42990; HLA-C*12:03; MAGEB2; ENSG00000099399; CTA
KASEGLSVVF

SEQ ID NO: 42991 - protein, 10 aa, Homo sapiens
  misc_feature: Table A; Target 42991; HLA-C*16:01; MAGEB2; ENSG00000099399; CTA
KASEGLSVVF

SEQ ID NO: 42992 - protein, 10 aa, Homo sapiens
  misc_feature: Table A; Target 42992; HLA-C*16:02; MAGEB2; ENSG00000099399; CTA
KASEGLSVVF

SEQ ID NO: 42993 - protein, 10 aa, Homo sapiens
  misc_feature: Table A; Target 42993; HLA-C*16:04; MAGEB2; ENSG00000099399; CTA
KASEGLSVVF

SEQ ID NO: 42994 - protein, 8 aa, Homo sapiens
  misc_feature: Table A; Target 42994; HLA-B*37:01; MAGEB2; ENSG00000099399; CTA
KDEEKAGV

SEQ ID NO: 42995 - protein, 8 aa, Homo sapiens
  misc_feature: Table A; Target 42995; HLA-C*16:02; MAGEB2; ENSG00000099399; CTA
KDEEKAGV

SEQ ID NO: 42996 - protein, 8 aa, Homo sapiens
  misc_feature: Table A; Target 42996; HLA-B*37:01; MAGEB2; ENSG00000099399; CTA
KDLVQEKY

SEQ ID NO: 42997 - protein, 8 aa, Homo sapiens
  misc_feature: Table A; Target 42997; HLA-C*07:01; MAGEB2; ENSG00000099399; CTA
KDLVQEKY

SEQ ID NO: 42998 - protein, 8 aa, Homo sapiens
  misc_feature: Table A; Target 42998; HLA-C*04:01; MAGEB2; ENSG00000099399; CTA
KIKKSVTK

SEQ ID NO: 42999 - protein, 9 aa, Homo sapiens
  misc_feature: Table A; Target 42999; HLA-B*15:03; MAGEB2; ENSG00000099399; CTA
KKASEGLSV

SEQ ID NO: 43000 - protein, 11 aa, Homo sapiens
  misc_feature: Table A; Target 43000; HLA-B*15:03; MAGEB2; ENSG00000099399; CTA
KKASEGLSVVF

SEQ ID NO: 43001 - protein, 11 aa, Homo sapiens
  misc_feature: Table A; Target 43001; HLA-A*03:01; MAGEB2; ENSG00000099399; CTA
KLITKDLVQEK

SEQ ID NO: 43002 - protein, 11 aa, Homo sapiens
  misc_feature: Table A; Target 43002; HLA-A*03:02; MAGEB2; ENSG00000099399; CTA
KLITKDLVQEK

SEQ ID NO: 43003 - protein, 11 aa, Homo sapiens
  misc_feature: Table A; Target 43003; HLA-A*11:01; MAGEB2; ENSG00000099399; CTA
KLITKDLVQEK

SEQ ID NO: 43004 - protein, 11 aa, Homo sapiens
  misc_feature: Table A; Target 43004; HLA-A*31:01; MAGEB2; ENSG00000099399; CTA
KLITKDLVQEK

SEQ ID NO: 43005 - protein, 9 aa, Homo sapiens
  misc_feature: Table A; Target 43005; HLA-A*02:01; MAGEB2; ENSG00000099399; CTA
KLLMPLLGV

SEQ ID NO: 43006 - protein, 9 aa, Homo sapiens
  misc_feature: Table A; Target 43006; HLA-A*02:03; MAGEB2; ENSG00000099399; CTA
KLLMPLLGV

SEQ ID NO: 43007 - protein, 9 aa, Homo sapiens
  misc_feature: Table A; Target 43007; HLA-A*02:04; MAGEB2; ENSG00000099399; CTA
KLLMPLLGV

SEQ ID NO: 43008 - protein, 9 aa, Homo sapiens
  misc_feature: Table A; Target 43008; HLA-A*02:07; MAGEB2; ENSG00000099399; CTA
KLLMPLLGV

SEQ ID NO: 43009 - protein, 10 aa, Homo sapiens
  misc_feature: Table A; Target 43009; HLA-C*06:02; MAGEB2; ENSG00000099399; CTA
KQVPSSDPPR

SEQ ID NO: 43010 - protein, 11 aa, Homo sapiens
  misc_feature: Table A; Target 43010; HLA-A*24:02; MAGEB2; ENSG00000099399; CTA
KQVPSSDPPRF

SEQ ID NO: 43011 - protein, 11 aa, Homo sapiens
  misc_feature: Table A; Target 43011; HLA-A*32:01; MAGEB2; ENSG00000099399; CTA
KQVPSSDPPRF

SEQ ID NO: 43012 - protein, 11 aa, Homo sapiens
  misc_feature: Table A; Target 43012; HLA-B*15:01; MAGEB2; ENSG00000099399; CTA
KQVPSSDPPRF

SEQ ID NO: 43013 - protein, 11 aa, Homo sapiens
  misc_feature: Table A; Target 43013; HLA-B*38:01; MAGEB2; ENSG00000099399; CTA
KQVPSSDPPRF

SEQ ID NO: 43014 - protein, 11 aa, Homo sapiens
  misc_feature: Table A; Target 43014; HLA-B*57:01; MAGEB2; ENSG00000099399; CTA
KQVPSSDPPRF

SEQ ID NO: 43015 - protein, 11 aa, Homo sapiens
  misc_feature: Table A; Target 43015; HLA-B*58:01; MAGEB2; ENSG00000099399; CTA
KQVPSSDPPRF

SEQ ID NO: 43016 - protein, 8 aa, Homo sapiens
  misc_feature: Table A; Target 43016; HLA-A*32:01; MAGEB2; ENSG00000099399; CTA
KSGSLVQF

SEQ ID NO: 43017 - protein, 8 aa, Homo sapiens
  misc_feature: Table A; Target 43017; HLA-B*58:01; MAGEB2; ENSG00000099399; CTA
KSGSLVQF

SEQ ID NO: 43018 - protein, 11 aa, Homo sapiens
  misc_feature: Table A; Target 43018; HLA-A*29:02; MAGEB2; ENSG00000099399; CTA
KSGSLVQFLLY

SEQ ID NO: 43019 - protein, 11 aa, Homo sapiens
  misc_feature: Table A; Target 43019; HLA-B*57:01; MAGEB2; ENSG00000099399; CTA
KSGSLVQFLLY

SEQ ID NO: 43020 - protein, 10 aa, Homo sapiens
  misc_feature: Table A; Target 43020; HLA-A*68:01; MAGEB2; ENSG00000099399; CTA
KSPSEDPLTR

SEQ ID NO: 43021 - protein, 10 aa, Homo sapiens
  misc_feature: Table A; Target 43021; HLA-B*27:05; MAGEB2; ENSG00000099399; CTA
KSPSEDPLTR

SEQ ID NO: 43022 - protein, 10 aa, Homo sapiens
  misc_feature: Table A; Target 43022; HLA-B*57:01; MAGEB2; ENSG00000099399; CTA
KSPSEDPLTR

SEQ ID NO: 43023 - protein, 10 aa, Homo sapiens
  misc_feature: Table A; Target 43023; HLA-C*07:02; MAGEB2; ENSG00000099399; CTA
KSPSEDPLTR

SEQ ID NO: 43024 - protein, 10 aa, Homo sapiens
  misc_feature: Table A; Target 43024; HLA-C*07:06; MAGEB2; ENSG00000099399; CTA
KSPSEDPLTR

SEQ ID NO: 43025 - protein, 11 aa, Homo sapiens
  misc_feature: Table A; Target 43025; HLA-A*03:01; MAGEB2; ENSG00000099399; CTA
KSPSEDPLTRK

SEQ ID NO: 43026 - protein, 11 aa, Homo sapiens
  misc_feature: Table A; Target 43026; HLA-A*03:02; MAGEB2; ENSG00000099399; CTA
KSPSEDPLTRK

SEQ ID NO: 43027 - protein, 11 aa, Homo sapiens
  misc_feature: Table A; Target 43027; HLA-A*11:01; MAGEB2; ENSG00000099399; CTA
KSPSEDPLTRK

SEQ ID NO: 43028 - protein, 8 aa, Homo sapiens
  misc_feature: Table A; Target 43028; HLA-C*16:01; MAGEB2; ENSG00000099399; CTA
KSVTKGEM

SEQ ID NO: 43029 - protein, 9 aa, Homo sapiens
  misc_feature: Table A; Target 43029; HLA-B*40:02; MAGEB2; ENSG00000099399; CTA
KSVTKGEML

SEQ ID NO: 43030 - protein, 9 aa, Homo sapiens
  misc_feature: Table A; Target 43030; HLA-B*58:01; MAGEB2; ENSG00000099399; CTA
KSVTKGEML

SEQ ID NO: 43031 - protein, 9 aa, Homo sapiens
  misc_feature: Table A; Target 43031; HLA-B*13:02; MAGEB2; ENSG00000099399; CTA
KVLEFLAKV

SEQ ID NO: 43032 - protein, 9 aa, Homo sapiens
  misc_feature: Table A; Target 43032; HLA-B*40:02; MAGEB2; ENSG00000099399; CTA
KVLEFLAKV

SEQ ID NO: 43033 - protein, 9 aa, Homo sapiens
  misc_feature: Table A; Target 43033; HLA-B*55:01; MAGEB2; ENSG00000099399; CTA
KVLEFLAKV

SEQ ID NO: 43034 - protein, 10 aa, Homo sapiens
  misc_feature: Table A; Target 43034; HLA-A*03:02; MAGEB2; ENSG00000099399; CTA
KVNGTTPCAF

SEQ ID NO: 43035 - protein, 10 aa, Homo sapiens
  misc_feature: Table A; Target 43035; HLA-A*25:01; MAGEB2; ENSG00000099399; CTA
KVNGTTPCAF

SEQ ID NO: 43036 - protein, 10 aa, Homo sapiens
  misc_feature: Table A; Target 43036; HLA-A*30:02; MAGEB2; ENSG00000099399; CTA
KVNGTTPCAF

SEQ ID NO: 43037 - protein, 10 aa, Homo sapiens
  misc_feature: Table A; Target 43037; HLA-A*32:01; MAGEB2; ENSG00000099399; CTA
KVNGTTPCAF

SEQ ID NO: 43038 - protein, 10 aa, Homo sapiens
  misc_feature: Table A; Target 43038; HLA-B*15:01; MAGEB2; ENSG00000099399; CTA
KVNGTTPCAF

SEQ ID NO: 43039 - protein, 10 aa, Homo sapiens
  misc_feature: Table A; Target 43039; HLA-C*01:02; MAGEB2; ENSG00000099399; CTA
KVNGTTPCAF

SEQ ID NO: 43040 - protein, 10 aa, Homo sapiens
  misc_feature: Table A; Target 43040; HLA-C*07:04; MAGEB2; ENSG00000099399; CTA
KVNGTTPCAF

SEQ ID NO: 43041 - protein, 9 aa, Homo sapiens
  misc_feature: Table A; Target 43041; HLA-A*03:01; MAGEB2; ENSG00000099399; CTA
KVNPNGHTY

SEQ ID NO: 43042 - protein, 9 aa, Homo sapiens
  misc_feature: Table A; Target 43042; HLA-A*03:02; MAGEB2; ENSG00000099399; CTA
KVNPNGHTY

SEQ ID NO: 43043 - protein, 9 aa, Homo sapiens
  misc_feature: Table A; Target 43043; HLA-A*23:01; MAGEB2; ENSG00000099399; CTA
KVNPNGHTY

SEQ ID NO: 43044 - protein, 9 aa, Homo sapiens
  misc_feature: Table A; Target 43044; HLA-A*25:01; MAGEB2; ENSG00000099399; CTA
KVNPNGHTY

SEQ ID NO: 43045 - protein, 9 aa, Homo sapiens
  misc_feature: Table A; Target 43045; HLA-A*26:01; MAGEB2; ENSG00000099399; CTA
KVNPNGHTY

SEQ ID NO: 43046 - protein, 9 aa, Homo sapiens
  misc_feature: Table A; Target 43046; HLA-A*29:02; MAGEB2; ENSG00000099399; CTA
KVNPNGHTY

SEQ ID NO: 43047 - protein, 9 aa, Homo sapiens
  misc_feature: Table A; Target 43047; HLA-A*30:02; MAGEB2; ENSG00000099399; CTA
KVNPNGHTY

SEQ ID NO: 43048 - protein, 9 aa, Homo sapiens
  misc_feature: Table A; Target 43048; HLA-A*31:01; MAGEB2; ENSG00000099399; CTA
KVNPNGHTY

SEQ ID NO: 43049 - protein, 9 aa, Homo sapiens
  misc_feature: Table A; Target 43049; HLA-B*15:03; MAGEB2; ENSG00000099399; CTA
KVNPNGHTY

SEQ ID NO: 43050 - protein, 9 aa, Homo sapiens
  misc_feature: Table A; Target 43050; HLA-B*35:01; MAGEB2; ENSG00000099399; CTA
KVNPNGHTY

SEQ ID NO: 43051 - protein, 9 aa, Homo sapiens
  misc_feature: Table A; Target 43051; HLA-B*44:03; MAGEB2; ENSG00000099399; CTA
KVNPNGHTY

SEQ ID NO: 43052 - protein, 9 aa, Homo sapiens
  misc_feature: Table A; Target 43052; HLA-B*46:01; MAGEB2; ENSG00000099399; CTA
KVNPNGHTY

SEQ ID NO: 43053 - protein, 9 aa, Homo sapiens
  misc_feature: Table A; Target 43053; HLA-B*57:01; MAGEB2; ENSG00000099399; CTA
KVNPNGHTY

SEQ ID NO: 43054 - protein, 9 aa, Homo sapiens
  misc_feature: Table A; Target 43054; HLA-C*01:02; MAGEB2; ENSG00000099399; CTA
KVNPNGHTY

SEQ ID NO: 43055 - protein, 9 aa, Homo sapiens
  misc_feature: Table A; Target 43055; HLA-C*02:02; MAGEB2; ENSG00000099399; CTA
KVNPNGHTY

SEQ ID NO: 43056 - protein, 9 aa, Homo sapiens
  misc_feature: Table A; Target 43056; HLA-C*03:04; MAGEB2; ENSG00000099399; CTA
KVNPNGHTY

SEQ ID NO: 43057 - protein, 9 aa, Homo sapiens
  misc_feature: Table A; Target 43057; HLA-C*07:04; MAGEB2; ENSG00000099399; CTA
KVNPNGHTY

SEQ ID NO: 43058 - protein, 9 aa, Homo sapiens
  misc_feature: Table A; Target 43058; HLA-C*07:06; MAGEB2; ENSG00000099399; CTA
KVNPNGHTY

SEQ ID NO: 43059 - protein, 9 aa, Homo sapiens
  misc_feature: Table A; Target 43059; HLA-C*12:03; MAGEB2; ENSG00000099399; CTA
KVNPNGHTY

SEQ ID NO: 43060 - protein, 9 aa, Homo sapiens
  misc_feature: Table A; Target 43060; HLA-C*14:02; MAGEB2; ENSG00000099399; CTA
KVNPNGHTY

SEQ ID NO: 43061 - protein, 9 aa, Homo sapiens
  misc_feature: Table A; Target 43061; HLA-C*16:01; MAGEB2; ENSG00000099399; CTA
KVNPNGHTY

SEQ ID NO: 43062 - protein, 9 aa, Homo sapiens
  misc_feature: Table A; Target 43062; HLA-C*16:02; MAGEB2; ENSG00000099399; CTA
KVNPNGHTY

SEQ ID NO: 43063 - protein, 9 aa, Homo sapiens
  misc_feature: Table A; Target 43063; HLA-C*16:04; MAGEB2; ENSG00000099399; CTA
KVNPNGHTY

SEQ ID NO: 43064 - protein, 10 aa, Homo sapiens
  misc_feature: Table A; Target 43064; HLA-A*32:01; MAGEB2; ENSG00000099399; CTA
KVNPNGHTYT

SEQ ID NO: 43065 - protein, 11 aa, Homo sapiens
  misc_feature: Table A; Target 43065; HLA-A*03:02; MAGEB2; ENSG00000099399; CTA
KVNPNGHTYTF

SEQ ID NO: 43066 - protein, 11 aa, Homo sapiens
  misc_feature: Table A; Target 43066; HLA-A*23:01; MAGEB2; ENSG00000099399; CTA
KVNPNGHTYTF

SEQ ID NO: 43067 - protein, 11 aa, Homo sapiens
  misc_feature: Table A; Target 43067; HLA-A*24:02; MAGEB2; ENSG00000099399; CTA
KVNPNGHTYTF

SEQ ID NO: 43068 - protein, 11 aa, Homo sapiens
  misc_feature: Table A; Target 43068; HLA-A*25:01; MAGEB2; ENSG00000099399; CTA
KVNPNGHTYTF

SEQ ID NO: 43069 - protein, 11 aa, Homo sapiens
  misc_feature: Table A; Target 43069; HLA-A*29:02; MAGEB2; ENSG00000099399; CTA
KVNPNGHTYTF

SEQ ID NO: 43070 - protein, 11 aa, Homo sapiens
  misc_feature: Table A; Target 43070; HLA-A*30:02; MAGEB2; ENSG00000099399; CTA
KVNPNGHTYTF

SEQ ID NO: 43071 - protein, 11 aa, Homo sapiens
  misc_feature: Table A; Target 43071; HLA-A*31:01; MAGEB2; ENSG00000099399; CTA
KVNPNGHTYTF

SEQ ID NO: 43072 - protein, 11 aa, Homo sapiens
  misc_feature: Table A; Target 43072; HLA-A*32:01; MAGEB2; ENSG00000099399; CTA
KVNPNGHTYTF

SEQ ID NO: 43073 - protein, 11 aa, Homo sapiens
  misc_feature: Table A; Target 43073; HLA-B*15:01; MAGEB2; ENSG00000099399; CTA
KVNPNGHTYTF

SEQ ID NO: 43074 - protein, 11 aa, Homo sapiens
  misc_feature: Table A; Target 43074; HLA-B*46:01; MAGEB2; ENSG00000099399; CTA
KVNPNGHTYTF

SEQ ID NO: 43075 - protein, 11 aa, Homo sapiens
  misc_feature: Table A; Target 43075; HLA-B*58:01; MAGEB2; ENSG00000099399; CTA
KVNPNGHTYTF

SEQ ID NO: 43076 - protein, 11 aa, Homo sapiens
  misc_feature: Table A; Target 43076; HLA-C*16:04; MAGEB2; ENSG00000099399; CTA
KVNPNGHTYTF

SEQ ID NO: 43077 - protein, 9 aa, Homo sapiens
  misc_feature: Table A; Target 43077; HLA-B*46:01; MAGEB2; ENSG00000099399; CTA
LAKVNGTTP

SEQ ID NO: 43078 - protein, 9 aa, Homo sapiens
  misc_feature: Table A; Target 43078; HLA-C*03:04; MAGEB2; ENSG00000099399; CTA
LAKVNGTTP

SEQ ID NO: 43079 - protein, 9 aa, Homo sapiens
  misc_feature: Table A; Target 43079; HLA-B*49:01; MAGEB2; ENSG00000099399; CTA
LEYKQVPSS

SEQ ID NO: 43080 - protein, 9 aa, Homo sapiens
  misc_feature: Table A; Target 43080; HLA-A*03:01; MAGEB2; ENSG00000099399; CTA
LLYKYKIKK

SEQ ID NO: 43081 - protein, 9 aa, Homo sapiens
  misc_feature: Table A; Target 43081; HLA-B*54:01; MAGEB2; ENSG00000099399; CTA
LNVPQVTEA

SEQ ID NO: 43082 - protein, 9 aa, Homo sapiens
  misc_feature: Table A; Target 43082; HLA-B*46:01; MAGEB2; ENSG00000099399; CTA
LSVVFGLEL

SEQ ID NO: 43083 - protein, 9 aa, Homo sapiens
  misc_feature: Table A; Target 43083; HLA-B*58:01; MAGEB2; ENSG00000099399; CTA
LSVVFGLEL

SEQ ID NO: 43084 - protein, 9 aa, Homo sapiens
  misc_feature: Table A; Target 43084; HLA-C*02:02; MAGEB2; ENSG00000099399; CTA
LSVVFGLEL

SEQ ID NO: 43085 - protein, 9 aa, Homo sapiens
  misc_feature: Table A; Target 43085; HLA-C*03:03; MAGEB2; ENSG00000099399; CTA
LSVVFGLEL

SEQ ID NO: 43086 - protein, 9 aa, Homo sapiens
  misc_feature: Table A; Target 43086; HLA-C*03:04; MAGEB2; ENSG00000099399; CTA
LSVVFGLEL

SEQ ID NO: 43087 - protein, 9 aa, Homo sapiens
  misc_feature: Table A; Target 43087; HLA-C*16:04; MAGEB2; ENSG00000099399; CTA
LSVVFGLEL

SEQ ID NO: 43088 - protein, 8 aa, Homo sapiens
  misc_feature: Table A; Target 43088; HLA-C*04:01; MAGEB2; ENSG00000099399; CTA
LTDEESLL

SEQ ID NO: 43089 - protein, 8 aa, Homo sapiens
  misc_feature: Table A; Target 43089; HLA-C*05:01; MAGEB2; ENSG00000099399; CTA
LTDEESLL

SEQ ID NO: 43090 - protein, 9 aa, Homo sapiens
  misc_feature: Table A; Target 43090; HLA-A*01:01; MAGEB2; ENSG00000099399; CTA
LTDEESLLS

SEQ ID NO: 43091 - protein, 11 aa, Homo sapiens
  misc_feature: Table A; Target 43091; HLA-A*01:01; MAGEB2; ENSG00000099399; CTA
LTDEESLLSSW

SEQ ID NO: 43092 - protein, 11 aa, Homo sapiens
  misc_feature: Table A; Target 43092; HLA-B*57:01; MAGEB2; ENSG00000099399; CTA
LTRKSGSLVQF

SEQ ID NO: 43093 - protein, 10 aa, Homo sapiens
  misc_feature: Table A; Target 43093; HLA-A*03:01; MAGEB2; ENSG00000099399; CTA
LVQEKYLEYK

SEQ ID NO: 43094 - protein, 10 aa, Homo sapiens
  misc_feature: Table A; Target 43094; HLA-A*03:02; MAGEB2; ENSG00000099399; CTA
LVQEKYLEYK

SEQ ID NO: 43095 - protein, 10 aa, Homo sapiens
  misc_feature: Table A; Target 43095; HLA-A*11:01; MAGEB2; ENSG00000099399; CTA
LVQEKYLEYK

SEQ ID NO: 43096 - protein, 11 aa, Homo sapiens
  misc_feature: Table A; Target 43096; HLA-B*54:01; MAGEB2; ENSG00000099399; CTA
MPLLGVIFLNG

SEQ ID NO: 43097 - protein, 10 aa, Homo sapiens
  misc_feature: Table A; Target 43097; HLA-B*15:03; MAGEB2; ENSG00000099399; CTA
NKVNPNGHTY

SEQ ID NO: 43098 - protein, 9 aa, Homo sapiens
  misc_feature: Table A; Target 43098; HLA-A*23:01; MAGEB2; ENSG00000099399; CTA
NPNGHTYTF

SEQ ID NO: 43099 - protein, 9 aa, Homo sapiens
  misc_feature: Table A; Target 43099; HLA-A*24:02; MAGEB2; ENSG00000099399; CTA
NPNGHTYTF

SEQ ID NO: 43100 - protein, 9 aa, Homo sapiens
  misc_feature: Table A; Target 43100; HLA-A*25:01; MAGEB2; ENSG00000099399; CTA
NPNGHTYTF

SEQ ID NO: 43101 - protein, 9 aa, Homo sapiens
  misc_feature: Table A; Target 43101; HLA-A*32:01; MAGEB2; ENSG00000099399; CTA
NPNGHTYTF

SEQ ID NO: 43102 - protein, 9 aa, Homo sapiens
  misc_feature: Table A; Target 43102; HLA-A*33:01; MAGEB2; ENSG00000099399; CTA
NPNGHTYTF

SEQ ID NO: 43103 - protein, 9 aa, Homo sapiens
  misc_feature: Table A; Target 43103; HLA-A*33:03; MAGEB2; ENSG00000099399; CTA
NPNGHTYTF

SEQ ID NO: 43104 - protein, 9 aa, Homo sapiens
  misc_feature: Table A; Target 43104; HLA-B*07:02; MAGEB2; ENSG00000099399; CTA
NPNGHTYTF

SEQ ID NO: 43105 - protein, 9 aa, Homo sapiens
  misc_feature: Table A; Target 43105; HLA-B*08:01; MAGEB2; ENSG00000099399; CTA
NPNGHTYTF

SEQ ID NO: 43106 - protein, 9 aa, Homo sapiens
  misc_feature: Table A; Target 43106; HLA-B*18:01; MAGEB2; ENSG00000099399; CTA
NPNGHTYTF

SEQ ID NO: 43107 - protein, 9 aa, Homo sapiens
  misc_feature: Table A; Target 43107; HLA-B*35:03; MAGEB2; ENSG00000099399; CTA
NPNGHTYTF

SEQ ID NO: 43108 - protein, 9 aa, Homo sapiens
  misc_feature: Table A; Target 43108; HLA-B*38:01; MAGEB2; ENSG00000099399; CTA
NPNGHTYTF

SEQ ID NO: 43109 - protein, 9 aa, Homo sapiens
  misc_feature: Table A; Target 43109; HLA-B*54:01; MAGEB2; ENSG00000099399; CTA
NPNGHTYTF

SEQ ID NO: 43110 - protein, 9 aa, Homo sapiens
  misc_feature: Table A; Target 43110; HLA-B*55:01; MAGEB2; ENSG00000099399; CTA
NPNGHTYTF

SEQ ID NO: 43111 - protein, 9 aa, Homo sapiens
  misc_feature: Table A; Target 43111; HLA-B*56:01; MAGEB2; ENSG00000099399; CTA
NPNGHTYTF

SEQ ID NO: 43112 - protein, 9 aa, Homo sapiens
  misc_feature: Table A; Target 43112; HLA-C*03:03; MAGEB2; ENSG00000099399; CTA
NPNGHTYTF

SEQ ID NO: 43113 - protein, 9 aa, Homo sapiens
  misc_feature: Table A; Target 43113; HLA-C*07:02; MAGEB2; ENSG00000099399; CTA
NPNGHTYTF

SEQ ID NO: 43114 - protein, 9 aa, Homo sapiens
  misc_feature: Table A; Target 43114; HLA-C*14:02; MAGEB2; ENSG00000099399; CTA
NPNGHTYTF

SEQ ID NO: 43115 - protein, 9 aa, Homo sapiens
  misc_feature: Table A; Target 43115; HLA-C*16:01; MAGEB2; ENSG00000099399; CTA
NPNGHTYTF

SEQ ID NO: 43116 - protein, 9 aa, Homo sapiens
  misc_feature: Table A; Target 43116; HLA-C*16:02; MAGEB2; ENSG00000099399; CTA
NPNGHTYTF

SEQ ID NO: 43117 - protein, 8 aa, Homo sapiens
  misc_feature: Table A; Target 43117; HLA-C*01:02; MAGEB2; ENSG00000099399; CTA
NVPQVTEA

SEQ ID NO: 43118 - protein, 11 aa, Homo sapiens
  misc_feature: Table A; Target 43118; HLA-A*68:01; MAGEB2; ENSG00000099399; CTA
PAAGIPQEPQR

SEQ ID NO: 43119 - protein, 11 aa, Homo sapiens
  misc_feature: Table A; Target 43119; HLA-B*27:02; MAGEB2; ENSG00000099399; CTA
PAAGIPQEPQR

SEQ ID NO: 43120 - protein, 9 aa, Homo sapiens
  misc_feature: Table A; Target 43120; HLA-A*01:01; MAGEB2; ENSG00000099399; CTA
PSEDPLTRK

SEQ ID NO: 43121 - protein, 9 aa, Homo sapiens
  misc_feature: Table A; Target 43121; HLA-A*03:02; MAGEB2; ENSG00000099399; CTA
PSEDPLTRK

SEQ ID NO: 43122 - protein, 9 aa, Homo sapiens
  misc_feature: Table A; Target 43122; HLA-A*11:01; MAGEB2; ENSG00000099399; CTA
PSEDPLTRK

SEQ ID NO: 43123 - protein, 10 aa, Homo sapiens
  misc_feature: Table A; Target 43123; HLA-C*16:01; MAGEB2; ENSG00000099399; CTA
PSSDPPRFQF

SEQ ID NO: 43124 - protein, 9 aa, Homo sapiens
  misc_feature: Table A; Target 43124; HLA-C*16:02; MAGEB2; ENSG00000099399; CTA
QASTSTKSP

SEQ ID NO: 43125 - protein, 9 aa, Homo sapiens
  misc_feature: Table A; Target 43125; HLA-B*39:01; MAGEB2; ENSG00000099399; CTA
QRAPTTAAA

SEQ ID NO: 43126 - protein, 9 aa, Homo sapiens
  misc_feature: Table A; Target 43126; HLA-A*11:01; MAGEB2; ENSG00000099399; CTA
QVPSSDPPR

SEQ ID NO: 43127 - protein, 9 aa, Homo sapiens
  misc_feature: Table A; Target 43127; HLA-A*68:01; MAGEB2; ENSG00000099399; CTA
QVPSSDPPR

SEQ ID NO: 43128 - protein, 9 aa, Homo sapiens
  misc_feature: Table A; Target 43128; HLA-C*07:06; MAGEB2; ENSG00000099399; CTA
QVPSSDPPR

SEQ ID NO: 43129 - protein, 10 aa, Homo sapiens
  misc_feature: Table A; Target 43129; HLA-A*25:01; MAGEB2; ENSG00000099399; CTA
QVPSSDPPRF

SEQ ID NO: 43130 - protein, 10 aa, Homo sapiens
  misc_feature: Table A; Target 43130; HLA-A*26:01; MAGEB2; ENSG00000099399; CTA
QVPSSDPPRF

SEQ ID NO: 43131 - protein, 9 aa, Homo sapiens
  misc_feature: Table A; Target 43131; HLA-C*01:02; MAGEB2; ENSG00000099399; CTA
RAPTTAAAA

SEQ ID NO: 43132 - protein, 10 aa, Homo sapiens
  misc_feature: Table A; Target 43132; HLA-C*01:02; MAGEB2; ENSG00000099399; CTA
RAPTTAAAAA

SEQ ID NO: 43133 - protein, 9 aa, Homo sapiens
  misc_feature: Table A; Target 43133; HLA-A*03:01; MAGEB2; ENSG00000099399; CTA
RAYAETSKM

SEQ ID NO: 43134 - protein, 9 aa, Homo sapiens
  misc_feature: Table A; Target 43134; HLA-A*32:01; MAGEB2; ENSG00000099399; CTA
RAYAETSKM

SEQ ID NO: 43135 - protein, 9 aa, Homo sapiens
  misc_feature: Table A; Target 43135; HLA-B*07:02; MAGEB2; ENSG00000099399; CTA
RAYAETSKM

SEQ ID NO: 43136 - protein, 9 aa, Homo sapiens
  misc_feature: Table A; Target 43136; HLA-B*15:01; MAGEB2; ENSG00000099399; CTA
RAYAETSKM

SEQ ID NO: 43137 - protein, 9 aa, Homo sapiens
  misc_feature: Table A; Target 43137; HLA-B*15:03; MAGEB2; ENSG00000099399; CTA
RAYAETSKM

SEQ ID NO: 43138 - protein, 9 aa, Homo sapiens
  misc_feature: Table A; Target 43138; HLA-B*46:01; MAGEB2; ENSG00000099399; CTA
RAYAETSKM

SEQ ID NO: 43139 - protein, 9 aa, Homo sapiens
  misc_feature: Table A; Target 43139; HLA-B*58:01; MAGEB2; ENSG00000099399; CTA
RAYAETSKM

SEQ ID NO: 43140 - protein, 9 aa, Homo sapiens
  misc_feature: Table A; Target 43140; HLA-C*01:02; MAGEB2; ENSG00000099399; CTA
RAYAETSKM

SEQ ID NO: 43141 - protein, 9 aa, Homo sapiens
  misc_feature: Table A; Target 43141; HLA-C*02:02; MAGEB2; ENSG00000099399; CTA
RAYAETSKM

SEQ ID NO: 43142 - protein, 9 aa, Homo sapiens
  misc_feature: Table A; Target 43142; HLA-C*03:03; MAGEB2; ENSG00000099399; CTA
RAYAETSKM

SEQ ID NO: 43143 - protein, 9 aa, Homo sapiens
  misc_feature: Table A; Target 43143; HLA-C*03:04; MAGEB2; ENSG00000099399; CTA
RAYAETSKM

SEQ ID NO: 43144 - protein, 9 aa, Homo sapiens
  misc_feature: Table A; Target 43144; HLA-C*05:01; MAGEB2; ENSG00000099399; CTA
RAYAETSKM

SEQ ID NO: 43145 - protein, 9 aa, Homo sapiens
  misc_feature: Table A; Target 43145; HLA-C*12:03; MAGEB2; ENSG00000099399; CTA
RAYAETSKM

SEQ ID NO: 43146 - protein, 9 aa, Homo sapiens
  misc_feature: Table A; Target 43146; HLA-C*16:02; MAGEB2; ENSG00000099399; CTA
RAYAETSKM

SEQ ID NO: 43147 - protein, 9 aa, Homo sapiens
  misc_feature: Table A; Target 43147; HLA-C*16:04; MAGEB2; ENSG00000099399; CTA
RAYAETSKM

SEQ ID NO: 43148 - protein, 10 aa, Homo sapiens
  misc_feature: Table A; Target 43148; HLA-A*03:01; MAGEB2; ENSG00000099399; CTA
RAYAETSKMK

SEQ ID NO: 43149 - protein, 9 aa, Homo sapiens
  misc_feature: Table A; Target 43149; HLA-B*37:01; MAGEB2; ENSG00000099399; CTA
RDETRGLNV

SEQ ID NO: 43150 - protein, 9 aa, Homo sapiens
  misc_feature: Table A; Target 43150; HLA-B*15:03; MAGEB2; ENSG00000099399; CTA
RKSGSLVQF

SEQ ID NO: 43151 - protein, 8 aa, Homo sapiens
  misc_feature: Table A; Target 43151; HLA-B*37:01; MAGEB2; ENSG00000099399; CTA
SDPPRFQF

SEQ ID NO: 43152 - protein, 9 aa, Homo sapiens
  misc_feature: Table A; Target 43152; HLA-B*37:01; MAGEB2; ENSG00000099399; CTA
SDPPRFQFL

SEQ ID NO: 43153 - protein, 9 aa, Homo sapiens
  misc_feature: Table A; Target 43153; HLA-B*44:03; MAGEB2; ENSG00000099399; CTA
SEDPLTRKS

SEQ ID NO: 43154 - protein, 8 aa, Homo sapiens
  misc_feature: Table A; Target 43154; HLA-A*30:01; MAGEB2; ENSG00000099399; CTA
SEGLSVVF

SEQ ID NO: 43155 - protein, 8 aa, Homo sapiens
  misc_feature: Table A; Target 43155; HLA-B*15:03; MAGEB2; ENSG00000099399; CTA
SEGLSVVF

SEQ ID NO: 43156 - protein, 8 aa, Homo sapiens
  misc_feature: Table A; Target 43156; HLA-B*18:01; MAGEB2; ENSG00000099399; CTA
SEGLSVVF

SEQ ID NO: 43157 - protein, 8 aa, Homo sapiens
  misc_feature: Table A; Target 43157; HLA-B*37:01; MAGEB2; ENSG00000099399; CTA
SEGLSVVF

SEQ ID NO: 43158 - protein, 8 aa, Homo sapiens
  misc_feature: Table A; Target 43158; HLA-B*40:01; MAGEB2; ENSG00000099399; CTA
SEGLSVVF

SEQ ID NO: 43159 - protein, 8 aa, Homo sapiens
  misc_feature: Table A; Target 43159; HLA-B*40:02; MAGEB2; ENSG00000099399; CTA
SEGLSVVF

SEQ ID NO: 43160 - protein, 8 aa, Homo sapiens
  misc_feature: Table A; Target 43160; HLA-B*44:02; MAGEB2; ENSG00000099399; CTA
SEGLSVVF

SEQ ID NO: 43161 - protein, 8 aa, Homo sapiens
  misc_feature: Table A; Target 43161; HLA-B*44:03; MAGEB2; ENSG00000099399; CTA
SEGLSVVF

SEQ ID NO: 43162 - protein, 8 aa, Homo sapiens
  misc_feature: Table A; Target 43162; HLA-B*49:01; MAGEB2; ENSG00000099399; CTA
SEGLSVVF

SEQ ID NO: 43163 - protein, 8 aa, Homo sapiens
  misc_feature: Table A; Target 43163; HLA-C*07:04; MAGEB2; ENSG00000099399; CTA
SEGLSVVF

SEQ ID NO: 43164 - protein, 8 aa, Homo sapiens
  misc_feature: Table A; Target 43164; HLA-C*16:04; MAGEB2; ENSG00000099399; CTA
SEGLSVVF

SEQ ID NO: 43165 - protein, 10 aa, Homo sapiens
  misc_feature: Table A; Target 43165; HLA-A*30:01; MAGEB2; ENSG00000099399; CTA
SEGLSVVFGL

SEQ ID NO: 43166 - protein, 10 aa, Homo sapiens
  misc_feature: Table A; Target 43166; HLA-B*40:01; MAGEB2; ENSG00000099399; CTA
SEGLSVVFGL

SEQ ID NO: 43167 - protein, 10 aa, Homo sapiens
  misc_feature: Table A; Target 43167; HLA-B*40:02; MAGEB2; ENSG00000099399; CTA
SEGLSVVFGL

SEQ ID NO: 43168 - protein, 10 aa, Homo sapiens
  misc_feature: Table A; Target 43168; HLA-B*44:02; MAGEB2; ENSG00000099399; CTA
SEGLSVVFGL

SEQ ID NO: 43169 - protein, 10 aa, Homo sapiens
  misc_feature: Table A; Target 43169; HLA-B*44:03; MAGEB2; ENSG00000099399; CTA
SEGLSVVFGL

SEQ ID NO: 43170 - protein, 10 aa, Homo sapiens
  misc_feature: Table A; Target 43170; HLA-A*02:04; MAGEB2; ENSG00000099399; CTA
SLLSSWDFPR

SEQ ID NO: 43171 - protein, 8 aa, Homo sapiens
  misc_feature: Table A; Target 43171; HLA-A*29:02; MAGEB2; ENSG00000099399; CTA
SLVQFLLY

SEQ ID NO: 43172 - protein, 9 aa, Homo sapiens
  misc_feature: Table A; Target 43172; HLA-A*03:01; MAGEB2; ENSG00000099399; CTA
SLVQFLLYK

SEQ ID NO: 43173 - protein, 10 aa, Homo sapiens
  misc_feature: Table A; Target 43173; HLA-A*29:02; MAGEB2; ENSG00000099399; CTA
SLVQFLLYKY

SEQ ID NO: 43174 - protein, 10 aa, Homo sapiens
  misc_feature: Table A; Target 43174; HLA-B*56:01; MAGEB2; ENSG00000099399; CTA
SPAAGIPQEP

SEQ ID NO: 43175 - protein, 9 aa, Homo sapiens
  misc_feature: Table A; Target 43175; HLA-A*33:03; MAGEB2; ENSG00000099399; CTA
SPSEDPLTR

SEQ ID NO: 43176 - protein, 9 aa, Homo sapiens
  misc_feature: Table A; Target 43176; HLA-A*68:01; MAGEB2; ENSG00000099399; CTA
SPSEDPLTR

SEQ ID NO: 43177 - protein, 9 aa, Homo sapiens
  misc_feature: Table A; Target 43177; HLA-B*07:02; MAGEB2; ENSG00000099399; CTA
SPSEDPLTR

SEQ ID NO: 43178 - protein, 9 aa, Homo sapiens
  misc_feature: Table A; Target 43178; HLA-B*35:01; MAGEB2; ENSG00000099399; CTA
SPSEDPLTR

SEQ ID NO: 43179 - protein, 9 aa, Homo sapiens
  misc_feature: Table A; Target 43179; HLA-B*35:03; MAGEB2; ENSG00000099399; CTA
SPSEDPLTR

SEQ ID NO: 43180 - protein, 9 aa, Homo sapiens
  misc_feature: Table A; Target 43180; HLA-B*56:01; MAGEB2; ENSG00000099399; CTA
SPSEDPLTR

SEQ ID NO: 43181 - protein, 9 aa, Homo sapiens
  misc_feature: Table A; Target 43181; HLA-C*07:06; MAGEB2; ENSG00000099399; CTA
SPSEDPLTR

SEQ ID NO: 43182 - protein, 10 aa, Homo sapiens
  misc_feature: Table A; Target 43182; HLA-A*03:02; MAGEB2; ENSG00000099399; CTA
SPSEDPLTRK

SEQ ID NO: 43183 - protein, 10 aa, Homo sapiens
  misc_feature: Table A; Target 43183; HLA-A*11:01; MAGEB2; ENSG00000099399; CTA
SPSEDPLTRK

SEQ ID NO: 43184 - protein, 10 aa, Homo sapiens
  misc_feature: Table A; Target 43184; HLA-B*56:01; MAGEB2; ENSG00000099399; CTA
SPSEDPLTRK

SEQ ID NO: 43185 - protein, 10 aa, Homo sapiens
  misc_feature: Table A; Target 43185; HLA-C*07:06; MAGEB2; ENSG00000099399; CTA
SPSEDPLTRK

SEQ ID NO: 43186 - protein, 9 aa, Homo sapiens
  misc_feature: Table A; Target 43186; HLA-A*01:01; MAGEB2; ENSG00000099399; CTA
SSDPPRFQF

SEQ ID NO: 43187 - protein, 9 aa, Homo sapiens
  misc_feature: Table A; Target 43187; HLA-A*02:07; MAGEB2; ENSG00000099399; CTA
SSDPPRFQF

SEQ ID NO: 43188 - protein, 9 aa, Homo sapiens
  misc_feature: Table A; Target 43188; HLA-A*32:01; MAGEB2; ENSG00000099399; CTA
SSDPPRFQF

SEQ ID NO: 43189 - protein, 9 aa, Homo sapiens
  misc_feature: Table A; Target 43189; HLA-B*57:01; MAGEB2; ENSG00000099399; CTA
SSDPPRFQF

SEQ ID NO: 43190 - protein, 9 aa, Homo sapiens
  misc_feature: Table A; Target 43190; HLA-B*58:01; MAGEB2; ENSG00000099399; CTA
SSDPPRFQF

SEQ ID NO: 43191 - protein, 9 aa, Homo sapiens
  misc_feature: Table A; Target 43191; HLA-C*05:01; MAGEB2; ENSG00000099399; CTA
SSDPPRFQF

SEQ ID NO: 43192 - protein, 9 aa, Homo sapiens
  misc_feature: Table A; Target 43192; HLA-C*16:01; MAGEB2; ENSG00000099399; CTA
SSDPPRFQF

SEQ ID NO: 43193 - protein, 11 aa, Homo sapiens
  misc_feature: Table A; Target 43193; HLA-B*57:01; MAGEB2; ENSG00000099399; CTA
SSDPPRFQFLW

SEQ ID NO: 43194 - protein, 9 aa, Homo sapiens
  misc_feature: Table A; Target 43194; HLA-A*03:02; MAGEB2; ENSG00000099399; CTA
SSQASTSTK

SEQ ID NO: 43195 - protein, 9 aa, Homo sapiens
  misc_feature: Table A; Target 43195; HLA-A*11:01; MAGEB2; ENSG00000099399; CTA
SSQASTSTK

SEQ ID NO: 43196 - protein, 9 aa, Homo sapiens
  misc_feature: Table A; Target 43196; HLA-C*07:06; MAGEB2; ENSG00000099399; CTA
SSQASTSTK

SEQ ID NO: 43197 - protein, 10 aa, Homo sapiens
  misc_feature: Table A; Target 43197; HLA-A*03:01; MAGEB2; ENSG00000099399; CTA
SSSQASTSTK

SEQ ID NO: 43198 - protein, 10 aa, Homo sapiens
  misc_feature: Table A; Target 43198; HLA-A*03:02; MAGEB2; ENSG00000099399; CTA
SSSQASTSTK

SEQ ID NO: 43199 - protein, 10 aa, Homo sapiens
  misc_feature: Table A; Target 43199; HLA-A*11:01; MAGEB2; ENSG00000099399; CTA
SSSQASTSTK

SEQ ID NO: 43200 - protein, 8 aa, Homo sapiens
  misc_feature: Table A; Target 43200; HLA-A*31:01; MAGEB2; ENSG00000099399; CTA
SSWDFPRR

SEQ ID NO: 43201 - protein, 9 aa, Homo sapiens
  misc_feature: Table A; Target 43201; HLA-A*02:01; MAGEB2; ENSG00000099399; CTA
SVFGEPWKL

SEQ ID NO: 43202 - protein, 9 aa, Homo sapiens
  misc_feature: Table A; Target 43202; HLA-A*02:03; MAGEB2; ENSG00000099399; CTA
SVFGEPWKL

SEQ ID NO: 43203 - protein, 9 aa, Homo sapiens
  misc_feature: Table A; Target 43203; HLA-A*02:04; MAGEB2; ENSG00000099399; CTA
SVFGEPWKL

SEQ ID NO: 43204 - protein, 9 aa, Homo sapiens
  misc_feature: Table A; Target 43204; HLA-A*02:07; MAGEB2; ENSG00000099399; CTA
SVFGEPWKL

SEQ ID NO: 43205 - protein, 9 aa, Homo sapiens
  misc_feature: Table A; Target 43205; HLA-A*68:02; MAGEB2; ENSG00000099399; CTA
SVFGEPWKL

SEQ ID NO: 43206 - protein, 9 aa, Homo sapiens
  misc_feature: Table A; Target 43206; HLA-B*13:02; MAGEB2; ENSG00000099399; CTA
SVFGEPWKL

SEQ ID NO: 43207 - protein, 9 aa, Homo sapiens
  misc_feature: Table A; Target 43207; HLA-C*02:02; MAGEB2; ENSG00000099399; CTA
SVFGEPWKL

SEQ ID NO: 43208 - protein, 11 aa, Homo sapiens
  misc_feature: Table A; Target 43208; HLA-C*07:04; MAGEB2; ENSG00000099399; CTA
SVSGGAASSSP

SEQ ID NO: 43209 - protein, 9 aa, Homo sapiens
  misc_feature: Table A; Target 43209; HLA-A*03:01; MAGEB2; ENSG00000099399; CTA
SVTKGEMLK

SEQ ID NO: 43210 - protein, 9 aa, Homo sapiens
  misc_feature: Table A; Target 43210; HLA-A*03:02; MAGEB2; ENSG00000099399; CTA
SVTKGEMLK

SEQ ID NO: 43211 - protein, 9 aa, Homo sapiens
  misc_feature: Table A; Target 43211; HLA-A*11:01; MAGEB2; ENSG00000099399; CTA
SVTKGEMLK

SEQ ID NO: 43212 - protein, 8 aa, Homo sapiens
  misc_feature: Table A; Target 43212; HLA-C*01:02; MAGEB2; ENSG00000099399; CTA
SVVFGLEL

SEQ ID NO: 43213 - protein, 8 aa, Homo sapiens
  misc_feature: Table A; Target 43213; HLA-C*03:03; MAGEB2; ENSG00000099399; CTA
SVVFGLEL

SEQ ID NO: 43214 - protein, 8 aa, Homo sapiens
  misc_feature: Table A; Target 43214; HLA-C*03:04; MAGEB2; ENSG00000099399; CTA
SVVFGLEL

SEQ ID NO: 43215 - protein, 10 aa, Homo sapiens
  misc_feature: Table A; Target 43215; HLA-A*03:02; MAGEB2; ENSG00000099399; CTA
SVVFGLELNK

SEQ ID NO: 43216 - protein, 10 aa, Homo sapiens
  misc_feature: Table A; Target 43216; HLA-A*11:01; MAGEB2; ENSG00000099399; CTA
SVVFGLELNK

SEQ ID NO: 43217 - protein, 10 aa, Homo sapiens
  misc_feature: Table A; Target 43217; HLA-B*27:02; MAGEB2; ENSG00000099399; CTA
SVVFGLELNK

SEQ ID NO: 43218 - protein, 11 aa, Homo sapiens
  misc_feature: Table A; Target 43218; HLA-A*68:02; MAGEB2; ENSG00000099399; CTA
SVVFGLELNKV

SEQ ID NO: 43219 - protein, 9 aa, Homo sapiens
  misc_feature: Table A; Target 43219; HLA-A*02:03; MAGEB2; ENSG00000099399; CTA
TAAAAAAGV

SEQ ID NO: 43220 - protein, 9 aa, Homo sapiens
  misc_feature: Table A; Target 43220; HLA-B*51:01; MAGEB2; ENSG00000099399; CTA
TAAAAAAGV

SEQ ID NO: 43221 - protein, 9 aa, Homo sapiens
  misc_feature: Table A; Target 43221; HLA-C*02:02; MAGEB2; ENSG00000099399; CTA
TAAAAAAGV

SEQ ID NO: 43222 - protein, 9 aa, Homo sapiens
  misc_feature: Table A; Target 43222; HLA-C*07:06; MAGEB2; ENSG00000099399; CTA
TAAAAAAGV

SEQ ID NO: 43223 - protein, 9 aa, Homo sapiens
  misc_feature: Table A; Target 43223; HLA-C*16:02; MAGEB2; ENSG00000099399; CTA
TAAAAAAGV

SEQ ID NO: 43224 - protein, 10 aa, Homo sapiens
  misc_feature: Table A; Target 43224; HLA-B*44:02; MAGEB2; ENSG00000099399; CTA
TDEESLLSSW

SEQ ID NO: 43225 - protein, 8 aa, Homo sapiens
  misc_feature: Table A; Target 43225; HLA-B*18:01; MAGEB2; ENSG00000099399; CTA
TEEEIWEF

SEQ ID NO: 43226 - protein, 8 aa, Homo sapiens
  misc_feature: Table A; Target 43226; HLA-B*08:01; MAGEB2; ENSG00000099399; CTA
TFIDKVDL

SEQ ID NO: 43227 - protein, 8 aa, Homo sapiens
  misc_feature: Table A; Target 43227; HLA-C*14:02; MAGEB2; ENSG00000099399; CTA
TFIDKVDL

SEQ ID NO: 43228 - protein, 9 aa, Homo sapiens
  misc_feature: Table A; Target 43228; HLA-B*15:03; MAGEB2; ENSG00000099399; CTA
TKDLVQEKY

SEQ ID NO: 43229 - protein, 9 aa, Homo sapiens
  misc_feature: Table A; Target 43229; HLA-B*27:05; MAGEB2; ENSG00000099399; CTA
TKSPSEDPL

SEQ ID NO: 43230 - protein, 9 aa, Homo sapiens
  misc_feature: Table A; Target 43230; HLA-B*38:01; MAGEB2; ENSG00000099399; CTA
TKSPSEDPL

SEQ ID NO: 43231 - protein, 9 aa, Homo sapiens
  misc_feature: Table A; Target 43231; HLA-B*39:01; MAGEB2; ENSG00000099399; CTA
TKSPSEDPL

SEQ ID NO: 43232 - protein, 9 aa, Homo sapiens
  misc_feature: Table A; Target 43232; HLA-B*35:01; MAGEB2; ENSG00000099399; CTA
TPCAFPTHY

SEQ ID NO: 43233 - protein, 9 aa, Homo sapiens
  misc_feature: Table A; Target 43233; HLA-C*06:02; MAGEB2; ENSG00000099399; CTA
TRGLNVPQV

SEQ ID NO: 43234 - protein, 9 aa, Homo sapiens
  misc_feature: Table A; Target 43234; HLA-B*57:01; MAGEB2; ENSG00000099399; CTA
TSKMKVLEF

SEQ ID NO: 43235 - protein, 9 aa, Homo sapiens
  misc_feature: Table A; Target 43235; HLA-C*07:01; MAGEB2; ENSG00000099399; CTA
TSKMKVLEF

SEQ ID NO: 43236 - protein, 10 aa, Homo sapiens
  misc_feature: Table A; Target 43236; HLA-C*06:02; MAGEB2; ENSG00000099399; CTA
TTAAAAAAGV

SEQ ID NO: 43237 - protein, 10 aa, Homo sapiens
  misc_feature: Table A; Target 43237; HLA-C*07:06; MAGEB2; ENSG00000099399; CTA
TTAAAAAAGV

SEQ ID NO: 43238 - protein, 10 aa, Homo sapiens
  misc_feature: Table A; Target 43238; HLA-A*26:01; MAGEB2; ENSG00000099399; CTA
TTPCAFPTHY

SEQ ID NO: 43239 - protein, 8 aa, Homo sapiens
  misc_feature: Table A; Target 43239; HLA-C*06:02; MAGEB2; ENSG00000099399; CTA
TYTFIDKV

SEQ ID NO: 43240 - protein, 9 aa, Homo sapiens
  misc_feature: Table A; Target 43240; HLA-B*40:01; MAGEB2; ENSG00000099399; CTA
VDLTDEESL

SEQ ID NO: 43241 - protein, 8 aa, Homo sapiens
  misc_feature: Table A; Target 43241; HLA-A*23:01; MAGEB2; ENSG00000099399; CTA
VFGEPWKL

SEQ ID NO: 43242 - protein, 8 aa, Homo sapiens
  misc_feature: Table A; Target 43242; HLA-A*24:02; MAGEB2; ENSG00000099399; CTA
VFGEPWKL

SEQ ID NO: 43243 - protein, 9 aa, Homo sapiens
  misc_feature: Table A; Target 43243; HLA-A*24:02; MAGEB2; ENSG00000099399; CTA
VFGEPWKLI

SEQ ID NO: 43244 - protein, 9 aa, Homo sapiens
  misc_feature: Table A; Target 43244; HLA-B*46:01; MAGEB2; ENSG00000099399; CTA
VIFLNGNSA

SEQ ID NO: 43245 - protein, 9 aa, Homo sapiens
  misc_feature: Table A; Target 43245; HLA-B*54:01; MAGEB2; ENSG00000099399; CTA
VIFLNGNSA

SEQ ID NO: 43246 - protein, 9 aa, Homo sapiens
  misc_feature: Table A; Target 43246; HLA-B*56:01; MAGEB2; ENSG00000099399; CTA
VIFLNGNSA

SEQ ID NO: 43247 - protein, 9 aa, Homo sapiens
  misc_feature: Table A; Target 43247; HLA-C*01:02; MAGEB2; ENSG00000099399; CTA
VIFLNGNSA

SEQ ID NO: 43248 - protein, 8 aa, Homo sapiens
  misc_feature: Table A; Target 43248; HLA-B*39:01; MAGEB2; ENSG00000099399; CTA
VNPNGHTY

SEQ ID NO: 43249 - protein, 8 aa, Homo sapiens
  misc_feature: Table A; Target 43249; HLA-B*46:01; MAGEB2; ENSG00000099399; CTA
VNPNGHTY

SEQ ID NO: 43250 - protein, 8 aa, Homo sapiens
  misc_feature: Table A; Target 43250; HLA-C*01:02; MAGEB2; ENSG00000099399; CTA
VNPNGHTY

SEQ ID NO: 43251 - protein, 8 aa, Homo sapiens
  misc_feature: Table A; Target 43251; HLA-C*04:01; MAGEB2; ENSG00000099399; CTA
VNPNGHTY

SEQ ID NO: 43252 - protein, 8 aa, Homo sapiens
  misc_feature: Table A; Target 43252; HLA-C*07:01; MAGEB2; ENSG00000099399; CTA
VNPNGHTY

SEQ ID NO: 43253 - protein, 8 aa, Homo sapiens
  misc_feature: Table A; Target 43253; HLA-C*14:02; MAGEB2; ENSG00000099399; CTA
VNPNGHTY

SEQ ID NO: 43254 - protein, 8 aa, Homo sapiens
  misc_feature: Table A; Target 43254; HLA-C*16:01; MAGEB2; ENSG00000099399; CTA
VNPNGHTY

SEQ ID NO: 43255 - protein, 8 aa, Homo sapiens
  misc_feature: Table A; Target 43255; HLA-C*16:02; MAGEB2; ENSG00000099399; CTA
VNPNGHTY

SEQ ID NO: 43256 - protein, 10 aa, Homo sapiens
  misc_feature: Table A; Target 43256; HLA-A*23:01; MAGEB2; ENSG00000099399; CTA
VNPNGHTYTF

SEQ ID NO: 43257 - protein, 10 aa, Homo sapiens
  misc_feature: Table A; Target 43257; HLA-A*24:02; MAGEB2; ENSG00000099399; CTA
VNPNGHTYTF

SEQ ID NO: 43258 - protein, 10 aa, Homo sapiens
  misc_feature: Table A; Target 43258; HLA-A*29:02; MAGEB2; ENSG00000099399; CTA
VNPNGHTYTF

SEQ ID NO: 43259 - protein, 10 aa, Homo sapiens
  misc_feature: Table A; Target 43259; HLA-A*33:01; MAGEB2; ENSG00000099399; CTA
VNPNGHTYTF

SEQ ID NO: 43260 - protein, 10 aa, Homo sapiens
  misc_feature: Table A; Target 43260; HLA-C*07:02; MAGEB2; ENSG00000099399; CTA
VNPNGHTYTF

SEQ ID NO: 43261 - protein, 9 aa, Homo sapiens
  misc_feature: Table A; Target 43261; HLA-A*23:01; MAGEB2; ENSG00000099399; CTA
VPSSDPPRF

SEQ ID NO: 43262 - protein, 9 aa, Homo sapiens
  misc_feature: Table A; Target 43262; HLA-A*24:02; MAGEB2; ENSG00000099399; CTA
VPSSDPPRF

SEQ ID NO: 43263 - protein, 9 aa, Homo sapiens
  misc_feature: Table A; Target 43263; HLA-B*07:02; MAGEB2; ENSG00000099399; CTA
VPSSDPPRF

SEQ ID NO: 43264 - protein, 9 aa, Homo sapiens
  misc_feature: Table A; Target 43264; HLA-B*35:01; MAGEB2; ENSG00000099399; CTA
VPSSDPPRF

SEQ ID NO: 43265 - protein, 9 aa, Homo sapiens
  misc_feature: Table A; Target 43265; HLA-B*35:03; MAGEB2; ENSG00000099399; CTA
VPSSDPPRF

SEQ ID NO: 43266 - protein, 9 aa, Homo sapiens
  misc_feature: Table A; Target 43266; HLA-B*38:01; MAGEB2; ENSG00000099399; CTA
VPSSDPPRF

SEQ ID NO: 43267 - protein, 9 aa, Homo sapiens
  misc_feature: Table A; Target 43267; HLA-B*51:01; MAGEB2; ENSG00000099399; CTA
VPSSDPPRF

SEQ ID NO: 43268 - protein, 9 aa, Homo sapiens
  misc_feature: Table A; Target 43268; HLA-B*55:01; MAGEB2; ENSG00000099399; CTA
VPSSDPPRF

SEQ ID NO: 43269 - protein, 9 aa, Homo sapiens
  misc_feature: Table A; Target 43269; HLA-C*03:03; MAGEB2; ENSG00000099399; CTA
VPSSDPPRF

SEQ ID NO: 43270 - protein, 9 aa, Homo sapiens
  misc_feature: Table A; Target 43270; HLA-C*05:01; MAGEB2; ENSG00000099399; CTA
VPSSDPPRF

SEQ ID NO: 43271 - protein, 9 aa, Homo sapiens
  misc_feature: Table A; Target 43271; HLA-C*07:02; MAGEB2; ENSG00000099399; CTA
VPSSDPPRF

SEQ ID NO: 43272 - protein, 9 aa, Homo sapiens
  misc_feature: Table A; Target 43272; HLA-C*16:01; MAGEB2; ENSG00000099399; CTA
VPSSDPPRF

SEQ ID NO: 43273 - protein, 9 aa, Homo sapiens
  misc_feature: Table A; Target 43273; HLA-C*16:02; MAGEB2; ENSG00000099399; CTA
VPSSDPPRF

SEQ ID NO: 43274 - protein, 11 aa, Homo sapiens
  misc_feature: Table A; Target 43274; HLA-B*35:01; MAGEB2; ENSG00000099399; CTA
VPSSDPPRFQF

SEQ ID NO: 43275 - protein, 8 aa, Homo sapiens
  misc_feature: Table A; Target 43275; HLA-C*16:01; MAGEB2; ENSG00000099399; CTA
VSSTKSKK

SEQ ID NO: 43276 - protein, 8 aa, Homo sapiens
  misc_feature: Table A; Target 43276; HLA-C*06:02; MAGEB2; ENSG00000099399; CTA
VTKGEMLK

SEQ ID NO: 43277 - protein, 9 aa, Homo sapiens
  misc_feature: Table A; Target 43277; HLA-A*02:03; MAGEB2; ENSG00000099399; CTA
VTKGEMLKI

SEQ ID NO: 43278 - protein, 9 aa, Homo sapiens
  misc_feature: Table A; Target 43278; HLA-B*13:02; MAGEB2; ENSG00000099399; CTA
VTKGEMLKI

SEQ ID NO: 43279 - protein, 9 aa, Homo sapiens
  misc_feature: Table A; Target 43279; HLA-B*40:02; MAGEB2; ENSG00000099399; CTA
VTKGEMLKI

SEQ ID NO: 43280 - protein, 9 aa, Homo sapiens
  misc_feature: Table A; Target 43280; HLA-C*06:02; MAGEB2; ENSG00000099399; CTA
VTKGEMLKI

SEQ ID NO: 43281 - protein, 9 aa, Homo sapiens
  misc_feature: Table A; Target 43281; HLA-A*03:01; MAGEB2; ENSG00000099399; CTA
VVFGLELNK

SEQ ID NO: 43282 - protein, 9 aa, Homo sapiens
  misc_feature: Table A; Target 43282; HLA-A*03:02; MAGEB2; ENSG00000099399; CTA
VVFGLELNK

SEQ ID NO: 43283 - protein, 9 aa, Homo sapiens
  misc_feature: Table A; Target 43283; HLA-A*11:01; MAGEB2; ENSG00000099399; CTA
VVFGLELNK

SEQ ID NO: 43284 - protein, 9 aa, Homo sapiens
  misc_feature: Table A; Target 43284; HLA-A*29:02; MAGEB2; ENSG00000099399; CTA
VVFGLELNK

SEQ ID NO: 43285 - protein, 9 aa, Homo sapiens
  misc_feature: Table A; Target 43285; HLA-B*27:02; MAGEB2; ENSG00000099399; CTA
VVFGLELNK

SEQ ID NO: 43286 - protein, 9 aa, Homo sapiens
  misc_feature: Table A; Target 43286; HLA-B*27:05; MAGEB2; ENSG00000099399; CTA
VVFGLELNK

SEQ ID NO: 43287 - protein, 10 aa, Homo sapiens
  misc_feature: Table A; Target 43287; HLA-A*02:01; MAGEB2; ENSG00000099399; CTA
VVFGLELNKV

SEQ ID NO: 43288 - protein, 10 aa, Homo sapiens
  misc_feature: Table A; Target 43288; HLA-A*02:03; MAGEB2; ENSG00000099399; CTA
VVFGLELNKV

SEQ ID NO: 43289 - protein, 10 aa, Homo sapiens
  misc_feature: Table A; Target 43289; HLA-A*02:04; MAGEB2; ENSG00000099399; CTA
VVFGLELNKV

SEQ ID NO: 43290 - protein, 10 aa, Homo sapiens
  misc_feature: Table A; Target 43290; HLA-A*02:07; MAGEB2; ENSG00000099399; CTA
VVFGLELNKV

SEQ ID NO: 43291 - protein, 10 aa, Homo sapiens
  misc_feature: Table A; Target 43291; HLA-A*68:02; MAGEB2; ENSG00000099399; CTA
VVFGLELNKV

SEQ ID NO: 43292 - protein, 10 aa, Homo sapiens
  misc_feature: Table A; Target 43292; HLA-C*02:02; MAGEB2; ENSG00000099399; CTA
VVFGLELNKV

SEQ ID NO: 43293 - protein, 9 aa, Homo sapiens
  misc_feature: Table A; Target 43293; HLA-A*02:01; MAGEB2; ENSG00000099399; CTA
VYDGEEHSV

SEQ ID NO: 43294 - protein, 9 aa, Homo sapiens
  misc_feature: Table A; Target 43294; HLA-A*02:07; MAGEB2; ENSG00000099399; CTA
VYDGEEHSV

SEQ ID NO: 43295 - protein, 9 aa, Homo sapiens
  misc_feature: Table A; Target 43295; HLA-A*23:01; MAGEB2; ENSG00000099399; CTA
VYDGEEHSV

SEQ ID NO: 43296 - protein, 9 aa, Homo sapiens
  misc_feature: Table A; Target 43296; HLA-A*24:02; MAGEB2; ENSG00000099399; CTA
VYDGEEHSV

SEQ ID NO: 43297 - protein, 9 aa, Homo sapiens
  misc_feature: Table A; Target 43297; HLA-A*32:01; MAGEB2; ENSG00000099399; CTA
VYDGEEHSV

SEQ ID NO: 43298 - protein, 9 aa, Homo sapiens
  misc_feature: Table A; Target 43298; HLA-B*35:01; MAGEB2; ENSG00000099399; CTA
VYDGEEHSV

SEQ ID NO: 43299 - protein, 9 aa, Homo sapiens
  misc_feature: Table A; Target 43299; HLA-B*35:03; MAGEB2; ENSG00000099399; CTA
VYDGEEHSV

SEQ ID NO: 43300 - protein, 9 aa, Homo sapiens
  misc_feature: Table A; Target 43300; HLA-B*38:01; MAGEB2; ENSG00000099399; CTA
VYDGEEHSV

SEQ ID NO: 43301 - protein, 9 aa, Homo sapiens
  misc_feature: Table A; Target 43301; HLA-B*39:01; MAGEB2; ENSG00000099399; CTA
VYDGEEHSV

SEQ ID NO: 43302 - protein, 9 aa, Homo sapiens
  misc_feature: Table A; Target 43302; HLA-B*55:01; MAGEB2; ENSG00000099399; CTA
VYDGEEHSV

SEQ ID NO: 43303 - protein, 9 aa, Homo sapiens
  misc_feature: Table A; Target 43303; HLA-C*03:04; MAGEB2; ENSG00000099399; CTA
VYDGEEHSV

SEQ ID NO: 43304 - protein, 9 aa, Homo sapiens
  misc_feature: Table A; Target 43304; HLA-C*04:01; MAGEB2; ENSG00000099399; CTA
VYDGEEHSV

SEQ ID NO: 43305 - protein, 9 aa, Homo sapiens
  misc_feature: Table A; Target 43305; HLA-C*05:01; MAGEB2; ENSG00000099399; CTA
VYDGEEHSV

SEQ ID NO: 43306 - protein, 9 aa, Homo sapiens
  misc_feature: Table A; Target 43306; HLA-C*07:04; MAGEB2; ENSG00000099399; CTA
VYDGEEHSV

SEQ ID NO: 43307 - protein, 9 aa, Homo sapiens
  misc_feature: Table A; Target 43307; HLA-C*14:02; MAGEB2; ENSG00000099399; CTA
VYDGEEHSV

SEQ ID NO: 43308 - protein, 9 aa, Homo sapiens
  misc_feature: Table A; Target 43308; HLA-C*16:02; MAGEB2; ENSG00000099399; CTA
VYDGEEHSV

SEQ ID NO: 43309 - protein, 10 aa, Homo sapiens
  misc_feature: Table A; Target 43309; HLA-A*23:01; MAGEB2; ENSG00000099399; CTA
VYDGEEHSVF

SEQ ID NO: 43310 - protein, 10 aa, Homo sapiens
  misc_feature: Table A; Target 43310; HLA-A*24:02; MAGEB2; ENSG00000099399; CTA
VYDGEEHSVF

SEQ ID NO: 43311 - protein, 10 aa, Homo sapiens
  misc_feature: Table A; Target 43311; HLA-B*35:01; MAGEB2; ENSG00000099399; CTA
VYDGEEHSVF

SEQ ID NO: 43312 - protein, 10 aa, Homo sapiens
  misc_feature: Table A; Target 43312; HLA-B*35:03; MAGEB2; ENSG00000099399; CTA
VYDGEEHSVF

SEQ ID NO: 43313 - protein, 10 aa, Homo sapiens
  misc_feature: Table A; Target 43313; HLA-B*38:01; MAGEB2; ENSG00000099399; CTA
VYDGEEHSVF

SEQ ID NO: 43314 - protein, 10 aa, Homo sapiens
  misc_feature: Table A; Target 43314; HLA-B*55:01; MAGEB2; ENSG00000099399; CTA
VYDGEEHSVF

SEQ ID NO: 43315 - protein, 10 aa, Homo sapiens
  misc_feature: Table A; Target 43315; HLA-C*04:01; MAGEB2; ENSG00000099399; CTA
VYDGEEHSVF

SEQ ID NO: 43316 - protein, 10 aa, Homo sapiens
  misc_feature: Table A; Target 43316; HLA-C*05:01; MAGEB2; ENSG00000099399; CTA
VYDGEEHSVF

SEQ ID NO: 43317 - protein, 9 aa, Homo sapiens
  misc_feature: Table A; Target 43317; HLA-B*49:01; MAGEB2; ENSG00000099399; CTA
WEFLNMLGV

SEQ ID NO: 43318 - protein, 9 aa, Homo sapiens
  misc_feature: Table A; Target 43318; HLA-A*01:01; MAGEB2; ENSG00000099399; CTA
YAETSKMKV

SEQ ID NO: 43319 - protein, 9 aa, Homo sapiens
  misc_feature: Table A; Target 43319; HLA-B*51:01; MAGEB2; ENSG00000099399; CTA
YAETSKMKV

SEQ ID NO: 43320 - protein, 9 aa, Homo sapiens
  misc_feature: Table A; Target 43320; HLA-C*05:01; MAGEB2; ENSG00000099399; CTA
YAETSKMKV

SEQ ID NO: 43321 - protein, 9 aa, Homo sapiens
  misc_feature: Table A; Target 43321; HLA-C*16:02; MAGEB2; ENSG00000099399; CTA
YAETSKMKV

SEQ ID NO: 43322 - protein, 8 aa, Homo sapiens
  misc_feature: Table A; Target 43322; HLA-B*37:01; MAGEB2; ENSG00000099399; CTA
YDGEEHSV

SEQ ID NO: 43323 - protein, 8 aa, Homo sapiens
  misc_feature: Table A; Target 43323; HLA-B*40:02; MAGEB2; ENSG00000099399; CTA
YDGEEHSV

SEQ ID NO: 43324 - protein, 8 aa, Homo sapiens
  misc_feature: Table A; Target 43324; HLA-C*06:02; MAGEB2; ENSG00000099399; CTA
YDGEEHSV

SEQ ID NO: 43325 - protein, 8 aa, Homo sapiens
  misc_feature: Table A; Target 43325; HLA-C*07:01; MAGEB2; ENSG00000099399; CTA
YDGEEHSV

SEQ ID NO: 43326 - protein, 8 aa, Homo sapiens
  misc_feature: Table A; Target 43326; HLA-C*07:04; MAGEB2; ENSG00000099399; CTA
YDGEEHSV

SEQ ID NO: 43327 - protein, 8 aa, Homo sapiens
  misc_feature: Table A; Target 43327; HLA-C*12:03; MAGEB2; ENSG00000099399; CTA
YDGEEHSV

SEQ ID NO: 43328 - protein, 8 aa, Homo sapiens
  misc_feature: Table A; Target 43328; HLA-C*16:02; MAGEB2; ENSG00000099399; CTA
YDGEEHSV

SEQ ID NO: 43329 - protein, 9 aa, Homo sapiens
  misc_feature: Table A; Target 43329; HLA-B*18:01; MAGEB2; ENSG00000099399; CTA
YDGEEHSVF

SEQ ID NO: 43330 - protein, 9 aa, Homo sapiens
  misc_feature: Table A; Target 43330; HLA-B*37:01; MAGEB2; ENSG00000099399; CTA
YDGEEHSVF

SEQ ID NO: 43331 - protein, 9 aa, Homo sapiens
  misc_feature: Table A; Target 43331; HLA-B*38:01; MAGEB2; ENSG00000099399; CTA
YDGEEHSVF

SEQ ID NO: 43332 - protein, 9 aa, Homo sapiens
  misc_feature: Table A; Target 43332; HLA-C*12:03; MAGEB2; ENSG00000099399; CTA
YDGEEHSVF

SEQ ID NO: 43333 - protein, 9 aa, Homo sapiens
  misc_feature: Table A; Target 43333; HLA-A*68:02; MAGEB2; ENSG00000099399; CTA
YTFIDKVDL

SEQ ID NO: 43334 - protein, 9 aa, Homo sapiens
  misc_feature: Table A; Target 43334; HLA-C*07:04; MAGEB2; ENSG00000099399; CTA
YTFIDKVDL

SEQ ID NO: 43335 - protein, 9 aa, Homo sapiens
  misc_feature: Table A; Target 43335; HLA-B*44:02; MAGEB2,MAGEB4; ENSG00000099399,ENSG00000120289; CTA,CTA
EEIWEFLNM

SEQ ID NO: 43336 - protein, 9 aa, Homo sapiens
  misc_feature: Table A; Target 43336; HLA-B*44:03; MAGEB2,MAGEB4; ENSG00000099399,ENSG00000120289; CTA,CTA
EEIWEFLNM

SEQ ID NO: 43337 - protein, 9 aa, Homo sapiens
  misc_feature: Table A; Target 43337; HLA-A*02:07; MAGEB2,MAGEB4; ENSG00000099399,ENSG00000120289; CTA,CTA
EIWEFLNML

SEQ ID NO: 43338 - protein, 9 aa, Homo sapiens
  misc_feature: Table A; Target 43338; HLA-A*68:02; MAGEB2,MAGEB4; ENSG00000099399,ENSG00000120289; CTA,CTA
EIWEFLNML

SEQ ID NO: 43339 - protein, 10 aa, Homo sapiens
  misc_feature: Table A; Target 43339; HLA-A*25:01; MAGEB2,MAGEB4; ENSG00000099399,ENSG00000120289; CTA,CTA
ETSKMKVLEF

SEQ ID NO: 43340 - protein, 10 aa, Homo sapiens
  misc_feature: Table A; Target 43340; HLA-A*26:01; MAGEB2,MAGEB4; ENSG00000099399,ENSG00000120289; CTA,CTA
ETSKMKVLEF

SEQ ID NO: 43341 - protein, 9 aa, Homo sapiens
  misc_feature: Table A; Target 43341; HLA-A*02:01; MAGEB2,MAGEB4; ENSG00000099399,ENSG00000120289; CTA,CTA
KVLEFLAKV

SEQ ID NO: 43342 - protein, 9 aa, Homo sapiens
  misc_feature: Table A; Target 43342; HLA-A*02:03; MAGEB2,MAGEB4; ENSG00000099399,ENSG00000120289; CTA,CTA
KVLEFLAKV

SEQ ID NO: 43343 - protein, 9 aa, Homo sapiens
  misc_feature: Table A; Target 43343; HLA-A*02:04; MAGEB2,MAGEB4; ENSG00000099399,ENSG00000120289; CTA,CTA
KVLEFLAKV

SEQ ID NO: 43344 - protein, 9 aa, Homo sapiens
  misc_feature: Table A; Target 43344; HLA-A*02:07; MAGEB2,MAGEB4; ENSG00000099399,ENSG00000120289; CTA,CTA
KVLEFLAKV

SEQ ID NO: 43345 - protein, 9 aa, Homo sapiens
  misc_feature: Table A; Target 43345; HLA-A*31:01; MAGEB2,MAGEB4; ENSG00000099399,ENSG00000120289; CTA,CTA
KVLEFLAKV

SEQ ID NO: 43346 - protein, 9 aa, Homo sapiens
  misc_feature: Table A; Target 43346; HLA-A*68:02; MAGEB2,MAGEB4; ENSG00000099399,ENSG00000120289; CTA,CTA
KVLEFLAKV

SEQ ID NO: 43347 - protein, 9 aa, Homo sapiens
  misc_feature: Table A; Target 43347; HLA-C*02:02; MAGEB2,MAGEB4; ENSG00000099399,ENSG00000120289; CTA,CTA
KVLEFLAKV

SEQ ID NO: 43348 - protein, 9 aa, Homo sapiens
  misc_feature: Table A; Target 43348; HLA-A*29:02; MAGEB2,MAGEB4; ENSG00000099399,ENSG00000120289; CTA,CTA
LVQFLLYKY

SEQ ID NO: 43349 - protein, 9 aa, Homo sapiens
  misc_feature: Table A; Target 43349; HLA-A*30:02; MAGEB2,MAGEB4; ENSG00000099399,ENSG00000120289; CTA,CTA
LVQFLLYKY

SEQ ID NO: 43350 - protein, 8 aa, Homo sapiens
  misc_feature: Table A; Target 43350; HLA-B*15:03; MAGEB2,MAGEB4; ENSG00000099399,ENSG00000120289; CTA,CTA
SKMKVLEF

SEQ ID NO: 43351 - protein, 9 aa, Homo sapiens
  misc_feature: Table A; Target 43351; HLA-B*08:01; MAGEB2,MAGEB4; ENSG00000099399,ENSG00000120289; CTA,CTA
TSKMKVLEF

SEQ ID NO: 43352 - protein, 8 aa, Homo sapiens
  misc_feature: Table A; Target 43352; HLA-B*15:01; MAGEB2,MAGEB4; ENSG00000099399,ENSG00000120289; CTA,CTA
VQFLLYKY

SEQ ID NO: 43353 - protein, 8 aa, Homo sapiens
  misc_feature: Table A; Target 43353; HLA-B*15:03; MAGEB2,MAGEB4; ENSG00000099399,ENSG00000120289; CTA,CTA
VQFLLYKY

SEQ ID NO: 43354 - protein, 8 aa, Homo sapiens
  misc_feature: Table A; Target 43354; HLA-B*18:01; MAGEB2,MAGEB4; ENSG00000099399,ENSG00000120289; CTA,CTA
VQFLLYKY

SEQ ID NO: 43355 - protein, 9 aa, Homo sapiens
  misc_feature: Table A; Target 43355; HLA-C*12:03; MAGEB4; ENSG00000120289; CTA
AAAAMSCTG

SEQ ID NO: 43356 - protein, 9 aa, Homo sapiens
  misc_feature: Table A; Target 43356; HLA-B*07:02; MAGEB4; ENSG00000120289; CTA
AARRGTTAM

SEQ ID NO: 43357 - protein, 9 aa, Homo sapiens
  misc_feature: Table A; Target 43357; HLA-B*46:01; MAGEB4; ENSG00000120289; CTA
AARRGTTAM

SEQ ID NO: 43358 - protein, 9 aa, Homo sapiens
  misc_feature: Table A; Target 43358; HLA-C*03:04; MAGEB4; ENSG00000120289; CTA
AARRGTTAM

SEQ ID NO: 43359 - protein, 9 aa, Homo sapiens
  misc_feature: Table A; Target 43359; HLA-C*07:02; MAGEB4; ENSG00000120289; CTA
AARRGTTAM

SEQ ID NO: 43360 - protein, 9 aa, Homo sapiens
  misc_feature: Table A; Target 43360; HLA-B*37:01; MAGEB4; ENSG00000120289; CTA
AEMLKIISK

SEQ ID NO: 43361 - protein, 9 aa, Homo sapiens
  misc_feature: Table A; Target 43361; HLA-B*40:02; MAGEB4; ENSG00000120289; CTA
AEMLKIISK

SEQ ID NO: 43362 - protein, 9 aa, Homo sapiens
  misc_feature: Table A; Target 43362; HLA-B*44:02; MAGEB4; ENSG00000120289; CTA
AEMLKIISK

SEQ ID NO: 43363 - protein, 9 aa, Homo sapiens
  misc_feature: Table A; Target 43363; HLA-B*44:03; MAGEB4; ENSG00000120289; CTA
AEMLKIISK

SEQ ID NO: 43364 - protein, 9 aa, Homo sapiens
  misc_feature: Table A; Target 43364; HLA-B*49:01; MAGEB4; ENSG00000120289; CTA
AEMLKIISK

SEQ ID NO: 43365 - protein, 11 aa, Homo sapiens
  misc_feature: Table A; Target 43365; HLA-B*44:02; MAGEB4; ENSG00000120289; CTA
AEMLKIISKKY

SEQ ID NO: 43366 - protein, 11 aa, Homo sapiens
  misc_feature: Table A; Target 43366; HLA-B*44:03; MAGEB4; ENSG00000120289; CTA
AEMLKIISKKY

SEQ ID NO: 43367 - protein, 9 aa, Homo sapiens
  misc_feature: Table A; Target 43367; HLA-A*32:01; MAGEB4; ENSG00000120289; CTA
AGARPRVAA

SEQ ID NO: 43368 - protein, 9 aa, Homo sapiens
  misc_feature: Table A; Target 43368; HLA-B*54:01; MAGEB4; ENSG00000120289; CTA
AGARPRVAA

SEQ ID NO: 43369 - protein, 9 aa, Homo sapiens
  misc_feature: Table A; Target 43369; HLA-B*56:01; MAGEB4; ENSG00000120289; CTA
AGARPRVAA

SEQ ID NO: 43370 - protein, 9 aa, Homo sapiens
  misc_feature: Table A; Target 43370; HLA-C*16:01; MAGEB4; ENSG00000120289; CTA
AGARPRVAA

SEQ ID NO: 43371 - protein, 11 aa, Homo sapiens
  misc_feature: Table A; Target 43371; HLA-B*15:03; MAGEB4; ENSG00000120289; CTA
AKVNDTTPNNF

SEQ ID NO: 43372 - protein, 9 aa, Homo sapiens
  misc_feature: Table A; Target 43372; HLA-A*02:03; MAGEB4; ENSG00000120289; CTA
ALKEVNPTT

SEQ ID NO: 43373 - protein, 9 aa, Homo sapiens
  misc_feature: Table A; Target 43373; HLA-A*32:01; MAGEB4; ENSG00000120289; CTA
ALKEVNPTT

SEQ ID NO: 43374 - protein, 9 aa, Homo sapiens
  misc_feature: Table A; Target 43374; HLA-B*55:01; MAGEB4; ENSG00000120289; CTA
ALKEVNPTT

SEQ ID NO: 43375 - protein, 9 aa, Homo sapiens
  misc_feature: Table A; Target 43375; HLA-C*16:02; MAGEB4; ENSG00000120289; CTA
ALKEVNPTT

SEQ ID NO: 43376 - protein, 10 aa, Homo sapiens
  misc_feature: Table A; Target 43376; HLA-A*02:03; MAGEB4; ENSG00000120289; CTA
ALKEVNPTTH

SEQ ID NO: 43377 - protein, 10 aa, Homo sapiens
  misc_feature: Table A; Target 43377; HLA-A*03:01; MAGEB4; ENSG00000120289; CTA
ALKEVNPTTH

SEQ ID NO: 43378 - protein, 10 aa, Homo sapiens
  misc_feature: Table A; Target 43378; HLA-B*15:01; MAGEB4; ENSG00000120289; CTA
ALKEVNPTTH

SEQ ID NO: 43379 - protein, 10 aa, Homo sapiens
  misc_feature: Table A; Target 43379; HLA-B*46:01; MAGEB4; ENSG00000120289; CTA
ALKEVNPTTH

SEQ ID NO: 43380 - protein, 8 aa, Homo sapiens
  misc_feature: Table A; Target 43380; HLA-A*31:01; MAGEB4; ENSG00000120289; CTA
AMTSAYSR

SEQ ID NO: 43381 - protein, 10 aa, Homo sapiens
  misc_feature: Table A; Target 43381; HLA-C*06:02; MAGEB4; ENSG00000120289; CTA
ARRGTTAMTS

SEQ ID NO: 43382 - protein, 9 aa, Homo sapiens
  misc_feature: Table A; Target 43382; HLA-B*13:02; MAGEB4; ENSG00000120289; CTA
ASSSLAFGI

SEQ ID NO: 43383 - protein, 9 aa, Homo sapiens
  misc_feature: Table A; Target 43383; HLA-A*32:01; MAGEB4; ENSG00000120289; CTA
ASTSTERSL

SEQ ID NO: 43384 - protein, 9 aa, Homo sapiens
  misc_feature: Table A; Target 43384; HLA-B*58:01; MAGEB4; ENSG00000120289; CTA
ASTSTERSL

SEQ ID NO: 43385 - protein, 9 aa, Homo sapiens
  misc_feature: Table A; Target 43385; HLA-C*01:02; MAGEB4; ENSG00000120289; CTA
ASTSTERSL

SEQ ID NO: 43386 - protein, 9 aa, Homo sapiens
  misc_feature: Table A; Target 43386; HLA-C*03:03; MAGEB4; ENSG00000120289; CTA
ASTSTERSL

SEQ ID NO: 43387 - protein, 9 aa, Homo sapiens
  misc_feature: Table A; Target 43387; HLA-C*03:04; MAGEB4; ENSG00000120289; CTA
ASTSTERSL

SEQ ID NO: 43388 - protein, 9 aa, Homo sapiens
  misc_feature: Table A; Target 43388; HLA-C*14:02; MAGEB4; ENSG00000120289; CTA
ASTSTERSL

SEQ ID NO: 43389 - protein, 9 aa, Homo sapiens
  misc_feature: Table A; Target 43389; HLA-C*16:01; MAGEB4; ENSG00000120289; CTA
ASTSTERSL

SEQ ID NO: 43390 - protein, 9 aa, Homo sapiens
  misc_feature: Table A; Target 43390; HLA-C*16:02; MAGEB4; ENSG00000120289; CTA
ASTSTERSL

SEQ ID NO: 43391 - protein, 10 aa, Homo sapiens
  misc_feature: Table A; Target 43391; HLA-A*03:01; MAGEB4; ENSG00000120289; CTA
ATSSSSSQPM

SEQ ID NO: 43392 - protein, 10 aa, Homo sapiens
  misc_feature: Table A; Target 43392; HLA-A*03:02; MAGEB4; ENSG00000120289; CTA
ATSSSSSQPM

SEQ ID NO: 43393 - protein, 10 aa, Homo sapiens
  misc_feature: Table A; Target 43393; HLA-A*11:01; MAGEB4; ENSG00000120289; CTA
ATSSSSSQPM

SEQ ID NO: 43394 - protein, 10 aa, Homo sapiens
  misc_feature: Table A; Target 43394; HLA-A*30:02; MAGEB4; ENSG00000120289; CTA
ATSSSSSQPM

SEQ ID NO: 43395 - protein, 10 aa, Homo sapiens
  misc_feature: Table A; Target 43395; HLA-A*31:01; MAGEB4; ENSG00000120289; CTA
ATSSSSSQPM

SEQ ID NO: 43396 - protein, 10 aa, Homo sapiens
  misc_feature: Table A; Target 43396; HLA-A*68:01; MAGEB4; ENSG00000120289; CTA
ATSSSSSQPM

SEQ ID NO: 43397 - protein, 10 aa, Homo sapiens
  misc_feature: Table A; Target 43397; HLA-B*07:02; MAGEB4; ENSG00000120289; CTA
ATSSSSSQPM

SEQ ID NO: 43398 - protein, 10 aa, Homo sapiens
  misc_feature: Table A; Target 43398; HLA-B*27:05; MAGEB4; ENSG00000120289; CTA
ATSSSSSQPM

SEQ ID NO: 43399 - protein, 10 aa, Homo sapiens
  misc_feature: Table A; Target 43399; HLA-B*39:01; MAGEB4; ENSG00000120289; CTA
ATSSSSSQPM

SEQ ID NO: 43400 - protein, 10 aa, Homo sapiens
  misc_feature: Table A; Target 43400; HLA-B*40:02; MAGEB4; ENSG00000120289; CTA
ATSSSSSQPM

SEQ ID NO: 43401 - protein, 10 aa, Homo sapiens
  misc_feature: Table A; Target 43401; HLA-C*01:02; MAGEB4; ENSG00000120289; CTA
ATSSSSSQPM

SEQ ID NO: 43402 - protein, 10 aa, Homo sapiens
  misc_feature: Table A; Target 43402; HLA-C*03:03; MAGEB4; ENSG00000120289; CTA
ATSSSSSQPM

SEQ ID NO: 43403 - protein, 10 aa, Homo sapiens
  misc_feature: Table A; Target 43403; HLA-C*03:04; MAGEB4; ENSG00000120289; CTA
ATSSSSSQPM

SEQ ID NO: 43404 - protein, 10 aa, Homo sapiens
  misc_feature: Table A; Target 43404; HLA-C*04:01; MAGEB4; ENSG00000120289; CTA
ATSSSSSQPM

SEQ ID NO: 43405 - protein, 10 aa, Homo sapiens
  misc_feature: Table A; Target 43405; HLA-C*06:02; MAGEB4; ENSG00000120289; CTA
ATSSSSSQPM

SEQ ID NO: 43406 - protein, 10 aa, Homo sapiens
  misc_feature: Table A; Target 43406; HLA-C*07:01; MAGEB4; ENSG00000120289; CTA
ATSSSSSQPM

SEQ ID NO: 43407 - protein, 10 aa, Homo sapiens
  misc_feature: Table A; Target 43407; HLA-C*07:02; MAGEB4; ENSG00000120289; CTA
ATSSSSSQPM

SEQ ID NO: 43408 - protein, 10 aa, Homo sapiens
  misc_feature: Table A; Target 43408; HLA-C*07:04; MAGEB4; ENSG00000120289; CTA
ATSSSSSQPM

SEQ ID NO: 43409 - protein, 10 aa, Homo sapiens
  misc_feature: Table A; Target 43409; HLA-C*07:06; MAGEB4; ENSG00000120289; CTA
ATSSSSSQPM

SEQ ID NO: 43410 - protein, 10 aa, Homo sapiens
  misc_feature: Table A; Target 43410; HLA-C*14:02; MAGEB4; ENSG00000120289; CTA
ATSSSSSQPM

SEQ ID NO: 43411 - protein, 11 aa, Homo sapiens
  misc_feature: Table A; Target 43411; HLA-A*33:01; MAGEB4; ENSG00000120289; CTA
DEEERAGARPR

SEQ ID NO: 43412 - protein, 8 aa, Homo sapiens
  misc_feature: Table A; Target 43412; HLA-B*08:01; MAGEB4; ENSG00000120289; CTA
DGKRHLIF

SEQ ID NO: 43413 - protein, 9 aa, Homo sapiens
  misc_feature: Table A; Target 43413; HLA-B*08:01; MAGEB4; ENSG00000120289; CTA
DSLTRKTKM

SEQ ID NO: 43414 - protein, 9 aa, Homo sapiens
  misc_feature: Table A; Target 43414; HLA-A*01:01; MAGEB4; ENSG00000120289; CTA
DTASSSLAF

SEQ ID NO: 43415 - protein, 9 aa, Homo sapiens
  misc_feature: Table A; Target 43415; HLA-A*25:01; MAGEB4; ENSG00000120289; CTA
DTASSSLAF

SEQ ID NO: 43416 - protein, 9 aa, Homo sapiens
  misc_feature: Table A; Target 43416; HLA-A*26:01; MAGEB4; ENSG00000120289; CTA
DTASSSLAF

SEQ ID NO: 43417 - protein, 9 aa, Homo sapiens
  misc_feature: Table A; Target 43417; HLA-A*33:01; MAGEB4; ENSG00000120289; CTA
DTASSSLAF

SEQ ID NO: 43418 - protein, 9 aa, Homo sapiens
  misc_feature: Table A; Target 43418; HLA-A*33:03; MAGEB4; ENSG00000120289; CTA
DTASSSLAF

SEQ ID NO: 43419 - protein, 9 aa, Homo sapiens
  misc_feature: Table A; Target 43419; HLA-B*18:01; MAGEB4; ENSG00000120289; CTA
DTASSSLAF

SEQ ID NO: 43420 - protein, 9 aa, Homo sapiens
  misc_feature: Table A; Target 43420; HLA-C*07:04; MAGEB4; ENSG00000120289; CTA
DTASSSLAF

SEQ ID NO: 43421 - protein, 9 aa, Homo sapiens
  misc_feature: Table A; Target 43421; HLA-C*07:06; MAGEB4; ENSG00000120289; CTA
DTASSSLAF

SEQ ID NO: 43422 - protein, 11 aa, Homo sapiens
  misc_feature: Table A; Target 43422; HLA-A*68:01; MAGEB4; ENSG00000120289; CTA
DTASSSLAFGI

SEQ ID NO: 43423 - protein, 10 aa, Homo sapiens
  misc_feature: Table A; Target 43423; HLA-A*25:01; MAGEB4; ENSG00000120289; CTA
DTTPNNFPLL

SEQ ID NO: 43424 - protein, 10 aa, Homo sapiens
  misc_feature: Table A; Target 43424; HLA-A*68:02; MAGEB4; ENSG00000120289; CTA
DTTPNNFPLL

SEQ ID NO: 43425 - protein, 11 aa, Homo sapiens
  misc_feature: Table A; Target 43425; HLA-A*01:01; MAGEB4; ENSG00000120289; CTA
DTTPNNFPLLY

SEQ ID NO: 43426 - protein, 11 aa, Homo sapiens
  misc_feature: Table A; Target 43426; HLA-A*26:01; MAGEB4; ENSG00000120289; CTA
DTTPNNFPLLY

SEQ ID NO: 43427 - protein, 11 aa, Homo sapiens
  misc_feature: Table A; Target 43427; HLA-A*29:02; MAGEB4; ENSG00000120289; CTA
DTTPNNFPLLY

SEQ ID NO: 43428 - protein, 9 aa, Homo sapiens
  misc_feature: Table A; Target 43428; HLA-A*33:03; MAGEB4; ENSG00000120289; CTA
EERAGARPR

SEQ ID NO: 43429 - protein, 10 aa, Homo sapiens
  misc_feature: Table A; Target 43429; HLA-B*49:01; MAGEB4; ENSG00000120289; CTA
EESPSSSSSV

SEQ ID NO: 43430 - protein, 11 aa, Homo sapiens
  misc_feature: Table A; Target 43430; HLA-A*30:01; MAGEB4; ENSG00000120289; CTA
EESPSSSSSVL

SEQ ID NO: 43431 - protein, 11 aa, Homo sapiens
  misc_feature: Table A; Target 43431; HLA-B*38:01; MAGEB4; ENSG00000120289; CTA
EESPSSSSSVL

SEQ ID NO: 43432 - protein, 11 aa, Homo sapiens
  misc_feature: Table A; Target 43432; HLA-B*39:01; MAGEB4; ENSG00000120289; CTA
EESPSSSSSVL

SEQ ID NO: 43433 - protein, 11 aa, Homo sapiens
  misc_feature: Table A; Target 43433; HLA-B*40:01; MAGEB4; ENSG00000120289; CTA
EESPSSSSSVL

SEQ ID NO: 43434 - protein, 11 aa, Homo sapiens
  misc_feature: Table A; Target 43434; HLA-B*40:02; MAGEB4; ENSG00000120289; CTA
EESPSSSSSVL

SEQ ID NO: 43435 - protein, 11 aa, Homo sapiens
  misc_feature: Table A; Target 43435; HLA-B*44:02; MAGEB4; ENSG00000120289; CTA
EESPSSSSSVL

SEQ ID NO: 43436 - protein, 11 aa, Homo sapiens
  misc_feature: Table A; Target 43436; HLA-B*44:03; MAGEB4; ENSG00000120289; CTA
EESPSSSSSVL

SEQ ID NO: 43437 - protein, 11 aa, Homo sapiens
  misc_feature: Table A; Target 43437; HLA-C*16:04; MAGEB4; ENSG00000120289; CTA
EESPSSSSSVL

SEQ ID NO: 43438 - protein, 9 aa, Homo sapiens
  misc_feature: Table A; Target 43438; HLA-A*29:02; MAGEB4; ENSG00000120289; CTA
EFLNMLGIY

SEQ ID NO: 43439 - protein, 10 aa, Homo sapiens
  misc_feature: Table A; Target 43439; HLA-A*68:02; MAGEB4; ENSG00000120289; CTA
EHFPEIFRKV

SEQ ID NO: 43440 - protein, 9 aa, Homo sapiens
  misc_feature: Table A; Target 43440; HLA-A*33:01; MAGEB4; ENSG00000120289; CTA
EIFRKVSQR

SEQ ID NO: 43441 - protein, 9 aa, Homo sapiens
  misc_feature: Table A; Target 43441; HLA-A*33:03; MAGEB4; ENSG00000120289; CTA
EIFRKVSQR

SEQ ID NO: 43442 - protein, 9 aa, Homo sapiens
  misc_feature: Table A; Target 43442; HLA-A*68:01; MAGEB4; ENSG00000120289; CTA
EIFRKVSQR

SEQ ID NO: 43443 - protein, 8 aa, Homo sapiens
  misc_feature: Table A; Target 43443; HLA-A*33:01; MAGEB4; ENSG00000120289; CTA
EMLKIISK

SEQ ID NO: 43444 - protein, 8 aa, Homo sapiens
  misc_feature: Table A; Target 43444; HLA-A*33:03; MAGEB4; ENSG00000120289; CTA
EMLKIISK

SEQ ID NO: 43445 - protein, 9 aa, Homo sapiens
  misc_feature: Table A; Target 43445; HLA-A*33:01; MAGEB4; ENSG00000120289; CTA
EMLKIISKK

SEQ ID NO: 43446 - protein, 9 aa, Homo sapiens
  misc_feature: Table A; Target 43446; HLA-A*33:03; MAGEB4; ENSG00000120289; CTA
EMLKIISKK

SEQ ID NO: 43447 - protein, 11 aa, Homo sapiens
  misc_feature: Table A; Target 43447; HLA-B*35:01; MAGEB4; ENSG00000120289; CTA
EPPTTSAAAAM

SEQ ID NO: 43448 - protein, 11 aa, Homo sapiens
  misc_feature: Table A; Target 43448; HLA-B*35:03; MAGEB4; ENSG00000120289; CTA
EPPTTSAAAAM

SEQ ID NO: 43449 - protein, 11 aa, Homo sapiens
  misc_feature: Table A; Target 43449; HLA-B*54:01; MAGEB4; ENSG00000120289; CTA
EPQREPPTTSA

SEQ ID NO: 43450 - protein, 11 aa, Homo sapiens
  misc_feature: Table A; Target 43450; HLA-B*56:01; MAGEB4; ENSG00000120289; CTA
EPQREPPTTSA

SEQ ID NO: 43451 - protein, 8 aa, Homo sapiens
  misc_feature: Table A; Target 43451; HLA-B*07:02; MAGEB4; ENSG00000120289; CTA
EPTTKAEM

SEQ ID NO: 43452 - protein, 8 aa, Homo sapiens
  misc_feature: Table A; Target 43452; HLA-B*08:01; MAGEB4; ENSG00000120289; CTA
EPTTKAEM

SEQ ID NO: 43453 - protein, 8 aa, Homo sapiens
  misc_feature: Table A; Target 43453; HLA-B*35:03; MAGEB4; ENSG00000120289; CTA
EPTTKAEM

SEQ ID NO: 43454 - protein, 8 aa, Homo sapiens
  misc_feature: Table A; Target 43454; HLA-B*55:01; MAGEB4; ENSG00000120289; CTA
EPTTKAEM

SEQ ID NO: 43455 - protein, 8 aa, Homo sapiens
  misc_feature: Table A; Target 43455; HLA-C*07:02; MAGEB4; ENSG00000120289; CTA
EPTTKAEM

SEQ ID NO: 43456 - protein, 9 aa, Homo sapiens
  misc_feature: Table A; Target 43456; HLA-B*07:02; MAGEB4; ENSG00000120289; CTA
EPTTKAEML

SEQ ID NO: 43457 - protein, 9 aa, Homo sapiens
  misc_feature: Table A; Target 43457; HLA-B*08:01; MAGEB4; ENSG00000120289; CTA
EPTTKAEML

SEQ ID NO: 43458 - protein, 9 aa, Homo sapiens
  misc_feature: Table A; Target 43458; HLA-B*35:03; MAGEB4; ENSG00000120289; CTA
EPTTKAEML

SEQ ID NO: 43459 - protein, 9 aa, Homo sapiens
  misc_feature: Table A; Target 43459; HLA-C*07:02; MAGEB4; ENSG00000120289; CTA
EPTTKAEML

SEQ ID NO: 43460 - protein, 9 aa, Homo sapiens
  misc_feature: Table A; Target 43460; HLA-C*01:02; MAGEB4; ENSG00000120289; CTA
ESPSSSSSV

SEQ ID NO: 43461 - protein, 11 aa, Homo sapiens
  misc_feature: Table A; Target 43461; HLA-A*33:01; MAGEB4; ENSG00000120289; CTA
ESPSSSSSVLR

SEQ ID NO: 43462 - protein, 11 aa, Homo sapiens
  misc_feature: Table A; Target 43462; HLA-A*33:03; MAGEB4; ENSG00000120289; CTA
ESPSSSSSVLR

SEQ ID NO: 43463 - protein, 11 aa, Homo sapiens
  misc_feature: Table A; Target 43463; HLA-A*68:01; MAGEB4; ENSG00000120289; CTA
ESPSSSSSVLR

SEQ ID NO: 43464 - protein, 11 aa, Homo sapiens
  misc_feature: Table A; Target 43464; HLA-C*07:06; MAGEB4; ENSG00000120289; CTA
ESPSSSSSVLR

SEQ ID NO: 43465 - protein, 9 aa, Homo sapiens
  misc_feature: Table A; Target 43465; HLA-A*01:01; MAGEB4; ENSG00000120289; CTA
EVNPTTHSY

SEQ ID NO: 43466 - protein, 9 aa, Homo sapiens
  misc_feature: Table A; Target 43466; HLA-A*25:01; MAGEB4; ENSG00000120289; CTA
EVNPTTHSY

SEQ ID NO: 43467 - protein, 9 aa, Homo sapiens
  misc_feature: Table A; Target 43467; HLA-A*26:01; MAGEB4; ENSG00000120289; CTA
EVNPTTHSY

SEQ ID NO: 43468 - protein, 9 aa, Homo sapiens
  misc_feature: Table A; Target 43468; HLA-A*29:02; MAGEB4; ENSG00000120289; CTA
EVNPTTHSY

SEQ ID NO: 43469 - protein, 9 aa, Homo sapiens
  misc_feature: Table A; Target 43469; HLA-A*30:02; MAGEB4; ENSG00000120289; CTA
EVNPTTHSY

SEQ ID NO: 43470 - protein, 9 aa, Homo sapiens
  misc_feature: Table A; Target 43470; HLA-A*32:01; MAGEB4; ENSG00000120289; CTA
EVNPTTHSY

SEQ ID NO: 43471 - protein, 9 aa, Homo sapiens
  misc_feature: Table A; Target 43471; HLA-A*33:01; MAGEB4; ENSG00000120289; CTA
EVNPTTHSY

SEQ ID NO: 43472 - protein, 9 aa, Homo sapiens
  misc_feature: Table A; Target 43472; HLA-A*33:03; MAGEB4; ENSG00000120289; CTA
EVNPTTHSY

SEQ ID NO: 43473 - protein, 9 aa, Homo sapiens
  misc_feature: Table A; Target 43473; HLA-A*68:01; MAGEB4; ENSG00000120289; CTA
EVNPTTHSY

SEQ ID NO: 43474 - protein, 9 aa, Homo sapiens
  misc_feature: Table A; Target 43474; HLA-B*15:01; MAGEB4; ENSG00000120289; CTA
EVNPTTHSY

SEQ ID NO: 43475 - protein, 9 aa, Homo sapiens
  misc_feature: Table A; Target 43475; HLA-B*15:03; MAGEB4; ENSG00000120289; CTA
EVNPTTHSY

SEQ ID NO: 43476 - protein, 9 aa, Homo sapiens
  misc_feature: Table A; Target 43476; HLA-B*18:01; MAGEB4; ENSG00000120289; CTA
EVNPTTHSY

SEQ ID NO: 43477 - protein, 9 aa, Homo sapiens
  misc_feature: Table A; Target 43477; HLA-B*27:02; MAGEB4; ENSG00000120289; CTA
EVNPTTHSY

SEQ ID NO: 43478 - protein, 9 aa, Homo sapiens
  misc_feature: Table A; Target 43478; HLA-B*35:01; MAGEB4; ENSG00000120289; CTA
EVNPTTHSY

SEQ ID NO: 43479 - protein, 9 aa, Homo sapiens
  misc_feature: Table A; Target 43479; HLA-B*39:01; MAGEB4; ENSG00000120289; CTA
EVNPTTHSY

SEQ ID NO: 43480 - protein, 9 aa, Homo sapiens
  misc_feature: Table A; Target 43480; HLA-B*44:02; MAGEB4; ENSG00000120289; CTA
EVNPTTHSY

SEQ ID NO: 43481 - protein, 9 aa, Homo sapiens
  misc_feature: Table A; Target 43481; HLA-B*44:03; MAGEB4; ENSG00000120289; CTA
EVNPTTHSY

SEQ ID NO: 43482 - protein, 9 aa, Homo sapiens
  misc_feature: Table A; Target 43482; HLA-B*46:01; MAGEB4; ENSG00000120289; CTA
EVNPTTHSY

SEQ ID NO: 43483 - protein, 9 aa, Homo sapiens
  misc_feature: Table A; Target 43483; HLA-B*58:01; MAGEB4; ENSG00000120289; CTA
EVNPTTHSY

SEQ ID NO: 43484 - protein, 9 aa, Homo sapiens
  misc_feature: Table A; Target 43484; HLA-C*01:02; MAGEB4; ENSG00000120289; CTA
EVNPTTHSY

SEQ ID NO: 43485 - protein, 9 aa, Homo sapiens
  misc_feature: Table A; Target 43485; HLA-C*02:02; MAGEB4; ENSG00000120289; CTA
EVNPTTHSY

SEQ ID NO: 43486 - protein, 9 aa, Homo sapiens
  misc_feature: Table A; Target 43486; HLA-C*03:03; MAGEB4; ENSG00000120289; CTA
EVNPTTHSY

SEQ ID NO: 43487 - protein, 9 aa, Homo sapiens
  misc_feature: Table A; Target 43487; HLA-C*07:04; MAGEB4; ENSG00000120289; CTA
EVNPTTHSY

SEQ ID NO: 43488 - protein, 9 aa, Homo sapiens
  misc_feature: Table A; Target 43488; HLA-C*07:06; MAGEB4; ENSG00000120289; CTA
EVNPTTHSY

SEQ ID NO: 43489 - protein, 9 aa, Homo sapiens
  misc_feature: Table A; Target 43489; HLA-C*12:03; MAGEB4; ENSG00000120289; CTA
EVNPTTHSY

SEQ ID NO: 43490 - protein, 9 aa, Homo sapiens
  misc_feature: Table A; Target 43490; HLA-C*14:02; MAGEB4; ENSG00000120289; CTA
EVNPTTHSY

SEQ ID NO: 43491 - protein, 9 aa, Homo sapiens
  misc_feature: Table A; Target 43491; HLA-C*16:01; MAGEB4; ENSG00000120289; CTA
EVNPTTHSY

SEQ ID NO: 43492 - protein, 9 aa, Homo sapiens
  misc_feature: Table A; Target 43492; HLA-C*16:02; MAGEB4; ENSG00000120289; CTA
EVNPTTHSY

SEQ ID NO: 43493 - protein, 9 aa, Homo sapiens
  misc_feature: Table A; Target 43493; HLA-C*16:04; MAGEB4; ENSG00000120289; CTA
EVNPTTHSY

SEQ ID NO: 43494 - protein, 10 aa, Homo sapiens
  misc_feature: Table A; Target 43494; HLA-A*25:01; MAGEB4; ENSG00000120289; CTA
EVNPTTHSYI

SEQ ID NO: 43495 - protein, 10 aa, Homo sapiens
  misc_feature: Table A; Target 43495; HLA-A*26:01; MAGEB4; ENSG00000120289; CTA
EVNPTTHSYI

SEQ ID NO: 43496 - protein, 10 aa, Homo sapiens
  misc_feature: Table A; Target 43496; HLA-A*33:03; MAGEB4; ENSG00000120289; CTA
EVNPTTHSYI

SEQ ID NO: 43497 - protein, 10 aa, Homo sapiens
  misc_feature: Table A; Target 43497; HLA-A*68:01; MAGEB4; ENSG00000120289; CTA
EVNPTTHSYI

SEQ ID NO: 43498 - protein, 10 aa, Homo sapiens
  misc_feature: Table A; Target 43498; HLA-A*68:02; MAGEB4; ENSG00000120289; CTA
EVNPTTHSYI

SEQ ID NO: 43499 - protein, 11 aa, Homo sapiens
  misc_feature: Table A; Target 43499; HLA-A*33:01; MAGEB4; ENSG00000120289; CTA
EVNPTTHSYIL

SEQ ID NO: 43500 - protein, 8 aa, Homo sapiens
  misc_feature: Table A; Target 43500; HLA-B*51:01; MAGEB4; ENSG00000120289; CTA
FGLALKEV

SEQ ID NO: 43501 - protein, 8 aa, Homo sapiens
  misc_feature: Table A; Target 43501; HLA-B*51:01; MAGEB4; ENSG00000120289; CTA
FPEIFRKV

SEQ ID NO: 43502 - protein, 8 aa, Homo sapiens
  misc_feature: Table A; Target 43502; HLA-B*54:01; MAGEB4; ENSG00000120289; CTA
FPEIFRKV

SEQ ID NO: 43503 - protein, 8 aa, Homo sapiens
  misc_feature: Table A; Target 43503; HLA-B*54:01; MAGEB4; ENSG00000120289; CTA
FPLLYEEA

SEQ ID NO: 43504 - protein, 8 aa, Homo sapiens
  misc_feature: Table A; Target 43504; HLA-B*56:01; MAGEB4; ENSG00000120289; CTA
FPLLYEEA

SEQ ID NO: 43505 - protein, 9 aa, Homo sapiens
  misc_feature: Table A; Target 43505; HLA-B*35:01; MAGEB4; ENSG00000120289; CTA
FPLLYEEAL

SEQ ID NO: 43506 - protein, 9 aa, Homo sapiens
  misc_feature: Table A; Target 43506; HLA-B*35:03; MAGEB4; ENSG00000120289; CTA
FPLLYEEAL

SEQ ID NO: 43507 - protein, 9 aa, Homo sapiens
  misc_feature: Table A; Target 43507; HLA-B*54:01; MAGEB4; ENSG00000120289; CTA
FPLLYEEAL

SEQ ID NO: 43508 - protein, 9 aa, Homo sapiens
  misc_feature: Table A; Target 43508; HLA-B*55:01; MAGEB4; ENSG00000120289; CTA
FPLLYEEAL

SEQ ID NO: 43509 - protein, 9 aa, Homo sapiens
  misc_feature: Table A; Target 43509; HLA-C*03:03; MAGEB4; ENSG00000120289; CTA
FPLLYEEAL

SEQ ID NO: 43510 - protein, 9 aa, Homo sapiens
  misc_feature: Table A; Target 43510; HLA-A*03:01; MAGEB4; ENSG00000120289; CTA
GARPRVAAR

SEQ ID NO: 43511 - protein, 9 aa, Homo sapiens
  misc_feature: Table A; Target 43511; HLA-A*31:01; MAGEB4; ENSG00000120289; CTA
GARPRVAAR

SEQ ID NO: 43512 - protein, 9 aa, Homo sapiens
  misc_feature: Table A; Target 43512; HLA-A*33:01; MAGEB4; ENSG00000120289; CTA
GARPRVAAR

SEQ ID NO: 43513 - protein, 9 aa, Homo sapiens
  misc_feature: Table A; Target 43513; HLA-A*33:03; MAGEB4; ENSG00000120289; CTA
GARPRVAAR

SEQ ID NO: 43514 - protein, 9 aa, Homo sapiens
  misc_feature: Table A; Target 43514; HLA-A*02:01; MAGEB4; ENSG00000120289; CTA
GLLMPLLSV

SEQ ID NO: 43515 - protein, 9 aa, Homo sapiens
  misc_feature: Table A; Target 43515; HLA-A*02:04; MAGEB4; ENSG00000120289; CTA
GLLMPLLSV

SEQ ID NO: 43516 - protein, 9 aa, Homo sapiens
  misc_feature: Table A; Target 43516; HLA-B*13:02; MAGEB4; ENSG00000120289; CTA
GLLMPLLSV

SEQ ID NO: 43517 - protein, 10 aa, Homo sapiens
  misc_feature: Table A; Target 43517; HLA-B*56:01; MAGEB4; ENSG00000120289; CTA
GPNDGNQSSA

SEQ ID NO: 43518 - protein, 11 aa, Homo sapiens
  misc_feature: Table A; Target 43518; HLA-A*25:01; MAGEB4; ENSG00000120289; CTA
GPNDGNQSSAW

SEQ ID NO: 43519 - protein, 11 aa, Homo sapiens
  misc_feature: Table A; Target 43519; HLA-B*07:02; MAGEB4; ENSG00000120289; CTA
GPNDGNQSSAW

SEQ ID NO: 43520 - protein, 11 aa, Homo sapiens
  misc_feature: Table A; Target 43520; HLA-B*27:02; MAGEB4; ENSG00000120289; CTA
GPNDGNQSSAW

SEQ ID NO: 43521 - protein, 11 aa, Homo sapiens
  misc_feature: Table A; Target 43521; HLA-B*44:03; MAGEB4; ENSG00000120289; CTA
GPNDGNQSSAW

SEQ ID NO: 43522 - protein, 11 aa, Homo sapiens
  misc_feature: Table A; Target 43522; HLA-C*07:02; MAGEB4; ENSG00000120289; CTA
GPNDGNQSSAW

SEQ ID NO: 43523 - protein, 11 aa, Homo sapiens
  misc_feature: Table A; Target 43523; HLA-C*07:06; MAGEB4; ENSG00000120289; CTA
GPNDGNQSSAW

SEQ ID NO: 43524 - protein, 11 aa, Homo sapiens
  misc_feature: Table A; Target 43524; HLA-C*16:04; MAGEB4; ENSG00000120289; CTA
GPNDGNQSSAW

SEQ ID NO: 43525 - protein, 8 aa, Homo sapiens
  misc_feature: Table A; Target 43525; HLA-B*13:02; MAGEB4; ENSG00000120289; CTA
GQTQDLKV

SEQ ID NO: 43526 - protein, 8 aa, Homo sapiens
  misc_feature: Table A; Target 43526; HLA-C*06:02; MAGEB4; ENSG00000120289; CTA
GQTQDLKV

SEQ ID NO: 43527 - protein, 9 aa, Homo sapiens
  misc_feature: Table A; Target 43527; HLA-A*01:01; MAGEB4; ENSG00000120289; CTA
GTTAMTSAY

SEQ ID NO: 43528 - protein, 9 aa, Homo sapiens
  misc_feature: Table A; Target 43528; HLA-A*03:01; MAGEB4; ENSG00000120289; CTA
GTTAMTSAY

SEQ ID NO: 43529 - protein, 9 aa, Homo sapiens
  misc_feature: Table A; Target 43529; HLA-A*03:02; MAGEB4; ENSG00000120289; CTA
GTTAMTSAY

SEQ ID NO: 43530 - protein, 9 aa, Homo sapiens
  misc_feature: Table A; Target 43530; HLA-A*11:01; MAGEB4; ENSG00000120289; CTA
GTTAMTSAY

SEQ ID NO: 43531 - protein, 9 aa, Homo sapiens
  misc_feature: Table A; Target 43531; HLA-A*25:01; MAGEB4; ENSG00000120289; CTA
GTTAMTSAY

SEQ ID NO: 43532 - protein, 9 aa, Homo sapiens
  misc_feature: Table A; Target 43532; HLA-A*26:01; MAGEB4; ENSG00000120289; CTA
GTTAMTSAY

SEQ ID NO: 43533 - protein, 9 aa, Homo sapiens
  misc_feature: Table A; Target 43533; HLA-A*29:02; MAGEB4; ENSG00000120289; CTA
GTTAMTSAY

SEQ ID NO: 43534 - protein, 9 aa, Homo sapiens
  misc_feature: Table A; Target 43534; HLA-A*30:02; MAGEB4; ENSG00000120289; CTA
GTTAMTSAY

SEQ ID NO: 43535 - protein, 9 aa, Homo sapiens
  misc_feature: Table A; Target 43535; HLA-A*32:01; MAGEB4; ENSG00000120289; CTA
GTTAMTSAY

SEQ ID NO: 43536 - protein, 9 aa, Homo sapiens
  misc_feature: Table A; Target 43536; HLA-B*15:01; MAGEB4; ENSG00000120289; CTA
GTTAMTSAY

SEQ ID NO: 43537 - protein, 9 aa, Homo sapiens
  misc_feature: Table A; Target 43537; HLA-B*15:03; MAGEB4; ENSG00000120289; CTA
GTTAMTSAY

SEQ ID NO: 43538 - protein, 9 aa, Homo sapiens
  misc_feature: Table A; Target 43538; HLA-B*18:01; MAGEB4; ENSG00000120289; CTA
GTTAMTSAY

SEQ ID NO: 43539 - protein, 9 aa, Homo sapiens
  misc_feature: Table A; Target 43539; HLA-B*27:02; MAGEB4; ENSG00000120289; CTA
GTTAMTSAY

SEQ ID NO: 43540 - protein, 9 aa, Homo sapiens
  misc_feature: Table A; Target 43540; HLA-B*27:05; MAGEB4; ENSG00000120289; CTA
GTTAMTSAY

SEQ ID NO: 43541 - protein, 9 aa, Homo sapiens
  misc_feature: Table A; Target 43541; HLA-B*35:01; MAGEB4; ENSG00000120289; CTA
GTTAMTSAY

SEQ ID NO: 43542 - protein, 9 aa, Homo sapiens
  misc_feature: Table A; Target 43542; HLA-B*39:01; MAGEB4; ENSG00000120289; CTA
GTTAMTSAY

SEQ ID NO: 43543 - protein, 9 aa, Homo sapiens
  misc_feature: Table A; Target 43543; HLA-B*44:03; MAGEB4; ENSG00000120289; CTA
GTTAMTSAY

SEQ ID NO: 43544 - protein, 9 aa, Homo sapiens
  misc_feature: Table A; Target 43544; HLA-B*46:01; MAGEB4; ENSG00000120289; CTA
GTTAMTSAY

SEQ ID NO: 43545 - protein, 9 aa, Homo sapiens
  misc_feature: Table A; Target 43545; HLA-B*58:01; MAGEB4; ENSG00000120289; CTA
GTTAMTSAY

SEQ ID NO: 43546 - protein, 9 aa, Homo sapiens
  misc_feature: Table A; Target 43546; HLA-C*01:02; MAGEB4; ENSG00000120289; CTA
GTTAMTSAY

SEQ ID NO: 43547 - protein, 9 aa, Homo sapiens
  misc_feature: Table A; Target 43547; HLA-C*02:02; MAGEB4; ENSG00000120289; CTA
GTTAMTSAY

SEQ ID NO: 43548 - protein, 9 aa, Homo sapiens
  misc_feature: Table A; Target 43548; HLA-C*04:01; MAGEB4; ENSG00000120289; CTA
GTTAMTSAY

SEQ ID NO: 43549 - protein, 9 aa, Homo sapiens
  misc_feature: Table A; Target 43549; HLA-C*06:02; MAGEB4; ENSG00000120289; CTA
GTTAMTSAY

SEQ ID NO: 43550 - protein, 9 aa, Homo sapiens
  misc_feature: Table A; Target 43550; HLA-C*07:01; MAGEB4; ENSG00000120289; CTA
GTTAMTSAY

SEQ ID NO: 43551 - protein, 9 aa, Homo sapiens
  misc_feature: Table A; Target 43551; HLA-C*07:04; MAGEB4; ENSG00000120289; CTA
GTTAMTSAY

SEQ ID NO: 43552 - protein, 9 aa, Homo sapiens
  misc_feature: Table A; Target 43552; HLA-C*07:06; MAGEB4; ENSG00000120289; CTA
GTTAMTSAY

SEQ ID NO: 43553 - protein, 9 aa, Homo sapiens
  misc_feature: Table A; Target 43553; HLA-C*12:03; MAGEB4; ENSG00000120289; CTA
GTTAMTSAY

SEQ ID NO: 43554 - protein, 9 aa, Homo sapiens
  misc_feature: Table A; Target 43554; HLA-C*14:02; MAGEB4; ENSG00000120289; CTA
GTTAMTSAY

SEQ ID NO: 43555 - protein, 9 aa, Homo sapiens
  misc_feature: Table A; Target 43555; HLA-C*16:01; MAGEB4; ENSG00000120289; CTA
GTTAMTSAY

SEQ ID NO: 43556 - protein, 9 aa, Homo sapiens
  misc_feature: Table A; Target 43556; HLA-C*16:02; MAGEB4; ENSG00000120289; CTA
GTTAMTSAY

SEQ ID NO: 43557 - protein, 9 aa, Homo sapiens
  misc_feature: Table A; Target 43557; HLA-C*16:04; MAGEB4; ENSG00000120289; CTA
GTTAMTSAY

SEQ ID NO: 43558 - protein, 11 aa, Homo sapiens
  misc_feature: Table A; Target 43558; HLA-A*03:02; MAGEB4; ENSG00000120289; CTA
GTTAMTSAYSR

SEQ ID NO: 43559 - protein, 11 aa, Homo sapiens
  misc_feature: Table A; Target 43559; HLA-A*11:01; MAGEB4; ENSG00000120289; CTA
GTTAMTSAYSR

SEQ ID NO: 43560 - protein, 11 aa, Homo sapiens
  misc_feature: Table A; Target 43560; HLA-A*31:01; MAGEB4; ENSG00000120289; CTA
GTTAMTSAYSR

SEQ ID NO: 43561 - protein, 11 aa, Homo sapiens
  misc_feature: Table A; Target 43561; HLA-A*33:03; MAGEB4; ENSG00000120289; CTA
GTTAMTSAYSR

SEQ ID NO: 43562 - protein, 11 aa, Homo sapiens
  misc_feature: Table A; Target 43562; HLA-A*68:01; MAGEB4; ENSG00000120289; CTA
GTTAMTSAYSR

SEQ ID NO: 43563 - protein, 11 aa, Homo sapiens
  misc_feature: Table A; Target 43563; HLA-B*27:02; MAGEB4; ENSG00000120289; CTA
GTTAMTSAYSR

SEQ ID NO: 43564 - protein, 11 aa, Homo sapiens
  misc_feature: Table A; Target 43564; HLA-C*07:06; MAGEB4; ENSG00000120289; CTA
GTTAMTSAYSR

SEQ ID NO: 43565 - protein, 9 aa, Homo sapiens
  misc_feature: Table A; Target 43565; HLA-A*02:07; MAGEB4; ENSG00000120289; CTA
HFPEIFRKV

SEQ ID NO: 43566 - protein, 8 aa, Homo sapiens
  misc_feature: Table A; Target 43566; HLA-B*08:01; MAGEB4; ENSG00000120289; CTA
HSYILVSM

SEQ ID NO: 43567 - protein, 8 aa, Homo sapiens
  misc_feature: Table A; Target 43567; HLA-B*51:01; MAGEB4; ENSG00000120289; CTA
HSYILVSM

SEQ ID NO: 43568 - protein, 8 aa, Homo sapiens
  misc_feature: Table A; Target 43568; HLA-C*14:02; MAGEB4; ENSG00000120289; CTA
IFLNGNCA

SEQ ID NO: 43569 - protein, 9 aa, Homo sapiens
  misc_feature: Table A; Target 43569; HLA-B*56:01; MAGEB4; ENSG00000120289; CTA
IPQEPQREP

SEQ ID NO: 43570 - protein, 10 aa, Homo sapiens
  misc_feature: Table A; Target 43570; HLA-B*54:01; MAGEB4; ENSG00000120289; CTA
IPQEPQREPP

SEQ ID NO: 43571 - protein, 10 aa, Homo sapiens
  misc_feature: Table A; Target 43571; HLA-B*56:01; MAGEB4; ENSG00000120289; CTA
IPQEPQREPP

SEQ ID NO: 43572 - protein, 9 aa, Homo sapiens
  misc_feature: Table A; Target 43572; HLA-A*24:02; MAGEB4; ENSG00000120289; CTA
IYDGKRHLI

SEQ ID NO: 43573 - protein, 10 aa, Homo sapiens
  misc_feature: Table A; Target 43573; HLA-A*24:02; MAGEB4; ENSG00000120289; CTA
IYDGKRHLIF

SEQ ID NO: 43574 - protein, 11 aa, Homo sapiens
  misc_feature: Table A; Target 43574; HLA-B*40:01; MAGEB4; ENSG00000120289; CTA
KEESPSSSSSV

SEQ ID NO: 43575 - protein, 11 aa, Homo sapiens
  misc_feature: Table A; Target 43575; HLA-B*49:01; MAGEB4; ENSG00000120289; CTA
KEESPSSSSSV

SEQ ID NO: 43576 - protein, 9 aa, Homo sapiens
  misc_feature: Table A; Target 43576; HLA-B*37:01; MAGEB4; ENSG00000120289; CTA
KEPTTKAEM

SEQ ID NO: 43577 - protein, 9 aa, Homo sapiens
  misc_feature: Table A; Target 43577; HLA-B*40:01; MAGEB4; ENSG00000120289; CTA
KEPTTKAEM

SEQ ID NO: 43578 - protein, 10 aa, Homo sapiens
  misc_feature: Table A; Target 43578; HLA-A*30:01; MAGEB4; ENSG00000120289; CTA
KEPTTKAEML

SEQ ID NO: 43579 - protein, 10 aa, Homo sapiens
  misc_feature: Table A; Target 43579; HLA-B*40:01; MAGEB4; ENSG00000120289; CTA
KEPTTKAEML

SEQ ID NO: 43580 - protein, 10 aa, Homo sapiens
  misc_feature: Table A; Target 43580; HLA-B*40:02; MAGEB4; ENSG00000120289; CTA
KEPTTKAEML

SEQ ID NO: 43581 - protein, 10 aa, Homo sapiens
  misc_feature: Table A; Target 43581; HLA-A*25:01; MAGEB4; ENSG00000120289; CTA
KEVNPTTHSY

SEQ ID NO: 43582 - protein, 10 aa, Homo sapiens
  misc_feature: Table A; Target 43582; HLA-A*29:02; MAGEB4; ENSG00000120289; CTA
KEVNPTTHSY

SEQ ID NO: 43583 - protein, 10 aa, Homo sapiens
  misc_feature: Table A; Target 43583; HLA-A*30:01; MAGEB4; ENSG00000120289; CTA
KEVNPTTHSY

SEQ ID NO: 43584 - protein, 10 aa, Homo sapiens
  misc_feature: Table A; Target 43584; HLA-A*30:02; MAGEB4; ENSG00000120289; CTA
KEVNPTTHSY

SEQ ID NO: 43585 - protein, 10 aa, Homo sapiens
  misc_feature: Table A; Target 43585; HLA-A*32:01; MAGEB4; ENSG00000120289; CTA
KEVNPTTHSY

SEQ ID NO: 43586 - protein, 10 aa, Homo sapiens
  misc_feature: Table A; Target 43586; HLA-B*15:01; MAGEB4; ENSG00000120289; CTA
KEVNPTTHSY

SEQ ID NO: 43587 - protein, 10 aa, Homo sapiens
  misc_feature: Table A; Target 43587; HLA-B*15:03; MAGEB4; ENSG00000120289; CTA
KEVNPTTHSY

SEQ ID NO: 43588 - protein, 10 aa, Homo sapiens
  misc_feature: Table A; Target 43588; HLA-B*18:01; MAGEB4; ENSG00000120289; CTA
KEVNPTTHSY

SEQ ID NO: 43589 - protein, 10 aa, Homo sapiens
  misc_feature: Table A; Target 43589; HLA-B*27:02; MAGEB4; ENSG00000120289; CTA
KEVNPTTHSY

SEQ ID NO: 43590 - protein, 10 aa, Homo sapiens
  misc_feature: Table A; Target 43590; HLA-B*37:01; MAGEB4; ENSG00000120289; CTA
KEVNPTTHSY

SEQ ID NO: 43591 - protein, 10 aa, Homo sapiens
  misc_feature: Table A; Target 43591; HLA-B*40:01; MAGEB4; ENSG00000120289; CTA
KEVNPTTHSY

SEQ ID NO: 43592 - protein, 10 aa, Homo sapiens
  misc_feature: Table A; Target 43592; HLA-B*44:02; MAGEB4; ENSG00000120289; CTA
KEVNPTTHSY

SEQ ID NO: 43593 - protein, 10 aa, Homo sapiens
  misc_feature: Table A; Target 43593; HLA-B*44:03; MAGEB4; ENSG00000120289; CTA
KEVNPTTHSY

SEQ ID NO: 43594 - protein, 10 aa, Homo sapiens
  misc_feature: Table A; Target 43594; HLA-C*02:02; MAGEB4; ENSG00000120289; CTA
KEVNPTTHSY

SEQ ID NO: 43595 - protein, 10 aa, Homo sapiens
  misc_feature: Table A; Target 43595; HLA-C*16:01; MAGEB4; ENSG00000120289; CTA
KEVNPTTHSY

SEQ ID NO: 43596 - protein, 10 aa, Homo sapiens
  misc_feature: Table A; Target 43596; HLA-C*16:02; MAGEB4; ENSG00000120289; CTA
KEVNPTTHSY

SEQ ID NO: 43597 - protein, 10 aa, Homo sapiens
  misc_feature: Table A; Target 43597; HLA-C*16:04; MAGEB4; ENSG00000120289; CTA
KEVNPTTHSY

SEQ ID NO: 43598 - protein, 11 aa, Homo sapiens
  misc_feature: Table A; Target 43598; HLA-B*49:01; MAGEB4; ENSG00000120289; CTA
KEVNPTTHSYI

SEQ ID NO: 43599 - protein, 11 aa, Homo sapiens
  misc_feature: Table A; Target 43599; HLA-A*03:01; MAGEB4; ENSG00000120289; CTA
KLITQDLVQEK

SEQ ID NO: 43600 - protein, 11 aa, Homo sapiens
  misc_feature: Table A; Target 43600; HLA-A*03:02; MAGEB4; ENSG00000120289; CTA
KLITQDLVQEK

SEQ ID NO: 43601 - protein, 11 aa, Homo sapiens
  misc_feature: Table A; Target 43601; HLA-A*11:01; MAGEB4; ENSG00000120289; CTA
KLITQDLVQEK

SEQ ID NO: 43602 - protein, 8 aa, Homo sapiens
  misc_feature: Table A; Target 43602; HLA-A*03:01; MAGEB4; ENSG00000120289; CTA
KMKEPTTK

SEQ ID NO: 43603 - protein, 9 aa, Homo sapiens
  misc_feature: Table A; Target 43603; HLA-A*02:03; MAGEB4; ENSG00000120289; CTA
KMKEPTTKA

SEQ ID NO: 43604 - protein, 9 aa, Homo sapiens
  misc_feature: Table A; Target 43604; HLA-A*32:01; MAGEB4; ENSG00000120289; CTA
KMKEPTTKA

SEQ ID NO: 43605 - protein, 9 aa, Homo sapiens
  misc_feature: Table A; Target 43605; HLA-B*46:01; MAGEB4; ENSG00000120289; CTA
KMKEPTTKA

SEQ ID NO: 43606 - protein, 9 aa, Homo sapiens
  misc_feature: Table A; Target 43606; HLA-B*55:01; MAGEB4; ENSG00000120289; CTA
KMKEPTTKA

SEQ ID NO: 43607 - protein, 9 aa, Homo sapiens
  misc_feature: Table A; Target 43607; HLA-A*03:01; MAGEB4; ENSG00000120289; CTA
KMLVQFLLY

SEQ ID NO: 43608 - protein, 9 aa, Homo sapiens
  misc_feature: Table A; Target 43608; HLA-A*24:02; MAGEB4; ENSG00000120289; CTA
KMLVQFLLY

SEQ ID NO: 43609 - protein, 9 aa, Homo sapiens
  misc_feature: Table A; Target 43609; HLA-A*29:02; MAGEB4; ENSG00000120289; CTA
KMLVQFLLY

SEQ ID NO: 43610 - protein, 9 aa, Homo sapiens
  misc_feature: Table A; Target 43610; HLA-B*57:01; MAGEB4; ENSG00000120289; CTA
KMLVQFLLY

SEQ ID NO: 43611 - protein, 10 aa, Homo sapiens
  misc_feature: Table A; Target 43611; HLA-A*03:01; MAGEB4; ENSG00000120289; CTA
KMLVQFLLYK

SEQ ID NO: 43612 - protein, 10 aa, Homo sapiens
  misc_feature: Table A; Target 43612; HLA-A*03:01; MAGEB4; ENSG00000120289; CTA
KVGQPTAAEK

SEQ ID NO: 43613 - protein, 10 aa, Homo sapiens
  misc_feature: Table A; Target 43613; HLA-A*03:02; MAGEB4; ENSG00000120289; CTA
KVGQPTAAEK

SEQ ID NO: 43614 - protein, 10 aa, Homo sapiens
  misc_feature: Table A; Target 43614; HLA-A*11:01; MAGEB4; ENSG00000120289; CTA
KVGQPTAAEK

SEQ ID NO: 43615 - protein, 10 aa, Homo sapiens
  misc_feature: Table A; Target 43615; HLA-A*03:02; MAGEB4; ENSG00000120289; CTA
KVNDTTPNNF

SEQ ID NO: 43616 - protein, 10 aa, Homo sapiens
  misc_feature: Table A; Target 43616; HLA-A*25:01; MAGEB4; ENSG00000120289; CTA
KVNDTTPNNF

SEQ ID NO: 43617 - protein, 10 aa, Homo sapiens
  misc_feature: Table A; Target 43617; HLA-A*30:02; MAGEB4; ENSG00000120289; CTA
KVNDTTPNNF

SEQ ID NO: 43618 - protein, 10 aa, Homo sapiens
  misc_feature: Table A; Target 43618; HLA-A*32:01; MAGEB4; ENSG00000120289; CTA
KVNDTTPNNF

SEQ ID NO: 43619 - protein, 10 aa, Homo sapiens
  misc_feature: Table A; Target 43619; HLA-B*58:01; MAGEB4; ENSG00000120289; CTA
KVNDTTPNNF

SEQ ID NO: 43620 - protein, 8 aa, Homo sapiens
  misc_feature: Table A; Target 43620; HLA-B*07:02; MAGEB4; ENSG00000120289; CTA
KVSQRTEL

SEQ ID NO: 43621 - protein, 8 aa, Homo sapiens
  misc_feature: Table A; Target 43621; HLA-B*08:01; MAGEB4; ENSG00000120289; CTA
KVSQRTEL

SEQ ID NO: 43622 - protein, 8 aa, Homo sapiens
  misc_feature: Table A; Target 43622; HLA-C*16:01; MAGEB4; ENSG00000120289; CTA
KVSQRTEL

SEQ ID NO: 43623 - protein, 9 aa, Homo sapiens
  misc_feature: Table A; Target 43623; HLA-B*37:01; MAGEB4; ENSG00000120289; CTA
KVSQRTELV

SEQ ID NO: 43624 - protein, 9 aa, Homo sapiens
  misc_feature: Table A; Target 43624; HLA-A*24:02; MAGEB4; ENSG00000120289; CTA
KYKEHFPEI

SEQ ID NO: 43625 - protein, 9 aa, Homo sapiens
  misc_feature: Table A; Target 43625; HLA-A*32:01; MAGEB4; ENSG00000120289; CTA
LAFGIPQEP

SEQ ID NO: 43626 - protein, 9 aa, Homo sapiens
  misc_feature: Table A; Target 43626; HLA-B*54:01; MAGEB4; ENSG00000120289; CTA
LAFGIPQEP

SEQ ID NO: 43627 - protein, 9 aa, Homo sapiens
  misc_feature: Table A; Target 43627; HLA-C*02:02; MAGEB4; ENSG00000120289; CTA
LAFGIPQEP

SEQ ID NO: 43628 - protein, 9 aa, Homo sapiens
  misc_feature: Table A; Target 43628; HLA-C*12:03; MAGEB4; ENSG00000120289; CTA
LAFGIPQEP

SEQ ID NO: 43629 - protein, 9 aa, Homo sapiens
  misc_feature: Table A; Target 43629; HLA-C*16:04; MAGEB4; ENSG00000120289; CTA
LAFGIPQEP

SEQ ID NO: 43630 - protein, 11 aa, Homo sapiens
  misc_feature: Table A; Target 43630; HLA-A*68:01; MAGEB4; ENSG00000120289; CTA
LAFGIPQEPQR

SEQ ID NO: 43631 - protein, 9 aa, Homo sapiens
  misc_feature: Table A; Target 43631; HLA-B*49:01; MAGEB4; ENSG00000120289; CTA
LEYQQVPNS

SEQ ID NO: 43632 - protein, 10 aa, Homo sapiens
  misc_feature: Table A; Target 43632; HLA-B*27:02; MAGEB4; ENSG00000120289; CTA
LITQDLVQEK

SEQ ID NO: 43633 - protein, 9 aa, Homo sapiens
  misc_feature: Table A; Target 43633; HLA-B*15:03; MAGEB4; ENSG00000120289; CTA
LKVGQPTAA

SEQ ID NO: 43634 - protein, 9 aa, Homo sapiens
  misc_feature: Table A; Target 43634; HLA-A*02:01; MAGEB4; ENSG00000120289; CTA
LLMPLLSVI

SEQ ID NO: 43635 - protein, 9 aa, Homo sapiens
  misc_feature: Table A; Target 43635; HLA-A*02:03; MAGEB4; ENSG00000120289; CTA
LLMPLLSVI

SEQ ID NO: 43636 - protein, 9 aa, Homo sapiens
  misc_feature: Table A; Target 43636; HLA-A*02:04; MAGEB4; ENSG00000120289; CTA
LLMPLLSVI

SEQ ID NO: 43637 - protein, 9 aa, Homo sapiens
  misc_feature: Table A; Target 43637; HLA-A*02:07; MAGEB4; ENSG00000120289; CTA
LLMPLLSVI

SEQ ID NO: 43638 - protein, 11 aa, Homo sapiens
  misc_feature: Table A; Target 43638; HLA-A*02:04; MAGEB4; ENSG00000120289; CTA
LLMPLLSVIFL

SEQ ID NO: 43639 - protein, 9 aa, Homo sapiens
  misc_feature: Table A; Target 43639; HLA-A*24:02; MAGEB4; ENSG00000120289; CTA
LMPLLSVIF

SEQ ID NO: 43640 - protein, 10 aa, Homo sapiens
  misc_feature: Table A; Target 43640; HLA-B*27:02; MAGEB4; ENSG00000120289; CTA
LNMLGIYDGK

SEQ ID NO: 43641 - protein, 8 aa, Homo sapiens
  misc_feature: Table A; Target 43641; HLA-B*07:02; MAGEB4; ENSG00000120289; CTA
LPRNGLLM

SEQ ID NO: 43642 - protein, 8 aa, Homo sapiens
  misc_feature: Table A; Target 43642; HLA-B*51:01; MAGEB4; ENSG00000120289; CTA
LPRNGLLM

SEQ ID NO: 43643 - protein, 9 aa, Homo sapiens
  misc_feature: Table A; Target 43643; HLA-B*54:01; MAGEB4; ENSG00000120289; CTA
LPRNGLLMP

SEQ ID NO: 43644 - protein, 9 aa, Homo sapiens
  misc_feature: Table A; Target 43644; HLA-B*56:01; MAGEB4; ENSG00000120289; CTA
LPRNGLLMP

SEQ ID NO: 43645 - protein, 9 aa, Homo sapiens
  misc_feature: Table A; Target 43645; HLA-B*38:01; MAGEB4; ENSG00000120289; CTA
LRDTASSSL

SEQ ID NO: 43646 - protein, 9 aa, Homo sapiens
  misc_feature: Table A; Target 43646; HLA-B*39:01; MAGEB4; ENSG00000120289; CTA
LRDTASSSL

SEQ ID NO: 43647 - protein, 9 aa, Homo sapiens
  misc_feature: Table A; Target 43647; HLA-C*05:01; MAGEB4; ENSG00000120289; CTA
LRDTASSSL

SEQ ID NO: 43648 - protein, 10 aa, Homo sapiens
  misc_feature: Table A; Target 43648; HLA-A*02:03; MAGEB4; ENSG00000120289; CTA
LVFGLALKEV

SEQ ID NO: 43649 - protein, 9 aa, Homo sapiens
  misc_feature: Table A; Target 43649; HLA-A*29:02; MAGEB4; ENSG00000120289; CTA
LVQEKYLEY

SEQ ID NO: 43650 - protein, 9 aa, Homo sapiens
  misc_feature: Table A; Target 43650; HLA-A*29:02; MAGEB4; ENSG00000120289; CTA
MLKIISKKY

SEQ ID NO: 43651 - protein, 8 aa, Homo sapiens
  misc_feature: Table A; Target 43651; HLA-A*29:02; MAGEB4; ENSG00000120289; CTA
MLVQFLLY

SEQ ID NO: 43652 - protein, 9 aa, Homo sapiens
  misc_feature: Table A; Target 43652; HLA-A*03:01; MAGEB4; ENSG00000120289; CTA
MLVQFLLYK

SEQ ID NO: 43653 - protein, 10 aa, Homo sapiens
  misc_feature: Table A; Target 43653; HLA-A*29:02; MAGEB4; ENSG00000120289; CTA
MLVQFLLYKY

SEQ ID NO: 43654 - protein, 8 aa, Homo sapiens
  misc_feature: Table A; Target 43654; HLA-B*35:01; MAGEB4; ENSG00000120289; CTA
MPLLSVIF

SEQ ID NO: 43655 - protein, 8 aa, Homo sapiens
  misc_feature: Table A; Target 43655; HLA-B*35:03; MAGEB4; ENSG00000120289; CTA
MPLLSVIF

SEQ ID NO: 43656 - protein, 9 aa, Homo sapiens
  misc_feature: Table A; Target 43656; HLA-B*35:01; MAGEB4; ENSG00000120289; CTA
MPLLSVIFL

SEQ ID NO: 43657 - protein, 9 aa, Homo sapiens
  misc_feature: Table A; Target 43657; HLA-B*35:03; MAGEB4; ENSG00000120289; CTA
MPLLSVIFL

SEQ ID NO: 43658 - protein, 9 aa, Homo sapiens
  misc_feature: Table A; Target 43658; HLA-B*51:01; MAGEB4; ENSG00000120289; CTA
MPLLSVIFL

SEQ ID NO: 43659 - protein, 9 aa, Homo sapiens
  misc_feature: Table A; Target 43659; HLA-B*54:01; MAGEB4; ENSG00000120289; CTA
MPLLSVIFL

SEQ ID NO: 43660 - protein, 11 aa, Homo sapiens
  misc_feature: Table A; Target 43660; HLA-B*54:01; MAGEB4; ENSG00000120289; CTA
MPLLSVIFLNG

SEQ ID NO: 43661 - protein, 9 aa, Homo sapiens
  misc_feature: Table A; Target 43661; HLA-C*16:01; MAGEB4; ENSG00000120289; CTA
MTSAYSRAT

SEQ ID NO: 43662 - protein, 9 aa, Homo sapiens
  misc_feature: Table A; Target 43662; HLA-B*44:02; MAGEB4; ENSG00000120289; CTA
NDGNQSSAW

SEQ ID NO: 43663 - protein, 8 aa, Homo sapiens
  misc_feature: Table A; Target 43663; HLA-B*37:01; MAGEB4; ENSG00000120289; CTA
NDTTPNNF

SEQ ID NO: 43664 - protein, 10 aa, Homo sapiens
  misc_feature: Table A; Target 43664; HLA-A*33:01; MAGEB4; ENSG00000120289; CTA
NMLGIYDGKR

SEQ ID NO: 43665 - protein, 9 aa, Homo sapiens
  misc_feature: Table A; Target 43665; HLA-B*35:01; MAGEB4; ENSG00000120289; CTA
NPTTHSYIL

SEQ ID NO: 43666 - protein, 9 aa, Homo sapiens
  misc_feature: Table A; Target 43666; HLA-B*35:03; MAGEB4; ENSG00000120289; CTA
NPTTHSYIL

SEQ ID NO: 43667 - protein, 9 aa, Homo sapiens
  misc_feature: Table A; Target 43667; HLA-A*68:01; MAGEB4; ENSG00000120289; CTA
PSSSSSVLR

SEQ ID NO: 43668 - protein, 9 aa, Homo sapiens
  misc_feature: Table A; Target 43668; HLA-C*07:06; MAGEB4; ENSG00000120289; CTA
PSSSSSVLR

SEQ ID NO: 43669 - protein, 8 aa, Homo sapiens
  misc_feature: Table A; Target 43669; HLA-C*07:06; MAGEB4; ENSG00000120289; CTA
QASTSTER

SEQ ID NO: 43670 - protein, 10 aa, Homo sapiens
  misc_feature: Table A; Target 43670; HLA-B*07:02; MAGEB4; ENSG00000120289; CTA
QASTSTERSL

SEQ ID NO: 43671 - protein, 10 aa, Homo sapiens
  misc_feature: Table A; Target 43671; HLA-B*35:03; MAGEB4; ENSG00000120289; CTA
QASTSTERSL

SEQ ID NO: 43672 - protein, 10 aa, Homo sapiens
  misc_feature: Table A; Target 43672; HLA-C*03:03; MAGEB4; ENSG00000120289; CTA
QASTSTERSL

SEQ ID NO: 43673 - protein, 10 aa, Homo sapiens
  misc_feature: Table A; Target 43673; HLA-C*03:04; MAGEB4; ENSG00000120289; CTA
QASTSTERSL

SEQ ID NO: 43674 - protein, 10 aa, Homo sapiens
  misc_feature: Table A; Target 43674; HLA-C*16:01; MAGEB4; ENSG00000120289; CTA
QASTSTERSL

SEQ ID NO: 43675 - protein, 10 aa, Homo sapiens
  misc_feature: Table A; Target 43675; HLA-C*16:02; MAGEB4; ENSG00000120289; CTA
QASTSTERSL

SEQ ID NO: 43676 - protein, 11 aa, Homo sapiens
  misc_feature: Table A; Target 43676; HLA-A*30:02; MAGEB4; ENSG00000120289; CTA
QQVPNSDPPRY

SEQ ID NO: 43677 - protein, 11 aa, Homo sapiens
  misc_feature: Table A; Target 43677; HLA-A*32:01; MAGEB4; ENSG00000120289; CTA
QQVPNSDPPRY

SEQ ID NO: 43678 - protein, 11 aa, Homo sapiens
  misc_feature: Table A; Target 43678; HLA-B*15:01; MAGEB4; ENSG00000120289; CTA
QQVPNSDPPRY

SEQ ID NO: 43679 - protein, 11 aa, Homo sapiens
  misc_feature: Table A; Target 43679; HLA-B*15:03; MAGEB4; ENSG00000120289; CTA
QQVPNSDPPRY

SEQ ID NO: 43680 - protein, 11 aa, Homo sapiens
  misc_feature: Table A; Target 43680; HLA-B*39:01; MAGEB4; ENSG00000120289; CTA
QQVPNSDPPRY

SEQ ID NO: 43681 - protein, 11 aa, Homo sapiens
  misc_feature: Table A; Target 43681; HLA-B*58:01; MAGEB4; ENSG00000120289; CTA
QQVPNSDPPRY

SEQ ID NO: 43682 - protein, 9 aa, Homo sapiens
  misc_feature: Table A; Target 43682; HLA-B*27:05; MAGEB4; ENSG00000120289; CTA
QRTELVFGL

SEQ ID NO: 43683 - protein, 9 aa, Homo sapiens
  misc_feature: Table A; Target 43683; HLA-A*31:01; MAGEB4; ENSG00000120289; CTA
QSSAWTLPR

SEQ ID NO: 43684 - protein, 11 aa, Homo sapiens
  misc_feature: Table A; Target 43684; HLA-C*03:03; MAGEB4; ENSG00000120289; CTA
RATSSSSSQPM

SEQ ID NO: 43685 - protein, 11 aa, Homo sapiens
  misc_feature: Table A; Target 43685; HLA-C*03:04; MAGEB4; ENSG00000120289; CTA
RATSSSSSQPM

SEQ ID NO: 43686 - protein, 11 aa, Homo sapiens
  misc_feature: Table A; Target 43686; HLA-C*07:01; MAGEB4; ENSG00000120289; CTA
RATSSSSSQPM

SEQ ID NO: 43687 - protein, 11 aa, Homo sapiens
  misc_feature: Table A; Target 43687; HLA-C*16:01; MAGEB4; ENSG00000120289; CTA
RATSSSSSQPM

SEQ ID NO: 43688 - protein, 8 aa, Homo sapiens
  misc_feature: Table A; Target 43688; HLA-B*37:01; MAGEB4; ENSG00000120289; CTA
RDTASSSL

SEQ ID NO: 43689 - protein, 9 aa, Homo sapiens
  misc_feature: Table A; Target 43689; HLA-A*30:01; MAGEB4; ENSG00000120289; CTA
REPPTTSAA

SEQ ID NO: 43690 - protein, 9 aa, Homo sapiens
  misc_feature: Table A; Target 43690; HLA-B*37:01; MAGEB4; ENSG00000120289; CTA
REPPTTSAA

SEQ ID NO: 43691 - protein, 9 aa, Homo sapiens
  misc_feature: Table A; Target 43691; HLA-B*40:01; MAGEB4; ENSG00000120289; CTA
REPPTTSAA

SEQ ID NO: 43692 - protein, 9 aa, Homo sapiens
  misc_feature: Table A; Target 43692; HLA-B*49:01; MAGEB4; ENSG00000120289; CTA
REPPTTSAA

SEQ ID NO: 43693 - protein, 10 aa, Homo sapiens
  misc_feature: Table A; Target 43693; HLA-A*30:01; MAGEB4; ENSG00000120289; CTA
REPPTTSAAA

SEQ ID NO: 43694 - protein, 10 aa, Homo sapiens
  misc_feature: Table A; Target 43694; HLA-B*40:01; MAGEB4; ENSG00000120289; CTA
REPPTTSAAA

SEQ ID NO: 43695 - protein, 10 aa, Homo sapiens
  misc_feature: Table A; Target 43695; HLA-A*30:02; MAGEB4; ENSG00000120289; CTA
RGTTAMTSAY

SEQ ID NO: 43696 - protein, 10 aa, Homo sapiens
  misc_feature: Table A; Target 43696; HLA-B*15:01; MAGEB4; ENSG00000120289; CTA
RGTTAMTSAY

SEQ ID NO: 43697 - protein, 10 aa, Homo sapiens
  misc_feature: Table A; Target 43697; HLA-B*15:03; MAGEB4; ENSG00000120289; CTA
RGTTAMTSAY

SEQ ID NO: 43698 - protein, 10 aa, Homo sapiens
  misc_feature: Table A; Target 43698; HLA-B*46:01; MAGEB4; ENSG00000120289; CTA
RGTTAMTSAY

SEQ ID NO: 43699 - protein, 10 aa, Homo sapiens
  misc_feature: Table A; Target 43699; HLA-B*58:01; MAGEB4; ENSG00000120289; CTA
RGTTAMTSAY

SEQ ID NO: 43700 - protein, 9 aa, Homo sapiens
  misc_feature: Table A; Target 43700; HLA-A*31:01; MAGEB4; ENSG00000120289; CTA
RHLIFGEPR

SEQ ID NO: 43701 - protein, 9 aa, Homo sapiens
  misc_feature: Table A; Target 43701; HLA-B*57:01; MAGEB4; ENSG00000120289; CTA
RSLKDSLTR

SEQ ID NO: 43702 - protein, 10 aa, Homo sapiens
  misc_feature: Table A; Target 43702; HLA-A*03:01; MAGEB4; ENSG00000120289; CTA
RSLKDSLTRK

SEQ ID NO: 43703 - protein, 10 aa, Homo sapiens
  misc_feature: Table A; Target 43703; HLA-A*03:01; MAGEB4; ENSG00000120289; CTA
RTRGQTQDLK

SEQ ID NO: 43704 - protein, 10 aa, Homo sapiens
  misc_feature: Table A; Target 43704; HLA-A*03:02; MAGEB4; ENSG00000120289; CTA
RTRGQTQDLK

SEQ ID NO: 43705 - protein, 10 aa, Homo sapiens
  misc_feature: Table A; Target 43705; HLA-A*11:01; MAGEB4; ENSG00000120289; CTA
RTRGQTQDLK

SEQ ID NO: 43706 - protein, 9 aa, Homo sapiens
  misc_feature: Table A; Target 43706; HLA-B*08:01; MAGEB4; ENSG00000120289; CTA
SAYSRATSS

SEQ ID NO: 43707 - protein, 9 aa, Homo sapiens
  misc_feature: Table A; Target 43707; HLA-B*46:01; MAGEB4; ENSG00000120289; CTA
SAYSRATSS

SEQ ID NO: 43708 - protein, 9 aa, Homo sapiens
  misc_feature: Table A; Target 43708; HLA-C*12:03; MAGEB4; ENSG00000120289; CTA
SAYSRATSS

SEQ ID NO: 43709 - protein, 9 aa, Homo sapiens
  misc_feature: Table A; Target 43709; HLA-C*16:01; MAGEB4; ENSG00000120289; CTA
SAYSRATSS

SEQ ID NO: 43710 - protein, 9 aa, Homo sapiens
  misc_feature: Table A; Target 43710; HLA-A*03:01; MAGEB4; ENSG00000120289; CTA
SLKDSLTRK

SEQ ID NO: 43711 - protein, 8 aa, Homo sapiens
  misc_feature: Table A; Target 43711; HLA-B*07:02; MAGEB4; ENSG00000120289; CTA
SPSSSSSV

SEQ ID NO: 43712 - protein, 8 aa, Homo sapiens
  misc_feature: Table A; Target 43712; HLA-C*07:02; MAGEB4; ENSG00000120289; CTA
SPSSSSSV

SEQ ID NO: 43713 - protein, 9 aa, Homo sapiens
  misc_feature: Table A; Target 43713; HLA-B*35:01; MAGEB4; ENSG00000120289; CTA
SPSSSSSVL

SEQ ID NO: 43714 - protein, 9 aa, Homo sapiens
  misc_feature: Table A; Target 43714; HLA-B*35:03; MAGEB4; ENSG00000120289; CTA
SPSSSSSVL

SEQ ID NO: 43715 - protein, 9 aa, Homo sapiens
  misc_feature: Table A; Target 43715; HLA-B*39:01; MAGEB4; ENSG00000120289; CTA
SPSSSSSVL

SEQ ID NO: 43716 - protein, 9 aa, Homo sapiens
  misc_feature: Table A; Target 43716; HLA-B*55:01; MAGEB4; ENSG00000120289; CTA
SPSSSSSVL

SEQ ID NO: 43717 - protein, 9 aa, Homo sapiens
  misc_feature: Table A; Target 43717; HLA-B*56:01; MAGEB4; ENSG00000120289; CTA
SPSSSSSVL

SEQ ID NO: 43718 - protein, 9 aa, Homo sapiens
  misc_feature: Table A; Target 43718; HLA-C*01:02; MAGEB4; ENSG00000120289; CTA
SPSSSSSVL

SEQ ID NO: 43719 - protein, 9 aa, Homo sapiens
  misc_feature: Table A; Target 43719; HLA-C*03:03; MAGEB4; ENSG00000120289; CTA
SPSSSSSVL

SEQ ID NO: 43720 - protein, 9 aa, Homo sapiens
  misc_feature: Table A; Target 43720; HLA-C*07:02; MAGEB4; ENSG00000120289; CTA
SPSSSSSVL

SEQ ID NO: 43721 - protein, 9 aa, Homo sapiens
  misc_feature: Table A; Target 43721; HLA-C*14:02; MAGEB4; ENSG00000120289; CTA
SPSSSSSVL

SEQ ID NO: 43722 - protein, 10 aa, Homo sapiens
  misc_feature: Table A; Target 43722; HLA-A*68:01; MAGEB4; ENSG00000120289; CTA
SPSSSSSVLR

SEQ ID NO: 43723 - protein, 10 aa, Homo sapiens
  misc_feature: Table A; Target 43723; HLA-C*07:06; MAGEB4; ENSG00000120289; CTA
SPSSSSSVLR

SEQ ID NO: 43724 - protein, 9 aa, Homo sapiens
  misc_feature: Table A; Target 43724; HLA-B*27:05; MAGEB4; ENSG00000120289; CTA
SQASTSTER

SEQ ID NO: 43725 - protein, 9 aa, Homo sapiens
  misc_feature: Table A; Target 43725; HLA-C*07:06; MAGEB4; ENSG00000120289; CTA
SQASTSTER

SEQ ID NO: 43726 - protein, 11 aa, Homo sapiens
  misc_feature: Table A; Target 43726; HLA-B*38:01; MAGEB4; ENSG00000120289; CTA
SQASTSTERSL

SEQ ID NO: 43727 - protein, 8 aa, Homo sapiens
  misc_feature: Table A; Target 43727; HLA-B*15:01; MAGEB4; ENSG00000120289; CTA
SQRTELVF

SEQ ID NO: 43728 - protein, 8 aa, Homo sapiens
  misc_feature: Table A; Target 43728; HLA-B*15:03; MAGEB4; ENSG00000120289; CTA
SQRTELVF

SEQ ID NO: 43729 - protein, 10 aa, Homo sapiens
  misc_feature: Table A; Target 43729; HLA-A*68:01; MAGEB4; ENSG00000120289; CTA
SSQASTSTER

SEQ ID NO: 43730 - protein, 10 aa, Homo sapiens
  misc_feature: Table A; Target 43730; HLA-C*07:06; MAGEB4; ENSG00000120289; CTA
SSQASTSTER

SEQ ID NO: 43731 - protein, 8 aa, Homo sapiens
  misc_feature: Table A; Target 43731; HLA-B*13:02; MAGEB4; ENSG00000120289; CTA
SSSLAFGI

SEQ ID NO: 43732 - protein, 11 aa, Homo sapiens
  misc_feature: Table A; Target 43732; HLA-A*68:01; MAGEB4; ENSG00000120289; CTA
SSSQASTSTER

SEQ ID NO: 43733 - protein, 11 aa, Homo sapiens
  misc_feature: Table A; Target 43733; HLA-C*07:06; MAGEB4; ENSG00000120289; CTA
SSSQASTSTER

SEQ ID NO: 43734 - protein, 8 aa, Homo sapiens
  misc_feature: Table A; Target 43734; HLA-C*16:01; MAGEB4; ENSG00000120289; CTA
STSTERSL

SEQ ID NO: 43735 - protein, 9 aa, Homo sapiens
  misc_feature: Table A; Target 43735; HLA-A*03:02; MAGEB4; ENSG00000120289; CTA
STSTERSLK

SEQ ID NO: 43736 - protein, 9 aa, Homo sapiens
  misc_feature: Table A; Target 43736; HLA-A*11:01; MAGEB4; ENSG00000120289; CTA
STSTERSLK

SEQ ID NO: 43737 - protein, 11 aa, Homo sapiens
  misc_feature: Table A; Target 43737; HLA-A*31:01; MAGEB4; ENSG00000120289; CTA
SVIFLNGNCAR

SEQ ID NO: 43738 - protein, 11 aa, Homo sapiens
  misc_feature: Table A; Target 43738; HLA-A*25:01; MAGEB4; ENSG00000120289; CTA
SVLRDTASSSL

SEQ ID NO: 43739 - protein, 11 aa, Homo sapiens
  misc_feature: Table A; Target 43739; HLA-B*07:02; MAGEB4; ENSG00000120289; CTA
SVLRDTASSSL

SEQ ID NO: 43740 - protein, 11 aa, Homo sapiens
  misc_feature: Table A; Target 43740; HLA-B*58:01; MAGEB4; ENSG00000120289; CTA
SVLRDTASSSL

SEQ ID NO: 43741 - protein, 11 aa, Homo sapiens
  misc_feature: Table A; Target 43741; HLA-C*01:02; MAGEB4; ENSG00000120289; CTA
SVLRDTASSSL

SEQ ID NO: 43742 - protein, 11 aa, Homo sapiens
  misc_feature: Table A; Target 43742; HLA-C*03:03; MAGEB4; ENSG00000120289; CTA
SVLRDTASSSL

SEQ ID NO: 43743 - protein, 11 aa, Homo sapiens
  misc_feature: Table A; Target 43743; HLA-C*03:04; MAGEB4; ENSG00000120289; CTA
SVLRDTASSSL

SEQ ID NO: 43744 - protein, 8 aa, Homo sapiens
  misc_feature: Table A; Target 43744; HLA-A*23:01; MAGEB4; ENSG00000120289; CTA
SYILVSML

SEQ ID NO: 43745 - protein, 8 aa, Homo sapiens
  misc_feature: Table A; Target 43745; HLA-A*24:02; MAGEB4; ENSG00000120289; CTA
SYILVSML

SEQ ID NO: 43746 - protein, 8 aa, Homo sapiens
  misc_feature: Table A; Target 43746; HLA-C*14:02; MAGEB4; ENSG00000120289; CTA
SYILVSML

SEQ ID NO: 43747 - protein, 9 aa, Homo sapiens
  misc_feature: Table A; Target 43747; HLA-A*03:02; MAGEB4; ENSG00000120289; CTA
TAMTSAYSR

SEQ ID NO: 43748 - protein, 9 aa, Homo sapiens
  misc_feature: Table A; Target 43748; HLA-A*11:01; MAGEB4; ENSG00000120289; CTA
TAMTSAYSR

SEQ ID NO: 43749 - protein, 9 aa, Homo sapiens
  misc_feature: Table A; Target 43749; HLA-A*31:01; MAGEB4; ENSG00000120289; CTA
TAMTSAYSR

SEQ ID NO: 43750 - protein, 9 aa, Homo sapiens
  misc_feature: Table A; Target 43750; HLA-A*33:01; MAGEB4; ENSG00000120289; CTA
TAMTSAYSR

SEQ ID NO: 43751 - protein, 9 aa, Homo sapiens
  misc_feature: Table A; Target 43751; HLA-A*33:03; MAGEB4; ENSG00000120289; CTA
TAMTSAYSR

SEQ ID NO: 43752 - protein, 9 aa, Homo sapiens
  misc_feature: Table A; Target 43752; HLA-A*68:01; MAGEB4; ENSG00000120289; CTA
TAMTSAYSR

SEQ ID NO: 43753 - protein, 9 aa, Homo sapiens
  misc_feature: Table A; Target 43753; HLA-B*35:01; MAGEB4; ENSG00000120289; CTA
TAMTSAYSR

SEQ ID NO: 43754 - protein, 9 aa, Homo sapiens
  misc_feature: Table A; Target 43754; HLA-B*57:01; MAGEB4; ENSG00000120289; CTA
TAMTSAYSR

SEQ ID NO: 43755 - protein, 9 aa, Homo sapiens
  misc_feature: Table A; Target 43755; HLA-C*07:06; MAGEB4; ENSG00000120289; CTA
TAMTSAYSR

SEQ ID NO: 43756 - protein, 10 aa, Homo sapiens
  misc_feature: Table A; Target 43756; HLA-B*54:01; MAGEB4; ENSG00000120289; CTA
TAMTSAYSRA

SEQ ID NO: 43757 - protein, 8 aa, Homo sapiens
  misc_feature: Table A; Target 43757; HLA-B*35:01; MAGEB4; ENSG00000120289; CTA
TASSSLAF

SEQ ID NO: 43758 - protein, 8 aa, Homo sapiens
  misc_feature: Table A; Target 43758; HLA-B*35:03; MAGEB4; ENSG00000120289; CTA
TASSSLAF

SEQ ID NO: 43759 - protein, 8 aa, Homo sapiens
  misc_feature: Table A; Target 43759; HLA-B*37:01; MAGEB4; ENSG00000120289; CTA
TASSSLAF

SEQ ID NO: 43760 - protein, 8 aa, Homo sapiens
  misc_feature: Table A; Target 43760; HLA-C*03:03; MAGEB4; ENSG00000120289; CTA
TASSSLAF

SEQ ID NO: 43761 - protein, 8 aa, Homo sapiens
  misc_feature: Table A; Target 43761; HLA-C*03:04; MAGEB4; ENSG00000120289; CTA
TASSSLAF

SEQ ID NO: 43762 - protein, 8 aa, Homo sapiens
  misc_feature: Table A; Target 43762; HLA-C*05:01; MAGEB4; ENSG00000120289; CTA
TASSSLAF

SEQ ID NO: 43763 - protein, 8 aa, Homo sapiens
  misc_feature: Table A; Target 43763; HLA-C*16:01; MAGEB4; ENSG00000120289; CTA
TASSSLAF

SEQ ID NO: 43764 - protein, 8 aa, Homo sapiens
  misc_feature: Table A; Target 43764; HLA-B*18:01; MAGEB4; ENSG00000120289; CTA
TELVFGLA

SEQ ID NO: 43765 - protein, 8 aa, Homo sapiens
  misc_feature: Table A; Target 43765; HLA-B*49:01; MAGEB4; ENSG00000120289; CTA
TELVFGLA

SEQ ID NO: 43766 - protein, 9 aa, Homo sapiens
  misc_feature: Table A; Target 43766; HLA-A*30:01; MAGEB4; ENSG00000120289; CTA
TELVFGLAL

SEQ ID NO: 43767 - protein, 9 aa, Homo sapiens
  misc_feature: Table A; Target 43767; HLA-B*18:01; MAGEB4; ENSG00000120289; CTA
TELVFGLAL

SEQ ID NO: 43768 - protein, 9 aa, Homo sapiens
  misc_feature: Table A; Target 43768; HLA-B*37:01; MAGEB4; ENSG00000120289; CTA
TELVFGLAL

SEQ ID NO: 43769 - protein, 9 aa, Homo sapiens
  misc_feature: Table A; Target 43769; HLA-B*40:01; MAGEB4; ENSG00000120289; CTA
TELVFGLAL

SEQ ID NO: 43770 - protein, 9 aa, Homo sapiens
  misc_feature: Table A; Target 43770; HLA-B*40:02; MAGEB4; ENSG00000120289; CTA
TELVFGLAL

SEQ ID NO: 43771 - protein, 9 aa, Homo sapiens
  misc_feature: Table A; Target 43771; HLA-B*44:02; MAGEB4; ENSG00000120289; CTA
TELVFGLAL

SEQ ID NO: 43772 - protein, 9 aa, Homo sapiens
  misc_feature: Table A; Target 43772; HLA-B*44:03; MAGEB4; ENSG00000120289; CTA
TELVFGLAL

SEQ ID NO: 43773 - protein, 9 aa, Homo sapiens
  misc_feature: Table A; Target 43773; HLA-B*49:01; MAGEB4; ENSG00000120289; CTA
TELVFGLAL

SEQ ID NO: 43774 - protein, 9 aa, Homo sapiens
  misc_feature: Table A; Target 43774; HLA-A*30:01; MAGEB4; ENSG00000120289; CTA
TERSLKDSL

SEQ ID NO: 43775 - protein, 9 aa, Homo sapiens
  misc_feature: Table A; Target 43775; HLA-B*07:02; MAGEB4; ENSG00000120289; CTA
TERSLKDSL

SEQ ID NO: 43776 - protein, 9 aa, Homo sapiens
  misc_feature: Table A; Target 43776; HLA-B*18:01; MAGEB4; ENSG00000120289; CTA
TERSLKDSL

SEQ ID NO: 43777 - protein, 9 aa, Homo sapiens
  misc_feature: Table A; Target 43777; HLA-B*40:01; MAGEB4; ENSG00000120289; CTA
TERSLKDSL

SEQ ID NO: 43778 - protein, 9 aa, Homo sapiens
  misc_feature: Table A; Target 43778; HLA-B*40:02; MAGEB4; ENSG00000120289; CTA
TERSLKDSL

SEQ ID NO: 43779 - protein, 9 aa, Homo sapiens
  misc_feature: Table A; Target 43779; HLA-B*44:02; MAGEB4; ENSG00000120289; CTA
TERSLKDSL

SEQ ID NO: 43780 - protein, 9 aa, Homo sapiens
  misc_feature: Table A; Target 43780; HLA-B*44:03; MAGEB4; ENSG00000120289; CTA
TERSLKDSL

SEQ ID NO: 43781 - protein, 9 aa, Homo sapiens
  misc_feature: Table A; Target 43781; HLA-B*38:01; MAGEB4; ENSG00000120289; CTA
THSYILVSM

SEQ ID NO: 43782 - protein, 9 aa, Homo sapiens
  misc_feature: Table A; Target 43782; HLA-B*39:01; MAGEB4; ENSG00000120289; CTA
THSYILVSM

SEQ ID NO: 43783 - protein, 8 aa, Homo sapiens
  misc_feature: Table A; Target 43783; HLA-B*51:01; MAGEB4; ENSG00000120289; CTA
TPNNFPLL

SEQ ID NO: 43784 - protein, 9 aa, Homo sapiens
  misc_feature: Table A; Target 43784; HLA-A*01:01; MAGEB4; ENSG00000120289; CTA
TPNNFPLLY

SEQ ID NO: 43785 - protein, 9 aa, Homo sapiens
  misc_feature: Table A; Target 43785; HLA-A*26:01; MAGEB4; ENSG00000120289; CTA
TPNNFPLLY

SEQ ID NO: 43786 - protein, 9 aa, Homo sapiens
  misc_feature: Table A; Target 43786; HLA-A*29:02; MAGEB4; ENSG00000120289; CTA
TPNNFPLLY

SEQ ID NO: 43787 - protein, 9 aa, Homo sapiens
  misc_feature: Table A; Target 43787; HLA-A*30:02; MAGEB4; ENSG00000120289; CTA
TPNNFPLLY

SEQ ID NO: 43788 - protein, 9 aa, Homo sapiens
  misc_feature: Table A; Target 43788; HLA-B*18:01; MAGEB4; ENSG00000120289; CTA
TPNNFPLLY

SEQ ID NO: 43789 - protein, 9 aa, Homo sapiens
  misc_feature: Table A; Target 43789; HLA-B*35:01; MAGEB4; ENSG00000120289; CTA
TPNNFPLLY

SEQ ID NO: 43790 - protein, 9 aa, Homo sapiens
  misc_feature: Table A; Target 43790; HLA-B*44:03; MAGEB4; ENSG00000120289; CTA
TPNNFPLLY

SEQ ID NO: 43791 - protein, 9 aa, Homo sapiens
  misc_feature: Table A; Target 43791; HLA-B*51:01; MAGEB4; ENSG00000120289; CTA
TPNNFPLLY

SEQ ID NO: 43792 - protein, 9 aa, Homo sapiens
  misc_feature: Table A; Target 43792; HLA-B*55:01; MAGEB4; ENSG00000120289; CTA
TPNNFPLLY

SEQ ID NO: 43793 - protein, 9 aa, Homo sapiens
  misc_feature: Table A; Target 43793; HLA-C*02:02; MAGEB4; ENSG00000120289; CTA
TPNNFPLLY

SEQ ID NO: 43794 - protein, 9 aa, Homo sapiens
  misc_feature: Table A; Target 43794; HLA-C*12:03; MAGEB4; ENSG00000120289; CTA
TPNNFPLLY

SEQ ID NO: 43795 - protein, 9 aa, Homo sapiens
  misc_feature: Table A; Target 43795; HLA-B*27:05; MAGEB4; ENSG00000120289; CTA
TRGQTQDLK

SEQ ID NO: 43796 - protein, 9 aa, Homo sapiens
  misc_feature: Table A; Target 43796; HLA-A*33:03; MAGEB4; ENSG00000120289; CTA
TSSSSSQPM

SEQ ID NO: 43797 - protein, 9 aa, Homo sapiens
  misc_feature: Table A; Target 43797; HLA-A*68:01; MAGEB4; ENSG00000120289; CTA
TSSSSSQPM

SEQ ID NO: 43798 - protein, 9 aa, Homo sapiens
  misc_feature: Table A; Target 43798; HLA-B*27:05; MAGEB4; ENSG00000120289; CTA
TSSSSSQPM

SEQ ID NO: 43799 - protein, 9 aa, Homo sapiens
  misc_feature: Table A; Target 43799; HLA-B*35:01; MAGEB4; ENSG00000120289; CTA
TSSSSSQPM

SEQ ID NO: 43800 - protein, 9 aa, Homo sapiens
  misc_feature: Table A; Target 43800; HLA-B*35:03; MAGEB4; ENSG00000120289; CTA
TSSSSSQPM

SEQ ID NO: 43801 - protein, 9 aa, Homo sapiens
  misc_feature: Table A; Target 43801; HLA-B*37:01; MAGEB4; ENSG00000120289; CTA
TSSSSSQPM

SEQ ID NO: 43802 - protein, 9 aa, Homo sapiens
  misc_feature: Table A; Target 43802; HLA-B*39:01; MAGEB4; ENSG00000120289; CTA
TSSSSSQPM

SEQ ID NO: 43803 - protein, 9 aa, Homo sapiens
  misc_feature: Table A; Target 43803; HLA-B*40:02; MAGEB4; ENSG00000120289; CTA
TSSSSSQPM

SEQ ID NO: 43804 - protein, 9 aa, Homo sapiens
  misc_feature: Table A; Target 43804; HLA-B*55:01; MAGEB4; ENSG00000120289; CTA
TSSSSSQPM

SEQ ID NO: 43805 - protein, 9 aa, Homo sapiens
  misc_feature: Table A; Target 43805; HLA-B*58:01; MAGEB4; ENSG00000120289; CTA
TSSSSSQPM

SEQ ID NO: 43806 - protein, 9 aa, Homo sapiens
  misc_feature: Table A; Target 43806; HLA-C*01:02; MAGEB4; ENSG00000120289; CTA
TSSSSSQPM

SEQ ID NO: 43807 - protein, 9 aa, Homo sapiens
  misc_feature: Table A; Target 43807; HLA-C*02:02; MAGEB4; ENSG00000120289; CTA
TSSSSSQPM

SEQ ID NO: 43808 - protein, 9 aa, Homo sapiens
  misc_feature: Table A; Target 43808; HLA-C*03:03; MAGEB4; ENSG00000120289; CTA
TSSSSSQPM

SEQ ID NO: 43809 - protein, 9 aa, Homo sapiens
  misc_feature: Table A; Target 43809; HLA-C*03:04; MAGEB4; ENSG00000120289; CTA
TSSSSSQPM

SEQ ID NO: 43810 - protein, 9 aa, Homo sapiens
  misc_feature: Table A; Target 43810; HLA-C*04:01; MAGEB4; ENSG00000120289; CTA
TSSSSSQPM

SEQ ID NO: 43811 - protein, 9 aa, Homo sapiens
  misc_feature: Table A; Target 43811; HLA-C*05:01; MAGEB4; ENSG00000120289; CTA
TSSSSSQPM

SEQ ID NO: 43812 - protein, 9 aa, Homo sapiens
  misc_feature: Table A; Target 43812; HLA-C*06:02; MAGEB4; ENSG00000120289; CTA
TSSSSSQPM

SEQ ID NO: 43813 - protein, 9 aa, Homo sapiens
  misc_feature: Table A; Target 43813; HLA-C*07:01; MAGEB4; ENSG00000120289; CTA
TSSSSSQPM

SEQ ID NO: 43814 - protein, 9 aa, Homo sapiens
  misc_feature: Table A; Target 43814; HLA-C*07:02; MAGEB4; ENSG00000120289; CTA
TSSSSSQPM

SEQ ID NO: 43815 - protein, 9 aa, Homo sapiens
  misc_feature: Table A; Target 43815; HLA-C*07:04; MAGEB4; ENSG00000120289; CTA
TSSSSSQPM

SEQ ID NO: 43816 - protein, 9 aa, Homo sapiens
  misc_feature: Table A; Target 43816; HLA-C*07:06; MAGEB4; ENSG00000120289; CTA
TSSSSSQPM

SEQ ID NO: 43817 - protein, 9 aa, Homo sapiens
  misc_feature: Table A; Target 43817; HLA-C*12:03; MAGEB4; ENSG00000120289; CTA
TSSSSSQPM

SEQ ID NO: 43818 - protein, 9 aa, Homo sapiens
  misc_feature: Table A; Target 43818; HLA-C*14:02; MAGEB4; ENSG00000120289; CTA
TSSSSSQPM

SEQ ID NO: 43819 - protein, 9 aa, Homo sapiens
  misc_feature: Table A; Target 43819; HLA-C*16:01; MAGEB4; ENSG00000120289; CTA
TSSSSSQPM

SEQ ID NO: 43820 - protein, 9 aa, Homo sapiens
  misc_feature: Table A; Target 43820; HLA-C*16:02; MAGEB4; ENSG00000120289; CTA
TSSSSSQPM

SEQ ID NO: 43821 - protein, 8 aa, Homo sapiens
  misc_feature: Table A; Target 43821; HLA-C*16:01; MAGEB4; ENSG00000120289; CTA
TSTERSLK

SEQ ID NO: 43822 - protein, 8 aa, Homo sapiens
  misc_feature: Table A; Target 43822; HLA-A*01:01; MAGEB4; ENSG00000120289; CTA
TTAMTSAY

SEQ ID NO: 43823 - protein, 8 aa, Homo sapiens
  misc_feature: Table A; Target 43823; HLA-A*25:01; MAGEB4; ENSG00000120289; CTA
TTAMTSAY

SEQ ID NO: 43824 - protein, 8 aa, Homo sapiens
  misc_feature: Table A; Target 43824; HLA-A*26:01; MAGEB4; ENSG00000120289; CTA
TTAMTSAY

SEQ ID NO: 43825 - protein, 8 aa, Homo sapiens
  misc_feature: Table A; Target 43825; HLA-A*30:02; MAGEB4; ENSG00000120289; CTA
TTAMTSAY

SEQ ID NO: 43826 - protein, 8 aa, Homo sapiens
  misc_feature: Table A; Target 43826; HLA-A*32:01; MAGEB4; ENSG00000120289; CTA
TTAMTSAY

SEQ ID NO: 43827 - protein, 8 aa, Homo sapiens
  misc_feature: Table A; Target 43827; HLA-B*15:01; MAGEB4; ENSG00000120289; CTA
TTAMTSAY

SEQ ID NO: 43828 - protein, 8 aa, Homo sapiens
  misc_feature: Table A; Target 43828; HLA-B*15:03; MAGEB4; ENSG00000120289; CTA
TTAMTSAY

SEQ ID NO: 43829 - protein, 8 aa, Homo sapiens
  misc_feature: Table A; Target 43829; HLA-B*18:01; MAGEB4; ENSG00000120289; CTA
TTAMTSAY

SEQ ID NO: 43830 - protein, 8 aa, Homo sapiens
  misc_feature: Table A; Target 43830; HLA-B*46:01; MAGEB4; ENSG00000120289; CTA
TTAMTSAY

SEQ ID NO: 43831 - protein, 8 aa, Homo sapiens
  misc_feature: Table A; Target 43831; HLA-C*01:02; MAGEB4; ENSG00000120289; CTA
TTAMTSAY

SEQ ID NO: 43832 - protein, 8 aa, Homo sapiens
  misc_feature: Table A; Target 43832; HLA-C*03:03; MAGEB4; ENSG00000120289; CTA
TTAMTSAY

SEQ ID NO: 43833 - protein, 8 aa, Homo sapiens
  misc_feature: Table A; Target 43833; HLA-C*04:01; MAGEB4; ENSG00000120289; CTA
TTAMTSAY

SEQ ID NO: 43834 - protein, 8 aa, Homo sapiens
  misc_feature: Table A; Target 43834; HLA-C*07:01; MAGEB4; ENSG00000120289; CTA
TTAMTSAY

SEQ ID NO: 43835 - protein, 8 aa, Homo sapiens
  misc_feature: Table A; Target 43835; HLA-C*07:04; MAGEB4; ENSG00000120289; CTA
TTAMTSAY

SEQ ID NO: 43836 - protein, 8 aa, Homo sapiens
  misc_feature: Table A; Target 43836; HLA-C*12:03; MAGEB4; ENSG00000120289; CTA
TTAMTSAY

SEQ ID NO: 43837 - protein, 8 aa, Homo sapiens
  misc_feature: Table A; Target 43837; HLA-C*14:02; MAGEB4; ENSG00000120289; CTA
TTAMTSAY

SEQ ID NO: 43838 - protein, 8 aa, Homo sapiens
  misc_feature: Table A; Target 43838; HLA-C*16:02; MAGEB4; ENSG00000120289; CTA
TTAMTSAY

SEQ ID NO: 43839 - protein, 10 aa, Homo sapiens
  misc_feature: Table A; Target 43839; HLA-A*03:02; MAGEB4; ENSG00000120289; CTA
TTAMTSAYSR

SEQ ID NO: 43840 - protein, 10 aa, Homo sapiens
  misc_feature: Table A; Target 43840; HLA-A*11:01; MAGEB4; ENSG00000120289; CTA
TTAMTSAYSR

SEQ ID NO: 43841 - protein, 10 aa, Homo sapiens
  misc_feature: Table A; Target 43841; HLA-A*31:01; MAGEB4; ENSG00000120289; CTA
TTAMTSAYSR

SEQ ID NO: 43842 - protein, 10 aa, Homo sapiens
  misc_feature: Table A; Target 43842; HLA-A*33:03; MAGEB4; ENSG00000120289; CTA
TTAMTSAYSR

SEQ ID NO: 43843 - protein, 10 aa, Homo sapiens
  misc_feature: Table A; Target 43843; HLA-A*68:01; MAGEB4; ENSG00000120289; CTA
TTAMTSAYSR

SEQ ID NO: 43844 - protein, 10 aa, Homo sapiens
  misc_feature: Table A; Target 43844; HLA-B*27:02; MAGEB4; ENSG00000120289; CTA
TTAMTSAYSR

SEQ ID NO: 43845 - protein, 10 aa, Homo sapiens
  misc_feature: Table A; Target 43845; HLA-C*07:06; MAGEB4; ENSG00000120289; CTA
TTAMTSAYSR

SEQ ID NO: 43846 - protein, 9 aa, Homo sapiens
  misc_feature: Table A; Target 43846; HLA-A*02:07; MAGEB4; ENSG00000120289; CTA
TTPNNFPLL

SEQ ID NO: 43847 - protein, 9 aa, Homo sapiens
  misc_feature: Table A; Target 43847; HLA-A*24:02; MAGEB4; ENSG00000120289; CTA
TTPNNFPLL

SEQ ID NO: 43848 - protein, 9 aa, Homo sapiens
  misc_feature: Table A; Target 43848; HLA-A*25:01; MAGEB4; ENSG00000120289; CTA
TTPNNFPLL

SEQ ID NO: 43849 - protein, 9 aa, Homo sapiens
  misc_feature: Table A; Target 43849; HLA-A*26:01; MAGEB4; ENSG00000120289; CTA
TTPNNFPLL

SEQ ID NO: 43850 - protein, 9 aa, Homo sapiens
  misc_feature: Table A; Target 43850; HLA-A*68:02; MAGEB4; ENSG00000120289; CTA
TTPNNFPLL

SEQ ID NO: 43851 - protein, 10 aa, Homo sapiens
  misc_feature: Table A; Target 43851; HLA-A*01:01; MAGEB4; ENSG00000120289; CTA
TTPNNFPLLY

SEQ ID NO: 43852 - protein, 10 aa, Homo sapiens
  misc_feature: Table A; Target 43852; HLA-A*25:01; MAGEB4; ENSG00000120289; CTA
TTPNNFPLLY

SEQ ID NO: 43853 - protein, 10 aa, Homo sapiens
  misc_feature: Table A; Target 43853; HLA-A*26:01; MAGEB4; ENSG00000120289; CTA
TTPNNFPLLY

SEQ ID NO: 43854 - protein, 10 aa, Homo sapiens
  misc_feature: Table A; Target 43854; HLA-A*29:02; MAGEB4; ENSG00000120289; CTA
TTPNNFPLLY

SEQ ID NO: 43855 - protein, 10 aa, Homo sapiens
  misc_feature: Table A; Target 43855; HLA-B*57:01; MAGEB4; ENSG00000120289; CTA
TTPNNFPLLY

SEQ ID NO: 43856 - protein, 9 aa, Homo sapiens
  misc_feature: Table A; Target 43856; HLA-B*54:01; MAGEB4; ENSG00000120289; CTA
VAARRGTTA

SEQ ID NO: 43857 - protein, 9 aa, Homo sapiens
  misc_feature: Table A; Target 43857; HLA-C*16:01; MAGEB4; ENSG00000120289; CTA
VAARRGTTA

SEQ ID NO: 43858 - protein, 9 aa, Homo sapiens
  misc_feature: Table A; Target 43858; HLA-A*03:02; MAGEB4; ENSG00000120289; CTA
VGQPTAAEK

SEQ ID NO: 43859 - protein, 9 aa, Homo sapiens
  misc_feature: Table A; Target 43859; HLA-A*11:01; MAGEB4; ENSG00000120289; CTA
VGQPTAAEK

SEQ ID NO: 43860 - protein, 9 aa, Homo sapiens
  misc_feature: Table A; Target 43860; HLA-B*27:02; MAGEB4; ENSG00000120289; CTA
VGQPTAAEK

SEQ ID NO: 43861 - protein, 9 aa, Homo sapiens
  misc_feature: Table A; Target 43861; HLA-C*01:02; MAGEB4; ENSG00000120289; CTA
VGQPTAAEK

SEQ ID NO: 43862 - protein, 9 aa, Homo sapiens
  misc_feature: Table A; Target 43862; HLA-C*07:06; MAGEB4; ENSG00000120289; CTA
VGQPTAAEK

SEQ ID NO: 43863 - protein, 10 aa, Homo sapiens
  misc_feature: Table A; Target 43863; HLA-A*02:03; MAGEB4; ENSG00000120289; CTA
VLRDTASSSL

SEQ ID NO: 43864 - protein, 10 aa, Homo sapiens
  misc_feature: Table A; Target 43864; HLA-A*03:01; MAGEB4; ENSG00000120289; CTA
VLRDTASSSL

SEQ ID NO: 43865 - protein, 10 aa, Homo sapiens
  misc_feature: Table A; Target 43865; HLA-B*07:02; MAGEB4; ENSG00000120289; CTA
VLRDTASSSL

SEQ ID NO: 43866 - protein, 10 aa, Homo sapiens
  misc_feature: Table A; Target 43866; HLA-B*15:01; MAGEB4; ENSG00000120289; CTA
VLRDTASSSL

SEQ ID NO: 43867 - protein, 10 aa, Homo sapiens
  misc_feature: Table A; Target 43867; HLA-B*15:03; MAGEB4; ENSG00000120289; CTA
VLRDTASSSL

SEQ ID NO: 43868 - protein, 10 aa, Homo sapiens
  misc_feature: Table A; Target 43868; HLA-B*46:01; MAGEB4; ENSG00000120289; CTA
VLRDTASSSL

SEQ ID NO: 43869 - protein, 10 aa, Homo sapiens
  misc_feature: Table A; Target 43869; HLA-C*01:02; MAGEB4; ENSG00000120289; CTA
VLRDTASSSL

SEQ ID NO: 43870 - protein, 10 aa, Homo sapiens
  misc_feature: Table A; Target 43870; HLA-C*07:02; MAGEB4; ENSG00000120289; CTA
VLRDTASSSL

SEQ ID NO: 43871 - protein, 10 aa, Homo sapiens
  misc_feature: Table A; Target 43871; HLA-C*07:04; MAGEB4; ENSG00000120289; CTA
VLRDTASSSL

SEQ ID NO: 43872 - protein, 10 aa, Homo sapiens
  misc_feature: Table A; Target 43872; HLA-C*14:02; MAGEB4; ENSG00000120289; CTA
VLRDTASSSL

SEQ ID NO: 43873 - protein, 9 aa, Homo sapiens
  misc_feature: Table A; Target 43873; HLA-C*04:01; MAGEB4; ENSG00000120289; CTA
VNDTTPNNF

SEQ ID NO: 43874 - protein, 9 aa, Homo sapiens
  misc_feature: Table A; Target 43874; HLA-C*05:01; MAGEB4; ENSG00000120289; CTA
VNDTTPNNF

SEQ ID NO: 43875 - protein, 8 aa, Homo sapiens
  misc_feature: Table A; Target 43875; HLA-C*14:02; MAGEB4; ENSG00000120289; CTA
VNPTTHSY

SEQ ID NO: 43876 - protein, 9 aa, Homo sapiens
  misc_feature: Table A; Target 43876; HLA-A*23:01; MAGEB4; ENSG00000120289; CTA
VSQRTELVF

SEQ ID NO: 43877 - protein, 9 aa, Homo sapiens
  misc_feature: Table A; Target 43877; HLA-A*32:01; MAGEB4; ENSG00000120289; CTA
VSQRTELVF

SEQ ID NO: 43878 - protein, 9 aa, Homo sapiens
  misc_feature: Table A; Target 43878; HLA-B*15:01; MAGEB4; ENSG00000120289; CTA
VSQRTELVF

SEQ ID NO: 43879 - protein, 9 aa, Homo sapiens
  misc_feature: Table A; Target 43879; HLA-B*46:01; MAGEB4; ENSG00000120289; CTA
VSQRTELVF

SEQ ID NO: 43880 - protein, 9 aa, Homo sapiens
  misc_feature: Table A; Target 43880; HLA-B*57:01; MAGEB4; ENSG00000120289; CTA
VSQRTELVF

SEQ ID NO: 43881 - protein, 9 aa, Homo sapiens
  misc_feature: Table A; Target 43881; HLA-B*58:01; MAGEB4; ENSG00000120289; CTA
VSQRTELVF

SEQ ID NO: 43882 - protein, 9 aa, Homo sapiens
  misc_feature: Table A; Target 43882; HLA-C*03:04; MAGEB4; ENSG00000120289; CTA
VSQRTELVF

SEQ ID NO: 43883 - protein, 9 aa, Homo sapiens
  misc_feature: Table A; Target 43883; HLA-C*12:03; MAGEB4; ENSG00000120289; CTA
VSQRTELVF

SEQ ID NO: 43884 - protein, 9 aa, Homo sapiens
  misc_feature: Table A; Target 43884; HLA-C*16:01; MAGEB4; ENSG00000120289; CTA
VSQRTELVF

SEQ ID NO: 43885 - protein, 9 aa, Homo sapiens
  misc_feature: Table A; Target 43885; HLA-B*49:01; MAGEB4; ENSG00000120289; CTA
WEFLNMLGI

SEQ ID NO: 43886 - protein, 10 aa, Homo sapiens
  misc_feature: Table A; Target 43886; HLA-A*11:01; MAGEB6; ENSG00000176746; CTA
ACTLAQFLQK

SEQ ID NO: 43887 - protein, 11 aa, Homo sapiens
  misc_feature: Table A; Target 43887; HLA-A*30:02; MAGEB6; ENSG00000176746; CTA
ADSSNTSPGLY

SEQ ID NO: 43888 - protein, 9 aa, Homo sapiens
  misc_feature: Table A; Target 43888; HLA-A*30:01; MAGEB6; ENSG00000176746; CTA
AETTKMRVL

SEQ ID NO: 43889 - protein, 9 aa, Homo sapiens
  misc_feature: Table A; Target 43889; HLA-B*37:01; MAGEB6; ENSG00000176746; CTA
AETTKMRVL

SEQ ID NO: 43890 - protein, 9 aa, Homo sapiens
  misc_feature: Table A; Target 43890; HLA-B*40:01; MAGEB6; ENSG00000176746; CTA
AETTKMRVL

SEQ ID NO: 43891 - protein, 9 aa, Homo sapiens
  misc_feature: Table A; Target 43891; HLA-B*40:02; MAGEB6; ENSG00000176746; CTA
AETTKMRVL

SEQ ID NO: 43892 - protein, 9 aa, Homo sapiens
  misc_feature: Table A; Target 43892; HLA-B*44:02; MAGEB6; ENSG00000176746; CTA
AETTKMRVL

SEQ ID NO: 43893 - protein, 9 aa, Homo sapiens
  misc_feature: Table A; Target 43893; HLA-B*44:03; MAGEB6; ENSG00000176746; CTA
AETTKMRVL

SEQ ID NO: 43894 - protein, 9 aa, Homo sapiens
  misc_feature: Table A; Target 43894; HLA-C*12:03; MAGEB6; ENSG00000176746; CTA
AETTKMRVL

SEQ ID NO: 43895 - protein, 9 aa, Homo sapiens
  misc_feature: Table A; Target 43895; HLA-C*16:01; MAGEB6; ENSG00000176746; CTA
AETTKMRVL

SEQ ID NO: 43896 - protein, 9 aa, Homo sapiens
  misc_feature: Table A; Target 43896; HLA-C*16:02; MAGEB6; ENSG00000176746; CTA
AETTKMRVL

SEQ ID NO: 43897 - protein, 9 aa, Homo sapiens
  misc_feature: Table A; Target 43897; HLA-A*02:03; MAGEB6; ENSG00000176746; CTA
ALIDEVERA

SEQ ID NO: 43898 - protein, 9 aa, Homo sapiens
  misc_feature: Table A; Target 43898; HLA-A*02:04; MAGEB6; ENSG00000176746; CTA
ALIDEVERA

SEQ ID NO: 43899 - protein, 9 aa, Homo sapiens
  misc_feature: Table A; Target 43899; HLA-A*02:07; MAGEB6; ENSG00000176746; CTA
ALIDEVERA

SEQ ID NO: 43900 - protein, 9 aa, Homo sapiens
  misc_feature: Table A; Target 43900; HLA-B*55:01; MAGEB6; ENSG00000176746; CTA
ALIDEVERA

SEQ ID NO: 43901 - protein, 10 aa, Homo sapiens
  misc_feature: Table A; Target 43901; HLA-A*02:01; MAGEB6; ENSG00000176746; CTA
ALIDEVERAL

SEQ ID NO: 43902 - protein, 10 aa, Homo sapiens
  misc_feature: Table A; Target 43902; HLA-A*02:03; MAGEB6; ENSG00000176746; CTA
ALIDEVERAL

SEQ ID NO: 43903 - protein, 10 aa, Homo sapiens
  misc_feature: Table A; Target 43903; HLA-A*02:04; MAGEB6; ENSG00000176746; CTA
ALIDEVERAL

SEQ ID NO: 43904 - protein, 10 aa, Homo sapiens
  misc_feature: Table A; Target 43904; HLA-A*25:01; MAGEB6; ENSG00000176746; CTA
ALIDEVERAL

SEQ ID NO: 43905 - protein, 10 aa, Homo sapiens
  misc_feature: Table A; Target 43905; HLA-A*30:01; MAGEB6; ENSG00000176746; CTA
ALIDEVERAL

SEQ ID NO: 43906 - protein, 10 aa, Homo sapiens
  misc_feature: Table A; Target 43906; HLA-B*15:01; MAGEB6; ENSG00000176746; CTA
ALIDEVERAL

SEQ ID NO: 43907 - protein, 10 aa, Homo sapiens
  misc_feature: Table A; Target 43907; HLA-B*40:01; MAGEB6; ENSG00000176746; CTA
ALIDEVERAL

SEQ ID NO: 43908 - protein, 10 aa, Homo sapiens
  misc_feature: Table A; Target 43908; HLA-B*46:01; MAGEB6; ENSG00000176746; CTA
ALIDEVERAL

SEQ ID NO: 43909 - protein, 10 aa, Homo sapiens
  misc_feature: Table A; Target 43909; HLA-B*55:01; MAGEB6; ENSG00000176746; CTA
ALIDEVERAL

SEQ ID NO: 43910 - protein, 10 aa, Homo sapiens
  misc_feature: Table A; Target 43910; HLA-C*01:02; MAGEB6; ENSG00000176746; CTA
ALIDEVERAL

SEQ ID NO: 43911 - protein, 11 aa, Homo sapiens
  misc_feature: Table A; Target 43911; HLA-A*31:01; MAGEB6; ENSG00000176746; CTA
ALIDEVERALR

SEQ ID NO: 43912 - protein, 9 aa, Homo sapiens
  misc_feature: Table A; Target 43912; HLA-A*01:01; MAGEB6; ENSG00000176746; CTA
ALPKSGLLM

SEQ ID NO: 43913 - protein, 9 aa, Homo sapiens
  misc_feature: Table A; Target 43913; HLA-A*03:01; MAGEB6; ENSG00000176746; CTA
ALPKSGLLM

SEQ ID NO: 43914 - protein, 11 aa, Homo sapiens
  misc_feature: Table A; Target 43914; HLA-A*02:04; MAGEB6; ENSG00000176746; CTA
ALPKSGLLMSL

SEQ ID NO: 43915 - protein, 11 aa, Homo sapiens
  misc_feature: Table A; Target 43915; HLA-A*02:07; MAGEB6; ENSG00000176746; CTA
ALPKSGLLMSL

SEQ ID NO: 43916 - protein, 8 aa, Homo sapiens
  misc_feature: Table A; Target 43916; HLA-B*15:01; MAGEB6; ENSG00000176746; CTA
AQFLQKKF

SEQ ID NO: 43917 - protein, 8 aa, Homo sapiens
  misc_feature: Table A; Target 43917; HLA-B*15:03; MAGEB6; ENSG00000176746; CTA
AQFLQKKF

SEQ ID NO: 43918 - protein, 10 aa, Homo sapiens
  misc_feature: Table A; Target 43918; HLA-A*11:01; MAGEB6; ENSG00000176746; CTA
AQFLQKKFEK

SEQ ID NO: 43919 - protein, 8 aa, Homo sapiens
  misc_feature: Table A; Target 43919; HLA-B*58:01; MAGEB6; ENSG00000176746; CTA
ASQKAIIF

SEQ ID NO: 43920 - protein, 9 aa, Homo sapiens
  misc_feature: Table A; Target 43920; HLA-A*03:01; MAGEB6; ENSG00000176746; CTA
ASQKAIIFK

SEQ ID NO: 43921 - protein, 9 aa, Homo sapiens
  misc_feature: Table A; Target 43921; HLA-A*03:02; MAGEB6; ENSG00000176746; CTA
ASQKAIIFK

SEQ ID NO: 43922 - protein, 9 aa, Homo sapiens
  misc_feature: Table A; Target 43922; HLA-A*31:01; MAGEB6; ENSG00000176746; CTA
ASQKAIIFK

SEQ ID NO: 43923 - protein, 10 aa, Homo sapiens
  misc_feature: Table A; Target 43923; HLA-A*31:01; MAGEB6; ENSG00000176746; CTA
ASQKAIIFKR

SEQ ID NO: 43924 - protein, 9 aa, Homo sapiens
  misc_feature: Table A; Target 43924; HLA-C*05:01; MAGEB6; ENSG00000176746; CTA
ATEEEVWEF

SEQ ID NO: 43925 - protein, 9 aa, Homo sapiens
  misc_feature: Table A; Target 43925; HLA-B*08:01; MAGEB6; ENSG00000176746; CTA
AVKKKACTL

SEQ ID NO: 43926 - protein, 9 aa, Homo sapiens
  misc_feature: Table A; Target 43926; HLA-A*31:01; MAGEB6; ENSG00000176746; CTA
AYAETTKMR

SEQ ID NO: 43927 - protein, 9 aa, Homo sapiens
  misc_feature: Table A; Target 43927; HLA-A*33:03; MAGEB6; ENSG00000176746; CTA
AYAETTKMR

SEQ ID NO: 43928 - protein, 11 aa, Homo sapiens
  misc_feature: Table A; Target 43928; HLA-A*24:02; MAGEB6; ENSG00000176746; CTA
AYAETTKMRVL

SEQ ID NO: 43929 - protein, 9 aa, Homo sapiens
  misc_feature: Table A; Target 43929; HLA-A*03:01; MAGEB6; ENSG00000176746; CTA
CTLAQFLQK

SEQ ID NO: 43930 - protein, 9 aa, Homo sapiens
  misc_feature: Table A; Target 43930; HLA-A*03:02; MAGEB6; ENSG00000176746; CTA
CTLAQFLQK

SEQ ID NO: 43931 - protein, 9 aa, Homo sapiens
  misc_feature: Table A; Target 43931; HLA-A*11:01; MAGEB6; ENSG00000176746; CTA
CTLAQFLQK

SEQ ID NO: 43932 - protein, 10 aa, Homo sapiens
  misc_feature: Table A; Target 43932; HLA-A*11:01; MAGEB6; ENSG00000176746; CTA
CTLAQFLQKK

SEQ ID NO: 43933 - protein, 9 aa, Homo sapiens
  misc_feature: Table A; Target 43933; HLA-A*33:01; MAGEB6; ENSG00000176746; CTA
DALIDEVER

SEQ ID NO: 43934 - protein, 9 aa, Homo sapiens
  misc_feature: Table A; Target 43934; HLA-A*33:03; MAGEB6; ENSG00000176746; CTA
DALIDEVER

SEQ ID NO: 43935 - protein, 9 aa, Homo sapiens
  misc_feature: Table A; Target 43935; HLA-A*68:01; MAGEB6; ENSG00000176746; CTA
DALIDEVER

SEQ ID NO: 43936 - protein, 9 aa, Homo sapiens
  misc_feature: Table A; Target 43936; HLA-C*07:06; MAGEB6; ENSG00000176746; CTA
DALIDEVER

SEQ ID NO: 43937 - protein, 9 aa, Homo sapiens
  misc_feature: Table A; Target 43937; HLA-C*07:06; MAGEB6; ENSG00000176746; CTA
DASIPQESQ

SEQ ID NO: 43938 - protein, 9 aa, Homo sapiens
  misc_feature: Table A; Target 43938; HLA-C*07:06; MAGEB6; ENSG00000176746; CTA
DASVPQESQ

SEQ ID NO: 43939 - protein, 8 aa, Homo sapiens
  misc_feature: Table A; Target 43939; HLA-B*08:01; MAGEB6; ENSG00000176746; CTA
DAVKKKAC

SEQ ID NO: 43940 - protein, 10 aa, Homo sapiens
  misc_feature: Table A; Target 43940; HLA-B*08:01; MAGEB6; ENSG00000176746; CTA
DAVKKKACTL

SEQ ID NO: 43941 - protein, 8 aa, Homo sapiens
  misc_feature: Table A; Target 43941; HLA-B*51:01; MAGEB6; ENSG00000176746; CTA
DAVVSYSK

SEQ ID NO: 43942 - protein, 9 aa, Homo sapiens
  misc_feature: Table A; Target 43942; HLA-B*18:01; MAGEB6; ENSG00000176746; CTA
DEKSPSTSH

SEQ ID NO: 43943 - protein, 9 aa, Homo sapiens
  misc_feature: Table A; Target 43943; HLA-A*33:01; MAGEB6; ENSG00000176746; CTA
DEKSPSTSR

SEQ ID NO: 43944 - protein, 9 aa, Homo sapiens
  misc_feature: Table A; Target 43944; HLA-A*33:03; MAGEB6; ENSG00000176746; CTA
DEKSPSTSR

SEQ ID NO: 43945 - protein, 9 aa, Homo sapiens
  misc_feature: Table A; Target 43945; HLA-B*18:01; MAGEB6; ENSG00000176746; CTA
DEKSPSTSR

SEQ ID NO: 43946 - protein, 9 aa, Homo sapiens
  misc_feature: Table A; Target 43946; HLA-C*07:06; MAGEB6; ENSG00000176746; CTA
DEKSPSTSR

SEQ ID NO: 43947 - protein, 9 aa, Homo sapiens
  misc_feature: Table A; Target 43947; HLA-B*18:01; MAGEB6; ENSG00000176746; CTA
DEVERALRL

SEQ ID NO: 43948 - protein, 9 aa, Homo sapiens
  misc_feature: Table A; Target 43948; HLA-B*37:01; MAGEB6; ENSG00000176746; CTA
DEVERALRL

SEQ ID NO: 43949 - protein, 9 aa, Homo sapiens
  misc_feature: Table A; Target 43949; HLA-B*44:02; MAGEB6; ENSG00000176746; CTA
DEVERALRL

SEQ ID NO: 43950 - protein, 9 aa, Homo sapiens
  misc_feature: Table A; Target 43950; HLA-B*44:03; MAGEB6; ENSG00000176746; CTA
DEVERALRL

SEQ ID NO: 43951 - protein, 8 aa, Homo sapiens
  misc_feature: Table A; Target 43951; HLA-B*08:01; MAGEB6; ENSG00000176746; CTA
DGILHSIY

SEQ ID NO: 43952 - protein, 8 aa, Homo sapiens
  misc_feature: Table A; Target 43952; HLA-B*18:01; MAGEB6; ENSG00000176746; CTA
DGILHSIY

SEQ ID NO: 43953 - protein, 8 aa, Homo sapiens
  misc_feature: Table A; Target 43953; HLA-C*12:03; MAGEB6; ENSG00000176746; CTA
DGILHSIY

SEQ ID NO: 43954 - protein, 9 aa, Homo sapiens
  misc_feature: Table A; Target 43954; HLA-B*08:01; MAGEB6; ENSG00000176746; CTA
DLVQDKYVV

SEQ ID NO: 43955 - protein, 10 aa, Homo sapiens
  misc_feature: Table A; Target 43955; HLA-A*25:01; MAGEB6; ENSG00000176746; CTA
DLVQDKYVVY

SEQ ID NO: 43956 - protein, 10 aa, Homo sapiens
  misc_feature: Table A; Target 43956; HLA-A*26:01; MAGEB6; ENSG00000176746; CTA
DLVQDKYVVY

SEQ ID NO: 43957 - protein, 10 aa, Homo sapiens
  misc_feature: Table A; Target 43957; HLA-B*35:01; MAGEB6; ENSG00000176746; CTA
DLVQDKYVVY

SEQ ID NO: 43958 - protein, 11 aa, Homo sapiens
  misc_feature: Table A; Target 43958; HLA-A*33:01; MAGEB6; ENSG00000176746; CTA
DLVQDKYVVYR

SEQ ID NO: 43959 - protein, 9 aa, Homo sapiens
  misc_feature: Table A; Target 43959; HLA-A*33:01; MAGEB6; ENSG00000176746; CTA
DNALPKSGL

SEQ ID NO: 43960 - protein, 9 aa, Homo sapiens
  misc_feature: Table A; Target 43960; HLA-B*08:01; MAGEB6; ENSG00000176746; CTA
DNALPKSGL

SEQ ID NO: 43961 - protein, 9 aa, Homo sapiens
  misc_feature: Table A; Target 43961; HLA-B*27:05; MAGEB6; ENSG00000176746; CTA
DSSGESYTL

SEQ ID NO: 43962 - protein, 9 aa, Homo sapiens
  misc_feature: Table A; Target 43962; HLA-B*35:03; MAGEB6; ENSG00000176746; CTA
DSSGESYTL

SEQ ID NO: 43963 - protein, 9 aa, Homo sapiens
  misc_feature: Table A; Target 43963; HLA-B*38:01; MAGEB6; ENSG00000176746; CTA
DSSGESYTL

SEQ ID NO: 43964 - protein, 9 aa, Homo sapiens
  misc_feature: Table A; Target 43964; HLA-B*39:01; MAGEB6; ENSG00000176746; CTA
DSSGESYTL

SEQ ID NO: 43965 - protein, 10 aa, Homo sapiens
  misc_feature: Table A; Target 43965; HLA-A*01:01; MAGEB6; ENSG00000176746; CTA
DSSNTSPGLY

SEQ ID NO: 43966 - protein, 10 aa, Homo sapiens
  misc_feature: Table A; Target 43966; HLA-A*26:01; MAGEB6; ENSG00000176746; CTA
DSSNTSPGLY

SEQ ID NO: 43967 - protein, 10 aa, Homo sapiens
  misc_feature: Table A; Target 43967; HLA-B*27:02; MAGEB6; ENSG00000176746; CTA
EDALIDEVER

SEQ ID NO: 43968 - protein, 11 aa, Homo sapiens
  misc_feature: Table A; Target 43968; HLA-B*27:02; MAGEB6; ENSG00000176746; CTA
EDEESVSASQK

SEQ ID NO: 43969 - protein, 8 aa, Homo sapiens
  misc_feature: Table A; Target 43969; HLA-B*18:01; MAGEB6; ENSG00000176746; CTA
EDLVQDKY

SEQ ID NO: 43970 - protein, 11 aa, Homo sapiens
  misc_feature: Table A; Target 43970; HLA-B*44:02; MAGEB6; ENSG00000176746; CTA
EESVSASQKAI

SEQ ID NO: 43971 - protein, 11 aa, Homo sapiens
  misc_feature: Table A; Target 43971; HLA-B*44:03; MAGEB6; ENSG00000176746; CTA
EESVSASQKAI

SEQ ID NO: 43972 - protein, 9 aa, Homo sapiens
  misc_feature: Table A; Target 43972; HLA-A*29:02; MAGEB6; ENSG00000176746; CTA
EFLGLLGIY

SEQ ID NO: 43973 - protein, 10 aa, Homo sapiens
  misc_feature: Table A; Target 43973; HLA-B*35:03; MAGEB6; ENSG00000176746; CTA
EGILSGDNAL

SEQ ID NO: 43974 - protein, 9 aa, Homo sapiens
  misc_feature: Table A; Target 43974; HLA-A*01:01; MAGEB6; ENSG00000176746; CTA
EMDSSGESY

SEQ ID NO: 43975 - protein, 9 aa, Homo sapiens
  misc_feature: Table A; Target 43975; HLA-A*26:01; MAGEB6; ENSG00000176746; CTA
EMDSSGESY

SEQ ID NO: 43976 - protein, 9 aa, Homo sapiens
  misc_feature: Table A; Target 43976; HLA-A*30:02; MAGEB6; ENSG00000176746; CTA
EMDSSGESY

SEQ ID NO: 43977 - protein, 9 aa, Homo sapiens
  misc_feature: Table A; Target 43977; HLA-B*15:01; MAGEB6; ENSG00000176746; CTA
EMDSSGESY

SEQ ID NO: 43978 - protein, 9 aa, Homo sapiens
  misc_feature: Table A; Target 43978; HLA-B*18:01; MAGEB6; ENSG00000176746; CTA
EMDSSGESY

SEQ ID NO: 43979 - protein, 9 aa, Homo sapiens
  misc_feature: Table A; Target 43979; HLA-B*39:01; MAGEB6; ENSG00000176746; CTA
EMDSSGESY

SEQ ID NO: 43980 - protein, 9 aa, Homo sapiens
  misc_feature: Table A; Target 43980; HLA-C*05:01; MAGEB6; ENSG00000176746; CTA
EMDSSGESY

SEQ ID NO: 43981 - protein, 9 aa, Homo sapiens
  misc_feature: Table A; Target 43981; HLA-C*07:04; MAGEB6; ENSG00000176746; CTA
EMDSSGESY

SEQ ID NO: 43982 - protein, 11 aa, Homo sapiens
  misc_feature: Table A; Target 43982; HLA-B*38:01; MAGEB6; ENSG00000176746; CTA
EMDSSGESYTL

SEQ ID NO: 43983 - protein, 11 aa, Homo sapiens
  misc_feature: Table A; Target 43983; HLA-B*39:01; MAGEB6; ENSG00000176746; CTA
EMDSSGESYTL

SEQ ID NO: 43984 - protein, 10 aa, Homo sapiens
  misc_feature: Table A; Target 43984; HLA-A*33:03; MAGEB6; ENSG00000176746; CTA
ESHSSSSSSR

SEQ ID NO: 43985 - protein, 8 aa, Homo sapiens
  misc_feature: Table A; Target 43985; HLA-B*08:01; MAGEB6; ENSG00000176746; CTA
ESILKADM

SEQ ID NO: 43986 - protein, 8 aa, Homo sapiens
  misc_feature: Table A; Target 43986; HLA-A*11:01; MAGEB6; ENSG00000176746; CTA
ESYTLVSK

SEQ ID NO: 43987 - protein, 8 aa, Homo sapiens
  misc_feature: Table A; Target 43987; HLA-A*33:01; MAGEB6; ENSG00000176746; CTA
ESYTLVSK

SEQ ID NO: 43988 - protein, 8 aa, Homo sapiens
  misc_feature: Table A; Target 43988; HLA-A*33:03; MAGEB6; ENSG00000176746; CTA
ESYTLVSK

SEQ ID NO: 43989 - protein, 9 aa, Homo sapiens
  misc_feature: Table A; Target 43989; HLA-A*25:01; MAGEB6; ENSG00000176746; CTA
ESYTLVSKL

SEQ ID NO: 43990 - protein, 9 aa, Homo sapiens
  misc_feature: Table A; Target 43990; HLA-A*26:01; MAGEB6; ENSG00000176746; CTA
ESYTLVSKL

SEQ ID NO: 43991 - protein, 9 aa, Homo sapiens
  misc_feature: Table A; Target 43991; HLA-A*33:01; MAGEB6; ENSG00000176746; CTA
ESYTLVSKL

SEQ ID NO: 43992 - protein, 9 aa, Homo sapiens
  misc_feature: Table A; Target 43992; HLA-A*33:03; MAGEB6; ENSG00000176746; CTA
ESYTLVSKL

SEQ ID NO: 43993 - protein, 9 aa, Homo sapiens
  misc_feature: Table A; Target 43993; HLA-A*68:01; MAGEB6; ENSG00000176746; CTA
ESYTLVSKL

SEQ ID NO: 43994 - protein, 9 aa, Homo sapiens
  misc_feature: Table A; Target 43994; HLA-A*68:02; MAGEB6; ENSG00000176746; CTA
ESYTLVSKL

SEQ ID NO: 43995 - protein, 9 aa, Homo sapiens
  misc_feature: Table A; Target 43995; HLA-B*51:01; MAGEB6; ENSG00000176746; CTA
ESYTLVSKL

SEQ ID NO: 43996 - protein, 9 aa, Homo sapiens
  misc_feature: Table A; Target 43996; HLA-C*07:06; MAGEB6; ENSG00000176746; CTA
ESYTLVSKL

SEQ ID NO: 43997 - protein, 9 aa, Homo sapiens
  misc_feature: Table A; Target 43997; HLA-C*12:03; MAGEB6; ENSG00000176746; CTA
ESYTLVSKL

SEQ ID NO: 43998 - protein, 9 aa, Homo sapiens
  misc_feature: Table A; Target 43998; HLA-A*25:01; MAGEB6; ENSG00000176746; CTA
ETNGQPQGL

SEQ ID NO: 43999 - protein, 9 aa, Homo sapiens
  misc_feature: Table A; Target 43999; HLA-A*26:01; MAGEB6; ENSG00000176746; CTA
ETNGQPQGL

SEQ ID NO: 44000 - protein, 9 aa, Homo sapiens
  misc_feature: Table A; Target 44000; HLA-A*33:03; MAGEB6; ENSG00000176746; CTA
ETNGQPQGL

SEQ ID NO: 44001 - protein, 9 aa, Homo sapiens
  misc_feature: Table A; Target 44001; HLA-A*68:01; MAGEB6; ENSG00000176746; CTA
ETNGQPQGL

SEQ ID NO: 44002 - protein, 8 aa, Homo sapiens
  misc_feature: Table A; Target 44002; HLA-B*08:01; MAGEB6; ENSG00000176746; CTA
ETTKMRVL

SEQ ID NO: 44003 - protein, 9 aa, Homo sapiens
  misc_feature: Table A; Target 44003; HLA-A*33:01; MAGEB6; ENSG00000176746; CTA
ETTKMRVLR

SEQ ID NO: 44004 - protein, 9 aa, Homo sapiens
  misc_feature: Table A; Target 44004; HLA-A*33:03; MAGEB6; ENSG00000176746; CTA
ETTKMRVLR

SEQ ID NO: 44005 - protein, 9 aa, Homo sapiens
  misc_feature: Table A; Target 44005; HLA-A*33:01; MAGEB6; ENSG00000176746; CTA
EVERALRLR

SEQ ID NO: 44006 - protein, 9 aa, Homo sapiens
  misc_feature: Table A; Target 44006; HLA-A*68:02; MAGEB6; ENSG00000176746; CTA
EVWEFLGLL

SEQ ID NO: 44007 - protein, 9 aa, Homo sapiens
  misc_feature: Table A; Target 44007; HLA-A*23:01; MAGEB6; ENSG00000176746; CTA
EYKPYFPQI

SEQ ID NO: 44008 - protein, 9 aa, Homo sapiens
  misc_feature: Table A; Target 44008; HLA-A*24:02; MAGEB6; ENSG00000176746; CTA
EYKPYFPQI

SEQ ID NO: 44009 - protein, 9 aa, Homo sapiens
  misc_feature: Table A; Target 44009; HLA-A*31:01; MAGEB6; ENSG00000176746; CTA
EYKPYFPQI

SEQ ID NO: 44010 - protein, 9 aa, Homo sapiens
  misc_feature: Table A; Target 44010; HLA-A*33:01; MAGEB6; ENSG00000176746; CTA
EYKPYFPQI

SEQ ID NO: 44011 - protein, 9 aa, Homo sapiens
  misc_feature: Table A; Target 44011; HLA-A*33:03; MAGEB6; ENSG00000176746; CTA
EYKPYFPQI

SEQ ID NO: 44012 - protein, 10 aa, Homo sapiens
  misc_feature: Table A; Target 44012; HLA-A*24:02; MAGEB6; ENSG00000176746; CTA
EYKPYFPQIL

SEQ ID NO: 44013 - protein, 8 aa, Homo sapiens
  misc_feature: Table A; Target 44013; HLA-B*46:01; MAGEB6; ENSG00000176746; CTA
FGVELKEM

SEQ ID NO: 44014 - protein, 8 aa, Homo sapiens
  misc_feature: Table A; Target 44014; HLA-C*03:03; MAGEB6; ENSG00000176746; CTA
FGVELKEM

SEQ ID NO: 44015 - protein, 8 aa, Homo sapiens
  misc_feature: Table A; Target 44015; HLA-C*03:04; MAGEB6; ENSG00000176746; CTA
FGVELKEM

SEQ ID NO: 44016 - protein, 9 aa, Homo sapiens
  misc_feature: Table A; Target 44016; HLA-B*40:01; MAGEB6; ENSG00000176746; CTA
GEDEESVSA

SEQ ID NO: 44017 - protein, 9 aa, Homo sapiens
  misc_feature: Table A; Target 44017; HLA-B*49:01; MAGEB6; ENSG00000176746; CTA
GEDEESVSA

SEQ ID NO: 44018 - protein, 9 aa, Homo sapiens
  misc_feature: Table A; Target 44018; HLA-A*03:02; MAGEB6; ENSG00000176746; CTA
GESYTLVSK

SEQ ID NO: 44019 - protein, 9 aa, Homo sapiens
  misc_feature: Table A; Target 44019; HLA-A*11:01; MAGEB6; ENSG00000176746; CTA
GESYTLVSK

SEQ ID NO: 44020 - protein, 9 aa, Homo sapiens
  misc_feature: Table A; Target 44020; HLA-B*27:05; MAGEB6; ENSG00000176746; CTA
GESYTLVSK

SEQ ID NO: 44021 - protein, 10 aa, Homo sapiens
  misc_feature: Table A; Target 44021; HLA-A*30:01; MAGEB6; ENSG00000176746; CTA
GESYTLVSKL

SEQ ID NO: 44022 - protein, 10 aa, Homo sapiens
  misc_feature: Table A; Target 44022; HLA-B*40:01; MAGEB6; ENSG00000176746; CTA
GESYTLVSKL

SEQ ID NO: 44023 - protein, 10 aa, Homo sapiens
  misc_feature: Table A; Target 44023; HLA-B*49:01; MAGEB6; ENSG00000176746; CTA
GESYTLVSKL

SEQ ID NO: 44024 - protein, 11 aa, Homo sapiens
  misc_feature: Table A; Target 44024; HLA-A*03:01; MAGEB6; ENSG00000176746; CTA
GILSGDNALPK

SEQ ID NO: 44025 - protein, 11 aa, Homo sapiens
  misc_feature: Table A; Target 44025; HLA-A*03:02; MAGEB6; ENSG00000176746; CTA
GILSGDNALPK

SEQ ID NO: 44026 - protein, 11 aa, Homo sapiens
  misc_feature: Table A; Target 44026; HLA-A*11:01; MAGEB6; ENSG00000176746; CTA
GILSGDNALPK

SEQ ID NO: 44027 - protein, 11 aa, Homo sapiens
  misc_feature: Table A; Target 44027; HLA-B*27:02; MAGEB6; ENSG00000176746; CTA
GILSGDNALPK

SEQ ID NO: 44028 - protein, 10 aa, Homo sapiens
  misc_feature: Table A; Target 44028; HLA-A*02:01; MAGEB6; ENSG00000176746; CTA
GIYDGILHSI

SEQ ID NO: 44029 - protein, 10 aa, Homo sapiens
  misc_feature: Table A; Target 44029; HLA-A*02:03; MAGEB6; ENSG00000176746; CTA
GIYDGILHSI

SEQ ID NO: 44030 - protein, 10 aa, Homo sapiens
  misc_feature: Table A; Target 44030; HLA-A*02:04; MAGEB6; ENSG00000176746; CTA
GIYDGILHSI

SEQ ID NO: 44031 - protein, 10 aa, Homo sapiens
  misc_feature: Table A; Target 44031; HLA-A*02:07; MAGEB6; ENSG00000176746; CTA
GIYDGILHSI

SEQ ID NO: 44032 - protein, 10 aa, Homo sapiens
  misc_feature: Table A; Target 44032; HLA-A*03:01; MAGEB6; ENSG00000176746; CTA
GIYDGILHSI

SEQ ID NO: 44033 - protein, 10 aa, Homo sapiens
  misc_feature: Table A; Target 44033; HLA-A*23:01; MAGEB6; ENSG00000176746; CTA
GIYDGILHSI

SEQ ID NO: 44034 - protein, 10 aa, Homo sapiens
  misc_feature: Table A; Target 44034; HLA-A*25:01; MAGEB6; ENSG00000176746; CTA
GIYDGILHSI

SEQ ID NO: 44035 - protein, 10 aa, Homo sapiens
  misc_feature: Table A; Target 44035; HLA-A*30:01; MAGEB6; ENSG00000176746; CTA
GIYDGILHSI

SEQ ID NO: 44036 - protein, 10 aa, Homo sapiens
  misc_feature: Table A; Target 44036; HLA-A*32:01; MAGEB6; ENSG00000176746; CTA
GIYDGILHSI

SEQ ID NO: 44037 - protein, 10 aa, Homo sapiens
  misc_feature: Table A; Target 44037; HLA-A*68:02; MAGEB6; ENSG00000176746; CTA
GIYDGILHSI

SEQ ID NO: 44038 - protein, 10 aa, Homo sapiens
  misc_feature: Table A; Target 44038; HLA-B*13:02; MAGEB6; ENSG00000176746; CTA
GIYDGILHSI

SEQ ID NO: 44039 - protein, 10 aa, Homo sapiens
  misc_feature: Table A; Target 44039; HLA-B*46:01; MAGEB6; ENSG00000176746; CTA
GIYDGILHSI

SEQ ID NO: 44040 - protein, 10 aa, Homo sapiens
  misc_feature: Table A; Target 44040; HLA-B*49:01; MAGEB6; ENSG00000176746; CTA
GIYDGILHSI

SEQ ID NO: 44041 - protein, 10 aa, Homo sapiens
  misc_feature: Table A; Target 44041; HLA-B*55:01; MAGEB6; ENSG00000176746; CTA
GIYDGILHSI

SEQ ID NO: 44042 - protein, 10 aa, Homo sapiens
  misc_feature: Table A; Target 44042; HLA-C*02:02; MAGEB6; ENSG00000176746; CTA
GIYDGILHSI

SEQ ID NO: 44043 - protein, 11 aa, Homo sapiens
  misc_feature: Table A; Target 44043; HLA-A*01:01; MAGEB6; ENSG00000176746; CTA
GIYDGILHSIY

SEQ ID NO: 44044 - protein, 11 aa, Homo sapiens
  misc_feature: Table A; Target 44044; HLA-A*29:02; MAGEB6; ENSG00000176746; CTA
GIYDGILHSIY

SEQ ID NO: 44045 - protein, 11 aa, Homo sapiens
  misc_feature: Table A; Target 44045; HLA-A*30:02; MAGEB6; ENSG00000176746; CTA
GIYDGILHSIY

SEQ ID NO: 44046 - protein, 11 aa, Homo sapiens
  misc_feature: Table A; Target 44046; HLA-B*15:01; MAGEB6; ENSG00000176746; CTA
GIYDGILHSIY

SEQ ID NO: 44047 - protein, 9 aa, Homo sapiens
  misc_feature: Table A; Target 44047; HLA-A*02:04; MAGEB6; ENSG00000176746; CTA
GLLGIYDGI

SEQ ID NO: 44048 - protein, 10 aa, Homo sapiens
  misc_feature: Table A; Target 44048; HLA-A*02:04; MAGEB6; ENSG00000176746; CTA
GLLGIYDGIL

SEQ ID NO: 44049 - protein, 9 aa, Homo sapiens
  misc_feature: Table A; Target 44049; HLA-A*02:04; MAGEB6; ENSG00000176746; CTA
GLLMSLLVV

SEQ ID NO: 44050 - protein, 11 aa, Homo sapiens
  misc_feature: Table A; Target 44050; HLA-A*03:02; MAGEB6; ENSG00000176746; CTA
GLTGPQATAEK

SEQ ID NO: 44051 - protein, 11 aa, Homo sapiens
  misc_feature: Table A; Target 44051; HLA-A*02:04; MAGEB6; ENSG00000176746; CTA
GLYPHLYEDAL

SEQ ID NO: 44052 - protein, 11 aa, Homo sapiens
  misc_feature: Table A; Target 44052; HLA-A*31:01; MAGEB6; ENSG00000176746; CTA
GQDEKSPSTSR

SEQ ID NO: 44053 - protein, 11 aa, Homo sapiens
  misc_feature: Table A; Target 44053; HLA-B*27:05; MAGEB6; ENSG00000176746; CTA
GQDEKSPSTSR

SEQ ID NO: 44054 - protein, 9 aa, Homo sapiens
  misc_feature: Table A; Target 44054; HLA-A*11:01; MAGEB6; ENSG00000176746; CTA
GSPDAVVSY

SEQ ID NO: 44055 - protein, 9 aa, Homo sapiens
  misc_feature: Table A; Target 44055; HLA-A*25:01; MAGEB6; ENSG00000176746; CTA
GSPDAVVSY

SEQ ID NO: 44056 - protein, 9 aa, Homo sapiens
  misc_feature: Table A; Target 44056; HLA-A*26:01; MAGEB6; ENSG00000176746; CTA
GSPDAVVSY

SEQ ID NO: 44057 - protein, 9 aa, Homo sapiens
  misc_feature: Table A; Target 44057; HLA-A*29:02; MAGEB6; ENSG00000176746; CTA
GSPDAVVSY

SEQ ID NO: 44058 - protein, 9 aa, Homo sapiens
  misc_feature: Table A; Target 44058; HLA-A*30:02; MAGEB6; ENSG00000176746; CTA
GSPDAVVSY

SEQ ID NO: 44059 - protein, 9 aa, Homo sapiens
  misc_feature: Table A; Target 44059; HLA-A*32:01; MAGEB6; ENSG00000176746; CTA
GSPDAVVSY

SEQ ID NO: 44060 - protein, 9 aa, Homo sapiens
  misc_feature: Table A; Target 44060; HLA-B*15:01; MAGEB6; ENSG00000176746; CTA
GSPDAVVSY

SEQ ID NO: 44061 - protein, 9 aa, Homo sapiens
  misc_feature: Table A; Target 44061; HLA-B*15:03; MAGEB6; ENSG00000176746; CTA
GSPDAVVSY

SEQ ID NO: 44062 - protein, 9 aa, Homo sapiens
  misc_feature: Table A; Target 44062; HLA-B*46:01; MAGEB6; ENSG00000176746; CTA
GSPDAVVSY

SEQ ID NO: 44063 - protein, 9 aa, Homo sapiens
  misc_feature: Table A; Target 44063; HLA-B*58:01; MAGEB6; ENSG00000176746; CTA
GSPDAVVSY

SEQ ID NO: 44064 - protein, 9 aa, Homo sapiens
  misc_feature: Table A; Target 44064; HLA-C*01:02; MAGEB6; ENSG00000176746; CTA
GSPDAVVSY

SEQ ID NO: 44065 - protein, 9 aa, Homo sapiens
  misc_feature: Table A; Target 44065; HLA-C*02:02; MAGEB6; ENSG00000176746; CTA
GSPDAVVSY

SEQ ID NO: 44066 - protein, 9 aa, Homo sapiens
  misc_feature: Table A; Target 44066; HLA-C*07:04; MAGEB6; ENSG00000176746; CTA
GSPDAVVSY

SEQ ID NO: 44067 - protein, 9 aa, Homo sapiens
  misc_feature: Table A; Target 44067; HLA-C*14:02; MAGEB6; ENSG00000176746; CTA
GSPDAVVSY

SEQ ID NO: 44068 - protein, 11 aa, Homo sapiens
  misc_feature: Table A; Target 44068; HLA-A*03:02; MAGEB6; ENSG00000176746; CTA
GSPDAVVSYSK

SEQ ID NO: 44069 - protein, 11 aa, Homo sapiens
  misc_feature: Table A; Target 44069; HLA-A*11:01; MAGEB6; ENSG00000176746; CTA
GSPDAVVSYSK

SEQ ID NO: 44070 - protein, 11 aa, Homo sapiens
  misc_feature: Table A; Target 44070; HLA-B*27:02; MAGEB6; ENSG00000176746; CTA
GSPDAVVSYSK

SEQ ID NO: 44071 - protein, 11 aa, Homo sapiens
  misc_feature: Table A; Target 44071; HLA-A*02:01; MAGEB6; ENSG00000176746; CTA
HLYEDALIDEV

SEQ ID NO: 44072 - protein, 11 aa, Homo sapiens
  misc_feature: Table A; Target 44072; HLA-A*29:02; MAGEB6; ENSG00000176746; CTA
IITEDLVQDKY

SEQ ID NO: 44073 - protein, 10 aa, Homo sapiens
  misc_feature: Table A; Target 44073; HLA-A*03:01; MAGEB6; ENSG00000176746; CTA
ILSGDNALPK

SEQ ID NO: 44074 - protein, 10 aa, Homo sapiens
  misc_feature: Table A; Target 44074; HLA-A*03:02; MAGEB6; ENSG00000176746; CTA
ILSGDNALPK

SEQ ID NO: 44075 - protein, 8 aa, Homo sapiens
  misc_feature: Table A; Target 44075; HLA-B*51:01; MAGEB6; ENSG00000176746; CTA
IPQESQGV

SEQ ID NO: 44076 - protein, 8 aa, Homo sapiens
  misc_feature: Table A; Target 44076; HLA-B*56:01; MAGEB6; ENSG00000176746; CTA
IPQESQGV

SEQ ID NO: 44077 - protein, 10 aa, Homo sapiens
  misc_feature: Table A; Target 44077; HLA-B*56:01; MAGEB6; ENSG00000176746; CTA
IPQESQGVSP

SEQ ID NO: 44078 - protein, 9 aa, Homo sapiens
  misc_feature: Table A; Target 44078; HLA-A*01:01; MAGEB6; ENSG00000176746; CTA
ITEDLVQDK

SEQ ID NO: 44079 - protein, 9 aa, Homo sapiens
  misc_feature: Table A; Target 44079; HLA-A*03:02; MAGEB6; ENSG00000176746; CTA
ITEDLVQDK

SEQ ID NO: 44080 - protein, 9 aa, Homo sapiens
  misc_feature: Table A; Target 44080; HLA-A*11:01; MAGEB6; ENSG00000176746; CTA
ITEDLVQDK

SEQ ID NO: 44081 - protein, 10 aa, Homo sapiens
  misc_feature: Table A; Target 44081; HLA-A*01:01; MAGEB6; ENSG00000176746; CTA
ITEDLVQDKY

SEQ ID NO: 44082 - protein, 10 aa, Homo sapiens
  misc_feature: Table A; Target 44082; HLA-A*26:01; MAGEB6; ENSG00000176746; CTA
ITEDLVQDKY

SEQ ID NO: 44083 - protein, 10 aa, Homo sapiens
  misc_feature: Table A; Target 44083; HLA-A*29:02; MAGEB6; ENSG00000176746; CTA
ITEDLVQDKY

SEQ ID NO: 44084 - protein, 10 aa, Homo sapiens
  misc_feature: Table A; Target 44084; HLA-A*30:02; MAGEB6; ENSG00000176746; CTA
ITEDLVQDKY

SEQ ID NO: 44085 - protein, 10 aa, Homo sapiens
  misc_feature: Table A; Target 44085; HLA-B*58:01; MAGEB6; ENSG00000176746; CTA
ITEDLVQDKY

SEQ ID NO: 44086 - protein, 9 aa, Homo sapiens
  misc_feature: Table A; Target 44086; HLA-A*02:01; MAGEB6; ENSG00000176746; CTA
IYDGILHSI

SEQ ID NO: 44087 - protein, 9 aa, Homo sapiens
  misc_feature: Table A; Target 44087; HLA-A*02:07; MAGEB6; ENSG00000176746; CTA
IYDGILHSI

SEQ ID NO: 44088 - protein, 9 aa, Homo sapiens
  misc_feature: Table A; Target 44088; HLA-A*23:01; MAGEB6; ENSG00000176746; CTA
IYDGILHSI

SEQ ID NO: 44089 - protein, 9 aa, Homo sapiens
  misc_feature: Table A; Target 44089; HLA-A*29:02; MAGEB6; ENSG00000176746; CTA
IYDGILHSI

SEQ ID NO: 44090 - protein, 9 aa, Homo sapiens
  misc_feature: Table A; Target 44090; HLA-A*30:01; MAGEB6; ENSG00000176746; CTA
IYDGILHSI

SEQ ID NO: 44091 - protein, 9 aa, Homo sapiens
  misc_feature: Table A; Target 44091; HLA-A*32:01; MAGEB6; ENSG00000176746; CTA
IYDGILHSI

SEQ ID NO: 44092 - protein, 9 aa, Homo sapiens
  misc_feature: Table A; Target 44092; HLA-B*35:01; MAGEB6; ENSG00000176746; CTA
IYDGILHSI

SEQ ID NO: 44093 - protein, 9 aa, Homo sapiens
  misc_feature: Table A; Target 44093; HLA-B*35:03; MAGEB6; ENSG00000176746; CTA
IYDGILHSI

SEQ ID NO: 44094 - protein, 9 aa, Homo sapiens
  misc_feature: Table A; Target 44094; HLA-B*38:01; MAGEB6; ENSG00000176746; CTA
IYDGILHSI

SEQ ID NO: 44095 - protein, 9 aa, Homo sapiens
  misc_feature: Table A; Target 44095; HLA-B*49:01; MAGEB6; ENSG00000176746; CTA
IYDGILHSI

SEQ ID NO: 44096 - protein, 9 aa, Homo sapiens
  misc_feature: Table A; Target 44096; HLA-B*51:01; MAGEB6; ENSG00000176746; CTA
IYDGILHSI

SEQ ID NO: 44097 - protein, 9 aa, Homo sapiens
  misc_feature: Table A; Target 44097; HLA-B*55:01; MAGEB6; ENSG00000176746; CTA
IYDGILHSI

SEQ ID NO: 44098 - protein, 9 aa, Homo sapiens
  misc_feature: Table A; Target 44098; HLA-B*58:01; MAGEB6; ENSG00000176746; CTA
IYDGILHSI

SEQ ID NO: 44099 - protein, 9 aa, Homo sapiens
  misc_feature: Table A; Target 44099; HLA-C*04:01; MAGEB6; ENSG00000176746; CTA
IYDGILHSI

SEQ ID NO: 44100 - protein, 9 aa, Homo sapiens
  misc_feature: Table A; Target 44100; HLA-C*05:01; MAGEB6; ENSG00000176746; CTA
IYDGILHSI

SEQ ID NO: 44101 - protein, 9 aa, Homo sapiens
  misc_feature: Table A; Target 44101; HLA-C*07:04; MAGEB6; ENSG00000176746; CTA
IYDGILHSI

SEQ ID NO: 44102 - protein, 9 aa, Homo sapiens
  misc_feature: Table A; Target 44102; HLA-C*14:02; MAGEB6; ENSG00000176746; CTA
IYDGILHSI

SEQ ID NO: 44103 - protein, 9 aa, Homo sapiens
  misc_feature: Table A; Target 44103; HLA-C*16:02; MAGEB6; ENSG00000176746; CTA
IYDGILHSI

SEQ ID NO: 44104 - protein, 10 aa, Homo sapiens
  misc_feature: Table A; Target 44104; HLA-A*29:02; MAGEB6; ENSG00000176746; CTA
IYDGILHSIY

SEQ ID NO: 44105 - protein, 8 aa, Homo sapiens
  misc_feature: Table A; Target 44105; HLA-A*24:02; MAGEB6; ENSG00000176746; CTA
IYGDARKI

SEQ ID NO: 44106 - protein, 9 aa, Homo sapiens
  misc_feature: Table A; Target 44106; HLA-A*24:02; MAGEB6; ENSG00000176746; CTA
IYGDARKII

SEQ ID NO: 44107 - protein, 10 aa, Homo sapiens
  misc_feature: Table A; Target 44107; HLA-A*25:01; MAGEB6; ENSG00000176746; CTA
KEMDSSGESY

SEQ ID NO: 44108 - protein, 10 aa, Homo sapiens
  misc_feature: Table A; Target 44108; HLA-A*26:01; MAGEB6; ENSG00000176746; CTA
KEMDSSGESY

SEQ ID NO: 44109 - protein, 10 aa, Homo sapiens
  misc_feature: Table A; Target 44109; HLA-A*30:01; MAGEB6; ENSG00000176746; CTA
KEMDSSGESY

SEQ ID NO: 44110 - protein, 10 aa, Homo sapiens
  misc_feature: Table A; Target 44110; HLA-A*30:02; MAGEB6; ENSG00000176746; CTA
KEMDSSGESY

SEQ ID NO: 44111 - protein, 10 aa, Homo sapiens
  misc_feature: Table A; Target 44111; HLA-A*32:01; MAGEB6; ENSG00000176746; CTA
KEMDSSGESY

SEQ ID NO: 44112 - protein, 10 aa, Homo sapiens
  misc_feature: Table A; Target 44112; HLA-B*15:01; MAGEB6; ENSG00000176746; CTA
KEMDSSGESY

SEQ ID NO: 44113 - protein, 10 aa, Homo sapiens
  misc_feature: Table A; Target 44113; HLA-B*15:03; MAGEB6; ENSG00000176746; CTA
KEMDSSGESY

SEQ ID NO: 44114 - protein, 10 aa, Homo sapiens
  misc_feature: Table A; Target 44114; HLA-B*18:01; MAGEB6; ENSG00000176746; CTA
KEMDSSGESY

SEQ ID NO: 44115 - protein, 10 aa, Homo sapiens
  misc_feature: Table A; Target 44115; HLA-B*27:02; MAGEB6; ENSG00000176746; CTA
KEMDSSGESY

SEQ ID NO: 44116 - protein, 10 aa, Homo sapiens
  misc_feature: Table A; Target 44116; HLA-B*37:01; MAGEB6; ENSG00000176746; CTA
KEMDSSGESY

SEQ ID NO: 44117 - protein, 10 aa, Homo sapiens
  misc_feature: Table A; Target 44117; HLA-B*39:01; MAGEB6; ENSG00000176746; CTA
KEMDSSGESY

SEQ ID NO: 44118 - protein, 10 aa, Homo sapiens
  misc_feature: Table A; Target 44118; HLA-B*40:01; MAGEB6; ENSG00000176746; CTA
KEMDSSGESY

SEQ ID NO: 44119 - protein, 10 aa, Homo sapiens
  misc_feature: Table A; Target 44119; HLA-B*40:02; MAGEB6; ENSG00000176746; CTA
KEMDSSGESY

SEQ ID NO: 44120 - protein, 10 aa, Homo sapiens
  misc_feature: Table A; Target 44120; HLA-B*44:02; MAGEB6; ENSG00000176746; CTA
KEMDSSGESY

SEQ ID NO: 44121 - protein, 10 aa, Homo sapiens
  misc_feature: Table A; Target 44121; HLA-B*46:01; MAGEB6; ENSG00000176746; CTA
KEMDSSGESY

SEQ ID NO: 44122 - protein, 10 aa, Homo sapiens
  misc_feature: Table A; Target 44122; HLA-B*49:01; MAGEB6; ENSG00000176746; CTA
KEMDSSGESY

SEQ ID NO: 44123 - protein, 10 aa, Homo sapiens
  misc_feature: Table A; Target 44123; HLA-B*58:01; MAGEB6; ENSG00000176746; CTA
KEMDSSGESY

SEQ ID NO: 44124 - protein, 10 aa, Homo sapiens
  misc_feature: Table A; Target 44124; HLA-C*02:02; MAGEB6; ENSG00000176746; CTA
KEMDSSGESY

SEQ ID NO: 44125 - protein, 10 aa, Homo sapiens
  misc_feature: Table A; Target 44125; HLA-C*07:04; MAGEB6; ENSG00000176746; CTA
KEMDSSGESY

SEQ ID NO: 44126 - protein, 10 aa, Homo sapiens
  misc_feature: Table A; Target 44126; HLA-C*14:02; MAGEB6; ENSG00000176746; CTA
KEMDSSGESY

SEQ ID NO: 44127 - protein, 10 aa, Homo sapiens
  misc_feature: Table A; Target 44127; HLA-C*16:04; MAGEB6; ENSG00000176746; CTA
KEMDSSGESY

SEQ ID NO: 44128 - protein, 9 aa, Homo sapiens
  misc_feature: Table A; Target 44128; HLA-B*37:01; MAGEB6; ENSG00000176746; CTA
KESILKADM

SEQ ID NO: 44129 - protein, 9 aa, Homo sapiens
  misc_feature: Table A; Target 44129; HLA-B*40:01; MAGEB6; ENSG00000176746; CTA
KESILKADM

SEQ ID NO: 44130 - protein, 10 aa, Homo sapiens
  misc_feature: Table A; Target 44130; HLA-B*40:01; MAGEB6; ENSG00000176746; CTA
KESILKADML

SEQ ID NO: 44131 - protein, 11 aa, Homo sapiens
  misc_feature: Table A; Target 44131; HLA-A*03:01; MAGEB6; ENSG00000176746; CTA
KIITEDLVQDK

SEQ ID NO: 44132 - protein, 11 aa, Homo sapiens
  misc_feature: Table A; Target 44132; HLA-A*03:02; MAGEB6; ENSG00000176746; CTA
KIITEDLVQDK

SEQ ID NO: 44133 - protein, 11 aa, Homo sapiens
  misc_feature: Table A; Target 44133; HLA-A*11:01; MAGEB6; ENSG00000176746; CTA
KIITEDLVQDK

SEQ ID NO: 44134 - protein, 8 aa, Homo sapiens
  misc_feature: Table A; Target 44134; HLA-B*07:02; MAGEB6; ENSG00000176746; CTA
KPYFPQIL

SEQ ID NO: 44135 - protein, 8 aa, Homo sapiens
  misc_feature: Table A; Target 44135; HLA-B*08:01; MAGEB6; ENSG00000176746; CTA
KPYFPQIL

SEQ ID NO: 44136 - protein, 8 aa, Homo sapiens
  misc_feature: Table A; Target 44136; HLA-C*04:01; MAGEB6; ENSG00000176746; CTA
KYDVAANG

SEQ ID NO: 44137 - protein, 9 aa, Homo sapiens
  misc_feature: Table A; Target 44137; HLA-C*05:01; MAGEB6; ENSG00000176746; CTA
LADSSNTSP

SEQ ID NO: 44138 - protein, 11 aa, Homo sapiens
  misc_feature: Table A; Target 44138; HLA-C*05:01; MAGEB6; ENSG00000176746; CTA
LADSSNTSPGL

SEQ ID NO: 44139 - protein, 8 aa, Homo sapiens
  misc_feature: Table A; Target 44139; HLA-C*05:01; MAGEB6; ENSG00000176746; CTA
LIDEVERA

SEQ ID NO: 44140 - protein, 9 aa, Homo sapiens
  misc_feature: Table A; Target 44140; HLA-A*02:07; MAGEB6; ENSG00000176746; CTA
LIDEVERAL

SEQ ID NO: 44141 - protein, 9 aa, Homo sapiens
  misc_feature: Table A; Target 44141; HLA-B*07:02; MAGEB6; ENSG00000176746; CTA
LIDEVERAL

SEQ ID NO: 44142 - protein, 9 aa, Homo sapiens
  misc_feature: Table A; Target 44142; HLA-B*35:03; MAGEB6; ENSG00000176746; CTA
LIDEVERAL

SEQ ID NO: 44143 - protein, 9 aa, Homo sapiens
  misc_feature: Table A; Target 44143; HLA-B*38:01; MAGEB6; ENSG00000176746; CTA
LIDEVERAL

SEQ ID NO: 44144 - protein, 9 aa, Homo sapiens
  misc_feature: Table A; Target 44144; HLA-C*01:02; MAGEB6; ENSG00000176746; CTA
LIDEVERAL

SEQ ID NO: 44145 - protein, 9 aa, Homo sapiens
  misc_feature: Table A; Target 44145; HLA-C*03:03; MAGEB6; ENSG00000176746; CTA
LIDEVERAL

SEQ ID NO: 44146 - protein, 9 aa, Homo sapiens
  misc_feature: Table A; Target 44146; HLA-C*03:04; MAGEB6; ENSG00000176746; CTA
LIDEVERAL

SEQ ID NO: 44147 - protein, 9 aa, Homo sapiens
  misc_feature: Table A; Target 44147; HLA-C*04:01; MAGEB6; ENSG00000176746; CTA
LIDEVERAL

SEQ ID NO: 44148 - protein, 9 aa, Homo sapiens
  misc_feature: Table A; Target 44148; HLA-C*05:01; MAGEB6; ENSG00000176746; CTA
LIDEVERAL

SEQ ID NO: 44149 - protein, 9 aa, Homo sapiens
  misc_feature: Table A; Target 44149; HLA-C*16:01; MAGEB6; ENSG00000176746; CTA
LIDEVERAL

SEQ ID NO: 44150 - protein, 9 aa, Homo sapiens
  misc_feature: Table A; Target 44150; HLA-C*16:02; MAGEB6; ENSG00000176746; CTA
LIDEVERAL

SEQ ID NO: 44151 - protein, 11 aa, Homo sapiens
  misc_feature: Table A; Target 44151; HLA-A*02:07; MAGEB6; ENSG00000176746; CTA
LIDEVERALRL

SEQ ID NO: 44152 - protein, 9 aa, Homo sapiens
  misc_feature: Table A; Target 44152; HLA-A*02:01; MAGEB6; ENSG00000176746; CTA
LLMSLLVVI

SEQ ID NO: 44153 - protein, 9 aa, Homo sapiens
  misc_feature: Table A; Target 44153; HLA-A*02:04; MAGEB6; ENSG00000176746; CTA
LLMSLLVVI

SEQ ID NO: 44154 - protein, 8 aa, Homo sapiens
  misc_feature: Table A; Target 44154; HLA-B*08:01; MAGEB6; ENSG00000176746; CTA
LPKSGLLM

SEQ ID NO: 44155 - protein, 8 aa, Homo sapiens
  misc_feature: Table A; Target 44155; HLA-B*51:01; MAGEB6; ENSG00000176746; CTA
LPKSGLLM

SEQ ID NO: 44156 - protein, 10 aa, Homo sapiens
  misc_feature: Table A; Target 44156; HLA-B*07:02; MAGEB6; ENSG00000176746; CTA
LPKSGLLMSL

SEQ ID NO: 44157 - protein, 10 aa, Homo sapiens
  misc_feature: Table A; Target 44157; HLA-C*07:02; MAGEB6; ENSG00000176746; CTA
LPKSGLLMSL

SEQ ID NO: 44158 - protein, 9 aa, Homo sapiens
  misc_feature: Table A; Target 44158; HLA-B*35:03; MAGEB6; ENSG00000176746; CTA
LPSEGILSG

SEQ ID NO: 44159 - protein, 9 aa, Homo sapiens
  misc_feature: Table A; Target 44159; HLA-B*54:01; MAGEB6; ENSG00000176746; CTA
LPSEGILSG

SEQ ID NO: 44160 - protein, 9 aa, Homo sapiens
  misc_feature: Table A; Target 44160; HLA-B*56:01; MAGEB6; ENSG00000176746; CTA
LPSEGILSG

SEQ ID NO: 44161 - protein, 8 aa, Homo sapiens
  misc_feature: Table A; Target 44161; HLA-B*08:01; MAGEB6; ENSG00000176746; CTA
LVQDKYVV

SEQ ID NO: 44162 - protein, 9 aa, Homo sapiens
  misc_feature: Table A; Target 44162; HLA-A*01:01; MAGEB6; ENSG00000176746; CTA
LVQDKYVVY

SEQ ID NO: 44163 - protein, 9 aa, Homo sapiens
  misc_feature: Table A; Target 44163; HLA-A*11:01; MAGEB6; ENSG00000176746; CTA
LVQDKYVVY

SEQ ID NO: 44164 - protein, 9 aa, Homo sapiens
  misc_feature: Table A; Target 44164; HLA-A*25:01; MAGEB6; ENSG00000176746; CTA
LVQDKYVVY

SEQ ID NO: 44165 - protein, 9 aa, Homo sapiens
  misc_feature: Table A; Target 44165; HLA-A*26:01; MAGEB6; ENSG00000176746; CTA
LVQDKYVVY

SEQ ID NO: 44166 - protein, 9 aa, Homo sapiens
  misc_feature: Table A; Target 44166; HLA-A*29:02; MAGEB6; ENSG00000176746; CTA
LVQDKYVVY

SEQ ID NO: 44167 - protein, 9 aa, Homo sapiens
  misc_feature: Table A; Target 44167; HLA-A*30:02; MAGEB6; ENSG00000176746; CTA
LVQDKYVVY

SEQ ID NO: 44168 - protein, 9 aa, Homo sapiens
  misc_feature: Table A; Target 44168; HLA-A*32:01; MAGEB6; ENSG00000176746; CTA
LVQDKYVVY

SEQ ID NO: 44169 - protein, 9 aa, Homo sapiens
  misc_feature: Table A; Target 44169; HLA-B*15:01; MAGEB6; ENSG00000176746; CTA
LVQDKYVVY

SEQ ID NO: 44170 - protein, 9 aa, Homo sapiens
  misc_feature: Table A; Target 44170; HLA-B*35:01; MAGEB6; ENSG00000176746; CTA
LVQDKYVVY

SEQ ID NO: 44171 - protein, 9 aa, Homo sapiens
  misc_feature: Table A; Target 44171; HLA-B*46:01; MAGEB6; ENSG00000176746; CTA
LVQDKYVVY

SEQ ID NO: 44172 - protein, 9 aa, Homo sapiens
  misc_feature: Table A; Target 44172; HLA-B*58:01; MAGEB6; ENSG00000176746; CTA
LVQDKYVVY

SEQ ID NO: 44173 - protein, 9 aa, Homo sapiens
  misc_feature: Table A; Target 44173; HLA-C*02:02; MAGEB6; ENSG00000176746; CTA
LVQDKYVVY

SEQ ID NO: 44174 - protein, 9 aa, Homo sapiens
  misc_feature: Table A; Target 44174; HLA-C*07:04; MAGEB6; ENSG00000176746; CTA
LVQDKYVVY

SEQ ID NO: 44175 - protein, 9 aa, Homo sapiens
  misc_feature: Table A; Target 44175; HLA-C*12:03; MAGEB6; ENSG00000176746; CTA
LVQDKYVVY

SEQ ID NO: 44176 - protein, 9 aa, Homo sapiens
  misc_feature: Table A; Target 44176; HLA-C*14:02; MAGEB6; ENSG00000176746; CTA
LVQDKYVVY

SEQ ID NO: 44177 - protein, 9 aa, Homo sapiens
  misc_feature: Table A; Target 44177; HLA-C*16:01; MAGEB6; ENSG00000176746; CTA
LVQDKYVVY

SEQ ID NO: 44178 - protein, 10 aa, Homo sapiens
  misc_feature: Table A; Target 44178; HLA-A*03:02; MAGEB6; ENSG00000176746; CTA
LVQDKYVVYR

SEQ ID NO: 44179 - protein, 10 aa, Homo sapiens
  misc_feature: Table A; Target 44179; HLA-A*11:01; MAGEB6; ENSG00000176746; CTA
LVQDKYVVYR

SEQ ID NO: 44180 - protein, 10 aa, Homo sapiens
  misc_feature: Table A; Target 44180; HLA-A*31:01; MAGEB6; ENSG00000176746; CTA
LVQDKYVVYR

SEQ ID NO: 44181 - protein, 10 aa, Homo sapiens
  misc_feature: Table A; Target 44181; HLA-A*33:01; MAGEB6; ENSG00000176746; CTA
LVQDKYVVYR

SEQ ID NO: 44182 - protein, 10 aa, Homo sapiens
  misc_feature: Table A; Target 44182; HLA-A*33:03; MAGEB6; ENSG00000176746; CTA
LVQDKYVVYR

SEQ ID NO: 44183 - protein, 10 aa, Homo sapiens
  misc_feature: Table A; Target 44183; HLA-A*68:01; MAGEB6; ENSG00000176746; CTA
LVQDKYVVYR

SEQ ID NO: 44184 - protein, 9 aa, Homo sapiens
  misc_feature: Table A; Target 44184; HLA-A*02:07; MAGEB6; ENSG00000176746; CTA
LVVAFGVEL

SEQ ID NO: 44185 - protein, 9 aa, Homo sapiens
  misc_feature: Table A; Target 44185; HLA-A*30:01; MAGEB6; ENSG00000176746; CTA
LVVAFGVEL

SEQ ID NO: 44186 - protein, 9 aa, Homo sapiens
  misc_feature: Table A; Target 44186; HLA-A*68:02; MAGEB6; ENSG00000176746; CTA
LVVAFGVEL

SEQ ID NO: 44187 - protein, 9 aa, Homo sapiens
  misc_feature: Table A; Target 44187; HLA-B*15:01; MAGEB6; ENSG00000176746; CTA
LVVAFGVEL

SEQ ID NO: 44188 - protein, 9 aa, Homo sapiens
  misc_feature: Table A; Target 44188; HLA-B*35:01; MAGEB6; ENSG00000176746; CTA
LVVAFGVEL

SEQ ID NO: 44189 - protein, 9 aa, Homo sapiens
  misc_feature: Table A; Target 44189; HLA-B*35:03; MAGEB6; ENSG00000176746; CTA
LVVAFGVEL

SEQ ID NO: 44190 - protein, 9 aa, Homo sapiens
  misc_feature: Table A; Target 44190; HLA-B*40:01; MAGEB6; ENSG00000176746; CTA
LVVAFGVEL

SEQ ID NO: 44191 - protein, 9 aa, Homo sapiens
  misc_feature: Table A; Target 44191; HLA-B*46:01; MAGEB6; ENSG00000176746; CTA
LVVAFGVEL

SEQ ID NO: 44192 - protein, 9 aa, Homo sapiens
  misc_feature: Table A; Target 44192; HLA-B*54:01; MAGEB6; ENSG00000176746; CTA
LVVAFGVEL

SEQ ID NO: 44193 - protein, 9 aa, Homo sapiens
  misc_feature: Table A; Target 44193; HLA-B*58:01; MAGEB6; ENSG00000176746; CTA
LVVAFGVEL

SEQ ID NO: 44194 - protein, 9 aa, Homo sapiens
  misc_feature: Table A; Target 44194; HLA-C*01:02; MAGEB6; ENSG00000176746; CTA
LVVAFGVEL

SEQ ID NO: 44195 - protein, 9 aa, Homo sapiens
  misc_feature: Table A; Target 44195; HLA-C*02:02; MAGEB6; ENSG00000176746; CTA
LVVAFGVEL

SEQ ID NO: 44196 - protein, 9 aa, Homo sapiens
  misc_feature: Table A; Target 44196; HLA-C*03:03; MAGEB6; ENSG00000176746; CTA
LVVAFGVEL

SEQ ID NO: 44197 - protein, 9 aa, Homo sapiens
  misc_feature: Table A; Target 44197; HLA-C*03:04; MAGEB6; ENSG00000176746; CTA
LVVAFGVEL

SEQ ID NO: 44198 - protein, 9 aa, Homo sapiens
  misc_feature: Table A; Target 44198; HLA-C*12:03; MAGEB6; ENSG00000176746; CTA
LVVAFGVEL

SEQ ID NO: 44199 - protein, 9 aa, Homo sapiens
  misc_feature: Table A; Target 44199; HLA-C*16:04; MAGEB6; ENSG00000176746; CTA
LVVAFGVEL

SEQ ID NO: 44200 - protein, 8 aa, Homo sapiens
  misc_feature: Table A; Target 44200; HLA-A*30:02; MAGEB6; ENSG00000176746; CTA
MDSSGESY

SEQ ID NO: 44201 - protein, 8 aa, Homo sapiens
  misc_feature: Table A; Target 44201; HLA-B*18:01; MAGEB6; ENSG00000176746; CTA
MDSSGESY

SEQ ID NO: 44202 - protein, 8 aa, Homo sapiens
  misc_feature: Table A; Target 44202; HLA-B*37:01; MAGEB6; ENSG00000176746; CTA
MDSSGESY

SEQ ID NO: 44203 - protein, 8 aa, Homo sapiens
  misc_feature: Table A; Target 44203; HLA-B*39:01; MAGEB6; ENSG00000176746; CTA
MDSSGESY

SEQ ID NO: 44204 - protein, 10 aa, Homo sapiens
  misc_feature: Table A; Target 44204; HLA-B*38:01; MAGEB6; ENSG00000176746; CTA
MDSSGESYTL

SEQ ID NO: 44205 - protein, 10 aa, Homo sapiens
  misc_feature: Table A; Target 44205; HLA-B*39:01; MAGEB6; ENSG00000176746; CTA
MDSSGESYTL

SEQ ID NO: 44206 - protein, 8 aa, Homo sapiens
  misc_feature: Table A; Target 44206; HLA-B*08:01; MAGEB6; ENSG00000176746; CTA
NALPKSGL

SEQ ID NO: 44207 - protein, 9 aa, Homo sapiens
  misc_feature: Table A; Target 44207; HLA-B*08:01; MAGEB6; ENSG00000176746; CTA
NALPKSGLL

SEQ ID NO: 44208 - protein, 9 aa, Homo sapiens
  misc_feature: Table A; Target 44208; HLA-C*03:03; MAGEB6; ENSG00000176746; CTA
NALPKSGLL

SEQ ID NO: 44209 - protein, 9 aa, Homo sapiens
  misc_feature: Table A; Target 44209; HLA-C*03:04; MAGEB6; ENSG00000176746; CTA
NALPKSGLL

SEQ ID NO: 44210 - protein, 9 aa, Homo sapiens
  misc_feature: Table A; Target 44210; HLA-A*01:01; MAGEB6; ENSG00000176746; CTA
NSDPPCYEF

SEQ ID NO: 44211 - protein, 9 aa, Homo sapiens
  misc_feature: Table A; Target 44211; HLA-B*35:01; MAGEB6; ENSG00000176746; CTA
NSDPPCYEF

SEQ ID NO: 44212 - protein, 9 aa, Homo sapiens
  misc_feature: Table A; Target 44212; HLA-B*38:01; MAGEB6; ENSG00000176746; CTA
NSDPPCYEF

SEQ ID NO: 44213 - protein, 9 aa, Homo sapiens
  misc_feature: Table A; Target 44213; HLA-B*58:01; MAGEB6; ENSG00000176746; CTA
NSDPPCYEF

SEQ ID NO: 44214 - protein, 9 aa, Homo sapiens
  misc_feature: Table A; Target 44214; HLA-C*03:04; MAGEB6; ENSG00000176746; CTA
NSDPPCYEF

SEQ ID NO: 44215 - protein, 9 aa, Homo sapiens
  misc_feature: Table A; Target 44215; HLA-C*05:01; MAGEB6; ENSG00000176746; CTA
NSDPPCYEF

SEQ ID NO: 44216 - protein, 9 aa, Homo sapiens
  misc_feature: Table A; Target 44216; HLA-C*07:04; MAGEB6; ENSG00000176746; CTA
NSDPPCYEF

SEQ ID NO: 44217 - protein, 10 aa, Homo sapiens
  misc_feature: Table A; Target 44217; HLA-A*01:01; MAGEB6; ENSG00000176746; CTA
NSDPPCYEFL

SEQ ID NO: 44218 - protein, 10 aa, Homo sapiens
  misc_feature: Table A; Target 44218; HLA-A*68:01; MAGEB6; ENSG00000176746; CTA
NTSPGLYPHL

SEQ ID NO: 44219 - protein, 10 aa, Homo sapiens
  misc_feature: Table A; Target 44219; HLA-A*68:02; MAGEB6; ENSG00000176746; CTA
NTSPGLYPHL

SEQ ID NO: 44220 - protein, 11 aa, Homo sapiens
  misc_feature: Table A; Target 44220; HLA-A*01:01; MAGEB6; ENSG00000176746; CTA
NTSPGLYPHLY

SEQ ID NO: 44221 - protein, 11 aa, Homo sapiens
  misc_feature: Table A; Target 44221; HLA-A*29:02; MAGEB6; ENSG00000176746; CTA
NTSPGLYPHLY

SEQ ID NO: 44222 - protein, 11 aa, Homo sapiens
  misc_feature: Table A; Target 44222; HLA-A*30:02; MAGEB6; ENSG00000176746; CTA
NTSPGLYPHLY

SEQ ID NO: 44223 - protein, 9 aa, Homo sapiens
  misc_feature: Table A; Target 44223; HLA-B*27:02; MAGEB6; ENSG00000176746; CTA
PDAVVSYSK

SEQ ID NO: 44224 - protein, 11 aa, Homo sapiens
  misc_feature: Table A; Target 44224; HLA-A*01:01; MAGEB6; ENSG00000176746; CTA
PTGSPDAVVSY

SEQ ID NO: 44225 - protein, 11 aa, Homo sapiens
  misc_feature: Table A; Target 44225; HLA-A*30:02; MAGEB6; ENSG00000176746; CTA
PTGSPDAVVSY

SEQ ID NO: 44226 - protein, 9 aa, Homo sapiens
  misc_feature: Table A; Target 44226; HLA-A*31:01; MAGEB6; ENSG00000176746; CTA
PYFPQILNR

SEQ ID NO: 44227 - protein, 9 aa, Homo sapiens
  misc_feature: Table A; Target 44227; HLA-A*33:01; MAGEB6; ENSG00000176746; CTA
PYFPQILNR

SEQ ID NO: 44228 - protein, 9 aa, Homo sapiens
  misc_feature: Table A; Target 44228; HLA-A*33:03; MAGEB6; ENSG00000176746; CTA
PYFPQILNR

SEQ ID NO: 44229 - protein, 10 aa, Homo sapiens
  misc_feature: Table A; Target 44229; HLA-A*30:01; MAGEB6; ENSG00000176746; CTA
QETNGQPQGL

SEQ ID NO: 44230 - protein, 10 aa, Homo sapiens
  misc_feature: Table A; Target 44230; HLA-B*40:01; MAGEB6; ENSG00000176746; CTA
QETNGQPQGL

SEQ ID NO: 44231 - protein, 10 aa, Homo sapiens
  misc_feature: Table A; Target 44231; HLA-B*44:02; MAGEB6; ENSG00000176746; CTA
QETNGQPQGL

SEQ ID NO: 44232 - protein, 10 aa, Homo sapiens
  misc_feature: Table A; Target 44232; HLA-B*44:03; MAGEB6; ENSG00000176746; CTA
QETNGQPQGL

SEQ ID NO: 44233 - protein, 10 aa, Homo sapiens
  misc_feature: Table A; Target 44233; HLA-C*16:04; MAGEB6; ENSG00000176746; CTA
QETNGQPQGL

SEQ ID NO: 44234 - protein, 10 aa, Homo sapiens
  misc_feature: Table A; Target 44234; HLA-B*54:01; MAGEB6; ENSG00000176746; CTA
QPQGLTGPQA

SEQ ID NO: 44235 - protein, 10 aa, Homo sapiens
  misc_feature: Table A; Target 44235; HLA-B*55:01; MAGEB6; ENSG00000176746; CTA
QPQGLTGPQA

SEQ ID NO: 44236 - protein, 10 aa, Homo sapiens
  misc_feature: Table A; Target 44236; HLA-B*56:01; MAGEB6; ENSG00000176746; CTA
QPQGLTGPQA

SEQ ID NO: 44237 - protein, 9 aa, Homo sapiens
  misc_feature: Table A; Target 44237; HLA-A*03:01; MAGEB6; ENSG00000176746; CTA
RLSKDAVKK

SEQ ID NO: 44238 - protein, 9 aa, Homo sapiens
  misc_feature: Table A; Target 44238; HLA-A*03:02; MAGEB6; ENSG00000176746; CTA
RLSKDAVKK

SEQ ID NO: 44239 - protein, 10 aa, Homo sapiens
  misc_feature: Table A; Target 44239; HLA-A*03:01; MAGEB6; ENSG00000176746; CTA
RLSKDAVKKK

SEQ ID NO: 44240 - protein, 10 aa, Homo sapiens
  misc_feature: Table A; Target 44240; HLA-A*03:02; MAGEB6; ENSG00000176746; CTA
RLSKDAVKKK

SEQ ID NO: 44241 - protein, 11 aa, Homo sapiens
  misc_feature: Table A; Target 44241; HLA-B*39:01; MAGEB6; ENSG00000176746; CTA
RQETNGQPQGL

SEQ ID NO: 44242 - protein, 11 aa, Homo sapiens
  misc_feature: Table A; Target 44242; HLA-A*30:02; MAGEB6; ENSG00000176746; CTA
RQVCNSDPPCY

SEQ ID NO: 44243 - protein, 10 aa, Homo sapiens
  misc_feature: Table A; Target 44243; HLA-B*57:01; MAGEB6; ENSG00000176746; CTA
RTSQHLVVAF

SEQ ID NO: 44244 - protein, 9 aa, Homo sapiens
  misc_feature: Table A; Target 44244; HLA-B*35:01; MAGEB6; ENSG00000176746; CTA
SASQKAIIF

SEQ ID NO: 44245 - protein, 9 aa, Homo sapiens
  misc_feature: Table A; Target 44245; HLA-B*37:01; MAGEB6; ENSG00000176746; CTA
SASQKAIIF

SEQ ID NO: 44246 - protein, 9 aa, Homo sapiens
  misc_feature: Table A; Target 44246; HLA-B*58:01; MAGEB6; ENSG00000176746; CTA
SASQKAIIF

SEQ ID NO: 44247 - protein, 9 aa, Homo sapiens
  misc_feature: Table A; Target 44247; HLA-C*02:02; MAGEB6; ENSG00000176746; CTA
SASQKAIIF

SEQ ID NO: 44248 - protein, 9 aa, Homo sapiens
  misc_feature: Table A; Target 44248; HLA-C*12:03; MAGEB6; ENSG00000176746; CTA
SASQKAIIF

SEQ ID NO: 44249 - protein, 9 aa, Homo sapiens
  misc_feature: Table A; Target 44249; HLA-C*16:01; MAGEB6; ENSG00000176746; CTA
SASQKAIIF

SEQ ID NO: 44250 - protein, 9 aa, Homo sapiens
  misc_feature: Table A; Target 44250; HLA-C*16:02; MAGEB6; ENSG00000176746; CTA
SASQKAIIF

SEQ ID NO: 44251 - protein, 10 aa, Homo sapiens
  misc_feature: Table A; Target 44251; HLA-A*03:01; MAGEB6; ENSG00000176746; CTA
SASQKAIIFK

SEQ ID NO: 44252 - protein, 10 aa, Homo sapiens
  misc_feature: Table A; Target 44252; HLA-A*03:02; MAGEB6; ENSG00000176746; CTA
SASQKAIIFK

SEQ ID NO: 44253 - protein, 10 aa, Homo sapiens
  misc_feature: Table A; Target 44253; HLA-A*11:01; MAGEB6; ENSG00000176746; CTA
SASQKAIIFK

SEQ ID NO: 44254 - protein, 10 aa, Homo sapiens
  misc_feature: Table A; Target 44254; HLA-A*68:01; MAGEB6; ENSG00000176746; CTA
SASQKAIIFK

SEQ ID NO: 44255 - protein, 8 aa, Homo sapiens
  misc_feature: Table A; Target 44255; HLA-B*37:01; MAGEB6; ENSG00000176746; CTA
SDPPCYEF

SEQ ID NO: 44256 - protein, 11 aa, Homo sapiens
  misc_feature: Table A; Target 44256; HLA-A*30:01; MAGEB6; ENSG00000176746; CTA
SEGILSGDNAL

SEQ ID NO: 44257 - protein, 11 aa, Homo sapiens
  misc_feature: Table A; Target 44257; HLA-B*40:01; MAGEB6; ENSG00000176746; CTA
SEGILSGDNAL

SEQ ID NO: 44258 - protein, 8 aa, Homo sapiens
  misc_feature: Table A; Target 44258; HLA-A*11:01; MAGEB6; ENSG00000176746; CTA
SGDNALPK

SEQ ID NO: 44259 - protein, 10 aa, Homo sapiens
  misc_feature: Table A; Target 44259; HLA-A*03:02; MAGEB6; ENSG00000176746; CTA
SGESYTLVSK

SEQ ID NO: 44260 - protein, 10 aa, Homo sapiens
  misc_feature: Table A; Target 44260; HLA-A*11:01; MAGEB6; ENSG00000176746; CTA
SGESYTLVSK

SEQ ID NO: 44261 - protein, 10 aa, Homo sapiens
  misc_feature: Table A; Target 44261; HLA-A*68:01; MAGEB6; ENSG00000176746; CTA
SGESYTLVSK

SEQ ID NO: 44262 - protein, 10 aa, Homo sapiens
  misc_feature: Table A; Target 44262; HLA-B*27:02; MAGEB6; ENSG00000176746; CTA
SGESYTLVSK

SEQ ID NO: 44263 - protein, 10 aa, Homo sapiens
  misc_feature: Table A; Target 44263; HLA-C*07:06; MAGEB6; ENSG00000176746; CTA
SGESYTLVSK

SEQ ID NO: 44264 - protein, 9 aa, Homo sapiens
  misc_feature: Table A; Target 44264; HLA-A*03:01; MAGEB6; ENSG00000176746; CTA
SILKADMLK

SEQ ID NO: 44265 - protein, 9 aa, Homo sapiens
  misc_feature: Table A; Target 44265; HLA-A*03:02; MAGEB6; ENSG00000176746; CTA
SILKADMLK

SEQ ID NO: 44266 - protein, 9 aa, Homo sapiens
  misc_feature: Table A; Target 44266; HLA-A*11:01; MAGEB6; ENSG00000176746; CTA
SILKADMLK

SEQ ID NO: 44267 - protein, 11 aa, Homo sapiens
  misc_feature: Table A; Target 44267; HLA-C*01:02; MAGEB6; ENSG00000176746; CTA
SIPQESQGVSP

SEQ ID NO: 44268 - protein, 8 aa, Homo sapiens
  misc_feature: Table A; Target 44268; HLA-A*30:02; MAGEB6; ENSG00000176746; CTA
SNTSPGLY

SEQ ID NO: 44269 - protein, 8 aa, Homo sapiens
  misc_feature: Table A; Target 44269; HLA-A*01:01; MAGEB6; ENSG00000176746; CTA
SPDAVVSY

SEQ ID NO: 44270 - protein, 8 aa, Homo sapiens
  misc_feature: Table A; Target 44270; HLA-B*18:01; MAGEB6; ENSG00000176746; CTA
SPDAVVSY

SEQ ID NO: 44271 - protein, 8 aa, Homo sapiens
  misc_feature: Table A; Target 44271; HLA-B*35:01; MAGEB6; ENSG00000176746; CTA
SPDAVVSY

SEQ ID NO: 44272 - protein, 8 aa, Homo sapiens
  misc_feature: Table A; Target 44272; HLA-B*55:01; MAGEB6; ENSG00000176746; CTA
SPDAVVSY

SEQ ID NO: 44273 - protein, 8 aa, Homo sapiens
  misc_feature: Table A; Target 44273; HLA-C*03:03; MAGEB6; ENSG00000176746; CTA
SPDAVVSY

SEQ ID NO: 44274 - protein, 8 aa, Homo sapiens
  misc_feature: Table A; Target 44274; HLA-C*05:01; MAGEB6; ENSG00000176746; CTA
SPDAVVSY

SEQ ID NO: 44275 - protein, 8 aa, Homo sapiens
  misc_feature: Table A; Target 44275; HLA-B*07:02; MAGEB6; ENSG00000176746; CTA
SPGLYPHL

SEQ ID NO: 44276 - protein, 8 aa, Homo sapiens
  misc_feature: Table A; Target 44276; HLA-C*07:02; MAGEB6; ENSG00000176746; CTA
SPGLYPHL

SEQ ID NO: 44277 - protein, 9 aa, Homo sapiens
  misc_feature: Table A; Target 44277; HLA-B*35:01; MAGEB6; ENSG00000176746; CTA
SPGLYPHLY

SEQ ID NO: 44278 - protein, 10 aa, Homo sapiens
  misc_feature: Table A; Target 44278; HLA-B*07:02; MAGEB6; ENSG00000176746; CTA
SPSTSHDVSV

SEQ ID NO: 44279 - protein, 10 aa, Homo sapiens
  misc_feature: Table A; Target 44279; HLA-B*56:01; MAGEB6; ENSG00000176746; CTA
SPSTSHDVSV

SEQ ID NO: 44280 - protein, 10 aa, Homo sapiens
  misc_feature: Table A; Target 44280; HLA-C*07:02; MAGEB6; ENSG00000176746; CTA
SPSTSHDVSV

SEQ ID NO: 44281 - protein, 10 aa, Homo sapiens
  misc_feature: Table A; Target 44281; HLA-B*07:02; MAGEB6; ENSG00000176746; CTA
SPSTSRDASV

SEQ ID NO: 44282 - protein, 10 aa, Homo sapiens
  misc_feature: Table A; Target 44282; HLA-C*07:02; MAGEB6; ENSG00000176746; CTA
SPSTSRDASV

SEQ ID NO: 44283 - protein, 9 aa, Homo sapiens
  misc_feature: Table A; Target 44283; HLA-B*07:02; MAGEB6; ENSG00000176746; CTA
SPTGSPDAV

SEQ ID NO: 44284 - protein, 9 aa, Homo sapiens
  misc_feature: Table A; Target 44284; HLA-B*56:01; MAGEB6; ENSG00000176746; CTA
SPTGSPDAV

SEQ ID NO: 44285 - protein, 10 aa, Homo sapiens
  misc_feature: Table A; Target 44285; HLA-B*35:03; MAGEB6; ENSG00000176746; CTA
SPTGSPDAVV

SEQ ID NO: 44286 - protein, 10 aa, Homo sapiens
  misc_feature: Table A; Target 44286; HLA-B*56:01; MAGEB6; ENSG00000176746; CTA
SPTGSPDAVV

SEQ ID NO: 44287 - protein, 8 aa, Homo sapiens
  misc_feature: Table A; Target 44287; HLA-A*32:01; MAGEB6; ENSG00000176746; CTA
SQHLVVAF

SEQ ID NO: 44288 - protein, 8 aa, Homo sapiens
  misc_feature: Table A; Target 44288; HLA-B*13:02; MAGEB6; ENSG00000176746; CTA
SQHLVVAF

SEQ ID NO: 44289 - protein, 8 aa, Homo sapiens
  misc_feature: Table A; Target 44289; HLA-B*15:01; MAGEB6; ENSG00000176746; CTA
SQHLVVAF

SEQ ID NO: 44290 - protein, 8 aa, Homo sapiens
  misc_feature: Table A; Target 44290; HLA-B*15:03; MAGEB6; ENSG00000176746; CTA
SQHLVVAF

SEQ ID NO: 44291 - protein, 8 aa, Homo sapiens
  misc_feature: Table A; Target 44291; HLA-B*18:01; MAGEB6; ENSG00000176746; CTA
SQHLVVAF

SEQ ID NO: 44292 - protein, 8 aa, Homo sapiens
  misc_feature: Table A; Target 44292; HLA-B*37:01; MAGEB6; ENSG00000176746; CTA
SQHLVVAF

SEQ ID NO: 44293 - protein, 8 aa, Homo sapiens
  misc_feature: Table A; Target 44293; HLA-C*07:04; MAGEB6; ENSG00000176746; CTA
SQHLVVAF

SEQ ID NO: 44294 - protein, 8 aa, Homo sapiens
  misc_feature: Table A; Target 44294; HLA-C*16:04; MAGEB6; ENSG00000176746; CTA
SQHLVVAF

SEQ ID NO: 44295 - protein, 9 aa, Homo sapiens
  misc_feature: Table A; Target 44295; HLA-A*31:01; MAGEB6; ENSG00000176746; CTA
SQKAIIFKR

SEQ ID NO: 44296 - protein, 9 aa, Homo sapiens
  misc_feature: Table A; Target 44296; HLA-A*33:01; MAGEB6; ENSG00000176746; CTA
SQKAIIFKR

SEQ ID NO: 44297 - protein, 9 aa, Homo sapiens
  misc_feature: Table A; Target 44297; HLA-A*33:03; MAGEB6; ENSG00000176746; CTA
SQKAIIFKR

SEQ ID NO: 44298 - protein, 11 aa, Homo sapiens
  misc_feature: Table A; Target 44298; HLA-A*03:02; MAGEB6; ENSG00000176746; CTA
SSGESYTLVSK

SEQ ID NO: 44299 - protein, 11 aa, Homo sapiens
  misc_feature: Table A; Target 44299; HLA-A*11:01; MAGEB6; ENSG00000176746; CTA
SSGESYTLVSK

SEQ ID NO: 44300 - protein, 11 aa, Homo sapiens
  misc_feature: Table A; Target 44300; HLA-A*68:01; MAGEB6; ENSG00000176746; CTA
SSGESYTLVSK

SEQ ID NO: 44301 - protein, 11 aa, Homo sapiens
  misc_feature: Table A; Target 44301; HLA-B*27:02; MAGEB6; ENSG00000176746; CTA
SSGESYTLVSK

SEQ ID NO: 44302 - protein, 9 aa, Homo sapiens
  misc_feature: Table A; Target 44302; HLA-A*01:01; MAGEB6; ENSG00000176746; CTA
SSNTSPGLY

SEQ ID NO: 44303 - protein, 9 aa, Homo sapiens
  misc_feature: Table A; Target 44303; HLA-A*30:02; MAGEB6; ENSG00000176746; CTA
SSNTSPGLY

SEQ ID NO: 44304 - protein, 9 aa, Homo sapiens
  misc_feature: Table A; Target 44304; HLA-B*15:03; MAGEB6; ENSG00000176746; CTA
SSNTSPGLY

SEQ ID NO: 44305 - protein, 9 aa, Homo sapiens
  misc_feature: Table A; Target 44305; HLA-B*58:01; MAGEB6; ENSG00000176746; CTA
SSNTSPGLY

SEQ ID NO: 44306 - protein, 8 aa, Homo sapiens
  misc_feature: Table A; Target 44306; HLA-C*16:01; MAGEB6; ENSG00000176746; CTA
SSSSRACL

SEQ ID NO: 44307 - protein, 9 aa, Homo sapiens
  misc_feature: Table A; Target 44307; HLA-B*07:02; MAGEB6; ENSG00000176746; CTA
SSSSSRACL

SEQ ID NO: 44308 - protein, 9 aa, Homo sapiens
  misc_feature: Table A; Target 44308; HLA-C*07:02; MAGEB6; ENSG00000176746; CTA
SSSSSRACL

SEQ ID NO: 44309 - protein, 9 aa, Homo sapiens
  misc_feature: Table A; Target 44309; HLA-C*16:01; MAGEB6; ENSG00000176746; CTA
SSSSSRACL

SEQ ID NO: 44310 - protein, 9 aa, Homo sapiens
  misc_feature: Table A; Target 44310; HLA-C*16:01; MAGEB6; ENSG00000176746; CTA
SSSSSSRAC

SEQ ID NO: 44311 - protein, 9 aa, Homo sapiens
  misc_feature: Table A; Target 44311; HLA-B*13:02; MAGEB6; ENSG00000176746; CTA
SVSASQKAI

SEQ ID NO: 44312 - protein, 8 aa, Homo sapiens
  misc_feature: Table A; Target 44312; HLA-A*23:01; MAGEB6; ENSG00000176746; CTA
SYTLVSKL

SEQ ID NO: 44313 - protein, 8 aa, Homo sapiens
  misc_feature: Table A; Target 44313; HLA-A*24:02; MAGEB6; ENSG00000176746; CTA
SYTLVSKL

SEQ ID NO: 44314 - protein, 8 aa, Homo sapiens
  misc_feature: Table A; Target 44314; HLA-C*14:02; MAGEB6; ENSG00000176746; CTA
SYTLVSKL

SEQ ID NO: 44315 - protein, 9 aa, Homo sapiens
  misc_feature: Table A; Target 44315; HLA-A*01:01; MAGEB6; ENSG00000176746; CTA
TEDLVQDKY

SEQ ID NO: 44316 - protein, 9 aa, Homo sapiens
  misc_feature: Table A; Target 44316; HLA-B*18:01; MAGEB6; ENSG00000176746; CTA
TEDLVQDKY

SEQ ID NO: 44317 - protein, 9 aa, Homo sapiens
  misc_feature: Table A; Target 44317; HLA-B*44:02; MAGEB6; ENSG00000176746; CTA
TEDLVQDKY

SEQ ID NO: 44318 - protein, 9 aa, Homo sapiens
  misc_feature: Table A; Target 44318; HLA-B*44:03; MAGEB6; ENSG00000176746; CTA
TEDLVQDKY

SEQ ID NO: 44319 - protein, 9 aa, Homo sapiens
  misc_feature: Table A; Target 44319; HLA-C*16:04; MAGEB6; ENSG00000176746; CTA
TEDLVQDKY

SEQ ID NO: 44320 - protein, 10 aa, Homo sapiens
  misc_feature: Table A; Target 44320; HLA-B*49:01; MAGEB6; ENSG00000176746; CTA
TEDLVQDKYV

SEQ ID NO: 44321 - protein, 11 aa, Homo sapiens
  misc_feature: Table A; Target 44321; HLA-B*49:01; MAGEB6; ENSG00000176746; CTA
TEDLVQDKYVV

SEQ ID NO: 44322 - protein, 8 aa, Homo sapiens
  misc_feature: Table A; Target 44322; HLA-B*18:01; MAGEB6; ENSG00000176746; CTA
TEEEVWEF

SEQ ID NO: 44323 - protein, 9 aa, Homo sapiens
  misc_feature: Table A; Target 44323; HLA-C*01:02; MAGEB6; ENSG00000176746; CTA
TGPQATAEK

SEQ ID NO: 44324 - protein, 10 aa, Homo sapiens
  misc_feature: Table A; Target 44324; HLA-A*30:02; MAGEB6; ENSG00000176746; CTA
TGSPDAVVSY

SEQ ID NO: 44325 - protein, 10 aa, Homo sapiens
  misc_feature: Table A; Target 44325; HLA-B*15:01; MAGEB6; ENSG00000176746; CTA
TGSPDAVVSY

SEQ ID NO: 44326 - protein, 10 aa, Homo sapiens
  misc_feature: Table A; Target 44326; HLA-B*35:01; MAGEB6; ENSG00000176746; CTA
TGSPDAVVSY

SEQ ID NO: 44327 - protein, 10 aa, Homo sapiens
  misc_feature: Table A; Target 44327; HLA-B*39:01; MAGEB6; ENSG00000176746; CTA
TGSPDAVVSY

SEQ ID NO: 44328 - protein, 10 aa, Homo sapiens
  misc_feature: Table A; Target 44328; HLA-C*03:03; MAGEB6; ENSG00000176746; CTA
TGSPDAVVSY

SEQ ID NO: 44329 - protein, 10 aa, Homo sapiens
  misc_feature: Table A; Target 44329; HLA-C*07:04; MAGEB6; ENSG00000176746; CTA
TGSPDAVVSY

SEQ ID NO: 44330 - protein, 10 aa, Homo sapiens
  misc_feature: Table A; Target 44330; HLA-C*07:06; MAGEB6; ENSG00000176746; CTA
TGSPDAVVSY

SEQ ID NO: 44331 - protein, 9 aa, Homo sapiens
  misc_feature: Table A; Target 44331; HLA-A*03:01; MAGEB6; ENSG00000176746; CTA
TLAQFLQKK

SEQ ID NO: 44332 - protein, 9 aa, Homo sapiens
  misc_feature: Table A; Target 44332; HLA-A*03:02; MAGEB6; ENSG00000176746; CTA
TLAQFLQKK

SEQ ID NO: 44333 - protein, 8 aa, Homo sapiens
  misc_feature: Table A; Target 44333; HLA-B*08:01; MAGEB6; ENSG00000176746; CTA
TLVSKLGL

SEQ ID NO: 44334 - protein, 9 aa, Homo sapiens
  misc_feature: Table A; Target 44334; HLA-A*02:07; MAGEB6; ENSG00000176746; CTA
TSPGLYPHL

SEQ ID NO: 44335 - protein, 10 aa, Homo sapiens
  misc_feature: Table A; Target 44335; HLA-A*01:01; MAGEB6; ENSG00000176746; CTA
TSPGLYPHLY

SEQ ID NO: 44336 - protein, 10 aa, Homo sapiens
  misc_feature: Table A; Target 44336; HLA-A*29:02; MAGEB6; ENSG00000176746; CTA
TSPGLYPHLY

SEQ ID NO: 44337 - protein, 10 aa, Homo sapiens
  misc_feature: Table A; Target 44337; HLA-A*30:02; MAGEB6; ENSG00000176746; CTA
TSPGLYPHLY

SEQ ID NO: 44338 - protein, 9 aa, Homo sapiens
  misc_feature: Table A; Target 44338; HLA-A*30:02; MAGEB6; ENSG00000176746; CTA
TSQHLVVAF

SEQ ID NO: 44339 - protein, 9 aa, Homo sapiens
  misc_feature: Table A; Target 44339; HLA-A*32:01; MAGEB6; ENSG00000176746; CTA
TSQHLVVAF

SEQ ID NO: 44340 - protein, 9 aa, Homo sapiens
  misc_feature: Table A; Target 44340; HLA-A*33:01; MAGEB6; ENSG00000176746; CTA
TSQHLVVAF

SEQ ID NO: 44341 - protein, 9 aa, Homo sapiens
  misc_feature: Table A; Target 44341; HLA-B*35:01; MAGEB6; ENSG00000176746; CTA
TSQHLVVAF

SEQ ID NO: 44342 - protein, 9 aa, Homo sapiens
  misc_feature: Table A; Target 44342; HLA-B*57:01; MAGEB6; ENSG00000176746; CTA
TSQHLVVAF

SEQ ID NO: 44343 - protein, 9 aa, Homo sapiens
  misc_feature: Table A; Target 44343; HLA-B*58:01; MAGEB6; ENSG00000176746; CTA
TSQHLVVAF

SEQ ID NO: 44344 - protein, 9 aa, Homo sapiens
  misc_feature: Table A; Target 44344; HLA-C*07:04; MAGEB6; ENSG00000176746; CTA
TSQHLVVAF

SEQ ID NO: 44345 - protein, 9 aa, Homo sapiens
  misc_feature: Table A; Target 44345; HLA-C*12:03; MAGEB6; ENSG00000176746; CTA
TSQHLVVAF

SEQ ID NO: 44346 - protein, 9 aa, Homo sapiens
  misc_feature: Table A; Target 44346; HLA-C*16:01; MAGEB6; ENSG00000176746; CTA
TSQHLVVAF

SEQ ID NO: 44347 - protein, 9 aa, Homo sapiens
  misc_feature: Table A; Target 44347; HLA-C*16:02; MAGEB6; ENSG00000176746; CTA
TSQHLVVAF

SEQ ID NO: 44348 - protein, 10 aa, Homo sapiens
  misc_feature: Table A; Target 44348; HLA-C*02:02; MAGEB6; ENSG00000176746; CTA
VAFGVELKEM

SEQ ID NO: 44349 - protein, 10 aa, Homo sapiens
  misc_feature: Table A; Target 44349; HLA-C*12:03; MAGEB6; ENSG00000176746; CTA
VAFGVELKEM

SEQ ID NO: 44350 - protein, 9 aa, Homo sapiens
  misc_feature: Table A; Target 44350; HLA-A*30:02; MAGEB6; ENSG00000176746; CTA
VCNSDPPCY

SEQ ID NO: 44351 - protein, 8 aa, Homo sapiens
  misc_feature: Table A; Target 44351; HLA-B*15:01; MAGEB6; ENSG00000176746; CTA
VQDKYVVY

SEQ ID NO: 44352 - protein, 8 aa, Homo sapiens
  misc_feature: Table A; Target 44352; HLA-B*15:03; MAGEB6; ENSG00000176746; CTA
VQDKYVVY

SEQ ID NO: 44353 - protein, 8 aa, Homo sapiens
  misc_feature: Table A; Target 44353; HLA-B*18:01; MAGEB6; ENSG00000176746; CTA
VQDKYVVY

SEQ ID NO: 44354 - protein, 8 aa, Homo sapiens
  misc_feature: Table A; Target 44354; HLA-C*05:01; MAGEB6; ENSG00000176746; CTA
VQDKYVVY

SEQ ID NO: 44355 - protein, 8 aa, Homo sapiens
  misc_feature: Table A; Target 44355; HLA-C*07:04; MAGEB6; ENSG00000176746; CTA
VQDKYVVY

SEQ ID NO: 44356 - protein, 9 aa, Homo sapiens
  misc_feature: Table A; Target 44356; HLA-A*03:01; MAGEB6; ENSG00000176746; CTA
VQDKYVVYR

SEQ ID NO: 44357 - protein, 9 aa, Homo sapiens
  misc_feature: Table A; Target 44357; HLA-A*31:01; MAGEB6; ENSG00000176746; CTA
VQDKYVVYR

SEQ ID NO: 44358 - protein, 9 aa, Homo sapiens
  misc_feature: Table A; Target 44358; HLA-C*16:01; MAGEB6; ENSG00000176746; CTA
VSASQKAII

SEQ ID NO: 44359 - protein, 10 aa, Homo sapiens
  misc_feature: Table A; Target 44359; HLA-C*12:03; MAGEB6; ENSG00000176746; CTA
VSASQKAIIF

SEQ ID NO: 44360 - protein, 10 aa, Homo sapiens
  misc_feature: Table A; Target 44360; HLA-C*16:01; MAGEB6; ENSG00000176746; CTA
VSASQKAIIF

SEQ ID NO: 44361 - protein, 11 aa, Homo sapiens
  misc_feature: Table A; Target 44361; HLA-A*03:01; MAGEB6; ENSG00000176746; CTA
VSASQKAIIFK

SEQ ID NO: 44362 - protein, 11 aa, Homo sapiens
  misc_feature: Table A; Target 44362; HLA-A*03:02; MAGEB6; ENSG00000176746; CTA
VSASQKAIIFK

SEQ ID NO: 44363 - protein, 11 aa, Homo sapiens
  misc_feature: Table A; Target 44363; HLA-A*11:01; MAGEB6; ENSG00000176746; CTA
VSASQKAIIFK

SEQ ID NO: 44364 - protein, 8 aa, Homo sapiens
  misc_feature: Table A; Target 44364; HLA-B*46:01; MAGEB6; ENSG00000176746; CTA
VVAFGVEL

SEQ ID NO: 44365 - protein, 8 aa, Homo sapiens
  misc_feature: Table A; Target 44365; HLA-C*01:02; MAGEB6; ENSG00000176746; CTA
VVAFGVEL

SEQ ID NO: 44366 - protein, 8 aa, Homo sapiens
  misc_feature: Table A; Target 44366; HLA-C*03:03; MAGEB6; ENSG00000176746; CTA
VVAFGVEL

SEQ ID NO: 44367 - protein, 8 aa, Homo sapiens
  misc_feature: Table A; Target 44367; HLA-C*03:04; MAGEB6; ENSG00000176746; CTA
VVAFGVEL

SEQ ID NO: 44368 - protein, 8 aa, Homo sapiens
  misc_feature: Table A; Target 44368; HLA-C*05:01; MAGEB6; ENSG00000176746; CTA
VVAFGVEL

SEQ ID NO: 44369 - protein, 9 aa, Homo sapiens
  misc_feature: Table A; Target 44369; HLA-A*03:02; MAGEB6; ENSG00000176746; CTA
VVAFGVELK

SEQ ID NO: 44370 - protein, 9 aa, Homo sapiens
  misc_feature: Table A; Target 44370; HLA-A*11:01; MAGEB6; ENSG00000176746; CTA
VVAFGVELK

SEQ ID NO: 44371 - protein, 9 aa, Homo sapiens
  misc_feature: Table A; Target 44371; HLA-B*49:01; MAGEB6; ENSG00000176746; CTA
WEFLGLLGI

SEQ ID NO: 44372 - protein, 9 aa, Homo sapiens
  misc_feature: Table A; Target 44372; HLA-A*01:01; MAGEB6; ENSG00000176746; CTA
YAETTKMRV

SEQ ID NO: 44373 - protein, 10 aa, Homo sapiens
  misc_feature: Table A; Target 44373; HLA-C*03:03; MAGEB6; ENSG00000176746; CTA
YAETTKMRVL

SEQ ID NO: 44374 - protein, 10 aa, Homo sapiens
  misc_feature: Table A; Target 44374; HLA-C*03:04; MAGEB6; ENSG00000176746; CTA
YAETTKMRVL

SEQ ID NO: 44375 - protein, 8 aa, Homo sapiens
  misc_feature: Table A; Target 44375; HLA-A*30:01; MAGEB6; ENSG00000176746; CTA
YDGILHSI

SEQ ID NO: 44376 - protein, 8 aa, Homo sapiens
  misc_feature: Table A; Target 44376; HLA-B*13:02; MAGEB6; ENSG00000176746; CTA
YDGILHSI

SEQ ID NO: 44377 - protein, 8 aa, Homo sapiens
  misc_feature: Table A; Target 44377; HLA-B*37:01; MAGEB6; ENSG00000176746; CTA
YDGILHSI

SEQ ID NO: 44378 - protein, 8 aa, Homo sapiens
  misc_feature: Table A; Target 44378; HLA-B*49:01; MAGEB6; ENSG00000176746; CTA
YDGILHSI

SEQ ID NO: 44379 - protein, 9 aa, Homo sapiens
  misc_feature: Table A; Target 44379; HLA-C*07:01; MAGEB6; ENSG00000176746; CTA
YDGILHSIY

SEQ ID NO: 44380 - protein, 11 aa, Homo sapiens
  misc_feature: Table A; Target 44380; HLA-B*27:02; MAGEB6; ENSG00000176746; CTA
YDVAANGQDEK

SEQ ID NO: 44381 - protein, 9 aa, Homo sapiens
  misc_feature: Table A; Target 44381; HLA-A*30:01; MAGEB6; ENSG00000176746; CTA
YEDALIDEV

SEQ ID NO: 44382 - protein, 9 aa, Homo sapiens
  misc_feature: Table A; Target 44382; HLA-B*40:01; MAGEB6; ENSG00000176746; CTA
YEDALIDEV

SEQ ID NO: 44383 - protein, 9 aa, Homo sapiens
  misc_feature: Table A; Target 44383; HLA-B*49:01; MAGEB6; ENSG00000176746; CTA
YEDALIDEV

SEQ ID NO: 44384 - protein, 10 aa, Homo sapiens
  misc_feature: Table A; Target 44384; HLA-B*44:02; MAGEB6; ENSG00000176746; CTA
YEFLWGPRAY

SEQ ID NO: 44385 - protein, 8 aa, Homo sapiens
  misc_feature: Table A; Target 44385; HLA-B*54:01; MAGEB6; ENSG00000176746; CTA
YPHLYEDA

SEQ ID NO: 44386 - protein, 9 aa, Homo sapiens
  misc_feature: Table A; Target 44386; HLA-B*35:01; MAGEB6; ENSG00000176746; CTA
YPHLYEDAL

SEQ ID NO: 44387 - protein, 9 aa, Homo sapiens
  misc_feature: Table A; Target 44387; HLA-B*35:03; MAGEB6; ENSG00000176746; CTA
YPHLYEDAL

SEQ ID NO: 44388 - protein, 9 aa, Homo sapiens
  misc_feature: Table A; Target 44388; HLA-B*55:01; MAGEB6; ENSG00000176746; CTA
YPHLYEDAL

SEQ ID NO: 44389 - protein, 9 aa, Homo sapiens
  misc_feature: Table A; Target 44389; HLA-C*03:03; MAGEB6; ENSG00000176746; CTA
YPHLYEDAL

SEQ ID NO: 44390 - protein, 9 aa, Homo sapiens
  misc_feature: Table A; Target 44390; HLA-C*03:04; MAGEB6; ENSG00000176746; CTA
YTLVSKLGL

SEQ ID NO: 44391 - protein, 11 aa, Homo sapiens
  misc_feature: Table A; Target 44391; HLA-C*02:02; MAGEC1; ENSG00000155495; CTA
AASSSTLVSIF

SEQ ID NO: 44392 - protein, 8 aa, Homo sapiens
  misc_feature: Table A; Target 44392; HLA-A*30:01; MAGEC1; ENSG00000155495; CTA
AEMLTNVI

SEQ ID NO: 44393 - protein, 8 aa, Homo sapiens
  misc_feature: Table A; Target 44393; HLA-B*18:01; MAGEC1; ENSG00000155495; CTA
AEMLTNVI

SEQ ID NO: 44394 - protein, 8 aa, Homo sapiens
  misc_feature: Table A; Target 44394; HLA-B*37:01; MAGEC1; ENSG00000155495; CTA
AEMLTNVI

SEQ ID NO: 44395 - protein, 8 aa, Homo sapiens
  misc_feature: Table A; Target 44395; HLA-B*40:01; MAGEC1; ENSG00000155495; CTA
AEMLTNVI

SEQ ID NO: 44396 - protein, 8 aa, Homo sapiens
  misc_feature: Table A; Target 44396; HLA-B*40:02; MAGEC1; ENSG00000155495; CTA
AEMLTNVI

SEQ ID NO: 44397 - protein, 8 aa, Homo sapiens
  misc_feature: Table A; Target 44397; HLA-B*44:02; MAGEC1; ENSG00000155495; CTA
AEMLTNVI

SEQ ID NO: 44398 - protein, 8 aa, Homo sapiens
  misc_feature: Table A; Target 44398; HLA-B*44:03; MAGEC1; ENSG00000155495; CTA
AEMLTNVI

SEQ ID NO: 44399 - protein, 11 aa, Homo sapiens
  misc_feature: Table A; Target 44399; HLA-A*30:02; MAGEC1; ENSG00000155495; CTA
AEMLTNVISRY

SEQ ID NO: 44400 - protein, 11 aa, Homo sapiens
  misc_feature: Table A; Target 44400; HLA-B*27:02; MAGEC1; ENSG00000155495; CTA
AEMLTNVISRY

SEQ ID NO: 44401 - protein, 11 aa, Homo sapiens
  misc_feature: Table A; Target 44401; HLA-B*37:01; MAGEC1; ENSG00000155495; CTA
AEMLTNVISRY

SEQ ID NO: 44402 - protein, 11 aa, Homo sapiens
  misc_feature: Table A; Target 44402; HLA-B*40:01; MAGEC1; ENSG00000155495; CTA
AEMLTNVISRY

SEQ ID NO: 44403 - protein, 11 aa, Homo sapiens
  misc_feature: Table A; Target 44403; HLA-C*16:04; MAGEC1; ENSG00000155495; CTA
AEMLTNVISRY

SEQ ID NO: 44404 - protein, 8 aa, Homo sapiens
  misc_feature: Table A; Target 44404; HLA-C*16:01; MAGEC1; ENSG00000155495; CTA
AFGEPREL

SEQ ID NO: 44405 - protein, 9 aa, Homo sapiens
  misc_feature: Table A; Target 44405; HLA-A*02:01; MAGEC1; ENSG00000155495; CTA
AMLKNTVPI

SEQ ID NO: 44406 - protein, 11 aa, Homo sapiens
  misc_feature: Table A; Target 44406; HLA-A*23:01; MAGEC1; ENSG00000155495; CTA
AMLKNTVPITF

SEQ ID NO: 44407 - protein, 8 aa, Homo sapiens
  misc_feature: Table A; Target 44407; HLA-B*37:01; MAGEC1; ENSG00000155495; CTA
AQSAFEGF

SEQ ID NO: 44408 - protein, 9 aa, Homo sapiens
  misc_feature: Table A; Target 44408; HLA-A*02:01; MAGEC1; ENSG00000155495; CTA
AQSPLQIPV

SEQ ID NO: 44409 - protein, 9 aa, Homo sapiens
  misc_feature: Table A; Target 44409; HLA-A*30:01; MAGEC1; ENSG00000155495; CTA
AQSPLQIPV

SEQ ID NO: 44410 - protein, 9 aa, Homo sapiens
  misc_feature: Table A; Target 44410; HLA-A*68:02; MAGEC1; ENSG00000155495; CTA
AQSPLQIPV

SEQ ID NO: 44411 - protein, 9 aa, Homo sapiens
  misc_feature: Table A; Target 44411; HLA-B*13:02; MAGEC1; ENSG00000155495; CTA
AQSPLQIPV

SEQ ID NO: 44412 - protein, 9 aa, Homo sapiens
  misc_feature: Table A; Target 44412; HLA-B*27:05; MAGEC1; ENSG00000155495; CTA
AQSPLQIPV

SEQ ID NO: 44413 - protein, 9 aa, Homo sapiens
  misc_feature: Table A; Target 44413; HLA-B*37:01; MAGEC1; ENSG00000155495; CTA
AQSPLQIPV

SEQ ID NO: 44414 - protein, 9 aa, Homo sapiens
  misc_feature: Table A; Target 44414; HLA-B*39:01; MAGEC1; ENSG00000155495; CTA
AQSPLQIPV

SEQ ID NO: 44415 - protein, 9 aa, Homo sapiens
  misc_feature: Table A; Target 44415; HLA-B*56:01; MAGEC1; ENSG00000155495; CTA
AQSPLQIPV

SEQ ID NO: 44416 - protein, 9 aa, Homo sapiens
  misc_feature: Table A; Target 44416; HLA-C*02:02; MAGEC1; ENSG00000155495; CTA
AQSPLQIPV

SEQ ID NO: 44417 - protein, 9 aa, Homo sapiens
  misc_feature: Table A; Target 44417; HLA-C*06:02; MAGEC1; ENSG00000155495; CTA
AQSPLQIPV

SEQ ID NO: 44418 - protein, 9 aa, Homo sapiens
  misc_feature: Table A; Target 44418; HLA-C*07:04; MAGEC1; ENSG00000155495; CTA
AQSPLQIPV

SEQ ID NO: 44419 - protein, 9 aa, Homo sapiens
  misc_feature: Table A; Target 44419; HLA-C*16:04; MAGEC1; ENSG00000155495; CTA
AQSPLQIPV

SEQ ID NO: 44420 - protein, 9 aa, Homo sapiens
  misc_feature: Table A; Target 44420; HLA-B*13:02; MAGEC1; ENSG00000155495; CTA
AQSPLQRPV

SEQ ID NO: 44421 - protein, 9 aa, Homo sapiens
  misc_feature: Table A; Target 44421; HLA-B*37:01; MAGEC1; ENSG00000155495; CTA
AQSPLQRPV

SEQ ID NO: 44422 - protein, 9 aa, Homo sapiens
  misc_feature: Table A; Target 44422; HLA-C*02:02; MAGEC1; ENSG00000155495; CTA
AQSPLQRPV

SEQ ID NO: 44423 - protein, 9 aa, Homo sapiens
  misc_feature: Table A; Target 44423; HLA-C*06:02; MAGEC1; ENSG00000155495; CTA
AQSPLQRPV

SEQ ID NO: 44424 - protein, 9 aa, Homo sapiens
  misc_feature: Table A; Target 44424; HLA-C*16:01; MAGEC1; ENSG00000155495; CTA
AQSPLQRPV

SEQ ID NO: 44425 - protein, 9 aa, Homo sapiens
  misc_feature: Table A; Target 44425; HLA-C*16:02; MAGEC1; ENSG00000155495; CTA
AQSPLQRPV

SEQ ID NO: 44426 - protein, 9 aa, Homo sapiens
  misc_feature: Table A; Target 44426; HLA-B*13:02; MAGEC1; ENSG00000155495; CTA
AQSPLQSPV

SEQ ID NO: 44427 - protein, 9 aa, Homo sapiens
  misc_feature: Table A; Target 44427; HLA-B*27:05; MAGEC1; ENSG00000155495; CTA
AQSPLQSPV

SEQ ID NO: 44428 - protein, 9 aa, Homo sapiens
  misc_feature: Table A; Target 44428; HLA-B*39:01; MAGEC1; ENSG00000155495; CTA
AQSPLQSPV

SEQ ID NO: 44429 - protein, 9 aa, Homo sapiens
  misc_feature: Table A; Target 44429; HLA-A*02:01; MAGEC1; ENSG00000155495; CTA
AQSSLQIPV

SEQ ID NO: 44430 - protein, 9 aa, Homo sapiens
  misc_feature: Table A; Target 44430; HLA-B*13:02; MAGEC1; ENSG00000155495; CTA
AQSSLQIPV

SEQ ID NO: 44431 - protein, 9 aa, Homo sapiens
  misc_feature: Table A; Target 44431; HLA-B*27:05; MAGEC1; ENSG00000155495; CTA
AQSSLQIPV

SEQ ID NO: 44432 - protein, 9 aa, Homo sapiens
  misc_feature: Table A; Target 44432; HLA-B*39:01; MAGEC1; ENSG00000155495; CTA
AQSSLQIPV

SEQ ID NO: 44433 - protein, 9 aa, Homo sapiens
  misc_feature: Table A; Target 44433; HLA-B*56:01; MAGEC1; ENSG00000155495; CTA
AQSSLQIPV

SEQ ID NO: 44434 - protein, 8 aa, Homo sapiens
  misc_feature: Table A; Target 44434; HLA-B*37:01; MAGEC1; ENSG00000155495; CTA
AQSTFEGF

SEQ ID NO: 44435 - protein, 9 aa, Homo sapiens
  misc_feature: Table A; Target 44435; HLA-C*03:04; MAGEC1; ENSG00000155495; CTA
ASSFFSSAL

SEQ ID NO: 44436 - protein, 9 aa, Homo sapiens
  misc_feature: Table A; Target 44436; HLA-A*30:01; MAGEC1; ENSG00000155495; CTA
ASSSTLVSI

SEQ ID NO: 44437 - protein, 9 aa, Homo sapiens
  misc_feature: Table A; Target 44437; HLA-B*13:02; MAGEC1; ENSG00000155495; CTA
ASSSTLVSI

SEQ ID NO: 44438 - protein, 9 aa, Homo sapiens
  misc_feature: Table A; Target 44438; HLA-B*49:01; MAGEC1; ENSG00000155495; CTA
ASSSTLVSI

SEQ ID NO: 44439 - protein, 9 aa, Homo sapiens
  misc_feature: Table A; Target 44439; HLA-B*58:01; MAGEC1; ENSG00000155495; CTA
ASSSTLVSI

SEQ ID NO: 44440 - protein, 9 aa, Homo sapiens
  misc_feature: Table A; Target 44440; HLA-C*16:02; MAGEC1; ENSG00000155495; CTA
ASSSTLVSI

SEQ ID NO: 44441 - protein, 10 aa, Homo sapiens
  misc_feature: Table A; Target 44441; HLA-A*30:02; MAGEC1; ENSG00000155495; CTA
ASSSVMSPSF

SEQ ID NO: 44442 - protein, 10 aa, Homo sapiens
  misc_feature: Table A; Target 44442; HLA-B*27:05; MAGEC1; ENSG00000155495; CTA
ASSSVMSPSF

SEQ ID NO: 44443 - protein, 10 aa, Homo sapiens
  misc_feature: Table A; Target 44443; HLA-B*58:01; MAGEC1; ENSG00000155495; CTA
ASSSVMSPSF

SEQ ID NO: 44444 - protein, 10 aa, Homo sapiens
  misc_feature: Table A; Target 44444; HLA-C*16:04; MAGEC1; ENSG00000155495; CTA
ASSSVMSPSF

SEQ ID NO: 44445 - protein, 9 aa, Homo sapiens
  misc_feature: Table A; Target 44445; HLA-C*05:01; MAGEC1; ENSG00000155495; CTA
ATESASSSV

SEQ ID NO: 44446 - protein, 9 aa, Homo sapiens
  misc_feature: Table A; Target 44446; HLA-C*03:04; MAGEC1; ENSG00000155495; CTA
CSSSTSLSL

SEQ ID NO: 44447 - protein, 10 aa, Homo sapiens
  misc_feature: Table A; Target 44447; HLA-B*18:01; MAGEC1; ENSG00000155495; CTA
DEKVDELARF

SEQ ID NO: 44448 - protein, 10 aa, Homo sapiens
  misc_feature: Table A; Target 44448; HLA-B*44:02; MAGEC1; ENSG00000155495; CTA
DEKVDELARF

SEQ ID NO: 44449 - protein, 10 aa, Homo sapiens
  misc_feature: Table A; Target 44449; HLA-B*44:03; MAGEC1; ENSG00000155495; CTA
DEKVDELARF

SEQ ID NO: 44450 - protein, 8 aa, Homo sapiens
  misc_feature: Table A; Target 44450; HLA-B*18:01; MAGEC1; ENSG00000155495; CTA
DELARFLL

SEQ ID NO: 44451 - protein, 9 aa, Homo sapiens
  misc_feature: Table A; Target 44451; HLA-B*44:02; MAGEC1; ENSG00000155495; CTA
DELARFLLL

SEQ ID NO: 44452 - protein, 10 aa, Homo sapiens
  misc_feature: Table A; Target 44452; HLA-B*18:01; MAGEC1; ENSG00000155495; CTA
DEQGMSQNRL

SEQ ID NO: 44453 - protein, 10 aa, Homo sapiens
  misc_feature: Table A; Target 44453; HLA-A*30:01; MAGEC1; ENSG00000155495; CTA
DEYTSSSDTL

SEQ ID NO: 44454 - protein, 10 aa, Homo sapiens
  misc_feature: Table A; Target 44454; HLA-B*18:01; MAGEC1; ENSG00000155495; CTA
DEYTSSSDTL

SEQ ID NO: 44455 - protein, 10 aa, Homo sapiens
  misc_feature: Table A; Target 44455; HLA-B*40:01; MAGEC1; ENSG00000155495; CTA
DEYTSSSDTL

SEQ ID NO: 44456 - protein, 10 aa, Homo sapiens
  misc_feature: Table A; Target 44456; HLA-A*25:01; MAGEC1; ENSG00000155495; CTA
DMPTAGMPSL

SEQ ID NO: 44457 - protein, 10 aa, Homo sapiens
  misc_feature: Table A; Target 44457; HLA-A*26:01; MAGEC1; ENSG00000155495; CTA
DMPTAGMPSL

SEQ ID NO: 44458 - protein, 8 aa, Homo sapiens
  misc_feature: Table A; Target 44458; HLA-B*35:01; MAGEC1; ENSG00000155495; CTA
DPDDSYVF

SEQ ID NO: 44459 - protein, 8 aa, Homo sapiens
  misc_feature: Table A; Target 44459; HLA-B*35:03; MAGEC1; ENSG00000155495; CTA
DPDDSYVF

SEQ ID NO: 44460 - protein, 8 aa, Homo sapiens
  misc_feature: Table A; Target 44460; HLA-B*55:01; MAGEC1; ENSG00000155495; CTA
DPDDSYVF

SEQ ID NO: 44461 - protein, 8 aa, Homo sapiens
  misc_feature: Table A; Target 44461; HLA-C*03:03; MAGEC1; ENSG00000155495; CTA
DPDDSYVF

SEQ ID NO: 44462 - protein, 8 aa, Homo sapiens
  misc_feature: Table A; Target 44462; HLA-C*05:01; MAGEC1; ENSG00000155495; CTA
DPDDSYVF

SEQ ID NO: 44463 - protein, 9 aa, Homo sapiens
  misc_feature: Table A; Target 44463; HLA-B*51:01; MAGEC1; ENSG00000155495; CTA
DPDDSYVFV

SEQ ID NO: 44464 - protein, 8 aa, Homo sapiens
  misc_feature: Table A; Target 44464; HLA-B*51:01; MAGEC1; ENSG00000155495; CTA
DSLSPLEI

SEQ ID NO: 44465 - protein, 8 aa, Homo sapiens
  misc_feature: Table A; Target 44465; HLA-B*51:01; MAGEC1; ENSG00000155495; CTA
DSLSPLQI

SEQ ID NO: 44466 - protein, 9 aa, Homo sapiens
  misc_feature: Table A; Target 44466; HLA-A*33:01; MAGEC1; ENSG00000155495; CTA
DSLSSLHFP

SEQ ID NO: 44467 - protein, 9 aa, Homo sapiens
  misc_feature: Table A; Target 44467; HLA-B*35:03; MAGEC1; ENSG00000155495; CTA
DSLTDSESL

SEQ ID NO: 44468 - protein, 8 aa, Homo sapiens
  misc_feature: Table A; Target 44468; HLA-A*68:01; MAGEC1; ENSG00000155495; CTA
DSSDPLQR

SEQ ID NO: 44469 - protein, 9 aa, Homo sapiens
  misc_feature: Table A; Target 44469; HLA-A*25:01; MAGEC1; ENSG00000155495; CTA
DSYVFVNTL

SEQ ID NO: 44470 - protein, 9 aa, Homo sapiens
  misc_feature: Table A; Target 44470; HLA-A*33:01; MAGEC1; ENSG00000155495; CTA
DSYVFVNTL

SEQ ID NO: 44471 - protein, 9 aa, Homo sapiens
  misc_feature: Table A; Target 44471; HLA-A*68:02; MAGEC1; ENSG00000155495; CTA
DSYVFVNTL

SEQ ID NO: 44472 - protein, 9 aa, Homo sapiens
  misc_feature: Table A; Target 44472; HLA-B*08:01; MAGEC1; ENSG00000155495; CTA
DSYVFVNTL

SEQ ID NO: 44473 - protein, 9 aa, Homo sapiens
  misc_feature: Table A; Target 44473; HLA-B*18:01; MAGEC1; ENSG00000155495; CTA
DSYVFVNTL

SEQ ID NO: 44474 - protein, 9 aa, Homo sapiens
  misc_feature: Table A; Target 44474; HLA-B*35:01; MAGEC1; ENSG00000155495; CTA
DSYVFVNTL

SEQ ID NO: 44475 - protein, 9 aa, Homo sapiens
  misc_feature: Table A; Target 44475; HLA-B*35:03; MAGEC1; ENSG00000155495; CTA
DSYVFVNTL

SEQ ID NO: 44476 - protein, 9 aa, Homo sapiens
  misc_feature: Table A; Target 44476; HLA-B*51:01; MAGEC1; ENSG00000155495; CTA
DSYVFVNTL

SEQ ID NO: 44477 - protein, 9 aa, Homo sapiens
  misc_feature: Table A; Target 44477; HLA-C*12:03; MAGEC1; ENSG00000155495; CTA
DSYVFVNTL

SEQ ID NO: 44478 - protein, 9 aa, Homo sapiens
  misc_feature: Table A; Target 44478; HLA-C*16:02; MAGEC1; ENSG00000155495; CTA
DSYVFVNTL

SEQ ID NO: 44479 - protein, 9 aa, Homo sapiens
  misc_feature: Table A; Target 44479; HLA-B*35:03; MAGEC1; ENSG00000155495; CTA
DTLLESDSL

SEQ ID NO: 44480 - protein, 10 aa, Homo sapiens
  misc_feature: Table A; Target 44480; HLA-A*33:01; MAGEC1; ENSG00000155495; CTA
DTLYPLQSPQ

SEQ ID NO: 44481 - protein, 9 aa, Homo sapiens
  misc_feature: Table A; Target 44481; HLA-B*08:01; MAGEC1; ENSG00000155495; CTA
DVEERAQAI

SEQ ID NO: 44482 - protein, 8 aa, Homo sapiens
  misc_feature: Table A; Target 44482; HLA-B*51:01; MAGEC1; ENSG00000155495; CTA
DVLSGIGV

SEQ ID NO: 44483 - protein, 9 aa, Homo sapiens
  misc_feature: Table A; Target 44483; HLA-A*25:01; MAGEC1; ENSG00000155495; CTA
DVLSGIGVR

SEQ ID NO: 44484 - protein, 9 aa, Homo sapiens
  misc_feature: Table A; Target 44484; HLA-A*26:01; MAGEC1; ENSG00000155495; CTA
DVLSGIGVR

SEQ ID NO: 44485 - protein, 9 aa, Homo sapiens
  misc_feature: Table A; Target 44485; HLA-A*33:01; MAGEC1; ENSG00000155495; CTA
DVLSGIGVR

SEQ ID NO: 44486 - protein, 9 aa, Homo sapiens
  misc_feature: Table A; Target 44486; HLA-A*33:03; MAGEC1; ENSG00000155495; CTA
DVLSGIGVR

SEQ ID NO: 44487 - protein, 9 aa, Homo sapiens
  misc_feature: Table A; Target 44487; HLA-A*68:01; MAGEC1; ENSG00000155495; CTA
DVLSGIGVR

SEQ ID NO: 44488 - protein, 9 aa, Homo sapiens
  misc_feature: Table A; Target 44488; HLA-C*07:06; MAGEC1; ENSG00000155495; CTA
DVLSGIGVR

SEQ ID NO: 44489 - protein, 10 aa, Homo sapiens
  misc_feature: Table A; Target 44489; HLA-A*26:01; MAGEC1; ENSG00000155495; CTA
DVLSGIGVRA

SEQ ID NO: 44490 - protein, 10 aa, Homo sapiens
  misc_feature: Table A; Target 44490; HLA-A*68:02; MAGEC1; ENSG00000155495; CTA
DVLSGIGVRA

SEQ ID NO: 44491 - protein, 10 aa, Homo sapiens
  misc_feature: Table A; Target 44491; HLA-B*54:01; MAGEC1; ENSG00000155495; CTA
DVLSGIGVRA

SEQ ID NO: 44492 - protein, 9 aa, Homo sapiens
  misc_feature: Table A; Target 44492; HLA-B*37:01; MAGEC1; ENSG00000155495; CTA
EDSLSPLHF

SEQ ID NO: 44493 - protein, 9 aa, Homo sapiens
  misc_feature: Table A; Target 44493; HLA-B*44:03; MAGEC1; ENSG00000155495; CTA
EDSLSPLHF

SEQ ID NO: 44494 - protein, 9 aa, Homo sapiens
  misc_feature: Table A; Target 44494; HLA-B*37:01; MAGEC1; ENSG00000155495; CTA
EDSLSSLHF

SEQ ID NO: 44495 - protein, 8 aa, Homo sapiens
  misc_feature: Table A; Target 44495; HLA-B*18:01; MAGEC1; ENSG00000155495; CTA
EDSMSPLY

SEQ ID NO: 44496 - protein, 9 aa, Homo sapiens
  misc_feature: Table A; Target 44496; HLA-A*33:03; MAGEC1; ENSG00000155495; CTA
EDSSDPLQR

SEQ ID NO: 44497 - protein, 9 aa, Homo sapiens
  misc_feature: Table A; Target 44497; HLA-A*68:01; MAGEC1; ENSG00000155495; CTA
EDSSDPLQR

SEQ ID NO: 44498 - protein, 9 aa, Homo sapiens
  misc_feature: Table A; Target 44498; HLA-C*07:06; MAGEC1; ENSG00000155495; CTA
EDSSDPLQR

SEQ ID NO: 44499 - protein, 11 aa, Homo sapiens
  misc_feature: Table A; Target 44499; HLA-B*49:01; MAGEC1; ENSG00000155495; CTA
EEFQSSLQSPV

SEQ ID NO: 44500 - protein, 10 aa, Homo sapiens
  misc_feature: Table A; Target 44500; HLA-B*39:01; MAGEC1; ENSG00000155495; CTA
EESSSPVDEY

SEQ ID NO: 44501 - protein, 10 aa, Homo sapiens
  misc_feature: Table A; Target 44501; HLA-B*44:02; MAGEC1; ENSG00000155495; CTA
EESSSPVDEY

SEQ ID NO: 44502 - protein, 10 aa, Homo sapiens
  misc_feature: Table A; Target 44502; HLA-B*44:03; MAGEC1; ENSG00000155495; CTA
EESSSPVDEY

SEQ ID NO: 44503 - protein, 8 aa, Homo sapiens
  misc_feature: Table A; Target 44503; HLA-B*18:01; MAGEC1; ENSG00000155495; CTA
EEVIWDVL

SEQ ID NO: 44504 - protein, 9 aa, Homo sapiens
  misc_feature: Table A; Target 44504; HLA-C*05:01; MAGEC1; ENSG00000155495; CTA
EGDDTQSPL

SEQ ID NO: 44505 - protein, 9 aa, Homo sapiens
  misc_feature: Table A; Target 44505; HLA-C*05:01; MAGEC1; ENSG00000155495; CTA
EGEDSQSPL

SEQ ID NO: 44506 - protein, 11 aa, Homo sapiens
  misc_feature: Table A; Target 44506; HLA-A*33:01; MAGEC1; ENSG00000155495; CTA
EGEDSSDPLQR

SEQ ID NO: 44507 - protein, 11 aa, Homo sapiens
  misc_feature: Table A; Target 44507; HLA-A*33:03; MAGEC1; ENSG00000155495; CTA
EGEDSSDPLQR

SEQ ID NO: 44508 - protein, 11 aa, Homo sapiens
  misc_feature: Table A; Target 44508; HLA-A*68:01; MAGEC1; ENSG00000155495; CTA
EGEDSSDPLQR

SEQ ID NO: 44509 - protein, 11 aa, Homo sapiens
  misc_feature: Table A; Target 44509; HLA-C*07:06; MAGEC1; ENSG00000155495; CTA
EGEDSSDPLQR

SEQ ID NO: 44510 - protein, 9 aa, Homo sapiens
  misc_feature: Table A; Target 44510; HLA-C*05:01; MAGEC1; ENSG00000155495; CTA
EGEDVQSPL

SEQ ID NO: 44511 - protein, 8 aa, Homo sapiens
  misc_feature: Table A; Target 44511; HLA-B*51:01; MAGEC1; ENSG00000155495; CTA
EGFAQSSL

SEQ ID NO: 44512 - protein, 10 aa, Homo sapiens
  misc_feature: Table A; Target 44512; HLA-A*68:01; MAGEC1; ENSG00000155495; CTA
EGPAQSPLQR

SEQ ID NO: 44513 - protein, 9 aa, Homo sapiens
  misc_feature: Table A; Target 44513; HLA-A*33:01; MAGEC1; ENSG00000155495; CTA
EHFAFGEPR

SEQ ID NO: 44514 - protein, 9 aa, Homo sapiens
  misc_feature: Table A; Target 44514; HLA-A*33:03; MAGEC1; ENSG00000155495; CTA
EHFAFGEPR

SEQ ID NO: 44515 - protein, 10 aa, Homo sapiens
  misc_feature: Table A; Target 44515; HLA-A*29:02; MAGEC1; ENSG00000155495; CTA
ELARFLLLKY

SEQ ID NO: 44516 - protein, 9 aa, Homo sapiens
  misc_feature: Table A; Target 44516; HLA-A*31:01; MAGEC1; ENSG00000155495; CTA
EMLTNVISR

SEQ ID NO: 44517 - protein, 9 aa, Homo sapiens
  misc_feature: Table A; Target 44517; HLA-A*33:01; MAGEC1; ENSG00000155495; CTA
EMLTNVISR

SEQ ID NO: 44518 - protein, 9 aa, Homo sapiens
  misc_feature: Table A; Target 44518; HLA-A*33:03; MAGEC1; ENSG00000155495; CTA
EMLTNVISR

SEQ ID NO: 44519 - protein, 9 aa, Homo sapiens
  misc_feature: Table A; Target 44519; HLA-A*68:01; MAGEC1; ENSG00000155495; CTA
EMLTNVISR

SEQ ID NO: 44520 - protein, 9 aa, Homo sapiens
  misc_feature: Table A; Target 44520; HLA-C*07:06; MAGEC1; ENSG00000155495; CTA
EMLTNVISR

SEQ ID NO: 44521 - protein, 10 aa, Homo sapiens
  misc_feature: Table A; Target 44521; HLA-A*01:01; MAGEC1; ENSG00000155495; CTA
EMLTNVISRY

SEQ ID NO: 44522 - protein, 10 aa, Homo sapiens
  misc_feature: Table A; Target 44522; HLA-A*25:01; MAGEC1; ENSG00000155495; CTA
EMLTNVISRY

SEQ ID NO: 44523 - protein, 10 aa, Homo sapiens
  misc_feature: Table A; Target 44523; HLA-A*26:01; MAGEC1; ENSG00000155495; CTA
EMLTNVISRY

SEQ ID NO: 44524 - protein, 10 aa, Homo sapiens
  misc_feature: Table A; Target 44524; HLA-A*29:02; MAGEC1; ENSG00000155495; CTA
EMLTNVISRY

SEQ ID NO: 44525 - protein, 10 aa, Homo sapiens
  misc_feature: Table A; Target 44525; HLA-A*30:02; MAGEC1; ENSG00000155495; CTA
EMLTNVISRY

SEQ ID NO: 44526 - protein, 10 aa, Homo sapiens
  misc_feature: Table A; Target 44526; HLA-B*44:02; MAGEC1; ENSG00000155495; CTA
EMLTNVISRY

SEQ ID NO: 44527 - protein, 10 aa, Homo sapiens
  misc_feature: Table A; Target 44527; HLA-B*44:03; MAGEC1; ENSG00000155495; CTA
EMLTNVISRY

SEQ ID NO: 44528 - protein, 8 aa, Homo sapiens
  misc_feature: Table A; Target 44528; HLA-B*35:01; MAGEC1; ENSG00000155495; CTA
EPLFTYTL

SEQ ID NO: 44529 - protein, 8 aa, Homo sapiens
  misc_feature: Table A; Target 44529; HLA-B*35:03; MAGEC1; ENSG00000155495; CTA
EPLFTYTL

SEQ ID NO: 44530 - protein, 9 aa, Homo sapiens
  misc_feature: Table A; Target 44530; HLA-B*38:01; MAGEC1; ENSG00000155495; CTA
EQGMSQNRL

SEQ ID NO: 44531 - protein, 10 aa, Homo sapiens
  misc_feature: Table A; Target 44531; HLA-A*25:01; MAGEC1; ENSG00000155495; CTA
ESAQSAFEGF

SEQ ID NO: 44532 - protein, 10 aa, Homo sapiens
  misc_feature: Table A; Target 44532; HLA-A*26:01; MAGEC1; ENSG00000155495; CTA
ESAQSAFEGF

SEQ ID NO: 44533 - protein, 10 aa, Homo sapiens
  misc_feature: Table A; Target 44533; HLA-A*25:01; MAGEC1; ENSG00000155495; CTA
ESAQSTFEGF

SEQ ID NO: 44534 - protein, 10 aa, Homo sapiens
  misc_feature: Table A; Target 44534; HLA-A*26:01; MAGEC1; ENSG00000155495; CTA
ESAQSTFEGF

SEQ ID NO: 44535 - protein, 8 aa, Homo sapiens
  misc_feature: Table A; Target 44535; HLA-A*01:01; MAGEC1; ENSG00000155495; CTA
ESEPLFTY

SEQ ID NO: 44536 - protein, 11 aa, Homo sapiens
  misc_feature: Table A; Target 44536; HLA-A*25:01; MAGEC1; ENSG00000155495; CTA
ESPLQSPVISF

SEQ ID NO: 44537 - protein, 9 aa, Homo sapiens
  misc_feature: Table A; Target 44537; HLA-A*01:01; MAGEC1; ENSG00000155495; CTA
ESSSPVDEY

SEQ ID NO: 44538 - protein, 9 aa, Homo sapiens
  misc_feature: Table A; Target 44538; HLA-A*25:01; MAGEC1; ENSG00000155495; CTA
ESSSPVDEY

SEQ ID NO: 44539 - protein, 9 aa, Homo sapiens
  misc_feature: Table A; Target 44539; HLA-A*26:01; MAGEC1; ENSG00000155495; CTA
ESSSPVDEY

SEQ ID NO: 44540 - protein, 9 aa, Homo sapiens
  misc_feature: Table A; Target 44540; HLA-A*30:02; MAGEC1; ENSG00000155495; CTA
ESSSPVDEY

SEQ ID NO: 44541 - protein, 9 aa, Homo sapiens
  misc_feature: Table A; Target 44541; HLA-B*35:01; MAGEC1; ENSG00000155495; CTA
ESSSPVDEY

SEQ ID NO: 44542 - protein, 9 aa, Homo sapiens
  misc_feature: Table A; Target 44542; HLA-C*07:06; MAGEC1; ENSG00000155495; CTA
ESSSPVDEY

SEQ ID NO: 44543 - protein, 8 aa, Homo sapiens
  misc_feature: Table A; Target 44543; HLA-A*01:01; MAGEC1; ENSG00000155495; CTA
EVDPDDSY

SEQ ID NO: 44544 - protein, 9 aa, Homo sapiens
  misc_feature: Table A; Target 44544; HLA-C*05:01; MAGEC1; ENSG00000155495; CTA
EVDPDDSYV

SEQ ID NO: 44545 - protein, 10 aa, Homo sapiens
  misc_feature: Table A; Target 44545; HLA-A*25:01; MAGEC1; ENSG00000155495; CTA
EVDPDDSYVF

SEQ ID NO: 44546 - protein, 10 aa, Homo sapiens
  misc_feature: Table A; Target 44546; HLA-A*26:01; MAGEC1; ENSG00000155495; CTA
EVDPDDSYVF

SEQ ID NO: 44547 - protein, 10 aa, Homo sapiens
  misc_feature: Table A; Target 44547; HLA-B*35:01; MAGEC1; ENSG00000155495; CTA
EVDPDDSYVF

SEQ ID NO: 44548 - protein, 10 aa, Homo sapiens
  misc_feature: Table A; Target 44548; HLA-B*38:01; MAGEC1; ENSG00000155495; CTA
EVDPDDSYVF

SEQ ID NO: 44549 - protein, 10 aa, Homo sapiens
  misc_feature: Table A; Target 44549; HLA-B*39:01; MAGEC1; ENSG00000155495; CTA
EVDPDDSYVF

SEQ ID NO: 44550 - protein, 10 aa, Homo sapiens
  misc_feature: Table A; Target 44550; HLA-C*03:03; MAGEC1; ENSG00000155495; CTA
EVDPDDSYVF

SEQ ID NO: 44551 - protein, 10 aa, Homo sapiens
  misc_feature: Table A; Target 44551; HLA-C*05:01; MAGEC1; ENSG00000155495; CTA
EVDPDDSYVF

SEQ ID NO: 44552 - protein, 11 aa, Homo sapiens
  misc_feature: Table A; Target 44552; HLA-A*01:01; MAGEC1; ENSG00000155495; CTA
EVDPDDSYVFV

SEQ ID NO: 44553 - protein, 11 aa, Homo sapiens
  misc_feature: Table A; Target 44553; HLA-A*02:07; MAGEC1; ENSG00000155495; CTA
EVDPDDSYVFV

SEQ ID NO: 44554 - protein, 11 aa, Homo sapiens
  misc_feature: Table A; Target 44554; HLA-A*68:02; MAGEC1; ENSG00000155495; CTA
EVDPDDSYVFV

SEQ ID NO: 44555 - protein, 10 aa, Homo sapiens
  misc_feature: Table A; Target 44555; HLA-A*25:01; MAGEC1; ENSG00000155495; CTA
EVIKRKVVEF

SEQ ID NO: 44556 - protein, 10 aa, Homo sapiens
  misc_feature: Table A; Target 44556; HLA-A*26:01; MAGEC1; ENSG00000155495; CTA
EVIKRKVVEF

SEQ ID NO: 44557 - protein, 10 aa, Homo sapiens
  misc_feature: Table A; Target 44557; HLA-A*25:01; MAGEC1; ENSG00000155495; CTA
EVIWDVLSGI

SEQ ID NO: 44558 - protein, 10 aa, Homo sapiens
  misc_feature: Table A; Target 44558; HLA-A*26:01; MAGEC1; ENSG00000155495; CTA
EVIWDVLSGI

SEQ ID NO: 44559 - protein, 10 aa, Homo sapiens
  misc_feature: Table A; Target 44559; HLA-A*68:02; MAGEC1; ENSG00000155495; CTA
EVIWDVLSGI

SEQ ID NO: 44560 - protein, 9 aa, Homo sapiens
  misc_feature: Table A; Target 44560; HLA-A*26:01; MAGEC1; ENSG00000155495; CTA
EVPNSSPPR

SEQ ID NO: 44561 - protein, 9 aa, Homo sapiens
  misc_feature: Table A; Target 44561; HLA-A*33:01; MAGEC1; ENSG00000155495; CTA
EVPNSSPPR

SEQ ID NO: 44562 - protein, 9 aa, Homo sapiens
  misc_feature: Table A; Target 44562; HLA-A*33:03; MAGEC1; ENSG00000155495; CTA
EVPNSSPPR

SEQ ID NO: 44563 - protein, 9 aa, Homo sapiens
  misc_feature: Table A; Target 44563; HLA-A*68:01; MAGEC1; ENSG00000155495; CTA
EVPNSSPPR

SEQ ID NO: 44564 - protein, 9 aa, Homo sapiens
  misc_feature: Table A; Target 44564; HLA-C*07:06; MAGEC1; ENSG00000155495; CTA
EVPNSSPPR

SEQ ID NO: 44565 - protein, 10 aa, Homo sapiens
  misc_feature: Table A; Target 44565; HLA-A*25:01; MAGEC1; ENSG00000155495; CTA
EVPNSSPPRY

SEQ ID NO: 44566 - protein, 10 aa, Homo sapiens
  misc_feature: Table A; Target 44566; HLA-A*29:02; MAGEC1; ENSG00000155495; CTA
EVPNSSPPRY

SEQ ID NO: 44567 - protein, 10 aa, Homo sapiens
  misc_feature: Table A; Target 44567; HLA-A*30:02; MAGEC1; ENSG00000155495; CTA
EVPNSSPPRY

SEQ ID NO: 44568 - protein, 9 aa, Homo sapiens
  misc_feature: Table A; Target 44568; HLA-A*24:02; MAGEC1; ENSG00000155495; CTA
EYTSSSDTL

SEQ ID NO: 44569 - protein, 9 aa, Homo sapiens
  misc_feature: Table A; Target 44569; HLA-A*02:03; MAGEC1; ENSG00000155495; CTA
FAFGEPREL

SEQ ID NO: 44570 - protein, 9 aa, Homo sapiens
  misc_feature: Table A; Target 44570; HLA-A*30:01; MAGEC1; ENSG00000155495; CTA
FAFGEPREL

SEQ ID NO: 44571 - protein, 9 aa, Homo sapiens
  misc_feature: Table A; Target 44571; HLA-A*68:02; MAGEC1; ENSG00000155495; CTA
FAFGEPREL

SEQ ID NO: 44572 - protein, 9 aa, Homo sapiens
  misc_feature: Table A; Target 44572; HLA-B*15:03; MAGEC1; ENSG00000155495; CTA
FAFGEPREL

SEQ ID NO: 44573 - protein, 9 aa, Homo sapiens
  misc_feature: Table A; Target 44573; HLA-B*27:05; MAGEC1; ENSG00000155495; CTA
FAFGEPREL

SEQ ID NO: 44574 - protein, 9 aa, Homo sapiens
  misc_feature: Table A; Target 44574; HLA-B*35:01; MAGEC1; ENSG00000155495; CTA
FAFGEPREL

SEQ ID NO: 44575 - protein, 9 aa, Homo sapiens
  misc_feature: Table A; Target 44575; HLA-B*35:03; MAGEC1; ENSG00000155495; CTA
FAFGEPREL

SEQ ID NO: 44576 - protein, 9 aa, Homo sapiens
  misc_feature: Table A; Target 44576; HLA-B*40:01; MAGEC1; ENSG00000155495; CTA
FAFGEPREL

SEQ ID NO: 44577 - protein, 9 aa, Homo sapiens
  misc_feature: Table A; Target 44577; HLA-B*46:01; MAGEC1; ENSG00000155495; CTA
FAFGEPREL

SEQ ID NO: 44578 - protein, 9 aa, Homo sapiens
  misc_feature: Table A; Target 44578; HLA-B*51:01; MAGEC1; ENSG00000155495; CTA
FAFGEPREL

SEQ ID NO: 44579 - protein, 9 aa, Homo sapiens
  misc_feature: Table A; Target 44579; HLA-B*54:01; MAGEC1; ENSG00000155495; CTA
FAFGEPREL

SEQ ID NO: 44580 - protein, 9 aa, Homo sapiens
  misc_feature: Table A; Target 44580; HLA-B*58:01; MAGEC1; ENSG00000155495; CTA
FAFGEPREL

SEQ ID NO: 44581 - protein, 9 aa, Homo sapiens
  misc_feature: Table A; Target 44581; HLA-C*01:02; MAGEC1; ENSG00000155495; CTA
FAFGEPREL

SEQ ID NO: 44582 - protein, 9 aa, Homo sapiens
  misc_feature: Table A; Target 44582; HLA-C*02:02; MAGEC1; ENSG00000155495; CTA
FAFGEPREL

SEQ ID NO: 44583 - protein, 9 aa, Homo sapiens
  misc_feature: Table A; Target 44583; HLA-C*03:03; MAGEC1; ENSG00000155495; CTA
FAFGEPREL

SEQ ID NO: 44584 - protein, 9 aa, Homo sapiens
  misc_feature: Table A; Target 44584; HLA-C*05:01; MAGEC1; ENSG00000155495; CTA
FAFGEPREL

SEQ ID NO: 44585 - protein, 9 aa, Homo sapiens
  misc_feature: Table A; Target 44585; HLA-C*07:04; MAGEC1; ENSG00000155495; CTA
FAFGEPREL

SEQ ID NO: 44586 - protein, 9 aa, Homo sapiens
  misc_feature: Table A; Target 44586; HLA-C*12:03; MAGEC1; ENSG00000155495; CTA
FAFGEPREL

SEQ ID NO: 44587 - protein, 9 aa, Homo sapiens
  misc_feature: Table A; Target 44587; HLA-C*16:01; MAGEC1; ENSG00000155495; CTA
FAFGEPREL

SEQ ID NO: 44588 - protein, 9 aa, Homo sapiens
  misc_feature: Table A; Target 44588; HLA-C*16:02; MAGEC1; ENSG00000155495; CTA
FAFGEPREL

SEQ ID NO: 44589 - protein, 9 aa, Homo sapiens
  misc_feature: Table A; Target 44589; HLA-C*16:04; MAGEC1; ENSG00000155495; CTA
FAFGEPREL

SEQ ID NO: 44590 - protein, 8 aa, Homo sapiens
  misc_feature: Table A; Target 44590; HLA-B*51:01; MAGEC1; ENSG00000155495; CTA
FAQSPLQI

SEQ ID NO: 44591 - protein, 10 aa, Homo sapiens
  misc_feature: Table A; Target 44591; HLA-A*68:02; MAGEC1; ENSG00000155495; CTA
FAQSPLQIPV

SEQ ID NO: 44592 - protein, 10 aa, Homo sapiens
  misc_feature: Table A; Target 44592; HLA-B*54:01; MAGEC1; ENSG00000155495; CTA
FAQSPLQIPV

SEQ ID NO: 44593 - protein, 10 aa, Homo sapiens
  misc_feature: Table A; Target 44593; HLA-C*02:02; MAGEC1; ENSG00000155495; CTA
FAQSPLQIPV

SEQ ID NO: 44594 - protein, 10 aa, Homo sapiens
  misc_feature: Table A; Target 44594; HLA-C*16:04; MAGEC1; ENSG00000155495; CTA
FAQSPLQIPV

SEQ ID NO: 44595 - protein, 8 aa, Homo sapiens
  misc_feature: Table A; Target 44595; HLA-B*51:01; MAGEC1; ENSG00000155495; CTA
FAQSSLQI

SEQ ID NO: 44596 - protein, 9 aa, Homo sapiens
  misc_feature: Table A; Target 44596; HLA-B*40:01; MAGEC1; ENSG00000155495; CTA
FEGFAQSPL

SEQ ID NO: 44597 - protein, 9 aa, Homo sapiens
  misc_feature: Table A; Target 44597; HLA-B*49:01; MAGEC1; ENSG00000155495; CTA
FEGFAQSPL

SEQ ID NO: 44598 - protein, 11 aa, Homo sapiens
  misc_feature: Table A; Target 44598; HLA-B*49:01; MAGEC1; ENSG00000155495; CTA
FEGFAQSPLQI

SEQ ID NO: 44599 - protein, 9 aa, Homo sapiens
  misc_feature: Table A; Target 44599; HLA-A*30:01; MAGEC1; ENSG00000155495; CTA
FEGFAQSSL

SEQ ID NO: 44600 - protein, 9 aa, Homo sapiens
  misc_feature: Table A; Target 44600; HLA-B*18:01; MAGEC1; ENSG00000155495; CTA
FEGFAQSSL

SEQ ID NO: 44601 - protein, 9 aa, Homo sapiens
  misc_feature: Table A; Target 44601; HLA-B*40:01; MAGEC1; ENSG00000155495; CTA
FEGFAQSSL

SEQ ID NO: 44602 - protein, 9 aa, Homo sapiens
  misc_feature: Table A; Target 44602; HLA-B*40:02; MAGEC1; ENSG00000155495; CTA
FEGFAQSSL

SEQ ID NO: 44603 - protein, 9 aa, Homo sapiens
  misc_feature: Table A; Target 44603; HLA-B*49:01; MAGEC1; ENSG00000155495; CTA
FEGFAQSSL

SEQ ID NO: 44604 - protein, 9 aa, Homo sapiens
  misc_feature: Table A; Target 44604; HLA-C*03:04; MAGEC1; ENSG00000155495; CTA
FEGFAQSSL

SEQ ID NO: 44605 - protein, 11 aa, Homo sapiens
  misc_feature: Table A; Target 44605; HLA-B*49:01; MAGEC1; ENSG00000155495; CTA
FEGFAQSSLQI

SEQ ID NO: 44606 - protein, 8 aa, Homo sapiens
  misc_feature: Table A; Target 44606; HLA-A*30:01; MAGEC1; ENSG00000155495; CTA
FEGFPQSL

SEQ ID NO: 44607 - protein, 8 aa, Homo sapiens
  misc_feature: Table A; Target 44607; HLA-B*18:01; MAGEC1; ENSG00000155495; CTA
FEGFPQSL

SEQ ID NO: 44608 - protein, 8 aa, Homo sapiens
  misc_feature: Table A; Target 44608; HLA-B*39:01; MAGEC1; ENSG00000155495; CTA
FEGFPQSL

SEQ ID NO: 44609 - protein, 8 aa, Homo sapiens
  misc_feature: Table A; Target 44609; HLA-B*40:01; MAGEC1; ENSG00000155495; CTA
FEGFPQSL

SEQ ID NO: 44610 - protein, 8 aa, Homo sapiens
  misc_feature: Table A; Target 44610; HLA-B*40:02; MAGEC1; ENSG00000155495; CTA
FEGFPQSL

SEQ ID NO: 44611 - protein, 8 aa, Homo sapiens
  misc_feature: Table A; Target 44611; HLA-B*49:01; MAGEC1; ENSG00000155495; CTA
FEGFPQSL

SEQ ID NO: 44612 - protein, 9 aa, Homo sapiens
  misc_feature: Table A; Target 44612; HLA-A*30:01; MAGEC1; ENSG00000155495; CTA
FEGFPQSLL

SEQ ID NO: 44613 - protein, 9 aa, Homo sapiens
  misc_feature: Table A; Target 44613; HLA-B*40:01; MAGEC1; ENSG00000155495; CTA
FEGFPQSLL

SEQ ID NO: 44614 - protein, 9 aa, Homo sapiens
  misc_feature: Table A; Target 44614; HLA-B*49:01; MAGEC1; ENSG00000155495; CTA
FEGFPQSLL

SEQ ID NO: 44615 - protein, 8 aa, Homo sapiens
  misc_feature: Table A; Target 44615; HLA-B*49:01; MAGEC1; ENSG00000155495; CTA
FEGFPQSV

SEQ ID NO: 44616 - protein, 9 aa, Homo sapiens
  misc_feature: Table A; Target 44616; HLA-A*30:01; MAGEC1; ENSG00000155495; CTA
FEGFPQSVL

SEQ ID NO: 44617 - protein, 9 aa, Homo sapiens
  misc_feature: Table A; Target 44617; HLA-B*40:01; MAGEC1; ENSG00000155495; CTA
FEGFPQSVL

SEQ ID NO: 44618 - protein, 9 aa, Homo sapiens
  misc_feature: Table A; Target 44618; HLA-B*40:02; MAGEC1; ENSG00000155495; CTA
FEGFPQSVL

SEQ ID NO: 44619 - protein, 9 aa, Homo sapiens
  misc_feature: Table A; Target 44619; HLA-B*49:01; MAGEC1; ENSG00000155495; CTA
FEGFPQSVL

SEQ ID NO: 44620 - protein, 9 aa, Homo sapiens
  misc_feature: Table A; Target 44620; HLA-A*23:01; MAGEC1; ENSG00000155495; CTA
FFSSALLSI

SEQ ID NO: 44621 - protein, 10 aa, Homo sapiens
  misc_feature: Table A; Target 44621; HLA-A*29:02; MAGEC1; ENSG00000155495; CTA
FFSSALLSIF

SEQ ID NO: 44622 - protein, 9 aa, Homo sapiens
  misc_feature: Table A; Target 44622; HLA-A*02:03; MAGEC1; ENSG00000155495; CTA
FLAMLKNTV

SEQ ID NO: 44623 - protein, 8 aa, Homo sapiens
  misc_feature: Table A; Target 44623; HLA-B*51:01; MAGEC1; ENSG00000155495; CTA
FPQSLLQI

SEQ ID NO: 44624 - protein, 11 aa, Homo sapiens
  misc_feature: Table A; Target 44624; HLA-B*35:01; MAGEC1; ENSG00000155495; CTA
FPQSPLQGEEF

SEQ ID NO: 44625 - protein, 11 aa, Homo sapiens
  misc_feature: Table A; Target 44625; HLA-B*35:03; MAGEC1; ENSG00000155495; CTA
FPQSPLQGEEF

SEQ ID NO: 44626 - protein, 11 aa, Homo sapiens
  misc_feature: Table A; Target 44626; HLA-B*38:01; MAGEC1; ENSG00000155495; CTA
FPQSPLQGEEF

SEQ ID NO: 44627 - protein, 11 aa, Homo sapiens
  misc_feature: Table A; Target 44627; HLA-B*54:01; MAGEC1; ENSG00000155495; CTA
FPQSPLQGEEF

SEQ ID NO: 44628 - protein, 11 aa, Homo sapiens
  misc_feature: Table A; Target 44628; HLA-B*55:01; MAGEC1; ENSG00000155495; CTA
FPQSPLQGEEF

SEQ ID NO: 44629 - protein, 11 aa, Homo sapiens
  misc_feature: Table A; Target 44629; HLA-B*56:01; MAGEC1; ENSG00000155495; CTA
FPQSPLQGEEF

SEQ ID NO: 44630 - protein, 11 aa, Homo sapiens
  misc_feature: Table A; Target 44630; HLA-C*04:01; MAGEC1; ENSG00000155495; CTA
FPQSPLQGEEF

SEQ ID NO: 44631 - protein, 10 aa, Homo sapiens
  misc_feature: Table A; Target 44631; HLA-B*54:01; MAGEC1; ENSG00000155495; CTA
FPQSPLQIPG

SEQ ID NO: 44632 - protein, 10 aa, Homo sapiens
  misc_feature: Table A; Target 44632; HLA-B*56:01; MAGEC1; ENSG00000155495; CTA
FPQSPLQIPG

SEQ ID NO: 44633 - protein, 10 aa, Homo sapiens
  misc_feature: Table A; Target 44633; HLA-B*35:01; MAGEC1; ENSG00000155495; CTA
FPQSPLQIPM

SEQ ID NO: 44634 - protein, 10 aa, Homo sapiens
  misc_feature: Table A; Target 44634; HLA-B*35:03; MAGEC1; ENSG00000155495; CTA
FPQSPLQIPM

SEQ ID NO: 44635 - protein, 10 aa, Homo sapiens
  misc_feature: Table A; Target 44635; HLA-B*54:01; MAGEC1; ENSG00000155495; CTA
FPQSPLQIPM

SEQ ID NO: 44636 - protein, 10 aa, Homo sapiens
  misc_feature: Table A; Target 44636; HLA-B*56:01; MAGEC1; ENSG00000155495; CTA
FPQSPLQIPM

SEQ ID NO: 44637 - protein, 11 aa, Homo sapiens
  misc_feature: Table A; Target 44637; HLA-B*54:01; MAGEC1; ENSG00000155495; CTA
FPQSPLQIPMT

SEQ ID NO: 44638 - protein, 11 aa, Homo sapiens
  misc_feature: Table A; Target 44638; HLA-B*35:01; MAGEC1; ENSG00000155495; CTA
FPQSPQGEDSL

SEQ ID NO: 44639 - protein, 11 aa, Homo sapiens
  misc_feature: Table A; Target 44639; HLA-B*35:03; MAGEC1; ENSG00000155495; CTA
FPQSPQGEDSL

SEQ ID NO: 44640 - protein, 11 aa, Homo sapiens
  misc_feature: Table A; Target 44640; HLA-B*38:01; MAGEC1; ENSG00000155495; CTA
FPQSPQGEDSL

SEQ ID NO: 44641 - protein, 11 aa, Homo sapiens
  misc_feature: Table A; Target 44641; HLA-B*39:01; MAGEC1; ENSG00000155495; CTA
FPQSPQGEDSL

SEQ ID NO: 44642 - protein, 11 aa, Homo sapiens
  misc_feature: Table A; Target 44642; HLA-B*55:01; MAGEC1; ENSG00000155495; CTA
FPQSPQGEDSL

SEQ ID NO: 44643 - protein, 8 aa, Homo sapiens
  misc_feature: Table A; Target 44643; HLA-B*51:01; MAGEC1; ENSG00000155495; CTA
FPQSVLQI

SEQ ID NO: 44644 - protein, 10 aa, Homo sapiens
  misc_feature: Table A; Target 44644; HLA-B*54:01; MAGEC1; ENSG00000155495; CTA
FPQSVLQIPV

SEQ ID NO: 44645 - protein, 10 aa, Homo sapiens
  misc_feature: Table A; Target 44645; HLA-B*56:01; MAGEC1; ENSG00000155495; CTA
FPQSVLQIPV

SEQ ID NO: 44646 - protein, 9 aa, Homo sapiens
  misc_feature: Table A; Target 44646; HLA-B*07:02; MAGEC1; ENSG00000155495; CTA
FPSSYKDAL

SEQ ID NO: 44647 - protein, 9 aa, Homo sapiens
  misc_feature: Table A; Target 44647; HLA-B*08:01; MAGEC1; ENSG00000155495; CTA
FPSSYKDAL

SEQ ID NO: 44648 - protein, 9 aa, Homo sapiens
  misc_feature: Table A; Target 44648; HLA-B*35:01; MAGEC1; ENSG00000155495; CTA
FPSSYKDAL

SEQ ID NO: 44649 - protein, 9 aa, Homo sapiens
  misc_feature: Table A; Target 44649; HLA-B*35:03; MAGEC1; ENSG00000155495; CTA
FPSSYKDAL

SEQ ID NO: 44650 - protein, 9 aa, Homo sapiens
  misc_feature: Table A; Target 44650; HLA-B*55:01; MAGEC1; ENSG00000155495; CTA
FPSSYKDAL

SEQ ID NO: 44651 - protein, 9 aa, Homo sapiens
  misc_feature: Table A; Target 44651; HLA-B*56:01; MAGEC1; ENSG00000155495; CTA
FPSSYKDAL

SEQ ID NO: 44652 - protein, 9 aa, Homo sapiens
  misc_feature: Table A; Target 44652; HLA-C*03:03; MAGEC1; ENSG00000155495; CTA
FPSSYKDAL

SEQ ID NO: 44653 - protein, 9 aa, Homo sapiens
  misc_feature: Table A; Target 44653; HLA-C*07:02; MAGEC1; ENSG00000155495; CTA
FPSSYKDAL

SEQ ID NO: 44654 - protein, 8 aa, Homo sapiens
  misc_feature: Table A; Target 44654; HLA-B*54:01; MAGEC1; ENSG00000155495; CTA
FPVIFRKA

SEQ ID NO: 44655 - protein, 9 aa, Homo sapiens
  misc_feature: Table A; Target 44655; HLA-C*05:01; MAGEC1; ENSG00000155495; CTA
FSEESSSPV

SEQ ID NO: 44656 - protein, 9 aa, Homo sapiens
  misc_feature: Table A; Target 44656; HLA-A*01:01; MAGEC1; ENSG00000155495; CTA
FSERTQSTF

SEQ ID NO: 44657 - protein, 9 aa, Homo sapiens
  misc_feature: Table A; Target 44657; HLA-A*32:01; MAGEC1; ENSG00000155495; CTA
FSERTQSTF

SEQ ID NO: 44658 - protein, 9 aa, Homo sapiens
  misc_feature: Table A; Target 44658; HLA-B*46:01; MAGEC1; ENSG00000155495; CTA
FSERTQSTF

SEQ ID NO: 44659 - protein, 9 aa, Homo sapiens
  misc_feature: Table A; Target 44659; HLA-B*58:01; MAGEC1; ENSG00000155495; CTA
FSERTQSTF

SEQ ID NO: 44660 - protein, 9 aa, Homo sapiens
  misc_feature: Table A; Target 44660; HLA-C*03:03; MAGEC1; ENSG00000155495; CTA
FSERTQSTF

SEQ ID NO: 44661 - protein, 9 aa, Homo sapiens
  misc_feature: Table A; Target 44661; HLA-C*03:04; MAGEC1; ENSG00000155495; CTA
FSERTQSTF

SEQ ID NO: 44662 - protein, 9 aa, Homo sapiens
  misc_feature: Table A; Target 44662; HLA-C*05:01; MAGEC1; ENSG00000155495; CTA
FSERTQSTF

SEQ ID NO: 44663 - protein, 9 aa, Homo sapiens
  misc_feature: Table A; Target 44663; HLA-C*07:04; MAGEC1; ENSG00000155495; CTA
FSERTQSTF

SEQ ID NO: 44664 - protein, 9 aa, Homo sapiens
  misc_feature: Table A; Target 44664; HLA-B*57:01; MAGEC1; ENSG00000155495; CTA
FSSALLSIF

SEQ ID NO: 44665 - protein, 9 aa, Homo sapiens
  misc_feature: Table A; Target 44665; HLA-C*02:02; MAGEC1; ENSG00000155495; CTA
FSSALLSIF

SEQ ID NO: 44666 - protein, 9 aa, Homo sapiens
  misc_feature: Table A; Target 44666; HLA-C*02:02; MAGEC1; ENSG00000155495; CTA
FSSTLLSIL

SEQ ID NO: 44667 - protein, 9 aa, Homo sapiens
  misc_feature: Table A; Target 44667; HLA-C*12:03; MAGEC1; ENSG00000155495; CTA
FSSTLLSIL

SEQ ID NO: 44668 - protein, 9 aa, Homo sapiens
  misc_feature: Table A; Target 44668; HLA-A*01:01; MAGEC1; ENSG00000155495; CTA
FSSTLLSLF

SEQ ID NO: 44669 - protein, 8 aa, Homo sapiens
  misc_feature: Table A; Target 44669; HLA-C*03:04; MAGEC1; ENSG00000155495; CTA
FSSTLVSL

SEQ ID NO: 44670 - protein, 9 aa, Homo sapiens
  misc_feature: Table A; Target 44670; HLA-A*01:01; MAGEC1; ENSG00000155495; CTA
FSSTLVSLF

SEQ ID NO: 44671 - protein, 9 aa, Homo sapiens
  misc_feature: Table A; Target 44671; HLA-B*57:01; MAGEC1; ENSG00000155495; CTA
FSSTLVSLF

SEQ ID NO: 44672 - protein, 9 aa, Homo sapiens
  misc_feature: Table A; Target 44672; HLA-C*02:02; MAGEC1; ENSG00000155495; CTA
FSSTLVSLF

SEQ ID NO: 44673 - protein, 8 aa, Homo sapiens
  misc_feature: Table A; Target 44673; HLA-B*46:01; MAGEC1; ENSG00000155495; CTA
FSYTLASL

SEQ ID NO: 44674 - protein, 8 aa, Homo sapiens
  misc_feature: Table A; Target 44674; HLA-C*03:03; MAGEC1; ENSG00000155495; CTA
FSYTLASL

SEQ ID NO: 44675 - protein, 8 aa, Homo sapiens
  misc_feature: Table A; Target 44675; HLA-C*03:04; MAGEC1; ENSG00000155495; CTA
FSYTLASL

SEQ ID NO: 44676 - protein, 9 aa, Homo sapiens
  misc_feature: Table A; Target 44676; HLA-A*01:01; MAGEC1; ENSG00000155495; CTA
FSYTLASLL

SEQ ID NO: 44677 - protein, 9 aa, Homo sapiens
  misc_feature: Table A; Target 44677; HLA-C*02:02; MAGEC1; ENSG00000155495; CTA
FSYTLASLL

SEQ ID NO: 44678 - protein, 9 aa, Homo sapiens
  misc_feature: Table A; Target 44678; HLA-C*03:03; MAGEC1; ENSG00000155495; CTA
FSYTLASLL

SEQ ID NO: 44679 - protein, 9 aa, Homo sapiens
  misc_feature: Table A; Target 44679; HLA-C*03:04; MAGEC1; ENSG00000155495; CTA
FSYTLASLL

SEQ ID NO: 44680 - protein, 9 aa, Homo sapiens
  misc_feature: Table A; Target 44680; HLA-C*12:03; MAGEC1; ENSG00000155495; CTA
FSYTLASLL

SEQ ID NO: 44681 - protein, 8 aa, Homo sapiens
  misc_feature: Table A; Target 44681; HLA-C*03:03; MAGEC1; ENSG00000155495; CTA
FSYTLLSL

SEQ ID NO: 44682 - protein, 8 aa, Homo sapiens
  misc_feature: Table A; Target 44682; HLA-C*03:04; MAGEC1; ENSG00000155495; CTA
FSYTLLSL

SEQ ID NO: 44683 - protein, 9 aa, Homo sapiens
  misc_feature: Table A; Target 44683; HLA-B*57:01; MAGEC1; ENSG00000155495; CTA
FSYTLLSLF

SEQ ID NO: 44684 - protein, 8 aa, Homo sapiens
  misc_feature: Table A; Target 44684; HLA-B*40:01; MAGEC1; ENSG00000155495; CTA
GEDFQSSL

SEQ ID NO: 44685 - protein, 10 aa, Homo sapiens
  misc_feature: Table A; Target 44685; HLA-A*30:01; MAGEC1; ENSG00000155495; CTA
GEDSLSPLQI

SEQ ID NO: 44686 - protein, 10 aa, Homo sapiens
  misc_feature: Table A; Target 44686; HLA-B*40:01; MAGEC1; ENSG00000155495; CTA
GEDSLSPLQI

SEQ ID NO: 44687 - protein, 10 aa, Homo sapiens
  misc_feature: Table A; Target 44687; HLA-B*44:03; MAGEC1; ENSG00000155495; CTA
GEDSLSPLQI

SEQ ID NO: 44688 - protein, 10 aa, Homo sapiens
  misc_feature: Table A; Target 44688; HLA-B*49:01; MAGEC1; ENSG00000155495; CTA
GEDSLSPLQI

SEQ ID NO: 44689 - protein, 8 aa, Homo sapiens
  misc_feature: Table A; Target 44689; HLA-B*40:01; MAGEC1; ENSG00000155495; CTA
GEDSLSSL

SEQ ID NO: 44690 - protein, 10 aa, Homo sapiens
  misc_feature: Table A; Target 44690; HLA-A*30:01; MAGEC1; ENSG00000155495; CTA
GEDSLSSLHF

SEQ ID NO: 44691 - protein, 10 aa, Homo sapiens
  misc_feature: Table A; Target 44691; HLA-B*27:02; MAGEC1; ENSG00000155495; CTA
GEDSLSSLHF

SEQ ID NO: 44692 - protein, 10 aa, Homo sapiens
  misc_feature: Table A; Target 44692; HLA-B*40:01; MAGEC1; ENSG00000155495; CTA
GEDSLSSLHF

SEQ ID NO: 44693 - protein, 10 aa, Homo sapiens
  misc_feature: Table A; Target 44693; HLA-B*44:02; MAGEC1; ENSG00000155495; CTA
GEDSLSSLHF

SEQ ID NO: 44694 - protein, 10 aa, Homo sapiens
  misc_feature: Table A; Target 44694; HLA-B*44:03; MAGEC1; ENSG00000155495; CTA
GEDSLSSLHF

SEQ ID NO: 44695 - protein, 10 aa, Homo sapiens
  misc_feature: Table A; Target 44695; HLA-B*49:01; MAGEC1; ENSG00000155495; CTA
GEDSLSSLHF

SEQ ID NO: 44696 - protein, 10 aa, Homo sapiens
  misc_feature: Table A; Target 44696; HLA-C*16:04; MAGEC1; ENSG00000155495; CTA
GEDSLSSLHF

SEQ ID NO: 44697 - protein, 9 aa, Homo sapiens
  misc_feature: Table A; Target 44697; HLA-B*18:01; MAGEC1; ENSG00000155495; CTA
GEDSMSPLY

SEQ ID NO: 44698 - protein, 9 aa, Homo sapiens
  misc_feature: Table A; Target 44698; HLA-B*44:02; MAGEC1; ENSG00000155495; CTA
GEDSMSPLY

SEQ ID NO: 44699 - protein, 9 aa, Homo sapiens
  misc_feature: Table A; Target 44699; HLA-B*44:03; MAGEC1; ENSG00000155495; CTA
GEDSMSPLY

SEQ ID NO: 44700 - protein, 10 aa, Homo sapiens
  misc_feature: Table A; Target 44700; HLA-B*40:01; MAGEC1; ENSG00000155495; CTA
GEDSMSPLYF

SEQ ID NO: 44701 - protein, 10 aa, Homo sapiens
  misc_feature: Table A; Target 44701; HLA-B*44:03; MAGEC1; ENSG00000155495; CTA
GEDSMSPLYF

SEQ ID NO: 44702 - protein, 10 aa, Homo sapiens
  misc_feature: Table A; Target 44702; HLA-B*49:01; MAGEC1; ENSG00000155495; CTA
GEDSMSPLYF

SEQ ID NO: 44703 - protein, 10 aa, Homo sapiens
  misc_feature: Table A; Target 44703; HLA-A*30:01; MAGEC1; ENSG00000155495; CTA
GEDSQSPLQI

SEQ ID NO: 44704 - protein, 10 aa, Homo sapiens
  misc_feature: Table A; Target 44704; HLA-B*40:01; MAGEC1; ENSG00000155495; CTA
GEDSQSPLQI

SEQ ID NO: 44705 - protein, 10 aa, Homo sapiens
  misc_feature: Table A; Target 44705; HLA-B*49:01; MAGEC1; ENSG00000155495; CTA
GEDSQSPLQI

SEQ ID NO: 44706 - protein, 8 aa, Homo sapiens
  misc_feature: Table A; Target 44706; HLA-B*37:01; MAGEC1; ENSG00000155495; CTA
GENTHSPL

SEQ ID NO: 44707 - protein, 10 aa, Homo sapiens
  misc_feature: Table A; Target 44707; HLA-A*30:01; MAGEC1; ENSG00000155495; CTA
GENTHSPLQI

SEQ ID NO: 44708 - protein, 10 aa, Homo sapiens
  misc_feature: Table A; Target 44708; HLA-B*40:01; MAGEC1; ENSG00000155495; CTA
GENTHSPLQI

SEQ ID NO: 44709 - protein, 10 aa, Homo sapiens
  misc_feature: Table A; Target 44709; HLA-B*44:03; MAGEC1; ENSG00000155495; CTA
GENTHSPLQI

SEQ ID NO: 44710 - protein, 10 aa, Homo sapiens
  misc_feature: Table A; Target 44710; HLA-B*49:01; MAGEC1; ENSG00000155495; CTA
GENTHSPLQI

SEQ ID NO: 44711 - protein, 9 aa, Homo sapiens
  misc_feature: Table A; Target 44711; HLA-A*23:01; MAGEC1; ENSG00000155495; CTA
GFAQSPLQI

SEQ ID NO: 44712 - protein, 9 aa, Homo sapiens
  misc_feature: Table A; Target 44712; HLA-A*30:01; MAGEC1; ENSG00000155495; CTA
GFAQSPLQI

SEQ ID NO: 44713 - protein, 9 aa, Homo sapiens
  misc_feature: Table A; Target 44713; HLA-B*13:02; MAGEC1; ENSG00000155495; CTA
GFAQSPLQI

SEQ ID NO: 44714 - protein, 9 aa, Homo sapiens
  misc_feature: Table A; Target 44714; HLA-B*13:02; MAGEC1; ENSG00000155495; CTA
GMSQNRLLI

SEQ ID NO: 44715 - protein, 10 aa, Homo sapiens
  misc_feature: Table A; Target 44715; HLA-B*56:01; MAGEC1; ENSG00000155495; CTA
GPAQSPLQSP

SEQ ID NO: 44716 - protein, 8 aa, Homo sapiens
  misc_feature: Table A; Target 44716; HLA-B*07:02; MAGEC1; ENSG00000155495; CTA
GPRAHSEV

SEQ ID NO: 44717 - protein, 9 aa, Homo sapiens
  misc_feature: Table A; Target 44717; HLA-B*07:02; MAGEC1; ENSG00000155495; CTA
GPRAHSEVI

SEQ ID NO: 44718 - protein, 9 aa, Homo sapiens
  misc_feature: Table A; Target 44718; HLA-C*07:02; MAGEC1; ENSG00000155495; CTA
GPRAHSEVI

SEQ ID NO: 44719 - protein, 10 aa, Homo sapiens
  misc_feature: Table A; Target 44719; HLA-B*56:01; MAGEC1; ENSG00000155495; CTA
GPVQSPLHSP

SEQ ID NO: 44720 - protein, 9 aa, Homo sapiens
  misc_feature: Table A; Target 44720; HLA-C*01:02; MAGEC1; ENSG00000155495; CTA
GSPSFSSTL

SEQ ID NO: 44721 - protein, 10 aa, Homo sapiens
  misc_feature: Table A; Target 44721; HLA-B*57:01; MAGEC1; ENSG00000155495; CTA
GTYASEEVIW

SEQ ID NO: 44722 - protein, 8 aa, Homo sapiens
  misc_feature: Table A; Target 44722; HLA-A*31:01; MAGEC1; ENSG00000155495; CTA
GYFPVIFR

SEQ ID NO: 44723 - protein, 9 aa, Homo sapiens
  misc_feature: Table A; Target 44723; HLA-A*29:02; MAGEC1; ENSG00000155495; CTA
GYFPVIFRK

SEQ ID NO: 44724 - protein, 9 aa, Homo sapiens
  misc_feature: Table A; Target 44724; HLA-A*31:01; MAGEC1; ENSG00000155495; CTA
GYFPVIFRK

SEQ ID NO: 44725 - protein, 9 aa, Homo sapiens
  misc_feature: Table A; Target 44725; HLA-B*57:01; MAGEC1; ENSG00000155495; CTA
GYFPVIFRK

SEQ ID NO: 44726 - protein, 9 aa, Homo sapiens
  misc_feature: Table A; Target 44726; HLA-A*30:01; MAGEC1; ENSG00000155495; CTA
IEILFGISL

SEQ ID NO: 44727 - protein, 9 aa, Homo sapiens
  misc_feature: Table A; Target 44727; HLA-B*15:03; MAGEC1; ENSG00000155495; CTA
IEILFGISL

SEQ ID NO: 44728 - protein, 9 aa, Homo sapiens
  misc_feature: Table A; Target 44728; HLA-B*18:01; MAGEC1; ENSG00000155495; CTA
IEILFGISL

SEQ ID NO: 44729 - protein, 9 aa, Homo sapiens
  misc_feature: Table A; Target 44729; HLA-B*37:01; MAGEC1; ENSG00000155495; CTA
IEILFGISL

SEQ ID NO: 44730 - protein, 9 aa, Homo sapiens
  misc_feature: Table A; Target 44730; HLA-B*40:01; MAGEC1; ENSG00000155495; CTA
IEILFGISL

SEQ ID NO: 44731 - protein, 9 aa, Homo sapiens
  misc_feature: Table A; Target 44731; HLA-B*40:02; MAGEC1; ENSG00000155495; CTA
IEILFGISL

SEQ ID NO: 44732 - protein, 9 aa, Homo sapiens
  misc_feature: Table A; Target 44732; HLA-B*44:02; MAGEC1; ENSG00000155495; CTA
IEILFGISL

SEQ ID NO: 44733 - protein, 9 aa, Homo sapiens
  misc_feature: Table A; Target 44733; HLA-B*44:03; MAGEC1; ENSG00000155495; CTA
IEILFGISL

SEQ ID NO: 44734 - protein, 9 aa, Homo sapiens
  misc_feature: Table A; Target 44734; HLA-B*49:01; MAGEC1; ENSG00000155495; CTA
IEILFGISL

SEQ ID NO: 44735 - protein, 9 aa, Homo sapiens
  misc_feature: Table A; Target 44735; HLA-A*23:01; MAGEC1; ENSG00000155495; CTA
IESEPLFTY

SEQ ID NO: 44736 - protein, 9 aa, Homo sapiens
  misc_feature: Table A; Target 44736; HLA-A*25:01; MAGEC1; ENSG00000155495; CTA
IESEPLFTY

SEQ ID NO: 44737 - protein, 9 aa, Homo sapiens
  misc_feature: Table A; Target 44737; HLA-A*29:02; MAGEC1; ENSG00000155495; CTA
IESEPLFTY

SEQ ID NO: 44738 - protein, 9 aa, Homo sapiens
  misc_feature: Table A; Target 44738; HLA-A*30:01; MAGEC1; ENSG00000155495; CTA
IESEPLFTY

SEQ ID NO: 44739 - protein, 9 aa, Homo sapiens
  misc_feature: Table A; Target 44739; HLA-A*30:02; MAGEC1; ENSG00000155495; CTA
IESEPLFTY

SEQ ID NO: 44740 - protein, 9 aa, Homo sapiens
  misc_feature: Table A; Target 44740; HLA-B*15:01; MAGEC1; ENSG00000155495; CTA
IESEPLFTY

SEQ ID NO: 44741 - protein, 9 aa, Homo sapiens
  misc_feature: Table A; Target 44741; HLA-B*15:03; MAGEC1; ENSG00000155495; CTA
IESEPLFTY

SEQ ID NO: 44742 - protein, 9 aa, Homo sapiens
  misc_feature: Table A; Target 44742; HLA-B*18:01; MAGEC1; ENSG00000155495; CTA
IESEPLFTY

SEQ ID NO: 44743 - protein, 9 aa, Homo sapiens
  misc_feature: Table A; Target 44743; HLA-B*27:02; MAGEC1; ENSG00000155495; CTA
IESEPLFTY

SEQ ID NO: 44744 - protein, 9 aa, Homo sapiens
  misc_feature: Table A; Target 44744; HLA-B*27:05; MAGEC1; ENSG00000155495; CTA
IESEPLFTY

SEQ ID NO: 44745 - protein, 9 aa, Homo sapiens
  misc_feature: Table A; Target 44745; HLA-B*35:01; MAGEC1; ENSG00000155495; CTA
IESEPLFTY

SEQ ID NO: 44746 - protein, 9 aa, Homo sapiens
  misc_feature: Table A; Target 44746; HLA-B*37:01; MAGEC1; ENSG00000155495; CTA
IESEPLFTY

SEQ ID NO: 44747 - protein, 9 aa, Homo sapiens
  misc_feature: Table A; Target 44747; HLA-B*40:01; MAGEC1; ENSG00000155495; CTA
IESEPLFTY

SEQ ID NO: 44748 - protein, 9 aa, Homo sapiens
  misc_feature: Table A; Target 44748; HLA-B*40:02; MAGEC1; ENSG00000155495; CTA
IESEPLFTY

SEQ ID NO: 44749 - protein, 9 aa, Homo sapiens
  misc_feature: Table A; Target 44749; HLA-B*44:02; MAGEC1; ENSG00000155495; CTA
IESEPLFTY

SEQ ID NO: 44750 - protein, 9 aa, Homo sapiens
  misc_feature: Table A; Target 44750; HLA-B*44:03; MAGEC1; ENSG00000155495; CTA
IESEPLFTY

SEQ ID NO: 44751 - protein, 9 aa, Homo sapiens
  misc_feature: Table A; Target 44751; HLA-B*49:01; MAGEC1; ENSG00000155495; CTA
IESEPLFTY

SEQ ID NO: 44752 - protein, 9 aa, Homo sapiens
  misc_feature: Table A; Target 44752; HLA-C*02:02; MAGEC1; ENSG00000155495; CTA
IESEPLFTY

SEQ ID NO: 44753 - protein, 9 aa, Homo sapiens
  misc_feature: Table A; Target 44753; HLA-C*12:03; MAGEC1; ENSG00000155495; CTA
IESEPLFTY

SEQ ID NO: 44754 - protein, 9 aa, Homo sapiens
  misc_feature: Table A; Target 44754; HLA-C*14:02; MAGEC1; ENSG00000155495; CTA
IESEPLFTY

SEQ ID NO: 44755 - protein, 9 aa, Homo sapiens
  misc_feature: Table A; Target 44755; HLA-C*16:01; MAGEC1; ENSG00000155495; CTA
IESEPLFTY

SEQ ID NO: 44756 - protein, 9 aa, Homo sapiens
  misc_feature: Table A; Target 44756; HLA-C*16:04; MAGEC1; ENSG00000155495; CTA
IESEPLFTY

SEQ ID NO: 44757 - protein, 10 aa, Homo sapiens
  misc_feature: Table A; Target 44757; HLA-B*49:01; MAGEC1; ENSG00000155495; CTA
IESEPLFTYT

SEQ ID NO: 44758 - protein, 11 aa, Homo sapiens
  misc_feature: Table A; Target 44758; HLA-A*30:01; MAGEC1; ENSG00000155495; CTA
IESEPLFTYTL

SEQ ID NO: 44759 - protein, 11 aa, Homo sapiens
  misc_feature: Table A; Target 44759; HLA-B*40:01; MAGEC1; ENSG00000155495; CTA
IESEPLFTYTL

SEQ ID NO: 44760 - protein, 11 aa, Homo sapiens
  misc_feature: Table A; Target 44760; HLA-B*49:01; MAGEC1; ENSG00000155495; CTA
IESEPLFTYTL

SEQ ID NO: 44761 - protein, 8 aa, Homo sapiens
  misc_feature: Table A; Target 44761; HLA-C*14:02; MAGEC1; ENSG00000155495; CTA
IFIKGTYA

SEQ ID NO: 44762 - protein, 8 aa, Homo sapiens
  misc_feature: Table A; Target 44762; HLA-C*14:02; MAGEC1; ENSG00000155495; CTA
IFQSSPER

SEQ ID NO: 44763 - protein, 9 aa, Homo sapiens
  misc_feature: Table A; Target 44763; HLA-C*14:02; MAGEC1; ENSG00000155495; CTA
IFQSSPESA

SEQ ID NO: 44764 - protein, 10 aa, Homo sapiens
  misc_feature: Table A; Target 44764; HLA-C*05:01; MAGEC1; ENSG00000155495; CTA
IIDTTDDSTA

SEQ ID NO: 44765 - protein, 8 aa, Homo sapiens
  misc_feature: Table A; Target 44765; HLA-B*15:01; MAGEC1; ENSG00000155495; CTA
IIFIKGTY

SEQ ID NO: 44766 - protein, 8 aa, Homo sapiens
  misc_feature: Table A; Target 44766; HLA-B*15:03; MAGEC1; ENSG00000155495; CTA
IIFIKGTY

SEQ ID NO: 44767 - protein, 9 aa, Homo sapiens
  misc_feature: Table A; Target 44767; HLA-A*02:03; MAGEC1; ENSG00000155495; CTA
IIFIKGTYA

SEQ ID NO: 44768 - protein, 10 aa, Homo sapiens
  misc_feature: Table A; Target 44768; HLA-A*02:01; MAGEC1; ENSG00000155495; CTA
ILFGISLREV

SEQ ID NO: 44769 - protein, 10 aa, Homo sapiens
  misc_feature: Table A; Target 44769; HLA-A*02:03; MAGEC1; ENSG00000155495; CTA
ILFGISLREV

SEQ ID NO: 44770 - protein, 10 aa, Homo sapiens
  misc_feature: Table A; Target 44770; HLA-A*02:04; MAGEC1; ENSG00000155495; CTA
ILFGISLREV

SEQ ID NO: 44771 - protein, 9 aa, Homo sapiens
  misc_feature: Table A; Target 44771; HLA-A*02:01; MAGEC1; ENSG00000155495; CTA
ILILSIIFI

SEQ ID NO: 44772 - protein, 9 aa, Homo sapiens
  misc_feature: Table A; Target 44772; HLA-A*02:04; MAGEC1; ENSG00000155495; CTA
ILILSIIFI

SEQ ID NO: 44773 - protein, 9 aa, Homo sapiens
  misc_feature: Table A; Target 44773; HLA-A*02:01; MAGEC1; ENSG00000155495; CTA
ILQSSPESA

SEQ ID NO: 44774 - protein, 9 aa, Homo sapiens
  misc_feature: Table A; Target 44774; HLA-A*02:03; MAGEC1; ENSG00000155495; CTA
ILQSSPESA

SEQ ID NO: 44775 - protein, 9 aa, Homo sapiens
  misc_feature: Table A; Target 44775; HLA-B*55:01; MAGEC1; ENSG00000155495; CTA
ILQSSPESA

SEQ ID NO: 44776 - protein, 9 aa, Homo sapiens
  misc_feature: Table A; Target 44776; HLA-C*14:02; MAGEC1; ENSG00000155495; CTA
ILQSSPESA

SEQ ID NO: 44777 - protein, 11 aa, Homo sapiens
  misc_feature: Table A; Target 44777; HLA-B*07:02; MAGEC1; ENSG00000155495; CTA
IPGSPSFSSTL

SEQ ID NO: 44778 - protein, 11 aa, Homo sapiens
  misc_feature: Table A; Target 44778; HLA-C*07:02; MAGEC1; ENSG00000155495; CTA
IPGSPSFSSTL

SEQ ID NO: 44779 - protein, 11 aa, Homo sapiens
  misc_feature: Table A; Target 44779; HLA-B*07:02; MAGEC1; ENSG00000155495; CTA
IPVSAASSSTL

SEQ ID NO: 44780 - protein, 11 aa, Homo sapiens
  misc_feature: Table A; Target 44780; HLA-B*35:01; MAGEC1; ENSG00000155495; CTA
IPVSAASSSTL

SEQ ID NO: 44781 - protein, 11 aa, Homo sapiens
  misc_feature: Table A; Target 44781; HLA-B*35:03; MAGEC1; ENSG00000155495; CTA
IPVSAASSSTL

SEQ ID NO: 44782 - protein, 11 aa, Homo sapiens
  misc_feature: Table A; Target 44782; HLA-C*07:02; MAGEC1; ENSG00000155495; CTA
IPVSAASSSTL

SEQ ID NO: 44783 - protein, 9 aa, Homo sapiens
  misc_feature: Table A; Target 44783; HLA-B*56:01; MAGEC1; ENSG00000155495; CTA
IPVSPSFSS

SEQ ID NO: 44784 - protein, 10 aa, Homo sapiens
  misc_feature: Table A; Target 44784; HLA-B*56:01; MAGEC1; ENSG00000155495; CTA
IPVSPSFSST

SEQ ID NO: 44785 - protein, 11 aa, Homo sapiens
  misc_feature: Table A; Target 44785; HLA-B*07:02; MAGEC1; ENSG00000155495; CTA
IPVSPSFSSTL

SEQ ID NO: 44786 - protein, 11 aa, Homo sapiens
  misc_feature: Table A; Target 44786; HLA-B*35:01; MAGEC1; ENSG00000155495; CTA
IPVSPSFSSTL

SEQ ID NO: 44787 - protein, 11 aa, Homo sapiens
  misc_feature: Table A; Target 44787; HLA-B*35:03; MAGEC1; ENSG00000155495; CTA
IPVSPSFSSTL

SEQ ID NO: 44788 - protein, 11 aa, Homo sapiens
  misc_feature: Table A; Target 44788; HLA-B*51:01; MAGEC1; ENSG00000155495; CTA
IPVSPSFSSTL

SEQ ID NO: 44789 - protein, 11 aa, Homo sapiens
  misc_feature: Table A; Target 44789; HLA-B*56:01; MAGEC1; ENSG00000155495; CTA
IPVSPSFSSTL

SEQ ID NO: 44790 - protein, 11 aa, Homo sapiens
  misc_feature: Table A; Target 44790; HLA-C*03:03; MAGEC1; ENSG00000155495; CTA
IPVSPSFSSTL

SEQ ID NO: 44791 - protein, 11 aa, Homo sapiens
  misc_feature: Table A; Target 44791; HLA-C*03:04; MAGEC1; ENSG00000155495; CTA
IPVSPSFSSTL

SEQ ID NO: 44792 - protein, 11 aa, Homo sapiens
  misc_feature: Table A; Target 44792; HLA-C*07:02; MAGEC1; ENSG00000155495; CTA
IPVSPSFSSTL

SEQ ID NO: 44793 - protein, 9 aa, Homo sapiens
  misc_feature: Table A; Target 44793; HLA-B*56:01; MAGEC1; ENSG00000155495; CTA
IPVSPSSSS

SEQ ID NO: 44794 - protein, 11 aa, Homo sapiens
  misc_feature: Table A; Target 44794; HLA-B*07:02; MAGEC1; ENSG00000155495; CTA
IPVSPSSSSTL

SEQ ID NO: 44795 - protein, 11 aa, Homo sapiens
  misc_feature: Table A; Target 44795; HLA-B*35:01; MAGEC1; ENSG00000155495; CTA
IPVSPSSSSTL

SEQ ID NO: 44796 - protein, 11 aa, Homo sapiens
  misc_feature: Table A; Target 44796; HLA-B*35:03; MAGEC1; ENSG00000155495; CTA
IPVSPSSSSTL

SEQ ID NO: 44797 - protein, 11 aa, Homo sapiens
  misc_feature: Table A; Target 44797; HLA-B*51:01; MAGEC1; ENSG00000155495; CTA
IPVSPSSSSTL

SEQ ID NO: 44798 - protein, 11 aa, Homo sapiens
  misc_feature: Table A; Target 44798; HLA-C*03:03; MAGEC1; ENSG00000155495; CTA
IPVSPSSSSTL

SEQ ID NO: 44799 - protein, 11 aa, Homo sapiens
  misc_feature: Table A; Target 44799; HLA-C*03:04; MAGEC1; ENSG00000155495; CTA
IPVSPSSSSTL

SEQ ID NO: 44800 - protein, 11 aa, Homo sapiens
  misc_feature: Table A; Target 44800; HLA-C*07:02; MAGEC1; ENSG00000155495; CTA
IPVSPSSSSTL

SEQ ID NO: 44801 - protein, 11 aa, Homo sapiens
  misc_feature: Table A; Target 44801; HLA-B*07:02; MAGEC1; ENSG00000155495; CTA
IPVSRSFSSTL

SEQ ID NO: 44802 - protein, 11 aa, Homo sapiens
  misc_feature: Table A; Target 44802; HLA-C*07:02; MAGEC1; ENSG00000155495; CTA
IPVSRSFSSTL

SEQ ID NO: 44803 - protein, 9 aa, Homo sapiens
  misc_feature: Table A; Target 44803; HLA-A*29:02; MAGEC1; ENSG00000155495; CTA
IPVSSSFSY

SEQ ID NO: 44804 - protein, 9 aa, Homo sapiens
  misc_feature: Table A; Target 44804; HLA-B*15:03; MAGEC1; ENSG00000155495; CTA
IPVSSSFSY

SEQ ID NO: 44805 - protein, 9 aa, Homo sapiens
  misc_feature: Table A; Target 44805; HLA-B*35:01; MAGEC1; ENSG00000155495; CTA
IPVSSSFSY

SEQ ID NO: 44806 - protein, 9 aa, Homo sapiens
  misc_feature: Table A; Target 44806; HLA-B*55:01; MAGEC1; ENSG00000155495; CTA
IPVSSSFSY

SEQ ID NO: 44807 - protein, 11 aa, Homo sapiens
  misc_feature: Table A; Target 44807; HLA-B*35:03; MAGEC1; ENSG00000155495; CTA
IPVSSSFSYTL

SEQ ID NO: 44808 - protein, 11 aa, Homo sapiens
  misc_feature: Table A; Target 44808; HLA-B*07:02; MAGEC1; ENSG00000155495; CTA
IPVSSSSSSTL

SEQ ID NO: 44809 - protein, 11 aa, Homo sapiens
  misc_feature: Table A; Target 44809; HLA-B*35:01; MAGEC1; ENSG00000155495; CTA
IPVSSSSSSTL

SEQ ID NO: 44810 - protein, 11 aa, Homo sapiens
  misc_feature: Table A; Target 44810; HLA-B*35:03; MAGEC1; ENSG00000155495; CTA
IPVSSSSSSTL

SEQ ID NO: 44811 - protein, 11 aa, Homo sapiens
  misc_feature: Table A; Target 44811; HLA-C*03:04; MAGEC1; ENSG00000155495; CTA
IPVSSSSSSTL

SEQ ID NO: 44812 - protein, 11 aa, Homo sapiens
  misc_feature: Table A; Target 44812; HLA-C*07:02; MAGEC1; ENSG00000155495; CTA
IPVSSSSSSTL

SEQ ID NO: 44813 - protein, 9 aa, Homo sapiens
  misc_feature: Table A; Target 44813; HLA-A*23:01; MAGEC1; ENSG00000155495; CTA
ISFSSSTSL

SEQ ID NO: 44814 - protein, 9 aa, Homo sapiens
  misc_feature: Table A; Target 44814; HLA-A*30:01; MAGEC1; ENSG00000155495; CTA
ISFSSSTSL

SEQ ID NO: 44815 - protein, 9 aa, Homo sapiens
  misc_feature: Table A; Target 44815; HLA-A*32:01; MAGEC1; ENSG00000155495; CTA
ISFSSSTSL

SEQ ID NO: 44816 - protein, 9 aa, Homo sapiens
  misc_feature: Table A; Target 44816; HLA-B*07:02; MAGEC1; ENSG00000155495; CTA
ISFSSSTSL

SEQ ID NO: 44817 - protein, 9 aa, Homo sapiens
  misc_feature: Table A; Target 44817; HLA-B*15:01; MAGEC1; ENSG00000155495; CTA
ISFSSSTSL

SEQ ID NO: 44818 - protein, 9 aa, Homo sapiens
  misc_feature: Table A; Target 44818; HLA-B*15:03; MAGEC1; ENSG00000155495; CTA
ISFSSSTSL

SEQ ID NO: 44819 - protein, 9 aa, Homo sapiens
  misc_feature: Table A; Target 44819; HLA-B*35:03; MAGEC1; ENSG00000155495; CTA
ISFSSSTSL

SEQ ID NO: 44820 - protein, 9 aa, Homo sapiens
  misc_feature: Table A; Target 44820; HLA-B*39:01; MAGEC1; ENSG00000155495; CTA
ISFSSSTSL

SEQ ID NO: 44821 - protein, 9 aa, Homo sapiens
  misc_feature: Table A; Target 44821; HLA-B*40:01; MAGEC1; ENSG00000155495; CTA
ISFSSSTSL

SEQ ID NO: 44822 - protein, 9 aa, Homo sapiens
  misc_feature: Table A; Target 44822; HLA-B*46:01; MAGEC1; ENSG00000155495; CTA
ISFSSSTSL

SEQ ID NO: 44823 - protein, 9 aa, Homo sapiens
  misc_feature: Table A; Target 44823; HLA-B*58:01; MAGEC1; ENSG00000155495; CTA
ISFSSSTSL

SEQ ID NO: 44824 - protein, 9 aa, Homo sapiens
  misc_feature: Table A; Target 44824; HLA-C*01:02; MAGEC1; ENSG00000155495; CTA
ISFSSSTSL

SEQ ID NO: 44825 - protein, 9 aa, Homo sapiens
  misc_feature: Table A; Target 44825; HLA-C*02:02; MAGEC1; ENSG00000155495; CTA
ISFSSSTSL

SEQ ID NO: 44826 - protein, 9 aa, Homo sapiens
  misc_feature: Table A; Target 44826; HLA-C*03:03; MAGEC1; ENSG00000155495; CTA
ISFSSSTSL

SEQ ID NO: 44827 - protein, 9 aa, Homo sapiens
  misc_feature: Table A; Target 44827; HLA-C*03:04; MAGEC1; ENSG00000155495; CTA
ISFSSSTSL

SEQ ID NO: 44828 - protein, 9 aa, Homo sapiens
  misc_feature: Table A; Target 44828; HLA-C*05:01; MAGEC1; ENSG00000155495; CTA
ISFSSSTSL

SEQ ID NO: 44829 - protein, 9 aa, Homo sapiens
  misc_feature: Table A; Target 44829; HLA-C*07:02; MAGEC1; ENSG00000155495; CTA
ISFSSSTSL

SEQ ID NO: 44830 - protein, 9 aa, Homo sapiens
  misc_feature: Table A; Target 44830; HLA-C*07:04; MAGEC1; ENSG00000155495; CTA
ISFSSSTSL

SEQ ID NO: 44831 - protein, 9 aa, Homo sapiens
  misc_feature: Table A; Target 44831; HLA-C*12:03; MAGEC1; ENSG00000155495; CTA
ISFSSSTSL

SEQ ID NO: 44832 - protein, 9 aa, Homo sapiens
  misc_feature: Table A; Target 44832; HLA-C*14:02; MAGEC1; ENSG00000155495; CTA
ISFSSSTSL

SEQ ID NO: 44833 - protein, 9 aa, Homo sapiens
  misc_feature: Table A; Target 44833; HLA-C*16:01; MAGEC1; ENSG00000155495; CTA
ISFSSSTSL

SEQ ID NO: 44834 - protein, 9 aa, Homo sapiens
  misc_feature: Table A; Target 44834; HLA-C*16:04; MAGEC1; ENSG00000155495; CTA
ISFSSSTSL

SEQ ID NO: 44835 - protein, 10 aa, Homo sapiens
  misc_feature: Table A; Target 44835; HLA-C*04:01; MAGEC1; ENSG00000155495; CTA
IWDVLSGIGV

SEQ ID NO: 44836 - protein, 9 aa, Homo sapiens
  misc_feature: Table A; Target 44836; HLA-B*57:01; MAGEC1; ENSG00000155495; CTA
KAREFIEIL

SEQ ID NO: 44837 - protein, 10 aa, Homo sapiens
  misc_feature: Table A; Target 44837; HLA-B*57:01; MAGEC1; ENSG00000155495; CTA
KAREFIEILF

SEQ ID NO: 44838 - protein, 8 aa, Homo sapiens
  misc_feature: Table A; Target 44838; HLA-B*37:01; MAGEC1; ENSG00000155495; CTA
KDMPTAGM

SEQ ID NO: 44839 - protein, 10 aa, Homo sapiens
  misc_feature: Table A; Target 44839; HLA-C*06:02; MAGEC1; ENSG00000155495; CTA
KDMPTAGMPS

SEQ ID NO: 44840 - protein, 9 aa, Homo sapiens
  misc_feature: Table A; Target 44840; HLA-B*37:01; MAGEC1; ENSG00000155495; CTA
KDSLSPLEI

SEQ ID NO: 44841 - protein, 9 aa, Homo sapiens
  misc_feature: Table A; Target 44841; HLA-B*37:01; MAGEC1; ENSG00000155495; CTA
KDSQSPLQI

SEQ ID NO: 44842 - protein, 8 aa, Homo sapiens
  misc_feature: Table A; Target 44842; HLA-C*16:01; MAGEC1; ENSG00000155495; CTA
KNTVPITF

SEQ ID NO: 44843 - protein, 8 aa, Homo sapiens
  misc_feature: Table A; Target 44843; HLA-C*05:01; MAGEC1; ENSG00000155495; CTA
KVDELARF

SEQ ID NO: 44844 - protein, 9 aa, Homo sapiens
  misc_feature: Table A; Target 44844; HLA-A*02:07; MAGEC1; ENSG00000155495; CTA
KVDELARFL

SEQ ID NO: 44845 - protein, 9 aa, Homo sapiens
  misc_feature: Table A; Target 44845; HLA-A*03:01; MAGEC1; ENSG00000155495; CTA
KVDELARFL

SEQ ID NO: 44846 - protein, 10 aa, Homo sapiens
  misc_feature: Table A; Target 44846; HLA-A*02:07; MAGEC1; ENSG00000155495; CTA
KVDELARFLL

SEQ ID NO: 44847 - protein, 11 aa, Homo sapiens
  misc_feature: Table A; Target 44847; HLA-A*02:07; MAGEC1; ENSG00000155495; CTA
KVDELARFLLL

SEQ ID NO: 44848 - protein, 11 aa, Homo sapiens
  misc_feature: Table A; Target 44848; HLA-A*03:01; MAGEC1; ENSG00000155495; CTA
KVDELARFLLL

SEQ ID NO: 44849 - protein, 9 aa, Homo sapiens
  misc_feature: Table A; Target 44849; HLA-A*02:01; MAGEC1; ENSG00000155495; CTA
KVVEFLAML

SEQ ID NO: 44850 - protein, 9 aa, Homo sapiens
  misc_feature: Table A; Target 44850; HLA-A*02:03; MAGEC1; ENSG00000155495; CTA
KVVEFLAML

SEQ ID NO: 44851 - protein, 9 aa, Homo sapiens
  misc_feature: Table A; Target 44851; HLA-A*02:04; MAGEC1; ENSG00000155495; CTA
KVVEFLAML

SEQ ID NO: 44852 - protein, 9 aa, Homo sapiens
  misc_feature: Table A; Target 44852; HLA-A*02:07; MAGEC1; ENSG00000155495; CTA
KVVEFLAML

SEQ ID NO: 44853 - protein, 9 aa, Homo sapiens
  misc_feature: Table A; Target 44853; HLA-A*68:02; MAGEC1; ENSG00000155495; CTA
KVVEFLAML

SEQ ID NO: 44854 - protein, 10 aa, Homo sapiens
  misc_feature: Table A; Target 44854; HLA-A*03:01; MAGEC1; ENSG00000155495; CTA
KVVEFLAMLK

SEQ ID NO: 44855 - protein, 10 aa, Homo sapiens
  misc_feature: Table A; Target 44855; HLA-A*03:02; MAGEC1; ENSG00000155495; CTA
KVVEFLAMLK

SEQ ID NO: 44856 - protein, 10 aa, Homo sapiens
  misc_feature: Table A; Target 44856; HLA-A*11:01; MAGEC1; ENSG00000155495; CTA
KVVEFLAMLK

SEQ ID NO: 44857 - protein, 9 aa, Homo sapiens
  misc_feature: Table A; Target 44857; HLA-A*02:04; MAGEC1; ENSG00000155495; CTA
KVWVQEHYL

SEQ ID NO: 44858 - protein, 9 aa, Homo sapiens
  misc_feature: Table A; Target 44858; HLA-A*02:07; MAGEC1; ENSG00000155495; CTA
KVWVQEHYL

SEQ ID NO: 44859 - protein, 10 aa, Homo sapiens
  misc_feature: Table A; Target 44859; HLA-A*03:02; MAGEC1; ENSG00000155495; CTA
KYQVKQPITK

SEQ ID NO: 44860 - protein, 10 aa, Homo sapiens
  misc_feature: Table A; Target 44860; HLA-A*31:01; MAGEC1; ENSG00000155495; CTA
KYQVKQPITK

SEQ ID NO: 44861 - protein, 10 aa, Homo sapiens
  misc_feature: Table A; Target 44861; HLA-C*06:02; MAGEC1; ENSG00000155495; CTA
KYQVKQPITK

SEQ ID NO: 44862 - protein, 8 aa, Homo sapiens
  misc_feature: Table A; Target 44862; HLA-B*08:01; MAGEC1; ENSG00000155495; CTA
LAMLKNTV

SEQ ID NO: 44863 - protein, 8 aa, Homo sapiens
  misc_feature: Table A; Target 44863; HLA-B*51:01; MAGEC1; ENSG00000155495; CTA
LAMLKNTV

SEQ ID NO: 44864 - protein, 9 aa, Homo sapiens
  misc_feature: Table A; Target 44864; HLA-A*29:02; MAGEC1; ENSG00000155495; CTA
LARFLLLKY

SEQ ID NO: 44865 - protein, 10 aa, Homo sapiens
  misc_feature: Table A; Target 44865; HLA-A*30:01; MAGEC1; ENSG00000155495; CTA
LEGEDSLSSL

SEQ ID NO: 44866 - protein, 10 aa, Homo sapiens
  misc_feature: Table A; Target 44866; HLA-B*40:01; MAGEC1; ENSG00000155495; CTA
LEGEDSLSSL

SEQ ID NO: 44867 - protein, 10 aa, Homo sapiens
  misc_feature: Table A; Target 44867; HLA-B*57:01; MAGEC1; ENSG00000155495; CTA
LHFPQSPPEW

SEQ ID NO: 44868 - protein, 10 aa, Homo sapiens
  misc_feature: Table A; Target 44868; HLA-A*01:01; MAGEC1; ENSG00000155495; CTA
LIESEPLFTY

SEQ ID NO: 44869 - protein, 10 aa, Homo sapiens
  misc_feature: Table A; Target 44869; HLA-A*29:02; MAGEC1; ENSG00000155495; CTA
LIESEPLFTY

SEQ ID NO: 44870 - protein, 8 aa, Homo sapiens
  misc_feature: Table A; Target 44870; HLA-A*02:04; MAGEC1; ENSG00000155495; CTA
LILSIIFI

SEQ ID NO: 44871 - protein, 9 aa, Homo sapiens
  misc_feature: Table A; Target 44871; HLA-B*15:03; MAGEC1; ENSG00000155495; CTA
LKNTVPITF

SEQ ID NO: 44872 - protein, 10 aa, Homo sapiens
  misc_feature: Table A; Target 44872; HLA-B*46:01; MAGEC1; ENSG00000155495; CTA
LLQIPMTSSF

SEQ ID NO: 44873 - protein, 9 aa, Homo sapiens
  misc_feature: Table A; Target 44873; HLA-B*54:01; MAGEC1; ENSG00000155495; CTA
LPQSFPESP

SEQ ID NO: 44874 - protein, 9 aa, Homo sapiens
  misc_feature: Table A; Target 44874; HLA-B*56:01; MAGEC1; ENSG00000155495; CTA
LPQSFPESP

SEQ ID NO: 44875 - protein, 9 aa, Homo sapiens
  misc_feature: Table A; Target 44875; HLA-A*23:01; MAGEC1; ENSG00000155495; CTA
LQIPGSPSF

SEQ ID NO: 44876 - protein, 9 aa, Homo sapiens
  misc_feature: Table A; Target 44876; HLA-A*24:02; MAGEC1; ENSG00000155495; CTA
LQIPGSPSF

SEQ ID NO: 44877 - protein, 9 aa, Homo sapiens
  misc_feature: Table A; Target 44877; HLA-A*25:01; MAGEC1; ENSG00000155495; CTA
LQIPGSPSF

SEQ ID NO: 44878 - protein, 9 aa, Homo sapiens
  misc_feature: Table A; Target 44878; HLA-A*26:01; MAGEC1; ENSG00000155495; CTA
LQIPGSPSF

SEQ ID NO: 44879 - protein, 9 aa, Homo sapiens
  misc_feature: Table A; Target 44879; HLA-A*32:01; MAGEC1; ENSG00000155495; CTA
LQIPGSPSF

SEQ ID NO: 44880 - protein, 9 aa, Homo sapiens
  misc_feature: Table A; Target 44880; HLA-B*15:01; MAGEC1; ENSG00000155495; CTA
LQIPGSPSF

SEQ ID NO: 44881 - protein, 9 aa, Homo sapiens
  misc_feature: Table A; Target 44881; HLA-B*15:03; MAGEC1; ENSG00000155495; CTA
LQIPGSPSF

SEQ ID NO: 44882 - protein, 9 aa, Homo sapiens
  misc_feature: Table A; Target 44882; HLA-B*38:01; MAGEC1; ENSG00000155495; CTA
LQIPGSPSF

SEQ ID NO: 44883 - protein, 9 aa, Homo sapiens
  misc_feature: Table A; Target 44883; HLA-B*39:01; MAGEC1; ENSG00000155495; CTA
LQIPGSPSF

SEQ ID NO: 44884 - protein, 9 aa, Homo sapiens
  misc_feature: Table A; Target 44884; HLA-B*46:01; MAGEC1; ENSG00000155495; CTA
LQIPGSPSF

SEQ ID NO: 44885 - protein, 9 aa, Homo sapiens
  misc_feature: Table A; Target 44885; HLA-B*58:01; MAGEC1; ENSG00000155495; CTA
LQIPGSPSF

SEQ ID NO: 44886 - protein, 9 aa, Homo sapiens
  misc_feature: Table A; Target 44886; HLA-C*02:02; MAGEC1; ENSG00000155495; CTA
LQIPGSPSF

SEQ ID NO: 44887 - protein, 9 aa, Homo sapiens
  misc_feature: Table A; Target 44887; HLA-C*03:03; MAGEC1; ENSG00000155495; CTA
LQIPGSPSF

SEQ ID NO: 44888 - protein, 9 aa, Homo sapiens
  misc_feature: Table A; Target 44888; HLA-C*03:04; MAGEC1; ENSG00000155495; CTA
LQIPGSPSF

SEQ ID NO: 44889 - protein, 9 aa, Homo sapiens
  misc_feature: Table A; Target 44889; HLA-C*07:04; MAGEC1; ENSG00000155495; CTA
LQIPGSPSF

SEQ ID NO: 44890 - protein, 9 aa, Homo sapiens
  misc_feature: Table A; Target 44890; HLA-C*14:02; MAGEC1; ENSG00000155495; CTA
LQIPGSPSF

SEQ ID NO: 44891 - protein, 9 aa, Homo sapiens
  misc_feature: Table A; Target 44891; HLA-C*16:04; MAGEC1; ENSG00000155495; CTA
LQIPGSPSF

SEQ ID NO: 44892 - protein, 9 aa, Homo sapiens
  misc_feature: Table A; Target 44892; HLA-A*02:01; MAGEC1; ENSG00000155495; CTA
LQIPVSPSF

SEQ ID NO: 44893 - protein, 9 aa, Homo sapiens
  misc_feature: Table A; Target 44893; HLA-A*02:07; MAGEC1; ENSG00000155495; CTA
LQIPVSPSF

SEQ ID NO: 44894 - protein, 9 aa, Homo sapiens
  misc_feature: Table A; Target 44894; HLA-A*23:01; MAGEC1; ENSG00000155495; CTA
LQIPVSPSF

SEQ ID NO: 44895 - protein, 9 aa, Homo sapiens
  misc_feature: Table A; Target 44895; HLA-A*24:02; MAGEC1; ENSG00000155495; CTA
LQIPVSPSF

SEQ ID NO: 44896 - protein, 9 aa, Homo sapiens
  misc_feature: Table A; Target 44896; HLA-A*25:01; MAGEC1; ENSG00000155495; CTA
LQIPVSPSF

SEQ ID NO: 44897 - protein, 9 aa, Homo sapiens
  misc_feature: Table A; Target 44897; HLA-A*26:01; MAGEC1; ENSG00000155495; CTA
LQIPVSPSF

SEQ ID NO: 44898 - protein, 9 aa, Homo sapiens
  misc_feature: Table A; Target 44898; HLA-A*30:01; MAGEC1; ENSG00000155495; CTA
LQIPVSPSF

SEQ ID NO: 44899 - protein, 9 aa, Homo sapiens
  misc_feature: Table A; Target 44899; HLA-A*30:02; MAGEC1; ENSG00000155495; CTA
LQIPVSPSF

SEQ ID NO: 44900 - protein, 9 aa, Homo sapiens
  misc_feature: Table A; Target 44900; HLA-A*32:01; MAGEC1; ENSG00000155495; CTA
LQIPVSPSF

SEQ ID NO: 44901 - protein, 9 aa, Homo sapiens
  misc_feature: Table A; Target 44901; HLA-B*07:02; MAGEC1; ENSG00000155495; CTA
LQIPVSPSF

SEQ ID NO: 44902 - protein, 9 aa, Homo sapiens
  misc_feature: Table A; Target 44902; HLA-B*13:02; MAGEC1; ENSG00000155495; CTA
LQIPVSPSF

SEQ ID NO: 44903 - protein, 9 aa, Homo sapiens
  misc_feature: Table A; Target 44903; HLA-B*15:03; MAGEC1; ENSG00000155495; CTA
LQIPVSPSF

SEQ ID NO: 44904 - protein, 9 aa, Homo sapiens
  misc_feature: Table A; Target 44904; HLA-B*18:01; MAGEC1; ENSG00000155495; CTA
LQIPVSPSF

SEQ ID NO: 44905 - protein, 9 aa, Homo sapiens
  misc_feature: Table A; Target 44905; HLA-B*27:02; MAGEC1; ENSG00000155495; CTA
LQIPVSPSF

SEQ ID NO: 44906 - protein, 9 aa, Homo sapiens
  misc_feature: Table A; Target 44906; HLA-B*27:05; MAGEC1; ENSG00000155495; CTA
LQIPVSPSF

SEQ ID NO: 44907 - protein, 9 aa, Homo sapiens
  misc_feature: Table A; Target 44907; HLA-B*35:01; MAGEC1; ENSG00000155495; CTA
LQIPVSPSF

SEQ ID NO: 44908 - protein, 9 aa, Homo sapiens
  misc_feature: Table A; Target 44908; HLA-B*35:03; MAGEC1; ENSG00000155495; CTA
LQIPVSPSF

SEQ ID NO: 44909 - protein, 9 aa, Homo sapiens
  misc_feature: Table A; Target 44909; HLA-B*37:01; MAGEC1; ENSG00000155495; CTA
LQIPVSPSF

SEQ ID NO: 44910 - protein, 9 aa, Homo sapiens
  misc_feature: Table A; Target 44910; HLA-B*38:01; MAGEC1; ENSG00000155495; CTA
LQIPVSPSF

SEQ ID NO: 44911 - protein, 9 aa, Homo sapiens
  misc_feature: Table A; Target 44911; HLA-B*39:01; MAGEC1; ENSG00000155495; CTA
LQIPVSPSF

SEQ ID NO: 44912 - protein, 9 aa, Homo sapiens
  misc_feature: Table A; Target 44912; HLA-B*40:01; MAGEC1; ENSG00000155495; CTA
LQIPVSPSF

SEQ ID NO: 44913 - protein, 9 aa, Homo sapiens
  misc_feature: Table A; Target 44913; HLA-B*40:02; MAGEC1; ENSG00000155495; CTA
LQIPVSPSF

SEQ ID NO: 44914 - protein, 9 aa, Homo sapiens
  misc_feature: Table A; Target 44914; HLA-B*44:02; MAGEC1; ENSG00000155495; CTA
LQIPVSPSF

SEQ ID NO: 44915 - protein, 9 aa, Homo sapiens
  misc_feature: Table A; Target 44915; HLA-B*44:03; MAGEC1; ENSG00000155495; CTA
LQIPVSPSF

SEQ ID NO: 44916 - protein, 9 aa, Homo sapiens
  misc_feature: Table A; Target 44916; HLA-B*46:01; MAGEC1; ENSG00000155495; CTA
LQIPVSPSF

SEQ ID NO: 44917 - protein, 9 aa, Homo sapiens
  misc_feature: Table A; Target 44917; HLA-B*57:01; MAGEC1; ENSG00000155495; CTA
LQIPVSPSF

SEQ ID NO: 44918 - protein, 9 aa, Homo sapiens
  misc_feature: Table A; Target 44918; HLA-B*58:01; MAGEC1; ENSG00000155495; CTA
LQIPVSPSF

SEQ ID NO: 44919 - protein, 9 aa, Homo sapiens
  misc_feature: Table A; Target 44919; HLA-C*02:02; MAGEC1; ENSG00000155495; CTA
LQIPVSPSF

SEQ ID NO: 44920 - protein, 9 aa, Homo sapiens
  misc_feature: Table A; Target 44920; HLA-C*03:03; MAGEC1; ENSG00000155495; CTA
LQIPVSPSF

SEQ ID NO: 44921 - protein, 9 aa, Homo sapiens
  misc_feature: Table A; Target 44921; HLA-C*03:04; MAGEC1; ENSG00000155495; CTA
LQIPVSPSF

SEQ ID NO: 44922 - protein, 9 aa, Homo sapiens
  misc_feature: Table A; Target 44922; HLA-C*07:04; MAGEC1; ENSG00000155495; CTA
LQIPVSPSF

SEQ ID NO: 44923 - protein, 9 aa, Homo sapiens
  misc_feature: Table A; Target 44923; HLA-C*12:03; MAGEC1; ENSG00000155495; CTA
LQIPVSPSF

SEQ ID NO: 44924 - protein, 9 aa, Homo sapiens
  misc_feature: Table A; Target 44924; HLA-C*14:02; MAGEC1; ENSG00000155495; CTA
LQIPVSPSF

SEQ ID NO: 44925 - protein, 9 aa, Homo sapiens
  misc_feature: Table A; Target 44925; HLA-C*16:01; MAGEC1; ENSG00000155495; CTA
LQIPVSPSF

SEQ ID NO: 44926 - protein, 9 aa, Homo sapiens
  misc_feature: Table A; Target 44926; HLA-C*16:04; MAGEC1; ENSG00000155495; CTA
LQIPVSPSF

SEQ ID NO: 44927 - protein, 9 aa, Homo sapiens
  misc_feature: Table A; Target 44927; HLA-A*23:01; MAGEC1; ENSG00000155495; CTA
LQIPVSRSF

SEQ ID NO: 44928 - protein, 9 aa, Homo sapiens
  misc_feature: Table A; Target 44928; HLA-A*24:02; MAGEC1; ENSG00000155495; CTA
LQIPVSRSF

SEQ ID NO: 44929 - protein, 9 aa, Homo sapiens
  misc_feature: Table A; Target 44929; HLA-A*32:01; MAGEC1; ENSG00000155495; CTA
LQIPVSRSF

SEQ ID NO: 44930 - protein, 9 aa, Homo sapiens
  misc_feature: Table A; Target 44930; HLA-B*15:01; MAGEC1; ENSG00000155495; CTA
LQIPVSRSF

SEQ ID NO: 44931 - protein, 9 aa, Homo sapiens
  misc_feature: Table A; Target 44931; HLA-B*15:03; MAGEC1; ENSG00000155495; CTA
LQIPVSRSF

SEQ ID NO: 44932 - protein, 9 aa, Homo sapiens
  misc_feature: Table A; Target 44932; HLA-B*46:01; MAGEC1; ENSG00000155495; CTA
LQIPVSRSF

SEQ ID NO: 44933 - protein, 9 aa, Homo sapiens
  misc_feature: Table A; Target 44933; HLA-B*57:01; MAGEC1; ENSG00000155495; CTA
LQIPVSRSF

SEQ ID NO: 44934 - protein, 9 aa, Homo sapiens
  misc_feature: Table A; Target 44934; HLA-B*58:01; MAGEC1; ENSG00000155495; CTA
LQIPVSRSF

SEQ ID NO: 44935 - protein, 9 aa, Homo sapiens
  misc_feature: Table A; Target 44935; HLA-C*16:01; MAGEC1; ENSG00000155495; CTA
LQIPVSRSF

SEQ ID NO: 44936 - protein, 9 aa, Homo sapiens
  misc_feature: Table A; Target 44936; HLA-C*16:04; MAGEC1; ENSG00000155495; CTA
LQIPVSRSF

SEQ ID NO: 44937 - protein, 9 aa, Homo sapiens
  misc_feature: Table A; Target 44937; HLA-A*23:01; MAGEC1; ENSG00000155495; CTA
LQIPVSSSF

SEQ ID NO: 44938 - protein, 9 aa, Homo sapiens
  misc_feature: Table A; Target 44938; HLA-A*24:02; MAGEC1; ENSG00000155495; CTA
LQIPVSSSF

SEQ ID NO: 44939 - protein, 9 aa, Homo sapiens
  misc_feature: Table A; Target 44939; HLA-A*25:01; MAGEC1; ENSG00000155495; CTA
LQIPVSSSF

SEQ ID NO: 44940 - protein, 9 aa, Homo sapiens
  misc_feature: Table A; Target 44940; HLA-A*26:01; MAGEC1; ENSG00000155495; CTA
LQIPVSSSF

SEQ ID NO: 44941 - protein, 9 aa, Homo sapiens
  misc_feature: Table A; Target 44941; HLA-A*30:02; MAGEC1; ENSG00000155495; CTA
LQIPVSSSF

SEQ ID NO: 44942 - protein, 9 aa, Homo sapiens
  misc_feature: Table A; Target 44942; HLA-A*32:01; MAGEC1; ENSG00000155495; CTA
LQIPVSSSF

SEQ ID NO: 44943 - protein, 9 aa, Homo sapiens
  misc_feature: Table A; Target 44943; HLA-B*15:03; MAGEC1; ENSG00000155495; CTA
LQIPVSSSF

SEQ ID NO: 44944 - protein, 9 aa, Homo sapiens
  misc_feature: Table A; Target 44944; HLA-B*18:01; MAGEC1; ENSG00000155495; CTA
LQIPVSSSF

SEQ ID NO: 44945 - protein, 9 aa, Homo sapiens
  misc_feature: Table A; Target 44945; HLA-B*38:01; MAGEC1; ENSG00000155495; CTA
LQIPVSSSF

SEQ ID NO: 44946 - protein, 9 aa, Homo sapiens
  misc_feature: Table A; Target 44946; HLA-B*46:01; MAGEC1; ENSG00000155495; CTA
LQIPVSSSF

SEQ ID NO: 44947 - protein, 9 aa, Homo sapiens
  misc_feature: Table A; Target 44947; HLA-B*57:01; MAGEC1; ENSG00000155495; CTA
LQIPVSSSF

SEQ ID NO: 44948 - protein, 9 aa, Homo sapiens
  misc_feature: Table A; Target 44948; HLA-B*58:01; MAGEC1; ENSG00000155495; CTA
LQIPVSSSF

SEQ ID NO: 44949 - protein, 9 aa, Homo sapiens
  misc_feature: Table A; Target 44949; HLA-C*02:02; MAGEC1; ENSG00000155495; CTA
LQIPVSSSF

SEQ ID NO: 44950 - protein, 9 aa, Homo sapiens
  misc_feature: Table A; Target 44950; HLA-C*03:03; MAGEC1; ENSG00000155495; CTA
LQIPVSSSF

SEQ ID NO: 44951 - protein, 9 aa, Homo sapiens
  misc_feature: Table A; Target 44951; HLA-C*03:04; MAGEC1; ENSG00000155495; CTA
LQIPVSSSF

SEQ ID NO: 44952 - protein, 9 aa, Homo sapiens
  misc_feature: Table A; Target 44952; HLA-C*07:04; MAGEC1; ENSG00000155495; CTA
LQIPVSSSF

SEQ ID NO: 44953 - protein, 9 aa, Homo sapiens
  misc_feature: Table A; Target 44953; HLA-C*14:02; MAGEC1; ENSG00000155495; CTA
LQIPVSSSF

SEQ ID NO: 44954 - protein, 9 aa, Homo sapiens
  misc_feature: Table A; Target 44954; HLA-C*16:01; MAGEC1; ENSG00000155495; CTA
LQIPVSSSF

SEQ ID NO: 44955 - protein, 9 aa, Homo sapiens
  misc_feature: Table A; Target 44955; HLA-C*16:04; MAGEC1; ENSG00000155495; CTA
LQIPVSSSF

SEQ ID NO: 44956 - protein, 11 aa, Homo sapiens
  misc_feature: Table A; Target 44956; HLA-A*29:02; MAGEC1; ENSG00000155495; CTA
LQIPVSSSFSY

SEQ ID NO: 44957 - protein, 11 aa, Homo sapiens
  misc_feature: Table A; Target 44957; HLA-A*30:02; MAGEC1; ENSG00000155495; CTA
LQIPVSSSFSY

SEQ ID NO: 44958 - protein, 11 aa, Homo sapiens
  misc_feature: Table A; Target 44958; HLA-A*32:01; MAGEC1; ENSG00000155495; CTA
LQIPVSSSFSY

SEQ ID NO: 44959 - protein, 11 aa, Homo sapiens
  misc_feature: Table A; Target 44959; HLA-B*15:01; MAGEC1; ENSG00000155495; CTA
LQIPVSSSFSY

SEQ ID NO: 44960 - protein, 8 aa, Homo sapiens
  misc_feature: Table A; Target 44960; HLA-A*32:01; MAGEC1; ENSG00000155495; CTA
LQNPASSF

SEQ ID NO: 44961 - protein, 8 aa, Homo sapiens
  misc_feature: Table A; Target 44961; HLA-B*15:01; MAGEC1; ENSG00000155495; CTA
LQNPASSF

SEQ ID NO: 44962 - protein, 8 aa, Homo sapiens
  misc_feature: Table A; Target 44962; HLA-B*15:03; MAGEC1; ENSG00000155495; CTA
LQNPASSF

SEQ ID NO: 44963 - protein, 8 aa, Homo sapiens
  misc_feature: Table A; Target 44963; HLA-B*39:01; MAGEC1; ENSG00000155495; CTA
LQNPASSF

SEQ ID NO: 44964 - protein, 8 aa, Homo sapiens
  misc_feature: Table A; Target 44964; HLA-B*46:01; MAGEC1; ENSG00000155495; CTA
LQNPASSF

SEQ ID NO: 44965 - protein, 8 aa, Homo sapiens
  misc_feature: Table A; Target 44965; HLA-C*14:02; MAGEC1; ENSG00000155495; CTA
LQNPASSF

SEQ ID NO: 44966 - protein, 9 aa, Homo sapiens
  misc_feature: Table A; Target 44966; HLA-A*30:02; MAGEC1; ENSG00000155495; CTA
LQNPASSFF

SEQ ID NO: 44967 - protein, 9 aa, Homo sapiens
  misc_feature: Table A; Target 44967; HLA-A*32:01; MAGEC1; ENSG00000155495; CTA
LQNPASSFF

SEQ ID NO: 44968 - protein, 9 aa, Homo sapiens
  misc_feature: Table A; Target 44968; HLA-B*15:01; MAGEC1; ENSG00000155495; CTA
LQNPASSFF

SEQ ID NO: 44969 - protein, 9 aa, Homo sapiens
  misc_feature: Table A; Target 44969; HLA-B*15:03; MAGEC1; ENSG00000155495; CTA
LQNPASSFF

SEQ ID NO: 44970 - protein, 9 aa, Homo sapiens
  misc_feature: Table A; Target 44970; HLA-B*46:01; MAGEC1; ENSG00000155495; CTA
LQNPASSFF

SEQ ID NO: 44971 - protein, 9 aa, Homo sapiens
  misc_feature: Table A; Target 44971; HLA-C*07:04; MAGEC1; ENSG00000155495; CTA
LQNPASSFF

SEQ ID NO: 44972 - protein, 8 aa, Homo sapiens
  misc_feature: Table A; Target 44972; HLA-A*32:01; MAGEC1; ENSG00000155495; CTA
LQRPVSSF

SEQ ID NO: 44973 - protein, 8 aa, Homo sapiens
  misc_feature: Table A; Target 44973; HLA-B*15:01; MAGEC1; ENSG00000155495; CTA
LQRPVSSF

SEQ ID NO: 44974 - protein, 8 aa, Homo sapiens
  misc_feature: Table A; Target 44974; HLA-B*15:03; MAGEC1; ENSG00000155495; CTA
LQRPVSSF

SEQ ID NO: 44975 - protein, 8 aa, Homo sapiens
  misc_feature: Table A; Target 44975; HLA-B*37:01; MAGEC1; ENSG00000155495; CTA
LQRPVSSF

SEQ ID NO: 44976 - protein, 8 aa, Homo sapiens
  misc_feature: Table A; Target 44976; HLA-B*46:01; MAGEC1; ENSG00000155495; CTA
LQRPVSSF

SEQ ID NO: 44977 - protein, 9 aa, Homo sapiens
  misc_feature: Table A; Target 44977; HLA-A*32:01; MAGEC1; ENSG00000155495; CTA
LQRPVSSFF

SEQ ID NO: 44978 - protein, 9 aa, Homo sapiens
  misc_feature: Table A; Target 44978; HLA-B*15:01; MAGEC1; ENSG00000155495; CTA
LQRPVSSFF

SEQ ID NO: 44979 - protein, 9 aa, Homo sapiens
  misc_feature: Table A; Target 44979; HLA-B*15:03; MAGEC1; ENSG00000155495; CTA
LQRPVSSFF

SEQ ID NO: 44980 - protein, 9 aa, Homo sapiens
  misc_feature: Table A; Target 44980; HLA-B*57:01; MAGEC1; ENSG00000155495; CTA
LQRPVSSFF

SEQ ID NO: 44981 - protein, 11 aa, Homo sapiens
  misc_feature: Table A; Target 44981; HLA-A*30:02; MAGEC1; ENSG00000155495; CTA
LQRPVSSFFSY

SEQ ID NO: 44982 - protein, 8 aa, Homo sapiens
  misc_feature: Table A; Target 44982; HLA-A*32:01; MAGEC1; ENSG00000155495; CTA
LQSPVISF

SEQ ID NO: 44983 - protein, 8 aa, Homo sapiens
  misc_feature: Table A; Target 44983; HLA-B*15:01; MAGEC1; ENSG00000155495; CTA
LQSPVISF

SEQ ID NO: 44984 - protein, 8 aa, Homo sapiens
  misc_feature: Table A; Target 44984; HLA-B*37:01; MAGEC1; ENSG00000155495; CTA
LQSPVISF

SEQ ID NO: 44985 - protein, 8 aa, Homo sapiens
  misc_feature: Table A; Target 44985; HLA-C*07:04; MAGEC1; ENSG00000155495; CTA
LQSPVISF

SEQ ID NO: 44986 - protein, 8 aa, Homo sapiens
  misc_feature: Table A; Target 44986; HLA-A*32:01; MAGEC1; ENSG00000155495; CTA
LQSPVSSF

SEQ ID NO: 44987 - protein, 8 aa, Homo sapiens
  misc_feature: Table A; Target 44987; HLA-B*15:01; MAGEC1; ENSG00000155495; CTA
LQSPVSSF

SEQ ID NO: 44988 - protein, 8 aa, Homo sapiens
  misc_feature: Table A; Target 44988; HLA-B*15:03; MAGEC1; ENSG00000155495; CTA
LQSPVSSF

SEQ ID NO: 44989 - protein, 8 aa, Homo sapiens
  misc_feature: Table A; Target 44989; HLA-B*37:01; MAGEC1; ENSG00000155495; CTA
LQSPVSSF

SEQ ID NO: 44990 - protein, 8 aa, Homo sapiens
  misc_feature: Table A; Target 44990; HLA-B*39:01; MAGEC1; ENSG00000155495; CTA
LQSPVSSF

SEQ ID NO: 44991 - protein, 9 aa, Homo sapiens
  misc_feature: Table A; Target 44991; HLA-A*02:07; MAGEC1; ENSG00000155495; CTA
LSPLHFPQF

SEQ ID NO: 44992 - protein, 9 aa, Homo sapiens
  misc_feature: Table A; Target 44992; HLA-A*24:02; MAGEC1; ENSG00000155495; CTA
LSPLHFPQF

SEQ ID NO: 44993 - protein, 10 aa, Homo sapiens
  misc_feature: Table A; Target 44993; HLA-A*25:01; MAGEC1; ENSG00000155495; CTA
LSQSSPVSSF

SEQ ID NO: 44994 - protein, 10 aa, Homo sapiens
  misc_feature: Table A; Target 44994; HLA-A*30:02; MAGEC1; ENSG00000155495; CTA
LSQSSPVSSF

SEQ ID NO: 44995 - protein, 10 aa, Homo sapiens
  misc_feature: Table A; Target 44995; HLA-B*46:01; MAGEC1; ENSG00000155495; CTA
LSQSSPVSSF

SEQ ID NO: 44996 - protein, 10 aa, Homo sapiens
  misc_feature: Table A; Target 44996; HLA-B*58:01; MAGEC1; ENSG00000155495; CTA
LSQSSPVSSF

SEQ ID NO: 44997 - protein, 8 aa, Homo sapiens
  misc_feature: Table A; Target 44997; HLA-C*05:01; MAGEC1; ENSG00000155495; CTA
LTDSESLI

SEQ ID NO: 44998 - protein, 8 aa, Homo sapiens
  misc_feature: Table A; Target 44998; HLA-A*01:01; MAGEC1; ENSG00000155495; CTA
LTNVISRY

SEQ ID NO: 44999 - protein, 8 aa, Homo sapiens
  misc_feature: Table A; Target 44999; HLA-A*30:02; MAGEC1; ENSG00000155495; CTA
LTNVISRY

SEQ ID NO: 45000 - protein, 8 aa, Homo sapiens
  misc_feature: Table A; Target 45000; HLA-A*32:01; MAGEC1; ENSG00000155495; CTA
LTNVISRY

SEQ ID NO: 45001 - protein, 8 aa, Homo sapiens
  misc_feature: Table A; Target 45001; HLA-B*15:01; MAGEC1; ENSG00000155495; CTA
LTNVISRY

SEQ ID NO: 45002 - protein, 8 aa, Homo sapiens
  misc_feature: Table A; Target 45002; HLA-B*46:01; MAGEC1; ENSG00000155495; CTA
LTNVISRY

SEQ ID NO: 45003 - protein, 8 aa, Homo sapiens
  misc_feature: Table A; Target 45003; HLA-B*58:01; MAGEC1; ENSG00000155495; CTA
LTNVISRY

SEQ ID NO: 45004 - protein, 8 aa, Homo sapiens
  misc_feature: Table A; Target 45004; HLA-C*07:01; MAGEC1; ENSG00000155495; CTA
LTNVISRY

SEQ ID NO: 45005 - protein, 8 aa, Homo sapiens
  misc_feature: Table A; Target 45005; HLA-C*12:03; MAGEC1; ENSG00000155495; CTA
LTNVISRY

SEQ ID NO: 45006 - protein, 8 aa, Homo sapiens
  misc_feature: Table A; Target 45006; HLA-C*16:01; MAGEC1; ENSG00000155495; CTA
LTNVISRY

SEQ ID NO: 45007 - protein, 8 aa, Homo sapiens
  misc_feature: Table A; Target 45007; HLA-C*16:02; MAGEC1; ENSG00000155495; CTA
LTNVISRY

SEQ ID NO: 45008 - protein, 10 aa, Homo sapiens
  misc_feature: Table A; Target 45008; HLA-A*23:01; MAGEC1; ENSG00000155495; CTA
MLKNTVPITF

SEQ ID NO: 45009 - protein, 10 aa, Homo sapiens
  misc_feature: Table A; Target 45009; HLA-A*24:02; MAGEC1; ENSG00000155495; CTA
MLKNTVPITF

SEQ ID NO: 45010 - protein, 10 aa, Homo sapiens
  misc_feature: Table A; Target 45010; HLA-B*46:01; MAGEC1; ENSG00000155495; CTA
MLKNTVPITF

SEQ ID NO: 45011 - protein, 10 aa, Homo sapiens
  misc_feature: Table A; Target 45011; HLA-B*57:01; MAGEC1; ENSG00000155495; CTA
MLKNTVPITF

SEQ ID NO: 45012 - protein, 10 aa, Homo sapiens
  misc_feature: Table A; Target 45012; HLA-C*04:01; MAGEC1; ENSG00000155495; CTA
MLKNTVPITF

SEQ ID NO: 45013 - protein, 8 aa, Homo sapiens
  misc_feature: Table A; Target 45013; HLA-A*33:03; MAGEC1; ENSG00000155495; CTA
MLTNVISR

SEQ ID NO: 45014 - protein, 9 aa, Homo sapiens
  misc_feature: Table A; Target 45014; HLA-A*01:01; MAGEC1; ENSG00000155495; CTA
MLTNVISRY

SEQ ID NO: 45015 - protein, 9 aa, Homo sapiens
  misc_feature: Table A; Target 45015; HLA-A*03:01; MAGEC1; ENSG00000155495; CTA
MLTNVISRY

SEQ ID NO: 45016 - protein, 9 aa, Homo sapiens
  misc_feature: Table A; Target 45016; HLA-A*24:02; MAGEC1; ENSG00000155495; CTA
MLTNVISRY

SEQ ID NO: 45017 - protein, 9 aa, Homo sapiens
  misc_feature: Table A; Target 45017; HLA-A*25:01; MAGEC1; ENSG00000155495; CTA
MLTNVISRY

SEQ ID NO: 45018 - protein, 9 aa, Homo sapiens
  misc_feature: Table A; Target 45018; HLA-A*26:01; MAGEC1; ENSG00000155495; CTA
MLTNVISRY

SEQ ID NO: 45019 - protein, 9 aa, Homo sapiens
  misc_feature: Table A; Target 45019; HLA-A*29:02; MAGEC1; ENSG00000155495; CTA
MLTNVISRY

SEQ ID NO: 45020 - protein, 9 aa, Homo sapiens
  misc_feature: Table A; Target 45020; HLA-A*30:02; MAGEC1; ENSG00000155495; CTA
MLTNVISRY

SEQ ID NO: 45021 - protein, 9 aa, Homo sapiens
  misc_feature: Table A; Target 45021; HLA-A*32:01; MAGEC1; ENSG00000155495; CTA
MLTNVISRY

SEQ ID NO: 45022 - protein, 9 aa, Homo sapiens
  misc_feature: Table A; Target 45022; HLA-B*15:01; MAGEC1; ENSG00000155495; CTA
MLTNVISRY

SEQ ID NO: 45023 - protein, 9 aa, Homo sapiens
  misc_feature: Table A; Target 45023; HLA-B*15:03; MAGEC1; ENSG00000155495; CTA
MLTNVISRY

SEQ ID NO: 45024 - protein, 9 aa, Homo sapiens
  misc_feature: Table A; Target 45024; HLA-B*35:01; MAGEC1; ENSG00000155495; CTA
MLTNVISRY

SEQ ID NO: 45025 - protein, 9 aa, Homo sapiens
  misc_feature: Table A; Target 45025; HLA-B*44:02; MAGEC1; ENSG00000155495; CTA
MLTNVISRY

SEQ ID NO: 45026 - protein, 9 aa, Homo sapiens
  misc_feature: Table A; Target 45026; HLA-B*44:03; MAGEC1; ENSG00000155495; CTA
MLTNVISRY

SEQ ID NO: 45027 - protein, 9 aa, Homo sapiens
  misc_feature: Table A; Target 45027; HLA-B*46:01; MAGEC1; ENSG00000155495; CTA
MLTNVISRY

SEQ ID NO: 45028 - protein, 9 aa, Homo sapiens
  misc_feature: Table A; Target 45028; HLA-B*57:01; MAGEC1; ENSG00000155495; CTA
MLTNVISRY

SEQ ID NO: 45029 - protein, 9 aa, Homo sapiens
  misc_feature: Table A; Target 45029; HLA-B*58:01; MAGEC1; ENSG00000155495; CTA
MLTNVISRY

SEQ ID NO: 45030 - protein, 9 aa, Homo sapiens
  misc_feature: Table A; Target 45030; HLA-C*02:02; MAGEC1; ENSG00000155495; CTA
MLTNVISRY

SEQ ID NO: 45031 - protein, 9 aa, Homo sapiens
  misc_feature: Table A; Target 45031; HLA-C*07:04; MAGEC1; ENSG00000155495; CTA
MLTNVISRY

SEQ ID NO: 45032 - protein, 9 aa, Homo sapiens
  misc_feature: Table A; Target 45032; HLA-C*12:03; MAGEC1; ENSG00000155495; CTA
MLTNVISRY

SEQ ID NO: 45033 - protein, 9 aa, Homo sapiens
  misc_feature: Table A; Target 45033; HLA-C*16:01; MAGEC1; ENSG00000155495; CTA
MLTNVISRY

SEQ ID NO: 45034 - protein, 9 aa, Homo sapiens
  misc_feature: Table A; Target 45034; HLA-C*16:02; MAGEC1; ENSG00000155495; CTA
MLTNVISRY

SEQ ID NO: 45035 - protein, 9 aa, Homo sapiens
  misc_feature: Table A; Target 45035; HLA-C*16:04; MAGEC1; ENSG00000155495; CTA
MLTNVISRY

SEQ ID NO: 45036 - protein, 9 aa, Homo sapiens
  misc_feature: Table A; Target 45036; HLA-B*54:01; MAGEC1; ENSG00000155495; CTA
MPSLLQSSS

SEQ ID NO: 45037 - protein, 9 aa, Homo sapiens
  misc_feature: Table A; Target 45037; HLA-B*56:01; MAGEC1; ENSG00000155495; CTA
MPSLLQSSS

SEQ ID NO: 45038 - protein, 9 aa, Homo sapiens
  misc_feature: Table A; Target 45038; HLA-B*08:01; MAGEC1; ENSG00000155495; CTA
MPTAGMPSL

SEQ ID NO: 45039 - protein, 9 aa, Homo sapiens
  misc_feature: Table A; Target 45039; HLA-B*39:01; MAGEC1; ENSG00000155495; CTA
MPTAGMPSL

SEQ ID NO: 45040 - protein, 9 aa, Homo sapiens
  misc_feature: Table A; Target 45040; HLA-B*51:01; MAGEC1; ENSG00000155495; CTA
MPTAGMPSL

SEQ ID NO: 45041 - protein, 9 aa, Homo sapiens
  misc_feature: Table A; Target 45041; HLA-B*54:01; MAGEC1; ENSG00000155495; CTA
MPTAGMPSL

SEQ ID NO: 45042 - protein, 9 aa, Homo sapiens
  misc_feature: Table A; Target 45042; HLA-B*55:01; MAGEC1; ENSG00000155495; CTA
MPTAGMPSL

SEQ ID NO: 45043 - protein, 9 aa, Homo sapiens
  misc_feature: Table A; Target 45043; HLA-B*56:01; MAGEC1; ENSG00000155495; CTA
MPTAGMPSL

SEQ ID NO: 45044 - protein, 9 aa, Homo sapiens
  misc_feature: Table A; Target 45044; HLA-C*03:03; MAGEC1; ENSG00000155495; CTA
MPTAGMPSL

SEQ ID NO: 45045 - protein, 9 aa, Homo sapiens
  misc_feature: Table A; Target 45045; HLA-C*03:04; MAGEC1; ENSG00000155495; CTA
MPTAGMPSL

SEQ ID NO: 45046 - protein, 9 aa, Homo sapiens
  misc_feature: Table A; Target 45046; HLA-C*07:02; MAGEC1; ENSG00000155495; CTA
MPTAGMPSL

SEQ ID NO: 45047 - protein, 9 aa, Homo sapiens
  misc_feature: Table A; Target 45047; HLA-C*07:06; MAGEC1; ENSG00000155495; CTA
MPTAGMPSL

SEQ ID NO: 45048 - protein, 9 aa, Homo sapiens
  misc_feature: Table A; Target 45048; HLA-C*14:02; MAGEC1; ENSG00000155495; CTA
MPTAGMPSL

SEQ ID NO: 45049 - protein, 10 aa, Homo sapiens
  misc_feature: Table A; Target 45049; HLA-B*07:02; MAGEC1; ENSG00000155495; CTA
MPTAGMPSLL

SEQ ID NO: 45050 - protein, 10 aa, Homo sapiens
  misc_feature: Table A; Target 45050; HLA-B*35:01; MAGEC1; ENSG00000155495; CTA
MPTAGMPSLL

SEQ ID NO: 45051 - protein, 10 aa, Homo sapiens
  misc_feature: Table A; Target 45051; HLA-B*35:03; MAGEC1; ENSG00000155495; CTA
MPTAGMPSLL

SEQ ID NO: 45052 - protein, 9 aa, Homo sapiens
  misc_feature: Table A; Target 45052; HLA-C*16:01; MAGEC1; ENSG00000155495; CTA
MSQNRLLIL

SEQ ID NO: 45053 - protein, 10 aa, Homo sapiens
  misc_feature: Table A; Target 45053; HLA-B*54:01; MAGEC1; ENSG00000155495; CTA
NPASSFFSSA

SEQ ID NO: 45054 - protein, 10 aa, Homo sapiens
  misc_feature: Table A; Target 45054; HLA-B*55:01; MAGEC1; ENSG00000155495; CTA
NPASSFFSSA

SEQ ID NO: 45055 - protein, 10 aa, Homo sapiens
  misc_feature: Table A; Target 45055; HLA-B*56:01; MAGEC1; ENSG00000155495; CTA
NPASSFFSSA

SEQ ID NO: 45056 - protein, 11 aa, Homo sapiens
  misc_feature: Table A; Target 45056; HLA-B*07:02; MAGEC1; ENSG00000155495; CTA
NPASSFFSSAL

SEQ ID NO: 45057 - protein, 9 aa, Homo sapiens
  misc_feature: Table A; Target 45057; HLA-A*32:01; MAGEC1; ENSG00000155495; CTA
NSSPPRYEF

SEQ ID NO: 45058 - protein, 9 aa, Homo sapiens
  misc_feature: Table A; Target 45058; HLA-B*57:01; MAGEC1; ENSG00000155495; CTA
NSSPPRYEF

SEQ ID NO: 45059 - protein, 9 aa, Homo sapiens
  misc_feature: Table A; Target 45059; HLA-B*58:01; MAGEC1; ENSG00000155495; CTA
NSSPPRYEF

SEQ ID NO: 45060 - protein, 9 aa, Homo sapiens
  misc_feature: Table A; Target 45060; HLA-C*16:01; MAGEC1; ENSG00000155495; CTA
NSSPPRYEF

SEQ ID NO: 45061 - protein, 11 aa, Homo sapiens
  misc_feature: Table A; Target 45061; HLA-A*01:01; MAGEC1; ENSG00000155495; CTA
NTVPITFPSSY

SEQ ID NO: 45062 - protein, 11 aa, Homo sapiens
  misc_feature: Table A; Target 45062; HLA-A*25:01; MAGEC1; ENSG00000155495; CTA
NTVPITFPSSY

SEQ ID NO: 45063 - protein, 11 aa, Homo sapiens
  misc_feature: Table A; Target 45063; HLA-A*26:01; MAGEC1; ENSG00000155495; CTA
NTVPITFPSSY

SEQ ID NO: 45064 - protein, 11 aa, Homo sapiens
  misc_feature: Table A; Target 45064; HLA-A*29:02; MAGEC1; ENSG00000155495; CTA
NTVPITFPSSY

SEQ ID NO: 45065 - protein, 11 aa, Homo sapiens
  misc_feature: Table A; Target 45065; HLA-A*30:02; MAGEC1; ENSG00000155495; CTA
NTVPITFPSSY

SEQ ID NO: 45066 - protein, 11 aa, Homo sapiens
  misc_feature: Table A; Target 45066; HLA-C*02:02; MAGEC1; ENSG00000155495; CTA
NTVPITFPSSY

SEQ ID NO: 45067 - protein, 9 aa, Homo sapiens
  misc_feature: Table A; Target 45067; HLA-A*25:01; MAGEC1; ENSG00000155495; CTA
NVISRYTGY

SEQ ID NO: 45068 - protein, 9 aa, Homo sapiens
  misc_feature: Table A; Target 45068; HLA-A*26:01; MAGEC1; ENSG00000155495; CTA
NVISRYTGY

SEQ ID NO: 45069 - protein, 9 aa, Homo sapiens
  misc_feature: Table A; Target 45069; HLA-A*29:02; MAGEC1; ENSG00000155495; CTA
NVISRYTGY

SEQ ID NO: 45070 - protein, 9 aa, Homo sapiens
  misc_feature: Table A; Target 45070; HLA-A*30:02; MAGEC1; ENSG00000155495; CTA
NVISRYTGY

SEQ ID NO: 45071 - protein, 9 aa, Homo sapiens
  misc_feature: Table A; Target 45071; HLA-A*32:01; MAGEC1; ENSG00000155495; CTA
NVISRYTGY

SEQ ID NO: 45072 - protein, 9 aa, Homo sapiens
  misc_feature: Table A; Target 45072; HLA-B*46:01; MAGEC1; ENSG00000155495; CTA
NVISRYTGY

SEQ ID NO: 45073 - protein, 9 aa, Homo sapiens
  misc_feature: Table A; Target 45073; HLA-B*40:01; MAGEC1; ENSG00000155495; CTA
PEGPVQSPL

SEQ ID NO: 45074 - protein, 8 aa, Homo sapiens
  misc_feature: Table A; Target 45074; HLA-B*37:01; MAGEC1; ENSG00000155495; CTA
PESAQSAF

SEQ ID NO: 45075 - protein, 8 aa, Homo sapiens
  misc_feature: Table A; Target 45075; HLA-B*18:01; MAGEC1; ENSG00000155495; CTA
PESAQSTF

SEQ ID NO: 45076 - protein, 8 aa, Homo sapiens
  misc_feature: Table A; Target 45076; HLA-B*37:01; MAGEC1; ENSG00000155495; CTA
PESAQSTF

SEQ ID NO: 45077 - protein, 8 aa, Homo sapiens
  misc_feature: Table A; Target 45077; HLA-C*04:01; MAGEC1; ENSG00000155495; CTA
PESAQSTF

SEQ ID NO: 45078 - protein, 9 aa, Homo sapiens
  misc_feature: Table A; Target 45078; HLA-B*15:01; MAGEC1; ENSG00000155495; CTA
PLQNPASSF

SEQ ID NO: 45079 - protein, 9 aa, Homo sapiens
  misc_feature: Table A; Target 45079; HLA-C*14:02; MAGEC1; ENSG00000155495; CTA
PLQNPASSF

SEQ ID NO: 45080 - protein, 9 aa, Homo sapiens
  misc_feature: Table A; Target 45080; HLA-A*24:02; MAGEC1; ENSG00000155495; CTA
PLQRPVSSF

SEQ ID NO: 45081 - protein, 9 aa, Homo sapiens
  misc_feature: Table A; Target 45081; HLA-A*24:02; MAGEC1; ENSG00000155495; CTA
PLQSPVSSF

SEQ ID NO: 45082 - protein, 9 aa, Homo sapiens
  misc_feature: Table A; Target 45082; HLA-B*15:01; MAGEC1; ENSG00000155495; CTA
PLQSPVSSF

SEQ ID NO: 45083 - protein, 11 aa, Homo sapiens
  misc_feature: Table A; Target 45083; HLA-B*39:01; MAGEC1; ENSG00000155495; CTA
PQSPPQGEDSM

SEQ ID NO: 45084 - protein, 8 aa, Homo sapiens
  misc_feature: Table A; Target 45084; HLA-B*07:02; MAGEC1; ENSG00000155495; CTA
PSSYKDAL

SEQ ID NO: 45085 - protein, 8 aa, Homo sapiens
  misc_feature: Table A; Target 45085; HLA-A*30:02; MAGEC1; ENSG00000155495; CTA
PVSSSFSY

SEQ ID NO: 45086 - protein, 10 aa, Homo sapiens
  misc_feature: Table A; Target 45086; HLA-A*01:01; MAGEC1; ENSG00000155495; CTA
QGEDSMSPLY

SEQ ID NO: 45087 - protein, 8 aa, Homo sapiens
  misc_feature: Table A; Target 45087; HLA-C*01:02; MAGEC1; ENSG00000155495; CTA
QIPVSSSF

SEQ ID NO: 45088 - protein, 8 aa, Homo sapiens
  misc_feature: Table A; Target 45088; HLA-C*14:02; MAGEC1; ENSG00000155495; CTA
QIPVSSSF

SEQ ID NO: 45089 - protein, 10 aa, Homo sapiens
  misc_feature: Table A; Target 45089; HLA-A*30:02; MAGEC1; ENSG00000155495; CTA
QIPVSSSFSY

SEQ ID NO: 45090 - protein, 9 aa, Homo sapiens
  misc_feature: Table A; Target 45090; HLA-A*25:01; MAGEC1; ENSG00000155495; CTA
QIVPSLPEW

SEQ ID NO: 45091 - protein, 9 aa, Homo sapiens
  misc_feature: Table A; Target 45091; HLA-B*57:01; MAGEC1; ENSG00000155495; CTA
QIVPSLPEW

SEQ ID NO: 45092 - protein, 9 aa, Homo sapiens
  misc_feature: Table A; Target 45092; HLA-B*58:01; MAGEC1; ENSG00000155495; CTA
QIVPSLPEW

SEQ ID NO: 45093 - protein, 8 aa, Homo sapiens
  misc_feature: Table A; Target 45093; HLA-B*07:02; MAGEC1; ENSG00000155495; CTA
QPITKAEM

SEQ ID NO: 45094 - protein, 8 aa, Homo sapiens
  misc_feature: Table A; Target 45094; HLA-B*08:01; MAGEC1; ENSG00000155495; CTA
QPITKAEM

SEQ ID NO: 45095 - protein, 8 aa, Homo sapiens
  misc_feature: Table A; Target 45095; HLA-B*35:03; MAGEC1; ENSG00000155495; CTA
QPITKAEM

SEQ ID NO: 45096 - protein, 8 aa, Homo sapiens
  misc_feature: Table A; Target 45096; HLA-C*07:02; MAGEC1; ENSG00000155495; CTA
QPITKAEM

SEQ ID NO: 45097 - protein, 9 aa, Homo sapiens
  misc_feature: Table A; Target 45097; HLA-B*07:02; MAGEC1; ENSG00000155495; CTA
QPITKAEML

SEQ ID NO: 45098 - protein, 9 aa, Homo sapiens
  misc_feature: Table A; Target 45098; HLA-B*08:01; MAGEC1; ENSG00000155495; CTA
QPITKAEML

SEQ ID NO: 45099 - protein, 9 aa, Homo sapiens
  misc_feature: Table A; Target 45099; HLA-B*35:01; MAGEC1; ENSG00000155495; CTA
QPITKAEML

SEQ ID NO: 45100 - protein, 9 aa, Homo sapiens
  misc_feature: Table A; Target 45100; HLA-B*35:03; MAGEC1; ENSG00000155495; CTA
QPITKAEML

SEQ ID NO: 45101 - protein, 9 aa, Homo sapiens
  misc_feature: Table A; Target 45101; HLA-B*55:01; MAGEC1; ENSG00000155495; CTA
QPITKAEML

SEQ ID NO: 45102 - protein, 9 aa, Homo sapiens
  misc_feature: Table A; Target 45102; HLA-C*07:02; MAGEC1; ENSG00000155495; CTA
QPITKAEML

SEQ ID NO: 45103 - protein, 11 aa, Homo sapiens
  misc_feature: Table A; Target 45103; HLA-A*25:01; MAGEC1; ENSG00000155495; CTA
QSFSERTQSTF

SEQ ID NO: 45104 - protein, 11 aa, Homo sapiens
  misc_feature: Table A; Target 45104; HLA-A*26:01; MAGEC1; ENSG00000155495; CTA
QSFSERTQSTF

SEQ ID NO: 45105 - protein, 11 aa, Homo sapiens
  misc_feature: Table A; Target 45105; HLA-A*30:02; MAGEC1; ENSG00000155495; CTA
QSFSERTQSTF

SEQ ID NO: 45106 - protein, 11 aa, Homo sapiens
  misc_feature: Table A; Target 45106; HLA-A*32:01; MAGEC1; ENSG00000155495; CTA
QSFSERTQSTF

SEQ ID NO: 45107 - protein, 11 aa, Homo sapiens
  misc_feature: Table A; Target 45107; HLA-B*15:01; MAGEC1; ENSG00000155495; CTA
QSFSERTQSTF

SEQ ID NO: 45108 - protein, 11 aa, Homo sapiens
  misc_feature: Table A; Target 45108; HLA-B*15:03; MAGEC1; ENSG00000155495; CTA
QSFSERTQSTF

SEQ ID NO: 45109 - protein, 11 aa, Homo sapiens
  misc_feature: Table A; Target 45109; HLA-B*46:01; MAGEC1; ENSG00000155495; CTA
QSFSERTQSTF

SEQ ID NO: 45110 - protein, 11 aa, Homo sapiens
  misc_feature: Table A; Target 45110; HLA-B*57:01; MAGEC1; ENSG00000155495; CTA
QSFSERTQSTF

SEQ ID NO: 45111 - protein, 11 aa, Homo sapiens
  misc_feature: Table A; Target 45111; HLA-B*58:01; MAGEC1; ENSG00000155495; CTA
QSFSERTQSTF

SEQ ID NO: 45112 - protein, 11 aa, Homo sapiens
  misc_feature: Table A; Target 45112; HLA-C*02:02; MAGEC1; ENSG00000155495; CTA
QSFSERTQSTF

SEQ ID NO: 45113 - protein, 11 aa, Homo sapiens
  misc_feature: Table A; Target 45113; HLA-C*07:01; MAGEC1; ENSG00000155495; CTA
QSFSERTQSTF

SEQ ID NO: 45114 - protein, 11 aa, Homo sapiens
  misc_feature: Table A; Target 45114; HLA-C*07:04; MAGEC1; ENSG00000155495; CTA
QSFSERTQSTF

SEQ ID NO: 45115 - protein, 11 aa, Homo sapiens
  misc_feature: Table A; Target 45115; HLA-C*12:03; MAGEC1; ENSG00000155495; CTA
QSFSERTQSTF

SEQ ID NO: 45116 - protein, 11 aa, Homo sapiens
  misc_feature: Table A; Target 45116; HLA-C*16:04; MAGEC1; ENSG00000155495; CTA
QSFSERTQSTF

SEQ ID NO: 45117 - protein, 9 aa, Homo sapiens
  misc_feature: Table A; Target 45117; HLA-C*01:02; MAGEC1; ENSG00000155495; CTA
QSPLQGEEF

SEQ ID NO: 45118 - protein, 10 aa, Homo sapiens
  misc_feature: Table A; Target 45118; HLA-A*68:01; MAGEC1; ENSG00000155495; CTA
QSPLQIPVSR

SEQ ID NO: 45119 - protein, 11 aa, Homo sapiens
  misc_feature: Table A; Target 45119; HLA-C*01:02; MAGEC1; ENSG00000155495; CTA
QSPLQNPASSF

SEQ ID NO: 45120 - protein, 9 aa, Homo sapiens
  misc_feature: Table A; Target 45120; HLA-C*01:02; MAGEC1; ENSG00000155495; CTA
QSPQGEDSL

SEQ ID NO: 45121 - protein, 11 aa, Homo sapiens
  misc_feature: Table A; Target 45121; HLA-A*25:01; MAGEC1; ENSG00000155495; CTA
QSSPESAQSAF

SEQ ID NO: 45122 - protein, 11 aa, Homo sapiens
  misc_feature: Table A; Target 45122; HLA-A*30:02; MAGEC1; ENSG00000155495; CTA
QSSPESAQSAF

SEQ ID NO: 45123 - protein, 11 aa, Homo sapiens
  misc_feature: Table A; Target 45123; HLA-A*32:01; MAGEC1; ENSG00000155495; CTA
QSSPESAQSAF

SEQ ID NO: 45124 - protein, 11 aa, Homo sapiens
  misc_feature: Table A; Target 45124; HLA-B*15:01; MAGEC1; ENSG00000155495; CTA
QSSPESAQSAF

SEQ ID NO: 45125 - protein, 11 aa, Homo sapiens
  misc_feature: Table A; Target 45125; HLA-B*39:01; MAGEC1; ENSG00000155495; CTA
QSSPESAQSAF

SEQ ID NO: 45126 - protein, 11 aa, Homo sapiens
  misc_feature: Table A; Target 45126; HLA-B*46:01; MAGEC1; ENSG00000155495; CTA
QSSPESAQSAF

SEQ ID NO: 45127 - protein, 11 aa, Homo sapiens
  misc_feature: Table A; Target 45127; HLA-B*57:01; MAGEC1; ENSG00000155495; CTA
QSSPESAQSAF

SEQ ID NO: 45128 - protein, 11 aa, Homo sapiens
  misc_feature: Table A; Target 45128; HLA-B*58:01; MAGEC1; ENSG00000155495; CTA
QSSPESAQSAF

SEQ ID NO: 45129 - protein, 11 aa, Homo sapiens
  misc_feature: Table A; Target 45129; HLA-C*07:04; MAGEC1; ENSG00000155495; CTA
QSSPESAQSAF

SEQ ID NO: 45130 - protein, 11 aa, Homo sapiens
  misc_feature: Table A; Target 45130; HLA-A*25:01; MAGEC1; ENSG00000155495; CTA
QSSPESAQSTF

SEQ ID NO: 45131 - protein, 11 aa, Homo sapiens
  misc_feature: Table A; Target 45131; HLA-A*30:02; MAGEC1; ENSG00000155495; CTA
QSSPESAQSTF

SEQ ID NO: 45132 - protein, 11 aa, Homo sapiens
  misc_feature: Table A; Target 45132; HLA-A*32:01; MAGEC1; ENSG00000155495; CTA
QSSPESAQSTF

SEQ ID NO: 45133 - protein, 11 aa, Homo sapiens
  misc_feature: Table A; Target 45133; HLA-B*15:01; MAGEC1; ENSG00000155495; CTA
QSSPESAQSTF

SEQ ID NO: 45134 - protein, 11 aa, Homo sapiens
  misc_feature: Table A; Target 45134; HLA-B*57:01; MAGEC1; ENSG00000155495; CTA
QSSPESAQSTF

SEQ ID NO: 45135 - protein, 11 aa, Homo sapiens
  misc_feature: Table A; Target 45135; HLA-B*58:01; MAGEC1; ENSG00000155495; CTA
QSSPESAQSTF

SEQ ID NO: 45136 - protein, 11 aa, Homo sapiens
  misc_feature: Table A; Target 45136; HLA-C*07:04; MAGEC1; ENSG00000155495; CTA
QSSPESAQSTF

SEQ ID NO: 45137 - protein, 11 aa, Homo sapiens
  misc_feature: Table A; Target 45137; HLA-A*01:01; MAGEC1; ENSG00000155495; CTA
QSSPESDDTLY

SEQ ID NO: 45138 - protein, 8 aa, Homo sapiens
  misc_feature: Table A; Target 45138; HLA-A*32:01; MAGEC1; ENSG00000155495; CTA
QSSPVSSF

SEQ ID NO: 45139 - protein, 8 aa, Homo sapiens
  misc_feature: Table A; Target 45139; HLA-B*37:01; MAGEC1; ENSG00000155495; CTA
QSSPVSSF

SEQ ID NO: 45140 - protein, 8 aa, Homo sapiens
  misc_feature: Table A; Target 45140; HLA-A*03:01; MAGEC1; ENSG00000155495; CTA
QVKQPITK

SEQ ID NO: 45141 - protein, 8 aa, Homo sapiens
  misc_feature: Table A; Target 45141; HLA-A*03:02; MAGEC1; ENSG00000155495; CTA
QVKQPITK

SEQ ID NO: 45142 - protein, 8 aa, Homo sapiens
  misc_feature: Table A; Target 45142; HLA-A*31:01; MAGEC1; ENSG00000155495; CTA
QVKQPITK

SEQ ID NO: 45143 - protein, 8 aa, Homo sapiens
  misc_feature: Table A; Target 45143; HLA-A*33:03; MAGEC1; ENSG00000155495; CTA
QVKQPITK

SEQ ID NO: 45144 - protein, 9 aa, Homo sapiens
  misc_feature: Table A; Target 45144; HLA-A*02:03; MAGEC1; ENSG00000155495; CTA
QVKQPITKA

SEQ ID NO: 45145 - protein, 9 aa, Homo sapiens
  misc_feature: Table A; Target 45145; HLA-B*54:01; MAGEC1; ENSG00000155495; CTA
QVKQPITKA

SEQ ID NO: 45146 - protein, 9 aa, Homo sapiens
  misc_feature: Table A; Target 45146; HLA-B*55:01; MAGEC1; ENSG00000155495; CTA
QVKQPITKA

SEQ ID NO: 45147 - protein, 9 aa, Homo sapiens
  misc_feature: Table A; Target 45147; HLA-B*56:01; MAGEC1; ENSG00000155495; CTA
QVKQPITKA

SEQ ID NO: 45148 - protein, 9 aa, Homo sapiens
  misc_feature: Table A; Target 45148; HLA-A*03:01; MAGEC1; ENSG00000155495; CTA
RAHSEVIKR

SEQ ID NO: 45149 - protein, 9 aa, Homo sapiens
  misc_feature: Table A; Target 45149; HLA-A*31:01; MAGEC1; ENSG00000155495; CTA
RAHSEVIKR

SEQ ID NO: 45150 - protein, 9 aa, Homo sapiens
  misc_feature: Table A; Target 45150; HLA-A*33:01; MAGEC1; ENSG00000155495; CTA
RAHSEVIKR

SEQ ID NO: 45151 - protein, 9 aa, Homo sapiens
  misc_feature: Table A; Target 45151; HLA-A*30:02; MAGEC1; ENSG00000155495; CTA
REVDPDDSY

SEQ ID NO: 45152 - protein, 9 aa, Homo sapiens
  misc_feature: Table A; Target 45152; HLA-B*15:03; MAGEC1; ENSG00000155495; CTA
REVDPDDSY

SEQ ID NO: 45153 - protein, 9 aa, Homo sapiens
  misc_feature: Table A; Target 45153; HLA-B*18:01; MAGEC1; ENSG00000155495; CTA
REVDPDDSY

SEQ ID NO: 45154 - protein, 9 aa, Homo sapiens
  misc_feature: Table A; Target 45154; HLA-B*27:02; MAGEC1; ENSG00000155495; CTA
REVDPDDSY

SEQ ID NO: 45155 - protein, 9 aa, Homo sapiens
  misc_feature: Table A; Target 45155; HLA-B*40:01; MAGEC1; ENSG00000155495; CTA
REVDPDDSY

SEQ ID NO: 45156 - protein, 9 aa, Homo sapiens
  misc_feature: Table A; Target 45156; HLA-B*44:02; MAGEC1; ENSG00000155495; CTA
REVDPDDSY

SEQ ID NO: 45157 - protein, 9 aa, Homo sapiens
  misc_feature: Table A; Target 45157; HLA-B*44:03; MAGEC1; ENSG00000155495; CTA
REVDPDDSY

SEQ ID NO: 45158 - protein, 9 aa, Homo sapiens
  misc_feature: Table A; Target 45158; HLA-C*16:04; MAGEC1; ENSG00000155495; CTA
REVDPDDSY

SEQ ID NO: 45159 - protein, 10 aa, Homo sapiens
  misc_feature: Table A; Target 45159; HLA-B*40:01; MAGEC1; ENSG00000155495; CTA
REVDPDDSYV

SEQ ID NO: 45160 - protein, 10 aa, Homo sapiens
  misc_feature: Table A; Target 45160; HLA-B*49:01; MAGEC1; ENSG00000155495; CTA
REVDPDDSYV

SEQ ID NO: 45161 - protein, 11 aa, Homo sapiens
  misc_feature: Table A; Target 45161; HLA-A*23:01; MAGEC1; ENSG00000155495; CTA
REVDPDDSYVF

SEQ ID NO: 45162 - protein, 11 aa, Homo sapiens
  misc_feature: Table A; Target 45162; HLA-A*24:02; MAGEC1; ENSG00000155495; CTA
REVDPDDSYVF

SEQ ID NO: 45163 - protein, 11 aa, Homo sapiens
  misc_feature: Table A; Target 45163; HLA-A*30:01; MAGEC1; ENSG00000155495; CTA
REVDPDDSYVF

SEQ ID NO: 45164 - protein, 11 aa, Homo sapiens
  misc_feature: Table A; Target 45164; HLA-B*40:01; MAGEC1; ENSG00000155495; CTA
REVDPDDSYVF

SEQ ID NO: 45165 - protein, 11 aa, Homo sapiens
  misc_feature: Table A; Target 45165; HLA-B*40:02; MAGEC1; ENSG00000155495; CTA
REVDPDDSYVF

SEQ ID NO: 45166 - protein, 11 aa, Homo sapiens
  misc_feature: Table A; Target 45166; HLA-B*44:02; MAGEC1; ENSG00000155495; CTA
REVDPDDSYVF

SEQ ID NO: 45167 - protein, 11 aa, Homo sapiens
  misc_feature: Table A; Target 45167; HLA-B*44:03; MAGEC1; ENSG00000155495; CTA
REVDPDDSYVF

SEQ ID NO: 45168 - protein, 11 aa, Homo sapiens
  misc_feature: Table A; Target 45168; HLA-B*57:01; MAGEC1; ENSG00000155495; CTA
REVDPDDSYVF

SEQ ID NO: 45169 - protein, 11 aa, Homo sapiens
  misc_feature: Table A; Target 45169; HLA-C*16:04; MAGEC1; ENSG00000155495; CTA
REVDPDDSYVF

SEQ ID NO: 45170 - protein, 11 aa, Homo sapiens
  misc_feature: Table A; Target 45170; HLA-A*30:02; MAGEC1; ENSG00000155495; CTA
REVPNSSPPRY

SEQ ID NO: 45171 - protein, 11 aa, Homo sapiens
  misc_feature: Table A; Target 45171; HLA-B*44:02; MAGEC1; ENSG00000155495; CTA
REVPNSSPPRY

SEQ ID NO: 45172 - protein, 11 aa, Homo sapiens
  misc_feature: Table A; Target 45172; HLA-B*44:03; MAGEC1; ENSG00000155495; CTA
REVPNSSPPRY

SEQ ID NO: 45173 - protein, 9 aa, Homo sapiens
  misc_feature: Table A; Target 45173; HLA-A*02:04; MAGEC1; ENSG00000155495; CTA
RLLILILSI

SEQ ID NO: 45174 - protein, 9 aa, Homo sapiens
  misc_feature: Table A; Target 45174; HLA-A*30:02; MAGEC1; ENSG00000155495; CTA
RPVSSFFSY

SEQ ID NO: 45175 - protein, 9 aa, Homo sapiens
  misc_feature: Table A; Target 45175; HLA-B*35:01; MAGEC1; ENSG00000155495; CTA
RPVSSFFSY

SEQ ID NO: 45176 - protein, 11 aa, Homo sapiens
  misc_feature: Table A; Target 45176; HLA-B*57:01; MAGEC1; ENSG00000155495; CTA
RSFSSTLLSIF

SEQ ID NO: 45177 - protein, 9 aa, Homo sapiens
  misc_feature: Table A; Target 45177; HLA-A*23:01; MAGEC1; ENSG00000155495; CTA
RYTGYFPVI

SEQ ID NO: 45178 - protein, 9 aa, Homo sapiens
  misc_feature: Table A; Target 45178; HLA-A*24:02; MAGEC1; ENSG00000155495; CTA
RYTGYFPVI

SEQ ID NO: 45179 - protein, 10 aa, Homo sapiens
  misc_feature: Table A; Target 45179; HLA-A*24:02; MAGEC1; ENSG00000155495; CTA
RYTGYFPVIF

SEQ ID NO: 45180 - protein, 8 aa, Homo sapiens
  misc_feature: Table A; Target 45180; HLA-C*03:03; MAGEC1; ENSG00000155495; CTA
SAASSSTL

SEQ ID NO: 45181 - protein, 8 aa, Homo sapiens
  misc_feature: Table A; Target 45181; HLA-C*03:04; MAGEC1; ENSG00000155495; CTA
SAASSSTL

SEQ ID NO: 45182 - protein, 8 aa, Homo sapiens
  misc_feature: Table A; Target 45182; HLA-C*05:01; MAGEC1; ENSG00000155495; CTA
SAASSSTL

SEQ ID NO: 45183 - protein, 9 aa, Homo sapiens
  misc_feature: Table A; Target 45183; HLA-C*02:02; MAGEC1; ENSG00000155495; CTA
SAASSSTLV

SEQ ID NO: 45184 - protein, 9 aa, Homo sapiens
  misc_feature: Table A; Target 45184; HLA-C*01:02; MAGEC1; ENSG00000155495; CTA
SAPEGEDSL

SEQ ID NO: 45185 - protein, 9 aa, Homo sapiens
  misc_feature: Table A; Target 45185; HLA-C*05:01; MAGEC1; ENSG00000155495; CTA
SAPEGEDSL

SEQ ID NO: 45186 - protein, 9 aa, Homo sapiens
  misc_feature: Table A; Target 45186; HLA-C*05:01; MAGEC1; ENSG00000155495; CTA
SAQSAFEGF

SEQ ID NO: 45187 - protein, 9 aa, Homo sapiens
  misc_feature: Table A; Target 45187; HLA-A*30:02; MAGEC1; ENSG00000155495; CTA
SAQSTFEGF

SEQ ID NO: 45188 - protein, 11 aa, Homo sapiens
  misc_feature: Table A; Target 45188; HLA-A*30:02; MAGEC1; ENSG00000155495; CTA
SEESSSPVDEY

SEQ ID NO: 45189 - protein, 11 aa, Homo sapiens
  misc_feature: Table A; Target 45189; HLA-B*44:03; MAGEC1; ENSG00000155495; CTA
SEESSSPVDEY

SEQ ID NO: 45190 - protein, 9 aa, Homo sapiens
  misc_feature: Table A; Target 45190; HLA-B*40:01; MAGEC1; ENSG00000155495; CTA
SEEVIWDVL

SEQ ID NO: 45191 - protein, 10 aa, Homo sapiens
  misc_feature: Table A; Target 45191; HLA-B*40:01; MAGEC1; ENSG00000155495; CTA
SEGEDSSDPL

SEQ ID NO: 45192 - protein, 9 aa, Homo sapiens
  misc_feature: Table A; Target 45192; HLA-A*30:01; MAGEC1; ENSG00000155495; CTA
SEPLFTYTL

SEQ ID NO: 45193 - protein, 9 aa, Homo sapiens
  misc_feature: Table A; Target 45193; HLA-B*18:01; MAGEC1; ENSG00000155495; CTA
SEPLFTYTL

SEQ ID NO: 45194 - protein, 9 aa, Homo sapiens
  misc_feature: Table A; Target 45194; HLA-B*37:01; MAGEC1; ENSG00000155495; CTA
SEPLFTYTL

SEQ ID NO: 45195 - protein, 9 aa, Homo sapiens
  misc_feature: Table A; Target 45195; HLA-B*40:01; MAGEC1; ENSG00000155495; CTA
SEPLFTYTL

SEQ ID NO: 45196 - protein, 9 aa, Homo sapiens
  misc_feature: Table A; Target 45196; HLA-B*40:02; MAGEC1; ENSG00000155495; CTA
SEPLFTYTL

SEQ ID NO: 45197 - protein, 9 aa, Homo sapiens
  misc_feature: Table A; Target 45197; HLA-B*44:02; MAGEC1; ENSG00000155495; CTA
SEPLFTYTL

SEQ ID NO: 45198 - protein, 9 aa, Homo sapiens
  misc_feature: Table A; Target 45198; HLA-B*44:03; MAGEC1; ENSG00000155495; CTA
SEPLFTYTL

SEQ ID NO: 45199 - protein, 9 aa, Homo sapiens
  misc_feature: Table A; Target 45199; HLA-B*49:01; MAGEC1; ENSG00000155495; CTA
SEPLFTYTL

SEQ ID NO: 45200 - protein, 8 aa, Homo sapiens
  misc_feature: Table A; Target 45200; HLA-B*15:03; MAGEC1; ENSG00000155495; CTA
SERTQSTF

SEQ ID NO: 45201 - protein, 8 aa, Homo sapiens
  misc_feature: Table A; Target 45201; HLA-B*18:01; MAGEC1; ENSG00000155495; CTA
SERTQSTF

SEQ ID NO: 45202 - protein, 8 aa, Homo sapiens
  misc_feature: Table A; Target 45202; HLA-B*37:01; MAGEC1; ENSG00000155495; CTA
SERTQSTF

SEQ ID NO: 45203 - protein, 8 aa, Homo sapiens
  misc_feature: Table A; Target 45203; HLA-B*40:02; MAGEC1; ENSG00000155495; CTA
SERTQSTF

SEQ ID NO: 45204 - protein, 11 aa, Homo sapiens
  misc_feature: Table A; Target 45204; HLA-B*37:01; MAGEC1; ENSG00000155495; CTA
SERTQSTFEGF

SEQ ID NO: 45205 - protein, 11 aa, Homo sapiens
  misc_feature: Table A; Target 45205; HLA-B*44:02; MAGEC1; ENSG00000155495; CTA
SERTQSTFEGF

SEQ ID NO: 45206 - protein, 11 aa, Homo sapiens
  misc_feature: Table A; Target 45206; HLA-B*44:03; MAGEC1; ENSG00000155495; CTA
SERTQSTFEGF

SEQ ID NO: 45207 - protein, 10 aa, Homo sapiens
  misc_feature: Table A; Target 45207; HLA-B*40:01; MAGEC1; ENSG00000155495; CTA
SESLIESEPL

SEQ ID NO: 45208 - protein, 11 aa, Homo sapiens
  misc_feature: Table A; Target 45208; HLA-B*44:02; MAGEC1; ENSG00000155495; CTA
SESLIESEPLF

SEQ ID NO: 45209 - protein, 9 aa, Homo sapiens
  misc_feature: Table A; Target 45209; HLA-C*01:02; MAGEC1; ENSG00000155495; CTA
SFPESSQSP

SEQ ID NO: 45210 - protein, 10 aa, Homo sapiens
  misc_feature: Table A; Target 45210; HLA-A*23:01; MAGEC1; ENSG00000155495; CTA
SFSERTQSTF

SEQ ID NO: 45211 - protein, 10 aa, Homo sapiens
  misc_feature: Table A; Target 45211; HLA-A*24:02; MAGEC1; ENSG00000155495; CTA
SFSERTQSTF

SEQ ID NO: 45212 - protein, 10 aa, Homo sapiens
  misc_feature: Table A; Target 45212; HLA-C*14:02; MAGEC1; ENSG00000155495; CTA
SFSERTQSTF

SEQ ID NO: 45213 - protein, 8 aa, Homo sapiens
  misc_feature: Table A; Target 45213; HLA-C*14:02; MAGEC1; ENSG00000155495; CTA
SFSSSTSL

SEQ ID NO: 45214 - protein, 9 aa, Homo sapiens
  misc_feature: Table A; Target 45214; HLA-C*01:02; MAGEC1; ENSG00000155495; CTA
SFSSTLLSL

SEQ ID NO: 45215 - protein, 9 aa, Homo sapiens
  misc_feature: Table A; Target 45215; HLA-C*14:02; MAGEC1; ENSG00000155495; CTA
SFSSTLLSL

SEQ ID NO: 45216 - protein, 9 aa, Homo sapiens
  misc_feature: Table A; Target 45216; HLA-A*23:01; MAGEC1; ENSG00000155495; CTA
SFSSTLVSL

SEQ ID NO: 45217 - protein, 9 aa, Homo sapiens
  misc_feature: Table A; Target 45217; HLA-C*01:02; MAGEC1; ENSG00000155495; CTA
SFSSTLVSL

SEQ ID NO: 45218 - protein, 9 aa, Homo sapiens
  misc_feature: Table A; Target 45218; HLA-C*14:02; MAGEC1; ENSG00000155495; CTA
SFSSTLVSL

SEQ ID NO: 45219 - protein, 9 aa, Homo sapiens
  misc_feature: Table A; Target 45219; HLA-C*14:02; MAGEC1; ENSG00000155495; CTA
SFSYTLLSL

SEQ ID NO: 45220 - protein, 9 aa, Homo sapiens
  misc_feature: Table A; Target 45220; HLA-A*31:01; MAGEC1; ENSG00000155495; CTA
SGIGVRAGR

SEQ ID NO: 45221 - protein, 9 aa, Homo sapiens
  misc_feature: Table A; Target 45221; HLA-B*07:02; MAGEC1; ENSG00000155495; CTA
SICSSSTSL

SEQ ID NO: 45222 - protein, 9 aa, Homo sapiens
  misc_feature: Table A; Target 45222; HLA-C*01:02; MAGEC1; ENSG00000155495; CTA
SICSSSTSL

SEQ ID NO: 45223 - protein, 9 aa, Homo sapiens
  misc_feature: Table A; Target 45223; HLA-C*14:02; MAGEC1; ENSG00000155495; CTA
SICSSSTSL

SEQ ID NO: 45224 - protein, 9 aa, Homo sapiens
  misc_feature: Table A; Target 45224; HLA-A*03:01; MAGEC1; ENSG00000155495; CTA
SIFQSSPER

SEQ ID NO: 45225 - protein, 9 aa, Homo sapiens
  misc_feature: Table A; Target 45225; HLA-A*03:02; MAGEC1; ENSG00000155495; CTA
SIFQSSPER

SEQ ID NO: 45226 - protein, 9 aa, Homo sapiens
  misc_feature: Table A; Target 45226; HLA-A*11:01; MAGEC1; ENSG00000155495; CTA
SIFQSSPER

SEQ ID NO: 45227 - protein, 9 aa, Homo sapiens
  misc_feature: Table A; Target 45227; HLA-A*31:01; MAGEC1; ENSG00000155495; CTA
SIFQSSPER

SEQ ID NO: 45228 - protein, 9 aa, Homo sapiens
  misc_feature: Table A; Target 45228; HLA-A*68:01; MAGEC1; ENSG00000155495; CTA
SIFQSSPER

SEQ ID NO: 45229 - protein, 9 aa, Homo sapiens
  misc_feature: Table A; Target 45229; HLA-C*07:06; MAGEC1; ENSG00000155495; CTA
SIFQSSPER

SEQ ID NO: 45230 - protein, 10 aa, Homo sapiens
  misc_feature: Table A; Target 45230; HLA-A*02:03; MAGEC1; ENSG00000155495; CTA
SIFQSSPESA

SEQ ID NO: 45231 - protein, 9 aa, Homo sapiens
  misc_feature: Table A; Target 45231; HLA-A*26:01; MAGEC1; ENSG00000155495; CTA
SIIFIKGTY

SEQ ID NO: 45232 - protein, 9 aa, Homo sapiens
  misc_feature: Table A; Target 45232; HLA-A*29:02; MAGEC1; ENSG00000155495; CTA
SIIFIKGTY

SEQ ID NO: 45233 - protein, 9 aa, Homo sapiens
  misc_feature: Table A; Target 45233; HLA-A*30:02; MAGEC1; ENSG00000155495; CTA
SIIFIKGTY

SEQ ID NO: 45234 - protein, 9 aa, Homo sapiens
  misc_feature: Table A; Target 45234; HLA-A*32:01; MAGEC1; ENSG00000155495; CTA
SIIFIKGTY

SEQ ID NO: 45235 - protein, 9 aa, Homo sapiens
  misc_feature: Table A; Target 45235; HLA-B*15:01; MAGEC1; ENSG00000155495; CTA
SIIFIKGTY

SEQ ID NO: 45236 - protein, 9 aa, Homo sapiens
  misc_feature: Table A; Target 45236; HLA-B*46:01; MAGEC1; ENSG00000155495; CTA
SIIFIKGTY

SEQ ID NO: 45237 - protein, 10 aa, Homo sapiens
  misc_feature: Table A; Target 45237; HLA-A*02:03; MAGEC1; ENSG00000155495; CTA
SIIFIKGTYA

SEQ ID NO: 45238 - protein, 9 aa, Homo sapiens
  misc_feature: Table A; Target 45238; HLA-A*02:03; MAGEC1; ENSG00000155495; CTA
SLFQSFSER

SEQ ID NO: 45239 - protein, 9 aa, Homo sapiens
  misc_feature: Table A; Target 45239; HLA-A*03:01; MAGEC1; ENSG00000155495; CTA
SLFQSFSER

SEQ ID NO: 45240 - protein, 9 aa, Homo sapiens
  misc_feature: Table A; Target 45240; HLA-A*31:01; MAGEC1; ENSG00000155495; CTA
SLFQSFSER

SEQ ID NO: 45241 - protein, 9 aa, Homo sapiens
  misc_feature: Table A; Target 45241; HLA-A*33:01; MAGEC1; ENSG00000155495; CTA
SLFQSFSER

SEQ ID NO: 45242 - protein, 9 aa, Homo sapiens
  misc_feature: Table A; Target 45242; HLA-A*33:03; MAGEC1; ENSG00000155495; CTA
SLFQSFSER

SEQ ID NO: 45243 - protein, 9 aa, Homo sapiens
  misc_feature: Table A; Target 45243; HLA-A*68:01; MAGEC1; ENSG00000155495; CTA
SLFQSFSER

SEQ ID NO: 45244 - protein, 9 aa, Homo sapiens
  misc_feature: Table A; Target 45244; HLA-C*07:06; MAGEC1; ENSG00000155495; CTA
SLFQSFSER

SEQ ID NO: 45245 - protein, 9 aa, Homo sapiens
  misc_feature: Table A; Target 45245; HLA-A*02:01; MAGEC1; ENSG00000155495; CTA
SLFQSSPEC

SEQ ID NO: 45246 - protein, 9 aa, Homo sapiens
  misc_feature: Table A; Target 45246; HLA-A*02:01; MAGEC1; ENSG00000155495; CTA
SLIESEPLF

SEQ ID NO: 45247 - protein, 9 aa, Homo sapiens
  misc_feature: Table A; Target 45247; HLA-A*02:04; MAGEC1; ENSG00000155495; CTA
SLIESEPLF

SEQ ID NO: 45248 - protein, 9 aa, Homo sapiens
  misc_feature: Table A; Target 45248; HLA-A*02:07; MAGEC1; ENSG00000155495; CTA
SLIESEPLF

SEQ ID NO: 45249 - protein, 9 aa, Homo sapiens
  misc_feature: Table A; Target 45249; HLA-A*23:01; MAGEC1; ENSG00000155495; CTA
SLIESEPLF

SEQ ID NO: 45250 - protein, 9 aa, Homo sapiens
  misc_feature: Table A; Target 45250; HLA-A*24:02; MAGEC1; ENSG00000155495; CTA
SLIESEPLF

SEQ ID NO: 45251 - protein, 9 aa, Homo sapiens
  misc_feature: Table A; Target 45251; HLA-A*26:01; MAGEC1; ENSG00000155495; CTA
SLIESEPLF

SEQ ID NO: 45252 - protein, 9 aa, Homo sapiens
  misc_feature: Table A; Target 45252; HLA-A*32:01; MAGEC1; ENSG00000155495; CTA
SLIESEPLF

SEQ ID NO: 45253 - protein, 9 aa, Homo sapiens
  misc_feature: Table A; Target 45253; HLA-B*15:01; MAGEC1; ENSG00000155495; CTA
SLIESEPLF

SEQ ID NO: 45254 - protein, 9 aa, Homo sapiens
  misc_feature: Table A; Target 45254; HLA-B*15:03; MAGEC1; ENSG00000155495; CTA
SLIESEPLF

SEQ ID NO: 45255 - protein, 9 aa, Homo sapiens
  misc_feature: Table A; Target 45255; HLA-B*38:01; MAGEC1; ENSG00000155495; CTA
SLIESEPLF

SEQ ID NO: 45256 - protein, 9 aa, Homo sapiens
  misc_feature: Table A; Target 45256; HLA-B*55:01; MAGEC1; ENSG00000155495; CTA
SLIESEPLF

SEQ ID NO: 45257 - protein, 11 aa, Homo sapiens
  misc_feature: Table A; Target 45257; HLA-A*25:01; MAGEC1; ENSG00000155495; CTA
SLIESEPLFTY

SEQ ID NO: 45258 - protein, 11 aa, Homo sapiens
  misc_feature: Table A; Target 45258; HLA-A*26:01; MAGEC1; ENSG00000155495; CTA
SLIESEPLFTY

SEQ ID NO: 45259 - protein, 11 aa, Homo sapiens
  misc_feature: Table A; Target 45259; HLA-A*29:02; MAGEC1; ENSG00000155495; CTA
SLIESEPLFTY

SEQ ID NO: 45260 - protein, 11 aa, Homo sapiens
  misc_feature: Table A; Target 45260; HLA-A*30:02; MAGEC1; ENSG00000155495; CTA
SLIESEPLFTY

SEQ ID NO: 45261 - protein, 9 aa, Homo sapiens
  misc_feature: Table A; Target 45261; HLA-A*02:07; MAGEC1; ENSG00000155495; CTA
SLPEWEDSL

SEQ ID NO: 45262 - protein, 10 aa, Homo sapiens
  misc_feature: Table A; Target 45262; HLA-A*30:02; MAGEC1; ENSG00000155495; CTA
SLQIPVSPSF

SEQ ID NO: 45263 - protein, 11 aa, Homo sapiens
  misc_feature: Table A; Target 45263; HLA-A*30:02; MAGEC1; ENSG00000155495; CTA
SLREVDPDDSY

SEQ ID NO: 45264 - protein, 11 aa, Homo sapiens
  misc_feature: Table A; Target 45264; HLA-B*15:01; MAGEC1; ENSG00000155495; CTA
SLREVDPDDSY

SEQ ID NO: 45265 - protein, 11 aa, Homo sapiens
  misc_feature: Table A; Target 45265; HLA-B*46:01; MAGEC1; ENSG00000155495; CTA
SLREVDPDDSY

SEQ ID NO: 45266 - protein, 8 aa, Homo sapiens
  misc_feature: Table A; Target 45266; HLA-B*37:01; MAGEC1; ENSG00000155495; CTA
SLSLPQSF

SEQ ID NO: 45267 - protein, 11 aa, Homo sapiens
  misc_feature: Table A; Target 45267; HLA-A*25:01; MAGEC1; ENSG00000155495; CTA
SLSQSSPVSSF

SEQ ID NO: 45268 - protein, 11 aa, Homo sapiens
  misc_feature: Table A; Target 45268; HLA-B*15:01; MAGEC1; ENSG00000155495; CTA
SLSQSSPVSSF

SEQ ID NO: 45269 - protein, 9 aa, Homo sapiens
  misc_feature: Table A; Target 45269; HLA-A*02:01; MAGEC1; ENSG00000155495; CTA
SLTDSESLI

SEQ ID NO: 45270 - protein, 9 aa, Homo sapiens
  misc_feature: Table A; Target 45270; HLA-B*13:02; MAGEC1; ENSG00000155495; CTA
SLTDSESLI

SEQ ID NO: 45271 - protein, 11 aa, Homo sapiens
  misc_feature: Table A; Target 45271; HLA-B*35:03; MAGEC1; ENSG00000155495; CTA
SPEGDDTQSPL

SEQ ID NO: 45272 - protein, 8 aa, Homo sapiens
  misc_feature: Table A; Target 45272; HLA-B*07:02; MAGEC1; ENSG00000155495; CTA
SPEGKDSL

SEQ ID NO: 45273 - protein, 8 aa, Homo sapiens
  misc_feature: Table A; Target 45273; HLA-C*07:02; MAGEC1; ENSG00000155495; CTA
SPEGKDSL

SEQ ID NO: 45274 - protein, 11 aa, Homo sapiens
  misc_feature: Table A; Target 45274; HLA-B*07:02; MAGEC1; ENSG00000155495; CTA
SPEGKDSLSPL

SEQ ID NO: 45275 - protein, 9 aa, Homo sapiens
  misc_feature: Table A; Target 45275; HLA-B*07:02; MAGEC1; ENSG00000155495; CTA
SPESAQSAF

SEQ ID NO: 45276 - protein, 9 aa, Homo sapiens
  misc_feature: Table A; Target 45276; HLA-B*15:03; MAGEC1; ENSG00000155495; CTA
SPESAQSAF

SEQ ID NO: 45277 - protein, 9 aa, Homo sapiens
  misc_feature: Table A; Target 45277; HLA-B*35:01; MAGEC1; ENSG00000155495; CTA
SPESAQSAF

SEQ ID NO: 45278 - protein, 9 aa, Homo sapiens
  misc_feature: Table A; Target 45278; HLA-B*35:03; MAGEC1; ENSG00000155495; CTA
SPESAQSAF

SEQ ID NO: 45279 - protein, 9 aa, Homo sapiens
  misc_feature: Table A; Target 45279; HLA-B*55:01; MAGEC1; ENSG00000155495; CTA
SPESAQSAF

SEQ ID NO: 45280 - protein, 9 aa, Homo sapiens
  misc_feature: Table A; Target 45280; HLA-C*01:02; MAGEC1; ENSG00000155495; CTA
SPESAQSAF

SEQ ID NO: 45281 - protein, 9 aa, Homo sapiens
  misc_feature: Table A; Target 45281; HLA-C*03:03; MAGEC1; ENSG00000155495; CTA
SPESAQSAF

SEQ ID NO: 45282 - protein, 9 aa, Homo sapiens
  misc_feature: Table A; Target 45282; HLA-C*05:01; MAGEC1; ENSG00000155495; CTA
SPESAQSAF

SEQ ID NO: 45283 - protein, 9 aa, Homo sapiens
  misc_feature: Table A; Target 45283; HLA-C*07:02; MAGEC1; ENSG00000155495; CTA
SPESAQSAF

SEQ ID NO: 45284 - protein, 9 aa, Homo sapiens
  misc_feature: Table A; Target 45284; HLA-C*07:06; MAGEC1; ENSG00000155495; CTA
SPESAQSAF

SEQ ID NO: 45285 - protein, 9 aa, Homo sapiens
  misc_feature: Table A; Target 45285; HLA-B*07:02; MAGEC1; ENSG00000155495; CTA
SPESAQSTF

SEQ ID NO: 45286 - protein, 9 aa, Homo sapiens
  misc_feature: Table A; Target 45286; HLA-B*35:01; MAGEC1; ENSG00000155495; CTA
SPESAQSTF

SEQ ID NO: 45287 - protein, 9 aa, Homo sapiens
  misc_feature: Table A; Target 45287; HLA-B*35:03; MAGEC1; ENSG00000155495; CTA
SPESAQSTF

SEQ ID NO: 45288 - protein, 9 aa, Homo sapiens
  misc_feature: Table A; Target 45288; HLA-B*38:01; MAGEC1; ENSG00000155495; CTA
SPESAQSTF

SEQ ID NO: 45289 - protein, 9 aa, Homo sapiens
  misc_feature: Table A; Target 45289; HLA-B*55:01; MAGEC1; ENSG00000155495; CTA
SPESAQSTF

SEQ ID NO: 45290 - protein, 9 aa, Homo sapiens
  misc_feature: Table A; Target 45290; HLA-C*03:03; MAGEC1; ENSG00000155495; CTA
SPESAQSTF

SEQ ID NO: 45291 - protein, 9 aa, Homo sapiens
  misc_feature: Table A; Target 45291; HLA-C*05:01; MAGEC1; ENSG00000155495; CTA
SPESAQSTF

SEQ ID NO: 45292 - protein, 9 aa, Homo sapiens
  misc_feature: Table A; Target 45292; HLA-C*07:02; MAGEC1; ENSG00000155495; CTA
SPESAQSTF

SEQ ID NO: 45293 - protein, 9 aa, Homo sapiens
  misc_feature: Table A; Target 45293; HLA-C*07:06; MAGEC1; ENSG00000155495; CTA
SPESAQSTF

SEQ ID NO: 45294 - protein, 9 aa, Homo sapiens
  misc_feature: Table A; Target 45294; HLA-B*35:01; MAGEC1; ENSG00000155495; CTA
SPESDDTLY

SEQ ID NO: 45295 - protein, 9 aa, Homo sapiens
  misc_feature: Table A; Target 45295; HLA-B*55:01; MAGEC1; ENSG00000155495; CTA
SPESDDTLY

SEQ ID NO: 45296 - protein, 9 aa, Homo sapiens
  misc_feature: Table A; Target 45296; HLA-C*03:03; MAGEC1; ENSG00000155495; CTA
SPESDDTLY

SEQ ID NO: 45297 - protein, 11 aa, Homo sapiens
  misc_feature: Table A; Target 45297; HLA-B*35:03; MAGEC1; ENSG00000155495; CTA
SPESDDTLYPL

SEQ ID NO: 45298 - protein, 9 aa, Homo sapiens
  misc_feature: Table A; Target 45298; HLA-B*56:01; MAGEC1; ENSG00000155495; CTA
SPESPLQSP

SEQ ID NO: 45299 - protein, 11 aa, Homo sapiens
  misc_feature: Table A; Target 45299; HLA-B*35:03; MAGEC1; ENSG00000155495; CTA
SPESPLQSPVI

SEQ ID NO: 45300 - protein, 10 aa, Homo sapiens
  misc_feature: Table A; Target 45300; HLA-B*56:01; MAGEC1; ENSG00000155495; CTA
SPFEGFPQSP

SEQ ID NO: 45301 - protein, 11 aa, Homo sapiens
  misc_feature: Table A; Target 45301; HLA-B*07:02; MAGEC1; ENSG00000155495; CTA
SPFEGFPQSPL

SEQ ID NO: 45302 - protein, 11 aa, Homo sapiens
  misc_feature: Table A; Target 45302; HLA-B*56:01; MAGEC1; ENSG00000155495; CTA
SPFEGFPQSPL

SEQ ID NO: 45303 - protein, 10 aa, Homo sapiens
  misc_feature: Table A; Target 45303; HLA-A*02:03; MAGEC1; ENSG00000155495; CTA
SPFEGFPQSV

SEQ ID NO: 45304 - protein, 10 aa, Homo sapiens
  misc_feature: Table A; Target 45304; HLA-B*07:02; MAGEC1; ENSG00000155495; CTA
SPFEGFPQSV

SEQ ID NO: 45305 - protein, 10 aa, Homo sapiens
  misc_feature: Table A; Target 45305; HLA-B*35:03; MAGEC1; ENSG00000155495; CTA
SPFEGFPQSV

SEQ ID NO: 45306 - protein, 10 aa, Homo sapiens
  misc_feature: Table A; Target 45306; HLA-B*51:01; MAGEC1; ENSG00000155495; CTA
SPFEGFPQSV

SEQ ID NO: 45307 - protein, 10 aa, Homo sapiens
  misc_feature: Table A; Target 45307; HLA-B*54:01; MAGEC1; ENSG00000155495; CTA
SPFEGFPQSV

SEQ ID NO: 45308 - protein, 10 aa, Homo sapiens
  misc_feature: Table A; Target 45308; HLA-B*55:01; MAGEC1; ENSG00000155495; CTA
SPFEGFPQSV

SEQ ID NO: 45309 - protein, 10 aa, Homo sapiens
  misc_feature: Table A; Target 45309; HLA-B*56:01; MAGEC1; ENSG00000155495; CTA
SPFEGFPQSV

SEQ ID NO: 45310 - protein, 10 aa, Homo sapiens
  misc_feature: Table A; Target 45310; HLA-C*02:02; MAGEC1; ENSG00000155495; CTA
SPFEGFPQSV

SEQ ID NO: 45311 - protein, 10 aa, Homo sapiens
  misc_feature: Table A; Target 45311; HLA-C*07:02; MAGEC1; ENSG00000155495; CTA
SPFEGFPQSV

SEQ ID NO: 45312 - protein, 11 aa, Homo sapiens
  misc_feature: Table A; Target 45312; HLA-B*07:02; MAGEC1; ENSG00000155495; CTA
SPFEGFPQSVL

SEQ ID NO: 45313 - protein, 11 aa, Homo sapiens
  misc_feature: Table A; Target 45313; HLA-B*35:01; MAGEC1; ENSG00000155495; CTA
SPFEGFPQSVL

SEQ ID NO: 45314 - protein, 11 aa, Homo sapiens
  misc_feature: Table A; Target 45314; HLA-B*35:03; MAGEC1; ENSG00000155495; CTA
SPFEGFPQSVL

SEQ ID NO: 45315 - protein, 11 aa, Homo sapiens
  misc_feature: Table A; Target 45315; HLA-B*56:01; MAGEC1; ENSG00000155495; CTA
SPFEGFPQSVL

SEQ ID NO: 45316 - protein, 11 aa, Homo sapiens
  misc_feature: Table A; Target 45316; HLA-C*07:02; MAGEC1; ENSG00000155495; CTA
SPFSEESSSPV

SEQ ID NO: 45317 - protein, 9 aa, Homo sapiens
  misc_feature: Table A; Target 45317; HLA-B*07:02; MAGEC1; ENSG00000155495; CTA
SPLEGEDSL

SEQ ID NO: 45318 - protein, 9 aa, Homo sapiens
  misc_feature: Table A; Target 45318; HLA-B*35:01; MAGEC1; ENSG00000155495; CTA
SPLEGEDSL

SEQ ID NO: 45319 - protein, 9 aa, Homo sapiens
  misc_feature: Table A; Target 45319; HLA-B*35:03; MAGEC1; ENSG00000155495; CTA
SPLEGEDSL

SEQ ID NO: 45320 - protein, 9 aa, Homo sapiens
  misc_feature: Table A; Target 45320; HLA-B*39:01; MAGEC1; ENSG00000155495; CTA
SPLEGEDSL

SEQ ID NO: 45321 - protein, 9 aa, Homo sapiens
  misc_feature: Table A; Target 45321; HLA-B*55:01; MAGEC1; ENSG00000155495; CTA
SPLEGEDSL

SEQ ID NO: 45322 - protein, 9 aa, Homo sapiens
  misc_feature: Table A; Target 45322; HLA-C*03:03; MAGEC1; ENSG00000155495; CTA
SPLEGEDSL

SEQ ID NO: 45323 - protein, 9 aa, Homo sapiens
  misc_feature: Table A; Target 45323; HLA-C*07:02; MAGEC1; ENSG00000155495; CTA
SPLEGEDSL

SEQ ID NO: 45324 - protein, 9 aa, Homo sapiens
  misc_feature: Table A; Target 45324; HLA-B*56:01; MAGEC1; ENSG00000155495; CTA
SPLEISQSP

SEQ ID NO: 45325 - protein, 8 aa, Homo sapiens
  misc_feature: Table A; Target 45325; HLA-B*35:01; MAGEC1; ENSG00000155495; CTA
SPLQGEEF

SEQ ID NO: 45326 - protein, 11 aa, Homo sapiens
  misc_feature: Table A; Target 45326; HLA-B*35:01; MAGEC1; ENSG00000155495; CTA
SPLQIPGSPSF

SEQ ID NO: 45327 - protein, 9 aa, Homo sapiens
  misc_feature: Table A; Target 45327; HLA-B*56:01; MAGEC1; ENSG00000155495; CTA
SPLQIPMTS

SEQ ID NO: 45328 - protein, 10 aa, Homo sapiens
  misc_feature: Table A; Target 45328; HLA-B*07:02; MAGEC1; ENSG00000155495; CTA
SPLQIPQSPL

SEQ ID NO: 45329 - protein, 10 aa, Homo sapiens
  misc_feature: Table A; Target 45329; HLA-B*56:01; MAGEC1; ENSG00000155495; CTA
SPLQIPQSPL

SEQ ID NO: 45330 - protein, 10 aa, Homo sapiens
  misc_feature: Table A; Target 45330; HLA-C*07:02; MAGEC1; ENSG00000155495; CTA
SPLQIPQSPL

SEQ ID NO: 45331 - protein, 9 aa, Homo sapiens
  misc_feature: Table A; Target 45331; HLA-B*54:01; MAGEC1; ENSG00000155495; CTA
SPLQIPVSP

SEQ ID NO: 45332 - protein, 9 aa, Homo sapiens
  misc_feature: Table A; Target 45332; HLA-B*55:01; MAGEC1; ENSG00000155495; CTA
SPLQIPVSP

SEQ ID NO: 45333 - protein, 9 aa, Homo sapiens
  misc_feature: Table A; Target 45333; HLA-B*56:01; MAGEC1; ENSG00000155495; CTA
SPLQIPVSP

SEQ ID NO: 45334 - protein, 9 aa, Homo sapiens
  misc_feature: Table A; Target 45334; HLA-A*33:01; MAGEC1; ENSG00000155495; CTA
SPLQIPVSR

SEQ ID NO: 45335 - protein, 9 aa, Homo sapiens
  misc_feature: Table A; Target 45335; HLA-A*33:03; MAGEC1; ENSG00000155495; CTA
SPLQIPVSR

SEQ ID NO: 45336 - protein, 9 aa, Homo sapiens
  misc_feature: Table A; Target 45336; HLA-A*68:01; MAGEC1; ENSG00000155495; CTA
SPLQIPVSR

SEQ ID NO: 45337 - protein, 9 aa, Homo sapiens
  misc_feature: Table A; Target 45337; HLA-B*56:01; MAGEC1; ENSG00000155495; CTA
SPLQIPVSR

SEQ ID NO: 45338 - protein, 9 aa, Homo sapiens
  misc_feature: Table A; Target 45338; HLA-C*07:06; MAGEC1; ENSG00000155495; CTA
SPLQIPVSR

SEQ ID NO: 45339 - protein, 11 aa, Homo sapiens
  misc_feature: Table A; Target 45339; HLA-A*23:01; MAGEC1; ENSG00000155495; CTA
SPLQIPVSSSF

SEQ ID NO: 45340 - protein, 11 aa, Homo sapiens
  misc_feature: Table A; Target 45340; HLA-B*35:01; MAGEC1; ENSG00000155495; CTA
SPLQIPVSSSF

SEQ ID NO: 45341 - protein, 9 aa, Homo sapiens
  misc_feature: Table A; Target 45341; HLA-A*23:01; MAGEC1; ENSG00000155495; CTA
SPLQIVPSL

SEQ ID NO: 45342 - protein, 9 aa, Homo sapiens
  misc_feature: Table A; Target 45342; HLA-B*07:02; MAGEC1; ENSG00000155495; CTA
SPLQIVPSL

SEQ ID NO: 45343 - protein, 9 aa, Homo sapiens
  misc_feature: Table A; Target 45343; HLA-B*35:01; MAGEC1; ENSG00000155495; CTA
SPLQIVPSL

SEQ ID NO: 45344 - protein, 9 aa, Homo sapiens
  misc_feature: Table A; Target 45344; HLA-B*35:03; MAGEC1; ENSG00000155495; CTA
SPLQIVPSL

SEQ ID NO: 45345 - protein, 9 aa, Homo sapiens
  misc_feature: Table A; Target 45345; HLA-B*55:01; MAGEC1; ENSG00000155495; CTA
SPLQIVPSL

SEQ ID NO: 45346 - protein, 9 aa, Homo sapiens
  misc_feature: Table A; Target 45346; HLA-B*56:01; MAGEC1; ENSG00000155495; CTA
SPLQIVPSL

SEQ ID NO: 45347 - protein, 9 aa, Homo sapiens
  misc_feature: Table A; Target 45347; HLA-C*07:02; MAGEC1; ENSG00000155495; CTA
SPLQIVPSL

SEQ ID NO: 45348 - protein, 10 aa, Homo sapiens
  misc_feature: Table A; Target 45348; HLA-B*07:02; MAGEC1; ENSG00000155495; CTA
SPLQNPASSF

SEQ ID NO: 45349 - protein, 10 aa, Homo sapiens
  misc_feature: Table A; Target 45349; HLA-B*35:01; MAGEC1; ENSG00000155495; CTA
SPLQNPASSF

SEQ ID NO: 45350 - protein, 10 aa, Homo sapiens
  misc_feature: Table A; Target 45350; HLA-B*56:01; MAGEC1; ENSG00000155495; CTA
SPLQNPASSF

SEQ ID NO: 45351 - protein, 10 aa, Homo sapiens
  misc_feature: Table A; Target 45351; HLA-C*07:02; MAGEC1; ENSG00000155495; CTA
SPLQNPASSF

SEQ ID NO: 45352 - protein, 11 aa, Homo sapiens
  misc_feature: Table A; Target 45352; HLA-B*35:01; MAGEC1; ENSG00000155495; CTA
SPLQNPASSFF

SEQ ID NO: 45353 - protein, 9 aa, Homo sapiens
  misc_feature: Table A; Target 45353; HLA-B*08:01; MAGEC1; ENSG00000155495; CTA
SPLQRPVSS

SEQ ID NO: 45354 - protein, 9 aa, Homo sapiens
  misc_feature: Table A; Target 45354; HLA-B*56:01; MAGEC1; ENSG00000155495; CTA
SPLQRPVSS

SEQ ID NO: 45355 - protein, 10 aa, Homo sapiens
  misc_feature: Table A; Target 45355; HLA-B*07:02; MAGEC1; ENSG00000155495; CTA
SPLQRPVSSF

SEQ ID NO: 45356 - protein, 10 aa, Homo sapiens
  misc_feature: Table A; Target 45356; HLA-C*07:02; MAGEC1; ENSG00000155495; CTA
SPLQRPVSSF

SEQ ID NO: 45357 - protein, 9 aa, Homo sapiens
  misc_feature: Table A; Target 45357; HLA-B*54:01; MAGEC1; ENSG00000155495; CTA
SPLQSPESA

SEQ ID NO: 45358 - protein, 9 aa, Homo sapiens
  misc_feature: Table A; Target 45358; HLA-B*56:01; MAGEC1; ENSG00000155495; CTA
SPLQSPESA

SEQ ID NO: 45359 - protein, 8 aa, Homo sapiens
  misc_feature: Table A; Target 45359; HLA-B*51:01; MAGEC1; ENSG00000155495; CTA
SPLQSPVI

SEQ ID NO: 45360 - protein, 10 aa, Homo sapiens
  misc_feature: Table A; Target 45360; HLA-B*07:02; MAGEC1; ENSG00000155495; CTA
SPLQSPVISF

SEQ ID NO: 45361 - protein, 10 aa, Homo sapiens
  misc_feature: Table A; Target 45361; HLA-B*35:01; MAGEC1; ENSG00000155495; CTA
SPLQSPVISF

SEQ ID NO: 45362 - protein, 10 aa, Homo sapiens
  misc_feature: Table A; Target 45362; HLA-B*55:01; MAGEC1; ENSG00000155495; CTA
SPLQSPVISF

SEQ ID NO: 45363 - protein, 10 aa, Homo sapiens
  misc_feature: Table A; Target 45363; HLA-B*56:01; MAGEC1; ENSG00000155495; CTA
SPLQSPVISF

SEQ ID NO: 45364 - protein, 10 aa, Homo sapiens
  misc_feature: Table A; Target 45364; HLA-B*07:02; MAGEC1; ENSG00000155495; CTA
SPLQSPVSSF

SEQ ID NO: 45365 - protein, 10 aa, Homo sapiens
  misc_feature: Table A; Target 45365; HLA-B*35:01; MAGEC1; ENSG00000155495; CTA
SPLQSPVSSF

SEQ ID NO: 45366 - protein, 10 aa, Homo sapiens
  misc_feature: Table A; Target 45366; HLA-C*07:02; MAGEC1; ENSG00000155495; CTA
SPLQSPVSSF

SEQ ID NO: 45367 - protein, 9 aa, Homo sapiens
  misc_feature: Table A; Target 45367; HLA-B*56:01; MAGEC1; ENSG00000155495; CTA
SPLYFPQSP

SEQ ID NO: 45368 - protein, 10 aa, Homo sapiens
  misc_feature: Table A; Target 45368; HLA-B*07:02; MAGEC1; ENSG00000155495; CTA
SPLYFPQSPL

SEQ ID NO: 45369 - protein, 11 aa, Homo sapiens
  misc_feature: Table A; Target 45369; HLA-B*07:02; MAGEC1; ENSG00000155495; CTA
SPPEGPVQSPL

SEQ ID NO: 45370 - protein, 9 aa, Homo sapiens
  misc_feature: Table A; Target 45370; HLA-B*07:02; MAGEC1; ENSG00000155495; CTA
SPQSPPEGM

SEQ ID NO: 45371 - protein, 9 aa, Homo sapiens
  misc_feature: Table A; Target 45371; HLA-B*35:01; MAGEC1; ENSG00000155495; CTA
SPQSPPEGM

SEQ ID NO: 45372 - protein, 9 aa, Homo sapiens
  misc_feature: Table A; Target 45372; HLA-B*35:03; MAGEC1; ENSG00000155495; CTA
SPQSPPEGM

SEQ ID NO: 45373 - protein, 9 aa, Homo sapiens
  misc_feature: Table A; Target 45373; HLA-C*07:02; MAGEC1; ENSG00000155495; CTA
SPQSPPEGM

SEQ ID NO: 45374 - protein, 9 aa, Homo sapiens
  misc_feature: Table A; Target 45374; HLA-B*07:02; MAGEC1; ENSG00000155495; CTA
SPSFSSTLL

SEQ ID NO: 45375 - protein, 9 aa, Homo sapiens
  misc_feature: Table A; Target 45375; HLA-B*35:03; MAGEC1; ENSG00000155495; CTA
SPSFSSTLL

SEQ ID NO: 45376 - protein, 9 aa, Homo sapiens
  misc_feature: Table A; Target 45376; HLA-C*07:02; MAGEC1; ENSG00000155495; CTA
SPSFSSTLL

SEQ ID NO: 45377 - protein, 11 aa, Homo sapiens
  misc_feature: Table A; Target 45377; HLA-B*07:02; MAGEC1; ENSG00000155495; CTA
SPSFSSTLLSL

SEQ ID NO: 45378 - protein, 9 aa, Homo sapiens
  misc_feature: Table A; Target 45378; HLA-B*07:02; MAGEC1; ENSG00000155495; CTA
SPSFSSTLV

SEQ ID NO: 45379 - protein, 9 aa, Homo sapiens
  misc_feature: Table A; Target 45379; HLA-B*56:01; MAGEC1; ENSG00000155495; CTA
SPSFSSTLV

SEQ ID NO: 45380 - protein, 11 aa, Homo sapiens
  misc_feature: Table A; Target 45380; HLA-B*07:02; MAGEC1; ENSG00000155495; CTA
SPSFSSTLVSL

SEQ ID NO: 45381 - protein, 11 aa, Homo sapiens
  misc_feature: Table A; Target 45381; HLA-C*07:02; MAGEC1; ENSG00000155495; CTA
SPSFSSTLVSL

SEQ ID NO: 45382 - protein, 8 aa, Homo sapiens
  misc_feature: Table A; Target 45382; HLA-B*07:02; MAGEC1; ENSG00000155495; CTA
SPSSSSTL

SEQ ID NO: 45383 - protein, 8 aa, Homo sapiens
  misc_feature: Table A; Target 45383; HLA-C*07:02; MAGEC1; ENSG00000155495; CTA
SPSSSSTL

SEQ ID NO: 45384 - protein, 9 aa, Homo sapiens
  misc_feature: Table A; Target 45384; HLA-B*07:02; MAGEC1; ENSG00000155495; CTA
SPSSSSTLL

SEQ ID NO: 45385 - protein, 9 aa, Homo sapiens
  misc_feature: Table A; Target 45385; HLA-B*35:03; MAGEC1; ENSG00000155495; CTA
SPSSSSTLL

SEQ ID NO: 45386 - protein, 9 aa, Homo sapiens
  misc_feature: Table A; Target 45386; HLA-C*07:02; MAGEC1; ENSG00000155495; CTA
SPSSSSTLL

SEQ ID NO: 45387 - protein, 11 aa, Homo sapiens
  misc_feature: Table A; Target 45387; HLA-B*07:02; MAGEC1; ENSG00000155495; CTA
SPSSSSTLLSL

SEQ ID NO: 45388 - protein, 11 aa, Homo sapiens
  misc_feature: Table A; Target 45388; HLA-C*07:02; MAGEC1; ENSG00000155495; CTA
SPSSSSTLLSL

SEQ ID NO: 45389 - protein, 9 aa, Homo sapiens
  misc_feature: Table A; Target 45389; HLA-B*55:01; MAGEC1; ENSG00000155495; CTA
SPVDEYTSS

SEQ ID NO: 45390 - protein, 9 aa, Homo sapiens
  misc_feature: Table A; Target 45390; HLA-B*56:01; MAGEC1; ENSG00000155495; CTA
SPVDEYTSS

SEQ ID NO: 45391 - protein, 9 aa, Homo sapiens
  misc_feature: Table A; Target 45391; HLA-B*56:01; MAGEC1; ENSG00000155495; CTA
SPVISFSSS

SEQ ID NO: 45392 - protein, 10 aa, Homo sapiens
  misc_feature: Table A; Target 45392; HLA-B*56:01; MAGEC1; ENSG00000155495; CTA
SPVISFSSST

SEQ ID NO: 45393 - protein, 9 aa, Homo sapiens
  misc_feature: Table A; Target 45393; HLA-B*13:02; MAGEC1; ENSG00000155495; CTA
SQNRLLILI

SEQ ID NO: 45394 - protein, 11 aa, Homo sapiens
  misc_feature: Table A; Target 45394; HLA-B*27:05; MAGEC1; ENSG00000155495; CTA
SQSSPEGKDSL

SEQ ID NO: 45395 - protein, 11 aa, Homo sapiens
  misc_feature: Table A; Target 45395; HLA-B*38:01; MAGEC1; ENSG00000155495; CTA
SQSSPEGKDSL

SEQ ID NO: 45396 - protein, 11 aa, Homo sapiens
  misc_feature: Table A; Target 45396; HLA-B*39:01; MAGEC1; ENSG00000155495; CTA
SQSSPEGKDSL

SEQ ID NO: 45397 - protein, 9 aa, Homo sapiens
  misc_feature: Table A; Target 45397; HLA-A*25:01; MAGEC1; ENSG00000155495; CTA
SQSSPVSSF

SEQ ID NO: 45398 - protein, 9 aa, Homo sapiens
  misc_feature: Table A; Target 45398; HLA-A*26:01; MAGEC1; ENSG00000155495; CTA
SQSSPVSSF

SEQ ID NO: 45399 - protein, 9 aa, Homo sapiens
  misc_feature: Table A; Target 45399; HLA-A*30:02; MAGEC1; ENSG00000155495; CTA
SQSSPVSSF

SEQ ID NO: 45400 - protein, 9 aa, Homo sapiens
  misc_feature: Table A; Target 45400; HLA-A*32:01; MAGEC1; ENSG00000155495; CTA
SQSSPVSSF

SEQ ID NO: 45401 - protein, 9 aa, Homo sapiens
  misc_feature: Table A; Target 45401; HLA-B*13:02; MAGEC1; ENSG00000155495; CTA
SQSSPVSSF

SEQ ID NO: 45402 - protein, 9 aa, Homo sapiens
  misc_feature: Table A; Target 45402; HLA-B*15:03; MAGEC1; ENSG00000155495; CTA
SQSSPVSSF

SEQ ID NO: 45403 - protein, 9 aa, Homo sapiens
  misc_feature: Table A; Target 45403; HLA-B*27:02; MAGEC1; ENSG00000155495; CTA
SQSSPVSSF

SEQ ID NO: 45404 - protein, 9 aa, Homo sapiens
  misc_feature: Table A; Target 45404; HLA-B*27:05; MAGEC1; ENSG00000155495; CTA
SQSSPVSSF

SEQ ID NO: 45405 - protein, 9 aa, Homo sapiens
  misc_feature: Table A; Target 45405; HLA-B*37:01; MAGEC1; ENSG00000155495; CTA
SQSSPVSSF

SEQ ID NO: 45406 - protein, 9 aa, Homo sapiens
  misc_feature: Table A; Target 45406; HLA-B*38:01; MAGEC1; ENSG00000155495; CTA
SQSSPVSSF

SEQ ID NO: 45407 - protein, 9 aa, Homo sapiens
  misc_feature: Table A; Target 45407; HLA-B*39:01; MAGEC1; ENSG00000155495; CTA
SQSSPVSSF

SEQ ID NO: 45408 - protein, 9 aa, Homo sapiens
  misc_feature: Table A; Target 45408; HLA-B*44:02; MAGEC1; ENSG00000155495; CTA
SQSSPVSSF

SEQ ID NO: 45409 - protein, 9 aa, Homo sapiens
  misc_feature: Table A; Target 45409; HLA-B*44:03; MAGEC1; ENSG00000155495; CTA
SQSSPVSSF

SEQ ID NO: 45410 - protein, 9 aa, Homo sapiens
  misc_feature: Table A; Target 45410; HLA-B*46:01; MAGEC1; ENSG00000155495; CTA
SQSSPVSSF

SEQ ID NO: 45411 - protein, 9 aa, Homo sapiens
  misc_feature: Table A; Target 45411; HLA-B*58:01; MAGEC1; ENSG00000155495; CTA
SQSSPVSSF

SEQ ID NO: 45412 - protein, 9 aa, Homo sapiens
  misc_feature: Table A; Target 45412; HLA-C*02:02; MAGEC1; ENSG00000155495; CTA
SQSSPVSSF

SEQ ID NO: 45413 - protein, 9 aa, Homo sapiens
  misc_feature: Table A; Target 45413; HLA-C*05:01; MAGEC1; ENSG00000155495; CTA
SQSSPVSSF

SEQ ID NO: 45414 - protein, 9 aa, Homo sapiens
  misc_feature: Table A; Target 45414; HLA-C*07:02; MAGEC1; ENSG00000155495; CTA
SQSSPVSSF

SEQ ID NO: 45415 - protein, 9 aa, Homo sapiens
  misc_feature: Table A; Target 45415; HLA-C*07:04; MAGEC1; ENSG00000155495; CTA
SQSSPVSSF

SEQ ID NO: 45416 - protein, 9 aa, Homo sapiens
  misc_feature: Table A; Target 45416; HLA-C*12:03; MAGEC1; ENSG00000155495; CTA
SQSSPVSSF

SEQ ID NO: 45417 - protein, 9 aa, Homo sapiens
  misc_feature: Table A; Target 45417; HLA-C*14:02; MAGEC1; ENSG00000155495; CTA
SQSSPVSSF

SEQ ID NO: 45418 - protein, 9 aa, Homo sapiens
  misc_feature: Table A; Target 45418; HLA-C*16:04; MAGEC1; ENSG00000155495; CTA
SQSSPVSSF

SEQ ID NO: 45419 - protein, 9 aa, Homo sapiens
  misc_feature: Table A; Target 45419; HLA-B*27:05; MAGEC1; ENSG00000155495; CTA
SRSFSSTLL

SEQ ID NO: 45420 - protein, 8 aa, Homo sapiens
  misc_feature: Table A; Target 45420; HLA-C*03:03; MAGEC1; ENSG00000155495; CTA
SSFFSSAL

SEQ ID NO: 45421 - protein, 8 aa, Homo sapiens
  misc_feature: Table A; Target 45421; HLA-C*03:04; MAGEC1; ENSG00000155495; CTA
SSFFSSAL

SEQ ID NO: 45422 - protein, 10 aa, Homo sapiens
  misc_feature: Table A; Target 45422; HLA-B*58:01; MAGEC1; ENSG00000155495; CTA
SSPECTQSTF

SEQ ID NO: 45423 - protein, 9 aa, Homo sapiens
  misc_feature: Table A; Target 45423; HLA-C*01:02; MAGEC1; ENSG00000155495; CTA
SSPEGKDSL

SEQ ID NO: 45424 - protein, 9 aa, Homo sapiens
  misc_feature: Table A; Target 45424; HLA-C*01:02; MAGEC1; ENSG00000155495; CTA
SSPESAQSA

SEQ ID NO: 45425 - protein, 10 aa, Homo sapiens
  misc_feature: Table A; Target 45425; HLA-C*01:02; MAGEC1; ENSG00000155495; CTA
SSPESAQSAF

SEQ ID NO: 45426 - protein, 10 aa, Homo sapiens
  misc_feature: Table A; Target 45426; HLA-C*01:02; MAGEC1; ENSG00000155495; CTA
SSPESAQSTF

SEQ ID NO: 45427 - protein, 10 aa, Homo sapiens
  misc_feature: Table A; Target 45427; HLA-B*57:01; MAGEC1; ENSG00000155495; CTA
SSPPRYEFLW

SEQ ID NO: 45428 - protein, 8 aa, Homo sapiens
  misc_feature: Table A; Target 45428; HLA-A*30:02; MAGEC1; ENSG00000155495; CTA
SSSPVDEY

SEQ ID NO: 45429 - protein, 8 aa, Homo sapiens
  misc_feature: Table A; Target 45429; HLA-B*39:01; MAGEC1; ENSG00000155495; CTA
SSSPVDEY

SEQ ID NO: 45430 - protein, 8 aa, Homo sapiens
  misc_feature: Table A; Target 45430; HLA-C*16:02; MAGEC1; ENSG00000155495; CTA
SSSPVDEY

SEQ ID NO: 45431 - protein, 9 aa, Homo sapiens
  misc_feature: Table A; Target 45431; HLA-C*03:04; MAGEC1; ENSG00000155495; CTA
SSSSSSSTL

SEQ ID NO: 45432 - protein, 9 aa, Homo sapiens
  misc_feature: Table A; Target 45432; HLA-A*25:01; MAGEC1; ENSG00000155495; CTA
SSSTLVSIF

SEQ ID NO: 45433 - protein, 9 aa, Homo sapiens
  misc_feature: Table A; Target 45433; HLA-A*26:01; MAGEC1; ENSG00000155495; CTA
SSSTLVSIF

SEQ ID NO: 45434 - protein, 9 aa, Homo sapiens
  misc_feature: Table A; Target 45434; HLA-B*57:01; MAGEC1; ENSG00000155495; CTA
SSSTLVSIF

SEQ ID NO: 45435 - protein, 9 aa, Homo sapiens
  misc_feature: Table A; Target 45435; HLA-B*58:01; MAGEC1; ENSG00000155495; CTA
SSSTLVSIF

SEQ ID NO: 45436 - protein, 9 aa, Homo sapiens
  misc_feature: Table A; Target 45436; HLA-C*02:02; MAGEC1; ENSG00000155495; CTA
SSSTLVSIF

SEQ ID NO: 45437 - protein, 9 aa, Homo sapiens
  misc_feature: Table A; Target 45437; HLA-C*07:04; MAGEC1; ENSG00000155495; CTA
SSSTLVSIF

SEQ ID NO: 45438 - protein, 9 aa, Homo sapiens
  misc_feature: Table A; Target 45438; HLA-C*12:03; MAGEC1; ENSG00000155495; CTA
SSSTLVSIF

SEQ ID NO: 45439 - protein, 9 aa, Homo sapiens
  misc_feature: Table A; Target 45439; HLA-C*16:01; MAGEC1; ENSG00000155495; CTA
SSSTLVSIF

SEQ ID NO: 45440 - protein, 8 aa, Homo sapiens
  misc_feature: Table A; Target 45440; HLA-C*03:04; MAGEC1; ENSG00000155495; CTA
SSSTSLSL

SEQ ID NO: 45441 - protein, 9 aa, Homo sapiens
  misc_feature: Table A; Target 45441; HLA-B*46:01; MAGEC1; ENSG00000155495; CTA
SSSTSLSPF

SEQ ID NO: 45442 - protein, 9 aa, Homo sapiens
  misc_feature: Table A; Target 45442; HLA-C*16:01; MAGEC1; ENSG00000155495; CTA
SSSTSLSPF

SEQ ID NO: 45443 - protein, 9 aa, Homo sapiens
  misc_feature: Table A; Target 45443; HLA-A*32:01; MAGEC1; ENSG00000155495; CTA
SSSVMSPSF

SEQ ID NO: 45444 - protein, 9 aa, Homo sapiens
  misc_feature: Table A; Target 45444; HLA-B*15:03; MAGEC1; ENSG00000155495; CTA
SSSVMSPSF

SEQ ID NO: 45445 - protein, 9 aa, Homo sapiens
  misc_feature: Table A; Target 45445; HLA-B*46:01; MAGEC1; ENSG00000155495; CTA
SSSVMSPSF

SEQ ID NO: 45446 - protein, 9 aa, Homo sapiens
  misc_feature: Table A; Target 45446; HLA-B*57:01; MAGEC1; ENSG00000155495; CTA
SSSVMSPSF

SEQ ID NO: 45447 - protein, 9 aa, Homo sapiens
  misc_feature: Table A; Target 45447; HLA-B*58:01; MAGEC1; ENSG00000155495; CTA
SSSVMSPSF

SEQ ID NO: 45448 - protein, 9 aa, Homo sapiens
  misc_feature: Table A; Target 45448; HLA-C*02:02; MAGEC1; ENSG00000155495; CTA
SSSVMSPSF

SEQ ID NO: 45449 - protein, 9 aa, Homo sapiens
  misc_feature: Table A; Target 45449; HLA-C*04:01; MAGEC1; ENSG00000155495; CTA
SSSVMSPSF

SEQ ID NO: 45450 - protein, 9 aa, Homo sapiens
  misc_feature: Table A; Target 45450; HLA-C*16:01; MAGEC1; ENSG00000155495; CTA
SSSVMSPSF

SEQ ID NO: 45451 - protein, 9 aa, Homo sapiens
  misc_feature: Table A; Target 45451; HLA-C*16:04; MAGEC1; ENSG00000155495; CTA
SSSVMSPSF

SEQ ID NO: 45452 - protein, 8 aa, Homo sapiens
  misc_feature: Table A; Target 45452; HLA-C*16:01; MAGEC1; ENSG00000155495; CTA
SSTLLSIL

SEQ ID NO: 45453 - protein, 8 aa, Homo sapiens
  misc_feature: Table A; Target 45453; HLA-B*37:01; MAGEC1; ENSG00000155495; CTA
SSTLVSIF

SEQ ID NO: 45454 - protein, 8 aa, Homo sapiens
  misc_feature: Table A; Target 45454; HLA-B*37:01; MAGEC1; ENSG00000155495; CTA
SSTLVSLF

SEQ ID NO: 45455 - protein, 11 aa, Homo sapiens
  misc_feature: Table A; Target 45455; HLA-B*57:01; MAGEC1; ENSG00000155495; CTA
SSTPSSLPQSF

SEQ ID NO: 45456 - protein, 11 aa, Homo sapiens
  misc_feature: Table A; Target 45456; HLA-B*58:01; MAGEC1; ENSG00000155495; CTA
SSTPSSLPQSF

SEQ ID NO: 45457 - protein, 9 aa, Homo sapiens
  misc_feature: Table A; Target 45457; HLA-A*11:01; MAGEC1; ENSG00000155495; CTA
SSTSSSLSK

SEQ ID NO: 45458 - protein, 9 aa, Homo sapiens
  misc_feature: Table A; Target 45458; HLA-C*07:06; MAGEC1; ENSG00000155495; CTA
SSTSSSLSK

SEQ ID NO: 45459 - protein, 8 aa, Homo sapiens
  misc_feature: Table A; Target 45459; HLA-B*58:01; MAGEC1; ENSG00000155495; CTA
SSVMSPSF

SEQ ID NO: 45460 - protein, 8 aa, Homo sapiens
  misc_feature: Table A; Target 45460; HLA-C*16:01; MAGEC1; ENSG00000155495; CTA
SSVMSPSF

SEQ ID NO: 45461 - protein, 11 aa, Homo sapiens
  misc_feature: Table A; Target 45461; HLA-A*68:02; MAGEC1; ENSG00000155495; CTA
STFEGFAQSPL

SEQ ID NO: 45462 - protein, 11 aa, Homo sapiens
  misc_feature: Table A; Target 45462; HLA-A*25:01; MAGEC1; ENSG00000155495; CTA
STFEGFAQSSL

SEQ ID NO: 45463 - protein, 11 aa, Homo sapiens
  misc_feature: Table A; Target 45463; HLA-A*26:01; MAGEC1; ENSG00000155495; CTA
STFEGFAQSSL

SEQ ID NO: 45464 - protein, 11 aa, Homo sapiens
  misc_feature: Table A; Target 45464; HLA-A*68:02; MAGEC1; ENSG00000155495; CTA
STFEGFAQSSL

SEQ ID NO: 45465 - protein, 11 aa, Homo sapiens
  misc_feature: Table A; Target 45465; HLA-B*27:05; MAGEC1; ENSG00000155495; CTA
STFEGFAQSSL

SEQ ID NO: 45466 - protein, 11 aa, Homo sapiens
  misc_feature: Table A; Target 45466; HLA-C*01:02; MAGEC1; ENSG00000155495; CTA
STFEGFAQSSL

SEQ ID NO: 45467 - protein, 10 aa, Homo sapiens
  misc_feature: Table A; Target 45467; HLA-A*02:03; MAGEC1; ENSG00000155495; CTA
STFEGFPQSL

SEQ ID NO: 45468 - protein, 10 aa, Homo sapiens
  misc_feature: Table A; Target 45468; HLA-A*25:01; MAGEC1; ENSG00000155495; CTA
STFEGFPQSL

SEQ ID NO: 45469 - protein, 10 aa, Homo sapiens
  misc_feature: Table A; Target 45469; HLA-A*26:01; MAGEC1; ENSG00000155495; CTA
STFEGFPQSL

SEQ ID NO: 45470 - protein, 10 aa, Homo sapiens
  misc_feature: Table A; Target 45470; HLA-A*68:01; MAGEC1; ENSG00000155495; CTA
STFEGFPQSL

SEQ ID NO: 45471 - protein, 10 aa, Homo sapiens
  misc_feature: Table A; Target 45471; HLA-A*68:02; MAGEC1; ENSG00000155495; CTA
STFEGFPQSL

SEQ ID NO: 45472 - protein, 10 aa, Homo sapiens
  misc_feature: Table A; Target 45472; HLA-B*13:02; MAGEC1; ENSG00000155495; CTA
STFEGFPQSL

SEQ ID NO: 45473 - protein, 10 aa, Homo sapiens
  misc_feature: Table A; Target 45473; HLA-B*27:05; MAGEC1; ENSG00000155495; CTA
STFEGFPQSL

SEQ ID NO: 45474 - protein, 10 aa, Homo sapiens
  misc_feature: Table A; Target 45474; HLA-C*02:02; MAGEC1; ENSG00000155495; CTA
STFEGFPQSL

SEQ ID NO: 45475 - protein, 10 aa, Homo sapiens
  misc_feature: Table A; Target 45475; HLA-C*12:03; MAGEC1; ENSG00000155495; CTA
STFEGFPQSL

SEQ ID NO: 45476 - protein, 11 aa, Homo sapiens
  misc_feature: Table A; Target 45476; HLA-A*68:02; MAGEC1; ENSG00000155495; CTA
STFEGFPQSLL

SEQ ID NO: 45477 - protein, 10 aa, Homo sapiens
  misc_feature: Table A; Target 45477; HLA-B*57:01; MAGEC1; ENSG00000155495; CTA
STLLSLFQSF

SEQ ID NO: 45478 - protein, 10 aa, Homo sapiens
  misc_feature: Table A; Target 45478; HLA-A*25:01; MAGEC1; ENSG00000155495; CTA
STPSSLPQSF

SEQ ID NO: 45479 - protein, 10 aa, Homo sapiens
  misc_feature: Table A; Target 45479; HLA-A*26:01; MAGEC1; ENSG00000155495; CTA
STPSSLPQSF

SEQ ID NO: 45480 - protein, 9 aa, Homo sapiens
  misc_feature: Table A; Target 45480; HLA-A*02:01; MAGEC1; ENSG00000155495; CTA
SVLQIPVSA

SEQ ID NO: 45481 - protein, 9 aa, Homo sapiens
  misc_feature: Table A; Target 45481; HLA-A*32:01; MAGEC1; ENSG00000155495; CTA
SVLQIPVSA

SEQ ID NO: 45482 - protein, 9 aa, Homo sapiens
  misc_feature: Table A; Target 45482; HLA-B*54:01; MAGEC1; ENSG00000155495; CTA
SVLQIPVSA

SEQ ID NO: 45483 - protein, 9 aa, Homo sapiens
  misc_feature: Table A; Target 45483; HLA-B*55:01; MAGEC1; ENSG00000155495; CTA
SVLQIPVSA

SEQ ID NO: 45484 - protein, 9 aa, Homo sapiens
  misc_feature: Table A; Target 45484; HLA-B*56:01; MAGEC1; ENSG00000155495; CTA
SVLQIPVSA

SEQ ID NO: 45485 - protein, 10 aa, Homo sapiens
  misc_feature: Table A; Target 45485; HLA-B*56:01; MAGEC1; ENSG00000155495; CTA
SVLQIPVSAA

SEQ ID NO: 45486 - protein, 10 aa, Homo sapiens
  misc_feature: Table A; Target 45486; HLA-A*26:01; MAGEC1; ENSG00000155495; CTA
SVMSPSFSSE

SEQ ID NO: 45487 - protein, 10 aa, Homo sapiens
  misc_feature: Table A; Target 45487; HLA-A*31:01; MAGEC1; ENSG00000155495; CTA
SVMSPSFSSE

SEQ ID NO: 45488 - protein, 10 aa, Homo sapiens
  misc_feature: Table A; Target 45488; HLA-C*01:02; MAGEC1; ENSG00000155495; CTA
SVMSPSFSSE

SEQ ID NO: 45489 - protein, 8 aa, Homo sapiens
  misc_feature: Table A; Target 45489; HLA-A*23:01; MAGEC1; ENSG00000155495; CTA
SYTLASLL

SEQ ID NO: 45490 - protein, 8 aa, Homo sapiens
  misc_feature: Table A; Target 45490; HLA-A*24:02; MAGEC1; ENSG00000155495; CTA
SYTLASLL

SEQ ID NO: 45491 - protein, 8 aa, Homo sapiens
  misc_feature: Table A; Target 45491; HLA-C*04:01; MAGEC1; ENSG00000155495; CTA
SYTLASLL

SEQ ID NO: 45492 - protein, 8 aa, Homo sapiens
  misc_feature: Table A; Target 45492; HLA-C*14:02; MAGEC1; ENSG00000155495; CTA
SYTLASLL

SEQ ID NO: 45493 - protein, 8 aa, Homo sapiens
  misc_feature: Table A; Target 45493; HLA-A*24:02; MAGEC1; ENSG00000155495; CTA
SYTLLSLF

SEQ ID NO: 45494 - protein, 8 aa, Homo sapiens
  misc_feature: Table A; Target 45494; HLA-A*23:01; MAGEC1; ENSG00000155495; CTA
SYVFVNTL

SEQ ID NO: 45495 - protein, 8 aa, Homo sapiens
  misc_feature: Table A; Target 45495; HLA-A*24:02; MAGEC1; ENSG00000155495; CTA
SYVFVNTL

SEQ ID NO: 45496 - protein, 8 aa, Homo sapiens
  misc_feature: Table A; Target 45496; HLA-C*14:02; MAGEC1; ENSG00000155495; CTA
SYVFVNTL

SEQ ID NO: 45497 - protein, 11 aa, Homo sapiens
  misc_feature: Table A; Target 45497; HLA-B*35:01; MAGEC1; ENSG00000155495; CTA
TATESASSSVM

SEQ ID NO: 45498 - protein, 11 aa, Homo sapiens
  misc_feature: Table A; Target 45498; HLA-B*35:03; MAGEC1; ENSG00000155495; CTA
TATESASSSVM

SEQ ID NO: 45499 - protein, 11 aa, Homo sapiens
  misc_feature: Table A; Target 45499; HLA-B*39:01; MAGEC1; ENSG00000155495; CTA
TATESASSSVM

SEQ ID NO: 45500 - protein, 11 aa, Homo sapiens
  misc_feature: Table A; Target 45500; HLA-C*03:03; MAGEC1; ENSG00000155495; CTA
TATESASSSVM

SEQ ID NO: 45501 - protein, 11 aa, Homo sapiens
  misc_feature: Table A; Target 45501; HLA-C*03:04; MAGEC1; ENSG00000155495; CTA
TATESASSSVM

SEQ ID NO: 45502 - protein, 11 aa, Homo sapiens
  misc_feature: Table A; Target 45502; HLA-C*07:04; MAGEC1; ENSG00000155495; CTA
TATESASSSVM

SEQ ID NO: 45503 - protein, 8 aa, Homo sapiens
  misc_feature: Table A; Target 45503; HLA-B*49:01; MAGEC1; ENSG00000155495; CTA
TESASSSV

SEQ ID NO: 45504 - protein, 9 aa, Homo sapiens
  misc_feature: Table A; Target 45504; HLA-A*30:01; MAGEC1; ENSG00000155495; CTA
TESASSSVM

SEQ ID NO: 45505 - protein, 9 aa, Homo sapiens
  misc_feature: Table A; Target 45505; HLA-B*15:03; MAGEC1; ENSG00000155495; CTA
TESASSSVM

SEQ ID NO: 45506 - protein, 9 aa, Homo sapiens
  misc_feature: Table A; Target 45506; HLA-B*18:01; MAGEC1; ENSG00000155495; CTA
TESASSSVM

SEQ ID NO: 45507 - protein, 9 aa, Homo sapiens
  misc_feature: Table A; Target 45507; HLA-B*35:01; MAGEC1; ENSG00000155495; CTA
TESASSSVM

SEQ ID NO: 45508 - protein, 9 aa, Homo sapiens
  misc_feature: Table A; Target 45508; HLA-B*37:01; MAGEC1; ENSG00000155495; CTA
TESASSSVM

SEQ ID NO: 45509 - protein, 9 aa, Homo sapiens
  misc_feature: Table A; Target 45509; HLA-B*39:01; MAGEC1; ENSG00000155495; CTA
TESASSSVM

SEQ ID NO: 45510 - protein, 9 aa, Homo sapiens
  misc_feature: Table A; Target 45510; HLA-B*40:01; MAGEC1; ENSG00000155495; CTA
TESASSSVM

SEQ ID NO: 45511 - protein, 9 aa, Homo sapiens
  misc_feature: Table A; Target 45511; HLA-B*40:02; MAGEC1; ENSG00000155495; CTA
TESASSSVM

SEQ ID NO: 45512 - protein, 9 aa, Homo sapiens
  misc_feature: Table A; Target 45512; HLA-B*44:03; MAGEC1; ENSG00000155495; CTA
TESASSSVM

SEQ ID NO: 45513 - protein, 9 aa, Homo sapiens
  misc_feature: Table A; Target 45513; HLA-B*49:01; MAGEC1; ENSG00000155495; CTA
TESASSSVM

SEQ ID NO: 45514 - protein, 9 aa, Homo sapiens
  misc_feature: Table A; Target 45514; HLA-C*02:02; MAGEC1; ENSG00000155495; CTA
TESASSSVM

SEQ ID NO: 45515 - protein, 9 aa, Homo sapiens
  misc_feature: Table A; Target 45515; HLA-C*03:03; MAGEC1; ENSG00000155495; CTA
TESASSSVM

SEQ ID NO: 45516 - protein, 9 aa, Homo sapiens
  misc_feature: Table A; Target 45516; HLA-C*07:04; MAGEC1; ENSG00000155495; CTA
TESASSSVM

SEQ ID NO: 45517 - protein, 9 aa, Homo sapiens
  misc_feature: Table A; Target 45517; HLA-C*16:04; MAGEC1; ENSG00000155495; CTA
TESASSSVM

SEQ ID NO: 45518 - protein, 10 aa, Homo sapiens
  misc_feature: Table A; Target 45518; HLA-C*01:02; MAGEC1; ENSG00000155495; CTA
TFEGFAQSSL

SEQ ID NO: 45519 - protein, 10 aa, Homo sapiens
  misc_feature: Table A; Target 45519; HLA-C*14:02; MAGEC1; ENSG00000155495; CTA
TFEGFAQSSL

SEQ ID NO: 45520 - protein, 9 aa, Homo sapiens
  misc_feature: Table A; Target 45520; HLA-A*23:01; MAGEC1; ENSG00000155495; CTA
TFEGFPQSL

SEQ ID NO: 45521 - protein, 9 aa, Homo sapiens
  misc_feature: Table A; Target 45521; HLA-A*32:01; MAGEC1; ENSG00000155495; CTA
TFEGFPQSL

SEQ ID NO: 45522 - protein, 9 aa, Homo sapiens
  misc_feature: Table A; Target 45522; HLA-B*35:01; MAGEC1; ENSG00000155495; CTA
TFEGFPQSL

SEQ ID NO: 45523 - protein, 9 aa, Homo sapiens
  misc_feature: Table A; Target 45523; HLA-B*35:03; MAGEC1; ENSG00000155495; CTA
TFEGFPQSL

SEQ ID NO: 45524 - protein, 9 aa, Homo sapiens
  misc_feature: Table A; Target 45524; HLA-C*01:02; MAGEC1; ENSG00000155495; CTA
TFEGFPQSL

SEQ ID NO: 45525 - protein, 9 aa, Homo sapiens
  misc_feature: Table A; Target 45525; HLA-C*04:01; MAGEC1; ENSG00000155495; CTA
TFEGFPQSL

SEQ ID NO: 45526 - protein, 9 aa, Homo sapiens
  misc_feature: Table A; Target 45526; HLA-C*14:02; MAGEC1; ENSG00000155495; CTA
TFEGFPQSL

SEQ ID NO: 45527 - protein, 8 aa, Homo sapiens
  misc_feature: Table A; Target 45527; HLA-C*12:03; MAGEC1; ENSG00000155495; CTA
TGYFPVIF

SEQ ID NO: 45528 - protein, 9 aa, Homo sapiens
  misc_feature: Table A; Target 45528; HLA-A*03:01; MAGEC1; ENSG00000155495; CTA
TGYFPVIFR

SEQ ID NO: 45529 - protein, 9 aa, Homo sapiens
  misc_feature: Table A; Target 45529; HLA-A*11:01; MAGEC1; ENSG00000155495; CTA
TGYFPVIFR

SEQ ID NO: 45530 - protein, 9 aa, Homo sapiens
  misc_feature: Table A; Target 45530; HLA-A*31:01; MAGEC1; ENSG00000155495; CTA
TGYFPVIFR

SEQ ID NO: 45531 - protein, 9 aa, Homo sapiens
  misc_feature: Table A; Target 45531; HLA-A*33:01; MAGEC1; ENSG00000155495; CTA
TGYFPVIFR

SEQ ID NO: 45532 - protein, 9 aa, Homo sapiens
  misc_feature: Table A; Target 45532; HLA-A*33:03; MAGEC1; ENSG00000155495; CTA
TGYFPVIFR

SEQ ID NO: 45533 - protein, 9 aa, Homo sapiens
  misc_feature: Table A; Target 45533; HLA-A*68:01; MAGEC1; ENSG00000155495; CTA
TGYFPVIFR

SEQ ID NO: 45534 - protein, 9 aa, Homo sapiens
  misc_feature: Table A; Target 45534; HLA-A*68:02; MAGEC1; ENSG00000155495; CTA
TGYFPVIFR

SEQ ID NO: 45535 - protein, 9 aa, Homo sapiens
  misc_feature: Table A; Target 45535; HLA-C*07:06; MAGEC1; ENSG00000155495; CTA
TGYFPVIFR

SEQ ID NO: 45536 - protein, 11 aa, Homo sapiens
  misc_feature: Table A; Target 45536; HLA-B*38:01; MAGEC1; ENSG00000155495; CTA
THSPLQIVPSL

SEQ ID NO: 45537 - protein, 9 aa, Homo sapiens
  misc_feature: Table A; Target 45537; HLA-B*15:03; MAGEC1; ENSG00000155495; CTA
TKVWVQEHY

SEQ ID NO: 45538 - protein, 9 aa, Homo sapiens
  misc_feature: Table A; Target 45538; HLA-A*02:01; MAGEC1; ENSG00000155495; CTA
TLDEKVDEL

SEQ ID NO: 45539 - protein, 9 aa, Homo sapiens
  misc_feature: Table A; Target 45539; HLA-A*02:04; MAGEC1; ENSG00000155495; CTA
TLDEKVDEL

SEQ ID NO: 45540 - protein, 9 aa, Homo sapiens
  misc_feature: Table A; Target 45540; HLA-A*02:07; MAGEC1; ENSG00000155495; CTA
TLDEKVDEL

SEQ ID NO: 45541 - protein, 9 aa, Homo sapiens
  misc_feature: Table A; Target 45541; HLA-B*35:03; MAGEC1; ENSG00000155495; CTA
TLDEKVDEL

SEQ ID NO: 45542 - protein, 9 aa, Homo sapiens
  misc_feature: Table A; Target 45542; HLA-B*38:01; MAGEC1; ENSG00000155495; CTA
TLDEKVDEL

SEQ ID NO: 45543 - protein, 9 aa, Homo sapiens
  misc_feature: Table A; Target 45543; HLA-B*39:01; MAGEC1; ENSG00000155495; CTA
TLDEKVDEL

SEQ ID NO: 45544 - protein, 9 aa, Homo sapiens
  misc_feature: Table A; Target 45544; HLA-B*55:01; MAGEC1; ENSG00000155495; CTA
TLDEKVDEL

SEQ ID NO: 45545 - protein, 9 aa, Homo sapiens
  misc_feature: Table A; Target 45545; HLA-C*04:01; MAGEC1; ENSG00000155495; CTA
TLDEKVDEL

SEQ ID NO: 45546 - protein, 9 aa, Homo sapiens
  misc_feature: Table A; Target 45546; HLA-C*05:01; MAGEC1; ENSG00000155495; CTA
TLDEKVDEL

SEQ ID NO: 45547 - protein, 9 aa, Homo sapiens
  misc_feature: Table A; Target 45547; HLA-A*02:07; MAGEC1; ENSG00000155495; CTA
TLLSLFQSF

SEQ ID NO: 45548 - protein, 9 aa, Homo sapiens
  misc_feature: Table A; Target 45548; HLA-A*23:01; MAGEC1; ENSG00000155495; CTA
TLLSLFQSF

SEQ ID NO: 45549 - protein, 9 aa, Homo sapiens
  misc_feature: Table A; Target 45549; HLA-A*24:02; MAGEC1; ENSG00000155495; CTA
TLLSLFQSF

SEQ ID NO: 45550 - protein, 9 aa, Homo sapiens
  misc_feature: Table A; Target 45550; HLA-A*29:02; MAGEC1; ENSG00000155495; CTA
TLLSLFQSF

SEQ ID NO: 45551 - protein, 9 aa, Homo sapiens
  misc_feature: Table A; Target 45551; HLA-B*44:02; MAGEC1; ENSG00000155495; CTA
TLLSLFQSF

SEQ ID NO: 45552 - protein, 11 aa, Homo sapiens
  misc_feature: Table A; Target 45552; HLA-A*03:01; MAGEC1; ENSG00000155495; CTA
TLYPLQSPQSR

SEQ ID NO: 45553 - protein, 11 aa, Homo sapiens
  misc_feature: Table A; Target 45553; HLA-A*03:02; MAGEC1; ENSG00000155495; CTA
TLYPLQSPQSR

SEQ ID NO: 45554 - protein, 11 aa, Homo sapiens
  misc_feature: Table A; Target 45554; HLA-A*11:01; MAGEC1; ENSG00000155495; CTA
TLYPLQSPQSR

SEQ ID NO: 45555 - protein, 11 aa, Homo sapiens
  misc_feature: Table A; Target 45555; HLA-A*31:01; MAGEC1; ENSG00000155495; CTA
TLYPLQSPQSR

SEQ ID NO: 45556 - protein, 11 aa, Homo sapiens
  misc_feature: Table A; Target 45556; HLA-A*33:01; MAGEC1; ENSG00000155495; CTA
TLYPLQSPQSR

SEQ ID NO: 45557 - protein, 11 aa, Homo sapiens
  misc_feature: Table A; Target 45557; HLA-A*33:03; MAGEC1; ENSG00000155495; CTA
TLYPLQSPQSR

SEQ ID NO: 45558 - protein, 11 aa, Homo sapiens
  misc_feature: Table A; Target 45558; HLA-A*68:01; MAGEC1; ENSG00000155495; CTA
TLYPLQSPQSR

SEQ ID NO: 45559 - protein, 11 aa, Homo sapiens
  misc_feature: Table A; Target 45559; HLA-C*07:06; MAGEC1; ENSG00000155495; CTA
TLYPLQSPQSR

SEQ ID NO: 45560 - protein, 9 aa, Homo sapiens
  misc_feature: Table A; Target 45560; HLA-B*07:02; MAGEC1; ENSG00000155495; CTA
TPSSLPQSF

SEQ ID NO: 45561 - protein, 9 aa, Homo sapiens
  misc_feature: Table A; Target 45561; HLA-B*15:03; MAGEC1; ENSG00000155495; CTA
TPSSLPQSF

SEQ ID NO: 45562 - protein, 9 aa, Homo sapiens
  misc_feature: Table A; Target 45562; HLA-B*18:01; MAGEC1; ENSG00000155495; CTA
TPSSLPQSF

SEQ ID NO: 45563 - protein, 9 aa, Homo sapiens
  misc_feature: Table A; Target 45563; HLA-B*35:01; MAGEC1; ENSG00000155495; CTA
TPSSLPQSF

SEQ ID NO: 45564 - protein, 9 aa, Homo sapiens
  misc_feature: Table A; Target 45564; HLA-B*35:03; MAGEC1; ENSG00000155495; CTA
TPSSLPQSF

SEQ ID NO: 45565 - protein, 9 aa, Homo sapiens
  misc_feature: Table A; Target 45565; HLA-B*38:01; MAGEC1; ENSG00000155495; CTA
TPSSLPQSF

SEQ ID NO: 45566 - protein, 9 aa, Homo sapiens
  misc_feature: Table A; Target 45566; HLA-B*55:01; MAGEC1; ENSG00000155495; CTA
TPSSLPQSF

SEQ ID NO: 45567 - protein, 9 aa, Homo sapiens
  misc_feature: Table A; Target 45567; HLA-C*07:02; MAGEC1; ENSG00000155495; CTA
TPSSLPQSF

SEQ ID NO: 45568 - protein, 9 aa, Homo sapiens
  misc_feature: Table A; Target 45568; HLA-A*23:01; MAGEC1; ENSG00000155495; CTA
TSLSLPQSF

SEQ ID NO: 45569 - protein, 9 aa, Homo sapiens
  misc_feature: Table A; Target 45569; HLA-A*29:02; MAGEC1; ENSG00000155495; CTA
TSLSLPQSF

SEQ ID NO: 45570 - protein, 9 aa, Homo sapiens
  misc_feature: Table A; Target 45570; HLA-A*30:02; MAGEC1; ENSG00000155495; CTA
TSLSLPQSF

SEQ ID NO: 45571 - protein, 9 aa, Homo sapiens
  misc_feature: Table A; Target 45571; HLA-A*32:01; MAGEC1; ENSG00000155495; CTA
TSLSLPQSF

SEQ ID NO: 45572 - protein, 9 aa, Homo sapiens
  misc_feature: Table A; Target 45572; HLA-A*33:03; MAGEC1; ENSG00000155495; CTA
TSLSLPQSF

SEQ ID NO: 45573 - protein, 9 aa, Homo sapiens
  misc_feature: Table A; Target 45573; HLA-B*15:03; MAGEC1; ENSG00000155495; CTA
TSLSLPQSF

SEQ ID NO: 45574 - protein, 9 aa, Homo sapiens
  misc_feature: Table A; Target 45574; HLA-B*18:01; MAGEC1; ENSG00000155495; CTA
TSLSLPQSF

SEQ ID NO: 45575 - protein, 9 aa, Homo sapiens
  misc_feature: Table A; Target 45575; HLA-B*35:01; MAGEC1; ENSG00000155495; CTA
TSLSLPQSF

SEQ ID NO: 45576 - protein, 9 aa, Homo sapiens
  misc_feature: Table A; Target 45576; HLA-B*46:01; MAGEC1; ENSG00000155495; CTA
TSLSLPQSF

SEQ ID NO: 45577 - protein, 9 aa, Homo sapiens
  misc_feature: Table A; Target 45577; HLA-B*57:01; MAGEC1; ENSG00000155495; CTA
TSLSLPQSF

SEQ ID NO: 45578 - protein, 9 aa, Homo sapiens
  misc_feature: Table A; Target 45578; HLA-B*58:01; MAGEC1; ENSG00000155495; CTA
TSLSLPQSF

SEQ ID NO: 45579 - protein, 9 aa, Homo sapiens
  misc_feature: Table A; Target 45579; HLA-C*07:06; MAGEC1; ENSG00000155495; CTA
TSLSLPQSF

SEQ ID NO: 45580 - protein, 9 aa, Homo sapiens
  misc_feature: Table A; Target 45580; HLA-C*16:01; MAGEC1; ENSG00000155495; CTA
TSLSLPQSF

SEQ ID NO: 45581 - protein, 9 aa, Homo sapiens
  misc_feature: Table A; Target 45581; HLA-C*16:04; MAGEC1; ENSG00000155495; CTA
TSLSLPQSF

SEQ ID NO: 45582 - protein, 10 aa, Homo sapiens
  misc_feature: Table A; Target 45582; HLA-A*25:01; MAGEC1; ENSG00000155495; CTA
TVPITFPSSY

SEQ ID NO: 45583 - protein, 10 aa, Homo sapiens
  misc_feature: Table A; Target 45583; HLA-A*26:01; MAGEC1; ENSG00000155495; CTA
TVPITFPSSY

SEQ ID NO: 45584 - protein, 10 aa, Homo sapiens
  misc_feature: Table A; Target 45584; HLA-A*30:02; MAGEC1; ENSG00000155495; CTA
TVPITFPSSY

SEQ ID NO: 45585 - protein, 10 aa, Homo sapiens
  misc_feature: Table A; Target 45585; HLA-C*01:02; MAGEC1; ENSG00000155495; CTA
TVPITFPSSY

SEQ ID NO: 45586 - protein, 10 aa, Homo sapiens
  misc_feature: Table A; Target 45586; HLA-C*07:04; MAGEC1; ENSG00000155495; CTA
TVPITFPSSY

SEQ ID NO: 45587 - protein, 8 aa, Homo sapiens
  misc_feature: Table A; Target 45587; HLA-B*37:01; MAGEC1; ENSG00000155495; CTA
VDELARFL

SEQ ID NO: 45588 - protein, 9 aa, Homo sapiens
  misc_feature: Table A; Target 45588; HLA-A*23:01; MAGEC1; ENSG00000155495; CTA
VDPDDSYVF

SEQ ID NO: 45589 - protein, 9 aa, Homo sapiens
  misc_feature: Table A; Target 45589; HLA-A*24:02; MAGEC1; ENSG00000155495; CTA
VDPDDSYVF

SEQ ID NO: 45590 - protein, 8 aa, Homo sapiens
  misc_feature: Table A; Target 45590; HLA-B*18:01; MAGEC1; ENSG00000155495; CTA
VEERAQAI

SEQ ID NO: 45591 - protein, 8 aa, Homo sapiens
  misc_feature: Table A; Target 45591; HLA-B*49:01; MAGEC1; ENSG00000155495; CTA
VEERAQAI

SEQ ID NO: 45592 - protein, 9 aa, Homo sapiens
  misc_feature: Table A; Target 45592; HLA-B*40:01; MAGEC1; ENSG00000155495; CTA
VEERAQAII

SEQ ID NO: 45593 - protein, 9 aa, Homo sapiens
  misc_feature: Table A; Target 45593; HLA-B*49:01; MAGEC1; ENSG00000155495; CTA
VEERAQAII

SEQ ID NO: 45594 - protein, 8 aa, Homo sapiens
  misc_feature: Table A; Target 45594; HLA-A*23:01; MAGEC1; ENSG00000155495; CTA
VFVNTLDL

SEQ ID NO: 45595 - protein, 8 aa, Homo sapiens
  misc_feature: Table A; Target 45595; HLA-C*14:02; MAGEC1; ENSG00000155495; CTA
VFVNTLDL

SEQ ID NO: 45596 - protein, 9 aa, Homo sapiens
  misc_feature: Table A; Target 45596; HLA-B*08:01; MAGEC1; ENSG00000155495; CTA
VIKRKVVEF

SEQ ID NO: 45597 - protein, 9 aa, Homo sapiens
  misc_feature: Table A; Target 45597; HLA-A*02:01; MAGEC1; ENSG00000155495; CTA
VIWDVLSGI

SEQ ID NO: 45598 - protein, 9 aa, Homo sapiens
  misc_feature: Table A; Target 45598; HLA-A*02:03; MAGEC1; ENSG00000155495; CTA
VIWDVLSGI

SEQ ID NO: 45599 - protein, 9 aa, Homo sapiens
  misc_feature: Table A; Target 45599; HLA-A*02:04; MAGEC1; ENSG00000155495; CTA
VIWDVLSGI

SEQ ID NO: 45600 - protein, 9 aa, Homo sapiens
  misc_feature: Table A; Target 45600; HLA-A*02:07; MAGEC1; ENSG00000155495; CTA
VIWDVLSGI

SEQ ID NO: 45601 - protein, 11 aa, Homo sapiens
  misc_feature: Table A; Target 45601; HLA-A*02:01; MAGEC1; ENSG00000155495; CTA
VIWDVLSGIGV

SEQ ID NO: 45602 - protein, 11 aa, Homo sapiens
  misc_feature: Table A; Target 45602; HLA-A*02:04; MAGEC1; ENSG00000155495; CTA
VIWDVLSGIGV

SEQ ID NO: 45603 - protein, 11 aa, Homo sapiens
  misc_feature: Table A; Target 45603; HLA-A*02:07; MAGEC1; ENSG00000155495; CTA
VIWDVLSGIGV

SEQ ID NO: 45604 - protein, 10 aa, Homo sapiens
  misc_feature: Table A; Target 45604; HLA-B*15:03; MAGEC1; ENSG00000155495; CTA
VKQPITKAEM

SEQ ID NO: 45605 - protein, 9 aa, Homo sapiens
  misc_feature: Table A; Target 45605; HLA-A*02:01; MAGEC1; ENSG00000155495; CTA
VLQIPVSAA

SEQ ID NO: 45606 - protein, 9 aa, Homo sapiens
  misc_feature: Table A; Target 45606; HLA-A*02:03; MAGEC1; ENSG00000155495; CTA
VLQIPVSAA

SEQ ID NO: 45607 - protein, 9 aa, Homo sapiens
  misc_feature: Table A; Target 45607; HLA-C*14:02; MAGEC1; ENSG00000155495; CTA
VLQIPVSAA

SEQ ID NO: 45608 - protein, 9 aa, Homo sapiens
  misc_feature: Table A; Target 45608; HLA-A*02:01; MAGEC1; ENSG00000155495; CTA
VLSGIGVRA

SEQ ID NO: 45609 - protein, 9 aa, Homo sapiens
  misc_feature: Table A; Target 45609; HLA-A*02:03; MAGEC1; ENSG00000155495; CTA
VLSGIGVRA

SEQ ID NO: 45610 - protein, 9 aa, Homo sapiens
  misc_feature: Table A; Target 45610; HLA-A*02:04; MAGEC1; ENSG00000155495; CTA
VLSGIGVRA

SEQ ID NO: 45611 - protein, 11 aa, Homo sapiens
  misc_feature: Table A; Target 45611; HLA-A*31:01; MAGEC1; ENSG00000155495; CTA
VLSGIGVRAGR

SEQ ID NO: 45612 - protein, 9 aa, Homo sapiens
  misc_feature: Table A; Target 45612; HLA-C*01:02; MAGEC1; ENSG00000155495; CTA
VMSPSFSSE

SEQ ID NO: 45613 - protein, 8 aa, Homo sapiens
  misc_feature: Table A; Target 45613; HLA-B*51:01; MAGEC1; ENSG00000155495; CTA
VPITFPSS

SEQ ID NO: 45614 - protein, 9 aa, Homo sapiens
  misc_feature: Table A; Target 45614; HLA-A*01:01; MAGEC1; ENSG00000155495; CTA
VPITFPSSY

SEQ ID NO: 45615 - protein, 9 aa, Homo sapiens
  misc_feature: Table A; Target 45615; HLA-A*23:01; MAGEC1; ENSG00000155495; CTA
VPITFPSSY

SEQ ID NO: 45616 - protein, 9 aa, Homo sapiens
  misc_feature: Table A; Target 45616; HLA-A*25:01; MAGEC1; ENSG00000155495; CTA
VPITFPSSY

SEQ ID NO: 45617 - protein, 9 aa, Homo sapiens
  misc_feature: Table A; Target 45617; HLA-A*26:01; MAGEC1; ENSG00000155495; CTA
VPITFPSSY

SEQ ID NO: 45618 - protein, 9 aa, Homo sapiens
  misc_feature: Table A; Target 45618; HLA-A*29:02; MAGEC1; ENSG00000155495; CTA
VPITFPSSY

SEQ ID NO: 45619 - protein, 9 aa, Homo sapiens
  misc_feature: Table A; Target 45619; HLA-A*30:02; MAGEC1; ENSG00000155495; CTA
VPITFPSSY

SEQ ID NO: 45620 - protein, 9 aa, Homo sapiens
  misc_feature: Table A; Target 45620; HLA-B*07:02; MAGEC1; ENSG00000155495; CTA
VPITFPSSY

SEQ ID NO: 45621 - protein, 9 aa, Homo sapiens
  misc_feature: Table A; Target 45621; HLA-B*15:01; MAGEC1; ENSG00000155495; CTA
VPITFPSSY

SEQ ID NO: 45622 - protein, 9 aa, Homo sapiens
  misc_feature: Table A; Target 45622; HLA-B*15:03; MAGEC1; ENSG00000155495; CTA
VPITFPSSY

SEQ ID NO: 45623 - protein, 9 aa, Homo sapiens
  misc_feature: Table A; Target 45623; HLA-B*18:01; MAGEC1; ENSG00000155495; CTA
VPITFPSSY

SEQ ID NO: 45624 - protein, 9 aa, Homo sapiens
  misc_feature: Table A; Target 45624; HLA-B*35:03; MAGEC1; ENSG00000155495; CTA
VPITFPSSY

SEQ ID NO: 45625 - protein, 9 aa, Homo sapiens
  misc_feature: Table A; Target 45625; HLA-B*46:01; MAGEC1; ENSG00000155495; CTA
VPITFPSSY

SEQ ID NO: 45626 - protein, 9 aa, Homo sapiens
  misc_feature: Table A; Target 45626; HLA-B*51:01; MAGEC1; ENSG00000155495; CTA
VPITFPSSY

SEQ ID NO: 45627 - protein, 9 aa, Homo sapiens
  misc_feature: Table A; Target 45627; HLA-B*54:01; MAGEC1; ENSG00000155495; CTA
VPITFPSSY

SEQ ID NO: 45628 - protein, 9 aa, Homo sapiens
  misc_feature: Table A; Target 45628; HLA-B*55:01; MAGEC1; ENSG00000155495; CTA
VPITFPSSY

SEQ ID NO: 45629 - protein, 9 aa, Homo sapiens
  misc_feature: Table A; Target 45629; HLA-B*56:01; MAGEC1; ENSG00000155495; CTA
VPITFPSSY

SEQ ID NO: 45630 - protein, 9 aa, Homo sapiens
  misc_feature: Table A; Target 45630; HLA-C*02:02; MAGEC1; ENSG00000155495; CTA
VPITFPSSY

SEQ ID NO: 45631 - protein, 9 aa, Homo sapiens
  misc_feature: Table A; Target 45631; HLA-C*07:02; MAGEC1; ENSG00000155495; CTA
VPITFPSSY

SEQ ID NO: 45632 - protein, 9 aa, Homo sapiens
  misc_feature: Table A; Target 45632; HLA-C*14:02; MAGEC1; ENSG00000155495; CTA
VPITFPSSY

SEQ ID NO: 45633 - protein, 9 aa, Homo sapiens
  misc_feature: Table A; Target 45633; HLA-A*30:02; MAGEC1; ENSG00000155495; CTA
VPNSSPPRY

SEQ ID NO: 45634 - protein, 9 aa, Homo sapiens
  misc_feature: Table A; Target 45634; HLA-B*35:01; MAGEC1; ENSG00000155495; CTA
VPNSSPPRY

SEQ ID NO: 45635 - protein, 9 aa, Homo sapiens
  misc_feature: Table A; Target 45635; HLA-B*55:01; MAGEC1; ENSG00000155495; CTA
VPNSSPPRY

SEQ ID NO: 45636 - protein, 11 aa, Homo sapiens
  misc_feature: Table A; Target 45636; HLA-A*23:01; MAGEC1; ENSG00000155495; CTA
VPNSSPPRYEF

SEQ ID NO: 45637 - protein, 11 aa, Homo sapiens
  misc_feature: Table A; Target 45637; HLA-B*07:02; MAGEC1; ENSG00000155495; CTA
VPNSSPPRYEF

SEQ ID NO: 45638 - protein, 11 aa, Homo sapiens
  misc_feature: Table A; Target 45638; HLA-B*35:01; MAGEC1; ENSG00000155495; CTA
VPNSSPPRYEF

SEQ ID NO: 45639 - protein, 11 aa, Homo sapiens
  misc_feature: Table A; Target 45639; HLA-B*55:01; MAGEC1; ENSG00000155495; CTA
VPNSSPPRYEF

SEQ ID NO: 45640 - protein, 8 aa, Homo sapiens
  misc_feature: Table A; Target 45640; HLA-A*01:01; MAGEC1; ENSG00000155495; CTA
VQEHYLEY

SEQ ID NO: 45641 - protein, 9 aa, Homo sapiens
  misc_feature: Table A; Target 45641; HLA-B*27:05; MAGEC1; ENSG00000155495; CTA
VQSPLQNPA

SEQ ID NO: 45642 - protein, 9 aa, Homo sapiens
  misc_feature: Table A; Target 45642; HLA-B*39:01; MAGEC1; ENSG00000155495; CTA
VQSPLQNPA

SEQ ID NO: 45643 - protein, 9 aa, Homo sapiens
  misc_feature: Table A; Target 45643; HLA-C*07:04; MAGEC1; ENSG00000155495; CTA
VQSPLQNPA

SEQ ID NO: 45644 - protein, 9 aa, Homo sapiens
  misc_feature: Table A; Target 45644; HLA-B*46:01; MAGEC1; ENSG00000155495; CTA
VSAASSSTL

SEQ ID NO: 45645 - protein, 9 aa, Homo sapiens
  misc_feature: Table A; Target 45645; HLA-B*58:01; MAGEC1; ENSG00000155495; CTA
VSAASSSTL

SEQ ID NO: 45646 - protein, 9 aa, Homo sapiens
  misc_feature: Table A; Target 45646; HLA-C*01:02; MAGEC1; ENSG00000155495; CTA
VSAASSSTL

SEQ ID NO: 45647 - protein, 9 aa, Homo sapiens
  misc_feature: Table A; Target 45647; HLA-C*03:03; MAGEC1; ENSG00000155495; CTA
VSAASSSTL

SEQ ID NO: 45648 - protein, 9 aa, Homo sapiens
  misc_feature: Table A; Target 45648; HLA-C*03:04; MAGEC1; ENSG00000155495; CTA
VSAASSSTL

SEQ ID NO: 45649 - protein, 9 aa, Homo sapiens
  misc_feature: Table A; Target 45649; HLA-C*05:01; MAGEC1; ENSG00000155495; CTA
VSAASSSTL

SEQ ID NO: 45650 - protein, 9 aa, Homo sapiens
  misc_feature: Table A; Target 45650; HLA-B*46:01; MAGEC1; ENSG00000155495; CTA
VSPSFSSTL

SEQ ID NO: 45651 - protein, 9 aa, Homo sapiens
  misc_feature: Table A; Target 45651; HLA-C*01:02; MAGEC1; ENSG00000155495; CTA
VSPSFSSTL

SEQ ID NO: 45652 - protein, 9 aa, Homo sapiens
  misc_feature: Table A; Target 45652; HLA-C*03:04; MAGEC1; ENSG00000155495; CTA
VSPSFSSTL

SEQ ID NO: 45653 - protein, 9 aa, Homo sapiens
  misc_feature: Table A; Target 45653; HLA-C*16:01; MAGEC1; ENSG00000155495; CTA
VSPSFSSTL

SEQ ID NO: 45654 - protein, 9 aa, Homo sapiens
  misc_feature: Table A; Target 45654; HLA-C*01:02; MAGEC1; ENSG00000155495; CTA
VSPSSSSTL

SEQ ID NO: 45655 - protein, 9 aa, Homo sapiens
  misc_feature: Table A; Target 45655; HLA-C*03:04; MAGEC1; ENSG00000155495; CTA
VSPSSSSTL

SEQ ID NO: 45656 - protein, 9 aa, Homo sapiens
  misc_feature: Table A; Target 45656; HLA-B*46:01; MAGEC1; ENSG00000155495; CTA
VSRSFSSTL

SEQ ID NO: 45657 - protein, 9 aa, Homo sapiens
  misc_feature: Table A; Target 45657; HLA-C*07:02; MAGEC1; ENSG00000155495; CTA
VSRSFSSTL

SEQ ID NO: 45658 - protein, 9 aa, Homo sapiens
  misc_feature: Table A; Target 45658; HLA-C*02:02; MAGEC1; ENSG00000155495; CTA
VSSSFSYTL

SEQ ID NO: 45659 - protein, 9 aa, Homo sapiens
  misc_feature: Table A; Target 45659; HLA-C*16:01; MAGEC1; ENSG00000155495; CTA
VSSSFSYTL

SEQ ID NO: 45660 - protein, 9 aa, Homo sapiens
  misc_feature: Table A; Target 45660; HLA-C*03:03; MAGEC1; ENSG00000155495; CTA
VSSSSSSTL

SEQ ID NO: 45661 - protein, 9 aa, Homo sapiens
  misc_feature: Table A; Target 45661; HLA-C*03:04; MAGEC1; ENSG00000155495; CTA
VSSSSSSTL

SEQ ID NO: 45662 - protein, 9 aa, Homo sapiens
  misc_feature: Table A; Target 45662; HLA-C*05:01; MAGEC1; ENSG00000155495; CTA
VSSSSSSTL

SEQ ID NO: 45663 - protein, 9 aa, Homo sapiens
  misc_feature: Table A; Target 45663; HLA-C*16:01; MAGEC1; ENSG00000155495; CTA
VSSSSSSTL

SEQ ID NO: 45664 - protein, 9 aa, Homo sapiens
  misc_feature: Table A; Target 45664; HLA-A*03:02; MAGEC1; ENSG00000155495; CTA
VVEFLAMLK

SEQ ID NO: 45665 - protein, 9 aa, Homo sapiens
  misc_feature: Table A; Target 45665; HLA-A*11:01; MAGEC1; ENSG00000155495; CTA
VVEFLAMLK

SEQ ID NO: 45666 - protein, 10 aa, Homo sapiens
  misc_feature: Table A; Target 45666; HLA-A*29:02; MAGEC1; ENSG00000155495; CTA
VWVQEHYLEY

SEQ ID NO: 45667 - protein, 9 aa, Homo sapiens
  misc_feature: Table A; Target 45667; HLA-A*01:01; MAGEC1; ENSG00000155495; CTA
WVQEHYLEY

SEQ ID NO: 45668 - protein, 9 aa, Homo sapiens
  misc_feature: Table A; Target 45668; HLA-A*25:01; MAGEC1; ENSG00000155495; CTA
WVQEHYLEY

SEQ ID NO: 45669 - protein, 9 aa, Homo sapiens
  misc_feature: Table A; Target 45669; HLA-A*26:01; MAGEC1; ENSG00000155495; CTA
WVQEHYLEY

SEQ ID NO: 45670 - protein, 9 aa, Homo sapiens
  misc_feature: Table A; Target 45670; HLA-A*29:02; MAGEC1; ENSG00000155495; CTA
WVQEHYLEY

SEQ ID NO: 45671 - protein, 9 aa, Homo sapiens
  misc_feature: Table A; Target 45671; HLA-A*30:02; MAGEC1; ENSG00000155495; CTA
WVQEHYLEY

SEQ ID NO: 45672 - protein, 9 aa, Homo sapiens
  misc_feature: Table A; Target 45672; HLA-A*33:01; MAGEC1; ENSG00000155495; CTA
YPLQSPQSR

SEQ ID NO: 45673 - protein, 9 aa, Homo sapiens
  misc_feature: Table A; Target 45673; HLA-A*33:03; MAGEC1; ENSG00000155495; CTA
YPLQSPQSR

SEQ ID NO: 45674 - protein, 9 aa, Homo sapiens
  misc_feature: Table A; Target 45674; HLA-A*68:01; MAGEC1; ENSG00000155495; CTA
YPLQSPQSR

SEQ ID NO: 45675 - protein, 9 aa, Homo sapiens
  misc_feature: Table A; Target 45675; HLA-B*35:01; MAGEC1; ENSG00000155495; CTA
YPLQSPQSR

SEQ ID NO: 45676 - protein, 9 aa, Homo sapiens
  misc_feature: Table A; Target 45676; HLA-B*35:03; MAGEC1; ENSG00000155495; CTA
YPLQSPQSR

SEQ ID NO: 45677 - protein, 9 aa, Homo sapiens
  misc_feature: Table A; Target 45677; HLA-B*51:01; MAGEC1; ENSG00000155495; CTA
YPLQSPQSR

SEQ ID NO: 45678 - protein, 9 aa, Homo sapiens
  misc_feature: Table A; Target 45678; HLA-B*54:01; MAGEC1; ENSG00000155495; CTA
YPLQSPQSR

SEQ ID NO: 45679 - protein, 9 aa, Homo sapiens
  misc_feature: Table A; Target 45679; HLA-B*56:01; MAGEC1; ENSG00000155495; CTA
YPLQSPQSR

SEQ ID NO: 45680 - protein, 9 aa, Homo sapiens
  misc_feature: Table A; Target 45680; HLA-C*07:06; MAGEC1; ENSG00000155495; CTA
YPLQSPQSR

SEQ ID NO: 45681 - protein, 9 aa, Homo sapiens
  misc_feature: Table A; Target 45681; HLA-A*03:01; MAGEC1; ENSG00000155495; CTA
YQVKQPITK

SEQ ID NO: 45682 - protein, 9 aa, Homo sapiens
  misc_feature: Table A; Target 45682; HLA-A*03:02; MAGEC1; ENSG00000155495; CTA
YQVKQPITK

SEQ ID NO: 45683 - protein, 9 aa, Homo sapiens
  misc_feature: Table A; Target 45683; HLA-A*11:01; MAGEC1; ENSG00000155495; CTA
YQVKQPITK

SEQ ID NO: 45684 - protein, 9 aa, Homo sapiens
  misc_feature: Table A; Target 45684; HLA-B*13:02; MAGEC1; ENSG00000155495; CTA
YQVKQPITK

SEQ ID NO: 45685 - protein, 9 aa, Homo sapiens
  misc_feature: Table A; Target 45685; HLA-B*27:05; MAGEC1; ENSG00000155495; CTA
YQVKQPITK

SEQ ID NO: 45686 - protein, 9 aa, Homo sapiens
  misc_feature: Table A; Target 45686; HLA-B*40:02; MAGEC1; ENSG00000155495; CTA
YQVKQPITK

SEQ ID NO: 45687 - protein, 9 aa, Homo sapiens
  misc_feature: Table A; Target 45687; HLA-C*02:02; MAGEC1; ENSG00000155495; CTA
YQVKQPITK

SEQ ID NO: 45688 - protein, 9 aa, Homo sapiens
  misc_feature: Table A; Target 45688; HLA-C*03:03; MAGEC1; ENSG00000155495; CTA
YQVKQPITK

SEQ ID NO: 45689 - protein, 9 aa, Homo sapiens
  misc_feature: Table A; Target 45689; HLA-C*06:02; MAGEC1; ENSG00000155495; CTA
YQVKQPITK

SEQ ID NO: 45690 - protein, 9 aa, Homo sapiens
  misc_feature: Table A; Target 45690; HLA-C*07:04; MAGEC1; ENSG00000155495; CTA
YQVKQPITK

SEQ ID NO: 45691 - protein, 9 aa, Homo sapiens
  misc_feature: Table A; Target 45691; HLA-C*16:01; MAGEC1; ENSG00000155495; CTA
YQVKQPITK

SEQ ID NO: 45692 - protein, 8 aa, Homo sapiens
  misc_feature: Table A; Target 45692; HLA-B*51:01; MAGEC1; ENSG00000155495; CTA
YTGYFPVI

SEQ ID NO: 45693 - protein, 9 aa, Homo sapiens
  misc_feature: Table A; Target 45693; HLA-A*24:02; MAGEC1; ENSG00000155495; CTA
YTGYFPVIF

SEQ ID NO: 45694 - protein, 10 aa, Homo sapiens
  misc_feature: Table A; Target 45694; HLA-A*68:02; MAGEC1; ENSG00000155495; CTA
YTGYFPVIFR

SEQ ID NO: 45695 - protein, 10 aa, Homo sapiens
  misc_feature: Table A; Target 45695; HLA-A*02:01; MAGEC1; ENSG00000155495; CTA
YTLDEKVDEL

SEQ ID NO: 45696 - protein, 10 aa, Homo sapiens
  misc_feature: Table A; Target 45696; HLA-A*02:04; MAGEC1; ENSG00000155495; CTA
YTLDEKVDEL

SEQ ID NO: 45697 - protein, 10 aa, Homo sapiens
  misc_feature: Table A; Target 45697; HLA-A*25:01; MAGEC1; ENSG00000155495; CTA
YTLDEKVDEL

SEQ ID NO: 45698 - protein, 10 aa, Homo sapiens
  misc_feature: Table A; Target 45698; HLA-A*26:01; MAGEC1; ENSG00000155495; CTA
YTLDEKVDEL

SEQ ID NO: 45699 - protein, 10 aa, Homo sapiens
  misc_feature: Table A; Target 45699; HLA-A*68:02; MAGEC1; ENSG00000155495; CTA
YTLDEKVDEL

SEQ ID NO: 45700 - protein, 10 aa, Homo sapiens
  misc_feature: Table A; Target 45700; HLA-B*40:01; MAGEC1; ENSG00000155495; CTA
YTLDEKVDEL

SEQ ID NO: 45701 - protein, 8 aa, Homo sapiens
  misc_feature: Table A; Target 45701; HLA-B*39:01; MAGEC1; ENSG00000155495; CTA
YTSSSDTL

SEQ ID NO: 45702 - protein, 8 aa, Homo sapiens
  misc_feature: Table A; Target 45702; HLA-C*03:03; MAGEC1; ENSG00000155495; CTA
YTSSSDTL

SEQ ID NO: 45703 - protein, 8 aa, Homo sapiens
  misc_feature: Table A; Target 45703; HLA-C*03:04; MAGEC1; ENSG00000155495; CTA
YTSSSDTL

SEQ ID NO: 45704 - protein, 8 aa, Homo sapiens
  misc_feature: Table A; Target 45704; HLA-C*05:01; MAGEC1; ENSG00000155495; CTA
YTSSSDTL

SEQ ID NO: 45705 - protein, 9 aa, Homo sapiens
  misc_feature: Table A; Target 45705; HLA-A*68:02; MAGEC1; ENSG00000155495; CTA
YTSSSDTLL

SEQ ID NO: 45706 - protein, 9 aa, Homo sapiens
  misc_feature: Table A; Target 45706; HLA-B*35:03; MAGEC1; ENSG00000155495; CTA
YTSSSDTLL

SEQ ID NO: 45707 - protein, 9 aa, Homo sapiens
  misc_feature: Table A; Target 45707; HLA-B*39:01; MAGEC1; ENSG00000155495; CTA
YTSSSDTLL

SEQ ID NO: 45708 - protein, 9 aa, Homo sapiens
  misc_feature: Table A; Target 45708; HLA-B*13:02; MAGEC1; ENSG00000155495; CTA
YVFVNTLDL

SEQ ID NO: 45709 - protein, 9 aa, Homo sapiens
  misc_feature: Table A; Target 45709; HLA-B*46:01; MAGEC1; ENSG00000155495; CTA
YVFVNTLDL

SEQ ID NO: 45710 - protein, 9 aa, Homo sapiens
  misc_feature: Table A; Target 45710; HLA-C*02:02; MAGEC1; ENSG00000155495; CTA
YVFVNTLDL

SEQ ID NO: 45711 - protein, 9 aa, Homo sapiens
  misc_feature: Table A; Target 45711; HLA-C*03:03; MAGEC1; ENSG00000155495; CTA
YVFVNTLDL

SEQ ID NO: 45712 - protein, 9 aa, Homo sapiens
  misc_feature: Table A; Target 45712; HLA-C*03:04; MAGEC1; ENSG00000155495; CTA
YVFVNTLDL

SEQ ID NO: 45713 - protein, 9 aa, Homo sapiens
  misc_feature: Table A; Target 45713; HLA-A*33:01; MAGEC1,MAGEC2; ENSG00000155495,ENSG00000046774; CTA,CTA
DALKDVEER

SEQ ID NO: 45714 - protein, 9 aa, Homo sapiens
  misc_feature: Table A; Target 45714; HLA-A*33:03; MAGEC1,MAGEC2; ENSG00000155495,ENSG00000046774; CTA,CTA
DALKDVEER

SEQ ID NO: 45715 - protein, 9 aa, Homo sapiens
  misc_feature: Table A; Target 45715; HLA-A*68:01; MAGEC1,MAGEC2; ENSG00000155495,ENSG00000046774; CTA,CTA
DALKDVEER

SEQ ID NO: 45716 - protein, 9 aa, Homo sapiens
  misc_feature: Table A; Target 45716; HLA-B*51:01; MAGEC1,MAGEC2; ENSG00000155495,ENSG00000046774; CTA,CTA
DALKDVEER

SEQ ID NO: 45717 - protein, 9 aa, Homo sapiens
  misc_feature: Table A; Target 45717; HLA-C*07:06; MAGEC1,MAGEC2; ENSG00000155495,ENSG00000046774; CTA,CTA
DALKDVEER

SEQ ID NO: 45718 - protein, 9 aa, Homo sapiens
  misc_feature: Table A; Target 45718; HLA-A*68:02; MAGEC1,MAGEC2; ENSG00000155495,ENSG00000046774; CTA,CTA
FTYTLDEKV

SEQ ID NO: 45719 - protein, 10 aa, Homo sapiens
  misc_feature: Table A; Target 45719; HLA-B*49:01; MAGEC1,MAGEC2; ENSG00000155495,ENSG00000046774; CTA,CTA
GEPRELLTKV

SEQ ID NO: 45720 - protein, 11 aa, Homo sapiens
  misc_feature: Table A; Target 45720; HLA-B*44:02; MAGEC1,MAGEC2; ENSG00000155495,ENSG00000046774; CTA,CTA
GEPRELLTKVW

SEQ ID NO: 45721 - protein, 11 aa, Homo sapiens
  misc_feature: Table A; Target 45721; HLA-B*44:03; MAGEC1,MAGEC2; ENSG00000155495,ENSG00000046774; CTA,CTA
GEPRELLTKVW

SEQ ID NO: 45722 - protein, 8 aa, Homo sapiens
  misc_feature: Table A; Target 45722; HLA-B*49:01; MAGEC2; ENSG00000046774; CTA
AEEPVTEA

SEQ ID NO: 45723 - protein, 10 aa, Homo sapiens
  misc_feature: Table A; Target 45723; HLA-A*30:01; MAGEC2; ENSG00000046774; CTA
AEEPVTEAEM

SEQ ID NO: 45724 - protein, 10 aa, Homo sapiens
  misc_feature: Table A; Target 45724; HLA-B*39:01; MAGEC2; ENSG00000046774; CTA
AEEPVTEAEM

SEQ ID NO: 45725 - protein, 10 aa, Homo sapiens
  misc_feature: Table A; Target 45725; HLA-B*40:02; MAGEC2; ENSG00000046774; CTA
AEEPVTEAEM

SEQ ID NO: 45726 - protein, 10 aa, Homo sapiens
  misc_feature: Table A; Target 45726; HLA-B*44:03; MAGEC2; ENSG00000046774; CTA
AEEPVTEAEM

SEQ ID NO: 45727 - protein, 10 aa, Homo sapiens
  misc_feature: Table A; Target 45727; HLA-B*49:01; MAGEC2; ENSG00000046774; CTA
AEEPVTEAEM

SEQ ID NO: 45728 - protein, 11 aa, Homo sapiens
  misc_feature: Table A; Target 45728; HLA-A*30:01; MAGEC2; ENSG00000046774; CTA
AEEPVTEAEML

SEQ ID NO: 45729 - protein, 11 aa, Homo sapiens
  misc_feature: Table A; Target 45729; HLA-B*38:01; MAGEC2; ENSG00000046774; CTA
AEEPVTEAEML

SEQ ID NO: 45730 - protein, 11 aa, Homo sapiens
  misc_feature: Table A; Target 45730; HLA-B*44:02; MAGEC2; ENSG00000046774; CTA
AEEPVTEAEML

SEQ ID NO: 45731 - protein, 9 aa, Homo sapiens
  misc_feature: Table A; Target 45731; HLA-B*44:02; MAGEC2; ENSG00000046774; CTA
AELVEFLLL

SEQ ID NO: 45732 - protein, 9 aa, Homo sapiens
  misc_feature: Table A; Target 45732; HLA-B*44:03; MAGEC2; ENSG00000046774; CTA
AELVEFLLL

SEQ ID NO: 45733 - protein, 9 aa, Homo sapiens
  misc_feature: Table A; Target 45733; HLA-B*49:01; MAGEC2; ENSG00000046774; CTA
AELVEFLLL

SEQ ID NO: 45734 - protein, 11 aa, Homo sapiens
  misc_feature: Table A; Target 45734; HLA-B*44:02; MAGEC2; ENSG00000046774; CTA
AELVEFLLLKY

SEQ ID NO: 45735 - protein, 11 aa, Homo sapiens
  misc_feature: Table A; Target 45735; HLA-B*44:03; MAGEC2; ENSG00000046774; CTA
AELVEFLLLKY

SEQ ID NO: 45736 - protein, 8 aa, Homo sapiens
  misc_feature: Table A; Target 45736; HLA-B*18:01; MAGEC2; ENSG00000046774; CTA
AEMLMIVI

SEQ ID NO: 45737 - protein, 8 aa, Homo sapiens
  misc_feature: Table A; Target 45737; HLA-B*44:02; MAGEC2; ENSG00000046774; CTA
AEMLMIVI

SEQ ID NO: 45738 - protein, 8 aa, Homo sapiens
  misc_feature: Table A; Target 45738; HLA-B*49:01; MAGEC2; ENSG00000046774; CTA
AEMLMIVI

SEQ ID NO: 45739 - protein, 10 aa, Homo sapiens
  misc_feature: Table A; Target 45739; HLA-A*30:01; MAGEC2; ENSG00000046774; CTA
AEMLMIVIKY

SEQ ID NO: 45740 - protein, 10 aa, Homo sapiens
  misc_feature: Table A; Target 45740; HLA-B*18:01; MAGEC2; ENSG00000046774; CTA
AEMLMIVIKY

SEQ ID NO: 45741 - protein, 10 aa, Homo sapiens
  misc_feature: Table A; Target 45741; HLA-B*27:02; MAGEC2; ENSG00000046774; CTA
AEMLMIVIKY

SEQ ID NO: 45742 - protein, 10 aa, Homo sapiens
  misc_feature: Table A; Target 45742; HLA-C*16:04; MAGEC2; ENSG00000046774; CTA
AEMLMIVIKY

SEQ ID NO: 45743 - protein, 11 aa, Homo sapiens
  misc_feature: Table A; Target 45743; HLA-B*15:03; MAGEC2; ENSG00000046774; CTA
AKLNNTVPSSF

SEQ ID NO: 45744 - protein, 10 aa, Homo sapiens
  misc_feature: Table A; Target 45744; HLA-A*02:07; MAGEC2; ENSG00000046774; CTA
ALIEVGPDHF

SEQ ID NO: 45745 - protein, 10 aa, Homo sapiens
  misc_feature: Table A; Target 45745; HLA-A*23:01; MAGEC2; ENSG00000046774; CTA
ALIEVGPDHF

SEQ ID NO: 45746 - protein, 10 aa, Homo sapiens
  misc_feature: Table A; Target 45746; HLA-B*15:01; MAGEC2; ENSG00000046774; CTA
ALIEVGPDHF

SEQ ID NO: 45747 - protein, 9 aa, Homo sapiens
  misc_feature: Table A; Target 45747; HLA-A*02:01; MAGEC2; ENSG00000046774; CTA
ALKDVEERV

SEQ ID NO: 45748 - protein, 9 aa, Homo sapiens
  misc_feature: Table A; Target 45748; HLA-A*02:03; MAGEC2; ENSG00000046774; CTA
ALKDVEERV

SEQ ID NO: 45749 - protein, 9 aa, Homo sapiens
  misc_feature: Table A; Target 45749; HLA-A*02:04; MAGEC2; ENSG00000046774; CTA
ALKDVEERV

SEQ ID NO: 45750 - protein, 9 aa, Homo sapiens
  misc_feature: Table A; Target 45750; HLA-A*02:07; MAGEC2; ENSG00000046774; CTA
ALKDVEERV

SEQ ID NO: 45751 - protein, 9 aa, Homo sapiens
  misc_feature: Table A; Target 45751; HLA-B*13:02; MAGEC2; ENSG00000046774; CTA
ALKDVEERV

SEQ ID NO: 45752 - protein, 9 aa, Homo sapiens
  misc_feature: Table A; Target 45752; HLA-B*55:01; MAGEC2; ENSG00000046774; CTA
ALKDVEERV

SEQ ID NO: 45753 - protein, 11 aa, Homo sapiens
  misc_feature: Table A; Target 45753; HLA-A*02:01; MAGEC2; ENSG00000046774; CTA
ALKDVEERVQA

SEQ ID NO: 45754 - protein, 11 aa, Homo sapiens
  misc_feature: Table A; Target 45754; HLA-A*02:03; MAGEC2; ENSG00000046774; CTA
ALKDVEERVQA

SEQ ID NO: 45755 - protein, 11 aa, Homo sapiens
  misc_feature: Table A; Target 45755; HLA-B*55:01; MAGEC2; ENSG00000046774; CTA
ALKDVEERVQA

SEQ ID NO: 45756 - protein, 8 aa, Homo sapiens
  misc_feature: Table A; Target 45756; HLA-C*05:01; MAGEC2; ENSG00000046774; CTA
ASESLSVM

SEQ ID NO: 45757 - protein, 9 aa, Homo sapiens
  misc_feature: Table A; Target 45757; HLA-A*01:01; MAGEC2; ENSG00000046774; CTA
ASSASSTLY

SEQ ID NO: 45758 - protein, 9 aa, Homo sapiens
  misc_feature: Table A; Target 45758; HLA-A*26:01; MAGEC2; ENSG00000046774; CTA
ASSASSTLY

SEQ ID NO: 45759 - protein, 9 aa, Homo sapiens
  misc_feature: Table A; Target 45759; HLA-A*29:02; MAGEC2; ENSG00000046774; CTA
ASSASSTLY

SEQ ID NO: 45760 - protein, 9 aa, Homo sapiens
  misc_feature: Table A; Target 45760; HLA-A*30:02; MAGEC2; ENSG00000046774; CTA
ASSASSTLY

SEQ ID NO: 45761 - protein, 9 aa, Homo sapiens
  misc_feature: Table A; Target 45761; HLA-A*32:01; MAGEC2; ENSG00000046774; CTA
ASSASSTLY

SEQ ID NO: 45762 - protein, 9 aa, Homo sapiens
  misc_feature: Table A; Target 45762; HLA-B*15:01; MAGEC2; ENSG00000046774; CTA
ASSASSTLY

SEQ ID NO: 45763 - protein, 9 aa, Homo sapiens
  misc_feature: Table A; Target 45763; HLA-B*15:03; MAGEC2; ENSG00000046774; CTA
ASSASSTLY

SEQ ID NO: 45764 - protein, 9 aa, Homo sapiens
  misc_feature: Table A; Target 45764; HLA-B*46:01; MAGEC2; ENSG00000046774; CTA
ASSASSTLY

SEQ ID NO: 45765 - protein, 9 aa, Homo sapiens
  misc_feature: Table A; Target 45765; HLA-B*58:01; MAGEC2; ENSG00000046774; CTA
ASSASSTLY

SEQ ID NO: 45766 - protein, 9 aa, Homo sapiens
  misc_feature: Table A; Target 45766; HLA-C*02:02; MAGEC2; ENSG00000046774; CTA
ASSASSTLY

SEQ ID NO: 45767 - protein, 9 aa, Homo sapiens
  misc_feature: Table A; Target 45767; HLA-C*07:04; MAGEC2; ENSG00000046774; CTA
ASSASSTLY

SEQ ID NO: 45768 - protein, 9 aa, Homo sapiens
  misc_feature: Table A; Target 45768; HLA-C*16:01; MAGEC2; ENSG00000046774; CTA
ASSASSTLY

SEQ ID NO: 45769 - protein, 9 aa, Homo sapiens
  misc_feature: Table A; Target 45769; HLA-C*16:02; MAGEC2; ENSG00000046774; CTA
ASSASSTLY

SEQ ID NO: 45770 - protein, 9 aa, Homo sapiens
  misc_feature: Table A; Target 45770; HLA-C*16:04; MAGEC2; ENSG00000046774; CTA
ASSASSTLY

SEQ ID NO: 45771 - protein, 9 aa, Homo sapiens
  misc_feature: Table A; Target 45771; HLA-A*01:01; MAGEC2; ENSG00000046774; CTA
ASSTLYLVF

SEQ ID NO: 45772 - protein, 9 aa, Homo sapiens
  misc_feature: Table A; Target 45772; HLA-A*03:01; MAGEC2; ENSG00000046774; CTA
ASSTLYLVF

SEQ ID NO: 45773 - protein, 9 aa, Homo sapiens
  misc_feature: Table A; Target 45773; HLA-A*11:01; MAGEC2; ENSG00000046774; CTA
ASSTLYLVF

SEQ ID NO: 45774 - protein, 9 aa, Homo sapiens
  misc_feature: Table A; Target 45774; HLA-A*23:01; MAGEC2; ENSG00000046774; CTA
ASSTLYLVF

SEQ ID NO: 45775 - protein, 9 aa, Homo sapiens
  misc_feature: Table A; Target 45775; HLA-A*29:02; MAGEC2; ENSG00000046774; CTA
ASSTLYLVF

SEQ ID NO: 45776 - protein, 9 aa, Homo sapiens
  misc_feature: Table A; Target 45776; HLA-A*30:02; MAGEC2; ENSG00000046774; CTA
ASSTLYLVF

SEQ ID NO: 45777 - protein, 9 aa, Homo sapiens
  misc_feature: Table A; Target 45777; HLA-A*32:01; MAGEC2; ENSG00000046774; CTA
ASSTLYLVF

SEQ ID NO: 45778 - protein, 9 aa, Homo sapiens
  misc_feature: Table A; Target 45778; HLA-B*27:02; MAGEC2; ENSG00000046774; CTA
ASSTLYLVF

SEQ ID NO: 45779 - protein, 9 aa, Homo sapiens
  misc_feature: Table A; Target 45779; HLA-B*57:01; MAGEC2; ENSG00000046774; CTA
ASSTLYLVF

SEQ ID NO: 45780 - protein, 9 aa, Homo sapiens
  misc_feature: Table A; Target 45780; HLA-B*58:01; MAGEC2; ENSG00000046774; CTA
ASSTLYLVF

SEQ ID NO: 45781 - protein, 9 aa, Homo sapiens
  misc_feature: Table A; Target 45781; HLA-C*02:02; MAGEC2; ENSG00000046774; CTA
ASSTLYLVF

SEQ ID NO: 45782 - protein, 9 aa, Homo sapiens
  misc_feature: Table A; Target 45782; HLA-C*12:03; MAGEC2; ENSG00000046774; CTA
ASSTLYLVF

SEQ ID NO: 45783 - protein, 9 aa, Homo sapiens
  misc_feature: Table A; Target 45783; HLA-C*16:01; MAGEC2; ENSG00000046774; CTA
ASSTLYLVF

SEQ ID NO: 45784 - protein, 9 aa, Homo sapiens
  misc_feature: Table A; Target 45784; HLA-C*16:04; MAGEC2; ENSG00000046774; CTA
ASSTLYLVF

SEQ ID NO: 45785 - protein, 11 aa, Homo sapiens
  misc_feature: Table A; Target 45785; HLA-A*68:02; MAGEC2; ENSG00000046774; CTA
ATIDTADDATV

SEQ ID NO: 45786 - protein, 9 aa, Homo sapiens
  misc_feature: Table A; Target 45786; HLA-B*15:01; MAGEC2; ENSG00000046774; CTA
ATVMASESL

SEQ ID NO: 45787 - protein, 9 aa, Homo sapiens
  misc_feature: Table A; Target 45787; HLA-B*40:01; MAGEC2; ENSG00000046774; CTA
ATVMASESL

SEQ ID NO: 45788 - protein, 9 aa, Homo sapiens
  misc_feature: Table A; Target 45788; HLA-B*46:01; MAGEC2; ENSG00000046774; CTA
ATVMASESL

SEQ ID NO: 45789 - protein, 9 aa, Homo sapiens
  misc_feature: Table A; Target 45789; HLA-B*58:01; MAGEC2; ENSG00000046774; CTA
ATVMASESL

SEQ ID NO: 45790 - protein, 9 aa, Homo sapiens
  misc_feature: Table A; Target 45790; HLA-C*01:02; MAGEC2; ENSG00000046774; CTA
ATVMASESL

SEQ ID NO: 45791 - protein, 9 aa, Homo sapiens
  misc_feature: Table A; Target 45791; HLA-C*03:03; MAGEC2; ENSG00000046774; CTA
ATVMASESL

SEQ ID NO: 45792 - protein, 9 aa, Homo sapiens
  misc_feature: Table A; Target 45792; HLA-C*03:04; MAGEC2; ENSG00000046774; CTA
ATVMASESL

SEQ ID NO: 45793 - protein, 9 aa, Homo sapiens
  misc_feature: Table A; Target 45793; HLA-C*14:02; MAGEC2; ENSG00000046774; CTA
ATVMASESL

SEQ ID NO: 45794 - protein, 9 aa, Homo sapiens
  misc_feature: Table A; Target 45794; HLA-C*16:04; MAGEC2; ENSG00000046774; CTA
ATVMASESL

SEQ ID NO: 45795 - protein, 9 aa, Homo sapiens
  misc_feature: Table A; Target 45795; HLA-A*02:03; MAGEC2; ENSG00000046774; CTA
CVFANTVGL

SEQ ID NO: 45796 - protein, 9 aa, Homo sapiens
  misc_feature: Table A; Target 45796; HLA-A*03:02; MAGEC2; ENSG00000046774; CTA
CVFANTVGL

SEQ ID NO: 45797 - protein, 9 aa, Homo sapiens
  misc_feature: Table A; Target 45797; HLA-B*13:02; MAGEC2; ENSG00000046774; CTA
CVFANTVGL

SEQ ID NO: 45798 - protein, 9 aa, Homo sapiens
  misc_feature: Table A; Target 45798; HLA-B*15:03; MAGEC2; ENSG00000046774; CTA
CVFANTVGL

SEQ ID NO: 45799 - protein, 9 aa, Homo sapiens
  misc_feature: Table A; Target 45799; HLA-B*27:05; MAGEC2; ENSG00000046774; CTA
CVFANTVGL

SEQ ID NO: 45800 - protein, 9 aa, Homo sapiens
  misc_feature: Table A; Target 45800; HLA-B*58:01; MAGEC2; ENSG00000046774; CTA
CVFANTVGL

SEQ ID NO: 45801 - protein, 9 aa, Homo sapiens
  misc_feature: Table A; Target 45801; HLA-C*01:02; MAGEC2; ENSG00000046774; CTA
CVFANTVGL

SEQ ID NO: 45802 - protein, 9 aa, Homo sapiens
  misc_feature: Table A; Target 45802; HLA-C*02:02; MAGEC2; ENSG00000046774; CTA
CVFANTVGL

SEQ ID NO: 45803 - protein, 10 aa, Homo sapiens
  misc_feature: Table A; Target 45803; HLA-B*35:03; MAGEC2; ENSG00000046774; CTA
DATVMASESL

SEQ ID NO: 45804 - protein, 9 aa, Homo sapiens
  misc_feature: Table A; Target 45804; HLA-A*30:01; MAGEC2; ENSG00000046774; CTA
DEGMPENSL

SEQ ID NO: 45805 - protein, 9 aa, Homo sapiens
  misc_feature: Table A; Target 45805; HLA-B*18:01; MAGEC2; ENSG00000046774; CTA
DEGMPENSL

SEQ ID NO: 45806 - protein, 9 aa, Homo sapiens
  misc_feature: Table A; Target 45806; HLA-B*40:01; MAGEC2; ENSG00000046774; CTA
DEGMPENSL

SEQ ID NO: 45807 - protein, 10 aa, Homo sapiens
  misc_feature: Table A; Target 45807; HLA-B*40:01; MAGEC2; ENSG00000046774; CTA
DEGMPENSLL

SEQ ID NO: 45808 - protein, 10 aa, Homo sapiens
  misc_feature: Table A; Target 45808; HLA-B*18:01; MAGEC2; ENSG00000046774; CTA
DEKVAELVEF

SEQ ID NO: 45809 - protein, 8 aa, Homo sapiens
  misc_feature: Table A; Target 45809; HLA-C*05:01; MAGEC2; ENSG00000046774; CTA
DNDSPTSV

SEQ ID NO: 45810 - protein, 10 aa, Homo sapiens
  misc_feature: Table A; Target 45810; HLA-B*38:01; MAGEC2; ENSG00000046774; CTA
DNDSPTSVEL

SEQ ID NO: 45811 - protein, 10 aa, Homo sapiens
  misc_feature: Table A; Target 45811; HLA-B*39:01; MAGEC2; ENSG00000046774; CTA
DNDSPTSVEL

SEQ ID NO: 45812 - protein, 10 aa, Homo sapiens
  misc_feature: Table A; Target 45812; HLA-C*05:01; MAGEC2; ENSG00000046774; CTA
DNDSPTSVEL

SEQ ID NO: 45813 - protein, 8 aa, Homo sapiens
  misc_feature: Table A; Target 45813; HLA-A*01:01; MAGEC2; ENSG00000046774; CTA
DSESSFTY

SEQ ID NO: 45814 - protein, 8 aa, Homo sapiens
  misc_feature: Table A; Target 45814; HLA-B*08:01; MAGEC2; ENSG00000046774; CTA
DSPTSVEL

SEQ ID NO: 45815 - protein, 8 aa, Homo sapiens
  misc_feature: Table A; Target 45815; HLA-B*51:01; MAGEC2; ENSG00000046774; CTA
DSPTSVEL

SEQ ID NO: 45816 - protein, 8 aa, Homo sapiens
  misc_feature: Table A; Target 45816; HLA-C*01:02; MAGEC2; ENSG00000046774; CTA
DSPTSVEL

SEQ ID NO: 45817 - protein, 8 aa, Homo sapiens
  misc_feature: Table A; Target 45817; HLA-C*05:01; MAGEC2; ENSG00000046774; CTA
DSPTSVEL

SEQ ID NO: 45818 - protein, 11 aa, Homo sapiens
  misc_feature: Table A; Target 45818; HLA-A*33:01; MAGEC2; ENSG00000046774; CTA
DSPTSVELEDW

SEQ ID NO: 45819 - protein, 9 aa, Homo sapiens
  misc_feature: Table A; Target 45819; HLA-A*25:01; MAGEC2; ENSG00000046774; CTA
DTADDATVM

SEQ ID NO: 45820 - protein, 9 aa, Homo sapiens
  misc_feature: Table A; Target 45820; HLA-A*26:01; MAGEC2; ENSG00000046774; CTA
DTADDATVM

SEQ ID NO: 45821 - protein, 9 aa, Homo sapiens
  misc_feature: Table A; Target 45821; HLA-A*68:01; MAGEC2; ENSG00000046774; CTA
DTADDATVM

SEQ ID NO: 45822 - protein, 9 aa, Homo sapiens
  misc_feature: Table A; Target 45822; HLA-B*35:01; MAGEC2; ENSG00000046774; CTA
DTADDATVM

SEQ ID NO: 45823 - protein, 9 aa, Homo sapiens
  misc_feature: Table A; Target 45823; HLA-B*35:03; MAGEC2; ENSG00000046774; CTA
DTADDATVM

SEQ ID NO: 45824 - protein, 9 aa, Homo sapiens
  misc_feature: Table A; Target 45824; HLA-B*39:01; MAGEC2; ENSG00000046774; CTA
DTADDATVM

SEQ ID NO: 45825 - protein, 9 aa, Homo sapiens
  misc_feature: Table A; Target 45825; HLA-C*07:06; MAGEC2; ENSG00000046774; CTA
DTADDATVM

SEQ ID NO: 45826 - protein, 10 aa, Homo sapiens
  misc_feature: Table A; Target 45826; HLA-A*68:01; MAGEC2; ENSG00000046774; CTA
DTADDATVMA

SEQ ID NO: 45827 - protein, 10 aa, Homo sapiens
  misc_feature: Table A; Target 45827; HLA-A*25:01; MAGEC2; ENSG00000046774; CTA
DVEERVQATI

SEQ ID NO: 45828 - protein, 8 aa, Homo sapiens
  misc_feature: Table A; Target 45828; HLA-A*33:01; MAGEC2; ENSG00000046774; CTA
DYFPVILK

SEQ ID NO: 45829 - protein, 8 aa, Homo sapiens
  misc_feature: Table A; Target 45829; HLA-A*33:03; MAGEC2; ENSG00000046774; CTA
DYFPVILK

SEQ ID NO: 45830 - protein, 8 aa, Homo sapiens
  misc_feature: Table A; Target 45830; HLA-C*07:02; MAGEC2; ENSG00000046774; CTA
DYFPVILK

SEQ ID NO: 45831 - protein, 9 aa, Homo sapiens
  misc_feature: Table A; Target 45831; HLA-A*24:02; MAGEC2; ENSG00000046774; CTA
DYFPVILKR

SEQ ID NO: 45832 - protein, 9 aa, Homo sapiens
  misc_feature: Table A; Target 45832; HLA-A*29:02; MAGEC2; ENSG00000046774; CTA
DYFPVILKR

SEQ ID NO: 45833 - protein, 9 aa, Homo sapiens
  misc_feature: Table A; Target 45833; HLA-A*31:01; MAGEC2; ENSG00000046774; CTA
DYFPVILKR

SEQ ID NO: 45834 - protein, 9 aa, Homo sapiens
  misc_feature: Table A; Target 45834; HLA-A*33:01; MAGEC2; ENSG00000046774; CTA
DYFPVILKR

SEQ ID NO: 45835 - protein, 9 aa, Homo sapiens
  misc_feature: Table A; Target 45835; HLA-A*33:03; MAGEC2; ENSG00000046774; CTA
DYFPVILKR

SEQ ID NO: 45836 - protein, 9 aa, Homo sapiens
  misc_feature: Table A; Target 45836; HLA-A*68:01; MAGEC2; ENSG00000046774; CTA
DYFPVILKR

SEQ ID NO: 45837 - protein, 9 aa, Homo sapiens
  misc_feature: Table A; Target 45837; HLA-A*68:02; MAGEC2; ENSG00000046774; CTA
DYFPVILKR

SEQ ID NO: 45838 - protein, 9 aa, Homo sapiens
  misc_feature: Table A; Target 45838; HLA-C*07:06; MAGEC2; ENSG00000046774; CTA
DYFPVILKR

SEQ ID NO: 45839 - protein, 9 aa, Homo sapiens
  misc_feature: Table A; Target 45839; HLA-C*05:01; MAGEC2; ENSG00000046774; CTA
EAEEPVTEA

SEQ ID NO: 45840 - protein, 11 aa, Homo sapiens
  misc_feature: Table A; Target 45840; HLA-C*05:01; MAGEC2; ENSG00000046774; CTA
EAEEPVTEAEM

SEQ ID NO: 45841 - protein, 9 aa, Homo sapiens
  misc_feature: Table A; Target 45841; HLA-A*25:01; MAGEC2; ENSG00000046774; CTA
EASSASSTL

SEQ ID NO: 45842 - protein, 9 aa, Homo sapiens
  misc_feature: Table A; Target 45842; HLA-A*26:01; MAGEC2; ENSG00000046774; CTA
EASSASSTL

SEQ ID NO: 45843 - protein, 9 aa, Homo sapiens
  misc_feature: Table A; Target 45843; HLA-B*35:01; MAGEC2; ENSG00000046774; CTA
EASSASSTL

SEQ ID NO: 45844 - protein, 9 aa, Homo sapiens
  misc_feature: Table A; Target 45844; HLA-B*35:03; MAGEC2; ENSG00000046774; CTA
EASSASSTL

SEQ ID NO: 45845 - protein, 9 aa, Homo sapiens
  misc_feature: Table A; Target 45845; HLA-B*39:01; MAGEC2; ENSG00000046774; CTA
EASSASSTL

SEQ ID NO: 45846 - protein, 9 aa, Homo sapiens
  misc_feature: Table A; Target 45846; HLA-B*51:01; MAGEC2; ENSG00000046774; CTA
EASSASSTL

SEQ ID NO: 45847 - protein, 9 aa, Homo sapiens
  misc_feature: Table A; Target 45847; HLA-C*01:02; MAGEC2; ENSG00000046774; CTA
EASSASSTL

SEQ ID NO: 45848 - protein, 9 aa, Homo sapiens
  misc_feature: Table A; Target 45848; HLA-C*03:03; MAGEC2; ENSG00000046774; CTA
EASSASSTL

SEQ ID NO: 45849 - protein, 9 aa, Homo sapiens
  misc_feature: Table A; Target 45849; HLA-C*03:04; MAGEC2; ENSG00000046774; CTA
EASSASSTL

SEQ ID NO: 45850 - protein, 9 aa, Homo sapiens
  misc_feature: Table A; Target 45850; HLA-C*05:01; MAGEC2; ENSG00000046774; CTA
EASSASSTL

SEQ ID NO: 45851 - protein, 9 aa, Homo sapiens
  misc_feature: Table A; Target 45851; HLA-C*07:06; MAGEC2; ENSG00000046774; CTA
EASSASSTL

SEQ ID NO: 45852 - protein, 10 aa, Homo sapiens
  misc_feature: Table A; Target 45852; HLA-A*01:01; MAGEC2; ENSG00000046774; CTA
EASSASSTLY

SEQ ID NO: 45853 - protein, 10 aa, Homo sapiens
  misc_feature: Table A; Target 45853; HLA-A*25:01; MAGEC2; ENSG00000046774; CTA
EASSASSTLY

SEQ ID NO: 45854 - protein, 10 aa, Homo sapiens
  misc_feature: Table A; Target 45854; HLA-A*26:01; MAGEC2; ENSG00000046774; CTA
EASSASSTLY

SEQ ID NO: 45855 - protein, 10 aa, Homo sapiens
  misc_feature: Table A; Target 45855; HLA-A*30:02; MAGEC2; ENSG00000046774; CTA
EASSASSTLY

SEQ ID NO: 45856 - protein, 10 aa, Homo sapiens
  misc_feature: Table A; Target 45856; HLA-A*68:01; MAGEC2; ENSG00000046774; CTA
EASSASSTLY

SEQ ID NO: 45857 - protein, 10 aa, Homo sapiens
  misc_feature: Table A; Target 45857; HLA-B*35:01; MAGEC2; ENSG00000046774; CTA
EASSASSTLY

SEQ ID NO: 45858 - protein, 10 aa, Homo sapiens
  misc_feature: Table A; Target 45858; HLA-C*07:06; MAGEC2; ENSG00000046774; CTA
EASSASSTLY

SEQ ID NO: 45859 - protein, 10 aa, Homo sapiens
  misc_feature: Table A; Target 45859; HLA-A*30:01; MAGEC2; ENSG00000046774; CTA
EEASSASSTL

SEQ ID NO: 45860 - protein, 10 aa, Homo sapiens
  misc_feature: Table A; Target 45860; HLA-B*40:01; MAGEC2; ENSG00000046774; CTA
EEASSASSTL

SEQ ID NO: 45861 - protein, 10 aa, Homo sapiens
  misc_feature: Table A; Target 45861; HLA-B*44:03; MAGEC2; ENSG00000046774; CTA
EEASSASSTL

SEQ ID NO: 45862 - protein, 11 aa, Homo sapiens
  misc_feature: Table A; Target 45862; HLA-A*26:01; MAGEC2; ENSG00000046774; CTA
EEASSASSTLY

SEQ ID NO: 45863 - protein, 11 aa, Homo sapiens
  misc_feature: Table A; Target 45863; HLA-B*18:01; MAGEC2; ENSG00000046774; CTA
EEASSASSTLY

SEQ ID NO: 45864 - protein, 11 aa, Homo sapiens
  misc_feature: Table A; Target 45864; HLA-B*44:02; MAGEC2; ENSG00000046774; CTA
EEASSASSTLY

SEQ ID NO: 45865 - protein, 11 aa, Homo sapiens
  misc_feature: Table A; Target 45865; HLA-B*44:03; MAGEC2; ENSG00000046774; CTA
EEASSASSTLY

SEQ ID NO: 45866 - protein, 11 aa, Homo sapiens
  misc_feature: Table A; Target 45866; HLA-C*16:04; MAGEC2; ENSG00000046774; CTA
EEASSASSTLY

SEQ ID NO: 45867 - protein, 11 aa, Homo sapiens
  misc_feature: Table A; Target 45867; HLA-B*40:01; MAGEC2; ENSG00000046774; CTA
EEEASSASSTL

SEQ ID NO: 45868 - protein, 9 aa, Homo sapiens
  misc_feature: Table A; Target 45868; HLA-B*49:01; MAGEC2; ENSG00000046774; CTA
EEEVPSGVI

SEQ ID NO: 45869 - protein, 9 aa, Homo sapiens
  misc_feature: Table A; Target 45869; HLA-B*40:01; MAGEC2; ENSG00000046774; CTA
EEPVTEAEM

SEQ ID NO: 45870 - protein, 9 aa, Homo sapiens
  misc_feature: Table A; Target 45870; HLA-B*44:02; MAGEC2; ENSG00000046774; CTA
EEPVTEAEM

SEQ ID NO: 45871 - protein, 9 aa, Homo sapiens
  misc_feature: Table A; Target 45871; HLA-B*44:03; MAGEC2; ENSG00000046774; CTA
EEPVTEAEM

SEQ ID NO: 45872 - protein, 10 aa, Homo sapiens
  misc_feature: Table A; Target 45872; HLA-B*40:01; MAGEC2; ENSG00000046774; CTA
EEPVTEAEML

SEQ ID NO: 45873 - protein, 8 aa, Homo sapiens
  misc_feature: Table A; Target 45873; HLA-B*18:01; MAGEC2; ENSG00000046774; CTA
EEVIWEVL

SEQ ID NO: 45874 - protein, 8 aa, Homo sapiens
  misc_feature: Table A; Target 45874; HLA-B*49:01; MAGEC2; ENSG00000046774; CTA
EEVPSGVI

SEQ ID NO: 45875 - protein, 11 aa, Homo sapiens
  misc_feature: Table A; Target 45875; HLA-A*30:01; MAGEC2; ENSG00000046774; CTA
EEVPSGVIPNL

SEQ ID NO: 45876 - protein, 11 aa, Homo sapiens
  misc_feature: Table A; Target 45876; HLA-B*40:01; MAGEC2; ENSG00000046774; CTA
EEVPSGVIPNL

SEQ ID NO: 45877 - protein, 11 aa, Homo sapiens
  misc_feature: Table A; Target 45877; HLA-B*44:02; MAGEC2; ENSG00000046774; CTA
EEVPSGVIPNL

SEQ ID NO: 45878 - protein, 11 aa, Homo sapiens
  misc_feature: Table A; Target 45878; HLA-B*44:03; MAGEC2; ENSG00000046774; CTA
EEVPSGVIPNL

SEQ ID NO: 45879 - protein, 9 aa, Homo sapiens
  misc_feature: Table A; Target 45879; HLA-A*33:01; MAGEC2; ENSG00000046774; CTA
EHFVYGEPR

SEQ ID NO: 45880 - protein, 9 aa, Homo sapiens
  misc_feature: Table A; Target 45880; HLA-A*33:03; MAGEC2; ENSG00000046774; CTA
EHFVYGEPR

SEQ ID NO: 45881 - protein, 10 aa, Homo sapiens
  misc_feature: Table A; Target 45881; HLA-A*25:01; MAGEC2; ENSG00000046774; CTA
ELVEFLLLKY

SEQ ID NO: 45882 - protein, 10 aa, Homo sapiens
  misc_feature: Table A; Target 45882; HLA-A*26:01; MAGEC2; ENSG00000046774; CTA
ELVEFLLLKY

SEQ ID NO: 45883 - protein, 10 aa, Homo sapiens
  misc_feature: Table A; Target 45883; HLA-A*29:02; MAGEC2; ENSG00000046774; CTA
ELVEFLLLKY

SEQ ID NO: 45884 - protein, 10 aa, Homo sapiens
  misc_feature: Table A; Target 45884; HLA-B*44:03; MAGEC2; ENSG00000046774; CTA
ELVEFLLLKY

SEQ ID NO: 45885 - protein, 9 aa, Homo sapiens
  misc_feature: Table A; Target 45885; HLA-A*01:01; MAGEC2; ENSG00000046774; CTA
EMLMIVIKY

SEQ ID NO: 45886 - protein, 9 aa, Homo sapiens
  misc_feature: Table A; Target 45886; HLA-A*23:01; MAGEC2; ENSG00000046774; CTA
EMLMIVIKY

SEQ ID NO: 45887 - protein, 9 aa, Homo sapiens
  misc_feature: Table A; Target 45887; HLA-A*26:01; MAGEC2; ENSG00000046774; CTA
EMLMIVIKY

SEQ ID NO: 45888 - protein, 9 aa, Homo sapiens
  misc_feature: Table A; Target 45888; HLA-A*29:02; MAGEC2; ENSG00000046774; CTA
EMLMIVIKY

SEQ ID NO: 45889 - protein, 9 aa, Homo sapiens
  misc_feature: Table A; Target 45889; HLA-A*33:03; MAGEC2; ENSG00000046774; CTA
EMLMIVIKY

SEQ ID NO: 45890 - protein, 9 aa, Homo sapiens
  misc_feature: Table A; Target 45890; HLA-B*18:01; MAGEC2; ENSG00000046774; CTA
EMLMIVIKY

SEQ ID NO: 45891 - protein, 9 aa, Homo sapiens
  misc_feature: Table A; Target 45891; HLA-B*35:01; MAGEC2; ENSG00000046774; CTA
EMLMIVIKY

SEQ ID NO: 45892 - protein, 9 aa, Homo sapiens
  misc_feature: Table A; Target 45892; HLA-B*44:02; MAGEC2; ENSG00000046774; CTA
EMLMIVIKY

SEQ ID NO: 45893 - protein, 9 aa, Homo sapiens
  misc_feature: Table A; Target 45893; HLA-B*44:03; MAGEC2; ENSG00000046774; CTA
EMLMIVIKY

SEQ ID NO: 45894 - protein, 9 aa, Homo sapiens
  misc_feature: Table A; Target 45894; HLA-C*07:01; MAGEC2; ENSG00000046774; CTA
EMLMIVIKY

SEQ ID NO: 45895 - protein, 9 aa, Homo sapiens
  misc_feature: Table A; Target 45895; HLA-C*12:03; MAGEC2; ENSG00000046774; CTA
EMLMIVIKY

SEQ ID NO: 45896 - protein, 8 aa, Homo sapiens
  misc_feature: Table A; Target 45896; HLA-B*35:01; MAGEC2; ENSG00000046774; CTA
EPVTEAEM

SEQ ID NO: 45897 - protein, 8 aa, Homo sapiens
  misc_feature: Table A; Target 45897; HLA-B*35:03; MAGEC2; ENSG00000046774; CTA
EPVTEAEM

SEQ ID NO: 45898 - protein, 9 aa, Homo sapiens
  misc_feature: Table A; Target 45898; HLA-B*35:01; MAGEC2; ENSG00000046774; CTA
EPVTEAEML

SEQ ID NO: 45899 - protein, 9 aa, Homo sapiens
  misc_feature: Table A; Target 45899; HLA-B*35:03; MAGEC2; ENSG00000046774; CTA
EPVTEAEML

SEQ ID NO: 45900 - protein, 10 aa, Homo sapiens
  misc_feature: Table A; Target 45900; HLA-B*35:03; MAGEC2; ENSG00000046774; CTA
EPVTEAEMLM

SEQ ID NO: 45901 - protein, 8 aa, Homo sapiens
  misc_feature: Table A; Target 45901; HLA-B*08:01; MAGEC2; ENSG00000046774; CTA
ESIKKKVL

SEQ ID NO: 45902 - protein, 10 aa, Homo sapiens
  misc_feature: Table A; Target 45902; HLA-A*25:01; MAGEC2; ENSG00000046774; CTA
EVGPDHFCVF

SEQ ID NO: 45903 - protein, 10 aa, Homo sapiens
  misc_feature: Table A; Target 45903; HLA-A*26:01; MAGEC2; ENSG00000046774; CTA
EVGPDHFCVF

SEQ ID NO: 45904 - protein, 9 aa, Homo sapiens
  misc_feature: Table A; Target 45904; HLA-A*26:01; MAGEC2; ENSG00000046774; CTA
EVIWEVLNA

SEQ ID NO: 45905 - protein, 9 aa, Homo sapiens
  misc_feature: Table A; Target 45905; HLA-A*68:02; MAGEC2; ENSG00000046774; CTA
EVIWEVLNA

SEQ ID NO: 45906 - protein, 10 aa, Homo sapiens
  misc_feature: Table A; Target 45906; HLA-A*25:01; MAGEC2; ENSG00000046774; CTA
EVIWEVLNAV

SEQ ID NO: 45907 - protein, 10 aa, Homo sapiens
  misc_feature: Table A; Target 45907; HLA-A*26:01; MAGEC2; ENSG00000046774; CTA
EVIWEVLNAV

SEQ ID NO: 45908 - protein, 9 aa, Homo sapiens
  misc_feature: Table A; Target 45908; HLA-A*25:01; MAGEC2; ENSG00000046774; CTA
EVLNAVGVY

SEQ ID NO: 45909 - protein, 9 aa, Homo sapiens
  misc_feature: Table A; Target 45909; HLA-A*29:02; MAGEC2; ENSG00000046774; CTA
EVLNAVGVY

SEQ ID NO: 45910 - protein, 9 aa, Homo sapiens
  misc_feature: Table A; Target 45910; HLA-A*30:02; MAGEC2; ENSG00000046774; CTA
EVLNAVGVY

SEQ ID NO: 45911 - protein, 9 aa, Homo sapiens
  misc_feature: Table A; Target 45911; HLA-A*33:01; MAGEC2; ENSG00000046774; CTA
EVLNAVGVY

SEQ ID NO: 45912 - protein, 9 aa, Homo sapiens
  misc_feature: Table A; Target 45912; HLA-A*33:03; MAGEC2; ENSG00000046774; CTA
EVLNAVGVY

SEQ ID NO: 45913 - protein, 9 aa, Homo sapiens
  misc_feature: Table A; Target 45913; HLA-A*68:01; MAGEC2; ENSG00000046774; CTA
EVLNAVGVY

SEQ ID NO: 45914 - protein, 9 aa, Homo sapiens
  misc_feature: Table A; Target 45914; HLA-B*15:01; MAGEC2; ENSG00000046774; CTA
EVLNAVGVY

SEQ ID NO: 45915 - protein, 9 aa, Homo sapiens
  misc_feature: Table A; Target 45915; HLA-B*15:03; MAGEC2; ENSG00000046774; CTA
EVLNAVGVY

SEQ ID NO: 45916 - protein, 9 aa, Homo sapiens
  misc_feature: Table A; Target 45916; HLA-B*18:01; MAGEC2; ENSG00000046774; CTA
EVLNAVGVY

SEQ ID NO: 45917 - protein, 9 aa, Homo sapiens
  misc_feature: Table A; Target 45917; HLA-B*35:01; MAGEC2; ENSG00000046774; CTA
EVLNAVGVY

SEQ ID NO: 45918 - protein, 9 aa, Homo sapiens
  misc_feature: Table A; Target 45918; HLA-B*39:01; MAGEC2; ENSG00000046774; CTA
EVLNAVGVY

SEQ ID NO: 45919 - protein, 9 aa, Homo sapiens
  misc_feature: Table A; Target 45919; HLA-B*44:03; MAGEC2; ENSG00000046774; CTA
EVLNAVGVY

SEQ ID NO: 45920 - protein, 9 aa, Homo sapiens
  misc_feature: Table A; Target 45920; HLA-B*46:01; MAGEC2; ENSG00000046774; CTA
EVLNAVGVY

SEQ ID NO: 45921 - protein, 9 aa, Homo sapiens
  misc_feature: Table A; Target 45921; HLA-C*07:04; MAGEC2; ENSG00000046774; CTA
EVLNAVGVY

SEQ ID NO: 45922 - protein, 9 aa, Homo sapiens
  misc_feature: Table A; Target 45922; HLA-C*07:06; MAGEC2; ENSG00000046774; CTA
EVLNAVGVY

SEQ ID NO: 45923 - protein, 9 aa, Homo sapiens
  misc_feature: Table A; Target 45923; HLA-C*12:03; MAGEC2; ENSG00000046774; CTA
EVLNAVGVY

SEQ ID NO: 45924 - protein, 10 aa, Homo sapiens
  misc_feature: Table A; Target 45924; HLA-A*26:01; MAGEC2; ENSG00000046774; CTA
EVLNAVGVYA

SEQ ID NO: 45925 - protein, 10 aa, Homo sapiens
  misc_feature: Table A; Target 45925; HLA-A*33:03; MAGEC2; ENSG00000046774; CTA
EVLNAVGVYA

SEQ ID NO: 45926 - protein, 10 aa, Homo sapiens
  misc_feature: Table A; Target 45926; HLA-A*68:01; MAGEC2; ENSG00000046774; CTA
EVLNAVGVYA

SEQ ID NO: 45927 - protein, 10 aa, Homo sapiens
  misc_feature: Table A; Target 45927; HLA-A*68:02; MAGEC2; ENSG00000046774; CTA
EVLNAVGVYA

SEQ ID NO: 45928 - protein, 9 aa, Homo sapiens
  misc_feature: Table A; Target 45928; HLA-A*25:01; MAGEC2; ENSG00000046774; CTA
EVPHSSPPY

SEQ ID NO: 45929 - protein, 9 aa, Homo sapiens
  misc_feature: Table A; Target 45929; HLA-A*26:01; MAGEC2; ENSG00000046774; CTA
EVPHSSPPY

SEQ ID NO: 45930 - protein, 9 aa, Homo sapiens
  misc_feature: Table A; Target 45930; HLA-A*29:02; MAGEC2; ENSG00000046774; CTA
EVPHSSPPY

SEQ ID NO: 45931 - protein, 10 aa, Homo sapiens
  misc_feature: Table A; Target 45931; HLA-A*25:01; MAGEC2; ENSG00000046774; CTA
EVPHSSPPYY

SEQ ID NO: 45932 - protein, 10 aa, Homo sapiens
  misc_feature: Table A; Target 45932; HLA-A*26:01; MAGEC2; ENSG00000046774; CTA
EVPHSSPPYY

SEQ ID NO: 45933 - protein, 10 aa, Homo sapiens
  misc_feature: Table A; Target 45933; HLA-A*24:02; MAGEC2; ENSG00000046774; CTA
EVPSGVIPNL

SEQ ID NO: 45934 - protein, 10 aa, Homo sapiens
  misc_feature: Table A; Target 45934; HLA-A*25:01; MAGEC2; ENSG00000046774; CTA
EVPSGVIPNL

SEQ ID NO: 45935 - protein, 10 aa, Homo sapiens
  misc_feature: Table A; Target 45935; HLA-A*33:03; MAGEC2; ENSG00000046774; CTA
EVPSGVIPNL

SEQ ID NO: 45936 - protein, 10 aa, Homo sapiens
  misc_feature: Table A; Target 45936; HLA-A*68:01; MAGEC2; ENSG00000046774; CTA
EVPSGVIPNL

SEQ ID NO: 45937 - protein, 10 aa, Homo sapiens
  misc_feature: Table A; Target 45937; HLA-A*68:02; MAGEC2; ENSG00000046774; CTA
EVPSGVIPNL

SEQ ID NO: 45938 - protein, 9 aa, Homo sapiens
  misc_feature: Table A; Target 45938; HLA-A*02:01; MAGEC2; ENSG00000046774; CTA
FLAKLNNTV

SEQ ID NO: 45939 - protein, 9 aa, Homo sapiens
  misc_feature: Table A; Target 45939; HLA-A*02:03; MAGEC2; ENSG00000046774; CTA
FLAKLNNTV

SEQ ID NO: 45940 - protein, 9 aa, Homo sapiens
  misc_feature: Table A; Target 45940; HLA-A*02:04; MAGEC2; ENSG00000046774; CTA
FLAKLNNTV

SEQ ID NO: 45941 - protein, 9 aa, Homo sapiens
  misc_feature: Table A; Target 45941; HLA-A*68:02; MAGEC2; ENSG00000046774; CTA
FLAKLNNTV

SEQ ID NO: 45942 - protein, 9 aa, Homo sapiens
  misc_feature: Table A; Target 45942; HLA-B*13:02; MAGEC2; ENSG00000046774; CTA
FLAKLNNTV

SEQ ID NO: 45943 - protein, 9 aa, Homo sapiens
  misc_feature: Table A; Target 45943; HLA-B*55:01; MAGEC2; ENSG00000046774; CTA
FLAKLNNTV

SEQ ID NO: 45944 - protein, 8 aa, Homo sapiens
  misc_feature: Table A; Target 45944; HLA-B*54:01; MAGEC2; ENSG00000046774; CTA
FPVILKRA

SEQ ID NO: 45945 - protein, 9 aa, Homo sapiens
  misc_feature: Table A; Target 45945; HLA-A*01:01; MAGEC2; ENSG00000046774; CTA
FSEESSSQK

SEQ ID NO: 45946 - protein, 9 aa, Homo sapiens
  misc_feature: Table A; Target 45946; HLA-C*05:01; MAGEC2; ENSG00000046774; CTA
FSEESSSQK

SEQ ID NO: 45947 - protein, 9 aa, Homo sapiens
  misc_feature: Table A; Target 45947; HLA-C*03:03; MAGEC2; ENSG00000046774; CTA
FSTSSSLIL

SEQ ID NO: 45948 - protein, 9 aa, Homo sapiens
  misc_feature: Table A; Target 45948; HLA-C*03:04; MAGEC2; ENSG00000046774; CTA
FSTSSSLIL

SEQ ID NO: 45949 - protein, 9 aa, Homo sapiens
  misc_feature: Table A; Target 45949; HLA-A*01:01; MAGEC2; ENSG00000046774; CTA
FTYTLDEKV

SEQ ID NO: 45950 - protein, 9 aa, Homo sapiens
  misc_feature: Table A; Target 45950; HLA-B*13:02; MAGEC2; ENSG00000046774; CTA
FTYTLDEKV

SEQ ID NO: 45951 - protein, 9 aa, Homo sapiens
  misc_feature: Table A; Target 45951; HLA-C*02:02; MAGEC2; ENSG00000046774; CTA
FTYTLDEKV

SEQ ID NO: 45952 - protein, 9 aa, Homo sapiens
  misc_feature: Table A; Target 45952; HLA-C*12:03; MAGEC2; ENSG00000046774; CTA
FTYTLDEKV

SEQ ID NO: 45953 - protein, 9 aa, Homo sapiens
  misc_feature: Table A; Target 45953; HLA-A*02:01; MAGEC2; ENSG00000046774; CTA
FVYGEPREL

SEQ ID NO: 45954 - protein, 9 aa, Homo sapiens
  misc_feature: Table A; Target 45954; HLA-A*02:03; MAGEC2; ENSG00000046774; CTA
FVYGEPREL

SEQ ID NO: 45955 - protein, 9 aa, Homo sapiens
  misc_feature: Table A; Target 45955; HLA-A*02:04; MAGEC2; ENSG00000046774; CTA
FVYGEPREL

SEQ ID NO: 45956 - protein, 9 aa, Homo sapiens
  misc_feature: Table A; Target 45956; HLA-A*02:07; MAGEC2; ENSG00000046774; CTA
FVYGEPREL

SEQ ID NO: 45957 - protein, 9 aa, Homo sapiens
  misc_feature: Table A; Target 45957; HLA-A*03:01; MAGEC2; ENSG00000046774; CTA
FVYGEPREL

SEQ ID NO: 45958 - protein, 9 aa, Homo sapiens
  misc_feature: Table A; Target 45958; HLA-A*25:01; MAGEC2; ENSG00000046774; CTA
FVYGEPREL

SEQ ID NO: 45959 - protein, 9 aa, Homo sapiens
  misc_feature: Table A; Target 45959; HLA-A*26:01; MAGEC2; ENSG00000046774; CTA
FVYGEPREL

SEQ ID NO: 45960 - protein, 9 aa, Homo sapiens
  misc_feature: Table A; Target 45960; HLA-A*32:01; MAGEC2; ENSG00000046774; CTA
FVYGEPREL

SEQ ID NO: 45961 - protein, 9 aa, Homo sapiens
  misc_feature: Table A; Target 45961; HLA-A*68:02; MAGEC2; ENSG00000046774; CTA
FVYGEPREL

SEQ ID NO: 45962 - protein, 9 aa, Homo sapiens
  misc_feature: Table A; Target 45962; HLA-B*08:01; MAGEC2; ENSG00000046774; CTA
FVYGEPREL

SEQ ID NO: 45963 - protein, 9 aa, Homo sapiens
  misc_feature: Table A; Target 45963; HLA-B*15:03; MAGEC2; ENSG00000046774; CTA
FVYGEPREL

SEQ ID NO: 45964 - protein, 9 aa, Homo sapiens
  misc_feature: Table A; Target 45964; HLA-B*35:01; MAGEC2; ENSG00000046774; CTA
FVYGEPREL

SEQ ID NO: 45965 - protein, 9 aa, Homo sapiens
  misc_feature: Table A; Target 45965; HLA-B*35:03; MAGEC2; ENSG00000046774; CTA
FVYGEPREL

SEQ ID NO: 45966 - protein, 9 aa, Homo sapiens
  misc_feature: Table A; Target 45966; HLA-B*40:01; MAGEC2; ENSG00000046774; CTA
FVYGEPREL

SEQ ID NO: 45967 - protein, 9 aa, Homo sapiens
  misc_feature: Table A; Target 45967; HLA-B*46:01; MAGEC2; ENSG00000046774; CTA
FVYGEPREL

SEQ ID NO: 45968 - protein, 9 aa, Homo sapiens
  misc_feature: Table A; Target 45968; HLA-B*51:01; MAGEC2; ENSG00000046774; CTA
FVYGEPREL

SEQ ID NO: 45969 - protein, 9 aa, Homo sapiens
  misc_feature: Table A; Target 45969; HLA-B*55:01; MAGEC2; ENSG00000046774; CTA
FVYGEPREL

SEQ ID NO: 45970 - protein, 9 aa, Homo sapiens
  misc_feature: Table A; Target 45970; HLA-B*58:01; MAGEC2; ENSG00000046774; CTA
FVYGEPREL

SEQ ID NO: 45971 - protein, 9 aa, Homo sapiens
  misc_feature: Table A; Target 45971; HLA-C*01:02; MAGEC2; ENSG00000046774; CTA
FVYGEPREL

SEQ ID NO: 45972 - protein, 9 aa, Homo sapiens
  misc_feature: Table A; Target 45972; HLA-C*02:02; MAGEC2; ENSG00000046774; CTA
FVYGEPREL

SEQ ID NO: 45973 - protein, 9 aa, Homo sapiens
  misc_feature: Table A; Target 45973; HLA-C*03:03; MAGEC2; ENSG00000046774; CTA
FVYGEPREL

SEQ ID NO: 45974 - protein, 9 aa, Homo sapiens
  misc_feature: Table A; Target 45974; HLA-C*05:01; MAGEC2; ENSG00000046774; CTA
FVYGEPREL

SEQ ID NO: 45975 - protein, 9 aa, Homo sapiens
  misc_feature: Table A; Target 45975; HLA-C*07:04; MAGEC2; ENSG00000046774; CTA
FVYGEPREL

SEQ ID NO: 45976 - protein, 9 aa, Homo sapiens
  misc_feature: Table A; Target 45976; HLA-C*12:03; MAGEC2; ENSG00000046774; CTA
FVYGEPREL

SEQ ID NO: 45977 - protein, 9 aa, Homo sapiens
  misc_feature: Table A; Target 45977; HLA-C*16:01; MAGEC2; ENSG00000046774; CTA
FVYGEPREL

SEQ ID NO: 45978 - protein, 9 aa, Homo sapiens
  misc_feature: Table A; Target 45978; HLA-C*16:02; MAGEC2; ENSG00000046774; CTA
FVYGEPREL

SEQ ID NO: 45979 - protein, 9 aa, Homo sapiens
  misc_feature: Table A; Target 45979; HLA-C*16:04; MAGEC2; ENSG00000046774; CTA
FVYGEPREL

SEQ ID NO: 45980 - protein, 9 aa, Homo sapiens
  misc_feature: Table A; Target 45980; HLA-B*49:01; MAGEC2; ENSG00000046774; CTA
GEDTGTCQG

SEQ ID NO: 45981 - protein, 10 aa, Homo sapiens
  misc_feature: Table A; Target 45981; HLA-A*30:01; MAGEC2; ENSG00000046774; CTA
GEDTGTCQGL

SEQ ID NO: 45982 - protein, 10 aa, Homo sapiens
  misc_feature: Table A; Target 45982; HLA-B*44:03; MAGEC2; ENSG00000046774; CTA
GEDTGTCQGL

SEQ ID NO: 45983 - protein, 10 aa, Homo sapiens
  misc_feature: Table A; Target 45983; HLA-B*49:01; MAGEC2; ENSG00000046774; CTA
GEDTGTCQGL

SEQ ID NO: 45984 - protein, 9 aa, Homo sapiens
  misc_feature: Table A; Target 45984; HLA-A*26:01; MAGEC2; ENSG00000046774; CTA
GLPDSESSF

SEQ ID NO: 45985 - protein, 9 aa, Homo sapiens
  misc_feature: Table A; Target 45985; HLA-A*32:01; MAGEC2; ENSG00000046774; CTA
GLPDSESSF

SEQ ID NO: 45986 - protein, 9 aa, Homo sapiens
  misc_feature: Table A; Target 45986; HLA-B*15:01; MAGEC2; ENSG00000046774; CTA
GLPDSESSF

SEQ ID NO: 45987 - protein, 9 aa, Homo sapiens
  misc_feature: Table A; Target 45987; HLA-B*15:03; MAGEC2; ENSG00000046774; CTA
GLPDSESSF

SEQ ID NO: 45988 - protein, 9 aa, Homo sapiens
  misc_feature: Table A; Target 45988; HLA-B*46:01; MAGEC2; ENSG00000046774; CTA
GLPDSESSF

SEQ ID NO: 45989 - protein, 9 aa, Homo sapiens
  misc_feature: Table A; Target 45989; HLA-C*01:02; MAGEC2; ENSG00000046774; CTA
GLPDSESSF

SEQ ID NO: 45990 - protein, 9 aa, Homo sapiens
  misc_feature: Table A; Target 45990; HLA-C*14:02; MAGEC2; ENSG00000046774; CTA
GLPDSESSF

SEQ ID NO: 45991 - protein, 11 aa, Homo sapiens
  misc_feature: Table A; Target 45991; HLA-A*26:01; MAGEC2; ENSG00000046774; CTA
GLPDSESSFTY

SEQ ID NO: 45992 - protein, 11 aa, Homo sapiens
  misc_feature: Table A; Target 45992; HLA-A*29:02; MAGEC2; ENSG00000046774; CTA
GLPDSESSFTY

SEQ ID NO: 45993 - protein, 11 aa, Homo sapiens
  misc_feature: Table A; Target 45993; HLA-A*30:02; MAGEC2; ENSG00000046774; CTA
GLPDSESSFTY

SEQ ID NO: 45994 - protein, 11 aa, Homo sapiens
  misc_feature: Table A; Target 45994; HLA-A*32:01; MAGEC2; ENSG00000046774; CTA
GLPDSESSFTY

SEQ ID NO: 45995 - protein, 11 aa, Homo sapiens
  misc_feature: Table A; Target 45995; HLA-B*15:01; MAGEC2; ENSG00000046774; CTA
GLPDSESSFTY

SEQ ID NO: 45996 - protein, 11 aa, Homo sapiens
  misc_feature: Table A; Target 45996; HLA-B*15:03; MAGEC2; ENSG00000046774; CTA
GLPDSESSFTY

SEQ ID NO: 45997 - protein, 11 aa, Homo sapiens
  misc_feature: Table A; Target 45997; HLA-B*46:01; MAGEC2; ENSG00000046774; CTA
GLPDSESSFTY

SEQ ID NO: 45998 - protein, 9 aa, Homo sapiens
  misc_feature: Table A; Target 45998; HLA-B*07:02; MAGEC2; ENSG00000046774; CTA
GPRAHSESI

SEQ ID NO: 45999 - protein, 9 aa, Homo sapiens
  misc_feature: Table A; Target 45999; HLA-B*56:01; MAGEC2; ENSG00000046774; CTA
GPRAHSESI

SEQ ID NO: 46000 - protein, 9 aa, Homo sapiens
  misc_feature: Table A; Target 46000; HLA-C*07:02; MAGEC2; ENSG00000046774; CTA
GPRAHSESI

SEQ ID NO: 46001 - protein, 10 aa, Homo sapiens
  misc_feature: Table A; Target 46001; HLA-B*07:02; MAGEC2; ENSG00000046774; CTA
GPSQSPLSSC

SEQ ID NO: 46002 - protein, 10 aa, Homo sapiens
  misc_feature: Table A; Target 46002; HLA-B*56:01; MAGEC2; ENSG00000046774; CTA
GPSQSPLSSC

SEQ ID NO: 46003 - protein, 10 aa, Homo sapiens
  misc_feature: Table A; Target 46003; HLA-A*25:01; MAGEC2; ENSG00000046774; CTA
GVIPNLTESI

SEQ ID NO: 46004 - protein, 10 aa, Homo sapiens
  misc_feature: Table A; Target 46004; HLA-A*02:01; MAGEC2; ENSG00000046774; CTA
GVYAGREHFV

SEQ ID NO: 46005 - protein, 10 aa, Homo sapiens
  misc_feature: Table A; Target 46005; HLA-A*02:03; MAGEC2; ENSG00000046774; CTA
GVYAGREHFV

SEQ ID NO: 46006 - protein, 11 aa, Homo sapiens
  misc_feature: Table A; Target 46006; HLA-A*03:01; MAGEC2; ENSG00000046774; CTA
GVYAGREHFVY

SEQ ID NO: 46007 - protein, 11 aa, Homo sapiens
  misc_feature: Table A; Target 46007; HLA-A*29:02; MAGEC2; ENSG00000046774; CTA
GVYAGREHFVY

SEQ ID NO: 46008 - protein, 11 aa, Homo sapiens
  misc_feature: Table A; Target 46008; HLA-A*30:02; MAGEC2; ENSG00000046774; CTA
GVYAGREHFVY

SEQ ID NO: 46009 - protein, 10 aa, Homo sapiens
  misc_feature: Table A; Target 46009; HLA-B*35:03; MAGEC2; ENSG00000046774; CTA
HPTDEEEEEA

SEQ ID NO: 46010 - protein, 9 aa, Homo sapiens
  misc_feature: Table A; Target 46010; HLA-B*35:01; MAGEC2; ENSG00000046774; CTA
HSSPPYYEF

SEQ ID NO: 46011 - protein, 9 aa, Homo sapiens
  misc_feature: Table A; Target 46011; HLA-B*57:01; MAGEC2; ENSG00000046774; CTA
HSSPPYYEF

SEQ ID NO: 46012 - protein, 9 aa, Homo sapiens
  misc_feature: Table A; Target 46012; HLA-B*58:01; MAGEC2; ENSG00000046774; CTA
HSSPPYYEF

SEQ ID NO: 46013 - protein, 9 aa, Homo sapiens
  misc_feature: Table A; Target 46013; HLA-C*02:02; MAGEC2; ENSG00000046774; CTA
HSSPPYYEF

SEQ ID NO: 46014 - protein, 8 aa, Homo sapiens
  misc_feature: Table A; Target 46014; HLA-B*18:01; MAGEC2; ENSG00000046774; CTA
IEVGPDHF

SEQ ID NO: 46015 - protein, 10 aa, Homo sapiens
  misc_feature: Table A; Target 46015; HLA-B*49:01; MAGEC2; ENSG00000046774; CTA
IEVGPDHFCV

SEQ ID NO: 46016 - protein, 9 aa, Homo sapiens
  misc_feature: Table A; Target 46016; HLA-A*03:01; MAGEC2; ENSG00000046774; CTA
IILSVIFIK

SEQ ID NO: 46017 - protein, 8 aa, Homo sapiens
  misc_feature: Table A; Target 46017; HLA-B*51:01; MAGEC2; ENSG00000046774; CTA
IPNLTESI

SEQ ID NO: 46018 - protein, 8 aa, Homo sapiens
  misc_feature: Table A; Target 46018; HLA-B*56:01; MAGEC2; ENSG00000046774; CTA
IPNLTESI

SEQ ID NO: 46019 - protein, 9 aa, Homo sapiens
  misc_feature: Table A; Target 46019; HLA-B*56:01; MAGEC2; ENSG00000046774; CTA
IPSSPPQGP

SEQ ID NO: 46020 - protein, 9 aa, Homo sapiens
  misc_feature: Table A; Target 46020; HLA-B*57:01; MAGEC2; ENSG00000046774; CTA
IVIKYKDYF

SEQ ID NO: 46021 - protein, 9 aa, Homo sapiens
  misc_feature: Table A; Target 46021; HLA-A*30:01; MAGEC2; ENSG00000046774; CTA
KDVEERVQA

SEQ ID NO: 46022 - protein, 9 aa, Homo sapiens
  misc_feature: Table A; Target 46022; HLA-B*40:02; MAGEC2; ENSG00000046774; CTA
KDVEERVQA

SEQ ID NO: 46023 - protein, 11 aa, Homo sapiens
  misc_feature: Table A; Target 46023; HLA-A*30:01; MAGEC2; ENSG00000046774; CTA
KDVEERVQATI

SEQ ID NO: 46024 - protein, 8 aa, Homo sapiens
  misc_feature: Table A; Target 46024; HLA-B*37:01; MAGEC2; ENSG00000046774; CTA
KDYFPVIL

SEQ ID NO: 46025 - protein, 9 aa, Homo sapiens
  misc_feature: Table A; Target 46025; HLA-A*03:01; MAGEC2; ENSG00000046774; CTA
KDYFPVILK

SEQ ID NO: 46026 - protein, 9 aa, Homo sapiens
  misc_feature: Table A; Target 46026; HLA-A*03:02; MAGEC2; ENSG00000046774; CTA
KDYFPVILK

SEQ ID NO: 46027 - protein, 10 aa, Homo sapiens
  misc_feature: Table A; Target 46027; HLA-A*03:01; MAGEC2; ENSG00000046774; CTA
KLNNTVPSSF

SEQ ID NO: 46028 - protein, 10 aa, Homo sapiens
  misc_feature: Table A; Target 46028; HLA-A*03:02; MAGEC2; ENSG00000046774; CTA
KLNNTVPSSF

SEQ ID NO: 46029 - protein, 10 aa, Homo sapiens
  misc_feature: Table A; Target 46029; HLA-A*23:01; MAGEC2; ENSG00000046774; CTA
KLNNTVPSSF

SEQ ID NO: 46030 - protein, 10 aa, Homo sapiens
  misc_feature: Table A; Target 46030; HLA-A*24:02; MAGEC2; ENSG00000046774; CTA
KLNNTVPSSF

SEQ ID NO: 46031 - protein, 10 aa, Homo sapiens
  misc_feature: Table A; Target 46031; HLA-A*30:02; MAGEC2; ENSG00000046774; CTA
KLNNTVPSSF

SEQ ID NO: 46032 - protein, 10 aa, Homo sapiens
  misc_feature: Table A; Target 46032; HLA-A*32:01; MAGEC2; ENSG00000046774; CTA
KLNNTVPSSF

SEQ ID NO: 46033 - protein, 10 aa, Homo sapiens
  misc_feature: Table A; Target 46033; HLA-B*15:01; MAGEC2; ENSG00000046774; CTA
KLNNTVPSSF

SEQ ID NO: 46034 - protein, 10 aa, Homo sapiens
  misc_feature: Table A; Target 46034; HLA-B*15:03; MAGEC2; ENSG00000046774; CTA
KLNNTVPSSF

SEQ ID NO: 46035 - protein, 10 aa, Homo sapiens
  misc_feature: Table A; Target 46035; HLA-B*46:01; MAGEC2; ENSG00000046774; CTA
KLNNTVPSSF

SEQ ID NO: 46036 - protein, 10 aa, Homo sapiens
  misc_feature: Table A; Target 46036; HLA-B*58:01; MAGEC2; ENSG00000046774; CTA
KLNNTVPSSF

SEQ ID NO: 46037 - protein, 10 aa, Homo sapiens
  misc_feature: Table A; Target 46037; HLA-C*01:02; MAGEC2; ENSG00000046774; CTA
KLNNTVPSSF

SEQ ID NO: 46038 - protein, 10 aa, Homo sapiens
  misc_feature: Table A; Target 46038; HLA-C*14:02; MAGEC2; ENSG00000046774; CTA
KLNNTVPSSF

SEQ ID NO: 46039 - protein, 9 aa, Homo sapiens
  misc_feature: Table A; Target 46039; HLA-A*02:01; MAGEC2; ENSG00000046774; CTA
KVAELVEFL

SEQ ID NO: 46040 - protein, 9 aa, Homo sapiens
  misc_feature: Table A; Target 46040; HLA-A*02:03; MAGEC2; ENSG00000046774; CTA
KVAELVEFL

SEQ ID NO: 46041 - protein, 9 aa, Homo sapiens
  misc_feature: Table A; Target 46041; HLA-A*02:04; MAGEC2; ENSG00000046774; CTA
KVAELVEFL

SEQ ID NO: 46042 - protein, 9 aa, Homo sapiens
  misc_feature: Table A; Target 46042; HLA-A*02:07; MAGEC2; ENSG00000046774; CTA
KVAELVEFL

SEQ ID NO: 46043 - protein, 9 aa, Homo sapiens
  misc_feature: Table A; Target 46043; HLA-A*68:02; MAGEC2; ENSG00000046774; CTA
KVAELVEFL

SEQ ID NO: 46044 - protein, 9 aa, Homo sapiens
  misc_feature: Table A; Target 46044; HLA-B*27:05; MAGEC2; ENSG00000046774; CTA
KVAELVEFL

SEQ ID NO: 46045 - protein, 9 aa, Homo sapiens
  misc_feature: Table A; Target 46045; HLA-B*58:01; MAGEC2; ENSG00000046774; CTA
KVAELVEFL

SEQ ID NO: 46046 - protein, 10 aa, Homo sapiens
  misc_feature: Table A; Target 46046; HLA-A*02:04; MAGEC2; ENSG00000046774; CTA
KVAELVEFLL

SEQ ID NO: 46047 - protein, 9 aa, Homo sapiens
  misc_feature: Table A; Target 46047; HLA-A*02:01; MAGEC2; ENSG00000046774; CTA
KVLEFLAKL

SEQ ID NO: 46048 - protein, 9 aa, Homo sapiens
  misc_feature: Table A; Target 46048; HLA-A*02:03; MAGEC2; ENSG00000046774; CTA
KVLEFLAKL

SEQ ID NO: 46049 - protein, 9 aa, Homo sapiens
  misc_feature: Table A; Target 46049; HLA-A*02:04; MAGEC2; ENSG00000046774; CTA
KVLEFLAKL

SEQ ID NO: 46050 - protein, 9 aa, Homo sapiens
  misc_feature: Table A; Target 46050; HLA-A*02:07; MAGEC2; ENSG00000046774; CTA
KVLEFLAKL

SEQ ID NO: 46051 - protein, 9 aa, Homo sapiens
  misc_feature: Table A; Target 46051; HLA-A*03:01; MAGEC2; ENSG00000046774; CTA
KVLEFLAKL

SEQ ID NO: 46052 - protein, 9 aa, Homo sapiens
  misc_feature: Table A; Target 46052; HLA-A*24:02; MAGEC2; ENSG00000046774; CTA
KVLEFLAKL

SEQ ID NO: 46053 - protein, 9 aa, Homo sapiens
  misc_feature: Table A; Target 46053; HLA-A*31:01; MAGEC2; ENSG00000046774; CTA
KVLEFLAKL

SEQ ID NO: 46054 - protein, 9 aa, Homo sapiens
  misc_feature: Table A; Target 46054; HLA-B*57:01; MAGEC2; ENSG00000046774; CTA
KVLEFLAKL

SEQ ID NO: 46055 - protein, 9 aa, Homo sapiens
  misc_feature: Table A; Target 46055; HLA-A*02:04; MAGEC2; ENSG00000046774; CTA
KVWVQGHYL

SEQ ID NO: 46056 - protein, 11 aa, Homo sapiens
  misc_feature: Table A; Target 46056; HLA-A*03:01; MAGEC2; ENSG00000046774; CTA
KVWVQGHYLEY

SEQ ID NO: 46057 - protein, 11 aa, Homo sapiens
  misc_feature: Table A; Target 46057; HLA-A*29:02; MAGEC2; ENSG00000046774; CTA
KVWVQGHYLEY

SEQ ID NO: 46058 - protein, 9 aa, Homo sapiens
  misc_feature: Table A; Target 46058; HLA-A*24:02; MAGEC2; ENSG00000046774; CTA
KYKDYFPVI

SEQ ID NO: 46059 - protein, 10 aa, Homo sapiens
  misc_feature: Table A; Target 46059; HLA-A*24:02; MAGEC2; ENSG00000046774; CTA
KYKDYFPVIL

SEQ ID NO: 46060 - protein, 8 aa, Homo sapiens
  misc_feature: Table A; Target 46060; HLA-B*08:01; MAGEC2; ENSG00000046774; CTA
LAKLNNTV

SEQ ID NO: 46061 - protein, 8 aa, Homo sapiens
  misc_feature: Table A; Target 46061; HLA-B*51:01; MAGEC2; ENSG00000046774; CTA
LAKLNNTV

SEQ ID NO: 46062 - protein, 8 aa, Homo sapiens
  misc_feature: Table A; Target 46062; HLA-A*02:04; MAGEC2; ENSG00000046774; CTA
LLFGLALI

SEQ ID NO: 46063 - protein, 10 aa, Homo sapiens
  misc_feature: Table A; Target 46063; HLA-A*02:01; MAGEC2; ENSG00000046774; CTA
LLFGLALIEV

SEQ ID NO: 46064 - protein, 10 aa, Homo sapiens
  misc_feature: Table A; Target 46064; HLA-A*02:03; MAGEC2; ENSG00000046774; CTA
LLFGLALIEV

SEQ ID NO: 46065 - protein, 10 aa, Homo sapiens
  misc_feature: Table A; Target 46065; HLA-A*02:04; MAGEC2; ENSG00000046774; CTA
LLFGLALIEV

SEQ ID NO: 46066 - protein, 10 aa, Homo sapiens
  misc_feature: Table A; Target 46066; HLA-A*02:07; MAGEC2; ENSG00000046774; CTA
LLFGLALIEV

SEQ ID NO: 46067 - protein, 8 aa, Homo sapiens
  misc_feature: Table A; Target 46067; HLA-B*55:01; MAGEC2; ENSG00000046774; CTA
LPDSESSF

SEQ ID NO: 46068 - protein, 8 aa, Homo sapiens
  misc_feature: Table A; Target 46068; HLA-C*05:01; MAGEC2; ENSG00000046774; CTA
LPDSESSF

SEQ ID NO: 46069 - protein, 10 aa, Homo sapiens
  misc_feature: Table A; Target 46069; HLA-A*01:01; MAGEC2; ENSG00000046774; CTA
LPDSESSFTY

SEQ ID NO: 46070 - protein, 10 aa, Homo sapiens
  misc_feature: Table A; Target 46070; HLA-B*35:01; MAGEC2; ENSG00000046774; CTA
LPDSESSFTY

SEQ ID NO: 46071 - protein, 10 aa, Homo sapiens
  misc_feature: Table A; Target 46071; HLA-C*03:03; MAGEC2; ENSG00000046774; CTA
LPDSESSFTY

SEQ ID NO: 46072 - protein, 10 aa, Homo sapiens
  misc_feature: Table A; Target 46072; HLA-B*57:01; MAGEC2; ENSG00000046774; CTA
LSVMSSNVSF

SEQ ID NO: 46073 - protein, 10 aa, Homo sapiens
  misc_feature: Table A; Target 46073; HLA-B*58:01; MAGEC2; ENSG00000046774; CTA
LSVMSSNVSF

SEQ ID NO: 46074 - protein, 11 aa, Homo sapiens
  misc_feature: Table A; Target 46074; HLA-C*05:01; MAGEC2; ENSG00000046774; CTA
LTDEGSDDEGM

SEQ ID NO: 46075 - protein, 9 aa, Homo sapiens
  misc_feature: Table A; Target 46075; HLA-A*01:01; MAGEC2; ENSG00000046774; CTA
LVEFLLLKY

SEQ ID NO: 46076 - protein, 9 aa, Homo sapiens
  misc_feature: Table A; Target 46076; HLA-A*29:02; MAGEC2; ENSG00000046774; CTA
LVEFLLLKY

SEQ ID NO: 46077 - protein, 8 aa, Homo sapiens
  misc_feature: Table A; Target 46077; HLA-A*25:01; MAGEC2; ENSG00000046774; CTA
LVFSPSSF

SEQ ID NO: 46078 - protein, 8 aa, Homo sapiens
  misc_feature: Table A; Target 46078; HLA-A*26:01; MAGEC2; ENSG00000046774; CTA
LVFSPSSF

SEQ ID NO: 46079 - protein, 8 aa, Homo sapiens
  misc_feature: Table A; Target 46079; HLA-A*32:01; MAGEC2; ENSG00000046774; CTA
LVFSPSSF

SEQ ID NO: 46080 - protein, 8 aa, Homo sapiens
  misc_feature: Table A; Target 46080; HLA-B*39:01; MAGEC2; ENSG00000046774; CTA
LVFSPSSF

SEQ ID NO: 46081 - protein, 8 aa, Homo sapiens
  misc_feature: Table A; Target 46081; HLA-B*46:01; MAGEC2; ENSG00000046774; CTA
LVFSPSSF

SEQ ID NO: 46082 - protein, 8 aa, Homo sapiens
  misc_feature: Table A; Target 46082; HLA-C*02:02; MAGEC2; ENSG00000046774; CTA
LVFSPSSF

SEQ ID NO: 46083 - protein, 8 aa, Homo sapiens
  misc_feature: Table A; Target 46083; HLA-C*05:01; MAGEC2; ENSG00000046774; CTA
LVFSPSSF

SEQ ID NO: 46084 - protein, 8 aa, Homo sapiens
  misc_feature: Table A; Target 46084; HLA-C*12:03; MAGEC2; ENSG00000046774; CTA
LVFSPSSF

SEQ ID NO: 46085 - protein, 10 aa, Homo sapiens
  misc_feature: Table A; Target 46085; HLA-A*23:01; MAGEC2; ENSG00000046774; CTA
LYLVFSPSSF

SEQ ID NO: 46086 - protein, 10 aa, Homo sapiens
  misc_feature: Table A; Target 46086; HLA-A*24:02; MAGEC2; ENSG00000046774; CTA
LYLVFSPSSF

SEQ ID NO: 46087 - protein, 10 aa, Homo sapiens
  misc_feature: Table A; Target 46087; HLA-A*29:02; MAGEC2; ENSG00000046774; CTA
LYLVFSPSSF

SEQ ID NO: 46088 - protein, 10 aa, Homo sapiens
  misc_feature: Table A; Target 46088; HLA-C*14:02; MAGEC2; ENSG00000046774; CTA
LYLVFSPSSF

SEQ ID NO: 46089 - protein, 8 aa, Homo sapiens
  misc_feature: Table A; Target 46089; HLA-B*51:01; MAGEC2; ENSG00000046774; CTA
MASESLSV

SEQ ID NO: 46090 - protein, 8 aa, Homo sapiens
  misc_feature: Table A; Target 46090; HLA-C*03:04; MAGEC2; ENSG00000046774; CTA
MASESLSV

SEQ ID NO: 46091 - protein, 9 aa, Homo sapiens
  misc_feature: Table A; Target 46091; HLA-A*25:01; MAGEC2; ENSG00000046774; CTA
MASESLSVM

SEQ ID NO: 46092 - protein, 9 aa, Homo sapiens
  misc_feature: Table A; Target 46092; HLA-A*26:01; MAGEC2; ENSG00000046774; CTA
MASESLSVM

SEQ ID NO: 46093 - protein, 9 aa, Homo sapiens
  misc_feature: Table A; Target 46093; HLA-A*68:01; MAGEC2; ENSG00000046774; CTA
MASESLSVM

SEQ ID NO: 46094 - protein, 9 aa, Homo sapiens
  misc_feature: Table A; Target 46094; HLA-B*07:02; MAGEC2; ENSG00000046774; CTA
MASESLSVM

SEQ ID NO: 46095 - protein, 9 aa, Homo sapiens
  misc_feature: Table A; Target 46095; HLA-B*15:01; MAGEC2; ENSG00000046774; CTA
MASESLSVM

SEQ ID NO: 46096 - protein, 9 aa, Homo sapiens
  misc_feature: Table A; Target 46096; HLA-B*15:03; MAGEC2; ENSG00000046774; CTA
MASESLSVM

SEQ ID NO: 46097 - protein, 9 aa, Homo sapiens
  misc_feature: Table A; Target 46097; HLA-B*27:05; MAGEC2; ENSG00000046774; CTA
MASESLSVM

SEQ ID NO: 46098 - protein, 9 aa, Homo sapiens
  misc_feature: Table A; Target 46098; HLA-B*35:03; MAGEC2; ENSG00000046774; CTA
MASESLSVM

SEQ ID NO: 46099 - protein, 9 aa, Homo sapiens
  misc_feature: Table A; Target 46099; HLA-B*38:01; MAGEC2; ENSG00000046774; CTA
MASESLSVM

SEQ ID NO: 46100 - protein, 9 aa, Homo sapiens
  misc_feature: Table A; Target 46100; HLA-B*39:01; MAGEC2; ENSG00000046774; CTA
MASESLSVM

SEQ ID NO: 46101 - protein, 9 aa, Homo sapiens
  misc_feature: Table A; Target 46101; HLA-B*46:01; MAGEC2; ENSG00000046774; CTA
MASESLSVM

SEQ ID NO: 46102 - protein, 9 aa, Homo sapiens
  misc_feature: Table A; Target 46102; HLA-B*51:01; MAGEC2; ENSG00000046774; CTA
MASESLSVM

SEQ ID NO: 46103 - protein, 9 aa, Homo sapiens
  misc_feature: Table A; Target 46103; HLA-B*54:01; MAGEC2; ENSG00000046774; CTA
MASESLSVM

SEQ ID NO: 46104 - protein, 9 aa, Homo sapiens
  misc_feature: Table A; Target 46104; HLA-B*55:01; MAGEC2; ENSG00000046774; CTA
MASESLSVM

SEQ ID NO: 46105 - protein, 9 aa, Homo sapiens
  misc_feature: Table A; Target 46105; HLA-B*58:01; MAGEC2; ENSG00000046774; CTA
MASESLSVM

SEQ ID NO: 46106 - protein, 9 aa, Homo sapiens
  misc_feature: Table A; Target 46106; HLA-C*01:02; MAGEC2; ENSG00000046774; CTA
MASESLSVM

SEQ ID NO: 46107 - protein, 9 aa, Homo sapiens
  misc_feature: Table A; Target 46107; HLA-C*02:02; MAGEC2; ENSG00000046774; CTA
MASESLSVM

SEQ ID NO: 46108 - protein, 9 aa, Homo sapiens
  misc_feature: Table A; Target 46108; HLA-C*03:03; MAGEC2; ENSG00000046774; CTA
MASESLSVM

SEQ ID NO: 46109 - protein, 9 aa, Homo sapiens
  misc_feature: Table A; Target 46109; HLA-C*03:04; MAGEC2; ENSG00000046774; CTA
MASESLSVM

SEQ ID NO: 46110 - protein, 9 aa, Homo sapiens
  misc_feature: Table A; Target 46110; HLA-C*05:01; MAGEC2; ENSG00000046774; CTA
MASESLSVM

SEQ ID NO: 46111 - protein, 9 aa, Homo sapiens
  misc_feature: Table A; Target 46111; HLA-C*07:04; MAGEC2; ENSG00000046774; CTA
MASESLSVM

SEQ ID NO: 46112 - protein, 9 aa, Homo sapiens
  misc_feature: Table A; Target 46112; HLA-C*07:06; MAGEC2; ENSG00000046774; CTA
MASESLSVM

SEQ ID NO: 46113 - protein, 9 aa, Homo sapiens
  misc_feature: Table A; Target 46113; HLA-C*12:03; MAGEC2; ENSG00000046774; CTA
MASESLSVM

SEQ ID NO: 46114 - protein, 9 aa, Homo sapiens
  misc_feature: Table A; Target 46114; HLA-C*14:02; MAGEC2; ENSG00000046774; CTA
MASESLSVM

SEQ ID NO: 46115 - protein, 9 aa, Homo sapiens
  misc_feature: Table A; Target 46115; HLA-C*16:01; MAGEC2; ENSG00000046774; CTA
MASESLSVM

SEQ ID NO: 46116 - protein, 9 aa, Homo sapiens
  misc_feature: Table A; Target 46116; HLA-C*16:02; MAGEC2; ENSG00000046774; CTA
MASESLSVM

SEQ ID NO: 46117 - protein, 9 aa, Homo sapiens
  misc_feature: Table A; Target 46117; HLA-C*16:04; MAGEC2; ENSG00000046774; CTA
MASESLSVM

SEQ ID NO: 46118 - protein, 8 aa, Homo sapiens
  misc_feature: Table A; Target 46118; HLA-B*18:01; MAGEC2; ENSG00000046774; CTA
MELLFGLA

SEQ ID NO: 46119 - protein, 9 aa, Homo sapiens
  misc_feature: Table A; Target 46119; HLA-B*18:01; MAGEC2; ENSG00000046774; CTA
MELLFGLAL

SEQ ID NO: 46120 - protein, 9 aa, Homo sapiens
  misc_feature: Table A; Target 46120; HLA-B*44:02; MAGEC2; ENSG00000046774; CTA
MELLFGLAL

SEQ ID NO: 46121 - protein, 9 aa, Homo sapiens
  misc_feature: Table A; Target 46121; HLA-B*49:01; MAGEC2; ENSG00000046774; CTA
MELLFGLAL

SEQ ID NO: 46122 - protein, 10 aa, Homo sapiens
  misc_feature: Table A; Target 46122; HLA-B*49:01; MAGEC2; ENSG00000046774; CTA
MELLFGLALI

SEQ ID NO: 46123 - protein, 8 aa, Homo sapiens
  misc_feature: Table A; Target 46123; HLA-B*18:01; MAGEC2; ENSG00000046774; CTA
MLMIVIKY

SEQ ID NO: 46124 - protein, 8 aa, Homo sapiens
  misc_feature: Table A; Target 46124; HLA-C*07:01; MAGEC2; ENSG00000046774; CTA
MLMIVIKY

SEQ ID NO: 46125 - protein, 9 aa, Homo sapiens
  misc_feature: Table A; Target 46125; HLA-B*35:03; MAGEC2; ENSG00000046774; CTA
MPENSLLII

SEQ ID NO: 46126 - protein, 9 aa, Homo sapiens
  misc_feature: Table A; Target 46126; HLA-B*51:01; MAGEC2; ENSG00000046774; CTA
MPENSLLII

SEQ ID NO: 46127 - protein, 11 aa, Homo sapiens
  misc_feature: Table A; Target 46127; HLA-B*35:01; MAGEC2; ENSG00000046774; CTA
MPENSLLIIIL

SEQ ID NO: 46128 - protein, 11 aa, Homo sapiens
  misc_feature: Table A; Target 46128; HLA-B*35:03; MAGEC2; ENSG00000046774; CTA
MPENSLLIIIL

SEQ ID NO: 46129 - protein, 9 aa, Homo sapiens
  misc_feature: Table A; Target 46129; HLA-B*07:02; MAGEC2; ENSG00000046774; CTA
MPPVPGVPF

SEQ ID NO: 46130 - protein, 9 aa, Homo sapiens
  misc_feature: Table A; Target 46130; HLA-B*35:01; MAGEC2; ENSG00000046774; CTA
MPPVPGVPF

SEQ ID NO: 46131 - protein, 9 aa, Homo sapiens
  misc_feature: Table A; Target 46131; HLA-B*35:03; MAGEC2; ENSG00000046774; CTA
MPPVPGVPF

SEQ ID NO: 46132 - protein, 9 aa, Homo sapiens
  misc_feature: Table A; Target 46132; HLA-B*54:01; MAGEC2; ENSG00000046774; CTA
MPPVPGVPF

SEQ ID NO: 46133 - protein, 9 aa, Homo sapiens
  misc_feature: Table A; Target 46133; HLA-B*55:01; MAGEC2; ENSG00000046774; CTA
MPPVPGVPF

SEQ ID NO: 46134 - protein, 9 aa, Homo sapiens
  misc_feature: Table A; Target 46134; HLA-A*26:01; MAGEC2; ENSG00000046774; CTA
NAVGVYAGR

SEQ ID NO: 46135 - protein, 9 aa, Homo sapiens
  misc_feature: Table A; Target 46135; HLA-A*33:01; MAGEC2; ENSG00000046774; CTA
NAVGVYAGR

SEQ ID NO: 46136 - protein, 9 aa, Homo sapiens
  misc_feature: Table A; Target 46136; HLA-A*33:03; MAGEC2; ENSG00000046774; CTA
NAVGVYAGR

SEQ ID NO: 46137 - protein, 9 aa, Homo sapiens
  misc_feature: Table A; Target 46137; HLA-A*68:02; MAGEC2; ENSG00000046774; CTA
NAVGVYAGR

SEQ ID NO: 46138 - protein, 9 aa, Homo sapiens
  misc_feature: Table A; Target 46138; HLA-B*27:02; MAGEC2; ENSG00000046774; CTA
NAVGVYAGR

SEQ ID NO: 46139 - protein, 9 aa, Homo sapiens
  misc_feature: Table A; Target 46139; HLA-C*07:06; MAGEC2; ENSG00000046774; CTA
NAVGVYAGR

SEQ ID NO: 46140 - protein, 9 aa, Homo sapiens
  misc_feature: Table A; Target 46140; HLA-A*30:01; MAGEC2; ENSG00000046774; CTA
NDSPTSVEL

SEQ ID NO: 46141 - protein, 9 aa, Homo sapiens
  misc_feature: Table A; Target 46141; HLA-B*27:05; MAGEC2; ENSG00000046774; CTA
NDSPTSVEL

SEQ ID NO: 46142 - protein, 9 aa, Homo sapiens
  misc_feature: Table A; Target 46142; HLA-B*35:03; MAGEC2; ENSG00000046774; CTA
NDSPTSVEL

SEQ ID NO: 46143 - protein, 9 aa, Homo sapiens
  misc_feature: Table A; Target 46143; HLA-B*37:01; MAGEC2; ENSG00000046774; CTA
NDSPTSVEL

SEQ ID NO: 46144 - protein, 9 aa, Homo sapiens
  misc_feature: Table A; Target 46144; HLA-B*38:01; MAGEC2; ENSG00000046774; CTA
NDSPTSVEL

SEQ ID NO: 46145 - protein, 9 aa, Homo sapiens
  misc_feature: Table A; Target 46145; HLA-B*39:01; MAGEC2; ENSG00000046774; CTA
NDSPTSVEL

SEQ ID NO: 46146 - protein, 9 aa, Homo sapiens
  misc_feature: Table A; Target 46146; HLA-B*40:01; MAGEC2; ENSG00000046774; CTA
NDSPTSVEL

SEQ ID NO: 46147 - protein, 9 aa, Homo sapiens
  misc_feature: Table A; Target 46147; HLA-C*16:02; MAGEC2; ENSG00000046774; CTA
NDSPTSVEL

SEQ ID NO: 46148 - protein, 10 aa, Homo sapiens
  misc_feature: Table A; Target 46148; HLA-A*25:01; MAGEC2; ENSG00000046774; CTA
NTVPSSFPSW

SEQ ID NO: 46149 - protein, 10 aa, Homo sapiens
  misc_feature: Table A; Target 46149; HLA-A*26:01; MAGEC2; ENSG00000046774; CTA
NTVPSSFPSW

SEQ ID NO: 46150 - protein, 10 aa, Homo sapiens
  misc_feature: Table A; Target 46150; HLA-B*57:01; MAGEC2; ENSG00000046774; CTA
NTVPSSFPSW

SEQ ID NO: 46151 - protein, 10 aa, Homo sapiens
  misc_feature: Table A; Target 46151; HLA-B*58:01; MAGEC2; ENSG00000046774; CTA
NTVPSSFPSW

SEQ ID NO: 46152 - protein, 10 aa, Homo sapiens
  misc_feature: Table A; Target 46152; HLA-C*05:01; MAGEC2; ENSG00000046774; CTA
NVDNDSPTSV

SEQ ID NO: 46153 - protein, 9 aa, Homo sapiens
  misc_feature: Table A; Target 46153; HLA-A*03:01; MAGEC2; ENSG00000046774; CTA
RAHSESIKK

SEQ ID NO: 46154 - protein, 9 aa, Homo sapiens
  misc_feature: Table A; Target 46154; HLA-A*03:02; MAGEC2; ENSG00000046774; CTA
RAHSESIKK

SEQ ID NO: 46155 - protein, 9 aa, Homo sapiens
  misc_feature: Table A; Target 46155; HLA-A*11:01; MAGEC2; ENSG00000046774; CTA
RAHSESIKK

SEQ ID NO: 46156 - protein, 10 aa, Homo sapiens
  misc_feature: Table A; Target 46156; HLA-B*57:01; MAGEC2; ENSG00000046774; CTA
RAREFMELLF

SEQ ID NO: 46157 - protein, 10 aa, Homo sapiens
  misc_feature: Table A; Target 46157; HLA-A*30:02; MAGEC2; ENSG00000046774; CTA
REVPHSSPPY

SEQ ID NO: 46158 - protein, 10 aa, Homo sapiens
  misc_feature: Table A; Target 46158; HLA-B*44:03; MAGEC2; ENSG00000046774; CTA
REVPHSSPPY

SEQ ID NO: 46159 - protein, 11 aa, Homo sapiens
  misc_feature: Table A; Target 46159; HLA-A*30:02; MAGEC2; ENSG00000046774; CTA
REVPHSSPPYY

SEQ ID NO: 46160 - protein, 11 aa, Homo sapiens
  misc_feature: Table A; Target 46160; HLA-B*44:03; MAGEC2; ENSG00000046774; CTA
REVPHSSPPYY

SEQ ID NO: 46161 - protein, 8 aa, Homo sapiens
  misc_feature: Table A; Target 46161; HLA-B*37:01; MAGEC2; ENSG00000046774; CTA
SASSTLYL

SEQ ID NO: 46162 - protein, 8 aa, Homo sapiens
  misc_feature: Table A; Target 46162; HLA-C*03:03; MAGEC2; ENSG00000046774; CTA
SASSTLYL

SEQ ID NO: 46163 - protein, 8 aa, Homo sapiens
  misc_feature: Table A; Target 46163; HLA-C*03:04; MAGEC2; ENSG00000046774; CTA
SASSTLYL

SEQ ID NO: 46164 - protein, 8 aa, Homo sapiens
  misc_feature: Table A; Target 46164; HLA-C*05:01; MAGEC2; ENSG00000046774; CTA
SASSTLYL

SEQ ID NO: 46165 - protein, 9 aa, Homo sapiens
  misc_feature: Table A; Target 46165; HLA-A*02:04; MAGEC2; ENSG00000046774; CTA
SASSTLYLV

SEQ ID NO: 46166 - protein, 9 aa, Homo sapiens
  misc_feature: Table A; Target 46166; HLA-A*68:02; MAGEC2; ENSG00000046774; CTA
SASSTLYLV

SEQ ID NO: 46167 - protein, 9 aa, Homo sapiens
  misc_feature: Table A; Target 46167; HLA-B*13:02; MAGEC2; ENSG00000046774; CTA
SASSTLYLV

SEQ ID NO: 46168 - protein, 9 aa, Homo sapiens
  misc_feature: Table A; Target 46168; HLA-C*02:02; MAGEC2; ENSG00000046774; CTA
SASSTLYLV

SEQ ID NO: 46169 - protein, 9 aa, Homo sapiens
  misc_feature: Table A; Target 46169; HLA-C*16:02; MAGEC2; ENSG00000046774; CTA
SASSTLYLV

SEQ ID NO: 46170 - protein, 10 aa, Homo sapiens
  misc_feature: Table A; Target 46170; HLA-B*35:01; MAGEC2; ENSG00000046774; CTA
SASSTLYLVF

SEQ ID NO: 46171 - protein, 10 aa, Homo sapiens
  misc_feature: Table A; Target 46171; HLA-C*02:02; MAGEC2; ENSG00000046774; CTA
SASSTLYLVF

SEQ ID NO: 46172 - protein, 9 aa, Homo sapiens
  misc_feature: Table A; Target 46172; HLA-A*30:01; MAGEC2; ENSG00000046774; CTA
SEEVIWEVL

SEQ ID NO: 46173 - protein, 9 aa, Homo sapiens
  misc_feature: Table A; Target 46173; HLA-B*40:01; MAGEC2; ENSG00000046774; CTA
SEEVIWEVL

SEQ ID NO: 46174 - protein, 9 aa, Homo sapiens
  misc_feature: Table A; Target 46174; HLA-B*37:01; MAGEC2; ENSG00000046774; CTA
SESIKKKVL

SEQ ID NO: 46175 - protein, 9 aa, Homo sapiens
  misc_feature: Table A; Target 46175; HLA-B*44:03; MAGEC2; ENSG00000046774; CTA
SESIKKKVL

SEQ ID NO: 46176 - protein, 9 aa, Homo sapiens
  misc_feature: Table A; Target 46176; HLA-A*23:01; MAGEC2; ENSG00000046774; CTA
SESSFTYTL

SEQ ID NO: 46177 - protein, 9 aa, Homo sapiens
  misc_feature: Table A; Target 46177; HLA-B*18:01; MAGEC2; ENSG00000046774; CTA
SESSFTYTL

SEQ ID NO: 46178 - protein, 9 aa, Homo sapiens
  misc_feature: Table A; Target 46178; HLA-B*27:02; MAGEC2; ENSG00000046774; CTA
SESSFTYTL

SEQ ID NO: 46179 - protein, 9 aa, Homo sapiens
  misc_feature: Table A; Target 46179; HLA-B*37:01; MAGEC2; ENSG00000046774; CTA
SESSFTYTL

SEQ ID NO: 46180 - protein, 9 aa, Homo sapiens
  misc_feature: Table A; Target 46180; HLA-B*38:01; MAGEC2; ENSG00000046774; CTA
SESSFTYTL

SEQ ID NO: 46181 - protein, 9 aa, Homo sapiens
  misc_feature: Table A; Target 46181; HLA-B*39:01; MAGEC2; ENSG00000046774; CTA
SESSFTYTL

SEQ ID NO: 46182 - protein, 9 aa, Homo sapiens
  misc_feature: Table A; Target 46182; HLA-B*40:02; MAGEC2; ENSG00000046774; CTA
SESSFTYTL

SEQ ID NO: 46183 - protein, 9 aa, Homo sapiens
  misc_feature: Table A; Target 46183; HLA-B*44:02; MAGEC2; ENSG00000046774; CTA
SESSFTYTL

SEQ ID NO: 46184 - protein, 9 aa, Homo sapiens
  misc_feature: Table A; Target 46184; HLA-B*44:03; MAGEC2; ENSG00000046774; CTA
SESSFTYTL

SEQ ID NO: 46185 - protein, 9 aa, Homo sapiens
  misc_feature: Table A; Target 46185; HLA-B*49:01; MAGEC2; ENSG00000046774; CTA
SESSFTYTL

SEQ ID NO: 46186 - protein, 9 aa, Homo sapiens
  misc_feature: Table A; Target 46186; HLA-C*02:02; MAGEC2; ENSG00000046774; CTA
SESSFTYTL

SEQ ID NO: 46187 - protein, 9 aa, Homo sapiens
  misc_feature: Table A; Target 46187; HLA-C*16:04; MAGEC2; ENSG00000046774; CTA
SESSFTYTL

SEQ ID NO: 46188 - protein, 8 aa, Homo sapiens
  misc_feature: Table A; Target 46188; HLA-C*01:02; MAGEC2; ENSG00000046774; CTA
SFSTSSSL

SEQ ID NO: 46189 - protein, 8 aa, Homo sapiens
  misc_feature: Table A; Target 46189; HLA-C*14:02; MAGEC2; ENSG00000046774; CTA
SFSTSSSL

SEQ ID NO: 46190 - protein, 9 aa, Homo sapiens
  misc_feature: Table A; Target 46190; HLA-A*23:01; MAGEC2; ENSG00000046774; CTA
SFSTSSSLI

SEQ ID NO: 46191 - protein, 9 aa, Homo sapiens
  misc_feature: Table A; Target 46191; HLA-C*14:02; MAGEC2; ENSG00000046774; CTA
SFSTSSSLI

SEQ ID NO: 46192 - protein, 9 aa, Homo sapiens
  misc_feature: Table A; Target 46192; HLA-B*08:01; MAGEC2; ENSG00000046774; CTA
SIKKKVLEF

SEQ ID NO: 46193 - protein, 9 aa, Homo sapiens
  misc_feature: Table A; Target 46193; HLA-A*02:01; MAGEC2; ENSG00000046774; CTA
SLLIIILSV

SEQ ID NO: 46194 - protein, 9 aa, Homo sapiens
  misc_feature: Table A; Target 46194; HLA-A*02:03; MAGEC2; ENSG00000046774; CTA
SLLIIILSV

SEQ ID NO: 46195 - protein, 9 aa, Homo sapiens
  misc_feature: Table A; Target 46195; HLA-A*02:04; MAGEC2; ENSG00000046774; CTA
SLLIIILSV

SEQ ID NO: 46196 - protein, 9 aa, Homo sapiens
  misc_feature: Table A; Target 46196; HLA-A*02:07; MAGEC2; ENSG00000046774; CTA
SLLIIILSV

SEQ ID NO: 46197 - protein, 9 aa, Homo sapiens
  misc_feature: Table A; Target 46197; HLA-A*02:01; MAGEC2; ENSG00000046774; CTA
SLSVMSSNV

SEQ ID NO: 46198 - protein, 9 aa, Homo sapiens
  misc_feature: Table A; Target 46198; HLA-A*02:03; MAGEC2; ENSG00000046774; CTA
SLSVMSSNV

SEQ ID NO: 46199 - protein, 9 aa, Homo sapiens
  misc_feature: Table A; Target 46199; HLA-B*13:02; MAGEC2; ENSG00000046774; CTA
SLSVMSSNV

SEQ ID NO: 46200 - protein, 9 aa, Homo sapiens
  misc_feature: Table A; Target 46200; HLA-B*56:01; MAGEC2; ENSG00000046774; CTA
SPSSFSTSS

SEQ ID NO: 46201 - protein, 11 aa, Homo sapiens
  misc_feature: Table A; Target 46201; HLA-B*35:01; MAGEC2; ENSG00000046774; CTA
SPSSFSTSSSL

SEQ ID NO: 46202 - protein, 11 aa, Homo sapiens
  misc_feature: Table A; Target 46202; HLA-B*35:03; MAGEC2; ENSG00000046774; CTA
SPSSFSTSSSL

SEQ ID NO: 46203 - protein, 11 aa, Homo sapiens
  misc_feature: Table A; Target 46203; HLA-B*56:01; MAGEC2; ENSG00000046774; CTA
SPSSFSTSSSL

SEQ ID NO: 46204 - protein, 8 aa, Homo sapiens
  misc_feature: Table A; Target 46204; HLA-A*30:02; MAGEC2; ENSG00000046774; CTA
SSASSTLY

SEQ ID NO: 46205 - protein, 9 aa, Homo sapiens
  misc_feature: Table A; Target 46205; HLA-A*01:01; MAGEC2; ENSG00000046774; CTA
SSASSTLYL

SEQ ID NO: 46206 - protein, 9 aa, Homo sapiens
  misc_feature: Table A; Target 46206; HLA-A*03:01; MAGEC2; ENSG00000046774; CTA
SSASSTLYL

SEQ ID NO: 46207 - protein, 9 aa, Homo sapiens
  misc_feature: Table A; Target 46207; HLA-A*11:01; MAGEC2; ENSG00000046774; CTA
SSASSTLYL

SEQ ID NO: 46208 - protein, 9 aa, Homo sapiens
  misc_feature: Table A; Target 46208; HLA-C*02:02; MAGEC2; ENSG00000046774; CTA
SSASSTLYL

SEQ ID NO: 46209 - protein, 9 aa, Homo sapiens
  misc_feature: Table A; Target 46209; HLA-C*03:03; MAGEC2; ENSG00000046774; CTA
SSASSTLYL

SEQ ID NO: 46210 - protein, 9 aa, Homo sapiens
  misc_feature: Table A; Target 46210; HLA-C*03:04; MAGEC2; ENSG00000046774; CTA
SSASSTLYL

SEQ ID NO: 46211 - protein, 11 aa, Homo sapiens
  misc_feature: Table A; Target 46211; HLA-B*57:01; MAGEC2; ENSG00000046774; CTA
SSASSTLYLVF

SEQ ID NO: 46212 - protein, 11 aa, Homo sapiens
  misc_feature: Table A; Target 46212; HLA-A*03:01; MAGEC2; ENSG00000046774; CTA
SSFSEESSSQK

SEQ ID NO: 46213 - protein, 11 aa, Homo sapiens
  misc_feature: Table A; Target 46213; HLA-A*03:02; MAGEC2; ENSG00000046774; CTA
SSFSEESSSQK

SEQ ID NO: 46214 - protein, 11 aa, Homo sapiens
  misc_feature: Table A; Target 46214; HLA-A*68:01; MAGEC2; ENSG00000046774; CTA
SSFSEESSSQK

SEQ ID NO: 46215 - protein, 11 aa, Homo sapiens
  misc_feature: Table A; Target 46215; HLA-B*27:02; MAGEC2; ENSG00000046774; CTA
SSFSEESSSQK

SEQ ID NO: 46216 - protein, 11 aa, Homo sapiens
  misc_feature: Table A; Target 46216; HLA-B*27:05; MAGEC2; ENSG00000046774; CTA
SSFSEESSSQK

SEQ ID NO: 46217 - protein, 11 aa, Homo sapiens
  misc_feature: Table A; Target 46217; HLA-C*07:06; MAGEC2; ENSG00000046774; CTA
SSFSEESSSQK

SEQ ID NO: 46218 - protein, 9 aa, Homo sapiens
  misc_feature: Table A; Target 46218; HLA-A*32:01; MAGEC2; ENSG00000046774; CTA
SSFSTSSSL

SEQ ID NO: 46219 - protein, 9 aa, Homo sapiens
  misc_feature: Table A; Target 46219; HLA-B*07:02; MAGEC2; ENSG00000046774; CTA
SSFSTSSSL

SEQ ID NO: 46220 - protein, 9 aa, Homo sapiens
  misc_feature: Table A; Target 46220; HLA-B*15:01; MAGEC2; ENSG00000046774; CTA
SSFSTSSSL

SEQ ID NO: 46221 - protein, 9 aa, Homo sapiens
  misc_feature: Table A; Target 46221; HLA-B*15:03; MAGEC2; ENSG00000046774; CTA
SSFSTSSSL

SEQ ID NO: 46222 - protein, 9 aa, Homo sapiens
  misc_feature: Table A; Target 46222; HLA-B*35:03; MAGEC2; ENSG00000046774; CTA
SSFSTSSSL

SEQ ID NO: 46223 - protein, 9 aa, Homo sapiens
  misc_feature: Table A; Target 46223; HLA-B*40:01; MAGEC2; ENSG00000046774; CTA
SSFSTSSSL

SEQ ID NO: 46224 - protein, 9 aa, Homo sapiens
  misc_feature: Table A; Target 46224; HLA-B*46:01; MAGEC2; ENSG00000046774; CTA
SSFSTSSSL

SEQ ID NO: 46225 - protein, 9 aa, Homo sapiens
  misc_feature: Table A; Target 46225; HLA-B*58:01; MAGEC2; ENSG00000046774; CTA
SSFSTSSSL

SEQ ID NO: 46226 - protein, 9 aa, Homo sapiens
  misc_feature: Table A; Target 46226; HLA-C*01:02; MAGEC2; ENSG00000046774; CTA
SSFSTSSSL

SEQ ID NO: 46227 - protein, 9 aa, Homo sapiens
  misc_feature: Table A; Target 46227; HLA-C*02:02; MAGEC2; ENSG00000046774; CTA
SSFSTSSSL

SEQ ID NO: 46228 - protein, 9 aa, Homo sapiens
  misc_feature: Table A; Target 46228; HLA-C*03:03; MAGEC2; ENSG00000046774; CTA
SSFSTSSSL

SEQ ID NO: 46229 - protein, 9 aa, Homo sapiens
  misc_feature: Table A; Target 46229; HLA-C*03:04; MAGEC2; ENSG00000046774; CTA
SSFSTSSSL

SEQ ID NO: 46230 - protein, 9 aa, Homo sapiens
  misc_feature: Table A; Target 46230; HLA-C*05:01; MAGEC2; ENSG00000046774; CTA
SSFSTSSSL

SEQ ID NO: 46231 - protein, 9 aa, Homo sapiens
  misc_feature: Table A; Target 46231; HLA-C*07:02; MAGEC2; ENSG00000046774; CTA
SSFSTSSSL

SEQ ID NO: 46232 - protein, 9 aa, Homo sapiens
  misc_feature: Table A; Target 46232; HLA-C*14:02; MAGEC2; ENSG00000046774; CTA
SSFSTSSSL

SEQ ID NO: 46233 - protein, 9 aa, Homo sapiens
  misc_feature: Table A; Target 46233; HLA-C*16:04; MAGEC2; ENSG00000046774; CTA
SSFSTSSSL

SEQ ID NO: 46234 - protein, 10 aa, Homo sapiens
  misc_feature: Table A; Target 46234; HLA-A*11:01; MAGEC2; ENSG00000046774; CTA
SSFTYTLDEK

SEQ ID NO: 46235 - protein, 10 aa, Homo sapiens
  misc_feature: Table A; Target 46235; HLA-B*57:01; MAGEC2; ENSG00000046774; CTA
SSPPYYEFLW

SEQ ID NO: 46236 - protein, 9 aa, Homo sapiens
  misc_feature: Table A; Target 46236; HLA-A*03:02; MAGEC2; ENSG00000046774; CTA
SVMSSNVSF

SEQ ID NO: 46237 - protein, 9 aa, Homo sapiens
  misc_feature: Table A; Target 46237; HLA-A*11:01; MAGEC2; ENSG00000046774; CTA
SVMSSNVSF

SEQ ID NO: 46238 - protein, 9 aa, Homo sapiens
  misc_feature: Table A; Target 46238; HLA-A*23:01; MAGEC2; ENSG00000046774; CTA
SVMSSNVSF

SEQ ID NO: 46239 - protein, 9 aa, Homo sapiens
  misc_feature: Table A; Target 46239; HLA-A*24:02; MAGEC2; ENSG00000046774; CTA
SVMSSNVSF

SEQ ID NO: 46240 - protein, 9 aa, Homo sapiens
  misc_feature: Table A; Target 46240; HLA-A*25:01; MAGEC2; ENSG00000046774; CTA
SVMSSNVSF

SEQ ID NO: 46241 - protein, 9 aa, Homo sapiens
  misc_feature: Table A; Target 46241; HLA-A*26:01; MAGEC2; ENSG00000046774; CTA
SVMSSNVSF

SEQ ID NO: 46242 - protein, 9 aa, Homo sapiens
  misc_feature: Table A; Target 46242; HLA-A*29:02; MAGEC2; ENSG00000046774; CTA
SVMSSNVSF

SEQ ID NO: 46243 - protein, 9 aa, Homo sapiens
  misc_feature: Table A; Target 46243; HLA-A*30:02; MAGEC2; ENSG00000046774; CTA
SVMSSNVSF

SEQ ID NO: 46244 - protein, 9 aa, Homo sapiens
  misc_feature: Table A; Target 46244; HLA-A*31:01; MAGEC2; ENSG00000046774; CTA
SVMSSNVSF

SEQ ID NO: 46245 - protein, 9 aa, Homo sapiens
  misc_feature: Table A; Target 46245; HLA-B*07:02; MAGEC2; ENSG00000046774; CTA
SVMSSNVSF

SEQ ID NO: 46246 - protein, 9 aa, Homo sapiens
  misc_feature: Table A; Target 46246; HLA-B*08:01; MAGEC2; ENSG00000046774; CTA
SVMSSNVSF

SEQ ID NO: 46247 - protein, 9 aa, Homo sapiens
  misc_feature: Table A; Target 46247; HLA-B*13:02; MAGEC2; ENSG00000046774; CTA
SVMSSNVSF

SEQ ID NO: 46248 - protein, 9 aa, Homo sapiens
  misc_feature: Table A; Target 46248; HLA-B*15:03; MAGEC2; ENSG00000046774; CTA
SVMSSNVSF

SEQ ID NO: 46249 - protein, 9 aa, Homo sapiens
  misc_feature: Table A; Target 46249; HLA-B*35:01; MAGEC2; ENSG00000046774; CTA
SVMSSNVSF

SEQ ID NO: 46250 - protein, 9 aa, Homo sapiens
  misc_feature: Table A; Target 46250; HLA-B*35:03; MAGEC2; ENSG00000046774; CTA
SVMSSNVSF

SEQ ID NO: 46251 - protein, 9 aa, Homo sapiens
  misc_feature: Table A; Target 46251; HLA-B*37:01; MAGEC2; ENSG00000046774; CTA
SVMSSNVSF

SEQ ID NO: 46252 - protein, 9 aa, Homo sapiens
  misc_feature: Table A; Target 46252; HLA-B*38:01; MAGEC2; ENSG00000046774; CTA
SVMSSNVSF

SEQ ID NO: 46253 - protein, 9 aa, Homo sapiens
  misc_feature: Table A; Target 46253; HLA-B*39:01; MAGEC2; ENSG00000046774; CTA
SVMSSNVSF

SEQ ID NO: 46254 - protein, 9 aa, Homo sapiens
  misc_feature: Table A; Target 46254; HLA-B*44:03; MAGEC2; ENSG00000046774; CTA
SVMSSNVSF

SEQ ID NO: 46255 - protein, 9 aa, Homo sapiens
  misc_feature: Table A; Target 46255; HLA-B*46:01; MAGEC2; ENSG00000046774; CTA
SVMSSNVSF

SEQ ID NO: 46256 - protein, 9 aa, Homo sapiens
  misc_feature: Table A; Target 46256; HLA-B*55:01; MAGEC2; ENSG00000046774; CTA
SVMSSNVSF

SEQ ID NO: 46257 - protein, 9 aa, Homo sapiens
  misc_feature: Table A; Target 46257; HLA-B*57:01; MAGEC2; ENSG00000046774; CTA
SVMSSNVSF

SEQ ID NO: 46258 - protein, 9 aa, Homo sapiens
  misc_feature: Table A; Target 46258; HLA-B*58:01; MAGEC2; ENSG00000046774; CTA
SVMSSNVSF

SEQ ID NO: 46259 - protein, 9 aa, Homo sapiens
  misc_feature: Table A; Target 46259; HLA-C*01:02; MAGEC2; ENSG00000046774; CTA
SVMSSNVSF

SEQ ID NO: 46260 - protein, 9 aa, Homo sapiens
  misc_feature: Table A; Target 46260; HLA-C*02:02; MAGEC2; ENSG00000046774; CTA
SVMSSNVSF

SEQ ID NO: 46261 - protein, 9 aa, Homo sapiens
  misc_feature: Table A; Target 46261; HLA-C*03:03; MAGEC2; ENSG00000046774; CTA
SVMSSNVSF

SEQ ID NO: 46262 - protein, 9 aa, Homo sapiens
  misc_feature: Table A; Target 46262; HLA-C*03:04; MAGEC2; ENSG00000046774; CTA
SVMSSNVSF

SEQ ID NO: 46263 - protein, 9 aa, Homo sapiens
  misc_feature: Table A; Target 46263; HLA-C*05:01; MAGEC2; ENSG00000046774; CTA
SVMSSNVSF

SEQ ID NO: 46264 - protein, 9 aa, Homo sapiens
  misc_feature: Table A; Target 46264; HLA-C*07:02; MAGEC2; ENSG00000046774; CTA
SVMSSNVSF

SEQ ID NO: 46265 - protein, 9 aa, Homo sapiens
  misc_feature: Table A; Target 46265; HLA-C*07:04; MAGEC2; ENSG00000046774; CTA
SVMSSNVSF

SEQ ID NO: 46266 - protein, 9 aa, Homo sapiens
  misc_feature: Table A; Target 46266; HLA-C*07:06; MAGEC2; ENSG00000046774; CTA
SVMSSNVSF

SEQ ID NO: 46267 - protein, 9 aa, Homo sapiens
  misc_feature: Table A; Target 46267; HLA-C*14:02; MAGEC2; ENSG00000046774; CTA
SVMSSNVSF

SEQ ID NO: 46268 - protein, 9 aa, Homo sapiens
  misc_feature: Table A; Target 46268; HLA-C*16:01; MAGEC2; ENSG00000046774; CTA
SVMSSNVSF

SEQ ID NO: 46269 - protein, 9 aa, Homo sapiens
  misc_feature: Table A; Target 46269; HLA-C*16:04; MAGEC2; ENSG00000046774; CTA
SVMSSNVSF

SEQ ID NO: 46270 - protein, 8 aa, Homo sapiens
  misc_feature: Table A; Target 46270; HLA-A*32:01; MAGEC2; ENSG00000046774; CTA
TADDATVM

SEQ ID NO: 46271 - protein, 8 aa, Homo sapiens
  misc_feature: Table A; Target 46271; HLA-B*35:01; MAGEC2; ENSG00000046774; CTA
TADDATVM

SEQ ID NO: 46272 - protein, 8 aa, Homo sapiens
  misc_feature: Table A; Target 46272; HLA-B*35:03; MAGEC2; ENSG00000046774; CTA
TADDATVM

SEQ ID NO: 46273 - protein, 8 aa, Homo sapiens
  misc_feature: Table A; Target 46273; HLA-B*39:01; MAGEC2; ENSG00000046774; CTA
TADDATVM

SEQ ID NO: 46274 - protein, 8 aa, Homo sapiens
  misc_feature: Table A; Target 46274; HLA-B*55:01; MAGEC2; ENSG00000046774; CTA
TADDATVM

SEQ ID NO: 46275 - protein, 8 aa, Homo sapiens
  misc_feature: Table A; Target 46275; HLA-C*03:03; MAGEC2; ENSG00000046774; CTA
TADDATVM

SEQ ID NO: 46276 - protein, 8 aa, Homo sapiens
  misc_feature: Table A; Target 46276; HLA-C*03:04; MAGEC2; ENSG00000046774; CTA
TADDATVM

SEQ ID NO: 46277 - protein, 8 aa, Homo sapiens
  misc_feature: Table A; Target 46277; HLA-C*04:01; MAGEC2; ENSG00000046774; CTA
TADDATVM

SEQ ID NO: 46278 - protein, 8 aa, Homo sapiens
  misc_feature: Table A; Target 46278; HLA-C*07:04; MAGEC2; ENSG00000046774; CTA
TADDATVM

SEQ ID NO: 46279 - protein, 9 aa, Homo sapiens
  misc_feature: Table A; Target 46279; HLA-B*35:03; MAGEC2; ENSG00000046774; CTA
TADDATVMA

SEQ ID NO: 46280 - protein, 9 aa, Homo sapiens
  misc_feature: Table A; Target 46280; HLA-B*39:01; MAGEC2; ENSG00000046774; CTA
TADDATVMA

SEQ ID NO: 46281 - protein, 9 aa, Homo sapiens
  misc_feature: Table A; Target 46281; HLA-B*54:01; MAGEC2; ENSG00000046774; CTA
TADDATVMA

SEQ ID NO: 46282 - protein, 9 aa, Homo sapiens
  misc_feature: Table A; Target 46282; HLA-C*05:01; MAGEC2; ENSG00000046774; CTA
TADDATVMA

SEQ ID NO: 46283 - protein, 8 aa, Homo sapiens
  misc_feature: Table A; Target 46283; HLA-B*49:01; MAGEC2; ENSG00000046774; CTA
TEAEMLMI

SEQ ID NO: 46284 - protein, 9 aa, Homo sapiens
  misc_feature: Table A; Target 46284; HLA-B*18:01; MAGEC2; ENSG00000046774; CTA
TEAEMLMIV

SEQ ID NO: 46285 - protein, 9 aa, Homo sapiens
  misc_feature: Table A; Target 46285; HLA-B*49:01; MAGEC2; ENSG00000046774; CTA
TEAEMLMIV

SEQ ID NO: 46286 - protein, 10 aa, Homo sapiens
  misc_feature: Table A; Target 46286; HLA-A*30:01; MAGEC2; ENSG00000046774; CTA
TEAEMLMIVI

SEQ ID NO: 46287 - protein, 10 aa, Homo sapiens
  misc_feature: Table A; Target 46287; HLA-B*49:01; MAGEC2; ENSG00000046774; CTA
TEAEMLMIVI

SEQ ID NO: 46288 - protein, 10 aa, Homo sapiens
  misc_feature: Table A; Target 46288; HLA-C*05:01; MAGEC2; ENSG00000046774; CTA
TIDTADDATV

SEQ ID NO: 46289 - protein, 11 aa, Homo sapiens
  misc_feature: Table A; Target 46289; HLA-B*35:03; MAGEC2; ENSG00000046774; CTA
TIDTADDATVM

SEQ ID NO: 46290 - protein, 11 aa, Homo sapiens
  misc_feature: Table A; Target 46290; HLA-B*55:01; MAGEC2; ENSG00000046774; CTA
TIDTADDATVM

SEQ ID NO: 46291 - protein, 11 aa, Homo sapiens
  misc_feature: Table A; Target 46291; HLA-C*03:03; MAGEC2; ENSG00000046774; CTA
TIDTADDATVM

SEQ ID NO: 46292 - protein, 11 aa, Homo sapiens
  misc_feature: Table A; Target 46292; HLA-C*04:01; MAGEC2; ENSG00000046774; CTA
TIDTADDATVM

SEQ ID NO: 46293 - protein, 11 aa, Homo sapiens
  misc_feature: Table A; Target 46293; HLA-C*05:01; MAGEC2; ENSG00000046774; CTA
TIDTADDATVM

SEQ ID NO: 46294 - protein, 9 aa, Homo sapiens
  misc_feature: Table A; Target 46294; HLA-A*02:01; MAGEC2; ENSG00000046774; CTA
TLDEKVAEL

SEQ ID NO: 46295 - protein, 9 aa, Homo sapiens
  misc_feature: Table A; Target 46295; HLA-A*02:03; MAGEC2; ENSG00000046774; CTA
TLDEKVAEL

SEQ ID NO: 46296 - protein, 9 aa, Homo sapiens
  misc_feature: Table A; Target 46296; HLA-A*02:04; MAGEC2; ENSG00000046774; CTA
TLDEKVAEL

SEQ ID NO: 46297 - protein, 9 aa, Homo sapiens
  misc_feature: Table A; Target 46297; HLA-A*02:07; MAGEC2; ENSG00000046774; CTA
TLDEKVAEL

SEQ ID NO: 46298 - protein, 9 aa, Homo sapiens
  misc_feature: Table A; Target 46298; HLA-A*32:01; MAGEC2; ENSG00000046774; CTA
TLDEKVAEL

SEQ ID NO: 46299 - protein, 9 aa, Homo sapiens
  misc_feature: Table A; Target 46299; HLA-B*08:01; MAGEC2; ENSG00000046774; CTA
TLDEKVAEL

SEQ ID NO: 46300 - protein, 9 aa, Homo sapiens
  misc_feature: Table A; Target 46300; HLA-B*35:03; MAGEC2; ENSG00000046774; CTA
TLDEKVAEL

SEQ ID NO: 46301 - protein, 9 aa, Homo sapiens
  misc_feature: Table A; Target 46301; HLA-B*38:01; MAGEC2; ENSG00000046774; CTA
TLDEKVAEL

SEQ ID NO: 46302 - protein, 9 aa, Homo sapiens
  misc_feature: Table A; Target 46302; HLA-B*39:01; MAGEC2; ENSG00000046774; CTA
TLDEKVAEL

SEQ ID NO: 46303 - protein, 9 aa, Homo sapiens
  misc_feature: Table A; Target 46303; HLA-B*40:01; MAGEC2; ENSG00000046774; CTA
TLDEKVAEL

SEQ ID NO: 46304 - protein, 9 aa, Homo sapiens
  misc_feature: Table A; Target 46304; HLA-B*55:01; MAGEC2; ENSG00000046774; CTA
TLDEKVAEL

SEQ ID NO: 46305 - protein, 9 aa, Homo sapiens
  misc_feature: Table A; Target 46305; HLA-C*01:02; MAGEC2; ENSG00000046774; CTA
TLDEKVAEL

SEQ ID NO: 46306 - protein, 9 aa, Homo sapiens
  misc_feature: Table A; Target 46306; HLA-C*04:01; MAGEC2; ENSG00000046774; CTA
TLDEKVAEL

SEQ ID NO: 46307 - protein, 9 aa, Homo sapiens
  misc_feature: Table A; Target 46307; HLA-C*05:01; MAGEC2; ENSG00000046774; CTA
TLDEKVAEL

SEQ ID NO: 46308 - protein, 9 aa, Homo sapiens
  misc_feature: Table A; Target 46308; HLA-C*07:04; MAGEC2; ENSG00000046774; CTA
TLDEKVAEL

SEQ ID NO: 46309 - protein, 8 aa, Homo sapiens
  misc_feature: Table A; Target 46309; HLA-B*35:03; MAGEC2; ENSG00000046774; CTA
TVMASESL

SEQ ID NO: 46310 - protein, 10 aa, Homo sapiens
  misc_feature: Table A; Target 46310; HLA-A*25:01; MAGEC2; ENSG00000046774; CTA
TVMASESLSV

SEQ ID NO: 46311 - protein, 10 aa, Homo sapiens
  misc_feature: Table A; Target 46311; HLA-B*13:02; MAGEC2; ENSG00000046774; CTA
TVMASESLSV

SEQ ID NO: 46312 - protein, 11 aa, Homo sapiens
  misc_feature: Table A; Target 46312; HLA-A*25:01; MAGEC2; ENSG00000046774; CTA
TVMASESLSVM

SEQ ID NO: 46313 - protein, 11 aa, Homo sapiens
  misc_feature: Table A; Target 46313; HLA-A*26:01; MAGEC2; ENSG00000046774; CTA
TVMASESLSVM

SEQ ID NO: 46314 - protein, 11 aa, Homo sapiens
  misc_feature: Table A; Target 46314; HLA-B*15:01; MAGEC2; ENSG00000046774; CTA
TVMASESLSVM

SEQ ID NO: 46315 - protein, 11 aa, Homo sapiens
  misc_feature: Table A; Target 46315; HLA-B*35:01; MAGEC2; ENSG00000046774; CTA
TVMASESLSVM

SEQ ID NO: 46316 - protein, 11 aa, Homo sapiens
  misc_feature: Table A; Target 46316; HLA-B*35:03; MAGEC2; ENSG00000046774; CTA
TVMASESLSVM

SEQ ID NO: 46317 - protein, 11 aa, Homo sapiens
  misc_feature: Table A; Target 46317; HLA-B*39:01; MAGEC2; ENSG00000046774; CTA
TVMASESLSVM

SEQ ID NO: 46318 - protein, 11 aa, Homo sapiens
  misc_feature: Table A; Target 46318; HLA-C*01:02; MAGEC2; ENSG00000046774; CTA
TVMASESLSVM

SEQ ID NO: 46319 - protein, 11 aa, Homo sapiens
  misc_feature: Table A; Target 46319; HLA-C*04:01; MAGEC2; ENSG00000046774; CTA
TVMASESLSVM

SEQ ID NO: 46320 - protein, 11 aa, Homo sapiens
  misc_feature: Table A; Target 46320; HLA-C*07:02; MAGEC2; ENSG00000046774; CTA
TVMASESLSVM

SEQ ID NO: 46321 - protein, 11 aa, Homo sapiens
  misc_feature: Table A; Target 46321; HLA-C*07:04; MAGEC2; ENSG00000046774; CTA
TVMASESLSVM

SEQ ID NO: 46322 - protein, 11 aa, Homo sapiens
  misc_feature: Table A; Target 46322; HLA-C*07:06; MAGEC2; ENSG00000046774; CTA
TVMASESLSVM

SEQ ID NO: 46323 - protein, 11 aa, Homo sapiens
  misc_feature: Table A; Target 46323; HLA-C*14:02; MAGEC2; ENSG00000046774; CTA
TVMASESLSVM

SEQ ID NO: 46324 - protein, 9 aa, Homo sapiens
  misc_feature: Table A; Target 46324; HLA-A*02:07; MAGEC2; ENSG00000046774; CTA
TVPSSFPSW

SEQ ID NO: 46325 - protein, 9 aa, Homo sapiens
  misc_feature: Table A; Target 46325; HLA-A*24:02; MAGEC2; ENSG00000046774; CTA
TVPSSFPSW

SEQ ID NO: 46326 - protein, 9 aa, Homo sapiens
  misc_feature: Table A; Target 46326; HLA-A*25:01; MAGEC2; ENSG00000046774; CTA
TVPSSFPSW

SEQ ID NO: 46327 - protein, 9 aa, Homo sapiens
  misc_feature: Table A; Target 46327; HLA-A*26:01; MAGEC2; ENSG00000046774; CTA
TVPSSFPSW

SEQ ID NO: 46328 - protein, 9 aa, Homo sapiens
  misc_feature: Table A; Target 46328; HLA-A*32:01; MAGEC2; ENSG00000046774; CTA
TVPSSFPSW

SEQ ID NO: 46329 - protein, 9 aa, Homo sapiens
  misc_feature: Table A; Target 46329; HLA-B*57:01; MAGEC2; ENSG00000046774; CTA
TVPSSFPSW

SEQ ID NO: 46330 - protein, 9 aa, Homo sapiens
  misc_feature: Table A; Target 46330; HLA-B*58:01; MAGEC2; ENSG00000046774; CTA
TVPSSFPSW

SEQ ID NO: 46331 - protein, 8 aa, Homo sapiens
  misc_feature: Table A; Target 46331; HLA-C*05:01; MAGEC2; ENSG00000046774; CTA
VAELVEFL

SEQ ID NO: 46332 - protein, 9 aa, Homo sapiens
  misc_feature: Table A; Target 46332; HLA-C*05:01; MAGEC2; ENSG00000046774; CTA
VAELVEFLL

SEQ ID NO: 46333 - protein, 9 aa, Homo sapiens
  misc_feature: Table A; Target 46333; HLA-A*02:01; MAGEC2; ENSG00000046774; CTA
VDNDSPTSV

SEQ ID NO: 46334 - protein, 9 aa, Homo sapiens
  misc_feature: Table A; Target 46334; HLA-A*02:03; MAGEC2; ENSG00000046774; CTA
VDNDSPTSV

SEQ ID NO: 46335 - protein, 9 aa, Homo sapiens
  misc_feature: Table A; Target 46335; HLA-A*30:01; MAGEC2; ENSG00000046774; CTA
VDNDSPTSV

SEQ ID NO: 46336 - protein, 9 aa, Homo sapiens
  misc_feature: Table A; Target 46336; HLA-B*13:02; MAGEC2; ENSG00000046774; CTA
VDNDSPTSV

SEQ ID NO: 46337 - protein, 9 aa, Homo sapiens
  misc_feature: Table A; Target 46337; HLA-B*37:01; MAGEC2; ENSG00000046774; CTA
VDNDSPTSV

SEQ ID NO: 46338 - protein, 9 aa, Homo sapiens
  misc_feature: Table A; Target 46338; HLA-B*49:01; MAGEC2; ENSG00000046774; CTA
VDNDSPTSV

SEQ ID NO: 46339 - protein, 9 aa, Homo sapiens
  misc_feature: Table A; Target 46339; HLA-B*56:01; MAGEC2; ENSG00000046774; CTA
VDNDSPTSV

SEQ ID NO: 46340 - protein, 9 aa, Homo sapiens
  misc_feature: Table A; Target 46340; HLA-C*01:02; MAGEC2; ENSG00000046774; CTA
VDNDSPTSV

SEQ ID NO: 46341 - protein, 9 aa, Homo sapiens
  misc_feature: Table A; Target 46341; HLA-C*05:01; MAGEC2; ENSG00000046774; CTA
VDNDSPTSV

SEQ ID NO: 46342 - protein, 9 aa, Homo sapiens
  misc_feature: Table A; Target 46342; HLA-C*12:03; MAGEC2; ENSG00000046774; CTA
VDNDSPTSV

SEQ ID NO: 46343 - protein, 9 aa, Homo sapiens
  misc_feature: Table A; Target 46343; HLA-C*16:02; MAGEC2; ENSG00000046774; CTA
VDNDSPTSV

SEQ ID NO: 46344 - protein, 9 aa, Homo sapiens
  misc_feature: Table A; Target 46344; HLA-C*16:04; MAGEC2; ENSG00000046774; CTA
VDNDSPTSV

SEQ ID NO: 46345 - protein, 9 aa, Homo sapiens
  misc_feature: Table A; Target 46345; HLA-A*30:01; MAGEC2; ENSG00000046774; CTA
VEERVQATI

SEQ ID NO: 46346 - protein, 9 aa, Homo sapiens
  misc_feature: Table A; Target 46346; HLA-B*40:01; MAGEC2; ENSG00000046774; CTA
VEERVQATI

SEQ ID NO: 46347 - protein, 9 aa, Homo sapiens
  misc_feature: Table A; Target 46347; HLA-B*40:02; MAGEC2; ENSG00000046774; CTA
VEERVQATI

SEQ ID NO: 46348 - protein, 9 aa, Homo sapiens
  misc_feature: Table A; Target 46348; HLA-B*44:02; MAGEC2; ENSG00000046774; CTA
VEERVQATI

SEQ ID NO: 46349 - protein, 9 aa, Homo sapiens
  misc_feature: Table A; Target 46349; HLA-B*44:03; MAGEC2; ENSG00000046774; CTA
VEERVQATI

SEQ ID NO: 46350 - protein, 8 aa, Homo sapiens
  misc_feature: Table A; Target 46350; HLA-B*18:01; MAGEC2; ENSG00000046774; CTA
VEFLLLKY

SEQ ID NO: 46351 - protein, 8 aa, Homo sapiens
  misc_feature: Table A; Target 46351; HLA-B*44:02; MAGEC2; ENSG00000046774; CTA
VEFLLLKY

SEQ ID NO: 46352 - protein, 8 aa, Homo sapiens
  misc_feature: Table A; Target 46352; HLA-B*44:03; MAGEC2; ENSG00000046774; CTA
VEFLLLKY

SEQ ID NO: 46353 - protein, 8 aa, Homo sapiens
  misc_feature: Table A; Target 46353; HLA-A*23:01; MAGEC2; ENSG00000046774; CTA
VFANTVGL

SEQ ID NO: 46354 - protein, 8 aa, Homo sapiens
  misc_feature: Table A; Target 46354; HLA-C*14:02; MAGEC2; ENSG00000046774; CTA
VFANTVGL

SEQ ID NO: 46355 - protein, 9 aa, Homo sapiens
  misc_feature: Table A; Target 46355; HLA-C*14:02; MAGEC2; ENSG00000046774; CTA
VFSPSSFST

SEQ ID NO: 46356 - protein, 9 aa, Homo sapiens
  misc_feature: Table A; Target 46356; HLA-A*24:02; MAGEC2; ENSG00000046774; CTA
VGPDHFCVF

SEQ ID NO: 46357 - protein, 9 aa, Homo sapiens
  misc_feature: Table A; Target 46357; HLA-A*02:07; MAGEC2; ENSG00000046774; CTA
VIPNLTESI

SEQ ID NO: 46358 - protein, 9 aa, Homo sapiens
  misc_feature: Table A; Target 46358; HLA-A*24:02; MAGEC2; ENSG00000046774; CTA
VIPNLTESI

SEQ ID NO: 46359 - protein, 9 aa, Homo sapiens
  misc_feature: Table A; Target 46359; HLA-C*01:02; MAGEC2; ENSG00000046774; CTA
VIPNLTESI

SEQ ID NO: 46360 - protein, 9 aa, Homo sapiens
  misc_feature: Table A; Target 46360; HLA-A*02:01; MAGEC2; ENSG00000046774; CTA
VIWEVLNAV

SEQ ID NO: 46361 - protein, 9 aa, Homo sapiens
  misc_feature: Table A; Target 46361; HLA-A*02:03; MAGEC2; ENSG00000046774; CTA
VIWEVLNAV

SEQ ID NO: 46362 - protein, 9 aa, Homo sapiens
  misc_feature: Table A; Target 46362; HLA-A*02:04; MAGEC2; ENSG00000046774; CTA
VIWEVLNAV

SEQ ID NO: 46363 - protein, 9 aa, Homo sapiens
  misc_feature: Table A; Target 46363; HLA-A*02:07; MAGEC2; ENSG00000046774; CTA
VIWEVLNAV

SEQ ID NO: 46364 - protein, 9 aa, Homo sapiens
  misc_feature: Table A; Target 46364; HLA-B*13:02; MAGEC2; ENSG00000046774; CTA
VIWEVLNAV

SEQ ID NO: 46365 - protein, 9 aa, Homo sapiens
  misc_feature: Table A; Target 46365; HLA-B*51:01; MAGEC2; ENSG00000046774; CTA
VIWEVLNAV

SEQ ID NO: 46366 - protein, 9 aa, Homo sapiens
  misc_feature: Table A; Target 46366; HLA-B*55:01; MAGEC2; ENSG00000046774; CTA
VIWEVLNAV

SEQ ID NO: 46367 - protein, 11 aa, Homo sapiens
  misc_feature: Table A; Target 46367; HLA-A*02:07; MAGEC2; ENSG00000046774; CTA
VIWEVLNAVGV

SEQ ID NO: 46368 - protein, 8 aa, Homo sapiens
  misc_feature: Table A; Target 46368; HLA-A*03:01; MAGEC2; ENSG00000046774; CTA
VLNAVGVY

SEQ ID NO: 46369 - protein, 8 aa, Homo sapiens
  misc_feature: Table A; Target 46369; HLA-A*30:02; MAGEC2; ENSG00000046774; CTA
VLNAVGVY

SEQ ID NO: 46370 - protein, 8 aa, Homo sapiens
  misc_feature: Table A; Target 46370; HLA-A*32:01; MAGEC2; ENSG00000046774; CTA
VLNAVGVY

SEQ ID NO: 46371 - protein, 8 aa, Homo sapiens
  misc_feature: Table A; Target 46371; HLA-B*15:01; MAGEC2; ENSG00000046774; CTA
VLNAVGVY

SEQ ID NO: 46372 - protein, 8 aa, Homo sapiens
  misc_feature: Table A; Target 46372; HLA-B*15:03; MAGEC2; ENSG00000046774; CTA
VLNAVGVY

SEQ ID NO: 46373 - protein, 8 aa, Homo sapiens
  misc_feature: Table A; Target 46373; HLA-B*39:01; MAGEC2; ENSG00000046774; CTA
VLNAVGVY

SEQ ID NO: 46374 - protein, 8 aa, Homo sapiens
  misc_feature: Table A; Target 46374; HLA-B*46:01; MAGEC2; ENSG00000046774; CTA
VLNAVGVY

SEQ ID NO: 46375 - protein, 8 aa, Homo sapiens
  misc_feature: Table A; Target 46375; HLA-C*07:02; MAGEC2; ENSG00000046774; CTA
VLNAVGVY

SEQ ID NO: 46376 - protein, 8 aa, Homo sapiens
  misc_feature: Table A; Target 46376; HLA-C*07:04; MAGEC2; ENSG00000046774; CTA
VLNAVGVY

SEQ ID NO: 46377 - protein, 8 aa, Homo sapiens
  misc_feature: Table A; Target 46377; HLA-C*14:02; MAGEC2; ENSG00000046774; CTA
VLNAVGVY

SEQ ID NO: 46378 - protein, 8 aa, Homo sapiens
  misc_feature: Table A; Target 46378; HLA-C*16:02; MAGEC2; ENSG00000046774; CTA
VLNAVGVY

SEQ ID NO: 46379 - protein, 9 aa, Homo sapiens
  misc_feature: Table A; Target 46379; HLA-A*02:01; MAGEC2; ENSG00000046774; CTA
VLNAVGVYA

SEQ ID NO: 46380 - protein, 9 aa, Homo sapiens
  misc_feature: Table A; Target 46380; HLA-A*02:03; MAGEC2; ENSG00000046774; CTA
VLNAVGVYA

SEQ ID NO: 46381 - protein, 9 aa, Homo sapiens
  misc_feature: Table A; Target 46381; HLA-A*02:04; MAGEC2; ENSG00000046774; CTA
VLNAVGVYA

SEQ ID NO: 46382 - protein, 9 aa, Homo sapiens
  misc_feature: Table A; Target 46382; HLA-A*02:07; MAGEC2; ENSG00000046774; CTA
VLNAVGVYA

SEQ ID NO: 46383 - protein, 9 aa, Homo sapiens
  misc_feature: Table A; Target 46383; HLA-A*03:01; MAGEC2; ENSG00000046774; CTA
VLNAVGVYA

SEQ ID NO: 46384 - protein, 9 aa, Homo sapiens
  misc_feature: Table A; Target 46384; HLA-A*03:02; MAGEC2; ENSG00000046774; CTA
VLNAVGVYA

SEQ ID NO: 46385 - protein, 9 aa, Homo sapiens
  misc_feature: Table A; Target 46385; HLA-B*13:02; MAGEC2; ENSG00000046774; CTA
VLNAVGVYA

SEQ ID NO: 46386 - protein, 9 aa, Homo sapiens
  misc_feature: Table A; Target 46386; HLA-B*46:01; MAGEC2; ENSG00000046774; CTA
VLNAVGVYA

SEQ ID NO: 46387 - protein, 9 aa, Homo sapiens
  misc_feature: Table A; Target 46387; HLA-B*56:01; MAGEC2; ENSG00000046774; CTA
VLNAVGVYA

SEQ ID NO: 46388 - protein, 9 aa, Homo sapiens
  misc_feature: Table A; Target 46388; HLA-C*02:02; MAGEC2; ENSG00000046774; CTA
VLNAVGVYA

SEQ ID NO: 46389 - protein, 11 aa, Homo sapiens
  misc_feature: Table A; Target 46389; HLA-A*31:01; MAGEC2; ENSG00000046774; CTA
VLNAVGVYAGR

SEQ ID NO: 46390 - protein, 9 aa, Homo sapiens
  misc_feature: Table A; Target 46390; HLA-A*02:01; MAGEC2; ENSG00000046774; CTA
VMASESLSV

SEQ ID NO: 46391 - protein, 9 aa, Homo sapiens
  misc_feature: Table A; Target 46391; HLA-A*02:03; MAGEC2; ENSG00000046774; CTA
VMASESLSV

SEQ ID NO: 46392 - protein, 9 aa, Homo sapiens
  misc_feature: Table A; Target 46392; HLA-B*13:02; MAGEC2; ENSG00000046774; CTA
VMASESLSV

SEQ ID NO: 46393 - protein, 9 aa, Homo sapiens
  misc_feature: Table A; Target 46393; HLA-B*55:01; MAGEC2; ENSG00000046774; CTA
VMASESLSV

SEQ ID NO: 46394 - protein, 10 aa, Homo sapiens
  misc_feature: Table A; Target 46394; HLA-B*15:01; MAGEC2; ENSG00000046774; CTA
VMASESLSVM

SEQ ID NO: 46395 - protein, 10 aa, Homo sapiens
  misc_feature: Table A; Target 46395; HLA-B*46:01; MAGEC2; ENSG00000046774; CTA
VMASESLSVM

SEQ ID NO: 46396 - protein, 10 aa, Homo sapiens
  misc_feature: Table A; Target 46396; HLA-C*01:02; MAGEC2; ENSG00000046774; CTA
VMASESLSVM

SEQ ID NO: 46397 - protein, 10 aa, Homo sapiens
  misc_feature: Table A; Target 46397; HLA-C*07:01; MAGEC2; ENSG00000046774; CTA
VMASESLSVM

SEQ ID NO: 46398 - protein, 10 aa, Homo sapiens
  misc_feature: Table A; Target 46398; HLA-C*07:04; MAGEC2; ENSG00000046774; CTA
VMASESLSVM

SEQ ID NO: 46399 - protein, 10 aa, Homo sapiens
  misc_feature: Table A; Target 46399; HLA-C*14:02; MAGEC2; ENSG00000046774; CTA
VMASESLSVM

SEQ ID NO: 46400 - protein, 8 aa, Homo sapiens
  misc_feature: Table A; Target 46400; HLA-A*23:01; MAGEC2; ENSG00000046774; CTA
VMSSNVSF

SEQ ID NO: 46401 - protein, 8 aa, Homo sapiens
  misc_feature: Table A; Target 46401; HLA-A*32:01; MAGEC2; ENSG00000046774; CTA
VMSSNVSF

SEQ ID NO: 46402 - protein, 8 aa, Homo sapiens
  misc_feature: Table A; Target 46402; HLA-B*37:01; MAGEC2; ENSG00000046774; CTA
VMSSNVSF

SEQ ID NO: 46403 - protein, 8 aa, Homo sapiens
  misc_feature: Table A; Target 46403; HLA-B*46:01; MAGEC2; ENSG00000046774; CTA
VMSSNVSF

SEQ ID NO: 46404 - protein, 8 aa, Homo sapiens
  misc_feature: Table A; Target 46404; HLA-C*04:01; MAGEC2; ENSG00000046774; CTA
VMSSNVSF

SEQ ID NO: 46405 - protein, 8 aa, Homo sapiens
  misc_feature: Table A; Target 46405; HLA-C*14:02; MAGEC2; ENSG00000046774; CTA
VMSSNVSF

SEQ ID NO: 46406 - protein, 9 aa, Homo sapiens
  misc_feature: Table A; Target 46406; HLA-B*51:01; MAGEC2; ENSG00000046774; CTA
VPGVPFRNV

SEQ ID NO: 46407 - protein, 9 aa, Homo sapiens
  misc_feature: Table A; Target 46407; HLA-B*56:01; MAGEC2; ENSG00000046774; CTA
VPGVPFRNV

SEQ ID NO: 46408 - protein, 8 aa, Homo sapiens
  misc_feature: Table A; Target 46408; HLA-A*30:02; MAGEC2; ENSG00000046774; CTA
VPHSSPPY

SEQ ID NO: 46409 - protein, 8 aa, Homo sapiens
  misc_feature: Table A; Target 46409; HLA-B*35:01; MAGEC2; ENSG00000046774; CTA
VPHSSPPY

SEQ ID NO: 46410 - protein, 9 aa, Homo sapiens
  misc_feature: Table A; Target 46410; HLA-A*30:02; MAGEC2; ENSG00000046774; CTA
VPHSSPPYY

SEQ ID NO: 46411 - protein, 9 aa, Homo sapiens
  misc_feature: Table A; Target 46411; HLA-B*35:01; MAGEC2; ENSG00000046774; CTA
VPHSSPPYY

SEQ ID NO: 46412 - protein, 11 aa, Homo sapiens
  misc_feature: Table A; Target 46412; HLA-B*35:01; MAGEC2; ENSG00000046774; CTA
VPHSSPPYYEF

SEQ ID NO: 46413 - protein, 9 aa, Homo sapiens
  misc_feature: Table A; Target 46413; HLA-A*02:04; MAGEC2; ENSG00000046774; CTA
VPSGVIPNL

SEQ ID NO: 46414 - protein, 9 aa, Homo sapiens
  misc_feature: Table A; Target 46414; HLA-A*11:01; MAGEC2; ENSG00000046774; CTA
VPSGVIPNL

SEQ ID NO: 46415 - protein, 9 aa, Homo sapiens
  misc_feature: Table A; Target 46415; HLA-A*23:01; MAGEC2; ENSG00000046774; CTA
VPSGVIPNL

SEQ ID NO: 46416 - protein, 9 aa, Homo sapiens
  misc_feature: Table A; Target 46416; HLA-A*24:02; MAGEC2; ENSG00000046774; CTA
VPSGVIPNL

SEQ ID NO: 46417 - protein, 9 aa, Homo sapiens
  misc_feature: Table A; Target 46417; HLA-A*30:01; MAGEC2; ENSG00000046774; CTA
VPSGVIPNL

SEQ ID NO: 46418 - protein, 9 aa, Homo sapiens
  misc_feature: Table A; Target 46418; HLA-A*68:01; MAGEC2; ENSG00000046774; CTA
VPSGVIPNL

SEQ ID NO: 46419 - protein, 9 aa, Homo sapiens
  misc_feature: Table A; Target 46419; HLA-A*68:02; MAGEC2; ENSG00000046774; CTA
VPSGVIPNL

SEQ ID NO: 46420 - protein, 9 aa, Homo sapiens
  misc_feature: Table A; Target 46420; HLA-B*07:02; MAGEC2; ENSG00000046774; CTA
VPSGVIPNL

SEQ ID NO: 46421 - protein, 9 aa, Homo sapiens
  misc_feature: Table A; Target 46421; HLA-B*38:01; MAGEC2; ENSG00000046774; CTA
VPSGVIPNL

SEQ ID NO: 46422 - protein, 9 aa, Homo sapiens
  misc_feature: Table A; Target 46422; HLA-B*39:01; MAGEC2; ENSG00000046774; CTA
VPSGVIPNL

SEQ ID NO: 46423 - protein, 9 aa, Homo sapiens
  misc_feature: Table A; Target 46423; HLA-B*51:01; MAGEC2; ENSG00000046774; CTA
VPSGVIPNL

SEQ ID NO: 46424 - protein, 9 aa, Homo sapiens
  misc_feature: Table A; Target 46424; HLA-B*54:01; MAGEC2; ENSG00000046774; CTA
VPSGVIPNL

SEQ ID NO: 46425 - protein, 9 aa, Homo sapiens
  misc_feature: Table A; Target 46425; HLA-B*55:01; MAGEC2; ENSG00000046774; CTA
VPSGVIPNL

SEQ ID NO: 46426 - protein, 9 aa, Homo sapiens
  misc_feature: Table A; Target 46426; HLA-B*56:01; MAGEC2; ENSG00000046774; CTA
VPSGVIPNL

SEQ ID NO: 46427 - protein, 9 aa, Homo sapiens
  misc_feature: Table A; Target 46427; HLA-B*58:01; MAGEC2; ENSG00000046774; CTA
VPSGVIPNL

SEQ ID NO: 46428 - protein, 9 aa, Homo sapiens
  misc_feature: Table A; Target 46428; HLA-C*02:02; MAGEC2; ENSG00000046774; CTA
VPSGVIPNL

SEQ ID NO: 46429 - protein, 9 aa, Homo sapiens
  misc_feature: Table A; Target 46429; HLA-C*03:03; MAGEC2; ENSG00000046774; CTA
VPSGVIPNL

SEQ ID NO: 46430 - protein, 9 aa, Homo sapiens
  misc_feature: Table A; Target 46430; HLA-C*05:01; MAGEC2; ENSG00000046774; CTA
VPSGVIPNL

SEQ ID NO: 46431 - protein, 9 aa, Homo sapiens
  misc_feature: Table A; Target 46431; HLA-C*07:02; MAGEC2; ENSG00000046774; CTA
VPSGVIPNL

SEQ ID NO: 46432 - protein, 9 aa, Homo sapiens
  misc_feature: Table A; Target 46432; HLA-C*07:04; MAGEC2; ENSG00000046774; CTA
VPSGVIPNL

SEQ ID NO: 46433 - protein, 9 aa, Homo sapiens
  misc_feature: Table A; Target 46433; HLA-C*07:06; MAGEC2; ENSG00000046774; CTA
VPSGVIPNL

SEQ ID NO: 46434 - protein, 9 aa, Homo sapiens
  misc_feature: Table A; Target 46434; HLA-C*12:03; MAGEC2; ENSG00000046774; CTA
VPSGVIPNL

SEQ ID NO: 46435 - protein, 9 aa, Homo sapiens
  misc_feature: Table A; Target 46435; HLA-C*16:01; MAGEC2; ENSG00000046774; CTA
VPSGVIPNL

SEQ ID NO: 46436 - protein, 9 aa, Homo sapiens
  misc_feature: Table A; Target 46436; HLA-C*16:02; MAGEC2; ENSG00000046774; CTA
VPSGVIPNL

SEQ ID NO: 46437 - protein, 10 aa, Homo sapiens
  misc_feature: Table A; Target 46437; HLA-B*56:01; MAGEC2; ENSG00000046774; CTA
VPSGVIPNLT

SEQ ID NO: 46438 - protein, 8 aa, Homo sapiens
  misc_feature: Table A; Target 46438; HLA-B*51:01; MAGEC2; ENSG00000046774; CTA
VPSSFPSW

SEQ ID NO: 46439 - protein, 8 aa, Homo sapiens
  misc_feature: Table A; Target 46439; HLA-A*29:02; MAGEC2; ENSG00000046774; CTA
VQGHYLEY

SEQ ID NO: 46440 - protein, 8 aa, Homo sapiens
  misc_feature: Table A; Target 46440; HLA-A*30:02; MAGEC2; ENSG00000046774; CTA
VQGHYLEY

SEQ ID NO: 46441 - protein, 8 aa, Homo sapiens
  misc_feature: Table A; Target 46441; HLA-A*32:01; MAGEC2; ENSG00000046774; CTA
VQGHYLEY

SEQ ID NO: 46442 - protein, 8 aa, Homo sapiens
  misc_feature: Table A; Target 46442; HLA-B*15:01; MAGEC2; ENSG00000046774; CTA
VQGHYLEY

SEQ ID NO: 46443 - protein, 8 aa, Homo sapiens
  misc_feature: Table A; Target 46443; HLA-B*15:03; MAGEC2; ENSG00000046774; CTA
VQGHYLEY

SEQ ID NO: 46444 - protein, 8 aa, Homo sapiens
  misc_feature: Table A; Target 46444; HLA-C*07:01; MAGEC2; ENSG00000046774; CTA
VQGHYLEY

SEQ ID NO: 46445 - protein, 8 aa, Homo sapiens
  misc_feature: Table A; Target 46445; HLA-C*16:01; MAGEC2; ENSG00000046774; CTA
VQGHYLEY

SEQ ID NO: 46446 - protein, 10 aa, Homo sapiens
  misc_feature: Table A; Target 46446; HLA-A*29:02; MAGEC2; ENSG00000046774; CTA
VWVQGHYLEY

SEQ ID NO: 46447 - protein, 9 aa, Homo sapiens
  misc_feature: Table A; Target 46447; HLA-A*24:02; MAGEC2; ENSG00000046774; CTA
VYAGREHFV

SEQ ID NO: 46448 - protein, 10 aa, Homo sapiens
  misc_feature: Table A; Target 46448; HLA-A*29:02; MAGEC2; ENSG00000046774; CTA
VYAGREHFVY

SEQ ID NO: 46449 - protein, 8 aa, Homo sapiens
  misc_feature: Table A; Target 46449; HLA-A*23:01; MAGEC2; ENSG00000046774; CTA
VYGEPREL

SEQ ID NO: 46450 - protein, 8 aa, Homo sapiens
  misc_feature: Table A; Target 46450; HLA-A*24:02; MAGEC2; ENSG00000046774; CTA
VYGEPREL

SEQ ID NO: 46451 - protein, 8 aa, Homo sapiens
  misc_feature: Table A; Target 46451; HLA-C*01:02; MAGEC2; ENSG00000046774; CTA
VYGEPREL

SEQ ID NO: 46452 - protein, 8 aa, Homo sapiens
  misc_feature: Table A; Target 46452; HLA-C*14:02; MAGEC2; ENSG00000046774; CTA
VYGEPREL

SEQ ID NO: 46453 - protein, 8 aa, Homo sapiens
  misc_feature: Table A; Target 46453; HLA-C*16:01; MAGEC2; ENSG00000046774; CTA
VYGEPREL

SEQ ID NO: 46454 - protein, 8 aa, Homo sapiens
  misc_feature: Table A; Target 46454; HLA-C*16:02; MAGEC2; ENSG00000046774; CTA
VYGEPREL

SEQ ID NO: 46455 - protein, 9 aa, Homo sapiens
  misc_feature: Table A; Target 46455; HLA-A*23:01; MAGEC2; ENSG00000046774; CTA
VYGEPRELL

SEQ ID NO: 46456 - protein, 9 aa, Homo sapiens
  misc_feature: Table A; Target 46456; HLA-A*24:02; MAGEC2; ENSG00000046774; CTA
VYGEPRELL

SEQ ID NO: 46457 - protein, 11 aa, Homo sapiens
  misc_feature: Table A; Target 46457; HLA-A*33:01; MAGEC2; ENSG00000046774; CTA
VYGEPRELLTK

SEQ ID NO: 46458 - protein, 9 aa, Homo sapiens
  misc_feature: Table A; Target 46458; HLA-A*30:01; MAGEC2; ENSG00000046774; CTA
WEVLNAVGV

SEQ ID NO: 46459 - protein, 9 aa, Homo sapiens
  misc_feature: Table A; Target 46459; HLA-B*40:02; MAGEC2; ENSG00000046774; CTA
WEVLNAVGV

SEQ ID NO: 46460 - protein, 9 aa, Homo sapiens
  misc_feature: Table A; Target 46460; HLA-B*49:01; MAGEC2; ENSG00000046774; CTA
WEVLNAVGV

SEQ ID NO: 46461 - protein, 9 aa, Homo sapiens
  misc_feature: Table A; Target 46461; HLA-A*01:01; MAGEC2; ENSG00000046774; CTA
WVQGHYLEY

SEQ ID NO: 46462 - protein, 9 aa, Homo sapiens
  misc_feature: Table A; Target 46462; HLA-A*26:01; MAGEC2; ENSG00000046774; CTA
WVQGHYLEY

SEQ ID NO: 46463 - protein, 9 aa, Homo sapiens
  misc_feature: Table A; Target 46463; HLA-A*29:02; MAGEC2; ENSG00000046774; CTA
WVQGHYLEY

SEQ ID NO: 46464 - protein, 9 aa, Homo sapiens
  misc_feature: Table A; Target 46464; HLA-A*30:02; MAGEC2; ENSG00000046774; CTA
WVQGHYLEY

SEQ ID NO: 46465 - protein, 9 aa, Homo sapiens
  misc_feature: Table A; Target 46465; HLA-A*29:02; MAGEC2; ENSG00000046774; CTA
YAGREHFVY

SEQ ID NO: 46466 - protein, 9 aa, Homo sapiens
  misc_feature: Table A; Target 46466; HLA-B*35:01; MAGEC2; ENSG00000046774; CTA
YAGREHFVY

SEQ ID NO: 46467 - protein, 9 aa, Homo sapiens
  misc_feature: Table A; Target 46467; HLA-C*02:02; MAGEC2; ENSG00000046774; CTA
YAGREHFVY

SEQ ID NO: 46468 - protein, 8 aa, Homo sapiens
  misc_feature: Table A; Target 46468; HLA-B*18:01; MAGEC2; ENSG00000046774; CTA
YEAEEPVT

SEQ ID NO: 46469 - protein, 9 aa, Homo sapiens
  misc_feature: Table A; Target 46469; HLA-B*49:01; MAGEC2; ENSG00000046774; CTA
YEAEEPVTE

SEQ ID NO: 46470 - protein, 10 aa, Homo sapiens
  misc_feature: Table A; Target 46470; HLA-A*30:01; MAGEC2; ENSG00000046774; CTA
YEAEEPVTEA

SEQ ID NO: 46471 - protein, 10 aa, Homo sapiens
  misc_feature: Table A; Target 46471; HLA-B*40:01; MAGEC2; ENSG00000046774; CTA
YEAEEPVTEA

SEQ ID NO: 46472 - protein, 10 aa, Homo sapiens
  misc_feature: Table A; Target 46472; HLA-B*49:01; MAGEC2; ENSG00000046774; CTA
YEAEEPVTEA

SEQ ID NO: 46473 - protein, 8 aa, Homo sapiens
  misc_feature: Table A; Target 46473; HLA-A*33:03; MAGEC2; ENSG00000046774; CTA
YFPVILKR

SEQ ID NO: 46474 - protein, 9 aa, Homo sapiens
  misc_feature: Table A; Target 46474; HLA-A*01:01; MAGEC2; ENSG00000046774; CTA
YLVFSPSSF

SEQ ID NO: 46475 - protein, 9 aa, Homo sapiens
  misc_feature: Table A; Target 46475; HLA-A*02:03; MAGEC2; ENSG00000046774; CTA
YLVFSPSSF

SEQ ID NO: 46476 - protein, 9 aa, Homo sapiens
  misc_feature: Table A; Target 46476; HLA-A*02:07; MAGEC2; ENSG00000046774; CTA
YLVFSPSSF

SEQ ID NO: 46477 - protein, 9 aa, Homo sapiens
  misc_feature: Table A; Target 46477; HLA-A*23:01; MAGEC2; ENSG00000046774; CTA
YLVFSPSSF

SEQ ID NO: 46478 - protein, 9 aa, Homo sapiens
  misc_feature: Table A; Target 46478; HLA-A*24:02; MAGEC2; ENSG00000046774; CTA
YLVFSPSSF

SEQ ID NO: 46479 - protein, 9 aa, Homo sapiens
  misc_feature: Table A; Target 46479; HLA-A*25:01; MAGEC2; ENSG00000046774; CTA
YLVFSPSSF

SEQ ID NO: 46480 - protein, 9 aa, Homo sapiens
  misc_feature: Table A; Target 46480; HLA-A*26:01; MAGEC2; ENSG00000046774; CTA
YLVFSPSSF

SEQ ID NO: 46481 - protein, 9 aa, Homo sapiens
  misc_feature: Table A; Target 46481; HLA-A*29:02; MAGEC2; ENSG00000046774; CTA
YLVFSPSSF

SEQ ID NO: 46482 - protein, 9 aa, Homo sapiens
  misc_feature: Table A; Target 46482; HLA-B*08:01; MAGEC2; ENSG00000046774; CTA
YLVFSPSSF

SEQ ID NO: 46483 - protein, 9 aa, Homo sapiens
  misc_feature: Table A; Target 46483; HLA-B*15:01; MAGEC2; ENSG00000046774; CTA
YLVFSPSSF

SEQ ID NO: 46484 - protein, 9 aa, Homo sapiens
  misc_feature: Table A; Target 46484; HLA-B*15:03; MAGEC2; ENSG00000046774; CTA
YLVFSPSSF

SEQ ID NO: 46485 - protein, 9 aa, Homo sapiens
  misc_feature: Table A; Target 46485; HLA-B*18:01; MAGEC2; ENSG00000046774; CTA
YLVFSPSSF

SEQ ID NO: 46486 - protein, 9 aa, Homo sapiens
  misc_feature: Table A; Target 46486; HLA-B*46:01; MAGEC2; ENSG00000046774; CTA
YLVFSPSSF

SEQ ID NO: 46487 - protein, 9 aa, Homo sapiens
  misc_feature: Table A; Target 46487; HLA-C*01:02; MAGEC2; ENSG00000046774; CTA
YLVFSPSSF

SEQ ID NO: 46488 - protein, 9 aa, Homo sapiens
  misc_feature: Table A; Target 46488; HLA-C*02:02; MAGEC2; ENSG00000046774; CTA
YLVFSPSSF

SEQ ID NO: 46489 - protein, 9 aa, Homo sapiens
  misc_feature: Table A; Target 46489; HLA-C*03:03; MAGEC2; ENSG00000046774; CTA
YLVFSPSSF

SEQ ID NO: 46490 - protein, 9 aa, Homo sapiens
  misc_feature: Table A; Target 46490; HLA-C*03:04; MAGEC2; ENSG00000046774; CTA
YLVFSPSSF

SEQ ID NO: 46491 - protein, 9 aa, Homo sapiens
  misc_feature: Table A; Target 46491; HLA-C*07:04; MAGEC2; ENSG00000046774; CTA
YLVFSPSSF

SEQ ID NO: 46492 - protein, 9 aa, Homo sapiens
  misc_feature: Table A; Target 46492; HLA-C*14:02; MAGEC2; ENSG00000046774; CTA
YLVFSPSSF

SEQ ID NO: 46493 - protein, 10 aa, Homo sapiens
  misc_feature: Table A; Target 46493; HLA-A*01:01; MAGEC2; ENSG00000046774; CTA
YTLDEKVAEL

SEQ ID NO: 46494 - protein, 10 aa, Homo sapiens
  misc_feature: Table A; Target 46494; HLA-A*02:01; MAGEC2; ENSG00000046774; CTA
YTLDEKVAEL

SEQ ID NO: 46495 - protein, 10 aa, Homo sapiens
  misc_feature: Table A; Target 46495; HLA-A*02:03; MAGEC2; ENSG00000046774; CTA
YTLDEKVAEL

SEQ ID NO: 46496 - protein, 10 aa, Homo sapiens
  misc_feature: Table A; Target 46496; HLA-A*02:04; MAGEC2; ENSG00000046774; CTA
YTLDEKVAEL

SEQ ID NO: 46497 - protein, 10 aa, Homo sapiens
  misc_feature: Table A; Target 46497; HLA-A*25:01; MAGEC2; ENSG00000046774; CTA
YTLDEKVAEL

SEQ ID NO: 46498 - protein, 10 aa, Homo sapiens
  misc_feature: Table A; Target 46498; HLA-A*26:01; MAGEC2; ENSG00000046774; CTA
YTLDEKVAEL

SEQ ID NO: 46499 - protein, 10 aa, Homo sapiens
  misc_feature: Table A; Target 46499; HLA-A*68:02; MAGEC2; ENSG00000046774; CTA
YTLDEKVAEL

SEQ ID NO: 46500 - protein, 11 aa, Homo sapiens
  misc_feature: Table A; Target 46500; HLA-B*49:01; MORC1; ENSG00000114487; CTA
AEEAVKIAESI

SEQ ID NO: 46501 - protein, 10 aa, Homo sapiens
  misc_feature: Table A; Target 46501; HLA-B*40:01; MORC1; ENSG00000114487; CTA
AELMQQFDVI

SEQ ID NO: 46502 - protein, 10 aa, Homo sapiens
  misc_feature: Table A; Target 46502; HLA-B*49:01; MORC1; ENSG00000114487; CTA
AELMQQFDVI

SEQ ID NO: 46503 - protein, 9 aa, Homo sapiens
  misc_feature: Table A; Target 46503; HLA-A*30:01; MORC1; ENSG00000114487; CTA
AEQQPQPQF

SEQ ID NO: 46504 - protein, 9 aa, Homo sapiens
  misc_feature: Table A; Target 46504; HLA-B*18:01; MORC1; ENSG00000114487; CTA
AEQQPQPQF

SEQ ID NO: 46505 - protein, 9 aa, Homo sapiens
  misc_feature: Table A; Target 46505; HLA-B*27:02; MORC1; ENSG00000114487; CTA
AEQQPQPQF

SEQ ID NO: 46506 - protein, 9 aa, Homo sapiens
  misc_feature: Table A; Target 46506; HLA-B*37:01; MORC1; ENSG00000114487; CTA
AEQQPQPQF

SEQ ID NO: 46507 - protein, 9 aa, Homo sapiens
  misc_feature: Table A; Target 46507; HLA-B*40:01; MORC1; ENSG00000114487; CTA
AEQQPQPQF

SEQ ID NO: 46508 - protein, 9 aa, Homo sapiens
  misc_feature: Table A; Target 46508; HLA-B*44:02; MORC1; ENSG00000114487; CTA
AEQQPQPQF

SEQ ID NO: 46509 - protein, 9 aa, Homo sapiens
  misc_feature: Table A; Target 46509; HLA-B*49:01; MORC1; ENSG00000114487; CTA
AEQQPQPQF

SEQ ID NO: 46510 - protein, 9 aa, Homo sapiens
  misc_feature: Table A; Target 46510; HLA-C*16:04; MORC1; ENSG00000114487; CTA
AEQQPQPQF

SEQ ID NO: 46511 - protein, 10 aa, Homo sapiens
  misc_feature: Table A; Target 46511; HLA-B*13:02; MORC1; ENSG00000114487; CTA
AEQQPQPQFI

SEQ ID NO: 46512 - protein, 10 aa, Homo sapiens
  misc_feature: Table A; Target 46512; HLA-B*44:02; MORC1; ENSG00000114487; CTA
AEQQPQPQFI

SEQ ID NO: 46513 - protein, 10 aa, Homo sapiens
  misc_feature: Table A; Target 46513; HLA-B*44:03; MORC1; ENSG00000114487; CTA
AEQQPQPQFI

SEQ ID NO: 46514 - protein, 10 aa, Homo sapiens
  misc_feature: Table A; Target 46514; HLA-B*49:01; MORC1; ENSG00000114487; CTA
AEQQPQPQFI

SEQ ID NO: 46515 - protein, 9 aa, Homo sapiens
  misc_feature: Table A; Target 46515; HLA-A*30:01; MORC1; ENSG00000114487; CTA
AERLDVFSV

SEQ ID NO: 46516 - protein, 9 aa, Homo sapiens
  misc_feature: Table A; Target 46516; HLA-B*37:01; MORC1; ENSG00000114487; CTA
AERLDVFSV

SEQ ID NO: 46517 - protein, 9 aa, Homo sapiens
  misc_feature: Table A; Target 46517; HLA-B*40:02; MORC1; ENSG00000114487; CTA
AERLDVFSV

SEQ ID NO: 46518 - protein, 9 aa, Homo sapiens
  misc_feature: Table A; Target 46518; HLA-B*44:02; MORC1; ENSG00000114487; CTA
AERLDVFSV

SEQ ID NO: 46519 - protein, 9 aa, Homo sapiens
  misc_feature: Table A; Target 46519; HLA-B*49:01; MORC1; ENSG00000114487; CTA
AERLDVFSV

SEQ ID NO: 46520 - protein, 9 aa, Homo sapiens
  misc_feature: Table A; Target 46520; HLA-B*49:01; MORC1; ENSG00000114487; CTA
AERSQRSQI

SEQ ID NO: 46521 - protein, 10 aa, Homo sapiens
  misc_feature: Table A; Target 46521; HLA-B*40:01; MORC1; ENSG00000114487; CTA
AESILKEAQI

SEQ ID NO: 46522 - protein, 10 aa, Homo sapiens
  misc_feature: Table A; Target 46522; HLA-B*44:02; MORC1; ENSG00000114487; CTA
AESILKEAQI

SEQ ID NO: 46523 - protein, 10 aa, Homo sapiens
  misc_feature: Table A; Target 46523; HLA-B*44:03; MORC1; ENSG00000114487; CTA
AESILKEAQI

SEQ ID NO: 46524 - protein, 10 aa, Homo sapiens
  misc_feature: Table A; Target 46524; HLA-B*49:01; MORC1; ENSG00000114487; CTA
AESILKEAQI

SEQ ID NO: 46525 - protein, 9 aa, Homo sapiens
  misc_feature: Table A; Target 46525; HLA-A*32:01; MORC1; ENSG00000114487; CTA
AGAERLDVF

SEQ ID NO: 46526 - protein, 9 aa, Homo sapiens
  misc_feature: Table A; Target 46526; HLA-B*15:01; MORC1; ENSG00000114487; CTA
AGAERLDVF

SEQ ID NO: 46527 - protein, 9 aa, Homo sapiens
  misc_feature: Table A; Target 46527; HLA-B*15:03; MORC1; ENSG00000114487; CTA
AGAERLDVF

SEQ ID NO: 46528 - protein, 9 aa, Homo sapiens
  misc_feature: Table A; Target 46528; HLA-B*37:01; MORC1; ENSG00000114487; CTA
AGAERLDVF

SEQ ID NO: 46529 - protein, 9 aa, Homo sapiens
  misc_feature: Table A; Target 46529; HLA-B*46:01; MORC1; ENSG00000114487; CTA
AGAERLDVF

SEQ ID NO: 46530 - protein, 9 aa, Homo sapiens
  misc_feature: Table A; Target 46530; HLA-B*55:01; MORC1; ENSG00000114487; CTA
AGAERLDVF

SEQ ID NO: 46531 - protein, 9 aa, Homo sapiens
  misc_feature: Table A; Target 46531; HLA-C*02:02; MORC1; ENSG00000114487; CTA
AGAERLDVF

SEQ ID NO: 46532 - protein, 9 aa, Homo sapiens
  misc_feature: Table A; Target 46532; HLA-C*16:01; MORC1; ENSG00000114487; CTA
AGAERLDVF

SEQ ID NO: 46533 - protein, 9 aa, Homo sapiens
  misc_feature: Table A; Target 46533; HLA-C*16:02; MORC1; ENSG00000114487; CTA
AGAERLDVF

SEQ ID NO: 46534 - protein, 11 aa, Homo sapiens
  misc_feature: Table A; Target 46534; HLA-B*44:02; MORC1; ENSG00000114487; CTA
AGALEDFPARW

SEQ ID NO: 46535 - protein, 11 aa, Homo sapiens
  misc_feature: Table A; Target 46535; HLA-B*57:01; MORC1; ENSG00000114487; CTA
AGALEDFPARW

SEQ ID NO: 46536 - protein, 10 aa, Homo sapiens
  misc_feature: Table A; Target 46536; HLA-A*11:01; MORC1; ENSG00000114487; CTA
AGMFIYSNNR

SEQ ID NO: 46537 - protein, 9 aa, Homo sapiens
  misc_feature: Table A; Target 46537; HLA-A*02:01; MORC1; ENSG00000114487; CTA
ALAELLDNA

SEQ ID NO: 46538 - protein, 9 aa, Homo sapiens
  misc_feature: Table A; Target 46538; HLA-A*02:03; MORC1; ENSG00000114487; CTA
ALAELLDNA

SEQ ID NO: 46539 - protein, 9 aa, Homo sapiens
  misc_feature: Table A; Target 46539; HLA-A*02:04; MORC1; ENSG00000114487; CTA
ALAELLDNA

SEQ ID NO: 46540 - protein, 9 aa, Homo sapiens
  misc_feature: Table A; Target 46540; HLA-A*02:07; MORC1; ENSG00000114487; CTA
ALAELLDNA

SEQ ID NO: 46541 - protein, 9 aa, Homo sapiens
  misc_feature: Table A; Target 46541; HLA-B*55:01; MORC1; ENSG00000114487; CTA
ALAELLDNA

SEQ ID NO: 46542 - protein, 10 aa, Homo sapiens
  misc_feature: Table A; Target 46542; HLA-B*27:02; MORC1; ENSG00000114487; CTA
ALAELLDNAR

SEQ ID NO: 46543 - protein, 9 aa, Homo sapiens
  misc_feature: Table A; Target 46543; HLA-A*01:01; MORC1; ENSG00000114487; CTA
ALEDFPARW

SEQ ID NO: 46544 - protein, 9 aa, Homo sapiens
  misc_feature: Table A; Target 46544; HLA-A*02:07; MORC1; ENSG00000114487; CTA
ALEDFPARW

SEQ ID NO: 46545 - protein, 9 aa, Homo sapiens
  misc_feature: Table A; Target 46545; HLA-B*44:02; MORC1; ENSG00000114487; CTA
ALEDFPARW

SEQ ID NO: 46546 - protein, 9 aa, Homo sapiens
  misc_feature: Table A; Target 46546; HLA-B*44:03; MORC1; ENSG00000114487; CTA
ALEDFPARW

SEQ ID NO: 46547 - protein, 9 aa, Homo sapiens
  misc_feature: Table A; Target 46547; HLA-B*57:01; MORC1; ENSG00000114487; CTA
ALEDFPARW

SEQ ID NO: 46548 - protein, 11 aa, Homo sapiens
  misc_feature: Table A; Target 46548; HLA-A*02:04; MORC1; ENSG00000114487; CTA
ALEDFPARWSF

SEQ ID NO: 46549 - protein, 10 aa, Homo sapiens
  misc_feature: Table A; Target 46549; HLA-A*03:02; MORC1; ENSG00000114487; CTA
ALEDVEAKQK

SEQ ID NO: 46550 - protein, 9 aa, Homo sapiens
  misc_feature: Table A; Target 46550; HLA-A*02:04; MORC1; ENSG00000114487; CTA
ALLLQKLQL

SEQ ID NO: 46551 - protein, 9 aa, Homo sapiens
  misc_feature: Table A; Target 46551; HLA-A*02:03; MORC1; ENSG00000114487; CTA
ALPENVKLA

SEQ ID NO: 46552 - protein, 9 aa, Homo sapiens
  misc_feature: Table A; Target 46552; HLA-A*02:07; MORC1; ENSG00000114487; CTA
ALPENVKLA

SEQ ID NO: 46553 - protein, 9 aa, Homo sapiens
  misc_feature: Table A; Target 46553; HLA-A*03:01; MORC1; ENSG00000114487; CTA
AMELSIIYK

SEQ ID NO: 46554 - protein, 9 aa, Homo sapiens
  misc_feature: Table A; Target 46554; HLA-A*03:02; MORC1; ENSG00000114487; CTA
AMELSIIYK

SEQ ID NO: 46555 - protein, 9 aa, Homo sapiens
  misc_feature: Table A; Target 46555; HLA-A*11:01; MORC1; ENSG00000114487; CTA
AMELSIIYK

SEQ ID NO: 46556 - protein, 10 aa, Homo sapiens
  misc_feature: Table A; Target 46556; HLA-A*01:01; MORC1; ENSG00000114487; CTA
AMELSIIYKY

SEQ ID NO: 46557 - protein, 10 aa, Homo sapiens
  misc_feature: Table A; Target 46557; HLA-A*29:02; MORC1; ENSG00000114487; CTA
AMELSIIYKY

SEQ ID NO: 46558 - protein, 10 aa, Homo sapiens
  misc_feature: Table A; Target 46558; HLA-A*30:02; MORC1; ENSG00000114487; CTA
AMELSIIYKY

SEQ ID NO: 46559 - protein, 8 aa, Homo sapiens
  misc_feature: Table A; Target 46559; HLA-B*08:01; MORC1; ENSG00000114487; CTA
AMKRSSSL

SEQ ID NO: 46560 - protein, 9 aa, Homo sapiens
  misc_feature: Table A; Target 46560; HLA-C*16:01; MORC1; ENSG00000114487; CTA
ANNPNRLEN

SEQ ID NO: 46561 - protein, 8 aa, Homo sapiens
  misc_feature: Table A; Target 46561; HLA-B*37:01; MORC1; ENSG00000114487; CTA
ANSTTHSF

SEQ ID NO: 46562 - protein, 8 aa, Homo sapiens
  misc_feature: Table A; Target 46562; HLA-B*13:02; MORC1; ENSG00000114487; CTA
AQAASWEM

SEQ ID NO: 46563 - protein, 8 aa, Homo sapiens
  misc_feature: Table A; Target 46563; HLA-B*27:05; MORC1; ENSG00000114487; CTA
AQAASWEM

SEQ ID NO: 46564 - protein, 9 aa, Homo sapiens
  misc_feature: Table A; Target 46564; HLA-A*11:01; MORC1; ENSG00000114487; CTA
AQPTEGCLK

SEQ ID NO: 46565 - protein, 9 aa, Homo sapiens
  misc_feature: Table A; Target 46565; HLA-B*38:01; MORC1; ENSG00000114487; CTA
ARDAGAERL

SEQ ID NO: 46566 - protein, 10 aa, Homo sapiens
  misc_feature: Table A; Target 46566; HLA-B*27:05; MORC1; ENSG00000114487; CTA
ARVSVSGSCK

SEQ ID NO: 46567 - protein, 9 aa, Homo sapiens
  misc_feature: Table A; Target 46567; HLA-A*11:01; MORC1; ENSG00000114487; CTA
ASDIIYFGR

SEQ ID NO: 46568 - protein, 9 aa, Homo sapiens
  misc_feature: Table A; Target 46568; HLA-A*31:01; MORC1; ENSG00000114487; CTA
ASDIIYFGR

SEQ ID NO: 46569 - protein, 9 aa, Homo sapiens
  misc_feature: Table A; Target 46569; HLA-A*03:01; MORC1; ENSG00000114487; CTA
ASSQSTPVK

SEQ ID NO: 46570 - protein, 9 aa, Homo sapiens
  misc_feature: Table A; Target 46570; HLA-A*03:02; MORC1; ENSG00000114487; CTA
ASSQSTPVK

SEQ ID NO: 46571 - protein, 9 aa, Homo sapiens
  misc_feature: Table A; Target 46571; HLA-A*11:01; MORC1; ENSG00000114487; CTA
ASSQSTPVK

SEQ ID NO: 46572 - protein, 9 aa, Homo sapiens
  misc_feature: Table A; Target 46572; HLA-B*07:02; MORC1; ENSG00000114487; CTA
AVKIAESIL

SEQ ID NO: 46573 - protein, 9 aa, Homo sapiens
  misc_feature: Table A; Target 46573; HLA-B*15:01; MORC1; ENSG00000114487; CTA
AVKIAESIL

SEQ ID NO: 46574 - protein, 10 aa, Homo sapiens
  misc_feature: Table A; Target 46574; HLA-A*03:01; MORC1; ENSG00000114487; CTA
AVKIAESILK

SEQ ID NO: 46575 - protein, 10 aa, Homo sapiens
  misc_feature: Table A; Target 46575; HLA-A*03:02; MORC1; ENSG00000114487; CTA
AVKIAESILK

SEQ ID NO: 46576 - protein, 10 aa, Homo sapiens
  misc_feature: Table A; Target 46576; HLA-A*11:01; MORC1; ENSG00000114487; CTA
AVKIAESILK

SEQ ID NO: 46577 - protein, 8 aa, Homo sapiens
  misc_feature: Table A; Target 46577; HLA-A*23:01; MORC1; ENSG00000114487; CTA
AYTSVLYF

SEQ ID NO: 46578 - protein, 8 aa, Homo sapiens
  misc_feature: Table A; Target 46578; HLA-A*24:02; MORC1; ENSG00000114487; CTA
AYTSVLYF

SEQ ID NO: 46579 - protein, 9 aa, Homo sapiens
  misc_feature: Table A; Target 46579; HLA-B*49:01; MORC1; ENSG00000114487; CTA
CEEESLSEV

SEQ ID NO: 46580 - protein, 10 aa, Homo sapiens
  misc_feature: Table A; Target 46580; HLA-B*49:01; MORC1; ENSG00000114487; CTA
CEEESLSEVV

SEQ ID NO: 46581 - protein, 9 aa, Homo sapiens
  misc_feature: Table A; Target 46581; HLA-A*23:01; MORC1; ENSG00000114487; CTA
CFNQIQNTY

SEQ ID NO: 46582 - protein, 9 aa, Homo sapiens
  misc_feature: Table A; Target 46582; HLA-A*24:02; MORC1; ENSG00000114487; CTA
CFNQIQNTY

SEQ ID NO: 46583 - protein, 9 aa, Homo sapiens
  misc_feature: Table A; Target 46583; HLA-A*29:02; MORC1; ENSG00000114487; CTA
CFNQIQNTY

SEQ ID NO: 46584 - protein, 9 aa, Homo sapiens
  misc_feature: Table A; Target 46584; HLA-A*30:02; MORC1; ENSG00000114487; CTA
CFNQIQNTY

SEQ ID NO: 46585 - protein, 9 aa, Homo sapiens
  misc_feature: Table A; Target 46585; HLA-B*15:01; MORC1; ENSG00000114487; CTA
CFNQIQNTY

SEQ ID NO: 46586 - protein, 9 aa, Homo sapiens
  misc_feature: Table A; Target 46586; HLA-B*15:03; MORC1; ENSG00000114487; CTA
CFNQIQNTY

SEQ ID NO: 46587 - protein, 9 aa, Homo sapiens
  misc_feature: Table A; Target 46587; HLA-C*14:02; MORC1; ENSG00000114487; CTA
CFNQIQNTY

SEQ ID NO: 46588 - protein, 10 aa, Homo sapiens
  misc_feature: Table A; Target 46588; HLA-A*25:01; MORC1; ENSG00000114487; CTA
CLKNAQAASW

SEQ ID NO: 46589 - protein, 9 aa, Homo sapiens
  misc_feature: Table A; Target 46589; HLA-B*51:01; MORC1; ENSG00000114487; CTA
DAGAERLDV

SEQ ID NO: 46590 - protein, 8 aa, Homo sapiens
  misc_feature: Table A; Target 46590; HLA-B*08:01; MORC1; ENSG00000114487; CTA
DDLKHESL

SEQ ID NO: 46591 - protein, 8 aa, Homo sapiens
  misc_feature: Table A; Target 46591; HLA-B*18:01; MORC1; ENSG00000114487; CTA
DDLKHESL

SEQ ID NO: 46592 - protein, 8 aa, Homo sapiens
  misc_feature: Table A; Target 46592; HLA-B*37:01; MORC1; ENSG00000114487; CTA
DDLKHESL

SEQ ID NO: 46593 - protein, 8 aa, Homo sapiens
  misc_feature: Table A; Target 46593; HLA-B*40:02; MORC1; ENSG00000114487; CTA
DDLKHESL

SEQ ID NO: 46594 - protein, 8 aa, Homo sapiens
  misc_feature: Table A; Target 46594; HLA-B*08:01; MORC1; ENSG00000114487; CTA
DDPQKFAM

SEQ ID NO: 46595 - protein, 9 aa, Homo sapiens
  misc_feature: Table A; Target 46595; HLA-A*33:01; MORC1; ENSG00000114487; CTA
DDRYPALQR

SEQ ID NO: 46596 - protein, 9 aa, Homo sapiens
  misc_feature: Table A; Target 46596; HLA-A*33:03; MORC1; ENSG00000114487; CTA
DDRYPALQR

SEQ ID NO: 46597 - protein, 9 aa, Homo sapiens
  misc_feature: Table A; Target 46597; HLA-A*68:01; MORC1; ENSG00000114487; CTA
DDRYPALQR

SEQ ID NO: 46598 - protein, 8 aa, Homo sapiens
  misc_feature: Table A; Target 46598; HLA-B*18:01; MORC1; ENSG00000114487; CTA
DEITVTST

SEQ ID NO: 46599 - protein, 9 aa, Homo sapiens
  misc_feature: Table A; Target 46599; HLA-A*30:01; MORC1; ENSG00000114487; CTA
DEITVTSTC

SEQ ID NO: 46600 - protein, 9 aa, Homo sapiens
  misc_feature: Table A; Target 46600; HLA-B*18:01; MORC1; ENSG00000114487; CTA
DEITVTSTC

SEQ ID NO: 46601 - protein, 9 aa, Homo sapiens
  misc_feature: Table A; Target 46601; HLA-B*49:01; MORC1; ENSG00000114487; CTA
DEITVTSTC

SEQ ID NO: 46602 - protein, 10 aa, Homo sapiens
  misc_feature: Table A; Target 46602; HLA-A*30:01; MORC1; ENSG00000114487; CTA
DEITVTSTCL

SEQ ID NO: 46603 - protein, 10 aa, Homo sapiens
  misc_feature: Table A; Target 46603; HLA-B*18:01; MORC1; ENSG00000114487; CTA
DEITVTSTCL

SEQ ID NO: 46604 - protein, 10 aa, Homo sapiens
  misc_feature: Table A; Target 46604; HLA-B*40:01; MORC1; ENSG00000114487; CTA
DEITVTSTCL

SEQ ID NO: 46605 - protein, 9 aa, Homo sapiens
  misc_feature: Table A; Target 46605; HLA-B*18:01; MORC1; ENSG00000114487; CTA
DEVKKAEEA

SEQ ID NO: 46606 - protein, 9 aa, Homo sapiens
  misc_feature: Table A; Target 46606; HLA-B*38:01; MORC1; ENSG00000114487; CTA
DKSNTDVSL

SEQ ID NO: 46607 - protein, 9 aa, Homo sapiens
  misc_feature: Table A; Target 46607; HLA-B*39:01; MORC1; ENSG00000114487; CTA
DKSNTDVSL

SEQ ID NO: 46608 - protein, 10 aa, Homo sapiens
  misc_feature: Table A; Target 46608; HLA-A*25:01; MORC1; ENSG00000114487; CTA
DLKHESLSSF

SEQ ID NO: 46609 - protein, 10 aa, Homo sapiens
  misc_feature: Table A; Target 46609; HLA-A*26:01; MORC1; ENSG00000114487; CTA
DLKHESLSSF

SEQ ID NO: 46610 - protein, 10 aa, Homo sapiens
  misc_feature: Table A; Target 46610; HLA-A*33:01; MORC1; ENSG00000114487; CTA
DNARDAGAER

SEQ ID NO: 46611 - protein, 10 aa, Homo sapiens
  misc_feature: Table A; Target 46611; HLA-A*68:01; MORC1; ENSG00000114487; CTA
DNARDAGAER

SEQ ID NO: 46612 - protein, 9 aa, Homo sapiens
  misc_feature: Table A; Target 46612; HLA-B*07:02; MORC1; ENSG00000114487; CTA
DPQKFAMEL

SEQ ID NO: 46613 - protein, 9 aa, Homo sapiens
  misc_feature: Table A; Target 46613; HLA-B*08:01; MORC1; ENSG00000114487; CTA
DPQKFAMEL

SEQ ID NO: 46614 - protein, 9 aa, Homo sapiens
  misc_feature: Table A; Target 46614; HLA-B*35:01; MORC1; ENSG00000114487; CTA
DPQKFAMEL

SEQ ID NO: 46615 - protein, 9 aa, Homo sapiens
  misc_feature: Table A; Target 46615; HLA-B*35:03; MORC1; ENSG00000114487; CTA
DPQKFAMEL

SEQ ID NO: 46616 - protein, 9 aa, Homo sapiens
  misc_feature: Table A; Target 46616; HLA-B*51:01; MORC1; ENSG00000114487; CTA
DPQKFAMEL

SEQ ID NO: 46617 - protein, 9 aa, Homo sapiens
  misc_feature: Table A; Target 46617; HLA-C*07:02; MORC1; ENSG00000114487; CTA
DPQKFAMEL

SEQ ID NO: 46618 - protein, 10 aa, Homo sapiens
  misc_feature: Table A; Target 46618; HLA-A*01:01; MORC1; ENSG00000114487; CTA
DSDIILVSDK

SEQ ID NO: 46619 - protein, 11 aa, Homo sapiens
  misc_feature: Table A; Target 46619; HLA-A*01:01; MORC1; ENSG00000114487; CTA
DSDVEYISETK

SEQ ID NO: 46620 - protein, 9 aa, Homo sapiens
  misc_feature: Table A; Target 46620; HLA-A*01:01; MORC1; ENSG00000114487; CTA
DTYLEALLK

SEQ ID NO: 46621 - protein, 9 aa, Homo sapiens
  misc_feature: Table A; Target 46621; HLA-A*11:01; MORC1; ENSG00000114487; CTA
DTYLEALLK

SEQ ID NO: 46622 - protein, 9 aa, Homo sapiens
  misc_feature: Table A; Target 46622; HLA-A*25:01; MORC1; ENSG00000114487; CTA
DVEKPLNSF

SEQ ID NO: 46623 - protein, 9 aa, Homo sapiens
  misc_feature: Table A; Target 46623; HLA-A*26:01; MORC1; ENSG00000114487; CTA
DVEKPLNSF

SEQ ID NO: 46624 - protein, 9 aa, Homo sapiens
  misc_feature: Table A; Target 46624; HLA-A*33:01; MORC1; ENSG00000114487; CTA
DVEKPLNSF

SEQ ID NO: 46625 - protein, 9 aa, Homo sapiens
  misc_feature: Table A; Target 46625; HLA-C*05:01; MORC1; ENSG00000114487; CTA
DVEKPLNSF

SEQ ID NO: 46626 - protein, 11 aa, Homo sapiens
  misc_feature: Table A; Target 46626; HLA-A*01:01; MORC1; ENSG00000114487; CTA
DVEKPLNSFQY

SEQ ID NO: 46627 - protein, 11 aa, Homo sapiens
  misc_feature: Table A; Target 46627; HLA-A*26:01; MORC1; ENSG00000114487; CTA
DVEKPLNSFQY

SEQ ID NO: 46628 - protein, 9 aa, Homo sapiens
  misc_feature: Table A; Target 46628; HLA-A*68:01; MORC1; ENSG00000114487; CTA
DVEYISETK

SEQ ID NO: 46629 - protein, 10 aa, Homo sapiens
  misc_feature: Table A; Target 46629; HLA-A*68:02; MORC1; ENSG00000114487; CTA
DVEYISETKI

SEQ ID NO: 46630 - protein, 9 aa, Homo sapiens
  misc_feature: Table A; Target 46630; HLA-A*33:01; MORC1; ENSG00000114487; CTA
DVFSVDNEK

SEQ ID NO: 46631 - protein, 9 aa, Homo sapiens
  misc_feature: Table A; Target 46631; HLA-A*68:01; MORC1; ENSG00000114487; CTA
DVFSVDNEK

SEQ ID NO: 46632 - protein, 9 aa, Homo sapiens
  misc_feature: Table A; Target 46632; HLA-C*07:06; MORC1; ENSG00000114487; CTA
DVFSVDNEK

SEQ ID NO: 46633 - protein, 10 aa, Homo sapiens
  misc_feature: Table A; Target 46633; HLA-A*25:01; MORC1; ENSG00000114487; CTA
DVFSVDNEKL

SEQ ID NO: 46634 - protein, 10 aa, Homo sapiens
  misc_feature: Table A; Target 46634; HLA-A*26:01; MORC1; ENSG00000114487; CTA
DVFSVDNEKL

SEQ ID NO: 46635 - protein, 10 aa, Homo sapiens
  misc_feature: Table A; Target 46635; HLA-A*68:01; MORC1; ENSG00000114487; CTA
DVFSVDNEKL

SEQ ID NO: 46636 - protein, 10 aa, Homo sapiens
  misc_feature: Table A; Target 46636; HLA-A*68:02; MORC1; ENSG00000114487; CTA
DVFSVDNEKL

SEQ ID NO: 46637 - protein, 10 aa, Homo sapiens
  misc_feature: Table A; Target 46637; HLA-B*35:03; MORC1; ENSG00000114487; CTA
DVFSVDNEKL

SEQ ID NO: 46638 - protein, 10 aa, Homo sapiens
  misc_feature: Table A; Target 46638; HLA-A*25:01; MORC1; ENSG00000114487; CTA
DVIYGKCGTL

SEQ ID NO: 46639 - protein, 10 aa, Homo sapiens
  misc_feature: Table A; Target 46639; HLA-A*26:01; MORC1; ENSG00000114487; CTA
DVIYGKCGTL

SEQ ID NO: 46640 - protein, 10 aa, Homo sapiens
  misc_feature: Table A; Target 46640; HLA-A*33:01; MORC1; ENSG00000114487; CTA
DVIYGKCGTL

SEQ ID NO: 46641 - protein, 11 aa, Homo sapiens
  misc_feature: Table A; Target 46641; HLA-A*33:01; MORC1; ENSG00000114487; CTA
DVNLSSGHIAR

SEQ ID NO: 46642 - protein, 11 aa, Homo sapiens
  misc_feature: Table A; Target 46642; HLA-A*33:03; MORC1; ENSG00000114487; CTA
DVNLSSGHIAR

SEQ ID NO: 46643 - protein, 11 aa, Homo sapiens
  misc_feature: Table A; Target 46643; HLA-A*68:01; MORC1; ENSG00000114487; CTA
DVNLSSGHIAR

SEQ ID NO: 46644 - protein, 11 aa, Homo sapiens
  misc_feature: Table A; Target 46644; HLA-C*07:06; MORC1; ENSG00000114487; CTA
DVNLSSGHIAR

SEQ ID NO: 46645 - protein, 9 aa, Homo sapiens
  misc_feature: Table A; Target 46645; HLA-A*68:02; MORC1; ENSG00000114487; CTA
EASDIIYFG

SEQ ID NO: 46646 - protein, 10 aa, Homo sapiens
  misc_feature: Table A; Target 46646; HLA-A*26:01; MORC1; ENSG00000114487; CTA
EASDIIYFGR

SEQ ID NO: 46647 - protein, 10 aa, Homo sapiens
  misc_feature: Table A; Target 46647; HLA-A*33:01; MORC1; ENSG00000114487; CTA
EASDIIYFGR

SEQ ID NO: 46648 - protein, 10 aa, Homo sapiens
  misc_feature: Table A; Target 46648; HLA-A*33:03; MORC1; ENSG00000114487; CTA
EASDIIYFGR

SEQ ID NO: 46649 - protein, 10 aa, Homo sapiens
  misc_feature: Table A; Target 46649; HLA-A*68:02; MORC1; ENSG00000114487; CTA
EASDIIYFGR

SEQ ID NO: 46650 - protein, 10 aa, Homo sapiens
  misc_feature: Table A; Target 46650; HLA-B*27:02; MORC1; ENSG00000114487; CTA
EASDIIYFGR

SEQ ID NO: 46651 - protein, 10 aa, Homo sapiens
  misc_feature: Table A; Target 46651; HLA-C*07:06; MORC1; ENSG00000114487; CTA
EASDIIYFGR

SEQ ID NO: 46652 - protein, 9 aa, Homo sapiens
  misc_feature: Table A; Target 46652; HLA-A*23:01; MORC1; ENSG00000114487; CTA
EAVKIAESI

SEQ ID NO: 46653 - protein, 9 aa, Homo sapiens
  misc_feature: Table A; Target 46653; HLA-A*25:01; MORC1; ENSG00000114487; CTA
EAVKIAESI

SEQ ID NO: 46654 - protein, 9 aa, Homo sapiens
  misc_feature: Table A; Target 46654; HLA-A*26:01; MORC1; ENSG00000114487; CTA
EAVKIAESI

SEQ ID NO: 46655 - protein, 9 aa, Homo sapiens
  misc_feature: Table A; Target 46655; HLA-A*68:01; MORC1; ENSG00000114487; CTA
EAVKIAESI

SEQ ID NO: 46656 - protein, 9 aa, Homo sapiens
  misc_feature: Table A; Target 46656; HLA-A*68:02; MORC1; ENSG00000114487; CTA
EAVKIAESI

SEQ ID NO: 46657 - protein, 9 aa, Homo sapiens
  misc_feature: Table A; Target 46657; HLA-B*35:01; MORC1; ENSG00000114487; CTA
EAVKIAESI

SEQ ID NO: 46658 - protein, 9 aa, Homo sapiens
  misc_feature: Table A; Target 46658; HLA-B*35:03; MORC1; ENSG00000114487; CTA
EAVKIAESI

SEQ ID NO: 46659 - protein, 9 aa, Homo sapiens
  misc_feature: Table A; Target 46659; HLA-B*51:01; MORC1; ENSG00000114487; CTA
EAVKIAESI

SEQ ID NO: 46660 - protein, 9 aa, Homo sapiens
  misc_feature: Table A; Target 46660; HLA-B*58:01; MORC1; ENSG00000114487; CTA
EAVKIAESI

SEQ ID NO: 46661 - protein, 9 aa, Homo sapiens
  misc_feature: Table A; Target 46661; HLA-C*07:06; MORC1; ENSG00000114487; CTA
EAVKIAESI

SEQ ID NO: 46662 - protein, 10 aa, Homo sapiens
  misc_feature: Table A; Target 46662; HLA-B*35:03; MORC1; ENSG00000114487; CTA
EAVKIAESIL

SEQ ID NO: 46663 - protein, 11 aa, Homo sapiens
  misc_feature: Table A; Target 46663; HLA-A*68:01; MORC1; ENSG00000114487; CTA
EAVKIAESILK

SEQ ID NO: 46664 - protein, 9 aa, Homo sapiens
  misc_feature: Table A; Target 46664; HLA-B*18:01; MORC1; ENSG00000114487; CTA
EDFPARWSF

SEQ ID NO: 46665 - protein, 9 aa, Homo sapiens
  misc_feature: Table A; Target 46665; HLA-B*44:02; MORC1; ENSG00000114487; CTA
EDFPARWSF

SEQ ID NO: 46666 - protein, 9 aa, Homo sapiens
  misc_feature: Table A; Target 46666; HLA-B*44:03; MORC1; ENSG00000114487; CTA
EDFPARWSF

SEQ ID NO: 46667 - protein, 9 aa, Homo sapiens
  misc_feature: Table A; Target 46667; HLA-B*40:02; MORC1; ENSG00000114487; CTA
EDILMAGAL

SEQ ID NO: 46668 - protein, 10 aa, Homo sapiens
  misc_feature: Table A; Target 46668; HLA-B*40:02; MORC1; ENSG00000114487; CTA
EDVEAKQKNL

SEQ ID NO: 46669 - protein, 9 aa, Homo sapiens
  misc_feature: Table A; Target 46669; HLA-B*18:01; MORC1; ENSG00000114487; CTA
EEASDIIYF

SEQ ID NO: 46670 - protein, 9 aa, Homo sapiens
  misc_feature: Table A; Target 46670; HLA-B*44:02; MORC1; ENSG00000114487; CTA
EEASDIIYF

SEQ ID NO: 46671 - protein, 9 aa, Homo sapiens
  misc_feature: Table A; Target 46671; HLA-B*44:03; MORC1; ENSG00000114487; CTA
EEASDIIYF

SEQ ID NO: 46672 - protein, 10 aa, Homo sapiens
  misc_feature: Table A; Target 46672; HLA-B*44:02; MORC1; ENSG00000114487; CTA
EEAVKIAESI

SEQ ID NO: 46673 - protein, 10 aa, Homo sapiens
  misc_feature: Table A; Target 46673; HLA-B*44:03; MORC1; ENSG00000114487; CTA
EEAVKIAESI

SEQ ID NO: 46674 - protein, 9 aa, Homo sapiens
  misc_feature: Table A; Target 46674; HLA-B*44:02; MORC1; ENSG00000114487; CTA
EEPALSCEL

SEQ ID NO: 46675 - protein, 9 aa, Homo sapiens
  misc_feature: Table A; Target 46675; HLA-B*44:03; MORC1; ENSG00000114487; CTA
EEPALSCEL

SEQ ID NO: 46676 - protein, 9 aa, Homo sapiens
  misc_feature: Table A; Target 46676; HLA-B*40:01; MORC1; ENSG00000114487; CTA
EESLSEVVV

SEQ ID NO: 46677 - protein, 9 aa, Homo sapiens
  misc_feature: Table A; Target 46677; HLA-B*49:01; MORC1; ENSG00000114487; CTA
EESLSEVVV

SEQ ID NO: 46678 - protein, 9 aa, Homo sapiens
  misc_feature: Table A; Target 46678; HLA-B*18:01; MORC1; ENSG00000114487; CTA
EETDSDVEY

SEQ ID NO: 46679 - protein, 9 aa, Homo sapiens
  misc_feature: Table A; Target 46679; HLA-B*44:02; MORC1; ENSG00000114487; CTA
EETDSDVEY

SEQ ID NO: 46680 - protein, 9 aa, Homo sapiens
  misc_feature: Table A; Target 46680; HLA-B*44:03; MORC1; ENSG00000114487; CTA
EETDSDVEY

SEQ ID NO: 46681 - protein, 8 aa, Homo sapiens
  misc_feature: Table A; Target 46681; HLA-B*18:01; MORC1; ENSG00000114487; CTA
EETMTCVF

SEQ ID NO: 46682 - protein, 8 aa, Homo sapiens
  misc_feature: Table A; Target 46682; HLA-B*37:01; MORC1; ENSG00000114487; CTA
EETMTCVF

SEQ ID NO: 46683 - protein, 9 aa, Homo sapiens
  misc_feature: Table A; Target 46683; HLA-B*18:01; MORC1; ENSG00000114487; CTA
EETMTCVFF

SEQ ID NO: 46684 - protein, 9 aa, Homo sapiens
  misc_feature: Table A; Target 46684; HLA-B*44:02; MORC1; ENSG00000114487; CTA
EETMTCVFF

SEQ ID NO: 46685 - protein, 9 aa, Homo sapiens
  misc_feature: Table A; Target 46685; HLA-B*44:03; MORC1; ENSG00000114487; CTA
EETMTCVFF

SEQ ID NO: 46686 - protein, 8 aa, Homo sapiens
  misc_feature: Table A; Target 46686; HLA-C*14:02; MORC1; ENSG00000114487; CTA
EFLNVQEY

SEQ ID NO: 46687 - protein, 10 aa, Homo sapiens
  misc_feature: Table A; Target 46687; HLA-A*01:01; MORC1; ENSG00000114487; CTA
EGDLEQTDTY

SEQ ID NO: 46688 - protein, 9 aa, Homo sapiens
  misc_feature: Table A; Target 46688; HLA-A*26:01; MORC1; ENSG00000114487; CTA
ELCNDVLAM

SEQ ID NO: 46689 - protein, 11 aa, Homo sapiens
  misc_feature: Table A; Target 46689; HLA-A*68:01; MORC1; ENSG00000114487; CTA
ELCNDVLAMKR

SEQ ID NO: 46690 - protein, 8 aa, Homo sapiens
  misc_feature: Table A; Target 46690; HLA-B*08:01; MORC1; ENSG00000114487; CTA
ELKTARTL

SEQ ID NO: 46691 - protein, 10 aa, Homo sapiens
  misc_feature: Table A; Target 46691; HLA-B*08:01; MORC1; ENSG00000114487; CTA
ELKTARTLSL

SEQ ID NO: 46692 - protein, 9 aa, Homo sapiens
  misc_feature: Table A; Target 46692; HLA-A*24:02; MORC1; ENSG00000114487; CTA
ELMQQFDVI

SEQ ID NO: 46693 - protein, 9 aa, Homo sapiens
  misc_feature: Table A; Target 46693; HLA-A*25:01; MORC1; ENSG00000114487; CTA
ELMQQFDVI

SEQ ID NO: 46694 - protein, 8 aa, Homo sapiens
  misc_feature: Table A; Target 46694; HLA-B*18:01; MORC1; ENSG00000114487; CTA
ELSIIYKY

SEQ ID NO: 46695 - protein, 8 aa, Homo sapiens
  misc_feature: Table A; Target 46695; HLA-C*07:01; MORC1; ENSG00000114487; CTA
ELSIIYKY

SEQ ID NO: 46696 - protein, 8 aa, Homo sapiens
  misc_feature: Table A; Target 46696; HLA-B*08:01; MORC1; ENSG00000114487; CTA
EMKRKQSL

SEQ ID NO: 46697 - protein, 8 aa, Homo sapiens
  misc_feature: Table A; Target 46697; HLA-A*33:01; MORC1; ENSG00000114487; CTA
ENVKLAER

SEQ ID NO: 46698 - protein, 8 aa, Homo sapiens
  misc_feature: Table A; Target 46698; HLA-A*33:03; MORC1; ENSG00000114487; CTA
ENVKLAER

SEQ ID NO: 46699 - protein, 9 aa, Homo sapiens
  misc_feature: Table A; Target 46699; HLA-B*08:01; MORC1; ENSG00000114487; CTA
EQMNKKLKM

SEQ ID NO: 46700 - protein, 9 aa, Homo sapiens
  misc_feature: Table A; Target 46700; HLA-B*13:02; MORC1; ENSG00000114487; CTA
EQQPQPQFI

SEQ ID NO: 46701 - protein, 9 aa, Homo sapiens
  misc_feature: Table A; Target 46701; HLA-B*38:01; MORC1; ENSG00000114487; CTA
EQQPQPQFI

SEQ ID NO: 46702 - protein, 10 aa, Homo sapiens
  misc_feature: Table A; Target 46702; HLA-B*39:01; MORC1; ENSG00000114487; CTA
EQTDTYLEAL

SEQ ID NO: 46703 - protein, 10 aa, Homo sapiens
  misc_feature: Table A; Target 46703; HLA-A*33:03; MORC1; ENSG00000114487; CTA
ESLSEVVVPM

SEQ ID NO: 46704 - protein, 10 aa, Homo sapiens
  misc_feature: Table A; Target 46704; HLA-C*07:06; MORC1; ENSG00000114487; CTA
ESLSEVVVPM

SEQ ID NO: 46705 - protein, 9 aa, Homo sapiens
  misc_feature: Table A; Target 46705; HLA-A*33:01; MORC1; ENSG00000114487; CTA
ESVIKYQNR

SEQ ID NO: 46706 - protein, 9 aa, Homo sapiens
  misc_feature: Table A; Target 46706; HLA-A*33:03; MORC1; ENSG00000114487; CTA
ESVIKYQNR

SEQ ID NO: 46707 - protein, 9 aa, Homo sapiens
  misc_feature: Table A; Target 46707; HLA-A*68:01; MORC1; ENSG00000114487; CTA
ESVIKYQNR

SEQ ID NO: 46708 - protein, 9 aa, Homo sapiens
  misc_feature: Table A; Target 46708; HLA-C*07:06; MORC1; ENSG00000114487; CTA
ESVIKYQNR

SEQ ID NO: 46709 - protein, 9 aa, Homo sapiens
  misc_feature: Table A; Target 46709; HLA-A*68:01; MORC1; ENSG00000114487; CTA
ESVTDDPQK

SEQ ID NO: 46710 - protein, 10 aa, Homo sapiens
  misc_feature: Table A; Target 46710; HLA-A*25:01; MORC1; ENSG00000114487; CTA
ESVTDDPQKF

SEQ ID NO: 46711 - protein, 10 aa, Homo sapiens
  misc_feature: Table A; Target 46711; HLA-A*26:01; MORC1; ENSG00000114487; CTA
ESVTDDPQKF

SEQ ID NO: 46712 - protein, 10 aa, Homo sapiens
  misc_feature: Table A; Target 46712; HLA-A*68:01; MORC1; ENSG00000114487; CTA
ESVTDDPQKF

SEQ ID NO: 46713 - protein, 10 aa, Homo sapiens
  misc_feature: Table A; Target 46713; HLA-C*07:06; MORC1; ENSG00000114487; CTA
ESVTDDPQKF

SEQ ID NO: 46714 - protein, 8 aa, Homo sapiens
  misc_feature: Table A; Target 46714; HLA-A*01:01; MORC1; ENSG00000114487; CTA
ETDSDVEY

SEQ ID NO: 46715 - protein, 8 aa, Homo sapiens
  misc_feature: Table A; Target 46715; HLA-C*05:01; MORC1; ENSG00000114487; CTA
ETDSDVEY

SEQ ID NO: 46716 - protein, 9 aa, Homo sapiens
  misc_feature: Table A; Target 46716; HLA-C*05:01; MORC1; ENSG00000114487; CTA
ETDSDVEYI

SEQ ID NO: 46717 - protein, 9 aa, Homo sapiens
  misc_feature: Table A; Target 46717; HLA-A*26:01; MORC1; ENSG00000114487; CTA
EVKKAEEAV

SEQ ID NO: 46718 - protein, 10 aa, Homo sapiens
  misc_feature: Table A; Target 46718; HLA-A*33:03; MORC1; ENSG00000114487; CTA
EVKKAEEAVK

SEQ ID NO: 46719 - protein, 9 aa, Homo sapiens
  misc_feature: Table A; Target 46719; HLA-A*03:01; MORC1; ENSG00000114487; CTA
EVMEPSHNK

SEQ ID NO: 46720 - protein, 9 aa, Homo sapiens
  misc_feature: Table A; Target 46720; HLA-A*03:02; MORC1; ENSG00000114487; CTA
EVMEPSHNK

SEQ ID NO: 46721 - protein, 9 aa, Homo sapiens
  misc_feature: Table A; Target 46721; HLA-A*11:01; MORC1; ENSG00000114487; CTA
EVMEPSHNK

SEQ ID NO: 46722 - protein, 9 aa, Homo sapiens
  misc_feature: Table A; Target 46722; HLA-A*25:01; MORC1; ENSG00000114487; CTA
EVMEPSHNK

SEQ ID NO: 46723 - protein, 9 aa, Homo sapiens
  misc_feature: Table A; Target 46723; HLA-A*33:01; MORC1; ENSG00000114487; CTA
EVMEPSHNK

SEQ ID NO: 46724 - protein, 9 aa, Homo sapiens
  misc_feature: Table A; Target 46724; HLA-A*33:03; MORC1; ENSG00000114487; CTA
EVMEPSHNK

SEQ ID NO: 46725 - protein, 9 aa, Homo sapiens
  misc_feature: Table A; Target 46725; HLA-A*68:01; MORC1; ENSG00000114487; CTA
EVMEPSHNK

SEQ ID NO: 46726 - protein, 9 aa, Homo sapiens
  misc_feature: Table A; Target 46726; HLA-C*07:06; MORC1; ENSG00000114487; CTA
EVMEPSHNK

SEQ ID NO: 46727 - protein, 9 aa, Homo sapiens
  misc_feature: Table A; Target 46727; HLA-A*25:01; MORC1; ENSG00000114487; CTA
EVVVPMPSW

SEQ ID NO: 46728 - protein, 9 aa, Homo sapiens
  misc_feature: Table A; Target 46728; HLA-A*26:01; MORC1; ENSG00000114487; CTA
EVVVPMPSW

SEQ ID NO: 46729 - protein, 9 aa, Homo sapiens
  misc_feature: Table A; Target 46729; HLA-B*44:02; MORC1; ENSG00000114487; CTA
EVVVPMPSW

SEQ ID NO: 46730 - protein, 9 aa, Homo sapiens
  misc_feature: Table A; Target 46730; HLA-B*44:03; MORC1; ENSG00000114487; CTA
EVVVPMPSW

SEQ ID NO: 46731 - protein, 9 aa, Homo sapiens
  misc_feature: Table A; Target 46731; HLA-B*57:01; MORC1; ENSG00000114487; CTA
EVVVPMPSW

SEQ ID NO: 46732 - protein, 9 aa, Homo sapiens
  misc_feature: Table A; Target 46732; HLA-B*58:01; MORC1; ENSG00000114487; CTA
EVVVPMPSW

SEQ ID NO: 46733 - protein, 8 aa, Homo sapiens
  misc_feature: Table A; Target 46733; HLA-A*23:01; MORC1; ENSG00000114487; CTA
EYISETKI

SEQ ID NO: 46734 - protein, 9 aa, Homo sapiens
  misc_feature: Table A; Target 46734; HLA-A*23:01; MORC1; ENSG00000114487; CTA
EYISETKIM

SEQ ID NO: 46735 - protein, 9 aa, Homo sapiens
  misc_feature: Table A; Target 46735; HLA-A*24:02; MORC1; ENSG00000114487; CTA
EYISETKIM

SEQ ID NO: 46736 - protein, 9 aa, Homo sapiens
  misc_feature: Table A; Target 46736; HLA-C*14:02; MORC1; ENSG00000114487; CTA
EYISETKIM

SEQ ID NO: 46737 - protein, 10 aa, Homo sapiens
  misc_feature: Table A; Target 46737; HLA-A*33:01; MORC1; ENSG00000114487; CTA
EYISETKIMK

SEQ ID NO: 46738 - protein, 10 aa, Homo sapiens
  misc_feature: Table A; Target 46738; HLA-A*33:03; MORC1; ENSG00000114487; CTA
EYISETKIMK

SEQ ID NO: 46739 - protein, 11 aa, Homo sapiens
  misc_feature: Table A; Target 46739; HLA-A*24:02; MORC1; ENSG00000114487; CTA
EYISETKIMKK

SEQ ID NO: 46740 - protein, 11 aa, Homo sapiens
  misc_feature: Table A; Target 46740; HLA-A*33:01; MORC1; ENSG00000114487; CTA
EYISETKIMKK

SEQ ID NO: 46741 - protein, 11 aa, Homo sapiens
  misc_feature: Table A; Target 46741; HLA-A*33:03; MORC1; ENSG00000114487; CTA
EYISETKIMKK

SEQ ID NO: 46742 - protein, 11 aa, Homo sapiens
  misc_feature: Table A; Target 46742; HLA-A*68:01; MORC1; ENSG00000114487; CTA
EYISETKIMKK

SEQ ID NO: 46743 - protein, 9 aa, Homo sapiens
  misc_feature: Table A; Target 46743; HLA-A*29:02; MORC1; ENSG00000114487; CTA
FAMELSIIY

SEQ ID NO: 46744 - protein, 9 aa, Homo sapiens
  misc_feature: Table A; Target 46744; HLA-B*35:01; MORC1; ENSG00000114487; CTA
FAMELSIIY

SEQ ID NO: 46745 - protein, 9 aa, Homo sapiens
  misc_feature: Table A; Target 46745; HLA-B*46:01; MORC1; ENSG00000114487; CTA
FAMELSIIY

SEQ ID NO: 46746 - protein, 9 aa, Homo sapiens
  misc_feature: Table A; Target 46746; HLA-C*02:02; MORC1; ENSG00000114487; CTA
FAMELSIIY

SEQ ID NO: 46747 - protein, 9 aa, Homo sapiens
  misc_feature: Table A; Target 46747; HLA-C*12:03; MORC1; ENSG00000114487; CTA
FAMELSIIY

SEQ ID NO: 46748 - protein, 9 aa, Homo sapiens
  misc_feature: Table A; Target 46748; HLA-C*16:04; MORC1; ENSG00000114487; CTA
FAMELSIIY

SEQ ID NO: 46749 - protein, 10 aa, Homo sapiens
  misc_feature: Table A; Target 46749; HLA-A*11:01; MORC1; ENSG00000114487; CTA
FAMELSIIYK

SEQ ID NO: 46750 - protein, 10 aa, Homo sapiens
  misc_feature: Table A; Target 46750; HLA-B*27:02; MORC1; ENSG00000114487; CTA
FAMELSIIYK

SEQ ID NO: 46751 - protein, 11 aa, Homo sapiens
  misc_feature: Table A; Target 46751; HLA-B*27:02; MORC1; ENSG00000114487; CTA
FGYQNDIDVEK

SEQ ID NO: 46752 - protein, 9 aa, Homo sapiens
  misc_feature: Table A; Target 46752; HLA-B*27:05; MORC1; ENSG00000114487; CTA
FIGQYGNGL

SEQ ID NO: 46753 - protein, 9 aa, Homo sapiens
  misc_feature: Table A; Target 46753; HLA-C*01:02; MORC1; ENSG00000114487; CTA
FIGQYGNGL

SEQ ID NO: 46754 - protein, 9 aa, Homo sapiens
  misc_feature: Table A; Target 46754; HLA-C*07:04; MORC1; ENSG00000114487; CTA
FIGQYGNGL

SEQ ID NO: 46755 - protein, 9 aa, Homo sapiens
  misc_feature: Table A; Target 46755; HLA-C*14:02; MORC1; ENSG00000114487; CTA
FIGQYGNGL

SEQ ID NO: 46756 - protein, 9 aa, Homo sapiens
  misc_feature: Table A; Target 46756; HLA-A*32:01; MORC1; ENSG00000114487; CTA
FIHANSTTH

SEQ ID NO: 46757 - protein, 9 aa, Homo sapiens
  misc_feature: Table A; Target 46757; HLA-B*15:03; MORC1; ENSG00000114487; CTA
FIHANSTTH

SEQ ID NO: 46758 - protein, 9 aa, Homo sapiens
  misc_feature: Table A; Target 46758; HLA-B*46:01; MORC1; ENSG00000114487; CTA
FIHANSTTH

SEQ ID NO: 46759 - protein, 9 aa, Homo sapiens
  misc_feature: Table A; Target 46759; HLA-C*02:02; MORC1; ENSG00000114487; CTA
FIHANSTTH

SEQ ID NO: 46760 - protein, 9 aa, Homo sapiens
  misc_feature: Table A; Target 46760; HLA-C*07:04; MORC1; ENSG00000114487; CTA
FIHANSTTH

SEQ ID NO: 46761 - protein, 9 aa, Homo sapiens
  misc_feature: Table A; Target 46761; HLA-A*02:07; MORC1; ENSG00000114487; CTA
FIPVDEITV

SEQ ID NO: 46762 - protein, 9 aa, Homo sapiens
  misc_feature: Table A; Target 46762; HLA-A*02:03; MORC1; ENSG00000114487; CTA
FIYSNNRLI

SEQ ID NO: 46763 - protein, 8 aa, Homo sapiens
  misc_feature: Table A; Target 46763; HLA-C*05:01; MORC1; ENSG00000114487; CTA
FLDDGCGM

SEQ ID NO: 46764 - protein, 10 aa, Homo sapiens
  misc_feature: Table A; Target 46764; HLA-A*01:01; MORC1; ENSG00000114487; CTA
FLDDGCGMSP

SEQ ID NO: 46765 - protein, 9 aa, Homo sapiens
  misc_feature: Table A; Target 46765; HLA-A*02:01; MORC1; ENSG00000114487; CTA
FLFGALAEL

SEQ ID NO: 46766 - protein, 9 aa, Homo sapiens
  misc_feature: Table A; Target 46766; HLA-A*02:03; MORC1; ENSG00000114487; CTA
FLFGALAEL

SEQ ID NO: 46767 - protein, 9 aa, Homo sapiens
  misc_feature: Table A; Target 46767; HLA-A*02:04; MORC1; ENSG00000114487; CTA
FLFGALAEL

SEQ ID NO: 46768 - protein, 9 aa, Homo sapiens
  misc_feature: Table A; Target 46768; HLA-A*02:07; MORC1; ENSG00000114487; CTA
FLFGALAEL

SEQ ID NO: 46769 - protein, 9 aa, Homo sapiens
  misc_feature: Table A; Target 46769; HLA-B*46:01; MORC1; ENSG00000114487; CTA
FLFGALAEL

SEQ ID NO: 46770 - protein, 10 aa, Homo sapiens
  misc_feature: Table A; Target 46770; HLA-A*02:03; MORC1; ENSG00000114487; CTA
FLFGALAELL

SEQ ID NO: 46771 - protein, 10 aa, Homo sapiens
  misc_feature: Table A; Target 46771; HLA-A*02:04; MORC1; ENSG00000114487; CTA
FLFGALAELL

SEQ ID NO: 46772 - protein, 8 aa, Homo sapiens
  misc_feature: Table A; Target 46772; HLA-C*14:02; MORC1; ENSG00000114487; CTA
FNQIQNTY

SEQ ID NO: 46773 - protein, 9 aa, Homo sapiens
  misc_feature: Table A; Target 46773; HLA-C*04:01; MORC1; ENSG00000114487; CTA
FNQIQNTYM

SEQ ID NO: 46774 - protein, 9 aa, Homo sapiens
  misc_feature: Table A; Target 46774; HLA-C*14:02; MORC1; ENSG00000114487; CTA
FNQIQNTYM

SEQ ID NO: 46775 - protein, 10 aa, Homo sapiens
  misc_feature: Table A; Target 46775; HLA-B*35:01; MORC1; ENSG00000114487; CTA
FPEHQLPSEL

SEQ ID NO: 46776 - protein, 10 aa, Homo sapiens
  misc_feature: Table A; Target 46776; HLA-B*35:03; MORC1; ENSG00000114487; CTA
FPEHQLPSEL

SEQ ID NO: 46777 - protein, 10 aa, Homo sapiens
  misc_feature: Table A; Target 46777; HLA-A*32:01; MORC1; ENSG00000114487; CTA
FQNNLNKVTI

SEQ ID NO: 46778 - protein, 10 aa, Homo sapiens
  misc_feature: Table A; Target 46778; HLA-B*13:02; MORC1; ENSG00000114487; CTA
FQNNLNKVTI

SEQ ID NO: 46779 - protein, 10 aa, Homo sapiens
  misc_feature: Table A; Target 46779; HLA-B*38:01; MORC1; ENSG00000114487; CTA
FQNNLNKVTI

SEQ ID NO: 46780 - protein, 9 aa, Homo sapiens
  misc_feature: Table A; Target 46780; HLA-B*08:01; MORC1; ENSG00000114487; CTA
FQYQRRQAM

SEQ ID NO: 46781 - protein, 8 aa, Homo sapiens
  misc_feature: Table A; Target 46781; HLA-C*03:04; MORC1; ENSG00000114487; CTA
FSVDNEKL

SEQ ID NO: 46782 - protein, 9 aa, Homo sapiens
  misc_feature: Table A; Target 46782; HLA-A*31:01; MORC1; ENSG00000114487; CTA
FYGVNVENR

SEQ ID NO: 46783 - protein, 9 aa, Homo sapiens
  misc_feature: Table A; Target 46783; HLA-A*33:01; MORC1; ENSG00000114487; CTA
FYGVNVENR

SEQ ID NO: 46784 - protein, 9 aa, Homo sapiens
  misc_feature: Table A; Target 46784; HLA-A*33:03; MORC1; ENSG00000114487; CTA
FYGVNVENR

SEQ ID NO: 46785 - protein, 9 aa, Homo sapiens
  misc_feature: Table A; Target 46785; HLA-A*03:01; MORC1; ENSG00000114487; CTA
GAFKDEVKK

SEQ ID NO: 46786 - protein, 9 aa, Homo sapiens
  misc_feature: Table A; Target 46786; HLA-A*03:02; MORC1; ENSG00000114487; CTA
GAFKDEVKK

SEQ ID NO: 46787 - protein, 9 aa, Homo sapiens
  misc_feature: Table A; Target 46787; HLA-A*11:01; MORC1; ENSG00000114487; CTA
GAFKDEVKK

SEQ ID NO: 46788 - protein, 9 aa, Homo sapiens
  misc_feature: Table A; Target 46788; HLA-B*57:01; MORC1; ENSG00000114487; CTA
GAFKDEVKK

SEQ ID NO: 46789 - protein, 9 aa, Homo sapiens
  misc_feature: Table A; Target 46789; HLA-C*07:06; MORC1; ENSG00000114487; CTA
GAFKDEVKK

SEQ ID NO: 46790 - protein, 8 aa, Homo sapiens
  misc_feature: Table A; Target 46790; HLA-C*12:03; MORC1; ENSG00000114487; CTA
GAGVVGIV

SEQ ID NO: 46791 - protein, 9 aa, Homo sapiens
  misc_feature: Table A; Target 46791; HLA-A*11:01; MORC1; ENSG00000114487; CTA
GALEDFPAR

SEQ ID NO: 46792 - protein, 9 aa, Homo sapiens
  misc_feature: Table A; Target 46792; HLA-A*31:01; MORC1; ENSG00000114487; CTA
GALEDFPAR

SEQ ID NO: 46793 - protein, 9 aa, Homo sapiens
  misc_feature: Table A; Target 46793; HLA-C*07:06; MORC1; ENSG00000114487; CTA
GALEDFPAR

SEQ ID NO: 46794 - protein, 10 aa, Homo sapiens
  misc_feature: Table A; Target 46794; HLA-B*44:02; MORC1; ENSG00000114487; CTA
GALEDFPARW

SEQ ID NO: 46795 - protein, 10 aa, Homo sapiens
  misc_feature: Table A; Target 46795; HLA-B*44:03; MORC1; ENSG00000114487; CTA
GALEDFPARW

SEQ ID NO: 46796 - protein, 10 aa, Homo sapiens
  misc_feature: Table A; Target 46796; HLA-B*57:01; MORC1; ENSG00000114487; CTA
GALEDFPARW

SEQ ID NO: 46797 - protein, 9 aa, Homo sapiens
  misc_feature: Table A; Target 46797; HLA-A*30:01; MORC1; ENSG00000114487; CTA
GDDLKHESL

SEQ ID NO: 46798 - protein, 9 aa, Homo sapiens
  misc_feature: Table A; Target 46798; HLA-B*37:01; MORC1; ENSG00000114487; CTA
GDDLKHESL

SEQ ID NO: 46799 - protein, 9 aa, Homo sapiens
  misc_feature: Table A; Target 46799; HLA-B*40:01; MORC1; ENSG00000114487; CTA
GDDLKHESL

SEQ ID NO: 46800 - protein, 9 aa, Homo sapiens
  misc_feature: Table A; Target 46800; HLA-B*40:02; MORC1; ENSG00000114487; CTA
GDDLKHESL

SEQ ID NO: 46801 - protein, 9 aa, Homo sapiens
  misc_feature: Table A; Target 46801; HLA-A*32:01; MORC1; ENSG00000114487; CTA
GINNRNLTL

SEQ ID NO: 46802 - protein, 9 aa, Homo sapiens
  misc_feature: Table A; Target 46802; HLA-B*07:02; MORC1; ENSG00000114487; CTA
GINNRNLTL

SEQ ID NO: 46803 - protein, 9 aa, Homo sapiens
  misc_feature: Table A; Target 46803; HLA-B*08:01; MORC1; ENSG00000114487; CTA
GINNRNLTL

SEQ ID NO: 46804 - protein, 9 aa, Homo sapiens
  misc_feature: Table A; Target 46804; HLA-B*37:01; MORC1; ENSG00000114487; CTA
GINNRNLTL

SEQ ID NO: 46805 - protein, 9 aa, Homo sapiens
  misc_feature: Table A; Target 46805; HLA-C*07:02; MORC1; ENSG00000114487; CTA
GINNRNLTL

SEQ ID NO: 46806 - protein, 9 aa, Homo sapiens
  misc_feature: Table A; Target 46806; HLA-C*16:01; MORC1; ENSG00000114487; CTA
GINNRNLTL

SEQ ID NO: 46807 - protein, 9 aa, Homo sapiens
  misc_feature: Table A; Target 46807; HLA-A*02:01; MORC1; ENSG00000114487; CTA
GIVNIPLEV

SEQ ID NO: 46808 - protein, 9 aa, Homo sapiens
  misc_feature: Table A; Target 46808; HLA-A*02:03; MORC1; ENSG00000114487; CTA
GIVNIPLEV

SEQ ID NO: 46809 - protein, 9 aa, Homo sapiens
  misc_feature: Table A; Target 46809; HLA-A*02:04; MORC1; ENSG00000114487; CTA
GIVNIPLEV

SEQ ID NO: 46810 - protein, 9 aa, Homo sapiens
  misc_feature: Table A; Target 46810; HLA-A*30:01; MORC1; ENSG00000114487; CTA
GIVNIPLEV

SEQ ID NO: 46811 - protein, 9 aa, Homo sapiens
  misc_feature: Table A; Target 46811; HLA-B*13:02; MORC1; ENSG00000114487; CTA
GIVNIPLEV

SEQ ID NO: 46812 - protein, 9 aa, Homo sapiens
  misc_feature: Table A; Target 46812; HLA-C*02:02; MORC1; ENSG00000114487; CTA
GIVNIPLEV

SEQ ID NO: 46813 - protein, 9 aa, Homo sapiens
  misc_feature: Table A; Target 46813; HLA-A*02:03; MORC1; ENSG00000114487; CTA
GLKSGSMRI

SEQ ID NO: 46814 - protein, 9 aa, Homo sapiens
  misc_feature: Table A; Target 46814; HLA-A*31:01; MORC1; ENSG00000114487; CTA
GMFIYSNNR

SEQ ID NO: 46815 - protein, 9 aa, Homo sapiens
  misc_feature: Table A; Target 46815; HLA-B*13:02; MORC1; ENSG00000114487; CTA
GQYGNGLKS

SEQ ID NO: 46816 - protein, 9 aa, Homo sapiens
  misc_feature: Table A; Target 46816; HLA-B*27:05; MORC1; ENSG00000114487; CTA
GQYGNGLKS

SEQ ID NO: 46817 - protein, 11 aa, Homo sapiens
  misc_feature: Table A; Target 46817; HLA-B*27:05; MORC1; ENSG00000114487; CTA
GQYGNGLKSGS

SEQ ID NO: 46818 - protein, 8 aa, Homo sapiens
  misc_feature: Table A; Target 46818; HLA-B*13:02; MORC1; ENSG00000114487; CTA
GQYLVQYC

SEQ ID NO: 46819 - protein, 9 aa, Homo sapiens
  misc_feature: Table A; Target 46819; HLA-A*02:04; MORC1; ENSG00000114487; CTA
GTLLVIYNL

SEQ ID NO: 46820 - protein, 10 aa, Homo sapiens
  misc_feature: Table A; Target 46820; HLA-A*03:01; MORC1; ENSG00000114487; CTA
GTLLVIYNLK

SEQ ID NO: 46821 - protein, 10 aa, Homo sapiens
  misc_feature: Table A; Target 46821; HLA-A*11:01; MORC1; ENSG00000114487; CTA
GTLLVIYNLK

SEQ ID NO: 46822 - protein, 10 aa, Homo sapiens
  misc_feature: Table A; Target 46822; HLA-A*03:01; MORC1; ENSG00000114487; CTA
GTMSTISPSK

SEQ ID NO: 46823 - protein, 10 aa, Homo sapiens
  misc_feature: Table A; Target 46823; HLA-A*03:02; MORC1; ENSG00000114487; CTA
GTMSTISPSK

SEQ ID NO: 46824 - protein, 10 aa, Homo sapiens
  misc_feature: Table A; Target 46824; HLA-A*11:01; MORC1; ENSG00000114487; CTA
GTMSTISPSK

SEQ ID NO: 46825 - protein, 10 aa, Homo sapiens
  misc_feature: Table A; Target 46825; HLA-B*27:02; MORC1; ENSG00000114487; CTA
GTMSTISPSK

SEQ ID NO: 46826 - protein, 10 aa, Homo sapiens
  misc_feature: Table A; Target 46826; HLA-B*27:02; MORC1; ENSG00000114487; CTA
GYQNDIDVEK

SEQ ID NO: 46827 - protein, 9 aa, Homo sapiens
  misc_feature: Table A; Target 46827; HLA-A*23:01; MORC1; ENSG00000114487; CTA
HANSTTHSF

SEQ ID NO: 46828 - protein, 9 aa, Homo sapiens
  misc_feature: Table A; Target 46828; HLA-A*25:01; MORC1; ENSG00000114487; CTA
HANSTTHSF

SEQ ID NO: 46829 - protein, 9 aa, Homo sapiens
  misc_feature: Table A; Target 46829; HLA-A*26:01; MORC1; ENSG00000114487; CTA
HANSTTHSF

SEQ ID NO: 46830 - protein, 9 aa, Homo sapiens
  misc_feature: Table A; Target 46830; HLA-A*30:02; MORC1; ENSG00000114487; CTA
HANSTTHSF

SEQ ID NO: 46831 - protein, 9 aa, Homo sapiens
  misc_feature: Table A; Target 46831; HLA-A*32:01; MORC1; ENSG00000114487; CTA
HANSTTHSF

SEQ ID NO: 46832 - protein, 9 aa, Homo sapiens
  misc_feature: Table A; Target 46832; HLA-A*33:01; MORC1; ENSG00000114487; CTA
HANSTTHSF

SEQ ID NO: 46833 - protein, 9 aa, Homo sapiens
  misc_feature: Table A; Target 46833; HLA-B*08:01; MORC1; ENSG00000114487; CTA
HANSTTHSF

SEQ ID NO: 46834 - protein, 9 aa, Homo sapiens
  misc_feature: Table A; Target 46834; HLA-B*15:01; MORC1; ENSG00000114487; CTA
HANSTTHSF

SEQ ID NO: 46835 - protein, 9 aa, Homo sapiens
  misc_feature: Table A; Target 46835; HLA-B*15:03; MORC1; ENSG00000114487; CTA
HANSTTHSF

SEQ ID NO: 46836 - protein, 9 aa, Homo sapiens
  misc_feature: Table A; Target 46836; HLA-B*35:01; MORC1; ENSG00000114487; CTA
HANSTTHSF

SEQ ID NO: 46837 - protein, 9 aa, Homo sapiens
  misc_feature: Table A; Target 46837; HLA-B*35:03; MORC1; ENSG00000114487; CTA
HANSTTHSF

SEQ ID NO: 46838 - protein, 9 aa, Homo sapiens
  misc_feature: Table A; Target 46838; HLA-B*37:01; MORC1; ENSG00000114487; CTA
HANSTTHSF

SEQ ID NO: 46839 - protein, 9 aa, Homo sapiens
  misc_feature: Table A; Target 46839; HLA-B*38:01; MORC1; ENSG00000114487; CTA
HANSTTHSF

SEQ ID NO: 46840 - protein, 9 aa, Homo sapiens
  misc_feature: Table A; Target 46840; HLA-B*39:01; MORC1; ENSG00000114487; CTA
HANSTTHSF

SEQ ID NO: 46841 - protein, 9 aa, Homo sapiens
  misc_feature: Table A; Target 46841; HLA-B*46:01; MORC1; ENSG00000114487; CTA
HANSTTHSF

SEQ ID NO: 46842 - protein, 9 aa, Homo sapiens
  misc_feature: Table A; Target 46842; HLA-B*55:01; MORC1; ENSG00000114487; CTA
HANSTTHSF

SEQ ID NO: 46843 - protein, 9 aa, Homo sapiens
  misc_feature: Table A; Target 46843; HLA-B*57:01; MORC1; ENSG00000114487; CTA
HANSTTHSF

SEQ ID NO: 46844 - protein, 9 aa, Homo sapiens
  misc_feature: Table A; Target 46844; HLA-B*58:01; MORC1; ENSG00000114487; CTA
HANSTTHSF

SEQ ID NO: 46845 - protein, 9 aa, Homo sapiens
  misc_feature: Table A; Target 46845; HLA-C*01:02; MORC1; ENSG00000114487; CTA
HANSTTHSF

SEQ ID NO: 46846 - protein, 9 aa, Homo sapiens
  misc_feature: Table A; Target 46846; HLA-C*02:02; MORC1; ENSG00000114487; CTA
HANSTTHSF

SEQ ID NO: 46847 - protein, 9 aa, Homo sapiens
  misc_feature: Table A; Target 46847; HLA-C*03:03; MORC1; ENSG00000114487; CTA
HANSTTHSF

SEQ ID NO: 46848 - protein, 9 aa, Homo sapiens
  misc_feature: Table A; Target 46848; HLA-C*03:04; MORC1; ENSG00000114487; CTA
HANSTTHSF

SEQ ID NO: 46849 - protein, 9 aa, Homo sapiens
  misc_feature: Table A; Target 46849; HLA-C*05:01; MORC1; ENSG00000114487; CTA
HANSTTHSF

SEQ ID NO: 46850 - protein, 9 aa, Homo sapiens
  misc_feature: Table A; Target 46850; HLA-C*07:06; MORC1; ENSG00000114487; CTA
HANSTTHSF

SEQ ID NO: 46851 - protein, 9 aa, Homo sapiens
  misc_feature: Table A; Target 46851; HLA-C*12:03; MORC1; ENSG00000114487; CTA
HANSTTHSF

SEQ ID NO: 46852 - protein, 9 aa, Homo sapiens
  misc_feature: Table A; Target 46852; HLA-C*14:02; MORC1; ENSG00000114487; CTA
HANSTTHSF

SEQ ID NO: 46853 - protein, 9 aa, Homo sapiens
  misc_feature: Table A; Target 46853; HLA-C*16:01; MORC1; ENSG00000114487; CTA
HANSTTHSF

SEQ ID NO: 46854 - protein, 9 aa, Homo sapiens
  misc_feature: Table A; Target 46854; HLA-C*16:02; MORC1; ENSG00000114487; CTA
HANSTTHSF

SEQ ID NO: 46855 - protein, 9 aa, Homo sapiens
  misc_feature: Table A; Target 46855; HLA-C*16:04; MORC1; ENSG00000114487; CTA
HANSTTHSF

SEQ ID NO: 46856 - protein, 8 aa, Homo sapiens
  misc_feature: Table A; Target 46856; HLA-A*30:01; MORC1; ENSG00000114487; CTA
HEKVGSQL

SEQ ID NO: 46857 - protein, 8 aa, Homo sapiens
  misc_feature: Table A; Target 46857; HLA-B*08:01; MORC1; ENSG00000114487; CTA
HEKVGSQL

SEQ ID NO: 46858 - protein, 8 aa, Homo sapiens
  misc_feature: Table A; Target 46858; HLA-B*18:01; MORC1; ENSG00000114487; CTA
HEKVGSQL

SEQ ID NO: 46859 - protein, 8 aa, Homo sapiens
  misc_feature: Table A; Target 46859; HLA-B*37:01; MORC1; ENSG00000114487; CTA
HEKVGSQL

SEQ ID NO: 46860 - protein, 8 aa, Homo sapiens
  misc_feature: Table A; Target 46860; HLA-B*40:01; MORC1; ENSG00000114487; CTA
HEKVGSQL

SEQ ID NO: 46861 - protein, 8 aa, Homo sapiens
  misc_feature: Table A; Target 46861; HLA-B*40:02; MORC1; ENSG00000114487; CTA
HEKVGSQL

SEQ ID NO: 46862 - protein, 10 aa, Homo sapiens
  misc_feature: Table A; Target 46862; HLA-A*30:01; MORC1; ENSG00000114487; CTA
HEKVGSQLKL

SEQ ID NO: 46863 - protein, 9 aa, Homo sapiens
  misc_feature: Table A; Target 46863; HLA-A*30:01; MORC1; ENSG00000114487; CTA
HESLSSFEL

SEQ ID NO: 46864 - protein, 9 aa, Homo sapiens
  misc_feature: Table A; Target 46864; HLA-B*18:01; MORC1; ENSG00000114487; CTA
HESLSSFEL

SEQ ID NO: 46865 - protein, 9 aa, Homo sapiens
  misc_feature: Table A; Target 46865; HLA-B*37:01; MORC1; ENSG00000114487; CTA
HESLSSFEL

SEQ ID NO: 46866 - protein, 9 aa, Homo sapiens
  misc_feature: Table A; Target 46866; HLA-B*40:01; MORC1; ENSG00000114487; CTA
HESLSSFEL

SEQ ID NO: 46867 - protein, 9 aa, Homo sapiens
  misc_feature: Table A; Target 46867; HLA-B*40:02; MORC1; ENSG00000114487; CTA
HESLSSFEL

SEQ ID NO: 46868 - protein, 9 aa, Homo sapiens
  misc_feature: Table A; Target 46868; HLA-A*29:02; MORC1; ENSG00000114487; CTA
HLLKVMGQY

SEQ ID NO: 46869 - protein, 9 aa, Homo sapiens
  misc_feature: Table A; Target 46869; HLA-A*30:02; MORC1; ENSG00000114487; CTA
HLLKVMGQY

SEQ ID NO: 46870 - protein, 9 aa, Homo sapiens
  misc_feature: Table A; Target 46870; HLA-A*02:01; MORC1; ENSG00000114487; CTA
HQVECLPSI

SEQ ID NO: 46871 - protein, 9 aa, Homo sapiens
  misc_feature: Table A; Target 46871; HLA-B*13:02; MORC1; ENSG00000114487; CTA
HQVECLPSI

SEQ ID NO: 46872 - protein, 9 aa, Homo sapiens
  misc_feature: Table A; Target 46872; HLA-B*38:01; MORC1; ENSG00000114487; CTA
HQVECLPSI

SEQ ID NO: 46873 - protein, 9 aa, Homo sapiens
  misc_feature: Table A; Target 46873; HLA-B*51:01; MORC1; ENSG00000114487; CTA
HQVECLPSI

SEQ ID NO: 46874 - protein, 9 aa, Homo sapiens
  misc_feature: Table A; Target 46874; HLA-B*54:01; MORC1; ENSG00000114487; CTA
HSFLFGALA

SEQ ID NO: 46875 - protein, 9 aa, Homo sapiens
  misc_feature: Table A; Target 46875; HLA-B*54:01; MORC1; ENSG00000114487; CTA
IAESILKEA

SEQ ID NO: 46876 - protein, 8 aa, Homo sapiens
  misc_feature: Table A; Target 46876; HLA-A*23:01; MORC1; ENSG00000114487; CTA
IANITTVW

SEQ ID NO: 46877 - protein, 8 aa, Homo sapiens
  misc_feature: Table A; Target 46877; HLA-A*25:01; MORC1; ENSG00000114487; CTA
IANITTVW

SEQ ID NO: 46878 - protein, 8 aa, Homo sapiens
  misc_feature: Table A; Target 46878; HLA-A*32:01; MORC1; ENSG00000114487; CTA
IANITTVW

SEQ ID NO: 46879 - protein, 8 aa, Homo sapiens
  misc_feature: Table A; Target 46879; HLA-B*08:01; MORC1; ENSG00000114487; CTA
IANITTVW

SEQ ID NO: 46880 - protein, 8 aa, Homo sapiens
  misc_feature: Table A; Target 46880; HLA-B*46:01; MORC1; ENSG00000114487; CTA
IANITTVW

SEQ ID NO: 46881 - protein, 8 aa, Homo sapiens
  misc_feature: Table A; Target 46881; HLA-B*57:01; MORC1; ENSG00000114487; CTA
IANITTVW

SEQ ID NO: 46882 - protein, 8 aa, Homo sapiens
  misc_feature: Table A; Target 46882; HLA-B*58:01; MORC1; ENSG00000114487; CTA
IANITTVW

SEQ ID NO: 46883 - protein, 8 aa, Homo sapiens
  misc_feature: Table A; Target 46883; HLA-C*12:03; MORC1; ENSG00000114487; CTA
IANITTVW

SEQ ID NO: 46884 - protein, 8 aa, Homo sapiens
  misc_feature: Table A; Target 46884; HLA-C*16:01; MORC1; ENSG00000114487; CTA
IANITTVW

SEQ ID NO: 46885 - protein, 8 aa, Homo sapiens
  misc_feature: Table A; Target 46885; HLA-C*16:04; MORC1; ENSG00000114487; CTA
IANITTVW

SEQ ID NO: 46886 - protein, 9 aa, Homo sapiens
  misc_feature: Table A; Target 46886; HLA-A*31:01; MORC1; ENSG00000114487; CTA
IANITTVWR

SEQ ID NO: 46887 - protein, 9 aa, Homo sapiens
  misc_feature: Table A; Target 46887; HLA-A*33:01; MORC1; ENSG00000114487; CTA
IANITTVWR

SEQ ID NO: 46888 - protein, 9 aa, Homo sapiens
  misc_feature: Table A; Target 46888; HLA-C*16:02; MORC1; ENSG00000114487; CTA
ICANNPNRL

SEQ ID NO: 46889 - protein, 10 aa, Homo sapiens
  misc_feature: Table A; Target 46889; HLA-A*23:01; MORC1; ENSG00000114487; CTA
IDVEKPLNSF

SEQ ID NO: 46890 - protein, 10 aa, Homo sapiens
  misc_feature: Table A; Target 46890; HLA-A*30:01; MORC1; ENSG00000114487; CTA
IDVEKPLNSF

SEQ ID NO: 46891 - protein, 10 aa, Homo sapiens
  misc_feature: Table A; Target 46891; HLA-B*37:01; MORC1; ENSG00000114487; CTA
IDVEKPLNSF

SEQ ID NO: 46892 - protein, 10 aa, Homo sapiens
  misc_feature: Table A; Target 46892; HLA-B*44:03; MORC1; ENSG00000114487; CTA
IDVEKPLNSF

SEQ ID NO: 46893 - protein, 10 aa, Homo sapiens
  misc_feature: Table A; Target 46893; HLA-C*16:04; MORC1; ENSG00000114487; CTA
IDVEKPLNSF

SEQ ID NO: 46894 - protein, 8 aa, Homo sapiens
  misc_feature: Table A; Target 46894; HLA-C*01:02; MORC1; ENSG00000114487; CTA
IGQYGNGL

SEQ ID NO: 46895 - protein, 8 aa, Homo sapiens
  misc_feature: Table A; Target 46895; HLA-C*14:02; MORC1; ENSG00000114487; CTA
IGQYGNGL

SEQ ID NO: 46896 - protein, 9 aa, Homo sapiens
  misc_feature: Table A; Target 46896; HLA-A*03:02; MORC1; ENSG00000114487; CTA
IGQYGNGLK

SEQ ID NO: 46897 - protein, 9 aa, Homo sapiens
  misc_feature: Table A; Target 46897; HLA-A*11:01; MORC1; ENSG00000114487; CTA
IGQYGNGLK

SEQ ID NO: 46898 - protein, 11 aa, Homo sapiens
  misc_feature: Table A; Target 46898; HLA-C*04:01; MORC1; ENSG00000114487; CTA
IGQYGNGLKSG

SEQ ID NO: 46899 - protein, 10 aa, Homo sapiens
  misc_feature: Table A; Target 46899; HLA-B*38:01; MORC1; ENSG00000114487; CTA
IHANSTTHSF

SEQ ID NO: 46900 - protein, 11 aa, Homo sapiens
  misc_feature: Table A; Target 46900; HLA-B*38:01; MORC1; ENSG00000114487; CTA
IHANSTTHSFL

SEQ ID NO: 46901 - protein, 10 aa, Homo sapiens
  misc_feature: Table A; Target 46901; HLA-A*02:03; MORC1; ENSG00000114487; CTA
IIYDSNTRGI

SEQ ID NO: 46902 - protein, 10 aa, Homo sapiens
  misc_feature: Table A; Target 46902; HLA-A*25:01; MORC1; ENSG00000114487; CTA
IIYDSNTRGI

SEQ ID NO: 46903 - protein, 8 aa, Homo sapiens
  misc_feature: Table A; Target 46903; HLA-A*03:01; MORC1; ENSG00000114487; CTA
IIYFGRSK

SEQ ID NO: 46904 - protein, 9 aa, Homo sapiens
  misc_feature: Table A; Target 46904; HLA-A*03:01; MORC1; ENSG00000114487; CTA
IIYFGRSKK

SEQ ID NO: 46905 - protein, 9 aa, Homo sapiens
  misc_feature: Table A; Target 46905; HLA-A*03:01; MORC1; ENSG00000114487; CTA
IIYKYSPFK

SEQ ID NO: 46906 - protein, 9 aa, Homo sapiens
  misc_feature: Table A; Target 46906; HLA-A*02:01; MORC1; ENSG00000114487; CTA
ILKEAQIKV

SEQ ID NO: 46907 - protein, 9 aa, Homo sapiens
  misc_feature: Table A; Target 46907; HLA-A*02:03; MORC1; ENSG00000114487; CTA
ILKEAQIKV

SEQ ID NO: 46908 - protein, 9 aa, Homo sapiens
  misc_feature: Table A; Target 46908; HLA-A*02:07; MORC1; ENSG00000114487; CTA
ILKEAQIKV

SEQ ID NO: 46909 - protein, 9 aa, Homo sapiens
  misc_feature: Table A; Target 46909; HLA-B*55:01; MORC1; ENSG00000114487; CTA
ILKEAQIKV

SEQ ID NO: 46910 - protein, 10 aa, Homo sapiens
  misc_feature: Table A; Target 46910; HLA-B*15:01; MORC1; ENSG00000114487; CTA
ILMAGALEDF

SEQ ID NO: 46911 - protein, 9 aa, Homo sapiens
  misc_feature: Table A; Target 46911; HLA-A*23:01; MORC1; ENSG00000114487; CTA
INNRNLTLF

SEQ ID NO: 46912 - protein, 9 aa, Homo sapiens
  misc_feature: Table A; Target 46912; HLA-A*24:02; MORC1; ENSG00000114487; CTA
INNRNLTLF

SEQ ID NO: 46913 - protein, 9 aa, Homo sapiens
  misc_feature: Table A; Target 46913; HLA-B*35:01; MORC1; ENSG00000114487; CTA
IPFIIQCDL

SEQ ID NO: 46914 - protein, 9 aa, Homo sapiens
  misc_feature: Table A; Target 46914; HLA-B*35:03; MORC1; ENSG00000114487; CTA
IPFIIQCDL

SEQ ID NO: 46915 - protein, 8 aa, Homo sapiens
  misc_feature: Table A; Target 46915; HLA-B*54:01; MORC1; ENSG00000114487; CTA
IPLEVMEP

SEQ ID NO: 46916 - protein, 9 aa, Homo sapiens
  misc_feature: Table A; Target 46916; HLA-A*23:01; MORC1; ENSG00000114487; CTA
IPLGTMSTI

SEQ ID NO: 46917 - protein, 9 aa, Homo sapiens
  misc_feature: Table A; Target 46917; HLA-B*07:02; MORC1; ENSG00000114487; CTA
IPLGTMSTI

SEQ ID NO: 46918 - protein, 9 aa, Homo sapiens
  misc_feature: Table A; Target 46918; HLA-B*35:03; MORC1; ENSG00000114487; CTA
IPLGTMSTI

SEQ ID NO: 46919 - protein, 9 aa, Homo sapiens
  misc_feature: Table A; Target 46919; HLA-B*49:01; MORC1; ENSG00000114487; CTA
IPLGTMSTI

SEQ ID NO: 46920 - protein, 9 aa, Homo sapiens
  misc_feature: Table A; Target 46920; HLA-B*54:01; MORC1; ENSG00000114487; CTA
IPLGTMSTI

SEQ ID NO: 46921 - protein, 9 aa, Homo sapiens
  misc_feature: Table A; Target 46921; HLA-B*56:01; MORC1; ENSG00000114487; CTA
IPLGTMSTI

SEQ ID NO: 46922 - protein, 9 aa, Homo sapiens
  misc_feature: Table A; Target 46922; HLA-C*07:02; MORC1; ENSG00000114487; CTA
IPLGTMSTI

SEQ ID NO: 46923 - protein, 11 aa, Homo sapiens
  misc_feature: Table A; Target 46923; HLA-B*07:02; MORC1; ENSG00000114487; CTA
IPLLNQEKQEL

SEQ ID NO: 46924 - protein, 11 aa, Homo sapiens
  misc_feature: Table A; Target 46924; HLA-B*35:03; MORC1; ENSG00000114487; CTA
IPLLNQEKQEL

SEQ ID NO: 46925 - protein, 11 aa, Homo sapiens
  misc_feature: Table A; Target 46925; HLA-B*55:01; MORC1; ENSG00000114487; CTA
IPLLNQEKQEL

SEQ ID NO: 46926 - protein, 11 aa, Homo sapiens
  misc_feature: Table A; Target 46926; HLA-C*07:02; MORC1; ENSG00000114487; CTA
IPLLNQEKQEL

SEQ ID NO: 46927 - protein, 9 aa, Homo sapiens
  misc_feature: Table A; Target 46927; HLA-B*35:01; MORC1; ENSG00000114487; CTA
IPVALPENV

SEQ ID NO: 46928 - protein, 9 aa, Homo sapiens
  misc_feature: Table A; Target 46928; HLA-B*35:03; MORC1; ENSG00000114487; CTA
IPVALPENV

SEQ ID NO: 46929 - protein, 9 aa, Homo sapiens
  misc_feature: Table A; Target 46929; HLA-B*51:01; MORC1; ENSG00000114487; CTA
IPVALPENV

SEQ ID NO: 46930 - protein, 9 aa, Homo sapiens
  misc_feature: Table A; Target 46930; HLA-B*54:01; MORC1; ENSG00000114487; CTA
IPVALPENV

SEQ ID NO: 46931 - protein, 9 aa, Homo sapiens
  misc_feature: Table A; Target 46931; HLA-B*56:01; MORC1; ENSG00000114487; CTA
IPVALPENV

SEQ ID NO: 46932 - protein, 11 aa, Homo sapiens
  misc_feature: Table A; Target 46932; HLA-A*23:01; MORC1; ENSG00000114487; CTA
IPVALPENVKL

SEQ ID NO: 46933 - protein, 11 aa, Homo sapiens
  misc_feature: Table A; Target 46933; HLA-B*35:01; MORC1; ENSG00000114487; CTA
IPVALPENVKL

SEQ ID NO: 46934 - protein, 11 aa, Homo sapiens
  misc_feature: Table A; Target 46934; HLA-B*35:03; MORC1; ENSG00000114487; CTA
IPVALPENVKL

SEQ ID NO: 46935 - protein, 11 aa, Homo sapiens
  misc_feature: Table A; Target 46935; HLA-B*55:01; MORC1; ENSG00000114487; CTA
IPVALPENVKL

SEQ ID NO: 46936 - protein, 8 aa, Homo sapiens
  misc_feature: Table A; Target 46936; HLA-B*51:01; MORC1; ENSG00000114487; CTA
IPVDEITV

SEQ ID NO: 46937 - protein, 8 aa, Homo sapiens
  misc_feature: Table A; Target 46937; HLA-B*56:01; MORC1; ENSG00000114487; CTA
IPVDEITV

SEQ ID NO: 46938 - protein, 9 aa, Homo sapiens
  misc_feature: Table A; Target 46938; HLA-B*35:01; MORC1; ENSG00000114487; CTA
IPVDEITVT

SEQ ID NO: 46939 - protein, 9 aa, Homo sapiens
  misc_feature: Table A; Target 46939; HLA-B*35:03; MORC1; ENSG00000114487; CTA
IPVDEITVT

SEQ ID NO: 46940 - protein, 9 aa, Homo sapiens
  misc_feature: Table A; Target 46940; HLA-B*55:01; MORC1; ENSG00000114487; CTA
IPVDEITVT

SEQ ID NO: 46941 - protein, 9 aa, Homo sapiens
  misc_feature: Table A; Target 46941; HLA-B*56:01; MORC1; ENSG00000114487; CTA
IPVDEITVT

SEQ ID NO: 46942 - protein, 10 aa, Homo sapiens
  misc_feature: Table A; Target 46942; HLA-B*56:01; MORC1; ENSG00000114487; CTA
IPVDEITVTS

SEQ ID NO: 46943 - protein, 11 aa, Homo sapiens
  misc_feature: Table A; Target 46943; HLA-B*35:01; MORC1; ENSG00000114487; CTA
IPVDEITVTST

SEQ ID NO: 46944 - protein, 11 aa, Homo sapiens
  misc_feature: Table A; Target 46944; HLA-B*54:01; MORC1; ENSG00000114487; CTA
IPVDEITVTST

SEQ ID NO: 46945 - protein, 11 aa, Homo sapiens
  misc_feature: Table A; Target 46945; HLA-B*55:01; MORC1; ENSG00000114487; CTA
IPVDEITVTST

SEQ ID NO: 46946 - protein, 11 aa, Homo sapiens
  misc_feature: Table A; Target 46946; HLA-B*56:01; MORC1; ENSG00000114487; CTA
IPVDEITVTST

SEQ ID NO: 46947 - protein, 9 aa, Homo sapiens
  misc_feature: Table A; Target 46947; HLA-A*03:01; MORC1; ENSG00000114487; CTA
IQNTYMVQY

SEQ ID NO: 46948 - protein, 9 aa, Homo sapiens
  misc_feature: Table A; Target 46948; HLA-A*03:02; MORC1; ENSG00000114487; CTA
IQNTYMVQY

SEQ ID NO: 46949 - protein, 9 aa, Homo sapiens
  misc_feature: Table A; Target 46949; HLA-A*23:01; MORC1; ENSG00000114487; CTA
IQNTYMVQY

SEQ ID NO: 46950 - protein, 9 aa, Homo sapiens
  misc_feature: Table A; Target 46950; HLA-A*26:01; MORC1; ENSG00000114487; CTA
IQNTYMVQY

SEQ ID NO: 46951 - protein, 9 aa, Homo sapiens
  misc_feature: Table A; Target 46951; HLA-A*29:02; MORC1; ENSG00000114487; CTA
IQNTYMVQY

SEQ ID NO: 46952 - protein, 9 aa, Homo sapiens
  misc_feature: Table A; Target 46952; HLA-A*30:02; MORC1; ENSG00000114487; CTA
IQNTYMVQY

SEQ ID NO: 46953 - protein, 9 aa, Homo sapiens
  misc_feature: Table A; Target 46953; HLA-A*32:01; MORC1; ENSG00000114487; CTA
IQNTYMVQY

SEQ ID NO: 46954 - protein, 9 aa, Homo sapiens
  misc_feature: Table A; Target 46954; HLA-B*15:01; MORC1; ENSG00000114487; CTA
IQNTYMVQY

SEQ ID NO: 46955 - protein, 9 aa, Homo sapiens
  misc_feature: Table A; Target 46955; HLA-B*15:03; MORC1; ENSG00000114487; CTA
IQNTYMVQY

SEQ ID NO: 46956 - protein, 9 aa, Homo sapiens
  misc_feature: Table A; Target 46956; HLA-B*18:01; MORC1; ENSG00000114487; CTA
IQNTYMVQY

SEQ ID NO: 46957 - protein, 9 aa, Homo sapiens
  misc_feature: Table A; Target 46957; HLA-B*27:02; MORC1; ENSG00000114487; CTA
IQNTYMVQY

SEQ ID NO: 46958 - protein, 9 aa, Homo sapiens
  misc_feature: Table A; Target 46958; HLA-B*46:01; MORC1; ENSG00000114487; CTA
IQNTYMVQY

SEQ ID NO: 46959 - protein, 9 aa, Homo sapiens
  misc_feature: Table A; Target 46959; HLA-C*02:02; MORC1; ENSG00000114487; CTA
IQNTYMVQY

SEQ ID NO: 46960 - protein, 9 aa, Homo sapiens
  misc_feature: Table A; Target 46960; HLA-C*07:04; MORC1; ENSG00000114487; CTA
IQNTYMVQY

SEQ ID NO: 46961 - protein, 9 aa, Homo sapiens
  misc_feature: Table A; Target 46961; HLA-C*12:03; MORC1; ENSG00000114487; CTA
IQNTYMVQY

SEQ ID NO: 46962 - protein, 9 aa, Homo sapiens
  misc_feature: Table A; Target 46962; HLA-C*14:02; MORC1; ENSG00000114487; CTA
IQNTYMVQY

SEQ ID NO: 46963 - protein, 9 aa, Homo sapiens
  misc_feature: Table A; Target 46963; HLA-C*16:02; MORC1; ENSG00000114487; CTA
IQNTYMVQY

SEQ ID NO: 46964 - protein, 9 aa, Homo sapiens
  misc_feature: Table A; Target 46964; HLA-C*16:04; MORC1; ENSG00000114487; CTA
IQNTYMVQY

SEQ ID NO: 46965 - protein, 9 aa, Homo sapiens
  misc_feature: Table A; Target 46965; HLA-C*05:01; MORC1; ENSG00000114487; CTA
ISEDKLKNL

SEQ ID NO: 46966 - protein, 9 aa, Homo sapiens
  misc_feature: Table A; Target 46966; HLA-C*16:02; MORC1; ENSG00000114487; CTA
ISEDKLKNL

SEQ ID NO: 46967 - protein, 9 aa, Homo sapiens
  misc_feature: Table A; Target 46967; HLA-A*01:01; MORC1; ENSG00000114487; CTA
ISETKIMKK

SEQ ID NO: 46968 - protein, 9 aa, Homo sapiens
  misc_feature: Table A; Target 46968; HLA-A*11:01; MORC1; ENSG00000114487; CTA
ISETKIMKK

SEQ ID NO: 46969 - protein, 8 aa, Homo sapiens
  misc_feature: Table A; Target 46969; HLA-C*03:03; MORC1; ENSG00000114487; CTA
ITVTSTCL

SEQ ID NO: 46970 - protein, 8 aa, Homo sapiens
  misc_feature: Table A; Target 46970; HLA-C*03:04; MORC1; ENSG00000114487; CTA
ITVTSTCL

SEQ ID NO: 46971 - protein, 8 aa, Homo sapiens
  misc_feature: Table A; Target 46971; HLA-B*13:02; MORC1; ENSG00000114487; CTA
IVNIPLEV

SEQ ID NO: 46972 - protein, 9 aa, Homo sapiens
  misc_feature: Table A; Target 46972; HLA-B*15:01; MORC1; ENSG00000114487; CTA
IVNIPLEVM

SEQ ID NO: 46973 - protein, 9 aa, Homo sapiens
  misc_feature: Table A; Target 46973; HLA-B*35:01; MORC1; ENSG00000114487; CTA
IVNIPLEVM

SEQ ID NO: 46974 - protein, 9 aa, Homo sapiens
  misc_feature: Table A; Target 46974; HLA-B*46:01; MORC1; ENSG00000114487; CTA
IVNIPLEVM

SEQ ID NO: 46975 - protein, 9 aa, Homo sapiens
  misc_feature: Table A; Target 46975; HLA-C*05:01; MORC1; ENSG00000114487; CTA
IVNIPLEVM

SEQ ID NO: 46976 - protein, 9 aa, Homo sapiens
  misc_feature: Table A; Target 46976; HLA-C*07:04; MORC1; ENSG00000114487; CTA
IVNIPLEVM

SEQ ID NO: 46977 - protein, 9 aa, Homo sapiens
  misc_feature: Table A; Target 46977; HLA-A*23:01; MORC1; ENSG00000114487; CTA
IYDSNTRGI

SEQ ID NO: 46978 - protein, 9 aa, Homo sapiens
  misc_feature: Table A; Target 46978; HLA-A*24:02; MORC1; ENSG00000114487; CTA
IYDSNTRGI

SEQ ID NO: 46979 - protein, 9 aa, Homo sapiens
  misc_feature: Table A; Target 46979; HLA-B*35:03; MORC1; ENSG00000114487; CTA
IYDSNTRGI

SEQ ID NO: 46980 - protein, 9 aa, Homo sapiens
  misc_feature: Table A; Target 46980; HLA-C*04:01; MORC1; ENSG00000114487; CTA
IYDSNTRGI

SEQ ID NO: 46981 - protein, 9 aa, Homo sapiens
  misc_feature: Table A; Target 46981; HLA-C*14:02; MORC1; ENSG00000114487; CTA
IYDSNTRGI

SEQ ID NO: 46982 - protein, 9 aa, Homo sapiens
  misc_feature: Table A; Target 46982; HLA-C*16:02; MORC1; ENSG00000114487; CTA
IYDSNTRGI

SEQ ID NO: 46983 - protein, 9 aa, Homo sapiens
  misc_feature: Table A; Target 46983; HLA-A*23:01; MORC1; ENSG00000114487; CTA
IYGKCGTLL

SEQ ID NO: 46984 - protein, 9 aa, Homo sapiens
  misc_feature: Table A; Target 46984; HLA-A*24:02; MORC1; ENSG00000114487; CTA
IYGKCGTLL

SEQ ID NO: 46985 - protein, 8 aa, Homo sapiens
  misc_feature: Table A; Target 46985; HLA-A*23:01; MORC1; ENSG00000114487; CTA
IYNLKLLL

SEQ ID NO: 46986 - protein, 10 aa, Homo sapiens
  misc_feature: Table A; Target 46986; HLA-A*24:02; MORC1; ENSG00000114487; CTA
IYSNNRLIKM

SEQ ID NO: 46987 - protein, 8 aa, Homo sapiens
  misc_feature: Table A; Target 46987; HLA-C*05:01; MORC1; ENSG00000114487; CTA
KAEEAVKI

SEQ ID NO: 46988 - protein, 8 aa, Homo sapiens
  misc_feature: Table A; Target 46988; HLA-B*37:01; MORC1; ENSG00000114487; CTA
KDVLQRAL

SEQ ID NO: 46989 - protein, 10 aa, Homo sapiens
  misc_feature: Table A; Target 46989; HLA-B*40:01; MORC1; ENSG00000114487; CTA
KEDILMAGAL

SEQ ID NO: 46990 - protein, 11 aa, Homo sapiens
  misc_feature: Table A; Target 46990; HLA-A*30:01; MORC1; ENSG00000114487; CTA
KEDNLLFQNNL

SEQ ID NO: 46991 - protein, 11 aa, Homo sapiens
  misc_feature: Table A; Target 46991; HLA-B*40:01; MORC1; ENSG00000114487; CTA
KEDNLLFQNNL

SEQ ID NO: 46992 - protein, 8 aa, Homo sapiens
  misc_feature: Table A; Target 46992; HLA-B*49:01; MORC1; ENSG00000114487; CTA
KEETMTCV

SEQ ID NO: 46993 - protein, 9 aa, Homo sapiens
  misc_feature: Table A; Target 46993; HLA-B*18:01; MORC1; ENSG00000114487; CTA
KEETMTCVF

SEQ ID NO: 46994 - protein, 9 aa, Homo sapiens
  misc_feature: Table A; Target 46994; HLA-B*37:01; MORC1; ENSG00000114487; CTA
KEETMTCVF

SEQ ID NO: 46995 - protein, 9 aa, Homo sapiens
  misc_feature: Table A; Target 46995; HLA-B*40:01; MORC1; ENSG00000114487; CTA
KEETMTCVF

SEQ ID NO: 46996 - protein, 10 aa, Homo sapiens
  misc_feature: Table A; Target 46996; HLA-B*44:02; MORC1; ENSG00000114487; CTA
KEIPLLNQEK

SEQ ID NO: 46997 - protein, 10 aa, Homo sapiens
  misc_feature: Table A; Target 46997; HLA-B*44:03; MORC1; ENSG00000114487; CTA
KEIPLLNQEK

SEQ ID NO: 46998 - protein, 9 aa, Homo sapiens
  misc_feature: Table A; Target 46998; HLA-B*44:02; MORC1; ENSG00000114487; CTA
KENTKTQKI

SEQ ID NO: 46999 - protein, 9 aa, Homo sapiens
  misc_feature: Table A; Target 46999; HLA-B*44:03; MORC1; ENSG00000114487; CTA
KENTKTQKI

SEQ ID NO: 47000 - protein, 9 aa, Homo sapiens
  misc_feature: Table A; Target 47000; HLA-B*49:01; MORC1; ENSG00000114487; CTA
KENTKTQKI

SEQ ID NO: 47001 - protein, 10 aa, Homo sapiens
  misc_feature: Table A; Target 47001; HLA-B*38:01; MORC1; ENSG00000114487; CTA
KHESLSSFEL

SEQ ID NO: 47002 - protein, 8 aa, Homo sapiens
  misc_feature: Table A; Target 47002; HLA-A*03:01; MORC1; ENSG00000114487; CTA
KIAESILK

SEQ ID NO: 47003 - protein, 8 aa, Homo sapiens
  misc_feature: Table A; Target 47003; HLA-A*03:02; MORC1; ENSG00000114487; CTA
KIAESILK

SEQ ID NO: 47004 - protein, 10 aa, Homo sapiens
  misc_feature: Table A; Target 47004; HLA-A*02:01; MORC1; ENSG00000114487; CTA
KIAESILKEA

SEQ ID NO: 47005 - protein, 10 aa, Homo sapiens
  misc_feature: Table A; Target 47005; HLA-A*02:03; MORC1; ENSG00000114487; CTA
KIAESILKEA

SEQ ID NO: 47006 - protein, 9 aa, Homo sapiens
  misc_feature: Table A; Target 47006; HLA-A*02:03; MORC1; ENSG00000114487; CTA
KLALLLQKL

SEQ ID NO: 47007 - protein, 9 aa, Homo sapiens
  misc_feature: Table A; Target 47007; HLA-A*02:04; MORC1; ENSG00000114487; CTA
KLALLLQKL

SEQ ID NO: 47008 - protein, 10 aa, Homo sapiens
  misc_feature: Table A; Target 47008; HLA-A*02:03; MORC1; ENSG00000114487; CTA
KLKSLLGAGV

SEQ ID NO: 47009 - protein, 10 aa, Homo sapiens
  misc_feature: Table A; Target 47009; HLA-A*02:01; MORC1; ENSG00000114487; CTA
KLLLNGEPEL

SEQ ID NO: 47010 - protein, 10 aa, Homo sapiens
  misc_feature: Table A; Target 47010; HLA-A*02:04; MORC1; ENSG00000114487; CTA
KLLLNGEPEL

SEQ ID NO: 47011 - protein, 9 aa, Homo sapiens
  misc_feature: Table A; Target 47011; HLA-B*57:01; MORC1; ENSG00000114487; CTA
KLREILLYF

SEQ ID NO: 47012 - protein, 9 aa, Homo sapiens
  misc_feature: Table A; Target 47012; HLA-B*13:02; MORC1; ENSG00000114487; CTA
KMNSQQQRI

SEQ ID NO: 47013 - protein, 8 aa, Homo sapiens
  misc_feature: Table A; Target 47013; HLA-B*35:01; MORC1; ENSG00000114487; CTA
KPLNSFQY

SEQ ID NO: 47014 - protein, 10 aa, Homo sapiens
  misc_feature: Table A; Target 47014; HLA-A*01:01; MORC1; ENSG00000114487; CTA
KQEFLNVQEY

SEQ ID NO: 47015 - protein, 10 aa, Homo sapiens
  misc_feature: Table A; Target 47015; HLA-A*30:02; MORC1; ENSG00000114487; CTA
KQEFLNVQEY

SEQ ID NO: 47016 - protein, 10 aa, Homo sapiens
  misc_feature: Table A; Target 47016; HLA-B*15:01; MORC1; ENSG00000114487; CTA
KQEFLNVQEY

SEQ ID NO: 47017 - protein, 10 aa, Homo sapiens
  misc_feature: Table A; Target 47017; HLA-C*07:01; MORC1; ENSG00000114487; CTA
KQEFLNVQEY

SEQ ID NO: 47018 - protein, 10 aa, Homo sapiens
  misc_feature: Table A; Target 47018; HLA-C*07:04; MORC1; ENSG00000114487; CTA
KQEFLNVQEY

SEQ ID NO: 47019 - protein, 10 aa, Homo sapiens
  misc_feature: Table A; Target 47019; HLA-C*16:04; MORC1; ENSG00000114487; CTA
KQEFLNVQEY

SEQ ID NO: 47020 - protein, 10 aa, Homo sapiens
  misc_feature: Table A; Target 47020; HLA-A*30:02; MORC1; ENSG00000114487; CTA
KQLRESVIKY

SEQ ID NO: 47021 - protein, 10 aa, Homo sapiens
  misc_feature: Table A; Target 47021; HLA-B*15:01; MORC1; ENSG00000114487; CTA
KQLRESVIKY

SEQ ID NO: 47022 - protein, 10 aa, Homo sapiens
  misc_feature: Table A; Target 47022; HLA-B*15:03; MORC1; ENSG00000114487; CTA
KQLRESVIKY

SEQ ID NO: 47023 - protein, 9 aa, Homo sapiens
  misc_feature: Table A; Target 47023; HLA-A*31:01; MORC1; ENSG00000114487; CTA
KQRELKTAR

SEQ ID NO: 47024 - protein, 9 aa, Homo sapiens
  misc_feature: Table A; Target 47024; HLA-A*03:01; MORC1; ENSG00000114487; CTA
KSNTDVSLK

SEQ ID NO: 47025 - protein, 9 aa, Homo sapiens
  misc_feature: Table A; Target 47025; HLA-A*03:02; MORC1; ENSG00000114487; CTA
KSNTDVSLK

SEQ ID NO: 47026 - protein, 9 aa, Homo sapiens
  misc_feature: Table A; Target 47026; HLA-A*11:01; MORC1; ENSG00000114487; CTA
KSNTDVSLK

SEQ ID NO: 47027 - protein, 9 aa, Homo sapiens
  misc_feature: Table A; Target 47027; HLA-A*31:01; MORC1; ENSG00000114487; CTA
KSNTDVSLK

SEQ ID NO: 47028 - protein, 9 aa, Homo sapiens
  misc_feature: Table A; Target 47028; HLA-B*57:01; MORC1; ENSG00000114487; CTA
KTARTLSLF

SEQ ID NO: 47029 - protein, 10 aa, Homo sapiens
  misc_feature: Table A; Target 47029; HLA-A*01:01; MORC1; ENSG00000114487; CTA
KTARTLSLFY

SEQ ID NO: 47030 - protein, 10 aa, Homo sapiens
  misc_feature: Table A; Target 47030; HLA-A*29:02; MORC1; ENSG00000114487; CTA
KTARTLSLFY

SEQ ID NO: 47031 - protein, 10 aa, Homo sapiens
  misc_feature: Table A; Target 47031; HLA-B*57:01; MORC1; ENSG00000114487; CTA
KTARTLSLFY

SEQ ID NO: 47032 - protein, 9 aa, Homo sapiens
  misc_feature: Table A; Target 47032; HLA-A*01:01; MORC1; ENSG00000114487; CTA
KTDKEDILM

SEQ ID NO: 47033 - protein, 9 aa, Homo sapiens
  misc_feature: Table A; Target 47033; HLA-C*05:01; MORC1; ENSG00000114487; CTA
KTDKEDILM

SEQ ID NO: 47034 - protein, 10 aa, Homo sapiens
  misc_feature: Table A; Target 47034; HLA-B*58:01; MORC1; ENSG00000114487; CTA
KTEAELMQQF

SEQ ID NO: 47035 - protein, 9 aa, Homo sapiens
  misc_feature: Table A; Target 47035; HLA-A*03:01; MORC1; ENSG00000114487; CTA
KVGSQLKLK

SEQ ID NO: 47036 - protein, 9 aa, Homo sapiens
  misc_feature: Table A; Target 47036; HLA-A*03:02; MORC1; ENSG00000114487; CTA
KVGSQLKLK

SEQ ID NO: 47037 - protein, 9 aa, Homo sapiens
  misc_feature: Table A; Target 47037; HLA-A*11:01; MORC1; ENSG00000114487; CTA
KVGSQLKLK

SEQ ID NO: 47038 - protein, 10 aa, Homo sapiens
  misc_feature: Table A; Target 47038; HLA-A*03:01; MORC1; ENSG00000114487; CTA
KVMGQYLVQY

SEQ ID NO: 47039 - protein, 10 aa, Homo sapiens
  misc_feature: Table A; Target 47039; HLA-A*03:02; MORC1; ENSG00000114487; CTA
KVMGQYLVQY

SEQ ID NO: 47040 - protein, 10 aa, Homo sapiens
  misc_feature: Table A; Target 47040; HLA-A*11:01; MORC1; ENSG00000114487; CTA
KVMGQYLVQY

SEQ ID NO: 47041 - protein, 10 aa, Homo sapiens
  misc_feature: Table A; Target 47041; HLA-A*25:01; MORC1; ENSG00000114487; CTA
KVMGQYLVQY

SEQ ID NO: 47042 - protein, 10 aa, Homo sapiens
  misc_feature: Table A; Target 47042; HLA-A*26:01; MORC1; ENSG00000114487; CTA
KVMGQYLVQY

SEQ ID NO: 47043 - protein, 10 aa, Homo sapiens
  misc_feature: Table A; Target 47043; HLA-A*29:02; MORC1; ENSG00000114487; CTA
KVMGQYLVQY

SEQ ID NO: 47044 - protein, 10 aa, Homo sapiens
  misc_feature: Table A; Target 47044; HLA-A*30:02; MORC1; ENSG00000114487; CTA
KVMGQYLVQY

SEQ ID NO: 47045 - protein, 10 aa, Homo sapiens
  misc_feature: Table A; Target 47045; HLA-A*31:01; MORC1; ENSG00000114487; CTA
KVMGQYLVQY

SEQ ID NO: 47046 - protein, 10 aa, Homo sapiens
  misc_feature: Table A; Target 47046; HLA-A*32:01; MORC1; ENSG00000114487; CTA
KVMGQYLVQY

SEQ ID NO: 47047 - protein, 10 aa, Homo sapiens
  misc_feature: Table A; Target 47047; HLA-B*15:01; MORC1; ENSG00000114487; CTA
KVMGQYLVQY

SEQ ID NO: 47048 - protein, 10 aa, Homo sapiens
  misc_feature: Table A; Target 47048; HLA-B*46:01; MORC1; ENSG00000114487; CTA
KVMGQYLVQY

SEQ ID NO: 47049 - protein, 10 aa, Homo sapiens
  misc_feature: Table A; Target 47049; HLA-B*57:01; MORC1; ENSG00000114487; CTA
KVMGQYLVQY

SEQ ID NO: 47050 - protein, 10 aa, Homo sapiens
  misc_feature: Table A; Target 47050; HLA-B*58:01; MORC1; ENSG00000114487; CTA
KVMGQYLVQY

SEQ ID NO: 47051 - protein, 10 aa, Homo sapiens
  misc_feature: Table A; Target 47051; HLA-C*02:02; MORC1; ENSG00000114487; CTA
KVMGQYLVQY

SEQ ID NO: 47052 - protein, 10 aa, Homo sapiens
  misc_feature: Table A; Target 47052; HLA-C*07:04; MORC1; ENSG00000114487; CTA
KVMGQYLVQY

SEQ ID NO: 47053 - protein, 10 aa, Homo sapiens
  misc_feature: Table A; Target 47053; HLA-C*16:04; MORC1; ENSG00000114487; CTA
KVMGQYLVQY

SEQ ID NO: 47054 - protein, 9 aa, Homo sapiens
  misc_feature: Table A; Target 47054; HLA-A*23:01; MORC1; ENSG00000114487; CTA
KYLYVTSSF

SEQ ID NO: 47055 - protein, 9 aa, Homo sapiens
  misc_feature: Table A; Target 47055; HLA-A*24:02; MORC1; ENSG00000114487; CTA
KYLYVTSSF

SEQ ID NO: 47056 - protein, 9 aa, Homo sapiens
  misc_feature: Table A; Target 47056; HLA-A*32:01; MORC1; ENSG00000114487; CTA
KYLYVTSSF

SEQ ID NO: 47057 - protein, 9 aa, Homo sapiens
  misc_feature: Table A; Target 47057; HLA-C*14:02; MORC1; ENSG00000114487; CTA
KYLYVTSSF

SEQ ID NO: 47058 - protein, 10 aa, Homo sapiens
  misc_feature: Table A; Target 47058; HLA-C*05:01; MORC1; ENSG00000114487; CTA
LAEQQPQPQF

SEQ ID NO: 47059 - protein, 8 aa, Homo sapiens
  misc_feature: Table A; Target 47059; HLA-B*51:01; MORC1; ENSG00000114487; CTA
LALLLQKL

SEQ ID NO: 47060 - protein, 9 aa, Homo sapiens
  misc_feature: Table A; Target 47060; HLA-B*07:02; MORC1; ENSG00000114487; CTA
LAMKRSSSL

SEQ ID NO: 47061 - protein, 9 aa, Homo sapiens
  misc_feature: Table A; Target 47061; HLA-B*08:01; MORC1; ENSG00000114487; CTA
LAMKRSSSL

SEQ ID NO: 47062 - protein, 9 aa, Homo sapiens
  misc_feature: Table A; Target 47062; HLA-C*03:03; MORC1; ENSG00000114487; CTA
LAMKRSSSL

SEQ ID NO: 47063 - protein, 9 aa, Homo sapiens
  misc_feature: Table A; Target 47063; HLA-C*03:04; MORC1; ENSG00000114487; CTA
LAMKRSSSL

SEQ ID NO: 47064 - protein, 10 aa, Homo sapiens
  misc_feature: Table A; Target 47064; HLA-A*33:01; MORC1; ENSG00000114487; CTA
LCNDVLAMKR

SEQ ID NO: 47065 - protein, 10 aa, Homo sapiens
  misc_feature: Table A; Target 47065; HLA-B*27:02; MORC1; ENSG00000114487; CTA
LDVFSVDNEK

SEQ ID NO: 47066 - protein, 10 aa, Homo sapiens
  misc_feature: Table A; Target 47066; HLA-B*40:01; MORC1; ENSG00000114487; CTA
LEALLKEDNL

SEQ ID NO: 47067 - protein, 8 aa, Homo sapiens
  misc_feature: Table A; Target 47067; HLA-B*44:02; MORC1; ENSG00000114487; CTA
LEDFPARW

SEQ ID NO: 47068 - protein, 8 aa, Homo sapiens
  misc_feature: Table A; Target 47068; HLA-B*44:03; MORC1; ENSG00000114487; CTA
LEDFPARW

SEQ ID NO: 47069 - protein, 10 aa, Homo sapiens
  misc_feature: Table A; Target 47069; HLA-B*40:01; MORC1; ENSG00000114487; CTA
LEEPALSCEL

SEQ ID NO: 47070 - protein, 11 aa, Homo sapiens
  misc_feature: Table A; Target 47070; HLA-B*40:01; MORC1; ENSG00000114487; CTA
LEQTDTYLEAL

SEQ ID NO: 47071 - protein, 9 aa, Homo sapiens
  misc_feature: Table A; Target 47071; HLA-C*12:03; MORC1; ENSG00000114487; CTA
LGAGVVGIV

SEQ ID NO: 47072 - protein, 9 aa, Homo sapiens
  misc_feature: Table A; Target 47072; HLA-B*15:03; MORC1; ENSG00000114487; CTA
LKHESLSSF

SEQ ID NO: 47073 - protein, 9 aa, Homo sapiens
  misc_feature: Table A; Target 47073; HLA-A*03:01; MORC1; ENSG00000114487; CTA
LLFQNNLNK

SEQ ID NO: 47074 - protein, 10 aa, Homo sapiens
  misc_feature: Table A; Target 47074; HLA-A*02:03; MORC1; ENSG00000114487; CTA
LLFQNNLNKV

SEQ ID NO: 47075 - protein, 10 aa, Homo sapiens
  misc_feature: Table A; Target 47075; HLA-A*02:04; MORC1; ENSG00000114487; CTA
LLFQNNLNKV

SEQ ID NO: 47076 - protein, 9 aa, Homo sapiens
  misc_feature: Table A; Target 47076; HLA-A*02:01; MORC1; ENSG00000114487; CTA
LLGAGVVGI

SEQ ID NO: 47077 - protein, 9 aa, Homo sapiens
  misc_feature: Table A; Target 47077; HLA-A*02:03; MORC1; ENSG00000114487; CTA
LLGAGVVGI

SEQ ID NO: 47078 - protein, 9 aa, Homo sapiens
  misc_feature: Table A; Target 47078; HLA-A*02:04; MORC1; ENSG00000114487; CTA
LLGAGVVGI

SEQ ID NO: 47079 - protein, 9 aa, Homo sapiens
  misc_feature: Table A; Target 47079; HLA-A*01:01; MORC1; ENSG00000114487; CTA
LLKEDNLLF

SEQ ID NO: 47080 - protein, 9 aa, Homo sapiens
  misc_feature: Table A; Target 47080; HLA-A*23:01; MORC1; ENSG00000114487; CTA
LLKEDNLLF

SEQ ID NO: 47081 - protein, 9 aa, Homo sapiens
  misc_feature: Table A; Target 47081; HLA-A*24:02; MORC1; ENSG00000114487; CTA
LLKEDNLLF

SEQ ID NO: 47082 - protein, 9 aa, Homo sapiens
  misc_feature: Table A; Target 47082; HLA-A*29:02; MORC1; ENSG00000114487; CTA
LLKEDNLLF

SEQ ID NO: 47083 - protein, 9 aa, Homo sapiens
  misc_feature: Table A; Target 47083; HLA-A*02:03; MORC1; ENSG00000114487; CTA
LLKVMGQYL

SEQ ID NO: 47084 - protein, 9 aa, Homo sapiens
  misc_feature: Table A; Target 47084; HLA-A*02:01; MORC1; ENSG00000114487; CTA
LLLNGEPEL

SEQ ID NO: 47085 - protein, 9 aa, Homo sapiens
  misc_feature: Table A; Target 47085; HLA-A*02:04; MORC1; ENSG00000114487; CTA
LLLNGEPEL

SEQ ID NO: 47086 - protein, 9 aa, Homo sapiens
  misc_feature: Table A; Target 47086; HLA-B*55:01; MORC1; ENSG00000114487; CTA
LLLNGEPEL

SEQ ID NO: 47087 - protein, 9 aa, Homo sapiens
  misc_feature: Table A; Target 47087; HLA-C*03:04; MORC1; ENSG00000114487; CTA
LLLNGEPEL

SEQ ID NO: 47088 - protein, 9 aa, Homo sapiens
  misc_feature: Table A; Target 47088; HLA-B*08:01; MORC1; ENSG00000114487; CTA
LLNQEKQEL

SEQ ID NO: 47089 - protein, 10 aa, Homo sapiens
  misc_feature: Table A; Target 47089; HLA-A*02:01; MORC1; ENSG00000114487; CTA
LLYFFPEHQL

SEQ ID NO: 47090 - protein, 10 aa, Homo sapiens
  misc_feature: Table A; Target 47090; HLA-A*02:04; MORC1; ENSG00000114487; CTA
LLYFFPEHQL

SEQ ID NO: 47091 - protein, 9 aa, Homo sapiens
  misc_feature: Table A; Target 47091; HLA-B*46:01; MORC1; ENSG00000114487; CTA
LMAGALEDF

SEQ ID NO: 47092 - protein, 9 aa, Homo sapiens
  misc_feature: Table A; Target 47092; HLA-A*33:01; MORC1; ENSG00000114487; CTA
LNKVTIDAR

SEQ ID NO: 47093 - protein, 9 aa, Homo sapiens
  misc_feature: Table A; Target 47093; HLA-A*33:03; MORC1; ENSG00000114487; CTA
LNKVTIDAR

SEQ ID NO: 47094 - protein, 8 aa, Homo sapiens
  misc_feature: Table A; Target 47094; HLA-B*08:01; MORC1; ENSG00000114487; CTA
LNQEKQEL

SEQ ID NO: 47095 - protein, 10 aa, Homo sapiens
  misc_feature: Table A; Target 47095; HLA-B*35:01; MORC1; ENSG00000114487; CTA
LPSELEEPAL

SEQ ID NO: 47096 - protein, 10 aa, Homo sapiens
  misc_feature: Table A; Target 47096; HLA-B*35:03; MORC1; ENSG00000114487; CTA
LPSELEEPAL

SEQ ID NO: 47097 - protein, 10 aa, Homo sapiens
  misc_feature: Table A; Target 47097; HLA-B*55:01; MORC1; ENSG00000114487; CTA
LPSELEEPAL

SEQ ID NO: 47098 - protein, 10 aa, Homo sapiens
  misc_feature: Table A; Target 47098; HLA-B*56:01; MORC1; ENSG00000114487; CTA
LPSELEEPAL

SEQ ID NO: 47099 - protein, 10 aa, Homo sapiens
  misc_feature: Table A; Target 47099; HLA-C*03:03; MORC1; ENSG00000114487; CTA
LPSELEEPAL

SEQ ID NO: 47100 - protein, 9 aa, Homo sapiens
  misc_feature: Table A; Target 47100; HLA-B*07:02; MORC1; ENSG00000114487; CTA
LPSIPLGTM

SEQ ID NO: 47101 - protein, 9 aa, Homo sapiens
  misc_feature: Table A; Target 47101; HLA-B*35:01; MORC1; ENSG00000114487; CTA
LPSIPLGTM

SEQ ID NO: 47102 - protein, 9 aa, Homo sapiens
  misc_feature: Table A; Target 47102; HLA-B*35:03; MORC1; ENSG00000114487; CTA
LPSIPLGTM

SEQ ID NO: 47103 - protein, 9 aa, Homo sapiens
  misc_feature: Table A; Target 47103; HLA-B*51:01; MORC1; ENSG00000114487; CTA
LPSIPLGTM

SEQ ID NO: 47104 - protein, 9 aa, Homo sapiens
  misc_feature: Table A; Target 47104; HLA-B*54:01; MORC1; ENSG00000114487; CTA
LPSIPLGTM

SEQ ID NO: 47105 - protein, 9 aa, Homo sapiens
  misc_feature: Table A; Target 47105; HLA-B*55:01; MORC1; ENSG00000114487; CTA
LPSIPLGTM

SEQ ID NO: 47106 - protein, 9 aa, Homo sapiens
  misc_feature: Table A; Target 47106; HLA-B*56:01; MORC1; ENSG00000114487; CTA
LPSIPLGTM

SEQ ID NO: 47107 - protein, 9 aa, Homo sapiens
  misc_feature: Table A; Target 47107; HLA-C*03:03; MORC1; ENSG00000114487; CTA
LPSIPLGTM

SEQ ID NO: 47108 - protein, 9 aa, Homo sapiens
  misc_feature: Table A; Target 47108; HLA-C*07:02; MORC1; ENSG00000114487; CTA
LPSIPLGTM

SEQ ID NO: 47109 - protein, 8 aa, Homo sapiens
  misc_feature: Table A; Target 47109; HLA-C*16:01; MORC1; ENSG00000114487; CTA
LSSAKDVL

SEQ ID NO: 47110 - protein, 10 aa, Homo sapiens
  misc_feature: Table A; Target 47110; HLA-B*27:02; MORC1; ENSG00000114487; CTA
LSSFELSASR

SEQ ID NO: 47111 - protein, 9 aa, Homo sapiens
  misc_feature: Table A; Target 47111; HLA-A*02:03; MORC1; ENSG00000114487; CTA
LSSGHIARV

SEQ ID NO: 47112 - protein, 9 aa, Homo sapiens
  misc_feature: Table A; Target 47112; HLA-A*24:02; MORC1; ENSG00000114487; CTA
LYFFPEHQL

SEQ ID NO: 47113 - protein, 11 aa, Homo sapiens
  misc_feature: Table A; Target 47113; HLA-A*24:02; MORC1; ENSG00000114487; CTA
LYVTSSFKGAF

SEQ ID NO: 47114 - protein, 10 aa, Homo sapiens
  misc_feature: Table A; Target 47114; HLA-A*26:01; MORC1; ENSG00000114487; CTA
MCFNQIQNTY

SEQ ID NO: 47115 - protein, 10 aa, Homo sapiens
  misc_feature: Table A; Target 47115; HLA-A*29:02; MORC1; ENSG00000114487; CTA
MCFNQIQNTY

SEQ ID NO: 47116 - protein, 10 aa, Homo sapiens
  misc_feature: Table A; Target 47116; HLA-A*30:02; MORC1; ENSG00000114487; CTA
MCFNQIQNTY

SEQ ID NO: 47117 - protein, 10 aa, Homo sapiens
  misc_feature: Table A; Target 47117; HLA-B*15:03; MORC1; ENSG00000114487; CTA
MCFNQIQNTY

SEQ ID NO: 47118 - protein, 10 aa, Homo sapiens
  misc_feature: Table A; Target 47118; HLA-B*35:01; MORC1; ENSG00000114487; CTA
MCFNQIQNTY

SEQ ID NO: 47119 - protein, 10 aa, Homo sapiens
  misc_feature: Table A; Target 47119; HLA-C*16:04; MORC1; ENSG00000114487; CTA
MCFNQIQNTY

SEQ ID NO: 47120 - protein, 11 aa, Homo sapiens
  misc_feature: Table A; Target 47120; HLA-B*49:01; MORC1; ENSG00000114487; CTA
MEDVNLSSGHI

SEQ ID NO: 47121 - protein, 9 aa, Homo sapiens
  misc_feature: Table A; Target 47121; HLA-A*29:02; MORC1; ENSG00000114487; CTA
MELSIIYKY

SEQ ID NO: 47122 - protein, 9 aa, Homo sapiens
  misc_feature: Table A; Target 47122; HLA-A*30:02; MORC1; ENSG00000114487; CTA
MELSIIYKY

SEQ ID NO: 47123 - protein, 9 aa, Homo sapiens
  misc_feature: Table A; Target 47123; HLA-B*18:01; MORC1; ENSG00000114487; CTA
MELSIIYKY

SEQ ID NO: 47124 - protein, 9 aa, Homo sapiens
  misc_feature: Table A; Target 47124; HLA-B*35:01; MORC1; ENSG00000114487; CTA
MELSIIYKY

SEQ ID NO: 47125 - protein, 9 aa, Homo sapiens
  misc_feature: Table A; Target 47125; HLA-B*44:02; MORC1; ENSG00000114487; CTA
MELSIIYKY

SEQ ID NO: 47126 - protein, 9 aa, Homo sapiens
  misc_feature: Table A; Target 47126; HLA-B*44:03; MORC1; ENSG00000114487; CTA
MELSIIYKY

SEQ ID NO: 47127 - protein, 9 aa, Homo sapiens
  misc_feature: Table A; Target 47127; HLA-C*16:04; MORC1; ENSG00000114487; CTA
MELSIIYKY

SEQ ID NO: 47128 - protein, 10 aa, Homo sapiens
  misc_feature: Table A; Target 47128; HLA-B*44:02; MORC1; ENSG00000114487; CTA
MEPSHNKQEF

SEQ ID NO: 47129 - protein, 10 aa, Homo sapiens
  misc_feature: Table A; Target 47129; HLA-B*44:03; MORC1; ENSG00000114487; CTA
MEPSHNKQEF

SEQ ID NO: 47130 - protein, 9 aa, Homo sapiens
  misc_feature: Table A; Target 47130; HLA-B*38:01; MORC1; ENSG00000114487; CTA
MHEKVGSQL

SEQ ID NO: 47131 - protein, 9 aa, Homo sapiens
  misc_feature: Table A; Target 47131; HLA-B*39:01; MORC1; ENSG00000114487; CTA
MHEKVGSQL

SEQ ID NO: 47132 - protein, 10 aa, Homo sapiens
  misc_feature: Table A; Target 47132; HLA-A*03:02; MORC1; ENSG00000114487; CTA
MQQFDVIYGK

SEQ ID NO: 47133 - protein, 10 aa, Homo sapiens
  misc_feature: Table A; Target 47133; HLA-A*11:01; MORC1; ENSG00000114487; CTA
MQQFDVIYGK

SEQ ID NO: 47134 - protein, 10 aa, Homo sapiens
  misc_feature: Table A; Target 47134; HLA-B*27:02; MORC1; ENSG00000114487; CTA
MQQFDVIYGK

SEQ ID NO: 47135 - protein, 9 aa, Homo sapiens
  misc_feature: Table A; Target 47135; HLA-B*35:01; MORC1; ENSG00000114487; CTA
NAQAASWEM

SEQ ID NO: 47136 - protein, 9 aa, Homo sapiens
  misc_feature: Table A; Target 47136; HLA-B*35:03; MORC1; ENSG00000114487; CTA
NAQAASWEM

SEQ ID NO: 47137 - protein, 9 aa, Homo sapiens
  misc_feature: Table A; Target 47137; HLA-B*55:01; MORC1; ENSG00000114487; CTA
NAQAASWEM

SEQ ID NO: 47138 - protein, 9 aa, Homo sapiens
  misc_feature: Table A; Target 47138; HLA-C*07:06; MORC1; ENSG00000114487; CTA
NAQAASWEM

SEQ ID NO: 47139 - protein, 9 aa, Homo sapiens
  misc_feature: Table A; Target 47139; HLA-C*14:02; MORC1; ENSG00000114487; CTA
NAQAASWEM

SEQ ID NO: 47140 - protein, 9 aa, Homo sapiens
  misc_feature: Table A; Target 47140; HLA-C*16:01; MORC1; ENSG00000114487; CTA
NAQAASWEM

SEQ ID NO: 47141 - protein, 11 aa, Homo sapiens
  misc_feature: Table A; Target 47141; HLA-A*33:01; MORC1; ENSG00000114487; CTA
NAQAASWEMKR

SEQ ID NO: 47142 - protein, 9 aa, Homo sapiens
  misc_feature: Table A; Target 47142; HLA-A*33:01; MORC1; ENSG00000114487; CTA
NARDAGAER

SEQ ID NO: 47143 - protein, 9 aa, Homo sapiens
  misc_feature: Table A; Target 47143; HLA-A*33:03; MORC1; ENSG00000114487; CTA
NARDAGAER

SEQ ID NO: 47144 - protein, 9 aa, Homo sapiens
  misc_feature: Table A; Target 47144; HLA-C*07:06; MORC1; ENSG00000114487; CTA
NARDAGAER

SEQ ID NO: 47145 - protein, 10 aa, Homo sapiens
  misc_feature: Table A; Target 47145; HLA-B*07:02; MORC1; ENSG00000114487; CTA
NARDAGAERL

SEQ ID NO: 47146 - protein, 9 aa, Homo sapiens
  misc_feature: Table A; Target 47146; HLA-A*30:01; MORC1; ENSG00000114487; CTA
NEFGYQNDI

SEQ ID NO: 47147 - protein, 9 aa, Homo sapiens
  misc_feature: Table A; Target 47147; HLA-B*18:01; MORC1; ENSG00000114487; CTA
NEFGYQNDI

SEQ ID NO: 47148 - protein, 9 aa, Homo sapiens
  misc_feature: Table A; Target 47148; HLA-B*40:01; MORC1; ENSG00000114487; CTA
NEFGYQNDI

SEQ ID NO: 47149 - protein, 9 aa, Homo sapiens
  misc_feature: Table A; Target 47149; HLA-B*44:03; MORC1; ENSG00000114487; CTA
NEFGYQNDI

SEQ ID NO: 47150 - protein, 9 aa, Homo sapiens
  misc_feature: Table A; Target 47150; HLA-B*49:01; MORC1; ENSG00000114487; CTA
NEFGYQNDI

SEQ ID NO: 47151 - protein, 8 aa, Homo sapiens
  misc_feature: Table A; Target 47151; HLA-B*18:01; MORC1; ENSG00000114487; CTA
NEKLQGGF

SEQ ID NO: 47152 - protein, 8 aa, Homo sapiens
  misc_feature: Table A; Target 47152; HLA-B*37:01; MORC1; ENSG00000114487; CTA
NEKLQGGF

SEQ ID NO: 47153 - protein, 11 aa, Homo sapiens
  misc_feature: Table A; Target 47153; HLA-A*01:01; MORC1; ENSG00000114487; CTA
NIEETDSDVEY

SEQ ID NO: 47154 - protein, 11 aa, Homo sapiens
  misc_feature: Table A; Target 47154; HLA-B*55:01; MORC1; ENSG00000114487; CTA
NIEETDSDVEY

SEQ ID NO: 47155 - protein, 9 aa, Homo sapiens
  misc_feature: Table A; Target 47155; HLA-A*02:03; MORC1; ENSG00000114487; CTA
NLKEKQREL

SEQ ID NO: 47156 - protein, 9 aa, Homo sapiens
  misc_feature: Table A; Target 47156; HLA-B*08:01; MORC1; ENSG00000114487; CTA
NLKEKQREL

SEQ ID NO: 47157 - protein, 8 aa, Homo sapiens
  misc_feature: Table A; Target 47157; HLA-B*08:01; MORC1; ENSG00000114487; CTA
NLRIKLAL

SEQ ID NO: 47158 - protein, 9 aa, Homo sapiens
  misc_feature: Table A; Target 47158; HLA-A*33:01; MORC1; ENSG00000114487; CTA
NLSSGHIAR

SEQ ID NO: 47159 - protein, 9 aa, Homo sapiens
  misc_feature: Table A; Target 47159; HLA-A*68:01; MORC1; ENSG00000114487; CTA
NLSSGHIAR

SEQ ID NO: 47160 - protein, 10 aa, Homo sapiens
  misc_feature: Table A; Target 47160; HLA-A*02:03; MORC1; ENSG00000114487; CTA
NLSSGHIARV

SEQ ID NO: 47161 - protein, 8 aa, Homo sapiens
  misc_feature: Table A; Target 47161; HLA-B*08:01; MORC1; ENSG00000114487; CTA
NNLNKVTI

SEQ ID NO: 47162 - protein, 11 aa, Homo sapiens
  misc_feature: Table A; Target 47162; HLA-A*33:01; MORC1; ENSG00000114487; CTA
NNLNKVTIDAR

SEQ ID NO: 47163 - protein, 10 aa, Homo sapiens
  misc_feature: Table A; Target 47163; HLA-B*54:01; MORC1; ENSG00000114487; CTA
NPWMRIFIQA

SEQ ID NO: 47164 - protein, 8 aa, Homo sapiens
  misc_feature: Table A; Target 47164; HLA-C*14:02; MORC1; ENSG00000114487; CTA
NQIQNTYM

SEQ ID NO: 47165 - protein, 9 aa, Homo sapiens
  misc_feature: Table A; Target 47165; HLA-A*02:01; MORC1; ENSG00000114487; CTA
NQIQNTYMV

SEQ ID NO: 47166 - protein, 9 aa, Homo sapiens
  misc_feature: Table A; Target 47166; HLA-A*02:03; MORC1; ENSG00000114487; CTA
NQIQNTYMV

SEQ ID NO: 47167 - protein, 9 aa, Homo sapiens
  misc_feature: Table A; Target 47167; HLA-A*02:04; MORC1; ENSG00000114487; CTA
NQIQNTYMV

SEQ ID NO: 47168 - protein, 9 aa, Homo sapiens
  misc_feature: Table A; Target 47168; HLA-A*30:01; MORC1; ENSG00000114487; CTA
NQIQNTYMV

SEQ ID NO: 47169 - protein, 9 aa, Homo sapiens
  misc_feature: Table A; Target 47169; HLA-B*13:02; MORC1; ENSG00000114487; CTA
NQIQNTYMV

SEQ ID NO: 47170 - protein, 9 aa, Homo sapiens
  misc_feature: Table A; Target 47170; HLA-B*27:05; MORC1; ENSG00000114487; CTA
NQIQNTYMV

SEQ ID NO: 47171 - protein, 9 aa, Homo sapiens
  misc_feature: Table A; Target 47171; HLA-B*39:01; MORC1; ENSG00000114487; CTA
NQIQNTYMV

SEQ ID NO: 47172 - protein, 11 aa, Homo sapiens
  misc_feature: Table A; Target 47172; HLA-A*30:02; MORC1; ENSG00000114487; CTA
NQIQNTYMVQY

SEQ ID NO: 47173 - protein, 11 aa, Homo sapiens
  misc_feature: Table A; Target 47173; HLA-B*15:01; MORC1; ENSG00000114487; CTA
NQIQNTYMVQY

SEQ ID NO: 47174 - protein, 11 aa, Homo sapiens
  misc_feature: Table A; Target 47174; HLA-C*16:04; MORC1; ENSG00000114487; CTA
NQIQNTYMVQY

SEQ ID NO: 47175 - protein, 9 aa, Homo sapiens
  misc_feature: Table A; Target 47175; HLA-C*16:01; MORC1; ENSG00000114487; CTA
NSQQQRIPV

SEQ ID NO: 47176 - protein, 8 aa, Homo sapiens
  misc_feature: Table A; Target 47176; HLA-C*16:01; MORC1; ENSG00000114487; CTA
NSTTHSFL

SEQ ID NO: 47177 - protein, 9 aa, Homo sapiens
  misc_feature: Table A; Target 47177; HLA-A*29:02; MORC1; ENSG00000114487; CTA
NSTTHSFLF

SEQ ID NO: 47178 - protein, 9 aa, Homo sapiens
  misc_feature: Table A; Target 47178; HLA-B*57:01; MORC1; ENSG00000114487; CTA
NSTTHSFLF

SEQ ID NO: 47179 - protein, 9 aa, Homo sapiens
  misc_feature: Table A; Target 47179; HLA-C*16:01; MORC1; ENSG00000114487; CTA
NSTTHSFLF

SEQ ID NO: 47180 - protein, 10 aa, Homo sapiens
  misc_feature: Table A; Target 47180; HLA-A*01:01; MORC1; ENSG00000114487; CTA
NTDVSLKQEK

SEQ ID NO: 47181 - protein, 9 aa, Homo sapiens
  misc_feature: Table A; Target 47181; HLA-B*35:03; MORC1; ENSG00000114487; CTA
NTSDSDIIL

SEQ ID NO: 47182 - protein, 10 aa, Homo sapiens
  misc_feature: Table A; Target 47182; HLA-A*68:02; MORC1; ENSG00000114487; CTA
NTSDSDIILV

SEQ ID NO: 47183 - protein, 9 aa, Homo sapiens
  misc_feature: Table A; Target 47183; HLA-A*03:02; MORC1; ENSG00000114487; CTA
NTYMVQYEK

SEQ ID NO: 47184 - protein, 9 aa, Homo sapiens
  misc_feature: Table A; Target 47184; HLA-A*11:01; MORC1; ENSG00000114487; CTA
NTYMVQYEK

SEQ ID NO: 47185 - protein, 9 aa, Homo sapiens
  misc_feature: Table A; Target 47185; HLA-A*68:01; MORC1; ENSG00000114487; CTA
NTYMVQYEK

SEQ ID NO: 47186 - protein, 10 aa, Homo sapiens
  misc_feature: Table A; Target 47186; HLA-A*68:01; MORC1; ENSG00000114487; CTA
NTYMVQYEKK

SEQ ID NO: 47187 - protein, 9 aa, Homo sapiens
  misc_feature: Table A; Target 47187; HLA-C*01:02; MORC1; ENSG00000114487; CTA
NVPMEDVNL

SEQ ID NO: 47188 - protein, 9 aa, Homo sapiens
  misc_feature: Table A; Target 47188; HLA-A*02:01; MORC1; ENSG00000114487; CTA
NVQEYNHLL

SEQ ID NO: 47189 - protein, 9 aa, Homo sapiens
  misc_feature: Table A; Target 47189; HLA-A*02:04; MORC1; ENSG00000114487; CTA
NVQEYNHLL

SEQ ID NO: 47190 - protein, 9 aa, Homo sapiens
  misc_feature: Table A; Target 47190; HLA-A*02:07; MORC1; ENSG00000114487; CTA
NVQEYNHLL

SEQ ID NO: 47191 - protein, 9 aa, Homo sapiens
  misc_feature: Table A; Target 47191; HLA-A*68:02; MORC1; ENSG00000114487; CTA
NVQEYNHLL

SEQ ID NO: 47192 - protein, 9 aa, Homo sapiens
  misc_feature: Table A; Target 47192; HLA-B*35:03; MORC1; ENSG00000114487; CTA
NVQEYNHLL

SEQ ID NO: 47193 - protein, 9 aa, Homo sapiens
  misc_feature: Table A; Target 47193; HLA-B*38:01; MORC1; ENSG00000114487; CTA
NVQEYNHLL

SEQ ID NO: 47194 - protein, 9 aa, Homo sapiens
  misc_feature: Table A; Target 47194; HLA-B*55:01; MORC1; ENSG00000114487; CTA
NVQEYNHLL

SEQ ID NO: 47195 - protein, 9 aa, Homo sapiens
  misc_feature: Table A; Target 47195; HLA-C*01:02; MORC1; ENSG00000114487; CTA
NVQEYNHLL

SEQ ID NO: 47196 - protein, 9 aa, Homo sapiens
  misc_feature: Table A; Target 47196; HLA-C*16:02; MORC1; ENSG00000114487; CTA
NVQEYNHLL

SEQ ID NO: 47197 - protein, 10 aa, Homo sapiens
  misc_feature: Table A; Target 47197; HLA-A*03:02; MORC1; ENSG00000114487; CTA
NVQEYNHLLK

SEQ ID NO: 47198 - protein, 10 aa, Homo sapiens
  misc_feature: Table A; Target 47198; HLA-A*11:01; MORC1; ENSG00000114487; CTA
NVQEYNHLLK

SEQ ID NO: 47199 - protein, 10 aa, Homo sapiens
  misc_feature: Table A; Target 47199; HLA-A*33:01; MORC1; ENSG00000114487; CTA
NVQEYNHLLK

SEQ ID NO: 47200 - protein, 8 aa, Homo sapiens
  misc_feature: Table A; Target 47200; HLA-C*14:02; MORC1; ENSG00000114487; CTA
NYQEKEFF

SEQ ID NO: 47201 - protein, 8 aa, Homo sapiens
  misc_feature: Table A; Target 47201; HLA-B*07:02; MORC1; ENSG00000114487; CTA
PALQRAQL

SEQ ID NO: 47202 - protein, 9 aa, Homo sapiens
  misc_feature: Table A; Target 47202; HLA-A*31:01; MORC1; ENSG00000114487; CTA
PLNSFQYQR

SEQ ID NO: 47203 - protein, 9 aa, Homo sapiens
  misc_feature: Table A; Target 47203; HLA-A*31:01; MORC1; ENSG00000114487; CTA
QAASWEMKR

SEQ ID NO: 47204 - protein, 9 aa, Homo sapiens
  misc_feature: Table A; Target 47204; HLA-A*33:03; MORC1; ENSG00000114487; CTA
QAASWEMKR

SEQ ID NO: 47205 - protein, 9 aa, Homo sapiens
  misc_feature: Table A; Target 47205; HLA-A*68:01; MORC1; ENSG00000114487; CTA
QAASWEMKR

SEQ ID NO: 47206 - protein, 9 aa, Homo sapiens
  misc_feature: Table A; Target 47206; HLA-C*07:06; MORC1; ENSG00000114487; CTA
QAASWEMKR

SEQ ID NO: 47207 - protein, 8 aa, Homo sapiens
  misc_feature: Table A; Target 47207; HLA-B*51:01; MORC1; ENSG00000114487; CTA
QAMGIPFI

SEQ ID NO: 47208 - protein, 9 aa, Homo sapiens
  misc_feature: Table A; Target 47208; HLA-B*13:02; MORC1; ENSG00000114487; CTA
QAMGIPFII

SEQ ID NO: 47209 - protein, 9 aa, Homo sapiens
  misc_feature: Table A; Target 47209; HLA-B*51:01; MORC1; ENSG00000114487; CTA
QAMGIPFII

SEQ ID NO: 47210 - protein, 9 aa, Homo sapiens
  misc_feature: Table A; Target 47210; HLA-C*12:03; MORC1; ENSG00000114487; CTA
QAMGIPFII

SEQ ID NO: 47211 - protein, 9 aa, Homo sapiens
  misc_feature: Table A; Target 47211; HLA-A*25:01; MORC1; ENSG00000114487; CTA
QEFLNVQEY

SEQ ID NO: 47212 - protein, 9 aa, Homo sapiens
  misc_feature: Table A; Target 47212; HLA-A*26:01; MORC1; ENSG00000114487; CTA
QEFLNVQEY

SEQ ID NO: 47213 - protein, 9 aa, Homo sapiens
  misc_feature: Table A; Target 47213; HLA-A*30:01; MORC1; ENSG00000114487; CTA
QEFLNVQEY

SEQ ID NO: 47214 - protein, 9 aa, Homo sapiens
  misc_feature: Table A; Target 47214; HLA-A*30:02; MORC1; ENSG00000114487; CTA
QEFLNVQEY

SEQ ID NO: 47215 - protein, 9 aa, Homo sapiens
  misc_feature: Table A; Target 47215; HLA-B*15:01; MORC1; ENSG00000114487; CTA
QEFLNVQEY

SEQ ID NO: 47216 - protein, 9 aa, Homo sapiens
  misc_feature: Table A; Target 47216; HLA-B*15:03; MORC1; ENSG00000114487; CTA
QEFLNVQEY

SEQ ID NO: 47217 - protein, 9 aa, Homo sapiens
  misc_feature: Table A; Target 47217; HLA-B*27:02; MORC1; ENSG00000114487; CTA
QEFLNVQEY

SEQ ID NO: 47218 - protein, 9 aa, Homo sapiens
  misc_feature: Table A; Target 47218; HLA-B*27:05; MORC1; ENSG00000114487; CTA
QEFLNVQEY

SEQ ID NO: 47219 - protein, 9 aa, Homo sapiens
  misc_feature: Table A; Target 47219; HLA-B*35:01; MORC1; ENSG00000114487; CTA
QEFLNVQEY

SEQ ID NO: 47220 - protein, 9 aa, Homo sapiens
  misc_feature: Table A; Target 47220; HLA-B*37:01; MORC1; ENSG00000114487; CTA
QEFLNVQEY

SEQ ID NO: 47221 - protein, 9 aa, Homo sapiens
  misc_feature: Table A; Target 47221; HLA-B*40:01; MORC1; ENSG00000114487; CTA
QEFLNVQEY

SEQ ID NO: 47222 - protein, 9 aa, Homo sapiens
  misc_feature: Table A; Target 47222; HLA-B*44:02; MORC1; ENSG00000114487; CTA
QEFLNVQEY

SEQ ID NO: 47223 - protein, 9 aa, Homo sapiens
  misc_feature: Table A; Target 47223; HLA-B*44:03; MORC1; ENSG00000114487; CTA
QEFLNVQEY

SEQ ID NO: 47224 - protein, 9 aa, Homo sapiens
  misc_feature: Table A; Target 47224; HLA-B*49:01; MORC1; ENSG00000114487; CTA
QEFLNVQEY

SEQ ID NO: 47225 - protein, 9 aa, Homo sapiens
  misc_feature: Table A; Target 47225; HLA-C*02:02; MORC1; ENSG00000114487; CTA
QEFLNVQEY

SEQ ID NO: 47226 - protein, 9 aa, Homo sapiens
  misc_feature: Table A; Target 47226; HLA-C*07:01; MORC1; ENSG00000114487; CTA
QEFLNVQEY

SEQ ID NO: 47227 - protein, 9 aa, Homo sapiens
  misc_feature: Table A; Target 47227; HLA-C*07:04; MORC1; ENSG00000114487; CTA
QEFLNVQEY

SEQ ID NO: 47228 - protein, 9 aa, Homo sapiens
  misc_feature: Table A; Target 47228; HLA-C*12:03; MORC1; ENSG00000114487; CTA
QEFLNVQEY

SEQ ID NO: 47229 - protein, 9 aa, Homo sapiens
  misc_feature: Table A; Target 47229; HLA-C*14:02; MORC1; ENSG00000114487; CTA
QEFLNVQEY

SEQ ID NO: 47230 - protein, 9 aa, Homo sapiens
  misc_feature: Table A; Target 47230; HLA-C*16:01; MORC1; ENSG00000114487; CTA
QEFLNVQEY

SEQ ID NO: 47231 - protein, 9 aa, Homo sapiens
  misc_feature: Table A; Target 47231; HLA-C*16:02; MORC1; ENSG00000114487; CTA
QEFLNVQEY

SEQ ID NO: 47232 - protein, 9 aa, Homo sapiens
  misc_feature: Table A; Target 47232; HLA-C*16:04; MORC1; ENSG00000114487; CTA
QEFLNVQEY

SEQ ID NO: 47233 - protein, 9 aa, Homo sapiens
  misc_feature: Table A; Target 47233; HLA-B*44:02; MORC1; ENSG00000114487; CTA
QEKEFFDIW

SEQ ID NO: 47234 - protein, 9 aa, Homo sapiens
  misc_feature: Table A; Target 47234; HLA-A*30:01; MORC1; ENSG00000114487; CTA
QEKKEIPLL

SEQ ID NO: 47235 - protein, 9 aa, Homo sapiens
  misc_feature: Table A; Target 47235; HLA-B*40:01; MORC1; ENSG00000114487; CTA
QEKKEIPLL

SEQ ID NO: 47236 - protein, 9 aa, Homo sapiens
  misc_feature: Table A; Target 47236; HLA-B*40:02; MORC1; ENSG00000114487; CTA
QEKKEIPLL

SEQ ID NO: 47237 - protein, 9 aa, Homo sapiens
  misc_feature: Table A; Target 47237; HLA-B*44:02; MORC1; ENSG00000114487; CTA
QEKKEIPLL

SEQ ID NO: 47238 - protein, 9 aa, Homo sapiens
  misc_feature: Table A; Target 47238; HLA-A*30:01; MORC1; ENSG00000114487; CTA
QEYNHLLKV

SEQ ID NO: 47239 - protein, 9 aa, Homo sapiens
  misc_feature: Table A; Target 47239; HLA-B*44:03; MORC1; ENSG00000114487; CTA
QEYNHLLKV

SEQ ID NO: 47240 - protein, 9 aa, Homo sapiens
  misc_feature: Table A; Target 47240; HLA-B*49:01; MORC1; ENSG00000114487; CTA
QEYNHLLKV

SEQ ID NO: 47241 - protein, 10 aa, Homo sapiens
  misc_feature: Table A; Target 47241; HLA-B*44:02; MORC1; ENSG00000114487; CTA
QEYNHLLKVM

SEQ ID NO: 47242 - protein, 10 aa, Homo sapiens
  misc_feature: Table A; Target 47242; HLA-B*44:03; MORC1; ENSG00000114487; CTA
QEYNHLLKVM

SEQ ID NO: 47243 - protein, 8 aa, Homo sapiens
  misc_feature: Table A; Target 47243; HLA-B*27:02; MORC1; ENSG00000114487; CTA
QFDVIYGK

SEQ ID NO: 47244 - protein, 8 aa, Homo sapiens
  misc_feature: Table A; Target 47244; HLA-A*02:03; MORC1; ENSG00000114487; CTA
QIANITTV

SEQ ID NO: 47245 - protein, 9 aa, Homo sapiens
  misc_feature: Table A; Target 47245; HLA-A*23:01; MORC1; ENSG00000114487; CTA
QIANITTVW

SEQ ID NO: 47246 - protein, 9 aa, Homo sapiens
  misc_feature: Table A; Target 47246; HLA-A*24:02; MORC1; ENSG00000114487; CTA
QIANITTVW

SEQ ID NO: 47247 - protein, 9 aa, Homo sapiens
  misc_feature: Table A; Target 47247; HLA-A*25:01; MORC1; ENSG00000114487; CTA
QIANITTVW

SEQ ID NO: 47248 - protein, 9 aa, Homo sapiens
  misc_feature: Table A; Target 47248; HLA-A*26:01; MORC1; ENSG00000114487; CTA
QIANITTVW

SEQ ID NO: 47249 - protein, 9 aa, Homo sapiens
  misc_feature: Table A; Target 47249; HLA-A*32:01; MORC1; ENSG00000114487; CTA
QIANITTVW

SEQ ID NO: 47250 - protein, 9 aa, Homo sapiens
  misc_feature: Table A; Target 47250; HLA-A*33:03; MORC1; ENSG00000114487; CTA
QIANITTVW

SEQ ID NO: 47251 - protein, 9 aa, Homo sapiens
  misc_feature: Table A; Target 47251; HLA-A*68:01; MORC1; ENSG00000114487; CTA
QIANITTVW

SEQ ID NO: 47252 - protein, 9 aa, Homo sapiens
  misc_feature: Table A; Target 47252; HLA-A*68:02; MORC1; ENSG00000114487; CTA
QIANITTVW

SEQ ID NO: 47253 - protein, 9 aa, Homo sapiens
  misc_feature: Table A; Target 47253; HLA-B*15:01; MORC1; ENSG00000114487; CTA
QIANITTVW

SEQ ID NO: 47254 - protein, 9 aa, Homo sapiens
  misc_feature: Table A; Target 47254; HLA-B*15:03; MORC1; ENSG00000114487; CTA
QIANITTVW

SEQ ID NO: 47255 - protein, 9 aa, Homo sapiens
  misc_feature: Table A; Target 47255; HLA-B*35:01; MORC1; ENSG00000114487; CTA
QIANITTVW

SEQ ID NO: 47256 - protein, 9 aa, Homo sapiens
  misc_feature: Table A; Target 47256; HLA-B*38:01; MORC1; ENSG00000114487; CTA
QIANITTVW

SEQ ID NO: 47257 - protein, 9 aa, Homo sapiens
  misc_feature: Table A; Target 47257; HLA-B*44:02; MORC1; ENSG00000114487; CTA
QIANITTVW

SEQ ID NO: 47258 - protein, 9 aa, Homo sapiens
  misc_feature: Table A; Target 47258; HLA-B*44:03; MORC1; ENSG00000114487; CTA
QIANITTVW

SEQ ID NO: 47259 - protein, 9 aa, Homo sapiens
  misc_feature: Table A; Target 47259; HLA-B*57:01; MORC1; ENSG00000114487; CTA
QIANITTVW

SEQ ID NO: 47260 - protein, 9 aa, Homo sapiens
  misc_feature: Table A; Target 47260; HLA-B*58:01; MORC1; ENSG00000114487; CTA
QIANITTVW

SEQ ID NO: 47261 - protein, 9 aa, Homo sapiens
  misc_feature: Table A; Target 47261; HLA-C*02:02; MORC1; ENSG00000114487; CTA
QIANITTVW

SEQ ID NO: 47262 - protein, 9 aa, Homo sapiens
  misc_feature: Table A; Target 47262; HLA-C*07:04; MORC1; ENSG00000114487; CTA
QIANITTVW

SEQ ID NO: 47263 - protein, 9 aa, Homo sapiens
  misc_feature: Table A; Target 47263; HLA-C*07:06; MORC1; ENSG00000114487; CTA
QIANITTVW

SEQ ID NO: 47264 - protein, 9 aa, Homo sapiens
  misc_feature: Table A; Target 47264; HLA-C*12:03; MORC1; ENSG00000114487; CTA
QIANITTVW

SEQ ID NO: 47265 - protein, 9 aa, Homo sapiens
  misc_feature: Table A; Target 47265; HLA-C*16:04; MORC1; ENSG00000114487; CTA
QIANITTVW

SEQ ID NO: 47266 - protein, 10 aa, Homo sapiens
  misc_feature: Table A; Target 47266; HLA-A*68:01; MORC1; ENSG00000114487; CTA
QIANITTVWR

SEQ ID NO: 47267 - protein, 10 aa, Homo sapiens
  misc_feature: Table A; Target 47267; HLA-A*03:02; MORC1; ENSG00000114487; CTA
QIQNTYMVQY

SEQ ID NO: 47268 - protein, 10 aa, Homo sapiens
  misc_feature: Table A; Target 47268; HLA-A*29:02; MORC1; ENSG00000114487; CTA
QIQNTYMVQY

SEQ ID NO: 47269 - protein, 10 aa, Homo sapiens
  misc_feature: Table A; Target 47269; HLA-A*30:02; MORC1; ENSG00000114487; CTA
QIQNTYMVQY

SEQ ID NO: 47270 - protein, 10 aa, Homo sapiens
  misc_feature: Table A; Target 47270; HLA-C*07:04; MORC1; ENSG00000114487; CTA
QIQNTYMVQY

SEQ ID NO: 47271 - protein, 8 aa, Homo sapiens
  misc_feature: Table A; Target 47271; HLA-B*08:01; MORC1; ENSG00000114487; CTA
QLKLKSLL

SEQ ID NO: 47272 - protein, 9 aa, Homo sapiens
  misc_feature: Table A; Target 47272; HLA-A*01:01; MORC1; ENSG00000114487; CTA
QLRESVIKY

SEQ ID NO: 47273 - protein, 9 aa, Homo sapiens
  misc_feature: Table A; Target 47273; HLA-A*03:01; MORC1; ENSG00000114487; CTA
QLRESVIKY

SEQ ID NO: 47274 - protein, 9 aa, Homo sapiens
  misc_feature: Table A; Target 47274; HLA-A*26:01; MORC1; ENSG00000114487; CTA
QLRESVIKY

SEQ ID NO: 47275 - protein, 9 aa, Homo sapiens
  misc_feature: Table A; Target 47275; HLA-A*29:02; MORC1; ENSG00000114487; CTA
QLRESVIKY

SEQ ID NO: 47276 - protein, 9 aa, Homo sapiens
  misc_feature: Table A; Target 47276; HLA-A*30:02; MORC1; ENSG00000114487; CTA
QLRESVIKY

SEQ ID NO: 47277 - protein, 9 aa, Homo sapiens
  misc_feature: Table A; Target 47277; HLA-B*15:01; MORC1; ENSG00000114487; CTA
QLRESVIKY

SEQ ID NO: 47278 - protein, 9 aa, Homo sapiens
  misc_feature: Table A; Target 47278; HLA-B*15:03; MORC1; ENSG00000114487; CTA
QLRESVIKY

SEQ ID NO: 47279 - protein, 9 aa, Homo sapiens
  misc_feature: Table A; Target 47279; HLA-B*46:01; MORC1; ENSG00000114487; CTA
QLRESVIKY

SEQ ID NO: 47280 - protein, 9 aa, Homo sapiens
  misc_feature: Table A; Target 47280; HLA-C*07:04; MORC1; ENSG00000114487; CTA
QLRESVIKY

SEQ ID NO: 47281 - protein, 9 aa, Homo sapiens
  misc_feature: Table A; Target 47281; HLA-B*54:01; MORC1; ENSG00000114487; CTA
QPQPQFIPV

SEQ ID NO: 47282 - protein, 9 aa, Homo sapiens
  misc_feature: Table A; Target 47282; HLA-B*56:01; MORC1; ENSG00000114487; CTA
QPQPQFIPV

SEQ ID NO: 47283 - protein, 9 aa, Homo sapiens
  misc_feature: Table A; Target 47283; HLA-A*03:01; MORC1; ENSG00000114487; CTA
QQFDVIYGK

SEQ ID NO: 47284 - protein, 9 aa, Homo sapiens
  misc_feature: Table A; Target 47284; HLA-A*03:02; MORC1; ENSG00000114487; CTA
QQFDVIYGK

SEQ ID NO: 47285 - protein, 9 aa, Homo sapiens
  misc_feature: Table A; Target 47285; HLA-A*11:01; MORC1; ENSG00000114487; CTA
QQFDVIYGK

SEQ ID NO: 47286 - protein, 9 aa, Homo sapiens
  misc_feature: Table A; Target 47286; HLA-A*31:01; MORC1; ENSG00000114487; CTA
QQFDVIYGK

SEQ ID NO: 47287 - protein, 9 aa, Homo sapiens
  misc_feature: Table A; Target 47287; HLA-B*13:02; MORC1; ENSG00000114487; CTA
QQFDVIYGK

SEQ ID NO: 47288 - protein, 9 aa, Homo sapiens
  misc_feature: Table A; Target 47288; HLA-B*27:05; MORC1; ENSG00000114487; CTA
QQFDVIYGK

SEQ ID NO: 47289 - protein, 9 aa, Homo sapiens
  misc_feature: Table A; Target 47289; HLA-A*02:04; MORC1; ENSG00000114487; CTA
QQQRIPVAL

SEQ ID NO: 47290 - protein, 9 aa, Homo sapiens
  misc_feature: Table A; Target 47290; HLA-A*32:01; MORC1; ENSG00000114487; CTA
QQQRIPVAL

SEQ ID NO: 47291 - protein, 9 aa, Homo sapiens
  misc_feature: Table A; Target 47291; HLA-B*13:02; MORC1; ENSG00000114487; CTA
QQQRIPVAL

SEQ ID NO: 47292 - protein, 9 aa, Homo sapiens
  misc_feature: Table A; Target 47292; HLA-B*15:01; MORC1; ENSG00000114487; CTA
QQQRIPVAL

SEQ ID NO: 47293 - protein, 9 aa, Homo sapiens
  misc_feature: Table A; Target 47293; HLA-B*15:03; MORC1; ENSG00000114487; CTA
QQQRIPVAL

SEQ ID NO: 47294 - protein, 9 aa, Homo sapiens
  misc_feature: Table A; Target 47294; HLA-B*27:05; MORC1; ENSG00000114487; CTA
QQQRIPVAL

SEQ ID NO: 47295 - protein, 9 aa, Homo sapiens
  misc_feature: Table A; Target 47295; HLA-B*38:01; MORC1; ENSG00000114487; CTA
QQQRIPVAL

SEQ ID NO: 47296 - protein, 9 aa, Homo sapiens
  misc_feature: Table A; Target 47296; HLA-B*39:01; MORC1; ENSG00000114487; CTA
QQQRIPVAL

SEQ ID NO: 47297 - protein, 8 aa, Homo sapiens
  misc_feature: Table A; Target 47297; HLA-B*08:01; MORC1; ENSG00000114487; CTA
QQRIPVAL

SEQ ID NO: 47298 - protein, 8 aa, Homo sapiens
  misc_feature: Table A; Target 47298; HLA-B*15:01; MORC1; ENSG00000114487; CTA
QQRIPVAL

SEQ ID NO: 47299 - protein, 8 aa, Homo sapiens
  misc_feature: Table A; Target 47299; HLA-B*15:03; MORC1; ENSG00000114487; CTA
QQRIPVAL

SEQ ID NO: 47300 - protein, 10 aa, Homo sapiens
  misc_feature: Table A; Target 47300; HLA-A*68:01; MORC1; ENSG00000114487; CTA
QSIIYDSNTR

SEQ ID NO: 47301 - protein, 9 aa, Homo sapiens
  misc_feature: Table A; Target 47301; HLA-A*32:01; MORC1; ENSG00000114487; CTA
QSTPVKETV

SEQ ID NO: 47302 - protein, 9 aa, Homo sapiens
  misc_feature: Table A; Target 47302; HLA-A*68:02; MORC1; ENSG00000114487; CTA
QSTPVKETV

SEQ ID NO: 47303 - protein, 9 aa, Homo sapiens
  misc_feature: Table A; Target 47303; HLA-B*13:02; MORC1; ENSG00000114487; CTA
QSTPVKETV

SEQ ID NO: 47304 - protein, 9 aa, Homo sapiens
  misc_feature: Table A; Target 47304; HLA-B*58:01; MORC1; ENSG00000114487; CTA
QSTPVKETV

SEQ ID NO: 47305 - protein, 9 aa, Homo sapiens
  misc_feature: Table A; Target 47305; HLA-C*16:01; MORC1; ENSG00000114487; CTA
QSTPVKETV

SEQ ID NO: 47306 - protein, 9 aa, Homo sapiens
  misc_feature: Table A; Target 47306; HLA-C*16:02; MORC1; ENSG00000114487; CTA
QSTPVKETV

SEQ ID NO: 47307 - protein, 9 aa, Homo sapiens
  misc_feature: Table A; Target 47307; HLA-C*16:04; MORC1; ENSG00000114487; CTA
QSTPVKETV

SEQ ID NO: 47308 - protein, 10 aa, Homo sapiens
  misc_feature: Table A; Target 47308; HLA-C*07:06; MORC1; ENSG00000114487; CTA
QSTPVKETVR

SEQ ID NO: 47309 - protein, 9 aa, Homo sapiens
  misc_feature: Table A; Target 47309; HLA-A*01:01; MORC1; ENSG00000114487; CTA
QTDTYLEAL

SEQ ID NO: 47310 - protein, 10 aa, Homo sapiens
  misc_feature: Table A; Target 47310; HLA-A*01:01; MORC1; ENSG00000114487; CTA
QTDTYLEALL

SEQ ID NO: 47311 - protein, 9 aa, Homo sapiens
  misc_feature: Table A; Target 47311; HLA-A*03:02; MORC1; ENSG00000114487; CTA
RALEDVEAK

SEQ ID NO: 47312 - protein, 9 aa, Homo sapiens
  misc_feature: Table A; Target 47312; HLA-A*11:01; MORC1; ENSG00000114487; CTA
RALEDVEAK

SEQ ID NO: 47313 - protein, 9 aa, Homo sapiens
  misc_feature: Table A; Target 47313; HLA-B*27:02; MORC1; ENSG00000114487; CTA
RALEDVEAK

SEQ ID NO: 47314 - protein, 11 aa, Homo sapiens
  misc_feature: Table A; Target 47314; HLA-A*03:02; MORC1; ENSG00000114487; CTA
RALEDVEAKQK

SEQ ID NO: 47315 - protein, 11 aa, Homo sapiens
  misc_feature: Table A; Target 47315; HLA-A*11:01; MORC1; ENSG00000114487; CTA
RALEDVEAKQK

SEQ ID NO: 47316 - protein, 9 aa, Homo sapiens
  misc_feature: Table A; Target 47316; HLA-B*07:02; MORC1; ENSG00000114487; CTA
RAQPTEGCL

SEQ ID NO: 47317 - protein, 9 aa, Homo sapiens
  misc_feature: Table A; Target 47317; HLA-C*03:04; MORC1; ENSG00000114487; CTA
RAQPTEGCL

SEQ ID NO: 47318 - protein, 10 aa, Homo sapiens
  misc_feature: Table A; Target 47318; HLA-A*03:02; MORC1; ENSG00000114487; CTA
RAQPTEGCLK

SEQ ID NO: 47319 - protein, 10 aa, Homo sapiens
  misc_feature: Table A; Target 47319; HLA-A*11:01; MORC1; ENSG00000114487; CTA
RAQPTEGCLK

SEQ ID NO: 47320 - protein, 8 aa, Homo sapiens
  misc_feature: Table A; Target 47320; HLA-B*15:03; MORC1; ENSG00000114487; CTA
RAYTSVLY

SEQ ID NO: 47321 - protein, 9 aa, Homo sapiens
  misc_feature: Table A; Target 47321; HLA-A*03:01; MORC1; ENSG00000114487; CTA
RAYTSVLYF

SEQ ID NO: 47322 - protein, 9 aa, Homo sapiens
  misc_feature: Table A; Target 47322; HLA-B*57:01; MORC1; ENSG00000114487; CTA
RAYTSVLYF

SEQ ID NO: 47323 - protein, 9 aa, Homo sapiens
  misc_feature: Table A; Target 47323; HLA-C*02:02; MORC1; ENSG00000114487; CTA
RAYTSVLYF

SEQ ID NO: 47324 - protein, 8 aa, Homo sapiens
  misc_feature: Table A; Target 47324; HLA-B*37:01; MORC1; ENSG00000114487; CTA
RDAGAERL

SEQ ID NO: 47325 - protein, 9 aa, Homo sapiens
  misc_feature: Table A; Target 47325; HLA-B*37:01; MORC1; ENSG00000114487; CTA
RELKTARTL

SEQ ID NO: 47326 - protein, 11 aa, Homo sapiens
  misc_feature: Table A; Target 47326; HLA-B*44:02; MORC1; ENSG00000114487; CTA
RESVTDDPQKF

SEQ ID NO: 47327 - protein, 11 aa, Homo sapiens
  misc_feature: Table A; Target 47327; HLA-B*44:03; MORC1; ENSG00000114487; CTA
RESVTDDPQKF

SEQ ID NO: 47328 - protein, 10 aa, Homo sapiens
  misc_feature: Table A; Target 47328; HLA-A*03:01; MORC1; ENSG00000114487; CTA
RIFIQAKRVK

SEQ ID NO: 47329 - protein, 9 aa, Homo sapiens
  misc_feature: Table A; Target 47329; HLA-B*57:01; MORC1; ENSG00000114487; CTA
RIGKDFILF

SEQ ID NO: 47330 - protein, 10 aa, Homo sapiens
  misc_feature: Table A; Target 47330; HLA-A*02:07; MORC1; ENSG00000114487; CTA
RIPVALPENV

SEQ ID NO: 47331 - protein, 11 aa, Homo sapiens
  misc_feature: Table A; Target 47331; HLA-A*03:02; MORC1; ENSG00000114487; CTA
RLDVFSVDNEK

SEQ ID NO: 47332 - protein, 9 aa, Homo sapiens
  misc_feature: Table A; Target 47332; HLA-A*03:02; MORC1; ENSG00000114487; CTA
RLPLEKNEK

SEQ ID NO: 47333 - protein, 9 aa, Homo sapiens
  misc_feature: Table A; Target 47333; HLA-B*13:02; MORC1; ENSG00000114487; CTA
RQAMGIPFI

SEQ ID NO: 47334 - protein, 9 aa, Homo sapiens
  misc_feature: Table A; Target 47334; HLA-A*30:02; MORC1; ENSG00000114487; CTA
RSQAGMFIY

SEQ ID NO: 47335 - protein, 9 aa, Homo sapiens
  misc_feature: Table A; Target 47335; HLA-B*57:01; MORC1; ENSG00000114487; CTA
RSQAGMFIY

SEQ ID NO: 47336 - protein, 9 aa, Homo sapiens
  misc_feature: Table A; Target 47336; HLA-B*58:01; MORC1; ENSG00000114487; CTA
RSQAGMFIY

SEQ ID NO: 47337 - protein, 11 aa, Homo sapiens
  misc_feature: Table A; Target 47337; HLA-B*57:01; MORC1; ENSG00000114487; CTA
RSQIANITTVW

SEQ ID NO: 47338 - protein, 11 aa, Homo sapiens
  misc_feature: Table A; Target 47338; HLA-B*58:01; MORC1; ENSG00000114487; CTA
RSQIANITTVW

SEQ ID NO: 47339 - protein, 8 aa, Homo sapiens
  misc_feature: Table A; Target 47339; HLA-B*57:01; MORC1; ENSG00000114487; CTA
RSSSLPSW

SEQ ID NO: 47340 - protein, 8 aa, Homo sapiens
  misc_feature: Table A; Target 47340; HLA-B*58:01; MORC1; ENSG00000114487; CTA
RSSSLPSW

SEQ ID NO: 47341 - protein, 9 aa, Homo sapiens
  misc_feature: Table A; Target 47341; HLA-A*02:04; MORC1; ENSG00000114487; CTA
RTLSLFYGV

SEQ ID NO: 47342 - protein, 9 aa, Homo sapiens
  misc_feature: Table A; Target 47342; HLA-A*03:01; MORC1; ENSG00000114487; CTA
RVLPSSTNY

SEQ ID NO: 47343 - protein, 9 aa, Homo sapiens
  misc_feature: Table A; Target 47343; HLA-A*03:02; MORC1; ENSG00000114487; CTA
RVLPSSTNY

SEQ ID NO: 47344 - protein, 9 aa, Homo sapiens
  misc_feature: Table A; Target 47344; HLA-A*25:01; MORC1; ENSG00000114487; CTA
RVLPSSTNY

SEQ ID NO: 47345 - protein, 9 aa, Homo sapiens
  misc_feature: Table A; Target 47345; HLA-A*26:01; MORC1; ENSG00000114487; CTA
RVLPSSTNY

SEQ ID NO: 47346 - protein, 9 aa, Homo sapiens
  misc_feature: Table A; Target 47346; HLA-A*29:02; MORC1; ENSG00000114487; CTA
RVLPSSTNY

SEQ ID NO: 47347 - protein, 9 aa, Homo sapiens
  misc_feature: Table A; Target 47347; HLA-A*30:02; MORC1; ENSG00000114487; CTA
RVLPSSTNY

SEQ ID NO: 47348 - protein, 9 aa, Homo sapiens
  misc_feature: Table A; Target 47348; HLA-A*31:01; MORC1; ENSG00000114487; CTA
RVLPSSTNY

SEQ ID NO: 47349 - protein, 9 aa, Homo sapiens
  misc_feature: Table A; Target 47349; HLA-A*32:01; MORC1; ENSG00000114487; CTA
RVLPSSTNY

SEQ ID NO: 47350 - protein, 9 aa, Homo sapiens
  misc_feature: Table A; Target 47350; HLA-B*15:01; MORC1; ENSG00000114487; CTA
RVLPSSTNY

SEQ ID NO: 47351 - protein, 9 aa, Homo sapiens
  misc_feature: Table A; Target 47351; HLA-B*15:03; MORC1; ENSG00000114487; CTA
RVLPSSTNY

SEQ ID NO: 47352 - protein, 9 aa, Homo sapiens
  misc_feature: Table A; Target 47352; HLA-B*39:01; MORC1; ENSG00000114487; CTA
RVLPSSTNY

SEQ ID NO: 47353 - protein, 9 aa, Homo sapiens
  misc_feature: Table A; Target 47353; HLA-B*46:01; MORC1; ENSG00000114487; CTA
RVLPSSTNY

SEQ ID NO: 47354 - protein, 9 aa, Homo sapiens
  misc_feature: Table A; Target 47354; HLA-B*57:01; MORC1; ENSG00000114487; CTA
RVLPSSTNY

SEQ ID NO: 47355 - protein, 9 aa, Homo sapiens
  misc_feature: Table A; Target 47355; HLA-B*58:01; MORC1; ENSG00000114487; CTA
RVLPSSTNY

SEQ ID NO: 47356 - protein, 9 aa, Homo sapiens
  misc_feature: Table A; Target 47356; HLA-C*02:02; MORC1; ENSG00000114487; CTA
RVLPSSTNY

SEQ ID NO: 47357 - protein, 9 aa, Homo sapiens
  misc_feature: Table A; Target 47357; HLA-C*07:04; MORC1; ENSG00000114487; CTA
RVLPSSTNY

SEQ ID NO: 47358 - protein, 9 aa, Homo sapiens
  misc_feature: Table A; Target 47358; HLA-C*16:04; MORC1; ENSG00000114487; CTA
RVLPSSTNY

SEQ ID NO: 47359 - protein, 9 aa, Homo sapiens
  misc_feature: Table A; Target 47359; HLA-A*03:01; MORC1; ENSG00000114487; CTA
RVSVSGSCK

SEQ ID NO: 47360 - protein, 9 aa, Homo sapiens
  misc_feature: Table A; Target 47360; HLA-A*03:02; MORC1; ENSG00000114487; CTA
RVSVSGSCK

SEQ ID NO: 47361 - protein, 10 aa, Homo sapiens
  misc_feature: Table A; Target 47361; HLA-A*24:02; MORC1; ENSG00000114487; CTA
RYPALQRAQL

SEQ ID NO: 47362 - protein, 8 aa, Homo sapiens
  misc_feature: Table A; Target 47362; HLA-A*31:01; MORC1; ENSG00000114487; CTA
SAKDVLQR

SEQ ID NO: 47363 - protein, 8 aa, Homo sapiens
  misc_feature: Table A; Target 47363; HLA-A*33:01; MORC1; ENSG00000114487; CTA
SAKDVLQR

SEQ ID NO: 47364 - protein, 8 aa, Homo sapiens
  misc_feature: Table A; Target 47364; HLA-A*33:03; MORC1; ENSG00000114487; CTA
SAKDVLQR

SEQ ID NO: 47365 - protein, 8 aa, Homo sapiens
  misc_feature: Table A; Target 47365; HLA-A*68:01; MORC1; ENSG00000114487; CTA
SAKDVLQR

SEQ ID NO: 47366 - protein, 9 aa, Homo sapiens
  misc_feature: Table A; Target 47366; HLA-B*54:01; MORC1; ENSG00000114487; CTA
SAKDVLQRA

SEQ ID NO: 47367 - protein, 9 aa, Homo sapiens
  misc_feature: Table A; Target 47367; HLA-A*11:01; MORC1; ENSG00000114487; CTA
SDIILVSDK

SEQ ID NO: 47368 - protein, 10 aa, Homo sapiens
  misc_feature: Table A; Target 47368; HLA-A*30:01; MORC1; ENSG00000114487; CTA
SDKSNTDVSL

SEQ ID NO: 47369 - protein, 11 aa, Homo sapiens
  misc_feature: Table A; Target 47369; HLA-A*11:01; MORC1; ENSG00000114487; CTA
SDKSNTDVSLK

SEQ ID NO: 47370 - protein, 8 aa, Homo sapiens
  misc_feature: Table A; Target 47370; HLA-B*37:01; MORC1; ENSG00000114487; CTA
SDSDIILV

SEQ ID NO: 47371 - protein, 8 aa, Homo sapiens
  misc_feature: Table A; Target 47371; HLA-A*30:01; MORC1; ENSG00000114487; CTA
SELEEPAL

SEQ ID NO: 47372 - protein, 8 aa, Homo sapiens
  misc_feature: Table A; Target 47372; HLA-B*18:01; MORC1; ENSG00000114487; CTA
SELEEPAL

SEQ ID NO: 47373 - protein, 8 aa, Homo sapiens
  misc_feature: Table A; Target 47373; HLA-B*40:01; MORC1; ENSG00000114487; CTA
SELEEPAL

SEQ ID NO: 47374 - protein, 8 aa, Homo sapiens
  misc_feature: Table A; Target 47374; HLA-B*44:03; MORC1; ENSG00000114487; CTA
SELEEPAL

SEQ ID NO: 47375 - protein, 8 aa, Homo sapiens
  misc_feature: Table A; Target 47375; HLA-B*49:01; MORC1; ENSG00000114487; CTA
SEVVVPMP

SEQ ID NO: 47376 - protein, 10 aa, Homo sapiens
  misc_feature: Table A; Target 47376; HLA-A*25:01; MORC1; ENSG00000114487; CTA
SEVVVPMPSW

SEQ ID NO: 47377 - protein, 10 aa, Homo sapiens
  misc_feature: Table A; Target 47377; HLA-A*30:01; MORC1; ENSG00000114487; CTA
SEVVVPMPSW

SEQ ID NO: 47378 - protein, 10 aa, Homo sapiens
  misc_feature: Table A; Target 47378; HLA-B*27:02; MORC1; ENSG00000114487; CTA
SEVVVPMPSW

SEQ ID NO: 47379 - protein, 10 aa, Homo sapiens
  misc_feature: Table A; Target 47379; HLA-B*44:02; MORC1; ENSG00000114487; CTA
SEVVVPMPSW

SEQ ID NO: 47380 - protein, 10 aa, Homo sapiens
  misc_feature: Table A; Target 47380; HLA-B*44:03; MORC1; ENSG00000114487; CTA
SEVVVPMPSW

SEQ ID NO: 47381 - protein, 10 aa, Homo sapiens
  misc_feature: Table A; Target 47381; HLA-B*49:01; MORC1; ENSG00000114487; CTA
SEVVVPMPSW

SEQ ID NO: 47382 - protein, 10 aa, Homo sapiens
  misc_feature: Table A; Target 47382; HLA-C*16:04; MORC1; ENSG00000114487; CTA
SEVVVPMPSW

SEQ ID NO: 47383 - protein, 10 aa, Homo sapiens
  misc_feature: Table A; Target 47383; HLA-A*29:02; MORC1; ENSG00000114487; CTA
SFRAYTSVLY

SEQ ID NO: 47384 - protein, 9 aa, Homo sapiens
  misc_feature: Table A; Target 47384; HLA-B*07:02; MORC1; ENSG00000114487; CTA
SGHIARVSV

SEQ ID NO: 47385 - protein, 9 aa, Homo sapiens
  misc_feature: Table A; Target 47385; HLA-B*08:01; MORC1; ENSG00000114487; CTA
SGHIARVSV

SEQ ID NO: 47386 - protein, 9 aa, Homo sapiens
  misc_feature: Table A; Target 47386; HLA-C*16:01; MORC1; ENSG00000114487; CTA
SGHIARVSV

SEQ ID NO: 47387 - protein, 9 aa, Homo sapiens
  misc_feature: Table A; Target 47387; HLA-A*68:01; MORC1; ENSG00000114487; CTA
SIIYDSNTR

SEQ ID NO: 47388 - protein, 9 aa, Homo sapiens
  misc_feature: Table A; Target 47388; HLA-C*07:06; MORC1; ENSG00000114487; CTA
SIIYDSNTR

SEQ ID NO: 47389 - protein, 9 aa, Homo sapiens
  misc_feature: Table A; Target 47389; HLA-A*03:02; MORC1; ENSG00000114487; CTA
SILKEAQIK

SEQ ID NO: 47390 - protein, 9 aa, Homo sapiens
  misc_feature: Table A; Target 47390; HLA-C*01:02; MORC1; ENSG00000114487; CTA
SIPLGTMST

SEQ ID NO: 47391 - protein, 10 aa, Homo sapiens
  misc_feature: Table A; Target 47391; HLA-C*01:02; MORC1; ENSG00000114487; CTA
SIPLGTMSTI

SEQ ID NO: 47392 - protein, 8 aa, Homo sapiens
  misc_feature: Table A; Target 47392; HLA-A*02:04; MORC1; ENSG00000114487; CTA
SLFYGVNV

SEQ ID NO: 47393 - protein, 8 aa, Homo sapiens
  misc_feature: Table A; Target 47393; HLA-B*13:02; MORC1; ENSG00000114487; CTA
SLFYGVNV

SEQ ID NO: 47394 - protein, 11 aa, Homo sapiens
  misc_feature: Table A; Target 47394; HLA-A*31:01; MORC1; ENSG00000114487; CTA
SLFYGVNVENR

SEQ ID NO: 47395 - protein, 11 aa, Homo sapiens
  misc_feature: Table A; Target 47395; HLA-A*68:01; MORC1; ENSG00000114487; CTA
SLFYGVNVENR

SEQ ID NO: 47396 - protein, 10 aa, Homo sapiens
  misc_feature: Table A; Target 47396; HLA-A*02:01; MORC1; ENSG00000114487; CTA
SLLGAGVVGI

SEQ ID NO: 47397 - protein, 10 aa, Homo sapiens
  misc_feature: Table A; Target 47397; HLA-A*02:03; MORC1; ENSG00000114487; CTA
SLLGAGVVGI

SEQ ID NO: 47398 - protein, 10 aa, Homo sapiens
  misc_feature: Table A; Target 47398; HLA-A*02:04; MORC1; ENSG00000114487; CTA
SLLGAGVVGI

SEQ ID NO: 47399 - protein, 10 aa, Homo sapiens
  misc_feature: Table A; Target 47399; HLA-B*55:01; MORC1; ENSG00000114487; CTA
SLLGAGVVGI

SEQ ID NO: 47400 - protein, 9 aa, Homo sapiens
  misc_feature: Table A; Target 47400; HLA-A*03:02; MORC1; ENSG00000114487; CTA
SLNFVEECK

SEQ ID NO: 47401 - protein, 9 aa, Homo sapiens
  misc_feature: Table A; Target 47401; HLA-A*02:04; MORC1; ENSG00000114487; CTA
SLPSWKSLL

SEQ ID NO: 47402 - protein, 9 aa, Homo sapiens
  misc_feature: Table A; Target 47402; HLA-A*02:07; MORC1; ENSG00000114487; CTA
SLPSWKSLL

SEQ ID NO: 47403 - protein, 9 aa, Homo sapiens
  misc_feature: Table A; Target 47403; HLA-A*24:02; MORC1; ENSG00000114487; CTA
SLPSWKSLL

SEQ ID NO: 47404 - protein, 11 aa, Homo sapiens
  misc_feature: Table A; Target 47404; HLA-A*02:07; MORC1; ENSG00000114487; CTA
SLPSWKSLLNV

SEQ ID NO: 47405 - protein, 9 aa, Homo sapiens
  misc_feature: Table A; Target 47405; HLA-A*02:01; MORC1; ENSG00000114487; CTA
SLSEVVVPM

SEQ ID NO: 47406 - protein, 9 aa, Homo sapiens
  misc_feature: Table A; Target 47406; HLA-A*02:04; MORC1; ENSG00000114487; CTA
SLSEVVVPM

SEQ ID NO: 47407 - protein, 9 aa, Homo sapiens
  misc_feature: Table A; Target 47407; HLA-A*02:07; MORC1; ENSG00000114487; CTA
SLSEVVVPM

SEQ ID NO: 47408 - protein, 9 aa, Homo sapiens
  misc_feature: Table A; Target 47408; HLA-B*37:01; MORC1; ENSG00000114487; CTA
SLSEVVVPM

SEQ ID NO: 47409 - protein, 9 aa, Homo sapiens
  misc_feature: Table A; Target 47409; HLA-C*07:06; MORC1; ENSG00000114487; CTA
SLSEVVVPM

SEQ ID NO: 47410 - protein, 9 aa, Homo sapiens
  misc_feature: Table A; Target 47410; HLA-B*07:02; MORC1; ENSG00000114487; CTA
SLSSAKDVL

SEQ ID NO: 47411 - protein, 9 aa, Homo sapiens
  misc_feature: Table A; Target 47411; HLA-B*39:01; MORC1; ENSG00000114487; CTA
SLSSAKDVL

SEQ ID NO: 47412 - protein, 9 aa, Homo sapiens
  misc_feature: Table A; Target 47412; HLA-A*02:01; MORC1; ENSG00000114487; CTA
SLSSFELSA

SEQ ID NO: 47413 - protein, 9 aa, Homo sapiens
  misc_feature: Table A; Target 47413; HLA-B*13:02; MORC1; ENSG00000114487; CTA
SLSSFELSA

SEQ ID NO: 47414 - protein, 10 aa, Homo sapiens
  misc_feature: Table A; Target 47414; HLA-B*07:02; MORC1; ENSG00000114487; CTA
SPASSQSTPV

SEQ ID NO: 47415 - protein, 10 aa, Homo sapiens
  misc_feature: Table A; Target 47415; HLA-B*56:01; MORC1; ENSG00000114487; CTA
SPASSQSTPV

SEQ ID NO: 47416 - protein, 10 aa, Homo sapiens
  misc_feature: Table A; Target 47416; HLA-C*07:02; MORC1; ENSG00000114487; CTA
SPASSQSTPV

SEQ ID NO: 47417 - protein, 11 aa, Homo sapiens
  misc_feature: Table A; Target 47417; HLA-A*11:01; MORC1; ENSG00000114487; CTA
SPASSQSTPVK

SEQ ID NO: 47418 - protein, 11 aa, Homo sapiens
  misc_feature: Table A; Target 47418; HLA-C*07:06; MORC1; ENSG00000114487; CTA
SPASSQSTPVK

SEQ ID NO: 47419 - protein, 9 aa, Homo sapiens
  misc_feature: Table A; Target 47419; HLA-B*35:03; MORC1; ENSG00000114487; CTA
SPEEASDII

SEQ ID NO: 47420 - protein, 10 aa, Homo sapiens
  misc_feature: Table A; Target 47420; HLA-B*35:01; MORC1; ENSG00000114487; CTA
SPEEASDIIY

SEQ ID NO: 47421 - protein, 10 aa, Homo sapiens
  misc_feature: Table A; Target 47421; HLA-B*35:03; MORC1; ENSG00000114487; CTA
SPEEASDIIY

SEQ ID NO: 47422 - protein, 10 aa, Homo sapiens
  misc_feature: Table A; Target 47422; HLA-B*55:01; MORC1; ENSG00000114487; CTA
SPEEASDIIY

SEQ ID NO: 47423 - protein, 10 aa, Homo sapiens
  misc_feature: Table A; Target 47423; HLA-C*03:03; MORC1; ENSG00000114487; CTA
SPEEASDIIY

SEQ ID NO: 47424 - protein, 11 aa, Homo sapiens
  misc_feature: Table A; Target 47424; HLA-B*35:01; MORC1; ENSG00000114487; CTA
SPEEASDIIYF

SEQ ID NO: 47425 - protein, 11 aa, Homo sapiens
  misc_feature: Table A; Target 47425; HLA-B*35:03; MORC1; ENSG00000114487; CTA
SPEEASDIIYF

SEQ ID NO: 47426 - protein, 11 aa, Homo sapiens
  misc_feature: Table A; Target 47426; HLA-B*55:01; MORC1; ENSG00000114487; CTA
SPEEASDIIYF

SEQ ID NO: 47427 - protein, 9 aa, Homo sapiens
  misc_feature: Table A; Target 47427; HLA-B*08:01; MORC1; ENSG00000114487; CTA
SPFKTEAEL

SEQ ID NO: 47428 - protein, 9 aa, Homo sapiens
  misc_feature: Table A; Target 47428; HLA-B*35:01; MORC1; ENSG00000114487; CTA
SPFKTEAEL

SEQ ID NO: 47429 - protein, 9 aa, Homo sapiens
  misc_feature: Table A; Target 47429; HLA-B*35:03; MORC1; ENSG00000114487; CTA
SPFKTEAEL

SEQ ID NO: 47430 - protein, 9 aa, Homo sapiens
  misc_feature: Table A; Target 47430; HLA-B*39:01; MORC1; ENSG00000114487; CTA
SPFKTEAEL

SEQ ID NO: 47431 - protein, 9 aa, Homo sapiens
  misc_feature: Table A; Target 47431; HLA-B*40:01; MORC1; ENSG00000114487; CTA
SPFKTEAEL

SEQ ID NO: 47432 - protein, 9 aa, Homo sapiens
  misc_feature: Table A; Target 47432; HLA-B*51:01; MORC1; ENSG00000114487; CTA
SPFKTEAEL

SEQ ID NO: 47433 - protein, 9 aa, Homo sapiens
  misc_feature: Table A; Target 47433; HLA-B*55:01; MORC1; ENSG00000114487; CTA
SPFKTEAEL

SEQ ID NO: 47434 - protein, 9 aa, Homo sapiens
  misc_feature: Table A; Target 47434; HLA-B*56:01; MORC1; ENSG00000114487; CTA
SPFKTEAEL

SEQ ID NO: 47435 - protein, 9 aa, Homo sapiens
  misc_feature: Table A; Target 47435; HLA-C*03:03; MORC1; ENSG00000114487; CTA
SPFKTEAEL

SEQ ID NO: 47436 - protein, 9 aa, Homo sapiens
  misc_feature: Table A; Target 47436; HLA-C*05:01; MORC1; ENSG00000114487; CTA
SPFKTEAEL

SEQ ID NO: 47437 - protein, 9 aa, Homo sapiens
  misc_feature: Table A; Target 47437; HLA-C*07:02; MORC1; ENSG00000114487; CTA
SPFKTEAEL

SEQ ID NO: 47438 - protein, 10 aa, Homo sapiens
  misc_feature: Table A; Target 47438; HLA-B*07:02; MORC1; ENSG00000114487; CTA
SPFKTEAELM

SEQ ID NO: 47439 - protein, 10 aa, Homo sapiens
  misc_feature: Table A; Target 47439; HLA-B*35:01; MORC1; ENSG00000114487; CTA
SPFKTEAELM

SEQ ID NO: 47440 - protein, 10 aa, Homo sapiens
  misc_feature: Table A; Target 47440; HLA-B*35:03; MORC1; ENSG00000114487; CTA
SPFKTEAELM

SEQ ID NO: 47441 - protein, 11 aa, Homo sapiens
  misc_feature: Table A; Target 47441; HLA-B*07:02; MORC1; ENSG00000114487; CTA
SPSKNEKEKQL

SEQ ID NO: 47442 - protein, 11 aa, Homo sapiens
  misc_feature: Table A; Target 47442; HLA-C*07:02; MORC1; ENSG00000114487; CTA
SPSKNEKEKQL

SEQ ID NO: 47443 - protein, 8 aa, Homo sapiens
  misc_feature: Table A; Target 47443; HLA-A*30:02; MORC1; ENSG00000114487; CTA
SQAGMFIY

SEQ ID NO: 47444 - protein, 8 aa, Homo sapiens
  misc_feature: Table A; Target 47444; HLA-B*15:01; MORC1; ENSG00000114487; CTA
SQAGMFIY

SEQ ID NO: 47445 - protein, 8 aa, Homo sapiens
  misc_feature: Table A; Target 47445; HLA-B*15:03; MORC1; ENSG00000114487; CTA
SQAGMFIY

SEQ ID NO: 47446 - protein, 8 aa, Homo sapiens
  misc_feature: Table A; Target 47446; HLA-C*07:04; MORC1; ENSG00000114487; CTA
SQAGMFIY

SEQ ID NO: 47447 - protein, 9 aa, Homo sapiens
  misc_feature: Table A; Target 47447; HLA-B*27:05; MORC1; ENSG00000114487; CTA
SQAGMFIYS

SEQ ID NO: 47448 - protein, 9 aa, Homo sapiens
  misc_feature: Table A; Target 47448; HLA-A*02:01; MORC1; ENSG00000114487; CTA
SQIANITTV

SEQ ID NO: 47449 - protein, 9 aa, Homo sapiens
  misc_feature: Table A; Target 47449; HLA-A*02:03; MORC1; ENSG00000114487; CTA
SQIANITTV

SEQ ID NO: 47450 - protein, 9 aa, Homo sapiens
  misc_feature: Table A; Target 47450; HLA-A*02:04; MORC1; ENSG00000114487; CTA
SQIANITTV

SEQ ID NO: 47451 - protein, 9 aa, Homo sapiens
  misc_feature: Table A; Target 47451; HLA-A*30:01; MORC1; ENSG00000114487; CTA
SQIANITTV

SEQ ID NO: 47452 - protein, 9 aa, Homo sapiens
  misc_feature: Table A; Target 47452; HLA-A*32:01; MORC1; ENSG00000114487; CTA
SQIANITTV

SEQ ID NO: 47453 - protein, 9 aa, Homo sapiens
  misc_feature: Table A; Target 47453; HLA-B*13:02; MORC1; ENSG00000114487; CTA
SQIANITTV

SEQ ID NO: 47454 - protein, 9 aa, Homo sapiens
  misc_feature: Table A; Target 47454; HLA-B*15:01; MORC1; ENSG00000114487; CTA
SQIANITTV

SEQ ID NO: 47455 - protein, 9 aa, Homo sapiens
  misc_feature: Table A; Target 47455; HLA-B*15:03; MORC1; ENSG00000114487; CTA
SQIANITTV

SEQ ID NO: 47456 - protein, 9 aa, Homo sapiens
  misc_feature: Table A; Target 47456; HLA-B*39:01; MORC1; ENSG00000114487; CTA
SQIANITTV

SEQ ID NO: 47457 - protein, 9 aa, Homo sapiens
  misc_feature: Table A; Target 47457; HLA-B*40:02; MORC1; ENSG00000114487; CTA
SQIANITTV

SEQ ID NO: 47458 - protein, 9 aa, Homo sapiens
  misc_feature: Table A; Target 47458; HLA-B*46:01; MORC1; ENSG00000114487; CTA
SQIANITTV

SEQ ID NO: 47459 - protein, 9 aa, Homo sapiens
  misc_feature: Table A; Target 47459; HLA-B*49:01; MORC1; ENSG00000114487; CTA
SQIANITTV

SEQ ID NO: 47460 - protein, 9 aa, Homo sapiens
  misc_feature: Table A; Target 47460; HLA-B*55:01; MORC1; ENSG00000114487; CTA
SQIANITTV

SEQ ID NO: 47461 - protein, 9 aa, Homo sapiens
  misc_feature: Table A; Target 47461; HLA-C*02:02; MORC1; ENSG00000114487; CTA
SQIANITTV

SEQ ID NO: 47462 - protein, 9 aa, Homo sapiens
  misc_feature: Table A; Target 47462; HLA-C*06:02; MORC1; ENSG00000114487; CTA
SQIANITTV

SEQ ID NO: 47463 - protein, 10 aa, Homo sapiens
  misc_feature: Table A; Target 47463; HLA-A*25:01; MORC1; ENSG00000114487; CTA
SQIANITTVW

SEQ ID NO: 47464 - protein, 10 aa, Homo sapiens
  misc_feature: Table A; Target 47464; HLA-A*26:01; MORC1; ENSG00000114487; CTA
SQIANITTVW

SEQ ID NO: 47465 - protein, 10 aa, Homo sapiens
  misc_feature: Table A; Target 47465; HLA-A*32:01; MORC1; ENSG00000114487; CTA
SQIANITTVW

SEQ ID NO: 47466 - protein, 10 aa, Homo sapiens
  misc_feature: Table A; Target 47466; HLA-B*15:01; MORC1; ENSG00000114487; CTA
SQIANITTVW

SEQ ID NO: 47467 - protein, 10 aa, Homo sapiens
  misc_feature: Table A; Target 47467; HLA-B*27:02; MORC1; ENSG00000114487; CTA
SQIANITTVW

SEQ ID NO: 47468 - protein, 10 aa, Homo sapiens
  misc_feature: Table A; Target 47468; HLA-B*44:02; MORC1; ENSG00000114487; CTA
SQIANITTVW

SEQ ID NO: 47469 - protein, 10 aa, Homo sapiens
  misc_feature: Table A; Target 47469; HLA-B*44:03; MORC1; ENSG00000114487; CTA
SQIANITTVW

SEQ ID NO: 47470 - protein, 10 aa, Homo sapiens
  misc_feature: Table A; Target 47470; HLA-B*57:01; MORC1; ENSG00000114487; CTA
SQIANITTVW

SEQ ID NO: 47471 - protein, 10 aa, Homo sapiens
  misc_feature: Table A; Target 47471; HLA-B*58:01; MORC1; ENSG00000114487; CTA
SQIANITTVW

SEQ ID NO: 47472 - protein, 10 aa, Homo sapiens
  misc_feature: Table A; Target 47472; HLA-C*16:04; MORC1; ENSG00000114487; CTA
SQIANITTVW

SEQ ID NO: 47473 - protein, 9 aa, Homo sapiens
  misc_feature: Table A; Target 47473; HLA-B*13:02; MORC1; ENSG00000114487; CTA
SQQQRIPVA

SEQ ID NO: 47474 - protein, 9 aa, Homo sapiens
  misc_feature: Table A; Target 47474; HLA-A*02:03; MORC1; ENSG00000114487; CTA
SQRSQIANI

SEQ ID NO: 47475 - protein, 9 aa, Homo sapiens
  misc_feature: Table A; Target 47475; HLA-B*13:02; MORC1; ENSG00000114487; CTA
SQRSQIANI

SEQ ID NO: 47476 - protein, 10 aa, Homo sapiens
  misc_feature: Table A; Target 47476; HLA-B*13:02; MORC1; ENSG00000114487; CTA
SQSTPVKETV

SEQ ID NO: 47477 - protein, 11 aa, Homo sapiens
  misc_feature: Table A; Target 47477; HLA-C*07:06; MORC1; ENSG00000114487; CTA
SQSTPVKETVR

SEQ ID NO: 47478 - protein, 9 aa, Homo sapiens
  misc_feature: Table A; Target 47478; HLA-A*33:03; MORC1; ENSG00000114487; CTA
SSAKDVLQR

SEQ ID NO: 47479 - protein, 9 aa, Homo sapiens
  misc_feature: Table A; Target 47479; HLA-A*68:01; MORC1; ENSG00000114487; CTA
SSAKDVLQR

SEQ ID NO: 47480 - protein, 9 aa, Homo sapiens
  misc_feature: Table A; Target 47480; HLA-C*07:06; MORC1; ENSG00000114487; CTA
SSAKDVLQR

SEQ ID NO: 47481 - protein, 9 aa, Homo sapiens
  misc_feature: Table A; Target 47481; HLA-A*11:01; MORC1; ENSG00000114487; CTA
SSFELSASR

SEQ ID NO: 47482 - protein, 9 aa, Homo sapiens
  misc_feature: Table A; Target 47482; HLA-A*31:01; MORC1; ENSG00000114487; CTA
SSFELSASR

SEQ ID NO: 47483 - protein, 9 aa, Homo sapiens
  misc_feature: Table A; Target 47483; HLA-A*33:01; MORC1; ENSG00000114487; CTA
SSFELSASR

SEQ ID NO: 47484 - protein, 9 aa, Homo sapiens
  misc_feature: Table A; Target 47484; HLA-A*33:03; MORC1; ENSG00000114487; CTA
SSFELSASR

SEQ ID NO: 47485 - protein, 9 aa, Homo sapiens
  misc_feature: Table A; Target 47485; HLA-A*68:01; MORC1; ENSG00000114487; CTA
SSFELSASR

SEQ ID NO: 47486 - protein, 9 aa, Homo sapiens
  misc_feature: Table A; Target 47486; HLA-B*27:05; MORC1; ENSG00000114487; CTA
SSFELSASR

SEQ ID NO: 47487 - protein, 9 aa, Homo sapiens
  misc_feature: Table A; Target 47487; HLA-B*57:01; MORC1; ENSG00000114487; CTA
SSFELSASR

SEQ ID NO: 47488 - protein, 9 aa, Homo sapiens
  misc_feature: Table A; Target 47488; HLA-C*07:06; MORC1; ENSG00000114487; CTA
SSFELSASR

SEQ ID NO: 47489 - protein, 10 aa, Homo sapiens
  misc_feature: Table A; Target 47489; HLA-A*31:01; MORC1; ENSG00000114487; CTA
SSFELSASRR

SEQ ID NO: 47490 - protein, 10 aa, Homo sapiens
  misc_feature: Table A; Target 47490; HLA-A*68:01; MORC1; ENSG00000114487; CTA
SSFELSASRR

SEQ ID NO: 47491 - protein, 10 aa, Homo sapiens
  misc_feature: Table A; Target 47491; HLA-C*07:06; MORC1; ENSG00000114487; CTA
SSFELSASRR

SEQ ID NO: 47492 - protein, 9 aa, Homo sapiens
  misc_feature: Table A; Target 47492; HLA-C*01:02; MORC1; ENSG00000114487; CTA
SSPASSQST

SEQ ID NO: 47493 - protein, 10 aa, Homo sapiens
  misc_feature: Table A; Target 47493; HLA-C*16:01; MORC1; ENSG00000114487; CTA
SSTNYQEKEF

SEQ ID NO: 47494 - protein, 9 aa, Homo sapiens
  misc_feature: Table A; Target 47494; HLA-A*11:01; MORC1; ENSG00000114487; CTA
STCLTSAHK

SEQ ID NO: 47495 - protein, 10 aa, Homo sapiens
  misc_feature: Table A; Target 47495; HLA-A*03:01; MORC1; ENSG00000114487; CTA
STISPSKNEK

SEQ ID NO: 47496 - protein, 10 aa, Homo sapiens
  misc_feature: Table A; Target 47496; HLA-A*03:02; MORC1; ENSG00000114487; CTA
STISPSKNEK

SEQ ID NO: 47497 - protein, 10 aa, Homo sapiens
  misc_feature: Table A; Target 47497; HLA-A*11:01; MORC1; ENSG00000114487; CTA
STISPSKNEK

SEQ ID NO: 47498 - protein, 10 aa, Homo sapiens
  misc_feature: Table A; Target 47498; HLA-A*68:01; MORC1; ENSG00000114487; CTA
STISPSKNEK

SEQ ID NO: 47499 - protein, 10 aa, Homo sapiens
  misc_feature: Table A; Target 47499; HLA-C*07:06; MORC1; ENSG00000114487; CTA
STISPSKNEK

SEQ ID NO: 47500 - protein, 9 aa, Homo sapiens
  misc_feature: Table A; Target 47500; HLA-A*01:01; MORC1; ENSG00000114487; CTA
STLKFIGQY

SEQ ID NO: 47501 - protein, 9 aa, Homo sapiens
  misc_feature: Table A; Target 47501; HLA-A*03:01; MORC1; ENSG00000114487; CTA
STLKFIGQY

SEQ ID NO: 47502 - protein, 9 aa, Homo sapiens
  misc_feature: Table A; Target 47502; HLA-A*11:01; MORC1; ENSG00000114487; CTA
STLKFIGQY

SEQ ID NO: 47503 - protein, 9 aa, Homo sapiens
  misc_feature: Table A; Target 47503; HLA-A*25:01; MORC1; ENSG00000114487; CTA
STLKFIGQY

SEQ ID NO: 47504 - protein, 9 aa, Homo sapiens
  misc_feature: Table A; Target 47504; HLA-A*26:01; MORC1; ENSG00000114487; CTA
STLKFIGQY

SEQ ID NO: 47505 - protein, 9 aa, Homo sapiens
  misc_feature: Table A; Target 47505; HLA-A*29:02; MORC1; ENSG00000114487; CTA
STLKFIGQY

SEQ ID NO: 47506 - protein, 9 aa, Homo sapiens
  misc_feature: Table A; Target 47506; HLA-A*30:02; MORC1; ENSG00000114487; CTA
STLKFIGQY

SEQ ID NO: 47507 - protein, 9 aa, Homo sapiens
  misc_feature: Table A; Target 47507; HLA-A*32:01; MORC1; ENSG00000114487; CTA
STLKFIGQY

SEQ ID NO: 47508 - protein, 9 aa, Homo sapiens
  misc_feature: Table A; Target 47508; HLA-B*44:03; MORC1; ENSG00000114487; CTA
STLKFIGQY

SEQ ID NO: 47509 - protein, 9 aa, Homo sapiens
  misc_feature: Table A; Target 47509; HLA-B*57:01; MORC1; ENSG00000114487; CTA
STLKFIGQY

SEQ ID NO: 47510 - protein, 9 aa, Homo sapiens
  misc_feature: Table A; Target 47510; HLA-B*58:01; MORC1; ENSG00000114487; CTA
STLKFIGQY

SEQ ID NO: 47511 - protein, 10 aa, Homo sapiens
  misc_feature: Table A; Target 47511; HLA-A*11:01; MORC1; ENSG00000114487; CTA
STPVKETVRK

SEQ ID NO: 47512 - protein, 8 aa, Homo sapiens
  misc_feature: Table A; Target 47512; HLA-B*57:01; MORC1; ENSG00000114487; CTA
STTHSFLF

SEQ ID NO: 47513 - protein, 8 aa, Homo sapiens
  misc_feature: Table A; Target 47513; HLA-A*31:01; MORC1; ENSG00000114487; CTA
SVIKYQNR

SEQ ID NO: 47514 - protein, 9 aa, Homo sapiens
  misc_feature: Table A; Target 47514; HLA-A*24:02; MORC1; ENSG00000114487; CTA
SVTDDPQKF

SEQ ID NO: 47515 - protein, 9 aa, Homo sapiens
  misc_feature: Table A; Target 47515; HLA-A*25:01; MORC1; ENSG00000114487; CTA
SVTDDPQKF

SEQ ID NO: 47516 - protein, 9 aa, Homo sapiens
  misc_feature: Table A; Target 47516; HLA-A*26:01; MORC1; ENSG00000114487; CTA
SVTDDPQKF

SEQ ID NO: 47517 - protein, 9 aa, Homo sapiens
  misc_feature: Table A; Target 47517; HLA-A*29:02; MORC1; ENSG00000114487; CTA
SVTDDPQKF

SEQ ID NO: 47518 - protein, 9 aa, Homo sapiens
  misc_feature: Table A; Target 47518; HLA-A*32:01; MORC1; ENSG00000114487; CTA
SVTDDPQKF

SEQ ID NO: 47519 - protein, 9 aa, Homo sapiens
  misc_feature: Table A; Target 47519; HLA-A*68:01; MORC1; ENSG00000114487; CTA
SVTDDPQKF

SEQ ID NO: 47520 - protein, 9 aa, Homo sapiens
  misc_feature: Table A; Target 47520; HLA-B*38:01; MORC1; ENSG00000114487; CTA
SVTDDPQKF

SEQ ID NO: 47521 - protein, 9 aa, Homo sapiens
  misc_feature: Table A; Target 47521; HLA-B*58:01; MORC1; ENSG00000114487; CTA
SVTDDPQKF

SEQ ID NO: 47522 - protein, 9 aa, Homo sapiens
  misc_feature: Table A; Target 47522; HLA-C*02:02; MORC1; ENSG00000114487; CTA
SVTDDPQKF

SEQ ID NO: 47523 - protein, 9 aa, Homo sapiens
  misc_feature: Table A; Target 47523; HLA-C*05:01; MORC1; ENSG00000114487; CTA
SVTDDPQKF

SEQ ID NO: 47524 - protein, 9 aa, Homo sapiens
  misc_feature: Table A; Target 47524; HLA-C*07:06; MORC1; ENSG00000114487; CTA
SVTDDPQKF

SEQ ID NO: 47525 - protein, 9 aa, Homo sapiens
  misc_feature: Table A; Target 47525; HLA-A*29:02; MORC1; ENSG00000114487; CTA
TARTLSLFY

SEQ ID NO: 47526 - protein, 9 aa, Homo sapiens
  misc_feature: Table A; Target 47526; HLA-B*37:01; MORC1; ENSG00000114487; CTA
TDDPQKFAM

SEQ ID NO: 47527 - protein, 8 aa, Homo sapiens
  misc_feature: Table A; Target 47527; HLA-B*37:01; MORC1; ENSG00000114487; CTA
TDKEDILM

SEQ ID NO: 47528 - protein, 8 aa, Homo sapiens
  misc_feature: Table A; Target 47528; HLA-C*07:04; MORC1; ENSG00000114487; CTA
TDKEDILM

SEQ ID NO: 47529 - protein, 8 aa, Homo sapiens
  misc_feature: Table A; Target 47529; HLA-B*37:01; MORC1; ENSG00000114487; CTA
TDSDVEYI

SEQ ID NO: 47530 - protein, 10 aa, Homo sapiens
  misc_feature: Table A; Target 47530; HLA-B*27:02; MORC1; ENSG00000114487; CTA
TDTYLEALLK

SEQ ID NO: 47531 - protein, 9 aa, Homo sapiens
  misc_feature: Table A; Target 47531; HLA-A*25:01; MORC1; ENSG00000114487; CTA
TEAELMQQF

SEQ ID NO: 47532 - protein, 9 aa, Homo sapiens
  misc_feature: Table A; Target 47532; HLA-A*30:01; MORC1; ENSG00000114487; CTA
TEAELMQQF

SEQ ID NO: 47533 - protein, 9 aa, Homo sapiens
  misc_feature: Table A; Target 47533; HLA-B*18:01; MORC1; ENSG00000114487; CTA
TEAELMQQF

SEQ ID NO: 47534 - protein, 9 aa, Homo sapiens
  misc_feature: Table A; Target 47534; HLA-B*27:02; MORC1; ENSG00000114487; CTA
TEAELMQQF

SEQ ID NO: 47535 - protein, 9 aa, Homo sapiens
  misc_feature: Table A; Target 47535; HLA-B*37:01; MORC1; ENSG00000114487; CTA
TEAELMQQF

SEQ ID NO: 47536 - protein, 9 aa, Homo sapiens
  misc_feature: Table A; Target 47536; HLA-B*38:01; MORC1; ENSG00000114487; CTA
TEAELMQQF

SEQ ID NO: 47537 - protein, 9 aa, Homo sapiens
  misc_feature: Table A; Target 47537; HLA-B*40:01; MORC1; ENSG00000114487; CTA
TEAELMQQF

SEQ ID NO: 47538 - protein, 9 aa, Homo sapiens
  misc_feature: Table A; Target 47538; HLA-B*44:02; MORC1; ENSG00000114487; CTA
TEAELMQQF

SEQ ID NO: 47539 - protein, 9 aa, Homo sapiens
  misc_feature: Table A; Target 47539; HLA-B*49:01; MORC1; ENSG00000114487; CTA
TEAELMQQF

SEQ ID NO: 47540 - protein, 9 aa, Homo sapiens
  misc_feature: Table A; Target 47540; HLA-C*02:02; MORC1; ENSG00000114487; CTA
TEAELMQQF

SEQ ID NO: 47541 - protein, 9 aa, Homo sapiens
  misc_feature: Table A; Target 47541; HLA-C*16:04; MORC1; ENSG00000114487; CTA
TEAELMQQF

SEQ ID NO: 47542 - protein, 10 aa, Homo sapiens
  misc_feature: Table A; Target 47542; HLA-B*08:01; MORC1; ENSG00000114487; CTA
TGINNRNLTL

SEQ ID NO: 47543 - protein, 10 aa, Homo sapiens
  misc_feature: Table A; Target 47543; HLA-C*16:01; MORC1; ENSG00000114487; CTA
TGINNRNLTL

SEQ ID NO: 47544 - protein, 10 aa, Homo sapiens
  misc_feature: Table A; Target 47544; HLA-C*16:02; MORC1; ENSG00000114487; CTA
TGINNRNLTL

SEQ ID NO: 47545 - protein, 9 aa, Homo sapiens
  misc_feature: Table A; Target 47545; HLA-A*03:02; MORC1; ENSG00000114487; CTA
TISPSKNEK

SEQ ID NO: 47546 - protein, 9 aa, Homo sapiens
  misc_feature: Table A; Target 47546; HLA-A*29:02; MORC1; ENSG00000114487; CTA
TLFCNEFGY

SEQ ID NO: 47547 - protein, 9 aa, Homo sapiens
  misc_feature: Table A; Target 47547; HLA-A*30:02; MORC1; ENSG00000114487; CTA
TLFCNEFGY

SEQ ID NO: 47548 - protein, 8 aa, Homo sapiens
  misc_feature: Table A; Target 47548; HLA-A*30:02; MORC1; ENSG00000114487; CTA
TLKFIGQY

SEQ ID NO: 47549 - protein, 8 aa, Homo sapiens
  misc_feature: Table A; Target 47549; HLA-B*15:01; MORC1; ENSG00000114487; CTA
TLKFIGQY

SEQ ID NO: 47550 - protein, 8 aa, Homo sapiens
  misc_feature: Table A; Target 47550; HLA-B*46:01; MORC1; ENSG00000114487; CTA
TLKFIGQY

SEQ ID NO: 47551 - protein, 8 aa, Homo sapiens
  misc_feature: Table A; Target 47551; HLA-A*02:04; MORC1; ENSG00000114487; CTA
TLLVIYNL

SEQ ID NO: 47552 - protein, 10 aa, Homo sapiens
  misc_feature: Table A; Target 47552; HLA-A*02:04; MORC1; ENSG00000114487; CTA
TLLVIYNLKL

SEQ ID NO: 47553 - protein, 9 aa, Homo sapiens
  misc_feature: Table A; Target 47553; HLA-A*03:01; MORC1; ENSG00000114487; CTA
TMSTISPSK

SEQ ID NO: 47554 - protein, 9 aa, Homo sapiens
  misc_feature: Table A; Target 47554; HLA-A*03:02; MORC1; ENSG00000114487; CTA
TMSTISPSK

SEQ ID NO: 47555 - protein, 9 aa, Homo sapiens
  misc_feature: Table A; Target 47555; HLA-A*11:01; MORC1; ENSG00000114487; CTA
TMSTISPSK

SEQ ID NO: 47556 - protein, 10 aa, Homo sapiens
  misc_feature: Table A; Target 47556; HLA-B*07:02; MORC1; ENSG00000114487; CTA
TPVKETVRKL

SEQ ID NO: 47557 - protein, 8 aa, Homo sapiens
  misc_feature: Table A; Target 47557; HLA-C*05:01; MORC1; ENSG00000114487; CTA
TSDSDIIL

SEQ ID NO: 47558 - protein, 9 aa, Homo sapiens
  misc_feature: Table A; Target 47558; HLA-A*01:01; MORC1; ENSG00000114487; CTA
TSDSDIILV

SEQ ID NO: 47559 - protein, 9 aa, Homo sapiens
  misc_feature: Table A; Target 47559; HLA-C*05:01; MORC1; ENSG00000114487; CTA
TSDSDIILV

SEQ ID NO: 47560 - protein, 8 aa, Homo sapiens
  misc_feature: Table A; Target 47560; HLA-C*16:01; MORC1; ENSG00000114487; CTA
TSSFKGAF

SEQ ID NO: 47561 - protein, 9 aa, Homo sapiens
  misc_feature: Table A; Target 47561; HLA-B*57:01; MORC1; ENSG00000114487; CTA
TSVLYFNPW

SEQ ID NO: 47562 - protein, 9 aa, Homo sapiens
  misc_feature: Table A; Target 47562; HLA-A*02:01; MORC1; ENSG00000114487; CTA
VALPENVKL

SEQ ID NO: 47563 - protein, 9 aa, Homo sapiens
  misc_feature: Table A; Target 47563; HLA-A*23:01; MORC1; ENSG00000114487; CTA
VALPENVKL

SEQ ID NO: 47564 - protein, 9 aa, Homo sapiens
  misc_feature: Table A; Target 47564; HLA-B*35:03; MORC1; ENSG00000114487; CTA
VALPENVKL

SEQ ID NO: 47565 - protein, 9 aa, Homo sapiens
  misc_feature: Table A; Target 47565; HLA-B*40:01; MORC1; ENSG00000114487; CTA
VALPENVKL

SEQ ID NO: 47566 - protein, 9 aa, Homo sapiens
  misc_feature: Table A; Target 47566; HLA-B*58:01; MORC1; ENSG00000114487; CTA
VALPENVKL

SEQ ID NO: 47567 - protein, 9 aa, Homo sapiens
  misc_feature: Table A; Target 47567; HLA-C*02:02; MORC1; ENSG00000114487; CTA
VALPENVKL

SEQ ID NO: 47568 - protein, 9 aa, Homo sapiens
  misc_feature: Table A; Target 47568; HLA-C*03:03; MORC1; ENSG00000114487; CTA
VALPENVKL

SEQ ID NO: 47569 - protein, 9 aa, Homo sapiens
  misc_feature: Table A; Target 47569; HLA-C*03:04; MORC1; ENSG00000114487; CTA
VALPENVKL

SEQ ID NO: 47570 - protein, 9 aa, Homo sapiens
  misc_feature: Table A; Target 47570; HLA-C*05:01; MORC1; ENSG00000114487; CTA
VALPENVKL

SEQ ID NO: 47571 - protein, 9 aa, Homo sapiens
  misc_feature: Table A; Target 47571; HLA-C*07:04; MORC1; ENSG00000114487; CTA
VALPENVKL

SEQ ID NO: 47572 - protein, 9 aa, Homo sapiens
  misc_feature: Table A; Target 47572; HLA-C*16:01; MORC1; ENSG00000114487; CTA
VALPENVKL

SEQ ID NO: 47573 - protein, 9 aa, Homo sapiens
  misc_feature: Table A; Target 47573; HLA-C*03:03; MORC1; ENSG00000114487; CTA
VASSPASSQ

SEQ ID NO: 47574 - protein, 8 aa, Homo sapiens
  misc_feature: Table A; Target 47574; HLA-B*37:01; MORC1; ENSG00000114487; CTA
VEAKQKNL

SEQ ID NO: 47575 - protein, 8 aa, Homo sapiens
  misc_feature: Table A; Target 47575; HLA-B*18:01; MORC1; ENSG00000114487; CTA
VEKPLNSF

SEQ ID NO: 47576 - protein, 8 aa, Homo sapiens
  misc_feature: Table A; Target 47576; HLA-B*37:01; MORC1; ENSG00000114487; CTA
VEKPLNSF

SEQ ID NO: 47577 - protein, 8 aa, Homo sapiens
  misc_feature: Table A; Target 47577; HLA-B*46:01; MORC1; ENSG00000114487; CTA
VEKPLNSF

SEQ ID NO: 47578 - protein, 10 aa, Homo sapiens
  misc_feature: Table A; Target 47578; HLA-A*29:02; MORC1; ENSG00000114487; CTA
VEKPLNSFQY

SEQ ID NO: 47579 - protein, 10 aa, Homo sapiens
  misc_feature: Table A; Target 47579; HLA-A*30:02; MORC1; ENSG00000114487; CTA
VEKPLNSFQY

SEQ ID NO: 47580 - protein, 10 aa, Homo sapiens
  misc_feature: Table A; Target 47580; HLA-B*18:01; MORC1; ENSG00000114487; CTA
VEKPLNSFQY

SEQ ID NO: 47581 - protein, 10 aa, Homo sapiens
  misc_feature: Table A; Target 47581; HLA-B*27:02; MORC1; ENSG00000114487; CTA
VEKPLNSFQY

SEQ ID NO: 47582 - protein, 10 aa, Homo sapiens
  misc_feature: Table A; Target 47582; HLA-B*44:02; MORC1; ENSG00000114487; CTA
VEKPLNSFQY

SEQ ID NO: 47583 - protein, 10 aa, Homo sapiens
  misc_feature: Table A; Target 47583; HLA-B*44:03; MORC1; ENSG00000114487; CTA
VEKPLNSFQY

SEQ ID NO: 47584 - protein, 10 aa, Homo sapiens
  misc_feature: Table A; Target 47584; HLA-C*16:04; MORC1; ENSG00000114487; CTA
VEKPLNSFQY

SEQ ID NO: 47585 - protein, 9 aa, Homo sapiens
  misc_feature: Table A; Target 47585; HLA-A*30:01; MORC1; ENSG00000114487; CTA
VENRSQAGM

SEQ ID NO: 47586 - protein, 9 aa, Homo sapiens
  misc_feature: Table A; Target 47586; HLA-B*37:01; MORC1; ENSG00000114487; CTA
VENRSQAGM

SEQ ID NO: 47587 - protein, 9 aa, Homo sapiens
  misc_feature: Table A; Target 47587; HLA-B*40:01; MORC1; ENSG00000114487; CTA
VENRSQAGM

SEQ ID NO: 47588 - protein, 9 aa, Homo sapiens
  misc_feature: Table A; Target 47588; HLA-B*44:02; MORC1; ENSG00000114487; CTA
VENRSQAGM

SEQ ID NO: 47589 - protein, 9 aa, Homo sapiens
  misc_feature: Table A; Target 47589; HLA-B*44:03; MORC1; ENSG00000114487; CTA
VENRSQAGM

SEQ ID NO: 47590 - protein, 9 aa, Homo sapiens
  misc_feature: Table A; Target 47590; HLA-C*16:04; MORC1; ENSG00000114487; CTA
VENRSQAGM

SEQ ID NO: 47591 - protein, 8 aa, Homo sapiens
  misc_feature: Table A; Target 47591; HLA-B*18:01; MORC1; ENSG00000114487; CTA
VEYISETK

SEQ ID NO: 47592 - protein, 9 aa, Homo sapiens
  misc_feature: Table A; Target 47592; HLA-A*23:01; MORC1; ENSG00000114487; CTA
VEYISETKI

SEQ ID NO: 47593 - protein, 9 aa, Homo sapiens
  misc_feature: Table A; Target 47593; HLA-A*30:01; MORC1; ENSG00000114487; CTA
VEYISETKI

SEQ ID NO: 47594 - protein, 9 aa, Homo sapiens
  misc_feature: Table A; Target 47594; HLA-B*13:02; MORC1; ENSG00000114487; CTA
VEYISETKI

SEQ ID NO: 47595 - protein, 9 aa, Homo sapiens
  misc_feature: Table A; Target 47595; HLA-B*18:01; MORC1; ENSG00000114487; CTA
VEYISETKI

SEQ ID NO: 47596 - protein, 9 aa, Homo sapiens
  misc_feature: Table A; Target 47596; HLA-B*40:01; MORC1; ENSG00000114487; CTA
VEYISETKI

SEQ ID NO: 47597 - protein, 9 aa, Homo sapiens
  misc_feature: Table A; Target 47597; HLA-B*40:02; MORC1; ENSG00000114487; CTA
VEYISETKI

SEQ ID NO: 47598 - protein, 9 aa, Homo sapiens
  misc_feature: Table A; Target 47598; HLA-B*44:02; MORC1; ENSG00000114487; CTA
VEYISETKI

SEQ ID NO: 47599 - protein, 9 aa, Homo sapiens
  misc_feature: Table A; Target 47599; HLA-B*44:03; MORC1; ENSG00000114487; CTA
VEYISETKI

SEQ ID NO: 47600 - protein, 9 aa, Homo sapiens
  misc_feature: Table A; Target 47600; HLA-B*49:01; MORC1; ENSG00000114487; CTA
VEYISETKI

SEQ ID NO: 47601 - protein, 9 aa, Homo sapiens
  misc_feature: Table A; Target 47601; HLA-C*16:04; MORC1; ENSG00000114487; CTA
VEYISETKI

SEQ ID NO: 47602 - protein, 10 aa, Homo sapiens
  misc_feature: Table A; Target 47602; HLA-A*30:01; MORC1; ENSG00000114487; CTA
VEYISETKIM

SEQ ID NO: 47603 - protein, 10 aa, Homo sapiens
  misc_feature: Table A; Target 47603; HLA-B*49:01; MORC1; ENSG00000114487; CTA
VEYISETKIM

SEQ ID NO: 47604 - protein, 9 aa, Homo sapiens
  misc_feature: Table A; Target 47604; HLA-C*04:01; MORC1; ENSG00000114487; CTA
VFSVDNEKL

SEQ ID NO: 47605 - protein, 8 aa, Homo sapiens
  misc_feature: Table A; Target 47605; HLA-B*08:01; MORC1; ENSG00000114487; CTA
VIKYQNRL

SEQ ID NO: 47606 - protein, 9 aa, Homo sapiens
  misc_feature: Table A; Target 47606; HLA-B*08:01; MORC1; ENSG00000114487; CTA
VIYGKCGTL

SEQ ID NO: 47607 - protein, 9 aa, Homo sapiens
  misc_feature: Table A; Target 47607; HLA-A*02:04; MORC1; ENSG00000114487; CTA
VIYNLKLLL

SEQ ID NO: 47608 - protein, 8 aa, Homo sapiens
  misc_feature: Table A; Target 47608; HLA-A*32:01; MORC1; ENSG00000114487; CTA
VLPSSTNY

SEQ ID NO: 47609 - protein, 8 aa, Homo sapiens
  misc_feature: Table A; Target 47609; HLA-B*15:01; MORC1; ENSG00000114487; CTA
VLPSSTNY

SEQ ID NO: 47610 - protein, 8 aa, Homo sapiens
  misc_feature: Table A; Target 47610; HLA-B*15:03; MORC1; ENSG00000114487; CTA
VLPSSTNY

SEQ ID NO: 47611 - protein, 8 aa, Homo sapiens
  misc_feature: Table A; Target 47611; HLA-B*46:01; MORC1; ENSG00000114487; CTA
VLPSSTNY

SEQ ID NO: 47612 - protein, 9 aa, Homo sapiens
  misc_feature: Table A; Target 47612; HLA-A*29:02; MORC1; ENSG00000114487; CTA
VMGQYLVQY

SEQ ID NO: 47613 - protein, 9 aa, Homo sapiens
  misc_feature: Table A; Target 47613; HLA-A*30:02; MORC1; ENSG00000114487; CTA
VMGQYLVQY

SEQ ID NO: 47614 - protein, 9 aa, Homo sapiens
  misc_feature: Table A; Target 47614; HLA-B*15:01; MORC1; ENSG00000114487; CTA
VMGQYLVQY

SEQ ID NO: 47615 - protein, 9 aa, Homo sapiens
  misc_feature: Table A; Target 47615; HLA-B*15:03; MORC1; ENSG00000114487; CTA
VMGQYLVQY

SEQ ID NO: 47616 - protein, 9 aa, Homo sapiens
  misc_feature: Table A; Target 47616; HLA-B*46:01; MORC1; ENSG00000114487; CTA
VMGQYLVQY

SEQ ID NO: 47617 - protein, 9 aa, Homo sapiens
  misc_feature: Table A; Target 47617; HLA-C*07:04; MORC1; ENSG00000114487; CTA
VMGQYLVQY

SEQ ID NO: 47618 - protein, 10 aa, Homo sapiens
  misc_feature: Table A; Target 47618; HLA-A*33:01; MORC1; ENSG00000114487; CTA
VNLSSGHIAR

SEQ ID NO: 47619 - protein, 10 aa, Homo sapiens
  misc_feature: Table A; Target 47619; HLA-A*33:03; MORC1; ENSG00000114487; CTA
VNLSSGHIAR

SEQ ID NO: 47620 - protein, 8 aa, Homo sapiens
  misc_feature: Table A; Target 47620; HLA-B*35:01; MORC1; ENSG00000114487; CTA
VPMEDVNL

SEQ ID NO: 47621 - protein, 8 aa, Homo sapiens
  misc_feature: Table A; Target 47621; HLA-B*35:03; MORC1; ENSG00000114487; CTA
VPMEDVNL

SEQ ID NO: 47622 - protein, 8 aa, Homo sapiens
  misc_feature: Table A; Target 47622; HLA-B*55:01; MORC1; ENSG00000114487; CTA
VPMEDVNL

SEQ ID NO: 47623 - protein, 11 aa, Homo sapiens
  misc_feature: Table A; Target 47623; HLA-B*56:01; MORC1; ENSG00000114487; CTA
VPMEDVNLSSG

SEQ ID NO: 47624 - protein, 8 aa, Homo sapiens
  misc_feature: Table A; Target 47624; HLA-B*51:01; MORC1; ENSG00000114487; CTA
VPMPSWLI

SEQ ID NO: 47625 - protein, 9 aa, Homo sapiens
  misc_feature: Table A; Target 47625; HLA-A*01:01; MORC1; ENSG00000114487; CTA
VQEYNHLLK

SEQ ID NO: 47626 - protein, 9 aa, Homo sapiens
  misc_feature: Table A; Target 47626; HLA-B*13:02; MORC1; ENSG00000114487; CTA
VQYCKDTGI

SEQ ID NO: 47627 - protein, 9 aa, Homo sapiens
  misc_feature: Table A; Target 47627; HLA-A*31:01; MORC1; ENSG00000114487; CTA
VQYEKKIKR

SEQ ID NO: 47628 - protein, 9 aa, Homo sapiens
  misc_feature: Table A; Target 47628; HLA-A*01:01; MORC1; ENSG00000114487; CTA
VSDKSNTDV

SEQ ID NO: 47629 - protein, 9 aa, Homo sapiens
  misc_feature: Table A; Target 47629; HLA-C*05:01; MORC1; ENSG00000114487; CTA
VSDKSNTDV

SEQ ID NO: 47630 - protein, 11 aa, Homo sapiens
  misc_feature: Table A; Target 47630; HLA-C*05:01; MORC1; ENSG00000114487; CTA
VSDKSNTDVSL

SEQ ID NO: 47631 - protein, 8 aa, Homo sapiens
  misc_feature: Table A; Target 47631; HLA-A*01:01; MORC1; ENSG00000114487; CTA
VTDDPQKF

SEQ ID NO: 47632 - protein, 8 aa, Homo sapiens
  misc_feature: Table A; Target 47632; HLA-A*32:01; MORC1; ENSG00000114487; CTA
VTDDPQKF

SEQ ID NO: 47633 - protein, 8 aa, Homo sapiens
  misc_feature: Table A; Target 47633; HLA-B*39:01; MORC1; ENSG00000114487; CTA
VTDDPQKF

SEQ ID NO: 47634 - protein, 8 aa, Homo sapiens
  misc_feature: Table A; Target 47634; HLA-B*58:01; MORC1; ENSG00000114487; CTA
VTDDPQKF

SEQ ID NO: 47635 - protein, 8 aa, Homo sapiens
  misc_feature: Table A; Target 47635; HLA-C*04:01; MORC1; ENSG00000114487; CTA
VTDDPQKF

SEQ ID NO: 47636 - protein, 8 aa, Homo sapiens
  misc_feature: Table A; Target 47636; HLA-C*07:04; MORC1; ENSG00000114487; CTA
VTDDPQKF

SEQ ID NO: 47637 - protein, 10 aa, Homo sapiens
  misc_feature: Table A; Target 47637; HLA-A*01:01; MORC1; ENSG00000114487; CTA
VTDDPQKFAM

SEQ ID NO: 47638 - protein, 10 aa, Homo sapiens
  misc_feature: Table A; Target 47638; HLA-A*02:07; MORC1; ENSG00000114487; CTA
VTDDPQKFAM

SEQ ID NO: 47639 - protein, 10 aa, Homo sapiens
  misc_feature: Table A; Target 47639; HLA-C*05:01; MORC1; ENSG00000114487; CTA
VTDDPQKFAM

SEQ ID NO: 47640 - protein, 10 aa, Homo sapiens
  misc_feature: Table A; Target 47640; HLA-C*16:01; MORC1; ENSG00000114487; CTA
VTDDPQKFAM

SEQ ID NO: 47641 - protein, 10 aa, Homo sapiens
  misc_feature: Table A; Target 47641; HLA-C*16:02; MORC1; ENSG00000114487; CTA
VTDDPQKFAM

SEQ ID NO: 47642 - protein, 11 aa, Homo sapiens
  misc_feature: Table A; Target 47642; HLA-A*01:01; MORC1; ENSG00000114487; CTA
VTDDPQKFAME

SEQ ID NO: 47643 - protein, 9 aa, Homo sapiens
  misc_feature: Table A; Target 47643; HLA-A*32:01; MORC1; ENSG00000114487; CTA
VTIDARHRL

SEQ ID NO: 47644 - protein, 9 aa, Homo sapiens
  misc_feature: Table A; Target 47644; HLA-A*25:01; MORC1; ENSG00000114487; CTA
VTSSFKGAF

SEQ ID NO: 47645 - protein, 9 aa, Homo sapiens
  misc_feature: Table A; Target 47645; HLA-A*26:01; MORC1; ENSG00000114487; CTA
VTSSFKGAF

SEQ ID NO: 47646 - protein, 9 aa, Homo sapiens
  misc_feature: Table A; Target 47646; HLA-A*30:02; MORC1; ENSG00000114487; CTA
VTSSFKGAF

SEQ ID NO: 47647 - protein, 9 aa, Homo sapiens
  misc_feature: Table A; Target 47647; HLA-A*32:01; MORC1; ENSG00000114487; CTA
VTSSFKGAF

SEQ ID NO: 47648 - protein, 9 aa, Homo sapiens
  misc_feature: Table A; Target 47648; HLA-C*02:02; MORC1; ENSG00000114487; CTA
VTSSFKGAF

SEQ ID NO: 47649 - protein, 9 aa, Homo sapiens
  misc_feature: Table A; Target 47649; HLA-C*16:01; MORC1; ENSG00000114487; CTA
VTSSFKGAF

SEQ ID NO: 47650 - protein, 9 aa, Homo sapiens
  misc_feature: Table A; Target 47650; HLA-C*16:02; MORC1; ENSG00000114487; CTA
VTSSFKGAF

SEQ ID NO: 47651 - protein, 10 aa, Homo sapiens
  misc_feature: Table A; Target 47651; HLA-A*03:01; MORC1; ENSG00000114487; CTA
VTSSFKGAFK

SEQ ID NO: 47652 - protein, 10 aa, Homo sapiens
  misc_feature: Table A; Target 47652; HLA-A*03:02; MORC1; ENSG00000114487; CTA
VTSSFKGAFK

SEQ ID NO: 47653 - protein, 10 aa, Homo sapiens
  misc_feature: Table A; Target 47653; HLA-A*11:01; MORC1; ENSG00000114487; CTA
VTSSFKGAFK

SEQ ID NO: 47654 - protein, 9 aa, Homo sapiens
  misc_feature: Table A; Target 47654; HLA-A*02:07; MORC1; ENSG00000114487; CTA
VVPMPSWLI

SEQ ID NO: 47655 - protein, 8 aa, Homo sapiens
  misc_feature: Table A; Target 47655; HLA-A*25:01; MORC1; ENSG00000114487; CTA
VVVPMPSW

SEQ ID NO: 47656 - protein, 8 aa, Homo sapiens
  misc_feature: Table A; Target 47656; HLA-B*57:01; MORC1; ENSG00000114487; CTA
VVVPMPSW

SEQ ID NO: 47657 - protein, 8 aa, Homo sapiens
  misc_feature: Table A; Target 47657; HLA-B*58:01; MORC1; ENSG00000114487; CTA
VVVPMPSW

SEQ ID NO: 47658 - protein, 10 aa, Homo sapiens
  misc_feature: Table A; Target 47658; HLA-A*31:01; MORC1; ENSG00000114487; CTA
YCKDTGINNR

SEQ ID NO: 47659 - protein, 10 aa, Homo sapiens
  misc_feature: Table A; Target 47659; HLA-A*33:01; MORC1; ENSG00000114487; CTA
YCKDTGINNR

SEQ ID NO: 47660 - protein, 10 aa, Homo sapiens
  misc_feature: Table A; Target 47660; HLA-A*33:03; MORC1; ENSG00000114487; CTA
YCKDTGINNR

SEQ ID NO: 47661 - protein, 10 aa, Homo sapiens
  misc_feature: Table A; Target 47661; HLA-A*68:01; MORC1; ENSG00000114487; CTA
YCKDTGINNR

SEQ ID NO: 47662 - protein, 10 aa, Homo sapiens
  misc_feature: Table A; Target 47662; HLA-C*07:06; MORC1; ENSG00000114487; CTA
YCKDTGINNR

SEQ ID NO: 47663 - protein, 8 aa, Homo sapiens
  misc_feature: Table A; Target 47663; HLA-B*37:01; MORC1; ENSG00000114487; CTA
YDSNTRGI

SEQ ID NO: 47664 - protein, 8 aa, Homo sapiens
  misc_feature: Table A; Target 47664; HLA-A*23:01; MORC1; ENSG00000114487; CTA
YFFPEHQL

SEQ ID NO: 47665 - protein, 9 aa, Homo sapiens
  misc_feature: Table A; Target 47665; HLA-A*24:02; MORC1; ENSG00000114487; CTA
YFNPWMRIF

SEQ ID NO: 47666 - protein, 10 aa, Homo sapiens
  misc_feature: Table A; Target 47666; HLA-C*01:02; MORC1; ENSG00000114487; CTA
YGNGLKSGSM

SEQ ID NO: 47667 - protein, 10 aa, Homo sapiens
  misc_feature: Table A; Target 47667; HLA-C*04:01; MORC1; ENSG00000114487; CTA
YGNGLKSGSM

SEQ ID NO: 47668 - protein, 10 aa, Homo sapiens
  misc_feature: Table A; Target 47668; HLA-C*07:01; MORC1; ENSG00000114487; CTA
YGNGLKSGSM

SEQ ID NO: 47669 - protein, 10 aa, Homo sapiens
  misc_feature: Table A; Target 47669; HLA-C*07:02; MORC1; ENSG00000114487; CTA
YGNGLKSGSM

SEQ ID NO: 47670 - protein, 10 aa, Homo sapiens
  misc_feature: Table A; Target 47670; HLA-C*14:02; MORC1; ENSG00000114487; CTA
YGNGLKSGSM

SEQ ID NO: 47671 - protein, 8 aa, Homo sapiens
  misc_feature: Table A; Target 47671; HLA-B*27:02; MORC1; ENSG00000114487; CTA
YGVNVENR

SEQ ID NO: 47672 - protein, 8 aa, Homo sapiens
  misc_feature: Table A; Target 47672; HLA-C*07:06; MORC1; ENSG00000114487; CTA
YGVNVENR

SEQ ID NO: 47673 - protein, 10 aa, Homo sapiens
  misc_feature: Table A; Target 47673; HLA-C*06:02; MORC1; ENSG00000114487; CTA
YGVNVENRSQ

SEQ ID NO: 47674 - protein, 10 aa, Homo sapiens
  misc_feature: Table A; Target 47674; HLA-C*07:01; MORC1; ENSG00000114487; CTA
YGVNVENRSQ

SEQ ID NO: 47675 - protein, 10 aa, Homo sapiens
  misc_feature: Table A; Target 47675; HLA-C*16:01; MORC1; ENSG00000114487; CTA
YGVNVENRSQ

SEQ ID NO: 47676 - protein, 8 aa, Homo sapiens
  misc_feature: Table A; Target 47676; HLA-C*03:03; MORC1; ENSG00000114487; CTA
YISETKIM

SEQ ID NO: 47677 - protein, 8 aa, Homo sapiens
  misc_feature: Table A; Target 47677; HLA-C*03:04; MORC1; ENSG00000114487; CTA
YISETKIM

SEQ ID NO: 47678 - protein, 9 aa, Homo sapiens
  misc_feature: Table A; Target 47678; HLA-A*03:01; MORC1; ENSG00000114487; CTA
YISETKIMK

SEQ ID NO: 47679 - protein, 9 aa, Homo sapiens
  misc_feature: Table A; Target 47679; HLA-A*03:02; MORC1; ENSG00000114487; CTA
YISETKIMK

SEQ ID NO: 47680 - protein, 9 aa, Homo sapiens
  misc_feature: Table A; Target 47680; HLA-A*11:01; MORC1; ENSG00000114487; CTA
YISETKIMK

SEQ ID NO: 47681 - protein, 9 aa, Homo sapiens
  misc_feature: Table A; Target 47681; HLA-A*68:01; MORC1; ENSG00000114487; CTA
YISETKIMK

SEQ ID NO: 47682 - protein, 10 aa, Homo sapiens
  misc_feature: Table A; Target 47682; HLA-A*03:01; MORC1; ENSG00000114487; CTA
YISETKIMKK

SEQ ID NO: 47683 - protein, 10 aa, Homo sapiens
  misc_feature: Table A; Target 47683; HLA-A*11:01; MORC1; ENSG00000114487; CTA
YISETKIMKK

SEQ ID NO: 47684 - protein, 10 aa, Homo sapiens
  misc_feature: Table A; Target 47684; HLA-A*68:01; MORC1; ENSG00000114487; CTA
YISETKIMKK

SEQ ID NO: 47685 - protein, 8 aa, Homo sapiens
  misc_feature: Table A; Target 47685; HLA-B*08:01; MORC1; ENSG00000114487; CTA
YLYVTSSF

SEQ ID NO: 47686 - protein, 8 aa, Homo sapiens
  misc_feature: Table A; Target 47686; HLA-B*15:01; MORC1; ENSG00000114487; CTA
YLYVTSSF

SEQ ID NO: 47687 - protein, 8 aa, Homo sapiens
  misc_feature: Table A; Target 47687; HLA-B*15:03; MORC1; ENSG00000114487; CTA
YLYVTSSF

SEQ ID NO: 47688 - protein, 8 aa, Homo sapiens
  misc_feature: Table A; Target 47688; HLA-B*18:01; MORC1; ENSG00000114487; CTA
YLYVTSSF

SEQ ID NO: 47689 - protein, 8 aa, Homo sapiens
  misc_feature: Table A; Target 47689; HLA-B*37:01; MORC1; ENSG00000114487; CTA
YLYVTSSF

SEQ ID NO: 47690 - protein, 8 aa, Homo sapiens
  misc_feature: Table A; Target 47690; HLA-B*46:01; MORC1; ENSG00000114487; CTA
YLYVTSSF

SEQ ID NO: 47691 - protein, 8 aa, Homo sapiens
  misc_feature: Table A; Target 47691; HLA-C*03:03; MORC1; ENSG00000114487; CTA
YLYVTSSF

SEQ ID NO: 47692 - protein, 8 aa, Homo sapiens
  misc_feature: Table A; Target 47692; HLA-C*03:04; MORC1; ENSG00000114487; CTA
YLYVTSSF

SEQ ID NO: 47693 - protein, 8 aa, Homo sapiens
  misc_feature: Table A; Target 47693; HLA-C*14:02; MORC1; ENSG00000114487; CTA
YLYVTSSF

SEQ ID NO: 47694 - protein, 9 aa, Homo sapiens
  misc_feature: Table A; Target 47694; HLA-A*03:01; MORC1; ENSG00000114487; CTA
YLYVTSSFK

SEQ ID NO: 47695 - protein, 9 aa, Homo sapiens
  misc_feature: Table A; Target 47695; HLA-B*07:02; MORC1; ENSG00000114487; CTA
YPALQRAQL

SEQ ID NO: 47696 - protein, 9 aa, Homo sapiens
  misc_feature: Table A; Target 47696; HLA-B*08:01; MORC1; ENSG00000114487; CTA
YPALQRAQL

SEQ ID NO: 47697 - protein, 9 aa, Homo sapiens
  misc_feature: Table A; Target 47697; HLA-B*35:01; MORC1; ENSG00000114487; CTA
YPALQRAQL

SEQ ID NO: 47698 - protein, 9 aa, Homo sapiens
  misc_feature: Table A; Target 47698; HLA-B*35:03; MORC1; ENSG00000114487; CTA
YPALQRAQL

SEQ ID NO: 47699 - protein, 9 aa, Homo sapiens
  misc_feature: Table A; Target 47699; HLA-B*51:01; MORC1; ENSG00000114487; CTA
YPALQRAQL

SEQ ID NO: 47700 - protein, 9 aa, Homo sapiens
  misc_feature: Table A; Target 47700; HLA-B*56:01; MORC1; ENSG00000114487; CTA
YPALQRAQL

SEQ ID NO: 47701 - protein, 9 aa, Homo sapiens
  misc_feature: Table A; Target 47701; HLA-C*07:02; MORC1; ENSG00000114487; CTA
YPALQRAQL

SEQ ID NO: 47702 - protein, 11 aa, Homo sapiens
  misc_feature: Table A; Target 47702; HLA-B*07:02; MORC1; ENSG00000114487; CTA
YPALQRAQLRL

SEQ ID NO: 47703 - protein, 9 aa, Homo sapiens
  misc_feature: Table A; Target 47703; HLA-A*03:02; MORC1; ENSG00000114487; CTA
YQNDIDVEK

SEQ ID NO: 47704 - protein, 9 aa, Homo sapiens
  misc_feature: Table A; Target 47704; HLA-A*11:01; MORC1; ENSG00000114487; CTA
YQNDIDVEK

SEQ ID NO: 47705 - protein, 9 aa, Homo sapiens
  misc_feature: Table A; Target 47705; HLA-B*27:02; MORC1; ENSG00000114487; CTA
YQNDIDVEK

SEQ ID NO: 47706 - protein, 9 aa, Homo sapiens
  misc_feature: Table A; Target 47706; HLA-B*27:05; MORC1; ENSG00000114487; CTA
YQNDIDVEK

SEQ ID NO: 47707 - protein, 9 aa, Homo sapiens
  misc_feature: Table A; Target 47707; HLA-B*08:01; MORC1; ENSG00000114487; CTA
YSNNRLIKM

SEQ ID NO: 47708 - protein, 9 aa, Homo sapiens
  misc_feature: Table A; Target 47708; HLA-B*46:01; MORC1; ENSG00000114487; CTA
YSNNRLIKM

SEQ ID NO: 47709 - protein, 9 aa, Homo sapiens
  misc_feature: Table A; Target 47709; HLA-C*02:02; MORC1; ENSG00000114487; CTA
YSNNRLIKM

SEQ ID NO: 47710 - protein, 9 aa, Homo sapiens
  misc_feature: Table A; Target 47710; HLA-C*12:03; MORC1; ENSG00000114487; CTA
YSNNRLIKM

SEQ ID NO: 47711 - protein, 9 aa, Homo sapiens
  misc_feature: Table A; Target 47711; HLA-C*16:01; MORC1; ENSG00000114487; CTA
YSNNRLIKM

SEQ ID NO: 47712 - protein, 10 aa, Homo sapiens
  misc_feature: Table A; Target 47712; HLA-C*01:02; MORC1; ENSG00000114487; CTA
YSPFKTEAEL

SEQ ID NO: 47713 - protein, 9 aa, Homo sapiens
  misc_feature: Table A; Target 47713; HLA-B*54:01; MORC1; ENSG00000114487; CTA
YVTSSFKGA

SEQ ID NO: 47714 - protein, 10 aa, Homo sapiens
  misc_feature: Table A; Target 47714; HLA-A*25:01; MORC1; ENSG00000114487; CTA
YVTSSFKGAF

SEQ ID NO: 47715 - protein, 10 aa, Homo sapiens
  misc_feature: Table A; Target 47715; HLA-A*26:01; MORC1; ENSG00000114487; CTA
YVTSSFKGAF

SEQ ID NO: 47716 - protein, 8 aa, Homo sapiens
  misc_feature: Table A; Target 47716; HLA-B*07:02; MTRNR2L1; ENSG00000256618; TAA
APRGFSCL

SEQ ID NO: 47717 - protein, 8 aa, Homo sapiens
  misc_feature: Table A; Target 47717; HLA-B*08:01; MTRNR2L1; ENSG00000256618; TAA
APRGFSCL

SEQ ID NO: 47718 - protein, 8 aa, Homo sapiens
  misc_feature: Table A; Target 47718; HLA-C*07:02; MTRNR2L1; ENSG00000256618; TAA
APRGFSCL

SEQ ID NO: 47719 - protein, 9 aa, Homo sapiens
  misc_feature: Table A; Target 47719; HLA-B*07:02; MTRNR2L1; ENSG00000256618; TAA
APRGFSCLL

SEQ ID NO: 47720 - protein, 9 aa, Homo sapiens
  misc_feature: Table A; Target 47720; HLA-C*07:02; MTRNR2L1; ENSG00000256618; TAA
APRGFSCLL

SEQ ID NO: 47721 - protein, 8 aa, Homo sapiens
  misc_feature: Table A; Target 47721; HLA-A*33:01; MTRNR2L1; ENSG00000256618; TAA
EIDLPVKR

SEQ ID NO: 47722 - protein, 8 aa, Homo sapiens
  misc_feature: Table A; Target 47722; HLA-A*33:03; MTRNR2L1; ENSG00000256618; TAA
EIDLPVKR

SEQ ID NO: 47723 - protein, 8 aa, Homo sapiens
  misc_feature: Table A; Target 47723; HLA-A*68:01; MTRNR2L1; ENSG00000256618; TAA
EIDLPVKR

SEQ ID NO: 47724 - protein, 8 aa, Homo sapiens
  misc_feature: Table A; Target 47724; HLA-C*04:01; MTRNR2L1; ENSG00000256618; TAA
EIDLPVKR

SEQ ID NO: 47725 - protein, 8 aa, Homo sapiens
  misc_feature: Table A; Target 47725; HLA-C*05:01; MTRNR2L1; ENSG00000256618; TAA
EIDLPVKR

SEQ ID NO: 47726 - protein, 9 aa, Homo sapiens
  misc_feature: Table A; Target 47726; HLA-A*33:01; MTRNR2L1; ENSG00000256618; TAA
EIDLPVKRR

SEQ ID NO: 47727 - protein, 9 aa, Homo sapiens
  misc_feature: Table A; Target 47727; HLA-A*33:03; MTRNR2L1; ENSG00000256618; TAA
EIDLPVKRR

SEQ ID NO: 47728 - protein, 9 aa, Homo sapiens
  misc_feature: Table A; Target 47728; HLA-A*68:01; MTRNR2L1; ENSG00000256618; TAA
EIDLPVKRR

SEQ ID NO: 47729 - protein, 9 aa, Homo sapiens
  misc_feature: Table A; Target 47729; HLA-A*02:01; MTRNR2L1; ENSG00000256618; TAA
LLSTSEIDL

SEQ ID NO: 47730 - protein, 9 aa, Homo sapiens
  misc_feature: Table A; Target 47730; HLA-B*39:01; MTRNR2L1; ENSG00000256618; TAA
LLSTSEIDL

SEQ ID NO: 47731 - protein, 11 aa, Homo sapiens
  misc_feature: Table A; Target 47731; HLA-A*68:02; MTRNR2L1; ENSG00000256618; TAA
LLSTSEIDLPV

SEQ ID NO: 47732 - protein, 11 aa, Homo sapiens
  misc_feature: Table A; Target 47732; HLA-A*11:01; MTRNR2L1; ENSG00000256618; TAA
LSTSEIDLPVK

SEQ ID NO: 47733 - protein, 11 aa, Homo sapiens
  misc_feature: Table A; Target 47733; HLA-B*27:02; MTRNR2L1; ENSG00000256618; TAA
LSTSEIDLPVK

SEQ ID NO: 47734 - protein, 9 aa, Homo sapiens
  misc_feature: Table A; Target 47734; HLA-C*01:02; MTRNR2L1; ENSG00000256618; TAA
MAPRGFSCL

SEQ ID NO: 47735 - protein, 8 aa, Homo sapiens
  misc_feature: Table A; Target 47735; HLA-B*18:01; MTRNR2L1; ENSG00000256618; TAA
SEIDLPVK

SEQ ID NO: 47736 - protein, 8 aa, Homo sapiens
  misc_feature: Table A; Target 47736; HLA-B*27:05; MTRNR2L1; ENSG00000256618; TAA
SEIDLPVK

SEQ ID NO: 47737 - protein, 8 aa, Homo sapiens
  misc_feature: Table A; Target 47737; HLA-B*40:02; MTRNR2L1; ENSG00000256618; TAA
SEIDLPVK

SEQ ID NO: 47738 - protein, 8 aa, Homo sapiens
  misc_feature: Table A; Target 47738; HLA-B*49:01; MTRNR2L1; ENSG00000256618; TAA
SEIDLPVK

SEQ ID NO: 47739 - protein, 9 aa, Homo sapiens
  misc_feature: Table A; Target 47739; HLA-A*11:01; MTRNR2L1; ENSG00000256618; TAA
SEIDLPVKR

SEQ ID NO: 47740 - protein, 9 aa, Homo sapiens
  misc_feature: Table A; Target 47740; HLA-A*30:01; MTRNR2L1; ENSG00000256618; TAA
SEIDLPVKR

SEQ ID NO: 47741 - protein, 9 aa, Homo sapiens
  misc_feature: Table A; Target 47741; HLA-A*31:01; MTRNR2L1; ENSG00000256618; TAA
SEIDLPVKR

SEQ ID NO: 47742 - protein, 9 aa, Homo sapiens
  misc_feature: Table A; Target 47742; HLA-A*33:01; MTRNR2L1; ENSG00000256618; TAA
SEIDLPVKR

SEQ ID NO: 47743 - protein, 9 aa, Homo sapiens
  misc_feature: Table A; Target 47743; HLA-A*33:03; MTRNR2L1; ENSG00000256618; TAA
SEIDLPVKR

SEQ ID NO: 47744 - protein, 9 aa, Homo sapiens
  misc_feature: Table A; Target 47744; HLA-A*68:01; MTRNR2L1; ENSG00000256618; TAA
SEIDLPVKR

SEQ ID NO: 47745 - protein, 9 aa, Homo sapiens
  misc_feature: Table A; Target 47745; HLA-A*68:02; MTRNR2L1; ENSG00000256618; TAA
SEIDLPVKR

SEQ ID NO: 47746 - protein, 9 aa, Homo sapiens
  misc_feature: Table A; Target 47746; HLA-B*18:01; MTRNR2L1; ENSG00000256618; TAA
SEIDLPVKR

SEQ ID NO: 47747 - protein, 9 aa, Homo sapiens
  misc_feature: Table A; Target 47747; HLA-B*27:02; MTRNR2L1; ENSG00000256618; TAA
SEIDLPVKR

SEQ ID NO: 47748 - protein, 9 aa, Homo sapiens
  misc_feature: Table A; Target 47748; HLA-B*27:05; MTRNR2L1; ENSG00000256618; TAA
SEIDLPVKR

SEQ ID NO: 47749 - protein, 9 aa, Homo sapiens
  misc_feature: Table A; Target 47749; HLA-B*40:01; MTRNR2L1; ENSG00000256618; TAA
SEIDLPVKR

SEQ ID NO: 47750 - protein, 9 aa, Homo sapiens
  misc_feature: Table A; Target 47750; HLA-B*40:02; MTRNR2L1; ENSG00000256618; TAA
SEIDLPVKR

SEQ ID NO: 47751 - protein, 9 aa, Homo sapiens
  misc_feature: Table A; Target 47751; HLA-B*44:02; MTRNR2L1; ENSG00000256618; TAA
SEIDLPVKR

SEQ ID NO: 47752 - protein, 9 aa, Homo sapiens
  misc_feature: Table A; Target 47752; HLA-B*44:03; MTRNR2L1; ENSG00000256618; TAA
SEIDLPVKR

SEQ ID NO: 47753 - protein, 9 aa, Homo sapiens
  misc_feature: Table A; Target 47753; HLA-B*49:01; MTRNR2L1; ENSG00000256618; TAA
SEIDLPVKR

SEQ ID NO: 47754 - protein, 9 aa, Homo sapiens
  misc_feature: Table A; Target 47754; HLA-B*57:01; MTRNR2L1; ENSG00000256618; TAA
SEIDLPVKR

SEQ ID NO: 47755 - protein, 9 aa, Homo sapiens
  misc_feature: Table A; Target 47755; HLA-C*02:02; MTRNR2L1; ENSG00000256618; TAA
SEIDLPVKR

SEQ ID NO: 47756 - protein, 9 aa, Homo sapiens
  misc_feature: Table A; Target 47756; HLA-C*06:02; MTRNR2L1; ENSG00000256618; TAA
SEIDLPVKR

SEQ ID NO: 47757 - protein, 9 aa, Homo sapiens
  misc_feature: Table A; Target 47757; HLA-C*07:06; MTRNR2L1; ENSG00000256618; TAA
SEIDLPVKR

SEQ ID NO: 47758 - protein, 9 aa, Homo sapiens
  misc_feature: Table A; Target 47758; HLA-C*12:03; MTRNR2L1; ENSG00000256618; TAA
SEIDLPVKR

SEQ ID NO: 47759 - protein, 9 aa, Homo sapiens
  misc_feature: Table A; Target 47759; HLA-C*16:04; MTRNR2L1; ENSG00000256618; TAA
SEIDLPVKR

SEQ ID NO: 47760 - protein, 10 aa, Homo sapiens
  misc_feature: Table A; Target 47760; HLA-B*44:02; MTRNR2L1; ENSG00000256618; TAA
SEIDLPVKRR

SEQ ID NO: 47761 - protein, 10 aa, Homo sapiens
  misc_feature: Table A; Target 47761; HLA-B*44:03; MTRNR2L1; ENSG00000256618; TAA
SEIDLPVKRR

SEQ ID NO: 47762 - protein, 11 aa, Homo sapiens
  misc_feature: Table A; Target 47762; HLA-B*44:02; MTRNR2L1; ENSG00000256618; TAA
SEIDLPVKRRT

SEQ ID NO: 47763 - protein, 11 aa, Homo sapiens
  misc_feature: Table A; Target 47763; HLA-B*44:03; MTRNR2L1; ENSG00000256618; TAA
SEIDLPVKRRT

SEQ ID NO: 47764 - protein, 9 aa, Homo sapiens
  misc_feature: Table A; Target 47764; HLA-A*11:01; MTRNR2L1; ENSG00000256618; TAA
STSEIDLPV

SEQ ID NO: 47765 - protein, 9 aa, Homo sapiens
  misc_feature: Table A; Target 47765; HLA-A*68:01; MTRNR2L1; ENSG00000256618; TAA
STSEIDLPV

SEQ ID NO: 47766 - protein, 9 aa, Homo sapiens
  misc_feature: Table A; Target 47766; HLA-A*68:02; MTRNR2L1; ENSG00000256618; TAA
STSEIDLPV

SEQ ID NO: 47767 - protein, 9 aa, Homo sapiens
  misc_feature: Table A; Target 47767; HLA-B*13:02; MTRNR2L1; ENSG00000256618; TAA
STSEIDLPV

SEQ ID NO: 47768 - protein, 9 aa, Homo sapiens
  misc_feature: Table A; Target 47768; HLA-C*06:02; MTRNR2L1; ENSG00000256618; TAA
STSEIDLPV

SEQ ID NO: 47769 - protein, 9 aa, Homo sapiens
  misc_feature: Table A; Target 47769; HLA-C*07:06; MTRNR2L1; ENSG00000256618; TAA
STSEIDLPV

SEQ ID NO: 47770 - protein, 9 aa, Homo sapiens
  misc_feature: Table A; Target 47770; HLA-C*16:04; MTRNR2L1; ENSG00000256618; TAA
STSEIDLPV

SEQ ID NO: 47771 - protein, 10 aa, Homo sapiens
  misc_feature: Table A; Target 47771; HLA-A*01:01; MTRNR2L1; ENSG00000256618; TAA
STSEIDLPVK

SEQ ID NO: 47772 - protein, 10 aa, Homo sapiens
  misc_feature: Table A; Target 47772; HLA-A*03:01; MTRNR2L1; ENSG00000256618; TAA
STSEIDLPVK

SEQ ID NO: 47773 - protein, 10 aa, Homo sapiens
  misc_feature: Table A; Target 47773; HLA-A*03:02; MTRNR2L1; ENSG00000256618; TAA
STSEIDLPVK

SEQ ID NO: 47774 - protein, 10 aa, Homo sapiens
  misc_feature: Table A; Target 47774; HLA-A*11:01; MTRNR2L1; ENSG00000256618; TAA
STSEIDLPVK

SEQ ID NO: 47775 - protein, 10 aa, Homo sapiens
  misc_feature: Table A; Target 47775; HLA-A*33:03; MTRNR2L1; ENSG00000256618; TAA
STSEIDLPVK

SEQ ID NO: 47776 - protein, 10 aa, Homo sapiens
  misc_feature: Table A; Target 47776; HLA-A*68:01; MTRNR2L1; ENSG00000256618; TAA
STSEIDLPVK

SEQ ID NO: 47777 - protein, 10 aa, Homo sapiens
  misc_feature: Table A; Target 47777; HLA-A*68:02; MTRNR2L1; ENSG00000256618; TAA
STSEIDLPVK

SEQ ID NO: 47778 - protein, 10 aa, Homo sapiens
  misc_feature: Table A; Target 47778; HLA-B*27:02; MTRNR2L1; ENSG00000256618; TAA
STSEIDLPVK

SEQ ID NO: 47779 - protein, 10 aa, Homo sapiens
  misc_feature: Table A; Target 47779; HLA-B*27:05; MTRNR2L1; ENSG00000256618; TAA
STSEIDLPVK

SEQ ID NO: 47780 - protein, 10 aa, Homo sapiens
  misc_feature: Table A; Target 47780; HLA-B*57:01; MTRNR2L1; ENSG00000256618; TAA
STSEIDLPVK

SEQ ID NO: 47781 - protein, 10 aa, Homo sapiens
  misc_feature: Table A; Target 47781; HLA-C*07:06; MTRNR2L1; ENSG00000256618; TAA
STSEIDLPVK

SEQ ID NO: 47782 - protein, 11 aa, Homo sapiens
  misc_feature: Table A; Target 47782; HLA-A*11:01; MTRNR2L1; ENSG00000256618; TAA
STSEIDLPVKR

SEQ ID NO: 47783 - protein, 11 aa, Homo sapiens
  misc_feature: Table A; Target 47783; HLA-A*31:01; MTRNR2L1; ENSG00000256618; TAA
STSEIDLPVKR

SEQ ID NO: 47784 - protein, 11 aa, Homo sapiens
  misc_feature: Table A; Target 47784; HLA-A*33:01; MTRNR2L1; ENSG00000256618; TAA
STSEIDLPVKR

SEQ ID NO: 47785 - protein, 11 aa, Homo sapiens
  misc_feature: Table A; Target 47785; HLA-A*33:03; MTRNR2L1; ENSG00000256618; TAA
STSEIDLPVKR

SEQ ID NO: 47786 - protein, 11 aa, Homo sapiens
  misc_feature: Table A; Target 47786; HLA-A*68:01; MTRNR2L1; ENSG00000256618; TAA
STSEIDLPVKR

SEQ ID NO: 47787 - protein, 11 aa, Homo sapiens
  misc_feature: Table A; Target 47787; HLA-A*68:02; MTRNR2L1; ENSG00000256618; TAA
STSEIDLPVKR

SEQ ID NO: 47788 - protein, 11 aa, Homo sapiens
  misc_feature: Table A; Target 47788; HLA-B*57:01; MTRNR2L1; ENSG00000256618; TAA
STSEIDLPVKR

SEQ ID NO: 47789 - protein, 11 aa, Homo sapiens
  misc_feature: Table A; Target 47789; HLA-C*07:06; MTRNR2L1; ENSG00000256618; TAA
STSEIDLPVKR

SEQ ID NO: 47790 - protein, 9 aa, Homo sapiens
  misc_feature: Table A; Target 47790; HLA-A*01:01; MTRNR2L1; ENSG00000256618; TAA
TSEIDLPVK

SEQ ID NO: 47791 - protein, 9 aa, Homo sapiens
  misc_feature: Table A; Target 47791; HLA-A*03:02; MTRNR2L1; ENSG00000256618; TAA
TSEIDLPVK

SEQ ID NO: 47792 - protein, 9 aa, Homo sapiens
  misc_feature: Table A; Target 47792; HLA-A*11:01; MTRNR2L1; ENSG00000256618; TAA
TSEIDLPVK

SEQ ID NO: 47793 - protein, 9 aa, Homo sapiens
  misc_feature: Table A; Target 47793; HLA-A*68:01; MTRNR2L1; ENSG00000256618; TAA
TSEIDLPVK

SEQ ID NO: 47794 - protein, 9 aa, Homo sapiens
  misc_feature: Table A; Target 47794; HLA-B*27:02; MTRNR2L1; ENSG00000256618; TAA
TSEIDLPVK

SEQ ID NO: 47795 - protein, 9 aa, Homo sapiens
  misc_feature: Table A; Target 47795; HLA-C*07:06; MTRNR2L1; ENSG00000256618; TAA
TSEIDLPVK

SEQ ID NO: 47796 - protein, 10 aa, Homo sapiens
  misc_feature: Table A; Target 47796; HLA-A*01:01; MTRNR2L1; ENSG00000256618; TAA
TSEIDLPVKR

SEQ ID NO: 47797 - protein, 10 aa, Homo sapiens
  misc_feature: Table A; Target 47797; HLA-A*33:03; MTRNR2L1; ENSG00000256618; TAA
TSEIDLPVKR

SEQ ID NO: 47798 - protein, 10 aa, Homo sapiens
  misc_feature: Table A; Target 47798; HLA-A*68:01; MTRNR2L1; ENSG00000256618; TAA
TSEIDLPVKR

SEQ ID NO: 47799 - protein, 10 aa, Homo sapiens
  misc_feature: Table A; Target 47799; HLA-B*27:02; MTRNR2L1; ENSG00000256618; TAA
TSEIDLPVKR

SEQ ID NO: 47800 - protein, 10 aa, Homo sapiens
  misc_feature: Table A; Target 47800; HLA-C*07:06; MTRNR2L1; ENSG00000256618; TAA
TSEIDLPVKR

SEQ ID NO: 47801 - protein, 8 aa, Homo sapiens
  misc_feature: Table A; Target 47801; HLA-B*27:02; MYH4; ENSG00000264424; TAA
AACIALDK

SEQ ID NO: 47802 - protein, 9 aa, Homo sapiens
  misc_feature: Table A; Target 47802; HLA-A*11:01; MYH4; ENSG00000264424; TAA
AACIELIEK

SEQ ID NO: 47803 - protein, 8 aa, Homo sapiens
  misc_feature: Table A; Target 47803; HLA-C*03:04; MYH4; ENSG00000264424; TAA
AAEALRNL

SEQ ID NO: 47804 - protein, 8 aa, Homo sapiens
  misc_feature: Table A; Target 47804; HLA-C*16:01; MYH4; ENSG00000264424; TAA
AAEALRNL

SEQ ID NO: 47805 - protein, 8 aa, Homo sapiens
  misc_feature: Table A; Target 47805; HLA-C*16:02; MYH4; ENSG00000264424; TAA
AAEALRNL

SEQ ID NO: 47806 - protein, 8 aa, Homo sapiens
  misc_feature: Table A; Target 47806; HLA-A*30:01; MYH4; ENSG00000264424; TAA
AAMMAEEL

SEQ ID NO: 47807 - protein, 8 aa, Homo sapiens
  misc_feature: Table A; Target 47807; HLA-B*15:01; MYH4; ENSG00000264424; TAA
AAMMAEEL

SEQ ID NO: 47808 - protein, 8 aa, Homo sapiens
  misc_feature: Table A; Target 47808; HLA-B*35:03; MYH4; ENSG00000264424; TAA
AAMMAEEL

SEQ ID NO: 47809 - protein, 8 aa, Homo sapiens
  misc_feature: Table A; Target 47809; HLA-B*37:01; MYH4; ENSG00000264424; TAA
AAMMAEEL

SEQ ID NO: 47810 - protein, 8 aa, Homo sapiens
  misc_feature: Table A; Target 47810; HLA-B*40:01; MYH4; ENSG00000264424; TAA
AAMMAEEL

SEQ ID NO: 47811 - protein, 8 aa, Homo sapiens
  misc_feature: Table A; Target 47811; HLA-B*46:01; MYH4; ENSG00000264424; TAA
AAMMAEEL

SEQ ID NO: 47812 - protein, 8 aa, Homo sapiens
  misc_feature: Table A; Target 47812; HLA-B*58:01; MYH4; ENSG00000264424; TAA
AAMMAEEL

SEQ ID NO: 47813 - protein, 8 aa, Homo sapiens
  misc_feature: Table A; Target 47813; HLA-C*01:02; MYH4; ENSG00000264424; TAA
AAMMAEEL

SEQ ID NO: 47814 - protein, 8 aa, Homo sapiens
  misc_feature: Table A; Target 47814; HLA-C*03:03; MYH4; ENSG00000264424; TAA
AAMMAEEL

SEQ ID NO: 47815 - protein, 8 aa, Homo sapiens
  misc_feature: Table A; Target 47815; HLA-C*03:04; MYH4; ENSG00000264424; TAA
AAMMAEEL

SEQ ID NO: 47816 - protein, 8 aa, Homo sapiens
  misc_feature: Table A; Target 47816; HLA-C*05:01; MYH4; ENSG00000264424; TAA
AAMMAEEL

SEQ ID NO: 47817 - protein, 8 aa, Homo sapiens
  misc_feature: Table A; Target 47817; HLA-C*14:02; MYH4; ENSG00000264424; TAA
AAMMAEEL

SEQ ID NO: 47818 - protein, 8 aa, Homo sapiens
  misc_feature: Table A; Target 47818; HLA-C*16:01; MYH4; ENSG00000264424; TAA
AAMMAEEL

SEQ ID NO: 47819 - protein, 8 aa, Homo sapiens
  misc_feature: Table A; Target 47819; HLA-C*16:02; MYH4; ENSG00000264424; TAA
AAMMAEEL

SEQ ID NO: 47820 - protein, 8 aa, Homo sapiens
  misc_feature: Table A; Target 47820; HLA-C*16:04; MYH4; ENSG00000264424; TAA
AAMMAEEL

SEQ ID NO: 47821 - protein, 9 aa, Homo sapiens
  misc_feature: Table A; Target 47821; HLA-A*11:01; MYH4; ENSG00000264424; TAA
AAMMAEELK

SEQ ID NO: 47822 - protein, 9 aa, Homo sapiens
  misc_feature: Table A; Target 47822; HLA-B*27:02; MYH4; ENSG00000264424; TAA
AAMMAEELK

SEQ ID NO: 47823 - protein, 10 aa, Homo sapiens
  misc_feature: Table A; Target 47823; HLA-A*11:01; MYH4; ENSG00000264424; TAA
AAMMAEELKK

SEQ ID NO: 47824 - protein, 10 aa, Homo sapiens
  misc_feature: Table A; Target 47824; HLA-B*27:02; MYH4; ENSG00000264424; TAA
AAMMAEELKK

SEQ ID NO: 47825 - protein, 8 aa, Homo sapiens
  misc_feature: Table A; Target 47825; HLA-B*15:03; MYH4; ENSG00000264424; TAA
AAWMIYTY

SEQ ID NO: 47826 - protein, 8 aa, Homo sapiens
  misc_feature: Table A; Target 47826; HLA-B*35:01; MYH4; ENSG00000264424; TAA
AAWMIYTY

SEQ ID NO: 47827 - protein, 8 aa, Homo sapiens
  misc_feature: Table A; Target 47827; HLA-C*02:02; MYH4; ENSG00000264424; TAA
AAWMIYTY

SEQ ID NO: 47828 - protein, 8 aa, Homo sapiens
  misc_feature: Table A; Target 47828; HLA-C*12:03; MYH4; ENSG00000264424; TAA
AAWMIYTY

SEQ ID NO: 47829 - protein, 8 aa, Homo sapiens
  misc_feature: Table A; Target 47829; HLA-C*16:04; MYH4; ENSG00000264424; TAA
AAWMIYTY

SEQ ID NO: 47830 - protein, 10 aa, Homo sapiens
  misc_feature: Table A; Target 47830; HLA-B*54:01; MYH4; ENSG00000264424; TAA
AAYLTSLNSA

SEQ ID NO: 47831 - protein, 10 aa, Homo sapiens
  misc_feature: Table A; Target 47831; HLA-B*56:01; MYH4; ENSG00000264424; TAA
AAYLTSLNSA

SEQ ID NO: 47832 - protein, 8 aa, Homo sapiens
  misc_feature: Table A; Target 47832; HLA-A*11:01; MYH4; ENSG00000264424; TAA
ACIELIEK

SEQ ID NO: 47833 - protein, 10 aa, Homo sapiens
  misc_feature: Table A; Target 47833; HLA-B*27:02; MYH4; ENSG00000264424; TAA
ADALADAEER

SEQ ID NO: 47834 - protein, 8 aa, Homo sapiens
  misc_feature: Table A; Target 47834; HLA-B*18:01; MYH4; ENSG00000264424; TAA
ADEKVAIY

SEQ ID NO: 47835 - protein, 8 aa, Homo sapiens
  misc_feature: Table A; Target 47835; HLA-B*37:01; MYH4; ENSG00000264424; TAA
ADEKVAIY

SEQ ID NO: 47836 - protein, 8 aa, Homo sapiens
  misc_feature: Table A; Target 47836; HLA-C*07:01; MYH4; ENSG00000264424; TAA
ADEKVAIY

SEQ ID NO: 47837 - protein, 9 aa, Homo sapiens
  misc_feature: Table A; Target 47837; HLA-A*03:01; MYH4; ENSG00000264424; TAA
ADEKVAIYK

SEQ ID NO: 47838 - protein, 9 aa, Homo sapiens
  misc_feature: Table A; Target 47838; HLA-A*03:02; MYH4; ENSG00000264424; TAA
ADEKVAIYK

SEQ ID NO: 47839 - protein, 9 aa, Homo sapiens
  misc_feature: Table A; Target 47839; HLA-A*11:01; MYH4; ENSG00000264424; TAA
ADEKVAIYK

SEQ ID NO: 47840 - protein, 9 aa, Homo sapiens
  misc_feature: Table A; Target 47840; HLA-B*27:02; MYH4; ENSG00000264424; TAA
ADEKVAIYK

SEQ ID NO: 47841 - protein, 10 aa, Homo sapiens
  misc_feature: Table A; Target 47841; HLA-A*03:02; MYH4; ENSG00000264424; TAA
ADIAESQVNK

SEQ ID NO: 47842 - protein, 10 aa, Homo sapiens
  misc_feature: Table A; Target 47842; HLA-A*11:01; MYH4; ENSG00000264424; TAA
ADIAESQVNK

SEQ ID NO: 47843 - protein, 10 aa, Homo sapiens
  misc_feature: Table A; Target 47843; HLA-B*27:02; MYH4; ENSG00000264424; TAA
ADIAESQVNK

SEQ ID NO: 47844 - protein, 11 aa, Homo sapiens
  misc_feature: Table A; Target 47844; HLA-A*30:01; MYH4; ENSG00000264424; TAA
ADIAESQVNKL

SEQ ID NO: 47845 - protein, 11 aa, Homo sapiens
  misc_feature: Table A; Target 47845; HLA-B*38:01; MYH4; ENSG00000264424; TAA
ADIAESQVNKL

SEQ ID NO: 47846 - protein, 11 aa, Homo sapiens
  misc_feature: Table A; Target 47846; HLA-B*40:01; MYH4; ENSG00000264424; TAA
ADIAESQVNKL

SEQ ID NO: 47847 - protein, 11 aa, Homo sapiens
  misc_feature: Table A; Target 47847; HLA-B*40:02; MYH4; ENSG00000264424; TAA
ADIAESQVNKL

SEQ ID NO: 47848 - protein, 11 aa, Homo sapiens
  misc_feature: Table A; Target 47848; HLA-B*44:02; MYH4; ENSG00000264424; TAA
ADIAESQVNKL

SEQ ID NO: 47849 - protein, 11 aa, Homo sapiens
  misc_feature: Table A; Target 47849; HLA-B*44:03; MYH4; ENSG00000264424; TAA
ADIAESQVNKL

SEQ ID NO: 47850 - protein, 11 aa, Homo sapiens
  misc_feature: Table A; Target 47850; HLA-C*12:03; MYH4; ENSG00000264424; TAA
ADIAESQVNKL

SEQ ID NO: 47851 - protein, 11 aa, Homo sapiens
  misc_feature: Table A; Target 47851; HLA-C*16:02; MYH4; ENSG00000264424; TAA
ADIAESQVNKL

SEQ ID NO: 47852 - protein, 8 aa, Homo sapiens
  misc_feature: Table A; Target 47852; HLA-A*30:01; MYH4; ENSG00000264424; TAA
ADIETYLL

SEQ ID NO: 47853 - protein, 8 aa, Homo sapiens
  misc_feature: Table A; Target 47853; HLA-B*37:01; MYH4; ENSG00000264424; TAA
ADIETYLL

SEQ ID NO: 47854 - protein, 8 aa, Homo sapiens
  misc_feature: Table A; Target 47854; HLA-B*40:02; MYH4; ENSG00000264424; TAA
ADIETYLL

SEQ ID NO: 47855 - protein, 8 aa, Homo sapiens
  misc_feature: Table A; Target 47855; HLA-B*44:02; MYH4; ENSG00000264424; TAA
ADIETYLL

SEQ ID NO: 47856 - protein, 10 aa, Homo sapiens
  misc_feature: Table A; Target 47856; HLA-A*03:01; MYH4; ENSG00000264424; TAA
ADIETYLLEK

SEQ ID NO: 47857 - protein, 10 aa, Homo sapiens
  misc_feature: Table A; Target 47857; HLA-A*11:01; MYH4; ENSG00000264424; TAA
ADIETYLLEK

SEQ ID NO: 47858 - protein, 10 aa, Homo sapiens
  misc_feature: Table A; Target 47858; HLA-B*27:02; MYH4; ENSG00000264424; TAA
ADIETYLLEK

SEQ ID NO: 47859 - protein, 8 aa, Homo sapiens
  misc_feature: Table A; Target 47859; HLA-B*37:01; MYH4; ENSG00000264424; TAA
ADKAAYLT

SEQ ID NO: 47860 - protein, 10 aa, Homo sapiens
  misc_feature: Table A; Target 47860; HLA-A*30:01; MYH4; ENSG00000264424; TAA
ADKAAYLTSL

SEQ ID NO: 47861 - protein, 10 aa, Homo sapiens
  misc_feature: Table A; Target 47861; HLA-B*40:02; MYH4; ENSG00000264424; TAA
ADKAAYLTSL

SEQ ID NO: 47862 - protein, 10 aa, Homo sapiens
  misc_feature: Table A; Target 47862; HLA-C*07:02; MYH4; ENSG00000264424; TAA
ADKAAYLTSL

SEQ ID NO: 47863 - protein, 9 aa, Homo sapiens
  misc_feature: Table A; Target 47863; HLA-B*37:01; MYH4; ENSG00000264424; TAA
ADLLKSLCY

SEQ ID NO: 47864 - protein, 9 aa, Homo sapiens
  misc_feature: Table A; Target 47864; HLA-B*49:01; MYH4; ENSG00000264424; TAA
AEADALADA

SEQ ID NO: 47865 - protein, 9 aa, Homo sapiens
  misc_feature: Table A; Target 47865; HLA-B*44:03; MYH4; ENSG00000264424; TAA
AEAEGGGGK

SEQ ID NO: 47866 - protein, 10 aa, Homo sapiens
  misc_feature: Table A; Target 47866; HLA-B*44:03; MYH4; ENSG00000264424; TAA
AEAEGGGGKK

SEQ ID NO: 47867 - protein, 10 aa, Homo sapiens
  misc_feature: Table A; Target 47867; HLA-B*49:01; MYH4; ENSG00000264424; TAA
AEAEGGGGKK

SEQ ID NO: 47868 - protein, 11 aa, Homo sapiens
  misc_feature: Table A; Target 47868; HLA-B*44:02; MYH4; ENSG00000264424; TAA
AEAEGGGGKKG

SEQ ID NO: 47869 - protein, 11 aa, Homo sapiens
  misc_feature: Table A; Target 47869; HLA-B*44:03; MYH4; ENSG00000264424; TAA
AEAEGGGGKKG

SEQ ID NO: 47870 - protein, 11 aa, Homo sapiens
  misc_feature: Table A; Target 47870; HLA-A*30:01; MYH4; ENSG00000264424; TAA
AEDEEEINAEL

SEQ ID NO: 47871 - protein, 11 aa, Homo sapiens
  misc_feature: Table A; Target 47871; HLA-B*40:01; MYH4; ENSG00000264424; TAA
AEDEEEINAEL

SEQ ID NO: 47872 - protein, 10 aa, Homo sapiens
  misc_feature: Table A; Target 47872; HLA-B*49:01; MYH4; ENSG00000264424; TAA
AEEAEEQSNV

SEQ ID NO: 47873 - protein, 8 aa, Homo sapiens
  misc_feature: Table A; Target 47873; HLA-B*49:01; MYH4; ENSG00000264424; TAA
AEEHVEAV

SEQ ID NO: 47874 - protein, 11 aa, Homo sapiens
  misc_feature: Table A; Target 47874; HLA-A*11:01; MYH4; ENSG00000264424; TAA
AEEHVEAVNSK

SEQ ID NO: 47875 - protein, 11 aa, Homo sapiens
  misc_feature: Table A; Target 47875; HLA-B*27:02; MYH4; ENSG00000264424; TAA
AEEHVEAVNSK

SEQ ID NO: 47876 - protein, 9 aa, Homo sapiens
  misc_feature: Table A; Target 47876; HLA-B*40:01; MYH4; ENSG00000264424; TAA
AEEKAKKAI

SEQ ID NO: 47877 - protein, 9 aa, Homo sapiens
  misc_feature: Table A; Target 47877; HLA-B*44:02; MYH4; ENSG00000264424; TAA
AEEKAKKAI

SEQ ID NO: 47878 - protein, 9 aa, Homo sapiens
  misc_feature: Table A; Target 47878; HLA-B*44:03; MYH4; ENSG00000264424; TAA
AEEKAKKAI

SEQ ID NO: 47879 - protein, 9 aa, Homo sapiens
  misc_feature: Table A; Target 47879; HLA-B*49:01; MYH4; ENSG00000264424; TAA
AEEKAKKAI

SEQ ID NO: 47880 - protein, 9 aa, Homo sapiens
  misc_feature: Table A; Target 47880; HLA-A*30:01; MYH4; ENSG00000264424; TAA
AEEQSNVNL

SEQ ID NO: 47881 - protein, 9 aa, Homo sapiens
  misc_feature: Table A; Target 47881; HLA-B*27:02; MYH4; ENSG00000264424; TAA
AEEQSNVNL

SEQ ID NO: 47882 - protein, 9 aa, Homo sapiens
  misc_feature: Table A; Target 47882; HLA-B*37:01; MYH4; ENSG00000264424; TAA
AEEQSNVNL

SEQ ID NO: 47883 - protein, 9 aa, Homo sapiens
  misc_feature: Table A; Target 47883; HLA-B*38:01; MYH4; ENSG00000264424; TAA
AEEQSNVNL

SEQ ID NO: 47884 - protein, 9 aa, Homo sapiens
  misc_feature: Table A; Target 47884; HLA-B*40:01; MYH4; ENSG00000264424; TAA
AEEQSNVNL

SEQ ID NO: 47885 - protein, 9 aa, Homo sapiens
  misc_feature: Table A; Target 47885; HLA-B*40:02; MYH4; ENSG00000264424; TAA
AEEQSNVNL

SEQ ID NO: 47886 - protein, 9 aa, Homo sapiens
  misc_feature: Table A; Target 47886; HLA-B*44:02; MYH4; ENSG00000264424; TAA
AEEQSNVNL

SEQ ID NO: 47887 - protein, 9 aa, Homo sapiens
  misc_feature: Table A; Target 47887; HLA-B*44:03; MYH4; ENSG00000264424; TAA
AEEQSNVNL

SEQ ID NO: 47888 - protein, 9 aa, Homo sapiens
  misc_feature: Table A; Target 47888; HLA-B*49:01; MYH4; ENSG00000264424; TAA
AEEQSNVNL

SEQ ID NO: 47889 - protein, 10 aa, Homo sapiens
  misc_feature: Table A; Target 47889; HLA-B*40:01; MYH4; ENSG00000264424; TAA
AEEQSNVNLA

SEQ ID NO: 47890 - protein, 10 aa, Homo sapiens
  misc_feature: Table A; Target 47890; HLA-B*49:01; MYH4; ENSG00000264424; TAA
AEEQSNVNLA

SEQ ID NO: 47891 - protein, 9 aa, Homo sapiens
  misc_feature: Table A; Target 47891; HLA-B*49:01; MYH4; ENSG00000264424; TAA
AEERCDQLI

SEQ ID NO: 47892 - protein, 10 aa, Homo sapiens
  misc_feature: Table A; Target 47892; HLA-A*30:01; MYH4; ENSG00000264424; TAA
AEIRSRNDAL

SEQ ID NO: 47893 - protein, 10 aa, Homo sapiens
  misc_feature: Table A; Target 47893; HLA-B*37:01; MYH4; ENSG00000264424; TAA
AEIRSRNDAL

SEQ ID NO: 47894 - protein, 10 aa, Homo sapiens
  misc_feature: Table A; Target 47894; HLA-B*40:01; MYH4; ENSG00000264424; TAA
AEIRSRNDAL

SEQ ID NO: 47895 - protein, 10 aa, Homo sapiens
  misc_feature: Table A; Target 47895; HLA-B*40:02; MYH4; ENSG00000264424; TAA
AEIRSRNDAL

SEQ ID NO: 47896 - protein, 10 aa, Homo sapiens
  misc_feature: Table A; Target 47896; HLA-B*44:02; MYH4; ENSG00000264424; TAA
AEIRSRNDAL

SEQ ID NO: 47897 - protein, 10 aa, Homo sapiens
  misc_feature: Table A; Target 47897; HLA-B*44:03; MYH4; ENSG00000264424; TAA
AEIRSRNDAL

SEQ ID NO: 47898 - protein, 10 aa, Homo sapiens
  misc_feature: Table A; Target 47898; HLA-B*49:01; MYH4; ENSG00000264424; TAA
AEIRSRNDAL

SEQ ID NO: 47899 - protein, 10 aa, Homo sapiens
  misc_feature: Table A; Target 47899; HLA-A*30:01; MYH4; ENSG00000264424; TAA
AEKDEELDQL

SEQ ID NO: 47900 - protein, 10 aa, Homo sapiens
  misc_feature: Table A; Target 47900; HLA-B*39:01; MYH4; ENSG00000264424; TAA
AEKDEELDQL

SEQ ID NO: 47901 - protein, 10 aa, Homo sapiens
  misc_feature: Table A; Target 47901; HLA-B*40:01; MYH4; ENSG00000264424; TAA
AEKDEELDQL

SEQ ID NO: 47902 - protein, 10 aa, Homo sapiens
  misc_feature: Table A; Target 47902; HLA-B*40:02; MYH4; ENSG00000264424; TAA
AEKDEELDQL

SEQ ID NO: 47903 - protein, 10 aa, Homo sapiens
  misc_feature: Table A; Target 47903; HLA-B*44:02; MYH4; ENSG00000264424; TAA
AEKDEELDQL

SEQ ID NO: 47904 - protein, 10 aa, Homo sapiens
  misc_feature: Table A; Target 47904; HLA-B*44:03; MYH4; ENSG00000264424; TAA
AEKDEELDQL

SEQ ID NO: 47905 - protein, 10 aa, Homo sapiens
  misc_feature: Table A; Target 47905; HLA-B*49:01; MYH4; ENSG00000264424; TAA
AEKDEELDQL

SEQ ID NO: 47906 - protein, 11 aa, Homo sapiens
  misc_feature: Table A; Target 47906; HLA-B*27:02; MYH4; ENSG00000264424; TAA
AEKDEELDQLK

SEQ ID NO: 47907 - protein, 9 aa, Homo sapiens
  misc_feature: Table A; Target 47907; HLA-B*44:02; MYH4; ENSG00000264424; TAA
AELEASQKE

SEQ ID NO: 47908 - protein, 9 aa, Homo sapiens
  misc_feature: Table A; Target 47908; HLA-B*44:03; MYH4; ENSG00000264424; TAA
AELEASQKE

SEQ ID NO: 47909 - protein, 11 aa, Homo sapiens
  misc_feature: Table A; Target 47909; HLA-A*30:01; MYH4; ENSG00000264424; TAA
AELEASQKESR

SEQ ID NO: 47910 - protein, 11 aa, Homo sapiens
  misc_feature: Table A; Target 47910; HLA-B*27:02; MYH4; ENSG00000264424; TAA
AELEASQKESR

SEQ ID NO: 47911 - protein, 11 aa, Homo sapiens
  misc_feature: Table A; Target 47911; HLA-B*40:01; MYH4; ENSG00000264424; TAA
AELEASQKESR

SEQ ID NO: 47912 - protein, 11 aa, Homo sapiens
  misc_feature: Table A; Target 47912; HLA-B*44:02; MYH4; ENSG00000264424; TAA
AELEASQKESR

SEQ ID NO: 47913 - protein, 11 aa, Homo sapiens
  misc_feature: Table A; Target 47913; HLA-B*44:03; MYH4; ENSG00000264424; TAA
AELEASQKESR

SEQ ID NO: 47914 - protein, 11 aa, Homo sapiens
  misc_feature: Table A; Target 47914; HLA-C*16:04; MYH4; ENSG00000264424; TAA
AELEASQKESR

SEQ ID NO: 47915 - protein, 10 aa, Homo sapiens
  misc_feature: Table A; Target 47915; HLA-A*30:01; MYH4; ENSG00000264424; TAA
AELGEQIDSL

SEQ ID NO: 47916 - protein, 10 aa, Homo sapiens
  misc_feature: Table A; Target 47916; HLA-B*27:02; MYH4; ENSG00000264424; TAA
AELGEQIDSL

SEQ ID NO: 47917 - protein, 10 aa, Homo sapiens
  misc_feature: Table A; Target 47917; HLA-B*40:01; MYH4; ENSG00000264424; TAA
AELGEQIDSL

SEQ ID NO: 47918 - protein, 10 aa, Homo sapiens
  misc_feature: Table A; Target 47918; HLA-B*40:02; MYH4; ENSG00000264424; TAA
AELGEQIDSL

SEQ ID NO: 47919 - protein, 10 aa, Homo sapiens
  misc_feature: Table A; Target 47919; HLA-B*44:02; MYH4; ENSG00000264424; TAA
AELGEQIDSL

SEQ ID NO: 47920 - protein, 10 aa, Homo sapiens
  misc_feature: Table A; Target 47920; HLA-B*44:03; MYH4; ENSG00000264424; TAA
AELGEQIDSL

SEQ ID NO: 47921 - protein, 10 aa, Homo sapiens
  misc_feature: Table A; Target 47921; HLA-B*49:01; MYH4; ENSG00000264424; TAA
AELGEQIDSL

SEQ ID NO: 47922 - protein, 10 aa, Homo sapiens
  misc_feature: Table A; Target 47922; HLA-C*16:04; MYH4; ENSG00000264424; TAA
AELGEQIDSL

SEQ ID NO: 47923 - protein, 9 aa, Homo sapiens
  misc_feature: Table A; Target 47923; HLA-B*37:01; MYH4; ENSG00000264424; TAA
AELQRGMSK

SEQ ID NO: 47924 - protein, 9 aa, Homo sapiens
  misc_feature: Table A; Target 47924; HLA-B*40:02; MYH4; ENSG00000264424; TAA
AELQRGMSK

SEQ ID NO: 47925 - protein, 9 aa, Homo sapiens
  misc_feature: Table A; Target 47925; HLA-B*44:02; MYH4; ENSG00000264424; TAA
AELQRGMSK

SEQ ID NO: 47926 - protein, 9 aa, Homo sapiens
  misc_feature: Table A; Target 47926; HLA-B*44:03; MYH4; ENSG00000264424; TAA
AELQRGMSK

SEQ ID NO: 47927 - protein, 9 aa, Homo sapiens
  misc_feature: Table A; Target 47927; HLA-C*16:01; MYH4; ENSG00000264424; TAA
AELQRGMSK

SEQ ID NO: 47928 - protein, 10 aa, Homo sapiens
  misc_feature: Table A; Target 47928; HLA-B*40:02; MYH4; ENSG00000264424; TAA
AELQRGMSKA

SEQ ID NO: 47929 - protein, 8 aa, Homo sapiens
  misc_feature: Table A; Target 47929; HLA-B*39:01; MYH4; ENSG00000264424; TAA
AEPDGTEV

SEQ ID NO: 47930 - protein, 8 aa, Homo sapiens
  misc_feature: Table A; Target 47930; HLA-B*49:01; MYH4; ENSG00000264424; TAA
AEPDGTEV

SEQ ID NO: 47931 - protein, 9 aa, Homo sapiens
  misc_feature: Table A; Target 47931; HLA-A*30:01; MYH4; ENSG00000264424; TAA
AEPDGTEVA

SEQ ID NO: 47932 - protein, 9 aa, Homo sapiens
  misc_feature: Table A; Target 47932; HLA-B*40:01; MYH4; ENSG00000264424; TAA
AEPDGTEVA

SEQ ID NO: 47933 - protein, 9 aa, Homo sapiens
  misc_feature: Table A; Target 47933; HLA-B*49:01; MYH4; ENSG00000264424; TAA
AEPDGTEVA

SEQ ID NO: 47934 - protein, 11 aa, Homo sapiens
  misc_feature: Table A; Target 47934; HLA-A*11:01; MYH4; ENSG00000264424; TAA
AEPDGTEVADK

SEQ ID NO: 47935 - protein, 11 aa, Homo sapiens
  misc_feature: Table A; Target 47935; HLA-B*39:01; MYH4; ENSG00000264424; TAA
AEPDGTEVADK

SEQ ID NO: 47936 - protein, 11 aa, Homo sapiens
  misc_feature: Table A; Target 47936; HLA-B*27:02; MYH4; ENSG00000264424; TAA
AEQELLDASER

SEQ ID NO: 47937 - protein, 9 aa, Homo sapiens
  misc_feature: Table A; Target 47937; HLA-B*44:02; MYH4; ENSG00000264424; TAA
AERSYHIFY

SEQ ID NO: 47938 - protein, 9 aa, Homo sapiens
  misc_feature: Table A; Target 47938; HLA-B*44:03; MYH4; ENSG00000264424; TAA
AERSYHIFY

SEQ ID NO: 47939 - protein, 8 aa, Homo sapiens
  misc_feature: Table A; Target 47939; HLA-A*30:01; MYH4; ENSG00000264424; TAA
AESQVNKL

SEQ ID NO: 47940 - protein, 8 aa, Homo sapiens
  misc_feature: Table A; Target 47940; HLA-B*18:01; MYH4; ENSG00000264424; TAA
AESQVNKL

SEQ ID NO: 47941 - protein, 8 aa, Homo sapiens
  misc_feature: Table A; Target 47941; HLA-B*37:01; MYH4; ENSG00000264424; TAA
AESQVNKL

SEQ ID NO: 47942 - protein, 8 aa, Homo sapiens
  misc_feature: Table A; Target 47942; HLA-B*40:01; MYH4; ENSG00000264424; TAA
AESQVNKL

SEQ ID NO: 47943 - protein, 8 aa, Homo sapiens
  misc_feature: Table A; Target 47943; HLA-B*40:02; MYH4; ENSG00000264424; TAA
AESQVNKL

SEQ ID NO: 47944 - protein, 8 aa, Homo sapiens
  misc_feature: Table A; Target 47944; HLA-B*44:02; MYH4; ENSG00000264424; TAA
AESQVNKL

SEQ ID NO: 47945 - protein, 8 aa, Homo sapiens
  misc_feature: Table A; Target 47945; HLA-B*44:03; MYH4; ENSG00000264424; TAA
AESQVNKL

SEQ ID NO: 47946 - protein, 8 aa, Homo sapiens
  misc_feature: Table A; Target 47946; HLA-B*49:01; MYH4; ENSG00000264424; TAA
AESQVNKL

SEQ ID NO: 47947 - protein, 8 aa, Homo sapiens
  misc_feature: Table A; Target 47947; HLA-C*16:04; MYH4; ENSG00000264424; TAA
AESQVNKL

SEQ ID NO: 47948 - protein, 9 aa, Homo sapiens
  misc_feature: Table A; Target 47948; HLA-B*44:02; MYH4; ENSG00000264424; TAA
AESQVNKLR

SEQ ID NO: 47949 - protein, 9 aa, Homo sapiens
  misc_feature: Table A; Target 47949; HLA-B*44:03; MYH4; ENSG00000264424; TAA
AESQVNKLR

SEQ ID NO: 47950 - protein, 10 aa, Homo sapiens
  misc_feature: Table A; Target 47950; HLA-B*44:02; MYH4; ENSG00000264424; TAA
AESQVNKLRV

SEQ ID NO: 47951 - protein, 10 aa, Homo sapiens
  misc_feature: Table A; Target 47951; HLA-B*44:03; MYH4; ENSG00000264424; TAA
AESQVNKLRV

SEQ ID NO: 47952 - protein, 10 aa, Homo sapiens
  misc_feature: Table A; Target 47952; HLA-B*49:01; MYH4; ENSG00000264424; TAA
AESQVNKLRV

SEQ ID NO: 47953 - protein, 10 aa, Homo sapiens
  misc_feature: Table A; Target 47953; HLA-A*30:01; MYH4; ENSG00000264424; TAA
AETEKEMANM

SEQ ID NO: 47954 - protein, 10 aa, Homo sapiens
  misc_feature: Table A; Target 47954; HLA-B*40:01; MYH4; ENSG00000264424; TAA
AETEKEMANM

SEQ ID NO: 47955 - protein, 10 aa, Homo sapiens
  misc_feature: Table A; Target 47955; HLA-B*40:02; MYH4; ENSG00000264424; TAA
AETEKEMANM

SEQ ID NO: 47956 - protein, 10 aa, Homo sapiens
  misc_feature: Table A; Target 47956; HLA-B*44:02; MYH4; ENSG00000264424; TAA
AETEKEMANM

SEQ ID NO: 47957 - protein, 10 aa, Homo sapiens
  misc_feature: Table A; Target 47957; HLA-B*44:03; MYH4; ENSG00000264424; TAA
AETEKEMANM

SEQ ID NO: 47958 - protein, 10 aa, Homo sapiens
  misc_feature: Table A; Target 47958; HLA-B*49:01; MYH4; ENSG00000264424; TAA
AETEKEMANM

SEQ ID NO: 47959 - protein, 10 aa, Homo sapiens
  misc_feature: Table A; Target 47959; HLA-A*30:01; MYH4; ENSG00000264424; TAA
AEVEELRASL

SEQ ID NO: 47960 - protein, 10 aa, Homo sapiens
  misc_feature: Table A; Target 47960; HLA-B*18:01; MYH4; ENSG00000264424; TAA
AEVEELRASL

SEQ ID NO: 47961 - protein, 10 aa, Homo sapiens
  misc_feature: Table A; Target 47961; HLA-B*27:02; MYH4; ENSG00000264424; TAA
AEVEELRASL

SEQ ID NO: 47962 - protein, 10 aa, Homo sapiens
  misc_feature: Table A; Target 47962; HLA-B*37:01; MYH4; ENSG00000264424; TAA
AEVEELRASL

SEQ ID NO: 47963 - protein, 10 aa, Homo sapiens
  misc_feature: Table A; Target 47963; HLA-B*40:01; MYH4; ENSG00000264424; TAA
AEVEELRASL

SEQ ID NO: 47964 - protein, 10 aa, Homo sapiens
  misc_feature: Table A; Target 47964; HLA-B*40:02; MYH4; ENSG00000264424; TAA
AEVEELRASL

SEQ ID NO: 47965 - protein, 10 aa, Homo sapiens
  misc_feature: Table A; Target 47965; HLA-B*44:02; MYH4; ENSG00000264424; TAA
AEVEELRASL

SEQ ID NO: 47966 - protein, 10 aa, Homo sapiens
  misc_feature: Table A; Target 47966; HLA-B*44:03; MYH4; ENSG00000264424; TAA
AEVEELRASL

SEQ ID NO: 47967 - protein, 10 aa, Homo sapiens
  misc_feature: Table A; Target 47967; HLA-B*49:01; MYH4; ENSG00000264424; TAA
AEVEELRASL

SEQ ID NO: 47968 - protein, 10 aa, Homo sapiens
  misc_feature: Table A; Target 47968; HLA-C*02:02; MYH4; ENSG00000264424; TAA
AEVEELRASL

SEQ ID NO: 47969 - protein, 10 aa, Homo sapiens
  misc_feature: Table A; Target 47969; HLA-C*16:04; MYH4; ENSG00000264424; TAA
AEVEELRASL

SEQ ID NO: 47970 - protein, 8 aa, Homo sapiens
  misc_feature: Table A; Target 47970; HLA-C*16:02; MYH4; ENSG00000264424; TAA
AFGNAKTV

SEQ ID NO: 47971 - protein, 10 aa, Homo sapiens
  misc_feature: Table A; Target 47971; HLA-C*14:02; MYH4; ENSG00000264424; TAA
AFLFSGAQTA

SEQ ID NO: 47972 - protein, 10 aa, Homo sapiens
  misc_feature: Table A; Target 47972; HLA-A*24:02; MYH4; ENSG00000264424; TAA
AFMNVKHWPW

SEQ ID NO: 47973 - protein, 9 aa, Homo sapiens
  misc_feature: Table A; Target 47973; HLA-C*04:01; MYH4; ENSG00000264424; TAA
AFTQQIEEL

SEQ ID NO: 47974 - protein, 9 aa, Homo sapiens
  misc_feature: Table A; Target 47974; HLA-C*14:02; MYH4; ENSG00000264424; TAA
AFTQQIEEL

SEQ ID NO: 47975 - protein, 8 aa, Homo sapiens
  misc_feature: Table A; Target 47975; HLA-A*03:02; MYH4; ENSG00000264424; TAA
AGATVTVK

SEQ ID NO: 47976 - protein, 8 aa, Homo sapiens
  misc_feature: Table A; Target 47976; HLA-A*11:01; MYH4; ENSG00000264424; TAA
AGATVTVK

SEQ ID NO: 47977 - protein, 9 aa, Homo sapiens
  misc_feature: Table A; Target 47977; HLA-A*31:01; MYH4; ENSG00000264424; TAA
AGKTVNTKR

SEQ ID NO: 47978 - protein, 9 aa, Homo sapiens
  misc_feature: Table A; Target 47978; HLA-A*03:02; MYH4; ENSG00000264424; TAA
AGLDETIAK

SEQ ID NO: 47979 - protein, 9 aa, Homo sapiens
  misc_feature: Table A; Target 47979; HLA-A*11:01; MYH4; ENSG00000264424; TAA
AGLDETIAK

SEQ ID NO: 47980 - protein, 10 aa, Homo sapiens
  misc_feature: Table A; Target 47980; HLA-A*02:04; MYH4; ENSG00000264424; TAA
AGLDETIAKL

SEQ ID NO: 47981 - protein, 10 aa, Homo sapiens
  misc_feature: Table A; Target 47981; HLA-B*40:01; MYH4; ENSG00000264424; TAA
AGLDETIAKL

SEQ ID NO: 47982 - protein, 8 aa, Homo sapiens
  misc_feature: Table A; Target 47982; HLA-B*13:02; MYH4; ENSG00000264424; TAA
AGTVDYNI

SEQ ID NO: 47983 - protein, 9 aa, Homo sapiens
  misc_feature: Table A; Target 47983; HLA-B*38:01; MYH4; ENSG00000264424; TAA
AHQQTLDDL

SEQ ID NO: 47984 - protein, 9 aa, Homo sapiens
  misc_feature: Table A; Target 47984; HLA-B*39:01; MYH4; ENSG00000264424; TAA
AHQQTLDDL

SEQ ID NO: 47985 - protein, 11 aa, Homo sapiens
  misc_feature: Table A; Target 47985; HLA-B*38:01; MYH4; ENSG00000264424; TAA
AHQQTLDDLQM

SEQ ID NO: 47986 - protein, 9 aa, Homo sapiens
  misc_feature: Table A; Target 47986; HLA-A*26:01; MYH4; ENSG00000264424; TAA
AIFGEAAPF

SEQ ID NO: 47987 - protein, 9 aa, Homo sapiens
  misc_feature: Table A; Target 47987; HLA-A*29:02; MYH4; ENSG00000264424; TAA
AIFGEAAPF

SEQ ID NO: 47988 - protein, 9 aa, Homo sapiens
  misc_feature: Table A; Target 47988; HLA-A*30:02; MYH4; ENSG00000264424; TAA
AIFGEAAPF

SEQ ID NO: 47989 - protein, 9 aa, Homo sapiens
  misc_feature: Table A; Target 47989; HLA-B*15:01; MYH4; ENSG00000264424; TAA
AIFGEAAPF

SEQ ID NO: 47990 - protein, 9 aa, Homo sapiens
  misc_feature: Table A; Target 47990; HLA-B*46:01; MYH4; ENSG00000264424; TAA
AIFGEAAPF

SEQ ID NO: 47991 - protein, 9 aa, Homo sapiens
  misc_feature: Table A; Target 47991; HLA-C*02:02; MYH4; ENSG00000264424; TAA
AIFGEAAPF

SEQ ID NO: 47992 - protein, 9 aa, Homo sapiens
  misc_feature: Table A; Target 47992; HLA-C*07:04; MYH4; ENSG00000264424; TAA
AIFGEAAPF

SEQ ID NO: 47993 - protein, 9 aa, Homo sapiens
  misc_feature: Table A; Target 47993; HLA-C*14:02; MYH4; ENSG00000264424; TAA
AIFGEAAPF

SEQ ID NO: 47994 - protein, 10 aa, Homo sapiens
  misc_feature: Table A; Target 47994; HLA-A*02:01; MYH4; ENSG00000264424; TAA
AIFGEAAPFL

SEQ ID NO: 47995 - protein, 10 aa, Homo sapiens
  misc_feature: Table A; Target 47995; HLA-A*02:03; MYH4; ENSG00000264424; TAA
AIFGEAAPFL

SEQ ID NO: 47996 - protein, 10 aa, Homo sapiens
  misc_feature: Table A; Target 47996; HLA-A*02:04; MYH4; ENSG00000264424; TAA
AIFGEAAPFL

SEQ ID NO: 47997 - protein, 10 aa, Homo sapiens
  misc_feature: Table A; Target 47997; HLA-A*02:07; MYH4; ENSG00000264424; TAA
AIFGEAAPFL

SEQ ID NO: 47998 - protein, 10 aa, Homo sapiens
  misc_feature: Table A; Target 47998; HLA-A*03:01; MYH4; ENSG00000264424; TAA
AIFGEAAPFL

SEQ ID NO: 47999 - protein, 10 aa, Homo sapiens
  misc_feature: Table A; Target 47999; HLA-A*03:02; MYH4; ENSG00000264424; TAA
AIFGEAAPFL

SEQ ID NO: 48000 - protein, 10 aa, Homo sapiens
  misc_feature: Table A; Target 48000; HLA-B*27:05; MYH4; ENSG00000264424; TAA
AIFGEAAPFL

SEQ ID NO: 48001 - protein, 11 aa, Homo sapiens
  misc_feature: Table A; Target 48001; HLA-A*03:01; MYH4; ENSG00000264424; TAA
AIFGEAAPFLR

SEQ ID NO: 48002 - protein, 11 aa, Homo sapiens
  misc_feature: Table A; Target 48002; HLA-A*03:02; MYH4; ENSG00000264424; TAA
AIFGEAAPFLR

SEQ ID NO: 48003 - protein, 11 aa, Homo sapiens
  misc_feature: Table A; Target 48003; HLA-A*11:01; MYH4; ENSG00000264424; TAA
AIFGEAAPFLR

SEQ ID NO: 48004 - protein, 11 aa, Homo sapiens
  misc_feature: Table A; Target 48004; HLA-A*29:02; MYH4; ENSG00000264424; TAA
AIFGEAAPFLR

SEQ ID NO: 48005 - protein, 11 aa, Homo sapiens
  misc_feature: Table A; Target 48005; HLA-A*31:01; MYH4; ENSG00000264424; TAA
AIFGEAAPFLR

SEQ ID NO: 48006 - protein, 11 aa, Homo sapiens
  misc_feature: Table A; Target 48006; HLA-C*07:06; MYH4; ENSG00000264424; TAA
AIFGEAAPFLR

SEQ ID NO: 48007 - protein, 11 aa, Homo sapiens
  misc_feature: Table A; Target 48007; HLA-A*03:02; MYH4; ENSG00000264424; TAA
AIPEGQFIDSK

SEQ ID NO: 48008 - protein, 11 aa, Homo sapiens
  misc_feature: Table A; Target 48008; HLA-A*11:01; MYH4; ENSG00000264424; TAA
AIPEGQFIDSK

SEQ ID NO: 48009 - protein, 8 aa, Homo sapiens
  misc_feature: Table A; Target 48009; HLA-C*01:02; MYH4; ENSG00000264424; TAA
AIQRTEEL

SEQ ID NO: 48010 - protein, 9 aa, Homo sapiens
  misc_feature: Table A; Target 48010; HLA-A*03:02; MYH4; ENSG00000264424; TAA
AIRGQDDLK

SEQ ID NO: 48011 - protein, 8 aa, Homo sapiens
  misc_feature: Table A; Target 48011; HLA-C*01:02; MYH4; ENSG00000264424; TAA
AITDAAMM

SEQ ID NO: 48012 - protein, 8 aa, Homo sapiens
  misc_feature: Table A; Target 48012; HLA-C*14:02; MYH4; ENSG00000264424; TAA
AITDAAMM

SEQ ID NO: 48013 - protein, 9 aa, Homo sapiens
  misc_feature: Table A; Target 48013; HLA-B*13:02; MYH4; ENSG00000264424; TAA
AITDAAMMA

SEQ ID NO: 48014 - protein, 9 aa, Homo sapiens
  misc_feature: Table A; Target 48014; HLA-A*02:04; MYH4; ENSG00000264424; TAA
AIYEKMFLW

SEQ ID NO: 48015 - protein, 9 aa, Homo sapiens
  misc_feature: Table A; Target 48015; HLA-B*57:01; MYH4; ENSG00000264424; TAA
AIYEKMFLW

SEQ ID NO: 48016 - protein, 10 aa, Homo sapiens
  misc_feature: Table A; Target 48016; HLA-B*07:02; MYH4; ENSG00000264424; TAA
AIYKLTGAVM

SEQ ID NO: 48017 - protein, 10 aa, Homo sapiens
  misc_feature: Table A; Target 48017; HLA-B*15:03; MYH4; ENSG00000264424; TAA
AIYKLTGAVM

SEQ ID NO: 48018 - protein, 10 aa, Homo sapiens
  misc_feature: Table A; Target 48018; HLA-B*46:01; MYH4; ENSG00000264424; TAA
AIYKLTGAVM

SEQ ID NO: 48019 - protein, 9 aa, Homo sapiens
  misc_feature: Table A; Target 48019; HLA-B*15:03; MYH4; ENSG00000264424; TAA
AKAELQRGM

SEQ ID NO: 48020 - protein, 8 aa, Homo sapiens
  misc_feature: Table A; Target 48020; HLA-B*15:03; MYH4; ENSG00000264424; TAA
AKANFEKM

SEQ ID NO: 48021 - protein, 9 aa, Homo sapiens
  misc_feature: Table A; Target 48021; HLA-B*15:03; MYH4; ENSG00000264424; TAA
AKIKEVTER

SEQ ID NO: 48022 - protein, 10 aa, Homo sapiens
  misc_feature: Table A; Target 48022; HLA-B*15:03; MYH4; ENSG00000264424; TAA
AKKAITDAAM

SEQ ID NO: 48023 - protein, 9 aa, Homo sapiens
  misc_feature: Table A; Target 48023; HLA-B*15:03; MYH4; ENSG00000264424; TAA
AKSTLAHAL

SEQ ID NO: 48024 - protein, 9 aa, Homo sapiens
  misc_feature: Table A; Target 48024; HLA-B*38:01; MYH4; ENSG00000264424; TAA
AKSTLAHAL

SEQ ID NO: 48025 - protein, 9 aa, Homo sapiens
  misc_feature: Table A; Target 48025; HLA-B*15:03; MYH4; ENSG00000264424; TAA
AKTEAGATV

SEQ ID NO: 48026 - protein, 9 aa, Homo sapiens
  misc_feature: Table A; Target 48026; HLA-A*03:01; MYH4; ENSG00000264424; TAA
ALAIQLQKK

SEQ ID NO: 48027 - protein, 9 aa, Homo sapiens
  misc_feature: Table A; Target 48027; HLA-A*03:02; MYH4; ENSG00000264424; TAA
ALAIQLQKK

SEQ ID NO: 48028 - protein, 9 aa, Homo sapiens
  misc_feature: Table A; Target 48028; HLA-A*02:04; MYH4; ENSG00000264424; TAA
ALAKAIYEK

SEQ ID NO: 48029 - protein, 9 aa, Homo sapiens
  misc_feature: Table A; Target 48029; HLA-A*03:01; MYH4; ENSG00000264424; TAA
ALAKAIYEK

SEQ ID NO: 48030 - protein, 9 aa, Homo sapiens
  misc_feature: Table A; Target 48030; HLA-A*03:02; MYH4; ENSG00000264424; TAA
ALAKAIYEK

SEQ ID NO: 48031 - protein, 9 aa, Homo sapiens
  misc_feature: Table A; Target 48031; HLA-A*11:01; MYH4; ENSG00000264424; TAA
ALAKAIYEK

SEQ ID NO: 48032 - protein, 9 aa, Homo sapiens
  misc_feature: Table A; Target 48032; HLA-A*03:01; MYH4; ENSG00000264424; TAA
ALDKKQRNF

SEQ ID NO: 48033 - protein, 9 aa, Homo sapiens
  misc_feature: Table A; Target 48033; HLA-A*03:01; MYH4; ENSG00000264424; TAA
ALFRENLNK

SEQ ID NO: 48034 - protein, 9 aa, Homo sapiens
  misc_feature: Table A; Target 48034; HLA-A*03:02; MYH4; ENSG00000264424; TAA
ALFRENLNK

SEQ ID NO: 48035 - protein, 9 aa, Homo sapiens
  misc_feature: Table A; Target 48035; HLA-A*11:01; MYH4; ENSG00000264424; TAA
ALFRENLNK

SEQ ID NO: 48036 - protein, 10 aa, Homo sapiens
  misc_feature: Table A; Target 48036; HLA-A*02:01; MYH4; ENSG00000264424; TAA
ALFRENLNKL

SEQ ID NO: 48037 - protein, 10 aa, Homo sapiens
  misc_feature: Table A; Target 48037; HLA-A*02:03; MYH4; ENSG00000264424; TAA
ALFRENLNKL

SEQ ID NO: 48038 - protein, 10 aa, Homo sapiens
  misc_feature: Table A; Target 48038; HLA-A*02:04; MYH4; ENSG00000264424; TAA
ALFRENLNKL

SEQ ID NO: 48039 - protein, 11 aa, Homo sapiens
  misc_feature: Table A; Target 48039; HLA-A*02:04; MYH4; ENSG00000264424; TAA
ALFRENLNKLM

SEQ ID NO: 48040 - protein, 10 aa, Homo sapiens
  misc_feature: Table A; Target 48040; HLA-A*02:01; MYH4; ENSG00000264424; TAA
ALQEAHQQTL

SEQ ID NO: 48041 - protein, 10 aa, Homo sapiens
  misc_feature: Table A; Target 48041; HLA-A*02:03; MYH4; ENSG00000264424; TAA
ALQEAHQQTL

SEQ ID NO: 48042 - protein, 10 aa, Homo sapiens
  misc_feature: Table A; Target 48042; HLA-A*02:04; MYH4; ENSG00000264424; TAA
ALQEAHQQTL

SEQ ID NO: 48043 - protein, 10 aa, Homo sapiens
  misc_feature: Table A; Target 48043; HLA-A*02:07; MYH4; ENSG00000264424; TAA
ALQEAHQQTL

SEQ ID NO: 48044 - protein, 10 aa, Homo sapiens
  misc_feature: Table A; Target 48044; HLA-A*32:01; MYH4; ENSG00000264424; TAA
ALQEAHQQTL

SEQ ID NO: 48045 - protein, 10 aa, Homo sapiens
  misc_feature: Table A; Target 48045; HLA-B*13:02; MYH4; ENSG00000264424; TAA
ALQEAHQQTL

SEQ ID NO: 48046 - protein, 10 aa, Homo sapiens
  misc_feature: Table A; Target 48046; HLA-B*15:01; MYH4; ENSG00000264424; TAA
ALQEAHQQTL

SEQ ID NO: 48047 - protein, 10 aa, Homo sapiens
  misc_feature: Table A; Target 48047; HLA-B*37:01; MYH4; ENSG00000264424; TAA
ALQEAHQQTL

SEQ ID NO: 48048 - protein, 10 aa, Homo sapiens
  misc_feature: Table A; Target 48048; HLA-B*38:01; MYH4; ENSG00000264424; TAA
ALQEAHQQTL

SEQ ID NO: 48049 - protein, 10 aa, Homo sapiens
  misc_feature: Table A; Target 48049; HLA-B*40:01; MYH4; ENSG00000264424; TAA
ALQEAHQQTL

SEQ ID NO: 48050 - protein, 10 aa, Homo sapiens
  misc_feature: Table A; Target 48050; HLA-B*55:01; MYH4; ENSG00000264424; TAA
ALQEAHQQTL

SEQ ID NO: 48051 - protein, 10 aa, Homo sapiens
  misc_feature: Table A; Target 48051; HLA-B*58:01; MYH4; ENSG00000264424; TAA
ALQEAHQQTL

SEQ ID NO: 48052 - protein, 10 aa, Homo sapiens
  misc_feature: Table A; Target 48052; HLA-C*01:02; MYH4; ENSG00000264424; TAA
ALQEAHQQTL

SEQ ID NO: 48053 - protein, 10 aa, Homo sapiens
  misc_feature: Table A; Target 48053; HLA-C*16:02; MYH4; ENSG00000264424; TAA
ALQEAHQQTL

SEQ ID NO: 48054 - protein, 8 aa, Homo sapiens
  misc_feature: Table A; Target 48054; HLA-B*08:01; MYH4; ENSG00000264424; TAA
ALRIKKKM

SEQ ID NO: 48055 - protein, 9 aa, Homo sapiens
  misc_feature: Table A; Target 48055; HLA-A*23:01; MYH4; ENSG00000264424; TAA
AMKTLAFLF

SEQ ID NO: 48056 - protein, 9 aa, Homo sapiens
  misc_feature: Table A; Target 48056; HLA-A*24:02; MYH4; ENSG00000264424; TAA
AMKTLAFLF

SEQ ID NO: 48057 - protein, 9 aa, Homo sapiens
  misc_feature: Table A; Target 48057; HLA-A*29:02; MYH4; ENSG00000264424; TAA
AMKTLAFLF

SEQ ID NO: 48058 - protein, 9 aa, Homo sapiens
  misc_feature: Table A; Target 48058; HLA-A*31:01; MYH4; ENSG00000264424; TAA
AMKTLAFLF

SEQ ID NO: 48059 - protein, 9 aa, Homo sapiens
  misc_feature: Table A; Target 48059; HLA-B*57:01; MYH4; ENSG00000264424; TAA
AMKTLAFLF

SEQ ID NO: 48060 - protein, 9 aa, Homo sapiens
  misc_feature: Table A; Target 48060; HLA-A*03:02; MYH4; ENSG00000264424; TAA
AMMAEELKK

SEQ ID NO: 48061 - protein, 9 aa, Homo sapiens
  misc_feature: Table A; Target 48061; HLA-A*11:01; MYH4; ENSG00000264424; TAA
AMMAEELKK

SEQ ID NO: 48062 - protein, 9 aa, Homo sapiens
  misc_feature: Table A; Target 48062; HLA-A*02:01; MYH4; ENSG00000264424; TAA
AMMTHLHEP

SEQ ID NO: 48063 - protein, 9 aa, Homo sapiens
  misc_feature: Table A; Target 48063; HLA-A*32:01; MYH4; ENSG00000264424; TAA
AMVERRANL

SEQ ID NO: 48064 - protein, 9 aa, Homo sapiens
  misc_feature: Table A; Target 48064; HLA-B*08:01; MYH4; ENSG00000264424; TAA
AMVERRANL

SEQ ID NO: 48065 - protein, 9 aa, Homo sapiens
  misc_feature: Table A; Target 48065; HLA-C*16:01; MYH4; ENSG00000264424; TAA
AMVERRANL

SEQ ID NO: 48066 - protein, 10 aa, Homo sapiens
  misc_feature: Table A; Target 48066; HLA-A*03:01; MYH4; ENSG00000264424; TAA
AMVSQLSRGK

SEQ ID NO: 48067 - protein, 10 aa, Homo sapiens
  misc_feature: Table A; Target 48067; HLA-A*03:02; MYH4; ENSG00000264424; TAA
AMVSQLSRGK

SEQ ID NO: 48068 - protein, 9 aa, Homo sapiens
  misc_feature: Table A; Target 48068; HLA-A*11:01; MYH4; ENSG00000264424; TAA
ANMKEEFEK

SEQ ID NO: 48069 - protein, 9 aa, Homo sapiens
  misc_feature: Table A; Target 48069; HLA-B*07:02; MYH4; ENSG00000264424; TAA
ANRQAAEAL

SEQ ID NO: 48070 - protein, 9 aa, Homo sapiens
  misc_feature: Table A; Target 48070; HLA-C*01:02; MYH4; ENSG00000264424; TAA
ANRQAAEAL

SEQ ID NO: 48071 - protein, 9 aa, Homo sapiens
  misc_feature: Table A; Target 48071; HLA-C*07:02; MYH4; ENSG00000264424; TAA
ANRQAAEAL

SEQ ID NO: 48072 - protein, 9 aa, Homo sapiens
  misc_feature: Table A; Target 48072; HLA-C*07:06; MYH4; ENSG00000264424; TAA
ANSEVAQWR

SEQ ID NO: 48073 - protein, 9 aa, Homo sapiens
  misc_feature: Table A; Target 48073; HLA-B*07:02; MYH4; ENSG00000264424; TAA
APFLRKSEK

SEQ ID NO: 48074 - protein, 9 aa, Homo sapiens
  misc_feature: Table A; Target 48074; HLA-C*07:02; MYH4; ENSG00000264424; TAA
APFLRKSEK

SEQ ID NO: 48075 - protein, 8 aa, Homo sapiens
  misc_feature: Table A; Target 48075; HLA-B*51:01; MYH4; ENSG00000264424; TAA
APPHIFSI

SEQ ID NO: 48076 - protein, 8 aa, Homo sapiens
  misc_feature: Table A; Target 48076; HLA-A*11:01; MYH4; ENSG00000264424; TAA
AQIEMNKK

SEQ ID NO: 48077 - protein, 8 aa, Homo sapiens
  misc_feature: Table A; Target 48077; HLA-B*27:05; MYH4; ENSG00000264424; TAA
AQIEMNKK

SEQ ID NO: 48078 - protein, 10 aa, Homo sapiens
  misc_feature: Table A; Target 48078; HLA-B*13:02; MYH4; ENSG00000264424; TAA
AQLITRTQAI

SEQ ID NO: 48079 - protein, 9 aa, Homo sapiens
  misc_feature: Table A; Target 48079; HLA-A*03:01; MYH4; ENSG00000264424; TAA
AQNKPFDAK

SEQ ID NO: 48080 - protein, 9 aa, Homo sapiens
  misc_feature: Table A; Target 48080; HLA-A*03:02; MYH4; ENSG00000264424; TAA
AQNKPFDAK

SEQ ID NO: 48081 - protein, 9 aa, Homo sapiens
  misc_feature: Table A; Target 48081; HLA-A*11:01; MYH4; ENSG00000264424; TAA
AQNKPFDAK

SEQ ID NO: 48082 - protein, 9 aa, Homo sapiens
  misc_feature: Table A; Target 48082; HLA-A*32:01; MYH4; ENSG00000264424; TAA
AQNKPFDAK

SEQ ID NO: 48083 - protein, 10 aa, Homo sapiens
  misc_feature: Table A; Target 48083; HLA-B*27:02; MYH4; ENSG00000264424; TAA
ARLHTESGEF

SEQ ID NO: 48084 - protein, 10 aa, Homo sapiens
  misc_feature: Table A; Target 48084; HLA-B*27:05; MYH4; ENSG00000264424; TAA
ARLHTESGEF

SEQ ID NO: 48085 - protein, 10 aa, Homo sapiens
  misc_feature: Table A; Target 48085; HLA-C*16:04; MYH4; ENSG00000264424; TAA
ARLHTESGEF

SEQ ID NO: 48086 - protein, 9 aa, Homo sapiens
  misc_feature: Table A; Target 48086; HLA-B*27:05; MYH4; ENSG00000264424; TAA
ARNAEEKAK

SEQ ID NO: 48087 - protein, 8 aa, Homo sapiens
  misc_feature: Table A; Target 48087; HLA-A*30:02; MYH4; ENSG00000264424; TAA
ASADIETY

SEQ ID NO: 48088 - protein, 8 aa, Homo sapiens
  misc_feature: Table A; Target 48088; HLA-B*15:01; MYH4; ENSG00000264424; TAA
ASADIETY

SEQ ID NO: 48089 - protein, 8 aa, Homo sapiens
  misc_feature: Table A; Target 48089; HLA-B*58:01; MYH4; ENSG00000264424; TAA
ASADIETY

SEQ ID NO: 48090 - protein, 9 aa, Homo sapiens
  misc_feature: Table A; Target 48090; HLA-A*02:01; MYH4; ENSG00000264424; TAA
ASADIETYL

SEQ ID NO: 48091 - protein, 9 aa, Homo sapiens
  misc_feature: Table A; Target 48091; HLA-A*23:01; MYH4; ENSG00000264424; TAA
ASADIETYL

SEQ ID NO: 48092 - protein, 9 aa, Homo sapiens
  misc_feature: Table A; Target 48092; HLA-A*32:01; MYH4; ENSG00000264424; TAA
ASADIETYL

SEQ ID NO: 48093 - protein, 9 aa, Homo sapiens
  misc_feature: Table A; Target 48093; HLA-A*68:02; MYH4; ENSG00000264424; TAA
ASADIETYL

SEQ ID NO: 48094 - protein, 9 aa, Homo sapiens
  misc_feature: Table A; Target 48094; HLA-B*13:02; MYH4; ENSG00000264424; TAA
ASADIETYL

SEQ ID NO: 48095 - protein, 9 aa, Homo sapiens
  misc_feature: Table A; Target 48095; HLA-B*27:05; MYH4; ENSG00000264424; TAA
ASADIETYL

SEQ ID NO: 48096 - protein, 9 aa, Homo sapiens
  misc_feature: Table A; Target 48096; HLA-B*38:01; MYH4; ENSG00000264424; TAA
ASADIETYL

SEQ ID NO: 48097 - protein, 9 aa, Homo sapiens
  misc_feature: Table A; Target 48097; HLA-B*39:01; MYH4; ENSG00000264424; TAA
ASADIETYL

SEQ ID NO: 48098 - protein, 9 aa, Homo sapiens
  misc_feature: Table A; Target 48098; HLA-B*40:01; MYH4; ENSG00000264424; TAA
ASADIETYL

SEQ ID NO: 48099 - protein, 9 aa, Homo sapiens
  misc_feature: Table A; Target 48099; HLA-B*58:01; MYH4; ENSG00000264424; TAA
ASADIETYL

SEQ ID NO: 48100 - protein, 9 aa, Homo sapiens
  misc_feature: Table A; Target 48100; HLA-C*02:02; MYH4; ENSG00000264424; TAA
ASADIETYL

SEQ ID NO: 48101 - protein, 9 aa, Homo sapiens
  misc_feature: Table A; Target 48101; HLA-C*05:01; MYH4; ENSG00000264424; TAA
ASADIETYL

SEQ ID NO: 48102 - protein, 9 aa, Homo sapiens
  misc_feature: Table A; Target 48102; HLA-C*12:03; MYH4; ENSG00000264424; TAA
ASADIETYL

SEQ ID NO: 48103 - protein, 9 aa, Homo sapiens
  misc_feature: Table A; Target 48103; HLA-C*16:02; MYH4; ENSG00000264424; TAA
ASADIETYL

SEQ ID NO: 48104 - protein, 9 aa, Homo sapiens
  misc_feature: Table A; Target 48104; HLA-C*16:04; MYH4; ENSG00000264424; TAA
ASADIETYL

SEQ ID NO: 48105 - protein, 9 aa, Homo sapiens
  misc_feature: Table A; Target 48105; HLA-A*30:02; MYH4; ENSG00000264424; TAA
ASAIPEGQF

SEQ ID NO: 48106 - protein, 9 aa, Homo sapiens
  misc_feature: Table A; Target 48106; HLA-B*15:01; MYH4; ENSG00000264424; TAA
ASAIPEGQF

SEQ ID NO: 48107 - protein, 9 aa, Homo sapiens
  misc_feature: Table A; Target 48107; HLA-B*58:01; MYH4; ENSG00000264424; TAA
ASAIPEGQF

SEQ ID NO: 48108 - protein, 9 aa, Homo sapiens
  misc_feature: Table A; Target 48108; HLA-C*05:01; MYH4; ENSG00000264424; TAA
ASAIPEGQF

SEQ ID NO: 48109 - protein, 9 aa, Homo sapiens
  misc_feature: Table A; Target 48109; HLA-C*16:01; MYH4; ENSG00000264424; TAA
ASAIPEGQF

SEQ ID NO: 48110 - protein, 8 aa, Homo sapiens
  misc_feature: Table A; Target 48110; HLA-B*58:01; MYH4; ENSG00000264424; TAA
ASERVQLL

SEQ ID NO: 48111 - protein, 9 aa, Homo sapiens
  misc_feature: Table A; Target 48111; HLA-A*01:01; MYH4; ENSG00000264424; TAA
ASERVQLLH

SEQ ID NO: 48112 - protein, 9 aa, Homo sapiens
  misc_feature: Table A; Target 48112; HLA-A*31:01; MYH4; ENSG00000264424; TAA
ASLEKTKQR

SEQ ID NO: 48113 - protein, 8 aa, Homo sapiens
  misc_feature: Table A; Target 48113; HLA-C*16:01; MYH4; ENSG00000264424; TAA
ASLERTER

SEQ ID NO: 48114 - protein, 9 aa, Homo sapiens
  misc_feature: Table A; Target 48114; HLA-A*03:01; MYH4; ENSG00000264424; TAA
ASNMETVSK

SEQ ID NO: 48115 - protein, 9 aa, Homo sapiens
  misc_feature: Table A; Target 48115; HLA-A*03:02; MYH4; ENSG00000264424; TAA
ASNMETVSK

SEQ ID NO: 48116 - protein, 9 aa, Homo sapiens
  misc_feature: Table A; Target 48116; HLA-A*11:01; MYH4; ENSG00000264424; TAA
ASNMETVSK

SEQ ID NO: 48117 - protein, 9 aa, Homo sapiens
  misc_feature: Table A; Target 48117; HLA-A*31:01; MYH4; ENSG00000264424; TAA
ASNMETVSK

SEQ ID NO: 48118 - protein, 9 aa, Homo sapiens
  misc_feature: Table A; Target 48118; HLA-A*68:01; MYH4; ENSG00000264424; TAA
ASNMETVSK

SEQ ID NO: 48119 - protein, 9 aa, Homo sapiens
  misc_feature: Table A; Target 48119; HLA-B*27:02; MYH4; ENSG00000264424; TAA
ASNMETVSK

SEQ ID NO: 48120 - protein, 9 aa, Homo sapiens
  misc_feature: Table A; Target 48120; HLA-B*27:05; MYH4; ENSG00000264424; TAA
ASNMETVSK

SEQ ID NO: 48121 - protein, 9 aa, Homo sapiens
  misc_feature: Table A; Target 48121; HLA-B*57:01; MYH4; ENSG00000264424; TAA
ASNMETVSK

SEQ ID NO: 48122 - protein, 9 aa, Homo sapiens
  misc_feature: Table A; Target 48122; HLA-B*58:01; MYH4; ENSG00000264424; TAA
ASNMETVSK

SEQ ID NO: 48123 - protein, 9 aa, Homo sapiens
  misc_feature: Table A; Target 48123; HLA-C*07:06; MYH4; ENSG00000264424; TAA
ASNMETVSK

SEQ ID NO: 48124 - protein, 11 aa, Homo sapiens
  misc_feature: Table A; Target 48124; HLA-A*03:01; MYH4; ENSG00000264424; TAA
ASNMETVSKAK

SEQ ID NO: 48125 - protein, 11 aa, Homo sapiens
  misc_feature: Table A; Target 48125; HLA-A*03:02; MYH4; ENSG00000264424; TAA
ASNMETVSKAK

SEQ ID NO: 48126 - protein, 11 aa, Homo sapiens
  misc_feature: Table A; Target 48126; HLA-A*11:01; MYH4; ENSG00000264424; TAA
ASNMETVSKAK

SEQ ID NO: 48127 - protein, 11 aa, Homo sapiens
  misc_feature: Table A; Target 48127; HLA-A*31:01; MYH4; ENSG00000264424; TAA
ASNMETVSKAK

SEQ ID NO: 48128 - protein, 11 aa, Homo sapiens
  misc_feature: Table A; Target 48128; HLA-B*27:02; MYH4; ENSG00000264424; TAA
ASNMETVSKAK

SEQ ID NO: 48129 - protein, 11 aa, Homo sapiens
  misc_feature: Table A; Target 48129; HLA-C*06:02; MYH4; ENSG00000264424; TAA
ASNMETVSKAK

SEQ ID NO: 48130 - protein, 9 aa, Homo sapiens
  misc_feature: Table A; Target 48130; HLA-B*58:01; MYH4; ENSG00000264424; TAA
ASQKESRSL

SEQ ID NO: 48131 - protein, 9 aa, Homo sapiens
  misc_feature: Table A; Target 48131; HLA-C*03:03; MYH4; ENSG00000264424; TAA
ASQKESRSL

SEQ ID NO: 48132 - protein, 9 aa, Homo sapiens
  misc_feature: Table A; Target 48132; HLA-C*03:04; MYH4; ENSG00000264424; TAA
ASQKESRSL

SEQ ID NO: 48133 - protein, 9 aa, Homo sapiens
  misc_feature: Table A; Target 48133; HLA-C*16:01; MYH4; ENSG00000264424; TAA
ASQKESRSL

SEQ ID NO: 48134 - protein, 8 aa, Homo sapiens
  misc_feature: Table A; Target 48134; HLA-A*03:01; MYH4; ENSG00000264424; TAA
ATAAALRK

SEQ ID NO: 48135 - protein, 8 aa, Homo sapiens
  misc_feature: Table A; Target 48135; HLA-A*03:02; MYH4; ENSG00000264424; TAA
ATAAALRK

SEQ ID NO: 48136 - protein, 8 aa, Homo sapiens
  misc_feature: Table A; Target 48136; HLA-A*11:01; MYH4; ENSG00000264424; TAA
ATAAALRK

SEQ ID NO: 48137 - protein, 9 aa, Homo sapiens
  misc_feature: Table A; Target 48137; HLA-A*03:01; MYH4; ENSG00000264424; TAA
ATAAALRKK

SEQ ID NO: 48138 - protein, 9 aa, Homo sapiens
  misc_feature: Table A; Target 48138; HLA-A*03:02; MYH4; ENSG00000264424; TAA
ATAAALRKK

SEQ ID NO: 48139 - protein, 9 aa, Homo sapiens
  misc_feature: Table A; Target 48139; HLA-A*11:01; MYH4; ENSG00000264424; TAA
ATAAALRKK

SEQ ID NO: 48140 - protein, 9 aa, Homo sapiens
  misc_feature: Table A; Target 48140; HLA-C*06:02; MYH4; ENSG00000264424; TAA
ATAAALRKK

SEQ ID NO: 48141 - protein, 9 aa, Homo sapiens
  misc_feature: Table A; Target 48141; HLA-C*16:01; MYH4; ENSG00000264424; TAA
ATAAALRKK

SEQ ID NO: 48142 - protein, 8 aa, Homo sapiens
  misc_feature: Table A; Target 48142; HLA-C*04:01; MYH4; ENSG00000264424; TAA
ATDSAVDI

SEQ ID NO: 48143 - protein, 8 aa, Homo sapiens
  misc_feature: Table A; Target 48143; HLA-C*05:01; MYH4; ENSG00000264424; TAA
ATDSAVDI

SEQ ID NO: 48144 - protein, 9 aa, Homo sapiens
  misc_feature: Table A; Target 48144; HLA-A*01:01; MYH4; ENSG00000264424; TAA
ATDSAVDIL

SEQ ID NO: 48145 - protein, 9 aa, Homo sapiens
  misc_feature: Table A; Target 48145; HLA-B*38:01; MYH4; ENSG00000264424; TAA
ATDSAVDIL

SEQ ID NO: 48146 - protein, 9 aa, Homo sapiens
  misc_feature: Table A; Target 48146; HLA-C*04:01; MYH4; ENSG00000264424; TAA
ATDSAVDIL

SEQ ID NO: 48147 - protein, 9 aa, Homo sapiens
  misc_feature: Table A; Target 48147; HLA-C*05:01; MYH4; ENSG00000264424; TAA
ATDSAVDIL

SEQ ID NO: 48148 - protein, 11 aa, Homo sapiens
  misc_feature: Table A; Target 48148; HLA-A*01:01; MYH4; ENSG00000264424; TAA
ATDSAVDILGF

SEQ ID NO: 48149 - protein, 11 aa, Homo sapiens
  misc_feature: Table A; Target 48149; HLA-A*02:07; MYH4; ENSG00000264424; TAA
ATDSAVDILGF

SEQ ID NO: 48150 - protein, 11 aa, Homo sapiens
  misc_feature: Table A; Target 48150; HLA-A*03:02; MYH4; ENSG00000264424; TAA
ATDSAVDILGF

SEQ ID NO: 48151 - protein, 11 aa, Homo sapiens
  misc_feature: Table A; Target 48151; HLA-A*11:01; MYH4; ENSG00000264424; TAA
ATDSAVDILGF

SEQ ID NO: 48152 - protein, 11 aa, Homo sapiens
  misc_feature: Table A; Target 48152; HLA-A*25:01; MYH4; ENSG00000264424; TAA
ATDSAVDILGF

SEQ ID NO: 48153 - protein, 11 aa, Homo sapiens
  misc_feature: Table A; Target 48153; HLA-A*26:01; MYH4; ENSG00000264424; TAA
ATDSAVDILGF

SEQ ID NO: 48154 - protein, 11 aa, Homo sapiens
  misc_feature: Table A; Target 48154; HLA-A*32:01; MYH4; ENSG00000264424; TAA
ATDSAVDILGF

SEQ ID NO: 48155 - protein, 11 aa, Homo sapiens
  misc_feature: Table A; Target 48155; HLA-B*58:01; MYH4; ENSG00000264424; TAA
ATDSAVDILGF

SEQ ID NO: 48156 - protein, 11 aa, Homo sapiens
  misc_feature: Table A; Target 48156; HLA-C*05:01; MYH4; ENSG00000264424; TAA
ATDSAVDILGF

SEQ ID NO: 48157 - protein, 9 aa, Homo sapiens
  misc_feature: Table A; Target 48157; HLA-A*01:01; MYH4; ENSG00000264424; TAA
ATDTSFKNK

SEQ ID NO: 48158 - protein, 9 aa, Homo sapiens
  misc_feature: Table A; Target 48158; HLA-A*03:01; MYH4; ENSG00000264424; TAA
ATDTSFKNK

SEQ ID NO: 48159 - protein, 9 aa, Homo sapiens
  misc_feature: Table A; Target 48159; HLA-A*03:02; MYH4; ENSG00000264424; TAA
ATDTSFKNK

SEQ ID NO: 48160 - protein, 9 aa, Homo sapiens
  misc_feature: Table A; Target 48160; HLA-A*11:01; MYH4; ENSG00000264424; TAA
ATDTSFKNK

SEQ ID NO: 48161 - protein, 9 aa, Homo sapiens
  misc_feature: Table A; Target 48161; HLA-A*31:01; MYH4; ENSG00000264424; TAA
ATDTSFKNK

SEQ ID NO: 48162 - protein, 10 aa, Homo sapiens
  misc_feature: Table A; Target 48162; HLA-A*01:01; MYH4; ENSG00000264424; TAA
ATDTSFKNKL

SEQ ID NO: 48163 - protein, 11 aa, Homo sapiens
  misc_feature: Table A; Target 48163; HLA-A*01:01; MYH4; ENSG00000264424; TAA
ATDTSFKNKLY

SEQ ID NO: 48164 - protein, 9 aa, Homo sapiens
  misc_feature: Table A; Target 48164; HLA-A*01:01; MYH4; ENSG00000264424; TAA
ATIAVTGEK

SEQ ID NO: 48165 - protein, 9 aa, Homo sapiens
  misc_feature: Table A; Target 48165; HLA-A*03:01; MYH4; ENSG00000264424; TAA
ATIAVTGEK

SEQ ID NO: 48166 - protein, 9 aa, Homo sapiens
  misc_feature: Table A; Target 48166; HLA-A*03:02; MYH4; ENSG00000264424; TAA
ATIAVTGEK

SEQ ID NO: 48167 - protein, 9 aa, Homo sapiens
  misc_feature: Table A; Target 48167; HLA-A*11:01; MYH4; ENSG00000264424; TAA
ATIAVTGEK

SEQ ID NO: 48168 - protein, 9 aa, Homo sapiens
  misc_feature: Table A; Target 48168; HLA-A*25:01; MYH4; ENSG00000264424; TAA
ATIAVTGEK

SEQ ID NO: 48169 - protein, 9 aa, Homo sapiens
  misc_feature: Table A; Target 48169; HLA-A*26:01; MYH4; ENSG00000264424; TAA
ATIAVTGEK

SEQ ID NO: 48170 - protein, 9 aa, Homo sapiens
  misc_feature: Table A; Target 48170; HLA-A*30:02; MYH4; ENSG00000264424; TAA
ATIAVTGEK

SEQ ID NO: 48171 - protein, 9 aa, Homo sapiens
  misc_feature: Table A; Target 48171; HLA-A*31:01; MYH4; ENSG00000264424; TAA
ATIAVTGEK

SEQ ID NO: 48172 - protein, 9 aa, Homo sapiens
  misc_feature: Table A; Target 48172; HLA-A*33:01; MYH4; ENSG00000264424; TAA
ATIAVTGEK

SEQ ID NO: 48173 - protein, 9 aa, Homo sapiens
  misc_feature: Table A; Target 48173; HLA-A*33:03; MYH4; ENSG00000264424; TAA
ATIAVTGEK

SEQ ID NO: 48174 - protein, 9 aa, Homo sapiens
  misc_feature: Table A; Target 48174; HLA-A*68:01; MYH4; ENSG00000264424; TAA
ATIAVTGEK

SEQ ID NO: 48175 - protein, 9 aa, Homo sapiens
  misc_feature: Table A; Target 48175; HLA-A*68:02; MYH4; ENSG00000264424; TAA
ATIAVTGEK

SEQ ID NO: 48176 - protein, 9 aa, Homo sapiens
  misc_feature: Table A; Target 48176; HLA-B*27:02; MYH4; ENSG00000264424; TAA
ATIAVTGEK

SEQ ID NO: 48177 - protein, 9 aa, Homo sapiens
  misc_feature: Table A; Target 48177; HLA-B*27:05; MYH4; ENSG00000264424; TAA
ATIAVTGEK

SEQ ID NO: 48178 - protein, 9 aa, Homo sapiens
  misc_feature: Table A; Target 48178; HLA-B*40:02; MYH4; ENSG00000264424; TAA
ATIAVTGEK

SEQ ID NO: 48179 - protein, 9 aa, Homo sapiens
  misc_feature: Table A; Target 48179; HLA-B*46:01; MYH4; ENSG00000264424; TAA
ATIAVTGEK

SEQ ID NO: 48180 - protein, 9 aa, Homo sapiens
  misc_feature: Table A; Target 48180; HLA-B*57:01; MYH4; ENSG00000264424; TAA
ATIAVTGEK

SEQ ID NO: 48181 - protein, 9 aa, Homo sapiens
  misc_feature: Table A; Target 48181; HLA-B*58:01; MYH4; ENSG00000264424; TAA
ATIAVTGEK

SEQ ID NO: 48182 - protein, 9 aa, Homo sapiens
  misc_feature: Table A; Target 48182; HLA-C*01:02; MYH4; ENSG00000264424; TAA
ATIAVTGEK

SEQ ID NO: 48183 - protein, 9 aa, Homo sapiens
  misc_feature: Table A; Target 48183; HLA-C*02:02; MYH4; ENSG00000264424; TAA
ATIAVTGEK

SEQ ID NO: 48184 - protein, 9 aa, Homo sapiens
  misc_feature: Table A; Target 48184; HLA-C*03:03; MYH4; ENSG00000264424; TAA
ATIAVTGEK

SEQ ID NO: 48185 - protein, 9 aa, Homo sapiens
  misc_feature: Table A; Target 48185; HLA-C*03:04; MYH4; ENSG00000264424; TAA
ATIAVTGEK

SEQ ID NO: 48186 - protein, 9 aa, Homo sapiens
  misc_feature: Table A; Target 48186; HLA-C*06:02; MYH4; ENSG00000264424; TAA
ATIAVTGEK

SEQ ID NO: 48187 - protein, 9 aa, Homo sapiens
  misc_feature: Table A; Target 48187; HLA-C*07:06; MYH4; ENSG00000264424; TAA
ATIAVTGEK

SEQ ID NO: 48188 - protein, 9 aa, Homo sapiens
  misc_feature: Table A; Target 48188; HLA-C*16:04; MYH4; ENSG00000264424; TAA
ATIAVTGEK

SEQ ID NO: 48189 - protein, 10 aa, Homo sapiens
  misc_feature: Table A; Target 48189; HLA-A*01:01; MYH4; ENSG00000264424; TAA
ATIAVTGEKK

SEQ ID NO: 48190 - protein, 10 aa, Homo sapiens
  misc_feature: Table A; Target 48190; HLA-A*03:01; MYH4; ENSG00000264424; TAA
ATIAVTGEKK

SEQ ID NO: 48191 - protein, 10 aa, Homo sapiens
  misc_feature: Table A; Target 48191; HLA-A*03:02; MYH4; ENSG00000264424; TAA
ATIAVTGEKK

SEQ ID NO: 48192 - protein, 10 aa, Homo sapiens
  misc_feature: Table A; Target 48192; HLA-A*11:01; MYH4; ENSG00000264424; TAA
ATIAVTGEKK

SEQ ID NO: 48193 - protein, 10 aa, Homo sapiens
  misc_feature: Table A; Target 48193; HLA-A*31:01; MYH4; ENSG00000264424; TAA
ATIAVTGEKK

SEQ ID NO: 48194 - protein, 10 aa, Homo sapiens
  misc_feature: Table A; Target 48194; HLA-A*32:01; MYH4; ENSG00000264424; TAA
ATIAVTGEKK

SEQ ID NO: 48195 - protein, 10 aa, Homo sapiens
  misc_feature: Table A; Target 48195; HLA-A*33:03; MYH4; ENSG00000264424; TAA
ATIAVTGEKK

SEQ ID NO: 48196 - protein, 10 aa, Homo sapiens
  misc_feature: Table A; Target 48196; HLA-A*68:01; MYH4; ENSG00000264424; TAA
ATIAVTGEKK

SEQ ID NO: 48197 - protein, 10 aa, Homo sapiens
  misc_feature: Table A; Target 48197; HLA-A*68:02; MYH4; ENSG00000264424; TAA
ATIAVTGEKK

SEQ ID NO: 48198 - protein, 10 aa, Homo sapiens
  misc_feature: Table A; Target 48198; HLA-B*27:02; MYH4; ENSG00000264424; TAA
ATIAVTGEKK

SEQ ID NO: 48199 - protein, 10 aa, Homo sapiens
  misc_feature: Table A; Target 48199; HLA-B*27:05; MYH4; ENSG00000264424; TAA
ATIAVTGEKK

SEQ ID NO: 48200 - protein, 10 aa, Homo sapiens
  misc_feature: Table A; Target 48200; HLA-B*57:01; MYH4; ENSG00000264424; TAA
ATIAVTGEKK

SEQ ID NO: 48201 - protein, 10 aa, Homo sapiens
  misc_feature: Table A; Target 48201; HLA-B*58:01; MYH4; ENSG00000264424; TAA
ATIAVTGEKK

SEQ ID NO: 48202 - protein, 10 aa, Homo sapiens
  misc_feature: Table A; Target 48202; HLA-C*06:02; MYH4; ENSG00000264424; TAA
ATIAVTGEKK

SEQ ID NO: 48203 - protein, 10 aa, Homo sapiens
  misc_feature: Table A; Target 48203; HLA-C*07:06; MYH4; ENSG00000264424; TAA
ATIAVTGEKK

SEQ ID NO: 48204 - protein, 11 aa, Homo sapiens
  misc_feature: Table A; Target 48204; HLA-A*03:02; MYH4; ENSG00000264424; TAA
ATIAVTGEKKK

SEQ ID NO: 48205 - protein, 11 aa, Homo sapiens
  misc_feature: Table A; Target 48205; HLA-A*11:01; MYH4; ENSG00000264424; TAA
ATIAVTGEKKK

SEQ ID NO: 48206 - protein, 11 aa, Homo sapiens
  misc_feature: Table A; Target 48206; HLA-B*57:01; MYH4; ENSG00000264424; TAA
ATIAVTGEKKK

SEQ ID NO: 48207 - protein, 8 aa, Homo sapiens
  misc_feature: Table A; Target 48207; HLA-A*32:01; MYH4; ENSG00000264424; TAA
ATSAQIEM

SEQ ID NO: 48208 - protein, 8 aa, Homo sapiens
  misc_feature: Table A; Target 48208; HLA-B*58:01; MYH4; ENSG00000264424; TAA
ATSAQIEM

SEQ ID NO: 48209 - protein, 8 aa, Homo sapiens
  misc_feature: Table A; Target 48209; HLA-C*16:01; MYH4; ENSG00000264424; TAA
ATSAQIEM

SEQ ID NO: 48210 - protein, 10 aa, Homo sapiens
  misc_feature: Table A; Target 48210; HLA-A*03:01; MYH4; ENSG00000264424; TAA
ATSAQIEMNK

SEQ ID NO: 48211 - protein, 10 aa, Homo sapiens
  misc_feature: Table A; Target 48211; HLA-A*03:02; MYH4; ENSG00000264424; TAA
ATSAQIEMNK

SEQ ID NO: 48212 - protein, 10 aa, Homo sapiens
  misc_feature: Table A; Target 48212; HLA-A*11:01; MYH4; ENSG00000264424; TAA
ATSAQIEMNK

SEQ ID NO: 48213 - protein, 10 aa, Homo sapiens
  misc_feature: Table A; Target 48213; HLA-A*31:01; MYH4; ENSG00000264424; TAA
ATSAQIEMNK

SEQ ID NO: 48214 - protein, 10 aa, Homo sapiens
  misc_feature: Table A; Target 48214; HLA-A*33:03; MYH4; ENSG00000264424; TAA
ATSAQIEMNK

SEQ ID NO: 48215 - protein, 10 aa, Homo sapiens
  misc_feature: Table A; Target 48215; HLA-A*68:01; MYH4; ENSG00000264424; TAA
ATSAQIEMNK

SEQ ID NO: 48216 - protein, 10 aa, Homo sapiens
  misc_feature: Table A; Target 48216; HLA-B*27:02; MYH4; ENSG00000264424; TAA
ATSAQIEMNK

SEQ ID NO: 48217 - protein, 10 aa, Homo sapiens
  misc_feature: Table A; Target 48217; HLA-B*27:05; MYH4; ENSG00000264424; TAA
ATSAQIEMNK

SEQ ID NO: 48218 - protein, 10 aa, Homo sapiens
  misc_feature: Table A; Target 48218; HLA-C*06:02; MYH4; ENSG00000264424; TAA
ATSAQIEMNK

SEQ ID NO: 48219 - protein, 10 aa, Homo sapiens
  misc_feature: Table A; Target 48219; HLA-C*07:06; MYH4; ENSG00000264424; TAA
ATSAQIEMNK

SEQ ID NO: 48220 - protein, 11 aa, Homo sapiens
  misc_feature: Table A; Target 48220; HLA-A*03:01; MYH4; ENSG00000264424; TAA
ATSAQIEMNKK

SEQ ID NO: 48221 - protein, 11 aa, Homo sapiens
  misc_feature: Table A; Target 48221; HLA-A*03:02; MYH4; ENSG00000264424; TAA
ATSAQIEMNKK

SEQ ID NO: 48222 - protein, 11 aa, Homo sapiens
  misc_feature: Table A; Target 48222; HLA-A*11:01; MYH4; ENSG00000264424; TAA
ATSAQIEMNKK

SEQ ID NO: 48223 - protein, 11 aa, Homo sapiens
  misc_feature: Table A; Target 48223; HLA-B*57:01; MYH4; ENSG00000264424; TAA
ATVTVKEDQVF

SEQ ID NO: 48224 - protein, 11 aa, Homo sapiens
  misc_feature: Table A; Target 48224; HLA-B*58:01; MYH4; ENSG00000264424; TAA
ATVTVKEDQVF

SEQ ID NO: 48225 - protein, 9 aa, Homo sapiens
  misc_feature: Table A; Target 48225; HLA-A*02:07; MYH4; ENSG00000264424; TAA
AVDILGFTA

SEQ ID NO: 48226 - protein, 9 aa, Homo sapiens
  misc_feature: Table A; Target 48226; HLA-B*56:01; MYH4; ENSG00000264424; TAA
AVDILGFTA

SEQ ID NO: 48227 - protein, 9 aa, Homo sapiens
  misc_feature: Table A; Target 48227; HLA-B*13:02; MYH4; ENSG00000264424; TAA
AVGALAKAI

SEQ ID NO: 48228 - protein, 9 aa, Homo sapiens
  misc_feature: Table A; Target 48228; HLA-B*44:03; MYH4; ENSG00000264424; TAA
AVGALAKAI

SEQ ID NO: 48229 - protein, 9 aa, Homo sapiens
  misc_feature: Table A; Target 48229; HLA-C*01:02; MYH4; ENSG00000264424; TAA
AVGALAKAI

SEQ ID NO: 48230 - protein, 10 aa, Homo sapiens
  misc_feature: Table A; Target 48230; HLA-A*29:02; MYH4; ENSG00000264424; TAA
AVGALAKAIY

SEQ ID NO: 48231 - protein, 10 aa, Homo sapiens
  misc_feature: Table A; Target 48231; HLA-A*30:02; MYH4; ENSG00000264424; TAA
AVGALAKAIY

SEQ ID NO: 48232 - protein, 10 aa, Homo sapiens
  misc_feature: Table A; Target 48232; HLA-A*32:01; MYH4; ENSG00000264424; TAA
AVGALAKAIY

SEQ ID NO: 48233 - protein, 10 aa, Homo sapiens
  misc_feature: Table A; Target 48233; HLA-B*15:01; MYH4; ENSG00000264424; TAA
AVGALAKAIY

SEQ ID NO: 48234 - protein, 9 aa, Homo sapiens
  misc_feature: Table A; Target 48234; HLA-A*31:01; MYH4; ENSG00000264424; TAA
AVLYNLKER

SEQ ID NO: 48235 - protein, 9 aa, Homo sapiens
  misc_feature: Table A; Target 48235; HLA-A*33:01; MYH4; ENSG00000264424; TAA
AVLYNLKER

SEQ ID NO: 48236 - protein, 10 aa, Homo sapiens
  misc_feature: Table A; Target 48236; HLA-A*29:02; MYH4; ENSG00000264424; TAA
AVLYNLKERY

SEQ ID NO: 48237 - protein, 10 aa, Homo sapiens
  misc_feature: Table A; Target 48237; HLA-A*30:02; MYH4; ENSG00000264424; TAA
AVLYNLKERY

SEQ ID NO: 48238 - protein, 9 aa, Homo sapiens
  misc_feature: Table A; Target 48238; HLA-A*03:01; MYH4; ENSG00000264424; TAA
AVMHYGNMK

SEQ ID NO: 48239 - protein, 9 aa, Homo sapiens
  misc_feature: Table A; Target 48239; HLA-A*03:02; MYH4; ENSG00000264424; TAA
AVMHYGNMK

SEQ ID NO: 48240 - protein, 9 aa, Homo sapiens
  misc_feature: Table A; Target 48240; HLA-A*11:01; MYH4; ENSG00000264424; TAA
AVMHYGNMK

SEQ ID NO: 48241 - protein, 9 aa, Homo sapiens
  misc_feature: Table A; Target 48241; HLA-A*32:01; MYH4; ENSG00000264424; TAA
AVNSKCASL

SEQ ID NO: 48242 - protein, 9 aa, Homo sapiens
  misc_feature: Table A; Target 48242; HLA-B*07:02; MYH4; ENSG00000264424; TAA
AVNSKCASL

SEQ ID NO: 48243 - protein, 9 aa, Homo sapiens
  misc_feature: Table A; Target 48243; HLA-B*08:01; MYH4; ENSG00000264424; TAA
AVNSKCASL

SEQ ID NO: 48244 - protein, 9 aa, Homo sapiens
  misc_feature: Table A; Target 48244; HLA-C*01:02; MYH4; ENSG00000264424; TAA
AVNSKCASL

SEQ ID NO: 48245 - protein, 9 aa, Homo sapiens
  misc_feature: Table A; Target 48245; HLA-C*07:02; MYH4; ENSG00000264424; TAA
AVNSKCASL

SEQ ID NO: 48246 - protein, 9 aa, Homo sapiens
  misc_feature: Table A; Target 48246; HLA-C*14:02; MYH4; ENSG00000264424; TAA
AVNSKCASL

SEQ ID NO: 48247 - protein, 9 aa, Homo sapiens
  misc_feature: Table A; Target 48247; HLA-A*24:02; MYH4; ENSG00000264424; TAA
AYEESLDHL

SEQ ID NO: 48248 - protein, 9 aa, Homo sapiens
  misc_feature: Table A; Target 48248; HLA-A*23:01; MYH4; ENSG00000264424; TAA
AYLTSLNSA

SEQ ID NO: 48249 - protein, 9 aa, Homo sapiens
  misc_feature: Table A; Target 48249; HLA-A*24:02; MYH4; ENSG00000264424; TAA
AYLTSLNSA

SEQ ID NO: 48250 - protein, 9 aa, Homo sapiens
  misc_feature: Table A; Target 48250; HLA-C*01:02; MYH4; ENSG00000264424; TAA
AYLTSLNSA

SEQ ID NO: 48251 - protein, 9 aa, Homo sapiens
  misc_feature: Table A; Target 48251; HLA-C*04:01; MYH4; ENSG00000264424; TAA
AYLTSLNSA

SEQ ID NO: 48252 - protein, 9 aa, Homo sapiens
  misc_feature: Table A; Target 48252; HLA-C*14:02; MYH4; ENSG00000264424; TAA
AYLTSLNSA

SEQ ID NO: 48253 - protein, 11 aa, Homo sapiens
  misc_feature: Table A; Target 48253; HLA-A*23:01; MYH4; ENSG00000264424; TAA
AYLTSLNSADL

SEQ ID NO: 48254 - protein, 11 aa, Homo sapiens
  misc_feature: Table A; Target 48254; HLA-A*24:02; MYH4; ENSG00000264424; TAA
AYLTSLNSADL

SEQ ID NO: 48255 - protein, 11 aa, Homo sapiens
  misc_feature: Table A; Target 48255; HLA-C*14:02; MYH4; ENSG00000264424; TAA
AYLTSLNSADL

SEQ ID NO: 48256 - protein, 9 aa, Homo sapiens
  misc_feature: Table A; Target 48256; HLA-A*31:01; MYH4; ENSG00000264424; TAA
AYQFMLTDR

SEQ ID NO: 48257 - protein, 8 aa, Homo sapiens
  misc_feature: Table A; Target 48257; HLA-B*18:01; MYH4; ENSG00000264424; TAA
CDLLREQY

SEQ ID NO: 48258 - protein, 8 aa, Homo sapiens
  misc_feature: Table A; Target 48258; HLA-C*07:01; MYH4; ENSG00000264424; TAA
CDLLREQY

SEQ ID NO: 48259 - protein, 8 aa, Homo sapiens
  misc_feature: Table A; Target 48259; HLA-C*07:04; MYH4; ENSG00000264424; TAA
CDLLREQY

SEQ ID NO: 48260 - protein, 9 aa, Homo sapiens
  misc_feature: Table A; Target 48260; HLA-B*37:01; MYH4; ENSG00000264424; TAA
CDQLIKTKI

SEQ ID NO: 48261 - protein, 11 aa, Homo sapiens
  misc_feature: Table A; Target 48261; HLA-A*23:01; MYH4; ENSG00000264424; TAA
CMFPKATDTSF

SEQ ID NO: 48262 - protein, 11 aa, Homo sapiens
  misc_feature: Table A; Target 48262; HLA-A*24:02; MYH4; ENSG00000264424; TAA
CMFPKATDTSF

SEQ ID NO: 48263 - protein, 11 aa, Homo sapiens
  misc_feature: Table A; Target 48263; HLA-A*32:01; MYH4; ENSG00000264424; TAA
CMFPKATDTSF

SEQ ID NO: 48264 - protein, 11 aa, Homo sapiens
  misc_feature: Table A; Target 48264; HLA-B*15:01; MYH4; ENSG00000264424; TAA
CMFPKATDTSF

SEQ ID NO: 48265 - protein, 11 aa, Homo sapiens
  misc_feature: Table A; Target 48265; HLA-B*15:03; MYH4; ENSG00000264424; TAA
CMFPKATDTSF

SEQ ID NO: 48266 - protein, 11 aa, Homo sapiens
  misc_feature: Table A; Target 48266; HLA-B*46:01; MYH4; ENSG00000264424; TAA
CMFPKATDTSF

SEQ ID NO: 48267 - protein, 11 aa, Homo sapiens
  misc_feature: Table A; Target 48267; HLA-A*24:02; MYH4; ENSG00000264424; TAA
CYPRVKVGNEF

SEQ ID NO: 48268 - protein, 9 aa, Homo sapiens
  misc_feature: Table A; Target 48268; HLA-A*68:01; MYH4; ENSG00000264424; TAA
DAAMMAEEL

SEQ ID NO: 48269 - protein, 9 aa, Homo sapiens
  misc_feature: Table A; Target 48269; HLA-B*18:01; MYH4; ENSG00000264424; TAA
DAAMMAEEL

SEQ ID NO: 48270 - protein, 9 aa, Homo sapiens
  misc_feature: Table A; Target 48270; HLA-B*35:01; MYH4; ENSG00000264424; TAA
DAAMMAEEL

SEQ ID NO: 48271 - protein, 9 aa, Homo sapiens
  misc_feature: Table A; Target 48271; HLA-B*35:03; MYH4; ENSG00000264424; TAA
DAAMMAEEL

SEQ ID NO: 48272 - protein, 9 aa, Homo sapiens
  misc_feature: Table A; Target 48272; HLA-B*39:01; MYH4; ENSG00000264424; TAA
DAAMMAEEL

SEQ ID NO: 48273 - protein, 9 aa, Homo sapiens
  misc_feature: Table A; Target 48273; HLA-B*51:01; MYH4; ENSG00000264424; TAA
DAAMMAEEL

SEQ ID NO: 48274 - protein, 9 aa, Homo sapiens
  misc_feature: Table A; Target 48274; HLA-C*07:06; MYH4; ENSG00000264424; TAA
DAAMMAEEL

SEQ ID NO: 48275 - protein, 10 aa, Homo sapiens
  misc_feature: Table A; Target 48275; HLA-B*27:02; MYH4; ENSG00000264424; TAA
DAAMMAEELK

SEQ ID NO: 48276 - protein, 9 aa, Homo sapiens
  misc_feature: Table A; Target 48276; HLA-B*35:03; MYH4; ENSG00000264424; TAA
DAEEHVEAV

SEQ ID NO: 48277 - protein, 9 aa, Homo sapiens
  misc_feature: Table A; Target 48277; HLA-B*51:01; MYH4; ENSG00000264424; TAA
DAEEHVEAV

SEQ ID NO: 48278 - protein, 9 aa, Homo sapiens
  misc_feature: Table A; Target 48278; HLA-C*05:01; MYH4; ENSG00000264424; TAA
DAEEHVEAV

SEQ ID NO: 48279 - protein, 9 aa, Homo sapiens
  misc_feature: Table A; Target 48279; HLA-A*25:01; MYH4; ENSG00000264424; TAA
DAIQRTEEL

SEQ ID NO: 48280 - protein, 9 aa, Homo sapiens
  misc_feature: Table A; Target 48280; HLA-A*26:01; MYH4; ENSG00000264424; TAA
DAIQRTEEL

SEQ ID NO: 48281 - protein, 9 aa, Homo sapiens
  misc_feature: Table A; Target 48281; HLA-A*33:01; MYH4; ENSG00000264424; TAA
DAIQRTEEL

SEQ ID NO: 48282 - protein, 9 aa, Homo sapiens
  misc_feature: Table A; Target 48282; HLA-A*68:01; MYH4; ENSG00000264424; TAA
DAIQRTEEL

SEQ ID NO: 48283 - protein, 9 aa, Homo sapiens
  misc_feature: Table A; Target 48283; HLA-A*68:02; MYH4; ENSG00000264424; TAA
DAIQRTEEL

SEQ ID NO: 48284 - protein, 9 aa, Homo sapiens
  misc_feature: Table A; Target 48284; HLA-B*07:02; MYH4; ENSG00000264424; TAA
DAIQRTEEL

SEQ ID NO: 48285 - protein, 9 aa, Homo sapiens
  misc_feature: Table A; Target 48285; HLA-B*08:01; MYH4; ENSG00000264424; TAA
DAIQRTEEL

SEQ ID NO: 48286 - protein, 9 aa, Homo sapiens
  misc_feature: Table A; Target 48286; HLA-B*18:01; MYH4; ENSG00000264424; TAA
DAIQRTEEL

SEQ ID NO: 48287 - protein, 9 aa, Homo sapiens
  misc_feature: Table A; Target 48287; HLA-B*35:01; MYH4; ENSG00000264424; TAA
DAIQRTEEL

SEQ ID NO: 48288 - protein, 9 aa, Homo sapiens
  misc_feature: Table A; Target 48288; HLA-B*35:03; MYH4; ENSG00000264424; TAA
DAIQRTEEL

SEQ ID NO: 48289 - protein, 9 aa, Homo sapiens
  misc_feature: Table A; Target 48289; HLA-B*38:01; MYH4; ENSG00000264424; TAA
DAIQRTEEL

SEQ ID NO: 48290 - protein, 9 aa, Homo sapiens
  misc_feature: Table A; Target 48290; HLA-B*39:01; MYH4; ENSG00000264424; TAA
DAIQRTEEL

SEQ ID NO: 48291 - protein, 9 aa, Homo sapiens
  misc_feature: Table A; Target 48291; HLA-B*40:01; MYH4; ENSG00000264424; TAA
DAIQRTEEL

SEQ ID NO: 48292 - protein, 9 aa, Homo sapiens
  misc_feature: Table A; Target 48292; HLA-B*40:02; MYH4; ENSG00000264424; TAA
DAIQRTEEL

SEQ ID NO: 48293 - protein, 9 aa, Homo sapiens
  misc_feature: Table A; Target 48293; HLA-B*46:01; MYH4; ENSG00000264424; TAA
DAIQRTEEL

SEQ ID NO: 48294 - protein, 9 aa, Homo sapiens
  misc_feature: Table A; Target 48294; HLA-B*51:01; MYH4; ENSG00000264424; TAA
DAIQRTEEL

SEQ ID NO: 48295 - protein, 9 aa, Homo sapiens
  misc_feature: Table A; Target 48295; HLA-B*55:01; MYH4; ENSG00000264424; TAA
DAIQRTEEL

SEQ ID NO: 48296 - protein, 9 aa, Homo sapiens
  misc_feature: Table A; Target 48296; HLA-B*58:01; MYH4; ENSG00000264424; TAA
DAIQRTEEL

SEQ ID NO: 48297 - protein, 9 aa, Homo sapiens
  misc_feature: Table A; Target 48297; HLA-C*01:02; MYH4; ENSG00000264424; TAA
DAIQRTEEL

SEQ ID NO: 48298 - protein, 9 aa, Homo sapiens
  misc_feature: Table A; Target 48298; HLA-C*02:02; MYH4; ENSG00000264424; TAA
DAIQRTEEL

SEQ ID NO: 48299 - protein, 9 aa, Homo sapiens
  misc_feature: Table A; Target 48299; HLA-C*03:03; MYH4; ENSG00000264424; TAA
DAIQRTEEL

SEQ ID NO: 48300 - protein, 9 aa, Homo sapiens
  misc_feature: Table A; Target 48300; HLA-C*03:04; MYH4; ENSG00000264424; TAA
DAIQRTEEL

SEQ ID NO: 48301 - protein, 9 aa, Homo sapiens
  misc_feature: Table A; Target 48301; HLA-C*05:01; MYH4; ENSG00000264424; TAA
DAIQRTEEL

SEQ ID NO: 48302 - protein, 9 aa, Homo sapiens
  misc_feature: Table A; Target 48302; HLA-C*07:06; MYH4; ENSG00000264424; TAA
DAIQRTEEL

SEQ ID NO: 48303 - protein, 9 aa, Homo sapiens
  misc_feature: Table A; Target 48303; HLA-C*12:03; MYH4; ENSG00000264424; TAA
DAIQRTEEL

SEQ ID NO: 48304 - protein, 9 aa, Homo sapiens
  misc_feature: Table A; Target 48304; HLA-C*14:02; MYH4; ENSG00000264424; TAA
DAIQRTEEL

SEQ ID NO: 48305 - protein, 9 aa, Homo sapiens
  misc_feature: Table A; Target 48305; HLA-C*16:01; MYH4; ENSG00000264424; TAA
DAIQRTEEL

SEQ ID NO: 48306 - protein, 9 aa, Homo sapiens
  misc_feature: Table A; Target 48306; HLA-C*16:02; MYH4; ENSG00000264424; TAA
DAIQRTEEL

SEQ ID NO: 48307 - protein, 9 aa, Homo sapiens
  misc_feature: Table A; Target 48307; HLA-C*16:04; MYH4; ENSG00000264424; TAA
DAIQRTEEL

SEQ ID NO: 48308 - protein, 9 aa, Homo sapiens
  misc_feature: Table A; Target 48308; HLA-B*35:03; MYH4; ENSG00000264424; TAA
DAIRGQDDL

SEQ ID NO: 48309 - protein, 9 aa, Homo sapiens
  misc_feature: Table A; Target 48309; HLA-C*03:03; MYH4; ENSG00000264424; TAA
DAIRGQDDL

SEQ ID NO: 48310 - protein, 8 aa, Homo sapiens
  misc_feature: Table A; Target 48310; HLA-B*08:01; MYH4; ENSG00000264424; TAA
DAKTSVFV

SEQ ID NO: 48311 - protein, 8 aa, Homo sapiens
  misc_feature: Table A; Target 48311; HLA-B*51:01; MYH4; ENSG00000264424; TAA
DAKTSVFV

SEQ ID NO: 48312 - protein, 9 aa, Homo sapiens
  misc_feature: Table A; Target 48312; HLA-A*33:01; MYH4; ENSG00000264424; TAA
DAKTSVFVV

SEQ ID NO: 48313 - protein, 9 aa, Homo sapiens
  misc_feature: Table A; Target 48313; HLA-B*51:01; MYH4; ENSG00000264424; TAA
DAKTSVFVV

SEQ ID NO: 48314 - protein, 9 aa, Homo sapiens
  misc_feature: Table A; Target 48314; HLA-C*12:03; MYH4; ENSG00000264424; TAA
DAKTSVFVV

SEQ ID NO: 48315 - protein, 9 aa, Homo sapiens
  misc_feature: Table A; Target 48315; HLA-A*33:01; MYH4; ENSG00000264424; TAA
DALADAEER

SEQ ID NO: 48316 - protein, 9 aa, Homo sapiens
  misc_feature: Table A; Target 48316; HLA-A*33:03; MYH4; ENSG00000264424; TAA
DALADAEER

SEQ ID NO: 48317 - protein, 9 aa, Homo sapiens
  misc_feature: Table A; Target 48317; HLA-A*68:01; MYH4; ENSG00000264424; TAA
DALADAEER

SEQ ID NO: 48318 - protein, 9 aa, Homo sapiens
  misc_feature: Table A; Target 48318; HLA-C*07:06; MYH4; ENSG00000264424; TAA
DALADAEER

SEQ ID NO: 48319 - protein, 8 aa, Homo sapiens
  misc_feature: Table A; Target 48319; HLA-A*33:01; MYH4; ENSG00000264424; TAA
DALRIKKK

SEQ ID NO: 48320 - protein, 8 aa, Homo sapiens
  misc_feature: Table A; Target 48320; HLA-B*51:01; MYH4; ENSG00000264424; TAA
DAMVSQLS

SEQ ID NO: 48321 - protein, 9 aa, Homo sapiens
  misc_feature: Table A; Target 48321; HLA-A*25:01; MYH4; ENSG00000264424; TAA
DAMVSQLSR

SEQ ID NO: 48322 - protein, 9 aa, Homo sapiens
  misc_feature: Table A; Target 48322; HLA-A*26:01; MYH4; ENSG00000264424; TAA
DAMVSQLSR

SEQ ID NO: 48323 - protein, 9 aa, Homo sapiens
  misc_feature: Table A; Target 48323; HLA-A*33:01; MYH4; ENSG00000264424; TAA
DAMVSQLSR

SEQ ID NO: 48324 - protein, 9 aa, Homo sapiens
  misc_feature: Table A; Target 48324; HLA-A*33:03; MYH4; ENSG00000264424; TAA
DAMVSQLSR

SEQ ID NO: 48325 - protein, 9 aa, Homo sapiens
  misc_feature: Table A; Target 48325; HLA-A*68:01; MYH4; ENSG00000264424; TAA
DAMVSQLSR

SEQ ID NO: 48326 - protein, 9 aa, Homo sapiens
  misc_feature: Table A; Target 48326; HLA-B*51:01; MYH4; ENSG00000264424; TAA
DAMVSQLSR

SEQ ID NO: 48327 - protein, 9 aa, Homo sapiens
  misc_feature: Table A; Target 48327; HLA-C*07:06; MYH4; ENSG00000264424; TAA
DAMVSQLSR

SEQ ID NO: 48328 - protein, 11 aa, Homo sapiens
  misc_feature: Table A; Target 48328; HLA-A*33:01; MYH4; ENSG00000264424; TAA
DAMVSQLSRGK

SEQ ID NO: 48329 - protein, 8 aa, Homo sapiens
  misc_feature: Table A; Target 48329; HLA-B*08:01; MYH4; ENSG00000264424; TAA
DASERVQL

SEQ ID NO: 48330 - protein, 8 aa, Homo sapiens
  misc_feature: Table A; Target 48330; HLA-B*51:01; MYH4; ENSG00000264424; TAA
DASERVQL

SEQ ID NO: 48331 - protein, 8 aa, Homo sapiens
  misc_feature: Table A; Target 48331; HLA-C*05:01; MYH4; ENSG00000264424; TAA
DASERVQL

SEQ ID NO: 48332 - protein, 8 aa, Homo sapiens
  misc_feature: Table A; Target 48332; HLA-C*16:01; MYH4; ENSG00000264424; TAA
DASERVQL

SEQ ID NO: 48333 - protein, 9 aa, Homo sapiens
  misc_feature: Table A; Target 48333; HLA-A*25:01; MYH4; ENSG00000264424; TAA
DASERVQLL

SEQ ID NO: 48334 - protein, 9 aa, Homo sapiens
  misc_feature: Table A; Target 48334; HLA-A*26:01; MYH4; ENSG00000264424; TAA
DASERVQLL

SEQ ID NO: 48335 - protein, 9 aa, Homo sapiens
  misc_feature: Table A; Target 48335; HLA-A*33:01; MYH4; ENSG00000264424; TAA
DASERVQLL

SEQ ID NO: 48336 - protein, 9 aa, Homo sapiens
  misc_feature: Table A; Target 48336; HLA-A*33:03; MYH4; ENSG00000264424; TAA
DASERVQLL

SEQ ID NO: 48337 - protein, 9 aa, Homo sapiens
  misc_feature: Table A; Target 48337; HLA-A*68:01; MYH4; ENSG00000264424; TAA
DASERVQLL

SEQ ID NO: 48338 - protein, 9 aa, Homo sapiens
  misc_feature: Table A; Target 48338; HLA-A*68:02; MYH4; ENSG00000264424; TAA
DASERVQLL

SEQ ID NO: 48339 - protein, 9 aa, Homo sapiens
  misc_feature: Table A; Target 48339; HLA-B*08:01; MYH4; ENSG00000264424; TAA
DASERVQLL

SEQ ID NO: 48340 - protein, 9 aa, Homo sapiens
  misc_feature: Table A; Target 48340; HLA-B*35:01; MYH4; ENSG00000264424; TAA
DASERVQLL

SEQ ID NO: 48341 - protein, 9 aa, Homo sapiens
  misc_feature: Table A; Target 48341; HLA-B*35:03; MYH4; ENSG00000264424; TAA
DASERVQLL

SEQ ID NO: 48342 - protein, 9 aa, Homo sapiens
  misc_feature: Table A; Target 48342; HLA-B*38:01; MYH4; ENSG00000264424; TAA
DASERVQLL

SEQ ID NO: 48343 - protein, 9 aa, Homo sapiens
  misc_feature: Table A; Target 48343; HLA-B*39:01; MYH4; ENSG00000264424; TAA
DASERVQLL

SEQ ID NO: 48344 - protein, 9 aa, Homo sapiens
  misc_feature: Table A; Target 48344; HLA-B*51:01; MYH4; ENSG00000264424; TAA
DASERVQLL

SEQ ID NO: 48345 - protein, 9 aa, Homo sapiens
  misc_feature: Table A; Target 48345; HLA-C*05:01; MYH4; ENSG00000264424; TAA
DASERVQLL

SEQ ID NO: 48346 - protein, 9 aa, Homo sapiens
  misc_feature: Table A; Target 48346; HLA-C*07:06; MYH4; ENSG00000264424; TAA
DASERVQLL

SEQ ID NO: 48347 - protein, 9 aa, Homo sapiens
  misc_feature: Table A; Target 48347; HLA-C*12:03; MYH4; ENSG00000264424; TAA
DASERVQLL

SEQ ID NO: 48348 - protein, 9 aa, Homo sapiens
  misc_feature: Table A; Target 48348; HLA-C*16:01; MYH4; ENSG00000264424; TAA
DASERVQLL

SEQ ID NO: 48349 - protein, 9 aa, Homo sapiens
  misc_feature: Table A; Target 48349; HLA-C*16:02; MYH4; ENSG00000264424; TAA
DASERVQLL

SEQ ID NO: 48350 - protein, 9 aa, Homo sapiens
  misc_feature: Table A; Target 48350; HLA-A*01:01; MYH4; ENSG00000264424; TAA
DCDLLREQY

SEQ ID NO: 48351 - protein, 11 aa, Homo sapiens
  misc_feature: Table A; Target 48351; HLA-B*27:02; MYH4; ENSG00000264424; TAA
DDLEGSLEQEK

SEQ ID NO: 48352 - protein, 9 aa, Homo sapiens
  misc_feature: Table A; Target 48352; HLA-B*27:02; MYH4; ENSG00000264424; TAA
DDLELTLAK

SEQ ID NO: 48353 - protein, 9 aa, Homo sapiens
  misc_feature: Table A; Target 48353; HLA-B*18:01; MYH4; ENSG00000264424; TAA
DDLKEQLAM

SEQ ID NO: 48354 - protein, 8 aa, Homo sapiens
  misc_feature: Table A; Target 48354; HLA-A*30:01; MYH4; ENSG00000264424; TAA
DEAEQLAL

SEQ ID NO: 48355 - protein, 8 aa, Homo sapiens
  misc_feature: Table A; Target 48355; HLA-B*18:01; MYH4; ENSG00000264424; TAA
DEAEQLAL

SEQ ID NO: 48356 - protein, 8 aa, Homo sapiens
  misc_feature: Table A; Target 48356; HLA-B*39:01; MYH4; ENSG00000264424; TAA
DEAEQLAL

SEQ ID NO: 48357 - protein, 8 aa, Homo sapiens
  misc_feature: Table A; Target 48357; HLA-B*40:01; MYH4; ENSG00000264424; TAA
DEAEQLAL

SEQ ID NO: 48358 - protein, 9 aa, Homo sapiens
  misc_feature: Table A; Target 48358; HLA-B*18:01; MYH4; ENSG00000264424; TAA
DEAEQLALK

SEQ ID NO: 48359 - protein, 9 aa, Homo sapiens
  misc_feature: Table A; Target 48359; HLA-B*27:02; MYH4; ENSG00000264424; TAA
DEAEQLALK

SEQ ID NO: 48360 - protein, 10 aa, Homo sapiens
  misc_feature: Table A; Target 48360; HLA-B*18:01; MYH4; ENSG00000264424; TAA
DEAEQLALKG

SEQ ID NO: 48361 - protein, 9 aa, Homo sapiens
  misc_feature: Table A; Target 48361; HLA-A*30:01; MYH4; ENSG00000264424; TAA
DEEEINAEL

SEQ ID NO: 48362 - protein, 9 aa, Homo sapiens
  misc_feature: Table A; Target 48362; HLA-A*68:02; MYH4; ENSG00000264424; TAA
DEEEINAEL

SEQ ID NO: 48363 - protein, 9 aa, Homo sapiens
  misc_feature: Table A; Target 48363; HLA-B*18:01; MYH4; ENSG00000264424; TAA
DEEEINAEL

SEQ ID NO: 48364 - protein, 9 aa, Homo sapiens
  misc_feature: Table A; Target 48364; HLA-B*35:03; MYH4; ENSG00000264424; TAA
DEEEINAEL

SEQ ID NO: 48365 - protein, 9 aa, Homo sapiens
  misc_feature: Table A; Target 48365; HLA-B*39:01; MYH4; ENSG00000264424; TAA
DEEEINAEL

SEQ ID NO: 48366 - protein, 9 aa, Homo sapiens
  misc_feature: Table A; Target 48366; HLA-B*40:01; MYH4; ENSG00000264424; TAA
DEEEINAEL

SEQ ID NO: 48367 - protein, 11 aa, Homo sapiens
  misc_feature: Table A; Target 48367; HLA-B*18:01; MYH4; ENSG00000264424; TAA
DEEEINAELTA

SEQ ID NO: 48368 - protein, 8 aa, Homo sapiens
  misc_feature: Table A; Target 48368; HLA-B*18:01; MYH4; ENSG00000264424; TAA
DEKDAMVS

SEQ ID NO: 48369 - protein, 9 aa, Homo sapiens
  misc_feature: Table A; Target 48369; HLA-B*18:01; MYH4; ENSG00000264424; TAA
DEKDAMVSQ

SEQ ID NO: 48370 - protein, 10 aa, Homo sapiens
  misc_feature: Table A; Target 48370; HLA-A*25:01; MYH4; ENSG00000264424; TAA
DEKDAMVSQL

SEQ ID NO: 48371 - protein, 10 aa, Homo sapiens
  misc_feature: Table A; Target 48371; HLA-A*30:01; MYH4; ENSG00000264424; TAA
DEKDAMVSQL

SEQ ID NO: 48372 - protein, 10 aa, Homo sapiens
  misc_feature: Table A; Target 48372; HLA-B*18:01; MYH4; ENSG00000264424; TAA
DEKDAMVSQL

SEQ ID NO: 48373 - protein, 10 aa, Homo sapiens
  misc_feature: Table A; Target 48373; HLA-B*40:01; MYH4; ENSG00000264424; TAA
DEKDAMVSQL

SEQ ID NO: 48374 - protein, 10 aa, Homo sapiens
  misc_feature: Table A; Target 48374; HLA-B*40:02; MYH4; ENSG00000264424; TAA
DEKDAMVSQL

SEQ ID NO: 48375 - protein, 10 aa, Homo sapiens
  misc_feature: Table A; Target 48375; HLA-B*44:02; MYH4; ENSG00000264424; TAA
DEKDAMVSQL

SEQ ID NO: 48376 - protein, 8 aa, Homo sapiens
  misc_feature: Table A; Target 48376; HLA-B*08:01; MYH4; ENSG00000264424; TAA
DEKLAQLI

SEQ ID NO: 48377 - protein, 8 aa, Homo sapiens
  misc_feature: Table A; Target 48377; HLA-B*18:01; MYH4; ENSG00000264424; TAA
DEKLAQLI

SEQ ID NO: 48378 - protein, 8 aa, Homo sapiens
  misc_feature: Table A; Target 48378; HLA-B*49:01; MYH4; ENSG00000264424; TAA
DEKLAQLI

SEQ ID NO: 48379 - protein, 8 aa, Homo sapiens
  misc_feature: Table A; Target 48379; HLA-B*51:01; MYH4; ENSG00000264424; TAA
DEKLAQLI

SEQ ID NO: 48380 - protein, 10 aa, Homo sapiens
  misc_feature: Table A; Target 48380; HLA-A*33:01; MYH4; ENSG00000264424; TAA
DEKLAQLITR

SEQ ID NO: 48381 - protein, 10 aa, Homo sapiens
  misc_feature: Table A; Target 48381; HLA-A*33:03; MYH4; ENSG00000264424; TAA
DEKLAQLITR

SEQ ID NO: 48382 - protein, 10 aa, Homo sapiens
  misc_feature: Table A; Target 48382; HLA-A*68:01; MYH4; ENSG00000264424; TAA
DEKLAQLITR

SEQ ID NO: 48383 - protein, 8 aa, Homo sapiens
  misc_feature: Table A; Target 48383; HLA-B*18:01; MYH4; ENSG00000264424; TAA
DEKVAIYK

SEQ ID NO: 48384 - protein, 9 aa, Homo sapiens
  misc_feature: Table A; Target 48384; HLA-A*30:01; MYH4; ENSG00000264424; TAA
DEKVAIYKL

SEQ ID NO: 48385 - protein, 9 aa, Homo sapiens
  misc_feature: Table A; Target 48385; HLA-B*18:01; MYH4; ENSG00000264424; TAA
DEKVAIYKL

SEQ ID NO: 48386 - protein, 9 aa, Homo sapiens
  misc_feature: Table A; Target 48386; HLA-B*40:02; MYH4; ENSG00000264424; TAA
DEKVAIYKL

SEQ ID NO: 48387 - protein, 9 aa, Homo sapiens
  misc_feature: Table A; Target 48387; HLA-B*44:02; MYH4; ENSG00000264424; TAA
DEKVAIYKL

SEQ ID NO: 48388 - protein, 9 aa, Homo sapiens
  misc_feature: Table A; Target 48388; HLA-B*44:03; MYH4; ENSG00000264424; TAA
DEKVAIYKL

SEQ ID NO: 48389 - protein, 9 aa, Homo sapiens
  misc_feature: Table A; Target 48389; HLA-A*30:01; MYH4; ENSG00000264424; TAA
DEQALAIQL

SEQ ID NO: 48390 - protein, 9 aa, Homo sapiens
  misc_feature: Table A; Target 48390; HLA-B*18:01; MYH4; ENSG00000264424; TAA
DEQALAIQL

SEQ ID NO: 48391 - protein, 9 aa, Homo sapiens
  misc_feature: Table A; Target 48391; HLA-B*40:01; MYH4; ENSG00000264424; TAA
DEQALAIQL

SEQ ID NO: 48392 - protein, 9 aa, Homo sapiens
  misc_feature: Table A; Target 48392; HLA-B*40:02; MYH4; ENSG00000264424; TAA
DEQALAIQL

SEQ ID NO: 48393 - protein, 9 aa, Homo sapiens
  misc_feature: Table A; Target 48393; HLA-B*44:02; MYH4; ENSG00000264424; TAA
DEQALAIQL

SEQ ID NO: 48394 - protein, 9 aa, Homo sapiens
  misc_feature: Table A; Target 48394; HLA-B*44:03; MYH4; ENSG00000264424; TAA
DEQALAIQL

SEQ ID NO: 48395 - protein, 11 aa, Homo sapiens
  misc_feature: Table A; Target 48395; HLA-B*27:02; MYH4; ENSG00000264424; TAA
DEQALAIQLQK

SEQ ID NO: 48396 - protein, 8 aa, Homo sapiens
  misc_feature: Table A; Target 48396; HLA-B*18:01; MYH4; ENSG00000264424; TAA
DETIAKLT

SEQ ID NO: 48397 - protein, 9 aa, Homo sapiens
  misc_feature: Table A; Target 48397; HLA-B*18:01; MYH4; ENSG00000264424; TAA
DETIAKLTK

SEQ ID NO: 48398 - protein, 9 aa, Homo sapiens
  misc_feature: Table A; Target 48398; HLA-B*44:03; MYH4; ENSG00000264424; TAA
DETIAKLTK

SEQ ID NO: 48399 - protein, 9 aa, Homo sapiens
  misc_feature: Table A; Target 48399; HLA-B*08:01; MYH4; ENSG00000264424; TAA
DFKQRYKVL

SEQ ID NO: 48400 - protein, 11 aa, Homo sapiens
  misc_feature: Table A; Target 48400; HLA-B*38:01; MYH4; ENSG00000264424; TAA
DHEKSELQTSL

SEQ ID NO: 48401 - protein, 11 aa, Homo sapiens
  misc_feature: Table A; Target 48401; HLA-B*39:01; MYH4; ENSG00000264424; TAA
DHEKSELQTSL

SEQ ID NO: 48402 - protein, 9 aa, Homo sapiens
  misc_feature: Table A; Target 48402; HLA-A*03:01; MYH4; ENSG00000264424; TAA
DIAESQVNK

SEQ ID NO: 48403 - protein, 9 aa, Homo sapiens
  misc_feature: Table A; Target 48403; HLA-A*03:02; MYH4; ENSG00000264424; TAA
DIAESQVNK

SEQ ID NO: 48404 - protein, 9 aa, Homo sapiens
  misc_feature: Table A; Target 48404; HLA-A*11:01; MYH4; ENSG00000264424; TAA
DIAESQVNK

SEQ ID NO: 48405 - protein, 9 aa, Homo sapiens
  misc_feature: Table A; Target 48405; HLA-A*33:01; MYH4; ENSG00000264424; TAA
DIAESQVNK

SEQ ID NO: 48406 - protein, 9 aa, Homo sapiens
  misc_feature: Table A; Target 48406; HLA-A*33:03; MYH4; ENSG00000264424; TAA
DIAESQVNK

SEQ ID NO: 48407 - protein, 9 aa, Homo sapiens
  misc_feature: Table A; Target 48407; HLA-A*68:01; MYH4; ENSG00000264424; TAA
DIAESQVNK

SEQ ID NO: 48408 - protein, 9 aa, Homo sapiens
  misc_feature: Table A; Target 48408; HLA-B*27:02; MYH4; ENSG00000264424; TAA
DIAESQVNK

SEQ ID NO: 48409 - protein, 9 aa, Homo sapiens
  misc_feature: Table A; Target 48409; HLA-C*07:06; MYH4; ENSG00000264424; TAA
DIAESQVNK

SEQ ID NO: 48410 - protein, 10 aa, Homo sapiens
  misc_feature: Table A; Target 48410; HLA-A*25:01; MYH4; ENSG00000264424; TAA
DIAESQVNKL

SEQ ID NO: 48411 - protein, 10 aa, Homo sapiens
  misc_feature: Table A; Target 48411; HLA-A*26:01; MYH4; ENSG00000264424; TAA
DIAESQVNKL

SEQ ID NO: 48412 - protein, 10 aa, Homo sapiens
  misc_feature: Table A; Target 48412; HLA-A*68:01; MYH4; ENSG00000264424; TAA
DIAESQVNKL

SEQ ID NO: 48413 - protein, 10 aa, Homo sapiens
  misc_feature: Table A; Target 48413; HLA-A*68:02; MYH4; ENSG00000264424; TAA
DIAESQVNKL

SEQ ID NO: 48414 - protein, 10 aa, Homo sapiens
  misc_feature: Table A; Target 48414; HLA-C*07:06; MYH4; ENSG00000264424; TAA
DIAESQVNKL

SEQ ID NO: 48415 - protein, 11 aa, Homo sapiens
  misc_feature: Table A; Target 48415; HLA-A*33:01; MYH4; ENSG00000264424; TAA
DIAESQVNKLR

SEQ ID NO: 48416 - protein, 11 aa, Homo sapiens
  misc_feature: Table A; Target 48416; HLA-A*33:03; MYH4; ENSG00000264424; TAA
DIAESQVNKLR

SEQ ID NO: 48417 - protein, 11 aa, Homo sapiens
  misc_feature: Table A; Target 48417; HLA-A*68:01; MYH4; ENSG00000264424; TAA
DIAESQVNKLR

SEQ ID NO: 48418 - protein, 11 aa, Homo sapiens
  misc_feature: Table A; Target 48418; HLA-C*07:06; MYH4; ENSG00000264424; TAA
DIAESQVNKLR

SEQ ID NO: 48419 - protein, 10 aa, Homo sapiens
  misc_feature: Table A; Target 48419; HLA-A*25:01; MYH4; ENSG00000264424; TAA
DIAGFEIFDF

SEQ ID NO: 48420 - protein, 10 aa, Homo sapiens
  misc_feature: Table A; Target 48420; HLA-A*26:01; MYH4; ENSG00000264424; TAA
DIAGFEIFDF

SEQ ID NO: 48421 - protein, 9 aa, Homo sapiens
  misc_feature: Table A; Target 48421; HLA-A*01:01; MYH4; ENSG00000264424; TAA
DIDDLELTL

SEQ ID NO: 48422 - protein, 9 aa, Homo sapiens
  misc_feature: Table A; Target 48422; HLA-A*02:07; MYH4; ENSG00000264424; TAA
DIDDLELTL

SEQ ID NO: 48423 - protein, 9 aa, Homo sapiens
  misc_feature: Table A; Target 48423; HLA-A*68:02; MYH4; ENSG00000264424; TAA
DIDDLELTL

SEQ ID NO: 48424 - protein, 9 aa, Homo sapiens
  misc_feature: Table A; Target 48424; HLA-B*35:03; MYH4; ENSG00000264424; TAA
DIDDLELTL

SEQ ID NO: 48425 - protein, 9 aa, Homo sapiens
  misc_feature: Table A; Target 48425; HLA-B*38:01; MYH4; ENSG00000264424; TAA
DIDDLELTL

SEQ ID NO: 48426 - protein, 9 aa, Homo sapiens
  misc_feature: Table A; Target 48426; HLA-B*39:01; MYH4; ENSG00000264424; TAA
DIDDLELTL

SEQ ID NO: 48427 - protein, 9 aa, Homo sapiens
  misc_feature: Table A; Target 48427; HLA-C*05:01; MYH4; ENSG00000264424; TAA
DIDDLELTL

SEQ ID NO: 48428 - protein, 11 aa, Homo sapiens
  misc_feature: Table A; Target 48428; HLA-B*27:02; MYH4; ENSG00000264424; TAA
DIDDLELTLAK

SEQ ID NO: 48429 - protein, 9 aa, Homo sapiens
  misc_feature: Table A; Target 48429; HLA-A*33:01; MYH4; ENSG00000264424; TAA
DIETYLLEK

SEQ ID NO: 48430 - protein, 9 aa, Homo sapiens
  misc_feature: Table A; Target 48430; HLA-A*68:01; MYH4; ENSG00000264424; TAA
DIETYLLEK

SEQ ID NO: 48431 - protein, 9 aa, Homo sapiens
  misc_feature: Table A; Target 48431; HLA-B*27:02; MYH4; ENSG00000264424; TAA
DIETYLLEK

SEQ ID NO: 48432 - protein, 9 aa, Homo sapiens
  misc_feature: Table A; Target 48432; HLA-A*26:01; MYH4; ENSG00000264424; TAA
DISQIQGEM

SEQ ID NO: 48433 - protein, 9 aa, Homo sapiens
  misc_feature: Table A; Target 48433; HLA-A*68:01; MYH4; ENSG00000264424; TAA
DISQIQGEM

SEQ ID NO: 48434 - protein, 9 aa, Homo sapiens
  misc_feature: Table A; Target 48434; HLA-C*07:06; MYH4; ENSG00000264424; TAA
DISQIQGEM

SEQ ID NO: 48435 - protein, 9 aa, Homo sapiens
  misc_feature: Table A; Target 48435; HLA-B*15:03; MYH4; ENSG00000264424; TAA
DKAAYLTSL

SEQ ID NO: 48436 - protein, 9 aa, Homo sapiens
  misc_feature: Table A; Target 48436; HLA-A*02:01; MYH4; ENSG00000264424; TAA
DLASNMETV

SEQ ID NO: 48437 - protein, 9 aa, Homo sapiens
  misc_feature: Table A; Target 48437; HLA-A*02:03; MYH4; ENSG00000264424; TAA
DLASNMETV

SEQ ID NO: 48438 - protein, 9 aa, Homo sapiens
  misc_feature: Table A; Target 48438; HLA-A*25:01; MYH4; ENSG00000264424; TAA
DLASNMETV

SEQ ID NO: 48439 - protein, 9 aa, Homo sapiens
  misc_feature: Table A; Target 48439; HLA-A*26:01; MYH4; ENSG00000264424; TAA
DLASNMETV

SEQ ID NO: 48440 - protein, 9 aa, Homo sapiens
  misc_feature: Table A; Target 48440; HLA-A*68:02; MYH4; ENSG00000264424; TAA
DLASNMETV

SEQ ID NO: 48441 - protein, 9 aa, Homo sapiens
  misc_feature: Table A; Target 48441; HLA-B*39:01; MYH4; ENSG00000264424; TAA
DLASNMETV

SEQ ID NO: 48442 - protein, 9 aa, Homo sapiens
  misc_feature: Table A; Target 48442; HLA-B*51:01; MYH4; ENSG00000264424; TAA
DLASNMETV

SEQ ID NO: 48443 - protein, 9 aa, Homo sapiens
  misc_feature: Table A; Target 48443; HLA-B*55:01; MYH4; ENSG00000264424; TAA
DLASNMETV

SEQ ID NO: 48444 - protein, 11 aa, Homo sapiens
  misc_feature: Table A; Target 48444; HLA-A*03:02; MYH4; ENSG00000264424; TAA
DLASNMETVSK

SEQ ID NO: 48445 - protein, 11 aa, Homo sapiens
  misc_feature: Table A; Target 48445; HLA-A*33:01; MYH4; ENSG00000264424; TAA
DLASNMETVSK

SEQ ID NO: 48446 - protein, 11 aa, Homo sapiens
  misc_feature: Table A; Target 48446; HLA-A*68:01; MYH4; ENSG00000264424; TAA
DLASNMETVSK

SEQ ID NO: 48447 - protein, 9 aa, Homo sapiens
  misc_feature: Table A; Target 48447; HLA-A*01:01; MYH4; ENSG00000264424; TAA
DLEESTLQH

SEQ ID NO: 48448 - protein, 8 aa, Homo sapiens
  misc_feature: Table A; Target 48448; HLA-B*08:01; MYH4; ENSG00000264424; TAA
DLKEQLAM

SEQ ID NO: 48449 - protein, 9 aa, Homo sapiens
  misc_feature: Table A; Target 48449; HLA-A*02:03; MYH4; ENSG00000264424; TAA
DLKEQLAMV

SEQ ID NO: 48450 - protein, 9 aa, Homo sapiens
  misc_feature: Table A; Target 48450; HLA-B*08:01; MYH4; ENSG00000264424; TAA
DLKEQLAMV

SEQ ID NO: 48451 - protein, 9 aa, Homo sapiens
  misc_feature: Table A; Target 48451; HLA-B*51:01; MYH4; ENSG00000264424; TAA
DLKEQLAMV

SEQ ID NO: 48452 - protein, 11 aa, Homo sapiens
  misc_feature: Table A; Target 48452; HLA-A*33:01; MYH4; ENSG00000264424; TAA
DLKEQLAMVER

SEQ ID NO: 48453 - protein, 11 aa, Homo sapiens
  misc_feature: Table A; Target 48453; HLA-A*33:03; MYH4; ENSG00000264424; TAA
DLKEQLAMVER

SEQ ID NO: 48454 - protein, 11 aa, Homo sapiens
  misc_feature: Table A; Target 48454; HLA-A*68:01; MYH4; ENSG00000264424; TAA
DLKEQLAMVER

SEQ ID NO: 48455 - protein, 10 aa, Homo sapiens
  misc_feature: Table A; Target 48455; HLA-B*08:01; MYH4; ENSG00000264424; TAA
DLKLAQESTM

SEQ ID NO: 48456 - protein, 10 aa, Homo sapiens
  misc_feature: Table A; Target 48456; HLA-A*33:01; MYH4; ENSG00000264424; TAA
DLLKSLCYPR

SEQ ID NO: 48457 - protein, 8 aa, Homo sapiens
  misc_feature: Table A; Target 48457; HLA-A*33:01; MYH4; ENSG00000264424; TAA
DLMIDVER

SEQ ID NO: 48458 - protein, 9 aa, Homo sapiens
  misc_feature: Table A; Target 48458; HLA-B*35:03; MYH4; ENSG00000264424; TAA
DLNEMEIQL

SEQ ID NO: 48459 - protein, 9 aa, Homo sapiens
  misc_feature: Table A; Target 48459; HLA-B*38:01; MYH4; ENSG00000264424; TAA
DLNEMEIQL

SEQ ID NO: 48460 - protein, 9 aa, Homo sapiens
  misc_feature: Table A; Target 48460; HLA-B*39:01; MYH4; ENSG00000264424; TAA
DLNEMEIQL

SEQ ID NO: 48461 - protein, 9 aa, Homo sapiens
  misc_feature: Table A; Target 48461; HLA-B*55:01; MYH4; ENSG00000264424; TAA
DLNEMEIQL

SEQ ID NO: 48462 - protein, 9 aa, Homo sapiens
  misc_feature: Table A; Target 48462; HLA-A*25:01; MYH4; ENSG00000264424; TAA
DLVDKLQTK

SEQ ID NO: 48463 - protein, 9 aa, Homo sapiens
  misc_feature: Table A; Target 48463; HLA-A*26:01; MYH4; ENSG00000264424; TAA
DLVDKLQTK

SEQ ID NO: 48464 - protein, 9 aa, Homo sapiens
  misc_feature: Table A; Target 48464; HLA-A*33:01; MYH4; ENSG00000264424; TAA
DLVDKLQTK

SEQ ID NO: 48465 - protein, 9 aa, Homo sapiens
  misc_feature: Table A; Target 48465; HLA-A*33:03; MYH4; ENSG00000264424; TAA
DLVDKLQTK

SEQ ID NO: 48466 - protein, 9 aa, Homo sapiens
  misc_feature: Table A; Target 48466; HLA-A*68:01; MYH4; ENSG00000264424; TAA
DLVDKLQTK

SEQ ID NO: 48467 - protein, 9 aa, Homo sapiens
  misc_feature: Table A; Target 48467; HLA-B*08:01; MYH4; ENSG00000264424; TAA
DLVDKLQTK

SEQ ID NO: 48468 - protein, 9 aa, Homo sapiens
  misc_feature: Table A; Target 48468; HLA-C*07:06; MYH4; ENSG00000264424; TAA
DLVDKLQTK

SEQ ID NO: 48469 - protein, 10 aa, Homo sapiens
  misc_feature: Table A; Target 48469; HLA-A*68:02; MYH4; ENSG00000264424; TAA
DLVDKLQTKV

SEQ ID NO: 48470 - protein, 8 aa, Homo sapiens
  misc_feature: Table A; Target 48470; HLA-B*08:01; MYH4; ENSG00000264424; TAA
DMAMMTHL

SEQ ID NO: 48471 - protein, 8 aa, Homo sapiens
  misc_feature: Table A; Target 48471; HLA-B*51:01; MYH4; ENSG00000264424; TAA
DMAMMTHL

SEQ ID NO: 48472 - protein, 9 aa, Homo sapiens
  misc_feature: Table A; Target 48472; HLA-A*33:01; MYH4; ENSG00000264424; TAA
DNSSRFGKF

SEQ ID NO: 48473 - protein, 8 aa, Homo sapiens
  misc_feature: Table A; Target 48473; HLA-A*33:01; MYH4; ENSG00000264424; TAA
DPKESYVK

SEQ ID NO: 48474 - protein, 8 aa, Homo sapiens
  misc_feature: Table A; Target 48474; HLA-A*33:03; MYH4; ENSG00000264424; TAA
DPKESYVK

SEQ ID NO: 48475 - protein, 9 aa, Homo sapiens
  misc_feature: Table A; Target 48475; HLA-B*54:01; MYH4; ENSG00000264424; TAA
DPKESYVKA

SEQ ID NO: 48476 - protein, 8 aa, Homo sapiens
  misc_feature: Table A; Target 48476; HLA-B*51:01; MYH4; ENSG00000264424; TAA
DPLNETVV

SEQ ID NO: 48477 - protein, 10 aa, Homo sapiens
  misc_feature: Table A; Target 48477; HLA-A*68:01; MYH4; ENSG00000264424; TAA
DPLNETVVGL

SEQ ID NO: 48478 - protein, 10 aa, Homo sapiens
  misc_feature: Table A; Target 48478; HLA-B*35:01; MYH4; ENSG00000264424; TAA
DPLNETVVGL

SEQ ID NO: 48479 - protein, 10 aa, Homo sapiens
  misc_feature: Table A; Target 48479; HLA-B*35:03; MYH4; ENSG00000264424; TAA
DPLNETVVGL

SEQ ID NO: 48480 - protein, 11 aa, Homo sapiens
  misc_feature: Table A; Target 48480; HLA-A*01:01; MYH4; ENSG00000264424; TAA
DPLNETVVGLY

SEQ ID NO: 48481 - protein, 11 aa, Homo sapiens
  misc_feature: Table A; Target 48481; HLA-A*26:01; MYH4; ENSG00000264424; TAA
DPLNETVVGLY

SEQ ID NO: 48482 - protein, 11 aa, Homo sapiens
  misc_feature: Table A; Target 48482; HLA-B*35:01; MYH4; ENSG00000264424; TAA
DPLNETVVGLY

SEQ ID NO: 48483 - protein, 9 aa, Homo sapiens
  misc_feature: Table A; Target 48483; HLA-B*08:01; MYH4; ENSG00000264424; TAA
DQIISANPL

SEQ ID NO: 48484 - protein, 9 aa, Homo sapiens
  misc_feature: Table A; Target 48484; HLA-B*18:01; MYH4; ENSG00000264424; TAA
DQIISANPL

SEQ ID NO: 48485 - protein, 9 aa, Homo sapiens
  misc_feature: Table A; Target 48485; HLA-B*27:05; MYH4; ENSG00000264424; TAA
DQIISANPL

SEQ ID NO: 48486 - protein, 9 aa, Homo sapiens
  misc_feature: Table A; Target 48486; HLA-B*39:01; MYH4; ENSG00000264424; TAA
DQIISANPL

SEQ ID NO: 48487 - protein, 10 aa, Homo sapiens
  misc_feature: Table A; Target 48487; HLA-B*38:01; MYH4; ENSG00000264424; TAA
DQIISANPLL

SEQ ID NO: 48488 - protein, 8 aa, Homo sapiens
  misc_feature: Table A; Target 48488; HLA-B*08:01; MYH4; ENSG00000264424; TAA
DQLIKTKI

SEQ ID NO: 48489 - protein, 8 aa, Homo sapiens
  misc_feature: Table A; Target 48489; HLA-B*08:01; MYH4; ENSG00000264424; TAA
DQLKRNHL

SEQ ID NO: 48490 - protein, 9 aa, Homo sapiens
  misc_feature: Table A; Target 48490; HLA-A*33:01; MYH4; ENSG00000264424; TAA
DQLKRNHLR

SEQ ID NO: 48491 - protein, 10 aa, Homo sapiens
  misc_feature: Table A; Target 48491; HLA-A*68:01; MYH4; ENSG00000264424; TAA
DQVFSMNPPK

SEQ ID NO: 48492 - protein, 10 aa, Homo sapiens
  misc_feature: Table A; Target 48492; HLA-B*27:02; MYH4; ENSG00000264424; TAA
DQVFSMNPPK

SEQ ID NO: 48493 - protein, 10 aa, Homo sapiens
  misc_feature: Table A; Target 48493; HLA-C*04:01; MYH4; ENSG00000264424; TAA
DQVFSMNPPK

SEQ ID NO: 48494 - protein, 9 aa, Homo sapiens
  misc_feature: Table A; Target 48494; HLA-B*38:01; MYH4; ENSG00000264424; TAA
DRENQSILI

SEQ ID NO: 48495 - protein, 9 aa, Homo sapiens
  misc_feature: Table A; Target 48495; HLA-A*25:01; MYH4; ENSG00000264424; TAA
DSAVDILGF

SEQ ID NO: 48496 - protein, 9 aa, Homo sapiens
  misc_feature: Table A; Target 48496; HLA-A*26:01; MYH4; ENSG00000264424; TAA
DSAVDILGF

SEQ ID NO: 48497 - protein, 9 aa, Homo sapiens
  misc_feature: Table A; Target 48497; HLA-A*33:01; MYH4; ENSG00000264424; TAA
DSAVDILGF

SEQ ID NO: 48498 - protein, 9 aa, Homo sapiens
  misc_feature: Table A; Target 48498; HLA-A*68:01; MYH4; ENSG00000264424; TAA
DSAVDILGF

SEQ ID NO: 48499 - protein, 9 aa, Homo sapiens
  misc_feature: Table A; Target 48499; HLA-B*18:01; MYH4; ENSG00000264424; TAA
DSAVDILGF

SEQ ID NO: 48500 - protein, 9 aa, Homo sapiens
  misc_feature: Table A; Target 48500; HLA-C*07:06; MYH4; ENSG00000264424; TAA
DSAVDILGF

SEQ ID NO: 48501 - protein, 9 aa, Homo sapiens
  misc_feature: Table A; Target 48501; HLA-A*33:01; MYH4; ENSG00000264424; TAA
DSLQRVKQK

SEQ ID NO: 48502 - protein, 10 aa, Homo sapiens
  misc_feature: Table A; Target 48502; HLA-A*01:01; MYH4; ENSG00000264424; TAA
DTENDKQQLN

SEQ ID NO: 48503 - protein, 9 aa, Homo sapiens
  misc_feature: Table A; Target 48503; HLA-A*25:01; MYH4; ENSG00000264424; TAA
DTKQPRQYF

SEQ ID NO: 48504 - protein, 9 aa, Homo sapiens
  misc_feature: Table A; Target 48504; HLA-A*33:01; MYH4; ENSG00000264424; TAA
DTKQPRQYF

SEQ ID NO: 48505 - protein, 9 aa, Homo sapiens
  misc_feature: Table A; Target 48505; HLA-A*33:03; MYH4; ENSG00000264424; TAA
DTKQPRQYF

SEQ ID NO: 48506 - protein, 8 aa, Homo sapiens
  misc_feature: Table A; Target 48506; HLA-A*33:01; MYH4; ENSG00000264424; TAA
DTSAHLER

SEQ ID NO: 48507 - protein, 8 aa, Homo sapiens
  misc_feature: Table A; Target 48507; HLA-A*33:03; MYH4; ENSG00000264424; TAA
DTSAHLER

SEQ ID NO: 48508 - protein, 8 aa, Homo sapiens
  misc_feature: Table A; Target 48508; HLA-A*68:01; MYH4; ENSG00000264424; TAA
DTSAHLER

SEQ ID NO: 48509 - protein, 9 aa, Homo sapiens
  misc_feature: Table A; Target 48509; HLA-A*25:01; MYH4; ENSG00000264424; TAA
DTSAHLERM

SEQ ID NO: 48510 - protein, 9 aa, Homo sapiens
  misc_feature: Table A; Target 48510; HLA-A*26:01; MYH4; ENSG00000264424; TAA
DTSAHLERM

SEQ ID NO: 48511 - protein, 9 aa, Homo sapiens
  misc_feature: Table A; Target 48511; HLA-A*33:01; MYH4; ENSG00000264424; TAA
DTSAHLERM

SEQ ID NO: 48512 - protein, 9 aa, Homo sapiens
  misc_feature: Table A; Target 48512; HLA-A*33:03; MYH4; ENSG00000264424; TAA
DTSAHLERM

SEQ ID NO: 48513 - protein, 9 aa, Homo sapiens
  misc_feature: Table A; Target 48513; HLA-A*68:02; MYH4; ENSG00000264424; TAA
DTSAHLERM

SEQ ID NO: 48514 - protein, 8 aa, Homo sapiens
  misc_feature: Table A; Target 48514; HLA-B*08:01; MYH4; ENSG00000264424; TAA
DTSFKNKL

SEQ ID NO: 48515 - protein, 9 aa, Homo sapiens
  misc_feature: Table A; Target 48515; HLA-A*01:01; MYH4; ENSG00000264424; TAA
DTSFKNKLY

SEQ ID NO: 48516 - protein, 9 aa, Homo sapiens
  misc_feature: Table A; Target 48516; HLA-A*26:01; MYH4; ENSG00000264424; TAA
DTSFKNKLY

SEQ ID NO: 48517 - protein, 11 aa, Homo sapiens
  misc_feature: Table A; Target 48517; HLA-A*68:01; MYH4; ENSG00000264424; TAA
EADALADAEER

SEQ ID NO: 48518 - protein, 11 aa, Homo sapiens
  misc_feature: Table A; Target 48518; HLA-B*27:02; MYH4; ENSG00000264424; TAA
EADALADAEER

SEQ ID NO: 48519 - protein, 8 aa, Homo sapiens
  misc_feature: Table A; Target 48519; HLA-C*05:01; MYH4; ENSG00000264424; TAA
EAEEQSNV

SEQ ID NO: 48520 - protein, 10 aa, Homo sapiens
  misc_feature: Table A; Target 48520; HLA-A*33:03; MYH4; ENSG00000264424; TAA
EAEEQSNVNL

SEQ ID NO: 48521 - protein, 10 aa, Homo sapiens
  misc_feature: Table A; Target 48521; HLA-A*68:01; MYH4; ENSG00000264424; TAA
EAEEQSNVNL

SEQ ID NO: 48522 - protein, 10 aa, Homo sapiens
  misc_feature: Table A; Target 48522; HLA-C*04:01; MYH4; ENSG00000264424; TAA
EAEEQSNVNL

SEQ ID NO: 48523 - protein, 10 aa, Homo sapiens
  misc_feature: Table A; Target 48523; HLA-C*05:01; MYH4; ENSG00000264424; TAA
EAEEQSNVNL

SEQ ID NO: 48524 - protein, 8 aa, Homo sapiens
  misc_feature: Table A; Target 48524; HLA-C*05:01; MYH4; ENSG00000264424; TAA
EAEGGGGK

SEQ ID NO: 48525 - protein, 9 aa, Homo sapiens
  misc_feature: Table A; Target 48525; HLA-C*05:01; MYH4; ENSG00000264424; TAA
EAEGGGGKK

SEQ ID NO: 48526 - protein, 8 aa, Homo sapiens
  misc_feature: Table A; Target 48526; HLA-B*27:02; MYH4; ENSG00000264424; TAA
EAEQLALK

SEQ ID NO: 48527 - protein, 9 aa, Homo sapiens
  misc_feature: Table A; Target 48527; HLA-A*02:03; MYH4; ENSG00000264424; TAA
EAFGNAKTV

SEQ ID NO: 48528 - protein, 9 aa, Homo sapiens
  misc_feature: Table A; Target 48528; HLA-A*25:01; MYH4; ENSG00000264424; TAA
EAFGNAKTV

SEQ ID NO: 48529 - protein, 9 aa, Homo sapiens
  misc_feature: Table A; Target 48529; HLA-A*26:01; MYH4; ENSG00000264424; TAA
EAFGNAKTV

SEQ ID NO: 48530 - protein, 9 aa, Homo sapiens
  misc_feature: Table A; Target 48530; HLA-A*33:01; MYH4; ENSG00000264424; TAA
EAFGNAKTV

SEQ ID NO: 48531 - protein, 9 aa, Homo sapiens
  misc_feature: Table A; Target 48531; HLA-A*33:03; MYH4; ENSG00000264424; TAA
EAFGNAKTV

SEQ ID NO: 48532 - protein, 9 aa, Homo sapiens
  misc_feature: Table A; Target 48532; HLA-A*68:01; MYH4; ENSG00000264424; TAA
EAFGNAKTV

SEQ ID NO: 48533 - protein, 9 aa, Homo sapiens
  misc_feature: Table A; Target 48533; HLA-A*68:02; MYH4; ENSG00000264424; TAA
EAFGNAKTV

SEQ ID NO: 48534 - protein, 9 aa, Homo sapiens
  misc_feature: Table A; Target 48534; HLA-B*13:02; MYH4; ENSG00000264424; TAA
EAFGNAKTV

SEQ ID NO: 48535 - protein, 9 aa, Homo sapiens
  misc_feature: Table A; Target 48535; HLA-B*35:01; MYH4; ENSG00000264424; TAA
EAFGNAKTV

SEQ ID NO: 48536 - protein, 9 aa, Homo sapiens
  misc_feature: Table A; Target 48536; HLA-B*35:03; MYH4; ENSG00000264424; TAA
EAFGNAKTV

SEQ ID NO: 48537 - protein, 9 aa, Homo sapiens
  misc_feature: Table A; Target 48537; HLA-B*39:01; MYH4; ENSG00000264424; TAA
EAFGNAKTV

SEQ ID NO: 48538 - protein, 9 aa, Homo sapiens
  misc_feature: Table A; Target 48538; HLA-B*40:02; MYH4; ENSG00000264424; TAA
EAFGNAKTV

SEQ ID NO: 48539 - protein, 9 aa, Homo sapiens
  misc_feature: Table A; Target 48539; HLA-B*49:01; MYH4; ENSG00000264424; TAA
EAFGNAKTV

SEQ ID NO: 48540 - protein, 9 aa, Homo sapiens
  misc_feature: Table A; Target 48540; HLA-B*51:01; MYH4; ENSG00000264424; TAA
EAFGNAKTV

SEQ ID NO: 48541 - protein, 9 aa, Homo sapiens
  misc_feature: Table A; Target 48541; HLA-B*54:01; MYH4; ENSG00000264424; TAA
EAFGNAKTV

SEQ ID NO: 48542 - protein, 9 aa, Homo sapiens
  misc_feature: Table A; Target 48542; HLA-B*56:01; MYH4; ENSG00000264424; TAA
EAFGNAKTV

SEQ ID NO: 48543 - protein, 9 aa, Homo sapiens
  misc_feature: Table A; Target 48543; HLA-C*02:02; MYH4; ENSG00000264424; TAA
EAFGNAKTV

SEQ ID NO: 48544 - protein, 9 aa, Homo sapiens
  misc_feature: Table A; Target 48544; HLA-C*03:03; MYH4; ENSG00000264424; TAA
EAFGNAKTV

SEQ ID NO: 48545 - protein, 9 aa, Homo sapiens
  misc_feature: Table A; Target 48545; HLA-C*03:04; MYH4; ENSG00000264424; TAA
EAFGNAKTV

SEQ ID NO: 48546 - protein, 9 aa, Homo sapiens
  misc_feature: Table A; Target 48546; HLA-C*06:02; MYH4; ENSG00000264424; TAA
EAFGNAKTV

SEQ ID NO: 48547 - protein, 9 aa, Homo sapiens
  misc_feature: Table A; Target 48547; HLA-C*07:01; MYH4; ENSG00000264424; TAA
EAFGNAKTV

SEQ ID NO: 48548 - protein, 9 aa, Homo sapiens
  misc_feature: Table A; Target 48548; HLA-C*07:06; MYH4; ENSG00000264424; TAA
EAFGNAKTV

SEQ ID NO: 48549 - protein, 9 aa, Homo sapiens
  misc_feature: Table A; Target 48549; HLA-C*12:03; MYH4; ENSG00000264424; TAA
EAFGNAKTV

SEQ ID NO: 48550 - protein, 9 aa, Homo sapiens
  misc_feature: Table A; Target 48550; HLA-C*16:02; MYH4; ENSG00000264424; TAA
EAFGNAKTV

SEQ ID NO: 48551 - protein, 9 aa, Homo sapiens
  misc_feature: Table A; Target 48551; HLA-C*16:04; MYH4; ENSG00000264424; TAA
EAFGNAKTV

SEQ ID NO: 48552 - protein, 10 aa, Homo sapiens
  misc_feature: Table A; Target 48552; HLA-A*26:01; MYH4; ENSG00000264424; TAA
EAFGNAKTVR

SEQ ID NO: 48553 - protein, 10 aa, Homo sapiens
  misc_feature: Table A; Target 48553; HLA-A*33:01; MYH4; ENSG00000264424; TAA
EAFGNAKTVR

SEQ ID NO: 48554 - protein, 10 aa, Homo sapiens
  misc_feature: Table A; Target 48554; HLA-A*33:03; MYH4; ENSG00000264424; TAA
EAFGNAKTVR

SEQ ID NO: 48555 - protein, 10 aa, Homo sapiens
  misc_feature: Table A; Target 48555; HLA-A*68:01; MYH4; ENSG00000264424; TAA
EAFGNAKTVR

SEQ ID NO: 48556 - protein, 10 aa, Homo sapiens
  misc_feature: Table A; Target 48556; HLA-B*35:01; MYH4; ENSG00000264424; TAA
EAFGNAKTVR

SEQ ID NO: 48557 - protein, 10 aa, Homo sapiens
  misc_feature: Table A; Target 48557; HLA-C*07:06; MYH4; ENSG00000264424; TAA
EAFGNAKTVR

SEQ ID NO: 48558 - protein, 8 aa, Homo sapiens
  misc_feature: Table A; Target 48558; HLA-B*51:01; MYH4; ENSG00000264424; TAA
EAGATVTV

SEQ ID NO: 48559 - protein, 8 aa, Homo sapiens
  misc_feature: Table A; Target 48559; HLA-C*05:01; MYH4; ENSG00000264424; TAA
EAGATVTV

SEQ ID NO: 48560 - protein, 9 aa, Homo sapiens
  misc_feature: Table A; Target 48560; HLA-A*33:01; MYH4; ENSG00000264424; TAA
EAGATVTVK

SEQ ID NO: 48561 - protein, 9 aa, Homo sapiens
  misc_feature: Table A; Target 48561; HLA-A*33:03; MYH4; ENSG00000264424; TAA
EAGATVTVK

SEQ ID NO: 48562 - protein, 9 aa, Homo sapiens
  misc_feature: Table A; Target 48562; HLA-A*68:01; MYH4; ENSG00000264424; TAA
EAGATVTVK

SEQ ID NO: 48563 - protein, 9 aa, Homo sapiens
  misc_feature: Table A; Target 48563; HLA-C*07:06; MYH4; ENSG00000264424; TAA
EAGATVTVK

SEQ ID NO: 48564 - protein, 9 aa, Homo sapiens
  misc_feature: Table A; Target 48564; HLA-A*01:01; MYH4; ENSG00000264424; TAA
EAHFSLVHY

SEQ ID NO: 48565 - protein, 9 aa, Homo sapiens
  misc_feature: Table A; Target 48565; HLA-A*25:01; MYH4; ENSG00000264424; TAA
EAHFSLVHY

SEQ ID NO: 48566 - protein, 9 aa, Homo sapiens
  misc_feature: Table A; Target 48566; HLA-A*26:01; MYH4; ENSG00000264424; TAA
EAHFSLVHY

SEQ ID NO: 48567 - protein, 9 aa, Homo sapiens
  misc_feature: Table A; Target 48567; HLA-A*33:01; MYH4; ENSG00000264424; TAA
EAHFSLVHY

SEQ ID NO: 48568 - protein, 9 aa, Homo sapiens
  misc_feature: Table A; Target 48568; HLA-B*35:01; MYH4; ENSG00000264424; TAA
EAHFSLVHY

SEQ ID NO: 48569 - protein, 9 aa, Homo sapiens
  misc_feature: Table A; Target 48569; HLA-C*07:01; MYH4; ENSG00000264424; TAA
EAHFSLVHY

SEQ ID NO: 48570 - protein, 8 aa, Homo sapiens
  misc_feature: Table A; Target 48570; HLA-A*33:03; MYH4; ENSG00000264424; TAA
EAKAELQR

SEQ ID NO: 48571 - protein, 8 aa, Homo sapiens
  misc_feature: Table A; Target 48571; HLA-B*08:01; MYH4; ENSG00000264424; TAA
EAKIKEVT

SEQ ID NO: 48572 - protein, 10 aa, Homo sapiens
  misc_feature: Table A; Target 48572; HLA-A*33:01; MYH4; ENSG00000264424; TAA
EAKIKEVTER

SEQ ID NO: 48573 - protein, 10 aa, Homo sapiens
  misc_feature: Table A; Target 48573; HLA-A*33:03; MYH4; ENSG00000264424; TAA
EAKIKEVTER

SEQ ID NO: 48574 - protein, 10 aa, Homo sapiens
  misc_feature: Table A; Target 48574; HLA-A*68:01; MYH4; ENSG00000264424; TAA
EAKIKEVTER

SEQ ID NO: 48575 - protein, 9 aa, Homo sapiens
  misc_feature: Table A; Target 48575; HLA-A*33:01; MYH4; ENSG00000264424; TAA
EAKKKLAQR

SEQ ID NO: 48576 - protein, 9 aa, Homo sapiens
  misc_feature: Table A; Target 48576; HLA-A*33:03; MYH4; ENSG00000264424; TAA
EAKKKLAQR

SEQ ID NO: 48577 - protein, 9 aa, Homo sapiens
  misc_feature: Table A; Target 48577; HLA-A*02:04; MYH4; ENSG00000264424; TAA
EAPPHIFSI

SEQ ID NO: 48578 - protein, 9 aa, Homo sapiens
  misc_feature: Table A; Target 48578; HLA-A*02:07; MYH4; ENSG00000264424; TAA
EAPPHIFSI

SEQ ID NO: 48579 - protein, 9 aa, Homo sapiens
  misc_feature: Table A; Target 48579; HLA-A*23:01; MYH4; ENSG00000264424; TAA
EAPPHIFSI

SEQ ID NO: 48580 - protein, 9 aa, Homo sapiens
  misc_feature: Table A; Target 48580; HLA-A*24:02; MYH4; ENSG00000264424; TAA
EAPPHIFSI

SEQ ID NO: 48581 - protein, 9 aa, Homo sapiens
  misc_feature: Table A; Target 48581; HLA-A*25:01; MYH4; ENSG00000264424; TAA
EAPPHIFSI

SEQ ID NO: 48582 - protein, 9 aa, Homo sapiens
  misc_feature: Table A; Target 48582; HLA-A*26:01; MYH4; ENSG00000264424; TAA
EAPPHIFSI

SEQ ID NO: 48583 - protein, 9 aa, Homo sapiens
  misc_feature: Table A; Target 48583; HLA-A*33:01; MYH4; ENSG00000264424; TAA
EAPPHIFSI

SEQ ID NO: 48584 - protein, 9 aa, Homo sapiens
  misc_feature: Table A; Target 48584; HLA-A*33:03; MYH4; ENSG00000264424; TAA
EAPPHIFSI

SEQ ID NO: 48585 - protein, 9 aa, Homo sapiens
  misc_feature: Table A; Target 48585; HLA-A*68:01; MYH4; ENSG00000264424; TAA
EAPPHIFSI

SEQ ID NO: 48586 - protein, 9 aa, Homo sapiens
  misc_feature: Table A; Target 48586; HLA-A*68:02; MYH4; ENSG00000264424; TAA
EAPPHIFSI

SEQ ID NO: 48587 - protein, 9 aa, Homo sapiens
  misc_feature: Table A; Target 48587; HLA-B*08:01; MYH4; ENSG00000264424; TAA
EAPPHIFSI

SEQ ID NO: 48588 - protein, 9 aa, Homo sapiens
  misc_feature: Table A; Target 48588; HLA-B*13:02; MYH4; ENSG00000264424; TAA
EAPPHIFSI

SEQ ID NO: 48589 - protein, 9 aa, Homo sapiens
  misc_feature: Table A; Target 48589; HLA-B*51:01; MYH4; ENSG00000264424; TAA
EAPPHIFSI

SEQ ID NO: 48590 - protein, 9 aa, Homo sapiens
  misc_feature: Table A; Target 48590; HLA-B*54:01; MYH4; ENSG00000264424; TAA
EAPPHIFSI

SEQ ID NO: 48591 - protein, 10 aa, Homo sapiens
  misc_feature: Table A; Target 48591; HLA-A*33:01; MYH4; ENSG00000264424; TAA
EAQNKPFDAK

SEQ ID NO: 48592 - protein, 10 aa, Homo sapiens
  misc_feature: Table A; Target 48592; HLA-A*33:03; MYH4; ENSG00000264424; TAA
EAQNKPFDAK

SEQ ID NO: 48593 - protein, 10 aa, Homo sapiens
  misc_feature: Table A; Target 48593; HLA-A*68:01; MYH4; ENSG00000264424; TAA
EAQNKPFDAK

SEQ ID NO: 48594 - protein, 11 aa, Homo sapiens
  misc_feature: Table A; Target 48594; HLA-A*33:01; MYH4; ENSG00000264424; TAA
EARNAEEKAKK

SEQ ID NO: 48595 - protein, 8 aa, Homo sapiens
  misc_feature: Table A; Target 48595; HLA-A*33:01; MYH4; ENSG00000264424; TAA
EATAAALR

SEQ ID NO: 48596 - protein, 8 aa, Homo sapiens
  misc_feature: Table A; Target 48596; HLA-A*33:03; MYH4; ENSG00000264424; TAA
EATAAALR

SEQ ID NO: 48597 - protein, 8 aa, Homo sapiens
  misc_feature: Table A; Target 48597; HLA-A*68:01; MYH4; ENSG00000264424; TAA
EATAAALR

SEQ ID NO: 48598 - protein, 8 aa, Homo sapiens
  misc_feature: Table A; Target 48598; HLA-C*07:06; MYH4; ENSG00000264424; TAA
EATAAALR

SEQ ID NO: 48599 - protein, 9 aa, Homo sapiens
  misc_feature: Table A; Target 48599; HLA-A*33:03; MYH4; ENSG00000264424; TAA
EATAAALRK

SEQ ID NO: 48600 - protein, 9 aa, Homo sapiens
  misc_feature: Table A; Target 48600; HLA-A*68:01; MYH4; ENSG00000264424; TAA
EATAAALRK

SEQ ID NO: 48601 - protein, 9 aa, Homo sapiens
  misc_feature: Table A; Target 48601; HLA-C*07:06; MYH4; ENSG00000264424; TAA
EATAAALRK

SEQ ID NO: 48602 - protein, 10 aa, Homo sapiens
  misc_feature: Table A; Target 48602; HLA-A*68:01; MYH4; ENSG00000264424; TAA
EATAAALRKK

SEQ ID NO: 48603 - protein, 10 aa, Homo sapiens
  misc_feature: Table A; Target 48603; HLA-A*25:01; MYH4; ENSG00000264424; TAA
EAVNSKCASL

SEQ ID NO: 48604 - protein, 10 aa, Homo sapiens
  misc_feature: Table A; Target 48604; HLA-A*26:01; MYH4; ENSG00000264424; TAA
EAVNSKCASL

SEQ ID NO: 48605 - protein, 8 aa, Homo sapiens
  misc_feature: Table A; Target 48605; HLA-B*27:02; MYH4; ENSG00000264424; TAA
EDIVQEAR

SEQ ID NO: 48606 - protein, 9 aa, Homo sapiens
  misc_feature: Table A; Target 48606; HLA-A*33:03; MYH4; ENSG00000264424; TAA
EDKVNTLTK

SEQ ID NO: 48607 - protein, 9 aa, Homo sapiens
  misc_feature: Table A; Target 48607; HLA-A*33:01; MYH4; ENSG00000264424; TAA
EDLMIDVER

SEQ ID NO: 48608 - protein, 9 aa, Homo sapiens
  misc_feature: Table A; Target 48608; HLA-A*33:03; MYH4; ENSG00000264424; TAA
EDLMIDVER

SEQ ID NO: 48609 - protein, 9 aa, Homo sapiens
  misc_feature: Table A; Target 48609; HLA-A*68:01; MYH4; ENSG00000264424; TAA
EDLMIDVER

SEQ ID NO: 48610 - protein, 9 aa, Homo sapiens
  misc_feature: Table A; Target 48610; HLA-B*40:02; MYH4; ENSG00000264424; TAA
EDMAMMTHL

SEQ ID NO: 48611 - protein, 9 aa, Homo sapiens
  misc_feature: Table A; Target 48611; HLA-B*44:02; MYH4; ENSG00000264424; TAA
EDMAMMTHL

SEQ ID NO: 48612 - protein, 9 aa, Homo sapiens
  misc_feature: Table A; Target 48612; HLA-B*44:03; MYH4; ENSG00000264424; TAA
EDMAMMTHL

SEQ ID NO: 48613 - protein, 10 aa, Homo sapiens
  misc_feature: Table A; Target 48613; HLA-B*27:02; MYH4; ENSG00000264424; TAA
EDQLSEIKTK

SEQ ID NO: 48614 - protein, 11 aa, Homo sapiens
  misc_feature: Table A; Target 48614; HLA-C*04:01; MYH4; ENSG00000264424; TAA
EDQVFSMNPPK

SEQ ID NO: 48615 - protein, 9 aa, Homo sapiens
  misc_feature: Table A; Target 48615; HLA-B*18:01; MYH4; ENSG00000264424; TAA
EEAEASLEH

SEQ ID NO: 48616 - protein, 9 aa, Homo sapiens
  misc_feature: Table A; Target 48616; HLA-B*44:03; MYH4; ENSG00000264424; TAA
EEAEASLEH

SEQ ID NO: 48617 - protein, 9 aa, Homo sapiens
  misc_feature: Table A; Target 48617; HLA-B*49:01; MYH4; ENSG00000264424; TAA
EEAEEQSNV

SEQ ID NO: 48618 - protein, 11 aa, Homo sapiens
  misc_feature: Table A; Target 48618; HLA-A*30:01; MYH4; ENSG00000264424; TAA
EEAEEQSNVNL

SEQ ID NO: 48619 - protein, 11 aa, Homo sapiens
  misc_feature: Table A; Target 48619; HLA-A*68:02; MYH4; ENSG00000264424; TAA
EEAEEQSNVNL

SEQ ID NO: 48620 - protein, 11 aa, Homo sapiens
  misc_feature: Table A; Target 48620; HLA-B*27:05; MYH4; ENSG00000264424; TAA
EEAEEQSNVNL

SEQ ID NO: 48621 - protein, 11 aa, Homo sapiens
  misc_feature: Table A; Target 48621; HLA-B*38:01; MYH4; ENSG00000264424; TAA
EEAEEQSNVNL

SEQ ID NO: 48622 - protein, 11 aa, Homo sapiens
  misc_feature: Table A; Target 48622; HLA-B*39:01; MYH4; ENSG00000264424; TAA
EEAEEQSNVNL

SEQ ID NO: 48623 - protein, 11 aa, Homo sapiens
  misc_feature: Table A; Target 48623; HLA-B*40:01; MYH4; ENSG00000264424; TAA
EEAEEQSNVNL

SEQ ID NO: 48624 - protein, 11 aa, Homo sapiens
  misc_feature: Table A; Target 48624; HLA-B*44:02; MYH4; ENSG00000264424; TAA
EEAEEQSNVNL

SEQ ID NO: 48625 - protein, 11 aa, Homo sapiens
  misc_feature: Table A; Target 48625; HLA-B*44:03; MYH4; ENSG00000264424; TAA
EEAEEQSNVNL

SEQ ID NO: 48626 - protein, 9 aa, Homo sapiens
  misc_feature: Table A; Target 48626; HLA-B*39:01; MYH4; ENSG00000264424; TAA
EEAGGATSA

SEQ ID NO: 48627 - protein, 9 aa, Homo sapiens
  misc_feature: Table A; Target 48627; HLA-B*49:01; MYH4; ENSG00000264424; TAA
EEAGGATSA

SEQ ID NO: 48628 - protein, 11 aa, Homo sapiens
  misc_feature: Table A; Target 48628; HLA-B*44:02; MYH4; ENSG00000264424; TAA
EEAGGATSAQI

SEQ ID NO: 48629 - protein, 11 aa, Homo sapiens
  misc_feature: Table A; Target 48629; HLA-B*44:03; MYH4; ENSG00000264424; TAA
EEAGGATSAQI

SEQ ID NO: 48630 - protein, 9 aa, Homo sapiens
  misc_feature: Table A; Target 48630; HLA-B*44:02; MYH4; ENSG00000264424; TAA
EEAKERADI

SEQ ID NO: 48631 - protein, 9 aa, Homo sapiens
  misc_feature: Table A; Target 48631; HLA-B*44:03; MYH4; ENSG00000264424; TAA
EEAKERADI

SEQ ID NO: 48632 - protein, 8 aa, Homo sapiens
  misc_feature: Table A; Target 48632; HLA-A*30:01; MYH4; ENSG00000264424; TAA
EEDKVNTL

SEQ ID NO: 48633 - protein, 8 aa, Homo sapiens
  misc_feature: Table A; Target 48633; HLA-B*18:01; MYH4; ENSG00000264424; TAA
EEDKVNTL

SEQ ID NO: 48634 - protein, 8 aa, Homo sapiens
  misc_feature: Table A; Target 48634; HLA-B*37:01; MYH4; ENSG00000264424; TAA
EEDKVNTL

SEQ ID NO: 48635 - protein, 8 aa, Homo sapiens
  misc_feature: Table A; Target 48635; HLA-B*40:01; MYH4; ENSG00000264424; TAA
EEDKVNTL

SEQ ID NO: 48636 - protein, 8 aa, Homo sapiens
  misc_feature: Table A; Target 48636; HLA-B*44:02; MYH4; ENSG00000264424; TAA
EEDKVNTL

SEQ ID NO: 48637 - protein, 8 aa, Homo sapiens
  misc_feature: Table A; Target 48637; HLA-B*44:03; MYH4; ENSG00000264424; TAA
EEDKVNTL

SEQ ID NO: 48638 - protein, 8 aa, Homo sapiens
  misc_feature: Table A; Target 48638; HLA-B*49:01; MYH4; ENSG00000264424; TAA
EEDKVNTL

SEQ ID NO: 48639 - protein, 10 aa, Homo sapiens
  misc_feature: Table A; Target 48639; HLA-A*01:01; MYH4; ENSG00000264424; TAA
EEDKVNTLTK

SEQ ID NO: 48640 - protein, 10 aa, Homo sapiens
  misc_feature: Table A; Target 48640; HLA-B*44:03; MYH4; ENSG00000264424; TAA
EEDKVNTLTK

SEQ ID NO: 48641 - protein, 8 aa, Homo sapiens
  misc_feature: Table A; Target 48641; HLA-B*40:01; MYH4; ENSG00000264424; TAA
EEEINAEL

SEQ ID NO: 48642 - protein, 11 aa, Homo sapiens
  misc_feature: Table A; Target 48642; HLA-B*27:02; MYH4; ENSG00000264424; TAA
EEEINAELTAK

SEQ ID NO: 48643 - protein, 10 aa, Homo sapiens
  misc_feature: Table A; Target 48643; HLA-A*30:01; MYH4; ENSG00000264424; TAA
EEEQEAKAEL

SEQ ID NO: 48644 - protein, 10 aa, Homo sapiens
  misc_feature: Table A; Target 48644; HLA-B*40:01; MYH4; ENSG00000264424; TAA
EEEQEAKAEL

SEQ ID NO: 48645 - protein, 10 aa, Homo sapiens
  misc_feature: Table A; Target 48645; HLA-B*44:02; MYH4; ENSG00000264424; TAA
EEEQEAKAEL

SEQ ID NO: 48646 - protein, 10 aa, Homo sapiens
  misc_feature: Table A; Target 48646; HLA-B*44:03; MYH4; ENSG00000264424; TAA
EEEQEAKAEL

SEQ ID NO: 48647 - protein, 11 aa, Homo sapiens
  misc_feature: Table A; Target 48647; HLA-A*30:01; MYH4; ENSG00000264424; TAA
EEEQQRLINEL

SEQ ID NO: 48648 - protein, 11 aa, Homo sapiens
  misc_feature: Table A; Target 48648; HLA-B*40:01; MYH4; ENSG00000264424; TAA
EEEQQRLINEL

SEQ ID NO: 48649 - protein, 11 aa, Homo sapiens
  misc_feature: Table A; Target 48649; HLA-B*44:02; MYH4; ENSG00000264424; TAA
EEEQQRLINEL

SEQ ID NO: 48650 - protein, 10 aa, Homo sapiens
  misc_feature: Table A; Target 48650; HLA-B*40:01; MYH4; ENSG00000264424; TAA
EEETKAKSTL

SEQ ID NO: 48651 - protein, 10 aa, Homo sapiens
  misc_feature: Table A; Target 48651; HLA-B*40:02; MYH4; ENSG00000264424; TAA
EEETKAKSTL

SEQ ID NO: 48652 - protein, 10 aa, Homo sapiens
  misc_feature: Table A; Target 48652; HLA-B*44:03; MYH4; ENSG00000264424; TAA
EEETKAKSTL

SEQ ID NO: 48653 - protein, 10 aa, Homo sapiens
  misc_feature: Table A; Target 48653; HLA-A*30:01; MYH4; ENSG00000264424; TAA
EEFEKTKEEL

SEQ ID NO: 48654 - protein, 10 aa, Homo sapiens
  misc_feature: Table A; Target 48654; HLA-B*18:01; MYH4; ENSG00000264424; TAA
EEFEKTKEEL

SEQ ID NO: 48655 - protein, 10 aa, Homo sapiens
  misc_feature: Table A; Target 48655; HLA-B*40:01; MYH4; ENSG00000264424; TAA
EEFEKTKEEL

SEQ ID NO: 48656 - protein, 10 aa, Homo sapiens
  misc_feature: Table A; Target 48656; HLA-B*40:02; MYH4; ENSG00000264424; TAA
EEFEKTKEEL

SEQ ID NO: 48657 - protein, 10 aa, Homo sapiens
  misc_feature: Table A; Target 48657; HLA-B*44:02; MYH4; ENSG00000264424; TAA
EEFEKTKEEL

SEQ ID NO: 48658 - protein, 10 aa, Homo sapiens
  misc_feature: Table A; Target 48658; HLA-B*44:03; MYH4; ENSG00000264424; TAA
EEFEKTKEEL

SEQ ID NO: 48659 - protein, 8 aa, Homo sapiens
  misc_feature: Table A; Target 48659; HLA-B*44:02; MYH4; ENSG00000264424; TAA
EEGKILRI

SEQ ID NO: 48660 - protein, 8 aa, Homo sapiens
  misc_feature: Table A; Target 48660; HLA-B*44:03; MYH4; ENSG00000264424; TAA
EEGKILRI

SEQ ID NO: 48661 - protein, 10 aa, Homo sapiens
  misc_feature: Table A; Target 48661; HLA-B*44:02; MYH4; ENSG00000264424; TAA
EEGKILRIQL

SEQ ID NO: 48662 - protein, 10 aa, Homo sapiens
  misc_feature: Table A; Target 48662; HLA-B*44:03; MYH4; ENSG00000264424; TAA
EEGKILRIQL

SEQ ID NO: 48663 - protein, 8 aa, Homo sapiens
  misc_feature: Table A; Target 48663; HLA-B*18:01; MYH4; ENSG00000264424; TAA
EEIEAERA

SEQ ID NO: 48664 - protein, 10 aa, Homo sapiens
  misc_feature: Table A; Target 48664; HLA-A*33:03; MYH4; ENSG00000264424; TAA
EEIEAERASR

SEQ ID NO: 48665 - protein, 10 aa, Homo sapiens
  misc_feature: Table A; Target 48665; HLA-B*44:02; MYH4; ENSG00000264424; TAA
EEIEAERASR

SEQ ID NO: 48666 - protein, 10 aa, Homo sapiens
  misc_feature: Table A; Target 48666; HLA-B*44:03; MYH4; ENSG00000264424; TAA
EEIEAERASR

SEQ ID NO: 48667 - protein, 11 aa, Homo sapiens
  misc_feature: Table A; Target 48667; HLA-B*44:02; MYH4; ENSG00000264424; TAA
EEIEAERASRA

SEQ ID NO: 48668 - protein, 11 aa, Homo sapiens
  misc_feature: Table A; Target 48668; HLA-B*49:01; MYH4; ENSG00000264424; TAA
EEIEAERASRA

SEQ ID NO: 48669 - protein, 9 aa, Homo sapiens
  misc_feature: Table A; Target 48669; HLA-A*30:01; MYH4; ENSG00000264424; TAA
EEINAELTA

SEQ ID NO: 48670 - protein, 9 aa, Homo sapiens
  misc_feature: Table A; Target 48670; HLA-B*18:01; MYH4; ENSG00000264424; TAA
EEINAELTA

SEQ ID NO: 48671 - protein, 9 aa, Homo sapiens
  misc_feature: Table A; Target 48671; HLA-B*49:01; MYH4; ENSG00000264424; TAA
EEINAELTA

SEQ ID NO: 48672 - protein, 10 aa, Homo sapiens
  misc_feature: Table A; Target 48672; HLA-A*33:03; MYH4; ENSG00000264424; TAA
EEINAELTAK

SEQ ID NO: 48673 - protein, 10 aa, Homo sapiens
  misc_feature: Table A; Target 48673; HLA-B*27:02; MYH4; ENSG00000264424; TAA
EEINAELTAK

SEQ ID NO: 48674 - protein, 10 aa, Homo sapiens
  misc_feature: Table A; Target 48674; HLA-B*44:02; MYH4; ENSG00000264424; TAA
EEINAELTAK

SEQ ID NO: 48675 - protein, 10 aa, Homo sapiens
  misc_feature: Table A; Target 48675; HLA-B*44:03; MYH4; ENSG00000264424; TAA
EEINAELTAK

SEQ ID NO: 48676 - protein, 10 aa, Homo sapiens
  misc_feature: Table A; Target 48676; HLA-B*49:01; MYH4; ENSG00000264424; TAA
EEINAELTAK

SEQ ID NO: 48677 - protein, 10 aa, Homo sapiens
  misc_feature: Table A; Target 48677; HLA-C*07:06; MYH4; ENSG00000264424; TAA
EEINAELTAK

SEQ ID NO: 48678 - protein, 11 aa, Homo sapiens
  misc_feature: Table A; Target 48678; HLA-A*68:01; MYH4; ENSG00000264424; TAA
EEINAELTAKK

SEQ ID NO: 48679 - protein, 11 aa, Homo sapiens
  misc_feature: Table A; Target 48679; HLA-A*68:02; MYH4; ENSG00000264424; TAA
EEINAELTAKK

SEQ ID NO: 48680 - protein, 11 aa, Homo sapiens
  misc_feature: Table A; Target 48680; HLA-B*27:02; MYH4; ENSG00000264424; TAA
EEINAELTAKK

SEQ ID NO: 48681 - protein, 11 aa, Homo sapiens
  misc_feature: Table A; Target 48681; HLA-B*27:05; MYH4; ENSG00000264424; TAA
EEINAELTAKK

SEQ ID NO: 48682 - protein, 11 aa, Homo sapiens
  misc_feature: Table A; Target 48682; HLA-B*44:02; MYH4; ENSG00000264424; TAA
EEINAELTAKK

SEQ ID NO: 48683 - protein, 11 aa, Homo sapiens
  misc_feature: Table A; Target 48683; HLA-B*44:03; MYH4; ENSG00000264424; TAA
EEINAELTAKK

SEQ ID NO: 48684 - protein, 11 aa, Homo sapiens
  misc_feature: Table A; Target 48684; HLA-C*07:06; MYH4; ENSG00000264424; TAA
EEINAELTAKK

SEQ ID NO: 48685 - protein, 10 aa, Homo sapiens
  misc_feature: Table A; Target 48685; HLA-A*30:01; MYH4; ENSG00000264424; TAA
EEISERLEEA

SEQ ID NO: 48686 - protein, 10 aa, Homo sapiens
  misc_feature: Table A; Target 48686; HLA-B*40:02; MYH4; ENSG00000264424; TAA
EEISERLEEA

SEQ ID NO: 48687 - protein, 8 aa, Homo sapiens
  misc_feature: Table A; Target 48687; HLA-B*18:01; MYH4; ENSG00000264424; TAA
EEKMVTLM

SEQ ID NO: 48688 - protein, 8 aa, Homo sapiens
  misc_feature: Table A; Target 48688; HLA-B*37:01; MYH4; ENSG00000264424; TAA
EEKMVTLM

SEQ ID NO: 48689 - protein, 8 aa, Homo sapiens
  misc_feature: Table A; Target 48689; HLA-B*40:02; MYH4; ENSG00000264424; TAA
EEKMVTLM

SEQ ID NO: 48690 - protein, 9 aa, Homo sapiens
  misc_feature: Table A; Target 48690; HLA-A*33:03; MYH4; ENSG00000264424; TAA
EELAKTEAK

SEQ ID NO: 48691 - protein, 9 aa, Homo sapiens
  misc_feature: Table A; Target 48691; HLA-B*44:03; MYH4; ENSG00000264424; TAA
EELAKTEAK

SEQ ID NO: 48692 - protein, 9 aa, Homo sapiens
  misc_feature: Table A; Target 48692; HLA-B*44:03; MYH4; ENSG00000264424; TAA
EELEEAKKK

SEQ ID NO: 48693 - protein, 10 aa, Homo sapiens
  misc_feature: Table A; Target 48693; HLA-B*40:01; MYH4; ENSG00000264424; TAA
EELEEAKKKL

SEQ ID NO: 48694 - protein, 10 aa, Homo sapiens
  misc_feature: Table A; Target 48694; HLA-B*40:02; MYH4; ENSG00000264424; TAA
EELEEAKKKL

SEQ ID NO: 48695 - protein, 10 aa, Homo sapiens
  misc_feature: Table A; Target 48695; HLA-B*44:02; MYH4; ENSG00000264424; TAA
EELEEAKKKL

SEQ ID NO: 48696 - protein, 10 aa, Homo sapiens
  misc_feature: Table A; Target 48696; HLA-B*44:03; MYH4; ENSG00000264424; TAA
EELEEAKKKL

SEQ ID NO: 48697 - protein, 11 aa, Homo sapiens
  misc_feature: Table A; Target 48697; HLA-A*33:03; MYH4; ENSG00000264424; TAA
EELEEEIEAER

SEQ ID NO: 48698 - protein, 11 aa, Homo sapiens
  misc_feature: Table A; Target 48698; HLA-B*27:02; MYH4; ENSG00000264424; TAA
EELEEEIEAER

SEQ ID NO: 48699 - protein, 11 aa, Homo sapiens
  misc_feature: Table A; Target 48699; HLA-C*07:06; MYH4; ENSG00000264424; TAA
EELEEEIEAER

SEQ ID NO: 48700 - protein, 10 aa, Homo sapiens
  misc_feature: Table A; Target 48700; HLA-B*18:01; MYH4; ENSG00000264424; TAA
EEMAGLDETI

SEQ ID NO: 48701 - protein, 10 aa, Homo sapiens
  misc_feature: Table A; Target 48701; HLA-B*27:02; MYH4; ENSG00000264424; TAA
EEMAGLDETI

SEQ ID NO: 48702 - protein, 10 aa, Homo sapiens
  misc_feature: Table A; Target 48702; HLA-B*38:01; MYH4; ENSG00000264424; TAA
EEMAGLDETI

SEQ ID NO: 48703 - protein, 10 aa, Homo sapiens
  misc_feature: Table A; Target 48703; HLA-B*40:01; MYH4; ENSG00000264424; TAA
EEMAGLDETI

SEQ ID NO: 48704 - protein, 10 aa, Homo sapiens
  misc_feature: Table A; Target 48704; HLA-B*44:02; MYH4; ENSG00000264424; TAA
EEMAGLDETI

SEQ ID NO: 48705 - protein, 10 aa, Homo sapiens
  misc_feature: Table A; Target 48705; HLA-B*44:03; MYH4; ENSG00000264424; TAA
EEMAGLDETI

SEQ ID NO: 48706 - protein, 10 aa, Homo sapiens
  misc_feature: Table A; Target 48706; HLA-B*49:01; MYH4; ENSG00000264424; TAA
EEMAGLDETI

SEQ ID NO: 48707 - protein, 11 aa, Homo sapiens
  misc_feature: Table A; Target 48707; HLA-B*44:02; MYH4; ENSG00000264424; TAA
EEMRDEKLAQL

SEQ ID NO: 48708 - protein, 11 aa, Homo sapiens
  misc_feature: Table A; Target 48708; HLA-B*44:03; MYH4; ENSG00000264424; TAA
EEMRDEKLAQL

SEQ ID NO: 48709 - protein, 9 aa, Homo sapiens
  misc_feature: Table A; Target 48709; HLA-A*30:01; MYH4; ENSG00000264424; TAA
EEQEAKAEL

SEQ ID NO: 48710 - protein, 9 aa, Homo sapiens
  misc_feature: Table A; Target 48710; HLA-B*18:01; MYH4; ENSG00000264424; TAA
EEQEAKAEL

SEQ ID NO: 48711 - protein, 9 aa, Homo sapiens
  misc_feature: Table A; Target 48711; HLA-B*27:02; MYH4; ENSG00000264424; TAA
EEQEAKAEL

SEQ ID NO: 48712 - protein, 9 aa, Homo sapiens
  misc_feature: Table A; Target 48712; HLA-B*37:01; MYH4; ENSG00000264424; TAA
EEQEAKAEL

SEQ ID NO: 48713 - protein, 9 aa, Homo sapiens
  misc_feature: Table A; Target 48713; HLA-B*40:01; MYH4; ENSG00000264424; TAA
EEQEAKAEL

SEQ ID NO: 48714 - protein, 9 aa, Homo sapiens
  misc_feature: Table A; Target 48714; HLA-B*40:02; MYH4; ENSG00000264424; TAA
EEQEAKAEL

SEQ ID NO: 48715 - protein, 9 aa, Homo sapiens
  misc_feature: Table A; Target 48715; HLA-B*44:02; MYH4; ENSG00000264424; TAA
EEQEAKAEL

SEQ ID NO: 48716 - protein, 9 aa, Homo sapiens
  misc_feature: Table A; Target 48716; HLA-B*44:03; MYH4; ENSG00000264424; TAA
EEQEAKAEL

SEQ ID NO: 48717 - protein, 9 aa, Homo sapiens
  misc_feature: Table A; Target 48717; HLA-C*16:04; MYH4; ENSG00000264424; TAA
EEQEAKAEL

SEQ ID NO: 48718 - protein, 11 aa, Homo sapiens
  misc_feature: Table A; Target 48718; HLA-A*33:03; MYH4; ENSG00000264424; TAA
EEQEAKAELQR

SEQ ID NO: 48719 - protein, 10 aa, Homo sapiens
  misc_feature: Table A; Target 48719; HLA-A*30:01; MYH4; ENSG00000264424; TAA
EEQQRLINEL

SEQ ID NO: 48720 - protein, 10 aa, Homo sapiens
  misc_feature: Table A; Target 48720; HLA-B*40:02; MYH4; ENSG00000264424; TAA
EEQQRLINEL

SEQ ID NO: 48721 - protein, 10 aa, Homo sapiens
  misc_feature: Table A; Target 48721; HLA-B*44:02; MYH4; ENSG00000264424; TAA
EEQQRLINEL

SEQ ID NO: 48722 - protein, 10 aa, Homo sapiens
  misc_feature: Table A; Target 48722; HLA-B*44:03; MYH4; ENSG00000264424; TAA
EEQQRLINEL

SEQ ID NO: 48723 - protein, 10 aa, Homo sapiens
  misc_feature: Table A; Target 48723; HLA-A*33:03; MYH4; ENSG00000264424; TAA
EEQSNVNLAK

SEQ ID NO: 48724 - protein, 11 aa, Homo sapiens
  misc_feature: Table A; Target 48724; HLA-A*25:01; MYH4; ENSG00000264424; TAA
EEQSNVNLAKF

SEQ ID NO: 48725 - protein, 11 aa, Homo sapiens
  misc_feature: Table A; Target 48725; HLA-A*26:01; MYH4; ENSG00000264424; TAA
EEQSNVNLAKF

SEQ ID NO: 48726 - protein, 11 aa, Homo sapiens
  misc_feature: Table A; Target 48726; HLA-A*30:01; MYH4; ENSG00000264424; TAA
EEQSNVNLAKF

SEQ ID NO: 48727 - protein, 11 aa, Homo sapiens
  misc_feature: Table A; Target 48727; HLA-B*18:01; MYH4; ENSG00000264424; TAA
EEQSNVNLAKF

SEQ ID NO: 48728 - protein, 11 aa, Homo sapiens
  misc_feature: Table A; Target 48728; HLA-B*27:02; MYH4; ENSG00000264424; TAA
EEQSNVNLAKF

SEQ ID NO: 48729 - protein, 11 aa, Homo sapiens
  misc_feature: Table A; Target 48729; HLA-B*44:02; MYH4; ENSG00000264424; TAA
EEQSNVNLAKF

SEQ ID NO: 48730 - protein, 11 aa, Homo sapiens
  misc_feature: Table A; Target 48730; HLA-B*44:03; MYH4; ENSG00000264424; TAA
EEQSNVNLAKF

SEQ ID NO: 48731 - protein, 11 aa, Homo sapiens
  misc_feature: Table A; Target 48731; HLA-C*07:01; MYH4; ENSG00000264424; TAA
EEQSNVNLAKF

SEQ ID NO: 48732 - protein, 11 aa, Homo sapiens
  misc_feature: Table A; Target 48732; HLA-C*16:04; MYH4; ENSG00000264424; TAA
EEQSNVNLAKF

SEQ ID NO: 48733 - protein, 10 aa, Homo sapiens
  misc_feature: Table A; Target 48733; HLA-A*30:01; MYH4; ENSG00000264424; TAA
EESLDHLETL

SEQ ID NO: 48734 - protein, 10 aa, Homo sapiens
  misc_feature: Table A; Target 48734; HLA-B*38:01; MYH4; ENSG00000264424; TAA
EESLDHLETL

SEQ ID NO: 48735 - protein, 10 aa, Homo sapiens
  misc_feature: Table A; Target 48735; HLA-B*40:01; MYH4; ENSG00000264424; TAA
EESLDHLETL

SEQ ID NO: 48736 - protein, 10 aa, Homo sapiens
  misc_feature: Table A; Target 48736; HLA-B*40:02; MYH4; ENSG00000264424; TAA
EESLDHLETL

SEQ ID NO: 48737 - protein, 10 aa, Homo sapiens
  misc_feature: Table A; Target 48737; HLA-B*44:02; MYH4; ENSG00000264424; TAA
EESLDHLETL

SEQ ID NO: 48738 - protein, 10 aa, Homo sapiens
  misc_feature: Table A; Target 48738; HLA-B*44:03; MYH4; ENSG00000264424; TAA
EESLDHLETL

SEQ ID NO: 48739 - protein, 9 aa, Homo sapiens
  misc_feature: Table A; Target 48739; HLA-B*18:01; MYH4; ENSG00000264424; TAA
EESTLQHEA

SEQ ID NO: 48740 - protein, 9 aa, Homo sapiens
  misc_feature: Table A; Target 48740; HLA-B*44:02; MYH4; ENSG00000264424; TAA
EESTLQHEA

SEQ ID NO: 48741 - protein, 9 aa, Homo sapiens
  misc_feature: Table A; Target 48741; HLA-B*44:03; MYH4; ENSG00000264424; TAA
EESTLQHEA

SEQ ID NO: 48742 - protein, 9 aa, Homo sapiens
  misc_feature: Table A; Target 48742; HLA-A*30:01; MYH4; ENSG00000264424; TAA
EETKAKSTL

SEQ ID NO: 48743 - protein, 9 aa, Homo sapiens
  misc_feature: Table A; Target 48743; HLA-B*18:01; MYH4; ENSG00000264424; TAA
EETKAKSTL

SEQ ID NO: 48744 - protein, 9 aa, Homo sapiens
  misc_feature: Table A; Target 48744; HLA-B*37:01; MYH4; ENSG00000264424; TAA
EETKAKSTL

SEQ ID NO: 48745 - protein, 9 aa, Homo sapiens
  misc_feature: Table A; Target 48745; HLA-B*40:01; MYH4; ENSG00000264424; TAA
EETKAKSTL

SEQ ID NO: 48746 - protein, 9 aa, Homo sapiens
  misc_feature: Table A; Target 48746; HLA-B*40:02; MYH4; ENSG00000264424; TAA
EETKAKSTL

SEQ ID NO: 48747 - protein, 9 aa, Homo sapiens
  misc_feature: Table A; Target 48747; HLA-B*44:02; MYH4; ENSG00000264424; TAA
EETKAKSTL

SEQ ID NO: 48748 - protein, 9 aa, Homo sapiens
  misc_feature: Table A; Target 48748; HLA-B*44:03; MYH4; ENSG00000264424; TAA
EETKAKSTL

SEQ ID NO: 48749 - protein, 10 aa, Homo sapiens
  misc_feature: Table A; Target 48749; HLA-B*44:02; MYH4; ENSG00000264424; TAA
EEYKKEGIEW

SEQ ID NO: 48750 - protein, 10 aa, Homo sapiens
  misc_feature: Table A; Target 48750; HLA-B*44:03; MYH4; ENSG00000264424; TAA
EEYKKEGIEW

SEQ ID NO: 48751 - protein, 9 aa, Homo sapiens
  misc_feature: Table A; Target 48751; HLA-A*23:01; MYH4; ENSG00000264424; TAA
EFIDFGMDL

SEQ ID NO: 48752 - protein, 9 aa, Homo sapiens
  misc_feature: Table A; Target 48752; HLA-C*14:02; MYH4; ENSG00000264424; TAA
EFIDFGMDL

SEQ ID NO: 48753 - protein, 9 aa, Homo sapiens
  misc_feature: Table A; Target 48753; HLA-B*08:01; MYH4; ENSG00000264424; TAA
EGKILRIQL

SEQ ID NO: 48754 - protein, 10 aa, Homo sapiens
  misc_feature: Table A; Target 48754; HLA-B*38:01; MYH4; ENSG00000264424; TAA
EHEEGKILRI

SEQ ID NO: 48755 - protein, 9 aa, Homo sapiens
  misc_feature: Table A; Target 48755; HLA-B*27:05; MYH4; ENSG00000264424; TAA
EHELVLHQL

SEQ ID NO: 48756 - protein, 9 aa, Homo sapiens
  misc_feature: Table A; Target 48756; HLA-B*38:01; MYH4; ENSG00000264424; TAA
EHELVLHQL

SEQ ID NO: 48757 - protein, 9 aa, Homo sapiens
  misc_feature: Table A; Target 48757; HLA-B*39:01; MYH4; ENSG00000264424; TAA
EHELVLHQL

SEQ ID NO: 48758 - protein, 9 aa, Homo sapiens
  misc_feature: Table A; Target 48758; HLA-A*33:03; MYH4; ENSG00000264424; TAA
EHVEAVNSK

SEQ ID NO: 48759 - protein, 9 aa, Homo sapiens
  misc_feature: Table A; Target 48759; HLA-A*68:01; MYH4; ENSG00000264424; TAA
EHVEAVNSK

SEQ ID NO: 48760 - protein, 9 aa, Homo sapiens
  misc_feature: Table A; Target 48760; HLA-B*27:05; MYH4; ENSG00000264424; TAA
EHVEAVNSK

SEQ ID NO: 48761 - protein, 9 aa, Homo sapiens
  misc_feature: Table A; Target 48761; HLA-B*38:01; MYH4; ENSG00000264424; TAA
EHVEAVNSK

SEQ ID NO: 48762 - protein, 9 aa, Homo sapiens
  misc_feature: Table A; Target 48762; HLA-B*39:01; MYH4; ENSG00000264424; TAA
EHVEAVNSK

SEQ ID NO: 48763 - protein, 9 aa, Homo sapiens
  misc_feature: Table A; Target 48763; HLA-C*07:06; MYH4; ENSG00000264424; TAA
EHVEAVNSK

SEQ ID NO: 48764 - protein, 9 aa, Homo sapiens
  misc_feature: Table A; Target 48764; HLA-A*02:07; MYH4; ENSG00000264424; TAA
EIDHTQYKF

SEQ ID NO: 48765 - protein, 9 aa, Homo sapiens
  misc_feature: Table A; Target 48765; HLA-A*33:03; MYH4; ENSG00000264424; TAA
EIDRKIAEK

SEQ ID NO: 48766 - protein, 9 aa, Homo sapiens
  misc_feature: Table A; Target 48766; HLA-A*33:03; MYH4; ENSG00000264424; TAA
EIEAERASR

SEQ ID NO: 48767 - protein, 8 aa, Homo sapiens
  misc_feature: Table A; Target 48767; HLA-A*25:01; MYH4; ENSG00000264424; TAA
EIFDFNSL

SEQ ID NO: 48768 - protein, 8 aa, Homo sapiens
  misc_feature: Table A; Target 48768; HLA-A*26:01; MYH4; ENSG00000264424; TAA
EIFDFNSL

SEQ ID NO: 48769 - protein, 8 aa, Homo sapiens
  misc_feature: Table A; Target 48769; HLA-A*68:02; MYH4; ENSG00000264424; TAA
EIFDFNSL

SEQ ID NO: 48770 - protein, 10 aa, Homo sapiens
  misc_feature: Table A; Target 48770; HLA-A*26:01; MYH4; ENSG00000264424; TAA
EIFDFNSLEQ

SEQ ID NO: 48771 - protein, 11 aa, Homo sapiens
  misc_feature: Table A; Target 48771; HLA-A*02:07; MYH4; ENSG00000264424; TAA
EIFDFNSLEQL

SEQ ID NO: 48772 - protein, 11 aa, Homo sapiens
  misc_feature: Table A; Target 48772; HLA-A*25:01; MYH4; ENSG00000264424; TAA
EIFDFNSLEQL

SEQ ID NO: 48773 - protein, 11 aa, Homo sapiens
  misc_feature: Table A; Target 48773; HLA-A*26:01; MYH4; ENSG00000264424; TAA
EIFDFNSLEQL

SEQ ID NO: 48774 - protein, 11 aa, Homo sapiens
  misc_feature: Table A; Target 48774; HLA-A*68:02; MYH4; ENSG00000264424; TAA
EIFDFNSLEQL

SEQ ID NO: 48775 - protein, 11 aa, Homo sapiens
  misc_feature: Table A; Target 48775; HLA-A*33:01; MYH4; ENSG00000264424; TAA
EIKTKEEEQQR

SEQ ID NO: 48776 - protein, 11 aa, Homo sapiens
  misc_feature: Table A; Target 48776; HLA-A*33:03; MYH4; ENSG00000264424; TAA
EIKTKEEEQQR

SEQ ID NO: 48777 - protein, 9 aa, Homo sapiens
  misc_feature: Table A; Target 48777; HLA-A*03:01; MYH4; ENSG00000264424; TAA
EINAELTAK

SEQ ID NO: 48778 - protein, 9 aa, Homo sapiens
  misc_feature: Table A; Target 48778; HLA-A*03:02; MYH4; ENSG00000264424; TAA
EINAELTAK

SEQ ID NO: 48779 - protein, 9 aa, Homo sapiens
  misc_feature: Table A; Target 48779; HLA-A*11:01; MYH4; ENSG00000264424; TAA
EINAELTAK

SEQ ID NO: 48780 - protein, 9 aa, Homo sapiens
  misc_feature: Table A; Target 48780; HLA-A*25:01; MYH4; ENSG00000264424; TAA
EINAELTAK

SEQ ID NO: 48781 - protein, 9 aa, Homo sapiens
  misc_feature: Table A; Target 48781; HLA-A*26:01; MYH4; ENSG00000264424; TAA
EINAELTAK

SEQ ID NO: 48782 - protein, 9 aa, Homo sapiens
  misc_feature: Table A; Target 48782; HLA-A*33:01; MYH4; ENSG00000264424; TAA
EINAELTAK

SEQ ID NO: 48783 - protein, 9 aa, Homo sapiens
  misc_feature: Table A; Target 48783; HLA-A*33:03; MYH4; ENSG00000264424; TAA
EINAELTAK

SEQ ID NO: 48784 - protein, 9 aa, Homo sapiens
  misc_feature: Table A; Target 48784; HLA-A*68:01; MYH4; ENSG00000264424; TAA
EINAELTAK

SEQ ID NO: 48785 - protein, 9 aa, Homo sapiens
  misc_feature: Table A; Target 48785; HLA-C*07:06; MYH4; ENSG00000264424; TAA
EINAELTAK

SEQ ID NO: 48786 - protein, 10 aa, Homo sapiens
  misc_feature: Table A; Target 48786; HLA-A*03:02; MYH4; ENSG00000264424; TAA
EINAELTAKK

SEQ ID NO: 48787 - protein, 10 aa, Homo sapiens
  misc_feature: Table A; Target 48787; HLA-A*26:01; MYH4; ENSG00000264424; TAA
EINAELTAKK

SEQ ID NO: 48788 - protein, 10 aa, Homo sapiens
  misc_feature: Table A; Target 48788; HLA-A*33:03; MYH4; ENSG00000264424; TAA
EINAELTAKK

SEQ ID NO: 48789 - protein, 10 aa, Homo sapiens
  misc_feature: Table A; Target 48789; HLA-A*68:01; MYH4; ENSG00000264424; TAA
EINAELTAKK

SEQ ID NO: 48790 - protein, 10 aa, Homo sapiens
  misc_feature: Table A; Target 48790; HLA-C*07:06; MYH4; ENSG00000264424; TAA
EINAELTAKK

SEQ ID NO: 48791 - protein, 11 aa, Homo sapiens
  misc_feature: Table A; Target 48791; HLA-A*33:01; MYH4; ENSG00000264424; TAA
EINAELTAKKR

SEQ ID NO: 48792 - protein, 11 aa, Homo sapiens
  misc_feature: Table A; Target 48792; HLA-A*33:03; MYH4; ENSG00000264424; TAA
EINAELTAKKR

SEQ ID NO: 48793 - protein, 11 aa, Homo sapiens
  misc_feature: Table A; Target 48793; HLA-A*68:01; MYH4; ENSG00000264424; TAA
EINAELTAKKR

SEQ ID NO: 48794 - protein, 9 aa, Homo sapiens
  misc_feature: Table A; Target 48794; HLA-A*25:01; MYH4; ENSG00000264424; TAA
EINDLASNM

SEQ ID NO: 48795 - protein, 9 aa, Homo sapiens
  misc_feature: Table A; Target 48795; HLA-A*26:01; MYH4; ENSG00000264424; TAA
EINDLASNM

SEQ ID NO: 48796 - protein, 9 aa, Homo sapiens
  misc_feature: Table A; Target 48796; HLA-A*33:01; MYH4; ENSG00000264424; TAA
EINDLASNM

SEQ ID NO: 48797 - protein, 9 aa, Homo sapiens
  misc_feature: Table A; Target 48797; HLA-A*33:03; MYH4; ENSG00000264424; TAA
EINDLASNM

SEQ ID NO: 48798 - protein, 9 aa, Homo sapiens
  misc_feature: Table A; Target 48798; HLA-A*68:01; MYH4; ENSG00000264424; TAA
EINDLASNM

SEQ ID NO: 48799 - protein, 9 aa, Homo sapiens
  misc_feature: Table A; Target 48799; HLA-C*01:02; MYH4; ENSG00000264424; TAA
EINDLASNM

SEQ ID NO: 48800 - protein, 9 aa, Homo sapiens
  misc_feature: Table A; Target 48800; HLA-C*05:01; MYH4; ENSG00000264424; TAA
EINDLASNM

SEQ ID NO: 48801 - protein, 9 aa, Homo sapiens
  misc_feature: Table A; Target 48801; HLA-C*07:06; MYH4; ENSG00000264424; TAA
EINDLASNM

SEQ ID NO: 48802 - protein, 9 aa, Homo sapiens
  misc_feature: Table A; Target 48802; HLA-A*33:01; MYH4; ENSG00000264424; TAA
EIQLNHANR

SEQ ID NO: 48803 - protein, 9 aa, Homo sapiens
  misc_feature: Table A; Target 48803; HLA-A*33:03; MYH4; ENSG00000264424; TAA
EIQLNHANR

SEQ ID NO: 48804 - protein, 9 aa, Homo sapiens
  misc_feature: Table A; Target 48804; HLA-A*68:01; MYH4; ENSG00000264424; TAA
EIQLNHANR

SEQ ID NO: 48805 - protein, 9 aa, Homo sapiens
  misc_feature: Table A; Target 48805; HLA-C*07:06; MYH4; ENSG00000264424; TAA
EIQLNHANR

SEQ ID NO: 48806 - protein, 9 aa, Homo sapiens
  misc_feature: Table A; Target 48806; HLA-B*07:02; MYH4; ENSG00000264424; TAA
EIRSRNDAL

SEQ ID NO: 48807 - protein, 9 aa, Homo sapiens
  misc_feature: Table A; Target 48807; HLA-B*08:01; MYH4; ENSG00000264424; TAA
EIRSRNDAL

SEQ ID NO: 48808 - protein, 9 aa, Homo sapiens
  misc_feature: Table A; Target 48808; HLA-C*07:02; MYH4; ENSG00000264424; TAA
EIRSRNDAL

SEQ ID NO: 48809 - protein, 9 aa, Homo sapiens
  misc_feature: Table A; Target 48809; HLA-A*25:01; MYH4; ENSG00000264424; TAA
EISDLTEQI

SEQ ID NO: 48810 - protein, 9 aa, Homo sapiens
  misc_feature: Table A; Target 48810; HLA-A*26:01; MYH4; ENSG00000264424; TAA
EISDLTEQI

SEQ ID NO: 48811 - protein, 9 aa, Homo sapiens
  misc_feature: Table A; Target 48811; HLA-A*68:01; MYH4; ENSG00000264424; TAA
EISDLTEQI

SEQ ID NO: 48812 - protein, 9 aa, Homo sapiens
  misc_feature: Table A; Target 48812; HLA-A*68:02; MYH4; ENSG00000264424; TAA
EISDLTEQI

SEQ ID NO: 48813 - protein, 9 aa, Homo sapiens
  misc_feature: Table A; Target 48813; HLA-B*38:01; MYH4; ENSG00000264424; TAA
EISDLTEQI

SEQ ID NO: 48814 - protein, 9 aa, Homo sapiens
  misc_feature: Table A; Target 48814; HLA-B*38:01; MYH4; ENSG00000264424; TAA
EKDAMVSQL

SEQ ID NO: 48815 - protein, 9 aa, Homo sapiens
  misc_feature: Table A; Target 48815; HLA-C*04:01; MYH4; ENSG00000264424; TAA
EKDAMVSQL

SEQ ID NO: 48816 - protein, 9 aa, Homo sapiens
  misc_feature: Table A; Target 48816; HLA-A*33:01; MYH4; ENSG00000264424; TAA
EKLAQLITR

SEQ ID NO: 48817 - protein, 9 aa, Homo sapiens
  misc_feature: Table A; Target 48817; HLA-A*33:03; MYH4; ENSG00000264424; TAA
EKLAQLITR

SEQ ID NO: 48818 - protein, 9 aa, Homo sapiens
  misc_feature: Table A; Target 48818; HLA-B*15:03; MYH4; ENSG00000264424; TAA
EKSELQTSL

SEQ ID NO: 48819 - protein, 9 aa, Homo sapiens
  misc_feature: Table A; Target 48819; HLA-B*38:01; MYH4; ENSG00000264424; TAA
EKSELQTSL

SEQ ID NO: 48820 - protein, 9 aa, Homo sapiens
  misc_feature: Table A; Target 48820; HLA-B*39:01; MYH4; ENSG00000264424; TAA
EKSELQTSL

SEQ ID NO: 48821 - protein, 9 aa, Homo sapiens
  misc_feature: Table A; Target 48821; HLA-A*68:02; MYH4; ENSG00000264424; TAA
EKSRVTFQL

SEQ ID NO: 48822 - protein, 9 aa, Homo sapiens
  misc_feature: Table A; Target 48822; HLA-A*33:03; MYH4; ENSG00000264424; TAA
ELAKTEAKR

SEQ ID NO: 48823 - protein, 10 aa, Homo sapiens
  misc_feature: Table A; Target 48823; HLA-A*33:03; MYH4; ENSG00000264424; TAA
ELEASQKESR

SEQ ID NO: 48824 - protein, 10 aa, Homo sapiens
  misc_feature: Table A; Target 48824; HLA-A*33:03; MYH4; ENSG00000264424; TAA
ELEEEIEAER

SEQ ID NO: 48825 - protein, 10 aa, Homo sapiens
  misc_feature: Table A; Target 48825; HLA-B*27:02; MYH4; ENSG00000264424; TAA
ELEEEIEAER

SEQ ID NO: 48826 - protein, 9 aa, Homo sapiens
  misc_feature: Table A; Target 48826; HLA-A*01:01; MYH4; ENSG00000264424; TAA
ELEEISERL

SEQ ID NO: 48827 - protein, 9 aa, Homo sapiens
  misc_feature: Table A; Target 48827; HLA-A*02:07; MYH4; ENSG00000264424; TAA
ELEEISERL

SEQ ID NO: 48828 - protein, 9 aa, Homo sapiens
  misc_feature: Table A; Target 48828; HLA-A*68:02; MYH4; ENSG00000264424; TAA
ELEEISERL

SEQ ID NO: 48829 - protein, 9 aa, Homo sapiens
  misc_feature: Table A; Target 48829; HLA-A*02:07; MYH4; ENSG00000264424; TAA
ELEEKMVTL

SEQ ID NO: 48830 - protein, 9 aa, Homo sapiens
  misc_feature: Table A; Target 48830; HLA-A*25:01; MYH4; ENSG00000264424; TAA
ELEEKMVTL

SEQ ID NO: 48831 - protein, 9 aa, Homo sapiens
  misc_feature: Table A; Target 48831; HLA-B*08:01; MYH4; ENSG00000264424; TAA
ELEEKMVTL

SEQ ID NO: 48832 - protein, 9 aa, Homo sapiens
  misc_feature: Table A; Target 48832; HLA-C*05:01; MYH4; ENSG00000264424; TAA
ELEEKMVTL

SEQ ID NO: 48833 - protein, 10 aa, Homo sapiens
  misc_feature: Table A; Target 48833; HLA-A*01:01; MYH4; ENSG00000264424; TAA
ELEEKMVTLM

SEQ ID NO: 48834 - protein, 11 aa, Homo sapiens
  misc_feature: Table A; Target 48834; HLA-B*27:02; MYH4; ENSG00000264424; TAA
ELESEVESEQK

SEQ ID NO: 48835 - protein, 9 aa, Homo sapiens
  misc_feature: Table A; Target 48835; HLA-A*25:01; MYH4; ENSG00000264424; TAA
ELFKVKNAY

SEQ ID NO: 48836 - protein, 9 aa, Homo sapiens
  misc_feature: Table A; Target 48836; HLA-A*26:01; MYH4; ENSG00000264424; TAA
ELFKVKNAY

SEQ ID NO: 48837 - protein, 9 aa, Homo sapiens
  misc_feature: Table A; Target 48837; HLA-A*29:02; MYH4; ENSG00000264424; TAA
ELFKVKNAY

SEQ ID NO: 48838 - protein, 9 aa, Homo sapiens
  misc_feature: Table A; Target 48838; HLA-A*30:02; MYH4; ENSG00000264424; TAA
ELFKVKNAY

SEQ ID NO: 48839 - protein, 9 aa, Homo sapiens
  misc_feature: Table A; Target 48839; HLA-A*32:01; MYH4; ENSG00000264424; TAA
ELFKVKNAY

SEQ ID NO: 48840 - protein, 9 aa, Homo sapiens
  misc_feature: Table A; Target 48840; HLA-B*15:01; MYH4; ENSG00000264424; TAA
ELFKVKNAY

SEQ ID NO: 48841 - protein, 9 aa, Homo sapiens
  misc_feature: Table A; Target 48841; HLA-B*18:01; MYH4; ENSG00000264424; TAA
ELFKVKNAY

SEQ ID NO: 48842 - protein, 9 aa, Homo sapiens
  misc_feature: Table A; Target 48842; HLA-B*44:03; MYH4; ENSG00000264424; TAA
ELFKVKNAY

SEQ ID NO: 48843 - protein, 9 aa, Homo sapiens
  misc_feature: Table A; Target 48843; HLA-C*07:04; MYH4; ENSG00000264424; TAA
ELFKVKNAY

SEQ ID NO: 48844 - protein, 9 aa, Homo sapiens
  misc_feature: Table A; Target 48844; HLA-B*39:01; MYH4; ENSG00000264424; TAA
ELGEQIDSL

SEQ ID NO: 48845 - protein, 9 aa, Homo sapiens
  misc_feature: Table A; Target 48845; HLA-A*02:03; MYH4; ENSG00000264424; TAA
ELIEKPMGI

SEQ ID NO: 48846 - protein, 9 aa, Homo sapiens
  misc_feature: Table A; Target 48846; HLA-A*25:01; MYH4; ENSG00000264424; TAA
ELIEKPMGI

SEQ ID NO: 48847 - protein, 9 aa, Homo sapiens
  misc_feature: Table A; Target 48847; HLA-A*26:01; MYH4; ENSG00000264424; TAA
ELIEKPMGI

SEQ ID NO: 48848 - protein, 9 aa, Homo sapiens
  misc_feature: Table A; Target 48848; HLA-A*68:02; MYH4; ENSG00000264424; TAA
ELIEKPMGI

SEQ ID NO: 48849 - protein, 9 aa, Homo sapiens
  misc_feature: Table A; Target 48849; HLA-B*08:01; MYH4; ENSG00000264424; TAA
ELIEKPMGI

SEQ ID NO: 48850 - protein, 10 aa, Homo sapiens
  misc_feature: Table A; Target 48850; HLA-A*25:01; MYH4; ENSG00000264424; TAA
ELIEKPMGIF

SEQ ID NO: 48851 - protein, 10 aa, Homo sapiens
  misc_feature: Table A; Target 48851; HLA-A*26:01; MYH4; ENSG00000264424; TAA
ELIEKPMGIF

SEQ ID NO: 48852 - protein, 8 aa, Homo sapiens
  misc_feature: Table A; Target 48852; HLA-A*33:03; MYH4; ENSG00000264424; TAA
ELLDASER

SEQ ID NO: 48853 - protein, 11 aa, Homo sapiens
  misc_feature: Table A; Target 48853; HLA-A*02:01; MYH4; ENSG00000264424; TAA
ELLDASERVQL

SEQ ID NO: 48854 - protein, 11 aa, Homo sapiens
  misc_feature: Table A; Target 48854; HLA-A*02:04; MYH4; ENSG00000264424; TAA
ELLDASERVQL

SEQ ID NO: 48855 - protein, 9 aa, Homo sapiens
  misc_feature: Table A; Target 48855; HLA-A*25:01; MYH4; ENSG00000264424; TAA
ELNQVKSEI

SEQ ID NO: 48856 - protein, 9 aa, Homo sapiens
  misc_feature: Table A; Target 48856; HLA-A*26:01; MYH4; ENSG00000264424; TAA
ELNQVKSEI

SEQ ID NO: 48857 - protein, 9 aa, Homo sapiens
  misc_feature: Table A; Target 48857; HLA-B*08:01; MYH4; ENSG00000264424; TAA
ELNQVKSEI

SEQ ID NO: 48858 - protein, 9 aa, Homo sapiens
  misc_feature: Table A; Target 48858; HLA-B*13:02; MYH4; ENSG00000264424; TAA
ELNQVKSEI

SEQ ID NO: 48859 - protein, 9 aa, Homo sapiens
  misc_feature: Table A; Target 48859; HLA-A*02:03; MYH4; ENSG00000264424; TAA
ELQARIEEL

SEQ ID NO: 48860 - protein, 9 aa, Homo sapiens
  misc_feature: Table A; Target 48860; HLA-A*02:04; MYH4; ENSG00000264424; TAA
ELQARIEEL

SEQ ID NO: 48861 - protein, 9 aa, Homo sapiens
  misc_feature: Table A; Target 48861; HLA-A*25:01; MYH4; ENSG00000264424; TAA
ELQARIEEL

SEQ ID NO: 48862 - protein, 9 aa, Homo sapiens
  misc_feature: Table A; Target 48862; HLA-A*26:01; MYH4; ENSG00000264424; TAA
ELQARIEEL

SEQ ID NO: 48863 - protein, 9 aa, Homo sapiens
  misc_feature: Table A; Target 48863; HLA-B*08:01; MYH4; ENSG00000264424; TAA
ELQARIEEL

SEQ ID NO: 48864 - protein, 9 aa, Homo sapiens
  misc_feature: Table A; Target 48864; HLA-B*08:01; MYH4; ENSG00000264424; TAA
ELSAQKARL

SEQ ID NO: 48865 - protein, 9 aa, Homo sapiens
  misc_feature: Table A; Target 48865; HLA-A*33:01; MYH4; ENSG00000264424; TAA
ELTLAKVEK

SEQ ID NO: 48866 - protein, 9 aa, Homo sapiens
  misc_feature: Table A; Target 48866; HLA-A*33:03; MYH4; ENSG00000264424; TAA
ELTLAKVEK

SEQ ID NO: 48867 - protein, 9 aa, Homo sapiens
  misc_feature: Table A; Target 48867; HLA-B*38:01; MYH4; ENSG00000264424; TAA
EMAGLDETI

SEQ ID NO: 48868 - protein, 11 aa, Homo sapiens
  misc_feature: Table A; Target 48868; HLA-A*03:02; MYH4; ENSG00000264424; TAA
EMAGLDETIAK

SEQ ID NO: 48869 - protein, 11 aa, Homo sapiens
  misc_feature: Table A; Target 48869; HLA-A*33:03; MYH4; ENSG00000264424; TAA
EMAGLDETIAK

SEQ ID NO: 48870 - protein, 11 aa, Homo sapiens
  misc_feature: Table A; Target 48870; HLA-A*68:01; MYH4; ENSG00000264424; TAA
EMAGLDETIAK

SEQ ID NO: 48871 - protein, 11 aa, Homo sapiens
  misc_feature: Table A; Target 48871; HLA-B*27:02; MYH4; ENSG00000264424; TAA
EMAGLDETIAK

SEQ ID NO: 48872 - protein, 9 aa, Homo sapiens
  misc_feature: Table A; Target 48872; HLA-A*24:02; MYH4; ENSG00000264424; TAA
EMANMKEEF

SEQ ID NO: 48873 - protein, 9 aa, Homo sapiens
  misc_feature: Table A; Target 48873; HLA-A*25:01; MYH4; ENSG00000264424; TAA
EMANMKEEF

SEQ ID NO: 48874 - protein, 9 aa, Homo sapiens
  misc_feature: Table A; Target 48874; HLA-A*26:01; MYH4; ENSG00000264424; TAA
EMANMKEEF

SEQ ID NO: 48875 - protein, 9 aa, Homo sapiens
  misc_feature: Table A; Target 48875; HLA-C*07:04; MYH4; ENSG00000264424; TAA
EMANMKEEF

SEQ ID NO: 48876 - protein, 10 aa, Homo sapiens
  misc_feature: Table A; Target 48876; HLA-A*33:01; MYH4; ENSG00000264424; TAA
EMEDIVQEAR

SEQ ID NO: 48877 - protein, 10 aa, Homo sapiens
  misc_feature: Table A; Target 48877; HLA-A*33:03; MYH4; ENSG00000264424; TAA
EMEDIVQEAR

SEQ ID NO: 48878 - protein, 10 aa, Homo sapiens
  misc_feature: Table A; Target 48878; HLA-A*68:01; MYH4; ENSG00000264424; TAA
EMEDIVQEAR

SEQ ID NO: 48879 - protein, 10 aa, Homo sapiens
  misc_feature: Table A; Target 48879; HLA-C*07:06; MYH4; ENSG00000264424; TAA
EMEDIVQEAR

SEQ ID NO: 48880 - protein, 11 aa, Homo sapiens
  misc_feature: Table A; Target 48880; HLA-A*33:03; MYH4; ENSG00000264424; TAA
EMEIQLNHANR

SEQ ID NO: 48881 - protein, 10 aa, Homo sapiens
  misc_feature: Table A; Target 48881; HLA-A*01:01; MYH4; ENSG00000264424; TAA
EMLLITTNPY

SEQ ID NO: 48882 - protein, 10 aa, Homo sapiens
  misc_feature: Table A; Target 48882; HLA-A*33:01; MYH4; ENSG00000264424; TAA
ENLNKLMTNL

SEQ ID NO: 48883 - protein, 10 aa, Homo sapiens
  misc_feature: Table A; Target 48883; HLA-A*33:03; MYH4; ENSG00000264424; TAA
ENLNKLMTNL

SEQ ID NO: 48884 - protein, 9 aa, Homo sapiens
  misc_feature: Table A; Target 48884; HLA-A*33:03; MYH4; ENSG00000264424; TAA
ENQSILITG

SEQ ID NO: 48885 - protein, 11 aa, Homo sapiens
  misc_feature: Table A; Target 48885; HLA-B*07:02; MYH4; ENSG00000264424; TAA
EPASGKMQGTL

SEQ ID NO: 48886 - protein, 8 aa, Homo sapiens
  misc_feature: Table A; Target 48886; HLA-B*08:01; MYH4; ENSG00000264424; TAA
EPAVLYNL

SEQ ID NO: 48887 - protein, 9 aa, Homo sapiens
  misc_feature: Table A; Target 48887; HLA-A*33:03; MYH4; ENSG00000264424; TAA
EPAVLYNLK

SEQ ID NO: 48888 - protein, 9 aa, Homo sapiens
  misc_feature: Table A; Target 48888; HLA-A*68:01; MYH4; ENSG00000264424; TAA
EPAVLYNLK

SEQ ID NO: 48889 - protein, 9 aa, Homo sapiens
  misc_feature: Table A; Target 48889; HLA-C*07:06; MYH4; ENSG00000264424; TAA
EPAVLYNLK

SEQ ID NO: 48890 - protein, 10 aa, Homo sapiens
  misc_feature: Table A; Target 48890; HLA-B*27:02; MYH4; ENSG00000264424; TAA
EPDGTEVADK

SEQ ID NO: 48891 - protein, 10 aa, Homo sapiens
  misc_feature: Table A; Target 48891; HLA-A*26:01; MYH4; ENSG00000264424; TAA
EQAEPDGTEV

SEQ ID NO: 48892 - protein, 10 aa, Homo sapiens
  misc_feature: Table A; Target 48892; HLA-B*39:01; MYH4; ENSG00000264424; TAA
EQAEPDGTEV

SEQ ID NO: 48893 - protein, 11 aa, Homo sapiens
  misc_feature: Table A; Target 48893; HLA-B*39:01; MYH4; ENSG00000264424; TAA
EQAEPDGTEVA

SEQ ID NO: 48894 - protein, 8 aa, Homo sapiens
  misc_feature: Table A; Target 48894; HLA-B*27:05; MYH4; ENSG00000264424; TAA
EQALAIQL

SEQ ID NO: 48895 - protein, 8 aa, Homo sapiens
  misc_feature: Table A; Target 48895; HLA-B*39:01; MYH4; ENSG00000264424; TAA
EQALAIQL

SEQ ID NO: 48896 - protein, 10 aa, Homo sapiens
  misc_feature: Table A; Target 48896; HLA-A*68:01; MYH4; ENSG00000264424; TAA
EQALAIQLQK

SEQ ID NO: 48897 - protein, 10 aa, Homo sapiens
  misc_feature: Table A; Target 48897; HLA-B*27:02; MYH4; ENSG00000264424; TAA
EQALAIQLQK

SEQ ID NO: 48898 - protein, 10 aa, Homo sapiens
  misc_feature: Table A; Target 48898; HLA-C*07:06; MYH4; ENSG00000264424; TAA
EQALAIQLQK

SEQ ID NO: 48899 - protein, 8 aa, Homo sapiens
  misc_feature: Table A; Target 48899; HLA-B*38:01; MYH4; ENSG00000264424; TAA
EQDTSAHL

SEQ ID NO: 48900 - protein, 8 aa, Homo sapiens
  misc_feature: Table A; Target 48900; HLA-B*39:01; MYH4; ENSG00000264424; TAA
EQDTSAHL

SEQ ID NO: 48901 - protein, 8 aa, Homo sapiens
  misc_feature: Table A; Target 48901; HLA-C*05:01; MYH4; ENSG00000264424; TAA
EQDTSAHL

SEQ ID NO: 48902 - protein, 10 aa, Homo sapiens
  misc_feature: Table A; Target 48902; HLA-A*33:03; MYH4; ENSG00000264424; TAA
EQDTSAHLER

SEQ ID NO: 48903 - protein, 10 aa, Homo sapiens
  misc_feature: Table A; Target 48903; HLA-A*68:01; MYH4; ENSG00000264424; TAA
EQDTSAHLER

SEQ ID NO: 48904 - protein, 10 aa, Homo sapiens
  misc_feature: Table A; Target 48904; HLA-C*07:06; MYH4; ENSG00000264424; TAA
EQDTSAHLER

SEQ ID NO: 48905 - protein, 11 aa, Homo sapiens
  misc_feature: Table A; Target 48905; HLA-B*38:01; MYH4; ENSG00000264424; TAA
EQDTSAHLERM

SEQ ID NO: 48906 - protein, 8 aa, Homo sapiens
  misc_feature: Table A; Target 48906; HLA-B*08:01; MYH4; ENSG00000264424; TAA
EQEAKAEL

SEQ ID NO: 48907 - protein, 10 aa, Homo sapiens
  misc_feature: Table A; Target 48907; HLA-B*38:01; MYH4; ENSG00000264424; TAA
EQHLGKSNNF

SEQ ID NO: 48908 - protein, 10 aa, Homo sapiens
  misc_feature: Table A; Target 48908; HLA-B*38:01; MYH4; ENSG00000264424; TAA
EQIAEGGKHI

SEQ ID NO: 48909 - protein, 9 aa, Homo sapiens
  misc_feature: Table A; Target 48909; HLA-A*02:01; MYH4; ENSG00000264424; TAA
EQIDSLQRV

SEQ ID NO: 48910 - protein, 9 aa, Homo sapiens
  misc_feature: Table A; Target 48910; HLA-A*02:03; MYH4; ENSG00000264424; TAA
EQIDSLQRV

SEQ ID NO: 48911 - protein, 9 aa, Homo sapiens
  misc_feature: Table A; Target 48911; HLA-A*02:04; MYH4; ENSG00000264424; TAA
EQIDSLQRV

SEQ ID NO: 48912 - protein, 9 aa, Homo sapiens
  misc_feature: Table A; Target 48912; HLA-A*02:07; MYH4; ENSG00000264424; TAA
EQIDSLQRV

SEQ ID NO: 48913 - protein, 9 aa, Homo sapiens
  misc_feature: Table A; Target 48913; HLA-A*25:01; MYH4; ENSG00000264424; TAA
EQIDSLQRV

SEQ ID NO: 48914 - protein, 9 aa, Homo sapiens
  misc_feature: Table A; Target 48914; HLA-A*26:01; MYH4; ENSG00000264424; TAA
EQIDSLQRV

SEQ ID NO: 48915 - protein, 9 aa, Homo sapiens
  misc_feature: Table A; Target 48915; HLA-A*68:02; MYH4; ENSG00000264424; TAA
EQIDSLQRV

SEQ ID NO: 48916 - protein, 9 aa, Homo sapiens
  misc_feature: Table A; Target 48916; HLA-B*13:02; MYH4; ENSG00000264424; TAA
EQIDSLQRV

SEQ ID NO: 48917 - protein, 9 aa, Homo sapiens
  misc_feature: Table A; Target 48917; HLA-B*27:05; MYH4; ENSG00000264424; TAA
EQIDSLQRV

SEQ ID NO: 48918 - protein, 9 aa, Homo sapiens
  misc_feature: Table A; Target 48918; HLA-B*38:01; MYH4; ENSG00000264424; TAA
EQIDSLQRV

SEQ ID NO: 48919 - protein, 9 aa, Homo sapiens
  misc_feature: Table A; Target 48919; HLA-B*39:01; MYH4; ENSG00000264424; TAA
EQIDSLQRV

SEQ ID NO: 48920 - protein, 9 aa, Homo sapiens
  misc_feature: Table A; Target 48920; HLA-C*06:02; MYH4; ENSG00000264424; TAA
EQIDSLQRV

SEQ ID NO: 48921 - protein, 10 aa, Homo sapiens
  misc_feature: Table A; Target 48921; HLA-A*26:01; MYH4; ENSG00000264424; TAA
EQIDSLQRVK

SEQ ID NO: 48922 - protein, 10 aa, Homo sapiens
  misc_feature: Table A; Target 48922; HLA-A*68:01; MYH4; ENSG00000264424; TAA
EQIDSLQRVK

SEQ ID NO: 48923 - protein, 10 aa, Homo sapiens
  misc_feature: Table A; Target 48923; HLA-B*27:02; MYH4; ENSG00000264424; TAA
EQIDSLQRVK

SEQ ID NO: 48924 - protein, 9 aa, Homo sapiens
  misc_feature: Table A; Target 48924; HLA-A*02:03; MYH4; ENSG00000264424; TAA
EQKHNVEAV

SEQ ID NO: 48925 - protein, 9 aa, Homo sapiens
  misc_feature: Table A; Target 48925; HLA-A*26:01; MYH4; ENSG00000264424; TAA
EQKHNVEAV

SEQ ID NO: 48926 - protein, 8 aa, Homo sapiens
  misc_feature: Table A; Target 48926; HLA-A*33:03; MYH4; ENSG00000264424; TAA
EQLAMVER

SEQ ID NO: 48927 - protein, 9 aa, Homo sapiens
  misc_feature: Table A; Target 48927; HLA-A*33:03; MYH4; ENSG00000264424; TAA
EQLAMVERR

SEQ ID NO: 48928 - protein, 9 aa, Homo sapiens
  misc_feature: Table A; Target 48928; HLA-A*02:04; MYH4; ENSG00000264424; TAA
EQQRLINEL

SEQ ID NO: 48929 - protein, 9 aa, Homo sapiens
  misc_feature: Table A; Target 48929; HLA-A*25:01; MYH4; ENSG00000264424; TAA
EQQRLINEL

SEQ ID NO: 48930 - protein, 9 aa, Homo sapiens
  misc_feature: Table A; Target 48930; HLA-A*26:01; MYH4; ENSG00000264424; TAA
EQQRLINEL

SEQ ID NO: 48931 - protein, 9 aa, Homo sapiens
  misc_feature: Table A; Target 48931; HLA-B*13:02; MYH4; ENSG00000264424; TAA
EQQRLINEL

SEQ ID NO: 48932 - protein, 9 aa, Homo sapiens
  misc_feature: Table A; Target 48932; HLA-B*38:01; MYH4; ENSG00000264424; TAA
EQQRLINEL

SEQ ID NO: 48933 - protein, 9 aa, Homo sapiens
  misc_feature: Table A; Target 48933; HLA-B*39:01; MYH4; ENSG00000264424; TAA
EQQRLINEL

SEQ ID NO: 48934 - protein, 9 aa, Homo sapiens
  misc_feature: Table A; Target 48934; HLA-B*44:02; MYH4; ENSG00000264424; TAA
EQQRLINEL

SEQ ID NO: 48935 - protein, 9 aa, Homo sapiens
  misc_feature: Table A; Target 48935; HLA-A*11:01; MYH4; ENSG00000264424; TAA
EQSNVNLAK

SEQ ID NO: 48936 - protein, 9 aa, Homo sapiens
  misc_feature: Table A; Target 48936; HLA-A*33:03; MYH4; ENSG00000264424; TAA
EQSNVNLAK

SEQ ID NO: 48937 - protein, 9 aa, Homo sapiens
  misc_feature: Table A; Target 48937; HLA-A*68:01; MYH4; ENSG00000264424; TAA
EQSNVNLAK

SEQ ID NO: 48938 - protein, 9 aa, Homo sapiens
  misc_feature: Table A; Target 48938; HLA-B*27:05; MYH4; ENSG00000264424; TAA
EQSNVNLAK

SEQ ID NO: 48939 - protein, 9 aa, Homo sapiens
  misc_feature: Table A; Target 48939; HLA-B*39:01; MYH4; ENSG00000264424; TAA
EQSNVNLAK

SEQ ID NO: 48940 - protein, 9 aa, Homo sapiens
  misc_feature: Table A; Target 48940; HLA-C*07:06; MYH4; ENSG00000264424; TAA
EQSNVNLAK

SEQ ID NO: 48941 - protein, 10 aa, Homo sapiens
  misc_feature: Table A; Target 48941; HLA-A*23:01; MYH4; ENSG00000264424; TAA
EQSNVNLAKF

SEQ ID NO: 48942 - protein, 10 aa, Homo sapiens
  misc_feature: Table A; Target 48942; HLA-A*24:02; MYH4; ENSG00000264424; TAA
EQSNVNLAKF

SEQ ID NO: 48943 - protein, 10 aa, Homo sapiens
  misc_feature: Table A; Target 48943; HLA-A*25:01; MYH4; ENSG00000264424; TAA
EQSNVNLAKF

SEQ ID NO: 48944 - protein, 10 aa, Homo sapiens
  misc_feature: Table A; Target 48944; HLA-A*26:01; MYH4; ENSG00000264424; TAA
EQSNVNLAKF

SEQ ID NO: 48945 - protein, 10 aa, Homo sapiens
  misc_feature: Table A; Target 48945; HLA-A*33:03; MYH4; ENSG00000264424; TAA
EQSNVNLAKF

SEQ ID NO: 48946 - protein, 10 aa, Homo sapiens
  misc_feature: Table A; Target 48946; HLA-A*68:01; MYH4; ENSG00000264424; TAA
EQSNVNLAKF

SEQ ID NO: 48947 - protein, 10 aa, Homo sapiens
  misc_feature: Table A; Target 48947; HLA-A*68:02; MYH4; ENSG00000264424; TAA
EQSNVNLAKF

SEQ ID NO: 48948 - protein, 10 aa, Homo sapiens
  misc_feature: Table A; Target 48948; HLA-B*27:05; MYH4; ENSG00000264424; TAA
EQSNVNLAKF

SEQ ID NO: 48949 - protein, 10 aa, Homo sapiens
  misc_feature: Table A; Target 48949; HLA-B*38:01; MYH4; ENSG00000264424; TAA
EQSNVNLAKF

SEQ ID NO: 48950 - protein, 10 aa, Homo sapiens
  misc_feature: Table A; Target 48950; HLA-B*39:01; MYH4; ENSG00000264424; TAA
EQSNVNLAKF

SEQ ID NO: 48951 - protein, 10 aa, Homo sapiens
  misc_feature: Table A; Target 48951; HLA-B*44:02; MYH4; ENSG00000264424; TAA
EQSNVNLAKF

SEQ ID NO: 48952 - protein, 10 aa, Homo sapiens
  misc_feature: Table A; Target 48952; HLA-B*44:03; MYH4; ENSG00000264424; TAA
EQSNVNLAKF

SEQ ID NO: 48953 - protein, 10 aa, Homo sapiens
  misc_feature: Table A; Target 48953; HLA-C*07:04; MYH4; ENSG00000264424; TAA
EQSNVNLAKF

SEQ ID NO: 48954 - protein, 10 aa, Homo sapiens
  misc_feature: Table A; Target 48954; HLA-C*16:04; MYH4; ENSG00000264424; TAA
EQSNVNLAKF

SEQ ID NO: 48955 - protein, 11 aa, Homo sapiens
  misc_feature: Table A; Target 48955; HLA-A*33:03; MYH4; ENSG00000264424; TAA
EQSNVNLAKFR

SEQ ID NO: 48956 - protein, 9 aa, Homo sapiens
  misc_feature: Table A; Target 48956; HLA-B*08:01; MYH4; ENSG00000264424; TAA
EQTVKDLQL

SEQ ID NO: 48957 - protein, 9 aa, Homo sapiens
  misc_feature: Table A; Target 48957; HLA-B*38:01; MYH4; ENSG00000264424; TAA
EQTVKDLQL

SEQ ID NO: 48958 - protein, 9 aa, Homo sapiens
  misc_feature: Table A; Target 48958; HLA-B*39:01; MYH4; ENSG00000264424; TAA
EQTVKDLQL

SEQ ID NO: 48959 - protein, 10 aa, Homo sapiens
  misc_feature: Table A; Target 48959; HLA-B*27:02; MYH4; ENSG00000264424; TAA
EQYEEEQEAK

SEQ ID NO: 48960 - protein, 10 aa, Homo sapiens
  misc_feature: Table A; Target 48960; HLA-B*27:05; MYH4; ENSG00000264424; TAA
EQYEEEQEAK

SEQ ID NO: 48961 - protein, 10 aa, Homo sapiens
  misc_feature: Table A; Target 48961; HLA-B*27:02; MYH4; ENSG00000264424; TAA
ERIEAQNKPF

SEQ ID NO: 48962 - protein, 10 aa, Homo sapiens
  misc_feature: Table A; Target 48962; HLA-C*16:04; MYH4; ENSG00000264424; TAA
ERIEAQNKPF

SEQ ID NO: 48963 - protein, 8 aa, Homo sapiens
  misc_feature: Table A; Target 48963; HLA-C*07:01; MYH4; ENSG00000264424; TAA
ERSYHIFY

SEQ ID NO: 48964 - protein, 9 aa, Homo sapiens
  misc_feature: Table A; Target 48964; HLA-A*01:01; MYH4; ENSG00000264424; TAA
ESEVESEQK

SEQ ID NO: 48965 - protein, 11 aa, Homo sapiens
  misc_feature: Table A; Target 48965; HLA-A*68:01; MYH4; ENSG00000264424; TAA
ESGAGKTVNTK

SEQ ID NO: 48966 - protein, 8 aa, Homo sapiens
  misc_feature: Table A; Target 48966; HLA-C*07:01; MYH4; ENSG00000264424; TAA
ESIFCIQY

SEQ ID NO: 48967 - protein, 9 aa, Homo sapiens
  misc_feature: Table A; Target 48967; HLA-A*02:04; MYH4; ENSG00000264424; TAA
ESLDHLETL

SEQ ID NO: 48968 - protein, 9 aa, Homo sapiens
  misc_feature: Table A; Target 48968; HLA-A*23:01; MYH4; ENSG00000264424; TAA
ESLDHLETL

SEQ ID NO: 48969 - protein, 9 aa, Homo sapiens
  misc_feature: Table A; Target 48969; HLA-A*24:02; MYH4; ENSG00000264424; TAA
ESLDHLETL

SEQ ID NO: 48970 - protein, 9 aa, Homo sapiens
  misc_feature: Table A; Target 48970; HLA-A*25:01; MYH4; ENSG00000264424; TAA
ESLDHLETL

SEQ ID NO: 48971 - protein, 9 aa, Homo sapiens
  misc_feature: Table A; Target 48971; HLA-A*26:01; MYH4; ENSG00000264424; TAA
ESLDHLETL

SEQ ID NO: 48972 - protein, 9 aa, Homo sapiens
  misc_feature: Table A; Target 48972; HLA-A*33:01; MYH4; ENSG00000264424; TAA
ESLDHLETL

SEQ ID NO: 48973 - protein, 9 aa, Homo sapiens
  misc_feature: Table A; Target 48973; HLA-A*33:03; MYH4; ENSG00000264424; TAA
ESLDHLETL

SEQ ID NO: 48974 - protein, 9 aa, Homo sapiens
  misc_feature: Table A; Target 48974; HLA-A*68:01; MYH4; ENSG00000264424; TAA
ESLDHLETL

SEQ ID NO: 48975 - protein, 9 aa, Homo sapiens
  misc_feature: Table A; Target 48975; HLA-A*68:02; MYH4; ENSG00000264424; TAA
ESLDHLETL

SEQ ID NO: 48976 - protein, 9 aa, Homo sapiens
  misc_feature: Table A; Target 48976; HLA-B*18:01; MYH4; ENSG00000264424; TAA
ESLDHLETL

SEQ ID NO: 48977 - protein, 9 aa, Homo sapiens
  misc_feature: Table A; Target 48977; HLA-B*35:03; MYH4; ENSG00000264424; TAA
ESLDHLETL

SEQ ID NO: 48978 - protein, 9 aa, Homo sapiens
  misc_feature: Table A; Target 48978; HLA-B*38:01; MYH4; ENSG00000264424; TAA
ESLDHLETL

SEQ ID NO: 48979 - protein, 9 aa, Homo sapiens
  misc_feature: Table A; Target 48979; HLA-B*40:02; MYH4; ENSG00000264424; TAA
ESLDHLETL

SEQ ID NO: 48980 - protein, 9 aa, Homo sapiens
  misc_feature: Table A; Target 48980; HLA-B*57:01; MYH4; ENSG00000264424; TAA
ESLDHLETL

SEQ ID NO: 48981 - protein, 9 aa, Homo sapiens
  misc_feature: Table A; Target 48981; HLA-B*58:01; MYH4; ENSG00000264424; TAA
ESLDHLETL

SEQ ID NO: 48982 - protein, 9 aa, Homo sapiens
  misc_feature: Table A; Target 48982; HLA-C*03:04; MYH4; ENSG00000264424; TAA
ESLDHLETL

SEQ ID NO: 48983 - protein, 9 aa, Homo sapiens
  misc_feature: Table A; Target 48983; HLA-C*05:01; MYH4; ENSG00000264424; TAA
ESLDHLETL

SEQ ID NO: 48984 - protein, 9 aa, Homo sapiens
  misc_feature: Table A; Target 48984; HLA-C*07:01; MYH4; ENSG00000264424; TAA
ESLDHLETL

SEQ ID NO: 48985 - protein, 9 aa, Homo sapiens
  misc_feature: Table A; Target 48985; HLA-C*12:03; MYH4; ENSG00000264424; TAA
ESLDHLETL

SEQ ID NO: 48986 - protein, 10 aa, Homo sapiens
  misc_feature: Table A; Target 48986; HLA-A*33:03; MYH4; ENSG00000264424; TAA
ESLDHLETLK

SEQ ID NO: 48987 - protein, 8 aa, Homo sapiens
  misc_feature: Table A; Target 48987; HLA-A*33:01; MYH4; ENSG00000264424; TAA
ESQVNKLR

SEQ ID NO: 48988 - protein, 8 aa, Homo sapiens
  misc_feature: Table A; Target 48988; HLA-A*33:03; MYH4; ENSG00000264424; TAA
ESQVNKLR

SEQ ID NO: 48989 - protein, 9 aa, Homo sapiens
  misc_feature: Table A; Target 48989; HLA-A*26:01; MYH4; ENSG00000264424; TAA
ESRSLSTEL

SEQ ID NO: 48990 - protein, 9 aa, Homo sapiens
  misc_feature: Table A; Target 48990; HLA-B*07:02; MYH4; ENSG00000264424; TAA
ESRSLSTEL

SEQ ID NO: 48991 - protein, 8 aa, Homo sapiens
  misc_feature: Table A; Target 48991; HLA-B*08:01; MYH4; ENSG00000264424; TAA
ESYVKAIV

SEQ ID NO: 48992 - protein, 11 aa, Homo sapiens
  misc_feature: Table A; Target 48992; HLA-A*33:01; MYH4; ENSG00000264424; TAA
ESYVKAIVQSR

SEQ ID NO: 48993 - protein, 11 aa, Homo sapiens
  misc_feature: Table A; Target 48993; HLA-A*33:03; MYH4; ENSG00000264424; TAA
ESYVKAIVQSR

SEQ ID NO: 48994 - protein, 11 aa, Homo sapiens
  misc_feature: Table A; Target 48994; HLA-A*68:01; MYH4; ENSG00000264424; TAA
ESYVKAIVQSR

SEQ ID NO: 48995 - protein, 11 aa, Homo sapiens
  misc_feature: Table A; Target 48995; HLA-C*07:06; MYH4; ENSG00000264424; TAA
ESYVKAIVQSR

SEQ ID NO: 48996 - protein, 11 aa, Homo sapiens
  misc_feature: Table A; Target 48996; HLA-A*01:01; MYH4; ENSG00000264424; TAA
ETDAIQRTEEL

SEQ ID NO: 48997 - protein, 9 aa, Homo sapiens
  misc_feature: Table A; Target 48997; HLA-A*01:01; MYH4; ENSG00000264424; TAA
ETDISQIQG

SEQ ID NO: 48998 - protein, 11 aa, Homo sapiens
  misc_feature: Table A; Target 48998; HLA-A*01:01; MYH4; ENSG00000264424; TAA
ETDISQIQGEM

SEQ ID NO: 48999 - protein, 9 aa, Homo sapiens
  misc_feature: Table A; Target 48999; HLA-A*25:01; MYH4; ENSG00000264424; TAA
ETEKEMANM

SEQ ID NO: 49000 - protein, 9 aa, Homo sapiens
  misc_feature: Table A; Target 49000; HLA-A*26:01; MYH4; ENSG00000264424; TAA
ETEKEMANM

SEQ ID NO: 49001 - protein, 9 aa, Homo sapiens
  misc_feature: Table A; Target 49001; HLA-A*33:03; MYH4; ENSG00000264424; TAA
ETEKEMANM

SEQ ID NO: 49002 - protein, 10 aa, Homo sapiens
  misc_feature: Table A; Target 49002; HLA-A*01:01; MYH4; ENSG00000264424; TAA
ETEKEMANMK

SEQ ID NO: 49003 - protein, 10 aa, Homo sapiens
  misc_feature: Table A; Target 49003; HLA-A*68:01; MYH4; ENSG00000264424; TAA
ETEKEMANMK

SEQ ID NO: 49004 - protein, 9 aa, Homo sapiens
  misc_feature: Table A; Target 49004; HLA-A*26:01; MYH4; ENSG00000264424; TAA
ETIAKLTKE

SEQ ID NO: 49005 - protein, 9 aa, Homo sapiens
  misc_feature: Table A; Target 49005; HLA-A*33:03; MYH4; ENSG00000264424; TAA
ETIAKLTKE

SEQ ID NO: 49006 - protein, 10 aa, Homo sapiens
  misc_feature: Table A; Target 49006; HLA-A*33:01; MYH4; ENSG00000264424; TAA
ETIAKLTKEK

SEQ ID NO: 49007 - protein, 10 aa, Homo sapiens
  misc_feature: Table A; Target 49007; HLA-A*33:03; MYH4; ENSG00000264424; TAA
ETIAKLTKEK

SEQ ID NO: 49008 - protein, 10 aa, Homo sapiens
  misc_feature: Table A; Target 49008; HLA-A*68:01; MYH4; ENSG00000264424; TAA
ETIAKLTKEK

SEQ ID NO: 49009 - protein, 8 aa, Homo sapiens
  misc_feature: Table A; Target 49009; HLA-B*08:01; MYH4; ENSG00000264424; TAA
ETKAKSTL

SEQ ID NO: 49010 - protein, 10 aa, Homo sapiens
  misc_feature: Table A; Target 49010; HLA-A*33:01; MYH4; ENSG00000264424; TAA
ETKTPGAMEH

SEQ ID NO: 49011 - protein, 10 aa, Homo sapiens
  misc_feature: Table A; Target 49011; HLA-A*33:03; MYH4; ENSG00000264424; TAA
ETKTPGAMEH

SEQ ID NO: 49012 - protein, 11 aa, Homo sapiens
  misc_feature: Table A; Target 49012; HLA-A*03:02; MYH4; ENSG00000264424; TAA
ETQAELEASQK

SEQ ID NO: 49013 - protein, 11 aa, Homo sapiens
  misc_feature: Table A; Target 49013; HLA-A*11:01; MYH4; ENSG00000264424; TAA
ETQAELEASQK

SEQ ID NO: 49014 - protein, 11 aa, Homo sapiens
  misc_feature: Table A; Target 49014; HLA-A*33:03; MYH4; ENSG00000264424; TAA
ETQAELEASQK

SEQ ID NO: 49015 - protein, 11 aa, Homo sapiens
  misc_feature: Table A; Target 49015; HLA-A*68:01; MYH4; ENSG00000264424; TAA
ETQAELEASQK

SEQ ID NO: 49016 - protein, 11 aa, Homo sapiens
  misc_feature: Table A; Target 49016; HLA-B*27:02; MYH4; ENSG00000264424; TAA
ETQAELEASQK

SEQ ID NO: 49017 - protein, 11 aa, Homo sapiens
  misc_feature: Table A; Target 49017; HLA-C*07:06; MYH4; ENSG00000264424; TAA
ETQAELEASQK

SEQ ID NO: 49018 - protein, 10 aa, Homo sapiens
  misc_feature: Table A; Target 49018; HLA-A*25:01; MYH4; ENSG00000264424; TAA
ETVSKAKANF

SEQ ID NO: 49019 - protein, 10 aa, Homo sapiens
  misc_feature: Table A; Target 49019; HLA-A*26:01; MYH4; ENSG00000264424; TAA
ETVSKAKANF

SEQ ID NO: 49020 - protein, 10 aa, Homo sapiens
  misc_feature: Table A; Target 49020; HLA-A*33:03; MYH4; ENSG00000264424; TAA
ETVSKAKANF

SEQ ID NO: 49021 - protein, 9 aa, Homo sapiens
  misc_feature: Table A; Target 49021; HLA-A*11:01; MYH4; ENSG00000264424; TAA
ETVVGLYQK

SEQ ID NO: 49022 - protein, 9 aa, Homo sapiens
  misc_feature: Table A; Target 49022; HLA-A*33:01; MYH4; ENSG00000264424; TAA
ETVVGLYQK

SEQ ID NO: 49023 - protein, 9 aa, Homo sapiens
  misc_feature: Table A; Target 49023; HLA-A*33:03; MYH4; ENSG00000264424; TAA
ETVVGLYQK

SEQ ID NO: 49024 - protein, 9 aa, Homo sapiens
  misc_feature: Table A; Target 49024; HLA-A*68:01; MYH4; ENSG00000264424; TAA
ETVVGLYQK

SEQ ID NO: 49025 - protein, 9 aa, Homo sapiens
  misc_feature: Table A; Target 49025; HLA-A*68:02; MYH4; ENSG00000264424; TAA
ETVVGLYQK

SEQ ID NO: 49026 - protein, 9 aa, Homo sapiens
  misc_feature: Table A; Target 49026; HLA-B*27:02; MYH4; ENSG00000264424; TAA
ETVVGLYQK

SEQ ID NO: 49027 - protein, 9 aa, Homo sapiens
  misc_feature: Table A; Target 49027; HLA-C*07:06; MYH4; ENSG00000264424; TAA
ETVVGLYQK

SEQ ID NO: 49028 - protein, 10 aa, Homo sapiens
  misc_feature: Table A; Target 49028; HLA-A*68:01; MYH4; ENSG00000264424; TAA
ETVVGLYQKS

SEQ ID NO: 49029 - protein, 9 aa, Homo sapiens
  misc_feature: Table A; Target 49029; HLA-A*33:01; MYH4; ENSG00000264424; TAA
ETYLLEKSR

SEQ ID NO: 49030 - protein, 9 aa, Homo sapiens
  misc_feature: Table A; Target 49030; HLA-A*33:03; MYH4; ENSG00000264424; TAA
ETYLLEKSR

SEQ ID NO: 49031 - protein, 10 aa, Homo sapiens
  misc_feature: Table A; Target 49031; HLA-A*68:02; MYH4; ENSG00000264424; TAA
ETYLLEKSRV

SEQ ID NO: 49032 - protein, 8 aa, Homo sapiens
  misc_feature: Table A; Target 49032; HLA-A*25:01; MYH4; ENSG00000264424; TAA
EVADKAAY

SEQ ID NO: 49033 - protein, 8 aa, Homo sapiens
  misc_feature: Table A; Target 49033; HLA-A*26:01; MYH4; ENSG00000264424; TAA
EVADKAAY

SEQ ID NO: 49034 - protein, 9 aa, Homo sapiens
  misc_feature: Table A; Target 49034; HLA-A*25:01; MYH4; ENSG00000264424; TAA
EVADKAAYL

SEQ ID NO: 49035 - protein, 9 aa, Homo sapiens
  misc_feature: Table A; Target 49035; HLA-A*26:01; MYH4; ENSG00000264424; TAA
EVADKAAYL

SEQ ID NO: 49036 - protein, 9 aa, Homo sapiens
  misc_feature: Table A; Target 49036; HLA-A*32:01; MYH4; ENSG00000264424; TAA
EVADKAAYL

SEQ ID NO: 49037 - protein, 9 aa, Homo sapiens
  misc_feature: Table A; Target 49037; HLA-A*33:01; MYH4; ENSG00000264424; TAA
EVADKAAYL

SEQ ID NO: 49038 - protein, 9 aa, Homo sapiens
  misc_feature: Table A; Target 49038; HLA-A*33:03; MYH4; ENSG00000264424; TAA
EVADKAAYL

SEQ ID NO: 49039 - protein, 9 aa, Homo sapiens
  misc_feature: Table A; Target 49039; HLA-A*68:01; MYH4; ENSG00000264424; TAA
EVADKAAYL

SEQ ID NO: 49040 - protein, 9 aa, Homo sapiens
  misc_feature: Table A; Target 49040; HLA-A*68:02; MYH4; ENSG00000264424; TAA
EVADKAAYL

SEQ ID NO: 49041 - protein, 9 aa, Homo sapiens
  misc_feature: Table A; Target 49041; HLA-B*08:01; MYH4; ENSG00000264424; TAA
EVADKAAYL

SEQ ID NO: 49042 - protein, 9 aa, Homo sapiens
  misc_feature: Table A; Target 49042; HLA-B*35:03; MYH4; ENSG00000264424; TAA
EVADKAAYL

SEQ ID NO: 49043 - protein, 9 aa, Homo sapiens
  misc_feature: Table A; Target 49043; HLA-C*07:06; MYH4; ENSG00000264424; TAA
EVADKAAYL

SEQ ID NO: 49044 - protein, 9 aa, Homo sapiens
  misc_feature: Table A; Target 49044; HLA-A*25:01; MYH4; ENSG00000264424; TAA
EVAQWRTKY

SEQ ID NO: 49045 - protein, 9 aa, Homo sapiens
  misc_feature: Table A; Target 49045; HLA-A*26:01; MYH4; ENSG00000264424; TAA
EVAQWRTKY

SEQ ID NO: 49046 - protein, 9 aa, Homo sapiens
  misc_feature: Table A; Target 49046; HLA-A*32:01; MYH4; ENSG00000264424; TAA
EVAQWRTKY

SEQ ID NO: 49047 - protein, 9 aa, Homo sapiens
  misc_feature: Table A; Target 49047; HLA-A*26:01; MYH4; ENSG00000264424; TAA
EVEDLMIDV

SEQ ID NO: 49048 - protein, 9 aa, Homo sapiens
  misc_feature: Table A; Target 49048; HLA-A*68:02; MYH4; ENSG00000264424; TAA
EVEDLMIDV

SEQ ID NO: 49049 - protein, 11 aa, Homo sapiens
  misc_feature: Table A; Target 49049; HLA-A*33:01; MYH4; ENSG00000264424; TAA
EVEDLMIDVER

SEQ ID NO: 49050 - protein, 11 aa, Homo sapiens
  misc_feature: Table A; Target 49050; HLA-A*33:03; MYH4; ENSG00000264424; TAA
EVEDLMIDVER

SEQ ID NO: 49051 - protein, 11 aa, Homo sapiens
  misc_feature: Table A; Target 49051; HLA-A*68:01; MYH4; ENSG00000264424; TAA
EVEDLMIDVER

SEQ ID NO: 49052 - protein, 11 aa, Homo sapiens
  misc_feature: Table A; Target 49052; HLA-A*68:02; MYH4; ENSG00000264424; TAA
EVEDLMIDVER

SEQ ID NO: 49053 - protein, 9 aa, Homo sapiens
  misc_feature: Table A; Target 49053; HLA-A*25:01; MYH4; ENSG00000264424; TAA
EVEELRASL

SEQ ID NO: 49054 - protein, 9 aa, Homo sapiens
  misc_feature: Table A; Target 49054; HLA-A*26:01; MYH4; ENSG00000264424; TAA
EVEELRASL

SEQ ID NO: 49055 - protein, 9 aa, Homo sapiens
  misc_feature: Table A; Target 49055; HLA-A*33:01; MYH4; ENSG00000264424; TAA
EVEELRASL

SEQ ID NO: 49056 - protein, 9 aa, Homo sapiens
  misc_feature: Table A; Target 49056; HLA-A*33:03; MYH4; ENSG00000264424; TAA
EVEELRASL

SEQ ID NO: 49057 - protein, 9 aa, Homo sapiens
  misc_feature: Table A; Target 49057; HLA-A*68:01; MYH4; ENSG00000264424; TAA
EVEELRASL

SEQ ID NO: 49058 - protein, 9 aa, Homo sapiens
  misc_feature: Table A; Target 49058; HLA-A*68:02; MYH4; ENSG00000264424; TAA
EVEELRASL

SEQ ID NO: 49059 - protein, 9 aa, Homo sapiens
  misc_feature: Table A; Target 49059; HLA-B*07:02; MYH4; ENSG00000264424; TAA
EVEELRASL

SEQ ID NO: 49060 - protein, 9 aa, Homo sapiens
  misc_feature: Table A; Target 49060; HLA-B*08:01; MYH4; ENSG00000264424; TAA
EVEELRASL

SEQ ID NO: 49061 - protein, 9 aa, Homo sapiens
  misc_feature: Table A; Target 49061; HLA-B*18:01; MYH4; ENSG00000264424; TAA
EVEELRASL

SEQ ID NO: 49062 - protein, 9 aa, Homo sapiens
  misc_feature: Table A; Target 49062; HLA-B*44:02; MYH4; ENSG00000264424; TAA
EVEELRASL

SEQ ID NO: 49063 - protein, 9 aa, Homo sapiens
  misc_feature: Table A; Target 49063; HLA-C*01:02; MYH4; ENSG00000264424; TAA
EVEELRASL

SEQ ID NO: 49064 - protein, 9 aa, Homo sapiens
  misc_feature: Table A; Target 49064; HLA-C*05:01; MYH4; ENSG00000264424; TAA
EVEELRASL

SEQ ID NO: 49065 - protein, 9 aa, Homo sapiens
  misc_feature: Table A; Target 49065; HLA-C*07:02; MYH4; ENSG00000264424; TAA
EVEELRASL

SEQ ID NO: 49066 - protein, 9 aa, Homo sapiens
  misc_feature: Table A; Target 49066; HLA-C*07:06; MYH4; ENSG00000264424; TAA
EVEELRASL

SEQ ID NO: 49067 - protein, 11 aa, Homo sapiens
  misc_feature: Table A; Target 49067; HLA-A*33:03; MYH4; ENSG00000264424; TAA
EVEELRASLER

SEQ ID NO: 49068 - protein, 11 aa, Homo sapiens
  misc_feature: Table A; Target 49068; HLA-A*68:01; MYH4; ENSG00000264424; TAA
EVEELRASLER

SEQ ID NO: 49069 - protein, 9 aa, Homo sapiens
  misc_feature: Table A; Target 49069; HLA-B*08:01; MYH4; ENSG00000264424; TAA
EVHTKVISE

SEQ ID NO: 49070 - protein, 9 aa, Homo sapiens
  misc_feature: Table A; Target 49070; HLA-A*25:01; MYH4; ENSG00000264424; TAA
EVVTAYRGK

SEQ ID NO: 49071 - protein, 9 aa, Homo sapiens
  misc_feature: Table A; Target 49071; HLA-A*26:01; MYH4; ENSG00000264424; TAA
EVVTAYRGK

SEQ ID NO: 49072 - protein, 9 aa, Homo sapiens
  misc_feature: Table A; Target 49072; HLA-A*33:03; MYH4; ENSG00000264424; TAA
EVVTAYRGK

SEQ ID NO: 49073 - protein, 9 aa, Homo sapiens
  misc_feature: Table A; Target 49073; HLA-A*68:01; MYH4; ENSG00000264424; TAA
EVVTAYRGK

SEQ ID NO: 49074 - protein, 9 aa, Homo sapiens
  misc_feature: Table A; Target 49074; HLA-A*33:03; MYH4; ENSG00000264424; TAA
EYKKEGIEW

SEQ ID NO: 49075 - protein, 11 aa, Homo sapiens
  misc_feature: Table A; Target 49075; HLA-A*24:02; MYH4; ENSG00000264424; TAA
EYKKEGIEWEF

SEQ ID NO: 49076 - protein, 9 aa, Homo sapiens
  misc_feature: Table A; Target 49076; HLA-B*39:01; MYH4; ENSG00000264424; TAA
FAFVSQGEI

SEQ ID NO: 49077 - protein, 9 aa, Homo sapiens
  misc_feature: Table A; Target 49077; HLA-B*40:01; MYH4; ENSG00000264424; TAA
FAFVSQGEI

SEQ ID NO: 49078 - protein, 9 aa, Homo sapiens
  misc_feature: Table A; Target 49078; HLA-B*46:01; MYH4; ENSG00000264424; TAA
FAFVSQGEI

SEQ ID NO: 49079 - protein, 9 aa, Homo sapiens
  misc_feature: Table A; Target 49079; HLA-B*51:01; MYH4; ENSG00000264424; TAA
FAFVSQGEI

SEQ ID NO: 49080 - protein, 9 aa, Homo sapiens
  misc_feature: Table A; Target 49080; HLA-B*54:01; MYH4; ENSG00000264424; TAA
FAFVSQGEI

SEQ ID NO: 49081 - protein, 9 aa, Homo sapiens
  misc_feature: Table A; Target 49081; HLA-C*02:02; MYH4; ENSG00000264424; TAA
FAFVSQGEI

SEQ ID NO: 49082 - protein, 9 aa, Homo sapiens
  misc_feature: Table A; Target 49082; HLA-C*03:03; MYH4; ENSG00000264424; TAA
FAFVSQGEI

SEQ ID NO: 49083 - protein, 9 aa, Homo sapiens
  misc_feature: Table A; Target 49083; HLA-C*03:04; MYH4; ENSG00000264424; TAA
FAFVSQGEI

SEQ ID NO: 49084 - protein, 9 aa, Homo sapiens
  misc_feature: Table A; Target 49084; HLA-C*16:04; MYH4; ENSG00000264424; TAA
FAFVSQGEI

SEQ ID NO: 49085 - protein, 11 aa, Homo sapiens
  misc_feature: Table A; Target 49085; HLA-A*68:02; MYH4; ENSG00000264424; TAA
FAFVSQGEITV

SEQ ID NO: 49086 - protein, 11 aa, Homo sapiens
  misc_feature: Table A; Target 49086; HLA-B*35:03; MYH4; ENSG00000264424; TAA
FAFVSQGEITV

SEQ ID NO: 49087 - protein, 11 aa, Homo sapiens
  misc_feature: Table A; Target 49087; HLA-B*51:01; MYH4; ENSG00000264424; TAA
FAFVSQGEITV

SEQ ID NO: 49088 - protein, 11 aa, Homo sapiens
  misc_feature: Table A; Target 49088; HLA-B*54:01; MYH4; ENSG00000264424; TAA
FAFVSQGEITV

SEQ ID NO: 49089 - protein, 11 aa, Homo sapiens
  misc_feature: Table A; Target 49089; HLA-C*02:02; MYH4; ENSG00000264424; TAA
FAFVSQGEITV

SEQ ID NO: 49090 - protein, 11 aa, Homo sapiens
  misc_feature: Table A; Target 49090; HLA-C*03:04; MYH4; ENSG00000264424; TAA
FAFVSQGEITV

SEQ ID NO: 49091 - protein, 11 aa, Homo sapiens
  misc_feature: Table A; Target 49091; HLA-C*12:03; MYH4; ENSG00000264424; TAA
FAFVSQGEITV

SEQ ID NO: 49092 - protein, 8 aa, Homo sapiens
  misc_feature: Table A; Target 49092; HLA-C*07:04; MYH4; ENSG00000264424; TAA
FATIAVTG

SEQ ID NO: 49093 - protein, 9 aa, Homo sapiens
  misc_feature: Table A; Target 49093; HLA-C*07:04; MYH4; ENSG00000264424; TAA
FATIAVTGE

SEQ ID NO: 49094 - protein, 10 aa, Homo sapiens
  misc_feature: Table A; Target 49094; HLA-A*68:01; MYH4; ENSG00000264424; TAA
FATIAVTGEK

SEQ ID NO: 49095 - protein, 10 aa, Homo sapiens
  misc_feature: Table A; Target 49095; HLA-B*27:02; MYH4; ENSG00000264424; TAA
FATIAVTGEK

SEQ ID NO: 49096 - protein, 10 aa, Homo sapiens
  misc_feature: Table A; Target 49096; HLA-C*07:02; MYH4; ENSG00000264424; TAA
FATIAVTGEK

SEQ ID NO: 49097 - protein, 10 aa, Homo sapiens
  misc_feature: Table A; Target 49097; HLA-C*07:06; MYH4; ENSG00000264424; TAA
FATIAVTGEK

SEQ ID NO: 49098 - protein, 11 aa, Homo sapiens
  misc_feature: Table A; Target 49098; HLA-B*27:02; MYH4; ENSG00000264424; TAA
FATIAVTGEKK

SEQ ID NO: 49099 - protein, 8 aa, Homo sapiens
  misc_feature: Table A; Target 49099; HLA-B*18:01; MYH4; ENSG00000264424; TAA
FDAKTSVF

SEQ ID NO: 49100 - protein, 8 aa, Homo sapiens
  misc_feature: Table A; Target 49100; HLA-B*37:01; MYH4; ENSG00000264424; TAA
FDAKTSVF

SEQ ID NO: 49101 - protein, 9 aa, Homo sapiens
  misc_feature: Table A; Target 49101; HLA-A*30:01; MYH4; ENSG00000264424; TAA
FDFNSLEQL

SEQ ID NO: 49102 - protein, 9 aa, Homo sapiens
  misc_feature: Table A; Target 49102; HLA-B*40:01; MYH4; ENSG00000264424; TAA
FDFNSLEQL

SEQ ID NO: 49103 - protein, 9 aa, Homo sapiens
  misc_feature: Table A; Target 49103; HLA-A*30:01; MYH4; ENSG00000264424; TAA
FEIFDFNSL

SEQ ID NO: 49104 - protein, 9 aa, Homo sapiens
  misc_feature: Table A; Target 49104; HLA-B*18:01; MYH4; ENSG00000264424; TAA
FEIFDFNSL

SEQ ID NO: 49105 - protein, 9 aa, Homo sapiens
  misc_feature: Table A; Target 49105; HLA-B*40:01; MYH4; ENSG00000264424; TAA
FEIFDFNSL

SEQ ID NO: 49106 - protein, 9 aa, Homo sapiens
  misc_feature: Table A; Target 49106; HLA-B*40:02; MYH4; ENSG00000264424; TAA
FEIFDFNSL

SEQ ID NO: 49107 - protein, 9 aa, Homo sapiens
  misc_feature: Table A; Target 49107; HLA-B*44:02; MYH4; ENSG00000264424; TAA
FEIFDFNSL

SEQ ID NO: 49108 - protein, 9 aa, Homo sapiens
  misc_feature: Table A; Target 49108; HLA-B*49:01; MYH4; ENSG00000264424; TAA
FEIFDFNSL

SEQ ID NO: 49109 - protein, 9 aa, Homo sapiens
  misc_feature: Table A; Target 49109; HLA-C*03:04; MYH4; ENSG00000264424; TAA
FEIFDFNSL

SEQ ID NO: 49110 - protein, 8 aa, Homo sapiens
  misc_feature: Table A; Target 49110; HLA-B*08:01; MYH4; ENSG00000264424; TAA
FEKTKEEL

SEQ ID NO: 49111 - protein, 8 aa, Homo sapiens
  misc_feature: Table A; Target 49111; HLA-B*37:01; MYH4; ENSG00000264424; TAA
FEKTKEEL

SEQ ID NO: 49112 - protein, 8 aa, Homo sapiens
  misc_feature: Table A; Target 49112; HLA-B*40:02; MYH4; ENSG00000264424; TAA
FEKTKEEL

SEQ ID NO: 49113 - protein, 8 aa, Homo sapiens
  misc_feature: Table A; Target 49113; HLA-C*16:01; MYH4; ENSG00000264424; TAA
FEKTKEEL

SEQ ID NO: 49114 - protein, 9 aa, Homo sapiens
  misc_feature: Table A; Target 49114; HLA-B*40:02; MYH4; ENSG00000264424; TAA
FEKTKEELA

SEQ ID NO: 49115 - protein, 10 aa, Homo sapiens
  misc_feature: Table A; Target 49115; HLA-A*30:01; MYH4; ENSG00000264424; TAA
FEMSNLQGKI

SEQ ID NO: 49116 - protein, 10 aa, Homo sapiens
  misc_feature: Table A; Target 49116; HLA-B*44:02; MYH4; ENSG00000264424; TAA
FEMSNLQGKI

SEQ ID NO: 49117 - protein, 10 aa, Homo sapiens
  misc_feature: Table A; Target 49117; HLA-B*44:03; MYH4; ENSG00000264424; TAA
FEMSNLQGKI

SEQ ID NO: 49118 - protein, 10 aa, Homo sapiens
  misc_feature: Table A; Target 49118; HLA-B*49:01; MYH4; ENSG00000264424; TAA
FEMSNLQGKI

SEQ ID NO: 49119 - protein, 10 aa, Homo sapiens
  misc_feature: Table A; Target 49119; HLA-A*02:03; MYH4; ENSG00000264424; TAA
FGATGKLASA

SEQ ID NO: 49120 - protein, 10 aa, Homo sapiens
  misc_feature: Table A; Target 49120; HLA-B*54:01; MYH4; ENSG00000264424; TAA
FGATGKLASA

SEQ ID NO: 49121 - protein, 8 aa, Homo sapiens
  misc_feature: Table A; Target 49121; HLA-C*03:04; MYH4; ENSG00000264424; TAA
FGEAAPFL

SEQ ID NO: 49122 - protein, 8 aa, Homo sapiens
  misc_feature: Table A; Target 49122; HLA-C*05:01; MYH4; ENSG00000264424; TAA
FGEAAPFL

SEQ ID NO: 49123 - protein, 8 aa, Homo sapiens
  misc_feature: Table A; Target 49123; HLA-B*08:01; MYH4; ENSG00000264424; TAA
FGHTKVFF

SEQ ID NO: 49124 - protein, 9 aa, Homo sapiens
  misc_feature: Table A; Target 49124; HLA-B*13:02; MYH4; ENSG00000264424; TAA
FGMDLAACI

SEQ ID NO: 49125 - protein, 9 aa, Homo sapiens
  misc_feature: Table A; Target 49125; HLA-B*51:01; MYH4; ENSG00000264424; TAA
FGMDLAACI

SEQ ID NO: 49126 - protein, 8 aa, Homo sapiens
  misc_feature: Table A; Target 49126; HLA-C*03:03; MYH4; ENSG00000264424; TAA
FIDFGMDL

SEQ ID NO: 49127 - protein, 8 aa, Homo sapiens
  misc_feature: Table A; Target 49127; HLA-C*03:04; MYH4; ENSG00000264424; TAA
FIDFGMDL

SEQ ID NO: 49128 - protein, 8 aa, Homo sapiens
  misc_feature: Table A; Target 49128; HLA-C*05:01; MYH4; ENSG00000264424; TAA
FIDFGMDL

SEQ ID NO: 49129 - protein, 9 aa, Homo sapiens
  misc_feature: Table A; Target 49129; HLA-B*15:03; MYH4; ENSG00000264424; TAA
FKAGLLGTL

SEQ ID NO: 49130 - protein, 9 aa, Homo sapiens
  misc_feature: Table A; Target 49130; HLA-A*02:01; MYH4; ENSG00000264424; TAA
FLFSGAQTA

SEQ ID NO: 49131 - protein, 9 aa, Homo sapiens
  misc_feature: Table A; Target 49131; HLA-A*02:03; MYH4; ENSG00000264424; TAA
FLFSGAQTA

SEQ ID NO: 49132 - protein, 9 aa, Homo sapiens
  misc_feature: Table A; Target 49132; HLA-A*02:04; MYH4; ENSG00000264424; TAA
FLFSGAQTA

SEQ ID NO: 49133 - protein, 9 aa, Homo sapiens
  misc_feature: Table A; Target 49133; HLA-A*02:07; MYH4; ENSG00000264424; TAA
FLFSGAQTA

SEQ ID NO: 49134 - protein, 9 aa, Homo sapiens
  misc_feature: Table A; Target 49134; HLA-A*30:01; MYH4; ENSG00000264424; TAA
FLFSGAQTA

SEQ ID NO: 49135 - protein, 9 aa, Homo sapiens
  misc_feature: Table A; Target 49135; HLA-A*32:01; MYH4; ENSG00000264424; TAA
FLFSGAQTA

SEQ ID NO: 49136 - protein, 9 aa, Homo sapiens
  misc_feature: Table A; Target 49136; HLA-B*13:02; MYH4; ENSG00000264424; TAA
FLFSGAQTA

SEQ ID NO: 49137 - protein, 9 aa, Homo sapiens
  misc_feature: Table A; Target 49137; HLA-B*15:01; MYH4; ENSG00000264424; TAA
FLFSGAQTA

SEQ ID NO: 49138 - protein, 9 aa, Homo sapiens
  misc_feature: Table A; Target 49138; HLA-B*27:05; MYH4; ENSG00000264424; TAA
FLFSGAQTA

SEQ ID NO: 49139 - protein, 9 aa, Homo sapiens
  misc_feature: Table A; Target 49139; HLA-B*35:03; MYH4; ENSG00000264424; TAA
FLFSGAQTA

SEQ ID NO: 49140 - protein, 9 aa, Homo sapiens
  misc_feature: Table A; Target 49140; HLA-B*39:01; MYH4; ENSG00000264424; TAA
FLFSGAQTA

SEQ ID NO: 49141 - protein, 9 aa, Homo sapiens
  misc_feature: Table A; Target 49141; HLA-B*46:01; MYH4; ENSG00000264424; TAA
FLFSGAQTA

SEQ ID NO: 49142 - protein, 9 aa, Homo sapiens
  misc_feature: Table A; Target 49142; HLA-B*54:01; MYH4; ENSG00000264424; TAA
FLFSGAQTA

SEQ ID NO: 49143 - protein, 9 aa, Homo sapiens
  misc_feature: Table A; Target 49143; HLA-B*55:01; MYH4; ENSG00000264424; TAA
FLFSGAQTA

SEQ ID NO: 49144 - protein, 9 aa, Homo sapiens
  misc_feature: Table A; Target 49144; HLA-B*56:01; MYH4; ENSG00000264424; TAA
FLFSGAQTA

SEQ ID NO: 49145 - protein, 9 aa, Homo sapiens
  misc_feature: Table A; Target 49145; HLA-C*01:02; MYH4; ENSG00000264424; TAA
FLFSGAQTA

SEQ ID NO: 49146 - protein, 9 aa, Homo sapiens
  misc_feature: Table A; Target 49146; HLA-C*02:02; MYH4; ENSG00000264424; TAA
FLFSGAQTA

SEQ ID NO: 49147 - protein, 9 aa, Homo sapiens
  misc_feature: Table A; Target 49147; HLA-C*03:03; MYH4; ENSG00000264424; TAA
FLFSGAQTA

SEQ ID NO: 49148 - protein, 9 aa, Homo sapiens
  misc_feature: Table A; Target 49148; HLA-C*03:04; MYH4; ENSG00000264424; TAA
FLFSGAQTA

SEQ ID NO: 49149 - protein, 9 aa, Homo sapiens
  misc_feature: Table A; Target 49149; HLA-C*06:02; MYH4; ENSG00000264424; TAA
FLFSGAQTA

SEQ ID NO: 49150 - protein, 9 aa, Homo sapiens
  misc_feature: Table A; Target 49150; HLA-C*07:04; MYH4; ENSG00000264424; TAA
FLFSGAQTA

SEQ ID NO: 49151 - protein, 9 aa, Homo sapiens
  misc_feature: Table A; Target 49151; HLA-C*12:03; MYH4; ENSG00000264424; TAA
FLFSGAQTA

SEQ ID NO: 49152 - protein, 9 aa, Homo sapiens
  misc_feature: Table A; Target 49152; HLA-C*14:02; MYH4; ENSG00000264424; TAA
FLFSGAQTA

SEQ ID NO: 49153 - protein, 10 aa, Homo sapiens
  misc_feature: Table A; Target 49153; HLA-A*02:03; MYH4; ENSG00000264424; TAA
FLFSGAQTAE

SEQ ID NO: 49154 - protein, 10 aa, Homo sapiens
  misc_feature: Table A; Target 49154; HLA-C*07:04; MYH4; ENSG00000264424; TAA
FLFSGAQTAE

SEQ ID NO: 49155 - protein, 11 aa, Homo sapiens
  misc_feature: Table A; Target 49155; HLA-A*02:01; MYH4; ENSG00000264424; TAA
FLFSGAQTAEA

SEQ ID NO: 49156 - protein, 11 aa, Homo sapiens
  misc_feature: Table A; Target 49156; HLA-A*02:03; MYH4; ENSG00000264424; TAA
FLFSGAQTAEA

SEQ ID NO: 49157 - protein, 11 aa, Homo sapiens
  misc_feature: Table A; Target 49157; HLA-A*02:04; MYH4; ENSG00000264424; TAA
FLFSGAQTAEA

SEQ ID NO: 49158 - protein, 11 aa, Homo sapiens
  misc_feature: Table A; Target 49158; HLA-A*02:07; MYH4; ENSG00000264424; TAA
FLFSGAQTAEA

SEQ ID NO: 49159 - protein, 11 aa, Homo sapiens
  misc_feature: Table A; Target 49159; HLA-A*68:02; MYH4; ENSG00000264424; TAA
FLFSGAQTAEA

SEQ ID NO: 49160 - protein, 11 aa, Homo sapiens
  misc_feature: Table A; Target 49160; HLA-B*46:01; MYH4; ENSG00000264424; TAA
FLFSGAQTAEA

SEQ ID NO: 49161 - protein, 11 aa, Homo sapiens
  misc_feature: Table A; Target 49161; HLA-B*54:01; MYH4; ENSG00000264424; TAA
FLFSGAQTAEA

SEQ ID NO: 49162 - protein, 11 aa, Homo sapiens
  misc_feature: Table A; Target 49162; HLA-B*55:01; MYH4; ENSG00000264424; TAA
FLFSGAQTAEA

SEQ ID NO: 49163 - protein, 8 aa, Homo sapiens
  misc_feature: Table A; Target 49163; HLA-A*02:04; MYH4; ENSG00000264424; TAA
FLWMVTRI

SEQ ID NO: 49164 - protein, 11 aa, Homo sapiens
  misc_feature: Table A; Target 49164; HLA-A*02:01; MYH4; ENSG00000264424; TAA
FMLTDRENQSI

SEQ ID NO: 49165 - protein, 9 aa, Homo sapiens
  misc_feature: Table A; Target 49165; HLA-A*24:02; MYH4; ENSG00000264424; TAA
FMNVKHWPW

SEQ ID NO: 49166 - protein, 9 aa, Homo sapiens
  misc_feature: Table A; Target 49166; HLA-A*23:01; MYH4; ENSG00000264424; TAA
FPKATDTSF

SEQ ID NO: 49167 - protein, 9 aa, Homo sapiens
  misc_feature: Table A; Target 49167; HLA-A*26:01; MYH4; ENSG00000264424; TAA
FPKATDTSF

SEQ ID NO: 49168 - protein, 9 aa, Homo sapiens
  misc_feature: Table A; Target 49168; HLA-A*32:01; MYH4; ENSG00000264424; TAA
FPKATDTSF

SEQ ID NO: 49169 - protein, 9 aa, Homo sapiens
  misc_feature: Table A; Target 49169; HLA-A*33:03; MYH4; ENSG00000264424; TAA
FPKATDTSF

SEQ ID NO: 49170 - protein, 9 aa, Homo sapiens
  misc_feature: Table A; Target 49170; HLA-B*07:02; MYH4; ENSG00000264424; TAA
FPKATDTSF

SEQ ID NO: 49171 - protein, 9 aa, Homo sapiens
  misc_feature: Table A; Target 49171; HLA-B*08:01; MYH4; ENSG00000264424; TAA
FPKATDTSF

SEQ ID NO: 49172 - protein, 9 aa, Homo sapiens
  misc_feature: Table A; Target 49172; HLA-B*15:01; MYH4; ENSG00000264424; TAA
FPKATDTSF

SEQ ID NO: 49173 - protein, 9 aa, Homo sapiens
  misc_feature: Table A; Target 49173; HLA-B*15:03; MYH4; ENSG00000264424; TAA
FPKATDTSF

SEQ ID NO: 49174 - protein, 9 aa, Homo sapiens
  misc_feature: Table A; Target 49174; HLA-B*35:01; MYH4; ENSG00000264424; TAA
FPKATDTSF

SEQ ID NO: 49175 - protein, 9 aa, Homo sapiens
  misc_feature: Table A; Target 49175; HLA-B*35:03; MYH4; ENSG00000264424; TAA
FPKATDTSF

SEQ ID NO: 49176 - protein, 9 aa, Homo sapiens
  misc_feature: Table A; Target 49176; HLA-B*40:02; MYH4; ENSG00000264424; TAA
FPKATDTSF

SEQ ID NO: 49177 - protein, 9 aa, Homo sapiens
  misc_feature: Table A; Target 49177; HLA-B*46:01; MYH4; ENSG00000264424; TAA
FPKATDTSF

SEQ ID NO: 49178 - protein, 9 aa, Homo sapiens
  misc_feature: Table A; Target 49178; HLA-B*51:01; MYH4; ENSG00000264424; TAA
FPKATDTSF

SEQ ID NO: 49179 - protein, 9 aa, Homo sapiens
  misc_feature: Table A; Target 49179; HLA-B*54:01; MYH4; ENSG00000264424; TAA
FPKATDTSF

SEQ ID NO: 49180 - protein, 9 aa, Homo sapiens
  misc_feature: Table A; Target 49180; HLA-B*55:01; MYH4; ENSG00000264424; TAA
FPKATDTSF

SEQ ID NO: 49181 - protein, 9 aa, Homo sapiens
  misc_feature: Table A; Target 49181; HLA-B*56:01; MYH4; ENSG00000264424; TAA
FPKATDTSF

SEQ ID NO: 49182 - protein, 9 aa, Homo sapiens
  misc_feature: Table A; Target 49182; HLA-C*01:02; MYH4; ENSG00000264424; TAA
FPKATDTSF

SEQ ID NO: 49183 - protein, 9 aa, Homo sapiens
  misc_feature: Table A; Target 49183; HLA-C*02:02; MYH4; ENSG00000264424; TAA
FPKATDTSF

SEQ ID NO: 49184 - protein, 9 aa, Homo sapiens
  misc_feature: Table A; Target 49184; HLA-C*03:03; MYH4; ENSG00000264424; TAA
FPKATDTSF

SEQ ID NO: 49185 - protein, 9 aa, Homo sapiens
  misc_feature: Table A; Target 49185; HLA-C*03:04; MYH4; ENSG00000264424; TAA
FPKATDTSF

SEQ ID NO: 49186 - protein, 9 aa, Homo sapiens
  misc_feature: Table A; Target 49186; HLA-C*04:01; MYH4; ENSG00000264424; TAA
FPKATDTSF

SEQ ID NO: 49187 - protein, 9 aa, Homo sapiens
  misc_feature: Table A; Target 49187; HLA-C*05:01; MYH4; ENSG00000264424; TAA
FPKATDTSF

SEQ ID NO: 49188 - protein, 9 aa, Homo sapiens
  misc_feature: Table A; Target 49188; HLA-C*07:02; MYH4; ENSG00000264424; TAA
FPKATDTSF

SEQ ID NO: 49189 - protein, 9 aa, Homo sapiens
  misc_feature: Table A; Target 49189; HLA-C*07:04; MYH4; ENSG00000264424; TAA
FPKATDTSF

SEQ ID NO: 49190 - protein, 9 aa, Homo sapiens
  misc_feature: Table A; Target 49190; HLA-C*14:02; MYH4; ENSG00000264424; TAA
FPKATDTSF

SEQ ID NO: 49191 - protein, 9 aa, Homo sapiens
  misc_feature: Table A; Target 49191; HLA-C*16:01; MYH4; ENSG00000264424; TAA
FPKATDTSF

SEQ ID NO: 49192 - protein, 8 aa, Homo sapiens
  misc_feature: Table A; Target 49192; HLA-B*54:01; MYH4; ENSG00000264424; TAA
FPSRILYA

SEQ ID NO: 49193 - protein, 8 aa, Homo sapiens
  misc_feature: Table A; Target 49193; HLA-B*56:01; MYH4; ENSG00000264424; TAA
FPSRILYA

SEQ ID NO: 49194 - protein, 9 aa, Homo sapiens
  misc_feature: Table A; Target 49194; HLA-A*30:02; MYH4; ENSG00000264424; TAA
FQLKAERSY

SEQ ID NO: 49195 - protein, 9 aa, Homo sapiens
  misc_feature: Table A; Target 49195; HLA-B*15:03; MYH4; ENSG00000264424; TAA
FQLKAERSY

SEQ ID NO: 49196 - protein, 8 aa, Homo sapiens
  misc_feature: Table A; Target 49196; HLA-B*15:01; MYH4; ENSG00000264424; TAA
FQTVSALF

SEQ ID NO: 49197 - protein, 8 aa, Homo sapiens
  misc_feature: Table A; Target 49197; HLA-B*15:03; MYH4; ENSG00000264424; TAA
FQTVSALF

SEQ ID NO: 49198 - protein, 8 aa, Homo sapiens
  misc_feature: Table A; Target 49198; HLA-C*07:04; MYH4; ENSG00000264424; TAA
FQTVSALF

SEQ ID NO: 49199 - protein, 9 aa, Homo sapiens
  misc_feature: Table A; Target 49199; HLA-B*13:02; MYH4; ENSG00000264424; TAA
FQTVSALFR

SEQ ID NO: 49200 - protein, 9 aa, Homo sapiens
  misc_feature: Table A; Target 49200; HLA-B*54:01; MYH4; ENSG00000264424; TAA
FSGAQTAEA

SEQ ID NO: 49201 - protein, 10 aa, Homo sapiens
  misc_feature: Table A; Target 49201; HLA-B*57:01; MYH4; ENSG00000264424; TAA
FSISDNAYQF

SEQ ID NO: 49202 - protein, 10 aa, Homo sapiens
  misc_feature: Table A; Target 49202; HLA-B*58:01; MYH4; ENSG00000264424; TAA
FSISDNAYQF

SEQ ID NO: 49203 - protein, 10 aa, Homo sapiens
  misc_feature: Table A; Target 49203; HLA-C*02:02; MYH4; ENSG00000264424; TAA
FSISDNAYQF

SEQ ID NO: 49204 - protein, 8 aa, Homo sapiens
  misc_feature: Table A; Target 49204; HLA-A*01:01; MYH4; ENSG00000264424; TAA
FSMNPPKY

SEQ ID NO: 49205 - protein, 8 aa, Homo sapiens
  misc_feature: Table A; Target 49205; HLA-A*30:02; MYH4; ENSG00000264424; TAA
FSMNPPKY

SEQ ID NO: 49206 - protein, 8 aa, Homo sapiens
  misc_feature: Table A; Target 49206; HLA-B*39:01; MYH4; ENSG00000264424; TAA
FSMNPPKY

SEQ ID NO: 49207 - protein, 8 aa, Homo sapiens
  misc_feature: Table A; Target 49207; HLA-B*46:01; MYH4; ENSG00000264424; TAA
FSMNPPKY

SEQ ID NO: 49208 - protein, 8 aa, Homo sapiens
  misc_feature: Table A; Target 49208; HLA-B*58:01; MYH4; ENSG00000264424; TAA
FSMNPPKY

SEQ ID NO: 49209 - protein, 8 aa, Homo sapiens
  misc_feature: Table A; Target 49209; HLA-C*02:02; MYH4; ENSG00000264424; TAA
FSMNPPKY

SEQ ID NO: 49210 - protein, 8 aa, Homo sapiens
  misc_feature: Table A; Target 49210; HLA-C*16:01; MYH4; ENSG00000264424; TAA
FSMNPPKY

SEQ ID NO: 49211 - protein, 10 aa, Homo sapiens
  misc_feature: Table A; Target 49211; HLA-A*11:01; MYH4; ENSG00000264424; TAA
FSMNPPKYDK

SEQ ID NO: 49212 - protein, 9 aa, Homo sapiens
  misc_feature: Table A; Target 49212; HLA-A*25:01; MYH4; ENSG00000264424; TAA
FTADEKVAI

SEQ ID NO: 49213 - protein, 9 aa, Homo sapiens
  misc_feature: Table A; Target 49213; HLA-A*32:01; MYH4; ENSG00000264424; TAA
FTADEKVAI

SEQ ID NO: 49214 - protein, 9 aa, Homo sapiens
  misc_feature: Table A; Target 49214; HLA-A*68:02; MYH4; ENSG00000264424; TAA
FTADEKVAI

SEQ ID NO: 49215 - protein, 9 aa, Homo sapiens
  misc_feature: Table A; Target 49215; HLA-B*13:02; MYH4; ENSG00000264424; TAA
FTADEKVAI

SEQ ID NO: 49216 - protein, 9 aa, Homo sapiens
  misc_feature: Table A; Target 49216; HLA-B*35:03; MYH4; ENSG00000264424; TAA
FTADEKVAI

SEQ ID NO: 49217 - protein, 9 aa, Homo sapiens
  misc_feature: Table A; Target 49217; HLA-B*38:01; MYH4; ENSG00000264424; TAA
FTADEKVAI

SEQ ID NO: 49218 - protein, 9 aa, Homo sapiens
  misc_feature: Table A; Target 49218; HLA-B*58:01; MYH4; ENSG00000264424; TAA
FTADEKVAI

SEQ ID NO: 49219 - protein, 9 aa, Homo sapiens
  misc_feature: Table A; Target 49219; HLA-C*02:02; MYH4; ENSG00000264424; TAA
FTADEKVAI

SEQ ID NO: 49220 - protein, 9 aa, Homo sapiens
  misc_feature: Table A; Target 49220; HLA-C*03:03; MYH4; ENSG00000264424; TAA
FTADEKVAI

SEQ ID NO: 49221 - protein, 9 aa, Homo sapiens
  misc_feature: Table A; Target 49221; HLA-C*03:04; MYH4; ENSG00000264424; TAA
FTADEKVAI

SEQ ID NO: 49222 - protein, 9 aa, Homo sapiens
  misc_feature: Table A; Target 49222; HLA-C*07:04; MYH4; ENSG00000264424; TAA
FTADEKVAI

SEQ ID NO: 49223 - protein, 9 aa, Homo sapiens
  misc_feature: Table A; Target 49223; HLA-C*12:03; MYH4; ENSG00000264424; TAA
FTADEKVAI

SEQ ID NO: 49224 - protein, 9 aa, Homo sapiens
  misc_feature: Table A; Target 49224; HLA-C*16:01; MYH4; ENSG00000264424; TAA
FTADEKVAI

SEQ ID NO: 49225 - protein, 9 aa, Homo sapiens
  misc_feature: Table A; Target 49225; HLA-C*16:02; MYH4; ENSG00000264424; TAA
FTADEKVAI

SEQ ID NO: 49226 - protein, 10 aa, Homo sapiens
  misc_feature: Table A; Target 49226; HLA-A*01:01; MYH4; ENSG00000264424; TAA
FTADEKVAIY

SEQ ID NO: 49227 - protein, 10 aa, Homo sapiens
  misc_feature: Table A; Target 49227; HLA-A*25:01; MYH4; ENSG00000264424; TAA
FTADEKVAIY

SEQ ID NO: 49228 - protein, 10 aa, Homo sapiens
  misc_feature: Table A; Target 49228; HLA-A*26:01; MYH4; ENSG00000264424; TAA
FTADEKVAIY

SEQ ID NO: 49229 - protein, 10 aa, Homo sapiens
  misc_feature: Table A; Target 49229; HLA-A*29:02; MYH4; ENSG00000264424; TAA
FTADEKVAIY

SEQ ID NO: 49230 - protein, 10 aa, Homo sapiens
  misc_feature: Table A; Target 49230; HLA-A*30:02; MYH4; ENSG00000264424; TAA
FTADEKVAIY

SEQ ID NO: 49231 - protein, 10 aa, Homo sapiens
  misc_feature: Table A; Target 49231; HLA-A*32:01; MYH4; ENSG00000264424; TAA
FTADEKVAIY

SEQ ID NO: 49232 - protein, 10 aa, Homo sapiens
  misc_feature: Table A; Target 49232; HLA-A*68:01; MYH4; ENSG00000264424; TAA
FTADEKVAIY

SEQ ID NO: 49233 - protein, 10 aa, Homo sapiens
  misc_feature: Table A; Target 49233; HLA-B*15:01; MYH4; ENSG00000264424; TAA
FTADEKVAIY

SEQ ID NO: 49234 - protein, 10 aa, Homo sapiens
  misc_feature: Table A; Target 49234; HLA-B*27:02; MYH4; ENSG00000264424; TAA
FTADEKVAIY

SEQ ID NO: 49235 - protein, 10 aa, Homo sapiens
  misc_feature: Table A; Target 49235; HLA-B*46:01; MYH4; ENSG00000264424; TAA
FTADEKVAIY

SEQ ID NO: 49236 - protein, 10 aa, Homo sapiens
  misc_feature: Table A; Target 49236; HLA-C*02:02; MYH4; ENSG00000264424; TAA
FTADEKVAIY

SEQ ID NO: 49237 - protein, 10 aa, Homo sapiens
  misc_feature: Table A; Target 49237; HLA-C*07:04; MYH4; ENSG00000264424; TAA
FTADEKVAIY

SEQ ID NO: 49238 - protein, 10 aa, Homo sapiens
  misc_feature: Table A; Target 49238; HLA-C*12:03; MYH4; ENSG00000264424; TAA
FTADEKVAIY

SEQ ID NO: 49239 - protein, 10 aa, Homo sapiens
  misc_feature: Table A; Target 49239; HLA-C*16:01; MYH4; ENSG00000264424; TAA
FTADEKVAIY

SEQ ID NO: 49240 - protein, 10 aa, Homo sapiens
  misc_feature: Table A; Target 49240; HLA-C*16:02; MYH4; ENSG00000264424; TAA
FTADEKVAIY

SEQ ID NO: 49241 - protein, 11 aa, Homo sapiens
  misc_feature: Table A; Target 49241; HLA-A*01:01; MYH4; ENSG00000264424; TAA
FTADEKVAIYK

SEQ ID NO: 49242 - protein, 11 aa, Homo sapiens
  misc_feature: Table A; Target 49242; HLA-A*03:01; MYH4; ENSG00000264424; TAA
FTADEKVAIYK

SEQ ID NO: 49243 - protein, 11 aa, Homo sapiens
  misc_feature: Table A; Target 49243; HLA-A*03:02; MYH4; ENSG00000264424; TAA
FTADEKVAIYK

SEQ ID NO: 49244 - protein, 11 aa, Homo sapiens
  misc_feature: Table A; Target 49244; HLA-A*11:01; MYH4; ENSG00000264424; TAA
FTADEKVAIYK

SEQ ID NO: 49245 - protein, 11 aa, Homo sapiens
  misc_feature: Table A; Target 49245; HLA-A*68:01; MYH4; ENSG00000264424; TAA
FTADEKVAIYK

SEQ ID NO: 49246 - protein, 11 aa, Homo sapiens
  misc_feature: Table A; Target 49246; HLA-A*68:02; MYH4; ENSG00000264424; TAA
FTADEKVAIYK

SEQ ID NO: 49247 - protein, 11 aa, Homo sapiens
  misc_feature: Table A; Target 49247; HLA-B*27:02; MYH4; ENSG00000264424; TAA
FTADEKVAIYK

SEQ ID NO: 49248 - protein, 9 aa, Homo sapiens
  misc_feature: Table A; Target 49248; HLA-A*02:04; MYH4; ENSG00000264424; TAA
FTNEKLQQF

SEQ ID NO: 49249 - protein, 9 aa, Homo sapiens
  misc_feature: Table A; Target 49249; HLA-A*02:07; MYH4; ENSG00000264424; TAA
FTNEKLQQF

SEQ ID NO: 49250 - protein, 9 aa, Homo sapiens
  misc_feature: Table A; Target 49250; HLA-A*23:01; MYH4; ENSG00000264424; TAA
FTNEKLQQF

SEQ ID NO: 49251 - protein, 9 aa, Homo sapiens
  misc_feature: Table A; Target 49251; HLA-A*24:02; MYH4; ENSG00000264424; TAA
FTNEKLQQF

SEQ ID NO: 49252 - protein, 9 aa, Homo sapiens
  misc_feature: Table A; Target 49252; HLA-A*25:01; MYH4; ENSG00000264424; TAA
FTNEKLQQF

SEQ ID NO: 49253 - protein, 9 aa, Homo sapiens
  misc_feature: Table A; Target 49253; HLA-A*26:01; MYH4; ENSG00000264424; TAA
FTNEKLQQF

SEQ ID NO: 49254 - protein, 9 aa, Homo sapiens
  misc_feature: Table A; Target 49254; HLA-A*29:02; MYH4; ENSG00000264424; TAA
FTNEKLQQF

SEQ ID NO: 49255 - protein, 9 aa, Homo sapiens
  misc_feature: Table A; Target 49255; HLA-A*30:02; MYH4; ENSG00000264424; TAA
FTNEKLQQF

SEQ ID NO: 49256 - protein, 9 aa, Homo sapiens
  misc_feature: Table A; Target 49256; HLA-A*31:01; MYH4; ENSG00000264424; TAA
FTNEKLQQF

SEQ ID NO: 49257 - protein, 9 aa, Homo sapiens
  misc_feature: Table A; Target 49257; HLA-A*32:01; MYH4; ENSG00000264424; TAA
FTNEKLQQF

SEQ ID NO: 49258 - protein, 9 aa, Homo sapiens
  misc_feature: Table A; Target 49258; HLA-A*33:01; MYH4; ENSG00000264424; TAA
FTNEKLQQF

SEQ ID NO: 49259 - protein, 9 aa, Homo sapiens
  misc_feature: Table A; Target 49259; HLA-A*33:03; MYH4; ENSG00000264424; TAA
FTNEKLQQF

SEQ ID NO: 49260 - protein, 9 aa, Homo sapiens
  misc_feature: Table A; Target 49260; HLA-B*08:01; MYH4; ENSG00000264424; TAA
FTNEKLQQF

SEQ ID NO: 49261 - protein, 9 aa, Homo sapiens
  misc_feature: Table A; Target 49261; HLA-B*15:01; MYH4; ENSG00000264424; TAA
FTNEKLQQF

SEQ ID NO: 49262 - protein, 9 aa, Homo sapiens
  misc_feature: Table A; Target 49262; HLA-B*46:01; MYH4; ENSG00000264424; TAA
FTNEKLQQF

SEQ ID NO: 49263 - protein, 9 aa, Homo sapiens
  misc_feature: Table A; Target 49263; HLA-B*57:01; MYH4; ENSG00000264424; TAA
FTNEKLQQF

SEQ ID NO: 49264 - protein, 9 aa, Homo sapiens
  misc_feature: Table A; Target 49264; HLA-B*58:01; MYH4; ENSG00000264424; TAA
FTNEKLQQF

SEQ ID NO: 49265 - protein, 9 aa, Homo sapiens
  misc_feature: Table A; Target 49265; HLA-C*01:02; MYH4; ENSG00000264424; TAA
FTNEKLQQF

SEQ ID NO: 49266 - protein, 9 aa, Homo sapiens
  misc_feature: Table A; Target 49266; HLA-C*02:02; MYH4; ENSG00000264424; TAA
FTNEKLQQF

SEQ ID NO: 49267 - protein, 9 aa, Homo sapiens
  misc_feature: Table A; Target 49267; HLA-C*03:03; MYH4; ENSG00000264424; TAA
FTNEKLQQF

SEQ ID NO: 49268 - protein, 9 aa, Homo sapiens
  misc_feature: Table A; Target 49268; HLA-C*03:04; MYH4; ENSG00000264424; TAA
FTNEKLQQF

SEQ ID NO: 49269 - protein, 9 aa, Homo sapiens
  misc_feature: Table A; Target 49269; HLA-C*07:04; MYH4; ENSG00000264424; TAA
FTNEKLQQF

SEQ ID NO: 49270 - protein, 9 aa, Homo sapiens
  misc_feature: Table A; Target 49270; HLA-C*12:03; MYH4; ENSG00000264424; TAA
FTNEKLQQF

SEQ ID NO: 49271 - protein, 9 aa, Homo sapiens
  misc_feature: Table A; Target 49271; HLA-C*14:02; MYH4; ENSG00000264424; TAA
FTNEKLQQF

SEQ ID NO: 49272 - protein, 9 aa, Homo sapiens
  misc_feature: Table A; Target 49272; HLA-C*16:01; MYH4; ENSG00000264424; TAA
FTNEKLQQF

SEQ ID NO: 49273 - protein, 9 aa, Homo sapiens
  misc_feature: Table A; Target 49273; HLA-C*16:02; MYH4; ENSG00000264424; TAA
FTNEKLQQF

SEQ ID NO: 49274 - protein, 9 aa, Homo sapiens
  misc_feature: Table A; Target 49274; HLA-C*16:04; MYH4; ENSG00000264424; TAA
FTNEKLQQF

SEQ ID NO: 49275 - protein, 10 aa, Homo sapiens
  misc_feature: Table A; Target 49275; HLA-A*29:02; MYH4; ENSG00000264424; TAA
FTNEKLQQFF

SEQ ID NO: 49276 - protein, 10 aa, Homo sapiens
  misc_feature: Table A; Target 49276; HLA-A*33:01; MYH4; ENSG00000264424; TAA
FTNEKLQQFF

SEQ ID NO: 49277 - protein, 10 aa, Homo sapiens
  misc_feature: Table A; Target 49277; HLA-B*57:01; MYH4; ENSG00000264424; TAA
FTNEKLQQFF

SEQ ID NO: 49278 - protein, 8 aa, Homo sapiens
  misc_feature: Table A; Target 49278; HLA-B*39:01; MYH4; ENSG00000264424; TAA
FTQQIEEL

SEQ ID NO: 49279 - protein, 8 aa, Homo sapiens
  misc_feature: Table A; Target 49279; HLA-B*46:01; MYH4; ENSG00000264424; TAA
FTQQIEEL

SEQ ID NO: 49280 - protein, 8 aa, Homo sapiens
  misc_feature: Table A; Target 49280; HLA-C*01:02; MYH4; ENSG00000264424; TAA
FTQQIEEL

SEQ ID NO: 49281 - protein, 8 aa, Homo sapiens
  misc_feature: Table A; Target 49281; HLA-C*02:02; MYH4; ENSG00000264424; TAA
FTQQIEEL

SEQ ID NO: 49282 - protein, 8 aa, Homo sapiens
  misc_feature: Table A; Target 49282; HLA-C*03:03; MYH4; ENSG00000264424; TAA
FTQQIEEL

SEQ ID NO: 49283 - protein, 8 aa, Homo sapiens
  misc_feature: Table A; Target 49283; HLA-C*03:04; MYH4; ENSG00000264424; TAA
FTQQIEEL

SEQ ID NO: 49284 - protein, 8 aa, Homo sapiens
  misc_feature: Table A; Target 49284; HLA-C*04:01; MYH4; ENSG00000264424; TAA
FTQQIEEL

SEQ ID NO: 49285 - protein, 8 aa, Homo sapiens
  misc_feature: Table A; Target 49285; HLA-C*05:01; MYH4; ENSG00000264424; TAA
FTQQIEEL

SEQ ID NO: 49286 - protein, 8 aa, Homo sapiens
  misc_feature: Table A; Target 49286; HLA-C*07:04; MYH4; ENSG00000264424; TAA
FTQQIEEL

SEQ ID NO: 49287 - protein, 8 aa, Homo sapiens
  misc_feature: Table A; Target 49287; HLA-C*12:03; MYH4; ENSG00000264424; TAA
FTQQIEEL

SEQ ID NO: 49288 - protein, 8 aa, Homo sapiens
  misc_feature: Table A; Target 49288; HLA-C*14:02; MYH4; ENSG00000264424; TAA
FTQQIEEL

SEQ ID NO: 49289 - protein, 8 aa, Homo sapiens
  misc_feature: Table A; Target 49289; HLA-C*16:01; MYH4; ENSG00000264424; TAA
FTQQIEEL

SEQ ID NO: 49290 - protein, 9 aa, Homo sapiens
  misc_feature: Table A; Target 49290; HLA-A*01:01; MYH4; ENSG00000264424; TAA
FTQQIEELK

SEQ ID NO: 49291 - protein, 9 aa, Homo sapiens
  misc_feature: Table A; Target 49291; HLA-A*03:02; MYH4; ENSG00000264424; TAA
FTQQIEELK

SEQ ID NO: 49292 - protein, 9 aa, Homo sapiens
  misc_feature: Table A; Target 49292; HLA-A*11:01; MYH4; ENSG00000264424; TAA
FTQQIEELK

SEQ ID NO: 49293 - protein, 9 aa, Homo sapiens
  misc_feature: Table A; Target 49293; HLA-A*33:03; MYH4; ENSG00000264424; TAA
FTQQIEELK

SEQ ID NO: 49294 - protein, 9 aa, Homo sapiens
  misc_feature: Table A; Target 49294; HLA-A*68:01; MYH4; ENSG00000264424; TAA
FTQQIEELK

SEQ ID NO: 49295 - protein, 9 aa, Homo sapiens
  misc_feature: Table A; Target 49295; HLA-A*68:02; MYH4; ENSG00000264424; TAA
FTQQIEELK

SEQ ID NO: 49296 - protein, 9 aa, Homo sapiens
  misc_feature: Table A; Target 49296; HLA-B*27:02; MYH4; ENSG00000264424; TAA
FTQQIEELK

SEQ ID NO: 49297 - protein, 10 aa, Homo sapiens
  misc_feature: Table A; Target 49297; HLA-A*31:01; MYH4; ENSG00000264424; TAA
FTQQIEELKR

SEQ ID NO: 49298 - protein, 10 aa, Homo sapiens
  misc_feature: Table A; Target 49298; HLA-A*33:01; MYH4; ENSG00000264424; TAA
FTQQIEELKR

SEQ ID NO: 49299 - protein, 10 aa, Homo sapiens
  misc_feature: Table A; Target 49299; HLA-A*33:03; MYH4; ENSG00000264424; TAA
FTQQIEELKR

SEQ ID NO: 49300 - protein, 10 aa, Homo sapiens
  misc_feature: Table A; Target 49300; HLA-A*68:01; MYH4; ENSG00000264424; TAA
FTQQIEELKR

SEQ ID NO: 49301 - protein, 10 aa, Homo sapiens
  misc_feature: Table A; Target 49301; HLA-B*27:02; MYH4; ENSG00000264424; TAA
FTQQIEELKR

SEQ ID NO: 49302 - protein, 10 aa, Homo sapiens
  misc_feature: Table A; Target 49302; HLA-B*57:01; MYH4; ENSG00000264424; TAA
FTQQIEELKR

SEQ ID NO: 49303 - protein, 10 aa, Homo sapiens
  misc_feature: Table A; Target 49303; HLA-C*07:06; MYH4; ENSG00000264424; TAA
FTQQIEELKR

SEQ ID NO: 49304 - protein, 8 aa, Homo sapiens
  misc_feature: Table A; Target 49304; HLA-A*01:01; MYH4; ENSG00000264424; TAA
FVLEQEEY

SEQ ID NO: 49305 - protein, 8 aa, Homo sapiens
  misc_feature: Table A; Target 49305; HLA-A*29:02; MYH4; ENSG00000264424; TAA
FVLEQEEY

SEQ ID NO: 49306 - protein, 8 aa, Homo sapiens
  misc_feature: Table A; Target 49306; HLA-A*30:02; MYH4; ENSG00000264424; TAA
FVLEQEEY

SEQ ID NO: 49307 - protein, 8 aa, Homo sapiens
  misc_feature: Table A; Target 49307; HLA-B*15:01; MYH4; ENSG00000264424; TAA
FVLEQEEY

SEQ ID NO: 49308 - protein, 8 aa, Homo sapiens
  misc_feature: Table A; Target 49308; HLA-B*15:03; MYH4; ENSG00000264424; TAA
FVLEQEEY

SEQ ID NO: 49309 - protein, 8 aa, Homo sapiens
  misc_feature: Table A; Target 49309; HLA-B*18:01; MYH4; ENSG00000264424; TAA
FVLEQEEY

SEQ ID NO: 49310 - protein, 8 aa, Homo sapiens
  misc_feature: Table A; Target 49310; HLA-B*35:01; MYH4; ENSG00000264424; TAA
FVLEQEEY

SEQ ID NO: 49311 - protein, 8 aa, Homo sapiens
  misc_feature: Table A; Target 49311; HLA-B*39:01; MYH4; ENSG00000264424; TAA
FVLEQEEY

SEQ ID NO: 49312 - protein, 8 aa, Homo sapiens
  misc_feature: Table A; Target 49312; HLA-B*46:01; MYH4; ENSG00000264424; TAA
FVLEQEEY

SEQ ID NO: 49313 - protein, 8 aa, Homo sapiens
  misc_feature: Table A; Target 49313; HLA-C*02:02; MYH4; ENSG00000264424; TAA
FVLEQEEY

SEQ ID NO: 49314 - protein, 8 aa, Homo sapiens
  misc_feature: Table A; Target 49314; HLA-C*03:03; MYH4; ENSG00000264424; TAA
FVLEQEEY

SEQ ID NO: 49315 - protein, 8 aa, Homo sapiens
  misc_feature: Table A; Target 49315; HLA-C*05:01; MYH4; ENSG00000264424; TAA
FVLEQEEY

SEQ ID NO: 49316 - protein, 8 aa, Homo sapiens
  misc_feature: Table A; Target 49316; HLA-C*07:01; MYH4; ENSG00000264424; TAA
FVLEQEEY

SEQ ID NO: 49317 - protein, 8 aa, Homo sapiens
  misc_feature: Table A; Target 49317; HLA-C*07:04; MYH4; ENSG00000264424; TAA
FVLEQEEY

SEQ ID NO: 49318 - protein, 8 aa, Homo sapiens
  misc_feature: Table A; Target 49318; HLA-C*12:03; MYH4; ENSG00000264424; TAA
FVLEQEEY

SEQ ID NO: 49319 - protein, 8 aa, Homo sapiens
  misc_feature: Table A; Target 49319; HLA-C*14:02; MYH4; ENSG00000264424; TAA
FVLEQEEY

SEQ ID NO: 49320 - protein, 8 aa, Homo sapiens
  misc_feature: Table A; Target 49320; HLA-C*16:01; MYH4; ENSG00000264424; TAA
FVLEQEEY

SEQ ID NO: 49321 - protein, 9 aa, Homo sapiens
  misc_feature: Table A; Target 49321; HLA-A*11:01; MYH4; ENSG00000264424; TAA
FVLEQEEYK

SEQ ID NO: 49322 - protein, 9 aa, Homo sapiens
  misc_feature: Table A; Target 49322; HLA-B*27:02; MYH4; ENSG00000264424; TAA
FVLEQEEYK

SEQ ID NO: 49323 - protein, 10 aa, Homo sapiens
  misc_feature: Table A; Target 49323; HLA-A*11:01; MYH4; ENSG00000264424; TAA
FVLEQEEYKK

SEQ ID NO: 49324 - protein, 10 aa, Homo sapiens
  misc_feature: Table A; Target 49324; HLA-B*27:02; MYH4; ENSG00000264424; TAA
FVLEQEEYKK

SEQ ID NO: 49325 - protein, 9 aa, Homo sapiens
  misc_feature: Table A; Target 49325; HLA-A*02:01; MYH4; ENSG00000264424; TAA
FVSQGEITV

SEQ ID NO: 49326 - protein, 9 aa, Homo sapiens
  misc_feature: Table A; Target 49326; HLA-A*02:03; MYH4; ENSG00000264424; TAA
FVSQGEITV

SEQ ID NO: 49327 - protein, 9 aa, Homo sapiens
  misc_feature: Table A; Target 49327; HLA-A*68:02; MYH4; ENSG00000264424; TAA
FVSQGEITV

SEQ ID NO: 49328 - protein, 9 aa, Homo sapiens
  misc_feature: Table A; Target 49328; HLA-B*13:02; MYH4; ENSG00000264424; TAA
FVSQGEITV

SEQ ID NO: 49329 - protein, 9 aa, Homo sapiens
  misc_feature: Table A; Target 49329; HLA-B*35:03; MYH4; ENSG00000264424; TAA
FVSQGEITV

SEQ ID NO: 49330 - protein, 9 aa, Homo sapiens
  misc_feature: Table A; Target 49330; HLA-B*38:01; MYH4; ENSG00000264424; TAA
FVSQGEITV

SEQ ID NO: 49331 - protein, 9 aa, Homo sapiens
  misc_feature: Table A; Target 49331; HLA-B*39:01; MYH4; ENSG00000264424; TAA
FVSQGEITV

SEQ ID NO: 49332 - protein, 9 aa, Homo sapiens
  misc_feature: Table A; Target 49332; HLA-B*51:01; MYH4; ENSG00000264424; TAA
FVSQGEITV

SEQ ID NO: 49333 - protein, 9 aa, Homo sapiens
  misc_feature: Table A; Target 49333; HLA-C*02:02; MYH4; ENSG00000264424; TAA
FVSQGEITV

SEQ ID NO: 49334 - protein, 9 aa, Homo sapiens
  misc_feature: Table A; Target 49334; HLA-C*03:03; MYH4; ENSG00000264424; TAA
FVSQGEITV

SEQ ID NO: 49335 - protein, 9 aa, Homo sapiens
  misc_feature: Table A; Target 49335; HLA-C*03:04; MYH4; ENSG00000264424; TAA
FVSQGEITV

SEQ ID NO: 49336 - protein, 9 aa, Homo sapiens
  misc_feature: Table A; Target 49336; HLA-C*05:01; MYH4; ENSG00000264424; TAA
FVSQGEITV

SEQ ID NO: 49337 - protein, 8 aa, Homo sapiens
  misc_feature: Table A; Target 49337; HLA-B*13:02; MYH4; ENSG00000264424; TAA
FVTKGQTV

SEQ ID NO: 49338 - protein, 8 aa, Homo sapiens
  misc_feature: Table A; Target 49338; HLA-B*39:01; MYH4; ENSG00000264424; TAA
FVTKGQTV

SEQ ID NO: 49339 - protein, 8 aa, Homo sapiens
  misc_feature: Table A; Target 49339; HLA-C*03:03; MYH4; ENSG00000264424; TAA
FVTKGQTV

SEQ ID NO: 49340 - protein, 8 aa, Homo sapiens
  misc_feature: Table A; Target 49340; HLA-C*03:04; MYH4; ENSG00000264424; TAA
FVTKGQTV

SEQ ID NO: 49341 - protein, 9 aa, Homo sapiens
  misc_feature: Table A; Target 49341; HLA-A*01:01; MYH4; ENSG00000264424; TAA
FVVDPKESY

SEQ ID NO: 49342 - protein, 9 aa, Homo sapiens
  misc_feature: Table A; Target 49342; HLA-A*23:01; MYH4; ENSG00000264424; TAA
FVVDPKESY

SEQ ID NO: 49343 - protein, 9 aa, Homo sapiens
  misc_feature: Table A; Target 49343; HLA-A*25:01; MYH4; ENSG00000264424; TAA
FVVDPKESY

SEQ ID NO: 49344 - protein, 9 aa, Homo sapiens
  misc_feature: Table A; Target 49344; HLA-A*26:01; MYH4; ENSG00000264424; TAA
FVVDPKESY

SEQ ID NO: 49345 - protein, 9 aa, Homo sapiens
  misc_feature: Table A; Target 49345; HLA-A*29:02; MYH4; ENSG00000264424; TAA
FVVDPKESY

SEQ ID NO: 49346 - protein, 9 aa, Homo sapiens
  misc_feature: Table A; Target 49346; HLA-A*30:02; MYH4; ENSG00000264424; TAA
FVVDPKESY

SEQ ID NO: 49347 - protein, 9 aa, Homo sapiens
  misc_feature: Table A; Target 49347; HLA-A*32:01; MYH4; ENSG00000264424; TAA
FVVDPKESY

SEQ ID NO: 49348 - protein, 9 aa, Homo sapiens
  misc_feature: Table A; Target 49348; HLA-A*68:01; MYH4; ENSG00000264424; TAA
FVVDPKESY

SEQ ID NO: 49349 - protein, 9 aa, Homo sapiens
  misc_feature: Table A; Target 49349; HLA-B*08:01; MYH4; ENSG00000264424; TAA
FVVDPKESY

SEQ ID NO: 49350 - protein, 9 aa, Homo sapiens
  misc_feature: Table A; Target 49350; HLA-B*15:01; MYH4; ENSG00000264424; TAA
FVVDPKESY

SEQ ID NO: 49351 - protein, 9 aa, Homo sapiens
  misc_feature: Table A; Target 49351; HLA-B*15:03; MYH4; ENSG00000264424; TAA
FVVDPKESY

SEQ ID NO: 49352 - protein, 9 aa, Homo sapiens
  misc_feature: Table A; Target 49352; HLA-B*18:01; MYH4; ENSG00000264424; TAA
FVVDPKESY

SEQ ID NO: 49353 - protein, 9 aa, Homo sapiens
  misc_feature: Table A; Target 49353; HLA-B*35:01; MYH4; ENSG00000264424; TAA
FVVDPKESY

SEQ ID NO: 49354 - protein, 9 aa, Homo sapiens
  misc_feature: Table A; Target 49354; HLA-B*35:03; MYH4; ENSG00000264424; TAA
FVVDPKESY

SEQ ID NO: 49355 - protein, 9 aa, Homo sapiens
  misc_feature: Table A; Target 49355; HLA-B*39:01; MYH4; ENSG00000264424; TAA
FVVDPKESY

SEQ ID NO: 49356 - protein, 9 aa, Homo sapiens
  misc_feature: Table A; Target 49356; HLA-B*44:03; MYH4; ENSG00000264424; TAA
FVVDPKESY

SEQ ID NO: 49357 - protein, 9 aa, Homo sapiens
  misc_feature: Table A; Target 49357; HLA-B*46:01; MYH4; ENSG00000264424; TAA
FVVDPKESY

SEQ ID NO: 49358 - protein, 9 aa, Homo sapiens
  misc_feature: Table A; Target 49358; HLA-B*54:01; MYH4; ENSG00000264424; TAA
FVVDPKESY

SEQ ID NO: 49359 - protein, 9 aa, Homo sapiens
  misc_feature: Table A; Target 49359; HLA-B*55:01; MYH4; ENSG00000264424; TAA
FVVDPKESY

SEQ ID NO: 49360 - protein, 9 aa, Homo sapiens
  misc_feature: Table A; Target 49360; HLA-B*57:01; MYH4; ENSG00000264424; TAA
FVVDPKESY

SEQ ID NO: 49361 - protein, 9 aa, Homo sapiens
  misc_feature: Table A; Target 49361; HLA-B*58:01; MYH4; ENSG00000264424; TAA
FVVDPKESY

SEQ ID NO: 49362 - protein, 9 aa, Homo sapiens
  misc_feature: Table A; Target 49362; HLA-C*01:02; MYH4; ENSG00000264424; TAA
FVVDPKESY

SEQ ID NO: 49363 - protein, 9 aa, Homo sapiens
  misc_feature: Table A; Target 49363; HLA-C*02:02; MYH4; ENSG00000264424; TAA
FVVDPKESY

SEQ ID NO: 49364 - protein, 9 aa, Homo sapiens
  misc_feature: Table A; Target 49364; HLA-C*03:03; MYH4; ENSG00000264424; TAA
FVVDPKESY

SEQ ID NO: 49365 - protein, 9 aa, Homo sapiens
  misc_feature: Table A; Target 49365; HLA-C*03:04; MYH4; ENSG00000264424; TAA
FVVDPKESY

SEQ ID NO: 49366 - protein, 9 aa, Homo sapiens
  misc_feature: Table A; Target 49366; HLA-C*05:01; MYH4; ENSG00000264424; TAA
FVVDPKESY

SEQ ID NO: 49367 - protein, 9 aa, Homo sapiens
  misc_feature: Table A; Target 49367; HLA-C*07:04; MYH4; ENSG00000264424; TAA
FVVDPKESY

SEQ ID NO: 49368 - protein, 9 aa, Homo sapiens
  misc_feature: Table A; Target 49368; HLA-C*07:06; MYH4; ENSG00000264424; TAA
FVVDPKESY

SEQ ID NO: 49369 - protein, 9 aa, Homo sapiens
  misc_feature: Table A; Target 49369; HLA-C*12:03; MYH4; ENSG00000264424; TAA
FVVDPKESY

SEQ ID NO: 49370 - protein, 9 aa, Homo sapiens
  misc_feature: Table A; Target 49370; HLA-C*14:02; MYH4; ENSG00000264424; TAA
FVVDPKESY

SEQ ID NO: 49371 - protein, 9 aa, Homo sapiens
  misc_feature: Table A; Target 49371; HLA-C*16:01; MYH4; ENSG00000264424; TAA
FVVDPKESY

SEQ ID NO: 49372 - protein, 9 aa, Homo sapiens
  misc_feature: Table A; Target 49372; HLA-C*16:02; MYH4; ENSG00000264424; TAA
FVVDPKESY

SEQ ID NO: 49373 - protein, 9 aa, Homo sapiens
  misc_feature: Table A; Target 49373; HLA-C*16:04; MYH4; ENSG00000264424; TAA
FVVDPKESY

SEQ ID NO: 49374 - protein, 10 aa, Homo sapiens
  misc_feature: Table A; Target 49374; HLA-A*01:01; MYH4; ENSG00000264424; TAA
FVVDPKESYV

SEQ ID NO: 49375 - protein, 10 aa, Homo sapiens
  misc_feature: Table A; Target 49375; HLA-A*02:01; MYH4; ENSG00000264424; TAA
FVVDPKESYV

SEQ ID NO: 49376 - protein, 10 aa, Homo sapiens
  misc_feature: Table A; Target 49376; HLA-A*02:03; MYH4; ENSG00000264424; TAA
FVVDPKESYV

SEQ ID NO: 49377 - protein, 10 aa, Homo sapiens
  misc_feature: Table A; Target 49377; HLA-A*02:04; MYH4; ENSG00000264424; TAA
FVVDPKESYV

SEQ ID NO: 49378 - protein, 10 aa, Homo sapiens
  misc_feature: Table A; Target 49378; HLA-A*02:07; MYH4; ENSG00000264424; TAA
FVVDPKESYV

SEQ ID NO: 49379 - protein, 10 aa, Homo sapiens
  misc_feature: Table A; Target 49379; HLA-A*25:01; MYH4; ENSG00000264424; TAA
FVVDPKESYV

SEQ ID NO: 49380 - protein, 10 aa, Homo sapiens
  misc_feature: Table A; Target 49380; HLA-A*26:01; MYH4; ENSG00000264424; TAA
FVVDPKESYV

SEQ ID NO: 49381 - protein, 10 aa, Homo sapiens
  misc_feature: Table A; Target 49381; HLA-A*68:02; MYH4; ENSG00000264424; TAA
FVVDPKESYV

SEQ ID NO: 49382 - protein, 10 aa, Homo sapiens
  misc_feature: Table A; Target 49382; HLA-B*27:05; MYH4; ENSG00000264424; TAA
FVVDPKESYV

SEQ ID NO: 49383 - protein, 10 aa, Homo sapiens
  misc_feature: Table A; Target 49383; HLA-C*02:02; MYH4; ENSG00000264424; TAA
FVVDPKESYV

SEQ ID NO: 49384 - protein, 10 aa, Homo sapiens
  misc_feature: Table A; Target 49384; HLA-C*03:04; MYH4; ENSG00000264424; TAA
FVVDPKESYV

SEQ ID NO: 49385 - protein, 10 aa, Homo sapiens
  misc_feature: Table A; Target 49385; HLA-C*05:01; MYH4; ENSG00000264424; TAA
FVVDPKESYV

SEQ ID NO: 49386 - protein, 10 aa, Homo sapiens
  misc_feature: Table A; Target 49386; HLA-C*12:03; MYH4; ENSG00000264424; TAA
FVVDPKESYV

SEQ ID NO: 49387 - protein, 11 aa, Homo sapiens
  misc_feature: Table A; Target 49387; HLA-A*03:02; MYH4; ENSG00000264424; TAA
FVVDPKESYVK

SEQ ID NO: 49388 - protein, 11 aa, Homo sapiens
  misc_feature: Table A; Target 49388; HLA-A*11:01; MYH4; ENSG00000264424; TAA
FVVDPKESYVK

SEQ ID NO: 49389 - protein, 11 aa, Homo sapiens
  misc_feature: Table A; Target 49389; HLA-A*68:01; MYH4; ENSG00000264424; TAA
FVVDPKESYVK

SEQ ID NO: 49390 - protein, 11 aa, Homo sapiens
  misc_feature: Table A; Target 49390; HLA-A*68:02; MYH4; ENSG00000264424; TAA
FVVDPKESYVK

SEQ ID NO: 49391 - protein, 11 aa, Homo sapiens
  misc_feature: Table A; Target 49391; HLA-C*07:06; MYH4; ENSG00000264424; TAA
FVVDPKESYVK

SEQ ID NO: 49392 - protein, 9 aa, Homo sapiens
  misc_feature: Table A; Target 49392; HLA-A*03:01; MYH4; ENSG00000264424; TAA
GAGKTVNTK

SEQ ID NO: 49393 - protein, 9 aa, Homo sapiens
  misc_feature: Table A; Target 49393; HLA-A*03:02; MYH4; ENSG00000264424; TAA
GAGKTVNTK

SEQ ID NO: 49394 - protein, 9 aa, Homo sapiens
  misc_feature: Table A; Target 49394; HLA-A*11:01; MYH4; ENSG00000264424; TAA
GAGKTVNTK

SEQ ID NO: 49395 - protein, 9 aa, Homo sapiens
  misc_feature: Table A; Target 49395; HLA-C*07:06; MYH4; ENSG00000264424; TAA
GAGKTVNTK

SEQ ID NO: 49396 - protein, 10 aa, Homo sapiens
  misc_feature: Table A; Target 49396; HLA-A*03:02; MYH4; ENSG00000264424; TAA
GALAKAIYEK

SEQ ID NO: 49397 - protein, 10 aa, Homo sapiens
  misc_feature: Table A; Target 49397; HLA-A*11:01; MYH4; ENSG00000264424; TAA
GALAKAIYEK

SEQ ID NO: 49398 - protein, 10 aa, Homo sapiens
  misc_feature: Table A; Target 49398; HLA-B*27:02; MYH4; ENSG00000264424; TAA
GALAKAIYEK

SEQ ID NO: 49399 - protein, 9 aa, Homo sapiens
  misc_feature: Table A; Target 49399; HLA-A*02:01; MYH4; ENSG00000264424; TAA
GAMEHELVL

SEQ ID NO: 49400 - protein, 9 aa, Homo sapiens
  misc_feature: Table A; Target 49400; HLA-A*23:01; MYH4; ENSG00000264424; TAA
GAMEHELVL

SEQ ID NO: 49401 - protein, 9 aa, Homo sapiens
  misc_feature: Table A; Target 49401; HLA-A*30:01; MYH4; ENSG00000264424; TAA
GAMEHELVL

SEQ ID NO: 49402 - protein, 9 aa, Homo sapiens
  misc_feature: Table A; Target 49402; HLA-B*07:02; MYH4; ENSG00000264424; TAA
GAMEHELVL

SEQ ID NO: 49403 - protein, 9 aa, Homo sapiens
  misc_feature: Table A; Target 49403; HLA-B*13:02; MYH4; ENSG00000264424; TAA
GAMEHELVL

SEQ ID NO: 49404 - protein, 9 aa, Homo sapiens
  misc_feature: Table A; Target 49404; HLA-B*15:01; MYH4; ENSG00000264424; TAA
GAMEHELVL

SEQ ID NO: 49405 - protein, 9 aa, Homo sapiens
  misc_feature: Table A; Target 49405; HLA-B*15:03; MYH4; ENSG00000264424; TAA
GAMEHELVL

SEQ ID NO: 49406 - protein, 9 aa, Homo sapiens
  misc_feature: Table A; Target 49406; HLA-B*35:03; MYH4; ENSG00000264424; TAA
GAMEHELVL

SEQ ID NO: 49407 - protein, 9 aa, Homo sapiens
  misc_feature: Table A; Target 49407; HLA-B*38:01; MYH4; ENSG00000264424; TAA
GAMEHELVL

SEQ ID NO: 49408 - protein, 9 aa, Homo sapiens
  misc_feature: Table A; Target 49408; HLA-B*39:01; MYH4; ENSG00000264424; TAA
GAMEHELVL

SEQ ID NO: 49409 - protein, 9 aa, Homo sapiens
  misc_feature: Table A; Target 49409; HLA-B*40:01; MYH4; ENSG00000264424; TAA
GAMEHELVL

SEQ ID NO: 49410 - protein, 9 aa, Homo sapiens
  misc_feature: Table A; Target 49410; HLA-B*46:01; MYH4; ENSG00000264424; TAA
GAMEHELVL

SEQ ID NO: 49411 - protein, 9 aa, Homo sapiens
  misc_feature: Table A; Target 49411; HLA-B*51:01; MYH4; ENSG00000264424; TAA
GAMEHELVL

SEQ ID NO: 49412 - protein, 9 aa, Homo sapiens
  misc_feature: Table A; Target 49412; HLA-B*55:01; MYH4; ENSG00000264424; TAA
GAMEHELVL

SEQ ID NO: 49413 - protein, 9 aa, Homo sapiens
  misc_feature: Table A; Target 49413; HLA-B*58:01; MYH4; ENSG00000264424; TAA
GAMEHELVL

SEQ ID NO: 49414 - protein, 9 aa, Homo sapiens
  misc_feature: Table A; Target 49414; HLA-C*02:02; MYH4; ENSG00000264424; TAA
GAMEHELVL

SEQ ID NO: 49415 - protein, 9 aa, Homo sapiens
  misc_feature: Table A; Target 49415; HLA-C*03:03; MYH4; ENSG00000264424; TAA
GAMEHELVL

SEQ ID NO: 49416 - protein, 9 aa, Homo sapiens
  misc_feature: Table A; Target 49416; HLA-C*03:04; MYH4; ENSG00000264424; TAA
GAMEHELVL

SEQ ID NO: 49417 - protein, 9 aa, Homo sapiens
  misc_feature: Table A; Target 49417; HLA-C*05:01; MYH4; ENSG00000264424; TAA
GAMEHELVL

SEQ ID NO: 49418 - protein, 9 aa, Homo sapiens
  misc_feature: Table A; Target 49418; HLA-C*07:04; MYH4; ENSG00000264424; TAA
GAMEHELVL

SEQ ID NO: 49419 - protein, 9 aa, Homo sapiens
  misc_feature: Table A; Target 49419; HLA-C*12:03; MYH4; ENSG00000264424; TAA
GAMEHELVL

SEQ ID NO: 49420 - protein, 9 aa, Homo sapiens
  misc_feature: Table A; Target 49420; HLA-C*14:02; MYH4; ENSG00000264424; TAA
GAMEHELVL

SEQ ID NO: 49421 - protein, 9 aa, Homo sapiens
  misc_feature: Table A; Target 49421; HLA-C*16:01; MYH4; ENSG00000264424; TAA
GAMEHELVL

SEQ ID NO: 49422 - protein, 9 aa, Homo sapiens
  misc_feature: Table A; Target 49422; HLA-C*16:02; MYH4; ENSG00000264424; TAA
GAMEHELVL

SEQ ID NO: 49423 - protein, 9 aa, Homo sapiens
  misc_feature: Table A; Target 49423; HLA-C*16:04; MYH4; ENSG00000264424; TAA
GAMEHELVL

SEQ ID NO: 49424 - protein, 9 aa, Homo sapiens
  misc_feature: Table A; Target 49424; HLA-B*54:01; MYH4; ENSG00000264424; TAA
GATGKLASA

SEQ ID NO: 49425 - protein, 9 aa, Homo sapiens
  misc_feature: Table A; Target 49425; HLA-B*56:01; MYH4; ENSG00000264424; TAA
GATGKLASA

SEQ ID NO: 49426 - protein, 9 aa, Homo sapiens
  misc_feature: Table A; Target 49426; HLA-C*16:02; MYH4; ENSG00000264424; TAA
GATGKLASA

SEQ ID NO: 49427 - protein, 9 aa, Homo sapiens
  misc_feature: Table A; Target 49427; HLA-A*30:01; MYH4; ENSG00000264424; TAA
GATSAQIEM

SEQ ID NO: 49428 - protein, 9 aa, Homo sapiens
  misc_feature: Table A; Target 49428; HLA-B*07:02; MYH4; ENSG00000264424; TAA
GATSAQIEM

SEQ ID NO: 49429 - protein, 9 aa, Homo sapiens
  misc_feature: Table A; Target 49429; HLA-B*13:02; MYH4; ENSG00000264424; TAA
GATSAQIEM

SEQ ID NO: 49430 - protein, 9 aa, Homo sapiens
  misc_feature: Table A; Target 49430; HLA-B*15:01; MYH4; ENSG00000264424; TAA
GATSAQIEM

SEQ ID NO: 49431 - protein, 9 aa, Homo sapiens
  misc_feature: Table A; Target 49431; HLA-B*15:03; MYH4; ENSG00000264424; TAA
GATSAQIEM

SEQ ID NO: 49432 - protein, 9 aa, Homo sapiens
  misc_feature: Table A; Target 49432; HLA-B*27:05; MYH4; ENSG00000264424; TAA
GATSAQIEM

SEQ ID NO: 49433 - protein, 9 aa, Homo sapiens
  misc_feature: Table A; Target 49433; HLA-B*35:01; MYH4; ENSG00000264424; TAA
GATSAQIEM

SEQ ID NO: 49434 - protein, 9 aa, Homo sapiens
  misc_feature: Table A; Target 49434; HLA-B*35:03; MYH4; ENSG00000264424; TAA
GATSAQIEM

SEQ ID NO: 49435 - protein, 9 aa, Homo sapiens
  misc_feature: Table A; Target 49435; HLA-B*39:01; MYH4; ENSG00000264424; TAA
GATSAQIEM

SEQ ID NO: 49436 - protein, 9 aa, Homo sapiens
  misc_feature: Table A; Target 49436; HLA-B*40:01; MYH4; ENSG00000264424; TAA
GATSAQIEM

SEQ ID NO: 49437 - protein, 9 aa, Homo sapiens
  misc_feature: Table A; Target 49437; HLA-B*46:01; MYH4; ENSG00000264424; TAA
GATSAQIEM

SEQ ID NO: 49438 - protein, 9 aa, Homo sapiens
  misc_feature: Table A; Target 49438; HLA-B*55:01; MYH4; ENSG00000264424; TAA
GATSAQIEM

SEQ ID NO: 49439 - protein, 9 aa, Homo sapiens
  misc_feature: Table A; Target 49439; HLA-B*58:01; MYH4; ENSG00000264424; TAA
GATSAQIEM

SEQ ID NO: 49440 - protein, 9 aa, Homo sapiens
  misc_feature: Table A; Target 49440; HLA-C*01:02; MYH4; ENSG00000264424; TAA
GATSAQIEM

SEQ ID NO: 49441 - protein, 9 aa, Homo sapiens
  misc_feature: Table A; Target 49441; HLA-C*02:02; MYH4; ENSG00000264424; TAA
GATSAQIEM

SEQ ID NO: 49442 - protein, 9 aa, Homo sapiens
  misc_feature: Table A; Target 49442; HLA-C*03:03; MYH4; ENSG00000264424; TAA
GATSAQIEM

SEQ ID NO: 49443 - protein, 9 aa, Homo sapiens
  misc_feature: Table A; Target 49443; HLA-C*03:04; MYH4; ENSG00000264424; TAA
GATSAQIEM

SEQ ID NO: 49444 - protein, 9 aa, Homo sapiens
  misc_feature: Table A; Target 49444; HLA-C*07:04; MYH4; ENSG00000264424; TAA
GATSAQIEM

SEQ ID NO: 49445 - protein, 9 aa, Homo sapiens
  misc_feature: Table A; Target 49445; HLA-C*07:06; MYH4; ENSG00000264424; TAA
GATSAQIEM

SEQ ID NO: 49446 - protein, 9 aa, Homo sapiens
  misc_feature: Table A; Target 49446; HLA-C*12:03; MYH4; ENSG00000264424; TAA
GATSAQIEM

SEQ ID NO: 49447 - protein, 9 aa, Homo sapiens
  misc_feature: Table A; Target 49447; HLA-C*16:01; MYH4; ENSG00000264424; TAA
GATSAQIEM

SEQ ID NO: 49448 - protein, 9 aa, Homo sapiens
  misc_feature: Table A; Target 49448; HLA-C*16:02; MYH4; ENSG00000264424; TAA
GATSAQIEM

SEQ ID NO: 49449 - protein, 9 aa, Homo sapiens
  misc_feature: Table A; Target 49449; HLA-C*16:04; MYH4; ENSG00000264424; TAA
GATSAQIEM

SEQ ID NO: 49450 - protein, 11 aa, Homo sapiens
  misc_feature: Table A; Target 49450; HLA-A*03:01; MYH4; ENSG00000264424; TAA
GATSAQIEMNK

SEQ ID NO: 49451 - protein, 11 aa, Homo sapiens
  misc_feature: Table A; Target 49451; HLA-A*03:02; MYH4; ENSG00000264424; TAA
GATSAQIEMNK

SEQ ID NO: 49452 - protein, 11 aa, Homo sapiens
  misc_feature: Table A; Target 49452; HLA-A*11:01; MYH4; ENSG00000264424; TAA
GATSAQIEMNK

SEQ ID NO: 49453 - protein, 11 aa, Homo sapiens
  misc_feature: Table A; Target 49453; HLA-B*27:02; MYH4; ENSG00000264424; TAA
GATSAQIEMNK

SEQ ID NO: 49454 - protein, 11 aa, Homo sapiens
  misc_feature: Table A; Target 49454; HLA-B*27:05; MYH4; ENSG00000264424; TAA
GATSAQIEMNK

SEQ ID NO: 49455 - protein, 11 aa, Homo sapiens
  misc_feature: Table A; Target 49455; HLA-C*07:06; MYH4; ENSG00000264424; TAA
GATSAQIEMNK

SEQ ID NO: 49456 - protein, 10 aa, Homo sapiens
  misc_feature: Table A; Target 49456; HLA-B*40:01; MYH4; ENSG00000264424; TAA
GDLNEMEIQL

SEQ ID NO: 49457 - protein, 9 aa, Homo sapiens
  misc_feature: Table A; Target 49457; HLA-A*11:01; MYH4; ENSG00000264424; TAA
GEAAPFLRK

SEQ ID NO: 49458 - protein, 9 aa, Homo sapiens
  misc_feature: Table A; Target 49458; HLA-B*27:05; MYH4; ENSG00000264424; TAA
GEAAPFLRK

SEQ ID NO: 49459 - protein, 9 aa, Homo sapiens
  misc_feature: Table A; Target 49459; HLA-B*44:02; MYH4; ENSG00000264424; TAA
GEAAPFLRK

SEQ ID NO: 49460 - protein, 9 aa, Homo sapiens
  misc_feature: Table A; Target 49460; HLA-B*44:03; MYH4; ENSG00000264424; TAA
GEAAPFLRK

SEQ ID NO: 49461 - protein, 9 aa, Homo sapiens
  misc_feature: Table A; Target 49461; HLA-B*49:01; MYH4; ENSG00000264424; TAA
GEAAPFLRK

SEQ ID NO: 49462 - protein, 8 aa, Homo sapiens
  misc_feature: Table A; Target 49462; HLA-A*30:01; MYH4; ENSG00000264424; TAA
GEITVPSI

SEQ ID NO: 49463 - protein, 8 aa, Homo sapiens
  misc_feature: Table A; Target 49463; HLA-B*13:02; MYH4; ENSG00000264424; TAA
GEITVPSI

SEQ ID NO: 49464 - protein, 8 aa, Homo sapiens
  misc_feature: Table A; Target 49464; HLA-B*18:01; MYH4; ENSG00000264424; TAA
GEITVPSI

SEQ ID NO: 49465 - protein, 8 aa, Homo sapiens
  misc_feature: Table A; Target 49465; HLA-B*37:01; MYH4; ENSG00000264424; TAA
GEITVPSI

SEQ ID NO: 49466 - protein, 8 aa, Homo sapiens
  misc_feature: Table A; Target 49466; HLA-B*40:01; MYH4; ENSG00000264424; TAA
GEITVPSI

SEQ ID NO: 49467 - protein, 8 aa, Homo sapiens
  misc_feature: Table A; Target 49467; HLA-B*40:02; MYH4; ENSG00000264424; TAA
GEITVPSI

SEQ ID NO: 49468 - protein, 8 aa, Homo sapiens
  misc_feature: Table A; Target 49468; HLA-B*44:02; MYH4; ENSG00000264424; TAA
GEITVPSI

SEQ ID NO: 49469 - protein, 8 aa, Homo sapiens
  misc_feature: Table A; Target 49469; HLA-B*44:03; MYH4; ENSG00000264424; TAA
GEITVPSI

SEQ ID NO: 49470 - protein, 8 aa, Homo sapiens
  misc_feature: Table A; Target 49470; HLA-B*49:01; MYH4; ENSG00000264424; TAA
GEITVPSI

SEQ ID NO: 49471 - protein, 10 aa, Homo sapiens
  misc_feature: Table A; Target 49471; HLA-A*30:01; MYH4; ENSG00000264424; TAA
GEMEDIVQEA

SEQ ID NO: 49472 - protein, 10 aa, Homo sapiens
  misc_feature: Table A; Target 49472; HLA-B*40:01; MYH4; ENSG00000264424; TAA
GEMEDIVQEA

SEQ ID NO: 49473 - protein, 10 aa, Homo sapiens
  misc_feature: Table A; Target 49473; HLA-B*49:01; MYH4; ENSG00000264424; TAA
GEMEDIVQEA

SEQ ID NO: 49474 - protein, 10 aa, Homo sapiens
  misc_feature: Table A; Target 49474; HLA-A*30:01; MYH4; ENSG00000264424; TAA
GEQIDSLQRV

SEQ ID NO: 49475 - protein, 10 aa, Homo sapiens
  misc_feature: Table A; Target 49475; HLA-B*40:01; MYH4; ENSG00000264424; TAA
GEQIDSLQRV

SEQ ID NO: 49476 - protein, 10 aa, Homo sapiens
  misc_feature: Table A; Target 49476; HLA-B*40:02; MYH4; ENSG00000264424; TAA
GEQIDSLQRV

SEQ ID NO: 49477 - protein, 10 aa, Homo sapiens
  misc_feature: Table A; Target 49477; HLA-B*44:02; MYH4; ENSG00000264424; TAA
GEQIDSLQRV

SEQ ID NO: 49478 - protein, 10 aa, Homo sapiens
  misc_feature: Table A; Target 49478; HLA-B*49:01; MYH4; ENSG00000264424; TAA
GEQIDSLQRV

SEQ ID NO: 49479 - protein, 11 aa, Homo sapiens
  misc_feature: Table A; Target 49479; HLA-B*44:02; MYH4; ENSG00000264424; TAA
GEQIDSLQRVK

SEQ ID NO: 49480 - protein, 9 aa, Homo sapiens
  misc_feature: Table A; Target 49480; HLA-A*30:01; MYH4; ENSG00000264424; TAA
GESGAGKTV

SEQ ID NO: 49481 - protein, 9 aa, Homo sapiens
  misc_feature: Table A; Target 49481; HLA-B*13:02; MYH4; ENSG00000264424; TAA
GESGAGKTV

SEQ ID NO: 49482 - protein, 9 aa, Homo sapiens
  misc_feature: Table A; Target 49482; HLA-B*37:01; MYH4; ENSG00000264424; TAA
GESGAGKTV

SEQ ID NO: 49483 - protein, 9 aa, Homo sapiens
  misc_feature: Table A; Target 49483; HLA-B*40:01; MYH4; ENSG00000264424; TAA
GESGAGKTV

SEQ ID NO: 49484 - protein, 9 aa, Homo sapiens
  misc_feature: Table A; Target 49484; HLA-B*40:02; MYH4; ENSG00000264424; TAA
GESGAGKTV

SEQ ID NO: 49485 - protein, 9 aa, Homo sapiens
  misc_feature: Table A; Target 49485; HLA-B*44:02; MYH4; ENSG00000264424; TAA
GESGAGKTV

SEQ ID NO: 49486 - protein, 9 aa, Homo sapiens
  misc_feature: Table A; Target 49486; HLA-B*44:03; MYH4; ENSG00000264424; TAA
GESGAGKTV

SEQ ID NO: 49487 - protein, 9 aa, Homo sapiens
  misc_feature: Table A; Target 49487; HLA-B*49:01; MYH4; ENSG00000264424; TAA
GESGAGKTV

SEQ ID NO: 49488 - protein, 9 aa, Homo sapiens
  misc_feature: Table A; Target 49488; HLA-C*02:02; MYH4; ENSG00000264424; TAA
GESGAGKTV

SEQ ID NO: 49489 - protein, 9 aa, Homo sapiens
  misc_feature: Table A; Target 49489; HLA-C*16:02; MYH4; ENSG00000264424; TAA
GESGAGKTV

SEQ ID NO: 49490 - protein, 9 aa, Homo sapiens
  misc_feature: Table A; Target 49490; HLA-C*16:04; MYH4; ENSG00000264424; TAA
GESGAGKTV

SEQ ID NO: 49491 - protein, 11 aa, Homo sapiens
  misc_feature: Table A; Target 49491; HLA-B*40:01; MYH4; ENSG00000264424; TAA
GESGAGKTVNT

SEQ ID NO: 49492 - protein, 9 aa, Homo sapiens
  misc_feature: Table A; Target 49492; HLA-A*31:01; MYH4; ENSG00000264424; TAA
GFLMRVEFR

SEQ ID NO: 49493 - protein, 10 aa, Homo sapiens
  misc_feature: Table A; Target 49493; HLA-B*39:01; MYH4; ENSG00000264424; TAA
GGATSAQIEM

SEQ ID NO: 49494 - protein, 9 aa, Homo sapiens
  misc_feature: Table A; Target 49494; HLA-B*08:01; MYH4; ENSG00000264424; TAA
GGKKKGSSF

SEQ ID NO: 49495 - protein, 9 aa, Homo sapiens
  misc_feature: Table A; Target 49495; HLA-B*15:03; MYH4; ENSG00000264424; TAA
GKIEDEQAL

SEQ ID NO: 49496 - protein, 9 aa, Homo sapiens
  misc_feature: Table A; Target 49496; HLA-B*38:01; MYH4; ENSG00000264424; TAA
GKIEDEQAL

SEQ ID NO: 49497 - protein, 9 aa, Homo sapiens
  misc_feature: Table A; Target 49497; HLA-B*39:01; MYH4; ENSG00000264424; TAA
GKIEDEQAL

SEQ ID NO: 49498 - protein, 9 aa, Homo sapiens
  misc_feature: Table A; Target 49498; HLA-B*40:01; MYH4; ENSG00000264424; TAA
GKIEDEQAL

SEQ ID NO: 49499 - protein, 8 aa, Homo sapiens
  misc_feature: Table A; Target 49499; HLA-B*15:03; MYH4; ENSG00000264424; TAA
GKKKGSSF

SEQ ID NO: 49500 - protein, 11 aa, Homo sapiens
  misc_feature: Table A; Target 49500; HLA-B*15:03; MYH4; ENSG00000264424; TAA
GKLASADIETY

SEQ ID NO: 49501 - protein, 9 aa, Homo sapiens
  misc_feature: Table A; Target 49501; HLA-B*15:03; MYH4; ENSG00000264424; TAA
GKPEAHFSL

SEQ ID NO: 49502 - protein, 9 aa, Homo sapiens
  misc_feature: Table A; Target 49502; HLA-B*13:02; MYH4; ENSG00000264424; TAA
GKQAFTQQI

SEQ ID NO: 49503 - protein, 9 aa, Homo sapiens
  misc_feature: Table A; Target 49503; HLA-B*15:03; MYH4; ENSG00000264424; TAA
GKVTAKTEA

SEQ ID NO: 49504 - protein, 8 aa, Homo sapiens
  misc_feature: Table A; Target 49504; HLA-A*03:01; MYH4; ENSG00000264424; TAA
GLDETIAK

SEQ ID NO: 49505 - protein, 8 aa, Homo sapiens
  misc_feature: Table A; Target 49505; HLA-A*03:02; MYH4; ENSG00000264424; TAA
GLDETIAK

SEQ ID NO: 49506 - protein, 9 aa, Homo sapiens
  misc_feature: Table A; Target 49506; HLA-A*01:01; MYH4; ENSG00000264424; TAA
GLDETIAKL

SEQ ID NO: 49507 - protein, 9 aa, Homo sapiens
  misc_feature: Table A; Target 49507; HLA-A*02:01; MYH4; ENSG00000264424; TAA
GLDETIAKL

SEQ ID NO: 49508 - protein, 9 aa, Homo sapiens
  misc_feature: Table A; Target 49508; HLA-A*02:03; MYH4; ENSG00000264424; TAA
GLDETIAKL

SEQ ID NO: 49509 - protein, 9 aa, Homo sapiens
  misc_feature: Table A; Target 49509; HLA-A*02:04; MYH4; ENSG00000264424; TAA
GLDETIAKL

SEQ ID NO: 49510 - protein, 9 aa, Homo sapiens
  misc_feature: Table A; Target 49510; HLA-A*02:07; MYH4; ENSG00000264424; TAA
GLDETIAKL

SEQ ID NO: 49511 - protein, 9 aa, Homo sapiens
  misc_feature: Table A; Target 49511; HLA-A*03:02; MYH4; ENSG00000264424; TAA
GLDETIAKL

SEQ ID NO: 49512 - protein, 9 aa, Homo sapiens
  misc_feature: Table A; Target 49512; HLA-A*30:01; MYH4; ENSG00000264424; TAA
GLDETIAKL

SEQ ID NO: 49513 - protein, 9 aa, Homo sapiens
  misc_feature: Table A; Target 49513; HLA-A*32:01; MYH4; ENSG00000264424; TAA
GLDETIAKL

SEQ ID NO: 49514 - protein, 9 aa, Homo sapiens
  misc_feature: Table A; Target 49514; HLA-B*13:02; MYH4; ENSG00000264424; TAA
GLDETIAKL

SEQ ID NO: 49515 - protein, 9 aa, Homo sapiens
  misc_feature: Table A; Target 49515; HLA-B*27:05; MYH4; ENSG00000264424; TAA
GLDETIAKL

SEQ ID NO: 49516 - protein, 9 aa, Homo sapiens
  misc_feature: Table A; Target 49516; HLA-B*35:03; MYH4; ENSG00000264424; TAA
GLDETIAKL

SEQ ID NO: 49517 - protein, 9 aa, Homo sapiens
  misc_feature: Table A; Target 49517; HLA-B*38:01; MYH4; ENSG00000264424; TAA
GLDETIAKL

SEQ ID NO: 49518 - protein, 9 aa, Homo sapiens
  misc_feature: Table A; Target 49518; HLA-B*40:01; MYH4; ENSG00000264424; TAA
GLDETIAKL

SEQ ID NO: 49519 - protein, 9 aa, Homo sapiens
  misc_feature: Table A; Target 49519; HLA-B*55:01; MYH4; ENSG00000264424; TAA
GLDETIAKL

SEQ ID NO: 49520 - protein, 9 aa, Homo sapiens
  misc_feature: Table A; Target 49520; HLA-C*04:01; MYH4; ENSG00000264424; TAA
GLDETIAKL

SEQ ID NO: 49521 - protein, 9 aa, Homo sapiens
  misc_feature: Table A; Target 49521; HLA-C*05:01; MYH4; ENSG00000264424; TAA
GLDETIAKL

SEQ ID NO: 49522 - protein, 9 aa, Homo sapiens
  misc_feature: Table A; Target 49522; HLA-C*07:04; MYH4; ENSG00000264424; TAA
GLDETIAKL

SEQ ID NO: 49523 - protein, 11 aa, Homo sapiens
  misc_feature: Table A; Target 49523; HLA-A*01:01; MYH4; ENSG00000264424; TAA
GLDETIAKLTK

SEQ ID NO: 49524 - protein, 11 aa, Homo sapiens
  misc_feature: Table A; Target 49524; HLA-A*02:07; MYH4; ENSG00000264424; TAA
GLDETIAKLTK

SEQ ID NO: 49525 - protein, 11 aa, Homo sapiens
  misc_feature: Table A; Target 49525; HLA-A*03:01; MYH4; ENSG00000264424; TAA
GLDETIAKLTK

SEQ ID NO: 49526 - protein, 11 aa, Homo sapiens
  misc_feature: Table A; Target 49526; HLA-A*03:02; MYH4; ENSG00000264424; TAA
GLDETIAKLTK

SEQ ID NO: 49527 - protein, 11 aa, Homo sapiens
  misc_feature: Table A; Target 49527; HLA-A*11:01; MYH4; ENSG00000264424; TAA
GLDETIAKLTK

SEQ ID NO: 49528 - protein, 9 aa, Homo sapiens
  misc_feature: Table A; Target 49528; HLA-A*02:01; MYH4; ENSG00000264424; TAA
GLLGTLEEM

SEQ ID NO: 49529 - protein, 9 aa, Homo sapiens
  misc_feature: Table A; Target 49529; HLA-A*02:04; MYH4; ENSG00000264424; TAA
GLLGTLEEM

SEQ ID NO: 49530 - protein, 9 aa, Homo sapiens
  misc_feature: Table A; Target 49530; HLA-B*13:02; MYH4; ENSG00000264424; TAA
GLLGTLEEM

SEQ ID NO: 49531 - protein, 9 aa, Homo sapiens
  misc_feature: Table A; Target 49531; HLA-B*15:01; MYH4; ENSG00000264424; TAA
GLLGTLEEM

SEQ ID NO: 49532 - protein, 9 aa, Homo sapiens
  misc_feature: Table A; Target 49532; HLA-B*15:03; MYH4; ENSG00000264424; TAA
GLLGTLEEM

SEQ ID NO: 49533 - protein, 9 aa, Homo sapiens
  misc_feature: Table A; Target 49533; HLA-B*46:01; MYH4; ENSG00000264424; TAA
GLLGTLEEM

SEQ ID NO: 49534 - protein, 9 aa, Homo sapiens
  misc_feature: Table A; Target 49534; HLA-B*55:01; MYH4; ENSG00000264424; TAA
GLLGTLEEM

SEQ ID NO: 49535 - protein, 9 aa, Homo sapiens
  misc_feature: Table A; Target 49535; HLA-C*14:02; MYH4; ENSG00000264424; TAA
GLLGTLEEM

SEQ ID NO: 49536 - protein, 8 aa, Homo sapiens
  misc_feature: Table A; Target 49536; HLA-B*08:01; MYH4; ENSG00000264424; TAA
GLYQKSAM

SEQ ID NO: 49537 - protein, 8 aa, Homo sapiens
  misc_feature: Table A; Target 49537; HLA-B*37:01; MYH4; ENSG00000264424; TAA
GLYQKSAM

SEQ ID NO: 49538 - protein, 9 aa, Homo sapiens
  misc_feature: Table A; Target 49538; HLA-A*03:01; MYH4; ENSG00000264424; TAA
GLYQKSAMK

SEQ ID NO: 49539 - protein, 9 aa, Homo sapiens
  misc_feature: Table A; Target 49539; HLA-A*03:02; MYH4; ENSG00000264424; TAA
GLYQKSAMK

SEQ ID NO: 49540 - protein, 9 aa, Homo sapiens
  misc_feature: Table A; Target 49540; HLA-A*11:01; MYH4; ENSG00000264424; TAA
GLYQKSAMK

SEQ ID NO: 49541 - protein, 11 aa, Homo sapiens
  misc_feature: Table A; Target 49541; HLA-A*02:03; MYH4; ENSG00000264424; TAA
GLYQKSAMKTL

SEQ ID NO: 49542 - protein, 9 aa, Homo sapiens
  misc_feature: Table A; Target 49542; HLA-A*02:01; MYH4; ENSG00000264424; TAA
GMSKANSEV

SEQ ID NO: 49543 - protein, 9 aa, Homo sapiens
  misc_feature: Table A; Target 49543; HLA-A*02:03; MYH4; ENSG00000264424; TAA
GMSKANSEV

SEQ ID NO: 49544 - protein, 9 aa, Homo sapiens
  misc_feature: Table A; Target 49544; HLA-B*13:02; MYH4; ENSG00000264424; TAA
GMSKANSEV

SEQ ID NO: 49545 - protein, 9 aa, Homo sapiens
  misc_feature: Table A; Target 49545; HLA-B*55:01; MYH4; ENSG00000264424; TAA
GMSKANSEV

SEQ ID NO: 49546 - protein, 11 aa, Homo sapiens
  misc_feature: Table A; Target 49546; HLA-C*04:01; MYH4; ENSG00000264424; TAA
GNEFVTKGQTV

SEQ ID NO: 49547 - protein, 9 aa, Homo sapiens
  misc_feature: Table A; Target 49547; HLA-A*02:07; MYH4; ENSG00000264424; TAA
GQDDLKEQL

SEQ ID NO: 49548 - protein, 9 aa, Homo sapiens
  misc_feature: Table A; Target 49548; HLA-B*13:02; MYH4; ENSG00000264424; TAA
GQDDLKEQL

SEQ ID NO: 49549 - protein, 9 aa, Homo sapiens
  misc_feature: Table A; Target 49549; HLA-B*15:03; MYH4; ENSG00000264424; TAA
GQDDLKEQL

SEQ ID NO: 49550 - protein, 9 aa, Homo sapiens
  misc_feature: Table A; Target 49550; HLA-B*27:05; MYH4; ENSG00000264424; TAA
GQDDLKEQL

SEQ ID NO: 49551 - protein, 9 aa, Homo sapiens
  misc_feature: Table A; Target 49551; HLA-B*38:01; MYH4; ENSG00000264424; TAA
GQDDLKEQL

SEQ ID NO: 49552 - protein, 9 aa, Homo sapiens
  misc_feature: Table A; Target 49552; HLA-B*39:01; MYH4; ENSG00000264424; TAA
GQDDLKEQL

SEQ ID NO: 49553 - protein, 9 aa, Homo sapiens
  misc_feature: Table A; Target 49553; HLA-B*40:01; MYH4; ENSG00000264424; TAA
GQDDLKEQL

SEQ ID NO: 49554 - protein, 9 aa, Homo sapiens
  misc_feature: Table A; Target 49554; HLA-C*05:01; MYH4; ENSG00000264424; TAA
GQDDLKEQL

SEQ ID NO: 49555 - protein, 9 aa, Homo sapiens
  misc_feature: Table A; Target 49555; HLA-B*13:02; MYH4; ENSG00000264424; TAA
GQFIDSKKA

SEQ ID NO: 49556 - protein, 9 aa, Homo sapiens
  misc_feature: Table A; Target 49556; HLA-B*15:03; MYH4; ENSG00000264424; TAA
GQFIDSKKA

SEQ ID NO: 49557 - protein, 8 aa, Homo sapiens
  misc_feature: Table A; Target 49557; HLA-A*30:02; MYH4; ENSG00000264424; TAA
GQTVQQVY

SEQ ID NO: 49558 - protein, 8 aa, Homo sapiens
  misc_feature: Table A; Target 49558; HLA-B*13:02; MYH4; ENSG00000264424; TAA
GQTVQQVY

SEQ ID NO: 49559 - protein, 8 aa, Homo sapiens
  misc_feature: Table A; Target 49559; HLA-B*15:01; MYH4; ENSG00000264424; TAA
GQTVQQVY

SEQ ID NO: 49560 - protein, 8 aa, Homo sapiens
  misc_feature: Table A; Target 49560; HLA-B*15:03; MYH4; ENSG00000264424; TAA
GQTVQQVY

SEQ ID NO: 49561 - protein, 8 aa, Homo sapiens
  misc_feature: Table A; Target 49561; HLA-B*18:01; MYH4; ENSG00000264424; TAA
GQTVQQVY

SEQ ID NO: 49562 - protein, 8 aa, Homo sapiens
  misc_feature: Table A; Target 49562; HLA-B*27:02; MYH4; ENSG00000264424; TAA
GQTVQQVY

SEQ ID NO: 49563 - protein, 8 aa, Homo sapiens
  misc_feature: Table A; Target 49563; HLA-B*27:05; MYH4; ENSG00000264424; TAA
GQTVQQVY

SEQ ID NO: 49564 - protein, 8 aa, Homo sapiens
  misc_feature: Table A; Target 49564; HLA-B*39:01; MYH4; ENSG00000264424; TAA
GQTVQQVY

SEQ ID NO: 49565 - protein, 8 aa, Homo sapiens
  misc_feature: Table A; Target 49565; HLA-C*02:02; MYH4; ENSG00000264424; TAA
GQTVQQVY

SEQ ID NO: 49566 - protein, 8 aa, Homo sapiens
  misc_feature: Table A; Target 49566; HLA-C*07:04; MYH4; ENSG00000264424; TAA
GQTVQQVY

SEQ ID NO: 49567 - protein, 8 aa, Homo sapiens
  misc_feature: Table A; Target 49567; HLA-C*14:02; MYH4; ENSG00000264424; TAA
GQTVQQVY

SEQ ID NO: 49568 - protein, 8 aa, Homo sapiens
  misc_feature: Table A; Target 49568; HLA-C*16:01; MYH4; ENSG00000264424; TAA
GQTVQQVY

SEQ ID NO: 49569 - protein, 8 aa, Homo sapiens
  misc_feature: Table A; Target 49569; HLA-C*16:04; MYH4; ENSG00000264424; TAA
GQTVQQVY

SEQ ID NO: 49570 - protein, 10 aa, Homo sapiens
  misc_feature: Table A; Target 49570; HLA-B*13:02; MYH4; ENSG00000264424; TAA
GQTVQQVYNA

SEQ ID NO: 49571 - protein, 10 aa, Homo sapiens
  misc_feature: Table A; Target 49571; HLA-B*27:05; MYH4; ENSG00000264424; TAA
GQTVQQVYNA

SEQ ID NO: 49572 - protein, 11 aa, Homo sapiens
  misc_feature: Table A; Target 49572; HLA-B*13:02; MYH4; ENSG00000264424; TAA
GQTVQQVYNAV

SEQ ID NO: 49573 - protein, 11 aa, Homo sapiens
  misc_feature: Table A; Target 49573; HLA-B*27:05; MYH4; ENSG00000264424; TAA
GQTVQQVYNAV

SEQ ID NO: 49574 - protein, 9 aa, Homo sapiens
  misc_feature: Table A; Target 49574; HLA-B*27:05; MYH4; ENSG00000264424; TAA
GRKMAEQEL

SEQ ID NO: 49575 - protein, 10 aa, Homo sapiens
  misc_feature: Table A; Target 49575; HLA-A*01:01; MYH4; ENSG00000264424; TAA
GSIEIDHTQY

SEQ ID NO: 49576 - protein, 10 aa, Homo sapiens
  misc_feature: Table A; Target 49576; HLA-A*25:01; MYH4; ENSG00000264424; TAA
GSIEIDHTQY

SEQ ID NO: 49577 - protein, 10 aa, Homo sapiens
  misc_feature: Table A; Target 49577; HLA-A*26:01; MYH4; ENSG00000264424; TAA
GSIEIDHTQY

SEQ ID NO: 49578 - protein, 10 aa, Homo sapiens
  misc_feature: Table A; Target 49578; HLA-A*29:02; MYH4; ENSG00000264424; TAA
GSIEIDHTQY

SEQ ID NO: 49579 - protein, 10 aa, Homo sapiens
  misc_feature: Table A; Target 49579; HLA-A*30:02; MYH4; ENSG00000264424; TAA
GSIEIDHTQY

SEQ ID NO: 49580 - protein, 10 aa, Homo sapiens
  misc_feature: Table A; Target 49580; HLA-A*32:01; MYH4; ENSG00000264424; TAA
GSIEIDHTQY

SEQ ID NO: 49581 - protein, 10 aa, Homo sapiens
  misc_feature: Table A; Target 49581; HLA-B*15:01; MYH4; ENSG00000264424; TAA
GSIEIDHTQY

SEQ ID NO: 49582 - protein, 10 aa, Homo sapiens
  misc_feature: Table A; Target 49582; HLA-B*15:03; MYH4; ENSG00000264424; TAA
GSIEIDHTQY

SEQ ID NO: 49583 - protein, 10 aa, Homo sapiens
  misc_feature: Table A; Target 49583; HLA-B*35:01; MYH4; ENSG00000264424; TAA
GSIEIDHTQY

SEQ ID NO: 49584 - protein, 10 aa, Homo sapiens
  misc_feature: Table A; Target 49584; HLA-B*44:02; MYH4; ENSG00000264424; TAA
GSIEIDHTQY

SEQ ID NO: 49585 - protein, 10 aa, Homo sapiens
  misc_feature: Table A; Target 49585; HLA-B*44:03; MYH4; ENSG00000264424; TAA
GSIEIDHTQY

SEQ ID NO: 49586 - protein, 10 aa, Homo sapiens
  misc_feature: Table A; Target 49586; HLA-B*46:01; MYH4; ENSG00000264424; TAA
GSIEIDHTQY

SEQ ID NO: 49587 - protein, 10 aa, Homo sapiens
  misc_feature: Table A; Target 49587; HLA-B*57:01; MYH4; ENSG00000264424; TAA
GSIEIDHTQY

SEQ ID NO: 49588 - protein, 10 aa, Homo sapiens
  misc_feature: Table A; Target 49588; HLA-B*58:01; MYH4; ENSG00000264424; TAA
GSIEIDHTQY

SEQ ID NO: 49589 - protein, 10 aa, Homo sapiens
  misc_feature: Table A; Target 49589; HLA-C*02:02; MYH4; ENSG00000264424; TAA
GSIEIDHTQY

SEQ ID NO: 49590 - protein, 10 aa, Homo sapiens
  misc_feature: Table A; Target 49590; HLA-C*07:04; MYH4; ENSG00000264424; TAA
GSIEIDHTQY

SEQ ID NO: 49591 - protein, 10 aa, Homo sapiens
  misc_feature: Table A; Target 49591; HLA-C*12:03; MYH4; ENSG00000264424; TAA
GSIEIDHTQY

SEQ ID NO: 49592 - protein, 10 aa, Homo sapiens
  misc_feature: Table A; Target 49592; HLA-C*16:04; MYH4; ENSG00000264424; TAA
GSIEIDHTQY

SEQ ID NO: 49593 - protein, 11 aa, Homo sapiens
  misc_feature: Table A; Target 49593; HLA-A*01:01; MYH4; ENSG00000264424; TAA
GSIEIDHTQYK

SEQ ID NO: 49594 - protein, 11 aa, Homo sapiens
  misc_feature: Table A; Target 49594; HLA-A*03:01; MYH4; ENSG00000264424; TAA
GSIEIDHTQYK

SEQ ID NO: 49595 - protein, 11 aa, Homo sapiens
  misc_feature: Table A; Target 49595; HLA-A*03:02; MYH4; ENSG00000264424; TAA
GSIEIDHTQYK

SEQ ID NO: 49596 - protein, 11 aa, Homo sapiens
  misc_feature: Table A; Target 49596; HLA-A*11:01; MYH4; ENSG00000264424; TAA
GSIEIDHTQYK

SEQ ID NO: 49597 - protein, 11 aa, Homo sapiens
  misc_feature: Table A; Target 49597; HLA-A*31:01; MYH4; ENSG00000264424; TAA
GSIEIDHTQYK

SEQ ID NO: 49598 - protein, 11 aa, Homo sapiens
  misc_feature: Table A; Target 49598; HLA-A*68:01; MYH4; ENSG00000264424; TAA
GSIEIDHTQYK

SEQ ID NO: 49599 - protein, 11 aa, Homo sapiens
  misc_feature: Table A; Target 49599; HLA-A*30:02; MYH4; ENSG00000264424; TAA
GSSFQTVSALF

SEQ ID NO: 49600 - protein, 10 aa, Homo sapiens
  misc_feature: Table A; Target 49600; HLA-A*01:01; MYH4; ENSG00000264424; TAA
GTEVADKAAY

SEQ ID NO: 49601 - protein, 10 aa, Homo sapiens
  misc_feature: Table A; Target 49601; HLA-A*30:02; MYH4; ENSG00000264424; TAA
GTEVADKAAY

SEQ ID NO: 49602 - protein, 10 aa, Homo sapiens
  misc_feature: Table A; Target 49602; HLA-A*25:01; MYH4; ENSG00000264424; TAA
GTVDYNIAGW

SEQ ID NO: 49603 - protein, 10 aa, Homo sapiens
  misc_feature: Table A; Target 49603; HLA-A*26:01; MYH4; ENSG00000264424; TAA
GTVDYNIAGW

SEQ ID NO: 49604 - protein, 10 aa, Homo sapiens
  misc_feature: Table A; Target 49604; HLA-A*32:01; MYH4; ENSG00000264424; TAA
GTVDYNIAGW

SEQ ID NO: 49605 - protein, 10 aa, Homo sapiens
  misc_feature: Table A; Target 49605; HLA-A*68:02; MYH4; ENSG00000264424; TAA
GTVDYNIAGW

SEQ ID NO: 49606 - protein, 10 aa, Homo sapiens
  misc_feature: Table A; Target 49606; HLA-B*44:02; MYH4; ENSG00000264424; TAA
GTVDYNIAGW

SEQ ID NO: 49607 - protein, 10 aa, Homo sapiens
  misc_feature: Table A; Target 49607; HLA-B*44:03; MYH4; ENSG00000264424; TAA
GTVDYNIAGW

SEQ ID NO: 49608 - protein, 10 aa, Homo sapiens
  misc_feature: Table A; Target 49608; HLA-B*57:01; MYH4; ENSG00000264424; TAA
GTVDYNIAGW

SEQ ID NO: 49609 - protein, 10 aa, Homo sapiens
  misc_feature: Table A; Target 49609; HLA-B*58:01; MYH4; ENSG00000264424; TAA
GTVDYNIAGW

SEQ ID NO: 49610 - protein, 10 aa, Homo sapiens
  misc_feature: Table A; Target 49610; HLA-C*16:04; MYH4; ENSG00000264424; TAA
GTVDYNIAGW

SEQ ID NO: 49611 - protein, 10 aa, Homo sapiens
  misc_feature: Table A; Target 49611; HLA-A*02:01; MYH4; ENSG00000264424; TAA
GVLDIAGFEI

SEQ ID NO: 49612 - protein, 10 aa, Homo sapiens
  misc_feature: Table A; Target 49612; HLA-A*02:04; MYH4; ENSG00000264424; TAA
GVLDIAGFEI

SEQ ID NO: 49613 - protein, 10 aa, Homo sapiens
  misc_feature: Table A; Target 49613; HLA-B*13:02; MYH4; ENSG00000264424; TAA
GVLDIAGFEI

SEQ ID NO: 49614 - protein, 10 aa, Homo sapiens
  misc_feature: Table A; Target 49614; HLA-A*31:01; MYH4; ENSG00000264424; TAA
GVLEGIRICR

SEQ ID NO: 49615 - protein, 8 aa, Homo sapiens
  misc_feature: Table A; Target 49615; HLA-A*32:01; MYH4; ENSG00000264424; TAA
HADSVAEL

SEQ ID NO: 49616 - protein, 8 aa, Homo sapiens
  misc_feature: Table A; Target 49616; HLA-B*07:02; MYH4; ENSG00000264424; TAA
HADSVAEL

SEQ ID NO: 49617 - protein, 8 aa, Homo sapiens
  misc_feature: Table A; Target 49617; HLA-B*35:01; MYH4; ENSG00000264424; TAA
HADSVAEL

SEQ ID NO: 49618 - protein, 8 aa, Homo sapiens
  misc_feature: Table A; Target 49618; HLA-B*35:03; MYH4; ENSG00000264424; TAA
HADSVAEL

SEQ ID NO: 49619 - protein, 8 aa, Homo sapiens
  misc_feature: Table A; Target 49619; HLA-B*38:01; MYH4; ENSG00000264424; TAA
HADSVAEL

SEQ ID NO: 49620 - protein, 8 aa, Homo sapiens
  misc_feature: Table A; Target 49620; HLA-B*39:01; MYH4; ENSG00000264424; TAA
HADSVAEL

SEQ ID NO: 49621 - protein, 8 aa, Homo sapiens
  misc_feature: Table A; Target 49621; HLA-B*40:01; MYH4; ENSG00000264424; TAA
HADSVAEL

SEQ ID NO: 49622 - protein, 8 aa, Homo sapiens
  misc_feature: Table A; Target 49622; HLA-B*51:01; MYH4; ENSG00000264424; TAA
HADSVAEL

SEQ ID NO: 49623 - protein, 8 aa, Homo sapiens
  misc_feature: Table A; Target 49623; HLA-B*55:01; MYH4; ENSG00000264424; TAA
HADSVAEL

SEQ ID NO: 49624 - protein, 8 aa, Homo sapiens
  misc_feature: Table A; Target 49624; HLA-B*58:01; MYH4; ENSG00000264424; TAA
HADSVAEL

SEQ ID NO: 49625 - protein, 8 aa, Homo sapiens
  misc_feature: Table A; Target 49625; HLA-C*01:02; MYH4; ENSG00000264424; TAA
HADSVAEL

SEQ ID NO: 49626 - protein, 8 aa, Homo sapiens
  misc_feature: Table A; Target 49626; HLA-C*03:03; MYH4; ENSG00000264424; TAA
HADSVAEL

SEQ ID NO: 49627 - protein, 8 aa, Homo sapiens
  misc_feature: Table A; Target 49627; HLA-C*03:04; MYH4; ENSG00000264424; TAA
HADSVAEL

SEQ ID NO: 49628 - protein, 8 aa, Homo sapiens
  misc_feature: Table A; Target 49628; HLA-C*04:01; MYH4; ENSG00000264424; TAA
HADSVAEL

SEQ ID NO: 49629 - protein, 8 aa, Homo sapiens
  misc_feature: Table A; Target 49629; HLA-C*05:01; MYH4; ENSG00000264424; TAA
HADSVAEL

SEQ ID NO: 49630 - protein, 8 aa, Homo sapiens
  misc_feature: Table A; Target 49630; HLA-C*07:04; MYH4; ENSG00000264424; TAA
HADSVAEL

SEQ ID NO: 49631 - protein, 8 aa, Homo sapiens
  misc_feature: Table A; Target 49631; HLA-C*07:06; MYH4; ENSG00000264424; TAA
HADSVAEL

SEQ ID NO: 49632 - protein, 8 aa, Homo sapiens
  misc_feature: Table A; Target 49632; HLA-C*12:03; MYH4; ENSG00000264424; TAA
HADSVAEL

SEQ ID NO: 49633 - protein, 8 aa, Homo sapiens
  misc_feature: Table A; Target 49633; HLA-C*16:02; MYH4; ENSG00000264424; TAA
HADSVAEL

SEQ ID NO: 49634 - protein, 9 aa, Homo sapiens
  misc_feature: Table A; Target 49634; HLA-B*54:01; MYH4; ENSG00000264424; TAA
HANRQAAEA

SEQ ID NO: 49635 - protein, 9 aa, Homo sapiens
  misc_feature: Table A; Target 49635; HLA-B*56:01; MYH4; ENSG00000264424; TAA
HANRQAAEA

SEQ ID NO: 49636 - protein, 10 aa, Homo sapiens
  misc_feature: Table A; Target 49636; HLA-B*35:01; MYH4; ENSG00000264424; TAA
HANRQAAEAL

SEQ ID NO: 49637 - protein, 10 aa, Homo sapiens
  misc_feature: Table A; Target 49637; HLA-B*35:03; MYH4; ENSG00000264424; TAA
HANRQAAEAL

SEQ ID NO: 49638 - protein, 10 aa, Homo sapiens
  misc_feature: Table A; Target 49638; HLA-B*40:01; MYH4; ENSG00000264424; TAA
HANRQAAEAL

SEQ ID NO: 49639 - protein, 11 aa, Homo sapiens
  misc_feature: Table A; Target 49639; HLA-A*31:01; MYH4; ENSG00000264424; TAA
HANRQAAEALR

SEQ ID NO: 49640 - protein, 11 aa, Homo sapiens
  misc_feature: Table A; Target 49640; HLA-A*33:01; MYH4; ENSG00000264424; TAA
HANRQAAEALR

SEQ ID NO: 49641 - protein, 11 aa, Homo sapiens
  misc_feature: Table A; Target 49641; HLA-A*33:03; MYH4; ENSG00000264424; TAA
HANRQAAEALR

SEQ ID NO: 49642 - protein, 11 aa, Homo sapiens
  misc_feature: Table A; Target 49642; HLA-A*68:01; MYH4; ENSG00000264424; TAA
HANRQAAEALR

SEQ ID NO: 49643 - protein, 11 aa, Homo sapiens
  misc_feature: Table A; Target 49643; HLA-C*07:06; MYH4; ENSG00000264424; TAA
HANRQAAEALR

SEQ ID NO: 49644 - protein, 8 aa, Homo sapiens
  misc_feature: Table A; Target 49644; HLA-C*16:01; MYH4; ENSG00000264424; TAA
HATENKVK

SEQ ID NO: 49645 - protein, 8 aa, Homo sapiens
  misc_feature: Table A; Target 49645; HLA-C*16:02; MYH4; ENSG00000264424; TAA
HATENKVK

SEQ ID NO: 49646 - protein, 10 aa, Homo sapiens
  misc_feature: Table A; Target 49646; HLA-C*16:02; MYH4; ENSG00000264424; TAA
HATENKVKNL

SEQ ID NO: 49647 - protein, 8 aa, Homo sapiens
  misc_feature: Table A; Target 49647; HLA-A*30:01; MYH4; ENSG00000264424; TAA
HEATAAAL

SEQ ID NO: 49648 - protein, 8 aa, Homo sapiens
  misc_feature: Table A; Target 49648; HLA-B*18:01; MYH4; ENSG00000264424; TAA
HEATAAAL

SEQ ID NO: 49649 - protein, 8 aa, Homo sapiens
  misc_feature: Table A; Target 49649; HLA-B*35:03; MYH4; ENSG00000264424; TAA
HEATAAAL

SEQ ID NO: 49650 - protein, 8 aa, Homo sapiens
  misc_feature: Table A; Target 49650; HLA-B*37:01; MYH4; ENSG00000264424; TAA
HEATAAAL

SEQ ID NO: 49651 - protein, 8 aa, Homo sapiens
  misc_feature: Table A; Target 49651; HLA-B*40:01; MYH4; ENSG00000264424; TAA
HEATAAAL

SEQ ID NO: 49652 - protein, 8 aa, Homo sapiens
  misc_feature: Table A; Target 49652; HLA-B*40:02; MYH4; ENSG00000264424; TAA
HEATAAAL

SEQ ID NO: 49653 - protein, 8 aa, Homo sapiens
  misc_feature: Table A; Target 49653; HLA-B*49:01; MYH4; ENSG00000264424; TAA
HEATAAAL

SEQ ID NO: 49654 - protein, 9 aa, Homo sapiens
  misc_feature: Table A; Target 49654; HLA-A*33:03; MYH4; ENSG00000264424; TAA
HEATAAALR

SEQ ID NO: 49655 - protein, 9 aa, Homo sapiens
  misc_feature: Table A; Target 49655; HLA-A*68:01; MYH4; ENSG00000264424; TAA
HEATAAALR

SEQ ID NO: 49656 - protein, 9 aa, Homo sapiens
  misc_feature: Table A; Target 49656; HLA-B*27:02; MYH4; ENSG00000264424; TAA
HEATAAALR

SEQ ID NO: 49657 - protein, 9 aa, Homo sapiens
  misc_feature: Table A; Target 49657; HLA-C*07:06; MYH4; ENSG00000264424; TAA
HEATAAALR

SEQ ID NO: 49658 - protein, 9 aa, Homo sapiens
  misc_feature: Table A; Target 49658; HLA-A*30:01; MYH4; ENSG00000264424; TAA
HEEGKILRI

SEQ ID NO: 49659 - protein, 9 aa, Homo sapiens
  misc_feature: Table A; Target 49659; HLA-B*40:01; MYH4; ENSG00000264424; TAA
HEEGKILRI

SEQ ID NO: 49660 - protein, 9 aa, Homo sapiens
  misc_feature: Table A; Target 49660; HLA-B*44:02; MYH4; ENSG00000264424; TAA
HEEGKILRI

SEQ ID NO: 49661 - protein, 9 aa, Homo sapiens
  misc_feature: Table A; Target 49661; HLA-B*44:03; MYH4; ENSG00000264424; TAA
HEEGKILRI

SEQ ID NO: 49662 - protein, 9 aa, Homo sapiens
  misc_feature: Table A; Target 49662; HLA-B*49:01; MYH4; ENSG00000264424; TAA
HEEGKILRI

SEQ ID NO: 49663 - protein, 10 aa, Homo sapiens
  misc_feature: Table A; Target 49663; HLA-A*30:01; MYH4; ENSG00000264424; TAA
HEKSELQTSL

SEQ ID NO: 49664 - protein, 10 aa, Homo sapiens
  misc_feature: Table A; Target 49664; HLA-B*18:01; MYH4; ENSG00000264424; TAA
HEKSELQTSL

SEQ ID NO: 49665 - protein, 10 aa, Homo sapiens
  misc_feature: Table A; Target 49665; HLA-B*40:01; MYH4; ENSG00000264424; TAA
HEKSELQTSL

SEQ ID NO: 49666 - protein, 10 aa, Homo sapiens
  misc_feature: Table A; Target 49666; HLA-B*40:02; MYH4; ENSG00000264424; TAA
HEKSELQTSL

SEQ ID NO: 49667 - protein, 10 aa, Homo sapiens
  misc_feature: Table A; Target 49667; HLA-B*44:02; MYH4; ENSG00000264424; TAA
HEKSELQTSL

SEQ ID NO: 49668 - protein, 10 aa, Homo sapiens
  misc_feature: Table A; Target 49668; HLA-B*49:01; MYH4; ENSG00000264424; TAA
HEKSELQTSL

SEQ ID NO: 49669 - protein, 8 aa, Homo sapiens
  misc_feature: Table A; Target 49669; HLA-A*30:01; MYH4; ENSG00000264424; TAA
HELVLHQL

SEQ ID NO: 49670 - protein, 8 aa, Homo sapiens
  misc_feature: Table A; Target 49670; HLA-B*18:01; MYH4; ENSG00000264424; TAA
HELVLHQL

SEQ ID NO: 49671 - protein, 8 aa, Homo sapiens
  misc_feature: Table A; Target 49671; HLA-B*37:01; MYH4; ENSG00000264424; TAA
HELVLHQL

SEQ ID NO: 49672 - protein, 8 aa, Homo sapiens
  misc_feature: Table A; Target 49672; HLA-B*40:01; MYH4; ENSG00000264424; TAA
HELVLHQL

SEQ ID NO: 49673 - protein, 8 aa, Homo sapiens
  misc_feature: Table A; Target 49673; HLA-B*40:02; MYH4; ENSG00000264424; TAA
HELVLHQL

SEQ ID NO: 49674 - protein, 8 aa, Homo sapiens
  misc_feature: Table A; Target 49674; HLA-B*44:02; MYH4; ENSG00000264424; TAA
HELVLHQL

SEQ ID NO: 49675 - protein, 8 aa, Homo sapiens
  misc_feature: Table A; Target 49675; HLA-B*44:03; MYH4; ENSG00000264424; TAA
HELVLHQL

SEQ ID NO: 49676 - protein, 8 aa, Homo sapiens
  misc_feature: Table A; Target 49676; HLA-B*49:01; MYH4; ENSG00000264424; TAA
HELVLHQL

SEQ ID NO: 49677 - protein, 9 aa, Homo sapiens
  misc_feature: Table A; Target 49677; HLA-A*02:07; MYH4; ENSG00000264424; TAA
HEPAVLYNL

SEQ ID NO: 49678 - protein, 9 aa, Homo sapiens
  misc_feature: Table A; Target 49678; HLA-A*24:02; MYH4; ENSG00000264424; TAA
HEPAVLYNL

SEQ ID NO: 49679 - protein, 9 aa, Homo sapiens
  misc_feature: Table A; Target 49679; HLA-A*30:01; MYH4; ENSG00000264424; TAA
HEPAVLYNL

SEQ ID NO: 49680 - protein, 9 aa, Homo sapiens
  misc_feature: Table A; Target 49680; HLA-A*68:02; MYH4; ENSG00000264424; TAA
HEPAVLYNL

SEQ ID NO: 49681 - protein, 9 aa, Homo sapiens
  misc_feature: Table A; Target 49681; HLA-B*18:01; MYH4; ENSG00000264424; TAA
HEPAVLYNL

SEQ ID NO: 49682 - protein, 9 aa, Homo sapiens
  misc_feature: Table A; Target 49682; HLA-B*37:01; MYH4; ENSG00000264424; TAA
HEPAVLYNL

SEQ ID NO: 49683 - protein, 9 aa, Homo sapiens
  misc_feature: Table A; Target 49683; HLA-B*38:01; MYH4; ENSG00000264424; TAA
HEPAVLYNL

SEQ ID NO: 49684 - protein, 9 aa, Homo sapiens
  misc_feature: Table A; Target 49684; HLA-B*40:01; MYH4; ENSG00000264424; TAA
HEPAVLYNL

SEQ ID NO: 49685 - protein, 9 aa, Homo sapiens
  misc_feature: Table A; Target 49685; HLA-B*40:02; MYH4; ENSG00000264424; TAA
HEPAVLYNL

SEQ ID NO: 49686 - protein, 9 aa, Homo sapiens
  misc_feature: Table A; Target 49686; HLA-B*44:02; MYH4; ENSG00000264424; TAA
HEPAVLYNL

SEQ ID NO: 49687 - protein, 9 aa, Homo sapiens
  misc_feature: Table A; Target 49687; HLA-B*44:03; MYH4; ENSG00000264424; TAA
HEPAVLYNL

SEQ ID NO: 49688 - protein, 9 aa, Homo sapiens
  misc_feature: Table A; Target 49688; HLA-B*49:01; MYH4; ENSG00000264424; TAA
HEPAVLYNL

SEQ ID NO: 49689 - protein, 8 aa, Homo sapiens
  misc_feature: Table A; Target 49689; HLA-C*04:01; MYH4; ENSG00000264424; TAA
HFGATGKL

SEQ ID NO: 49690 - protein, 8 aa, Homo sapiens
  misc_feature: Table A; Target 49690; HLA-C*07:01; MYH4; ENSG00000264424; TAA
HFGATGKL

SEQ ID NO: 49691 - protein, 10 aa, Homo sapiens
  misc_feature: Table A; Target 49691; HLA-A*26:01; MYH4; ENSG00000264424; TAA
HIFSISDNAY

SEQ ID NO: 49692 - protein, 10 aa, Homo sapiens
  misc_feature: Table A; Target 49692; HLA-A*30:02; MYH4; ENSG00000264424; TAA
HIFSISDNAY

SEQ ID NO: 49693 - protein, 10 aa, Homo sapiens
  misc_feature: Table A; Target 49693; HLA-B*15:01; MYH4; ENSG00000264424; TAA
HIFSISDNAY

SEQ ID NO: 49694 - protein, 10 aa, Homo sapiens
  misc_feature: Table A; Target 49694; HLA-B*35:01; MYH4; ENSG00000264424; TAA
HIFSISDNAY

SEQ ID NO: 49695 - protein, 10 aa, Homo sapiens
  misc_feature: Table A; Target 49695; HLA-C*07:04; MYH4; ENSG00000264424; TAA
HIFSISDNAY

SEQ ID NO: 49696 - protein, 10 aa, Homo sapiens
  misc_feature: Table A; Target 49696; HLA-A*03:01; MYH4; ENSG00000264424; TAA
HIFYQILSNK

SEQ ID NO: 49697 - protein, 10 aa, Homo sapiens
  misc_feature: Table A; Target 49697; HLA-A*03:02; MYH4; ENSG00000264424; TAA
HIFYQILSNK

SEQ ID NO: 49698 - protein, 10 aa, Homo sapiens
  misc_feature: Table A; Target 49698; HLA-A*68:02; MYH4; ENSG00000264424; TAA
HIFYQILSNK

SEQ ID NO: 49699 - protein, 10 aa, Homo sapiens
  misc_feature: Table A; Target 49699; HLA-A*03:02; MYH4; ENSG00000264424; TAA
HLGKSNNFQK

SEQ ID NO: 49700 - protein, 8 aa, Homo sapiens
  misc_feature: Table A; Target 49700; HLA-B*08:01; MYH4; ENSG00000264424; TAA
HLHEPAVL

SEQ ID NO: 49701 - protein, 9 aa, Homo sapiens
  misc_feature: Table A; Target 49701; HLA-A*01:01; MYH4; ENSG00000264424; TAA
HLHEPAVLY

SEQ ID NO: 49702 - protein, 9 aa, Homo sapiens
  misc_feature: Table A; Target 49702; HLA-A*03:01; MYH4; ENSG00000264424; TAA
HLHEPAVLY

SEQ ID NO: 49703 - protein, 9 aa, Homo sapiens
  misc_feature: Table A; Target 49703; HLA-A*25:01; MYH4; ENSG00000264424; TAA
HLHEPAVLY

SEQ ID NO: 49704 - protein, 9 aa, Homo sapiens
  misc_feature: Table A; Target 49704; HLA-A*26:01; MYH4; ENSG00000264424; TAA
HLHEPAVLY

SEQ ID NO: 49705 - protein, 9 aa, Homo sapiens
  misc_feature: Table A; Target 49705; HLA-A*29:02; MYH4; ENSG00000264424; TAA
HLHEPAVLY

SEQ ID NO: 49706 - protein, 9 aa, Homo sapiens
  misc_feature: Table A; Target 49706; HLA-A*30:02; MYH4; ENSG00000264424; TAA
HLHEPAVLY

SEQ ID NO: 49707 - protein, 9 aa, Homo sapiens
  misc_feature: Table A; Target 49707; HLA-A*32:01; MYH4; ENSG00000264424; TAA
HLHEPAVLY

SEQ ID NO: 49708 - protein, 9 aa, Homo sapiens
  misc_feature: Table A; Target 49708; HLA-A*33:01; MYH4; ENSG00000264424; TAA
HLHEPAVLY

SEQ ID NO: 49709 - protein, 9 aa, Homo sapiens
  misc_feature: Table A; Target 49709; HLA-B*08:01; MYH4; ENSG00000264424; TAA
HLHEPAVLY

SEQ ID NO: 49710 - protein, 9 aa, Homo sapiens
  misc_feature: Table A; Target 49710; HLA-B*15:01; MYH4; ENSG00000264424; TAA
HLHEPAVLY

SEQ ID NO: 49711 - protein, 9 aa, Homo sapiens
  misc_feature: Table A; Target 49711; HLA-B*15:03; MYH4; ENSG00000264424; TAA
HLHEPAVLY

SEQ ID NO: 49712 - protein, 9 aa, Homo sapiens
  misc_feature: Table A; Target 49712; HLA-B*35:01; MYH4; ENSG00000264424; TAA
HLHEPAVLY

SEQ ID NO: 49713 - protein, 9 aa, Homo sapiens
  misc_feature: Table A; Target 49713; HLA-B*46:01; MYH4; ENSG00000264424; TAA
HLHEPAVLY

SEQ ID NO: 49714 - protein, 9 aa, Homo sapiens
  misc_feature: Table A; Target 49714; HLA-C*02:02; MYH4; ENSG00000264424; TAA
HLHEPAVLY

SEQ ID NO: 49715 - protein, 9 aa, Homo sapiens
  misc_feature: Table A; Target 49715; HLA-C*03:03; MYH4; ENSG00000264424; TAA
HLHEPAVLY

SEQ ID NO: 49716 - protein, 9 aa, Homo sapiens
  misc_feature: Table A; Target 49716; HLA-C*07:04; MYH4; ENSG00000264424; TAA
HLHEPAVLY

SEQ ID NO: 49717 - protein, 11 aa, Homo sapiens
  misc_feature: Table A; Target 49717; HLA-A*02:04; MYH4; ENSG00000264424; TAA
HLHEPAVLYNL

SEQ ID NO: 49718 - protein, 11 aa, Homo sapiens
  misc_feature: Table A; Target 49718; HLA-A*02:07; MYH4; ENSG00000264424; TAA
HLHEPAVLYNL

SEQ ID NO: 49719 - protein, 8 aa, Homo sapiens
  misc_feature: Table A; Target 49719; HLA-B*08:01; MYH4; ENSG00000264424; TAA
HLRVVESM

SEQ ID NO: 49720 - protein, 10 aa, Homo sapiens
  misc_feature: Table A; Target 49720; HLA-A*01:01; MYH4; ENSG00000264424; TAA
HMFVLEQEEY

SEQ ID NO: 49721 - protein, 10 aa, Homo sapiens
  misc_feature: Table A; Target 49721; HLA-A*29:02; MYH4; ENSG00000264424; TAA
HMFVLEQEEY

SEQ ID NO: 49722 - protein, 10 aa, Homo sapiens
  misc_feature: Table A; Target 49722; HLA-A*30:02; MYH4; ENSG00000264424; TAA
HMFVLEQEEY

SEQ ID NO: 49723 - protein, 10 aa, Homo sapiens
  misc_feature: Table A; Target 49723; HLA-B*15:01; MYH4; ENSG00000264424; TAA
HMFVLEQEEY

SEQ ID NO: 49724 - protein, 10 aa, Homo sapiens
  misc_feature: Table A; Target 49724; HLA-B*15:03; MYH4; ENSG00000264424; TAA
HMFVLEQEEY

SEQ ID NO: 49725 - protein, 10 aa, Homo sapiens
  misc_feature: Table A; Target 49725; HLA-B*35:01; MYH4; ENSG00000264424; TAA
HMFVLEQEEY

SEQ ID NO: 49726 - protein, 10 aa, Homo sapiens
  misc_feature: Table A; Target 49726; HLA-C*07:01; MYH4; ENSG00000264424; TAA
HMFVLEQEEY

SEQ ID NO: 49727 - protein, 10 aa, Homo sapiens
  misc_feature: Table A; Target 49727; HLA-C*16:04; MYH4; ENSG00000264424; TAA
HMFVLEQEEY

SEQ ID NO: 49728 - protein, 10 aa, Homo sapiens
  misc_feature: Table A; Target 49728; HLA-B*38:01; MYH4; ENSG00000264424; TAA
HQQTLDDLQM

SEQ ID NO: 49729 - protein, 9 aa, Homo sapiens
  misc_feature: Table A; Target 49729; HLA-A*03:02; MYH4; ENSG00000264424; TAA
HTESGEFSR

SEQ ID NO: 49730 - protein, 9 aa, Homo sapiens
  misc_feature: Table A; Target 49730; HLA-A*11:01; MYH4; ENSG00000264424; TAA
HTESGEFSR

SEQ ID NO: 49731 - protein, 9 aa, Homo sapiens
  misc_feature: Table A; Target 49731; HLA-A*31:01; MYH4; ENSG00000264424; TAA
HTESGEFSR

SEQ ID NO: 49732 - protein, 9 aa, Homo sapiens
  misc_feature: Table A; Target 49732; HLA-A*33:01; MYH4; ENSG00000264424; TAA
HTESGEFSR

SEQ ID NO: 49733 - protein, 9 aa, Homo sapiens
  misc_feature: Table A; Target 49733; HLA-A*33:03; MYH4; ENSG00000264424; TAA
HTESGEFSR

SEQ ID NO: 49734 - protein, 9 aa, Homo sapiens
  misc_feature: Table A; Target 49734; HLA-A*68:01; MYH4; ENSG00000264424; TAA
HTESGEFSR

SEQ ID NO: 49735 - protein, 9 aa, Homo sapiens
  misc_feature: Table A; Target 49735; HLA-C*07:06; MYH4; ENSG00000264424; TAA
HTESGEFSR

SEQ ID NO: 49736 - protein, 10 aa, Homo sapiens
  misc_feature: Table A; Target 49736; HLA-A*01:01; MYH4; ENSG00000264424; TAA
HTESGEFSRQ

SEQ ID NO: 49737 - protein, 11 aa, Homo sapiens
  misc_feature: Table A; Target 49737; HLA-A*68:02; MYH4; ENSG00000264424; TAA
HTESGEFSRQL

SEQ ID NO: 49738 - protein, 8 aa, Homo sapiens
  misc_feature: Table A; Target 49738; HLA-C*04:01; MYH4; ENSG00000264424; TAA
HTKVISEE

SEQ ID NO: 49739 - protein, 8 aa, Homo sapiens
  misc_feature: Table A; Target 49739; HLA-C*12:03; MYH4; ENSG00000264424; TAA
HTKVISEE

SEQ ID NO: 49740 - protein, 11 aa, Homo sapiens
  misc_feature: Table A; Target 49740; HLA-A*03:01; MYH4; ENSG00000264424; TAA
HTQNTSLINTK

SEQ ID NO: 49741 - protein, 11 aa, Homo sapiens
  misc_feature: Table A; Target 49741; HLA-A*03:02; MYH4; ENSG00000264424; TAA
HTQNTSLINTK

SEQ ID NO: 49742 - protein, 11 aa, Homo sapiens
  misc_feature: Table A; Target 49742; HLA-A*11:01; MYH4; ENSG00000264424; TAA
HTQNTSLINTK

SEQ ID NO: 49743 - protein, 11 aa, Homo sapiens
  misc_feature: Table A; Target 49743; HLA-A*31:01; MYH4; ENSG00000264424; TAA
HTQNTSLINTK

SEQ ID NO: 49744 - protein, 11 aa, Homo sapiens
  misc_feature: Table A; Target 49744; HLA-A*33:01; MYH4; ENSG00000264424; TAA
HTQNTSLINTK

SEQ ID NO: 49745 - protein, 11 aa, Homo sapiens
  misc_feature: Table A; Target 49745; HLA-A*33:03; MYH4; ENSG00000264424; TAA
HTQNTSLINTK

SEQ ID NO: 49746 - protein, 11 aa, Homo sapiens
  misc_feature: Table A; Target 49746; HLA-A*68:01; MYH4; ENSG00000264424; TAA
HTQNTSLINTK

SEQ ID NO: 49747 - protein, 11 aa, Homo sapiens
  misc_feature: Table A; Target 49747; HLA-A*68:02; MYH4; ENSG00000264424; TAA
HTQNTSLINTK

SEQ ID NO: 49748 - protein, 11 aa, Homo sapiens
  misc_feature: Table A; Target 49748; HLA-B*27:02; MYH4; ENSG00000264424; TAA
HTQNTSLINTK

SEQ ID NO: 49749 - protein, 11 aa, Homo sapiens
  misc_feature: Table A; Target 49749; HLA-B*27:05; MYH4; ENSG00000264424; TAA
HTQNTSLINTK

SEQ ID NO: 49750 - protein, 11 aa, Homo sapiens
  misc_feature: Table A; Target 49750; HLA-C*06:02; MYH4; ENSG00000264424; TAA
HTQNTSLINTK

SEQ ID NO: 49751 - protein, 11 aa, Homo sapiens
  misc_feature: Table A; Target 49751; HLA-C*07:06; MYH4; ENSG00000264424; TAA
HTQNTSLINTK

SEQ ID NO: 49752 - protein, 8 aa, Homo sapiens
  misc_feature: Table A; Target 49752; HLA-A*03:02; MYH4; ENSG00000264424; TAA
HVEAVNSK

SEQ ID NO: 49753 - protein, 8 aa, Homo sapiens
  misc_feature: Table A; Target 49753; HLA-B*15:03; MYH4; ENSG00000264424; TAA
HYAGTVDY

SEQ ID NO: 49754 - protein, 8 aa, Homo sapiens
  misc_feature: Table A; Target 49754; HLA-C*14:02; MYH4; ENSG00000264424; TAA
HYAGTVDY

SEQ ID NO: 49755 - protein, 10 aa, Homo sapiens
  misc_feature: Table A; Target 49755; HLA-A*23:01; MYH4; ENSG00000264424; TAA
HYAGTVDYNI

SEQ ID NO: 49756 - protein, 10 aa, Homo sapiens
  misc_feature: Table A; Target 49756; HLA-A*24:02; MYH4; ENSG00000264424; TAA
HYAGTVDYNI

SEQ ID NO: 49757 - protein, 10 aa, Homo sapiens
  misc_feature: Table A; Target 49757; HLA-C*06:02; MYH4; ENSG00000264424; TAA
HYAGTVDYNI

SEQ ID NO: 49758 - protein, 11 aa, Homo sapiens
  misc_feature: Table A; Target 49758; HLA-C*03:03; MYH4; ENSG00000264424; TAA
IAEGGKHIHEL

SEQ ID NO: 49759 - protein, 8 aa, Homo sapiens
  misc_feature: Table A; Target 49759; HLA-C*05:01; MYH4; ENSG00000264424; TAA
IAEKDEEL

SEQ ID NO: 49760 - protein, 11 aa, Homo sapiens
  misc_feature: Table A; Target 49760; HLA-C*05:01; MYH4; ENSG00000264424; TAA
IAEKDEELDQL

SEQ ID NO: 49761 - protein, 8 aa, Homo sapiens
  misc_feature: Table A; Target 49761; HLA-A*03:02; MYH4; ENSG00000264424; TAA
IAESQVNK

SEQ ID NO: 49762 - protein, 8 aa, Homo sapiens
  misc_feature: Table A; Target 49762; HLA-B*27:02; MYH4; ENSG00000264424; TAA
IAESQVNK

SEQ ID NO: 49763 - protein, 9 aa, Homo sapiens
  misc_feature: Table A; Target 49763; HLA-A*02:07; MYH4; ENSG00000264424; TAA
IAESQVNKL

SEQ ID NO: 49764 - protein, 9 aa, Homo sapiens
  misc_feature: Table A; Target 49764; HLA-A*23:01; MYH4; ENSG00000264424; TAA
IAESQVNKL

SEQ ID NO: 49765 - protein, 9 aa, Homo sapiens
  misc_feature: Table A; Target 49765; HLA-A*24:02; MYH4; ENSG00000264424; TAA
IAESQVNKL

SEQ ID NO: 49766 - protein, 9 aa, Homo sapiens
  misc_feature: Table A; Target 49766; HLA-A*68:02; MYH4; ENSG00000264424; TAA
IAESQVNKL

SEQ ID NO: 49767 - protein, 9 aa, Homo sapiens
  misc_feature: Table A; Target 49767; HLA-B*27:05; MYH4; ENSG00000264424; TAA
IAESQVNKL

SEQ ID NO: 49768 - protein, 9 aa, Homo sapiens
  misc_feature: Table A; Target 49768; HLA-B*35:01; MYH4; ENSG00000264424; TAA
IAESQVNKL

SEQ ID NO: 49769 - protein, 9 aa, Homo sapiens
  misc_feature: Table A; Target 49769; HLA-B*35:03; MYH4; ENSG00000264424; TAA
IAESQVNKL

SEQ ID NO: 49770 - protein, 9 aa, Homo sapiens
  misc_feature: Table A; Target 49770; HLA-B*38:01; MYH4; ENSG00000264424; TAA
IAESQVNKL

SEQ ID NO: 49771 - protein, 9 aa, Homo sapiens
  misc_feature: Table A; Target 49771; HLA-B*39:01; MYH4; ENSG00000264424; TAA
IAESQVNKL

SEQ ID NO: 49772 - protein, 9 aa, Homo sapiens
  misc_feature: Table A; Target 49772; HLA-B*40:01; MYH4; ENSG00000264424; TAA
IAESQVNKL

SEQ ID NO: 49773 - protein, 9 aa, Homo sapiens
  misc_feature: Table A; Target 49773; HLA-B*51:01; MYH4; ENSG00000264424; TAA
IAESQVNKL

SEQ ID NO: 49774 - protein, 9 aa, Homo sapiens
  misc_feature: Table A; Target 49774; HLA-B*55:01; MYH4; ENSG00000264424; TAA
IAESQVNKL

SEQ ID NO: 49775 - protein, 9 aa, Homo sapiens
  misc_feature: Table A; Target 49775; HLA-B*58:01; MYH4; ENSG00000264424; TAA
IAESQVNKL

SEQ ID NO: 49776 - protein, 9 aa, Homo sapiens
  misc_feature: Table A; Target 49776; HLA-C*01:02; MYH4; ENSG00000264424; TAA
IAESQVNKL

SEQ ID NO: 49777 - protein, 9 aa, Homo sapiens
  misc_feature: Table A; Target 49777; HLA-C*02:02; MYH4; ENSG00000264424; TAA
IAESQVNKL

SEQ ID NO: 49778 - protein, 9 aa, Homo sapiens
  misc_feature: Table A; Target 49778; HLA-C*03:03; MYH4; ENSG00000264424; TAA
IAESQVNKL

SEQ ID NO: 49779 - protein, 9 aa, Homo sapiens
  misc_feature: Table A; Target 49779; HLA-C*03:04; MYH4; ENSG00000264424; TAA
IAESQVNKL

SEQ ID NO: 49780 - protein, 9 aa, Homo sapiens
  misc_feature: Table A; Target 49780; HLA-C*04:01; MYH4; ENSG00000264424; TAA
IAESQVNKL

SEQ ID NO: 49781 - protein, 9 aa, Homo sapiens
  misc_feature: Table A; Target 49781; HLA-C*05:01; MYH4; ENSG00000264424; TAA
IAESQVNKL

SEQ ID NO: 49782 - protein, 9 aa, Homo sapiens
  misc_feature: Table A; Target 49782; HLA-C*07:04; MYH4; ENSG00000264424; TAA
IAESQVNKL

SEQ ID NO: 49783 - protein, 9 aa, Homo sapiens
  misc_feature: Table A; Target 49783; HLA-C*12:03; MYH4; ENSG00000264424; TAA
IAESQVNKL

SEQ ID NO: 49784 - protein, 9 aa, Homo sapiens
  misc_feature: Table A; Target 49784; HLA-C*14:02; MYH4; ENSG00000264424; TAA
IAESQVNKL

SEQ ID NO: 49785 - protein, 9 aa, Homo sapiens
  misc_feature: Table A; Target 49785; HLA-C*16:01; MYH4; ENSG00000264424; TAA
IAESQVNKL

SEQ ID NO: 49786 - protein, 9 aa, Homo sapiens
  misc_feature: Table A; Target 49786; HLA-C*16:02; MYH4; ENSG00000264424; TAA
IAESQVNKL

SEQ ID NO: 49787 - protein, 10 aa, Homo sapiens
  misc_feature: Table A; Target 49787; HLA-A*33:03; MYH4; ENSG00000264424; TAA
IAESQVNKLR

SEQ ID NO: 49788 - protein, 10 aa, Homo sapiens
  misc_feature: Table A; Target 49788; HLA-A*68:01; MYH4; ENSG00000264424; TAA
IAESQVNKLR

SEQ ID NO: 49789 - protein, 10 aa, Homo sapiens
  misc_feature: Table A; Target 49789; HLA-C*07:06; MYH4; ENSG00000264424; TAA
IAESQVNKLR

SEQ ID NO: 49790 - protein, 10 aa, Homo sapiens
  misc_feature: Table A; Target 49790; HLA-B*57:01; MYH4; ENSG00000264424; TAA
IALDKKQRNF

SEQ ID NO: 49791 - protein, 8 aa, Homo sapiens
  misc_feature: Table A; Target 49791; HLA-B*58:01; MYH4; ENSG00000264424; TAA
IAVTGEKK

SEQ ID NO: 49792 - protein, 8 aa, Homo sapiens
  misc_feature: Table A; Target 49792; HLA-C*05:01; MYH4; ENSG00000264424; TAA
IAVTGEKK

SEQ ID NO: 49793 - protein, 10 aa, Homo sapiens
  misc_feature: Table A; Target 49793; HLA-B*27:02; MYH4; ENSG00000264424; TAA
IDDLELTLAK

SEQ ID NO: 49794 - protein, 8 aa, Homo sapiens
  misc_feature: Table A; Target 49794; HLA-C*05:01; MYH4; ENSG00000264424; TAA
IDDQEELM

SEQ ID NO: 49795 - protein, 8 aa, Homo sapiens
  misc_feature: Table A; Target 49795; HLA-B*37:01; MYH4; ENSG00000264424; TAA
IDHTQYKF

SEQ ID NO: 49796 - protein, 8 aa, Homo sapiens
  misc_feature: Table A; Target 49796; HLA-B*40:02; MYH4; ENSG00000264424; TAA
IDHTQYKF

SEQ ID NO: 49797 - protein, 8 aa, Homo sapiens
  misc_feature: Table A; Target 49797; HLA-B*37:01; MYH4; ENSG00000264424; TAA
IDSLQRVK

SEQ ID NO: 49798 - protein, 8 aa, Homo sapiens
  misc_feature: Table A; Target 49798; HLA-C*06:02; MYH4; ENSG00000264424; TAA
IDSLQRVK

SEQ ID NO: 49799 - protein, 8 aa, Homo sapiens
  misc_feature: Table A; Target 49799; HLA-C*16:01; MYH4; ENSG00000264424; TAA
IDSLQRVK

SEQ ID NO: 49800 - protein, 9 aa, Homo sapiens
  misc_feature: Table A; Target 49800; HLA-A*30:01; MYH4; ENSG00000264424; TAA
IDVERSNAA

SEQ ID NO: 49801 - protein, 9 aa, Homo sapiens
  misc_feature: Table A; Target 49801; HLA-B*37:01; MYH4; ENSG00000264424; TAA
IDVERSNAA

SEQ ID NO: 49802 - protein, 9 aa, Homo sapiens
  misc_feature: Table A; Target 49802; HLA-B*40:02; MYH4; ENSG00000264424; TAA
IDVERSNAA

SEQ ID NO: 49803 - protein, 9 aa, Homo sapiens
  misc_feature: Table A; Target 49803; HLA-B*54:01; MYH4; ENSG00000264424; TAA
IDVERSNAA

SEQ ID NO: 49804 - protein, 9 aa, Homo sapiens
  misc_feature: Table A; Target 49804; HLA-B*37:01; MYH4; ENSG00000264424; TAA
IEAERASRA

SEQ ID NO: 49805 - protein, 9 aa, Homo sapiens
  misc_feature: Table A; Target 49805; HLA-B*49:01; MYH4; ENSG00000264424; TAA
IEAERASRA

SEQ ID NO: 49806 - protein, 8 aa, Homo sapiens
  misc_feature: Table A; Target 49806; HLA-B*18:01; MYH4; ENSG00000264424; TAA
IEAQNKPF

SEQ ID NO: 49807 - protein, 8 aa, Homo sapiens
  misc_feature: Table A; Target 49807; HLA-B*37:01; MYH4; ENSG00000264424; TAA
IEAQNKPF

SEQ ID NO: 49808 - protein, 9 aa, Homo sapiens
  misc_feature: Table A; Target 49808; HLA-A*30:01; MYH4; ENSG00000264424; TAA
IEDEQALAI

SEQ ID NO: 49809 - protein, 9 aa, Homo sapiens
  misc_feature: Table A; Target 49809; HLA-B*13:02; MYH4; ENSG00000264424; TAA
IEDEQALAI

SEQ ID NO: 49810 - protein, 9 aa, Homo sapiens
  misc_feature: Table A; Target 49810; HLA-B*18:01; MYH4; ENSG00000264424; TAA
IEDEQALAI

SEQ ID NO: 49811 - protein, 9 aa, Homo sapiens
  misc_feature: Table A; Target 49811; HLA-B*38:01; MYH4; ENSG00000264424; TAA
IEDEQALAI

SEQ ID NO: 49812 - protein, 9 aa, Homo sapiens
  misc_feature: Table A; Target 49812; HLA-B*40:01; MYH4; ENSG00000264424; TAA
IEDEQALAI

SEQ ID NO: 49813 - protein, 9 aa, Homo sapiens
  misc_feature: Table A; Target 49813; HLA-B*44:02; MYH4; ENSG00000264424; TAA
IEDEQALAI

SEQ ID NO: 49814 - protein, 9 aa, Homo sapiens
  misc_feature: Table A; Target 49814; HLA-B*44:03; MYH4; ENSG00000264424; TAA
IEDEQALAI

SEQ ID NO: 49815 - protein, 9 aa, Homo sapiens
  misc_feature: Table A; Target 49815; HLA-B*49:01; MYH4; ENSG00000264424; TAA
IEDEQALAI

SEQ ID NO: 49816 - protein, 9 aa, Homo sapiens
  misc_feature: Table A; Target 49816; HLA-C*05:01; MYH4; ENSG00000264424; TAA
IEDEQALAI

SEQ ID NO: 49817 - protein, 11 aa, Homo sapiens
  misc_feature: Table A; Target 49817; HLA-A*30:01; MYH4; ENSG00000264424; TAA
IEDEQALAIQL

SEQ ID NO: 49818 - protein, 11 aa, Homo sapiens
  misc_feature: Table A; Target 49818; HLA-B*40:01; MYH4; ENSG00000264424; TAA
IEDEQALAIQL

SEQ ID NO: 49819 - protein, 11 aa, Homo sapiens
  misc_feature: Table A; Target 49819; HLA-B*49:01; MYH4; ENSG00000264424; TAA
IEDEQALAIQL

SEQ ID NO: 49820 - protein, 9 aa, Homo sapiens
  misc_feature: Table A; Target 49820; HLA-B*18:01; MYH4; ENSG00000264424; TAA
IEDMAMMTH

SEQ ID NO: 49821 - protein, 10 aa, Homo sapiens
  misc_feature: Table A; Target 49821; HLA-A*30:01; MYH4; ENSG00000264424; TAA
IEDMAMMTHL

SEQ ID NO: 49822 - protein, 10 aa, Homo sapiens
  misc_feature: Table A; Target 49822; HLA-B*40:01; MYH4; ENSG00000264424; TAA
IEDMAMMTHL

SEQ ID NO: 49823 - protein, 10 aa, Homo sapiens
  misc_feature: Table A; Target 49823; HLA-B*40:02; MYH4; ENSG00000264424; TAA
IEDMAMMTHL

SEQ ID NO: 49824 - protein, 10 aa, Homo sapiens
  misc_feature: Table A; Target 49824; HLA-B*49:01; MYH4; ENSG00000264424; TAA
IEDMAMMTHL

SEQ ID NO: 49825 - protein, 8 aa, Homo sapiens
  misc_feature: Table A; Target 49825; HLA-A*30:01; MYH4; ENSG00000264424; TAA
IEIDHTQY

SEQ ID NO: 49826 - protein, 8 aa, Homo sapiens
  misc_feature: Table A; Target 49826; HLA-A*32:01; MYH4; ENSG00000264424; TAA
IEIDHTQY

SEQ ID NO: 49827 - protein, 8 aa, Homo sapiens
  misc_feature: Table A; Target 49827; HLA-B*15:01; MYH4; ENSG00000264424; TAA
IEIDHTQY

SEQ ID NO: 49828 - protein, 8 aa, Homo sapiens
  misc_feature: Table A; Target 49828; HLA-B*15:03; MYH4; ENSG00000264424; TAA
IEIDHTQY

SEQ ID NO: 49829 - protein, 8 aa, Homo sapiens
  misc_feature: Table A; Target 49829; HLA-B*18:01; MYH4; ENSG00000264424; TAA
IEIDHTQY

SEQ ID NO: 49830 - protein, 8 aa, Homo sapiens
  misc_feature: Table A; Target 49830; HLA-B*27:02; MYH4; ENSG00000264424; TAA
IEIDHTQY

SEQ ID NO: 49831 - protein, 8 aa, Homo sapiens
  misc_feature: Table A; Target 49831; HLA-B*37:01; MYH4; ENSG00000264424; TAA
IEIDHTQY

SEQ ID NO: 49832 - protein, 8 aa, Homo sapiens
  misc_feature: Table A; Target 49832; HLA-B*44:02; MYH4; ENSG00000264424; TAA
IEIDHTQY

SEQ ID NO: 49833 - protein, 8 aa, Homo sapiens
  misc_feature: Table A; Target 49833; HLA-B*44:03; MYH4; ENSG00000264424; TAA
IEIDHTQY

SEQ ID NO: 49834 - protein, 8 aa, Homo sapiens
  misc_feature: Table A; Target 49834; HLA-B*46:01; MYH4; ENSG00000264424; TAA
IEIDHTQY

SEQ ID NO: 49835 - protein, 8 aa, Homo sapiens
  misc_feature: Table A; Target 49835; HLA-B*49:01; MYH4; ENSG00000264424; TAA
IEIDHTQY

SEQ ID NO: 49836 - protein, 8 aa, Homo sapiens
  misc_feature: Table A; Target 49836; HLA-C*02:02; MYH4; ENSG00000264424; TAA
IEIDHTQY

SEQ ID NO: 49837 - protein, 8 aa, Homo sapiens
  misc_feature: Table A; Target 49837; HLA-C*07:01; MYH4; ENSG00000264424; TAA
IEIDHTQY

SEQ ID NO: 49838 - protein, 8 aa, Homo sapiens
  misc_feature: Table A; Target 49838; HLA-C*14:02; MYH4; ENSG00000264424; TAA
IEIDHTQY

SEQ ID NO: 49839 - protein, 8 aa, Homo sapiens
  misc_feature: Table A; Target 49839; HLA-C*16:04; MYH4; ENSG00000264424; TAA
IEIDHTQY

SEQ ID NO: 49840 - protein, 9 aa, Homo sapiens
  misc_feature: Table A; Target 49840; HLA-A*11:01; MYH4; ENSG00000264424; TAA
IEIDHTQYK

SEQ ID NO: 49841 - protein, 9 aa, Homo sapiens
  misc_feature: Table A; Target 49841; HLA-B*27:05; MYH4; ENSG00000264424; TAA
IEIDHTQYK

SEQ ID NO: 49842 - protein, 9 aa, Homo sapiens
  misc_feature: Table A; Target 49842; HLA-B*44:02; MYH4; ENSG00000264424; TAA
IEIDHTQYK

SEQ ID NO: 49843 - protein, 9 aa, Homo sapiens
  misc_feature: Table A; Target 49843; HLA-B*44:03; MYH4; ENSG00000264424; TAA
IEIDHTQYK

SEQ ID NO: 49844 - protein, 9 aa, Homo sapiens
  misc_feature: Table A; Target 49844; HLA-B*49:01; MYH4; ENSG00000264424; TAA
IEIDHTQYK

SEQ ID NO: 49845 - protein, 10 aa, Homo sapiens
  misc_feature: Table A; Target 49845; HLA-A*23:01; MYH4; ENSG00000264424; TAA
IEIDHTQYKF

SEQ ID NO: 49846 - protein, 10 aa, Homo sapiens
  misc_feature: Table A; Target 49846; HLA-A*24:02; MYH4; ENSG00000264424; TAA
IEIDHTQYKF

SEQ ID NO: 49847 - protein, 10 aa, Homo sapiens
  misc_feature: Table A; Target 49847; HLA-A*30:01; MYH4; ENSG00000264424; TAA
IEIDHTQYKF

SEQ ID NO: 49848 - protein, 10 aa, Homo sapiens
  misc_feature: Table A; Target 49848; HLA-B*18:01; MYH4; ENSG00000264424; TAA
IEIDHTQYKF

SEQ ID NO: 49849 - protein, 10 aa, Homo sapiens
  misc_feature: Table A; Target 49849; HLA-B*44:02; MYH4; ENSG00000264424; TAA
IEIDHTQYKF

SEQ ID NO: 49850 - protein, 10 aa, Homo sapiens
  misc_feature: Table A; Target 49850; HLA-B*44:03; MYH4; ENSG00000264424; TAA
IEIDHTQYKF

SEQ ID NO: 49851 - protein, 10 aa, Homo sapiens
  misc_feature: Table A; Target 49851; HLA-B*57:01; MYH4; ENSG00000264424; TAA
IEIDHTQYKF

SEQ ID NO: 49852 - protein, 10 aa, Homo sapiens
  misc_feature: Table A; Target 49852; HLA-C*16:04; MYH4; ENSG00000264424; TAA
IEIDHTQYKF

SEQ ID NO: 49853 - protein, 8 aa, Homo sapiens
  misc_feature: Table A; Target 49853; HLA-B*18:01; MYH4; ENSG00000264424; TAA
IEKPMGIF

SEQ ID NO: 49854 - protein, 8 aa, Homo sapiens
  misc_feature: Table A; Target 49854; HLA-B*40:02; MYH4; ENSG00000264424; TAA
IEKPMGIF

SEQ ID NO: 49855 - protein, 10 aa, Homo sapiens
  misc_feature: Table A; Target 49855; HLA-A*30:01; MYH4; ENSG00000264424; TAA
IEKPMGIFSI

SEQ ID NO: 49856 - protein, 10 aa, Homo sapiens
  misc_feature: Table A; Target 49856; HLA-B*49:01; MYH4; ENSG00000264424; TAA
IEKPMGIFSI

SEQ ID NO: 49857 - protein, 8 aa, Homo sapiens
  misc_feature: Table A; Target 49857; HLA-B*18:01; MYH4; ENSG00000264424; TAA
IELIEKPM

SEQ ID NO: 49858 - protein, 10 aa, Homo sapiens
  misc_feature: Table A; Target 49858; HLA-B*49:01; MYH4; ENSG00000264424; TAA
IELIEKPMGI

SEQ ID NO: 49859 - protein, 8 aa, Homo sapiens
  misc_feature: Table A; Target 49859; HLA-B*18:01; MYH4; ENSG00000264424; TAA
IEMLLITT

SEQ ID NO: 49860 - protein, 9 aa, Homo sapiens
  misc_feature: Table A; Target 49860; HLA-B*18:01; MYH4; ENSG00000264424; TAA
IEMLLITTN

SEQ ID NO: 49861 - protein, 9 aa, Homo sapiens
  misc_feature: Table A; Target 49861; HLA-B*49:01; MYH4; ENSG00000264424; TAA
IEMLLITTN

SEQ ID NO: 49862 - protein, 11 aa, Homo sapiens
  misc_feature: Table A; Target 49862; HLA-B*18:01; MYH4; ENSG00000264424; TAA
IEMLLITTNPY

SEQ ID NO: 49863 - protein, 11 aa, Homo sapiens
  misc_feature: Table A; Target 49863; HLA-B*44:02; MYH4; ENSG00000264424; TAA
IEMLLITTNPY

SEQ ID NO: 49864 - protein, 8 aa, Homo sapiens
  misc_feature: Table A; Target 49864; HLA-B*27:02; MYH4; ENSG00000264424; TAA
IETYLLEK

SEQ ID NO: 49865 - protein, 8 aa, Homo sapiens
  misc_feature: Table A; Target 49865; HLA-B*18:01; MYH4; ENSG00000264424; TAA
IEWEFIDF

SEQ ID NO: 49866 - protein, 10 aa, Homo sapiens
  misc_feature: Table A; Target 49866; HLA-B*35:03; MYH4; ENSG00000264424; TAA
IFDFNSLEQL

SEQ ID NO: 49867 - protein, 10 aa, Homo sapiens
  misc_feature: Table A; Target 49867; HLA-C*04:01; MYH4; ENSG00000264424; TAA
IFDFNSLEQL

SEQ ID NO: 49868 - protein, 8 aa, Homo sapiens
  misc_feature: Table A; Target 49868; HLA-C*14:02; MYH4; ENSG00000264424; TAA
IFGEAAPF

SEQ ID NO: 49869 - protein, 9 aa, Homo sapiens
  misc_feature: Table A; Target 49869; HLA-A*23:01; MYH4; ENSG00000264424; TAA
IFGEAAPFL

SEQ ID NO: 49870 - protein, 9 aa, Homo sapiens
  misc_feature: Table A; Target 49870; HLA-A*24:02; MYH4; ENSG00000264424; TAA
IFGEAAPFL

SEQ ID NO: 49871 - protein, 9 aa, Homo sapiens
  misc_feature: Table A; Target 49871; HLA-A*29:02; MYH4; ENSG00000264424; TAA
IFGEAAPFL

SEQ ID NO: 49872 - protein, 9 aa, Homo sapiens
  misc_feature: Table A; Target 49872; HLA-C*01:02; MYH4; ENSG00000264424; TAA
IFGEAAPFL

SEQ ID NO: 49873 - protein, 9 aa, Homo sapiens
  misc_feature: Table A; Target 49873; HLA-C*04:01; MYH4; ENSG00000264424; TAA
IFGEAAPFL

SEQ ID NO: 49874 - protein, 9 aa, Homo sapiens
  misc_feature: Table A; Target 49874; HLA-C*14:02; MYH4; ENSG00000264424; TAA
IFGEAAPFL

SEQ ID NO: 49875 - protein, 9 aa, Homo sapiens
  misc_feature: Table A; Target 49875; HLA-A*29:02; MYH4; ENSG00000264424; TAA
IFSISDNAY

SEQ ID NO: 49876 - protein, 9 aa, Homo sapiens
  misc_feature: Table A; Target 49876; HLA-A*30:02; MYH4; ENSG00000264424; TAA
IFSISDNAY

SEQ ID NO: 49877 - protein, 9 aa, Homo sapiens
  misc_feature: Table A; Target 49877; HLA-C*14:02; MYH4; ENSG00000264424; TAA
IFSISDNAY

SEQ ID NO: 49878 - protein, 11 aa, Homo sapiens
  misc_feature: Table A; Target 49878; HLA-A*23:01; MYH4; ENSG00000264424; TAA
IFSISDNAYQF

SEQ ID NO: 49879 - protein, 11 aa, Homo sapiens
  misc_feature: Table A; Target 49879; HLA-A*24:02; MYH4; ENSG00000264424; TAA
IFSISDNAYQF

SEQ ID NO: 49880 - protein, 9 aa, Homo sapiens
  misc_feature: Table A; Target 49880; HLA-A*33:03; MYH4; ENSG00000264424; TAA
IFYQILSNK

SEQ ID NO: 49881 - protein, 9 aa, Homo sapiens
  misc_feature: Table A; Target 49881; HLA-B*38:01; MYH4; ENSG00000264424; TAA
IHFGATGKL

SEQ ID NO: 49882 - protein, 9 aa, Homo sapiens
  misc_feature: Table A; Target 49882; HLA-B*39:01; MYH4; ENSG00000264424; TAA
IHFGATGKL

SEQ ID NO: 49883 - protein, 8 aa, Homo sapiens
  misc_feature: Table A; Target 49883; HLA-A*23:01; MYH4; ENSG00000264424; TAA
IISANPLL

SEQ ID NO: 49884 - protein, 9 aa, Homo sapiens
  misc_feature: Table A; Target 49884; HLA-A*03:02; MYH4; ENSG00000264424; TAA
ILGFTADEK

SEQ ID NO: 49885 - protein, 9 aa, Homo sapiens
  misc_feature: Table A; Target 49885; HLA-B*27:02; MYH4; ENSG00000264424; TAA
ILGFTADEK

SEQ ID NO: 49886 - protein, 9 aa, Homo sapiens
  misc_feature: Table A; Target 49886; HLA-A*02:01; MYH4; ENSG00000264424; TAA
ILITGESGA

SEQ ID NO: 49887 - protein, 9 aa, Homo sapiens
  misc_feature: Table A; Target 49887; HLA-A*02:03; MYH4; ENSG00000264424; TAA
ILITGESGA

SEQ ID NO: 49888 - protein, 11 aa, Homo sapiens
  misc_feature: Table A; Target 49888; HLA-A*02:03; MYH4; ENSG00000264424; TAA
ILITGESGAGK

SEQ ID NO: 49889 - protein, 11 aa, Homo sapiens
  misc_feature: Table A; Target 49889; HLA-A*03:01; MYH4; ENSG00000264424; TAA
ILITGESGAGK

SEQ ID NO: 49890 - protein, 11 aa, Homo sapiens
  misc_feature: Table A; Target 49890; HLA-A*03:02; MYH4; ENSG00000264424; TAA
ILITGESGAGK

SEQ ID NO: 49891 - protein, 11 aa, Homo sapiens
  misc_feature: Table A; Target 49891; HLA-A*11:01; MYH4; ENSG00000264424; TAA
ILITGESGAGK

SEQ ID NO: 49892 - protein, 11 aa, Homo sapiens
  misc_feature: Table A; Target 49892; HLA-A*31:01; MYH4; ENSG00000264424; TAA
ILITGESGAGK

SEQ ID NO: 49893 - protein, 11 aa, Homo sapiens
  misc_feature: Table A; Target 49893; HLA-A*68:01; MYH4; ENSG00000264424; TAA
ILITGESGAGK

SEQ ID NO: 49894 - protein, 11 aa, Homo sapiens
  misc_feature: Table A; Target 49894; HLA-B*27:02; MYH4; ENSG00000264424; TAA
ILITGESGAGK

SEQ ID NO: 49895 - protein, 11 aa, Homo sapiens
  misc_feature: Table A; Target 49895; HLA-B*27:05; MYH4; ENSG00000264424; TAA
ILITGESGAGK

SEQ ID NO: 49896 - protein, 11 aa, Homo sapiens
  misc_feature: Table A; Target 49896; HLA-C*01:02; MYH4; ENSG00000264424; TAA
ILITGESGAGK

SEQ ID NO: 49897 - protein, 9 aa, Homo sapiens
  misc_feature: Table A; Target 49897; HLA-A*02:01; MYH4; ENSG00000264424; TAA
ILKDTQLHL

SEQ ID NO: 49898 - protein, 9 aa, Homo sapiens
  misc_feature: Table A; Target 49898; HLA-A*02:03; MYH4; ENSG00000264424; TAA
ILKDTQLHL

SEQ ID NO: 49899 - protein, 9 aa, Homo sapiens
  misc_feature: Table A; Target 49899; HLA-A*02:04; MYH4; ENSG00000264424; TAA
ILKDTQLHL

SEQ ID NO: 49900 - protein, 9 aa, Homo sapiens
  misc_feature: Table A; Target 49900; HLA-A*02:07; MYH4; ENSG00000264424; TAA
ILKDTQLHL

SEQ ID NO: 49901 - protein, 9 aa, Homo sapiens
  misc_feature: Table A; Target 49901; HLA-A*03:01; MYH4; ENSG00000264424; TAA
ILKDTQLHL

SEQ ID NO: 49902 - protein, 9 aa, Homo sapiens
  misc_feature: Table A; Target 49902; HLA-A*23:01; MYH4; ENSG00000264424; TAA
ILKDTQLHL

SEQ ID NO: 49903 - protein, 9 aa, Homo sapiens
  misc_feature: Table A; Target 49903; HLA-A*29:02; MYH4; ENSG00000264424; TAA
ILKDTQLHL

SEQ ID NO: 49904 - protein, 9 aa, Homo sapiens
  misc_feature: Table A; Target 49904; HLA-B*13:02; MYH4; ENSG00000264424; TAA
ILKDTQLHL

SEQ ID NO: 49905 - protein, 11 aa, Homo sapiens
  misc_feature: Table A; Target 49905; HLA-A*02:03; MYH4; ENSG00000264424; TAA
ILRIQLELNQV

SEQ ID NO: 49906 - protein, 9 aa, Homo sapiens
  misc_feature: Table A; Target 49906; HLA-A*02:01; MYH4; ENSG00000264424; TAA
ILSNKKPEL

SEQ ID NO: 49907 - protein, 9 aa, Homo sapiens
  misc_feature: Table A; Target 49907; HLA-A*02:04; MYH4; ENSG00000264424; TAA
ILSNKKPEL

SEQ ID NO: 49908 - protein, 9 aa, Homo sapiens
  misc_feature: Table A; Target 49908; HLA-C*16:01; MYH4; ENSG00000264424; TAA
ILSNKKPEL

SEQ ID NO: 49909 - protein, 9 aa, Homo sapiens
  misc_feature: Table A; Target 49909; HLA-A*03:01; MYH4; ENSG00000264424; TAA
ILYADFKQR

SEQ ID NO: 49910 - protein, 9 aa, Homo sapiens
  misc_feature: Table A; Target 49910; HLA-A*31:01; MYH4; ENSG00000264424; TAA
ILYADFKQR

SEQ ID NO: 49911 - protein, 9 aa, Homo sapiens
  misc_feature: Table A; Target 49911; HLA-A*33:01; MYH4; ENSG00000264424; TAA
ILYADFKQR

SEQ ID NO: 49912 - protein, 10 aa, Homo sapiens
  misc_feature: Table A; Target 49912; HLA-A*01:01; MYH4; ENSG00000264424; TAA
ILYADFKQRY

SEQ ID NO: 49913 - protein, 10 aa, Homo sapiens
  misc_feature: Table A; Target 49913; HLA-A*29:02; MYH4; ENSG00000264424; TAA
ILYADFKQRY

SEQ ID NO: 49914 - protein, 10 aa, Homo sapiens
  misc_feature: Table A; Target 49914; HLA-A*30:02; MYH4; ENSG00000264424; TAA
ILYADFKQRY

SEQ ID NO: 49915 - protein, 11 aa, Homo sapiens
  misc_feature: Table A; Target 49915; HLA-A*03:01; MYH4; ENSG00000264424; TAA
ILYADFKQRYK

SEQ ID NO: 49916 - protein, 10 aa, Homo sapiens
  misc_feature: Table A; Target 49916; HLA-A*68:01; MYH4; ENSG00000264424; TAA
INAELTAKKR

SEQ ID NO: 49917 - protein, 8 aa, Homo sapiens
  misc_feature: Table A; Target 49917; HLA-C*04:01; MYH4; ENSG00000264424; TAA
INDLASNM

SEQ ID NO: 49918 - protein, 8 aa, Homo sapiens
  misc_feature: Table A; Target 49918; HLA-C*05:01; MYH4; ENSG00000264424; TAA
INDLASNM

SEQ ID NO: 49919 - protein, 8 aa, Homo sapiens
  misc_feature: Table A; Target 49919; HLA-B*27:02; MYH4; ENSG00000264424; TAA
INELSAQK

SEQ ID NO: 49920 - protein, 8 aa, Homo sapiens
  misc_feature: Table A; Target 49920; HLA-C*06:02; MYH4; ENSG00000264424; TAA
INFTNEKL

SEQ ID NO: 49921 - protein, 8 aa, Homo sapiens
  misc_feature: Table A; Target 49921; HLA-C*07:01; MYH4; ENSG00000264424; TAA
INFTNEKL

SEQ ID NO: 49922 - protein, 11 aa, Homo sapiens
  misc_feature: Table A; Target 49922; HLA-A*23:01; MYH4; ENSG00000264424; TAA
INFTNEKLQQF

SEQ ID NO: 49923 - protein, 11 aa, Homo sapiens
  misc_feature: Table A; Target 49923; HLA-B*57:01; MYH4; ENSG00000264424; TAA
INFTNEKLQQF

SEQ ID NO: 49924 - protein, 8 aa, Homo sapiens
  misc_feature: Table A; Target 49924; HLA-B*27:02; MYH4; ENSG00000264424; TAA
INQQLDTK

SEQ ID NO: 49925 - protein, 11 aa, Homo sapiens
  misc_feature: Table A; Target 49925; HLA-A*31:01; MYH4; ENSG00000264424; TAA
INQQLDTKQPR

SEQ ID NO: 49926 - protein, 11 aa, Homo sapiens
  misc_feature: Table A; Target 49926; HLA-A*33:01; MYH4; ENSG00000264424; TAA
INQQLDTKQPR

SEQ ID NO: 49927 - protein, 11 aa, Homo sapiens
  misc_feature: Table A; Target 49927; HLA-A*33:03; MYH4; ENSG00000264424; TAA
INQQLDTKQPR

SEQ ID NO: 49928 - protein, 10 aa, Homo sapiens
  misc_feature: Table A; Target 49928; HLA-B*27:02; MYH4; ENSG00000264424; TAA
IPEGQFIDSK

SEQ ID NO: 49929 - protein, 9 aa, Homo sapiens
  misc_feature: Table A; Target 49929; HLA-B*55:01; MYH4; ENSG00000264424; TAA
IPNETKTPG

SEQ ID NO: 49930 - protein, 9 aa, Homo sapiens
  misc_feature: Table A; Target 49930; HLA-B*56:01; MYH4; ENSG00000264424; TAA
IPNETKTPG

SEQ ID NO: 49931 - protein, 10 aa, Homo sapiens
  misc_feature: Table A; Target 49931; HLA-B*54:01; MYH4; ENSG00000264424; TAA
IPNETKTPGA

SEQ ID NO: 49932 - protein, 10 aa, Homo sapiens
  misc_feature: Table A; Target 49932; HLA-B*55:01; MYH4; ENSG00000264424; TAA
IPNETKTPGA

SEQ ID NO: 49933 - protein, 10 aa, Homo sapiens
  misc_feature: Table A; Target 49933; HLA-B*56:01; MYH4; ENSG00000264424; TAA
IPNETKTPGA

SEQ ID NO: 49934 - protein, 11 aa, Homo sapiens
  misc_feature: Table A; Target 49934; HLA-B*07:02; MYH4; ENSG00000264424; TAA
IPNETKTPGAM

SEQ ID NO: 49935 - protein, 11 aa, Homo sapiens
  misc_feature: Table A; Target 49935; HLA-B*35:01; MYH4; ENSG00000264424; TAA
IPNETKTPGAM

SEQ ID NO: 49936 - protein, 11 aa, Homo sapiens
  misc_feature: Table A; Target 49936; HLA-B*35:03; MYH4; ENSG00000264424; TAA
IPNETKTPGAM

SEQ ID NO: 49937 - protein, 11 aa, Homo sapiens
  misc_feature: Table A; Target 49937; HLA-B*55:01; MYH4; ENSG00000264424; TAA
IPNETKTPGAM

SEQ ID NO: 49938 - protein, 10 aa, Homo sapiens
  misc_feature: Table A; Target 49938; HLA-A*02:01; MYH4; ENSG00000264424; TAA
IQLEAKIKEV

SEQ ID NO: 49939 - protein, 10 aa, Homo sapiens
  misc_feature: Table A; Target 49939; HLA-A*02:03; MYH4; ENSG00000264424; TAA
IQLEAKIKEV

SEQ ID NO: 49940 - protein, 8 aa, Homo sapiens
  misc_feature: Table A; Target 49940; HLA-A*02:01; MYH4; ENSG00000264424; TAA
IQLELNQV

SEQ ID NO: 49941 - protein, 8 aa, Homo sapiens
  misc_feature: Table A; Target 49941; HLA-B*13:02; MYH4; ENSG00000264424; TAA
IQLELNQV

SEQ ID NO: 49942 - protein, 8 aa, Homo sapiens
  misc_feature: Table A; Target 49942; HLA-C*06:02; MYH4; ENSG00000264424; TAA
IQLELNQV

SEQ ID NO: 49943 - protein, 8 aa, Homo sapiens
  misc_feature: Table A; Target 49943; HLA-A*31:01; MYH4; ENSG00000264424; TAA
IQLNHANR

SEQ ID NO: 49944 - protein, 9 aa, Homo sapiens
  misc_feature: Table A; Target 49944; HLA-A*02:01; MYH4; ENSG00000264424; TAA
IQYFATIAV

SEQ ID NO: 49945 - protein, 9 aa, Homo sapiens
  misc_feature: Table A; Target 49945; HLA-A*02:03; MYH4; ENSG00000264424; TAA
IQYFATIAV

SEQ ID NO: 49946 - protein, 9 aa, Homo sapiens
  misc_feature: Table A; Target 49946; HLA-A*30:01; MYH4; ENSG00000264424; TAA
IQYFATIAV

SEQ ID NO: 49947 - protein, 9 aa, Homo sapiens
  misc_feature: Table A; Target 49947; HLA-B*13:02; MYH4; ENSG00000264424; TAA
IQYFATIAV

SEQ ID NO: 49948 - protein, 9 aa, Homo sapiens
  misc_feature: Table A; Target 49948; HLA-B*49:01; MYH4; ENSG00000264424; TAA
IQYFATIAV

SEQ ID NO: 49949 - protein, 9 aa, Homo sapiens
  misc_feature: Table A; Target 49949; HLA-C*02:02; MYH4; ENSG00000264424; TAA
IQYFATIAV

SEQ ID NO: 49950 - protein, 8 aa, Homo sapiens
  misc_feature: Table A; Target 49950; HLA-B*15:01; MYH4; ENSG00000264424; TAA
IQYNIRAF

SEQ ID NO: 49951 - protein, 8 aa, Homo sapiens
  misc_feature: Table A; Target 49951; HLA-B*15:03; MYH4; ENSG00000264424; TAA
IQYNIRAF

SEQ ID NO: 49952 - protein, 9 aa, Homo sapiens
  misc_feature: Table A; Target 49952; HLA-B*54:01; MYH4; ENSG00000264424; TAA
ISANPLLEA

SEQ ID NO: 49953 - protein, 9 aa, Homo sapiens
  misc_feature: Table A; Target 49953; HLA-B*56:01; MYH4; ENSG00000264424; TAA
ISANPLLEA

SEQ ID NO: 49954 - protein, 9 aa, Homo sapiens
  misc_feature: Table A; Target 49954; HLA-C*03:03; MYH4; ENSG00000264424; TAA
ISANPLLEA

SEQ ID NO: 49955 - protein, 9 aa, Homo sapiens
  misc_feature: Table A; Target 49955; HLA-C*03:04; MYH4; ENSG00000264424; TAA
ISANPLLEA

SEQ ID NO: 49956 - protein, 10 aa, Homo sapiens
  misc_feature: Table A; Target 49956; HLA-A*23:01; MYH4; ENSG00000264424; TAA
ISANPLLEAF

SEQ ID NO: 49957 - protein, 10 aa, Homo sapiens
  misc_feature: Table A; Target 49957; HLA-B*27:02; MYH4; ENSG00000264424; TAA
ISANPLLEAF

SEQ ID NO: 49958 - protein, 10 aa, Homo sapiens
  misc_feature: Table A; Target 49958; HLA-B*46:01; MYH4; ENSG00000264424; TAA
ISANPLLEAF

SEQ ID NO: 49959 - protein, 10 aa, Homo sapiens
  misc_feature: Table A; Target 49959; HLA-B*57:01; MYH4; ENSG00000264424; TAA
ISANPLLEAF

SEQ ID NO: 49960 - protein, 10 aa, Homo sapiens
  misc_feature: Table A; Target 49960; HLA-B*58:01; MYH4; ENSG00000264424; TAA
ISANPLLEAF

SEQ ID NO: 49961 - protein, 8 aa, Homo sapiens
  misc_feature: Table A; Target 49961; HLA-A*01:01; MYH4; ENSG00000264424; TAA
ISDLTEQI

SEQ ID NO: 49962 - protein, 8 aa, Homo sapiens
  misc_feature: Table A; Target 49962; HLA-C*05:01; MYH4; ENSG00000264424; TAA
ISDLTEQI

SEQ ID NO: 49963 - protein, 8 aa, Homo sapiens
  misc_feature: Table A; Target 49963; HLA-A*23:01; MYH4; ENSG00000264424; TAA
ISDNAYQF

SEQ ID NO: 49964 - protein, 8 aa, Homo sapiens
  misc_feature: Table A; Target 49964; HLA-A*32:01; MYH4; ENSG00000264424; TAA
ISDNAYQF

SEQ ID NO: 49965 - protein, 8 aa, Homo sapiens
  misc_feature: Table A; Target 49965; HLA-B*38:01; MYH4; ENSG00000264424; TAA
ISDNAYQF

SEQ ID NO: 49966 - protein, 8 aa, Homo sapiens
  misc_feature: Table A; Target 49966; HLA-B*39:01; MYH4; ENSG00000264424; TAA
ISDNAYQF

SEQ ID NO: 49967 - protein, 8 aa, Homo sapiens
  misc_feature: Table A; Target 49967; HLA-B*58:01; MYH4; ENSG00000264424; TAA
ISDNAYQF

SEQ ID NO: 49968 - protein, 8 aa, Homo sapiens
  misc_feature: Table A; Target 49968; HLA-C*04:01; MYH4; ENSG00000264424; TAA
ISDNAYQF

SEQ ID NO: 49969 - protein, 8 aa, Homo sapiens
  misc_feature: Table A; Target 49969; HLA-C*05:01; MYH4; ENSG00000264424; TAA
ISDNAYQF

SEQ ID NO: 49970 - protein, 8 aa, Homo sapiens
  misc_feature: Table A; Target 49970; HLA-C*07:04; MYH4; ENSG00000264424; TAA
ISDNAYQF

SEQ ID NO: 49971 - protein, 8 aa, Homo sapiens
  misc_feature: Table A; Target 49971; HLA-C*16:01; MYH4; ENSG00000264424; TAA
ISDNAYQF

SEQ ID NO: 49972 - protein, 9 aa, Homo sapiens
  misc_feature: Table A; Target 49972; HLA-A*01:01; MYH4; ENSG00000264424; TAA
ISDNAYQFM

SEQ ID NO: 49973 - protein, 9 aa, Homo sapiens
  misc_feature: Table A; Target 49973; HLA-C*05:01; MYH4; ENSG00000264424; TAA
ISDNAYQFM

SEQ ID NO: 49974 - protein, 10 aa, Homo sapiens
  misc_feature: Table A; Target 49974; HLA-A*01:01; MYH4; ENSG00000264424; TAA
ISDNAYQFML

SEQ ID NO: 49975 - protein, 8 aa, Homo sapiens
  misc_feature: Table A; Target 49975; HLA-C*03:04; MYH4; ENSG00000264424; TAA
ISQIQGEM

SEQ ID NO: 49976 - protein, 8 aa, Homo sapiens
  misc_feature: Table A; Target 49976; HLA-C*16:01; MYH4; ENSG00000264424; TAA
ISQIQGEM

SEQ ID NO: 49977 - protein, 9 aa, Homo sapiens
  misc_feature: Table A; Target 49977; HLA-A*01:01; MYH4; ENSG00000264424; TAA
ITDAAMMAE

SEQ ID NO: 49978 - protein, 11 aa, Homo sapiens
  misc_feature: Table A; Target 49978; HLA-C*05:01; MYH4; ENSG00000264424; TAA
ITDAAMMAEEL

SEQ ID NO: 49979 - protein, 9 aa, Homo sapiens
  misc_feature: Table A; Target 49979; HLA-A*03:01; MYH4; ENSG00000264424; TAA
ITGESGAGK

SEQ ID NO: 49980 - protein, 9 aa, Homo sapiens
  misc_feature: Table A; Target 49980; HLA-A*03:02; MYH4; ENSG00000264424; TAA
ITGESGAGK

SEQ ID NO: 49981 - protein, 9 aa, Homo sapiens
  misc_feature: Table A; Target 49981; HLA-A*11:01; MYH4; ENSG00000264424; TAA
ITGESGAGK

SEQ ID NO: 49982 - protein, 11 aa, Homo sapiens
  misc_feature: Table A; Target 49982; HLA-C*16:02; MYH4; ENSG00000264424; TAA
ITGESGAGKTV

SEQ ID NO: 49983 - protein, 9 aa, Homo sapiens
  misc_feature: Table A; Target 49983; HLA-A*31:01; MYH4; ENSG00000264424; TAA
ITRTQAICR

SEQ ID NO: 49984 - protein, 9 aa, Homo sapiens
  misc_feature: Table A; Target 49984; HLA-A*33:01; MYH4; ENSG00000264424; TAA
ITRTQAICR

SEQ ID NO: 49985 - protein, 9 aa, Homo sapiens
  misc_feature: Table A; Target 49985; HLA-A*33:03; MYH4; ENSG00000264424; TAA
ITRTQAICR

SEQ ID NO: 49986 - protein, 9 aa, Homo sapiens
  misc_feature: Table A; Target 49986; HLA-A*68:01; MYH4; ENSG00000264424; TAA
ITRTQAICR

SEQ ID NO: 49987 - protein, 8 aa, Homo sapiens
  misc_feature: Table A; Target 49987; HLA-B*57:01; MYH4; ENSG00000264424; TAA
ITTNPYDF

SEQ ID NO: 49988 - protein, 10 aa, Homo sapiens
  misc_feature: Table A; Target 49988; HLA-A*29:02; MYH4; ENSG00000264424; TAA
ITTNPYDFAF

SEQ ID NO: 49989 - protein, 10 aa, Homo sapiens
  misc_feature: Table A; Target 49989; HLA-B*27:02; MYH4; ENSG00000264424; TAA
ITTNPYDFAF

SEQ ID NO: 49990 - protein, 10 aa, Homo sapiens
  misc_feature: Table A; Target 49990; HLA-B*57:01; MYH4; ENSG00000264424; TAA
ITTNPYDFAF

SEQ ID NO: 49991 - protein, 10 aa, Homo sapiens
  misc_feature: Table A; Target 49991; HLA-C*16:02; MYH4; ENSG00000264424; TAA
ITTNPYDFAF

SEQ ID NO: 49992 - protein, 11 aa, Homo sapiens
  misc_feature: Table A; Target 49992; HLA-A*03:02; MYH4; ENSG00000264424; TAA
IVQEARNAEEK

SEQ ID NO: 49993 - protein, 11 aa, Homo sapiens
  misc_feature: Table A; Target 49993; HLA-A*11:01; MYH4; ENSG00000264424; TAA
IVQEARNAEEK

SEQ ID NO: 49994 - protein, 8 aa, Homo sapiens
  misc_feature: Table A; Target 49994; HLA-A*24:02; MYH4; ENSG00000264424; TAA
IYEKMFLW

SEQ ID NO: 49995 - protein, 8 aa, Homo sapiens
  misc_feature: Table A; Target 49995; HLA-C*14:02; MYH4; ENSG00000264424; TAA
IYKLTGAV

SEQ ID NO: 49996 - protein, 9 aa, Homo sapiens
  misc_feature: Table A; Target 49996; HLA-A*23:01; MYH4; ENSG00000264424; TAA
IYKLTGAVM

SEQ ID NO: 49997 - protein, 9 aa, Homo sapiens
  misc_feature: Table A; Target 49997; HLA-A*24:02; MYH4; ENSG00000264424; TAA
IYKLTGAVM

SEQ ID NO: 49998 - protein, 9 aa, Homo sapiens
  misc_feature: Table A; Target 49998; HLA-B*15:01; MYH4; ENSG00000264424; TAA
IYKLTGAVM

SEQ ID NO: 49999 - protein, 9 aa, Homo sapiens
  misc_feature: Table A; Target 49999; HLA-B*15:03; MYH4; ENSG00000264424; TAA
IYKLTGAVM

SEQ ID NO: 50000 - protein, 9 aa, Homo sapiens
  misc_feature: Table A; Target 50000; HLA-B*46:01; MYH4; ENSG00000264424; TAA
IYKLTGAVM

SEQ ID NO: 50001 - protein, 9 aa, Homo sapiens
  misc_feature: Table A; Target 50001; HLA-C*01:02; MYH4; ENSG00000264424; TAA
IYKLTGAVM

SEQ ID NO: 50002 - protein, 9 aa, Homo sapiens
  misc_feature: Table A; Target 50002; HLA-C*04:01; MYH4; ENSG00000264424; TAA
IYKLTGAVM

SEQ ID NO: 50003 - protein, 9 aa, Homo sapiens
  misc_feature: Table A; Target 50003; HLA-C*14:02; MYH4; ENSG00000264424; TAA
IYKLTGAVM

SEQ ID NO: 50004 - protein, 11 aa, Homo sapiens
  misc_feature: Table A; Target 50004; HLA-A*24:02; MYH4; ENSG00000264424; TAA
IYKLTGAVMHY

SEQ ID NO: 50005 - protein, 11 aa, Homo sapiens
  misc_feature: Table A; Target 50005; HLA-A*29:02; MYH4; ENSG00000264424; TAA
IYKLTGAVMHY

SEQ ID NO: 50006 - protein, 8 aa, Homo sapiens
  misc_feature: Table A; Target 50006; HLA-A*23:01; MYH4; ENSG00000264424; TAA
IYTYSGLF

SEQ ID NO: 50007 - protein, 8 aa, Homo sapiens
  misc_feature: Table A; Target 50007; HLA-A*24:02; MYH4; ENSG00000264424; TAA
IYTYSGLF

SEQ ID NO: 50008 - protein, 8 aa, Homo sapiens
  misc_feature: Table A; Target 50008; HLA-C*04:01; MYH4; ENSG00000264424; TAA
IYTYSGLF

SEQ ID NO: 50009 - protein, 8 aa, Homo sapiens
  misc_feature: Table A; Target 50009; HLA-B*08:01; MYH4; ENSG00000264424; TAA
KAAYLTSL

SEQ ID NO: 50010 - protein, 8 aa, Homo sapiens
  misc_feature: Table A; Target 50010; HLA-B*46:01; MYH4; ENSG00000264424; TAA
KAAYLTSL

SEQ ID NO: 50011 - protein, 8 aa, Homo sapiens
  misc_feature: Table A; Target 50011; HLA-B*58:01; MYH4; ENSG00000264424; TAA
KAAYLTSL

SEQ ID NO: 50012 - protein, 8 aa, Homo sapiens
  misc_feature: Table A; Target 50012; HLA-C*03:03; MYH4; ENSG00000264424; TAA
KAAYLTSL

SEQ ID NO: 50013 - protein, 8 aa, Homo sapiens
  misc_feature: Table A; Target 50013; HLA-C*03:04; MYH4; ENSG00000264424; TAA
KAAYLTSL

SEQ ID NO: 50014 - protein, 8 aa, Homo sapiens
  misc_feature: Table A; Target 50014; HLA-C*16:01; MYH4; ENSG00000264424; TAA
KAAYLTSL

SEQ ID NO: 50015 - protein, 8 aa, Homo sapiens
  misc_feature: Table A; Target 50015; HLA-C*16:02; MYH4; ENSG00000264424; TAA
KAAYLTSL

SEQ ID NO: 50016 - protein, 11 aa, Homo sapiens
  misc_feature: Table A; Target 50016; HLA-B*56:01; MYH4; ENSG00000264424; TAA
KAAYLTSLNSA

SEQ ID NO: 50017 - protein, 8 aa, Homo sapiens
  misc_feature: Table A; Target 50017; HLA-C*16:01; MYH4; ENSG00000264424; TAA
KAELQRGM

SEQ ID NO: 50018 - protein, 8 aa, Homo sapiens
  misc_feature: Table A; Target 50018; HLA-B*08:01; MYH4; ENSG00000264424; TAA
KAITDAAM

SEQ ID NO: 50019 - protein, 8 aa, Homo sapiens
  misc_feature: Table A; Target 50019; HLA-B*35:03; MYH4; ENSG00000264424; TAA
KAITDAAM

SEQ ID NO: 50020 - protein, 8 aa, Homo sapiens
  misc_feature: Table A; Target 50020; HLA-C*03:03; MYH4; ENSG00000264424; TAA
KAITDAAM

SEQ ID NO: 50021 - protein, 8 aa, Homo sapiens
  misc_feature: Table A; Target 50021; HLA-C*03:04; MYH4; ENSG00000264424; TAA
KAITDAAM

SEQ ID NO: 50022 - protein, 9 aa, Homo sapiens
  misc_feature: Table A; Target 50022; HLA-B*15:01; MYH4; ENSG00000264424; TAA
KAITDAAMM

SEQ ID NO: 50023 - protein, 9 aa, Homo sapiens
  misc_feature: Table A; Target 50023; HLA-B*15:03; MYH4; ENSG00000264424; TAA
KAITDAAMM

SEQ ID NO: 50024 - protein, 9 aa, Homo sapiens
  misc_feature: Table A; Target 50024; HLA-B*35:03; MYH4; ENSG00000264424; TAA
KAITDAAMM

SEQ ID NO: 50025 - protein, 9 aa, Homo sapiens
  misc_feature: Table A; Target 50025; HLA-B*40:01; MYH4; ENSG00000264424; TAA
KAITDAAMM

SEQ ID NO: 50026 - protein, 9 aa, Homo sapiens
  misc_feature: Table A; Target 50026; HLA-B*46:01; MYH4; ENSG00000264424; TAA
KAITDAAMM

SEQ ID NO: 50027 - protein, 9 aa, Homo sapiens
  misc_feature: Table A; Target 50027; HLA-B*55:01; MYH4; ENSG00000264424; TAA
KAITDAAMM

SEQ ID NO: 50028 - protein, 9 aa, Homo sapiens
  misc_feature: Table A; Target 50028; HLA-B*58:01; MYH4; ENSG00000264424; TAA
KAITDAAMM

SEQ ID NO: 50029 - protein, 9 aa, Homo sapiens
  misc_feature: Table A; Target 50029; HLA-C*01:02; MYH4; ENSG00000264424; TAA
KAITDAAMM

SEQ ID NO: 50030 - protein, 9 aa, Homo sapiens
  misc_feature: Table A; Target 50030; HLA-C*02:02; MYH4; ENSG00000264424; TAA
KAITDAAMM

SEQ ID NO: 50031 - protein, 9 aa, Homo sapiens
  misc_feature: Table A; Target 50031; HLA-C*03:03; MYH4; ENSG00000264424; TAA
KAITDAAMM

SEQ ID NO: 50032 - protein, 9 aa, Homo sapiens
  misc_feature: Table A; Target 50032; HLA-C*03:04; MYH4; ENSG00000264424; TAA
KAITDAAMM

SEQ ID NO: 50033 - protein, 9 aa, Homo sapiens
  misc_feature: Table A; Target 50033; HLA-C*04:01; MYH4; ENSG00000264424; TAA
KAITDAAMM

SEQ ID NO: 50034 - protein, 9 aa, Homo sapiens
  misc_feature: Table A; Target 50034; HLA-C*06:02; MYH4; ENSG00000264424; TAA
KAITDAAMM

SEQ ID NO: 50035 - protein, 9 aa, Homo sapiens
  misc_feature: Table A; Target 50035; HLA-C*07:04; MYH4; ENSG00000264424; TAA
KAITDAAMM

SEQ ID NO: 50036 - protein, 9 aa, Homo sapiens
  misc_feature: Table A; Target 50036; HLA-C*12:03; MYH4; ENSG00000264424; TAA
KAITDAAMM

SEQ ID NO: 50037 - protein, 9 aa, Homo sapiens
  misc_feature: Table A; Target 50037; HLA-C*14:02; MYH4; ENSG00000264424; TAA
KAITDAAMM

SEQ ID NO: 50038 - protein, 9 aa, Homo sapiens
  misc_feature: Table A; Target 50038; HLA-C*16:01; MYH4; ENSG00000264424; TAA
KAITDAAMM

SEQ ID NO: 50039 - protein, 9 aa, Homo sapiens
  misc_feature: Table A; Target 50039; HLA-C*16:02; MYH4; ENSG00000264424; TAA
KAITDAAMM

SEQ ID NO: 50040 - protein, 9 aa, Homo sapiens
  misc_feature: Table A; Target 50040; HLA-C*16:04; MYH4; ENSG00000264424; TAA
KAITDAAMM

SEQ ID NO: 50041 - protein, 10 aa, Homo sapiens
  misc_feature: Table A; Target 50041; HLA-B*57:01; MYH4; ENSG00000264424; TAA
KAIYEKMFLW

SEQ ID NO: 50042 - protein, 9 aa, Homo sapiens
  misc_feature: Table A; Target 50042; HLA-B*40:02; MYH4; ENSG00000264424; TAA
KAKANFEKM

SEQ ID NO: 50043 - protein, 9 aa, Homo sapiens
  misc_feature: Table A; Target 50043; HLA-B*46:01; MYH4; ENSG00000264424; TAA
KAKANFEKM

SEQ ID NO: 50044 - protein, 9 aa, Homo sapiens
  misc_feature: Table A; Target 50044; HLA-B*57:01; MYH4; ENSG00000264424; TAA
KAKANFEKM

SEQ ID NO: 50045 - protein, 9 aa, Homo sapiens
  misc_feature: Table A; Target 50045; HLA-B*58:01; MYH4; ENSG00000264424; TAA
KAKANFEKM

SEQ ID NO: 50046 - protein, 9 aa, Homo sapiens
  misc_feature: Table A; Target 50046; HLA-C*02:02; MYH4; ENSG00000264424; TAA
KAKANFEKM

SEQ ID NO: 50047 - protein, 9 aa, Homo sapiens
  misc_feature: Table A; Target 50047; HLA-C*12:03; MYH4; ENSG00000264424; TAA
KAKANFEKM

SEQ ID NO: 50048 - protein, 9 aa, Homo sapiens
  misc_feature: Table A; Target 50048; HLA-C*16:02; MYH4; ENSG00000264424; TAA
KAKANFEKM

SEQ ID NO: 50049 - protein, 10 aa, Homo sapiens
  misc_feature: Table A; Target 50049; HLA-C*07:02; MYH4; ENSG00000264424; TAA
KAKSTLAHAL

SEQ ID NO: 50050 - protein, 11 aa, Homo sapiens
  misc_feature: Table A; Target 50050; HLA-A*30:01; MYH4; ENSG00000264424; TAA
KALQEAHQQTL

SEQ ID NO: 50051 - protein, 11 aa, Homo sapiens
  misc_feature: Table A; Target 50051; HLA-B*40:01; MYH4; ENSG00000264424; TAA
KALQEAHQQTL

SEQ ID NO: 50052 - protein, 11 aa, Homo sapiens
  misc_feature: Table A; Target 50052; HLA-B*40:02; MYH4; ENSG00000264424; TAA
KALQEAHQQTL

SEQ ID NO: 50053 - protein, 11 aa, Homo sapiens
  misc_feature: Table A; Target 50053; HLA-B*57:01; MYH4; ENSG00000264424; TAA
KALQEAHQQTL

SEQ ID NO: 50054 - protein, 11 aa, Homo sapiens
  misc_feature: Table A; Target 50054; HLA-B*58:01; MYH4; ENSG00000264424; TAA
KALQEAHQQTL

SEQ ID NO: 50055 - protein, 11 aa, Homo sapiens
  misc_feature: Table A; Target 50055; HLA-C*16:02; MYH4; ENSG00000264424; TAA
KALQEAHQQTL

SEQ ID NO: 50056 - protein, 11 aa, Homo sapiens
  misc_feature: Table A; Target 50056; HLA-C*16:04; MYH4; ENSG00000264424; TAA
KALQEAHQQTL

SEQ ID NO: 50057 - protein, 9 aa, Homo sapiens
  misc_feature: Table A; Target 50057; HLA-A*03:02; MYH4; ENSG00000264424; TAA
KANSEVAQW

SEQ ID NO: 50058 - protein, 9 aa, Homo sapiens
  misc_feature: Table A; Target 50058; HLA-A*24:02; MYH4; ENSG00000264424; TAA
KANSEVAQW

SEQ ID NO: 50059 - protein, 9 aa, Homo sapiens
  misc_feature: Table A; Target 50059; HLA-A*25:01; MYH4; ENSG00000264424; TAA
KANSEVAQW

SEQ ID NO: 50060 - protein, 9 aa, Homo sapiens
  misc_feature: Table A; Target 50060; HLA-A*30:02; MYH4; ENSG00000264424; TAA
KANSEVAQW

SEQ ID NO: 50061 - protein, 9 aa, Homo sapiens
  misc_feature: Table A; Target 50061; HLA-A*31:01; MYH4; ENSG00000264424; TAA
KANSEVAQW

SEQ ID NO: 50062 - protein, 9 aa, Homo sapiens
  misc_feature: Table A; Target 50062; HLA-A*32:01; MYH4; ENSG00000264424; TAA
KANSEVAQW

SEQ ID NO: 50063 - protein, 9 aa, Homo sapiens
  misc_feature: Table A; Target 50063; HLA-A*33:01; MYH4; ENSG00000264424; TAA
KANSEVAQW

SEQ ID NO: 50064 - protein, 9 aa, Homo sapiens
  misc_feature: Table A; Target 50064; HLA-A*33:03; MYH4; ENSG00000264424; TAA
KANSEVAQW

SEQ ID NO: 50065 - protein, 9 aa, Homo sapiens
  misc_feature: Table A; Target 50065; HLA-B*44:02; MYH4; ENSG00000264424; TAA
KANSEVAQW

SEQ ID NO: 50066 - protein, 9 aa, Homo sapiens
  misc_feature: Table A; Target 50066; HLA-B*44:03; MYH4; ENSG00000264424; TAA
KANSEVAQW

SEQ ID NO: 50067 - protein, 9 aa, Homo sapiens
  misc_feature: Table A; Target 50067; HLA-B*57:01; MYH4; ENSG00000264424; TAA
KANSEVAQW

SEQ ID NO: 50068 - protein, 9 aa, Homo sapiens
  misc_feature: Table A; Target 50068; HLA-B*58:01; MYH4; ENSG00000264424; TAA
KANSEVAQW

SEQ ID NO: 50069 - protein, 9 aa, Homo sapiens
  misc_feature: Table A; Target 50069; HLA-C*07:06; MYH4; ENSG00000264424; TAA
KANSEVAQW

SEQ ID NO: 50070 - protein, 9 aa, Homo sapiens
  misc_feature: Table A; Target 50070; HLA-C*12:03; MYH4; ENSG00000264424; TAA
KANSEVAQW

SEQ ID NO: 50071 - protein, 9 aa, Homo sapiens
  misc_feature: Table A; Target 50071; HLA-C*16:01; MYH4; ENSG00000264424; TAA
KANSEVAQW

SEQ ID NO: 50072 - protein, 9 aa, Homo sapiens
  misc_feature: Table A; Target 50072; HLA-C*16:02; MYH4; ENSG00000264424; TAA
KANSEVAQW

SEQ ID NO: 50073 - protein, 9 aa, Homo sapiens
  misc_feature: Table A; Target 50073; HLA-C*16:04; MYH4; ENSG00000264424; TAA
KANSEVAQW

SEQ ID NO: 50074 - protein, 10 aa, Homo sapiens
  misc_feature: Table A; Target 50074; HLA-A*31:01; MYH4; ENSG00000264424; TAA
KANSEVAQWR

SEQ ID NO: 50075 - protein, 11 aa, Homo sapiens
  misc_feature: Table A; Target 50075; HLA-B*57:01; MYH4; ENSG00000264424; TAA
KARLHTESGEF

SEQ ID NO: 50076 - protein, 10 aa, Homo sapiens
  misc_feature: Table A; Target 50076; HLA-A*03:01; MYH4; ENSG00000264424; TAA
KATDTSFKNK

SEQ ID NO: 50077 - protein, 10 aa, Homo sapiens
  misc_feature: Table A; Target 50077; HLA-A*03:02; MYH4; ENSG00000264424; TAA
KATDTSFKNK

SEQ ID NO: 50078 - protein, 10 aa, Homo sapiens
  misc_feature: Table A; Target 50078; HLA-A*11:01; MYH4; ENSG00000264424; TAA
KATDTSFKNK

SEQ ID NO: 50079 - protein, 8 aa, Homo sapiens
  misc_feature: Table A; Target 50079; HLA-A*30:01; MYH4; ENSG00000264424; TAA
KDAMVSQL

SEQ ID NO: 50080 - protein, 8 aa, Homo sapiens
  misc_feature: Table A; Target 50080; HLA-B*37:01; MYH4; ENSG00000264424; TAA
KDAMVSQL

SEQ ID NO: 50081 - protein, 8 aa, Homo sapiens
  misc_feature: Table A; Target 50081; HLA-B*40:02; MYH4; ENSG00000264424; TAA
KDAMVSQL

SEQ ID NO: 50082 - protein, 8 aa, Homo sapiens
  misc_feature: Table A; Target 50082; HLA-C*07:04; MYH4; ENSG00000264424; TAA
KDAMVSQL

SEQ ID NO: 50083 - protein, 8 aa, Homo sapiens
  misc_feature: Table A; Target 50083; HLA-C*12:03; MYH4; ENSG00000264424; TAA
KDAMVSQL

SEQ ID NO: 50084 - protein, 8 aa, Homo sapiens
  misc_feature: Table A; Target 50084; HLA-C*16:02; MYH4; ENSG00000264424; TAA
KDAMVSQL

SEQ ID NO: 50085 - protein, 9 aa, Homo sapiens
  misc_feature: Table A; Target 50085; HLA-C*06:02; MYH4; ENSG00000264424; TAA
KDAMVSQLS

SEQ ID NO: 50086 - protein, 10 aa, Homo sapiens
  misc_feature: Table A; Target 50086; HLA-A*30:01; MYH4; ENSG00000264424; TAA
KDIDDLELTL

SEQ ID NO: 50087 - protein, 10 aa, Homo sapiens
  misc_feature: Table A; Target 50087; HLA-B*40:01; MYH4; ENSG00000264424; TAA
KDIDDLELTL

SEQ ID NO: 50088 - protein, 9 aa, Homo sapiens
  misc_feature: Table A; Target 50088; HLA-B*40:02; MYH4; ENSG00000264424; TAA
KDPLNETVV

SEQ ID NO: 50089 - protein, 8 aa, Homo sapiens
  misc_feature: Table A; Target 50089; HLA-A*30:01; MYH4; ENSG00000264424; TAA
KEDQVFSM

SEQ ID NO: 50090 - protein, 8 aa, Homo sapiens
  misc_feature: Table A; Target 50090; HLA-B*18:01; MYH4; ENSG00000264424; TAA
KEDQVFSM

SEQ ID NO: 50091 - protein, 8 aa, Homo sapiens
  misc_feature: Table A; Target 50091; HLA-B*37:01; MYH4; ENSG00000264424; TAA
KEDQVFSM

SEQ ID NO: 50092 - protein, 8 aa, Homo sapiens
  misc_feature: Table A; Target 50092; HLA-B*40:01; MYH4; ENSG00000264424; TAA
KEDQVFSM

SEQ ID NO: 50093 - protein, 9 aa, Homo sapiens
  misc_feature: Table A; Target 50093; HLA-A*30:01; MYH4; ENSG00000264424; TAA
KEEEQQRLI

SEQ ID NO: 50094 - protein, 9 aa, Homo sapiens
  misc_feature: Table A; Target 50094; HLA-B*40:01; MYH4; ENSG00000264424; TAA
KEEEQQRLI

SEQ ID NO: 50095 - protein, 9 aa, Homo sapiens
  misc_feature: Table A; Target 50095; HLA-B*44:02; MYH4; ENSG00000264424; TAA
KEEEQQRLI

SEQ ID NO: 50096 - protein, 9 aa, Homo sapiens
  misc_feature: Table A; Target 50096; HLA-B*44:03; MYH4; ENSG00000264424; TAA
KEEEQQRLI

SEQ ID NO: 50097 - protein, 9 aa, Homo sapiens
  misc_feature: Table A; Target 50097; HLA-B*49:01; MYH4; ENSG00000264424; TAA
KEEEQQRLI

SEQ ID NO: 50098 - protein, 9 aa, Homo sapiens
  misc_feature: Table A; Target 50098; HLA-B*40:01; MYH4; ENSG00000264424; TAA
KEELAKTEA

SEQ ID NO: 50099 - protein, 9 aa, Homo sapiens
  misc_feature: Table A; Target 50099; HLA-B*40:02; MYH4; ENSG00000264424; TAA
KEELAKTEA

SEQ ID NO: 50100 - protein, 9 aa, Homo sapiens
  misc_feature: Table A; Target 50100; HLA-A*30:01; MYH4; ENSG00000264424; TAA
KEEPASGKM

SEQ ID NO: 50101 - protein, 9 aa, Homo sapiens
  misc_feature: Table A; Target 50101; HLA-B*37:01; MYH4; ENSG00000264424; TAA
KEEPASGKM

SEQ ID NO: 50102 - protein, 9 aa, Homo sapiens
  misc_feature: Table A; Target 50102; HLA-B*40:01; MYH4; ENSG00000264424; TAA
KEEPASGKM

SEQ ID NO: 50103 - protein, 9 aa, Homo sapiens
  misc_feature: Table A; Target 50103; HLA-B*40:02; MYH4; ENSG00000264424; TAA
KEEPASGKM

SEQ ID NO: 50104 - protein, 9 aa, Homo sapiens
  misc_feature: Table A; Target 50104; HLA-B*44:03; MYH4; ENSG00000264424; TAA
KEEPASGKM

SEQ ID NO: 50105 - protein, 9 aa, Homo sapiens
  misc_feature: Table A; Target 50105; HLA-B*49:01; MYH4; ENSG00000264424; TAA
KEEPASGKM

SEQ ID NO: 50106 - protein, 8 aa, Homo sapiens
  misc_feature: Table A; Target 50106; HLA-A*30:01; MYH4; ENSG00000264424; TAA
KEFEMSNL

SEQ ID NO: 50107 - protein, 8 aa, Homo sapiens
  misc_feature: Table A; Target 50107; HLA-B*18:01; MYH4; ENSG00000264424; TAA
KEFEMSNL

SEQ ID NO: 50108 - protein, 8 aa, Homo sapiens
  misc_feature: Table A; Target 50108; HLA-B*37:01; MYH4; ENSG00000264424; TAA
KEFEMSNL

SEQ ID NO: 50109 - protein, 8 aa, Homo sapiens
  misc_feature: Table A; Target 50109; HLA-B*40:01; MYH4; ENSG00000264424; TAA
KEFEMSNL

SEQ ID NO: 50110 - protein, 8 aa, Homo sapiens
  misc_feature: Table A; Target 50110; HLA-B*40:02; MYH4; ENSG00000264424; TAA
KEFEMSNL

SEQ ID NO: 50111 - protein, 8 aa, Homo sapiens
  misc_feature: Table A; Target 50111; HLA-B*49:01; MYH4; ENSG00000264424; TAA
KEFEMSNL

SEQ ID NO: 50112 - protein, 10 aa, Homo sapiens
  misc_feature: Table A; Target 50112; HLA-B*49:01; MYH4; ENSG00000264424; TAA
KEFEMSNLQG

SEQ ID NO: 50113 - protein, 10 aa, Homo sapiens
  misc_feature: Table A; Target 50113; HLA-B*40:02; MYH4; ENSG00000264424; TAA
KEKHATENKV

SEQ ID NO: 50114 - protein, 11 aa, Homo sapiens
  misc_feature: Table A; Target 50114; HLA-B*40:02; MYH4; ENSG00000264424; TAA
KEKHATENKVK

SEQ ID NO: 50115 - protein, 9 aa, Homo sapiens
  misc_feature: Table A; Target 50115; HLA-B*40:02; MYH4; ENSG00000264424; TAA
KEKKALQEA

SEQ ID NO: 50116 - protein, 10 aa, Homo sapiens
  misc_feature: Table A; Target 50116; HLA-B*40:02; MYH4; ENSG00000264424; TAA
KEKSELKMEI

SEQ ID NO: 50117 - protein, 9 aa, Homo sapiens
  misc_feature: Table A; Target 50117; HLA-B*40:02; MYH4; ENSG00000264424; TAA
KELEEKMVT

SEQ ID NO: 50118 - protein, 10 aa, Homo sapiens
  misc_feature: Table A; Target 50118; HLA-A*30:01; MYH4; ENSG00000264424; TAA
KELEEKMVTL

SEQ ID NO: 50119 - protein, 10 aa, Homo sapiens
  misc_feature: Table A; Target 50119; HLA-B*37:01; MYH4; ENSG00000264424; TAA
KELEEKMVTL

SEQ ID NO: 50120 - protein, 10 aa, Homo sapiens
  misc_feature: Table A; Target 50120; HLA-B*40:01; MYH4; ENSG00000264424; TAA
KELEEKMVTL

SEQ ID NO: 50121 - protein, 10 aa, Homo sapiens
  misc_feature: Table A; Target 50121; HLA-B*40:02; MYH4; ENSG00000264424; TAA
KELEEKMVTL

SEQ ID NO: 50122 - protein, 10 aa, Homo sapiens
  misc_feature: Table A; Target 50122; HLA-B*44:02; MYH4; ENSG00000264424; TAA
KELEEKMVTL

SEQ ID NO: 50123 - protein, 10 aa, Homo sapiens
  misc_feature: Table A; Target 50123; HLA-B*44:03; MYH4; ENSG00000264424; TAA
KELEEKMVTL

SEQ ID NO: 50124 - protein, 10 aa, Homo sapiens
  misc_feature: Table A; Target 50124; HLA-B*49:01; MYH4; ENSG00000264424; TAA
KELEEKMVTL

SEQ ID NO: 50125 - protein, 11 aa, Homo sapiens
  misc_feature: Table A; Target 50125; HLA-A*30:01; MYH4; ENSG00000264424; TAA
KELEEKMVTLM

SEQ ID NO: 50126 - protein, 11 aa, Homo sapiens
  misc_feature: Table A; Target 50126; HLA-B*37:01; MYH4; ENSG00000264424; TAA
KELEEKMVTLM

SEQ ID NO: 50127 - protein, 11 aa, Homo sapiens
  misc_feature: Table A; Target 50127; HLA-B*40:01; MYH4; ENSG00000264424; TAA
KELEEKMVTLM

SEQ ID NO: 50128 - protein, 10 aa, Homo sapiens
  misc_feature: Table A; Target 50128; HLA-A*30:01; MYH4; ENSG00000264424; TAA
KELQARIEEL

SEQ ID NO: 50129 - protein, 10 aa, Homo sapiens
  misc_feature: Table A; Target 50129; HLA-B*37:01; MYH4; ENSG00000264424; TAA
KELQARIEEL

SEQ ID NO: 50130 - protein, 10 aa, Homo sapiens
  misc_feature: Table A; Target 50130; HLA-B*40:01; MYH4; ENSG00000264424; TAA
KELQARIEEL

SEQ ID NO: 50131 - protein, 10 aa, Homo sapiens
  misc_feature: Table A; Target 50131; HLA-B*40:02; MYH4; ENSG00000264424; TAA
KELQARIEEL

SEQ ID NO: 50132 - protein, 10 aa, Homo sapiens
  misc_feature: Table A; Target 50132; HLA-B*44:02; MYH4; ENSG00000264424; TAA
KELQARIEEL

SEQ ID NO: 50133 - protein, 10 aa, Homo sapiens
  misc_feature: Table A; Target 50133; HLA-B*49:01; MYH4; ENSG00000264424; TAA
KELQARIEEL

SEQ ID NO: 50134 - protein, 10 aa, Homo sapiens
  misc_feature: Table A; Target 50134; HLA-A*30:01; MYH4; ENSG00000264424; TAA
KEMANMKEEF

SEQ ID NO: 50135 - protein, 10 aa, Homo sapiens
  misc_feature: Table A; Target 50135; HLA-B*18:01; MYH4; ENSG00000264424; TAA
KEMANMKEEF

SEQ ID NO: 50136 - protein, 10 aa, Homo sapiens
  misc_feature: Table A; Target 50136; HLA-B*37:01; MYH4; ENSG00000264424; TAA
KEMANMKEEF

SEQ ID NO: 50137 - protein, 10 aa, Homo sapiens
  misc_feature: Table A; Target 50137; HLA-B*40:01; MYH4; ENSG00000264424; TAA
KEMANMKEEF

SEQ ID NO: 50138 - protein, 10 aa, Homo sapiens
  misc_feature: Table A; Target 50138; HLA-B*40:02; MYH4; ENSG00000264424; TAA
KEMANMKEEF

SEQ ID NO: 50139 - protein, 10 aa, Homo sapiens
  misc_feature: Table A; Target 50139; HLA-B*44:02; MYH4; ENSG00000264424; TAA
KEMANMKEEF

SEQ ID NO: 50140 - protein, 10 aa, Homo sapiens
  misc_feature: Table A; Target 50140; HLA-B*44:03; MYH4; ENSG00000264424; TAA
KEMANMKEEF

SEQ ID NO: 50141 - protein, 10 aa, Homo sapiens
  misc_feature: Table A; Target 50141; HLA-C*16:04; MYH4; ENSG00000264424; TAA
KEMANMKEEF

SEQ ID NO: 50142 - protein, 9 aa, Homo sapiens
  misc_feature: Table A; Target 50142; HLA-A*30:01; MYH4; ENSG00000264424; TAA
KEQDTSAHL

SEQ ID NO: 50143 - protein, 9 aa, Homo sapiens
  misc_feature: Table A; Target 50143; HLA-B*27:02; MYH4; ENSG00000264424; TAA
KEQDTSAHL

SEQ ID NO: 50144 - protein, 9 aa, Homo sapiens
  misc_feature: Table A; Target 50144; HLA-B*37:01; MYH4; ENSG00000264424; TAA
KEQDTSAHL

SEQ ID NO: 50145 - protein, 9 aa, Homo sapiens
  misc_feature: Table A; Target 50145; HLA-B*40:01; MYH4; ENSG00000264424; TAA
KEQDTSAHL

SEQ ID NO: 50146 - protein, 9 aa, Homo sapiens
  misc_feature: Table A; Target 50146; HLA-B*40:02; MYH4; ENSG00000264424; TAA
KEQDTSAHL

SEQ ID NO: 50147 - protein, 9 aa, Homo sapiens
  misc_feature: Table A; Target 50147; HLA-B*44:02; MYH4; ENSG00000264424; TAA
KEQDTSAHL

SEQ ID NO: 50148 - protein, 9 aa, Homo sapiens
  misc_feature: Table A; Target 50148; HLA-B*44:03; MYH4; ENSG00000264424; TAA
KEQDTSAHL

SEQ ID NO: 50149 - protein, 9 aa, Homo sapiens
  misc_feature: Table A; Target 50149; HLA-B*49:01; MYH4; ENSG00000264424; TAA
KEQDTSAHL

SEQ ID NO: 50150 - protein, 9 aa, Homo sapiens
  misc_feature: Table A; Target 50150; HLA-C*16:04; MYH4; ENSG00000264424; TAA
KEQDTSAHL

SEQ ID NO: 50151 - protein, 11 aa, Homo sapiens
  misc_feature: Table A; Target 50151; HLA-A*31:01; MYH4; ENSG00000264424; TAA
KEQDTSAHLER

SEQ ID NO: 50152 - protein, 11 aa, Homo sapiens
  misc_feature: Table A; Target 50152; HLA-A*33:01; MYH4; ENSG00000264424; TAA
KEQDTSAHLER

SEQ ID NO: 50153 - protein, 11 aa, Homo sapiens
  misc_feature: Table A; Target 50153; HLA-B*44:02; MYH4; ENSG00000264424; TAA
KEQDTSAHLER

SEQ ID NO: 50154 - protein, 9 aa, Homo sapiens
  misc_feature: Table A; Target 50154; HLA-A*31:01; MYH4; ENSG00000264424; TAA
KEQLAMVER

SEQ ID NO: 50155 - protein, 11 aa, Homo sapiens
  misc_feature: Table A; Target 50155; HLA-B*40:02; MYH4; ENSG00000264424; TAA
KERADIAESQV

SEQ ID NO: 50156 - protein, 10 aa, Homo sapiens
  misc_feature: Table A; Target 50156; HLA-B*40:02; MYH4; ENSG00000264424; TAA
KERIEAQNKP

SEQ ID NO: 50157 - protein, 10 aa, Homo sapiens
  misc_feature: Table A; Target 50157; HLA-A*30:01; MYH4; ENSG00000264424; TAA
KESRSLSTEL

SEQ ID NO: 50158 - protein, 10 aa, Homo sapiens
  misc_feature: Table A; Target 50158; HLA-B*40:01; MYH4; ENSG00000264424; TAA
KESRSLSTEL

SEQ ID NO: 50159 - protein, 10 aa, Homo sapiens
  misc_feature: Table A; Target 50159; HLA-B*40:02; MYH4; ENSG00000264424; TAA
KESRSLSTEL

SEQ ID NO: 50160 - protein, 8 aa, Homo sapiens
  misc_feature: Table A; Target 50160; HLA-B*37:01; MYH4; ENSG00000264424; TAA
KESYVKAI

SEQ ID NO: 50161 - protein, 9 aa, Homo sapiens
  misc_feature: Table A; Target 50161; HLA-B*37:01; MYH4; ENSG00000264424; TAA
KESYVKAIV

SEQ ID NO: 50162 - protein, 9 aa, Homo sapiens
  misc_feature: Table A; Target 50162; HLA-B*40:01; MYH4; ENSG00000264424; TAA
KESYVKAIV

SEQ ID NO: 50163 - protein, 9 aa, Homo sapiens
  misc_feature: Table A; Target 50163; HLA-B*49:01; MYH4; ENSG00000264424; TAA
KESYVKAIV

SEQ ID NO: 50164 - protein, 8 aa, Homo sapiens
  misc_feature: Table A; Target 50164; HLA-C*12:03; MYH4; ENSG00000264424; TAA
KGFPSRIL

SEQ ID NO: 50165 - protein, 9 aa, Homo sapiens
  misc_feature: Table A; Target 50165; HLA-A*29:02; MYH4; ENSG00000264424; TAA
KGFPSRILY

SEQ ID NO: 50166 - protein, 9 aa, Homo sapiens
  misc_feature: Table A; Target 50166; HLA-A*30:02; MYH4; ENSG00000264424; TAA
KGFPSRILY

SEQ ID NO: 50167 - protein, 9 aa, Homo sapiens
  misc_feature: Table A; Target 50167; HLA-A*31:01; MYH4; ENSG00000264424; TAA
KGFPSRILY

SEQ ID NO: 50168 - protein, 9 aa, Homo sapiens
  misc_feature: Table A; Target 50168; HLA-A*32:01; MYH4; ENSG00000264424; TAA
KGFPSRILY

SEQ ID NO: 50169 - protein, 9 aa, Homo sapiens
  misc_feature: Table A; Target 50169; HLA-B*13:02; MYH4; ENSG00000264424; TAA
KGFPSRILY

SEQ ID NO: 50170 - protein, 9 aa, Homo sapiens
  misc_feature: Table A; Target 50170; HLA-B*15:01; MYH4; ENSG00000264424; TAA
KGFPSRILY

SEQ ID NO: 50171 - protein, 9 aa, Homo sapiens
  misc_feature: Table A; Target 50171; HLA-B*15:03; MYH4; ENSG00000264424; TAA
KGFPSRILY

SEQ ID NO: 50172 - protein, 9 aa, Homo sapiens
  misc_feature: Table A; Target 50172; HLA-B*46:01; MYH4; ENSG00000264424; TAA
KGFPSRILY

SEQ ID NO: 50173 - protein, 9 aa, Homo sapiens
  misc_feature: Table A; Target 50173; HLA-B*57:01; MYH4; ENSG00000264424; TAA
KGFPSRILY

SEQ ID NO: 50174 - protein, 9 aa, Homo sapiens
  misc_feature: Table A; Target 50174; HLA-B*58:01; MYH4; ENSG00000264424; TAA
KGFPSRILY

SEQ ID NO: 50175 - protein, 9 aa, Homo sapiens
  misc_feature: Table A; Target 50175; HLA-C*02:02; MYH4; ENSG00000264424; TAA
KGFPSRILY

SEQ ID NO: 50176 - protein, 9 aa, Homo sapiens
  misc_feature: Table A; Target 50176; HLA-C*12:03; MYH4; ENSG00000264424; TAA
KGFPSRILY

SEQ ID NO: 50177 - protein, 9 aa, Homo sapiens
  misc_feature: Table A; Target 50177; HLA-C*16:01; MYH4; ENSG00000264424; TAA
KGFPSRILY

SEQ ID NO: 50178 - protein, 10 aa, Homo sapiens
  misc_feature: Table A; Target 50178; HLA-A*02:03; MYH4; ENSG00000264424; TAA
KGFPSRILYA

SEQ ID NO: 50179 - protein, 8 aa, Homo sapiens
  misc_feature: Table A; Target 50179; HLA-C*16:02; MYH4; ENSG00000264424; TAA
KGQTVQQV

SEQ ID NO: 50180 - protein, 9 aa, Homo sapiens
  misc_feature: Table A; Target 50180; HLA-A*30:02; MYH4; ENSG00000264424; TAA
KGQTVQQVY

SEQ ID NO: 50181 - protein, 9 aa, Homo sapiens
  misc_feature: Table A; Target 50181; HLA-A*32:01; MYH4; ENSG00000264424; TAA
KGQTVQQVY

SEQ ID NO: 50182 - protein, 9 aa, Homo sapiens
  misc_feature: Table A; Target 50182; HLA-B*15:01; MYH4; ENSG00000264424; TAA
KGQTVQQVY

SEQ ID NO: 50183 - protein, 9 aa, Homo sapiens
  misc_feature: Table A; Target 50183; HLA-B*15:03; MYH4; ENSG00000264424; TAA
KGQTVQQVY

SEQ ID NO: 50184 - protein, 9 aa, Homo sapiens
  misc_feature: Table A; Target 50184; HLA-B*46:01; MYH4; ENSG00000264424; TAA
KGQTVQQVY

SEQ ID NO: 50185 - protein, 9 aa, Homo sapiens
  misc_feature: Table A; Target 50185; HLA-B*58:01; MYH4; ENSG00000264424; TAA
KGQTVQQVY

SEQ ID NO: 50186 - protein, 9 aa, Homo sapiens
  misc_feature: Table A; Target 50186; HLA-C*16:01; MYH4; ENSG00000264424; TAA
KGQTVQQVY

SEQ ID NO: 50187 - protein, 9 aa, Homo sapiens
  misc_feature: Table A; Target 50187; HLA-C*16:02; MYH4; ENSG00000264424; TAA
KGQTVQQVY

SEQ ID NO: 50188 - protein, 9 aa, Homo sapiens
  misc_feature: Table A; Target 50188; HLA-C*16:04; MYH4; ENSG00000264424; TAA
KGQTVQQVY

SEQ ID NO: 50189 - protein, 8 aa, Homo sapiens
  misc_feature: Table A; Target 50189; HLA-C*16:02; MYH4; ENSG00000264424; TAA
KGSSFQTV

SEQ ID NO: 50190 - protein, 10 aa, Homo sapiens
  misc_feature: Table A; Target 50190; HLA-B*56:01; MYH4; ENSG00000264424; TAA
KGSSFQTVSA

SEQ ID NO: 50191 - protein, 9 aa, Homo sapiens
  misc_feature: Table A; Target 50191; HLA-A*32:01; MYH4; ENSG00000264424; TAA
KHADSVAEL

SEQ ID NO: 50192 - protein, 9 aa, Homo sapiens
  misc_feature: Table A; Target 50192; HLA-B*15:03; MYH4; ENSG00000264424; TAA
KHADSVAEL

SEQ ID NO: 50193 - protein, 9 aa, Homo sapiens
  misc_feature: Table A; Target 50193; HLA-B*27:05; MYH4; ENSG00000264424; TAA
KHADSVAEL

SEQ ID NO: 50194 - protein, 9 aa, Homo sapiens
  misc_feature: Table A; Target 50194; HLA-B*38:01; MYH4; ENSG00000264424; TAA
KHADSVAEL

SEQ ID NO: 50195 - protein, 9 aa, Homo sapiens
  misc_feature: Table A; Target 50195; HLA-B*39:01; MYH4; ENSG00000264424; TAA
KHADSVAEL

SEQ ID NO: 50196 - protein, 9 aa, Homo sapiens
  misc_feature: Table A; Target 50196; HLA-B*40:01; MYH4; ENSG00000264424; TAA
KHADSVAEL

SEQ ID NO: 50197 - protein, 9 aa, Homo sapiens
  misc_feature: Table A; Target 50197; HLA-B*40:02; MYH4; ENSG00000264424; TAA
KHADSVAEL

SEQ ID NO: 50198 - protein, 9 aa, Homo sapiens
  misc_feature: Table A; Target 50198; HLA-B*58:01; MYH4; ENSG00000264424; TAA
KHADSVAEL

SEQ ID NO: 50199 - protein, 9 aa, Homo sapiens
  misc_feature: Table A; Target 50199; HLA-C*03:04; MYH4; ENSG00000264424; TAA
KHADSVAEL

SEQ ID NO: 50200 - protein, 9 aa, Homo sapiens
  misc_feature: Table A; Target 50200; HLA-C*07:04; MYH4; ENSG00000264424; TAA
KHADSVAEL

SEQ ID NO: 50201 - protein, 9 aa, Homo sapiens
  misc_feature: Table A; Target 50201; HLA-C*12:03; MYH4; ENSG00000264424; TAA
KHADSVAEL

SEQ ID NO: 50202 - protein, 9 aa, Homo sapiens
  misc_feature: Table A; Target 50202; HLA-C*16:02; MYH4; ENSG00000264424; TAA
KHADSVAEL

SEQ ID NO: 50203 - protein, 9 aa, Homo sapiens
  misc_feature: Table A; Target 50203; HLA-C*16:04; MYH4; ENSG00000264424; TAA
KHADSVAEL

SEQ ID NO: 50204 - protein, 9 aa, Homo sapiens
  misc_feature: Table A; Target 50204; HLA-B*40:01; MYH4; ENSG00000264424; TAA
KIAEKDEEL

SEQ ID NO: 50205 - protein, 9 aa, Homo sapiens
  misc_feature: Table A; Target 50205; HLA-B*58:01; MYH4; ENSG00000264424; TAA
KIAEKDEEL

SEQ ID NO: 50206 - protein, 9 aa, Homo sapiens
  misc_feature: Table A; Target 50206; HLA-C*01:02; MYH4; ENSG00000264424; TAA
KIAEKDEEL

SEQ ID NO: 50207 - protein, 8 aa, Homo sapiens
  misc_feature: Table A; Target 50207; HLA-C*05:01; MYH4; ENSG00000264424; TAA
KIEDEQAL

SEQ ID NO: 50208 - protein, 8 aa, Homo sapiens
  misc_feature: Table A; Target 50208; HLA-A*31:01; MYH4; ENSG00000264424; TAA
KIKEVTER

SEQ ID NO: 50209 - protein, 8 aa, Homo sapiens
  misc_feature: Table A; Target 50209; HLA-A*33:03; MYH4; ENSG00000264424; TAA
KIKEVTER

SEQ ID NO: 50210 - protein, 9 aa, Homo sapiens
  misc_feature: Table A; Target 50210; HLA-A*02:04; MYH4; ENSG00000264424; TAA
KILRIQLEL

SEQ ID NO: 50211 - protein, 9 aa, Homo sapiens
  misc_feature: Table A; Target 50211; HLA-B*15:03; MYH4; ENSG00000264424; TAA
KKAITDAAM

SEQ ID NO: 50212 - protein, 10 aa, Homo sapiens
  misc_feature: Table A; Target 50212; HLA-B*15:03; MYH4; ENSG00000264424; TAA
KKMEGDLNEM

SEQ ID NO: 50213 - protein, 8 aa, Homo sapiens
  misc_feature: Table A; Target 50213; HLA-A*03:01; MYH4; ENSG00000264424; TAA
KLAQLITR

SEQ ID NO: 50214 - protein, 8 aa, Homo sapiens
  misc_feature: Table A; Target 50214; HLA-A*31:01; MYH4; ENSG00000264424; TAA
KLAQLITR

SEQ ID NO: 50215 - protein, 9 aa, Homo sapiens
  misc_feature: Table A; Target 50215; HLA-A*02:03; MYH4; ENSG00000264424; TAA
KLAQLITRT

SEQ ID NO: 50216 - protein, 9 aa, Homo sapiens
  misc_feature: Table A; Target 50216; HLA-A*02:04; MYH4; ENSG00000264424; TAA
KLAQLITRT

SEQ ID NO: 50217 - protein, 10 aa, Homo sapiens
  misc_feature: Table A; Target 50217; HLA-A*01:01; MYH4; ENSG00000264424; TAA
KLASADIETY

SEQ ID NO: 50218 - protein, 10 aa, Homo sapiens
  misc_feature: Table A; Target 50218; HLA-A*25:01; MYH4; ENSG00000264424; TAA
KLASADIETY

SEQ ID NO: 50219 - protein, 10 aa, Homo sapiens
  misc_feature: Table A; Target 50219; HLA-A*26:01; MYH4; ENSG00000264424; TAA
KLASADIETY

SEQ ID NO: 50220 - protein, 10 aa, Homo sapiens
  misc_feature: Table A; Target 50220; HLA-A*30:02; MYH4; ENSG00000264424; TAA
KLASADIETY

SEQ ID NO: 50221 - protein, 10 aa, Homo sapiens
  misc_feature: Table A; Target 50221; HLA-A*32:01; MYH4; ENSG00000264424; TAA
KLASADIETY

SEQ ID NO: 50222 - protein, 10 aa, Homo sapiens
  misc_feature: Table A; Target 50222; HLA-B*15:01; MYH4; ENSG00000264424; TAA
KLASADIETY

SEQ ID NO: 50223 - protein, 10 aa, Homo sapiens
  misc_feature: Table A; Target 50223; HLA-B*15:03; MYH4; ENSG00000264424; TAA
KLASADIETY

SEQ ID NO: 50224 - protein, 10 aa, Homo sapiens
  misc_feature: Table A; Target 50224; HLA-B*27:02; MYH4; ENSG00000264424; TAA
KLASADIETY

SEQ ID NO: 50225 - protein, 10 aa, Homo sapiens
  misc_feature: Table A; Target 50225; HLA-B*44:03; MYH4; ENSG00000264424; TAA
KLASADIETY

SEQ ID NO: 50226 - protein, 10 aa, Homo sapiens
  misc_feature: Table A; Target 50226; HLA-B*46:01; MYH4; ENSG00000264424; TAA
KLASADIETY

SEQ ID NO: 50227 - protein, 10 aa, Homo sapiens
  misc_feature: Table A; Target 50227; HLA-B*58:01; MYH4; ENSG00000264424; TAA
KLASADIETY

SEQ ID NO: 50228 - protein, 10 aa, Homo sapiens
  misc_feature: Table A; Target 50228; HLA-C*07:04; MYH4; ENSG00000264424; TAA
KLASADIETY

SEQ ID NO: 50229 - protein, 10 aa, Homo sapiens
  misc_feature: Table A; Target 50229; HLA-C*16:04; MYH4; ENSG00000264424; TAA
KLASADIETY

SEQ ID NO: 50230 - protein, 11 aa, Homo sapiens
  misc_feature: Table A; Target 50230; HLA-A*02:01; MYH4; ENSG00000264424; TAA
KLASADIETYL

SEQ ID NO: 50231 - protein, 11 aa, Homo sapiens
  misc_feature: Table A; Target 50231; HLA-A*02:03; MYH4; ENSG00000264424; TAA
KLASADIETYL

SEQ ID NO: 50232 - protein, 11 aa, Homo sapiens
  misc_feature: Table A; Target 50232; HLA-A*02:04; MYH4; ENSG00000264424; TAA
KLASADIETYL

SEQ ID NO: 50233 - protein, 11 aa, Homo sapiens
  misc_feature: Table A; Target 50233; HLA-A*02:07; MYH4; ENSG00000264424; TAA
KLASADIETYL

SEQ ID NO: 50234 - protein, 9 aa, Homo sapiens
  misc_feature: Table A; Target 50234; HLA-C*05:01; MYH4; ENSG00000264424; TAA
KLEDECSEL

SEQ ID NO: 50235 - protein, 10 aa, Homo sapiens
  misc_feature: Table A; Target 50235; HLA-A*03:02; MYH4; ENSG00000264424; TAA
KLEDECSELK

SEQ ID NO: 50236 - protein, 9 aa, Homo sapiens
  misc_feature: Table A; Target 50236; HLA-A*02:07; MYH4; ENSG00000264424; TAA
KLETDISQI

SEQ ID NO: 50237 - protein, 9 aa, Homo sapiens
  misc_feature: Table A; Target 50237; HLA-A*02:01; MYH4; ENSG00000264424; TAA
KLQHELEEA

SEQ ID NO: 50238 - protein, 9 aa, Homo sapiens
  misc_feature: Table A; Target 50238; HLA-B*55:01; MYH4; ENSG00000264424; TAA
KLQHELEEA

SEQ ID NO: 50239 - protein, 10 aa, Homo sapiens
  misc_feature: Table A; Target 50239; HLA-A*03:02; MYH4; ENSG00000264424; TAA
KLQHELEEAK

SEQ ID NO: 50240 - protein, 9 aa, Homo sapiens
  misc_feature: Table A; Target 50240; HLA-A*03:01; MYH4; ENSG00000264424; TAA
KLQTKVKAY

SEQ ID NO: 50241 - protein, 9 aa, Homo sapiens
  misc_feature: Table A; Target 50241; HLA-A*03:02; MYH4; ENSG00000264424; TAA
KLQTKVKAY

SEQ ID NO: 50242 - protein, 9 aa, Homo sapiens
  misc_feature: Table A; Target 50242; HLA-A*30:02; MYH4; ENSG00000264424; TAA
KLQTKVKAY

SEQ ID NO: 50243 - protein, 9 aa, Homo sapiens
  misc_feature: Table A; Target 50243; HLA-A*32:01; MYH4; ENSG00000264424; TAA
KLQTKVKAY

SEQ ID NO: 50244 - protein, 9 aa, Homo sapiens
  misc_feature: Table A; Target 50244; HLA-B*15:01; MYH4; ENSG00000264424; TAA
KLQTKVKAY

SEQ ID NO: 50245 - protein, 9 aa, Homo sapiens
  misc_feature: Table A; Target 50245; HLA-C*16:01; MYH4; ENSG00000264424; TAA
KLQTKVKAY

SEQ ID NO: 50246 - protein, 9 aa, Homo sapiens
  misc_feature: Table A; Target 50246; HLA-C*16:02; MYH4; ENSG00000264424; TAA
KLQTKVKAY

SEQ ID NO: 50247 - protein, 9 aa, Homo sapiens
  misc_feature: Table A; Target 50247; HLA-A*01:01; MYH4; ENSG00000264424; TAA
KLTGAVMHY

SEQ ID NO: 50248 - protein, 9 aa, Homo sapiens
  misc_feature: Table A; Target 50248; HLA-A*03:01; MYH4; ENSG00000264424; TAA
KLTGAVMHY

SEQ ID NO: 50249 - protein, 9 aa, Homo sapiens
  misc_feature: Table A; Target 50249; HLA-A*03:02; MYH4; ENSG00000264424; TAA
KLTGAVMHY

SEQ ID NO: 50250 - protein, 9 aa, Homo sapiens
  misc_feature: Table A; Target 50250; HLA-A*26:01; MYH4; ENSG00000264424; TAA
KLTGAVMHY

SEQ ID NO: 50251 - protein, 9 aa, Homo sapiens
  misc_feature: Table A; Target 50251; HLA-A*29:02; MYH4; ENSG00000264424; TAA
KLTGAVMHY

SEQ ID NO: 50252 - protein, 9 aa, Homo sapiens
  misc_feature: Table A; Target 50252; HLA-A*30:02; MYH4; ENSG00000264424; TAA
KLTGAVMHY

SEQ ID NO: 50253 - protein, 9 aa, Homo sapiens
  misc_feature: Table A; Target 50253; HLA-A*32:01; MYH4; ENSG00000264424; TAA
KLTGAVMHY

SEQ ID NO: 50254 - protein, 9 aa, Homo sapiens
  misc_feature: Table A; Target 50254; HLA-B*15:01; MYH4; ENSG00000264424; TAA
KLTGAVMHY

SEQ ID NO: 50255 - protein, 9 aa, Homo sapiens
  misc_feature: Table A; Target 50255; HLA-B*15:03; MYH4; ENSG00000264424; TAA
KLTGAVMHY

SEQ ID NO: 50256 - protein, 9 aa, Homo sapiens
  misc_feature: Table A; Target 50256; HLA-B*44:03; MYH4; ENSG00000264424; TAA
KLTGAVMHY

SEQ ID NO: 50257 - protein, 9 aa, Homo sapiens
  misc_feature: Table A; Target 50257; HLA-B*46:01; MYH4; ENSG00000264424; TAA
KLTGAVMHY

SEQ ID NO: 50258 - protein, 9 aa, Homo sapiens
  misc_feature: Table A; Target 50258; HLA-B*57:01; MYH4; ENSG00000264424; TAA
KLTGAVMHY

SEQ ID NO: 50259 - protein, 9 aa, Homo sapiens
  misc_feature: Table A; Target 50259; HLA-B*58:01; MYH4; ENSG00000264424; TAA
KLTGAVMHY

SEQ ID NO: 50260 - protein, 9 aa, Homo sapiens
  misc_feature: Table A; Target 50260; HLA-C*02:02; MYH4; ENSG00000264424; TAA
KLTGAVMHY

SEQ ID NO: 50261 - protein, 9 aa, Homo sapiens
  misc_feature: Table A; Target 50261; HLA-C*07:04; MYH4; ENSG00000264424; TAA
KLTGAVMHY

SEQ ID NO: 50262 - protein, 9 aa, Homo sapiens
  misc_feature: Table A; Target 50262; HLA-C*12:03; MYH4; ENSG00000264424; TAA
KLTGAVMHY

SEQ ID NO: 50263 - protein, 9 aa, Homo sapiens
  misc_feature: Table A; Target 50263; HLA-C*16:01; MYH4; ENSG00000264424; TAA
KLTGAVMHY

SEQ ID NO: 50264 - protein, 9 aa, Homo sapiens
  misc_feature: Table A; Target 50264; HLA-C*16:02; MYH4; ENSG00000264424; TAA
KLTGAVMHY

SEQ ID NO: 50265 - protein, 10 aa, Homo sapiens
  misc_feature: Table A; Target 50265; HLA-C*06:02; MYH4; ENSG00000264424; TAA
KLTGAVMHYG

SEQ ID NO: 50266 - protein, 9 aa, Homo sapiens
  misc_feature: Table A; Target 50266; HLA-A*03:01; MYH4; ENSG00000264424; TAA
KLYEQHLGK

SEQ ID NO: 50267 - protein, 9 aa, Homo sapiens
  misc_feature: Table A; Target 50267; HLA-A*03:02; MYH4; ENSG00000264424; TAA
KLYEQHLGK

SEQ ID NO: 50268 - protein, 9 aa, Homo sapiens
  misc_feature: Table A; Target 50268; HLA-A*11:01; MYH4; ENSG00000264424; TAA
KLYEQHLGK

SEQ ID NO: 50269 - protein, 11 aa, Homo sapiens
  misc_feature: Table A; Target 50269; HLA-A*03:01; MYH4; ENSG00000264424; TAA
KLYFKIKPLLK

SEQ ID NO: 50270 - protein, 10 aa, Homo sapiens
  misc_feature: Table A; Target 50270; HLA-A*02:01; MYH4; ENSG00000264424; TAA
KMAEQELLDA

SEQ ID NO: 50271 - protein, 10 aa, Homo sapiens
  misc_feature: Table A; Target 50271; HLA-A*02:03; MYH4; ENSG00000264424; TAA
KMAEQELLDA

SEQ ID NO: 50272 - protein, 9 aa, Homo sapiens
  misc_feature: Table A; Target 50272; HLA-A*31:01; MYH4; ENSG00000264424; TAA
KMFLWMVTR

SEQ ID NO: 50273 - protein, 9 aa, Homo sapiens
  misc_feature: Table A; Target 50273; HLA-A*03:01; MYH4; ENSG00000264424; TAA
KMVTLMQEK

SEQ ID NO: 50274 - protein, 9 aa, Homo sapiens
  misc_feature: Table A; Target 50274; HLA-A*03:02; MYH4; ENSG00000264424; TAA
KMVTLMQEK

SEQ ID NO: 50275 - protein, 11 aa, Homo sapiens
  misc_feature: Table A; Target 50275; HLA-C*16:02; MYH4; ENSG00000264424; TAA
KNKDPLNETVV

SEQ ID NO: 50276 - protein, 8 aa, Homo sapiens
  misc_feature: Table A; Target 50276; HLA-B*08:01; MYH4; ENSG00000264424; TAA
KPEAHFSL

SEQ ID NO: 50277 - protein, 9 aa, Homo sapiens
  misc_feature: Table A; Target 50277; HLA-A*02:03; MYH4; ENSG00000264424; TAA
KPFDAKTSV

SEQ ID NO: 50278 - protein, 9 aa, Homo sapiens
  misc_feature: Table A; Target 50278; HLA-A*32:01; MYH4; ENSG00000264424; TAA
KPFDAKTSV

SEQ ID NO: 50279 - protein, 9 aa, Homo sapiens
  misc_feature: Table A; Target 50279; HLA-B*07:02; MYH4; ENSG00000264424; TAA
KPFDAKTSV

SEQ ID NO: 50280 - protein, 9 aa, Homo sapiens
  misc_feature: Table A; Target 50280; HLA-B*08:01; MYH4; ENSG00000264424; TAA
KPFDAKTSV

SEQ ID NO: 50281 - protein, 9 aa, Homo sapiens
  misc_feature: Table A; Target 50281; HLA-B*13:02; MYH4; ENSG00000264424; TAA
KPFDAKTSV

SEQ ID NO: 50282 - protein, 9 aa, Homo sapiens
  misc_feature: Table A; Target 50282; HLA-B*35:03; MYH4; ENSG00000264424; TAA
KPFDAKTSV

SEQ ID NO: 50283 - protein, 9 aa, Homo sapiens
  misc_feature: Table A; Target 50283; HLA-B*40:02; MYH4; ENSG00000264424; TAA
KPFDAKTSV

SEQ ID NO: 50284 - protein, 9 aa, Homo sapiens
  misc_feature: Table A; Target 50284; HLA-B*46:01; MYH4; ENSG00000264424; TAA
KPFDAKTSV

SEQ ID NO: 50285 - protein, 9 aa, Homo sapiens
  misc_feature: Table A; Target 50285; HLA-B*51:01; MYH4; ENSG00000264424; TAA
KPFDAKTSV

SEQ ID NO: 50286 - protein, 9 aa, Homo sapiens
  misc_feature: Table A; Target 50286; HLA-B*54:01; MYH4; ENSG00000264424; TAA
KPFDAKTSV

SEQ ID NO: 50287 - protein, 9 aa, Homo sapiens
  misc_feature: Table A; Target 50287; HLA-B*55:01; MYH4; ENSG00000264424; TAA
KPFDAKTSV

SEQ ID NO: 50288 - protein, 9 aa, Homo sapiens
  misc_feature: Table A; Target 50288; HLA-B*56:01; MYH4; ENSG00000264424; TAA
KPFDAKTSV

SEQ ID NO: 50289 - protein, 9 aa, Homo sapiens
  misc_feature: Table A; Target 50289; HLA-C*01:02; MYH4; ENSG00000264424; TAA
KPFDAKTSV

SEQ ID NO: 50290 - protein, 9 aa, Homo sapiens
  misc_feature: Table A; Target 50290; HLA-C*02:02; MYH4; ENSG00000264424; TAA
KPFDAKTSV

SEQ ID NO: 50291 - protein, 9 aa, Homo sapiens
  misc_feature: Table A; Target 50291; HLA-C*07:02; MYH4; ENSG00000264424; TAA
KPFDAKTSV

SEQ ID NO: 50292 - protein, 9 aa, Homo sapiens
  misc_feature: Table A; Target 50292; HLA-C*12:03; MYH4; ENSG00000264424; TAA
KPFDAKTSV

SEQ ID NO: 50293 - protein, 9 aa, Homo sapiens
  misc_feature: Table A; Target 50293; HLA-C*14:02; MYH4; ENSG00000264424; TAA
KPFDAKTSV

SEQ ID NO: 50294 - protein, 9 aa, Homo sapiens
  misc_feature: Table A; Target 50294; HLA-C*16:01; MYH4; ENSG00000264424; TAA
KPFDAKTSV

SEQ ID NO: 50295 - protein, 9 aa, Homo sapiens
  misc_feature: Table A; Target 50295; HLA-C*16:02; MYH4; ENSG00000264424; TAA
KPFDAKTSV

SEQ ID NO: 50296 - protein, 10 aa, Homo sapiens
  misc_feature: Table A; Target 50296; HLA-A*23:01; MYH4; ENSG00000264424; TAA
KPFDAKTSVF

SEQ ID NO: 50297 - protein, 10 aa, Homo sapiens
  misc_feature: Table A; Target 50297; HLA-A*24:02; MYH4; ENSG00000264424; TAA
KPFDAKTSVF

SEQ ID NO: 50298 - protein, 10 aa, Homo sapiens
  misc_feature: Table A; Target 50298; HLA-A*25:01; MYH4; ENSG00000264424; TAA
KPFDAKTSVF

SEQ ID NO: 50299 - protein, 10 aa, Homo sapiens
  misc_feature: Table A; Target 50299; HLA-B*07:02; MYH4; ENSG00000264424; TAA
KPFDAKTSVF

SEQ ID NO: 50300 - protein, 10 aa, Homo sapiens
  misc_feature: Table A; Target 50300; HLA-B*15:01; MYH4; ENSG00000264424; TAA
KPFDAKTSVF

SEQ ID NO: 50301 - protein, 10 aa, Homo sapiens
  misc_feature: Table A; Target 50301; HLA-B*15:03; MYH4; ENSG00000264424; TAA
KPFDAKTSVF

SEQ ID NO: 50302 - protein, 10 aa, Homo sapiens
  misc_feature: Table A; Target 50302; HLA-B*35:01; MYH4; ENSG00000264424; TAA
KPFDAKTSVF

SEQ ID NO: 50303 - protein, 10 aa, Homo sapiens
  misc_feature: Table A; Target 50303; HLA-B*35:03; MYH4; ENSG00000264424; TAA
KPFDAKTSVF

SEQ ID NO: 50304 - protein, 10 aa, Homo sapiens
  misc_feature: Table A; Target 50304; HLA-B*44:02; MYH4; ENSG00000264424; TAA
KPFDAKTSVF

SEQ ID NO: 50305 - protein, 10 aa, Homo sapiens
  misc_feature: Table A; Target 50305; HLA-B*44:03; MYH4; ENSG00000264424; TAA
KPFDAKTSVF

SEQ ID NO: 50306 - protein, 10 aa, Homo sapiens
  misc_feature: Table A; Target 50306; HLA-B*46:01; MYH4; ENSG00000264424; TAA
KPFDAKTSVF

SEQ ID NO: 50307 - protein, 10 aa, Homo sapiens
  misc_feature: Table A; Target 50307; HLA-B*54:01; MYH4; ENSG00000264424; TAA
KPFDAKTSVF

SEQ ID NO: 50308 - protein, 10 aa, Homo sapiens
  misc_feature: Table A; Target 50308; HLA-B*55:01; MYH4; ENSG00000264424; TAA
KPFDAKTSVF

SEQ ID NO: 50309 - protein, 10 aa, Homo sapiens
  misc_feature: Table A; Target 50309; HLA-B*56:01; MYH4; ENSG00000264424; TAA
KPFDAKTSVF

SEQ ID NO: 50310 - protein, 10 aa, Homo sapiens
  misc_feature: Table A; Target 50310; HLA-B*57:01; MYH4; ENSG00000264424; TAA
KPFDAKTSVF

SEQ ID NO: 50311 - protein, 10 aa, Homo sapiens
  misc_feature: Table A; Target 50311; HLA-C*02:02; MYH4; ENSG00000264424; TAA
KPFDAKTSVF

SEQ ID NO: 50312 - protein, 10 aa, Homo sapiens
  misc_feature: Table A; Target 50312; HLA-C*07:02; MYH4; ENSG00000264424; TAA
KPFDAKTSVF

SEQ ID NO: 50313 - protein, 10 aa, Homo sapiens
  misc_feature: Table A; Target 50313; HLA-C*12:03; MYH4; ENSG00000264424; TAA
KPFDAKTSVF

SEQ ID NO: 50314 - protein, 11 aa, Homo sapiens
  misc_feature: Table A; Target 50314; HLA-A*02:01; MYH4; ENSG00000264424; TAA
KPFDAKTSVFV

SEQ ID NO: 50315 - protein, 11 aa, Homo sapiens
  misc_feature: Table A; Target 50315; HLA-B*07:02; MYH4; ENSG00000264424; TAA
KPFDAKTSVFV

SEQ ID NO: 50316 - protein, 11 aa, Homo sapiens
  misc_feature: Table A; Target 50316; HLA-B*56:01; MYH4; ENSG00000264424; TAA
KPFDAKTSVFV

SEQ ID NO: 50317 - protein, 8 aa, Homo sapiens
  misc_feature: Table A; Target 50317; HLA-B*56:01; MYH4; ENSG00000264424; TAA
KPMGIFSI

SEQ ID NO: 50318 - protein, 9 aa, Homo sapiens
  misc_feature: Table A; Target 50318; HLA-B*07:02; MYH4; ENSG00000264424; TAA
KPMGIFSIL

SEQ ID NO: 50319 - protein, 9 aa, Homo sapiens
  misc_feature: Table A; Target 50319; HLA-B*56:01; MYH4; ENSG00000264424; TAA
KPMGIFSIL

SEQ ID NO: 50320 - protein, 9 aa, Homo sapiens
  misc_feature: Table A; Target 50320; HLA-C*07:02; MYH4; ENSG00000264424; TAA
KPMGIFSIL

SEQ ID NO: 50321 - protein, 8 aa, Homo sapiens
  misc_feature: Table A; Target 50321; HLA-B*13:02; MYH4; ENSG00000264424; TAA
KQAFTQQI

SEQ ID NO: 50322 - protein, 9 aa, Homo sapiens
  misc_feature: Table A; Target 50322; HLA-A*31:01; MYH4; ENSG00000264424; TAA
KQIQKLEAR

SEQ ID NO: 50323 - protein, 10 aa, Homo sapiens
  misc_feature: Table A; Target 50323; HLA-A*02:07; MYH4; ENSG00000264424; TAA
KQPRQYFIGV

SEQ ID NO: 50324 - protein, 9 aa, Homo sapiens
  misc_feature: Table A; Target 50324; HLA-B*27:05; MYH4; ENSG00000264424; TAA
KRQLEEETK

SEQ ID NO: 50325 - protein, 9 aa, Homo sapiens
  misc_feature: Table A; Target 50325; HLA-A*32:01; MYH4; ENSG00000264424; TAA
KSAETEKEM

SEQ ID NO: 50326 - protein, 9 aa, Homo sapiens
  misc_feature: Table A; Target 50326; HLA-B*46:01; MYH4; ENSG00000264424; TAA
KSAETEKEM

SEQ ID NO: 50327 - protein, 9 aa, Homo sapiens
  misc_feature: Table A; Target 50327; HLA-B*58:01; MYH4; ENSG00000264424; TAA
KSAETEKEM

SEQ ID NO: 50328 - protein, 9 aa, Homo sapiens
  misc_feature: Table A; Target 50328; HLA-C*01:02; MYH4; ENSG00000264424; TAA
KSAETEKEM

SEQ ID NO: 50329 - protein, 9 aa, Homo sapiens
  misc_feature: Table A; Target 50329; HLA-C*03:03; MYH4; ENSG00000264424; TAA
KSAETEKEM

SEQ ID NO: 50330 - protein, 9 aa, Homo sapiens
  misc_feature: Table A; Target 50330; HLA-C*03:04; MYH4; ENSG00000264424; TAA
KSAETEKEM

SEQ ID NO: 50331 - protein, 9 aa, Homo sapiens
  misc_feature: Table A; Target 50331; HLA-C*12:03; MYH4; ENSG00000264424; TAA
KSAETEKEM

SEQ ID NO: 50332 - protein, 9 aa, Homo sapiens
  misc_feature: Table A; Target 50332; HLA-C*16:01; MYH4; ENSG00000264424; TAA
KSAETEKEM

SEQ ID NO: 50333 - protein, 9 aa, Homo sapiens
  misc_feature: Table A; Target 50333; HLA-C*16:02; MYH4; ENSG00000264424; TAA
KSAETEKEM

SEQ ID NO: 50334 - protein, 9 aa, Homo sapiens
  misc_feature: Table A; Target 50334; HLA-B*58:01; MYH4; ENSG00000264424; TAA
KSAMKTLAF

SEQ ID NO: 50335 - protein, 9 aa, Homo sapiens
  misc_feature: Table A; Target 50335; HLA-C*16:01; MYH4; ENSG00000264424; TAA
KSAMKTLAF

SEQ ID NO: 50336 - protein, 9 aa, Homo sapiens
  misc_feature: Table A; Target 50336; HLA-A*03:01; MYH4; ENSG00000264424; TAA
KSNNFQKPK

SEQ ID NO: 50337 - protein, 9 aa, Homo sapiens
  misc_feature: Table A; Target 50337; HLA-A*03:02; MYH4; ENSG00000264424; TAA
KSNNFQKPK

SEQ ID NO: 50338 - protein, 9 aa, Homo sapiens
  misc_feature: Table A; Target 50338; HLA-A*11:01; MYH4; ENSG00000264424; TAA
KSNNFQKPK

SEQ ID NO: 50339 - protein, 9 aa, Homo sapiens
  misc_feature: Table A; Target 50339; HLA-A*31:01; MYH4; ENSG00000264424; TAA
KSNNFQKPK

SEQ ID NO: 50340 - protein, 10 aa, Homo sapiens
  misc_feature: Table A; Target 50340; HLA-C*06:02; MYH4; ENSG00000264424; TAA
KSNNFQKPKP

SEQ ID NO: 50341 - protein, 8 aa, Homo sapiens
  misc_feature: Table A; Target 50341; HLA-B*57:01; MYH4; ENSG00000264424; TAA
KSRVTFQL

SEQ ID NO: 50342 - protein, 9 aa, Homo sapiens
  misc_feature: Table A; Target 50342; HLA-A*03:01; MYH4; ENSG00000264424; TAA
KSRVTFQLK

SEQ ID NO: 50343 - protein, 9 aa, Homo sapiens
  misc_feature: Table A; Target 50343; HLA-A*31:01; MYH4; ENSG00000264424; TAA
KSRVTFQLK

SEQ ID NO: 50344 - protein, 9 aa, Homo sapiens
  misc_feature: Table A; Target 50344; HLA-B*57:01; MYH4; ENSG00000264424; TAA
KSRVTFQLK

SEQ ID NO: 50345 - protein, 8 aa, Homo sapiens
  misc_feature: Table A; Target 50345; HLA-A*32:01; MYH4; ENSG00000264424; TAA
KSTLAHAL

SEQ ID NO: 50346 - protein, 8 aa, Homo sapiens
  misc_feature: Table A; Target 50346; HLA-B*08:01; MYH4; ENSG00000264424; TAA
KSTLAHAL

SEQ ID NO: 50347 - protein, 8 aa, Homo sapiens
  misc_feature: Table A; Target 50347; HLA-B*37:01; MYH4; ENSG00000264424; TAA
KSTLAHAL

SEQ ID NO: 50348 - protein, 8 aa, Homo sapiens
  misc_feature: Table A; Target 50348; HLA-B*40:02; MYH4; ENSG00000264424; TAA
KSTLAHAL

SEQ ID NO: 50349 - protein, 8 aa, Homo sapiens
  misc_feature: Table A; Target 50349; HLA-B*58:01; MYH4; ENSG00000264424; TAA
KSTLAHAL

SEQ ID NO: 50350 - protein, 8 aa, Homo sapiens
  misc_feature: Table A; Target 50350; HLA-C*03:04; MYH4; ENSG00000264424; TAA
KSTLAHAL

SEQ ID NO: 50351 - protein, 8 aa, Homo sapiens
  misc_feature: Table A; Target 50351; HLA-C*06:02; MYH4; ENSG00000264424; TAA
KSTLAHAL

SEQ ID NO: 50352 - protein, 8 aa, Homo sapiens
  misc_feature: Table A; Target 50352; HLA-C*16:01; MYH4; ENSG00000264424; TAA
KSTLAHAL

SEQ ID NO: 50353 - protein, 8 aa, Homo sapiens
  misc_feature: Table A; Target 50353; HLA-C*16:02; MYH4; ENSG00000264424; TAA
KSTLAHAL

SEQ ID NO: 50354 - protein, 8 aa, Homo sapiens
  misc_feature: Table A; Target 50354; HLA-C*05:01; MYH4; ENSG00000264424; TAA
KTEAGATV

SEQ ID NO: 50355 - protein, 10 aa, Homo sapiens
  misc_feature: Table A; Target 50355; HLA-A*01:01; MYH4; ENSG00000264424; TAA
KTEAGATVTV

SEQ ID NO: 50356 - protein, 10 aa, Homo sapiens
  misc_feature: Table A; Target 50356; HLA-B*40:01; MYH4; ENSG00000264424; TAA
KTEAGATVTV

SEQ ID NO: 50357 - protein, 10 aa, Homo sapiens
  misc_feature: Table A; Target 50357; HLA-B*58:01; MYH4; ENSG00000264424; TAA
KTEAGATVTV

SEQ ID NO: 50358 - protein, 10 aa, Homo sapiens
  misc_feature: Table A; Target 50358; HLA-C*05:01; MYH4; ENSG00000264424; TAA
KTEAGATVTV

SEQ ID NO: 50359 - protein, 11 aa, Homo sapiens
  misc_feature: Table A; Target 50359; HLA-A*01:01; MYH4; ENSG00000264424; TAA
KTEAGATVTVK

SEQ ID NO: 50360 - protein, 11 aa, Homo sapiens
  misc_feature: Table A; Target 50360; HLA-A*03:01; MYH4; ENSG00000264424; TAA
KTEAGATVTVK

SEQ ID NO: 50361 - protein, 11 aa, Homo sapiens
  misc_feature: Table A; Target 50361; HLA-A*03:02; MYH4; ENSG00000264424; TAA
KTEAGATVTVK

SEQ ID NO: 50362 - protein, 11 aa, Homo sapiens
  misc_feature: Table A; Target 50362; HLA-A*11:01; MYH4; ENSG00000264424; TAA
KTEAGATVTVK

SEQ ID NO: 50363 - protein, 11 aa, Homo sapiens
  misc_feature: Table A; Target 50363; HLA-B*27:02; MYH4; ENSG00000264424; TAA
KTEAGATVTVK

SEQ ID NO: 50364 - protein, 11 aa, Homo sapiens
  misc_feature: Table A; Target 50364; HLA-C*07:06; MYH4; ENSG00000264424; TAA
KTEAGATVTVK

SEQ ID NO: 50365 - protein, 9 aa, Homo sapiens
  misc_feature: Table A; Target 50365; HLA-A*31:01; MYH4; ENSG00000264424; TAA
KTKEEEQQR

SEQ ID NO: 50366 - protein, 9 aa, Homo sapiens
  misc_feature: Table A; Target 50366; HLA-A*33:03; MYH4; ENSG00000264424; TAA
KTKEEEQQR

SEQ ID NO: 50367 - protein, 9 aa, Homo sapiens
  misc_feature: Table A; Target 50367; HLA-C*07:06; MYH4; ENSG00000264424; TAA
KTKEEEQQR

SEQ ID NO: 50368 - protein, 9 aa, Homo sapiens
  misc_feature: Table A; Target 50368; HLA-A*03:01; MYH4; ENSG00000264424; TAA
KTKIQLEAK

SEQ ID NO: 50369 - protein, 9 aa, Homo sapiens
  misc_feature: Table A; Target 50369; HLA-A*03:02; MYH4; ENSG00000264424; TAA
KTKIQLEAK

SEQ ID NO: 50370 - protein, 10 aa, Homo sapiens
  misc_feature: Table A; Target 50370; HLA-B*40:02; MYH4; ENSG00000264424; TAA
KTPGAMEHEL

SEQ ID NO: 50371 - protein, 10 aa, Homo sapiens
  misc_feature: Table A; Target 50371; HLA-B*58:01; MYH4; ENSG00000264424; TAA
KTPGAMEHEL

SEQ ID NO: 50372 - protein, 10 aa, Homo sapiens
  misc_feature: Table A; Target 50372; HLA-C*01:02; MYH4; ENSG00000264424; TAA
KTPGAMEHEL

SEQ ID NO: 50373 - protein, 10 aa, Homo sapiens
  misc_feature: Table A; Target 50373; HLA-C*06:02; MYH4; ENSG00000264424; TAA
KTPGAMEHEL

SEQ ID NO: 50374 - protein, 10 aa, Homo sapiens
  misc_feature: Table A; Target 50374; HLA-C*07:02; MYH4; ENSG00000264424; TAA
KTPGAMEHEL

SEQ ID NO: 50375 - protein, 10 aa, Homo sapiens
  misc_feature: Table A; Target 50375; HLA-A*03:01; MYH4; ENSG00000264424; TAA
KTSVFVVDPK

SEQ ID NO: 50376 - protein, 10 aa, Homo sapiens
  misc_feature: Table A; Target 50376; HLA-A*03:02; MYH4; ENSG00000264424; TAA
KTSVFVVDPK

SEQ ID NO: 50377 - protein, 10 aa, Homo sapiens
  misc_feature: Table A; Target 50377; HLA-A*11:01; MYH4; ENSG00000264424; TAA
KTSVFVVDPK

SEQ ID NO: 50378 - protein, 10 aa, Homo sapiens
  misc_feature: Table A; Target 50378; HLA-B*27:02; MYH4; ENSG00000264424; TAA
KTSVFVVDPK

SEQ ID NO: 50379 - protein, 11 aa, Homo sapiens
  misc_feature: Table A; Target 50379; HLA-B*57:01; MYH4; ENSG00000264424; TAA
KTVRNDNSSRF

SEQ ID NO: 50380 - protein, 11 aa, Homo sapiens
  misc_feature: Table A; Target 50380; HLA-B*58:01; MYH4; ENSG00000264424; TAA
KTVRNDNSSRF

SEQ ID NO: 50381 - protein, 9 aa, Homo sapiens
  misc_feature: Table A; Target 50381; HLA-A*03:01; MYH4; ENSG00000264424; TAA
KVGNEFVTK

SEQ ID NO: 50382 - protein, 9 aa, Homo sapiens
  misc_feature: Table A; Target 50382; HLA-A*03:02; MYH4; ENSG00000264424; TAA
KVGNEFVTK

SEQ ID NO: 50383 - protein, 9 aa, Homo sapiens
  misc_feature: Table A; Target 50383; HLA-A*11:01; MYH4; ENSG00000264424; TAA
KVGNEFVTK

SEQ ID NO: 50384 - protein, 9 aa, Homo sapiens
  misc_feature: Table A; Target 50384; HLA-A*31:01; MYH4; ENSG00000264424; TAA
KVGNEFVTK

SEQ ID NO: 50385 - protein, 9 aa, Homo sapiens
  misc_feature: Table A; Target 50385; HLA-B*27:05; MYH4; ENSG00000264424; TAA
KVGNEFVTK

SEQ ID NO: 50386 - protein, 9 aa, Homo sapiens
  misc_feature: Table A; Target 50386; HLA-B*57:01; MYH4; ENSG00000264424; TAA
KVGNEFVTK

SEQ ID NO: 50387 - protein, 9 aa, Homo sapiens
  misc_feature: Table A; Target 50387; HLA-A*30:02; MYH4; ENSG00000264424; TAA
KVKNLTEEM

SEQ ID NO: 50388 - protein, 9 aa, Homo sapiens
  misc_feature: Table A; Target 50388; HLA-A*31:01; MYH4; ENSG00000264424; TAA
KVKNLTEEM

SEQ ID NO: 50389 - protein, 9 aa, Homo sapiens
  misc_feature: Table A; Target 50389; HLA-A*32:01; MYH4; ENSG00000264424; TAA
KVKNLTEEM

SEQ ID NO: 50390 - protein, 9 aa, Homo sapiens
  misc_feature: Table A; Target 50390; HLA-B*07:02; MYH4; ENSG00000264424; TAA
KVKNLTEEM

SEQ ID NO: 50391 - protein, 9 aa, Homo sapiens
  misc_feature: Table A; Target 50391; HLA-B*08:01; MYH4; ENSG00000264424; TAA
KVKNLTEEM

SEQ ID NO: 50392 - protein, 9 aa, Homo sapiens
  misc_feature: Table A; Target 50392; HLA-B*15:01; MYH4; ENSG00000264424; TAA
KVKNLTEEM

SEQ ID NO: 50393 - protein, 9 aa, Homo sapiens
  misc_feature: Table A; Target 50393; HLA-B*15:03; MYH4; ENSG00000264424; TAA
KVKNLTEEM

SEQ ID NO: 50394 - protein, 9 aa, Homo sapiens
  misc_feature: Table A; Target 50394; HLA-B*40:02; MYH4; ENSG00000264424; TAA
KVKNLTEEM

SEQ ID NO: 50395 - protein, 9 aa, Homo sapiens
  misc_feature: Table A; Target 50395; HLA-B*46:01; MYH4; ENSG00000264424; TAA
KVKNLTEEM

SEQ ID NO: 50396 - protein, 9 aa, Homo sapiens
  misc_feature: Table A; Target 50396; HLA-B*57:01; MYH4; ENSG00000264424; TAA
KVKNLTEEM

SEQ ID NO: 50397 - protein, 9 aa, Homo sapiens
  misc_feature: Table A; Target 50397; HLA-B*58:01; MYH4; ENSG00000264424; TAA
KVKNLTEEM

SEQ ID NO: 50398 - protein, 9 aa, Homo sapiens
  misc_feature: Table A; Target 50398; HLA-C*01:02; MYH4; ENSG00000264424; TAA
KVKNLTEEM

SEQ ID NO: 50399 - protein, 9 aa, Homo sapiens
  misc_feature: Table A; Target 50399; HLA-C*02:02; MYH4; ENSG00000264424; TAA
KVKNLTEEM

SEQ ID NO: 50400 - protein, 9 aa, Homo sapiens
  misc_feature: Table A; Target 50400; HLA-C*07:04; MYH4; ENSG00000264424; TAA
KVKNLTEEM

SEQ ID NO: 50401 - protein, 9 aa, Homo sapiens
  misc_feature: Table A; Target 50401; HLA-C*12:03; MYH4; ENSG00000264424; TAA
KVKNLTEEM

SEQ ID NO: 50402 - protein, 9 aa, Homo sapiens
  misc_feature: Table A; Target 50402; HLA-C*14:02; MYH4; ENSG00000264424; TAA
KVKNLTEEM

SEQ ID NO: 50403 - protein, 9 aa, Homo sapiens
  misc_feature: Table A; Target 50403; HLA-C*16:01; MYH4; ENSG00000264424; TAA
KVKNLTEEM

SEQ ID NO: 50404 - protein, 10 aa, Homo sapiens
  misc_feature: Table A; Target 50404; HLA-A*30:02; MYH4; ENSG00000264424; TAA
KVLAEWKQKY

SEQ ID NO: 50405 - protein, 9 aa, Homo sapiens
  misc_feature: Table A; Target 50405; HLA-A*03:01; MYH4; ENSG00000264424; TAA
KVNTLTKAK

SEQ ID NO: 50406 - protein, 9 aa, Homo sapiens
  misc_feature: Table A; Target 50406; HLA-A*03:02; MYH4; ENSG00000264424; TAA
KVNTLTKAK

SEQ ID NO: 50407 - protein, 9 aa, Homo sapiens
  misc_feature: Table A; Target 50407; HLA-A*11:01; MYH4; ENSG00000264424; TAA
KVNTLTKAK

SEQ ID NO: 50408 - protein, 9 aa, Homo sapiens
  misc_feature: Table A; Target 50408; HLA-A*31:01; MYH4; ENSG00000264424; TAA
KVNTLTKAK

SEQ ID NO: 50409 - protein, 9 aa, Homo sapiens
  misc_feature: Table A; Target 50409; HLA-A*32:01; MYH4; ENSG00000264424; TAA
KVNTLTKAK

SEQ ID NO: 50410 - protein, 11 aa, Homo sapiens
  misc_feature: Table A; Target 50410; HLA-A*03:02; MYH4; ENSG00000264424; TAA
KVNTLTKAKTK

SEQ ID NO: 50411 - protein, 9 aa, Homo sapiens
  misc_feature: Table A; Target 50411; HLA-A*23:01; MYH4; ENSG00000264424; TAA
KYEETQAEL

SEQ ID NO: 50412 - protein, 9 aa, Homo sapiens
  misc_feature: Table A; Target 50412; HLA-A*24:02; MYH4; ENSG00000264424; TAA
KYEETQAEL

SEQ ID NO: 50413 - protein, 9 aa, Homo sapiens
  misc_feature: Table A; Target 50413; HLA-B*35:03; MYH4; ENSG00000264424; TAA
KYEETQAEL

SEQ ID NO: 50414 - protein, 9 aa, Homo sapiens
  misc_feature: Table A; Target 50414; HLA-B*40:01; MYH4; ENSG00000264424; TAA
KYEETQAEL

SEQ ID NO: 50415 - protein, 9 aa, Homo sapiens
  misc_feature: Table A; Target 50415; HLA-C*01:02; MYH4; ENSG00000264424; TAA
KYEETQAEL

SEQ ID NO: 50416 - protein, 9 aa, Homo sapiens
  misc_feature: Table A; Target 50416; HLA-C*04:01; MYH4; ENSG00000264424; TAA
KYEETQAEL

SEQ ID NO: 50417 - protein, 9 aa, Homo sapiens
  misc_feature: Table A; Target 50417; HLA-C*05:01; MYH4; ENSG00000264424; TAA
KYEETQAEL

SEQ ID NO: 50418 - protein, 9 aa, Homo sapiens
  misc_feature: Table A; Target 50418; HLA-C*14:02; MYH4; ENSG00000264424; TAA
KYEETQAEL

SEQ ID NO: 50419 - protein, 9 aa, Homo sapiens
  misc_feature: Table A; Target 50419; HLA-A*31:01; MYH4; ENSG00000264424; TAA
KYETDAIQR

SEQ ID NO: 50420 - protein, 9 aa, Homo sapiens
  misc_feature: Table A; Target 50420; HLA-A*33:01; MYH4; ENSG00000264424; TAA
KYETDAIQR

SEQ ID NO: 50421 - protein, 9 aa, Homo sapiens
  misc_feature: Table A; Target 50421; HLA-A*33:03; MYH4; ENSG00000264424; TAA
KYETDAIQR

SEQ ID NO: 50422 - protein, 10 aa, Homo sapiens
  misc_feature: Table A; Target 50422; HLA-B*27:02; MYH4; ENSG00000264424; TAA
LAACIELIEK

SEQ ID NO: 50423 - protein, 8 aa, Homo sapiens
  misc_feature: Table A; Target 50423; HLA-B*54:01; MYH4; ENSG00000264424; TAA
LAFLFSGA

SEQ ID NO: 50424 - protein, 11 aa, Homo sapiens
  misc_feature: Table A; Target 50424; HLA-B*54:01; MYH4; ENSG00000264424; TAA
LAFLFSGAQTA

SEQ ID NO: 50425 - protein, 8 aa, Homo sapiens
  misc_feature: Table A; Target 50425; HLA-B*54:01; MYH4; ENSG00000264424; TAA
LAHALQSA

SEQ ID NO: 50426 - protein, 9 aa, Homo sapiens
  misc_feature: Table A; Target 50426; HLA-A*33:01; MYH4; ENSG00000264424; TAA
LAHALQSAR

SEQ ID NO: 50427 - protein, 9 aa, Homo sapiens
  misc_feature: Table A; Target 50427; HLA-A*33:03; MYH4; ENSG00000264424; TAA
LAHALQSAR

SEQ ID NO: 50428 - protein, 9 aa, Homo sapiens
  misc_feature: Table A; Target 50428; HLA-A*68:01; MYH4; ENSG00000264424; TAA
LAHALQSAR

SEQ ID NO: 50429 - protein, 9 aa, Homo sapiens
  misc_feature: Table A; Target 50429; HLA-C*07:06; MYH4; ENSG00000264424; TAA
LAHALQSAR

SEQ ID NO: 50430 - protein, 9 aa, Homo sapiens
  misc_feature: Table A; Target 50430; HLA-C*16:02; MYH4; ENSG00000264424; TAA
LAIQLQKKI

SEQ ID NO: 50431 - protein, 9 aa, Homo sapiens
  misc_feature: Table A; Target 50431; HLA-B*46:01; MYH4; ENSG00000264424; TAA
LAKAIYEKM

SEQ ID NO: 50432 - protein, 9 aa, Homo sapiens
  misc_feature: Table A; Target 50432; HLA-C*02:02; MYH4; ENSG00000264424; TAA
LAKAIYEKM

SEQ ID NO: 50433 - protein, 9 aa, Homo sapiens
  misc_feature: Table A; Target 50433; HLA-C*12:03; MYH4; ENSG00000264424; TAA
LAKAIYEKM

SEQ ID NO: 50434 - protein, 9 aa, Homo sapiens
  misc_feature: Table A; Target 50434; HLA-C*16:04; MYH4; ENSG00000264424; TAA
LAKAIYEKM

SEQ ID NO: 50435 - protein, 9 aa, Homo sapiens
  misc_feature: Table A; Target 50435; HLA-A*01:01; MYH4; ENSG00000264424; TAA
LASADIETY

SEQ ID NO: 50436 - protein, 9 aa, Homo sapiens
  misc_feature: Table A; Target 50436; HLA-A*25:01; MYH4; ENSG00000264424; TAA
LASADIETY

SEQ ID NO: 50437 - protein, 9 aa, Homo sapiens
  misc_feature: Table A; Target 50437; HLA-A*29:02; MYH4; ENSG00000264424; TAA
LASADIETY

SEQ ID NO: 50438 - protein, 9 aa, Homo sapiens
  misc_feature: Table A; Target 50438; HLA-A*30:02; MYH4; ENSG00000264424; TAA
LASADIETY

SEQ ID NO: 50439 - protein, 9 aa, Homo sapiens
  misc_feature: Table A; Target 50439; HLA-B*15:01; MYH4; ENSG00000264424; TAA
LASADIETY

SEQ ID NO: 50440 - protein, 9 aa, Homo sapiens
  misc_feature: Table A; Target 50440; HLA-B*15:03; MYH4; ENSG00000264424; TAA
LASADIETY

SEQ ID NO: 50441 - protein, 9 aa, Homo sapiens
  misc_feature: Table A; Target 50441; HLA-B*18:01; MYH4; ENSG00000264424; TAA
LASADIETY

SEQ ID NO: 50442 - protein, 9 aa, Homo sapiens
  misc_feature: Table A; Target 50442; HLA-B*27:02; MYH4; ENSG00000264424; TAA
LASADIETY

SEQ ID NO: 50443 - protein, 9 aa, Homo sapiens
  misc_feature: Table A; Target 50443; HLA-B*27:05; MYH4; ENSG00000264424; TAA
LASADIETY

SEQ ID NO: 50444 - protein, 9 aa, Homo sapiens
  misc_feature: Table A; Target 50444; HLA-B*35:01; MYH4; ENSG00000264424; TAA
LASADIETY

SEQ ID NO: 50445 - protein, 9 aa, Homo sapiens
  misc_feature: Table A; Target 50445; HLA-B*35:03; MYH4; ENSG00000264424; TAA
LASADIETY

SEQ ID NO: 50446 - protein, 9 aa, Homo sapiens
  misc_feature: Table A; Target 50446; HLA-B*39:01; MYH4; ENSG00000264424; TAA
LASADIETY

SEQ ID NO: 50447 - protein, 9 aa, Homo sapiens
  misc_feature: Table A; Target 50447; HLA-B*46:01; MYH4; ENSG00000264424; TAA
LASADIETY

SEQ ID NO: 50448 - protein, 9 aa, Homo sapiens
  misc_feature: Table A; Target 50448; HLA-B*55:01; MYH4; ENSG00000264424; TAA
LASADIETY

SEQ ID NO: 50449 - protein, 9 aa, Homo sapiens
  misc_feature: Table A; Target 50449; HLA-B*57:01; MYH4; ENSG00000264424; TAA
LASADIETY

SEQ ID NO: 50450 - protein, 9 aa, Homo sapiens
  misc_feature: Table A; Target 50450; HLA-B*58:01; MYH4; ENSG00000264424; TAA
LASADIETY

SEQ ID NO: 50451 - protein, 9 aa, Homo sapiens
  misc_feature: Table A; Target 50451; HLA-C*02:02; MYH4; ENSG00000264424; TAA
LASADIETY

SEQ ID NO: 50452 - protein, 9 aa, Homo sapiens
  misc_feature: Table A; Target 50452; HLA-C*03:03; MYH4; ENSG00000264424; TAA
LASADIETY

SEQ ID NO: 50453 - protein, 9 aa, Homo sapiens
  misc_feature: Table A; Target 50453; HLA-C*03:04; MYH4; ENSG00000264424; TAA
LASADIETY

SEQ ID NO: 50454 - protein, 9 aa, Homo sapiens
  misc_feature: Table A; Target 50454; HLA-C*07:04; MYH4; ENSG00000264424; TAA
LASADIETY

SEQ ID NO: 50455 - protein, 9 aa, Homo sapiens
  misc_feature: Table A; Target 50455; HLA-C*07:06; MYH4; ENSG00000264424; TAA
LASADIETY

SEQ ID NO: 50456 - protein, 9 aa, Homo sapiens
  misc_feature: Table A; Target 50456; HLA-C*12:03; MYH4; ENSG00000264424; TAA
LASADIETY

SEQ ID NO: 50457 - protein, 9 aa, Homo sapiens
  misc_feature: Table A; Target 50457; HLA-C*16:01; MYH4; ENSG00000264424; TAA
LASADIETY

SEQ ID NO: 50458 - protein, 9 aa, Homo sapiens
  misc_feature: Table A; Target 50458; HLA-C*16:02; MYH4; ENSG00000264424; TAA
LASADIETY

SEQ ID NO: 50459 - protein, 9 aa, Homo sapiens
  misc_feature: Table A; Target 50459; HLA-C*16:04; MYH4; ENSG00000264424; TAA
LASADIETY

SEQ ID NO: 50460 - protein, 8 aa, Homo sapiens
  misc_feature: Table A; Target 50460; HLA-B*51:01; MYH4; ENSG00000264424; TAA
LASNMETV

SEQ ID NO: 50461 - protein, 8 aa, Homo sapiens
  misc_feature: Table A; Target 50461; HLA-C*02:02; MYH4; ENSG00000264424; TAA
LASNMETV

SEQ ID NO: 50462 - protein, 10 aa, Homo sapiens
  misc_feature: Table A; Target 50462; HLA-B*27:02; MYH4; ENSG00000264424; TAA
LASNMETVSK

SEQ ID NO: 50463 - protein, 10 aa, Homo sapiens
  misc_feature: Table A; Target 50463; HLA-C*07:06; MYH4; ENSG00000264424; TAA
LASNMETVSK

SEQ ID NO: 50464 - protein, 9 aa, Homo sapiens
  misc_feature: Table A; Target 50464; HLA-A*30:01; MYH4; ENSG00000264424; TAA
LDASERVQL

SEQ ID NO: 50465 - protein, 9 aa, Homo sapiens
  misc_feature: Table A; Target 50465; HLA-B*37:01; MYH4; ENSG00000264424; TAA
LDASERVQL

SEQ ID NO: 50466 - protein, 9 aa, Homo sapiens
  misc_feature: Table A; Target 50466; HLA-B*38:01; MYH4; ENSG00000264424; TAA
LDASERVQL

SEQ ID NO: 50467 - protein, 9 aa, Homo sapiens
  misc_feature: Table A; Target 50467; HLA-B*40:01; MYH4; ENSG00000264424; TAA
LDASERVQL

SEQ ID NO: 50468 - protein, 9 aa, Homo sapiens
  misc_feature: Table A; Target 50468; HLA-B*40:01; MYH4; ENSG00000264424; TAA
LDEAEQLAL

SEQ ID NO: 50469 - protein, 10 aa, Homo sapiens
  misc_feature: Table A; Target 50469; HLA-B*27:02; MYH4; ENSG00000264424; TAA
LDEAEQLALK

SEQ ID NO: 50470 - protein, 8 aa, Homo sapiens
  misc_feature: Table A; Target 50470; HLA-B*37:01; MYH4; ENSG00000264424; TAA
LDETIAKL

SEQ ID NO: 50471 - protein, 8 aa, Homo sapiens
  misc_feature: Table A; Target 50471; HLA-B*08:01; MYH4; ENSG00000264424; TAA
LDHEKSEL

SEQ ID NO: 50472 - protein, 8 aa, Homo sapiens
  misc_feature: Table A; Target 50472; HLA-B*37:01; MYH4; ENSG00000264424; TAA
LDHEKSEL

SEQ ID NO: 50473 - protein, 8 aa, Homo sapiens
  misc_feature: Table A; Target 50473; HLA-B*40:02; MYH4; ENSG00000264424; TAA
LDHEKSEL

SEQ ID NO: 50474 - protein, 8 aa, Homo sapiens
  misc_feature: Table A; Target 50474; HLA-C*06:02; MYH4; ENSG00000264424; TAA
LDHLETLK

SEQ ID NO: 50475 - protein, 9 aa, Homo sapiens
  misc_feature: Table A; Target 50475; HLA-A*30:02; MYH4; ENSG00000264424; TAA
LDTKQPRQY

SEQ ID NO: 50476 - protein, 9 aa, Homo sapiens
  misc_feature: Table A; Target 50476; HLA-C*16:01; MYH4; ENSG00000264424; TAA
LDTKQPRQY

SEQ ID NO: 50477 - protein, 9 aa, Homo sapiens
  misc_feature: Table A; Target 50477; HLA-C*16:02; MYH4; ENSG00000264424; TAA
LDTKQPRQY

SEQ ID NO: 50478 - protein, 10 aa, Homo sapiens
  misc_feature: Table A; Target 50478; HLA-B*49:01; MYH4; ENSG00000264424; TAA
LEAFGNAKTV

SEQ ID NO: 50479 - protein, 8 aa, Homo sapiens
  misc_feature: Table A; Target 50479; HLA-B*49:01; MYH4; ENSG00000264424; TAA
LEAKIKEV

SEQ ID NO: 50480 - protein, 8 aa, Homo sapiens
  misc_feature: Table A; Target 50480; HLA-B*49:01; MYH4; ENSG00000264424; TAA
LEDECSEL

SEQ ID NO: 50481 - protein, 8 aa, Homo sapiens
  misc_feature: Table A; Target 50481; HLA-C*05:01; MYH4; ENSG00000264424; TAA
LEDECSEL

SEQ ID NO: 50482 - protein, 8 aa, Homo sapiens
  misc_feature: Table A; Target 50482; HLA-B*18:01; MYH4; ENSG00000264424; TAA
LEDQIISA

SEQ ID NO: 50483 - protein, 8 aa, Homo sapiens
  misc_feature: Table A; Target 50483; HLA-B*49:01; MYH4; ENSG00000264424; TAA
LEDQIISA

SEQ ID NO: 50484 - protein, 11 aa, Homo sapiens
  misc_feature: Table A; Target 50484; HLA-B*40:01; MYH4; ENSG00000264424; TAA
LEDQIISANPL

SEQ ID NO: 50485 - protein, 8 aa, Homo sapiens
  misc_feature: Table A; Target 50485; HLA-B*49:01; MYH4; ENSG00000264424; TAA
LEDQLSEI

SEQ ID NO: 50486 - protein, 8 aa, Homo sapiens
  misc_feature: Table A; Target 50486; HLA-B*40:01; MYH4; ENSG00000264424; TAA
LEEAEASL

SEQ ID NO: 50487 - protein, 10 aa, Homo sapiens
  misc_feature: Table A; Target 50487; HLA-A*30:01; MYH4; ENSG00000264424; TAA
LEEAGGATSA

SEQ ID NO: 50488 - protein, 10 aa, Homo sapiens
  misc_feature: Table A; Target 50488; HLA-B*40:01; MYH4; ENSG00000264424; TAA
LEEAGGATSA

SEQ ID NO: 50489 - protein, 10 aa, Homo sapiens
  misc_feature: Table A; Target 50489; HLA-B*49:01; MYH4; ENSG00000264424; TAA
LEEAGGATSA

SEQ ID NO: 50490 - protein, 11 aa, Homo sapiens
  misc_feature: Table A; Target 50490; HLA-A*30:01; MYH4; ENSG00000264424; TAA
LEEETKAKSTL

SEQ ID NO: 50491 - protein, 11 aa, Homo sapiens
  misc_feature: Table A; Target 50491; HLA-B*40:01; MYH4; ENSG00000264424; TAA
LEEETKAKSTL

SEQ ID NO: 50492 - protein, 11 aa, Homo sapiens
  misc_feature: Table A; Target 50492; HLA-B*40:02; MYH4; ENSG00000264424; TAA
LEEETKAKSTL

SEQ ID NO: 50493 - protein, 8 aa, Homo sapiens
  misc_feature: Table A; Target 50493; HLA-B*40:01; MYH4; ENSG00000264424; TAA
LEEISERL

SEQ ID NO: 50494 - protein, 8 aa, Homo sapiens
  misc_feature: Table A; Target 50494; HLA-A*30:01; MYH4; ENSG00000264424; TAA
LEEKMVTL

SEQ ID NO: 50495 - protein, 8 aa, Homo sapiens
  misc_feature: Table A; Target 50495; HLA-B*18:01; MYH4; ENSG00000264424; TAA
LEEKMVTL

SEQ ID NO: 50496 - protein, 8 aa, Homo sapiens
  misc_feature: Table A; Target 50496; HLA-B*40:01; MYH4; ENSG00000264424; TAA
LEEKMVTL

SEQ ID NO: 50497 - protein, 8 aa, Homo sapiens
  misc_feature: Table A; Target 50497; HLA-B*40:02; MYH4; ENSG00000264424; TAA
LEEKMVTL

SEQ ID NO: 50498 - protein, 8 aa, Homo sapiens
  misc_feature: Table A; Target 50498; HLA-B*49:01; MYH4; ENSG00000264424; TAA
LEEKMVTL

SEQ ID NO: 50499 - protein, 9 aa, Homo sapiens
  misc_feature: Table A; Target 50499; HLA-A*30:01; MYH4; ENSG00000264424; TAA
LEEKMVTLM

SEQ ID NO: 50500 - protein, 9 aa, Homo sapiens
  misc_feature: Table A; Target 50500; HLA-B*18:01; MYH4; ENSG00000264424; TAA
LEEKMVTLM

SEQ ID NO: 50501 - protein, 9 aa, Homo sapiens
  misc_feature: Table A; Target 50501; HLA-B*37:01; MYH4; ENSG00000264424; TAA
LEEKMVTLM

SEQ ID NO: 50502 - protein, 9 aa, Homo sapiens
  misc_feature: Table A; Target 50502; HLA-B*40:01; MYH4; ENSG00000264424; TAA
LEEKMVTLM

SEQ ID NO: 50503 - protein, 9 aa, Homo sapiens
  misc_feature: Table A; Target 50503; HLA-B*49:01; MYH4; ENSG00000264424; TAA
LEEKMVTLM

SEQ ID NO: 50504 - protein, 9 aa, Homo sapiens
  misc_feature: Table A; Target 50504; HLA-B*40:01; MYH4; ENSG00000264424; TAA
LEEMRDEKL

SEQ ID NO: 50505 - protein, 10 aa, Homo sapiens
  misc_feature: Table A; Target 50505; HLA-B*40:02; MYH4; ENSG00000264424; TAA
LEESTLQHEA

SEQ ID NO: 50506 - protein, 10 aa, Homo sapiens
  misc_feature: Table A; Target 50506; HLA-B*49:01; MYH4; ENSG00000264424; TAA
LEESTLQHEA

SEQ ID NO: 50507 - protein, 9 aa, Homo sapiens
  misc_feature: Table A; Target 50507; HLA-A*30:01; MYH4; ENSG00000264424; TAA
LEHEEGKIL

SEQ ID NO: 50508 - protein, 9 aa, Homo sapiens
  misc_feature: Table A; Target 50508; HLA-B*40:01; MYH4; ENSG00000264424; TAA
LEHEEGKIL

SEQ ID NO: 50509 - protein, 9 aa, Homo sapiens
  misc_feature: Table A; Target 50509; HLA-B*40:02; MYH4; ENSG00000264424; TAA
LEHEEGKIL

SEQ ID NO: 50510 - protein, 9 aa, Homo sapiens
  misc_feature: Table A; Target 50510; HLA-B*44:02; MYH4; ENSG00000264424; TAA
LEHEEGKIL

SEQ ID NO: 50511 - protein, 9 aa, Homo sapiens
  misc_feature: Table A; Target 50511; HLA-B*44:03; MYH4; ENSG00000264424; TAA
LEHEEGKIL

SEQ ID NO: 50512 - protein, 8 aa, Homo sapiens
  misc_feature: Table A; Target 50512; HLA-B*08:01; MYH4; ENSG00000264424; TAA
LEKEKSEL

SEQ ID NO: 50513 - protein, 8 aa, Homo sapiens
  misc_feature: Table A; Target 50513; HLA-B*40:02; MYH4; ENSG00000264424; TAA
LEKEKSEL

SEQ ID NO: 50514 - protein, 8 aa, Homo sapiens
  misc_feature: Table A; Target 50514; HLA-B*08:01; MYH4; ENSG00000264424; TAA
LEKSRVTF

SEQ ID NO: 50515 - protein, 8 aa, Homo sapiens
  misc_feature: Table A; Target 50515; HLA-B*08:01; MYH4; ENSG00000264424; TAA
LEKTKQRL

SEQ ID NO: 50516 - protein, 10 aa, Homo sapiens
  misc_feature: Table A; Target 50516; HLA-B*49:01; MYH4; ENSG00000264424; TAA
LELNQVKSEI

SEQ ID NO: 50517 - protein, 8 aa, Homo sapiens
  misc_feature: Table A; Target 50517; HLA-B*18:01; MYH4; ENSG00000264424; TAA
LELTLAKV

SEQ ID NO: 50518 - protein, 8 aa, Homo sapiens
  misc_feature: Table A; Target 50518; HLA-B*49:01; MYH4; ENSG00000264424; TAA
LELTLAKV

SEQ ID NO: 50519 - protein, 8 aa, Homo sapiens
  misc_feature: Table A; Target 50519; HLA-B*18:01; MYH4; ENSG00000264424; TAA
LEQLCINF

SEQ ID NO: 50520 - protein, 10 aa, Homo sapiens
  misc_feature: Table A; Target 50520; HLA-B*27:02; MYH4; ENSG00000264424; TAA
LESEVESEQK

SEQ ID NO: 50521 - protein, 8 aa, Homo sapiens
  misc_feature: Table A; Target 50521; HLA-A*30:01; MYH4; ENSG00000264424; TAA
LETDISQI

SEQ ID NO: 50522 - protein, 8 aa, Homo sapiens
  misc_feature: Table A; Target 50522; HLA-B*13:02; MYH4; ENSG00000264424; TAA
LETDISQI

SEQ ID NO: 50523 - protein, 8 aa, Homo sapiens
  misc_feature: Table A; Target 50523; HLA-B*18:01; MYH4; ENSG00000264424; TAA
LETDISQI

SEQ ID NO: 50524 - protein, 8 aa, Homo sapiens
  misc_feature: Table A; Target 50524; HLA-B*40:01; MYH4; ENSG00000264424; TAA
LETDISQI

SEQ ID NO: 50525 - protein, 8 aa, Homo sapiens
  misc_feature: Table A; Target 50525; HLA-B*49:01; MYH4; ENSG00000264424; TAA
LETDISQI

SEQ ID NO: 50526 - protein, 9 aa, Homo sapiens
  misc_feature: Table A; Target 50526; HLA-C*12:03; MYH4; ENSG00000264424; TAA
LETDISQIQ

SEQ ID NO: 50527 - protein, 9 aa, Homo sapiens
  misc_feature: Table A; Target 50527; HLA-C*14:02; MYH4; ENSG00000264424; TAA
LFCVTVNPY

SEQ ID NO: 50528 - protein, 8 aa, Homo sapiens
  misc_feature: Table A; Target 50528; HLA-C*14:02; MYH4; ENSG00000264424; TAA
LFSGAQTA

SEQ ID NO: 50529 - protein, 10 aa, Homo sapiens
  misc_feature: Table A; Target 50529; HLA-C*14:02; MYH4; ENSG00000264424; TAA
LFSGAQTAEA

SEQ ID NO: 50530 - protein, 11 aa, Homo sapiens
  misc_feature: Table A; Target 50530; HLA-A*01:01; MYH4; ENSG00000264424; TAA
LGSIEIDHTQY

SEQ ID NO: 50531 - protein, 8 aa, Homo sapiens
  misc_feature: Table A; Target 50531; HLA-B*39:01; MYH4; ENSG00000264424; TAA
LHEPAVLY

SEQ ID NO: 50532 - protein, 8 aa, Homo sapiens
  misc_feature: Table A; Target 50532; HLA-C*07:04; MYH4; ENSG00000264424; TAA
LHEPAVLY

SEQ ID NO: 50533 - protein, 10 aa, Homo sapiens
  misc_feature: Table A; Target 50533; HLA-B*38:01; MYH4; ENSG00000264424; TAA
LHEPAVLYNL

SEQ ID NO: 50534 - protein, 8 aa, Homo sapiens
  misc_feature: Table A; Target 50534; HLA-B*39:01; MYH4; ENSG00000264424; TAA
LHTESGEF

SEQ ID NO: 50535 - protein, 8 aa, Homo sapiens
  misc_feature: Table A; Target 50535; HLA-C*05:01; MYH4; ENSG00000264424; TAA
LHTESGEF

SEQ ID NO: 50536 - protein, 8 aa, Homo sapiens
  misc_feature: Table A; Target 50536; HLA-B*38:01; MYH4; ENSG00000264424; TAA
LHTQNTSL

SEQ ID NO: 50537 - protein, 8 aa, Homo sapiens
  misc_feature: Table A; Target 50537; HLA-B*39:01; MYH4; ENSG00000264424; TAA
LHTQNTSL

SEQ ID NO: 50538 - protein, 9 aa, Homo sapiens
  misc_feature: Table A; Target 50538; HLA-B*38:01; MYH4; ENSG00000264424; TAA
LHTQNTSLI

SEQ ID NO: 50539 - protein, 8 aa, Homo sapiens
  misc_feature: Table A; Target 50539; HLA-B*08:01; MYH4; ENSG00000264424; TAA
LIKTKIQL

SEQ ID NO: 50540 - protein, 9 aa, Homo sapiens
  misc_feature: Table A; Target 50540; HLA-A*03:01; MYH4; ENSG00000264424; TAA
LINELSAQK

SEQ ID NO: 50541 - protein, 9 aa, Homo sapiens
  misc_feature: Table A; Target 50541; HLA-A*03:02; MYH4; ENSG00000264424; TAA
LINELSAQK

SEQ ID NO: 50542 - protein, 9 aa, Homo sapiens
  misc_feature: Table A; Target 50542; HLA-A*11:01; MYH4; ENSG00000264424; TAA
LINELSAQK

SEQ ID NO: 50543 - protein, 9 aa, Homo sapiens
  misc_feature: Table A; Target 50543; HLA-A*33:03; MYH4; ENSG00000264424; TAA
LINELSAQK

SEQ ID NO: 50544 - protein, 9 aa, Homo sapiens
  misc_feature: Table A; Target 50544; HLA-A*68:01; MYH4; ENSG00000264424; TAA
LINELSAQK

SEQ ID NO: 50545 - protein, 9 aa, Homo sapiens
  misc_feature: Table A; Target 50545; HLA-B*27:02; MYH4; ENSG00000264424; TAA
LINELSAQK

SEQ ID NO: 50546 - protein, 9 aa, Homo sapiens
  misc_feature: Table A; Target 50546; HLA-C*07:06; MYH4; ENSG00000264424; TAA
LINELSAQK

SEQ ID NO: 50547 - protein, 8 aa, Homo sapiens
  misc_feature: Table A; Target 50547; HLA-B*08:01; MYH4; ENSG00000264424; TAA
LINTKKKL

SEQ ID NO: 50548 - protein, 10 aa, Homo sapiens
  misc_feature: Table A; Target 50548; HLA-A*03:02; MYH4; ENSG00000264424; TAA
LITGESGAGK

SEQ ID NO: 50549 - protein, 9 aa, Homo sapiens
  misc_feature: Table A; Target 50549; HLA-B*15:03; MYH4; ENSG00000264424; TAA
LKLAQESTM

SEQ ID NO: 50550 - protein, 8 aa, Homo sapiens
  misc_feature: Table A; Target 50550; HLA-C*05:01; MYH4; ENSG00000264424; TAA
LLDASERV

SEQ ID NO: 50551 - protein, 10 aa, Homo sapiens
  misc_feature: Table A; Target 50551; HLA-A*02:07; MYH4; ENSG00000264424; TAA
LLDASERVQL

SEQ ID NO: 50552 - protein, 10 aa, Homo sapiens
  misc_feature: Table A; Target 50552; HLA-B*38:01; MYH4; ENSG00000264424; TAA
LLDASERVQL

SEQ ID NO: 50553 - protein, 10 aa, Homo sapiens
  misc_feature: Table A; Target 50553; HLA-B*55:01; MYH4; ENSG00000264424; TAA
LLDASERVQL

SEQ ID NO: 50554 - protein, 10 aa, Homo sapiens
  misc_feature: Table A; Target 50554; HLA-C*05:01; MYH4; ENSG00000264424; TAA
LLDASERVQL

SEQ ID NO: 50555 - protein, 11 aa, Homo sapiens
  misc_feature: Table A; Target 50555; HLA-A*02:07; MYH4; ENSG00000264424; TAA
LLDASERVQLL

SEQ ID NO: 50556 - protein, 9 aa, Homo sapiens
  misc_feature: Table A; Target 50556; HLA-A*01:01; MYH4; ENSG00000264424; TAA
LLEAFGNAK

SEQ ID NO: 50557 - protein, 9 aa, Homo sapiens
  misc_feature: Table A; Target 50557; HLA-A*03:01; MYH4; ENSG00000264424; TAA
LLEAFGNAK

SEQ ID NO: 50558 - protein, 9 aa, Homo sapiens
  misc_feature: Table A; Target 50558; HLA-A*03:02; MYH4; ENSG00000264424; TAA
LLEAFGNAK

SEQ ID NO: 50559 - protein, 11 aa, Homo sapiens
  misc_feature: Table A; Target 50559; HLA-A*02:03; MYH4; ENSG00000264424; TAA
LLEAFGNAKTV

SEQ ID NO: 50560 - protein, 11 aa, Homo sapiens
  misc_feature: Table A; Target 50560; HLA-C*16:02; MYH4; ENSG00000264424; TAA
LLEAFGNAKTV

SEQ ID NO: 50561 - protein, 8 aa, Homo sapiens
  misc_feature: Table A; Target 50561; HLA-B*46:01; MYH4; ENSG00000264424; TAA
LLGTLEEM

SEQ ID NO: 50562 - protein, 9 aa, Homo sapiens
  misc_feature: Table A; Target 50562; HLA-A*02:01; MYH4; ENSG00000264424; TAA
LLHTQNTSL

SEQ ID NO: 50563 - protein, 9 aa, Homo sapiens
  misc_feature: Table A; Target 50563; HLA-A*02:03; MYH4; ENSG00000264424; TAA
LLHTQNTSL

SEQ ID NO: 50564 - protein, 9 aa, Homo sapiens
  misc_feature: Table A; Target 50564; HLA-A*02:04; MYH4; ENSG00000264424; TAA
LLHTQNTSL

SEQ ID NO: 50565 - protein, 9 aa, Homo sapiens
  misc_feature: Table A; Target 50565; HLA-A*02:07; MYH4; ENSG00000264424; TAA
LLHTQNTSL

SEQ ID NO: 50566 - protein, 9 aa, Homo sapiens
  misc_feature: Table A; Target 50566; HLA-A*32:01; MYH4; ENSG00000264424; TAA
LLHTQNTSL

SEQ ID NO: 50567 - protein, 9 aa, Homo sapiens
  misc_feature: Table A; Target 50567; HLA-B*07:02; MYH4; ENSG00000264424; TAA
LLHTQNTSL

SEQ ID NO: 50568 - protein, 9 aa, Homo sapiens
  misc_feature: Table A; Target 50568; HLA-B*08:01; MYH4; ENSG00000264424; TAA
LLHTQNTSL

SEQ ID NO: 50569 - protein, 9 aa, Homo sapiens
  misc_feature: Table A; Target 50569; HLA-B*15:01; MYH4; ENSG00000264424; TAA
LLHTQNTSL

SEQ ID NO: 50570 - protein, 9 aa, Homo sapiens
  misc_feature: Table A; Target 50570; HLA-B*46:01; MYH4; ENSG00000264424; TAA
LLHTQNTSL

SEQ ID NO: 50571 - protein, 9 aa, Homo sapiens
  misc_feature: Table A; Target 50571; HLA-B*55:01; MYH4; ENSG00000264424; TAA
LLHTQNTSL

SEQ ID NO: 50572 - protein, 9 aa, Homo sapiens
  misc_feature: Table A; Target 50572; HLA-C*01:02; MYH4; ENSG00000264424; TAA
LLHTQNTSL

SEQ ID NO: 50573 - protein, 9 aa, Homo sapiens
  misc_feature: Table A; Target 50573; HLA-C*03:03; MYH4; ENSG00000264424; TAA
LLHTQNTSL

SEQ ID NO: 50574 - protein, 9 aa, Homo sapiens
  misc_feature: Table A; Target 50574; HLA-C*03:04; MYH4; ENSG00000264424; TAA
LLHTQNTSL

SEQ ID NO: 50575 - protein, 9 aa, Homo sapiens
  misc_feature: Table A; Target 50575; HLA-C*14:02; MYH4; ENSG00000264424; TAA
LLHTQNTSL

SEQ ID NO: 50576 - protein, 8 aa, Homo sapiens
  misc_feature: Table A; Target 50576; HLA-B*46:01; MYH4; ENSG00000264424; TAA
LLITTNPY

SEQ ID NO: 50577 - protein, 10 aa, Homo sapiens
  misc_feature: Table A; Target 50577; HLA-A*02:01; MYH4; ENSG00000264424; TAA
LMIDVERSNA

SEQ ID NO: 50578 - protein, 10 aa, Homo sapiens
  misc_feature: Table A; Target 50578; HLA-A*02:03; MYH4; ENSG00000264424; TAA
LMIDVERSNA

SEQ ID NO: 50579 - protein, 11 aa, Homo sapiens
  misc_feature: Table A; Target 50579; HLA-A*02:01; MYH4; ENSG00000264424; TAA
LMIDVERSNAA

SEQ ID NO: 50580 - protein, 11 aa, Homo sapiens
  misc_feature: Table A; Target 50580; HLA-A*02:03; MYH4; ENSG00000264424; TAA
LMIDVERSNAA

SEQ ID NO: 50581 - protein, 11 aa, Homo sapiens
  misc_feature: Table A; Target 50581; HLA-A*02:07; MYH4; ENSG00000264424; TAA
LMIDVERSNAA

SEQ ID NO: 50582 - protein, 11 aa, Homo sapiens
  misc_feature: Table A; Target 50582; HLA-A*32:01; MYH4; ENSG00000264424; TAA
LMIDVERSNAA

SEQ ID NO: 50583 - protein, 9 aa, Homo sapiens
  misc_feature: Table A; Target 50583; HLA-A*02:01; MYH4; ENSG00000264424; TAA
LMQAEVEEL

SEQ ID NO: 50584 - protein, 9 aa, Homo sapiens
  misc_feature: Table A; Target 50584; HLA-A*02:03; MYH4; ENSG00000264424; TAA
LMQAEVEEL

SEQ ID NO: 50585 - protein, 9 aa, Homo sapiens
  misc_feature: Table A; Target 50585; HLA-A*02:04; MYH4; ENSG00000264424; TAA
LMQAEVEEL

SEQ ID NO: 50586 - protein, 9 aa, Homo sapiens
  misc_feature: Table A; Target 50586; HLA-A*02:07; MYH4; ENSG00000264424; TAA
LMQAEVEEL

SEQ ID NO: 50587 - protein, 9 aa, Homo sapiens
  misc_feature: Table A; Target 50587; HLA-B*27:05; MYH4; ENSG00000264424; TAA
LMQAEVEEL

SEQ ID NO: 50588 - protein, 9 aa, Homo sapiens
  misc_feature: Table A; Target 50588; HLA-B*55:01; MYH4; ENSG00000264424; TAA
LMQAEVEEL

SEQ ID NO: 50589 - protein, 9 aa, Homo sapiens
  misc_feature: Table A; Target 50589; HLA-C*01:02; MYH4; ENSG00000264424; TAA
LMQAEVEEL

SEQ ID NO: 50590 - protein, 9 aa, Homo sapiens
  misc_feature: Table A; Target 50590; HLA-C*03:04; MYH4; ENSG00000264424; TAA
LMQAEVEEL

SEQ ID NO: 50591 - protein, 9 aa, Homo sapiens
  misc_feature: Table A; Target 50591; HLA-C*07:04; MYH4; ENSG00000264424; TAA
LMQAEVEEL

SEQ ID NO: 50592 - protein, 9 aa, Homo sapiens
  misc_feature: Table A; Target 50592; HLA-C*14:02; MYH4; ENSG00000264424; TAA
LMQAEVEEL

SEQ ID NO: 50593 - protein, 10 aa, Homo sapiens
  misc_feature: Table A; Target 50593; HLA-B*27:02; MYH4; ENSG00000264424; TAA
LMQAEVEELR

SEQ ID NO: 50594 - protein, 8 aa, Homo sapiens
  misc_feature: Table A; Target 50594; HLA-B*08:01; MYH4; ENSG00000264424; TAA
LMQEKNDL

SEQ ID NO: 50595 - protein, 9 aa, Homo sapiens
  misc_feature: Table A; Target 50595; HLA-A*01:01; MYH4; ENSG00000264424; TAA
LNETVVGLY

SEQ ID NO: 50596 - protein, 11 aa, Homo sapiens
  misc_feature: Table A; Target 50596; HLA-B*27:02; MYH4; ENSG00000264424; TAA
LNETVVGLYQK

SEQ ID NO: 50597 - protein, 8 aa, Homo sapiens
  misc_feature: Table A; Target 50597; HLA-B*08:01; MYH4; ENSG00000264424; TAA
LNKLMTNL

SEQ ID NO: 50598 - protein, 8 aa, Homo sapiens
  misc_feature: Table A; Target 50598; HLA-C*07:02; MYH4; ENSG00000264424; TAA
LNKLMTNL

SEQ ID NO: 50599 - protein, 8 aa, Homo sapiens
  misc_feature: Table A; Target 50599; HLA-B*08:01; MYH4; ENSG00000264424; TAA
LNQVKSEI

SEQ ID NO: 50600 - protein, 8 aa, Homo sapiens
  misc_feature: Table A; Target 50600; HLA-B*35:01; MYH4; ENSG00000264424; TAA
LPVYNPEV

SEQ ID NO: 50601 - protein, 8 aa, Homo sapiens
  misc_feature: Table A; Target 50601; HLA-B*35:03; MYH4; ENSG00000264424; TAA
LPVYNPEV

SEQ ID NO: 50602 - protein, 8 aa, Homo sapiens
  misc_feature: Table A; Target 50602; HLA-B*51:01; MYH4; ENSG00000264424; TAA
LPVYNPEV

SEQ ID NO: 50603 - protein, 8 aa, Homo sapiens
  misc_feature: Table A; Target 50603; HLA-B*54:01; MYH4; ENSG00000264424; TAA
LPVYNPEV

SEQ ID NO: 50604 - protein, 8 aa, Homo sapiens
  misc_feature: Table A; Target 50604; HLA-B*55:01; MYH4; ENSG00000264424; TAA
LPVYNPEV

SEQ ID NO: 50605 - protein, 8 aa, Homo sapiens
  misc_feature: Table A; Target 50605; HLA-B*56:01; MYH4; ENSG00000264424; TAA
LPVYNPEV

SEQ ID NO: 50606 - protein, 9 aa, Homo sapiens
  misc_feature: Table A; Target 50606; HLA-B*07:02; MYH4; ENSG00000264424; TAA
LPVYNPEVV

SEQ ID NO: 50607 - protein, 9 aa, Homo sapiens
  misc_feature: Table A; Target 50607; HLA-B*35:01; MYH4; ENSG00000264424; TAA
LPVYNPEVV

SEQ ID NO: 50608 - protein, 9 aa, Homo sapiens
  misc_feature: Table A; Target 50608; HLA-B*35:03; MYH4; ENSG00000264424; TAA
LPVYNPEVV

SEQ ID NO: 50609 - protein, 9 aa, Homo sapiens
  misc_feature: Table A; Target 50609; HLA-B*51:01; MYH4; ENSG00000264424; TAA
LPVYNPEVV

SEQ ID NO: 50610 - protein, 9 aa, Homo sapiens
  misc_feature: Table A; Target 50610; HLA-B*54:01; MYH4; ENSG00000264424; TAA
LPVYNPEVV

SEQ ID NO: 50611 - protein, 9 aa, Homo sapiens
  misc_feature: Table A; Target 50611; HLA-B*55:01; MYH4; ENSG00000264424; TAA
LPVYNPEVV

SEQ ID NO: 50612 - protein, 9 aa, Homo sapiens
  misc_feature: Table A; Target 50612; HLA-B*56:01; MYH4; ENSG00000264424; TAA
LPVYNPEVV

SEQ ID NO: 50613 - protein, 9 aa, Homo sapiens
  misc_feature: Table A; Target 50613; HLA-C*07:02; MYH4; ENSG00000264424; TAA
LPVYNPEVV

SEQ ID NO: 50614 - protein, 10 aa, Homo sapiens
  misc_feature: Table A; Target 50614; HLA-B*35:03; MYH4; ENSG00000264424; TAA
LPVYNPEVVT

SEQ ID NO: 50615 - protein, 10 aa, Homo sapiens
  misc_feature: Table A; Target 50615; HLA-B*54:01; MYH4; ENSG00000264424; TAA
LPVYNPEVVT

SEQ ID NO: 50616 - protein, 10 aa, Homo sapiens
  misc_feature: Table A; Target 50616; HLA-B*56:01; MYH4; ENSG00000264424; TAA
LPVYNPEVVT

SEQ ID NO: 50617 - protein, 11 aa, Homo sapiens
  misc_feature: Table A; Target 50617; HLA-B*35:03; MYH4; ENSG00000264424; TAA
LPVYNPEVVTA

SEQ ID NO: 50618 - protein, 11 aa, Homo sapiens
  misc_feature: Table A; Target 50618; HLA-B*54:01; MYH4; ENSG00000264424; TAA
LPVYNPEVVTA

SEQ ID NO: 50619 - protein, 11 aa, Homo sapiens
  misc_feature: Table A; Target 50619; HLA-B*55:01; MYH4; ENSG00000264424; TAA
LPVYNPEVVTA

SEQ ID NO: 50620 - protein, 11 aa, Homo sapiens
  misc_feature: Table A; Target 50620; HLA-B*56:01; MYH4; ENSG00000264424; TAA
LPVYNPEVVTA

SEQ ID NO: 50621 - protein, 8 aa, Homo sapiens
  misc_feature: Table A; Target 50621; HLA-C*05:01; MYH4; ENSG00000264424; TAA
LQDLVDKL

SEQ ID NO: 50622 - protein, 9 aa, Homo sapiens
  misc_feature: Table A; Target 50622; HLA-B*13:02; MYH4; ENSG00000264424; TAA
LQEAHQQTL

SEQ ID NO: 50623 - protein, 9 aa, Homo sapiens
  misc_feature: Table A; Target 50623; HLA-B*15:01; MYH4; ENSG00000264424; TAA
LQEAHQQTL

SEQ ID NO: 50624 - protein, 9 aa, Homo sapiens
  misc_feature: Table A; Target 50624; HLA-B*15:03; MYH4; ENSG00000264424; TAA
LQEAHQQTL

SEQ ID NO: 50625 - protein, 9 aa, Homo sapiens
  misc_feature: Table A; Target 50625; HLA-B*27:05; MYH4; ENSG00000264424; TAA
LQEAHQQTL

SEQ ID NO: 50626 - protein, 9 aa, Homo sapiens
  misc_feature: Table A; Target 50626; HLA-B*38:01; MYH4; ENSG00000264424; TAA
LQEAHQQTL

SEQ ID NO: 50627 - protein, 9 aa, Homo sapiens
  misc_feature: Table A; Target 50627; HLA-B*39:01; MYH4; ENSG00000264424; TAA
LQEAHQQTL

SEQ ID NO: 50628 - protein, 9 aa, Homo sapiens
  misc_feature: Table A; Target 50628; HLA-B*40:01; MYH4; ENSG00000264424; TAA
LQEAHQQTL

SEQ ID NO: 50629 - protein, 9 aa, Homo sapiens
  misc_feature: Table A; Target 50629; HLA-C*02:02; MYH4; ENSG00000264424; TAA
LQEAHQQTL

SEQ ID NO: 50630 - protein, 9 aa, Homo sapiens
  misc_feature: Table A; Target 50630; HLA-C*03:03; MYH4; ENSG00000264424; TAA
LQEAHQQTL

SEQ ID NO: 50631 - protein, 9 aa, Homo sapiens
  misc_feature: Table A; Target 50631; HLA-C*03:04; MYH4; ENSG00000264424; TAA
LQEAHQQTL

SEQ ID NO: 50632 - protein, 9 aa, Homo sapiens
  misc_feature: Table A; Target 50632; HLA-C*05:01; MYH4; ENSG00000264424; TAA
LQEAHQQTL

SEQ ID NO: 50633 - protein, 9 aa, Homo sapiens
  misc_feature: Table A; Target 50633; HLA-C*07:04; MYH4; ENSG00000264424; TAA
LQEAHQQTL

SEQ ID NO: 50634 - protein, 9 aa, Homo sapiens
  misc_feature: Table A; Target 50634; HLA-C*16:02; MYH4; ENSG00000264424; TAA
LQEAHQQTL

SEQ ID NO: 50635 - protein, 10 aa, Homo sapiens
  misc_feature: Table A; Target 50635; HLA-A*30:01; MYH4; ENSG00000264424; TAA
LQHEATAAAL

SEQ ID NO: 50636 - protein, 10 aa, Homo sapiens
  misc_feature: Table A; Target 50636; HLA-B*13:02; MYH4; ENSG00000264424; TAA
LQHEATAAAL

SEQ ID NO: 50637 - protein, 10 aa, Homo sapiens
  misc_feature: Table A; Target 50637; HLA-B*15:01; MYH4; ENSG00000264424; TAA
LQHEATAAAL

SEQ ID NO: 50638 - protein, 10 aa, Homo sapiens
  misc_feature: Table A; Target 50638; HLA-B*39:01; MYH4; ENSG00000264424; TAA
LQHEATAAAL

SEQ ID NO: 50639 - protein, 10 aa, Homo sapiens
  misc_feature: Table A; Target 50639; HLA-B*40:01; MYH4; ENSG00000264424; TAA
LQHEATAAAL

SEQ ID NO: 50640 - protein, 10 aa, Homo sapiens
  misc_feature: Table A; Target 50640; HLA-B*40:02; MYH4; ENSG00000264424; TAA
LQHEATAAAL

SEQ ID NO: 50641 - protein, 10 aa, Homo sapiens
  misc_feature: Table A; Target 50641; HLA-B*46:01; MYH4; ENSG00000264424; TAA
LQHEATAAAL

SEQ ID NO: 50642 - protein, 10 aa, Homo sapiens
  misc_feature: Table A; Target 50642; HLA-C*03:03; MYH4; ENSG00000264424; TAA
LQHEATAAAL

SEQ ID NO: 50643 - protein, 10 aa, Homo sapiens
  misc_feature: Table A; Target 50643; HLA-C*03:04; MYH4; ENSG00000264424; TAA
LQHEATAAAL

SEQ ID NO: 50644 - protein, 10 aa, Homo sapiens
  misc_feature: Table A; Target 50644; HLA-C*07:02; MYH4; ENSG00000264424; TAA
LQHEATAAAL

SEQ ID NO: 50645 - protein, 10 aa, Homo sapiens
  misc_feature: Table A; Target 50645; HLA-C*07:04; MYH4; ENSG00000264424; TAA
LQHEATAAAL

SEQ ID NO: 50646 - protein, 11 aa, Homo sapiens
  misc_feature: Table A; Target 50646; HLA-A*31:01; MYH4; ENSG00000264424; TAA
LQHEATAAALR

SEQ ID NO: 50647 - protein, 11 aa, Homo sapiens
  misc_feature: Table A; Target 50647; HLA-B*27:02; MYH4; ENSG00000264424; TAA
LQHEATAAALR

SEQ ID NO: 50648 - protein, 11 aa, Homo sapiens
  misc_feature: Table A; Target 50648; HLA-C*07:06; MYH4; ENSG00000264424; TAA
LQHEATAAALR

SEQ ID NO: 50649 - protein, 11 aa, Homo sapiens
  misc_feature: Table A; Target 50649; HLA-A*02:01; MYH4; ENSG00000264424; TAA
LQMEEDKVNTL

SEQ ID NO: 50650 - protein, 11 aa, Homo sapiens
  misc_feature: Table A; Target 50650; HLA-A*02:03; MYH4; ENSG00000264424; TAA
LQMEEDKVNTL

SEQ ID NO: 50651 - protein, 11 aa, Homo sapiens
  misc_feature: Table A; Target 50651; HLA-A*02:04; MYH4; ENSG00000264424; TAA
LQMEEDKVNTL

SEQ ID NO: 50652 - protein, 11 aa, Homo sapiens
  misc_feature: Table A; Target 50652; HLA-B*15:01; MYH4; ENSG00000264424; TAA
LQMEEDKVNTL

SEQ ID NO: 50653 - protein, 11 aa, Homo sapiens
  misc_feature: Table A; Target 50653; HLA-B*38:01; MYH4; ENSG00000264424; TAA
LQMEEDKVNTL

SEQ ID NO: 50654 - protein, 11 aa, Homo sapiens
  misc_feature: Table A; Target 50654; HLA-B*39:01; MYH4; ENSG00000264424; TAA
LQMEEDKVNTL

SEQ ID NO: 50655 - protein, 10 aa, Homo sapiens
  misc_feature: Table A; Target 50655; HLA-B*13:02; MYH4; ENSG00000264424; TAA
LQNEVEDLMI

SEQ ID NO: 50656 - protein, 10 aa, Homo sapiens
  misc_feature: Table A; Target 50656; HLA-B*38:01; MYH4; ENSG00000264424; TAA
LQNEVEDLMI

SEQ ID NO: 50657 - protein, 8 aa, Homo sapiens
  misc_feature: Table A; Target 50657; HLA-B*08:01; MYH4; ENSG00000264424; TAA
LQRVKQKL

SEQ ID NO: 50658 - protein, 8 aa, Homo sapiens
  misc_feature: Table A; Target 50658; HLA-A*30:02; MYH4; ENSG00000264424; TAA
LQTKVKAY

SEQ ID NO: 50659 - protein, 8 aa, Homo sapiens
  misc_feature: Table A; Target 50659; HLA-A*32:01; MYH4; ENSG00000264424; TAA
LQTKVKAY

SEQ ID NO: 50660 - protein, 8 aa, Homo sapiens
  misc_feature: Table A; Target 50660; HLA-B*15:01; MYH4; ENSG00000264424; TAA
LQTKVKAY

SEQ ID NO: 50661 - protein, 8 aa, Homo sapiens
  misc_feature: Table A; Target 50661; HLA-B*15:03; MYH4; ENSG00000264424; TAA
LQTKVKAY

SEQ ID NO: 50662 - protein, 8 aa, Homo sapiens
  misc_feature: Table A; Target 50662; HLA-B*18:01; MYH4; ENSG00000264424; TAA
LQTKVKAY

SEQ ID NO: 50663 - protein, 8 aa, Homo sapiens
  misc_feature: Table A; Target 50663; HLA-B*37:01; MYH4; ENSG00000264424; TAA
LQTKVKAY

SEQ ID NO: 50664 - protein, 8 aa, Homo sapiens
  misc_feature: Table A; Target 50664; HLA-B*44:03; MYH4; ENSG00000264424; TAA
LQTKVKAY

SEQ ID NO: 50665 - protein, 8 aa, Homo sapiens
  misc_feature: Table A; Target 50665; HLA-B*46:01; MYH4; ENSG00000264424; TAA
LQTKVKAY

SEQ ID NO: 50666 - protein, 8 aa, Homo sapiens
  misc_feature: Table A; Target 50666; HLA-B*58:01; MYH4; ENSG00000264424; TAA
LQTKVKAY

SEQ ID NO: 50667 - protein, 8 aa, Homo sapiens
  misc_feature: Table A; Target 50667; HLA-C*07:01; MYH4; ENSG00000264424; TAA
LQTKVKAY

SEQ ID NO: 50668 - protein, 8 aa, Homo sapiens
  misc_feature: Table A; Target 50668; HLA-C*07:04; MYH4; ENSG00000264424; TAA
LQTKVKAY

SEQ ID NO: 50669 - protein, 8 aa, Homo sapiens
  misc_feature: Table A; Target 50669; HLA-C*12:03; MYH4; ENSG00000264424; TAA
LQTKVKAY

SEQ ID NO: 50670 - protein, 8 aa, Homo sapiens
  misc_feature: Table A; Target 50670; HLA-C*16:01; MYH4; ENSG00000264424; TAA
LQTKVKAY

SEQ ID NO: 50671 - protein, 8 aa, Homo sapiens
  misc_feature: Table A; Target 50671; HLA-C*16:02; MYH4; ENSG00000264424; TAA
LQTKVKAY

SEQ ID NO: 50672 - protein, 8 aa, Homo sapiens
  misc_feature: Table A; Target 50672; HLA-C*16:04; MYH4; ENSG00000264424; TAA
LQTKVKAY

SEQ ID NO: 50673 - protein, 10 aa, Homo sapiens
  misc_feature: Table A; Target 50673; HLA-B*27:05; MYH4; ENSG00000264424; TAA
LQVQAEADAL

SEQ ID NO: 50674 - protein, 10 aa, Homo sapiens
  misc_feature: Table A; Target 50674; HLA-B*38:01; MYH4; ENSG00000264424; TAA
LQVQAEADAL

SEQ ID NO: 50675 - protein, 10 aa, Homo sapiens
  misc_feature: Table A; Target 50675; HLA-B*39:01; MYH4; ENSG00000264424; TAA
LQVQAEADAL

SEQ ID NO: 50676 - protein, 9 aa, Homo sapiens
  misc_feature: Table A; Target 50676; HLA-B*27:02; MYH4; ENSG00000264424; TAA
LRLDEAEQL

SEQ ID NO: 50677 - protein, 9 aa, Homo sapiens
  misc_feature: Table A; Target 50677; HLA-B*27:05; MYH4; ENSG00000264424; TAA
LRLDEAEQL

SEQ ID NO: 50678 - protein, 9 aa, Homo sapiens
  misc_feature: Table A; Target 50678; HLA-B*38:01; MYH4; ENSG00000264424; TAA
LRLDEAEQL

SEQ ID NO: 50679 - protein, 9 aa, Homo sapiens
  misc_feature: Table A; Target 50679; HLA-B*39:01; MYH4; ENSG00000264424; TAA
LRLDEAEQL

SEQ ID NO: 50680 - protein, 9 aa, Homo sapiens
  misc_feature: Table A; Target 50680; HLA-B*27:05; MYH4; ENSG00000264424; TAA
LRNTQGILK

SEQ ID NO: 50681 - protein, 8 aa, Homo sapiens
  misc_feature: Table A; Target 50681; HLA-B*08:01; MYH4; ENSG00000264424; TAA
LSAQKARL

SEQ ID NO: 50682 - protein, 8 aa, Homo sapiens
  misc_feature: Table A; Target 50682; HLA-C*16:01; MYH4; ENSG00000264424; TAA
LSNKKPEL

SEQ ID NO: 50683 - protein, 11 aa, Homo sapiens
  misc_feature: Table A; Target 50683; HLA-A*33:01; MYH4; ENSG00000264424; TAA
LSRELEEISER

SEQ ID NO: 50684 - protein, 8 aa, Homo sapiens
  misc_feature: Table A; Target 50684; HLA-B*08:01; MYH4; ENSG00000264424; TAA
LSRGKQAF

SEQ ID NO: 50685 - protein, 9 aa, Homo sapiens
  misc_feature: Table A; Target 50685; HLA-A*11:01; MYH4; ENSG00000264424; TAA
LSTELFKVK

SEQ ID NO: 50686 - protein, 9 aa, Homo sapiens
  misc_feature: Table A; Target 50686; HLA-B*57:01; MYH4; ENSG00000264424; TAA
LSTELFKVK

SEQ ID NO: 50687 - protein, 9 aa, Homo sapiens
  misc_feature: Table A; Target 50687; HLA-C*16:01; MYH4; ENSG00000264424; TAA
LSTELFKVK

SEQ ID NO: 50688 - protein, 9 aa, Homo sapiens
  misc_feature: Table A; Target 50688; HLA-C*05:01; MYH4; ENSG00000264424; TAA
LTDRENQSI

SEQ ID NO: 50689 - protein, 11 aa, Homo sapiens
  misc_feature: Table A; Target 50689; HLA-A*01:01; MYH4; ENSG00000264424; TAA
LTDRENQSILI

SEQ ID NO: 50690 - protein, 8 aa, Homo sapiens
  misc_feature: Table A; Target 50690; HLA-C*05:01; MYH4; ENSG00000264424; TAA
LTEEMAGL

SEQ ID NO: 50691 - protein, 10 aa, Homo sapiens
  misc_feature: Table A; Target 50691; HLA-B*27:02; MYH4; ENSG00000264424; TAA
LTEQIAEGGK

SEQ ID NO: 50692 - protein, 8 aa, Homo sapiens
  misc_feature: Table A; Target 50692; HLA-A*01:01; MYH4; ENSG00000264424; TAA
LTGAVMHY

SEQ ID NO: 50693 - protein, 8 aa, Homo sapiens
  misc_feature: Table A; Target 50693; HLA-A*29:02; MYH4; ENSG00000264424; TAA
LTGAVMHY

SEQ ID NO: 50694 - protein, 8 aa, Homo sapiens
  misc_feature: Table A; Target 50694; HLA-A*30:02; MYH4; ENSG00000264424; TAA
LTGAVMHY

SEQ ID NO: 50695 - protein, 8 aa, Homo sapiens
  misc_feature: Table A; Target 50695; HLA-A*32:01; MYH4; ENSG00000264424; TAA
LTGAVMHY

SEQ ID NO: 50696 - protein, 8 aa, Homo sapiens
  misc_feature: Table A; Target 50696; HLA-B*15:01; MYH4; ENSG00000264424; TAA
LTGAVMHY

SEQ ID NO: 50697 - protein, 8 aa, Homo sapiens
  misc_feature: Table A; Target 50697; HLA-B*46:01; MYH4; ENSG00000264424; TAA
LTGAVMHY

SEQ ID NO: 50698 - protein, 8 aa, Homo sapiens
  misc_feature: Table A; Target 50698; HLA-B*57:01; MYH4; ENSG00000264424; TAA
LTGAVMHY

SEQ ID NO: 50699 - protein, 8 aa, Homo sapiens
  misc_feature: Table A; Target 50699; HLA-B*58:01; MYH4; ENSG00000264424; TAA
LTGAVMHY

SEQ ID NO: 50700 - protein, 8 aa, Homo sapiens
  misc_feature: Table A; Target 50700; HLA-C*01:02; MYH4; ENSG00000264424; TAA
LTGAVMHY

SEQ ID NO: 50701 - protein, 8 aa, Homo sapiens
  misc_feature: Table A; Target 50701; HLA-C*04:01; MYH4; ENSG00000264424; TAA
LTGAVMHY

SEQ ID NO: 50702 - protein, 8 aa, Homo sapiens
  misc_feature: Table A; Target 50702; HLA-C*06:02; MYH4; ENSG00000264424; TAA
LTGAVMHY

SEQ ID NO: 50703 - protein, 8 aa, Homo sapiens
  misc_feature: Table A; Target 50703; HLA-C*07:01; MYH4; ENSG00000264424; TAA
LTGAVMHY

SEQ ID NO: 50704 - protein, 8 aa, Homo sapiens
  misc_feature: Table A; Target 50704; HLA-C*07:04; MYH4; ENSG00000264424; TAA
LTGAVMHY

SEQ ID NO: 50705 - protein, 8 aa, Homo sapiens
  misc_feature: Table A; Target 50705; HLA-C*12:03; MYH4; ENSG00000264424; TAA
LTGAVMHY

SEQ ID NO: 50706 - protein, 8 aa, Homo sapiens
  misc_feature: Table A; Target 50706; HLA-C*16:01; MYH4; ENSG00000264424; TAA
LTGAVMHY

SEQ ID NO: 50707 - protein, 8 aa, Homo sapiens
  misc_feature: Table A; Target 50707; HLA-C*16:02; MYH4; ENSG00000264424; TAA
LTGAVMHY

SEQ ID NO: 50708 - protein, 8 aa, Homo sapiens
  misc_feature: Table A; Target 50708; HLA-B*08:01; MYH4; ENSG00000264424; TAA
LTKAKTKL

SEQ ID NO: 50709 - protein, 8 aa, Homo sapiens
  misc_feature: Table A; Target 50709; HLA-B*08:01; MYH4; ENSG00000264424; TAA
LTKEKKAL

SEQ ID NO: 50710 - protein, 11 aa, Homo sapiens
  misc_feature: Table A; Target 50710; HLA-A*01:01; MYH4; ENSG00000264424; TAA
LTSLNSADLLK

SEQ ID NO: 50711 - protein, 11 aa, Homo sapiens
  misc_feature: Table A; Target 50711; HLA-A*03:02; MYH4; ENSG00000264424; TAA
LTSLNSADLLK

SEQ ID NO: 50712 - protein, 11 aa, Homo sapiens
  misc_feature: Table A; Target 50712; HLA-A*11:01; MYH4; ENSG00000264424; TAA
LTSLNSADLLK

SEQ ID NO: 50713 - protein, 11 aa, Homo sapiens
  misc_feature: Table A; Target 50713; HLA-B*27:02; MYH4; ENSG00000264424; TAA
LTSLNSADLLK

SEQ ID NO: 50714 - protein, 8 aa, Homo sapiens
  misc_feature: Table A; Target 50714; HLA-A*03:02; MYH4; ENSG00000264424; TAA
LVDKLQTK

SEQ ID NO: 50715 - protein, 8 aa, Homo sapiens
  misc_feature: Table A; Target 50715; HLA-C*05:01; MYH4; ENSG00000264424; TAA
LVDKLQTK

SEQ ID NO: 50716 - protein, 9 aa, Homo sapiens
  misc_feature: Table A; Target 50716; HLA-A*01:01; MYH4; ENSG00000264424; TAA
LVDKLQTKV

SEQ ID NO: 50717 - protein, 9 aa, Homo sapiens
  misc_feature: Table A; Target 50717; HLA-A*02:01; MYH4; ENSG00000264424; TAA
LVDKLQTKV

SEQ ID NO: 50718 - protein, 9 aa, Homo sapiens
  misc_feature: Table A; Target 50718; HLA-A*02:07; MYH4; ENSG00000264424; TAA
LVDKLQTKV

SEQ ID NO: 50719 - protein, 9 aa, Homo sapiens
  misc_feature: Table A; Target 50719; HLA-A*68:02; MYH4; ENSG00000264424; TAA
LVDKLQTKV

SEQ ID NO: 50720 - protein, 9 aa, Homo sapiens
  misc_feature: Table A; Target 50720; HLA-C*05:01; MYH4; ENSG00000264424; TAA
LVDKLQTKV

SEQ ID NO: 50721 - protein, 10 aa, Homo sapiens
  misc_feature: Table A; Target 50721; HLA-A*03:02; MYH4; ENSG00000264424; TAA
LVDKLQTKVK

SEQ ID NO: 50722 - protein, 10 aa, Homo sapiens
  misc_feature: Table A; Target 50722; HLA-A*01:01; MYH4; ENSG00000264424; TAA
LVHYAGTVDY

SEQ ID NO: 50723 - protein, 10 aa, Homo sapiens
  misc_feature: Table A; Target 50723; HLA-A*29:02; MYH4; ENSG00000264424; TAA
LVHYAGTVDY

SEQ ID NO: 50724 - protein, 10 aa, Homo sapiens
  misc_feature: Table A; Target 50724; HLA-A*30:02; MYH4; ENSG00000264424; TAA
LVHYAGTVDY

SEQ ID NO: 50725 - protein, 10 aa, Homo sapiens
  misc_feature: Table A; Target 50725; HLA-B*15:01; MYH4; ENSG00000264424; TAA
LVHYAGTVDY

SEQ ID NO: 50726 - protein, 10 aa, Homo sapiens
  misc_feature: Table A; Target 50726; HLA-B*46:01; MYH4; ENSG00000264424; TAA
LVHYAGTVDY

SEQ ID NO: 50727 - protein, 10 aa, Homo sapiens
  misc_feature: Table A; Target 50727; HLA-C*04:01; MYH4; ENSG00000264424; TAA
LVHYAGTVDY

SEQ ID NO: 50728 - protein, 9 aa, Homo sapiens
  misc_feature: Table A; Target 50728; HLA-A*24:02; MYH4; ENSG00000264424; TAA
LYADFKQRY

SEQ ID NO: 50729 - protein, 9 aa, Homo sapiens
  misc_feature: Table A; Target 50729; HLA-A*29:02; MYH4; ENSG00000264424; TAA
LYADFKQRY

SEQ ID NO: 50730 - protein, 9 aa, Homo sapiens
  misc_feature: Table A; Target 50730; HLA-A*24:02; MYH4; ENSG00000264424; TAA
LYFKIKPLL

SEQ ID NO: 50731 - protein, 10 aa, Homo sapiens
  misc_feature: Table A; Target 50731; HLA-A*24:02; MYH4; ENSG00000264424; TAA
LYFKIKPLLK

SEQ ID NO: 50732 - protein, 10 aa, Homo sapiens
  misc_feature: Table A; Target 50732; HLA-A*24:02; MYH4; ENSG00000264424; TAA
LYQKSAMKTL

SEQ ID NO: 50733 - protein, 8 aa, Homo sapiens
  misc_feature: Table A; Target 50733; HLA-B*35:03; MYH4; ENSG00000264424; TAA
MAGLDETI

SEQ ID NO: 50734 - protein, 8 aa, Homo sapiens
  misc_feature: Table A; Target 50734; HLA-C*07:01; MYH4; ENSG00000264424; TAA
MAGLDETI

SEQ ID NO: 50735 - protein, 8 aa, Homo sapiens
  misc_feature: Table A; Target 50735; HLA-C*07:04; MYH4; ENSG00000264424; TAA
MAGLDETI

SEQ ID NO: 50736 - protein, 10 aa, Homo sapiens
  misc_feature: Table A; Target 50736; HLA-B*27:02; MYH4; ENSG00000264424; TAA
MAGLDETIAK

SEQ ID NO: 50737 - protein, 8 aa, Homo sapiens
  misc_feature: Table A; Target 50737; HLA-B*54:01; MYH4; ENSG00000264424; TAA
MAIFGEAA

SEQ ID NO: 50738 - protein, 8 aa, Homo sapiens
  misc_feature: Table A; Target 50738; HLA-C*03:04; MYH4; ENSG00000264424; TAA
MAIFGEAA

SEQ ID NO: 50739 - protein, 10 aa, Homo sapiens
  misc_feature: Table A; Target 50739; HLA-B*35:01; MYH4; ENSG00000264424; TAA
MAIFGEAAPF

SEQ ID NO: 50740 - protein, 10 aa, Homo sapiens
  misc_feature: Table A; Target 50740; HLA-B*35:03; MYH4; ENSG00000264424; TAA
MAIFGEAAPF

SEQ ID NO: 50741 - protein, 10 aa, Homo sapiens
  misc_feature: Table A; Target 50741; HLA-B*46:01; MYH4; ENSG00000264424; TAA
MAIFGEAAPF

SEQ ID NO: 50742 - protein, 10 aa, Homo sapiens
  misc_feature: Table A; Target 50742; HLA-C*02:02; MYH4; ENSG00000264424; TAA
MAIFGEAAPF

SEQ ID NO: 50743 - protein, 10 aa, Homo sapiens
  misc_feature: Table A; Target 50743; HLA-C*03:04; MYH4; ENSG00000264424; TAA
MAIFGEAAPF

SEQ ID NO: 50744 - protein, 8 aa, Homo sapiens
  misc_feature: Table A; Target 50744; HLA-B*08:01; MYH4; ENSG00000264424; TAA
MANMKEEF

SEQ ID NO: 50745 - protein, 8 aa, Homo sapiens
  misc_feature: Table A; Target 50745; HLA-B*46:01; MYH4; ENSG00000264424; TAA
MANMKEEF

SEQ ID NO: 50746 - protein, 8 aa, Homo sapiens
  misc_feature: Table A; Target 50746; HLA-C*16:01; MYH4; ENSG00000264424; TAA
MANMKEEF

SEQ ID NO: 50747 - protein, 10 aa, Homo sapiens
  misc_feature: Table A; Target 50747; HLA-B*27:02; MYH4; ENSG00000264424; TAA
MANMKEEFEK

SEQ ID NO: 50748 - protein, 9 aa, Homo sapiens
  misc_feature: Table A; Target 50748; HLA-B*35:03; MYH4; ENSG00000264424; TAA
MATDSAVDI

SEQ ID NO: 50749 - protein, 9 aa, Homo sapiens
  misc_feature: Table A; Target 50749; HLA-B*38:01; MYH4; ENSG00000264424; TAA
MATDSAVDI

SEQ ID NO: 50750 - protein, 9 aa, Homo sapiens
  misc_feature: Table A; Target 50750; HLA-B*39:01; MYH4; ENSG00000264424; TAA
MATDSAVDI

SEQ ID NO: 50751 - protein, 9 aa, Homo sapiens
  misc_feature: Table A; Target 50751; HLA-B*51:01; MYH4; ENSG00000264424; TAA
MATDSAVDI

SEQ ID NO: 50752 - protein, 9 aa, Homo sapiens
  misc_feature: Table A; Target 50752; HLA-C*02:02; MYH4; ENSG00000264424; TAA
MATDSAVDI

SEQ ID NO: 50753 - protein, 9 aa, Homo sapiens
  misc_feature: Table A; Target 50753; HLA-C*03:03; MYH4; ENSG00000264424; TAA
MATDSAVDI

SEQ ID NO: 50754 - protein, 9 aa, Homo sapiens
  misc_feature: Table A; Target 50754; HLA-C*03:04; MYH4; ENSG00000264424; TAA
MATDSAVDI

SEQ ID NO: 50755 - protein, 9 aa, Homo sapiens
  misc_feature: Table A; Target 50755; HLA-C*04:01; MYH4; ENSG00000264424; TAA
MATDSAVDI

SEQ ID NO: 50756 - protein, 9 aa, Homo sapiens
  misc_feature: Table A; Target 50756; HLA-C*05:01; MYH4; ENSG00000264424; TAA
MATDSAVDI

SEQ ID NO: 50757 - protein, 9 aa, Homo sapiens
  misc_feature: Table A; Target 50757; HLA-C*07:04; MYH4; ENSG00000264424; TAA
MATDSAVDI

SEQ ID NO: 50758 - protein, 9 aa, Homo sapiens
  misc_feature: Table A; Target 50758; HLA-C*12:03; MYH4; ENSG00000264424; TAA
MATDSAVDI

SEQ ID NO: 50759 - protein, 9 aa, Homo sapiens
  misc_feature: Table A; Target 50759; HLA-C*16:02; MYH4; ENSG00000264424; TAA
MATDSAVDI

SEQ ID NO: 50760 - protein, 10 aa, Homo sapiens
  misc_feature: Table A; Target 50760; HLA-B*35:03; MYH4; ENSG00000264424; TAA
MATDSAVDIL

SEQ ID NO: 50761 - protein, 10 aa, Homo sapiens
  misc_feature: Table A; Target 50761; HLA-C*07:06; MYH4; ENSG00000264424; TAA
MATDSAVDIL

SEQ ID NO: 50762 - protein, 10 aa, Homo sapiens
  misc_feature: Table A; Target 50762; HLA-A*30:01; MYH4; ENSG00000264424; TAA
MDTENDKQQL

SEQ ID NO: 50763 - protein, 10 aa, Homo sapiens
  misc_feature: Table A; Target 50763; HLA-B*40:01; MYH4; ENSG00000264424; TAA
MDTENDKQQL

SEQ ID NO: 50764 - protein, 10 aa, Homo sapiens
  misc_feature: Table A; Target 50764; HLA-C*16:02; MYH4; ENSG00000264424; TAA
MDTENDKQQL

SEQ ID NO: 50765 - protein, 8 aa, Homo sapiens
  misc_feature: Table A; Target 50765; HLA-B*18:01; MYH4; ENSG00000264424; TAA
MEDIVQEA

SEQ ID NO: 50766 - protein, 8 aa, Homo sapiens
  misc_feature: Table A; Target 50766; HLA-B*49:01; MYH4; ENSG00000264424; TAA
MEDIVQEA

SEQ ID NO: 50767 - protein, 9 aa, Homo sapiens
  misc_feature: Table A; Target 50767; HLA-B*18:01; MYH4; ENSG00000264424; TAA
MEDIVQEAR

SEQ ID NO: 50768 - protein, 9 aa, Homo sapiens
  misc_feature: Table A; Target 50768; HLA-A*30:01; MYH4; ENSG00000264424; TAA
MEEDKVNTL

SEQ ID NO: 50769 - protein, 9 aa, Homo sapiens
  misc_feature: Table A; Target 50769; HLA-B*18:01; MYH4; ENSG00000264424; TAA
MEEDKVNTL

SEQ ID NO: 50770 - protein, 9 aa, Homo sapiens
  misc_feature: Table A; Target 50770; HLA-B*37:01; MYH4; ENSG00000264424; TAA
MEEDKVNTL

SEQ ID NO: 50771 - protein, 9 aa, Homo sapiens
  misc_feature: Table A; Target 50771; HLA-B*38:01; MYH4; ENSG00000264424; TAA
MEEDKVNTL

SEQ ID NO: 50772 - protein, 9 aa, Homo sapiens
  misc_feature: Table A; Target 50772; HLA-B*39:01; MYH4; ENSG00000264424; TAA
MEEDKVNTL

SEQ ID NO: 50773 - protein, 9 aa, Homo sapiens
  misc_feature: Table A; Target 50773; HLA-B*40:01; MYH4; ENSG00000264424; TAA
MEEDKVNTL

SEQ ID NO: 50774 - protein, 9 aa, Homo sapiens
  misc_feature: Table A; Target 50774; HLA-B*40:02; MYH4; ENSG00000264424; TAA
MEEDKVNTL

SEQ ID NO: 50775 - protein, 9 aa, Homo sapiens
  misc_feature: Table A; Target 50775; HLA-B*44:02; MYH4; ENSG00000264424; TAA
MEEDKVNTL

SEQ ID NO: 50776 - protein, 9 aa, Homo sapiens
  misc_feature: Table A; Target 50776; HLA-B*44:03; MYH4; ENSG00000264424; TAA
MEEDKVNTL

SEQ ID NO: 50777 - protein, 9 aa, Homo sapiens
  misc_feature: Table A; Target 50777; HLA-B*49:01; MYH4; ENSG00000264424; TAA
MEEDKVNTL

SEQ ID NO: 50778 - protein, 9 aa, Homo sapiens
  misc_feature: Table A; Target 50778; HLA-C*05:01; MYH4; ENSG00000264424; TAA
MEEDKVNTL

SEQ ID NO: 50779 - protein, 9 aa, Homo sapiens
  misc_feature: Table A; Target 50779; HLA-C*07:04; MYH4; ENSG00000264424; TAA
MEEDKVNTL

SEQ ID NO: 50780 - protein, 9 aa, Homo sapiens
  misc_feature: Table A; Target 50780; HLA-C*16:04; MYH4; ENSG00000264424; TAA
MEEDKVNTL

SEQ ID NO: 50781 - protein, 8 aa, Homo sapiens
  misc_feature: Table A; Target 50781; HLA-B*18:01; MYH4; ENSG00000264424; TAA
MEGDLNEM

SEQ ID NO: 50782 - protein, 10 aa, Homo sapiens
  misc_feature: Table A; Target 50782; HLA-A*30:01; MYH4; ENSG00000264424; TAA
MEGDLNEMEI

SEQ ID NO: 50783 - protein, 10 aa, Homo sapiens
  misc_feature: Table A; Target 50783; HLA-B*40:02; MYH4; ENSG00000264424; TAA
MEGDLNEMEI

SEQ ID NO: 50784 - protein, 10 aa, Homo sapiens
  misc_feature: Table A; Target 50784; HLA-B*44:03; MYH4; ENSG00000264424; TAA
MEGDLNEMEI

SEQ ID NO: 50785 - protein, 10 aa, Homo sapiens
  misc_feature: Table A; Target 50785; HLA-B*49:01; MYH4; ENSG00000264424; TAA
MEGDLNEMEI

SEQ ID NO: 50786 - protein, 10 aa, Homo sapiens
  misc_feature: Table A; Target 50786; HLA-C*07:01; MYH4; ENSG00000264424; TAA
MEGDLNEMEI

SEQ ID NO: 50787 - protein, 8 aa, Homo sapiens
  misc_feature: Table A; Target 50787; HLA-B*18:01; MYH4; ENSG00000264424; TAA
MEHELVLH

SEQ ID NO: 50788 - protein, 10 aa, Homo sapiens
  misc_feature: Table A; Target 50788; HLA-A*30:01; MYH4; ENSG00000264424; TAA
MEHELVLHQL

SEQ ID NO: 50789 - protein, 10 aa, Homo sapiens
  misc_feature: Table A; Target 50789; HLA-B*18:01; MYH4; ENSG00000264424; TAA
MEHELVLHQL

SEQ ID NO: 50790 - protein, 10 aa, Homo sapiens
  misc_feature: Table A; Target 50790; HLA-B*40:01; MYH4; ENSG00000264424; TAA
MEHELVLHQL

SEQ ID NO: 50791 - protein, 10 aa, Homo sapiens
  misc_feature: Table A; Target 50791; HLA-B*40:02; MYH4; ENSG00000264424; TAA
MEHELVLHQL

SEQ ID NO: 50792 - protein, 10 aa, Homo sapiens
  misc_feature: Table A; Target 50792; HLA-B*44:02; MYH4; ENSG00000264424; TAA
MEHELVLHQL

SEQ ID NO: 50793 - protein, 10 aa, Homo sapiens
  misc_feature: Table A; Target 50793; HLA-B*44:03; MYH4; ENSG00000264424; TAA
MEHELVLHQL

SEQ ID NO: 50794 - protein, 9 aa, Homo sapiens
  misc_feature: Table A; Target 50794; HLA-B*49:01; MYH4; ENSG00000264424; TAA
MEINDLASN

SEQ ID NO: 50795 - protein, 10 aa, Homo sapiens
  misc_feature: Table A; Target 50795; HLA-A*30:01; MYH4; ENSG00000264424; TAA
MEINDLASNM

SEQ ID NO: 50796 - protein, 10 aa, Homo sapiens
  misc_feature: Table A; Target 50796; HLA-B*27:02; MYH4; ENSG00000264424; TAA
MEINDLASNM

SEQ ID NO: 50797 - protein, 10 aa, Homo sapiens
  misc_feature: Table A; Target 50797; HLA-B*38:01; MYH4; ENSG00000264424; TAA
MEINDLASNM

SEQ ID NO: 50798 - protein, 10 aa, Homo sapiens
  misc_feature: Table A; Target 50798; HLA-B*40:01; MYH4; ENSG00000264424; TAA
MEINDLASNM

SEQ ID NO: 50799 - protein, 10 aa, Homo sapiens
  misc_feature: Table A; Target 50799; HLA-B*40:02; MYH4; ENSG00000264424; TAA
MEINDLASNM

SEQ ID NO: 50800 - protein, 10 aa, Homo sapiens
  misc_feature: Table A; Target 50800; HLA-B*44:02; MYH4; ENSG00000264424; TAA
MEINDLASNM

SEQ ID NO: 50801 - protein, 10 aa, Homo sapiens
  misc_feature: Table A; Target 50801; HLA-B*44:03; MYH4; ENSG00000264424; TAA
MEINDLASNM

SEQ ID NO: 50802 - protein, 10 aa, Homo sapiens
  misc_feature: Table A; Target 50802; HLA-B*49:01; MYH4; ENSG00000264424; TAA
MEINDLASNM

SEQ ID NO: 50803 - protein, 8 aa, Homo sapiens
  misc_feature: Table A; Target 50803; HLA-B*18:01; MYH4; ENSG00000264424; TAA
MEIQLNHA

SEQ ID NO: 50804 - protein, 8 aa, Homo sapiens
  misc_feature: Table A; Target 50804; HLA-B*40:02; MYH4; ENSG00000264424; TAA
MEIQLNHA

SEQ ID NO: 50805 - protein, 8 aa, Homo sapiens
  misc_feature: Table A; Target 50805; HLA-B*49:01; MYH4; ENSG00000264424; TAA
MEIQLNHA

SEQ ID NO: 50806 - protein, 9 aa, Homo sapiens
  misc_feature: Table A; Target 50806; HLA-B*18:01; MYH4; ENSG00000264424; TAA
MEIQLNHAN

SEQ ID NO: 50807 - protein, 10 aa, Homo sapiens
  misc_feature: Table A; Target 50807; HLA-A*33:03; MYH4; ENSG00000264424; TAA
MEIQLNHANR

SEQ ID NO: 50808 - protein, 10 aa, Homo sapiens
  misc_feature: Table A; Target 50808; HLA-B*44:02; MYH4; ENSG00000264424; TAA
MEIQLNHANR

SEQ ID NO: 50809 - protein, 8 aa, Homo sapiens
  misc_feature: Table A; Target 50809; HLA-A*30:01; MYH4; ENSG00000264424; TAA
MEQTVKDL

SEQ ID NO: 50810 - protein, 8 aa, Homo sapiens
  misc_feature: Table A; Target 50810; HLA-B*18:01; MYH4; ENSG00000264424; TAA
MEQTVKDL

SEQ ID NO: 50811 - protein, 8 aa, Homo sapiens
  misc_feature: Table A; Target 50811; HLA-B*37:01; MYH4; ENSG00000264424; TAA
MEQTVKDL

SEQ ID NO: 50812 - protein, 8 aa, Homo sapiens
  misc_feature: Table A; Target 50812; HLA-B*40:02; MYH4; ENSG00000264424; TAA
MEQTVKDL

SEQ ID NO: 50813 - protein, 8 aa, Homo sapiens
  misc_feature: Table A; Target 50813; HLA-B*44:02; MYH4; ENSG00000264424; TAA
MEQTVKDL

SEQ ID NO: 50814 - protein, 10 aa, Homo sapiens
  misc_feature: Table A; Target 50814; HLA-A*30:01; MYH4; ENSG00000264424; TAA
MEQTVKDLQL

SEQ ID NO: 50815 - protein, 10 aa, Homo sapiens
  misc_feature: Table A; Target 50815; HLA-B*40:01; MYH4; ENSG00000264424; TAA
MEQTVKDLQL

SEQ ID NO: 50816 - protein, 10 aa, Homo sapiens
  misc_feature: Table A; Target 50816; HLA-B*40:02; MYH4; ENSG00000264424; TAA
MEQTVKDLQL

SEQ ID NO: 50817 - protein, 10 aa, Homo sapiens
  misc_feature: Table A; Target 50817; HLA-B*44:02; MYH4; ENSG00000264424; TAA
MEQTVKDLQL

SEQ ID NO: 50818 - protein, 10 aa, Homo sapiens
  misc_feature: Table A; Target 50818; HLA-B*44:03; MYH4; ENSG00000264424; TAA
MEQTVKDLQL

SEQ ID NO: 50819 - protein, 8 aa, Homo sapiens
  misc_feature: Table A; Target 50819; HLA-B*18:01; MYH4; ENSG00000264424; TAA
METVSKAK

SEQ ID NO: 50820 - protein, 9 aa, Homo sapiens
  misc_feature: Table A; Target 50820; HLA-B*40:02; MYH4; ENSG00000264424; TAA
METVSKAKA

SEQ ID NO: 50821 - protein, 11 aa, Homo sapiens
  misc_feature: Table A; Target 50821; HLA-B*44:03; MYH4; ENSG00000264424; TAA
METVSKAKANF

SEQ ID NO: 50822 - protein, 10 aa, Homo sapiens
  misc_feature: Table A; Target 50822; HLA-A*23:01; MYH4; ENSG00000264424; TAA
MFPKATDTSF

SEQ ID NO: 50823 - protein, 10 aa, Homo sapiens
  misc_feature: Table A; Target 50823; HLA-A*24:02; MYH4; ENSG00000264424; TAA
MFPKATDTSF

SEQ ID NO: 50824 - protein, 10 aa, Homo sapiens
  misc_feature: Table A; Target 50824; HLA-C*14:02; MYH4; ENSG00000264424; TAA
MFPKATDTSF

SEQ ID NO: 50825 - protein, 9 aa, Homo sapiens
  misc_feature: Table A; Target 50825; HLA-A*29:02; MYH4; ENSG00000264424; TAA
MFVLEQEEY

SEQ ID NO: 50826 - protein, 9 aa, Homo sapiens
  misc_feature: Table A; Target 50826; HLA-B*15:01; MYH4; ENSG00000264424; TAA
MFVLEQEEY

SEQ ID NO: 50827 - protein, 9 aa, Homo sapiens
  misc_feature: Table A; Target 50827; HLA-B*15:03; MYH4; ENSG00000264424; TAA
MFVLEQEEY

SEQ ID NO: 50828 - protein, 9 aa, Homo sapiens
  misc_feature: Table A; Target 50828; HLA-B*18:01; MYH4; ENSG00000264424; TAA
MFVLEQEEY

SEQ ID NO: 50829 - protein, 9 aa, Homo sapiens
  misc_feature: Table A; Target 50829; HLA-B*35:01; MYH4; ENSG00000264424; TAA
MFVLEQEEY

SEQ ID NO: 50830 - protein, 9 aa, Homo sapiens
  misc_feature: Table A; Target 50830; HLA-B*46:01; MYH4; ENSG00000264424; TAA
MFVLEQEEY

SEQ ID NO: 50831 - protein, 9 aa, Homo sapiens
  misc_feature: Table A; Target 50831; HLA-B*55:01; MYH4; ENSG00000264424; TAA
MFVLEQEEY

SEQ ID NO: 50832 - protein, 9 aa, Homo sapiens
  misc_feature: Table A; Target 50832; HLA-C*04:01; MYH4; ENSG00000264424; TAA
MFVLEQEEY

SEQ ID NO: 50833 - protein, 9 aa, Homo sapiens
  misc_feature: Table A; Target 50833; HLA-C*07:01; MYH4; ENSG00000264424; TAA
MFVLEQEEY

SEQ ID NO: 50834 - protein, 9 aa, Homo sapiens
  misc_feature: Table A; Target 50834; HLA-C*07:04; MYH4; ENSG00000264424; TAA
MFVLEQEEY

SEQ ID NO: 50835 - protein, 9 aa, Homo sapiens
  misc_feature: Table A; Target 50835; HLA-C*14:02; MYH4; ENSG00000264424; TAA
MFVLEQEEY

SEQ ID NO: 50836 - protein, 10 aa, Homo sapiens
  misc_feature: Table A; Target 50836; HLA-B*27:02; MYH4; ENSG00000264424; TAA
MFVLEQEEYK

SEQ ID NO: 50837 - protein, 8 aa, Homo sapiens
  misc_feature: Table A; Target 50837; HLA-C*07:01; MYH4; ENSG00000264424; TAA
MHYGNMKF

SEQ ID NO: 50838 - protein, 9 aa, Homo sapiens
  misc_feature: Table A; Target 50838; HLA-A*29:02; MYH4; ENSG00000264424; TAA
MIYTYSGLF

SEQ ID NO: 50839 - protein, 9 aa, Homo sapiens
  misc_feature: Table A; Target 50839; HLA-C*02:02; MYH4; ENSG00000264424; TAA
MIYTYSGLF

SEQ ID NO: 50840 - protein, 9 aa, Homo sapiens
  misc_feature: Table A; Target 50840; HLA-A*01:01; MYH4; ENSG00000264424; TAA
MLLITTNPY

SEQ ID NO: 50841 - protein, 9 aa, Homo sapiens
  misc_feature: Table A; Target 50841; HLA-A*29:02; MYH4; ENSG00000264424; TAA
MLLITTNPY

SEQ ID NO: 50842 - protein, 9 aa, Homo sapiens
  misc_feature: Table A; Target 50842; HLA-B*46:01; MYH4; ENSG00000264424; TAA
MLLITTNPY

SEQ ID NO: 50843 - protein, 9 aa, Homo sapiens
  misc_feature: Table A; Target 50843; HLA-C*07:04; MYH4; ENSG00000264424; TAA
MLLITTNPY

SEQ ID NO: 50844 - protein, 10 aa, Homo sapiens
  misc_feature: Table A; Target 50844; HLA-A*02:03; MYH4; ENSG00000264424; TAA
MLTDRENQSI

SEQ ID NO: 50845 - protein, 9 aa, Homo sapiens
  misc_feature: Table A; Target 50845; HLA-B*54:01; MYH4; ENSG00000264424; TAA
MMTHLHEPA

SEQ ID NO: 50846 - protein, 8 aa, Homo sapiens
  misc_feature: Table A; Target 50846; HLA-B*13:02; MYH4; ENSG00000264424; TAA
MQAEVEEL

SEQ ID NO: 50847 - protein, 8 aa, Homo sapiens
  misc_feature: Table A; Target 50847; HLA-B*15:01; MYH4; ENSG00000264424; TAA
MQAEVEEL

SEQ ID NO: 50848 - protein, 8 aa, Homo sapiens
  misc_feature: Table A; Target 50848; HLA-B*27:05; MYH4; ENSG00000264424; TAA
MQAEVEEL

SEQ ID NO: 50849 - protein, 8 aa, Homo sapiens
  misc_feature: Table A; Target 50849; HLA-B*37:01; MYH4; ENSG00000264424; TAA
MQAEVEEL

SEQ ID NO: 50850 - protein, 8 aa, Homo sapiens
  misc_feature: Table A; Target 50850; HLA-B*38:01; MYH4; ENSG00000264424; TAA
MQAEVEEL

SEQ ID NO: 50851 - protein, 8 aa, Homo sapiens
  misc_feature: Table A; Target 50851; HLA-B*39:01; MYH4; ENSG00000264424; TAA
MQAEVEEL

SEQ ID NO: 50852 - protein, 8 aa, Homo sapiens
  misc_feature: Table A; Target 50852; HLA-B*40:01; MYH4; ENSG00000264424; TAA
MQAEVEEL

SEQ ID NO: 50853 - protein, 8 aa, Homo sapiens
  misc_feature: Table A; Target 50853; HLA-C*03:03; MYH4; ENSG00000264424; TAA
MQAEVEEL

SEQ ID NO: 50854 - protein, 8 aa, Homo sapiens
  misc_feature: Table A; Target 50854; HLA-C*05:01; MYH4; ENSG00000264424; TAA
MQAEVEEL

SEQ ID NO: 50855 - protein, 8 aa, Homo sapiens
  misc_feature: Table A; Target 50855; HLA-C*07:04; MYH4; ENSG00000264424; TAA
MQAEVEEL

SEQ ID NO: 50856 - protein, 9 aa, Homo sapiens
  misc_feature: Table A; Target 50856; HLA-A*33:03; MYH4; ENSG00000264424; TAA
MQAEVEELR

SEQ ID NO: 50857 - protein, 9 aa, Homo sapiens
  misc_feature: Table A; Target 50857; HLA-A*68:01; MYH4; ENSG00000264424; TAA
MQAEVEELR

SEQ ID NO: 50858 - protein, 9 aa, Homo sapiens
  misc_feature: Table A; Target 50858; HLA-A*68:02; MYH4; ENSG00000264424; TAA
MQAEVEELR

SEQ ID NO: 50859 - protein, 9 aa, Homo sapiens
  misc_feature: Table A; Target 50859; HLA-B*27:02; MYH4; ENSG00000264424; TAA
MQAEVEELR

SEQ ID NO: 50860 - protein, 9 aa, Homo sapiens
  misc_feature: Table A; Target 50860; HLA-B*38:01; MYH4; ENSG00000264424; TAA
MQAEVEELR

SEQ ID NO: 50861 - protein, 9 aa, Homo sapiens
  misc_feature: Table A; Target 50861; HLA-C*07:06; MYH4; ENSG00000264424; TAA
MQAEVEELR

SEQ ID NO: 50862 - protein, 10 aa, Homo sapiens
  misc_feature: Table A; Target 50862; HLA-B*13:02; MYH4; ENSG00000264424; TAA
MQAEVEELRA

SEQ ID NO: 50863 - protein, 9 aa, Homo sapiens
  misc_feature: Table A; Target 50863; HLA-B*38:01; MYH4; ENSG00000264424; TAA
MQEKNDLQL

SEQ ID NO: 50864 - protein, 11 aa, Homo sapiens
  misc_feature: Table A; Target 50864; HLA-A*01:01; MYH4; ENSG00000264424; TAA
MQEKNDLQLQV

SEQ ID NO: 50865 - protein, 9 aa, Homo sapiens
  misc_feature: Table A; Target 50865; HLA-B*13:02; MYH4; ENSG00000264424; TAA
MQGTLEDQI

SEQ ID NO: 50866 - protein, 9 aa, Homo sapiens
  misc_feature: Table A; Target 50866; HLA-B*38:01; MYH4; ENSG00000264424; TAA
MQGTLEDQI

SEQ ID NO: 50867 - protein, 10 aa, Homo sapiens
  misc_feature: Table A; Target 50867; HLA-B*38:01; MYH4; ENSG00000264424; TAA
MQGTLEDQII

SEQ ID NO: 50868 - protein, 9 aa, Homo sapiens
  misc_feature: Table A; Target 50868; HLA-A*30:01; MYH4; ENSG00000264424; TAA
MQSTLDAEI

SEQ ID NO: 50869 - protein, 9 aa, Homo sapiens
  misc_feature: Table A; Target 50869; HLA-B*13:02; MYH4; ENSG00000264424; TAA
MQSTLDAEI

SEQ ID NO: 50870 - protein, 9 aa, Homo sapiens
  misc_feature: Table A; Target 50870; HLA-B*27:05; MYH4; ENSG00000264424; TAA
MQSTLDAEI

SEQ ID NO: 50871 - protein, 9 aa, Homo sapiens
  misc_feature: Table A; Target 50871; HLA-B*38:01; MYH4; ENSG00000264424; TAA
MQSTLDAEI

SEQ ID NO: 50872 - protein, 9 aa, Homo sapiens
  misc_feature: Table A; Target 50872; HLA-B*39:01; MYH4; ENSG00000264424; TAA
MQSTLDAEI

SEQ ID NO: 50873 - protein, 9 aa, Homo sapiens
  misc_feature: Table A; Target 50873; HLA-C*06:02; MYH4; ENSG00000264424; TAA
MQSTLDAEI

SEQ ID NO: 50874 - protein, 10 aa, Homo sapiens
  misc_feature: Table A; Target 50874; HLA-B*27:02; MYH4; ENSG00000264424; TAA
MQSTLDAEIR

SEQ ID NO: 50875 - protein, 8 aa, Homo sapiens
  misc_feature: Table A; Target 50875; HLA-C*12:03; MYH4; ENSG00000264424; TAA
MSKANSEV

SEQ ID NO: 50876 - protein, 9 aa, Homo sapiens
  misc_feature: Table A; Target 50876; HLA-B*54:01; MYH4; ENSG00000264424; TAA
MSKANSEVA

SEQ ID NO: 50877 - protein, 11 aa, Homo sapiens
  misc_feature: Table A; Target 50877; HLA-A*25:01; MYH4; ENSG00000264424; TAA
MSKANSEVAQW

SEQ ID NO: 50878 - protein, 11 aa, Homo sapiens
  misc_feature: Table A; Target 50878; HLA-A*33:03; MYH4; ENSG00000264424; TAA
MSKANSEVAQW

SEQ ID NO: 50879 - protein, 11 aa, Homo sapiens
  misc_feature: Table A; Target 50879; HLA-B*57:01; MYH4; ENSG00000264424; TAA
MSKANSEVAQW

SEQ ID NO: 50880 - protein, 11 aa, Homo sapiens
  misc_feature: Table A; Target 50880; HLA-B*58:01; MYH4; ENSG00000264424; TAA
MSKANSEVAQW

SEQ ID NO: 50881 - protein, 9 aa, Homo sapiens
  misc_feature: Table A; Target 50881; HLA-B*40:02; MYH4; ENSG00000264424; TAA
MTHLHEPAV

SEQ ID NO: 50882 - protein, 9 aa, Homo sapiens
  misc_feature: Table A; Target 50882; HLA-B*54:01; MYH4; ENSG00000264424; TAA
MTHLHEPAV

SEQ ID NO: 50883 - protein, 11 aa, Homo sapiens
  misc_feature: Table A; Target 50883; HLA-A*01:01; MYH4; ENSG00000264424; TAA
MTHLHEPAVLY

SEQ ID NO: 50884 - protein, 9 aa, Homo sapiens
  misc_feature: Table A; Target 50884; HLA-A*03:01; MYH4; ENSG00000264424; TAA
MVSQLSRGK

SEQ ID NO: 50885 - protein, 9 aa, Homo sapiens
  misc_feature: Table A; Target 50885; HLA-A*03:02; MYH4; ENSG00000264424; TAA
MVSQLSRGK

SEQ ID NO: 50886 - protein, 9 aa, Homo sapiens
  misc_feature: Table A; Target 50886; HLA-A*11:01; MYH4; ENSG00000264424; TAA
MVSQLSRGK

SEQ ID NO: 50887 - protein, 9 aa, Homo sapiens
  misc_feature: Table A; Target 50887; HLA-C*16:01; MYH4; ENSG00000264424; TAA
MVSQLSRGK

SEQ ID NO: 50888 - protein, 8 aa, Homo sapiens
  misc_feature: Table A; Target 50888; HLA-C*04:01; MYH4; ENSG00000264424; TAA
MVTLMQEK

SEQ ID NO: 50889 - protein, 9 aa, Homo sapiens
  misc_feature: Table A; Target 50889; HLA-A*02:04; MYH4; ENSG00000264424; TAA
MVTRINQQL

SEQ ID NO: 50890 - protein, 9 aa, Homo sapiens
  misc_feature: Table A; Target 50890; HLA-A*23:01; MYH4; ENSG00000264424; TAA
MVTRINQQL

SEQ ID NO: 50891 - protein, 9 aa, Homo sapiens
  misc_feature: Table A; Target 50891; HLA-A*24:02; MYH4; ENSG00000264424; TAA
MVTRINQQL

SEQ ID NO: 50892 - protein, 9 aa, Homo sapiens
  misc_feature: Table A; Target 50892; HLA-A*26:01; MYH4; ENSG00000264424; TAA
MVTRINQQL

SEQ ID NO: 50893 - protein, 9 aa, Homo sapiens
  misc_feature: Table A; Target 50893; HLA-A*32:01; MYH4; ENSG00000264424; TAA
MVTRINQQL

SEQ ID NO: 50894 - protein, 9 aa, Homo sapiens
  misc_feature: Table A; Target 50894; HLA-A*68:01; MYH4; ENSG00000264424; TAA
MVTRINQQL

SEQ ID NO: 50895 - protein, 9 aa, Homo sapiens
  misc_feature: Table A; Target 50895; HLA-A*68:02; MYH4; ENSG00000264424; TAA
MVTRINQQL

SEQ ID NO: 50896 - protein, 9 aa, Homo sapiens
  misc_feature: Table A; Target 50896; HLA-B*27:05; MYH4; ENSG00000264424; TAA
MVTRINQQL

SEQ ID NO: 50897 - protein, 9 aa, Homo sapiens
  misc_feature: Table A; Target 50897; HLA-B*35:01; MYH4; ENSG00000264424; TAA
MVTRINQQL

SEQ ID NO: 50898 - protein, 9 aa, Homo sapiens
  misc_feature: Table A; Target 50898; HLA-B*35:03; MYH4; ENSG00000264424; TAA
MVTRINQQL

SEQ ID NO: 50899 - protein, 9 aa, Homo sapiens
  misc_feature: Table A; Target 50899; HLA-B*38:01; MYH4; ENSG00000264424; TAA
MVTRINQQL

SEQ ID NO: 50900 - protein, 9 aa, Homo sapiens
  misc_feature: Table A; Target 50900; HLA-B*55:01; MYH4; ENSG00000264424; TAA
MVTRINQQL

SEQ ID NO: 50901 - protein, 9 aa, Homo sapiens
  misc_feature: Table A; Target 50901; HLA-B*58:01; MYH4; ENSG00000264424; TAA
MVTRINQQL

SEQ ID NO: 50902 - protein, 9 aa, Homo sapiens
  misc_feature: Table A; Target 50902; HLA-C*03:03; MYH4; ENSG00000264424; TAA
MVTRINQQL

SEQ ID NO: 50903 - protein, 9 aa, Homo sapiens
  misc_feature: Table A; Target 50903; HLA-C*03:04; MYH4; ENSG00000264424; TAA
MVTRINQQL

SEQ ID NO: 50904 - protein, 9 aa, Homo sapiens
  misc_feature: Table A; Target 50904; HLA-C*06:02; MYH4; ENSG00000264424; TAA
MVTRINQQL

SEQ ID NO: 50905 - protein, 9 aa, Homo sapiens
  misc_feature: Table A; Target 50905; HLA-C*07:04; MYH4; ENSG00000264424; TAA
MVTRINQQL

SEQ ID NO: 50906 - protein, 9 aa, Homo sapiens
  misc_feature: Table A; Target 50906; HLA-C*07:06; MYH4; ENSG00000264424; TAA
MVTRINQQL

SEQ ID NO: 50907 - protein, 9 aa, Homo sapiens
  misc_feature: Table A; Target 50907; HLA-C*16:01; MYH4; ENSG00000264424; TAA
MVTRINQQL

SEQ ID NO: 50908 - protein, 9 aa, Homo sapiens
  misc_feature: Table A; Target 50908; HLA-C*16:02; MYH4; ENSG00000264424; TAA
MVTRINQQL

SEQ ID NO: 50909 - protein, 9 aa, Homo sapiens
  misc_feature: Table A; Target 50909; HLA-A*68:01; MYH4; ENSG00000264424; TAA
NAACIALDK

SEQ ID NO: 50910 - protein, 9 aa, Homo sapiens
  misc_feature: Table A; Target 50910; HLA-A*68:01; MYH4; ENSG00000264424; TAA
NAELTAKKR

SEQ ID NO: 50911 - protein, 10 aa, Homo sapiens
  misc_feature: Table A; Target 50911; HLA-B*35:01; MYH4; ENSG00000264424; TAA
NASAIPEGQF

SEQ ID NO: 50912 - protein, 10 aa, Homo sapiens
  misc_feature: Table A; Target 50912; HLA-C*05:01; MYH4; ENSG00000264424; TAA
NASAIPEGQF

SEQ ID NO: 50913 - protein, 8 aa, Homo sapiens
  misc_feature: Table A; Target 50913; HLA-B*27:02; MYH4; ENSG00000264424; TAA
NAVGALAK

SEQ ID NO: 50914 - protein, 9 aa, Homo sapiens
  misc_feature: Table A; Target 50914; HLA-B*54:01; MYH4; ENSG00000264424; TAA
NAVGALAKA

SEQ ID NO: 50915 - protein, 9 aa, Homo sapiens
  misc_feature: Table A; Target 50915; HLA-B*56:01; MYH4; ENSG00000264424; TAA
NAVGALAKA

SEQ ID NO: 50916 - protein, 11 aa, Homo sapiens
  misc_feature: Table A; Target 50916; HLA-A*30:02; MYH4; ENSG00000264424; TAA
NAVGALAKAIY

SEQ ID NO: 50917 - protein, 11 aa, Homo sapiens
  misc_feature: Table A; Target 50917; HLA-B*35:01; MYH4; ENSG00000264424; TAA
NAVGALAKAIY

SEQ ID NO: 50918 - protein, 10 aa, Homo sapiens
  misc_feature: Table A; Target 50918; HLA-B*27:05; MYH4; ENSG00000264424; TAA
NAYEESLDHL

SEQ ID NO: 50919 - protein, 10 aa, Homo sapiens
  misc_feature: Table A; Target 50919; HLA-B*40:02; MYH4; ENSG00000264424; TAA
NDLASNMETV

SEQ ID NO: 50920 - protein, 9 aa, Homo sapiens
  misc_feature: Table A; Target 50920; HLA-B*18:01; MYH4; ENSG00000264424; TAA
NEFVTKGQT

SEQ ID NO: 50921 - protein, 9 aa, Homo sapiens
  misc_feature: Table A; Target 50921; HLA-B*44:03; MYH4; ENSG00000264424; TAA
NEFVTKGQT

SEQ ID NO: 50922 - protein, 10 aa, Homo sapiens
  misc_feature: Table A; Target 50922; HLA-A*30:01; MYH4; ENSG00000264424; TAA
NEFVTKGQTV

SEQ ID NO: 50923 - protein, 10 aa, Homo sapiens
  misc_feature: Table A; Target 50923; HLA-B*18:01; MYH4; ENSG00000264424; TAA
NEFVTKGQTV

SEQ ID NO: 50924 - protein, 10 aa, Homo sapiens
  misc_feature: Table A; Target 50924; HLA-B*37:01; MYH4; ENSG00000264424; TAA
NEFVTKGQTV

SEQ ID NO: 50925 - protein, 10 aa, Homo sapiens
  misc_feature: Table A; Target 50925; HLA-B*40:01; MYH4; ENSG00000264424; TAA
NEFVTKGQTV

SEQ ID NO: 50926 - protein, 10 aa, Homo sapiens
  misc_feature: Table A; Target 50926; HLA-B*40:02; MYH4; ENSG00000264424; TAA
NEFVTKGQTV

SEQ ID NO: 50927 - protein, 10 aa, Homo sapiens
  misc_feature: Table A; Target 50927; HLA-B*44:02; MYH4; ENSG00000264424; TAA
NEFVTKGQTV

SEQ ID NO: 50928 - protein, 10 aa, Homo sapiens
  misc_feature: Table A; Target 50928; HLA-B*44:03; MYH4; ENSG00000264424; TAA
NEFVTKGQTV

SEQ ID NO: 50929 - protein, 10 aa, Homo sapiens
  misc_feature: Table A; Target 50929; HLA-B*49:01; MYH4; ENSG00000264424; TAA
NEFVTKGQTV

SEQ ID NO: 50930 - protein, 8 aa, Homo sapiens
  misc_feature: Table A; Target 50930; HLA-B*18:01; MYH4; ENSG00000264424; TAA
NEKLQQFF

SEQ ID NO: 50931 - protein, 8 aa, Homo sapiens
  misc_feature: Table A; Target 50931; HLA-B*37:01; MYH4; ENSG00000264424; TAA
NEKLQQFF

SEQ ID NO: 50932 - protein, 8 aa, Homo sapiens
  misc_feature: Table A; Target 50932; HLA-B*18:01; MYH4; ENSG00000264424; TAA
NELSAQKA

SEQ ID NO: 50933 - protein, 9 aa, Homo sapiens
  misc_feature: Table A; Target 50933; HLA-B*44:02; MYH4; ENSG00000264424; TAA
NELSAQKAR

SEQ ID NO: 50934 - protein, 9 aa, Homo sapiens
  misc_feature: Table A; Target 50934; HLA-B*44:03; MYH4; ENSG00000264424; TAA
NELSAQKAR

SEQ ID NO: 50935 - protein, 10 aa, Homo sapiens
  misc_feature: Table A; Target 50935; HLA-B*40:01; MYH4; ENSG00000264424; TAA
NELSAQKARL

SEQ ID NO: 50936 - protein, 10 aa, Homo sapiens
  misc_feature: Table A; Target 50936; HLA-B*44:03; MYH4; ENSG00000264424; TAA
NELSAQKARL

SEQ ID NO: 50937 - protein, 8 aa, Homo sapiens
  misc_feature: Table A; Target 50937; HLA-B*18:01; MYH4; ENSG00000264424; TAA
NEMEIQLN

SEQ ID NO: 50938 - protein, 9 aa, Homo sapiens
  misc_feature: Table A; Target 50938; HLA-B*18:01; MYH4; ENSG00000264424; TAA
NEMEIQLNH

SEQ ID NO: 50939 - protein, 9 aa, Homo sapiens
  misc_feature: Table A; Target 50939; HLA-B*27:02; MYH4; ENSG00000264424; TAA
NEMEIQLNH

SEQ ID NO: 50940 - protein, 9 aa, Homo sapiens
  misc_feature: Table A; Target 50940; HLA-B*27:05; MYH4; ENSG00000264424; TAA
NEMEIQLNH

SEQ ID NO: 50941 - protein, 9 aa, Homo sapiens
  misc_feature: Table A; Target 50941; HLA-B*44:02; MYH4; ENSG00000264424; TAA
NEMEIQLNH

SEQ ID NO: 50942 - protein, 9 aa, Homo sapiens
  misc_feature: Table A; Target 50942; HLA-B*44:03; MYH4; ENSG00000264424; TAA
NEMEIQLNH

SEQ ID NO: 50943 - protein, 9 aa, Homo sapiens
  misc_feature: Table A; Target 50943; HLA-B*49:01; MYH4; ENSG00000264424; TAA
NEMEIQLNH

SEQ ID NO: 50944 - protein, 9 aa, Homo sapiens
  misc_feature: Table A; Target 50944; HLA-C*16:04; MYH4; ENSG00000264424; TAA
NEMEIQLNH

SEQ ID NO: 50945 - protein, 10 aa, Homo sapiens
  misc_feature: Table A; Target 50945; HLA-A*30:01; MYH4; ENSG00000264424; TAA
NEMEIQLNHA

SEQ ID NO: 50946 - protein, 10 aa, Homo sapiens
  misc_feature: Table A; Target 50946; HLA-B*18:01; MYH4; ENSG00000264424; TAA
NEMEIQLNHA

SEQ ID NO: 50947 - protein, 10 aa, Homo sapiens
  misc_feature: Table A; Target 50947; HLA-B*44:02; MYH4; ENSG00000264424; TAA
NEMEIQLNHA

SEQ ID NO: 50948 - protein, 10 aa, Homo sapiens
  misc_feature: Table A; Target 50948; HLA-B*44:03; MYH4; ENSG00000264424; TAA
NEMEIQLNHA

SEQ ID NO: 50949 - protein, 10 aa, Homo sapiens
  misc_feature: Table A; Target 50949; HLA-B*49:01; MYH4; ENSG00000264424; TAA
NEMEIQLNHA

SEQ ID NO: 50950 - protein, 8 aa, Homo sapiens
  misc_feature: Table A; Target 50950; HLA-B*18:01; MYH4; ENSG00000264424; TAA
NETKTPGA

SEQ ID NO: 50951 - protein, 9 aa, Homo sapiens
  misc_feature: Table A; Target 50951; HLA-A*30:01; MYH4; ENSG00000264424; TAA
NETKTPGAM

SEQ ID NO: 50952 - protein, 9 aa, Homo sapiens
  misc_feature: Table A; Target 50952; HLA-B*18:01; MYH4; ENSG00000264424; TAA
NETKTPGAM

SEQ ID NO: 50953 - protein, 9 aa, Homo sapiens
  misc_feature: Table A; Target 50953; HLA-B*40:01; MYH4; ENSG00000264424; TAA
NETKTPGAM

SEQ ID NO: 50954 - protein, 8 aa, Homo sapiens
  misc_feature: Table A; Target 50954; HLA-B*15:03; MYH4; ENSG00000264424; TAA
NETVVGLY

SEQ ID NO: 50955 - protein, 8 aa, Homo sapiens
  misc_feature: Table A; Target 50955; HLA-B*18:01; MYH4; ENSG00000264424; TAA
NETVVGLY

SEQ ID NO: 50956 - protein, 8 aa, Homo sapiens
  misc_feature: Table A; Target 50956; HLA-B*37:01; MYH4; ENSG00000264424; TAA
NETVVGLY

SEQ ID NO: 50957 - protein, 8 aa, Homo sapiens
  misc_feature: Table A; Target 50957; HLA-B*44:02; MYH4; ENSG00000264424; TAA
NETVVGLY

SEQ ID NO: 50958 - protein, 8 aa, Homo sapiens
  misc_feature: Table A; Target 50958; HLA-B*44:03; MYH4; ENSG00000264424; TAA
NETVVGLY

SEQ ID NO: 50959 - protein, 8 aa, Homo sapiens
  misc_feature: Table A; Target 50959; HLA-B*49:01; MYH4; ENSG00000264424; TAA
NETVVGLY

SEQ ID NO: 50960 - protein, 8 aa, Homo sapiens
  misc_feature: Table A; Target 50960; HLA-C*07:01; MYH4; ENSG00000264424; TAA
NETVVGLY

SEQ ID NO: 50961 - protein, 8 aa, Homo sapiens
  misc_feature: Table A; Target 50961; HLA-B*49:01; MYH4; ENSG00000264424; TAA
NEVEDLMI

SEQ ID NO: 50962 - protein, 10 aa, Homo sapiens
  misc_feature: Table A; Target 50962; HLA-B*49:01; MYH4; ENSG00000264424; TAA
NEVEDLMIDV

SEQ ID NO: 50963 - protein, 9 aa, Homo sapiens
  misc_feature: Table A; Target 50963; HLA-A*24:02; MYH4; ENSG00000264424; TAA
NFDKVLAEW

SEQ ID NO: 50964 - protein, 9 aa, Homo sapiens
  misc_feature: Table A; Target 50964; HLA-C*04:01; MYH4; ENSG00000264424; TAA
NFDKVLAEW

SEQ ID NO: 50965 - protein, 10 aa, Homo sapiens
  misc_feature: Table A; Target 50965; HLA-A*24:02; MYH4; ENSG00000264424; TAA
NFTNEKLQQF

SEQ ID NO: 50966 - protein, 11 aa, Homo sapiens
  misc_feature: Table A; Target 50966; HLA-B*38:01; MYH4; ENSG00000264424; TAA
NHANRQAAEAL

SEQ ID NO: 50967 - protein, 11 aa, Homo sapiens
  misc_feature: Table A; Target 50967; HLA-B*39:01; MYH4; ENSG00000264424; TAA
NHANRQAAEAL

SEQ ID NO: 50968 - protein, 9 aa, Homo sapiens
  misc_feature: Table A; Target 50968; HLA-B*38:01; MYH4; ENSG00000264424; TAA
NHLRVVESM

SEQ ID NO: 50969 - protein, 9 aa, Homo sapiens
  misc_feature: Table A; Target 50969; HLA-A*03:01; MYH4; ENSG00000264424; TAA
NIRAFMNVK

SEQ ID NO: 50970 - protein, 9 aa, Homo sapiens
  misc_feature: Table A; Target 50970; HLA-A*25:01; MYH4; ENSG00000264424; TAA
NLKERYAAW

SEQ ID NO: 50971 - protein, 9 aa, Homo sapiens
  misc_feature: Table A; Target 50971; HLA-B*08:01; MYH4; ENSG00000264424; TAA
NLKERYAAW

SEQ ID NO: 50972 - protein, 10 aa, Homo sapiens
  misc_feature: Table A; Target 50972; HLA-A*02:01; MYH4; ENSG00000264424; TAA
NLMQAEVEEL

SEQ ID NO: 50973 - protein, 10 aa, Homo sapiens
  misc_feature: Table A; Target 50973; HLA-A*02:04; MYH4; ENSG00000264424; TAA
NLMQAEVEEL

SEQ ID NO: 50974 - protein, 10 aa, Homo sapiens
  misc_feature: Table A; Target 50974; HLA-A*25:01; MYH4; ENSG00000264424; TAA
NLMQAEVEEL

SEQ ID NO: 50975 - protein, 10 aa, Homo sapiens
  misc_feature: Table A; Target 50975; HLA-B*27:05; MYH4; ENSG00000264424; TAA
NLMQAEVEEL

SEQ ID NO: 50976 - protein, 10 aa, Homo sapiens
  misc_feature: Table A; Target 50976; HLA-B*35:03; MYH4; ENSG00000264424; TAA
NLMQAEVEEL

SEQ ID NO: 50977 - protein, 10 aa, Homo sapiens
  misc_feature: Table A; Target 50977; HLA-B*38:01; MYH4; ENSG00000264424; TAA
NLMQAEVEEL

SEQ ID NO: 50978 - protein, 10 aa, Homo sapiens
  misc_feature: Table A; Target 50978; HLA-B*55:01; MYH4; ENSG00000264424; TAA
NLMQAEVEEL

SEQ ID NO: 50979 - protein, 11 aa, Homo sapiens
  misc_feature: Table A; Target 50979; HLA-A*33:01; MYH4; ENSG00000264424; TAA
NLMQAEVEELR

SEQ ID NO: 50980 - protein, 9 aa, Homo sapiens
  misc_feature: Table A; Target 50980; HLA-A*02:03; MYH4; ENSG00000264424; TAA
NLNKLMTNL

SEQ ID NO: 50981 - protein, 9 aa, Homo sapiens
  misc_feature: Table A; Target 50981; HLA-A*02:04; MYH4; ENSG00000264424; TAA
NLNKLMTNL

SEQ ID NO: 50982 - protein, 9 aa, Homo sapiens
  misc_feature: Table A; Target 50982; HLA-A*02:07; MYH4; ENSG00000264424; TAA
NLNKLMTNL

SEQ ID NO: 50983 - protein, 9 aa, Homo sapiens
  misc_feature: Table A; Target 50983; HLA-A*03:01; MYH4; ENSG00000264424; TAA
NLNKLMTNL

SEQ ID NO: 50984 - protein, 9 aa, Homo sapiens
  misc_feature: Table A; Target 50984; HLA-A*03:02; MYH4; ENSG00000264424; TAA
NLNKLMTNL

SEQ ID NO: 50985 - protein, 9 aa, Homo sapiens
  misc_feature: Table A; Target 50985; HLA-C*01:02; MYH4; ENSG00000264424; TAA
NLNKLMTNL

SEQ ID NO: 50986 - protein, 9 aa, Homo sapiens
  misc_feature: Table A; Target 50986; HLA-B*07:02; MYH4; ENSG00000264424; TAA
NLRNTQGIL

SEQ ID NO: 50987 - protein, 10 aa, Homo sapiens
  misc_feature: Table A; Target 50987; HLA-A*03:01; MYH4; ENSG00000264424; TAA
NLRNTQGILK

SEQ ID NO: 50988 - protein, 9 aa, Homo sapiens
  misc_feature: Table A; Target 50988; HLA-A*03:02; MYH4; ENSG00000264424; TAA
NMETVSKAK

SEQ ID NO: 50989 - protein, 10 aa, Homo sapiens
  misc_feature: Table A; Target 50989; HLA-A*33:01; MYH4; ENSG00000264424; TAA
NNFQKPKPAK

SEQ ID NO: 50990 - protein, 8 aa, Homo sapiens
  misc_feature: Table A; Target 50990; HLA-B*18:01; MYH4; ENSG00000264424; TAA
NPEVVTAY

SEQ ID NO: 50991 - protein, 8 aa, Homo sapiens
  misc_feature: Table A; Target 50991; HLA-B*35:01; MYH4; ENSG00000264424; TAA
NPEVVTAY

SEQ ID NO: 50992 - protein, 8 aa, Homo sapiens
  misc_feature: Table A; Target 50992; HLA-B*55:01; MYH4; ENSG00000264424; TAA
NPEVVTAY

SEQ ID NO: 50993 - protein, 8 aa, Homo sapiens
  misc_feature: Table A; Target 50993; HLA-C*03:03; MYH4; ENSG00000264424; TAA
NPEVVTAY

SEQ ID NO: 50994 - protein, 8 aa, Homo sapiens
  misc_feature: Table A; Target 50994; HLA-C*14:02; MYH4; ENSG00000264424; TAA
NPEVVTAY

SEQ ID NO: 50995 - protein, 9 aa, Homo sapiens
  misc_feature: Table A; Target 50995; HLA-A*68:01; MYH4; ENSG00000264424; TAA
NPEVVTAYR

SEQ ID NO: 50996 - protein, 9 aa, Homo sapiens
  misc_feature: Table A; Target 50996; HLA-C*07:06; MYH4; ENSG00000264424; TAA
NPEVVTAYR

SEQ ID NO: 50997 - protein, 10 aa, Homo sapiens
  misc_feature: Table A; Target 50997; HLA-B*54:01; MYH4; ENSG00000264424; TAA
NPLLEAFGNA

SEQ ID NO: 50998 - protein, 8 aa, Homo sapiens
  misc_feature: Table A; Target 50998; HLA-B*51:01; MYH4; ENSG00000264424; TAA
NPPKYDKI

SEQ ID NO: 50999 - protein, 8 aa, Homo sapiens
  misc_feature: Table A; Target 50999; HLA-B*51:01; MYH4; ENSG00000264424; TAA
NPYDFAFV

SEQ ID NO: 51000 - protein, 8 aa, Homo sapiens
  misc_feature: Table A; Target 51000; HLA-B*54:01; MYH4; ENSG00000264424; TAA
NPYDFAFV

SEQ ID NO: 51001 - protein, 8 aa, Homo sapiens
  misc_feature: Table A; Target 51001; HLA-B*56:01; MYH4; ENSG00000264424; TAA
NPYDFAFV

SEQ ID NO: 51002 - protein, 9 aa, Homo sapiens
  misc_feature: Table A; Target 51002; HLA-B*54:01; MYH4; ENSG00000264424; TAA
NPYDFAFVS

SEQ ID NO: 51003 - protein, 10 aa, Homo sapiens
  misc_feature: Table A; Target 51003; HLA-B*54:01; MYH4; ENSG00000264424; TAA
NPYDFAFVSQ

SEQ ID NO: 51004 - protein, 9 aa, Homo sapiens
  misc_feature: Table A; Target 51004; HLA-B*35:01; MYH4; ENSG00000264424; TAA
NPYKWLPVY

SEQ ID NO: 51005 - protein, 9 aa, Homo sapiens
  misc_feature: Table A; Target 51005; HLA-B*51:01; MYH4; ENSG00000264424; TAA
NPYKWLPVY

SEQ ID NO: 51006 - protein, 10 aa, Homo sapiens
  misc_feature: Table A; Target 51006; HLA-A*31:01; MYH4; ENSG00000264424; TAA
NQQLDTKQPR

SEQ ID NO: 51007 - protein, 10 aa, Homo sapiens
  misc_feature: Table A; Target 51007; HLA-A*33:01; MYH4; ENSG00000264424; TAA
NQQLDTKQPR

SEQ ID NO: 51008 - protein, 10 aa, Homo sapiens
  misc_feature: Table A; Target 51008; HLA-A*33:03; MYH4; ENSG00000264424; TAA
NQQLDTKQPR

SEQ ID NO: 51009 - protein, 10 aa, Homo sapiens
  misc_feature: Table A; Target 51009; HLA-A*68:01; MYH4; ENSG00000264424; TAA
NQQLDTKQPR

SEQ ID NO: 51010 - protein, 9 aa, Homo sapiens
  misc_feature: Table A; Target 51010; HLA-B*27:05; MYH4; ENSG00000264424; TAA
NRQAAEALR

SEQ ID NO: 51011 - protein, 9 aa, Homo sapiens
  misc_feature: Table A; Target 51011; HLA-A*02:03; MYH4; ENSG00000264424; TAA
NSADLLKSL

SEQ ID NO: 51012 - protein, 9 aa, Homo sapiens
  misc_feature: Table A; Target 51012; HLA-A*25:01; MYH4; ENSG00000264424; TAA
NSADLLKSL

SEQ ID NO: 51013 - protein, 9 aa, Homo sapiens
  misc_feature: Table A; Target 51013; HLA-A*32:01; MYH4; ENSG00000264424; TAA
NSADLLKSL

SEQ ID NO: 51014 - protein, 9 aa, Homo sapiens
  misc_feature: Table A; Target 51014; HLA-A*33:01; MYH4; ENSG00000264424; TAA
NSADLLKSL

SEQ ID NO: 51015 - protein, 9 aa, Homo sapiens
  misc_feature: Table A; Target 51015; HLA-A*33:03; MYH4; ENSG00000264424; TAA
NSADLLKSL

SEQ ID NO: 51016 - protein, 9 aa, Homo sapiens
  misc_feature: Table A; Target 51016; HLA-A*68:01; MYH4; ENSG00000264424; TAA
NSADLLKSL

SEQ ID NO: 51017 - protein, 9 aa, Homo sapiens
  misc_feature: Table A; Target 51017; HLA-A*68:02; MYH4; ENSG00000264424; TAA
NSADLLKSL

SEQ ID NO: 51018 - protein, 9 aa, Homo sapiens
  misc_feature: Table A; Target 51018; HLA-B*27:05; MYH4; ENSG00000264424; TAA
NSADLLKSL

SEQ ID NO: 51019 - protein, 9 aa, Homo sapiens
  misc_feature: Table A; Target 51019; HLA-B*40:02; MYH4; ENSG00000264424; TAA
NSADLLKSL

SEQ ID NO: 51020 - protein, 9 aa, Homo sapiens
  misc_feature: Table A; Target 51020; HLA-B*44:02; MYH4; ENSG00000264424; TAA
NSADLLKSL

SEQ ID NO: 51021 - protein, 9 aa, Homo sapiens
  misc_feature: Table A; Target 51021; HLA-B*44:03; MYH4; ENSG00000264424; TAA
NSADLLKSL

SEQ ID NO: 51022 - protein, 9 aa, Homo sapiens
  misc_feature: Table A; Target 51022; HLA-C*01:02; MYH4; ENSG00000264424; TAA
NSADLLKSL

SEQ ID NO: 51023 - protein, 9 aa, Homo sapiens
  misc_feature: Table A; Target 51023; HLA-C*02:02; MYH4; ENSG00000264424; TAA
NSADLLKSL

SEQ ID NO: 51024 - protein, 9 aa, Homo sapiens
  misc_feature: Table A; Target 51024; HLA-C*03:04; MYH4; ENSG00000264424; TAA
NSADLLKSL

SEQ ID NO: 51025 - protein, 9 aa, Homo sapiens
  misc_feature: Table A; Target 51025; HLA-C*06:02; MYH4; ENSG00000264424; TAA
NSADLLKSL

SEQ ID NO: 51026 - protein, 9 aa, Homo sapiens
  misc_feature: Table A; Target 51026; HLA-C*07:06; MYH4; ENSG00000264424; TAA
NSADLLKSL

SEQ ID NO: 51027 - protein, 9 aa, Homo sapiens
  misc_feature: Table A; Target 51027; HLA-C*12:03; MYH4; ENSG00000264424; TAA
NSADLLKSL

SEQ ID NO: 51028 - protein, 9 aa, Homo sapiens
  misc_feature: Table A; Target 51028; HLA-C*14:02; MYH4; ENSG00000264424; TAA
NSADLLKSL

SEQ ID NO: 51029 - protein, 9 aa, Homo sapiens
  misc_feature: Table A; Target 51029; HLA-C*16:01; MYH4; ENSG00000264424; TAA
NSADLLKSL

SEQ ID NO: 51030 - protein, 9 aa, Homo sapiens
  misc_feature: Table A; Target 51030; HLA-C*16:02; MYH4; ENSG00000264424; TAA
NSADLLKSL

SEQ ID NO: 51031 - protein, 11 aa, Homo sapiens
  misc_feature: Table A; Target 51031; HLA-A*01:01; MYH4; ENSG00000264424; TAA
NSADLLKSLCY

SEQ ID NO: 51032 - protein, 11 aa, Homo sapiens
  misc_feature: Table A; Target 51032; HLA-A*29:02; MYH4; ENSG00000264424; TAA
NSADLLKSLCY

SEQ ID NO: 51033 - protein, 11 aa, Homo sapiens
  misc_feature: Table A; Target 51033; HLA-A*01:01; MYH4; ENSG00000264424; TAA
NSEVAQWRTKY

SEQ ID NO: 51034 - protein, 8 aa, Homo sapiens
  misc_feature: Table A; Target 51034; HLA-B*15:01; MYH4; ENSG00000264424; TAA
NTKRVIQY

SEQ ID NO: 51035 - protein, 8 aa, Homo sapiens
  misc_feature: Table A; Target 51035; HLA-C*16:01; MYH4; ENSG00000264424; TAA
NTKRVIQY

SEQ ID NO: 51036 - protein, 9 aa, Homo sapiens
  misc_feature: Table A; Target 51036; HLA-A*25:01; MYH4; ENSG00000264424; TAA
NTKRVIQYF

SEQ ID NO: 51037 - protein, 9 aa, Homo sapiens
  misc_feature: Table A; Target 51037; HLA-A*33:01; MYH4; ENSG00000264424; TAA
NTKRVIQYF

SEQ ID NO: 51038 - protein, 9 aa, Homo sapiens
  misc_feature: Table A; Target 51038; HLA-B*57:01; MYH4; ENSG00000264424; TAA
NTKRVIQYF

SEQ ID NO: 51039 - protein, 8 aa, Homo sapiens
  misc_feature: Table A; Target 51039; HLA-A*03:02; MYH4; ENSG00000264424; TAA
NTSLINTK

SEQ ID NO: 51040 - protein, 8 aa, Homo sapiens
  misc_feature: Table A; Target 51040; HLA-A*11:01; MYH4; ENSG00000264424; TAA
NTSLINTK

SEQ ID NO: 51041 - protein, 9 aa, Homo sapiens
  misc_feature: Table A; Target 51041; HLA-A*01:01; MYH4; ENSG00000264424; TAA
NTSLINTKK

SEQ ID NO: 51042 - protein, 9 aa, Homo sapiens
  misc_feature: Table A; Target 51042; HLA-A*03:01; MYH4; ENSG00000264424; TAA
NTSLINTKK

SEQ ID NO: 51043 - protein, 9 aa, Homo sapiens
  misc_feature: Table A; Target 51043; HLA-A*03:02; MYH4; ENSG00000264424; TAA
NTSLINTKK

SEQ ID NO: 51044 - protein, 9 aa, Homo sapiens
  misc_feature: Table A; Target 51044; HLA-A*11:01; MYH4; ENSG00000264424; TAA
NTSLINTKK

SEQ ID NO: 51045 - protein, 9 aa, Homo sapiens
  misc_feature: Table A; Target 51045; HLA-A*33:03; MYH4; ENSG00000264424; TAA
NTSLINTKK

SEQ ID NO: 51046 - protein, 9 aa, Homo sapiens
  misc_feature: Table A; Target 51046; HLA-A*68:01; MYH4; ENSG00000264424; TAA
NTSLINTKK

SEQ ID NO: 51047 - protein, 9 aa, Homo sapiens
  misc_feature: Table A; Target 51047; HLA-A*68:02; MYH4; ENSG00000264424; TAA
NTSLINTKK

SEQ ID NO: 51048 - protein, 9 aa, Homo sapiens
  misc_feature: Table A; Target 51048; HLA-C*07:06; MYH4; ENSG00000264424; TAA
NTSLINTKK

SEQ ID NO: 51049 - protein, 9 aa, Homo sapiens
  misc_feature: Table A; Target 51049; HLA-A*33:01; MYH4; ENSG00000264424; TAA
NVEAVKGLR

SEQ ID NO: 51050 - protein, 9 aa, Homo sapiens
  misc_feature: Table A; Target 51050; HLA-A*33:03; MYH4; ENSG00000264424; TAA
NVEAVKGLR

SEQ ID NO: 51051 - protein, 9 aa, Homo sapiens
  misc_feature: Table A; Target 51051; HLA-A*68:01; MYH4; ENSG00000264424; TAA
NVEAVKGLR

SEQ ID NO: 51052 - protein, 9 aa, Homo sapiens
  misc_feature: Table A; Target 51052; HLA-C*07:06; MYH4; ENSG00000264424; TAA
NVEAVKGLR

SEQ ID NO: 51053 - protein, 9 aa, Homo sapiens
  misc_feature: Table A; Target 51053; HLA-B*27:02; MYH4; ENSG00000264424; TAA
PDGTEVADK

SEQ ID NO: 51054 - protein, 9 aa, Homo sapiens
  misc_feature: Table A; Target 51054; HLA-B*27:02; MYH4; ENSG00000264424; TAA
PEGQFIDSK

SEQ ID NO: 51055 - protein, 8 aa, Homo sapiens
  misc_feature: Table A; Target 51055; HLA-B*27:02; MYH4; ENSG00000264424; TAA
PEVVTAYR

SEQ ID NO: 51056 - protein, 9 aa, Homo sapiens
  misc_feature: Table A; Target 51056; HLA-A*23:01; MYH4; ENSG00000264424; TAA
PFDAKTSVF

SEQ ID NO: 51057 - protein, 9 aa, Homo sapiens
  misc_feature: Table A; Target 51057; HLA-A*24:02; MYH4; ENSG00000264424; TAA
PFDAKTSVF

SEQ ID NO: 51058 - protein, 9 aa, Homo sapiens
  misc_feature: Table A; Target 51058; HLA-C*04:01; MYH4; ENSG00000264424; TAA
PFDAKTSVF

SEQ ID NO: 51059 - protein, 9 aa, Homo sapiens
  misc_feature: Table A; Target 51059; HLA-C*07:01; MYH4; ENSG00000264424; TAA
PFDAKTSVF

SEQ ID NO: 51060 - protein, 8 aa, Homo sapiens
  misc_feature: Table A; Target 51060; HLA-C*07:04; MYH4; ENSG00000264424; TAA
PGAMEHEL

SEQ ID NO: 51061 - protein, 9 aa, Homo sapiens
  misc_feature: Table A; Target 51061; HLA-A*02:03; MYH4; ENSG00000264424; TAA
PLNETVVGL

SEQ ID NO: 51062 - protein, 9 aa, Homo sapiens
  misc_feature: Table A; Target 51062; HLA-A*02:04; MYH4; ENSG00000264424; TAA
PLNETVVGL

SEQ ID NO: 51063 - protein, 10 aa, Homo sapiens
  misc_feature: Table A; Target 51063; HLA-A*01:01; MYH4; ENSG00000264424; TAA
PLNETVVGLY

SEQ ID NO: 51064 - protein, 10 aa, Homo sapiens
  misc_feature: Table A; Target 51064; HLA-A*30:02; MYH4; ENSG00000264424; TAA
PLNETVVGLY

SEQ ID NO: 51065 - protein, 11 aa, Homo sapiens
  misc_feature: Table A; Target 51065; HLA-A*03:01; MYH4; ENSG00000264424; TAA
PVYNPEVVTAY

SEQ ID NO: 51066 - protein, 11 aa, Homo sapiens
  misc_feature: Table A; Target 51066; HLA-A*25:01; MYH4; ENSG00000264424; TAA
PVYNPEVVTAY

SEQ ID NO: 51067 - protein, 11 aa, Homo sapiens
  misc_feature: Table A; Target 51067; HLA-A*26:01; MYH4; ENSG00000264424; TAA
PVYNPEVVTAY

SEQ ID NO: 51068 - protein, 11 aa, Homo sapiens
  misc_feature: Table A; Target 51068; HLA-A*29:02; MYH4; ENSG00000264424; TAA
PVYNPEVVTAY

SEQ ID NO: 51069 - protein, 11 aa, Homo sapiens
  misc_feature: Table A; Target 51069; HLA-A*30:02; MYH4; ENSG00000264424; TAA
PVYNPEVVTAY

SEQ ID NO: 51070 - protein, 11 aa, Homo sapiens
  misc_feature: Table A; Target 51070; HLA-A*33:01; MYH4; ENSG00000264424; TAA
PVYNPEVVTAY

SEQ ID NO: 51071 - protein, 11 aa, Homo sapiens
  misc_feature: Table A; Target 51071; HLA-B*15:01; MYH4; ENSG00000264424; TAA
PVYNPEVVTAY

SEQ ID NO: 51072 - protein, 11 aa, Homo sapiens
  misc_feature: Table A; Target 51072; HLA-B*27:02; MYH4; ENSG00000264424; TAA
PVYNPEVVTAY

SEQ ID NO: 51073 - protein, 9 aa, Homo sapiens
  misc_feature: Table A; Target 51073; HLA-A*25:01; MYH4; ENSG00000264424; TAA
QAAEALRNL

SEQ ID NO: 51074 - protein, 9 aa, Homo sapiens
  misc_feature: Table A; Target 51074; HLA-A*32:01; MYH4; ENSG00000264424; TAA
QAAEALRNL

SEQ ID NO: 51075 - protein, 9 aa, Homo sapiens
  misc_feature: Table A; Target 51075; HLA-B*07:02; MYH4; ENSG00000264424; TAA
QAAEALRNL

SEQ ID NO: 51076 - protein, 9 aa, Homo sapiens
  misc_feature: Table A; Target 51076; HLA-B*15:03; MYH4; ENSG00000264424; TAA
QAAEALRNL

SEQ ID NO: 51077 - protein, 9 aa, Homo sapiens
  misc_feature: Table A; Target 51077; HLA-B*27:05; MYH4; ENSG00000264424; TAA
QAAEALRNL

SEQ ID NO: 51078 - protein, 9 aa, Homo sapiens
  misc_feature: Table A; Target 51078; HLA-B*35:03; MYH4; ENSG00000264424; TAA
QAAEALRNL

SEQ ID NO: 51079 - protein, 9 aa, Homo sapiens
  misc_feature: Table A; Target 51079; HLA-B*38:01; MYH4; ENSG00000264424; TAA
QAAEALRNL

SEQ ID NO: 51080 - protein, 9 aa, Homo sapiens
  misc_feature: Table A; Target 51080; HLA-B*40:02; MYH4; ENSG00000264424; TAA
QAAEALRNL

SEQ ID NO: 51081 - protein, 9 aa, Homo sapiens
  misc_feature: Table A; Target 51081; HLA-B*46:01; MYH4; ENSG00000264424; TAA
QAAEALRNL

SEQ ID NO: 51082 - protein, 9 aa, Homo sapiens
  misc_feature: Table A; Target 51082; HLA-B*51:01; MYH4; ENSG00000264424; TAA
QAAEALRNL

SEQ ID NO: 51083 - protein, 9 aa, Homo sapiens
  misc_feature: Table A; Target 51083; HLA-B*58:01; MYH4; ENSG00000264424; TAA
QAAEALRNL

SEQ ID NO: 51084 - protein, 9 aa, Homo sapiens
  misc_feature: Table A; Target 51084; HLA-C*01:02; MYH4; ENSG00000264424; TAA
QAAEALRNL

SEQ ID NO: 51085 - protein, 9 aa, Homo sapiens
  misc_feature: Table A; Target 51085; HLA-C*02:02; MYH4; ENSG00000264424; TAA
QAAEALRNL

SEQ ID NO: 51086 - protein, 9 aa, Homo sapiens
  misc_feature: Table A; Target 51086; HLA-C*03:03; MYH4; ENSG00000264424; TAA
QAAEALRNL

SEQ ID NO: 51087 - protein, 9 aa, Homo sapiens
  misc_feature: Table A; Target 51087; HLA-C*03:04; MYH4; ENSG00000264424; TAA
QAAEALRNL

SEQ ID NO: 51088 - protein, 9 aa, Homo sapiens
  misc_feature: Table A; Target 51088; HLA-C*06:02; MYH4; ENSG00000264424; TAA
QAAEALRNL

SEQ ID NO: 51089 - protein, 9 aa, Homo sapiens
  misc_feature: Table A; Target 51089; HLA-C*07:04; MYH4; ENSG00000264424; TAA
QAAEALRNL

SEQ ID NO: 51090 - protein, 9 aa, Homo sapiens
  misc_feature: Table A; Target 51090; HLA-C*07:06; MYH4; ENSG00000264424; TAA
QAAEALRNL

SEQ ID NO: 51091 - protein, 9 aa, Homo sapiens
  misc_feature: Table A; Target 51091; HLA-C*12:03; MYH4; ENSG00000264424; TAA
QAAEALRNL

SEQ ID NO: 51092 - protein, 9 aa, Homo sapiens
  misc_feature: Table A; Target 51092; HLA-C*16:01; MYH4; ENSG00000264424; TAA
QAAEALRNL

SEQ ID NO: 51093 - protein, 9 aa, Homo sapiens
  misc_feature: Table A; Target 51093; HLA-C*16:02; MYH4; ENSG00000264424; TAA
QAAEALRNL

SEQ ID NO: 51094 - protein, 9 aa, Homo sapiens
  misc_feature: Table A; Target 51094; HLA-C*16:04; MYH4; ENSG00000264424; TAA
QAAEALRNL

SEQ ID NO: 51095 - protein, 10 aa, Homo sapiens
  misc_feature: Table A; Target 51095; HLA-A*31:01; MYH4; ENSG00000264424; TAA
QAAEALRNLR

SEQ ID NO: 51096 - protein, 10 aa, Homo sapiens
  misc_feature: Table A; Target 51096; HLA-A*33:03; MYH4; ENSG00000264424; TAA
QAAEALRNLR

SEQ ID NO: 51097 - protein, 10 aa, Homo sapiens
  misc_feature: Table A; Target 51097; HLA-A*68:01; MYH4; ENSG00000264424; TAA
QAAEALRNLR

SEQ ID NO: 51098 - protein, 10 aa, Homo sapiens
  misc_feature: Table A; Target 51098; HLA-C*07:06; MYH4; ENSG00000264424; TAA
QAAEALRNLR

SEQ ID NO: 51099 - protein, 10 aa, Homo sapiens
  misc_feature: Table A; Target 51099; HLA-C*16:02; MYH4; ENSG00000264424; TAA
QAAEALRNLR

SEQ ID NO: 51100 - protein, 11 aa, Homo sapiens
  misc_feature: Table A; Target 51100; HLA-C*05:01; MYH4; ENSG00000264424; TAA
QAEEAEEQSNV

SEQ ID NO: 51101 - protein, 9 aa, Homo sapiens
  misc_feature: Table A; Target 51101; HLA-B*35:03; MYH4; ENSG00000264424; TAA
QAEPDGTEV

SEQ ID NO: 51102 - protein, 9 aa, Homo sapiens
  misc_feature: Table A; Target 51102; HLA-B*39:01; MYH4; ENSG00000264424; TAA
QAEPDGTEV

SEQ ID NO: 51103 - protein, 9 aa, Homo sapiens
  misc_feature: Table A; Target 51103; HLA-C*05:01; MYH4; ENSG00000264424; TAA
QAEPDGTEV

SEQ ID NO: 51104 - protein, 10 aa, Homo sapiens
  misc_feature: Table A; Target 51104; HLA-B*27:05; MYH4; ENSG00000264424; TAA
QAFTQQIEEL

SEQ ID NO: 51105 - protein, 10 aa, Homo sapiens
  misc_feature: Table A; Target 51105; HLA-B*35:03; MYH4; ENSG00000264424; TAA
QAFTQQIEEL

SEQ ID NO: 51106 - protein, 10 aa, Homo sapiens
  misc_feature: Table A; Target 51106; HLA-B*38:01; MYH4; ENSG00000264424; TAA
QAFTQQIEEL

SEQ ID NO: 51107 - protein, 11 aa, Homo sapiens
  misc_feature: Table A; Target 51107; HLA-B*27:02; MYH4; ENSG00000264424; TAA
QAFTQQIEELK

SEQ ID NO: 51108 - protein, 9 aa, Homo sapiens
  misc_feature: Table A; Target 51108; HLA-A*03:01; MYH4; ENSG00000264424; TAA
QALAIQLQK

SEQ ID NO: 51109 - protein, 9 aa, Homo sapiens
  misc_feature: Table A; Target 51109; HLA-A*03:02; MYH4; ENSG00000264424; TAA
QALAIQLQK

SEQ ID NO: 51110 - protein, 9 aa, Homo sapiens
  misc_feature: Table A; Target 51110; HLA-A*11:01; MYH4; ENSG00000264424; TAA
QALAIQLQK

SEQ ID NO: 51111 - protein, 9 aa, Homo sapiens
  misc_feature: Table A; Target 51111; HLA-A*33:03; MYH4; ENSG00000264424; TAA
QALAIQLQK

SEQ ID NO: 51112 - protein, 9 aa, Homo sapiens
  misc_feature: Table A; Target 51112; HLA-A*68:01; MYH4; ENSG00000264424; TAA
QALAIQLQK

SEQ ID NO: 51113 - protein, 9 aa, Homo sapiens
  misc_feature: Table A; Target 51113; HLA-B*27:02; MYH4; ENSG00000264424; TAA
QALAIQLQK

SEQ ID NO: 51114 - protein, 9 aa, Homo sapiens
  misc_feature: Table A; Target 51114; HLA-C*07:06; MYH4; ENSG00000264424; TAA
QALAIQLQK

SEQ ID NO: 51115 - protein, 8 aa, Homo sapiens
  misc_feature: Table A; Target 51115; HLA-B*37:01; MYH4; ENSG00000264424; TAA
QDDLKEQL

SEQ ID NO: 51116 - protein, 10 aa, Homo sapiens
  misc_feature: Table A; Target 51116; HLA-B*27:02; MYH4; ENSG00000264424; TAA
QDLVDKLQTK

SEQ ID NO: 51117 - protein, 10 aa, Homo sapiens
  misc_feature: Table A; Target 51117; HLA-C*04:01; MYH4; ENSG00000264424; TAA
QDLVDKLQTK

SEQ ID NO: 51118 - protein, 10 aa, Homo sapiens
  misc_feature: Table A; Target 51118; HLA-C*07:01; MYH4; ENSG00000264424; TAA
QDLVDKLQTK

SEQ ID NO: 51119 - protein, 10 aa, Homo sapiens
  misc_feature: Table A; Target 51119; HLA-C*07:02; MYH4; ENSG00000264424; TAA
QDLVDKLQTK

SEQ ID NO: 51120 - protein, 9 aa, Homo sapiens
  misc_feature: Table A; Target 51120; HLA-A*33:01; MYH4; ENSG00000264424; TAA
QDTSAHLER

SEQ ID NO: 51121 - protein, 9 aa, Homo sapiens
  misc_feature: Table A; Target 51121; HLA-A*33:03; MYH4; ENSG00000264424; TAA
QDTSAHLER

SEQ ID NO: 51122 - protein, 9 aa, Homo sapiens
  misc_feature: Table A; Target 51122; HLA-A*68:01; MYH4; ENSG00000264424; TAA
QDTSAHLER

SEQ ID NO: 51123 - protein, 9 aa, Homo sapiens
  misc_feature: Table A; Target 51123; HLA-C*16:02; MYH4; ENSG00000264424; TAA
QDTSAHLER

SEQ ID NO: 51124 - protein, 10 aa, Homo sapiens
  misc_feature: Table A; Target 51124; HLA-B*37:01; MYH4; ENSG00000264424; TAA
QDTSAHLERM

SEQ ID NO: 51125 - protein, 8 aa, Homo sapiens
  misc_feature: Table A; Target 51125; HLA-A*30:01; MYH4; ENSG00000264424; TAA
QEAHQQTL

SEQ ID NO: 51126 - protein, 8 aa, Homo sapiens
  misc_feature: Table A; Target 51126; HLA-B*40:01; MYH4; ENSG00000264424; TAA
QEAHQQTL

SEQ ID NO: 51127 - protein, 11 aa, Homo sapiens
  misc_feature: Table A; Target 51127; HLA-B*40:01; MYH4; ENSG00000264424; TAA
QEAHQQTLDDL

SEQ ID NO: 51128 - protein, 9 aa, Homo sapiens
  misc_feature: Table A; Target 51128; HLA-B*44:03; MYH4; ENSG00000264424; TAA
QEAKAELQR

SEQ ID NO: 51129 - protein, 11 aa, Homo sapiens
  misc_feature: Table A; Target 51129; HLA-A*30:01; MYH4; ENSG00000264424; TAA
QEAKAELQRGM

SEQ ID NO: 51130 - protein, 11 aa, Homo sapiens
  misc_feature: Table A; Target 51130; HLA-B*44:02; MYH4; ENSG00000264424; TAA
QEAKAELQRGM

SEQ ID NO: 51131 - protein, 11 aa, Homo sapiens
  misc_feature: Table A; Target 51131; HLA-B*44:03; MYH4; ENSG00000264424; TAA
QEAKAELQRGM

SEQ ID NO: 51132 - protein, 8 aa, Homo sapiens
  misc_feature: Table A; Target 51132; HLA-A*30:01; MYH4; ENSG00000264424; TAA
QEAPPHIF

SEQ ID NO: 51133 - protein, 8 aa, Homo sapiens
  misc_feature: Table A; Target 51133; HLA-B*18:01; MYH4; ENSG00000264424; TAA
QEAPPHIF

SEQ ID NO: 51134 - protein, 8 aa, Homo sapiens
  misc_feature: Table A; Target 51134; HLA-B*37:01; MYH4; ENSG00000264424; TAA
QEAPPHIF

SEQ ID NO: 51135 - protein, 8 aa, Homo sapiens
  misc_feature: Table A; Target 51135; HLA-B*40:01; MYH4; ENSG00000264424; TAA
QEAPPHIF

SEQ ID NO: 51136 - protein, 8 aa, Homo sapiens
  misc_feature: Table A; Target 51136; HLA-B*44:02; MYH4; ENSG00000264424; TAA
QEAPPHIF

SEQ ID NO: 51137 - protein, 8 aa, Homo sapiens
  misc_feature: Table A; Target 51137; HLA-B*44:03; MYH4; ENSG00000264424; TAA
QEAPPHIF

SEQ ID NO: 51138 - protein, 8 aa, Homo sapiens
  misc_feature: Table A; Target 51138; HLA-B*49:01; MYH4; ENSG00000264424; TAA
QEAPPHIF

SEQ ID NO: 51139 - protein, 8 aa, Homo sapiens
  misc_feature: Table A; Target 51139; HLA-C*16:04; MYH4; ENSG00000264424; TAA
QEAPPHIF

SEQ ID NO: 51140 - protein, 10 aa, Homo sapiens
  misc_feature: Table A; Target 51140; HLA-A*30:01; MYH4; ENSG00000264424; TAA
QEAPPHIFSI

SEQ ID NO: 51141 - protein, 10 aa, Homo sapiens
  misc_feature: Table A; Target 51141; HLA-B*37:01; MYH4; ENSG00000264424; TAA
QEAPPHIFSI

SEQ ID NO: 51142 - protein, 10 aa, Homo sapiens
  misc_feature: Table A; Target 51142; HLA-B*38:01; MYH4; ENSG00000264424; TAA
QEAPPHIFSI

SEQ ID NO: 51143 - protein, 10 aa, Homo sapiens
  misc_feature: Table A; Target 51143; HLA-B*40:01; MYH4; ENSG00000264424; TAA
QEAPPHIFSI

SEQ ID NO: 51144 - protein, 10 aa, Homo sapiens
  misc_feature: Table A; Target 51144; HLA-B*44:02; MYH4; ENSG00000264424; TAA
QEAPPHIFSI

SEQ ID NO: 51145 - protein, 10 aa, Homo sapiens
  misc_feature: Table A; Target 51145; HLA-B*44:03; MYH4; ENSG00000264424; TAA
QEAPPHIFSI

SEQ ID NO: 51146 - protein, 10 aa, Homo sapiens
  misc_feature: Table A; Target 51146; HLA-B*49:01; MYH4; ENSG00000264424; TAA
QEAPPHIFSI

SEQ ID NO: 51147 - protein, 9 aa, Homo sapiens
  misc_feature: Table A; Target 51147; HLA-B*44:03; MYH4; ENSG00000264424; TAA
QEEYKKEGI

SEQ ID NO: 51148 - protein, 10 aa, Homo sapiens
  misc_feature: Table A; Target 51148; HLA-A*30:01; MYH4; ENSG00000264424; TAA
QEISDLTEQI

SEQ ID NO: 51149 - protein, 10 aa, Homo sapiens
  misc_feature: Table A; Target 51149; HLA-B*38:01; MYH4; ENSG00000264424; TAA
QEISDLTEQI

SEQ ID NO: 51150 - protein, 10 aa, Homo sapiens
  misc_feature: Table A; Target 51150; HLA-B*40:01; MYH4; ENSG00000264424; TAA
QEISDLTEQI

SEQ ID NO: 51151 - protein, 10 aa, Homo sapiens
  misc_feature: Table A; Target 51151; HLA-B*44:02; MYH4; ENSG00000264424; TAA
QEISDLTEQI

SEQ ID NO: 51152 - protein, 10 aa, Homo sapiens
  misc_feature: Table A; Target 51152; HLA-B*44:03; MYH4; ENSG00000264424; TAA
QEISDLTEQI

SEQ ID NO: 51153 - protein, 10 aa, Homo sapiens
  misc_feature: Table A; Target 51153; HLA-B*49:01; MYH4; ENSG00000264424; TAA
QEISDLTEQI

SEQ ID NO: 51154 - protein, 10 aa, Homo sapiens
  misc_feature: Table A; Target 51154; HLA-A*30:01; MYH4; ENSG00000264424; TAA
QEKNDLQLQV

SEQ ID NO: 51155 - protein, 10 aa, Homo sapiens
  misc_feature: Table A; Target 51155; HLA-B*49:01; MYH4; ENSG00000264424; TAA
QEKNDLQLQV

SEQ ID NO: 51156 - protein, 10 aa, Homo sapiens
  misc_feature: Table A; Target 51156; HLA-B*49:01; MYH4; ENSG00000264424; TAA
QELLDASERV

SEQ ID NO: 51157 - protein, 9 aa, Homo sapiens
  misc_feature: Table A; Target 51157; HLA-B*08:01; MYH4; ENSG00000264424; TAA
QGILKDTQL

SEQ ID NO: 51158 - protein, 9 aa, Homo sapiens
  misc_feature: Table A; Target 51158; HLA-B*35:03; MYH4; ENSG00000264424; TAA
QGILKDTQL

SEQ ID NO: 51159 - protein, 9 aa, Homo sapiens
  misc_feature: Table A; Target 51159; HLA-B*40:01; MYH4; ENSG00000264424; TAA
QGILKDTQL

SEQ ID NO: 51160 - protein, 9 aa, Homo sapiens
  misc_feature: Table A; Target 51160; HLA-B*27:05; MYH4; ENSG00000264424; TAA
QHEATAAAL

SEQ ID NO: 51161 - protein, 9 aa, Homo sapiens
  misc_feature: Table A; Target 51161; HLA-B*35:03; MYH4; ENSG00000264424; TAA
QHEATAAAL

SEQ ID NO: 51162 - protein, 9 aa, Homo sapiens
  misc_feature: Table A; Target 51162; HLA-B*38:01; MYH4; ENSG00000264424; TAA
QHEATAAAL

SEQ ID NO: 51163 - protein, 9 aa, Homo sapiens
  misc_feature: Table A; Target 51163; HLA-B*39:01; MYH4; ENSG00000264424; TAA
QHEATAAAL

SEQ ID NO: 51164 - protein, 10 aa, Homo sapiens
  misc_feature: Table A; Target 51164; HLA-B*38:01; MYH4; ENSG00000264424; TAA
QHEATAAALR

SEQ ID NO: 51165 - protein, 9 aa, Homo sapiens
  misc_feature: Table A; Target 51165; HLA-B*38:01; MYH4; ENSG00000264424; TAA
QHLGKSNNF

SEQ ID NO: 51166 - protein, 8 aa, Homo sapiens
  misc_feature: Table A; Target 51166; HLA-C*05:01; MYH4; ENSG00000264424; TAA
QIDSLQRV

SEQ ID NO: 51167 - protein, 9 aa, Homo sapiens
  misc_feature: Table A; Target 51167; HLA-A*01:01; MYH4; ENSG00000264424; TAA
QIDSLQRVK

SEQ ID NO: 51168 - protein, 9 aa, Homo sapiens
  misc_feature: Table A; Target 51168; HLA-A*03:01; MYH4; ENSG00000264424; TAA
QIDSLQRVK

SEQ ID NO: 51169 - protein, 9 aa, Homo sapiens
  misc_feature: Table A; Target 51169; HLA-A*03:02; MYH4; ENSG00000264424; TAA
QIDSLQRVK

SEQ ID NO: 51170 - protein, 9 aa, Homo sapiens
  misc_feature: Table A; Target 51170; HLA-A*11:01; MYH4; ENSG00000264424; TAA
QIDSLQRVK

SEQ ID NO: 51171 - protein, 8 aa, Homo sapiens
  misc_feature: Table A; Target 51171; HLA-C*01:02; MYH4; ENSG00000264424; TAA
QIISANPL

SEQ ID NO: 51172 - protein, 9 aa, Homo sapiens
  misc_feature: Table A; Target 51172; HLA-A*02:01; MYH4; ENSG00000264424; TAA
QIISANPLL

SEQ ID NO: 51173 - protein, 9 aa, Homo sapiens
  misc_feature: Table A; Target 51173; HLA-A*02:04; MYH4; ENSG00000264424; TAA
QIISANPLL

SEQ ID NO: 51174 - protein, 9 aa, Homo sapiens
  misc_feature: Table A; Target 51174; HLA-A*02:07; MYH4; ENSG00000264424; TAA
QIISANPLL

SEQ ID NO: 51175 - protein, 9 aa, Homo sapiens
  misc_feature: Table A; Target 51175; HLA-A*23:01; MYH4; ENSG00000264424; TAA
QIISANPLL

SEQ ID NO: 51176 - protein, 9 aa, Homo sapiens
  misc_feature: Table A; Target 51176; HLA-A*24:02; MYH4; ENSG00000264424; TAA
QIISANPLL

SEQ ID NO: 51177 - protein, 9 aa, Homo sapiens
  misc_feature: Table A; Target 51177; HLA-B*07:02; MYH4; ENSG00000264424; TAA
QIISANPLL

SEQ ID NO: 51178 - protein, 9 aa, Homo sapiens
  misc_feature: Table A; Target 51178; HLA-B*27:05; MYH4; ENSG00000264424; TAA
QIISANPLL

SEQ ID NO: 51179 - protein, 9 aa, Homo sapiens
  misc_feature: Table A; Target 51179; HLA-B*35:03; MYH4; ENSG00000264424; TAA
QIISANPLL

SEQ ID NO: 51180 - protein, 9 aa, Homo sapiens
  misc_feature: Table A; Target 51180; HLA-B*38:01; MYH4; ENSG00000264424; TAA
QIISANPLL

SEQ ID NO: 51181 - protein, 9 aa, Homo sapiens
  misc_feature: Table A; Target 51181; HLA-B*58:01; MYH4; ENSG00000264424; TAA
QIISANPLL

SEQ ID NO: 51182 - protein, 9 aa, Homo sapiens
  misc_feature: Table A; Target 51182; HLA-C*03:03; MYH4; ENSG00000264424; TAA
QIISANPLL

SEQ ID NO: 51183 - protein, 9 aa, Homo sapiens
  misc_feature: Table A; Target 51183; HLA-C*03:04; MYH4; ENSG00000264424; TAA
QIISANPLL

SEQ ID NO: 51184 - protein, 11 aa, Homo sapiens
  misc_feature: Table A; Target 51184; HLA-B*54:01; MYH4; ENSG00000264424; TAA
QIISANPLLEA

SEQ ID NO: 51185 - protein, 11 aa, Homo sapiens
  misc_feature: Table A; Target 51185; HLA-B*56:01; MYH4; ENSG00000264424; TAA
QIISANPLLEA

SEQ ID NO: 51186 - protein, 10 aa, Homo sapiens
  misc_feature: Table A; Target 51186; HLA-B*15:03; MYH4; ENSG00000264424; TAA
QKYEETQAEL

SEQ ID NO: 51187 - protein, 10 aa, Homo sapiens
  misc_feature: Table A; Target 51187; HLA-B*39:01; MYH4; ENSG00000264424; TAA
QKYEETQAEL

SEQ ID NO: 51188 - protein, 8 aa, Homo sapiens
  misc_feature: Table A; Target 51188; HLA-C*05:01; MYH4; ENSG00000264424; TAA
QLDEKDAM

SEQ ID NO: 51189 - protein, 9 aa, Homo sapiens
  misc_feature: Table A; Target 51189; HLA-A*02:01; MYH4; ENSG00000264424; TAA
QLDEKDAMV

SEQ ID NO: 51190 - protein, 9 aa, Homo sapiens
  misc_feature: Table A; Target 51190; HLA-A*02:07; MYH4; ENSG00000264424; TAA
QLDEKDAMV

SEQ ID NO: 51191 - protein, 9 aa, Homo sapiens
  misc_feature: Table A; Target 51191; HLA-B*55:01; MYH4; ENSG00000264424; TAA
QLDEKDAMV

SEQ ID NO: 51192 - protein, 9 aa, Homo sapiens
  misc_feature: Table A; Target 51192; HLA-C*05:01; MYH4; ENSG00000264424; TAA
QLDEKDAMV

SEQ ID NO: 51193 - protein, 9 aa, Homo sapiens
  misc_feature: Table A; Target 51193; HLA-C*05:01; MYH4; ENSG00000264424; TAA
QLDHEKSEL

SEQ ID NO: 51194 - protein, 10 aa, Homo sapiens
  misc_feature: Table A; Target 51194; HLA-A*01:01; MYH4; ENSG00000264424; TAA
QLDTKQPRQY

SEQ ID NO: 51195 - protein, 9 aa, Homo sapiens
  misc_feature: Table A; Target 51195; HLA-A*02:03; MYH4; ENSG00000264424; TAA
QLEAKIKEV

SEQ ID NO: 51196 - protein, 9 aa, Homo sapiens
  misc_feature: Table A; Target 51196; HLA-B*55:01; MYH4; ENSG00000264424; TAA
QLEAKIKEV

SEQ ID NO: 51197 - protein, 9 aa, Homo sapiens
  misc_feature: Table A; Target 51197; HLA-C*16:02; MYH4; ENSG00000264424; TAA
QLEAKIKEV

SEQ ID NO: 51198 - protein, 9 aa, Homo sapiens
  misc_feature: Table A; Target 51198; HLA-A*03:02; MYH4; ENSG00000264424; TAA
QLEEETKAK

SEQ ID NO: 51199 - protein, 9 aa, Homo sapiens
  misc_feature: Table A; Target 51199; HLA-A*02:01; MYH4; ENSG00000264424; TAA
QLIKTKIQL

SEQ ID NO: 51200 - protein, 9 aa, Homo sapiens
  misc_feature: Table A; Target 51200; HLA-A*02:04; MYH4; ENSG00000264424; TAA
QLIKTKIQL

SEQ ID NO: 51201 - protein, 9 aa, Homo sapiens
  misc_feature: Table A; Target 51201; HLA-B*08:01; MYH4; ENSG00000264424; TAA
QLIKTKIQL

SEQ ID NO: 51202 - protein, 9 aa, Homo sapiens
  misc_feature: Table A; Target 51202; HLA-A*02:01; MYH4; ENSG00000264424; TAA
QLITRTQAI

SEQ ID NO: 51203 - protein, 9 aa, Homo sapiens
  misc_feature: Table A; Target 51203; HLA-A*02:03; MYH4; ENSG00000264424; TAA
QLITRTQAI

SEQ ID NO: 51204 - protein, 9 aa, Homo sapiens
  misc_feature: Table A; Target 51204; HLA-A*02:04; MYH4; ENSG00000264424; TAA
QLITRTQAI

SEQ ID NO: 51205 - protein, 9 aa, Homo sapiens
  misc_feature: Table A; Target 51205; HLA-A*02:07; MYH4; ENSG00000264424; TAA
QLITRTQAI

SEQ ID NO: 51206 - protein, 9 aa, Homo sapiens
  misc_feature: Table A; Target 51206; HLA-A*23:01; MYH4; ENSG00000264424; TAA
QLITRTQAI

SEQ ID NO: 51207 - protein, 9 aa, Homo sapiens
  misc_feature: Table A; Target 51207; HLA-A*24:02; MYH4; ENSG00000264424; TAA
QLITRTQAI

SEQ ID NO: 51208 - protein, 9 aa, Homo sapiens
  misc_feature: Table A; Target 51208; HLA-A*25:01; MYH4; ENSG00000264424; TAA
QLITRTQAI

SEQ ID NO: 51209 - protein, 9 aa, Homo sapiens
  misc_feature: Table A; Target 51209; HLA-A*26:01; MYH4; ENSG00000264424; TAA
QLITRTQAI

SEQ ID NO: 51210 - protein, 9 aa, Homo sapiens
  misc_feature: Table A; Target 51210; HLA-A*30:01; MYH4; ENSG00000264424; TAA
QLITRTQAI

SEQ ID NO: 51211 - protein, 9 aa, Homo sapiens
  misc_feature: Table A; Target 51211; HLA-A*32:01; MYH4; ENSG00000264424; TAA
QLITRTQAI

SEQ ID NO: 51212 - protein, 9 aa, Homo sapiens
  misc_feature: Table A; Target 51212; HLA-B*08:01; MYH4; ENSG00000264424; TAA
QLITRTQAI

SEQ ID NO: 51213 - protein, 9 aa, Homo sapiens
  misc_feature: Table A; Target 51213; HLA-B*13:02; MYH4; ENSG00000264424; TAA
QLITRTQAI

SEQ ID NO: 51214 - protein, 9 aa, Homo sapiens
  misc_feature: Table A; Target 51214; HLA-B*15:01; MYH4; ENSG00000264424; TAA
QLITRTQAI

SEQ ID NO: 51215 - protein, 9 aa, Homo sapiens
  misc_feature: Table A; Target 51215; HLA-B*37:01; MYH4; ENSG00000264424; TAA
QLITRTQAI

SEQ ID NO: 51216 - protein, 9 aa, Homo sapiens
  misc_feature: Table A; Target 51216; HLA-B*44:02; MYH4; ENSG00000264424; TAA
QLITRTQAI

SEQ ID NO: 51217 - protein, 9 aa, Homo sapiens
  misc_feature: Table A; Target 51217; HLA-B*46:01; MYH4; ENSG00000264424; TAA
QLITRTQAI

SEQ ID NO: 51218 - protein, 9 aa, Homo sapiens
  misc_feature: Table A; Target 51218; HLA-B*55:01; MYH4; ENSG00000264424; TAA
QLITRTQAI

SEQ ID NO: 51219 - protein, 9 aa, Homo sapiens
  misc_feature: Table A; Target 51219; HLA-B*58:01; MYH4; ENSG00000264424; TAA
QLITRTQAI

SEQ ID NO: 51220 - protein, 9 aa, Homo sapiens
  misc_feature: Table A; Target 51220; HLA-C*01:02; MYH4; ENSG00000264424; TAA
QLITRTQAI

SEQ ID NO: 51221 - protein, 9 aa, Homo sapiens
  misc_feature: Table A; Target 51221; HLA-C*07:02; MYH4; ENSG00000264424; TAA
QLITRTQAI

SEQ ID NO: 51222 - protein, 9 aa, Homo sapiens
  misc_feature: Table A; Target 51222; HLA-C*16:02; MYH4; ENSG00000264424; TAA
QLITRTQAI

SEQ ID NO: 51223 - protein, 9 aa, Homo sapiens
  misc_feature: Table A; Target 51223; HLA-A*02:04; MYH4; ENSG00000264424; TAA
QLQKKIKEL

SEQ ID NO: 51224 - protein, 9 aa, Homo sapiens
  misc_feature: Table A; Target 51224; HLA-B*08:01; MYH4; ENSG00000264424; TAA
QLQKKIKEL

SEQ ID NO: 51225 - protein, 11 aa, Homo sapiens
  misc_feature: Table A; Target 51225; HLA-B*27:05; MYH4; ENSG00000264424; TAA
QLQVQAEADAL

SEQ ID NO: 51226 - protein, 9 aa, Homo sapiens
  misc_feature: Table A; Target 51226; HLA-A*03:02; MYH4; ENSG00000264424; TAA
QNTSLINTK

SEQ ID NO: 51227 - protein, 9 aa, Homo sapiens
  misc_feature: Table A; Target 51227; HLA-A*11:01; MYH4; ENSG00000264424; TAA
QNTSLINTK

SEQ ID NO: 51228 - protein, 9 aa, Homo sapiens
  misc_feature: Table A; Target 51228; HLA-A*33:01; MYH4; ENSG00000264424; TAA
QNTSLINTK

SEQ ID NO: 51229 - protein, 9 aa, Homo sapiens
  misc_feature: Table A; Target 51229; HLA-A*33:03; MYH4; ENSG00000264424; TAA
QNTSLINTK

SEQ ID NO: 51230 - protein, 9 aa, Homo sapiens
  misc_feature: Table A; Target 51230; HLA-A*68:01; MYH4; ENSG00000264424; TAA
QNTSLINTK

SEQ ID NO: 51231 - protein, 9 aa, Homo sapiens
  misc_feature: Table A; Target 51231; HLA-B*27:02; MYH4; ENSG00000264424; TAA
QNTSLINTK

SEQ ID NO: 51232 - protein, 9 aa, Homo sapiens
  misc_feature: Table A; Target 51232; HLA-B*27:05; MYH4; ENSG00000264424; TAA
QNTSLINTK

SEQ ID NO: 51233 - protein, 9 aa, Homo sapiens
  misc_feature: Table A; Target 51233; HLA-C*07:06; MYH4; ENSG00000264424; TAA
QNTSLINTK

SEQ ID NO: 51234 - protein, 10 aa, Homo sapiens
  misc_feature: Table A; Target 51234; HLA-B*27:02; MYH4; ENSG00000264424; TAA
QNTSLINTKK

SEQ ID NO: 51235 - protein, 9 aa, Homo sapiens
  misc_feature: Table A; Target 51235; HLA-B*07:02; MYH4; ENSG00000264424; TAA
QPRQYFIGV

SEQ ID NO: 51236 - protein, 9 aa, Homo sapiens
  misc_feature: Table A; Target 51236; HLA-B*54:01; MYH4; ENSG00000264424; TAA
QPRQYFIGV

SEQ ID NO: 51237 - protein, 9 aa, Homo sapiens
  misc_feature: Table A; Target 51237; HLA-B*56:01; MYH4; ENSG00000264424; TAA
QPRQYFIGV

SEQ ID NO: 51238 - protein, 9 aa, Homo sapiens
  misc_feature: Table A; Target 51238; HLA-C*07:02; MYH4; ENSG00000264424; TAA
QPRQYFIGV

SEQ ID NO: 51239 - protein, 10 aa, Homo sapiens
  misc_feature: Table A; Target 51239; HLA-B*07:02; MYH4; ENSG00000264424; TAA
QPRQYFIGVL

SEQ ID NO: 51240 - protein, 11 aa, Homo sapiens
  misc_feature: Table A; Target 51240; HLA-B*38:01; MYH4; ENSG00000264424; TAA
QQEISDLTEQI

SEQ ID NO: 51241 - protein, 9 aa, Homo sapiens
  misc_feature: Table A; Target 51241; HLA-A*31:01; MYH4; ENSG00000264424; TAA
QQLDTKQPR

SEQ ID NO: 51242 - protein, 9 aa, Homo sapiens
  misc_feature: Table A; Target 51242; HLA-A*33:03; MYH4; ENSG00000264424; TAA
QQLDTKQPR

SEQ ID NO: 51243 - protein, 11 aa, Homo sapiens
  misc_feature: Table A; Target 51243; HLA-A*30:02; MYH4; ENSG00000264424; TAA
QQLDTKQPRQY

SEQ ID NO: 51244 - protein, 11 aa, Homo sapiens
  misc_feature: Table A; Target 51244; HLA-A*32:01; MYH4; ENSG00000264424; TAA
QQLDTKQPRQY

SEQ ID NO: 51245 - protein, 11 aa, Homo sapiens
  misc_feature: Table A; Target 51245; HLA-B*15:01; MYH4; ENSG00000264424; TAA
QQLDTKQPRQY

SEQ ID NO: 51246 - protein, 11 aa, Homo sapiens
  misc_feature: Table A; Target 51246; HLA-B*15:03; MYH4; ENSG00000264424; TAA
QQLDTKQPRQY

SEQ ID NO: 51247 - protein, 8 aa, Homo sapiens
  misc_feature: Table A; Target 51247; HLA-B*08:01; MYH4; ENSG00000264424; TAA
QQRLINEL

SEQ ID NO: 51248 - protein, 8 aa, Homo sapiens
  misc_feature: Table A; Target 51248; HLA-B*15:01; MYH4; ENSG00000264424; TAA
QQRLINEL

SEQ ID NO: 51249 - protein, 8 aa, Homo sapiens
  misc_feature: Table A; Target 51249; HLA-B*15:03; MYH4; ENSG00000264424; TAA
QQRLINEL

SEQ ID NO: 51250 - protein, 8 aa, Homo sapiens
  misc_feature: Table A; Target 51250; HLA-B*37:01; MYH4; ENSG00000264424; TAA
QQRLINEL

SEQ ID NO: 51251 - protein, 8 aa, Homo sapiens
  misc_feature: Table A; Target 51251; HLA-C*07:04; MYH4; ENSG00000264424; TAA
QQRLINEL

SEQ ID NO: 51252 - protein, 9 aa, Homo sapiens
  misc_feature: Table A; Target 51252; HLA-B*38:01; MYH4; ENSG00000264424; TAA
QQTLDDLQM

SEQ ID NO: 51253 - protein, 9 aa, Homo sapiens
  misc_feature: Table A; Target 51253; HLA-B*39:01; MYH4; ENSG00000264424; TAA
QQTLDDLQM

SEQ ID NO: 51254 - protein, 10 aa, Homo sapiens
  misc_feature: Table A; Target 51254; HLA-B*38:01; MYH4; ENSG00000264424; TAA
QQVDDLEGSL

SEQ ID NO: 51255 - protein, 10 aa, Homo sapiens
  misc_feature: Table A; Target 51255; HLA-B*39:01; MYH4; ENSG00000264424; TAA
QQVDDLEGSL

SEQ ID NO: 51256 - protein, 10 aa, Homo sapiens
  misc_feature: Table A; Target 51256; HLA-B*39:01; MYH4; ENSG00000264424; TAA
QQVYNAVGAL

SEQ ID NO: 51257 - protein, 10 aa, Homo sapiens
  misc_feature: Table A; Target 51257; HLA-C*07:04; MYH4; ENSG00000264424; TAA
QQVYNAVGAL

SEQ ID NO: 51258 - protein, 11 aa, Homo sapiens
  misc_feature: Table A; Target 51258; HLA-B*27:05; MYH4; ENSG00000264424; TAA
QRLINELSAQK

SEQ ID NO: 51259 - protein, 9 aa, Homo sapiens
  misc_feature: Table A; Target 51259; HLA-B*27:05; MYH4; ENSG00000264424; TAA
QRSDLSREL

SEQ ID NO: 51260 - protein, 9 aa, Homo sapiens
  misc_feature: Table A; Target 51260; HLA-B*38:01; MYH4; ENSG00000264424; TAA
QRSDLSREL

SEQ ID NO: 51261 - protein, 9 aa, Homo sapiens
  misc_feature: Table A; Target 51261; HLA-B*39:01; MYH4; ENSG00000264424; TAA
QRSDLSREL

SEQ ID NO: 51262 - protein, 9 aa, Homo sapiens
  misc_feature: Table A; Target 51262; HLA-C*06:02; MYH4; ENSG00000264424; TAA
QRSDLSREL

SEQ ID NO: 51263 - protein, 9 aa, Homo sapiens
  misc_feature: Table A; Target 51263; HLA-C*16:01; MYH4; ENSG00000264424; TAA
QRSDLSREL

SEQ ID NO: 51264 - protein, 10 aa, Homo sapiens
  misc_feature: Table A; Target 51264; HLA-B*27:02; MYH4; ENSG00000264424; TAA
QRTEELEEAK

SEQ ID NO: 51265 - protein, 9 aa, Homo sapiens
  misc_feature: Table A; Target 51265; HLA-A*23:01; MYH4; ENSG00000264424; TAA
QSNVNLAKF

SEQ ID NO: 51266 - protein, 9 aa, Homo sapiens
  misc_feature: Table A; Target 51266; HLA-A*24:02; MYH4; ENSG00000264424; TAA
QSNVNLAKF

SEQ ID NO: 51267 - protein, 9 aa, Homo sapiens
  misc_feature: Table A; Target 51267; HLA-A*25:01; MYH4; ENSG00000264424; TAA
QSNVNLAKF

SEQ ID NO: 51268 - protein, 9 aa, Homo sapiens
  misc_feature: Table A; Target 51268; HLA-A*26:01; MYH4; ENSG00000264424; TAA
QSNVNLAKF

SEQ ID NO: 51269 - protein, 9 aa, Homo sapiens
  misc_feature: Table A; Target 51269; HLA-A*30:02; MYH4; ENSG00000264424; TAA
QSNVNLAKF

SEQ ID NO: 51270 - protein, 9 aa, Homo sapiens
  misc_feature: Table A; Target 51270; HLA-A*32:01; MYH4; ENSG00000264424; TAA
QSNVNLAKF

SEQ ID NO: 51271 - protein, 9 aa, Homo sapiens
  misc_feature: Table A; Target 51271; HLA-B*15:01; MYH4; ENSG00000264424; TAA
QSNVNLAKF

SEQ ID NO: 51272 - protein, 9 aa, Homo sapiens
  misc_feature: Table A; Target 51272; HLA-B*46:01; MYH4; ENSG00000264424; TAA
QSNVNLAKF

SEQ ID NO: 51273 - protein, 9 aa, Homo sapiens
  misc_feature: Table A; Target 51273; HLA-B*57:01; MYH4; ENSG00000264424; TAA
QSNVNLAKF

SEQ ID NO: 51274 - protein, 9 aa, Homo sapiens
  misc_feature: Table A; Target 51274; HLA-B*58:01; MYH4; ENSG00000264424; TAA
QSNVNLAKF

SEQ ID NO: 51275 - protein, 9 aa, Homo sapiens
  misc_feature: Table A; Target 51275; HLA-C*16:04; MYH4; ENSG00000264424; TAA
QSNVNLAKF

SEQ ID NO: 51276 - protein, 11 aa, Homo sapiens
  misc_feature: Table A; Target 51276; HLA-A*03:02; MYH4; ENSG00000264424; TAA
QTAEAEGGGGK

SEQ ID NO: 51277 - protein, 11 aa, Homo sapiens
  misc_feature: Table A; Target 51277; HLA-A*11:01; MYH4; ENSG00000264424; TAA
QTAEAEGGGGK

SEQ ID NO: 51278 - protein, 11 aa, Homo sapiens
  misc_feature: Table A; Target 51278; HLA-A*68:01; MYH4; ENSG00000264424; TAA
QTAEAEGGGGK

SEQ ID NO: 51279 - protein, 11 aa, Homo sapiens
  misc_feature: Table A; Target 51279; HLA-B*27:02; MYH4; ENSG00000264424; TAA
QTAEAEGGGGK

SEQ ID NO: 51280 - protein, 11 aa, Homo sapiens
  misc_feature: Table A; Target 51280; HLA-C*07:06; MYH4; ENSG00000264424; TAA
QTAEAEGGGGK

SEQ ID NO: 51281 - protein, 11 aa, Homo sapiens
  misc_feature: Table A; Target 51281; HLA-A*01:01; MYH4; ENSG00000264424; TAA
QTEEDRKNILR

SEQ ID NO: 51282 - protein, 9 aa, Homo sapiens
  misc_feature: Table A; Target 51282; HLA-A*31:01; MYH4; ENSG00000264424; TAA
QTKVKAYKR

SEQ ID NO: 51283 - protein, 9 aa, Homo sapiens
  misc_feature: Table A; Target 51283; HLA-A*33:01; MYH4; ENSG00000264424; TAA
QTKVKAYKR

SEQ ID NO: 51284 - protein, 9 aa, Homo sapiens
  misc_feature: Table A; Target 51284; HLA-A*33:03; MYH4; ENSG00000264424; TAA
QTKVKAYKR

SEQ ID NO: 51285 - protein, 9 aa, Homo sapiens
  misc_feature: Table A; Target 51285; HLA-A*31:01; MYH4; ENSG00000264424; TAA
QTVKDLQLR

SEQ ID NO: 51286 - protein, 9 aa, Homo sapiens
  misc_feature: Table A; Target 51286; HLA-A*33:03; MYH4; ENSG00000264424; TAA
QTVKDLQLR

SEQ ID NO: 51287 - protein, 9 aa, Homo sapiens
  misc_feature: Table A; Target 51287; HLA-A*68:01; MYH4; ENSG00000264424; TAA
QTVKDLQLR

SEQ ID NO: 51288 - protein, 9 aa, Homo sapiens
  misc_feature: Table A; Target 51288; HLA-C*07:06; MYH4; ENSG00000264424; TAA
QTVKDLQLR

SEQ ID NO: 51289 - protein, 9 aa, Homo sapiens
  misc_feature: Table A; Target 51289; HLA-A*68:02; MYH4; ENSG00000264424; TAA
QTVQQVYNA

SEQ ID NO: 51290 - protein, 9 aa, Homo sapiens
  misc_feature: Table A; Target 51290; HLA-B*54:01; MYH4; ENSG00000264424; TAA
QTVQQVYNA

SEQ ID NO: 51291 - protein, 9 aa, Homo sapiens
  misc_feature: Table A; Target 51291; HLA-B*56:01; MYH4; ENSG00000264424; TAA
QTVQQVYNA

SEQ ID NO: 51292 - protein, 10 aa, Homo sapiens
  misc_feature: Table A; Target 51292; HLA-A*68:01; MYH4; ENSG00000264424; TAA
QTVQQVYNAV

SEQ ID NO: 51293 - protein, 10 aa, Homo sapiens
  misc_feature: Table A; Target 51293; HLA-A*68:02; MYH4; ENSG00000264424; TAA
QTVQQVYNAV

SEQ ID NO: 51294 - protein, 11 aa, Homo sapiens
  misc_feature: Table A; Target 51294; HLA-A*68:02; MYH4; ENSG00000264424; TAA
QTVSALFRENL

SEQ ID NO: 51295 - protein, 9 aa, Homo sapiens
  misc_feature: Table A; Target 51295; HLA-A*02:07; MYH4; ENSG00000264424; TAA
QVDDLEGSL

SEQ ID NO: 51296 - protein, 9 aa, Homo sapiens
  misc_feature: Table A; Target 51296; HLA-B*38:01; MYH4; ENSG00000264424; TAA
QVDDLEGSL

SEQ ID NO: 51297 - protein, 9 aa, Homo sapiens
  misc_feature: Table A; Target 51297; HLA-B*39:01; MYH4; ENSG00000264424; TAA
QVDDLEGSL

SEQ ID NO: 51298 - protein, 9 aa, Homo sapiens
  misc_feature: Table A; Target 51298; HLA-C*05:01; MYH4; ENSG00000264424; TAA
QVDDLEGSL

SEQ ID NO: 51299 - protein, 9 aa, Homo sapiens
  misc_feature: Table A; Target 51299; HLA-A*03:01; MYH4; ENSG00000264424; TAA
QVFSMNPPK

SEQ ID NO: 51300 - protein, 9 aa, Homo sapiens
  misc_feature: Table A; Target 51300; HLA-A*03:02; MYH4; ENSG00000264424; TAA
QVFSMNPPK

SEQ ID NO: 51301 - protein, 9 aa, Homo sapiens
  misc_feature: Table A; Target 51301; HLA-A*11:01; MYH4; ENSG00000264424; TAA
QVFSMNPPK

SEQ ID NO: 51302 - protein, 9 aa, Homo sapiens
  misc_feature: Table A; Target 51302; HLA-A*31:01; MYH4; ENSG00000264424; TAA
QVFSMNPPK

SEQ ID NO: 51303 - protein, 9 aa, Homo sapiens
  misc_feature: Table A; Target 51303; HLA-A*68:01; MYH4; ENSG00000264424; TAA
QVFSMNPPK

SEQ ID NO: 51304 - protein, 9 aa, Homo sapiens
  misc_feature: Table A; Target 51304; HLA-B*27:05; MYH4; ENSG00000264424; TAA
QVFSMNPPK

SEQ ID NO: 51305 - protein, 9 aa, Homo sapiens
  misc_feature: Table A; Target 51305; HLA-C*06:02; MYH4; ENSG00000264424; TAA
QVFSMNPPK

SEQ ID NO: 51306 - protein, 9 aa, Homo sapiens
  misc_feature: Table A; Target 51306; HLA-C*07:06; MYH4; ENSG00000264424; TAA
QVFSMNPPK

SEQ ID NO: 51307 - protein, 10 aa, Homo sapiens
  misc_feature: Table A; Target 51307; HLA-A*25:01; MYH4; ENSG00000264424; TAA
QVFSMNPPKY

SEQ ID NO: 51308 - protein, 10 aa, Homo sapiens
  misc_feature: Table A; Target 51308; HLA-A*26:01; MYH4; ENSG00000264424; TAA
QVFSMNPPKY

SEQ ID NO: 51309 - protein, 10 aa, Homo sapiens
  misc_feature: Table A; Target 51309; HLA-A*29:02; MYH4; ENSG00000264424; TAA
QVFSMNPPKY

SEQ ID NO: 51310 - protein, 10 aa, Homo sapiens
  misc_feature: Table A; Target 51310; HLA-A*30:02; MYH4; ENSG00000264424; TAA
QVFSMNPPKY

SEQ ID NO: 51311 - protein, 10 aa, Homo sapiens
  misc_feature: Table A; Target 51311; HLA-A*32:01; MYH4; ENSG00000264424; TAA
QVFSMNPPKY

SEQ ID NO: 51312 - protein, 10 aa, Homo sapiens
  misc_feature: Table A; Target 51312; HLA-B*15:01; MYH4; ENSG00000264424; TAA
QVFSMNPPKY

SEQ ID NO: 51313 - protein, 10 aa, Homo sapiens
  misc_feature: Table A; Target 51313; HLA-B*44:03; MYH4; ENSG00000264424; TAA
QVFSMNPPKY

SEQ ID NO: 51314 - protein, 10 aa, Homo sapiens
  misc_feature: Table A; Target 51314; HLA-B*58:01; MYH4; ENSG00000264424; TAA
QVFSMNPPKY

SEQ ID NO: 51315 - protein, 10 aa, Homo sapiens
  misc_feature: Table A; Target 51315; HLA-C*12:03; MYH4; ENSG00000264424; TAA
QVFSMNPPKY

SEQ ID NO: 51316 - protein, 10 aa, Homo sapiens
  misc_feature: Table A; Target 51316; HLA-C*16:04; MYH4; ENSG00000264424; TAA
QVFSMNPPKY

SEQ ID NO: 51317 - protein, 9 aa, Homo sapiens
  misc_feature: Table A; Target 51317; HLA-A*03:02; MYH4; ENSG00000264424; TAA
QVKSEIDRK

SEQ ID NO: 51318 - protein, 9 aa, Homo sapiens
  misc_feature: Table A; Target 51318; HLA-A*33:03; MYH4; ENSG00000264424; TAA
QVKSEIDRK

SEQ ID NO: 51319 - protein, 8 aa, Homo sapiens
  misc_feature: Table A; Target 51319; HLA-A*03:01; MYH4; ENSG00000264424; TAA
QVNKLRVK

SEQ ID NO: 51320 - protein, 9 aa, Homo sapiens
  misc_feature: Table A; Target 51320; HLA-B*27:05; MYH4; ENSG00000264424; TAA
QVQAEADAL

SEQ ID NO: 51321 - protein, 9 aa, Homo sapiens
  misc_feature: Table A; Target 51321; HLA-B*35:03; MYH4; ENSG00000264424; TAA
QVQAEADAL

SEQ ID NO: 51322 - protein, 9 aa, Homo sapiens
  misc_feature: Table A; Target 51322; HLA-B*38:01; MYH4; ENSG00000264424; TAA
QVQAEADAL

SEQ ID NO: 51323 - protein, 9 aa, Homo sapiens
  misc_feature: Table A; Target 51323; HLA-B*39:01; MYH4; ENSG00000264424; TAA
QVQAEADAL

SEQ ID NO: 51324 - protein, 9 aa, Homo sapiens
  misc_feature: Table A; Target 51324; HLA-C*01:02; MYH4; ENSG00000264424; TAA
QVQAEADAL

SEQ ID NO: 51325 - protein, 9 aa, Homo sapiens
  misc_feature: Table A; Target 51325; HLA-A*02:03; MYH4; ENSG00000264424; TAA
QVYNAVGAL

SEQ ID NO: 51326 - protein, 9 aa, Homo sapiens
  misc_feature: Table A; Target 51326; HLA-A*03:01; MYH4; ENSG00000264424; TAA
QVYNAVGAL

SEQ ID NO: 51327 - protein, 9 aa, Homo sapiens
  misc_feature: Table A; Target 51327; HLA-A*03:02; MYH4; ENSG00000264424; TAA
QVYNAVGAL

SEQ ID NO: 51328 - protein, 9 aa, Homo sapiens
  misc_feature: Table A; Target 51328; HLA-A*11:01; MYH4; ENSG00000264424; TAA
QVYNAVGAL

SEQ ID NO: 51329 - protein, 9 aa, Homo sapiens
  misc_feature: Table A; Target 51329; HLA-A*25:01; MYH4; ENSG00000264424; TAA
QVYNAVGAL

SEQ ID NO: 51330 - protein, 9 aa, Homo sapiens
  misc_feature: Table A; Target 51330; HLA-A*26:01; MYH4; ENSG00000264424; TAA
QVYNAVGAL

SEQ ID NO: 51331 - protein, 9 aa, Homo sapiens
  misc_feature: Table A; Target 51331; HLA-A*32:01; MYH4; ENSG00000264424; TAA
QVYNAVGAL

SEQ ID NO: 51332 - protein, 9 aa, Homo sapiens
  misc_feature: Table A; Target 51332; HLA-A*68:01; MYH4; ENSG00000264424; TAA
QVYNAVGAL

SEQ ID NO: 51333 - protein, 9 aa, Homo sapiens
  misc_feature: Table A; Target 51333; HLA-A*68:02; MYH4; ENSG00000264424; TAA
QVYNAVGAL

SEQ ID NO: 51334 - protein, 9 aa, Homo sapiens
  misc_feature: Table A; Target 51334; HLA-B*07:02; MYH4; ENSG00000264424; TAA
QVYNAVGAL

SEQ ID NO: 51335 - protein, 9 aa, Homo sapiens
  misc_feature: Table A; Target 51335; HLA-B*15:01; MYH4; ENSG00000264424; TAA
QVYNAVGAL

SEQ ID NO: 51336 - protein, 9 aa, Homo sapiens
  misc_feature: Table A; Target 51336; HLA-B*15:03; MYH4; ENSG00000264424; TAA
QVYNAVGAL

SEQ ID NO: 51337 - protein, 9 aa, Homo sapiens
  misc_feature: Table A; Target 51337; HLA-B*27:05; MYH4; ENSG00000264424; TAA
QVYNAVGAL

SEQ ID NO: 51338 - protein, 9 aa, Homo sapiens
  misc_feature: Table A; Target 51338; HLA-B*35:01; MYH4; ENSG00000264424; TAA
QVYNAVGAL

SEQ ID NO: 51339 - protein, 9 aa, Homo sapiens
  misc_feature: Table A; Target 51339; HLA-B*35:03; MYH4; ENSG00000264424; TAA
QVYNAVGAL

SEQ ID NO: 51340 - protein, 9 aa, Homo sapiens
  misc_feature: Table A; Target 51340; HLA-B*39:01; MYH4; ENSG00000264424; TAA
QVYNAVGAL

SEQ ID NO: 51341 - protein, 9 aa, Homo sapiens
  misc_feature: Table A; Target 51341; HLA-B*40:02; MYH4; ENSG00000264424; TAA
QVYNAVGAL

SEQ ID NO: 51342 - protein, 9 aa, Homo sapiens
  misc_feature: Table A; Target 51342; HLA-B*46:01; MYH4; ENSG00000264424; TAA
QVYNAVGAL

SEQ ID NO: 51343 - protein, 9 aa, Homo sapiens
  misc_feature: Table A; Target 51343; HLA-C*01:02; MYH4; ENSG00000264424; TAA
QVYNAVGAL

SEQ ID NO: 51344 - protein, 9 aa, Homo sapiens
  misc_feature: Table A; Target 51344; HLA-C*02:02; MYH4; ENSG00000264424; TAA
QVYNAVGAL

SEQ ID NO: 51345 - protein, 9 aa, Homo sapiens
  misc_feature: Table A; Target 51345; HLA-C*03:03; MYH4; ENSG00000264424; TAA
QVYNAVGAL

SEQ ID NO: 51346 - protein, 9 aa, Homo sapiens
  misc_feature: Table A; Target 51346; HLA-C*03:04; MYH4; ENSG00000264424; TAA
QVYNAVGAL

SEQ ID NO: 51347 - protein, 9 aa, Homo sapiens
  misc_feature: Table A; Target 51347; HLA-C*05:01; MYH4; ENSG00000264424; TAA
QVYNAVGAL

SEQ ID NO: 51348 - protein, 9 aa, Homo sapiens
  misc_feature: Table A; Target 51348; HLA-C*06:02; MYH4; ENSG00000264424; TAA
QVYNAVGAL

SEQ ID NO: 51349 - protein, 9 aa, Homo sapiens
  misc_feature: Table A; Target 51349; HLA-C*07:02; MYH4; ENSG00000264424; TAA
QVYNAVGAL

SEQ ID NO: 51350 - protein, 9 aa, Homo sapiens
  misc_feature: Table A; Target 51350; HLA-C*07:04; MYH4; ENSG00000264424; TAA
QVYNAVGAL

SEQ ID NO: 51351 - protein, 9 aa, Homo sapiens
  misc_feature: Table A; Target 51351; HLA-C*07:06; MYH4; ENSG00000264424; TAA
QVYNAVGAL

SEQ ID NO: 51352 - protein, 9 aa, Homo sapiens
  misc_feature: Table A; Target 51352; HLA-C*14:02; MYH4; ENSG00000264424; TAA
QVYNAVGAL

SEQ ID NO: 51353 - protein, 10 aa, Homo sapiens
  misc_feature: Table A; Target 51353; HLA-B*56:01; MYH4; ENSG00000264424; TAA
QVYNAVGALA

SEQ ID NO: 51354 - protein, 11 aa, Homo sapiens
  misc_feature: Table A; Target 51354; HLA-A*01:01; MYH4; ENSG00000264424; TAA
QVYNAVGALAK

SEQ ID NO: 51355 - protein, 11 aa, Homo sapiens
  misc_feature: Table A; Target 51355; HLA-A*03:01; MYH4; ENSG00000264424; TAA
QVYNAVGALAK

SEQ ID NO: 51356 - protein, 11 aa, Homo sapiens
  misc_feature: Table A; Target 51356; HLA-A*03:02; MYH4; ENSG00000264424; TAA
QVYNAVGALAK

SEQ ID NO: 51357 - protein, 11 aa, Homo sapiens
  misc_feature: Table A; Target 51357; HLA-A*11:01; MYH4; ENSG00000264424; TAA
QVYNAVGALAK

SEQ ID NO: 51358 - protein, 11 aa, Homo sapiens
  misc_feature: Table A; Target 51358; HLA-A*31:01; MYH4; ENSG00000264424; TAA
QVYNAVGALAK

SEQ ID NO: 51359 - protein, 11 aa, Homo sapiens
  misc_feature: Table A; Target 51359; HLA-A*33:03; MYH4; ENSG00000264424; TAA
QVYNAVGALAK

SEQ ID NO: 51360 - protein, 11 aa, Homo sapiens
  misc_feature: Table A; Target 51360; HLA-A*68:01; MYH4; ENSG00000264424; TAA
QVYNAVGALAK

SEQ ID NO: 51361 - protein, 11 aa, Homo sapiens
  misc_feature: Table A; Target 51361; HLA-B*13:02; MYH4; ENSG00000264424; TAA
QVYNAVGALAK

SEQ ID NO: 51362 - protein, 11 aa, Homo sapiens
  misc_feature: Table A; Target 51362; HLA-B*27:02; MYH4; ENSG00000264424; TAA
QVYNAVGALAK

SEQ ID NO: 51363 - protein, 11 aa, Homo sapiens
  misc_feature: Table A; Target 51363; HLA-B*27:05; MYH4; ENSG00000264424; TAA
QVYNAVGALAK

SEQ ID NO: 51364 - protein, 11 aa, Homo sapiens
  misc_feature: Table A; Target 51364; HLA-C*06:02; MYH4; ENSG00000264424; TAA
QVYNAVGALAK

SEQ ID NO: 51365 - protein, 11 aa, Homo sapiens
  misc_feature: Table A; Target 51365; HLA-C*07:06; MYH4; ENSG00000264424; TAA
QVYNAVGALAK

SEQ ID NO: 51366 - protein, 8 aa, Homo sapiens
  misc_feature: Table A; Target 51366; HLA-C*14:02; MYH4; ENSG00000264424; TAA
QYFATIAV

SEQ ID NO: 51367 - protein, 9 aa, Homo sapiens
  misc_feature: Table A; Target 51367; HLA-A*23:01; MYH4; ENSG00000264424; TAA
QYFIGVLDI

SEQ ID NO: 51368 - protein, 9 aa, Homo sapiens
  misc_feature: Table A; Target 51368; HLA-A*24:02; MYH4; ENSG00000264424; TAA
QYFIGVLDI

SEQ ID NO: 51369 - protein, 9 aa, Homo sapiens
  misc_feature: Table A; Target 51369; HLA-B*13:02; MYH4; ENSG00000264424; TAA
QYFIGVLDI

SEQ ID NO: 51370 - protein, 9 aa, Homo sapiens
  misc_feature: Table A; Target 51370; HLA-C*05:01; MYH4; ENSG00000264424; TAA
RADIAESQV

SEQ ID NO: 51371 - protein, 11 aa, Homo sapiens
  misc_feature: Table A; Target 51371; HLA-A*03:02; MYH4; ENSG00000264424; TAA
RADIAESQVNK

SEQ ID NO: 51372 - protein, 11 aa, Homo sapiens
  misc_feature: Table A; Target 51372; HLA-A*11:01; MYH4; ENSG00000264424; TAA
RADIAESQVNK

SEQ ID NO: 51373 - protein, 11 aa, Homo sapiens
  misc_feature: Table A; Target 51373; HLA-B*27:02; MYH4; ENSG00000264424; TAA
RADIAESQVNK

SEQ ID NO: 51374 - protein, 9 aa, Homo sapiens
  misc_feature: Table A; Target 51374; HLA-B*57:01; MYH4; ENSG00000264424; TAA
RAFMNVKHW

SEQ ID NO: 51375 - protein, 9 aa, Homo sapiens
  misc_feature: Table A; Target 51375; HLA-B*46:01; MYH4; ENSG00000264424; TAA
RANLMQAEV

SEQ ID NO: 51376 - protein, 9 aa, Homo sapiens
  misc_feature: Table A; Target 51376; HLA-B*56:01; MYH4; ENSG00000264424; TAA
RANLMQAEV

SEQ ID NO: 51377 - protein, 9 aa, Homo sapiens
  misc_feature: Table A; Target 51377; HLA-B*58:01; MYH4; ENSG00000264424; TAA
RANLMQAEV

SEQ ID NO: 51378 - protein, 9 aa, Homo sapiens
  misc_feature: Table A; Target 51378; HLA-C*16:04; MYH4; ENSG00000264424; TAA
RANLMQAEV

SEQ ID NO: 51379 - protein, 8 aa, Homo sapiens
  misc_feature: Table A; Target 51379; HLA-B*37:01; MYH4; ENSG00000264424; TAA
RDEKLAQL

SEQ ID NO: 51380 - protein, 11 aa, Homo sapiens
  misc_feature: Table A; Target 51380; HLA-A*31:01; MYH4; ENSG00000264424; TAA
RDEKLAQLITR

SEQ ID NO: 51381 - protein, 8 aa, Homo sapiens
  misc_feature: Table A; Target 51381; HLA-B*37:01; MYH4; ENSG00000264424; TAA
RDLEESTL

SEQ ID NO: 51382 - protein, 8 aa, Homo sapiens
  misc_feature: Table A; Target 51382; HLA-A*30:01; MYH4; ENSG00000264424; TAA
REAEFQKM

SEQ ID NO: 51383 - protein, 8 aa, Homo sapiens
  misc_feature: Table A; Target 51383; HLA-B*18:01; MYH4; ENSG00000264424; TAA
REAEFQKM

SEQ ID NO: 51384 - protein, 8 aa, Homo sapiens
  misc_feature: Table A; Target 51384; HLA-B*37:01; MYH4; ENSG00000264424; TAA
REAEFQKM

SEQ ID NO: 51385 - protein, 8 aa, Homo sapiens
  misc_feature: Table A; Target 51385; HLA-B*40:01; MYH4; ENSG00000264424; TAA
REAEFQKM

SEQ ID NO: 51386 - protein, 8 aa, Homo sapiens
  misc_feature: Table A; Target 51386; HLA-B*40:02; MYH4; ENSG00000264424; TAA
REAEFQKM

SEQ ID NO: 51387 - protein, 8 aa, Homo sapiens
  misc_feature: Table A; Target 51387; HLA-B*44:02; MYH4; ENSG00000264424; TAA
REAEFQKM

SEQ ID NO: 51388 - protein, 8 aa, Homo sapiens
  misc_feature: Table A; Target 51388; HLA-B*44:03; MYH4; ENSG00000264424; TAA
REAEFQKM

SEQ ID NO: 51389 - protein, 8 aa, Homo sapiens
  misc_feature: Table A; Target 51389; HLA-B*49:01; MYH4; ENSG00000264424; TAA
REAEFQKM

SEQ ID NO: 51390 - protein, 10 aa, Homo sapiens
  misc_feature: Table A; Target 51390; HLA-A*30:01; MYH4; ENSG00000264424; TAA
RELEEISERL

SEQ ID NO: 51391 - protein, 10 aa, Homo sapiens
  misc_feature: Table A; Target 51391; HLA-B*40:01; MYH4; ENSG00000264424; TAA
RELEEISERL

SEQ ID NO: 51392 - protein, 10 aa, Homo sapiens
  misc_feature: Table A; Target 51392; HLA-B*40:02; MYH4; ENSG00000264424; TAA
RELEEISERL

SEQ ID NO: 51393 - protein, 10 aa, Homo sapiens
  misc_feature: Table A; Target 51393; HLA-B*44:02; MYH4; ENSG00000264424; TAA
RELEEISERL

SEQ ID NO: 51394 - protein, 10 aa, Homo sapiens
  misc_feature: Table A; Target 51394; HLA-B*44:03; MYH4; ENSG00000264424; TAA
RELEEISERL

SEQ ID NO: 51395 - protein, 10 aa, Homo sapiens
  misc_feature: Table A; Target 51395; HLA-A*30:01; MYH4; ENSG00000264424; TAA
RENKNLQQEI

SEQ ID NO: 51396 - protein, 10 aa, Homo sapiens
  misc_feature: Table A; Target 51396; HLA-B*44:02; MYH4; ENSG00000264424; TAA
RENKNLQQEI

SEQ ID NO: 51397 - protein, 10 aa, Homo sapiens
  misc_feature: Table A; Target 51397; HLA-B*44:03; MYH4; ENSG00000264424; TAA
RENKNLQQEI

SEQ ID NO: 51398 - protein, 10 aa, Homo sapiens
  misc_feature: Table A; Target 51398; HLA-B*49:01; MYH4; ENSG00000264424; TAA
RENKNLQQEI

SEQ ID NO: 51399 - protein, 8 aa, Homo sapiens
  misc_feature: Table A; Target 51399; HLA-B*37:01; MYH4; ENSG00000264424; TAA
RENLNKLM

SEQ ID NO: 51400 - protein, 8 aa, Homo sapiens
  misc_feature: Table A; Target 51400; HLA-B*37:01; MYH4; ENSG00000264424; TAA
RENQSILI

SEQ ID NO: 51401 - protein, 8 aa, Homo sapiens
  misc_feature: Table A; Target 51401; HLA-B*49:01; MYH4; ENSG00000264424; TAA
RENQSILI

SEQ ID NO: 51402 - protein, 10 aa, Homo sapiens
  misc_feature: Table A; Target 51402; HLA-B*40:02; MYH4; ENSG00000264424; TAA
RENQSILITG

SEQ ID NO: 51403 - protein, 11 aa, Homo sapiens
  misc_feature: Table A; Target 51403; HLA-B*27:02; MYH4; ENSG00000264424; TAA
REQYEEEQEAK

SEQ ID NO: 51404 - protein, 9 aa, Homo sapiens
  misc_feature: Table A; Target 51404; HLA-B*18:01; MYH4; ENSG00000264424; TAA
RESIFCIQY

SEQ ID NO: 51405 - protein, 9 aa, Homo sapiens
  misc_feature: Table A; Target 51405; HLA-B*44:02; MYH4; ENSG00000264424; TAA
RESIFCIQY

SEQ ID NO: 51406 - protein, 9 aa, Homo sapiens
  misc_feature: Table A; Target 51406; HLA-B*44:03; MYH4; ENSG00000264424; TAA
RESIFCIQY

SEQ ID NO: 51407 - protein, 9 aa, Homo sapiens
  misc_feature: Table A; Target 51407; HLA-B*57:01; MYH4; ENSG00000264424; TAA
RGFLMRVEF

SEQ ID NO: 51408 - protein, 9 aa, Homo sapiens
  misc_feature: Table A; Target 51408; HLA-A*03:01; MYH4; ENSG00000264424; TAA
RIHFGATGK

SEQ ID NO: 51409 - protein, 9 aa, Homo sapiens
  misc_feature: Table A; Target 51409; HLA-A*03:02; MYH4; ENSG00000264424; TAA
RIHFGATGK

SEQ ID NO: 51410 - protein, 10 aa, Homo sapiens
  misc_feature: Table A; Target 51410; HLA-A*03:01; MYH4; ENSG00000264424; TAA
RIHFGATGKL

SEQ ID NO: 51411 - protein, 9 aa, Homo sapiens
  misc_feature: Table A; Target 51411; HLA-A*03:01; MYH4; ENSG00000264424; TAA
RINQQLDTK

SEQ ID NO: 51412 - protein, 9 aa, Homo sapiens
  misc_feature: Table A; Target 51412; HLA-A*03:02; MYH4; ENSG00000264424; TAA
RINQQLDTK

SEQ ID NO: 51413 - protein, 9 aa, Homo sapiens
  misc_feature: Table A; Target 51413; HLA-A*11:01; MYH4; ENSG00000264424; TAA
RINQQLDTK

SEQ ID NO: 51414 - protein, 9 aa, Homo sapiens
  misc_feature: Table A; Target 51414; HLA-A*02:01; MYH4; ENSG00000264424; TAA
RIQLELNQV

SEQ ID NO: 51415 - protein, 9 aa, Homo sapiens
  misc_feature: Table A; Target 51415; HLA-A*02:03; MYH4; ENSG00000264424; TAA
RIQLELNQV

SEQ ID NO: 51416 - protein, 9 aa, Homo sapiens
  misc_feature: Table A; Target 51416; HLA-A*02:04; MYH4; ENSG00000264424; TAA
RIQLELNQV

SEQ ID NO: 51417 - protein, 10 aa, Homo sapiens
  misc_feature: Table A; Target 51417; HLA-A*03:02; MYH4; ENSG00000264424; TAA
RIQLELNQVK

SEQ ID NO: 51418 - protein, 8 aa, Homo sapiens
  misc_feature: Table A; Target 51418; HLA-C*05:01; MYH4; ENSG00000264424; TAA
RLDEAEQL

SEQ ID NO: 51419 - protein, 10 aa, Homo sapiens
  misc_feature: Table A; Target 51419; HLA-A*01:01; MYH4; ENSG00000264424; TAA
RLDEAEQLAL

SEQ ID NO: 51420 - protein, 10 aa, Homo sapiens
  misc_feature: Table A; Target 51420; HLA-A*02:07; MYH4; ENSG00000264424; TAA
RLDEAEQLAL

SEQ ID NO: 51421 - protein, 10 aa, Homo sapiens
  misc_feature: Table A; Target 51421; HLA-B*38:01; MYH4; ENSG00000264424; TAA
RLDEAEQLAL

SEQ ID NO: 51422 - protein, 10 aa, Homo sapiens
  misc_feature: Table A; Target 51422; HLA-B*40:01; MYH4; ENSG00000264424; TAA
RLDEAEQLAL

SEQ ID NO: 51423 - protein, 10 aa, Homo sapiens
  misc_feature: Table A; Target 51423; HLA-C*05:01; MYH4; ENSG00000264424; TAA
RLDEAEQLAL

SEQ ID NO: 51424 - protein, 11 aa, Homo sapiens
  misc_feature: Table A; Target 51424; HLA-A*01:01; MYH4; ENSG00000264424; TAA
RLDEAEQLALK

SEQ ID NO: 51425 - protein, 11 aa, Homo sapiens
  misc_feature: Table A; Target 51425; HLA-A*03:01; MYH4; ENSG00000264424; TAA
RLDEAEQLALK

SEQ ID NO: 51426 - protein, 11 aa, Homo sapiens
  misc_feature: Table A; Target 51426; HLA-A*03:02; MYH4; ENSG00000264424; TAA
RLDEAEQLALK

SEQ ID NO: 51427 - protein, 9 aa, Homo sapiens
  misc_feature: Table A; Target 51427; HLA-A*30:02; MYH4; ENSG00000264424; TAA
RLHTESGEF

SEQ ID NO: 51428 - protein, 9 aa, Homo sapiens
  misc_feature: Table A; Target 51428; HLA-A*32:01; MYH4; ENSG00000264424; TAA
RLHTESGEF

SEQ ID NO: 51429 - protein, 9 aa, Homo sapiens
  misc_feature: Table A; Target 51429; HLA-B*15:01; MYH4; ENSG00000264424; TAA
RLHTESGEF

SEQ ID NO: 51430 - protein, 9 aa, Homo sapiens
  misc_feature: Table A; Target 51430; HLA-B*46:01; MYH4; ENSG00000264424; TAA
RLHTESGEF

SEQ ID NO: 51431 - protein, 9 aa, Homo sapiens
  misc_feature: Table A; Target 51431; HLA-B*58:01; MYH4; ENSG00000264424; TAA
RLHTESGEF

SEQ ID NO: 51432 - protein, 11 aa, Homo sapiens
  misc_feature: Table A; Target 51432; HLA-A*31:01; MYH4; ENSG00000264424; TAA
RLHTESGEFSR

SEQ ID NO: 51433 - protein, 10 aa, Homo sapiens
  misc_feature: Table A; Target 51433; HLA-A*03:01; MYH4; ENSG00000264424; TAA
RLINELSAQK

SEQ ID NO: 51434 - protein, 10 aa, Homo sapiens
  misc_feature: Table A; Target 51434; HLA-A*03:02; MYH4; ENSG00000264424; TAA
RLINELSAQK

SEQ ID NO: 51435 - protein, 10 aa, Homo sapiens
  misc_feature: Table A; Target 51435; HLA-A*11:01; MYH4; ENSG00000264424; TAA
RLINELSAQK

SEQ ID NO: 51436 - protein, 10 aa, Homo sapiens
  misc_feature: Table A; Target 51436; HLA-A*30:02; MYH4; ENSG00000264424; TAA
RLINELSAQK

SEQ ID NO: 51437 - protein, 10 aa, Homo sapiens
  misc_feature: Table A; Target 51437; HLA-B*27:02; MYH4; ENSG00000264424; TAA
RLINELSAQK

SEQ ID NO: 51438 - protein, 9 aa, Homo sapiens
  misc_feature: Table A; Target 51438; HLA-A*02:01; MYH4; ENSG00000264424; TAA
RLQDAEEHV

SEQ ID NO: 51439 - protein, 9 aa, Homo sapiens
  misc_feature: Table A; Target 51439; HLA-A*02:01; MYH4; ENSG00000264424; TAA
RLQDLVDKL

SEQ ID NO: 51440 - protein, 9 aa, Homo sapiens
  misc_feature: Table A; Target 51440; HLA-A*02:03; MYH4; ENSG00000264424; TAA
RLQDLVDKL

SEQ ID NO: 51441 - protein, 9 aa, Homo sapiens
  misc_feature: Table A; Target 51441; HLA-A*02:04; MYH4; ENSG00000264424; TAA
RLQDLVDKL

SEQ ID NO: 51442 - protein, 9 aa, Homo sapiens
  misc_feature: Table A; Target 51442; HLA-A*02:07; MYH4; ENSG00000264424; TAA
RLQDLVDKL

SEQ ID NO: 51443 - protein, 9 aa, Homo sapiens
  misc_feature: Table A; Target 51443; HLA-A*03:02; MYH4; ENSG00000264424; TAA
RLQDLVDKL

SEQ ID NO: 51444 - protein, 9 aa, Homo sapiens
  misc_feature: Table A; Target 51444; HLA-B*55:01; MYH4; ENSG00000264424; TAA
RLQDLVDKL

SEQ ID NO: 51445 - protein, 11 aa, Homo sapiens
  misc_feature: Table A; Target 51445; HLA-A*03:01; MYH4; ENSG00000264424; TAA
RMKKNMEQTVK

SEQ ID NO: 51446 - protein, 10 aa, Homo sapiens
  misc_feature: Table A; Target 51446; HLA-B*57:01; MYH4; ENSG00000264424; TAA
RNFDKVLAEW

SEQ ID NO: 51447 - protein, 10 aa, Homo sapiens
  misc_feature: Table A; Target 51447; HLA-B*15:01; MYH4; ENSG00000264424; TAA
RQAAEALRNL

SEQ ID NO: 51448 - protein, 10 aa, Homo sapiens
  misc_feature: Table A; Target 51448; HLA-B*27:05; MYH4; ENSG00000264424; TAA
RQAAEALRNL

SEQ ID NO: 51449 - protein, 10 aa, Homo sapiens
  misc_feature: Table A; Target 51449; HLA-B*58:01; MYH4; ENSG00000264424; TAA
RQAAEALRNL

SEQ ID NO: 51450 - protein, 11 aa, Homo sapiens
  misc_feature: Table A; Target 51450; HLA-A*31:01; MYH4; ENSG00000264424; TAA
RQAAEALRNLR

SEQ ID NO: 51451 - protein, 9 aa, Homo sapiens
  misc_feature: Table A; Target 51451; HLA-B*15:01; MYH4; ENSG00000264424; TAA
RQEAPPHIF

SEQ ID NO: 51452 - protein, 9 aa, Homo sapiens
  misc_feature: Table A; Target 51452; HLA-B*37:01; MYH4; ENSG00000264424; TAA
RQEAPPHIF

SEQ ID NO: 51453 - protein, 9 aa, Homo sapiens
  misc_feature: Table A; Target 51453; HLA-B*38:01; MYH4; ENSG00000264424; TAA
RQEAPPHIF

SEQ ID NO: 51454 - protein, 11 aa, Homo sapiens
  misc_feature: Table A; Target 51454; HLA-A*02:04; MYH4; ENSG00000264424; TAA
RQEAPPHIFSI

SEQ ID NO: 51455 - protein, 10 aa, Homo sapiens
  misc_feature: Table A; Target 51455; HLA-A*02:01; MYH4; ENSG00000264424; TAA
RQLDEKDAMV

SEQ ID NO: 51456 - protein, 10 aa, Homo sapiens
  misc_feature: Table A; Target 51456; HLA-B*13:02; MYH4; ENSG00000264424; TAA
RQYFIGVLDI

SEQ ID NO: 51457 - protein, 9 aa, Homo sapiens
  misc_feature: Table A; Target 51457; HLA-B*38:01; MYH4; ENSG00000264424; TAA
RRDLEESTL

SEQ ID NO: 51458 - protein, 9 aa, Homo sapiens
  misc_feature: Table A; Target 51458; HLA-A*03:01; MYH4; ENSG00000264424; TAA
RSLSTELFK

SEQ ID NO: 51459 - protein, 9 aa, Homo sapiens
  misc_feature: Table A; Target 51459; HLA-A*03:02; MYH4; ENSG00000264424; TAA
RSLSTELFK

SEQ ID NO: 51460 - protein, 9 aa, Homo sapiens
  misc_feature: Table A; Target 51460; HLA-A*11:01; MYH4; ENSG00000264424; TAA
RSLSTELFK

SEQ ID NO: 51461 - protein, 10 aa, Homo sapiens
  misc_feature: Table A; Target 51461; HLA-A*02:04; MYH4; ENSG00000264424; TAA
RSLSTELFKV

SEQ ID NO: 51462 - protein, 10 aa, Homo sapiens
  misc_feature: Table A; Target 51462; HLA-A*03:01; MYH4; ENSG00000264424; TAA
RSLSTELFKV

SEQ ID NO: 51463 - protein, 11 aa, Homo sapiens
  misc_feature: Table A; Target 51463; HLA-A*03:01; MYH4; ENSG00000264424; TAA
RSLSTELFKVK

SEQ ID NO: 51464 - protein, 11 aa, Homo sapiens
  misc_feature: Table A; Target 51464; HLA-A*03:02; MYH4; ENSG00000264424; TAA
RSLSTELFKVK

SEQ ID NO: 51465 - protein, 11 aa, Homo sapiens
  misc_feature: Table A; Target 51465; HLA-A*11:01; MYH4; ENSG00000264424; TAA
RSLSTELFKVK

SEQ ID NO: 51466 - protein, 11 aa, Homo sapiens
  misc_feature: Table A; Target 51466; HLA-A*31:01; MYH4; ENSG00000264424; TAA
RSLSTELFKVK

SEQ ID NO: 51467 - protein, 11 aa, Homo sapiens
  misc_feature: Table A; Target 51467; HLA-B*57:01; MYH4; ENSG00000264424; TAA
RSLSTELFKVK

SEQ ID NO: 51468 - protein, 9 aa, Homo sapiens
  misc_feature: Table A; Target 51468; HLA-A*31:01; MYH4; ENSG00000264424; TAA
RSTHPHFVR

SEQ ID NO: 51469 - protein, 9 aa, Homo sapiens
  misc_feature: Table A; Target 51469; HLA-B*57:01; MYH4; ENSG00000264424; TAA
RSTHPHFVR

SEQ ID NO: 51470 - protein, 9 aa, Homo sapiens
  misc_feature: Table A; Target 51470; HLA-B*57:01; MYH4; ENSG00000264424; TAA
RSYHIFYQI

SEQ ID NO: 51471 - protein, 10 aa, Homo sapiens
  misc_feature: Table A; Target 51471; HLA-A*03:02; MYH4; ENSG00000264424; TAA
RTEELEEAKK

SEQ ID NO: 51472 - protein, 10 aa, Homo sapiens
  misc_feature: Table A; Target 51472; HLA-A*11:01; MYH4; ENSG00000264424; TAA
RTEELEEAKK

SEQ ID NO: 51473 - protein, 11 aa, Homo sapiens
  misc_feature: Table A; Target 51473; HLA-A*03:02; MYH4; ENSG00000264424; TAA
RTEELEEAKKK

SEQ ID NO: 51474 - protein, 11 aa, Homo sapiens
  misc_feature: Table A; Target 51474; HLA-A*11:01; MYH4; ENSG00000264424; TAA
RTEELEEAKKK

SEQ ID NO: 51475 - protein, 11 aa, Homo sapiens
  misc_feature: Table A; Target 51475; HLA-A*03:01; MYH4; ENSG00000264424; TAA
RTKYETDAIQR

SEQ ID NO: 51476 - protein, 11 aa, Homo sapiens
  misc_feature: Table A; Target 51476; HLA-A*03:02; MYH4; ENSG00000264424; TAA
RTKYETDAIQR

SEQ ID NO: 51477 - protein, 11 aa, Homo sapiens
  misc_feature: Table A; Target 51477; HLA-A*11:01; MYH4; ENSG00000264424; TAA
RTKYETDAIQR

SEQ ID NO: 51478 - protein, 11 aa, Homo sapiens
  misc_feature: Table A; Target 51478; HLA-A*31:01; MYH4; ENSG00000264424; TAA
RTKYETDAIQR

SEQ ID NO: 51479 - protein, 11 aa, Homo sapiens
  misc_feature: Table A; Target 51479; HLA-A*33:01; MYH4; ENSG00000264424; TAA
RTKYETDAIQR

SEQ ID NO: 51480 - protein, 11 aa, Homo sapiens
  misc_feature: Table A; Target 51480; HLA-A*33:03; MYH4; ENSG00000264424; TAA
RTKYETDAIQR

SEQ ID NO: 51481 - protein, 11 aa, Homo sapiens
  misc_feature: Table A; Target 51481; HLA-A*68:01; MYH4; ENSG00000264424; TAA
RTKYETDAIQR

SEQ ID NO: 51482 - protein, 11 aa, Homo sapiens
  misc_feature: Table A; Target 51482; HLA-B*57:01; MYH4; ENSG00000264424; TAA
RTKYETDAIQR

SEQ ID NO: 51483 - protein, 11 aa, Homo sapiens
  misc_feature: Table A; Target 51483; HLA-A*03:02; MYH4; ENSG00000264424; TAA
RTLEDQLSEIK

SEQ ID NO: 51484 - protein, 11 aa, Homo sapiens
  misc_feature: Table A; Target 51484; HLA-A*11:01; MYH4; ENSG00000264424; TAA
RTLEDQLSEIK

SEQ ID NO: 51485 - protein, 11 aa, Homo sapiens
  misc_feature: Table A; Target 51485; HLA-B*57:01; MYH4; ENSG00000264424; TAA
RTLEDQLSEIK

SEQ ID NO: 51486 - protein, 9 aa, Homo sapiens
  misc_feature: Table A; Target 51486; HLA-B*57:01; MYH4; ENSG00000264424; TAA
RTQAICRGF

SEQ ID NO: 51487 - protein, 9 aa, Homo sapiens
  misc_feature: Table A; Target 51487; HLA-A*02:03; MYH4; ENSG00000264424; TAA
RVIQYFATI

SEQ ID NO: 51488 - protein, 9 aa, Homo sapiens
  misc_feature: Table A; Target 51488; HLA-A*02:04; MYH4; ENSG00000264424; TAA
RVIQYFATI

SEQ ID NO: 51489 - protein, 9 aa, Homo sapiens
  misc_feature: Table A; Target 51489; HLA-A*02:07; MYH4; ENSG00000264424; TAA
RVIQYFATI

SEQ ID NO: 51490 - protein, 9 aa, Homo sapiens
  misc_feature: Table A; Target 51490; HLA-A*24:02; MYH4; ENSG00000264424; TAA
RVIQYFATI

SEQ ID NO: 51491 - protein, 9 aa, Homo sapiens
  misc_feature: Table A; Target 51491; HLA-A*25:01; MYH4; ENSG00000264424; TAA
RVIQYFATI

SEQ ID NO: 51492 - protein, 9 aa, Homo sapiens
  misc_feature: Table A; Target 51492; HLA-A*68:02; MYH4; ENSG00000264424; TAA
RVIQYFATI

SEQ ID NO: 51493 - protein, 9 aa, Homo sapiens
  misc_feature: Table A; Target 51493; HLA-B*57:01; MYH4; ENSG00000264424; TAA
RVIQYFATI

SEQ ID NO: 51494 - protein, 8 aa, Homo sapiens
  misc_feature: Table A; Target 51494; HLA-A*32:01; MYH4; ENSG00000264424; TAA
RVKVGNEF

SEQ ID NO: 51495 - protein, 8 aa, Homo sapiens
  misc_feature: Table A; Target 51495; HLA-B*08:01; MYH4; ENSG00000264424; TAA
RVKVGNEF

SEQ ID NO: 51496 - protein, 8 aa, Homo sapiens
  misc_feature: Table A; Target 51496; HLA-B*46:01; MYH4; ENSG00000264424; TAA
RVKVGNEF

SEQ ID NO: 51497 - protein, 11 aa, Homo sapiens
  misc_feature: Table A; Target 51497; HLA-A*03:01; MYH4; ENSG00000264424; TAA
RVKVGNEFVTK

SEQ ID NO: 51498 - protein, 11 aa, Homo sapiens
  misc_feature: Table A; Target 51498; HLA-A*03:02; MYH4; ENSG00000264424; TAA
RVKVGNEFVTK

SEQ ID NO: 51499 - protein, 11 aa, Homo sapiens
  misc_feature: Table A; Target 51499; HLA-A*11:01; MYH4; ENSG00000264424; TAA
RVKVGNEFVTK

SEQ ID NO: 51500 - protein, 11 aa, Homo sapiens
  misc_feature: Table A; Target 51500; HLA-A*31:01; MYH4; ENSG00000264424; TAA
RVKVGNEFVTK

SEQ ID NO: 51501 - protein, 9 aa, Homo sapiens
  misc_feature: Table A; Target 51501; HLA-B*07:02; MYH4; ENSG00000264424; TAA
RVRELESEV

SEQ ID NO: 51502 - protein, 10 aa, Homo sapiens
  misc_feature: Table A; Target 51502; HLA-A*31:01; MYH4; ENSG00000264424; TAA
RVTFQLKAER

SEQ ID NO: 51503 - protein, 9 aa, Homo sapiens
  misc_feature: Table A; Target 51503; HLA-B*58:01; MYH4; ENSG00000264424; TAA
RVVESMQST

SEQ ID NO: 51504 - protein, 10 aa, Homo sapiens
  misc_feature: Table A; Target 51504; HLA-A*25:01; MYH4; ENSG00000264424; TAA
RVVESMQSTL

SEQ ID NO: 51505 - protein, 10 aa, Homo sapiens
  misc_feature: Table A; Target 51505; HLA-A*30:01; MYH4; ENSG00000264424; TAA
RVVESMQSTL

SEQ ID NO: 51506 - protein, 10 aa, Homo sapiens
  misc_feature: Table A; Target 51506; HLA-B*07:02; MYH4; ENSG00000264424; TAA
RVVESMQSTL

SEQ ID NO: 51507 - protein, 10 aa, Homo sapiens
  misc_feature: Table A; Target 51507; HLA-B*15:01; MYH4; ENSG00000264424; TAA
RVVESMQSTL

SEQ ID NO: 51508 - protein, 10 aa, Homo sapiens
  misc_feature: Table A; Target 51508; HLA-B*27:05; MYH4; ENSG00000264424; TAA
RVVESMQSTL

SEQ ID NO: 51509 - protein, 10 aa, Homo sapiens
  misc_feature: Table A; Target 51509; HLA-B*40:01; MYH4; ENSG00000264424; TAA
RVVESMQSTL

SEQ ID NO: 51510 - protein, 10 aa, Homo sapiens
  misc_feature: Table A; Target 51510; HLA-B*40:02; MYH4; ENSG00000264424; TAA
RVVESMQSTL

SEQ ID NO: 51511 - protein, 10 aa, Homo sapiens
  misc_feature: Table A; Target 51511; HLA-B*58:01; MYH4; ENSG00000264424; TAA
RVVESMQSTL

SEQ ID NO: 51512 - protein, 10 aa, Homo sapiens
  misc_feature: Table A; Target 51512; HLA-C*03:03; MYH4; ENSG00000264424; TAA
RVVESMQSTL

SEQ ID NO: 51513 - protein, 10 aa, Homo sapiens
  misc_feature: Table A; Target 51513; HLA-C*03:04; MYH4; ENSG00000264424; TAA
RVVESMQSTL

SEQ ID NO: 51514 - protein, 10 aa, Homo sapiens
  misc_feature: Table A; Target 51514; HLA-C*07:02; MYH4; ENSG00000264424; TAA
RVVESMQSTL

SEQ ID NO: 51515 - protein, 10 aa, Homo sapiens
  misc_feature: Table A; Target 51515; HLA-A*24:02; MYH4; ENSG00000264424; TAA
RYAAWMIYTY

SEQ ID NO: 51516 - protein, 10 aa, Homo sapiens
  misc_feature: Table A; Target 51516; HLA-A*29:02; MYH4; ENSG00000264424; TAA
RYAAWMIYTY

SEQ ID NO: 51517 - protein, 8 aa, Homo sapiens
  misc_feature: Table A; Target 51517; HLA-C*04:01; MYH4; ENSG00000264424; TAA
SADIETYL

SEQ ID NO: 51518 - protein, 8 aa, Homo sapiens
  misc_feature: Table A; Target 51518; HLA-C*05:01; MYH4; ENSG00000264424; TAA
SADIETYL

SEQ ID NO: 51519 - protein, 9 aa, Homo sapiens
  misc_feature: Table A; Target 51519; HLA-A*02:07; MYH4; ENSG00000264424; TAA
SADIETYLL

SEQ ID NO: 51520 - protein, 9 aa, Homo sapiens
  misc_feature: Table A; Target 51520; HLA-B*35:03; MYH4; ENSG00000264424; TAA
SADIETYLL

SEQ ID NO: 51521 - protein, 9 aa, Homo sapiens
  misc_feature: Table A; Target 51521; HLA-B*38:01; MYH4; ENSG00000264424; TAA
SADIETYLL

SEQ ID NO: 51522 - protein, 9 aa, Homo sapiens
  misc_feature: Table A; Target 51522; HLA-B*40:01; MYH4; ENSG00000264424; TAA
SADIETYLL

SEQ ID NO: 51523 - protein, 9 aa, Homo sapiens
  misc_feature: Table A; Target 51523; HLA-C*04:01; MYH4; ENSG00000264424; TAA
SADIETYLL

SEQ ID NO: 51524 - protein, 9 aa, Homo sapiens
  misc_feature: Table A; Target 51524; HLA-C*05:01; MYH4; ENSG00000264424; TAA
SADIETYLL

SEQ ID NO: 51525 - protein, 11 aa, Homo sapiens
  misc_feature: Table A; Target 51525; HLA-A*11:01; MYH4; ENSG00000264424; TAA
SADIETYLLEK

SEQ ID NO: 51526 - protein, 11 aa, Homo sapiens
  misc_feature: Table A; Target 51526; HLA-B*27:02; MYH4; ENSG00000264424; TAA
SADIETYLLEK

SEQ ID NO: 51527 - protein, 8 aa, Homo sapiens
  misc_feature: Table A; Target 51527; HLA-B*08:01; MYH4; ENSG00000264424; TAA
SADLLKSL

SEQ ID NO: 51528 - protein, 8 aa, Homo sapiens
  misc_feature: Table A; Target 51528; HLA-C*03:04; MYH4; ENSG00000264424; TAA
SADLLKSL

SEQ ID NO: 51529 - protein, 8 aa, Homo sapiens
  misc_feature: Table A; Target 51529; HLA-C*05:01; MYH4; ENSG00000264424; TAA
SADLLKSL

SEQ ID NO: 51530 - protein, 10 aa, Homo sapiens
  misc_feature: Table A; Target 51530; HLA-A*01:01; MYH4; ENSG00000264424; TAA
SADLLKSLCY

SEQ ID NO: 51531 - protein, 8 aa, Homo sapiens
  misc_feature: Table A; Target 51531; HLA-C*03:03; MYH4; ENSG00000264424; TAA
SAETEKEM

SEQ ID NO: 51532 - protein, 8 aa, Homo sapiens
  misc_feature: Table A; Target 51532; HLA-C*05:01; MYH4; ENSG00000264424; TAA
SAETEKEM

SEQ ID NO: 51533 - protein, 8 aa, Homo sapiens
  misc_feature: Table A; Target 51533; HLA-C*16:01; MYH4; ENSG00000264424; TAA
SAETEKEM

SEQ ID NO: 51534 - protein, 8 aa, Homo sapiens
  misc_feature: Table A; Target 51534; HLA-C*16:02; MYH4; ENSG00000264424; TAA
SAETEKEM

SEQ ID NO: 51535 - protein, 8 aa, Homo sapiens
  misc_feature: Table A; Target 51535; HLA-C*05:01; MYH4; ENSG00000264424; TAA
SAIPEGQF

SEQ ID NO: 51536 - protein, 9 aa, Homo sapiens
  misc_feature: Table A; Target 51536; HLA-A*23:01; MYH4; ENSG00000264424; TAA
SAIPEGQFI

SEQ ID NO: 51537 - protein, 9 aa, Homo sapiens
  misc_feature: Table A; Target 51537; HLA-A*25:01; MYH4; ENSG00000264424; TAA
SAIPEGQFI

SEQ ID NO: 51538 - protein, 9 aa, Homo sapiens
  misc_feature: Table A; Target 51538; HLA-B*13:02; MYH4; ENSG00000264424; TAA
SAIPEGQFI

SEQ ID NO: 51539 - protein, 9 aa, Homo sapiens
  misc_feature: Table A; Target 51539; HLA-B*35:03; MYH4; ENSG00000264424; TAA
SAIPEGQFI

SEQ ID NO: 51540 - protein, 9 aa, Homo sapiens
  misc_feature: Table A; Target 51540; HLA-B*38:01; MYH4; ENSG00000264424; TAA
SAIPEGQFI

SEQ ID NO: 51541 - protein, 9 aa, Homo sapiens
  misc_feature: Table A; Target 51541; HLA-B*39:01; MYH4; ENSG00000264424; TAA
SAIPEGQFI

SEQ ID NO: 51542 - protein, 9 aa, Homo sapiens
  misc_feature: Table A; Target 51542; HLA-B*44:02; MYH4; ENSG00000264424; TAA
SAIPEGQFI

SEQ ID NO: 51543 - protein, 9 aa, Homo sapiens
  misc_feature: Table A; Target 51543; HLA-B*44:03; MYH4; ENSG00000264424; TAA
SAIPEGQFI

SEQ ID NO: 51544 - protein, 9 aa, Homo sapiens
  misc_feature: Table A; Target 51544; HLA-B*49:01; MYH4; ENSG00000264424; TAA
SAIPEGQFI

SEQ ID NO: 51545 - protein, 9 aa, Homo sapiens
  misc_feature: Table A; Target 51545; HLA-B*51:01; MYH4; ENSG00000264424; TAA
SAIPEGQFI

SEQ ID NO: 51546 - protein, 9 aa, Homo sapiens
  misc_feature: Table A; Target 51546; HLA-B*58:01; MYH4; ENSG00000264424; TAA
SAIPEGQFI

SEQ ID NO: 51547 - protein, 9 aa, Homo sapiens
  misc_feature: Table A; Target 51547; HLA-C*02:02; MYH4; ENSG00000264424; TAA
SAIPEGQFI

SEQ ID NO: 51548 - protein, 9 aa, Homo sapiens
  misc_feature: Table A; Target 51548; HLA-C*03:03; MYH4; ENSG00000264424; TAA
SAIPEGQFI

SEQ ID NO: 51549 - protein, 9 aa, Homo sapiens
  misc_feature: Table A; Target 51549; HLA-C*03:04; MYH4; ENSG00000264424; TAA
SAIPEGQFI

SEQ ID NO: 51550 - protein, 9 aa, Homo sapiens
  misc_feature: Table A; Target 51550; HLA-C*05:01; MYH4; ENSG00000264424; TAA
SAIPEGQFI

SEQ ID NO: 51551 - protein, 9 aa, Homo sapiens
  misc_feature: Table A; Target 51551; HLA-C*16:02; MYH4; ENSG00000264424; TAA
SAIPEGQFI

SEQ ID NO: 51552 - protein, 9 aa, Homo sapiens
  misc_feature: Table A; Target 51552; HLA-C*16:04; MYH4; ENSG00000264424; TAA
SAIPEGQFI

SEQ ID NO: 51553 - protein, 8 aa, Homo sapiens
  misc_feature: Table A; Target 51553; HLA-B*08:01; MYH4; ENSG00000264424; TAA
SALFRENL

SEQ ID NO: 51554 - protein, 8 aa, Homo sapiens
  misc_feature: Table A; Target 51554; HLA-C*16:01; MYH4; ENSG00000264424; TAA
SALFRENL

SEQ ID NO: 51555 - protein, 8 aa, Homo sapiens
  misc_feature: Table A; Target 51555; HLA-B*08:01; MYH4; ENSG00000264424; TAA
SAMKTLAF

SEQ ID NO: 51556 - protein, 8 aa, Homo sapiens
  misc_feature: Table A; Target 51556; HLA-B*15:01; MYH4; ENSG00000264424; TAA
SAMKTLAF

SEQ ID NO: 51557 - protein, 8 aa, Homo sapiens
  misc_feature: Table A; Target 51557; HLA-B*15:03; MYH4; ENSG00000264424; TAA
SAMKTLAF

SEQ ID NO: 51558 - protein, 8 aa, Homo sapiens
  misc_feature: Table A; Target 51558; HLA-B*37:01; MYH4; ENSG00000264424; TAA
SAMKTLAF

SEQ ID NO: 51559 - protein, 8 aa, Homo sapiens
  misc_feature: Table A; Target 51559; HLA-B*46:01; MYH4; ENSG00000264424; TAA
SAMKTLAF

SEQ ID NO: 51560 - protein, 8 aa, Homo sapiens
  misc_feature: Table A; Target 51560; HLA-B*58:01; MYH4; ENSG00000264424; TAA
SAMKTLAF

SEQ ID NO: 51561 - protein, 8 aa, Homo sapiens
  misc_feature: Table A; Target 51561; HLA-C*03:03; MYH4; ENSG00000264424; TAA
SAMKTLAF

SEQ ID NO: 51562 - protein, 8 aa, Homo sapiens
  misc_feature: Table A; Target 51562; HLA-C*03:04; MYH4; ENSG00000264424; TAA
SAMKTLAF

SEQ ID NO: 51563 - protein, 8 aa, Homo sapiens
  misc_feature: Table A; Target 51563; HLA-C*16:01; MYH4; ENSG00000264424; TAA
SAMKTLAF

SEQ ID NO: 51564 - protein, 9 aa, Homo sapiens
  misc_feature: Table A; Target 51564; HLA-A*02:04; MYH4; ENSG00000264424; TAA
SAMKTLAFL

SEQ ID NO: 51565 - protein, 10 aa, Homo sapiens
  misc_feature: Table A; Target 51565; HLA-B*57:01; MYH4; ENSG00000264424; TAA
SAMKTLAFLF

SEQ ID NO: 51566 - protein, 8 aa, Homo sapiens
  misc_feature: Table A; Target 51566; HLA-B*54:01; MYH4; ENSG00000264424; TAA
SANPLLEA

SEQ ID NO: 51567 - protein, 8 aa, Homo sapiens
  misc_feature: Table A; Target 51567; HLA-B*56:01; MYH4; ENSG00000264424; TAA
SANPLLEA

SEQ ID NO: 51568 - protein, 9 aa, Homo sapiens
  misc_feature: Table A; Target 51568; HLA-A*23:01; MYH4; ENSG00000264424; TAA
SANPLLEAF

SEQ ID NO: 51569 - protein, 9 aa, Homo sapiens
  misc_feature: Table A; Target 51569; HLA-A*24:02; MYH4; ENSG00000264424; TAA
SANPLLEAF

SEQ ID NO: 51570 - protein, 9 aa, Homo sapiens
  misc_feature: Table A; Target 51570; HLA-A*25:01; MYH4; ENSG00000264424; TAA
SANPLLEAF

SEQ ID NO: 51571 - protein, 9 aa, Homo sapiens
  misc_feature: Table A; Target 51571; HLA-A*26:01; MYH4; ENSG00000264424; TAA
SANPLLEAF

SEQ ID NO: 51572 - protein, 9 aa, Homo sapiens
  misc_feature: Table A; Target 51572; HLA-A*29:02; MYH4; ENSG00000264424; TAA
SANPLLEAF

SEQ ID NO: 51573 - protein, 9 aa, Homo sapiens
  misc_feature: Table A; Target 51573; HLA-A*30:02; MYH4; ENSG00000264424; TAA
SANPLLEAF

SEQ ID NO: 51574 - protein, 9 aa, Homo sapiens
  misc_feature: Table A; Target 51574; HLA-A*31:01; MYH4; ENSG00000264424; TAA
SANPLLEAF

SEQ ID NO: 51575 - protein, 9 aa, Homo sapiens
  misc_feature: Table A; Target 51575; HLA-A*32:01; MYH4; ENSG00000264424; TAA
SANPLLEAF

SEQ ID NO: 51576 - protein, 9 aa, Homo sapiens
  misc_feature: Table A; Target 51576; HLA-A*33:01; MYH4; ENSG00000264424; TAA
SANPLLEAF

SEQ ID NO: 51577 - protein, 9 aa, Homo sapiens
  misc_feature: Table A; Target 51577; HLA-A*33:03; MYH4; ENSG00000264424; TAA
SANPLLEAF

SEQ ID NO: 51578 - protein, 9 aa, Homo sapiens
  misc_feature: Table A; Target 51578; HLA-B*07:02; MYH4; ENSG00000264424; TAA
SANPLLEAF

SEQ ID NO: 51579 - protein, 9 aa, Homo sapiens
  misc_feature: Table A; Target 51579; HLA-B*15:01; MYH4; ENSG00000264424; TAA
SANPLLEAF

SEQ ID NO: 51580 - protein, 9 aa, Homo sapiens
  misc_feature: Table A; Target 51580; HLA-B*15:03; MYH4; ENSG00000264424; TAA
SANPLLEAF

SEQ ID NO: 51581 - protein, 9 aa, Homo sapiens
  misc_feature: Table A; Target 51581; HLA-B*18:01; MYH4; ENSG00000264424; TAA
SANPLLEAF

SEQ ID NO: 51582 - protein, 9 aa, Homo sapiens
  misc_feature: Table A; Target 51582; HLA-B*27:02; MYH4; ENSG00000264424; TAA
SANPLLEAF

SEQ ID NO: 51583 - protein, 9 aa, Homo sapiens
  misc_feature: Table A; Target 51583; HLA-B*27:05; MYH4; ENSG00000264424; TAA
SANPLLEAF

SEQ ID NO: 51584 - protein, 9 aa, Homo sapiens
  misc_feature: Table A; Target 51584; HLA-B*35:01; MYH4; ENSG00000264424; TAA
SANPLLEAF

SEQ ID NO: 51585 - protein, 9 aa, Homo sapiens
  misc_feature: Table A; Target 51585; HLA-B*35:03; MYH4; ENSG00000264424; TAA
SANPLLEAF

SEQ ID NO: 51586 - protein, 9 aa, Homo sapiens
  misc_feature: Table A; Target 51586; HLA-B*37:01; MYH4; ENSG00000264424; TAA
SANPLLEAF

SEQ ID NO: 51587 - protein, 9 aa, Homo sapiens
  misc_feature: Table A; Target 51587; HLA-B*38:01; MYH4; ENSG00000264424; TAA
SANPLLEAF

SEQ ID NO: 51588 - protein, 9 aa, Homo sapiens
  misc_feature: Table A; Target 51588; HLA-B*44:02; MYH4; ENSG00000264424; TAA
SANPLLEAF

SEQ ID NO: 51589 - protein, 9 aa, Homo sapiens
  misc_feature: Table A; Target 51589; HLA-B*44:03; MYH4; ENSG00000264424; TAA
SANPLLEAF

SEQ ID NO: 51590 - protein, 9 aa, Homo sapiens
  misc_feature: Table A; Target 51590; HLA-B*46:01; MYH4; ENSG00000264424; TAA
SANPLLEAF

SEQ ID NO: 51591 - protein, 9 aa, Homo sapiens
  misc_feature: Table A; Target 51591; HLA-B*55:01; MYH4; ENSG00000264424; TAA
SANPLLEAF

SEQ ID NO: 51592 - protein, 9 aa, Homo sapiens
  misc_feature: Table A; Target 51592; HLA-B*56:01; MYH4; ENSG00000264424; TAA
SANPLLEAF

SEQ ID NO: 51593 - protein, 9 aa, Homo sapiens
  misc_feature: Table A; Target 51593; HLA-B*57:01; MYH4; ENSG00000264424; TAA
SANPLLEAF

SEQ ID NO: 51594 - protein, 9 aa, Homo sapiens
  misc_feature: Table A; Target 51594; HLA-B*58:01; MYH4; ENSG00000264424; TAA
SANPLLEAF

SEQ ID NO: 51595 - protein, 9 aa, Homo sapiens
  misc_feature: Table A; Target 51595; HLA-C*01:02; MYH4; ENSG00000264424; TAA
SANPLLEAF

SEQ ID NO: 51596 - protein, 9 aa, Homo sapiens
  misc_feature: Table A; Target 51596; HLA-C*02:02; MYH4; ENSG00000264424; TAA
SANPLLEAF

SEQ ID NO: 51597 - protein, 9 aa, Homo sapiens
  misc_feature: Table A; Target 51597; HLA-C*03:03; MYH4; ENSG00000264424; TAA
SANPLLEAF

SEQ ID NO: 51598 - protein, 9 aa, Homo sapiens
  misc_feature: Table A; Target 51598; HLA-C*03:04; MYH4; ENSG00000264424; TAA
SANPLLEAF

SEQ ID NO: 51599 - protein, 9 aa, Homo sapiens
  misc_feature: Table A; Target 51599; HLA-C*05:01; MYH4; ENSG00000264424; TAA
SANPLLEAF

SEQ ID NO: 51600 - protein, 9 aa, Homo sapiens
  misc_feature: Table A; Target 51600; HLA-C*07:04; MYH4; ENSG00000264424; TAA
SANPLLEAF

SEQ ID NO: 51601 - protein, 9 aa, Homo sapiens
  misc_feature: Table A; Target 51601; HLA-C*07:06; MYH4; ENSG00000264424; TAA
SANPLLEAF

SEQ ID NO: 51602 - protein, 9 aa, Homo sapiens
  misc_feature: Table A; Target 51602; HLA-C*12:03; MYH4; ENSG00000264424; TAA
SANPLLEAF

SEQ ID NO: 51603 - protein, 9 aa, Homo sapiens
  misc_feature: Table A; Target 51603; HLA-C*14:02; MYH4; ENSG00000264424; TAA
SANPLLEAF

SEQ ID NO: 51604 - protein, 9 aa, Homo sapiens
  misc_feature: Table A; Target 51604; HLA-C*16:01; MYH4; ENSG00000264424; TAA
SANPLLEAF

SEQ ID NO: 51605 - protein, 9 aa, Homo sapiens
  misc_feature: Table A; Target 51605; HLA-C*16:02; MYH4; ENSG00000264424; TAA
SANPLLEAF

SEQ ID NO: 51606 - protein, 9 aa, Homo sapiens
  misc_feature: Table A; Target 51606; HLA-C*16:04; MYH4; ENSG00000264424; TAA
SANPLLEAF

SEQ ID NO: 51607 - protein, 9 aa, Homo sapiens
  misc_feature: Table A; Target 51607; HLA-A*03:02; MYH4; ENSG00000264424; TAA
SAQIEMNKK

SEQ ID NO: 51608 - protein, 9 aa, Homo sapiens
  misc_feature: Table A; Target 51608; HLA-A*11:01; MYH4; ENSG00000264424; TAA
SAQIEMNKK

SEQ ID NO: 51609 - protein, 9 aa, Homo sapiens
  misc_feature: Table A; Target 51609; HLA-C*07:06; MYH4; ENSG00000264424; TAA
SAQIEMNKK

SEQ ID NO: 51610 - protein, 8 aa, Homo sapiens
  misc_feature: Table A; Target 51610; HLA-A*23:01; MYH4; ENSG00000264424; TAA
SAVDILGF

SEQ ID NO: 51611 - protein, 8 aa, Homo sapiens
  misc_feature: Table A; Target 51611; HLA-A*25:01; MYH4; ENSG00000264424; TAA
SAVDILGF

SEQ ID NO: 51612 - protein, 8 aa, Homo sapiens
  misc_feature: Table A; Target 51612; HLA-A*26:01; MYH4; ENSG00000264424; TAA
SAVDILGF

SEQ ID NO: 51613 - protein, 8 aa, Homo sapiens
  misc_feature: Table A; Target 51613; HLA-B*35:01; MYH4; ENSG00000264424; TAA
SAVDILGF

SEQ ID NO: 51614 - protein, 8 aa, Homo sapiens
  misc_feature: Table A; Target 51614; HLA-B*58:01; MYH4; ENSG00000264424; TAA
SAVDILGF

SEQ ID NO: 51615 - protein, 8 aa, Homo sapiens
  misc_feature: Table A; Target 51615; HLA-C*02:02; MYH4; ENSG00000264424; TAA
SAVDILGF

SEQ ID NO: 51616 - protein, 10 aa, Homo sapiens
  misc_feature: Table A; Target 51616; HLA-A*68:02; MYH4; ENSG00000264424; TAA
SAVDILGFTA

SEQ ID NO: 51617 - protein, 10 aa, Homo sapiens
  misc_feature: Table A; Target 51617; HLA-B*54:01; MYH4; ENSG00000264424; TAA
SAVDILGFTA

SEQ ID NO: 51618 - protein, 10 aa, Homo sapiens
  misc_feature: Table A; Target 51618; HLA-B*56:01; MYH4; ENSG00000264424; TAA
SAVDILGFTA

SEQ ID NO: 51619 - protein, 10 aa, Homo sapiens
  misc_feature: Table A; Target 51619; HLA-C*16:04; MYH4; ENSG00000264424; TAA
SAVDILGFTA

SEQ ID NO: 51620 - protein, 8 aa, Homo sapiens
  misc_feature: Table A; Target 51620; HLA-B*37:01; MYH4; ENSG00000264424; TAA
SDNAYQFM

SEQ ID NO: 51621 - protein, 8 aa, Homo sapiens
  misc_feature: Table A; Target 51621; HLA-B*18:01; MYH4; ENSG00000264424; TAA
SDSEMAIF

SEQ ID NO: 51622 - protein, 8 aa, Homo sapiens
  misc_feature: Table A; Target 51622; HLA-B*37:01; MYH4; ENSG00000264424; TAA
SDSEMAIF

SEQ ID NO: 51623 - protein, 10 aa, Homo sapiens
  misc_feature: Table A; Target 51623; HLA-B*49:01; MYH4; ENSG00000264424; TAA
SEKLLGSIEI

SEQ ID NO: 51624 - protein, 10 aa, Homo sapiens
  misc_feature: Table A; Target 51624; HLA-B*40:01; MYH4; ENSG00000264424; TAA
SELKKDIDDL

SEQ ID NO: 51625 - protein, 10 aa, Homo sapiens
  misc_feature: Table A; Target 51625; HLA-A*30:01; MYH4; ENSG00000264424; TAA
SELKMEINDL

SEQ ID NO: 51626 - protein, 10 aa, Homo sapiens
  misc_feature: Table A; Target 51626; HLA-B*40:01; MYH4; ENSG00000264424; TAA
SELKMEINDL

SEQ ID NO: 51627 - protein, 10 aa, Homo sapiens
  misc_feature: Table A; Target 51627; HLA-B*40:02; MYH4; ENSG00000264424; TAA
SELKMEINDL

SEQ ID NO: 51628 - protein, 9 aa, Homo sapiens
  misc_feature: Table A; Target 51628; HLA-A*30:01; MYH4; ENSG00000264424; TAA
SEMAIFGEA

SEQ ID NO: 51629 - protein, 9 aa, Homo sapiens
  misc_feature: Table A; Target 51629; HLA-B*18:01; MYH4; ENSG00000264424; TAA
SEMAIFGEA

SEQ ID NO: 51630 - protein, 9 aa, Homo sapiens
  misc_feature: Table A; Target 51630; HLA-B*40:01; MYH4; ENSG00000264424; TAA
SEMAIFGEA

SEQ ID NO: 51631 - protein, 9 aa, Homo sapiens
  misc_feature: Table A; Target 51631; HLA-B*40:02; MYH4; ENSG00000264424; TAA
SEMAIFGEA

SEQ ID NO: 51632 - protein, 9 aa, Homo sapiens
  misc_feature: Table A; Target 51632; HLA-B*44:02; MYH4; ENSG00000264424; TAA
SEMAIFGEA

SEQ ID NO: 51633 - protein, 9 aa, Homo sapiens
  misc_feature: Table A; Target 51633; HLA-B*44:03; MYH4; ENSG00000264424; TAA
SEMAIFGEA

SEQ ID NO: 51634 - protein, 9 aa, Homo sapiens
  misc_feature: Table A; Target 51634; HLA-B*49:01; MYH4; ENSG00000264424; TAA
SEMAIFGEA

SEQ ID NO: 51635 - protein, 9 aa, Homo sapiens
  misc_feature: Table A; Target 51635; HLA-B*54:01; MYH4; ENSG00000264424; TAA
SEMAIFGEA

SEQ ID NO: 51636 - protein, 9 aa, Homo sapiens
  misc_feature: Table A; Target 51636; HLA-B*56:01; MYH4; ENSG00000264424; TAA
SEMAIFGEA

SEQ ID NO: 51637 - protein, 9 aa, Homo sapiens
  misc_feature: Table A; Target 51637; HLA-C*16:04; MYH4; ENSG00000264424; TAA
SEMAIFGEA

SEQ ID NO: 51638 - protein, 10 aa, Homo sapiens
  misc_feature: Table A; Target 51638; HLA-A*30:01; MYH4; ENSG00000264424; TAA
SEMAIFGEAA

SEQ ID NO: 51639 - protein, 10 aa, Homo sapiens
  misc_feature: Table A; Target 51639; HLA-B*18:01; MYH4; ENSG00000264424; TAA
SEMAIFGEAA

SEQ ID NO: 51640 - protein, 10 aa, Homo sapiens
  misc_feature: Table A; Target 51640; HLA-B*49:01; MYH4; ENSG00000264424; TAA
SEMAIFGEAA

SEQ ID NO: 51641 - protein, 10 aa, Homo sapiens
  misc_feature: Table A; Target 51641; HLA-A*30:01; MYH4; ENSG00000264424; TAA
SEQKHNVEAV

SEQ ID NO: 51642 - protein, 10 aa, Homo sapiens
  misc_feature: Table A; Target 51642; HLA-B*44:02; MYH4; ENSG00000264424; TAA
SEVAQWRTKY

SEQ ID NO: 51643 - protein, 10 aa, Homo sapiens
  misc_feature: Table A; Target 51643; HLA-B*44:03; MYH4; ENSG00000264424; TAA
SEVAQWRTKY

SEQ ID NO: 51644 - protein, 9 aa, Homo sapiens
  misc_feature: Table A; Target 51644; HLA-B*44:03; MYH4; ENSG00000264424; TAA
SEVESEQKH

SEQ ID NO: 51645 - protein, 11 aa, Homo sapiens
  misc_feature: Table A; Target 51645; HLA-B*49:01; MYH4; ENSG00000264424; TAA
SEVESEQKHNV

SEQ ID NO: 51646 - protein, 8 aa, Homo sapiens
  misc_feature: Table A; Target 51646; HLA-C*01:02; MYH4; ENSG00000264424; TAA
SFQTVSAL

SEQ ID NO: 51647 - protein, 8 aa, Homo sapiens
  misc_feature: Table A; Target 51647; HLA-C*14:02; MYH4; ENSG00000264424; TAA
SFQTVSAL

SEQ ID NO: 51648 - protein, 9 aa, Homo sapiens
  misc_feature: Table A; Target 51648; HLA-A*23:01; MYH4; ENSG00000264424; TAA
SFQTVSALF

SEQ ID NO: 51649 - protein, 9 aa, Homo sapiens
  misc_feature: Table A; Target 51649; HLA-A*24:02; MYH4; ENSG00000264424; TAA
SFQTVSALF

SEQ ID NO: 51650 - protein, 9 aa, Homo sapiens
  misc_feature: Table A; Target 51650; HLA-A*29:02; MYH4; ENSG00000264424; TAA
SFQTVSALF

SEQ ID NO: 51651 - protein, 9 aa, Homo sapiens
  misc_feature: Table A; Target 51651; HLA-A*30:02; MYH4; ENSG00000264424; TAA
SFQTVSALF

SEQ ID NO: 51652 - protein, 9 aa, Homo sapiens
  misc_feature: Table A; Target 51652; HLA-C*04:01; MYH4; ENSG00000264424; TAA
SFQTVSALF

SEQ ID NO: 51653 - protein, 9 aa, Homo sapiens
  misc_feature: Table A; Target 51653; HLA-C*14:02; MYH4; ENSG00000264424; TAA
SFQTVSALF

SEQ ID NO: 51654 - protein, 10 aa, Homo sapiens
  misc_feature: Table A; Target 51654; HLA-A*33:03; MYH4; ENSG00000264424; TAA
SFQTVSALFR

SEQ ID NO: 51655 - protein, 10 aa, Homo sapiens
  misc_feature: Table A; Target 51655; HLA-A*03:02; MYH4; ENSG00000264424; TAA
SGAGKTVNTK

SEQ ID NO: 51656 - protein, 10 aa, Homo sapiens
  misc_feature: Table A; Target 51656; HLA-A*11:01; MYH4; ENSG00000264424; TAA
SGAGKTVNTK

SEQ ID NO: 51657 - protein, 11 aa, Homo sapiens
  misc_feature: Table A; Target 51657; HLA-A*31:01; MYH4; ENSG00000264424; TAA
SGAGKTVNTKR

SEQ ID NO: 51658 - protein, 11 aa, Homo sapiens
  misc_feature: Table A; Target 51658; HLA-A*68:01; MYH4; ENSG00000264424; TAA
SGAGKTVNTKR

SEQ ID NO: 51659 - protein, 8 aa, Homo sapiens
  misc_feature: Table A; Target 51659; HLA-C*05:01; MYH4; ENSG00000264424; TAA
SIDDQEEL

SEQ ID NO: 51660 - protein, 9 aa, Homo sapiens
  misc_feature: Table A; Target 51660; HLA-A*02:07; MYH4; ENSG00000264424; TAA
SIDDQEELM

SEQ ID NO: 51661 - protein, 9 aa, Homo sapiens
  misc_feature: Table A; Target 51661; HLA-B*38:01; MYH4; ENSG00000264424; TAA
SIDDQEELM

SEQ ID NO: 51662 - protein, 9 aa, Homo sapiens
  misc_feature: Table A; Target 51662; HLA-C*05:01; MYH4; ENSG00000264424; TAA
SIDDQEELM

SEQ ID NO: 51663 - protein, 9 aa, Homo sapiens
  misc_feature: Table A; Target 51663; HLA-A*01:01; MYH4; ENSG00000264424; TAA
SIEIDHTQY

SEQ ID NO: 51664 - protein, 9 aa, Homo sapiens
  misc_feature: Table A; Target 51664; HLA-A*29:02; MYH4; ENSG00000264424; TAA
SIEIDHTQY

SEQ ID NO: 51665 - protein, 9 aa, Homo sapiens
  misc_feature: Table A; Target 51665; HLA-A*30:02; MYH4; ENSG00000264424; TAA
SIEIDHTQY

SEQ ID NO: 51666 - protein, 9 aa, Homo sapiens
  misc_feature: Table A; Target 51666; HLA-B*15:01; MYH4; ENSG00000264424; TAA
SIEIDHTQY

SEQ ID NO: 51667 - protein, 9 aa, Homo sapiens
  misc_feature: Table A; Target 51667; HLA-C*07:04; MYH4; ENSG00000264424; TAA
SIEIDHTQY

SEQ ID NO: 51668 - protein, 10 aa, Homo sapiens
  misc_feature: Table A; Target 51668; HLA-A*01:01; MYH4; ENSG00000264424; TAA
SIEIDHTQYK

SEQ ID NO: 51669 - protein, 10 aa, Homo sapiens
  misc_feature: Table A; Target 51669; HLA-A*03:02; MYH4; ENSG00000264424; TAA
SIEIDHTQYK

SEQ ID NO: 51670 - protein, 10 aa, Homo sapiens
  misc_feature: Table A; Target 51670; HLA-A*11:01; MYH4; ENSG00000264424; TAA
SIEIDHTQYK

SEQ ID NO: 51671 - protein, 9 aa, Homo sapiens
  misc_feature: Table A; Target 51671; HLA-A*68:02; MYH4; ENSG00000264424; TAA
SIFCIQYNI

SEQ ID NO: 51672 - protein, 9 aa, Homo sapiens
  misc_feature: Table A; Target 51672; HLA-B*13:02; MYH4; ENSG00000264424; TAA
SIFCIQYNI

SEQ ID NO: 51673 - protein, 9 aa, Homo sapiens
  misc_feature: Table A; Target 51673; HLA-A*03:02; MYH4; ENSG00000264424; TAA
SISDNAYQF

SEQ ID NO: 51674 - protein, 9 aa, Homo sapiens
  misc_feature: Table A; Target 51674; HLA-A*11:01; MYH4; ENSG00000264424; TAA
SISDNAYQF

SEQ ID NO: 51675 - protein, 9 aa, Homo sapiens
  misc_feature: Table A; Target 51675; HLA-A*23:01; MYH4; ENSG00000264424; TAA
SISDNAYQF

SEQ ID NO: 51676 - protein, 9 aa, Homo sapiens
  misc_feature: Table A; Target 51676; HLA-A*24:02; MYH4; ENSG00000264424; TAA
SISDNAYQF

SEQ ID NO: 51677 - protein, 9 aa, Homo sapiens
  misc_feature: Table A; Target 51677; HLA-A*26:01; MYH4; ENSG00000264424; TAA
SISDNAYQF

SEQ ID NO: 51678 - protein, 9 aa, Homo sapiens
  misc_feature: Table A; Target 51678; HLA-A*29:02; MYH4; ENSG00000264424; TAA
SISDNAYQF

SEQ ID NO: 51679 - protein, 9 aa, Homo sapiens
  misc_feature: Table A; Target 51679; HLA-A*32:01; MYH4; ENSG00000264424; TAA
SISDNAYQF

SEQ ID NO: 51680 - protein, 9 aa, Homo sapiens
  misc_feature: Table A; Target 51680; HLA-B*15:01; MYH4; ENSG00000264424; TAA
SISDNAYQF

SEQ ID NO: 51681 - protein, 9 aa, Homo sapiens
  misc_feature: Table A; Target 51681; HLA-B*27:05; MYH4; ENSG00000264424; TAA
SISDNAYQF

SEQ ID NO: 51682 - protein, 9 aa, Homo sapiens
  misc_feature: Table A; Target 51682; HLA-B*35:01; MYH4; ENSG00000264424; TAA
SISDNAYQF

SEQ ID NO: 51683 - protein, 9 aa, Homo sapiens
  misc_feature: Table A; Target 51683; HLA-B*37:01; MYH4; ENSG00000264424; TAA
SISDNAYQF

SEQ ID NO: 51684 - protein, 9 aa, Homo sapiens
  misc_feature: Table A; Target 51684; HLA-B*38:01; MYH4; ENSG00000264424; TAA
SISDNAYQF

SEQ ID NO: 51685 - protein, 9 aa, Homo sapiens
  misc_feature: Table A; Target 51685; HLA-B*44:03; MYH4; ENSG00000264424; TAA
SISDNAYQF

SEQ ID NO: 51686 - protein, 9 aa, Homo sapiens
  misc_feature: Table A; Target 51686; HLA-B*58:01; MYH4; ENSG00000264424; TAA
SISDNAYQF

SEQ ID NO: 51687 - protein, 9 aa, Homo sapiens
  misc_feature: Table A; Target 51687; HLA-C*02:02; MYH4; ENSG00000264424; TAA
SISDNAYQF

SEQ ID NO: 51688 - protein, 9 aa, Homo sapiens
  misc_feature: Table A; Target 51688; HLA-C*07:04; MYH4; ENSG00000264424; TAA
SISDNAYQF

SEQ ID NO: 51689 - protein, 9 aa, Homo sapiens
  misc_feature: Table A; Target 51689; HLA-C*07:06; MYH4; ENSG00000264424; TAA
SISDNAYQF

SEQ ID NO: 51690 - protein, 9 aa, Homo sapiens
  misc_feature: Table A; Target 51690; HLA-C*16:04; MYH4; ENSG00000264424; TAA
SISDNAYQF

SEQ ID NO: 51691 - protein, 8 aa, Homo sapiens
  misc_feature: Table A; Target 51691; HLA-A*02:07; MYH4; ENSG00000264424; TAA
SLDHLETL

SEQ ID NO: 51692 - protein, 8 aa, Homo sapiens
  misc_feature: Table A; Target 51692; HLA-C*05:01; MYH4; ENSG00000264424; TAA
SLDHLETL

SEQ ID NO: 51693 - protein, 9 aa, Homo sapiens
  misc_feature: Table A; Target 51693; HLA-A*01:01; MYH4; ENSG00000264424; TAA
SLDHLETLK

SEQ ID NO: 51694 - protein, 9 aa, Homo sapiens
  misc_feature: Table A; Target 51694; HLA-A*03:02; MYH4; ENSG00000264424; TAA
SLDHLETLK

SEQ ID NO: 51695 - protein, 9 aa, Homo sapiens
  misc_feature: Table A; Target 51695; HLA-A*02:01; MYH4; ENSG00000264424; TAA
SLEEAEASL

SEQ ID NO: 51696 - protein, 9 aa, Homo sapiens
  misc_feature: Table A; Target 51696; HLA-B*35:03; MYH4; ENSG00000264424; TAA
SLEEAEASL

SEQ ID NO: 51697 - protein, 9 aa, Homo sapiens
  misc_feature: Table A; Target 51697; HLA-C*01:02; MYH4; ENSG00000264424; TAA
SLEEAEASL

SEQ ID NO: 51698 - protein, 9 aa, Homo sapiens
  misc_feature: Table A; Target 51698; HLA-C*05:01; MYH4; ENSG00000264424; TAA
SLEEAEASL

SEQ ID NO: 51699 - protein, 9 aa, Homo sapiens
  misc_feature: Table A; Target 51699; HLA-A*03:01; MYH4; ENSG00000264424; TAA
SLNSADLLK

SEQ ID NO: 51700 - protein, 9 aa, Homo sapiens
  misc_feature: Table A; Target 51700; HLA-A*03:02; MYH4; ENSG00000264424; TAA
SLNSADLLK

SEQ ID NO: 51701 - protein, 9 aa, Homo sapiens
  misc_feature: Table A; Target 51701; HLA-A*11:01; MYH4; ENSG00000264424; TAA
SLNSADLLK

SEQ ID NO: 51702 - protein, 9 aa, Homo sapiens
  misc_feature: Table A; Target 51702; HLA-B*13:02; MYH4; ENSG00000264424; TAA
SLNSADLLK

SEQ ID NO: 51703 - protein, 11 aa, Homo sapiens
  misc_feature: Table A; Target 51703; HLA-A*02:03; MYH4; ENSG00000264424; TAA
SLNSADLLKSL

SEQ ID NO: 51704 - protein, 11 aa, Homo sapiens
  misc_feature: Table A; Target 51704; HLA-A*02:04; MYH4; ENSG00000264424; TAA
SLNSADLLKSL

SEQ ID NO: 51705 - protein, 9 aa, Homo sapiens
  misc_feature: Table A; Target 51705; HLA-A*02:01; MYH4; ENSG00000264424; TAA
SLSTELFKV

SEQ ID NO: 51706 - protein, 9 aa, Homo sapiens
  misc_feature: Table A; Target 51706; HLA-A*02:03; MYH4; ENSG00000264424; TAA
SLSTELFKV

SEQ ID NO: 51707 - protein, 9 aa, Homo sapiens
  misc_feature: Table A; Target 51707; HLA-A*02:04; MYH4; ENSG00000264424; TAA
SLSTELFKV

SEQ ID NO: 51708 - protein, 9 aa, Homo sapiens
  misc_feature: Table A; Target 51708; HLA-A*02:07; MYH4; ENSG00000264424; TAA
SLSTELFKV

SEQ ID NO: 51709 - protein, 9 aa, Homo sapiens
  misc_feature: Table A; Target 51709; HLA-A*68:02; MYH4; ENSG00000264424; TAA
SLSTELFKV

SEQ ID NO: 51710 - protein, 9 aa, Homo sapiens
  misc_feature: Table A; Target 51710; HLA-B*13:02; MYH4; ENSG00000264424; TAA
SLSTELFKV

SEQ ID NO: 51711 - protein, 9 aa, Homo sapiens
  misc_feature: Table A; Target 51711; HLA-B*55:01; MYH4; ENSG00000264424; TAA
SLSTELFKV

SEQ ID NO: 51712 - protein, 10 aa, Homo sapiens
  misc_feature: Table A; Target 51712; HLA-A*03:01; MYH4; ENSG00000264424; TAA
SLSTELFKVK

SEQ ID NO: 51713 - protein, 10 aa, Homo sapiens
  misc_feature: Table A; Target 51713; HLA-A*03:02; MYH4; ENSG00000264424; TAA
SLSTELFKVK

SEQ ID NO: 51714 - protein, 10 aa, Homo sapiens
  misc_feature: Table A; Target 51714; HLA-A*11:01; MYH4; ENSG00000264424; TAA
SLSTELFKVK

SEQ ID NO: 51715 - protein, 9 aa, Homo sapiens
  misc_feature: Table A; Target 51715; HLA-A*02:03; MYH4; ENSG00000264424; TAA
SLVHYAGTV

SEQ ID NO: 51716 - protein, 11 aa, Homo sapiens
  misc_feature: Table A; Target 51716; HLA-C*07:01; MYH4; ENSG00000264424; TAA
SLVHYAGTVDY

SEQ ID NO: 51717 - protein, 9 aa, Homo sapiens
  misc_feature: Table A; Target 51717; HLA-A*03:02; MYH4; ENSG00000264424; TAA
SMNPPKYDK

SEQ ID NO: 51718 - protein, 9 aa, Homo sapiens
  misc_feature: Table A; Target 51718; HLA-A*11:01; MYH4; ENSG00000264424; TAA
SMNPPKYDK

SEQ ID NO: 51719 - protein, 8 aa, Homo sapiens
  misc_feature: Table A; Target 51719; HLA-A*03:02; MYH4; ENSG00000264424; TAA
SNMETVSK

SEQ ID NO: 51720 - protein, 8 aa, Homo sapiens
  misc_feature: Table A; Target 51720; HLA-A*11:01; MYH4; ENSG00000264424; TAA
SNMETVSK

SEQ ID NO: 51721 - protein, 8 aa, Homo sapiens
  misc_feature: Table A; Target 51721; HLA-A*33:01; MYH4; ENSG00000264424; TAA
SNMETVSK

SEQ ID NO: 51722 - protein, 8 aa, Homo sapiens
  misc_feature: Table A; Target 51722; HLA-A*33:03; MYH4; ENSG00000264424; TAA
SNMETVSK

SEQ ID NO: 51723 - protein, 8 aa, Homo sapiens
  misc_feature: Table A; Target 51723; HLA-B*27:02; MYH4; ENSG00000264424; TAA
SNMETVSK

SEQ ID NO: 51724 - protein, 9 aa, Homo sapiens
  misc_feature: Table A; Target 51724; HLA-B*55:01; MYH4; ENSG00000264424; TAA
SNMETVSKA

SEQ ID NO: 51725 - protein, 10 aa, Homo sapiens
  misc_feature: Table A; Target 51725; HLA-A*03:02; MYH4; ENSG00000264424; TAA
SNMETVSKAK

SEQ ID NO: 51726 - protein, 10 aa, Homo sapiens
  misc_feature: Table A; Target 51726; HLA-C*07:06; MYH4; ENSG00000264424; TAA
SNMETVSKAK

SEQ ID NO: 51727 - protein, 10 aa, Homo sapiens
  misc_feature: Table A; Target 51727; HLA-B*13:02; MYH4; ENSG00000264424; TAA
SQIQGEMEDI

SEQ ID NO: 51728 - protein, 8 aa, Homo sapiens
  misc_feature: Table A; Target 51728; HLA-B*08:01; MYH4; ENSG00000264424; TAA
SQKESRSL

SEQ ID NO: 51729 - protein, 8 aa, Homo sapiens
  misc_feature: Table A; Target 51729; HLA-B*15:01; MYH4; ENSG00000264424; TAA
SQKESRSL

SEQ ID NO: 51730 - protein, 9 aa, Homo sapiens
  misc_feature: Table A; Target 51730; HLA-A*11:01; MYH4; ENSG00000264424; TAA
SQVNKLRVK

SEQ ID NO: 51731 - protein, 9 aa, Homo sapiens
  misc_feature: Table A; Target 51731; HLA-C*16:01; MYH4; ENSG00000264424; TAA
SQVNKLRVK

SEQ ID NO: 51732 - protein, 9 aa, Homo sapiens
  misc_feature: Table A; Target 51732; HLA-B*27:05; MYH4; ENSG00000264424; TAA
SRAKAEKQR

SEQ ID NO: 51733 - protein, 9 aa, Homo sapiens
  misc_feature: Table A; Target 51733; HLA-B*27:05; MYH4; ENSG00000264424; TAA
SRNDALRIK

SEQ ID NO: 51734 - protein, 9 aa, Homo sapiens
  misc_feature: Table A; Target 51734; HLA-C*06:02; MYH4; ENSG00000264424; TAA
SRNDALRIK

SEQ ID NO: 51735 - protein, 10 aa, Homo sapiens
  misc_feature: Table A; Target 51735; HLA-B*27:05; MYH4; ENSG00000264424; TAA
SRNDALRIKK

SEQ ID NO: 51736 - protein, 9 aa, Homo sapiens
  misc_feature: Table A; Target 51736; HLA-B*27:02; MYH4; ENSG00000264424; TAA
SRSLSTELF

SEQ ID NO: 51737 - protein, 9 aa, Homo sapiens
  misc_feature: Table A; Target 51737; HLA-B*27:05; MYH4; ENSG00000264424; TAA
SRSLSTELF

SEQ ID NO: 51738 - protein, 9 aa, Homo sapiens
  misc_feature: Table A; Target 51738; HLA-B*38:01; MYH4; ENSG00000264424; TAA
SRSLSTELF

SEQ ID NO: 51739 - protein, 9 aa, Homo sapiens
  misc_feature: Table A; Target 51739; HLA-C*16:04; MYH4; ENSG00000264424; TAA
SRSLSTELF

SEQ ID NO: 51740 - protein, 8 aa, Homo sapiens
  misc_feature: Table A; Target 51740; HLA-C*05:01; MYH4; ENSG00000264424; TAA
SSDSEMAI

SEQ ID NO: 51741 - protein, 9 aa, Homo sapiens
  misc_feature: Table A; Target 51741; HLA-A*01:01; MYH4; ENSG00000264424; TAA
SSDSEMAIF

SEQ ID NO: 51742 - protein, 9 aa, Homo sapiens
  misc_feature: Table A; Target 51742; HLA-C*05:01; MYH4; ENSG00000264424; TAA
SSDSEMAIF

SEQ ID NO: 51743 - protein, 9 aa, Homo sapiens
  misc_feature: Table A; Target 51743; HLA-A*25:01; MYH4; ENSG00000264424; TAA
SSFQTVSAL

SEQ ID NO: 51744 - protein, 9 aa, Homo sapiens
  misc_feature: Table A; Target 51744; HLA-A*30:01; MYH4; ENSG00000264424; TAA
SSFQTVSAL

SEQ ID NO: 51745 - protein, 9 aa, Homo sapiens
  misc_feature: Table A; Target 51745; HLA-B*08:01; MYH4; ENSG00000264424; TAA
SSFQTVSAL

SEQ ID NO: 51746 - protein, 9 aa, Homo sapiens
  misc_feature: Table A; Target 51746; HLA-B*15:01; MYH4; ENSG00000264424; TAA
SSFQTVSAL

SEQ ID NO: 51747 - protein, 9 aa, Homo sapiens
  misc_feature: Table A; Target 51747; HLA-B*15:03; MYH4; ENSG00000264424; TAA
SSFQTVSAL

SEQ ID NO: 51748 - protein, 9 aa, Homo sapiens
  misc_feature: Table A; Target 51748; HLA-B*27:05; MYH4; ENSG00000264424; TAA
SSFQTVSAL

SEQ ID NO: 51749 - protein, 9 aa, Homo sapiens
  misc_feature: Table A; Target 51749; HLA-B*39:01; MYH4; ENSG00000264424; TAA
SSFQTVSAL

SEQ ID NO: 51750 - protein, 9 aa, Homo sapiens
  misc_feature: Table A; Target 51750; HLA-B*40:01; MYH4; ENSG00000264424; TAA
SSFQTVSAL

SEQ ID NO: 51751 - protein, 9 aa, Homo sapiens
  misc_feature: Table A; Target 51751; HLA-B*40:02; MYH4; ENSG00000264424; TAA
SSFQTVSAL

SEQ ID NO: 51752 - protein, 9 aa, Homo sapiens
  misc_feature: Table A; Target 51752; HLA-B*46:01; MYH4; ENSG00000264424; TAA
SSFQTVSAL

SEQ ID NO: 51753 - protein, 9 aa, Homo sapiens
  misc_feature: Table A; Target 51753; HLA-B*58:01; MYH4; ENSG00000264424; TAA
SSFQTVSAL

SEQ ID NO: 51754 - protein, 9 aa, Homo sapiens
  misc_feature: Table A; Target 51754; HLA-C*01:02; MYH4; ENSG00000264424; TAA
SSFQTVSAL

SEQ ID NO: 51755 - protein, 9 aa, Homo sapiens
  misc_feature: Table A; Target 51755; HLA-C*02:02; MYH4; ENSG00000264424; TAA
SSFQTVSAL

SEQ ID NO: 51756 - protein, 9 aa, Homo sapiens
  misc_feature: Table A; Target 51756; HLA-C*03:03; MYH4; ENSG00000264424; TAA
SSFQTVSAL

SEQ ID NO: 51757 - protein, 9 aa, Homo sapiens
  misc_feature: Table A; Target 51757; HLA-C*03:04; MYH4; ENSG00000264424; TAA
SSFQTVSAL

SEQ ID NO: 51758 - protein, 9 aa, Homo sapiens
  misc_feature: Table A; Target 51758; HLA-C*05:01; MYH4; ENSG00000264424; TAA
SSFQTVSAL

SEQ ID NO: 51759 - protein, 9 aa, Homo sapiens
  misc_feature: Table A; Target 51759; HLA-C*07:06; MYH4; ENSG00000264424; TAA
SSFQTVSAL

SEQ ID NO: 51760 - protein, 9 aa, Homo sapiens
  misc_feature: Table A; Target 51760; HLA-C*12:03; MYH4; ENSG00000264424; TAA
SSFQTVSAL

SEQ ID NO: 51761 - protein, 9 aa, Homo sapiens
  misc_feature: Table A; Target 51761; HLA-C*14:02; MYH4; ENSG00000264424; TAA
SSFQTVSAL

SEQ ID NO: 51762 - protein, 9 aa, Homo sapiens
  misc_feature: Table A; Target 51762; HLA-C*16:04; MYH4; ENSG00000264424; TAA
SSFQTVSAL

SEQ ID NO: 51763 - protein, 10 aa, Homo sapiens
  misc_feature: Table A; Target 51763; HLA-B*57:01; MYH4; ENSG00000264424; TAA
SSFQTVSALF

SEQ ID NO: 51764 - protein, 11 aa, Homo sapiens
  misc_feature: Table A; Target 51764; HLA-A*11:01; MYH4; ENSG00000264424; TAA
SSFQTVSALFR

SEQ ID NO: 51765 - protein, 11 aa, Homo sapiens
  misc_feature: Table A; Target 51765; HLA-A*31:01; MYH4; ENSG00000264424; TAA
SSFQTVSALFR

SEQ ID NO: 51766 - protein, 11 aa, Homo sapiens
  misc_feature: Table A; Target 51766; HLA-A*33:01; MYH4; ENSG00000264424; TAA
SSFQTVSALFR

SEQ ID NO: 51767 - protein, 11 aa, Homo sapiens
  misc_feature: Table A; Target 51767; HLA-A*68:01; MYH4; ENSG00000264424; TAA
SSFQTVSALFR

SEQ ID NO: 51768 - protein, 11 aa, Homo sapiens
  misc_feature: Table A; Target 51768; HLA-C*07:06; MYH4; ENSG00000264424; TAA
SSFQTVSALFR

SEQ ID NO: 51769 - protein, 11 aa, Homo sapiens
  misc_feature: Table A; Target 51769; HLA-A*01:01; MYH4; ENSG00000264424; TAA
STELFKVKNAY

SEQ ID NO: 51770 - protein, 11 aa, Homo sapiens
  misc_feature: Table A; Target 51770; HLA-A*30:02; MYH4; ENSG00000264424; TAA
STELFKVKNAY

SEQ ID NO: 51771 - protein, 8 aa, Homo sapiens
  misc_feature: Table A; Target 51771; HLA-A*31:01; MYH4; ENSG00000264424; TAA
STHPHFVR

SEQ ID NO: 51772 - protein, 11 aa, Homo sapiens
  misc_feature: Table A; Target 51772; HLA-A*31:01; MYH4; ENSG00000264424; TAA
STLAHALQSAR

SEQ ID NO: 51773 - protein, 11 aa, Homo sapiens
  misc_feature: Table A; Target 51773; HLA-A*33:01; MYH4; ENSG00000264424; TAA
STLAHALQSAR

SEQ ID NO: 51774 - protein, 11 aa, Homo sapiens
  misc_feature: Table A; Target 51774; HLA-A*33:03; MYH4; ENSG00000264424; TAA
STLAHALQSAR

SEQ ID NO: 51775 - protein, 10 aa, Homo sapiens
  misc_feature: Table A; Target 51775; HLA-A*11:01; MYH4; ENSG00000264424; TAA
STLDAEIRSR

SEQ ID NO: 51776 - protein, 10 aa, Homo sapiens
  misc_feature: Table A; Target 51776; HLA-A*25:01; MYH4; ENSG00000264424; TAA
STLDAEIRSR

SEQ ID NO: 51777 - protein, 10 aa, Homo sapiens
  misc_feature: Table A; Target 51777; HLA-A*31:01; MYH4; ENSG00000264424; TAA
STLDAEIRSR

SEQ ID NO: 51778 - protein, 10 aa, Homo sapiens
  misc_feature: Table A; Target 51778; HLA-A*33:01; MYH4; ENSG00000264424; TAA
STLDAEIRSR

SEQ ID NO: 51779 - protein, 10 aa, Homo sapiens
  misc_feature: Table A; Target 51779; HLA-A*33:03; MYH4; ENSG00000264424; TAA
STLDAEIRSR

SEQ ID NO: 51780 - protein, 10 aa, Homo sapiens
  misc_feature: Table A; Target 51780; HLA-A*68:01; MYH4; ENSG00000264424; TAA
STLDAEIRSR

SEQ ID NO: 51781 - protein, 10 aa, Homo sapiens
  misc_feature: Table A; Target 51781; HLA-B*57:01; MYH4; ENSG00000264424; TAA
STLDAEIRSR

SEQ ID NO: 51782 - protein, 10 aa, Homo sapiens
  misc_feature: Table A; Target 51782; HLA-C*07:06; MYH4; ENSG00000264424; TAA
STLDAEIRSR

SEQ ID NO: 51783 - protein, 9 aa, Homo sapiens
  misc_feature: Table A; Target 51783; HLA-A*03:02; MYH4; ENSG00000264424; TAA
STMDTENDK

SEQ ID NO: 51784 - protein, 9 aa, Homo sapiens
  misc_feature: Table A; Target 51784; HLA-A*11:01; MYH4; ENSG00000264424; TAA
STMDTENDK

SEQ ID NO: 51785 - protein, 9 aa, Homo sapiens
  misc_feature: Table A; Target 51785; HLA-A*02:01; MYH4; ENSG00000264424; TAA
SVAELGEQI

SEQ ID NO: 51786 - protein, 9 aa, Homo sapiens
  misc_feature: Table A; Target 51786; HLA-A*02:03; MYH4; ENSG00000264424; TAA
SVAELGEQI

SEQ ID NO: 51787 - protein, 9 aa, Homo sapiens
  misc_feature: Table A; Target 51787; HLA-A*25:01; MYH4; ENSG00000264424; TAA
SVAELGEQI

SEQ ID NO: 51788 - protein, 9 aa, Homo sapiens
  misc_feature: Table A; Target 51788; HLA-A*26:01; MYH4; ENSG00000264424; TAA
SVAELGEQI

SEQ ID NO: 51789 - protein, 9 aa, Homo sapiens
  misc_feature: Table A; Target 51789; HLA-A*68:02; MYH4; ENSG00000264424; TAA
SVAELGEQI

SEQ ID NO: 51790 - protein, 9 aa, Homo sapiens
  misc_feature: Table A; Target 51790; HLA-B*13:02; MYH4; ENSG00000264424; TAA
SVAELGEQI

SEQ ID NO: 51791 - protein, 9 aa, Homo sapiens
  misc_feature: Table A; Target 51791; HLA-B*38:01; MYH4; ENSG00000264424; TAA
SVAELGEQI

SEQ ID NO: 51792 - protein, 9 aa, Homo sapiens
  misc_feature: Table A; Target 51792; HLA-B*39:01; MYH4; ENSG00000264424; TAA
SVAELGEQI

SEQ ID NO: 51793 - protein, 9 aa, Homo sapiens
  misc_feature: Table A; Target 51793; HLA-C*02:02; MYH4; ENSG00000264424; TAA
SVAELGEQI

SEQ ID NO: 51794 - protein, 9 aa, Homo sapiens
  misc_feature: Table A; Target 51794; HLA-C*05:01; MYH4; ENSG00000264424; TAA
SVAELGEQI

SEQ ID NO: 51795 - protein, 9 aa, Homo sapiens
  misc_feature: Table A; Target 51795; HLA-C*07:06; MYH4; ENSG00000264424; TAA
SVAELGEQI

SEQ ID NO: 51796 - protein, 8 aa, Homo sapiens
  misc_feature: Table A; Target 51796; HLA-A*03:02; MYH4; ENSG00000264424; TAA
SVFVVDPK

SEQ ID NO: 51797 - protein, 8 aa, Homo sapiens
  misc_feature: Table A; Target 51797; HLA-A*11:01; MYH4; ENSG00000264424; TAA
SVFVVDPK

SEQ ID NO: 51798 - protein, 11 aa, Homo sapiens
  misc_feature: Table A; Target 51798; HLA-A*25:01; MYH4; ENSG00000264424; TAA
SVFVVDPKESY

SEQ ID NO: 51799 - protein, 11 aa, Homo sapiens
  misc_feature: Table A; Target 51799; HLA-A*26:01; MYH4; ENSG00000264424; TAA
SVFVVDPKESY

SEQ ID NO: 51800 - protein, 11 aa, Homo sapiens
  misc_feature: Table A; Target 51800; HLA-A*29:02; MYH4; ENSG00000264424; TAA
SVFVVDPKESY

SEQ ID NO: 51801 - protein, 11 aa, Homo sapiens
  misc_feature: Table A; Target 51801; HLA-A*30:02; MYH4; ENSG00000264424; TAA
SVFVVDPKESY

SEQ ID NO: 51802 - protein, 11 aa, Homo sapiens
  misc_feature: Table A; Target 51802; HLA-A*32:01; MYH4; ENSG00000264424; TAA
SVFVVDPKESY

SEQ ID NO: 51803 - protein, 11 aa, Homo sapiens
  misc_feature: Table A; Target 51803; HLA-B*15:01; MYH4; ENSG00000264424; TAA
SVFVVDPKESY

SEQ ID NO: 51804 - protein, 11 aa, Homo sapiens
  misc_feature: Table A; Target 51804; HLA-B*35:01; MYH4; ENSG00000264424; TAA
SVFVVDPKESY

SEQ ID NO: 51805 - protein, 11 aa, Homo sapiens
  misc_feature: Table A; Target 51805; HLA-B*46:01; MYH4; ENSG00000264424; TAA
SVFVVDPKESY

SEQ ID NO: 51806 - protein, 8 aa, Homo sapiens
  misc_feature: Table A; Target 51806; HLA-A*24:02; MYH4; ENSG00000264424; TAA
SYHIFYQI

SEQ ID NO: 51807 - protein, 9 aa, Homo sapiens
  misc_feature: Table A; Target 51807; HLA-A*24:02; MYH4; ENSG00000264424; TAA
SYHIFYQIL

SEQ ID NO: 51808 - protein, 8 aa, Homo sapiens
  misc_feature: Table A; Target 51808; HLA-C*07:01; MYH4; ENSG00000264424; TAA
SYVKAIVQ

SEQ ID NO: 51809 - protein, 10 aa, Homo sapiens
  misc_feature: Table A; Target 51809; HLA-A*31:01; MYH4; ENSG00000264424; TAA
SYVKAIVQSR

SEQ ID NO: 51810 - protein, 10 aa, Homo sapiens
  misc_feature: Table A; Target 51810; HLA-A*33:01; MYH4; ENSG00000264424; TAA
SYVKAIVQSR

SEQ ID NO: 51811 - protein, 10 aa, Homo sapiens
  misc_feature: Table A; Target 51811; HLA-A*33:03; MYH4; ENSG00000264424; TAA
SYVKAIVQSR

SEQ ID NO: 51812 - protein, 10 aa, Homo sapiens
  misc_feature: Table A; Target 51812; HLA-C*07:06; MYH4; ENSG00000264424; TAA
SYVKAIVQSR

SEQ ID NO: 51813 - protein, 8 aa, Homo sapiens
  misc_feature: Table A; Target 51813; HLA-C*06:02; MYH4; ENSG00000264424; TAA
TAAALRKK

SEQ ID NO: 51814 - protein, 8 aa, Homo sapiens
  misc_feature: Table A; Target 51814; HLA-B*08:01; MYH4; ENSG00000264424; TAA
TADEKVAI

SEQ ID NO: 51815 - protein, 8 aa, Homo sapiens
  misc_feature: Table A; Target 51815; HLA-C*05:01; MYH4; ENSG00000264424; TAA
TADEKVAI

SEQ ID NO: 51816 - protein, 9 aa, Homo sapiens
  misc_feature: Table A; Target 51816; HLA-A*01:01; MYH4; ENSG00000264424; TAA
TADEKVAIY

SEQ ID NO: 51817 - protein, 9 aa, Homo sapiens
  misc_feature: Table A; Target 51817; HLA-A*03:02; MYH4; ENSG00000264424; TAA
TADEKVAIY

SEQ ID NO: 51818 - protein, 9 aa, Homo sapiens
  misc_feature: Table A; Target 51818; HLA-A*11:01; MYH4; ENSG00000264424; TAA
TADEKVAIY

SEQ ID NO: 51819 - protein, 9 aa, Homo sapiens
  misc_feature: Table A; Target 51819; HLA-A*25:01; MYH4; ENSG00000264424; TAA
TADEKVAIY

SEQ ID NO: 51820 - protein, 9 aa, Homo sapiens
  misc_feature: Table A; Target 51820; HLA-A*26:01; MYH4; ENSG00000264424; TAA
TADEKVAIY

SEQ ID NO: 51821 - protein, 9 aa, Homo sapiens
  misc_feature: Table A; Target 51821; HLA-A*29:02; MYH4; ENSG00000264424; TAA
TADEKVAIY

SEQ ID NO: 51822 - protein, 9 aa, Homo sapiens
  misc_feature: Table A; Target 51822; HLA-A*30:02; MYH4; ENSG00000264424; TAA
TADEKVAIY

SEQ ID NO: 51823 - protein, 9 aa, Homo sapiens
  misc_feature: Table A; Target 51823; HLA-A*32:01; MYH4; ENSG00000264424; TAA
TADEKVAIY

SEQ ID NO: 51824 - protein, 9 aa, Homo sapiens
  misc_feature: Table A; Target 51824; HLA-A*33:03; MYH4; ENSG00000264424; TAA
TADEKVAIY

SEQ ID NO: 51825 - protein, 9 aa, Homo sapiens
  misc_feature: Table A; Target 51825; HLA-A*68:01; MYH4; ENSG00000264424; TAA
TADEKVAIY

SEQ ID NO: 51826 - protein, 9 aa, Homo sapiens
  misc_feature: Table A; Target 51826; HLA-B*15:01; MYH4; ENSG00000264424; TAA
TADEKVAIY

SEQ ID NO: 51827 - protein, 9 aa, Homo sapiens
  misc_feature: Table A; Target 51827; HLA-B*15:03; MYH4; ENSG00000264424; TAA
TADEKVAIY

SEQ ID NO: 51828 - protein, 9 aa, Homo sapiens
  misc_feature: Table A; Target 51828; HLA-B*18:01; MYH4; ENSG00000264424; TAA
TADEKVAIY

SEQ ID NO: 51829 - protein, 9 aa, Homo sapiens
  misc_feature: Table A; Target 51829; HLA-B*27:05; MYH4; ENSG00000264424; TAA
TADEKVAIY

SEQ ID NO: 51830 - protein, 9 aa, Homo sapiens
  misc_feature: Table A; Target 51830; HLA-B*35:01; MYH4; ENSG00000264424; TAA
TADEKVAIY

SEQ ID NO: 51831 - protein, 9 aa, Homo sapiens
  misc_feature: Table A; Target 51831; HLA-B*35:03; MYH4; ENSG00000264424; TAA
TADEKVAIY

SEQ ID NO: 51832 - protein, 9 aa, Homo sapiens
  misc_feature: Table A; Target 51832; HLA-B*38:01; MYH4; ENSG00000264424; TAA
TADEKVAIY

SEQ ID NO: 51833 - protein, 9 aa, Homo sapiens
  misc_feature: Table A; Target 51833; HLA-B*39:01; MYH4; ENSG00000264424; TAA
TADEKVAIY

SEQ ID NO: 51834 - protein, 9 aa, Homo sapiens
  misc_feature: Table A; Target 51834; HLA-B*44:03; MYH4; ENSG00000264424; TAA
TADEKVAIY

SEQ ID NO: 51835 - protein, 9 aa, Homo sapiens
  misc_feature: Table A; Target 51835; HLA-B*46:01; MYH4; ENSG00000264424; TAA
TADEKVAIY

SEQ ID NO: 51836 - protein, 9 aa, Homo sapiens
  misc_feature: Table A; Target 51836; HLA-B*55:01; MYH4; ENSG00000264424; TAA
TADEKVAIY

SEQ ID NO: 51837 - protein, 9 aa, Homo sapiens
  misc_feature: Table A; Target 51837; HLA-B*58:01; MYH4; ENSG00000264424; TAA
TADEKVAIY

SEQ ID NO: 51838 - protein, 9 aa, Homo sapiens
  misc_feature: Table A; Target 51838; HLA-C*01:02; MYH4; ENSG00000264424; TAA
TADEKVAIY

SEQ ID NO: 51839 - protein, 9 aa, Homo sapiens
  misc_feature: Table A; Target 51839; HLA-C*02:02; MYH4; ENSG00000264424; TAA
TADEKVAIY

SEQ ID NO: 51840 - protein, 9 aa, Homo sapiens
  misc_feature: Table A; Target 51840; HLA-C*03:03; MYH4; ENSG00000264424; TAA
TADEKVAIY

SEQ ID NO: 51841 - protein, 9 aa, Homo sapiens
  misc_feature: Table A; Target 51841; HLA-C*03:04; MYH4; ENSG00000264424; TAA
TADEKVAIY

SEQ ID NO: 51842 - protein, 9 aa, Homo sapiens
  misc_feature: Table A; Target 51842; HLA-C*04:01; MYH4; ENSG00000264424; TAA
TADEKVAIY

SEQ ID NO: 51843 - protein, 9 aa, Homo sapiens
  misc_feature: Table A; Target 51843; HLA-C*05:01; MYH4; ENSG00000264424; TAA
TADEKVAIY

SEQ ID NO: 51844 - protein, 9 aa, Homo sapiens
  misc_feature: Table A; Target 51844; HLA-C*07:01; MYH4; ENSG00000264424; TAA
TADEKVAIY

SEQ ID NO: 51845 - protein, 9 aa, Homo sapiens
  misc_feature: Table A; Target 51845; HLA-C*07:04; MYH4; ENSG00000264424; TAA
TADEKVAIY

SEQ ID NO: 51846 - protein, 9 aa, Homo sapiens
  misc_feature: Table A; Target 51846; HLA-C*07:06; MYH4; ENSG00000264424; TAA
TADEKVAIY

SEQ ID NO: 51847 - protein, 9 aa, Homo sapiens
  misc_feature: Table A; Target 51847; HLA-C*12:03; MYH4; ENSG00000264424; TAA
TADEKVAIY

SEQ ID NO: 51848 - protein, 9 aa, Homo sapiens
  misc_feature: Table A; Target 51848; HLA-C*14:02; MYH4; ENSG00000264424; TAA
TADEKVAIY

SEQ ID NO: 51849 - protein, 9 aa, Homo sapiens
  misc_feature: Table A; Target 51849; HLA-C*16:01; MYH4; ENSG00000264424; TAA
TADEKVAIY

SEQ ID NO: 51850 - protein, 9 aa, Homo sapiens
  misc_feature: Table A; Target 51850; HLA-C*16:02; MYH4; ENSG00000264424; TAA
TADEKVAIY

SEQ ID NO: 51851 - protein, 9 aa, Homo sapiens
  misc_feature: Table A; Target 51851; HLA-C*16:04; MYH4; ENSG00000264424; TAA
TADEKVAIY

SEQ ID NO: 51852 - protein, 10 aa, Homo sapiens
  misc_feature: Table A; Target 51852; HLA-A*03:01; MYH4; ENSG00000264424; TAA
TADEKVAIYK

SEQ ID NO: 51853 - protein, 10 aa, Homo sapiens
  misc_feature: Table A; Target 51853; HLA-A*03:02; MYH4; ENSG00000264424; TAA
TADEKVAIYK

SEQ ID NO: 51854 - protein, 10 aa, Homo sapiens
  misc_feature: Table A; Target 51854; HLA-A*11:01; MYH4; ENSG00000264424; TAA
TADEKVAIYK

SEQ ID NO: 51855 - protein, 10 aa, Homo sapiens
  misc_feature: Table A; Target 51855; HLA-A*68:01; MYH4; ENSG00000264424; TAA
TADEKVAIYK

SEQ ID NO: 51856 - protein, 10 aa, Homo sapiens
  misc_feature: Table A; Target 51856; HLA-B*27:02; MYH4; ENSG00000264424; TAA
TADEKVAIYK

SEQ ID NO: 51857 - protein, 10 aa, Homo sapiens
  misc_feature: Table A; Target 51857; HLA-C*07:06; MYH4; ENSG00000264424; TAA
TADEKVAIYK

SEQ ID NO: 51858 - protein, 11 aa, Homo sapiens
  misc_feature: Table A; Target 51858; HLA-A*02:07; MYH4; ENSG00000264424; TAA
TADEKVAIYKL

SEQ ID NO: 51859 - protein, 11 aa, Homo sapiens
  misc_feature: Table A; Target 51859; HLA-B*38:01; MYH4; ENSG00000264424; TAA
TADEKVAIYKL

SEQ ID NO: 51860 - protein, 11 aa, Homo sapiens
  misc_feature: Table A; Target 51860; HLA-C*05:01; MYH4; ENSG00000264424; TAA
TADEKVAIYKL

SEQ ID NO: 51861 - protein, 11 aa, Homo sapiens
  misc_feature: Table A; Target 51861; HLA-B*27:02; MYH4; ENSG00000264424; TAA
TDAAMMAEELK

SEQ ID NO: 51862 - protein, 10 aa, Homo sapiens
  misc_feature: Table A; Target 51862; HLA-B*37:01; MYH4; ENSG00000264424; TAA
TDAIQRTEEL

SEQ ID NO: 51863 - protein, 10 aa, Homo sapiens
  misc_feature: Table A; Target 51863; HLA-A*30:01; MYH4; ENSG00000264424; TAA
TDISQIQGEM

SEQ ID NO: 51864 - protein, 8 aa, Homo sapiens
  misc_feature: Table A; Target 51864; HLA-B*37:01; MYH4; ENSG00000264424; TAA
TDSAVDIL

SEQ ID NO: 51865 - protein, 10 aa, Homo sapiens
  misc_feature: Table A; Target 51865; HLA-B*27:02; MYH4; ENSG00000264424; TAA
TDSAVDILGF

SEQ ID NO: 51866 - protein, 10 aa, Homo sapiens
  misc_feature: Table A; Target 51866; HLA-B*37:01; MYH4; ENSG00000264424; TAA
TDSAVDILGF

SEQ ID NO: 51867 - protein, 10 aa, Homo sapiens
  misc_feature: Table A; Target 51867; HLA-B*38:01; MYH4; ENSG00000264424; TAA
TDSAVDILGF

SEQ ID NO: 51868 - protein, 10 aa, Homo sapiens
  misc_feature: Table A; Target 51868; HLA-B*44:02; MYH4; ENSG00000264424; TAA
TDSAVDILGF

SEQ ID NO: 51869 - protein, 10 aa, Homo sapiens
  misc_feature: Table A; Target 51869; HLA-C*07:01; MYH4; ENSG00000264424; TAA
TDSAVDILGF

SEQ ID NO: 51870 - protein, 8 aa, Homo sapiens
  misc_feature: Table A; Target 51870; HLA-A*03:02; MYH4; ENSG00000264424; TAA
TDTSFKNK

SEQ ID NO: 51871 - protein, 9 aa, Homo sapiens
  misc_feature: Table A; Target 51871; HLA-B*37:01; MYH4; ENSG00000264424; TAA
TDTSFKNKL

SEQ ID NO: 51872 - protein, 9 aa, Homo sapiens
  misc_feature: Table A; Target 51872; HLA-C*16:02; MYH4; ENSG00000264424; TAA
TDTSFKNKL

SEQ ID NO: 51873 - protein, 10 aa, Homo sapiens
  misc_feature: Table A; Target 51873; HLA-B*44:02; MYH4; ENSG00000264424; TAA
TDTSFKNKLY

SEQ ID NO: 51874 - protein, 10 aa, Homo sapiens
  misc_feature: Table A; Target 51874; HLA-C*06:02; MYH4; ENSG00000264424; TAA
TDTSFKNKLY

SEQ ID NO: 51875 - protein, 10 aa, Homo sapiens
  misc_feature: Table A; Target 51875; HLA-C*07:01; MYH4; ENSG00000264424; TAA
TDTSFKNKLY

SEQ ID NO: 51876 - protein, 10 aa, Homo sapiens
  misc_feature: Table A; Target 51876; HLA-C*12:03; MYH4; ENSG00000264424; TAA
TDTSFKNKLY

SEQ ID NO: 51877 - protein, 10 aa, Homo sapiens
  misc_feature: Table A; Target 51877; HLA-C*16:02; MYH4; ENSG00000264424; TAA
TDTSFKNKLY

SEQ ID NO: 51878 - protein, 9 aa, Homo sapiens
  misc_feature: Table A; Target 51878; HLA-A*02:01; MYH4; ENSG00000264424; TAA
TEAGATVTV

SEQ ID NO: 51879 - protein, 9 aa, Homo sapiens
  misc_feature: Table A; Target 51879; HLA-A*02:03; MYH4; ENSG00000264424; TAA
TEAGATVTV

SEQ ID NO: 51880 - protein, 9 aa, Homo sapiens
  misc_feature: Table A; Target 51880; HLA-A*30:01; MYH4; ENSG00000264424; TAA
TEAGATVTV

SEQ ID NO: 51881 - protein, 9 aa, Homo sapiens
  misc_feature: Table A; Target 51881; HLA-A*68:02; MYH4; ENSG00000264424; TAA
TEAGATVTV

SEQ ID NO: 51882 - protein, 9 aa, Homo sapiens
  misc_feature: Table A; Target 51882; HLA-B*13:02; MYH4; ENSG00000264424; TAA
TEAGATVTV

SEQ ID NO: 51883 - protein, 9 aa, Homo sapiens
  misc_feature: Table A; Target 51883; HLA-B*18:01; MYH4; ENSG00000264424; TAA
TEAGATVTV

SEQ ID NO: 51884 - protein, 9 aa, Homo sapiens
  misc_feature: Table A; Target 51884; HLA-B*27:05; MYH4; ENSG00000264424; TAA
TEAGATVTV

SEQ ID NO: 51885 - protein, 9 aa, Homo sapiens
  misc_feature: Table A; Target 51885; HLA-B*35:03; MYH4; ENSG00000264424; TAA
TEAGATVTV

SEQ ID NO: 51886 - protein, 9 aa, Homo sapiens
  misc_feature: Table A; Target 51886; HLA-B*37:01; MYH4; ENSG00000264424; TAA
TEAGATVTV

SEQ ID NO: 51887 - protein, 9 aa, Homo sapiens
  misc_feature: Table A; Target 51887; HLA-B*38:01; MYH4; ENSG00000264424; TAA
TEAGATVTV

SEQ ID NO: 51888 - protein, 9 aa, Homo sapiens
  misc_feature: Table A; Target 51888; HLA-B*39:01; MYH4; ENSG00000264424; TAA
TEAGATVTV

SEQ ID NO: 51889 - protein, 9 aa, Homo sapiens
  misc_feature: Table A; Target 51889; HLA-B*40:01; MYH4; ENSG00000264424; TAA
TEAGATVTV

SEQ ID NO: 51890 - protein, 9 aa, Homo sapiens
  misc_feature: Table A; Target 51890; HLA-B*40:02; MYH4; ENSG00000264424; TAA
TEAGATVTV

SEQ ID NO: 51891 - protein, 9 aa, Homo sapiens
  misc_feature: Table A; Target 51891; HLA-B*44:02; MYH4; ENSG00000264424; TAA
TEAGATVTV

SEQ ID NO: 51892 - protein, 9 aa, Homo sapiens
  misc_feature: Table A; Target 51892; HLA-B*44:03; MYH4; ENSG00000264424; TAA
TEAGATVTV

SEQ ID NO: 51893 - protein, 9 aa, Homo sapiens
  misc_feature: Table A; Target 51893; HLA-B*49:01; MYH4; ENSG00000264424; TAA
TEAGATVTV

SEQ ID NO: 51894 - protein, 9 aa, Homo sapiens
  misc_feature: Table A; Target 51894; HLA-B*51:01; MYH4; ENSG00000264424; TAA
TEAGATVTV

SEQ ID NO: 51895 - protein, 9 aa, Homo sapiens
  misc_feature: Table A; Target 51895; HLA-B*55:01; MYH4; ENSG00000264424; TAA
TEAGATVTV

SEQ ID NO: 51896 - protein, 9 aa, Homo sapiens
  misc_feature: Table A; Target 51896; HLA-C*02:02; MYH4; ENSG00000264424; TAA
TEAGATVTV

SEQ ID NO: 51897 - protein, 9 aa, Homo sapiens
  misc_feature: Table A; Target 51897; HLA-C*03:04; MYH4; ENSG00000264424; TAA
TEAGATVTV

SEQ ID NO: 51898 - protein, 9 aa, Homo sapiens
  misc_feature: Table A; Target 51898; HLA-C*04:01; MYH4; ENSG00000264424; TAA
TEAGATVTV

SEQ ID NO: 51899 - protein, 9 aa, Homo sapiens
  misc_feature: Table A; Target 51899; HLA-C*06:02; MYH4; ENSG00000264424; TAA
TEAGATVTV

SEQ ID NO: 51900 - protein, 9 aa, Homo sapiens
  misc_feature: Table A; Target 51900; HLA-C*07:04; MYH4; ENSG00000264424; TAA
TEAGATVTV

SEQ ID NO: 51901 - protein, 9 aa, Homo sapiens
  misc_feature: Table A; Target 51901; HLA-C*12:03; MYH4; ENSG00000264424; TAA
TEAGATVTV

SEQ ID NO: 51902 - protein, 9 aa, Homo sapiens
  misc_feature: Table A; Target 51902; HLA-C*16:02; MYH4; ENSG00000264424; TAA
TEAGATVTV

SEQ ID NO: 51903 - protein, 9 aa, Homo sapiens
  misc_feature: Table A; Target 51903; HLA-C*16:04; MYH4; ENSG00000264424; TAA
TEAGATVTV

SEQ ID NO: 51904 - protein, 10 aa, Homo sapiens
  misc_feature: Table A; Target 51904; HLA-A*30:01; MYH4; ENSG00000264424; TAA
TEAGATVTVK

SEQ ID NO: 51905 - protein, 10 aa, Homo sapiens
  misc_feature: Table A; Target 51905; HLA-A*68:01; MYH4; ENSG00000264424; TAA
TEAGATVTVK

SEQ ID NO: 51906 - protein, 10 aa, Homo sapiens
  misc_feature: Table A; Target 51906; HLA-B*27:02; MYH4; ENSG00000264424; TAA
TEAGATVTVK

SEQ ID NO: 51907 - protein, 10 aa, Homo sapiens
  misc_feature: Table A; Target 51907; HLA-B*27:05; MYH4; ENSG00000264424; TAA
TEAGATVTVK

SEQ ID NO: 51908 - protein, 10 aa, Homo sapiens
  misc_feature: Table A; Target 51908; HLA-B*40:01; MYH4; ENSG00000264424; TAA
TEAGATVTVK

SEQ ID NO: 51909 - protein, 10 aa, Homo sapiens
  misc_feature: Table A; Target 51909; HLA-B*49:01; MYH4; ENSG00000264424; TAA
TEAGATVTVK

SEQ ID NO: 51910 - protein, 10 aa, Homo sapiens
  misc_feature: Table A; Target 51910; HLA-C*07:06; MYH4; ENSG00000264424; TAA
TEAGATVTVK

SEQ ID NO: 51911 - protein, 9 aa, Homo sapiens
  misc_feature: Table A; Target 51911; HLA-A*30:01; MYH4; ENSG00000264424; TAA
TEEDRKNIL

SEQ ID NO: 51912 - protein, 9 aa, Homo sapiens
  misc_feature: Table A; Target 51912; HLA-B*37:01; MYH4; ENSG00000264424; TAA
TEEDRKNIL

SEQ ID NO: 51913 - protein, 9 aa, Homo sapiens
  misc_feature: Table A; Target 51913; HLA-B*40:01; MYH4; ENSG00000264424; TAA
TEEDRKNIL

SEQ ID NO: 51914 - protein, 9 aa, Homo sapiens
  misc_feature: Table A; Target 51914; HLA-B*40:02; MYH4; ENSG00000264424; TAA
TEEDRKNIL

SEQ ID NO: 51915 - protein, 9 aa, Homo sapiens
  misc_feature: Table A; Target 51915; HLA-B*44:02; MYH4; ENSG00000264424; TAA
TEEDRKNIL

SEQ ID NO: 51916 - protein, 11 aa, Homo sapiens
  misc_feature: Table A; Target 51916; HLA-B*40:01; MYH4; ENSG00000264424; TAA
TEELEEAKKKL

SEQ ID NO: 51917 - protein, 11 aa, Homo sapiens
  misc_feature: Table A; Target 51917; HLA-B*44:03; MYH4; ENSG00000264424; TAA
TEELEEAKKKL

SEQ ID NO: 51918 - protein, 11 aa, Homo sapiens
  misc_feature: Table A; Target 51918; HLA-B*38:01; MYH4; ENSG00000264424; TAA
TEEMAGLDETI

SEQ ID NO: 51919 - protein, 11 aa, Homo sapiens
  misc_feature: Table A; Target 51919; HLA-B*40:01; MYH4; ENSG00000264424; TAA
TEEMAGLDETI

SEQ ID NO: 51920 - protein, 11 aa, Homo sapiens
  misc_feature: Table A; Target 51920; HLA-B*49:01; MYH4; ENSG00000264424; TAA
TEEMAGLDETI

SEQ ID NO: 51921 - protein, 8 aa, Homo sapiens
  misc_feature: Table A; Target 51921; HLA-A*30:01; MYH4; ENSG00000264424; TAA
TEKEMANM

SEQ ID NO: 51922 - protein, 8 aa, Homo sapiens
  misc_feature: Table A; Target 51922; HLA-B*18:01; MYH4; ENSG00000264424; TAA
TEKEMANM

SEQ ID NO: 51923 - protein, 8 aa, Homo sapiens
  misc_feature: Table A; Target 51923; HLA-B*37:01; MYH4; ENSG00000264424; TAA
TEKEMANM

SEQ ID NO: 51924 - protein, 8 aa, Homo sapiens
  misc_feature: Table A; Target 51924; HLA-B*40:02; MYH4; ENSG00000264424; TAA
TEKEMANM

SEQ ID NO: 51925 - protein, 10 aa, Homo sapiens
  misc_feature: Table A; Target 51925; HLA-B*18:01; MYH4; ENSG00000264424; TAA
TELFKVKNAY

SEQ ID NO: 51926 - protein, 10 aa, Homo sapiens
  misc_feature: Table A; Target 51926; HLA-B*44:02; MYH4; ENSG00000264424; TAA
TELFKVKNAY

SEQ ID NO: 51927 - protein, 10 aa, Homo sapiens
  misc_feature: Table A; Target 51927; HLA-B*44:03; MYH4; ENSG00000264424; TAA
TELFKVKNAY

SEQ ID NO: 51928 - protein, 8 aa, Homo sapiens
  misc_feature: Table A; Target 51928; HLA-B*08:01; MYH4; ENSG00000264424; TAA
TENDKQQL

SEQ ID NO: 51929 - protein, 8 aa, Homo sapiens
  misc_feature: Table A; Target 51929; HLA-B*18:01; MYH4; ENSG00000264424; TAA
TENDKQQL

SEQ ID NO: 51930 - protein, 8 aa, Homo sapiens
  misc_feature: Table A; Target 51930; HLA-B*37:01; MYH4; ENSG00000264424; TAA
TENDKQQL

SEQ ID NO: 51931 - protein, 8 aa, Homo sapiens
  misc_feature: Table A; Target 51931; HLA-B*44:02; MYH4; ENSG00000264424; TAA
TENDKQQL

SEQ ID NO: 51932 - protein, 8 aa, Homo sapiens
  misc_feature: Table A; Target 51932; HLA-B*44:03; MYH4; ENSG00000264424; TAA
TENDKQQL

SEQ ID NO: 51933 - protein, 8 aa, Homo sapiens
  misc_feature: Table A; Target 51933; HLA-B*18:01; MYH4; ENSG00000264424; TAA
TENKVKNL

SEQ ID NO: 51934 - protein, 8 aa, Homo sapiens
  misc_feature: Table A; Target 51934; HLA-B*37:01; MYH4; ENSG00000264424; TAA
TENKVKNL

SEQ ID NO: 51935 - protein, 8 aa, Homo sapiens
  misc_feature: Table A; Target 51935; HLA-B*44:02; MYH4; ENSG00000264424; TAA
TENKVKNL

SEQ ID NO: 51936 - protein, 8 aa, Homo sapiens
  misc_feature: Table A; Target 51936; HLA-B*44:03; MYH4; ENSG00000264424; TAA
TENKVKNL

SEQ ID NO: 51937 - protein, 11 aa, Homo sapiens
  misc_feature: Table A; Target 51937; HLA-B*44:02; MYH4; ENSG00000264424; TAA
TEQIAEGGKHI

SEQ ID NO: 51938 - protein, 11 aa, Homo sapiens
  misc_feature: Table A; Target 51938; HLA-B*44:03; MYH4; ENSG00000264424; TAA
TEQIAEGGKHI

SEQ ID NO: 51939 - protein, 11 aa, Homo sapiens
  misc_feature: Table A; Target 51939; HLA-B*49:01; MYH4; ENSG00000264424; TAA
TEQIAEGGKHI

SEQ ID NO: 51940 - protein, 10 aa, Homo sapiens
  misc_feature: Table A; Target 51940; HLA-A*30:01; MYH4; ENSG00000264424; TAA
TESGEFSRQL

SEQ ID NO: 51941 - protein, 10 aa, Homo sapiens
  misc_feature: Table A; Target 51941; HLA-B*40:01; MYH4; ENSG00000264424; TAA
TESGEFSRQL

SEQ ID NO: 51942 - protein, 10 aa, Homo sapiens
  misc_feature: Table A; Target 51942; HLA-B*40:02; MYH4; ENSG00000264424; TAA
TESGEFSRQL

SEQ ID NO: 51943 - protein, 10 aa, Homo sapiens
  misc_feature: Table A; Target 51943; HLA-B*44:02; MYH4; ENSG00000264424; TAA
TESGEFSRQL

SEQ ID NO: 51944 - protein, 10 aa, Homo sapiens
  misc_feature: Table A; Target 51944; HLA-B*44:03; MYH4; ENSG00000264424; TAA
TESGEFSRQL

SEQ ID NO: 51945 - protein, 10 aa, Homo sapiens
  misc_feature: Table A; Target 51945; HLA-B*49:01; MYH4; ENSG00000264424; TAA
TESGEFSRQL

SEQ ID NO: 51946 - protein, 9 aa, Homo sapiens
  misc_feature: Table A; Target 51946; HLA-A*30:02; MYH4; ENSG00000264424; TAA
TEVADKAAY

SEQ ID NO: 51947 - protein, 9 aa, Homo sapiens
  misc_feature: Table A; Target 51947; HLA-A*32:01; MYH4; ENSG00000264424; TAA
TEVADKAAY

SEQ ID NO: 51948 - protein, 9 aa, Homo sapiens
  misc_feature: Table A; Target 51948; HLA-B*15:01; MYH4; ENSG00000264424; TAA
TEVADKAAY

SEQ ID NO: 51949 - protein, 9 aa, Homo sapiens
  misc_feature: Table A; Target 51949; HLA-B*15:03; MYH4; ENSG00000264424; TAA
TEVADKAAY

SEQ ID NO: 51950 - protein, 9 aa, Homo sapiens
  misc_feature: Table A; Target 51950; HLA-B*18:01; MYH4; ENSG00000264424; TAA
TEVADKAAY

SEQ ID NO: 51951 - protein, 9 aa, Homo sapiens
  misc_feature: Table A; Target 51951; HLA-B*27:02; MYH4; ENSG00000264424; TAA
TEVADKAAY

SEQ ID NO: 51952 - protein, 9 aa, Homo sapiens
  misc_feature: Table A; Target 51952; HLA-B*35:01; MYH4; ENSG00000264424; TAA
TEVADKAAY

SEQ ID NO: 51953 - protein, 9 aa, Homo sapiens
  misc_feature: Table A; Target 51953; HLA-B*37:01; MYH4; ENSG00000264424; TAA
TEVADKAAY

SEQ ID NO: 51954 - protein, 9 aa, Homo sapiens
  misc_feature: Table A; Target 51954; HLA-B*40:01; MYH4; ENSG00000264424; TAA
TEVADKAAY

SEQ ID NO: 51955 - protein, 9 aa, Homo sapiens
  misc_feature: Table A; Target 51955; HLA-B*44:02; MYH4; ENSG00000264424; TAA
TEVADKAAY

SEQ ID NO: 51956 - protein, 9 aa, Homo sapiens
  misc_feature: Table A; Target 51956; HLA-B*44:03; MYH4; ENSG00000264424; TAA
TEVADKAAY

SEQ ID NO: 51957 - protein, 9 aa, Homo sapiens
  misc_feature: Table A; Target 51957; HLA-C*02:02; MYH4; ENSG00000264424; TAA
TEVADKAAY

SEQ ID NO: 51958 - protein, 9 aa, Homo sapiens
  misc_feature: Table A; Target 51958; HLA-C*03:03; MYH4; ENSG00000264424; TAA
TEVADKAAY

SEQ ID NO: 51959 - protein, 9 aa, Homo sapiens
  misc_feature: Table A; Target 51959; HLA-C*16:01; MYH4; ENSG00000264424; TAA
TEVADKAAY

SEQ ID NO: 51960 - protein, 9 aa, Homo sapiens
  misc_feature: Table A; Target 51960; HLA-C*16:04; MYH4; ENSG00000264424; TAA
TEVADKAAY

SEQ ID NO: 51961 - protein, 10 aa, Homo sapiens
  misc_feature: Table A; Target 51961; HLA-A*30:01; MYH4; ENSG00000264424; TAA
TEVADKAAYL

SEQ ID NO: 51962 - protein, 10 aa, Homo sapiens
  misc_feature: Table A; Target 51962; HLA-B*40:01; MYH4; ENSG00000264424; TAA
TEVADKAAYL

SEQ ID NO: 51963 - protein, 10 aa, Homo sapiens
  misc_feature: Table A; Target 51963; HLA-B*40:02; MYH4; ENSG00000264424; TAA
TEVADKAAYL

SEQ ID NO: 51964 - protein, 10 aa, Homo sapiens
  misc_feature: Table A; Target 51964; HLA-B*44:02; MYH4; ENSG00000264424; TAA
TEVADKAAYL

SEQ ID NO: 51965 - protein, 10 aa, Homo sapiens
  misc_feature: Table A; Target 51965; HLA-B*44:03; MYH4; ENSG00000264424; TAA
TEVADKAAYL

SEQ ID NO: 51966 - protein, 10 aa, Homo sapiens
  misc_feature: Table A; Target 51966; HLA-B*49:01; MYH4; ENSG00000264424; TAA
TEVADKAAYL

SEQ ID NO: 51967 - protein, 8 aa, Homo sapiens
  misc_feature: Table A; Target 51967; HLA-C*04:01; MYH4; ENSG00000264424; TAA
TGAVMHYG

SEQ ID NO: 51968 - protein, 8 aa, Homo sapiens
  misc_feature: Table A; Target 51968; HLA-C*06:02; MYH4; ENSG00000264424; TAA
TGAVMHYG

SEQ ID NO: 51969 - protein, 8 aa, Homo sapiens
  misc_feature: Table A; Target 51969; HLA-C*07:01; MYH4; ENSG00000264424; TAA
TGAVMHYG

SEQ ID NO: 51970 - protein, 9 aa, Homo sapiens
  misc_feature: Table A; Target 51970; HLA-C*06:02; MYH4; ENSG00000264424; TAA
TGAVMHYGN

SEQ ID NO: 51971 - protein, 9 aa, Homo sapiens
  misc_feature: Table A; Target 51971; HLA-B*38:01; MYH4; ENSG00000264424; TAA
THLHEPAVL

SEQ ID NO: 51972 - protein, 9 aa, Homo sapiens
  misc_feature: Table A; Target 51972; HLA-B*39:01; MYH4; ENSG00000264424; TAA
THLHEPAVL

SEQ ID NO: 51973 - protein, 10 aa, Homo sapiens
  misc_feature: Table A; Target 51973; HLA-A*29:02; MYH4; ENSG00000264424; TAA
THLHEPAVLY

SEQ ID NO: 51974 - protein, 10 aa, Homo sapiens
  misc_feature: Table A; Target 51974; HLA-C*07:01; MYH4; ENSG00000264424; TAA
THLHEPAVLY

SEQ ID NO: 51975 - protein, 9 aa, Homo sapiens
  misc_feature: Table A; Target 51975; HLA-A*03:01; MYH4; ENSG00000264424; TAA
TIAKLTKEK

SEQ ID NO: 51976 - protein, 9 aa, Homo sapiens
  misc_feature: Table A; Target 51976; HLA-A*03:02; MYH4; ENSG00000264424; TAA
TIAKLTKEK

SEQ ID NO: 51977 - protein, 8 aa, Homo sapiens
  misc_feature: Table A; Target 51977; HLA-A*03:01; MYH4; ENSG00000264424; TAA
TIAVTGEK

SEQ ID NO: 51978 - protein, 8 aa, Homo sapiens
  misc_feature: Table A; Target 51978; HLA-A*03:02; MYH4; ENSG00000264424; TAA
TIAVTGEK

SEQ ID NO: 51979 - protein, 8 aa, Homo sapiens
  misc_feature: Table A; Target 51979; HLA-A*68:01; MYH4; ENSG00000264424; TAA
TIAVTGEK

SEQ ID NO: 51980 - protein, 9 aa, Homo sapiens
  misc_feature: Table A; Target 51980; HLA-A*03:01; MYH4; ENSG00000264424; TAA
TIAVTGEKK

SEQ ID NO: 51981 - protein, 9 aa, Homo sapiens
  misc_feature: Table A; Target 51981; HLA-A*03:02; MYH4; ENSG00000264424; TAA
TIAVTGEKK

SEQ ID NO: 51982 - protein, 9 aa, Homo sapiens
  misc_feature: Table A; Target 51982; HLA-A*11:01; MYH4; ENSG00000264424; TAA
TIAVTGEKK

SEQ ID NO: 51983 - protein, 9 aa, Homo sapiens
  misc_feature: Table A; Target 51983; HLA-A*68:01; MYH4; ENSG00000264424; TAA
TIAVTGEKK

SEQ ID NO: 51984 - protein, 9 aa, Homo sapiens
  misc_feature: Table A; Target 51984; HLA-C*07:06; MYH4; ENSG00000264424; TAA
TIAVTGEKK

SEQ ID NO: 51985 - protein, 10 aa, Homo sapiens
  misc_feature: Table A; Target 51985; HLA-B*15:03; MYH4; ENSG00000264424; TAA
TKGQTVQQVY

SEQ ID NO: 51986 - protein, 10 aa, Homo sapiens
  misc_feature: Table A; Target 51986; HLA-A*68:01; MYH4; ENSG00000264424; TAA
TKYETDAIQR

SEQ ID NO: 51987 - protein, 9 aa, Homo sapiens
  misc_feature: Table A; Target 51987; HLA-A*02:03; MYH4; ENSG00000264424; TAA
TLAFLFSGA

SEQ ID NO: 51988 - protein, 9 aa, Homo sapiens
  misc_feature: Table A; Target 51988; HLA-A*02:01; MYH4; ENSG00000264424; TAA
TLAHALQSA

SEQ ID NO: 51989 - protein, 9 aa, Homo sapiens
  misc_feature: Table A; Target 51989; HLA-A*02:03; MYH4; ENSG00000264424; TAA
TLAHALQSA

SEQ ID NO: 51990 - protein, 9 aa, Homo sapiens
  misc_feature: Table A; Target 51990; HLA-A*02:04; MYH4; ENSG00000264424; TAA
TLAHALQSA

SEQ ID NO: 51991 - protein, 9 aa, Homo sapiens
  misc_feature: Table A; Target 51991; HLA-B*54:01; MYH4; ENSG00000264424; TAA
TLAHALQSA

SEQ ID NO: 51992 - protein, 9 aa, Homo sapiens
  misc_feature: Table A; Target 51992; HLA-B*55:01; MYH4; ENSG00000264424; TAA
TLAHALQSA

SEQ ID NO: 51993 - protein, 9 aa, Homo sapiens
  misc_feature: Table A; Target 51993; HLA-B*56:01; MYH4; ENSG00000264424; TAA
TLAHALQSA

SEQ ID NO: 51994 - protein, 10 aa, Homo sapiens
  misc_feature: Table A; Target 51994; HLA-A*68:01; MYH4; ENSG00000264424; TAA
TLAHALQSAR

SEQ ID NO: 51995 - protein, 9 aa, Homo sapiens
  misc_feature: Table A; Target 51995; HLA-A*03:01; MYH4; ENSG00000264424; TAA
TLAKVEKEK

SEQ ID NO: 51996 - protein, 9 aa, Homo sapiens
  misc_feature: Table A; Target 51996; HLA-A*03:02; MYH4; ENSG00000264424; TAA
TLAKVEKEK

SEQ ID NO: 51997 - protein, 9 aa, Homo sapiens
  misc_feature: Table A; Target 51997; HLA-A*03:01; MYH4; ENSG00000264424; TAA
TLDAEIRSR

SEQ ID NO: 51998 - protein, 9 aa, Homo sapiens
  misc_feature: Table A; Target 51998; HLA-A*31:01; MYH4; ENSG00000264424; TAA
TLDAEIRSR

SEQ ID NO: 51999 - protein, 9 aa, Homo sapiens
  misc_feature: Table A; Target 51999; HLA-A*33:01; MYH4; ENSG00000264424; TAA
TLDAEIRSR

SEQ ID NO: 52000 - protein, 9 aa, Homo sapiens
  misc_feature: Table A; Target 52000; HLA-A*33:03; MYH4; ENSG00000264424; TAA
TLDAEIRSR

SEQ ID NO: 52001 - protein, 9 aa, Homo sapiens
  misc_feature: Table A; Target 52001; HLA-A*02:01; MYH4; ENSG00000264424; TAA
TLEDQIISA

SEQ ID NO: 52002 - protein, 9 aa, Homo sapiens
  misc_feature: Table A; Target 52002; HLA-A*02:01; MYH4; ENSG00000264424; TAA
TLEDQLSEI

SEQ ID NO: 52003 - protein, 9 aa, Homo sapiens
  misc_feature: Table A; Target 52003; HLA-A*02:07; MYH4; ENSG00000264424; TAA
TLEDQLSEI

SEQ ID NO: 52004 - protein, 9 aa, Homo sapiens
  misc_feature: Table A; Target 52004; HLA-B*55:01; MYH4; ENSG00000264424; TAA
TLEDQLSEI

SEQ ID NO: 52005 - protein, 9 aa, Homo sapiens
  misc_feature: Table A; Target 52005; HLA-C*05:01; MYH4; ENSG00000264424; TAA
TLEDQLSEI

SEQ ID NO: 52006 - protein, 10 aa, Homo sapiens
  misc_feature: Table A; Target 52006; HLA-B*27:02; MYH4; ENSG00000264424; TAA
TLEDQLSEIK

SEQ ID NO: 52007 - protein, 11 aa, Homo sapiens
  misc_feature: Table A; Target 52007; HLA-C*06:02; MYH4; ENSG00000264424; TAA
TLEDQLSEIKT

SEQ ID NO: 52008 - protein, 9 aa, Homo sapiens
  misc_feature: Table A; Target 52008; HLA-B*08:01; MYH4; ENSG00000264424; TAA
TLMQEKNDL

SEQ ID NO: 52009 - protein, 11 aa, Homo sapiens
  misc_feature: Table A; Target 52009; HLA-A*02:01; MYH4; ENSG00000264424; TAA
TLMQEKNDLQL

SEQ ID NO: 52010 - protein, 11 aa, Homo sapiens
  misc_feature: Table A; Target 52010; HLA-B*38:01; MYH4; ENSG00000264424; TAA
TMDTENDKQQL

SEQ ID NO: 52011 - protein, 11 aa, Homo sapiens
  misc_feature: Table A; Target 52011; HLA-B*55:01; MYH4; ENSG00000264424; TAA
TMDTENDKQQL

SEQ ID NO: 52012 - protein, 11 aa, Homo sapiens
  misc_feature: Table A; Target 52012; HLA-C*04:01; MYH4; ENSG00000264424; TAA
TMDTENDKQQL

SEQ ID NO: 52013 - protein, 11 aa, Homo sapiens
  misc_feature: Table A; Target 52013; HLA-C*05:01; MYH4; ENSG00000264424; TAA
TMDTENDKQQL

SEQ ID NO: 52014 - protein, 9 aa, Homo sapiens
  misc_feature: Table A; Target 52014; HLA-A*68:02; MYH4; ENSG00000264424; TAA
TNPYDFAFV

SEQ ID NO: 52015 - protein, 9 aa, Homo sapiens
  misc_feature: Table A; Target 52015; HLA-B*07:02; MYH4; ENSG00000264424; TAA
TPGAMEHEL

SEQ ID NO: 52016 - protein, 9 aa, Homo sapiens
  misc_feature: Table A; Target 52016; HLA-B*35:01; MYH4; ENSG00000264424; TAA
TPGAMEHEL

SEQ ID NO: 52017 - protein, 9 aa, Homo sapiens
  misc_feature: Table A; Target 52017; HLA-B*35:03; MYH4; ENSG00000264424; TAA
TPGAMEHEL

SEQ ID NO: 52018 - protein, 9 aa, Homo sapiens
  misc_feature: Table A; Target 52018; HLA-B*55:01; MYH4; ENSG00000264424; TAA
TPGAMEHEL

SEQ ID NO: 52019 - protein, 9 aa, Homo sapiens
  misc_feature: Table A; Target 52019; HLA-C*03:03; MYH4; ENSG00000264424; TAA
TPGAMEHEL

SEQ ID NO: 52020 - protein, 9 aa, Homo sapiens
  misc_feature: Table A; Target 52020; HLA-C*07:02; MYH4; ENSG00000264424; TAA
TPGAMEHEL

SEQ ID NO: 52021 - protein, 11 aa, Homo sapiens
  misc_feature: Table A; Target 52021; HLA-B*35:03; MYH4; ENSG00000264424; TAA
TPGAMEHELVL

SEQ ID NO: 52022 - protein, 9 aa, Homo sapiens
  misc_feature: Table A; Target 52022; HLA-B*39:01; MYH4; ENSG00000264424; TAA
TQAELEASQ

SEQ ID NO: 52023 - protein, 10 aa, Homo sapiens
  misc_feature: Table A; Target 52023; HLA-B*27:02; MYH4; ENSG00000264424; TAA
TQAELEASQK

SEQ ID NO: 52024 - protein, 10 aa, Homo sapiens
  misc_feature: Table A; Target 52024; HLA-B*27:05; MYH4; ENSG00000264424; TAA
TQAELEASQK

SEQ ID NO: 52025 - protein, 10 aa, Homo sapiens
  misc_feature: Table A; Target 52025; HLA-C*07:06; MYH4; ENSG00000264424; TAA
TQAELEASQK

SEQ ID NO: 52026 - protein, 9 aa, Homo sapiens
  misc_feature: Table A; Target 52026; HLA-B*13:02; MYH4; ENSG00000264424; TAA
TQLHLDDAI

SEQ ID NO: 52027 - protein, 9 aa, Homo sapiens
  misc_feature: Table A; Target 52027; HLA-B*38:01; MYH4; ENSG00000264424; TAA
TQLHLDDAI

SEQ ID NO: 52028 - protein, 9 aa, Homo sapiens
  misc_feature: Table A; Target 52028; HLA-A*31:01; MYH4; ENSG00000264424; TAA
TQNTSLINT

SEQ ID NO: 52029 - protein, 10 aa, Homo sapiens
  misc_feature: Table A; Target 52029; HLA-A*03:01; MYH4; ENSG00000264424; TAA
TQNTSLINTK

SEQ ID NO: 52030 - protein, 10 aa, Homo sapiens
  misc_feature: Table A; Target 52030; HLA-A*03:02; MYH4; ENSG00000264424; TAA
TQNTSLINTK

SEQ ID NO: 52031 - protein, 10 aa, Homo sapiens
  misc_feature: Table A; Target 52031; HLA-A*11:01; MYH4; ENSG00000264424; TAA
TQNTSLINTK

SEQ ID NO: 52032 - protein, 10 aa, Homo sapiens
  misc_feature: Table A; Target 52032; HLA-B*27:02; MYH4; ENSG00000264424; TAA
TQNTSLINTK

SEQ ID NO: 52033 - protein, 10 aa, Homo sapiens
  misc_feature: Table A; Target 52033; HLA-B*27:05; MYH4; ENSG00000264424; TAA
TQNTSLINTK

SEQ ID NO: 52034 - protein, 10 aa, Homo sapiens
  misc_feature: Table A; Target 52034; HLA-C*07:06; MYH4; ENSG00000264424; TAA
TQNTSLINTK

SEQ ID NO: 52035 - protein, 11 aa, Homo sapiens
  misc_feature: Table A; Target 52035; HLA-A*03:02; MYH4; ENSG00000264424; TAA
TQNTSLINTKK

SEQ ID NO: 52036 - protein, 11 aa, Homo sapiens
  misc_feature: Table A; Target 52036; HLA-A*11:01; MYH4; ENSG00000264424; TAA
TQNTSLINTKK

SEQ ID NO: 52037 - protein, 11 aa, Homo sapiens
  misc_feature: Table A; Target 52037; HLA-A*68:01; MYH4; ENSG00000264424; TAA
TQNTSLINTKK

SEQ ID NO: 52038 - protein, 11 aa, Homo sapiens
  misc_feature: Table A; Target 52038; HLA-B*27:02; MYH4; ENSG00000264424; TAA
TQNTSLINTKK

SEQ ID NO: 52039 - protein, 11 aa, Homo sapiens
  misc_feature: Table A; Target 52039; HLA-B*27:05; MYH4; ENSG00000264424; TAA
TQNTSLINTKK

SEQ ID NO: 52040 - protein, 11 aa, Homo sapiens
  misc_feature: Table A; Target 52040; HLA-C*06:02; MYH4; ENSG00000264424; TAA
TQNTSLINTKK

SEQ ID NO: 52041 - protein, 11 aa, Homo sapiens
  misc_feature: Table A; Target 52041; HLA-C*07:06; MYH4; ENSG00000264424; TAA
TQNTSLINTKK

SEQ ID NO: 52042 - protein, 9 aa, Homo sapiens
  misc_feature: Table A; Target 52042; HLA-A*11:01; MYH4; ENSG00000264424; TAA
TQYKFGHTK

SEQ ID NO: 52043 - protein, 10 aa, Homo sapiens
  misc_feature: Table A; Target 52043; HLA-A*02:03; MYH4; ENSG00000264424; TAA
TQYKFGHTKV

SEQ ID NO: 52044 - protein, 10 aa, Homo sapiens
  misc_feature: Table A; Target 52044; HLA-B*27:02; MYH4; ENSG00000264424; TAA
TRINQQLDTK

SEQ ID NO: 52045 - protein, 10 aa, Homo sapiens
  misc_feature: Table A; Target 52045; HLA-B*27:05; MYH4; ENSG00000264424; TAA
TRINQQLDTK

SEQ ID NO: 52046 - protein, 8 aa, Homo sapiens
  misc_feature: Table A; Target 52046; HLA-B*58:01; MYH4; ENSG00000264424; TAA
TSAHLERM

SEQ ID NO: 52047 - protein, 9 aa, Homo sapiens
  misc_feature: Table A; Target 52047; HLA-A*03:01; MYH4; ENSG00000264424; TAA
TSAQIEMNK

SEQ ID NO: 52048 - protein, 9 aa, Homo sapiens
  misc_feature: Table A; Target 52048; HLA-A*03:02; MYH4; ENSG00000264424; TAA
TSAQIEMNK

SEQ ID NO: 52049 - protein, 9 aa, Homo sapiens
  misc_feature: Table A; Target 52049; HLA-A*11:01; MYH4; ENSG00000264424; TAA
TSAQIEMNK

SEQ ID NO: 52050 - protein, 9 aa, Homo sapiens
  misc_feature: Table A; Target 52050; HLA-A*33:03; MYH4; ENSG00000264424; TAA
TSAQIEMNK

SEQ ID NO: 52051 - protein, 9 aa, Homo sapiens
  misc_feature: Table A; Target 52051; HLA-A*68:01; MYH4; ENSG00000264424; TAA
TSAQIEMNK

SEQ ID NO: 52052 - protein, 9 aa, Homo sapiens
  misc_feature: Table A; Target 52052; HLA-A*68:02; MYH4; ENSG00000264424; TAA
TSAQIEMNK

SEQ ID NO: 52053 - protein, 9 aa, Homo sapiens
  misc_feature: Table A; Target 52053; HLA-B*27:02; MYH4; ENSG00000264424; TAA
TSAQIEMNK

SEQ ID NO: 52054 - protein, 9 aa, Homo sapiens
  misc_feature: Table A; Target 52054; HLA-B*27:05; MYH4; ENSG00000264424; TAA
TSAQIEMNK

SEQ ID NO: 52055 - protein, 9 aa, Homo sapiens
  misc_feature: Table A; Target 52055; HLA-C*06:02; MYH4; ENSG00000264424; TAA
TSAQIEMNK

SEQ ID NO: 52056 - protein, 9 aa, Homo sapiens
  misc_feature: Table A; Target 52056; HLA-C*07:06; MYH4; ENSG00000264424; TAA
TSAQIEMNK

SEQ ID NO: 52057 - protein, 10 aa, Homo sapiens
  misc_feature: Table A; Target 52057; HLA-A*03:02; MYH4; ENSG00000264424; TAA
TSAQIEMNKK

SEQ ID NO: 52058 - protein, 10 aa, Homo sapiens
  misc_feature: Table A; Target 52058; HLA-A*11:01; MYH4; ENSG00000264424; TAA
TSAQIEMNKK

SEQ ID NO: 52059 - protein, 10 aa, Homo sapiens
  misc_feature: Table A; Target 52059; HLA-A*68:01; MYH4; ENSG00000264424; TAA
TSAQIEMNKK

SEQ ID NO: 52060 - protein, 10 aa, Homo sapiens
  misc_feature: Table A; Target 52060; HLA-B*27:02; MYH4; ENSG00000264424; TAA
TSAQIEMNKK

SEQ ID NO: 52061 - protein, 10 aa, Homo sapiens
  misc_feature: Table A; Target 52061; HLA-C*07:06; MYH4; ENSG00000264424; TAA
TSAQIEMNKK

SEQ ID NO: 52062 - protein, 11 aa, Homo sapiens
  misc_feature: Table A; Target 52062; HLA-A*68:01; MYH4; ENSG00000264424; TAA
TSAQIEMNKKR

SEQ ID NO: 52063 - protein, 8 aa, Homo sapiens
  misc_feature: Table A; Target 52063; HLA-A*11:01; MYH4; ENSG00000264424; TAA
TSLINTKK

SEQ ID NO: 52064 - protein, 9 aa, Homo sapiens
  misc_feature: Table A; Target 52064; HLA-C*05:01; MYH4; ENSG00000264424; TAA
TSLNSADLL

SEQ ID NO: 52065 - protein, 10 aa, Homo sapiens
  misc_feature: Table A; Target 52065; HLA-A*11:01; MYH4; ENSG00000264424; TAA
TSLNSADLLK

SEQ ID NO: 52066 - protein, 10 aa, Homo sapiens
  misc_feature: Table A; Target 52066; HLA-B*27:02; MYH4; ENSG00000264424; TAA
TSLNSADLLK

SEQ ID NO: 52067 - protein, 9 aa, Homo sapiens
  misc_feature: Table A; Target 52067; HLA-A*03:02; MYH4; ENSG00000264424; TAA
TSVFVVDPK

SEQ ID NO: 52068 - protein, 9 aa, Homo sapiens
  misc_feature: Table A; Target 52068; HLA-A*11:01; MYH4; ENSG00000264424; TAA
TSVFVVDPK

SEQ ID NO: 52069 - protein, 9 aa, Homo sapiens
  misc_feature: Table A; Target 52069; HLA-A*68:01; MYH4; ENSG00000264424; TAA
TSVFVVDPK

SEQ ID NO: 52070 - protein, 9 aa, Homo sapiens
  misc_feature: Table A; Target 52070; HLA-B*27:02; MYH4; ENSG00000264424; TAA
TSVFVVDPK

SEQ ID NO: 52071 - protein, 9 aa, Homo sapiens
  misc_feature: Table A; Target 52071; HLA-C*06:02; MYH4; ENSG00000264424; TAA
TSVFVVDPK

SEQ ID NO: 52072 - protein, 9 aa, Homo sapiens
  misc_feature: Table A; Target 52072; HLA-C*07:06; MYH4; ENSG00000264424; TAA
TSVFVVDPK

SEQ ID NO: 52073 - protein, 10 aa, Homo sapiens
  misc_feature: Table A; Target 52073; HLA-C*06:02; MYH4; ENSG00000264424; TAA
TSVFVVDPKE

SEQ ID NO: 52074 - protein, 9 aa, Homo sapiens
  misc_feature: Table A; Target 52074; HLA-A*29:02; MYH4; ENSG00000264424; TAA
TTNPYDFAF

SEQ ID NO: 52075 - protein, 9 aa, Homo sapiens
  misc_feature: Table A; Target 52075; HLA-A*30:02; MYH4; ENSG00000264424; TAA
TTNPYDFAF

SEQ ID NO: 52076 - protein, 9 aa, Homo sapiens
  misc_feature: Table A; Target 52076; HLA-A*32:01; MYH4; ENSG00000264424; TAA
TTNPYDFAF

SEQ ID NO: 52077 - protein, 9 aa, Homo sapiens
  misc_feature: Table A; Target 52077; HLA-B*27:02; MYH4; ENSG00000264424; TAA
TTNPYDFAF

SEQ ID NO: 52078 - protein, 9 aa, Homo sapiens
  misc_feature: Table A; Target 52078; HLA-B*35:01; MYH4; ENSG00000264424; TAA
TTNPYDFAF

SEQ ID NO: 52079 - protein, 9 aa, Homo sapiens
  misc_feature: Table A; Target 52079; HLA-B*35:03; MYH4; ENSG00000264424; TAA
TTNPYDFAF

SEQ ID NO: 52080 - protein, 9 aa, Homo sapiens
  misc_feature: Table A; Target 52080; HLA-B*57:01; MYH4; ENSG00000264424; TAA
TTNPYDFAF

SEQ ID NO: 52081 - protein, 9 aa, Homo sapiens
  misc_feature: Table A; Target 52081; HLA-B*58:01; MYH4; ENSG00000264424; TAA
TTNPYDFAF

SEQ ID NO: 52082 - protein, 9 aa, Homo sapiens
  misc_feature: Table A; Target 52082; HLA-C*16:01; MYH4; ENSG00000264424; TAA
TTNPYDFAF

SEQ ID NO: 52083 - protein, 10 aa, Homo sapiens
  misc_feature: Table A; Target 52083; HLA-A*68:02; MYH4; ENSG00000264424; TAA
TTNPYDFAFV

SEQ ID NO: 52084 - protein, 9 aa, Homo sapiens
  misc_feature: Table A; Target 52084; HLA-A*01:01; MYH4; ENSG00000264424; TAA
TVDYNIAGW

SEQ ID NO: 52085 - protein, 9 aa, Homo sapiens
  misc_feature: Table A; Target 52085; HLA-A*25:01; MYH4; ENSG00000264424; TAA
TVDYNIAGW

SEQ ID NO: 52086 - protein, 9 aa, Homo sapiens
  misc_feature: Table A; Target 52086; HLA-A*26:01; MYH4; ENSG00000264424; TAA
TVDYNIAGW

SEQ ID NO: 52087 - protein, 9 aa, Homo sapiens
  misc_feature: Table A; Target 52087; HLA-A*32:01; MYH4; ENSG00000264424; TAA
TVDYNIAGW

SEQ ID NO: 52088 - protein, 9 aa, Homo sapiens
  misc_feature: Table A; Target 52088; HLA-B*44:02; MYH4; ENSG00000264424; TAA
TVDYNIAGW

SEQ ID NO: 52089 - protein, 9 aa, Homo sapiens
  misc_feature: Table A; Target 52089; HLA-B*44:03; MYH4; ENSG00000264424; TAA
TVDYNIAGW

SEQ ID NO: 52090 - protein, 9 aa, Homo sapiens
  misc_feature: Table A; Target 52090; HLA-B*57:01; MYH4; ENSG00000264424; TAA
TVDYNIAGW

SEQ ID NO: 52091 - protein, 9 aa, Homo sapiens
  misc_feature: Table A; Target 52091; HLA-B*58:01; MYH4; ENSG00000264424; TAA
TVDYNIAGW

SEQ ID NO: 52092 - protein, 8 aa, Homo sapiens
  misc_feature: Table A; Target 52092; HLA-A*31:01; MYH4; ENSG00000264424; TAA
TVKDLQLR

SEQ ID NO: 52093 - protein, 8 aa, Homo sapiens
  misc_feature: Table A; Target 52093; HLA-A*33:03; MYH4; ENSG00000264424; TAA
TVKDLQLR

SEQ ID NO: 52094 - protein, 9 aa, Homo sapiens
  misc_feature: Table A; Target 52094; HLA-A*02:03; MYH4; ENSG00000264424; TAA
TVKDLQLRL

SEQ ID NO: 52095 - protein, 9 aa, Homo sapiens
  misc_feature: Table A; Target 52095; HLA-A*02:04; MYH4; ENSG00000264424; TAA
TVKDLQLRL

SEQ ID NO: 52096 - protein, 9 aa, Homo sapiens
  misc_feature: Table A; Target 52096; HLA-A*31:01; MYH4; ENSG00000264424; TAA
TVKDLQLRL

SEQ ID NO: 52097 - protein, 9 aa, Homo sapiens
  misc_feature: Table A; Target 52097; HLA-A*68:02; MYH4; ENSG00000264424; TAA
TVKDLQLRL

SEQ ID NO: 52098 - protein, 9 aa, Homo sapiens
  misc_feature: Table A; Target 52098; HLA-B*08:01; MYH4; ENSG00000264424; TAA
TVKDLQLRL

SEQ ID NO: 52099 - protein, 8 aa, Homo sapiens
  misc_feature: Table A; Target 52099; HLA-B*08:01; MYH4; ENSG00000264424; TAA
TVKEDQVF

SEQ ID NO: 52100 - protein, 8 aa, Homo sapiens
  misc_feature: Table A; Target 52100; HLA-B*15:01; MYH4; ENSG00000264424; TAA
TVKEDQVF

SEQ ID NO: 52101 - protein, 8 aa, Homo sapiens
  misc_feature: Table A; Target 52101; HLA-B*46:01; MYH4; ENSG00000264424; TAA
TVKEDQVF

SEQ ID NO: 52102 - protein, 10 aa, Homo sapiens
  misc_feature: Table A; Target 52102; HLA-A*25:01; MYH4; ENSG00000264424; TAA
TVKEDQVFSM

SEQ ID NO: 52103 - protein, 10 aa, Homo sapiens
  misc_feature: Table A; Target 52103; HLA-A*26:01; MYH4; ENSG00000264424; TAA
TVKEDQVFSM

SEQ ID NO: 52104 - protein, 8 aa, Homo sapiens
  misc_feature: Table A; Target 52104; HLA-B*08:01; MYH4; ENSG00000264424; TAA
TVNTKRVI

SEQ ID NO: 52105 - protein, 10 aa, Homo sapiens
  misc_feature: Table A; Target 52105; HLA-A*03:01; MYH4; ENSG00000264424; TAA
TVNTKRVIQY

SEQ ID NO: 52106 - protein, 10 aa, Homo sapiens
  misc_feature: Table A; Target 52106; HLA-A*25:01; MYH4; ENSG00000264424; TAA
TVNTKRVIQY

SEQ ID NO: 52107 - protein, 10 aa, Homo sapiens
  misc_feature: Table A; Target 52107; HLA-A*30:02; MYH4; ENSG00000264424; TAA
TVNTKRVIQY

SEQ ID NO: 52108 - protein, 10 aa, Homo sapiens
  misc_feature: Table A; Target 52108; HLA-A*32:01; MYH4; ENSG00000264424; TAA
TVNTKRVIQY

SEQ ID NO: 52109 - protein, 10 aa, Homo sapiens
  misc_feature: Table A; Target 52109; HLA-B*15:01; MYH4; ENSG00000264424; TAA
TVNTKRVIQY

SEQ ID NO: 52110 - protein, 9 aa, Homo sapiens
  misc_feature: Table A; Target 52110; HLA-A*02:03; MYH4; ENSG00000264424; TAA
TVQQVYNAV

SEQ ID NO: 52111 - protein, 9 aa, Homo sapiens
  misc_feature: Table A; Target 52111; HLA-A*02:07; MYH4; ENSG00000264424; TAA
TVQQVYNAV

SEQ ID NO: 52112 - protein, 9 aa, Homo sapiens
  misc_feature: Table A; Target 52112; HLA-A*68:02; MYH4; ENSG00000264424; TAA
TVQQVYNAV

SEQ ID NO: 52113 - protein, 9 aa, Homo sapiens
  misc_feature: Table A; Target 52113; HLA-B*13:02; MYH4; ENSG00000264424; TAA
TVQQVYNAV

SEQ ID NO: 52114 - protein, 9 aa, Homo sapiens
  misc_feature: Table A; Target 52114; HLA-B*35:03; MYH4; ENSG00000264424; TAA
TVQQVYNAV

SEQ ID NO: 52115 - protein, 9 aa, Homo sapiens
  misc_feature: Table A; Target 52115; HLA-B*56:01; MYH4; ENSG00000264424; TAA
TVQQVYNAV

SEQ ID NO: 52116 - protein, 9 aa, Homo sapiens
  misc_feature: Table A; Target 52116; HLA-C*01:02; MYH4; ENSG00000264424; TAA
TVQQVYNAV

SEQ ID NO: 52117 - protein, 9 aa, Homo sapiens
  misc_feature: Table A; Target 52117; HLA-C*06:02; MYH4; ENSG00000264424; TAA
TVQQVYNAV

SEQ ID NO: 52118 - protein, 9 aa, Homo sapiens
  misc_feature: Table A; Target 52118; HLA-C*14:02; MYH4; ENSG00000264424; TAA
TVQQVYNAV

SEQ ID NO: 52119 - protein, 9 aa, Homo sapiens
  misc_feature: Table A; Target 52119; HLA-A*31:01; MYH4; ENSG00000264424; TAA
TVRNDNSSR

SEQ ID NO: 52120 - protein, 9 aa, Homo sapiens
  misc_feature: Table A; Target 52120; HLA-A*33:01; MYH4; ENSG00000264424; TAA
TVRNDNSSR

SEQ ID NO: 52121 - protein, 9 aa, Homo sapiens
  misc_feature: Table A; Target 52121; HLA-A*33:03; MYH4; ENSG00000264424; TAA
TVRNDNSSR

SEQ ID NO: 52122 - protein, 9 aa, Homo sapiens
  misc_feature: Table A; Target 52122; HLA-A*68:01; MYH4; ENSG00000264424; TAA
TVRNDNSSR

SEQ ID NO: 52123 - protein, 9 aa, Homo sapiens
  misc_feature: Table A; Target 52123; HLA-C*07:06; MYH4; ENSG00000264424; TAA
TVRNDNSSR

SEQ ID NO: 52124 - protein, 10 aa, Homo sapiens
  misc_feature: Table A; Target 52124; HLA-A*25:01; MYH4; ENSG00000264424; TAA
TVRNDNSSRF

SEQ ID NO: 52125 - protein, 10 aa, Homo sapiens
  misc_feature: Table A; Target 52125; HLA-A*26:01; MYH4; ENSG00000264424; TAA
TVRNDNSSRF

SEQ ID NO: 52126 - protein, 10 aa, Homo sapiens
  misc_feature: Table A; Target 52126; HLA-A*68:02; MYH4; ENSG00000264424; TAA
TVSALFRENL

SEQ ID NO: 52127 - protein, 9 aa, Homo sapiens
  misc_feature: Table A; Target 52127; HLA-A*32:01; MYH4; ENSG00000264424; TAA
TVSKAKANF

SEQ ID NO: 52128 - protein, 10 aa, Homo sapiens
  misc_feature: Table A; Target 52128; HLA-B*38:01; MYH4; ENSG00000264424; TAA
TVTVKEDQVF

SEQ ID NO: 52129 - protein, 10 aa, Homo sapiens
  misc_feature: Table A; Target 52129; HLA-B*39:01; MYH4; ENSG00000264424; TAA
TVTVKEDQVF

SEQ ID NO: 52130 - protein, 8 aa, Homo sapiens
  misc_feature: Table A; Target 52130; HLA-A*03:02; MYH4; ENSG00000264424; TAA
TVVGLYQK

SEQ ID NO: 52131 - protein, 8 aa, Homo sapiens
  misc_feature: Table A; Target 52131; HLA-A*11:01; MYH4; ENSG00000264424; TAA
TVVGLYQK

SEQ ID NO: 52132 - protein, 10 aa, Homo sapiens
  misc_feature: Table A; Target 52132; HLA-B*56:01; MYH4; ENSG00000264424; TAA
TVVGLYQKSA

SEQ ID NO: 52133 - protein, 11 aa, Homo sapiens
  misc_feature: Table A; Target 52133; HLA-A*23:01; MYH4; ENSG00000264424; TAA
TYLLEKSRVTF

SEQ ID NO: 52134 - protein, 11 aa, Homo sapiens
  misc_feature: Table A; Target 52134; HLA-A*24:02; MYH4; ENSG00000264424; TAA
TYLLEKSRVTF

SEQ ID NO: 52135 - protein, 8 aa, Homo sapiens
  misc_feature: Table A; Target 52135; HLA-A*32:01; MYH4; ENSG00000264424; TAA
VADKAAYL

SEQ ID NO: 52136 - protein, 8 aa, Homo sapiens
  misc_feature: Table A; Target 52136; HLA-B*51:01; MYH4; ENSG00000264424; TAA
VADKAAYL

SEQ ID NO: 52137 - protein, 8 aa, Homo sapiens
  misc_feature: Table A; Target 52137; HLA-C*03:03; MYH4; ENSG00000264424; TAA
VADKAAYL

SEQ ID NO: 52138 - protein, 8 aa, Homo sapiens
  misc_feature: Table A; Target 52138; HLA-C*03:04; MYH4; ENSG00000264424; TAA
VADKAAYL

SEQ ID NO: 52139 - protein, 8 aa, Homo sapiens
  misc_feature: Table A; Target 52139; HLA-C*04:01; MYH4; ENSG00000264424; TAA
VADKAAYL

SEQ ID NO: 52140 - protein, 8 aa, Homo sapiens
  misc_feature: Table A; Target 52140; HLA-C*05:01; MYH4; ENSG00000264424; TAA
VADKAAYL

SEQ ID NO: 52141 - protein, 8 aa, Homo sapiens
  misc_feature: Table A; Target 52141; HLA-C*07:04; MYH4; ENSG00000264424; TAA
VADKAAYL

SEQ ID NO: 52142 - protein, 9 aa, Homo sapiens
  misc_feature: Table A; Target 52142; HLA-A*01:01; MYH4; ENSG00000264424; TAA
VADKAAYLT

SEQ ID NO: 52143 - protein, 11 aa, Homo sapiens
  misc_feature: Table A; Target 52143; HLA-A*01:01; MYH4; ENSG00000264424; TAA
VADKAAYLTSL

SEQ ID NO: 52144 - protein, 11 aa, Homo sapiens
  misc_feature: Table A; Target 52144; HLA-C*05:01; MYH4; ENSG00000264424; TAA
VADKAAYLTSL

SEQ ID NO: 52145 - protein, 8 aa, Homo sapiens
  misc_feature: Table A; Target 52145; HLA-C*05:01; MYH4; ENSG00000264424; TAA
VAELGEQI

SEQ ID NO: 52146 - protein, 11 aa, Homo sapiens
  misc_feature: Table A; Target 52146; HLA-B*39:01; MYH4; ENSG00000264424; TAA
VAELGEQIDSL

SEQ ID NO: 52147 - protein, 11 aa, Homo sapiens
  misc_feature: Table A; Target 52147; HLA-C*05:01; MYH4; ENSG00000264424; TAA
VAELGEQIDSL

SEQ ID NO: 52148 - protein, 9 aa, Homo sapiens
  misc_feature: Table A; Target 52148; HLA-A*02:03; MYH4; ENSG00000264424; TAA
VAIYKLTGA

SEQ ID NO: 52149 - protein, 9 aa, Homo sapiens
  misc_feature: Table A; Target 52149; HLA-B*46:01; MYH4; ENSG00000264424; TAA
VAIYKLTGA

SEQ ID NO: 52150 - protein, 9 aa, Homo sapiens
  misc_feature: Table A; Target 52150; HLA-B*54:01; MYH4; ENSG00000264424; TAA
VAIYKLTGA

SEQ ID NO: 52151 - protein, 9 aa, Homo sapiens
  misc_feature: Table A; Target 52151; HLA-B*56:01; MYH4; ENSG00000264424; TAA
VAIYKLTGA

SEQ ID NO: 52152 - protein, 9 aa, Homo sapiens
  misc_feature: Table A; Target 52152; HLA-C*16:02; MYH4; ENSG00000264424; TAA
VAIYKLTGA

SEQ ID NO: 52153 - protein, 8 aa, Homo sapiens
  misc_feature: Table A; Target 52153; HLA-C*16:01; MYH4; ENSG00000264424; TAA
VAQWRTKY

SEQ ID NO: 52154 - protein, 8 aa, Homo sapiens
  misc_feature: Table A; Target 52154; HLA-C*05:01; MYH4; ENSG00000264424; TAA
VDDLEGSL

SEQ ID NO: 52155 - protein, 8 aa, Homo sapiens
  misc_feature: Table A; Target 52155; HLA-A*30:01; MYH4; ENSG00000264424; TAA
VDILGFTA

SEQ ID NO: 52156 - protein, 8 aa, Homo sapiens
  misc_feature: Table A; Target 52156; HLA-B*37:01; MYH4; ENSG00000264424; TAA
VDILGFTA

SEQ ID NO: 52157 - protein, 11 aa, Homo sapiens
  misc_feature: Table A; Target 52157; HLA-B*27:02; MYH4; ENSG00000264424; TAA
VDILGFTADEK

SEQ ID NO: 52158 - protein, 8 aa, Homo sapiens
  misc_feature: Table A; Target 52158; HLA-A*30:01; MYH4; ENSG00000264424; TAA
VDKLQTKV

SEQ ID NO: 52159 - protein, 8 aa, Homo sapiens
  misc_feature: Table A; Target 52159; HLA-B*37:01; MYH4; ENSG00000264424; TAA
VDKLQTKV

SEQ ID NO: 52160 - protein, 8 aa, Homo sapiens
  misc_feature: Table A; Target 52160; HLA-B*40:02; MYH4; ENSG00000264424; TAA
VDKLQTKV

SEQ ID NO: 52161 - protein, 8 aa, Homo sapiens
  misc_feature: Table A; Target 52161; HLA-C*06:02; MYH4; ENSG00000264424; TAA
VDKLQTKV

SEQ ID NO: 52162 - protein, 8 aa, Homo sapiens
  misc_feature: Table A; Target 52162; HLA-C*12:03; MYH4; ENSG00000264424; TAA
VDKLQTKV

SEQ ID NO: 52163 - protein, 9 aa, Homo sapiens
  misc_feature: Table A; Target 52163; HLA-C*04:01; MYH4; ENSG00000264424; TAA
VDKLQTKVK

SEQ ID NO: 52164 - protein, 9 aa, Homo sapiens
  misc_feature: Table A; Target 52164; HLA-C*06:02; MYH4; ENSG00000264424; TAA
VDKLQTKVK

SEQ ID NO: 52165 - protein, 9 aa, Homo sapiens
  misc_feature: Table A; Target 52165; HLA-C*07:01; MYH4; ENSG00000264424; TAA
VDKLQTKVK

SEQ ID NO: 52166 - protein, 8 aa, Homo sapiens
  misc_feature: Table A; Target 52166; HLA-B*37:01; MYH4; ENSG00000264424; TAA
VDYNIAGW

SEQ ID NO: 52167 - protein, 9 aa, Homo sapiens
  misc_feature: Table A; Target 52167; HLA-B*49:01; MYH4; ENSG00000264424; TAA
VEAVNSKCA

SEQ ID NO: 52168 - protein, 8 aa, Homo sapiens
  misc_feature: Table A; Target 52168; HLA-B*49:01; MYH4; ENSG00000264424; TAA
VEDLMIDV

SEQ ID NO: 52169 - protein, 10 aa, Homo sapiens
  misc_feature: Table A; Target 52169; HLA-B*27:02; MYH4; ENSG00000264424; TAA
VEDLMIDVER

SEQ ID NO: 52170 - protein, 8 aa, Homo sapiens
  misc_feature: Table A; Target 52170; HLA-B*08:01; MYH4; ENSG00000264424; TAA
VEELRASL

SEQ ID NO: 52171 - protein, 8 aa, Homo sapiens
  misc_feature: Table A; Target 52171; HLA-B*18:01; MYH4; ENSG00000264424; TAA
VEELRASL

SEQ ID NO: 52172 - protein, 8 aa, Homo sapiens
  misc_feature: Table A; Target 52172; HLA-B*37:01; MYH4; ENSG00000264424; TAA
VEELRASL

SEQ ID NO: 52173 - protein, 8 aa, Homo sapiens
  misc_feature: Table A; Target 52173; HLA-B*40:01; MYH4; ENSG00000264424; TAA
VEELRASL

SEQ ID NO: 52174 - protein, 8 aa, Homo sapiens
  misc_feature: Table A; Target 52174; HLA-B*40:02; MYH4; ENSG00000264424; TAA
VEELRASL

SEQ ID NO: 52175 - protein, 8 aa, Homo sapiens
  misc_feature: Table A; Target 52175; HLA-B*18:01; MYH4; ENSG00000264424; TAA
VERRANLM

SEQ ID NO: 52176 - protein, 8 aa, Homo sapiens
  misc_feature: Table A; Target 52176; HLA-B*37:01; MYH4; ENSG00000264424; TAA
VERRANLM

SEQ ID NO: 52177 - protein, 9 aa, Homo sapiens
  misc_feature: Table A; Target 52177; HLA-B*40:02; MYH4; ENSG00000264424; TAA
VERSNAACI

SEQ ID NO: 52178 - protein, 9 aa, Homo sapiens
  misc_feature: Table A; Target 52178; HLA-B*49:01; MYH4; ENSG00000264424; TAA
VERSNAACI

SEQ ID NO: 52179 - protein, 9 aa, Homo sapiens
  misc_feature: Table A; Target 52179; HLA-B*13:02; MYH4; ENSG00000264424; TAA
VESEQKHNV

SEQ ID NO: 52180 - protein, 9 aa, Homo sapiens
  misc_feature: Table A; Target 52180; HLA-B*37:01; MYH4; ENSG00000264424; TAA
VESEQKHNV

SEQ ID NO: 52181 - protein, 9 aa, Homo sapiens
  misc_feature: Table A; Target 52181; HLA-B*40:01; MYH4; ENSG00000264424; TAA
VESEQKHNV

SEQ ID NO: 52182 - protein, 9 aa, Homo sapiens
  misc_feature: Table A; Target 52182; HLA-B*44:02; MYH4; ENSG00000264424; TAA
VESEQKHNV

SEQ ID NO: 52183 - protein, 9 aa, Homo sapiens
  misc_feature: Table A; Target 52183; HLA-B*44:03; MYH4; ENSG00000264424; TAA
VESEQKHNV

SEQ ID NO: 52184 - protein, 9 aa, Homo sapiens
  misc_feature: Table A; Target 52184; HLA-B*49:01; MYH4; ENSG00000264424; TAA
VESEQKHNV

SEQ ID NO: 52185 - protein, 9 aa, Homo sapiens
  misc_feature: Table A; Target 52185; HLA-C*02:02; MYH4; ENSG00000264424; TAA
VESEQKHNV

SEQ ID NO: 52186 - protein, 9 aa, Homo sapiens
  misc_feature: Table A; Target 52186; HLA-C*16:02; MYH4; ENSG00000264424; TAA
VESEQKHNV

SEQ ID NO: 52187 - protein, 9 aa, Homo sapiens
  misc_feature: Table A; Target 52187; HLA-C*16:04; MYH4; ENSG00000264424; TAA
VESEQKHNV

SEQ ID NO: 52188 - protein, 8 aa, Homo sapiens
  misc_feature: Table A; Target 52188; HLA-A*30:01; MYH4; ENSG00000264424; TAA
VESMQSTL

SEQ ID NO: 52189 - protein, 8 aa, Homo sapiens
  misc_feature: Table A; Target 52189; HLA-B*18:01; MYH4; ENSG00000264424; TAA
VESMQSTL

SEQ ID NO: 52190 - protein, 8 aa, Homo sapiens
  misc_feature: Table A; Target 52190; HLA-B*37:01; MYH4; ENSG00000264424; TAA
VESMQSTL

SEQ ID NO: 52191 - protein, 8 aa, Homo sapiens
  misc_feature: Table A; Target 52191; HLA-B*40:01; MYH4; ENSG00000264424; TAA
VESMQSTL

SEQ ID NO: 52192 - protein, 8 aa, Homo sapiens
  misc_feature: Table A; Target 52192; HLA-B*49:01; MYH4; ENSG00000264424; TAA
VESMQSTL

SEQ ID NO: 52193 - protein, 9 aa, Homo sapiens
  misc_feature: Table A; Target 52193; HLA-A*23:01; MYH4; ENSG00000264424; TAA
VFSMNPPKY

SEQ ID NO: 52194 - protein, 9 aa, Homo sapiens
  misc_feature: Table A; Target 52194; HLA-A*24:02; MYH4; ENSG00000264424; TAA
VFSMNPPKY

SEQ ID NO: 52195 - protein, 9 aa, Homo sapiens
  misc_feature: Table A; Target 52195; HLA-A*29:02; MYH4; ENSG00000264424; TAA
VFSMNPPKY

SEQ ID NO: 52196 - protein, 9 aa, Homo sapiens
  misc_feature: Table A; Target 52196; HLA-A*30:02; MYH4; ENSG00000264424; TAA
VFSMNPPKY

SEQ ID NO: 52197 - protein, 9 aa, Homo sapiens
  misc_feature: Table A; Target 52197; HLA-B*15:03; MYH4; ENSG00000264424; TAA
VFSMNPPKY

SEQ ID NO: 52198 - protein, 9 aa, Homo sapiens
  misc_feature: Table A; Target 52198; HLA-C*16:01; MYH4; ENSG00000264424; TAA
VFSMNPPKY

SEQ ID NO: 52199 - protein, 10 aa, Homo sapiens
  misc_feature: Table A; Target 52199; HLA-A*23:01; MYH4; ENSG00000264424; TAA
VFVVDPKESY

SEQ ID NO: 52200 - protein, 10 aa, Homo sapiens
  misc_feature: Table A; Target 52200; HLA-A*29:02; MYH4; ENSG00000264424; TAA
VFVVDPKESY

SEQ ID NO: 52201 - protein, 10 aa, Homo sapiens
  misc_feature: Table A; Target 52201; HLA-A*30:02; MYH4; ENSG00000264424; TAA
VFVVDPKESY

SEQ ID NO: 52202 - protein, 10 aa, Homo sapiens
  misc_feature: Table A; Target 52202; HLA-B*15:01; MYH4; ENSG00000264424; TAA
VFVVDPKESY

SEQ ID NO: 52203 - protein, 10 aa, Homo sapiens
  misc_feature: Table A; Target 52203; HLA-B*15:03; MYH4; ENSG00000264424; TAA
VFVVDPKESY

SEQ ID NO: 52204 - protein, 10 aa, Homo sapiens
  misc_feature: Table A; Target 52204; HLA-B*46:01; MYH4; ENSG00000264424; TAA
VFVVDPKESY

SEQ ID NO: 52205 - protein, 10 aa, Homo sapiens
  misc_feature: Table A; Target 52205; HLA-C*14:02; MYH4; ENSG00000264424; TAA
VFVVDPKESY

SEQ ID NO: 52206 - protein, 9 aa, Homo sapiens
  misc_feature: Table A; Target 52206; HLA-A*30:02; MYH4; ENSG00000264424; TAA
VGALAKAIY

SEQ ID NO: 52207 - protein, 9 aa, Homo sapiens
  misc_feature: Table A; Target 52207; HLA-A*32:01; MYH4; ENSG00000264424; TAA
VGALAKAIY

SEQ ID NO: 52208 - protein, 9 aa, Homo sapiens
  misc_feature: Table A; Target 52208; HLA-B*15:01; MYH4; ENSG00000264424; TAA
VGALAKAIY

SEQ ID NO: 52209 - protein, 9 aa, Homo sapiens
  misc_feature: Table A; Target 52209; HLA-B*15:03; MYH4; ENSG00000264424; TAA
VGALAKAIY

SEQ ID NO: 52210 - protein, 9 aa, Homo sapiens
  misc_feature: Table A; Target 52210; HLA-B*46:01; MYH4; ENSG00000264424; TAA
VGALAKAIY

SEQ ID NO: 52211 - protein, 9 aa, Homo sapiens
  misc_feature: Table A; Target 52211; HLA-C*07:04; MYH4; ENSG00000264424; TAA
VGALAKAIY

SEQ ID NO: 52212 - protein, 9 aa, Homo sapiens
  misc_feature: Table A; Target 52212; HLA-C*16:01; MYH4; ENSG00000264424; TAA
VGALAKAIY

SEQ ID NO: 52213 - protein, 9 aa, Homo sapiens
  misc_feature: Table A; Target 52213; HLA-B*08:01; MYH4; ENSG00000264424; TAA
VGLYQKSAM

SEQ ID NO: 52214 - protein, 9 aa, Homo sapiens
  misc_feature: Table A; Target 52214; HLA-B*46:01; MYH4; ENSG00000264424; TAA
VGLYQKSAM

SEQ ID NO: 52215 - protein, 9 aa, Homo sapiens
  misc_feature: Table A; Target 52215; HLA-C*01:02; MYH4; ENSG00000264424; TAA
VGLYQKSAM

SEQ ID NO: 52216 - protein, 9 aa, Homo sapiens
  misc_feature: Table A; Target 52216; HLA-C*14:02; MYH4; ENSG00000264424; TAA
VGLYQKSAM

SEQ ID NO: 52217 - protein, 8 aa, Homo sapiens
  misc_feature: Table A; Target 52217; HLA-A*03:02; MYH4; ENSG00000264424; TAA
VGNEFVTK

SEQ ID NO: 52218 - protein, 8 aa, Homo sapiens
  misc_feature: Table A; Target 52218; HLA-A*11:01; MYH4; ENSG00000264424; TAA
VGNEFVTK

SEQ ID NO: 52219 - protein, 8 aa, Homo sapiens
  misc_feature: Table A; Target 52219; HLA-B*27:02; MYH4; ENSG00000264424; TAA
VGNEFVTK

SEQ ID NO: 52220 - protein, 9 aa, Homo sapiens
  misc_feature: Table A; Target 52220; HLA-A*29:02; MYH4; ENSG00000264424; TAA
VHYAGTVDY

SEQ ID NO: 52221 - protein, 9 aa, Homo sapiens
  misc_feature: Table A; Target 52221; HLA-A*30:02; MYH4; ENSG00000264424; TAA
VHYAGTVDY

SEQ ID NO: 52222 - protein, 9 aa, Homo sapiens
  misc_feature: Table A; Target 52222; HLA-A*32:01; MYH4; ENSG00000264424; TAA
VHYAGTVDY

SEQ ID NO: 52223 - protein, 9 aa, Homo sapiens
  misc_feature: Table A; Target 52223; HLA-B*15:01; MYH4; ENSG00000264424; TAA
VHYAGTVDY

SEQ ID NO: 52224 - protein, 9 aa, Homo sapiens
  misc_feature: Table A; Target 52224; HLA-B*15:03; MYH4; ENSG00000264424; TAA
VHYAGTVDY

SEQ ID NO: 52225 - protein, 9 aa, Homo sapiens
  misc_feature: Table A; Target 52225; HLA-B*18:01; MYH4; ENSG00000264424; TAA
VHYAGTVDY

SEQ ID NO: 52226 - protein, 9 aa, Homo sapiens
  misc_feature: Table A; Target 52226; HLA-B*27:05; MYH4; ENSG00000264424; TAA
VHYAGTVDY

SEQ ID NO: 52227 - protein, 9 aa, Homo sapiens
  misc_feature: Table A; Target 52227; HLA-B*35:01; MYH4; ENSG00000264424; TAA
VHYAGTVDY

SEQ ID NO: 52228 - protein, 9 aa, Homo sapiens
  misc_feature: Table A; Target 52228; HLA-B*38:01; MYH4; ENSG00000264424; TAA
VHYAGTVDY

SEQ ID NO: 52229 - protein, 9 aa, Homo sapiens
  misc_feature: Table A; Target 52229; HLA-B*39:01; MYH4; ENSG00000264424; TAA
VHYAGTVDY

SEQ ID NO: 52230 - protein, 9 aa, Homo sapiens
  misc_feature: Table A; Target 52230; HLA-B*46:01; MYH4; ENSG00000264424; TAA
VHYAGTVDY

SEQ ID NO: 52231 - protein, 9 aa, Homo sapiens
  misc_feature: Table A; Target 52231; HLA-C*01:02; MYH4; ENSG00000264424; TAA
VHYAGTVDY

SEQ ID NO: 52232 - protein, 9 aa, Homo sapiens
  misc_feature: Table A; Target 52232; HLA-C*02:02; MYH4; ENSG00000264424; TAA
VHYAGTVDY

SEQ ID NO: 52233 - protein, 9 aa, Homo sapiens
  misc_feature: Table A; Target 52233; HLA-C*04:01; MYH4; ENSG00000264424; TAA
VHYAGTVDY

SEQ ID NO: 52234 - protein, 9 aa, Homo sapiens
  misc_feature: Table A; Target 52234; HLA-C*06:02; MYH4; ENSG00000264424; TAA
VHYAGTVDY

SEQ ID NO: 52235 - protein, 9 aa, Homo sapiens
  misc_feature: Table A; Target 52235; HLA-C*07:01; MYH4; ENSG00000264424; TAA
VHYAGTVDY

SEQ ID NO: 52236 - protein, 9 aa, Homo sapiens
  misc_feature: Table A; Target 52236; HLA-C*07:04; MYH4; ENSG00000264424; TAA
VHYAGTVDY

SEQ ID NO: 52237 - protein, 9 aa, Homo sapiens
  misc_feature: Table A; Target 52237; HLA-C*12:03; MYH4; ENSG00000264424; TAA
VHYAGTVDY

SEQ ID NO: 52238 - protein, 9 aa, Homo sapiens
  misc_feature: Table A; Target 52238; HLA-C*14:02; MYH4; ENSG00000264424; TAA
VHYAGTVDY

SEQ ID NO: 52239 - protein, 9 aa, Homo sapiens
  misc_feature: Table A; Target 52239; HLA-C*16:04; MYH4; ENSG00000264424; TAA
VHYAGTVDY

SEQ ID NO: 52240 - protein, 11 aa, Homo sapiens
  misc_feature: Table A; Target 52240; HLA-B*38:01; MYH4; ENSG00000264424; TAA
VHYAGTVDYNI

SEQ ID NO: 52241 - protein, 9 aa, Homo sapiens
  misc_feature: Table A; Target 52241; HLA-B*15:03; MYH4; ENSG00000264424; TAA
VKNAYEESL

SEQ ID NO: 52242 - protein, 8 aa, Homo sapiens
  misc_feature: Table A; Target 52242; HLA-B*15:03; MYH4; ENSG00000264424; TAA
VKNLTEEM

SEQ ID NO: 52243 - protein, 9 aa, Homo sapiens
  misc_feature: Table A; Target 52243; HLA-A*01:01; MYH4; ENSG00000264424; TAA
VLAEWKQKY

SEQ ID NO: 52244 - protein, 9 aa, Homo sapiens
  misc_feature: Table A; Target 52244; HLA-A*03:01; MYH4; ENSG00000264424; TAA
VLAEWKQKY

SEQ ID NO: 52245 - protein, 9 aa, Homo sapiens
  misc_feature: Table A; Target 52245; HLA-A*29:02; MYH4; ENSG00000264424; TAA
VLAEWKQKY

SEQ ID NO: 52246 - protein, 9 aa, Homo sapiens
  misc_feature: Table A; Target 52246; HLA-A*32:01; MYH4; ENSG00000264424; TAA
VLAEWKQKY

SEQ ID NO: 52247 - protein, 9 aa, Homo sapiens
  misc_feature: Table A; Target 52247; HLA-B*15:01; MYH4; ENSG00000264424; TAA
VLAEWKQKY

SEQ ID NO: 52248 - protein, 9 aa, Homo sapiens
  misc_feature: Table A; Target 52248; HLA-A*02:01; MYH4; ENSG00000264424; TAA
VLDIAGFEI

SEQ ID NO: 52249 - protein, 9 aa, Homo sapiens
  misc_feature: Table A; Target 52249; HLA-A*02:07; MYH4; ENSG00000264424; TAA
VLDIAGFEI

SEQ ID NO: 52250 - protein, 9 aa, Homo sapiens
  misc_feature: Table A; Target 52250; HLA-B*13:02; MYH4; ENSG00000264424; TAA
VLDIAGFEI

SEQ ID NO: 52251 - protein, 9 aa, Homo sapiens
  misc_feature: Table A; Target 52251; HLA-B*38:01; MYH4; ENSG00000264424; TAA
VLDIAGFEI

SEQ ID NO: 52252 - protein, 9 aa, Homo sapiens
  misc_feature: Table A; Target 52252; HLA-C*05:01; MYH4; ENSG00000264424; TAA
VLDIAGFEI

SEQ ID NO: 52253 - protein, 9 aa, Homo sapiens
  misc_feature: Table A; Target 52253; HLA-A*31:01; MYH4; ENSG00000264424; TAA
VLEGIRICR

SEQ ID NO: 52254 - protein, 9 aa, Homo sapiens
  misc_feature: Table A; Target 52254; HLA-A*03:02; MYH4; ENSG00000264424; TAA
VLEQEEYKK

SEQ ID NO: 52255 - protein, 9 aa, Homo sapiens
  misc_feature: Table A; Target 52255; HLA-A*01:01; MYH4; ENSG00000264424; TAA
VLYNLKERY

SEQ ID NO: 52256 - protein, 9 aa, Homo sapiens
  misc_feature: Table A; Target 52256; HLA-A*03:01; MYH4; ENSG00000264424; TAA
VLYNLKERY

SEQ ID NO: 52257 - protein, 9 aa, Homo sapiens
  misc_feature: Table A; Target 52257; HLA-A*29:02; MYH4; ENSG00000264424; TAA
VLYNLKERY

SEQ ID NO: 52258 - protein, 9 aa, Homo sapiens
  misc_feature: Table A; Target 52258; HLA-A*30:02; MYH4; ENSG00000264424; TAA
VLYNLKERY

SEQ ID NO: 52259 - protein, 9 aa, Homo sapiens
  misc_feature: Table A; Target 52259; HLA-A*32:01; MYH4; ENSG00000264424; TAA
VLYNLKERY

SEQ ID NO: 52260 - protein, 9 aa, Homo sapiens
  misc_feature: Table A; Target 52260; HLA-B*15:01; MYH4; ENSG00000264424; TAA
VLYNLKERY

SEQ ID NO: 52261 - protein, 9 aa, Homo sapiens
  misc_feature: Table A; Target 52261; HLA-B*46:01; MYH4; ENSG00000264424; TAA
VLYNLKERY

SEQ ID NO: 52262 - protein, 9 aa, Homo sapiens
  misc_feature: Table A; Target 52262; HLA-C*02:02; MYH4; ENSG00000264424; TAA
VLYNLKERY

SEQ ID NO: 52263 - protein, 9 aa, Homo sapiens
  misc_feature: Table A; Target 52263; HLA-A*24:02; MYH4; ENSG00000264424; TAA
VMHYGNMKF

SEQ ID NO: 52264 - protein, 9 aa, Homo sapiens
  misc_feature: Table A; Target 52264; HLA-C*04:01; MYH4; ENSG00000264424; TAA
VMHYGNMKF

SEQ ID NO: 52265 - protein, 9 aa, Homo sapiens
  misc_feature: Table A; Target 52265; HLA-C*16:01; MYH4; ENSG00000264424; TAA
VNTKRVIQY

SEQ ID NO: 52266 - protein, 9 aa, Homo sapiens
  misc_feature: Table A; Target 52266; HLA-C*16:02; MYH4; ENSG00000264424; TAA
VNTKRVIQY

SEQ ID NO: 52267 - protein, 10 aa, Homo sapiens
  misc_feature: Table A; Target 52267; HLA-B*35:03; MYH4; ENSG00000264424; TAA
VPSIDDQEEL

SEQ ID NO: 52268 - protein, 8 aa, Homo sapiens
  misc_feature: Table A; Target 52268; HLA-B*27:05; MYH4; ENSG00000264424; TAA
VQAEADAL

SEQ ID NO: 52269 - protein, 8 aa, Homo sapiens
  misc_feature: Table A; Target 52269; HLA-B*39:01; MYH4; ENSG00000264424; TAA
VQAEADAL

SEQ ID NO: 52270 - protein, 8 aa, Homo sapiens
  misc_feature: Table A; Target 52270; HLA-C*05:01; MYH4; ENSG00000264424; TAA
VQAEADAL

SEQ ID NO: 52271 - protein, 11 aa, Homo sapiens
  misc_feature: Table A; Target 52271; HLA-B*15:01; MYH4; ENSG00000264424; TAA
VQLLHTQNTSL

SEQ ID NO: 52272 - protein, 8 aa, Homo sapiens
  misc_feature: Table A; Target 52272; HLA-B*13:02; MYH4; ENSG00000264424; TAA
VQQVYNAV

SEQ ID NO: 52273 - protein, 9 aa, Homo sapiens
  misc_feature: Table A; Target 52273; HLA-A*32:01; MYH4; ENSG00000264424; TAA
VRNDNSSRF

SEQ ID NO: 52274 - protein, 9 aa, Homo sapiens
  misc_feature: Table A; Target 52274; HLA-B*27:02; MYH4; ENSG00000264424; TAA
VRNDNSSRF

SEQ ID NO: 52275 - protein, 9 aa, Homo sapiens
  misc_feature: Table A; Target 52275; HLA-B*27:05; MYH4; ENSG00000264424; TAA
VRNDNSSRF

SEQ ID NO: 52276 - protein, 9 aa, Homo sapiens
  misc_feature: Table A; Target 52276; HLA-B*38:01; MYH4; ENSG00000264424; TAA
VRNDNSSRF

SEQ ID NO: 52277 - protein, 9 aa, Homo sapiens
  misc_feature: Table A; Target 52277; HLA-C*06:02; MYH4; ENSG00000264424; TAA
VRNDNSSRF

SEQ ID NO: 52278 - protein, 9 aa, Homo sapiens
  misc_feature: Table A; Target 52278; HLA-C*12:03; MYH4; ENSG00000264424; TAA
VRNDNSSRF

SEQ ID NO: 52279 - protein, 9 aa, Homo sapiens
  misc_feature: Table A; Target 52279; HLA-C*16:01; MYH4; ENSG00000264424; TAA
VRNDNSSRF

SEQ ID NO: 52280 - protein, 9 aa, Homo sapiens
  misc_feature: Table A; Target 52280; HLA-C*16:04; MYH4; ENSG00000264424; TAA
VRNDNSSRF

SEQ ID NO: 52281 - protein, 9 aa, Homo sapiens
  misc_feature: Table A; Target 52281; HLA-C*16:01; MYH4; ENSG00000264424; TAA
VSALFRENL

SEQ ID NO: 52282 - protein, 8 aa, Homo sapiens
  misc_feature: Table A; Target 52282; HLA-B*08:01; MYH4; ENSG00000264424; TAA
VSKAKANF

SEQ ID NO: 52283 - protein, 9 aa, Homo sapiens
  misc_feature: Table A; Target 52283; HLA-A*11:01; MYH4; ENSG00000264424; TAA
VTFQLKAER

SEQ ID NO: 52284 - protein, 9 aa, Homo sapiens
  misc_feature: Table A; Target 52284; HLA-A*31:01; MYH4; ENSG00000264424; TAA
VTFQLKAER

SEQ ID NO: 52285 - protein, 9 aa, Homo sapiens
  misc_feature: Table A; Target 52285; HLA-A*33:01; MYH4; ENSG00000264424; TAA
VTFQLKAER

SEQ ID NO: 52286 - protein, 9 aa, Homo sapiens
  misc_feature: Table A; Target 52286; HLA-A*33:03; MYH4; ENSG00000264424; TAA
VTFQLKAER

SEQ ID NO: 52287 - protein, 9 aa, Homo sapiens
  misc_feature: Table A; Target 52287; HLA-A*68:01; MYH4; ENSG00000264424; TAA
VTFQLKAER

SEQ ID NO: 52288 - protein, 9 aa, Homo sapiens
  misc_feature: Table A; Target 52288; HLA-B*57:01; MYH4; ENSG00000264424; TAA
VTFQLKAER

SEQ ID NO: 52289 - protein, 9 aa, Homo sapiens
  misc_feature: Table A; Target 52289; HLA-C*07:06; MYH4; ENSG00000264424; TAA
VTFQLKAER

SEQ ID NO: 52290 - protein, 11 aa, Homo sapiens
  misc_feature: Table A; Target 52290; HLA-B*57:01; MYH4; ENSG00000264424; TAA
VTFQLKAERSY

SEQ ID NO: 52291 - protein, 10 aa, Homo sapiens
  misc_feature: Table A; Target 52291; HLA-A*02:03; MYH4; ENSG00000264424; TAA
VTKGQTVQQV

SEQ ID NO: 52292 - protein, 11 aa, Homo sapiens
  misc_feature: Table A; Target 52292; HLA-A*01:01; MYH4; ENSG00000264424; TAA
VTKGQTVQQVY

SEQ ID NO: 52293 - protein, 11 aa, Homo sapiens
  misc_feature: Table A; Target 52293; HLA-A*23:01; MYH4; ENSG00000264424; TAA
VTKGQTVQQVY

SEQ ID NO: 52294 - protein, 11 aa, Homo sapiens
  misc_feature: Table A; Target 52294; HLA-A*25:01; MYH4; ENSG00000264424; TAA
VTKGQTVQQVY

SEQ ID NO: 52295 - protein, 11 aa, Homo sapiens
  misc_feature: Table A; Target 52295; HLA-A*26:01; MYH4; ENSG00000264424; TAA
VTKGQTVQQVY

SEQ ID NO: 52296 - protein, 11 aa, Homo sapiens
  misc_feature: Table A; Target 52296; HLA-A*29:02; MYH4; ENSG00000264424; TAA
VTKGQTVQQVY

SEQ ID NO: 52297 - protein, 11 aa, Homo sapiens
  misc_feature: Table A; Target 52297; HLA-A*30:02; MYH4; ENSG00000264424; TAA
VTKGQTVQQVY

SEQ ID NO: 52298 - protein, 11 aa, Homo sapiens
  misc_feature: Table A; Target 52298; HLA-A*31:01; MYH4; ENSG00000264424; TAA
VTKGQTVQQVY

SEQ ID NO: 52299 - protein, 11 aa, Homo sapiens
  misc_feature: Table A; Target 52299; HLA-A*32:01; MYH4; ENSG00000264424; TAA
VTKGQTVQQVY

SEQ ID NO: 52300 - protein, 11 aa, Homo sapiens
  misc_feature: Table A; Target 52300; HLA-B*15:01; MYH4; ENSG00000264424; TAA
VTKGQTVQQVY

SEQ ID NO: 52301 - protein, 11 aa, Homo sapiens
  misc_feature: Table A; Target 52301; HLA-B*15:03; MYH4; ENSG00000264424; TAA
VTKGQTVQQVY

SEQ ID NO: 52302 - protein, 11 aa, Homo sapiens
  misc_feature: Table A; Target 52302; HLA-B*46:01; MYH4; ENSG00000264424; TAA
VTKGQTVQQVY

SEQ ID NO: 52303 - protein, 11 aa, Homo sapiens
  misc_feature: Table A; Target 52303; HLA-B*57:01; MYH4; ENSG00000264424; TAA
VTKGQTVQQVY

SEQ ID NO: 52304 - protein, 11 aa, Homo sapiens
  misc_feature: Table A; Target 52304; HLA-B*58:01; MYH4; ENSG00000264424; TAA
VTKGQTVQQVY

SEQ ID NO: 52305 - protein, 11 aa, Homo sapiens
  misc_feature: Table A; Target 52305; HLA-C*02:02; MYH4; ENSG00000264424; TAA
VTKGQTVQQVY

SEQ ID NO: 52306 - protein, 11 aa, Homo sapiens
  misc_feature: Table A; Target 52306; HLA-C*06:02; MYH4; ENSG00000264424; TAA
VTKGQTVQQVY

SEQ ID NO: 52307 - protein, 11 aa, Homo sapiens
  misc_feature: Table A; Target 52307; HLA-C*07:04; MYH4; ENSG00000264424; TAA
VTKGQTVQQVY

SEQ ID NO: 52308 - protein, 11 aa, Homo sapiens
  misc_feature: Table A; Target 52308; HLA-C*12:03; MYH4; ENSG00000264424; TAA
VTKGQTVQQVY

SEQ ID NO: 52309 - protein, 11 aa, Homo sapiens
  misc_feature: Table A; Target 52309; HLA-C*16:01; MYH4; ENSG00000264424; TAA
VTKGQTVQQVY

SEQ ID NO: 52310 - protein, 11 aa, Homo sapiens
  misc_feature: Table A; Target 52310; HLA-C*16:02; MYH4; ENSG00000264424; TAA
VTKGQTVQQVY

SEQ ID NO: 52311 - protein, 11 aa, Homo sapiens
  misc_feature: Table A; Target 52311; HLA-C*16:04; MYH4; ENSG00000264424; TAA
VTKGQTVQQVY

SEQ ID NO: 52312 - protein, 8 aa, Homo sapiens
  misc_feature: Table A; Target 52312; HLA-B*08:01; MYH4; ENSG00000264424; TAA
VTRINQQL

SEQ ID NO: 52313 - protein, 11 aa, Homo sapiens
  misc_feature: Table A; Target 52313; HLA-A*03:01; MYH4; ENSG00000264424; TAA
VTRINQQLDTK

SEQ ID NO: 52314 - protein, 11 aa, Homo sapiens
  misc_feature: Table A; Target 52314; HLA-A*03:02; MYH4; ENSG00000264424; TAA
VTRINQQLDTK

SEQ ID NO: 52315 - protein, 11 aa, Homo sapiens
  misc_feature: Table A; Target 52315; HLA-A*11:01; MYH4; ENSG00000264424; TAA
VTRINQQLDTK

SEQ ID NO: 52316 - protein, 9 aa, Homo sapiens
  misc_feature: Table A; Target 52316; HLA-A*23:01; MYH4; ENSG00000264424; TAA
VTVKEDQVF

SEQ ID NO: 52317 - protein, 9 aa, Homo sapiens
  misc_feature: Table A; Target 52317; HLA-A*32:01; MYH4; ENSG00000264424; TAA
VTVKEDQVF

SEQ ID NO: 52318 - protein, 9 aa, Homo sapiens
  misc_feature: Table A; Target 52318; HLA-B*15:01; MYH4; ENSG00000264424; TAA
VTVKEDQVF

SEQ ID NO: 52319 - protein, 9 aa, Homo sapiens
  misc_feature: Table A; Target 52319; HLA-B*15:03; MYH4; ENSG00000264424; TAA
VTVKEDQVF

SEQ ID NO: 52320 - protein, 9 aa, Homo sapiens
  misc_feature: Table A; Target 52320; HLA-B*38:01; MYH4; ENSG00000264424; TAA
VTVKEDQVF

SEQ ID NO: 52321 - protein, 9 aa, Homo sapiens
  misc_feature: Table A; Target 52321; HLA-B*39:01; MYH4; ENSG00000264424; TAA
VTVKEDQVF

SEQ ID NO: 52322 - protein, 9 aa, Homo sapiens
  misc_feature: Table A; Target 52322; HLA-B*57:01; MYH4; ENSG00000264424; TAA
VTVKEDQVF

SEQ ID NO: 52323 - protein, 9 aa, Homo sapiens
  misc_feature: Table A; Target 52323; HLA-B*58:01; MYH4; ENSG00000264424; TAA
VTVKEDQVF

SEQ ID NO: 52324 - protein, 8 aa, Homo sapiens
  misc_feature: Table A; Target 52324; HLA-B*57:01; MYH4; ENSG00000264424; TAA
VTVNPYKW

SEQ ID NO: 52325 - protein, 8 aa, Homo sapiens
  misc_feature: Table A; Target 52325; HLA-B*58:01; MYH4; ENSG00000264424; TAA
VTVNPYKW

SEQ ID NO: 52326 - protein, 8 aa, Homo sapiens
  misc_feature: Table A; Target 52326; HLA-A*01:01; MYH4; ENSG00000264424; TAA
VVDPKESY

SEQ ID NO: 52327 - protein, 8 aa, Homo sapiens
  misc_feature: Table A; Target 52327; HLA-A*30:02; MYH4; ENSG00000264424; TAA
VVDPKESY

SEQ ID NO: 52328 - protein, 8 aa, Homo sapiens
  misc_feature: Table A; Target 52328; HLA-A*32:01; MYH4; ENSG00000264424; TAA
VVDPKESY

SEQ ID NO: 52329 - protein, 8 aa, Homo sapiens
  misc_feature: Table A; Target 52329; HLA-B*15:01; MYH4; ENSG00000264424; TAA
VVDPKESY

SEQ ID NO: 52330 - protein, 8 aa, Homo sapiens
  misc_feature: Table A; Target 52330; HLA-C*04:01; MYH4; ENSG00000264424; TAA
VVDPKESY

SEQ ID NO: 52331 - protein, 8 aa, Homo sapiens
  misc_feature: Table A; Target 52331; HLA-C*05:01; MYH4; ENSG00000264424; TAA
VVDPKESY

SEQ ID NO: 52332 - protein, 8 aa, Homo sapiens
  misc_feature: Table A; Target 52332; HLA-C*16:01; MYH4; ENSG00000264424; TAA
VVDPKESY

SEQ ID NO: 52333 - protein, 8 aa, Homo sapiens
  misc_feature: Table A; Target 52333; HLA-C*16:02; MYH4; ENSG00000264424; TAA
VVDPKESY

SEQ ID NO: 52334 - protein, 9 aa, Homo sapiens
  misc_feature: Table A; Target 52334; HLA-A*01:01; MYH4; ENSG00000264424; TAA
VVDPKESYV

SEQ ID NO: 52335 - protein, 9 aa, Homo sapiens
  misc_feature: Table A; Target 52335; HLA-A*02:01; MYH4; ENSG00000264424; TAA
VVDPKESYV

SEQ ID NO: 52336 - protein, 9 aa, Homo sapiens
  misc_feature: Table A; Target 52336; HLA-A*02:03; MYH4; ENSG00000264424; TAA
VVDPKESYV

SEQ ID NO: 52337 - protein, 9 aa, Homo sapiens
  misc_feature: Table A; Target 52337; HLA-A*02:07; MYH4; ENSG00000264424; TAA
VVDPKESYV

SEQ ID NO: 52338 - protein, 9 aa, Homo sapiens
  misc_feature: Table A; Target 52338; HLA-B*13:02; MYH4; ENSG00000264424; TAA
VVDPKESYV

SEQ ID NO: 52339 - protein, 9 aa, Homo sapiens
  misc_feature: Table A; Target 52339; HLA-B*38:01; MYH4; ENSG00000264424; TAA
VVDPKESYV

SEQ ID NO: 52340 - protein, 9 aa, Homo sapiens
  misc_feature: Table A; Target 52340; HLA-B*39:01; MYH4; ENSG00000264424; TAA
VVDPKESYV

SEQ ID NO: 52341 - protein, 9 aa, Homo sapiens
  misc_feature: Table A; Target 52341; HLA-B*55:01; MYH4; ENSG00000264424; TAA
VVDPKESYV

SEQ ID NO: 52342 - protein, 9 aa, Homo sapiens
  misc_feature: Table A; Target 52342; HLA-C*03:03; MYH4; ENSG00000264424; TAA
VVDPKESYV

SEQ ID NO: 52343 - protein, 9 aa, Homo sapiens
  misc_feature: Table A; Target 52343; HLA-C*03:04; MYH4; ENSG00000264424; TAA
VVDPKESYV

SEQ ID NO: 52344 - protein, 9 aa, Homo sapiens
  misc_feature: Table A; Target 52344; HLA-C*04:01; MYH4; ENSG00000264424; TAA
VVDPKESYV

SEQ ID NO: 52345 - protein, 9 aa, Homo sapiens
  misc_feature: Table A; Target 52345; HLA-C*05:01; MYH4; ENSG00000264424; TAA
VVDPKESYV

SEQ ID NO: 52346 - protein, 9 aa, Homo sapiens
  misc_feature: Table A; Target 52346; HLA-C*07:04; MYH4; ENSG00000264424; TAA
VVDPKESYV

SEQ ID NO: 52347 - protein, 10 aa, Homo sapiens
  misc_feature: Table A; Target 52347; HLA-A*01:01; MYH4; ENSG00000264424; TAA
VVDPKESYVK

SEQ ID NO: 52348 - protein, 10 aa, Homo sapiens
  misc_feature: Table A; Target 52348; HLA-A*03:01; MYH4; ENSG00000264424; TAA
VVDPKESYVK

SEQ ID NO: 52349 - protein, 10 aa, Homo sapiens
  misc_feature: Table A; Target 52349; HLA-A*03:02; MYH4; ENSG00000264424; TAA
VVDPKESYVK

SEQ ID NO: 52350 - protein, 10 aa, Homo sapiens
  misc_feature: Table A; Target 52350; HLA-A*11:01; MYH4; ENSG00000264424; TAA
VVDPKESYVK

SEQ ID NO: 52351 - protein, 10 aa, Homo sapiens
  misc_feature: Table A; Target 52351; HLA-A*29:02; MYH4; ENSG00000264424; TAA
VVDPKESYVK

SEQ ID NO: 52352 - protein, 10 aa, Homo sapiens
  misc_feature: Table A; Target 52352; HLA-A*31:01; MYH4; ENSG00000264424; TAA
VVDPKESYVK

SEQ ID NO: 52353 - protein, 10 aa, Homo sapiens
  misc_feature: Table A; Target 52353; HLA-A*68:01; MYH4; ENSG00000264424; TAA
VVDPKESYVK

SEQ ID NO: 52354 - protein, 10 aa, Homo sapiens
  misc_feature: Table A; Target 52354; HLA-B*27:02; MYH4; ENSG00000264424; TAA
VVDPKESYVK

SEQ ID NO: 52355 - protein, 10 aa, Homo sapiens
  misc_feature: Table A; Target 52355; HLA-B*27:05; MYH4; ENSG00000264424; TAA
VVDPKESYVK

SEQ ID NO: 52356 - protein, 9 aa, Homo sapiens
  misc_feature: Table A; Target 52356; HLA-B*27:05; MYH4; ENSG00000264424; TAA
VVESMQSTL

SEQ ID NO: 52357 - protein, 9 aa, Homo sapiens
  misc_feature: Table A; Target 52357; HLA-B*38:01; MYH4; ENSG00000264424; TAA
VVESMQSTL

SEQ ID NO: 52358 - protein, 9 aa, Homo sapiens
  misc_feature: Table A; Target 52358; HLA-B*39:01; MYH4; ENSG00000264424; TAA
VVESMQSTL

SEQ ID NO: 52359 - protein, 9 aa, Homo sapiens
  misc_feature: Table A; Target 52359; HLA-B*40:01; MYH4; ENSG00000264424; TAA
VVESMQSTL

SEQ ID NO: 52360 - protein, 9 aa, Homo sapiens
  misc_feature: Table A; Target 52360; HLA-B*58:01; MYH4; ENSG00000264424; TAA
VVESMQSTL

SEQ ID NO: 52361 - protein, 9 aa, Homo sapiens
  misc_feature: Table A; Target 52361; HLA-C*01:02; MYH4; ENSG00000264424; TAA
VVESMQSTL

SEQ ID NO: 52362 - protein, 9 aa, Homo sapiens
  misc_feature: Table A; Target 52362; HLA-C*03:03; MYH4; ENSG00000264424; TAA
VVESMQSTL

SEQ ID NO: 52363 - protein, 9 aa, Homo sapiens
  misc_feature: Table A; Target 52363; HLA-C*03:04; MYH4; ENSG00000264424; TAA
VVESMQSTL

SEQ ID NO: 52364 - protein, 9 aa, Homo sapiens
  misc_feature: Table A; Target 52364; HLA-C*05:01; MYH4; ENSG00000264424; TAA
VVESMQSTL

SEQ ID NO: 52365 - protein, 9 aa, Homo sapiens
  misc_feature: Table A; Target 52365; HLA-C*07:04; MYH4; ENSG00000264424; TAA
VVESMQSTL

SEQ ID NO: 52366 - protein, 9 aa, Homo sapiens
  misc_feature: Table A; Target 52366; HLA-C*16:02; MYH4; ENSG00000264424; TAA
VVESMQSTL

SEQ ID NO: 52367 - protein, 8 aa, Homo sapiens
  misc_feature: Table A; Target 52367; HLA-A*23:01; MYH4; ENSG00000264424; TAA
VYNAVGAL

SEQ ID NO: 52368 - protein, 8 aa, Homo sapiens
  misc_feature: Table A; Target 52368; HLA-A*24:02; MYH4; ENSG00000264424; TAA
VYNAVGAL

SEQ ID NO: 52369 - protein, 8 aa, Homo sapiens
  misc_feature: Table A; Target 52369; HLA-A*30:02; MYH4; ENSG00000264424; TAA
VYNAVGAL

SEQ ID NO: 52370 - protein, 8 aa, Homo sapiens
  misc_feature: Table A; Target 52370; HLA-B*07:02; MYH4; ENSG00000264424; TAA
VYNAVGAL

SEQ ID NO: 52371 - protein, 8 aa, Homo sapiens
  misc_feature: Table A; Target 52371; HLA-B*39:01; MYH4; ENSG00000264424; TAA
VYNAVGAL

SEQ ID NO: 52372 - protein, 8 aa, Homo sapiens
  misc_feature: Table A; Target 52372; HLA-B*46:01; MYH4; ENSG00000264424; TAA
VYNAVGAL

SEQ ID NO: 52373 - protein, 8 aa, Homo sapiens
  misc_feature: Table A; Target 52373; HLA-C*01:02; MYH4; ENSG00000264424; TAA
VYNAVGAL

SEQ ID NO: 52374 - protein, 8 aa, Homo sapiens
  misc_feature: Table A; Target 52374; HLA-C*04:01; MYH4; ENSG00000264424; TAA
VYNAVGAL

SEQ ID NO: 52375 - protein, 8 aa, Homo sapiens
  misc_feature: Table A; Target 52375; HLA-C*06:02; MYH4; ENSG00000264424; TAA
VYNAVGAL

SEQ ID NO: 52376 - protein, 8 aa, Homo sapiens
  misc_feature: Table A; Target 52376; HLA-C*07:02; MYH4; ENSG00000264424; TAA
VYNAVGAL

SEQ ID NO: 52377 - protein, 8 aa, Homo sapiens
  misc_feature: Table A; Target 52377; HLA-C*07:04; MYH4; ENSG00000264424; TAA
VYNAVGAL

SEQ ID NO: 52378 - protein, 8 aa, Homo sapiens
  misc_feature: Table A; Target 52378; HLA-C*14:02; MYH4; ENSG00000264424; TAA
VYNAVGAL

SEQ ID NO: 52379 - protein, 8 aa, Homo sapiens
  misc_feature: Table A; Target 52379; HLA-C*16:02; MYH4; ENSG00000264424; TAA
VYNAVGAL

SEQ ID NO: 52380 - protein, 9 aa, Homo sapiens
  misc_feature: Table A; Target 52380; HLA-A*23:01; MYH4; ENSG00000264424; TAA
VYNAVGALA

SEQ ID NO: 52381 - protein, 9 aa, Homo sapiens
  misc_feature: Table A; Target 52381; HLA-A*24:02; MYH4; ENSG00000264424; TAA
VYNAVGALA

SEQ ID NO: 52382 - protein, 9 aa, Homo sapiens
  misc_feature: Table A; Target 52382; HLA-A*29:02; MYH4; ENSG00000264424; TAA
VYNAVGALA

SEQ ID NO: 52383 - protein, 9 aa, Homo sapiens
  misc_feature: Table A; Target 52383; HLA-A*30:02; MYH4; ENSG00000264424; TAA
VYNAVGALA

SEQ ID NO: 52384 - protein, 9 aa, Homo sapiens
  misc_feature: Table A; Target 52384; HLA-B*46:01; MYH4; ENSG00000264424; TAA
VYNAVGALA

SEQ ID NO: 52385 - protein, 9 aa, Homo sapiens
  misc_feature: Table A; Target 52385; HLA-C*01:02; MYH4; ENSG00000264424; TAA
VYNAVGALA

SEQ ID NO: 52386 - protein, 9 aa, Homo sapiens
  misc_feature: Table A; Target 52386; HLA-C*14:02; MYH4; ENSG00000264424; TAA
VYNAVGALA

SEQ ID NO: 52387 - protein, 10 aa, Homo sapiens
  misc_feature: Table A; Target 52387; HLA-A*03:01; MYH4; ENSG00000264424; TAA
VYNAVGALAK

SEQ ID NO: 52388 - protein, 10 aa, Homo sapiens
  misc_feature: Table A; Target 52388; HLA-A*03:02; MYH4; ENSG00000264424; TAA
VYNAVGALAK

SEQ ID NO: 52389 - protein, 10 aa, Homo sapiens
  misc_feature: Table A; Target 52389; HLA-A*23:01; MYH4; ENSG00000264424; TAA
VYNAVGALAK

SEQ ID NO: 52390 - protein, 10 aa, Homo sapiens
  misc_feature: Table A; Target 52390; HLA-A*24:02; MYH4; ENSG00000264424; TAA
VYNAVGALAK

SEQ ID NO: 52391 - protein, 10 aa, Homo sapiens
  misc_feature: Table A; Target 52391; HLA-A*29:02; MYH4; ENSG00000264424; TAA
VYNAVGALAK

SEQ ID NO: 52392 - protein, 10 aa, Homo sapiens
  misc_feature: Table A; Target 52392; HLA-A*31:01; MYH4; ENSG00000264424; TAA
VYNAVGALAK

SEQ ID NO: 52393 - protein, 10 aa, Homo sapiens
  misc_feature: Table A; Target 52393; HLA-A*33:01; MYH4; ENSG00000264424; TAA
VYNAVGALAK

SEQ ID NO: 52394 - protein, 10 aa, Homo sapiens
  misc_feature: Table A; Target 52394; HLA-A*33:03; MYH4; ENSG00000264424; TAA
VYNAVGALAK

SEQ ID NO: 52395 - protein, 10 aa, Homo sapiens
  misc_feature: Table A; Target 52395; HLA-B*27:02; MYH4; ENSG00000264424; TAA
VYNAVGALAK

SEQ ID NO: 52396 - protein, 10 aa, Homo sapiens
  misc_feature: Table A; Target 52396; HLA-B*27:05; MYH4; ENSG00000264424; TAA
VYNAVGALAK

SEQ ID NO: 52397 - protein, 10 aa, Homo sapiens
  misc_feature: Table A; Target 52397; HLA-C*01:02; MYH4; ENSG00000264424; TAA
VYNAVGALAK

SEQ ID NO: 52398 - protein, 10 aa, Homo sapiens
  misc_feature: Table A; Target 52398; HLA-C*07:02; MYH4; ENSG00000264424; TAA
VYNAVGALAK

SEQ ID NO: 52399 - protein, 10 aa, Homo sapiens
  misc_feature: Table A; Target 52399; HLA-C*14:02; MYH4; ENSG00000264424; TAA
VYNAVGALAK

SEQ ID NO: 52400 - protein, 9 aa, Homo sapiens
  misc_feature: Table A; Target 52400; HLA-A*23:01; MYH4; ENSG00000264424; TAA
VYNPEVVTA

SEQ ID NO: 52401 - protein, 9 aa, Homo sapiens
  misc_feature: Table A; Target 52401; HLA-A*24:02; MYH4; ENSG00000264424; TAA
VYNPEVVTA

SEQ ID NO: 52402 - protein, 9 aa, Homo sapiens
  misc_feature: Table A; Target 52402; HLA-B*56:01; MYH4; ENSG00000264424; TAA
VYNPEVVTA

SEQ ID NO: 52403 - protein, 9 aa, Homo sapiens
  misc_feature: Table A; Target 52403; HLA-C*14:02; MYH4; ENSG00000264424; TAA
VYNPEVVTA

SEQ ID NO: 52404 - protein, 10 aa, Homo sapiens
  misc_feature: Table A; Target 52404; HLA-A*23:01; MYH4; ENSG00000264424; TAA
VYNPEVVTAY

SEQ ID NO: 52405 - protein, 10 aa, Homo sapiens
  misc_feature: Table A; Target 52405; HLA-A*24:02; MYH4; ENSG00000264424; TAA
VYNPEVVTAY

SEQ ID NO: 52406 - protein, 10 aa, Homo sapiens
  misc_feature: Table A; Target 52406; HLA-A*25:01; MYH4; ENSG00000264424; TAA
VYNPEVVTAY

SEQ ID NO: 52407 - protein, 10 aa, Homo sapiens
  misc_feature: Table A; Target 52407; HLA-A*26:01; MYH4; ENSG00000264424; TAA
VYNPEVVTAY

SEQ ID NO: 52408 - protein, 10 aa, Homo sapiens
  misc_feature: Table A; Target 52408; HLA-A*29:02; MYH4; ENSG00000264424; TAA
VYNPEVVTAY

SEQ ID NO: 52409 - protein, 10 aa, Homo sapiens
  misc_feature: Table A; Target 52409; HLA-A*30:02; MYH4; ENSG00000264424; TAA
VYNPEVVTAY

SEQ ID NO: 52410 - protein, 10 aa, Homo sapiens
  misc_feature: Table A; Target 52410; HLA-A*31:01; MYH4; ENSG00000264424; TAA
VYNPEVVTAY

SEQ ID NO: 52411 - protein, 10 aa, Homo sapiens
  misc_feature: Table A; Target 52411; HLA-A*32:01; MYH4; ENSG00000264424; TAA
VYNPEVVTAY

SEQ ID NO: 52412 - protein, 10 aa, Homo sapiens
  misc_feature: Table A; Target 52412; HLA-A*33:03; MYH4; ENSG00000264424; TAA
VYNPEVVTAY

SEQ ID NO: 52413 - protein, 10 aa, Homo sapiens
  misc_feature: Table A; Target 52413; HLA-B*15:01; MYH4; ENSG00000264424; TAA
VYNPEVVTAY

SEQ ID NO: 52414 - protein, 10 aa, Homo sapiens
  misc_feature: Table A; Target 52414; HLA-B*15:03; MYH4; ENSG00000264424; TAA
VYNPEVVTAY

SEQ ID NO: 52415 - protein, 10 aa, Homo sapiens
  misc_feature: Table A; Target 52415; HLA-B*27:02; MYH4; ENSG00000264424; TAA
VYNPEVVTAY

SEQ ID NO: 52416 - protein, 10 aa, Homo sapiens
  misc_feature: Table A; Target 52416; HLA-B*44:02; MYH4; ENSG00000264424; TAA
VYNPEVVTAY

SEQ ID NO: 52417 - protein, 10 aa, Homo sapiens
  misc_feature: Table A; Target 52417; HLA-B*46:01; MYH4; ENSG00000264424; TAA
VYNPEVVTAY

SEQ ID NO: 52418 - protein, 10 aa, Homo sapiens
  misc_feature: Table A; Target 52418; HLA-B*57:01; MYH4; ENSG00000264424; TAA
VYNPEVVTAY

SEQ ID NO: 52419 - protein, 10 aa, Homo sapiens
  misc_feature: Table A; Target 52419; HLA-B*58:01; MYH4; ENSG00000264424; TAA
VYNPEVVTAY

SEQ ID NO: 52420 - protein, 10 aa, Homo sapiens
  misc_feature: Table A; Target 52420; HLA-C*01:02; MYH4; ENSG00000264424; TAA
VYNPEVVTAY

SEQ ID NO: 52421 - protein, 10 aa, Homo sapiens
  misc_feature: Table A; Target 52421; HLA-C*02:02; MYH4; ENSG00000264424; TAA
VYNPEVVTAY

SEQ ID NO: 52422 - protein, 10 aa, Homo sapiens
  misc_feature: Table A; Target 52422; HLA-C*07:04; MYH4; ENSG00000264424; TAA
VYNPEVVTAY

SEQ ID NO: 52423 - protein, 10 aa, Homo sapiens
  misc_feature: Table A; Target 52423; HLA-C*14:02; MYH4; ENSG00000264424; TAA
VYNPEVVTAY

SEQ ID NO: 52424 - protein, 10 aa, Homo sapiens
  misc_feature: Table A; Target 52424; HLA-C*16:04; MYH4; ENSG00000264424; TAA
VYNPEVVTAY

SEQ ID NO: 52425 - protein, 11 aa, Homo sapiens
  misc_feature: Table A; Target 52425; HLA-A*31:01; MYH4; ENSG00000264424; TAA
VYNPEVVTAYR

SEQ ID NO: 52426 - protein, 11 aa, Homo sapiens
  misc_feature: Table A; Target 52426; HLA-A*33:01; MYH4; ENSG00000264424; TAA
VYNPEVVTAYR

SEQ ID NO: 52427 - protein, 11 aa, Homo sapiens
  misc_feature: Table A; Target 52427; HLA-A*33:03; MYH4; ENSG00000264424; TAA
VYNPEVVTAYR

SEQ ID NO: 52428 - protein, 9 aa, Homo sapiens
  misc_feature: Table A; Target 52428; HLA-A*02:01; MYH4; ENSG00000264424; TAA
WLPVYNPEV

SEQ ID NO: 52429 - protein, 9 aa, Homo sapiens
  misc_feature: Table A; Target 52429; HLA-A*02:07; MYH4; ENSG00000264424; TAA
WLPVYNPEV

SEQ ID NO: 52430 - protein, 9 aa, Homo sapiens
  misc_feature: Table A; Target 52430; HLA-A*01:01; MYH4; ENSG00000264424; TAA
YAAWMIYTY

SEQ ID NO: 52431 - protein, 9 aa, Homo sapiens
  misc_feature: Table A; Target 52431; HLA-A*26:01; MYH4; ENSG00000264424; TAA
YAAWMIYTY

SEQ ID NO: 52432 - protein, 9 aa, Homo sapiens
  misc_feature: Table A; Target 52432; HLA-A*29:02; MYH4; ENSG00000264424; TAA
YAAWMIYTY

SEQ ID NO: 52433 - protein, 9 aa, Homo sapiens
  misc_feature: Table A; Target 52433; HLA-B*35:01; MYH4; ENSG00000264424; TAA
YAAWMIYTY

SEQ ID NO: 52434 - protein, 9 aa, Homo sapiens
  misc_feature: Table A; Target 52434; HLA-B*54:01; MYH4; ENSG00000264424; TAA
YAAWMIYTY

SEQ ID NO: 52435 - protein, 9 aa, Homo sapiens
  misc_feature: Table A; Target 52435; HLA-B*57:01; MYH4; ENSG00000264424; TAA
YAAWMIYTY

SEQ ID NO: 52436 - protein, 9 aa, Homo sapiens
  misc_feature: Table A; Target 52436; HLA-C*02:02; MYH4; ENSG00000264424; TAA
YAAWMIYTY

SEQ ID NO: 52437 - protein, 9 aa, Homo sapiens
  misc_feature: Table A; Target 52437; HLA-C*12:03; MYH4; ENSG00000264424; TAA
YAAWMIYTY

SEQ ID NO: 52438 - protein, 9 aa, Homo sapiens
  misc_feature: Table A; Target 52438; HLA-C*16:04; MYH4; ENSG00000264424; TAA
YAAWMIYTY

SEQ ID NO: 52439 - protein, 8 aa, Homo sapiens
  misc_feature: Table A; Target 52439; HLA-A*01:01; MYH4; ENSG00000264424; TAA
YADFKQRY

SEQ ID NO: 52440 - protein, 8 aa, Homo sapiens
  misc_feature: Table A; Target 52440; HLA-B*08:01; MYH4; ENSG00000264424; TAA
YADFKQRY

SEQ ID NO: 52441 - protein, 9 aa, Homo sapiens
  misc_feature: Table A; Target 52441; HLA-A*03:01; MYH4; ENSG00000264424; TAA
YADFKQRYK

SEQ ID NO: 52442 - protein, 8 aa, Homo sapiens
  misc_feature: Table A; Target 52442; HLA-C*07:04; MYH4; ENSG00000264424; TAA
YAGTVDYN

SEQ ID NO: 52443 - protein, 8 aa, Homo sapiens
  misc_feature: Table A; Target 52443; HLA-C*12:03; MYH4; ENSG00000264424; TAA
YAGTVDYN

SEQ ID NO: 52444 - protein, 9 aa, Homo sapiens
  misc_feature: Table A; Target 52444; HLA-A*23:01; MYH4; ENSG00000264424; TAA
YAGTVDYNI

SEQ ID NO: 52445 - protein, 9 aa, Homo sapiens
  misc_feature: Table A; Target 52445; HLA-A*68:02; MYH4; ENSG00000264424; TAA
YAGTVDYNI

SEQ ID NO: 52446 - protein, 9 aa, Homo sapiens
  misc_feature: Table A; Target 52446; HLA-B*13:02; MYH4; ENSG00000264424; TAA
YAGTVDYNI

SEQ ID NO: 52447 - protein, 9 aa, Homo sapiens
  misc_feature: Table A; Target 52447; HLA-B*35:03; MYH4; ENSG00000264424; TAA
YAGTVDYNI

SEQ ID NO: 52448 - protein, 9 aa, Homo sapiens
  misc_feature: Table A; Target 52448; HLA-B*38:01; MYH4; ENSG00000264424; TAA
YAGTVDYNI

SEQ ID NO: 52449 - protein, 9 aa, Homo sapiens
  misc_feature: Table A; Target 52449; HLA-B*51:01; MYH4; ENSG00000264424; TAA
YAGTVDYNI

SEQ ID NO: 52450 - protein, 9 aa, Homo sapiens
  misc_feature: Table A; Target 52450; HLA-B*58:01; MYH4; ENSG00000264424; TAA
YAGTVDYNI

SEQ ID NO: 52451 - protein, 9 aa, Homo sapiens
  misc_feature: Table A; Target 52451; HLA-C*16:04; MYH4; ENSG00000264424; TAA
YAGTVDYNI

SEQ ID NO: 52452 - protein, 9 aa, Homo sapiens
  misc_feature: Table A; Target 52452; HLA-A*30:01; MYH4; ENSG00000264424; TAA
YDKIEDMAM

SEQ ID NO: 52453 - protein, 9 aa, Homo sapiens
  misc_feature: Table A; Target 52453; HLA-B*40:02; MYH4; ENSG00000264424; TAA
YDKIEDMAM

SEQ ID NO: 52454 - protein, 9 aa, Homo sapiens
  misc_feature: Table A; Target 52454; HLA-B*40:01; MYH4; ENSG00000264424; TAA
YEEEQEAKA

SEQ ID NO: 52455 - protein, 9 aa, Homo sapiens
  misc_feature: Table A; Target 52455; HLA-B*49:01; MYH4; ENSG00000264424; TAA
YEEEQEAKA

SEQ ID NO: 52456 - protein, 11 aa, Homo sapiens
  misc_feature: Table A; Target 52456; HLA-A*30:01; MYH4; ENSG00000264424; TAA
YEEEQEAKAEL

SEQ ID NO: 52457 - protein, 11 aa, Homo sapiens
  misc_feature: Table A; Target 52457; HLA-B*18:01; MYH4; ENSG00000264424; TAA
YEEEQEAKAEL

SEQ ID NO: 52458 - protein, 11 aa, Homo sapiens
  misc_feature: Table A; Target 52458; HLA-B*27:05; MYH4; ENSG00000264424; TAA
YEEEQEAKAEL

SEQ ID NO: 52459 - protein, 11 aa, Homo sapiens
  misc_feature: Table A; Target 52459; HLA-B*38:01; MYH4; ENSG00000264424; TAA
YEEEQEAKAEL

SEQ ID NO: 52460 - protein, 11 aa, Homo sapiens
  misc_feature: Table A; Target 52460; HLA-B*39:01; MYH4; ENSG00000264424; TAA
YEEEQEAKAEL

SEQ ID NO: 52461 - protein, 11 aa, Homo sapiens
  misc_feature: Table A; Target 52461; HLA-B*40:01; MYH4; ENSG00000264424; TAA
YEEEQEAKAEL

SEQ ID NO: 52462 - protein, 11 aa, Homo sapiens
  misc_feature: Table A; Target 52462; HLA-B*40:02; MYH4; ENSG00000264424; TAA
YEEEQEAKAEL

SEQ ID NO: 52463 - protein, 11 aa, Homo sapiens
  misc_feature: Table A; Target 52463; HLA-B*49:01; MYH4; ENSG00000264424; TAA
YEEEQEAKAEL

SEQ ID NO: 52464 - protein, 11 aa, Homo sapiens
  misc_feature: Table A; Target 52464; HLA-C*03:04; MYH4; ENSG00000264424; TAA
YEEEQEAKAEL

SEQ ID NO: 52465 - protein, 11 aa, Homo sapiens
  misc_feature: Table A; Target 52465; HLA-C*05:01; MYH4; ENSG00000264424; TAA
YEEEQEAKAEL

SEQ ID NO: 52466 - protein, 8 aa, Homo sapiens
  misc_feature: Table A; Target 52466; HLA-A*30:01; MYH4; ENSG00000264424; TAA
YEESLDHL

SEQ ID NO: 52467 - protein, 8 aa, Homo sapiens
  misc_feature: Table A; Target 52467; HLA-B*40:01; MYH4; ENSG00000264424; TAA
YEESLDHL

SEQ ID NO: 52468 - protein, 8 aa, Homo sapiens
  misc_feature: Table A; Target 52468; HLA-B*40:02; MYH4; ENSG00000264424; TAA
YEESLDHL

SEQ ID NO: 52469 - protein, 8 aa, Homo sapiens
  misc_feature: Table A; Target 52469; HLA-B*49:01; MYH4; ENSG00000264424; TAA
YEESLDHL

SEQ ID NO: 52470 - protein, 11 aa, Homo sapiens
  misc_feature: Table A; Target 52470; HLA-A*30:01; MYH4; ENSG00000264424; TAA
YEESLDHLETL

SEQ ID NO: 52471 - protein, 11 aa, Homo sapiens
  misc_feature: Table A; Target 52471; HLA-B*18:01; MYH4; ENSG00000264424; TAA
YEESLDHLETL

SEQ ID NO: 52472 - protein, 11 aa, Homo sapiens
  misc_feature: Table A; Target 52472; HLA-B*40:01; MYH4; ENSG00000264424; TAA
YEESLDHLETL

SEQ ID NO: 52473 - protein, 11 aa, Homo sapiens
  misc_feature: Table A; Target 52473; HLA-B*40:02; MYH4; ENSG00000264424; TAA
YEESLDHLETL

SEQ ID NO: 52474 - protein, 11 aa, Homo sapiens
  misc_feature: Table A; Target 52474; HLA-B*49:01; MYH4; ENSG00000264424; TAA
YEESLDHLETL

SEQ ID NO: 52475 - protein, 11 aa, Homo sapiens
  misc_feature: Table A; Target 52475; HLA-C*04:01; MYH4; ENSG00000264424; TAA
YEESLDHLETL

SEQ ID NO: 52476 - protein, 8 aa, Homo sapiens
  misc_feature: Table A; Target 52476; HLA-A*30:01; MYH4; ENSG00000264424; TAA
YEETQAEL

SEQ ID NO: 52477 - protein, 8 aa, Homo sapiens
  misc_feature: Table A; Target 52477; HLA-B*18:01; MYH4; ENSG00000264424; TAA
YEETQAEL

SEQ ID NO: 52478 - protein, 8 aa, Homo sapiens
  misc_feature: Table A; Target 52478; HLA-B*39:01; MYH4; ENSG00000264424; TAA
YEETQAEL

SEQ ID NO: 52479 - protein, 8 aa, Homo sapiens
  misc_feature: Table A; Target 52479; HLA-B*40:01; MYH4; ENSG00000264424; TAA
YEETQAEL

SEQ ID NO: 52480 - protein, 8 aa, Homo sapiens
  misc_feature: Table A; Target 52480; HLA-B*40:02; MYH4; ENSG00000264424; TAA
YEETQAEL

SEQ ID NO: 52481 - protein, 8 aa, Homo sapiens
  misc_feature: Table A; Target 52481; HLA-B*49:01; MYH4; ENSG00000264424; TAA
YEETQAEL

SEQ ID NO: 52482 - protein, 8 aa, Homo sapiens
  misc_feature: Table A; Target 52482; HLA-C*05:01; MYH4; ENSG00000264424; TAA
YEETQAEL

SEQ ID NO: 52483 - protein, 8 aa, Homo sapiens
  misc_feature: Table A; Target 52483; HLA-C*07:04; MYH4; ENSG00000264424; TAA
YEETQAEL

SEQ ID NO: 52484 - protein, 10 aa, Homo sapiens
  misc_feature: Table A; Target 52484; HLA-B*39:01; MYH4; ENSG00000264424; TAA
YEETQAELEA

SEQ ID NO: 52485 - protein, 10 aa, Homo sapiens
  misc_feature: Table A; Target 52485; HLA-C*07:01; MYH4; ENSG00000264424; TAA
YEQHLGKSNN

SEQ ID NO: 52486 - protein, 11 aa, Homo sapiens
  misc_feature: Table A; Target 52486; HLA-B*44:02; MYH4; ENSG00000264424; TAA
YEQHLGKSNNF

SEQ ID NO: 52487 - protein, 8 aa, Homo sapiens
  misc_feature: Table A; Target 52487; HLA-B*18:01; MYH4; ENSG00000264424; TAA
YETDAIQR

SEQ ID NO: 52488 - protein, 8 aa, Homo sapiens
  misc_feature: Table A; Target 52488; HLA-B*27:02; MYH4; ENSG00000264424; TAA
YETDAIQR

SEQ ID NO: 52489 - protein, 8 aa, Homo sapiens
  misc_feature: Table A; Target 52489; HLA-B*27:05; MYH4; ENSG00000264424; TAA
YETDAIQR

SEQ ID NO: 52490 - protein, 8 aa, Homo sapiens
  misc_feature: Table A; Target 52490; HLA-B*49:01; MYH4; ENSG00000264424; TAA
YETDAIQR

SEQ ID NO: 52491 - protein, 9 aa, Homo sapiens
  misc_feature: Table A; Target 52491; HLA-A*30:01; MYH4; ENSG00000264424; TAA
YETDAIQRT

SEQ ID NO: 52492 - protein, 9 aa, Homo sapiens
  misc_feature: Table A; Target 52492; HLA-A*32:01; MYH4; ENSG00000264424; TAA
YETDAIQRT

SEQ ID NO: 52493 - protein, 9 aa, Homo sapiens
  misc_feature: Table A; Target 52493; HLA-B*13:02; MYH4; ENSG00000264424; TAA
YETDAIQRT

SEQ ID NO: 52494 - protein, 9 aa, Homo sapiens
  misc_feature: Table A; Target 52494; HLA-B*18:01; MYH4; ENSG00000264424; TAA
YETDAIQRT

SEQ ID NO: 52495 - protein, 9 aa, Homo sapiens
  misc_feature: Table A; Target 52495; HLA-B*27:05; MYH4; ENSG00000264424; TAA
YETDAIQRT

SEQ ID NO: 52496 - protein, 9 aa, Homo sapiens
  misc_feature: Table A; Target 52496; HLA-B*40:01; MYH4; ENSG00000264424; TAA
YETDAIQRT

SEQ ID NO: 52497 - protein, 9 aa, Homo sapiens
  misc_feature: Table A; Target 52497; HLA-B*40:02; MYH4; ENSG00000264424; TAA
YETDAIQRT

SEQ ID NO: 52498 - protein, 9 aa, Homo sapiens
  misc_feature: Table A; Target 52498; HLA-B*44:02; MYH4; ENSG00000264424; TAA
YETDAIQRT

SEQ ID NO: 52499 - protein, 9 aa, Homo sapiens
  misc_feature: Table A; Target 52499; HLA-B*44:03; MYH4; ENSG00000264424; TAA
YETDAIQRT

SEQ ID NO: 52500 - protein, 9 aa, Homo sapiens
  misc_feature: Table A; Target 52500; HLA-B*49:01; MYH4; ENSG00000264424; TAA
YETDAIQRT

SEQ ID NO: 52501 - protein, 9 aa, Homo sapiens
  misc_feature: Table A; Target 52501; HLA-C*07:04; MYH4; ENSG00000264424; TAA
YETDAIQRT

SEQ ID NO: 52502 - protein, 9 aa, Homo sapiens
  misc_feature: Table A; Target 52502; HLA-C*12:03; MYH4; ENSG00000264424; TAA
YETDAIQRT

SEQ ID NO: 52503 - protein, 9 aa, Homo sapiens
  misc_feature: Table A; Target 52503; HLA-C*16:02; MYH4; ENSG00000264424; TAA
YETDAIQRT

SEQ ID NO: 52504 - protein, 9 aa, Homo sapiens
  misc_feature: Table A; Target 52504; HLA-C*16:04; MYH4; ENSG00000264424; TAA
YETDAIQRT

SEQ ID NO: 52505 - protein, 9 aa, Homo sapiens
  misc_feature: Table A; Target 52505; HLA-A*23:01; MYH4; ENSG00000264424; TAA
YFATIAVTG

SEQ ID NO: 52506 - protein, 9 aa, Homo sapiens
  misc_feature: Table A; Target 52506; HLA-C*14:02; MYH4; ENSG00000264424; TAA
YFATIAVTG

SEQ ID NO: 52507 - protein, 8 aa, Homo sapiens
  misc_feature: Table A; Target 52507; HLA-A*23:01; MYH4; ENSG00000264424; TAA
YFIGVLDI

SEQ ID NO: 52508 - protein, 8 aa, Homo sapiens
  misc_feature: Table A; Target 52508; HLA-B*08:01; MYH4; ENSG00000264424; TAA
YFKIKPLL

SEQ ID NO: 52509 - protein, 8 aa, Homo sapiens
  misc_feature: Table A; Target 52509; HLA-B*15:03; MYH4; ENSG00000264424; TAA
YKLTGAVM

SEQ ID NO: 52510 - protein, 10 aa, Homo sapiens
  misc_feature: Table A; Target 52510; HLA-B*15:03; MYH4; ENSG00000264424; TAA
YKLTGAVMHY

SEQ ID NO: 52511 - protein, 10 aa, Homo sapiens
  misc_feature: Table A; Target 52511; HLA-C*07:01; MYH4; ENSG00000264424; TAA
YKLTGAVMHY

SEQ ID NO: 52512 - protein, 9 aa, Homo sapiens
  misc_feature: Table A; Target 52512; HLA-B*15:03; MYH4; ENSG00000264424; TAA
YKVLNASAI

SEQ ID NO: 52513 - protein, 8 aa, Homo sapiens
  misc_feature: Table A; Target 52513; HLA-B*08:01; MYH4; ENSG00000264424; TAA
YLLEKSRV

SEQ ID NO: 52514 - protein, 10 aa, Homo sapiens
  misc_feature: Table A; Target 52514; HLA-A*02:04; MYH4; ENSG00000264424; TAA
YLLEKSRVTF

SEQ ID NO: 52515 - protein, 10 aa, Homo sapiens
  misc_feature: Table A; Target 52515; HLA-A*23:01; MYH4; ENSG00000264424; TAA
YLLEKSRVTF

SEQ ID NO: 52516 - protein, 10 aa, Homo sapiens
  misc_feature: Table A; Target 52516; HLA-A*24:02; MYH4; ENSG00000264424; TAA
YLLEKSRVTF

SEQ ID NO: 52517 - protein, 8 aa, Homo sapiens
  misc_feature: Table A; Target 52517; HLA-A*02:01; MYH4; ENSG00000264424; TAA
YLTSLNSA

SEQ ID NO: 52518 - protein, 8 aa, Homo sapiens
  misc_feature: Table A; Target 52518; HLA-B*56:01; MYH4; ENSG00000264424; TAA
YLTSLNSA

SEQ ID NO: 52519 - protein, 8 aa, Homo sapiens
  misc_feature: Table A; Target 52519; HLA-C*16:02; MYH4; ENSG00000264424; TAA
YLTSLNSA

SEQ ID NO: 52520 - protein, 11 aa, Homo sapiens
  misc_feature: Table A; Target 52520; HLA-A*02:01; MYH4; ENSG00000264424; TAA
YLTSLNSADLL

SEQ ID NO: 52521 - protein, 11 aa, Homo sapiens
  misc_feature: Table A; Target 52521; HLA-A*02:04; MYH4; ENSG00000264424; TAA
YLTSLNSADLL

SEQ ID NO: 52522 - protein, 11 aa, Homo sapiens
  misc_feature: Table A; Target 52522; HLA-C*14:02; MYH4; ENSG00000264424; TAA
YLTSLNSADLL

SEQ ID NO: 52523 - protein, 9 aa, Homo sapiens
  misc_feature: Table A; Target 52523; HLA-A*01:01; MYH4; ENSG00000264424; TAA
YNPEVVTAY

SEQ ID NO: 52524 - protein, 9 aa, Homo sapiens
  misc_feature: Table A; Target 52524; HLA-A*02:07; MYH4; ENSG00000264424; TAA
YNPEVVTAY

SEQ ID NO: 52525 - protein, 9 aa, Homo sapiens
  misc_feature: Table A; Target 52525; HLA-A*23:01; MYH4; ENSG00000264424; TAA
YNPEVVTAY

SEQ ID NO: 52526 - protein, 9 aa, Homo sapiens
  misc_feature: Table A; Target 52526; HLA-A*25:01; MYH4; ENSG00000264424; TAA
YNPEVVTAY

SEQ ID NO: 52527 - protein, 9 aa, Homo sapiens
  misc_feature: Table A; Target 52527; HLA-A*26:01; MYH4; ENSG00000264424; TAA
YNPEVVTAY

SEQ ID NO: 52528 - protein, 9 aa, Homo sapiens
  misc_feature: Table A; Target 52528; HLA-A*29:02; MYH4; ENSG00000264424; TAA
YNPEVVTAY

SEQ ID NO: 52529 - protein, 9 aa, Homo sapiens
  misc_feature: Table A; Target 52529; HLA-A*30:02; MYH4; ENSG00000264424; TAA
YNPEVVTAY

SEQ ID NO: 52530 - protein, 9 aa, Homo sapiens
  misc_feature: Table A; Target 52530; HLA-A*33:01; MYH4; ENSG00000264424; TAA
YNPEVVTAY

SEQ ID NO: 52531 - protein, 9 aa, Homo sapiens
  misc_feature: Table A; Target 52531; HLA-B*15:01; MYH4; ENSG00000264424; TAA
YNPEVVTAY

SEQ ID NO: 52532 - protein, 9 aa, Homo sapiens
  misc_feature: Table A; Target 52532; HLA-B*15:03; MYH4; ENSG00000264424; TAA
YNPEVVTAY

SEQ ID NO: 52533 - protein, 9 aa, Homo sapiens
  misc_feature: Table A; Target 52533; HLA-B*18:01; MYH4; ENSG00000264424; TAA
YNPEVVTAY

SEQ ID NO: 52534 - protein, 9 aa, Homo sapiens
  misc_feature: Table A; Target 52534; HLA-B*35:01; MYH4; ENSG00000264424; TAA
YNPEVVTAY

SEQ ID NO: 52535 - protein, 9 aa, Homo sapiens
  misc_feature: Table A; Target 52535; HLA-B*46:01; MYH4; ENSG00000264424; TAA
YNPEVVTAY

SEQ ID NO: 52536 - protein, 9 aa, Homo sapiens
  misc_feature: Table A; Target 52536; HLA-C*01:02; MYH4; ENSG00000264424; TAA
YNPEVVTAY

SEQ ID NO: 52537 - protein, 9 aa, Homo sapiens
  misc_feature: Table A; Target 52537; HLA-C*02:02; MYH4; ENSG00000264424; TAA
YNPEVVTAY

SEQ ID NO: 52538 - protein, 9 aa, Homo sapiens
  misc_feature: Table A; Target 52538; HLA-C*07:04; MYH4; ENSG00000264424; TAA
YNPEVVTAY

SEQ ID NO: 52539 - protein, 9 aa, Homo sapiens
  misc_feature: Table A; Target 52539; HLA-C*14:02; MYH4; ENSG00000264424; TAA
YNPEVVTAY

SEQ ID NO: 52540 - protein, 9 aa, Homo sapiens
  misc_feature: Table A; Target 52540; HLA-C*16:01; MYH4; ENSG00000264424; TAA
YNPEVVTAY

SEQ ID NO: 52541 - protein, 9 aa, Homo sapiens
  misc_feature: Table A; Target 52541; HLA-C*16:04; MYH4; ENSG00000264424; TAA
YNPEVVTAY

SEQ ID NO: 52542 - protein, 10 aa, Homo sapiens
  misc_feature: Table A; Target 52542; HLA-B*07:02; MYH4; ENSG00000264424; TAA
YPRVKVGNEF

SEQ ID NO: 52543 - protein, 10 aa, Homo sapiens
  misc_feature: Table A; Target 52543; HLA-B*35:01; MYH4; ENSG00000264424; TAA
YPRVKVGNEF

SEQ ID NO: 52544 - protein, 10 aa, Homo sapiens
  misc_feature: Table A; Target 52544; HLA-C*07:02; MYH4; ENSG00000264424; TAA
YPRVKVGNEF

SEQ ID NO: 52545 - protein, 9 aa, Homo sapiens
  misc_feature: Table A; Target 52545; HLA-A*02:03; MYH4; ENSG00000264424; TAA
YQKSAMKTL

SEQ ID NO: 52546 - protein, 9 aa, Homo sapiens
  misc_feature: Table A; Target 52546; HLA-A*25:01; MYH4; ENSG00000264424; TAA
YQKSAMKTL

SEQ ID NO: 52547 - protein, 9 aa, Homo sapiens
  misc_feature: Table A; Target 52547; HLA-A*26:01; MYH4; ENSG00000264424; TAA
YQKSAMKTL

SEQ ID NO: 52548 - protein, 9 aa, Homo sapiens
  misc_feature: Table A; Target 52548; HLA-A*32:01; MYH4; ENSG00000264424; TAA
YQKSAMKTL

SEQ ID NO: 52549 - protein, 9 aa, Homo sapiens
  misc_feature: Table A; Target 52549; HLA-B*08:01; MYH4; ENSG00000264424; TAA
YQKSAMKTL

SEQ ID NO: 52550 - protein, 9 aa, Homo sapiens
  misc_feature: Table A; Target 52550; HLA-B*15:01; MYH4; ENSG00000264424; TAA
YQKSAMKTL

SEQ ID NO: 52551 - protein, 9 aa, Homo sapiens
  misc_feature: Table A; Target 52551; HLA-B*15:03; MYH4; ENSG00000264424; TAA
YQKSAMKTL

SEQ ID NO: 52552 - protein, 9 aa, Homo sapiens
  misc_feature: Table A; Target 52552; HLA-B*40:02; MYH4; ENSG00000264424; TAA
YQKSAMKTL

SEQ ID NO: 52553 - protein, 9 aa, Homo sapiens
  misc_feature: Table A; Target 52553; HLA-B*46:01; MYH4; ENSG00000264424; TAA
YQKSAMKTL

SEQ ID NO: 52554 - protein, 9 aa, Homo sapiens
  misc_feature: Table A; Target 52554; HLA-C*02:02; MYH4; ENSG00000264424; TAA
YQKSAMKTL

SEQ ID NO: 52555 - protein, 9 aa, Homo sapiens
  misc_feature: Table A; Target 52555; HLA-C*03:04; MYH4; ENSG00000264424; TAA
YQKSAMKTL

SEQ ID NO: 52556 - protein, 9 aa, Homo sapiens
  misc_feature: Table A; Target 52556; HLA-C*07:04; MYH4; ENSG00000264424; TAA
YQKSAMKTL

SEQ ID NO: 52557 - protein, 9 aa, Homo sapiens
  misc_feature: Table A; Target 52557; HLA-C*12:03; MYH4; ENSG00000264424; TAA
YQKSAMKTL

SEQ ID NO: 52558 - protein, 9 aa, Homo sapiens
  misc_feature: Table A; Target 52558; HLA-A*68:02; MYH4; ENSG00000264424; TAA
YSGLFCVTV

SEQ ID NO: 52559 - protein, 9 aa, Homo sapiens
  misc_feature: Table A; Target 52559; HLA-A*02:01; MYH4; ENSG00000264424; TAA
YTYSGLFCV

SEQ ID NO: 52560 - protein, 9 aa, Homo sapiens
  misc_feature: Table A; Target 52560; HLA-A*02:04; MYH4; ENSG00000264424; TAA
YTYSGLFCV

SEQ ID NO: 52561 - protein, 9 aa, Homo sapiens
  misc_feature: Table A; Target 52561; HLA-A*68:02; MYH4; ENSG00000264424; TAA
YTYSGLFCV

SEQ ID NO: 52562 - protein, 9 aa, Homo sapiens
  misc_feature: Table A; Target 52562; HLA-B*13:02; MYH4; ENSG00000264424; TAA
YTYSGLFCV

SEQ ID NO: 52563 - protein, 9 aa, Homo sapiens
  misc_feature: Table A; Target 52563; HLA-B*54:01; MYH4; ENSG00000264424; TAA
YTYSGLFCV

SEQ ID NO: 52564 - protein, 11 aa, Homo sapiens
  misc_feature: Table A; Target 52564; HLA-A*68:02; MYH4; ENSG00000264424; TAA
YTYSGLFCVTV

SEQ ID NO: 52565 - protein, 9 aa, Homo sapiens
  misc_feature: Table A; Target 52565; HLA-A*02:03; MYH4; ENSG00000264424; TAA
YVKAIVQSR

SEQ ID NO: 52566 - protein, 9 aa, Homo sapiens
  misc_feature: Table A; Target 52566; HLA-A*25:01; MYH4; ENSG00000264424; TAA
YVKAIVQSR

SEQ ID NO: 52567 - protein, 9 aa, Homo sapiens
  misc_feature: Table A; Target 52567; HLA-A*26:01; MYH4; ENSG00000264424; TAA
YVKAIVQSR

SEQ ID NO: 52568 - protein, 9 aa, Homo sapiens
  misc_feature: Table A; Target 52568; HLA-A*31:01; MYH4; ENSG00000264424; TAA
YVKAIVQSR

SEQ ID NO: 52569 - protein, 9 aa, Homo sapiens
  misc_feature: Table A; Target 52569; HLA-A*32:01; MYH4; ENSG00000264424; TAA
YVKAIVQSR

SEQ ID NO: 52570 - protein, 9 aa, Homo sapiens
  misc_feature: Table A; Target 52570; HLA-A*33:01; MYH4; ENSG00000264424; TAA
YVKAIVQSR

SEQ ID NO: 52571 - protein, 9 aa, Homo sapiens
  misc_feature: Table A; Target 52571; HLA-A*33:03; MYH4; ENSG00000264424; TAA
YVKAIVQSR

SEQ ID NO: 52572 - protein, 9 aa, Homo sapiens
  misc_feature: Table A; Target 52572; HLA-A*68:01; MYH4; ENSG00000264424; TAA
YVKAIVQSR

SEQ ID NO: 52573 - protein, 9 aa, Homo sapiens
  misc_feature: Table A; Target 52573; HLA-A*68:02; MYH4; ENSG00000264424; TAA
YVKAIVQSR

SEQ ID NO: 52574 - protein, 9 aa, Homo sapiens
  misc_feature: Table A; Target 52574; HLA-B*08:01; MYH4; ENSG00000264424; TAA
YVKAIVQSR

SEQ ID NO: 52575 - protein, 9 aa, Homo sapiens
  misc_feature: Table A; Target 52575; HLA-B*13:02; MYH4; ENSG00000264424; TAA
YVKAIVQSR

SEQ ID NO: 52576 - protein, 9 aa, Homo sapiens
  misc_feature: Table A; Target 52576; HLA-B*46:01; MYH4; ENSG00000264424; TAA
YVKAIVQSR

SEQ ID NO: 52577 - protein, 9 aa, Homo sapiens
  misc_feature: Table A; Target 52577; HLA-B*54:01; MYH4; ENSG00000264424; TAA
YVKAIVQSR

SEQ ID NO: 52578 - protein, 9 aa, Homo sapiens
  misc_feature: Table A; Target 52578; HLA-B*57:01; MYH4; ENSG00000264424; TAA
YVKAIVQSR

SEQ ID NO: 52579 - protein, 9 aa, Homo sapiens
  misc_feature: Table A; Target 52579; HLA-C*02:02; MYH4; ENSG00000264424; TAA
YVKAIVQSR

SEQ ID NO: 52580 - protein, 9 aa, Homo sapiens
  misc_feature: Table A; Target 52580; HLA-C*07:06; MYH4; ENSG00000264424; TAA
YVKAIVQSR

SEQ ID NO: 52581 - protein, 9 aa, Homo sapiens
  misc_feature: Table A; Target 52581; HLA-C*16:02; MYH4; ENSG00000264424; TAA
YVKAIVQSR

SEQ ID NO: 52582 - protein, 8 aa, Homo sapiens
  misc_feature: Table A; Target 52582; HLA-B*15:01; NPFFR2; ENSG00000056291; TAA
AAIFIISY

SEQ ID NO: 52583 - protein, 8 aa, Homo sapiens
  misc_feature: Table A; Target 52583; HLA-C*02:02; NPFFR2; ENSG00000056291; TAA
AAIFIISY

SEQ ID NO: 52584 - protein, 9 aa, Homo sapiens
  misc_feature: Table A; Target 52584; HLA-C*02:02; NPFFR2; ENSG00000056291; TAA
AAIFIISYF

SEQ ID NO: 52585 - protein, 9 aa, Homo sapiens
  misc_feature: Table A; Target 52585; HLA-C*12:03; NPFFR2; ENSG00000056291; TAA
AAIFIISYF

SEQ ID NO: 52586 - protein, 8 aa, Homo sapiens
  misc_feature: Table A; Target 52586; HLA-B*37:01; NPFFR2; ENSG00000056291; TAA
AASVFTLV

SEQ ID NO: 52587 - protein, 8 aa, Homo sapiens
  misc_feature: Table A; Target 52587; HLA-B*49:01; NPFFR2; ENSG00000056291; TAA
AASVFTLV

SEQ ID NO: 52588 - protein, 9 aa, Homo sapiens
  misc_feature: Table A; Target 52588; HLA-B*56:01; NPFFR2; ENSG00000056291; TAA
AASVFTLVA

SEQ ID NO: 52589 - protein, 8 aa, Homo sapiens
  misc_feature: Table A; Target 52589; HLA-B*37:01; NPFFR2; ENSG00000056291; TAA
ADLSPNEL

SEQ ID NO: 52590 - protein, 8 aa, Homo sapiens
  misc_feature: Table A; Target 52590; HLA-A*30:01; NPFFR2; ENSG00000056291; TAA
AEKPQQEL

SEQ ID NO: 52591 - protein, 8 aa, Homo sapiens
  misc_feature: Table A; Target 52591; HLA-B*37:01; NPFFR2; ENSG00000056291; TAA
AEKPQQEL

SEQ ID NO: 52592 - protein, 8 aa, Homo sapiens
  misc_feature: Table A; Target 52592; HLA-B*40:01; NPFFR2; ENSG00000056291; TAA
AEKPQQEL

SEQ ID NO: 52593 - protein, 8 aa, Homo sapiens
  misc_feature: Table A; Target 52593; HLA-B*40:02; NPFFR2; ENSG00000056291; TAA
AEKPQQEL

SEQ ID NO: 52594 - protein, 8 aa, Homo sapiens
  misc_feature: Table A; Target 52594; HLA-B*44:02; NPFFR2; ENSG00000056291; TAA
AEKPQQEL

SEQ ID NO: 52595 - protein, 8 aa, Homo sapiens
  misc_feature: Table A; Target 52595; HLA-B*44:03; NPFFR2; ENSG00000056291; TAA
AEKPQQEL

SEQ ID NO: 52596 - protein, 8 aa, Homo sapiens
  misc_feature: Table A; Target 52596; HLA-C*16:04; NPFFR2; ENSG00000056291; TAA
AEKPQQEL

SEQ ID NO: 52597 - protein, 9 aa, Homo sapiens
  misc_feature: Table A; Target 52597; HLA-A*30:01; NPFFR2; ENSG00000056291; TAA
AEKPQQELV

SEQ ID NO: 52598 - protein, 9 aa, Homo sapiens
  misc_feature: Table A; Target 52598; HLA-B*13:02; NPFFR2; ENSG00000056291; TAA
AEKPQQELV

SEQ ID NO: 52599 - protein, 9 aa, Homo sapiens
  misc_feature: Table A; Target 52599; HLA-B*37:01; NPFFR2; ENSG00000056291; TAA
AEKPQQELV

SEQ ID NO: 52600 - protein, 9 aa, Homo sapiens
  misc_feature: Table A; Target 52600; HLA-B*40:01; NPFFR2; ENSG00000056291; TAA
AEKPQQELV

SEQ ID NO: 52601 - protein, 9 aa, Homo sapiens
  misc_feature: Table A; Target 52601; HLA-B*40:02; NPFFR2; ENSG00000056291; TAA
AEKPQQELV

SEQ ID NO: 52602 - protein, 9 aa, Homo sapiens
  misc_feature: Table A; Target 52602; HLA-B*44:02; NPFFR2; ENSG00000056291; TAA
AEKPQQELV

SEQ ID NO: 52603 - protein, 9 aa, Homo sapiens
  misc_feature: Table A; Target 52603; HLA-B*44:03; NPFFR2; ENSG00000056291; TAA
AEKPQQELV

SEQ ID NO: 52604 - protein, 9 aa, Homo sapiens
  misc_feature: Table A; Target 52604; HLA-B*49:01; NPFFR2; ENSG00000056291; TAA
AEKPQQELV

SEQ ID NO: 52605 - protein, 9 aa, Homo sapiens
  misc_feature: Table A; Target 52605; HLA-C*02:02; NPFFR2; ENSG00000056291; TAA
AEKPQQELV

SEQ ID NO: 52606 - protein, 9 aa, Homo sapiens
  misc_feature: Table A; Target 52606; HLA-C*16:04; NPFFR2; ENSG00000056291; TAA
AEKPQQELV

SEQ ID NO: 52607 - protein, 10 aa, Homo sapiens
  misc_feature: Table A; Target 52607; HLA-A*30:01; NPFFR2; ENSG00000056291; TAA
AEKPQQELVM

SEQ ID NO: 52608 - protein, 10 aa, Homo sapiens
  misc_feature: Table A; Target 52608; HLA-B*40:01; NPFFR2; ENSG00000056291; TAA
AEKPQQELVM

SEQ ID NO: 52609 - protein, 10 aa, Homo sapiens
  misc_feature: Table A; Target 52609; HLA-B*40:02; NPFFR2; ENSG00000056291; TAA
AEKPQQELVM

SEQ ID NO: 52610 - protein, 10 aa, Homo sapiens
  misc_feature: Table A; Target 52610; HLA-B*44:02; NPFFR2; ENSG00000056291; TAA
AEKPQQELVM

SEQ ID NO: 52611 - protein, 10 aa, Homo sapiens
  misc_feature: Table A; Target 52611; HLA-B*44:03; NPFFR2; ENSG00000056291; TAA
AEKPQQELVM

SEQ ID NO: 52612 - protein, 10 aa, Homo sapiens
  misc_feature: Table A; Target 52612; HLA-B*49:01; NPFFR2; ENSG00000056291; TAA
AEKPQQELVM

SEQ ID NO: 52613 - protein, 10 aa, Homo sapiens
  misc_feature: Table A; Target 52613; HLA-C*02:02; NPFFR2; ENSG00000056291; TAA
AEKPQQELVM

SEQ ID NO: 52614 - protein, 10 aa, Homo sapiens
  misc_feature: Table A; Target 52614; HLA-C*16:04; NPFFR2; ENSG00000056291; TAA
AEKPQQELVM

SEQ ID NO: 52615 - protein, 9 aa, Homo sapiens
  misc_feature: Table A; Target 52615; HLA-B*15:03; NPFFR2; ENSG00000056291; TAA
AGWPFGNTM

SEQ ID NO: 52616 - protein, 9 aa, Homo sapiens
  misc_feature: Table A; Target 52616; HLA-A*02:01; NPFFR2; ENSG00000056291; TAA
AISDLLVGI

SEQ ID NO: 52617 - protein, 9 aa, Homo sapiens
  misc_feature: Table A; Target 52617; HLA-A*02:03; NPFFR2; ENSG00000056291; TAA
AISDLLVGI

SEQ ID NO: 52618 - protein, 9 aa, Homo sapiens
  misc_feature: Table A; Target 52618; HLA-A*02:04; NPFFR2; ENSG00000056291; TAA
AISDLLVGI

SEQ ID NO: 52619 - protein, 9 aa, Homo sapiens
  misc_feature: Table A; Target 52619; HLA-A*02:07; NPFFR2; ENSG00000056291; TAA
AISDLLVGI

SEQ ID NO: 52620 - protein, 9 aa, Homo sapiens
  misc_feature: Table A; Target 52620; HLA-B*13:02; NPFFR2; ENSG00000056291; TAA
AISDLLVGI

SEQ ID NO: 52621 - protein, 9 aa, Homo sapiens
  misc_feature: Table A; Target 52621; HLA-B*55:01; NPFFR2; ENSG00000056291; TAA
AISDLLVGI

SEQ ID NO: 52622 - protein, 9 aa, Homo sapiens
  misc_feature: Table A; Target 52622; HLA-B*56:01; NPFFR2; ENSG00000056291; TAA
AITIMSPSA

SEQ ID NO: 52623 - protein, 9 aa, Homo sapiens
  misc_feature: Table A; Target 52623; HLA-B*15:03; NPFFR2; ENSG00000056291; TAA
AKPMEAYAL

SEQ ID NO: 52624 - protein, 9 aa, Homo sapiens
  misc_feature: Table A; Target 52624; HLA-A*02:03; NPFFR2; ENSG00000056291; TAA
ALKAKSHVL

SEQ ID NO: 52625 - protein, 9 aa, Homo sapiens
  misc_feature: Table A; Target 52625; HLA-B*08:01; NPFFR2; ENSG00000056291; TAA
ALKAKSHVL

SEQ ID NO: 52626 - protein, 9 aa, Homo sapiens
  misc_feature: Table A; Target 52626; HLA-A*02:04; NPFFR2; ENSG00000056291; TAA
ALLFILSWL

SEQ ID NO: 52627 - protein, 8 aa, Homo sapiens
  misc_feature: Table A; Target 52627; HLA-B*51:01; NPFFR2; ENSG00000056291; TAA
APLSLIVI

SEQ ID NO: 52628 - protein, 8 aa, Homo sapiens
  misc_feature: Table A; Target 52628; HLA-B*56:01; NPFFR2; ENSG00000056291; TAA
APLSLIVI

SEQ ID NO: 52629 - protein, 9 aa, Homo sapiens
  misc_feature: Table A; Target 52629; HLA-B*07:02; NPFFR2; ENSG00000056291; TAA
APLSLIVIM

SEQ ID NO: 52630 - protein, 9 aa, Homo sapiens
  misc_feature: Table A; Target 52630; HLA-B*35:01; NPFFR2; ENSG00000056291; TAA
APLSLIVIM

SEQ ID NO: 52631 - protein, 9 aa, Homo sapiens
  misc_feature: Table A; Target 52631; HLA-B*35:03; NPFFR2; ENSG00000056291; TAA
APLSLIVIM

SEQ ID NO: 52632 - protein, 9 aa, Homo sapiens
  misc_feature: Table A; Target 52632; HLA-B*54:01; NPFFR2; ENSG00000056291; TAA
APLSLIVIM

SEQ ID NO: 52633 - protein, 9 aa, Homo sapiens
  misc_feature: Table A; Target 52633; HLA-B*55:01; NPFFR2; ENSG00000056291; TAA
APLSLIVIM

SEQ ID NO: 52634 - protein, 9 aa, Homo sapiens
  misc_feature: Table A; Target 52634; HLA-B*56:01; NPFFR2; ENSG00000056291; TAA
APLSLIVIM

SEQ ID NO: 52635 - protein, 10 aa, Homo sapiens
  misc_feature: Table A; Target 52635; HLA-B*35:01; NPFFR2; ENSG00000056291; TAA
APLSLIVIMY

SEQ ID NO: 52636 - protein, 9 aa, Homo sapiens
  misc_feature: Table A; Target 52636; HLA-B*13:02; NPFFR2; ENSG00000056291; TAA
ASVFTLVAI

SEQ ID NO: 52637 - protein, 9 aa, Homo sapiens
  misc_feature: Table A; Target 52637; HLA-B*58:01; NPFFR2; ENSG00000056291; TAA
ASVFTLVAI

SEQ ID NO: 52638 - protein, 9 aa, Homo sapiens
  misc_feature: Table A; Target 52638; HLA-A*02:07; NPFFR2; ENSG00000056291; TAA
AVDRFQCVV

SEQ ID NO: 52639 - protein, 10 aa, Homo sapiens
  misc_feature: Table A; Target 52639; HLA-A*01:01; NPFFR2; ENSG00000056291; TAA
AVDRFQCVVY

SEQ ID NO: 52640 - protein, 10 aa, Homo sapiens
  misc_feature: Table A; Target 52640; HLA-A*03:01; NPFFR2; ENSG00000056291; TAA
AVMLHVQEEK

SEQ ID NO: 52641 - protein, 10 aa, Homo sapiens
  misc_feature: Table A; Target 52641; HLA-A*03:02; NPFFR2; ENSG00000056291; TAA
AVMLHVQEEK

SEQ ID NO: 52642 - protein, 10 aa, Homo sapiens
  misc_feature: Table A; Target 52642; HLA-A*11:01; NPFFR2; ENSG00000056291; TAA
AVMLHVQEEK

SEQ ID NO: 52643 - protein, 11 aa, Homo sapiens
  misc_feature: Table A; Target 52643; HLA-A*30:02; NPFFR2; ENSG00000056291; TAA
AVMLHVQEEKY

SEQ ID NO: 52644 - protein, 11 aa, Homo sapiens
  misc_feature: Table A; Target 52644; HLA-B*15:01; NPFFR2; ENSG00000056291; TAA
AVMLHVQEEKY

SEQ ID NO: 52645 - protein, 10 aa, Homo sapiens
  misc_feature: Table A; Target 52645; HLA-A*02:01; NPFFR2; ENSG00000056291; TAA
CLLESDVSSA

SEQ ID NO: 52646 - protein, 10 aa, Homo sapiens
  misc_feature: Table A; Target 52646; HLA-A*02:03; NPFFR2; ENSG00000056291; TAA
CLLESDVSSA

SEQ ID NO: 52647 - protein, 9 aa, Homo sapiens
  misc_feature: Table A; Target 52647; HLA-A*03:01; NPFFR2; ENSG00000056291; TAA
CVVYPFKPK

SEQ ID NO: 52648 - protein, 9 aa, Homo sapiens
  misc_feature: Table A; Target 52648; HLA-A*25:01; NPFFR2; ENSG00000056291; TAA
DINITYVNY

SEQ ID NO: 52649 - protein, 9 aa, Homo sapiens
  misc_feature: Table A; Target 52649; HLA-A*26:01; NPFFR2; ENSG00000056291; TAA
DINITYVNY

SEQ ID NO: 52650 - protein, 9 aa, Homo sapiens
  misc_feature: Table A; Target 52650; HLA-A*29:02; NPFFR2; ENSG00000056291; TAA
DINITYVNY

SEQ ID NO: 52651 - protein, 9 aa, Homo sapiens
  misc_feature: Table A; Target 52651; HLA-A*30:02; NPFFR2; ENSG00000056291; TAA
DINITYVNY

SEQ ID NO: 52652 - protein, 9 aa, Homo sapiens
  misc_feature: Table A; Target 52652; HLA-A*33:01; NPFFR2; ENSG00000056291; TAA
DINITYVNY

SEQ ID NO: 52653 - protein, 9 aa, Homo sapiens
  misc_feature: Table A; Target 52653; HLA-A*33:03; NPFFR2; ENSG00000056291; TAA
DINITYVNY

SEQ ID NO: 52654 - protein, 9 aa, Homo sapiens
  misc_feature: Table A; Target 52654; HLA-A*68:01; NPFFR2; ENSG00000056291; TAA
DINITYVNY

SEQ ID NO: 52655 - protein, 9 aa, Homo sapiens
  misc_feature: Table A; Target 52655; HLA-B*18:01; NPFFR2; ENSG00000056291; TAA
DINITYVNY

SEQ ID NO: 52656 - protein, 9 aa, Homo sapiens
  misc_feature: Table A; Target 52656; HLA-B*35:01; NPFFR2; ENSG00000056291; TAA
DINITYVNY

SEQ ID NO: 52657 - protein, 9 aa, Homo sapiens
  misc_feature: Table A; Target 52657; HLA-C*07:06; NPFFR2; ENSG00000056291; TAA
DINITYVNY

SEQ ID NO: 52658 - protein, 10 aa, Homo sapiens
  misc_feature: Table A; Target 52658; HLA-A*26:01; NPFFR2; ENSG00000056291; TAA
DINITYVNYY

SEQ ID NO: 52659 - protein, 9 aa, Homo sapiens
  misc_feature: Table A; Target 52659; HLA-B*38:01; NPFFR2; ENSG00000056291; TAA
DLSPNELQI

SEQ ID NO: 52660 - protein, 10 aa, Homo sapiens
  misc_feature: Table A; Target 52660; HLA-A*23:01; NPFFR2; ENSG00000056291; TAA
DYADLSPNEL

SEQ ID NO: 52661 - protein, 10 aa, Homo sapiens
  misc_feature: Table A; Target 52661; HLA-A*24:02; NPFFR2; ENSG00000056291; TAA
DYADLSPNEL

SEQ ID NO: 52662 - protein, 10 aa, Homo sapiens
  misc_feature: Table A; Target 52662; HLA-A*33:03; NPFFR2; ENSG00000056291; TAA
DYADLSPNEL

SEQ ID NO: 52663 - protein, 10 aa, Homo sapiens
  misc_feature: Table A; Target 52663; HLA-C*14:02; NPFFR2; ENSG00000056291; TAA
DYADLSPNEL

SEQ ID NO: 52664 - protein, 8 aa, Homo sapiens
  misc_feature: Table A; Target 52664; HLA-B*51:01; NPFFR2; ENSG00000056291; TAA
EAFQLQLC

SEQ ID NO: 52665 - protein, 10 aa, Homo sapiens
  misc_feature: Table A; Target 52665; HLA-A*33:01; NPFFR2; ENSG00000056291; TAA
EAFQLQLCQK

SEQ ID NO: 52666 - protein, 10 aa, Homo sapiens
  misc_feature: Table A; Target 52666; HLA-A*33:03; NPFFR2; ENSG00000056291; TAA
EAFQLQLCQK

SEQ ID NO: 52667 - protein, 10 aa, Homo sapiens
  misc_feature: Table A; Target 52667; HLA-A*68:01; NPFFR2; ENSG00000056291; TAA
EAFQLQLCQK

SEQ ID NO: 52668 - protein, 8 aa, Homo sapiens
  misc_feature: Table A; Target 52668; HLA-A*33:03; NPFFR2; ENSG00000056291; TAA
EAYALKAK

SEQ ID NO: 52669 - protein, 8 aa, Homo sapiens
  misc_feature: Table A; Target 52669; HLA-B*37:01; NPFFR2; ENSG00000056291; TAA
EDWPNQEM

SEQ ID NO: 52670 - protein, 8 aa, Homo sapiens
  misc_feature: Table A; Target 52670; HLA-A*33:01; NPFFR2; ENSG00000056291; TAA
EQWHVVSR

SEQ ID NO: 52671 - protein, 8 aa, Homo sapiens
  misc_feature: Table A; Target 52671; HLA-A*33:03; NPFFR2; ENSG00000056291; TAA
EQWHVVSR

SEQ ID NO: 52672 - protein, 9 aa, Homo sapiens
  misc_feature: Table A; Target 52672; HLA-A*23:01; NPFFR2; ENSG00000056291; TAA
FFGTPAASW

SEQ ID NO: 52673 - protein, 9 aa, Homo sapiens
  misc_feature: Table A; Target 52673; HLA-A*24:02; NPFFR2; ENSG00000056291; TAA
FFGTPAASW

SEQ ID NO: 52674 - protein, 9 aa, Homo sapiens
  misc_feature: Table A; Target 52674; HLA-A*29:02; NPFFR2; ENSG00000056291; TAA
FFGTPAASW

SEQ ID NO: 52675 - protein, 9 aa, Homo sapiens
  misc_feature: Table A; Target 52675; HLA-B*57:01; NPFFR2; ENSG00000056291; TAA
FFGTPAASW

SEQ ID NO: 52676 - protein, 9 aa, Homo sapiens
  misc_feature: Table A; Target 52676; HLA-C*14:02; NPFFR2; ENSG00000056291; TAA
FFGTPAASW

SEQ ID NO: 52677 - protein, 9 aa, Homo sapiens
  misc_feature: Table A; Target 52677; HLA-C*01:02; NPFFR2; ENSG00000056291; TAA
FGNSSVNPI

SEQ ID NO: 52678 - protein, 9 aa, Homo sapiens
  misc_feature: Table A; Target 52678; HLA-C*14:02; NPFFR2; ENSG00000056291; TAA
FGNSSVNPI

SEQ ID NO: 52679 - protein, 11 aa, Homo sapiens
  misc_feature: Table A; Target 52679; HLA-C*12:03; NPFFR2; ENSG00000056291; TAA
FGNSSVNPIIY

SEQ ID NO: 52680 - protein, 8 aa, Homo sapiens
  misc_feature: Table A; Target 52680; HLA-B*57:01; NPFFR2; ENSG00000056291; TAA
FGTPAASW

SEQ ID NO: 52681 - protein, 8 aa, Homo sapiens
  misc_feature: Table A; Target 52681; HLA-B*58:01; NPFFR2; ENSG00000056291; TAA
FGTPAASW

SEQ ID NO: 52682 - protein, 9 aa, Homo sapiens
  misc_feature: Table A; Target 52682; HLA-A*02:04; NPFFR2; ENSG00000056291; TAA
FILSWLPLW

SEQ ID NO: 52683 - protein, 9 aa, Homo sapiens
  misc_feature: Table A; Target 52683; HLA-A*02:07; NPFFR2; ENSG00000056291; TAA
FQEAFQLQL

SEQ ID NO: 52684 - protein, 9 aa, Homo sapiens
  misc_feature: Table A; Target 52684; HLA-A*30:01; NPFFR2; ENSG00000056291; TAA
FQEAFQLQL

SEQ ID NO: 52685 - protein, 9 aa, Homo sapiens
  misc_feature: Table A; Target 52685; HLA-B*13:02; NPFFR2; ENSG00000056291; TAA
FQEAFQLQL

SEQ ID NO: 52686 - protein, 9 aa, Homo sapiens
  misc_feature: Table A; Target 52686; HLA-B*27:05; NPFFR2; ENSG00000056291; TAA
FQEAFQLQL

SEQ ID NO: 52687 - protein, 9 aa, Homo sapiens
  misc_feature: Table A; Target 52687; HLA-B*38:01; NPFFR2; ENSG00000056291; TAA
FQEAFQLQL

SEQ ID NO: 52688 - protein, 9 aa, Homo sapiens
  misc_feature: Table A; Target 52688; HLA-B*39:01; NPFFR2; ENSG00000056291; TAA
FQEAFQLQL

SEQ ID NO: 52689 - protein, 9 aa, Homo sapiens
  misc_feature: Table A; Target 52689; HLA-C*02:02; NPFFR2; ENSG00000056291; TAA
FQEAFQLQL

SEQ ID NO: 52690 - protein, 9 aa, Homo sapiens
  misc_feature: Table A; Target 52690; HLA-A*02:01; NPFFR2; ENSG00000056291; TAA
FQNPHGETL

SEQ ID NO: 52691 - protein, 9 aa, Homo sapiens
  misc_feature: Table A; Target 52691; HLA-A*02:03; NPFFR2; ENSG00000056291; TAA
FQNPHGETL

SEQ ID NO: 52692 - protein, 9 aa, Homo sapiens
  misc_feature: Table A; Target 52692; HLA-A*02:04; NPFFR2; ENSG00000056291; TAA
FQNPHGETL

SEQ ID NO: 52693 - protein, 9 aa, Homo sapiens
  misc_feature: Table A; Target 52693; HLA-A*25:01; NPFFR2; ENSG00000056291; TAA
FQNPHGETL

SEQ ID NO: 52694 - protein, 9 aa, Homo sapiens
  misc_feature: Table A; Target 52694; HLA-A*30:01; NPFFR2; ENSG00000056291; TAA
FQNPHGETL

SEQ ID NO: 52695 - protein, 9 aa, Homo sapiens
  misc_feature: Table A; Target 52695; HLA-A*32:01; NPFFR2; ENSG00000056291; TAA
FQNPHGETL

SEQ ID NO: 52696 - protein, 9 aa, Homo sapiens
  misc_feature: Table A; Target 52696; HLA-B*07:02; NPFFR2; ENSG00000056291; TAA
FQNPHGETL

SEQ ID NO: 52697 - protein, 9 aa, Homo sapiens
  misc_feature: Table A; Target 52697; HLA-B*08:01; NPFFR2; ENSG00000056291; TAA
FQNPHGETL

SEQ ID NO: 52698 - protein, 9 aa, Homo sapiens
  misc_feature: Table A; Target 52698; HLA-B*13:02; NPFFR2; ENSG00000056291; TAA
FQNPHGETL

SEQ ID NO: 52699 - protein, 9 aa, Homo sapiens
  misc_feature: Table A; Target 52699; HLA-B*15:01; NPFFR2; ENSG00000056291; TAA
FQNPHGETL

SEQ ID NO: 52700 - protein, 9 aa, Homo sapiens
  misc_feature: Table A; Target 52700; HLA-B*15:03; NPFFR2; ENSG00000056291; TAA
FQNPHGETL

SEQ ID NO: 52701 - protein, 9 aa, Homo sapiens
  misc_feature: Table A; Target 52701; HLA-B*27:05; NPFFR2; ENSG00000056291; TAA
FQNPHGETL

SEQ ID NO: 52702 - protein, 9 aa, Homo sapiens
  misc_feature: Table A; Target 52702; HLA-B*35:03; NPFFR2; ENSG00000056291; TAA
FQNPHGETL

SEQ ID NO: 52703 - protein, 9 aa, Homo sapiens
  misc_feature: Table A; Target 52703; HLA-B*37:01; NPFFR2; ENSG00000056291; TAA
FQNPHGETL

SEQ ID NO: 52704 - protein, 9 aa, Homo sapiens
  misc_feature: Table A; Target 52704; HLA-B*38:01; NPFFR2; ENSG00000056291; TAA
FQNPHGETL

SEQ ID NO: 52705 - protein, 9 aa, Homo sapiens
  misc_feature: Table A; Target 52705; HLA-B*39:01; NPFFR2; ENSG00000056291; TAA
FQNPHGETL

SEQ ID NO: 52706 - protein, 9 aa, Homo sapiens
  misc_feature: Table A; Target 52706; HLA-B*40:01; NPFFR2; ENSG00000056291; TAA
FQNPHGETL

SEQ ID NO: 52707 - protein, 9 aa, Homo sapiens
  misc_feature: Table A; Target 52707; HLA-B*40:02; NPFFR2; ENSG00000056291; TAA
FQNPHGETL

SEQ ID NO: 52708 - protein, 9 aa, Homo sapiens
  misc_feature: Table A; Target 52708; HLA-B*46:01; NPFFR2; ENSG00000056291; TAA
FQNPHGETL

SEQ ID NO: 52709 - protein, 9 aa, Homo sapiens
  misc_feature: Table A; Target 52709; HLA-B*58:01; NPFFR2; ENSG00000056291; TAA
FQNPHGETL

SEQ ID NO: 52710 - protein, 9 aa, Homo sapiens
  misc_feature: Table A; Target 52710; HLA-C*01:02; NPFFR2; ENSG00000056291; TAA
FQNPHGETL

SEQ ID NO: 52711 - protein, 9 aa, Homo sapiens
  misc_feature: Table A; Target 52711; HLA-C*02:02; NPFFR2; ENSG00000056291; TAA
FQNPHGETL

SEQ ID NO: 52712 - protein, 9 aa, Homo sapiens
  misc_feature: Table A; Target 52712; HLA-C*03:03; NPFFR2; ENSG00000056291; TAA
FQNPHGETL

SEQ ID NO: 52713 - protein, 9 aa, Homo sapiens
  misc_feature: Table A; Target 52713; HLA-C*03:04; NPFFR2; ENSG00000056291; TAA
FQNPHGETL

SEQ ID NO: 52714 - protein, 9 aa, Homo sapiens
  misc_feature: Table A; Target 52714; HLA-C*05:01; NPFFR2; ENSG00000056291; TAA
FQNPHGETL

SEQ ID NO: 52715 - protein, 9 aa, Homo sapiens
  misc_feature: Table A; Target 52715; HLA-C*07:02; NPFFR2; ENSG00000056291; TAA
FQNPHGETL

SEQ ID NO: 52716 - protein, 9 aa, Homo sapiens
  misc_feature: Table A; Target 52716; HLA-C*07:04; NPFFR2; ENSG00000056291; TAA
FQNPHGETL

SEQ ID NO: 52717 - protein, 9 aa, Homo sapiens
  misc_feature: Table A; Target 52717; HLA-C*12:03; NPFFR2; ENSG00000056291; TAA
FQNPHGETL

SEQ ID NO: 52718 - protein, 9 aa, Homo sapiens
  misc_feature: Table A; Target 52718; HLA-C*14:02; NPFFR2; ENSG00000056291; TAA
FQNPHGETL

SEQ ID NO: 52719 - protein, 9 aa, Homo sapiens
  misc_feature: Table A; Target 52719; HLA-C*16:01; NPFFR2; ENSG00000056291; TAA
FQNPHGETL

SEQ ID NO: 52720 - protein, 9 aa, Homo sapiens
  misc_feature: Table A; Target 52720; HLA-C*16:02; NPFFR2; ENSG00000056291; TAA
FQNPHGETL

SEQ ID NO: 52721 - protein, 9 aa, Homo sapiens
  misc_feature: Table A; Target 52721; HLA-C*16:04; NPFFR2; ENSG00000056291; TAA
FQNPHGETL

SEQ ID NO: 52722 - protein, 10 aa, Homo sapiens
  misc_feature: Table A; Target 52722; HLA-A*02:01; NPFFR2; ENSG00000056291; TAA
FQNPHGETLL

SEQ ID NO: 52723 - protein, 10 aa, Homo sapiens
  misc_feature: Table A; Target 52723; HLA-A*02:03; NPFFR2; ENSG00000056291; TAA
FQNPHGETLL

SEQ ID NO: 52724 - protein, 10 aa, Homo sapiens
  misc_feature: Table A; Target 52724; HLA-A*02:04; NPFFR2; ENSG00000056291; TAA
FQNPHGETLL

SEQ ID NO: 52725 - protein, 10 aa, Homo sapiens
  misc_feature: Table A; Target 52725; HLA-A*32:01; NPFFR2; ENSG00000056291; TAA
FQNPHGETLL

SEQ ID NO: 52726 - protein, 10 aa, Homo sapiens
  misc_feature: Table A; Target 52726; HLA-B*13:02; NPFFR2; ENSG00000056291; TAA
FQNPHGETLL

SEQ ID NO: 52727 - protein, 10 aa, Homo sapiens
  misc_feature: Table A; Target 52727; HLA-B*15:01; NPFFR2; ENSG00000056291; TAA
FQNPHGETLL

SEQ ID NO: 52728 - protein, 10 aa, Homo sapiens
  misc_feature: Table A; Target 52728; HLA-B*27:05; NPFFR2; ENSG00000056291; TAA
FQNPHGETLL

SEQ ID NO: 52729 - protein, 10 aa, Homo sapiens
  misc_feature: Table A; Target 52729; HLA-B*38:01; NPFFR2; ENSG00000056291; TAA
FQNPHGETLL

SEQ ID NO: 52730 - protein, 10 aa, Homo sapiens
  misc_feature: Table A; Target 52730; HLA-B*39:01; NPFFR2; ENSG00000056291; TAA
FQNPHGETLL

SEQ ID NO: 52731 - protein, 10 aa, Homo sapiens
  misc_feature: Table A; Target 52731; HLA-B*40:01; NPFFR2; ENSG00000056291; TAA
FQNPHGETLL

SEQ ID NO: 52732 - protein, 10 aa, Homo sapiens
  misc_feature: Table A; Target 52732; HLA-C*02:02; NPFFR2; ENSG00000056291; TAA
FQNPHGETLL

SEQ ID NO: 52733 - protein, 10 aa, Homo sapiens
  misc_feature: Table A; Target 52733; HLA-C*07:04; NPFFR2; ENSG00000056291; TAA
FQNPHGETLL

SEQ ID NO: 52734 - protein, 11 aa, Homo sapiens
  misc_feature: Table A; Target 52734; HLA-A*01:01; NPFFR2; ENSG00000056291; TAA
FQNPHGETLLY

SEQ ID NO: 52735 - protein, 11 aa, Homo sapiens
  misc_feature: Table A; Target 52735; HLA-A*03:01; NPFFR2; ENSG00000056291; TAA
FQNPHGETLLY

SEQ ID NO: 52736 - protein, 11 aa, Homo sapiens
  misc_feature: Table A; Target 52736; HLA-A*26:01; NPFFR2; ENSG00000056291; TAA
FQNPHGETLLY

SEQ ID NO: 52737 - protein, 11 aa, Homo sapiens
  misc_feature: Table A; Target 52737; HLA-A*29:02; NPFFR2; ENSG00000056291; TAA
FQNPHGETLLY

SEQ ID NO: 52738 - protein, 11 aa, Homo sapiens
  misc_feature: Table A; Target 52738; HLA-A*30:02; NPFFR2; ENSG00000056291; TAA
FQNPHGETLLY

SEQ ID NO: 52739 - protein, 11 aa, Homo sapiens
  misc_feature: Table A; Target 52739; HLA-A*31:01; NPFFR2; ENSG00000056291; TAA
FQNPHGETLLY

SEQ ID NO: 52740 - protein, 11 aa, Homo sapiens
  misc_feature: Table A; Target 52740; HLA-A*32:01; NPFFR2; ENSG00000056291; TAA
FQNPHGETLLY

SEQ ID NO: 52741 - protein, 11 aa, Homo sapiens
  misc_feature: Table A; Target 52741; HLA-B*15:01; NPFFR2; ENSG00000056291; TAA
FQNPHGETLLY

SEQ ID NO: 52742 - protein, 11 aa, Homo sapiens
  misc_feature: Table A; Target 52742; HLA-B*15:03; NPFFR2; ENSG00000056291; TAA
FQNPHGETLLY

SEQ ID NO: 52743 - protein, 11 aa, Homo sapiens
  misc_feature: Table A; Target 52743; HLA-B*44:03; NPFFR2; ENSG00000056291; TAA
FQNPHGETLLY

SEQ ID NO: 52744 - protein, 11 aa, Homo sapiens
  misc_feature: Table A; Target 52744; HLA-C*02:02; NPFFR2; ENSG00000056291; TAA
FQNPHGETLLY

SEQ ID NO: 52745 - protein, 11 aa, Homo sapiens
  misc_feature: Table A; Target 52745; HLA-C*12:03; NPFFR2; ENSG00000056291; TAA
FQNPHGETLLY

SEQ ID NO: 52746 - protein, 11 aa, Homo sapiens
  misc_feature: Table A; Target 52746; HLA-C*16:04; NPFFR2; ENSG00000056291; TAA
FQNPHGETLLY

SEQ ID NO: 52747 - protein, 10 aa, Homo sapiens
  misc_feature: Table A; Target 52747; HLA-B*27:02; NPFFR2; ENSG00000056291; TAA
FTLVAIAVDR

SEQ ID NO: 52748 - protein, 8 aa, Homo sapiens
  misc_feature: Table A; Target 52748; HLA-C*14:02; NPFFR2; ENSG00000056291; TAA
GFQEAFQL

SEQ ID NO: 52749 - protein, 9 aa, Homo sapiens
  misc_feature: Table A; Target 52749; HLA-C*01:02; NPFFR2; ENSG00000056291; TAA
GGPAWSGSL

SEQ ID NO: 52750 - protein, 9 aa, Homo sapiens
  misc_feature: Table A; Target 52750; HLA-B*15:01; NPFFR2; ENSG00000056291; TAA
GISVAASVF

SEQ ID NO: 52751 - protein, 9 aa, Homo sapiens
  misc_feature: Table A; Target 52751; HLA-B*15:03; NPFFR2; ENSG00000056291; TAA
GISVAASVF

SEQ ID NO: 52752 - protein, 8 aa, Homo sapiens
  misc_feature: Table A; Target 52752; HLA-B*13:02; NPFFR2; ENSG00000056291; TAA
GLVQGISV

SEQ ID NO: 52753 - protein, 9 aa, Homo sapiens
  misc_feature: Table A; Target 52753; HLA-A*02:01; NPFFR2; ENSG00000056291; TAA
GLVQGISVA

SEQ ID NO: 52754 - protein, 9 aa, Homo sapiens
  misc_feature: Table A; Target 52754; HLA-A*02:03; NPFFR2; ENSG00000056291; TAA
GLVQGISVA

SEQ ID NO: 52755 - protein, 9 aa, Homo sapiens
  misc_feature: Table A; Target 52755; HLA-B*15:01; NPFFR2; ENSG00000056291; TAA
GLVQGISVA

SEQ ID NO: 52756 - protein, 9 aa, Homo sapiens
  misc_feature: Table A; Target 52756; HLA-B*55:01; NPFFR2; ENSG00000056291; TAA
GLVQGISVA

SEQ ID NO: 52757 - protein, 10 aa, Homo sapiens
  misc_feature: Table A; Target 52757; HLA-B*56:01; NPFFR2; ENSG00000056291; TAA
GLVQGISVAA

SEQ ID NO: 52758 - protein, 9 aa, Homo sapiens
  misc_feature: Table A; Target 52758; HLA-B*13:02; NPFFR2; ENSG00000056291; TAA
GNSSVNPII

SEQ ID NO: 52759 - protein, 10 aa, Homo sapiens
  misc_feature: Table A; Target 52759; HLA-A*29:02; NPFFR2; ENSG00000056291; TAA
GNSSVNPIIY

SEQ ID NO: 52760 - protein, 10 aa, Homo sapiens
  misc_feature: Table A; Target 52760; HLA-A*30:02; NPFFR2; ENSG00000056291; TAA
GNSSVNPIIY

SEQ ID NO: 52761 - protein, 8 aa, Homo sapiens
  misc_feature: Table A; Target 52761; HLA-B*07:02; NPFFR2; ENSG00000056291; TAA
GPAWSGSL

SEQ ID NO: 52762 - protein, 9 aa, Homo sapiens
  misc_feature: Table A; Target 52762; HLA-B*27:05; NPFFR2; ENSG00000056291; TAA
GRIGISLFR

SEQ ID NO: 52763 - protein, 9 aa, Homo sapiens
  misc_feature: Table A; Target 52763; HLA-B*38:01; NPFFR2; ENSG00000056291; TAA
HHLYSDINI

SEQ ID NO: 52764 - protein, 10 aa, Homo sapiens
  misc_feature: Table A; Target 52764; HLA-A*01:01; NPFFR2; ENSG00000056291; TAA
HLYSDINITY

SEQ ID NO: 52765 - protein, 10 aa, Homo sapiens
  misc_feature: Table A; Target 52765; HLA-A*03:01; NPFFR2; ENSG00000056291; TAA
HLYSDINITY

SEQ ID NO: 52766 - protein, 10 aa, Homo sapiens
  misc_feature: Table A; Target 52766; HLA-A*25:01; NPFFR2; ENSG00000056291; TAA
HLYSDINITY

SEQ ID NO: 52767 - protein, 10 aa, Homo sapiens
  misc_feature: Table A; Target 52767; HLA-A*26:01; NPFFR2; ENSG00000056291; TAA
HLYSDINITY

SEQ ID NO: 52768 - protein, 10 aa, Homo sapiens
  misc_feature: Table A; Target 52768; HLA-A*29:02; NPFFR2; ENSG00000056291; TAA
HLYSDINITY

SEQ ID NO: 52769 - protein, 10 aa, Homo sapiens
  misc_feature: Table A; Target 52769; HLA-A*30:02; NPFFR2; ENSG00000056291; TAA
HLYSDINITY

SEQ ID NO: 52770 - protein, 10 aa, Homo sapiens
  misc_feature: Table A; Target 52770; HLA-A*32:01; NPFFR2; ENSG00000056291; TAA
HLYSDINITY

SEQ ID NO: 52771 - protein, 10 aa, Homo sapiens
  misc_feature: Table A; Target 52771; HLA-B*15:01; NPFFR2; ENSG00000056291; TAA
HLYSDINITY

SEQ ID NO: 52772 - protein, 10 aa, Homo sapiens
  misc_feature: Table A; Target 52772; HLA-B*15:03; NPFFR2; ENSG00000056291; TAA
HLYSDINITY

SEQ ID NO: 52773 - protein, 10 aa, Homo sapiens
  misc_feature: Table A; Target 52773; HLA-B*35:01; NPFFR2; ENSG00000056291; TAA
HLYSDINITY

SEQ ID NO: 52774 - protein, 10 aa, Homo sapiens
  misc_feature: Table A; Target 52774; HLA-B*46:01; NPFFR2; ENSG00000056291; TAA
HLYSDINITY

SEQ ID NO: 52775 - protein, 10 aa, Homo sapiens
  misc_feature: Table A; Target 52775; HLA-C*02:02; NPFFR2; ENSG00000056291; TAA
HLYSDINITY

SEQ ID NO: 52776 - protein, 10 aa, Homo sapiens
  misc_feature: Table A; Target 52776; HLA-C*07:04; NPFFR2; ENSG00000056291; TAA
HLYSDINITY

SEQ ID NO: 52777 - protein, 11 aa, Homo sapiens
  misc_feature: Table A; Target 52777; HLA-A*02:01; NPFFR2; ENSG00000056291; TAA
HLYSDINITYV

SEQ ID NO: 52778 - protein, 11 aa, Homo sapiens
  misc_feature: Table A; Target 52778; HLA-A*02:03; NPFFR2; ENSG00000056291; TAA
HLYSDINITYV

SEQ ID NO: 52779 - protein, 11 aa, Homo sapiens
  misc_feature: Table A; Target 52779; HLA-A*02:04; NPFFR2; ENSG00000056291; TAA
HLYSDINITYV

SEQ ID NO: 52780 - protein, 11 aa, Homo sapiens
  misc_feature: Table A; Target 52780; HLA-A*02:07; NPFFR2; ENSG00000056291; TAA
HLYSDINITYV

SEQ ID NO: 52781 - protein, 8 aa, Homo sapiens
  misc_feature: Table A; Target 52781; HLA-B*08:01; NPFFR2; ENSG00000056291; TAA
HMHTVTNL

SEQ ID NO: 52782 - protein, 9 aa, Homo sapiens
  misc_feature: Table A; Target 52782; HLA-A*23:01; NPFFR2; ENSG00000056291; TAA
HMHTVTNLF

SEQ ID NO: 52783 - protein, 9 aa, Homo sapiens
  misc_feature: Table A; Target 52783; HLA-A*24:02; NPFFR2; ENSG00000056291; TAA
HMHTVTNLF

SEQ ID NO: 52784 - protein, 8 aa, Homo sapiens
  misc_feature: Table A; Target 52784; HLA-B*13:02; NPFFR2; ENSG00000056291; TAA
HQPQVAAI

SEQ ID NO: 52785 - protein, 8 aa, Homo sapiens
  misc_feature: Table A; Target 52785; HLA-B*51:01; NPFFR2; ENSG00000056291; TAA
HQPQVAAI

SEQ ID NO: 52786 - protein, 9 aa, Homo sapiens
  misc_feature: Table A; Target 52786; HLA-A*24:02; NPFFR2; ENSG00000056291; TAA
HQPQVAAIF

SEQ ID NO: 52787 - protein, 10 aa, Homo sapiens
  misc_feature: Table A; Target 52787; HLA-B*13:02; NPFFR2; ENSG00000056291; TAA
HQPQVAAIFI

SEQ ID NO: 52788 - protein, 9 aa, Homo sapiens
  misc_feature: Table A; Target 52788; HLA-A*68:02; NPFFR2; ENSG00000056291; TAA
HTVTNLFIL

SEQ ID NO: 52789 - protein, 9 aa, Homo sapiens
  misc_feature: Table A; Target 52789; HLA-A*11:01; NPFFR2; ENSG00000056291; TAA
HVQEEKYYR

SEQ ID NO: 52790 - protein, 9 aa, Homo sapiens
  misc_feature: Table A; Target 52790; HLA-A*31:01; NPFFR2; ENSG00000056291; TAA
HVQEEKYYR

SEQ ID NO: 52791 - protein, 9 aa, Homo sapiens
  misc_feature: Table A; Target 52791; HLA-A*33:01; NPFFR2; ENSG00000056291; TAA
HVQEEKYYR

SEQ ID NO: 52792 - protein, 9 aa, Homo sapiens
  misc_feature: Table A; Target 52792; HLA-A*33:03; NPFFR2; ENSG00000056291; TAA
HVQEEKYYR

SEQ ID NO: 52793 - protein, 9 aa, Homo sapiens
  misc_feature: Table A; Target 52793; HLA-A*68:01; NPFFR2; ENSG00000056291; TAA
HVQEEKYYR

SEQ ID NO: 52794 - protein, 9 aa, Homo sapiens
  misc_feature: Table A; Target 52794; HLA-C*07:06; NPFFR2; ENSG00000056291; TAA
HVQEEKYYR

SEQ ID NO: 52795 - protein, 9 aa, Homo sapiens
  misc_feature: Table A; Target 52795; HLA-B*51:01; NPFFR2; ENSG00000056291; TAA
IAVDRFQCV

SEQ ID NO: 52796 - protein, 9 aa, Homo sapiens
  misc_feature: Table A; Target 52796; HLA-B*54:01; NPFFR2; ENSG00000056291; TAA
IAVDRFQCV

SEQ ID NO: 52797 - protein, 9 aa, Homo sapiens
  misc_feature: Table A; Target 52797; HLA-C*02:02; NPFFR2; ENSG00000056291; TAA
IAVDRFQCV

SEQ ID NO: 52798 - protein, 9 aa, Homo sapiens
  misc_feature: Table A; Target 52798; HLA-C*03:04; NPFFR2; ENSG00000056291; TAA
IAVDRFQCV

SEQ ID NO: 52799 - protein, 9 aa, Homo sapiens
  misc_feature: Table A; Target 52799; HLA-C*12:03; NPFFR2; ENSG00000056291; TAA
IAVDRFQCV

SEQ ID NO: 52800 - protein, 9 aa, Homo sapiens
  misc_feature: Table A; Target 52800; HLA-C*16:01; NPFFR2; ENSG00000056291; TAA
IAVDRFQCV

SEQ ID NO: 52801 - protein, 9 aa, Homo sapiens
  misc_feature: Table A; Target 52801; HLA-C*16:02; NPFFR2; ENSG00000056291; TAA
IAVDRFQCV

SEQ ID NO: 52802 - protein, 9 aa, Homo sapiens
  misc_feature: Table A; Target 52802; HLA-A*24:02; NPFFR2; ENSG00000056291; TAA
IFIISYFLI

SEQ ID NO: 52803 - protein, 9 aa, Homo sapiens
  misc_feature: Table A; Target 52803; HLA-B*54:01; NPFFR2; ENSG00000056291; TAA
IGISLFRAA

SEQ ID NO: 52804 - protein, 9 aa, Homo sapiens
  misc_feature: Table A; Target 52804; HLA-A*02:04; NPFFR2; ENSG00000056291; TAA
ILNLAISDL

SEQ ID NO: 52805 - protein, 9 aa, Homo sapiens
  misc_feature: Table A; Target 52805; HLA-C*01:02; NPFFR2; ENSG00000056291; TAA
ILNLAISDL

SEQ ID NO: 52806 - protein, 9 aa, Homo sapiens
  misc_feature: Table A; Target 52806; HLA-C*14:02; NPFFR2; ENSG00000056291; TAA
ILNLAISDL

SEQ ID NO: 52807 - protein, 10 aa, Homo sapiens
  misc_feature: Table A; Target 52807; HLA-A*02:04; NPFFR2; ENSG00000056291; TAA
ILSWLPLWTL

SEQ ID NO: 52808 - protein, 8 aa, Homo sapiens
  misc_feature: Table A; Target 52808; HLA-B*46:01; NPFFR2; ENSG00000056291; TAA
IMSPSAVM

SEQ ID NO: 52809 - protein, 8 aa, Homo sapiens
  misc_feature: Table A; Target 52809; HLA-C*05:01; NPFFR2; ENSG00000056291; TAA
IMSPSAVM

SEQ ID NO: 52810 - protein, 8 aa, Homo sapiens
  misc_feature: Table A; Target 52810; HLA-C*14:02; NPFFR2; ENSG00000056291; TAA
IMSPSAVM

SEQ ID NO: 52811 - protein, 9 aa, Homo sapiens
  misc_feature: Table A; Target 52811; HLA-A*02:01; NPFFR2; ENSG00000056291; TAA
IMSPSAVML

SEQ ID NO: 52812 - protein, 9 aa, Homo sapiens
  misc_feature: Table A; Target 52812; HLA-A*02:04; NPFFR2; ENSG00000056291; TAA
IMSPSAVML

SEQ ID NO: 52813 - protein, 9 aa, Homo sapiens
  misc_feature: Table A; Target 52813; HLA-A*02:07; NPFFR2; ENSG00000056291; TAA
IMSPSAVML

SEQ ID NO: 52814 - protein, 9 aa, Homo sapiens
  misc_feature: Table A; Target 52814; HLA-A*23:01; NPFFR2; ENSG00000056291; TAA
IMSPSAVML

SEQ ID NO: 52815 - protein, 9 aa, Homo sapiens
  misc_feature: Table A; Target 52815; HLA-A*24:02; NPFFR2; ENSG00000056291; TAA
IMSPSAVML

SEQ ID NO: 52816 - protein, 9 aa, Homo sapiens
  misc_feature: Table A; Target 52816; HLA-A*32:01; NPFFR2; ENSG00000056291; TAA
IMSPSAVML

SEQ ID NO: 52817 - protein, 9 aa, Homo sapiens
  misc_feature: Table A; Target 52817; HLA-B*13:02; NPFFR2; ENSG00000056291; TAA
IMSPSAVML

SEQ ID NO: 52818 - protein, 9 aa, Homo sapiens
  misc_feature: Table A; Target 52818; HLA-B*15:01; NPFFR2; ENSG00000056291; TAA
IMSPSAVML

SEQ ID NO: 52819 - protein, 9 aa, Homo sapiens
  misc_feature: Table A; Target 52819; HLA-B*38:01; NPFFR2; ENSG00000056291; TAA
IMSPSAVML

SEQ ID NO: 52820 - protein, 9 aa, Homo sapiens
  misc_feature: Table A; Target 52820; HLA-B*39:01; NPFFR2; ENSG00000056291; TAA
IMSPSAVML

SEQ ID NO: 52821 - protein, 9 aa, Homo sapiens
  misc_feature: Table A; Target 52821; HLA-B*55:01; NPFFR2; ENSG00000056291; TAA
IMSPSAVML

SEQ ID NO: 52822 - protein, 9 aa, Homo sapiens
  misc_feature: Table A; Target 52822; HLA-C*01:02; NPFFR2; ENSG00000056291; TAA
IMSPSAVML

SEQ ID NO: 52823 - protein, 9 aa, Homo sapiens
  misc_feature: Table A; Target 52823; HLA-C*02:02; NPFFR2; ENSG00000056291; TAA
IMSPSAVML

SEQ ID NO: 52824 - protein, 9 aa, Homo sapiens
  misc_feature: Table A; Target 52824; HLA-C*03:03; NPFFR2; ENSG00000056291; TAA
IMSPSAVML

SEQ ID NO: 52825 - protein, 9 aa, Homo sapiens
  misc_feature: Table A; Target 52825; HLA-C*03:04; NPFFR2; ENSG00000056291; TAA
IMSPSAVML

SEQ ID NO: 52826 - protein, 9 aa, Homo sapiens
  misc_feature: Table A; Target 52826; HLA-C*04:01; NPFFR2; ENSG00000056291; TAA
IMSPSAVML

SEQ ID NO: 52827 - protein, 9 aa, Homo sapiens
  misc_feature: Table A; Target 52827; HLA-C*07:04; NPFFR2; ENSG00000056291; TAA
IMSPSAVML

SEQ ID NO: 52828 - protein, 9 aa, Homo sapiens
  misc_feature: Table A; Target 52828; HLA-C*14:02; NPFFR2; ENSG00000056291; TAA
IMSPSAVML

SEQ ID NO: 52829 - protein, 9 aa, Homo sapiens
  misc_feature: Table A; Target 52829; HLA-C*16:02; NPFFR2; ENSG00000056291; TAA
IMSPSAVML

SEQ ID NO: 52830 - protein, 10 aa, Homo sapiens
  misc_feature: Table A; Target 52830; HLA-A*02:03; NPFFR2; ENSG00000056291; TAA
IMYGRIGISL

SEQ ID NO: 52831 - protein, 9 aa, Homo sapiens
  misc_feature: Table A; Target 52831; HLA-A*29:02; NPFFR2; ENSG00000056291; TAA
INITYVNYY

SEQ ID NO: 52832 - protein, 8 aa, Homo sapiens
  misc_feature: Table A; Target 52832; HLA-C*05:01; NPFFR2; ENSG00000056291; TAA
ISDLLVGI

SEQ ID NO: 52833 - protein, 9 aa, Homo sapiens
  misc_feature: Table A; Target 52833; HLA-A*01:01; NPFFR2; ENSG00000056291; TAA
ISDLLVGIF

SEQ ID NO: 52834 - protein, 9 aa, Homo sapiens
  misc_feature: Table A; Target 52834; HLA-C*04:01; NPFFR2; ENSG00000056291; TAA
ISDLLVGIF

SEQ ID NO: 52835 - protein, 9 aa, Homo sapiens
  misc_feature: Table A; Target 52835; HLA-C*05:01; NPFFR2; ENSG00000056291; TAA
ISDLLVGIF

SEQ ID NO: 52836 - protein, 8 aa, Homo sapiens
  misc_feature: Table A; Target 52836; HLA-B*15:01; NPFFR2; ENSG00000056291; TAA
ISVAASVF

SEQ ID NO: 52837 - protein, 8 aa, Homo sapiens
  misc_feature: Table A; Target 52837; HLA-B*15:03; NPFFR2; ENSG00000056291; TAA
ISVAASVF

SEQ ID NO: 52838 - protein, 8 aa, Homo sapiens
  misc_feature: Table A; Target 52838; HLA-B*18:01; NPFFR2; ENSG00000056291; TAA
ISVAASVF

SEQ ID NO: 52839 - protein, 8 aa, Homo sapiens
  misc_feature: Table A; Target 52839; HLA-B*46:01; NPFFR2; ENSG00000056291; TAA
ISVAASVF

SEQ ID NO: 52840 - protein, 8 aa, Homo sapiens
  misc_feature: Table A; Target 52840; HLA-B*58:01; NPFFR2; ENSG00000056291; TAA
ISVAASVF

SEQ ID NO: 52841 - protein, 8 aa, Homo sapiens
  misc_feature: Table A; Target 52841; HLA-C*02:02; NPFFR2; ENSG00000056291; TAA
ISVAASVF

SEQ ID NO: 52842 - protein, 8 aa, Homo sapiens
  misc_feature: Table A; Target 52842; HLA-C*03:04; NPFFR2; ENSG00000056291; TAA
ISVAASVF

SEQ ID NO: 52843 - protein, 8 aa, Homo sapiens
  misc_feature: Table A; Target 52843; HLA-C*14:02; NPFFR2; ENSG00000056291; TAA
ISVAASVF

SEQ ID NO: 52844 - protein, 9 aa, Homo sapiens
  misc_feature: Table A; Target 52844; HLA-A*02:03; NPFFR2; ENSG00000056291; TAA
ITIMSPSAV

SEQ ID NO: 52845 - protein, 9 aa, Homo sapiens
  misc_feature: Table A; Target 52845; HLA-A*26:01; NPFFR2; ENSG00000056291; TAA
ITIMSPSAV

SEQ ID NO: 52846 - protein, 9 aa, Homo sapiens
  misc_feature: Table A; Target 52846; HLA-A*68:02; NPFFR2; ENSG00000056291; TAA
ITIMSPSAV

SEQ ID NO: 52847 - protein, 9 aa, Homo sapiens
  misc_feature: Table A; Target 52847; HLA-C*03:03; NPFFR2; ENSG00000056291; TAA
ITIMSPSAV

SEQ ID NO: 52848 - protein, 9 aa, Homo sapiens
  misc_feature: Table A; Target 52848; HLA-C*03:04; NPFFR2; ENSG00000056291; TAA
ITIMSPSAV

SEQ ID NO: 52849 - protein, 11 aa, Homo sapiens
  misc_feature: Table A; Target 52849; HLA-B*57:01; NPFFR2; ENSG00000056291; TAA
ITLLDNIIAGW

SEQ ID NO: 52850 - protein, 9 aa, Homo sapiens
  misc_feature: Table A; Target 52850; HLA-A*23:01; NPFFR2; ENSG00000056291; TAA
IYGFFNENF

SEQ ID NO: 52851 - protein, 9 aa, Homo sapiens
  misc_feature: Table A; Target 52851; HLA-A*24:02; NPFFR2; ENSG00000056291; TAA
IYGFFNENF

SEQ ID NO: 52852 - protein, 9 aa, Homo sapiens
  misc_feature: Table A; Target 52852; HLA-A*29:02; NPFFR2; ENSG00000056291; TAA
IYGFFNENF

SEQ ID NO: 52853 - protein, 9 aa, Homo sapiens
  misc_feature: Table A; Target 52853; HLA-A*24:02; NPFFR2; ENSG00000056291; TAA
IYIYPFAHW

SEQ ID NO: 52854 - protein, 8 aa, Homo sapiens
  misc_feature: Table A; Target 52854; HLA-A*23:01; NPFFR2; ENSG00000056291; TAA
IYLAPLSL

SEQ ID NO: 52855 - protein, 8 aa, Homo sapiens
  misc_feature: Table A; Target 52855; HLA-A*24:02; NPFFR2; ENSG00000056291; TAA
IYLAPLSL

SEQ ID NO: 52856 - protein, 8 aa, Homo sapiens
  misc_feature: Table A; Target 52856; HLA-C*14:02; NPFFR2; ENSG00000056291; TAA
IYLAPLSL

SEQ ID NO: 52857 - protein, 9 aa, Homo sapiens
  misc_feature: Table A; Target 52857; HLA-A*23:01; NPFFR2; ENSG00000056291; TAA
IYLAPLSLI

SEQ ID NO: 52858 - protein, 9 aa, Homo sapiens
  misc_feature: Table A; Target 52858; HLA-A*24:02; NPFFR2; ENSG00000056291; TAA
IYLAPLSLI

SEQ ID NO: 52859 - protein, 10 aa, Homo sapiens
  misc_feature: Table A; Target 52859; HLA-A*24:02; NPFFR2; ENSG00000056291; TAA
IYPFAHWLAF

SEQ ID NO: 52860 - protein, 10 aa, Homo sapiens
  misc_feature: Table A; Target 52860; HLA-A*23:01; NPFFR2; ENSG00000056291; TAA
IYTTVLFANI

SEQ ID NO: 52861 - protein, 10 aa, Homo sapiens
  misc_feature: Table A; Target 52861; HLA-A*24:02; NPFFR2; ENSG00000056291; TAA
IYTTVLFANI

SEQ ID NO: 52862 - protein, 8 aa, Homo sapiens
  misc_feature: Table A; Target 52862; HLA-B*08:01; NPFFR2; ENSG00000056291; TAA
KAKSHVLI

SEQ ID NO: 52863 - protein, 9 aa, Homo sapiens
  misc_feature: Table A; Target 52863; HLA-A*30:01; NPFFR2; ENSG00000056291; TAA
KETTNSSEI

SEQ ID NO: 52864 - protein, 9 aa, Homo sapiens
  misc_feature: Table A; Target 52864; HLA-B*13:02; NPFFR2; ENSG00000056291; TAA
KETTNSSEI

SEQ ID NO: 52865 - protein, 9 aa, Homo sapiens
  misc_feature: Table A; Target 52865; HLA-B*37:01; NPFFR2; ENSG00000056291; TAA
KETTNSSEI

SEQ ID NO: 52866 - protein, 9 aa, Homo sapiens
  misc_feature: Table A; Target 52866; HLA-B*38:01; NPFFR2; ENSG00000056291; TAA
KETTNSSEI

SEQ ID NO: 52867 - protein, 9 aa, Homo sapiens
  misc_feature: Table A; Target 52867; HLA-B*40:01; NPFFR2; ENSG00000056291; TAA
KETTNSSEI

SEQ ID NO: 52868 - protein, 9 aa, Homo sapiens
  misc_feature: Table A; Target 52868; HLA-B*40:02; NPFFR2; ENSG00000056291; TAA
KETTNSSEI

SEQ ID NO: 52869 - protein, 9 aa, Homo sapiens
  misc_feature: Table A; Target 52869; HLA-B*44:02; NPFFR2; ENSG00000056291; TAA
KETTNSSEI

SEQ ID NO: 52870 - protein, 9 aa, Homo sapiens
  misc_feature: Table A; Target 52870; HLA-B*44:03; NPFFR2; ENSG00000056291; TAA
KETTNSSEI

SEQ ID NO: 52871 - protein, 9 aa, Homo sapiens
  misc_feature: Table A; Target 52871; HLA-B*49:01; NPFFR2; ENSG00000056291; TAA
KETTNSSEI

SEQ ID NO: 52872 - protein, 9 aa, Homo sapiens
  misc_feature: Table A; Target 52872; HLA-B*58:01; NPFFR2; ENSG00000056291; TAA
KETTNSSEI

SEQ ID NO: 52873 - protein, 9 aa, Homo sapiens
  misc_feature: Table A; Target 52873; HLA-C*06:02; NPFFR2; ENSG00000056291; TAA
KETTNSSEI

SEQ ID NO: 52874 - protein, 9 aa, Homo sapiens
  misc_feature: Table A; Target 52874; HLA-C*16:02; NPFFR2; ENSG00000056291; TAA
KETTNSSEI

SEQ ID NO: 52875 - protein, 9 aa, Homo sapiens
  misc_feature: Table A; Target 52875; HLA-C*16:04; NPFFR2; ENSG00000056291; TAA
KETTNSSEI

SEQ ID NO: 52876 - protein, 9 aa, Homo sapiens
  misc_feature: Table A; Target 52876; HLA-B*38:01; NPFFR2; ENSG00000056291; TAA
KHMHTVTNL

SEQ ID NO: 52877 - protein, 9 aa, Homo sapiens
  misc_feature: Table A; Target 52877; HLA-A*02:03; NPFFR2; ENSG00000056291; TAA
KISGLVQGI

SEQ ID NO: 52878 - protein, 9 aa, Homo sapiens
  misc_feature: Table A; Target 52878; HLA-A*32:01; NPFFR2; ENSG00000056291; TAA
KISGLVQGI

SEQ ID NO: 52879 - protein, 9 aa, Homo sapiens
  misc_feature: Table A; Target 52879; HLA-B*13:02; NPFFR2; ENSG00000056291; TAA
KISGLVQGI

SEQ ID NO: 52880 - protein, 9 aa, Homo sapiens
  misc_feature: Table A; Target 52880; HLA-B*58:01; NPFFR2; ENSG00000056291; TAA
KISGLVQGI

SEQ ID NO: 52881 - protein, 9 aa, Homo sapiens
  misc_feature: Table A; Target 52881; HLA-C*06:02; NPFFR2; ENSG00000056291; TAA
KISGLVQGI

SEQ ID NO: 52882 - protein, 8 aa, Homo sapiens
  misc_feature: Table A; Target 52882; HLA-B*57:01; NPFFR2; ENSG00000056291; TAA
KIYTTVLF

SEQ ID NO: 52883 - protein, 9 aa, Homo sapiens
  misc_feature: Table A; Target 52883; HLA-A*02:01; NPFFR2; ENSG00000056291; TAA
KIYTTVLFA

SEQ ID NO: 52884 - protein, 9 aa, Homo sapiens
  misc_feature: Table A; Target 52884; HLA-A*02:03; NPFFR2; ENSG00000056291; TAA
KIYTTVLFA

SEQ ID NO: 52885 - protein, 9 aa, Homo sapiens
  misc_feature: Table A; Target 52885; HLA-A*02:04; NPFFR2; ENSG00000056291; TAA
KMLLIVALL

SEQ ID NO: 52886 - protein, 9 aa, Homo sapiens
  misc_feature: Table A; Target 52886; HLA-B*55:01; NPFFR2; ENSG00000056291; TAA
KPKLTIKTA

SEQ ID NO: 52887 - protein, 9 aa, Homo sapiens
  misc_feature: Table A; Target 52887; HLA-B*56:01; NPFFR2; ENSG00000056291; TAA
KPKLTIKTA

SEQ ID NO: 52888 - protein, 10 aa, Homo sapiens
  misc_feature: Table A; Target 52888; HLA-B*07:02; NPFFR2; ENSG00000056291; TAA
KPKLTIKTAF

SEQ ID NO: 52889 - protein, 10 aa, Homo sapiens
  misc_feature: Table A; Target 52889; HLA-C*07:02; NPFFR2; ENSG00000056291; TAA
KPKLTIKTAF

SEQ ID NO: 52890 - protein, 8 aa, Homo sapiens
  misc_feature: Table A; Target 52890; HLA-B*07:02; NPFFR2; ENSG00000056291; TAA
KPMEAYAL

SEQ ID NO: 52891 - protein, 8 aa, Homo sapiens
  misc_feature: Table A; Target 52891; HLA-B*08:01; NPFFR2; ENSG00000056291; TAA
KPMEAYAL

SEQ ID NO: 52892 - protein, 8 aa, Homo sapiens
  misc_feature: Table A; Target 52892; HLA-B*35:01; NPFFR2; ENSG00000056291; TAA
KPMEAYAL

SEQ ID NO: 52893 - protein, 8 aa, Homo sapiens
  misc_feature: Table A; Target 52893; HLA-B*35:03; NPFFR2; ENSG00000056291; TAA
KPMEAYAL

SEQ ID NO: 52894 - protein, 8 aa, Homo sapiens
  misc_feature: Table A; Target 52894; HLA-B*37:01; NPFFR2; ENSG00000056291; TAA
KPMEAYAL

SEQ ID NO: 52895 - protein, 8 aa, Homo sapiens
  misc_feature: Table A; Target 52895; HLA-B*55:01; NPFFR2; ENSG00000056291; TAA
KPMEAYAL

SEQ ID NO: 52896 - protein, 8 aa, Homo sapiens
  misc_feature: Table A; Target 52896; HLA-B*56:01; NPFFR2; ENSG00000056291; TAA
KPMEAYAL

SEQ ID NO: 52897 - protein, 8 aa, Homo sapiens
  misc_feature: Table A; Target 52897; HLA-C*07:02; NPFFR2; ENSG00000056291; TAA
KPMEAYAL

SEQ ID NO: 52898 - protein, 8 aa, Homo sapiens
  misc_feature: Table A; Target 52898; HLA-C*16:01; NPFFR2; ENSG00000056291; TAA
KPMEAYAL

SEQ ID NO: 52899 - protein, 9 aa, Homo sapiens
  misc_feature: Table A; Target 52899; HLA-A*03:02; NPFFR2; ENSG00000056291; TAA
KPMEAYALK

SEQ ID NO: 52900 - protein, 9 aa, Homo sapiens
  misc_feature: Table A; Target 52900; HLA-A*11:01; NPFFR2; ENSG00000056291; TAA
KPMEAYALK

SEQ ID NO: 52901 - protein, 9 aa, Homo sapiens
  misc_feature: Table A; Target 52901; HLA-B*27:02; NPFFR2; ENSG00000056291; TAA
KPMEAYALK

SEQ ID NO: 52902 - protein, 10 aa, Homo sapiens
  misc_feature: Table A; Target 52902; HLA-B*54:01; NPFFR2; ENSG00000056291; TAA
KPMEAYALKA

SEQ ID NO: 52903 - protein, 10 aa, Homo sapiens
  misc_feature: Table A; Target 52903; HLA-B*55:01; NPFFR2; ENSG00000056291; TAA
KPMEAYALKA

SEQ ID NO: 52904 - protein, 10 aa, Homo sapiens
  misc_feature: Table A; Target 52904; HLA-B*56:01; NPFFR2; ENSG00000056291; TAA
KPMEAYALKA

SEQ ID NO: 52905 - protein, 11 aa, Homo sapiens
  misc_feature: Table A; Target 52905; HLA-B*07:02; NPFFR2; ENSG00000056291; TAA
KPQQELVMEEL

SEQ ID NO: 52906 - protein, 11 aa, Homo sapiens
  misc_feature: Table A; Target 52906; HLA-C*07:02; NPFFR2; ENSG00000056291; TAA
KPQQELVMEEL

SEQ ID NO: 52907 - protein, 9 aa, Homo sapiens
  misc_feature: Table A; Target 52907; HLA-C*16:04; NPFFR2; ENSG00000056291; TAA
KRAKPMEAY

SEQ ID NO: 52908 - protein, 10 aa, Homo sapiens
  misc_feature: Table A; Target 52908; HLA-B*58:01; NPFFR2; ENSG00000056291; TAA
KSAEKPQQEL

SEQ ID NO: 52909 - protein, 9 aa, Homo sapiens
  misc_feature: Table A; Target 52909; HLA-B*58:01; NPFFR2; ENSG00000056291; TAA
KSHVLINTS

SEQ ID NO: 52910 - protein, 9 aa, Homo sapiens
  misc_feature: Table A; Target 52910; HLA-A*68:02; NPFFR2; ENSG00000056291; TAA
KTAFVIIMI

SEQ ID NO: 52911 - protein, 9 aa, Homo sapiens
  misc_feature: Table A; Target 52911; HLA-A*31:01; NPFFR2; ENSG00000056291; TAA
KTSPVYWCR

SEQ ID NO: 52912 - protein, 9 aa, Homo sapiens
  misc_feature: Table A; Target 52912; HLA-B*57:01; NPFFR2; ENSG00000056291; TAA
KTSPVYWCR

SEQ ID NO: 52913 - protein, 8 aa, Homo sapiens
  misc_feature: Table A; Target 52913; HLA-C*12:03; NPFFR2; ENSG00000056291; TAA
LAFGNSSV

SEQ ID NO: 52914 - protein, 9 aa, Homo sapiens
  misc_feature: Table A; Target 52914; HLA-C*12:03; NPFFR2; ENSG00000056291; TAA
LAFGNSSVN

SEQ ID NO: 52915 - protein, 10 aa, Homo sapiens
  misc_feature: Table A; Target 52915; HLA-B*54:01; NPFFR2; ENSG00000056291; TAA
LAITIMSPSA

SEQ ID NO: 52916 - protein, 8 aa, Homo sapiens
  misc_feature: Table A; Target 52916; HLA-B*51:01; NPFFR2; ENSG00000056291; TAA
LAPLSLIV

SEQ ID NO: 52917 - protein, 9 aa, Homo sapiens
  misc_feature: Table A; Target 52917; HLA-B*51:01; NPFFR2; ENSG00000056291; TAA
LAPLSLIVI

SEQ ID NO: 52918 - protein, 9 aa, Homo sapiens
  misc_feature: Table A; Target 52918; HLA-B*49:01; NPFFR2; ENSG00000056291; TAA
LESDVSSAP

SEQ ID NO: 52919 - protein, 9 aa, Homo sapiens
  misc_feature: Table A; Target 52919; HLA-A*03:01; NPFFR2; ENSG00000056291; TAA
LGLSRQTAK

SEQ ID NO: 52920 - protein, 9 aa, Homo sapiens
  misc_feature: Table A; Target 52920; HLA-A*11:01; NPFFR2; ENSG00000056291; TAA
LGLSRQTAK

SEQ ID NO: 52921 - protein, 9 aa, Homo sapiens
  misc_feature: Table A; Target 52921; HLA-B*38:01; NPFFR2; ENSG00000056291; TAA
LHQPQVAAI

SEQ ID NO: 52922 - protein, 9 aa, Homo sapiens
  misc_feature: Table A; Target 52922; HLA-B*39:01; NPFFR2; ENSG00000056291; TAA
LHQPQVAAI

SEQ ID NO: 52923 - protein, 9 aa, Homo sapiens
  misc_feature: Table A; Target 52923; HLA-C*07:04; NPFFR2; ENSG00000056291; TAA
LHQPQVAAI

SEQ ID NO: 52924 - protein, 8 aa, Homo sapiens
  misc_feature: Table A; Target 52924; HLA-C*01:02; NPFFR2; ENSG00000056291; TAA
LINTSNQL

SEQ ID NO: 52925 - protein, 8 aa, Homo sapiens
  misc_feature: Table A; Target 52925; HLA-C*05:01; NPFFR2; ENSG00000056291; TAA
LINTSNQL

SEQ ID NO: 52926 - protein, 9 aa, Homo sapiens
  misc_feature: Table A; Target 52926; HLA-A*01:01; NPFFR2; ENSG00000056291; TAA
LLDNIIAGW

SEQ ID NO: 52927 - protein, 9 aa, Homo sapiens
  misc_feature: Table A; Target 52927; HLA-A*02:07; NPFFR2; ENSG00000056291; TAA
LLDNIIAGW

SEQ ID NO: 52928 - protein, 9 aa, Homo sapiens
  misc_feature: Table A; Target 52928; HLA-A*03:01; NPFFR2; ENSG00000056291; TAA
LLYRKSAEK

SEQ ID NO: 52929 - protein, 10 aa, Homo sapiens
  misc_feature: Table A; Target 52929; HLA-B*57:01; NPFFR2; ENSG00000056291; TAA
LSRQTAKSSW

SEQ ID NO: 52930 - protein, 11 aa, Homo sapiens
  misc_feature: Table A; Target 52930; HLA-B*57:01; NPFFR2; ENSG00000056291; TAA
LSVQQRGGPAW

SEQ ID NO: 52931 - protein, 11 aa, Homo sapiens
  misc_feature: Table A; Target 52931; HLA-B*58:01; NPFFR2; ENSG00000056291; TAA
LSVQQRGGPAW

SEQ ID NO: 52932 - protein, 9 aa, Homo sapiens
  misc_feature: Table A; Target 52932; HLA-B*54:01; NPFFR2; ENSG00000056291; TAA
LVQGISVAA

SEQ ID NO: 52933 - protein, 9 aa, Homo sapiens
  misc_feature: Table A; Target 52933; HLA-B*56:01; NPFFR2; ENSG00000056291; TAA
LVQGISVAA

SEQ ID NO: 52934 - protein, 9 aa, Homo sapiens
  misc_feature: Table A; Target 52934; HLA-A*23:01; NPFFR2; ENSG00000056291; TAA
LYSDINITY

SEQ ID NO: 52935 - protein, 9 aa, Homo sapiens
  misc_feature: Table A; Target 52935; HLA-A*24:02; NPFFR2; ENSG00000056291; TAA
LYSDINITY

SEQ ID NO: 52936 - protein, 9 aa, Homo sapiens
  misc_feature: Table A; Target 52936; HLA-A*26:01; NPFFR2; ENSG00000056291; TAA
LYSDINITY

SEQ ID NO: 52937 - protein, 9 aa, Homo sapiens
  misc_feature: Table A; Target 52937; HLA-A*29:02; NPFFR2; ENSG00000056291; TAA
LYSDINITY

SEQ ID NO: 52938 - protein, 9 aa, Homo sapiens
  misc_feature: Table A; Target 52938; HLA-A*30:02; NPFFR2; ENSG00000056291; TAA
LYSDINITY

SEQ ID NO: 52939 - protein, 9 aa, Homo sapiens
  misc_feature: Table A; Target 52939; HLA-A*32:01; NPFFR2; ENSG00000056291; TAA
LYSDINITY

SEQ ID NO: 52940 - protein, 9 aa, Homo sapiens
  misc_feature: Table A; Target 52940; HLA-A*33:01; NPFFR2; ENSG00000056291; TAA
LYSDINITY

SEQ ID NO: 52941 - protein, 9 aa, Homo sapiens
  misc_feature: Table A; Target 52941; HLA-A*33:03; NPFFR2; ENSG00000056291; TAA
LYSDINITY

SEQ ID NO: 52942 - protein, 9 aa, Homo sapiens
  misc_feature: Table A; Target 52942; HLA-B*15:01; NPFFR2; ENSG00000056291; TAA
LYSDINITY

SEQ ID NO: 52943 - protein, 9 aa, Homo sapiens
  misc_feature: Table A; Target 52943; HLA-B*15:03; NPFFR2; ENSG00000056291; TAA
LYSDINITY

SEQ ID NO: 52944 - protein, 9 aa, Homo sapiens
  misc_feature: Table A; Target 52944; HLA-B*18:01; NPFFR2; ENSG00000056291; TAA
LYSDINITY

SEQ ID NO: 52945 - protein, 9 aa, Homo sapiens
  misc_feature: Table A; Target 52945; HLA-B*27:05; NPFFR2; ENSG00000056291; TAA
LYSDINITY

SEQ ID NO: 52946 - protein, 9 aa, Homo sapiens
  misc_feature: Table A; Target 52946; HLA-B*35:01; NPFFR2; ENSG00000056291; TAA
LYSDINITY

SEQ ID NO: 52947 - protein, 9 aa, Homo sapiens
  misc_feature: Table A; Target 52947; HLA-B*39:01; NPFFR2; ENSG00000056291; TAA
LYSDINITY

SEQ ID NO: 52948 - protein, 9 aa, Homo sapiens
  misc_feature: Table A; Target 52948; HLA-B*46:01; NPFFR2; ENSG00000056291; TAA
LYSDINITY

SEQ ID NO: 52949 - protein, 9 aa, Homo sapiens
  misc_feature: Table A; Target 52949; HLA-B*57:01; NPFFR2; ENSG00000056291; TAA
LYSDINITY

SEQ ID NO: 52950 - protein, 9 aa, Homo sapiens
  misc_feature: Table A; Target 52950; HLA-B*58:01; NPFFR2; ENSG00000056291; TAA
LYSDINITY

SEQ ID NO: 52951 - protein, 9 aa, Homo sapiens
  misc_feature: Table A; Target 52951; HLA-C*01:02; NPFFR2; ENSG00000056291; TAA
LYSDINITY

SEQ ID NO: 52952 - protein, 9 aa, Homo sapiens
  misc_feature: Table A; Target 52952; HLA-C*02:02; NPFFR2; ENSG00000056291; TAA
LYSDINITY

SEQ ID NO: 52953 - protein, 9 aa, Homo sapiens
  misc_feature: Table A; Target 52953; HLA-C*04:01; NPFFR2; ENSG00000056291; TAA
LYSDINITY

SEQ ID NO: 52954 - protein, 9 aa, Homo sapiens
  misc_feature: Table A; Target 52954; HLA-C*07:04; NPFFR2; ENSG00000056291; TAA
LYSDINITY

SEQ ID NO: 52955 - protein, 9 aa, Homo sapiens
  misc_feature: Table A; Target 52955; HLA-C*12:03; NPFFR2; ENSG00000056291; TAA
LYSDINITY

SEQ ID NO: 52956 - protein, 9 aa, Homo sapiens
  misc_feature: Table A; Target 52956; HLA-C*14:02; NPFFR2; ENSG00000056291; TAA
LYSDINITY

SEQ ID NO: 52957 - protein, 9 aa, Homo sapiens
  misc_feature: Table A; Target 52957; HLA-C*16:01; NPFFR2; ENSG00000056291; TAA
LYSDINITY

SEQ ID NO: 52958 - protein, 9 aa, Homo sapiens
  misc_feature: Table A; Target 52958; HLA-C*16:02; NPFFR2; ENSG00000056291; TAA
LYSDINITY

SEQ ID NO: 52959 - protein, 9 aa, Homo sapiens
  misc_feature: Table A; Target 52959; HLA-C*16:04; NPFFR2; ENSG00000056291; TAA
LYSDINITY

SEQ ID NO: 52960 - protein, 10 aa, Homo sapiens
  misc_feature: Table A; Target 52960; HLA-A*23:01; NPFFR2; ENSG00000056291; TAA
LYSDINITYV

SEQ ID NO: 52961 - protein, 10 aa, Homo sapiens
  misc_feature: Table A; Target 52961; HLA-A*24:02; NPFFR2; ENSG00000056291; TAA
LYSDINITYV

SEQ ID NO: 52962 - protein, 8 aa, Homo sapiens
  misc_feature: Table A; Target 52962; HLA-B*18:01; NPFFR2; ENSG00000056291; TAA
MEAYALKA

SEQ ID NO: 52963 - protein, 8 aa, Homo sapiens
  misc_feature: Table A; Target 52963; HLA-B*49:01; NPFFR2; ENSG00000056291; TAA
MEAYALKA

SEQ ID NO: 52964 - protein, 8 aa, Homo sapiens
  misc_feature: Table A; Target 52964; HLA-B*38:01; NPFFR2; ENSG00000056291; TAA
MHTVTNLF

SEQ ID NO: 52965 - protein, 9 aa, Homo sapiens
  misc_feature: Table A; Target 52965; HLA-B*38:01; NPFFR2; ENSG00000056291; TAA
MHTVTNLFI

SEQ ID NO: 52966 - protein, 9 aa, Homo sapiens
  misc_feature: Table A; Target 52966; HLA-A*01:01; NPFFR2; ENSG00000056291; TAA
MLHVQEEKY

SEQ ID NO: 52967 - protein, 9 aa, Homo sapiens
  misc_feature: Table A; Target 52967; HLA-A*29:02; NPFFR2; ENSG00000056291; TAA
MLHVQEEKY

SEQ ID NO: 52968 - protein, 9 aa, Homo sapiens
  misc_feature: Table A; Target 52968; HLA-A*30:02; NPFFR2; ENSG00000056291; TAA
MLHVQEEKY

SEQ ID NO: 52969 - protein, 9 aa, Homo sapiens
  misc_feature: Table A; Target 52969; HLA-B*15:01; NPFFR2; ENSG00000056291; TAA
MLHVQEEKY

SEQ ID NO: 52970 - protein, 9 aa, Homo sapiens
  misc_feature: Table A; Target 52970; HLA-B*15:03; NPFFR2; ENSG00000056291; TAA
MLHVQEEKY

SEQ ID NO: 52971 - protein, 9 aa, Homo sapiens
  misc_feature: Table A; Target 52971; HLA-B*46:01; NPFFR2; ENSG00000056291; TAA
MLHVQEEKY

SEQ ID NO: 52972 - protein, 9 aa, Homo sapiens
  misc_feature: Table A; Target 52972; HLA-C*07:04; NPFFR2; ENSG00000056291; TAA
MLHVQEEKY

SEQ ID NO: 52973 - protein, 9 aa, Homo sapiens
  misc_feature: Table A; Target 52973; HLA-A*29:02; NPFFR2; ENSG00000056291; TAA
MLLIVALLF

SEQ ID NO: 52974 - protein, 9 aa, Homo sapiens
  misc_feature: Table A; Target 52974; HLA-A*23:01; NPFFR2; ENSG00000056291; TAA
MMGNTVVCF

SEQ ID NO: 52975 - protein, 9 aa, Homo sapiens
  misc_feature: Table A; Target 52975; HLA-C*07:04; NPFFR2; ENSG00000056291; TAA
MMGNTVVCF

SEQ ID NO: 52976 - protein, 9 aa, Homo sapiens
  misc_feature: Table A; Target 52976; HLA-C*14:02; NPFFR2; ENSG00000056291; TAA
MMGNTVVCF

SEQ ID NO: 52977 - protein, 9 aa, Homo sapiens
  misc_feature: Table A; Target 52977; HLA-B*35:03; NPFFR2; ENSG00000056291; TAA
MPITLLDNI

SEQ ID NO: 52978 - protein, 9 aa, Homo sapiens
  misc_feature: Table A; Target 52978; HLA-B*51:01; NPFFR2; ENSG00000056291; TAA
MPITLLDNI

SEQ ID NO: 52979 - protein, 9 aa, Homo sapiens
  misc_feature: Table A; Target 52979; HLA-B*54:01; NPFFR2; ENSG00000056291; TAA
MPITLLDNI

SEQ ID NO: 52980 - protein, 9 aa, Homo sapiens
  misc_feature: Table A; Target 52980; HLA-B*56:01; NPFFR2; ENSG00000056291; TAA
MPITLLDNI

SEQ ID NO: 52981 - protein, 10 aa, Homo sapiens
  misc_feature: Table A; Target 52981; HLA-B*35:03; NPFFR2; ENSG00000056291; TAA
MPITLLDNII

SEQ ID NO: 52982 - protein, 10 aa, Homo sapiens
  misc_feature: Table A; Target 52982; HLA-B*51:01; NPFFR2; ENSG00000056291; TAA
MPITLLDNII

SEQ ID NO: 52983 - protein, 10 aa, Homo sapiens
  misc_feature: Table A; Target 52983; HLA-B*54:01; NPFFR2; ENSG00000056291; TAA
MPITLLDNII

SEQ ID NO: 52984 - protein, 11 aa, Homo sapiens
  misc_feature: Table A; Target 52984; HLA-B*54:01; NPFFR2; ENSG00000056291; TAA
MPITLLDNIIA

SEQ ID NO: 52985 - protein, 8 aa, Homo sapiens
  misc_feature: Table A; Target 52985; HLA-C*01:02; NPFFR2; ENSG00000056291; TAA
MSPSAVML

SEQ ID NO: 52986 - protein, 10 aa, Homo sapiens
  misc_feature: Table A; Target 52986; HLA-A*68:02; NPFFR2; ENSG00000056291; TAA
MSPSAVMLHV

SEQ ID NO: 52987 - protein, 9 aa, Homo sapiens
  misc_feature: Table A; Target 52987; HLA-A*23:01; NPFFR2; ENSG00000056291; TAA
MYGRIGISL

SEQ ID NO: 52988 - protein, 9 aa, Homo sapiens
  misc_feature: Table A; Target 52988; HLA-A*24:02; NPFFR2; ENSG00000056291; TAA
MYGRIGISL

SEQ ID NO: 52989 - protein, 9 aa, Homo sapiens
  misc_feature: Table A; Target 52989; HLA-C*14:02; NPFFR2; ENSG00000056291; TAA
MYGRIGISL

SEQ ID NO: 52990 - protein, 10 aa, Homo sapiens
  misc_feature: Table A; Target 52990; HLA-A*24:02; NPFFR2; ENSG00000056291; TAA
MYGRIGISLF

SEQ ID NO: 52991 - protein, 8 aa, Homo sapiens
  misc_feature: Table A; Target 52991; HLA-B*37:01; NPFFR2; ENSG00000056291; TAA
NDTKHHLY

SEQ ID NO: 52992 - protein, 8 aa, Homo sapiens
  misc_feature: Table A; Target 52992; HLA-C*07:01; NPFFR2; ENSG00000056291; TAA
NDTKHHLY

SEQ ID NO: 52993 - protein, 8 aa, Homo sapiens
  misc_feature: Table A; Target 52993; HLA-B*18:01; NPFFR2; ENSG00000056291; TAA
NELQIINI

SEQ ID NO: 52994 - protein, 8 aa, Homo sapiens
  misc_feature: Table A; Target 52994; HLA-B*49:01; NPFFR2; ENSG00000056291; TAA
NELQIINI

SEQ ID NO: 52995 - protein, 9 aa, Homo sapiens
  misc_feature: Table A; Target 52995; HLA-B*18:01; NPFFR2; ENSG00000056291; TAA
NELQIINIY

SEQ ID NO: 52996 - protein, 9 aa, Homo sapiens
  misc_feature: Table A; Target 52996; HLA-B*44:02; NPFFR2; ENSG00000056291; TAA
NELQIINIY

SEQ ID NO: 52997 - protein, 9 aa, Homo sapiens
  misc_feature: Table A; Target 52997; HLA-B*44:03; NPFFR2; ENSG00000056291; TAA
NELQIINIY

SEQ ID NO: 52998 - protein, 8 aa, Homo sapiens
  misc_feature: Table A; Target 52998; HLA-A*01:01; NPFFR2; ENSG00000056291; TAA
NITYVNYY

SEQ ID NO: 52999 - protein, 9 aa, Homo sapiens
  misc_feature: Table A; Target 52999; HLA-A*02:04; NPFFR2; ENSG00000056291; TAA
NITYVNYYL

SEQ ID NO: 53000 - protein, 9 aa, Homo sapiens
  misc_feature: Table A; Target 53000; HLA-A*68:02; NPFFR2; ENSG00000056291; TAA
NITYVNYYL

SEQ ID NO: 53001 - protein, 9 aa, Homo sapiens
  misc_feature: Table A; Target 53001; HLA-B*08:01; NPFFR2; ENSG00000056291; TAA
NIYLAPLSL

SEQ ID NO: 53002 - protein, 9 aa, Homo sapiens
  misc_feature: Table A; Target 53002; HLA-C*01:02; NPFFR2; ENSG00000056291; TAA
NIYLAPLSL

SEQ ID NO: 53003 - protein, 9 aa, Homo sapiens
  misc_feature: Table A; Target 53003; HLA-C*07:02; NPFFR2; ENSG00000056291; TAA
NIYLAPLSL

SEQ ID NO: 53004 - protein, 9 aa, Homo sapiens
  misc_feature: Table A; Target 53004; HLA-C*14:02; NPFFR2; ENSG00000056291; TAA
NIYLAPLSL

SEQ ID NO: 53005 - protein, 9 aa, Homo sapiens
  misc_feature: Table A; Target 53005; HLA-A*01:01; NPFFR2; ENSG00000056291; TAA
NPHGETLLY

SEQ ID NO: 53006 - protein, 9 aa, Homo sapiens
  misc_feature: Table A; Target 53006; HLA-A*26:01; NPFFR2; ENSG00000056291; TAA
NPHGETLLY

SEQ ID NO: 53007 - protein, 9 aa, Homo sapiens
  misc_feature: Table A; Target 53007; HLA-A*29:02; NPFFR2; ENSG00000056291; TAA
NPHGETLLY

SEQ ID NO: 53008 - protein, 9 aa, Homo sapiens
  misc_feature: Table A; Target 53008; HLA-A*30:02; NPFFR2; ENSG00000056291; TAA
NPHGETLLY

SEQ ID NO: 53009 - protein, 9 aa, Homo sapiens
  misc_feature: Table A; Target 53009; HLA-B*35:01; NPFFR2; ENSG00000056291; TAA
NPHGETLLY

SEQ ID NO: 53010 - protein, 9 aa, Homo sapiens
  misc_feature: Table A; Target 53010; HLA-B*55:01; NPFFR2; ENSG00000056291; TAA
NPHGETLLY

SEQ ID NO: 53011 - protein, 9 aa, Homo sapiens
  misc_feature: Table A; Target 53011; HLA-C*03:03; NPFFR2; ENSG00000056291; TAA
NPHGETLLY

SEQ ID NO: 53012 - protein, 10 aa, Homo sapiens
  misc_feature: Table A; Target 53012; HLA-A*33:01; NPFFR2; ENSG00000056291; TAA
NPHGETLLYR

SEQ ID NO: 53013 - protein, 10 aa, Homo sapiens
  misc_feature: Table A; Target 53013; HLA-A*33:03; NPFFR2; ENSG00000056291; TAA
NPHGETLLYR

SEQ ID NO: 53014 - protein, 9 aa, Homo sapiens
  misc_feature: Table A; Target 53014; HLA-A*23:01; NPFFR2; ENSG00000056291; TAA
NQLVQESTF

SEQ ID NO: 53015 - protein, 9 aa, Homo sapiens
  misc_feature: Table A; Target 53015; HLA-A*24:02; NPFFR2; ENSG00000056291; TAA
NQLVQESTF

SEQ ID NO: 53016 - protein, 9 aa, Homo sapiens
  misc_feature: Table A; Target 53016; HLA-A*32:01; NPFFR2; ENSG00000056291; TAA
NQLVQESTF

SEQ ID NO: 53017 - protein, 9 aa, Homo sapiens
  misc_feature: Table A; Target 53017; HLA-B*15:01; NPFFR2; ENSG00000056291; TAA
NQLVQESTF

SEQ ID NO: 53018 - protein, 9 aa, Homo sapiens
  misc_feature: Table A; Target 53018; HLA-B*15:03; NPFFR2; ENSG00000056291; TAA
NQLVQESTF

SEQ ID NO: 53019 - protein, 9 aa, Homo sapiens
  misc_feature: Table A; Target 53019; HLA-B*18:01; NPFFR2; ENSG00000056291; TAA
NQLVQESTF

SEQ ID NO: 53020 - protein, 9 aa, Homo sapiens
  misc_feature: Table A; Target 53020; HLA-B*38:01; NPFFR2; ENSG00000056291; TAA
NQLVQESTF

SEQ ID NO: 53021 - protein, 9 aa, Homo sapiens
  misc_feature: Table A; Target 53021; HLA-B*39:01; NPFFR2; ENSG00000056291; TAA
NQLVQESTF

SEQ ID NO: 53022 - protein, 9 aa, Homo sapiens
  misc_feature: Table A; Target 53022; HLA-C*04:01; NPFFR2; ENSG00000056291; TAA
NQLVQESTF

SEQ ID NO: 53023 - protein, 9 aa, Homo sapiens
  misc_feature: Table A; Target 53023; HLA-C*07:04; NPFFR2; ENSG00000056291; TAA
NQLVQESTF

SEQ ID NO: 53024 - protein, 9 aa, Homo sapiens
  misc_feature: Table A; Target 53024; HLA-C*14:02; NPFFR2; ENSG00000056291; TAA
NQLVQESTF

SEQ ID NO: 53025 - protein, 9 aa, Homo sapiens
  misc_feature: Table A; Target 53025; HLA-C*16:04; NPFFR2; ENSG00000056291; TAA
NQLVQESTF

SEQ ID NO: 53026 - protein, 9 aa, Homo sapiens
  misc_feature: Table A; Target 53026; HLA-B*54:01; NPFFR2; ENSG00000056291; TAA
NSFFGTPAA

SEQ ID NO: 53027 - protein, 9 aa, Homo sapiens
  misc_feature: Table A; Target 53027; HLA-B*56:01; NPFFR2; ENSG00000056291; TAA
NSFFGTPAA

SEQ ID NO: 53028 - protein, 9 aa, Homo sapiens
  misc_feature: Table A; Target 53028; HLA-C*02:02; NPFFR2; ENSG00000056291; TAA
NSFFGTPAA

SEQ ID NO: 53029 - protein, 9 aa, Homo sapiens
  misc_feature: Table A; Target 53029; HLA-C*03:03; NPFFR2; ENSG00000056291; TAA
NSFFGTPAA

SEQ ID NO: 53030 - protein, 9 aa, Homo sapiens
  misc_feature: Table A; Target 53030; HLA-C*03:04; NPFFR2; ENSG00000056291; TAA
NSFFGTPAA

SEQ ID NO: 53031 - protein, 9 aa, Homo sapiens
  misc_feature: Table A; Target 53031; HLA-C*12:03; NPFFR2; ENSG00000056291; TAA
NSFFGTPAA

SEQ ID NO: 53032 - protein, 11 aa, Homo sapiens
  misc_feature: Table A; Target 53032; HLA-A*25:01; NPFFR2; ENSG00000056291; TAA
NSFFGTPAASW

SEQ ID NO: 53033 - protein, 11 aa, Homo sapiens
  misc_feature: Table A; Target 53033; HLA-B*44:02; NPFFR2; ENSG00000056291; TAA
NSFFGTPAASW

SEQ ID NO: 53034 - protein, 11 aa, Homo sapiens
  misc_feature: Table A; Target 53034; HLA-B*44:03; NPFFR2; ENSG00000056291; TAA
NSFFGTPAASW

SEQ ID NO: 53035 - protein, 11 aa, Homo sapiens
  misc_feature: Table A; Target 53035; HLA-B*57:01; NPFFR2; ENSG00000056291; TAA
NSFFGTPAASW

SEQ ID NO: 53036 - protein, 11 aa, Homo sapiens
  misc_feature: Table A; Target 53036; HLA-B*58:01; NPFFR2; ENSG00000056291; TAA
NSFFGTPAASW

SEQ ID NO: 53037 - protein, 11 aa, Homo sapiens
  misc_feature: Table A; Target 53037; HLA-C*16:04; NPFFR2; ENSG00000056291; TAA
NSFFGTPAASW

SEQ ID NO: 53038 - protein, 10 aa, Homo sapiens
  misc_feature: Table A; Target 53038; HLA-A*30:02; NPFFR2; ENSG00000056291; TAA
NSQNKTSPVY

SEQ ID NO: 53039 - protein, 11 aa, Homo sapiens
  misc_feature: Table A; Target 53039; HLA-A*33:01; NPFFR2; ENSG00000056291; TAA
NSQNKTSPVYW

SEQ ID NO: 53040 - protein, 11 aa, Homo sapiens
  misc_feature: Table A; Target 53040; HLA-B*57:01; NPFFR2; ENSG00000056291; TAA
NSQNKTSPVYW

SEQ ID NO: 53041 - protein, 9 aa, Homo sapiens
  misc_feature: Table A; Target 53041; HLA-A*01:01; NPFFR2; ENSG00000056291; TAA
NSSVNPIIY

SEQ ID NO: 53042 - protein, 9 aa, Homo sapiens
  misc_feature: Table A; Target 53042; HLA-A*29:02; NPFFR2; ENSG00000056291; TAA
NSSVNPIIY

SEQ ID NO: 53043 - protein, 9 aa, Homo sapiens
  misc_feature: Table A; Target 53043; HLA-A*30:02; NPFFR2; ENSG00000056291; TAA
NSSVNPIIY

SEQ ID NO: 53044 - protein, 9 aa, Homo sapiens
  misc_feature: Table A; Target 53044; HLA-C*12:03; NPFFR2; ENSG00000056291; TAA
NSSVNPIIY

SEQ ID NO: 53045 - protein, 9 aa, Homo sapiens
  misc_feature: Table A; Target 53045; HLA-C*16:01; NPFFR2; ENSG00000056291; TAA
NSSVNPIIY

SEQ ID NO: 53046 - protein, 10 aa, Homo sapiens
  misc_feature: Table A; Target 53046; HLA-A*26:01; NPFFR2; ENSG00000056291; TAA
NVNDTKHHLY

SEQ ID NO: 53047 - protein, 10 aa, Homo sapiens
  misc_feature: Table A; Target 53047; HLA-A*29:02; NPFFR2; ENSG00000056291; TAA
NVNDTKHHLY

SEQ ID NO: 53048 - protein, 10 aa, Homo sapiens
  misc_feature: Table A; Target 53048; HLA-A*30:02; NPFFR2; ENSG00000056291; TAA
NVNDTKHHLY

SEQ ID NO: 53049 - protein, 9 aa, Homo sapiens
  misc_feature: Table A; Target 53049; HLA-A*23:01; NPFFR2; ENSG00000056291; TAA
NYYLHQPQV

SEQ ID NO: 53050 - protein, 9 aa, Homo sapiens
  misc_feature: Table A; Target 53050; HLA-A*24:02; NPFFR2; ENSG00000056291; TAA
NYYLHQPQV

SEQ ID NO: 53051 - protein, 9 aa, Homo sapiens
  misc_feature: Table A; Target 53051; HLA-B*51:01; NPFFR2; ENSG00000056291; TAA
NYYLHQPQV

SEQ ID NO: 53052 - protein, 9 aa, Homo sapiens
  misc_feature: Table A; Target 53052; HLA-C*14:02; NPFFR2; ENSG00000056291; TAA
NYYLHQPQV

SEQ ID NO: 53053 - protein, 8 aa, Homo sapiens
  misc_feature: Table A; Target 53053; HLA-C*07:01; NPFFR2; ENSG00000056291; TAA
PHGETLLY

SEQ ID NO: 53054 - protein, 8 aa, Homo sapiens
  misc_feature: Table A; Target 53054; HLA-B*13:02; NPFFR2; ENSG00000056291; TAA
PQVAAIFI

SEQ ID NO: 53055 - protein, 8 aa, Homo sapiens
  misc_feature: Table A; Target 53055; HLA-A*30:01; NPFFR2; ENSG00000056291; TAA
QEAFQLQL

SEQ ID NO: 53056 - protein, 8 aa, Homo sapiens
  misc_feature: Table A; Target 53056; HLA-B*49:01; NPFFR2; ENSG00000056291; TAA
QEAFQLQL

SEQ ID NO: 53057 - protein, 9 aa, Homo sapiens
  misc_feature: Table A; Target 53057; HLA-B*49:01; NPFFR2; ENSG00000056291; TAA
QEAFQLQLC

SEQ ID NO: 53058 - protein, 8 aa, Homo sapiens
  misc_feature: Table A; Target 53058; HLA-A*30:01; NPFFR2; ENSG00000056291; TAA
QELVMEEL

SEQ ID NO: 53059 - protein, 8 aa, Homo sapiens
  misc_feature: Table A; Target 53059; HLA-B*18:01; NPFFR2; ENSG00000056291; TAA
QELVMEEL

SEQ ID NO: 53060 - protein, 8 aa, Homo sapiens
  misc_feature: Table A; Target 53060; HLA-B*40:01; NPFFR2; ENSG00000056291; TAA
QELVMEEL

SEQ ID NO: 53061 - protein, 8 aa, Homo sapiens
  misc_feature: Table A; Target 53061; HLA-B*49:01; NPFFR2; ENSG00000056291; TAA
QELVMEEL

SEQ ID NO: 53062 - protein, 10 aa, Homo sapiens
  misc_feature: Table A; Target 53062; HLA-B*49:01; NPFFR2; ENSG00000056291; TAA
QEMRKIYTTV

SEQ ID NO: 53063 - protein, 9 aa, Homo sapiens
  misc_feature: Table A; Target 53063; HLA-A*31:01; NPFFR2; ENSG00000056291; TAA
QEQWHVVSR

SEQ ID NO: 53064 - protein, 9 aa, Homo sapiens
  misc_feature: Table A; Target 53064; HLA-B*37:01; NPFFR2; ENSG00000056291; TAA
QEQWHVVSR

SEQ ID NO: 53065 - protein, 9 aa, Homo sapiens
  misc_feature: Table A; Target 53065; HLA-A*33:01; NPFFR2; ENSG00000056291; TAA
QNKTSPVYW

SEQ ID NO: 53066 - protein, 9 aa, Homo sapiens
  misc_feature: Table A; Target 53066; HLA-B*57:01; NPFFR2; ENSG00000056291; TAA
QNKTSPVYW

SEQ ID NO: 53067 - protein, 10 aa, Homo sapiens
  misc_feature: Table A; Target 53067; HLA-A*01:01; NPFFR2; ENSG00000056291; TAA
QNPHGETLLY

SEQ ID NO: 53068 - protein, 10 aa, Homo sapiens
  misc_feature: Table A; Target 53068; HLA-A*26:01; NPFFR2; ENSG00000056291; TAA
QNPHGETLLY

SEQ ID NO: 53069 - protein, 10 aa, Homo sapiens
  misc_feature: Table A; Target 53069; HLA-A*29:02; NPFFR2; ENSG00000056291; TAA
QNPHGETLLY

SEQ ID NO: 53070 - protein, 11 aa, Homo sapiens
  misc_feature: Table A; Target 53070; HLA-A*33:01; NPFFR2; ENSG00000056291; TAA
QNPHGETLLYR

SEQ ID NO: 53071 - protein, 11 aa, Homo sapiens
  misc_feature: Table A; Target 53071; HLA-A*33:03; NPFFR2; ENSG00000056291; TAA
QNPHGETLLYR

SEQ ID NO: 53072 - protein, 9 aa, Homo sapiens
  misc_feature: Table A; Target 53072; HLA-B*38:01; NPFFR2; ENSG00000056291; TAA
QQELVMEEL

SEQ ID NO: 53073 - protein, 9 aa, Homo sapiens
  misc_feature: Table A; Target 53073; HLA-B*39:01; NPFFR2; ENSG00000056291; TAA
QQELVMEEL

SEQ ID NO: 53074 - protein, 10 aa, Homo sapiens
  misc_feature: Table A; Target 53074; HLA-A*25:01; NPFFR2; ENSG00000056291; TAA
QVAAIFIISY

SEQ ID NO: 53075 - protein, 10 aa, Homo sapiens
  misc_feature: Table A; Target 53075; HLA-A*26:01; NPFFR2; ENSG00000056291; TAA
QVAAIFIISY

SEQ ID NO: 53076 - protein, 9 aa, Homo sapiens
  misc_feature: Table A; Target 53076; HLA-A*03:01; NPFFR2; ENSG00000056291; TAA
RAAVPHTGR

SEQ ID NO: 53077 - protein, 9 aa, Homo sapiens
  misc_feature: Table A; Target 53077; HLA-A*03:02; NPFFR2; ENSG00000056291; TAA
RAAVPHTGR

SEQ ID NO: 53078 - protein, 9 aa, Homo sapiens
  misc_feature: Table A; Target 53078; HLA-A*31:01; NPFFR2; ENSG00000056291; TAA
RAAVPHTGR

SEQ ID NO: 53079 - protein, 9 aa, Homo sapiens
  misc_feature: Table A; Target 53079; HLA-A*33:01; NPFFR2; ENSG00000056291; TAA
RAAVPHTGR

SEQ ID NO: 53080 - protein, 9 aa, Homo sapiens
  misc_feature: Table A; Target 53080; HLA-A*33:03; NPFFR2; ENSG00000056291; TAA
RAAVPHTGR

SEQ ID NO: 53081 - protein, 9 aa, Homo sapiens
  misc_feature: Table A; Target 53081; HLA-A*68:01; NPFFR2; ENSG00000056291; TAA
RAAVPHTGR

SEQ ID NO: 53082 - protein, 9 aa, Homo sapiens
  misc_feature: Table A; Target 53082; HLA-B*27:05; NPFFR2; ENSG00000056291; TAA
RAAVPHTGR

SEQ ID NO: 53083 - protein, 9 aa, Homo sapiens
  misc_feature: Table A; Target 53083; HLA-B*57:01; NPFFR2; ENSG00000056291; TAA
RAAVPHTGR

SEQ ID NO: 53084 - protein, 9 aa, Homo sapiens
  misc_feature: Table A; Target 53084; HLA-C*07:06; NPFFR2; ENSG00000056291; TAA
RAAVPHTGR

SEQ ID NO: 53085 - protein, 8 aa, Homo sapiens
  misc_feature: Table A; Target 53085; HLA-A*30:02; NPFFR2; ENSG00000056291; TAA
RAKPMEAY

SEQ ID NO: 53086 - protein, 8 aa, Homo sapiens
  misc_feature: Table A; Target 53086; HLA-A*32:01; NPFFR2; ENSG00000056291; TAA
RAKPMEAY

SEQ ID NO: 53087 - protein, 8 aa, Homo sapiens
  misc_feature: Table A; Target 53087; HLA-B*15:01; NPFFR2; ENSG00000056291; TAA
RAKPMEAY

SEQ ID NO: 53088 - protein, 8 aa, Homo sapiens
  misc_feature: Table A; Target 53088; HLA-B*46:01; NPFFR2; ENSG00000056291; TAA
RAKPMEAY

SEQ ID NO: 53089 - protein, 11 aa, Homo sapiens
  misc_feature: Table A; Target 53089; HLA-A*03:01; NPFFR2; ENSG00000056291; TAA
RAKPMEAYALK

SEQ ID NO: 53090 - protein, 11 aa, Homo sapiens
  misc_feature: Table A; Target 53090; HLA-A*31:01; NPFFR2; ENSG00000056291; TAA
RAKPMEAYALK

SEQ ID NO: 53091 - protein, 8 aa, Homo sapiens
  misc_feature: Table A; Target 53091; HLA-A*31:01; NPFFR2; ENSG00000056291; TAA
RALSVQQR

SEQ ID NO: 53092 - protein, 9 aa, Homo sapiens
  misc_feature: Table A; Target 53092; HLA-B*37:01; NPFFR2; ENSG00000056291; TAA
REDWPNQEM

SEQ ID NO: 53093 - protein, 9 aa, Homo sapiens
  misc_feature: Table A; Target 53093; HLA-B*40:01; NPFFR2; ENSG00000056291; TAA
REDWPNQEM

SEQ ID NO: 53094 - protein, 10 aa, Homo sapiens
  misc_feature: Table A; Target 53094; HLA-A*03:01; NPFFR2; ENSG00000056291; TAA
RLGLSRQTAK

SEQ ID NO: 53095 - protein, 8 aa, Homo sapiens
  misc_feature: Table A; Target 53095; HLA-A*32:01; NPFFR2; ENSG00000056291; TAA
RQTAKSSW

SEQ ID NO: 53096 - protein, 9 aa, Homo sapiens
  misc_feature: Table A; Target 53096; HLA-B*27:05; NPFFR2; ENSG00000056291; TAA
RRALSVQQR

SEQ ID NO: 53097 - protein, 9 aa, Homo sapiens
  misc_feature: Table A; Target 53097; HLA-A*03:01; NPFFR2; ENSG00000056291; TAA
RVRLNSQNK

SEQ ID NO: 53098 - protein, 9 aa, Homo sapiens
  misc_feature: Table A; Target 53098; HLA-B*07:02; NPFFR2; ENSG00000056291; TAA
SAEKPQQEL

SEQ ID NO: 53099 - protein, 9 aa, Homo sapiens
  misc_feature: Table A; Target 53099; HLA-B*35:03; NPFFR2; ENSG00000056291; TAA
SAEKPQQEL

SEQ ID NO: 53100 - protein, 9 aa, Homo sapiens
  misc_feature: Table A; Target 53100; HLA-B*40:01; NPFFR2; ENSG00000056291; TAA
SAEKPQQEL

SEQ ID NO: 53101 - protein, 9 aa, Homo sapiens
  misc_feature: Table A; Target 53101; HLA-B*58:01; NPFFR2; ENSG00000056291; TAA
SAEKPQQEL

SEQ ID NO: 53102 - protein, 9 aa, Homo sapiens
  misc_feature: Table A; Target 53102; HLA-C*01:02; NPFFR2; ENSG00000056291; TAA
SAEKPQQEL

SEQ ID NO: 53103 - protein, 9 aa, Homo sapiens
  misc_feature: Table A; Target 53103; HLA-C*03:03; NPFFR2; ENSG00000056291; TAA
SAEKPQQEL

SEQ ID NO: 53104 - protein, 9 aa, Homo sapiens
  misc_feature: Table A; Target 53104; HLA-C*03:04; NPFFR2; ENSG00000056291; TAA
SAEKPQQEL

SEQ ID NO: 53105 - protein, 9 aa, Homo sapiens
  misc_feature: Table A; Target 53105; HLA-C*05:01; NPFFR2; ENSG00000056291; TAA
SAEKPQQEL

SEQ ID NO: 53106 - protein, 9 aa, Homo sapiens
  misc_feature: Table A; Target 53106; HLA-C*07:06; NPFFR2; ENSG00000056291; TAA
SAEKPQQEL

SEQ ID NO: 53107 - protein, 10 aa, Homo sapiens
  misc_feature: Table A; Target 53107; HLA-C*05:01; NPFFR2; ENSG00000056291; TAA
SAEKPQQELV

SEQ ID NO: 53108 - protein, 11 aa, Homo sapiens
  misc_feature: Table A; Target 53108; HLA-C*05:01; NPFFR2; ENSG00000056291; TAA
SAEKPQQELVM

SEQ ID NO: 53109 - protein, 8 aa, Homo sapiens
  misc_feature: Table A; Target 53109; HLA-A*30:01; NPFFR2; ENSG00000056291; TAA
SDINITYV

SEQ ID NO: 53110 - protein, 8 aa, Homo sapiens
  misc_feature: Table A; Target 53110; HLA-B*37:01; NPFFR2; ENSG00000056291; TAA
SDINITYV

SEQ ID NO: 53111 - protein, 8 aa, Homo sapiens
  misc_feature: Table A; Target 53111; HLA-B*49:01; NPFFR2; ENSG00000056291; TAA
SDINITYV

SEQ ID NO: 53112 - protein, 10 aa, Homo sapiens
  misc_feature: Table A; Target 53112; HLA-A*25:01; NPFFR2; ENSG00000056291; TAA
SDINITYVNY

SEQ ID NO: 53113 - protein, 10 aa, Homo sapiens
  misc_feature: Table A; Target 53113; HLA-A*26:01; NPFFR2; ENSG00000056291; TAA
SDINITYVNY

SEQ ID NO: 53114 - protein, 10 aa, Homo sapiens
  misc_feature: Table A; Target 53114; HLA-B*44:02; NPFFR2; ENSG00000056291; TAA
SDINITYVNY

SEQ ID NO: 53115 - protein, 10 aa, Homo sapiens
  misc_feature: Table A; Target 53115; HLA-B*44:03; NPFFR2; ENSG00000056291; TAA
SDINITYVNY

SEQ ID NO: 53116 - protein, 8 aa, Homo sapiens
  misc_feature: Table A; Target 53116; HLA-B*37:01; NPFFR2; ENSG00000056291; TAA
SDLLVGIF

SEQ ID NO: 53117 - protein, 11 aa, Homo sapiens
  misc_feature: Table A; Target 53117; HLA-A*30:01; NPFFR2; ENSG00000056291; TAA
SDYADLSPNEL

SEQ ID NO: 53118 - protein, 11 aa, Homo sapiens
  misc_feature: Table A; Target 53118; HLA-B*40:02; NPFFR2; ENSG00000056291; TAA
SDYADLSPNEL

SEQ ID NO: 53119 - protein, 8 aa, Homo sapiens
  misc_feature: Table A; Target 53119; HLA-C*14:02; NPFFR2; ENSG00000056291; TAA
SFFGTPAA

SEQ ID NO: 53120 - protein, 10 aa, Homo sapiens
  misc_feature: Table A; Target 53120; HLA-A*23:01; NPFFR2; ENSG00000056291; TAA
SFFGTPAASW

SEQ ID NO: 53121 - protein, 10 aa, Homo sapiens
  misc_feature: Table A; Target 53121; HLA-A*24:02; NPFFR2; ENSG00000056291; TAA
SFFGTPAASW

SEQ ID NO: 53122 - protein, 10 aa, Homo sapiens
  misc_feature: Table A; Target 53122; HLA-A*25:01; NPFFR2; ENSG00000056291; TAA
SFFGTPAASW

SEQ ID NO: 53123 - protein, 10 aa, Homo sapiens
  misc_feature: Table A; Target 53123; HLA-A*29:02; NPFFR2; ENSG00000056291; TAA
SFFGTPAASW

SEQ ID NO: 53124 - protein, 10 aa, Homo sapiens
  misc_feature: Table A; Target 53124; HLA-A*30:02; NPFFR2; ENSG00000056291; TAA
SFFGTPAASW

SEQ ID NO: 53125 - protein, 9 aa, Homo sapiens
  misc_feature: Table A; Target 53125; HLA-A*02:01; NPFFR2; ENSG00000056291; TAA
SGLVQGISV

SEQ ID NO: 53126 - protein, 9 aa, Homo sapiens
  misc_feature: Table A; Target 53126; HLA-B*13:02; NPFFR2; ENSG00000056291; TAA
SGLVQGISV

SEQ ID NO: 53127 - protein, 9 aa, Homo sapiens
  misc_feature: Table A; Target 53127; HLA-B*46:01; NPFFR2; ENSG00000056291; TAA
SGLVQGISV

SEQ ID NO: 53128 - protein, 9 aa, Homo sapiens
  misc_feature: Table A; Target 53128; HLA-B*51:01; NPFFR2; ENSG00000056291; TAA
SGLVQGISV

SEQ ID NO: 53129 - protein, 9 aa, Homo sapiens
  misc_feature: Table A; Target 53129; HLA-C*01:02; NPFFR2; ENSG00000056291; TAA
SGLVQGISV

SEQ ID NO: 53130 - protein, 9 aa, Homo sapiens
  misc_feature: Table A; Target 53130; HLA-C*03:03; NPFFR2; ENSG00000056291; TAA
SGLVQGISV

SEQ ID NO: 53131 - protein, 9 aa, Homo sapiens
  misc_feature: Table A; Target 53131; HLA-C*03:04; NPFFR2; ENSG00000056291; TAA
SGLVQGISV

SEQ ID NO: 53132 - protein, 9 aa, Homo sapiens
  misc_feature: Table A; Target 53132; HLA-C*14:02; NPFFR2; ENSG00000056291; TAA
SGLVQGISV

SEQ ID NO: 53133 - protein, 11 aa, Homo sapiens
  misc_feature: Table A; Target 53133; HLA-B*38:01; NPFFR2; ENSG00000056291; TAA
SHVLINTSNQL

SEQ ID NO: 53134 - protein, 11 aa, Homo sapiens
  misc_feature: Table A; Target 53134; HLA-B*39:01; NPFFR2; ENSG00000056291; TAA
SHVLINTSNQL

SEQ ID NO: 53135 - protein, 8 aa, Homo sapiens
  misc_feature: Table A; Target 53135; HLA-B*56:01; NPFFR2; ENSG00000056291; TAA
SPNELQII

SEQ ID NO: 53136 - protein, 10 aa, Homo sapiens
  misc_feature: Table A; Target 53136; HLA-B*56:01; NPFFR2; ENSG00000056291; TAA
SPNELQIINI

SEQ ID NO: 53137 - protein, 11 aa, Homo sapiens
  misc_feature: Table A; Target 53137; HLA-B*35:01; NPFFR2; ENSG00000056291; TAA
SPNELQIINIY

SEQ ID NO: 53138 - protein, 9 aa, Homo sapiens
  misc_feature: Table A; Target 53138; HLA-A*68:02; NPFFR2; ENSG00000056291; TAA
SPSAVMLHV

SEQ ID NO: 53139 - protein, 9 aa, Homo sapiens
  misc_feature: Table A; Target 53139; HLA-B*07:02; NPFFR2; ENSG00000056291; TAA
SPSAVMLHV

SEQ ID NO: 53140 - protein, 9 aa, Homo sapiens
  misc_feature: Table A; Target 53140; HLA-B*13:02; NPFFR2; ENSG00000056291; TAA
SPSAVMLHV

SEQ ID NO: 53141 - protein, 9 aa, Homo sapiens
  misc_feature: Table A; Target 53141; HLA-B*35:03; NPFFR2; ENSG00000056291; TAA
SPSAVMLHV

SEQ ID NO: 53142 - protein, 9 aa, Homo sapiens
  misc_feature: Table A; Target 53142; HLA-B*51:01; NPFFR2; ENSG00000056291; TAA
SPSAVMLHV

SEQ ID NO: 53143 - protein, 9 aa, Homo sapiens
  misc_feature: Table A; Target 53143; HLA-B*54:01; NPFFR2; ENSG00000056291; TAA
SPSAVMLHV

SEQ ID NO: 53144 - protein, 9 aa, Homo sapiens
  misc_feature: Table A; Target 53144; HLA-B*55:01; NPFFR2; ENSG00000056291; TAA
SPSAVMLHV

SEQ ID NO: 53145 - protein, 9 aa, Homo sapiens
  misc_feature: Table A; Target 53145; HLA-B*56:01; NPFFR2; ENSG00000056291; TAA
SPSAVMLHV

SEQ ID NO: 53146 - protein, 9 aa, Homo sapiens
  misc_feature: Table A; Target 53146; HLA-C*07:02; NPFFR2; ENSG00000056291; TAA
SPSAVMLHV

SEQ ID NO: 53147 - protein, 9 aa, Homo sapiens
  misc_feature: Table A; Target 53147; HLA-C*16:02; NPFFR2; ENSG00000056291; TAA
SPSAVMLHV

SEQ ID NO: 53148 - protein, 9 aa, Homo sapiens
  misc_feature: Table A; Target 53148; HLA-A*26:01; NPFFR2; ENSG00000056291; TAA
SQNKTSPVY

SEQ ID NO: 53149 - protein, 9 aa, Homo sapiens
  misc_feature: Table A; Target 53149; HLA-A*30:02; NPFFR2; ENSG00000056291; TAA
SQNKTSPVY

SEQ ID NO: 53150 - protein, 9 aa, Homo sapiens
  misc_feature: Table A; Target 53150; HLA-A*32:01; NPFFR2; ENSG00000056291; TAA
SQNKTSPVY

SEQ ID NO: 53151 - protein, 9 aa, Homo sapiens
  misc_feature: Table A; Target 53151; HLA-B*15:01; NPFFR2; ENSG00000056291; TAA
SQNKTSPVY

SEQ ID NO: 53152 - protein, 9 aa, Homo sapiens
  misc_feature: Table A; Target 53152; HLA-B*15:03; NPFFR2; ENSG00000056291; TAA
SQNKTSPVY

SEQ ID NO: 53153 - protein, 9 aa, Homo sapiens
  misc_feature: Table A; Target 53153; HLA-B*18:01; NPFFR2; ENSG00000056291; TAA
SQNKTSPVY

SEQ ID NO: 53154 - protein, 9 aa, Homo sapiens
  misc_feature: Table A; Target 53154; HLA-B*44:03; NPFFR2; ENSG00000056291; TAA
SQNKTSPVY

SEQ ID NO: 53155 - protein, 9 aa, Homo sapiens
  misc_feature: Table A; Target 53155; HLA-B*46:01; NPFFR2; ENSG00000056291; TAA
SQNKTSPVY

SEQ ID NO: 53156 - protein, 9 aa, Homo sapiens
  misc_feature: Table A; Target 53156; HLA-C*02:02; NPFFR2; ENSG00000056291; TAA
SQNKTSPVY

SEQ ID NO: 53157 - protein, 9 aa, Homo sapiens
  misc_feature: Table A; Target 53157; HLA-C*07:04; NPFFR2; ENSG00000056291; TAA
SQNKTSPVY

SEQ ID NO: 53158 - protein, 9 aa, Homo sapiens
  misc_feature: Table A; Target 53158; HLA-C*14:02; NPFFR2; ENSG00000056291; TAA
SQNKTSPVY

SEQ ID NO: 53159 - protein, 9 aa, Homo sapiens
  misc_feature: Table A; Target 53159; HLA-C*16:01; NPFFR2; ENSG00000056291; TAA
SQNKTSPVY

SEQ ID NO: 53160 - protein, 9 aa, Homo sapiens
  misc_feature: Table A; Target 53160; HLA-C*16:04; NPFFR2; ENSG00000056291; TAA
SQNKTSPVY

SEQ ID NO: 53161 - protein, 10 aa, Homo sapiens
  misc_feature: Table A; Target 53161; HLA-A*32:01; NPFFR2; ENSG00000056291; TAA
SQNKTSPVYW

SEQ ID NO: 53162 - protein, 10 aa, Homo sapiens
  misc_feature: Table A; Target 53162; HLA-B*27:02; NPFFR2; ENSG00000056291; TAA
SQNKTSPVYW

SEQ ID NO: 53163 - protein, 10 aa, Homo sapiens
  misc_feature: Table A; Target 53163; HLA-B*44:02; NPFFR2; ENSG00000056291; TAA
SQNKTSPVYW

SEQ ID NO: 53164 - protein, 10 aa, Homo sapiens
  misc_feature: Table A; Target 53164; HLA-B*44:03; NPFFR2; ENSG00000056291; TAA
SQNKTSPVYW

SEQ ID NO: 53165 - protein, 10 aa, Homo sapiens
  misc_feature: Table A; Target 53165; HLA-B*57:01; NPFFR2; ENSG00000056291; TAA
SQNKTSPVYW

SEQ ID NO: 53166 - protein, 10 aa, Homo sapiens
  misc_feature: Table A; Target 53166; HLA-B*58:01; NPFFR2; ENSG00000056291; TAA
SQNKTSPVYW

SEQ ID NO: 53167 - protein, 9 aa, Homo sapiens
  misc_feature: Table A; Target 53167; HLA-A*32:01; NPFFR2; ENSG00000056291; TAA
SRQTAKSSW

SEQ ID NO: 53168 - protein, 9 aa, Homo sapiens
  misc_feature: Table A; Target 53168; HLA-B*27:02; NPFFR2; ENSG00000056291; TAA
SRQTAKSSW

SEQ ID NO: 53169 - protein, 9 aa, Homo sapiens
  misc_feature: Table A; Target 53169; HLA-B*27:05; NPFFR2; ENSG00000056291; TAA
SRQTAKSSW

SEQ ID NO: 53170 - protein, 9 aa, Homo sapiens
  misc_feature: Table A; Target 53170; HLA-C*16:04; NPFFR2; ENSG00000056291; TAA
SRQTAKSSW

SEQ ID NO: 53171 - protein, 9 aa, Homo sapiens
  misc_feature: Table A; Target 53171; HLA-B*57:01; NPFFR2; ENSG00000056291; TAA
SSENWHPIW

SEQ ID NO: 53172 - protein, 8 aa, Homo sapiens
  misc_feature: Table A; Target 53172; HLA-A*30:02; NPFFR2; ENSG00000056291; TAA
SSVNPIIY

SEQ ID NO: 53173 - protein, 8 aa, Homo sapiens
  misc_feature: Table A; Target 53173; HLA-C*16:01; NPFFR2; ENSG00000056291; TAA
SSVNPIIY

SEQ ID NO: 53174 - protein, 10 aa, Homo sapiens
  misc_feature: Table A; Target 53174; HLA-B*57:01; NPFFR2; ENSG00000056291; TAA
SSVNPIIYGF

SEQ ID NO: 53175 - protein, 11 aa, Homo sapiens
  misc_feature: Table A; Target 53175; HLA-A*68:02; NPFFR2; ENSG00000056291; TAA
STFQNPHGETL

SEQ ID NO: 53176 - protein, 9 aa, Homo sapiens
  misc_feature: Table A; Target 53176; HLA-A*02:01; NPFFR2; ENSG00000056291; TAA
SVAASVFTL

SEQ ID NO: 53177 - protein, 9 aa, Homo sapiens
  misc_feature: Table A; Target 53177; HLA-A*02:03; NPFFR2; ENSG00000056291; TAA
SVAASVFTL

SEQ ID NO: 53178 - protein, 9 aa, Homo sapiens
  misc_feature: Table A; Target 53178; HLA-A*02:04; NPFFR2; ENSG00000056291; TAA
SVAASVFTL

SEQ ID NO: 53179 - protein, 9 aa, Homo sapiens
  misc_feature: Table A; Target 53179; HLA-A*02:07; NPFFR2; ENSG00000056291; TAA
SVAASVFTL

SEQ ID NO: 53180 - protein, 9 aa, Homo sapiens
  misc_feature: Table A; Target 53180; HLA-A*03:01; NPFFR2; ENSG00000056291; TAA
SVAASVFTL

SEQ ID NO: 53181 - protein, 9 aa, Homo sapiens
  misc_feature: Table A; Target 53181; HLA-A*03:02; NPFFR2; ENSG00000056291; TAA
SVAASVFTL

SEQ ID NO: 53182 - protein, 9 aa, Homo sapiens
  misc_feature: Table A; Target 53182; HLA-A*11:01; NPFFR2; ENSG00000056291; TAA
SVAASVFTL

SEQ ID NO: 53183 - protein, 9 aa, Homo sapiens
  misc_feature: Table A; Target 53183; HLA-A*25:01; NPFFR2; ENSG00000056291; TAA
SVAASVFTL

SEQ ID NO: 53184 - protein, 9 aa, Homo sapiens
  misc_feature: Table A; Target 53184; HLA-A*26:01; NPFFR2; ENSG00000056291; TAA
SVAASVFTL

SEQ ID NO: 53185 - protein, 9 aa, Homo sapiens
  misc_feature: Table A; Target 53185; HLA-A*30:01; NPFFR2; ENSG00000056291; TAA
SVAASVFTL

SEQ ID NO: 53186 - protein, 9 aa, Homo sapiens
  misc_feature: Table A; Target 53186; HLA-A*30:02; NPFFR2; ENSG00000056291; TAA
SVAASVFTL

SEQ ID NO: 53187 - protein, 9 aa, Homo sapiens
  misc_feature: Table A; Target 53187; HLA-A*32:01; NPFFR2; ENSG00000056291; TAA
SVAASVFTL

SEQ ID NO: 53188 - protein, 9 aa, Homo sapiens
  misc_feature: Table A; Target 53188; HLA-A*68:01; NPFFR2; ENSG00000056291; TAA
SVAASVFTL

SEQ ID NO: 53189 - protein, 9 aa, Homo sapiens
  misc_feature: Table A; Target 53189; HLA-A*68:02; NPFFR2; ENSG00000056291; TAA
SVAASVFTL

SEQ ID NO: 53190 - protein, 9 aa, Homo sapiens
  misc_feature: Table A; Target 53190; HLA-B*07:02; NPFFR2; ENSG00000056291; TAA
SVAASVFTL

SEQ ID NO: 53191 - protein, 9 aa, Homo sapiens
  misc_feature: Table A; Target 53191; HLA-B*13:02; NPFFR2; ENSG00000056291; TAA
SVAASVFTL

SEQ ID NO: 53192 - protein, 9 aa, Homo sapiens
  misc_feature: Table A; Target 53192; HLA-B*15:01; NPFFR2; ENSG00000056291; TAA
SVAASVFTL

SEQ ID NO: 53193 - protein, 9 aa, Homo sapiens
  misc_feature: Table A; Target 53193; HLA-B*27:05; NPFFR2; ENSG00000056291; TAA
SVAASVFTL

SEQ ID NO: 53194 - protein, 9 aa, Homo sapiens
  misc_feature: Table A; Target 53194; HLA-B*35:01; NPFFR2; ENSG00000056291; TAA
SVAASVFTL

SEQ ID NO: 53195 - protein, 9 aa, Homo sapiens
  misc_feature: Table A; Target 53195; HLA-B*35:03; NPFFR2; ENSG00000056291; TAA
SVAASVFTL

SEQ ID NO: 53196 - protein, 9 aa, Homo sapiens
  misc_feature: Table A; Target 53196; HLA-B*38:01; NPFFR2; ENSG00000056291; TAA
SVAASVFTL

SEQ ID NO: 53197 - protein, 9 aa, Homo sapiens
  misc_feature: Table A; Target 53197; HLA-B*39:01; NPFFR2; ENSG00000056291; TAA
SVAASVFTL

SEQ ID NO: 53198 - protein, 9 aa, Homo sapiens
  misc_feature: Table A; Target 53198; HLA-B*58:01; NPFFR2; ENSG00000056291; TAA
SVAASVFTL

SEQ ID NO: 53199 - protein, 9 aa, Homo sapiens
  misc_feature: Table A; Target 53199; HLA-C*01:02; NPFFR2; ENSG00000056291; TAA
SVAASVFTL

SEQ ID NO: 53200 - protein, 9 aa, Homo sapiens
  misc_feature: Table A; Target 53200; HLA-C*02:02; NPFFR2; ENSG00000056291; TAA
SVAASVFTL

SEQ ID NO: 53201 - protein, 9 aa, Homo sapiens
  misc_feature: Table A; Target 53201; HLA-C*03:03; NPFFR2; ENSG00000056291; TAA
SVAASVFTL

SEQ ID NO: 53202 - protein, 9 aa, Homo sapiens
  misc_feature: Table A; Target 53202; HLA-C*03:04; NPFFR2; ENSG00000056291; TAA
SVAASVFTL

SEQ ID NO: 53203 - protein, 9 aa, Homo sapiens
  misc_feature: Table A; Target 53203; HLA-C*07:04; NPFFR2; ENSG00000056291; TAA
SVAASVFTL

SEQ ID NO: 53204 - protein, 9 aa, Homo sapiens
  misc_feature: Table A; Target 53204; HLA-C*07:06; NPFFR2; ENSG00000056291; TAA
SVAASVFTL

SEQ ID NO: 53205 - protein, 9 aa, Homo sapiens
  misc_feature: Table A; Target 53205; HLA-C*12:03; NPFFR2; ENSG00000056291; TAA
SVAASVFTL

SEQ ID NO: 53206 - protein, 9 aa, Homo sapiens
  misc_feature: Table A; Target 53206; HLA-C*14:02; NPFFR2; ENSG00000056291; TAA
SVAASVFTL

SEQ ID NO: 53207 - protein, 9 aa, Homo sapiens
  misc_feature: Table A; Target 53207; HLA-C*16:02; NPFFR2; ENSG00000056291; TAA
SVAASVFTL

SEQ ID NO: 53208 - protein, 10 aa, Homo sapiens
  misc_feature: Table A; Target 53208; HLA-A*02:01; NPFFR2; ENSG00000056291; TAA
SVAASVFTLV

SEQ ID NO: 53209 - protein, 10 aa, Homo sapiens
  misc_feature: Table A; Target 53209; HLA-A*02:03; NPFFR2; ENSG00000056291; TAA
SVAASVFTLV

SEQ ID NO: 53210 - protein, 10 aa, Homo sapiens
  misc_feature: Table A; Target 53210; HLA-A*25:01; NPFFR2; ENSG00000056291; TAA
SVAASVFTLV

SEQ ID NO: 53211 - protein, 10 aa, Homo sapiens
  misc_feature: Table A; Target 53211; HLA-A*26:01; NPFFR2; ENSG00000056291; TAA
SVAASVFTLV

SEQ ID NO: 53212 - protein, 10 aa, Homo sapiens
  misc_feature: Table A; Target 53212; HLA-A*68:02; NPFFR2; ENSG00000056291; TAA
SVAASVFTLV

SEQ ID NO: 53213 - protein, 8 aa, Homo sapiens
  misc_feature: Table A; Target 53213; HLA-B*13:02; NPFFR2; ENSG00000056291; TAA
SVFTLVAI

SEQ ID NO: 53214 - protein, 9 aa, Homo sapiens
  misc_feature: Table A; Target 53214; HLA-B*56:01; NPFFR2; ENSG00000056291; TAA
SVFTLVAIA

SEQ ID NO: 53215 - protein, 10 aa, Homo sapiens
  misc_feature: Table A; Target 53215; HLA-A*68:02; NPFFR2; ENSG00000056291; TAA
SVFTLVAIAV

SEQ ID NO: 53216 - protein, 9 aa, Homo sapiens
  misc_feature: Table A; Target 53216; HLA-A*02:04; NPFFR2; ENSG00000056291; TAA
SVNPIIYGF

SEQ ID NO: 53217 - protein, 9 aa, Homo sapiens
  misc_feature: Table A; Target 53217; HLA-A*02:07; NPFFR2; ENSG00000056291; TAA
SVNPIIYGF

SEQ ID NO: 53218 - protein, 9 aa, Homo sapiens
  misc_feature: Table A; Target 53218; HLA-A*03:01; NPFFR2; ENSG00000056291; TAA
SVNPIIYGF

SEQ ID NO: 53219 - protein, 9 aa, Homo sapiens
  misc_feature: Table A; Target 53219; HLA-A*03:02; NPFFR2; ENSG00000056291; TAA
SVNPIIYGF

SEQ ID NO: 53220 - protein, 9 aa, Homo sapiens
  misc_feature: Table A; Target 53220; HLA-A*11:01; NPFFR2; ENSG00000056291; TAA
SVNPIIYGF

SEQ ID NO: 53221 - protein, 9 aa, Homo sapiens
  misc_feature: Table A; Target 53221; HLA-A*23:01; NPFFR2; ENSG00000056291; TAA
SVNPIIYGF

SEQ ID NO: 53222 - protein, 9 aa, Homo sapiens
  misc_feature: Table A; Target 53222; HLA-A*24:02; NPFFR2; ENSG00000056291; TAA
SVNPIIYGF

SEQ ID NO: 53223 - protein, 9 aa, Homo sapiens
  misc_feature: Table A; Target 53223; HLA-A*25:01; NPFFR2; ENSG00000056291; TAA
SVNPIIYGF

SEQ ID NO: 53224 - protein, 9 aa, Homo sapiens
  misc_feature: Table A; Target 53224; HLA-A*26:01; NPFFR2; ENSG00000056291; TAA
SVNPIIYGF

SEQ ID NO: 53225 - protein, 9 aa, Homo sapiens
  misc_feature: Table A; Target 53225; HLA-A*29:02; NPFFR2; ENSG00000056291; TAA
SVNPIIYGF

SEQ ID NO: 53226 - protein, 9 aa, Homo sapiens
  misc_feature: Table A; Target 53226; HLA-A*30:02; NPFFR2; ENSG00000056291; TAA
SVNPIIYGF

SEQ ID NO: 53227 - protein, 9 aa, Homo sapiens
  misc_feature: Table A; Target 53227; HLA-A*31:01; NPFFR2; ENSG00000056291; TAA
SVNPIIYGF

SEQ ID NO: 53228 - protein, 9 aa, Homo sapiens
  misc_feature: Table A; Target 53228; HLA-A*32:01; NPFFR2; ENSG00000056291; TAA
SVNPIIYGF

SEQ ID NO: 53229 - protein, 9 aa, Homo sapiens
  misc_feature: Table A; Target 53229; HLA-A*33:01; NPFFR2; ENSG00000056291; TAA
SVNPIIYGF

SEQ ID NO: 53230 - protein, 9 aa, Homo sapiens
  misc_feature: Table A; Target 53230; HLA-A*33:03; NPFFR2; ENSG00000056291; TAA
SVNPIIYGF

SEQ ID NO: 53231 - protein, 9 aa, Homo sapiens
  misc_feature: Table A; Target 53231; HLA-A*68:01; NPFFR2; ENSG00000056291; TAA
SVNPIIYGF

SEQ ID NO: 53232 - protein, 9 aa, Homo sapiens
  misc_feature: Table A; Target 53232; HLA-A*68:02; NPFFR2; ENSG00000056291; TAA
SVNPIIYGF

SEQ ID NO: 53233 - protein, 9 aa, Homo sapiens
  misc_feature: Table A; Target 53233; HLA-B*13:02; NPFFR2; ENSG00000056291; TAA
SVNPIIYGF

SEQ ID NO: 53234 - protein, 9 aa, Homo sapiens
  misc_feature: Table A; Target 53234; HLA-B*15:01; NPFFR2; ENSG00000056291; TAA
SVNPIIYGF

SEQ ID NO: 53235 - protein, 9 aa, Homo sapiens
  misc_feature: Table A; Target 53235; HLA-B*27:02; NPFFR2; ENSG00000056291; TAA
SVNPIIYGF

SEQ ID NO: 53236 - protein, 9 aa, Homo sapiens
  misc_feature: Table A; Target 53236; HLA-B*27:05; NPFFR2; ENSG00000056291; TAA
SVNPIIYGF

SEQ ID NO: 53237 - protein, 9 aa, Homo sapiens
  misc_feature: Table A; Target 53237; HLA-B*35:01; NPFFR2; ENSG00000056291; TAA
SVNPIIYGF

SEQ ID NO: 53238 - protein, 9 aa, Homo sapiens
  misc_feature: Table A; Target 53238; HLA-B*44:02; NPFFR2; ENSG00000056291; TAA
SVNPIIYGF

SEQ ID NO: 53239 - protein, 9 aa, Homo sapiens
  misc_feature: Table A; Target 53239; HLA-B*44:03; NPFFR2; ENSG00000056291; TAA
SVNPIIYGF

SEQ ID NO: 53240 - protein, 9 aa, Homo sapiens
  misc_feature: Table A; Target 53240; HLA-B*57:01; NPFFR2; ENSG00000056291; TAA
SVNPIIYGF

SEQ ID NO: 53241 - protein, 9 aa, Homo sapiens
  misc_feature: Table A; Target 53241; HLA-B*58:01; NPFFR2; ENSG00000056291; TAA
SVNPIIYGF

SEQ ID NO: 53242 - protein, 9 aa, Homo sapiens
  misc_feature: Table A; Target 53242; HLA-C*02:02; NPFFR2; ENSG00000056291; TAA
SVNPIIYGF

SEQ ID NO: 53243 - protein, 9 aa, Homo sapiens
  misc_feature: Table A; Target 53243; HLA-C*07:06; NPFFR2; ENSG00000056291; TAA
SVNPIIYGF

SEQ ID NO: 53244 - protein, 9 aa, Homo sapiens
  misc_feature: Table A; Target 53244; HLA-C*16:04; NPFFR2; ENSG00000056291; TAA
SVNPIIYGF

SEQ ID NO: 53245 - protein, 10 aa, Homo sapiens
  misc_feature: Table A; Target 53245; HLA-A*25:01; NPFFR2; ENSG00000056291; TAA
SVNPIIYGFF

SEQ ID NO: 53246 - protein, 10 aa, Homo sapiens
  misc_feature: Table A; Target 53246; HLA-A*29:02; NPFFR2; ENSG00000056291; TAA
SVNPIIYGFF

SEQ ID NO: 53247 - protein, 10 aa, Homo sapiens
  misc_feature: Table A; Target 53247; HLA-A*25:01; NPFFR2; ENSG00000056291; TAA
SVQQRGGPAW

SEQ ID NO: 53248 - protein, 10 aa, Homo sapiens
  misc_feature: Table A; Target 53248; HLA-A*32:01; NPFFR2; ENSG00000056291; TAA
SVQQRGGPAW

SEQ ID NO: 53249 - protein, 8 aa, Homo sapiens
  misc_feature: Table A; Target 53249; HLA-B*51:01; NPFFR2; ENSG00000056291; TAA
TAFVIIMI

SEQ ID NO: 53250 - protein, 9 aa, Homo sapiens
  misc_feature: Table A; Target 53250; HLA-B*51:01; NPFFR2; ENSG00000056291; TAA
TAFVIIMII

SEQ ID NO: 53251 - protein, 9 aa, Homo sapiens
  misc_feature: Table A; Target 53251; HLA-C*12:03; NPFFR2; ENSG00000056291; TAA
TAFVIIMII

SEQ ID NO: 53252 - protein, 8 aa, Homo sapiens
  misc_feature: Table A; Target 53252; HLA-A*31:01; NPFFR2; ENSG00000056291; TAA
TAKSSWSR

SEQ ID NO: 53253 - protein, 8 aa, Homo sapiens
  misc_feature: Table A; Target 53253; HLA-A*33:03; NPFFR2; ENSG00000056291; TAA
TAKSSWSR

SEQ ID NO: 53254 - protein, 10 aa, Homo sapiens
  misc_feature: Table A; Target 53254; HLA-A*23:01; NPFFR2; ENSG00000056291; TAA
TFQNPHGETL

SEQ ID NO: 53255 - protein, 10 aa, Homo sapiens
  misc_feature: Table A; Target 53255; HLA-C*04:01; NPFFR2; ENSG00000056291; TAA
TFQNPHGETL

SEQ ID NO: 53256 - protein, 10 aa, Homo sapiens
  misc_feature: Table A; Target 53256; HLA-C*14:02; NPFFR2; ENSG00000056291; TAA
TFQNPHGETL

SEQ ID NO: 53257 - protein, 8 aa, Homo sapiens
  misc_feature: Table A; Target 53257; HLA-B*08:01; NPFFR2; ENSG00000056291; TAA
TIKTAFVI

SEQ ID NO: 53258 - protein, 9 aa, Homo sapiens
  misc_feature: Table A; Target 53258; HLA-A*23:01; NPFFR2; ENSG00000056291; TAA
TIMSPSAVM

SEQ ID NO: 53259 - protein, 9 aa, Homo sapiens
  misc_feature: Table A; Target 53259; HLA-A*26:01; NPFFR2; ENSG00000056291; TAA
TIMSPSAVM

SEQ ID NO: 53260 - protein, 9 aa, Homo sapiens
  misc_feature: Table A; Target 53260; HLA-A*32:01; NPFFR2; ENSG00000056291; TAA
TIMSPSAVM

SEQ ID NO: 53261 - protein, 9 aa, Homo sapiens
  misc_feature: Table A; Target 53261; HLA-B*07:02; NPFFR2; ENSG00000056291; TAA
TIMSPSAVM

SEQ ID NO: 53262 - protein, 9 aa, Homo sapiens
  misc_feature: Table A; Target 53262; HLA-B*15:01; NPFFR2; ENSG00000056291; TAA
TIMSPSAVM

SEQ ID NO: 53263 - protein, 9 aa, Homo sapiens
  misc_feature: Table A; Target 53263; HLA-B*15:03; NPFFR2; ENSG00000056291; TAA
TIMSPSAVM

SEQ ID NO: 53264 - protein, 9 aa, Homo sapiens
  misc_feature: Table A; Target 53264; HLA-B*35:01; NPFFR2; ENSG00000056291; TAA
TIMSPSAVM

SEQ ID NO: 53265 - protein, 9 aa, Homo sapiens
  misc_feature: Table A; Target 53265; HLA-B*35:03; NPFFR2; ENSG00000056291; TAA
TIMSPSAVM

SEQ ID NO: 53266 - protein, 9 aa, Homo sapiens
  misc_feature: Table A; Target 53266; HLA-B*39:01; NPFFR2; ENSG00000056291; TAA
TIMSPSAVM

SEQ ID NO: 53267 - protein, 9 aa, Homo sapiens
  misc_feature: Table A; Target 53267; HLA-B*46:01; NPFFR2; ENSG00000056291; TAA
TIMSPSAVM

SEQ ID NO: 53268 - protein, 9 aa, Homo sapiens
  misc_feature: Table A; Target 53268; HLA-C*01:02; NPFFR2; ENSG00000056291; TAA
TIMSPSAVM

SEQ ID NO: 53269 - protein, 9 aa, Homo sapiens
  misc_feature: Table A; Target 53269; HLA-C*03:03; NPFFR2; ENSG00000056291; TAA
TIMSPSAVM

SEQ ID NO: 53270 - protein, 9 aa, Homo sapiens
  misc_feature: Table A; Target 53270; HLA-C*03:04; NPFFR2; ENSG00000056291; TAA
TIMSPSAVM

SEQ ID NO: 53271 - protein, 9 aa, Homo sapiens
  misc_feature: Table A; Target 53271; HLA-C*07:02; NPFFR2; ENSG00000056291; TAA
TIMSPSAVM

SEQ ID NO: 53272 - protein, 9 aa, Homo sapiens
  misc_feature: Table A; Target 53272; HLA-C*07:04; NPFFR2; ENSG00000056291; TAA
TIMSPSAVM

SEQ ID NO: 53273 - protein, 9 aa, Homo sapiens
  misc_feature: Table A; Target 53273; HLA-C*14:02; NPFFR2; ENSG00000056291; TAA
TIMSPSAVM

SEQ ID NO: 53274 - protein, 10 aa, Homo sapiens
  misc_feature: Table A; Target 53274; HLA-C*01:02; NPFFR2; ENSG00000056291; TAA
TIMSPSAVML

SEQ ID NO: 53275 - protein, 11 aa, Homo sapiens
  misc_feature: Table A; Target 53275; HLA-A*03:02; NPFFR2; ENSG00000056291; TAA
TIMSPSAVMLH

SEQ ID NO: 53276 - protein, 10 aa, Homo sapiens
  misc_feature: Table A; Target 53276; HLA-A*25:01; NPFFR2; ENSG00000056291; TAA
TLLDNIIAGW

SEQ ID NO: 53277 - protein, 9 aa, Homo sapiens
  misc_feature: Table A; Target 53277; HLA-A*68:01; NPFFR2; ENSG00000056291; TAA
TLVAIAVDR

SEQ ID NO: 53278 - protein, 9 aa, Homo sapiens
  misc_feature: Table A; Target 53278; HLA-B*27:02; NPFFR2; ENSG00000056291; TAA
TLVAIAVDR

SEQ ID NO: 53279 - protein, 9 aa, Homo sapiens
  misc_feature: Table A; Target 53279; HLA-C*07:06; NPFFR2; ENSG00000056291; TAA
TLVAIAVDR

SEQ ID NO: 53280 - protein, 9 aa, Homo sapiens
  misc_feature: Table A; Target 53280; HLA-B*07:02; NPFFR2; ENSG00000056291; TAA
TPAASWCLL

SEQ ID NO: 53281 - protein, 11 aa, Homo sapiens
  misc_feature: Table A; Target 53281; HLA-B*58:01; NPFFR2; ENSG00000056291; TAA
TSNQLVQESTF

SEQ ID NO: 53282 - protein, 9 aa, Homo sapiens
  misc_feature: Table A; Target 53282; HLA-A*29:02; NPFFR2; ENSG00000056291; TAA
TTVLFANIY

SEQ ID NO: 53283 - protein, 9 aa, Homo sapiens
  misc_feature: Table A; Target 53283; HLA-A*30:02; NPFFR2; ENSG00000056291; TAA
TTVLFANIY

SEQ ID NO: 53284 - protein, 10 aa, Homo sapiens
  misc_feature: Table A; Target 53284; HLA-A*68:02; NPFFR2; ENSG00000056291; TAA
TTVLFANIYL

SEQ ID NO: 53285 - protein, 10 aa, Homo sapiens
  misc_feature: Table A; Target 53285; HLA-A*68:02; NPFFR2; ENSG00000056291; TAA
TVTNLFILNL

SEQ ID NO: 53286 - protein, 9 aa, Homo sapiens
  misc_feature: Table A; Target 53286; HLA-A*31:01; NPFFR2; ENSG00000056291; TAA
TVVCFIVMR

SEQ ID NO: 53287 - protein, 9 aa, Homo sapiens
  misc_feature: Table A; Target 53287; HLA-A*68:01; NPFFR2; ENSG00000056291; TAA
TVVCFIVMR

SEQ ID NO: 53288 - protein, 9 aa, Homo sapiens
  misc_feature: Table A; Target 53288; HLA-A*26:01; NPFFR2; ENSG00000056291; TAA
VAAIFIISY

SEQ ID NO: 53289 - protein, 9 aa, Homo sapiens
  misc_feature: Table A; Target 53289; HLA-A*30:02; NPFFR2; ENSG00000056291; TAA
VAAIFIISY

SEQ ID NO: 53290 - protein, 9 aa, Homo sapiens
  misc_feature: Table A; Target 53290; HLA-B*15:01; NPFFR2; ENSG00000056291; TAA
VAAIFIISY

SEQ ID NO: 53291 - protein, 9 aa, Homo sapiens
  misc_feature: Table A; Target 53291; HLA-B*15:03; NPFFR2; ENSG00000056291; TAA
VAAIFIISY

SEQ ID NO: 53292 - protein, 9 aa, Homo sapiens
  misc_feature: Table A; Target 53292; HLA-B*18:01; NPFFR2; ENSG00000056291; TAA
VAAIFIISY

SEQ ID NO: 53293 - protein, 9 aa, Homo sapiens
  misc_feature: Table A; Target 53293; HLA-B*35:01; NPFFR2; ENSG00000056291; TAA
VAAIFIISY

SEQ ID NO: 53294 - protein, 9 aa, Homo sapiens
  misc_feature: Table A; Target 53294; HLA-B*46:01; NPFFR2; ENSG00000056291; TAA
VAAIFIISY

SEQ ID NO: 53295 - protein, 9 aa, Homo sapiens
  misc_feature: Table A; Target 53295; HLA-C*02:02; NPFFR2; ENSG00000056291; TAA
VAAIFIISY

SEQ ID NO: 53296 - protein, 9 aa, Homo sapiens
  misc_feature: Table A; Target 53296; HLA-C*12:03; NPFFR2; ENSG00000056291; TAA
VAAIFIISY

SEQ ID NO: 53297 - protein, 9 aa, Homo sapiens
  misc_feature: Table A; Target 53297; HLA-C*16:01; NPFFR2; ENSG00000056291; TAA
VAAIFIISY

SEQ ID NO: 53298 - protein, 9 aa, Homo sapiens
  misc_feature: Table A; Target 53298; HLA-C*16:04; NPFFR2; ENSG00000056291; TAA
VAAIFIISY

SEQ ID NO: 53299 - protein, 8 aa, Homo sapiens
  misc_feature: Table A; Target 53299; HLA-A*23:01; NPFFR2; ENSG00000056291; TAA
VAASVFTL

SEQ ID NO: 53300 - protein, 8 aa, Homo sapiens
  misc_feature: Table A; Target 53300; HLA-A*30:01; NPFFR2; ENSG00000056291; TAA
VAASVFTL

SEQ ID NO: 53301 - protein, 8 aa, Homo sapiens
  misc_feature: Table A; Target 53301; HLA-B*46:01; NPFFR2; ENSG00000056291; TAA
VAASVFTL

SEQ ID NO: 53302 - protein, 8 aa, Homo sapiens
  misc_feature: Table A; Target 53302; HLA-B*51:01; NPFFR2; ENSG00000056291; TAA
VAASVFTL

SEQ ID NO: 53303 - protein, 8 aa, Homo sapiens
  misc_feature: Table A; Target 53303; HLA-B*58:01; NPFFR2; ENSG00000056291; TAA
VAASVFTL

SEQ ID NO: 53304 - protein, 8 aa, Homo sapiens
  misc_feature: Table A; Target 53304; HLA-C*02:02; NPFFR2; ENSG00000056291; TAA
VAASVFTL

SEQ ID NO: 53305 - protein, 8 aa, Homo sapiens
  misc_feature: Table A; Target 53305; HLA-C*03:03; NPFFR2; ENSG00000056291; TAA
VAASVFTL

SEQ ID NO: 53306 - protein, 8 aa, Homo sapiens
  misc_feature: Table A; Target 53306; HLA-C*03:04; NPFFR2; ENSG00000056291; TAA
VAASVFTL

SEQ ID NO: 53307 - protein, 8 aa, Homo sapiens
  misc_feature: Table A; Target 53307; HLA-C*05:01; NPFFR2; ENSG00000056291; TAA
VAASVFTL

SEQ ID NO: 53308 - protein, 8 aa, Homo sapiens
  misc_feature: Table A; Target 53308; HLA-C*12:03; NPFFR2; ENSG00000056291; TAA
VAASVFTL

SEQ ID NO: 53309 - protein, 8 aa, Homo sapiens
  misc_feature: Table A; Target 53309; HLA-C*16:01; NPFFR2; ENSG00000056291; TAA
VAASVFTL

SEQ ID NO: 53310 - protein, 8 aa, Homo sapiens
  misc_feature: Table A; Target 53310; HLA-C*16:02; NPFFR2; ENSG00000056291; TAA
VAASVFTL

SEQ ID NO: 53311 - protein, 8 aa, Homo sapiens
  misc_feature: Table A; Target 53311; HLA-C*16:04; NPFFR2; ENSG00000056291; TAA
VAASVFTL

SEQ ID NO: 53312 - protein, 9 aa, Homo sapiens
  misc_feature: Table A; Target 53312; HLA-A*02:01; NPFFR2; ENSG00000056291; TAA
VAASVFTLV

SEQ ID NO: 53313 - protein, 9 aa, Homo sapiens
  misc_feature: Table A; Target 53313; HLA-A*02:03; NPFFR2; ENSG00000056291; TAA
VAASVFTLV

SEQ ID NO: 53314 - protein, 9 aa, Homo sapiens
  misc_feature: Table A; Target 53314; HLA-A*02:07; NPFFR2; ENSG00000056291; TAA
VAASVFTLV

SEQ ID NO: 53315 - protein, 9 aa, Homo sapiens
  misc_feature: Table A; Target 53315; HLA-A*23:01; NPFFR2; ENSG00000056291; TAA
VAASVFTLV

SEQ ID NO: 53316 - protein, 9 aa, Homo sapiens
  misc_feature: Table A; Target 53316; HLA-A*24:02; NPFFR2; ENSG00000056291; TAA
VAASVFTLV

SEQ ID NO: 53317 - protein, 9 aa, Homo sapiens
  misc_feature: Table A; Target 53317; HLA-A*26:01; NPFFR2; ENSG00000056291; TAA
VAASVFTLV

SEQ ID NO: 53318 - protein, 9 aa, Homo sapiens
  misc_feature: Table A; Target 53318; HLA-A*32:01; NPFFR2; ENSG00000056291; TAA
VAASVFTLV

SEQ ID NO: 53319 - protein, 9 aa, Homo sapiens
  misc_feature: Table A; Target 53319; HLA-A*68:02; NPFFR2; ENSG00000056291; TAA
VAASVFTLV

SEQ ID NO: 53320 - protein, 9 aa, Homo sapiens
  misc_feature: Table A; Target 53320; HLA-B*13:02; NPFFR2; ENSG00000056291; TAA
VAASVFTLV

SEQ ID NO: 53321 - protein, 9 aa, Homo sapiens
  misc_feature: Table A; Target 53321; HLA-B*35:03; NPFFR2; ENSG00000056291; TAA
VAASVFTLV

SEQ ID NO: 53322 - protein, 9 aa, Homo sapiens
  misc_feature: Table A; Target 53322; HLA-B*39:01; NPFFR2; ENSG00000056291; TAA
VAASVFTLV

SEQ ID NO: 53323 - protein, 9 aa, Homo sapiens
  misc_feature: Table A; Target 53323; HLA-B*46:01; NPFFR2; ENSG00000056291; TAA
VAASVFTLV

SEQ ID NO: 53324 - protein, 9 aa, Homo sapiens
  misc_feature: Table A; Target 53324; HLA-B*49:01; NPFFR2; ENSG00000056291; TAA
VAASVFTLV

SEQ ID NO: 53325 - protein, 9 aa, Homo sapiens
  misc_feature: Table A; Target 53325; HLA-B*51:01; NPFFR2; ENSG00000056291; TAA
VAASVFTLV

SEQ ID NO: 53326 - protein, 9 aa, Homo sapiens
  misc_feature: Table A; Target 53326; HLA-B*54:01; NPFFR2; ENSG00000056291; TAA
VAASVFTLV

SEQ ID NO: 53327 - protein, 9 aa, Homo sapiens
  misc_feature: Table A; Target 53327; HLA-B*55:01; NPFFR2; ENSG00000056291; TAA
VAASVFTLV

SEQ ID NO: 53328 - protein, 9 aa, Homo sapiens
  misc_feature: Table A; Target 53328; HLA-B*56:01; NPFFR2; ENSG00000056291; TAA
VAASVFTLV

SEQ ID NO: 53329 - protein, 9 aa, Homo sapiens
  misc_feature: Table A; Target 53329; HLA-B*58:01; NPFFR2; ENSG00000056291; TAA
VAASVFTLV

SEQ ID NO: 53330 - protein, 9 aa, Homo sapiens
  misc_feature: Table A; Target 53330; HLA-C*02:02; NPFFR2; ENSG00000056291; TAA
VAASVFTLV

SEQ ID NO: 53331 - protein, 9 aa, Homo sapiens
  misc_feature: Table A; Target 53331; HLA-C*03:03; NPFFR2; ENSG00000056291; TAA
VAASVFTLV

SEQ ID NO: 53332 - protein, 9 aa, Homo sapiens
  misc_feature: Table A; Target 53332; HLA-C*03:04; NPFFR2; ENSG00000056291; TAA
VAASVFTLV

SEQ ID NO: 53333 - protein, 9 aa, Homo sapiens
  misc_feature: Table A; Target 53333; HLA-C*05:01; NPFFR2; ENSG00000056291; TAA
VAASVFTLV

SEQ ID NO: 53334 - protein, 9 aa, Homo sapiens
  misc_feature: Table A; Target 53334; HLA-C*12:03; NPFFR2; ENSG00000056291; TAA
VAASVFTLV

SEQ ID NO: 53335 - protein, 9 aa, Homo sapiens
  misc_feature: Table A; Target 53335; HLA-C*16:02; NPFFR2; ENSG00000056291; TAA
VAASVFTLV

SEQ ID NO: 53336 - protein, 9 aa, Homo sapiens
  misc_feature: Table A; Target 53336; HLA-C*16:04; NPFFR2; ENSG00000056291; TAA
VAASVFTLV

SEQ ID NO: 53337 - protein, 8 aa, Homo sapiens
  misc_feature: Table A; Target 53337; HLA-B*58:01; NPFFR2; ENSG00000056291; TAA
VAIAVDRF

SEQ ID NO: 53338 - protein, 9 aa, Homo sapiens
  misc_feature: Table A; Target 53338; HLA-B*57:01; NPFFR2; ENSG00000056291; TAA
VALLFILSW

SEQ ID NO: 53339 - protein, 9 aa, Homo sapiens
  misc_feature: Table A; Target 53339; HLA-A*23:01; NPFFR2; ENSG00000056291; TAA
VFTLVAIAV

SEQ ID NO: 53340 - protein, 9 aa, Homo sapiens
  misc_feature: Table A; Target 53340; HLA-C*14:02; NPFFR2; ENSG00000056291; TAA
VFTLVAIAV

SEQ ID NO: 53341 - protein, 9 aa, Homo sapiens
  misc_feature: Table A; Target 53341; HLA-A*02:04; NPFFR2; ENSG00000056291; TAA
VIIMIIWVL

SEQ ID NO: 53342 - protein, 9 aa, Homo sapiens
  misc_feature: Table A; Target 53342; HLA-A*02:01; NPFFR2; ENSG00000056291; TAA
VLFANIYLA

SEQ ID NO: 53343 - protein, 9 aa, Homo sapiens
  misc_feature: Table A; Target 53343; HLA-A*02:03; NPFFR2; ENSG00000056291; TAA
VLFANIYLA

SEQ ID NO: 53344 - protein, 9 aa, Homo sapiens
  misc_feature: Table A; Target 53344; HLA-A*02:04; NPFFR2; ENSG00000056291; TAA
VLFANIYLA

SEQ ID NO: 53345 - protein, 11 aa, Homo sapiens
  misc_feature: Table A; Target 53345; HLA-A*02:01; NPFFR2; ENSG00000056291; TAA
VLFANIYLAPL

SEQ ID NO: 53346 - protein, 11 aa, Homo sapiens
  misc_feature: Table A; Target 53346; HLA-A*02:03; NPFFR2; ENSG00000056291; TAA
VLFANIYLAPL

SEQ ID NO: 53347 - protein, 11 aa, Homo sapiens
  misc_feature: Table A; Target 53347; HLA-A*02:04; NPFFR2; ENSG00000056291; TAA
VLFANIYLAPL

SEQ ID NO: 53348 - protein, 9 aa, Homo sapiens
  misc_feature: Table A; Target 53348; HLA-A*02:01; NPFFR2; ENSG00000056291; TAA
VLINTSNQL

SEQ ID NO: 53349 - protein, 9 aa, Homo sapiens
  misc_feature: Table A; Target 53349; HLA-A*02:03; NPFFR2; ENSG00000056291; TAA
VLINTSNQL

SEQ ID NO: 53350 - protein, 9 aa, Homo sapiens
  misc_feature: Table A; Target 53350; HLA-A*02:04; NPFFR2; ENSG00000056291; TAA
VLINTSNQL

SEQ ID NO: 53351 - protein, 9 aa, Homo sapiens
  misc_feature: Table A; Target 53351; HLA-A*02:07; NPFFR2; ENSG00000056291; TAA
VLINTSNQL

SEQ ID NO: 53352 - protein, 9 aa, Homo sapiens
  misc_feature: Table A; Target 53352; HLA-A*23:01; NPFFR2; ENSG00000056291; TAA
VLINTSNQL

SEQ ID NO: 53353 - protein, 9 aa, Homo sapiens
  misc_feature: Table A; Target 53353; HLA-A*24:02; NPFFR2; ENSG00000056291; TAA
VLINTSNQL

SEQ ID NO: 53354 - protein, 9 aa, Homo sapiens
  misc_feature: Table A; Target 53354; HLA-A*32:01; NPFFR2; ENSG00000056291; TAA
VLINTSNQL

SEQ ID NO: 53355 - protein, 9 aa, Homo sapiens
  misc_feature: Table A; Target 53355; HLA-B*13:02; NPFFR2; ENSG00000056291; TAA
VLINTSNQL

SEQ ID NO: 53356 - protein, 9 aa, Homo sapiens
  misc_feature: Table A; Target 53356; HLA-B*15:01; NPFFR2; ENSG00000056291; TAA
VLINTSNQL

SEQ ID NO: 53357 - protein, 9 aa, Homo sapiens
  misc_feature: Table A; Target 53357; HLA-B*35:03; NPFFR2; ENSG00000056291; TAA
VLINTSNQL

SEQ ID NO: 53358 - protein, 9 aa, Homo sapiens
  misc_feature: Table A; Target 53358; HLA-B*38:01; NPFFR2; ENSG00000056291; TAA
VLINTSNQL

SEQ ID NO: 53359 - protein, 9 aa, Homo sapiens
  misc_feature: Table A; Target 53359; HLA-B*39:01; NPFFR2; ENSG00000056291; TAA
VLINTSNQL

SEQ ID NO: 53360 - protein, 9 aa, Homo sapiens
  misc_feature: Table A; Target 53360; HLA-B*40:01; NPFFR2; ENSG00000056291; TAA
VLINTSNQL

SEQ ID NO: 53361 - protein, 9 aa, Homo sapiens
  misc_feature: Table A; Target 53361; HLA-B*46:01; NPFFR2; ENSG00000056291; TAA
VLINTSNQL

SEQ ID NO: 53362 - protein, 9 aa, Homo sapiens
  misc_feature: Table A; Target 53362; HLA-B*55:01; NPFFR2; ENSG00000056291; TAA
VLINTSNQL

SEQ ID NO: 53363 - protein, 9 aa, Homo sapiens
  misc_feature: Table A; Target 53363; HLA-B*58:01; NPFFR2; ENSG00000056291; TAA
VLINTSNQL

SEQ ID NO: 53364 - protein, 9 aa, Homo sapiens
  misc_feature: Table A; Target 53364; HLA-C*01:02; NPFFR2; ENSG00000056291; TAA
VLINTSNQL

SEQ ID NO: 53365 - protein, 9 aa, Homo sapiens
  misc_feature: Table A; Target 53365; HLA-C*03:03; NPFFR2; ENSG00000056291; TAA
VLINTSNQL

SEQ ID NO: 53366 - protein, 9 aa, Homo sapiens
  misc_feature: Table A; Target 53366; HLA-C*03:04; NPFFR2; ENSG00000056291; TAA
VLINTSNQL

SEQ ID NO: 53367 - protein, 9 aa, Homo sapiens
  misc_feature: Table A; Target 53367; HLA-C*07:04; NPFFR2; ENSG00000056291; TAA
VLINTSNQL

SEQ ID NO: 53368 - protein, 9 aa, Homo sapiens
  misc_feature: Table A; Target 53368; HLA-C*14:02; NPFFR2; ENSG00000056291; TAA
VLINTSNQL

SEQ ID NO: 53369 - protein, 9 aa, Homo sapiens
  misc_feature: Table A; Target 53369; HLA-C*16:01; NPFFR2; ENSG00000056291; TAA
VLINTSNQL

SEQ ID NO: 53370 - protein, 9 aa, Homo sapiens
  misc_feature: Table A; Target 53370; HLA-C*16:02; NPFFR2; ENSG00000056291; TAA
VLINTSNQL

SEQ ID NO: 53371 - protein, 10 aa, Homo sapiens
  misc_feature: Table A; Target 53371; HLA-A*02:01; NPFFR2; ENSG00000056291; TAA
VLINTSNQLV

SEQ ID NO: 53372 - protein, 10 aa, Homo sapiens
  misc_feature: Table A; Target 53372; HLA-A*02:03; NPFFR2; ENSG00000056291; TAA
VLINTSNQLV

SEQ ID NO: 53373 - protein, 9 aa, Homo sapiens
  misc_feature: Table A; Target 53373; HLA-A*03:02; NPFFR2; ENSG00000056291; TAA
VMLHVQEEK

SEQ ID NO: 53374 - protein, 10 aa, Homo sapiens
  misc_feature: Table A; Target 53374; HLA-A*29:02; NPFFR2; ENSG00000056291; TAA
VMLHVQEEKY

SEQ ID NO: 53375 - protein, 10 aa, Homo sapiens
  misc_feature: Table A; Target 53375; HLA-A*30:02; NPFFR2; ENSG00000056291; TAA
VMLHVQEEKY

SEQ ID NO: 53376 - protein, 8 aa, Homo sapiens
  misc_feature: Table A; Target 53376; HLA-B*08:01; NPFFR2; ENSG00000056291; TAA
VNDTKHHL

SEQ ID NO: 53377 - protein, 9 aa, Homo sapiens
  misc_feature: Table A; Target 53377; HLA-A*01:01; NPFFR2; ENSG00000056291; TAA
VNDTKHHLY

SEQ ID NO: 53378 - protein, 9 aa, Homo sapiens
  misc_feature: Table A; Target 53378; HLA-A*29:02; NPFFR2; ENSG00000056291; TAA
VNDTKHHLY

SEQ ID NO: 53379 - protein, 9 aa, Homo sapiens
  misc_feature: Table A; Target 53379; HLA-A*02:01; NPFFR2; ENSG00000056291; TAA
VQEEKYYRV

SEQ ID NO: 53380 - protein, 9 aa, Homo sapiens
  misc_feature: Table A; Target 53380; HLA-A*02:04; NPFFR2; ENSG00000056291; TAA
VQEEKYYRV

SEQ ID NO: 53381 - protein, 9 aa, Homo sapiens
  misc_feature: Table A; Target 53381; HLA-A*02:07; NPFFR2; ENSG00000056291; TAA
VQEEKYYRV

SEQ ID NO: 53382 - protein, 11 aa, Homo sapiens
  misc_feature: Table A; Target 53382; HLA-B*15:01; NPFFR2; ENSG00000056291; TAA
VQGISVAASVF

SEQ ID NO: 53383 - protein, 9 aa, Homo sapiens
  misc_feature: Table A; Target 53383; HLA-A*32:01; NPFFR2; ENSG00000056291; TAA
VQQRGGPAW

SEQ ID NO: 53384 - protein, 9 aa, Homo sapiens
  misc_feature: Table A; Target 53384; HLA-B*15:01; NPFFR2; ENSG00000056291; TAA
VQQRGGPAW

SEQ ID NO: 53385 - protein, 8 aa, Homo sapiens
  misc_feature: Table A; Target 53385; HLA-B*27:05; NPFFR2; ENSG00000056291; TAA
VRLNSQNK

SEQ ID NO: 53386 - protein, 11 aa, Homo sapiens
  misc_feature: Table A; Target 53386; HLA-C*07:06; NPFFR2; ENSG00000056291; TAA
VSSAPDKEAGR

SEQ ID NO: 53387 - protein, 9 aa, Homo sapiens
  misc_feature: Table A; Target 53387; HLA-A*02:04; NPFFR2; ENSG00000056291; TAA
VTNLFILNL

SEQ ID NO: 53388 - protein, 9 aa, Homo sapiens
  misc_feature: Table A; Target 53388; HLA-A*03:01; NPFFR2; ENSG00000056291; TAA
VTNLFILNL

SEQ ID NO: 53389 - protein, 9 aa, Homo sapiens
  misc_feature: Table A; Target 53389; HLA-A*02:01; NPFFR2; ENSG00000056291; TAA
VVYPFKPKL

SEQ ID NO: 53390 - protein, 9 aa, Homo sapiens
  misc_feature: Table A; Target 53390; HLA-A*02:04; NPFFR2; ENSG00000056291; TAA
VVYPFKPKL

SEQ ID NO: 53391 - protein, 9 aa, Homo sapiens
  misc_feature: Table A; Target 53391; HLA-A*02:07; NPFFR2; ENSG00000056291; TAA
VVYPFKPKL

SEQ ID NO: 53392 - protein, 9 aa, Homo sapiens
  misc_feature: Table A; Target 53392; HLA-A*03:01; NPFFR2; ENSG00000056291; TAA
VVYPFKPKL

SEQ ID NO: 53393 - protein, 9 aa, Homo sapiens
  misc_feature: Table A; Target 53393; HLA-A*11:01; NPFFR2; ENSG00000056291; TAA
VVYPFKPKL

SEQ ID NO: 53394 - protein, 9 aa, Homo sapiens
  misc_feature: Table A; Target 53394; HLA-A*23:01; NPFFR2; ENSG00000056291; TAA
VVYPFKPKL

SEQ ID NO: 53395 - protein, 9 aa, Homo sapiens
  misc_feature: Table A; Target 53395; HLA-A*24:02; NPFFR2; ENSG00000056291; TAA
VVYPFKPKL

SEQ ID NO: 53396 - protein, 9 aa, Homo sapiens
  misc_feature: Table A; Target 53396; HLA-A*31:01; NPFFR2; ENSG00000056291; TAA
VVYPFKPKL

SEQ ID NO: 53397 - protein, 9 aa, Homo sapiens
  misc_feature: Table A; Target 53397; HLA-A*32:01; NPFFR2; ENSG00000056291; TAA
VVYPFKPKL

SEQ ID NO: 53398 - protein, 9 aa, Homo sapiens
  misc_feature: Table A; Target 53398; HLA-A*68:02; NPFFR2; ENSG00000056291; TAA
VVYPFKPKL

SEQ ID NO: 53399 - protein, 9 aa, Homo sapiens
  misc_feature: Table A; Target 53399; HLA-B*13:02; NPFFR2; ENSG00000056291; TAA
VVYPFKPKL

SEQ ID NO: 53400 - protein, 9 aa, Homo sapiens
  misc_feature: Table A; Target 53400; HLA-B*40:02; NPFFR2; ENSG00000056291; TAA
VVYPFKPKL

SEQ ID NO: 53401 - protein, 9 aa, Homo sapiens
  misc_feature: Table A; Target 53401; HLA-B*51:01; NPFFR2; ENSG00000056291; TAA
VVYPFKPKL

SEQ ID NO: 53402 - protein, 9 aa, Homo sapiens
  misc_feature: Table A; Target 53402; HLA-B*57:01; NPFFR2; ENSG00000056291; TAA
VVYPFKPKL

SEQ ID NO: 53403 - protein, 9 aa, Homo sapiens
  misc_feature: Table A; Target 53403; HLA-B*58:01; NPFFR2; ENSG00000056291; TAA
VVYPFKPKL

SEQ ID NO: 53404 - protein, 9 aa, Homo sapiens
  misc_feature: Table A; Target 53404; HLA-C*02:02; NPFFR2; ENSG00000056291; TAA
VVYPFKPKL

SEQ ID NO: 53405 - protein, 9 aa, Homo sapiens
  misc_feature: Table A; Target 53405; HLA-C*12:03; NPFFR2; ENSG00000056291; TAA
VVYPFKPKL

SEQ ID NO: 53406 - protein, 8 aa, Homo sapiens
  misc_feature: Table A; Target 53406; HLA-A*24:02; NPFFR2; ENSG00000056291; TAA
VYPFKPKL

SEQ ID NO: 53407 - protein, 10 aa, Homo sapiens
  misc_feature: Table A; Target 53407; HLA-A*24:02; NPFFR2; ENSG00000056291; TAA
VYPFKPKLTI

SEQ ID NO: 53408 - protein, 9 aa, Homo sapiens
  misc_feature: Table A; Target 53408; HLA-A*02:03; NPFFR2; ENSG00000056291; TAA
WLAFGNSSV

SEQ ID NO: 53409 - protein, 9 aa, Homo sapiens
  misc_feature: Table A; Target 53409; HLA-A*01:01; NPFFR2; ENSG00000056291; TAA
YADLSPNEL

SEQ ID NO: 53410 - protein, 9 aa, Homo sapiens
  misc_feature: Table A; Target 53410; HLA-A*02:07; NPFFR2; ENSG00000056291; TAA
YADLSPNEL

SEQ ID NO: 53411 - protein, 9 aa, Homo sapiens
  misc_feature: Table A; Target 53411; HLA-A*23:01; NPFFR2; ENSG00000056291; TAA
YADLSPNEL

SEQ ID NO: 53412 - protein, 9 aa, Homo sapiens
  misc_feature: Table A; Target 53412; HLA-A*30:01; NPFFR2; ENSG00000056291; TAA
YADLSPNEL

SEQ ID NO: 53413 - protein, 9 aa, Homo sapiens
  misc_feature: Table A; Target 53413; HLA-A*32:01; NPFFR2; ENSG00000056291; TAA
YADLSPNEL

SEQ ID NO: 53414 - protein, 9 aa, Homo sapiens
  misc_feature: Table A; Target 53414; HLA-B*18:01; NPFFR2; ENSG00000056291; TAA
YADLSPNEL

SEQ ID NO: 53415 - protein, 9 aa, Homo sapiens
  misc_feature: Table A; Target 53415; HLA-B*27:05; NPFFR2; ENSG00000056291; TAA
YADLSPNEL

SEQ ID NO: 53416 - protein, 9 aa, Homo sapiens
  misc_feature: Table A; Target 53416; HLA-B*35:01; NPFFR2; ENSG00000056291; TAA
YADLSPNEL

SEQ ID NO: 53417 - protein, 9 aa, Homo sapiens
  misc_feature: Table A; Target 53417; HLA-B*35:03; NPFFR2; ENSG00000056291; TAA
YADLSPNEL

SEQ ID NO: 53418 - protein, 9 aa, Homo sapiens
  misc_feature: Table A; Target 53418; HLA-B*38:01; NPFFR2; ENSG00000056291; TAA
YADLSPNEL

SEQ ID NO: 53419 - protein, 9 aa, Homo sapiens
  misc_feature: Table A; Target 53419; HLA-B*39:01; NPFFR2; ENSG00000056291; TAA
YADLSPNEL

SEQ ID NO: 53420 - protein, 9 aa, Homo sapiens
  misc_feature: Table A; Target 53420; HLA-B*40:01; NPFFR2; ENSG00000056291; TAA
YADLSPNEL

SEQ ID NO: 53421 - protein, 9 aa, Homo sapiens
  misc_feature: Table A; Target 53421; HLA-B*46:01; NPFFR2; ENSG00000056291; TAA
YADLSPNEL

SEQ ID NO: 53422 - protein, 9 aa, Homo sapiens
  misc_feature: Table A; Target 53422; HLA-B*51:01; NPFFR2; ENSG00000056291; TAA
YADLSPNEL

SEQ ID NO: 53423 - protein, 9 aa, Homo sapiens
  misc_feature: Table A; Target 53423; HLA-B*54:01; NPFFR2; ENSG00000056291; TAA
YADLSPNEL

SEQ ID NO: 53424 - protein, 9 aa, Homo sapiens
  misc_feature: Table A; Target 53424; HLA-B*55:01; NPFFR2; ENSG00000056291; TAA
YADLSPNEL

SEQ ID NO: 53425 - protein, 9 aa, Homo sapiens
  misc_feature: Table A; Target 53425; HLA-B*58:01; NPFFR2; ENSG00000056291; TAA
YADLSPNEL

SEQ ID NO: 53426 - protein, 9 aa, Homo sapiens
  misc_feature: Table A; Target 53426; HLA-C*01:02; NPFFR2; ENSG00000056291; TAA
YADLSPNEL

SEQ ID NO: 53427 - protein, 9 aa, Homo sapiens
  misc_feature: Table A; Target 53427; HLA-C*02:02; NPFFR2; ENSG00000056291; TAA
YADLSPNEL

SEQ ID NO: 53428 - protein, 9 aa, Homo sapiens
  misc_feature: Table A; Target 53428; HLA-C*03:03; NPFFR2; ENSG00000056291; TAA
YADLSPNEL

SEQ ID NO: 53429 - protein, 9 aa, Homo sapiens
  misc_feature: Table A; Target 53429; HLA-C*03:04; NPFFR2; ENSG00000056291; TAA
YADLSPNEL

SEQ ID NO: 53430 - protein, 9 aa, Homo sapiens
  misc_feature: Table A; Target 53430; HLA-C*04:01; NPFFR2; ENSG00000056291; TAA
YADLSPNEL

SEQ ID NO: 53431 - protein, 9 aa, Homo sapiens
  misc_feature: Table A; Target 53431; HLA-C*05:01; NPFFR2; ENSG00000056291; TAA
YADLSPNEL

SEQ ID NO: 53432 - protein, 9 aa, Homo sapiens
  misc_feature: Table A; Target 53432; HLA-C*07:04; NPFFR2; ENSG00000056291; TAA
YADLSPNEL

SEQ ID NO: 53433 - protein, 9 aa, Homo sapiens
  misc_feature: Table A; Target 53433; HLA-C*12:03; NPFFR2; ENSG00000056291; TAA
YADLSPNEL

SEQ ID NO: 53434 - protein, 9 aa, Homo sapiens
  misc_feature: Table A; Target 53434; HLA-C*14:02; NPFFR2; ENSG00000056291; TAA
YADLSPNEL

SEQ ID NO: 53435 - protein, 9 aa, Homo sapiens
  misc_feature: Table A; Target 53435; HLA-C*16:01; NPFFR2; ENSG00000056291; TAA
YADLSPNEL

SEQ ID NO: 53436 - protein, 9 aa, Homo sapiens
  misc_feature: Table A; Target 53436; HLA-C*16:02; NPFFR2; ENSG00000056291; TAA
YADLSPNEL

SEQ ID NO: 53437 - protein, 9 aa, Homo sapiens
  misc_feature: Table A; Target 53437; HLA-C*16:04; NPFFR2; ENSG00000056291; TAA
YADLSPNEL

SEQ ID NO: 53438 - protein, 11 aa, Homo sapiens
  misc_feature: Table A; Target 53438; HLA-B*38:01; NPFFR2; ENSG00000056291; TAA
YADLSPNELQI

SEQ ID NO: 53439 - protein, 9 aa, Homo sapiens
  misc_feature: Table A; Target 53439; HLA-B*51:01; NPFFR2; ENSG00000056291; TAA
YALKAKSHV

SEQ ID NO: 53440 - protein, 8 aa, Homo sapiens
  misc_feature: Table A; Target 53440; HLA-B*08:01; NPFFR2; ENSG00000056291; TAA
YGRIGISL

SEQ ID NO: 53441 - protein, 8 aa, Homo sapiens
  misc_feature: Table A; Target 53441; HLA-C*03:04; NPFFR2; ENSG00000056291; TAA
YGRIGISL

SEQ ID NO: 53442 - protein, 9 aa, Homo sapiens
  misc_feature: Table A; Target 53442; HLA-A*02:01; NPFFR2; ENSG00000056291; TAA
YIYPFAHWL

SEQ ID NO: 53443 - protein, 9 aa, Homo sapiens
  misc_feature: Table A; Target 53443; HLA-A*02:04; NPFFR2; ENSG00000056291; TAA
YIYPFAHWL

SEQ ID NO: 53444 - protein, 9 aa, Homo sapiens
  misc_feature: Table A; Target 53444; HLA-A*02:07; NPFFR2; ENSG00000056291; TAA
YIYPFAHWL

SEQ ID NO: 53445 - protein, 9 aa, Homo sapiens
  misc_feature: Table A; Target 53445; HLA-A*68:02; NPFFR2; ENSG00000056291; TAA
YIYPFAHWL

SEQ ID NO: 53446 - protein, 8 aa, Homo sapiens
  misc_feature: Table A; Target 53446; HLA-A*02:03; NPFFR2; ENSG00000056291; TAA
YLAPLSLI

SEQ ID NO: 53447 - protein, 8 aa, Homo sapiens
  misc_feature: Table A; Target 53447; HLA-A*02:04; NPFFR2; ENSG00000056291; TAA
YLAPLSLI

SEQ ID NO: 53448 - protein, 9 aa, Homo sapiens
  misc_feature: Table A; Target 53448; HLA-A*02:01; NPFFR2; ENSG00000056291; TAA
YLAPLSLIV

SEQ ID NO: 53449 - protein, 9 aa, Homo sapiens
  misc_feature: Table A; Target 53449; HLA-A*02:03; NPFFR2; ENSG00000056291; TAA
YLAPLSLIV

SEQ ID NO: 53450 - protein, 9 aa, Homo sapiens
  misc_feature: Table A; Target 53450; HLA-A*02:04; NPFFR2; ENSG00000056291; TAA
YLAPLSLIV

SEQ ID NO: 53451 - protein, 9 aa, Homo sapiens
  misc_feature: Table A; Target 53451; HLA-A*02:07; NPFFR2; ENSG00000056291; TAA
YLAPLSLIV

SEQ ID NO: 53452 - protein, 9 aa, Homo sapiens
  misc_feature: Table A; Target 53452; HLA-B*13:02; NPFFR2; ENSG00000056291; TAA
YLAPLSLIV

SEQ ID NO: 53453 - protein, 9 aa, Homo sapiens
  misc_feature: Table A; Target 53453; HLA-C*02:02; NPFFR2; ENSG00000056291; TAA
YLAPLSLIV

SEQ ID NO: 53454 - protein, 10 aa, Homo sapiens
  misc_feature: Table A; Target 53454; HLA-A*02:01; NPFFR2; ENSG00000056291; TAA
YLAPLSLIVI

SEQ ID NO: 53455 - protein, 10 aa, Homo sapiens
  misc_feature: Table A; Target 53455; HLA-A*02:03; NPFFR2; ENSG00000056291; TAA
YLAPLSLIVI

SEQ ID NO: 53456 - protein, 10 aa, Homo sapiens
  misc_feature: Table A; Target 53456; HLA-A*02:04; NPFFR2; ENSG00000056291; TAA
YLAPLSLIVI

SEQ ID NO: 53457 - protein, 11 aa, Homo sapiens
  misc_feature: Table A; Target 53457; HLA-A*02:01; NPFFR2; ENSG00000056291; TAA
YLAPLSLIVIM

SEQ ID NO: 53458 - protein, 11 aa, Homo sapiens
  misc_feature: Table A; Target 53458; HLA-A*02:04; NPFFR2; ENSG00000056291; TAA
YLAPLSLIVIM

SEQ ID NO: 53459 - protein, 9 aa, Homo sapiens
  misc_feature: Table A; Target 53459; HLA-B*54:01; NPFFR2; ENSG00000056291; TAA
YLHQPQVAA

SEQ ID NO: 53460 - protein, 10 aa, Homo sapiens
  misc_feature: Table A; Target 53460; HLA-A*02:03; NPFFR2; ENSG00000056291; TAA
YLHQPQVAAI

SEQ ID NO: 53461 - protein, 10 aa, Homo sapiens
  misc_feature: Table A; Target 53461; HLA-A*02:04; NPFFR2; ENSG00000056291; TAA
YLHQPQVAAI

SEQ ID NO: 53462 - protein, 8 aa, Homo sapiens
  misc_feature: Table A; Target 53462; HLA-B*54:01; NPFFR2; ENSG00000056291; TAA
YPFAHWLA

SEQ ID NO: 53463 - protein, 9 aa, Homo sapiens
  misc_feature: Table A; Target 53463; HLA-A*29:02; NPFFR2; ENSG00000056291; TAA
YPFAHWLAF

SEQ ID NO: 53464 - protein, 9 aa, Homo sapiens
  misc_feature: Table A; Target 53464; HLA-B*35:01; NPFFR2; ENSG00000056291; TAA
YPFAHWLAF

SEQ ID NO: 53465 - protein, 9 aa, Homo sapiens
  misc_feature: Table A; Target 53465; HLA-B*54:01; NPFFR2; ENSG00000056291; TAA
YPFAHWLAF

SEQ ID NO: 53466 - protein, 9 aa, Homo sapiens
  misc_feature: Table A; Target 53466; HLA-B*07:02; NPFFR2; ENSG00000056291; TAA
YPFKPKLTI

SEQ ID NO: 53467 - protein, 9 aa, Homo sapiens
  misc_feature: Table A; Target 53467; HLA-B*08:01; NPFFR2; ENSG00000056291; TAA
YPFKPKLTI

SEQ ID NO: 53468 - protein, 9 aa, Homo sapiens
  misc_feature: Table A; Target 53468; HLA-B*13:02; NPFFR2; ENSG00000056291; TAA
YPFKPKLTI

SEQ ID NO: 53469 - protein, 9 aa, Homo sapiens
  misc_feature: Table A; Target 53469; HLA-B*51:01; NPFFR2; ENSG00000056291; TAA
YPFKPKLTI

SEQ ID NO: 53470 - protein, 9 aa, Homo sapiens
  misc_feature: Table A; Target 53470; HLA-B*54:01; NPFFR2; ENSG00000056291; TAA
YPFKPKLTI

SEQ ID NO: 53471 - protein, 9 aa, Homo sapiens
  misc_feature: Table A; Target 53471; HLA-B*56:01; NPFFR2; ENSG00000056291; TAA
YPFKPKLTI

SEQ ID NO: 53472 - protein, 9 aa, Homo sapiens
  misc_feature: Table A; Target 53472; HLA-C*07:02; NPFFR2; ENSG00000056291; TAA
YPFKPKLTI

SEQ ID NO: 53473 - protein, 8 aa, Homo sapiens
  misc_feature: Table A; Target 53473; HLA-A*01:01; NPFFR2; ENSG00000056291; TAA
YSDINITY

SEQ ID NO: 53474 - protein, 8 aa, Homo sapiens
  misc_feature: Table A; Target 53474; HLA-B*58:01; NPFFR2; ENSG00000056291; TAA
YSDINITY

SEQ ID NO: 53475 - protein, 8 aa, Homo sapiens
  misc_feature: Table A; Target 53475; HLA-C*05:01; NPFFR2; ENSG00000056291; TAA
YSDINITY

SEQ ID NO: 53476 - protein, 9 aa, Homo sapiens
  misc_feature: Table A; Target 53476; HLA-A*01:01; NPFFR2; ENSG00000056291; TAA
YSDINITYV

SEQ ID NO: 53477 - protein, 9 aa, Homo sapiens
  misc_feature: Table A; Target 53477; HLA-A*02:01; NPFFR2; ENSG00000056291; TAA
YSDINITYV

SEQ ID NO: 53478 - protein, 9 aa, Homo sapiens
  misc_feature: Table A; Target 53478; HLA-A*02:07; NPFFR2; ENSG00000056291; TAA
YSDINITYV

SEQ ID NO: 53479 - protein, 9 aa, Homo sapiens
  misc_feature: Table A; Target 53479; HLA-C*05:01; NPFFR2; ENSG00000056291; TAA
YSDINITYV

SEQ ID NO: 53480 - protein, 10 aa, Homo sapiens
  misc_feature: Table A; Target 53480; HLA-A*01:01; NPFFR2; ENSG00000056291; TAA
YSDINITYVN

SEQ ID NO: 53481 - protein, 11 aa, Homo sapiens
  misc_feature: Table A; Target 53481; HLA-A*01:01; NPFFR2; ENSG00000056291; TAA
YSDINITYVNY

SEQ ID NO: 53482 - protein, 11 aa, Homo sapiens
  misc_feature: Table A; Target 53482; HLA-A*29:02; NPFFR2; ENSG00000056291; TAA
YSDINITYVNY

SEQ ID NO: 53483 - protein, 9 aa, Homo sapiens
  misc_feature: Table A; Target 53483; HLA-A*68:02; NPFFR2; ENSG00000056291; TAA
YTTVLFANI

SEQ ID NO: 53484 - protein, 8 aa, Homo sapiens
  misc_feature: Table A; Target 53484; HLA-A*23:01; NPFFR2; ENSG00000056291; TAA
YYLHQPQV

SEQ ID NO: 53485 - protein, 9 aa, Homo sapiens
  misc_feature: Table A; Target 53485; HLA-A*23:01; NPFFR2; ENSG00000056291; TAA
YYLHQPQVA

SEQ ID NO: 53486 - protein, 9 aa, Homo sapiens
  misc_feature: Table A; Target 53486; HLA-A*24:02; NPFFR2; ENSG00000056291; TAA
YYLHQPQVA

SEQ ID NO: 53487 - protein, 9 aa, Homo sapiens
  misc_feature: Table A; Target 53487; HLA-B*54:01; NPFFR2; ENSG00000056291; TAA
YYLHQPQVA

SEQ ID NO: 53488 - protein, 9 aa, Homo sapiens
  misc_feature: Table A; Target 53488; HLA-C*14:02; NPFFR2; ENSG00000056291; TAA
YYLHQPQVA

SEQ ID NO: 53489 - protein, 11 aa, Homo sapiens
  misc_feature: Table A; Target 53489; HLA-A*23:01; NPFFR2; ENSG00000056291; TAA
YYLHQPQVAAI

SEQ ID NO: 53490 - protein, 11 aa, Homo sapiens
  misc_feature: Table A; Target 53490; HLA-A*24:02; NPFFR2; ENSG00000056291; TAA
YYLHQPQVAAI

SEQ ID NO: 53491 - protein, 9 aa, Homo sapiens
  misc_feature: Table A; Target 53491; HLA-A*02:01; NPSR1; ENSG00000187258; TAA
AINPLIYCV

SEQ ID NO: 53492 - protein, 9 aa, Homo sapiens
  misc_feature: Table A; Target 53492; HLA-A*02:03; NPSR1; ENSG00000187258; TAA
AINPLIYCV

SEQ ID NO: 53493 - protein, 9 aa, Homo sapiens
  misc_feature: Table A; Target 53493; HLA-A*02:04; NPSR1; ENSG00000187258; TAA
AINPLIYCV

SEQ ID NO: 53494 - protein, 9 aa, Homo sapiens
  misc_feature: Table A; Target 53494; HLA-A*02:07; NPSR1; ENSG00000187258; TAA
AINPLIYCV

SEQ ID NO: 53495 - protein, 9 aa, Homo sapiens
  misc_feature: Table A; Target 53495; HLA-A*30:01; NPSR1; ENSG00000187258; TAA
AINPLIYCV

SEQ ID NO: 53496 - protein, 9 aa, Homo sapiens
  misc_feature: Table A; Target 53496; HLA-A*32:01; NPSR1; ENSG00000187258; TAA
AINPLIYCV

SEQ ID NO: 53497 - protein, 9 aa, Homo sapiens
  misc_feature: Table A; Target 53497; HLA-B*13:02; NPSR1; ENSG00000187258; TAA
AINPLIYCV

SEQ ID NO: 53498 - protein, 9 aa, Homo sapiens
  misc_feature: Table A; Target 53498; HLA-B*55:01; NPSR1; ENSG00000187258; TAA
AINPLIYCV

SEQ ID NO: 53499 - protein, 9 aa, Homo sapiens
  misc_feature: Table A; Target 53499; HLA-B*56:01; NPSR1; ENSG00000187258; TAA
AINPLIYCV

SEQ ID NO: 53500 - protein, 9 aa, Homo sapiens
  misc_feature: Table A; Target 53500; HLA-C*02:02; NPSR1; ENSG00000187258; TAA
AINPLIYCV

SEQ ID NO: 53501 - protein, 9 aa, Homo sapiens
  misc_feature: Table A; Target 53501; HLA-C*06:02; NPSR1; ENSG00000187258; TAA
AINPLIYCV

SEQ ID NO: 53502 - protein, 10 aa, Homo sapiens
  misc_feature: Table A; Target 53502; HLA-A*25:01; NPSR1; ENSG00000187258; TAA
AINPLIYCVF

SEQ ID NO: 53503 - protein, 10 aa, Homo sapiens
  misc_feature: Table A; Target 53503; HLA-B*44:02; NPSR1; ENSG00000187258; TAA
AINPLIYCVF

SEQ ID NO: 53504 - protein, 9 aa, Homo sapiens
  misc_feature: Table A; Target 53504; HLA-A*02:01; NPSR1; ENSG00000187258; TAA
AITDSFTGL

SEQ ID NO: 53505 - protein, 9 aa, Homo sapiens
  misc_feature: Table A; Target 53505; HLA-A*02:03; NPSR1; ENSG00000187258; TAA
AITDSFTGL

SEQ ID NO: 53506 - protein, 9 aa, Homo sapiens
  misc_feature: Table A; Target 53506; HLA-A*02:04; NPSR1; ENSG00000187258; TAA
AITDSFTGL

SEQ ID NO: 53507 - protein, 9 aa, Homo sapiens
  misc_feature: Table A; Target 53507; HLA-A*02:07; NPSR1; ENSG00000187258; TAA
AITDSFTGL

SEQ ID NO: 53508 - protein, 9 aa, Homo sapiens
  misc_feature: Table A; Target 53508; HLA-A*25:01; NPSR1; ENSG00000187258; TAA
AITDSFTGL

SEQ ID NO: 53509 - protein, 9 aa, Homo sapiens
  misc_feature: Table A; Target 53509; HLA-A*26:01; NPSR1; ENSG00000187258; TAA
AITDSFTGL

SEQ ID NO: 53510 - protein, 9 aa, Homo sapiens
  misc_feature: Table A; Target 53510; HLA-A*32:01; NPSR1; ENSG00000187258; TAA
AITDSFTGL

SEQ ID NO: 53511 - protein, 9 aa, Homo sapiens
  misc_feature: Table A; Target 53511; HLA-B*15:01; NPSR1; ENSG00000187258; TAA
AITDSFTGL

SEQ ID NO: 53512 - protein, 9 aa, Homo sapiens
  misc_feature: Table A; Target 53512; HLA-B*15:03; NPSR1; ENSG00000187258; TAA
AITDSFTGL

SEQ ID NO: 53513 - protein, 9 aa, Homo sapiens
  misc_feature: Table A; Target 53513; HLA-B*27:05; NPSR1; ENSG00000187258; TAA
AITDSFTGL

SEQ ID NO: 53514 - protein, 9 aa, Homo sapiens
  misc_feature: Table A; Target 53514; HLA-B*39:01; NPSR1; ENSG00000187258; TAA
AITDSFTGL

SEQ ID NO: 53515 - protein, 9 aa, Homo sapiens
  misc_feature: Table A; Target 53515; HLA-B*40:01; NPSR1; ENSG00000187258; TAA
AITDSFTGL

SEQ ID NO: 53516 - protein, 9 aa, Homo sapiens
  misc_feature: Table A; Target 53516; HLA-B*46:01; NPSR1; ENSG00000187258; TAA
AITDSFTGL

SEQ ID NO: 53517 - protein, 9 aa, Homo sapiens
  misc_feature: Table A; Target 53517; HLA-B*55:01; NPSR1; ENSG00000187258; TAA
AITDSFTGL

SEQ ID NO: 53518 - protein, 9 aa, Homo sapiens
  misc_feature: Table A; Target 53518; HLA-B*58:01; NPSR1; ENSG00000187258; TAA
AITDSFTGL

SEQ ID NO: 53519 - protein, 9 aa, Homo sapiens
  misc_feature: Table A; Target 53519; HLA-C*01:02; NPSR1; ENSG00000187258; TAA
AITDSFTGL

SEQ ID NO: 53520 - protein, 9 aa, Homo sapiens
  misc_feature: Table A; Target 53520; HLA-C*02:02; NPSR1; ENSG00000187258; TAA
AITDSFTGL

SEQ ID NO: 53521 - protein, 9 aa, Homo sapiens
  misc_feature: Table A; Target 53521; HLA-C*03:04; NPSR1; ENSG00000187258; TAA
AITDSFTGL

SEQ ID NO: 53522 - protein, 9 aa, Homo sapiens
  misc_feature: Table A; Target 53522; HLA-C*05:01; NPSR1; ENSG00000187258; TAA
AITDSFTGL

SEQ ID NO: 53523 - protein, 9 aa, Homo sapiens
  misc_feature: Table A; Target 53523; HLA-C*14:02; NPSR1; ENSG00000187258; TAA
AITDSFTGL

SEQ ID NO: 53524 - protein, 8 aa, Homo sapiens
  misc_feature: Table A; Target 53524; HLA-B*15:03; NPSR1; ENSG00000187258; TAA
AKIKAIKY

SEQ ID NO: 53525 - protein, 9 aa, Homo sapiens
  misc_feature: Table A; Target 53525; HLA-A*02:04; NPSR1; ENSG00000187258; TAA
ALNSAINPL

SEQ ID NO: 53526 - protein, 9 aa, Homo sapiens
  misc_feature: Table A; Target 53526; HLA-C*01:02; NPSR1; ENSG00000187258; TAA
ALNSAINPL

SEQ ID NO: 53527 - protein, 11 aa, Homo sapiens
  misc_feature: Table A; Target 53527; HLA-A*03:01; NPSR1; ENSG00000187258; TAA
ALNSAINPLIY

SEQ ID NO: 53528 - protein, 11 aa, Homo sapiens
  misc_feature: Table A; Target 53528; HLA-A*29:02; NPSR1; ENSG00000187258; TAA
ALNSAINPLIY

SEQ ID NO: 53529 - protein, 11 aa, Homo sapiens
  misc_feature: Table A; Target 53529; HLA-A*30:02; NPSR1; ENSG00000187258; TAA
ALNSAINPLIY

SEQ ID NO: 53530 - protein, 11 aa, Homo sapiens
  misc_feature: Table A; Target 53530; HLA-B*15:01; NPSR1; ENSG00000187258; TAA
ALNSAINPLIY

SEQ ID NO: 53531 - protein, 9 aa, Homo sapiens
  misc_feature: Table A; Target 53531; HLA-B*07:02; NPSR1; ENSG00000187258; TAA
APDLVCRVV

SEQ ID NO: 53532 - protein, 9 aa, Homo sapiens
  misc_feature: Table A; Target 53532; HLA-B*51:01; NPSR1; ENSG00000187258; TAA
APDLVCRVV

SEQ ID NO: 53533 - protein, 9 aa, Homo sapiens
  misc_feature: Table A; Target 53533; HLA-B*54:01; NPSR1; ENSG00000187258; TAA
APDLVCRVV

SEQ ID NO: 53534 - protein, 9 aa, Homo sapiens
  misc_feature: Table A; Target 53534; HLA-B*55:01; NPSR1; ENSG00000187258; TAA
APDLVCRVV

SEQ ID NO: 53535 - protein, 9 aa, Homo sapiens
  misc_feature: Table A; Target 53535; HLA-B*56:01; NPSR1; ENSG00000187258; TAA
APDLVCRVV

SEQ ID NO: 53536 - protein, 9 aa, Homo sapiens
  misc_feature: Table A; Target 53536; HLA-C*07:02; NPSR1; ENSG00000187258; TAA
APDLVCRVV

SEQ ID NO: 53537 - protein, 9 aa, Homo sapiens
  misc_feature: Table A; Target 53537; HLA-B*27:02; NPSR1; ENSG00000187258; TAA
ARVLIVIAW

SEQ ID NO: 53538 - protein, 9 aa, Homo sapiens
  misc_feature: Table A; Target 53538; HLA-B*44:02; NPSR1; ENSG00000187258; TAA
ARVLIVIAW

SEQ ID NO: 53539 - protein, 9 aa, Homo sapiens
  misc_feature: Table A; Target 53539; HLA-B*44:03; NPSR1; ENSG00000187258; TAA
ARVLIVIAW

SEQ ID NO: 53540 - protein, 9 aa, Homo sapiens
  misc_feature: Table A; Target 53540; HLA-B*57:01; NPSR1; ENSG00000187258; TAA
ARVLIVIAW

SEQ ID NO: 53541 - protein, 9 aa, Homo sapiens
  misc_feature: Table A; Target 53541; HLA-C*16:04; NPSR1; ENSG00000187258; TAA
ARVLIVIAW

SEQ ID NO: 53542 - protein, 9 aa, Homo sapiens
  misc_feature: Table A; Target 53542; HLA-A*23:01; NPSR1; ENSG00000187258; TAA
ASTYVLVSL

SEQ ID NO: 53543 - protein, 9 aa, Homo sapiens
  misc_feature: Table A; Target 53543; HLA-A*30:01; NPSR1; ENSG00000187258; TAA
ASTYVLVSL

SEQ ID NO: 53544 - protein, 9 aa, Homo sapiens
  misc_feature: Table A; Target 53544; HLA-A*31:01; NPSR1; ENSG00000187258; TAA
ASTYVLVSL

SEQ ID NO: 53545 - protein, 9 aa, Homo sapiens
  misc_feature: Table A; Target 53545; HLA-A*68:02; NPSR1; ENSG00000187258; TAA
ASTYVLVSL

SEQ ID NO: 53546 - protein, 9 aa, Homo sapiens
  misc_feature: Table A; Target 53546; HLA-B*13:02; NPSR1; ENSG00000187258; TAA
ASTYVLVSL

SEQ ID NO: 53547 - protein, 9 aa, Homo sapiens
  misc_feature: Table A; Target 53547; HLA-B*40:02; NPSR1; ENSG00000187258; TAA
ASTYVLVSL

SEQ ID NO: 53548 - protein, 9 aa, Homo sapiens
  misc_feature: Table A; Target 53548; HLA-B*46:01; NPSR1; ENSG00000187258; TAA
ASTYVLVSL

SEQ ID NO: 53549 - protein, 9 aa, Homo sapiens
  misc_feature: Table A; Target 53549; HLA-B*57:01; NPSR1; ENSG00000187258; TAA
ASTYVLVSL

SEQ ID NO: 53550 - protein, 9 aa, Homo sapiens
  misc_feature: Table A; Target 53550; HLA-B*58:01; NPSR1; ENSG00000187258; TAA
ASTYVLVSL

SEQ ID NO: 53551 - protein, 9 aa, Homo sapiens
  misc_feature: Table A; Target 53551; HLA-C*01:02; NPSR1; ENSG00000187258; TAA
ASTYVLVSL

SEQ ID NO: 53552 - protein, 9 aa, Homo sapiens
  misc_feature: Table A; Target 53552; HLA-C*02:02; NPSR1; ENSG00000187258; TAA
ASTYVLVSL

SEQ ID NO: 53553 - protein, 9 aa, Homo sapiens
  misc_feature: Table A; Target 53553; HLA-C*03:03; NPSR1; ENSG00000187258; TAA
ASTYVLVSL

SEQ ID NO: 53554 - protein, 9 aa, Homo sapiens
  misc_feature: Table A; Target 53554; HLA-C*03:04; NPSR1; ENSG00000187258; TAA
ASTYVLVSL

SEQ ID NO: 53555 - protein, 9 aa, Homo sapiens
  misc_feature: Table A; Target 53555; HLA-C*06:02; NPSR1; ENSG00000187258; TAA
ASTYVLVSL

SEQ ID NO: 53556 - protein, 9 aa, Homo sapiens
  misc_feature: Table A; Target 53556; HLA-C*07:02; NPSR1; ENSG00000187258; TAA
ASTYVLVSL

SEQ ID NO: 53557 - protein, 9 aa, Homo sapiens
  misc_feature: Table A; Target 53557; HLA-C*07:04; NPSR1; ENSG00000187258; TAA
ASTYVLVSL

SEQ ID NO: 53558 - protein, 9 aa, Homo sapiens
  misc_feature: Table A; Target 53558; HLA-C*12:03; NPSR1; ENSG00000187258; TAA
ASTYVLVSL

SEQ ID NO: 53559 - protein, 9 aa, Homo sapiens
  misc_feature: Table A; Target 53559; HLA-C*14:02; NPSR1; ENSG00000187258; TAA
ASTYVLVSL

SEQ ID NO: 53560 - protein, 9 aa, Homo sapiens
  misc_feature: Table A; Target 53560; HLA-C*16:01; NPSR1; ENSG00000187258; TAA
ASTYVLVSL

SEQ ID NO: 53561 - protein, 9 aa, Homo sapiens
  misc_feature: Table A; Target 53561; HLA-C*16:02; NPSR1; ENSG00000187258; TAA
ASTYVLVSL

SEQ ID NO: 53562 - protein, 9 aa, Homo sapiens
  misc_feature: Table A; Target 53562; HLA-C*16:04; NPSR1; ENSG00000187258; TAA
ASTYVLVSL

SEQ ID NO: 53563 - protein, 8 aa, Homo sapiens
  misc_feature: Table A; Target 53563; HLA-B*58:01; NPSR1; ENSG00000187258; TAA
ASVIIQNL

SEQ ID NO: 53564 - protein, 10 aa, Homo sapiens
  misc_feature: Table A; Target 53564; HLA-A*01:01; NPSR1; ENSG00000187258; TAA
CSDGKLCSSY

SEQ ID NO: 53565 - protein, 10 aa, Homo sapiens
  misc_feature: Table A; Target 53565; HLA-C*07:01; NPSR1; ENSG00000187258; TAA
CSDGKLCSSY

SEQ ID NO: 53566 - protein, 10 aa, Homo sapiens
  misc_feature: Table A; Target 53566; HLA-A*01:01; NPSR1; ENSG00000187258; TAA
CTETVTFTEV

SEQ ID NO: 53567 - protein, 9 aa, Homo sapiens
  misc_feature: Table A; Target 53567; HLA-A*30:02; NPSR1; ENSG00000187258; TAA
CVFSSSISF

SEQ ID NO: 53568 - protein, 9 aa, Homo sapiens
  misc_feature: Table A; Target 53568; HLA-A*32:01; NPSR1; ENSG00000187258; TAA
CVFSSSISF

SEQ ID NO: 53569 - protein, 9 aa, Homo sapiens
  misc_feature: Table A; Target 53569; HLA-B*15:01; NPSR1; ENSG00000187258; TAA
CVFSSSISF

SEQ ID NO: 53570 - protein, 9 aa, Homo sapiens
  misc_feature: Table A; Target 53570; HLA-B*15:03; NPSR1; ENSG00000187258; TAA
CVFSSSISF

SEQ ID NO: 53571 - protein, 9 aa, Homo sapiens
  misc_feature: Table A; Target 53571; HLA-B*35:01; NPSR1; ENSG00000187258; TAA
CVFSSSISF

SEQ ID NO: 53572 - protein, 9 aa, Homo sapiens
  misc_feature: Table A; Target 53572; HLA-B*46:01; NPSR1; ENSG00000187258; TAA
CVFSSSISF

SEQ ID NO: 53573 - protein, 9 aa, Homo sapiens
  misc_feature: Table A; Target 53573; HLA-C*02:02; NPSR1; ENSG00000187258; TAA
CVFSSSISF

SEQ ID NO: 53574 - protein, 9 aa, Homo sapiens
  misc_feature: Table A; Target 53574; HLA-C*07:04; NPSR1; ENSG00000187258; TAA
CVFSSSISF

SEQ ID NO: 53575 - protein, 9 aa, Homo sapiens
  misc_feature: Table A; Target 53575; HLA-C*16:04; NPSR1; ENSG00000187258; TAA
CVFSSSISF

SEQ ID NO: 53576 - protein, 10 aa, Homo sapiens
  misc_feature: Table A; Target 53576; HLA-A*33:01; NPSR1; ENSG00000187258; TAA
DFTAPDLVCR

SEQ ID NO: 53577 - protein, 10 aa, Homo sapiens
  misc_feature: Table A; Target 53577; HLA-A*33:03; NPSR1; ENSG00000187258; TAA
DFTAPDLVCR

SEQ ID NO: 53578 - protein, 8 aa, Homo sapiens
  misc_feature: Table A; Target 53578; HLA-B*08:01; NPSR1; ENSG00000187258; TAA
DGKLCSSY

SEQ ID NO: 53579 - protein, 8 aa, Homo sapiens
  misc_feature: Table A; Target 53579; HLA-C*07:01; NPSR1; ENSG00000187258; TAA
DGKLCSSY

SEQ ID NO: 53580 - protein, 9 aa, Homo sapiens
  misc_feature: Table A; Target 53580; HLA-A*25:01; NPSR1; ENSG00000187258; TAA
DILDNFNLL

SEQ ID NO: 53581 - protein, 8 aa, Homo sapiens
  misc_feature: Table A; Target 53581; HLA-B*18:01; NPSR1; ENSG00000187258; TAA
DRYHAIVY

SEQ ID NO: 53582 - protein, 8 aa, Homo sapiens
  misc_feature: Table A; Target 53582; HLA-C*07:01; NPSR1; ENSG00000187258; TAA
DRYHAIVY

SEQ ID NO: 53583 - protein, 9 aa, Homo sapiens
  misc_feature: Table A; Target 53583; HLA-A*25:01; NPSR1; ENSG00000187258; TAA
DSFTGLVNI

SEQ ID NO: 53584 - protein, 9 aa, Homo sapiens
  misc_feature: Table A; Target 53584; HLA-A*33:01; NPSR1; ENSG00000187258; TAA
DSFTGLVNI

SEQ ID NO: 53585 - protein, 9 aa, Homo sapiens
  misc_feature: Table A; Target 53585; HLA-A*68:02; NPSR1; ENSG00000187258; TAA
DSFTGLVNI

SEQ ID NO: 53586 - protein, 9 aa, Homo sapiens
  misc_feature: Table A; Target 53586; HLA-B*51:01; NPSR1; ENSG00000187258; TAA
DSFTGLVNI

SEQ ID NO: 53587 - protein, 10 aa, Homo sapiens
  misc_feature: Table A; Target 53587; HLA-A*25:01; NPSR1; ENSG00000187258; TAA
DSFTGLVNIL

SEQ ID NO: 53588 - protein, 9 aa, Homo sapiens
  misc_feature: Table A; Target 53588; HLA-A*33:01; NPSR1; ENSG00000187258; TAA
DSRMTFRER

SEQ ID NO: 53589 - protein, 9 aa, Homo sapiens
  misc_feature: Table A; Target 53589; HLA-A*68:01; NPSR1; ENSG00000187258; TAA
DSSGTGQTL

SEQ ID NO: 53590 - protein, 9 aa, Homo sapiens
  misc_feature: Table A; Target 53590; HLA-B*35:03; NPSR1; ENSG00000187258; TAA
DSSGTGQTL

SEQ ID NO: 53591 - protein, 9 aa, Homo sapiens
  misc_feature: Table A; Target 53591; HLA-B*38:01; NPSR1; ENSG00000187258; TAA
DSSGTGQTL

SEQ ID NO: 53592 - protein, 9 aa, Homo sapiens
  misc_feature: Table A; Target 53592; HLA-B*39:01; NPSR1; ENSG00000187258; TAA
DSSGTGQTL

SEQ ID NO: 53593 - protein, 9 aa, Homo sapiens
  misc_feature: Table A; Target 53593; HLA-C*01:02; NPSR1; ENSG00000187258; TAA
DSSGTGQTL

SEQ ID NO: 53594 - protein, 9 aa, Homo sapiens
  misc_feature: Table A; Target 53594; HLA-C*03:04; NPSR1; ENSG00000187258; TAA
DSSGTGQTL

SEQ ID NO: 53595 - protein, 9 aa, Homo sapiens
  misc_feature: Table A; Target 53595; HLA-C*07:06; NPSR1; ENSG00000187258; TAA
DSSGTGQTL

SEQ ID NO: 53596 - protein, 8 aa, Homo sapiens
  misc_feature: Table A; Target 53596; HLA-B*51:01; NPSR1; ENSG00000187258; TAA
DSYWTPYM

SEQ ID NO: 53597 - protein, 9 aa, Homo sapiens
  misc_feature: Table A; Target 53597; HLA-A*33:01; NPSR1; ENSG00000187258; TAA
DTQERFYAS

SEQ ID NO: 53598 - protein, 11 aa, Homo sapiens
  misc_feature: Table A; Target 53598; HLA-A*25:01; NPSR1; ENSG00000187258; TAA
EQRSQDSRMTF

SEQ ID NO: 53599 - protein, 11 aa, Homo sapiens
  misc_feature: Table A; Target 53599; HLA-B*15:01; NPSR1; ENSG00000187258; TAA
EQRSQDSRMTF

SEQ ID NO: 53600 - protein, 8 aa, Homo sapiens
  misc_feature: Table A; Target 53600; HLA-A*25:01; NPSR1; ENSG00000187258; TAA
ETVTFTEV

SEQ ID NO: 53601 - protein, 8 aa, Homo sapiens
  misc_feature: Table A; Target 53601; HLA-A*26:01; NPSR1; ENSG00000187258; TAA
ETVTFTEV

SEQ ID NO: 53602 - protein, 8 aa, Homo sapiens
  misc_feature: Table A; Target 53602; HLA-A*68:02; NPSR1; ENSG00000187258; TAA
ETVTFTEV

SEQ ID NO: 53603 - protein, 9 aa, Homo sapiens
  misc_feature: Table A; Target 53603; HLA-A*25:01; NPSR1; ENSG00000187258; TAA
ETVTFTEVV

SEQ ID NO: 53604 - protein, 9 aa, Homo sapiens
  misc_feature: Table A; Target 53604; HLA-A*26:01; NPSR1; ENSG00000187258; TAA
ETVTFTEVV

SEQ ID NO: 53605 - protein, 9 aa, Homo sapiens
  misc_feature: Table A; Target 53605; HLA-A*68:01; NPSR1; ENSG00000187258; TAA
ETVTFTEVV

SEQ ID NO: 53606 - protein, 9 aa, Homo sapiens
  misc_feature: Table A; Target 53606; HLA-A*68:02; NPSR1; ENSG00000187258; TAA
ETVTFTEVV

SEQ ID NO: 53607 - protein, 11 aa, Homo sapiens
  misc_feature: Table A; Target 53607; HLA-A*26:01; NPSR1; ENSG00000187258; TAA
ETVTFTEVVEG

SEQ ID NO: 53608 - protein, 8 aa, Homo sapiens
  misc_feature: Table A; Target 53608; HLA-A*25:01; NPSR1; ENSG00000187258; TAA
EVVEGKEW

SEQ ID NO: 53609 - protein, 11 aa, Homo sapiens
  misc_feature: Table A; Target 53609; HLA-A*25:01; NPSR1; ENSG00000187258; TAA
EVVEGKEWGSF

SEQ ID NO: 53610 - protein, 11 aa, Homo sapiens
  misc_feature: Table A; Target 53610; HLA-A*26:01; NPSR1; ENSG00000187258; TAA
EVVEGKEWGSF

SEQ ID NO: 53611 - protein, 9 aa, Homo sapiens
  misc_feature: Table A; Target 53611; HLA-A*24:02; NPSR1; ENSG00000187258; TAA
EWGSFYYSF

SEQ ID NO: 53612 - protein, 10 aa, Homo sapiens
  misc_feature: Table A; Target 53612; HLA-A*30:01; NPSR1; ENSG00000187258; TAA
FDSSGTGQTL

SEQ ID NO: 53613 - protein, 10 aa, Homo sapiens
  misc_feature: Table A; Target 53613; HLA-B*27:05; NPSR1; ENSG00000187258; TAA
FDSSGTGQTL

SEQ ID NO: 53614 - protein, 10 aa, Homo sapiens
  misc_feature: Table A; Target 53614; HLA-B*38:01; NPSR1; ENSG00000187258; TAA
FDSSGTGQTL

SEQ ID NO: 53615 - protein, 10 aa, Homo sapiens
  misc_feature: Table A; Target 53615; HLA-B*39:01; NPSR1; ENSG00000187258; TAA
FDSSGTGQTL

SEQ ID NO: 53616 - protein, 10 aa, Homo sapiens
  misc_feature: Table A; Target 53616; HLA-B*40:01; NPSR1; ENSG00000187258; TAA
FDSSGTGQTL

SEQ ID NO: 53617 - protein, 10 aa, Homo sapiens
  misc_feature: Table A; Target 53617; HLA-B*40:02; NPSR1; ENSG00000187258; TAA
FDSSGTGQTL

SEQ ID NO: 53618 - protein, 10 aa, Homo sapiens
  misc_feature: Table A; Target 53618; HLA-C*03:03; NPSR1; ENSG00000187258; TAA
FDSSGTGQTL

SEQ ID NO: 53619 - protein, 10 aa, Homo sapiens
  misc_feature: Table A; Target 53619; HLA-C*03:04; NPSR1; ENSG00000187258; TAA
FDSSGTGQTL

SEQ ID NO: 53620 - protein, 10 aa, Homo sapiens
  misc_feature: Table A; Target 53620; HLA-C*04:01; NPSR1; ENSG00000187258; TAA
FDSSGTGQTL

SEQ ID NO: 53621 - protein, 10 aa, Homo sapiens
  misc_feature: Table A; Target 53621; HLA-C*07:02; NPSR1; ENSG00000187258; TAA
FDSSGTGQTL

SEQ ID NO: 53622 - protein, 10 aa, Homo sapiens
  misc_feature: Table A; Target 53622; HLA-C*12:03; NPSR1; ENSG00000187258; TAA
FDSSGTGQTL

SEQ ID NO: 53623 - protein, 10 aa, Homo sapiens
  misc_feature: Table A; Target 53623; HLA-C*16:02; NPSR1; ENSG00000187258; TAA
FDSSGTGQTL

SEQ ID NO: 53624 - protein, 9 aa, Homo sapiens
  misc_feature: Table A; Target 53624; HLA-A*02:07; NPSR1; ENSG00000187258; TAA
FIPLTIISI

SEQ ID NO: 53625 - protein, 9 aa, Homo sapiens
  misc_feature: Table A; Target 53625; HLA-A*68:02; NPSR1; ENSG00000187258; TAA
FIPLTIISI

SEQ ID NO: 53626 - protein, 9 aa, Homo sapiens
  misc_feature: Table A; Target 53626; HLA-B*13:02; NPSR1; ENSG00000187258; TAA
FIPLTIISI

SEQ ID NO: 53627 - protein, 9 aa, Homo sapiens
  misc_feature: Table A; Target 53627; HLA-B*51:01; NPSR1; ENSG00000187258; TAA
FIPLTIISI

SEQ ID NO: 53628 - protein, 9 aa, Homo sapiens
  misc_feature: Table A; Target 53628; HLA-B*54:01; NPSR1; ENSG00000187258; TAA
FIPLTIISI

SEQ ID NO: 53629 - protein, 9 aa, Homo sapiens
  misc_feature: Table A; Target 53629; HLA-C*01:02; NPSR1; ENSG00000187258; TAA
FIPLTIISI

SEQ ID NO: 53630 - protein, 9 aa, Homo sapiens
  misc_feature: Table A; Target 53630; HLA-B*15:03; NPSR1; ENSG00000187258; TAA
FKTEQLITL

SEQ ID NO: 53631 - protein, 9 aa, Homo sapiens
  misc_feature: Table A; Target 53631; HLA-A*02:01; NPSR1; ENSG00000187258; TAA
FLFDILDNF

SEQ ID NO: 53632 - protein, 9 aa, Homo sapiens
  misc_feature: Table A; Target 53632; HLA-A*02:03; NPSR1; ENSG00000187258; TAA
FLFDILDNF

SEQ ID NO: 53633 - protein, 9 aa, Homo sapiens
  misc_feature: Table A; Target 53633; HLA-A*02:04; NPSR1; ENSG00000187258; TAA
FLFDILDNF

SEQ ID NO: 53634 - protein, 9 aa, Homo sapiens
  misc_feature: Table A; Target 53634; HLA-A*02:07; NPSR1; ENSG00000187258; TAA
FLFDILDNF

SEQ ID NO: 53635 - protein, 9 aa, Homo sapiens
  misc_feature: Table A; Target 53635; HLA-A*29:02; NPSR1; ENSG00000187258; TAA
FLFDILDNF

SEQ ID NO: 53636 - protein, 9 aa, Homo sapiens
  misc_feature: Table A; Target 53636; HLA-A*68:02; NPSR1; ENSG00000187258; TAA
FLFDILDNF

SEQ ID NO: 53637 - protein, 9 aa, Homo sapiens
  misc_feature: Table A; Target 53637; HLA-C*02:02; NPSR1; ENSG00000187258; TAA
FLFDILDNF

SEQ ID NO: 53638 - protein, 11 aa, Homo sapiens
  misc_feature: Table A; Target 53638; HLA-A*02:01; NPSR1; ENSG00000187258; TAA
FLFDILDNFNL

SEQ ID NO: 53639 - protein, 11 aa, Homo sapiens
  misc_feature: Table A; Target 53639; HLA-A*02:04; NPSR1; ENSG00000187258; TAA
FLFDILDNFNL

SEQ ID NO: 53640 - protein, 11 aa, Homo sapiens
  misc_feature: Table A; Target 53640; HLA-A*02:07; NPSR1; ENSG00000187258; TAA
FLFDILDNFNL

SEQ ID NO: 53641 - protein, 8 aa, Homo sapiens
  misc_feature: Table A; Target 53641; HLA-A*02:01; NPSR1; ENSG00000187258; TAA
FLFSIPTL

SEQ ID NO: 53642 - protein, 8 aa, Homo sapiens
  misc_feature: Table A; Target 53642; HLA-A*02:03; NPSR1; ENSG00000187258; TAA
FLFSIPTL

SEQ ID NO: 53643 - protein, 8 aa, Homo sapiens
  misc_feature: Table A; Target 53643; HLA-A*02:04; NPSR1; ENSG00000187258; TAA
FLFSIPTL

SEQ ID NO: 53644 - protein, 8 aa, Homo sapiens
  misc_feature: Table A; Target 53644; HLA-A*02:07; NPSR1; ENSG00000187258; TAA
FLFSIPTL

SEQ ID NO: 53645 - protein, 8 aa, Homo sapiens
  misc_feature: Table A; Target 53645; HLA-B*51:01; NPSR1; ENSG00000187258; TAA
FLFSIPTL

SEQ ID NO: 53646 - protein, 8 aa, Homo sapiens
  misc_feature: Table A; Target 53646; HLA-C*02:02; NPSR1; ENSG00000187258; TAA
FLFSIPTL

SEQ ID NO: 53647 - protein, 8 aa, Homo sapiens
  misc_feature: Table A; Target 53647; HLA-C*03:03; NPSR1; ENSG00000187258; TAA
FLFSIPTL

SEQ ID NO: 53648 - protein, 8 aa, Homo sapiens
  misc_feature: Table A; Target 53648; HLA-C*03:04; NPSR1; ENSG00000187258; TAA
FLFSIPTL

SEQ ID NO: 53649 - protein, 9 aa, Homo sapiens
  misc_feature: Table A; Target 53649; HLA-A*02:01; NPSR1; ENSG00000187258; TAA
FLFSIPTLI

SEQ ID NO: 53650 - protein, 9 aa, Homo sapiens
  misc_feature: Table A; Target 53650; HLA-A*02:03; NPSR1; ENSG00000187258; TAA
FLFSIPTLI

SEQ ID NO: 53651 - protein, 9 aa, Homo sapiens
  misc_feature: Table A; Target 53651; HLA-A*02:04; NPSR1; ENSG00000187258; TAA
FLFSIPTLI

SEQ ID NO: 53652 - protein, 9 aa, Homo sapiens
  misc_feature: Table A; Target 53652; HLA-A*02:07; NPSR1; ENSG00000187258; TAA
FLFSIPTLI

SEQ ID NO: 53653 - protein, 9 aa, Homo sapiens
  misc_feature: Table A; Target 53653; HLA-A*23:01; NPSR1; ENSG00000187258; TAA
FLFSIPTLI

SEQ ID NO: 53654 - protein, 9 aa, Homo sapiens
  misc_feature: Table A; Target 53654; HLA-A*29:02; NPSR1; ENSG00000187258; TAA
FLFSIPTLI

SEQ ID NO: 53655 - protein, 9 aa, Homo sapiens
  misc_feature: Table A; Target 53655; HLA-A*68:02; NPSR1; ENSG00000187258; TAA
FLFSIPTLI

SEQ ID NO: 53656 - protein, 9 aa, Homo sapiens
  misc_feature: Table A; Target 53656; HLA-B*13:02; NPSR1; ENSG00000187258; TAA
FLFSIPTLI

SEQ ID NO: 53657 - protein, 9 aa, Homo sapiens
  misc_feature: Table A; Target 53657; HLA-C*02:02; NPSR1; ENSG00000187258; TAA
FLFSIPTLI

SEQ ID NO: 53658 - protein, 10 aa, Homo sapiens
  misc_feature: Table A; Target 53658; HLA-A*02:03; NPSR1; ENSG00000187258; TAA
FLFSIPTLII

SEQ ID NO: 53659 - protein, 10 aa, Homo sapiens
  misc_feature: Table A; Target 53659; HLA-A*02:04; NPSR1; ENSG00000187258; TAA
FLFSIPTLII

SEQ ID NO: 53660 - protein, 11 aa, Homo sapiens
  misc_feature: Table A; Target 53660; HLA-A*02:04; NPSR1; ENSG00000187258; TAA
FLFSIPTLIIF

SEQ ID NO: 53661 - protein, 11 aa, Homo sapiens
  misc_feature: Table A; Target 53661; HLA-A*02:07; NPSR1; ENSG00000187258; TAA
FLFSIPTLIIF

SEQ ID NO: 53662 - protein, 10 aa, Homo sapiens
  misc_feature: Table A; Target 53662; HLA-A*02:03; NPSR1; ENSG00000187258; TAA
FLQGEKQARV

SEQ ID NO: 53663 - protein, 9 aa, Homo sapiens
  misc_feature: Table A; Target 53663; HLA-A*23:01; NPSR1; ENSG00000187258; TAA
FSIPTLIIF

SEQ ID NO: 53664 - protein, 9 aa, Homo sapiens
  misc_feature: Table A; Target 53664; HLA-B*46:01; NPSR1; ENSG00000187258; TAA
FSIPTLIIF

SEQ ID NO: 53665 - protein, 9 aa, Homo sapiens
  misc_feature: Table A; Target 53665; HLA-B*57:01; NPSR1; ENSG00000187258; TAA
FSIPTLIIF

SEQ ID NO: 53666 - protein, 9 aa, Homo sapiens
  misc_feature: Table A; Target 53666; HLA-C*02:02; NPSR1; ENSG00000187258; TAA
FSIPTLIIF

SEQ ID NO: 53667 - protein, 9 aa, Homo sapiens
  misc_feature: Table A; Target 53667; HLA-C*03:04; NPSR1; ENSG00000187258; TAA
FSIPTLIIF

SEQ ID NO: 53668 - protein, 9 aa, Homo sapiens
  misc_feature: Table A; Target 53668; HLA-A*01:01; NPSR1; ENSG00000187258; TAA
FTAPDLVCR

SEQ ID NO: 53669 - protein, 9 aa, Homo sapiens
  misc_feature: Table A; Target 53669; HLA-A*11:01; NPSR1; ENSG00000187258; TAA
FTAPDLVCR

SEQ ID NO: 53670 - protein, 9 aa, Homo sapiens
  misc_feature: Table A; Target 53670; HLA-A*31:01; NPSR1; ENSG00000187258; TAA
FTAPDLVCR

SEQ ID NO: 53671 - protein, 9 aa, Homo sapiens
  misc_feature: Table A; Target 53671; HLA-A*33:01; NPSR1; ENSG00000187258; TAA
FTAPDLVCR

SEQ ID NO: 53672 - protein, 9 aa, Homo sapiens
  misc_feature: Table A; Target 53672; HLA-A*33:03; NPSR1; ENSG00000187258; TAA
FTAPDLVCR

SEQ ID NO: 53673 - protein, 9 aa, Homo sapiens
  misc_feature: Table A; Target 53673; HLA-A*68:01; NPSR1; ENSG00000187258; TAA
FTAPDLVCR

SEQ ID NO: 53674 - protein, 9 aa, Homo sapiens
  misc_feature: Table A; Target 53674; HLA-A*68:02; NPSR1; ENSG00000187258; TAA
FTAPDLVCR

SEQ ID NO: 53675 - protein, 9 aa, Homo sapiens
  misc_feature: Table A; Target 53675; HLA-B*27:05; NPSR1; ENSG00000187258; TAA
FTAPDLVCR

SEQ ID NO: 53676 - protein, 9 aa, Homo sapiens
  misc_feature: Table A; Target 53676; HLA-C*02:02; NPSR1; ENSG00000187258; TAA
FTAPDLVCR

SEQ ID NO: 53677 - protein, 9 aa, Homo sapiens
  misc_feature: Table A; Target 53677; HLA-C*07:06; NPSR1; ENSG00000187258; TAA
FTAPDLVCR

SEQ ID NO: 53678 - protein, 10 aa, Homo sapiens
  misc_feature: Table A; Target 53678; HLA-A*02:01; NPSR1; ENSG00000187258; TAA
FTAPDLVCRV

SEQ ID NO: 53679 - protein, 10 aa, Homo sapiens
  misc_feature: Table A; Target 53679; HLA-A*02:03; NPSR1; ENSG00000187258; TAA
FTAPDLVCRV

SEQ ID NO: 53680 - protein, 10 aa, Homo sapiens
  misc_feature: Table A; Target 53680; HLA-A*68:02; NPSR1; ENSG00000187258; TAA
FTAPDLVCRV

SEQ ID NO: 53681 - protein, 10 aa, Homo sapiens
  misc_feature: Table A; Target 53681; HLA-A*01:01; NPSR1; ENSG00000187258; TAA
FTEVVEGKEW

SEQ ID NO: 53682 - protein, 10 aa, Homo sapiens
  misc_feature: Table A; Target 53682; HLA-A*25:01; NPSR1; ENSG00000187258; TAA
FTEVVEGKEW

SEQ ID NO: 53683 - protein, 10 aa, Homo sapiens
  misc_feature: Table A; Target 53683; HLA-B*57:01; NPSR1; ENSG00000187258; TAA
FTEVVEGKEW

SEQ ID NO: 53684 - protein, 11 aa, Homo sapiens
  misc_feature: Table A; Target 53684; HLA-A*68:02; NPSR1; ENSG00000187258; TAA
FTGDFTAPDLV

SEQ ID NO: 53685 - protein, 8 aa, Homo sapiens
  misc_feature: Table A; Target 53685; HLA-C*03:04; NPSR1; ENSG00000187258; TAA
FTGLVNIL

SEQ ID NO: 53686 - protein, 8 aa, Homo sapiens
  misc_feature: Table A; Target 53686; HLA-C*07:04; NPSR1; ENSG00000187258; TAA
FTGLVNIL

SEQ ID NO: 53687 - protein, 8 aa, Homo sapiens
  misc_feature: Table A; Target 53687; HLA-C*12:03; NPSR1; ENSG00000187258; TAA
FTGLVNIL

SEQ ID NO: 53688 - protein, 8 aa, Homo sapiens
  misc_feature: Table A; Target 53688; HLA-B*08:01; NPSR1; ENSG00000187258; TAA
FTIVGNSV

SEQ ID NO: 53689 - protein, 8 aa, Homo sapiens
  misc_feature: Table A; Target 53689; HLA-B*40:02; NPSR1; ENSG00000187258; TAA
FTIVGNSV

SEQ ID NO: 53690 - protein, 8 aa, Homo sapiens
  misc_feature: Table A; Target 53690; HLA-B*46:01; NPSR1; ENSG00000187258; TAA
FTIVGNSV

SEQ ID NO: 53691 - protein, 8 aa, Homo sapiens
  misc_feature: Table A; Target 53691; HLA-B*51:01; NPSR1; ENSG00000187258; TAA
FTIVGNSV

SEQ ID NO: 53692 - protein, 8 aa, Homo sapiens
  misc_feature: Table A; Target 53692; HLA-C*01:02; NPSR1; ENSG00000187258; TAA
FTIVGNSV

SEQ ID NO: 53693 - protein, 8 aa, Homo sapiens
  misc_feature: Table A; Target 53693; HLA-C*02:02; NPSR1; ENSG00000187258; TAA
FTIVGNSV

SEQ ID NO: 53694 - protein, 8 aa, Homo sapiens
  misc_feature: Table A; Target 53694; HLA-C*03:03; NPSR1; ENSG00000187258; TAA
FTIVGNSV

SEQ ID NO: 53695 - protein, 8 aa, Homo sapiens
  misc_feature: Table A; Target 53695; HLA-C*03:04; NPSR1; ENSG00000187258; TAA
FTIVGNSV

SEQ ID NO: 53696 - protein, 8 aa, Homo sapiens
  misc_feature: Table A; Target 53696; HLA-C*05:01; NPSR1; ENSG00000187258; TAA
FTIVGNSV

SEQ ID NO: 53697 - protein, 8 aa, Homo sapiens
  misc_feature: Table A; Target 53697; HLA-C*12:03; NPSR1; ENSG00000187258; TAA
FTIVGNSV

SEQ ID NO: 53698 - protein, 8 aa, Homo sapiens
  misc_feature: Table A; Target 53698; HLA-C*14:02; NPSR1; ENSG00000187258; TAA
FTIVGNSV

SEQ ID NO: 53699 - protein, 8 aa, Homo sapiens
  misc_feature: Table A; Target 53699; HLA-C*16:04; NPSR1; ENSG00000187258; TAA
FTIVGNSV

SEQ ID NO: 53700 - protein, 9 aa, Homo sapiens
  misc_feature: Table A; Target 53700; HLA-A*01:01; NPSR1; ENSG00000187258; TAA
FTIVGNSVV

SEQ ID NO: 53701 - protein, 9 aa, Homo sapiens
  misc_feature: Table A; Target 53701; HLA-A*26:01; NPSR1; ENSG00000187258; TAA
FTIVGNSVV

SEQ ID NO: 53702 - protein, 9 aa, Homo sapiens
  misc_feature: Table A; Target 53702; HLA-A*68:02; NPSR1; ENSG00000187258; TAA
FTIVGNSVV

SEQ ID NO: 53703 - protein, 9 aa, Homo sapiens
  misc_feature: Table A; Target 53703; HLA-B*46:01; NPSR1; ENSG00000187258; TAA
FTIVGNSVV

SEQ ID NO: 53704 - protein, 9 aa, Homo sapiens
  misc_feature: Table A; Target 53704; HLA-B*49:01; NPSR1; ENSG00000187258; TAA
FTIVGNSVV

SEQ ID NO: 53705 - protein, 9 aa, Homo sapiens
  misc_feature: Table A; Target 53705; HLA-C*01:02; NPSR1; ENSG00000187258; TAA
FTIVGNSVV

SEQ ID NO: 53706 - protein, 9 aa, Homo sapiens
  misc_feature: Table A; Target 53706; HLA-C*02:02; NPSR1; ENSG00000187258; TAA
FTIVGNSVV

SEQ ID NO: 53707 - protein, 9 aa, Homo sapiens
  misc_feature: Table A; Target 53707; HLA-C*03:03; NPSR1; ENSG00000187258; TAA
FTIVGNSVV

SEQ ID NO: 53708 - protein, 9 aa, Homo sapiens
  misc_feature: Table A; Target 53708; HLA-C*03:04; NPSR1; ENSG00000187258; TAA
FTIVGNSVV

SEQ ID NO: 53709 - protein, 9 aa, Homo sapiens
  misc_feature: Table A; Target 53709; HLA-C*05:01; NPSR1; ENSG00000187258; TAA
FTIVGNSVV

SEQ ID NO: 53710 - protein, 10 aa, Homo sapiens
  misc_feature: Table A; Target 53710; HLA-C*03:03; NPSR1; ENSG00000187258; TAA
FTIVGNSVVL

SEQ ID NO: 53711 - protein, 10 aa, Homo sapiens
  misc_feature: Table A; Target 53711; HLA-C*03:04; NPSR1; ENSG00000187258; TAA
FTIVGNSVVL

SEQ ID NO: 53712 - protein, 10 aa, Homo sapiens
  misc_feature: Table A; Target 53712; HLA-A*02:01; NPSR1; ENSG00000187258; TAA
FVFTIVGNSV

SEQ ID NO: 53713 - protein, 10 aa, Homo sapiens
  misc_feature: Table A; Target 53713; HLA-A*02:03; NPSR1; ENSG00000187258; TAA
FVFTIVGNSV

SEQ ID NO: 53714 - protein, 10 aa, Homo sapiens
  misc_feature: Table A; Target 53714; HLA-A*02:04; NPSR1; ENSG00000187258; TAA
FVFTIVGNSV

SEQ ID NO: 53715 - protein, 10 aa, Homo sapiens
  misc_feature: Table A; Target 53715; HLA-A*02:07; NPSR1; ENSG00000187258; TAA
FVFTIVGNSV

SEQ ID NO: 53716 - protein, 10 aa, Homo sapiens
  misc_feature: Table A; Target 53716; HLA-A*25:01; NPSR1; ENSG00000187258; TAA
FVFTIVGNSV

SEQ ID NO: 53717 - protein, 10 aa, Homo sapiens
  misc_feature: Table A; Target 53717; HLA-A*26:01; NPSR1; ENSG00000187258; TAA
FVFTIVGNSV

SEQ ID NO: 53718 - protein, 10 aa, Homo sapiens
  misc_feature: Table A; Target 53718; HLA-A*68:02; NPSR1; ENSG00000187258; TAA
FVFTIVGNSV

SEQ ID NO: 53719 - protein, 10 aa, Homo sapiens
  misc_feature: Table A; Target 53719; HLA-B*13:02; NPSR1; ENSG00000187258; TAA
FVFTIVGNSV

SEQ ID NO: 53720 - protein, 10 aa, Homo sapiens
  misc_feature: Table A; Target 53720; HLA-B*51:01; NPSR1; ENSG00000187258; TAA
FVFTIVGNSV

SEQ ID NO: 53721 - protein, 10 aa, Homo sapiens
  misc_feature: Table A; Target 53721; HLA-B*54:01; NPSR1; ENSG00000187258; TAA
FVFTIVGNSV

SEQ ID NO: 53722 - protein, 10 aa, Homo sapiens
  misc_feature: Table A; Target 53722; HLA-C*02:02; NPSR1; ENSG00000187258; TAA
FVFTIVGNSV

SEQ ID NO: 53723 - protein, 10 aa, Homo sapiens
  misc_feature: Table A; Target 53723; HLA-C*03:04; NPSR1; ENSG00000187258; TAA
FVFTIVGNSV

SEQ ID NO: 53724 - protein, 11 aa, Homo sapiens
  misc_feature: Table A; Target 53724; HLA-A*68:02; NPSR1; ENSG00000187258; TAA
FVFTIVGNSVV

SEQ ID NO: 53725 - protein, 11 aa, Homo sapiens
  misc_feature: Table A; Target 53725; HLA-A*26:01; NPSR1; ENSG00000187258; TAA
FVTQLAITDSF

SEQ ID NO: 53726 - protein, 10 aa, Homo sapiens
  misc_feature: Table A; Target 53726; HLA-A*23:01; NPSR1; ENSG00000187258; TAA
FYASVIIQNL

SEQ ID NO: 53727 - protein, 10 aa, Homo sapiens
  misc_feature: Table A; Target 53727; HLA-A*24:02; NPSR1; ENSG00000187258; TAA
FYASVIIQNL

SEQ ID NO: 53728 - protein, 10 aa, Homo sapiens
  misc_feature: Table A; Target 53728; HLA-A*33:03; NPSR1; ENSG00000187258; TAA
FYASVIIQNL

SEQ ID NO: 53729 - protein, 10 aa, Homo sapiens
  misc_feature: Table A; Target 53729; HLA-A*68:02; NPSR1; ENSG00000187258; TAA
FYASVIIQNL

SEQ ID NO: 53730 - protein, 10 aa, Homo sapiens
  misc_feature: Table A; Target 53730; HLA-A*24:02; NPSR1; ENSG00000187258; TAA
FYYSFKTEQL

SEQ ID NO: 53731 - protein, 8 aa, Homo sapiens
  misc_feature: Table A; Target 53731; HLA-A*30:01; NPSR1; ENSG00000187258; TAA
GDFTAPDL

SEQ ID NO: 53732 - protein, 8 aa, Homo sapiens
  misc_feature: Table A; Target 53732; HLA-B*37:01; NPSR1; ENSG00000187258; TAA
GDFTAPDL

SEQ ID NO: 53733 - protein, 8 aa, Homo sapiens
  misc_feature: Table A; Target 53733; HLA-B*40:02; NPSR1; ENSG00000187258; TAA
GDFTAPDL

SEQ ID NO: 53734 - protein, 11 aa, Homo sapiens
  misc_feature: Table A; Target 53734; HLA-A*31:01; NPSR1; ENSG00000187258; TAA
GDFTAPDLVCR

SEQ ID NO: 53735 - protein, 11 aa, Homo sapiens
  misc_feature: Table A; Target 53735; HLA-B*27:02; NPSR1; ENSG00000187258; TAA
GDFTAPDLVCR

SEQ ID NO: 53736 - protein, 9 aa, Homo sapiens
  misc_feature: Table A; Target 53736; HLA-B*49:01; NPSR1; ENSG00000187258; TAA
GEKQARVLI

SEQ ID NO: 53737 - protein, 9 aa, Homo sapiens
  misc_feature: Table A; Target 53737; HLA-B*44:02; NPSR1; ENSG00000187258; TAA
GEVQCWALW

SEQ ID NO: 53738 - protein, 9 aa, Homo sapiens
  misc_feature: Table A; Target 53738; HLA-B*44:03; NPSR1; ENSG00000187258; TAA
GEVQCWALW

SEQ ID NO: 53739 - protein, 9 aa, Homo sapiens
  misc_feature: Table A; Target 53739; HLA-A*03:01; NPSR1; ENSG00000187258; TAA
GLISKAKIK

SEQ ID NO: 53740 - protein, 9 aa, Homo sapiens
  misc_feature: Table A; Target 53740; HLA-A*03:02; NPSR1; ENSG00000187258; TAA
GLISKAKIK

SEQ ID NO: 53741 - protein, 11 aa, Homo sapiens
  misc_feature: Table A; Target 53741; HLA-A*02:03; NPSR1; ENSG00000187258; TAA
GLISKAKIKAI

SEQ ID NO: 53742 - protein, 9 aa, Homo sapiens
  misc_feature: Table A; Target 53742; HLA-A*02:01; NPSR1; ENSG00000187258; TAA
GLVNILTDI

SEQ ID NO: 53743 - protein, 9 aa, Homo sapiens
  misc_feature: Table A; Target 53743; HLA-A*02:03; NPSR1; ENSG00000187258; TAA
GLVNILTDI

SEQ ID NO: 53744 - protein, 9 aa, Homo sapiens
  misc_feature: Table A; Target 53744; HLA-A*02:04; NPSR1; ENSG00000187258; TAA
GLVNILTDI

SEQ ID NO: 53745 - protein, 9 aa, Homo sapiens
  misc_feature: Table A; Target 53745; HLA-B*13:02; NPSR1; ENSG00000187258; TAA
GLVNILTDI

SEQ ID NO: 53746 - protein, 10 aa, Homo sapiens
  misc_feature: Table A; Target 53746; HLA-A*25:01; NPSR1; ENSG00000187258; TAA
GNSVVLFSTW

SEQ ID NO: 53747 - protein, 10 aa, Homo sapiens
  misc_feature: Table A; Target 53747; HLA-B*44:02; NPSR1; ENSG00000187258; TAA
GNSVVLFSTW

SEQ ID NO: 53748 - protein, 9 aa, Homo sapiens
  misc_feature: Table A; Target 53748; HLA-B*13:02; NPSR1; ENSG00000187258; TAA
GQTLDSSPV

SEQ ID NO: 53749 - protein, 9 aa, Homo sapiens
  misc_feature: Table A; Target 53749; HLA-B*35:01; NPSR1; ENSG00000187258; TAA
HAIVYPMKF

SEQ ID NO: 53750 - protein, 9 aa, Homo sapiens
  misc_feature: Table A; Target 53750; HLA-B*57:01; NPSR1; ENSG00000187258; TAA
HAIVYPMKF

SEQ ID NO: 53751 - protein, 9 aa, Homo sapiens
  misc_feature: Table A; Target 53751; HLA-C*02:02; NPSR1; ENSG00000187258; TAA
HAIVYPMKF

SEQ ID NO: 53752 - protein, 9 aa, Homo sapiens
  misc_feature: Table A; Target 53752; HLA-C*12:03; NPSR1; ENSG00000187258; TAA
HAIVYPMKF

SEQ ID NO: 53753 - protein, 8 aa, Homo sapiens
  misc_feature: Table A; Target 53753; HLA-B*18:01; NPSR1; ENSG00000187258; TAA
HEMQILSK

SEQ ID NO: 53754 - protein, 9 aa, Homo sapiens
  misc_feature: Table A; Target 53754; HLA-B*49:01; NPSR1; ENSG00000187258; TAA
HEMQILSKP

SEQ ID NO: 53755 - protein, 9 aa, Homo sapiens
  misc_feature: Table A; Target 53755; HLA-A*29:02; NPSR1; ENSG00000187258; TAA
IAWSLSFLF

SEQ ID NO: 53756 - protein, 9 aa, Homo sapiens
  misc_feature: Table A; Target 53756; HLA-B*57:01; NPSR1; ENSG00000187258; TAA
IAWSLSFLF

SEQ ID NO: 53757 - protein, 8 aa, Homo sapiens
  misc_feature: Table A; Target 53757; HLA-B*08:01; NPSR1; ENSG00000187258; TAA
IIFGKRTL

SEQ ID NO: 53758 - protein, 8 aa, Homo sapiens
  misc_feature: Table A; Target 53758; HLA-A*02:04; NPSR1; ENSG00000187258; TAA
IIQNLPAL

SEQ ID NO: 53759 - protein, 8 aa, Homo sapiens
  misc_feature: Table A; Target 53759; HLA-A*23:01; NPSR1; ENSG00000187258; TAA
IIQNLPAL

SEQ ID NO: 53760 - protein, 8 aa, Homo sapiens
  misc_feature: Table A; Target 53760; HLA-B*46:01; NPSR1; ENSG00000187258; TAA
IIQNLPAL

SEQ ID NO: 53761 - protein, 8 aa, Homo sapiens
  misc_feature: Table A; Target 53761; HLA-C*01:02; NPSR1; ENSG00000187258; TAA
IIQNLPAL

SEQ ID NO: 53762 - protein, 8 aa, Homo sapiens
  misc_feature: Table A; Target 53762; HLA-C*03:03; NPSR1; ENSG00000187258; TAA
IIQNLPAL

SEQ ID NO: 53763 - protein, 8 aa, Homo sapiens
  misc_feature: Table A; Target 53763; HLA-C*03:04; NPSR1; ENSG00000187258; TAA
IIQNLPAL

SEQ ID NO: 53764 - protein, 8 aa, Homo sapiens
  misc_feature: Table A; Target 53764; HLA-C*14:02; NPSR1; ENSG00000187258; TAA
IIQNLPAL

SEQ ID NO: 53765 - protein, 8 aa, Homo sapiens
  misc_feature: Table A; Target 53765; HLA-C*16:01; NPSR1; ENSG00000187258; TAA
IIQNLPAL

SEQ ID NO: 53766 - protein, 8 aa, Homo sapiens
  misc_feature: Table A; Target 53766; HLA-C*16:02; NPSR1; ENSG00000187258; TAA
IIQNLPAL

SEQ ID NO: 53767 - protein, 8 aa, Homo sapiens
  misc_feature: Table A; Target 53767; HLA-A*02:07; NPSR1; ENSG00000187258; TAA
ILDNFNLL

SEQ ID NO: 53768 - protein, 8 aa, Homo sapiens
  misc_feature: Table A; Target 53768; HLA-C*05:01; NPSR1; ENSG00000187258; TAA
ILDNFNLL

SEQ ID NO: 53769 - protein, 9 aa, Homo sapiens
  misc_feature: Table A; Target 53769; HLA-A*02:01; NPSR1; ENSG00000187258; TAA
ILTDINWRF

SEQ ID NO: 53770 - protein, 9 aa, Homo sapiens
  misc_feature: Table A; Target 53770; HLA-A*02:04; NPSR1; ENSG00000187258; TAA
ILTDINWRF

SEQ ID NO: 53771 - protein, 9 aa, Homo sapiens
  misc_feature: Table A; Target 53771; HLA-A*02:07; NPSR1; ENSG00000187258; TAA
ILTDINWRF

SEQ ID NO: 53772 - protein, 9 aa, Homo sapiens
  misc_feature: Table A; Target 53772; HLA-A*23:01; NPSR1; ENSG00000187258; TAA
ILTDINWRF

SEQ ID NO: 53773 - protein, 9 aa, Homo sapiens
  misc_feature: Table A; Target 53773; HLA-A*24:02; NPSR1; ENSG00000187258; TAA
ILTDINWRF

SEQ ID NO: 53774 - protein, 9 aa, Homo sapiens
  misc_feature: Table A; Target 53774; HLA-A*29:02; NPSR1; ENSG00000187258; TAA
ILTDINWRF

SEQ ID NO: 53775 - protein, 9 aa, Homo sapiens
  misc_feature: Table A; Target 53775; HLA-A*02:03; NPSR1; ENSG00000187258; TAA
IMYGIVIRT

SEQ ID NO: 53776 - protein, 10 aa, Homo sapiens
  misc_feature: Table A; Target 53776; HLA-A*02:03; NPSR1; ENSG00000187258; TAA
IMYGIVIRTI

SEQ ID NO: 53777 - protein, 8 aa, Homo sapiens
  misc_feature: Table A; Target 53777; HLA-A*23:01; NPSR1; ENSG00000187258; TAA
IPLTIISI

SEQ ID NO: 53778 - protein, 8 aa, Homo sapiens
  misc_feature: Table A; Target 53778; HLA-B*08:01; NPSR1; ENSG00000187258; TAA
IPLTIISI

SEQ ID NO: 53779 - protein, 8 aa, Homo sapiens
  misc_feature: Table A; Target 53779; HLA-B*35:01; NPSR1; ENSG00000187258; TAA
IPLTIISI

SEQ ID NO: 53780 - protein, 8 aa, Homo sapiens
  misc_feature: Table A; Target 53780; HLA-B*35:03; NPSR1; ENSG00000187258; TAA
IPLTIISI

SEQ ID NO: 53781 - protein, 8 aa, Homo sapiens
  misc_feature: Table A; Target 53781; HLA-B*51:01; NPSR1; ENSG00000187258; TAA
IPLTIISI

SEQ ID NO: 53782 - protein, 8 aa, Homo sapiens
  misc_feature: Table A; Target 53782; HLA-B*54:01; NPSR1; ENSG00000187258; TAA
IPLTIISI

SEQ ID NO: 53783 - protein, 8 aa, Homo sapiens
  misc_feature: Table A; Target 53783; HLA-B*56:01; NPSR1; ENSG00000187258; TAA
IPLTIISI

SEQ ID NO: 53784 - protein, 9 aa, Homo sapiens
  misc_feature: Table A; Target 53784; HLA-B*07:02; NPSR1; ENSG00000187258; TAA
IPLTIISIM

SEQ ID NO: 53785 - protein, 9 aa, Homo sapiens
  misc_feature: Table A; Target 53785; HLA-B*35:01; NPSR1; ENSG00000187258; TAA
IPLTIISIM

SEQ ID NO: 53786 - protein, 9 aa, Homo sapiens
  misc_feature: Table A; Target 53786; HLA-B*35:03; NPSR1; ENSG00000187258; TAA
IPLTIISIM

SEQ ID NO: 53787 - protein, 9 aa, Homo sapiens
  misc_feature: Table A; Target 53787; HLA-B*51:01; NPSR1; ENSG00000187258; TAA
IPLTIISIM

SEQ ID NO: 53788 - protein, 9 aa, Homo sapiens
  misc_feature: Table A; Target 53788; HLA-B*54:01; NPSR1; ENSG00000187258; TAA
IPLTIISIM

SEQ ID NO: 53789 - protein, 9 aa, Homo sapiens
  misc_feature: Table A; Target 53789; HLA-B*56:01; NPSR1; ENSG00000187258; TAA
IPLTIISIM

SEQ ID NO: 53790 - protein, 9 aa, Homo sapiens
  misc_feature: Table A; Target 53790; HLA-C*07:02; NPSR1; ENSG00000187258; TAA
IPLTIISIM

SEQ ID NO: 53791 - protein, 10 aa, Homo sapiens
  misc_feature: Table A; Target 53791; HLA-A*23:01; NPSR1; ENSG00000187258; TAA
IPLTIISIMY

SEQ ID NO: 53792 - protein, 10 aa, Homo sapiens
  misc_feature: Table A; Target 53792; HLA-A*29:02; NPSR1; ENSG00000187258; TAA
IPLTIISIMY

SEQ ID NO: 53793 - protein, 10 aa, Homo sapiens
  misc_feature: Table A; Target 53793; HLA-B*35:01; NPSR1; ENSG00000187258; TAA
IPLTIISIMY

SEQ ID NO: 53794 - protein, 9 aa, Homo sapiens
  misc_feature: Table A; Target 53794; HLA-B*27:02; NPSR1; ENSG00000187258; TAA
IPTLIIFGK

SEQ ID NO: 53795 - protein, 9 aa, Homo sapiens
  misc_feature: Table A; Target 53795; HLA-B*54:01; NPSR1; ENSG00000187258; TAA
IPTLIIFGK

SEQ ID NO: 53796 - protein, 9 aa, Homo sapiens
  misc_feature: Table A; Target 53796; HLA-B*56:01; NPSR1; ENSG00000187258; TAA
IPTLIIFGK

SEQ ID NO: 53797 - protein, 9 aa, Homo sapiens
  misc_feature: Table A; Target 53797; HLA-A*31:01; NPSR1; ENSG00000187258; TAA
ISFPCREQR

SEQ ID NO: 53798 - protein, 9 aa, Homo sapiens
  misc_feature: Table A; Target 53798; HLA-B*57:01; NPSR1; ENSG00000187258; TAA
ISFPCREQR

SEQ ID NO: 53799 - protein, 9 aa, Homo sapiens
  misc_feature: Table A; Target 53799; HLA-B*08:01; NPSR1; ENSG00000187258; TAA
ISKAKIKAI

SEQ ID NO: 53800 - protein, 8 aa, Homo sapiens
  misc_feature: Table A; Target 53800; HLA-A*02:07; NPSR1; ENSG00000187258; TAA
ITDSFTGL

SEQ ID NO: 53801 - protein, 8 aa, Homo sapiens
  misc_feature: Table A; Target 53801; HLA-B*39:01; NPSR1; ENSG00000187258; TAA
ITDSFTGL

SEQ ID NO: 53802 - protein, 8 aa, Homo sapiens
  misc_feature: Table A; Target 53802; HLA-C*03:03; NPSR1; ENSG00000187258; TAA
ITDSFTGL

SEQ ID NO: 53803 - protein, 8 aa, Homo sapiens
  misc_feature: Table A; Target 53803; HLA-C*03:04; NPSR1; ENSG00000187258; TAA
ITDSFTGL

SEQ ID NO: 53804 - protein, 8 aa, Homo sapiens
  misc_feature: Table A; Target 53804; HLA-C*04:01; NPSR1; ENSG00000187258; TAA
ITDSFTGL

SEQ ID NO: 53805 - protein, 8 aa, Homo sapiens
  misc_feature: Table A; Target 53805; HLA-C*05:01; NPSR1; ENSG00000187258; TAA
ITDSFTGL

SEQ ID NO: 53806 - protein, 9 aa, Homo sapiens
  misc_feature: Table A; Target 53806; HLA-A*01:01; NPSR1; ENSG00000187258; TAA
ITDSFTGLV

SEQ ID NO: 53807 - protein, 9 aa, Homo sapiens
  misc_feature: Table A; Target 53807; HLA-A*68:02; NPSR1; ENSG00000187258; TAA
ITDSFTGLV

SEQ ID NO: 53808 - protein, 9 aa, Homo sapiens
  misc_feature: Table A; Target 53808; HLA-C*05:01; NPSR1; ENSG00000187258; TAA
ITDSFTGLV

SEQ ID NO: 53809 - protein, 10 aa, Homo sapiens
  misc_feature: Table A; Target 53809; HLA-A*01:01; NPSR1; ENSG00000187258; TAA
ITDSFTGLVN

SEQ ID NO: 53810 - protein, 11 aa, Homo sapiens
  misc_feature: Table A; Target 53810; HLA-A*02:01; NPSR1; ENSG00000187258; TAA
ITDSFTGLVNI

SEQ ID NO: 53811 - protein, 11 aa, Homo sapiens
  misc_feature: Table A; Target 53811; HLA-A*02:07; NPSR1; ENSG00000187258; TAA
ITDSFTGLVNI

SEQ ID NO: 53812 - protein, 11 aa, Homo sapiens
  misc_feature: Table A; Target 53812; HLA-A*68:02; NPSR1; ENSG00000187258; TAA
ITDSFTGLVNI

SEQ ID NO: 53813 - protein, 11 aa, Homo sapiens
  misc_feature: Table A; Target 53813; HLA-C*05:01; NPSR1; ENSG00000187258; TAA
ITDSFTGLVNI

SEQ ID NO: 53814 - protein, 9 aa, Homo sapiens
  misc_feature: Table A; Target 53814; HLA-B*57:01; NPSR1; ENSG00000187258; TAA
ITLWVLFVF

SEQ ID NO: 53815 - protein, 9 aa, Homo sapiens
  misc_feature: Table A; Target 53815; HLA-A*68:02; NPSR1; ENSG00000187258; TAA
IVAFLVYFI

SEQ ID NO: 53816 - protein, 8 aa, Homo sapiens
  misc_feature: Table A; Target 53816; HLA-C*07:04; NPSR1; ENSG00000187258; TAA
IVGNSVVL

SEQ ID NO: 53817 - protein, 9 aa, Homo sapiens
  misc_feature: Table A; Target 53817; HLA-A*23:01; NPSR1; ENSG00000187258; TAA
IVGNSVVLF

SEQ ID NO: 53818 - protein, 9 aa, Homo sapiens
  misc_feature: Table A; Target 53818; HLA-A*24:02; NPSR1; ENSG00000187258; TAA
IVGNSVVLF

SEQ ID NO: 53819 - protein, 9 aa, Homo sapiens
  misc_feature: Table A; Target 53819; HLA-A*26:01; NPSR1; ENSG00000187258; TAA
IVGNSVVLF

SEQ ID NO: 53820 - protein, 9 aa, Homo sapiens
  misc_feature: Table A; Target 53820; HLA-A*29:02; NPSR1; ENSG00000187258; TAA
IVGNSVVLF

SEQ ID NO: 53821 - protein, 9 aa, Homo sapiens
  misc_feature: Table A; Target 53821; HLA-A*32:01; NPSR1; ENSG00000187258; TAA
IVGNSVVLF

SEQ ID NO: 53822 - protein, 9 aa, Homo sapiens
  misc_feature: Table A; Target 53822; HLA-B*57:01; NPSR1; ENSG00000187258; TAA
IVGNSVVLF

SEQ ID NO: 53823 - protein, 9 aa, Homo sapiens
  misc_feature: Table A; Target 53823; HLA-C*07:04; NPSR1; ENSG00000187258; TAA
IVGNSVVLF

SEQ ID NO: 53824 - protein, 9 aa, Homo sapiens
  misc_feature: Table A; Target 53824; HLA-A*23:01; NPSR1; ENSG00000187258; TAA
IVIAWSLSF

SEQ ID NO: 53825 - protein, 9 aa, Homo sapiens
  misc_feature: Table A; Target 53825; HLA-B*57:01; NPSR1; ENSG00000187258; TAA
IVIAWSLSF

SEQ ID NO: 53826 - protein, 9 aa, Homo sapiens
  misc_feature: Table A; Target 53826; HLA-C*02:02; NPSR1; ENSG00000187258; TAA
KAKIKAIKY

SEQ ID NO: 53827 - protein, 10 aa, Homo sapiens
  misc_feature: Table A; Target 53827; HLA-B*44:02; NPSR1; ENSG00000187258; TAA
KEWGSFYYSF

SEQ ID NO: 53828 - protein, 9 aa, Homo sapiens
  misc_feature: Table A; Target 53828; HLA-B*08:01; NPSR1; ENSG00000187258; TAA
KIKAIKYSI

SEQ ID NO: 53829 - protein, 9 aa, Homo sapiens
  misc_feature: Table A; Target 53829; HLA-A*30:01; NPSR1; ENSG00000187258; TAA
KQARVLIVI

SEQ ID NO: 53830 - protein, 9 aa, Homo sapiens
  misc_feature: Table A; Target 53830; HLA-B*13:02; NPSR1; ENSG00000187258; TAA
KQARVLIVI

SEQ ID NO: 53831 - protein, 11 aa, Homo sapiens
  misc_feature: Table A; Target 53831; HLA-B*57:01; NPSR1; ENSG00000187258; TAA
KQARVLIVIAW

SEQ ID NO: 53832 - protein, 9 aa, Homo sapiens
  misc_feature: Table A; Target 53832; HLA-A*32:01; NPSR1; ENSG00000187258; TAA
KSKTYETVI

SEQ ID NO: 53833 - protein, 9 aa, Homo sapiens
  misc_feature: Table A; Target 53833; HLA-B*40:02; NPSR1; ENSG00000187258; TAA
KSKTYETVI

SEQ ID NO: 53834 - protein, 9 aa, Homo sapiens
  misc_feature: Table A; Target 53834; HLA-B*57:01; NPSR1; ENSG00000187258; TAA
KSKTYETVI

SEQ ID NO: 53835 - protein, 9 aa, Homo sapiens
  misc_feature: Table A; Target 53835; HLA-B*58:01; NPSR1; ENSG00000187258; TAA
KSKTYETVI

SEQ ID NO: 53836 - protein, 9 aa, Homo sapiens
  misc_feature: Table A; Target 53836; HLA-C*16:02; NPSR1; ENSG00000187258; TAA
KSKTYETVI

SEQ ID NO: 53837 - protein, 9 aa, Homo sapiens
  misc_feature: Table A; Target 53837; HLA-A*01:01; NPSR1; ENSG00000187258; TAA
KTEQLITLW

SEQ ID NO: 53838 - protein, 9 aa, Homo sapiens
  misc_feature: Table A; Target 53838; HLA-B*44:02; NPSR1; ENSG00000187258; TAA
KTEQLITLW

SEQ ID NO: 53839 - protein, 9 aa, Homo sapiens
  misc_feature: Table A; Target 53839; HLA-B*57:01; NPSR1; ENSG00000187258; TAA
KTEQLITLW

SEQ ID NO: 53840 - protein, 9 aa, Homo sapiens
  misc_feature: Table A; Target 53840; HLA-B*58:01; NPSR1; ENSG00000187258; TAA
KTEQLITLW

SEQ ID NO: 53841 - protein, 9 aa, Homo sapiens
  misc_feature: Table A; Target 53841; HLA-A*03:01; NPSR1; ENSG00000187258; TAA
KTYETVISN

SEQ ID NO: 53842 - protein, 9 aa, Homo sapiens
  misc_feature: Table A; Target 53842; HLA-A*11:01; NPSR1; ENSG00000187258; TAA
KTYETVISN

SEQ ID NO: 53843 - protein, 9 aa, Homo sapiens
  misc_feature: Table A; Target 53843; HLA-A*31:01; NPSR1; ENSG00000187258; TAA
KTYETVISN

SEQ ID NO: 53844 - protein, 9 aa, Homo sapiens
  misc_feature: Table A; Target 53844; HLA-B*40:02; NPSR1; ENSG00000187258; TAA
KTYETVISN

SEQ ID NO: 53845 - protein, 9 aa, Homo sapiens
  misc_feature: Table A; Target 53845; HLA-C*12:03; NPSR1; ENSG00000187258; TAA
KTYETVISN

SEQ ID NO: 53846 - protein, 10 aa, Homo sapiens
  misc_feature: Table A; Target 53846; HLA-A*02:03; NPSR1; ENSG00000187258; TAA
KTYETVISNC

SEQ ID NO: 53847 - protein, 10 aa, Homo sapiens
  misc_feature: Table A; Target 53847; HLA-A*03:01; NPSR1; ENSG00000187258; TAA
KTYETVISNC

SEQ ID NO: 53848 - protein, 10 aa, Homo sapiens
  misc_feature: Table A; Target 53848; HLA-A*03:02; NPSR1; ENSG00000187258; TAA
KTYETVISNC

SEQ ID NO: 53849 - protein, 10 aa, Homo sapiens
  misc_feature: Table A; Target 53849; HLA-A*24:02; NPSR1; ENSG00000187258; TAA
KYSIIIILAF

SEQ ID NO: 53850 - protein, 10 aa, Homo sapiens
  misc_feature: Table A; Target 53850; HLA-C*02:02; NPSR1; ENSG00000187258; TAA
LAITDSFTGL

SEQ ID NO: 53851 - protein, 10 aa, Homo sapiens
  misc_feature: Table A; Target 53851; HLA-C*03:03; NPSR1; ENSG00000187258; TAA
LAITDSFTGL

SEQ ID NO: 53852 - protein, 10 aa, Homo sapiens
  misc_feature: Table A; Target 53852; HLA-C*03:04; NPSR1; ENSG00000187258; TAA
LAITDSFTGL

SEQ ID NO: 53853 - protein, 8 aa, Homo sapiens
  misc_feature: Table A; Target 53853; HLA-C*04:01; NPSR1; ENSG00000187258; TAA
LFDILDNF

SEQ ID NO: 53854 - protein, 9 aa, Homo sapiens
  misc_feature: Table A; Target 53854; HLA-A*02:07; NPSR1; ENSG00000187258; TAA
LLPDTQERF

SEQ ID NO: 53855 - protein, 9 aa, Homo sapiens
  misc_feature: Table A; Target 53855; HLA-A*24:02; NPSR1; ENSG00000187258; TAA
LLPDTQERF

SEQ ID NO: 53856 - protein, 9 aa, Homo sapiens
  misc_feature: Table A; Target 53856; HLA-A*29:02; NPSR1; ENSG00000187258; TAA
LLPDTQERF

SEQ ID NO: 53857 - protein, 10 aa, Homo sapiens
  misc_feature: Table A; Target 53857; HLA-A*29:02; NPSR1; ENSG00000187258; TAA
LLPDTQERFY

SEQ ID NO: 53858 - protein, 11 aa, Homo sapiens
  misc_feature: Table A; Target 53858; HLA-A*02:01; NPSR1; ENSG00000187258; TAA
LLPDTQERFYA

SEQ ID NO: 53859 - protein, 11 aa, Homo sapiens
  misc_feature: Table A; Target 53859; HLA-A*02:07; NPSR1; ENSG00000187258; TAA
LLPDTQERFYA

SEQ ID NO: 53860 - protein, 9 aa, Homo sapiens
  misc_feature: Table A; Target 53860; HLA-A*02:01; NPSR1; ENSG00000187258; TAA
LLYASTYVL

SEQ ID NO: 53861 - protein, 9 aa, Homo sapiens
  misc_feature: Table A; Target 53861; HLA-A*02:04; NPSR1; ENSG00000187258; TAA
LLYASTYVL

SEQ ID NO: 53862 - protein, 9 aa, Homo sapiens
  misc_feature: Table A; Target 53862; HLA-C*14:02; NPSR1; ENSG00000187258; TAA
LLYASTYVL

SEQ ID NO: 53863 - protein, 10 aa, Homo sapiens
  misc_feature: Table A; Target 53863; HLA-A*02:03; NPSR1; ENSG00000187258; TAA
LLYASTYVLV

SEQ ID NO: 53864 - protein, 10 aa, Homo sapiens
  misc_feature: Table A; Target 53864; HLA-A*02:07; NPSR1; ENSG00000187258; TAA
LLYASTYVLV

SEQ ID NO: 53865 - protein, 10 aa, Homo sapiens
  misc_feature: Table A; Target 53865; HLA-A*29:02; NPSR1; ENSG00000187258; TAA
LNSAINPLIY

SEQ ID NO: 53866 - protein, 8 aa, Homo sapiens
  misc_feature: Table A; Target 53866; HLA-B*07:02; NPSR1; ENSG00000187258; TAA
LPALNSAI

SEQ ID NO: 53867 - protein, 8 aa, Homo sapiens
  misc_feature: Table A; Target 53867; HLA-B*35:03; NPSR1; ENSG00000187258; TAA
LPALNSAI

SEQ ID NO: 53868 - protein, 8 aa, Homo sapiens
  misc_feature: Table A; Target 53868; HLA-B*51:01; NPSR1; ENSG00000187258; TAA
LPALNSAI

SEQ ID NO: 53869 - protein, 11 aa, Homo sapiens
  misc_feature: Table A; Target 53869; HLA-B*07:02; NPSR1; ENSG00000187258; TAA
LPALNSAINPL

SEQ ID NO: 53870 - protein, 11 aa, Homo sapiens
  misc_feature: Table A; Target 53870; HLA-B*35:03; NPSR1; ENSG00000187258; TAA
LPALNSAINPL

SEQ ID NO: 53871 - protein, 8 aa, Homo sapiens
  misc_feature: Table A; Target 53871; HLA-B*55:01; NPSR1; ENSG00000187258; TAA
LPDTQERF

SEQ ID NO: 53872 - protein, 8 aa, Homo sapiens
  misc_feature: Table A; Target 53872; HLA-C*03:03; NPSR1; ENSG00000187258; TAA
LPDTQERF

SEQ ID NO: 53873 - protein, 8 aa, Homo sapiens
  misc_feature: Table A; Target 53873; HLA-C*05:01; NPSR1; ENSG00000187258; TAA
LPDTQERF

SEQ ID NO: 53874 - protein, 9 aa, Homo sapiens
  misc_feature: Table A; Target 53874; HLA-A*01:01; NPSR1; ENSG00000187258; TAA
LPDTQERFY

SEQ ID NO: 53875 - protein, 9 aa, Homo sapiens
  misc_feature: Table A; Target 53875; HLA-B*35:01; NPSR1; ENSG00000187258; TAA
LPDTQERFY

SEQ ID NO: 53876 - protein, 9 aa, Homo sapiens
  misc_feature: Table A; Target 53876; HLA-B*51:01; NPSR1; ENSG00000187258; TAA
LPDTQERFY

SEQ ID NO: 53877 - protein, 9 aa, Homo sapiens
  misc_feature: Table A; Target 53877; HLA-B*55:01; NPSR1; ENSG00000187258; TAA
LPDTQERFY

SEQ ID NO: 53878 - protein, 9 aa, Homo sapiens
  misc_feature: Table A; Target 53878; HLA-C*03:03; NPSR1; ENSG00000187258; TAA
LPDTQERFY

SEQ ID NO: 53879 - protein, 10 aa, Homo sapiens
  misc_feature: Table A; Target 53879; HLA-B*57:01; NPSR1; ENSG00000187258; TAA
LSFLFSIPTL

SEQ ID NO: 53880 - protein, 9 aa, Homo sapiens
  misc_feature: Table A; Target 53880; HLA-A*24:02; NPSR1; ENSG00000187258; TAA
LSIDRYHAI

SEQ ID NO: 53881 - protein, 11 aa, Homo sapiens
  misc_feature: Table A; Target 53881; HLA-A*01:01; NPSR1; ENSG00000187258; TAA
LSIDRYHAIVY

SEQ ID NO: 53882 - protein, 9 aa, Homo sapiens
  misc_feature: Table A; Target 53882; HLA-A*25:01; NPSR1; ENSG00000187258; TAA
LSNGEVQCW

SEQ ID NO: 53883 - protein, 9 aa, Homo sapiens
  misc_feature: Table A; Target 53883; HLA-A*32:01; NPSR1; ENSG00000187258; TAA
LSNGEVQCW

SEQ ID NO: 53884 - protein, 9 aa, Homo sapiens
  misc_feature: Table A; Target 53884; HLA-A*33:03; NPSR1; ENSG00000187258; TAA
LSNGEVQCW

SEQ ID NO: 53885 - protein, 9 aa, Homo sapiens
  misc_feature: Table A; Target 53885; HLA-B*57:01; NPSR1; ENSG00000187258; TAA
LSNGEVQCW

SEQ ID NO: 53886 - protein, 9 aa, Homo sapiens
  misc_feature: Table A; Target 53886; HLA-B*58:01; NPSR1; ENSG00000187258; TAA
LSNGEVQCW

SEQ ID NO: 53887 - protein, 9 aa, Homo sapiens
  misc_feature: Table A; Target 53887; HLA-C*16:04; NPSR1; ENSG00000187258; TAA
LSNGEVQCW

SEQ ID NO: 53888 - protein, 10 aa, Homo sapiens
  misc_feature: Table A; Target 53888; HLA-B*57:01; NPSR1; ENSG00000187258; TAA
LVNILTDINW

SEQ ID NO: 53889 - protein, 9 aa, Homo sapiens
  misc_feature: Table A; Target 53889; HLA-A*01:01; NPSR1; ENSG00000187258; TAA
LVSLSIDRY

SEQ ID NO: 53890 - protein, 9 aa, Homo sapiens
  misc_feature: Table A; Target 53890; HLA-A*29:02; NPSR1; ENSG00000187258; TAA
LVSLSIDRY

SEQ ID NO: 53891 - protein, 9 aa, Homo sapiens
  misc_feature: Table A; Target 53891; HLA-A*30:02; NPSR1; ENSG00000187258; TAA
LVSLSIDRY

SEQ ID NO: 53892 - protein, 9 aa, Homo sapiens
  misc_feature: Table A; Target 53892; HLA-B*15:01; NPSR1; ENSG00000187258; TAA
LVSLSIDRY

SEQ ID NO: 53893 - protein, 9 aa, Homo sapiens
  misc_feature: Table A; Target 53893; HLA-B*58:01; NPSR1; ENSG00000187258; TAA
LVSLSIDRY

SEQ ID NO: 53894 - protein, 9 aa, Homo sapiens
  misc_feature: Table A; Target 53894; HLA-C*16:01; NPSR1; ENSG00000187258; TAA
LVSLSIDRY

SEQ ID NO: 53895 - protein, 9 aa, Homo sapiens
  misc_feature: Table A; Target 53895; HLA-A*02:03; NPSR1; ENSG00000187258; TAA
LVYFIPLTI

SEQ ID NO: 53896 - protein, 9 aa, Homo sapiens
  misc_feature: Table A; Target 53896; HLA-A*68:02; NPSR1; ENSG00000187258; TAA
LVYFIPLTI

SEQ ID NO: 53897 - protein, 9 aa, Homo sapiens
  misc_feature: Table A; Target 53897; HLA-B*13:02; NPSR1; ENSG00000187258; TAA
LVYFIPLTI

SEQ ID NO: 53898 - protein, 9 aa, Homo sapiens
  misc_feature: Table A; Target 53898; HLA-B*51:01; NPSR1; ENSG00000187258; TAA
LVYFIPLTI

SEQ ID NO: 53899 - protein, 9 aa, Homo sapiens
  misc_feature: Table A; Target 53899; HLA-C*02:02; NPSR1; ENSG00000187258; TAA
LVYFIPLTI

SEQ ID NO: 53900 - protein, 9 aa, Homo sapiens
  misc_feature: Table A; Target 53900; HLA-A*24:02; NPSR1; ENSG00000187258; TAA
LWVLFVFTI

SEQ ID NO: 53901 - protein, 8 aa, Homo sapiens
  misc_feature: Table A; Target 53901; HLA-A*23:01; NPSR1; ENSG00000187258; TAA
LYASTYVL

SEQ ID NO: 53902 - protein, 8 aa, Homo sapiens
  misc_feature: Table A; Target 53902; HLA-A*24:02; NPSR1; ENSG00000187258; TAA
LYASTYVL

SEQ ID NO: 53903 - protein, 8 aa, Homo sapiens
  misc_feature: Table A; Target 53903; HLA-C*14:02; NPSR1; ENSG00000187258; TAA
LYASTYVL

SEQ ID NO: 53904 - protein, 9 aa, Homo sapiens
  misc_feature: Table A; Target 53904; HLA-A*23:01; NPSR1; ENSG00000187258; TAA
LYASTYVLV

SEQ ID NO: 53905 - protein, 9 aa, Homo sapiens
  misc_feature: Table A; Target 53905; HLA-A*24:02; NPSR1; ENSG00000187258; TAA
LYASTYVLV

SEQ ID NO: 53906 - protein, 11 aa, Homo sapiens
  misc_feature: Table A; Target 53906; HLA-A*24:02; NPSR1; ENSG00000187258; TAA
LYASTYVLVSL

SEQ ID NO: 53907 - protein, 10 aa, Homo sapiens
  misc_feature: Table A; Target 53907; HLA-A*25:01; NPSR1; ENSG00000187258; TAA
MPANFTEGSF

SEQ ID NO: 53908 - protein, 10 aa, Homo sapiens
  misc_feature: Table A; Target 53908; HLA-B*35:01; NPSR1; ENSG00000187258; TAA
MPANFTEGSF

SEQ ID NO: 53909 - protein, 10 aa, Homo sapiens
  misc_feature: Table A; Target 53909; HLA-B*35:03; NPSR1; ENSG00000187258; TAA
MPANFTEGSF

SEQ ID NO: 53910 - protein, 10 aa, Homo sapiens
  misc_feature: Table A; Target 53910; HLA-B*55:01; NPSR1; ENSG00000187258; TAA
MPANFTEGSF

SEQ ID NO: 53911 - protein, 9 aa, Homo sapiens
  misc_feature: Table A; Target 53911; HLA-B*15:01; NPSR1; ENSG00000187258; TAA
MQILSKPEF

SEQ ID NO: 53912 - protein, 9 aa, Homo sapiens
  misc_feature: Table A; Target 53912; HLA-B*15:03; NPSR1; ENSG00000187258; TAA
MQILSKPEF

SEQ ID NO: 53913 - protein, 8 aa, Homo sapiens
  misc_feature: Table A; Target 53913; HLA-A*68:02; NPSR1; ENSG00000187258; TAA
MTFFVTQL

SEQ ID NO: 53914 - protein, 8 aa, Homo sapiens
  misc_feature: Table A; Target 53914; HLA-B*18:01; NPSR1; ENSG00000187258; TAA
MTFFVTQL

SEQ ID NO: 53915 - protein, 9 aa, Homo sapiens
  misc_feature: Table A; Target 53915; HLA-A*68:02; NPSR1; ENSG00000187258; TAA
MTFFVTQLA

SEQ ID NO: 53916 - protein, 10 aa, Homo sapiens
  misc_feature: Table A; Target 53916; HLA-A*68:02; NPSR1; ENSG00000187258; TAA
MTFFVTQLAI

SEQ ID NO: 53917 - protein, 9 aa, Homo sapiens
  misc_feature: Table A; Target 53917; HLA-A*01:01; NPSR1; ENSG00000187258; TAA
MTIVAFLVY

SEQ ID NO: 53918 - protein, 9 aa, Homo sapiens
  misc_feature: Table A; Target 53918; HLA-A*25:01; NPSR1; ENSG00000187258; TAA
MTIVAFLVY

SEQ ID NO: 53919 - protein, 9 aa, Homo sapiens
  misc_feature: Table A; Target 53919; HLA-A*29:02; NPSR1; ENSG00000187258; TAA
MTIVAFLVY

SEQ ID NO: 53920 - protein, 9 aa, Homo sapiens
  misc_feature: Table A; Target 53920; HLA-B*57:01; NPSR1; ENSG00000187258; TAA
MTIVAFLVY

SEQ ID NO: 53921 - protein, 9 aa, Homo sapiens
  misc_feature: Table A; Target 53921; HLA-A*23:01; NPSR1; ENSG00000187258; TAA
MYGIVIRTI

SEQ ID NO: 53922 - protein, 9 aa, Homo sapiens
  misc_feature: Table A; Target 53922; HLA-A*24:02; NPSR1; ENSG00000187258; TAA
MYGIVIRTI

SEQ ID NO: 53923 - protein, 10 aa, Homo sapiens
  misc_feature: Table A; Target 53923; HLA-A*24:02; NPSR1; ENSG00000187258; TAA
MYGIVIRTIW

SEQ ID NO: 53924 - protein, 9 aa, Homo sapiens
  misc_feature: Table A; Target 53924; HLA-A*33:01; NPSR1; ENSG00000187258; TAA
NLLPDTQER

SEQ ID NO: 53925 - protein, 9 aa, Homo sapiens
  misc_feature: Table A; Target 53925; HLA-A*33:03; NPSR1; ENSG00000187258; TAA
NLLPDTQER

SEQ ID NO: 53926 - protein, 10 aa, Homo sapiens
  misc_feature: Table A; Target 53926; HLA-A*29:02; NPSR1; ENSG00000187258; TAA
NLLPDTQERF

SEQ ID NO: 53927 - protein, 11 aa, Homo sapiens
  misc_feature: Table A; Target 53927; HLA-A*29:02; NPSR1; ENSG00000187258; TAA
NLLPDTQERFY

SEQ ID NO: 53928 - protein, 11 aa, Homo sapiens
  misc_feature: Table A; Target 53928; HLA-A*30:02; NPSR1; ENSG00000187258; TAA
NLLPDTQERFY

SEQ ID NO: 53929 - protein, 9 aa, Homo sapiens
  misc_feature: Table A; Target 53929; HLA-A*02:07; NPSR1; ENSG00000187258; TAA
NLPALNSAI

SEQ ID NO: 53930 - protein, 9 aa, Homo sapiens
  misc_feature: Table A; Target 53930; HLA-C*01:02; NPSR1; ENSG00000187258; TAA
NLPALNSAI

SEQ ID NO: 53931 - protein, 9 aa, Homo sapiens
  misc_feature: Table A; Target 53931; HLA-B*27:05; NPSR1; ENSG00000187258; TAA
NRGLISKAK

SEQ ID NO: 53932 - protein, 9 aa, Homo sapiens
  misc_feature: Table A; Target 53932; HLA-A*01:01; NPSR1; ENSG00000187258; TAA
NSAINPLIY

SEQ ID NO: 53933 - protein, 9 aa, Homo sapiens
  misc_feature: Table A; Target 53933; HLA-A*26:01; NPSR1; ENSG00000187258; TAA
NSAINPLIY

SEQ ID NO: 53934 - protein, 9 aa, Homo sapiens
  misc_feature: Table A; Target 53934; HLA-A*29:02; NPSR1; ENSG00000187258; TAA
NSAINPLIY

SEQ ID NO: 53935 - protein, 9 aa, Homo sapiens
  misc_feature: Table A; Target 53935; HLA-A*30:02; NPSR1; ENSG00000187258; TAA
NSAINPLIY

SEQ ID NO: 53936 - protein, 9 aa, Homo sapiens
  misc_feature: Table A; Target 53936; HLA-B*15:03; NPSR1; ENSG00000187258; TAA
NSAINPLIY

SEQ ID NO: 53937 - protein, 9 aa, Homo sapiens
  misc_feature: Table A; Target 53937; HLA-B*18:01; NPSR1; ENSG00000187258; TAA
NSAINPLIY

SEQ ID NO: 53938 - protein, 9 aa, Homo sapiens
  misc_feature: Table A; Target 53938; HLA-B*35:01; NPSR1; ENSG00000187258; TAA
NSAINPLIY

SEQ ID NO: 53939 - protein, 9 aa, Homo sapiens
  misc_feature: Table A; Target 53939; HLA-B*58:01; NPSR1; ENSG00000187258; TAA
NSAINPLIY

SEQ ID NO: 53940 - protein, 9 aa, Homo sapiens
  misc_feature: Table A; Target 53940; HLA-C*02:02; NPSR1; ENSG00000187258; TAA
NSAINPLIY

SEQ ID NO: 53941 - protein, 9 aa, Homo sapiens
  misc_feature: Table A; Target 53941; HLA-C*07:01; NPSR1; ENSG00000187258; TAA
NSAINPLIY

SEQ ID NO: 53942 - protein, 9 aa, Homo sapiens
  misc_feature: Table A; Target 53942; HLA-C*07:04; NPSR1; ENSG00000187258; TAA
NSAINPLIY

SEQ ID NO: 53943 - protein, 9 aa, Homo sapiens
  misc_feature: Table A; Target 53943; HLA-C*12:03; NPSR1; ENSG00000187258; TAA
NSAINPLIY

SEQ ID NO: 53944 - protein, 9 aa, Homo sapiens
  misc_feature: Table A; Target 53944; HLA-C*16:01; NPSR1; ENSG00000187258; TAA
NSAINPLIY

SEQ ID NO: 53945 - protein, 9 aa, Homo sapiens
  misc_feature: Table A; Target 53945; HLA-C*16:02; NPSR1; ENSG00000187258; TAA
NSAINPLIY

SEQ ID NO: 53946 - protein, 9 aa, Homo sapiens
  misc_feature: Table A; Target 53946; HLA-A*25:01; NPSR1; ENSG00000187258; TAA
NSVVLFSTW

SEQ ID NO: 53947 - protein, 9 aa, Homo sapiens
  misc_feature: Table A; Target 53947; HLA-B*44:02; NPSR1; ENSG00000187258; TAA
NSVVLFSTW

SEQ ID NO: 53948 - protein, 9 aa, Homo sapiens
  misc_feature: Table A; Target 53948; HLA-B*44:03; NPSR1; ENSG00000187258; TAA
NSVVLFSTW

SEQ ID NO: 53949 - protein, 9 aa, Homo sapiens
  misc_feature: Table A; Target 53949; HLA-B*57:01; NPSR1; ENSG00000187258; TAA
NSVVLFSTW

SEQ ID NO: 53950 - protein, 9 aa, Homo sapiens
  misc_feature: Table A; Target 53950; HLA-B*58:01; NPSR1; ENSG00000187258; TAA
NSVVLFSTW

SEQ ID NO: 53951 - protein, 11 aa, Homo sapiens
  misc_feature: Table A; Target 53951; HLA-A*24:02; NPSR1; ENSG00000187258; TAA
PYFLFDILDNF

SEQ ID NO: 53952 - protein, 8 aa, Homo sapiens
  misc_feature: Table A; Target 53952; HLA-A*23:01; NPSR1; ENSG00000187258; TAA
PYMTIVAF

SEQ ID NO: 53953 - protein, 8 aa, Homo sapiens
  misc_feature: Table A; Target 53953; HLA-A*24:02; NPSR1; ENSG00000187258; TAA
PYMTIVAF

SEQ ID NO: 53954 - protein, 9 aa, Homo sapiens
  misc_feature: Table A; Target 53954; HLA-A*23:01; NPSR1; ENSG00000187258; TAA
PYMTIVAFL

SEQ ID NO: 53955 - protein, 9 aa, Homo sapiens
  misc_feature: Table A; Target 53955; HLA-A*24:02; NPSR1; ENSG00000187258; TAA
PYMTIVAFL

SEQ ID NO: 53956 - protein, 8 aa, Homo sapiens
  misc_feature: Table A; Target 53956; HLA-B*51:01; NPSR1; ENSG00000187258; TAA
QARVLIVI

SEQ ID NO: 53957 - protein, 10 aa, Homo sapiens
  misc_feature: Table A; Target 53957; HLA-B*57:01; NPSR1; ENSG00000187258; TAA
QARVLIVIAW

SEQ ID NO: 53958 - protein, 9 aa, Homo sapiens
  misc_feature: Table A; Target 53958; HLA-B*49:01; NPSR1; ENSG00000187258; TAA
QERFYASVI

SEQ ID NO: 53959 - protein, 9 aa, Homo sapiens
  misc_feature: Table A; Target 53959; HLA-C*03:04; NPSR1; ENSG00000187258; TAA
QGEKQARVL

SEQ ID NO: 53960 - protein, 9 aa, Homo sapiens
  misc_feature: Table A; Target 53960; HLA-B*13:02; NPSR1; ENSG00000187258; TAA
QILSKPEFI

SEQ ID NO: 53961 - protein, 8 aa, Homo sapiens
  misc_feature: Table A; Target 53961; HLA-A*02:04; NPSR1; ENSG00000187258; TAA
QLITLWVL

SEQ ID NO: 53962 - protein, 10 aa, Homo sapiens
  misc_feature: Table A; Target 53962; HLA-B*27:02; NPSR1; ENSG00000187258; TAA
QRSQDSRMTF

SEQ ID NO: 53963 - protein, 10 aa, Homo sapiens
  misc_feature: Table A; Target 53963; HLA-B*27:05; NPSR1; ENSG00000187258; TAA
QRSQDSRMTF

SEQ ID NO: 53964 - protein, 10 aa, Homo sapiens
  misc_feature: Table A; Target 53964; HLA-B*38:01; NPSR1; ENSG00000187258; TAA
QRSQDSRMTF

SEQ ID NO: 53965 - protein, 10 aa, Homo sapiens
  misc_feature: Table A; Target 53965; HLA-C*16:04; NPSR1; ENSG00000187258; TAA
QRSQDSRMTF

SEQ ID NO: 53966 - protein, 9 aa, Homo sapiens
  misc_feature: Table A; Target 53966; HLA-B*39:01; NPSR1; ENSG00000187258; TAA
QTLDSSPVA

SEQ ID NO: 53967 - protein, 10 aa, Homo sapiens
  misc_feature: Table A; Target 53967; HLA-A*25:01; NPSR1; ENSG00000187258; TAA
QVVLLYASTY

SEQ ID NO: 53968 - protein, 10 aa, Homo sapiens
  misc_feature: Table A; Target 53968; HLA-A*26:01; NPSR1; ENSG00000187258; TAA
QVVLLYASTY

SEQ ID NO: 53969 - protein, 10 aa, Homo sapiens
  misc_feature: Table A; Target 53969; HLA-A*30:02; NPSR1; ENSG00000187258; TAA
QVVLLYASTY

SEQ ID NO: 53970 - protein, 10 aa, Homo sapiens
  misc_feature: Table A; Target 53970; HLA-B*15:01; NPSR1; ENSG00000187258; TAA
QVVLLYASTY

SEQ ID NO: 53971 - protein, 10 aa, Homo sapiens
  misc_feature: Table A; Target 53971; HLA-B*35:01; NPSR1; ENSG00000187258; TAA
QVVLLYASTY

SEQ ID NO: 53972 - protein, 10 aa, Homo sapiens
  misc_feature: Table A; Target 53972; HLA-C*07:01; NPSR1; ENSG00000187258; TAA
QVVLLYASTY

SEQ ID NO: 53973 - protein, 9 aa, Homo sapiens
  misc_feature: Table A; Target 53973; HLA-A*02:01; NPSR1; ENSG00000187258; TAA
RMTFFVTQL

SEQ ID NO: 53974 - protein, 9 aa, Homo sapiens
  misc_feature: Table A; Target 53974; HLA-A*02:03; NPSR1; ENSG00000187258; TAA
RMTFFVTQL

SEQ ID NO: 53975 - protein, 9 aa, Homo sapiens
  misc_feature: Table A; Target 53975; HLA-A*02:04; NPSR1; ENSG00000187258; TAA
RMTFFVTQL

SEQ ID NO: 53976 - protein, 9 aa, Homo sapiens
  misc_feature: Table A; Target 53976; HLA-A*02:07; NPSR1; ENSG00000187258; TAA
RMTFFVTQL

SEQ ID NO: 53977 - protein, 9 aa, Homo sapiens
  misc_feature: Table A; Target 53977; HLA-A*23:01; NPSR1; ENSG00000187258; TAA
RMTFFVTQL

SEQ ID NO: 53978 - protein, 9 aa, Homo sapiens
  misc_feature: Table A; Target 53978; HLA-A*24:02; NPSR1; ENSG00000187258; TAA
RMTFFVTQL

SEQ ID NO: 53979 - protein, 9 aa, Homo sapiens
  misc_feature: Table A; Target 53979; HLA-A*30:02; NPSR1; ENSG00000187258; TAA
RSQDSRMTF

SEQ ID NO: 53980 - protein, 9 aa, Homo sapiens
  misc_feature: Table A; Target 53980; HLA-A*31:01; NPSR1; ENSG00000187258; TAA
RSQDSRMTF

SEQ ID NO: 53981 - protein, 9 aa, Homo sapiens
  misc_feature: Table A; Target 53981; HLA-A*32:01; NPSR1; ENSG00000187258; TAA
RSQDSRMTF

SEQ ID NO: 53982 - protein, 9 aa, Homo sapiens
  misc_feature: Table A; Target 53982; HLA-B*07:02; NPSR1; ENSG00000187258; TAA
RSQDSRMTF

SEQ ID NO: 53983 - protein, 9 aa, Homo sapiens
  misc_feature: Table A; Target 53983; HLA-B*15:01; NPSR1; ENSG00000187258; TAA
RSQDSRMTF

SEQ ID NO: 53984 - protein, 9 aa, Homo sapiens
  misc_feature: Table A; Target 53984; HLA-B*46:01; NPSR1; ENSG00000187258; TAA
RSQDSRMTF

SEQ ID NO: 53985 - protein, 9 aa, Homo sapiens
  misc_feature: Table A; Target 53985; HLA-B*57:01; NPSR1; ENSG00000187258; TAA
RSQDSRMTF

SEQ ID NO: 53986 - protein, 9 aa, Homo sapiens
  misc_feature: Table A; Target 53986; HLA-B*58:01; NPSR1; ENSG00000187258; TAA
RSQDSRMTF

SEQ ID NO: 53987 - protein, 9 aa, Homo sapiens
  misc_feature: Table A; Target 53987; HLA-C*03:04; NPSR1; ENSG00000187258; TAA
RSQDSRMTF

SEQ ID NO: 53988 - protein, 9 aa, Homo sapiens
  misc_feature: Table A; Target 53988; HLA-C*07:02; NPSR1; ENSG00000187258; TAA
RSQDSRMTF

SEQ ID NO: 53989 - protein, 9 aa, Homo sapiens
  misc_feature: Table A; Target 53989; HLA-C*12:03; NPSR1; ENSG00000187258; TAA
RSQDSRMTF

SEQ ID NO: 53990 - protein, 9 aa, Homo sapiens
  misc_feature: Table A; Target 53990; HLA-C*16:01; NPSR1; ENSG00000187258; TAA
RSQDSRMTF

SEQ ID NO: 53991 - protein, 9 aa, Homo sapiens
  misc_feature: Table A; Target 53991; HLA-C*16:02; NPSR1; ENSG00000187258; TAA
RSQDSRMTF

SEQ ID NO: 53992 - protein, 10 aa, Homo sapiens
  misc_feature: Table A; Target 53992; HLA-A*31:01; NPSR1; ENSG00000187258; TAA
RSQDSRMTFR

SEQ ID NO: 53993 - protein, 10 aa, Homo sapiens
  misc_feature: Table A; Target 53993; HLA-B*57:01; NPSR1; ENSG00000187258; TAA
RTIWIKSKTY

SEQ ID NO: 53994 - protein, 11 aa, Homo sapiens
  misc_feature: Table A; Target 53994; HLA-A*25:01; NPSR1; ENSG00000187258; TAA
RTLSNGEVQCW

SEQ ID NO: 53995 - protein, 11 aa, Homo sapiens
  misc_feature: Table A; Target 53995; HLA-A*32:01; NPSR1; ENSG00000187258; TAA
RTLSNGEVQCW

SEQ ID NO: 53996 - protein, 11 aa, Homo sapiens
  misc_feature: Table A; Target 53996; HLA-B*44:03; NPSR1; ENSG00000187258; TAA
RTLSNGEVQCW

SEQ ID NO: 53997 - protein, 11 aa, Homo sapiens
  misc_feature: Table A; Target 53997; HLA-B*57:01; NPSR1; ENSG00000187258; TAA
RTLSNGEVQCW

SEQ ID NO: 53998 - protein, 11 aa, Homo sapiens
  misc_feature: Table A; Target 53998; HLA-B*58:01; NPSR1; ENSG00000187258; TAA
RTLSNGEVQCW

SEQ ID NO: 53999 - protein, 11 aa, Homo sapiens
  misc_feature: Table A; Target 53999; HLA-C*16:04; NPSR1; ENSG00000187258; TAA
RTLSNGEVQCW

SEQ ID NO: 54000 - protein, 8 aa, Homo sapiens
  misc_feature: Table A; Target 54000; HLA-B*57:01; NPSR1; ENSG00000187258; TAA
RVLIVIAW

SEQ ID NO: 54001 - protein, 8 aa, Homo sapiens
  misc_feature: Table A; Target 54001; HLA-A*23:01; NPSR1; ENSG00000187258; TAA
RYLQVVLL

SEQ ID NO: 54002 - protein, 8 aa, Homo sapiens
  misc_feature: Table A; Target 54002; HLA-A*24:02; NPSR1; ENSG00000187258; TAA
RYLQVVLL

SEQ ID NO: 54003 - protein, 9 aa, Homo sapiens
  misc_feature: Table A; Target 54003; HLA-A*23:01; NPSR1; ENSG00000187258; TAA
RYLQVVLLY

SEQ ID NO: 54004 - protein, 9 aa, Homo sapiens
  misc_feature: Table A; Target 54004; HLA-A*24:02; NPSR1; ENSG00000187258; TAA
RYLQVVLLY

SEQ ID NO: 54005 - protein, 9 aa, Homo sapiens
  misc_feature: Table A; Target 54005; HLA-A*29:02; NPSR1; ENSG00000187258; TAA
RYLQVVLLY

SEQ ID NO: 54006 - protein, 9 aa, Homo sapiens
  misc_feature: Table A; Target 54006; HLA-A*30:02; NPSR1; ENSG00000187258; TAA
RYLQVVLLY

SEQ ID NO: 54007 - protein, 9 aa, Homo sapiens
  misc_feature: Table A; Target 54007; HLA-B*57:01; NPSR1; ENSG00000187258; TAA
RYLQVVLLY

SEQ ID NO: 54008 - protein, 8 aa, Homo sapiens
  misc_feature: Table A; Target 54008; HLA-A*29:02; NPSR1; ENSG00000187258; TAA
SAINPLIY

SEQ ID NO: 54009 - protein, 8 aa, Homo sapiens
  misc_feature: Table A; Target 54009; HLA-A*30:02; NPSR1; ENSG00000187258; TAA
SAINPLIY

SEQ ID NO: 54010 - protein, 8 aa, Homo sapiens
  misc_feature: Table A; Target 54010; HLA-B*15:01; NPSR1; ENSG00000187258; TAA
SAINPLIY

SEQ ID NO: 54011 - protein, 8 aa, Homo sapiens
  misc_feature: Table A; Target 54011; HLA-B*15:03; NPSR1; ENSG00000187258; TAA
SAINPLIY

SEQ ID NO: 54012 - protein, 8 aa, Homo sapiens
  misc_feature: Table A; Target 54012; HLA-B*35:01; NPSR1; ENSG00000187258; TAA
SAINPLIY

SEQ ID NO: 54013 - protein, 8 aa, Homo sapiens
  misc_feature: Table A; Target 54013; HLA-B*39:01; NPSR1; ENSG00000187258; TAA
SAINPLIY

SEQ ID NO: 54014 - protein, 8 aa, Homo sapiens
  misc_feature: Table A; Target 54014; HLA-B*46:01; NPSR1; ENSG00000187258; TAA
SAINPLIY

SEQ ID NO: 54015 - protein, 8 aa, Homo sapiens
  misc_feature: Table A; Target 54015; HLA-B*58:01; NPSR1; ENSG00000187258; TAA
SAINPLIY

SEQ ID NO: 54016 - protein, 8 aa, Homo sapiens
  misc_feature: Table A; Target 54016; HLA-C*02:02; NPSR1; ENSG00000187258; TAA
SAINPLIY

SEQ ID NO: 54017 - protein, 8 aa, Homo sapiens
  misc_feature: Table A; Target 54017; HLA-C*03:03; NPSR1; ENSG00000187258; TAA
SAINPLIY

SEQ ID NO: 54018 - protein, 8 aa, Homo sapiens
  misc_feature: Table A; Target 54018; HLA-C*07:01; NPSR1; ENSG00000187258; TAA
SAINPLIY

SEQ ID NO: 54019 - protein, 8 aa, Homo sapiens
  misc_feature: Table A; Target 54019; HLA-C*12:03; NPSR1; ENSG00000187258; TAA
SAINPLIY

SEQ ID NO: 54020 - protein, 8 aa, Homo sapiens
  misc_feature: Table A; Target 54020; HLA-C*14:02; NPSR1; ENSG00000187258; TAA
SAINPLIY

SEQ ID NO: 54021 - protein, 8 aa, Homo sapiens
  misc_feature: Table A; Target 54021; HLA-C*16:01; NPSR1; ENSG00000187258; TAA
SAINPLIY

SEQ ID NO: 54022 - protein, 8 aa, Homo sapiens
  misc_feature: Table A; Target 54022; HLA-C*16:02; NPSR1; ENSG00000187258; TAA
SAINPLIY

SEQ ID NO: 54023 - protein, 8 aa, Homo sapiens
  misc_feature: Table A; Target 54023; HLA-C*16:04; NPSR1; ENSG00000187258; TAA
SAINPLIY

SEQ ID NO: 54024 - protein, 9 aa, Homo sapiens
  misc_feature: Table A; Target 54024; HLA-C*02:02; NPSR1; ENSG00000187258; TAA
SAINPLIYC

SEQ ID NO: 54025 - protein, 9 aa, Homo sapiens
  misc_feature: Table A; Target 54025; HLA-C*12:03; NPSR1; ENSG00000187258; TAA
SAINPLIYC

SEQ ID NO: 54026 - protein, 10 aa, Homo sapiens
  misc_feature: Table A; Target 54026; HLA-A*68:02; NPSR1; ENSG00000187258; TAA
SAINPLIYCV

SEQ ID NO: 54027 - protein, 9 aa, Homo sapiens
  misc_feature: Table A; Target 54027; HLA-A*30:02; NPSR1; ENSG00000187258; TAA
SDGKLCSSY

SEQ ID NO: 54028 - protein, 9 aa, Homo sapiens
  misc_feature: Table A; Target 54028; HLA-B*18:01; NPSR1; ENSG00000187258; TAA
SDGKLCSSY

SEQ ID NO: 54029 - protein, 9 aa, Homo sapiens
  misc_feature: Table A; Target 54029; HLA-C*07:01; NPSR1; ENSG00000187258; TAA
SDGKLCSSY

SEQ ID NO: 54030 - protein, 8 aa, Homo sapiens
  misc_feature: Table A; Target 54030; HLA-C*04:01; NPSR1; ENSG00000187258; TAA
SFDSSGTG

SEQ ID NO: 54031 - protein, 9 aa, Homo sapiens
  misc_feature: Table A; Target 54031; HLA-C*04:01; NPSR1; ENSG00000187258; TAA
SFDSSGTGQ

SEQ ID NO: 54032 - protein, 10 aa, Homo sapiens
  misc_feature: Table A; Target 54032; HLA-C*04:01; NPSR1; ENSG00000187258; TAA
SFDSSGTGQT

SEQ ID NO: 54033 - protein, 11 aa, Homo sapiens
  misc_feature: Table A; Target 54033; HLA-A*23:01; NPSR1; ENSG00000187258; TAA
SFDSSGTGQTL

SEQ ID NO: 54034 - protein, 11 aa, Homo sapiens
  misc_feature: Table A; Target 54034; HLA-A*30:01; NPSR1; ENSG00000187258; TAA
SFDSSGTGQTL

SEQ ID NO: 54035 - protein, 11 aa, Homo sapiens
  misc_feature: Table A; Target 54035; HLA-A*32:01; NPSR1; ENSG00000187258; TAA
SFDSSGTGQTL

SEQ ID NO: 54036 - protein, 11 aa, Homo sapiens
  misc_feature: Table A; Target 54036; HLA-B*35:01; NPSR1; ENSG00000187258; TAA
SFDSSGTGQTL

SEQ ID NO: 54037 - protein, 11 aa, Homo sapiens
  misc_feature: Table A; Target 54037; HLA-B*35:03; NPSR1; ENSG00000187258; TAA
SFDSSGTGQTL

SEQ ID NO: 54038 - protein, 11 aa, Homo sapiens
  misc_feature: Table A; Target 54038; HLA-B*38:01; NPSR1; ENSG00000187258; TAA
SFDSSGTGQTL

SEQ ID NO: 54039 - protein, 11 aa, Homo sapiens
  misc_feature: Table A; Target 54039; HLA-B*39:01; NPSR1; ENSG00000187258; TAA
SFDSSGTGQTL

SEQ ID NO: 54040 - protein, 11 aa, Homo sapiens
  misc_feature: Table A; Target 54040; HLA-B*40:01; NPSR1; ENSG00000187258; TAA
SFDSSGTGQTL

SEQ ID NO: 54041 - protein, 11 aa, Homo sapiens
  misc_feature: Table A; Target 54041; HLA-B*55:01; NPSR1; ENSG00000187258; TAA
SFDSSGTGQTL

SEQ ID NO: 54042 - protein, 11 aa, Homo sapiens
  misc_feature: Table A; Target 54042; HLA-C*01:02; NPSR1; ENSG00000187258; TAA
SFDSSGTGQTL

SEQ ID NO: 54043 - protein, 11 aa, Homo sapiens
  misc_feature: Table A; Target 54043; HLA-C*04:01; NPSR1; ENSG00000187258; TAA
SFDSSGTGQTL

SEQ ID NO: 54044 - protein, 11 aa, Homo sapiens
  misc_feature: Table A; Target 54044; HLA-C*05:01; NPSR1; ENSG00000187258; TAA
SFDSSGTGQTL

SEQ ID NO: 54045 - protein, 11 aa, Homo sapiens
  misc_feature: Table A; Target 54045; HLA-C*07:02; NPSR1; ENSG00000187258; TAA
SFDSSGTGQTL

SEQ ID NO: 54046 - protein, 11 aa, Homo sapiens
  misc_feature: Table A; Target 54046; HLA-C*07:04; NPSR1; ENSG00000187258; TAA
SFDSSGTGQTL

SEQ ID NO: 54047 - protein, 11 aa, Homo sapiens
  misc_feature: Table A; Target 54047; HLA-C*14:02; NPSR1; ENSG00000187258; TAA
SFDSSGTGQTL

SEQ ID NO: 54048 - protein, 11 aa, Homo sapiens
  misc_feature: Table A; Target 54048; HLA-B*57:01; NPSR1; ENSG00000187258; TAA
SFKTEQLITLW

SEQ ID NO: 54049 - protein, 9 aa, Homo sapiens
  misc_feature: Table A; Target 54049; HLA-A*02:04; NPSR1; ENSG00000187258; TAA
SFLFSIPTL

SEQ ID NO: 54050 - protein, 9 aa, Homo sapiens
  misc_feature: Table A; Target 54050; HLA-A*23:01; NPSR1; ENSG00000187258; TAA
SFLFSIPTL

SEQ ID NO: 54051 - protein, 9 aa, Homo sapiens
  misc_feature: Table A; Target 54051; HLA-A*24:02; NPSR1; ENSG00000187258; TAA
SFLFSIPTL

SEQ ID NO: 54052 - protein, 9 aa, Homo sapiens
  misc_feature: Table A; Target 54052; HLA-C*14:02; NPSR1; ENSG00000187258; TAA
SFLFSIPTL

SEQ ID NO: 54053 - protein, 9 aa, Homo sapiens
  misc_feature: Table A; Target 54053; HLA-A*23:01; NPSR1; ENSG00000187258; TAA
SFTGLVNIL

SEQ ID NO: 54054 - protein, 9 aa, Homo sapiens
  misc_feature: Table A; Target 54054; HLA-A*24:02; NPSR1; ENSG00000187258; TAA
SFTGLVNIL

SEQ ID NO: 54055 - protein, 9 aa, Homo sapiens
  misc_feature: Table A; Target 54055; HLA-A*02:07; NPSR1; ENSG00000187258; TAA
SIDRYHAIV

SEQ ID NO: 54056 - protein, 10 aa, Homo sapiens
  misc_feature: Table A; Target 54056; HLA-A*01:01; NPSR1; ENSG00000187258; TAA
SIDRYHAIVY

SEQ ID NO: 54057 - protein, 9 aa, Homo sapiens
  misc_feature: Table A; Target 54057; HLA-A*02:03; NPSR1; ENSG00000187258; TAA
SIIIILAFI

SEQ ID NO: 54058 - protein, 9 aa, Homo sapiens
  misc_feature: Table A; Target 54058; HLA-A*02:04; NPSR1; ENSG00000187258; TAA
SIIIILAFI

SEQ ID NO: 54059 - protein, 9 aa, Homo sapiens
  misc_feature: Table A; Target 54059; HLA-A*02:07; NPSR1; ENSG00000187258; TAA
SIIIILAFI

SEQ ID NO: 54060 - protein, 9 aa, Homo sapiens
  misc_feature: Table A; Target 54060; HLA-A*68:02; NPSR1; ENSG00000187258; TAA
SIIIILAFI

SEQ ID NO: 54061 - protein, 9 aa, Homo sapiens
  misc_feature: Table A; Target 54061; HLA-A*02:07; NPSR1; ENSG00000187258; TAA
SIPTLIIFG

SEQ ID NO: 54062 - protein, 10 aa, Homo sapiens
  misc_feature: Table A; Target 54062; HLA-A*03:01; NPSR1; ENSG00000187258; TAA
SIPTLIIFGK

SEQ ID NO: 54063 - protein, 10 aa, Homo sapiens
  misc_feature: Table A; Target 54063; HLA-A*11:01; NPSR1; ENSG00000187258; TAA
SIPTLIIFGK

SEQ ID NO: 54064 - protein, 8 aa, Homo sapiens
  misc_feature: Table A; Target 54064; HLA-A*02:04; NPSR1; ENSG00000187258; TAA
SLSFLFSI

SEQ ID NO: 54065 - protein, 11 aa, Homo sapiens
  misc_feature: Table A; Target 54065; HLA-A*02:04; NPSR1; ENSG00000187258; TAA
SLSFLFSIPTL

SEQ ID NO: 54066 - protein, 9 aa, Homo sapiens
  misc_feature: Table A; Target 54066; HLA-B*07:02; NPSR1; ENSG00000187258; TAA
SPVACTETV

SEQ ID NO: 54067 - protein, 9 aa, Homo sapiens
  misc_feature: Table A; Target 54067; HLA-B*35:03; NPSR1; ENSG00000187258; TAA
SPVACTETV

SEQ ID NO: 54068 - protein, 9 aa, Homo sapiens
  misc_feature: Table A; Target 54068; HLA-B*51:01; NPSR1; ENSG00000187258; TAA
SPVACTETV

SEQ ID NO: 54069 - protein, 9 aa, Homo sapiens
  misc_feature: Table A; Target 54069; HLA-B*55:01; NPSR1; ENSG00000187258; TAA
SPVACTETV

SEQ ID NO: 54070 - protein, 9 aa, Homo sapiens
  misc_feature: Table A; Target 54070; HLA-B*56:01; NPSR1; ENSG00000187258; TAA
SPVACTETV

SEQ ID NO: 54071 - protein, 9 aa, Homo sapiens
  misc_feature: Table A; Target 54071; HLA-C*07:02; NPSR1; ENSG00000187258; TAA
SPVACTETV

SEQ ID NO: 54072 - protein, 11 aa, Homo sapiens
  misc_feature: Table A; Target 54072; HLA-B*35:01; NPSR1; ENSG00000187258; TAA
SPVACTETVTF

SEQ ID NO: 54073 - protein, 11 aa, Homo sapiens
  misc_feature: Table A; Target 54073; HLA-B*35:03; NPSR1; ENSG00000187258; TAA
SPVACTETVTF

SEQ ID NO: 54074 - protein, 11 aa, Homo sapiens
  misc_feature: Table A; Target 54074; HLA-B*55:01; NPSR1; ENSG00000187258; TAA
SPVACTETVTF

SEQ ID NO: 54075 - protein, 8 aa, Homo sapiens
  misc_feature: Table A; Target 54075; HLA-B*51:01; NPSR1; ENSG00000187258; TAA
SPYFLFDI

SEQ ID NO: 54076 - protein, 9 aa, Homo sapiens
  misc_feature: Table A; Target 54076; HLA-B*54:01; NPSR1; ENSG00000187258; TAA
SPYFLFDIL

SEQ ID NO: 54077 - protein, 8 aa, Homo sapiens
  misc_feature: Table A; Target 54077; HLA-A*32:01; NPSR1; ENSG00000187258; TAA
SQDSRMTF

SEQ ID NO: 54078 - protein, 8 aa, Homo sapiens
  misc_feature: Table A; Target 54078; HLA-B*15:01; NPSR1; ENSG00000187258; TAA
SQDSRMTF

SEQ ID NO: 54079 - protein, 8 aa, Homo sapiens
  misc_feature: Table A; Target 54079; HLA-B*15:03; NPSR1; ENSG00000187258; TAA
SQDSRMTF

SEQ ID NO: 54080 - protein, 8 aa, Homo sapiens
  misc_feature: Table A; Target 54080; HLA-B*37:01; NPSR1; ENSG00000187258; TAA
SQDSRMTF

SEQ ID NO: 54081 - protein, 8 aa, Homo sapiens
  misc_feature: Table A; Target 54081; HLA-B*38:01; NPSR1; ENSG00000187258; TAA
SQDSRMTF

SEQ ID NO: 54082 - protein, 8 aa, Homo sapiens
  misc_feature: Table A; Target 54082; HLA-C*04:01; NPSR1; ENSG00000187258; TAA
SQDSRMTF

SEQ ID NO: 54083 - protein, 8 aa, Homo sapiens
  misc_feature: Table A; Target 54083; HLA-C*05:01; NPSR1; ENSG00000187258; TAA
SQDSRMTF

SEQ ID NO: 54084 - protein, 9 aa, Homo sapiens
  misc_feature: Table A; Target 54084; HLA-A*31:01; NPSR1; ENSG00000187258; TAA
SQDSRMTFR

SEQ ID NO: 54085 - protein, 8 aa, Homo sapiens
  misc_feature: Table A; Target 54085; HLA-C*01:02; NPSR1; ENSG00000187258; TAA
SSGTGQTL

SEQ ID NO: 54086 - protein, 8 aa, Homo sapiens
  misc_feature: Table A; Target 54086; HLA-C*03:03; NPSR1; ENSG00000187258; TAA
SSGTGQTL

SEQ ID NO: 54087 - protein, 8 aa, Homo sapiens
  misc_feature: Table A; Target 54087; HLA-C*03:04; NPSR1; ENSG00000187258; TAA
SSGTGQTL

SEQ ID NO: 54088 - protein, 8 aa, Homo sapiens
  misc_feature: Table A; Target 54088; HLA-C*05:01; NPSR1; ENSG00000187258; TAA
SSGTGQTL

SEQ ID NO: 54089 - protein, 11 aa, Homo sapiens
  misc_feature: Table A; Target 54089; HLA-A*31:01; NPSR1; ENSG00000187258; TAA
SSISFPCREQR

SEQ ID NO: 54090 - protein, 9 aa, Homo sapiens
  misc_feature: Table A; Target 54090; HLA-A*11:01; NPSR1; ENSG00000187258; TAA
SSSISFPCR

SEQ ID NO: 54091 - protein, 9 aa, Homo sapiens
  misc_feature: Table A; Target 54091; HLA-A*31:01; NPSR1; ENSG00000187258; TAA
SSSISFPCR

SEQ ID NO: 54092 - protein, 9 aa, Homo sapiens
  misc_feature: Table A; Target 54092; HLA-A*68:01; NPSR1; ENSG00000187258; TAA
SSSISFPCR

SEQ ID NO: 54093 - protein, 9 aa, Homo sapiens
  misc_feature: Table A; Target 54093; HLA-C*07:06; NPSR1; ENSG00000187258; TAA
SSSISFPCR

SEQ ID NO: 54094 - protein, 10 aa, Homo sapiens
  misc_feature: Table A; Target 54094; HLA-A*03:01; NPSR1; ENSG00000187258; TAA
SSYNRGLISK

SEQ ID NO: 54095 - protein, 10 aa, Homo sapiens
  misc_feature: Table A; Target 54095; HLA-A*03:02; NPSR1; ENSG00000187258; TAA
SSYNRGLISK

SEQ ID NO: 54096 - protein, 10 aa, Homo sapiens
  misc_feature: Table A; Target 54096; HLA-A*11:01; NPSR1; ENSG00000187258; TAA
SSYNRGLISK

SEQ ID NO: 54097 - protein, 10 aa, Homo sapiens
  misc_feature: Table A; Target 54097; HLA-A*31:01; NPSR1; ENSG00000187258; TAA
SSYNRGLISK

SEQ ID NO: 54098 - protein, 10 aa, Homo sapiens
  misc_feature: Table A; Target 54098; HLA-A*33:01; NPSR1; ENSG00000187258; TAA
SSYNRGLISK

SEQ ID NO: 54099 - protein, 10 aa, Homo sapiens
  misc_feature: Table A; Target 54099; HLA-A*33:03; NPSR1; ENSG00000187258; TAA
SSYNRGLISK

SEQ ID NO: 54100 - protein, 10 aa, Homo sapiens
  misc_feature: Table A; Target 54100; HLA-A*68:01; NPSR1; ENSG00000187258; TAA
SSYNRGLISK

SEQ ID NO: 54101 - protein, 8 aa, Homo sapiens
  misc_feature: Table A; Target 54101; HLA-B*08:01; NPSR1; ENSG00000187258; TAA
STYVLVSL

SEQ ID NO: 54102 - protein, 8 aa, Homo sapiens
  misc_feature: Table A; Target 54102; HLA-B*40:02; NPSR1; ENSG00000187258; TAA
STYVLVSL

SEQ ID NO: 54103 - protein, 8 aa, Homo sapiens
  misc_feature: Table A; Target 54103; HLA-B*46:01; NPSR1; ENSG00000187258; TAA
STYVLVSL

SEQ ID NO: 54104 - protein, 8 aa, Homo sapiens
  misc_feature: Table A; Target 54104; HLA-B*51:01; NPSR1; ENSG00000187258; TAA
STYVLVSL

SEQ ID NO: 54105 - protein, 8 aa, Homo sapiens
  misc_feature: Table A; Target 54105; HLA-C*03:03; NPSR1; ENSG00000187258; TAA
STYVLVSL

SEQ ID NO: 54106 - protein, 8 aa, Homo sapiens
  misc_feature: Table A; Target 54106; HLA-C*03:04; NPSR1; ENSG00000187258; TAA
STYVLVSL

SEQ ID NO: 54107 - protein, 8 aa, Homo sapiens
  misc_feature: Table A; Target 54107; HLA-C*14:02; NPSR1; ENSG00000187258; TAA
STYVLVSL

SEQ ID NO: 54108 - protein, 9 aa, Homo sapiens
  misc_feature: Table A; Target 54108; HLA-B*54:01; NPSR1; ENSG00000187258; TAA
SVIIQNLPA

SEQ ID NO: 54109 - protein, 9 aa, Homo sapiens
  misc_feature: Table A; Target 54109; HLA-B*56:01; NPSR1; ENSG00000187258; TAA
SVIIQNLPA

SEQ ID NO: 54110 - protein, 10 aa, Homo sapiens
  misc_feature: Table A; Target 54110; HLA-A*02:04; NPSR1; ENSG00000187258; TAA
SVIIQNLPAL

SEQ ID NO: 54111 - protein, 10 aa, Homo sapiens
  misc_feature: Table A; Target 54111; HLA-A*25:01; NPSR1; ENSG00000187258; TAA
SVIIQNLPAL

SEQ ID NO: 54112 - protein, 8 aa, Homo sapiens
  misc_feature: Table A; Target 54112; HLA-A*25:01; NPSR1; ENSG00000187258; TAA
SVVLFSTW

SEQ ID NO: 54113 - protein, 8 aa, Homo sapiens
  misc_feature: Table A; Target 54113; HLA-B*57:01; NPSR1; ENSG00000187258; TAA
SVVLFSTW

SEQ ID NO: 54114 - protein, 8 aa, Homo sapiens
  misc_feature: Table A; Target 54114; HLA-B*58:01; NPSR1; ENSG00000187258; TAA
SVVLFSTW

SEQ ID NO: 54115 - protein, 9 aa, Homo sapiens
  misc_feature: Table A; Target 54115; HLA-A*31:01; NPSR1; ENSG00000187258; TAA
SVVLFSTWR

SEQ ID NO: 54116 - protein, 9 aa, Homo sapiens
  misc_feature: Table A; Target 54116; HLA-A*03:01; NPSR1; ENSG00000187258; TAA
SYNRGLISK

SEQ ID NO: 54117 - protein, 9 aa, Homo sapiens
  misc_feature: Table A; Target 54117; HLA-A*03:02; NPSR1; ENSG00000187258; TAA
SYNRGLISK

SEQ ID NO: 54118 - protein, 9 aa, Homo sapiens
  misc_feature: Table A; Target 54118; HLA-A*11:01; NPSR1; ENSG00000187258; TAA
SYNRGLISK

SEQ ID NO: 54119 - protein, 9 aa, Homo sapiens
  misc_feature: Table A; Target 54119; HLA-A*31:01; NPSR1; ENSG00000187258; TAA
SYNRGLISK

SEQ ID NO: 54120 - protein, 9 aa, Homo sapiens
  misc_feature: Table A; Target 54120; HLA-A*33:01; NPSR1; ENSG00000187258; TAA
SYNRGLISK

SEQ ID NO: 54121 - protein, 9 aa, Homo sapiens
  misc_feature: Table A; Target 54121; HLA-A*33:03; NPSR1; ENSG00000187258; TAA
SYNRGLISK

SEQ ID NO: 54122 - protein, 9 aa, Homo sapiens
  misc_feature: Table A; Target 54122; HLA-C*01:02; NPSR1; ENSG00000187258; TAA
SYNRGLISK

SEQ ID NO: 54123 - protein, 9 aa, Homo sapiens
  misc_feature: Table A; Target 54123; HLA-C*06:02; NPSR1; ENSG00000187258; TAA
SYNRGLISK

SEQ ID NO: 54124 - protein, 9 aa, Homo sapiens
  misc_feature: Table A; Target 54124; HLA-C*07:02; NPSR1; ENSG00000187258; TAA
SYNRGLISK

SEQ ID NO: 54125 - protein, 9 aa, Homo sapiens
  misc_feature: Table A; Target 54125; HLA-A*24:02; NPSR1; ENSG00000187258; TAA
SYWTPYMTI

SEQ ID NO: 54126 - protein, 9 aa, Homo sapiens
  misc_feature: Table A; Target 54126; HLA-A*02:07; NPSR1; ENSG00000187258; TAA
TAPDLVCRV

SEQ ID NO: 54127 - protein, 9 aa, Homo sapiens
  misc_feature: Table A; Target 54127; HLA-A*68:02; NPSR1; ENSG00000187258; TAA
TAPDLVCRV

SEQ ID NO: 54128 - protein, 9 aa, Homo sapiens
  misc_feature: Table A; Target 54128; HLA-B*51:01; NPSR1; ENSG00000187258; TAA
TAPDLVCRV

SEQ ID NO: 54129 - protein, 9 aa, Homo sapiens
  misc_feature: Table A; Target 54129; HLA-C*06:02; NPSR1; ENSG00000187258; TAA
TAPDLVCRV

SEQ ID NO: 54130 - protein, 9 aa, Homo sapiens
  misc_feature: Table A; Target 54130; HLA-C*12:03; NPSR1; ENSG00000187258; TAA
TAPDLVCRV

SEQ ID NO: 54131 - protein, 8 aa, Homo sapiens
  misc_feature: Table A; Target 54131; HLA-B*37:01; NPSR1; ENSG00000187258; TAA
TDSFTGLV

SEQ ID NO: 54132 - protein, 8 aa, Homo sapiens
  misc_feature: Table A; Target 54132; HLA-B*18:01; NPSR1; ENSG00000187258; TAA
TEQLITLW

SEQ ID NO: 54133 - protein, 8 aa, Homo sapiens
  misc_feature: Table A; Target 54133; HLA-B*37:01; NPSR1; ENSG00000187258; TAA
TEQLITLW

SEQ ID NO: 54134 - protein, 8 aa, Homo sapiens
  misc_feature: Table A; Target 54134; HLA-B*44:02; NPSR1; ENSG00000187258; TAA
TEQLITLW

SEQ ID NO: 54135 - protein, 8 aa, Homo sapiens
  misc_feature: Table A; Target 54135; HLA-B*44:03; NPSR1; ENSG00000187258; TAA
TEQLITLW

SEQ ID NO: 54136 - protein, 9 aa, Homo sapiens
  misc_feature: Table A; Target 54136; HLA-B*49:01; NPSR1; ENSG00000187258; TAA
TEQLITLWV

SEQ ID NO: 54137 - protein, 10 aa, Homo sapiens
  misc_feature: Table A; Target 54137; HLA-B*44:02; NPSR1; ENSG00000187258; TAA
TEQLITLWVL

SEQ ID NO: 54138 - protein, 9 aa, Homo sapiens
  misc_feature: Table A; Target 54138; HLA-B*40:02; NPSR1; ENSG00000187258; TAA
TERHEMQIL

SEQ ID NO: 54139 - protein, 9 aa, Homo sapiens
  misc_feature: Table A; Target 54139; HLA-C*07:01; NPSR1; ENSG00000187258; TAA
TERHEMQIL

SEQ ID NO: 54140 - protein, 9 aa, Homo sapiens
  misc_feature: Table A; Target 54140; HLA-A*30:01; NPSR1; ENSG00000187258; TAA
TETVTFTEV

SEQ ID NO: 54141 - protein, 9 aa, Homo sapiens
  misc_feature: Table A; Target 54141; HLA-B*13:02; NPSR1; ENSG00000187258; TAA
TETVTFTEV

SEQ ID NO: 54142 - protein, 9 aa, Homo sapiens
  misc_feature: Table A; Target 54142; HLA-B*18:01; NPSR1; ENSG00000187258; TAA
TETVTFTEV

SEQ ID NO: 54143 - protein, 9 aa, Homo sapiens
  misc_feature: Table A; Target 54143; HLA-B*37:01; NPSR1; ENSG00000187258; TAA
TETVTFTEV

SEQ ID NO: 54144 - protein, 9 aa, Homo sapiens
  misc_feature: Table A; Target 54144; HLA-B*40:01; NPSR1; ENSG00000187258; TAA
TETVTFTEV

SEQ ID NO: 54145 - protein, 9 aa, Homo sapiens
  misc_feature: Table A; Target 54145; HLA-B*40:02; NPSR1; ENSG00000187258; TAA
TETVTFTEV

SEQ ID NO: 54146 - protein, 9 aa, Homo sapiens
  misc_feature: Table A; Target 54146; HLA-B*44:02; NPSR1; ENSG00000187258; TAA
TETVTFTEV

SEQ ID NO: 54147 - protein, 9 aa, Homo sapiens
  misc_feature: Table A; Target 54147; HLA-B*44:03; NPSR1; ENSG00000187258; TAA
TETVTFTEV

SEQ ID NO: 54148 - protein, 9 aa, Homo sapiens
  misc_feature: Table A; Target 54148; HLA-B*49:01; NPSR1; ENSG00000187258; TAA
TETVTFTEV

SEQ ID NO: 54149 - protein, 9 aa, Homo sapiens
  misc_feature: Table A; Target 54149; HLA-C*02:02; NPSR1; ENSG00000187258; TAA
TETVTFTEV

SEQ ID NO: 54150 - protein, 9 aa, Homo sapiens
  misc_feature: Table A; Target 54150; HLA-C*16:02; NPSR1; ENSG00000187258; TAA
TETVTFTEV

SEQ ID NO: 54151 - protein, 9 aa, Homo sapiens
  misc_feature: Table A; Target 54151; HLA-C*16:04; NPSR1; ENSG00000187258; TAA
TETVTFTEV

SEQ ID NO: 54152 - protein, 10 aa, Homo sapiens
  misc_feature: Table A; Target 54152; HLA-B*49:01; NPSR1; ENSG00000187258; TAA
TETVTFTEVV

SEQ ID NO: 54153 - protein, 9 aa, Homo sapiens
  misc_feature: Table A; Target 54153; HLA-B*27:02; NPSR1; ENSG00000187258; TAA
TEVVEGKEW

SEQ ID NO: 54154 - protein, 9 aa, Homo sapiens
  misc_feature: Table A; Target 54154; HLA-B*44:02; NPSR1; ENSG00000187258; TAA
TEVVEGKEW

SEQ ID NO: 54155 - protein, 9 aa, Homo sapiens
  misc_feature: Table A; Target 54155; HLA-B*44:03; NPSR1; ENSG00000187258; TAA
TEVVEGKEW

SEQ ID NO: 54156 - protein, 9 aa, Homo sapiens
  misc_feature: Table A; Target 54156; HLA-B*57:01; NPSR1; ENSG00000187258; TAA
TEVVEGKEW

SEQ ID NO: 54157 - protein, 9 aa, Homo sapiens
  misc_feature: Table A; Target 54157; HLA-C*16:04; NPSR1; ENSG00000187258; TAA
TEVVEGKEW

SEQ ID NO: 54158 - protein, 9 aa, Homo sapiens
  misc_feature: Table A; Target 54158; HLA-A*23:01; NPSR1; ENSG00000187258; TAA
TFFVTQLAI

SEQ ID NO: 54159 - protein, 9 aa, Homo sapiens
  misc_feature: Table A; Target 54159; HLA-B*13:02; NPSR1; ENSG00000187258; TAA
TFFVTQLAI

SEQ ID NO: 54160 - protein, 9 aa, Homo sapiens
  misc_feature: Table A; Target 54160; HLA-A*33:03; NPSR1; ENSG00000187258; TAA
TFTEVVEGK

SEQ ID NO: 54161 - protein, 9 aa, Homo sapiens
  misc_feature: Table A; Target 54161; HLA-B*27:02; NPSR1; ENSG00000187258; TAA
TFTEVVEGK

SEQ ID NO: 54162 - protein, 9 aa, Homo sapiens
  misc_feature: Table A; Target 54162; HLA-B*35:03; NPSR1; ENSG00000187258; TAA
TGDFTAPDL

SEQ ID NO: 54163 - protein, 9 aa, Homo sapiens
  misc_feature: Table A; Target 54163; HLA-B*39:01; NPSR1; ENSG00000187258; TAA
TGDFTAPDL

SEQ ID NO: 54164 - protein, 9 aa, Homo sapiens
  misc_feature: Table A; Target 54164; HLA-C*05:01; NPSR1; ENSG00000187258; TAA
TGDFTAPDL

SEQ ID NO: 54165 - protein, 9 aa, Homo sapiens
  misc_feature: Table A; Target 54165; HLA-A*02:01; NPSR1; ENSG00000187258; TAA
TIISIMYGI

SEQ ID NO: 54166 - protein, 9 aa, Homo sapiens
  misc_feature: Table A; Target 54166; HLA-A*02:04; NPSR1; ENSG00000187258; TAA
TIISIMYGI

SEQ ID NO: 54167 - protein, 9 aa, Homo sapiens
  misc_feature: Table A; Target 54167; HLA-A*02:07; NPSR1; ENSG00000187258; TAA
TIISIMYGI

SEQ ID NO: 54168 - protein, 9 aa, Homo sapiens
  misc_feature: Table A; Target 54168; HLA-A*68:02; NPSR1; ENSG00000187258; TAA
TIISIMYGI

SEQ ID NO: 54169 - protein, 9 aa, Homo sapiens
  misc_feature: Table A; Target 54169; HLA-B*35:03; NPSR1; ENSG00000187258; TAA
TIVGNSVVL

SEQ ID NO: 54170 - protein, 9 aa, Homo sapiens
  misc_feature: Table A; Target 54170; HLA-B*39:01; NPSR1; ENSG00000187258; TAA
TIVGNSVVL

SEQ ID NO: 54171 - protein, 9 aa, Homo sapiens
  misc_feature: Table A; Target 54171; HLA-B*40:01; NPSR1; ENSG00000187258; TAA
TIVGNSVVL

SEQ ID NO: 54172 - protein, 9 aa, Homo sapiens
  misc_feature: Table A; Target 54172; HLA-C*03:03; NPSR1; ENSG00000187258; TAA
TIVGNSVVL

SEQ ID NO: 54173 - protein, 9 aa, Homo sapiens
  misc_feature: Table A; Target 54173; HLA-C*03:04; NPSR1; ENSG00000187258; TAA
TIVGNSVVL

SEQ ID NO: 54174 - protein, 9 aa, Homo sapiens
  misc_feature: Table A; Target 54174; HLA-C*07:04; NPSR1; ENSG00000187258; TAA
TIVGNSVVL

SEQ ID NO: 54175 - protein, 10 aa, Homo sapiens
  misc_feature: Table A; Target 54175; HLA-A*26:01; NPSR1; ENSG00000187258; TAA
TIVGNSVVLF

SEQ ID NO: 54176 - protein, 9 aa, Homo sapiens
  misc_feature: Table A; Target 54176; HLA-A*02:01; NPSR1; ENSG00000187258; TAA
TLDSSPVAC

SEQ ID NO: 54177 - protein, 9 aa, Homo sapiens
  misc_feature: Table A; Target 54177; HLA-A*02:07; NPSR1; ENSG00000187258; TAA
TLDSSPVAC

SEQ ID NO: 54178 - protein, 9 aa, Homo sapiens
  misc_feature: Table A; Target 54178; HLA-B*39:01; NPSR1; ENSG00000187258; TAA
TLDSSPVAC

SEQ ID NO: 54179 - protein, 9 aa, Homo sapiens
  misc_feature: Table A; Target 54179; HLA-B*55:01; NPSR1; ENSG00000187258; TAA
TLDSSPVAC

SEQ ID NO: 54180 - protein, 9 aa, Homo sapiens
  misc_feature: Table A; Target 54180; HLA-C*04:01; NPSR1; ENSG00000187258; TAA
TLDSSPVAC

SEQ ID NO: 54181 - protein, 9 aa, Homo sapiens
  misc_feature: Table A; Target 54181; HLA-C*05:01; NPSR1; ENSG00000187258; TAA
TLDSSPVAC

SEQ ID NO: 54182 - protein, 10 aa, Homo sapiens
  misc_feature: Table A; Target 54182; HLA-A*25:01; NPSR1; ENSG00000187258; TAA
TLSNGEVQCW

SEQ ID NO: 54183 - protein, 10 aa, Homo sapiens
  misc_feature: Table A; Target 54183; HLA-A*32:01; NPSR1; ENSG00000187258; TAA
TLSNGEVQCW

SEQ ID NO: 54184 - protein, 10 aa, Homo sapiens
  misc_feature: Table A; Target 54184; HLA-A*68:01; NPSR1; ENSG00000187258; TAA
TLSNGEVQCW

SEQ ID NO: 54185 - protein, 10 aa, Homo sapiens
  misc_feature: Table A; Target 54185; HLA-B*38:01; NPSR1; ENSG00000187258; TAA
TLSNGEVQCW

SEQ ID NO: 54186 - protein, 10 aa, Homo sapiens
  misc_feature: Table A; Target 54186; HLA-B*57:01; NPSR1; ENSG00000187258; TAA
TLSNGEVQCW

SEQ ID NO: 54187 - protein, 10 aa, Homo sapiens
  misc_feature: Table A; Target 54187; HLA-B*58:01; NPSR1; ENSG00000187258; TAA
TLSNGEVQCW

SEQ ID NO: 54188 - protein, 8 aa, Homo sapiens
  misc_feature: Table A; Target 54188; HLA-B*51:01; NPSR1; ENSG00000187258; TAA
TPYMTIVA

SEQ ID NO: 54189 - protein, 8 aa, Homo sapiens
  misc_feature: Table A; Target 54189; HLA-B*54:01; NPSR1; ENSG00000187258; TAA
TPYMTIVA

SEQ ID NO: 54190 - protein, 8 aa, Homo sapiens
  misc_feature: Table A; Target 54190; HLA-B*55:01; NPSR1; ENSG00000187258; TAA
TPYMTIVA

SEQ ID NO: 54191 - protein, 8 aa, Homo sapiens
  misc_feature: Table A; Target 54191; HLA-B*56:01; NPSR1; ENSG00000187258; TAA
TPYMTIVA

SEQ ID NO: 54192 - protein, 9 aa, Homo sapiens
  misc_feature: Table A; Target 54192; HLA-A*25:01; NPSR1; ENSG00000187258; TAA
TPYMTIVAF

SEQ ID NO: 54193 - protein, 9 aa, Homo sapiens
  misc_feature: Table A; Target 54193; HLA-B*07:02; NPSR1; ENSG00000187258; TAA
TPYMTIVAF

SEQ ID NO: 54194 - protein, 9 aa, Homo sapiens
  misc_feature: Table A; Target 54194; HLA-B*08:01; NPSR1; ENSG00000187258; TAA
TPYMTIVAF

SEQ ID NO: 54195 - protein, 9 aa, Homo sapiens
  misc_feature: Table A; Target 54195; HLA-B*15:03; NPSR1; ENSG00000187258; TAA
TPYMTIVAF

SEQ ID NO: 54196 - protein, 9 aa, Homo sapiens
  misc_feature: Table A; Target 54196; HLA-B*18:01; NPSR1; ENSG00000187258; TAA
TPYMTIVAF

SEQ ID NO: 54197 - protein, 9 aa, Homo sapiens
  misc_feature: Table A; Target 54197; HLA-B*35:01; NPSR1; ENSG00000187258; TAA
TPYMTIVAF

SEQ ID NO: 54198 - protein, 9 aa, Homo sapiens
  misc_feature: Table A; Target 54198; HLA-B*35:03; NPSR1; ENSG00000187258; TAA
TPYMTIVAF

SEQ ID NO: 54199 - protein, 9 aa, Homo sapiens
  misc_feature: Table A; Target 54199; HLA-B*46:01; NPSR1; ENSG00000187258; TAA
TPYMTIVAF

SEQ ID NO: 54200 - protein, 9 aa, Homo sapiens
  misc_feature: Table A; Target 54200; HLA-B*51:01; NPSR1; ENSG00000187258; TAA
TPYMTIVAF

SEQ ID NO: 54201 - protein, 9 aa, Homo sapiens
  misc_feature: Table A; Target 54201; HLA-B*54:01; NPSR1; ENSG00000187258; TAA
TPYMTIVAF

SEQ ID NO: 54202 - protein, 9 aa, Homo sapiens
  misc_feature: Table A; Target 54202; HLA-B*55:01; NPSR1; ENSG00000187258; TAA
TPYMTIVAF

SEQ ID NO: 54203 - protein, 9 aa, Homo sapiens
  misc_feature: Table A; Target 54203; HLA-B*56:01; NPSR1; ENSG00000187258; TAA
TPYMTIVAF

SEQ ID NO: 54204 - protein, 9 aa, Homo sapiens
  misc_feature: Table A; Target 54204; HLA-C*02:02; NPSR1; ENSG00000187258; TAA
TPYMTIVAF

SEQ ID NO: 54205 - protein, 9 aa, Homo sapiens
  misc_feature: Table A; Target 54205; HLA-C*03:03; NPSR1; ENSG00000187258; TAA
TPYMTIVAF

SEQ ID NO: 54206 - protein, 9 aa, Homo sapiens
  misc_feature: Table A; Target 54206; HLA-C*07:02; NPSR1; ENSG00000187258; TAA
TPYMTIVAF

SEQ ID NO: 54207 - protein, 9 aa, Homo sapiens
  misc_feature: Table A; Target 54207; HLA-C*12:03; NPSR1; ENSG00000187258; TAA
TPYMTIVAF

SEQ ID NO: 54208 - protein, 9 aa, Homo sapiens
  misc_feature: Table A; Target 54208; HLA-C*14:02; NPSR1; ENSG00000187258; TAA
TPYMTIVAF

SEQ ID NO: 54209 - protein, 9 aa, Homo sapiens
  misc_feature: Table A; Target 54209; HLA-A*23:01; NPSR1; ENSG00000187258; TAA
TQLAITDSF

SEQ ID NO: 54210 - protein, 9 aa, Homo sapiens
  misc_feature: Table A; Target 54210; HLA-A*24:02; NPSR1; ENSG00000187258; TAA
TQLAITDSF

SEQ ID NO: 54211 - protein, 9 aa, Homo sapiens
  misc_feature: Table A; Target 54211; HLA-A*30:02; NPSR1; ENSG00000187258; TAA
TQLAITDSF

SEQ ID NO: 54212 - protein, 9 aa, Homo sapiens
  misc_feature: Table A; Target 54212; HLA-A*32:01; NPSR1; ENSG00000187258; TAA
TQLAITDSF

SEQ ID NO: 54213 - protein, 9 aa, Homo sapiens
  misc_feature: Table A; Target 54213; HLA-B*13:02; NPSR1; ENSG00000187258; TAA
TQLAITDSF

SEQ ID NO: 54214 - protein, 9 aa, Homo sapiens
  misc_feature: Table A; Target 54214; HLA-B*15:01; NPSR1; ENSG00000187258; TAA
TQLAITDSF

SEQ ID NO: 54215 - protein, 9 aa, Homo sapiens
  misc_feature: Table A; Target 54215; HLA-B*15:03; NPSR1; ENSG00000187258; TAA
TQLAITDSF

SEQ ID NO: 54216 - protein, 9 aa, Homo sapiens
  misc_feature: Table A; Target 54216; HLA-B*18:01; NPSR1; ENSG00000187258; TAA
TQLAITDSF

SEQ ID NO: 54217 - protein, 9 aa, Homo sapiens
  misc_feature: Table A; Target 54217; HLA-B*27:02; NPSR1; ENSG00000187258; TAA
TQLAITDSF

SEQ ID NO: 54218 - protein, 9 aa, Homo sapiens
  misc_feature: Table A; Target 54218; HLA-B*27:05; NPSR1; ENSG00000187258; TAA
TQLAITDSF

SEQ ID NO: 54219 - protein, 9 aa, Homo sapiens
  misc_feature: Table A; Target 54219; HLA-B*35:01; NPSR1; ENSG00000187258; TAA
TQLAITDSF

SEQ ID NO: 54220 - protein, 9 aa, Homo sapiens
  misc_feature: Table A; Target 54220; HLA-B*37:01; NPSR1; ENSG00000187258; TAA
TQLAITDSF

SEQ ID NO: 54221 - protein, 9 aa, Homo sapiens
  misc_feature: Table A; Target 54221; HLA-B*38:01; NPSR1; ENSG00000187258; TAA
TQLAITDSF

SEQ ID NO: 54222 - protein, 9 aa, Homo sapiens
  misc_feature: Table A; Target 54222; HLA-B*39:01; NPSR1; ENSG00000187258; TAA
TQLAITDSF

SEQ ID NO: 54223 - protein, 9 aa, Homo sapiens
  misc_feature: Table A; Target 54223; HLA-B*44:02; NPSR1; ENSG00000187258; TAA
TQLAITDSF

SEQ ID NO: 54224 - protein, 9 aa, Homo sapiens
  misc_feature: Table A; Target 54224; HLA-B*44:03; NPSR1; ENSG00000187258; TAA
TQLAITDSF

SEQ ID NO: 54225 - protein, 9 aa, Homo sapiens
  misc_feature: Table A; Target 54225; HLA-B*46:01; NPSR1; ENSG00000187258; TAA
TQLAITDSF

SEQ ID NO: 54226 - protein, 9 aa, Homo sapiens
  misc_feature: Table A; Target 54226; HLA-B*58:01; NPSR1; ENSG00000187258; TAA
TQLAITDSF

SEQ ID NO: 54227 - protein, 9 aa, Homo sapiens
  misc_feature: Table A; Target 54227; HLA-C*02:02; NPSR1; ENSG00000187258; TAA
TQLAITDSF

SEQ ID NO: 54228 - protein, 9 aa, Homo sapiens
  misc_feature: Table A; Target 54228; HLA-C*05:01; NPSR1; ENSG00000187258; TAA
TQLAITDSF

SEQ ID NO: 54229 - protein, 9 aa, Homo sapiens
  misc_feature: Table A; Target 54229; HLA-C*07:04; NPSR1; ENSG00000187258; TAA
TQLAITDSF

SEQ ID NO: 54230 - protein, 9 aa, Homo sapiens
  misc_feature: Table A; Target 54230; HLA-C*14:02; NPSR1; ENSG00000187258; TAA
TQLAITDSF

SEQ ID NO: 54231 - protein, 9 aa, Homo sapiens
  misc_feature: Table A; Target 54231; HLA-C*16:04; NPSR1; ENSG00000187258; TAA
TQLAITDSF

SEQ ID NO: 54232 - protein, 11 aa, Homo sapiens
  misc_feature: Table A; Target 54232; HLA-A*11:01; NPSR1; ENSG00000187258; TAA
TVTFTEVVEGK

SEQ ID NO: 54233 - protein, 11 aa, Homo sapiens
  misc_feature: Table A; Target 54233; HLA-A*68:01; NPSR1; ENSG00000187258; TAA
TVTFTEVVEGK

SEQ ID NO: 54234 - protein, 11 aa, Homo sapiens
  misc_feature: Table A; Target 54234; HLA-B*27:02; NPSR1; ENSG00000187258; TAA
TVTFTEVVEGK

SEQ ID NO: 54235 - protein, 9 aa, Homo sapiens
  misc_feature: Table A; Target 54235; HLA-C*04:01; NPSR1; ENSG00000187258; TAA
TYETVISNC

SEQ ID NO: 54236 - protein, 9 aa, Homo sapiens
  misc_feature: Table A; Target 54236; HLA-A*23:01; NPSR1; ENSG00000187258; TAA
TYVLVSLSI

SEQ ID NO: 54237 - protein, 9 aa, Homo sapiens
  misc_feature: Table A; Target 54237; HLA-A*24:02; NPSR1; ENSG00000187258; TAA
TYVLVSLSI

SEQ ID NO: 54238 - protein, 9 aa, Homo sapiens
  misc_feature: Table A; Target 54238; HLA-A*30:01; NPSR1; ENSG00000187258; TAA
TYVLVSLSI

SEQ ID NO: 54239 - protein, 9 aa, Homo sapiens
  misc_feature: Table A; Target 54239; HLA-B*13:02; NPSR1; ENSG00000187258; TAA
TYVLVSLSI

SEQ ID NO: 54240 - protein, 9 aa, Homo sapiens
  misc_feature: Table A; Target 54240; HLA-C*14:02; NPSR1; ENSG00000187258; TAA
TYVLVSLSI

SEQ ID NO: 54241 - protein, 11 aa, Homo sapiens
  misc_feature: Table A; Target 54241; HLA-A*31:01; NPSR1; ENSG00000187258; TAA
TYVLVSLSIDR

SEQ ID NO: 54242 - protein, 11 aa, Homo sapiens
  misc_feature: Table A; Target 54242; HLA-B*27:02; NPSR1; ENSG00000187258; TAA
TYVLVSLSIDR

SEQ ID NO: 54243 - protein, 9 aa, Homo sapiens
  misc_feature: Table A; Target 54243; HLA-A*23:01; NPSR1; ENSG00000187258; TAA
VACTETVTF

SEQ ID NO: 54244 - protein, 9 aa, Homo sapiens
  misc_feature: Table A; Target 54244; HLA-A*32:01; NPSR1; ENSG00000187258; TAA
VACTETVTF

SEQ ID NO: 54245 - protein, 9 aa, Homo sapiens
  misc_feature: Table A; Target 54245; HLA-B*15:03; NPSR1; ENSG00000187258; TAA
VACTETVTF

SEQ ID NO: 54246 - protein, 9 aa, Homo sapiens
  misc_feature: Table A; Target 54246; HLA-B*35:01; NPSR1; ENSG00000187258; TAA
VACTETVTF

SEQ ID NO: 54247 - protein, 9 aa, Homo sapiens
  misc_feature: Table A; Target 54247; HLA-B*38:01; NPSR1; ENSG00000187258; TAA
VACTETVTF

SEQ ID NO: 54248 - protein, 9 aa, Homo sapiens
  misc_feature: Table A; Target 54248; HLA-B*46:01; NPSR1; ENSG00000187258; TAA
VACTETVTF

SEQ ID NO: 54249 - protein, 9 aa, Homo sapiens
  misc_feature: Table A; Target 54249; HLA-B*58:01; NPSR1; ENSG00000187258; TAA
VACTETVTF

SEQ ID NO: 54250 - protein, 9 aa, Homo sapiens
  misc_feature: Table A; Target 54250; HLA-C*02:02; NPSR1; ENSG00000187258; TAA
VACTETVTF

SEQ ID NO: 54251 - protein, 9 aa, Homo sapiens
  misc_feature: Table A; Target 54251; HLA-C*03:03; NPSR1; ENSG00000187258; TAA
VACTETVTF

SEQ ID NO: 54252 - protein, 9 aa, Homo sapiens
  misc_feature: Table A; Target 54252; HLA-C*03:04; NPSR1; ENSG00000187258; TAA
VACTETVTF

SEQ ID NO: 54253 - protein, 9 aa, Homo sapiens
  misc_feature: Table A; Target 54253; HLA-C*05:01; NPSR1; ENSG00000187258; TAA
VACTETVTF

SEQ ID NO: 54254 - protein, 9 aa, Homo sapiens
  misc_feature: Table A; Target 54254; HLA-C*12:03; NPSR1; ENSG00000187258; TAA
VACTETVTF

SEQ ID NO: 54255 - protein, 9 aa, Homo sapiens
  misc_feature: Table A; Target 54255; HLA-C*16:04; NPSR1; ENSG00000187258; TAA
VACTETVTF

SEQ ID NO: 54256 - protein, 8 aa, Homo sapiens
  misc_feature: Table A; Target 54256; HLA-B*51:01; NPSR1; ENSG00000187258; TAA
VAFLVYFI

SEQ ID NO: 54257 - protein, 8 aa, Homo sapiens
  misc_feature: Table A; Target 54257; HLA-A*23:01; NPSR1; ENSG00000187258; TAA
VFSSSISF

SEQ ID NO: 54258 - protein, 8 aa, Homo sapiens
  misc_feature: Table A; Target 54258; HLA-C*14:02; NPSR1; ENSG00000187258; TAA
VFSSSISF

SEQ ID NO: 54259 - protein, 9 aa, Homo sapiens
  misc_feature: Table A; Target 54259; HLA-A*23:01; NPSR1; ENSG00000187258; TAA
VFTIVGNSV

SEQ ID NO: 54260 - protein, 9 aa, Homo sapiens
  misc_feature: Table A; Target 54260; HLA-A*24:02; NPSR1; ENSG00000187258; TAA
VFTIVGNSV

SEQ ID NO: 54261 - protein, 9 aa, Homo sapiens
  misc_feature: Table A; Target 54261; HLA-A*30:01; NPSR1; ENSG00000187258; TAA
VFTIVGNSV

SEQ ID NO: 54262 - protein, 9 aa, Homo sapiens
  misc_feature: Table A; Target 54262; HLA-B*13:02; NPSR1; ENSG00000187258; TAA
VFTIVGNSV

SEQ ID NO: 54263 - protein, 9 aa, Homo sapiens
  misc_feature: Table A; Target 54263; HLA-B*35:03; NPSR1; ENSG00000187258; TAA
VFTIVGNSV

SEQ ID NO: 54264 - protein, 9 aa, Homo sapiens
  misc_feature: Table A; Target 54264; HLA-B*46:01; NPSR1; ENSG00000187258; TAA
VFTIVGNSV

SEQ ID NO: 54265 - protein, 9 aa, Homo sapiens
  misc_feature: Table A; Target 54265; HLA-C*01:02; NPSR1; ENSG00000187258; TAA
VFTIVGNSV

SEQ ID NO: 54266 - protein, 9 aa, Homo sapiens
  misc_feature: Table A; Target 54266; HLA-C*04:01; NPSR1; ENSG00000187258; TAA
VFTIVGNSV

SEQ ID NO: 54267 - protein, 9 aa, Homo sapiens
  misc_feature: Table A; Target 54267; HLA-C*14:02; NPSR1; ENSG00000187258; TAA
VFTIVGNSV

SEQ ID NO: 54268 - protein, 9 aa, Homo sapiens
  misc_feature: Table A; Target 54268; HLA-C*16:01; NPSR1; ENSG00000187258; TAA
VFTIVGNSV

SEQ ID NO: 54269 - protein, 9 aa, Homo sapiens
  misc_feature: Table A; Target 54269; HLA-C*16:02; NPSR1; ENSG00000187258; TAA
VFTIVGNSV

SEQ ID NO: 54270 - protein, 11 aa, Homo sapiens
  misc_feature: Table A; Target 54270; HLA-A*23:01; NPSR1; ENSG00000187258; TAA
VFTIVGNSVVL

SEQ ID NO: 54271 - protein, 8 aa, Homo sapiens
  misc_feature: Table A; Target 54271; HLA-B*37:01; NPSR1; ENSG00000187258; TAA
VGNSVVLF

SEQ ID NO: 54272 - protein, 8 aa, Homo sapiens
  misc_feature: Table A; Target 54272; HLA-C*12:03; NPSR1; ENSG00000187258; TAA
VGNSVVLF

SEQ ID NO: 54273 - protein, 11 aa, Homo sapiens
  misc_feature: Table A; Target 54273; HLA-B*57:01; NPSR1; ENSG00000187258; TAA
VGNSVVLFSTW

SEQ ID NO: 54274 - protein, 9 aa, Homo sapiens
  misc_feature: Table A; Target 54274; HLA-A*02:01; NPSR1; ENSG00000187258; TAA
VIIQNLPAL

SEQ ID NO: 54275 - protein, 9 aa, Homo sapiens
  misc_feature: Table A; Target 54275; HLA-A*02:03; NPSR1; ENSG00000187258; TAA
VIIQNLPAL

SEQ ID NO: 54276 - protein, 9 aa, Homo sapiens
  misc_feature: Table A; Target 54276; HLA-A*02:04; NPSR1; ENSG00000187258; TAA
VIIQNLPAL

SEQ ID NO: 54277 - protein, 9 aa, Homo sapiens
  misc_feature: Table A; Target 54277; HLA-A*02:07; NPSR1; ENSG00000187258; TAA
VIIQNLPAL

SEQ ID NO: 54278 - protein, 9 aa, Homo sapiens
  misc_feature: Table A; Target 54278; HLA-A*11:01; NPSR1; ENSG00000187258; TAA
VIIQNLPAL

SEQ ID NO: 54279 - protein, 9 aa, Homo sapiens
  misc_feature: Table A; Target 54279; HLA-A*23:01; NPSR1; ENSG00000187258; TAA
VIIQNLPAL

SEQ ID NO: 54280 - protein, 9 aa, Homo sapiens
  misc_feature: Table A; Target 54280; HLA-A*24:02; NPSR1; ENSG00000187258; TAA
VIIQNLPAL

SEQ ID NO: 54281 - protein, 9 aa, Homo sapiens
  misc_feature: Table A; Target 54281; HLA-A*25:01; NPSR1; ENSG00000187258; TAA
VIIQNLPAL

SEQ ID NO: 54282 - protein, 9 aa, Homo sapiens
  misc_feature: Table A; Target 54282; HLA-A*26:01; NPSR1; ENSG00000187258; TAA
VIIQNLPAL

SEQ ID NO: 54283 - protein, 9 aa, Homo sapiens
  misc_feature: Table A; Target 54283; HLA-A*30:01; NPSR1; ENSG00000187258; TAA
VIIQNLPAL

SEQ ID NO: 54284 - protein, 9 aa, Homo sapiens
  misc_feature: Table A; Target 54284; HLA-A*32:01; NPSR1; ENSG00000187258; TAA
VIIQNLPAL

SEQ ID NO: 54285 - protein, 9 aa, Homo sapiens
  misc_feature: Table A; Target 54285; HLA-B*07:02; NPSR1; ENSG00000187258; TAA
VIIQNLPAL

SEQ ID NO: 54286 - protein, 9 aa, Homo sapiens
  misc_feature: Table A; Target 54286; HLA-B*08:01; NPSR1; ENSG00000187258; TAA
VIIQNLPAL

SEQ ID NO: 54287 - protein, 9 aa, Homo sapiens
  misc_feature: Table A; Target 54287; HLA-B*13:02; NPSR1; ENSG00000187258; TAA
VIIQNLPAL

SEQ ID NO: 54288 - protein, 9 aa, Homo sapiens
  misc_feature: Table A; Target 54288; HLA-B*15:01; NPSR1; ENSG00000187258; TAA
VIIQNLPAL

SEQ ID NO: 54289 - protein, 9 aa, Homo sapiens
  misc_feature: Table A; Target 54289; HLA-B*35:03; NPSR1; ENSG00000187258; TAA
VIIQNLPAL

SEQ ID NO: 54290 - protein, 9 aa, Homo sapiens
  misc_feature: Table A; Target 54290; HLA-B*40:01; NPSR1; ENSG00000187258; TAA
VIIQNLPAL

SEQ ID NO: 54291 - protein, 9 aa, Homo sapiens
  misc_feature: Table A; Target 54291; HLA-B*40:02; NPSR1; ENSG00000187258; TAA
VIIQNLPAL

SEQ ID NO: 54292 - protein, 9 aa, Homo sapiens
  misc_feature: Table A; Target 54292; HLA-B*46:01; NPSR1; ENSG00000187258; TAA
VIIQNLPAL

SEQ ID NO: 54293 - protein, 9 aa, Homo sapiens
  misc_feature: Table A; Target 54293; HLA-B*55:01; NPSR1; ENSG00000187258; TAA
VIIQNLPAL

SEQ ID NO: 54294 - protein, 9 aa, Homo sapiens
  misc_feature: Table A; Target 54294; HLA-B*58:01; NPSR1; ENSG00000187258; TAA
VIIQNLPAL

SEQ ID NO: 54295 - protein, 9 aa, Homo sapiens
  misc_feature: Table A; Target 54295; HLA-C*01:02; NPSR1; ENSG00000187258; TAA
VIIQNLPAL

SEQ ID NO: 54296 - protein, 9 aa, Homo sapiens
  misc_feature: Table A; Target 54296; HLA-C*02:02; NPSR1; ENSG00000187258; TAA
VIIQNLPAL

SEQ ID NO: 54297 - protein, 9 aa, Homo sapiens
  misc_feature: Table A; Target 54297; HLA-C*03:03; NPSR1; ENSG00000187258; TAA
VIIQNLPAL

SEQ ID NO: 54298 - protein, 9 aa, Homo sapiens
  misc_feature: Table A; Target 54298; HLA-C*03:04; NPSR1; ENSG00000187258; TAA
VIIQNLPAL

SEQ ID NO: 54299 - protein, 9 aa, Homo sapiens
  misc_feature: Table A; Target 54299; HLA-C*07:04; NPSR1; ENSG00000187258; TAA
VIIQNLPAL

SEQ ID NO: 54300 - protein, 9 aa, Homo sapiens
  misc_feature: Table A; Target 54300; HLA-C*14:02; NPSR1; ENSG00000187258; TAA
VIIQNLPAL

SEQ ID NO: 54301 - protein, 9 aa, Homo sapiens
  misc_feature: Table A; Target 54301; HLA-C*16:01; NPSR1; ENSG00000187258; TAA
VIIQNLPAL

SEQ ID NO: 54302 - protein, 9 aa, Homo sapiens
  misc_feature: Table A; Target 54302; HLA-C*16:02; NPSR1; ENSG00000187258; TAA
VIIQNLPAL

SEQ ID NO: 54303 - protein, 9 aa, Homo sapiens
  misc_feature: Table A; Target 54303; HLA-C*16:04; NPSR1; ENSG00000187258; TAA
VIIQNLPAL

SEQ ID NO: 54304 - protein, 9 aa, Homo sapiens
  misc_feature: Table A; Target 54304; HLA-A*03:01; NPSR1; ENSG00000187258; TAA
VLFSTWRRK

SEQ ID NO: 54305 - protein, 9 aa, Homo sapiens
  misc_feature: Table A; Target 54305; HLA-A*02:01; NPSR1; ENSG00000187258; TAA
VLIVIAWSL

SEQ ID NO: 54306 - protein, 9 aa, Homo sapiens
  misc_feature: Table A; Target 54306; HLA-A*02:04; NPSR1; ENSG00000187258; TAA
VLIVIAWSL

SEQ ID NO: 54307 - protein, 9 aa, Homo sapiens
  misc_feature: Table A; Target 54307; HLA-A*02:07; NPSR1; ENSG00000187258; TAA
VLIVIAWSL

SEQ ID NO: 54308 - protein, 8 aa, Homo sapiens
  misc_feature: Table A; Target 54308; HLA-B*15:01; NPSR1; ENSG00000187258; TAA
VLLYASTY

SEQ ID NO: 54309 - protein, 8 aa, Homo sapiens
  misc_feature: Table A; Target 54309; HLA-B*15:03; NPSR1; ENSG00000187258; TAA
VLLYASTY

SEQ ID NO: 54310 - protein, 8 aa, Homo sapiens
  misc_feature: Table A; Target 54310; HLA-B*46:01; NPSR1; ENSG00000187258; TAA
VLLYASTY

SEQ ID NO: 54311 - protein, 8 aa, Homo sapiens
  misc_feature: Table A; Target 54311; HLA-C*14:02; NPSR1; ENSG00000187258; TAA
VLLYASTY

SEQ ID NO: 54312 - protein, 9 aa, Homo sapiens
  misc_feature: Table A; Target 54312; HLA-A*02:01; NPSR1; ENSG00000187258; TAA
VLLYASTYV

SEQ ID NO: 54313 - protein, 10 aa, Homo sapiens
  misc_feature: Table A; Target 54313; HLA-A*01:01; NPSR1; ENSG00000187258; TAA
VLVSLSIDRY

SEQ ID NO: 54314 - protein, 10 aa, Homo sapiens
  misc_feature: Table A; Target 54314; HLA-A*29:02; NPSR1; ENSG00000187258; TAA
VLVSLSIDRY

SEQ ID NO: 54315 - protein, 10 aa, Homo sapiens
  misc_feature: Table A; Target 54315; HLA-A*30:02; NPSR1; ENSG00000187258; TAA
VLVSLSIDRY

SEQ ID NO: 54316 - protein, 10 aa, Homo sapiens
  misc_feature: Table A; Target 54316; HLA-B*15:01; NPSR1; ENSG00000187258; TAA
VLVSLSIDRY

SEQ ID NO: 54317 - protein, 9 aa, Homo sapiens
  misc_feature: Table A; Target 54317; HLA-B*57:01; NPSR1; ENSG00000187258; TAA
VNILTDINW

SEQ ID NO: 54318 - protein, 8 aa, Homo sapiens
  misc_feature: Table A; Target 54318; HLA-A*01:01; NPSR1; ENSG00000187258; TAA
VSLSIDRY

SEQ ID NO: 54319 - protein, 8 aa, Homo sapiens
  misc_feature: Table A; Target 54319; HLA-A*30:02; NPSR1; ENSG00000187258; TAA
VSLSIDRY

SEQ ID NO: 54320 - protein, 10 aa, Homo sapiens
  misc_feature: Table A; Target 54320; HLA-A*01:01; NPSR1; ENSG00000187258; TAA
VTFTEVVEGK

SEQ ID NO: 54321 - protein, 10 aa, Homo sapiens
  misc_feature: Table A; Target 54321; HLA-A*03:01; NPSR1; ENSG00000187258; TAA
VTFTEVVEGK

SEQ ID NO: 54322 - protein, 10 aa, Homo sapiens
  misc_feature: Table A; Target 54322; HLA-A*03:02; NPSR1; ENSG00000187258; TAA
VTFTEVVEGK

SEQ ID NO: 54323 - protein, 10 aa, Homo sapiens
  misc_feature: Table A; Target 54323; HLA-A*11:01; NPSR1; ENSG00000187258; TAA
VTFTEVVEGK

SEQ ID NO: 54324 - protein, 10 aa, Homo sapiens
  misc_feature: Table A; Target 54324; HLA-A*68:01; NPSR1; ENSG00000187258; TAA
VTFTEVVEGK

SEQ ID NO: 54325 - protein, 10 aa, Homo sapiens
  misc_feature: Table A; Target 54325; HLA-B*27:02; NPSR1; ENSG00000187258; TAA
VTFTEVVEGK

SEQ ID NO: 54326 - protein, 10 aa, Homo sapiens
  misc_feature: Table A; Target 54326; HLA-A*01:01; NPSR1; ENSG00000187258; TAA
VTQLAITDSF

SEQ ID NO: 54327 - protein, 10 aa, Homo sapiens
  misc_feature: Table A; Target 54327; HLA-A*24:02; NPSR1; ENSG00000187258; TAA
VTQLAITDSF

SEQ ID NO: 54328 - protein, 10 aa, Homo sapiens
  misc_feature: Table A; Target 54328; HLA-B*57:01; NPSR1; ENSG00000187258; TAA
VTQLAITDSF

SEQ ID NO: 54329 - protein, 10 aa, Homo sapiens
  misc_feature: Table A; Target 54329; HLA-B*58:01; NPSR1; ENSG00000187258; TAA
VTQLAITDSF

SEQ ID NO: 54330 - protein, 11 aa, Homo sapiens
  misc_feature: Table A; Target 54330; HLA-A*01:01; NPSR1; ENSG00000187258; TAA
VVEGKEWGSFY

SEQ ID NO: 54331 - protein, 9 aa, Homo sapiens
  misc_feature: Table A; Target 54331; HLA-A*03:01; NPSR1; ENSG00000187258; TAA
VVLLYASTY

SEQ ID NO: 54332 - protein, 9 aa, Homo sapiens
  misc_feature: Table A; Target 54332; HLA-A*29:02; NPSR1; ENSG00000187258; TAA
VVLLYASTY

SEQ ID NO: 54333 - protein, 9 aa, Homo sapiens
  misc_feature: Table A; Target 54333; HLA-A*30:02; NPSR1; ENSG00000187258; TAA
VVLLYASTY

SEQ ID NO: 54334 - protein, 9 aa, Homo sapiens
  misc_feature: Table A; Target 54334; HLA-A*32:01; NPSR1; ENSG00000187258; TAA
VVLLYASTY

SEQ ID NO: 54335 - protein, 9 aa, Homo sapiens
  misc_feature: Table A; Target 54335; HLA-B*15:01; NPSR1; ENSG00000187258; TAA
VVLLYASTY

SEQ ID NO: 54336 - protein, 9 aa, Homo sapiens
  misc_feature: Table A; Target 54336; HLA-B*15:03; NPSR1; ENSG00000187258; TAA
VVLLYASTY

SEQ ID NO: 54337 - protein, 9 aa, Homo sapiens
  misc_feature: Table A; Target 54337; HLA-B*35:01; NPSR1; ENSG00000187258; TAA
VVLLYASTY

SEQ ID NO: 54338 - protein, 9 aa, Homo sapiens
  misc_feature: Table A; Target 54338; HLA-B*46:01; NPSR1; ENSG00000187258; TAA
VVLLYASTY

SEQ ID NO: 54339 - protein, 9 aa, Homo sapiens
  misc_feature: Table A; Target 54339; HLA-C*01:02; NPSR1; ENSG00000187258; TAA
VVLLYASTY

SEQ ID NO: 54340 - protein, 9 aa, Homo sapiens
  misc_feature: Table A; Target 54340; HLA-C*02:02; NPSR1; ENSG00000187258; TAA
VVLLYASTY

SEQ ID NO: 54341 - protein, 9 aa, Homo sapiens
  misc_feature: Table A; Target 54341; HLA-C*07:04; NPSR1; ENSG00000187258; TAA
VVLLYASTY

SEQ ID NO: 54342 - protein, 9 aa, Homo sapiens
  misc_feature: Table A; Target 54342; HLA-C*14:02; NPSR1; ENSG00000187258; TAA
VVLLYASTY

SEQ ID NO: 54343 - protein, 8 aa, Homo sapiens
  misc_feature: Table A; Target 54343; HLA-A*23:01; NPSR1; ENSG00000187258; TAA
VYFIPLTI

SEQ ID NO: 54344 - protein, 8 aa, Homo sapiens
  misc_feature: Table A; Target 54344; HLA-A*24:02; NPSR1; ENSG00000187258; TAA
VYFIPLTI

SEQ ID NO: 54345 - protein, 8 aa, Homo sapiens
  misc_feature: Table A; Target 54345; HLA-B*51:01; NPSR1; ENSG00000187258; TAA
VYFIPLTI

SEQ ID NO: 54346 - protein, 9 aa, Homo sapiens
  misc_feature: Table A; Target 54346; HLA-A*23:01; NPSR1; ENSG00000187258; TAA
VYFIPLTII

SEQ ID NO: 54347 - protein, 9 aa, Homo sapiens
  misc_feature: Table A; Target 54347; HLA-A*24:02; NPSR1; ENSG00000187258; TAA
VYFIPLTII

SEQ ID NO: 54348 - protein, 11 aa, Homo sapiens
  misc_feature: Table A; Target 54348; HLA-A*24:02; NPSR1; ENSG00000187258; TAA
VYFIPLTIISI

SEQ ID NO: 54349 - protein, 9 aa, Homo sapiens
  misc_feature: Table A; Target 54349; HLA-A*24:02; NPSR1; ENSG00000187258; TAA
VYPMKFLQG

SEQ ID NO: 54350 - protein, 8 aa, Homo sapiens
  misc_feature: Table A; Target 54350; HLA-B*51:01; NPSR1; ENSG00000187258; TAA
YASTYVLV

SEQ ID NO: 54351 - protein, 8 aa, Homo sapiens
  misc_feature: Table A; Target 54351; HLA-C*02:02; NPSR1; ENSG00000187258; TAA
YASTYVLV

SEQ ID NO: 54352 - protein, 8 aa, Homo sapiens
  misc_feature: Table A; Target 54352; HLA-C*12:03; NPSR1; ENSG00000187258; TAA
YASTYVLV

SEQ ID NO: 54353 - protein, 9 aa, Homo sapiens
  misc_feature: Table A; Target 54353; HLA-C*12:03; NPSR1; ENSG00000187258; TAA
YASTYVLVS

SEQ ID NO: 54354 - protein, 10 aa, Homo sapiens
  misc_feature: Table A; Target 54354; HLA-A*30:01; NPSR1; ENSG00000187258; TAA
YASTYVLVSL

SEQ ID NO: 54355 - protein, 10 aa, Homo sapiens
  misc_feature: Table A; Target 54355; HLA-A*68:02; NPSR1; ENSG00000187258; TAA
YASTYVLVSL

SEQ ID NO: 54356 - protein, 10 aa, Homo sapiens
  misc_feature: Table A; Target 54356; HLA-B*35:03; NPSR1; ENSG00000187258; TAA
YASTYVLVSL

SEQ ID NO: 54357 - protein, 10 aa, Homo sapiens
  misc_feature: Table A; Target 54357; HLA-B*51:01; NPSR1; ENSG00000187258; TAA
YASTYVLVSL

SEQ ID NO: 54358 - protein, 10 aa, Homo sapiens
  misc_feature: Table A; Target 54358; HLA-B*54:01; NPSR1; ENSG00000187258; TAA
YASTYVLVSL

SEQ ID NO: 54359 - protein, 10 aa, Homo sapiens
  misc_feature: Table A; Target 54359; HLA-C*02:02; NPSR1; ENSG00000187258; TAA
YASTYVLVSL

SEQ ID NO: 54360 - protein, 10 aa, Homo sapiens
  misc_feature: Table A; Target 54360; HLA-C*03:03; NPSR1; ENSG00000187258; TAA
YASTYVLVSL

SEQ ID NO: 54361 - protein, 10 aa, Homo sapiens
  misc_feature: Table A; Target 54361; HLA-C*03:04; NPSR1; ENSG00000187258; TAA
YASTYVLVSL

SEQ ID NO: 54362 - protein, 10 aa, Homo sapiens
  misc_feature: Table A; Target 54362; HLA-C*12:03; NPSR1; ENSG00000187258; TAA
YASTYVLVSL

SEQ ID NO: 54363 - protein, 10 aa, Homo sapiens
  misc_feature: Table A; Target 54363; HLA-C*16:02; NPSR1; ENSG00000187258; TAA
YASTYVLVSL

SEQ ID NO: 54364 - protein, 10 aa, Homo sapiens
  misc_feature: Table A; Target 54364; HLA-C*16:04; NPSR1; ENSG00000187258; TAA
YASTYVLVSL

SEQ ID NO: 54365 - protein, 9 aa, Homo sapiens
  misc_feature: Table A; Target 54365; HLA-A*02:01; NPSR1; ENSG00000187258; TAA
YASVIIQNL

SEQ ID NO: 54366 - protein, 9 aa, Homo sapiens
  misc_feature: Table A; Target 54366; HLA-A*02:03; NPSR1; ENSG00000187258; TAA
YASVIIQNL

SEQ ID NO: 54367 - protein, 9 aa, Homo sapiens
  misc_feature: Table A; Target 54367; HLA-A*02:04; NPSR1; ENSG00000187258; TAA
YASVIIQNL

SEQ ID NO: 54368 - protein, 9 aa, Homo sapiens
  misc_feature: Table A; Target 54368; HLA-A*02:07; NPSR1; ENSG00000187258; TAA
YASVIIQNL

SEQ ID NO: 54369 - protein, 9 aa, Homo sapiens
  misc_feature: Table A; Target 54369; HLA-A*23:01; NPSR1; ENSG00000187258; TAA
YASVIIQNL

SEQ ID NO: 54370 - protein, 9 aa, Homo sapiens
  misc_feature: Table A; Target 54370; HLA-A*24:02; NPSR1; ENSG00000187258; TAA
YASVIIQNL

SEQ ID NO: 54371 - protein, 9 aa, Homo sapiens
  misc_feature: Table A; Target 54371; HLA-A*25:01; NPSR1; ENSG00000187258; TAA
YASVIIQNL

SEQ ID NO: 54372 - protein, 9 aa, Homo sapiens
  misc_feature: Table A; Target 54372; HLA-A*26:01; NPSR1; ENSG00000187258; TAA
YASVIIQNL

SEQ ID NO: 54373 - protein, 9 aa, Homo sapiens
  misc_feature: Table A; Target 54373; HLA-A*30:01; NPSR1; ENSG00000187258; TAA
YASVIIQNL

SEQ ID NO: 54374 - protein, 9 aa, Homo sapiens
  misc_feature: Table A; Target 54374; HLA-A*32:01; NPSR1; ENSG00000187258; TAA
YASVIIQNL

SEQ ID NO: 54375 - protein, 9 aa, Homo sapiens
  misc_feature: Table A; Target 54375; HLA-A*33:03; NPSR1; ENSG00000187258; TAA
YASVIIQNL

SEQ ID NO: 54376 - protein, 9 aa, Homo sapiens
  misc_feature: Table A; Target 54376; HLA-A*68:01; NPSR1; ENSG00000187258; TAA
YASVIIQNL

SEQ ID NO: 54377 - protein, 9 aa, Homo sapiens
  misc_feature: Table A; Target 54377; HLA-A*68:02; NPSR1; ENSG00000187258; TAA
YASVIIQNL

SEQ ID NO: 54378 - protein, 9 aa, Homo sapiens
  misc_feature: Table A; Target 54378; HLA-B*08:01; NPSR1; ENSG00000187258; TAA
YASVIIQNL

SEQ ID NO: 54379 - protein, 9 aa, Homo sapiens
  misc_feature: Table A; Target 54379; HLA-B*13:02; NPSR1; ENSG00000187258; TAA
YASVIIQNL

SEQ ID NO: 54380 - protein, 9 aa, Homo sapiens
  misc_feature: Table A; Target 54380; HLA-B*15:03; NPSR1; ENSG00000187258; TAA
YASVIIQNL

SEQ ID NO: 54381 - protein, 9 aa, Homo sapiens
  misc_feature: Table A; Target 54381; HLA-B*27:02; NPSR1; ENSG00000187258; TAA
YASVIIQNL

SEQ ID NO: 54382 - protein, 9 aa, Homo sapiens
  misc_feature: Table A; Target 54382; HLA-B*27:05; NPSR1; ENSG00000187258; TAA
YASVIIQNL

SEQ ID NO: 54383 - protein, 9 aa, Homo sapiens
  misc_feature: Table A; Target 54383; HLA-B*35:01; NPSR1; ENSG00000187258; TAA
YASVIIQNL

SEQ ID NO: 54384 - protein, 9 aa, Homo sapiens
  misc_feature: Table A; Target 54384; HLA-B*35:03; NPSR1; ENSG00000187258; TAA
YASVIIQNL

SEQ ID NO: 54385 - protein, 9 aa, Homo sapiens
  misc_feature: Table A; Target 54385; HLA-B*38:01; NPSR1; ENSG00000187258; TAA
YASVIIQNL

SEQ ID NO: 54386 - protein, 9 aa, Homo sapiens
  misc_feature: Table A; Target 54386; HLA-B*39:01; NPSR1; ENSG00000187258; TAA
YASVIIQNL

SEQ ID NO: 54387 - protein, 9 aa, Homo sapiens
  misc_feature: Table A; Target 54387; HLA-B*40:01; NPSR1; ENSG00000187258; TAA
YASVIIQNL

SEQ ID NO: 54388 - protein, 9 aa, Homo sapiens
  misc_feature: Table A; Target 54388; HLA-B*40:02; NPSR1; ENSG00000187258; TAA
YASVIIQNL

SEQ ID NO: 54389 - protein, 9 aa, Homo sapiens
  misc_feature: Table A; Target 54389; HLA-B*44:02; NPSR1; ENSG00000187258; TAA
YASVIIQNL

SEQ ID NO: 54390 - protein, 9 aa, Homo sapiens
  misc_feature: Table A; Target 54390; HLA-B*46:01; NPSR1; ENSG00000187258; TAA
YASVIIQNL

SEQ ID NO: 54391 - protein, 9 aa, Homo sapiens
  misc_feature: Table A; Target 54391; HLA-B*51:01; NPSR1; ENSG00000187258; TAA
YASVIIQNL

SEQ ID NO: 54392 - protein, 9 aa, Homo sapiens
  misc_feature: Table A; Target 54392; HLA-B*55:01; NPSR1; ENSG00000187258; TAA
YASVIIQNL

SEQ ID NO: 54393 - protein, 9 aa, Homo sapiens
  misc_feature: Table A; Target 54393; HLA-B*58:01; NPSR1; ENSG00000187258; TAA
YASVIIQNL

SEQ ID NO: 54394 - protein, 9 aa, Homo sapiens
  misc_feature: Table A; Target 54394; HLA-C*01:02; NPSR1; ENSG00000187258; TAA
YASVIIQNL

SEQ ID NO: 54395 - protein, 9 aa, Homo sapiens
  misc_feature: Table A; Target 54395; HLA-C*02:02; NPSR1; ENSG00000187258; TAA
YASVIIQNL

SEQ ID NO: 54396 - protein, 9 aa, Homo sapiens
  misc_feature: Table A; Target 54396; HLA-C*03:03; NPSR1; ENSG00000187258; TAA
YASVIIQNL

SEQ ID NO: 54397 - protein, 9 aa, Homo sapiens
  misc_feature: Table A; Target 54397; HLA-C*03:04; NPSR1; ENSG00000187258; TAA
YASVIIQNL

SEQ ID NO: 54398 - protein, 9 aa, Homo sapiens
  misc_feature: Table A; Target 54398; HLA-C*05:01; NPSR1; ENSG00000187258; TAA
YASVIIQNL

SEQ ID NO: 54399 - protein, 9 aa, Homo sapiens
  misc_feature: Table A; Target 54399; HLA-C*06:02; NPSR1; ENSG00000187258; TAA
YASVIIQNL

SEQ ID NO: 54400 - protein, 9 aa, Homo sapiens
  misc_feature: Table A; Target 54400; HLA-C*07:04; NPSR1; ENSG00000187258; TAA
YASVIIQNL

SEQ ID NO: 54401 - protein, 9 aa, Homo sapiens
  misc_feature: Table A; Target 54401; HLA-C*07:06; NPSR1; ENSG00000187258; TAA
YASVIIQNL

SEQ ID NO: 54402 - protein, 9 aa, Homo sapiens
  misc_feature: Table A; Target 54402; HLA-C*12:03; NPSR1; ENSG00000187258; TAA
YASVIIQNL

SEQ ID NO: 54403 - protein, 9 aa, Homo sapiens
  misc_feature: Table A; Target 54403; HLA-C*14:02; NPSR1; ENSG00000187258; TAA
YASVIIQNL

SEQ ID NO: 54404 - protein, 9 aa, Homo sapiens
  misc_feature: Table A; Target 54404; HLA-C*16:01; NPSR1; ENSG00000187258; TAA
YASVIIQNL

SEQ ID NO: 54405 - protein, 9 aa, Homo sapiens
  misc_feature: Table A; Target 54405; HLA-C*16:02; NPSR1; ENSG00000187258; TAA
YASVIIQNL

SEQ ID NO: 54406 - protein, 9 aa, Homo sapiens
  misc_feature: Table A; Target 54406; HLA-C*16:04; NPSR1; ENSG00000187258; TAA
YASVIIQNL

SEQ ID NO: 54407 - protein, 11 aa, Homo sapiens
  misc_feature: Table A; Target 54407; HLA-B*54:01; NPSR1; ENSG00000187258; TAA
YASVIIQNLPA

SEQ ID NO: 54408 - protein, 8 aa, Homo sapiens
  misc_feature: Table A; Target 54408; HLA-A*30:01; NPSR1; ENSG00000187258; TAA
YETVISNC

SEQ ID NO: 54409 - protein, 8 aa, Homo sapiens
  misc_feature: Table A; Target 54409; HLA-B*18:01; NPSR1; ENSG00000187258; TAA
YETVISNC

SEQ ID NO: 54410 - protein, 8 aa, Homo sapiens
  misc_feature: Table A; Target 54410; HLA-B*37:01; NPSR1; ENSG00000187258; TAA
YETVISNC

SEQ ID NO: 54411 - protein, 8 aa, Homo sapiens
  misc_feature: Table A; Target 54411; HLA-B*40:02; NPSR1; ENSG00000187258; TAA
YETVISNC

SEQ ID NO: 54412 - protein, 8 aa, Homo sapiens
  misc_feature: Table A; Target 54412; HLA-B*49:01; NPSR1; ENSG00000187258; TAA
YETVISNC

SEQ ID NO: 54413 - protein, 8 aa, Homo sapiens
  misc_feature: Table A; Target 54413; HLA-C*12:03; NPSR1; ENSG00000187258; TAA
YETVISNC

SEQ ID NO: 54414 - protein, 9 aa, Homo sapiens
  misc_feature: Table A; Target 54414; HLA-B*49:01; NPSR1; ENSG00000187258; TAA
YETVISNCS

SEQ ID NO: 54415 - protein, 8 aa, Homo sapiens
  misc_feature: Table A; Target 54415; HLA-A*23:01; NPSR1; ENSG00000187258; TAA
YFIPLTII

SEQ ID NO: 54416 - protein, 10 aa, Homo sapiens
  misc_feature: Table A; Target 54416; HLA-A*23:01; NPSR1; ENSG00000187258; TAA
YFIPLTIISI

SEQ ID NO: 54417 - protein, 10 aa, Homo sapiens
  misc_feature: Table A; Target 54417; HLA-A*24:02; NPSR1; ENSG00000187258; TAA
YFIPLTIISI

SEQ ID NO: 54418 - protein, 10 aa, Homo sapiens
  misc_feature: Table A; Target 54418; HLA-A*29:02; NPSR1; ENSG00000187258; TAA
YFLFDILDNF

SEQ ID NO: 54419 - protein, 8 aa, Homo sapiens
  misc_feature: Table A; Target 54419; HLA-B*51:01; NPSR1; ENSG00000187258; TAA
YGIVIRTI

SEQ ID NO: 54420 - protein, 9 aa, Homo sapiens
  misc_feature: Table A; Target 54420; HLA-B*57:01; NPSR1; ENSG00000187258; TAA
YGIVIRTIW

SEQ ID NO: 54421 - protein, 8 aa, Homo sapiens
  misc_feature: Table A; Target 54421; HLA-A*01:01; NPSR1; ENSG00000187258; TAA
YLQVVLLY

SEQ ID NO: 54422 - protein, 8 aa, Homo sapiens
  misc_feature: Table A; Target 54422; HLA-A*29:02; NPSR1; ENSG00000187258; TAA
YLQVVLLY

SEQ ID NO: 54423 - protein, 8 aa, Homo sapiens
  misc_feature: Table A; Target 54423; HLA-C*07:01; NPSR1; ENSG00000187258; TAA
YLQVVLLY

SEQ ID NO: 54424 - protein, 9 aa, Homo sapiens
  misc_feature: Table A; Target 54424; HLA-A*02:01; NPSR1; ENSG00000187258; TAA
YLQVVLLYA

SEQ ID NO: 54425 - protein, 9 aa, Homo sapiens
  misc_feature: Table A; Target 54425; HLA-A*02:03; NPSR1; ENSG00000187258; TAA
YLQVVLLYA

SEQ ID NO: 54426 - protein, 9 aa, Homo sapiens
  misc_feature: Table A; Target 54426; HLA-A*02:04; NPSR1; ENSG00000187258; TAA
YLQVVLLYA

SEQ ID NO: 54427 - protein, 9 aa, Homo sapiens
  misc_feature: Table A; Target 54427; HLA-A*02:07; NPSR1; ENSG00000187258; TAA
YLQVVLLYA

SEQ ID NO: 54428 - protein, 8 aa, Homo sapiens
  misc_feature: Table A; Target 54428; HLA-A*33:01; NPSR1; ENSG00000187258; TAA
YNRGLISK

SEQ ID NO: 54429 - protein, 8 aa, Homo sapiens
  misc_feature: Table A; Target 54429; HLA-B*54:01; NPSR1; ENSG00000187258; TAA
YPMKFLQG

SEQ ID NO: 54430 - protein, 8 aa, Homo sapiens
  misc_feature: Table A; Target 54430; HLA-B*58:01; NPSR1; ENSG00000187258; TAA
YSFKTEQL

SEQ ID NO: 54431 - protein, 8 aa, Homo sapiens
  misc_feature: Table A; Target 54431; HLA-C*03:03; NPSR1; ENSG00000187258; TAA
YSFKTEQL

SEQ ID NO: 54432 - protein, 8 aa, Homo sapiens
  misc_feature: Table A; Target 54432; HLA-C*03:04; NPSR1; ENSG00000187258; TAA
YSFKTEQL

SEQ ID NO: 54433 - protein, 9 aa, Homo sapiens
  misc_feature: Table A; Target 54433; HLA-A*68:02; NPSR1; ENSG00000187258; TAA
YSFKTEQLI

SEQ ID NO: 54434 - protein, 9 aa, Homo sapiens
  misc_feature: Table A; Target 54434; HLA-B*13:02; NPSR1; ENSG00000187258; TAA
YSFKTEQLI

SEQ ID NO: 54435 - protein, 9 aa, Homo sapiens
  misc_feature: Table A; Target 54435; HLA-B*51:01; NPSR1; ENSG00000187258; TAA
YSFKTEQLI

SEQ ID NO: 54436 - protein, 9 aa, Homo sapiens
  misc_feature: Table A; Target 54436; HLA-B*57:01; NPSR1; ENSG00000187258; TAA
YSFKTEQLI

SEQ ID NO: 54437 - protein, 9 aa, Homo sapiens
  misc_feature: Table A; Target 54437; HLA-B*58:01; NPSR1; ENSG00000187258; TAA
YSFKTEQLI

SEQ ID NO: 54438 - protein, 8 aa, Homo sapiens
  misc_feature: Table A; Target 54438; HLA-B*51:01; NPSR1; ENSG00000187258; TAA
YVLVSLSI

SEQ ID NO: 54439 - protein, 10 aa, Homo sapiens
  misc_feature: Table A; Target 54439; HLA-B*27:02; NPSR1; ENSG00000187258; TAA
YVLVSLSIDR

SEQ ID NO: 54440 - protein, 11 aa, Homo sapiens
  misc_feature: Table A; Target 54440; HLA-A*01:01; NPSR1; ENSG00000187258; TAA
YVLVSLSIDRY

SEQ ID NO: 54441 - protein, 11 aa, Homo sapiens
  misc_feature: Table A; Target 54441; HLA-A*29:02; NPSR1; ENSG00000187258; TAA
YVLVSLSIDRY

SEQ ID NO: 54442 - protein, 9 aa, Homo sapiens
  misc_feature: Table A; Target 54442; HLA-A*23:01; NPSR1; ENSG00000187258; TAA
YYSFKTEQL

SEQ ID NO: 54443 - protein, 9 aa, Homo sapiens
  misc_feature: Table A; Target 54443; HLA-A*24:02; NPSR1; ENSG00000187258; TAA
YYSFKTEQL

SEQ ID NO: 54444 - protein, 9 aa, Homo sapiens
  misc_feature: Table A; Target 54444; HLA-C*07:04; NPSR1; ENSG00000187258; TAA
YYSFKTEQL

SEQ ID NO: 54445 - protein, 9 aa, Homo sapiens
  misc_feature: Table A; Target 54445; HLA-C*14:02; NPSR1; ENSG00000187258; TAA
YYSFKTEQL

SEQ ID NO: 54446 - protein, 10 aa, Homo sapiens
  misc_feature: Table A; Target 54446; HLA-A*24:02; NPSR1; ENSG00000187258; TAA
YYSFKTEQLI

SEQ ID NO: 54447 - protein, 8 aa, Homo sapiens
  misc_feature: Table A; Target 54447; HLA-A*23:01; OBP2B; ENSG00000171102; TAA
AAALSFTL

SEQ ID NO: 54448 - protein, 8 aa, Homo sapiens
  misc_feature: Table A; Target 54448; HLA-A*30:01; OBP2B; ENSG00000171102; TAA
AAALSFTL

SEQ ID NO: 54449 - protein, 8 aa, Homo sapiens
  misc_feature: Table A; Target 54449; HLA-B*08:01; OBP2B; ENSG00000171102; TAA
AAALSFTL

SEQ ID NO: 54450 - protein, 8 aa, Homo sapiens
  misc_feature: Table A; Target 54450; HLA-B*35:03; OBP2B; ENSG00000171102; TAA
AAALSFTL

SEQ ID NO: 54451 - protein, 8 aa, Homo sapiens
  misc_feature: Table A; Target 54451; HLA-B*37:01; OBP2B; ENSG00000171102; TAA
AAALSFTL

SEQ ID NO: 54452 - protein, 8 aa, Homo sapiens
  misc_feature: Table A; Target 54452; HLA-B*40:01; OBP2B; ENSG00000171102; TAA
AAALSFTL

SEQ ID NO: 54453 - protein, 8 aa, Homo sapiens
  misc_feature: Table A; Target 54453; HLA-B*58:01; OBP2B; ENSG00000171102; TAA
AAALSFTL

SEQ ID NO: 54454 - protein, 8 aa, Homo sapiens
  misc_feature: Table A; Target 54454; HLA-C*01:02; OBP2B; ENSG00000171102; TAA
AAALSFTL

SEQ ID NO: 54455 - protein, 8 aa, Homo sapiens
  misc_feature: Table A; Target 54455; HLA-C*02:02; OBP2B; ENSG00000171102; TAA
AAALSFTL

SEQ ID NO: 54456 - protein, 8 aa, Homo sapiens
  misc_feature: Table A; Target 54456; HLA-C*03:03; OBP2B; ENSG00000171102; TAA
AAALSFTL

SEQ ID NO: 54457 - protein, 8 aa, Homo sapiens
  misc_feature: Table A; Target 54457; HLA-C*03:04; OBP2B; ENSG00000171102; TAA
AAALSFTL

SEQ ID NO: 54458 - protein, 8 aa, Homo sapiens
  misc_feature: Table A; Target 54458; HLA-C*14:02; OBP2B; ENSG00000171102; TAA
AAALSFTL

SEQ ID NO: 54459 - protein, 8 aa, Homo sapiens
  misc_feature: Table A; Target 54459; HLA-C*16:01; OBP2B; ENSG00000171102; TAA
AAALSFTL

SEQ ID NO: 54460 - protein, 8 aa, Homo sapiens
  misc_feature: Table A; Target 54460; HLA-C*16:04; OBP2B; ENSG00000171102; TAA
AAALSFTL

SEQ ID NO: 54461 - protein, 9 aa, Homo sapiens
  misc_feature: Table A; Target 54461; HLA-A*02:07; OBP2B; ENSG00000171102; TAA
ALEEFKKLV

SEQ ID NO: 54462 - protein, 11 aa, Homo sapiens
  misc_feature: Table A; Target 54462; HLA-A*31:01; OBP2B; ENSG00000171102; TAA
ALEEFKKLVQR

SEQ ID NO: 54463 - protein, 8 aa, Homo sapiens
  misc_feature: Table A; Target 54463; HLA-B*08:01; OBP2B; ENSG00000171102; TAA
CIQKKILM

SEQ ID NO: 54464 - protein, 9 aa, Homo sapiens
  misc_feature: Table A; Target 54464; HLA-A*33:01; OBP2B; ENSG00000171102; TAA
DITGTWYVK

SEQ ID NO: 54465 - protein, 9 aa, Homo sapiens
  misc_feature: Table A; Target 54465; HLA-A*68:01; OBP2B; ENSG00000171102; TAA
DITGTWYVK

SEQ ID NO: 54466 - protein, 10 aa, Homo sapiens
  misc_feature: Table A; Target 54466; HLA-A*25:01; OBP2B; ENSG00000171102; TAA
DTNREALEEF

SEQ ID NO: 54467 - protein, 10 aa, Homo sapiens
  misc_feature: Table A; Target 54467; HLA-A*26:01; OBP2B; ENSG00000171102; TAA
DTNREALEEF

SEQ ID NO: 54468 - protein, 10 aa, Homo sapiens
  misc_feature: Table A; Target 54468; HLA-A*33:01; OBP2B; ENSG00000171102; TAA
DTNREALEEF

SEQ ID NO: 54469 - protein, 9 aa, Homo sapiens
  misc_feature: Table A; Target 54469; HLA-A*33:01; OBP2B; ENSG00000171102; TAA
EALEEFKKL

SEQ ID NO: 54470 - protein, 8 aa, Homo sapiens
  misc_feature: Table A; Target 54470; HLA-A*33:03; OBP2B; ENSG00000171102; TAA
EATFTFMR

SEQ ID NO: 54471 - protein, 8 aa, Homo sapiens
  misc_feature: Table A; Target 54471; HLA-C*07:01; OBP2B; ENSG00000171102; TAA
EDITGTWY

SEQ ID NO: 54472 - protein, 9 aa, Homo sapiens
  misc_feature: Table A; Target 54472; HLA-A*68:02; OBP2B; ENSG00000171102; TAA
EDITGTWYV

SEQ ID NO: 54473 - protein, 8 aa, Homo sapiens
  misc_feature: Table A; Target 54473; HLA-B*18:01; OBP2B; ENSG00000171102; TAA
EEDIFTPL

SEQ ID NO: 54474 - protein, 11 aa, Homo sapiens
  misc_feature: Table A; Target 54474; HLA-B*39:01; OBP2B; ENSG00000171102; TAA
EEDIFTPLQTG

SEQ ID NO: 54475 - protein, 8 aa, Homo sapiens
  misc_feature: Table A; Target 54475; HLA-B*44:02; OBP2B; ENSG00000171102; TAA
EEDITGTW

SEQ ID NO: 54476 - protein, 8 aa, Homo sapiens
  misc_feature: Table A; Target 54476; HLA-B*44:03; OBP2B; ENSG00000171102; TAA
EEDITGTW

SEQ ID NO: 54477 - protein, 9 aa, Homo sapiens
  misc_feature: Table A; Target 54477; HLA-B*18:01; OBP2B; ENSG00000171102; TAA
EEDITGTWY

SEQ ID NO: 54478 - protein, 9 aa, Homo sapiens
  misc_feature: Table A; Target 54478; HLA-B*44:02; OBP2B; ENSG00000171102; TAA
EEDITGTWY

SEQ ID NO: 54479 - protein, 9 aa, Homo sapiens
  misc_feature: Table A; Target 54479; HLA-B*44:03; OBP2B; ENSG00000171102; TAA
EEDITGTWY

SEQ ID NO: 54480 - protein, 9 aa, Homo sapiens
  misc_feature: Table A; Target 54480; HLA-A*25:01; OBP2B; ENSG00000171102; TAA
EEEDITGTW

SEQ ID NO: 54481 - protein, 9 aa, Homo sapiens
  misc_feature: Table A; Target 54481; HLA-B*18:01; OBP2B; ENSG00000171102; TAA
EEEDITGTW

SEQ ID NO: 54482 - protein, 9 aa, Homo sapiens
  misc_feature: Table A; Target 54482; HLA-B*27:02; OBP2B; ENSG00000171102; TAA
EEEDITGTW

SEQ ID NO: 54483 - protein, 9 aa, Homo sapiens
  misc_feature: Table A; Target 54483; HLA-B*44:02; OBP2B; ENSG00000171102; TAA
EEEDITGTW

SEQ ID NO: 54484 - protein, 9 aa, Homo sapiens
  misc_feature: Table A; Target 54484; HLA-B*44:03; OBP2B; ENSG00000171102; TAA
EEEDITGTW

SEQ ID NO: 54485 - protein, 9 aa, Homo sapiens
  misc_feature: Table A; Target 54485; HLA-C*16:04; OBP2B; ENSG00000171102; TAA
EEEDITGTW

SEQ ID NO: 54486 - protein, 10 aa, Homo sapiens
  misc_feature: Table A; Target 54486; HLA-B*18:01; OBP2B; ENSG00000171102; TAA
EEEDITGTWY

SEQ ID NO: 54487 - protein, 10 aa, Homo sapiens
  misc_feature: Table A; Target 54487; HLA-B*44:02; OBP2B; ENSG00000171102; TAA
EEEDITGTWY

SEQ ID NO: 54488 - protein, 10 aa, Homo sapiens
  misc_feature: Table A; Target 54488; HLA-B*44:03; OBP2B; ENSG00000171102; TAA
EEEDITGTWY

SEQ ID NO: 54489 - protein, 9 aa, Homo sapiens
  misc_feature: Table A; Target 54489; HLA-A*33:01; OBP2B; ENSG00000171102; TAA
EEFKKLVQR

SEQ ID NO: 54490 - protein, 9 aa, Homo sapiens
  misc_feature: Table A; Target 54490; HLA-A*33:03; OBP2B; ENSG00000171102; TAA
EEFKKLVQR

SEQ ID NO: 54491 - protein, 9 aa, Homo sapiens
  misc_feature: Table A; Target 54491; HLA-B*44:03; OBP2B; ENSG00000171102; TAA
EEFKKLVQR

SEQ ID NO: 54492 - protein, 9 aa, Homo sapiens
  misc_feature: Table A; Target 54492; HLA-A*25:01; OBP2B; ENSG00000171102; TAA
EEPGKYSAY

SEQ ID NO: 54493 - protein, 9 aa, Homo sapiens
  misc_feature: Table A; Target 54493; HLA-A*26:01; OBP2B; ENSG00000171102; TAA
EEPGKYSAY

SEQ ID NO: 54494 - protein, 9 aa, Homo sapiens
  misc_feature: Table A; Target 54494; HLA-B*18:01; OBP2B; ENSG00000171102; TAA
EEPGKYSAY

SEQ ID NO: 54495 - protein, 9 aa, Homo sapiens
  misc_feature: Table A; Target 54495; HLA-B*44:02; OBP2B; ENSG00000171102; TAA
EEPGKYSAY

SEQ ID NO: 54496 - protein, 9 aa, Homo sapiens
  misc_feature: Table A; Target 54496; HLA-B*44:03; OBP2B; ENSG00000171102; TAA
EEPGKYSAY

SEQ ID NO: 54497 - protein, 8 aa, Homo sapiens
  misc_feature: Table A; Target 54497; HLA-A*33:01; OBP2B; ENSG00000171102; TAA
EFKKLVQR

SEQ ID NO: 54498 - protein, 8 aa, Homo sapiens
  misc_feature: Table A; Target 54498; HLA-A*33:03; OBP2B; ENSG00000171102; TAA
EFKKLVQR

SEQ ID NO: 54499 - protein, 8 aa, Homo sapiens
  misc_feature: Table A; Target 54499; HLA-B*35:01; OBP2B; ENSG00000171102; TAA
EPGKYSAY

SEQ ID NO: 54500 - protein, 8 aa, Homo sapiens
  misc_feature: Table A; Target 54500; HLA-A*02:01; OBP2B; ENSG00000171102; TAA
FLGVTLGL

SEQ ID NO: 54501 - protein, 8 aa, Homo sapiens
  misc_feature: Table A; Target 54501; HLA-A*02:03; OBP2B; ENSG00000171102; TAA
FLGVTLGL

SEQ ID NO: 54502 - protein, 8 aa, Homo sapiens
  misc_feature: Table A; Target 54502; HLA-A*02:04; OBP2B; ENSG00000171102; TAA
FLGVTLGL

SEQ ID NO: 54503 - protein, 10 aa, Homo sapiens
  misc_feature: Table A; Target 54503; HLA-C*01:02; OBP2B; ENSG00000171102; TAA
FTPLQTGSCV

SEQ ID NO: 54504 - protein, 9 aa, Homo sapiens
  misc_feature: Table A; Target 54504; HLA-B*15:03; OBP2B; ENSG00000171102; TAA
GKLEATFTF

SEQ ID NO: 54505 - protein, 10 aa, Homo sapiens
  misc_feature: Table A; Target 54505; HLA-A*02:01; OBP2B; ENSG00000171102; TAA
GLAAALSFTL

SEQ ID NO: 54506 - protein, 10 aa, Homo sapiens
  misc_feature: Table A; Target 54506; HLA-A*02:04; OBP2B; ENSG00000171102; TAA
GLAAALSFTL

SEQ ID NO: 54507 - protein, 11 aa, Homo sapiens
  misc_feature: Table A; Target 54507; HLA-A*31:01; OBP2B; ENSG00000171102; TAA
GLLHMGKLVGR

SEQ ID NO: 54508 - protein, 11 aa, Homo sapiens
  misc_feature: Table A; Target 54508; HLA-A*02:01; OBP2B; ENSG00000171102; TAA
GLSEEDIFTPL

SEQ ID NO: 54509 - protein, 11 aa, Homo sapiens
  misc_feature: Table A; Target 54509; HLA-A*02:04; OBP2B; ENSG00000171102; TAA
GLSEEDIFTPL

SEQ ID NO: 54510 - protein, 11 aa, Homo sapiens
  misc_feature: Table A; Target 54510; HLA-A*02:07; OBP2B; ENSG00000171102; TAA
GLSEEDIFTPL

SEQ ID NO: 54511 - protein, 9 aa, Homo sapiens
  misc_feature: Table A; Target 54511; HLA-B*56:01; OBP2B; ENSG00000171102; TAA
GVTLGLAAA

SEQ ID NO: 54512 - protein, 8 aa, Homo sapiens
  misc_feature: Table A; Target 54512; HLA-A*33:01; OBP2B; ENSG00000171102; TAA
HMGKLVGR

SEQ ID NO: 54513 - protein, 9 aa, Homo sapiens
  misc_feature: Table A; Target 54513; HLA-B*57:01; OBP2B; ENSG00000171102; TAA
KAMVVDKDF

SEQ ID NO: 54514 - protein, 9 aa, Homo sapiens
  misc_feature: Table A; Target 54514; HLA-B*37:01; OBP2B; ENSG00000171102; TAA
KDQHHGGLL

SEQ ID NO: 54515 - protein, 9 aa, Homo sapiens
  misc_feature: Table A; Target 54515; HLA-A*02:07; OBP2B; ENSG00000171102; TAA
KLEATFTFM

SEQ ID NO: 54516 - protein, 8 aa, Homo sapiens
  misc_feature: Table A; Target 54516; HLA-A*01:01; OBP2B; ENSG00000171102; TAA
KTEEPGKY

SEQ ID NO: 54517 - protein, 8 aa, Homo sapiens
  misc_feature: Table A; Target 54517; HLA-A*30:02; OBP2B; ENSG00000171102; TAA
KTEEPGKY

SEQ ID NO: 54518 - protein, 8 aa, Homo sapiens
  misc_feature: Table A; Target 54518; HLA-B*39:01; OBP2B; ENSG00000171102; TAA
KTEEPGKY

SEQ ID NO: 54519 - protein, 8 aa, Homo sapiens
  misc_feature: Table A; Target 54519; HLA-C*05:01; OBP2B; ENSG00000171102; TAA
KTEEPGKY

SEQ ID NO: 54520 - protein, 10 aa, Homo sapiens
  misc_feature: Table A; Target 54520; HLA-A*01:01; OBP2B; ENSG00000171102; TAA
KTEEPGKYSA

SEQ ID NO: 54521 - protein, 11 aa, Homo sapiens
  misc_feature: Table A; Target 54521; HLA-A*01:01; OBP2B; ENSG00000171102; TAA
KTEEPGKYSAY

SEQ ID NO: 54522 - protein, 11 aa, Homo sapiens
  misc_feature: Table A; Target 54522; HLA-A*03:01; OBP2B; ENSG00000171102; TAA
KTEEPGKYSAY

SEQ ID NO: 54523 - protein, 11 aa, Homo sapiens
  misc_feature: Table A; Target 54523; HLA-A*03:02; OBP2B; ENSG00000171102; TAA
KTEEPGKYSAY

SEQ ID NO: 54524 - protein, 11 aa, Homo sapiens
  misc_feature: Table A; Target 54524; HLA-A*25:01; OBP2B; ENSG00000171102; TAA
KTEEPGKYSAY

SEQ ID NO: 54525 - protein, 11 aa, Homo sapiens
  misc_feature: Table A; Target 54525; HLA-A*26:01; OBP2B; ENSG00000171102; TAA
KTEEPGKYSAY

SEQ ID NO: 54526 - protein, 11 aa, Homo sapiens
  misc_feature: Table A; Target 54526; HLA-A*29:02; OBP2B; ENSG00000171102; TAA
KTEEPGKYSAY

SEQ ID NO: 54527 - protein, 11 aa, Homo sapiens
  misc_feature: Table A; Target 54527; HLA-A*30:02; OBP2B; ENSG00000171102; TAA
KTEEPGKYSAY

SEQ ID NO: 54528 - protein, 11 aa, Homo sapiens
  misc_feature: Table A; Target 54528; HLA-A*32:01; OBP2B; ENSG00000171102; TAA
KTEEPGKYSAY

SEQ ID NO: 54529 - protein, 11 aa, Homo sapiens
  misc_feature: Table A; Target 54529; HLA-C*01:02; OBP2B; ENSG00000171102; TAA
KTEEPGKYSAY

SEQ ID NO: 54530 - protein, 11 aa, Homo sapiens
  misc_feature: Table A; Target 54530; HLA-C*12:03; OBP2B; ENSG00000171102; TAA
KTEEPGKYSAY

SEQ ID NO: 54531 - protein, 11 aa, Homo sapiens
  misc_feature: Table A; Target 54531; HLA-C*16:01; OBP2B; ENSG00000171102; TAA
KTEEPGKYSAY

SEQ ID NO: 54532 - protein, 11 aa, Homo sapiens
  misc_feature: Table A; Target 54532; HLA-C*16:02; OBP2B; ENSG00000171102; TAA
KTEEPGKYSAY

SEQ ID NO: 54533 - protein, 9 aa, Homo sapiens
  misc_feature: Table A; Target 54533; HLA-A*02:04; OBP2B; ENSG00000171102; TAA
KTLFLGVTL

SEQ ID NO: 54534 - protein, 9 aa, Homo sapiens
  misc_feature: Table A; Target 54534; HLA-A*31:01; OBP2B; ENSG00000171102; TAA
KTLFLGVTL

SEQ ID NO: 54535 - protein, 9 aa, Homo sapiens
  misc_feature: Table A; Target 54535; HLA-B*57:01; OBP2B; ENSG00000171102; TAA
KTLFLGVTL

SEQ ID NO: 54536 - protein, 9 aa, Homo sapiens
  misc_feature: Table A; Target 54536; HLA-B*58:01; OBP2B; ENSG00000171102; TAA
KTLFLGVTL

SEQ ID NO: 54537 - protein, 9 aa, Homo sapiens
  misc_feature: Table A; Target 54537; HLA-C*03:04; OBP2B; ENSG00000171102; TAA
KTLFLGVTL

SEQ ID NO: 54538 - protein, 9 aa, Homo sapiens
  misc_feature: Table A; Target 54538; HLA-A*32:01; OBP2B; ENSG00000171102; TAA
KVSPVKVTA

SEQ ID NO: 54539 - protein, 9 aa, Homo sapiens
  misc_feature: Table A; Target 54539; HLA-B*37:01; OBP2B; ENSG00000171102; TAA
KVSPVKVTA

SEQ ID NO: 54540 - protein, 9 aa, Homo sapiens
  misc_feature: Table A; Target 54540; HLA-B*55:01; OBP2B; ENSG00000171102; TAA
KVSPVKVTA

SEQ ID NO: 54541 - protein, 9 aa, Homo sapiens
  misc_feature: Table A; Target 54541; HLA-B*56:01; OBP2B; ENSG00000171102; TAA
KVSPVKVTA

SEQ ID NO: 54542 - protein, 9 aa, Homo sapiens
  misc_feature: Table A; Target 54542; HLA-B*58:01; OBP2B; ENSG00000171102; TAA
KVSPVKVTA

SEQ ID NO: 54543 - protein, 9 aa, Homo sapiens
  misc_feature: Table A; Target 54543; HLA-C*16:01; OBP2B; ENSG00000171102; TAA
KVSPVKVTA

SEQ ID NO: 54544 - protein, 10 aa, Homo sapiens
  misc_feature: Table A; Target 54544; HLA-A*02:03; OBP2B; ENSG00000171102; TAA
KVSPVKVTAL

SEQ ID NO: 54545 - protein, 10 aa, Homo sapiens
  misc_feature: Table A; Target 54545; HLA-A*02:04; OBP2B; ENSG00000171102; TAA
KVSPVKVTAL

SEQ ID NO: 54546 - protein, 10 aa, Homo sapiens
  misc_feature: Table A; Target 54546; HLA-A*03:01; OBP2B; ENSG00000171102; TAA
KVSPVKVTAL

SEQ ID NO: 54547 - protein, 10 aa, Homo sapiens
  misc_feature: Table A; Target 54547; HLA-A*03:02; OBP2B; ENSG00000171102; TAA
KVSPVKVTAL

SEQ ID NO: 54548 - protein, 10 aa, Homo sapiens
  misc_feature: Table A; Target 54548; HLA-A*25:01; OBP2B; ENSG00000171102; TAA
KVSPVKVTAL

SEQ ID NO: 54549 - protein, 10 aa, Homo sapiens
  misc_feature: Table A; Target 54549; HLA-A*32:01; OBP2B; ENSG00000171102; TAA
KVSPVKVTAL

SEQ ID NO: 54550 - protein, 10 aa, Homo sapiens
  misc_feature: Table A; Target 54550; HLA-B*07:02; OBP2B; ENSG00000171102; TAA
KVSPVKVTAL

SEQ ID NO: 54551 - protein, 10 aa, Homo sapiens
  misc_feature: Table A; Target 54551; HLA-C*01:02; OBP2B; ENSG00000171102; TAA
KVSPVKVTAL

SEQ ID NO: 54552 - protein, 9 aa, Homo sapiens
  misc_feature: Table A; Target 54552; HLA-B*35:01; OBP2B; ENSG00000171102; TAA
LAAALSFTL

SEQ ID NO: 54553 - protein, 9 aa, Homo sapiens
  misc_feature: Table A; Target 54553; HLA-B*35:03; OBP2B; ENSG00000171102; TAA
LAAALSFTL

SEQ ID NO: 54554 - protein, 9 aa, Homo sapiens
  misc_feature: Table A; Target 54554; HLA-B*58:01; OBP2B; ENSG00000171102; TAA
LAAALSFTL

SEQ ID NO: 54555 - protein, 9 aa, Homo sapiens
  misc_feature: Table A; Target 54555; HLA-C*02:02; OBP2B; ENSG00000171102; TAA
LAAALSFTL

SEQ ID NO: 54556 - protein, 9 aa, Homo sapiens
  misc_feature: Table A; Target 54556; HLA-C*03:03; OBP2B; ENSG00000171102; TAA
LAAALSFTL

SEQ ID NO: 54557 - protein, 9 aa, Homo sapiens
  misc_feature: Table A; Target 54557; HLA-C*03:04; OBP2B; ENSG00000171102; TAA
LAAALSFTL

SEQ ID NO: 54558 - protein, 9 aa, Homo sapiens
  misc_feature: Table A; Target 54558; HLA-C*12:03; OBP2B; ENSG00000171102; TAA
LAAALSFTL

SEQ ID NO: 54559 - protein, 9 aa, Homo sapiens
  misc_feature: Table A; Target 54559; HLA-C*16:04; OBP2B; ENSG00000171102; TAA
LAAALSFTL

SEQ ID NO: 54560 - protein, 8 aa, Homo sapiens
  misc_feature: Table A; Target 54560; HLA-B*18:01; OBP2B; ENSG00000171102; TAA
LEATFTFM

SEQ ID NO: 54561 - protein, 8 aa, Homo sapiens
  misc_feature: Table A; Target 54561; HLA-B*49:01; OBP2B; ENSG00000171102; TAA
LEATFTFM

SEQ ID NO: 54562 - protein, 10 aa, Homo sapiens
  misc_feature: Table A; Target 54562; HLA-B*44:02; OBP2B; ENSG00000171102; TAA
LEEEDITGTW

SEQ ID NO: 54563 - protein, 10 aa, Homo sapiens
  misc_feature: Table A; Target 54563; HLA-B*44:03; OBP2B; ENSG00000171102; TAA
LEEEDITGTW

SEQ ID NO: 54564 - protein, 9 aa, Homo sapiens
  misc_feature: Table A; Target 54564; HLA-A*23:01; OBP2B; ENSG00000171102; TAA
LFLGVTLGL

SEQ ID NO: 54565 - protein, 9 aa, Homo sapiens
  misc_feature: Table A; Target 54565; HLA-B*54:01; OBP2B; ENSG00000171102; TAA
LGVTLGLAA

SEQ ID NO: 54566 - protein, 9 aa, Homo sapiens
  misc_feature: Table A; Target 54566; HLA-A*31:01; OBP2B; ENSG00000171102; TAA
LHMGKLVGR

SEQ ID NO: 54567 - protein, 9 aa, Homo sapiens
  misc_feature: Table A; Target 54567; HLA-A*01:01; OBP2B; ENSG00000171102; TAA
NSDTNREAL

SEQ ID NO: 54568 - protein, 9 aa, Homo sapiens
  misc_feature: Table A; Target 54568; HLA-B*35:03; OBP2B; ENSG00000171102; TAA
NSDTNREAL

SEQ ID NO: 54569 - protein, 9 aa, Homo sapiens
  misc_feature: Table A; Target 54569; HLA-C*01:02; OBP2B; ENSG00000171102; TAA
NSDTNREAL

SEQ ID NO: 54570 - protein, 9 aa, Homo sapiens
  misc_feature: Table A; Target 54570; HLA-C*03:03; OBP2B; ENSG00000171102; TAA
NSDTNREAL

SEQ ID NO: 54571 - protein, 9 aa, Homo sapiens
  misc_feature: Table A; Target 54571; HLA-C*03:04; OBP2B; ENSG00000171102; TAA
NSDTNREAL

SEQ ID NO: 54572 - protein, 9 aa, Homo sapiens
  misc_feature: Table A; Target 54572; HLA-C*05:01; OBP2B; ENSG00000171102; TAA
NSDTNREAL

SEQ ID NO: 54573 - protein, 9 aa, Homo sapiens
  misc_feature: Table A; Target 54573; HLA-C*16:01; OBP2B; ENSG00000171102; TAA
NSDTNREAL

SEQ ID NO: 54574 - protein, 9 aa, Homo sapiens
  misc_feature: Table A; Target 54574; HLA-B*44:02; OBP2B; ENSG00000171102; TAA
QELPRRDHY

SEQ ID NO: 54575 - protein, 9 aa, Homo sapiens
  misc_feature: Table A; Target 54575; HLA-B*44:03; OBP2B; ENSG00000171102; TAA
QELPRRDHY

SEQ ID NO: 54576 - protein, 9 aa, Homo sapiens
  misc_feature: Table A; Target 54576; HLA-B*38:01; OBP2B; ENSG00000171102; TAA
QHHGGLLHM

SEQ ID NO: 54577 - protein, 9 aa, Homo sapiens
  misc_feature: Table A; Target 54577; HLA-C*07:01; OBP2B; ENSG00000171102; TAA
QHHGGLLHM

SEQ ID NO: 54578 - protein, 9 aa, Homo sapiens
  misc_feature: Table A; Target 54578; HLA-C*07:01; OBP2B; ENSG00000171102; TAA
QTGSCVPEH

SEQ ID NO: 54579 - protein, 10 aa, Homo sapiens
  misc_feature: Table A; Target 54579; HLA-B*44:02; OBP2B; ENSG00000171102; TAA
REALEEFKKL

SEQ ID NO: 54580 - protein, 10 aa, Homo sapiens
  misc_feature: Table A; Target 54580; HLA-B*44:03; OBP2B; ENSG00000171102; TAA
REALEEFKKL

SEQ ID NO: 54581 - protein, 9 aa, Homo sapiens
  misc_feature: Table A; Target 54581; HLA-B*15:03; OBP2B; ENSG00000171102; TAA
RKTEEPGKY

SEQ ID NO: 54582 - protein, 10 aa, Homo sapiens
  misc_feature: Table A; Target 54582; HLA-B*07:02; OBP2B; ENSG00000171102; TAA
RPRKVSPVKV

SEQ ID NO: 54583 - protein, 8 aa, Homo sapiens
  misc_feature: Table A; Target 54583; HLA-C*03:03; OBP2B; ENSG00000171102; TAA
SAYGGRKL

SEQ ID NO: 54584 - protein, 8 aa, Homo sapiens
  misc_feature: Table A; Target 54584; HLA-C*03:04; OBP2B; ENSG00000171102; TAA
SAYGGRKL

SEQ ID NO: 54585 - protein, 8 aa, Homo sapiens
  misc_feature: Table A; Target 54585; HLA-C*16:01; OBP2B; ENSG00000171102; TAA
SAYGGRKL

SEQ ID NO: 54586 - protein, 9 aa, Homo sapiens
  misc_feature: Table A; Target 54586; HLA-C*02:02; OBP2B; ENSG00000171102; TAA
SAYGGRKLM

SEQ ID NO: 54587 - protein, 9 aa, Homo sapiens
  misc_feature: Table A; Target 54587; HLA-C*12:03; OBP2B; ENSG00000171102; TAA
SAYGGRKLM

SEQ ID NO: 54588 - protein, 9 aa, Homo sapiens
  misc_feature: Table A; Target 54588; HLA-C*16:01; OBP2B; ENSG00000171102; TAA
SAYGGRKLM

SEQ ID NO: 54589 - protein, 9 aa, Homo sapiens
  misc_feature: Table A; Target 54589; HLA-C*16:02; OBP2B; ENSG00000171102; TAA
SAYGGRKLM

SEQ ID NO: 54590 - protein, 10 aa, Homo sapiens
  misc_feature: Table A; Target 54590; HLA-A*03:01; OBP2B; ENSG00000171102; TAA
SAYGGRKLMY

SEQ ID NO: 54591 - protein, 10 aa, Homo sapiens
  misc_feature: Table A; Target 54591; HLA-A*29:02; OBP2B; ENSG00000171102; TAA
SAYGGRKLMY

SEQ ID NO: 54592 - protein, 10 aa, Homo sapiens
  misc_feature: Table A; Target 54592; HLA-C*02:02; OBP2B; ENSG00000171102; TAA
SAYGGRKLMY

SEQ ID NO: 54593 - protein, 8 aa, Homo sapiens
  misc_feature: Table A; Target 54593; HLA-B*37:01; OBP2B; ENSG00000171102; TAA
SDTNREAL

SEQ ID NO: 54594 - protein, 8 aa, Homo sapiens
  misc_feature: Table A; Target 54594; HLA-C*16:01; OBP2B; ENSG00000171102; TAA
SDTNREAL

SEQ ID NO: 54595 - protein, 9 aa, Homo sapiens
  misc_feature: Table A; Target 54595; HLA-A*30:01; OBP2B; ENSG00000171102; TAA
SEEDIFTPL

SEQ ID NO: 54596 - protein, 9 aa, Homo sapiens
  misc_feature: Table A; Target 54596; HLA-B*18:01; OBP2B; ENSG00000171102; TAA
SEEDIFTPL

SEQ ID NO: 54597 - protein, 9 aa, Homo sapiens
  misc_feature: Table A; Target 54597; HLA-B*37:01; OBP2B; ENSG00000171102; TAA
SEEDIFTPL

SEQ ID NO: 54598 - protein, 9 aa, Homo sapiens
  misc_feature: Table A; Target 54598; HLA-B*40:01; OBP2B; ENSG00000171102; TAA
SEEDIFTPL

SEQ ID NO: 54599 - protein, 9 aa, Homo sapiens
  misc_feature: Table A; Target 54599; HLA-B*40:02; OBP2B; ENSG00000171102; TAA
SEEDIFTPL

SEQ ID NO: 54600 - protein, 9 aa, Homo sapiens
  misc_feature: Table A; Target 54600; HLA-B*44:02; OBP2B; ENSG00000171102; TAA
SEEDIFTPL

SEQ ID NO: 54601 - protein, 9 aa, Homo sapiens
  misc_feature: Table A; Target 54601; HLA-B*44:03; OBP2B; ENSG00000171102; TAA
SEEDIFTPL

SEQ ID NO: 54602 - protein, 9 aa, Homo sapiens
  misc_feature: Table A; Target 54602; HLA-B*49:01; OBP2B; ENSG00000171102; TAA
SEEDIFTPL

SEQ ID NO: 54603 - protein, 8 aa, Homo sapiens
  misc_feature: Table A; Target 54603; HLA-B*07:02; OBP2B; ENSG00000171102; TAA
SPVKVTAL

SEQ ID NO: 54604 - protein, 8 aa, Homo sapiens
  misc_feature: Table A; Target 54604; HLA-B*08:01; OBP2B; ENSG00000171102; TAA
SPVKVTAL

SEQ ID NO: 54605 - protein, 8 aa, Homo sapiens
  misc_feature: Table A; Target 54605; HLA-B*35:01; OBP2B; ENSG00000171102; TAA
SPVKVTAL

SEQ ID NO: 54606 - protein, 8 aa, Homo sapiens
  misc_feature: Table A; Target 54606; HLA-B*35:03; OBP2B; ENSG00000171102; TAA
SPVKVTAL

SEQ ID NO: 54607 - protein, 8 aa, Homo sapiens
  misc_feature: Table A; Target 54607; HLA-B*51:01; OBP2B; ENSG00000171102; TAA
SPVKVTAL

SEQ ID NO: 54608 - protein, 8 aa, Homo sapiens
  misc_feature: Table A; Target 54608; HLA-B*55:01; OBP2B; ENSG00000171102; TAA
SPVKVTAL

SEQ ID NO: 54609 - protein, 8 aa, Homo sapiens
  misc_feature: Table A; Target 54609; HLA-B*56:01; OBP2B; ENSG00000171102; TAA
SPVKVTAL

SEQ ID NO: 54610 - protein, 8 aa, Homo sapiens
  misc_feature: Table A; Target 54610; HLA-C*03:04; OBP2B; ENSG00000171102; TAA
SPVKVTAL

SEQ ID NO: 54611 - protein, 8 aa, Homo sapiens
  misc_feature: Table A; Target 54611; HLA-C*07:02; OBP2B; ENSG00000171102; TAA
SPVKVTAL

SEQ ID NO: 54612 - protein, 8 aa, Homo sapiens
  misc_feature: Table A; Target 54612; HLA-C*03:04; OBP2B; ENSG00000171102; TAA
TALGGGKL

SEQ ID NO: 54613 - protein, 10 aa, Homo sapiens
  misc_feature: Table A; Target 54613; HLA-B*54:01; OBP2B; ENSG00000171102; TAA
TALGGGKLEA

SEQ ID NO: 54614 - protein, 10 aa, Homo sapiens
  misc_feature: Table A; Target 54614; HLA-B*56:01; OBP2B; ENSG00000171102; TAA
TALGGGKLEA

SEQ ID NO: 54615 - protein, 9 aa, Homo sapiens
  misc_feature: Table A; Target 54615; HLA-A*30:01; OBP2B; ENSG00000171102; TAA
TEEPGKYSA

SEQ ID NO: 54616 - protein, 9 aa, Homo sapiens
  misc_feature: Table A; Target 54616; HLA-B*18:01; OBP2B; ENSG00000171102; TAA
TEEPGKYSA

SEQ ID NO: 54617 - protein, 9 aa, Homo sapiens
  misc_feature: Table A; Target 54617; HLA-B*37:01; OBP2B; ENSG00000171102; TAA
TEEPGKYSA

SEQ ID NO: 54618 - protein, 9 aa, Homo sapiens
  misc_feature: Table A; Target 54618; HLA-B*40:01; OBP2B; ENSG00000171102; TAA
TEEPGKYSA

SEQ ID NO: 54619 - protein, 9 aa, Homo sapiens
  misc_feature: Table A; Target 54619; HLA-B*40:02; OBP2B; ENSG00000171102; TAA
TEEPGKYSA

SEQ ID NO: 54620 - protein, 9 aa, Homo sapiens
  misc_feature: Table A; Target 54620; HLA-B*44:02; OBP2B; ENSG00000171102; TAA
TEEPGKYSA

SEQ ID NO: 54621 - protein, 9 aa, Homo sapiens
  misc_feature: Table A; Target 54621; HLA-B*44:03; OBP2B; ENSG00000171102; TAA
TEEPGKYSA

SEQ ID NO: 54622 - protein, 9 aa, Homo sapiens
  misc_feature: Table A; Target 54622; HLA-B*49:01; OBP2B; ENSG00000171102; TAA
TEEPGKYSA

SEQ ID NO: 54623 - protein, 10 aa, Homo sapiens
  misc_feature: Table A; Target 54623; HLA-A*01:01; OBP2B; ENSG00000171102; TAA
TEEPGKYSAY

SEQ ID NO: 54624 - protein, 10 aa, Homo sapiens
  misc_feature: Table A; Target 54624; HLA-A*25:01; OBP2B; ENSG00000171102; TAA
TEEPGKYSAY

SEQ ID NO: 54625 - protein, 10 aa, Homo sapiens
  misc_feature: Table A; Target 54625; HLA-A*30:02; OBP2B; ENSG00000171102; TAA
TEEPGKYSAY

SEQ ID NO: 54626 - protein, 10 aa, Homo sapiens
  misc_feature: Table A; Target 54626; HLA-B*18:01; OBP2B; ENSG00000171102; TAA
TEEPGKYSAY

SEQ ID NO: 54627 - protein, 10 aa, Homo sapiens
  misc_feature: Table A; Target 54627; HLA-B*27:02; OBP2B; ENSG00000171102; TAA
TEEPGKYSAY

SEQ ID NO: 54628 - protein, 10 aa, Homo sapiens
  misc_feature: Table A; Target 54628; HLA-B*40:01; OBP2B; ENSG00000171102; TAA
TEEPGKYSAY

SEQ ID NO: 54629 - protein, 10 aa, Homo sapiens
  misc_feature: Table A; Target 54629; HLA-B*44:02; OBP2B; ENSG00000171102; TAA
TEEPGKYSAY

SEQ ID NO: 54630 - protein, 10 aa, Homo sapiens
  misc_feature: Table A; Target 54630; HLA-B*44:03; OBP2B; ENSG00000171102; TAA
TEEPGKYSAY

SEQ ID NO: 54631 - protein, 10 aa, Homo sapiens
  misc_feature: Table A; Target 54631; HLA-C*02:02; OBP2B; ENSG00000171102; TAA
TEEPGKYSAY

SEQ ID NO: 54632 - protein, 10 aa, Homo sapiens
  misc_feature: Table A; Target 54632; HLA-C*07:04; OBP2B; ENSG00000171102; TAA
TEEPGKYSAY

SEQ ID NO: 54633 - protein, 10 aa, Homo sapiens
  misc_feature: Table A; Target 54633; HLA-C*16:04; OBP2B; ENSG00000171102; TAA
TEEPGKYSAY

SEQ ID NO: 54634 - protein, 8 aa, Homo sapiens
  misc_feature: Table A; Target 54634; HLA-C*01:02; OBP2B; ENSG00000171102; TAA
TLFLGVTL

SEQ ID NO: 54635 - protein, 8 aa, Homo sapiens
  misc_feature: Table A; Target 54635; HLA-C*07:04; OBP2B; ENSG00000171102; TAA
TLFLGVTL

SEQ ID NO: 54636 - protein, 10 aa, Homo sapiens
  misc_feature: Table A; Target 54636; HLA-A*02:01; OBP2B; ENSG00000171102; TAA
TLFLGVTLGL

SEQ ID NO: 54637 - protein, 10 aa, Homo sapiens
  misc_feature: Table A; Target 54637; HLA-A*02:03; OBP2B; ENSG00000171102; TAA
TLFLGVTLGL

SEQ ID NO: 54638 - protein, 10 aa, Homo sapiens
  misc_feature: Table A; Target 54638; HLA-A*02:04; OBP2B; ENSG00000171102; TAA
TLFLGVTLGL

SEQ ID NO: 54639 - protein, 11 aa, Homo sapiens
  misc_feature: Table A; Target 54639; HLA-A*02:03; OBP2B; ENSG00000171102; TAA
TLFLGVTLGLA

SEQ ID NO: 54640 - protein, 8 aa, Homo sapiens
  misc_feature: Table A; Target 54640; HLA-B*08:01; OBP2B; ENSG00000171102; TAA
TLGLAAAL

SEQ ID NO: 54641 - protein, 9 aa, Homo sapiens
  misc_feature: Table A; Target 54641; HLA-A*33:01; OBP2B; ENSG00000171102; TAA
TNREALEEF

SEQ ID NO: 54642 - protein, 9 aa, Homo sapiens
  misc_feature: Table A; Target 54642; HLA-B*46:01; OBP2B; ENSG00000171102; TAA
TNREALEEF

SEQ ID NO: 54643 - protein, 9 aa, Homo sapiens
  misc_feature: Table A; Target 54643; HLA-B*07:02; OBP2B; ENSG00000171102; TAA
TPLQTGSCV

SEQ ID NO: 54644 - protein, 9 aa, Homo sapiens
  misc_feature: Table A; Target 54644; HLA-B*51:01; OBP2B; ENSG00000171102; TAA
TPLQTGSCV

SEQ ID NO: 54645 - protein, 9 aa, Homo sapiens
  misc_feature: Table A; Target 54645; HLA-B*56:01; OBP2B; ENSG00000171102; TAA
TPLQTGSCV

SEQ ID NO: 54646 - protein, 9 aa, Homo sapiens
  misc_feature: Table A; Target 54646; HLA-A*31:01; OBP2B; ENSG00000171102; TAA
VDKDFPEDR

SEQ ID NO: 54647 - protein, 9 aa, Homo sapiens
  misc_feature: Table A; Target 54647; HLA-A*33:01; OBP2B; ENSG00000171102; TAA
VDKDFPEDR

SEQ ID NO: 54648 - protein, 9 aa, Homo sapiens
  misc_feature: Table A; Target 54648; HLA-C*07:06; OBP2B; ENSG00000171102; TAA
VGRNSDTNR

SEQ ID NO: 54649 - protein, 9 aa, Homo sapiens
  misc_feature: Table A; Target 54649; HLA-A*02:07; OBP2B; ENSG00000171102; TAA
VSPVKVTAL

SEQ ID NO: 54650 - protein, 9 aa, Homo sapiens
  misc_feature: Table A; Target 54650; HLA-A*24:02; OBP2B; ENSG00000171102; TAA
VSPVKVTAL

SEQ ID NO: 54651 - protein, 9 aa, Homo sapiens
  misc_feature: Table A; Target 54651; HLA-B*08:01; OBP2B; ENSG00000171102; TAA
VSPVKVTAL

SEQ ID NO: 54652 - protein, 9 aa, Homo sapiens
  misc_feature: Table A; Target 54652; HLA-B*46:01; OBP2B; ENSG00000171102; TAA
VSPVKVTAL

SEQ ID NO: 54653 - protein, 9 aa, Homo sapiens
  misc_feature: Table A; Target 54653; HLA-C*01:02; OBP2B; ENSG00000171102; TAA
VSPVKVTAL

SEQ ID NO: 54654 - protein, 9 aa, Homo sapiens
  misc_feature: Table A; Target 54654; HLA-C*14:02; OBP2B; ENSG00000171102; TAA
VSPVKVTAL

SEQ ID NO: 54655 - protein, 9 aa, Homo sapiens
  misc_feature: Table A; Target 54655; HLA-C*03:04; OBP2B; ENSG00000171102; TAA
VTALGGGKL

SEQ ID NO: 54656 - protein, 9 aa, Homo sapiens
  misc_feature: Table A; Target 54656; HLA-A*23:01; OBP2B; ENSG00000171102; TAA
VTLGLAAAL

SEQ ID NO: 54657 - protein, 9 aa, Homo sapiens
  misc_feature: Table A; Target 54657; HLA-C*01:02; OBP2B; ENSG00000171102; TAA
VTLGLAAAL

SEQ ID NO: 54658 - protein, 9 aa, Homo sapiens
  misc_feature: Table A; Target 54658; HLA-C*03:03; OBP2B; ENSG00000171102; TAA
VTLGLAAAL

SEQ ID NO: 54659 - protein, 9 aa, Homo sapiens
  misc_feature: Table A; Target 54659; HLA-C*03:04; OBP2B; ENSG00000171102; TAA
VTLGLAAAL

SEQ ID NO: 54660 - protein, 9 aa, Homo sapiens
  misc_feature: Table A; Target 54660; HLA-C*14:02; OBP2B; ENSG00000171102; TAA
VTLGLAAAL

SEQ ID NO: 54661 - protein, 11 aa, Homo sapiens
  misc_feature: Table A; Target 54661; HLA-A*23:01; OBP2B; ENSG00000171102; TAA
VTLGLAAALSF

SEQ ID NO: 54662 - protein, 8 aa, Homo sapiens
  misc_feature: Table A; Target 54662; HLA-C*07:01; OBP2B; ENSG00000171102; TAA
YGGRKLMY

SEQ ID NO: 54663 - protein, 9 aa, Homo sapiens
  misc_feature: Table A; Target 54663; HLA-C*03:03; OBP2B; ENSG00000171102; TAA
YSAYGGRKL

SEQ ID NO: 54664 - protein, 9 aa, Homo sapiens
  misc_feature: Table A; Target 54664; HLA-C*03:04; OBP2B; ENSG00000171102; TAA
YSAYGGRKL

SEQ ID NO: 54665 - protein, 11 aa, Homo sapiens
  misc_feature: Table A; Target 54665; HLA-A*01:01; OBP2B; ENSG00000171102; TAA
YSAYGGRKLMY

SEQ ID NO: 54666 - protein, 9 aa, Homo sapiens
  misc_feature: Table A; Target 54666; HLA-A*02:01; ONECUT3; ENSG00000205922; TAA
AAAAAVAGA

SEQ ID NO: 54667 - protein, 9 aa, Homo sapiens
  misc_feature: Table A; Target 54667; HLA-A*02:03; ONECUT3; ENSG00000205922; TAA
AAAAAVAGA

SEQ ID NO: 54668 - protein, 9 aa, Homo sapiens
  misc_feature: Table A; Target 54668; HLA-B*56:01; ONECUT3; ENSG00000205922; TAA
AAAAAVAGA

SEQ ID NO: 54669 - protein, 9 aa, Homo sapiens
  misc_feature: Table A; Target 54669; HLA-A*30:02; ONECUT3; ENSG00000205922; TAA
AAAAVAGAH

SEQ ID NO: 54670 - protein, 9 aa, Homo sapiens
  misc_feature: Table A; Target 54670; HLA-B*46:01; ONECUT3; ENSG00000205922; TAA
AAAAVAGAH

SEQ ID NO: 54671 - protein, 9 aa, Homo sapiens
  misc_feature: Table A; Target 54671; HLA-C*02:02; ONECUT3; ENSG00000205922; TAA
AAAAVAGAH

SEQ ID NO: 54672 - protein, 9 aa, Homo sapiens
  misc_feature: Table A; Target 54672; HLA-C*07:06; ONECUT3; ENSG00000205922; TAA
AAAAVAGAH

SEQ ID NO: 54673 - protein, 9 aa, Homo sapiens
  misc_feature: Table A; Target 54673; HLA-C*16:04; ONECUT3; ENSG00000205922; TAA
AAAAVAGAH

SEQ ID NO: 54674 - protein, 9 aa, Homo sapiens
  misc_feature: Table A; Target 54674; HLA-A*03:02; ONECUT3; ENSG00000205922; TAA
AAAEEINTK

SEQ ID NO: 54675 - protein, 9 aa, Homo sapiens
  misc_feature: Table A; Target 54675; HLA-A*11:01; ONECUT3; ENSG00000205922; TAA
AAAEEINTK

SEQ ID NO: 54676 - protein, 9 aa, Homo sapiens
  misc_feature: Table A; Target 54676; HLA-C*05:01; ONECUT3; ENSG00000205922; TAA
AAAEEINTK

SEQ ID NO: 54677 - protein, 9 aa, Homo sapiens
  misc_feature: Table A; Target 54677; HLA-C*07:06; ONECUT3; ENSG00000205922; TAA
AAAEEINTK

SEQ ID NO: 54678 - protein, 11 aa, Homo sapiens
  misc_feature: Table A; Target 54678; HLA-C*16:02; ONECUT3; ENSG00000205922; TAA
AAAEEINTKEV

SEQ ID NO: 54679 - protein, 8 aa, Homo sapiens
  misc_feature: Table A; Target 54679; HLA-C*16:01; ONECUT3; ENSG00000205922; TAA
AAAQHRGL

SEQ ID NO: 54680 - protein, 10 aa, Homo sapiens
  misc_feature: Table A; Target 54680; HLA-C*16:01; ONECUT3; ENSG00000205922; TAA
AAAQHRGLVA

SEQ ID NO: 54681 - protein, 10 aa, Homo sapiens
  misc_feature: Table A; Target 54681; HLA-C*16:02; ONECUT3; ENSG00000205922; TAA
AAEEINTKEV

SEQ ID NO: 54682 - protein, 8 aa, Homo sapiens
  misc_feature: Table A; Target 54682; HLA-B*54:01; ONECUT3; ENSG00000205922; TAA
AAFEPHAA

SEQ ID NO: 54683 - protein, 8 aa, Homo sapiens
  misc_feature: Table A; Target 54683; HLA-B*56:01; ONECUT3; ENSG00000205922; TAA
AAFEPHAA

SEQ ID NO: 54684 - protein, 9 aa, Homo sapiens
  misc_feature: Table A; Target 54684; HLA-B*07:02; ONECUT3; ENSG00000205922; TAA
AAFEPHAAL

SEQ ID NO: 54685 - protein, 9 aa, Homo sapiens
  misc_feature: Table A; Target 54685; HLA-B*08:01; ONECUT3; ENSG00000205922; TAA
AAFEPHAAL

SEQ ID NO: 54686 - protein, 9 aa, Homo sapiens
  misc_feature: Table A; Target 54686; HLA-B*15:03; ONECUT3; ENSG00000205922; TAA
AAFEPHAAL

SEQ ID NO: 54687 - protein, 9 aa, Homo sapiens
  misc_feature: Table A; Target 54687; HLA-B*35:03; ONECUT3; ENSG00000205922; TAA
AAFEPHAAL

SEQ ID NO: 54688 - protein, 9 aa, Homo sapiens
  misc_feature: Table A; Target 54688; HLA-B*37:01; ONECUT3; ENSG00000205922; TAA
AAFEPHAAL

SEQ ID NO: 54689 - protein, 9 aa, Homo sapiens
  misc_feature: Table A; Target 54689; HLA-B*40:01; ONECUT3; ENSG00000205922; TAA
AAFEPHAAL

SEQ ID NO: 54690 - protein, 9 aa, Homo sapiens
  misc_feature: Table A; Target 54690; HLA-B*46:01; ONECUT3; ENSG00000205922; TAA
AAFEPHAAL

SEQ ID NO: 54691 - protein, 9 aa, Homo sapiens
  misc_feature: Table A; Target 54691; HLA-B*56:01; ONECUT3; ENSG00000205922; TAA
AAFEPHAAL

SEQ ID NO: 54692 - protein, 9 aa, Homo sapiens
  misc_feature: Table A; Target 54692; HLA-C*01:02; ONECUT3; ENSG00000205922; TAA
AAFEPHAAL

SEQ ID NO: 54693 - protein, 9 aa, Homo sapiens
  misc_feature: Table A; Target 54693; HLA-C*02:02; ONECUT3; ENSG00000205922; TAA
AAFEPHAAL

SEQ ID NO: 54694 - protein, 9 aa, Homo sapiens
  misc_feature: Table A; Target 54694; HLA-C*03:03; ONECUT3; ENSG00000205922; TAA
AAFEPHAAL

SEQ ID NO: 54695 - protein, 9 aa, Homo sapiens
  misc_feature: Table A; Target 54695; HLA-C*03:04; ONECUT3; ENSG00000205922; TAA
AAFEPHAAL

SEQ ID NO: 54696 - protein, 9 aa, Homo sapiens
  misc_feature: Table A; Target 54696; HLA-C*05:01; ONECUT3; ENSG00000205922; TAA
AAFEPHAAL

SEQ ID NO: 54697 - protein, 9 aa, Homo sapiens
  misc_feature: Table A; Target 54697; HLA-C*07:02; ONECUT3; ENSG00000205922; TAA
AAFEPHAAL

SEQ ID NO: 54698 - protein, 9 aa, Homo sapiens
  misc_feature: Table A; Target 54698; HLA-C*12:03; ONECUT3; ENSG00000205922; TAA
AAFEPHAAL

SEQ ID NO: 54699 - protein, 9 aa, Homo sapiens
  misc_feature: Table A; Target 54699; HLA-C*14:02; ONECUT3; ENSG00000205922; TAA
AAFEPHAAL

SEQ ID NO: 54700 - protein, 9 aa, Homo sapiens
  misc_feature: Table A; Target 54700; HLA-C*16:01; ONECUT3; ENSG00000205922; TAA
AAFEPHAAL

SEQ ID NO: 54701 - protein, 9 aa, Homo sapiens
  misc_feature: Table A; Target 54701; HLA-C*16:04; ONECUT3; ENSG00000205922; TAA
AAFEPHAAL

SEQ ID NO: 54702 - protein, 10 aa, Homo sapiens
  misc_feature: Table A; Target 54702; HLA-C*02:02; ONECUT3; ENSG00000205922; TAA
AAFEPHAALL

SEQ ID NO: 54703 - protein, 9 aa, Homo sapiens
  misc_feature: Table A; Target 54703; HLA-C*03:03; ONECUT3; ENSG00000205922; TAA
AALASVGHL

SEQ ID NO: 54704 - protein, 9 aa, Homo sapiens
  misc_feature: Table A; Target 54704; HLA-C*03:04; ONECUT3; ENSG00000205922; TAA
AALASVGHL

SEQ ID NO: 54705 - protein, 10 aa, Homo sapiens
  misc_feature: Table A; Target 54705; HLA-A*01:01; ONECUT3; ENSG00000205922; TAA
AALASVGHLY

SEQ ID NO: 54706 - protein, 10 aa, Homo sapiens
  misc_feature: Table A; Target 54706; HLA-A*26:01; ONECUT3; ENSG00000205922; TAA
AALASVGHLY

SEQ ID NO: 54707 - protein, 10 aa, Homo sapiens
  misc_feature: Table A; Target 54707; HLA-A*29:02; ONECUT3; ENSG00000205922; TAA
AALASVGHLY

SEQ ID NO: 54708 - protein, 10 aa, Homo sapiens
  misc_feature: Table A; Target 54708; HLA-A*30:02; ONECUT3; ENSG00000205922; TAA
AALASVGHLY

SEQ ID NO: 54709 - protein, 10 aa, Homo sapiens
  misc_feature: Table A; Target 54709; HLA-B*15:03; ONECUT3; ENSG00000205922; TAA
AALASVGHLY

SEQ ID NO: 54710 - protein, 10 aa, Homo sapiens
  misc_feature: Table A; Target 54710; HLA-B*35:01; ONECUT3; ENSG00000205922; TAA
AALASVGHLY

SEQ ID NO: 54711 - protein, 10 aa, Homo sapiens
  misc_feature: Table A; Target 54711; HLA-B*44:02; ONECUT3; ENSG00000205922; TAA
AALASVGHLY

SEQ ID NO: 54712 - protein, 10 aa, Homo sapiens
  misc_feature: Table A; Target 54712; HLA-B*44:03; ONECUT3; ENSG00000205922; TAA
AALASVGHLY

SEQ ID NO: 54713 - protein, 10 aa, Homo sapiens
  misc_feature: Table A; Target 54713; HLA-C*02:02; ONECUT3; ENSG00000205922; TAA
AALASVGHLY

SEQ ID NO: 54714 - protein, 10 aa, Homo sapiens
  misc_feature: Table A; Target 54714; HLA-C*16:04; ONECUT3; ENSG00000205922; TAA
AALASVGHLY

SEQ ID NO: 54715 - protein, 9 aa, Homo sapiens
  misc_feature: Table A; Target 54715; HLA-C*04:01; ONECUT3; ENSG00000205922; TAA
AAPPPPPPP

SEQ ID NO: 54716 - protein, 9 aa, Homo sapiens
  misc_feature: Table A; Target 54716; HLA-C*06:02; ONECUT3; ENSG00000205922; TAA
AAPPPPPPP

SEQ ID NO: 54717 - protein, 9 aa, Homo sapiens
  misc_feature: Table A; Target 54717; HLA-C*12:03; ONECUT3; ENSG00000205922; TAA
AAPPPPPPP

SEQ ID NO: 54718 - protein, 9 aa, Homo sapiens
  misc_feature: Table A; Target 54718; HLA-B*54:01; ONECUT3; ENSG00000205922; TAA
AAQHRGLVA

SEQ ID NO: 54719 - protein, 9 aa, Homo sapiens
  misc_feature: Table A; Target 54719; HLA-C*03:04; ONECUT3; ENSG00000205922; TAA
AAQHRGLVA

SEQ ID NO: 54720 - protein, 9 aa, Homo sapiens
  misc_feature: Table A; Target 54720; HLA-C*16:01; ONECUT3; ENSG00000205922; TAA
AAQHRGLVA

SEQ ID NO: 54721 - protein, 8 aa, Homo sapiens
  misc_feature: Table A; Target 54721; HLA-C*03:04; ONECUT3; ENSG00000205922; TAA
AASVSGSF

SEQ ID NO: 54722 - protein, 8 aa, Homo sapiens
  misc_feature: Table A; Target 54722; HLA-C*05:01; ONECUT3; ENSG00000205922; TAA
AASVSGSF

SEQ ID NO: 54723 - protein, 8 aa, Homo sapiens
  misc_feature: Table A; Target 54723; HLA-C*16:01; ONECUT3; ENSG00000205922; TAA
AASVSGSF

SEQ ID NO: 54724 - protein, 9 aa, Homo sapiens
  misc_feature: Table A; Target 54724; HLA-C*02:02; ONECUT3; ENSG00000205922; TAA
AAYGPPGHL

SEQ ID NO: 54725 - protein, 9 aa, Homo sapiens
  misc_feature: Table A; Target 54725; HLA-C*03:03; ONECUT3; ENSG00000205922; TAA
AAYGPPGHL

SEQ ID NO: 54726 - protein, 9 aa, Homo sapiens
  misc_feature: Table A; Target 54726; HLA-C*03:04; ONECUT3; ENSG00000205922; TAA
AAYGPPGHL

SEQ ID NO: 54727 - protein, 9 aa, Homo sapiens
  misc_feature: Table A; Target 54727; HLA-C*05:01; ONECUT3; ENSG00000205922; TAA
AAYGPPGHL

SEQ ID NO: 54728 - protein, 9 aa, Homo sapiens
  misc_feature: Table A; Target 54728; HLA-C*12:03; ONECUT3; ENSG00000205922; TAA
AAYGPPGHL

SEQ ID NO: 54729 - protein, 10 aa, Homo sapiens
  misc_feature: Table A; Target 54729; HLA-B*56:01; ONECUT3; ENSG00000205922; TAA
AAYGPPGHLA

SEQ ID NO: 54730 - protein, 11 aa, Homo sapiens
  misc_feature: Table A; Target 54730; HLA-A*30:02; ONECUT3; ENSG00000205922; TAA
ACEAPGLGGTY

SEQ ID NO: 54731 - protein, 11 aa, Homo sapiens
  misc_feature: Table A; Target 54731; HLA-B*15:03; ONECUT3; ENSG00000205922; TAA
ACEAPGLGGTY

SEQ ID NO: 54732 - protein, 11 aa, Homo sapiens
  misc_feature: Table A; Target 54732; HLA-B*39:01; ONECUT3; ENSG00000205922; TAA
ACEAPGLGGTY

SEQ ID NO: 54733 - protein, 9 aa, Homo sapiens
  misc_feature: Table A; Target 54733; HLA-A*30:01; ONECUT3; ENSG00000205922; TAA
AEDALARGL

SEQ ID NO: 54734 - protein, 9 aa, Homo sapiens
  misc_feature: Table A; Target 54734; HLA-B*18:01; ONECUT3; ENSG00000205922; TAA
AEDALARGL

SEQ ID NO: 54735 - protein, 9 aa, Homo sapiens
  misc_feature: Table A; Target 54735; HLA-B*37:01; ONECUT3; ENSG00000205922; TAA
AEDALARGL

SEQ ID NO: 54736 - protein, 9 aa, Homo sapiens
  misc_feature: Table A; Target 54736; HLA-B*40:01; ONECUT3; ENSG00000205922; TAA
AEDALARGL

SEQ ID NO: 54737 - protein, 9 aa, Homo sapiens
  misc_feature: Table A; Target 54737; HLA-B*40:02; ONECUT3; ENSG00000205922; TAA
AEDALARGL

SEQ ID NO: 54738 - protein, 9 aa, Homo sapiens
  misc_feature: Table A; Target 54738; HLA-B*44:02; ONECUT3; ENSG00000205922; TAA
AEDALARGL

SEQ ID NO: 54739 - protein, 9 aa, Homo sapiens
  misc_feature: Table A; Target 54739; HLA-B*44:03; ONECUT3; ENSG00000205922; TAA
AEDALARGL

SEQ ID NO: 54740 - protein, 9 aa, Homo sapiens
  misc_feature: Table A; Target 54740; HLA-B*49:01; ONECUT3; ENSG00000205922; TAA
AEDALARGL

SEQ ID NO: 54741 - protein, 9 aa, Homo sapiens
  misc_feature: Table A; Target 54741; HLA-C*16:04; ONECUT3; ENSG00000205922; TAA
AEDALARGL

SEQ ID NO: 54742 - protein, 9 aa, Homo sapiens
  misc_feature: Table A; Target 54742; HLA-A*30:01; ONECUT3; ENSG00000205922; TAA
AEEINTKEV

SEQ ID NO: 54743 - protein, 9 aa, Homo sapiens
  misc_feature: Table A; Target 54743; HLA-B*40:01; ONECUT3; ENSG00000205922; TAA
AEEINTKEV

SEQ ID NO: 54744 - protein, 9 aa, Homo sapiens
  misc_feature: Table A; Target 54744; HLA-B*44:02; ONECUT3; ENSG00000205922; TAA
AEEINTKEV

SEQ ID NO: 54745 - protein, 9 aa, Homo sapiens
  misc_feature: Table A; Target 54745; HLA-B*44:03; ONECUT3; ENSG00000205922; TAA
AEEINTKEV

SEQ ID NO: 54746 - protein, 9 aa, Homo sapiens
  misc_feature: Table A; Target 54746; HLA-B*49:01; ONECUT3; ENSG00000205922; TAA
AEEINTKEV

SEQ ID NO: 54747 - protein, 10 aa, Homo sapiens
  misc_feature: Table A; Target 54747; HLA-B*40:01; ONECUT3; ENSG00000205922; TAA
AEEINTKEVA

SEQ ID NO: 54748 - protein, 11 aa, Homo sapiens
  misc_feature: Table A; Target 54748; HLA-B*39:01; ONECUT3; ENSG00000205922; TAA
AEEPSTAPGGP

SEQ ID NO: 54749 - protein, 9 aa, Homo sapiens
  misc_feature: Table A; Target 54749; HLA-A*23:01; ONECUT3; ENSG00000205922; TAA
AFEPHAALL

SEQ ID NO: 54750 - protein, 9 aa, Homo sapiens
  misc_feature: Table A; Target 54750; HLA-A*24:02; ONECUT3; ENSG00000205922; TAA
AFEPHAALL

SEQ ID NO: 54751 - protein, 9 aa, Homo sapiens
  misc_feature: Table A; Target 54751; HLA-A*11:01; ONECUT3; ENSG00000205922; TAA
AGATATFSK

SEQ ID NO: 54752 - protein, 11 aa, Homo sapiens
  misc_feature: Table A; Target 54752; HLA-A*31:01; ONECUT3; ENSG00000205922; TAA
AGELLSPGHAR

SEQ ID NO: 54753 - protein, 8 aa, Homo sapiens
  misc_feature: Table A; Target 54753; HLA-B*08:01; ONECUT3; ENSG00000205922; TAA
AGPLHPAM

SEQ ID NO: 54754 - protein, 8 aa, Homo sapiens
  misc_feature: Table A; Target 54754; HLA-C*01:02; ONECUT3; ENSG00000205922; TAA
AGPLHPAM

SEQ ID NO: 54755 - protein, 8 aa, Homo sapiens
  misc_feature: Table A; Target 54755; HLA-C*16:01; ONECUT3; ENSG00000205922; TAA
AGPLHPAM

SEQ ID NO: 54756 - protein, 9 aa, Homo sapiens
  misc_feature: Table A; Target 54756; HLA-B*27:05; ONECUT3; ENSG00000205922; TAA
AHAQAGELL

SEQ ID NO: 54757 - protein, 9 aa, Homo sapiens
  misc_feature: Table A; Target 54757; HLA-B*39:01; ONECUT3; ENSG00000205922; TAA
AHAQAGELL

SEQ ID NO: 54758 - protein, 9 aa, Homo sapiens
  misc_feature: Table A; Target 54758; HLA-A*01:01; ONECUT3; ENSG00000205922; TAA
ALASVGHLY

SEQ ID NO: 54759 - protein, 9 aa, Homo sapiens
  misc_feature: Table A; Target 54759; HLA-A*03:01; ONECUT3; ENSG00000205922; TAA
ALASVGHLY

SEQ ID NO: 54760 - protein, 9 aa, Homo sapiens
  misc_feature: Table A; Target 54760; HLA-A*03:02; ONECUT3; ENSG00000205922; TAA
ALASVGHLY

SEQ ID NO: 54761 - protein, 9 aa, Homo sapiens
  misc_feature: Table A; Target 54761; HLA-A*25:01; ONECUT3; ENSG00000205922; TAA
ALASVGHLY

SEQ ID NO: 54762 - protein, 9 aa, Homo sapiens
  misc_feature: Table A; Target 54762; HLA-A*26:01; ONECUT3; ENSG00000205922; TAA
ALASVGHLY

SEQ ID NO: 54763 - protein, 9 aa, Homo sapiens
  misc_feature: Table A; Target 54763; HLA-A*29:02; ONECUT3; ENSG00000205922; TAA
ALASVGHLY

SEQ ID NO: 54764 - protein, 9 aa, Homo sapiens
  misc_feature: Table A; Target 54764; HLA-A*30:02; ONECUT3; ENSG00000205922; TAA
ALASVGHLY

SEQ ID NO: 54765 - protein, 9 aa, Homo sapiens
  misc_feature: Table A; Target 54765; HLA-A*32:01; ONECUT3; ENSG00000205922; TAA
ALASVGHLY

SEQ ID NO: 54766 - protein, 9 aa, Homo sapiens
  misc_feature: Table A; Target 54766; HLA-B*15:01; ONECUT3; ENSG00000205922; TAA
ALASVGHLY

SEQ ID NO: 54767 - protein, 9 aa, Homo sapiens
  misc_feature: Table A; Target 54767; HLA-B*15:03; ONECUT3; ENSG00000205922; TAA
ALASVGHLY

SEQ ID NO: 54768 - protein, 9 aa, Homo sapiens
  misc_feature: Table A; Target 54768; HLA-B*44:02; ONECUT3; ENSG00000205922; TAA
ALASVGHLY

SEQ ID NO: 54769 - protein, 9 aa, Homo sapiens
  misc_feature: Table A; Target 54769; HLA-B*44:03; ONECUT3; ENSG00000205922; TAA
ALASVGHLY

SEQ ID NO: 54770 - protein, 9 aa, Homo sapiens
  misc_feature: Table A; Target 54770; HLA-B*46:01; ONECUT3; ENSG00000205922; TAA
ALASVGHLY

SEQ ID NO: 54771 - protein, 9 aa, Homo sapiens
  misc_feature: Table A; Target 54771; HLA-B*58:01; ONECUT3; ENSG00000205922; TAA
ALASVGHLY

SEQ ID NO: 54772 - protein, 9 aa, Homo sapiens
  misc_feature: Table A; Target 54772; HLA-C*02:02; ONECUT3; ENSG00000205922; TAA
ALASVGHLY

SEQ ID NO: 54773 - protein, 9 aa, Homo sapiens
  misc_feature: Table A; Target 54773; HLA-C*07:04; ONECUT3; ENSG00000205922; TAA
ALASVGHLY

SEQ ID NO: 54774 - protein, 9 aa, Homo sapiens
  misc_feature: Table A; Target 54774; HLA-C*16:01; ONECUT3; ENSG00000205922; TAA
ALASVGHLY

SEQ ID NO: 54775 - protein, 9 aa, Homo sapiens
  misc_feature: Table A; Target 54775; HLA-C*16:02; ONECUT3; ENSG00000205922; TAA
ALASVGHLY

SEQ ID NO: 54776 - protein, 9 aa, Homo sapiens
  misc_feature: Table A; Target 54776; HLA-C*16:04; ONECUT3; ENSG00000205922; TAA
ALASVGHLY

SEQ ID NO: 54777 - protein, 9 aa, Homo sapiens
  misc_feature: Table A; Target 54777; HLA-A*02:01; ONECUT3; ENSG00000205922; TAA
ALPPALHGA

SEQ ID NO: 54778 - protein, 9 aa, Homo sapiens
  misc_feature: Table A; Target 54778; HLA-A*02:03; ONECUT3; ENSG00000205922; TAA
ALPPALHGA

SEQ ID NO: 54779 - protein, 9 aa, Homo sapiens
  misc_feature: Table A; Target 54779; HLA-A*02:07; ONECUT3; ENSG00000205922; TAA
ALPPALHGA

SEQ ID NO: 54780 - protein, 10 aa, Homo sapiens
  misc_feature: Table A; Target 54780; HLA-B*56:01; ONECUT3; ENSG00000205922; TAA
APGGPAGATA

SEQ ID NO: 54781 - protein, 8 aa, Homo sapiens
  misc_feature: Table A; Target 54781; HLA-C*14:02; ONECUT3; ENSG00000205922; TAA
APGLGGTY

SEQ ID NO: 54782 - protein, 11 aa, Homo sapiens
  misc_feature: Table A; Target 54782; HLA-B*07:02; ONECUT3; ENSG00000205922; TAA
APGLGGTYTTL

SEQ ID NO: 54783 - protein, 11 aa, Homo sapiens
  misc_feature: Table A; Target 54783; HLA-C*07:02; ONECUT3; ENSG00000205922; TAA
APGLGGTYTTL

SEQ ID NO: 54784 - protein, 9 aa, Homo sapiens
  misc_feature: Table A; Target 54784; HLA-B*07:02; ONECUT3; ENSG00000205922; TAA
APGRPGLVA

SEQ ID NO: 54785 - protein, 9 aa, Homo sapiens
  misc_feature: Table A; Target 54785; HLA-B*54:01; ONECUT3; ENSG00000205922; TAA
APGRPGLVA

SEQ ID NO: 54786 - protein, 9 aa, Homo sapiens
  misc_feature: Table A; Target 54786; HLA-B*56:01; ONECUT3; ENSG00000205922; TAA
APGRPGLVA

SEQ ID NO: 54787 - protein, 9 aa, Homo sapiens
  misc_feature: Table A; Target 54787; HLA-C*07:02; ONECUT3; ENSG00000205922; TAA
APGRPGLVA

SEQ ID NO: 54788 - protein, 8 aa, Homo sapiens
  misc_feature: Table A; Target 54788; HLA-B*56:01; ONECUT3; ENSG00000205922; TAA
APLGGLAA

SEQ ID NO: 54789 - protein, 9 aa, Homo sapiens
  misc_feature: Table A; Target 54789; HLA-B*07:02; ONECUT3; ENSG00000205922; TAA
APLGGLAAA

SEQ ID NO: 54790 - protein, 9 aa, Homo sapiens
  misc_feature: Table A; Target 54790; HLA-B*54:01; ONECUT3; ENSG00000205922; TAA
APLGGLAAA

SEQ ID NO: 54791 - protein, 9 aa, Homo sapiens
  misc_feature: Table A; Target 54791; HLA-B*55:01; ONECUT3; ENSG00000205922; TAA
APLGGLAAA

SEQ ID NO: 54792 - protein, 9 aa, Homo sapiens
  misc_feature: Table A; Target 54792; HLA-B*56:01; ONECUT3; ENSG00000205922; TAA
APLGGLAAA

SEQ ID NO: 54793 - protein, 9 aa, Homo sapiens
  misc_feature: Table A; Target 54793; HLA-C*07:02; ONECUT3; ENSG00000205922; TAA
APLGGLAAA

SEQ ID NO: 54794 - protein, 10 aa, Homo sapiens
  misc_feature: Table A; Target 54794; HLA-B*56:01; ONECUT3; ENSG00000205922; TAA
APLGGLAAAG

SEQ ID NO: 54795 - protein, 11 aa, Homo sapiens
  misc_feature: Table A; Target 54795; HLA-B*56:01; ONECUT3; ENSG00000205922; TAA
APLGGLAAAGA

SEQ ID NO: 54796 - protein, 9 aa, Homo sapiens
  misc_feature: Table A; Target 54796; HLA-C*04:01; ONECUT3; ENSG00000205922; TAA
APPPPPPPQ

SEQ ID NO: 54797 - protein, 9 aa, Homo sapiens
  misc_feature: Table A; Target 54797; HLA-B*56:01; ONECUT3; ENSG00000205922; TAA
APQPPPPPP

SEQ ID NO: 54798 - protein, 10 aa, Homo sapiens
  misc_feature: Table A; Target 54798; HLA-B*56:01; ONECUT3; ENSG00000205922; TAA
APQPPPPPPP

SEQ ID NO: 54799 - protein, 8 aa, Homo sapiens
  misc_feature: Table A; Target 54799; HLA-B*15:01; ONECUT3; ENSG00000205922; TAA
AQRITAEL

SEQ ID NO: 54800 - protein, 8 aa, Homo sapiens
  misc_feature: Table A; Target 54800; HLA-B*15:03; ONECUT3; ENSG00000205922; TAA
AQRITAEL

SEQ ID NO: 54801 - protein, 9 aa, Homo sapiens
  misc_feature: Table A; Target 54801; HLA-B*27:05; ONECUT3; ENSG00000205922; TAA
ARSAAAQHR

SEQ ID NO: 54802 - protein, 10 aa, Homo sapiens
  misc_feature: Table A; Target 54802; HLA-A*30:02; ONECUT3; ENSG00000205922; TAA
ASVGHLYGPY

SEQ ID NO: 54803 - protein, 9 aa, Homo sapiens
  misc_feature: Table A; Target 54803; HLA-B*40:01; ONECUT3; ENSG00000205922; TAA
ASVSGSFTL

SEQ ID NO: 54804 - protein, 9 aa, Homo sapiens
  misc_feature: Table A; Target 54804; HLA-B*58:01; ONECUT3; ENSG00000205922; TAA
ASVSGSFTL

SEQ ID NO: 54805 - protein, 9 aa, Homo sapiens
  misc_feature: Table A; Target 54805; HLA-C*01:02; ONECUT3; ENSG00000205922; TAA
ASVSGSFTL

SEQ ID NO: 54806 - protein, 9 aa, Homo sapiens
  misc_feature: Table A; Target 54806; HLA-C*02:02; ONECUT3; ENSG00000205922; TAA
ASVSGSFTL

SEQ ID NO: 54807 - protein, 9 aa, Homo sapiens
  misc_feature: Table A; Target 54807; HLA-C*03:03; ONECUT3; ENSG00000205922; TAA
ASVSGSFTL

SEQ ID NO: 54808 - protein, 9 aa, Homo sapiens
  misc_feature: Table A; Target 54808; HLA-C*03:04; ONECUT3; ENSG00000205922; TAA
ASVSGSFTL

SEQ ID NO: 54809 - protein, 9 aa, Homo sapiens
  misc_feature: Table A; Target 54809; HLA-C*16:01; ONECUT3; ENSG00000205922; TAA
ASVSGSFTL

SEQ ID NO: 54810 - protein, 9 aa, Homo sapiens
  misc_feature: Table A; Target 54810; HLA-C*16:04; ONECUT3; ENSG00000205922; TAA
ASVSGSFTL

SEQ ID NO: 54811 - protein, 10 aa, Homo sapiens
  misc_feature: Table A; Target 54811; HLA-C*02:02; ONECUT3; ENSG00000205922; TAA
ASVSGSFTLM

SEQ ID NO: 54812 - protein, 9 aa, Homo sapiens
  misc_feature: Table A; Target 54812; HLA-A*03:01; ONECUT3; ENSG00000205922; TAA
AVADKFHQH

SEQ ID NO: 54813 - protein, 9 aa, Homo sapiens
  misc_feature: Table A; Target 54813; HLA-A*03:02; ONECUT3; ENSG00000205922; TAA
AVADKFHQH

SEQ ID NO: 54814 - protein, 9 aa, Homo sapiens
  misc_feature: Table A; Target 54814; HLA-A*11:01; ONECUT3; ENSG00000205922; TAA
AVADKFHQH

SEQ ID NO: 54815 - protein, 9 aa, Homo sapiens
  misc_feature: Table A; Target 54815; HLA-A*23:01; ONECUT3; ENSG00000205922; TAA
AYGPPGHLA

SEQ ID NO: 54816 - protein, 9 aa, Homo sapiens
  misc_feature: Table A; Target 54816; HLA-A*24:02; ONECUT3; ENSG00000205922; TAA
AYGPPGHLA

SEQ ID NO: 54817 - protein, 9 aa, Homo sapiens
  misc_feature: Table A; Target 54817; HLA-C*14:02; ONECUT3; ENSG00000205922; TAA
AYGPPGHLA

SEQ ID NO: 54818 - protein, 10 aa, Homo sapiens
  misc_feature: Table A; Target 54818; HLA-A*25:01; ONECUT3; ENSG00000205922; TAA
CEAPGLGGTY

SEQ ID NO: 54819 - protein, 10 aa, Homo sapiens
  misc_feature: Table A; Target 54819; HLA-A*26:01; ONECUT3; ENSG00000205922; TAA
CEAPGLGGTY

SEQ ID NO: 54820 - protein, 10 aa, Homo sapiens
  misc_feature: Table A; Target 54820; HLA-A*29:02; ONECUT3; ENSG00000205922; TAA
CEAPGLGGTY

SEQ ID NO: 54821 - protein, 10 aa, Homo sapiens
  misc_feature: Table A; Target 54821; HLA-A*30:01; ONECUT3; ENSG00000205922; TAA
CEAPGLGGTY

SEQ ID NO: 54822 - protein, 10 aa, Homo sapiens
  misc_feature: Table A; Target 54822; HLA-A*30:02; ONECUT3; ENSG00000205922; TAA
CEAPGLGGTY

SEQ ID NO: 54823 - protein, 10 aa, Homo sapiens
  misc_feature: Table A; Target 54823; HLA-A*32:01; ONECUT3; ENSG00000205922; TAA
CEAPGLGGTY

SEQ ID NO: 54824 - protein, 10 aa, Homo sapiens
  misc_feature: Table A; Target 54824; HLA-B*15:01; ONECUT3; ENSG00000205922; TAA
CEAPGLGGTY

SEQ ID NO: 54825 - protein, 10 aa, Homo sapiens
  misc_feature: Table A; Target 54825; HLA-B*15:03; ONECUT3; ENSG00000205922; TAA
CEAPGLGGTY

SEQ ID NO: 54826 - protein, 10 aa, Homo sapiens
  misc_feature: Table A; Target 54826; HLA-B*18:01; ONECUT3; ENSG00000205922; TAA
CEAPGLGGTY

SEQ ID NO: 54827 - protein, 10 aa, Homo sapiens
  misc_feature: Table A; Target 54827; HLA-B*27:02; ONECUT3; ENSG00000205922; TAA
CEAPGLGGTY

SEQ ID NO: 54828 - protein, 10 aa, Homo sapiens
  misc_feature: Table A; Target 54828; HLA-B*27:05; ONECUT3; ENSG00000205922; TAA
CEAPGLGGTY

SEQ ID NO: 54829 - protein, 10 aa, Homo sapiens
  misc_feature: Table A; Target 54829; HLA-B*39:01; ONECUT3; ENSG00000205922; TAA
CEAPGLGGTY

SEQ ID NO: 54830 - protein, 10 aa, Homo sapiens
  misc_feature: Table A; Target 54830; HLA-B*40:01; ONECUT3; ENSG00000205922; TAA
CEAPGLGGTY

SEQ ID NO: 54831 - protein, 10 aa, Homo sapiens
  misc_feature: Table A; Target 54831; HLA-B*44:02; ONECUT3; ENSG00000205922; TAA
CEAPGLGGTY

SEQ ID NO: 54832 - protein, 10 aa, Homo sapiens
  misc_feature: Table A; Target 54832; HLA-B*44:03; ONECUT3; ENSG00000205922; TAA
CEAPGLGGTY

SEQ ID NO: 54833 - protein, 10 aa, Homo sapiens
  misc_feature: Table A; Target 54833; HLA-B*49:01; ONECUT3; ENSG00000205922; TAA
CEAPGLGGTY

SEQ ID NO: 54834 - protein, 10 aa, Homo sapiens
  misc_feature: Table A; Target 54834; HLA-C*02:02; ONECUT3; ENSG00000205922; TAA
CEAPGLGGTY

SEQ ID NO: 54835 - protein, 10 aa, Homo sapiens
  misc_feature: Table A; Target 54835; HLA-C*07:04; ONECUT3; ENSG00000205922; TAA
CEAPGLGGTY

SEQ ID NO: 54836 - protein, 10 aa, Homo sapiens
  misc_feature: Table A; Target 54836; HLA-C*16:01; ONECUT3; ENSG00000205922; TAA
CEAPGLGGTY

SEQ ID NO: 54837 - protein, 10 aa, Homo sapiens
  misc_feature: Table A; Target 54837; HLA-C*16:02; ONECUT3; ENSG00000205922; TAA
CEAPGLGGTY

SEQ ID NO: 54838 - protein, 10 aa, Homo sapiens
  misc_feature: Table A; Target 54838; HLA-C*16:04; ONECUT3; ENSG00000205922; TAA
CEAPGLGGTY

SEQ ID NO: 54839 - protein, 9 aa, Homo sapiens
  misc_feature: Table A; Target 54839; HLA-B*18:01; ONECUT3; ENSG00000205922; TAA
DERAALASV

SEQ ID NO: 54840 - protein, 9 aa, Homo sapiens
  misc_feature: Table A; Target 54840; HLA-B*51:01; ONECUT3; ENSG00000205922; TAA
DERAALASV

SEQ ID NO: 54841 - protein, 9 aa, Homo sapiens
  misc_feature: Table A; Target 54841; HLA-A*25:01; ONECUT3; ENSG00000205922; TAA
EAPGLGGTY

SEQ ID NO: 54842 - protein, 9 aa, Homo sapiens
  misc_feature: Table A; Target 54842; HLA-A*26:01; ONECUT3; ENSG00000205922; TAA
EAPGLGGTY

SEQ ID NO: 54843 - protein, 9 aa, Homo sapiens
  misc_feature: Table A; Target 54843; HLA-B*35:01; ONECUT3; ENSG00000205922; TAA
EAPGLGGTY

SEQ ID NO: 54844 - protein, 8 aa, Homo sapiens
  misc_feature: Table A; Target 54844; HLA-B*37:01; ONECUT3; ENSG00000205922; TAA
EDALARGL

SEQ ID NO: 54845 - protein, 8 aa, Homo sapiens
  misc_feature: Table A; Target 54845; HLA-B*18:01; ONECUT3; ENSG00000205922; TAA
EEINTKEV

SEQ ID NO: 54846 - protein, 8 aa, Homo sapiens
  misc_feature: Table A; Target 54846; HLA-B*49:01; ONECUT3; ENSG00000205922; TAA
EEINTKEV

SEQ ID NO: 54847 - protein, 9 aa, Homo sapiens
  misc_feature: Table A; Target 54847; HLA-A*30:01; ONECUT3; ENSG00000205922; TAA
EEINTKEVA

SEQ ID NO: 54848 - protein, 9 aa, Homo sapiens
  misc_feature: Table A; Target 54848; HLA-B*18:01; ONECUT3; ENSG00000205922; TAA
EEINTKEVA

SEQ ID NO: 54849 - protein, 9 aa, Homo sapiens
  misc_feature: Table A; Target 54849; HLA-B*40:01; ONECUT3; ENSG00000205922; TAA
EEINTKEVA

SEQ ID NO: 54850 - protein, 9 aa, Homo sapiens
  misc_feature: Table A; Target 54850; HLA-B*40:02; ONECUT3; ENSG00000205922; TAA
EEINTKEVA

SEQ ID NO: 54851 - protein, 9 aa, Homo sapiens
  misc_feature: Table A; Target 54851; HLA-B*44:02; ONECUT3; ENSG00000205922; TAA
EEINTKEVA

SEQ ID NO: 54852 - protein, 9 aa, Homo sapiens
  misc_feature: Table A; Target 54852; HLA-B*44:03; ONECUT3; ENSG00000205922; TAA
EEINTKEVA

SEQ ID NO: 54853 - protein, 9 aa, Homo sapiens
  misc_feature: Table A; Target 54853; HLA-B*49:01; ONECUT3; ENSG00000205922; TAA
EEINTKEVA

SEQ ID NO: 54854 - protein, 10 aa, Homo sapiens
  misc_feature: Table A; Target 54854; HLA-B*44:02; ONECUT3; ENSG00000205922; TAA
EEINTKEVAQ

SEQ ID NO: 54855 - protein, 11 aa, Homo sapiens
  misc_feature: Table A; Target 54855; HLA-A*33:03; ONECUT3; ENSG00000205922; TAA
EEINTKEVAQR

SEQ ID NO: 54856 - protein, 11 aa, Homo sapiens
  misc_feature: Table A; Target 54856; HLA-A*68:01; ONECUT3; ENSG00000205922; TAA
EEINTKEVAQR

SEQ ID NO: 54857 - protein, 11 aa, Homo sapiens
  misc_feature: Table A; Target 54857; HLA-C*07:06; ONECUT3; ENSG00000205922; TAA
EEINTKEVAQR

SEQ ID NO: 54858 - protein, 10 aa, Homo sapiens
  misc_feature: Table A; Target 54858; HLA-A*33:01; ONECUT3; ENSG00000205922; TAA
EINTKEVAQR

SEQ ID NO: 54859 - protein, 10 aa, Homo sapiens
  misc_feature: Table A; Target 54859; HLA-A*33:03; ONECUT3; ENSG00000205922; TAA
EINTKEVAQR

SEQ ID NO: 54860 - protein, 10 aa, Homo sapiens
  misc_feature: Table A; Target 54860; HLA-A*68:01; ONECUT3; ENSG00000205922; TAA
EINTKEVAQR

SEQ ID NO: 54861 - protein, 10 aa, Homo sapiens
  misc_feature: Table A; Target 54861; HLA-C*07:06; ONECUT3; ENSG00000205922; TAA
EINTKEVAQR

SEQ ID NO: 54862 - protein, 10 aa, Homo sapiens
  misc_feature: Table A; Target 54862; HLA-A*26:01; ONECUT3; ENSG00000205922; TAA
ELAGPLHPAM

SEQ ID NO: 54863 - protein, 9 aa, Homo sapiens
  misc_feature: Table A; Target 54863; HLA-A*33:01; ONECUT3; ENSG00000205922; TAA
ELLSPGHAR

SEQ ID NO: 54864 - protein, 9 aa, Homo sapiens
  misc_feature: Table A; Target 54864; HLA-A*33:03; ONECUT3; ENSG00000205922; TAA
ELLSPGHAR

SEQ ID NO: 54865 - protein, 9 aa, Homo sapiens
  misc_feature: Table A; Target 54865; HLA-A*68:01; ONECUT3; ENSG00000205922; TAA
ELLSPGHAR

SEQ ID NO: 54866 - protein, 9 aa, Homo sapiens
  misc_feature: Table A; Target 54866; HLA-C*07:06; ONECUT3; ENSG00000205922; TAA
ELLSPGHAR

SEQ ID NO: 54867 - protein, 9 aa, Homo sapiens
  misc_feature: Table A; Target 54867; HLA-A*26:01; ONECUT3; ENSG00000205922; TAA
ELNTVSNFF

SEQ ID NO: 54868 - protein, 9 aa, Homo sapiens
  misc_feature: Table A; Target 54868; HLA-A*26:01; ONECUT3; ENSG00000205922; TAA
ELPAMGSPL

SEQ ID NO: 54869 - protein, 9 aa, Homo sapiens
  misc_feature: Table A; Target 54869; HLA-C*01:02; ONECUT3; ENSG00000205922; TAA
ELPAMGSPL

SEQ ID NO: 54870 - protein, 10 aa, Homo sapiens
  misc_feature: Table A; Target 54870; HLA-B*07:02; ONECUT3; ENSG00000205922; TAA
EPEFQRMSAL

SEQ ID NO: 54871 - protein, 10 aa, Homo sapiens
  misc_feature: Table A; Target 54871; HLA-C*07:02; ONECUT3; ENSG00000205922; TAA
EPEFQRMSAL

SEQ ID NO: 54872 - protein, 9 aa, Homo sapiens
  misc_feature: Table A; Target 54872; HLA-A*33:01; ONECUT3; ENSG00000205922; TAA
EPHAALLGR

SEQ ID NO: 54873 - protein, 9 aa, Homo sapiens
  misc_feature: Table A; Target 54873; HLA-A*33:03; ONECUT3; ENSG00000205922; TAA
EPHAALLGR

SEQ ID NO: 54874 - protein, 9 aa, Homo sapiens
  misc_feature: Table A; Target 54874; HLA-A*25:01; ONECUT3; ENSG00000205922; TAA
ESLGGLHSV

SEQ ID NO: 54875 - protein, 9 aa, Homo sapiens
  misc_feature: Table A; Target 54875; HLA-A*26:01; ONECUT3; ENSG00000205922; TAA
ESLGGLHSV

SEQ ID NO: 54876 - protein, 9 aa, Homo sapiens
  misc_feature: Table A; Target 54876; HLA-A*33:01; ONECUT3; ENSG00000205922; TAA
ESLGGLHSV

SEQ ID NO: 54877 - protein, 9 aa, Homo sapiens
  misc_feature: Table A; Target 54877; HLA-A*33:03; ONECUT3; ENSG00000205922; TAA
ESLGGLHSV

SEQ ID NO: 54878 - protein, 9 aa, Homo sapiens
  misc_feature: Table A; Target 54878; HLA-A*68:02; ONECUT3; ENSG00000205922; TAA
ESLGGLHSV

SEQ ID NO: 54879 - protein, 9 aa, Homo sapiens
  misc_feature: Table A; Target 54879; HLA-B*40:02; ONECUT3; ENSG00000205922; TAA
ESLGGLHSV

SEQ ID NO: 54880 - protein, 9 aa, Homo sapiens
  misc_feature: Table A; Target 54880; HLA-B*51:01; ONECUT3; ENSG00000205922; TAA
ESLGGLHSV

SEQ ID NO: 54881 - protein, 9 aa, Homo sapiens
  misc_feature: Table A; Target 54881; HLA-B*54:01; ONECUT3; ENSG00000205922; TAA
ESLGGLHSV

SEQ ID NO: 54882 - protein, 9 aa, Homo sapiens
  misc_feature: Table A; Target 54882; HLA-A*26:01; ONECUT3; ENSG00000205922; TAA
EVAQRITAE

SEQ ID NO: 54883 - protein, 10 aa, Homo sapiens
  misc_feature: Table A; Target 54883; HLA-A*25:01; ONECUT3; ENSG00000205922; TAA
EVAQRITAEL

SEQ ID NO: 54884 - protein, 10 aa, Homo sapiens
  misc_feature: Table A; Target 54884; HLA-A*26:01; ONECUT3; ENSG00000205922; TAA
EVAQRITAEL

SEQ ID NO: 54885 - protein, 10 aa, Homo sapiens
  misc_feature: Table A; Target 54885; HLA-A*33:03; ONECUT3; ENSG00000205922; TAA
EVAQRITAEL

SEQ ID NO: 54886 - protein, 10 aa, Homo sapiens
  misc_feature: Table A; Target 54886; HLA-A*68:01; ONECUT3; ENSG00000205922; TAA
EVAQRITAEL

SEQ ID NO: 54887 - protein, 10 aa, Homo sapiens
  misc_feature: Table A; Target 54887; HLA-A*68:02; ONECUT3; ENSG00000205922; TAA
EVAQRITAEL

SEQ ID NO: 54888 - protein, 9 aa, Homo sapiens
  misc_feature: Table A; Target 54888; HLA-C*03:03; ONECUT3; ENSG00000205922; TAA
FTDLQRRTL

SEQ ID NO: 54889 - protein, 9 aa, Homo sapiens
  misc_feature: Table A; Target 54889; HLA-C*03:04; ONECUT3; ENSG00000205922; TAA
FTDLQRRTL

SEQ ID NO: 54890 - protein, 8 aa, Homo sapiens
  misc_feature: Table A; Target 54890; HLA-C*05:01; ONECUT3; ENSG00000205922; TAA
GADFRGEL

SEQ ID NO: 54891 - protein, 11 aa, Homo sapiens
  misc_feature: Table A; Target 54891; HLA-B*39:01; ONECUT3; ENSG00000205922; TAA
GAGSAGGGADF

SEQ ID NO: 54892 - protein, 9 aa, Homo sapiens
  misc_feature: Table A; Target 54892; HLA-B*56:01; ONECUT3; ENSG00000205922; TAA
GATATFSKA

SEQ ID NO: 54893 - protein, 9 aa, Homo sapiens
  misc_feature: Table A; Target 54893; HLA-B*44:03; ONECUT3; ENSG00000205922; TAA
GELAGPLHP

SEQ ID NO: 54894 - protein, 9 aa, Homo sapiens
  misc_feature: Table A; Target 54894; HLA-B*49:01; ONECUT3; ENSG00000205922; TAA
GELAGPLHP

SEQ ID NO: 54895 - protein, 10 aa, Homo sapiens
  misc_feature: Table A; Target 54895; HLA-B*49:01; ONECUT3; ENSG00000205922; TAA
GELAGPLHPA

SEQ ID NO: 54896 - protein, 11 aa, Homo sapiens
  misc_feature: Table A; Target 54896; HLA-A*30:01; ONECUT3; ENSG00000205922; TAA
GELAGPLHPAM

SEQ ID NO: 54897 - protein, 11 aa, Homo sapiens
  misc_feature: Table A; Target 54897; HLA-B*40:01; ONECUT3; ENSG00000205922; TAA
GELAGPLHPAM

SEQ ID NO: 54898 - protein, 10 aa, Homo sapiens
  misc_feature: Table A; Target 54898; HLA-B*44:02; ONECUT3; ENSG00000205922; TAA
GELLSPGHAR

SEQ ID NO: 54899 - protein, 10 aa, Homo sapiens
  misc_feature: Table A; Target 54899; HLA-B*44:03; ONECUT3; ENSG00000205922; TAA
GELLSPGHAR

SEQ ID NO: 54900 - protein, 9 aa, Homo sapiens
  misc_feature: Table A; Target 54900; HLA-B*07:02; ONECUT3; ENSG00000205922; TAA
GGADFRGEL

SEQ ID NO: 54901 - protein, 9 aa, Homo sapiens
  misc_feature: Table A; Target 54901; HLA-C*16:01; ONECUT3; ENSG00000205922; TAA
GGADFRGEL

SEQ ID NO: 54902 - protein, 11 aa, Homo sapiens
  misc_feature: Table A; Target 54902; HLA-C*07:04; ONECUT3; ENSG00000205922; TAA
GGGPGGSGGGP

SEQ ID NO: 54903 - protein, 9 aa, Homo sapiens
  misc_feature: Table A; Target 54903; HLA-A*02:04; ONECUT3; ENSG00000205922; TAA
GLLAPLGGL

SEQ ID NO: 54904 - protein, 11 aa, Homo sapiens
  misc_feature: Table A; Target 54904; HLA-A*02:03; ONECUT3; ENSG00000205922; TAA
GLVAPGRPGLV

SEQ ID NO: 54905 - protein, 9 aa, Homo sapiens
  misc_feature: Table A; Target 54905; HLA-A*23:01; ONECUT3; ENSG00000205922; TAA
GPAGATATF

SEQ ID NO: 54906 - protein, 9 aa, Homo sapiens
  misc_feature: Table A; Target 54906; HLA-A*25:01; ONECUT3; ENSG00000205922; TAA
GPAGATATF

SEQ ID NO: 54907 - protein, 9 aa, Homo sapiens
  misc_feature: Table A; Target 54907; HLA-A*26:01; ONECUT3; ENSG00000205922; TAA
GPAGATATF

SEQ ID NO: 54908 - protein, 9 aa, Homo sapiens
  misc_feature: Table A; Target 54908; HLA-B*07:02; ONECUT3; ENSG00000205922; TAA
GPAGATATF

SEQ ID NO: 54909 - protein, 9 aa, Homo sapiens
  misc_feature: Table A; Target 54909; HLA-B*15:01; ONECUT3; ENSG00000205922; TAA
GPAGATATF

SEQ ID NO: 54910 - protein, 9 aa, Homo sapiens
  misc_feature: Table A; Target 54910; HLA-B*15:03; ONECUT3; ENSG00000205922; TAA
GPAGATATF

SEQ ID NO: 54911 - protein, 9 aa, Homo sapiens
  misc_feature: Table A; Target 54911; HLA-B*35:01; ONECUT3; ENSG00000205922; TAA
GPAGATATF

SEQ ID NO: 54912 - protein, 9 aa, Homo sapiens
  misc_feature: Table A; Target 54912; HLA-B*35:03; ONECUT3; ENSG00000205922; TAA
GPAGATATF

SEQ ID NO: 54913 - protein, 9 aa, Homo sapiens
  misc_feature: Table A; Target 54913; HLA-B*55:01; ONECUT3; ENSG00000205922; TAA
GPAGATATF

SEQ ID NO: 54914 - protein, 9 aa, Homo sapiens
  misc_feature: Table A; Target 54914; HLA-B*56:01; ONECUT3; ENSG00000205922; TAA
GPAGATATF

SEQ ID NO: 54915 - protein, 9 aa, Homo sapiens
  misc_feature: Table A; Target 54915; HLA-C*07:02; ONECUT3; ENSG00000205922; TAA
GPAGATATF

SEQ ID NO: 54916 - protein, 9 aa, Homo sapiens
  misc_feature: Table A; Target 54916; HLA-C*14:02; ONECUT3; ENSG00000205922; TAA
GPAGATATF

SEQ ID NO: 54917 - protein, 11 aa, Homo sapiens
  misc_feature: Table A; Target 54917; HLA-B*56:01; ONECUT3; ENSG00000205922; TAA
GPGGSGGGPSA

SEQ ID NO: 54918 - protein, 9 aa, Homo sapiens
  misc_feature: Table A; Target 54918; HLA-B*07:02; ONECUT3; ENSG00000205922; TAA
GPLHPAMGM

SEQ ID NO: 54919 - protein, 9 aa, Homo sapiens
  misc_feature: Table A; Target 54919; HLA-B*54:01; ONECUT3; ENSG00000205922; TAA
GPYGKELPA

SEQ ID NO: 54920 - protein, 9 aa, Homo sapiens
  misc_feature: Table A; Target 54920; HLA-B*56:01; ONECUT3; ENSG00000205922; TAA
GPYGKELPA

SEQ ID NO: 54921 - protein, 10 aa, Homo sapiens
  misc_feature: Table A; Target 54921; HLA-B*07:02; ONECUT3; ENSG00000205922; TAA
GPYGKELPAM

SEQ ID NO: 54922 - protein, 10 aa, Homo sapiens
  misc_feature: Table A; Target 54922; HLA-B*55:01; ONECUT3; ENSG00000205922; TAA
GPYGKELPAM

SEQ ID NO: 54923 - protein, 9 aa, Homo sapiens
  misc_feature: Table A; Target 54923; HLA-B*27:05; ONECUT3; ENSG00000205922; TAA
GRAEDALAR

SEQ ID NO: 54924 - protein, 11 aa, Homo sapiens
  misc_feature: Table A; Target 54924; HLA-B*27:05; ONECUT3; ENSG00000205922; TAA
GRAEDALARGL

SEQ ID NO: 54925 - protein, 9 aa, Homo sapiens
  misc_feature: Table A; Target 54925; HLA-B*27:05; ONECUT3; ENSG00000205922; TAA
GRPGLVAGM

SEQ ID NO: 54926 - protein, 11 aa, Homo sapiens
  misc_feature: Table A; Target 54926; HLA-A*03:01; ONECUT3; ENSG00000205922; TAA
GTLSDLLRNPK

SEQ ID NO: 54927 - protein, 11 aa, Homo sapiens
  misc_feature: Table A; Target 54927; HLA-A*11:01; ONECUT3; ENSG00000205922; TAA
GTLSDLLRNPK

SEQ ID NO: 54928 - protein, 11 aa, Homo sapiens
  misc_feature: Table A; Target 54928; HLA-A*03:01; ONECUT3; ENSG00000205922; TAA
GTYTTLTPLQH

SEQ ID NO: 54929 - protein, 8 aa, Homo sapiens
  misc_feature: Table A; Target 54929; HLA-B*54:01; ONECUT3; ENSG00000205922; TAA
HAHPHPAA

SEQ ID NO: 54930 - protein, 9 aa, Homo sapiens
  misc_feature: Table A; Target 54930; HLA-B*54:01; ONECUT3; ENSG00000205922; TAA
HAHPHPAAA

SEQ ID NO: 54931 - protein, 8 aa, Homo sapiens
  misc_feature: Table A; Target 54931; HLA-C*03:04; ONECUT3; ENSG00000205922; TAA
HAQAGELL

SEQ ID NO: 54932 - protein, 10 aa, Homo sapiens
  misc_feature: Table A; Target 54932; HLA-C*04:01; ONECUT3; ENSG00000205922; TAA
HGPHGGGGGP

SEQ ID NO: 54933 - protein, 10 aa, Homo sapiens
  misc_feature: Table A; Target 54933; HLA-A*02:03; ONECUT3; ENSG00000205922; TAA
HLYGPYGKEL

SEQ ID NO: 54934 - protein, 9 aa, Homo sapiens
  misc_feature: Table A; Target 54934; HLA-B*54:01; ONECUT3; ENSG00000205922; TAA
HPHAHPHPA

SEQ ID NO: 54935 - protein, 10 aa, Homo sapiens
  misc_feature: Table A; Target 54935; HLA-B*54:01; ONECUT3; ENSG00000205922; TAA
HPHAHPHPAA

SEQ ID NO: 54936 - protein, 9 aa, Homo sapiens
  misc_feature: Table A; Target 54936; HLA-B*13:02; ONECUT3; ENSG00000205922; TAA
HQHAAAAAV

SEQ ID NO: 54937 - protein, 9 aa, Homo sapiens
  misc_feature: Table A; Target 54937; HLA-B*15:03; ONECUT3; ENSG00000205922; TAA
HQHAAAAAV

SEQ ID NO: 54938 - protein, 9 aa, Homo sapiens
  misc_feature: Table A; Target 54938; HLA-B*37:01; ONECUT3; ENSG00000205922; TAA
HQHAAAAAV

SEQ ID NO: 54939 - protein, 9 aa, Homo sapiens
  misc_feature: Table A; Target 54939; HLA-B*39:01; ONECUT3; ENSG00000205922; TAA
HQHAAAAAV

SEQ ID NO: 54940 - protein, 9 aa, Homo sapiens
  misc_feature: Table A; Target 54940; HLA-C*07:04; ONECUT3; ENSG00000205922; TAA
HQHAAAAAV

SEQ ID NO: 54941 - protein, 9 aa, Homo sapiens
  misc_feature: Table A; Target 54941; HLA-A*33:01; ONECUT3; ENSG00000205922; TAA
INTKEVAQR

SEQ ID NO: 54942 - protein, 9 aa, Homo sapiens
  misc_feature: Table A; Target 54942; HLA-A*31:01; ONECUT3; ENSG00000205922; TAA
IPQAIFAQR

SEQ ID NO: 54943 - protein, 9 aa, Homo sapiens
  misc_feature: Table A; Target 54943; HLA-A*33:01; ONECUT3; ENSG00000205922; TAA
IPQAIFAQR

SEQ ID NO: 54944 - protein, 9 aa, Homo sapiens
  misc_feature: Table A; Target 54944; HLA-A*33:03; ONECUT3; ENSG00000205922; TAA
IPQAIFAQR

SEQ ID NO: 54945 - protein, 9 aa, Homo sapiens
  misc_feature: Table A; Target 54945; HLA-A*68:01; ONECUT3; ENSG00000205922; TAA
IPQAIFAQR

SEQ ID NO: 54946 - protein, 9 aa, Homo sapiens
  misc_feature: Table A; Target 54946; HLA-B*56:01; ONECUT3; ENSG00000205922; TAA
IPQAIFAQR

SEQ ID NO: 54947 - protein, 9 aa, Homo sapiens
  misc_feature: Table A; Target 54947; HLA-C*07:06; ONECUT3; ENSG00000205922; TAA
IPQAIFAQR

SEQ ID NO: 54948 - protein, 10 aa, Homo sapiens
  misc_feature: Table A; Target 54948; HLA-B*51:01; ONECUT3; ENSG00000205922; TAA
IPQAIFAQRI

SEQ ID NO: 54949 - protein, 10 aa, Homo sapiens
  misc_feature: Table A; Target 54949; HLA-B*56:01; ONECUT3; ENSG00000205922; TAA
IPQAIFAQRI

SEQ ID NO: 54950 - protein, 9 aa, Homo sapiens
  misc_feature: Table A; Target 54950; HLA-C*03:03; ONECUT3; ENSG00000205922; TAA
ISQQLGLEL

SEQ ID NO: 54951 - protein, 9 aa, Homo sapiens
  misc_feature: Table A; Target 54951; HLA-C*03:04; ONECUT3; ENSG00000205922; TAA
ISQQLGLEL

SEQ ID NO: 54952 - protein, 8 aa, Homo sapiens
  misc_feature: Table A; Target 54952; HLA-C*16:01; ONECUT3; ENSG00000205922; TAA
ITAELKRY

SEQ ID NO: 54953 - protein, 8 aa, Homo sapiens
  misc_feature: Table A; Target 54953; HLA-C*16:02; ONECUT3; ENSG00000205922; TAA
ITAELKRY

SEQ ID NO: 54954 - protein, 10 aa, Homo sapiens
  misc_feature: Table A; Target 54954; HLA-B*37:01; ONECUT3; ENSG00000205922; TAA
KELPAMGSPL

SEQ ID NO: 54955 - protein, 10 aa, Homo sapiens
  misc_feature: Table A; Target 54955; HLA-B*40:01; ONECUT3; ENSG00000205922; TAA
KELPAMGSPL

SEQ ID NO: 54956 - protein, 11 aa, Homo sapiens
  misc_feature: Table A; Target 54956; HLA-A*30:01; ONECUT3; ENSG00000205922; TAA
KEMQVTISQQL

SEQ ID NO: 54957 - protein, 11 aa, Homo sapiens
  misc_feature: Table A; Target 54957; HLA-B*40:01; ONECUT3; ENSG00000205922; TAA
KEMQVTISQQL

SEQ ID NO: 54958 - protein, 11 aa, Homo sapiens
  misc_feature: Table A; Target 54958; HLA-B*40:02; ONECUT3; ENSG00000205922; TAA
KEMQVTISQQL

SEQ ID NO: 54959 - protein, 11 aa, Homo sapiens
  misc_feature: Table A; Target 54959; HLA-B*44:02; ONECUT3; ENSG00000205922; TAA
KEMQVTISQQL

SEQ ID NO: 54960 - protein, 11 aa, Homo sapiens
  misc_feature: Table A; Target 54960; HLA-B*44:03; ONECUT3; ENSG00000205922; TAA
KEMQVTISQQL

SEQ ID NO: 54961 - protein, 11 aa, Homo sapiens
  misc_feature: Table A; Target 54961; HLA-C*16:04; ONECUT3; ENSG00000205922; TAA
KEMQVTISQQL

SEQ ID NO: 54962 - protein, 9 aa, Homo sapiens
  misc_feature: Table A; Target 54962; HLA-A*30:01; ONECUT3; ENSG00000205922; TAA
KEVAQRITA

SEQ ID NO: 54963 - protein, 9 aa, Homo sapiens
  misc_feature: Table A; Target 54963; HLA-B*40:02; ONECUT3; ENSG00000205922; TAA
KEVAQRITA

SEQ ID NO: 54964 - protein, 11 aa, Homo sapiens
  misc_feature: Table A; Target 54964; HLA-A*30:01; ONECUT3; ENSG00000205922; TAA
KEVAQRITAEL

SEQ ID NO: 54965 - protein, 11 aa, Homo sapiens
  misc_feature: Table A; Target 54965; HLA-B*40:01; ONECUT3; ENSG00000205922; TAA
KEVAQRITAEL

SEQ ID NO: 54966 - protein, 9 aa, Homo sapiens
  misc_feature: Table A; Target 54966; HLA-A*32:01; ONECUT3; ENSG00000205922; TAA
KLKSGRETF

SEQ ID NO: 54967 - protein, 9 aa, Homo sapiens
  misc_feature: Table A; Target 54967; HLA-A*23:01; ONECUT3; ENSG00000205922; TAA
LAASVSGSF

SEQ ID NO: 54968 - protein, 9 aa, Homo sapiens
  misc_feature: Table A; Target 54968; HLA-A*32:01; ONECUT3; ENSG00000205922; TAA
LAASVSGSF

SEQ ID NO: 54969 - protein, 9 aa, Homo sapiens
  misc_feature: Table A; Target 54969; HLA-B*15:01; ONECUT3; ENSG00000205922; TAA
LAASVSGSF

SEQ ID NO: 54970 - protein, 9 aa, Homo sapiens
  misc_feature: Table A; Target 54970; HLA-B*15:03; ONECUT3; ENSG00000205922; TAA
LAASVSGSF

SEQ ID NO: 54971 - protein, 9 aa, Homo sapiens
  misc_feature: Table A; Target 54971; HLA-B*35:01; ONECUT3; ENSG00000205922; TAA
LAASVSGSF

SEQ ID NO: 54972 - protein, 9 aa, Homo sapiens
  misc_feature: Table A; Target 54972; HLA-B*39:01; ONECUT3; ENSG00000205922; TAA
LAASVSGSF

SEQ ID NO: 54973 - protein, 9 aa, Homo sapiens
  misc_feature: Table A; Target 54973; HLA-B*46:01; ONECUT3; ENSG00000205922; TAA
LAASVSGSF

SEQ ID NO: 54974 - protein, 9 aa, Homo sapiens
  misc_feature: Table A; Target 54974; HLA-B*58:01; ONECUT3; ENSG00000205922; TAA
LAASVSGSF

SEQ ID NO: 54975 - protein, 9 aa, Homo sapiens
  misc_feature: Table A; Target 54975; HLA-C*02:02; ONECUT3; ENSG00000205922; TAA
LAASVSGSF

SEQ ID NO: 54976 - protein, 9 aa, Homo sapiens
  misc_feature: Table A; Target 54976; HLA-C*03:03; ONECUT3; ENSG00000205922; TAA
LAASVSGSF

SEQ ID NO: 54977 - protein, 9 aa, Homo sapiens
  misc_feature: Table A; Target 54977; HLA-C*03:04; ONECUT3; ENSG00000205922; TAA
LAASVSGSF

SEQ ID NO: 54978 - protein, 9 aa, Homo sapiens
  misc_feature: Table A; Target 54978; HLA-C*05:01; ONECUT3; ENSG00000205922; TAA
LAASVSGSF

SEQ ID NO: 54979 - protein, 9 aa, Homo sapiens
  misc_feature: Table A; Target 54979; HLA-C*14:02; ONECUT3; ENSG00000205922; TAA
LAASVSGSF

SEQ ID NO: 54980 - protein, 9 aa, Homo sapiens
  misc_feature: Table A; Target 54980; HLA-C*16:01; ONECUT3; ENSG00000205922; TAA
LAASVSGSF

SEQ ID NO: 54981 - protein, 9 aa, Homo sapiens
  misc_feature: Table A; Target 54981; HLA-C*16:04; ONECUT3; ENSG00000205922; TAA
LAASVSGSF

SEQ ID NO: 54982 - protein, 9 aa, Homo sapiens
  misc_feature: Table A; Target 54982; HLA-A*23:01; ONECUT3; ENSG00000205922; TAA
LAGPLHPAM

SEQ ID NO: 54983 - protein, 9 aa, Homo sapiens
  misc_feature: Table A; Target 54983; HLA-A*32:01; ONECUT3; ENSG00000205922; TAA
LAGPLHPAM

SEQ ID NO: 54984 - protein, 9 aa, Homo sapiens
  misc_feature: Table A; Target 54984; HLA-B*15:03; ONECUT3; ENSG00000205922; TAA
LAGPLHPAM

SEQ ID NO: 54985 - protein, 9 aa, Homo sapiens
  misc_feature: Table A; Target 54985; HLA-B*35:01; ONECUT3; ENSG00000205922; TAA
LAGPLHPAM

SEQ ID NO: 54986 - protein, 9 aa, Homo sapiens
  misc_feature: Table A; Target 54986; HLA-B*35:03; ONECUT3; ENSG00000205922; TAA
LAGPLHPAM

SEQ ID NO: 54987 - protein, 9 aa, Homo sapiens
  misc_feature: Table A; Target 54987; HLA-B*46:01; ONECUT3; ENSG00000205922; TAA
LAGPLHPAM

SEQ ID NO: 54988 - protein, 9 aa, Homo sapiens
  misc_feature: Table A; Target 54988; HLA-B*54:01; ONECUT3; ENSG00000205922; TAA
LAGPLHPAM

SEQ ID NO: 54989 - protein, 9 aa, Homo sapiens
  misc_feature: Table A; Target 54989; HLA-B*55:01; ONECUT3; ENSG00000205922; TAA
LAGPLHPAM

SEQ ID NO: 54990 - protein, 9 aa, Homo sapiens
  misc_feature: Table A; Target 54990; HLA-B*58:01; ONECUT3; ENSG00000205922; TAA
LAGPLHPAM

SEQ ID NO: 54991 - protein, 9 aa, Homo sapiens
  misc_feature: Table A; Target 54991; HLA-C*02:02; ONECUT3; ENSG00000205922; TAA
LAGPLHPAM

SEQ ID NO: 54992 - protein, 9 aa, Homo sapiens
  misc_feature: Table A; Target 54992; HLA-C*03:03; ONECUT3; ENSG00000205922; TAA
LAGPLHPAM

SEQ ID NO: 54993 - protein, 9 aa, Homo sapiens
  misc_feature: Table A; Target 54993; HLA-C*03:04; ONECUT3; ENSG00000205922; TAA
LAGPLHPAM

SEQ ID NO: 54994 - protein, 9 aa, Homo sapiens
  misc_feature: Table A; Target 54994; HLA-C*07:01; ONECUT3; ENSG00000205922; TAA
LAGPLHPAM

SEQ ID NO: 54995 - protein, 9 aa, Homo sapiens
  misc_feature: Table A; Target 54995; HLA-C*07:04; ONECUT3; ENSG00000205922; TAA
LAGPLHPAM

SEQ ID NO: 54996 - protein, 9 aa, Homo sapiens
  misc_feature: Table A; Target 54996; HLA-C*12:03; ONECUT3; ENSG00000205922; TAA
LAGPLHPAM

SEQ ID NO: 54997 - protein, 9 aa, Homo sapiens
  misc_feature: Table A; Target 54997; HLA-C*14:02; ONECUT3; ENSG00000205922; TAA
LAGPLHPAM

SEQ ID NO: 54998 - protein, 9 aa, Homo sapiens
  misc_feature: Table A; Target 54998; HLA-C*16:01; ONECUT3; ENSG00000205922; TAA
LAGPLHPAM

SEQ ID NO: 54999 - protein, 9 aa, Homo sapiens
  misc_feature: Table A; Target 54999; HLA-C*16:02; ONECUT3; ENSG00000205922; TAA
LAGPLHPAM

SEQ ID NO: 55000 - protein, 9 aa, Homo sapiens
  misc_feature: Table A; Target 55000; HLA-C*16:04; ONECUT3; ENSG00000205922; TAA
LAGPLHPAM

SEQ ID NO: 55001 - protein, 9 aa, Homo sapiens
  misc_feature: Table A; Target 55001; HLA-B*46:01; ONECUT3; ENSG00000205922; TAA
LAPLGGLAA

SEQ ID NO: 55002 - protein, 9 aa, Homo sapiens
  misc_feature: Table A; Target 55002; HLA-B*54:01; ONECUT3; ENSG00000205922; TAA
LAPLGGLAA

SEQ ID NO: 55003 - protein, 9 aa, Homo sapiens
  misc_feature: Table A; Target 55003; HLA-B*56:01; ONECUT3; ENSG00000205922; TAA
LAPLGGLAA

SEQ ID NO: 55004 - protein, 9 aa, Homo sapiens
  misc_feature: Table A; Target 55004; HLA-C*01:02; ONECUT3; ENSG00000205922; TAA
LAPLGGLAA

SEQ ID NO: 55005 - protein, 9 aa, Homo sapiens
  misc_feature: Table A; Target 55005; HLA-C*03:03; ONECUT3; ENSG00000205922; TAA
LAPLGGLAA

SEQ ID NO: 55006 - protein, 9 aa, Homo sapiens
  misc_feature: Table A; Target 55006; HLA-C*03:04; ONECUT3; ENSG00000205922; TAA
LAPLGGLAA

SEQ ID NO: 55007 - protein, 9 aa, Homo sapiens
  misc_feature: Table A; Target 55007; HLA-C*14:02; ONECUT3; ENSG00000205922; TAA
LAPLGGLAA

SEQ ID NO: 55008 - protein, 10 aa, Homo sapiens
  misc_feature: Table A; Target 55008; HLA-B*54:01; ONECUT3; ENSG00000205922; TAA
LAPLGGLAAA

SEQ ID NO: 55009 - protein, 10 aa, Homo sapiens
  misc_feature: Table A; Target 55009; HLA-B*56:01; ONECUT3; ENSG00000205922; TAA
LAPLGGLAAA

SEQ ID NO: 55010 - protein, 8 aa, Homo sapiens
  misc_feature: Table A; Target 55010; HLA-A*01:01; ONECUT3; ENSG00000205922; TAA
LASVGHLY

SEQ ID NO: 55011 - protein, 8 aa, Homo sapiens
  misc_feature: Table A; Target 55011; HLA-A*29:02; ONECUT3; ENSG00000205922; TAA
LASVGHLY

SEQ ID NO: 55012 - protein, 8 aa, Homo sapiens
  misc_feature: Table A; Target 55012; HLA-A*30:02; ONECUT3; ENSG00000205922; TAA
LASVGHLY

SEQ ID NO: 55013 - protein, 8 aa, Homo sapiens
  misc_feature: Table A; Target 55013; HLA-B*15:03; ONECUT3; ENSG00000205922; TAA
LASVGHLY

SEQ ID NO: 55014 - protein, 8 aa, Homo sapiens
  misc_feature: Table A; Target 55014; HLA-B*46:01; ONECUT3; ENSG00000205922; TAA
LASVGHLY

SEQ ID NO: 55015 - protein, 8 aa, Homo sapiens
  misc_feature: Table A; Target 55015; HLA-B*58:01; ONECUT3; ENSG00000205922; TAA
LASVGHLY

SEQ ID NO: 55016 - protein, 8 aa, Homo sapiens
  misc_feature: Table A; Target 55016; HLA-C*02:02; ONECUT3; ENSG00000205922; TAA
LASVGHLY

SEQ ID NO: 55017 - protein, 8 aa, Homo sapiens
  misc_feature: Table A; Target 55017; HLA-C*03:03; ONECUT3; ENSG00000205922; TAA
LASVGHLY

SEQ ID NO: 55018 - protein, 8 aa, Homo sapiens
  misc_feature: Table A; Target 55018; HLA-C*03:04; ONECUT3; ENSG00000205922; TAA
LASVGHLY

SEQ ID NO: 55019 - protein, 8 aa, Homo sapiens
  misc_feature: Table A; Target 55019; HLA-C*05:01; ONECUT3; ENSG00000205922; TAA
LASVGHLY

SEQ ID NO: 55020 - protein, 8 aa, Homo sapiens
  misc_feature: Table A; Target 55020; HLA-C*16:01; ONECUT3; ENSG00000205922; TAA
LASVGHLY

SEQ ID NO: 55021 - protein, 8 aa, Homo sapiens
  misc_feature: Table A; Target 55021; HLA-C*16:02; ONECUT3; ENSG00000205922; TAA
LASVGHLY

SEQ ID NO: 55022 - protein, 9 aa, Homo sapiens
  misc_feature: Table A; Target 55022; HLA-A*30:01; ONECUT3; ENSG00000205922; TAA
LELNTVSNF

SEQ ID NO: 55023 - protein, 9 aa, Homo sapiens
  misc_feature: Table A; Target 55023; HLA-B*18:01; ONECUT3; ENSG00000205922; TAA
LELNTVSNF

SEQ ID NO: 55024 - protein, 9 aa, Homo sapiens
  misc_feature: Table A; Target 55024; HLA-B*37:01; ONECUT3; ENSG00000205922; TAA
LELNTVSNF

SEQ ID NO: 55025 - protein, 9 aa, Homo sapiens
  misc_feature: Table A; Target 55025; HLA-B*40:01; ONECUT3; ENSG00000205922; TAA
LELNTVSNF

SEQ ID NO: 55026 - protein, 9 aa, Homo sapiens
  misc_feature: Table A; Target 55026; HLA-B*44:02; ONECUT3; ENSG00000205922; TAA
LELNTVSNF

SEQ ID NO: 55027 - protein, 9 aa, Homo sapiens
  misc_feature: Table A; Target 55027; HLA-B*44:03; ONECUT3; ENSG00000205922; TAA
LELNTVSNF

SEQ ID NO: 55028 - protein, 9 aa, Homo sapiens
  misc_feature: Table A; Target 55028; HLA-B*49:01; ONECUT3; ENSG00000205922; TAA
LELNTVSNF

SEQ ID NO: 55029 - protein, 9 aa, Homo sapiens
  misc_feature: Table A; Target 55029; HLA-C*16:04; ONECUT3; ENSG00000205922; TAA
LELNTVSNF

SEQ ID NO: 55030 - protein, 10 aa, Homo sapiens
  misc_feature: Table A; Target 55030; HLA-B*49:01; ONECUT3; ENSG00000205922; TAA
LESLGGLHSV

SEQ ID NO: 55031 - protein, 9 aa, Homo sapiens
  misc_feature: Table A; Target 55031; HLA-C*06:02; ONECUT3; ENSG00000205922; TAA
LLAPLGGLA

SEQ ID NO: 55032 - protein, 10 aa, Homo sapiens
  misc_feature: Table A; Target 55032; HLA-A*02:01; ONECUT3; ENSG00000205922; TAA
LLAPLGGLAA

SEQ ID NO: 55033 - protein, 10 aa, Homo sapiens
  misc_feature: Table A; Target 55033; HLA-A*02:03; ONECUT3; ENSG00000205922; TAA
LLAPLGGLAA

SEQ ID NO: 55034 - protein, 10 aa, Homo sapiens
  misc_feature: Table A; Target 55034; HLA-A*02:04; ONECUT3; ENSG00000205922; TAA
LLAPLGGLAA

SEQ ID NO: 55035 - protein, 10 aa, Homo sapiens
  misc_feature: Table A; Target 55035; HLA-B*54:01; ONECUT3; ENSG00000205922; TAA
LLAPLGGLAA

SEQ ID NO: 55036 - protein, 10 aa, Homo sapiens
  misc_feature: Table A; Target 55036; HLA-B*56:01; ONECUT3; ENSG00000205922; TAA
LLAPLGGLAA

SEQ ID NO: 55037 - protein, 11 aa, Homo sapiens
  misc_feature: Table A; Target 55037; HLA-A*02:01; ONECUT3; ENSG00000205922; TAA
LLAPLGGLAAA

SEQ ID NO: 55038 - protein, 11 aa, Homo sapiens
  misc_feature: Table A; Target 55038; HLA-A*02:03; ONECUT3; ENSG00000205922; TAA
LLAPLGGLAAA

SEQ ID NO: 55039 - protein, 11 aa, Homo sapiens
  misc_feature: Table A; Target 55039; HLA-A*02:04; ONECUT3; ENSG00000205922; TAA
LLAPLGGLAAA

SEQ ID NO: 55040 - protein, 11 aa, Homo sapiens
  misc_feature: Table A; Target 55040; HLA-A*02:07; ONECUT3; ENSG00000205922; TAA
LLAPLGGLAAA

SEQ ID NO: 55041 - protein, 11 aa, Homo sapiens
  misc_feature: Table A; Target 55041; HLA-B*56:01; ONECUT3; ENSG00000205922; TAA
LLAPLGGLAAA

SEQ ID NO: 55042 - protein, 11 aa, Homo sapiens
  misc_feature: Table A; Target 55042; HLA-A*02:07; ONECUT3; ENSG00000205922; TAA
LLPPAAFEPHA

SEQ ID NO: 55043 - protein, 9 aa, Homo sapiens
  misc_feature: Table A; Target 55043; HLA-B*07:02; ONECUT3; ENSG00000205922; TAA
LPNALPPAL

SEQ ID NO: 55044 - protein, 9 aa, Homo sapiens
  misc_feature: Table A; Target 55044; HLA-B*35:01; ONECUT3; ENSG00000205922; TAA
LPNALPPAL

SEQ ID NO: 55045 - protein, 9 aa, Homo sapiens
  misc_feature: Table A; Target 55045; HLA-B*35:03; ONECUT3; ENSG00000205922; TAA
LPNALPPAL

SEQ ID NO: 55046 - protein, 9 aa, Homo sapiens
  misc_feature: Table A; Target 55046; HLA-B*51:01; ONECUT3; ENSG00000205922; TAA
LPNALPPAL

SEQ ID NO: 55047 - protein, 9 aa, Homo sapiens
  misc_feature: Table A; Target 55047; HLA-B*54:01; ONECUT3; ENSG00000205922; TAA
LPNALPPAL

SEQ ID NO: 55048 - protein, 9 aa, Homo sapiens
  misc_feature: Table A; Target 55048; HLA-B*56:01; ONECUT3; ENSG00000205922; TAA
LPNALPPAL

SEQ ID NO: 55049 - protein, 9 aa, Homo sapiens
  misc_feature: Table A; Target 55049; HLA-C*07:02; ONECUT3; ENSG00000205922; TAA
LPNALPPAL

SEQ ID NO: 55050 - protein, 9 aa, Homo sapiens
  misc_feature: Table A; Target 55050; HLA-C*14:02; ONECUT3; ENSG00000205922; TAA
LPNALPPAL

SEQ ID NO: 55051 - protein, 10 aa, Homo sapiens
  misc_feature: Table A; Target 55051; HLA-B*54:01; ONECUT3; ENSG00000205922; TAA
LPPAAFEPHA

SEQ ID NO: 55052 - protein, 11 aa, Homo sapiens
  misc_feature: Table A; Target 55052; HLA-B*54:01; ONECUT3; ENSG00000205922; TAA
LPPAAFEPHAA

SEQ ID NO: 55053 - protein, 8 aa, Homo sapiens
  misc_feature: Table A; Target 55053; HLA-B*51:01; ONECUT3; ENSG00000205922; TAA
LPPLAAVA

SEQ ID NO: 55054 - protein, 11 aa, Homo sapiens
  misc_feature: Table A; Target 55054; HLA-B*35:01; ONECUT3; ENSG00000205922; TAA
LPPLAAVADKF

SEQ ID NO: 55055 - protein, 8 aa, Homo sapiens
  misc_feature: Table A; Target 55055; HLA-C*01:02; ONECUT3; ENSG00000205922; TAA
LSPLPNAL

SEQ ID NO: 55056 - protein, 9 aa, Homo sapiens
  misc_feature: Table A; Target 55056; HLA-A*32:01; ONECUT3; ENSG00000205922; TAA
LVAPGRPGL

SEQ ID NO: 55057 - protein, 9 aa, Homo sapiens
  misc_feature: Table A; Target 55057; HLA-C*16:01; ONECUT3; ENSG00000205922; TAA
LVAPGRPGL

SEQ ID NO: 55058 - protein, 9 aa, Homo sapiens
  misc_feature: Table A; Target 55058; HLA-A*24:02; ONECUT3; ENSG00000205922; TAA
LYGPYGKEL

SEQ ID NO: 55059 - protein, 9 aa, Homo sapiens
  misc_feature: Table A; Target 55059; HLA-C*14:02; ONECUT3; ENSG00000205922; TAA
LYGPYGKEL

SEQ ID NO: 55060 - protein, 8 aa, Homo sapiens
  misc_feature: Table A; Target 55060; HLA-B*18:01; ONECUT3; ENSG00000205922; TAA
MELSLESL

SEQ ID NO: 55061 - protein, 9 aa, Homo sapiens
  misc_feature: Table A; Target 55061; HLA-A*23:01; ONECUT3; ENSG00000205922; TAA
MQVTISQQL

SEQ ID NO: 55062 - protein, 9 aa, Homo sapiens
  misc_feature: Table A; Target 55062; HLA-A*30:01; ONECUT3; ENSG00000205922; TAA
MQVTISQQL

SEQ ID NO: 55063 - protein, 9 aa, Homo sapiens
  misc_feature: Table A; Target 55063; HLA-B*13:02; ONECUT3; ENSG00000205922; TAA
MQVTISQQL

SEQ ID NO: 55064 - protein, 9 aa, Homo sapiens
  misc_feature: Table A; Target 55064; HLA-B*15:01; ONECUT3; ENSG00000205922; TAA
MQVTISQQL

SEQ ID NO: 55065 - protein, 9 aa, Homo sapiens
  misc_feature: Table A; Target 55065; HLA-B*15:03; ONECUT3; ENSG00000205922; TAA
MQVTISQQL

SEQ ID NO: 55066 - protein, 9 aa, Homo sapiens
  misc_feature: Table A; Target 55066; HLA-B*27:05; ONECUT3; ENSG00000205922; TAA
MQVTISQQL

SEQ ID NO: 55067 - protein, 9 aa, Homo sapiens
  misc_feature: Table A; Target 55067; HLA-B*35:03; ONECUT3; ENSG00000205922; TAA
MQVTISQQL

SEQ ID NO: 55068 - protein, 9 aa, Homo sapiens
  misc_feature: Table A; Target 55068; HLA-B*38:01; ONECUT3; ENSG00000205922; TAA
MQVTISQQL

SEQ ID NO: 55069 - protein, 9 aa, Homo sapiens
  misc_feature: Table A; Target 55069; HLA-B*39:01; ONECUT3; ENSG00000205922; TAA
MQVTISQQL

SEQ ID NO: 55070 - protein, 9 aa, Homo sapiens
  misc_feature: Table A; Target 55070; HLA-B*40:01; ONECUT3; ENSG00000205922; TAA
MQVTISQQL

SEQ ID NO: 55071 - protein, 9 aa, Homo sapiens
  misc_feature: Table A; Target 55071; HLA-C*02:02; ONECUT3; ENSG00000205922; TAA
MQVTISQQL

SEQ ID NO: 55072 - protein, 9 aa, Homo sapiens
  misc_feature: Table A; Target 55072; HLA-C*16:04; ONECUT3; ENSG00000205922; TAA
MQVTISQQL

SEQ ID NO: 55073 - protein, 8 aa, Homo sapiens
  misc_feature: Table A; Target 55073; HLA-C*16:01; ONECUT3; ENSG00000205922; TAA
MSALRLAA

SEQ ID NO: 55074 - protein, 8 aa, Homo sapiens
  misc_feature: Table A; Target 55074; HLA-A*33:01; ONECUT3; ENSG00000205922; TAA
NTKEVAQR

SEQ ID NO: 55075 - protein, 8 aa, Homo sapiens
  misc_feature: Table A; Target 55075; HLA-A*33:03; ONECUT3; ENSG00000205922; TAA
NTKEVAQR

SEQ ID NO: 55076 - protein, 11 aa, Homo sapiens
  misc_feature: Table A; Target 55076; HLA-A*23:01; ONECUT3; ENSG00000205922; TAA
PGGPAGATATF

SEQ ID NO: 55077 - protein, 11 aa, Homo sapiens
  misc_feature: Table A; Target 55077; HLA-A*24:02; ONECUT3; ENSG00000205922; TAA
PGGPAGATATF

SEQ ID NO: 55078 - protein, 11 aa, Homo sapiens
  misc_feature: Table A; Target 55078; HLA-A*30:02; ONECUT3; ENSG00000205922; TAA
PGGPAGATATF

SEQ ID NO: 55079 - protein, 11 aa, Homo sapiens
  misc_feature: Table A; Target 55079; HLA-B*07:02; ONECUT3; ENSG00000205922; TAA
PGGPAGATATF

SEQ ID NO: 55080 - protein, 11 aa, Homo sapiens
  misc_feature: Table A; Target 55080; HLA-C*04:01; ONECUT3; ENSG00000205922; TAA
PGGPAGATATF

SEQ ID NO: 55081 - protein, 11 aa, Homo sapiens
  misc_feature: Table A; Target 55081; HLA-C*07:02; ONECUT3; ENSG00000205922; TAA
PGGPAGATATF

SEQ ID NO: 55082 - protein, 9 aa, Homo sapiens
  misc_feature: Table A; Target 55082; HLA-A*24:02; ONECUT3; ENSG00000205922; TAA
PLAAVADKF

SEQ ID NO: 55083 - protein, 9 aa, Homo sapiens
  misc_feature: Table A; Target 55083; HLA-B*13:02; ONECUT3; ENSG00000205922; TAA
PQAIFAQRI

SEQ ID NO: 55084 - protein, 9 aa, Homo sapiens
  misc_feature: Table A; Target 55084; HLA-C*03:04; ONECUT3; ENSG00000205922; TAA
QAIFAQRIL

SEQ ID NO: 55085 - protein, 10 aa, Homo sapiens
  misc_feature: Table A; Target 55085; HLA-A*30:01; ONECUT3; ENSG00000205922; TAA
QEPEFQRMSA

SEQ ID NO: 55086 - protein, 9 aa, Homo sapiens
  misc_feature: Table A; Target 55086; HLA-B*37:01; ONECUT3; ENSG00000205922; TAA
QEQQKERAL

SEQ ID NO: 55087 - protein, 9 aa, Homo sapiens
  misc_feature: Table A; Target 55087; HLA-B*40:01; ONECUT3; ENSG00000205922; TAA
QEQQKERAL

SEQ ID NO: 55088 - protein, 9 aa, Homo sapiens
  misc_feature: Table A; Target 55088; HLA-B*44:02; ONECUT3; ENSG00000205922; TAA
QEQQKERAL

SEQ ID NO: 55089 - protein, 9 aa, Homo sapiens
  misc_feature: Table A; Target 55089; HLA-B*44:03; ONECUT3; ENSG00000205922; TAA
QEQQKERAL

SEQ ID NO: 55090 - protein, 9 aa, Homo sapiens
  misc_feature: Table A; Target 55090; HLA-B*39:01; ONECUT3; ENSG00000205922; TAA
QHAAAAAVA

SEQ ID NO: 55091 - protein, 9 aa, Homo sapiens
  misc_feature: Table A; Target 55091; HLA-A*02:01; ONECUT3; ENSG00000205922; TAA
QLGLELNTV

SEQ ID NO: 55092 - protein, 9 aa, Homo sapiens
  misc_feature: Table A; Target 55092; HLA-A*02:03; ONECUT3; ENSG00000205922; TAA
QLGLELNTV

SEQ ID NO: 55093 - protein, 9 aa, Homo sapiens
  misc_feature: Table A; Target 55093; HLA-B*56:01; ONECUT3; ENSG00000205922; TAA
QPPPPPPPP

SEQ ID NO: 55094 - protein, 9 aa, Homo sapiens
  misc_feature: Table A; Target 55094; HLA-C*04:01; ONECUT3; ENSG00000205922; TAA
QPPPPPPPP

SEQ ID NO: 55095 - protein, 10 aa, Homo sapiens
  misc_feature: Table A; Target 55095; HLA-A*02:01; ONECUT3; ENSG00000205922; TAA
QQLGLELNTV

SEQ ID NO: 55096 - protein, 10 aa, Homo sapiens
  misc_feature: Table A; Target 55096; HLA-B*13:02; ONECUT3; ENSG00000205922; TAA
QQLGLELNTV

SEQ ID NO: 55097 - protein, 11 aa, Homo sapiens
  misc_feature: Table A; Target 55097; HLA-A*01:01; ONECUT3; ENSG00000205922; TAA
RAALASVGHLY

SEQ ID NO: 55098 - protein, 11 aa, Homo sapiens
  misc_feature: Table A; Target 55098; HLA-A*30:02; ONECUT3; ENSG00000205922; TAA
RAALASVGHLY

SEQ ID NO: 55099 - protein, 11 aa, Homo sapiens
  misc_feature: Table A; Target 55099; HLA-B*57:01; ONECUT3; ENSG00000205922; TAA
RAALASVGHLY

SEQ ID NO: 55100 - protein, 10 aa, Homo sapiens
  misc_feature: Table A; Target 55100; HLA-A*30:02; ONECUT3; ENSG00000205922; TAA
RLAASVSGSF

SEQ ID NO: 55101 - protein, 11 aa, Homo sapiens
  misc_feature: Table A; Target 55101; HLA-B*07:02; ONECUT3; ENSG00000205922; TAA
RPGLVAGMASL

SEQ ID NO: 55102 - protein, 10 aa, Homo sapiens
  misc_feature: Table A; Target 55102; HLA-B*07:02; ONECUT3; ENSG00000205922; TAA
RPSKEMQVTI

SEQ ID NO: 55103 - protein, 10 aa, Homo sapiens
  misc_feature: Table A; Target 55103; HLA-B*56:01; ONECUT3; ENSG00000205922; TAA
RPSKEMQVTI

SEQ ID NO: 55104 - protein, 9 aa, Homo sapiens
  misc_feature: Table A; Target 55104; HLA-A*23:01; ONECUT3; ENSG00000205922; TAA
RYSIPQAIF

SEQ ID NO: 55105 - protein, 9 aa, Homo sapiens
  misc_feature: Table A; Target 55105; HLA-A*24:02; ONECUT3; ENSG00000205922; TAA
RYSIPQAIF

SEQ ID NO: 55106 - protein, 9 aa, Homo sapiens
  misc_feature: Table A; Target 55106; HLA-C*03:04; ONECUT3; ENSG00000205922; TAA
SAAAQHRGL

SEQ ID NO: 55107 - protein, 9 aa, Homo sapiens
  misc_feature: Table A; Target 55107; HLA-C*16:01; ONECUT3; ENSG00000205922; TAA
SAAAQHRGL

SEQ ID NO: 55108 - protein, 9 aa, Homo sapiens
  misc_feature: Table A; Target 55108; HLA-C*16:02; ONECUT3; ENSG00000205922; TAA
SAAAQHRGL

SEQ ID NO: 55109 - protein, 11 aa, Homo sapiens
  misc_feature: Table A; Target 55109; HLA-A*02:01; ONECUT3; ENSG00000205922; TAA
SLESLGGLHSV

SEQ ID NO: 55110 - protein, 11 aa, Homo sapiens
  misc_feature: Table A; Target 55110; HLA-A*02:04; ONECUT3; ENSG00000205922; TAA
SLESLGGLHSV

SEQ ID NO: 55111 - protein, 11 aa, Homo sapiens
  misc_feature: Table A; Target 55111; HLA-A*02:07; ONECUT3; ENSG00000205922; TAA
SLESLGGLHSV

SEQ ID NO: 55112 - protein, 11 aa, Homo sapiens
  misc_feature: Table A; Target 55112; HLA-B*55:01; ONECUT3; ENSG00000205922; TAA
SLESLGGLHSV

SEQ ID NO: 55113 - protein, 8 aa, Homo sapiens
  misc_feature: Table A; Target 55113; HLA-A*02:01; ONECUT3; ENSG00000205922; TAA
SLGGLHSV

SEQ ID NO: 55114 - protein, 8 aa, Homo sapiens
  misc_feature: Table A; Target 55114; HLA-A*02:03; ONECUT3; ENSG00000205922; TAA
SLGGLHSV

SEQ ID NO: 55115 - protein, 8 aa, Homo sapiens
  misc_feature: Table A; Target 55115; HLA-B*55:01; ONECUT3; ENSG00000205922; TAA
SLGGLHSV

SEQ ID NO: 55116 - protein, 9 aa, Homo sapiens
  misc_feature: Table A; Target 55116; HLA-B*07:02; ONECUT3; ENSG00000205922; TAA
SPGHARSAA

SEQ ID NO: 55117 - protein, 9 aa, Homo sapiens
  misc_feature: Table A; Target 55117; HLA-B*56:01; ONECUT3; ENSG00000205922; TAA
SPGHARSAA

SEQ ID NO: 55118 - protein, 10 aa, Homo sapiens
  misc_feature: Table A; Target 55118; HLA-B*56:01; ONECUT3; ENSG00000205922; TAA
SPGHARSAAA

SEQ ID NO: 55119 - protein, 10 aa, Homo sapiens
  misc_feature: Table A; Target 55119; HLA-B*56:01; ONECUT3; ENSG00000205922; TAA
SPLPNALPPA

SEQ ID NO: 55120 - protein, 9 aa, Homo sapiens
  misc_feature: Table A; Target 55120; HLA-B*54:01; ONECUT3; ENSG00000205922; TAA
SPLSPLPNA

SEQ ID NO: 55121 - protein, 9 aa, Homo sapiens
  misc_feature: Table A; Target 55121; HLA-B*55:01; ONECUT3; ENSG00000205922; TAA
SPLSPLPNA

SEQ ID NO: 55122 - protein, 9 aa, Homo sapiens
  misc_feature: Table A; Target 55122; HLA-B*56:01; ONECUT3; ENSG00000205922; TAA
SPLSPLPNA

SEQ ID NO: 55123 - protein, 10 aa, Homo sapiens
  misc_feature: Table A; Target 55123; HLA-B*07:02; ONECUT3; ENSG00000205922; TAA
SPLSPLPNAL

SEQ ID NO: 55124 - protein, 10 aa, Homo sapiens
  misc_feature: Table A; Target 55124; HLA-B*56:01; ONECUT3; ENSG00000205922; TAA
SPLSPLPNAL

SEQ ID NO: 55125 - protein, 10 aa, Homo sapiens
  misc_feature: Table A; Target 55125; HLA-C*07:02; ONECUT3; ENSG00000205922; TAA
SPLSPLPNAL

SEQ ID NO: 55126 - protein, 9 aa, Homo sapiens
  misc_feature: Table A; Target 55126; HLA-B*27:05; ONECUT3; ENSG00000205922; TAA
SQGTLSDLL

SEQ ID NO: 55127 - protein, 9 aa, Homo sapiens
  misc_feature: Table A; Target 55127; HLA-B*38:01; ONECUT3; ENSG00000205922; TAA
SQGTLSDLL

SEQ ID NO: 55128 - protein, 9 aa, Homo sapiens
  misc_feature: Table A; Target 55128; HLA-B*39:01; ONECUT3; ENSG00000205922; TAA
SQGTLSDLL

SEQ ID NO: 55129 - protein, 9 aa, Homo sapiens
  misc_feature: Table A; Target 55129; HLA-A*26:01; ONECUT3; ENSG00000205922; TAA
SVGHLYGPY

SEQ ID NO: 55130 - protein, 9 aa, Homo sapiens
  misc_feature: Table A; Target 55130; HLA-A*29:02; ONECUT3; ENSG00000205922; TAA
SVGHLYGPY

SEQ ID NO: 55131 - protein, 9 aa, Homo sapiens
  misc_feature: Table A; Target 55131; HLA-A*30:02; ONECUT3; ENSG00000205922; TAA
SVGHLYGPY

SEQ ID NO: 55132 - protein, 9 aa, Homo sapiens
  misc_feature: Table A; Target 55132; HLA-A*25:01; ONECUT3; ENSG00000205922; TAA
SVSGSFTLM

SEQ ID NO: 55133 - protein, 9 aa, Homo sapiens
  misc_feature: Table A; Target 55133; HLA-A*26:01; ONECUT3; ENSG00000205922; TAA
SVSGSFTLM

SEQ ID NO: 55134 - protein, 9 aa, Homo sapiens
  misc_feature: Table A; Target 55134; HLA-A*29:02; ONECUT3; ENSG00000205922; TAA
SVSGSFTLM

SEQ ID NO: 55135 - protein, 9 aa, Homo sapiens
  misc_feature: Table A; Target 55135; HLA-A*32:01; ONECUT3; ENSG00000205922; TAA
SVSGSFTLM

SEQ ID NO: 55136 - protein, 9 aa, Homo sapiens
  misc_feature: Table A; Target 55136; HLA-A*68:01; ONECUT3; ENSG00000205922; TAA
SVSGSFTLM

SEQ ID NO: 55137 - protein, 9 aa, Homo sapiens
  misc_feature: Table A; Target 55137; HLA-B*15:01; ONECUT3; ENSG00000205922; TAA
SVSGSFTLM

SEQ ID NO: 55138 - protein, 9 aa, Homo sapiens
  misc_feature: Table A; Target 55138; HLA-C*02:02; ONECUT3; ENSG00000205922; TAA
SVSGSFTLM

SEQ ID NO: 55139 - protein, 9 aa, Homo sapiens
  misc_feature: Table A; Target 55139; HLA-C*07:04; ONECUT3; ENSG00000205922; TAA
SVSGSFTLM

SEQ ID NO: 55140 - protein, 9 aa, Homo sapiens
  misc_feature: Table A; Target 55140; HLA-C*07:06; ONECUT3; ENSG00000205922; TAA
SVSGSFTLM

SEQ ID NO: 55141 - protein, 9 aa, Homo sapiens
  misc_feature: Table A; Target 55141; HLA-C*12:03; ONECUT3; ENSG00000205922; TAA
SVSGSFTLM

SEQ ID NO: 55142 - protein, 10 aa, Homo sapiens
  misc_feature: Table A; Target 55142; HLA-A*68:01; ONECUT3; ENSG00000205922; TAA
SVSGSFTLMR

SEQ ID NO: 55143 - protein, 9 aa, Homo sapiens
  misc_feature: Table A; Target 55143; HLA-B*08:01; ONECUT3; ENSG00000205922; TAA
TAELKRYSI

SEQ ID NO: 55144 - protein, 9 aa, Homo sapiens
  misc_feature: Table A; Target 55144; HLA-B*37:01; ONECUT3; ENSG00000205922; TAA
TDLQRRTLI

SEQ ID NO: 55145 - protein, 9 aa, Homo sapiens
  misc_feature: Table A; Target 55145; HLA-B*07:02; ONECUT3; ENSG00000205922; TAA
TPLQHLPPL

SEQ ID NO: 55146 - protein, 10 aa, Homo sapiens
  misc_feature: Table A; Target 55146; HLA-B*54:01; ONECUT3; ENSG00000205922; TAA
TPLQHLPPLA

SEQ ID NO: 55147 - protein, 11 aa, Homo sapiens
  misc_feature: Table A; Target 55147; HLA-B*54:01; ONECUT3; ENSG00000205922; TAA
TPLQHLPPLAA

SEQ ID NO: 55148 - protein, 11 aa, Homo sapiens
  misc_feature: Table A; Target 55148; HLA-B*56:01; ONECUT3; ENSG00000205922; TAA
TPLQHLPPLAA

SEQ ID NO: 55149 - protein, 10 aa, Homo sapiens
  misc_feature: Table A; Target 55149; HLA-A*68:01; ONECUT3; ENSG00000205922; TAA
TVSNFFMNAR

SEQ ID NO: 55150 - protein, 10 aa, Homo sapiens
  misc_feature: Table A; Target 55150; HLA-C*07:06; ONECUT3; ENSG00000205922; TAA
TVSNFFMNAR

SEQ ID NO: 55151 - protein, 8 aa, Homo sapiens
  misc_feature: Table A; Target 55151; HLA-C*05:01; ONECUT3; ENSG00000205922; TAA
VAGMASLL

SEQ ID NO: 55152 - protein, 9 aa, Homo sapiens
  misc_feature: Table A; Target 55152; HLA-B*46:01; ONECUT3; ENSG00000205922; TAA
VAHAQAGEL

SEQ ID NO: 55153 - protein, 9 aa, Homo sapiens
  misc_feature: Table A; Target 55153; HLA-C*01:02; ONECUT3; ENSG00000205922; TAA
VAHAQAGEL

SEQ ID NO: 55154 - protein, 9 aa, Homo sapiens
  misc_feature: Table A; Target 55154; HLA-C*03:03; ONECUT3; ENSG00000205922; TAA
VAHAQAGEL

SEQ ID NO: 55155 - protein, 9 aa, Homo sapiens
  misc_feature: Table A; Target 55155; HLA-C*03:04; ONECUT3; ENSG00000205922; TAA
VAHAQAGEL

SEQ ID NO: 55156 - protein, 9 aa, Homo sapiens
  misc_feature: Table A; Target 55156; HLA-C*14:02; ONECUT3; ENSG00000205922; TAA
VAHAQAGEL

SEQ ID NO: 55157 - protein, 9 aa, Homo sapiens
  misc_feature: Table A; Target 55157; HLA-C*16:02; ONECUT3; ENSG00000205922; TAA
VAHAQAGEL

SEQ ID NO: 55158 - protein, 9 aa, Homo sapiens
  misc_feature: Table A; Target 55158; HLA-B*51:01; ONECUT3; ENSG00000205922; TAA
VAPGRPGLV

SEQ ID NO: 55159 - protein, 9 aa, Homo sapiens
  misc_feature: Table A; Target 55159; HLA-A*23:01; ONECUT3; ENSG00000205922; TAA
VAQRITAEL

SEQ ID NO: 55160 - protein, 9 aa, Homo sapiens
  misc_feature: Table A; Target 55160; HLA-A*24:02; ONECUT3; ENSG00000205922; TAA
VAQRITAEL

SEQ ID NO: 55161 - protein, 9 aa, Homo sapiens
  misc_feature: Table A; Target 55161; HLA-B*07:02; ONECUT3; ENSG00000205922; TAA
VAQRITAEL

SEQ ID NO: 55162 - protein, 9 aa, Homo sapiens
  misc_feature: Table A; Target 55162; HLA-B*15:01; ONECUT3; ENSG00000205922; TAA
VAQRITAEL

SEQ ID NO: 55163 - protein, 9 aa, Homo sapiens
  misc_feature: Table A; Target 55163; HLA-B*35:03; ONECUT3; ENSG00000205922; TAA
VAQRITAEL

SEQ ID NO: 55164 - protein, 9 aa, Homo sapiens
  misc_feature: Table A; Target 55164; HLA-B*46:01; ONECUT3; ENSG00000205922; TAA
VAQRITAEL

SEQ ID NO: 55165 - protein, 9 aa, Homo sapiens
  misc_feature: Table A; Target 55165; HLA-B*58:01; ONECUT3; ENSG00000205922; TAA
VAQRITAEL

SEQ ID NO: 55166 - protein, 9 aa, Homo sapiens
  misc_feature: Table A; Target 55166; HLA-C*01:02; ONECUT3; ENSG00000205922; TAA
VAQRITAEL

SEQ ID NO: 55167 - protein, 9 aa, Homo sapiens
  misc_feature: Table A; Target 55167; HLA-C*02:02; ONECUT3; ENSG00000205922; TAA
VAQRITAEL

SEQ ID NO: 55168 - protein, 9 aa, Homo sapiens
  misc_feature: Table A; Target 55168; HLA-C*03:03; ONECUT3; ENSG00000205922; TAA
VAQRITAEL

SEQ ID NO: 55169 - protein, 9 aa, Homo sapiens
  misc_feature: Table A; Target 55169; HLA-C*03:04; ONECUT3; ENSG00000205922; TAA
VAQRITAEL

SEQ ID NO: 55170 - protein, 9 aa, Homo sapiens
  misc_feature: Table A; Target 55170; HLA-C*05:01; ONECUT3; ENSG00000205922; TAA
VAQRITAEL

SEQ ID NO: 55171 - protein, 9 aa, Homo sapiens
  misc_feature: Table A; Target 55171; HLA-C*12:03; ONECUT3; ENSG00000205922; TAA
VAQRITAEL

SEQ ID NO: 55172 - protein, 9 aa, Homo sapiens
  misc_feature: Table A; Target 55172; HLA-C*14:02; ONECUT3; ENSG00000205922; TAA
VAQRITAEL

SEQ ID NO: 55173 - protein, 9 aa, Homo sapiens
  misc_feature: Table A; Target 55173; HLA-C*16:01; ONECUT3; ENSG00000205922; TAA
VAQRITAEL

SEQ ID NO: 55174 - protein, 9 aa, Homo sapiens
  misc_feature: Table A; Target 55174; HLA-C*16:02; ONECUT3; ENSG00000205922; TAA
VAQRITAEL

SEQ ID NO: 55175 - protein, 9 aa, Homo sapiens
  misc_feature: Table A; Target 55175; HLA-C*16:04; ONECUT3; ENSG00000205922; TAA
VAQRITAEL

SEQ ID NO: 55176 - protein, 10 aa, Homo sapiens
  misc_feature: Table A; Target 55176; HLA-A*03:02; ONECUT3; ENSG00000205922; TAA
VAQRITAELK

SEQ ID NO: 55177 - protein, 9 aa, Homo sapiens
  misc_feature: Table A; Target 55177; HLA-A*31:01; ONECUT3; ENSG00000205922; TAA
VSNFFMNAR

SEQ ID NO: 55178 - protein, 9 aa, Homo sapiens
  misc_feature: Table A; Target 55178; HLA-A*33:01; ONECUT3; ENSG00000205922; TAA
VSNFFMNAR

SEQ ID NO: 55179 - protein, 9 aa, Homo sapiens
  misc_feature: Table A; Target 55179; HLA-B*58:01; ONECUT3; ENSG00000205922; TAA
VTISQQLGL

SEQ ID NO: 55180 - protein, 8 aa, Homo sapiens
  misc_feature: Table A; Target 55180; HLA-B*46:01; ONECUT3; ENSG00000205922; TAA
YGKELPAM

SEQ ID NO: 55181 - protein, 8 aa, Homo sapiens
  misc_feature: Table A; Target 55181; HLA-C*01:02; ONECUT3; ENSG00000205922; TAA
YGPYGKEL

SEQ ID NO: 55182 - protein, 8 aa, Homo sapiens
  misc_feature: Table A; Target 55182; HLA-C*03:03; ONECUT3; ENSG00000205922; TAA
YGPYGKEL

SEQ ID NO: 55183 - protein, 8 aa, Homo sapiens
  misc_feature: Table A; Target 55183; HLA-C*03:04; ONECUT3; ENSG00000205922; TAA
YGPYGKEL

SEQ ID NO: 55184 - protein, 9 aa, Homo sapiens
  misc_feature: Table A; Target 55184; HLA-B*54:01; ONECUT3; ENSG00000205922; TAA
YSIPQAIFA

SEQ ID NO: 55185 - protein, 11 aa, Homo sapiens
  misc_feature: Table A; Target 55185; HLA-A*31:01; ONECUT3; ENSG00000205922; TAA
YSIPQAIFAQR

SEQ ID NO: 55186 - protein, 9 aa, Homo sapiens
  misc_feature: Table A; Target 55186; HLA-A*01:01; ONECUT3; ENSG00000205922; TAA
YTTLTPLQH

SEQ ID NO: 55187 - protein, 9 aa, Homo sapiens
  misc_feature: Table A; Target 55187; HLA-C*16:01; OR2A4; ENSG00000180658; TAA
ACNTVPRML

SEQ ID NO: 55188 - protein, 9 aa, Homo sapiens
  misc_feature: Table A; Target 55188; HLA-B*37:01; OR2A4; ENSG00000180658; TAA
ADTHINENM

SEQ ID NO: 55189 - protein, 10 aa, Homo sapiens
  misc_feature: Table A; Target 55189; HLA-A*30:02; OR2A4; ENSG00000180658; TAA
AIIMYVGPRY

SEQ ID NO: 55190 - protein, 10 aa, Homo sapiens
  misc_feature: Table A; Target 55190; HLA-A*02:01; OR2A4; ENSG00000180658; TAA
AILQIQSREV

SEQ ID NO: 55191 - protein, 9 aa, Homo sapiens
  misc_feature: Table A; Target 55191; HLA-C*01:02; OR2A4; ENSG00000180658; TAA
AISGLVGPL

SEQ ID NO: 55192 - protein, 9 aa, Homo sapiens
  misc_feature: Table A; Target 55192; HLA-C*14:02; OR2A4; ENSG00000180658; TAA
AISGLVGPL

SEQ ID NO: 55193 - protein, 9 aa, Homo sapiens
  misc_feature: Table A; Target 55193; HLA-A*02:01; OR2A4; ENSG00000180658; TAA
AVTECLLLV

SEQ ID NO: 55194 - protein, 9 aa, Homo sapiens
  misc_feature: Table A; Target 55194; HLA-B*13:02; OR2A4; ENSG00000180658; TAA
AVTECLLLV

SEQ ID NO: 55195 - protein, 9 aa, Homo sapiens
  misc_feature: Table A; Target 55195; HLA-A*02:01; OR2A4; ENSG00000180658; TAA
AVTSWTTGV

SEQ ID NO: 55196 - protein, 9 aa, Homo sapiens
  misc_feature: Table A; Target 55196; HLA-A*02:03; OR2A4; ENSG00000180658; TAA
AVTSWTTGV

SEQ ID NO: 55197 - protein, 9 aa, Homo sapiens
  misc_feature: Table A; Target 55197; HLA-A*02:04; OR2A4; ENSG00000180658; TAA
AVTSWTTGV

SEQ ID NO: 55198 - protein, 9 aa, Homo sapiens
  misc_feature: Table A; Target 55198; HLA-B*13:02; OR2A4; ENSG00000180658; TAA
AVTSWTTGV

SEQ ID NO: 55199 - protein, 9 aa, Homo sapiens
  misc_feature: Table A; Target 55199; HLA-B*56:01; OR2A4; ENSG00000180658; TAA
AVVDIAYAC

SEQ ID NO: 55200 - protein, 9 aa, Homo sapiens
  misc_feature: Table A; Target 55200; HLA-A*68:01; OR2A4; ENSG00000180658; TAA
CAILQIQSR

SEQ ID NO: 55201 - protein, 9 aa, Homo sapiens
  misc_feature: Table A; Target 55201; HLA-C*07:06; OR2A4; ENSG00000180658; TAA
CAILQIQSR

SEQ ID NO: 55202 - protein, 9 aa, Homo sapiens
  misc_feature: Table A; Target 55202; HLA-A*30:01; OR2A4; ENSG00000180658; TAA
CEILAVLKL

SEQ ID NO: 55203 - protein, 9 aa, Homo sapiens
  misc_feature: Table A; Target 55203; HLA-B*40:01; OR2A4; ENSG00000180658; TAA
CEILAVLKL

SEQ ID NO: 55204 - protein, 9 aa, Homo sapiens
  misc_feature: Table A; Target 55204; HLA-B*40:02; OR2A4; ENSG00000180658; TAA
CEILAVLKL

SEQ ID NO: 55205 - protein, 9 aa, Homo sapiens
  misc_feature: Table A; Target 55205; HLA-B*44:02; OR2A4; ENSG00000180658; TAA
CEILAVLKL

SEQ ID NO: 55206 - protein, 9 aa, Homo sapiens
  misc_feature: Table A; Target 55206; HLA-B*44:03; OR2A4; ENSG00000180658; TAA
CEILAVLKL

SEQ ID NO: 55207 - protein, 9 aa, Homo sapiens
  misc_feature: Table A; Target 55207; HLA-B*49:01; OR2A4; ENSG00000180658; TAA
CEILAVLKL

SEQ ID NO: 55208 - protein, 9 aa, Homo sapiens
  misc_feature: Table A; Target 55208; HLA-A*25:01; OR2A4; ENSG00000180658; TAA
CITLAVTSW

SEQ ID NO: 55209 - protein, 9 aa, Homo sapiens
  misc_feature: Table A; Target 55209; HLA-A*32:01; OR2A4; ENSG00000180658; TAA
CITLAVTSW

SEQ ID NO: 55210 - protein, 9 aa, Homo sapiens
  misc_feature: Table A; Target 55210; HLA-A*29:02; OR2A4; ENSG00000180658; TAA
CLLLVVMSY

SEQ ID NO: 55211 - protein, 9 aa, Homo sapiens
  misc_feature: Table A; Target 55211; HLA-A*25:01; OR2A4; ENSG00000180658; TAA
DNITSIREF

SEQ ID NO: 55212 - protein, 9 aa, Homo sapiens
  misc_feature: Table A; Target 55212; HLA-A*26:01; OR2A4; ENSG00000180658; TAA
DNITSIREF

SEQ ID NO: 55213 - protein, 9 aa, Homo sapiens
  misc_feature: Table A; Target 55213; HLA-A*33:01; OR2A4; ENSG00000180658; TAA
DNITSIREF

SEQ ID NO: 55214 - protein, 8 aa, Homo sapiens
  misc_feature: Table A; Target 55214; HLA-B*08:01; OR2A4; ENSG00000180658; TAA
DSRLHAPM

SEQ ID NO: 55215 - protein, 8 aa, Homo sapiens
  misc_feature: Table A; Target 55215; HLA-A*33:03; OR2A4; ENSG00000180658; TAA
EVKNTLKR

SEQ ID NO: 55216 - protein, 9 aa, Homo sapiens
  misc_feature: Table A; Target 55216; HLA-B*38:01; OR2A4; ENSG00000180658; TAA
FHSLFNPML

SEQ ID NO: 55217 - protein, 8 aa, Homo sapiens
  misc_feature: Table A; Target 55217; HLA-A*02:04; OR2A4; ENSG00000180658; TAA
FLFSTFAV

SEQ ID NO: 55218 - protein, 9 aa, Homo sapiens
  misc_feature: Table A; Target 55218; HLA-B*07:02; OR2A4; ENSG00000180658; TAA
FPVGPRIQM

SEQ ID NO: 55219 - protein, 9 aa, Homo sapiens
  misc_feature: Table A; Target 55219; HLA-B*35:01; OR2A4; ENSG00000180658; TAA
FPVGPRIQM

SEQ ID NO: 55220 - protein, 9 aa, Homo sapiens
  misc_feature: Table A; Target 55220; HLA-B*35:03; OR2A4; ENSG00000180658; TAA
FPVGPRIQM

SEQ ID NO: 55221 - protein, 9 aa, Homo sapiens
  misc_feature: Table A; Target 55221; HLA-B*54:01; OR2A4; ENSG00000180658; TAA
FPVGPRIQM

SEQ ID NO: 55222 - protein, 9 aa, Homo sapiens
  misc_feature: Table A; Target 55222; HLA-B*55:01; OR2A4; ENSG00000180658; TAA
FPVGPRIQM

SEQ ID NO: 55223 - protein, 9 aa, Homo sapiens
  misc_feature: Table A; Target 55223; HLA-B*56:01; OR2A4; ENSG00000180658; TAA
FPVGPRIQM

SEQ ID NO: 55224 - protein, 9 aa, Homo sapiens
  misc_feature: Table A; Target 55224; HLA-C*07:02; OR2A4; ENSG00000180658; TAA
FPVGPRIQM

SEQ ID NO: 55225 - protein, 10 aa, Homo sapiens
  misc_feature: Table A; Target 55225; HLA-B*35:03; OR2A4; ENSG00000180658; TAA
FPVGPRIQML

SEQ ID NO: 55226 - protein, 10 aa, Homo sapiens
  misc_feature: Table A; Target 55226; HLA-C*07:02; OR2A4; ENSG00000180658; TAA
FPVGPRIQML

SEQ ID NO: 55227 - protein, 9 aa, Homo sapiens
  misc_feature: Table A; Target 55227; HLA-A*02:04; OR2A4; ENSG00000180658; TAA
FSLFYVFTL

SEQ ID NO: 55228 - protein, 10 aa, Homo sapiens
  misc_feature: Table A; Target 55228; HLA-B*44:02; OR2A4; ENSG00000180658; TAA
GDNITSIREF

SEQ ID NO: 55229 - protein, 8 aa, Homo sapiens
  misc_feature: Table A; Target 55229; HLA-A*02:04; OR2A4; ENSG00000180658; TAA
GLFSLFYV

SEQ ID NO: 55230 - protein, 9 aa, Homo sapiens
  misc_feature: Table A; Target 55230; HLA-A*29:02; OR2A4; ENSG00000180658; TAA
GLFSLFYVF

SEQ ID NO: 55231 - protein, 11 aa, Homo sapiens
  misc_feature: Table A; Target 55231; HLA-A*02:04; OR2A4; ENSG00000180658; TAA
GLFSLFYVFTL

SEQ ID NO: 55232 - protein, 9 aa, Homo sapiens
  misc_feature: Table A; Target 55232; HLA-A*02:04; OR2A4; ENSG00000180658; TAA
GLISLDSRL

SEQ ID NO: 55233 - protein, 9 aa, Homo sapiens
  misc_feature: Table A; Target 55233; HLA-A*02:01; OR2A4; ENSG00000180658; TAA
GLVGPLSTI

SEQ ID NO: 55234 - protein, 9 aa, Homo sapiens
  misc_feature: Table A; Target 55234; HLA-A*02:03; OR2A4; ENSG00000180658; TAA
GLVGPLSTI

SEQ ID NO: 55235 - protein, 9 aa, Homo sapiens
  misc_feature: Table A; Target 55235; HLA-B*13:02; OR2A4; ENSG00000180658; TAA
GLVGPLSTI

SEQ ID NO: 55236 - protein, 9 aa, Homo sapiens
  misc_feature: Table A; Target 55236; HLA-B*46:01; OR2A4; ENSG00000180658; TAA
GLVGPLSTI

SEQ ID NO: 55237 - protein, 9 aa, Homo sapiens
  misc_feature: Table A; Target 55237; HLA-B*55:01; OR2A4; ENSG00000180658; TAA
GLVGPLSTI

SEQ ID NO: 55238 - protein, 10 aa, Homo sapiens
  misc_feature: Table A; Target 55238; HLA-A*30:02; OR2A4; ENSG00000180658; TAA
GPLSTIVVSY

SEQ ID NO: 55239 - protein, 10 aa, Homo sapiens
  misc_feature: Table A; Target 55239; HLA-B*35:01; OR2A4; ENSG00000180658; TAA
GPLSTIVVSY

SEQ ID NO: 55240 - protein, 9 aa, Homo sapiens
  misc_feature: Table A; Target 55240; HLA-C*01:02; OR2A4; ENSG00000180658; TAA
GTILGLISL

SEQ ID NO: 55241 - protein, 8 aa, Homo sapiens
  misc_feature: Table A; Target 55241; HLA-B*08:01; OR2A4; ENSG00000180658; TAA
HINENMVL

SEQ ID NO: 55242 - protein, 8 aa, Homo sapiens
  misc_feature: Table A; Target 55242; HLA-C*03:04; OR2A4; ENSG00000180658; TAA
HINENMVL

SEQ ID NO: 55243 - protein, 9 aa, Homo sapiens
  misc_feature: Table A; Target 55243; HLA-B*54:01; OR2A4; ENSG00000180658; TAA
HINENMVLA

SEQ ID NO: 55244 - protein, 9 aa, Homo sapiens
  misc_feature: Table A; Target 55244; HLA-A*01:01; OR2A4; ENSG00000180658; TAA
HLAVVDIAY

SEQ ID NO: 55245 - protein, 9 aa, Homo sapiens
  misc_feature: Table A; Target 55245; HLA-A*25:01; OR2A4; ENSG00000180658; TAA
HLAVVDIAY

SEQ ID NO: 55246 - protein, 9 aa, Homo sapiens
  misc_feature: Table A; Target 55246; HLA-A*26:01; OR2A4; ENSG00000180658; TAA
HLAVVDIAY

SEQ ID NO: 55247 - protein, 9 aa, Homo sapiens
  misc_feature: Table A; Target 55247; HLA-A*29:02; OR2A4; ENSG00000180658; TAA
HLAVVDIAY

SEQ ID NO: 55248 - protein, 9 aa, Homo sapiens
  misc_feature: Table A; Target 55248; HLA-A*30:02; OR2A4; ENSG00000180658; TAA
HLAVVDIAY

SEQ ID NO: 55249 - protein, 9 aa, Homo sapiens
  misc_feature: Table A; Target 55249; HLA-A*32:01; OR2A4; ENSG00000180658; TAA
HLAVVDIAY

SEQ ID NO: 55250 - protein, 9 aa, Homo sapiens
  misc_feature: Table A; Target 55250; HLA-B*15:01; OR2A4; ENSG00000180658; TAA
HLAVVDIAY

SEQ ID NO: 55251 - protein, 9 aa, Homo sapiens
  misc_feature: Table A; Target 55251; HLA-B*15:03; OR2A4; ENSG00000180658; TAA
HLAVVDIAY

SEQ ID NO: 55252 - protein, 9 aa, Homo sapiens
  misc_feature: Table A; Target 55252; HLA-B*18:01; OR2A4; ENSG00000180658; TAA
HLAVVDIAY

SEQ ID NO: 55253 - protein, 9 aa, Homo sapiens
  misc_feature: Table A; Target 55253; HLA-B*35:01; OR2A4; ENSG00000180658; TAA
HLAVVDIAY

SEQ ID NO: 55254 - protein, 9 aa, Homo sapiens
  misc_feature: Table A; Target 55254; HLA-B*46:01; OR2A4; ENSG00000180658; TAA
HLAVVDIAY

SEQ ID NO: 55255 - protein, 9 aa, Homo sapiens
  misc_feature: Table A; Target 55255; HLA-B*55:01; OR2A4; ENSG00000180658; TAA
HLAVVDIAY

SEQ ID NO: 55256 - protein, 9 aa, Homo sapiens
  misc_feature: Table A; Target 55256; HLA-C*02:02; OR2A4; ENSG00000180658; TAA
HLAVVDIAY

SEQ ID NO: 55257 - protein, 9 aa, Homo sapiens
  misc_feature: Table A; Target 55257; HLA-C*03:03; OR2A4; ENSG00000180658; TAA
HLAVVDIAY

SEQ ID NO: 55258 - protein, 9 aa, Homo sapiens
  misc_feature: Table A; Target 55258; HLA-C*07:04; OR2A4; ENSG00000180658; TAA
HLAVVDIAY

SEQ ID NO: 55259 - protein, 9 aa, Homo sapiens
  misc_feature: Table A; Target 55259; HLA-C*16:01; OR2A4; ENSG00000180658; TAA
HLAVVDIAY

SEQ ID NO: 55260 - protein, 10 aa, Homo sapiens
  misc_feature: Table A; Target 55260; HLA-A*02:03; OR2A4; ENSG00000180658; TAA
HLAVVDIAYA

SEQ ID NO: 55261 - protein, 9 aa, Homo sapiens
  misc_feature: Table A; Target 55261; HLA-A*01:01; OR2A4; ENSG00000180658; TAA
HLCVIGLVY

SEQ ID NO: 55262 - protein, 9 aa, Homo sapiens
  misc_feature: Table A; Target 55262; HLA-A*29:02; OR2A4; ENSG00000180658; TAA
HLCVIGLVY

SEQ ID NO: 55263 - protein, 8 aa, Homo sapiens
  misc_feature: Table A; Target 55263; HLA-B*07:02; OR2A4; ENSG00000180658; TAA
HPAKPISF

SEQ ID NO: 55264 - protein, 8 aa, Homo sapiens
  misc_feature: Table A; Target 55264; HLA-B*08:01; OR2A4; ENSG00000180658; TAA
HPAKPISF

SEQ ID NO: 55265 - protein, 8 aa, Homo sapiens
  misc_feature: Table A; Target 55265; HLA-B*35:01; OR2A4; ENSG00000180658; TAA
HPAKPISF

SEQ ID NO: 55266 - protein, 8 aa, Homo sapiens
  misc_feature: Table A; Target 55266; HLA-C*07:02; OR2A4; ENSG00000180658; TAA
HPAKPISF

SEQ ID NO: 55267 - protein, 9 aa, Homo sapiens
  misc_feature: Table A; Target 55267; HLA-B*54:01; OR2A4; ENSG00000180658; TAA
HPAKPISFA

SEQ ID NO: 55268 - protein, 9 aa, Homo sapiens
  misc_feature: Table A; Target 55268; HLA-B*55:01; OR2A4; ENSG00000180658; TAA
HPAKPISFA

SEQ ID NO: 55269 - protein, 9 aa, Homo sapiens
  misc_feature: Table A; Target 55269; HLA-B*56:01; OR2A4; ENSG00000180658; TAA
HPAKPISFA

SEQ ID NO: 55270 - protein, 8 aa, Homo sapiens
  misc_feature: Table A; Target 55270; HLA-B*51:01; OR2A4; ENSG00000180658; TAA
IAYACNTV

SEQ ID NO: 55271 - protein, 9 aa, Homo sapiens
  misc_feature: Table A; Target 55271; HLA-A*29:02; OR2A4; ENSG00000180658; TAA
IIMYVGPRY

SEQ ID NO: 55272 - protein, 9 aa, Homo sapiens
  misc_feature: Table A; Target 55272; HLA-A*02:01; OR2A4; ENSG00000180658; TAA
ILQIQSREV

SEQ ID NO: 55273 - protein, 9 aa, Homo sapiens
  misc_feature: Table A; Target 55273; HLA-A*02:03; OR2A4; ENSG00000180658; TAA
ILQIQSREV

SEQ ID NO: 55274 - protein, 9 aa, Homo sapiens
  misc_feature: Table A; Target 55274; HLA-C*16:02; OR2A4; ENSG00000180658; TAA
ILQIQSREV

SEQ ID NO: 55275 - protein, 11 aa, Homo sapiens
  misc_feature: Table A; Target 55275; HLA-A*31:01; OR2A4; ENSG00000180658; TAA
ILQIQSREVQR

SEQ ID NO: 55276 - protein, 8 aa, Homo sapiens
  misc_feature: Table A; Target 55276; HLA-B*15:03; OR2A4; ENSG00000180658; TAA
IMYVGPRY

SEQ ID NO: 55277 - protein, 8 aa, Homo sapiens
  misc_feature: Table A; Target 55277; HLA-B*46:01; OR2A4; ENSG00000180658; TAA
IMYVGPRY

SEQ ID NO: 55278 - protein, 8 aa, Homo sapiens
  misc_feature: Table A; Target 55278; HLA-C*16:01; OR2A4; ENSG00000180658; TAA
IMYVGPRY

SEQ ID NO: 55279 - protein, 9 aa, Homo sapiens
  misc_feature: Table A; Target 55279; HLA-B*27:05; OR2A4; ENSG00000180658; TAA
IQSREVQRK

SEQ ID NO: 55280 - protein, 8 aa, Homo sapiens
  misc_feature: Table A; Target 55280; HLA-A*25:01; OR2A4; ENSG00000180658; TAA
ITLAVTSW

SEQ ID NO: 55281 - protein, 8 aa, Homo sapiens
  misc_feature: Table A; Target 55281; HLA-A*32:01; OR2A4; ENSG00000180658; TAA
ITLAVTSW

SEQ ID NO: 55282 - protein, 8 aa, Homo sapiens
  misc_feature: Table A; Target 55282; HLA-B*57:01; OR2A4; ENSG00000180658; TAA
ITLAVTSW

SEQ ID NO: 55283 - protein, 8 aa, Homo sapiens
  misc_feature: Table A; Target 55283; HLA-B*58:01; OR2A4; ENSG00000180658; TAA
ITLAVTSW

SEQ ID NO: 55284 - protein, 8 aa, Homo sapiens
  misc_feature: Table A; Target 55284; HLA-B*08:01; OR2A4; ENSG00000180658; TAA
KNTLKRVL

SEQ ID NO: 55285 - protein, 10 aa, Homo sapiens
  misc_feature: Table A; Target 55285; HLA-C*06:02; OR2A4; ENSG00000180658; TAA
KRVLGVERAL

SEQ ID NO: 55286 - protein, 10 aa, Homo sapiens
  misc_feature: Table A; Target 55286; HLA-C*07:02; OR2A4; ENSG00000180658; TAA
KRVLGVERAL

SEQ ID NO: 55287 - protein, 9 aa, Homo sapiens
  misc_feature: Table A; Target 55287; HLA-A*24:02; OR2A4; ENSG00000180658; TAA
KYLLLFHSL

SEQ ID NO: 55288 - protein, 8 aa, Homo sapiens
  misc_feature: Table A; Target 55288; HLA-B*15:01; OR2A4; ENSG00000180658; TAA
LAVVDIAY

SEQ ID NO: 55289 - protein, 8 aa, Homo sapiens
  misc_feature: Table A; Target 55289; HLA-B*35:01; OR2A4; ENSG00000180658; TAA
LAVVDIAY

SEQ ID NO: 55290 - protein, 8 aa, Homo sapiens
  misc_feature: Table A; Target 55290; HLA-B*39:01; OR2A4; ENSG00000180658; TAA
LAVVDIAY

SEQ ID NO: 55291 - protein, 8 aa, Homo sapiens
  misc_feature: Table A; Target 55291; HLA-B*46:01; OR2A4; ENSG00000180658; TAA
LAVVDIAY

SEQ ID NO: 55292 - protein, 8 aa, Homo sapiens
  misc_feature: Table A; Target 55292; HLA-B*55:01; OR2A4; ENSG00000180658; TAA
LAVVDIAY

SEQ ID NO: 55293 - protein, 8 aa, Homo sapiens
  misc_feature: Table A; Target 55293; HLA-C*03:03; OR2A4; ENSG00000180658; TAA
LAVVDIAY

SEQ ID NO: 55294 - protein, 8 aa, Homo sapiens
  misc_feature: Table A; Target 55294; HLA-C*07:04; OR2A4; ENSG00000180658; TAA
LAVVDIAY

SEQ ID NO: 55295 - protein, 9 aa, Homo sapiens
  misc_feature: Table A; Target 55295; HLA-C*02:02; OR2A4; ENSG00000180658; TAA
LAVVDIAYA

SEQ ID NO: 55296 - protein, 9 aa, Homo sapiens
  misc_feature: Table A; Target 55296; HLA-A*29:02; OR2A4; ENSG00000180658; TAA
LFGLFSLFY

SEQ ID NO: 55297 - protein, 9 aa, Homo sapiens
  misc_feature: Table A; Target 55297; HLA-B*51:01; OR2A4; ENSG00000180658; TAA
LGFPVGPRI

SEQ ID NO: 55298 - protein, 9 aa, Homo sapiens
  misc_feature: Table A; Target 55298; HLA-A*24:02; OR2A4; ENSG00000180658; TAA
LHPAKPISF

SEQ ID NO: 55299 - protein, 8 aa, Homo sapiens
  misc_feature: Table A; Target 55299; HLA-A*02:04; OR2A4; ENSG00000180658; TAA
LLFGLFSL

SEQ ID NO: 55300 - protein, 10 aa, Homo sapiens
  misc_feature: Table A; Target 55300; HLA-A*29:02; OR2A4; ENSG00000180658; TAA
LLFGLFSLFY

SEQ ID NO: 55301 - protein, 10 aa, Homo sapiens
  misc_feature: Table A; Target 55301; HLA-A*24:02; OR2A4; ENSG00000180658; TAA
LLHPAKPISF

SEQ ID NO: 55302 - protein, 10 aa, Homo sapiens
  misc_feature: Table A; Target 55302; HLA-B*08:01; OR2A4; ENSG00000180658; TAA
LLHPAKPISF

SEQ ID NO: 55303 - protein, 10 aa, Homo sapiens
  misc_feature: Table A; Target 55303; HLA-B*46:01; OR2A4; ENSG00000180658; TAA
LLHPAKPISF

SEQ ID NO: 55304 - protein, 9 aa, Homo sapiens
  misc_feature: Table A; Target 55304; HLA-A*02:01; OR2A4; ENSG00000180658; TAA
LLLGFPVGP

SEQ ID NO: 55305 - protein, 11 aa, Homo sapiens
  misc_feature: Table A; Target 55305; HLA-A*02:04; OR2A4; ENSG00000180658; TAA
LLLGFPVGPRI

SEQ ID NO: 55306 - protein, 9 aa, Homo sapiens
  misc_feature: Table A; Target 55306; HLA-B*51:01; OR2A4; ENSG00000180658; TAA
LPFCRPQKI

SEQ ID NO: 55307 - protein, 11 aa, Homo sapiens
  misc_feature: Table A; Target 55307; HLA-A*01:01; OR2A4; ENSG00000180658; TAA
LSHLAVVDIAY

SEQ ID NO: 55308 - protein, 9 aa, Homo sapiens
  misc_feature: Table A; Target 55308; HLA-A*29:02; OR2A4; ENSG00000180658; TAA
LVLLLPLPF

SEQ ID NO: 55309 - protein, 8 aa, Homo sapiens
  misc_feature: Table A; Target 55309; HLA-C*05:01; OR2A4; ENSG00000180658; TAA
MGDNITSI

SEQ ID NO: 55310 - protein, 9 aa, Homo sapiens
  misc_feature: Table A; Target 55310; HLA-A*02:04; OR2A4; ENSG00000180658; TAA
MLLFGLFSL

SEQ ID NO: 55311 - protein, 9 aa, Homo sapiens
  misc_feature: Table A; Target 55311; HLA-A*02:01; OR2A4; ENSG00000180658; TAA
MLNPLICSL

SEQ ID NO: 55312 - protein, 9 aa, Homo sapiens
  misc_feature: Table A; Target 55312; HLA-A*02:03; OR2A4; ENSG00000180658; TAA
MLNPLICSL

SEQ ID NO: 55313 - protein, 9 aa, Homo sapiens
  misc_feature: Table A; Target 55313; HLA-A*02:04; OR2A4; ENSG00000180658; TAA
MLNPLICSL

SEQ ID NO: 55314 - protein, 9 aa, Homo sapiens
  misc_feature: Table A; Target 55314; HLA-A*32:01; OR2A4; ENSG00000180658; TAA
MLNPLICSL

SEQ ID NO: 55315 - protein, 9 aa, Homo sapiens
  misc_feature: Table A; Target 55315; HLA-B*08:01; OR2A4; ENSG00000180658; TAA
MLNPLICSL

SEQ ID NO: 55316 - protein, 9 aa, Homo sapiens
  misc_feature: Table A; Target 55316; HLA-A*68:02; OR2A4; ENSG00000180658; TAA
MSYDLYVAI

SEQ ID NO: 55317 - protein, 10 aa, Homo sapiens
  misc_feature: Table A; Target 55317; HLA-A*25:01; OR2A4; ENSG00000180658; TAA
MVLAGAISGL

SEQ ID NO: 55318 - protein, 10 aa, Homo sapiens
  misc_feature: Table A; Target 55318; HLA-A*26:01; OR2A4; ENSG00000180658; TAA
MVLAGAISGL

SEQ ID NO: 55319 - protein, 10 aa, Homo sapiens
  misc_feature: Table A; Target 55319; HLA-B*18:01; OR2A4; ENSG00000180658; TAA
NENMVLAGAI

SEQ ID NO: 55320 - protein, 8 aa, Homo sapiens
  misc_feature: Table A; Target 55320; HLA-C*16:01; OR2A4; ENSG00000180658; TAA
NITSIREF

SEQ ID NO: 55321 - protein, 9 aa, Homo sapiens
  misc_feature: Table A; Target 55321; HLA-A*68:02; OR2A4; ENSG00000180658; TAA
NITSIREFL

SEQ ID NO: 55322 - protein, 8 aa, Homo sapiens
  misc_feature: Table A; Target 55322; HLA-B*51:01; OR2A4; ENSG00000180658; TAA
NPMLNPLI

SEQ ID NO: 55323 - protein, 9 aa, Homo sapiens
  misc_feature: Table A; Target 55323; HLA-B*54:01; OR2A4; ENSG00000180658; TAA
NPMLNPLIC

SEQ ID NO: 55324 - protein, 9 aa, Homo sapiens
  misc_feature: Table A; Target 55324; HLA-B*56:01; OR2A4; ENSG00000180658; TAA
NPMLNPLIC

SEQ ID NO: 55325 - protein, 10 aa, Homo sapiens
  misc_feature: Table A; Target 55325; HLA-B*56:01; OR2A4; ENSG00000180658; TAA
NPMLNPLICS

SEQ ID NO: 55326 - protein, 8 aa, Homo sapiens
  misc_feature: Table A; Target 55326; HLA-B*08:01; OR2A4; ENSG00000180658; TAA
NSEVKNTL

SEQ ID NO: 55327 - protein, 8 aa, Homo sapiens
  misc_feature: Table A; Target 55327; HLA-C*01:02; OR2A4; ENSG00000180658; TAA
NSEVKNTL

SEQ ID NO: 55328 - protein, 8 aa, Homo sapiens
  misc_feature: Table A; Target 55328; HLA-C*05:01; OR2A4; ENSG00000180658; TAA
NSEVKNTL

SEQ ID NO: 55329 - protein, 8 aa, Homo sapiens
  misc_feature: Table A; Target 55329; HLA-C*16:01; OR2A4; ENSG00000180658; TAA
NSEVKNTL

SEQ ID NO: 55330 - protein, 9 aa, Homo sapiens
  misc_feature: Table A; Target 55330; HLA-A*01:01; OR2A4; ENSG00000180658; TAA
NSEVKNTLK

SEQ ID NO: 55331 - protein, 9 aa, Homo sapiens
  misc_feature: Table A; Target 55331; HLA-B*08:01; OR2A4; ENSG00000180658; TAA
NTLKRVLGV

SEQ ID NO: 55332 - protein, 11 aa, Homo sapiens
  misc_feature: Table A; Target 55332; HLA-A*33:01; OR2A4; ENSG00000180658; TAA
NTLKRVLGVER

SEQ ID NO: 55333 - protein, 10 aa, Homo sapiens
  misc_feature: Table A; Target 55333; HLA-A*31:01; OR2A4; ENSG00000180658; TAA
PAKPISFAGR

SEQ ID NO: 55334 - protein, 9 aa, Homo sapiens
  misc_feature: Table A; Target 55334; HLA-A*29:02; OR2A4; ENSG00000180658; TAA
PLSTIVVSY

SEQ ID NO: 55335 - protein, 9 aa, Homo sapiens
  misc_feature: Table A; Target 55335; HLA-A*30:02; OR2A4; ENSG00000180658; TAA
PLSTIVVSY

SEQ ID NO: 55336 - protein, 9 aa, Homo sapiens
  misc_feature: Table A; Target 55336; HLA-B*15:01; OR2A4; ENSG00000180658; TAA
PLSTIVVSY

SEQ ID NO: 55337 - protein, 9 aa, Homo sapiens
  misc_feature: Table A; Target 55337; HLA-A*31:01; OR2A4; ENSG00000180658; TAA
QIQSREVQR

SEQ ID NO: 55338 - protein, 9 aa, Homo sapiens
  misc_feature: Table A; Target 55338; HLA-A*33:03; OR2A4; ENSG00000180658; TAA
QIQSREVQR

SEQ ID NO: 55339 - protein, 9 aa, Homo sapiens
  misc_feature: Table A; Target 55339; HLA-A*32:01; OR2A4; ENSG00000180658; TAA
RNSEVKNTL

SEQ ID NO: 55340 - protein, 9 aa, Homo sapiens
  misc_feature: Table A; Target 55340; HLA-C*16:01; OR2A4; ENSG00000180658; TAA
RNSEVKNTL

SEQ ID NO: 55341 - protein, 9 aa, Homo sapiens
  misc_feature: Table A; Target 55341; HLA-B*57:01; OR2A4; ENSG00000180658; TAA
RVLGVERAL

SEQ ID NO: 55342 - protein, 9 aa, Homo sapiens
  misc_feature: Table A; Target 55342; HLA-A*31:01; OR2A4; ENSG00000180658; TAA
RYLAIMTWR

SEQ ID NO: 55343 - protein, 10 aa, Homo sapiens
  misc_feature: Table A; Target 55343; HLA-A*30:02; OR2A4; ENSG00000180658; TAA
SHLAVVDIAY

SEQ ID NO: 55344 - protein, 11 aa, Homo sapiens
  misc_feature: Table A; Target 55344; HLA-A*01:01; OR2A4; ENSG00000180658; TAA
SLDSRLHAPMY

SEQ ID NO: 55345 - protein, 8 aa, Homo sapiens
  misc_feature: Table A; Target 55345; HLA-A*02:04; OR2A4; ENSG00000180658; TAA
SLFYVFTL

SEQ ID NO: 55346 - protein, 9 aa, Homo sapiens
  misc_feature: Table A; Target 55346; HLA-A*02:01; OR2A4; ENSG00000180658; TAA
SLFYVFTLL

SEQ ID NO: 55347 - protein, 9 aa, Homo sapiens
  misc_feature: Table A; Target 55347; HLA-A*02:03; OR2A4; ENSG00000180658; TAA
SLFYVFTLL

SEQ ID NO: 55348 - protein, 9 aa, Homo sapiens
  misc_feature: Table A; Target 55348; HLA-A*02:04; OR2A4; ENSG00000180658; TAA
SLFYVFTLL

SEQ ID NO: 55349 - protein, 9 aa, Homo sapiens
  misc_feature: Table A; Target 55349; HLA-A*02:07; OR2A4; ENSG00000180658; TAA
SLFYVFTLL

SEQ ID NO: 55350 - protein, 9 aa, Homo sapiens
  misc_feature: Table A; Target 55350; HLA-A*68:02; OR2A4; ENSG00000180658; TAA
SLFYVFTLL

SEQ ID NO: 55351 - protein, 9 aa, Homo sapiens
  misc_feature: Table A; Target 55351; HLA-A*02:04; OR2A4; ENSG00000180658; TAA
SLIHLVLLL

SEQ ID NO: 55352 - protein, 11 aa, Homo sapiens
  misc_feature: Table A; Target 55352; HLA-C*07:02; OR2A4; ENSG00000180658; TAA
SLRNSEVKNTL

SEQ ID NO: 55353 - protein, 9 aa, Homo sapiens
  misc_feature: Table A; Target 55353; HLA-A*68:02; OR2A4; ENSG00000180658; TAA
STFAVTECL

SEQ ID NO: 55354 - protein, 9 aa, Homo sapiens
  misc_feature: Table A; Target 55354; HLA-B*40:01; OR2A4; ENSG00000180658; TAA
STFAVTECL

SEQ ID NO: 55355 - protein, 9 aa, Homo sapiens
  misc_feature: Table A; Target 55355; HLA-C*06:02; OR2A4; ENSG00000180658; TAA
TAIIMYVGP

SEQ ID NO: 55356 - protein, 9 aa, Homo sapiens
  misc_feature: Table A; Target 55356; HLA-B*18:01; OR2A4; ENSG00000180658; TAA
TECLLLVVM

SEQ ID NO: 55357 - protein, 8 aa, Homo sapiens
  misc_feature: Table A; Target 55357; HLA-B*51:01; OR2A4; ENSG00000180658; TAA
TGVLLSLI

SEQ ID NO: 55358 - protein, 9 aa, Homo sapiens
  misc_feature: Table A; Target 55358; HLA-B*27:05; OR2A4; ENSG00000180658; TAA
THINENMVL

SEQ ID NO: 55359 - protein, 9 aa, Homo sapiens
  misc_feature: Table A; Target 55359; HLA-B*35:03; OR2A4; ENSG00000180658; TAA
THINENMVL

SEQ ID NO: 55360 - protein, 9 aa, Homo sapiens
  misc_feature: Table A; Target 55360; HLA-B*38:01; OR2A4; ENSG00000180658; TAA
THINENMVL

SEQ ID NO: 55361 - protein, 9 aa, Homo sapiens
  misc_feature: Table A; Target 55361; HLA-B*39:01; OR2A4; ENSG00000180658; TAA
THINENMVL

SEQ ID NO: 55362 - protein, 10 aa, Homo sapiens
  misc_feature: Table A; Target 55362; HLA-A*31:01; OR2A4; ENSG00000180658; TAA
TLKRVLGVER

SEQ ID NO: 55363 - protein, 11 aa, Homo sapiens
  misc_feature: Table A; Target 55363; HLA-A*02:04; OR2A4; ENSG00000180658; TAA
TLLGNGTILGL

SEQ ID NO: 55364 - protein, 9 aa, Homo sapiens
  misc_feature: Table A; Target 55364; HLA-A*02:07; OR2A4; ENSG00000180658; TAA
TVPRMLVNL

SEQ ID NO: 55365 - protein, 9 aa, Homo sapiens
  misc_feature: Table A; Target 55365; HLA-A*29:02; OR2A4; ENSG00000180658; TAA
VAICHPLRY

SEQ ID NO: 55366 - protein, 10 aa, Homo sapiens
  misc_feature: Table A; Target 55366; HLA-A*25:01; OR2A4; ENSG00000180658; TAA
VCITLAVTSW

SEQ ID NO: 55367 - protein, 9 aa, Homo sapiens
  misc_feature: Table A; Target 55367; HLA-C*01:02; OR2A4; ENSG00000180658; TAA
VGPLSTIVV

SEQ ID NO: 55368 - protein, 9 aa, Homo sapiens
  misc_feature: Table A; Target 55368; HLA-C*01:02; OR2A4; ENSG00000180658; TAA
VGPRYGNPK

SEQ ID NO: 55369 - protein, 9 aa, Homo sapiens
  misc_feature: Table A; Target 55369; HLA-A*02:01; OR2A4; ENSG00000180658; TAA
VLAGAISGL

SEQ ID NO: 55370 - protein, 9 aa, Homo sapiens
  misc_feature: Table A; Target 55370; HLA-A*02:03; OR2A4; ENSG00000180658; TAA
VLAGAISGL

SEQ ID NO: 55371 - protein, 9 aa, Homo sapiens
  misc_feature: Table A; Target 55371; HLA-A*02:04; OR2A4; ENSG00000180658; TAA
VLAGAISGL

SEQ ID NO: 55372 - protein, 9 aa, Homo sapiens
  misc_feature: Table A; Target 55372; HLA-B*15:01; OR2A4; ENSG00000180658; TAA
VLAGAISGL

SEQ ID NO: 55373 - protein, 9 aa, Homo sapiens
  misc_feature: Table A; Target 55373; HLA-B*46:01; OR2A4; ENSG00000180658; TAA
VLAGAISGL

SEQ ID NO: 55374 - protein, 9 aa, Homo sapiens
  misc_feature: Table A; Target 55374; HLA-C*01:02; OR2A4; ENSG00000180658; TAA
VLAGAISGL

SEQ ID NO: 55375 - protein, 8 aa, Homo sapiens
  misc_feature: Table A; Target 55375; HLA-C*01:02; OR2A4; ENSG00000180658; TAA
VLGVERAL

SEQ ID NO: 55376 - protein, 8 aa, Homo sapiens
  misc_feature: Table A; Target 55376; HLA-C*16:01; OR2A4; ENSG00000180658; TAA
VLGVERAL

SEQ ID NO: 55377 - protein, 8 aa, Homo sapiens
  misc_feature: Table A; Target 55377; HLA-A*02:04; OR2A4; ENSG00000180658; TAA
VLLSLIHL

SEQ ID NO: 55378 - protein, 9 aa, Homo sapiens
  misc_feature: Table A; Target 55378; HLA-A*02:01; OR2A4; ENSG00000180658; TAA
VLLSLIHLV

SEQ ID NO: 55379 - protein, 9 aa, Homo sapiens
  misc_feature: Table A; Target 55379; HLA-A*02:03; OR2A4; ENSG00000180658; TAA
VLLSLIHLV

SEQ ID NO: 55380 - protein, 9 aa, Homo sapiens
  misc_feature: Table A; Target 55380; HLA-A*02:04; OR2A4; ENSG00000180658; TAA
VLLSLIHLV

SEQ ID NO: 55381 - protein, 9 aa, Homo sapiens
  misc_feature: Table A; Target 55381; HLA-A*02:07; OR2A4; ENSG00000180658; TAA
VLLSLIHLV

SEQ ID NO: 55382 - protein, 11 aa, Homo sapiens
  misc_feature: Table A; Target 55382; HLA-A*02:04; OR2A4; ENSG00000180658; TAA
VLLSLIHLVLL

SEQ ID NO: 55383 - protein, 9 aa, Homo sapiens
  misc_feature: Table A; Target 55383; HLA-B*07:02; OR2A4; ENSG00000180658; TAA
VPRMLVNLL

SEQ ID NO: 55384 - protein, 9 aa, Homo sapiens
  misc_feature: Table A; Target 55384; HLA-A*02:01; OR2A4; ENSG00000180658; TAA
VVMSYDLYV

SEQ ID NO: 55385 - protein, 9 aa, Homo sapiens
  misc_feature: Table A; Target 55385; HLA-A*02:04; OR2A4; ENSG00000180658; TAA
VVMSYDLYV

SEQ ID NO: 55386 - protein, 9 aa, Homo sapiens
  misc_feature: Table A; Target 55386; HLA-A*02:07; OR2A4; ENSG00000180658; TAA
VVMSYDLYV

SEQ ID NO: 55387 - protein, 9 aa, Homo sapiens
  misc_feature: Table A; Target 55387; HLA-B*13:02; OR2A4; ENSG00000180658; TAA
VVMSYDLYV

SEQ ID NO: 55388 - protein, 8 aa, Homo sapiens
  misc_feature: Table A; Target 55388; HLA-A*23:01; OR2A4; ENSG00000180658; TAA
VYGTAIIM

SEQ ID NO: 55389 - protein, 8 aa, Homo sapiens
  misc_feature: Table A; Target 55389; HLA-C*14:02; OR2A4; ENSG00000180658; TAA
VYGTAIIM

SEQ ID NO: 55390 - protein, 9 aa, Homo sapiens
  misc_feature: Table A; Target 55390; HLA-A*23:01; OR2A4; ENSG00000180658; TAA
VYGTAIIMY

SEQ ID NO: 55391 - protein, 9 aa, Homo sapiens
  misc_feature: Table A; Target 55391; HLA-A*24:02; OR2A4; ENSG00000180658; TAA
VYGTAIIMY

SEQ ID NO: 55392 - protein, 9 aa, Homo sapiens
  misc_feature: Table A; Target 55392; HLA-A*29:02; OR2A4; ENSG00000180658; TAA
VYGTAIIMY

SEQ ID NO: 55393 - protein, 9 aa, Homo sapiens
  misc_feature: Table A; Target 55393; HLA-C*14:02; OR2A4; ENSG00000180658; TAA
VYGTAIIMY

SEQ ID NO: 55394 - protein, 9 aa, Homo sapiens
  misc_feature: Table A; Target 55394; HLA-C*12:03; OR2A4; ENSG00000180658; TAA
YACNTVPRM

SEQ ID NO: 55395 - protein, 9 aa, Homo sapiens
  misc_feature: Table A; Target 55395; HLA-A*68:02; OR2A4; ENSG00000180658; TAA
YGTAIIMYV

SEQ ID NO: 55396 - protein, 9 aa, Homo sapiens
  misc_feature: Table A; Target 55396; HLA-C*02:02; OR2A4; ENSG00000180658; TAA
YGTAIIMYV

SEQ ID NO: 55397 - protein, 9 aa, Homo sapiens
  misc_feature: Table A; Target 55397; HLA-A*02:04; OR2A4; ENSG00000180658; TAA
YLAIMTWRV

SEQ ID NO: 55398 - protein, 8 aa, Homo sapiens
  misc_feature: Table A; Target 55398; HLA-A*02:04; OR2A4; ENSG00000180658; TAA
YLLLFHSL

SEQ ID NO: 55399 - protein, 10 aa, Homo sapiens
  misc_feature: Table A; Target 55399; HLA-A*01:01; OR2A4; ENSG00000180658; TAA
YVAICHPLRY

SEQ ID NO: 55400 - protein, 9 aa, Homo sapiens
  misc_feature: Table A; Target 55400; HLA-B*56:01; OR51E1; ENSG00000180785; TAA
AALMAPLPV

SEQ ID NO: 55401 - protein, 8 aa, Homo sapiens
  misc_feature: Table A; Target 55401; HLA-C*16:01; OR51E1; ENSG00000180785; TAA
AAVVRGAA

SEQ ID NO: 55402 - protein, 9 aa, Homo sapiens
  misc_feature: Table A; Target 55402; HLA-A*30:01; OR51E1; ENSG00000180785; TAA
AAVVRGAAL

SEQ ID NO: 55403 - protein, 9 aa, Homo sapiens
  misc_feature: Table A; Target 55403; HLA-A*32:01; OR51E1; ENSG00000180785; TAA
AAVVRGAAL

SEQ ID NO: 55404 - protein, 9 aa, Homo sapiens
  misc_feature: Table A; Target 55404; HLA-B*07:02; OR51E1; ENSG00000180785; TAA
AAVVRGAAL

SEQ ID NO: 55405 - protein, 9 aa, Homo sapiens
  misc_feature: Table A; Target 55405; HLA-B*08:01; OR51E1; ENSG00000180785; TAA
AAVVRGAAL

SEQ ID NO: 55406 - protein, 9 aa, Homo sapiens
  misc_feature: Table A; Target 55406; HLA-B*15:01; OR51E1; ENSG00000180785; TAA
AAVVRGAAL

SEQ ID NO: 55407 - protein, 9 aa, Homo sapiens
  misc_feature: Table A; Target 55407; HLA-B*15:03; OR51E1; ENSG00000180785; TAA
AAVVRGAAL

SEQ ID NO: 55408 - protein, 9 aa, Homo sapiens
  misc_feature: Table A; Target 55408; HLA-B*35:03; OR51E1; ENSG00000180785; TAA
AAVVRGAAL

SEQ ID NO: 55409 - protein, 9 aa, Homo sapiens
  misc_feature: Table A; Target 55409; HLA-B*37:01; OR51E1; ENSG00000180785; TAA
AAVVRGAAL

SEQ ID NO: 55410 - protein, 9 aa, Homo sapiens
  misc_feature: Table A; Target 55410; HLA-B*39:01; OR51E1; ENSG00000180785; TAA
AAVVRGAAL

SEQ ID NO: 55411 - protein, 9 aa, Homo sapiens
  misc_feature: Table A; Target 55411; HLA-B*40:01; OR51E1; ENSG00000180785; TAA
AAVVRGAAL

SEQ ID NO: 55412 - protein, 9 aa, Homo sapiens
  misc_feature: Table A; Target 55412; HLA-B*40:02; OR51E1; ENSG00000180785; TAA
AAVVRGAAL

SEQ ID NO: 55413 - protein, 9 aa, Homo sapiens
  misc_feature: Table A; Target 55413; HLA-B*46:01; OR51E1; ENSG00000180785; TAA
AAVVRGAAL

SEQ ID NO: 55414 - protein, 9 aa, Homo sapiens
  misc_feature: Table A; Target 55414; HLA-B*58:01; OR51E1; ENSG00000180785; TAA
AAVVRGAAL

SEQ ID NO: 55415 - protein, 9 aa, Homo sapiens
  misc_feature: Table A; Target 55415; HLA-C*01:02; OR51E1; ENSG00000180785; TAA
AAVVRGAAL

SEQ ID NO: 55416 - protein, 9 aa, Homo sapiens
  misc_feature: Table A; Target 55416; HLA-C*02:02; OR51E1; ENSG00000180785; TAA
AAVVRGAAL

SEQ ID NO: 55417 - protein, 9 aa, Homo sapiens
  misc_feature: Table A; Target 55417; HLA-C*03:03; OR51E1; ENSG00000180785; TAA
AAVVRGAAL

SEQ ID NO: 55418 - protein, 9 aa, Homo sapiens
  misc_feature: Table A; Target 55418; HLA-C*03:04; OR51E1; ENSG00000180785; TAA
AAVVRGAAL

SEQ ID NO: 55419 - protein, 9 aa, Homo sapiens
  misc_feature: Table A; Target 55419; HLA-C*05:01; OR51E1; ENSG00000180785; TAA
AAVVRGAAL

SEQ ID NO: 55420 - protein, 9 aa, Homo sapiens
  misc_feature: Table A; Target 55420; HLA-C*07:02; OR51E1; ENSG00000180785; TAA
AAVVRGAAL

SEQ ID NO: 55421 - protein, 9 aa, Homo sapiens
  misc_feature: Table A; Target 55421; HLA-C*12:03; OR51E1; ENSG00000180785; TAA
AAVVRGAAL

SEQ ID NO: 55422 - protein, 9 aa, Homo sapiens
  misc_feature: Table A; Target 55422; HLA-C*14:02; OR51E1; ENSG00000180785; TAA
AAVVRGAAL

SEQ ID NO: 55423 - protein, 9 aa, Homo sapiens
  misc_feature: Table A; Target 55423; HLA-C*16:01; OR51E1; ENSG00000180785; TAA
AAVVRGAAL

SEQ ID NO: 55424 - protein, 9 aa, Homo sapiens
  misc_feature: Table A; Target 55424; HLA-C*16:02; OR51E1; ENSG00000180785; TAA
AAVVRGAAL

SEQ ID NO: 55425 - protein, 9 aa, Homo sapiens
  misc_feature: Table A; Target 55425; HLA-C*16:04; OR51E1; ENSG00000180785; TAA
AAVVRGAAL

SEQ ID NO: 55426 - protein, 9 aa, Homo sapiens
  misc_feature: Table A; Target 55426; HLA-A*02:01; OR51E1; ENSG00000180785; TAA
ACDDIRVNV

SEQ ID NO: 55427 - protein, 9 aa, Homo sapiens
  misc_feature: Table A; Target 55427; HLA-A*02:07; OR51E1; ENSG00000180785; TAA
ACDDIRVNV

SEQ ID NO: 55428 - protein, 9 aa, Homo sapiens
  misc_feature: Table A; Target 55428; HLA-B*38:01; OR51E1; ENSG00000180785; TAA
ACDDIRVNV

SEQ ID NO: 55429 - protein, 9 aa, Homo sapiens
  misc_feature: Table A; Target 55429; HLA-B*39:01; OR51E1; ENSG00000180785; TAA
ACDDIRVNV

SEQ ID NO: 55430 - protein, 9 aa, Homo sapiens
  misc_feature: Table A; Target 55430; HLA-B*55:01; OR51E1; ENSG00000180785; TAA
ACDDIRVNV

SEQ ID NO: 55431 - protein, 9 aa, Homo sapiens
  misc_feature: Table A; Target 55431; HLA-C*04:01; OR51E1; ENSG00000180785; TAA
ACDDIRVNV

SEQ ID NO: 55432 - protein, 9 aa, Homo sapiens
  misc_feature: Table A; Target 55432; HLA-C*05:01; OR51E1; ENSG00000180785; TAA
ACDDIRVNV

SEQ ID NO: 55433 - protein, 8 aa, Homo sapiens
  misc_feature: Table A; Target 55433; HLA-C*04:01; OR51E1; ENSG00000180785; TAA
AFDRYVAI

SEQ ID NO: 55434 - protein, 10 aa, Homo sapiens
  misc_feature: Table A; Target 55434; HLA-A*02:03; OR51E1; ENSG00000180785; TAA
AIFWFNSTTI

SEQ ID NO: 55435 - protein, 9 aa, Homo sapiens
  misc_feature: Table A; Target 55435; HLA-A*02:01; OR51E1; ENSG00000180785; TAA
ALMAPLPVF

SEQ ID NO: 55436 - protein, 9 aa, Homo sapiens
  misc_feature: Table A; Target 55436; HLA-A*02:03; OR51E1; ENSG00000180785; TAA
ALMAPLPVF

SEQ ID NO: 55437 - protein, 9 aa, Homo sapiens
  misc_feature: Table A; Target 55437; HLA-A*02:04; OR51E1; ENSG00000180785; TAA
ALMAPLPVF

SEQ ID NO: 55438 - protein, 9 aa, Homo sapiens
  misc_feature: Table A; Target 55438; HLA-A*02:07; OR51E1; ENSG00000180785; TAA
ALMAPLPVF

SEQ ID NO: 55439 - protein, 9 aa, Homo sapiens
  misc_feature: Table A; Target 55439; HLA-A*03:01; OR51E1; ENSG00000180785; TAA
ALMAPLPVF

SEQ ID NO: 55440 - protein, 9 aa, Homo sapiens
  misc_feature: Table A; Target 55440; HLA-A*03:02; OR51E1; ENSG00000180785; TAA
ALMAPLPVF

SEQ ID NO: 55441 - protein, 9 aa, Homo sapiens
  misc_feature: Table A; Target 55441; HLA-A*23:01; OR51E1; ENSG00000180785; TAA
ALMAPLPVF

SEQ ID NO: 55442 - protein, 9 aa, Homo sapiens
  misc_feature: Table A; Target 55442; HLA-A*24:02; OR51E1; ENSG00000180785; TAA
ALMAPLPVF

SEQ ID NO: 55443 - protein, 9 aa, Homo sapiens
  misc_feature: Table A; Target 55443; HLA-A*25:01; OR51E1; ENSG00000180785; TAA
ALMAPLPVF

SEQ ID NO: 55444 - protein, 9 aa, Homo sapiens
  misc_feature: Table A; Target 55444; HLA-A*26:01; OR51E1; ENSG00000180785; TAA
ALMAPLPVF

SEQ ID NO: 55445 - protein, 9 aa, Homo sapiens
  misc_feature: Table A; Target 55445; HLA-A*29:02; OR51E1; ENSG00000180785; TAA
ALMAPLPVF

SEQ ID NO: 55446 - protein, 9 aa, Homo sapiens
  misc_feature: Table A; Target 55446; HLA-A*30:02; OR51E1; ENSG00000180785; TAA
ALMAPLPVF

SEQ ID NO: 55447 - protein, 9 aa, Homo sapiens
  misc_feature: Table A; Target 55447; HLA-A*32:01; OR51E1; ENSG00000180785; TAA
ALMAPLPVF

SEQ ID NO: 55448 - protein, 9 aa, Homo sapiens
  misc_feature: Table A; Target 55448; HLA-B*07:02; OR51E1; ENSG00000180785; TAA
ALMAPLPVF

SEQ ID NO: 55449 - protein, 9 aa, Homo sapiens
  misc_feature: Table A; Target 55449; HLA-B*13:02; OR51E1; ENSG00000180785; TAA
ALMAPLPVF

SEQ ID NO: 55450 - protein, 9 aa, Homo sapiens
  misc_feature: Table A; Target 55450; HLA-B*15:01; OR51E1; ENSG00000180785; TAA
ALMAPLPVF

SEQ ID NO: 55451 - protein, 9 aa, Homo sapiens
  misc_feature: Table A; Target 55451; HLA-B*15:03; OR51E1; ENSG00000180785; TAA
ALMAPLPVF

SEQ ID NO: 55452 - protein, 9 aa, Homo sapiens
  misc_feature: Table A; Target 55452; HLA-B*37:01; OR51E1; ENSG00000180785; TAA
ALMAPLPVF

SEQ ID NO: 55453 - protein, 9 aa, Homo sapiens
  misc_feature: Table A; Target 55453; HLA-B*40:02; OR51E1; ENSG00000180785; TAA
ALMAPLPVF

SEQ ID NO: 55454 - protein, 9 aa, Homo sapiens
  misc_feature: Table A; Target 55454; HLA-B*44:02; OR51E1; ENSG00000180785; TAA
ALMAPLPVF

SEQ ID NO: 55455 - protein, 9 aa, Homo sapiens
  misc_feature: Table A; Target 55455; HLA-B*46:01; OR51E1; ENSG00000180785; TAA
ALMAPLPVF

SEQ ID NO: 55456 - protein, 9 aa, Homo sapiens
  misc_feature: Table A; Target 55456; HLA-B*55:01; OR51E1; ENSG00000180785; TAA
ALMAPLPVF

SEQ ID NO: 55457 - protein, 9 aa, Homo sapiens
  misc_feature: Table A; Target 55457; HLA-B*56:01; OR51E1; ENSG00000180785; TAA
ALMAPLPVF

SEQ ID NO: 55458 - protein, 9 aa, Homo sapiens
  misc_feature: Table A; Target 55458; HLA-B*57:01; OR51E1; ENSG00000180785; TAA
ALMAPLPVF

SEQ ID NO: 55459 - protein, 9 aa, Homo sapiens
  misc_feature: Table A; Target 55459; HLA-B*58:01; OR51E1; ENSG00000180785; TAA
ALMAPLPVF

SEQ ID NO: 55460 - protein, 9 aa, Homo sapiens
  misc_feature: Table A; Target 55460; HLA-C*02:02; OR51E1; ENSG00000180785; TAA
ALMAPLPVF

SEQ ID NO: 55461 - protein, 9 aa, Homo sapiens
  misc_feature: Table A; Target 55461; HLA-C*03:03; OR51E1; ENSG00000180785; TAA
ALMAPLPVF

SEQ ID NO: 55462 - protein, 9 aa, Homo sapiens
  misc_feature: Table A; Target 55462; HLA-C*03:04; OR51E1; ENSG00000180785; TAA
ALMAPLPVF

SEQ ID NO: 55463 - protein, 9 aa, Homo sapiens
  misc_feature: Table A; Target 55463; HLA-C*07:04; OR51E1; ENSG00000180785; TAA
ALMAPLPVF

SEQ ID NO: 55464 - protein, 9 aa, Homo sapiens
  misc_feature: Table A; Target 55464; HLA-C*14:02; OR51E1; ENSG00000180785; TAA
ALMAPLPVF

SEQ ID NO: 55465 - protein, 9 aa, Homo sapiens
  misc_feature: Table A; Target 55465; HLA-C*16:01; OR51E1; ENSG00000180785; TAA
ALMAPLPVF

SEQ ID NO: 55466 - protein, 10 aa, Homo sapiens
  misc_feature: Table A; Target 55466; HLA-A*02:01; OR51E1; ENSG00000180785; TAA
ALMAPLPVFI

SEQ ID NO: 55467 - protein, 10 aa, Homo sapiens
  misc_feature: Table A; Target 55467; HLA-A*02:03; OR51E1; ENSG00000180785; TAA
ALMAPLPVFI

SEQ ID NO: 55468 - protein, 10 aa, Homo sapiens
  misc_feature: Table A; Target 55468; HLA-A*02:04; OR51E1; ENSG00000180785; TAA
ALMAPLPVFI

SEQ ID NO: 55469 - protein, 10 aa, Homo sapiens
  misc_feature: Table A; Target 55469; HLA-A*02:07; OR51E1; ENSG00000180785; TAA
ALMAPLPVFI

SEQ ID NO: 55470 - protein, 10 aa, Homo sapiens
  misc_feature: Table A; Target 55470; HLA-B*13:02; OR51E1; ENSG00000180785; TAA
ALMAPLPVFI

SEQ ID NO: 55471 - protein, 11 aa, Homo sapiens
  misc_feature: Table A; Target 55471; HLA-A*03:01; OR51E1; ENSG00000180785; TAA
ALMAPLPVFIK

SEQ ID NO: 55472 - protein, 11 aa, Homo sapiens
  misc_feature: Table A; Target 55472; HLA-A*03:02; OR51E1; ENSG00000180785; TAA
ALMAPLPVFIK

SEQ ID NO: 55473 - protein, 11 aa, Homo sapiens
  misc_feature: Table A; Target 55473; HLA-A*11:01; OR51E1; ENSG00000180785; TAA
ALMAPLPVFIK

SEQ ID NO: 55474 - protein, 9 aa, Homo sapiens
  misc_feature: Table A; Target 55474; HLA-A*31:01; OR51E1; ENSG00000180785; TAA
APLPVFIKQ

SEQ ID NO: 55475 - protein, 9 aa, Homo sapiens
  misc_feature: Table A; Target 55475; HLA-B*54:01; OR51E1; ENSG00000180785; TAA
APLPVFIKQ

SEQ ID NO: 55476 - protein, 10 aa, Homo sapiens
  misc_feature: Table A; Target 55476; HLA-B*07:02; OR51E1; ENSG00000180785; TAA
APLPVFIKQL

SEQ ID NO: 55477 - protein, 10 aa, Homo sapiens
  misc_feature: Table A; Target 55477; HLA-C*07:02; OR51E1; ENSG00000180785; TAA
APLPVFIKQL

SEQ ID NO: 55478 - protein, 8 aa, Homo sapiens
  misc_feature: Table A; Target 55478; HLA-B*13:02; OR51E1; ENSG00000180785; TAA
AQAKAFGT

SEQ ID NO: 55479 - protein, 10 aa, Homo sapiens
  misc_feature: Table A; Target 55479; HLA-A*30:01; OR51E1; ENSG00000180785; TAA
AQAKAFGTCV

SEQ ID NO: 55480 - protein, 10 aa, Homo sapiens
  misc_feature: Table A; Target 55480; HLA-B*13:02; OR51E1; ENSG00000180785; TAA
AQAKAFGTCV

SEQ ID NO: 55481 - protein, 10 aa, Homo sapiens
  misc_feature: Table A; Target 55481; HLA-B*40:02; OR51E1; ENSG00000180785; TAA
AQAKAFGTCV

SEQ ID NO: 55482 - protein, 10 aa, Homo sapiens
  misc_feature: Table A; Target 55482; HLA-C*06:02; OR51E1; ENSG00000180785; TAA
AQAKAFGTCV

SEQ ID NO: 55483 - protein, 9 aa, Homo sapiens
  misc_feature: Table A; Target 55483; HLA-A*02:04; OR51E1; ENSG00000180785; TAA
ATVLTLPRV

SEQ ID NO: 55484 - protein, 10 aa, Homo sapiens
  misc_feature: Table A; Target 55484; HLA-C*06:02; OR51E1; ENSG00000180785; TAA
ATVLTLPRVT

SEQ ID NO: 55485 - protein, 11 aa, Homo sapiens
  misc_feature: Table A; Target 55485; HLA-A*03:02; OR51E1; ENSG00000180785; TAA
ATVLTLPRVTK

SEQ ID NO: 55486 - protein, 11 aa, Homo sapiens
  misc_feature: Table A; Target 55486; HLA-A*11:01; OR51E1; ENSG00000180785; TAA
ATVLTLPRVTK

SEQ ID NO: 55487 - protein, 9 aa, Homo sapiens
  misc_feature: Table A; Target 55487; HLA-A*02:04; OR51E1; ENSG00000180785; TAA
ATYFILIGL

SEQ ID NO: 55488 - protein, 9 aa, Homo sapiens
  misc_feature: Table A; Target 55488; HLA-A*03:01; OR51E1; ENSG00000180785; TAA
ATYFILIGL

SEQ ID NO: 55489 - protein, 9 aa, Homo sapiens
  misc_feature: Table A; Target 55489; HLA-A*68:02; OR51E1; ENSG00000180785; TAA
ATYFILIGL

SEQ ID NO: 55490 - protein, 9 aa, Homo sapiens
  misc_feature: Table A; Target 55490; HLA-A*23:01; OR51E1; ENSG00000180785; TAA
AVLGNLTII

SEQ ID NO: 55491 - protein, 10 aa, Homo sapiens
  misc_feature: Table A; Target 55491; HLA-A*29:02; OR51E1; ENSG00000180785; TAA
AVLGNLTIIY

SEQ ID NO: 55492 - protein, 10 aa, Homo sapiens
  misc_feature: Table A; Target 55492; HLA-A*30:02; OR51E1; ENSG00000180785; TAA
AVLGNLTIIY

SEQ ID NO: 55493 - protein, 11 aa, Homo sapiens
  misc_feature: Table A; Target 55493; HLA-A*02:04; OR51E1; ENSG00000180785; TAA
AVLGNLTIIYI

SEQ ID NO: 55494 - protein, 8 aa, Homo sapiens
  misc_feature: Table A; Target 55494; HLA-B*07:02; OR51E1; ENSG00000180785; TAA
AVVRGAAL

SEQ ID NO: 55495 - protein, 8 aa, Homo sapiens
  misc_feature: Table A; Target 55495; HLA-B*08:01; OR51E1; ENSG00000180785; TAA
AVVRGAAL

SEQ ID NO: 55496 - protein, 8 aa, Homo sapiens
  misc_feature: Table A; Target 55496; HLA-B*46:01; OR51E1; ENSG00000180785; TAA
AVVRGAAL

SEQ ID NO: 55497 - protein, 8 aa, Homo sapiens
  misc_feature: Table A; Target 55497; HLA-C*01:02; OR51E1; ENSG00000180785; TAA
AVVRGAAL

SEQ ID NO: 55498 - protein, 8 aa, Homo sapiens
  misc_feature: Table A; Target 55498; HLA-C*03:03; OR51E1; ENSG00000180785; TAA
AVVRGAAL

SEQ ID NO: 55499 - protein, 8 aa, Homo sapiens
  misc_feature: Table A; Target 55499; HLA-C*03:04; OR51E1; ENSG00000180785; TAA
AVVRGAAL

SEQ ID NO: 55500 - protein, 8 aa, Homo sapiens
  misc_feature: Table A; Target 55500; HLA-C*07:02; OR51E1; ENSG00000180785; TAA
AVVRGAAL

SEQ ID NO: 55501 - protein, 8 aa, Homo sapiens
  misc_feature: Table A; Target 55501; HLA-C*14:02; OR51E1; ENSG00000180785; TAA
AVVRGAAL

SEQ ID NO: 55502 - protein, 9 aa, Homo sapiens
  misc_feature: Table A; Target 55502; HLA-A*26:01; OR51E1; ENSG00000180785; TAA
AVVRGAALM

SEQ ID NO: 55503 - protein, 9 aa, Homo sapiens
  misc_feature: Table A; Target 55503; HLA-B*58:01; OR51E1; ENSG00000180785; TAA
AVVRGAALM

SEQ ID NO: 55504 - protein, 8 aa, Homo sapiens
  misc_feature: Table A; Target 55504; HLA-B*37:01; OR51E1; ENSG00000180785; TAA
CDDIRVNV

SEQ ID NO: 55505 - protein, 9 aa, Homo sapiens
  misc_feature: Table A; Target 55505; HLA-B*37:01; OR51E1; ENSG00000180785; TAA
CDDIRVNVV

SEQ ID NO: 55506 - protein, 9 aa, Homo sapiens
  misc_feature: Table A; Target 55506; HLA-B*49:01; OR51E1; ENSG00000180785; TAA
CDDIRVNVV

SEQ ID NO: 55507 - protein, 10 aa, Homo sapiens
  misc_feature: Table A; Target 55507; HLA-C*04:01; OR51E1; ENSG00000180785; TAA
CDDIRVNVVY

SEQ ID NO: 55508 - protein, 10 aa, Homo sapiens
  misc_feature: Table A; Target 55508; HLA-C*07:01; OR51E1; ENSG00000180785; TAA
CDDIRVNVVY

SEQ ID NO: 55509 - protein, 9 aa, Homo sapiens
  misc_feature: Table A; Target 55509; HLA-A*02:03; OR51E1; ENSG00000180785; TAA
CLHQDVMKL

SEQ ID NO: 55510 - protein, 8 aa, Homo sapiens
  misc_feature: Table A; Target 55510; HLA-B*51:01; OR51E1; ENSG00000180785; TAA
DACLLQMF

SEQ ID NO: 55511 - protein, 8 aa, Homo sapiens
  misc_feature: Table A; Target 55511; HLA-C*07:01; OR51E1; ENSG00000180785; TAA
DACLLQMF

SEQ ID NO: 55512 - protein, 8 aa, Homo sapiens
  misc_feature: Table A; Target 55512; HLA-B*08:01; OR51E1; ENSG00000180785; TAA
DDIRVNVV

SEQ ID NO: 55513 - protein, 8 aa, Homo sapiens
  misc_feature: Table A; Target 55513; HLA-B*18:01; OR51E1; ENSG00000180785; TAA
DDIRVNVV

SEQ ID NO: 55514 - protein, 8 aa, Homo sapiens
  misc_feature: Table A; Target 55514; HLA-B*37:01; OR51E1; ENSG00000180785; TAA
DDIRVNVV

SEQ ID NO: 55515 - protein, 8 aa, Homo sapiens
  misc_feature: Table A; Target 55515; HLA-B*40:02; OR51E1; ENSG00000180785; TAA
DDIRVNVV

SEQ ID NO: 55516 - protein, 8 aa, Homo sapiens
  misc_feature: Table A; Target 55516; HLA-B*51:01; OR51E1; ENSG00000180785; TAA
DDIRVNVV

SEQ ID NO: 55517 - protein, 8 aa, Homo sapiens
  misc_feature: Table A; Target 55517; HLA-C*12:03; OR51E1; ENSG00000180785; TAA
DDIRVNVV

SEQ ID NO: 55518 - protein, 9 aa, Homo sapiens
  misc_feature: Table A; Target 55518; HLA-A*25:01; OR51E1; ENSG00000180785; TAA
DDIRVNVVY

SEQ ID NO: 55519 - protein, 9 aa, Homo sapiens
  misc_feature: Table A; Target 55519; HLA-A*26:01; OR51E1; ENSG00000180785; TAA
DDIRVNVVY

SEQ ID NO: 55520 - protein, 9 aa, Homo sapiens
  misc_feature: Table A; Target 55520; HLA-A*33:01; OR51E1; ENSG00000180785; TAA
DDIRVNVVY

SEQ ID NO: 55521 - protein, 9 aa, Homo sapiens
  misc_feature: Table A; Target 55521; HLA-B*15:03; OR51E1; ENSG00000180785; TAA
DDIRVNVVY

SEQ ID NO: 55522 - protein, 9 aa, Homo sapiens
  misc_feature: Table A; Target 55522; HLA-B*18:01; OR51E1; ENSG00000180785; TAA
DDIRVNVVY

SEQ ID NO: 55523 - protein, 9 aa, Homo sapiens
  misc_feature: Table A; Target 55523; HLA-B*35:01; OR51E1; ENSG00000180785; TAA
DDIRVNVVY

SEQ ID NO: 55524 - protein, 9 aa, Homo sapiens
  misc_feature: Table A; Target 55524; HLA-B*44:02; OR51E1; ENSG00000180785; TAA
DDIRVNVVY

SEQ ID NO: 55525 - protein, 9 aa, Homo sapiens
  misc_feature: Table A; Target 55525; HLA-B*44:03; OR51E1; ENSG00000180785; TAA
DDIRVNVVY

SEQ ID NO: 55526 - protein, 9 aa, Homo sapiens
  misc_feature: Table A; Target 55526; HLA-C*04:01; OR51E1; ENSG00000180785; TAA
DDIRVNVVY

SEQ ID NO: 55527 - protein, 9 aa, Homo sapiens
  misc_feature: Table A; Target 55527; HLA-C*07:01; OR51E1; ENSG00000180785; TAA
DDIRVNVVY

SEQ ID NO: 55528 - protein, 9 aa, Homo sapiens
  misc_feature: Table A; Target 55528; HLA-C*12:03; OR51E1; ENSG00000180785; TAA
DDIRVNVVY

SEQ ID NO: 55529 - protein, 9 aa, Homo sapiens
  misc_feature: Table A; Target 55529; HLA-C*16:04; OR51E1; ENSG00000180785; TAA
DDIRVNVVY

SEQ ID NO: 55530 - protein, 10 aa, Homo sapiens
  misc_feature: Table A; Target 55530; HLA-A*33:01; OR51E1; ENSG00000180785; TAA
DDIRVNVVYG

SEQ ID NO: 55531 - protein, 9 aa, Homo sapiens
  misc_feature: Table A; Target 55531; HLA-A*25:01; OR51E1; ENSG00000180785; TAA
DILISTSSM

SEQ ID NO: 55532 - protein, 9 aa, Homo sapiens
  misc_feature: Table A; Target 55532; HLA-A*26:01; OR51E1; ENSG00000180785; TAA
DILISTSSM

SEQ ID NO: 55533 - protein, 9 aa, Homo sapiens
  misc_feature: Table A; Target 55533; HLA-A*33:01; OR51E1; ENSG00000180785; TAA
DILISTSSM

SEQ ID NO: 55534 - protein, 9 aa, Homo sapiens
  misc_feature: Table A; Target 55534; HLA-B*08:01; OR51E1; ENSG00000180785; TAA
DILISTSSM

SEQ ID NO: 55535 - protein, 9 aa, Homo sapiens
  misc_feature: Table A; Target 55535; HLA-B*18:01; OR51E1; ENSG00000180785; TAA
DILISTSSM

SEQ ID NO: 55536 - protein, 9 aa, Homo sapiens
  misc_feature: Table A; Target 55536; HLA-B*35:01; OR51E1; ENSG00000180785; TAA
DILISTSSM

SEQ ID NO: 55537 - protein, 9 aa, Homo sapiens
  misc_feature: Table A; Target 55537; HLA-B*51:01; OR51E1; ENSG00000180785; TAA
DILISTSSM

SEQ ID NO: 55538 - protein, 9 aa, Homo sapiens
  misc_feature: Table A; Target 55538; HLA-C*01:02; OR51E1; ENSG00000180785; TAA
DILISTSSM

SEQ ID NO: 55539 - protein, 9 aa, Homo sapiens
  misc_feature: Table A; Target 55539; HLA-C*14:02; OR51E1; ENSG00000180785; TAA
DILISTSSM

SEQ ID NO: 55540 - protein, 11 aa, Homo sapiens
  misc_feature: Table A; Target 55540; HLA-A*03:01; OR51E1; ENSG00000180785; TAA
DILISTSSMPK

SEQ ID NO: 55541 - protein, 11 aa, Homo sapiens
  misc_feature: Table A; Target 55541; HLA-A*11:01; OR51E1; ENSG00000180785; TAA
DILISTSSMPK

SEQ ID NO: 55542 - protein, 11 aa, Homo sapiens
  misc_feature: Table A; Target 55542; HLA-A*33:01; OR51E1; ENSG00000180785; TAA
DILISTSSMPK

SEQ ID NO: 55543 - protein, 11 aa, Homo sapiens
  misc_feature: Table A; Target 55543; HLA-A*68:01; OR51E1; ENSG00000180785; TAA
DILISTSSMPK

SEQ ID NO: 55544 - protein, 11 aa, Homo sapiens
  misc_feature: Table A; Target 55544; HLA-B*27:02; OR51E1; ENSG00000180785; TAA
DILISTSSMPK

SEQ ID NO: 55545 - protein, 8 aa, Homo sapiens
  misc_feature: Table A; Target 55545; HLA-A*33:01; OR51E1; ENSG00000180785; TAA
DIRVNVVY

SEQ ID NO: 55546 - protein, 8 aa, Homo sapiens
  misc_feature: Table A; Target 55546; HLA-B*08:01; OR51E1; ENSG00000180785; TAA
DIRVNVVY

SEQ ID NO: 55547 - protein, 8 aa, Homo sapiens
  misc_feature: Table A; Target 55547; HLA-B*15:03; OR51E1; ENSG00000180785; TAA
DIRVNVVY

SEQ ID NO: 55548 - protein, 8 aa, Homo sapiens
  misc_feature: Table A; Target 55548; HLA-B*18:01; OR51E1; ENSG00000180785; TAA
DIRVNVVY

SEQ ID NO: 55549 - protein, 8 aa, Homo sapiens
  misc_feature: Table A; Target 55549; HLA-C*07:01; OR51E1; ENSG00000180785; TAA
DIRVNVVY

SEQ ID NO: 55550 - protein, 9 aa, Homo sapiens
  misc_feature: Table A; Target 55550; HLA-A*33:01; OR51E1; ENSG00000180785; TAA
DIRVNVVYG

SEQ ID NO: 55551 - protein, 11 aa, Homo sapiens
  misc_feature: Table A; Target 55551; HLA-B*35:01; OR51E1; ENSG00000180785; TAA
DPNGNESSATY

SEQ ID NO: 55552 - protein, 9 aa, Homo sapiens
  misc_feature: Table A; Target 55552; HLA-A*01:01; OR51E1; ENSG00000180785; TAA
DSLLISFSY

SEQ ID NO: 55553 - protein, 9 aa, Homo sapiens
  misc_feature: Table A; Target 55553; HLA-A*26:01; OR51E1; ENSG00000180785; TAA
DSLLISFSY

SEQ ID NO: 55554 - protein, 9 aa, Homo sapiens
  misc_feature: Table A; Target 55554; HLA-A*29:02; OR51E1; ENSG00000180785; TAA
DSLLISFSY

SEQ ID NO: 55555 - protein, 9 aa, Homo sapiens
  misc_feature: Table A; Target 55555; HLA-A*33:01; OR51E1; ENSG00000180785; TAA
DSLLISFSY

SEQ ID NO: 55556 - protein, 9 aa, Homo sapiens
  misc_feature: Table A; Target 55556; HLA-A*33:03; OR51E1; ENSG00000180785; TAA
DSLLISFSY

SEQ ID NO: 55557 - protein, 9 aa, Homo sapiens
  misc_feature: Table A; Target 55557; HLA-B*18:01; OR51E1; ENSG00000180785; TAA
DSLLISFSY

SEQ ID NO: 55558 - protein, 9 aa, Homo sapiens
  misc_feature: Table A; Target 55558; HLA-B*35:01; OR51E1; ENSG00000180785; TAA
DSLLISFSY

SEQ ID NO: 55559 - protein, 8 aa, Homo sapiens
  misc_feature: Table A; Target 55559; HLA-B*51:01; OR51E1; ENSG00000180785; TAA
DSPLPVIL

SEQ ID NO: 55560 - protein, 11 aa, Homo sapiens
  misc_feature: Table A; Target 55560; HLA-A*68:02; OR51E1; ENSG00000180785; TAA
DSPLPVILANI

SEQ ID NO: 55561 - protein, 9 aa, Homo sapiens
  misc_feature: Table A; Target 55561; HLA-B*18:01; OR51E1; ENSG00000180785; TAA
EEAQFWLAF

SEQ ID NO: 55562 - protein, 9 aa, Homo sapiens
  misc_feature: Table A; Target 55562; HLA-B*44:02; OR51E1; ENSG00000180785; TAA
EEAQFWLAF

SEQ ID NO: 55563 - protein, 9 aa, Homo sapiens
  misc_feature: Table A; Target 55563; HLA-B*44:03; OR51E1; ENSG00000180785; TAA
EEAQFWLAF

SEQ ID NO: 55564 - protein, 9 aa, Homo sapiens
  misc_feature: Table A; Target 55564; HLA-B*38:01; OR51E1; ENSG00000180785; TAA
EHSLHEPMY

SEQ ID NO: 55565 - protein, 9 aa, Homo sapiens
  misc_feature: Table A; Target 55565; HLA-B*39:01; OR51E1; ENSG00000180785; TAA
EHSLHEPMY

SEQ ID NO: 55566 - protein, 10 aa, Homo sapiens
  misc_feature: Table A; Target 55566; HLA-B*38:01; OR51E1; ENSG00000180785; TAA
EHSLHEPMYI

SEQ ID NO: 55567 - protein, 10 aa, Homo sapiens
  misc_feature: Table A; Target 55567; HLA-A*68:02; OR51E1; ENSG00000180785; TAA
ESSATYFILI

SEQ ID NO: 55568 - protein, 10 aa, Homo sapiens
  misc_feature: Table A; Target 55568; HLA-A*25:01; OR51E1; ENSG00000180785; TAA
ESTVLLAMAF

SEQ ID NO: 55569 - protein, 9 aa, Homo sapiens
  misc_feature: Table A; Target 55569; HLA-A*26:01; OR51E1; ENSG00000180785; TAA
FAIHSLSGM

SEQ ID NO: 55570 - protein, 9 aa, Homo sapiens
  misc_feature: Table A; Target 55570; HLA-B*35:01; OR51E1; ENSG00000180785; TAA
FAIHSLSGM

SEQ ID NO: 55571 - protein, 9 aa, Homo sapiens
  misc_feature: Table A; Target 55571; HLA-B*35:03; OR51E1; ENSG00000180785; TAA
FAIHSLSGM

SEQ ID NO: 55572 - protein, 9 aa, Homo sapiens
  misc_feature: Table A; Target 55572; HLA-B*46:01; OR51E1; ENSG00000180785; TAA
FAIHSLSGM

SEQ ID NO: 55573 - protein, 9 aa, Homo sapiens
  misc_feature: Table A; Target 55573; HLA-C*01:02; OR51E1; ENSG00000180785; TAA
FAIHSLSGM

SEQ ID NO: 55574 - protein, 9 aa, Homo sapiens
  misc_feature: Table A; Target 55574; HLA-C*02:02; OR51E1; ENSG00000180785; TAA
FAIHSLSGM

SEQ ID NO: 55575 - protein, 9 aa, Homo sapiens
  misc_feature: Table A; Target 55575; HLA-C*03:03; OR51E1; ENSG00000180785; TAA
FAIHSLSGM

SEQ ID NO: 55576 - protein, 9 aa, Homo sapiens
  misc_feature: Table A; Target 55576; HLA-C*03:04; OR51E1; ENSG00000180785; TAA
FAIHSLSGM

SEQ ID NO: 55577 - protein, 10 aa, Homo sapiens
  misc_feature: Table A; Target 55577; HLA-B*07:02; OR51E1; ENSG00000180785; TAA
FHVATHASEP

SEQ ID NO: 55578 - protein, 10 aa, Homo sapiens
  misc_feature: Table A; Target 55578; HLA-C*06:02; OR51E1; ENSG00000180785; TAA
FHVATHASEP

SEQ ID NO: 55579 - protein, 10 aa, Homo sapiens
  misc_feature: Table A; Target 55579; HLA-C*07:01; OR51E1; ENSG00000180785; TAA
FHVATHASEP

SEQ ID NO: 55580 - protein, 10 aa, Homo sapiens
  misc_feature: Table A; Target 55580; HLA-C*07:04; OR51E1; ENSG00000180785; TAA
FHVATHASEP

SEQ ID NO: 55581 - protein, 10 aa, Homo sapiens
  misc_feature: Table A; Target 55581; HLA-A*02:07; OR51E1; ENSG00000180785; TAA
FIFYVPFIGL

SEQ ID NO: 55582 - protein, 10 aa, Homo sapiens
  misc_feature: Table A; Target 55582; HLA-A*68:02; OR51E1; ENSG00000180785; TAA
FIFYVPFIGL

SEQ ID NO: 55583 - protein, 9 aa, Homo sapiens
  misc_feature: Table A; Target 55583; HLA-A*02:01; OR51E1; ENSG00000180785; TAA
FILIGLPGL

SEQ ID NO: 55584 - protein, 9 aa, Homo sapiens
  misc_feature: Table A; Target 55584; HLA-A*02:04; OR51E1; ENSG00000180785; TAA
FILIGLPGL

SEQ ID NO: 55585 - protein, 9 aa, Homo sapiens
  misc_feature: Table A; Target 55585; HLA-A*02:07; OR51E1; ENSG00000180785; TAA
FILIGLPGL

SEQ ID NO: 55586 - protein, 8 aa, Homo sapiens
  misc_feature: Table A; Target 55586; HLA-B*37:01; OR51E1; ENSG00000180785; TAA
FNSTTIQF

SEQ ID NO: 55587 - protein, 10 aa, Homo sapiens
  misc_feature: Table A; Target 55587; HLA-B*54:01; OR51E1; ENSG00000180785; TAA
FPLCSLYLIA

SEQ ID NO: 55588 - protein, 8 aa, Homo sapiens
  misc_feature: Table A; Target 55588; HLA-A*23:01; OR51E1; ENSG00000180785; TAA
FWFNSTTI

SEQ ID NO: 55589 - protein, 10 aa, Homo sapiens
  misc_feature: Table A; Target 55589; HLA-A*23:01; OR51E1; ENSG00000180785; TAA
FWFNSTTIQF

SEQ ID NO: 55590 - protein, 10 aa, Homo sapiens
  misc_feature: Table A; Target 55590; HLA-A*24:02; OR51E1; ENSG00000180785; TAA
FWFNSTTIQF

SEQ ID NO: 55591 - protein, 10 aa, Homo sapiens
  misc_feature: Table A; Target 55591; HLA-A*23:01; OR51E1; ENSG00000180785; TAA
FYVPFIGLSM

SEQ ID NO: 55592 - protein, 10 aa, Homo sapiens
  misc_feature: Table A; Target 55592; HLA-A*24:02; OR51E1; ENSG00000180785; TAA
FYVPFIGLSM

SEQ ID NO: 55593 - protein, 10 aa, Homo sapiens
  misc_feature: Table A; Target 55593; HLA-A*29:02; OR51E1; ENSG00000180785; TAA
FYVPFIGLSM

SEQ ID NO: 55594 - protein, 11 aa, Homo sapiens
  misc_feature: Table A; Target 55594; HLA-C*04:01; OR51E1; ENSG00000180785; TAA
GIDILISTSSM

SEQ ID NO: 55595 - protein, 9 aa, Homo sapiens
  misc_feature: Table A; Target 55595; HLA-A*01:01; OR51E1; ENSG00000180785; TAA
GLDSLLISF

SEQ ID NO: 55596 - protein, 9 aa, Homo sapiens
  misc_feature: Table A; Target 55596; HLA-A*02:01; OR51E1; ENSG00000180785; TAA
GLDSLLISF

SEQ ID NO: 55597 - protein, 9 aa, Homo sapiens
  misc_feature: Table A; Target 55597; HLA-A*02:04; OR51E1; ENSG00000180785; TAA
GLDSLLISF

SEQ ID NO: 55598 - protein, 9 aa, Homo sapiens
  misc_feature: Table A; Target 55598; HLA-A*02:07; OR51E1; ENSG00000180785; TAA
GLDSLLISF

SEQ ID NO: 55599 - protein, 9 aa, Homo sapiens
  misc_feature: Table A; Target 55599; HLA-A*03:01; OR51E1; ENSG00000180785; TAA
GLDSLLISF

SEQ ID NO: 55600 - protein, 9 aa, Homo sapiens
  misc_feature: Table A; Target 55600; HLA-A*29:02; OR51E1; ENSG00000180785; TAA
GLDSLLISF

SEQ ID NO: 55601 - protein, 9 aa, Homo sapiens
  misc_feature: Table A; Target 55601; HLA-B*55:01; OR51E1; ENSG00000180785; TAA
GLDSLLISF

SEQ ID NO: 55602 - protein, 9 aa, Homo sapiens
  misc_feature: Table A; Target 55602; HLA-C*05:01; OR51E1; ENSG00000180785; TAA
GLDSLLISF

SEQ ID NO: 55603 - protein, 11 aa, Homo sapiens
  misc_feature: Table A; Target 55603; HLA-A*01:01; OR51E1; ENSG00000180785; TAA
GLDSLLISFSY

SEQ ID NO: 55604 - protein, 11 aa, Homo sapiens
  misc_feature: Table A; Target 55604; HLA-A*29:02; OR51E1; ENSG00000180785; TAA
GLDSLLISFSY

SEQ ID NO: 55605 - protein, 9 aa, Homo sapiens
  misc_feature: Table A; Target 55605; HLA-A*02:01; OR51E1; ENSG00000180785; TAA
GLIVIISAI

SEQ ID NO: 55606 - protein, 9 aa, Homo sapiens
  misc_feature: Table A; Target 55606; HLA-A*02:03; OR51E1; ENSG00000180785; TAA
GLIVIISAI

SEQ ID NO: 55607 - protein, 9 aa, Homo sapiens
  misc_feature: Table A; Target 55607; HLA-A*02:04; OR51E1; ENSG00000180785; TAA
GLIVIISAI

SEQ ID NO: 55608 - protein, 9 aa, Homo sapiens
  misc_feature: Table A; Target 55608; HLA-A*02:07; OR51E1; ENSG00000180785; TAA
GLIVIISAI

SEQ ID NO: 55609 - protein, 9 aa, Homo sapiens
  misc_feature: Table A; Target 55609; HLA-A*30:01; OR51E1; ENSG00000180785; TAA
GLIVIISAI

SEQ ID NO: 55610 - protein, 9 aa, Homo sapiens
  misc_feature: Table A; Target 55610; HLA-B*13:02; OR51E1; ENSG00000180785; TAA
GLIVIISAI

SEQ ID NO: 55611 - protein, 9 aa, Homo sapiens
  misc_feature: Table A; Target 55611; HLA-B*15:01; OR51E1; ENSG00000180785; TAA
GLIVIISAI

SEQ ID NO: 55612 - protein, 9 aa, Homo sapiens
  misc_feature: Table A; Target 55612; HLA-B*46:01; OR51E1; ENSG00000180785; TAA
GLIVIISAI

SEQ ID NO: 55613 - protein, 9 aa, Homo sapiens
  misc_feature: Table A; Target 55613; HLA-B*55:01; OR51E1; ENSG00000180785; TAA
GLIVIISAI

SEQ ID NO: 55614 - protein, 11 aa, Homo sapiens
  misc_feature: Table A; Target 55614; HLA-A*02:04; OR51E1; ENSG00000180785; TAA
GLIVIISAIGL

SEQ ID NO: 55615 - protein, 8 aa, Homo sapiens
  misc_feature: Table A; Target 55615; HLA-B*37:01; OR51E1; ENSG00000180785; TAA
GLSMVHRF

SEQ ID NO: 55616 - protein, 9 aa, Homo sapiens
  misc_feature: Table A; Target 55616; HLA-A*03:02; OR51E1; ENSG00000180785; TAA
GLTREAQAK

SEQ ID NO: 55617 - protein, 9 aa, Homo sapiens
  misc_feature: Table A; Target 55617; HLA-A*02:01; OR51E1; ENSG00000180785; TAA
GVAAVVRGA

SEQ ID NO: 55618 - protein, 9 aa, Homo sapiens
  misc_feature: Table A; Target 55618; HLA-A*02:03; OR51E1; ENSG00000180785; TAA
GVAAVVRGA

SEQ ID NO: 55619 - protein, 9 aa, Homo sapiens
  misc_feature: Table A; Target 55619; HLA-A*32:01; OR51E1; ENSG00000180785; TAA
GVAAVVRGA

SEQ ID NO: 55620 - protein, 9 aa, Homo sapiens
  misc_feature: Table A; Target 55620; HLA-B*13:02; OR51E1; ENSG00000180785; TAA
GVAAVVRGA

SEQ ID NO: 55621 - protein, 9 aa, Homo sapiens
  misc_feature: Table A; Target 55621; HLA-B*55:01; OR51E1; ENSG00000180785; TAA
GVAAVVRGA

SEQ ID NO: 55622 - protein, 9 aa, Homo sapiens
  misc_feature: Table A; Target 55622; HLA-B*56:01; OR51E1; ENSG00000180785; TAA
GVAAVVRGA

SEQ ID NO: 55623 - protein, 9 aa, Homo sapiens
  misc_feature: Table A; Target 55623; HLA-C*06:02; OR51E1; ENSG00000180785; TAA
GVAAVVRGA

SEQ ID NO: 55624 - protein, 10 aa, Homo sapiens
  misc_feature: Table A; Target 55624; HLA-B*56:01; OR51E1; ENSG00000180785; TAA
GVAAVVRGAA

SEQ ID NO: 55625 - protein, 11 aa, Homo sapiens
  misc_feature: Table A; Target 55625; HLA-B*07:02; OR51E1; ENSG00000180785; TAA
GVAAVVRGAAL

SEQ ID NO: 55626 - protein, 11 aa, Homo sapiens
  misc_feature: Table A; Target 55626; HLA-B*27:05; OR51E1; ENSG00000180785; TAA
GVAAVVRGAAL

SEQ ID NO: 55627 - protein, 11 aa, Homo sapiens
  misc_feature: Table A; Target 55627; HLA-C*01:02; OR51E1; ENSG00000180785; TAA
GVAAVVRGAAL

SEQ ID NO: 55628 - protein, 9 aa, Homo sapiens
  misc_feature: Table A; Target 55628; HLA-A*31:01; OR51E1; ENSG00000180785; TAA
HATVLTLPR

SEQ ID NO: 55629 - protein, 9 aa, Homo sapiens
  misc_feature: Table A; Target 55629; HLA-A*33:01; OR51E1; ENSG00000180785; TAA
HATVLTLPR

SEQ ID NO: 55630 - protein, 9 aa, Homo sapiens
  misc_feature: Table A; Target 55630; HLA-A*33:03; OR51E1; ENSG00000180785; TAA
HATVLTLPR

SEQ ID NO: 55631 - protein, 9 aa, Homo sapiens
  misc_feature: Table A; Target 55631; HLA-A*68:01; OR51E1; ENSG00000180785; TAA
HATVLTLPR

SEQ ID NO: 55632 - protein, 9 aa, Homo sapiens
  misc_feature: Table A; Target 55632; HLA-B*27:02; OR51E1; ENSG00000180785; TAA
HATVLTLPR

SEQ ID NO: 55633 - protein, 9 aa, Homo sapiens
  misc_feature: Table A; Target 55633; HLA-C*07:06; OR51E1; ENSG00000180785; TAA
HATVLTLPR

SEQ ID NO: 55634 - protein, 8 aa, Homo sapiens
  misc_feature: Table A; Target 55634; HLA-B*08:01; OR51E1; ENSG00000180785; TAA
HPLRHATV

SEQ ID NO: 55635 - protein, 8 aa, Homo sapiens
  misc_feature: Table A; Target 55635; HLA-B*51:01; OR51E1; ENSG00000180785; TAA
HPLRHATV

SEQ ID NO: 55636 - protein, 9 aa, Homo sapiens
  misc_feature: Table A; Target 55636; HLA-B*07:02; OR51E1; ENSG00000180785; TAA
HPLRHATVL

SEQ ID NO: 55637 - protein, 9 aa, Homo sapiens
  misc_feature: Table A; Target 55637; HLA-B*08:01; OR51E1; ENSG00000180785; TAA
HPLRHATVL

SEQ ID NO: 55638 - protein, 9 aa, Homo sapiens
  misc_feature: Table A; Target 55638; HLA-B*35:01; OR51E1; ENSG00000180785; TAA
HPLRHATVL

SEQ ID NO: 55639 - protein, 9 aa, Homo sapiens
  misc_feature: Table A; Target 55639; HLA-B*35:03; OR51E1; ENSG00000180785; TAA
HPLRHATVL

SEQ ID NO: 55640 - protein, 9 aa, Homo sapiens
  misc_feature: Table A; Target 55640; HLA-C*07:02; OR51E1; ENSG00000180785; TAA
HPLRHATVL

SEQ ID NO: 55641 - protein, 10 aa, Homo sapiens
  misc_feature: Table A; Target 55641; HLA-B*57:01; OR51E1; ENSG00000180785; TAA
HSLHEPMYIF

SEQ ID NO: 55642 - protein, 9 aa, Homo sapiens
  misc_feature: Table A; Target 55642; HLA-A*02:03; OR51E1; ENSG00000180785; TAA
HVATHASEP

SEQ ID NO: 55643 - protein, 9 aa, Homo sapiens
  misc_feature: Table A; Target 55643; HLA-A*26:01; OR51E1; ENSG00000180785; TAA
HVATHASEP

SEQ ID NO: 55644 - protein, 9 aa, Homo sapiens
  misc_feature: Table A; Target 55644; HLA-A*32:01; OR51E1; ENSG00000180785; TAA
HVATHASEP

SEQ ID NO: 55645 - protein, 9 aa, Homo sapiens
  misc_feature: Table A; Target 55645; HLA-B*27:05; OR51E1; ENSG00000180785; TAA
HVATHASEP

SEQ ID NO: 55646 - protein, 9 aa, Homo sapiens
  misc_feature: Table A; Target 55646; HLA-C*04:01; OR51E1; ENSG00000180785; TAA
HVATHASEP

SEQ ID NO: 55647 - protein, 9 aa, Homo sapiens
  misc_feature: Table A; Target 55647; HLA-C*06:02; OR51E1; ENSG00000180785; TAA
HVATHASEP

SEQ ID NO: 55648 - protein, 9 aa, Homo sapiens
  misc_feature: Table A; Target 55648; HLA-C*07:01; OR51E1; ENSG00000180785; TAA
HVATHASEP

SEQ ID NO: 55649 - protein, 9 aa, Homo sapiens
  misc_feature: Table A; Target 55649; HLA-C*07:02; OR51E1; ENSG00000180785; TAA
HVATHASEP

SEQ ID NO: 55650 - protein, 9 aa, Homo sapiens
  misc_feature: Table A; Target 55650; HLA-C*07:04; OR51E1; ENSG00000180785; TAA
HVATHASEP

SEQ ID NO: 55651 - protein, 9 aa, Homo sapiens
  misc_feature: Table A; Target 55651; HLA-C*07:06; OR51E1; ENSG00000180785; TAA
HVATHASEP

SEQ ID NO: 55652 - protein, 9 aa, Homo sapiens
  misc_feature: Table A; Target 55652; HLA-C*12:03; OR51E1; ENSG00000180785; TAA
HVATHASEP

SEQ ID NO: 55653 - protein, 9 aa, Homo sapiens
  misc_feature: Table A; Target 55653; HLA-C*16:01; OR51E1; ENSG00000180785; TAA
HVATHASEP

SEQ ID NO: 55654 - protein, 9 aa, Homo sapiens
  misc_feature: Table A; Target 55654; HLA-C*16:02; OR51E1; ENSG00000180785; TAA
HVATHASEP

SEQ ID NO: 55655 - protein, 9 aa, Homo sapiens
  misc_feature: Table A; Target 55655; HLA-A*29:02; OR51E1; ENSG00000180785; TAA
HVCAVFIFY

SEQ ID NO: 55656 - protein, 9 aa, Homo sapiens
  misc_feature: Table A; Target 55656; HLA-B*35:03; OR51E1; ENSG00000180785; TAA
IAVLGNLTI

SEQ ID NO: 55657 - protein, 9 aa, Homo sapiens
  misc_feature: Table A; Target 55657; HLA-B*49:01; OR51E1; ENSG00000180785; TAA
IAVLGNLTI

SEQ ID NO: 55658 - protein, 9 aa, Homo sapiens
  misc_feature: Table A; Target 55658; HLA-B*51:01; OR51E1; ENSG00000180785; TAA
IAVLGNLTI

SEQ ID NO: 55659 - protein, 9 aa, Homo sapiens
  misc_feature: Table A; Target 55659; HLA-B*58:01; OR51E1; ENSG00000180785; TAA
IAVLGNLTI

SEQ ID NO: 55660 - protein, 10 aa, Homo sapiens
  misc_feature: Table A; Target 55660; HLA-A*30:01; OR51E1; ENSG00000180785; TAA
IDILISTSSM

SEQ ID NO: 55661 - protein, 10 aa, Homo sapiens
  misc_feature: Table A; Target 55661; HLA-B*40:02; OR51E1; ENSG00000180785; TAA
IDILISTSSM

SEQ ID NO: 55662 - protein, 9 aa, Homo sapiens
  misc_feature: Table A; Target 55662; HLA-A*23:01; OR51E1; ENSG00000180785; TAA
IFWFNSTTI

SEQ ID NO: 55663 - protein, 9 aa, Homo sapiens
  misc_feature: Table A; Target 55663; HLA-A*24:02; OR51E1; ENSG00000180785; TAA
IFWFNSTTI

SEQ ID NO: 55664 - protein, 11 aa, Homo sapiens
  misc_feature: Table A; Target 55664; HLA-A*23:01; OR51E1; ENSG00000180785; TAA
IFWFNSTTIQF

SEQ ID NO: 55665 - protein, 9 aa, Homo sapiens
  misc_feature: Table A; Target 55665; HLA-A*23:01; OR51E1; ENSG00000180785; TAA
IFYVPFIGL

SEQ ID NO: 55666 - protein, 9 aa, Homo sapiens
  misc_feature: Table A; Target 55666; HLA-A*29:02; OR51E1; ENSG00000180785; TAA
IFYVPFIGL

SEQ ID NO: 55667 - protein, 9 aa, Homo sapiens
  misc_feature: Table A; Target 55667; HLA-A*31:01; OR51E1; ENSG00000180785; TAA
IFYVPFIGL

SEQ ID NO: 55668 - protein, 8 aa, Homo sapiens
  misc_feature: Table A; Target 55668; HLA-B*51:01; OR51E1; ENSG00000180785; TAA
IGLDSLLI

SEQ ID NO: 55669 - protein, 10 aa, Homo sapiens
  misc_feature: Table A; Target 55669; HLA-A*23:01; OR51E1; ENSG00000180785; TAA
IGLDSLLISF

SEQ ID NO: 55670 - protein, 10 aa, Homo sapiens
  misc_feature: Table A; Target 55670; HLA-A*24:02; OR51E1; ENSG00000180785; TAA
IGLDSLLISF

SEQ ID NO: 55671 - protein, 10 aa, Homo sapiens
  misc_feature: Table A; Target 55671; HLA-B*57:01; OR51E1; ENSG00000180785; TAA
IGLDSLLISF

SEQ ID NO: 55672 - protein, 9 aa, Homo sapiens
  misc_feature: Table A; Target 55672; HLA-A*02:01; OR51E1; ENSG00000180785; TAA
IGLPGLEEA

SEQ ID NO: 55673 - protein, 11 aa, Homo sapiens
  misc_feature: Table A; Target 55673; HLA-A*23:01; OR51E1; ENSG00000180785; TAA
IGLPGLEEAQF

SEQ ID NO: 55674 - protein, 9 aa, Homo sapiens
  misc_feature: Table A; Target 55674; HLA-A*24:02; OR51E1; ENSG00000180785; TAA
IGLSMVHRF

SEQ ID NO: 55675 - protein, 9 aa, Homo sapiens
  misc_feature: Table A; Target 55675; HLA-B*57:01; OR51E1; ENSG00000180785; TAA
IGLSMVHRF

SEQ ID NO: 55676 - protein, 11 aa, Homo sapiens
  misc_feature: Table A; Target 55676; HLA-B*38:01; OR51E1; ENSG00000180785; TAA
IHSLSGMESTV

SEQ ID NO: 55677 - protein, 11 aa, Homo sapiens
  misc_feature: Table A; Target 55677; HLA-B*39:01; OR51E1; ENSG00000180785; TAA
IHSLSGMESTV

SEQ ID NO: 55678 - protein, 9 aa, Homo sapiens
  misc_feature: Table A; Target 55678; HLA-A*03:01; OR51E1; ENSG00000180785; TAA
IIYIVRTEH

SEQ ID NO: 55679 - protein, 8 aa, Homo sapiens
  misc_feature: Table A; Target 55679; HLA-A*02:04; OR51E1; ENSG00000180785; TAA
ILANIYLL

SEQ ID NO: 55680 - protein, 8 aa, Homo sapiens
  misc_feature: Table A; Target 55680; HLA-A*23:01; OR51E1; ENSG00000180785; TAA
ILANIYLL

SEQ ID NO: 55681 - protein, 9 aa, Homo sapiens
  misc_feature: Table A; Target 55681; HLA-A*02:03; OR51E1; ENSG00000180785; TAA
ILANIYLLV

SEQ ID NO: 55682 - protein, 9 aa, Homo sapiens
  misc_feature: Table A; Target 55682; HLA-A*02:07; OR51E1; ENSG00000180785; TAA
ILANIYLLV

SEQ ID NO: 55683 - protein, 9 aa, Homo sapiens
  misc_feature: Table A; Target 55683; HLA-B*13:02; OR51E1; ENSG00000180785; TAA
ILANIYLLV

SEQ ID NO: 55684 - protein, 8 aa, Homo sapiens
  misc_feature: Table A; Target 55684; HLA-A*02:04; OR51E1; ENSG00000180785; TAA
ILIGLPGL

SEQ ID NO: 55685 - protein, 8 aa, Homo sapiens
  misc_feature: Table A; Target 55685; HLA-A*23:01; OR51E1; ENSG00000180785; TAA
ILIGLPGL

SEQ ID NO: 55686 - protein, 8 aa, Homo sapiens
  misc_feature: Table A; Target 55686; HLA-B*55:01; OR51E1; ENSG00000180785; TAA
ILIGLPGL

SEQ ID NO: 55687 - protein, 11 aa, Homo sapiens
  misc_feature: Table A; Target 55687; HLA-A*02:01; OR51E1; ENSG00000180785; TAA
ILIGLPGLEEA

SEQ ID NO: 55688 - protein, 11 aa, Homo sapiens
  misc_feature: Table A; Target 55688; HLA-A*02:03; OR51E1; ENSG00000180785; TAA
ILIGLPGLEEA

SEQ ID NO: 55689 - protein, 11 aa, Homo sapiens
  misc_feature: Table A; Target 55689; HLA-A*02:04; OR51E1; ENSG00000180785; TAA
ILIGLPGLEEA

SEQ ID NO: 55690 - protein, 8 aa, Homo sapiens
  misc_feature: Table A; Target 55690; HLA-B*15:01; OR51E1; ENSG00000180785; TAA
ILISTSSM

SEQ ID NO: 55691 - protein, 8 aa, Homo sapiens
  misc_feature: Table A; Target 55691; HLA-B*46:01; OR51E1; ENSG00000180785; TAA
ILISTSSM

SEQ ID NO: 55692 - protein, 8 aa, Homo sapiens
  misc_feature: Table A; Target 55692; HLA-C*01:02; OR51E1; ENSG00000180785; TAA
ILISTSSM

SEQ ID NO: 55693 - protein, 8 aa, Homo sapiens
  misc_feature: Table A; Target 55693; HLA-C*14:02; OR51E1; ENSG00000180785; TAA
ILISTSSM

SEQ ID NO: 55694 - protein, 10 aa, Homo sapiens
  misc_feature: Table A; Target 55694; HLA-A*03:01; OR51E1; ENSG00000180785; TAA
ILISTSSMPK

SEQ ID NO: 55695 - protein, 10 aa, Homo sapiens
  misc_feature: Table A; Target 55695; HLA-A*03:02; OR51E1; ENSG00000180785; TAA
ILISTSSMPK

SEQ ID NO: 55696 - protein, 10 aa, Homo sapiens
  misc_feature: Table A; Target 55696; HLA-A*11:01; OR51E1; ENSG00000180785; TAA
ILISTSSMPK

SEQ ID NO: 55697 - protein, 10 aa, Homo sapiens
  misc_feature: Table A; Target 55697; HLA-B*27:02; OR51E1; ENSG00000180785; TAA
ILISTSSMPK

SEQ ID NO: 55698 - protein, 8 aa, Homo sapiens
  misc_feature: Table A; Target 55698; HLA-A*02:03; OR51E1; ENSG00000180785; TAA
ILKTVLGL

SEQ ID NO: 55699 - protein, 8 aa, Homo sapiens
  misc_feature: Table A; Target 55699; HLA-B*08:01; OR51E1; ENSG00000180785; TAA
ILKTVLGL

SEQ ID NO: 55700 - protein, 8 aa, Homo sapiens
  misc_feature: Table A; Target 55700; HLA-C*06:02; OR51E1; ENSG00000180785; TAA
ILKTVLGL

SEQ ID NO: 55701 - protein, 8 aa, Homo sapiens
  misc_feature: Table A; Target 55701; HLA-C*07:04; OR51E1; ENSG00000180785; TAA
ILKTVLGL

SEQ ID NO: 55702 - protein, 9 aa, Homo sapiens
  misc_feature: Table A; Target 55702; HLA-A*02:03; OR51E1; ENSG00000180785; TAA
ILKTVLGLT

SEQ ID NO: 55703 - protein, 10 aa, Homo sapiens
  misc_feature: Table A; Target 55703; HLA-A*31:01; OR51E1; ENSG00000180785; TAA
ILKTVLGLTR

SEQ ID NO: 55704 - protein, 10 aa, Homo sapiens
  misc_feature: Table A; Target 55704; HLA-A*33:03; OR51E1; ENSG00000180785; TAA
ILKTVLGLTR

SEQ ID NO: 55705 - protein, 8 aa, Homo sapiens
  misc_feature: Table A; Target 55705; HLA-B*13:02; OR51E1; ENSG00000180785; TAA
IQFDACLL

SEQ ID NO: 55706 - protein, 8 aa, Homo sapiens
  misc_feature: Table A; Target 55706; HLA-B*15:03; OR51E1; ENSG00000180785; TAA
IQFDACLL

SEQ ID NO: 55707 - protein, 9 aa, Homo sapiens
  misc_feature: Table A; Target 55707; HLA-B*27:02; OR51E1; ENSG00000180785; TAA
IRVNVVYGL

SEQ ID NO: 55708 - protein, 9 aa, Homo sapiens
  misc_feature: Table A; Target 55708; HLA-B*27:05; OR51E1; ENSG00000180785; TAA
IRVNVVYGL

SEQ ID NO: 55709 - protein, 9 aa, Homo sapiens
  misc_feature: Table A; Target 55709; HLA-C*06:02; OR51E1; ENSG00000180785; TAA
IRVNVVYGL

SEQ ID NO: 55710 - protein, 9 aa, Homo sapiens
  misc_feature: Table A; Target 55710; HLA-B*39:01; OR51E1; ENSG00000180785; TAA
ISAIGLDSL

SEQ ID NO: 55711 - protein, 9 aa, Homo sapiens
  misc_feature: Table A; Target 55711; HLA-C*01:02; OR51E1; ENSG00000180785; TAA
ISAIGLDSL

SEQ ID NO: 55712 - protein, 9 aa, Homo sapiens
  misc_feature: Table A; Target 55712; HLA-C*03:04; OR51E1; ENSG00000180785; TAA
ISAIGLDSL

SEQ ID NO: 55713 - protein, 8 aa, Homo sapiens
  misc_feature: Table A; Target 55713; HLA-A*03:02; OR51E1; ENSG00000180785; TAA
ISTSSMPK

SEQ ID NO: 55714 - protein, 8 aa, Homo sapiens
  misc_feature: Table A; Target 55714; HLA-A*11:01; OR51E1; ENSG00000180785; TAA
ISTSSMPK

SEQ ID NO: 55715 - protein, 9 aa, Homo sapiens
  misc_feature: Table A; Target 55715; HLA-B*58:01; OR51E1; ENSG00000180785; TAA
ISTSSMPKM

SEQ ID NO: 55716 - protein, 9 aa, Homo sapiens
  misc_feature: Table A; Target 55716; HLA-C*02:02; OR51E1; ENSG00000180785; TAA
ISTSSMPKM

SEQ ID NO: 55717 - protein, 9 aa, Homo sapiens
  misc_feature: Table A; Target 55717; HLA-C*03:03; OR51E1; ENSG00000180785; TAA
ISTSSMPKM

SEQ ID NO: 55718 - protein, 9 aa, Homo sapiens
  misc_feature: Table A; Target 55718; HLA-C*03:04; OR51E1; ENSG00000180785; TAA
ISTSSMPKM

SEQ ID NO: 55719 - protein, 9 aa, Homo sapiens
  misc_feature: Table A; Target 55719; HLA-C*12:03; OR51E1; ENSG00000180785; TAA
ISTSSMPKM

SEQ ID NO: 55720 - protein, 9 aa, Homo sapiens
  misc_feature: Table A; Target 55720; HLA-C*16:01; OR51E1; ENSG00000180785; TAA
ISTSSMPKM

SEQ ID NO: 55721 - protein, 9 aa, Homo sapiens
  misc_feature: Table A; Target 55721; HLA-C*16:02; OR51E1; ENSG00000180785; TAA
ISTSSMPKM

SEQ ID NO: 55722 - protein, 10 aa, Homo sapiens
  misc_feature: Table A; Target 55722; HLA-B*07:02; OR51E1; ENSG00000180785; TAA
ISTSSMPKML

SEQ ID NO: 55723 - protein, 10 aa, Homo sapiens
  misc_feature: Table A; Target 55723; HLA-C*07:02; OR51E1; ENSG00000180785; TAA
ISTSSMPKML

SEQ ID NO: 55724 - protein, 10 aa, Homo sapiens
  misc_feature: Table A; Target 55724; HLA-C*16:02; OR51E1; ENSG00000180785; TAA
ISTSSMPKML

SEQ ID NO: 55725 - protein, 9 aa, Homo sapiens
  misc_feature: Table A; Target 55725; HLA-B*58:01; OR51E1; ENSG00000180785; TAA
IVIISAIGL

SEQ ID NO: 55726 - protein, 9 aa, Homo sapiens
  misc_feature: Table A; Target 55726; HLA-C*01:02; OR51E1; ENSG00000180785; TAA
IVIISAIGL

SEQ ID NO: 55727 - protein, 9 aa, Homo sapiens
  misc_feature: Table A; Target 55727; HLA-C*03:03; OR51E1; ENSG00000180785; TAA
IVIISAIGL

SEQ ID NO: 55728 - protein, 9 aa, Homo sapiens
  misc_feature: Table A; Target 55728; HLA-C*03:04; OR51E1; ENSG00000180785; TAA
IVIISAIGL

SEQ ID NO: 55729 - protein, 8 aa, Homo sapiens
  misc_feature: Table A; Target 55729; HLA-B*07:02; OR51E1; ENSG00000180785; TAA
IVRTEHSL

SEQ ID NO: 55730 - protein, 8 aa, Homo sapiens
  misc_feature: Table A; Target 55730; HLA-B*08:01; OR51E1; ENSG00000180785; TAA
IVRTEHSL

SEQ ID NO: 55731 - protein, 8 aa, Homo sapiens
  misc_feature: Table A; Target 55731; HLA-C*16:01; OR51E1; ENSG00000180785; TAA
IVRTEHSL

SEQ ID NO: 55732 - protein, 8 aa, Homo sapiens
  misc_feature: Table A; Target 55732; HLA-A*03:01; OR51E1; ENSG00000180785; TAA
IVYGVKTK

SEQ ID NO: 55733 - protein, 8 aa, Homo sapiens
  misc_feature: Table A; Target 55733; HLA-A*03:02; OR51E1; ENSG00000180785; TAA
IVYGVKTK

SEQ ID NO: 55734 - protein, 10 aa, Homo sapiens
  misc_feature: Table A; Target 55734; HLA-A*23:01; OR51E1; ENSG00000180785; TAA
IYIVRTEHSL

SEQ ID NO: 55735 - protein, 10 aa, Homo sapiens
  misc_feature: Table A; Target 55735; HLA-A*24:02; OR51E1; ENSG00000180785; TAA
IYIVRTEHSL

SEQ ID NO: 55736 - protein, 9 aa, Homo sapiens
  misc_feature: Table A; Target 55736; HLA-A*23:01; OR51E1; ENSG00000180785; TAA
IYLLVPPVL

SEQ ID NO: 55737 - protein, 9 aa, Homo sapiens
  misc_feature: Table A; Target 55737; HLA-A*24:02; OR51E1; ENSG00000180785; TAA
IYLLVPPVL

SEQ ID NO: 55738 - protein, 9 aa, Homo sapiens
  misc_feature: Table A; Target 55738; HLA-B*35:03; OR51E1; ENSG00000180785; TAA
IYLLVPPVL

SEQ ID NO: 55739 - protein, 9 aa, Homo sapiens
  misc_feature: Table A; Target 55739; HLA-C*14:02; OR51E1; ENSG00000180785; TAA
IYLLVPPVL

SEQ ID NO: 55740 - protein, 9 aa, Homo sapiens
  misc_feature: Table A; Target 55740; HLA-A*32:01; OR51E1; ENSG00000180785; TAA
KAFGTCVSH

SEQ ID NO: 55741 - protein, 9 aa, Homo sapiens
  misc_feature: Table A; Target 55741; HLA-B*15:03; OR51E1; ENSG00000180785; TAA
KAFGTCVSH

SEQ ID NO: 55742 - protein, 9 aa, Homo sapiens
  misc_feature: Table A; Target 55742; HLA-C*02:02; OR51E1; ENSG00000180785; TAA
KAFGTCVSH

SEQ ID NO: 55743 - protein, 9 aa, Homo sapiens
  misc_feature: Table A; Target 55743; HLA-C*06:02; OR51E1; ENSG00000180785; TAA
KAFGTCVSH

SEQ ID NO: 55744 - protein, 9 aa, Homo sapiens
  misc_feature: Table A; Target 55744; HLA-C*07:01; OR51E1; ENSG00000180785; TAA
KAFGTCVSH

SEQ ID NO: 55745 - protein, 10 aa, Homo sapiens
  misc_feature: Table A; Target 55745; HLA-A*02:03; OR51E1; ENSG00000180785; TAA
KAFGTCVSHV

SEQ ID NO: 55746 - protein, 10 aa, Homo sapiens
  misc_feature: Table A; Target 55746; HLA-C*12:03; OR51E1; ENSG00000180785; TAA
KAFGTCVSHV

SEQ ID NO: 55747 - protein, 9 aa, Homo sapiens
  misc_feature: Table A; Target 55747; HLA-A*03:01; OR51E1; ENSG00000180785; TAA
KIGVAAVVR

SEQ ID NO: 55748 - protein, 9 aa, Homo sapiens
  misc_feature: Table A; Target 55748; HLA-A*03:02; OR51E1; ENSG00000180785; TAA
KIGVAAVVR

SEQ ID NO: 55749 - protein, 9 aa, Homo sapiens
  misc_feature: Table A; Target 55749; HLA-C*06:02; OR51E1; ENSG00000180785; TAA
KRRDSPLPV

SEQ ID NO: 55750 - protein, 8 aa, Homo sapiens
  misc_feature: Table A; Target 55750; HLA-A*31:01; OR51E1; ENSG00000180785; TAA
KTKEIRQR

SEQ ID NO: 55751 - protein, 8 aa, Homo sapiens
  misc_feature: Table A; Target 55751; HLA-B*57:01; OR51E1; ENSG00000180785; TAA
KTVLGLTR

SEQ ID NO: 55752 - protein, 10 aa, Homo sapiens
  misc_feature: Table A; Target 55752; HLA-C*06:02; OR51E1; ENSG00000180785; TAA
KTVLGLTREA

SEQ ID NO: 55753 - protein, 10 aa, Homo sapiens
  misc_feature: Table A; Target 55753; HLA-A*68:02; OR51E1; ENSG00000180785; TAA
LACDDIRVNV

SEQ ID NO: 55754 - protein, 8 aa, Homo sapiens
  misc_feature: Table A; Target 55754; HLA-B*46:01; OR51E1; ENSG00000180785; TAA
LAFPLCSL

SEQ ID NO: 55755 - protein, 8 aa, Homo sapiens
  misc_feature: Table A; Target 55755; HLA-B*51:01; OR51E1; ENSG00000180785; TAA
LAFPLCSL

SEQ ID NO: 55756 - protein, 8 aa, Homo sapiens
  misc_feature: Table A; Target 55756; HLA-C*03:04; OR51E1; ENSG00000180785; TAA
LAFPLCSL

SEQ ID NO: 55757 - protein, 9 aa, Homo sapiens
  misc_feature: Table A; Target 55757; HLA-A*01:01; OR51E1; ENSG00000180785; TAA
LAFPLCSLY

SEQ ID NO: 55758 - protein, 9 aa, Homo sapiens
  misc_feature: Table A; Target 55758; HLA-A*29:02; OR51E1; ENSG00000180785; TAA
LAFPLCSLY

SEQ ID NO: 55759 - protein, 9 aa, Homo sapiens
  misc_feature: Table A; Target 55759; HLA-A*30:02; OR51E1; ENSG00000180785; TAA
LAFPLCSLY

SEQ ID NO: 55760 - protein, 9 aa, Homo sapiens
  misc_feature: Table A; Target 55760; HLA-B*15:03; OR51E1; ENSG00000180785; TAA
LAFPLCSLY

SEQ ID NO: 55761 - protein, 9 aa, Homo sapiens
  misc_feature: Table A; Target 55761; HLA-B*35:01; OR51E1; ENSG00000180785; TAA
LAFPLCSLY

SEQ ID NO: 55762 - protein, 9 aa, Homo sapiens
  misc_feature: Table A; Target 55762; HLA-B*57:01; OR51E1; ENSG00000180785; TAA
LAFPLCSLY

SEQ ID NO: 55763 - protein, 9 aa, Homo sapiens
  misc_feature: Table A; Target 55763; HLA-C*02:02; OR51E1; ENSG00000180785; TAA
LAFPLCSLY

SEQ ID NO: 55764 - protein, 9 aa, Homo sapiens
  misc_feature: Table A; Target 55764; HLA-C*07:01; OR51E1; ENSG00000180785; TAA
LAFPLCSLY

SEQ ID NO: 55765 - protein, 9 aa, Homo sapiens
  misc_feature: Table A; Target 55765; HLA-C*12:03; OR51E1; ENSG00000180785; TAA
LAFPLCSLY

SEQ ID NO: 55766 - protein, 8 aa, Homo sapiens
  misc_feature: Table A; Target 55766; HLA-B*18:01; OR51E1; ENSG00000180785; TAA
LDSLLISF

SEQ ID NO: 55767 - protein, 8 aa, Homo sapiens
  misc_feature: Table A; Target 55767; HLA-B*37:01; OR51E1; ENSG00000180785; TAA
LDSLLISF

SEQ ID NO: 55768 - protein, 8 aa, Homo sapiens
  misc_feature: Table A; Target 55768; HLA-C*14:02; OR51E1; ENSG00000180785; TAA
LFHVATHA

SEQ ID NO: 55769 - protein, 9 aa, Homo sapiens
  misc_feature: Table A; Target 55769; HLA-B*38:01; OR51E1; ENSG00000180785; TAA
LHEPMYIFL

SEQ ID NO: 55770 - protein, 8 aa, Homo sapiens
  misc_feature: Table A; Target 55770; HLA-B*38:01; OR51E1; ENSG00000180785; TAA
LHQDVMKL

SEQ ID NO: 55771 - protein, 8 aa, Homo sapiens
  misc_feature: Table A; Target 55771; HLA-B*39:01; OR51E1; ENSG00000180785; TAA
LHQDVMKL

SEQ ID NO: 55772 - protein, 8 aa, Homo sapiens
  misc_feature: Table A; Target 55772; HLA-C*06:02; OR51E1; ENSG00000180785; TAA
LHQDVMKL

SEQ ID NO: 55773 - protein, 8 aa, Homo sapiens
  misc_feature: Table A; Target 55773; HLA-C*07:04; OR51E1; ENSG00000180785; TAA
LHQDVMKL

SEQ ID NO: 55774 - protein, 8 aa, Homo sapiens
  misc_feature: Table A; Target 55774; HLA-C*12:03; OR51E1; ENSG00000180785; TAA
LHQDVMKL

SEQ ID NO: 55775 - protein, 9 aa, Homo sapiens
  misc_feature: Table A; Target 55775; HLA-A*02:01; OR51E1; ENSG00000180785; TAA
LILKTVLGL

SEQ ID NO: 55776 - protein, 9 aa, Homo sapiens
  misc_feature: Table A; Target 55776; HLA-A*02:04; OR51E1; ENSG00000180785; TAA
LILKTVLGL

SEQ ID NO: 55777 - protein, 9 aa, Homo sapiens
  misc_feature: Table A; Target 55777; HLA-A*02:07; OR51E1; ENSG00000180785; TAA
LILKTVLGL

SEQ ID NO: 55778 - protein, 9 aa, Homo sapiens
  misc_feature: Table A; Target 55778; HLA-A*03:01; OR51E1; ENSG00000180785; TAA
LISTSSMPK

SEQ ID NO: 55779 - protein, 9 aa, Homo sapiens
  misc_feature: Table A; Target 55779; HLA-A*03:02; OR51E1; ENSG00000180785; TAA
LISTSSMPK

SEQ ID NO: 55780 - protein, 9 aa, Homo sapiens
  misc_feature: Table A; Target 55780; HLA-A*11:01; OR51E1; ENSG00000180785; TAA
LISTSSMPK

SEQ ID NO: 55781 - protein, 9 aa, Homo sapiens
  misc_feature: Table A; Target 55781; HLA-C*16:01; OR51E1; ENSG00000180785; TAA
LISTSSMPK

SEQ ID NO: 55782 - protein, 9 aa, Homo sapiens
  misc_feature: Table A; Target 55782; HLA-A*29:02; OR51E1; ENSG00000180785; TAA
LLAMAFDRY

SEQ ID NO: 55783 - protein, 8 aa, Homo sapiens
  misc_feature: Table A; Target 55783; HLA-B*08:01; OR51E1; ENSG00000180785; TAA
LLILKTVL

SEQ ID NO: 55784 - protein, 9 aa, Homo sapiens
  misc_feature: Table A; Target 55784; HLA-A*02:01; OR51E1; ENSG00000180785; TAA
LLISFSYLL

SEQ ID NO: 55785 - protein, 9 aa, Homo sapiens
  misc_feature: Table A; Target 55785; HLA-A*02:04; OR51E1; ENSG00000180785; TAA
LLISFSYLL

SEQ ID NO: 55786 - protein, 9 aa, Homo sapiens
  misc_feature: Table A; Target 55786; HLA-A*02:07; OR51E1; ENSG00000180785; TAA
LLISFSYLL

SEQ ID NO: 55787 - protein, 11 aa, Homo sapiens
  misc_feature: Table A; Target 55787; HLA-A*02:04; OR51E1; ENSG00000180785; TAA
LLISFSYLLIL

SEQ ID NO: 55788 - protein, 10 aa, Homo sapiens
  misc_feature: Table A; Target 55788; HLA-A*02:03; OR51E1; ENSG00000180785; TAA
LLQMFAIHSL

SEQ ID NO: 55789 - protein, 10 aa, Homo sapiens
  misc_feature: Table A; Target 55789; HLA-A*02:04; OR51E1; ENSG00000180785; TAA
LLQMFAIHSL

SEQ ID NO: 55790 - protein, 10 aa, Homo sapiens
  misc_feature: Table A; Target 55790; HLA-A*02:01; OR51E1; ENSG00000180785; TAA
LLVPPVLNPI

SEQ ID NO: 55791 - protein, 10 aa, Homo sapiens
  misc_feature: Table A; Target 55791; HLA-A*02:03; OR51E1; ENSG00000180785; TAA
LLVPPVLNPI

SEQ ID NO: 55792 - protein, 10 aa, Homo sapiens
  misc_feature: Table A; Target 55792; HLA-A*02:04; OR51E1; ENSG00000180785; TAA
LLVPPVLNPI

SEQ ID NO: 55793 - protein, 10 aa, Homo sapiens
  misc_feature: Table A; Target 55793; HLA-A*02:07; OR51E1; ENSG00000180785; TAA
LLVPPVLNPI

SEQ ID NO: 55794 - protein, 8 aa, Homo sapiens
  misc_feature: Table A; Target 55794; HLA-A*23:01; OR51E1; ENSG00000180785; TAA
LMAPLPVF

SEQ ID NO: 55795 - protein, 8 aa, Homo sapiens
  misc_feature: Table A; Target 55795; HLA-B*15:03; OR51E1; ENSG00000180785; TAA
LMAPLPVF

SEQ ID NO: 55796 - protein, 8 aa, Homo sapiens
  misc_feature: Table A; Target 55796; HLA-B*46:01; OR51E1; ENSG00000180785; TAA
LMAPLPVF

SEQ ID NO: 55797 - protein, 8 aa, Homo sapiens
  misc_feature: Table A; Target 55797; HLA-B*57:01; OR51E1; ENSG00000180785; TAA
LMAPLPVF

SEQ ID NO: 55798 - protein, 8 aa, Homo sapiens
  misc_feature: Table A; Target 55798; HLA-B*58:01; OR51E1; ENSG00000180785; TAA
LMAPLPVF

SEQ ID NO: 55799 - protein, 9 aa, Homo sapiens
  misc_feature: Table A; Target 55799; HLA-A*02:01; OR51E1; ENSG00000180785; TAA
LMAPLPVFI

SEQ ID NO: 55800 - protein, 9 aa, Homo sapiens
  misc_feature: Table A; Target 55800; HLA-A*02:03; OR51E1; ENSG00000180785; TAA
LMAPLPVFI

SEQ ID NO: 55801 - protein, 9 aa, Homo sapiens
  misc_feature: Table A; Target 55801; HLA-A*02:04; OR51E1; ENSG00000180785; TAA
LMAPLPVFI

SEQ ID NO: 55802 - protein, 9 aa, Homo sapiens
  misc_feature: Table A; Target 55802; HLA-A*02:07; OR51E1; ENSG00000180785; TAA
LMAPLPVFI

SEQ ID NO: 55803 - protein, 9 aa, Homo sapiens
  misc_feature: Table A; Target 55803; HLA-A*23:01; OR51E1; ENSG00000180785; TAA
LMAPLPVFI

SEQ ID NO: 55804 - protein, 9 aa, Homo sapiens
  misc_feature: Table A; Target 55804; HLA-A*24:02; OR51E1; ENSG00000180785; TAA
LMAPLPVFI

SEQ ID NO: 55805 - protein, 9 aa, Homo sapiens
  misc_feature: Table A; Target 55805; HLA-A*68:02; OR51E1; ENSG00000180785; TAA
LMAPLPVFI

SEQ ID NO: 55806 - protein, 9 aa, Homo sapiens
  misc_feature: Table A; Target 55806; HLA-B*13:02; OR51E1; ENSG00000180785; TAA
LMAPLPVFI

SEQ ID NO: 55807 - protein, 9 aa, Homo sapiens
  misc_feature: Table A; Target 55807; HLA-B*49:01; OR51E1; ENSG00000180785; TAA
LMAPLPVFI

SEQ ID NO: 55808 - protein, 9 aa, Homo sapiens
  misc_feature: Table A; Target 55808; HLA-C*06:02; OR51E1; ENSG00000180785; TAA
LMAPLPVFI

SEQ ID NO: 55809 - protein, 9 aa, Homo sapiens
  misc_feature: Table A; Target 55809; HLA-B*07:02; OR51E1; ENSG00000180785; TAA
LPFCRSNIL

SEQ ID NO: 55810 - protein, 9 aa, Homo sapiens
  misc_feature: Table A; Target 55810; HLA-B*08:01; OR51E1; ENSG00000180785; TAA
LPFCRSNIL

SEQ ID NO: 55811 - protein, 9 aa, Homo sapiens
  misc_feature: Table A; Target 55811; HLA-B*51:01; OR51E1; ENSG00000180785; TAA
LPFCRSNIL

SEQ ID NO: 55812 - protein, 9 aa, Homo sapiens
  misc_feature: Table A; Target 55812; HLA-B*35:01; OR51E1; ENSG00000180785; TAA
LPGLEEAQF

SEQ ID NO: 55813 - protein, 9 aa, Homo sapiens
  misc_feature: Table A; Target 55813; HLA-B*35:03; OR51E1; ENSG00000180785; TAA
LPGLEEAQF

SEQ ID NO: 55814 - protein, 9 aa, Homo sapiens
  misc_feature: Table A; Target 55814; HLA-B*55:01; OR51E1; ENSG00000180785; TAA
LPGLEEAQF

SEQ ID NO: 55815 - protein, 9 aa, Homo sapiens
  misc_feature: Table A; Target 55815; HLA-C*03:03; OR51E1; ENSG00000180785; TAA
LPGLEEAQF

SEQ ID NO: 55816 - protein, 9 aa, Homo sapiens
  misc_feature: Table A; Target 55816; HLA-B*07:02; OR51E1; ENSG00000180785; TAA
LPRVTKIGV

SEQ ID NO: 55817 - protein, 9 aa, Homo sapiens
  misc_feature: Table A; Target 55817; HLA-B*08:01; OR51E1; ENSG00000180785; TAA
LPRVTKIGV

SEQ ID NO: 55818 - protein, 9 aa, Homo sapiens
  misc_feature: Table A; Target 55818; HLA-B*51:01; OR51E1; ENSG00000180785; TAA
LPRVTKIGV

SEQ ID NO: 55819 - protein, 9 aa, Homo sapiens
  misc_feature: Table A; Target 55819; HLA-B*54:01; OR51E1; ENSG00000180785; TAA
LPRVTKIGV

SEQ ID NO: 55820 - protein, 9 aa, Homo sapiens
  misc_feature: Table A; Target 55820; HLA-B*56:01; OR51E1; ENSG00000180785; TAA
LPRVTKIGV

SEQ ID NO: 55821 - protein, 9 aa, Homo sapiens
  misc_feature: Table A; Target 55821; HLA-C*07:02; OR51E1; ENSG00000180785; TAA
LPRVTKIGV

SEQ ID NO: 55822 - protein, 10 aa, Homo sapiens
  misc_feature: Table A; Target 55822; HLA-B*07:02; OR51E1; ENSG00000180785; TAA
LPRVTKIGVA

SEQ ID NO: 55823 - protein, 10 aa, Homo sapiens
  misc_feature: Table A; Target 55823; HLA-B*54:01; OR51E1; ENSG00000180785; TAA
LPRVTKIGVA

SEQ ID NO: 55824 - protein, 11 aa, Homo sapiens
  misc_feature: Table A; Target 55824; HLA-B*07:02; OR51E1; ENSG00000180785; TAA
LPRVTKIGVAA

SEQ ID NO: 55825 - protein, 11 aa, Homo sapiens
  misc_feature: Table A; Target 55825; HLA-B*54:01; OR51E1; ENSG00000180785; TAA
LPRVTKIGVAA

SEQ ID NO: 55826 - protein, 11 aa, Homo sapiens
  misc_feature: Table A; Target 55826; HLA-B*56:01; OR51E1; ENSG00000180785; TAA
LPRVTKIGVAA

SEQ ID NO: 55827 - protein, 11 aa, Homo sapiens
  misc_feature: Table A; Target 55827; HLA-C*07:02; OR51E1; ENSG00000180785; TAA
LPRVTKIGVAA

SEQ ID NO: 55828 - protein, 8 aa, Homo sapiens
  misc_feature: Table A; Target 55828; HLA-B*51:01; OR51E1; ENSG00000180785; TAA
LPVILANI

SEQ ID NO: 55829 - protein, 8 aa, Homo sapiens
  misc_feature: Table A; Target 55829; HLA-B*56:01; OR51E1; ENSG00000180785; TAA
LPVILANI

SEQ ID NO: 55830 - protein, 9 aa, Homo sapiens
  misc_feature: Table A; Target 55830; HLA-B*35:01; OR51E1; ENSG00000180785; TAA
LPVILANIY

SEQ ID NO: 55831 - protein, 9 aa, Homo sapiens
  misc_feature: Table A; Target 55831; HLA-A*02:01; OR51E1; ENSG00000180785; TAA
LQMFAIHSL

SEQ ID NO: 55832 - protein, 9 aa, Homo sapiens
  misc_feature: Table A; Target 55832; HLA-A*02:03; OR51E1; ENSG00000180785; TAA
LQMFAIHSL

SEQ ID NO: 55833 - protein, 9 aa, Homo sapiens
  misc_feature: Table A; Target 55833; HLA-A*02:04; OR51E1; ENSG00000180785; TAA
LQMFAIHSL

SEQ ID NO: 55834 - protein, 9 aa, Homo sapiens
  misc_feature: Table A; Target 55834; HLA-A*02:07; OR51E1; ENSG00000180785; TAA
LQMFAIHSL

SEQ ID NO: 55835 - protein, 9 aa, Homo sapiens
  misc_feature: Table A; Target 55835; HLA-A*24:02; OR51E1; ENSG00000180785; TAA
LQMFAIHSL

SEQ ID NO: 55836 - protein, 9 aa, Homo sapiens
  misc_feature: Table A; Target 55836; HLA-A*30:01; OR51E1; ENSG00000180785; TAA
LQMFAIHSL

SEQ ID NO: 55837 - protein, 9 aa, Homo sapiens
  misc_feature: Table A; Target 55837; HLA-A*32:01; OR51E1; ENSG00000180785; TAA
LQMFAIHSL

SEQ ID NO: 55838 - protein, 9 aa, Homo sapiens
  misc_feature: Table A; Target 55838; HLA-B*08:01; OR51E1; ENSG00000180785; TAA
LQMFAIHSL

SEQ ID NO: 55839 - protein, 9 aa, Homo sapiens
  misc_feature: Table A; Target 55839; HLA-B*13:02; OR51E1; ENSG00000180785; TAA
LQMFAIHSL

SEQ ID NO: 55840 - protein, 9 aa, Homo sapiens
  misc_feature: Table A; Target 55840; HLA-B*15:01; OR51E1; ENSG00000180785; TAA
LQMFAIHSL

SEQ ID NO: 55841 - protein, 9 aa, Homo sapiens
  misc_feature: Table A; Target 55841; HLA-B*15:03; OR51E1; ENSG00000180785; TAA
LQMFAIHSL

SEQ ID NO: 55842 - protein, 9 aa, Homo sapiens
  misc_feature: Table A; Target 55842; HLA-B*27:05; OR51E1; ENSG00000180785; TAA
LQMFAIHSL

SEQ ID NO: 55843 - protein, 9 aa, Homo sapiens
  misc_feature: Table A; Target 55843; HLA-B*38:01; OR51E1; ENSG00000180785; TAA
LQMFAIHSL

SEQ ID NO: 55844 - protein, 9 aa, Homo sapiens
  misc_feature: Table A; Target 55844; HLA-B*39:01; OR51E1; ENSG00000180785; TAA
LQMFAIHSL

SEQ ID NO: 55845 - protein, 9 aa, Homo sapiens
  misc_feature: Table A; Target 55845; HLA-B*44:02; OR51E1; ENSG00000180785; TAA
LQMFAIHSL

SEQ ID NO: 55846 - protein, 9 aa, Homo sapiens
  misc_feature: Table A; Target 55846; HLA-C*02:02; OR51E1; ENSG00000180785; TAA
LQMFAIHSL

SEQ ID NO: 55847 - protein, 9 aa, Homo sapiens
  misc_feature: Table A; Target 55847; HLA-C*03:03; OR51E1; ENSG00000180785; TAA
LQMFAIHSL

SEQ ID NO: 55848 - protein, 9 aa, Homo sapiens
  misc_feature: Table A; Target 55848; HLA-C*03:04; OR51E1; ENSG00000180785; TAA
LQMFAIHSL

SEQ ID NO: 55849 - protein, 9 aa, Homo sapiens
  misc_feature: Table A; Target 55849; HLA-C*07:04; OR51E1; ENSG00000180785; TAA
LQMFAIHSL

SEQ ID NO: 55850 - protein, 9 aa, Homo sapiens
  misc_feature: Table A; Target 55850; HLA-C*06:02; OR51E1; ENSG00000180785; TAA
LRHATVLTL

SEQ ID NO: 55851 - protein, 10 aa, Homo sapiens
  misc_feature: Table A; Target 55851; HLA-C*07:02; OR51E1; ENSG00000180785; TAA
LSGMESTVLL

SEQ ID NO: 55852 - protein, 9 aa, Homo sapiens
  misc_feature: Table A; Target 55852; HLA-A*02:04; OR51E1; ENSG00000180785; TAA
LTLPRVTKI

SEQ ID NO: 55853 - protein, 9 aa, Homo sapiens
  misc_feature: Table A; Target 55853; HLA-A*24:02; OR51E1; ENSG00000180785; TAA
LTLPRVTKI

SEQ ID NO: 55854 - protein, 10 aa, Homo sapiens
  misc_feature: Table A; Target 55854; HLA-B*57:01; OR51E1; ENSG00000180785; TAA
LTREAQAKAF

SEQ ID NO: 55855 - protein, 9 aa, Homo sapiens
  misc_feature: Table A; Target 55855; HLA-A*02:01; OR51E1; ENSG00000180785; TAA
LVPPVLNPI

SEQ ID NO: 55856 - protein, 9 aa, Homo sapiens
  misc_feature: Table A; Target 55856; HLA-A*02:04; OR51E1; ENSG00000180785; TAA
LVPPVLNPI

SEQ ID NO: 55857 - protein, 9 aa, Homo sapiens
  misc_feature: Table A; Target 55857; HLA-A*02:07; OR51E1; ENSG00000180785; TAA
LVPPVLNPI

SEQ ID NO: 55858 - protein, 9 aa, Homo sapiens
  misc_feature: Table A; Target 55858; HLA-A*24:02; OR51E1; ENSG00000180785; TAA
LVPPVLNPI

SEQ ID NO: 55859 - protein, 9 aa, Homo sapiens
  misc_feature: Table A; Target 55859; HLA-A*68:02; OR51E1; ENSG00000180785; TAA
LVPPVLNPI

SEQ ID NO: 55860 - protein, 9 aa, Homo sapiens
  misc_feature: Table A; Target 55860; HLA-B*51:01; OR51E1; ENSG00000180785; TAA
LVPPVLNPI

SEQ ID NO: 55861 - protein, 9 aa, Homo sapiens
  misc_feature: Table A; Target 55861; HLA-C*01:02; OR51E1; ENSG00000180785; TAA
LVPPVLNPI

SEQ ID NO: 55862 - protein, 10 aa, Homo sapiens
  misc_feature: Table A; Target 55862; HLA-A*02:07; OR51E1; ENSG00000180785; TAA
LVPPVLNPIV

SEQ ID NO: 55863 - protein, 11 aa, Homo sapiens
  misc_feature: Table A; Target 55863; HLA-A*26:01; OR51E1; ENSG00000180785; TAA
LVPPVLNPIVY

SEQ ID NO: 55864 - protein, 11 aa, Homo sapiens
  misc_feature: Table A; Target 55864; HLA-A*29:02; OR51E1; ENSG00000180785; TAA
LVPPVLNPIVY

SEQ ID NO: 55865 - protein, 11 aa, Homo sapiens
  misc_feature: Table A; Target 55865; HLA-B*15:01; OR51E1; ENSG00000180785; TAA
LVPPVLNPIVY

SEQ ID NO: 55866 - protein, 11 aa, Homo sapiens
  misc_feature: Table A; Target 55866; HLA-C*07:04; OR51E1; ENSG00000180785; TAA
LVPPVLNPIVY

SEQ ID NO: 55867 - protein, 8 aa, Homo sapiens
  misc_feature: Table A; Target 55867; HLA-B*08:01; OR51E1; ENSG00000180785; TAA
MAFDRYVA

SEQ ID NO: 55868 - protein, 8 aa, Homo sapiens
  misc_feature: Table A; Target 55868; HLA-B*56:01; OR51E1; ENSG00000180785; TAA
MAFDRYVA

SEQ ID NO: 55869 - protein, 8 aa, Homo sapiens
  misc_feature: Table A; Target 55869; HLA-C*16:01; OR51E1; ENSG00000180785; TAA
MAFDRYVA

SEQ ID NO: 55870 - protein, 9 aa, Homo sapiens
  misc_feature: Table A; Target 55870; HLA-A*02:01; OR51E1; ENSG00000180785; TAA
MAFDRYVAI

SEQ ID NO: 55871 - protein, 9 aa, Homo sapiens
  misc_feature: Table A; Target 55871; HLA-A*02:03; OR51E1; ENSG00000180785; TAA
MAFDRYVAI

SEQ ID NO: 55872 - protein, 9 aa, Homo sapiens
  misc_feature: Table A; Target 55872; HLA-A*02:04; OR51E1; ENSG00000180785; TAA
MAFDRYVAI

SEQ ID NO: 55873 - protein, 9 aa, Homo sapiens
  misc_feature: Table A; Target 55873; HLA-A*02:07; OR51E1; ENSG00000180785; TAA
MAFDRYVAI

SEQ ID NO: 55874 - protein, 9 aa, Homo sapiens
  misc_feature: Table A; Target 55874; HLA-A*23:01; OR51E1; ENSG00000180785; TAA
MAFDRYVAI

SEQ ID NO: 55875 - protein, 9 aa, Homo sapiens
  misc_feature: Table A; Target 55875; HLA-A*24:02; OR51E1; ENSG00000180785; TAA
MAFDRYVAI

SEQ ID NO: 55876 - protein, 9 aa, Homo sapiens
  misc_feature: Table A; Target 55876; HLA-A*33:01; OR51E1; ENSG00000180785; TAA
MAFDRYVAI

SEQ ID NO: 55877 - protein, 9 aa, Homo sapiens
  misc_feature: Table A; Target 55877; HLA-B*35:03; OR51E1; ENSG00000180785; TAA
MAFDRYVAI

SEQ ID NO: 55878 - protein, 9 aa, Homo sapiens
  misc_feature: Table A; Target 55878; HLA-B*57:01; OR51E1; ENSG00000180785; TAA
MAFDRYVAI

SEQ ID NO: 55879 - protein, 9 aa, Homo sapiens
  misc_feature: Table A; Target 55879; HLA-B*58:01; OR51E1; ENSG00000180785; TAA
MAFDRYVAI

SEQ ID NO: 55880 - protein, 9 aa, Homo sapiens
  misc_feature: Table A; Target 55880; HLA-C*01:02; OR51E1; ENSG00000180785; TAA
MAFDRYVAI

SEQ ID NO: 55881 - protein, 9 aa, Homo sapiens
  misc_feature: Table A; Target 55881; HLA-C*16:02; OR51E1; ENSG00000180785; TAA
MAFDRYVAI

SEQ ID NO: 55882 - protein, 8 aa, Homo sapiens
  misc_feature: Table A; Target 55882; HLA-B*51:01; OR51E1; ENSG00000180785; TAA
MAPLPVFI

SEQ ID NO: 55883 - protein, 8 aa, Homo sapiens
  misc_feature: Table A; Target 55883; HLA-C*07:01; OR51E1; ENSG00000180785; TAA
MAPLPVFI

SEQ ID NO: 55884 - protein, 9 aa, Homo sapiens
  misc_feature: Table A; Target 55884; HLA-A*11:01; OR51E1; ENSG00000180785; TAA
MAPLPVFIK

SEQ ID NO: 55885 - protein, 8 aa, Homo sapiens
  misc_feature: Table A; Target 55885; HLA-B*18:01; OR51E1; ENSG00000180785; TAA
MESTVLLA

SEQ ID NO: 55886 - protein, 8 aa, Homo sapiens
  misc_feature: Table A; Target 55886; HLA-B*37:01; OR51E1; ENSG00000180785; TAA
MESTVLLA

SEQ ID NO: 55887 - protein, 8 aa, Homo sapiens
  misc_feature: Table A; Target 55887; HLA-B*49:01; OR51E1; ENSG00000180785; TAA
MESTVLLA

SEQ ID NO: 55888 - protein, 9 aa, Homo sapiens
  misc_feature: Table A; Target 55888; HLA-A*30:01; OR51E1; ENSG00000180785; TAA
MESTVLLAM

SEQ ID NO: 55889 - protein, 9 aa, Homo sapiens
  misc_feature: Table A; Target 55889; HLA-B*18:01; OR51E1; ENSG00000180785; TAA
MESTVLLAM

SEQ ID NO: 55890 - protein, 9 aa, Homo sapiens
  misc_feature: Table A; Target 55890; HLA-B*35:01; OR51E1; ENSG00000180785; TAA
MESTVLLAM

SEQ ID NO: 55891 - protein, 9 aa, Homo sapiens
  misc_feature: Table A; Target 55891; HLA-B*37:01; OR51E1; ENSG00000180785; TAA
MESTVLLAM

SEQ ID NO: 55892 - protein, 9 aa, Homo sapiens
  misc_feature: Table A; Target 55892; HLA-B*40:01; OR51E1; ENSG00000180785; TAA
MESTVLLAM

SEQ ID NO: 55893 - protein, 9 aa, Homo sapiens
  misc_feature: Table A; Target 55893; HLA-B*40:02; OR51E1; ENSG00000180785; TAA
MESTVLLAM

SEQ ID NO: 55894 - protein, 9 aa, Homo sapiens
  misc_feature: Table A; Target 55894; HLA-B*44:02; OR51E1; ENSG00000180785; TAA
MESTVLLAM

SEQ ID NO: 55895 - protein, 9 aa, Homo sapiens
  misc_feature: Table A; Target 55895; HLA-B*44:03; OR51E1; ENSG00000180785; TAA
MESTVLLAM

SEQ ID NO: 55896 - protein, 9 aa, Homo sapiens
  misc_feature: Table A; Target 55896; HLA-B*49:01; OR51E1; ENSG00000180785; TAA
MESTVLLAM

SEQ ID NO: 55897 - protein, 9 aa, Homo sapiens
  misc_feature: Table A; Target 55897; HLA-C*02:02; OR51E1; ENSG00000180785; TAA
MESTVLLAM

SEQ ID NO: 55898 - protein, 9 aa, Homo sapiens
  misc_feature: Table A; Target 55898; HLA-C*16:04; OR51E1; ENSG00000180785; TAA
MESTVLLAM

SEQ ID NO: 55899 - protein, 11 aa, Homo sapiens
  misc_feature: Table A; Target 55899; HLA-B*18:01; OR51E1; ENSG00000180785; TAA
MESTVLLAMAF

SEQ ID NO: 55900 - protein, 11 aa, Homo sapiens
  misc_feature: Table A; Target 55900; HLA-B*44:02; OR51E1; ENSG00000180785; TAA
MESTVLLAMAF

SEQ ID NO: 55901 - protein, 8 aa, Homo sapiens
  misc_feature: Table A; Target 55901; HLA-C*07:01; OR51E1; ENSG00000180785; TAA
MFAIHSLS

SEQ ID NO: 55902 - protein, 9 aa, Homo sapiens
  misc_feature: Table A; Target 55902; HLA-A*02:01; OR51E1; ENSG00000180785; TAA
MLSGIDILI

SEQ ID NO: 55903 - protein, 9 aa, Homo sapiens
  misc_feature: Table A; Target 55903; HLA-A*02:03; OR51E1; ENSG00000180785; TAA
MLSGIDILI

SEQ ID NO: 55904 - protein, 9 aa, Homo sapiens
  misc_feature: Table A; Target 55904; HLA-A*02:04; OR51E1; ENSG00000180785; TAA
MLSGIDILI

SEQ ID NO: 55905 - protein, 9 aa, Homo sapiens
  misc_feature: Table A; Target 55905; HLA-A*02:07; OR51E1; ENSG00000180785; TAA
MLSGIDILI

SEQ ID NO: 55906 - protein, 9 aa, Homo sapiens
  misc_feature: Table A; Target 55906; HLA-A*68:02; OR51E1; ENSG00000180785; TAA
MLSGIDILI

SEQ ID NO: 55907 - protein, 9 aa, Homo sapiens
  misc_feature: Table A; Target 55907; HLA-B*13:02; OR51E1; ENSG00000180785; TAA
MLSGIDILI

SEQ ID NO: 55908 - protein, 9 aa, Homo sapiens
  misc_feature: Table A; Target 55908; HLA-B*38:01; OR51E1; ENSG00000180785; TAA
MLSGIDILI

SEQ ID NO: 55909 - protein, 9 aa, Homo sapiens
  misc_feature: Table A; Target 55909; HLA-C*04:01; OR51E1; ENSG00000180785; TAA
MLSGIDILI

SEQ ID NO: 55910 - protein, 11 aa, Homo sapiens
  misc_feature: Table A; Target 55910; HLA-B*35:03; OR51E1; ENSG00000180785; TAA
MVDPNGNESSA

SEQ ID NO: 55911 - protein, 11 aa, Homo sapiens
  misc_feature: Table A; Target 55911; HLA-B*54:01; OR51E1; ENSG00000180785; TAA
MVDPNGNESSA

SEQ ID NO: 55912 - protein, 8 aa, Homo sapiens
  misc_feature: Table A; Target 55912; HLA-A*33:01; OR51E1; ENSG00000180785; TAA
MVHRFSKR

SEQ ID NO: 55913 - protein, 8 aa, Homo sapiens
  misc_feature: Table A; Target 55913; HLA-B*18:01; OR51E1; ENSG00000180785; TAA
NESSATYF

SEQ ID NO: 55914 - protein, 8 aa, Homo sapiens
  misc_feature: Table A; Target 55914; HLA-B*37:01; OR51E1; ENSG00000180785; TAA
NESSATYF

SEQ ID NO: 55915 - protein, 8 aa, Homo sapiens
  misc_feature: Table A; Target 55915; HLA-B*44:02; OR51E1; ENSG00000180785; TAA
NESSATYF

SEQ ID NO: 55916 - protein, 8 aa, Homo sapiens
  misc_feature: Table A; Target 55916; HLA-B*44:03; OR51E1; ENSG00000180785; TAA
NESSATYF

SEQ ID NO: 55917 - protein, 9 aa, Homo sapiens
  misc_feature: Table A; Target 55917; HLA-B*38:01; OR51E1; ENSG00000180785; TAA
NESSATYFI

SEQ ID NO: 55918 - protein, 9 aa, Homo sapiens
  misc_feature: Table A; Target 55918; HLA-B*44:02; OR51E1; ENSG00000180785; TAA
NESSATYFI

SEQ ID NO: 55919 - protein, 9 aa, Homo sapiens
  misc_feature: Table A; Target 55919; HLA-B*44:03; OR51E1; ENSG00000180785; TAA
NESSATYFI

SEQ ID NO: 55920 - protein, 9 aa, Homo sapiens
  misc_feature: Table A; Target 55920; HLA-B*49:01; OR51E1; ENSG00000180785; TAA
NESSATYFI

SEQ ID NO: 55921 - protein, 10 aa, Homo sapiens
  misc_feature: Table A; Target 55921; HLA-A*30:01; OR51E1; ENSG00000180785; TAA
NESSATYFIL

SEQ ID NO: 55922 - protein, 9 aa, Homo sapiens
  misc_feature: Table A; Target 55922; HLA-A*30:02; OR51E1; ENSG00000180785; TAA
NGNESSATY

SEQ ID NO: 55923 - protein, 9 aa, Homo sapiens
  misc_feature: Table A; Target 55923; HLA-A*32:01; OR51E1; ENSG00000180785; TAA
NGNESSATY

SEQ ID NO: 55924 - protein, 9 aa, Homo sapiens
  misc_feature: Table A; Target 55924; HLA-B*15:01; OR51E1; ENSG00000180785; TAA
NGNESSATY

SEQ ID NO: 55925 - protein, 9 aa, Homo sapiens
  misc_feature: Table A; Target 55925; HLA-B*15:03; OR51E1; ENSG00000180785; TAA
NGNESSATY

SEQ ID NO: 55926 - protein, 9 aa, Homo sapiens
  misc_feature: Table A; Target 55926; HLA-B*18:01; OR51E1; ENSG00000180785; TAA
NGNESSATY

SEQ ID NO: 55927 - protein, 9 aa, Homo sapiens
  misc_feature: Table A; Target 55927; HLA-B*35:01; OR51E1; ENSG00000180785; TAA
NGNESSATY

SEQ ID NO: 55928 - protein, 9 aa, Homo sapiens
  misc_feature: Table A; Target 55928; HLA-B*39:01; OR51E1; ENSG00000180785; TAA
NGNESSATY

SEQ ID NO: 55929 - protein, 9 aa, Homo sapiens
  misc_feature: Table A; Target 55929; HLA-B*46:01; OR51E1; ENSG00000180785; TAA
NGNESSATY

SEQ ID NO: 55930 - protein, 9 aa, Homo sapiens
  misc_feature: Table A; Target 55930; HLA-C*01:02; OR51E1; ENSG00000180785; TAA
NGNESSATY

SEQ ID NO: 55931 - protein, 9 aa, Homo sapiens
  misc_feature: Table A; Target 55931; HLA-C*03:03; OR51E1; ENSG00000180785; TAA
NGNESSATY

SEQ ID NO: 55932 - protein, 9 aa, Homo sapiens
  misc_feature: Table A; Target 55932; HLA-C*07:04; OR51E1; ENSG00000180785; TAA
NGNESSATY

SEQ ID NO: 55933 - protein, 9 aa, Homo sapiens
  misc_feature: Table A; Target 55933; HLA-C*07:06; OR51E1; ENSG00000180785; TAA
NGNESSATY

SEQ ID NO: 55934 - protein, 9 aa, Homo sapiens
  misc_feature: Table A; Target 55934; HLA-C*14:02; OR51E1; ENSG00000180785; TAA
NGNESSATY

SEQ ID NO: 55935 - protein, 8 aa, Homo sapiens
  misc_feature: Table A; Target 55935; HLA-A*02:04; OR51E1; ENSG00000180785; TAA
NLTIIYIV

SEQ ID NO: 55936 - protein, 9 aa, Homo sapiens
  misc_feature: Table A; Target 55936; HLA-A*33:01; OR51E1; ENSG00000180785; TAA
NLTIIYIVR

SEQ ID NO: 55937 - protein, 9 aa, Homo sapiens
  misc_feature: Table A; Target 55937; HLA-A*33:03; OR51E1; ENSG00000180785; TAA
NLTIIYIVR

SEQ ID NO: 55938 - protein, 9 aa, Homo sapiens
  misc_feature: Table A; Target 55938; HLA-B*35:03; OR51E1; ENSG00000180785; TAA
NPIVYGVKT

SEQ ID NO: 55939 - protein, 9 aa, Homo sapiens
  misc_feature: Table A; Target 55939; HLA-A*68:02; OR51E1; ENSG00000180785; TAA
NVVYGLIVI

SEQ ID NO: 55940 - protein, 9 aa, Homo sapiens
  misc_feature: Table A; Target 55940; HLA-A*02:07; OR51E1; ENSG00000180785; TAA
PLPVFIKQL

SEQ ID NO: 55941 - protein, 9 aa, Homo sapiens
  misc_feature: Table A; Target 55941; HLA-A*02:07; OR51E1; ENSG00000180785; TAA
PLPVILANI

SEQ ID NO: 55942 - protein, 9 aa, Homo sapiens
  misc_feature: Table A; Target 55942; HLA-A*24:02; OR51E1; ENSG00000180785; TAA
PLPVILANI

SEQ ID NO: 55943 - protein, 9 aa, Homo sapiens
  misc_feature: Table A; Target 55943; HLA-B*35:01; OR51E1; ENSG00000180785; TAA
PPVLNPIVY

SEQ ID NO: 55944 - protein, 9 aa, Homo sapiens
  misc_feature: Table A; Target 55944; HLA-C*04:01; OR51E1; ENSG00000180785; TAA
PPVLNPIVY

SEQ ID NO: 55945 - protein, 8 aa, Homo sapiens
  misc_feature: Table A; Target 55945; HLA-A*30:02; OR51E1; ENSG00000180785; TAA
PVLNPIVY

SEQ ID NO: 55946 - protein, 9 aa, Homo sapiens
  misc_feature: Table A; Target 55946; HLA-B*07:02; OR51E1; ENSG00000180785; TAA
QAKAFGTCV

SEQ ID NO: 55947 - protein, 9 aa, Homo sapiens
  misc_feature: Table A; Target 55947; HLA-B*08:01; OR51E1; ENSG00000180785; TAA
QAKAFGTCV

SEQ ID NO: 55948 - protein, 9 aa, Homo sapiens
  misc_feature: Table A; Target 55948; HLA-B*13:02; OR51E1; ENSG00000180785; TAA
QAKAFGTCV

SEQ ID NO: 55949 - protein, 9 aa, Homo sapiens
  misc_feature: Table A; Target 55949; HLA-B*40:02; OR51E1; ENSG00000180785; TAA
QAKAFGTCV

SEQ ID NO: 55950 - protein, 9 aa, Homo sapiens
  misc_feature: Table A; Target 55950; HLA-B*46:01; OR51E1; ENSG00000180785; TAA
QAKAFGTCV

SEQ ID NO: 55951 - protein, 9 aa, Homo sapiens
  misc_feature: Table A; Target 55951; HLA-B*51:01; OR51E1; ENSG00000180785; TAA
QAKAFGTCV

SEQ ID NO: 55952 - protein, 9 aa, Homo sapiens
  misc_feature: Table A; Target 55952; HLA-B*54:01; OR51E1; ENSG00000180785; TAA
QAKAFGTCV

SEQ ID NO: 55953 - protein, 9 aa, Homo sapiens
  misc_feature: Table A; Target 55953; HLA-B*56:01; OR51E1; ENSG00000180785; TAA
QAKAFGTCV

SEQ ID NO: 55954 - protein, 9 aa, Homo sapiens
  misc_feature: Table A; Target 55954; HLA-C*02:02; OR51E1; ENSG00000180785; TAA
QAKAFGTCV

SEQ ID NO: 55955 - protein, 9 aa, Homo sapiens
  misc_feature: Table A; Target 55955; HLA-C*07:02; OR51E1; ENSG00000180785; TAA
QAKAFGTCV

SEQ ID NO: 55956 - protein, 9 aa, Homo sapiens
  misc_feature: Table A; Target 55956; HLA-C*12:03; OR51E1; ENSG00000180785; TAA
QAKAFGTCV

SEQ ID NO: 55957 - protein, 9 aa, Homo sapiens
  misc_feature: Table A; Target 55957; HLA-C*16:02; OR51E1; ENSG00000180785; TAA
QAKAFGTCV

SEQ ID NO: 55958 - protein, 9 aa, Homo sapiens
  misc_feature: Table A; Target 55958; HLA-B*35:03; OR51E1; ENSG00000180785; TAA
QFDACLLQM

SEQ ID NO: 55959 - protein, 9 aa, Homo sapiens
  misc_feature: Table A; Target 55959; HLA-C*04:01; OR51E1; ENSG00000180785; TAA
QFDACLLQM

SEQ ID NO: 55960 - protein, 8 aa, Homo sapiens
  misc_feature: Table A; Target 55960; HLA-A*02:01; OR51E1; ENSG00000180785; TAA
QMFAIHSL

SEQ ID NO: 55961 - protein, 8 aa, Homo sapiens
  misc_feature: Table A; Target 55961; HLA-A*02:03; OR51E1; ENSG00000180785; TAA
QMFAIHSL

SEQ ID NO: 55962 - protein, 8 aa, Homo sapiens
  misc_feature: Table A; Target 55962; HLA-A*02:04; OR51E1; ENSG00000180785; TAA
QMFAIHSL

SEQ ID NO: 55963 - protein, 8 aa, Homo sapiens
  misc_feature: Table A; Target 55963; HLA-A*32:01; OR51E1; ENSG00000180785; TAA
QMFAIHSL

SEQ ID NO: 55964 - protein, 8 aa, Homo sapiens
  misc_feature: Table A; Target 55964; HLA-B*08:01; OR51E1; ENSG00000180785; TAA
QMFAIHSL

SEQ ID NO: 55965 - protein, 8 aa, Homo sapiens
  misc_feature: Table A; Target 55965; HLA-B*13:02; OR51E1; ENSG00000180785; TAA
QMFAIHSL

SEQ ID NO: 55966 - protein, 8 aa, Homo sapiens
  misc_feature: Table A; Target 55966; HLA-B*15:01; OR51E1; ENSG00000180785; TAA
QMFAIHSL

SEQ ID NO: 55967 - protein, 8 aa, Homo sapiens
  misc_feature: Table A; Target 55967; HLA-B*15:03; OR51E1; ENSG00000180785; TAA
QMFAIHSL

SEQ ID NO: 55968 - protein, 8 aa, Homo sapiens
  misc_feature: Table A; Target 55968; HLA-B*18:01; OR51E1; ENSG00000180785; TAA
QMFAIHSL

SEQ ID NO: 55969 - protein, 8 aa, Homo sapiens
  misc_feature: Table A; Target 55969; HLA-B*37:01; OR51E1; ENSG00000180785; TAA
QMFAIHSL

SEQ ID NO: 55970 - protein, 8 aa, Homo sapiens
  misc_feature: Table A; Target 55970; HLA-B*40:02; OR51E1; ENSG00000180785; TAA
QMFAIHSL

SEQ ID NO: 55971 - protein, 8 aa, Homo sapiens
  misc_feature: Table A; Target 55971; HLA-B*51:01; OR51E1; ENSG00000180785; TAA
QMFAIHSL

SEQ ID NO: 55972 - protein, 8 aa, Homo sapiens
  misc_feature: Table A; Target 55972; HLA-C*07:04; OR51E1; ENSG00000180785; TAA
QMFAIHSL

SEQ ID NO: 55973 - protein, 8 aa, Homo sapiens
  misc_feature: Table A; Target 55973; HLA-B*37:01; OR51E1; ENSG00000180785; TAA
RDSPLPVI

SEQ ID NO: 55974 - protein, 9 aa, Homo sapiens
  misc_feature: Table A; Target 55974; HLA-A*30:01; OR51E1; ENSG00000180785; TAA
RDSPLPVIL

SEQ ID NO: 55975 - protein, 9 aa, Homo sapiens
  misc_feature: Table A; Target 55975; HLA-B*37:01; OR51E1; ENSG00000180785; TAA
RDSPLPVIL

SEQ ID NO: 55976 - protein, 9 aa, Homo sapiens
  misc_feature: Table A; Target 55976; HLA-B*38:01; OR51E1; ENSG00000180785; TAA
RDSPLPVIL

SEQ ID NO: 55977 - protein, 9 aa, Homo sapiens
  misc_feature: Table A; Target 55977; HLA-B*40:01; OR51E1; ENSG00000180785; TAA
RDSPLPVIL

SEQ ID NO: 55978 - protein, 9 aa, Homo sapiens
  misc_feature: Table A; Target 55978; HLA-B*40:02; OR51E1; ENSG00000180785; TAA
RDSPLPVIL

SEQ ID NO: 55979 - protein, 9 aa, Homo sapiens
  misc_feature: Table A; Target 55979; HLA-C*06:02; OR51E1; ENSG00000180785; TAA
RDSPLPVIL

SEQ ID NO: 55980 - protein, 9 aa, Homo sapiens
  misc_feature: Table A; Target 55980; HLA-C*07:04; OR51E1; ENSG00000180785; TAA
RDSPLPVIL

SEQ ID NO: 55981 - protein, 9 aa, Homo sapiens
  misc_feature: Table A; Target 55981; HLA-C*12:03; OR51E1; ENSG00000180785; TAA
RDSPLPVIL

SEQ ID NO: 55982 - protein, 8 aa, Homo sapiens
  misc_feature: Table A; Target 55982; HLA-B*18:01; OR51E1; ENSG00000180785; TAA
REAQAKAF

SEQ ID NO: 55983 - protein, 8 aa, Homo sapiens
  misc_feature: Table A; Target 55983; HLA-B*37:01; OR51E1; ENSG00000180785; TAA
REAQAKAF

SEQ ID NO: 55984 - protein, 8 aa, Homo sapiens
  misc_feature: Table A; Target 55984; HLA-B*44:02; OR51E1; ENSG00000180785; TAA
REAQAKAF

SEQ ID NO: 55985 - protein, 8 aa, Homo sapiens
  misc_feature: Table A; Target 55985; HLA-B*44:03; OR51E1; ENSG00000180785; TAA
REAQAKAF

SEQ ID NO: 55986 - protein, 8 aa, Homo sapiens
  misc_feature: Table A; Target 55986; HLA-A*02:04; OR51E1; ENSG00000180785; TAA
RILRLFHV

SEQ ID NO: 55987 - protein, 9 aa, Homo sapiens
  misc_feature: Table A; Target 55987; HLA-A*02:03; OR51E1; ENSG00000180785; TAA
RLFHVATHA

SEQ ID NO: 55988 - protein, 9 aa, Homo sapiens
  misc_feature: Table A; Target 55988; HLA-A*02:04; OR51E1; ENSG00000180785; TAA
RLFHVATHA

SEQ ID NO: 55989 - protein, 9 aa, Homo sapiens
  misc_feature: Table A; Target 55989; HLA-A*02:07; OR51E1; ENSG00000180785; TAA
RLFHVATHA

SEQ ID NO: 55990 - protein, 9 aa, Homo sapiens
  misc_feature: Table A; Target 55990; HLA-A*01:01; OR51E1; ENSG00000180785; TAA
RSNILSHSY

SEQ ID NO: 55991 - protein, 9 aa, Homo sapiens
  misc_feature: Table A; Target 55991; HLA-A*03:02; OR51E1; ENSG00000180785; TAA
RSNILSHSY

SEQ ID NO: 55992 - protein, 9 aa, Homo sapiens
  misc_feature: Table A; Target 55992; HLA-A*29:02; OR51E1; ENSG00000180785; TAA
RSNILSHSY

SEQ ID NO: 55993 - protein, 9 aa, Homo sapiens
  misc_feature: Table A; Target 55993; HLA-A*30:02; OR51E1; ENSG00000180785; TAA
RSNILSHSY

SEQ ID NO: 55994 - protein, 9 aa, Homo sapiens
  misc_feature: Table A; Target 55994; HLA-A*31:01; OR51E1; ENSG00000180785; TAA
RSNILSHSY

SEQ ID NO: 55995 - protein, 9 aa, Homo sapiens
  misc_feature: Table A; Target 55995; HLA-A*32:01; OR51E1; ENSG00000180785; TAA
RSNILSHSY

SEQ ID NO: 55996 - protein, 9 aa, Homo sapiens
  misc_feature: Table A; Target 55996; HLA-B*15:01; OR51E1; ENSG00000180785; TAA
RSNILSHSY

SEQ ID NO: 55997 - protein, 9 aa, Homo sapiens
  misc_feature: Table A; Target 55997; HLA-B*15:03; OR51E1; ENSG00000180785; TAA
RSNILSHSY

SEQ ID NO: 55998 - protein, 9 aa, Homo sapiens
  misc_feature: Table A; Target 55998; HLA-B*27:02; OR51E1; ENSG00000180785; TAA
RSNILSHSY

SEQ ID NO: 55999 - protein, 9 aa, Homo sapiens
  misc_feature: Table A; Target 55999; HLA-B*44:02; OR51E1; ENSG00000180785; TAA
RSNILSHSY

SEQ ID NO: 56000 - protein, 9 aa, Homo sapiens
  misc_feature: Table A; Target 56000; HLA-B*44:03; OR51E1; ENSG00000180785; TAA
RSNILSHSY

SEQ ID NO: 56001 - protein, 9 aa, Homo sapiens
  misc_feature: Table A; Target 56001; HLA-B*46:01; OR51E1; ENSG00000180785; TAA
RSNILSHSY

SEQ ID NO: 56002 - protein, 9 aa, Homo sapiens
  misc_feature: Table A; Target 56002; HLA-B*57:01; OR51E1; ENSG00000180785; TAA
RSNILSHSY

SEQ ID NO: 56003 - protein, 9 aa, Homo sapiens
  misc_feature: Table A; Target 56003; HLA-B*58:01; OR51E1; ENSG00000180785; TAA
RSNILSHSY

SEQ ID NO: 56004 - protein, 9 aa, Homo sapiens
  misc_feature: Table A; Target 56004; HLA-C*02:02; OR51E1; ENSG00000180785; TAA
RSNILSHSY

SEQ ID NO: 56005 - protein, 9 aa, Homo sapiens
  misc_feature: Table A; Target 56005; HLA-C*16:01; OR51E1; ENSG00000180785; TAA
RSNILSHSY

SEQ ID NO: 56006 - protein, 9 aa, Homo sapiens
  misc_feature: Table A; Target 56006; HLA-C*16:02; OR51E1; ENSG00000180785; TAA
RSNILSHSY

SEQ ID NO: 56007 - protein, 9 aa, Homo sapiens
  misc_feature: Table A; Target 56007; HLA-C*16:04; OR51E1; ENSG00000180785; TAA
RSNILSHSY

SEQ ID NO: 56008 - protein, 11 aa, Homo sapiens
  misc_feature: Table A; Target 56008; HLA-A*01:01; OR51E1; ENSG00000180785; TAA
RTEHSLHEPMY

SEQ ID NO: 56009 - protein, 8 aa, Homo sapiens
  misc_feature: Table A; Target 56009; HLA-B*37:01; OR51E1; ENSG00000180785; TAA
RVNVVYGL

SEQ ID NO: 56010 - protein, 9 aa, Homo sapiens
  misc_feature: Table A; Target 56010; HLA-B*54:01; OR51E1; ENSG00000180785; TAA
RVTKIGVAA

SEQ ID NO: 56011 - protein, 9 aa, Homo sapiens
  misc_feature: Table A; Target 56011; HLA-B*56:01; OR51E1; ENSG00000180785; TAA
RVTKIGVAA

SEQ ID NO: 56012 - protein, 9 aa, Homo sapiens
  misc_feature: Table A; Target 56012; HLA-A*23:01; OR51E1; ENSG00000180785; TAA
RYVAICHPL

SEQ ID NO: 56013 - protein, 9 aa, Homo sapiens
  misc_feature: Table A; Target 56013; HLA-A*31:01; OR51E1; ENSG00000180785; TAA
RYVAICHPL

SEQ ID NO: 56014 - protein, 9 aa, Homo sapiens
  misc_feature: Table A; Target 56014; HLA-C*06:02; OR51E1; ENSG00000180785; TAA
RYVAICHPL

SEQ ID NO: 56015 - protein, 9 aa, Homo sapiens
  misc_feature: Table A; Target 56015; HLA-C*07:01; OR51E1; ENSG00000180785; TAA
RYVAICHPL

SEQ ID NO: 56016 - protein, 8 aa, Homo sapiens
  misc_feature: Table A; Target 56016; HLA-C*03:04; OR51E1; ENSG00000180785; TAA
SAIGLDSL

SEQ ID NO: 56017 - protein, 9 aa, Homo sapiens
  misc_feature: Table A; Target 56017; HLA-B*35:03; OR51E1; ENSG00000180785; TAA
SAIGLDSLL

SEQ ID NO: 56018 - protein, 9 aa, Homo sapiens
  misc_feature: Table A; Target 56018; HLA-B*38:01; OR51E1; ENSG00000180785; TAA
SAIGLDSLL

SEQ ID NO: 56019 - protein, 9 aa, Homo sapiens
  misc_feature: Table A; Target 56019; HLA-B*39:01; OR51E1; ENSG00000180785; TAA
SAIGLDSLL

SEQ ID NO: 56020 - protein, 9 aa, Homo sapiens
  misc_feature: Table A; Target 56020; HLA-C*02:02; OR51E1; ENSG00000180785; TAA
SAIGLDSLL

SEQ ID NO: 56021 - protein, 9 aa, Homo sapiens
  misc_feature: Table A; Target 56021; HLA-C*05:01; OR51E1; ENSG00000180785; TAA
SAIGLDSLL

SEQ ID NO: 56022 - protein, 8 aa, Homo sapiens
  misc_feature: Table A; Target 56022; HLA-B*51:01; OR51E1; ENSG00000180785; TAA
SATYFILI

SEQ ID NO: 56023 - protein, 9 aa, Homo sapiens
  misc_feature: Table A; Target 56023; HLA-B*54:01; OR51E1; ENSG00000180785; TAA
SGIDILIST

SEQ ID NO: 56024 - protein, 9 aa, Homo sapiens
  misc_feature: Table A; Target 56024; HLA-B*56:01; OR51E1; ENSG00000180785; TAA
SGIDILIST

SEQ ID NO: 56025 - protein, 8 aa, Homo sapiens
  misc_feature: Table A; Target 56025; HLA-B*08:01; OR51E1; ENSG00000180785; TAA
SGMESTVL

SEQ ID NO: 56026 - protein, 8 aa, Homo sapiens
  misc_feature: Table A; Target 56026; HLA-B*15:01; OR51E1; ENSG00000180785; TAA
SGMESTVL

SEQ ID NO: 56027 - protein, 8 aa, Homo sapiens
  misc_feature: Table A; Target 56027; HLA-B*15:03; OR51E1; ENSG00000180785; TAA
SGMESTVL

SEQ ID NO: 56028 - protein, 8 aa, Homo sapiens
  misc_feature: Table A; Target 56028; HLA-B*35:03; OR51E1; ENSG00000180785; TAA
SGMESTVL

SEQ ID NO: 56029 - protein, 8 aa, Homo sapiens
  misc_feature: Table A; Target 56029; HLA-C*03:03; OR51E1; ENSG00000180785; TAA
SGMESTVL

SEQ ID NO: 56030 - protein, 8 aa, Homo sapiens
  misc_feature: Table A; Target 56030; HLA-C*03:04; OR51E1; ENSG00000180785; TAA
SGMESTVL

SEQ ID NO: 56031 - protein, 8 aa, Homo sapiens
  misc_feature: Table A; Target 56031; HLA-C*05:01; OR51E1; ENSG00000180785; TAA
SGMESTVL

SEQ ID NO: 56032 - protein, 9 aa, Homo sapiens
  misc_feature: Table A; Target 56032; HLA-A*02:01; OR51E1; ENSG00000180785; TAA
SGMESTVLL

SEQ ID NO: 56033 - protein, 9 aa, Homo sapiens
  misc_feature: Table A; Target 56033; HLA-A*02:04; OR51E1; ENSG00000180785; TAA
SGMESTVLL

SEQ ID NO: 56034 - protein, 9 aa, Homo sapiens
  misc_feature: Table A; Target 56034; HLA-A*02:07; OR51E1; ENSG00000180785; TAA
SGMESTVLL

SEQ ID NO: 56035 - protein, 9 aa, Homo sapiens
  misc_feature: Table A; Target 56035; HLA-A*23:01; OR51E1; ENSG00000180785; TAA
SGMESTVLL

SEQ ID NO: 56036 - protein, 9 aa, Homo sapiens
  misc_feature: Table A; Target 56036; HLA-A*30:01; OR51E1; ENSG00000180785; TAA
SGMESTVLL

SEQ ID NO: 56037 - protein, 9 aa, Homo sapiens
  misc_feature: Table A; Target 56037; HLA-B*35:03; OR51E1; ENSG00000180785; TAA
SGMESTVLL

SEQ ID NO: 56038 - protein, 9 aa, Homo sapiens
  misc_feature: Table A; Target 56038; HLA-B*38:01; OR51E1; ENSG00000180785; TAA
SGMESTVLL

SEQ ID NO: 56039 - protein, 9 aa, Homo sapiens
  misc_feature: Table A; Target 56039; HLA-B*40:01; OR51E1; ENSG00000180785; TAA
SGMESTVLL

SEQ ID NO: 56040 - protein, 9 aa, Homo sapiens
  misc_feature: Table A; Target 56040; HLA-C*01:02; OR51E1; ENSG00000180785; TAA
SGMESTVLL

SEQ ID NO: 56041 - protein, 9 aa, Homo sapiens
  misc_feature: Table A; Target 56041; HLA-C*02:02; OR51E1; ENSG00000180785; TAA
SGMESTVLL

SEQ ID NO: 56042 - protein, 9 aa, Homo sapiens
  misc_feature: Table A; Target 56042; HLA-C*03:03; OR51E1; ENSG00000180785; TAA
SGMESTVLL

SEQ ID NO: 56043 - protein, 9 aa, Homo sapiens
  misc_feature: Table A; Target 56043; HLA-C*03:04; OR51E1; ENSG00000180785; TAA
SGMESTVLL

SEQ ID NO: 56044 - protein, 9 aa, Homo sapiens
  misc_feature: Table A; Target 56044; HLA-C*05:01; OR51E1; ENSG00000180785; TAA
SGMESTVLL

SEQ ID NO: 56045 - protein, 9 aa, Homo sapiens
  misc_feature: Table A; Target 56045; HLA-C*07:04; OR51E1; ENSG00000180785; TAA
SGMESTVLL

SEQ ID NO: 56046 - protein, 9 aa, Homo sapiens
  misc_feature: Table A; Target 56046; HLA-C*14:02; OR51E1; ENSG00000180785; TAA
SGMESTVLL

SEQ ID NO: 56047 - protein, 8 aa, Homo sapiens
  misc_feature: Table A; Target 56047; HLA-A*02:03; OR51E1; ENSG00000180785; TAA
SLHEPMYI

SEQ ID NO: 56048 - protein, 8 aa, Homo sapiens
  misc_feature: Table A; Target 56048; HLA-B*13:02; OR51E1; ENSG00000180785; TAA
SLHEPMYI

SEQ ID NO: 56049 - protein, 10 aa, Homo sapiens
  misc_feature: Table A; Target 56049; HLA-A*02:01; OR51E1; ENSG00000180785; TAA
SLHEPMYIFL

SEQ ID NO: 56050 - protein, 10 aa, Homo sapiens
  misc_feature: Table A; Target 56050; HLA-A*02:03; OR51E1; ENSG00000180785; TAA
SLHEPMYIFL

SEQ ID NO: 56051 - protein, 10 aa, Homo sapiens
  misc_feature: Table A; Target 56051; HLA-A*02:04; OR51E1; ENSG00000180785; TAA
SLHEPMYIFL

SEQ ID NO: 56052 - protein, 10 aa, Homo sapiens
  misc_feature: Table A; Target 56052; HLA-A*02:07; OR51E1; ENSG00000180785; TAA
SLHEPMYIFL

SEQ ID NO: 56053 - protein, 8 aa, Homo sapiens
  misc_feature: Table A; Target 56053; HLA-A*29:02; OR51E1; ENSG00000180785; TAA
SLLISFSY

SEQ ID NO: 56054 - protein, 9 aa, Homo sapiens
  misc_feature: Table A; Target 56054; HLA-A*02:01; OR51E1; ENSG00000180785; TAA
SLLISFSYL

SEQ ID NO: 56055 - protein, 9 aa, Homo sapiens
  misc_feature: Table A; Target 56055; HLA-A*02:04; OR51E1; ENSG00000180785; TAA
SLLISFSYL

SEQ ID NO: 56056 - protein, 9 aa, Homo sapiens
  misc_feature: Table A; Target 56056; HLA-A*02:07; OR51E1; ENSG00000180785; TAA
SLLISFSYL

SEQ ID NO: 56057 - protein, 9 aa, Homo sapiens
  misc_feature: Table A; Target 56057; HLA-A*02:01; OR51E1; ENSG00000180785; TAA
SLSGMESTV

SEQ ID NO: 56058 - protein, 9 aa, Homo sapiens
  misc_feature: Table A; Target 56058; HLA-A*02:03; OR51E1; ENSG00000180785; TAA
SLSGMESTV

SEQ ID NO: 56059 - protein, 9 aa, Homo sapiens
  misc_feature: Table A; Target 56059; HLA-B*13:02; OR51E1; ENSG00000180785; TAA
SLSGMESTV

SEQ ID NO: 56060 - protein, 9 aa, Homo sapiens
  misc_feature: Table A; Target 56060; HLA-B*55:01; OR51E1; ENSG00000180785; TAA
SLSGMESTV

SEQ ID NO: 56061 - protein, 11 aa, Homo sapiens
  misc_feature: Table A; Target 56061; HLA-A*02:04; OR51E1; ENSG00000180785; TAA
SLSGMESTVLL

SEQ ID NO: 56062 - protein, 8 aa, Homo sapiens
  misc_feature: Table A; Target 56062; HLA-A*02:04; OR51E1; ENSG00000180785; TAA
SLYLIAVL

SEQ ID NO: 56063 - protein, 8 aa, Homo sapiens
  misc_feature: Table A; Target 56063; HLA-B*08:01; OR51E1; ENSG00000180785; TAA
SLYLIAVL

SEQ ID NO: 56064 - protein, 9 aa, Homo sapiens
  misc_feature: Table A; Target 56064; HLA-A*24:02; OR51E1; ENSG00000180785; TAA
SMPKMLAIF

SEQ ID NO: 56065 - protein, 9 aa, Homo sapiens
  misc_feature: Table A; Target 56065; HLA-A*31:01; OR51E1; ENSG00000180785; TAA
SMVHRFSKR

SEQ ID NO: 56066 - protein, 8 aa, Homo sapiens
  misc_feature: Table A; Target 56066; HLA-A*29:02; OR51E1; ENSG00000180785; TAA
SNILSHSY

SEQ ID NO: 56067 - protein, 8 aa, Homo sapiens
  misc_feature: Table A; Target 56067; HLA-A*30:02; OR51E1; ENSG00000180785; TAA
SNILSHSY

SEQ ID NO: 56068 - protein, 8 aa, Homo sapiens
  misc_feature: Table A; Target 56068; HLA-A*32:01; OR51E1; ENSG00000180785; TAA
SNILSHSY

SEQ ID NO: 56069 - protein, 8 aa, Homo sapiens
  misc_feature: Table A; Target 56069; HLA-B*15:01; OR51E1; ENSG00000180785; TAA
SNILSHSY

SEQ ID NO: 56070 - protein, 8 aa, Homo sapiens
  misc_feature: Table A; Target 56070; HLA-B*15:03; OR51E1; ENSG00000180785; TAA
SNILSHSY

SEQ ID NO: 56071 - protein, 8 aa, Homo sapiens
  misc_feature: Table A; Target 56071; HLA-B*18:01; OR51E1; ENSG00000180785; TAA
SNILSHSY

SEQ ID NO: 56072 - protein, 8 aa, Homo sapiens
  misc_feature: Table A; Target 56072; HLA-B*37:01; OR51E1; ENSG00000180785; TAA
SNILSHSY

SEQ ID NO: 56073 - protein, 8 aa, Homo sapiens
  misc_feature: Table A; Target 56073; HLA-B*44:02; OR51E1; ENSG00000180785; TAA
SNILSHSY

SEQ ID NO: 56074 - protein, 8 aa, Homo sapiens
  misc_feature: Table A; Target 56074; HLA-B*44:03; OR51E1; ENSG00000180785; TAA
SNILSHSY

SEQ ID NO: 56075 - protein, 8 aa, Homo sapiens
  misc_feature: Table A; Target 56075; HLA-C*07:01; OR51E1; ENSG00000180785; TAA
SNILSHSY

SEQ ID NO: 56076 - protein, 8 aa, Homo sapiens
  misc_feature: Table A; Target 56076; HLA-C*14:02; OR51E1; ENSG00000180785; TAA
SNILSHSY

SEQ ID NO: 56077 - protein, 8 aa, Homo sapiens
  misc_feature: Table A; Target 56077; HLA-C*16:01; OR51E1; ENSG00000180785; TAA
SNILSHSY

SEQ ID NO: 56078 - protein, 8 aa, Homo sapiens
  misc_feature: Table A; Target 56078; HLA-B*54:01; OR51E1; ENSG00000180785; TAA
SPLPVILA

SEQ ID NO: 56079 - protein, 8 aa, Homo sapiens
  misc_feature: Table A; Target 56079; HLA-B*55:01; OR51E1; ENSG00000180785; TAA
SPLPVILA

SEQ ID NO: 56080 - protein, 8 aa, Homo sapiens
  misc_feature: Table A; Target 56080; HLA-B*56:01; OR51E1; ENSG00000180785; TAA
SPLPVILA

SEQ ID NO: 56081 - protein, 9 aa, Homo sapiens
  misc_feature: Table A; Target 56081; HLA-B*54:01; OR51E1; ENSG00000180785; TAA
SPLPVILAN

SEQ ID NO: 56082 - protein, 9 aa, Homo sapiens
  misc_feature: Table A; Target 56082; HLA-B*56:01; OR51E1; ENSG00000180785; TAA
SPLPVILAN

SEQ ID NO: 56083 - protein, 10 aa, Homo sapiens
  misc_feature: Table A; Target 56083; HLA-A*23:01; OR51E1; ENSG00000180785; TAA
SPLPVILANI

SEQ ID NO: 56084 - protein, 10 aa, Homo sapiens
  misc_feature: Table A; Target 56084; HLA-B*51:01; OR51E1; ENSG00000180785; TAA
SPLPVILANI

SEQ ID NO: 56085 - protein, 10 aa, Homo sapiens
  misc_feature: Table A; Target 56085; HLA-B*56:01; OR51E1; ENSG00000180785; TAA
SPLPVILANI

SEQ ID NO: 56086 - protein, 11 aa, Homo sapiens
  misc_feature: Table A; Target 56086; HLA-A*29:02; OR51E1; ENSG00000180785; TAA
SPLPVILANIY

SEQ ID NO: 56087 - protein, 11 aa, Homo sapiens
  misc_feature: Table A; Target 56087; HLA-A*30:02; OR51E1; ENSG00000180785; TAA
SPLPVILANIY

SEQ ID NO: 56088 - protein, 11 aa, Homo sapiens
  misc_feature: Table A; Target 56088; HLA-B*35:01; OR51E1; ENSG00000180785; TAA
SPLPVILANIY

SEQ ID NO: 56089 - protein, 9 aa, Homo sapiens
  misc_feature: Table A; Target 56089; HLA-A*68:02; OR51E1; ENSG00000180785; TAA
SSATYFILI

SEQ ID NO: 56090 - protein, 9 aa, Homo sapiens
  misc_feature: Table A; Target 56090; HLA-A*25:01; OR51E1; ENSG00000180785; TAA
SSMPKMLAI

SEQ ID NO: 56091 - protein, 9 aa, Homo sapiens
  misc_feature: Table A; Target 56091; HLA-B*08:01; OR51E1; ENSG00000180785; TAA
SSMPKMLAI

SEQ ID NO: 56092 - protein, 9 aa, Homo sapiens
  misc_feature: Table A; Target 56092; HLA-B*13:02; OR51E1; ENSG00000180785; TAA
SSMPKMLAI

SEQ ID NO: 56093 - protein, 9 aa, Homo sapiens
  misc_feature: Table A; Target 56093; HLA-B*58:01; OR51E1; ENSG00000180785; TAA
SSMPKMLAI

SEQ ID NO: 56094 - protein, 11 aa, Homo sapiens
  misc_feature: Table A; Target 56094; HLA-B*57:01; OR51E1; ENSG00000180785; TAA
SSMPKMLAIFW

SEQ ID NO: 56095 - protein, 9 aa, Homo sapiens
  misc_feature: Table A; Target 56095; HLA-A*68:02; OR51E1; ENSG00000180785; TAA
STSSMPKML

SEQ ID NO: 56096 - protein, 9 aa, Homo sapiens
  misc_feature: Table A; Target 56096; HLA-B*07:02; OR51E1; ENSG00000180785; TAA
STSSMPKML

SEQ ID NO: 56097 - protein, 9 aa, Homo sapiens
  misc_feature: Table A; Target 56097; HLA-B*27:05; OR51E1; ENSG00000180785; TAA
STSSMPKML

SEQ ID NO: 56098 - protein, 9 aa, Homo sapiens
  misc_feature: Table A; Target 56098; HLA-C*04:01; OR51E1; ENSG00000180785; TAA
STSSMPKML

SEQ ID NO: 56099 - protein, 9 aa, Homo sapiens
  misc_feature: Table A; Target 56099; HLA-C*06:02; OR51E1; ENSG00000180785; TAA
STSSMPKML

SEQ ID NO: 56100 - protein, 9 aa, Homo sapiens
  misc_feature: Table A; Target 56100; HLA-C*12:03; OR51E1; ENSG00000180785; TAA
STSSMPKML

SEQ ID NO: 56101 - protein, 9 aa, Homo sapiens
  misc_feature: Table A; Target 56101; HLA-C*16:01; OR51E1; ENSG00000180785; TAA
STSSMPKML

SEQ ID NO: 56102 - protein, 9 aa, Homo sapiens
  misc_feature: Table A; Target 56102; HLA-C*16:02; OR51E1; ENSG00000180785; TAA
STSSMPKML

SEQ ID NO: 56103 - protein, 9 aa, Homo sapiens
  misc_feature: Table A; Target 56103; HLA-B*57:01; OR51E1; ENSG00000180785; TAA
STVLLAMAF

SEQ ID NO: 56104 - protein, 9 aa, Homo sapiens
  misc_feature: Table A; Target 56104; HLA-C*07:01; OR51E1; ENSG00000180785; TAA
SYCLHQDVM

SEQ ID NO: 56105 - protein, 9 aa, Homo sapiens
  misc_feature: Table A; Target 56105; HLA-A*23:01; OR51E1; ENSG00000180785; TAA
SYLLILKTV

SEQ ID NO: 56106 - protein, 9 aa, Homo sapiens
  misc_feature: Table A; Target 56106; HLA-A*24:02; OR51E1; ENSG00000180785; TAA
SYLLILKTV

SEQ ID NO: 56107 - protein, 10 aa, Homo sapiens
  misc_feature: Table A; Target 56107; HLA-A*23:01; OR51E1; ENSG00000180785; TAA
SYLLILKTVL

SEQ ID NO: 56108 - protein, 10 aa, Homo sapiens
  misc_feature: Table A; Target 56108; HLA-A*24:02; OR51E1; ENSG00000180785; TAA
SYLLILKTVL

SEQ ID NO: 56109 - protein, 9 aa, Homo sapiens
  misc_feature: Table A; Target 56109; HLA-A*30:01; OR51E1; ENSG00000180785; TAA
TEHSLHEPM

SEQ ID NO: 56110 - protein, 9 aa, Homo sapiens
  misc_feature: Table A; Target 56110; HLA-B*18:01; OR51E1; ENSG00000180785; TAA
TEHSLHEPM

SEQ ID NO: 56111 - protein, 9 aa, Homo sapiens
  misc_feature: Table A; Target 56111; HLA-B*37:01; OR51E1; ENSG00000180785; TAA
TEHSLHEPM

SEQ ID NO: 56112 - protein, 9 aa, Homo sapiens
  misc_feature: Table A; Target 56112; HLA-B*40:01; OR51E1; ENSG00000180785; TAA
TEHSLHEPM

SEQ ID NO: 56113 - protein, 9 aa, Homo sapiens
  misc_feature: Table A; Target 56113; HLA-B*40:02; OR51E1; ENSG00000180785; TAA
TEHSLHEPM

SEQ ID NO: 56114 - protein, 9 aa, Homo sapiens
  misc_feature: Table A; Target 56114; HLA-C*06:02; OR51E1; ENSG00000180785; TAA
TEHSLHEPM

SEQ ID NO: 56115 - protein, 9 aa, Homo sapiens
  misc_feature: Table A; Target 56115; HLA-C*07:01; OR51E1; ENSG00000180785; TAA
TEHSLHEPM

SEQ ID NO: 56116 - protein, 9 aa, Homo sapiens
  misc_feature: Table A; Target 56116; HLA-C*07:04; OR51E1; ENSG00000180785; TAA
TEHSLHEPM

SEQ ID NO: 56117 - protein, 10 aa, Homo sapiens
  misc_feature: Table A; Target 56117; HLA-A*30:02; OR51E1; ENSG00000180785; TAA
TEHSLHEPMY

SEQ ID NO: 56118 - protein, 10 aa, Homo sapiens
  misc_feature: Table A; Target 56118; HLA-B*44:02; OR51E1; ENSG00000180785; TAA
TEHSLHEPMY

SEQ ID NO: 56119 - protein, 10 aa, Homo sapiens
  misc_feature: Table A; Target 56119; HLA-B*44:03; OR51E1; ENSG00000180785; TAA
TEHSLHEPMY

SEQ ID NO: 56120 - protein, 9 aa, Homo sapiens
  misc_feature: Table A; Target 56120; HLA-A*68:02; OR51E1; ENSG00000180785; TAA
TKIGVAAVV

SEQ ID NO: 56121 - protein, 9 aa, Homo sapiens
  misc_feature: Table A; Target 56121; HLA-B*15:03; OR51E1; ENSG00000180785; TAA
TKIGVAAVV

SEQ ID NO: 56122 - protein, 10 aa, Homo sapiens
  misc_feature: Table A; Target 56122; HLA-A*02:07; OR51E1; ENSG00000180785; TAA
TLPRVTKIGV

SEQ ID NO: 56123 - protein, 9 aa, Homo sapiens
  misc_feature: Table A; Target 56123; HLA-B*27:02; OR51E1; ENSG00000180785; TAA
TREAQAKAF

SEQ ID NO: 56124 - protein, 9 aa, Homo sapiens
  misc_feature: Table A; Target 56124; HLA-B*27:05; OR51E1; ENSG00000180785; TAA
TREAQAKAF

SEQ ID NO: 56125 - protein, 9 aa, Homo sapiens
  misc_feature: Table A; Target 56125; HLA-B*38:01; OR51E1; ENSG00000180785; TAA
TREAQAKAF

SEQ ID NO: 56126 - protein, 9 aa, Homo sapiens
  misc_feature: Table A; Target 56126; HLA-C*06:02; OR51E1; ENSG00000180785; TAA
TREAQAKAF

SEQ ID NO: 56127 - protein, 9 aa, Homo sapiens
  misc_feature: Table A; Target 56127; HLA-C*07:01; OR51E1; ENSG00000180785; TAA
TREAQAKAF

SEQ ID NO: 56128 - protein, 9 aa, Homo sapiens
  misc_feature: Table A; Target 56128; HLA-C*16:04; OR51E1; ENSG00000180785; TAA
TREAQAKAF

SEQ ID NO: 56129 - protein, 9 aa, Homo sapiens
  misc_feature: Table A; Target 56129; HLA-B*35:03; OR51E1; ENSG00000180785; TAA
TTIQFDACL

SEQ ID NO: 56130 - protein, 10 aa, Homo sapiens
  misc_feature: Table A; Target 56130; HLA-A*68:02; OR51E1; ENSG00000180785; TAA
TTIQFDACLL

SEQ ID NO: 56131 - protein, 10 aa, Homo sapiens
  misc_feature: Table A; Target 56131; HLA-C*06:02; OR51E1; ENSG00000180785; TAA
TTIQFDACLL

SEQ ID NO: 56132 - protein, 9 aa, Homo sapiens
  misc_feature: Table A; Target 56132; HLA-B*54:01; OR51E1; ENSG00000180785; TAA
TVLGLTREA

SEQ ID NO: 56133 - protein, 9 aa, Homo sapiens
  misc_feature: Table A; Target 56133; HLA-B*56:01; OR51E1; ENSG00000180785; TAA
TVLGLTREA

SEQ ID NO: 56134 - protein, 8 aa, Homo sapiens
  misc_feature: Table A; Target 56134; HLA-B*37:01; OR51E1; ENSG00000180785; TAA
TVLLAMAF

SEQ ID NO: 56135 - protein, 10 aa, Homo sapiens
  misc_feature: Table A; Target 56135; HLA-B*27:02; OR51E1; ENSG00000180785; TAA
TVLLAMAFDR

SEQ ID NO: 56136 - protein, 8 aa, Homo sapiens
  misc_feature: Table A; Target 56136; HLA-A*02:01; OR51E1; ENSG00000180785; TAA
TVLTLPRV

SEQ ID NO: 56137 - protein, 8 aa, Homo sapiens
  misc_feature: Table A; Target 56137; HLA-A*02:04; OR51E1; ENSG00000180785; TAA
TVLTLPRV

SEQ ID NO: 56138 - protein, 8 aa, Homo sapiens
  misc_feature: Table A; Target 56138; HLA-B*51:01; OR51E1; ENSG00000180785; TAA
TVLTLPRV

SEQ ID NO: 56139 - protein, 9 aa, Homo sapiens
  misc_feature: Table A; Target 56139; HLA-C*06:02; OR51E1; ENSG00000180785; TAA
TVLTLPRVT

SEQ ID NO: 56140 - protein, 10 aa, Homo sapiens
  misc_feature: Table A; Target 56140; HLA-A*03:01; OR51E1; ENSG00000180785; TAA
TVLTLPRVTK

SEQ ID NO: 56141 - protein, 10 aa, Homo sapiens
  misc_feature: Table A; Target 56141; HLA-A*03:02; OR51E1; ENSG00000180785; TAA
TVLTLPRVTK

SEQ ID NO: 56142 - protein, 10 aa, Homo sapiens
  misc_feature: Table A; Target 56142; HLA-A*11:01; OR51E1; ENSG00000180785; TAA
TVLTLPRVTK

SEQ ID NO: 56143 - protein, 10 aa, Homo sapiens
  misc_feature: Table A; Target 56143; HLA-A*31:01; OR51E1; ENSG00000180785; TAA
TVLTLPRVTK

SEQ ID NO: 56144 - protein, 10 aa, Homo sapiens
  misc_feature: Table A; Target 56144; HLA-A*33:03; OR51E1; ENSG00000180785; TAA
TVLTLPRVTK

SEQ ID NO: 56145 - protein, 10 aa, Homo sapiens
  misc_feature: Table A; Target 56145; HLA-B*57:01; OR51E1; ENSG00000180785; TAA
TVLTLPRVTK

SEQ ID NO: 56146 - protein, 8 aa, Homo sapiens
  misc_feature: Table A; Target 56146; HLA-C*16:01; OR51E1; ENSG00000180785; TAA
VAAVVRGA

SEQ ID NO: 56147 - protein, 9 aa, Homo sapiens
  misc_feature: Table A; Target 56147; HLA-B*54:01; OR51E1; ENSG00000180785; TAA
VAAVVRGAA

SEQ ID NO: 56148 - protein, 9 aa, Homo sapiens
  misc_feature: Table A; Target 56148; HLA-C*16:01; OR51E1; ENSG00000180785; TAA
VAAVVRGAA

SEQ ID NO: 56149 - protein, 10 aa, Homo sapiens
  misc_feature: Table A; Target 56149; HLA-A*32:01; OR51E1; ENSG00000180785; TAA
VAAVVRGAAL

SEQ ID NO: 56150 - protein, 10 aa, Homo sapiens
  misc_feature: Table A; Target 56150; HLA-B*07:02; OR51E1; ENSG00000180785; TAA
VAAVVRGAAL

SEQ ID NO: 56151 - protein, 10 aa, Homo sapiens
  misc_feature: Table A; Target 56151; HLA-B*08:01; OR51E1; ENSG00000180785; TAA
VAAVVRGAAL

SEQ ID NO: 56152 - protein, 10 aa, Homo sapiens
  misc_feature: Table A; Target 56152; HLA-B*40:01; OR51E1; ENSG00000180785; TAA
VAAVVRGAAL

SEQ ID NO: 56153 - protein, 10 aa, Homo sapiens
  misc_feature: Table A; Target 56153; HLA-B*46:01; OR51E1; ENSG00000180785; TAA
VAAVVRGAAL

SEQ ID NO: 56154 - protein, 10 aa, Homo sapiens
  misc_feature: Table A; Target 56154; HLA-C*01:02; OR51E1; ENSG00000180785; TAA
VAAVVRGAAL

SEQ ID NO: 56155 - protein, 10 aa, Homo sapiens
  misc_feature: Table A; Target 56155; HLA-C*03:03; OR51E1; ENSG00000180785; TAA
VAAVVRGAAL

SEQ ID NO: 56156 - protein, 10 aa, Homo sapiens
  misc_feature: Table A; Target 56156; HLA-C*03:04; OR51E1; ENSG00000180785; TAA
VAAVVRGAAL

SEQ ID NO: 56157 - protein, 10 aa, Homo sapiens
  misc_feature: Table A; Target 56157; HLA-C*05:01; OR51E1; ENSG00000180785; TAA
VAAVVRGAAL

SEQ ID NO: 56158 - protein, 10 aa, Homo sapiens
  misc_feature: Table A; Target 56158; HLA-C*07:02; OR51E1; ENSG00000180785; TAA
VAAVVRGAAL

SEQ ID NO: 56159 - protein, 10 aa, Homo sapiens
  misc_feature: Table A; Target 56159; HLA-C*14:02; OR51E1; ENSG00000180785; TAA
VAAVVRGAAL

SEQ ID NO: 56160 - protein, 10 aa, Homo sapiens
  misc_feature: Table A; Target 56160; HLA-C*16:01; OR51E1; ENSG00000180785; TAA
VAAVVRGAAL

SEQ ID NO: 56161 - protein, 10 aa, Homo sapiens
  misc_feature: Table A; Target 56161; HLA-C*16:02; OR51E1; ENSG00000180785; TAA
VAAVVRGAAL

SEQ ID NO: 56162 - protein, 10 aa, Homo sapiens
  misc_feature: Table A; Target 56162; HLA-C*16:04; OR51E1; ENSG00000180785; TAA
VAAVVRGAAL

SEQ ID NO: 56163 - protein, 11 aa, Homo sapiens
  misc_feature: Table A; Target 56163; HLA-C*04:01; OR51E1; ENSG00000180785; TAA
VAAVVRGAALM

SEQ ID NO: 56164 - protein, 11 aa, Homo sapiens
  misc_feature: Table A; Target 56164; HLA-C*06:02; OR51E1; ENSG00000180785; TAA
VAAVVRGAALM

SEQ ID NO: 56165 - protein, 11 aa, Homo sapiens
  misc_feature: Table A; Target 56165; HLA-C*12:03; OR51E1; ENSG00000180785; TAA
VAAVVRGAALM

SEQ ID NO: 56166 - protein, 11 aa, Homo sapiens
  misc_feature: Table A; Target 56166; HLA-C*16:01; OR51E1; ENSG00000180785; TAA
VAAVVRGAALM

SEQ ID NO: 56167 - protein, 11 aa, Homo sapiens
  misc_feature: Table A; Target 56167; HLA-C*16:02; OR51E1; ENSG00000180785; TAA
VAAVVRGAALM

SEQ ID NO: 56168 - protein, 8 aa, Homo sapiens
  misc_feature: Table A; Target 56168; HLA-C*16:02; OR51E1; ENSG00000180785; TAA
VATHASEP

SEQ ID NO: 56169 - protein, 9 aa, Homo sapiens
  misc_feature: Table A; Target 56169; HLA-A*24:02; OR51E1; ENSG00000180785; TAA
VFIFYVPFI

SEQ ID NO: 56170 - protein, 8 aa, Homo sapiens
  misc_feature: Table A; Target 56170; HLA-A*23:01; OR51E1; ENSG00000180785; TAA
VFIKQLPF

SEQ ID NO: 56171 - protein, 9 aa, Homo sapiens
  misc_feature: Table A; Target 56171; HLA-A*02:01; OR51E1; ENSG00000180785; TAA
VILANIYLL

SEQ ID NO: 56172 - protein, 9 aa, Homo sapiens
  misc_feature: Table A; Target 56172; HLA-A*02:04; OR51E1; ENSG00000180785; TAA
VILANIYLL

SEQ ID NO: 56173 - protein, 9 aa, Homo sapiens
  misc_feature: Table A; Target 56173; HLA-A*23:01; OR51E1; ENSG00000180785; TAA
VILANIYLL

SEQ ID NO: 56174 - protein, 11 aa, Homo sapiens
  misc_feature: Table A; Target 56174; HLA-A*03:02; OR51E1; ENSG00000180785; TAA
VLGLTREAQAK

SEQ ID NO: 56175 - protein, 11 aa, Homo sapiens
  misc_feature: Table A; Target 56175; HLA-C*07:01; OR51E1; ENSG00000180785; TAA
VLGLTREAQAK

SEQ ID NO: 56176 - protein, 11 aa, Homo sapiens
  misc_feature: Table A; Target 56176; HLA-C*07:02; OR51E1; ENSG00000180785; TAA
VLGLTREAQAK

SEQ ID NO: 56177 - protein, 9 aa, Homo sapiens
  misc_feature: Table A; Target 56177; HLA-A*01:01; OR51E1; ENSG00000180785; TAA
VLGNLTIIY

SEQ ID NO: 56178 - protein, 9 aa, Homo sapiens
  misc_feature: Table A; Target 56178; HLA-A*03:01; OR51E1; ENSG00000180785; TAA
VLGNLTIIY

SEQ ID NO: 56179 - protein, 9 aa, Homo sapiens
  misc_feature: Table A; Target 56179; HLA-A*29:02; OR51E1; ENSG00000180785; TAA
VLGNLTIIY

SEQ ID NO: 56180 - protein, 9 aa, Homo sapiens
  misc_feature: Table A; Target 56180; HLA-B*46:01; OR51E1; ENSG00000180785; TAA
VLGNLTIIY

SEQ ID NO: 56181 - protein, 9 aa, Homo sapiens
  misc_feature: Table A; Target 56181; HLA-C*07:04; OR51E1; ENSG00000180785; TAA
VLGNLTIIY

SEQ ID NO: 56182 - protein, 10 aa, Homo sapiens
  misc_feature: Table A; Target 56182; HLA-A*02:03; OR51E1; ENSG00000180785; TAA
VLGNLTIIYI

SEQ ID NO: 56183 - protein, 10 aa, Homo sapiens
  misc_feature: Table A; Target 56183; HLA-A*02:04; OR51E1; ENSG00000180785; TAA
VLGNLTIIYI

SEQ ID NO: 56184 - protein, 10 aa, Homo sapiens
  misc_feature: Table A; Target 56184; HLA-A*29:02; OR51E1; ENSG00000180785; TAA
VLLAMAFDRY

SEQ ID NO: 56185 - protein, 9 aa, Homo sapiens
  misc_feature: Table A; Target 56185; HLA-A*02:01; OR51E1; ENSG00000180785; TAA
VLNPIVYGV

SEQ ID NO: 56186 - protein, 9 aa, Homo sapiens
  misc_feature: Table A; Target 56186; HLA-A*02:03; OR51E1; ENSG00000180785; TAA
VLNPIVYGV

SEQ ID NO: 56187 - protein, 9 aa, Homo sapiens
  misc_feature: Table A; Target 56187; HLA-A*02:04; OR51E1; ENSG00000180785; TAA
VLNPIVYGV

SEQ ID NO: 56188 - protein, 9 aa, Homo sapiens
  misc_feature: Table A; Target 56188; HLA-A*02:07; OR51E1; ENSG00000180785; TAA
VLNPIVYGV

SEQ ID NO: 56189 - protein, 9 aa, Homo sapiens
  misc_feature: Table A; Target 56189; HLA-A*23:01; OR51E1; ENSG00000180785; TAA
VLNPIVYGV

SEQ ID NO: 56190 - protein, 9 aa, Homo sapiens
  misc_feature: Table A; Target 56190; HLA-A*32:01; OR51E1; ENSG00000180785; TAA
VLNPIVYGV

SEQ ID NO: 56191 - protein, 9 aa, Homo sapiens
  misc_feature: Table A; Target 56191; HLA-A*68:02; OR51E1; ENSG00000180785; TAA
VLNPIVYGV

SEQ ID NO: 56192 - protein, 9 aa, Homo sapiens
  misc_feature: Table A; Target 56192; HLA-B*13:02; OR51E1; ENSG00000180785; TAA
VLNPIVYGV

SEQ ID NO: 56193 - protein, 9 aa, Homo sapiens
  misc_feature: Table A; Target 56193; HLA-B*55:01; OR51E1; ENSG00000180785; TAA
VLNPIVYGV

SEQ ID NO: 56194 - protein, 9 aa, Homo sapiens
  misc_feature: Table A; Target 56194; HLA-C*02:02; OR51E1; ENSG00000180785; TAA
VLNPIVYGV

SEQ ID NO: 56195 - protein, 9 aa, Homo sapiens
  misc_feature: Table A; Target 56195; HLA-C*16:02; OR51E1; ENSG00000180785; TAA
VLNPIVYGV

SEQ ID NO: 56196 - protein, 10 aa, Homo sapiens
  misc_feature: Table A; Target 56196; HLA-A*03:01; OR51E1; ENSG00000180785; TAA
VLNPIVYGVK

SEQ ID NO: 56197 - protein, 10 aa, Homo sapiens
  misc_feature: Table A; Target 56197; HLA-A*03:02; OR51E1; ENSG00000180785; TAA
VLNPIVYGVK

SEQ ID NO: 56198 - protein, 10 aa, Homo sapiens
  misc_feature: Table A; Target 56198; HLA-B*27:02; OR51E1; ENSG00000180785; TAA
VLNPIVYGVK

SEQ ID NO: 56199 - protein, 9 aa, Homo sapiens
  misc_feature: Table A; Target 56199; HLA-A*03:01; OR51E1; ENSG00000180785; TAA
VLTLPRVTK

SEQ ID NO: 56200 - protein, 9 aa, Homo sapiens
  misc_feature: Table A; Target 56200; HLA-A*03:02; OR51E1; ENSG00000180785; TAA
VLTLPRVTK

SEQ ID NO: 56201 - protein, 9 aa, Homo sapiens
  misc_feature: Table A; Target 56201; HLA-C*16:01; OR51E1; ENSG00000180785; TAA
VLTLPRVTK

SEQ ID NO: 56202 - protein, 8 aa, Homo sapiens
  misc_feature: Table A; Target 56202; HLA-B*07:02; OR51E1; ENSG00000180785; TAA
VPFIGLSM

SEQ ID NO: 56203 - protein, 8 aa, Homo sapiens
  misc_feature: Table A; Target 56203; HLA-B*08:01; OR51E1; ENSG00000180785; TAA
VPFIGLSM

SEQ ID NO: 56204 - protein, 8 aa, Homo sapiens
  misc_feature: Table A; Target 56204; HLA-B*35:01; OR51E1; ENSG00000180785; TAA
VPFIGLSM

SEQ ID NO: 56205 - protein, 8 aa, Homo sapiens
  misc_feature: Table A; Target 56205; HLA-B*51:01; OR51E1; ENSG00000180785; TAA
VPFIGLSM

SEQ ID NO: 56206 - protein, 8 aa, Homo sapiens
  misc_feature: Table A; Target 56206; HLA-B*54:01; OR51E1; ENSG00000180785; TAA
VPFIGLSM

SEQ ID NO: 56207 - protein, 9 aa, Homo sapiens
  misc_feature: Table A; Target 56207; HLA-A*02:03; OR51E1; ENSG00000180785; TAA
VPFIGLSMV

SEQ ID NO: 56208 - protein, 9 aa, Homo sapiens
  misc_feature: Table A; Target 56208; HLA-B*07:02; OR51E1; ENSG00000180785; TAA
VPFIGLSMV

SEQ ID NO: 56209 - protein, 9 aa, Homo sapiens
  misc_feature: Table A; Target 56209; HLA-B*49:01; OR51E1; ENSG00000180785; TAA
VPFIGLSMV

SEQ ID NO: 56210 - protein, 9 aa, Homo sapiens
  misc_feature: Table A; Target 56210; HLA-B*51:01; OR51E1; ENSG00000180785; TAA
VPFIGLSMV

SEQ ID NO: 56211 - protein, 9 aa, Homo sapiens
  misc_feature: Table A; Target 56211; HLA-B*54:01; OR51E1; ENSG00000180785; TAA
VPFIGLSMV

SEQ ID NO: 56212 - protein, 9 aa, Homo sapiens
  misc_feature: Table A; Target 56212; HLA-B*55:01; OR51E1; ENSG00000180785; TAA
VPFIGLSMV

SEQ ID NO: 56213 - protein, 9 aa, Homo sapiens
  misc_feature: Table A; Target 56213; HLA-B*56:01; OR51E1; ENSG00000180785; TAA
VPFIGLSMV

SEQ ID NO: 56214 - protein, 9 aa, Homo sapiens
  misc_feature: Table A; Target 56214; HLA-C*07:02; OR51E1; ENSG00000180785; TAA
VPFIGLSMV

SEQ ID NO: 56215 - protein, 8 aa, Homo sapiens
  misc_feature: Table A; Target 56215; HLA-B*51:01; OR51E1; ENSG00000180785; TAA
VPPVLNPI

SEQ ID NO: 56216 - protein, 9 aa, Homo sapiens
  misc_feature: Table A; Target 56216; HLA-B*51:01; OR51E1; ENSG00000180785; TAA
VPPVLNPIV

SEQ ID NO: 56217 - protein, 9 aa, Homo sapiens
  misc_feature: Table A; Target 56217; HLA-B*54:01; OR51E1; ENSG00000180785; TAA
VPPVLNPIV

SEQ ID NO: 56218 - protein, 9 aa, Homo sapiens
  misc_feature: Table A; Target 56218; HLA-B*56:01; OR51E1; ENSG00000180785; TAA
VPPVLNPIV

SEQ ID NO: 56219 - protein, 10 aa, Homo sapiens
  misc_feature: Table A; Target 56219; HLA-A*29:02; OR51E1; ENSG00000180785; TAA
VPPVLNPIVY

SEQ ID NO: 56220 - protein, 10 aa, Homo sapiens
  misc_feature: Table A; Target 56220; HLA-B*35:01; OR51E1; ENSG00000180785; TAA
VPPVLNPIVY

SEQ ID NO: 56221 - protein, 10 aa, Homo sapiens
  misc_feature: Table A; Target 56221; HLA-B*55:01; OR51E1; ENSG00000180785; TAA
VPPVLNPIVY

SEQ ID NO: 56222 - protein, 10 aa, Homo sapiens
  misc_feature: Table A; Target 56222; HLA-C*04:01; OR51E1; ENSG00000180785; TAA
VPPVLNPIVY

SEQ ID NO: 56223 - protein, 10 aa, Homo sapiens
  misc_feature: Table A; Target 56223; HLA-C*07:01; OR51E1; ENSG00000180785; TAA
VPPVLNPIVY

SEQ ID NO: 56224 - protein, 10 aa, Homo sapiens
  misc_feature: Table A; Target 56224; HLA-C*07:04; OR51E1; ENSG00000180785; TAA
VPPVLNPIVY

SEQ ID NO: 56225 - protein, 8 aa, Homo sapiens
  misc_feature: Table A; Target 56225; HLA-B*46:01; OR51E1; ENSG00000180785; TAA
VTKIGVAA

SEQ ID NO: 56226 - protein, 9 aa, Homo sapiens
  misc_feature: Table A; Target 56226; HLA-A*02:03; OR51E1; ENSG00000180785; TAA
VTKIGVAAV

SEQ ID NO: 56227 - protein, 9 aa, Homo sapiens
  misc_feature: Table A; Target 56227; HLA-A*02:04; OR51E1; ENSG00000180785; TAA
VTKIGVAAV

SEQ ID NO: 56228 - protein, 9 aa, Homo sapiens
  misc_feature: Table A; Target 56228; HLA-A*32:01; OR51E1; ENSG00000180785; TAA
VTKIGVAAV

SEQ ID NO: 56229 - protein, 9 aa, Homo sapiens
  misc_feature: Table A; Target 56229; HLA-B*08:01; OR51E1; ENSG00000180785; TAA
VTKIGVAAV

SEQ ID NO: 56230 - protein, 9 aa, Homo sapiens
  misc_feature: Table A; Target 56230; HLA-B*40:02; OR51E1; ENSG00000180785; TAA
VTKIGVAAV

SEQ ID NO: 56231 - protein, 9 aa, Homo sapiens
  misc_feature: Table A; Target 56231; HLA-B*46:01; OR51E1; ENSG00000180785; TAA
VTKIGVAAV

SEQ ID NO: 56232 - protein, 9 aa, Homo sapiens
  misc_feature: Table A; Target 56232; HLA-C*01:02; OR51E1; ENSG00000180785; TAA
VTKIGVAAV

SEQ ID NO: 56233 - protein, 9 aa, Homo sapiens
  misc_feature: Table A; Target 56233; HLA-C*06:02; OR51E1; ENSG00000180785; TAA
VTKIGVAAV

SEQ ID NO: 56234 - protein, 11 aa, Homo sapiens
  misc_feature: Table A; Target 56234; HLA-A*31:01; OR51E1; ENSG00000180785; TAA
VTKIGVAAVVR

SEQ ID NO: 56235 - protein, 11 aa, Homo sapiens
  misc_feature: Table A; Target 56235; HLA-A*33:01; OR51E1; ENSG00000180785; TAA
VTKIGVAAVVR

SEQ ID NO: 56236 - protein, 11 aa, Homo sapiens
  misc_feature: Table A; Target 56236; HLA-A*33:03; OR51E1; ENSG00000180785; TAA
VTKIGVAAVVR

SEQ ID NO: 56237 - protein, 11 aa, Homo sapiens
  misc_feature: Table A; Target 56237; HLA-A*68:01; OR51E1; ENSG00000180785; TAA
VTKIGVAAVVR

SEQ ID NO: 56238 - protein, 9 aa, Homo sapiens
  misc_feature: Table A; Target 56238; HLA-B*56:01; OR51E1; ENSG00000180785; TAA
VVRGAALMA

SEQ ID NO: 56239 - protein, 8 aa, Homo sapiens
  misc_feature: Table A; Target 56239; HLA-B*51:01; OR51E1; ENSG00000180785; TAA
VVYGLIVI

SEQ ID NO: 56240 - protein, 9 aa, Homo sapiens
  misc_feature: Table A; Target 56240; HLA-A*02:01; OR51E1; ENSG00000180785; TAA
VVYGLIVII

SEQ ID NO: 56241 - protein, 9 aa, Homo sapiens
  misc_feature: Table A; Target 56241; HLA-A*02:03; OR51E1; ENSG00000180785; TAA
VVYGLIVII

SEQ ID NO: 56242 - protein, 9 aa, Homo sapiens
  misc_feature: Table A; Target 56242; HLA-A*02:04; OR51E1; ENSG00000180785; TAA
VVYGLIVII

SEQ ID NO: 56243 - protein, 9 aa, Homo sapiens
  misc_feature: Table A; Target 56243; HLA-A*02:07; OR51E1; ENSG00000180785; TAA
VVYGLIVII

SEQ ID NO: 56244 - protein, 9 aa, Homo sapiens
  misc_feature: Table A; Target 56244; HLA-A*23:01; OR51E1; ENSG00000180785; TAA
VVYGLIVII

SEQ ID NO: 56245 - protein, 9 aa, Homo sapiens
  misc_feature: Table A; Target 56245; HLA-A*24:02; OR51E1; ENSG00000180785; TAA
VVYGLIVII

SEQ ID NO: 56246 - protein, 9 aa, Homo sapiens
  misc_feature: Table A; Target 56246; HLA-A*68:02; OR51E1; ENSG00000180785; TAA
VVYGLIVII

SEQ ID NO: 56247 - protein, 9 aa, Homo sapiens
  misc_feature: Table A; Target 56247; HLA-B*13:02; OR51E1; ENSG00000180785; TAA
VVYGLIVII

SEQ ID NO: 56248 - protein, 9 aa, Homo sapiens
  misc_feature: Table A; Target 56248; HLA-B*51:01; OR51E1; ENSG00000180785; TAA
VVYGLIVII

SEQ ID NO: 56249 - protein, 9 aa, Homo sapiens
  misc_feature: Table A; Target 56249; HLA-C*02:02; OR51E1; ENSG00000180785; TAA
VVYGLIVII

SEQ ID NO: 56250 - protein, 9 aa, Homo sapiens
  misc_feature: Table A; Target 56250; HLA-C*12:03; OR51E1; ENSG00000180785; TAA
VVYGLIVII

SEQ ID NO: 56251 - protein, 11 aa, Homo sapiens
  misc_feature: Table A; Target 56251; HLA-B*54:01; OR51E1; ENSG00000180785; TAA
VVYGLIVIISA

SEQ ID NO: 56252 - protein, 8 aa, Homo sapiens
  misc_feature: Table A; Target 56252; HLA-A*23:01; OR51E1; ENSG00000180785; TAA
VYGLIVII

SEQ ID NO: 56253 - protein, 8 aa, Homo sapiens
  misc_feature: Table A; Target 56253; HLA-A*24:02; OR51E1; ENSG00000180785; TAA
VYGLIVII

SEQ ID NO: 56254 - protein, 11 aa, Homo sapiens
  misc_feature: Table A; Target 56254; HLA-A*24:02; OR51E1; ENSG00000180785; TAA
VYGLIVIISAI

SEQ ID NO: 56255 - protein, 9 aa, Homo sapiens
  misc_feature: Table A; Target 56255; HLA-A*24:02; OR51E1; ENSG00000180785; TAA
VYGVKTKEI

SEQ ID NO: 56256 - protein, 9 aa, Homo sapiens
  misc_feature: Table A; Target 56256; HLA-A*23:01; OR51E1; ENSG00000180785; TAA
WFNSTTIQF

SEQ ID NO: 56257 - protein, 9 aa, Homo sapiens
  misc_feature: Table A; Target 56257; HLA-A*24:02; OR51E1; ENSG00000180785; TAA
WFNSTTIQF

SEQ ID NO: 56258 - protein, 9 aa, Homo sapiens
  misc_feature: Table A; Target 56258; HLA-A*29:02; OR51E1; ENSG00000180785; TAA
WFNSTTIQF

SEQ ID NO: 56259 - protein, 9 aa, Homo sapiens
  misc_feature: Table A; Target 56259; HLA-C*14:02; OR51E1; ENSG00000180785; TAA
WFNSTTIQF

SEQ ID NO: 56260 - protein, 9 aa, Homo sapiens
  misc_feature: Table A; Target 56260; HLA-A*02:03; OR51E1; ENSG00000180785; TAA
WLAFPLCSL

SEQ ID NO: 56261 - protein, 10 aa, Homo sapiens
  misc_feature: Table A; Target 56261; HLA-C*07:01; OR51E1; ENSG00000180785; TAA
YCLHQDVMKL

SEQ ID NO: 56262 - protein, 9 aa, Homo sapiens
  misc_feature: Table A; Target 56262; HLA-B*54:01; OR51E1; ENSG00000180785; TAA
YGLIVIISA

SEQ ID NO: 56263 - protein, 8 aa, Homo sapiens
  misc_feature: Table A; Target 56263; HLA-B*51:01; OR51E1; ENSG00000180785; TAA
YGVKTKEI

SEQ ID NO: 56264 - protein, 9 aa, Homo sapiens
  misc_feature: Table A; Target 56264; HLA-A*02:07; OR51E1; ENSG00000180785; TAA
YIVRTEHSL

SEQ ID NO: 56265 - protein, 9 aa, Homo sapiens
  misc_feature: Table A; Target 56265; HLA-B*08:01; OR51E1; ENSG00000180785; TAA
YIVRTEHSL

SEQ ID NO: 56266 - protein, 9 aa, Homo sapiens
  misc_feature: Table A; Target 56266; HLA-B*35:03; OR51E1; ENSG00000180785; TAA
YIVRTEHSL

SEQ ID NO: 56267 - protein, 9 aa, Homo sapiens
  misc_feature: Table A; Target 56267; HLA-B*58:01; OR51E1; ENSG00000180785; TAA
YIVRTEHSL

SEQ ID NO: 56268 - protein, 9 aa, Homo sapiens
  misc_feature: Table A; Target 56268; HLA-C*03:03; OR51E1; ENSG00000180785; TAA
YIVRTEHSL

SEQ ID NO: 56269 - protein, 9 aa, Homo sapiens
  misc_feature: Table A; Target 56269; HLA-C*03:04; OR51E1; ENSG00000180785; TAA
YIVRTEHSL

SEQ ID NO: 56270 - protein, 9 aa, Homo sapiens
  misc_feature: Table A; Target 56270; HLA-A*02:01; OR51E1; ENSG00000180785; TAA
YLIAVLGNL

SEQ ID NO: 56271 - protein, 9 aa, Homo sapiens
  misc_feature: Table A; Target 56271; HLA-A*02:03; OR51E1; ENSG00000180785; TAA
YLIAVLGNL

SEQ ID NO: 56272 - protein, 9 aa, Homo sapiens
  misc_feature: Table A; Target 56272; HLA-A*02:04; OR51E1; ENSG00000180785; TAA
YLIAVLGNL

SEQ ID NO: 56273 - protein, 9 aa, Homo sapiens
  misc_feature: Table A; Target 56273; HLA-A*02:07; OR51E1; ENSG00000180785; TAA
YLIAVLGNL

SEQ ID NO: 56274 - protein, 9 aa, Homo sapiens
  misc_feature: Table A; Target 56274; HLA-A*23:01; OR51E1; ENSG00000180785; TAA
YLIAVLGNL

SEQ ID NO: 56275 - protein, 9 aa, Homo sapiens
  misc_feature: Table A; Target 56275; HLA-A*24:02; OR51E1; ENSG00000180785; TAA
YLIAVLGNL

SEQ ID NO: 56276 - protein, 9 aa, Homo sapiens
  misc_feature: Table A; Target 56276; HLA-A*68:02; OR51E1; ENSG00000180785; TAA
YLIAVLGNL

SEQ ID NO: 56277 - protein, 9 aa, Homo sapiens
  misc_feature: Table A; Target 56277; HLA-B*13:02; OR51E1; ENSG00000180785; TAA
YLIAVLGNL

SEQ ID NO: 56278 - protein, 9 aa, Homo sapiens
  misc_feature: Table A; Target 56278; HLA-B*40:02; OR51E1; ENSG00000180785; TAA
YLIAVLGNL

SEQ ID NO: 56279 - protein, 9 aa, Homo sapiens
  misc_feature: Table A; Target 56279; HLA-B*46:01; OR51E1; ENSG00000180785; TAA
YLIAVLGNL

SEQ ID NO: 56280 - protein, 9 aa, Homo sapiens
  misc_feature: Table A; Target 56280; HLA-C*01:02; OR51E1; ENSG00000180785; TAA
YLIAVLGNL

SEQ ID NO: 56281 - protein, 11 aa, Homo sapiens
  misc_feature: Table A; Target 56281; HLA-A*02:01; OR51E1; ENSG00000180785; TAA
YLIAVLGNLTI

SEQ ID NO: 56282 - protein, 8 aa, Homo sapiens
  misc_feature: Table A; Target 56282; HLA-A*02:01; OR51E1; ENSG00000180785; TAA
YLLILKTV

SEQ ID NO: 56283 - protein, 8 aa, Homo sapiens
  misc_feature: Table A; Target 56283; HLA-A*02:03; OR51E1; ENSG00000180785; TAA
YLLILKTV

SEQ ID NO: 56284 - protein, 8 aa, Homo sapiens
  misc_feature: Table A; Target 56284; HLA-A*02:04; OR51E1; ENSG00000180785; TAA
YLLILKTV

SEQ ID NO: 56285 - protein, 9 aa, Homo sapiens
  misc_feature: Table A; Target 56285; HLA-A*02:01; OR51E1; ENSG00000180785; TAA
YLLILKTVL

SEQ ID NO: 56286 - protein, 9 aa, Homo sapiens
  misc_feature: Table A; Target 56286; HLA-A*02:03; OR51E1; ENSG00000180785; TAA
YLLILKTVL

SEQ ID NO: 56287 - protein, 9 aa, Homo sapiens
  misc_feature: Table A; Target 56287; HLA-A*02:04; OR51E1; ENSG00000180785; TAA
YLLILKTVL

SEQ ID NO: 56288 - protein, 9 aa, Homo sapiens
  misc_feature: Table A; Target 56288; HLA-A*02:07; OR51E1; ENSG00000180785; TAA
YLLILKTVL

SEQ ID NO: 56289 - protein, 9 aa, Homo sapiens
  misc_feature: Table A; Target 56289; HLA-B*08:01; OR51E1; ENSG00000180785; TAA
YLLILKTVL

SEQ ID NO: 56290 - protein, 9 aa, Homo sapiens
  misc_feature: Table A; Target 56290; HLA-B*40:02; OR51E1; ENSG00000180785; TAA
YLLILKTVL

SEQ ID NO: 56291 - protein, 11 aa, Homo sapiens
  misc_feature: Table A; Target 56291; HLA-A*02:04; OR51E1; ENSG00000180785; TAA
YLLILKTVLGL

SEQ ID NO: 56292 - protein, 8 aa, Homo sapiens
  misc_feature: Table A; Target 56292; HLA-A*02:01; OR51E1; ENSG00000180785; TAA
YLLVPPVL

SEQ ID NO: 56293 - protein, 8 aa, Homo sapiens
  misc_feature: Table A; Target 56293; HLA-A*02:04; OR51E1; ENSG00000180785; TAA
YLLVPPVL

SEQ ID NO: 56294 - protein, 8 aa, Homo sapiens
  misc_feature: Table A; Target 56294; HLA-A*23:01; OR51E1; ENSG00000180785; TAA
YLLVPPVL

SEQ ID NO: 56295 - protein, 8 aa, Homo sapiens
  misc_feature: Table A; Target 56295; HLA-C*03:03; OR51E1; ENSG00000180785; TAA
YLLVPPVL

SEQ ID NO: 56296 - protein, 8 aa, Homo sapiens
  misc_feature: Table A; Target 56296; HLA-C*03:04; OR51E1; ENSG00000180785; TAA
YLLVPPVL

SEQ ID NO: 56297 - protein, 11 aa, Homo sapiens
  misc_feature: Table A; Target 56297; HLA-A*02:01; OR51E1; ENSG00000180785; TAA
YLLVPPVLNPI

SEQ ID NO: 56298 - protein, 11 aa, Homo sapiens
  misc_feature: Table A; Target 56298; HLA-A*02:04; OR51E1; ENSG00000180785; TAA
YLLVPPVLNPI

SEQ ID NO: 56299 - protein, 9 aa, Homo sapiens
  misc_feature: Table A; Target 56299; HLA-A*02:07; OR51E1; ENSG00000180785; TAA
YVPFIGLSM

SEQ ID NO: 56300 - protein, 9 aa, Homo sapiens
  misc_feature: Table A; Target 56300; HLA-A*26:01; OR51E1; ENSG00000180785; TAA
YVPFIGLSM

SEQ ID NO: 56301 - protein, 9 aa, Homo sapiens
  misc_feature: Table A; Target 56301; HLA-A*29:02; OR51E1; ENSG00000180785; TAA
YVPFIGLSM

SEQ ID NO: 56302 - protein, 9 aa, Homo sapiens
  misc_feature: Table A; Target 56302; HLA-B*08:01; OR51E1; ENSG00000180785; TAA
YVPFIGLSM

SEQ ID NO: 56303 - protein, 9 aa, Homo sapiens
  misc_feature: Table A; Target 56303; HLA-B*46:01; OR51E1; ENSG00000180785; TAA
YVPFIGLSM

SEQ ID NO: 56304 - protein, 9 aa, Homo sapiens
  misc_feature: Table A; Target 56304; HLA-C*01:02; OR51E1; ENSG00000180785; TAA
YVPFIGLSM

SEQ ID NO: 56305 - protein, 10 aa, Homo sapiens
  misc_feature: Table A; Target 56305; HLA-A*02:01; OR51E1; ENSG00000180785; TAA
YVPFIGLSMV

SEQ ID NO: 56306 - protein, 10 aa, Homo sapiens
  misc_feature: Table A; Target 56306; HLA-A*02:03; OR51E1; ENSG00000180785; TAA
YVPFIGLSMV

SEQ ID NO: 56307 - protein, 10 aa, Homo sapiens
  misc_feature: Table A; Target 56307; HLA-A*02:07; OR51E1; ENSG00000180785; TAA
YVPFIGLSMV

SEQ ID NO: 56308 - protein, 10 aa, Homo sapiens
  misc_feature: Table A; Target 56308; HLA-A*68:02; OR51E1; ENSG00000180785; TAA
YVPFIGLSMV

SEQ ID NO: 56309 - protein, 9 aa, Homo sapiens
  misc_feature: Table A; Target 56309; HLA-C*12:03; OR51E1,OR51E2; ENSG00000180785,ENSG00000167332; TAA,TAA
KAFGTCVSH

SEQ ID NO: 56310 - protein, 9 aa, Homo sapiens
  misc_feature: Table A; Target 56310; HLA-A*01:01; OR51E1,OR51E2; ENSG00000180785,ENSG00000167332; TAA,TAA
LLAMAFDRY

SEQ ID NO: 56311 - protein, 8 aa, Homo sapiens
  misc_feature: Table A; Target 56311; HLA-B*54:01; OR51E1,OR51E2; ENSG00000180785,ENSG00000167332; TAA,TAA
MAFDRYVA

SEQ ID NO: 56312 - protein, 9 aa, Homo sapiens
  misc_feature: Table A; Target 56312; HLA-A*25:01; OR51E1,OR51E2; ENSG00000180785,ENSG00000167332; TAA,TAA
MAFDRYVAI

SEQ ID NO: 56313 - protein, 9 aa, Homo sapiens
  misc_feature: Table A; Target 56313; HLA-A*68:02; OR51E1,OR51E2; ENSG00000180785,ENSG00000167332; TAA,TAA
MAFDRYVAI

SEQ ID NO: 56314 - protein, 9 aa, Homo sapiens
  misc_feature: Table A; Target 56314; HLA-B*08:01; OR51E1,OR51E2; ENSG00000180785,ENSG00000167332; TAA,TAA
MAFDRYVAI

SEQ ID NO: 56315 - protein, 9 aa, Homo sapiens
  misc_feature: Table A; Target 56315; HLA-B*35:01; OR51E1,OR51E2; ENSG00000180785,ENSG00000167332; TAA,TAA
MAFDRYVAI

SEQ ID NO: 56316 - protein, 9 aa, Homo sapiens
  misc_feature: Table A; Target 56316; HLA-B*46:01; OR51E1,OR51E2; ENSG00000180785,ENSG00000167332; TAA,TAA
MAFDRYVAI

SEQ ID NO: 56317 - protein, 9 aa, Homo sapiens
  misc_feature: Table A; Target 56317; HLA-B*51:01; OR51E1,OR51E2; ENSG00000180785,ENSG00000167332; TAA,TAA
MAFDRYVAI

SEQ ID NO: 56318 - protein, 9 aa, Homo sapiens
  misc_feature: Table A; Target 56318; HLA-B*54:01; OR51E1,OR51E2; ENSG00000180785,ENSG00000167332; TAA,TAA
MAFDRYVAI

SEQ ID NO: 56319 - protein, 9 aa, Homo sapiens
  misc_feature: Table A; Target 56319; HLA-B*56:01; OR51E1,OR51E2; ENSG00000180785,ENSG00000167332; TAA,TAA
MAFDRYVAI

SEQ ID NO: 56320 - protein, 9 aa, Homo sapiens
  misc_feature: Table A; Target 56320; HLA-C*02:02; OR51E1,OR51E2; ENSG00000180785,ENSG00000167332; TAA,TAA
MAFDRYVAI

SEQ ID NO: 56321 - protein, 9 aa, Homo sapiens
  misc_feature: Table A; Target 56321; HLA-C*03:03; OR51E1,OR51E2; ENSG00000180785,ENSG00000167332; TAA,TAA
MAFDRYVAI

SEQ ID NO: 56322 - protein, 9 aa, Homo sapiens
  misc_feature: Table A; Target 56322; HLA-C*03:04; OR51E1,OR51E2; ENSG00000180785,ENSG00000167332; TAA,TAA
MAFDRYVAI

SEQ ID NO: 56323 - protein, 9 aa, Homo sapiens
  misc_feature: Table A; Target 56323; HLA-C*12:03; OR51E1,OR51E2; ENSG00000180785,ENSG00000167332; TAA,TAA
MAFDRYVAI

SEQ ID NO: 56324 - protein, 9 aa, Homo sapiens
  misc_feature: Table A; Target 56324; HLA-C*16:01; OR51E1,OR51E2; ENSG00000180785,ENSG00000167332; TAA,TAA
MAFDRYVAI

SEQ ID NO: 56325 - protein, 9 aa, Homo sapiens
  misc_feature: Table A; Target 56325; HLA-C*16:04; OR51E1,OR51E2; ENSG00000180785,ENSG00000167332; TAA,TAA
MAFDRYVAI

SEQ ID NO: 56326 - protein, 9 aa, Homo sapiens
  misc_feature: Table A; Target 56326; HLA-A*24:02; OR51E1,OR51E2; ENSG00000180785,ENSG00000167332; TAA,TAA
RYVAICHPL

SEQ ID NO: 56327 - protein, 9 aa, Homo sapiens
  misc_feature: Table A; Target 56327; HLA-B*13:02; OR51E2; ENSG00000167332; TAA
AAIDLALST

SEQ ID NO: 56328 - protein, 9 aa, Homo sapiens
  misc_feature: Table A; Target 56328; HLA-C*03:04; OR51E2; ENSG00000167332; TAA
AAIDLALST

SEQ ID NO: 56329 - protein, 9 aa, Homo sapiens
  misc_feature: Table A; Target 56329; HLA-C*16:04; OR51E2; ENSG00000167332; TAA
AAIDLALST

SEQ ID NO: 56330 - protein, 10 aa, Homo sapiens
  misc_feature: Table A; Target 56330; HLA-B*56:01; OR51E2; ENSG00000167332; TAA
AAVLNNTVTA

SEQ ID NO: 56331 - protein, 8 aa, Homo sapiens
  misc_feature: Table A; Target 56331; HLA-B*37:01; OR51E2; ENSG00000167332; TAA
ADTLPNVV

SEQ ID NO: 56332 - protein, 9 aa, Homo sapiens
  misc_feature: Table A; Target 56332; HLA-B*15:01; OR51E2; ENSG00000167332; TAA
ADTLPNVVY

SEQ ID NO: 56333 - protein, 9 aa, Homo sapiens
  misc_feature: Table A; Target 56333; HLA-B*15:03; OR51E2; ENSG00000167332; TAA
ADTLPNVVY

SEQ ID NO: 56334 - protein, 9 aa, Homo sapiens
  misc_feature: Table A; Target 56334; HLA-B*18:01; OR51E2; ENSG00000167332; TAA
ADTLPNVVY

SEQ ID NO: 56335 - protein, 9 aa, Homo sapiens
  misc_feature: Table A; Target 56335; HLA-B*37:01; OR51E2; ENSG00000167332; TAA
ADTLPNVVY

SEQ ID NO: 56336 - protein, 9 aa, Homo sapiens
  misc_feature: Table A; Target 56336; HLA-B*44:02; OR51E2; ENSG00000167332; TAA
ADTLPNVVY

SEQ ID NO: 56337 - protein, 9 aa, Homo sapiens
  misc_feature: Table A; Target 56337; HLA-B*44:03; OR51E2; ENSG00000167332; TAA
ADTLPNVVY

SEQ ID NO: 56338 - protein, 9 aa, Homo sapiens
  misc_feature: Table A; Target 56338; HLA-C*16:01; OR51E2; ENSG00000167332; TAA
ADTLPNVVY

SEQ ID NO: 56339 - protein, 9 aa, Homo sapiens
  misc_feature: Table A; Target 56339; HLA-C*16:04; OR51E2; ENSG00000167332; TAA
ADTLPNVVY

SEQ ID NO: 56340 - protein, 11 aa, Homo sapiens
  misc_feature: Table A; Target 56340; HLA-C*05:01; OR51E2; ENSG00000167332; TAA
AIDLALSTSTM

SEQ ID NO: 56341 - protein, 10 aa, Homo sapiens
  misc_feature: Table A; Target 56341; HLA-A*02:03; OR51E2; ENSG00000167332; TAA
ALFWFDSREI

SEQ ID NO: 56342 - protein, 9 aa, Homo sapiens
  misc_feature: Table A; Target 56342; HLA-A*02:01; OR51E2; ENSG00000167332; TAA
ALSAIESTI

SEQ ID NO: 56343 - protein, 9 aa, Homo sapiens
  misc_feature: Table A; Target 56343; HLA-A*02:03; OR51E2; ENSG00000167332; TAA
ALSAIESTI

SEQ ID NO: 56344 - protein, 9 aa, Homo sapiens
  misc_feature: Table A; Target 56344; HLA-A*32:01; OR51E2; ENSG00000167332; TAA
ALSAIESTI

SEQ ID NO: 56345 - protein, 9 aa, Homo sapiens
  misc_feature: Table A; Target 56345; HLA-B*13:02; OR51E2; ENSG00000167332; TAA
ALSAIESTI

SEQ ID NO: 56346 - protein, 11 aa, Homo sapiens
  misc_feature: Table A; Target 56346; HLA-A*02:04; OR51E2; ENSG00000167332; TAA
ALSAIESTILL

SEQ ID NO: 56347 - protein, 9 aa, Homo sapiens
  misc_feature: Table A; Target 56347; HLA-A*03:01; OR51E2; ENSG00000167332; TAA
ALSTSTMPK

SEQ ID NO: 56348 - protein, 9 aa, Homo sapiens
  misc_feature: Table A; Target 56348; HLA-A*03:02; OR51E2; ENSG00000167332; TAA
ALSTSTMPK

SEQ ID NO: 56349 - protein, 9 aa, Homo sapiens
  misc_feature: Table A; Target 56349; HLA-A*11:01; OR51E2; ENSG00000167332; TAA
ALSTSTMPK

SEQ ID NO: 56350 - protein, 9 aa, Homo sapiens
  misc_feature: Table A; Target 56350; HLA-A*02:03; OR51E2; ENSG00000167332; TAA
AMFGNCIVV

SEQ ID NO: 56351 - protein, 9 aa, Homo sapiens
  misc_feature: Table A; Target 56351; HLA-B*13:02; OR51E2; ENSG00000167332; TAA
AMFGNCIVV

SEQ ID NO: 56352 - protein, 9 aa, Homo sapiens
  misc_feature: Table A; Target 56352; HLA-A*03:02; OR51E2; ENSG00000167332; TAA
AMFKISCDK

SEQ ID NO: 56353 - protein, 8 aa, Homo sapiens
  misc_feature: Table A; Target 56353; HLA-A*02:01; OR51E2; ENSG00000167332; TAA
AQIGIVAV

SEQ ID NO: 56354 - protein, 8 aa, Homo sapiens
  misc_feature: Table A; Target 56354; HLA-B*13:02; OR51E2; ENSG00000167332; TAA
AQIGIVAV

SEQ ID NO: 56355 - protein, 8 aa, Homo sapiens
  misc_feature: Table A; Target 56355; HLA-B*15:01; OR51E2; ENSG00000167332; TAA
AQIGIVAV

SEQ ID NO: 56356 - protein, 9 aa, Homo sapiens
  misc_feature: Table A; Target 56356; HLA-A*02:01; OR51E2; ENSG00000167332; TAA
AQIGIVAVV

SEQ ID NO: 56357 - protein, 9 aa, Homo sapiens
  misc_feature: Table A; Target 56357; HLA-A*02:03; OR51E2; ENSG00000167332; TAA
AQIGIVAVV

SEQ ID NO: 56358 - protein, 9 aa, Homo sapiens
  misc_feature: Table A; Target 56358; HLA-A*02:04; OR51E2; ENSG00000167332; TAA
AQIGIVAVV

SEQ ID NO: 56359 - protein, 9 aa, Homo sapiens
  misc_feature: Table A; Target 56359; HLA-A*02:07; OR51E2; ENSG00000167332; TAA
AQIGIVAVV

SEQ ID NO: 56360 - protein, 9 aa, Homo sapiens
  misc_feature: Table A; Target 56360; HLA-A*26:01; OR51E2; ENSG00000167332; TAA
AQIGIVAVV

SEQ ID NO: 56361 - protein, 9 aa, Homo sapiens
  misc_feature: Table A; Target 56361; HLA-A*30:01; OR51E2; ENSG00000167332; TAA
AQIGIVAVV

SEQ ID NO: 56362 - protein, 9 aa, Homo sapiens
  misc_feature: Table A; Target 56362; HLA-A*32:01; OR51E2; ENSG00000167332; TAA
AQIGIVAVV

SEQ ID NO: 56363 - protein, 9 aa, Homo sapiens
  misc_feature: Table A; Target 56363; HLA-A*68:02; OR51E2; ENSG00000167332; TAA
AQIGIVAVV

SEQ ID NO: 56364 - protein, 9 aa, Homo sapiens
  misc_feature: Table A; Target 56364; HLA-B*13:02; OR51E2; ENSG00000167332; TAA
AQIGIVAVV

SEQ ID NO: 56365 - protein, 9 aa, Homo sapiens
  misc_feature: Table A; Target 56365; HLA-B*15:01; OR51E2; ENSG00000167332; TAA
AQIGIVAVV

SEQ ID NO: 56366 - protein, 9 aa, Homo sapiens
  misc_feature: Table A; Target 56366; HLA-B*15:03; OR51E2; ENSG00000167332; TAA
AQIGIVAVV

SEQ ID NO: 56367 - protein, 9 aa, Homo sapiens
  misc_feature: Table A; Target 56367; HLA-B*27:05; OR51E2; ENSG00000167332; TAA
AQIGIVAVV

SEQ ID NO: 56368 - protein, 9 aa, Homo sapiens
  misc_feature: Table A; Target 56368; HLA-B*39:01; OR51E2; ENSG00000167332; TAA
AQIGIVAVV

SEQ ID NO: 56369 - protein, 9 aa, Homo sapiens
  misc_feature: Table A; Target 56369; HLA-B*40:02; OR51E2; ENSG00000167332; TAA
AQIGIVAVV

SEQ ID NO: 56370 - protein, 9 aa, Homo sapiens
  misc_feature: Table A; Target 56370; HLA-B*46:01; OR51E2; ENSG00000167332; TAA
AQIGIVAVV

SEQ ID NO: 56371 - protein, 9 aa, Homo sapiens
  misc_feature: Table A; Target 56371; HLA-B*49:01; OR51E2; ENSG00000167332; TAA
AQIGIVAVV

SEQ ID NO: 56372 - protein, 9 aa, Homo sapiens
  misc_feature: Table A; Target 56372; HLA-B*55:01; OR51E2; ENSG00000167332; TAA
AQIGIVAVV

SEQ ID NO: 56373 - protein, 9 aa, Homo sapiens
  misc_feature: Table A; Target 56373; HLA-B*56:01; OR51E2; ENSG00000167332; TAA
AQIGIVAVV

SEQ ID NO: 56374 - protein, 9 aa, Homo sapiens
  misc_feature: Table A; Target 56374; HLA-C*02:02; OR51E2; ENSG00000167332; TAA
AQIGIVAVV

SEQ ID NO: 56375 - protein, 9 aa, Homo sapiens
  misc_feature: Table A; Target 56375; HLA-C*06:02; OR51E2; ENSG00000167332; TAA
AQIGIVAVV

SEQ ID NO: 56376 - protein, 9 aa, Homo sapiens
  misc_feature: Table A; Target 56376; HLA-C*12:03; OR51E2; ENSG00000167332; TAA
AQIGIVAVV

SEQ ID NO: 56377 - protein, 9 aa, Homo sapiens
  misc_feature: Table A; Target 56377; HLA-C*16:04; OR51E2; ENSG00000167332; TAA
AQIGIVAVV

SEQ ID NO: 56378 - protein, 10 aa, Homo sapiens
  misc_feature: Table A; Target 56378; HLA-A*31:01; OR51E2; ENSG00000167332; TAA
AQIGIVAVVR

SEQ ID NO: 56379 - protein, 10 aa, Homo sapiens
  misc_feature: Table A; Target 56379; HLA-C*07:06; OR51E2; ENSG00000167332; TAA
AQIGIVAVVR

SEQ ID NO: 56380 - protein, 9 aa, Homo sapiens
  misc_feature: Table A; Target 56380; HLA-B*55:01; OR51E2; ENSG00000167332; TAA
AVLNNTVTA

SEQ ID NO: 56381 - protein, 9 aa, Homo sapiens
  misc_feature: Table A; Target 56381; HLA-B*56:01; OR51E2; ENSG00000167332; TAA
AVLNNTVTA

SEQ ID NO: 56382 - protein, 11 aa, Homo sapiens
  misc_feature: Table A; Target 56382; HLA-A*23:01; OR51E2; ENSG00000167332; TAA
AVLNNTVTAQI

SEQ ID NO: 56383 - protein, 9 aa, Homo sapiens
  misc_feature: Table A; Target 56383; HLA-A*02:01; OR51E2; ENSG00000167332; TAA
AYADTLPNV

SEQ ID NO: 56384 - protein, 9 aa, Homo sapiens
  misc_feature: Table A; Target 56384; HLA-A*23:01; OR51E2; ENSG00000167332; TAA
AYADTLPNV

SEQ ID NO: 56385 - protein, 9 aa, Homo sapiens
  misc_feature: Table A; Target 56385; HLA-A*24:02; OR51E2; ENSG00000167332; TAA
AYADTLPNV

SEQ ID NO: 56386 - protein, 9 aa, Homo sapiens
  misc_feature: Table A; Target 56386; HLA-A*32:01; OR51E2; ENSG00000167332; TAA
AYADTLPNV

SEQ ID NO: 56387 - protein, 9 aa, Homo sapiens
  misc_feature: Table A; Target 56387; HLA-B*46:01; OR51E2; ENSG00000167332; TAA
AYADTLPNV

SEQ ID NO: 56388 - protein, 9 aa, Homo sapiens
  misc_feature: Table A; Target 56388; HLA-B*55:01; OR51E2; ENSG00000167332; TAA
AYADTLPNV

SEQ ID NO: 56389 - protein, 9 aa, Homo sapiens
  misc_feature: Table A; Target 56389; HLA-C*14:02; OR51E2; ENSG00000167332; TAA
AYADTLPNV

SEQ ID NO: 56390 - protein, 9 aa, Homo sapiens
  misc_feature: Table A; Target 56390; HLA-C*16:02; OR51E2; ENSG00000167332; TAA
AYADTLPNV

SEQ ID NO: 56391 - protein, 10 aa, Homo sapiens
  misc_feature: Table A; Target 56391; HLA-A*23:01; OR51E2; ENSG00000167332; TAA
AYADTLPNVV

SEQ ID NO: 56392 - protein, 10 aa, Homo sapiens
  misc_feature: Table A; Target 56392; HLA-A*24:02; OR51E2; ENSG00000167332; TAA
AYADTLPNVV

SEQ ID NO: 56393 - protein, 11 aa, Homo sapiens
  misc_feature: Table A; Target 56393; HLA-A*24:02; OR51E2; ENSG00000167332; TAA
AYADTLPNVVY

SEQ ID NO: 56394 - protein, 11 aa, Homo sapiens
  misc_feature: Table A; Target 56394; HLA-A*29:02; OR51E2; ENSG00000167332; TAA
AYADTLPNVVY

SEQ ID NO: 56395 - protein, 11 aa, Homo sapiens
  misc_feature: Table A; Target 56395; HLA-A*30:02; OR51E2; ENSG00000167332; TAA
AYADTLPNVVY

SEQ ID NO: 56396 - protein, 11 aa, Homo sapiens
  misc_feature: Table A; Target 56396; HLA-B*15:01; OR51E2; ENSG00000167332; TAA
AYADTLPNVVY

SEQ ID NO: 56397 - protein, 11 aa, Homo sapiens
  misc_feature: Table A; Target 56397; HLA-C*14:02; OR51E2; ENSG00000167332; TAA
AYADTLPNVVY

SEQ ID NO: 56398 - protein, 10 aa, Homo sapiens
  misc_feature: Table A; Target 56398; HLA-A*30:02; OR51E2; ENSG00000167332; TAA
CHSNVLSHSY

SEQ ID NO: 56399 - protein, 9 aa, Homo sapiens
  misc_feature: Table A; Target 56399; HLA-C*07:04; OR51E2; ENSG00000167332; TAA
CVSHIGVVL

SEQ ID NO: 56400 - protein, 10 aa, Homo sapiens
  misc_feature: Table A; Target 56400; HLA-B*51:01; OR51E2; ENSG00000167332; TAA
DIYLLLPPVI

SEQ ID NO: 56401 - protein, 9 aa, Homo sapiens
  misc_feature: Table A; Target 56401; HLA-A*25:01; OR51E2; ENSG00000167332; TAA
DLALSTSTM

SEQ ID NO: 56402 - protein, 9 aa, Homo sapiens
  misc_feature: Table A; Target 56402; HLA-A*26:01; OR51E2; ENSG00000167332; TAA
DLALSTSTM

SEQ ID NO: 56403 - protein, 9 aa, Homo sapiens
  misc_feature: Table A; Target 56403; HLA-B*08:01; OR51E2; ENSG00000167332; TAA
DLALSTSTM

SEQ ID NO: 56404 - protein, 8 aa, Homo sapiens
  misc_feature: Table A; Target 56404; HLA-B*18:01; OR51E2; ENSG00000167332; TAA
DTLPNVVY

SEQ ID NO: 56405 - protein, 8 aa, Homo sapiens
  misc_feature: Table A; Target 56405; HLA-B*35:01; OR51E2; ENSG00000167332; TAA
DTLPNVVY

SEQ ID NO: 56406 - protein, 9 aa, Homo sapiens
  misc_feature: Table A; Target 56406; HLA-A*33:01; OR51E2; ENSG00000167332; TAA
DTLPNVVYG

SEQ ID NO: 56407 - protein, 10 aa, Homo sapiens
  misc_feature: Table A; Target 56407; HLA-A*25:01; OR51E2; ENSG00000167332; TAA
DTLPNVVYGL

SEQ ID NO: 56408 - protein, 10 aa, Homo sapiens
  misc_feature: Table A; Target 56408; HLA-A*33:03; OR51E2; ENSG00000167332; TAA
DTLPNVVYGL

SEQ ID NO: 56409 - protein, 9 aa, Homo sapiens
  misc_feature: Table A; Target 56409; HLA-A*25:01; OR51E2; ENSG00000167332; TAA
DVMFISLSY

SEQ ID NO: 56410 - protein, 9 aa, Homo sapiens
  misc_feature: Table A; Target 56410; HLA-A*26:01; OR51E2; ENSG00000167332; TAA
DVMFISLSY

SEQ ID NO: 56411 - protein, 9 aa, Homo sapiens
  misc_feature: Table A; Target 56411; HLA-A*29:02; OR51E2; ENSG00000167332; TAA
DVMFISLSY

SEQ ID NO: 56412 - protein, 9 aa, Homo sapiens
  misc_feature: Table A; Target 56412; HLA-B*35:01; OR51E2; ENSG00000167332; TAA
DVMFISLSY

SEQ ID NO: 56413 - protein, 10 aa, Homo sapiens
  misc_feature: Table A; Target 56413; HLA-A*25:01; OR51E2; ENSG00000167332; TAA
DVMFISLSYF

SEQ ID NO: 56414 - protein, 10 aa, Homo sapiens
  misc_feature: Table A; Target 56414; HLA-A*26:01; OR51E2; ENSG00000167332; TAA
DVMFISLSYF

SEQ ID NO: 56415 - protein, 11 aa, Homo sapiens
  misc_feature: Table A; Target 56415; HLA-A*30:02; OR51E2; ENSG00000167332; TAA
FCHSNVLSHSY

SEQ ID NO: 56416 - protein, 8 aa, Homo sapiens
  misc_feature: Table A; Target 56416; HLA-B*37:01; OR51E2; ENSG00000167332; TAA
FDSREISF

SEQ ID NO: 56417 - protein, 9 aa, Homo sapiens
  misc_feature: Table A; Target 56417; HLA-B*18:01; OR51E2; ENSG00000167332; TAA
FEACLTQMF

SEQ ID NO: 56418 - protein, 9 aa, Homo sapiens
  misc_feature: Table A; Target 56418; HLA-B*44:02; OR51E2; ENSG00000167332; TAA
FEACLTQMF

SEQ ID NO: 56419 - protein, 9 aa, Homo sapiens
  misc_feature: Table A; Target 56419; HLA-A*23:01; OR51E2; ENSG00000167332; TAA
FFFPLPLLI

SEQ ID NO: 56420 - protein, 9 aa, Homo sapiens
  misc_feature: Table A; Target 56420; HLA-A*24:02; OR51E2; ENSG00000167332; TAA
FFFPLPLLI

SEQ ID NO: 56421 - protein, 9 aa, Homo sapiens
  misc_feature: Table A; Target 56421; HLA-A*29:02; OR51E2; ENSG00000167332; TAA
FFFPLPLLI

SEQ ID NO: 56422 - protein, 9 aa, Homo sapiens
  misc_feature: Table A; Target 56422; HLA-A*29:02; OR51E2; ENSG00000167332; TAA
FFPLPLLIK

SEQ ID NO: 56423 - protein, 9 aa, Homo sapiens
  misc_feature: Table A; Target 56423; HLA-C*12:03; OR51E2; ENSG00000167332; TAA
FGNSLHPIV

SEQ ID NO: 56424 - protein, 10 aa, Homo sapiens
  misc_feature: Table A; Target 56424; HLA-A*31:01; OR51E2; ENSG00000167332; TAA
FGNSLHPIVR

SEQ ID NO: 56425 - protein, 8 aa, Homo sapiens
  misc_feature: Table A; Target 56425; HLA-B*08:01; OR51E2; ENSG00000167332; TAA
FLIIRTVL

SEQ ID NO: 56426 - protein, 10 aa, Homo sapiens
  misc_feature: Table A; Target 56426; HLA-A*02:03; OR51E2; ENSG00000167332; TAA
FLIIRTVLQL

SEQ ID NO: 56427 - protein, 8 aa, Homo sapiens
  misc_feature: Table A; Target 56427; HLA-B*51:01; OR51E2; ENSG00000167332; TAA
FPLLSMYV

SEQ ID NO: 56428 - protein, 9 aa, Homo sapiens
  misc_feature: Table A; Target 56428; HLA-B*51:01; OR51E2; ENSG00000167332; TAA
FPLLSMYVV

SEQ ID NO: 56429 - protein, 9 aa, Homo sapiens
  misc_feature: Table A; Target 56429; HLA-B*54:01; OR51E2; ENSG00000167332; TAA
FPLLSMYVV

SEQ ID NO: 56430 - protein, 9 aa, Homo sapiens
  misc_feature: Table A; Target 56430; HLA-B*56:01; OR51E2; ENSG00000167332; TAA
FPLLSMYVV

SEQ ID NO: 56431 - protein, 10 aa, Homo sapiens
  misc_feature: Table A; Target 56431; HLA-B*54:01; OR51E2; ENSG00000167332; TAA
FPLLSMYVVA

SEQ ID NO: 56432 - protein, 9 aa, Homo sapiens
  misc_feature: Table A; Target 56432; HLA-A*68:02; OR51E2; ENSG00000167332; TAA
FTHATFVLI

SEQ ID NO: 56433 - protein, 9 aa, Homo sapiens
  misc_feature: Table A; Target 56433; HLA-A*02:01; OR51E2; ENSG00000167332; TAA
FVLIGIPGL

SEQ ID NO: 56434 - protein, 9 aa, Homo sapiens
  misc_feature: Table A; Target 56434; HLA-A*02:04; OR51E2; ENSG00000167332; TAA
FVLIGIPGL

SEQ ID NO: 56435 - protein, 9 aa, Homo sapiens
  misc_feature: Table A; Target 56435; HLA-A*02:07; OR51E2; ENSG00000167332; TAA
FVLIGIPGL

SEQ ID NO: 56436 - protein, 10 aa, Homo sapiens
  misc_feature: Table A; Target 56436; HLA-A*24:02; OR51E2; ENSG00000167332; TAA
FWFDSREISF

SEQ ID NO: 56437 - protein, 10 aa, Homo sapiens
  misc_feature: Table A; Target 56437; HLA-A*29:02; OR51E2; ENSG00000167332; TAA
FYVPLIGLSV

SEQ ID NO: 56438 - protein, 8 aa, Homo sapiens
  misc_feature: Table A; Target 56438; HLA-B*37:01; OR51E2; ENSG00000167332; TAA
GLSVVHRF

SEQ ID NO: 56439 - protein, 8 aa, Homo sapiens
  misc_feature: Table A; Target 56439; HLA-B*13:02; OR51E2; ENSG00000167332; TAA
GLTAILLV

SEQ ID NO: 56440 - protein, 9 aa, Homo sapiens
  misc_feature: Table A; Target 56440; HLA-A*02:07; OR51E2; ENSG00000167332; TAA
GVDVMFISL

SEQ ID NO: 56441 - protein, 9 aa, Homo sapiens
  misc_feature: Table A; Target 56441; HLA-A*68:02; OR51E2; ENSG00000167332; TAA
HAAVLNNTV

SEQ ID NO: 56442 - protein, 9 aa, Homo sapiens
  misc_feature: Table A; Target 56442; HLA-B*13:02; OR51E2; ENSG00000167332; TAA
HAAVLNNTV

SEQ ID NO: 56443 - protein, 9 aa, Homo sapiens
  misc_feature: Table A; Target 56443; HLA-B*35:03; OR51E2; ENSG00000167332; TAA
HAAVLNNTV

SEQ ID NO: 56444 - protein, 9 aa, Homo sapiens
  misc_feature: Table A; Target 56444; HLA-B*38:01; OR51E2; ENSG00000167332; TAA
HAAVLNNTV

SEQ ID NO: 56445 - protein, 9 aa, Homo sapiens
  misc_feature: Table A; Target 56445; HLA-B*39:01; OR51E2; ENSG00000167332; TAA
HAAVLNNTV

SEQ ID NO: 56446 - protein, 9 aa, Homo sapiens
  misc_feature: Table A; Target 56446; HLA-B*51:01; OR51E2; ENSG00000167332; TAA
HAAVLNNTV

SEQ ID NO: 56447 - protein, 9 aa, Homo sapiens
  misc_feature: Table A; Target 56447; HLA-B*54:01; OR51E2; ENSG00000167332; TAA
HAAVLNNTV

SEQ ID NO: 56448 - protein, 9 aa, Homo sapiens
  misc_feature: Table A; Target 56448; HLA-B*58:01; OR51E2; ENSG00000167332; TAA
HAAVLNNTV

SEQ ID NO: 56449 - protein, 9 aa, Homo sapiens
  misc_feature: Table A; Target 56449; HLA-C*02:02; OR51E2; ENSG00000167332; TAA
HAAVLNNTV

SEQ ID NO: 56450 - protein, 9 aa, Homo sapiens
  misc_feature: Table A; Target 56450; HLA-C*03:03; OR51E2; ENSG00000167332; TAA
HAAVLNNTV

SEQ ID NO: 56451 - protein, 9 aa, Homo sapiens
  misc_feature: Table A; Target 56451; HLA-C*03:04; OR51E2; ENSG00000167332; TAA
HAAVLNNTV

SEQ ID NO: 56452 - protein, 9 aa, Homo sapiens
  misc_feature: Table A; Target 56452; HLA-C*07:06; OR51E2; ENSG00000167332; TAA
HAAVLNNTV

SEQ ID NO: 56453 - protein, 9 aa, Homo sapiens
  misc_feature: Table A; Target 56453; HLA-C*12:03; OR51E2; ENSG00000167332; TAA
HAAVLNNTV

SEQ ID NO: 56454 - protein, 9 aa, Homo sapiens
  misc_feature: Table A; Target 56454; HLA-C*16:02; OR51E2; ENSG00000167332; TAA
HAAVLNNTV

SEQ ID NO: 56455 - protein, 9 aa, Homo sapiens
  misc_feature: Table A; Target 56455; HLA-C*16:04; OR51E2; ENSG00000167332; TAA
HAAVLNNTV

SEQ ID NO: 56456 - protein, 11 aa, Homo sapiens
  misc_feature: Table A; Target 56456; HLA-B*54:01; OR51E2; ENSG00000167332; TAA
HAAVLNNTVTA

SEQ ID NO: 56457 - protein, 10 aa, Homo sapiens
  misc_feature: Table A; Target 56457; HLA-B*51:01; OR51E2; ENSG00000167332; TAA
HALSAIESTI

SEQ ID NO: 56458 - protein, 11 aa, Homo sapiens
  misc_feature: Table A; Target 56458; HLA-B*35:03; OR51E2; ENSG00000167332; TAA
HALSAIESTIL

SEQ ID NO: 56459 - protein, 9 aa, Homo sapiens
  misc_feature: Table A; Target 56459; HLA-A*68:02; OR51E2; ENSG00000167332; TAA
HATFVLIGI

SEQ ID NO: 56460 - protein, 9 aa, Homo sapiens
  misc_feature: Table A; Target 56460; HLA-B*51:01; OR51E2; ENSG00000167332; TAA
HATFVLIGI

SEQ ID NO: 56461 - protein, 9 aa, Homo sapiens
  misc_feature: Table A; Target 56461; HLA-A*29:02; OR51E2; ENSG00000167332; TAA
HIGVVLAFY

SEQ ID NO: 56462 - protein, 8 aa, Homo sapiens
  misc_feature: Table A; Target 56462; HLA-B*07:02; OR51E2; ENSG00000167332; TAA
HPIVRVVM

SEQ ID NO: 56463 - protein, 8 aa, Homo sapiens
  misc_feature: Table A; Target 56463; HLA-B*08:01; OR51E2; ENSG00000167332; TAA
HPIVRVVM

SEQ ID NO: 56464 - protein, 8 aa, Homo sapiens
  misc_feature: Table A; Target 56464; HLA-B*08:01; OR51E2; ENSG00000167332; TAA
HPLRHAAV

SEQ ID NO: 56465 - protein, 9 aa, Homo sapiens
  misc_feature: Table A; Target 56465; HLA-B*07:02; OR51E2; ENSG00000167332; TAA
HPLRHAAVL

SEQ ID NO: 56466 - protein, 9 aa, Homo sapiens
  misc_feature: Table A; Target 56466; HLA-B*08:01; OR51E2; ENSG00000167332; TAA
HPLRHAAVL

SEQ ID NO: 56467 - protein, 9 aa, Homo sapiens
  misc_feature: Table A; Target 56467; HLA-C*07:02; OR51E2; ENSG00000167332; TAA
HPLRHAAVL

SEQ ID NO: 56468 - protein, 9 aa, Homo sapiens
  misc_feature: Table A; Target 56468; HLA-A*01:01; OR51E2; ENSG00000167332; TAA
HQDVMKLAY

SEQ ID NO: 56469 - protein, 9 aa, Homo sapiens
  misc_feature: Table A; Target 56469; HLA-A*29:02; OR51E2; ENSG00000167332; TAA
HQDVMKLAY

SEQ ID NO: 56470 - protein, 9 aa, Homo sapiens
  misc_feature: Table A; Target 56470; HLA-A*30:02; OR51E2; ENSG00000167332; TAA
HQDVMKLAY

SEQ ID NO: 56471 - protein, 9 aa, Homo sapiens
  misc_feature: Table A; Target 56471; HLA-A*32:01; OR51E2; ENSG00000167332; TAA
HQDVMKLAY

SEQ ID NO: 56472 - protein, 9 aa, Homo sapiens
  misc_feature: Table A; Target 56472; HLA-B*15:01; OR51E2; ENSG00000167332; TAA
HQDVMKLAY

SEQ ID NO: 56473 - protein, 9 aa, Homo sapiens
  misc_feature: Table A; Target 56473; HLA-B*15:03; OR51E2; ENSG00000167332; TAA
HQDVMKLAY

SEQ ID NO: 56474 - protein, 9 aa, Homo sapiens
  misc_feature: Table A; Target 56474; HLA-B*18:01; OR51E2; ENSG00000167332; TAA
HQDVMKLAY

SEQ ID NO: 56475 - protein, 9 aa, Homo sapiens
  misc_feature: Table A; Target 56475; HLA-B*35:01; OR51E2; ENSG00000167332; TAA
HQDVMKLAY

SEQ ID NO: 56476 - protein, 9 aa, Homo sapiens
  misc_feature: Table A; Target 56476; HLA-B*44:03; OR51E2; ENSG00000167332; TAA
HQDVMKLAY

SEQ ID NO: 56477 - protein, 9 aa, Homo sapiens
  misc_feature: Table A; Target 56477; HLA-C*03:03; OR51E2; ENSG00000167332; TAA
HQDVMKLAY

SEQ ID NO: 56478 - protein, 9 aa, Homo sapiens
  misc_feature: Table A; Target 56478; HLA-C*16:02; OR51E2; ENSG00000167332; TAA
HQDVMKLAY

SEQ ID NO: 56479 - protein, 9 aa, Homo sapiens
  misc_feature: Table A; Target 56479; HLA-C*16:04; OR51E2; ENSG00000167332; TAA
HQDVMKLAY

SEQ ID NO: 56480 - protein, 9 aa, Homo sapiens
  misc_feature: Table A; Target 56480; HLA-A*01:01; OR51E2; ENSG00000167332; TAA
HSNVLSHSY

SEQ ID NO: 56481 - protein, 9 aa, Homo sapiens
  misc_feature: Table A; Target 56481; HLA-A*25:01; OR51E2; ENSG00000167332; TAA
HSNVLSHSY

SEQ ID NO: 56482 - protein, 9 aa, Homo sapiens
  misc_feature: Table A; Target 56482; HLA-A*26:01; OR51E2; ENSG00000167332; TAA
HSNVLSHSY

SEQ ID NO: 56483 - protein, 9 aa, Homo sapiens
  misc_feature: Table A; Target 56483; HLA-A*29:02; OR51E2; ENSG00000167332; TAA
HSNVLSHSY

SEQ ID NO: 56484 - protein, 9 aa, Homo sapiens
  misc_feature: Table A; Target 56484; HLA-A*30:02; OR51E2; ENSG00000167332; TAA
HSNVLSHSY

SEQ ID NO: 56485 - protein, 9 aa, Homo sapiens
  misc_feature: Table A; Target 56485; HLA-A*32:01; OR51E2; ENSG00000167332; TAA
HSNVLSHSY

SEQ ID NO: 56486 - protein, 9 aa, Homo sapiens
  misc_feature: Table A; Target 56486; HLA-A*33:01; OR51E2; ENSG00000167332; TAA
HSNVLSHSY

SEQ ID NO: 56487 - protein, 9 aa, Homo sapiens
  misc_feature: Table A; Target 56487; HLA-A*33:03; OR51E2; ENSG00000167332; TAA
HSNVLSHSY

SEQ ID NO: 56488 - protein, 9 aa, Homo sapiens
  misc_feature: Table A; Target 56488; HLA-B*15:01; OR51E2; ENSG00000167332; TAA
HSNVLSHSY

SEQ ID NO: 56489 - protein, 9 aa, Homo sapiens
  misc_feature: Table A; Target 56489; HLA-B*15:03; OR51E2; ENSG00000167332; TAA
HSNVLSHSY

SEQ ID NO: 56490 - protein, 9 aa, Homo sapiens
  misc_feature: Table A; Target 56490; HLA-B*18:01; OR51E2; ENSG00000167332; TAA
HSNVLSHSY

SEQ ID NO: 56491 - protein, 9 aa, Homo sapiens
  misc_feature: Table A; Target 56491; HLA-B*35:01; OR51E2; ENSG00000167332; TAA
HSNVLSHSY

SEQ ID NO: 56492 - protein, 9 aa, Homo sapiens
  misc_feature: Table A; Target 56492; HLA-B*44:02; OR51E2; ENSG00000167332; TAA
HSNVLSHSY

SEQ ID NO: 56493 - protein, 9 aa, Homo sapiens
  misc_feature: Table A; Target 56493; HLA-B*44:03; OR51E2; ENSG00000167332; TAA
HSNVLSHSY

SEQ ID NO: 56494 - protein, 9 aa, Homo sapiens
  misc_feature: Table A; Target 56494; HLA-B*46:01; OR51E2; ENSG00000167332; TAA
HSNVLSHSY

SEQ ID NO: 56495 - protein, 9 aa, Homo sapiens
  misc_feature: Table A; Target 56495; HLA-B*57:01; OR51E2; ENSG00000167332; TAA
HSNVLSHSY

SEQ ID NO: 56496 - protein, 9 aa, Homo sapiens
  misc_feature: Table A; Target 56496; HLA-B*58:01; OR51E2; ENSG00000167332; TAA
HSNVLSHSY

SEQ ID NO: 56497 - protein, 9 aa, Homo sapiens
  misc_feature: Table A; Target 56497; HLA-C*02:02; OR51E2; ENSG00000167332; TAA
HSNVLSHSY

SEQ ID NO: 56498 - protein, 9 aa, Homo sapiens
  misc_feature: Table A; Target 56498; HLA-C*07:04; OR51E2; ENSG00000167332; TAA
HSNVLSHSY

SEQ ID NO: 56499 - protein, 9 aa, Homo sapiens
  misc_feature: Table A; Target 56499; HLA-C*07:06; OR51E2; ENSG00000167332; TAA
HSNVLSHSY

SEQ ID NO: 56500 - protein, 9 aa, Homo sapiens
  misc_feature: Table A; Target 56500; HLA-C*16:01; OR51E2; ENSG00000167332; TAA
HSNVLSHSY

SEQ ID NO: 56501 - protein, 9 aa, Homo sapiens
  misc_feature: Table A; Target 56501; HLA-C*16:02; OR51E2; ENSG00000167332; TAA
HSNVLSHSY

SEQ ID NO: 56502 - protein, 9 aa, Homo sapiens
  misc_feature: Table A; Target 56502; HLA-C*16:04; OR51E2; ENSG00000167332; TAA
HSNVLSHSY

SEQ ID NO: 56503 - protein, 8 aa, Homo sapiens
  misc_feature: Table A; Target 56503; HLA-B*18:01; OR51E2; ENSG00000167332; TAA
IESTILLA

SEQ ID NO: 56504 - protein, 8 aa, Homo sapiens
  misc_feature: Table A; Target 56504; HLA-B*49:01; OR51E2; ENSG00000167332; TAA
IESTILLA

SEQ ID NO: 56505 - protein, 9 aa, Homo sapiens
  misc_feature: Table A; Target 56505; HLA-A*30:01; OR51E2; ENSG00000167332; TAA
IESTILLAM

SEQ ID NO: 56506 - protein, 9 aa, Homo sapiens
  misc_feature: Table A; Target 56506; HLA-B*18:01; OR51E2; ENSG00000167332; TAA
IESTILLAM

SEQ ID NO: 56507 - protein, 9 aa, Homo sapiens
  misc_feature: Table A; Target 56507; HLA-B*37:01; OR51E2; ENSG00000167332; TAA
IESTILLAM

SEQ ID NO: 56508 - protein, 9 aa, Homo sapiens
  misc_feature: Table A; Target 56508; HLA-B*40:01; OR51E2; ENSG00000167332; TAA
IESTILLAM

SEQ ID NO: 56509 - protein, 9 aa, Homo sapiens
  misc_feature: Table A; Target 56509; HLA-B*40:02; OR51E2; ENSG00000167332; TAA
IESTILLAM

SEQ ID NO: 56510 - protein, 9 aa, Homo sapiens
  misc_feature: Table A; Target 56510; HLA-B*44:02; OR51E2; ENSG00000167332; TAA
IESTILLAM

SEQ ID NO: 56511 - protein, 9 aa, Homo sapiens
  misc_feature: Table A; Target 56511; HLA-B*44:03; OR51E2; ENSG00000167332; TAA
IESTILLAM

SEQ ID NO: 56512 - protein, 9 aa, Homo sapiens
  misc_feature: Table A; Target 56512; HLA-B*49:01; OR51E2; ENSG00000167332; TAA
IESTILLAM

SEQ ID NO: 56513 - protein, 9 aa, Homo sapiens
  misc_feature: Table A; Target 56513; HLA-C*16:04; OR51E2; ENSG00000167332; TAA
IESTILLAM

SEQ ID NO: 56514 - protein, 9 aa, Homo sapiens
  misc_feature: Table A; Target 56514; HLA-A*24:02; OR51E2; ENSG00000167332; TAA
IGLSVVHRF

SEQ ID NO: 56515 - protein, 9 aa, Homo sapiens
  misc_feature: Table A; Target 56515; HLA-B*57:01; OR51E2; ENSG00000167332; TAA
IGLSVVHRF

SEQ ID NO: 56516 - protein, 11 aa, Homo sapiens
  misc_feature: Table A; Target 56516; HLA-B*38:01; OR51E2; ENSG00000167332; TAA
IHALSAIESTI

SEQ ID NO: 56517 - protein, 9 aa, Homo sapiens
  misc_feature: Table A; Target 56517; HLA-A*32:01; OR51E2; ENSG00000167332; TAA
IVAVVRGSL

SEQ ID NO: 56518 - protein, 9 aa, Homo sapiens
  misc_feature: Table A; Target 56518; HLA-B*07:02; OR51E2; ENSG00000167332; TAA
IVAVVRGSL

SEQ ID NO: 56519 - protein, 9 aa, Homo sapiens
  misc_feature: Table A; Target 56519; HLA-C*07:02; OR51E2; ENSG00000167332; TAA
IVAVVRGSL

SEQ ID NO: 56520 - protein, 9 aa, Homo sapiens
  misc_feature: Table A; Target 56520; HLA-A*24:02; OR51E2; ENSG00000167332; TAA
IYGAKTKQI

SEQ ID NO: 56521 - protein, 9 aa, Homo sapiens
  misc_feature: Table A; Target 56521; HLA-A*23:01; OR51E2; ENSG00000167332; TAA
IYLLLPPVI

SEQ ID NO: 56522 - protein, 9 aa, Homo sapiens
  misc_feature: Table A; Target 56522; HLA-A*24:02; OR51E2; ENSG00000167332; TAA
IYLLLPPVI

SEQ ID NO: 56523 - protein, 8 aa, Homo sapiens
  misc_feature: Table A; Target 56523; HLA-C*03:03; OR51E2; ENSG00000167332; TAA
LAAIDLAL

SEQ ID NO: 56524 - protein, 9 aa, Homo sapiens
  misc_feature: Table A; Target 56524; HLA-B*46:01; OR51E2; ENSG00000167332; TAA
LAFCHSNVL

SEQ ID NO: 56525 - protein, 9 aa, Homo sapiens
  misc_feature: Table A; Target 56525; HLA-C*02:02; OR51E2; ENSG00000167332; TAA
LAFCHSNVL

SEQ ID NO: 56526 - protein, 9 aa, Homo sapiens
  misc_feature: Table A; Target 56526; HLA-C*03:03; OR51E2; ENSG00000167332; TAA
LAFCHSNVL

SEQ ID NO: 56527 - protein, 9 aa, Homo sapiens
  misc_feature: Table A; Target 56527; HLA-C*03:04; OR51E2; ENSG00000167332; TAA
LAFCHSNVL

SEQ ID NO: 56528 - protein, 9 aa, Homo sapiens
  misc_feature: Table A; Target 56528; HLA-C*12:03; OR51E2; ENSG00000167332; TAA
LAFCHSNVL

SEQ ID NO: 56529 - protein, 8 aa, Homo sapiens
  misc_feature: Table A; Target 56529; HLA-B*51:01; OR51E2; ENSG00000167332; TAA
LAFYVPLI

SEQ ID NO: 56530 - protein, 8 aa, Homo sapiens
  misc_feature: Table A; Target 56530; HLA-C*03:03; OR51E2; ENSG00000167332; TAA
LALSTSTM

SEQ ID NO: 56531 - protein, 8 aa, Homo sapiens
  misc_feature: Table A; Target 56531; HLA-C*03:04; OR51E2; ENSG00000167332; TAA
LALSTSTM

SEQ ID NO: 56532 - protein, 9 aa, Homo sapiens
  misc_feature: Table A; Target 56532; HLA-A*29:02; OR51E2; ENSG00000167332; TAA
LFFFPLPLL

SEQ ID NO: 56533 - protein, 9 aa, Homo sapiens
  misc_feature: Table A; Target 56533; HLA-A*03:01; OR51E2; ENSG00000167332; TAA
LIGIPGLEK

SEQ ID NO: 56534 - protein, 11 aa, Homo sapiens
  misc_feature: Table A; Target 56534; HLA-A*02:04; OR51E2; ENSG00000167332; TAA
LLLPPVINPII

SEQ ID NO: 56535 - protein, 9 aa, Homo sapiens
  misc_feature: Table A; Target 56535; HLA-A*02:01; OR51E2; ENSG00000167332; TAA
LLPPVINPI

SEQ ID NO: 56536 - protein, 9 aa, Homo sapiens
  misc_feature: Table A; Target 56536; HLA-A*02:04; OR51E2; ENSG00000167332; TAA
LLPPVINPI

SEQ ID NO: 56537 - protein, 9 aa, Homo sapiens
  misc_feature: Table A; Target 56537; HLA-A*02:07; OR51E2; ENSG00000167332; TAA
LLPPVINPI

SEQ ID NO: 56538 - protein, 9 aa, Homo sapiens
  misc_feature: Table A; Target 56538; HLA-A*24:02; OR51E2; ENSG00000167332; TAA
LLPPVINPI

SEQ ID NO: 56539 - protein, 9 aa, Homo sapiens
  misc_feature: Table A; Target 56539; HLA-C*01:02; OR51E2; ENSG00000167332; TAA
LLPPVINPI

SEQ ID NO: 56540 - protein, 10 aa, Homo sapiens
  misc_feature: Table A; Target 56540; HLA-A*02:07; OR51E2; ENSG00000167332; TAA
LLPPVINPII

SEQ ID NO: 56541 - protein, 11 aa, Homo sapiens
  misc_feature: Table A; Target 56541; HLA-A*29:02; OR51E2; ENSG00000167332; TAA
LLPPVINPIIY

SEQ ID NO: 56542 - protein, 8 aa, Homo sapiens
  misc_feature: Table A; Target 56542; HLA-B*08:01; OR51E2; ENSG00000167332; TAA
LPNVVYGL

SEQ ID NO: 56543 - protein, 8 aa, Homo sapiens
  misc_feature: Table A; Target 56543; HLA-B*35:01; OR51E2; ENSG00000167332; TAA
LPNVVYGL

SEQ ID NO: 56544 - protein, 10 aa, Homo sapiens
  misc_feature: Table A; Target 56544; HLA-B*54:01; OR51E2; ENSG00000167332; TAA
LPNVVYGLTA

SEQ ID NO: 56545 - protein, 10 aa, Homo sapiens
  misc_feature: Table A; Target 56545; HLA-B*56:01; OR51E2; ENSG00000167332; TAA
LPNVVYGLTA

SEQ ID NO: 56546 - protein, 8 aa, Homo sapiens
  misc_feature: Table A; Target 56546; HLA-B*51:01; OR51E2; ENSG00000167332; TAA
LPPVINPI

SEQ ID NO: 56547 - protein, 9 aa, Homo sapiens
  misc_feature: Table A; Target 56547; HLA-B*35:03; OR51E2; ENSG00000167332; TAA
LPPVINPII

SEQ ID NO: 56548 - protein, 9 aa, Homo sapiens
  misc_feature: Table A; Target 56548; HLA-B*51:01; OR51E2; ENSG00000167332; TAA
LPPVINPII

SEQ ID NO: 56549 - protein, 10 aa, Homo sapiens
  misc_feature: Table A; Target 56549; HLA-B*35:01; OR51E2; ENSG00000167332; TAA
LPPVINPIIY

SEQ ID NO: 56550 - protein, 9 aa, Homo sapiens
  misc_feature: Table A; Target 56550; HLA-B*58:01; OR51E2; ENSG00000167332; TAA
LSTSTMPKI

SEQ ID NO: 56551 - protein, 8 aa, Homo sapiens
  misc_feature: Table A; Target 56551; HLA-B*51:01; OR51E2; ENSG00000167332; TAA
MGVDVMFI

SEQ ID NO: 56552 - protein, 9 aa, Homo sapiens
  misc_feature: Table A; Target 56552; HLA-A*02:01; OR51E2; ENSG00000167332; TAA
MLAAIDLAL

SEQ ID NO: 56553 - protein, 9 aa, Homo sapiens
  misc_feature: Table A; Target 56553; HLA-A*02:03; OR51E2; ENSG00000167332; TAA
MLAAIDLAL

SEQ ID NO: 56554 - protein, 9 aa, Homo sapiens
  misc_feature: Table A; Target 56554; HLA-A*02:04; OR51E2; ENSG00000167332; TAA
MLAAIDLAL

SEQ ID NO: 56555 - protein, 9 aa, Homo sapiens
  misc_feature: Table A; Target 56555; HLA-A*02:07; OR51E2; ENSG00000167332; TAA
MLAAIDLAL

SEQ ID NO: 56556 - protein, 9 aa, Homo sapiens
  misc_feature: Table A; Target 56556; HLA-A*68:02; OR51E2; ENSG00000167332; TAA
MLAAIDLAL

SEQ ID NO: 56557 - protein, 9 aa, Homo sapiens
  misc_feature: Table A; Target 56557; HLA-B*13:02; OR51E2; ENSG00000167332; TAA
MLAAIDLAL

SEQ ID NO: 56558 - protein, 9 aa, Homo sapiens
  misc_feature: Table A; Target 56558; HLA-B*35:03; OR51E2; ENSG00000167332; TAA
MLAAIDLAL

SEQ ID NO: 56559 - protein, 9 aa, Homo sapiens
  misc_feature: Table A; Target 56559; HLA-B*55:01; OR51E2; ENSG00000167332; TAA
MLAAIDLAL

SEQ ID NO: 56560 - protein, 9 aa, Homo sapiens
  misc_feature: Table A; Target 56560; HLA-A*33:01; OR51E2; ENSG00000167332; TAA
NCIVVFIVR

SEQ ID NO: 56561 - protein, 9 aa, Homo sapiens
  misc_feature: Table A; Target 56561; HLA-A*23:01; OR51E2; ENSG00000167332; TAA
NFTHATFVL

SEQ ID NO: 56562 - protein, 8 aa, Homo sapiens
  misc_feature: Table A; Target 56562; HLA-A*33:01; OR51E2; ENSG00000167332; TAA
NSLHPIVR

SEQ ID NO: 56563 - protein, 9 aa, Homo sapiens
  misc_feature: Table A; Target 56563; HLA-A*02:04; OR51E2; ENSG00000167332; TAA
NSLHPIVRV

SEQ ID NO: 56564 - protein, 9 aa, Homo sapiens
  misc_feature: Table A; Target 56564; HLA-A*68:02; OR51E2; ENSG00000167332; TAA
NSLHPIVRV

SEQ ID NO: 56565 - protein, 11 aa, Homo sapiens
  misc_feature: Table A; Target 56565; HLA-A*68:02; OR51E2; ENSG00000167332; TAA
NTVTAQIGIVA

SEQ ID NO: 56566 - protein, 9 aa, Homo sapiens
  misc_feature: Table A; Target 56566; HLA-A*25:01; OR51E2; ENSG00000167332; TAA
NVVYGLTAI

SEQ ID NO: 56567 - protein, 9 aa, Homo sapiens
  misc_feature: Table A; Target 56567; HLA-B*35:01; OR51E2; ENSG00000167332; TAA
PPVINPIIY

SEQ ID NO: 56568 - protein, 8 aa, Homo sapiens
  misc_feature: Table A; Target 56568; HLA-C*07:01; OR51E2; ENSG00000167332; TAA
QDVMKLAY

SEQ ID NO: 56569 - protein, 9 aa, Homo sapiens
  misc_feature: Table A; Target 56569; HLA-A*31:01; OR51E2; ENSG00000167332; TAA
QIGIVAVVR

SEQ ID NO: 56570 - protein, 9 aa, Homo sapiens
  misc_feature: Table A; Target 56570; HLA-A*33:03; OR51E2; ENSG00000167332; TAA
QIGIVAVVR

SEQ ID NO: 56571 - protein, 9 aa, Homo sapiens
  misc_feature: Table A; Target 56571; HLA-A*68:01; OR51E2; ENSG00000167332; TAA
QIGIVAVVR

SEQ ID NO: 56572 - protein, 9 aa, Homo sapiens
  misc_feature: Table A; Target 56572; HLA-C*07:06; OR51E2; ENSG00000167332; TAA
QIGIVAVVR

SEQ ID NO: 56573 - protein, 9 aa, Homo sapiens
  misc_feature: Table A; Target 56573; HLA-B*08:01; OR51E2; ENSG00000167332; TAA
QIRTRVLAM

SEQ ID NO: 56574 - protein, 8 aa, Homo sapiens
  misc_feature: Table A; Target 56574; HLA-A*02:04; OR51E2; ENSG00000167332; TAA
QMFFIHAL

SEQ ID NO: 56575 - protein, 9 aa, Homo sapiens
  misc_feature: Table A; Target 56575; HLA-A*30:01; OR51E2; ENSG00000167332; TAA
REISFEACL

SEQ ID NO: 56576 - protein, 9 aa, Homo sapiens
  misc_feature: Table A; Target 56576; HLA-B*40:01; OR51E2; ENSG00000167332; TAA
REISFEACL

SEQ ID NO: 56577 - protein, 9 aa, Homo sapiens
  misc_feature: Table A; Target 56577; HLA-B*44:02; OR51E2; ENSG00000167332; TAA
REISFEACL

SEQ ID NO: 56578 - protein, 9 aa, Homo sapiens
  misc_feature: Table A; Target 56578; HLA-B*44:03; OR51E2; ENSG00000167332; TAA
REISFEACL

SEQ ID NO: 56579 - protein, 10 aa, Homo sapiens
  misc_feature: Table A; Target 56579; HLA-B*38:01; OR51E2; ENSG00000167332; TAA
RHAAVLNNTV

SEQ ID NO: 56580 - protein, 10 aa, Homo sapiens
  misc_feature: Table A; Target 56580; HLA-B*57:01; OR51E2; ENSG00000167332; TAA
RSLHAPMYLF

SEQ ID NO: 56581 - protein, 11 aa, Homo sapiens
  misc_feature: Table A; Target 56581; HLA-A*01:01; OR51E2; ENSG00000167332; TAA
RTERSLHAPMY

SEQ ID NO: 56582 - protein, 9 aa, Homo sapiens
  misc_feature: Table A; Target 56582; HLA-A*03:01; OR51E2; ENSG00000167332; TAA
RTVLQLPSK

SEQ ID NO: 56583 - protein, 9 aa, Homo sapiens
  misc_feature: Table A; Target 56583; HLA-A*03:02; OR51E2; ENSG00000167332; TAA
RTVLQLPSK

SEQ ID NO: 56584 - protein, 9 aa, Homo sapiens
  misc_feature: Table A; Target 56584; HLA-A*11:01; OR51E2; ENSG00000167332; TAA
RTVLQLPSK

SEQ ID NO: 56585 - protein, 8 aa, Homo sapiens
  misc_feature: Table A; Target 56585; HLA-B*35:03; OR51E2; ENSG00000167332; TAA
SAIESTIL

SEQ ID NO: 56586 - protein, 8 aa, Homo sapiens
  misc_feature: Table A; Target 56586; HLA-C*03:03; OR51E2; ENSG00000167332; TAA
SAIESTIL

SEQ ID NO: 56587 - protein, 8 aa, Homo sapiens
  misc_feature: Table A; Target 56587; HLA-C*03:04; OR51E2; ENSG00000167332; TAA
SAIESTIL

SEQ ID NO: 56588 - protein, 8 aa, Homo sapiens
  misc_feature: Table A; Target 56588; HLA-C*05:01; OR51E2; ENSG00000167332; TAA
SAIESTIL

SEQ ID NO: 56589 - protein, 9 aa, Homo sapiens
  misc_feature: Table A; Target 56589; HLA-A*02:01; OR51E2; ENSG00000167332; TAA
SAIESTILL

SEQ ID NO: 56590 - protein, 9 aa, Homo sapiens
  misc_feature: Table A; Target 56590; HLA-A*02:04; OR51E2; ENSG00000167332; TAA
SAIESTILL

SEQ ID NO: 56591 - protein, 9 aa, Homo sapiens
  misc_feature: Table A; Target 56591; HLA-A*02:07; OR51E2; ENSG00000167332; TAA
SAIESTILL

SEQ ID NO: 56592 - protein, 9 aa, Homo sapiens
  misc_feature: Table A; Target 56592; HLA-A*11:01; OR51E2; ENSG00000167332; TAA
SAIESTILL

SEQ ID NO: 56593 - protein, 9 aa, Homo sapiens
  misc_feature: Table A; Target 56593; HLA-A*23:01; OR51E2; ENSG00000167332; TAA
SAIESTILL

SEQ ID NO: 56594 - protein, 9 aa, Homo sapiens
  misc_feature: Table A; Target 56594; HLA-A*24:02; OR51E2; ENSG00000167332; TAA
SAIESTILL

SEQ ID NO: 56595 - protein, 9 aa, Homo sapiens
  misc_feature: Table A; Target 56595; HLA-A*25:01; OR51E2; ENSG00000167332; TAA
SAIESTILL

SEQ ID NO: 56596 - protein, 9 aa, Homo sapiens
  misc_feature: Table A; Target 56596; HLA-A*26:01; OR51E2; ENSG00000167332; TAA
SAIESTILL

SEQ ID NO: 56597 - protein, 9 aa, Homo sapiens
  misc_feature: Table A; Target 56597; HLA-A*30:01; OR51E2; ENSG00000167332; TAA
SAIESTILL

SEQ ID NO: 56598 - protein, 9 aa, Homo sapiens
  misc_feature: Table A; Target 56598; HLA-A*32:01; OR51E2; ENSG00000167332; TAA
SAIESTILL

SEQ ID NO: 56599 - protein, 9 aa, Homo sapiens
  misc_feature: Table A; Target 56599; HLA-A*68:02; OR51E2; ENSG00000167332; TAA
SAIESTILL

SEQ ID NO: 56600 - protein, 9 aa, Homo sapiens
  misc_feature: Table A; Target 56600; HLA-B*07:02; OR51E2; ENSG00000167332; TAA
SAIESTILL

SEQ ID NO: 56601 - protein, 9 aa, Homo sapiens
  misc_feature: Table A; Target 56601; HLA-B*15:01; OR51E2; ENSG00000167332; TAA
SAIESTILL

SEQ ID NO: 56602 - protein, 9 aa, Homo sapiens
  misc_feature: Table A; Target 56602; HLA-B*15:03; OR51E2; ENSG00000167332; TAA
SAIESTILL

SEQ ID NO: 56603 - protein, 9 aa, Homo sapiens
  misc_feature: Table A; Target 56603; HLA-B*27:05; OR51E2; ENSG00000167332; TAA
SAIESTILL

SEQ ID NO: 56604 - protein, 9 aa, Homo sapiens
  misc_feature: Table A; Target 56604; HLA-B*35:01; OR51E2; ENSG00000167332; TAA
SAIESTILL

SEQ ID NO: 56605 - protein, 9 aa, Homo sapiens
  misc_feature: Table A; Target 56605; HLA-B*35:03; OR51E2; ENSG00000167332; TAA
SAIESTILL

SEQ ID NO: 56606 - protein, 9 aa, Homo sapiens
  misc_feature: Table A; Target 56606; HLA-B*38:01; OR51E2; ENSG00000167332; TAA
SAIESTILL

SEQ ID NO: 56607 - protein, 9 aa, Homo sapiens
  misc_feature: Table A; Target 56607; HLA-B*39:01; OR51E2; ENSG00000167332; TAA
SAIESTILL

SEQ ID NO: 56608 - protein, 9 aa, Homo sapiens
  misc_feature: Table A; Target 56608; HLA-B*40:01; OR51E2; ENSG00000167332; TAA
SAIESTILL

SEQ ID NO: 56609 - protein, 9 aa, Homo sapiens
  misc_feature: Table A; Target 56609; HLA-B*44:03; OR51E2; ENSG00000167332; TAA
SAIESTILL

SEQ ID NO: 56610 - protein, 9 aa, Homo sapiens
  misc_feature: Table A; Target 56610; HLA-B*46:01; OR51E2; ENSG00000167332; TAA
SAIESTILL

SEQ ID NO: 56611 - protein, 9 aa, Homo sapiens
  misc_feature: Table A; Target 56611; HLA-B*55:01; OR51E2; ENSG00000167332; TAA
SAIESTILL

SEQ ID NO: 56612 - protein, 9 aa, Homo sapiens
  misc_feature: Table A; Target 56612; HLA-B*57:01; OR51E2; ENSG00000167332; TAA
SAIESTILL

SEQ ID NO: 56613 - protein, 9 aa, Homo sapiens
  misc_feature: Table A; Target 56613; HLA-B*58:01; OR51E2; ENSG00000167332; TAA
SAIESTILL

SEQ ID NO: 56614 - protein, 9 aa, Homo sapiens
  misc_feature: Table A; Target 56614; HLA-C*01:02; OR51E2; ENSG00000167332; TAA
SAIESTILL

SEQ ID NO: 56615 - protein, 9 aa, Homo sapiens
  misc_feature: Table A; Target 56615; HLA-C*02:02; OR51E2; ENSG00000167332; TAA
SAIESTILL

SEQ ID NO: 56616 - protein, 9 aa, Homo sapiens
  misc_feature: Table A; Target 56616; HLA-C*03:03; OR51E2; ENSG00000167332; TAA
SAIESTILL

SEQ ID NO: 56617 - protein, 9 aa, Homo sapiens
  misc_feature: Table A; Target 56617; HLA-C*03:04; OR51E2; ENSG00000167332; TAA
SAIESTILL

SEQ ID NO: 56618 - protein, 9 aa, Homo sapiens
  misc_feature: Table A; Target 56618; HLA-C*05:01; OR51E2; ENSG00000167332; TAA
SAIESTILL

SEQ ID NO: 56619 - protein, 9 aa, Homo sapiens
  misc_feature: Table A; Target 56619; HLA-C*07:04; OR51E2; ENSG00000167332; TAA
SAIESTILL

SEQ ID NO: 56620 - protein, 9 aa, Homo sapiens
  misc_feature: Table A; Target 56620; HLA-C*07:06; OR51E2; ENSG00000167332; TAA
SAIESTILL

SEQ ID NO: 56621 - protein, 9 aa, Homo sapiens
  misc_feature: Table A; Target 56621; HLA-C*12:03; OR51E2; ENSG00000167332; TAA
SAIESTILL

SEQ ID NO: 56622 - protein, 9 aa, Homo sapiens
  misc_feature: Table A; Target 56622; HLA-C*14:02; OR51E2; ENSG00000167332; TAA
SAIESTILL

SEQ ID NO: 56623 - protein, 9 aa, Homo sapiens
  misc_feature: Table A; Target 56623; HLA-C*16:01; OR51E2; ENSG00000167332; TAA
SAIESTILL

SEQ ID NO: 56624 - protein, 9 aa, Homo sapiens
  misc_feature: Table A; Target 56624; HLA-C*16:02; OR51E2; ENSG00000167332; TAA
SAIESTILL

SEQ ID NO: 56625 - protein, 9 aa, Homo sapiens
  misc_feature: Table A; Target 56625; HLA-C*16:04; OR51E2; ENSG00000167332; TAA
SAIESTILL

SEQ ID NO: 56626 - protein, 11 aa, Homo sapiens
  misc_feature: Table A; Target 56626; HLA-A*11:01; OR51E2; ENSG00000167332; TAA
SAIESTILLAM

SEQ ID NO: 56627 - protein, 11 aa, Homo sapiens
  misc_feature: Table A; Target 56627; HLA-B*35:01; OR51E2; ENSG00000167332; TAA
SAIESTILLAM

SEQ ID NO: 56628 - protein, 11 aa, Homo sapiens
  misc_feature: Table A; Target 56628; HLA-C*07:06; OR51E2; ENSG00000167332; TAA
SAIESTILLAM

SEQ ID NO: 56629 - protein, 9 aa, Homo sapiens
  misc_feature: Table A; Target 56629; HLA-A*32:01; OR51E2; ENSG00000167332; TAA
SCNFTHATF

SEQ ID NO: 56630 - protein, 9 aa, Homo sapiens
  misc_feature: Table A; Target 56630; HLA-A*23:01; OR51E2; ENSG00000167332; TAA
SHIGVVLAF

SEQ ID NO: 56631 - protein, 9 aa, Homo sapiens
  misc_feature: Table A; Target 56631; HLA-B*38:01; OR51E2; ENSG00000167332; TAA
SHIGVVLAF

SEQ ID NO: 56632 - protein, 9 aa, Homo sapiens
  misc_feature: Table A; Target 56632; HLA-B*39:01; OR51E2; ENSG00000167332; TAA
SHIGVVLAF

SEQ ID NO: 56633 - protein, 9 aa, Homo sapiens
  misc_feature: Table A; Target 56633; HLA-A*02:01; OR51E2; ENSG00000167332; TAA
SLFFFPLPL

SEQ ID NO: 56634 - protein, 9 aa, Homo sapiens
  misc_feature: Table A; Target 56634; HLA-A*02:03; OR51E2; ENSG00000167332; TAA
SLFFFPLPL

SEQ ID NO: 56635 - protein, 9 aa, Homo sapiens
  misc_feature: Table A; Target 56635; HLA-A*02:04; OR51E2; ENSG00000167332; TAA
SLFFFPLPL

SEQ ID NO: 56636 - protein, 10 aa, Homo sapiens
  misc_feature: Table A; Target 56636; HLA-A*02:03; OR51E2; ENSG00000167332; TAA
SLFFFPLPLL

SEQ ID NO: 56637 - protein, 10 aa, Homo sapiens
  misc_feature: Table A; Target 56637; HLA-A*02:04; OR51E2; ENSG00000167332; TAA
SLFFFPLPLL

SEQ ID NO: 56638 - protein, 8 aa, Homo sapiens
  misc_feature: Table A; Target 56638; HLA-A*02:03; OR51E2; ENSG00000167332; TAA
SLHPIVRV

SEQ ID NO: 56639 - protein, 8 aa, Homo sapiens
  misc_feature: Table A; Target 56639; HLA-A*02:04; OR51E2; ENSG00000167332; TAA
SLHPIVRV

SEQ ID NO: 56640 - protein, 9 aa, Homo sapiens
  misc_feature: Table A; Target 56640; HLA-A*02:01; OR51E2; ENSG00000167332; TAA
SLHPIVRVV

SEQ ID NO: 56641 - protein, 9 aa, Homo sapiens
  misc_feature: Table A; Target 56641; HLA-A*02:03; OR51E2; ENSG00000167332; TAA
SLHPIVRVV

SEQ ID NO: 56642 - protein, 9 aa, Homo sapiens
  misc_feature: Table A; Target 56642; HLA-A*02:04; OR51E2; ENSG00000167332; TAA
SLHPIVRVV

SEQ ID NO: 56643 - protein, 9 aa, Homo sapiens
  misc_feature: Table A; Target 56643; HLA-A*02:07; OR51E2; ENSG00000167332; TAA
SLHPIVRVV

SEQ ID NO: 56644 - protein, 9 aa, Homo sapiens
  misc_feature: Table A; Target 56644; HLA-A*68:02; OR51E2; ENSG00000167332; TAA
SLHPIVRVV

SEQ ID NO: 56645 - protein, 9 aa, Homo sapiens
  misc_feature: Table A; Target 56645; HLA-B*13:02; OR51E2; ENSG00000167332; TAA
SLHPIVRVV

SEQ ID NO: 56646 - protein, 9 aa, Homo sapiens
  misc_feature: Table A; Target 56646; HLA-B*55:01; OR51E2; ENSG00000167332; TAA
SLHPIVRVV

SEQ ID NO: 56647 - protein, 8 aa, Homo sapiens
  misc_feature: Table A; Target 56647; HLA-A*30:02; OR51E2; ENSG00000167332; TAA
SNVLSHSY

SEQ ID NO: 56648 - protein, 8 aa, Homo sapiens
  misc_feature: Table A; Target 56648; HLA-B*15:01; OR51E2; ENSG00000167332; TAA
SNVLSHSY

SEQ ID NO: 56649 - protein, 8 aa, Homo sapiens
  misc_feature: Table A; Target 56649; HLA-B*15:03; OR51E2; ENSG00000167332; TAA
SNVLSHSY

SEQ ID NO: 56650 - protein, 8 aa, Homo sapiens
  misc_feature: Table A; Target 56650; HLA-B*18:01; OR51E2; ENSG00000167332; TAA
SNVLSHSY

SEQ ID NO: 56651 - protein, 10 aa, Homo sapiens
  misc_feature: Table A; Target 56651; HLA-A*32:01; OR51E2; ENSG00000167332; TAA
SSCNFTHATF

SEQ ID NO: 56652 - protein, 9 aa, Homo sapiens
  misc_feature: Table A; Target 56652; HLA-A*02:01; OR51E2; ENSG00000167332; TAA
STMPKILAL

SEQ ID NO: 56653 - protein, 9 aa, Homo sapiens
  misc_feature: Table A; Target 56653; HLA-A*02:04; OR51E2; ENSG00000167332; TAA
STMPKILAL

SEQ ID NO: 56654 - protein, 9 aa, Homo sapiens
  misc_feature: Table A; Target 56654; HLA-A*03:01; OR51E2; ENSG00000167332; TAA
STMPKILAL

SEQ ID NO: 56655 - protein, 9 aa, Homo sapiens
  misc_feature: Table A; Target 56655; HLA-A*11:01; OR51E2; ENSG00000167332; TAA
STMPKILAL

SEQ ID NO: 56656 - protein, 9 aa, Homo sapiens
  misc_feature: Table A; Target 56656; HLA-A*25:01; OR51E2; ENSG00000167332; TAA
STMPKILAL

SEQ ID NO: 56657 - protein, 9 aa, Homo sapiens
  misc_feature: Table A; Target 56657; HLA-A*26:01; OR51E2; ENSG00000167332; TAA
STMPKILAL

SEQ ID NO: 56658 - protein, 9 aa, Homo sapiens
  misc_feature: Table A; Target 56658; HLA-A*32:01; OR51E2; ENSG00000167332; TAA
STMPKILAL

SEQ ID NO: 56659 - protein, 9 aa, Homo sapiens
  misc_feature: Table A; Target 56659; HLA-A*68:02; OR51E2; ENSG00000167332; TAA
STMPKILAL

SEQ ID NO: 56660 - protein, 9 aa, Homo sapiens
  misc_feature: Table A; Target 56660; HLA-B*08:01; OR51E2; ENSG00000167332; TAA
STMPKILAL

SEQ ID NO: 56661 - protein, 9 aa, Homo sapiens
  misc_feature: Table A; Target 56661; HLA-C*03:03; OR51E2; ENSG00000167332; TAA
STMPKILAL

SEQ ID NO: 56662 - protein, 9 aa, Homo sapiens
  misc_feature: Table A; Target 56662; HLA-C*03:04; OR51E2; ENSG00000167332; TAA
STMPKILAL

SEQ ID NO: 56663 - protein, 11 aa, Homo sapiens
  misc_feature: Table A; Target 56663; HLA-B*57:01; OR51E2; ENSG00000167332; TAA
STMPKILALFW

SEQ ID NO: 56664 - protein, 9 aa, Homo sapiens
  misc_feature: Table A; Target 56664; HLA-C*12:03; OR51E2; ENSG00000167332; TAA
STSTMPKIL

SEQ ID NO: 56665 - protein, 9 aa, Homo sapiens
  misc_feature: Table A; Target 56665; HLA-C*16:01; OR51E2; ENSG00000167332; TAA
STSTMPKIL

SEQ ID NO: 56666 - protein, 9 aa, Homo sapiens
  misc_feature: Table A; Target 56666; HLA-A*68:02; OR51E2; ENSG00000167332; TAA
SYFLIIRTV

SEQ ID NO: 56667 - protein, 10 aa, Homo sapiens
  misc_feature: Table A; Target 56667; HLA-A*24:02; OR51E2; ENSG00000167332; TAA
SYFLIIRTVL

SEQ ID NO: 56668 - protein, 9 aa, Homo sapiens
  misc_feature: Table A; Target 56668; HLA-B*51:01; OR51E2; ENSG00000167332; TAA
TAILLVMGV

SEQ ID NO: 56669 - protein, 9 aa, Homo sapiens
  misc_feature: Table A; Target 56669; HLA-B*54:01; OR51E2; ENSG00000167332; TAA
TAILLVMGV

SEQ ID NO: 56670 - protein, 9 aa, Homo sapiens
  misc_feature: Table A; Target 56670; HLA-B*56:01; OR51E2; ENSG00000167332; TAA
TAILLVMGV

SEQ ID NO: 56671 - protein, 9 aa, Homo sapiens
  misc_feature: Table A; Target 56671; HLA-C*12:03; OR51E2; ENSG00000167332; TAA
TAILLVMGV

SEQ ID NO: 56672 - protein, 9 aa, Homo sapiens
  misc_feature: Table A; Target 56672; HLA-B*08:01; OR51E2; ENSG00000167332; TAA
TAQIGIVAV

SEQ ID NO: 56673 - protein, 9 aa, Homo sapiens
  misc_feature: Table A; Target 56673; HLA-B*13:02; OR51E2; ENSG00000167332; TAA
TAQIGIVAV

SEQ ID NO: 56674 - protein, 9 aa, Homo sapiens
  misc_feature: Table A; Target 56674; HLA-B*35:03; OR51E2; ENSG00000167332; TAA
TAQIGIVAV

SEQ ID NO: 56675 - protein, 9 aa, Homo sapiens
  misc_feature: Table A; Target 56675; HLA-B*39:01; OR51E2; ENSG00000167332; TAA
TAQIGIVAV

SEQ ID NO: 56676 - protein, 9 aa, Homo sapiens
  misc_feature: Table A; Target 56676; HLA-B*46:01; OR51E2; ENSG00000167332; TAA
TAQIGIVAV

SEQ ID NO: 56677 - protein, 9 aa, Homo sapiens
  misc_feature: Table A; Target 56677; HLA-B*51:01; OR51E2; ENSG00000167332; TAA
TAQIGIVAV

SEQ ID NO: 56678 - protein, 9 aa, Homo sapiens
  misc_feature: Table A; Target 56678; HLA-B*54:01; OR51E2; ENSG00000167332; TAA
TAQIGIVAV

SEQ ID NO: 56679 - protein, 9 aa, Homo sapiens
  misc_feature: Table A; Target 56679; HLA-B*56:01; OR51E2; ENSG00000167332; TAA
TAQIGIVAV

SEQ ID NO: 56680 - protein, 9 aa, Homo sapiens
  misc_feature: Table A; Target 56680; HLA-C*01:02; OR51E2; ENSG00000167332; TAA
TAQIGIVAV

SEQ ID NO: 56681 - protein, 9 aa, Homo sapiens
  misc_feature: Table A; Target 56681; HLA-C*03:03; OR51E2; ENSG00000167332; TAA
TAQIGIVAV

SEQ ID NO: 56682 - protein, 9 aa, Homo sapiens
  misc_feature: Table A; Target 56682; HLA-C*03:04; OR51E2; ENSG00000167332; TAA
TAQIGIVAV

SEQ ID NO: 56683 - protein, 9 aa, Homo sapiens
  misc_feature: Table A; Target 56683; HLA-C*16:02; OR51E2; ENSG00000167332; TAA
TAQIGIVAV

SEQ ID NO: 56684 - protein, 11 aa, Homo sapiens
  misc_feature: Table A; Target 56684; HLA-A*33:01; OR51E2; ENSG00000167332; TAA
TAQIGIVAVVR

SEQ ID NO: 56685 - protein, 11 aa, Homo sapiens
  misc_feature: Table A; Target 56685; HLA-A*68:01; OR51E2; ENSG00000167332; TAA
TAQIGIVAVVR

SEQ ID NO: 56686 - protein, 11 aa, Homo sapiens
  misc_feature: Table A; Target 56686; HLA-C*07:06; OR51E2; ENSG00000167332; TAA
TAQIGIVAVVR

SEQ ID NO: 56687 - protein, 8 aa, Homo sapiens
  misc_feature: Table A; Target 56687; HLA-B*38:01; OR51E2; ENSG00000167332; TAA
THATFVLI

SEQ ID NO: 56688 - protein, 9 aa, Homo sapiens
  misc_feature: Table A; Target 56688; HLA-A*02:01; OR51E2; ENSG00000167332; TAA
TLPNVVYGL

SEQ ID NO: 56689 - protein, 9 aa, Homo sapiens
  misc_feature: Table A; Target 56689; HLA-A*02:03; OR51E2; ENSG00000167332; TAA
TLPNVVYGL

SEQ ID NO: 56690 - protein, 9 aa, Homo sapiens
  misc_feature: Table A; Target 56690; HLA-A*02:04; OR51E2; ENSG00000167332; TAA
TLPNVVYGL

SEQ ID NO: 56691 - protein, 9 aa, Homo sapiens
  misc_feature: Table A; Target 56691; HLA-A*02:07; OR51E2; ENSG00000167332; TAA
TLPNVVYGL

SEQ ID NO: 56692 - protein, 9 aa, Homo sapiens
  misc_feature: Table A; Target 56692; HLA-A*23:01; OR51E2; ENSG00000167332; TAA
TLPNVVYGL

SEQ ID NO: 56693 - protein, 9 aa, Homo sapiens
  misc_feature: Table A; Target 56693; HLA-C*01:02; OR51E2; ENSG00000167332; TAA
TLPNVVYGL

SEQ ID NO: 56694 - protein, 9 aa, Homo sapiens
  misc_feature: Table A; Target 56694; HLA-A*24:02; OR51E2; ENSG00000167332; TAA
TMPKILALF

SEQ ID NO: 56695 - protein, 9 aa, Homo sapiens
  misc_feature: Table A; Target 56695; HLA-A*02:01; OR51E2; ENSG00000167332; TAA
TQMFFIHAL

SEQ ID NO: 56696 - protein, 9 aa, Homo sapiens
  misc_feature: Table A; Target 56696; HLA-A*02:03; OR51E2; ENSG00000167332; TAA
TQMFFIHAL

SEQ ID NO: 56697 - protein, 9 aa, Homo sapiens
  misc_feature: Table A; Target 56697; HLA-A*02:04; OR51E2; ENSG00000167332; TAA
TQMFFIHAL

SEQ ID NO: 56698 - protein, 9 aa, Homo sapiens
  misc_feature: Table A; Target 56698; HLA-A*30:01; OR51E2; ENSG00000167332; TAA
TQMFFIHAL

SEQ ID NO: 56699 - protein, 9 aa, Homo sapiens
  misc_feature: Table A; Target 56699; HLA-B*08:01; OR51E2; ENSG00000167332; TAA
TQMFFIHAL

SEQ ID NO: 56700 - protein, 9 aa, Homo sapiens
  misc_feature: Table A; Target 56700; HLA-B*13:02; OR51E2; ENSG00000167332; TAA
TQMFFIHAL

SEQ ID NO: 56701 - protein, 9 aa, Homo sapiens
  misc_feature: Table A; Target 56701; HLA-B*38:01; OR51E2; ENSG00000167332; TAA
TQMFFIHAL

SEQ ID NO: 56702 - protein, 9 aa, Homo sapiens
  misc_feature: Table A; Target 56702; HLA-B*44:02; OR51E2; ENSG00000167332; TAA
TQMFFIHAL

SEQ ID NO: 56703 - protein, 11 aa, Homo sapiens
  misc_feature: Table A; Target 56703; HLA-A*31:01; OR51E2; ENSG00000167332; TAA
TVLQLPSKSER

SEQ ID NO: 56704 - protein, 11 aa, Homo sapiens
  misc_feature: Table A; Target 56704; HLA-A*33:01; OR51E2; ENSG00000167332; TAA
TVLQLPSKSER

SEQ ID NO: 56705 - protein, 11 aa, Homo sapiens
  misc_feature: Table A; Target 56705; HLA-A*33:03; OR51E2; ENSG00000167332; TAA
TVLQLPSKSER

SEQ ID NO: 56706 - protein, 11 aa, Homo sapiens
  misc_feature: Table A; Target 56706; HLA-A*68:01; OR51E2; ENSG00000167332; TAA
TVLQLPSKSER

SEQ ID NO: 56707 - protein, 11 aa, Homo sapiens
  misc_feature: Table A; Target 56707; HLA-C*07:06; OR51E2; ENSG00000167332; TAA
TVLQLPSKSER

SEQ ID NO: 56708 - protein, 8 aa, Homo sapiens
  misc_feature: Table A; Target 56708; HLA-B*08:01; OR51E2; ENSG00000167332; TAA
VAVVRGSL

SEQ ID NO: 56709 - protein, 8 aa, Homo sapiens
  misc_feature: Table A; Target 56709; HLA-C*03:04; OR51E2; ENSG00000167332; TAA
VAVVRGSL

SEQ ID NO: 56710 - protein, 8 aa, Homo sapiens
  misc_feature: Table A; Target 56710; HLA-C*16:01; OR51E2; ENSG00000167332; TAA
VAVVRGSL

SEQ ID NO: 56711 - protein, 9 aa, Homo sapiens
  misc_feature: Table A; Target 56711; HLA-B*46:01; OR51E2; ENSG00000167332; TAA
VAVVRGSLF

SEQ ID NO: 56712 - protein, 9 aa, Homo sapiens
  misc_feature: Table A; Target 56712; HLA-C*02:02; OR51E2; ENSG00000167332; TAA
VAVVRGSLF

SEQ ID NO: 56713 - protein, 9 aa, Homo sapiens
  misc_feature: Table A; Target 56713; HLA-C*16:01; OR51E2; ENSG00000167332; TAA
VAVVRGSLF

SEQ ID NO: 56714 - protein, 9 aa, Homo sapiens
  misc_feature: Table A; Target 56714; HLA-C*16:04; OR51E2; ENSG00000167332; TAA
VAVVRGSLF

SEQ ID NO: 56715 - protein, 8 aa, Homo sapiens
  misc_feature: Table A; Target 56715; HLA-A*30:01; OR51E2; ENSG00000167332; TAA
VDVMFISL

SEQ ID NO: 56716 - protein, 8 aa, Homo sapiens
  misc_feature: Table A; Target 56716; HLA-B*37:01; OR51E2; ENSG00000167332; TAA
VDVMFISL

SEQ ID NO: 56717 - protein, 9 aa, Homo sapiens
  misc_feature: Table A; Target 56717; HLA-A*30:02; OR51E2; ENSG00000167332; TAA
VGFPLLSMY

SEQ ID NO: 56718 - protein, 9 aa, Homo sapiens
  misc_feature: Table A; Target 56718; HLA-B*15:03; OR51E2; ENSG00000167332; TAA
VGFPLLSMY

SEQ ID NO: 56719 - protein, 9 aa, Homo sapiens
  misc_feature: Table A; Target 56719; HLA-B*46:01; OR51E2; ENSG00000167332; TAA
VGFPLLSMY

SEQ ID NO: 56720 - protein, 9 aa, Homo sapiens
  misc_feature: Table A; Target 56720; HLA-C*02:02; OR51E2; ENSG00000167332; TAA
VGFPLLSMY

SEQ ID NO: 56721 - protein, 8 aa, Homo sapiens
  misc_feature: Table A; Target 56721; HLA-B*38:01; OR51E2; ENSG00000167332; TAA
VHQDVMKL

SEQ ID NO: 56722 - protein, 8 aa, Homo sapiens
  misc_feature: Table A; Target 56722; HLA-B*39:01; OR51E2; ENSG00000167332; TAA
VHQDVMKL

SEQ ID NO: 56723 - protein, 10 aa, Homo sapiens
  misc_feature: Table A; Target 56723; HLA-A*29:02; OR51E2; ENSG00000167332; TAA
VHQDVMKLAY

SEQ ID NO: 56724 - protein, 10 aa, Homo sapiens
  misc_feature: Table A; Target 56724; HLA-A*30:02; OR51E2; ENSG00000167332; TAA
VHQDVMKLAY

SEQ ID NO: 56725 - protein, 9 aa, Homo sapiens
  misc_feature: Table A; Target 56725; HLA-A*02:01; OR51E2; ENSG00000167332; TAA
VINPIIYGA

SEQ ID NO: 56726 - protein, 9 aa, Homo sapiens
  misc_feature: Table A; Target 56726; HLA-A*02:03; OR51E2; ENSG00000167332; TAA
VINPIIYGA

SEQ ID NO: 56727 - protein, 9 aa, Homo sapiens
  misc_feature: Table A; Target 56727; HLA-A*02:04; OR51E2; ENSG00000167332; TAA
VINPIIYGA

SEQ ID NO: 56728 - protein, 9 aa, Homo sapiens
  misc_feature: Table A; Target 56728; HLA-A*02:07; OR51E2; ENSG00000167332; TAA
VINPIIYGA

SEQ ID NO: 56729 - protein, 9 aa, Homo sapiens
  misc_feature: Table A; Target 56729; HLA-B*56:01; OR51E2; ENSG00000167332; TAA
VINPIIYGA

SEQ ID NO: 56730 - protein, 10 aa, Homo sapiens
  misc_feature: Table A; Target 56730; HLA-A*03:01; OR51E2; ENSG00000167332; TAA
VINPIIYGAK

SEQ ID NO: 56731 - protein, 10 aa, Homo sapiens
  misc_feature: Table A; Target 56731; HLA-A*03:02; OR51E2; ENSG00000167332; TAA
VINPIIYGAK

SEQ ID NO: 56732 - protein, 9 aa, Homo sapiens
  misc_feature: Table A; Target 56732; HLA-A*02:01; OR51E2; ENSG00000167332; TAA
VLAFYVPLI

SEQ ID NO: 56733 - protein, 9 aa, Homo sapiens
  misc_feature: Table A; Target 56733; HLA-A*02:03; OR51E2; ENSG00000167332; TAA
VLAFYVPLI

SEQ ID NO: 56734 - protein, 9 aa, Homo sapiens
  misc_feature: Table A; Target 56734; HLA-A*02:04; OR51E2; ENSG00000167332; TAA
VLAFYVPLI

SEQ ID NO: 56735 - protein, 8 aa, Homo sapiens
  misc_feature: Table A; Target 56735; HLA-A*02:04; OR51E2; ENSG00000167332; TAA
VLIGIPGL

SEQ ID NO: 56736 - protein, 10 aa, Homo sapiens
  misc_feature: Table A; Target 56736; HLA-A*03:01; OR51E2; ENSG00000167332; TAA
VLIGIPGLEK

SEQ ID NO: 56737 - protein, 10 aa, Homo sapiens
  misc_feature: Table A; Target 56737; HLA-A*03:02; OR51E2; ENSG00000167332; TAA
VLIGIPGLEK

SEQ ID NO: 56738 - protein, 10 aa, Homo sapiens
  misc_feature: Table A; Target 56738; HLA-A*11:01; OR51E2; ENSG00000167332; TAA
VLIGIPGLEK

SEQ ID NO: 56739 - protein, 11 aa, Homo sapiens
  misc_feature: Table A; Target 56739; HLA-A*02:01; OR51E2; ENSG00000167332; TAA
VLIGIPGLEKA

SEQ ID NO: 56740 - protein, 11 aa, Homo sapiens
  misc_feature: Table A; Target 56740; HLA-A*02:03; OR51E2; ENSG00000167332; TAA
VLIGIPGLEKA

SEQ ID NO: 56741 - protein, 11 aa, Homo sapiens
  misc_feature: Table A; Target 56741; HLA-A*02:04; OR51E2; ENSG00000167332; TAA
VLIGIPGLEKA

SEQ ID NO: 56742 - protein, 10 aa, Homo sapiens
  misc_feature: Table A; Target 56742; HLA-A*31:01; OR51E2; ENSG00000167332; TAA
VLQLPSKSER

SEQ ID NO: 56743 - protein, 8 aa, Homo sapiens
  misc_feature: Table A; Target 56743; HLA-B*51:01; OR51E2; ENSG00000167332; TAA
VPLIGLSV

SEQ ID NO: 56744 - protein, 8 aa, Homo sapiens
  misc_feature: Table A; Target 56744; HLA-B*56:01; OR51E2; ENSG00000167332; TAA
VPLIGLSV

SEQ ID NO: 56745 - protein, 9 aa, Homo sapiens
  misc_feature: Table A; Target 56745; HLA-B*07:02; OR51E2; ENSG00000167332; TAA
VPLIGLSVV

SEQ ID NO: 56746 - protein, 9 aa, Homo sapiens
  misc_feature: Table A; Target 56746; HLA-B*51:01; OR51E2; ENSG00000167332; TAA
VPLIGLSVV

SEQ ID NO: 56747 - protein, 9 aa, Homo sapiens
  misc_feature: Table A; Target 56747; HLA-B*54:01; OR51E2; ENSG00000167332; TAA
VPLIGLSVV

SEQ ID NO: 56748 - protein, 9 aa, Homo sapiens
  misc_feature: Table A; Target 56748; HLA-B*55:01; OR51E2; ENSG00000167332; TAA
VPLIGLSVV

SEQ ID NO: 56749 - protein, 9 aa, Homo sapiens
  misc_feature: Table A; Target 56749; HLA-B*56:01; OR51E2; ENSG00000167332; TAA
VPLIGLSVV

SEQ ID NO: 56750 - protein, 9 aa, Homo sapiens
  misc_feature: Table A; Target 56750; HLA-C*16:04; OR51E2; ENSG00000167332; TAA
VRVVMGDIY

SEQ ID NO: 56751 - protein, 8 aa, Homo sapiens
  misc_feature: Table A; Target 56751; HLA-B*08:01; OR51E2; ENSG00000167332; TAA
VSHIGVVL

SEQ ID NO: 56752 - protein, 8 aa, Homo sapiens
  misc_feature: Table A; Target 56752; HLA-B*40:02; OR51E2; ENSG00000167332; TAA
VSHIGVVL

SEQ ID NO: 56753 - protein, 8 aa, Homo sapiens
  misc_feature: Table A; Target 56753; HLA-C*01:02; OR51E2; ENSG00000167332; TAA
VSHIGVVL

SEQ ID NO: 56754 - protein, 8 aa, Homo sapiens
  misc_feature: Table A; Target 56754; HLA-C*03:03; OR51E2; ENSG00000167332; TAA
VSHIGVVL

SEQ ID NO: 56755 - protein, 8 aa, Homo sapiens
  misc_feature: Table A; Target 56755; HLA-C*03:04; OR51E2; ENSG00000167332; TAA
VSHIGVVL

SEQ ID NO: 56756 - protein, 8 aa, Homo sapiens
  misc_feature: Table A; Target 56756; HLA-C*07:04; OR51E2; ENSG00000167332; TAA
VSHIGVVL

SEQ ID NO: 56757 - protein, 8 aa, Homo sapiens
  misc_feature: Table A; Target 56757; HLA-C*16:01; OR51E2; ENSG00000167332; TAA
VSHIGVVL

SEQ ID NO: 56758 - protein, 9 aa, Homo sapiens
  misc_feature: Table A; Target 56758; HLA-C*12:03; OR51E2; ENSG00000167332; TAA
VTAQIGIVA

SEQ ID NO: 56759 - protein, 10 aa, Homo sapiens
  misc_feature: Table A; Target 56759; HLA-A*02:01; OR51E2; ENSG00000167332; TAA
VTAQIGIVAV

SEQ ID NO: 56760 - protein, 10 aa, Homo sapiens
  misc_feature: Table A; Target 56760; HLA-A*02:03; OR51E2; ENSG00000167332; TAA
VTAQIGIVAV

SEQ ID NO: 56761 - protein, 10 aa, Homo sapiens
  misc_feature: Table A; Target 56761; HLA-A*68:02; OR51E2; ENSG00000167332; TAA
VTAQIGIVAV

SEQ ID NO: 56762 - protein, 11 aa, Homo sapiens
  misc_feature: Table A; Target 56762; HLA-A*68:02; OR51E2; ENSG00000167332; TAA
VTAQIGIVAVV

SEQ ID NO: 56763 - protein, 9 aa, Homo sapiens
  misc_feature: Table A; Target 56763; HLA-B*13:02; OR51E2; ENSG00000167332; TAA
VVAMFGNCI

SEQ ID NO: 56764 - protein, 9 aa, Homo sapiens
  misc_feature: Table A; Target 56764; HLA-A*31:01; OR51E2; ENSG00000167332; TAA
VVFIVRTER

SEQ ID NO: 56765 - protein, 9 aa, Homo sapiens
  misc_feature: Table A; Target 56765; HLA-C*03:04; OR51E2; ENSG00000167332; TAA
VVHRFGNSL

SEQ ID NO: 56766 - protein, 9 aa, Homo sapiens
  misc_feature: Table A; Target 56766; HLA-A*02:04; OR51E2; ENSG00000167332; TAA
VVMGDIYLL

SEQ ID NO: 56767 - protein, 9 aa, Homo sapiens
  misc_feature: Table A; Target 56767; HLA-A*23:01; OR51E2; ENSG00000167332; TAA
VVMGDIYLL

SEQ ID NO: 56768 - protein, 9 aa, Homo sapiens
  misc_feature: Table A; Target 56768; HLA-A*23:01; OR51E2; ENSG00000167332; TAA
VYGLTAILL

SEQ ID NO: 56769 - protein, 9 aa, Homo sapiens
  misc_feature: Table A; Target 56769; HLA-A*24:02; OR51E2; ENSG00000167332; TAA
VYGLTAILL

SEQ ID NO: 56770 - protein, 9 aa, Homo sapiens
  misc_feature: Table A; Target 56770; HLA-C*04:01; OR51E2; ENSG00000167332; TAA
WFDSREISF

SEQ ID NO: 56771 - protein, 8 aa, Homo sapiens
  misc_feature: Table A; Target 56771; HLA-B*51:01; OR51E2; ENSG00000167332; TAA
YADTLPNV

SEQ ID NO: 56772 - protein, 8 aa, Homo sapiens
  misc_feature: Table A; Target 56772; HLA-C*03:04; OR51E2; ENSG00000167332; TAA
YADTLPNV

SEQ ID NO: 56773 - protein, 8 aa, Homo sapiens
  misc_feature: Table A; Target 56773; HLA-C*05:01; OR51E2; ENSG00000167332; TAA
YADTLPNV

SEQ ID NO: 56774 - protein, 9 aa, Homo sapiens
  misc_feature: Table A; Target 56774; HLA-A*01:01; OR51E2; ENSG00000167332; TAA
YADTLPNVV

SEQ ID NO: 56775 - protein, 9 aa, Homo sapiens
  misc_feature: Table A; Target 56775; HLA-B*35:03; OR51E2; ENSG00000167332; TAA
YADTLPNVV

SEQ ID NO: 56776 - protein, 9 aa, Homo sapiens
  misc_feature: Table A; Target 56776; HLA-B*38:01; OR51E2; ENSG00000167332; TAA
YADTLPNVV

SEQ ID NO: 56777 - protein, 9 aa, Homo sapiens
  misc_feature: Table A; Target 56777; HLA-B*39:01; OR51E2; ENSG00000167332; TAA
YADTLPNVV

SEQ ID NO: 56778 - protein, 9 aa, Homo sapiens
  misc_feature: Table A; Target 56778; HLA-B*51:01; OR51E2; ENSG00000167332; TAA
YADTLPNVV

SEQ ID NO: 56779 - protein, 9 aa, Homo sapiens
  misc_feature: Table A; Target 56779; HLA-B*54:01; OR51E2; ENSG00000167332; TAA
YADTLPNVV

SEQ ID NO: 56780 - protein, 9 aa, Homo sapiens
  misc_feature: Table A; Target 56780; HLA-B*55:01; OR51E2; ENSG00000167332; TAA
YADTLPNVV

SEQ ID NO: 56781 - protein, 9 aa, Homo sapiens
  misc_feature: Table A; Target 56781; HLA-C*02:02; OR51E2; ENSG00000167332; TAA
YADTLPNVV

SEQ ID NO: 56782 - protein, 9 aa, Homo sapiens
  misc_feature: Table A; Target 56782; HLA-C*03:03; OR51E2; ENSG00000167332; TAA
YADTLPNVV

SEQ ID NO: 56783 - protein, 9 aa, Homo sapiens
  misc_feature: Table A; Target 56783; HLA-C*03:04; OR51E2; ENSG00000167332; TAA
YADTLPNVV

SEQ ID NO: 56784 - protein, 9 aa, Homo sapiens
  misc_feature: Table A; Target 56784; HLA-C*05:01; OR51E2; ENSG00000167332; TAA
YADTLPNVV

SEQ ID NO: 56785 - protein, 9 aa, Homo sapiens
  misc_feature: Table A; Target 56785; HLA-C*07:04; OR51E2; ENSG00000167332; TAA
YADTLPNVV

SEQ ID NO: 56786 - protein, 9 aa, Homo sapiens
  misc_feature: Table A; Target 56786; HLA-C*12:03; OR51E2; ENSG00000167332; TAA
YADTLPNVV

SEQ ID NO: 56787 - protein, 9 aa, Homo sapiens
  misc_feature: Table A; Target 56787; HLA-C*16:02; OR51E2; ENSG00000167332; TAA
YADTLPNVV

SEQ ID NO: 56788 - protein, 9 aa, Homo sapiens
  misc_feature: Table A; Target 56788; HLA-C*16:04; OR51E2; ENSG00000167332; TAA
YADTLPNVV

SEQ ID NO: 56789 - protein, 10 aa, Homo sapiens
  misc_feature: Table A; Target 56789; HLA-A*01:01; OR51E2; ENSG00000167332; TAA
YADTLPNVVY

SEQ ID NO: 56790 - protein, 10 aa, Homo sapiens
  misc_feature: Table A; Target 56790; HLA-A*23:01; OR51E2; ENSG00000167332; TAA
YADTLPNVVY

SEQ ID NO: 56791 - protein, 10 aa, Homo sapiens
  misc_feature: Table A; Target 56791; HLA-A*26:01; OR51E2; ENSG00000167332; TAA
YADTLPNVVY

SEQ ID NO: 56792 - protein, 10 aa, Homo sapiens
  misc_feature: Table A; Target 56792; HLA-A*29:02; OR51E2; ENSG00000167332; TAA
YADTLPNVVY

SEQ ID NO: 56793 - protein, 10 aa, Homo sapiens
  misc_feature: Table A; Target 56793; HLA-A*30:02; OR51E2; ENSG00000167332; TAA
YADTLPNVVY

SEQ ID NO: 56794 - protein, 10 aa, Homo sapiens
  misc_feature: Table A; Target 56794; HLA-B*15:03; OR51E2; ENSG00000167332; TAA
YADTLPNVVY

SEQ ID NO: 56795 - protein, 10 aa, Homo sapiens
  misc_feature: Table A; Target 56795; HLA-B*35:01; OR51E2; ENSG00000167332; TAA
YADTLPNVVY

SEQ ID NO: 56796 - protein, 10 aa, Homo sapiens
  misc_feature: Table A; Target 56796; HLA-B*35:03; OR51E2; ENSG00000167332; TAA
YADTLPNVVY

SEQ ID NO: 56797 - protein, 10 aa, Homo sapiens
  misc_feature: Table A; Target 56797; HLA-B*38:01; OR51E2; ENSG00000167332; TAA
YADTLPNVVY

SEQ ID NO: 56798 - protein, 10 aa, Homo sapiens
  misc_feature: Table A; Target 56798; HLA-B*39:01; OR51E2; ENSG00000167332; TAA
YADTLPNVVY

SEQ ID NO: 56799 - protein, 10 aa, Homo sapiens
  misc_feature: Table A; Target 56799; HLA-B*46:01; OR51E2; ENSG00000167332; TAA
YADTLPNVVY

SEQ ID NO: 56800 - protein, 10 aa, Homo sapiens
  misc_feature: Table A; Target 56800; HLA-B*55:01; OR51E2; ENSG00000167332; TAA
YADTLPNVVY

SEQ ID NO: 56801 - protein, 10 aa, Homo sapiens
  misc_feature: Table A; Target 56801; HLA-B*58:01; OR51E2; ENSG00000167332; TAA
YADTLPNVVY

SEQ ID NO: 56802 - protein, 10 aa, Homo sapiens
  misc_feature: Table A; Target 56802; HLA-C*02:02; OR51E2; ENSG00000167332; TAA
YADTLPNVVY

SEQ ID NO: 56803 - protein, 10 aa, Homo sapiens
  misc_feature: Table A; Target 56803; HLA-C*03:03; OR51E2; ENSG00000167332; TAA
YADTLPNVVY

SEQ ID NO: 56804 - protein, 10 aa, Homo sapiens
  misc_feature: Table A; Target 56804; HLA-C*03:04; OR51E2; ENSG00000167332; TAA
YADTLPNVVY

SEQ ID NO: 56805 - protein, 10 aa, Homo sapiens
  misc_feature: Table A; Target 56805; HLA-C*05:01; OR51E2; ENSG00000167332; TAA
YADTLPNVVY

SEQ ID NO: 56806 - protein, 10 aa, Homo sapiens
  misc_feature: Table A; Target 56806; HLA-C*07:04; OR51E2; ENSG00000167332; TAA
YADTLPNVVY

SEQ ID NO: 56807 - protein, 10 aa, Homo sapiens
  misc_feature: Table A; Target 56807; HLA-C*07:06; OR51E2; ENSG00000167332; TAA
YADTLPNVVY

SEQ ID NO: 56808 - protein, 10 aa, Homo sapiens
  misc_feature: Table A; Target 56808; HLA-C*12:03; OR51E2; ENSG00000167332; TAA
YADTLPNVVY

SEQ ID NO: 56809 - protein, 9 aa, Homo sapiens
  misc_feature: Table A; Target 56809; HLA-A*23:01; OR51E2; ENSG00000167332; TAA
YFLIIRTVL

SEQ ID NO: 56810 - protein, 9 aa, Homo sapiens
  misc_feature: Table A; Target 56810; HLA-A*24:02; OR51E2; ENSG00000167332; TAA
YFLIIRTVL

SEQ ID NO: 56811 - protein, 8 aa, Homo sapiens
  misc_feature: Table A; Target 56811; HLA-B*51:01; OR51E2; ENSG00000167332; TAA
YGAKTKQI

SEQ ID NO: 56812 - protein, 9 aa, Homo sapiens
  misc_feature: Table A; Target 56812; HLA-A*02:07; OR51E2; ENSG00000167332; TAA
YVPLIGLSV

SEQ ID NO: 56813 - protein, 9 aa, Homo sapiens
  misc_feature: Table A; Target 56813; HLA-A*30:01; OR51E2; ENSG00000167332; TAA
YVPLIGLSV

SEQ ID NO: 56814 - protein, 9 aa, Homo sapiens
  misc_feature: Table A; Target 56814; HLA-A*68:02; OR51E2; ENSG00000167332; TAA
YVPLIGLSV

SEQ ID NO: 56815 - protein, 9 aa, Homo sapiens
  misc_feature: Table A; Target 56815; HLA-B*13:02; OR51E2; ENSG00000167332; TAA
YVPLIGLSV

SEQ ID NO: 56816 - protein, 9 aa, Homo sapiens
  misc_feature: Table A; Target 56816; HLA-B*51:01; OR51E2; ENSG00000167332; TAA
YVPLIGLSV

SEQ ID NO: 56817 - protein, 9 aa, Homo sapiens
  misc_feature: Table A; Target 56817; HLA-B*54:01; OR51E2; ENSG00000167332; TAA
YVPLIGLSV

SEQ ID NO: 56818 - protein, 9 aa, Homo sapiens
  misc_feature: Table A; Target 56818; HLA-C*01:02; OR51E2; ENSG00000167332; TAA
YVPLIGLSV

SEQ ID NO: 56819 - protein, 9 aa, Homo sapiens
  misc_feature: Table A; Target 56819; HLA-C*02:02; OR51E2; ENSG00000167332; TAA
YVPLIGLSV

SEQ ID NO: 56820 - protein, 10 aa, Homo sapiens
  misc_feature: Table A; Target 56820; HLA-A*02:07; OR51E2; ENSG00000167332; TAA
YVPLIGLSVV

SEQ ID NO: 56821 - protein, 10 aa, Homo sapiens
  misc_feature: Table A; Target 56821; HLA-A*68:02; OR51E2; ENSG00000167332; TAA
YVPLIGLSVV

SEQ ID NO: 56822 - protein, 9 aa, Homo sapiens
  misc_feature: Table A; Target 56822; HLA-C*16:01; PAEP; ENSG00000122133; TAA
AGTWHSMAM

SEQ ID NO: 56823 - protein, 9 aa, Homo sapiens
  misc_feature: Table A; Target 56823; HLA-A*02:01; PAEP; ENSG00000122133; TAA
ALVCGVPAM

SEQ ID NO: 56824 - protein, 9 aa, Homo sapiens
  misc_feature: Table A; Target 56824; HLA-B*46:01; PAEP; ENSG00000122133; TAA
ALVCGVPAM

SEQ ID NO: 56825 - protein, 9 aa, Homo sapiens
  misc_feature: Table A; Target 56825; HLA-A*02:01; PAEP; ENSG00000122133; TAA
AMATNNISL

SEQ ID NO: 56826 - protein, 9 aa, Homo sapiens
  misc_feature: Table A; Target 56826; HLA-A*02:03; PAEP; ENSG00000122133; TAA
AMATNNISL

SEQ ID NO: 56827 - protein, 9 aa, Homo sapiens
  misc_feature: Table A; Target 56827; HLA-A*02:04; PAEP; ENSG00000122133; TAA
AMATNNISL

SEQ ID NO: 56828 - protein, 9 aa, Homo sapiens
  misc_feature: Table A; Target 56828; HLA-A*03:01; PAEP; ENSG00000122133; TAA
AMATNNISL

SEQ ID NO: 56829 - protein, 9 aa, Homo sapiens
  misc_feature: Table A; Target 56829; HLA-A*32:01; PAEP; ENSG00000122133; TAA
AMATNNISL

SEQ ID NO: 56830 - protein, 9 aa, Homo sapiens
  misc_feature: Table A; Target 56830; HLA-B*07:02; PAEP; ENSG00000122133; TAA
AMATNNISL

SEQ ID NO: 56831 - protein, 9 aa, Homo sapiens
  misc_feature: Table A; Target 56831; HLA-B*15:01; PAEP; ENSG00000122133; TAA
AMATNNISL

SEQ ID NO: 56832 - protein, 9 aa, Homo sapiens
  misc_feature: Table A; Target 56832; HLA-B*40:01; PAEP; ENSG00000122133; TAA
AMATNNISL

SEQ ID NO: 56833 - protein, 9 aa, Homo sapiens
  misc_feature: Table A; Target 56833; HLA-B*46:01; PAEP; ENSG00000122133; TAA
AMATNNISL

SEQ ID NO: 56834 - protein, 9 aa, Homo sapiens
  misc_feature: Table A; Target 56834; HLA-B*55:01; PAEP; ENSG00000122133; TAA
AMATNNISL

SEQ ID NO: 56835 - protein, 9 aa, Homo sapiens
  misc_feature: Table A; Target 56835; HLA-B*58:01; PAEP; ENSG00000122133; TAA
AMATNNISL

SEQ ID NO: 56836 - protein, 9 aa, Homo sapiens
  misc_feature: Table A; Target 56836; HLA-C*01:02; PAEP; ENSG00000122133; TAA
AMATNNISL

SEQ ID NO: 56837 - protein, 9 aa, Homo sapiens
  misc_feature: Table A; Target 56837; HLA-C*07:04; PAEP; ENSG00000122133; TAA
AMATNNISL

SEQ ID NO: 56838 - protein, 9 aa, Homo sapiens
  misc_feature: Table A; Target 56838; HLA-C*14:02; PAEP; ENSG00000122133; TAA
AMATNNISL

SEQ ID NO: 56839 - protein, 9 aa, Homo sapiens
  misc_feature: Table A; Target 56839; HLA-C*16:01; PAEP; ENSG00000122133; TAA
AMATNNISL

SEQ ID NO: 56840 - protein, 10 aa, Homo sapiens
  misc_feature: Table A; Target 56840; HLA-A*02:03; PAEP; ENSG00000122133; TAA
AMATNNISLM

SEQ ID NO: 56841 - protein, 10 aa, Homo sapiens
  misc_feature: Table A; Target 56841; HLA-A*26:01; PAEP; ENSG00000122133; TAA
AMATNNISLM

SEQ ID NO: 56842 - protein, 10 aa, Homo sapiens
  misc_feature: Table A; Target 56842; HLA-B*07:02; PAEP; ENSG00000122133; TAA
APLRVHITSL

SEQ ID NO: 56843 - protein, 10 aa, Homo sapiens
  misc_feature: Table A; Target 56843; HLA-B*56:01; PAEP; ENSG00000122133; TAA
APLRVHITSL

SEQ ID NO: 56844 - protein, 10 aa, Homo sapiens
  misc_feature: Table A; Target 56844; HLA-C*07:02; PAEP; ENSG00000122133; TAA
APLRVHITSL

SEQ ID NO: 56845 - protein, 8 aa, Homo sapiens
  misc_feature: Table A; Target 56845; HLA-A*11:01; PAEP; ENSG00000122133; TAA
ATLKAPLR

SEQ ID NO: 56846 - protein, 8 aa, Homo sapiens
  misc_feature: Table A; Target 56846; HLA-A*31:01; PAEP; ENSG00000122133; TAA
ATLKAPLR

SEQ ID NO: 56847 - protein, 9 aa, Homo sapiens
  misc_feature: Table A; Target 56847; HLA-A*02:01; PAEP; ENSG00000122133; TAA
ATLKAPLRV

SEQ ID NO: 56848 - protein, 9 aa, Homo sapiens
  misc_feature: Table A; Target 56848; HLA-A*02:03; PAEP; ENSG00000122133; TAA
ATLKAPLRV

SEQ ID NO: 56849 - protein, 9 aa, Homo sapiens
  misc_feature: Table A; Target 56849; HLA-A*02:04; PAEP; ENSG00000122133; TAA
ATLKAPLRV

SEQ ID NO: 56850 - protein, 9 aa, Homo sapiens
  misc_feature: Table A; Target 56850; HLA-A*03:01; PAEP; ENSG00000122133; TAA
ATLKAPLRV

SEQ ID NO: 56851 - protein, 9 aa, Homo sapiens
  misc_feature: Table A; Target 56851; HLA-A*11:01; PAEP; ENSG00000122133; TAA
ATLKAPLRV

SEQ ID NO: 56852 - protein, 9 aa, Homo sapiens
  misc_feature: Table A; Target 56852; HLA-B*13:02; PAEP; ENSG00000122133; TAA
ATLKAPLRV

SEQ ID NO: 56853 - protein, 8 aa, Homo sapiens
  misc_feature: Table A; Target 56853; HLA-B*39:01; PAEP; ENSG00000122133; TAA
ATLLDTDY

SEQ ID NO: 56854 - protein, 8 aa, Homo sapiens
  misc_feature: Table A; Target 56854; HLA-A*32:01; PAEP; ENSG00000122133; TAA
ATNNISLM

SEQ ID NO: 56855 - protein, 8 aa, Homo sapiens
  misc_feature: Table A; Target 56855; HLA-C*05:01; PAEP; ENSG00000122133; TAA
ATNNISLM

SEQ ID NO: 56856 - protein, 9 aa, Homo sapiens
  misc_feature: Table A; Target 56856; HLA-A*11:01; PAEP; ENSG00000122133; TAA
ATNNISLMA

SEQ ID NO: 56857 - protein, 9 aa, Homo sapiens
  misc_feature: Table A; Target 56857; HLA-B*56:01; PAEP; ENSG00000122133; TAA
ATNNISLMA

SEQ ID NO: 56858 - protein, 11 aa, Homo sapiens
  misc_feature: Table A; Target 56858; HLA-A*03:02; PAEP; ENSG00000122133; TAA
ATNNISLMATL

SEQ ID NO: 56859 - protein, 11 aa, Homo sapiens
  misc_feature: Table A; Target 56859; HLA-A*23:01; PAEP; ENSG00000122133; TAA
ATNNISLMATL

SEQ ID NO: 56860 - protein, 11 aa, Homo sapiens
  misc_feature: Table A; Target 56860; HLA-A*31:01; PAEP; ENSG00000122133; TAA
ATNNISLMATL

SEQ ID NO: 56861 - protein, 11 aa, Homo sapiens
  misc_feature: Table A; Target 56861; HLA-A*03:02; PAEP; ENSG00000122133; TAA
CLQDTTTPIQS

SEQ ID NO: 56862 - protein, 8 aa, Homo sapiens
  misc_feature: Table A; Target 56862; HLA-B*08:01; PAEP; ENSG00000122133; TAA
CQYLARVL

SEQ ID NO: 56863 - protein, 8 aa, Homo sapiens
  misc_feature: Table A; Target 56863; HLA-B*15:03; PAEP; ENSG00000122133; TAA
CQYLARVL

SEQ ID NO: 56864 - protein, 8 aa, Homo sapiens
  misc_feature: Table A; Target 56864; HLA-B*18:01; PAEP; ENSG00000122133; TAA
DDEIMQGF

SEQ ID NO: 56865 - protein, 8 aa, Homo sapiens
  misc_feature: Table A; Target 56865; HLA-B*18:01; PAEP; ENSG00000122133; TAA
DEIMQGFI

SEQ ID NO: 56866 - protein, 8 aa, Homo sapiens
  misc_feature: Table A; Target 56866; HLA-B*49:01; PAEP; ENSG00000122133; TAA
DEIMQGFI

SEQ ID NO: 56867 - protein, 10 aa, Homo sapiens
  misc_feature: Table A; Target 56867; HLA-B*18:01; PAEP; ENSG00000122133; TAA
DEIMQGFIRA

SEQ ID NO: 56868 - protein, 11 aa, Homo sapiens
  misc_feature: Table A; Target 56868; HLA-B*18:01; PAEP; ENSG00000122133; TAA
DEIMQGFIRAF

SEQ ID NO: 56869 - protein, 11 aa, Homo sapiens
  misc_feature: Table A; Target 56869; HLA-B*44:02; PAEP; ENSG00000122133; TAA
DEIMQGFIRAF

SEQ ID NO: 56870 - protein, 11 aa, Homo sapiens
  misc_feature: Table A; Target 56870; HLA-B*44:03; PAEP; ENSG00000122133; TAA
DEIMQGFIRAF

SEQ ID NO: 56871 - protein, 9 aa, Homo sapiens
  misc_feature: Table A; Target 56871; HLA-A*33:01; PAEP; ENSG00000122133; TAA
DNLEIVLHR

SEQ ID NO: 56872 - protein, 9 aa, Homo sapiens
  misc_feature: Table A; Target 56872; HLA-A*33:03; PAEP; ENSG00000122133; TAA
DNLEIVLHR

SEQ ID NO: 56873 - protein, 8 aa, Homo sapiens
  misc_feature: Table A; Target 56873; HLA-C*05:01; PAEP; ENSG00000122133; TAA
DTDYDNFL

SEQ ID NO: 56874 - protein, 9 aa, Homo sapiens
  misc_feature: Table A; Target 56874; HLA-A*01:01; PAEP; ENSG00000122133; TAA
DTDYDNFLF

SEQ ID NO: 56875 - protein, 10 aa, Homo sapiens
  misc_feature: Table A; Target 56875; HLA-A*01:01; PAEP; ENSG00000122133; TAA
DTDYDNFLFL

SEQ ID NO: 56876 - protein, 9 aa, Homo sapiens
  misc_feature: Table A; Target 56876; HLA-A*25:01; PAEP; ENSG00000122133; TAA
DTTTPIQSM

SEQ ID NO: 56877 - protein, 9 aa, Homo sapiens
  misc_feature: Table A; Target 56877; HLA-A*26:01; PAEP; ENSG00000122133; TAA
DTTTPIQSM

SEQ ID NO: 56878 - protein, 9 aa, Homo sapiens
  misc_feature: Table A; Target 56878; HLA-A*33:01; PAEP; ENSG00000122133; TAA
DTTTPIQSM

SEQ ID NO: 56879 - protein, 9 aa, Homo sapiens
  misc_feature: Table A; Target 56879; HLA-A*33:03; PAEP; ENSG00000122133; TAA
DTTTPIQSM

SEQ ID NO: 56880 - protein, 9 aa, Homo sapiens
  misc_feature: Table A; Target 56880; HLA-A*68:01; PAEP; ENSG00000122133; TAA
DTTTPIQSM

SEQ ID NO: 56881 - protein, 9 aa, Homo sapiens
  misc_feature: Table A; Target 56881; HLA-A*68:02; PAEP; ENSG00000122133; TAA
DTTTPIQSM

SEQ ID NO: 56882 - protein, 9 aa, Homo sapiens
  misc_feature: Table A; Target 56882; HLA-B*18:01; PAEP; ENSG00000122133; TAA
DTTTPIQSM

SEQ ID NO: 56883 - protein, 9 aa, Homo sapiens
  misc_feature: Table A; Target 56883; HLA-B*35:01; PAEP; ENSG00000122133; TAA
DTTTPIQSM

SEQ ID NO: 56884 - protein, 9 aa, Homo sapiens
  misc_feature: Table A; Target 56884; HLA-B*35:03; PAEP; ENSG00000122133; TAA
DTTTPIQSM

SEQ ID NO: 56885 - protein, 9 aa, Homo sapiens
  misc_feature: Table A; Target 56885; HLA-B*39:01; PAEP; ENSG00000122133; TAA
DTTTPIQSM

SEQ ID NO: 56886 - protein, 9 aa, Homo sapiens
  misc_feature: Table A; Target 56886; HLA-B*51:01; PAEP; ENSG00000122133; TAA
DTTTPIQSM

SEQ ID NO: 56887 - protein, 9 aa, Homo sapiens
  misc_feature: Table A; Target 56887; HLA-C*07:06; PAEP; ENSG00000122133; TAA
DTTTPIQSM

SEQ ID NO: 56888 - protein, 9 aa, Homo sapiens
  misc_feature: Table A; Target 56888; HLA-C*12:03; PAEP; ENSG00000122133; TAA
DTTTPIQSM

SEQ ID NO: 56889 - protein, 10 aa, Homo sapiens
  misc_feature: Table A; Target 56889; HLA-A*26:01; PAEP; ENSG00000122133; TAA
DTTTPIQSMM

SEQ ID NO: 56890 - protein, 10 aa, Homo sapiens
  misc_feature: Table A; Target 56890; HLA-A*68:01; PAEP; ENSG00000122133; TAA
DTTTPIQSMM

SEQ ID NO: 56891 - protein, 10 aa, Homo sapiens
  misc_feature: Table A; Target 56891; HLA-A*68:02; PAEP; ENSG00000122133; TAA
DTTTPIQSMM

SEQ ID NO: 56892 - protein, 9 aa, Homo sapiens
  misc_feature: Table A; Target 56892; HLA-A*01:01; PAEP; ENSG00000122133; TAA
EATLLDTDY

SEQ ID NO: 56893 - protein, 9 aa, Homo sapiens
  misc_feature: Table A; Target 56893; HLA-A*26:01; PAEP; ENSG00000122133; TAA
EATLLDTDY

SEQ ID NO: 56894 - protein, 9 aa, Homo sapiens
  misc_feature: Table A; Target 56894; HLA-B*35:01; PAEP; ENSG00000122133; TAA
EATLLDTDY

SEQ ID NO: 56895 - protein, 9 aa, Homo sapiens
  misc_feature: Table A; Target 56895; HLA-B*39:01; PAEP; ENSG00000122133; TAA
EATLLDTDY

SEQ ID NO: 56896 - protein, 9 aa, Homo sapiens
  misc_feature: Table A; Target 56896; HLA-B*55:01; PAEP; ENSG00000122133; TAA
EATLLDTDY

SEQ ID NO: 56897 - protein, 9 aa, Homo sapiens
  misc_feature: Table A; Target 56897; HLA-C*03:03; PAEP; ENSG00000122133; TAA
EATLLDTDY

SEQ ID NO: 56898 - protein, 9 aa, Homo sapiens
  misc_feature: Table A; Target 56898; HLA-C*07:01; PAEP; ENSG00000122133; TAA
EATLLDTDY

SEQ ID NO: 56899 - protein, 9 aa, Homo sapiens
  misc_feature: Table A; Target 56899; HLA-B*18:01; PAEP; ENSG00000122133; TAA
EDDEIMQGF

SEQ ID NO: 56900 - protein, 9 aa, Homo sapiens
  misc_feature: Table A; Target 56900; HLA-B*44:02; PAEP; ENSG00000122133; TAA
EDDEIMQGF

SEQ ID NO: 56901 - protein, 9 aa, Homo sapiens
  misc_feature: Table A; Target 56901; HLA-B*44:03; PAEP; ENSG00000122133; TAA
EDDEIMQGF

SEQ ID NO: 56902 - protein, 11 aa, Homo sapiens
  misc_feature: Table A; Target 56902; HLA-B*44:02; PAEP; ENSG00000122133; TAA
EDNLEIVLHRW

SEQ ID NO: 56903 - protein, 11 aa, Homo sapiens
  misc_feature: Table A; Target 56903; HLA-B*44:03; PAEP; ENSG00000122133; TAA
EDNLEIVLHRW

SEQ ID NO: 56904 - protein, 8 aa, Homo sapiens
  misc_feature: Table A; Target 56904; HLA-A*33:03; PAEP; ENSG00000122133; TAA
EIMQGFIR

SEQ ID NO: 56905 - protein, 9 aa, Homo sapiens
  misc_feature: Table A; Target 56905; HLA-A*68:02; PAEP; ENSG00000122133; TAA
EIMQGFIRA

SEQ ID NO: 56906 - protein, 9 aa, Homo sapiens
  misc_feature: Table A; Target 56906; HLA-B*54:01; PAEP; ENSG00000122133; TAA
EIMQGFIRA

SEQ ID NO: 56907 - protein, 10 aa, Homo sapiens
  misc_feature: Table A; Target 56907; HLA-A*25:01; PAEP; ENSG00000122133; TAA
EIMQGFIRAF

SEQ ID NO: 56908 - protein, 10 aa, Homo sapiens
  misc_feature: Table A; Target 56908; HLA-A*26:01; PAEP; ENSG00000122133; TAA
EIMQGFIRAF

SEQ ID NO: 56909 - protein, 10 aa, Homo sapiens
  misc_feature: Table A; Target 56909; HLA-B*44:02; PAEP; ENSG00000122133; TAA
EIMQGFIRAF

SEQ ID NO: 56910 - protein, 9 aa, Homo sapiens
  misc_feature: Table A; Target 56910; HLA-A*25:01; PAEP; ENSG00000122133; TAA
ELPKLAGTW

SEQ ID NO: 56911 - protein, 9 aa, Homo sapiens
  misc_feature: Table A; Target 56911; HLA-A*26:01; PAEP; ENSG00000122133; TAA
ELPKLAGTW

SEQ ID NO: 56912 - protein, 9 aa, Homo sapiens
  misc_feature: Table A; Target 56912; HLA-A*33:03; PAEP; ENSG00000122133; TAA
ENNSCVEKK

SEQ ID NO: 56913 - protein, 10 aa, Homo sapiens
  misc_feature: Table A; Target 56913; HLA-B*40:02; PAEP; ENSG00000122133; TAA
GEKTENPKKF

SEQ ID NO: 56914 - protein, 10 aa, Homo sapiens
  misc_feature: Table A; Target 56914; HLA-B*44:02; PAEP; ENSG00000122133; TAA
GEKTENPKKF

SEQ ID NO: 56915 - protein, 10 aa, Homo sapiens
  misc_feature: Table A; Target 56915; HLA-B*44:03; PAEP; ENSG00000122133; TAA
GEKTENPKKF

SEQ ID NO: 56916 - protein, 11 aa, Homo sapiens
  misc_feature: Table A; Target 56916; HLA-A*03:02; PAEP; ENSG00000122133; TAA
GVPAMDIPQTK

SEQ ID NO: 56917 - protein, 11 aa, Homo sapiens
  misc_feature: Table A; Target 56917; HLA-A*11:01; PAEP; ENSG00000122133; TAA
GVPAMDIPQTK

SEQ ID NO: 56918 - protein, 9 aa, Homo sapiens
  misc_feature: Table A; Target 56918; HLA-A*02:04; PAEP; ENSG00000122133; TAA
IMQGFIRAF

SEQ ID NO: 56919 - protein, 9 aa, Homo sapiens
  misc_feature: Table A; Target 56919; HLA-A*31:01; PAEP; ENSG00000122133; TAA
IMQGFIRAF

SEQ ID NO: 56920 - protein, 9 aa, Homo sapiens
  misc_feature: Table A; Target 56920; HLA-A*32:01; PAEP; ENSG00000122133; TAA
IMQGFIRAF

SEQ ID NO: 56921 - protein, 9 aa, Homo sapiens
  misc_feature: Table A; Target 56921; HLA-B*57:01; PAEP; ENSG00000122133; TAA
IMQGFIRAF

SEQ ID NO: 56922 - protein, 10 aa, Homo sapiens
  misc_feature: Table A; Target 56922; HLA-A*31:01; PAEP; ENSG00000122133; TAA
IMQGFIRAFR

SEQ ID NO: 56923 - protein, 8 aa, Homo sapiens
  misc_feature: Table A; Target 56923; HLA-B*07:02; PAEP; ENSG00000122133; TAA
IPQTKQDL

SEQ ID NO: 56924 - protein, 8 aa, Homo sapiens
  misc_feature: Table A; Target 56924; HLA-B*08:01; PAEP; ENSG00000122133; TAA
IPQTKQDL

SEQ ID NO: 56925 - protein, 8 aa, Homo sapiens
  misc_feature: Table A; Target 56925; HLA-C*07:02; PAEP; ENSG00000122133; TAA
IPQTKQDL

SEQ ID NO: 56926 - protein, 10 aa, Homo sapiens
  misc_feature: Table A; Target 56926; HLA-B*07:02; PAEP; ENSG00000122133; TAA
IPQTKQDLEL

SEQ ID NO: 56927 - protein, 10 aa, Homo sapiens
  misc_feature: Table A; Target 56927; HLA-B*35:03; PAEP; ENSG00000122133; TAA
IPQTKQDLEL

SEQ ID NO: 56928 - protein, 10 aa, Homo sapiens
  misc_feature: Table A; Target 56928; HLA-C*07:02; PAEP; ENSG00000122133; TAA
IPQTKQDLEL

SEQ ID NO: 56929 - protein, 8 aa, Homo sapiens
  misc_feature: Table A; Target 56929; HLA-B*15:01; PAEP; ENSG00000122133; TAA
IQSMMCQY

SEQ ID NO: 56930 - protein, 8 aa, Homo sapiens
  misc_feature: Table A; Target 56930; HLA-B*15:03; PAEP; ENSG00000122133; TAA
IQSMMCQY

SEQ ID NO: 56931 - protein, 8 aa, Homo sapiens
  misc_feature: Table A; Target 56931; HLA-C*07:04; PAEP; ENSG00000122133; TAA
IQSMMCQY

SEQ ID NO: 56932 - protein, 9 aa, Homo sapiens
  misc_feature: Table A; Target 56932; HLA-B*13:02; PAEP; ENSG00000122133; TAA
IQSMMCQYL

SEQ ID NO: 56933 - protein, 8 aa, Homo sapiens
  misc_feature: Table A; Target 56933; HLA-A*11:01; PAEP; ENSG00000122133; TAA
ISLMATLK

SEQ ID NO: 56934 - protein, 10 aa, Homo sapiens
  misc_feature: Table A; Target 56934; HLA-C*01:02; PAEP; ENSG00000122133; TAA
KINYTVANEA

SEQ ID NO: 56935 - protein, 9 aa, Homo sapiens
  misc_feature: Table A; Target 56935; HLA-A*02:07; PAEP; ENSG00000122133; TAA
KQDLELPKL

SEQ ID NO: 56936 - protein, 9 aa, Homo sapiens
  misc_feature: Table A; Target 56936; HLA-B*38:01; PAEP; ENSG00000122133; TAA
KQDLELPKL

SEQ ID NO: 56937 - protein, 9 aa, Homo sapiens
  misc_feature: Table A; Target 56937; HLA-B*40:01; PAEP; ENSG00000122133; TAA
KQDLELPKL

SEQ ID NO: 56938 - protein, 9 aa, Homo sapiens
  misc_feature: Table A; Target 56938; HLA-A*02:04; PAEP; ENSG00000122133; TAA
KQMEEPCRF

SEQ ID NO: 56939 - protein, 9 aa, Homo sapiens
  misc_feature: Table A; Target 56939; HLA-A*24:02; PAEP; ENSG00000122133; TAA
KQMEEPCRF

SEQ ID NO: 56940 - protein, 9 aa, Homo sapiens
  misc_feature: Table A; Target 56940; HLA-A*26:01; PAEP; ENSG00000122133; TAA
KQMEEPCRF

SEQ ID NO: 56941 - protein, 9 aa, Homo sapiens
  misc_feature: Table A; Target 56941; HLA-A*30:02; PAEP; ENSG00000122133; TAA
KQMEEPCRF

SEQ ID NO: 56942 - protein, 9 aa, Homo sapiens
  misc_feature: Table A; Target 56942; HLA-A*31:01; PAEP; ENSG00000122133; TAA
KQMEEPCRF

SEQ ID NO: 56943 - protein, 9 aa, Homo sapiens
  misc_feature: Table A; Target 56943; HLA-A*32:01; PAEP; ENSG00000122133; TAA
KQMEEPCRF

SEQ ID NO: 56944 - protein, 9 aa, Homo sapiens
  misc_feature: Table A; Target 56944; HLA-B*13:02; PAEP; ENSG00000122133; TAA
KQMEEPCRF

SEQ ID NO: 56945 - protein, 9 aa, Homo sapiens
  misc_feature: Table A; Target 56945; HLA-B*15:01; PAEP; ENSG00000122133; TAA
KQMEEPCRF

SEQ ID NO: 56946 - protein, 9 aa, Homo sapiens
  misc_feature: Table A; Target 56946; HLA-B*15:03; PAEP; ENSG00000122133; TAA
KQMEEPCRF

SEQ ID NO: 56947 - protein, 9 aa, Homo sapiens
  misc_feature: Table A; Target 56947; HLA-B*27:02; PAEP; ENSG00000122133; TAA
KQMEEPCRF

SEQ ID NO: 56948 - protein, 9 aa, Homo sapiens
  misc_feature: Table A; Target 56948; HLA-B*27:05; PAEP; ENSG00000122133; TAA
KQMEEPCRF

SEQ ID NO: 56949 - protein, 9 aa, Homo sapiens
  misc_feature: Table A; Target 56949; HLA-B*37:01; PAEP; ENSG00000122133; TAA
KQMEEPCRF

SEQ ID NO: 56950 - protein, 9 aa, Homo sapiens
  misc_feature: Table A; Target 56950; HLA-B*38:01; PAEP; ENSG00000122133; TAA
KQMEEPCRF

SEQ ID NO: 56951 - protein, 9 aa, Homo sapiens
  misc_feature: Table A; Target 56951; HLA-B*40:02; PAEP; ENSG00000122133; TAA
KQMEEPCRF

SEQ ID NO: 56952 - protein, 9 aa, Homo sapiens
  misc_feature: Table A; Target 56952; HLA-B*44:02; PAEP; ENSG00000122133; TAA
KQMEEPCRF

SEQ ID NO: 56953 - protein, 9 aa, Homo sapiens
  misc_feature: Table A; Target 56953; HLA-B*44:03; PAEP; ENSG00000122133; TAA
KQMEEPCRF

SEQ ID NO: 56954 - protein, 9 aa, Homo sapiens
  misc_feature: Table A; Target 56954; HLA-B*55:01; PAEP; ENSG00000122133; TAA
KQMEEPCRF

SEQ ID NO: 56955 - protein, 9 aa, Homo sapiens
  misc_feature: Table A; Target 56955; HLA-B*57:01; PAEP; ENSG00000122133; TAA
KQMEEPCRF

SEQ ID NO: 56956 - protein, 9 aa, Homo sapiens
  misc_feature: Table A; Target 56956; HLA-B*58:01; PAEP; ENSG00000122133; TAA
KQMEEPCRF

SEQ ID NO: 56957 - protein, 9 aa, Homo sapiens
  misc_feature: Table A; Target 56957; HLA-C*02:02; PAEP; ENSG00000122133; TAA
KQMEEPCRF

SEQ ID NO: 56958 - protein, 9 aa, Homo sapiens
  misc_feature: Table A; Target 56958; HLA-C*04:01; PAEP; ENSG00000122133; TAA
KQMEEPCRF

SEQ ID NO: 56959 - protein, 9 aa, Homo sapiens
  misc_feature: Table A; Target 56959; HLA-C*05:01; PAEP; ENSG00000122133; TAA
KQMEEPCRF

SEQ ID NO: 56960 - protein, 9 aa, Homo sapiens
  misc_feature: Table A; Target 56960; HLA-C*06:02; PAEP; ENSG00000122133; TAA
KQMEEPCRF

SEQ ID NO: 56961 - protein, 9 aa, Homo sapiens
  misc_feature: Table A; Target 56961; HLA-C*07:04; PAEP; ENSG00000122133; TAA
KQMEEPCRF

SEQ ID NO: 56962 - protein, 9 aa, Homo sapiens
  misc_feature: Table A; Target 56962; HLA-C*12:03; PAEP; ENSG00000122133; TAA
KQMEEPCRF

SEQ ID NO: 56963 - protein, 9 aa, Homo sapiens
  misc_feature: Table A; Target 56963; HLA-C*16:01; PAEP; ENSG00000122133; TAA
KQMEEPCRF

SEQ ID NO: 56964 - protein, 9 aa, Homo sapiens
  misc_feature: Table A; Target 56964; HLA-C*16:04; PAEP; ENSG00000122133; TAA
KQMEEPCRF

SEQ ID NO: 56965 - protein, 9 aa, Homo sapiens
  misc_feature: Table A; Target 56965; HLA-A*03:02; PAEP; ENSG00000122133; TAA
KTENPKKFK

SEQ ID NO: 56966 - protein, 11 aa, Homo sapiens
  misc_feature: Table A; Target 56966; HLA-A*03:01; PAEP; ENSG00000122133; TAA
KVLGEKTENPK

SEQ ID NO: 56967 - protein, 11 aa, Homo sapiens
  misc_feature: Table A; Target 56967; HLA-A*03:02; PAEP; ENSG00000122133; TAA
KVLGEKTENPK

SEQ ID NO: 56968 - protein, 11 aa, Homo sapiens
  misc_feature: Table A; Target 56968; HLA-A*11:01; PAEP; ENSG00000122133; TAA
KVLGEKTENPK

SEQ ID NO: 56969 - protein, 11 aa, Homo sapiens
  misc_feature: Table A; Target 56969; HLA-A*31:01; PAEP; ENSG00000122133; TAA
KVLGEKTENPK

SEQ ID NO: 56970 - protein, 8 aa, Homo sapiens
  misc_feature: Table A; Target 56970; HLA-B*44:02; PAEP; ENSG00000122133; TAA
LEIVLHRW

SEQ ID NO: 56971 - protein, 8 aa, Homo sapiens
  misc_feature: Table A; Target 56971; HLA-B*44:03; PAEP; ENSG00000122133; TAA
LEIVLHRW

SEQ ID NO: 56972 - protein, 10 aa, Homo sapiens
  misc_feature: Table A; Target 56972; HLA-B*44:02; PAEP; ENSG00000122133; TAA
LELPKLAGTW

SEQ ID NO: 56973 - protein, 10 aa, Homo sapiens
  misc_feature: Table A; Target 56973; HLA-B*44:03; PAEP; ENSG00000122133; TAA
LELPKLAGTW

SEQ ID NO: 56974 - protein, 10 aa, Homo sapiens
  misc_feature: Table A; Target 56974; HLA-B*57:01; PAEP; ENSG00000122133; TAA
LELPKLAGTW

SEQ ID NO: 56975 - protein, 10 aa, Homo sapiens
  misc_feature: Table A; Target 56975; HLA-C*16:04; PAEP; ENSG00000122133; TAA
LELPKLAGTW

SEQ ID NO: 56976 - protein, 9 aa, Homo sapiens
  misc_feature: Table A; Target 56976; HLA-C*06:02; PAEP; ENSG00000122133; TAA
LGVALVCGV

SEQ ID NO: 56977 - protein, 9 aa, Homo sapiens
  misc_feature: Table A; Target 56977; HLA-A*01:01; PAEP; ENSG00000122133; TAA
LLDTDYDNF

SEQ ID NO: 56978 - protein, 9 aa, Homo sapiens
  misc_feature: Table A; Target 56978; HLA-A*02:07; PAEP; ENSG00000122133; TAA
LLDTDYDNF

SEQ ID NO: 56979 - protein, 9 aa, Homo sapiens
  misc_feature: Table A; Target 56979; HLA-B*55:01; PAEP; ENSG00000122133; TAA
LLDTDYDNF

SEQ ID NO: 56980 - protein, 9 aa, Homo sapiens
  misc_feature: Table A; Target 56980; HLA-C*05:01; PAEP; ENSG00000122133; TAA
LLDTDYDNF

SEQ ID NO: 56981 - protein, 10 aa, Homo sapiens
  misc_feature: Table A; Target 56981; HLA-A*02:07; PAEP; ENSG00000122133; TAA
LLDTDYDNFL

SEQ ID NO: 56982 - protein, 11 aa, Homo sapiens
  misc_feature: Table A; Target 56982; HLA-A*02:07; PAEP; ENSG00000122133; TAA
LLDTDYDNFLF

SEQ ID NO: 56983 - protein, 9 aa, Homo sapiens
  misc_feature: Table A; Target 56983; HLA-A*02:01; PAEP; ENSG00000122133; TAA
LLLTLGVAL

SEQ ID NO: 56984 - protein, 9 aa, Homo sapiens
  misc_feature: Table A; Target 56984; HLA-A*02:04; PAEP; ENSG00000122133; TAA
LLLTLGVAL

SEQ ID NO: 56985 - protein, 9 aa, Homo sapiens
  misc_feature: Table A; Target 56985; HLA-A*02:07; PAEP; ENSG00000122133; TAA
LLLTLGVAL

SEQ ID NO: 56986 - protein, 9 aa, Homo sapiens
  misc_feature: Table A; Target 56986; HLA-A*23:01; PAEP; ENSG00000122133; TAA
LLLTLGVAL

SEQ ID NO: 56987 - protein, 9 aa, Homo sapiens
  misc_feature: Table A; Target 56987; HLA-C*01:02; PAEP; ENSG00000122133; TAA
LLLTLGVAL

SEQ ID NO: 56988 - protein, 9 aa, Homo sapiens
  misc_feature: Table A; Target 56988; HLA-C*14:02; PAEP; ENSG00000122133; TAA
LLLTLGVAL

SEQ ID NO: 56989 - protein, 10 aa, Homo sapiens
  misc_feature: Table A; Target 56989; HLA-A*02:01; PAEP; ENSG00000122133; TAA
LLLTLGVALV

SEQ ID NO: 56990 - protein, 10 aa, Homo sapiens
  misc_feature: Table A; Target 56990; HLA-A*02:03; PAEP; ENSG00000122133; TAA
LLLTLGVALV

SEQ ID NO: 56991 - protein, 10 aa, Homo sapiens
  misc_feature: Table A; Target 56991; HLA-A*02:04; PAEP; ENSG00000122133; TAA
LLLTLGVALV

SEQ ID NO: 56992 - protein, 9 aa, Homo sapiens
  misc_feature: Table A; Target 56992; HLA-A*02:07; PAEP; ENSG00000122133; TAA
LLPTPEDNL

SEQ ID NO: 56993 - protein, 9 aa, Homo sapiens
  misc_feature: Table A; Target 56993; HLA-C*01:02; PAEP; ENSG00000122133; TAA
LLPTPEDNL

SEQ ID NO: 56994 - protein, 9 aa, Homo sapiens
  misc_feature: Table A; Target 56994; HLA-C*05:01; PAEP; ENSG00000122133; TAA
LLPTPEDNL

SEQ ID NO: 56995 - protein, 11 aa, Homo sapiens
  misc_feature: Table A; Target 56995; HLA-A*02:07; PAEP; ENSG00000122133; TAA
LLPTPEDNLEI

SEQ ID NO: 56996 - protein, 8 aa, Homo sapiens
  misc_feature: Table A; Target 56996; HLA-C*01:02; PAEP; ENSG00000122133; TAA
LLTLGVAL

SEQ ID NO: 56997 - protein, 8 aa, Homo sapiens
  misc_feature: Table A; Target 56997; HLA-C*03:03; PAEP; ENSG00000122133; TAA
LLTLGVAL

SEQ ID NO: 56998 - protein, 8 aa, Homo sapiens
  misc_feature: Table A; Target 56998; HLA-C*03:04; PAEP; ENSG00000122133; TAA
LLTLGVAL

SEQ ID NO: 56999 - protein, 8 aa, Homo sapiens
  misc_feature: Table A; Target 56999; HLA-C*14:02; PAEP; ENSG00000122133; TAA
LLTLGVAL

SEQ ID NO: 57000 - protein, 9 aa, Homo sapiens
  misc_feature: Table A; Target 57000; HLA-A*02:01; PAEP; ENSG00000122133; TAA
LLTLGVALV

SEQ ID NO: 57001 - protein, 9 aa, Homo sapiens
  misc_feature: Table A; Target 57001; HLA-A*02:03; PAEP; ENSG00000122133; TAA
LLTLGVALV

SEQ ID NO: 57002 - protein, 9 aa, Homo sapiens
  misc_feature: Table A; Target 57002; HLA-A*02:04; PAEP; ENSG00000122133; TAA
LLTLGVALV

SEQ ID NO: 57003 - protein, 9 aa, Homo sapiens
  misc_feature: Table A; Target 57003; HLA-B*08:01; PAEP; ENSG00000122133; TAA
LMATLKAPL

SEQ ID NO: 57004 - protein, 8 aa, Homo sapiens
  misc_feature: Table A; Target 57004; HLA-B*08:01; PAEP; ENSG00000122133; TAA
LPKLAGTW

SEQ ID NO: 57005 - protein, 8 aa, Homo sapiens
  misc_feature: Table A; Target 57005; HLA-B*35:03; PAEP; ENSG00000122133; TAA
LPTPEDNL

SEQ ID NO: 57006 - protein, 10 aa, Homo sapiens
  misc_feature: Table A; Target 57006; HLA-B*35:03; PAEP; ENSG00000122133; TAA
LPTPEDNLEI

SEQ ID NO: 57007 - protein, 8 aa, Homo sapiens
  misc_feature: Table A; Target 57007; HLA-C*05:01; PAEP; ENSG00000122133; TAA
LQDTTTPI

SEQ ID NO: 57008 - protein, 11 aa, Homo sapiens
  misc_feature: Table A; Target 57008; HLA-B*27:05; PAEP; ENSG00000122133; TAA
LQDTTTPIQSM

SEQ ID NO: 57009 - protein, 11 aa, Homo sapiens
  misc_feature: Table A; Target 57009; HLA-B*38:01; PAEP; ENSG00000122133; TAA
LQDTTTPIQSM

SEQ ID NO: 57010 - protein, 11 aa, Homo sapiens
  misc_feature: Table A; Target 57010; HLA-B*39:01; PAEP; ENSG00000122133; TAA
LQDTTTPIQSM

SEQ ID NO: 57011 - protein, 11 aa, Homo sapiens
  misc_feature: Table A; Target 57011; HLA-C*04:01; PAEP; ENSG00000122133; TAA
LQDTTTPIQSM

SEQ ID NO: 57012 - protein, 11 aa, Homo sapiens
  misc_feature: Table A; Target 57012; HLA-C*05:01; PAEP; ENSG00000122133; TAA
LQDTTTPIQSM

SEQ ID NO: 57013 - protein, 10 aa, Homo sapiens
  misc_feature: Table A; Target 57013; HLA-C*04:01; PAEP; ENSG00000122133; TAA
LTLGVALVCG

SEQ ID NO: 57014 - protein, 11 aa, Homo sapiens
  misc_feature: Table A; Target 57014; HLA-A*25:01; PAEP; ENSG00000122133; TAA
LVEDDEIMQGF

SEQ ID NO: 57015 - protein, 11 aa, Homo sapiens
  misc_feature: Table A; Target 57015; HLA-A*26:01; PAEP; ENSG00000122133; TAA
LVEDDEIMQGF

SEQ ID NO: 57016 - protein, 8 aa, Homo sapiens
  misc_feature: Table A; Target 57016; HLA-B*51:01; PAEP; ENSG00000122133; TAA
MAMATNNI

SEQ ID NO: 57017 - protein, 10 aa, Homo sapiens
  misc_feature: Table A; Target 57017; HLA-A*68:01; PAEP; ENSG00000122133; TAA
MAMATNNISL

SEQ ID NO: 57018 - protein, 10 aa, Homo sapiens
  misc_feature: Table A; Target 57018; HLA-B*07:02; PAEP; ENSG00000122133; TAA
MAMATNNISL

SEQ ID NO: 57019 - protein, 10 aa, Homo sapiens
  misc_feature: Table A; Target 57019; HLA-B*35:01; PAEP; ENSG00000122133; TAA
MAMATNNISL

SEQ ID NO: 57020 - protein, 10 aa, Homo sapiens
  misc_feature: Table A; Target 57020; HLA-B*35:03; PAEP; ENSG00000122133; TAA
MAMATNNISL

SEQ ID NO: 57021 - protein, 10 aa, Homo sapiens
  misc_feature: Table A; Target 57021; HLA-B*40:01; PAEP; ENSG00000122133; TAA
MAMATNNISL

SEQ ID NO: 57022 - protein, 10 aa, Homo sapiens
  misc_feature: Table A; Target 57022; HLA-B*40:02; PAEP; ENSG00000122133; TAA
MAMATNNISL

SEQ ID NO: 57023 - protein, 10 aa, Homo sapiens
  misc_feature: Table A; Target 57023; HLA-B*46:01; PAEP; ENSG00000122133; TAA
MAMATNNISL

SEQ ID NO: 57024 - protein, 10 aa, Homo sapiens
  misc_feature: Table A; Target 57024; HLA-B*54:01; PAEP; ENSG00000122133; TAA
MAMATNNISL

SEQ ID NO: 57025 - protein, 10 aa, Homo sapiens
  misc_feature: Table A; Target 57025; HLA-B*55:01; PAEP; ENSG00000122133; TAA
MAMATNNISL

SEQ ID NO: 57026 - protein, 10 aa, Homo sapiens
  misc_feature: Table A; Target 57026; HLA-B*56:01; PAEP; ENSG00000122133; TAA
MAMATNNISL

SEQ ID NO: 57027 - protein, 10 aa, Homo sapiens
  misc_feature: Table A; Target 57027; HLA-B*58:01; PAEP; ENSG00000122133; TAA
MAMATNNISL

SEQ ID NO: 57028 - protein, 10 aa, Homo sapiens
  misc_feature: Table A; Target 57028; HLA-C*02:02; PAEP; ENSG00000122133; TAA
MAMATNNISL

SEQ ID NO: 57029 - protein, 10 aa, Homo sapiens
  misc_feature: Table A; Target 57029; HLA-C*03:03; PAEP; ENSG00000122133; TAA
MAMATNNISL

SEQ ID NO: 57030 - protein, 10 aa, Homo sapiens
  misc_feature: Table A; Target 57030; HLA-C*03:04; PAEP; ENSG00000122133; TAA
MAMATNNISL

SEQ ID NO: 57031 - protein, 10 aa, Homo sapiens
  misc_feature: Table A; Target 57031; HLA-C*07:06; PAEP; ENSG00000122133; TAA
MAMATNNISL

SEQ ID NO: 57032 - protein, 10 aa, Homo sapiens
  misc_feature: Table A; Target 57032; HLA-C*12:03; PAEP; ENSG00000122133; TAA
MAMATNNISL

SEQ ID NO: 57033 - protein, 10 aa, Homo sapiens
  misc_feature: Table A; Target 57033; HLA-C*14:02; PAEP; ENSG00000122133; TAA
MAMATNNISL

SEQ ID NO: 57034 - protein, 11 aa, Homo sapiens
  misc_feature: Table A; Target 57034; HLA-A*26:01; PAEP; ENSG00000122133; TAA
MAMATNNISLM

SEQ ID NO: 57035 - protein, 8 aa, Homo sapiens
  misc_feature: Table A; Target 57035; HLA-B*07:02; PAEP; ENSG00000122133; TAA
MATLKAPL

SEQ ID NO: 57036 - protein, 8 aa, Homo sapiens
  misc_feature: Table A; Target 57036; HLA-B*08:01; PAEP; ENSG00000122133; TAA
MATLKAPL

SEQ ID NO: 57037 - protein, 8 aa, Homo sapiens
  misc_feature: Table A; Target 57037; HLA-C*03:04; PAEP; ENSG00000122133; TAA
MATLKAPL

SEQ ID NO: 57038 - protein, 8 aa, Homo sapiens
  misc_feature: Table A; Target 57038; HLA-C*16:01; PAEP; ENSG00000122133; TAA
MATLKAPL

SEQ ID NO: 57039 - protein, 8 aa, Homo sapiens
  misc_feature: Table A; Target 57039; HLA-B*27:05; PAEP; ENSG00000122133; TAA
MATNNISL

SEQ ID NO: 57040 - protein, 8 aa, Homo sapiens
  misc_feature: Table A; Target 57040; HLA-B*35:03; PAEP; ENSG00000122133; TAA
MATNNISL

SEQ ID NO: 57041 - protein, 8 aa, Homo sapiens
  misc_feature: Table A; Target 57041; HLA-B*54:01; PAEP; ENSG00000122133; TAA
MATNNISL

SEQ ID NO: 57042 - protein, 8 aa, Homo sapiens
  misc_feature: Table A; Target 57042; HLA-B*58:01; PAEP; ENSG00000122133; TAA
MATNNISL

SEQ ID NO: 57043 - protein, 8 aa, Homo sapiens
  misc_feature: Table A; Target 57043; HLA-C*01:02; PAEP; ENSG00000122133; TAA
MATNNISL

SEQ ID NO: 57044 - protein, 8 aa, Homo sapiens
  misc_feature: Table A; Target 57044; HLA-C*03:03; PAEP; ENSG00000122133; TAA
MATNNISL

SEQ ID NO: 57045 - protein, 8 aa, Homo sapiens
  misc_feature: Table A; Target 57045; HLA-C*03:04; PAEP; ENSG00000122133; TAA
MATNNISL

SEQ ID NO: 57046 - protein, 8 aa, Homo sapiens
  misc_feature: Table A; Target 57046; HLA-C*07:02; PAEP; ENSG00000122133; TAA
MATNNISL

SEQ ID NO: 57047 - protein, 8 aa, Homo sapiens
  misc_feature: Table A; Target 57047; HLA-C*07:04; PAEP; ENSG00000122133; TAA
MATNNISL

SEQ ID NO: 57048 - protein, 8 aa, Homo sapiens
  misc_feature: Table A; Target 57048; HLA-C*14:02; PAEP; ENSG00000122133; TAA
MATNNISL

SEQ ID NO: 57049 - protein, 8 aa, Homo sapiens
  misc_feature: Table A; Target 57049; HLA-C*16:01; PAEP; ENSG00000122133; TAA
MATNNISL

SEQ ID NO: 57050 - protein, 8 aa, Homo sapiens
  misc_feature: Table A; Target 57050; HLA-C*16:02; PAEP; ENSG00000122133; TAA
MATNNISL

SEQ ID NO: 57051 - protein, 9 aa, Homo sapiens
  misc_feature: Table A; Target 57051; HLA-A*25:01; PAEP; ENSG00000122133; TAA
MATNNISLM

SEQ ID NO: 57052 - protein, 9 aa, Homo sapiens
  misc_feature: Table A; Target 57052; HLA-A*26:01; PAEP; ENSG00000122133; TAA
MATNNISLM

SEQ ID NO: 57053 - protein, 9 aa, Homo sapiens
  misc_feature: Table A; Target 57053; HLA-A*33:01; PAEP; ENSG00000122133; TAA
MATNNISLM

SEQ ID NO: 57054 - protein, 9 aa, Homo sapiens
  misc_feature: Table A; Target 57054; HLA-A*33:03; PAEP; ENSG00000122133; TAA
MATNNISLM

SEQ ID NO: 57055 - protein, 9 aa, Homo sapiens
  misc_feature: Table A; Target 57055; HLA-A*68:01; PAEP; ENSG00000122133; TAA
MATNNISLM

SEQ ID NO: 57056 - protein, 9 aa, Homo sapiens
  misc_feature: Table A; Target 57056; HLA-B*27:05; PAEP; ENSG00000122133; TAA
MATNNISLM

SEQ ID NO: 57057 - protein, 9 aa, Homo sapiens
  misc_feature: Table A; Target 57057; HLA-B*35:01; PAEP; ENSG00000122133; TAA
MATNNISLM

SEQ ID NO: 57058 - protein, 9 aa, Homo sapiens
  misc_feature: Table A; Target 57058; HLA-B*35:03; PAEP; ENSG00000122133; TAA
MATNNISLM

SEQ ID NO: 57059 - protein, 9 aa, Homo sapiens
  misc_feature: Table A; Target 57059; HLA-B*38:01; PAEP; ENSG00000122133; TAA
MATNNISLM

SEQ ID NO: 57060 - protein, 9 aa, Homo sapiens
  misc_feature: Table A; Target 57060; HLA-B*39:01; PAEP; ENSG00000122133; TAA
MATNNISLM

SEQ ID NO: 57061 - protein, 9 aa, Homo sapiens
  misc_feature: Table A; Target 57061; HLA-B*46:01; PAEP; ENSG00000122133; TAA
MATNNISLM

SEQ ID NO: 57062 - protein, 9 aa, Homo sapiens
  misc_feature: Table A; Target 57062; HLA-B*51:01; PAEP; ENSG00000122133; TAA
MATNNISLM

SEQ ID NO: 57063 - protein, 9 aa, Homo sapiens
  misc_feature: Table A; Target 57063; HLA-B*54:01; PAEP; ENSG00000122133; TAA
MATNNISLM

SEQ ID NO: 57064 - protein, 9 aa, Homo sapiens
  misc_feature: Table A; Target 57064; HLA-B*55:01; PAEP; ENSG00000122133; TAA
MATNNISLM

SEQ ID NO: 57065 - protein, 9 aa, Homo sapiens
  misc_feature: Table A; Target 57065; HLA-B*58:01; PAEP; ENSG00000122133; TAA
MATNNISLM

SEQ ID NO: 57066 - protein, 9 aa, Homo sapiens
  misc_feature: Table A; Target 57066; HLA-C*02:02; PAEP; ENSG00000122133; TAA
MATNNISLM

SEQ ID NO: 57067 - protein, 9 aa, Homo sapiens
  misc_feature: Table A; Target 57067; HLA-C*03:03; PAEP; ENSG00000122133; TAA
MATNNISLM

SEQ ID NO: 57068 - protein, 9 aa, Homo sapiens
  misc_feature: Table A; Target 57068; HLA-C*03:04; PAEP; ENSG00000122133; TAA
MATNNISLM

SEQ ID NO: 57069 - protein, 9 aa, Homo sapiens
  misc_feature: Table A; Target 57069; HLA-C*04:01; PAEP; ENSG00000122133; TAA
MATNNISLM

SEQ ID NO: 57070 - protein, 9 aa, Homo sapiens
  misc_feature: Table A; Target 57070; HLA-C*07:01; PAEP; ENSG00000122133; TAA
MATNNISLM

SEQ ID NO: 57071 - protein, 9 aa, Homo sapiens
  misc_feature: Table A; Target 57071; HLA-C*07:04; PAEP; ENSG00000122133; TAA
MATNNISLM

SEQ ID NO: 57072 - protein, 9 aa, Homo sapiens
  misc_feature: Table A; Target 57072; HLA-C*07:06; PAEP; ENSG00000122133; TAA
MATNNISLM

SEQ ID NO: 57073 - protein, 9 aa, Homo sapiens
  misc_feature: Table A; Target 57073; HLA-C*12:03; PAEP; ENSG00000122133; TAA
MATNNISLM

SEQ ID NO: 57074 - protein, 9 aa, Homo sapiens
  misc_feature: Table A; Target 57074; HLA-C*14:02; PAEP; ENSG00000122133; TAA
MATNNISLM

SEQ ID NO: 57075 - protein, 9 aa, Homo sapiens
  misc_feature: Table A; Target 57075; HLA-C*16:01; PAEP; ENSG00000122133; TAA
MATNNISLM

SEQ ID NO: 57076 - protein, 9 aa, Homo sapiens
  misc_feature: Table A; Target 57076; HLA-C*16:02; PAEP; ENSG00000122133; TAA
MATNNISLM

SEQ ID NO: 57077 - protein, 9 aa, Homo sapiens
  misc_feature: Table A; Target 57077; HLA-C*16:04; PAEP; ENSG00000122133; TAA
MATNNISLM

SEQ ID NO: 57078 - protein, 10 aa, Homo sapiens
  misc_feature: Table A; Target 57078; HLA-B*54:01; PAEP; ENSG00000122133; TAA
MATNNISLMA

SEQ ID NO: 57079 - protein, 10 aa, Homo sapiens
  misc_feature: Table A; Target 57079; HLA-B*18:01; PAEP; ENSG00000122133; TAA
NEATLLDTDY

SEQ ID NO: 57080 - protein, 10 aa, Homo sapiens
  misc_feature: Table A; Target 57080; HLA-B*44:03; PAEP; ENSG00000122133; TAA
NEATLLDTDY

SEQ ID NO: 57081 - protein, 8 aa, Homo sapiens
  misc_feature: Table A; Target 57081; HLA-B*39:01; PAEP; ENSG00000122133; TAA
NISLMATL

SEQ ID NO: 57082 - protein, 8 aa, Homo sapiens
  misc_feature: Table A; Target 57082; HLA-C*01:02; PAEP; ENSG00000122133; TAA
NISLMATL

SEQ ID NO: 57083 - protein, 8 aa, Homo sapiens
  misc_feature: Table A; Target 57083; HLA-C*14:02; PAEP; ENSG00000122133; TAA
NISLMATL

SEQ ID NO: 57084 - protein, 9 aa, Homo sapiens
  misc_feature: Table A; Target 57084; HLA-A*03:02; PAEP; ENSG00000122133; TAA
NISLMATLK

SEQ ID NO: 57085 - protein, 9 aa, Homo sapiens
  misc_feature: Table A; Target 57085; HLA-A*23:01; PAEP; ENSG00000122133; TAA
NNISLMATL

SEQ ID NO: 57086 - protein, 9 aa, Homo sapiens
  misc_feature: Table A; Target 57086; HLA-A*25:01; PAEP; ENSG00000122133; TAA
NNISLMATL

SEQ ID NO: 57087 - protein, 9 aa, Homo sapiens
  misc_feature: Table A; Target 57087; HLA-A*26:01; PAEP; ENSG00000122133; TAA
NNISLMATL

SEQ ID NO: 57088 - protein, 9 aa, Homo sapiens
  misc_feature: Table A; Target 57088; HLA-B*18:01; PAEP; ENSG00000122133; TAA
NNISLMATL

SEQ ID NO: 57089 - protein, 9 aa, Homo sapiens
  misc_feature: Table A; Target 57089; HLA-B*39:01; PAEP; ENSG00000122133; TAA
NNISLMATL

SEQ ID NO: 57090 - protein, 10 aa, Homo sapiens
  misc_feature: Table A; Target 57090; HLA-B*27:02; PAEP; ENSG00000122133; TAA
NNISLMATLK

SEQ ID NO: 57091 - protein, 8 aa, Homo sapiens
  misc_feature: Table A; Target 57091; HLA-C*01:02; PAEP; ENSG00000122133; TAA
NYTVANEA

SEQ ID NO: 57092 - protein, 8 aa, Homo sapiens
  misc_feature: Table A; Target 57092; HLA-C*14:02; PAEP; ENSG00000122133; TAA
NYTVANEA

SEQ ID NO: 57093 - protein, 9 aa, Homo sapiens
  misc_feature: Table A; Target 57093; HLA-C*14:02; PAEP; ENSG00000122133; TAA
NYTVANEAT

SEQ ID NO: 57094 - protein, 10 aa, Homo sapiens
  misc_feature: Table A; Target 57094; HLA-A*24:02; PAEP; ENSG00000122133; TAA
NYTVANEATL

SEQ ID NO: 57095 - protein, 10 aa, Homo sapiens
  misc_feature: Table A; Target 57095; HLA-C*14:02; PAEP; ENSG00000122133; TAA
NYTVANEATL

SEQ ID NO: 57096 - protein, 11 aa, Homo sapiens
  misc_feature: Table A; Target 57096; HLA-A*24:02; PAEP; ENSG00000122133; TAA
NYTVANEATLL

SEQ ID NO: 57097 - protein, 9 aa, Homo sapiens
  misc_feature: Table A; Target 57097; HLA-A*03:02; PAEP; ENSG00000122133; TAA
PAMDIPQTK

SEQ ID NO: 57098 - protein, 9 aa, Homo sapiens
  misc_feature: Table A; Target 57098; HLA-A*11:01; PAEP; ENSG00000122133; TAA
PAMDIPQTK

SEQ ID NO: 57099 - protein, 9 aa, Homo sapiens
  misc_feature: Table A; Target 57099; HLA-A*68:01; PAEP; ENSG00000122133; TAA
PAMDIPQTK

SEQ ID NO: 57100 - protein, 9 aa, Homo sapiens
  misc_feature: Table A; Target 57100; HLA-B*40:01; PAEP; ENSG00000122133; TAA
PEDNLEIVL

SEQ ID NO: 57101 - protein, 8 aa, Homo sapiens
  misc_feature: Table A; Target 57101; HLA-A*30:01; PAEP; ENSG00000122133; TAA
QDLELPKL

SEQ ID NO: 57102 - protein, 8 aa, Homo sapiens
  misc_feature: Table A; Target 57102; HLA-B*37:01; PAEP; ENSG00000122133; TAA
QDLELPKL

SEQ ID NO: 57103 - protein, 8 aa, Homo sapiens
  misc_feature: Table A; Target 57103; HLA-B*40:02; PAEP; ENSG00000122133; TAA
QDLELPKL

SEQ ID NO: 57104 - protein, 10 aa, Homo sapiens
  misc_feature: Table A; Target 57104; HLA-A*30:01; PAEP; ENSG00000122133; TAA
QDTTTPIQSM

SEQ ID NO: 57105 - protein, 10 aa, Homo sapiens
  misc_feature: Table A; Target 57105; HLA-B*40:02; PAEP; ENSG00000122133; TAA
QDTTTPIQSM

SEQ ID NO: 57106 - protein, 10 aa, Homo sapiens
  misc_feature: Table A; Target 57106; HLA-C*04:01; PAEP; ENSG00000122133; TAA
QDTTTPIQSM

SEQ ID NO: 57107 - protein, 10 aa, Homo sapiens
  misc_feature: Table A; Target 57107; HLA-C*16:02; PAEP; ENSG00000122133; TAA
QDTTTPIQSM

SEQ ID NO: 57108 - protein, 8 aa, Homo sapiens
  misc_feature: Table A; Target 57108; HLA-C*05:01; PAEP; ENSG00000122133; TAA
QMEEPCRF

SEQ ID NO: 57109 - protein, 8 aa, Homo sapiens
  misc_feature: Table A; Target 57109; HLA-A*31:01; PAEP; ENSG00000122133; TAA
RAFRPLPR

SEQ ID NO: 57110 - protein, 11 aa, Homo sapiens
  misc_feature: Table A; Target 57110; HLA-B*57:01; PAEP; ENSG00000122133; TAA
RAFRPLPRHLW

SEQ ID NO: 57111 - protein, 8 aa, Homo sapiens
  misc_feature: Table A; Target 57111; HLA-B*57:01; PAEP; ENSG00000122133; TAA
RPLPRHLW

SEQ ID NO: 57112 - protein, 8 aa, Homo sapiens
  misc_feature: Table A; Target 57112; HLA-B*08:01; PAEP; ENSG00000122133; TAA
SCVEKKVL

SEQ ID NO: 57113 - protein, 8 aa, Homo sapiens
  misc_feature: Table A; Target 57113; HLA-C*16:01; PAEP; ENSG00000122133; TAA
SCVEKKVL

SEQ ID NO: 57114 - protein, 9 aa, Homo sapiens
  misc_feature: Table A; Target 57114; HLA-A*02:03; PAEP; ENSG00000122133; TAA
SMAMATNNI

SEQ ID NO: 57115 - protein, 9 aa, Homo sapiens
  misc_feature: Table A; Target 57115; HLA-B*13:02; PAEP; ENSG00000122133; TAA
SMAMATNNI

SEQ ID NO: 57116 - protein, 9 aa, Homo sapiens
  misc_feature: Table A; Target 57116; HLA-B*38:01; PAEP; ENSG00000122133; TAA
SMAMATNNI

SEQ ID NO: 57117 - protein, 9 aa, Homo sapiens
  misc_feature: Table A; Target 57117; HLA-C*06:02; PAEP; ENSG00000122133; TAA
SMAMATNNI

SEQ ID NO: 57118 - protein, 9 aa, Homo sapiens
  misc_feature: Table A; Target 57118; HLA-C*07:04; PAEP; ENSG00000122133; TAA
SMAMATNNI

SEQ ID NO: 57119 - protein, 11 aa, Homo sapiens
  misc_feature: Table A; Target 57119; HLA-A*02:01; PAEP; ENSG00000122133; TAA
SMAMATNNISL

SEQ ID NO: 57120 - protein, 8 aa, Homo sapiens
  misc_feature: Table A; Target 57120; HLA-B*37:01; PAEP; ENSG00000122133; TAA
TDYDNFLF

SEQ ID NO: 57121 - protein, 9 aa, Homo sapiens
  misc_feature: Table A; Target 57121; HLA-A*68:02; PAEP; ENSG00000122133; TAA
TDYDNFLFL

SEQ ID NO: 57122 - protein, 9 aa, Homo sapiens
  misc_feature: Table A; Target 57122; HLA-B*44:02; PAEP; ENSG00000122133; TAA
TDYDNFLFL

SEQ ID NO: 57123 - protein, 9 aa, Homo sapiens
  misc_feature: Table A; Target 57123; HLA-B*37:01; PAEP; ENSG00000122133; TAA
TENPKKFKI

SEQ ID NO: 57124 - protein, 9 aa, Homo sapiens
  misc_feature: Table A; Target 57124; HLA-B*44:02; PAEP; ENSG00000122133; TAA
TENPKKFKI

SEQ ID NO: 57125 - protein, 9 aa, Homo sapiens
  misc_feature: Table A; Target 57125; HLA-B*44:03; PAEP; ENSG00000122133; TAA
TENPKKFKI

SEQ ID NO: 57126 - protein, 9 aa, Homo sapiens
  misc_feature: Table A; Target 57126; HLA-B*49:01; PAEP; ENSG00000122133; TAA
TENPKKFKI

SEQ ID NO: 57127 - protein, 10 aa, Homo sapiens
  misc_feature: Table A; Target 57127; HLA-A*02:03; PAEP; ENSG00000122133; TAA
TLGVALVCGV

SEQ ID NO: 57128 - protein, 8 aa, Homo sapiens
  misc_feature: Table A; Target 57128; HLA-A*02:03; PAEP; ENSG00000122133; TAA
TLKAPLRV

SEQ ID NO: 57129 - protein, 10 aa, Homo sapiens
  misc_feature: Table A; Target 57129; HLA-A*23:01; PAEP; ENSG00000122133; TAA
TLLDTDYDNF

SEQ ID NO: 57130 - protein, 10 aa, Homo sapiens
  misc_feature: Table A; Target 57130; HLA-B*38:01; PAEP; ENSG00000122133; TAA
TLLDTDYDNF

SEQ ID NO: 57131 - protein, 11 aa, Homo sapiens
  misc_feature: Table A; Target 57131; HLA-A*02:01; PAEP; ENSG00000122133; TAA
TLLDTDYDNFL

SEQ ID NO: 57132 - protein, 11 aa, Homo sapiens
  misc_feature: Table A; Target 57132; HLA-A*02:04; PAEP; ENSG00000122133; TAA
TLLDTDYDNFL

SEQ ID NO: 57133 - protein, 10 aa, Homo sapiens
  misc_feature: Table A; Target 57133; HLA-C*07:02; PAEP; ENSG00000122133; TAA
TNNISLMATL

SEQ ID NO: 57134 - protein, 11 aa, Homo sapiens
  misc_feature: Table A; Target 57134; HLA-B*27:02; PAEP; ENSG00000122133; TAA
TNNISLMATLK

SEQ ID NO: 57135 - protein, 10 aa, Homo sapiens
  misc_feature: Table A; Target 57135; HLA-B*35:01; PAEP; ENSG00000122133; TAA
TPEDNLEIVL

SEQ ID NO: 57136 - protein, 10 aa, Homo sapiens
  misc_feature: Table A; Target 57136; HLA-B*35:03; PAEP; ENSG00000122133; TAA
TPEDNLEIVL

SEQ ID NO: 57137 - protein, 10 aa, Homo sapiens
  misc_feature: Table A; Target 57137; HLA-B*35:01; PAEP; ENSG00000122133; TAA
TPIQSMMCQY

SEQ ID NO: 57138 - protein, 10 aa, Homo sapiens
  misc_feature: Table A; Target 57138; HLA-B*55:01; PAEP; ENSG00000122133; TAA
TPIQSMMCQY

SEQ ID NO: 57139 - protein, 11 aa, Homo sapiens
  misc_feature: Table A; Target 57139; HLA-B*39:01; PAEP; ENSG00000122133; TAA
TSLLPTPEDNL

SEQ ID NO: 57140 - protein, 8 aa, Homo sapiens
  misc_feature: Table A; Target 57140; HLA-C*01:02; PAEP; ENSG00000122133; TAA
TTPIQSMM

SEQ ID NO: 57141 - protein, 8 aa, Homo sapiens
  misc_feature: Table A; Target 57141; HLA-C*04:01; PAEP; ENSG00000122133; TAA
TTPIQSMM

SEQ ID NO: 57142 - protein, 11 aa, Homo sapiens
  misc_feature: Table A; Target 57142; HLA-C*07:01; PAEP; ENSG00000122133; TAA
TTPIQSMMCQY

SEQ ID NO: 57143 - protein, 8 aa, Homo sapiens
  misc_feature: Table A; Target 57143; HLA-A*32:01; PAEP; ENSG00000122133; TAA
TTTPIQSM

SEQ ID NO: 57144 - protein, 8 aa, Homo sapiens
  misc_feature: Table A; Target 57144; HLA-C*04:01; PAEP; ENSG00000122133; TAA
TTTPIQSM

SEQ ID NO: 57145 - protein, 8 aa, Homo sapiens
  misc_feature: Table A; Target 57145; HLA-C*16:02; PAEP; ENSG00000122133; TAA
TTTPIQSM

SEQ ID NO: 57146 - protein, 9 aa, Homo sapiens
  misc_feature: Table A; Target 57146; HLA-A*26:01; PAEP; ENSG00000122133; TAA
TTTPIQSMM

SEQ ID NO: 57147 - protein, 9 aa, Homo sapiens
  misc_feature: Table A; Target 57147; HLA-A*32:01; PAEP; ENSG00000122133; TAA
TTTPIQSMM

SEQ ID NO: 57148 - protein, 9 aa, Homo sapiens
  misc_feature: Table A; Target 57148; HLA-A*68:01; PAEP; ENSG00000122133; TAA
TTTPIQSMM

SEQ ID NO: 57149 - protein, 9 aa, Homo sapiens
  misc_feature: Table A; Target 57149; HLA-A*68:02; PAEP; ENSG00000122133; TAA
TTTPIQSMM

SEQ ID NO: 57150 - protein, 9 aa, Homo sapiens
  misc_feature: Table A; Target 57150; HLA-B*27:05; PAEP; ENSG00000122133; TAA
TTTPIQSMM

SEQ ID NO: 57151 - protein, 9 aa, Homo sapiens
  misc_feature: Table A; Target 57151; HLA-B*57:01; PAEP; ENSG00000122133; TAA
TTTPIQSMM

SEQ ID NO: 57152 - protein, 9 aa, Homo sapiens
  misc_feature: Table A; Target 57152; HLA-B*58:01; PAEP; ENSG00000122133; TAA
TTTPIQSMM

SEQ ID NO: 57153 - protein, 9 aa, Homo sapiens
  misc_feature: Table A; Target 57153; HLA-C*02:02; PAEP; ENSG00000122133; TAA
TTTPIQSMM

SEQ ID NO: 57154 - protein, 9 aa, Homo sapiens
  misc_feature: Table A; Target 57154; HLA-C*04:01; PAEP; ENSG00000122133; TAA
TTTPIQSMM

SEQ ID NO: 57155 - protein, 9 aa, Homo sapiens
  misc_feature: Table A; Target 57155; HLA-C*07:06; PAEP; ENSG00000122133; TAA
TTTPIQSMM

SEQ ID NO: 57156 - protein, 9 aa, Homo sapiens
  misc_feature: Table A; Target 57156; HLA-C*12:03; PAEP; ENSG00000122133; TAA
TTTPIQSMM

SEQ ID NO: 57157 - protein, 9 aa, Homo sapiens
  misc_feature: Table A; Target 57157; HLA-C*16:01; PAEP; ENSG00000122133; TAA
TTTPIQSMM

SEQ ID NO: 57158 - protein, 9 aa, Homo sapiens
  misc_feature: Table A; Target 57158; HLA-C*16:02; PAEP; ENSG00000122133; TAA
TTTPIQSMM

SEQ ID NO: 57159 - protein, 9 aa, Homo sapiens
  misc_feature: Table A; Target 57159; HLA-A*25:01; PAEP; ENSG00000122133; TAA
TVANEATLL

SEQ ID NO: 57160 - protein, 9 aa, Homo sapiens
  misc_feature: Table A; Target 57160; HLA-A*26:01; PAEP; ENSG00000122133; TAA
TVANEATLL

SEQ ID NO: 57161 - protein, 9 aa, Homo sapiens
  misc_feature: Table A; Target 57161; HLA-A*68:01; PAEP; ENSG00000122133; TAA
TVANEATLL

SEQ ID NO: 57162 - protein, 9 aa, Homo sapiens
  misc_feature: Table A; Target 57162; HLA-A*68:02; PAEP; ENSG00000122133; TAA
TVANEATLL

SEQ ID NO: 57163 - protein, 9 aa, Homo sapiens
  misc_feature: Table A; Target 57163; HLA-B*27:05; PAEP; ENSG00000122133; TAA
TVANEATLL

SEQ ID NO: 57164 - protein, 9 aa, Homo sapiens
  misc_feature: Table A; Target 57164; HLA-B*35:03; PAEP; ENSG00000122133; TAA
TVANEATLL

SEQ ID NO: 57165 - protein, 9 aa, Homo sapiens
  misc_feature: Table A; Target 57165; HLA-B*38:01; PAEP; ENSG00000122133; TAA
TVANEATLL

SEQ ID NO: 57166 - protein, 9 aa, Homo sapiens
  misc_feature: Table A; Target 57166; HLA-B*39:01; PAEP; ENSG00000122133; TAA
TVANEATLL

SEQ ID NO: 57167 - protein, 9 aa, Homo sapiens
  misc_feature: Table A; Target 57167; HLA-C*05:01; PAEP; ENSG00000122133; TAA
TVANEATLL

SEQ ID NO: 57168 - protein, 9 aa, Homo sapiens
  misc_feature: Table A; Target 57168; HLA-C*07:04; PAEP; ENSG00000122133; TAA
TVANEATLL

SEQ ID NO: 57169 - protein, 9 aa, Homo sapiens
  misc_feature: Table A; Target 57169; HLA-C*07:06; PAEP; ENSG00000122133; TAA
TVANEATLL

SEQ ID NO: 57170 - protein, 9 aa, Homo sapiens
  misc_feature: Table A; Target 57170; HLA-B*54:01; PAEP; ENSG00000122133; TAA
VALVCGVPA

SEQ ID NO: 57171 - protein, 8 aa, Homo sapiens
  misc_feature: Table A; Target 57171; HLA-A*23:01; PAEP; ENSG00000122133; TAA
VANEATLL

SEQ ID NO: 57172 - protein, 8 aa, Homo sapiens
  misc_feature: Table A; Target 57172; HLA-B*46:01; PAEP; ENSG00000122133; TAA
VANEATLL

SEQ ID NO: 57173 - protein, 8 aa, Homo sapiens
  misc_feature: Table A; Target 57173; HLA-B*51:01; PAEP; ENSG00000122133; TAA
VANEATLL

SEQ ID NO: 57174 - protein, 8 aa, Homo sapiens
  misc_feature: Table A; Target 57174; HLA-C*01:02; PAEP; ENSG00000122133; TAA
VANEATLL

SEQ ID NO: 57175 - protein, 8 aa, Homo sapiens
  misc_feature: Table A; Target 57175; HLA-C*03:03; PAEP; ENSG00000122133; TAA
VANEATLL

SEQ ID NO: 57176 - protein, 8 aa, Homo sapiens
  misc_feature: Table A; Target 57176; HLA-C*03:04; PAEP; ENSG00000122133; TAA
VANEATLL

SEQ ID NO: 57177 - protein, 8 aa, Homo sapiens
  misc_feature: Table A; Target 57177; HLA-C*05:01; PAEP; ENSG00000122133; TAA
VANEATLL

SEQ ID NO: 57178 - protein, 8 aa, Homo sapiens
  misc_feature: Table A; Target 57178; HLA-C*07:04; PAEP; ENSG00000122133; TAA
VANEATLL

SEQ ID NO: 57179 - protein, 8 aa, Homo sapiens
  misc_feature: Table A; Target 57179; HLA-C*14:02; PAEP; ENSG00000122133; TAA
VANEATLL

SEQ ID NO: 57180 - protein, 8 aa, Homo sapiens
  misc_feature: Table A; Target 57180; HLA-C*16:02; PAEP; ENSG00000122133; TAA
VANEATLL

SEQ ID NO: 57181 - protein, 10 aa, Homo sapiens
  misc_feature: Table A; Target 57181; HLA-A*30:01; PAEP; ENSG00000122133; TAA
VEDDEIMQGF

SEQ ID NO: 57182 - protein, 10 aa, Homo sapiens
  misc_feature: Table A; Target 57182; HLA-B*18:01; PAEP; ENSG00000122133; TAA
VEDDEIMQGF

SEQ ID NO: 57183 - protein, 10 aa, Homo sapiens
  misc_feature: Table A; Target 57183; HLA-B*27:02; PAEP; ENSG00000122133; TAA
VEDDEIMQGF

SEQ ID NO: 57184 - protein, 10 aa, Homo sapiens
  misc_feature: Table A; Target 57184; HLA-B*27:05; PAEP; ENSG00000122133; TAA
VEDDEIMQGF

SEQ ID NO: 57185 - protein, 10 aa, Homo sapiens
  misc_feature: Table A; Target 57185; HLA-B*37:01; PAEP; ENSG00000122133; TAA
VEDDEIMQGF

SEQ ID NO: 57186 - protein, 10 aa, Homo sapiens
  misc_feature: Table A; Target 57186; HLA-B*38:01; PAEP; ENSG00000122133; TAA
VEDDEIMQGF

SEQ ID NO: 57187 - protein, 10 aa, Homo sapiens
  misc_feature: Table A; Target 57187; HLA-B*40:01; PAEP; ENSG00000122133; TAA
VEDDEIMQGF

SEQ ID NO: 57188 - protein, 10 aa, Homo sapiens
  misc_feature: Table A; Target 57188; HLA-B*44:02; PAEP; ENSG00000122133; TAA
VEDDEIMQGF

SEQ ID NO: 57189 - protein, 10 aa, Homo sapiens
  misc_feature: Table A; Target 57189; HLA-B*44:03; PAEP; ENSG00000122133; TAA
VEDDEIMQGF

SEQ ID NO: 57190 - protein, 10 aa, Homo sapiens
  misc_feature: Table A; Target 57190; HLA-B*49:01; PAEP; ENSG00000122133; TAA
VEDDEIMQGF

SEQ ID NO: 57191 - protein, 10 aa, Homo sapiens
  misc_feature: Table A; Target 57191; HLA-C*05:01; PAEP; ENSG00000122133; TAA
VEDDEIMQGF

SEQ ID NO: 57192 - protein, 10 aa, Homo sapiens
  misc_feature: Table A; Target 57192; HLA-C*16:04; PAEP; ENSG00000122133; TAA
VEDDEIMQGF

SEQ ID NO: 57193 - protein, 11 aa, Homo sapiens
  misc_feature: Table A; Target 57193; HLA-B*49:01; PAEP; ENSG00000122133; TAA
VEDDEIMQGFI

SEQ ID NO: 57194 - protein, 9 aa, Homo sapiens
  misc_feature: Table A; Target 57194; HLA-A*02:03; PAEP; ENSG00000122133; TAA
VLGEKTENP

SEQ ID NO: 57195 - protein, 10 aa, Homo sapiens
  misc_feature: Table A; Target 57195; HLA-A*03:01; PAEP; ENSG00000122133; TAA
VLGEKTENPK

SEQ ID NO: 57196 - protein, 10 aa, Homo sapiens
  misc_feature: Table A; Target 57196; HLA-A*03:02; PAEP; ENSG00000122133; TAA
VLGEKTENPK

SEQ ID NO: 57197 - protein, 11 aa, Homo sapiens
  misc_feature: Table A; Target 57197; HLA-A*03:02; PAEP; ENSG00000122133; TAA
VLGEKTENPKK

SEQ ID NO: 57198 - protein, 9 aa, Homo sapiens
  misc_feature: Table A; Target 57198; HLA-B*35:03; PAEP; ENSG00000122133; TAA
VLVEDDEIM

SEQ ID NO: 57199 - protein, 9 aa, Homo sapiens
  misc_feature: Table A; Target 57199; HLA-B*55:01; PAEP; ENSG00000122133; TAA
VLVEDDEIM

SEQ ID NO: 57200 - protein, 9 aa, Homo sapiens
  misc_feature: Table A; Target 57200; HLA-B*56:01; PAEP; ENSG00000122133; TAA
VPAMDIPQT

SEQ ID NO: 57201 - protein, 10 aa, Homo sapiens
  misc_feature: Table A; Target 57201; HLA-A*68:01; PAEP; ENSG00000122133; TAA
VPAMDIPQTK

SEQ ID NO: 57202 - protein, 10 aa, Homo sapiens
  misc_feature: Table A; Target 57202; HLA-B*56:01; PAEP; ENSG00000122133; TAA
VPAMDIPQTK

SEQ ID NO: 57203 - protein, 9 aa, Homo sapiens
  misc_feature: Table A; Target 57203; HLA-A*02:01; PAEP; ENSG00000122133; TAA
YTVANEATL

SEQ ID NO: 57204 - protein, 9 aa, Homo sapiens
  misc_feature: Table A; Target 57204; HLA-A*23:01; PAEP; ENSG00000122133; TAA
YTVANEATL

SEQ ID NO: 57205 - protein, 9 aa, Homo sapiens
  misc_feature: Table A; Target 57205; HLA-A*30:01; PAEP; ENSG00000122133; TAA
YTVANEATL

SEQ ID NO: 57206 - protein, 9 aa, Homo sapiens
  misc_feature: Table A; Target 57206; HLA-A*68:02; PAEP; ENSG00000122133; TAA
YTVANEATL

SEQ ID NO: 57207 - protein, 9 aa, Homo sapiens
  misc_feature: Table A; Target 57207; HLA-B*35:03; PAEP; ENSG00000122133; TAA
YTVANEATL

SEQ ID NO: 57208 - protein, 9 aa, Homo sapiens
  misc_feature: Table A; Target 57208; HLA-B*38:01; PAEP; ENSG00000122133; TAA
YTVANEATL

SEQ ID NO: 57209 - protein, 9 aa, Homo sapiens
  misc_feature: Table A; Target 57209; HLA-B*39:01; PAEP; ENSG00000122133; TAA
YTVANEATL

SEQ ID NO: 57210 - protein, 9 aa, Homo sapiens
  misc_feature: Table A; Target 57210; HLA-B*40:01; PAEP; ENSG00000122133; TAA
YTVANEATL

SEQ ID NO: 57211 - protein, 9 aa, Homo sapiens
  misc_feature: Table A; Target 57211; HLA-B*40:02; PAEP; ENSG00000122133; TAA
YTVANEATL

SEQ ID NO: 57212 - protein, 9 aa, Homo sapiens
  misc_feature: Table A; Target 57212; HLA-B*46:01; PAEP; ENSG00000122133; TAA
YTVANEATL

SEQ ID NO: 57213 - protein, 9 aa, Homo sapiens
  misc_feature: Table A; Target 57213; HLA-B*58:01; PAEP; ENSG00000122133; TAA
YTVANEATL

SEQ ID NO: 57214 - protein, 9 aa, Homo sapiens
  misc_feature: Table A; Target 57214; HLA-C*01:02; PAEP; ENSG00000122133; TAA
YTVANEATL

SEQ ID NO: 57215 - protein, 9 aa, Homo sapiens
  misc_feature: Table A; Target 57215; HLA-C*02:02; PAEP; ENSG00000122133; TAA
YTVANEATL

SEQ ID NO: 57216 - protein, 9 aa, Homo sapiens
  misc_feature: Table A; Target 57216; HLA-C*03:03; PAEP; ENSG00000122133; TAA
YTVANEATL

SEQ ID NO: 57217 - protein, 9 aa, Homo sapiens
  misc_feature: Table A; Target 57217; HLA-C*03:04; PAEP; ENSG00000122133; TAA
YTVANEATL

SEQ ID NO: 57218 - protein, 9 aa, Homo sapiens
  misc_feature: Table A; Target 57218; HLA-C*05:01; PAEP; ENSG00000122133; TAA
YTVANEATL

SEQ ID NO: 57219 - protein, 9 aa, Homo sapiens
  misc_feature: Table A; Target 57219; HLA-C*07:04; PAEP; ENSG00000122133; TAA
YTVANEATL

SEQ ID NO: 57220 - protein, 9 aa, Homo sapiens
  misc_feature: Table A; Target 57220; HLA-C*16:02; PAEP; ENSG00000122133; TAA
YTVANEATL

SEQ ID NO: 57221 - protein, 10 aa, Homo sapiens
  misc_feature: Table A; Target 57221; HLA-A*11:01; PAGE1; ENSG00000068985; CTA
ADSQELVQPK

SEQ ID NO: 57222 - protein, 10 aa, Homo sapiens
  misc_feature: Table A; Target 57222; HLA-B*27:02; PAGE1; ENSG00000068985; CTA
ADSQELVQPK

SEQ ID NO: 57223 - protein, 10 aa, Homo sapiens
  misc_feature: Table A; Target 57223; HLA-A*03:02; PAGE1; ENSG00000068985; CTA
ADSQEQVHPK

SEQ ID NO: 57224 - protein, 10 aa, Homo sapiens
  misc_feature: Table A; Target 57224; HLA-A*11:01; PAGE1; ENSG00000068985; CTA
ADSQEQVHPK

SEQ ID NO: 57225 - protein, 10 aa, Homo sapiens
  misc_feature: Table A; Target 57225; HLA-B*27:02; PAGE1; ENSG00000068985; CTA
ADSQEQVHPK

SEQ ID NO: 57226 - protein, 8 aa, Homo sapiens
  misc_feature: Table A; Target 57226; HLA-B*18:01; PAGE1; ENSG00000068985; CTA
DEVESPTQ

SEQ ID NO: 57227 - protein, 9 aa, Homo sapiens
  misc_feature: Table A; Target 57227; HLA-B*18:01; PAGE1; ENSG00000068985; CTA
DEVESPTQS

SEQ ID NO: 57228 - protein, 8 aa, Homo sapiens
  misc_feature: Table A; Target 57228; HLA-B*51:01; PAGE1; ENSG00000068985; CTA
DGPDTKRV

SEQ ID NO: 57229 - protein, 8 aa, Homo sapiens
  misc_feature: Table A; Target 57229; HLA-B*39:01; PAGE1; ENSG00000068985; CTA
DGPDVQEL

SEQ ID NO: 57230 - protein, 8 aa, Homo sapiens
  misc_feature: Table A; Target 57230; HLA-B*51:01; PAGE1; ENSG00000068985; CTA
DGPDVQEL

SEQ ID NO: 57231 - protein, 8 aa, Homo sapiens
  misc_feature: Table A; Target 57231; HLA-C*01:02; PAGE1; ENSG00000068985; CTA
DGPDVQEL

SEQ ID NO: 57232 - protein, 9 aa, Homo sapiens
  misc_feature: Table A; Target 57232; HLA-A*03:02; PAGE1; ENSG00000068985; CTA
DSQELVQPK

SEQ ID NO: 57233 - protein, 9 aa, Homo sapiens
  misc_feature: Table A; Target 57233; HLA-A*11:01; PAGE1; ENSG00000068985; CTA
DSQELVQPK

SEQ ID NO: 57234 - protein, 9 aa, Homo sapiens
  misc_feature: Table A; Target 57234; HLA-A*33:01; PAGE1; ENSG00000068985; CTA
DSQELVQPK

SEQ ID NO: 57235 - protein, 9 aa, Homo sapiens
  misc_feature: Table A; Target 57235; HLA-A*33:03; PAGE1; ENSG00000068985; CTA
DSQELVQPK

SEQ ID NO: 57236 - protein, 9 aa, Homo sapiens
  misc_feature: Table A; Target 57236; HLA-A*68:01; PAGE1; ENSG00000068985; CTA
DSQELVQPK

SEQ ID NO: 57237 - protein, 9 aa, Homo sapiens
  misc_feature: Table A; Target 57237; HLA-B*27:02; PAGE1; ENSG00000068985; CTA
DSQELVQPK

SEQ ID NO: 57238 - protein, 9 aa, Homo sapiens
  misc_feature: Table A; Target 57238; HLA-C*07:06; PAGE1; ENSG00000068985; CTA
DSQELVQPK

SEQ ID NO: 57239 - protein, 9 aa, Homo sapiens
  misc_feature: Table A; Target 57239; HLA-A*03:02; PAGE1; ENSG00000068985; CTA
DSQEQVHPK

SEQ ID NO: 57240 - protein, 9 aa, Homo sapiens
  misc_feature: Table A; Target 57240; HLA-A*11:01; PAGE1; ENSG00000068985; CTA
DSQEQVHPK

SEQ ID NO: 57241 - protein, 9 aa, Homo sapiens
  misc_feature: Table A; Target 57241; HLA-A*33:01; PAGE1; ENSG00000068985; CTA
DSQEQVHPK

SEQ ID NO: 57242 - protein, 9 aa, Homo sapiens
  misc_feature: Table A; Target 57242; HLA-A*33:03; PAGE1; ENSG00000068985; CTA
DSQEQVHPK

SEQ ID NO: 57243 - protein, 9 aa, Homo sapiens
  misc_feature: Table A; Target 57243; HLA-A*68:01; PAGE1; ENSG00000068985; CTA
DSQEQVHPK

SEQ ID NO: 57244 - protein, 9 aa, Homo sapiens
  misc_feature: Table A; Target 57244; HLA-B*27:02; PAGE1; ENSG00000068985; CTA
DSQEQVHPK

SEQ ID NO: 57245 - protein, 9 aa, Homo sapiens
  misc_feature: Table A; Target 57245; HLA-C*06:02; PAGE1; ENSG00000068985; CTA
DSQEQVHPK

SEQ ID NO: 57246 - protein, 9 aa, Homo sapiens
  misc_feature: Table A; Target 57246; HLA-C*07:06; PAGE1; ENSG00000068985; CTA
DSQEQVHPK

SEQ ID NO: 57247 - protein, 8 aa, Homo sapiens
  misc_feature: Table A; Target 57247; HLA-A*33:01; PAGE1; ENSG00000068985; CTA
DTKRVCLR

SEQ ID NO: 57248 - protein, 8 aa, Homo sapiens
  misc_feature: Table A; Target 57248; HLA-C*05:01; PAGE1; ENSG00000068985; CTA
EADSQELV

SEQ ID NO: 57249 - protein, 11 aa, Homo sapiens
  misc_feature: Table A; Target 57249; HLA-A*11:01; PAGE1; ENSG00000068985; CTA
EADSQELVQPK

SEQ ID NO: 57250 - protein, 11 aa, Homo sapiens
  misc_feature: Table A; Target 57250; HLA-A*33:01; PAGE1; ENSG00000068985; CTA
EADSQELVQPK

SEQ ID NO: 57251 - protein, 11 aa, Homo sapiens
  misc_feature: Table A; Target 57251; HLA-A*33:03; PAGE1; ENSG00000068985; CTA
EADSQELVQPK

SEQ ID NO: 57252 - protein, 11 aa, Homo sapiens
  misc_feature: Table A; Target 57252; HLA-A*68:01; PAGE1; ENSG00000068985; CTA
EADSQELVQPK

SEQ ID NO: 57253 - protein, 11 aa, Homo sapiens
  misc_feature: Table A; Target 57253; HLA-B*27:02; PAGE1; ENSG00000068985; CTA
EADSQELVQPK

SEQ ID NO: 57254 - protein, 11 aa, Homo sapiens
  misc_feature: Table A; Target 57254; HLA-B*27:05; PAGE1; ENSG00000068985; CTA
EADSQELVQPK

SEQ ID NO: 57255 - protein, 11 aa, Homo sapiens
  misc_feature: Table A; Target 57255; HLA-C*07:06; PAGE1; ENSG00000068985; CTA
EADSQELVQPK

SEQ ID NO: 57256 - protein, 8 aa, Homo sapiens
  misc_feature: Table A; Target 57256; HLA-C*05:01; PAGE1; ENSG00000068985; CTA
EADSQEQV

SEQ ID NO: 57257 - protein, 11 aa, Homo sapiens
  misc_feature: Table A; Target 57257; HLA-A*33:01; PAGE1; ENSG00000068985; CTA
EADSQEQVHPK

SEQ ID NO: 57258 - protein, 11 aa, Homo sapiens
  misc_feature: Table A; Target 57258; HLA-A*33:03; PAGE1; ENSG00000068985; CTA
EADSQEQVHPK

SEQ ID NO: 57259 - protein, 11 aa, Homo sapiens
  misc_feature: Table A; Target 57259; HLA-A*68:01; PAGE1; ENSG00000068985; CTA
EADSQEQVHPK

SEQ ID NO: 57260 - protein, 11 aa, Homo sapiens
  misc_feature: Table A; Target 57260; HLA-B*27:02; PAGE1; ENSG00000068985; CTA
EADSQEQVHPK

SEQ ID NO: 57261 - protein, 11 aa, Homo sapiens
  misc_feature: Table A; Target 57261; HLA-C*07:06; PAGE1; ENSG00000068985; CTA
EADSQEQVHPK

SEQ ID NO: 57262 - protein, 10 aa, Homo sapiens
  misc_feature: Table A; Target 57262; HLA-A*33:01; PAGE1; ENSG00000068985; CTA
ELGDGPDTKR

SEQ ID NO: 57263 - protein, 10 aa, Homo sapiens
  misc_feature: Table A; Target 57263; HLA-A*33:03; PAGE1; ENSG00000068985; CTA
ELGDGPDTKR

SEQ ID NO: 57264 - protein, 10 aa, Homo sapiens
  misc_feature: Table A; Target 57264; HLA-A*68:01; PAGE1; ENSG00000068985; CTA
ELGDGPDTKR

SEQ ID NO: 57265 - protein, 10 aa, Homo sapiens
  misc_feature: Table A; Target 57265; HLA-C*07:06; PAGE1; ENSG00000068985; CTA
ELGDGPDTKR

SEQ ID NO: 57266 - protein, 9 aa, Homo sapiens
  misc_feature: Table A; Target 57266; HLA-B*35:03; PAGE1; ENSG00000068985; CTA
EPEADSQEL

SEQ ID NO: 57267 - protein, 11 aa, Homo sapiens
  misc_feature: Table A; Target 57267; HLA-B*38:01; PAGE1; ENSG00000068985; CTA
ERGDGPDVQEL

SEQ ID NO: 57268 - protein, 9 aa, Homo sapiens
  misc_feature: Table A; Target 57268; HLA-B*37:01; PAGE1; ENSG00000068985; CTA
GDGPDTKRV

SEQ ID NO: 57269 - protein, 9 aa, Homo sapiens
  misc_feature: Table A; Target 57269; HLA-C*16:02; PAGE1; ENSG00000068985; CTA
GDGPDTKRV

SEQ ID NO: 57270 - protein, 11 aa, Homo sapiens
  misc_feature: Table A; Target 57270; HLA-A*30:01; PAGE1; ENSG00000068985; CTA
GDGPDTKRVCL

SEQ ID NO: 57271 - protein, 9 aa, Homo sapiens
  misc_feature: Table A; Target 57271; HLA-A*30:01; PAGE1; ENSG00000068985; CTA
GDGPDVQEL

SEQ ID NO: 57272 - protein, 9 aa, Homo sapiens
  misc_feature: Table A; Target 57272; HLA-B*37:01; PAGE1; ENSG00000068985; CTA
GDGPDVQEL

SEQ ID NO: 57273 - protein, 9 aa, Homo sapiens
  misc_feature: Table A; Target 57273; HLA-B*38:01; PAGE1; ENSG00000068985; CTA
GDGPDVQEL

SEQ ID NO: 57274 - protein, 9 aa, Homo sapiens
  misc_feature: Table A; Target 57274; HLA-B*40:01; PAGE1; ENSG00000068985; CTA
GDGPDVQEL

SEQ ID NO: 57275 - protein, 9 aa, Homo sapiens
  misc_feature: Table A; Target 57275; HLA-B*40:02; PAGE1; ENSG00000068985; CTA
GDGPDVQEL

SEQ ID NO: 57276 - protein, 9 aa, Homo sapiens
  misc_feature: Table A; Target 57276; HLA-B*07:02; PAGE1; ENSG00000068985; CTA
GPDTKRVCL

SEQ ID NO: 57277 - protein, 9 aa, Homo sapiens
  misc_feature: Table A; Target 57277; HLA-B*08:01; PAGE1; ENSG00000068985; CTA
GPDTKRVCL

SEQ ID NO: 57278 - protein, 9 aa, Homo sapiens
  misc_feature: Table A; Target 57278; HLA-C*07:02; PAGE1; ENSG00000068985; CTA
GPDTKRVCL

SEQ ID NO: 57279 - protein, 9 aa, Homo sapiens
  misc_feature: Table A; Target 57279; HLA-B*35:03; PAGE1; ENSG00000068985; CTA
GPDVQELGL

SEQ ID NO: 57280 - protein, 11 aa, Homo sapiens
  misc_feature: Table A; Target 57280; HLA-B*27:05; PAGE1; ENSG00000068985; CTA
GQEPEADSQEL

SEQ ID NO: 57281 - protein, 11 aa, Homo sapiens
  misc_feature: Table A; Target 57281; HLA-B*38:01; PAGE1; ENSG00000068985; CTA
GQEPEADSQEL

SEQ ID NO: 57282 - protein, 11 aa, Homo sapiens
  misc_feature: Table A; Target 57282; HLA-B*39:01; PAGE1; ENSG00000068985; CTA
GQEPEADSQEL

SEQ ID NO: 57283 - protein, 8 aa, Homo sapiens
  misc_feature: Table A; Target 57283; HLA-C*14:02; PAGE1; ENSG00000068985; CTA
IYVESSEE

SEQ ID NO: 57284 - protein, 9 aa, Homo sapiens
  misc_feature: Table A; Target 57284; HLA-C*14:02; PAGE1; ENSG00000068985; CTA
IYVESSEES

SEQ ID NO: 57285 - protein, 11 aa, Homo sapiens
  misc_feature: Table A; Target 57285; HLA-A*02:01; PAGE1; ENSG00000068985; CTA
KLPAEGPEPEA

SEQ ID NO: 57286 - protein, 11 aa, Homo sapiens
  misc_feature: Table A; Target 57286; HLA-A*02:07; PAGE1; ENSG00000068985; CTA
KLPAEGPEPEA

SEQ ID NO: 57287 - protein, 9 aa, Homo sapiens
  misc_feature: Table A; Target 57287; HLA-C*05:01; PAGE1; ENSG00000068985; CTA
LGDGPDTKR

SEQ ID NO: 57288 - protein, 9 aa, Homo sapiens
  misc_feature: Table A; Target 57288; HLA-A*02:01; PAGE1; ENSG00000068985; CTA
LGLPNPEEV

SEQ ID NO: 57289 - protein, 8 aa, Homo sapiens
  misc_feature: Table A; Target 57289; HLA-B*51:01; PAGE1; ENSG00000068985; CTA
LPAEGPEP

SEQ ID NO: 57290 - protein, 8 aa, Homo sapiens
  misc_feature: Table A; Target 57290; HLA-B*54:01; PAGE1; ENSG00000068985; CTA
LPAEGPEP

SEQ ID NO: 57291 - protein, 10 aa, Homo sapiens
  misc_feature: Table A; Target 57291; HLA-B*35:01; PAGE1; ENSG00000068985; CTA
LPAEGPEPEA

SEQ ID NO: 57292 - protein, 10 aa, Homo sapiens
  misc_feature: Table A; Target 57292; HLA-B*35:03; PAGE1; ENSG00000068985; CTA
LPAEGPEPEA

SEQ ID NO: 57293 - protein, 10 aa, Homo sapiens
  misc_feature: Table A; Target 57293; HLA-B*51:01; PAGE1; ENSG00000068985; CTA
LPAEGPEPEA

SEQ ID NO: 57294 - protein, 10 aa, Homo sapiens
  misc_feature: Table A; Target 57294; HLA-B*54:01; PAGE1; ENSG00000068985; CTA
LPAEGPEPEA

SEQ ID NO: 57295 - protein, 10 aa, Homo sapiens
  misc_feature: Table A; Target 57295; HLA-B*55:01; PAGE1; ENSG00000068985; CTA
LPAEGPEPEA

SEQ ID NO: 57296 - protein, 10 aa, Homo sapiens
  misc_feature: Table A; Target 57296; HLA-B*56:01; PAGE1; ENSG00000068985; CTA
LPAEGPEPEA

SEQ ID NO: 57297 - protein, 9 aa, Homo sapiens
  misc_feature: Table A; Target 57297; HLA-B*35:03; PAGE1; ENSG00000068985; CTA
LPNPEEVKT

SEQ ID NO: 57298 - protein, 9 aa, Homo sapiens
  misc_feature: Table A; Target 57298; HLA-B*55:01; PAGE1; ENSG00000068985; CTA
LPNPEEVKT

SEQ ID NO: 57299 - protein, 9 aa, Homo sapiens
  misc_feature: Table A; Target 57299; HLA-B*56:01; PAGE1; ENSG00000068985; CTA
LPNPEEVKT

SEQ ID NO: 57300 - protein, 9 aa, Homo sapiens
  misc_feature: Table A; Target 57300; HLA-B*27:05; PAGE1; ENSG00000068985; CTA
LRNEEQMKL

SEQ ID NO: 57301 - protein, 9 aa, Homo sapiens
  misc_feature: Table A; Target 57301; HLA-B*38:01; PAGE1; ENSG00000068985; CTA
LRNEEQMKL

SEQ ID NO: 57302 - protein, 9 aa, Homo sapiens
  misc_feature: Table A; Target 57302; HLA-B*18:01; PAGE1; ENSG00000068985; CTA
NEEQMKLPA

SEQ ID NO: 57303 - protein, 9 aa, Homo sapiens
  misc_feature: Table A; Target 57303; HLA-B*49:01; PAGE1; ENSG00000068985; CTA
PEADSQELV

SEQ ID NO: 57304 - protein, 9 aa, Homo sapiens
  misc_feature: Table A; Target 57304; HLA-A*68:01; PAGE1; ENSG00000068985; CTA
QDSTPAEER

SEQ ID NO: 57305 - protein, 9 aa, Homo sapiens
  misc_feature: Table A; Target 57305; HLA-B*27:02; PAGE1; ENSG00000068985; CTA
QDSTPAEER

SEQ ID NO: 57306 - protein, 9 aa, Homo sapiens
  misc_feature: Table A; Target 57306; HLA-C*07:06; PAGE1; ENSG00000068985; CTA
QDSTPAEER

SEQ ID NO: 57307 - protein, 8 aa, Homo sapiens
  misc_feature: Table A; Target 57307; HLA-B*40:02; PAGE1; ENSG00000068985; CTA
QELVQPKT

SEQ ID NO: 57308 - protein, 8 aa, Homo sapiens
  misc_feature: Table A; Target 57308; HLA-C*16:02; PAGE1; ENSG00000068985; CTA
QELVQPKT

SEQ ID NO: 57309 - protein, 10 aa, Homo sapiens
  misc_feature: Table A; Target 57309; HLA-A*30:01; PAGE1; ENSG00000068985; CTA
QEPEADSQEL

SEQ ID NO: 57310 - protein, 10 aa, Homo sapiens
  misc_feature: Table A; Target 57310; HLA-B*40:01; PAGE1; ENSG00000068985; CTA
QEPEADSQEL

SEQ ID NO: 57311 - protein, 10 aa, Homo sapiens
  misc_feature: Table A; Target 57311; HLA-B*40:02; PAGE1; ENSG00000068985; CTA
QEPEADSQEL

SEQ ID NO: 57312 - protein, 10 aa, Homo sapiens
  misc_feature: Table A; Target 57312; HLA-B*44:02; PAGE1; ENSG00000068985; CTA
QEPEADSQEL

SEQ ID NO: 57313 - protein, 10 aa, Homo sapiens
  misc_feature: Table A; Target 57313; HLA-B*44:03; PAGE1; ENSG00000068985; CTA
QEPEADSQEL

SEQ ID NO: 57314 - protein, 10 aa, Homo sapiens
  misc_feature: Table A; Target 57314; HLA-B*49:01; PAGE1; ENSG00000068985; CTA
QEPEADSQEL

SEQ ID NO: 57315 - protein, 10 aa, Homo sapiens
  misc_feature: Table A; Target 57315; HLA-C*16:04; PAGE1; ENSG00000068985; CTA
QEPEADSQEL

SEQ ID NO: 57316 - protein, 11 aa, Homo sapiens
  misc_feature: Table A; Target 57316; HLA-B*49:01; PAGE1; ENSG00000068985; CTA
QEPEADSQELV

SEQ ID NO: 57317 - protein, 8 aa, Homo sapiens
  misc_feature: Table A; Target 57317; HLA-C*16:02; PAGE1; ENSG00000068985; CTA
QEQVHPKT

SEQ ID NO: 57318 - protein, 8 aa, Homo sapiens
  misc_feature: Table A; Target 57318; HLA-B*07:02; PAGE1; ENSG00000068985; CTA
QPKTGCEL

SEQ ID NO: 57319 - protein, 8 aa, Homo sapiens
  misc_feature: Table A; Target 57319; HLA-B*08:01; PAGE1; ENSG00000068985; CTA
QPKTGCEL

SEQ ID NO: 57320 - protein, 8 aa, Homo sapiens
  misc_feature: Table A; Target 57320; HLA-C*07:02; PAGE1; ENSG00000068985; CTA
QPKTGCEL

SEQ ID NO: 57321 - protein, 11 aa, Homo sapiens
  misc_feature: Table A; Target 57321; HLA-A*33:01; PAGE1; ENSG00000068985; CTA
QSQDSTPAEER

SEQ ID NO: 57322 - protein, 11 aa, Homo sapiens
  misc_feature: Table A; Target 57322; HLA-A*33:03; PAGE1; ENSG00000068985; CTA
QSQDSTPAEER

SEQ ID NO: 57323 - protein, 11 aa, Homo sapiens
  misc_feature: Table A; Target 57323; HLA-A*68:01; PAGE1; ENSG00000068985; CTA
QSQDSTPAEER

SEQ ID NO: 57324 - protein, 11 aa, Homo sapiens
  misc_feature: Table A; Target 57324; HLA-C*07:06; PAGE1; ENSG00000068985; CTA
QSQDSTPAEER

SEQ ID NO: 57325 - protein, 10 aa, Homo sapiens
  misc_feature: Table A; Target 57325; HLA-A*31:01; PAGE1; ENSG00000068985; CTA
QVHPKTGCER

SEQ ID NO: 57326 - protein, 9 aa, Homo sapiens
  misc_feature: Table A; Target 57326; HLA-B*40:01; PAGE1; ENSG00000068985; CTA
REDEGASAA

SEQ ID NO: 57327 - protein, 9 aa, Homo sapiens
  misc_feature: Table A; Target 57327; HLA-B*49:01; PAGE1; ENSG00000068985; CTA
REDEGASAA

SEQ ID NO: 57328 - protein, 10 aa, Homo sapiens
  misc_feature: Table A; Target 57328; HLA-B*40:01; PAGE1; ENSG00000068985; CTA
RGDGPDVQEL

SEQ ID NO: 57329 - protein, 10 aa, Homo sapiens
  misc_feature: Table A; Target 57329; HLA-C*05:01; PAGE1; ENSG00000068985; CTA
RGDGPDVQEL

SEQ ID NO: 57330 - protein, 9 aa, Homo sapiens
  misc_feature: Table A; Target 57330; HLA-B*56:01; PAGE1; ENSG00000068985; CTA
RPMIYVESS

SEQ ID NO: 57331 - protein, 9 aa, Homo sapiens
  misc_feature: Table A; Target 57331; HLA-B*13:02; PAGE1; ENSG00000068985; CTA
SQELVQPKT

SEQ ID NO: 57332 - protein, 8 aa, Homo sapiens
  misc_feature: Table A; Target 57332; HLA-A*03:02; PAGE1; ENSG00000068985; CTA
SQEQVHPK

SEQ ID NO: 57333 - protein, 8 aa, Homo sapiens
  misc_feature: Table A; Target 57333; HLA-A*11:01; PAGE1; ENSG00000068985; CTA
SQEQVHPK

SEQ ID NO: 57334 - protein, 9 aa, Homo sapiens
  misc_feature: Table A; Target 57334; HLA-C*05:01; PAGE1; ENSG00000068985; CTA
SSDEQPDEV

SEQ ID NO: 57335 - protein, 8 aa, Homo sapiens
  misc_feature: Table A; Target 57335; HLA-B*37:01; PAGE1; ENSG00000068985; CTA
VESPTQSQ

SEQ ID NO: 57336 - protein, 11 aa, Homo sapiens
  misc_feature: Table A; Target 57336; HLA-B*39:01; PAGE1; ENSG00000068985; CTA
VESPTQSQDST

SEQ ID NO: 57337 - protein, 9 aa, Homo sapiens
  misc_feature: Table A; Target 57337; HLA-B*15:03; PAGE1; ENSG00000068985; CTA
VQPKTGCEL

SEQ ID NO: 57338 - protein, 9 aa, Homo sapiens
  misc_feature: Table A; Target 57338; HLA-B*46:01; PAGE1; ENSG00000068985; CTA
VQPKTGCEL

SEQ ID NO: 57339 - protein, 9 aa, Homo sapiens
  misc_feature: Table A; Target 57339; HLA-C*01:02; PAGE1; ENSG00000068985; CTA
VQPKTGCEL

SEQ ID NO: 57340 - protein, 10 aa, Homo sapiens
  misc_feature: Table A; Target 57340; HLA-C*14:02; PAGE2; ENSG00000234068; TAA
AFQGPDMEAF

SEQ ID NO: 57341 - protein, 10 aa, Homo sapiens
  misc_feature: Table A; Target 57341; HLA-B*56:01; PAGE2; ENSG00000234068; TAA
APSGEIENQA

SEQ ID NO: 57342 - protein, 11 aa, Homo sapiens
  misc_feature: Table A; Target 57342; HLA-B*56:01; PAGE2; ENSG00000234068; TAA
APSGEIENQAV

SEQ ID NO: 57343 - protein, 10 aa, Homo sapiens
  misc_feature: Table A; Target 57343; HLA-A*26:01; PAGE2; ENSG00000234068; TAA
AVPAFQGPDM

SEQ ID NO: 57344 - protein, 10 aa, Homo sapiens
  misc_feature: Table A; Target 57344; HLA-C*04:01; PAGE2; ENSG00000234068; TAA
AVPAFQGPDM

SEQ ID NO: 57345 - protein, 9 aa, Homo sapiens
  misc_feature: Table A; Target 57345; HLA-B*35:03; PAGE2; ENSG00000234068; TAA
DMEAFQQEL

SEQ ID NO: 57346 - protein, 9 aa, Homo sapiens
  misc_feature: Table A; Target 57346; HLA-B*38:01; PAGE2; ENSG00000234068; TAA
DMEAFQQEL

SEQ ID NO: 57347 - protein, 9 aa, Homo sapiens
  misc_feature: Table A; Target 57347; HLA-A*68:02; PAGE2; ENSG00000234068; TAA
EAFQQELAL

SEQ ID NO: 57348 - protein, 11 aa, Homo sapiens
  misc_feature: Table A; Target 57348; HLA-A*11:01; PAGE2; ENSG00000234068; TAA
EAFQQELALLK

SEQ ID NO: 57349 - protein, 10 aa, Homo sapiens
  misc_feature: Table A; Target 57349; HLA-A*25:01; PAGE2; ENSG00000234068; TAA
EIENQAVPAF

SEQ ID NO: 57350 - protein, 10 aa, Homo sapiens
  misc_feature: Table A; Target 57350; HLA-A*26:01; PAGE2; ENSG00000234068; TAA
EIENQAVPAF

SEQ ID NO: 57351 - protein, 10 aa, Homo sapiens
  misc_feature: Table A; Target 57351; HLA-B*38:01; PAGE2; ENSG00000234068; TAA
ESSQPVGSVI

SEQ ID NO: 57352 - protein, 9 aa, Homo sapiens
  misc_feature: Table A; Target 57352; HLA-A*24:02; PAGE2; ENSG00000234068; TAA
FQGPDMEAF

SEQ ID NO: 57353 - protein, 9 aa, Homo sapiens
  misc_feature: Table A; Target 57353; HLA-A*25:01; PAGE2; ENSG00000234068; TAA
FQGPDMEAF

SEQ ID NO: 57354 - protein, 9 aa, Homo sapiens
  misc_feature: Table A; Target 57354; HLA-A*32:01; PAGE2; ENSG00000234068; TAA
FQGPDMEAF

SEQ ID NO: 57355 - protein, 9 aa, Homo sapiens
  misc_feature: Table A; Target 57355; HLA-B*15:01; PAGE2; ENSG00000234068; TAA
FQGPDMEAF

SEQ ID NO: 57356 - protein, 9 aa, Homo sapiens
  misc_feature: Table A; Target 57356; HLA-B*15:03; PAGE2; ENSG00000234068; TAA
FQGPDMEAF

SEQ ID NO: 57357 - protein, 9 aa, Homo sapiens
  misc_feature: Table A; Target 57357; HLA-B*18:01; PAGE2; ENSG00000234068; TAA
FQGPDMEAF

SEQ ID NO: 57358 - protein, 9 aa, Homo sapiens
  misc_feature: Table A; Target 57358; HLA-B*27:02; PAGE2; ENSG00000234068; TAA
FQGPDMEAF

SEQ ID NO: 57359 - protein, 9 aa, Homo sapiens
  misc_feature: Table A; Target 57359; HLA-B*27:05; PAGE2; ENSG00000234068; TAA
FQGPDMEAF

SEQ ID NO: 57360 - protein, 9 aa, Homo sapiens
  misc_feature: Table A; Target 57360; HLA-B*35:01; PAGE2; ENSG00000234068; TAA
FQGPDMEAF

SEQ ID NO: 57361 - protein, 9 aa, Homo sapiens
  misc_feature: Table A; Target 57361; HLA-B*35:03; PAGE2; ENSG00000234068; TAA
FQGPDMEAF

SEQ ID NO: 57362 - protein, 9 aa, Homo sapiens
  misc_feature: Table A; Target 57362; HLA-B*38:01; PAGE2; ENSG00000234068; TAA
FQGPDMEAF

SEQ ID NO: 57363 - protein, 9 aa, Homo sapiens
  misc_feature: Table A; Target 57363; HLA-B*39:01; PAGE2; ENSG00000234068; TAA
FQGPDMEAF

SEQ ID NO: 57364 - protein, 9 aa, Homo sapiens
  misc_feature: Table A; Target 57364; HLA-B*46:01; PAGE2; ENSG00000234068; TAA
FQGPDMEAF

SEQ ID NO: 57365 - protein, 9 aa, Homo sapiens
  misc_feature: Table A; Target 57365; HLA-B*58:01; PAGE2; ENSG00000234068; TAA
FQGPDMEAF

SEQ ID NO: 57366 - protein, 9 aa, Homo sapiens
  misc_feature: Table A; Target 57366; HLA-C*02:02; PAGE2; ENSG00000234068; TAA
FQGPDMEAF

SEQ ID NO: 57367 - protein, 9 aa, Homo sapiens
  misc_feature: Table A; Target 57367; HLA-C*03:03; PAGE2; ENSG00000234068; TAA
FQGPDMEAF

SEQ ID NO: 57368 - protein, 9 aa, Homo sapiens
  misc_feature: Table A; Target 57368; HLA-C*03:04; PAGE2; ENSG00000234068; TAA
FQGPDMEAF

SEQ ID NO: 57369 - protein, 9 aa, Homo sapiens
  misc_feature: Table A; Target 57369; HLA-C*07:04; PAGE2; ENSG00000234068; TAA
FQGPDMEAF

SEQ ID NO: 57370 - protein, 9 aa, Homo sapiens
  misc_feature: Table A; Target 57370; HLA-C*16:04; PAGE2; ENSG00000234068; TAA
FQGPDMEAF

SEQ ID NO: 57371 - protein, 8 aa, Homo sapiens
  misc_feature: Table A; Target 57371; HLA-A*30:01; PAGE2; ENSG00000234068; TAA
GEIENQAV

SEQ ID NO: 57372 - protein, 8 aa, Homo sapiens
  misc_feature: Table A; Target 57372; HLA-B*18:01; PAGE2; ENSG00000234068; TAA
GEIENQAV

SEQ ID NO: 57373 - protein, 8 aa, Homo sapiens
  misc_feature: Table A; Target 57373; HLA-B*40:01; PAGE2; ENSG00000234068; TAA
GEIENQAV

SEQ ID NO: 57374 - protein, 8 aa, Homo sapiens
  misc_feature: Table A; Target 57374; HLA-B*49:01; PAGE2; ENSG00000234068; TAA
GEIENQAV

SEQ ID NO: 57375 - protein, 9 aa, Homo sapiens
  misc_feature: Table A; Target 57375; HLA-A*30:01; PAGE2; ENSG00000234068; TAA
GEIENQAVP

SEQ ID NO: 57376 - protein, 9 aa, Homo sapiens
  misc_feature: Table A; Target 57376; HLA-B*27:05; PAGE2; ENSG00000234068; TAA
GEIENQAVP

SEQ ID NO: 57377 - protein, 9 aa, Homo sapiens
  misc_feature: Table A; Target 57377; HLA-B*40:01; PAGE2; ENSG00000234068; TAA
GEIENQAVP

SEQ ID NO: 57378 - protein, 9 aa, Homo sapiens
  misc_feature: Table A; Target 57378; HLA-B*40:02; PAGE2; ENSG00000234068; TAA
GEIENQAVP

SEQ ID NO: 57379 - protein, 9 aa, Homo sapiens
  misc_feature: Table A; Target 57379; HLA-B*49:01; PAGE2; ENSG00000234068; TAA
GEIENQAVP

SEQ ID NO: 57380 - protein, 9 aa, Homo sapiens
  misc_feature: Table A; Target 57380; HLA-C*16:04; PAGE2; ENSG00000234068; TAA
GEIENQAVP

SEQ ID NO: 57381 - protein, 10 aa, Homo sapiens
  misc_feature: Table A; Target 57381; HLA-A*30:01; PAGE2; ENSG00000234068; TAA
GEIENQAVPA

SEQ ID NO: 57382 - protein, 10 aa, Homo sapiens
  misc_feature: Table A; Target 57382; HLA-B*40:01; PAGE2; ENSG00000234068; TAA
GEIENQAVPA

SEQ ID NO: 57383 - protein, 10 aa, Homo sapiens
  misc_feature: Table A; Target 57383; HLA-B*40:02; PAGE2; ENSG00000234068; TAA
GEIENQAVPA

SEQ ID NO: 57384 - protein, 10 aa, Homo sapiens
  misc_feature: Table A; Target 57384; HLA-B*49:01; PAGE2; ENSG00000234068; TAA
GEIENQAVPA

SEQ ID NO: 57385 - protein, 11 aa, Homo sapiens
  misc_feature: Table A; Target 57385; HLA-A*25:01; PAGE2; ENSG00000234068; TAA
GEIENQAVPAF

SEQ ID NO: 57386 - protein, 11 aa, Homo sapiens
  misc_feature: Table A; Target 57386; HLA-A*30:01; PAGE2; ENSG00000234068; TAA
GEIENQAVPAF

SEQ ID NO: 57387 - protein, 11 aa, Homo sapiens
  misc_feature: Table A; Target 57387; HLA-B*18:01; PAGE2; ENSG00000234068; TAA
GEIENQAVPAF

SEQ ID NO: 57388 - protein, 11 aa, Homo sapiens
  misc_feature: Table A; Target 57388; HLA-B*27:02; PAGE2; ENSG00000234068; TAA
GEIENQAVPAF

SEQ ID NO: 57389 - protein, 11 aa, Homo sapiens
  misc_feature: Table A; Target 57389; HLA-B*27:05; PAGE2; ENSG00000234068; TAA
GEIENQAVPAF

SEQ ID NO: 57390 - protein, 11 aa, Homo sapiens
  misc_feature: Table A; Target 57390; HLA-B*40:01; PAGE2; ENSG00000234068; TAA
GEIENQAVPAF

SEQ ID NO: 57391 - protein, 11 aa, Homo sapiens
  misc_feature: Table A; Target 57391; HLA-B*40:02; PAGE2; ENSG00000234068; TAA
GEIENQAVPAF

SEQ ID NO: 57392 - protein, 11 aa, Homo sapiens
  misc_feature: Table A; Target 57392; HLA-B*44:02; PAGE2; ENSG00000234068; TAA
GEIENQAVPAF

SEQ ID NO: 57393 - protein, 11 aa, Homo sapiens
  misc_feature: Table A; Target 57393; HLA-B*44:03; PAGE2; ENSG00000234068; TAA
GEIENQAVPAF

SEQ ID NO: 57394 - protein, 11 aa, Homo sapiens
  misc_feature: Table A; Target 57394; HLA-B*49:01; PAGE2; ENSG00000234068; TAA
GEIENQAVPAF

SEQ ID NO: 57395 - protein, 11 aa, Homo sapiens
  misc_feature: Table A; Target 57395; HLA-C*16:04; PAGE2; ENSG00000234068; TAA
GEIENQAVPAF

SEQ ID NO: 57396 - protein, 8 aa, Homo sapiens
  misc_feature: Table A; Target 57396; HLA-B*18:01; PAGE2; ENSG00000234068; TAA
IENQAVPA

SEQ ID NO: 57397 - protein, 9 aa, Homo sapiens
  misc_feature: Table A; Target 57397; HLA-A*23:01; PAGE2; ENSG00000234068; TAA
IENQAVPAF

SEQ ID NO: 57398 - protein, 9 aa, Homo sapiens
  misc_feature: Table A; Target 57398; HLA-A*24:02; PAGE2; ENSG00000234068; TAA
IENQAVPAF

SEQ ID NO: 57399 - protein, 9 aa, Homo sapiens
  misc_feature: Table A; Target 57399; HLA-A*25:01; PAGE2; ENSG00000234068; TAA
IENQAVPAF

SEQ ID NO: 57400 - protein, 9 aa, Homo sapiens
  misc_feature: Table A; Target 57400; HLA-A*30:01; PAGE2; ENSG00000234068; TAA
IENQAVPAF

SEQ ID NO: 57401 - protein, 9 aa, Homo sapiens
  misc_feature: Table A; Target 57401; HLA-A*32:01; PAGE2; ENSG00000234068; TAA
IENQAVPAF

SEQ ID NO: 57402 - protein, 9 aa, Homo sapiens
  misc_feature: Table A; Target 57402; HLA-B*15:01; PAGE2; ENSG00000234068; TAA
IENQAVPAF

SEQ ID NO: 57403 - protein, 9 aa, Homo sapiens
  misc_feature: Table A; Target 57403; HLA-B*15:03; PAGE2; ENSG00000234068; TAA
IENQAVPAF

SEQ ID NO: 57404 - protein, 9 aa, Homo sapiens
  misc_feature: Table A; Target 57404; HLA-B*18:01; PAGE2; ENSG00000234068; TAA
IENQAVPAF

SEQ ID NO: 57405 - protein, 9 aa, Homo sapiens
  misc_feature: Table A; Target 57405; HLA-B*27:02; PAGE2; ENSG00000234068; TAA
IENQAVPAF

SEQ ID NO: 57406 - protein, 9 aa, Homo sapiens
  misc_feature: Table A; Target 57406; HLA-B*35:01; PAGE2; ENSG00000234068; TAA
IENQAVPAF

SEQ ID NO: 57407 - protein, 9 aa, Homo sapiens
  misc_feature: Table A; Target 57407; HLA-B*37:01; PAGE2; ENSG00000234068; TAA
IENQAVPAF

SEQ ID NO: 57408 - protein, 9 aa, Homo sapiens
  misc_feature: Table A; Target 57408; HLA-B*38:01; PAGE2; ENSG00000234068; TAA
IENQAVPAF

SEQ ID NO: 57409 - protein, 9 aa, Homo sapiens
  misc_feature: Table A; Target 57409; HLA-B*40:01; PAGE2; ENSG00000234068; TAA
IENQAVPAF

SEQ ID NO: 57410 - protein, 9 aa, Homo sapiens
  misc_feature: Table A; Target 57410; HLA-B*40:02; PAGE2; ENSG00000234068; TAA
IENQAVPAF

SEQ ID NO: 57411 - protein, 9 aa, Homo sapiens
  misc_feature: Table A; Target 57411; HLA-B*44:02; PAGE2; ENSG00000234068; TAA
IENQAVPAF

SEQ ID NO: 57412 - protein, 9 aa, Homo sapiens
  misc_feature: Table A; Target 57412; HLA-B*44:03; PAGE2; ENSG00000234068; TAA
IENQAVPAF

SEQ ID NO: 57413 - protein, 9 aa, Homo sapiens
  misc_feature: Table A; Target 57413; HLA-B*49:01; PAGE2; ENSG00000234068; TAA
IENQAVPAF

SEQ ID NO: 57414 - protein, 9 aa, Homo sapiens
  misc_feature: Table A; Target 57414; HLA-C*02:02; PAGE2; ENSG00000234068; TAA
IENQAVPAF

SEQ ID NO: 57415 - protein, 9 aa, Homo sapiens
  misc_feature: Table A; Target 57415; HLA-C*07:04; PAGE2; ENSG00000234068; TAA
IENQAVPAF

SEQ ID NO: 57416 - protein, 9 aa, Homo sapiens
  misc_feature: Table A; Target 57416; HLA-C*14:02; PAGE2; ENSG00000234068; TAA
IENQAVPAF

SEQ ID NO: 57417 - protein, 9 aa, Homo sapiens
  misc_feature: Table A; Target 57417; HLA-C*16:01; PAGE2; ENSG00000234068; TAA
IENQAVPAF

SEQ ID NO: 57418 - protein, 9 aa, Homo sapiens
  misc_feature: Table A; Target 57418; HLA-C*16:04; PAGE2; ENSG00000234068; TAA
IENQAVPAF

SEQ ID NO: 57419 - protein, 10 aa, Homo sapiens
  misc_feature: Table A; Target 57419; HLA-A*02:01; PAGE2; ENSG00000234068; TAA
IMPTFDLTKV

SEQ ID NO: 57420 - protein, 9 aa, Homo sapiens
  misc_feature: Table A; Target 57420; HLA-B*27:05; PAGE2; ENSG00000234068; TAA
IVQEPTEEK

SEQ ID NO: 57421 - protein, 9 aa, Homo sapiens
  misc_feature: Table A; Target 57421; HLA-B*46:01; PAGE2; ENSG00000234068; TAA
IVQEPTEEK

SEQ ID NO: 57422 - protein, 10 aa, Homo sapiens
  misc_feature: Table A; Target 57422; HLA-B*58:01; PAGE2; ENSG00000234068; TAA
KVLEAGDAQP

SEQ ID NO: 57423 - protein, 10 aa, Homo sapiens
  misc_feature: Table A; Target 57423; HLA-B*54:01; PAGE2; ENSG00000234068; TAA
MPTFDLTKVL

SEQ ID NO: 57424 - protein, 11 aa, Homo sapiens
  misc_feature: Table A; Target 57424; HLA-B*27:02; PAGE2; ENSG00000234068; TAA
PAFQGPDMEAF

SEQ ID NO: 57425 - protein, 9 aa, Homo sapiens
  misc_feature: Table A; Target 57425; HLA-A*31:01; PAGE2; ENSG00000234068; TAA
RARSQSSER

SEQ ID NO: 57426 - protein, 9 aa, Homo sapiens
  misc_feature: Table A; Target 57426; HLA-C*04:01; PAGE2; ENSG00000234068; TAA
TFDLTKVLE

SEQ ID NO: 57427 - protein, 9 aa, Homo sapiens
  misc_feature: Table A; Target 57427; HLA-B*07:02; PAGE2; ENSG00000234068; TAA
VPAFQGPDM

SEQ ID NO: 57428 - protein, 9 aa, Homo sapiens
  misc_feature: Table A; Target 57428; HLA-B*35:01; PAGE2; ENSG00000234068; TAA
VPAFQGPDM

SEQ ID NO: 57429 - protein, 9 aa, Homo sapiens
  misc_feature: Table A; Target 57429; HLA-B*35:03; PAGE2; ENSG00000234068; TAA
VPAFQGPDM

SEQ ID NO: 57430 - protein, 9 aa, Homo sapiens
  misc_feature: Table A; Target 57430; HLA-B*51:01; PAGE2; ENSG00000234068; TAA
VPAFQGPDM

SEQ ID NO: 57431 - protein, 9 aa, Homo sapiens
  misc_feature: Table A; Target 57431; HLA-B*55:01; PAGE2; ENSG00000234068; TAA
VPAFQGPDM

SEQ ID NO: 57432 - protein, 9 aa, Homo sapiens
  misc_feature: Table A; Target 57432; HLA-B*56:01; PAGE2; ENSG00000234068; TAA
VPAFQGPDM

SEQ ID NO: 57433 - protein, 9 aa, Homo sapiens
  misc_feature: Table A; Target 57433; HLA-C*03:03; PAGE2; ENSG00000234068; TAA
VPAFQGPDM

SEQ ID NO: 57434 - protein, 9 aa, Homo sapiens
  misc_feature: Table A; Target 57434; HLA-C*07:02; PAGE2; ENSG00000234068; TAA
VPAFQGPDM

SEQ ID NO: 57435 - protein, 11 aa, Homo sapiens
  misc_feature: Table A; Target 57435; HLA-B*35:03; PAGE2; ENSG00000234068; TAA
VPAFQGPDMEA

SEQ ID NO: 57436 - protein, 11 aa, Homo sapiens
  misc_feature: Table A; Target 57436; HLA-B*54:01; PAGE2; ENSG00000234068; TAA
VPAFQGPDMEA

SEQ ID NO: 57437 - protein, 11 aa, Homo sapiens
  misc_feature: Table A; Target 57437; HLA-B*55:01; PAGE2; ENSG00000234068; TAA
VPAFQGPDMEA

SEQ ID NO: 57438 - protein, 11 aa, Homo sapiens
  misc_feature: Table A; Target 57438; HLA-B*56:01; PAGE2; ENSG00000234068; TAA
VPAFQGPDMEA

SEQ ID NO: 57439 - protein, 11 aa, Homo sapiens
  misc_feature: Table A; Target 57439; HLA-C*06:02; PAGE2; ENSG00000234068; TAA
VPAFQGPDMEA

SEQ ID NO: 57440 - protein, 9 aa, Homo sapiens
  misc_feature: Table A; Target 57440; HLA-B*39:01; PAGE2,PAGE2B; ENSG00000234068,ENSG00000238269; TAA,TAA
DEPGDGPDV

SEQ ID NO: 57441 - protein, 10 aa, Homo sapiens
  misc_feature: Table A; Target 57441; HLA-B*39:01; PAGE2,PAGE2B; ENSG00000234068,ENSG00000238269; TAA,TAA
DEPGDGPDVR

SEQ ID NO: 57442 - protein, 9 aa, Homo sapiens
  misc_feature: Table A; Target 57442; HLA-B*51:01; PAGE2,PAGE2B; ENSG00000234068,ENSG00000238269; TAA,TAA
DGPDVREGI

SEQ ID NO: 57443 - protein, 11 aa, Homo sapiens
  misc_feature: Table A; Target 57443; HLA-B*39:01; PAGE2,PAGE2B; ENSG00000234068,ENSG00000238269; TAA,TAA
DQESSQPVGSV

SEQ ID NO: 57444 - protein, 10 aa, Homo sapiens
  misc_feature: Table A; Target 57444; HLA-A*25:01; PAGE2,PAGE2B; ENSG00000234068,ENSG00000238269; TAA,TAA
DVREGIMPTF

SEQ ID NO: 57445 - protein, 10 aa, Homo sapiens
  misc_feature: Table A; Target 57445; HLA-A*26:01; PAGE2,PAGE2B; ENSG00000234068,ENSG00000238269; TAA,TAA
DVREGIMPTF

SEQ ID NO: 57446 - protein, 10 aa, Homo sapiens
  misc_feature: Table A; Target 57446; HLA-A*33:01; PAGE2,PAGE2B; ENSG00000234068,ENSG00000238269; TAA,TAA
DVREGIMPTF

SEQ ID NO: 57447 - protein, 10 aa, Homo sapiens
  misc_feature: Table A; Target 57447; HLA-A*33:03; PAGE2,PAGE2B; ENSG00000234068,ENSG00000238269; TAA,TAA
DVREGIMPTF

SEQ ID NO: 57448 - protein, 11 aa, Homo sapiens
  misc_feature: Table A; Target 57448; HLA-C*07:06; PAGE2,PAGE2B; ENSG00000234068,ENSG00000238269; TAA,TAA
EAFQQELALLK

SEQ ID NO: 57449 - protein, 10 aa, Homo sapiens
  misc_feature: Table A; Target 57449; HLA-A*25:01; PAGE2,PAGE2B; ENSG00000234068,ENSG00000238269; TAA,TAA
ESSQPVGSVI

SEQ ID NO: 57450 - protein, 10 aa, Homo sapiens
  misc_feature: Table A; Target 57450; HLA-A*68:01; PAGE2,PAGE2B; ENSG00000234068,ENSG00000238269; TAA,TAA
ESSQPVGSVI

SEQ ID NO: 57451 - protein, 10 aa, Homo sapiens
  misc_feature: Table A; Target 57451; HLA-A*68:02; PAGE2,PAGE2B; ENSG00000234068,ENSG00000238269; TAA,TAA
ESSQPVGSVI

SEQ ID NO: 57452 - protein, 10 aa, Homo sapiens
  misc_feature: Table A; Target 57452; HLA-C*07:06; PAGE2,PAGE2B; ENSG00000234068,ENSG00000238269; TAA,TAA
ESSQPVGSVI

SEQ ID NO: 57453 - protein, 9 aa, Homo sapiens
  misc_feature: Table A; Target 57453; HLA-B*08:01; PAGE2,PAGE2B; ENSG00000234068,ENSG00000238269; TAA,TAA
FDLTKVLEA

SEQ ID NO: 57454 - protein, 9 aa, Homo sapiens
  misc_feature: Table A; Target 57454; HLA-B*54:01; PAGE2,PAGE2B; ENSG00000234068,ENSG00000238269; TAA,TAA
FDLTKVLEA

SEQ ID NO: 57455 - protein, 10 aa, Homo sapiens
  misc_feature: Table A; Target 57455; HLA-A*03:01; PAGE2,PAGE2B; ENSG00000234068,ENSG00000238269; TAA,TAA
GIMPTFDLTK

SEQ ID NO: 57456 - protein, 10 aa, Homo sapiens
  misc_feature: Table A; Target 57456; HLA-A*03:02; PAGE2,PAGE2B; ENSG00000234068,ENSG00000238269; TAA,TAA
GIMPTFDLTK

SEQ ID NO: 57457 - protein, 10 aa, Homo sapiens
  misc_feature: Table A; Target 57457; HLA-A*11:01; PAGE2,PAGE2B; ENSG00000234068,ENSG00000238269; TAA,TAA
GIMPTFDLTK

SEQ ID NO: 57458 - protein, 10 aa, Homo sapiens
  misc_feature: Table A; Target 57458; HLA-B*27:02; PAGE2,PAGE2B; ENSG00000234068,ENSG00000238269; TAA,TAA
GIMPTFDLTK

SEQ ID NO: 57459 - protein, 11 aa, Homo sapiens
  misc_feature: Table A; Target 57459; HLA-A*02:04; PAGE2,PAGE2B; ENSG00000234068,ENSG00000238269; TAA,TAA
GIMPTFDLTKV

SEQ ID NO: 57460 - protein, 9 aa, Homo sapiens
  misc_feature: Table A; Target 57460; HLA-B*07:02; PAGE2,PAGE2B; ENSG00000234068,ENSG00000238269; TAA,TAA
GPDVREGIM

SEQ ID NO: 57461 - protein, 9 aa, Homo sapiens
  misc_feature: Table A; Target 57461; HLA-B*55:01; PAGE2,PAGE2B; ENSG00000234068,ENSG00000238269; TAA,TAA
GPDVREGIM

SEQ ID NO: 57462 - protein, 9 aa, Homo sapiens
  misc_feature: Table A; Target 57462; HLA-C*03:03; PAGE2,PAGE2B; ENSG00000234068,ENSG00000238269; TAA,TAA
GPDVREGIM

SEQ ID NO: 57463 - protein, 9 aa, Homo sapiens
  misc_feature: Table A; Target 57463; HLA-C*07:02; PAGE2,PAGE2B; ENSG00000234068,ENSG00000238269; TAA,TAA
GPDVREGIM

SEQ ID NO: 57464 - protein, 9 aa, Homo sapiens
  misc_feature: Table A; Target 57464; HLA-C*01:02; PAGE2,PAGE2B; ENSG00000234068,ENSG00000238269; TAA,TAA
IAPSGEIEN

SEQ ID NO: 57465 - protein, 9 aa, Homo sapiens
  misc_feature: Table A; Target 57465; HLA-C*05:01; PAGE2,PAGE2B; ENSG00000234068,ENSG00000238269; TAA,TAA
IEDEPGDGP

SEQ ID NO: 57466 - protein, 9 aa, Homo sapiens
  misc_feature: Table A; Target 57466; HLA-A*03:01; PAGE2,PAGE2B; ENSG00000234068,ENSG00000238269; TAA,TAA
IMPTFDLTK

SEQ ID NO: 57467 - protein, 10 aa, Homo sapiens
  misc_feature: Table A; Target 57467; HLA-A*02:03; PAGE2,PAGE2B; ENSG00000234068,ENSG00000238269; TAA,TAA
IMPTFDLTKV

SEQ ID NO: 57468 - protein, 10 aa, Homo sapiens
  misc_feature: Table A; Target 57468; HLA-A*02:07; PAGE2,PAGE2B; ENSG00000234068,ENSG00000238269; TAA,TAA
IMPTFDLTKV

SEQ ID NO: 57469 - protein, 11 aa, Homo sapiens
  misc_feature: Table A; Target 57469; HLA-A*02:07; PAGE2,PAGE2B; ENSG00000234068,ENSG00000238269; TAA,TAA
IMPTFDLTKVL

SEQ ID NO: 57470 - protein, 9 aa, Homo sapiens
  misc_feature: Table A; Target 57470; HLA-A*01:01; PAGE2,PAGE2B; ENSG00000234068,ENSG00000238269; TAA,TAA
IVQEPTEEK

SEQ ID NO: 57471 - protein, 9 aa, Homo sapiens
  misc_feature: Table A; Target 57471; HLA-A*03:01; PAGE2,PAGE2B; ENSG00000234068,ENSG00000238269; TAA,TAA
IVQEPTEEK

SEQ ID NO: 57472 - protein, 9 aa, Homo sapiens
  misc_feature: Table A; Target 57472; HLA-A*03:02; PAGE2,PAGE2B; ENSG00000234068,ENSG00000238269; TAA,TAA
IVQEPTEEK

SEQ ID NO: 57473 - protein, 9 aa, Homo sapiens
  misc_feature: Table A; Target 57473; HLA-A*11:01; PAGE2,PAGE2B; ENSG00000234068,ENSG00000238269; TAA,TAA
IVQEPTEEK

SEQ ID NO: 57474 - protein, 9 aa, Homo sapiens
  misc_feature: Table A; Target 57474; HLA-A*33:01; PAGE2,PAGE2B; ENSG00000234068,ENSG00000238269; TAA,TAA
IVQEPTEEK

SEQ ID NO: 57475 - protein, 9 aa, Homo sapiens
  misc_feature: Table A; Target 57475; HLA-A*33:03; PAGE2,PAGE2B; ENSG00000234068,ENSG00000238269; TAA,TAA
IVQEPTEEK

SEQ ID NO: 57476 - protein, 9 aa, Homo sapiens
  misc_feature: Table A; Target 57476; HLA-A*68:01; PAGE2,PAGE2B; ENSG00000234068,ENSG00000238269; TAA,TAA
IVQEPTEEK

SEQ ID NO: 57477 - protein, 9 aa, Homo sapiens
  misc_feature: Table A; Target 57477; HLA-B*27:02; PAGE2,PAGE2B; ENSG00000234068,ENSG00000238269; TAA,TAA
IVQEPTEEK

SEQ ID NO: 57478 - protein, 9 aa, Homo sapiens
  misc_feature: Table A; Target 57478; HLA-C*05:01; PAGE2,PAGE2B; ENSG00000234068,ENSG00000238269; TAA,TAA
IVQEPTEEK

SEQ ID NO: 57479 - protein, 9 aa, Homo sapiens
  misc_feature: Table A; Target 57479; HLA-C*07:06; PAGE2,PAGE2B; ENSG00000234068,ENSG00000238269; TAA,TAA
IVQEPTEEK

SEQ ID NO: 57480 - protein, 10 aa, Homo sapiens
  misc_feature: Table A; Target 57480; HLA-A*03:02; PAGE2,PAGE2B; ENSG00000234068,ENSG00000238269; TAA,TAA
IVQEPTEEKR

SEQ ID NO: 57481 - protein, 10 aa, Homo sapiens
  misc_feature: Table A; Target 57481; HLA-A*33:01; PAGE2,PAGE2B; ENSG00000234068,ENSG00000238269; TAA,TAA
IVQEPTEEKR

SEQ ID NO: 57482 - protein, 10 aa, Homo sapiens
  misc_feature: Table A; Target 57482; HLA-A*33:03; PAGE2,PAGE2B; ENSG00000234068,ENSG00000238269; TAA,TAA
IVQEPTEEKR

SEQ ID NO: 57483 - protein, 10 aa, Homo sapiens
  misc_feature: Table A; Target 57483; HLA-A*68:01; PAGE2,PAGE2B; ENSG00000234068,ENSG00000238269; TAA,TAA
IVQEPTEEKR

SEQ ID NO: 57484 - protein, 10 aa, Homo sapiens
  misc_feature: Table A; Target 57484; HLA-B*57:01; PAGE2,PAGE2B; ENSG00000234068,ENSG00000238269; TAA,TAA
IVQEPTEEKR

SEQ ID NO: 57485 - protein, 10 aa, Homo sapiens
  misc_feature: Table A; Target 57485; HLA-C*07:06; PAGE2,PAGE2B; ENSG00000234068,ENSG00000238269; TAA,TAA
IVQEPTEEKR

SEQ ID NO: 57486 - protein, 10 aa, Homo sapiens
  misc_feature: Table A; Target 57486; HLA-C*07:04; PAGE2,PAGE2B; ENSG00000234068,ENSG00000238269; TAA,TAA
KVLEAGDAQP

SEQ ID NO: 57487 - protein, 8 aa, Homo sapiens
  misc_feature: Table A; Target 57487; HLA-A*30:01; PAGE2,PAGE2B; ENSG00000234068,ENSG00000238269; TAA,TAA
MEAFQQEL

SEQ ID NO: 57488 - protein, 8 aa, Homo sapiens
  misc_feature: Table A; Target 57488; HLA-B*18:01; PAGE2,PAGE2B; ENSG00000234068,ENSG00000238269; TAA,TAA
MEAFQQEL

SEQ ID NO: 57489 - protein, 8 aa, Homo sapiens
  misc_feature: Table A; Target 57489; HLA-B*27:05; PAGE2,PAGE2B; ENSG00000234068,ENSG00000238269; TAA,TAA
MEAFQQEL

SEQ ID NO: 57490 - protein, 8 aa, Homo sapiens
  misc_feature: Table A; Target 57490; HLA-B*37:01; PAGE2,PAGE2B; ENSG00000234068,ENSG00000238269; TAA,TAA
MEAFQQEL

SEQ ID NO: 57491 - protein, 8 aa, Homo sapiens
  misc_feature: Table A; Target 57491; HLA-B*39:01; PAGE2,PAGE2B; ENSG00000234068,ENSG00000238269; TAA,TAA
MEAFQQEL

SEQ ID NO: 57492 - protein, 8 aa, Homo sapiens
  misc_feature: Table A; Target 57492; HLA-B*40:01; PAGE2,PAGE2B; ENSG00000234068,ENSG00000238269; TAA,TAA
MEAFQQEL

SEQ ID NO: 57493 - protein, 8 aa, Homo sapiens
  misc_feature: Table A; Target 57493; HLA-B*40:02; PAGE2,PAGE2B; ENSG00000234068,ENSG00000238269; TAA,TAA
MEAFQQEL

SEQ ID NO: 57494 - protein, 8 aa, Homo sapiens
  misc_feature: Table A; Target 57494; HLA-B*44:02; PAGE2,PAGE2B; ENSG00000234068,ENSG00000238269; TAA,TAA
MEAFQQEL

SEQ ID NO: 57495 - protein, 8 aa, Homo sapiens
  misc_feature: Table A; Target 57495; HLA-B*49:01; PAGE2,PAGE2B; ENSG00000234068,ENSG00000238269; TAA,TAA
MEAFQQEL

SEQ ID NO: 57496 - protein, 8 aa, Homo sapiens
  misc_feature: Table A; Target 57496; HLA-C*03:04; PAGE2,PAGE2B; ENSG00000234068,ENSG00000238269; TAA,TAA
MEAFQQEL

SEQ ID NO: 57497 - protein, 8 aa, Homo sapiens
  misc_feature: Table A; Target 57497; HLA-C*07:04; PAGE2,PAGE2B; ENSG00000234068,ENSG00000238269; TAA,TAA
MEAFQQEL

SEQ ID NO: 57498 - protein, 8 aa, Homo sapiens
  misc_feature: Table A; Target 57498; HLA-C*16:04; PAGE2,PAGE2B; ENSG00000234068,ENSG00000238269; TAA,TAA
MEAFQQEL

SEQ ID NO: 57499 - protein, 9 aa, Homo sapiens
  misc_feature: Table A; Target 57499; HLA-B*49:01; PAGE2,PAGE2B; ENSG00000234068,ENSG00000238269; TAA,TAA
MEAFQQELA

SEQ ID NO: 57500 - protein, 10 aa, Homo sapiens
  misc_feature: Table A; Target 57500; HLA-A*30:01; PAGE2,PAGE2B; ENSG00000234068,ENSG00000238269; TAA,TAA
MEAFQQELAL

SEQ ID NO: 57501 - protein, 10 aa, Homo sapiens
  misc_feature: Table A; Target 57501; HLA-B*40:01; PAGE2,PAGE2B; ENSG00000234068,ENSG00000238269; TAA,TAA
MEAFQQELAL

SEQ ID NO: 57502 - protein, 9 aa, Homo sapiens
  misc_feature: Table A; Target 57502; HLA-B*35:01; PAGE2,PAGE2B; ENSG00000234068,ENSG00000238269; TAA,TAA
MPTFDLTKV

SEQ ID NO: 57503 - protein, 9 aa, Homo sapiens
  misc_feature: Table A; Target 57503; HLA-B*35:03; PAGE2,PAGE2B; ENSG00000234068,ENSG00000238269; TAA,TAA
MPTFDLTKV

SEQ ID NO: 57504 - protein, 9 aa, Homo sapiens
  misc_feature: Table A; Target 57504; HLA-B*51:01; PAGE2,PAGE2B; ENSG00000234068,ENSG00000238269; TAA,TAA
MPTFDLTKV

SEQ ID NO: 57505 - protein, 9 aa, Homo sapiens
  misc_feature: Table A; Target 57505; HLA-B*54:01; PAGE2,PAGE2B; ENSG00000234068,ENSG00000238269; TAA,TAA
MPTFDLTKV

SEQ ID NO: 57506 - protein, 9 aa, Homo sapiens
  misc_feature: Table A; Target 57506; HLA-B*55:01; PAGE2,PAGE2B; ENSG00000234068,ENSG00000238269; TAA,TAA
MPTFDLTKV

SEQ ID NO: 57507 - protein, 9 aa, Homo sapiens
  misc_feature: Table A; Target 57507; HLA-B*56:01; PAGE2,PAGE2B; ENSG00000234068,ENSG00000238269; TAA,TAA
MPTFDLTKV

SEQ ID NO: 57508 - protein, 10 aa, Homo sapiens
  misc_feature: Table A; Target 57508; HLA-B*35:01; PAGE2,PAGE2B; ENSG00000234068,ENSG00000238269; TAA,TAA
MPTFDLTKVL

SEQ ID NO: 57509 - protein, 10 aa, Homo sapiens
  misc_feature: Table A; Target 57509; HLA-B*35:03; PAGE2,PAGE2B; ENSG00000234068,ENSG00000238269; TAA,TAA
MPTFDLTKVL

SEQ ID NO: 57510 - protein, 9 aa, Homo sapiens
  misc_feature: Table A; Target 57510; HLA-B*37:01; PAGE2,PAGE2B; ENSG00000234068,ENSG00000238269; TAA,TAA
NDQESSQPV

SEQ ID NO: 57511 - protein, 10 aa, Homo sapiens
  misc_feature: Table A; Target 57511; HLA-B*49:01; PAGE2,PAGE2B; ENSG00000234068,ENSG00000238269; TAA,TAA
QESSQPVGSV

SEQ ID NO: 57512 - protein, 11 aa, Homo sapiens
  misc_feature: Table A; Target 57512; HLA-A*30:01; PAGE2,PAGE2B; ENSG00000234068,ENSG00000238269; TAA,TAA
QESSQPVGSVI

SEQ ID NO: 57513 - protein, 11 aa, Homo sapiens
  misc_feature: Table A; Target 57513; HLA-B*38:01; PAGE2,PAGE2B; ENSG00000234068,ENSG00000238269; TAA,TAA
QESSQPVGSVI

SEQ ID NO: 57514 - protein, 11 aa, Homo sapiens
  misc_feature: Table A; Target 57514; HLA-B*40:01; PAGE2,PAGE2B; ENSG00000234068,ENSG00000238269; TAA,TAA
QESSQPVGSVI

SEQ ID NO: 57515 - protein, 11 aa, Homo sapiens
  misc_feature: Table A; Target 57515; HLA-B*44:02; PAGE2,PAGE2B; ENSG00000234068,ENSG00000238269; TAA,TAA
QESSQPVGSVI

SEQ ID NO: 57516 - protein, 11 aa, Homo sapiens
  misc_feature: Table A; Target 57516; HLA-B*44:03; PAGE2,PAGE2B; ENSG00000234068,ENSG00000238269; TAA,TAA
QESSQPVGSVI

SEQ ID NO: 57517 - protein, 11 aa, Homo sapiens
  misc_feature: Table A; Target 57517; HLA-B*49:01; PAGE2,PAGE2B; ENSG00000234068,ENSG00000238269; TAA,TAA
QESSQPVGSVI

SEQ ID NO: 57518 - protein, 8 aa, Homo sapiens
  misc_feature: Table A; Target 57518; HLA-B*56:01; PAGE2,PAGE2B; ENSG00000234068,ENSG00000238269; TAA,TAA
QPVGSVIV

SEQ ID NO: 57519 - protein, 9 aa, Homo sapiens
  misc_feature: Table A; Target 57519; HLA-B*35:01; PAGE2,PAGE2B; ENSG00000234068,ENSG00000238269; TAA,TAA
QPVGSVIVQ

SEQ ID NO: 57520 - protein, 11 aa, Homo sapiens
  misc_feature: Table A; Target 57520; HLA-B*56:01; PAGE2,PAGE2B; ENSG00000234068,ENSG00000238269; TAA,TAA
QPVGSVIVQEP

SEQ ID NO: 57521 - protein, 8 aa, Homo sapiens
  misc_feature: Table A; Target 57521; HLA-B*18:01; PAGE2,PAGE2B; ENSG00000234068,ENSG00000238269; TAA,TAA
REGIMPTF

SEQ ID NO: 57522 - protein, 8 aa, Homo sapiens
  misc_feature: Table A; Target 57522; HLA-B*37:01; PAGE2,PAGE2B; ENSG00000234068,ENSG00000238269; TAA,TAA
REGIMPTF

SEQ ID NO: 57523 - protein, 8 aa, Homo sapiens
  misc_feature: Table A; Target 57523; HLA-B*44:02; PAGE2,PAGE2B; ENSG00000234068,ENSG00000238269; TAA,TAA
REGIMPTF

SEQ ID NO: 57524 - protein, 8 aa, Homo sapiens
  misc_feature: Table A; Target 57524; HLA-B*44:03; PAGE2,PAGE2B; ENSG00000234068,ENSG00000238269; TAA,TAA
REGIMPTF

SEQ ID NO: 57525 - protein, 8 aa, Homo sapiens
  misc_feature: Table A; Target 57525; HLA-B*13:02; PAGE2,PAGE2B; ENSG00000234068,ENSG00000238269; TAA,TAA
SQPVGSVI

SEQ ID NO: 57526 - protein, 8 aa, Homo sapiens
  misc_feature: Table A; Target 57526; HLA-B*15:01; PAGE2,PAGE2B; ENSG00000234068,ENSG00000238269; TAA,TAA
SQPVGSVI

SEQ ID NO: 57527 - protein, 8 aa, Homo sapiens
  misc_feature: Table A; Target 57527; HLA-B*15:03; PAGE2,PAGE2B; ENSG00000234068,ENSG00000238269; TAA,TAA
SQPVGSVI

SEQ ID NO: 57528 - protein, 8 aa, Homo sapiens
  misc_feature: Table A; Target 57528; HLA-B*39:01; PAGE2,PAGE2B; ENSG00000234068,ENSG00000238269; TAA,TAA
SQPVGSVI

SEQ ID NO: 57529 - protein, 8 aa, Homo sapiens
  misc_feature: Table A; Target 57529; HLA-C*01:02; PAGE2,PAGE2B; ENSG00000234068,ENSG00000238269; TAA,TAA
SQPVGSVI

SEQ ID NO: 57530 - protein, 8 aa, Homo sapiens
  misc_feature: Table A; Target 57530; HLA-C*05:01; PAGE2,PAGE2B; ENSG00000234068,ENSG00000238269; TAA,TAA
SQPVGSVI

SEQ ID NO: 57531 - protein, 8 aa, Homo sapiens
  misc_feature: Table A; Target 57531; HLA-C*14:02; PAGE2,PAGE2B; ENSG00000234068,ENSG00000238269; TAA,TAA
SQPVGSVI

SEQ ID NO: 57532 - protein, 9 aa, Homo sapiens
  misc_feature: Table A; Target 57532; HLA-B*13:02; PAGE2,PAGE2B; ENSG00000234068,ENSG00000238269; TAA,TAA
SQPVGSVIV

SEQ ID NO: 57533 - protein, 9 aa, Homo sapiens
  misc_feature: Table A; Target 57533; HLA-A*32:01; PAGE2,PAGE2B; ENSG00000234068,ENSG00000238269; TAA,TAA
SSQPVGSVI

SEQ ID NO: 57534 - protein, 9 aa, Homo sapiens
  misc_feature: Table A; Target 57534; HLA-B*13:02; PAGE2,PAGE2B; ENSG00000234068,ENSG00000238269; TAA,TAA
SSQPVGSVI

SEQ ID NO: 57535 - protein, 9 aa, Homo sapiens
  misc_feature: Table A; Target 57535; HLA-B*38:01; PAGE2,PAGE2B; ENSG00000234068,ENSG00000238269; TAA,TAA
SSQPVGSVI

SEQ ID NO: 57536 - protein, 9 aa, Homo sapiens
  misc_feature: Table A; Target 57536; HLA-B*39:01; PAGE2,PAGE2B; ENSG00000234068,ENSG00000238269; TAA,TAA
SSQPVGSVI

SEQ ID NO: 57537 - protein, 9 aa, Homo sapiens
  misc_feature: Table A; Target 57537; HLA-B*46:01; PAGE2,PAGE2B; ENSG00000234068,ENSG00000238269; TAA,TAA
SSQPVGSVI

SEQ ID NO: 57538 - protein, 9 aa, Homo sapiens
  misc_feature: Table A; Target 57538; HLA-B*58:01; PAGE2,PAGE2B; ENSG00000234068,ENSG00000238269; TAA,TAA
SSQPVGSVI

SEQ ID NO: 57539 - protein, 9 aa, Homo sapiens
  misc_feature: Table A; Target 57539; HLA-C*03:03; PAGE2,PAGE2B; ENSG00000234068,ENSG00000238269; TAA,TAA
SSQPVGSVI

SEQ ID NO: 57540 - protein, 9 aa, Homo sapiens
  misc_feature: Table A; Target 57540; HLA-C*03:04; PAGE2,PAGE2B; ENSG00000234068,ENSG00000238269; TAA,TAA
SSQPVGSVI

SEQ ID NO: 57541 - protein, 9 aa, Homo sapiens
  misc_feature: Table A; Target 57541; HLA-C*05:01; PAGE2,PAGE2B; ENSG00000234068,ENSG00000238269; TAA,TAA
SSQPVGSVI

SEQ ID NO: 57542 - protein, 9 aa, Homo sapiens
  misc_feature: Table A; Target 57542; HLA-C*16:02; PAGE2,PAGE2B; ENSG00000234068,ENSG00000238269; TAA,TAA
SSQPVGSVI

SEQ ID NO: 57543 - protein, 11 aa, Homo sapiens
  misc_feature: Table A; Target 57543; HLA-A*03:01; PAGE2,PAGE2B; ENSG00000234068,ENSG00000238269; TAA,TAA
SVIVQEPTEEK

SEQ ID NO: 57544 - protein, 11 aa, Homo sapiens
  misc_feature: Table A; Target 57544; HLA-A*11:01; PAGE2,PAGE2B; ENSG00000234068,ENSG00000238269; TAA,TAA
SVIVQEPTEEK

SEQ ID NO: 57545 - protein, 11 aa, Homo sapiens
  misc_feature: Table A; Target 57545; HLA-C*07:06; PAGE2,PAGE2B; ENSG00000234068,ENSG00000238269; TAA,TAA
SVIVQEPTEEK

SEQ ID NO: 57546 - protein, 8 aa, Homo sapiens
  misc_feature: Table A; Target 57546; HLA-B*35:01; PAGE2,PAGE2B; ENSG00000234068,ENSG00000238269; TAA,TAA
TFDLTKVL

SEQ ID NO: 57547 - protein, 8 aa, Homo sapiens
  misc_feature: Table A; Target 57547; HLA-B*35:03; PAGE2,PAGE2B; ENSG00000234068,ENSG00000238269; TAA,TAA
TFDLTKVL

SEQ ID NO: 57548 - protein, 8 aa, Homo sapiens
  misc_feature: Table A; Target 57548; HLA-C*04:01; PAGE2,PAGE2B; ENSG00000234068,ENSG00000238269; TAA,TAA
TFDLTKVL

SEQ ID NO: 57549 - protein, 10 aa, Homo sapiens
  misc_feature: Table A; Target 57549; HLA-A*03:02; PAGE2,PAGE2B; ENSG00000234068,ENSG00000238269; TAA,TAA
VIVQEPTEEK

SEQ ID NO: 57550 - protein, 10 aa, Homo sapiens
  misc_feature: Table A; Target 57550; HLA-A*11:01; PAGE2,PAGE2B; ENSG00000234068,ENSG00000238269; TAA,TAA
VIVQEPTEEK

SEQ ID NO: 57551 - protein, 10 aa, Homo sapiens
  misc_feature: Table A; Target 57551; HLA-B*27:02; PAGE2,PAGE2B; ENSG00000234068,ENSG00000238269; TAA,TAA
VIVQEPTEEK

SEQ ID NO: 57552 - protein, 9 aa, Homo sapiens
  misc_feature: Table A; Target 57552; HLA-B*27:02; PAGE2,PAGE2B; ENSG00000234068,ENSG00000238269; TAA,TAA
VREGIMPTF

SEQ ID NO: 57553 - protein, 9 aa, Homo sapiens
  misc_feature: Table A; Target 57553; HLA-B*27:05; PAGE2,PAGE2B; ENSG00000234068,ENSG00000238269; TAA,TAA
VREGIMPTF

SEQ ID NO: 57554 - protein, 9 aa, Homo sapiens
  misc_feature: Table A; Target 57554; HLA-B*38:01; PAGE2,PAGE2B; ENSG00000234068,ENSG00000238269; TAA,TAA
VREGIMPTF

SEQ ID NO: 57555 - protein, 9 aa, Homo sapiens
  misc_feature: Table A; Target 57555; HLA-B*39:01; PAGE2,PAGE2B; ENSG00000234068,ENSG00000238269; TAA,TAA
VREGIMPTF

SEQ ID NO: 57556 - protein, 9 aa, Homo sapiens
  misc_feature: Table A; Target 57556; HLA-C*06:02; PAGE2,PAGE2B; ENSG00000234068,ENSG00000238269; TAA,TAA
VREGIMPTF

SEQ ID NO: 57557 - protein, 9 aa, Homo sapiens
  misc_feature: Table A; Target 57557; HLA-C*16:04; PAGE2,PAGE2B; ENSG00000234068,ENSG00000238269; TAA,TAA
VREGIMPTF

SEQ ID NO: 57558 - protein, 8 aa, Homo sapiens
  misc_feature: Table A; Target 57558; HLA-C*14:02; PAGE2,PAGE2B,PAGE5; ENSG00000234068,ENSG00000238269,ENSG00000158639; TAA,TAA,TAA
AFQQELAL

SEQ ID NO: 57559 - protein, 10 aa, Homo sapiens
  misc_feature: Table A; Target 57559; HLA-B*27:02; PAGE2,PAGE2B,PAGE5; ENSG00000234068,ENSG00000238269,ENSG00000158639; TAA,TAA,TAA
AFQQELALLK

SEQ ID NO: 57560 - protein, 9 aa, Homo sapiens
  misc_feature: Table A; Target 57560; HLA-A*25:01; PAGE2,PAGE2B,PAGE5; ENSG00000234068,ENSG00000238269,ENSG00000158639; TAA,TAA,TAA
EAFQQELAL

SEQ ID NO: 57561 - protein, 9 aa, Homo sapiens
  misc_feature: Table A; Target 57561; HLA-A*68:01; PAGE2,PAGE2B,PAGE5; ENSG00000234068,ENSG00000238269,ENSG00000158639; TAA,TAA,TAA
EAFQQELAL

SEQ ID NO: 57562 - protein, 9 aa, Homo sapiens
  misc_feature: Table A; Target 57562; HLA-B*35:01; PAGE2,PAGE2B,PAGE5; ENSG00000234068,ENSG00000238269,ENSG00000158639; TAA,TAA,TAA
EAFQQELAL

SEQ ID NO: 57563 - protein, 9 aa, Homo sapiens
  misc_feature: Table A; Target 57563; HLA-B*35:03; PAGE2,PAGE2B,PAGE5; ENSG00000234068,ENSG00000238269,ENSG00000158639; TAA,TAA,TAA
EAFQQELAL

SEQ ID NO: 57564 - protein, 9 aa, Homo sapiens
  misc_feature: Table A; Target 57564; HLA-B*39:01; PAGE2,PAGE2B,PAGE5; ENSG00000234068,ENSG00000238269,ENSG00000158639; TAA,TAA,TAA
EAFQQELAL

SEQ ID NO: 57565 - protein, 9 aa, Homo sapiens
  misc_feature: Table A; Target 57565; HLA-B*40:01; PAGE2,PAGE2B,PAGE5; ENSG00000234068,ENSG00000238269,ENSG00000158639; TAA,TAA,TAA
EAFQQELAL

SEQ ID NO: 57566 - protein, 9 aa, Homo sapiens
  misc_feature: Table A; Target 57566; HLA-B*51:01; PAGE2,PAGE2B,PAGE5; ENSG00000234068,ENSG00000238269,ENSG00000158639; TAA,TAA,TAA
EAFQQELAL

SEQ ID NO: 57567 - protein, 9 aa, Homo sapiens
  misc_feature: Table A; Target 57567; HLA-C*03:03; PAGE2,PAGE2B,PAGE5; ENSG00000234068,ENSG00000238269,ENSG00000158639; TAA,TAA,TAA
EAFQQELAL

SEQ ID NO: 57568 - protein, 9 aa, Homo sapiens
  misc_feature: Table A; Target 57568; HLA-C*07:06; PAGE2,PAGE2B,PAGE5; ENSG00000234068,ENSG00000238269,ENSG00000158639; TAA,TAA,TAA
EAFQQELAL

SEQ ID NO: 57569 - protein, 10 aa, Homo sapiens
  misc_feature: Table A; Target 57569; HLA-A*25:01; PAGE2,PAGE2B,PAGE5; ENSG00000234068,ENSG00000238269,ENSG00000158639; TAA,TAA,TAA
EAFQQELALL

SEQ ID NO: 57570 - protein, 10 aa, Homo sapiens
  misc_feature: Table A; Target 57570; HLA-A*26:01; PAGE2,PAGE2B,PAGE5; ENSG00000234068,ENSG00000238269,ENSG00000158639; TAA,TAA,TAA
EAFQQELALL

SEQ ID NO: 57571 - protein, 10 aa, Homo sapiens
  misc_feature: Table A; Target 57571; HLA-A*33:03; PAGE2,PAGE2B,PAGE5; ENSG00000234068,ENSG00000238269,ENSG00000158639; TAA,TAA,TAA
EAFQQELALL

SEQ ID NO: 57572 - protein, 10 aa, Homo sapiens
  misc_feature: Table A; Target 57572; HLA-A*68:01; PAGE2,PAGE2B,PAGE5; ENSG00000234068,ENSG00000238269,ENSG00000158639; TAA,TAA,TAA
EAFQQELALL

SEQ ID NO: 57573 - protein, 10 aa, Homo sapiens
  misc_feature: Table A; Target 57573; HLA-A*68:02; PAGE2,PAGE2B,PAGE5; ENSG00000234068,ENSG00000238269,ENSG00000158639; TAA,TAA,TAA
EAFQQELALL

SEQ ID NO: 57574 - protein, 11 aa, Homo sapiens
  misc_feature: Table A; Target 57574; HLA-A*68:01; PAGE2,PAGE2B,PAGE5; ENSG00000234068,ENSG00000238269,ENSG00000158639; TAA,TAA,TAA
EAFQQELALLK

SEQ ID NO: 57575 - protein, 11 aa, Homo sapiens
  misc_feature: Table A; Target 57575; HLA-B*27:02; PAGE2,PAGE2B,PAGE5; ENSG00000234068,ENSG00000238269,ENSG00000158639; TAA,TAA,TAA
EAFQQELALLK

SEQ ID NO: 57576 - protein, 11 aa, Homo sapiens
  misc_feature: Table A; Target 57576; HLA-B*38:01; PAGE2,PAGE2B,PAGE5; ENSG00000234068,ENSG00000238269,ENSG00000158639; TAA,TAA,TAA
EEEPPTDNQGI

SEQ ID NO: 57577 - protein, 11 aa, Homo sapiens
  misc_feature: Table A; Target 57577; HLA-B*44:02; PAGE2,PAGE2B,PAGE5; ENSG00000234068,ENSG00000238269,ENSG00000158639; TAA,TAA,TAA
EEEPPTDNQGI

SEQ ID NO: 57578 - protein, 10 aa, Homo sapiens
  misc_feature: Table A; Target 57578; HLA-B*44:02; PAGE2,PAGE2B,PAGE5; ENSG00000234068,ENSG00000238269,ENSG00000158639; TAA,TAA,TAA
EEPPTDNQGI

SEQ ID NO: 57579 - protein, 10 aa, Homo sapiens
  misc_feature: Table A; Target 57579; HLA-B*44:03; PAGE2,PAGE2B,PAGE5; ENSG00000234068,ENSG00000238269,ENSG00000158639; TAA,TAA,TAA
EEPPTDNQGI

SEQ ID NO: 57580 - protein, 10 aa, Homo sapiens
  misc_feature: Table A; Target 57580; HLA-A*02:01; PAGE2,PAGE2B,PAGE5; ENSG00000234068,ENSG00000238269,ENSG00000158639; TAA,TAA,TAA
FQQELALLKI

SEQ ID NO: 57581 - protein, 10 aa, Homo sapiens
  misc_feature: Table A; Target 57581; HLA-A*02:03; PAGE2,PAGE2B,PAGE5; ENSG00000234068,ENSG00000238269,ENSG00000158639; TAA,TAA,TAA
FQQELALLKI

SEQ ID NO: 57582 - protein, 10 aa, Homo sapiens
  misc_feature: Table A; Target 57582; HLA-A*02:04; PAGE2,PAGE2B,PAGE5; ENSG00000234068,ENSG00000238269,ENSG00000158639; TAA,TAA,TAA
FQQELALLKI

SEQ ID NO: 57583 - protein, 10 aa, Homo sapiens
  misc_feature: Table A; Target 57583; HLA-B*13:02; PAGE2,PAGE2B,PAGE5; ENSG00000234068,ENSG00000238269,ENSG00000158639; TAA,TAA,TAA
FQQELALLKI

SEQ ID NO: 57584 - protein, 8 aa, Homo sapiens
  misc_feature: Table A; Target 57584; HLA-B*44:03; PAGE2,PAGE2B,PAGE5; ENSG00000234068,ENSG00000238269,ENSG00000158639; TAA,TAA,TAA
QELALLKI

SEQ ID NO: 57585 - protein, 8 aa, Homo sapiens
  misc_feature: Table A; Target 57585; HLA-B*49:01; PAGE2,PAGE2B,PAGE5; ENSG00000234068,ENSG00000238269,ENSG00000158639; TAA,TAA,TAA
QELALLKI

SEQ ID NO: 57586 - protein, 9 aa, Homo sapiens
  misc_feature: Table A; Target 57586; HLA-B*13:02; PAGE2,PAGE2B,PAGE5; ENSG00000234068,ENSG00000238269,ENSG00000158639; TAA,TAA,TAA
QQELALLKI

SEQ ID NO: 57587 - protein, 9 aa, Homo sapiens
  misc_feature: Table A; Target 57587; HLA-B*38:01; PAGE2,PAGE2B,PAGE5; ENSG00000234068,ENSG00000238269,ENSG00000158639; TAA,TAA,TAA
QQELALLKI

SEQ ID NO: 57588 - protein, 10 aa, Homo sapiens
  misc_feature: Table A; Target 57588; HLA-A*33:01; PAGE2,PAGE5; ENSG00000234068,ENSG00000158639; TAA,TAA
EAFQQELALL

SEQ ID NO: 57589 - protein, 9 aa, Homo sapiens
  misc_feature: Table A; Target 57589; HLA-B*07:02; PAGE2B; ENSG00000238269; TAA
APAVQGPDM

SEQ ID NO: 57590 - protein, 9 aa, Homo sapiens
  misc_feature: Table A; Target 57590; HLA-B*35:01; PAGE2B; ENSG00000238269; TAA
APAVQGPDM

SEQ ID NO: 57591 - protein, 9 aa, Homo sapiens
  misc_feature: Table A; Target 57591; HLA-B*35:03; PAGE2B; ENSG00000238269; TAA
APAVQGPDM

SEQ ID NO: 57592 - protein, 9 aa, Homo sapiens
  misc_feature: Table A; Target 57592; HLA-B*39:01; PAGE2B; ENSG00000238269; TAA
APAVQGPDM

SEQ ID NO: 57593 - protein, 9 aa, Homo sapiens
  misc_feature: Table A; Target 57593; HLA-B*55:01; PAGE2B; ENSG00000238269; TAA
APAVQGPDM

SEQ ID NO: 57594 - protein, 9 aa, Homo sapiens
  misc_feature: Table A; Target 57594; HLA-B*56:01; PAGE2B; ENSG00000238269; TAA
APAVQGPDM

SEQ ID NO: 57595 - protein, 9 aa, Homo sapiens
  misc_feature: Table A; Target 57595; HLA-C*07:02; PAGE2B; ENSG00000238269; TAA
APAVQGPDM

SEQ ID NO: 57596 - protein, 9 aa, Homo sapiens
  misc_feature: Table A; Target 57596; HLA-C*16:01; PAGE2B; ENSG00000238269; TAA
APAVQGPDM

SEQ ID NO: 57597 - protein, 11 aa, Homo sapiens
  misc_feature: Table A; Target 57597; HLA-B*07:02; PAGE2B; ENSG00000238269; TAA
APAVQGPDMEA

SEQ ID NO: 57598 - protein, 11 aa, Homo sapiens
  misc_feature: Table A; Target 57598; HLA-B*54:01; PAGE2B; ENSG00000238269; TAA
APAVQGPDMEA

SEQ ID NO: 57599 - protein, 11 aa, Homo sapiens
  misc_feature: Table A; Target 57599; HLA-B*55:01; PAGE2B; ENSG00000238269; TAA
APAVQGPDMEA

SEQ ID NO: 57600 - protein, 11 aa, Homo sapiens
  misc_feature: Table A; Target 57600; HLA-B*56:01; PAGE2B; ENSG00000238269; TAA
APAVQGPDMEA

SEQ ID NO: 57601 - protein, 10 aa, Homo sapiens
  misc_feature: Table A; Target 57601; HLA-A*25:01; PAGE2B; ENSG00000238269; TAA
AVQGPDMEAF

SEQ ID NO: 57602 - protein, 10 aa, Homo sapiens
  misc_feature: Table A; Target 57602; HLA-A*26:01; PAGE2B; ENSG00000238269; TAA
AVQGPDMEAF

SEQ ID NO: 57603 - protein, 10 aa, Homo sapiens
  misc_feature: Table A; Target 57603; HLA-A*30:02; PAGE2B; ENSG00000238269; TAA
AVQGPDMEAF

SEQ ID NO: 57604 - protein, 10 aa, Homo sapiens
  misc_feature: Table A; Target 57604; HLA-B*15:01; PAGE2B; ENSG00000238269; TAA
AVQGPDMEAF

SEQ ID NO: 57605 - protein, 11 aa, Homo sapiens
  misc_feature: Table A; Target 57605; HLA-B*39:01; PAGE2B; ENSG00000238269; TAA
EGAPAVQGPDM

SEQ ID NO: 57606 - protein, 9 aa, Homo sapiens
  misc_feature: Table A; Target 57606; HLA-B*49:01; PAGE2B; ENSG00000238269; TAA
GEIENEGAP

SEQ ID NO: 57607 - protein, 10 aa, Homo sapiens
  misc_feature: Table A; Target 57607; HLA-A*30:01; PAGE2B; ENSG00000238269; TAA
GEIENEGAPA

SEQ ID NO: 57608 - protein, 10 aa, Homo sapiens
  misc_feature: Table A; Target 57608; HLA-B*40:01; PAGE2B; ENSG00000238269; TAA
GEIENEGAPA

SEQ ID NO: 57609 - protein, 10 aa, Homo sapiens
  misc_feature: Table A; Target 57609; HLA-B*40:02; PAGE2B; ENSG00000238269; TAA
GEIENEGAPA

SEQ ID NO: 57610 - protein, 10 aa, Homo sapiens
  misc_feature: Table A; Target 57610; HLA-B*49:01; PAGE2B; ENSG00000238269; TAA
GEIENEGAPA

SEQ ID NO: 57611 - protein, 11 aa, Homo sapiens
  misc_feature: Table A; Target 57611; HLA-A*30:01; PAGE2B; ENSG00000238269; TAA
GEIENEGAPAV

SEQ ID NO: 57612 - protein, 11 aa, Homo sapiens
  misc_feature: Table A; Target 57612; HLA-B*13:02; PAGE2B; ENSG00000238269; TAA
GEIENEGAPAV

SEQ ID NO: 57613 - protein, 11 aa, Homo sapiens
  misc_feature: Table A; Target 57613; HLA-B*40:01; PAGE2B; ENSG00000238269; TAA
GEIENEGAPAV

SEQ ID NO: 57614 - protein, 11 aa, Homo sapiens
  misc_feature: Table A; Target 57614; HLA-B*40:02; PAGE2B; ENSG00000238269; TAA
GEIENEGAPAV

SEQ ID NO: 57615 - protein, 11 aa, Homo sapiens
  misc_feature: Table A; Target 57615; HLA-B*44:02; PAGE2B; ENSG00000238269; TAA
GEIENEGAPAV

SEQ ID NO: 57616 - protein, 11 aa, Homo sapiens
  misc_feature: Table A; Target 57616; HLA-B*44:03; PAGE2B; ENSG00000238269; TAA
GEIENEGAPAV

SEQ ID NO: 57617 - protein, 11 aa, Homo sapiens
  misc_feature: Table A; Target 57617; HLA-B*49:01; PAGE2B; ENSG00000238269; TAA
GEIENEGAPAV

SEQ ID NO: 57618 - protein, 11 aa, Homo sapiens
  misc_feature: Table A; Target 57618; HLA-C*16:04; PAGE2B; ENSG00000238269; TAA
GEIENEGAPAV

SEQ ID NO: 57619 - protein, 11 aa, Homo sapiens
  misc_feature: Table A; Target 57619; HLA-A*33:01; PAGE2B; ENSG00000238269; TAA
HVRTRSQSSER

SEQ ID NO: 57620 - protein, 8 aa, Homo sapiens
  misc_feature: Table A; Target 57620; HLA-B*18:01; PAGE2B; ENSG00000238269; TAA
IENEGAPA

SEQ ID NO: 57621 - protein, 9 aa, Homo sapiens
  misc_feature: Table A; Target 57621; HLA-A*02:01; PAGE2B; ENSG00000238269; TAA
IENEGAPAV

SEQ ID NO: 57622 - protein, 9 aa, Homo sapiens
  misc_feature: Table A; Target 57622; HLA-A*30:01; PAGE2B; ENSG00000238269; TAA
IENEGAPAV

SEQ ID NO: 57623 - protein, 9 aa, Homo sapiens
  misc_feature: Table A; Target 57623; HLA-B*13:02; PAGE2B; ENSG00000238269; TAA
IENEGAPAV

SEQ ID NO: 57624 - protein, 9 aa, Homo sapiens
  misc_feature: Table A; Target 57624; HLA-B*18:01; PAGE2B; ENSG00000238269; TAA
IENEGAPAV

SEQ ID NO: 57625 - protein, 9 aa, Homo sapiens
  misc_feature: Table A; Target 57625; HLA-B*37:01; PAGE2B; ENSG00000238269; TAA
IENEGAPAV

SEQ ID NO: 57626 - protein, 9 aa, Homo sapiens
  misc_feature: Table A; Target 57626; HLA-B*39:01; PAGE2B; ENSG00000238269; TAA
IENEGAPAV

SEQ ID NO: 57627 - protein, 9 aa, Homo sapiens
  misc_feature: Table A; Target 57627; HLA-B*40:01; PAGE2B; ENSG00000238269; TAA
IENEGAPAV

SEQ ID NO: 57628 - protein, 9 aa, Homo sapiens
  misc_feature: Table A; Target 57628; HLA-B*40:02; PAGE2B; ENSG00000238269; TAA
IENEGAPAV

SEQ ID NO: 57629 - protein, 9 aa, Homo sapiens
  misc_feature: Table A; Target 57629; HLA-B*44:02; PAGE2B; ENSG00000238269; TAA
IENEGAPAV

SEQ ID NO: 57630 - protein, 9 aa, Homo sapiens
  misc_feature: Table A; Target 57630; HLA-B*44:03; PAGE2B; ENSG00000238269; TAA
IENEGAPAV

SEQ ID NO: 57631 - protein, 9 aa, Homo sapiens
  misc_feature: Table A; Target 57631; HLA-B*49:01; PAGE2B; ENSG00000238269; TAA
IENEGAPAV

SEQ ID NO: 57632 - protein, 9 aa, Homo sapiens
  misc_feature: Table A; Target 57632; HLA-C*02:02; PAGE2B; ENSG00000238269; TAA
IENEGAPAV

SEQ ID NO: 57633 - protein, 9 aa, Homo sapiens
  misc_feature: Table A; Target 57633; HLA-C*03:04; PAGE2B; ENSG00000238269; TAA
IENEGAPAV

SEQ ID NO: 57634 - protein, 9 aa, Homo sapiens
  misc_feature: Table A; Target 57634; HLA-C*14:02; PAGE2B; ENSG00000238269; TAA
IENEGAPAV

SEQ ID NO: 57635 - protein, 9 aa, Homo sapiens
  misc_feature: Table A; Target 57635; HLA-C*16:02; PAGE2B; ENSG00000238269; TAA
IENEGAPAV

SEQ ID NO: 57636 - protein, 9 aa, Homo sapiens
  misc_feature: Table A; Target 57636; HLA-C*16:04; PAGE2B; ENSG00000238269; TAA
IENEGAPAV

SEQ ID NO: 57637 - protein, 10 aa, Homo sapiens
  misc_feature: Table A; Target 57637; HLA-B*27:02; PAGE2B; ENSG00000238269; TAA
IENEGAPAVQ

SEQ ID NO: 57638 - protein, 11 aa, Homo sapiens
  misc_feature: Table A; Target 57638; HLA-B*27:02; PAGE2B; ENSG00000238269; TAA
PAVQGPDMEAF

SEQ ID NO: 57639 - protein, 9 aa, Homo sapiens
  misc_feature: Table A; Target 57639; HLA-A*31:01; PAGE2B; ENSG00000238269; TAA
RTRSQSSER

SEQ ID NO: 57640 - protein, 9 aa, Homo sapiens
  misc_feature: Table A; Target 57640; HLA-A*33:03; PAGE2B; ENSG00000238269; TAA
RTRSQSSER

SEQ ID NO: 57641 - protein, 9 aa, Homo sapiens
  misc_feature: Table A; Target 57641; HLA-A*23:01; PAGE2B; ENSG00000238269; TAA
VQGPDMEAF

SEQ ID NO: 57642 - protein, 9 aa, Homo sapiens
  misc_feature: Table A; Target 57642; HLA-A*24:02; PAGE2B; ENSG00000238269; TAA
VQGPDMEAF

SEQ ID NO: 57643 - protein, 9 aa, Homo sapiens
  misc_feature: Table A; Target 57643; HLA-A*32:01; PAGE2B; ENSG00000238269; TAA
VQGPDMEAF

SEQ ID NO: 57644 - protein, 9 aa, Homo sapiens
  misc_feature: Table A; Target 57644; HLA-B*15:01; PAGE2B; ENSG00000238269; TAA
VQGPDMEAF

SEQ ID NO: 57645 - protein, 9 aa, Homo sapiens
  misc_feature: Table A; Target 57645; HLA-B*15:03; PAGE2B; ENSG00000238269; TAA
VQGPDMEAF

SEQ ID NO: 57646 - protein, 9 aa, Homo sapiens
  misc_feature: Table A; Target 57646; HLA-B*27:02; PAGE2B; ENSG00000238269; TAA
VQGPDMEAF

SEQ ID NO: 57647 - protein, 9 aa, Homo sapiens
  misc_feature: Table A; Target 57647; HLA-B*27:05; PAGE2B; ENSG00000238269; TAA
VQGPDMEAF

SEQ ID NO: 57648 - protein, 9 aa, Homo sapiens
  misc_feature: Table A; Target 57648; HLA-B*37:01; PAGE2B; ENSG00000238269; TAA
VQGPDMEAF

SEQ ID NO: 57649 - protein, 9 aa, Homo sapiens
  misc_feature: Table A; Target 57649; HLA-B*38:01; PAGE2B; ENSG00000238269; TAA
VQGPDMEAF

SEQ ID NO: 57650 - protein, 9 aa, Homo sapiens
  misc_feature: Table A; Target 57650; HLA-B*39:01; PAGE2B; ENSG00000238269; TAA
VQGPDMEAF

SEQ ID NO: 57651 - protein, 9 aa, Homo sapiens
  misc_feature: Table A; Target 57651; HLA-B*46:01; PAGE2B; ENSG00000238269; TAA
VQGPDMEAF

SEQ ID NO: 57652 - protein, 9 aa, Homo sapiens
  misc_feature: Table A; Target 57652; HLA-B*58:01; PAGE2B; ENSG00000238269; TAA
VQGPDMEAF

SEQ ID NO: 57653 - protein, 9 aa, Homo sapiens
  misc_feature: Table A; Target 57653; HLA-C*07:04; PAGE2B; ENSG00000238269; TAA
VQGPDMEAF

SEQ ID NO: 57654 - protein, 9 aa, Homo sapiens
  misc_feature: Table A; Target 57654; HLA-C*16:04; PAGE2B; ENSG00000238269; TAA
VQGPDMEAF

SEQ ID NO: 57655 - protein, 10 aa, Homo sapiens
  misc_feature: Table A; Target 57655; HLA-A*31:01; PAGE5; ENSG00000158639; TAA
AGNRGWAGTR

SEQ ID NO: 57656 - protein, 9 aa, Homo sapiens
  misc_feature: Table A; Target 57656; HLA-B*07:02; PAGE5; ENSG00000158639; TAA
APAVQGTDV

SEQ ID NO: 57657 - protein, 9 aa, Homo sapiens
  misc_feature: Table A; Target 57657; HLA-B*55:01; PAGE5; ENSG00000158639; TAA
APAVQGTDV

SEQ ID NO: 57658 - protein, 9 aa, Homo sapiens
  misc_feature: Table A; Target 57658; HLA-B*56:01; PAGE5; ENSG00000158639; TAA
APAVQGTDV

SEQ ID NO: 57659 - protein, 9 aa, Homo sapiens
  misc_feature: Table A; Target 57659; HLA-C*07:02; PAGE5; ENSG00000158639; TAA
APAVQGTDV

SEQ ID NO: 57660 - protein, 11 aa, Homo sapiens
  misc_feature: Table A; Target 57660; HLA-B*54:01; PAGE5; ENSG00000158639; TAA
APAVQGTDVEA

SEQ ID NO: 57661 - protein, 11 aa, Homo sapiens
  misc_feature: Table A; Target 57661; HLA-B*55:01; PAGE5; ENSG00000158639; TAA
APAVQGTDVEA

SEQ ID NO: 57662 - protein, 11 aa, Homo sapiens
  misc_feature: Table A; Target 57662; HLA-B*56:01; PAGE5; ENSG00000158639; TAA
APAVQGTDVEA

SEQ ID NO: 57663 - protein, 10 aa, Homo sapiens
  misc_feature: Table A; Target 57663; HLA-B*56:01; PAGE5; ENSG00000158639; TAA
APSGEIKNEG

SEQ ID NO: 57664 - protein, 10 aa, Homo sapiens
  misc_feature: Table A; Target 57664; HLA-A*25:01; PAGE5; ENSG00000158639; TAA
AVQGTDVEAF

SEQ ID NO: 57665 - protein, 10 aa, Homo sapiens
  misc_feature: Table A; Target 57665; HLA-A*30:02; PAGE5; ENSG00000158639; TAA
AVQGTDVEAF

SEQ ID NO: 57666 - protein, 10 aa, Homo sapiens
  misc_feature: Table A; Target 57666; HLA-B*15:01; PAGE5; ENSG00000158639; TAA
AVQGTDVEAF

SEQ ID NO: 57667 - protein, 9 aa, Homo sapiens
  misc_feature: Table A; Target 57667; HLA-B*51:01; PAGE5; ENSG00000158639; TAA
DAPGDGPDV

SEQ ID NO: 57668 - protein, 10 aa, Homo sapiens
  misc_feature: Table A; Target 57668; HLA-A*68:01; PAGE5; ENSG00000158639; TAA
DAPGDGPDVR

SEQ ID NO: 57669 - protein, 8 aa, Homo sapiens
  misc_feature: Table A; Target 57669; HLA-A*33:01; PAGE5; ENSG00000158639; TAA
DMSEHVTR

SEQ ID NO: 57670 - protein, 8 aa, Homo sapiens
  misc_feature: Table A; Target 57670; HLA-A*33:03; PAGE5; ENSG00000158639; TAA
DMSEHVTR

SEQ ID NO: 57671 - protein, 8 aa, Homo sapiens
  misc_feature: Table A; Target 57671; HLA-A*68:01; PAGE5; ENSG00000158639; TAA
DMSEHVTR

SEQ ID NO: 57672 - protein, 8 aa, Homo sapiens
  misc_feature: Table A; Target 57672; HLA-B*08:01; PAGE5; ENSG00000158639; TAA
DMSEHVTR

SEQ ID NO: 57673 - protein, 8 aa, Homo sapiens
  misc_feature: Table A; Target 57673; HLA-C*07:06; PAGE5; ENSG00000158639; TAA
DMSEHVTR

SEQ ID NO: 57674 - protein, 8 aa, Homo sapiens
  misc_feature: Table A; Target 57674; HLA-B*51:01; PAGE5; ENSG00000158639; TAA
DPTKVLEA

SEQ ID NO: 57675 - protein, 8 aa, Homo sapiens
  misc_feature: Table A; Target 57675; HLA-B*54:01; PAGE5; ENSG00000158639; TAA
DPTKVLEA

SEQ ID NO: 57676 - protein, 8 aa, Homo sapiens
  misc_feature: Table A; Target 57676; HLA-B*55:01; PAGE5; ENSG00000158639; TAA
DPTKVLEA

SEQ ID NO: 57677 - protein, 8 aa, Homo sapiens
  misc_feature: Table A; Target 57677; HLA-B*56:01; PAGE5; ENSG00000158639; TAA
DPTKVLEA

SEQ ID NO: 57678 - protein, 9 aa, Homo sapiens
  misc_feature: Table A; Target 57678; HLA-A*33:01; PAGE5; ENSG00000158639; TAA
DVEAFQQEL

SEQ ID NO: 57679 - protein, 9 aa, Homo sapiens
  misc_feature: Table A; Target 57679; HLA-A*68:01; PAGE5; ENSG00000158639; TAA
DVEAFQQEL

SEQ ID NO: 57680 - protein, 9 aa, Homo sapiens
  misc_feature: Table A; Target 57680; HLA-A*68:02; PAGE5; ENSG00000158639; TAA
DVEAFQQEL

SEQ ID NO: 57681 - protein, 9 aa, Homo sapiens
  misc_feature: Table A; Target 57681; HLA-B*35:01; PAGE5; ENSG00000158639; TAA
DVEAFQQEL

SEQ ID NO: 57682 - protein, 9 aa, Homo sapiens
  misc_feature: Table A; Target 57682; HLA-B*35:03; PAGE5; ENSG00000158639; TAA
DVEAFQQEL

SEQ ID NO: 57683 - protein, 9 aa, Homo sapiens
  misc_feature: Table A; Target 57683; HLA-B*38:01; PAGE5; ENSG00000158639; TAA
DVEAFQQEL

SEQ ID NO: 57684 - protein, 9 aa, Homo sapiens
  misc_feature: Table A; Target 57684; HLA-C*05:01; PAGE5; ENSG00000158639; TAA
DVEAFQQEL

SEQ ID NO: 57685 - protein, 9 aa, Homo sapiens
  misc_feature: Table A; Target 57685; HLA-C*07:06; PAGE5; ENSG00000158639; TAA
DVEAFQQEL

SEQ ID NO: 57686 - protein, 10 aa, Homo sapiens
  misc_feature: Table A; Target 57686; HLA-A*25:01; PAGE5; ENSG00000158639; TAA
DVREGTLPTF

SEQ ID NO: 57687 - protein, 10 aa, Homo sapiens
  misc_feature: Table A; Target 57687; HLA-A*26:01; PAGE5; ENSG00000158639; TAA
DVREGTLPTF

SEQ ID NO: 57688 - protein, 10 aa, Homo sapiens
  misc_feature: Table A; Target 57688; HLA-A*33:01; PAGE5; ENSG00000158639; TAA
DVREGTLPTF

SEQ ID NO: 57689 - protein, 10 aa, Homo sapiens
  misc_feature: Table A; Target 57689; HLA-A*33:03; PAGE5; ENSG00000158639; TAA
DVREGTLPTF

SEQ ID NO: 57690 - protein, 11 aa, Homo sapiens
  misc_feature: Table A; Target 57690; HLA-A*33:01; PAGE5; ENSG00000158639; TAA
EDAPGDGPDVR

SEQ ID NO: 57691 - protein, 11 aa, Homo sapiens
  misc_feature: Table A; Target 57691; HLA-A*68:01; PAGE5; ENSG00000158639; TAA
EDAPGDGPDVR

SEQ ID NO: 57692 - protein, 11 aa, Homo sapiens
  misc_feature: Table A; Target 57692; HLA-A*68:02; PAGE5; ENSG00000158639; TAA
EDAPGDGPDVR

SEQ ID NO: 57693 - protein, 11 aa, Homo sapiens
  misc_feature: Table A; Target 57693; HLA-A*33:01; PAGE5; ENSG00000158639; TAA
EHVTRSQSSER

SEQ ID NO: 57694 - protein, 11 aa, Homo sapiens
  misc_feature: Table A; Target 57694; HLA-A*33:03; PAGE5; ENSG00000158639; TAA
EHVTRSQSSER

SEQ ID NO: 57695 - protein, 10 aa, Homo sapiens
  misc_feature: Table A; Target 57695; HLA-A*25:01; PAGE5; ENSG00000158639; TAA
EIKNEGAPAV

SEQ ID NO: 57696 - protein, 10 aa, Homo sapiens
  misc_feature: Table A; Target 57696; HLA-A*26:01; PAGE5; ENSG00000158639; TAA
EIKNEGAPAV

SEQ ID NO: 57697 - protein, 10 aa, Homo sapiens
  misc_feature: Table A; Target 57697; HLA-A*68:01; PAGE5; ENSG00000158639; TAA
ESSQPVGPVI

SEQ ID NO: 57698 - protein, 10 aa, Homo sapiens
  misc_feature: Table A; Target 57698; HLA-A*68:02; PAGE5; ENSG00000158639; TAA
ESSQPVGPVI

SEQ ID NO: 57699 - protein, 10 aa, Homo sapiens
  misc_feature: Table A; Target 57699; HLA-B*38:01; PAGE5; ENSG00000158639; TAA
ESSQPVGPVI

SEQ ID NO: 57700 - protein, 9 aa, Homo sapiens
  misc_feature: Table A; Target 57700; HLA-A*26:01; PAGE5; ENSG00000158639; TAA
EVRDMSEHV

SEQ ID NO: 57701 - protein, 9 aa, Homo sapiens
  misc_feature: Table A; Target 57701; HLA-A*68:02; PAGE5; ENSG00000158639; TAA
EVRDMSEHV

SEQ ID NO: 57702 - protein, 11 aa, Homo sapiens
  misc_feature: Table A; Target 57702; HLA-A*31:01; PAGE5; ENSG00000158639; TAA
EVRDMSEHVTR

SEQ ID NO: 57703 - protein, 11 aa, Homo sapiens
  misc_feature: Table A; Target 57703; HLA-A*33:01; PAGE5; ENSG00000158639; TAA
EVRDMSEHVTR

SEQ ID NO: 57704 - protein, 11 aa, Homo sapiens
  misc_feature: Table A; Target 57704; HLA-A*68:01; PAGE5; ENSG00000158639; TAA
EVRDMSEHVTR

SEQ ID NO: 57705 - protein, 11 aa, Homo sapiens
  misc_feature: Table A; Target 57705; HLA-B*57:01; PAGE5; ENSG00000158639; TAA
EVRDMSEHVTR

SEQ ID NO: 57706 - protein, 11 aa, Homo sapiens
  misc_feature: Table A; Target 57706; HLA-C*07:06; PAGE5; ENSG00000158639; TAA
EVRDMSEHVTR

SEQ ID NO: 57707 - protein, 9 aa, Homo sapiens
  misc_feature: Table A; Target 57707; HLA-B*27:02; PAGE5; ENSG00000158639; TAA
FQQELALLK

SEQ ID NO: 57708 - protein, 10 aa, Homo sapiens
  misc_feature: Table A; Target 57708; HLA-C*01:02; PAGE5; ENSG00000158639; TAA
GAPAVQGTDV

SEQ ID NO: 57709 - protein, 9 aa, Homo sapiens
  misc_feature: Table A; Target 57709; HLA-B*40:01; PAGE5; ENSG00000158639; TAA
GEIKNEGAP

SEQ ID NO: 57710 - protein, 9 aa, Homo sapiens
  misc_feature: Table A; Target 57710; HLA-B*40:02; PAGE5; ENSG00000158639; TAA
GEIKNEGAP

SEQ ID NO: 57711 - protein, 10 aa, Homo sapiens
  misc_feature: Table A; Target 57711; HLA-A*30:01; PAGE5; ENSG00000158639; TAA
GEIKNEGAPA

SEQ ID NO: 57712 - protein, 10 aa, Homo sapiens
  misc_feature: Table A; Target 57712; HLA-B*40:01; PAGE5; ENSG00000158639; TAA
GEIKNEGAPA

SEQ ID NO: 57713 - protein, 10 aa, Homo sapiens
  misc_feature: Table A; Target 57713; HLA-B*40:02; PAGE5; ENSG00000158639; TAA
GEIKNEGAPA

SEQ ID NO: 57714 - protein, 10 aa, Homo sapiens
  misc_feature: Table A; Target 57714; HLA-B*49:01; PAGE5; ENSG00000158639; TAA
GEIKNEGAPA

SEQ ID NO: 57715 - protein, 11 aa, Homo sapiens
  misc_feature: Table A; Target 57715; HLA-A*30:01; PAGE5; ENSG00000158639; TAA
GEIKNEGAPAV

SEQ ID NO: 57716 - protein, 11 aa, Homo sapiens
  misc_feature: Table A; Target 57716; HLA-B*13:02; PAGE5; ENSG00000158639; TAA
GEIKNEGAPAV

SEQ ID NO: 57717 - protein, 11 aa, Homo sapiens
  misc_feature: Table A; Target 57717; HLA-B*40:01; PAGE5; ENSG00000158639; TAA
GEIKNEGAPAV

SEQ ID NO: 57718 - protein, 11 aa, Homo sapiens
  misc_feature: Table A; Target 57718; HLA-B*40:02; PAGE5; ENSG00000158639; TAA
GEIKNEGAPAV

SEQ ID NO: 57719 - protein, 11 aa, Homo sapiens
  misc_feature: Table A; Target 57719; HLA-B*44:03; PAGE5; ENSG00000158639; TAA
GEIKNEGAPAV

SEQ ID NO: 57720 - protein, 11 aa, Homo sapiens
  misc_feature: Table A; Target 57720; HLA-B*49:01; PAGE5; ENSG00000158639; TAA
GEIKNEGAPAV

SEQ ID NO: 57721 - protein, 11 aa, Homo sapiens
  misc_feature: Table A; Target 57721; HLA-C*16:04; PAGE5; ENSG00000158639; TAA
GEIKNEGAPAV

SEQ ID NO: 57722 - protein, 9 aa, Homo sapiens
  misc_feature: Table A; Target 57722; HLA-A*03:02; PAGE5; ENSG00000158639; TAA
GIAPSGEIK

SEQ ID NO: 57723 - protein, 9 aa, Homo sapiens
  misc_feature: Table A; Target 57723; HLA-B*07:02; PAGE5; ENSG00000158639; TAA
GPDVREGTL

SEQ ID NO: 57724 - protein, 9 aa, Homo sapiens
  misc_feature: Table A; Target 57724; HLA-B*08:01; PAGE5; ENSG00000158639; TAA
GPDVREGTL

SEQ ID NO: 57725 - protein, 9 aa, Homo sapiens
  misc_feature: Table A; Target 57725; HLA-B*35:03; PAGE5; ENSG00000158639; TAA
GPDVREGTL

SEQ ID NO: 57726 - protein, 9 aa, Homo sapiens
  misc_feature: Table A; Target 57726; HLA-C*05:01; PAGE5; ENSG00000158639; TAA
GPDVREGTL

SEQ ID NO: 57727 - protein, 9 aa, Homo sapiens
  misc_feature: Table A; Target 57727; HLA-C*07:02; PAGE5; ENSG00000158639; TAA
GPDVREGTL

SEQ ID NO: 57728 - protein, 10 aa, Homo sapiens
  misc_feature: Table A; Target 57728; HLA-A*01:01; PAGE5; ENSG00000158639; TAA
GTDVEAFQQE

SEQ ID NO: 57729 - protein, 11 aa, Homo sapiens
  misc_feature: Table A; Target 57729; HLA-B*39:01; PAGE5; ENSG00000158639; TAA
GTDVEAFQQEL

SEQ ID NO: 57730 - protein, 10 aa, Homo sapiens
  misc_feature: Table A; Target 57730; HLA-A*03:01; PAGE5; ENSG00000158639; TAA
GTLPTFDPTK

SEQ ID NO: 57731 - protein, 10 aa, Homo sapiens
  misc_feature: Table A; Target 57731; HLA-A*03:02; PAGE5; ENSG00000158639; TAA
GTLPTFDPTK

SEQ ID NO: 57732 - protein, 10 aa, Homo sapiens
  misc_feature: Table A; Target 57732; HLA-A*11:01; PAGE5; ENSG00000158639; TAA
GTLPTFDPTK

SEQ ID NO: 57733 - protein, 10 aa, Homo sapiens
  misc_feature: Table A; Target 57733; HLA-B*27:02; PAGE5; ENSG00000158639; TAA
GTLPTFDPTK

SEQ ID NO: 57734 - protein, 10 aa, Homo sapiens
  misc_feature: Table A; Target 57734; HLA-B*57:01; PAGE5; ENSG00000158639; TAA
GTLPTFDPTK

SEQ ID NO: 57735 - protein, 9 aa, Homo sapiens
  misc_feature: Table A; Target 57735; HLA-C*16:01; PAGE5; ENSG00000158639; TAA
GTREEVRDM

SEQ ID NO: 57736 - protein, 10 aa, Homo sapiens
  misc_feature: Table A; Target 57736; HLA-A*68:01; PAGE5; ENSG00000158639; TAA
HVTRSQSSER

SEQ ID NO: 57737 - protein, 10 aa, Homo sapiens
  misc_feature: Table A; Target 57737; HLA-C*07:06; PAGE5; ENSG00000158639; TAA
HVTRSQSSER

SEQ ID NO: 57738 - protein, 11 aa, Homo sapiens
  misc_feature: Table A; Target 57738; HLA-B*49:01; PAGE5; ENSG00000158639; TAA
IEDAPGDGPDV

SEQ ID NO: 57739 - protein, 9 aa, Homo sapiens
  misc_feature: Table A; Target 57739; HLA-B*15:03; PAGE5; ENSG00000158639; TAA
IKNEGAPAV

SEQ ID NO: 57740 - protein, 9 aa, Homo sapiens
  misc_feature: Table A; Target 57740; HLA-A*03:01; PAGE5; ENSG00000158639; TAA
IVQQPTEEK

SEQ ID NO: 57741 - protein, 9 aa, Homo sapiens
  misc_feature: Table A; Target 57741; HLA-A*03:02; PAGE5; ENSG00000158639; TAA
IVQQPTEEK

SEQ ID NO: 57742 - protein, 9 aa, Homo sapiens
  misc_feature: Table A; Target 57742; HLA-A*11:01; PAGE5; ENSG00000158639; TAA
IVQQPTEEK

SEQ ID NO: 57743 - protein, 9 aa, Homo sapiens
  misc_feature: Table A; Target 57743; HLA-C*05:01; PAGE5; ENSG00000158639; TAA
IVQQPTEEK

SEQ ID NO: 57744 - protein, 9 aa, Homo sapiens
  misc_feature: Table A; Target 57744; HLA-C*07:06; PAGE5; ENSG00000158639; TAA
IVQQPTEEK

SEQ ID NO: 57745 - protein, 10 aa, Homo sapiens
  misc_feature: Table A; Target 57745; HLA-A*68:01; PAGE5; ENSG00000158639; TAA
IVQQPTEEKR

SEQ ID NO: 57746 - protein, 10 aa, Homo sapiens
  misc_feature: Table A; Target 57746; HLA-C*07:06; PAGE5; ENSG00000158639; TAA
IVQQPTEEKR

SEQ ID NO: 57747 - protein, 10 aa, Homo sapiens
  misc_feature: Table A; Target 57747; HLA-B*27:05; PAGE5; ENSG00000158639; TAA
KVLEAGEGQL

SEQ ID NO: 57748 - protein, 10 aa, Homo sapiens
  misc_feature: Table A; Target 57748; HLA-B*40:01; PAGE5; ENSG00000158639; TAA
KVLEAGEGQL

SEQ ID NO: 57749 - protein, 10 aa, Homo sapiens
  misc_feature: Table A; Target 57749; HLA-B*40:02; PAGE5; ENSG00000158639; TAA
KVLEAGEGQL

SEQ ID NO: 57750 - protein, 10 aa, Homo sapiens
  misc_feature: Table A; Target 57750; HLA-B*58:01; PAGE5; ENSG00000158639; TAA
KVLEAGEGQL

SEQ ID NO: 57751 - protein, 8 aa, Homo sapiens
  misc_feature: Table A; Target 57751; HLA-B*39:01; PAGE5; ENSG00000158639; TAA
LEAGEGQL

SEQ ID NO: 57752 - protein, 8 aa, Homo sapiens
  misc_feature: Table A; Target 57752; HLA-B*40:01; PAGE5; ENSG00000158639; TAA
LEAGEGQL

SEQ ID NO: 57753 - protein, 8 aa, Homo sapiens
  misc_feature: Table A; Target 57753; HLA-B*27:02; PAGE5; ENSG00000158639; TAA
LPTFDPTK

SEQ ID NO: 57754 - protein, 9 aa, Homo sapiens
  misc_feature: Table A; Target 57754; HLA-B*35:03; PAGE5; ENSG00000158639; TAA
LPTFDPTKV

SEQ ID NO: 57755 - protein, 9 aa, Homo sapiens
  misc_feature: Table A; Target 57755; HLA-B*51:01; PAGE5; ENSG00000158639; TAA
LPTFDPTKV

SEQ ID NO: 57756 - protein, 9 aa, Homo sapiens
  misc_feature: Table A; Target 57756; HLA-B*54:01; PAGE5; ENSG00000158639; TAA
LPTFDPTKV

SEQ ID NO: 57757 - protein, 9 aa, Homo sapiens
  misc_feature: Table A; Target 57757; HLA-B*56:01; PAGE5; ENSG00000158639; TAA
LPTFDPTKV

SEQ ID NO: 57758 - protein, 10 aa, Homo sapiens
  misc_feature: Table A; Target 57758; HLA-B*35:01; PAGE5; ENSG00000158639; TAA
LPTFDPTKVL

SEQ ID NO: 57759 - protein, 10 aa, Homo sapiens
  misc_feature: Table A; Target 57759; HLA-B*35:03; PAGE5; ENSG00000158639; TAA
LPTFDPTKVL

SEQ ID NO: 57760 - protein, 9 aa, Homo sapiens
  misc_feature: Table A; Target 57760; HLA-A*31:01; PAGE5; ENSG00000158639; TAA
MQAPWAGNR

SEQ ID NO: 57761 - protein, 11 aa, Homo sapiens
  misc_feature: Table A; Target 57761; HLA-B*57:01; PAGE5; ENSG00000158639; TAA
MQAPWAGNRGW

SEQ ID NO: 57762 - protein, 11 aa, Homo sapiens
  misc_feature: Table A; Target 57762; HLA-B*27:02; PAGE5; ENSG00000158639; TAA
PAVQGTDVEAF

SEQ ID NO: 57763 - protein, 9 aa, Homo sapiens
  misc_feature: Table A; Target 57763; HLA-C*12:03; PAGE5; ENSG00000158639; TAA
PTFDPTKVL

SEQ ID NO: 57764 - protein, 11 aa, Homo sapiens
  misc_feature: Table A; Target 57764; HLA-A*30:01; PAGE5; ENSG00000158639; TAA
QESSQPVGPVI

SEQ ID NO: 57765 - protein, 11 aa, Homo sapiens
  misc_feature: Table A; Target 57765; HLA-B*38:01; PAGE5; ENSG00000158639; TAA
QESSQPVGPVI

SEQ ID NO: 57766 - protein, 11 aa, Homo sapiens
  misc_feature: Table A; Target 57766; HLA-B*40:01; PAGE5; ENSG00000158639; TAA
QESSQPVGPVI

SEQ ID NO: 57767 - protein, 11 aa, Homo sapiens
  misc_feature: Table A; Target 57767; HLA-B*44:02; PAGE5; ENSG00000158639; TAA
QESSQPVGPVI

SEQ ID NO: 57768 - protein, 11 aa, Homo sapiens
  misc_feature: Table A; Target 57768; HLA-B*44:03; PAGE5; ENSG00000158639; TAA
QESSQPVGPVI

SEQ ID NO: 57769 - protein, 11 aa, Homo sapiens
  misc_feature: Table A; Target 57769; HLA-B*49:01; PAGE5; ENSG00000158639; TAA
QESSQPVGPVI

SEQ ID NO: 57770 - protein, 9 aa, Homo sapiens
  misc_feature: Table A; Target 57770; HLA-B*07:02; PAGE5; ENSG00000158639; TAA
QGIAPSGEI

SEQ ID NO: 57771 - protein, 9 aa, Homo sapiens
  misc_feature: Table A; Target 57771; HLA-C*05:01; PAGE5; ENSG00000158639; TAA
QGIAPSGEI

SEQ ID NO: 57772 - protein, 10 aa, Homo sapiens
  misc_feature: Table A; Target 57772; HLA-A*11:01; PAGE5; ENSG00000158639; TAA
QGIAPSGEIK

SEQ ID NO: 57773 - protein, 10 aa, Homo sapiens
  misc_feature: Table A; Target 57773; HLA-B*27:02; PAGE5; ENSG00000158639; TAA
QGIAPSGEIK

SEQ ID NO: 57774 - protein, 8 aa, Homo sapiens
  misc_feature: Table A; Target 57774; HLA-B*37:01; PAGE5; ENSG00000158639; TAA
QGTDVEAF

SEQ ID NO: 57775 - protein, 8 aa, Homo sapiens
  misc_feature: Table A; Target 57775; HLA-B*56:01; PAGE5; ENSG00000158639; TAA
QPVGPVIV

SEQ ID NO: 57776 - protein, 9 aa, Homo sapiens
  misc_feature: Table A; Target 57776; HLA-B*35:01; PAGE5; ENSG00000158639; TAA
QPVGPVIVQ

SEQ ID NO: 57777 - protein, 9 aa, Homo sapiens
  misc_feature: Table A; Target 57777; HLA-B*56:01; PAGE5; ENSG00000158639; TAA
QPVGPVIVQ

SEQ ID NO: 57778 - protein, 11 aa, Homo sapiens
  misc_feature: Table A; Target 57778; HLA-B*56:01; PAGE5; ENSG00000158639; TAA
QPVGPVIVQQP

SEQ ID NO: 57779 - protein, 9 aa, Homo sapiens
  misc_feature: Table A; Target 57779; HLA-A*31:01; PAGE5; ENSG00000158639; TAA
RDMSEHVTR

SEQ ID NO: 57780 - protein, 8 aa, Homo sapiens
  misc_feature: Table A; Target 57780; HLA-B*18:01; PAGE5; ENSG00000158639; TAA
REGTLPTF

SEQ ID NO: 57781 - protein, 8 aa, Homo sapiens
  misc_feature: Table A; Target 57781; HLA-B*37:01; PAGE5; ENSG00000158639; TAA
REGTLPTF

SEQ ID NO: 57782 - protein, 8 aa, Homo sapiens
  misc_feature: Table A; Target 57782; HLA-B*13:02; PAGE5; ENSG00000158639; TAA
SQPVGPVI

SEQ ID NO: 57783 - protein, 8 aa, Homo sapiens
  misc_feature: Table A; Target 57783; HLA-B*15:03; PAGE5; ENSG00000158639; TAA
SQPVGPVI

SEQ ID NO: 57784 - protein, 8 aa, Homo sapiens
  misc_feature: Table A; Target 57784; HLA-B*39:01; PAGE5; ENSG00000158639; TAA
SQPVGPVI

SEQ ID NO: 57785 - protein, 8 aa, Homo sapiens
  misc_feature: Table A; Target 57785; HLA-B*51:01; PAGE5; ENSG00000158639; TAA
SQPVGPVI

SEQ ID NO: 57786 - protein, 9 aa, Homo sapiens
  misc_feature: Table A; Target 57786; HLA-A*02:07; PAGE5; ENSG00000158639; TAA
SQPVGPVIV

SEQ ID NO: 57787 - protein, 9 aa, Homo sapiens
  misc_feature: Table A; Target 57787; HLA-B*13:02; PAGE5; ENSG00000158639; TAA
SQPVGPVIV

SEQ ID NO: 57788 - protein, 9 aa, Homo sapiens
  misc_feature: Table A; Target 57788; HLA-A*23:01; PAGE5; ENSG00000158639; TAA
SSQPVGPVI

SEQ ID NO: 57789 - protein, 9 aa, Homo sapiens
  misc_feature: Table A; Target 57789; HLA-A*32:01; PAGE5; ENSG00000158639; TAA
SSQPVGPVI

SEQ ID NO: 57790 - protein, 9 aa, Homo sapiens
  misc_feature: Table A; Target 57790; HLA-B*13:02; PAGE5; ENSG00000158639; TAA
SSQPVGPVI

SEQ ID NO: 57791 - protein, 9 aa, Homo sapiens
  misc_feature: Table A; Target 57791; HLA-B*15:03; PAGE5; ENSG00000158639; TAA
SSQPVGPVI

SEQ ID NO: 57792 - protein, 9 aa, Homo sapiens
  misc_feature: Table A; Target 57792; HLA-B*38:01; PAGE5; ENSG00000158639; TAA
SSQPVGPVI

SEQ ID NO: 57793 - protein, 9 aa, Homo sapiens
  misc_feature: Table A; Target 57793; HLA-B*39:01; PAGE5; ENSG00000158639; TAA
SSQPVGPVI

SEQ ID NO: 57794 - protein, 9 aa, Homo sapiens
  misc_feature: Table A; Target 57794; HLA-B*46:01; PAGE5; ENSG00000158639; TAA
SSQPVGPVI

SEQ ID NO: 57795 - protein, 9 aa, Homo sapiens
  misc_feature: Table A; Target 57795; HLA-B*51:01; PAGE5; ENSG00000158639; TAA
SSQPVGPVI

SEQ ID NO: 57796 - protein, 9 aa, Homo sapiens
  misc_feature: Table A; Target 57796; HLA-B*58:01; PAGE5; ENSG00000158639; TAA
SSQPVGPVI

SEQ ID NO: 57797 - protein, 9 aa, Homo sapiens
  misc_feature: Table A; Target 57797; HLA-C*03:03; PAGE5; ENSG00000158639; TAA
SSQPVGPVI

SEQ ID NO: 57798 - protein, 9 aa, Homo sapiens
  misc_feature: Table A; Target 57798; HLA-C*03:04; PAGE5; ENSG00000158639; TAA
SSQPVGPVI

SEQ ID NO: 57799 - protein, 9 aa, Homo sapiens
  misc_feature: Table A; Target 57799; HLA-C*06:02; PAGE5; ENSG00000158639; TAA
SSQPVGPVI

SEQ ID NO: 57800 - protein, 9 aa, Homo sapiens
  misc_feature: Table A; Target 57800; HLA-C*16:01; PAGE5; ENSG00000158639; TAA
SSQPVGPVI

SEQ ID NO: 57801 - protein, 9 aa, Homo sapiens
  misc_feature: Table A; Target 57801; HLA-C*16:02; PAGE5; ENSG00000158639; TAA
SSQPVGPVI

SEQ ID NO: 57802 - protein, 9 aa, Homo sapiens
  misc_feature: Table A; Target 57802; HLA-C*16:04; PAGE5; ENSG00000158639; TAA
SSQPVGPVI

SEQ ID NO: 57803 - protein, 10 aa, Homo sapiens
  misc_feature: Table A; Target 57803; HLA-C*12:03; PAGE5; ENSG00000158639; TAA
SSQPVGPVIV

SEQ ID NO: 57804 - protein, 10 aa, Homo sapiens
  misc_feature: Table A; Target 57804; HLA-A*30:01; PAGE5; ENSG00000158639; TAA
TDVEAFQQEL

SEQ ID NO: 57805 - protein, 10 aa, Homo sapiens
  misc_feature: Table A; Target 57805; HLA-B*38:01; PAGE5; ENSG00000158639; TAA
TDVEAFQQEL

SEQ ID NO: 57806 - protein, 10 aa, Homo sapiens
  misc_feature: Table A; Target 57806; HLA-B*39:01; PAGE5; ENSG00000158639; TAA
TDVEAFQQEL

SEQ ID NO: 57807 - protein, 10 aa, Homo sapiens
  misc_feature: Table A; Target 57807; HLA-B*40:01; PAGE5; ENSG00000158639; TAA
TDVEAFQQEL

SEQ ID NO: 57808 - protein, 10 aa, Homo sapiens
  misc_feature: Table A; Target 57808; HLA-B*40:02; PAGE5; ENSG00000158639; TAA
TDVEAFQQEL

SEQ ID NO: 57809 - protein, 10 aa, Homo sapiens
  misc_feature: Table A; Target 57809; HLA-B*44:02; PAGE5; ENSG00000158639; TAA
TDVEAFQQEL

SEQ ID NO: 57810 - protein, 10 aa, Homo sapiens
  misc_feature: Table A; Target 57810; HLA-B*49:01; PAGE5; ENSG00000158639; TAA
TDVEAFQQEL

SEQ ID NO: 57811 - protein, 10 aa, Homo sapiens
  misc_feature: Table A; Target 57811; HLA-C*03:04; PAGE5; ENSG00000158639; TAA
TDVEAFQQEL

SEQ ID NO: 57812 - protein, 8 aa, Homo sapiens
  misc_feature: Table A; Target 57812; HLA-B*35:01; PAGE5; ENSG00000158639; TAA
TFDPTKVL

SEQ ID NO: 57813 - protein, 8 aa, Homo sapiens
  misc_feature: Table A; Target 57813; HLA-C*04:01; PAGE5; ENSG00000158639; TAA
TFDPTKVL

SEQ ID NO: 57814 - protein, 9 aa, Homo sapiens
  misc_feature: Table A; Target 57814; HLA-C*04:01; PAGE5; ENSG00000158639; TAA
TFDPTKVLE

SEQ ID NO: 57815 - protein, 9 aa, Homo sapiens
  misc_feature: Table A; Target 57815; HLA-A*02:07; PAGE5; ENSG00000158639; TAA
TLPTFDPTK

SEQ ID NO: 57816 - protein, 10 aa, Homo sapiens
  misc_feature: Table A; Target 57816; HLA-A*02:01; PAGE5; ENSG00000158639; TAA
TLPTFDPTKV

SEQ ID NO: 57817 - protein, 10 aa, Homo sapiens
  misc_feature: Table A; Target 57817; HLA-A*02:03; PAGE5; ENSG00000158639; TAA
TLPTFDPTKV

SEQ ID NO: 57818 - protein, 10 aa, Homo sapiens
  misc_feature: Table A; Target 57818; HLA-A*02:04; PAGE5; ENSG00000158639; TAA
TLPTFDPTKV

SEQ ID NO: 57819 - protein, 10 aa, Homo sapiens
  misc_feature: Table A; Target 57819; HLA-A*02:07; PAGE5; ENSG00000158639; TAA
TLPTFDPTKV

SEQ ID NO: 57820 - protein, 10 aa, Homo sapiens
  misc_feature: Table A; Target 57820; HLA-A*68:02; PAGE5; ENSG00000158639; TAA
TLPTFDPTKV

SEQ ID NO: 57821 - protein, 11 aa, Homo sapiens
  misc_feature: Table A; Target 57821; HLA-A*02:03; PAGE5; ENSG00000158639; TAA
TLPTFDPTKVL

SEQ ID NO: 57822 - protein, 11 aa, Homo sapiens
  misc_feature: Table A; Target 57822; HLA-A*02:07; PAGE5; ENSG00000158639; TAA
TLPTFDPTKVL

SEQ ID NO: 57823 - protein, 11 aa, Homo sapiens
  misc_feature: Table A; Target 57823; HLA-A*24:02; PAGE5; ENSG00000158639; TAA
TLPTFDPTKVL

SEQ ID NO: 57824 - protein, 8 aa, Homo sapiens
  misc_feature: Table A; Target 57824; HLA-A*30:01; PAGE5; ENSG00000158639; TAA
VEAFQQEL

SEQ ID NO: 57825 - protein, 8 aa, Homo sapiens
  misc_feature: Table A; Target 57825; HLA-B*18:01; PAGE5; ENSG00000158639; TAA
VEAFQQEL

SEQ ID NO: 57826 - protein, 8 aa, Homo sapiens
  misc_feature: Table A; Target 57826; HLA-B*37:01; PAGE5; ENSG00000158639; TAA
VEAFQQEL

SEQ ID NO: 57827 - protein, 8 aa, Homo sapiens
  misc_feature: Table A; Target 57827; HLA-B*39:01; PAGE5; ENSG00000158639; TAA
VEAFQQEL

SEQ ID NO: 57828 - protein, 8 aa, Homo sapiens
  misc_feature: Table A; Target 57828; HLA-B*40:01; PAGE5; ENSG00000158639; TAA
VEAFQQEL

SEQ ID NO: 57829 - protein, 8 aa, Homo sapiens
  misc_feature: Table A; Target 57829; HLA-B*40:02; PAGE5; ENSG00000158639; TAA
VEAFQQEL

SEQ ID NO: 57830 - protein, 8 aa, Homo sapiens
  misc_feature: Table A; Target 57830; HLA-B*44:02; PAGE5; ENSG00000158639; TAA
VEAFQQEL

SEQ ID NO: 57831 - protein, 8 aa, Homo sapiens
  misc_feature: Table A; Target 57831; HLA-B*44:03; PAGE5; ENSG00000158639; TAA
VEAFQQEL

SEQ ID NO: 57832 - protein, 8 aa, Homo sapiens
  misc_feature: Table A; Target 57832; HLA-B*49:01; PAGE5; ENSG00000158639; TAA
VEAFQQEL

SEQ ID NO: 57833 - protein, 8 aa, Homo sapiens
  misc_feature: Table A; Target 57833; HLA-C*03:04; PAGE5; ENSG00000158639; TAA
VEAFQQEL

SEQ ID NO: 57834 - protein, 8 aa, Homo sapiens
  misc_feature: Table A; Target 57834; HLA-C*07:04; PAGE5; ENSG00000158639; TAA
VEAFQQEL

SEQ ID NO: 57835 - protein, 8 aa, Homo sapiens
  misc_feature: Table A; Target 57835; HLA-C*12:03; PAGE5; ENSG00000158639; TAA
VEAFQQEL

SEQ ID NO: 57836 - protein, 8 aa, Homo sapiens
  misc_feature: Table A; Target 57836; HLA-C*16:01; PAGE5; ENSG00000158639; TAA
VEAFQQEL

SEQ ID NO: 57837 - protein, 8 aa, Homo sapiens
  misc_feature: Table A; Target 57837; HLA-C*16:04; PAGE5; ENSG00000158639; TAA
VEAFQQEL

SEQ ID NO: 57838 - protein, 9 aa, Homo sapiens
  misc_feature: Table A; Target 57838; HLA-B*49:01; PAGE5; ENSG00000158639; TAA
VEAFQQELA

SEQ ID NO: 57839 - protein, 10 aa, Homo sapiens
  misc_feature: Table A; Target 57839; HLA-A*30:01; PAGE5; ENSG00000158639; TAA
VEAFQQELAL

SEQ ID NO: 57840 - protein, 10 aa, Homo sapiens
  misc_feature: Table A; Target 57840; HLA-B*40:01; PAGE5; ENSG00000158639; TAA
VEAFQQELAL

SEQ ID NO: 57841 - protein, 11 aa, Homo sapiens
  misc_feature: Table A; Target 57841; HLA-B*40:01; PAGE5; ENSG00000158639; TAA
VEAFQQELALL

SEQ ID NO: 57842 - protein, 10 aa, Homo sapiens
  misc_feature: Table A; Target 57842; HLA-A*03:01; PAGE5; ENSG00000158639; TAA
VIVQQPTEEK

SEQ ID NO: 57843 - protein, 10 aa, Homo sapiens
  misc_feature: Table A; Target 57843; HLA-A*03:02; PAGE5; ENSG00000158639; TAA
VIVQQPTEEK

SEQ ID NO: 57844 - protein, 10 aa, Homo sapiens
  misc_feature: Table A; Target 57844; HLA-A*11:01; PAGE5; ENSG00000158639; TAA
VIVQQPTEEK

SEQ ID NO: 57845 - protein, 9 aa, Homo sapiens
  misc_feature: Table A; Target 57845; HLA-A*02:01; PAGE5; ENSG00000158639; TAA
VLEAGEGQL

SEQ ID NO: 57846 - protein, 9 aa, Homo sapiens
  misc_feature: Table A; Target 57846; HLA-B*38:01; PAGE5; ENSG00000158639; TAA
VLEAGEGQL

SEQ ID NO: 57847 - protein, 9 aa, Homo sapiens
  misc_feature: Table A; Target 57847; HLA-B*39:01; PAGE5; ENSG00000158639; TAA
VLEAGEGQL

SEQ ID NO: 57848 - protein, 9 aa, Homo sapiens
  misc_feature: Table A; Target 57848; HLA-C*01:02; PAGE5; ENSG00000158639; TAA
VLEAGEGQL

SEQ ID NO: 57849 - protein, 9 aa, Homo sapiens
  misc_feature: Table A; Target 57849; HLA-C*05:01; PAGE5; ENSG00000158639; TAA
VLEAGEGQL

SEQ ID NO: 57850 - protein, 9 aa, Homo sapiens
  misc_feature: Table A; Target 57850; HLA-C*07:04; PAGE5; ENSG00000158639; TAA
VLEAGEGQL

SEQ ID NO: 57851 - protein, 9 aa, Homo sapiens
  misc_feature: Table A; Target 57851; HLA-A*32:01; PAGE5; ENSG00000158639; TAA
VQGTDVEAF

SEQ ID NO: 57852 - protein, 9 aa, Homo sapiens
  misc_feature: Table A; Target 57852; HLA-B*15:01; PAGE5; ENSG00000158639; TAA
VQGTDVEAF

SEQ ID NO: 57853 - protein, 9 aa, Homo sapiens
  misc_feature: Table A; Target 57853; HLA-B*15:03; PAGE5; ENSG00000158639; TAA
VQGTDVEAF

SEQ ID NO: 57854 - protein, 9 aa, Homo sapiens
  misc_feature: Table A; Target 57854; HLA-B*38:01; PAGE5; ENSG00000158639; TAA
VQGTDVEAF

SEQ ID NO: 57855 - protein, 9 aa, Homo sapiens
  misc_feature: Table A; Target 57855; HLA-B*39:01; PAGE5; ENSG00000158639; TAA
VQGTDVEAF

SEQ ID NO: 57856 - protein, 9 aa, Homo sapiens
  misc_feature: Table A; Target 57856; HLA-C*07:04; PAGE5; ENSG00000158639; TAA
VQGTDVEAF

SEQ ID NO: 57857 - protein, 10 aa, Homo sapiens
  misc_feature: Table A; Target 57857; HLA-B*27:05; PAGE5; ENSG00000158639; TAA
VRDMSEHVTR

SEQ ID NO: 57858 - protein, 9 aa, Homo sapiens
  misc_feature: Table A; Target 57858; HLA-B*27:02; PAGE5; ENSG00000158639; TAA
VREGTLPTF

SEQ ID NO: 57859 - protein, 9 aa, Homo sapiens
  misc_feature: Table A; Target 57859; HLA-B*27:05; PAGE5; ENSG00000158639; TAA
VREGTLPTF

SEQ ID NO: 57860 - protein, 9 aa, Homo sapiens
  misc_feature: Table A; Target 57860; HLA-B*38:01; PAGE5; ENSG00000158639; TAA
VREGTLPTF

SEQ ID NO: 57861 - protein, 9 aa, Homo sapiens
  misc_feature: Table A; Target 57861; HLA-C*16:04; PAGE5; ENSG00000158639; TAA
VREGTLPTF

SEQ ID NO: 57862 - protein, 9 aa, Homo sapiens
  misc_feature: Table A; Target 57862; HLA-A*31:01; PAGE5; ENSG00000158639; TAA
VTRSQSSER

SEQ ID NO: 57863 - protein, 9 aa, Homo sapiens
  misc_feature: Table A; Target 57863; HLA-A*33:01; PAGE5; ENSG00000158639; TAA
VTRSQSSER

SEQ ID NO: 57864 - protein, 9 aa, Homo sapiens
  misc_feature: Table A; Target 57864; HLA-A*33:03; PAGE5; ENSG00000158639; TAA
VTRSQSSER

SEQ ID NO: 57865 - protein, 9 aa, Homo sapiens
  misc_feature: Table A; Target 57865; HLA-C*07:06; PAGE5; ENSG00000158639; TAA
VTRSQSSER

SEQ ID NO: 57866 - protein, 9 aa, Homo sapiens
  misc_feature: Table A; Target 57866; HLA-C*05:01; PASD1; ENSG00000166049; CTA
AAEQQPSGF

SEQ ID NO: 57867 - protein, 10 aa, Homo sapiens
  misc_feature: Table A; Target 57867; HLA-A*01:01; PASD1; ENSG00000166049; CTA
AAEQQPSGFY

SEQ ID NO: 57868 - protein, 10 aa, Homo sapiens
  misc_feature: Table A; Target 57868; HLA-A*30:02; PASD1; ENSG00000166049; CTA
AAEQQPSGFY

SEQ ID NO: 57869 - protein, 9 aa, Homo sapiens
  misc_feature: Table A; Target 57869; HLA-C*01:02; PASD1; ENSG00000166049; CTA
AAGASAQPL

SEQ ID NO: 57870 - protein, 9 aa, Homo sapiens
  misc_feature: Table A; Target 57870; HLA-C*03:03; PASD1; ENSG00000166049; CTA
AAGASAQPL

SEQ ID NO: 57871 - protein, 9 aa, Homo sapiens
  misc_feature: Table A; Target 57871; HLA-C*03:04; PASD1; ENSG00000166049; CTA
AAGASAQPL

SEQ ID NO: 57872 - protein, 9 aa, Homo sapiens
  misc_feature: Table A; Target 57872; HLA-C*14:02; PASD1; ENSG00000166049; CTA
AAGASAQPL

SEQ ID NO: 57873 - protein, 10 aa, Homo sapiens
  misc_feature: Table A; Target 57873; HLA-B*58:01; PASD1; ENSG00000166049; CTA
AAISDDQIDI

SEQ ID NO: 57874 - protein, 8 aa, Homo sapiens
  misc_feature: Table A; Target 57874; HLA-C*05:01; PASD1; ENSG00000166049; CTA
AAYQPDQM

SEQ ID NO: 57875 - protein, 9 aa, Homo sapiens
  misc_feature: Table A; Target 57875; HLA-A*33:03; PASD1; ENSG00000166049; CTA
AAYQPDQMR

SEQ ID NO: 57876 - protein, 9 aa, Homo sapiens
  misc_feature: Table A; Target 57876; HLA-A*68:01; PASD1; ENSG00000166049; CTA
AAYQPDQMR

SEQ ID NO: 57877 - protein, 9 aa, Homo sapiens
  misc_feature: Table A; Target 57877; HLA-C*07:06; PASD1; ENSG00000166049; CTA
AAYQPDQMR

SEQ ID NO: 57878 - protein, 11 aa, Homo sapiens
  misc_feature: Table A; Target 57878; HLA-B*54:01; PASD1; ENSG00000166049; CTA
AAYQPDQMRSA

SEQ ID NO: 57879 - protein, 11 aa, Homo sapiens
  misc_feature: Table A; Target 57879; HLA-B*56:01; PASD1; ENSG00000166049; CTA
AAYQPDQMRSA

SEQ ID NO: 57880 - protein, 10 aa, Homo sapiens
  misc_feature: Table A; Target 57880; HLA-A*30:02; PASD1; ENSG00000166049; CTA
ACVPQEDRLY

SEQ ID NO: 57881 - protein, 10 aa, Homo sapiens
  misc_feature: Table A; Target 57881; HLA-B*15:03; PASD1; ENSG00000166049; CTA
ACVPQEDRLY

SEQ ID NO: 57882 - protein, 10 aa, Homo sapiens
  misc_feature: Table A; Target 57882; HLA-C*16:01; PASD1; ENSG00000166049; CTA
ACVPQEDRLY

SEQ ID NO: 57883 - protein, 8 aa, Homo sapiens
  misc_feature: Table A; Target 57883; HLA-B*37:01; PASD1; ENSG00000166049; CTA
ADPVDLEF

SEQ ID NO: 57884 - protein, 8 aa, Homo sapiens
  misc_feature: Table A; Target 57884; HLA-A*30:01; PASD1; ENSG00000166049; CTA
AEIVGKKL

SEQ ID NO: 57885 - protein, 8 aa, Homo sapiens
  misc_feature: Table A; Target 57885; HLA-B*37:01; PASD1; ENSG00000166049; CTA
AEIVGKKL

SEQ ID NO: 57886 - protein, 8 aa, Homo sapiens
  misc_feature: Table A; Target 57886; HLA-B*40:01; PASD1; ENSG00000166049; CTA
AEIVGKKL

SEQ ID NO: 57887 - protein, 8 aa, Homo sapiens
  misc_feature: Table A; Target 57887; HLA-B*44:02; PASD1; ENSG00000166049; CTA
AEIVGKKL

SEQ ID NO: 57888 - protein, 8 aa, Homo sapiens
  misc_feature: Table A; Target 57888; HLA-B*44:03; PASD1; ENSG00000166049; CTA
AEIVGKKL

SEQ ID NO: 57889 - protein, 9 aa, Homo sapiens
  misc_feature: Table A; Target 57889; HLA-A*30:01; PASD1; ENSG00000166049; CTA
AEIVGKKLL

SEQ ID NO: 57890 - protein, 9 aa, Homo sapiens
  misc_feature: Table A; Target 57890; HLA-B*37:01; PASD1; ENSG00000166049; CTA
AEIVGKKLL

SEQ ID NO: 57891 - protein, 9 aa, Homo sapiens
  misc_feature: Table A; Target 57891; HLA-B*40:01; PASD1; ENSG00000166049; CTA
AEIVGKKLL

SEQ ID NO: 57892 - protein, 9 aa, Homo sapiens
  misc_feature: Table A; Target 57892; HLA-B*40:02; PASD1; ENSG00000166049; CTA
AEIVGKKLL

SEQ ID NO: 57893 - protein, 9 aa, Homo sapiens
  misc_feature: Table A; Target 57893; HLA-B*44:02; PASD1; ENSG00000166049; CTA
AEIVGKKLL

SEQ ID NO: 57894 - protein, 9 aa, Homo sapiens
  misc_feature: Table A; Target 57894; HLA-B*44:03; PASD1; ENSG00000166049; CTA
AEIVGKKLL

SEQ ID NO: 57895 - protein, 9 aa, Homo sapiens
  misc_feature: Table A; Target 57895; HLA-B*49:01; PASD1; ENSG00000166049; CTA
AEIVGKKLL

SEQ ID NO: 57896 - protein, 8 aa, Homo sapiens
  misc_feature: Table A; Target 57896; HLA-A*30:01; PASD1; ENSG00000166049; CTA
AENISSLL

SEQ ID NO: 57897 - protein, 8 aa, Homo sapiens
  misc_feature: Table A; Target 57897; HLA-B*37:01; PASD1; ENSG00000166049; CTA
AENISSLL

SEQ ID NO: 57898 - protein, 8 aa, Homo sapiens
  misc_feature: Table A; Target 57898; HLA-B*40:01; PASD1; ENSG00000166049; CTA
AENISSLL

SEQ ID NO: 57899 - protein, 8 aa, Homo sapiens
  misc_feature: Table A; Target 57899; HLA-B*44:02; PASD1; ENSG00000166049; CTA
AENISSLL

SEQ ID NO: 57900 - protein, 8 aa, Homo sapiens
  misc_feature: Table A; Target 57900; HLA-B*44:03; PASD1; ENSG00000166049; CTA
AENISSLL

SEQ ID NO: 57901 - protein, 8 aa, Homo sapiens
  misc_feature: Table A; Target 57901; HLA-B*49:01; PASD1; ENSG00000166049; CTA
AENISSLL

SEQ ID NO: 57902 - protein, 9 aa, Homo sapiens
  misc_feature: Table A; Target 57902; HLA-B*49:01; PASD1; ENSG00000166049; CTA
AENISSLLG

SEQ ID NO: 57903 - protein, 11 aa, Homo sapiens
  misc_feature: Table A; Target 57903; HLA-A*30:01; PASD1; ENSG00000166049; CTA
AENISSLLGHL

SEQ ID NO: 57904 - protein, 11 aa, Homo sapiens
  misc_feature: Table A; Target 57904; HLA-B*40:01; PASD1; ENSG00000166049; CTA
AENISSLLGHL

SEQ ID NO: 57905 - protein, 11 aa, Homo sapiens
  misc_feature: Table A; Target 57905; HLA-B*44:02; PASD1; ENSG00000166049; CTA
AENISSLLGHL

SEQ ID NO: 57906 - protein, 11 aa, Homo sapiens
  misc_feature: Table A; Target 57906; HLA-B*44:03; PASD1; ENSG00000166049; CTA
AENISSLLGHL

SEQ ID NO: 57907 - protein, 11 aa, Homo sapiens
  misc_feature: Table A; Target 57907; HLA-B*49:01; PASD1; ENSG00000166049; CTA
AENISSLLGHL

SEQ ID NO: 57908 - protein, 8 aa, Homo sapiens
  misc_feature: Table A; Target 57908; HLA-B*37:01; PASD1; ENSG00000166049; CTA
AEQQPSGF

SEQ ID NO: 57909 - protein, 8 aa, Homo sapiens
  misc_feature: Table A; Target 57909; HLA-B*44:02; PASD1; ENSG00000166049; CTA
AEQQPSGF

SEQ ID NO: 57910 - protein, 8 aa, Homo sapiens
  misc_feature: Table A; Target 57910; HLA-B*44:03; PASD1; ENSG00000166049; CTA
AEQQPSGF

SEQ ID NO: 57911 - protein, 8 aa, Homo sapiens
  misc_feature: Table A; Target 57911; HLA-C*16:04; PASD1; ENSG00000166049; CTA
AEQQPSGF

SEQ ID NO: 57912 - protein, 9 aa, Homo sapiens
  misc_feature: Table A; Target 57912; HLA-A*30:02; PASD1; ENSG00000166049; CTA
AEQQPSGFY

SEQ ID NO: 57913 - protein, 9 aa, Homo sapiens
  misc_feature: Table A; Target 57913; HLA-B*15:01; PASD1; ENSG00000166049; CTA
AEQQPSGFY

SEQ ID NO: 57914 - protein, 9 aa, Homo sapiens
  misc_feature: Table A; Target 57914; HLA-B*15:03; PASD1; ENSG00000166049; CTA
AEQQPSGFY

SEQ ID NO: 57915 - protein, 9 aa, Homo sapiens
  misc_feature: Table A; Target 57915; HLA-B*27:02; PASD1; ENSG00000166049; CTA
AEQQPSGFY

SEQ ID NO: 57916 - protein, 9 aa, Homo sapiens
  misc_feature: Table A; Target 57916; HLA-B*37:01; PASD1; ENSG00000166049; CTA
AEQQPSGFY

SEQ ID NO: 57917 - protein, 9 aa, Homo sapiens
  misc_feature: Table A; Target 57917; HLA-B*44:02; PASD1; ENSG00000166049; CTA
AEQQPSGFY

SEQ ID NO: 57918 - protein, 9 aa, Homo sapiens
  misc_feature: Table A; Target 57918; HLA-B*44:03; PASD1; ENSG00000166049; CTA
AEQQPSGFY

SEQ ID NO: 57919 - protein, 9 aa, Homo sapiens
  misc_feature: Table A; Target 57919; HLA-C*16:04; PASD1; ENSG00000166049; CTA
AEQQPSGFY

SEQ ID NO: 57920 - protein, 10 aa, Homo sapiens
  misc_feature: Table A; Target 57920; HLA-B*44:02; PASD1; ENSG00000166049; CTA
AEQQPSGFYQ

SEQ ID NO: 57921 - protein, 9 aa, Homo sapiens
  misc_feature: Table A; Target 57921; HLA-B*37:01; PASD1; ENSG00000166049; CTA
AEQTRLMPA

SEQ ID NO: 57922 - protein, 8 aa, Homo sapiens
  misc_feature: Table A; Target 57922; HLA-A*30:02; PASD1; ENSG00000166049; CTA
AFQGPAAY

SEQ ID NO: 57923 - protein, 8 aa, Homo sapiens
  misc_feature: Table A; Target 57923; HLA-C*14:02; PASD1; ENSG00000166049; CTA
AFQGPAAY

SEQ ID NO: 57924 - protein, 8 aa, Homo sapiens
  misc_feature: Table A; Target 57924; HLA-B*08:01; PASD1; ENSG00000166049; CTA
AGQVKRPL

SEQ ID NO: 57925 - protein, 8 aa, Homo sapiens
  misc_feature: Table A; Target 57925; HLA-C*16:01; PASD1; ENSG00000166049; CTA
AGQVKRPL

SEQ ID NO: 57926 - protein, 9 aa, Homo sapiens
  misc_feature: Table A; Target 57926; HLA-C*01:02; PASD1; ENSG00000166049; CTA
AIQNQQNAL

SEQ ID NO: 57927 - protein, 9 aa, Homo sapiens
  misc_feature: Table A; Target 57927; HLA-C*14:02; PASD1; ENSG00000166049; CTA
AIQNQQNAL

SEQ ID NO: 57928 - protein, 10 aa, Homo sapiens
  misc_feature: Table A; Target 57928; HLA-A*25:01; PASD1; ENSG00000166049; CTA
AISSSSIPQF

SEQ ID NO: 57929 - protein, 10 aa, Homo sapiens
  misc_feature: Table A; Target 57929; HLA-A*26:01; PASD1; ENSG00000166049; CTA
AISSSSIPQF

SEQ ID NO: 57930 - protein, 9 aa, Homo sapiens
  misc_feature: Table A; Target 57930; HLA-A*03:02; PASD1; ENSG00000166049; CTA
AQPIVPVQR

SEQ ID NO: 57931 - protein, 9 aa, Homo sapiens
  misc_feature: Table A; Target 57931; HLA-A*11:01; PASD1; ENSG00000166049; CTA
AQPIVPVQR

SEQ ID NO: 57932 - protein, 9 aa, Homo sapiens
  misc_feature: Table A; Target 57932; HLA-A*31:01; PASD1; ENSG00000166049; CTA
AQPIVPVQR

SEQ ID NO: 57933 - protein, 9 aa, Homo sapiens
  misc_feature: Table A; Target 57933; HLA-A*33:03; PASD1; ENSG00000166049; CTA
AQPIVPVQR

SEQ ID NO: 57934 - protein, 9 aa, Homo sapiens
  misc_feature: Table A; Target 57934; HLA-A*68:01; PASD1; ENSG00000166049; CTA
AQPIVPVQR

SEQ ID NO: 57935 - protein, 9 aa, Homo sapiens
  misc_feature: Table A; Target 57935; HLA-B*13:02; PASD1; ENSG00000166049; CTA
AQPIVPVQR

SEQ ID NO: 57936 - protein, 9 aa, Homo sapiens
  misc_feature: Table A; Target 57936; HLA-B*27:05; PASD1; ENSG00000166049; CTA
AQPIVPVQR

SEQ ID NO: 57937 - protein, 9 aa, Homo sapiens
  misc_feature: Table A; Target 57937; HLA-C*07:06; PASD1; ENSG00000166049; CTA
AQPIVPVQR

SEQ ID NO: 57938 - protein, 8 aa, Homo sapiens
  misc_feature: Table A; Target 57938; HLA-B*56:01; PASD1; ENSG00000166049; CTA
AVYVEPAA

SEQ ID NO: 57939 - protein, 9 aa, Homo sapiens
  misc_feature: Table A; Target 57939; HLA-A*02:01; PASD1; ENSG00000166049; CTA
AVYVEPAAA

SEQ ID NO: 57940 - protein, 9 aa, Homo sapiens
  misc_feature: Table A; Target 57940; HLA-A*02:03; PASD1; ENSG00000166049; CTA
AVYVEPAAA

SEQ ID NO: 57941 - protein, 9 aa, Homo sapiens
  misc_feature: Table A; Target 57941; HLA-A*03:01; PASD1; ENSG00000166049; CTA
AVYVEPAAA

SEQ ID NO: 57942 - protein, 9 aa, Homo sapiens
  misc_feature: Table A; Target 57942; HLA-A*11:01; PASD1; ENSG00000166049; CTA
AVYVEPAAA

SEQ ID NO: 57943 - protein, 9 aa, Homo sapiens
  misc_feature: Table A; Target 57943; HLA-A*25:01; PASD1; ENSG00000166049; CTA
AVYVEPAAA

SEQ ID NO: 57944 - protein, 9 aa, Homo sapiens
  misc_feature: Table A; Target 57944; HLA-A*32:01; PASD1; ENSG00000166049; CTA
AVYVEPAAA

SEQ ID NO: 57945 - protein, 9 aa, Homo sapiens
  misc_feature: Table A; Target 57945; HLA-B*13:02; PASD1; ENSG00000166049; CTA
AVYVEPAAA

SEQ ID NO: 57946 - protein, 9 aa, Homo sapiens
  misc_feature: Table A; Target 57946; HLA-B*27:05; PASD1; ENSG00000166049; CTA
AVYVEPAAA

SEQ ID NO: 57947 - protein, 9 aa, Homo sapiens
  misc_feature: Table A; Target 57947; HLA-B*37:01; PASD1; ENSG00000166049; CTA
AVYVEPAAA

SEQ ID NO: 57948 - protein, 9 aa, Homo sapiens
  misc_feature: Table A; Target 57948; HLA-B*40:02; PASD1; ENSG00000166049; CTA
AVYVEPAAA

SEQ ID NO: 57949 - protein, 9 aa, Homo sapiens
  misc_feature: Table A; Target 57949; HLA-B*46:01; PASD1; ENSG00000166049; CTA
AVYVEPAAA

SEQ ID NO: 57950 - protein, 9 aa, Homo sapiens
  misc_feature: Table A; Target 57950; HLA-B*54:01; PASD1; ENSG00000166049; CTA
AVYVEPAAA

SEQ ID NO: 57951 - protein, 9 aa, Homo sapiens
  misc_feature: Table A; Target 57951; HLA-B*55:01; PASD1; ENSG00000166049; CTA
AVYVEPAAA

SEQ ID NO: 57952 - protein, 9 aa, Homo sapiens
  misc_feature: Table A; Target 57952; HLA-B*56:01; PASD1; ENSG00000166049; CTA
AVYVEPAAA

SEQ ID NO: 57953 - protein, 9 aa, Homo sapiens
  misc_feature: Table A; Target 57953; HLA-C*01:02; PASD1; ENSG00000166049; CTA
AVYVEPAAA

SEQ ID NO: 57954 - protein, 9 aa, Homo sapiens
  misc_feature: Table A; Target 57954; HLA-C*03:03; PASD1; ENSG00000166049; CTA
AVYVEPAAA

SEQ ID NO: 57955 - protein, 9 aa, Homo sapiens
  misc_feature: Table A; Target 57955; HLA-C*03:04; PASD1; ENSG00000166049; CTA
AVYVEPAAA

SEQ ID NO: 57956 - protein, 9 aa, Homo sapiens
  misc_feature: Table A; Target 57956; HLA-C*14:02; PASD1; ENSG00000166049; CTA
AVYVEPAAA

SEQ ID NO: 57957 - protein, 10 aa, Homo sapiens
  misc_feature: Table A; Target 57957; HLA-A*02:03; PASD1; ENSG00000166049; CTA
AVYVEPAAAA

SEQ ID NO: 57958 - protein, 10 aa, Homo sapiens
  misc_feature: Table A; Target 57958; HLA-A*03:01; PASD1; ENSG00000166049; CTA
AVYVEPAAAA

SEQ ID NO: 57959 - protein, 10 aa, Homo sapiens
  misc_feature: Table A; Target 57959; HLA-B*54:01; PASD1; ENSG00000166049; CTA
AVYVEPAAAA

SEQ ID NO: 57960 - protein, 10 aa, Homo sapiens
  misc_feature: Table A; Target 57960; HLA-B*56:01; PASD1; ENSG00000166049; CTA
AVYVEPAAAA

SEQ ID NO: 57961 - protein, 11 aa, Homo sapiens
  misc_feature: Table A; Target 57961; HLA-B*56:01; PASD1; ENSG00000166049; CTA
AVYVEPAAAAA

SEQ ID NO: 57962 - protein, 9 aa, Homo sapiens
  misc_feature: Table A; Target 57962; HLA-A*23:01; PASD1; ENSG00000166049; CTA
AYDIISQEL

SEQ ID NO: 57963 - protein, 9 aa, Homo sapiens
  misc_feature: Table A; Target 57963; HLA-A*24:02; PASD1; ENSG00000166049; CTA
AYDIISQEL

SEQ ID NO: 57964 - protein, 9 aa, Homo sapiens
  misc_feature: Table A; Target 57964; HLA-A*32:01; PASD1; ENSG00000166049; CTA
AYDIISQEL

SEQ ID NO: 57965 - protein, 9 aa, Homo sapiens
  misc_feature: Table A; Target 57965; HLA-B*35:01; PASD1; ENSG00000166049; CTA
AYDIISQEL

SEQ ID NO: 57966 - protein, 9 aa, Homo sapiens
  misc_feature: Table A; Target 57966; HLA-B*35:03; PASD1; ENSG00000166049; CTA
AYDIISQEL

SEQ ID NO: 57967 - protein, 9 aa, Homo sapiens
  misc_feature: Table A; Target 57967; HLA-B*38:01; PASD1; ENSG00000166049; CTA
AYDIISQEL

SEQ ID NO: 57968 - protein, 9 aa, Homo sapiens
  misc_feature: Table A; Target 57968; HLA-C*04:01; PASD1; ENSG00000166049; CTA
AYDIISQEL

SEQ ID NO: 57969 - protein, 9 aa, Homo sapiens
  misc_feature: Table A; Target 57969; HLA-C*05:01; PASD1; ENSG00000166049; CTA
AYDIISQEL

SEQ ID NO: 57970 - protein, 9 aa, Homo sapiens
  misc_feature: Table A; Target 57970; HLA-C*07:04; PASD1; ENSG00000166049; CTA
AYDIISQEL

SEQ ID NO: 57971 - protein, 9 aa, Homo sapiens
  misc_feature: Table A; Target 57971; HLA-C*14:02; PASD1; ENSG00000166049; CTA
AYDIISQEL

SEQ ID NO: 57972 - protein, 11 aa, Homo sapiens
  misc_feature: Table A; Target 57972; HLA-A*24:02; PASD1; ENSG00000166049; CTA
AYDIISQELEL

SEQ ID NO: 57973 - protein, 10 aa, Homo sapiens
  misc_feature: Table A; Target 57973; HLA-A*23:01; PASD1; ENSG00000166049; CTA
AYQGPPVNQL

SEQ ID NO: 57974 - protein, 10 aa, Homo sapiens
  misc_feature: Table A; Target 57974; HLA-A*24:02; PASD1; ENSG00000166049; CTA
AYQGPPVNQL

SEQ ID NO: 57975 - protein, 10 aa, Homo sapiens
  misc_feature: Table A; Target 57975; HLA-C*14:02; PASD1; ENSG00000166049; CTA
AYQGPPVNQL

SEQ ID NO: 57976 - protein, 10 aa, Homo sapiens
  misc_feature: Table A; Target 57976; HLA-C*14:02; PASD1; ENSG00000166049; CTA
AYQPDQMRSA

SEQ ID NO: 57977 - protein, 9 aa, Homo sapiens
  misc_feature: Table A; Target 57977; HLA-A*02:01; PASD1; ENSG00000166049; CTA
CVAENISSL

SEQ ID NO: 57978 - protein, 9 aa, Homo sapiens
  misc_feature: Table A; Target 57978; HLA-A*02:03; PASD1; ENSG00000166049; CTA
CVAENISSL

SEQ ID NO: 57979 - protein, 9 aa, Homo sapiens
  misc_feature: Table A; Target 57979; HLA-A*25:01; PASD1; ENSG00000166049; CTA
CVAENISSL

SEQ ID NO: 57980 - protein, 9 aa, Homo sapiens
  misc_feature: Table A; Target 57980; HLA-A*26:01; PASD1; ENSG00000166049; CTA
CVAENISSL

SEQ ID NO: 57981 - protein, 9 aa, Homo sapiens
  misc_feature: Table A; Target 57981; HLA-A*32:01; PASD1; ENSG00000166049; CTA
CVAENISSL

SEQ ID NO: 57982 - protein, 9 aa, Homo sapiens
  misc_feature: Table A; Target 57982; HLA-B*27:05; PASD1; ENSG00000166049; CTA
CVAENISSL

SEQ ID NO: 57983 - protein, 9 aa, Homo sapiens
  misc_feature: Table A; Target 57983; HLA-B*46:01; PASD1; ENSG00000166049; CTA
CVAENISSL

SEQ ID NO: 57984 - protein, 9 aa, Homo sapiens
  misc_feature: Table A; Target 57984; HLA-C*01:02; PASD1; ENSG00000166049; CTA
CVAENISSL

SEQ ID NO: 57985 - protein, 9 aa, Homo sapiens
  misc_feature: Table A; Target 57985; HLA-C*03:03; PASD1; ENSG00000166049; CTA
CVAENISSL

SEQ ID NO: 57986 - protein, 9 aa, Homo sapiens
  misc_feature: Table A; Target 57986; HLA-C*03:04; PASD1; ENSG00000166049; CTA
CVAENISSL

SEQ ID NO: 57987 - protein, 9 aa, Homo sapiens
  misc_feature: Table A; Target 57987; HLA-C*12:03; PASD1; ENSG00000166049; CTA
CVAENISSL

SEQ ID NO: 57988 - protein, 9 aa, Homo sapiens
  misc_feature: Table A; Target 57988; HLA-C*14:02; PASD1; ENSG00000166049; CTA
CVAENISSL

SEQ ID NO: 57989 - protein, 9 aa, Homo sapiens
  misc_feature: Table A; Target 57989; HLA-B*51:01; PASD1; ENSG00000166049; CTA
DAIQNQQNA

SEQ ID NO: 57990 - protein, 10 aa, Homo sapiens
  misc_feature: Table A; Target 57990; HLA-A*25:01; PASD1; ENSG00000166049; CTA
DAIQNQQNAL

SEQ ID NO: 57991 - protein, 10 aa, Homo sapiens
  misc_feature: Table A; Target 57991; HLA-A*68:01; PASD1; ENSG00000166049; CTA
DAIQNQQNAL

SEQ ID NO: 57992 - protein, 10 aa, Homo sapiens
  misc_feature: Table A; Target 57992; HLA-B*35:03; PASD1; ENSG00000166049; CTA
DAIQNQQNAL

SEQ ID NO: 57993 - protein, 10 aa, Homo sapiens
  misc_feature: Table A; Target 57993; HLA-B*51:01; PASD1; ENSG00000166049; CTA
DAIQNQQNAL

SEQ ID NO: 57994 - protein, 10 aa, Homo sapiens
  misc_feature: Table A; Target 57994; HLA-C*03:03; PASD1; ENSG00000166049; CTA
DAIQNQQNAL

SEQ ID NO: 57995 - protein, 10 aa, Homo sapiens
  misc_feature: Table A; Target 57995; HLA-C*03:04; PASD1; ENSG00000166049; CTA
DAIQNQQNAL

SEQ ID NO: 57996 - protein, 10 aa, Homo sapiens
  misc_feature: Table A; Target 57996; HLA-C*07:06; PASD1; ENSG00000166049; CTA
DAIQNQQNAL

SEQ ID NO: 57997 - protein, 8 aa, Homo sapiens
  misc_feature: Table A; Target 57997; HLA-B*18:01; PASD1; ENSG00000166049; CTA
DEEKDEVY

SEQ ID NO: 57998 - protein, 9 aa, Homo sapiens
  misc_feature: Table A; Target 57998; HLA-A*30:01; PASD1; ENSG00000166049; CTA
DEEPFVGEL

SEQ ID NO: 57999 - protein, 9 aa, Homo sapiens
  misc_feature: Table A; Target 57999; HLA-B*18:01; PASD1; ENSG00000166049; CTA
DEEPFVGEL

SEQ ID NO: 58000 - protein, 9 aa, Homo sapiens
  misc_feature: Table A; Target 58000; HLA-B*39:01; PASD1; ENSG00000166049; CTA
DEEPFVGEL

SEQ ID NO: 58001 - protein, 9 aa, Homo sapiens
  misc_feature: Table A; Target 58001; HLA-B*40:01; PASD1; ENSG00000166049; CTA
DEEPFVGEL

SEQ ID NO: 58002 - protein, 9 aa, Homo sapiens
  misc_feature: Table A; Target 58002; HLA-B*40:02; PASD1; ENSG00000166049; CTA
DEEPFVGEL

SEQ ID NO: 58003 - protein, 9 aa, Homo sapiens
  misc_feature: Table A; Target 58003; HLA-B*49:01; PASD1; ENSG00000166049; CTA
DEEPFVGEL

SEQ ID NO: 58004 - protein, 11 aa, Homo sapiens
  misc_feature: Table A; Target 58004; HLA-B*18:01; PASD1; ENSG00000166049; CTA
DESQSFYPEAY

SEQ ID NO: 58005 - protein, 9 aa, Homo sapiens
  misc_feature: Table A; Target 58005; HLA-B*18:01; PASD1; ENSG00000166049; CTA
DEVYQKIIL

SEQ ID NO: 58006 - protein, 10 aa, Homo sapiens
  misc_feature: Table A; Target 58006; HLA-B*38:01; PASD1; ENSG00000166049; CTA
DHLQKQPNTL

SEQ ID NO: 58007 - protein, 10 aa, Homo sapiens
  misc_feature: Table A; Target 58007; HLA-B*39:01; PASD1; ENSG00000166049; CTA
DHLQKQPNTL

SEQ ID NO: 58008 - protein, 8 aa, Homo sapiens
  misc_feature: Table A; Target 58008; HLA-A*26:01; PASD1; ENSG00000166049; CTA
DIAEVEQY

SEQ ID NO: 58009 - protein, 8 aa, Homo sapiens
  misc_feature: Table A; Target 58009; HLA-B*18:01; PASD1; ENSG00000166049; CTA
DIAEVEQY

SEQ ID NO: 58010 - protein, 10 aa, Homo sapiens
  misc_feature: Table A; Target 58010; HLA-A*25:01; PASD1; ENSG00000166049; CTA
DICNEFPVVF

SEQ ID NO: 58011 - protein, 9 aa, Homo sapiens
  misc_feature: Table A; Target 58011; HLA-A*25:01; PASD1; ENSG00000166049; CTA
DIISQELEL

SEQ ID NO: 58012 - protein, 9 aa, Homo sapiens
  misc_feature: Table A; Target 58012; HLA-A*26:01; PASD1; ENSG00000166049; CTA
DIISQELEL

SEQ ID NO: 58013 - protein, 9 aa, Homo sapiens
  misc_feature: Table A; Target 58013; HLA-B*35:03; PASD1; ENSG00000166049; CTA
DIISQELEL

SEQ ID NO: 58014 - protein, 10 aa, Homo sapiens
  misc_feature: Table A; Target 58014; HLA-A*25:01; PASD1; ENSG00000166049; CTA
DIISQELELM

SEQ ID NO: 58015 - protein, 10 aa, Homo sapiens
  misc_feature: Table A; Target 58015; HLA-A*26:01; PASD1; ENSG00000166049; CTA
DIISQELELM

SEQ ID NO: 58016 - protein, 10 aa, Homo sapiens
  misc_feature: Table A; Target 58016; HLA-A*03:02; PASD1; ENSG00000166049; CTA
DLQSSEAVPK

SEQ ID NO: 58017 - protein, 10 aa, Homo sapiens
  misc_feature: Table A; Target 58017; HLA-A*11:01; PASD1; ENSG00000166049; CTA
DLQSSEAVPK

SEQ ID NO: 58018 - protein, 10 aa, Homo sapiens
  misc_feature: Table A; Target 58018; HLA-A*33:01; PASD1; ENSG00000166049; CTA
DLQSSEAVPK

SEQ ID NO: 58019 - protein, 10 aa, Homo sapiens
  misc_feature: Table A; Target 58019; HLA-A*68:01; PASD1; ENSG00000166049; CTA
DLQSSEAVPK

SEQ ID NO: 58020 - protein, 10 aa, Homo sapiens
  misc_feature: Table A; Target 58020; HLA-B*27:02; PASD1; ENSG00000166049; CTA
DLQSSEAVPK

SEQ ID NO: 58021 - protein, 10 aa, Homo sapiens
  misc_feature: Table A; Target 58021; HLA-C*07:06; PASD1; ENSG00000166049; CTA
DLQSSEAVPK

SEQ ID NO: 58022 - protein, 11 aa, Homo sapiens
  misc_feature: Table A; Target 58022; HLA-A*03:02; PASD1; ENSG00000166049; CTA
DLQSSEAVPKK

SEQ ID NO: 58023 - protein, 11 aa, Homo sapiens
  misc_feature: Table A; Target 58023; HLA-A*11:01; PASD1; ENSG00000166049; CTA
DLQSSEAVPKK

SEQ ID NO: 58024 - protein, 11 aa, Homo sapiens
  misc_feature: Table A; Target 58024; HLA-A*33:01; PASD1; ENSG00000166049; CTA
DLQSSEAVPKK

SEQ ID NO: 58025 - protein, 11 aa, Homo sapiens
  misc_feature: Table A; Target 58025; HLA-A*68:01; PASD1; ENSG00000166049; CTA
DLQSSEAVPKK

SEQ ID NO: 58026 - protein, 9 aa, Homo sapiens
  misc_feature: Table A; Target 58026; HLA-B*35:03; PASD1; ENSG00000166049; CTA
DPENPVAPL

SEQ ID NO: 58027 - protein, 9 aa, Homo sapiens
  misc_feature: Table A; Target 58027; HLA-B*35:01; PASD1; ENSG00000166049; CTA
DPVDLEFSV

SEQ ID NO: 58028 - protein, 9 aa, Homo sapiens
  misc_feature: Table A; Target 58028; HLA-B*35:03; PASD1; ENSG00000166049; CTA
DPVDLEFSV

SEQ ID NO: 58029 - protein, 9 aa, Homo sapiens
  misc_feature: Table A; Target 58029; HLA-B*51:01; PASD1; ENSG00000166049; CTA
DPVDLEFSV

SEQ ID NO: 58030 - protein, 9 aa, Homo sapiens
  misc_feature: Table A; Target 58030; HLA-B*54:01; PASD1; ENSG00000166049; CTA
DPVDLEFSV

SEQ ID NO: 58031 - protein, 9 aa, Homo sapiens
  misc_feature: Table A; Target 58031; HLA-B*56:01; PASD1; ENSG00000166049; CTA
DPVDLEFSV

SEQ ID NO: 58032 - protein, 9 aa, Homo sapiens
  misc_feature: Table A; Target 58032; HLA-B*35:03; PASD1; ENSG00000166049; CTA
DPVDPEDSV

SEQ ID NO: 58033 - protein, 9 aa, Homo sapiens
  misc_feature: Table A; Target 58033; HLA-B*51:01; PASD1; ENSG00000166049; CTA
DPVDPEDSV

SEQ ID NO: 58034 - protein, 11 aa, Homo sapiens
  misc_feature: Table A; Target 58034; HLA-B*35:03; PASD1; ENSG00000166049; CTA
DPVDPEDSVDL

SEQ ID NO: 58035 - protein, 8 aa, Homo sapiens
  misc_feature: Table A; Target 58035; HLA-B*18:01; PASD1; ENSG00000166049; CTA
DQIDIAEV

SEQ ID NO: 58036 - protein, 11 aa, Homo sapiens
  misc_feature: Table A; Target 58036; HLA-A*25:01; PASD1; ENSG00000166049; CTA
DQIDIAEVEQY

SEQ ID NO: 58037 - protein, 11 aa, Homo sapiens
  misc_feature: Table A; Target 58037; HLA-A*26:01; PASD1; ENSG00000166049; CTA
DQIDIAEVEQY

SEQ ID NO: 58038 - protein, 11 aa, Homo sapiens
  misc_feature: Table A; Target 58038; HLA-A*30:02; PASD1; ENSG00000166049; CTA
DQIDIAEVEQY

SEQ ID NO: 58039 - protein, 11 aa, Homo sapiens
  misc_feature: Table A; Target 58039; HLA-B*15:01; PASD1; ENSG00000166049; CTA
DQIDIAEVEQY

SEQ ID NO: 58040 - protein, 11 aa, Homo sapiens
  misc_feature: Table A; Target 58040; HLA-B*18:01; PASD1; ENSG00000166049; CTA
DQIDIAEVEQY

SEQ ID NO: 58041 - protein, 11 aa, Homo sapiens
  misc_feature: Table A; Target 58041; HLA-B*27:05; PASD1; ENSG00000166049; CTA
DQIDIAEVEQY

SEQ ID NO: 58042 - protein, 11 aa, Homo sapiens
  misc_feature: Table A; Target 58042; HLA-B*35:01; PASD1; ENSG00000166049; CTA
DQIDIAEVEQY

SEQ ID NO: 58043 - protein, 11 aa, Homo sapiens
  misc_feature: Table A; Target 58043; HLA-C*07:06; PASD1; ENSG00000166049; CTA
DQIDIAEVEQY

SEQ ID NO: 58044 - protein, 9 aa, Homo sapiens
  misc_feature: Table A; Target 58044; HLA-B*39:01; PASD1; ENSG00000166049; CTA
DQQDPENPV

SEQ ID NO: 58045 - protein, 9 aa, Homo sapiens
  misc_feature: Table A; Target 58045; HLA-A*26:01; PASD1; ENSG00000166049; CTA
DSLGPVVQV

SEQ ID NO: 58046 - protein, 9 aa, Homo sapiens
  misc_feature: Table A; Target 58046; HLA-A*33:01; PASD1; ENSG00000166049; CTA
DSLGPVVQV

SEQ ID NO: 58047 - protein, 9 aa, Homo sapiens
  misc_feature: Table A; Target 58047; HLA-A*33:03; PASD1; ENSG00000166049; CTA
DSLGPVVQV

SEQ ID NO: 58048 - protein, 9 aa, Homo sapiens
  misc_feature: Table A; Target 58048; HLA-A*68:02; PASD1; ENSG00000166049; CTA
DSLGPVVQV

SEQ ID NO: 58049 - protein, 9 aa, Homo sapiens
  misc_feature: Table A; Target 58049; HLA-B*51:01; PASD1; ENSG00000166049; CTA
DSLGPVVQV

SEQ ID NO: 58050 - protein, 9 aa, Homo sapiens
  misc_feature: Table A; Target 58050; HLA-A*68:01; PASD1; ENSG00000166049; CTA
DSSAYENVK

SEQ ID NO: 58051 - protein, 10 aa, Homo sapiens
  misc_feature: Table A; Target 58051; HLA-A*33:01; PASD1; ENSG00000166049; CTA
DSSAYENVKF

SEQ ID NO: 58052 - protein, 10 aa, Homo sapiens
  misc_feature: Table A; Target 58052; HLA-C*12:03; PASD1; ENSG00000166049; CTA
DSSAYENVKF

SEQ ID NO: 58053 - protein, 9 aa, Homo sapiens
  misc_feature: Table A; Target 58053; HLA-A*23:01; PASD1; ENSG00000166049; CTA
DTMPESPAL

SEQ ID NO: 58054 - protein, 9 aa, Homo sapiens
  misc_feature: Table A; Target 58054; HLA-A*25:01; PASD1; ENSG00000166049; CTA
DTMPESPAL

SEQ ID NO: 58055 - protein, 9 aa, Homo sapiens
  misc_feature: Table A; Target 58055; HLA-A*26:01; PASD1; ENSG00000166049; CTA
DTMPESPAL

SEQ ID NO: 58056 - protein, 9 aa, Homo sapiens
  misc_feature: Table A; Target 58056; HLA-A*33:01; PASD1; ENSG00000166049; CTA
DTMPESPAL

SEQ ID NO: 58057 - protein, 9 aa, Homo sapiens
  misc_feature: Table A; Target 58057; HLA-A*33:03; PASD1; ENSG00000166049; CTA
DTMPESPAL

SEQ ID NO: 58058 - protein, 9 aa, Homo sapiens
  misc_feature: Table A; Target 58058; HLA-A*68:01; PASD1; ENSG00000166049; CTA
DTMPESPAL

SEQ ID NO: 58059 - protein, 9 aa, Homo sapiens
  misc_feature: Table A; Target 58059; HLA-A*68:02; PASD1; ENSG00000166049; CTA
DTMPESPAL

SEQ ID NO: 58060 - protein, 9 aa, Homo sapiens
  misc_feature: Table A; Target 58060; HLA-B*08:01; PASD1; ENSG00000166049; CTA
DTMPESPAL

SEQ ID NO: 58061 - protein, 9 aa, Homo sapiens
  misc_feature: Table A; Target 58061; HLA-B*18:01; PASD1; ENSG00000166049; CTA
DTMPESPAL

SEQ ID NO: 58062 - protein, 9 aa, Homo sapiens
  misc_feature: Table A; Target 58062; HLA-B*27:02; PASD1; ENSG00000166049; CTA
DTMPESPAL

SEQ ID NO: 58063 - protein, 9 aa, Homo sapiens
  misc_feature: Table A; Target 58063; HLA-B*27:05; PASD1; ENSG00000166049; CTA
DTMPESPAL

SEQ ID NO: 58064 - protein, 9 aa, Homo sapiens
  misc_feature: Table A; Target 58064; HLA-B*35:01; PASD1; ENSG00000166049; CTA
DTMPESPAL

SEQ ID NO: 58065 - protein, 9 aa, Homo sapiens
  misc_feature: Table A; Target 58065; HLA-B*35:03; PASD1; ENSG00000166049; CTA
DTMPESPAL

SEQ ID NO: 58066 - protein, 9 aa, Homo sapiens
  misc_feature: Table A; Target 58066; HLA-B*38:01; PASD1; ENSG00000166049; CTA
DTMPESPAL

SEQ ID NO: 58067 - protein, 9 aa, Homo sapiens
  misc_feature: Table A; Target 58067; HLA-B*39:01; PASD1; ENSG00000166049; CTA
DTMPESPAL

SEQ ID NO: 58068 - protein, 9 aa, Homo sapiens
  misc_feature: Table A; Target 58068; HLA-B*40:01; PASD1; ENSG00000166049; CTA
DTMPESPAL

SEQ ID NO: 58069 - protein, 9 aa, Homo sapiens
  misc_feature: Table A; Target 58069; HLA-B*40:02; PASD1; ENSG00000166049; CTA
DTMPESPAL

SEQ ID NO: 58070 - protein, 9 aa, Homo sapiens
  misc_feature: Table A; Target 58070; HLA-B*51:01; PASD1; ENSG00000166049; CTA
DTMPESPAL

SEQ ID NO: 58071 - protein, 9 aa, Homo sapiens
  misc_feature: Table A; Target 58071; HLA-B*58:01; PASD1; ENSG00000166049; CTA
DTMPESPAL

SEQ ID NO: 58072 - protein, 9 aa, Homo sapiens
  misc_feature: Table A; Target 58072; HLA-C*01:02; PASD1; ENSG00000166049; CTA
DTMPESPAL

SEQ ID NO: 58073 - protein, 9 aa, Homo sapiens
  misc_feature: Table A; Target 58073; HLA-C*03:03; PASD1; ENSG00000166049; CTA
DTMPESPAL

SEQ ID NO: 58074 - protein, 9 aa, Homo sapiens
  misc_feature: Table A; Target 58074; HLA-C*03:04; PASD1; ENSG00000166049; CTA
DTMPESPAL

SEQ ID NO: 58075 - protein, 9 aa, Homo sapiens
  misc_feature: Table A; Target 58075; HLA-C*05:01; PASD1; ENSG00000166049; CTA
DTMPESPAL

SEQ ID NO: 58076 - protein, 9 aa, Homo sapiens
  misc_feature: Table A; Target 58076; HLA-C*07:04; PASD1; ENSG00000166049; CTA
DTMPESPAL

SEQ ID NO: 58077 - protein, 9 aa, Homo sapiens
  misc_feature: Table A; Target 58077; HLA-C*07:06; PASD1; ENSG00000166049; CTA
DTMPESPAL

SEQ ID NO: 58078 - protein, 9 aa, Homo sapiens
  misc_feature: Table A; Target 58078; HLA-C*16:01; PASD1; ENSG00000166049; CTA
DTMPESPAL

SEQ ID NO: 58079 - protein, 11 aa, Homo sapiens
  misc_feature: Table A; Target 58079; HLA-A*25:01; PASD1; ENSG00000166049; CTA
DTMPESPALSL

SEQ ID NO: 58080 - protein, 11 aa, Homo sapiens
  misc_feature: Table A; Target 58080; HLA-A*26:01; PASD1; ENSG00000166049; CTA
DTMPESPALSL

SEQ ID NO: 58081 - protein, 11 aa, Homo sapiens
  misc_feature: Table A; Target 58081; HLA-A*33:01; PASD1; ENSG00000166049; CTA
DTMPESPALSL

SEQ ID NO: 58082 - protein, 11 aa, Homo sapiens
  misc_feature: Table A; Target 58082; HLA-A*33:03; PASD1; ENSG00000166049; CTA
DTMPESPALSL

SEQ ID NO: 58083 - protein, 11 aa, Homo sapiens
  misc_feature: Table A; Target 58083; HLA-A*68:01; PASD1; ENSG00000166049; CTA
DTMPESPALSL

SEQ ID NO: 58084 - protein, 11 aa, Homo sapiens
  misc_feature: Table A; Target 58084; HLA-C*07:06; PASD1; ENSG00000166049; CTA
DTMPESPALSL

SEQ ID NO: 58085 - protein, 9 aa, Homo sapiens
  misc_feature: Table A; Target 58085; HLA-A*33:01; PASD1; ENSG00000166049; CTA
DVSVPLCNH

SEQ ID NO: 58086 - protein, 8 aa, Homo sapiens
  misc_feature: Table A; Target 58086; HLA-A*23:01; PASD1; ENSG00000166049; CTA
DYFNQVTL

SEQ ID NO: 58087 - protein, 8 aa, Homo sapiens
  misc_feature: Table A; Target 58087; HLA-C*14:02; PASD1; ENSG00000166049; CTA
DYFNQVTL

SEQ ID NO: 58088 - protein, 10 aa, Homo sapiens
  misc_feature: Table A; Target 58088; HLA-A*23:01; PASD1; ENSG00000166049; CTA
DYFNQVTLQL

SEQ ID NO: 58089 - protein, 9 aa, Homo sapiens
  misc_feature: Table A; Target 58089; HLA-A*24:02; PASD1; ENSG00000166049; CTA
DYIRLWQEL

SEQ ID NO: 58090 - protein, 8 aa, Homo sapiens
  misc_feature: Table A; Target 58090; HLA-B*51:01; PASD1; ENSG00000166049; CTA
EAISSSSI

SEQ ID NO: 58091 - protein, 11 aa, Homo sapiens
  misc_feature: Table A; Target 58091; HLA-A*23:01; PASD1; ENSG00000166049; CTA
EAISSSSIPQF

SEQ ID NO: 58092 - protein, 11 aa, Homo sapiens
  misc_feature: Table A; Target 58092; HLA-A*25:01; PASD1; ENSG00000166049; CTA
EAISSSSIPQF

SEQ ID NO: 58093 - protein, 11 aa, Homo sapiens
  misc_feature: Table A; Target 58093; HLA-A*26:01; PASD1; ENSG00000166049; CTA
EAISSSSIPQF

SEQ ID NO: 58094 - protein, 11 aa, Homo sapiens
  misc_feature: Table A; Target 58094; HLA-A*68:01; PASD1; ENSG00000166049; CTA
EAISSSSIPQF

SEQ ID NO: 58095 - protein, 11 aa, Homo sapiens
  misc_feature: Table A; Target 58095; HLA-B*35:01; PASD1; ENSG00000166049; CTA
EAISSSSIPQF

SEQ ID NO: 58096 - protein, 11 aa, Homo sapiens
  misc_feature: Table A; Target 58096; HLA-B*58:01; PASD1; ENSG00000166049; CTA
EAISSSSIPQF

SEQ ID NO: 58097 - protein, 9 aa, Homo sapiens
  misc_feature: Table A; Target 58097; HLA-A*33:03; PASD1; ENSG00000166049; CTA
EAVPKKQQK

SEQ ID NO: 58098 - protein, 9 aa, Homo sapiens
  misc_feature: Table A; Target 58098; HLA-A*68:01; PASD1; ENSG00000166049; CTA
EAVPKKQQK

SEQ ID NO: 58099 - protein, 8 aa, Homo sapiens
  misc_feature: Table A; Target 58099; HLA-B*51:01; PASD1; ENSG00000166049; CTA
EAYQGPPV

SEQ ID NO: 58100 - protein, 11 aa, Homo sapiens
  misc_feature: Table A; Target 58100; HLA-A*25:01; PASD1; ENSG00000166049; CTA
EAYQGPPVNQL

SEQ ID NO: 58101 - protein, 11 aa, Homo sapiens
  misc_feature: Table A; Target 58101; HLA-A*26:01; PASD1; ENSG00000166049; CTA
EAYQGPPVNQL

SEQ ID NO: 58102 - protein, 11 aa, Homo sapiens
  misc_feature: Table A; Target 58102; HLA-A*68:01; PASD1; ENSG00000166049; CTA
EAYQGPPVNQL

SEQ ID NO: 58103 - protein, 9 aa, Homo sapiens
  misc_feature: Table A; Target 58103; HLA-B*40:01; PASD1; ENSG00000166049; CTA
EEEQQKQQL

SEQ ID NO: 58104 - protein, 9 aa, Homo sapiens
  misc_feature: Table A; Target 58104; HLA-B*44:02; PASD1; ENSG00000166049; CTA
EEEQQKQQL

SEQ ID NO: 58105 - protein, 9 aa, Homo sapiens
  misc_feature: Table A; Target 58105; HLA-B*44:03; PASD1; ENSG00000166049; CTA
EEEQQKQQL

SEQ ID NO: 58106 - protein, 10 aa, Homo sapiens
  misc_feature: Table A; Target 58106; HLA-B*44:02; PASD1; ENSG00000166049; CTA
EEKDEVYQKI

SEQ ID NO: 58107 - protein, 10 aa, Homo sapiens
  misc_feature: Table A; Target 58107; HLA-B*44:03; PASD1; ENSG00000166049; CTA
EEKDEVYQKI

SEQ ID NO: 58108 - protein, 9 aa, Homo sapiens
  misc_feature: Table A; Target 58108; HLA-A*23:01; PASD1; ENSG00000166049; CTA
EFPVVFSGL

SEQ ID NO: 58109 - protein, 9 aa, Homo sapiens
  misc_feature: Table A; Target 58109; HLA-A*24:02; PASD1; ENSG00000166049; CTA
EFPVVFSGL

SEQ ID NO: 58110 - protein, 9 aa, Homo sapiens
  misc_feature: Table A; Target 58110; HLA-A*26:01; PASD1; ENSG00000166049; CTA
EFPVVFSGL

SEQ ID NO: 58111 - protein, 9 aa, Homo sapiens
  misc_feature: Table A; Target 58111; HLA-C*01:02; PASD1; ENSG00000166049; CTA
EFPVVFSGL

SEQ ID NO: 58112 - protein, 9 aa, Homo sapiens
  misc_feature: Table A; Target 58112; HLA-A*25:01; PASD1; ENSG00000166049; CTA
EGPPDPQAF

SEQ ID NO: 58113 - protein, 8 aa, Homo sapiens
  misc_feature: Table A; Target 58113; HLA-B*08:01; PASD1; ENSG00000166049; CTA
EIVGKKLL

SEQ ID NO: 58114 - protein, 10 aa, Homo sapiens
  misc_feature: Table A; Target 58114; HLA-A*25:01; PASD1; ENSG00000166049; CTA
EIVGKKLLSL

SEQ ID NO: 58115 - protein, 9 aa, Homo sapiens
  misc_feature: Table A; Target 58115; HLA-A*25:01; PASD1; ENSG00000166049; CTA
ELQEPCVAF

SEQ ID NO: 58116 - protein, 9 aa, Homo sapiens
  misc_feature: Table A; Target 58116; HLA-A*26:01; PASD1; ENSG00000166049; CTA
ELQEPCVAF

SEQ ID NO: 58117 - protein, 9 aa, Homo sapiens
  misc_feature: Table A; Target 58117; HLA-A*33:03; PASD1; ENSG00000166049; CTA
ELQEPCVAF

SEQ ID NO: 58118 - protein, 9 aa, Homo sapiens
  misc_feature: Table A; Target 58118; HLA-A*33:03; PASD1; ENSG00000166049; CTA
ELSSSQGQR

SEQ ID NO: 58119 - protein, 9 aa, Homo sapiens
  misc_feature: Table A; Target 58119; HLA-A*26:01; PASD1; ENSG00000166049; CTA
ENISSLLGH

SEQ ID NO: 58120 - protein, 9 aa, Homo sapiens
  misc_feature: Table A; Target 58120; HLA-A*68:02; PASD1; ENSG00000166049; CTA
ENVKFIVNV

SEQ ID NO: 58121 - protein, 10 aa, Homo sapiens
  misc_feature: Table A; Target 58121; HLA-A*33:03; PASD1; ENSG00000166049; CTA
ENVKFIVNVR

SEQ ID NO: 58122 - protein, 9 aa, Homo sapiens
  misc_feature: Table A; Target 58122; HLA-B*35:03; PASD1; ENSG00000166049; CTA
EPAAAAAAA

SEQ ID NO: 58123 - protein, 9 aa, Homo sapiens
  misc_feature: Table A; Target 58123; HLA-B*54:01; PASD1; ENSG00000166049; CTA
EPAAAAAAA

SEQ ID NO: 58124 - protein, 9 aa, Homo sapiens
  misc_feature: Table A; Target 58124; HLA-B*56:01; PASD1; ENSG00000166049; CTA
EPAAAAAAA

SEQ ID NO: 58125 - protein, 8 aa, Homo sapiens
  misc_feature: Table A; Target 58125; HLA-A*01:01; PASD1; ENSG00000166049; CTA
EPEVNPLY

SEQ ID NO: 58126 - protein, 8 aa, Homo sapiens
  misc_feature: Table A; Target 58126; HLA-B*35:01; PASD1; ENSG00000166049; CTA
EPEVNPLY

SEQ ID NO: 58127 - protein, 8 aa, Homo sapiens
  misc_feature: Table A; Target 58127; HLA-B*55:01; PASD1; ENSG00000166049; CTA
EPEVNPLY

SEQ ID NO: 58128 - protein, 8 aa, Homo sapiens
  misc_feature: Table A; Target 58128; HLA-C*03:03; PASD1; ENSG00000166049; CTA
EPEVNPLY

SEQ ID NO: 58129 - protein, 9 aa, Homo sapiens
  misc_feature: Table A; Target 58129; HLA-A*33:03; PASD1; ENSG00000166049; CTA
EPEVNPLYR

SEQ ID NO: 58130 - protein, 9 aa, Homo sapiens
  misc_feature: Table A; Target 58130; HLA-A*68:01; PASD1; ENSG00000166049; CTA
EPEVNPLYR

SEQ ID NO: 58131 - protein, 9 aa, Homo sapiens
  misc_feature: Table A; Target 58131; HLA-C*07:06; PASD1; ENSG00000166049; CTA
EPEVNPLYR

SEQ ID NO: 58132 - protein, 11 aa, Homo sapiens
  misc_feature: Table A; Target 58132; HLA-A*26:01; PASD1; ENSG00000166049; CTA
EQGTLHGQPTY

SEQ ID NO: 58133 - protein, 9 aa, Homo sapiens
  misc_feature: Table A; Target 58133; HLA-A*33:03; PASD1; ENSG00000166049; CTA
EQHLKEQQR

SEQ ID NO: 58134 - protein, 8 aa, Homo sapiens
  misc_feature: Table A; Target 58134; HLA-B*08:01; PASD1; ENSG00000166049; CTA
EQPLKHNV

SEQ ID NO: 58135 - protein, 9 aa, Homo sapiens
  misc_feature: Table A; Target 58135; HLA-B*08:01; PASD1; ENSG00000166049; CTA
EQPLKHNVI

SEQ ID NO: 58136 - protein, 8 aa, Homo sapiens
  misc_feature: Table A; Target 58136; HLA-A*30:02; PASD1; ENSG00000166049; CTA
EQQPSGFY

SEQ ID NO: 58137 - protein, 8 aa, Homo sapiens
  misc_feature: Table A; Target 58137; HLA-B*39:01; PASD1; ENSG00000166049; CTA
EQQPSGFY

SEQ ID NO: 58138 - protein, 9 aa, Homo sapiens
  misc_feature: Table A; Target 58138; HLA-A*30:01; PASD1; ENSG00000166049; CTA
EQYGPQENV

SEQ ID NO: 58139 - protein, 9 aa, Homo sapiens
  misc_feature: Table A; Target 58139; HLA-B*13:02; PASD1; ENSG00000166049; CTA
EQYGPQENV

SEQ ID NO: 58140 - protein, 9 aa, Homo sapiens
  misc_feature: Table A; Target 58140; HLA-B*39:01; PASD1; ENSG00000166049; CTA
EQYGPQENV

SEQ ID NO: 58141 - protein, 9 aa, Homo sapiens
  misc_feature: Table A; Target 58141; HLA-C*06:02; PASD1; ENSG00000166049; CTA
EQYGPQENV

SEQ ID NO: 58142 - protein, 11 aa, Homo sapiens
  misc_feature: Table A; Target 58142; HLA-A*26:01; PASD1; ENSG00000166049; CTA
EQYGPQENVHM

SEQ ID NO: 58143 - protein, 11 aa, Homo sapiens
  misc_feature: Table A; Target 58143; HLA-B*27:05; PASD1; ENSG00000166049; CTA
EQYGPQENVHM

SEQ ID NO: 58144 - protein, 11 aa, Homo sapiens
  misc_feature: Table A; Target 58144; HLA-B*38:01; PASD1; ENSG00000166049; CTA
EQYGPQENVHM

SEQ ID NO: 58145 - protein, 11 aa, Homo sapiens
  misc_feature: Table A; Target 58145; HLA-B*39:01; PASD1; ENSG00000166049; CTA
EQYGPQENVHM

SEQ ID NO: 58146 - protein, 10 aa, Homo sapiens
  misc_feature: Table A; Target 58146; HLA-A*26:01; PASD1; ENSG00000166049; CTA
ESPALSLQDF

SEQ ID NO: 58147 - protein, 10 aa, Homo sapiens
  misc_feature: Table A; Target 58147; HLA-A*01:01; PASD1; ENSG00000166049; CTA
ESQSFYPEAY

SEQ ID NO: 58148 - protein, 10 aa, Homo sapiens
  misc_feature: Table A; Target 58148; HLA-A*25:01; PASD1; ENSG00000166049; CTA
ESQSFYPEAY

SEQ ID NO: 58149 - protein, 10 aa, Homo sapiens
  misc_feature: Table A; Target 58149; HLA-A*26:01; PASD1; ENSG00000166049; CTA
ESQSFYPEAY

SEQ ID NO: 58150 - protein, 10 aa, Homo sapiens
  misc_feature: Table A; Target 58150; HLA-A*30:02; PASD1; ENSG00000166049; CTA
ESQSFYPEAY

SEQ ID NO: 58151 - protein, 9 aa, Homo sapiens
  misc_feature: Table A; Target 58151; HLA-A*68:02; PASD1; ENSG00000166049; CTA
ETPQDYIRL

SEQ ID NO: 58152 - protein, 10 aa, Homo sapiens
  misc_feature: Table A; Target 58152; HLA-A*25:01; PASD1; ENSG00000166049; CTA
ETPQDYIRLW

SEQ ID NO: 58153 - protein, 10 aa, Homo sapiens
  misc_feature: Table A; Target 58153; HLA-B*44:02; PASD1; ENSG00000166049; CTA
ETPQDYIRLW

SEQ ID NO: 58154 - protein, 10 aa, Homo sapiens
  misc_feature: Table A; Target 58154; HLA-B*57:01; PASD1; ENSG00000166049; CTA
ETPQDYIRLW

SEQ ID NO: 58155 - protein, 11 aa, Homo sapiens
  misc_feature: Table A; Target 58155; HLA-A*68:02; PASD1; ENSG00000166049; CTA
EVEQYGPQENV

SEQ ID NO: 58156 - protein, 8 aa, Homo sapiens
  misc_feature: Table A; Target 58156; HLA-B*08:01; PASD1; ENSG00000166049; CTA
EVYQKIIL

SEQ ID NO: 58157 - protein, 9 aa, Homo sapiens
  misc_feature: Table A; Target 58157; HLA-A*03:01; PASD1; ENSG00000166049; CTA
EVYQKIILK

SEQ ID NO: 58158 - protein, 9 aa, Homo sapiens
  misc_feature: Table A; Target 58158; HLA-A*11:01; PASD1; ENSG00000166049; CTA
EVYQKIILK

SEQ ID NO: 58159 - protein, 9 aa, Homo sapiens
  misc_feature: Table A; Target 58159; HLA-A*26:01; PASD1; ENSG00000166049; CTA
EVYQKIILK

SEQ ID NO: 58160 - protein, 9 aa, Homo sapiens
  misc_feature: Table A; Target 58160; HLA-A*33:01; PASD1; ENSG00000166049; CTA
EVYQKIILK

SEQ ID NO: 58161 - protein, 9 aa, Homo sapiens
  misc_feature: Table A; Target 58161; HLA-A*33:03; PASD1; ENSG00000166049; CTA
EVYQKIILK

SEQ ID NO: 58162 - protein, 9 aa, Homo sapiens
  misc_feature: Table A; Target 58162; HLA-A*68:01; PASD1; ENSG00000166049; CTA
EVYQKIILK

SEQ ID NO: 58163 - protein, 9 aa, Homo sapiens
  misc_feature: Table A; Target 58163; HLA-C*07:06; PASD1; ENSG00000166049; CTA
EVYQKIILK

SEQ ID NO: 58164 - protein, 10 aa, Homo sapiens
  misc_feature: Table A; Target 58164; HLA-A*25:01; PASD1; ENSG00000166049; CTA
EVYQKIILKF

SEQ ID NO: 58165 - protein, 10 aa, Homo sapiens
  misc_feature: Table A; Target 58165; HLA-A*26:01; PASD1; ENSG00000166049; CTA
EVYQKIILKF

SEQ ID NO: 58166 - protein, 10 aa, Homo sapiens
  misc_feature: Table A; Target 58166; HLA-A*33:01; PASD1; ENSG00000166049; CTA
EVYQKIILKF

SEQ ID NO: 58167 - protein, 10 aa, Homo sapiens
  misc_feature: Table A; Target 58167; HLA-A*33:03; PASD1; ENSG00000166049; CTA
EVYQKIILKF

SEQ ID NO: 58168 - protein, 10 aa, Homo sapiens
  misc_feature: Table A; Target 58168; HLA-A*68:02; PASD1; ENSG00000166049; CTA
EVYQKIILKF

SEQ ID NO: 58169 - protein, 11 aa, Homo sapiens
  misc_feature: Table A; Target 58169; HLA-A*02:01; PASD1; ENSG00000166049; CTA
FLDTMPESPAL

SEQ ID NO: 58170 - protein, 11 aa, Homo sapiens
  misc_feature: Table A; Target 58170; HLA-A*02:07; PASD1; ENSG00000166049; CTA
FLDTMPESPAL

SEQ ID NO: 58171 - protein, 11 aa, Homo sapiens
  misc_feature: Table A; Target 58171; HLA-B*38:01; PASD1; ENSG00000166049; CTA
FLDTMPESPAL

SEQ ID NO: 58172 - protein, 10 aa, Homo sapiens
  misc_feature: Table A; Target 58172; HLA-A*02:01; PASD1; ENSG00000166049; CTA
FLQAQPIVPV

SEQ ID NO: 58173 - protein, 10 aa, Homo sapiens
  misc_feature: Table A; Target 58173; HLA-A*02:03; PASD1; ENSG00000166049; CTA
FLQAQPIVPV

SEQ ID NO: 58174 - protein, 10 aa, Homo sapiens
  misc_feature: Table A; Target 58174; HLA-A*02:01; PASD1; ENSG00000166049; CTA
FMITLSTDGV

SEQ ID NO: 58175 - protein, 10 aa, Homo sapiens
  misc_feature: Table A; Target 58175; HLA-A*02:03; PASD1; ENSG00000166049; CTA
FMITLSTDGV

SEQ ID NO: 58176 - protein, 9 aa, Homo sapiens
  misc_feature: Table A; Target 58176; HLA-B*35:01; PASD1; ENSG00000166049; CTA
FPITSDSTI

SEQ ID NO: 58177 - protein, 9 aa, Homo sapiens
  misc_feature: Table A; Target 58177; HLA-B*35:03; PASD1; ENSG00000166049; CTA
FPITSDSTI

SEQ ID NO: 58178 - protein, 9 aa, Homo sapiens
  misc_feature: Table A; Target 58178; HLA-B*51:01; PASD1; ENSG00000166049; CTA
FPITSDSTI

SEQ ID NO: 58179 - protein, 9 aa, Homo sapiens
  misc_feature: Table A; Target 58179; HLA-B*54:01; PASD1; ENSG00000166049; CTA
FPITSDSTI

SEQ ID NO: 58180 - protein, 9 aa, Homo sapiens
  misc_feature: Table A; Target 58180; HLA-B*56:01; PASD1; ENSG00000166049; CTA
FPITSDSTI

SEQ ID NO: 58181 - protein, 9 aa, Homo sapiens
  misc_feature: Table A; Target 58181; HLA-C*03:03; PASD1; ENSG00000166049; CTA
FPITSDSTI

SEQ ID NO: 58182 - protein, 9 aa, Homo sapiens
  misc_feature: Table A; Target 58182; HLA-C*07:02; PASD1; ENSG00000166049; CTA
FPITSDSTI

SEQ ID NO: 58183 - protein, 8 aa, Homo sapiens
  misc_feature: Table A; Target 58183; HLA-B*54:01; PASD1; ENSG00000166049; CTA
FPLLNSET

SEQ ID NO: 58184 - protein, 9 aa, Homo sapiens
  misc_feature: Table A; Target 58184; HLA-B*35:01; PASD1; ENSG00000166049; CTA
FPLLNSETH

SEQ ID NO: 58185 - protein, 9 aa, Homo sapiens
  misc_feature: Table A; Target 58185; HLA-B*35:03; PASD1; ENSG00000166049; CTA
FPLLNSETH

SEQ ID NO: 58186 - protein, 10 aa, Homo sapiens
  misc_feature: Table A; Target 58186; HLA-B*51:01; PASD1; ENSG00000166049; CTA
FPLLNSETHI

SEQ ID NO: 58187 - protein, 10 aa, Homo sapiens
  misc_feature: Table A; Target 58187; HLA-B*54:01; PASD1; ENSG00000166049; CTA
FPTYDYFNQV

SEQ ID NO: 58188 - protein, 8 aa, Homo sapiens
  misc_feature: Table A; Target 58188; HLA-B*08:01; PASD1; ENSG00000166049; CTA
FPVVFSGL

SEQ ID NO: 58189 - protein, 8 aa, Homo sapiens
  misc_feature: Table A; Target 58189; HLA-B*35:01; PASD1; ENSG00000166049; CTA
FPVVFSGL

SEQ ID NO: 58190 - protein, 8 aa, Homo sapiens
  misc_feature: Table A; Target 58190; HLA-B*35:03; PASD1; ENSG00000166049; CTA
FPVVFSGL

SEQ ID NO: 58191 - protein, 8 aa, Homo sapiens
  misc_feature: Table A; Target 58191; HLA-B*51:01; PASD1; ENSG00000166049; CTA
FPVVFSGL

SEQ ID NO: 58192 - protein, 8 aa, Homo sapiens
  misc_feature: Table A; Target 58192; HLA-B*54:01; PASD1; ENSG00000166049; CTA
FPVVFSGL

SEQ ID NO: 58193 - protein, 9 aa, Homo sapiens
  misc_feature: Table A; Target 58193; HLA-B*35:01; PASD1; ENSG00000166049; CTA
FPVVFSGLF

SEQ ID NO: 58194 - protein, 9 aa, Homo sapiens
  misc_feature: Table A; Target 58194; HLA-B*27:05; PASD1; ENSG00000166049; CTA
FQGPAAYQP

SEQ ID NO: 58195 - protein, 10 aa, Homo sapiens
  misc_feature: Table A; Target 58195; HLA-B*27:05; PASD1; ENSG00000166049; CTA
FRGEPEVNPL

SEQ ID NO: 58196 - protein, 9 aa, Homo sapiens
  misc_feature: Table A; Target 58196; HLA-A*02:01; PASD1; ENSG00000166049; CTA
FSVDQVDSV

SEQ ID NO: 58197 - protein, 9 aa, Homo sapiens
  misc_feature: Table A; Target 58197; HLA-A*68:02; PASD1; ENSG00000166049; CTA
FSVDQVDSV

SEQ ID NO: 58198 - protein, 9 aa, Homo sapiens
  misc_feature: Table A; Target 58198; HLA-C*02:02; PASD1; ENSG00000166049; CTA
FSVDQVDSV

SEQ ID NO: 58199 - protein, 9 aa, Homo sapiens
  misc_feature: Table A; Target 58199; HLA-C*03:03; PASD1; ENSG00000166049; CTA
FSVDQVDSV

SEQ ID NO: 58200 - protein, 9 aa, Homo sapiens
  misc_feature: Table A; Target 58200; HLA-C*03:04; PASD1; ENSG00000166049; CTA
FSVDQVDSV

SEQ ID NO: 58201 - protein, 8 aa, Homo sapiens
  misc_feature: Table A; Target 58201; HLA-A*01:01; PASD1; ENSG00000166049; CTA
FVDSDSTY

SEQ ID NO: 58202 - protein, 8 aa, Homo sapiens
  misc_feature: Table A; Target 58202; HLA-B*39:01; PASD1; ENSG00000166049; CTA
FVDSDSTY

SEQ ID NO: 58203 - protein, 8 aa, Homo sapiens
  misc_feature: Table A; Target 58203; HLA-B*55:01; PASD1; ENSG00000166049; CTA
FVDSDSTY

SEQ ID NO: 58204 - protein, 8 aa, Homo sapiens
  misc_feature: Table A; Target 58204; HLA-C*04:01; PASD1; ENSG00000166049; CTA
FVDSDSTY

SEQ ID NO: 58205 - protein, 8 aa, Homo sapiens
  misc_feature: Table A; Target 58205; HLA-C*05:01; PASD1; ENSG00000166049; CTA
FVDSDSTY

SEQ ID NO: 58206 - protein, 9 aa, Homo sapiens
  misc_feature: Table A; Target 58206; HLA-A*02:01; PASD1; ENSG00000166049; CTA
FVDSDSTYC

SEQ ID NO: 58207 - protein, 9 aa, Homo sapiens
  misc_feature: Table A; Target 58207; HLA-B*35:03; PASD1; ENSG00000166049; CTA
FVDSDSTYC

SEQ ID NO: 58208 - protein, 9 aa, Homo sapiens
  misc_feature: Table A; Target 58208; HLA-C*05:01; PASD1; ENSG00000166049; CTA
FVDSDSTYC

SEQ ID NO: 58209 - protein, 10 aa, Homo sapiens
  misc_feature: Table A; Target 58209; HLA-B*40:01; PASD1; ENSG00000166049; CTA
GAAGASAQPL

SEQ ID NO: 58210 - protein, 10 aa, Homo sapiens
  misc_feature: Table A; Target 58210; HLA-C*03:03; PASD1; ENSG00000166049; CTA
GAAGASAQPL

SEQ ID NO: 58211 - protein, 10 aa, Homo sapiens
  misc_feature: Table A; Target 58211; HLA-C*03:04; PASD1; ENSG00000166049; CTA
GAAGASAQPL

SEQ ID NO: 58212 - protein, 10 aa, Homo sapiens
  misc_feature: Table A; Target 58212; HLA-B*27:02; PASD1; ENSG00000166049; CTA
GDSSAYENVK

SEQ ID NO: 58213 - protein, 9 aa, Homo sapiens
  misc_feature: Table A; Target 58213; HLA-A*30:01; PASD1; ENSG00000166049; CTA
GELQEPCVA

SEQ ID NO: 58214 - protein, 9 aa, Homo sapiens
  misc_feature: Table A; Target 58214; HLA-B*40:01; PASD1; ENSG00000166049; CTA
GELQEPCVA

SEQ ID NO: 58215 - protein, 9 aa, Homo sapiens
  misc_feature: Table A; Target 58215; HLA-B*49:01; PASD1; ENSG00000166049; CTA
GELQEPCVA

SEQ ID NO: 58216 - protein, 10 aa, Homo sapiens
  misc_feature: Table A; Target 58216; HLA-A*30:01; PASD1; ENSG00000166049; CTA
GELQEPCVAF

SEQ ID NO: 58217 - protein, 10 aa, Homo sapiens
  misc_feature: Table A; Target 58217; HLA-B*18:01; PASD1; ENSG00000166049; CTA
GELQEPCVAF

SEQ ID NO: 58218 - protein, 10 aa, Homo sapiens
  misc_feature: Table A; Target 58218; HLA-B*40:01; PASD1; ENSG00000166049; CTA
GELQEPCVAF

SEQ ID NO: 58219 - protein, 10 aa, Homo sapiens
  misc_feature: Table A; Target 58219; HLA-B*40:02; PASD1; ENSG00000166049; CTA
GELQEPCVAF

SEQ ID NO: 58220 - protein, 10 aa, Homo sapiens
  misc_feature: Table A; Target 58220; HLA-B*44:02; PASD1; ENSG00000166049; CTA
GELQEPCVAF

SEQ ID NO: 58221 - protein, 10 aa, Homo sapiens
  misc_feature: Table A; Target 58221; HLA-B*44:03; PASD1; ENSG00000166049; CTA
GELQEPCVAF

SEQ ID NO: 58222 - protein, 8 aa, Homo sapiens
  misc_feature: Table A; Target 58222; HLA-B*37:01; PASD1; ENSG00000166049; CTA
GEPEVNPL

SEQ ID NO: 58223 - protein, 9 aa, Homo sapiens
  misc_feature: Table A; Target 58223; HLA-A*26:01; PASD1; ENSG00000166049; CTA
GEPEVNPLY

SEQ ID NO: 58224 - protein, 9 aa, Homo sapiens
  misc_feature: Table A; Target 58224; HLA-A*29:02; PASD1; ENSG00000166049; CTA
GEPEVNPLY

SEQ ID NO: 58225 - protein, 9 aa, Homo sapiens
  misc_feature: Table A; Target 58225; HLA-A*30:01; PASD1; ENSG00000166049; CTA
GEPEVNPLY

SEQ ID NO: 58226 - protein, 9 aa, Homo sapiens
  misc_feature: Table A; Target 58226; HLA-A*30:02; PASD1; ENSG00000166049; CTA
GEPEVNPLY

SEQ ID NO: 58227 - protein, 9 aa, Homo sapiens
  misc_feature: Table A; Target 58227; HLA-B*15:01; PASD1; ENSG00000166049; CTA
GEPEVNPLY

SEQ ID NO: 58228 - protein, 9 aa, Homo sapiens
  misc_feature: Table A; Target 58228; HLA-B*15:03; PASD1; ENSG00000166049; CTA
GEPEVNPLY

SEQ ID NO: 58229 - protein, 9 aa, Homo sapiens
  misc_feature: Table A; Target 58229; HLA-B*18:01; PASD1; ENSG00000166049; CTA
GEPEVNPLY

SEQ ID NO: 58230 - protein, 9 aa, Homo sapiens
  misc_feature: Table A; Target 58230; HLA-B*27:02; PASD1; ENSG00000166049; CTA
GEPEVNPLY

SEQ ID NO: 58231 - protein, 9 aa, Homo sapiens
  misc_feature: Table A; Target 58231; HLA-B*27:05; PASD1; ENSG00000166049; CTA
GEPEVNPLY

SEQ ID NO: 58232 - protein, 9 aa, Homo sapiens
  misc_feature: Table A; Target 58232; HLA-B*37:01; PASD1; ENSG00000166049; CTA
GEPEVNPLY

SEQ ID NO: 58233 - protein, 9 aa, Homo sapiens
  misc_feature: Table A; Target 58233; HLA-B*40:01; PASD1; ENSG00000166049; CTA
GEPEVNPLY

SEQ ID NO: 58234 - protein, 9 aa, Homo sapiens
  misc_feature: Table A; Target 58234; HLA-B*44:02; PASD1; ENSG00000166049; CTA
GEPEVNPLY

SEQ ID NO: 58235 - protein, 9 aa, Homo sapiens
  misc_feature: Table A; Target 58235; HLA-B*44:03; PASD1; ENSG00000166049; CTA
GEPEVNPLY

SEQ ID NO: 58236 - protein, 9 aa, Homo sapiens
  misc_feature: Table A; Target 58236; HLA-B*49:01; PASD1; ENSG00000166049; CTA
GEPEVNPLY

SEQ ID NO: 58237 - protein, 9 aa, Homo sapiens
  misc_feature: Table A; Target 58237; HLA-B*58:01; PASD1; ENSG00000166049; CTA
GEPEVNPLY

SEQ ID NO: 58238 - protein, 9 aa, Homo sapiens
  misc_feature: Table A; Target 58238; HLA-C*02:02; PASD1; ENSG00000166049; CTA
GEPEVNPLY

SEQ ID NO: 58239 - protein, 9 aa, Homo sapiens
  misc_feature: Table A; Target 58239; HLA-C*07:01; PASD1; ENSG00000166049; CTA
GEPEVNPLY

SEQ ID NO: 58240 - protein, 9 aa, Homo sapiens
  misc_feature: Table A; Target 58240; HLA-C*16:02; PASD1; ENSG00000166049; CTA
GEPEVNPLY

SEQ ID NO: 58241 - protein, 9 aa, Homo sapiens
  misc_feature: Table A; Target 58241; HLA-C*16:04; PASD1; ENSG00000166049; CTA
GEPEVNPLY

SEQ ID NO: 58242 - protein, 10 aa, Homo sapiens
  misc_feature: Table A; Target 58242; HLA-B*27:02; PASD1; ENSG00000166049; CTA
GEPEVNPLYR

SEQ ID NO: 58243 - protein, 10 aa, Homo sapiens
  misc_feature: Table A; Target 58243; HLA-B*40:01; PASD1; ENSG00000166049; CTA
GEPEVNPLYR

SEQ ID NO: 58244 - protein, 10 aa, Homo sapiens
  misc_feature: Table A; Target 58244; HLA-B*44:03; PASD1; ENSG00000166049; CTA
GEPEVNPLYR

SEQ ID NO: 58245 - protein, 10 aa, Homo sapiens
  misc_feature: Table A; Target 58245; HLA-B*49:01; PASD1; ENSG00000166049; CTA
GEPEVNPLYR

SEQ ID NO: 58246 - protein, 10 aa, Homo sapiens
  misc_feature: Table A; Target 58246; HLA-C*16:04; PASD1; ENSG00000166049; CTA
GEPEVNPLYR

SEQ ID NO: 58247 - protein, 10 aa, Homo sapiens
  misc_feature: Table A; Target 58247; HLA-B*27:02; PASD1; ENSG00000166049; CTA
GHLPAEIVGK

SEQ ID NO: 58248 - protein, 10 aa, Homo sapiens
  misc_feature: Table A; Target 58248; HLA-B*27:05; PASD1; ENSG00000166049; CTA
GHLPAEIVGK

SEQ ID NO: 58249 - protein, 9 aa, Homo sapiens
  misc_feature: Table A; Target 58249; HLA-B*15:03; PASD1; ENSG00000166049; CTA
GHTSMKAVY

SEQ ID NO: 58250 - protein, 9 aa, Homo sapiens
  misc_feature: Table A; Target 58250; HLA-A*03:01; PASD1; ENSG00000166049; CTA
GLSLSNSLK

SEQ ID NO: 58251 - protein, 9 aa, Homo sapiens
  misc_feature: Table A; Target 58251; HLA-A*03:02; PASD1; ENSG00000166049; CTA
GLSLSNSLK

SEQ ID NO: 58252 - protein, 11 aa, Homo sapiens
  misc_feature: Table A; Target 58252; HLA-A*29:02; PASD1; ENSG00000166049; CTA
GNVEHGDSSAY

SEQ ID NO: 58253 - protein, 11 aa, Homo sapiens
  misc_feature: Table A; Target 58253; HLA-A*30:02; PASD1; ENSG00000166049; CTA
GNVEHGDSSAY

SEQ ID NO: 58254 - protein, 11 aa, Homo sapiens
  misc_feature: Table A; Target 58254; HLA-B*15:01; PASD1; ENSG00000166049; CTA
GNVEHGDSSAY

SEQ ID NO: 58255 - protein, 9 aa, Homo sapiens
  misc_feature: Table A; Target 58255; HLA-B*07:02; PASD1; ENSG00000166049; CTA
GPQENVHMF

SEQ ID NO: 58256 - protein, 9 aa, Homo sapiens
  misc_feature: Table A; Target 58256; HLA-B*35:01; PASD1; ENSG00000166049; CTA
GPQENVHMF

SEQ ID NO: 58257 - protein, 9 aa, Homo sapiens
  misc_feature: Table A; Target 58257; HLA-B*55:01; PASD1; ENSG00000166049; CTA
GPQENVHMF

SEQ ID NO: 58258 - protein, 9 aa, Homo sapiens
  misc_feature: Table A; Target 58258; HLA-B*56:01; PASD1; ENSG00000166049; CTA
GPQENVHMF

SEQ ID NO: 58259 - protein, 9 aa, Homo sapiens
  misc_feature: Table A; Target 58259; HLA-C*07:02; PASD1; ENSG00000166049; CTA
GPQENVHMF

SEQ ID NO: 58260 - protein, 9 aa, Homo sapiens
  misc_feature: Table A; Target 58260; HLA-C*16:02; PASD1; ENSG00000166049; CTA
GPQENVHMF

SEQ ID NO: 58261 - protein, 10 aa, Homo sapiens
  misc_feature: Table A; Target 58261; HLA-B*56:01; PASD1; ENSG00000166049; CTA
GPQENVHMFV

SEQ ID NO: 58262 - protein, 9 aa, Homo sapiens
  misc_feature: Table A; Target 58262; HLA-A*25:01; PASD1; ENSG00000166049; CTA
GPVVQVNTW

SEQ ID NO: 58263 - protein, 9 aa, Homo sapiens
  misc_feature: Table A; Target 58263; HLA-B*35:01; PASD1; ENSG00000166049; CTA
GPVVQVNTW

SEQ ID NO: 58264 - protein, 9 aa, Homo sapiens
  misc_feature: Table A; Target 58264; HLA-B*44:02; PASD1; ENSG00000166049; CTA
GPVVQVNTW

SEQ ID NO: 58265 - protein, 9 aa, Homo sapiens
  misc_feature: Table A; Target 58265; HLA-B*44:03; PASD1; ENSG00000166049; CTA
GPVVQVNTW

SEQ ID NO: 58266 - protein, 9 aa, Homo sapiens
  misc_feature: Table A; Target 58266; HLA-B*57:01; PASD1; ENSG00000166049; CTA
GPVVQVNTW

SEQ ID NO: 58267 - protein, 9 aa, Homo sapiens
  misc_feature: Table A; Target 58267; HLA-B*58:01; PASD1; ENSG00000166049; CTA
GPVVQVNTW

SEQ ID NO: 58268 - protein, 9 aa, Homo sapiens
  misc_feature: Table A; Target 58268; HLA-C*16:04; PASD1; ENSG00000166049; CTA
GPVVQVNTW

SEQ ID NO: 58269 - protein, 8 aa, Homo sapiens
  misc_feature: Table A; Target 58269; HLA-B*13:02; PASD1; ENSG00000166049; CTA
GQPTYHQV

SEQ ID NO: 58270 - protein, 10 aa, Homo sapiens
  misc_feature: Table A; Target 58270; HLA-A*30:01; PASD1; ENSG00000166049; CTA
GQPTYHQVQV

SEQ ID NO: 58271 - protein, 10 aa, Homo sapiens
  misc_feature: Table A; Target 58271; HLA-B*13:02; PASD1; ENSG00000166049; CTA
GQPTYHQVQV

SEQ ID NO: 58272 - protein, 10 aa, Homo sapiens
  misc_feature: Table A; Target 58272; HLA-B*15:01; PASD1; ENSG00000166049; CTA
GQQEDESQSF

SEQ ID NO: 58273 - protein, 11 aa, Homo sapiens
  misc_feature: Table A; Target 58273; HLA-A*30:02; PASD1; ENSG00000166049; CTA
GQQEDESQSFY

SEQ ID NO: 58274 - protein, 11 aa, Homo sapiens
  misc_feature: Table A; Target 58274; HLA-B*15:01; PASD1; ENSG00000166049; CTA
GQQEDESQSFY

SEQ ID NO: 58275 - protein, 11 aa, Homo sapiens
  misc_feature: Table A; Target 58275; HLA-B*27:05; PASD1; ENSG00000166049; CTA
GQQEDESQSFY

SEQ ID NO: 58276 - protein, 8 aa, Homo sapiens
  misc_feature: Table A; Target 58276; HLA-B*15:01; PASD1; ENSG00000166049; CTA
GQRGHTSM

SEQ ID NO: 58277 - protein, 8 aa, Homo sapiens
  misc_feature: Table A; Target 58277; HLA-B*15:03; PASD1; ENSG00000166049; CTA
GQRGHTSM

SEQ ID NO: 58278 - protein, 9 aa, Homo sapiens
  misc_feature: Table A; Target 58278; HLA-A*03:01; PASD1; ENSG00000166049; CTA
GQVKRPLPH

SEQ ID NO: 58279 - protein, 9 aa, Homo sapiens
  misc_feature: Table A; Target 58279; HLA-A*01:01; PASD1; ENSG00000166049; CTA
GTLHGQPTY

SEQ ID NO: 58280 - protein, 9 aa, Homo sapiens
  misc_feature: Table A; Target 58280; HLA-A*11:01; PASD1; ENSG00000166049; CTA
GTLHGQPTY

SEQ ID NO: 58281 - protein, 9 aa, Homo sapiens
  misc_feature: Table A; Target 58281; HLA-A*26:01; PASD1; ENSG00000166049; CTA
GTLHGQPTY

SEQ ID NO: 58282 - protein, 9 aa, Homo sapiens
  misc_feature: Table A; Target 58282; HLA-A*29:02; PASD1; ENSG00000166049; CTA
GTLHGQPTY

SEQ ID NO: 58283 - protein, 9 aa, Homo sapiens
  misc_feature: Table A; Target 58283; HLA-A*30:02; PASD1; ENSG00000166049; CTA
GTLHGQPTY

SEQ ID NO: 58284 - protein, 9 aa, Homo sapiens
  misc_feature: Table A; Target 58284; HLA-A*32:01; PASD1; ENSG00000166049; CTA
GTLHGQPTY

SEQ ID NO: 58285 - protein, 9 aa, Homo sapiens
  misc_feature: Table A; Target 58285; HLA-B*15:01; PASD1; ENSG00000166049; CTA
GTLHGQPTY

SEQ ID NO: 58286 - protein, 9 aa, Homo sapiens
  misc_feature: Table A; Target 58286; HLA-B*15:03; PASD1; ENSG00000166049; CTA
GTLHGQPTY

SEQ ID NO: 58287 - protein, 9 aa, Homo sapiens
  misc_feature: Table A; Target 58287; HLA-B*27:02; PASD1; ENSG00000166049; CTA
GTLHGQPTY

SEQ ID NO: 58288 - protein, 9 aa, Homo sapiens
  misc_feature: Table A; Target 58288; HLA-B*39:01; PASD1; ENSG00000166049; CTA
GTLHGQPTY

SEQ ID NO: 58289 - protein, 9 aa, Homo sapiens
  misc_feature: Table A; Target 58289; HLA-B*57:01; PASD1; ENSG00000166049; CTA
GTLHGQPTY

SEQ ID NO: 58290 - protein, 9 aa, Homo sapiens
  misc_feature: Table A; Target 58290; HLA-B*58:01; PASD1; ENSG00000166049; CTA
GTLHGQPTY

SEQ ID NO: 58291 - protein, 9 aa, Homo sapiens
  misc_feature: Table A; Target 58291; HLA-C*16:01; PASD1; ENSG00000166049; CTA
GTLHGQPTY

SEQ ID NO: 58292 - protein, 9 aa, Homo sapiens
  misc_feature: Table A; Target 58292; HLA-C*16:02; PASD1; ENSG00000166049; CTA
GTLHGQPTY

SEQ ID NO: 58293 - protein, 11 aa, Homo sapiens
  misc_feature: Table A; Target 58293; HLA-B*39:01; PASD1; ENSG00000166049; CTA
GVEGPPDPQAF

SEQ ID NO: 58294 - protein, 11 aa, Homo sapiens
  misc_feature: Table A; Target 58294; HLA-A*30:01; PASD1; ENSG00000166049; CTA
HDAIQNQQNAL

SEQ ID NO: 58295 - protein, 9 aa, Homo sapiens
  misc_feature: Table A; Target 58295; HLA-A*32:01; PASD1; ENSG00000166049; CTA
HGQPTYHQV

SEQ ID NO: 58296 - protein, 9 aa, Homo sapiens
  misc_feature: Table A; Target 58296; HLA-B*13:02; PASD1; ENSG00000166049; CTA
HGQPTYHQV

SEQ ID NO: 58297 - protein, 9 aa, Homo sapiens
  misc_feature: Table A; Target 58297; HLA-C*06:02; PASD1; ENSG00000166049; CTA
HGQPTYHQV

SEQ ID NO: 58298 - protein, 9 aa, Homo sapiens
  misc_feature: Table A; Target 58298; HLA-C*16:02; PASD1; ENSG00000166049; CTA
HGQPTYHQV

SEQ ID NO: 58299 - protein, 9 aa, Homo sapiens
  misc_feature: Table A; Target 58299; HLA-A*02:03; PASD1; ENSG00000166049; CTA
HLKEQQRQL

SEQ ID NO: 58300 - protein, 9 aa, Homo sapiens
  misc_feature: Table A; Target 58300; HLA-B*08:01; PASD1; ENSG00000166049; CTA
HLKEQQRQL

SEQ ID NO: 58301 - protein, 9 aa, Homo sapiens
  misc_feature: Table A; Target 58301; HLA-A*02:07; PASD1; ENSG00000166049; CTA
HLPAEIVGK

SEQ ID NO: 58302 - protein, 9 aa, Homo sapiens
  misc_feature: Table A; Target 58302; HLA-A*03:01; PASD1; ENSG00000166049; CTA
HLPAEIVGK

SEQ ID NO: 58303 - protein, 9 aa, Homo sapiens
  misc_feature: Table A; Target 58303; HLA-A*03:02; PASD1; ENSG00000166049; CTA
HLPAEIVGK

SEQ ID NO: 58304 - protein, 9 aa, Homo sapiens
  misc_feature: Table A; Target 58304; HLA-A*11:01; PASD1; ENSG00000166049; CTA
HLPAEIVGK

SEQ ID NO: 58305 - protein, 9 aa, Homo sapiens
  misc_feature: Table A; Target 58305; HLA-A*68:01; PASD1; ENSG00000166049; CTA
HLPAEIVGK

SEQ ID NO: 58306 - protein, 10 aa, Homo sapiens
  misc_feature: Table A; Target 58306; HLA-A*03:01; PASD1; ENSG00000166049; CTA
HLPAEIVGKK

SEQ ID NO: 58307 - protein, 11 aa, Homo sapiens
  misc_feature: Table A; Target 58307; HLA-A*02:07; PASD1; ENSG00000166049; CTA
HLPAEIVGKKL

SEQ ID NO: 58308 - protein, 9 aa, Homo sapiens
  misc_feature: Table A; Target 58308; HLA-A*02:03; PASD1; ENSG00000166049; CTA
HLQKQPNTL

SEQ ID NO: 58309 - protein, 9 aa, Homo sapiens
  misc_feature: Table A; Target 58309; HLA-A*02:04; PASD1; ENSG00000166049; CTA
HLQKQPNTL

SEQ ID NO: 58310 - protein, 9 aa, Homo sapiens
  misc_feature: Table A; Target 58310; HLA-A*03:02; PASD1; ENSG00000166049; CTA
HLQKQPNTL

SEQ ID NO: 58311 - protein, 9 aa, Homo sapiens
  misc_feature: Table A; Target 58311; HLA-B*08:01; PASD1; ENSG00000166049; CTA
HLQKQPNTL

SEQ ID NO: 58312 - protein, 9 aa, Homo sapiens
  misc_feature: Table A; Target 58312; HLA-B*38:01; PASD1; ENSG00000166049; CTA
HLQKQPNTL

SEQ ID NO: 58313 - protein, 9 aa, Homo sapiens
  misc_feature: Table A; Target 58313; HLA-C*14:02; PASD1; ENSG00000166049; CTA
HLQKQPNTL

SEQ ID NO: 58314 - protein, 10 aa, Homo sapiens
  misc_feature: Table A; Target 58314; HLA-A*01:01; PASD1; ENSG00000166049; CTA
HMFVDSDSTY

SEQ ID NO: 58315 - protein, 10 aa, Homo sapiens
  misc_feature: Table A; Target 58315; HLA-A*25:01; PASD1; ENSG00000166049; CTA
HMFVDSDSTY

SEQ ID NO: 58316 - protein, 10 aa, Homo sapiens
  misc_feature: Table A; Target 58316; HLA-A*26:01; PASD1; ENSG00000166049; CTA
HMFVDSDSTY

SEQ ID NO: 58317 - protein, 10 aa, Homo sapiens
  misc_feature: Table A; Target 58317; HLA-A*29:02; PASD1; ENSG00000166049; CTA
HMFVDSDSTY

SEQ ID NO: 58318 - protein, 10 aa, Homo sapiens
  misc_feature: Table A; Target 58318; HLA-A*30:02; PASD1; ENSG00000166049; CTA
HMFVDSDSTY

SEQ ID NO: 58319 - protein, 10 aa, Homo sapiens
  misc_feature: Table A; Target 58319; HLA-A*32:01; PASD1; ENSG00000166049; CTA
HMFVDSDSTY

SEQ ID NO: 58320 - protein, 10 aa, Homo sapiens
  misc_feature: Table A; Target 58320; HLA-B*15:01; PASD1; ENSG00000166049; CTA
HMFVDSDSTY

SEQ ID NO: 58321 - protein, 10 aa, Homo sapiens
  misc_feature: Table A; Target 58321; HLA-B*15:03; PASD1; ENSG00000166049; CTA
HMFVDSDSTY

SEQ ID NO: 58322 - protein, 10 aa, Homo sapiens
  misc_feature: Table A; Target 58322; HLA-B*35:01; PASD1; ENSG00000166049; CTA
HMFVDSDSTY

SEQ ID NO: 58323 - protein, 10 aa, Homo sapiens
  misc_feature: Table A; Target 58323; HLA-B*46:01; PASD1; ENSG00000166049; CTA
HMFVDSDSTY

SEQ ID NO: 58324 - protein, 10 aa, Homo sapiens
  misc_feature: Table A; Target 58324; HLA-B*55:01; PASD1; ENSG00000166049; CTA
HMFVDSDSTY

SEQ ID NO: 58325 - protein, 10 aa, Homo sapiens
  misc_feature: Table A; Target 58325; HLA-B*58:01; PASD1; ENSG00000166049; CTA
HMFVDSDSTY

SEQ ID NO: 58326 - protein, 10 aa, Homo sapiens
  misc_feature: Table A; Target 58326; HLA-C*02:02; PASD1; ENSG00000166049; CTA
HMFVDSDSTY

SEQ ID NO: 58327 - protein, 10 aa, Homo sapiens
  misc_feature: Table A; Target 58327; HLA-C*04:01; PASD1; ENSG00000166049; CTA
HMFVDSDSTY

SEQ ID NO: 58328 - protein, 10 aa, Homo sapiens
  misc_feature: Table A; Target 58328; HLA-C*07:04; PASD1; ENSG00000166049; CTA
HMFVDSDSTY

SEQ ID NO: 58329 - protein, 9 aa, Homo sapiens
  misc_feature: Table A; Target 58329; HLA-A*33:01; PASD1; ENSG00000166049; CTA
HNVIVGNER

SEQ ID NO: 58330 - protein, 9 aa, Homo sapiens
  misc_feature: Table A; Target 58330; HLA-A*33:03; PASD1; ENSG00000166049; CTA
HNVIVGNER

SEQ ID NO: 58331 - protein, 9 aa, Homo sapiens
  misc_feature: Table A; Target 58331; HLA-A*68:01; PASD1; ENSG00000166049; CTA
HNVIVGNER

SEQ ID NO: 58332 - protein, 9 aa, Homo sapiens
  misc_feature: Table A; Target 58332; HLA-C*07:06; PASD1; ENSG00000166049; CTA
HNVIVGNER

SEQ ID NO: 58333 - protein, 8 aa, Homo sapiens
  misc_feature: Table A; Target 58333; HLA-B*54:01; PASD1; ENSG00000166049; CTA
HPVRFLQA

SEQ ID NO: 58334 - protein, 8 aa, Homo sapiens
  misc_feature: Table A; Target 58334; HLA-B*56:01; PASD1; ENSG00000166049; CTA
HPVRFLQA

SEQ ID NO: 58335 - protein, 8 aa, Homo sapiens
  misc_feature: Table A; Target 58335; HLA-A*30:01; PASD1; ENSG00000166049; CTA
HQVQVSEV

SEQ ID NO: 58336 - protein, 8 aa, Homo sapiens
  misc_feature: Table A; Target 58336; HLA-B*13:02; PASD1; ENSG00000166049; CTA
HQVQVSEV

SEQ ID NO: 58337 - protein, 8 aa, Homo sapiens
  misc_feature: Table A; Target 58337; HLA-B*39:01; PASD1; ENSG00000166049; CTA
HQVQVSEV

SEQ ID NO: 58338 - protein, 8 aa, Homo sapiens
  misc_feature: Table A; Target 58338; HLA-B*40:02; PASD1; ENSG00000166049; CTA
HQVQVSEV

SEQ ID NO: 58339 - protein, 10 aa, Homo sapiens
  misc_feature: Table A; Target 58339; HLA-B*13:02; PASD1; ENSG00000166049; CTA
HQVQVSEVGV

SEQ ID NO: 58340 - protein, 10 aa, Homo sapiens
  misc_feature: Table A; Target 58340; HLA-B*39:01; PASD1; ENSG00000166049; CTA
HQVQVSEVGV

SEQ ID NO: 58341 - protein, 8 aa, Homo sapiens
  misc_feature: Table A; Target 58341; HLA-C*16:01; PASD1; ENSG00000166049; CTA
HTSMKAVY

SEQ ID NO: 58342 - protein, 9 aa, Homo sapiens
  misc_feature: Table A; Target 58342; HLA-A*68:02; PASD1; ENSG00000166049; CTA
HTSMKAVYV

SEQ ID NO: 58343 - protein, 10 aa, Homo sapiens
  misc_feature: Table A; Target 58343; HLA-C*03:03; PASD1; ENSG00000166049; CTA
ICVAENISSL

SEQ ID NO: 58344 - protein, 10 aa, Homo sapiens
  misc_feature: Table A; Target 58344; HLA-C*03:04; PASD1; ENSG00000166049; CTA
ICVAENISSL

SEQ ID NO: 58345 - protein, 9 aa, Homo sapiens
  misc_feature: Table A; Target 58345; HLA-A*30:02; PASD1; ENSG00000166049; CTA
IDIAEVEQY

SEQ ID NO: 58346 - protein, 9 aa, Homo sapiens
  misc_feature: Table A; Target 58346; HLA-B*15:01; PASD1; ENSG00000166049; CTA
IDIAEVEQY

SEQ ID NO: 58347 - protein, 9 aa, Homo sapiens
  misc_feature: Table A; Target 58347; HLA-B*15:03; PASD1; ENSG00000166049; CTA
IDIAEVEQY

SEQ ID NO: 58348 - protein, 9 aa, Homo sapiens
  misc_feature: Table A; Target 58348; HLA-B*18:01; PASD1; ENSG00000166049; CTA
IDIAEVEQY

SEQ ID NO: 58349 - protein, 9 aa, Homo sapiens
  misc_feature: Table A; Target 58349; HLA-B*27:02; PASD1; ENSG00000166049; CTA
IDIAEVEQY

SEQ ID NO: 58350 - protein, 9 aa, Homo sapiens
  misc_feature: Table A; Target 58350; HLA-B*35:01; PASD1; ENSG00000166049; CTA
IDIAEVEQY

SEQ ID NO: 58351 - protein, 9 aa, Homo sapiens
  misc_feature: Table A; Target 58351; HLA-B*44:02; PASD1; ENSG00000166049; CTA
IDIAEVEQY

SEQ ID NO: 58352 - protein, 9 aa, Homo sapiens
  misc_feature: Table A; Target 58352; HLA-B*44:03; PASD1; ENSG00000166049; CTA
IDIAEVEQY

SEQ ID NO: 58353 - protein, 9 aa, Homo sapiens
  misc_feature: Table A; Target 58353; HLA-C*16:04; PASD1; ENSG00000166049; CTA
IDIAEVEQY

SEQ ID NO: 58354 - protein, 8 aa, Homo sapiens
  misc_feature: Table A; Target 58354; HLA-C*03:04; PASD1; ENSG00000166049; CTA
IISQELEL

SEQ ID NO: 58355 - protein, 10 aa, Homo sapiens
  misc_feature: Table A; Target 58355; HLA-B*27:02; PASD1; ENSG00000166049; CTA
IISQELELMK

SEQ ID NO: 58356 - protein, 9 aa, Homo sapiens
  misc_feature: Table A; Target 58356; HLA-B*56:01; PASD1; ENSG00000166049; CTA
IPDLQSSEA

SEQ ID NO: 58357 - protein, 9 aa, Homo sapiens
  misc_feature: Table A; Target 58357; HLA-A*29:02; PASD1; ENSG00000166049; CTA
IPSFPTYDY

SEQ ID NO: 58358 - protein, 9 aa, Homo sapiens
  misc_feature: Table A; Target 58358; HLA-B*35:01; PASD1; ENSG00000166049; CTA
IPSFPTYDY

SEQ ID NO: 58359 - protein, 9 aa, Homo sapiens
  misc_feature: Table A; Target 58359; HLA-B*55:01; PASD1; ENSG00000166049; CTA
IPSFPTYDY

SEQ ID NO: 58360 - protein, 8 aa, Homo sapiens
  misc_feature: Table A; Target 58360; HLA-B*15:01; PASD1; ENSG00000166049; CTA
IQNQQNAL

SEQ ID NO: 58361 - protein, 8 aa, Homo sapiens
  misc_feature: Table A; Target 58361; HLA-B*15:03; PASD1; ENSG00000166049; CTA
IQNQQNAL

SEQ ID NO: 58362 - protein, 8 aa, Homo sapiens
  misc_feature: Table A; Target 58362; HLA-B*39:01; PASD1; ENSG00000166049; CTA
IQNQQNAL

SEQ ID NO: 58363 - protein, 8 aa, Homo sapiens
  misc_feature: Table A; Target 58363; HLA-C*14:02; PASD1; ENSG00000166049; CTA
IQNQQNAL

SEQ ID NO: 58364 - protein, 11 aa, Homo sapiens
  misc_feature: Table A; Target 58364; HLA-B*15:01; PASD1; ENSG00000166049; CTA
IQNQQNALELM

SEQ ID NO: 58365 - protein, 8 aa, Homo sapiens
  misc_feature: Table A; Target 58365; HLA-C*05:01; PASD1; ENSG00000166049; CTA
ISDDQIDI

SEQ ID NO: 58366 - protein, 9 aa, Homo sapiens
  misc_feature: Table A; Target 58366; HLA-A*11:01; PASD1; ENSG00000166049; CTA
ISQELELMK

SEQ ID NO: 58367 - protein, 9 aa, Homo sapiens
  misc_feature: Table A; Target 58367; HLA-B*27:02; PASD1; ENSG00000166049; CTA
ISQELELMK

SEQ ID NO: 58368 - protein, 10 aa, Homo sapiens
  misc_feature: Table A; Target 58368; HLA-A*11:01; PASD1; ENSG00000166049; CTA
ISQELELMKK

SEQ ID NO: 58369 - protein, 9 aa, Homo sapiens
  misc_feature: Table A; Target 58369; HLA-A*23:01; PASD1; ENSG00000166049; CTA
ISSSSIPQF

SEQ ID NO: 58370 - protein, 9 aa, Homo sapiens
  misc_feature: Table A; Target 58370; HLA-A*24:02; PASD1; ENSG00000166049; CTA
ISSSSIPQF

SEQ ID NO: 58371 - protein, 9 aa, Homo sapiens
  misc_feature: Table A; Target 58371; HLA-A*25:01; PASD1; ENSG00000166049; CTA
ISSSSIPQF

SEQ ID NO: 58372 - protein, 9 aa, Homo sapiens
  misc_feature: Table A; Target 58372; HLA-A*26:01; PASD1; ENSG00000166049; CTA
ISSSSIPQF

SEQ ID NO: 58373 - protein, 9 aa, Homo sapiens
  misc_feature: Table A; Target 58373; HLA-A*30:02; PASD1; ENSG00000166049; CTA
ISSSSIPQF

SEQ ID NO: 58374 - protein, 9 aa, Homo sapiens
  misc_feature: Table A; Target 58374; HLA-A*32:01; PASD1; ENSG00000166049; CTA
ISSSSIPQF

SEQ ID NO: 58375 - protein, 9 aa, Homo sapiens
  misc_feature: Table A; Target 58375; HLA-B*57:01; PASD1; ENSG00000166049; CTA
ISSSSIPQF

SEQ ID NO: 58376 - protein, 9 aa, Homo sapiens
  misc_feature: Table A; Target 58376; HLA-B*58:01; PASD1; ENSG00000166049; CTA
ISSSSIPQF

SEQ ID NO: 58377 - protein, 9 aa, Homo sapiens
  misc_feature: Table A; Target 58377; HLA-C*02:02; PASD1; ENSG00000166049; CTA
ISSSSIPQF

SEQ ID NO: 58378 - protein, 9 aa, Homo sapiens
  misc_feature: Table A; Target 58378; HLA-C*07:04; PASD1; ENSG00000166049; CTA
ISSSSIPQF

SEQ ID NO: 58379 - protein, 9 aa, Homo sapiens
  misc_feature: Table A; Target 58379; HLA-C*12:03; PASD1; ENSG00000166049; CTA
ISSSSIPQF

SEQ ID NO: 58380 - protein, 9 aa, Homo sapiens
  misc_feature: Table A; Target 58380; HLA-C*16:01; PASD1; ENSG00000166049; CTA
ISSSSIPQF

SEQ ID NO: 58381 - protein, 9 aa, Homo sapiens
  misc_feature: Table A; Target 58381; HLA-C*16:02; PASD1; ENSG00000166049; CTA
ISSSSIPQF

SEQ ID NO: 58382 - protein, 10 aa, Homo sapiens
  misc_feature: Table A; Target 58382; HLA-A*01:01; PASD1; ENSG00000166049; CTA
ISTLETPQDY

SEQ ID NO: 58383 - protein, 10 aa, Homo sapiens
  misc_feature: Table A; Target 58383; HLA-A*25:01; PASD1; ENSG00000166049; CTA
ITSDSTISTL

SEQ ID NO: 58384 - protein, 10 aa, Homo sapiens
  misc_feature: Table A; Target 58384; HLA-A*68:01; PASD1; ENSG00000166049; CTA
ITSDSTISTL

SEQ ID NO: 58385 - protein, 9 aa, Homo sapiens
  misc_feature: Table A; Target 58385; HLA-B*08:01; PASD1; ENSG00000166049; CTA
IVGKKLLSL

SEQ ID NO: 58386 - protein, 9 aa, Homo sapiens
  misc_feature: Table A; Target 58386; HLA-A*30:01; PASD1; ENSG00000166049; CTA
KAVSDEAVL

SEQ ID NO: 58387 - protein, 9 aa, Homo sapiens
  misc_feature: Table A; Target 58387; HLA-B*35:03; PASD1; ENSG00000166049; CTA
KAVSDEAVL

SEQ ID NO: 58388 - protein, 9 aa, Homo sapiens
  misc_feature: Table A; Target 58388; HLA-B*40:01; PASD1; ENSG00000166049; CTA
KAVSDEAVL

SEQ ID NO: 58389 - protein, 9 aa, Homo sapiens
  misc_feature: Table A; Target 58389; HLA-B*58:01; PASD1; ENSG00000166049; CTA
KAVSDEAVL

SEQ ID NO: 58390 - protein, 9 aa, Homo sapiens
  misc_feature: Table A; Target 58390; HLA-C*03:03; PASD1; ENSG00000166049; CTA
KAVSDEAVL

SEQ ID NO: 58391 - protein, 9 aa, Homo sapiens
  misc_feature: Table A; Target 58391; HLA-C*03:04; PASD1; ENSG00000166049; CTA
KAVSDEAVL

SEQ ID NO: 58392 - protein, 9 aa, Homo sapiens
  misc_feature: Table A; Target 58392; HLA-C*16:01; PASD1; ENSG00000166049; CTA
KAVSDEAVL

SEQ ID NO: 58393 - protein, 9 aa, Homo sapiens
  misc_feature: Table A; Target 58393; HLA-C*16:02; PASD1; ENSG00000166049; CTA
KAVSDEAVL

SEQ ID NO: 58394 - protein, 9 aa, Homo sapiens
  misc_feature: Table A; Target 58394; HLA-B*07:02; PASD1; ENSG00000166049; CTA
KAVYVEPAA

SEQ ID NO: 58395 - protein, 9 aa, Homo sapiens
  misc_feature: Table A; Target 58395; HLA-B*40:02; PASD1; ENSG00000166049; CTA
KAVYVEPAA

SEQ ID NO: 58396 - protein, 9 aa, Homo sapiens
  misc_feature: Table A; Target 58396; HLA-B*54:01; PASD1; ENSG00000166049; CTA
KAVYVEPAA

SEQ ID NO: 58397 - protein, 9 aa, Homo sapiens
  misc_feature: Table A; Target 58397; HLA-B*56:01; PASD1; ENSG00000166049; CTA
KAVYVEPAA

SEQ ID NO: 58398 - protein, 9 aa, Homo sapiens
  misc_feature: Table A; Target 58398; HLA-B*58:01; PASD1; ENSG00000166049; CTA
KAVYVEPAA

SEQ ID NO: 58399 - protein, 9 aa, Homo sapiens
  misc_feature: Table A; Target 58399; HLA-C*03:03; PASD1; ENSG00000166049; CTA
KAVYVEPAA

SEQ ID NO: 58400 - protein, 9 aa, Homo sapiens
  misc_feature: Table A; Target 58400; HLA-C*03:04; PASD1; ENSG00000166049; CTA
KAVYVEPAA

SEQ ID NO: 58401 - protein, 10 aa, Homo sapiens
  misc_feature: Table A; Target 58401; HLA-B*56:01; PASD1; ENSG00000166049; CTA
KAVYVEPAAA

SEQ ID NO: 58402 - protein, 11 aa, Homo sapiens
  misc_feature: Table A; Target 58402; HLA-B*56:01; PASD1; ENSG00000166049; CTA
KAVYVEPAAAA

SEQ ID NO: 58403 - protein, 9 aa, Homo sapiens
  misc_feature: Table A; Target 58403; HLA-B*44:02; PASD1; ENSG00000166049; CTA
KEQLEERTW

SEQ ID NO: 58404 - protein, 9 aa, Homo sapiens
  misc_feature: Table A; Target 58404; HLA-B*44:03; PASD1; ENSG00000166049; CTA
KEQLEERTW

SEQ ID NO: 58405 - protein, 9 aa, Homo sapiens
  misc_feature: Table A; Target 58405; HLA-C*16:04; PASD1; ENSG00000166049; CTA
KEQLEERTW

SEQ ID NO: 58406 - protein, 10 aa, Homo sapiens
  misc_feature: Table A; Target 58406; HLA-A*31:01; PASD1; ENSG00000166049; CTA
KHNVIVGNER

SEQ ID NO: 58407 - protein, 9 aa, Homo sapiens
  misc_feature: Table A; Target 58407; HLA-A*02:04; PASD1; ENSG00000166049; CTA
KIILKFPLL

SEQ ID NO: 58408 - protein, 9 aa, Homo sapiens
  misc_feature: Table A; Target 58408; HLA-A*02:07; PASD1; ENSG00000166049; CTA
KIILKFPLL

SEQ ID NO: 58409 - protein, 9 aa, Homo sapiens
  misc_feature: Table A; Target 58409; HLA-A*24:02; PASD1; ENSG00000166049; CTA
KIILKFPLL

SEQ ID NO: 58410 - protein, 9 aa, Homo sapiens
  misc_feature: Table A; Target 58410; HLA-A*31:01; PASD1; ENSG00000166049; CTA
KLKEQLEER

SEQ ID NO: 58411 - protein, 9 aa, Homo sapiens
  misc_feature: Table A; Target 58411; HLA-B*46:01; PASD1; ENSG00000166049; CTA
KLKEQLEER

SEQ ID NO: 58412 - protein, 11 aa, Homo sapiens
  misc_feature: Table A; Target 58412; HLA-B*57:01; PASD1; ENSG00000166049; CTA
KLKEQLEERTW

SEQ ID NO: 58413 - protein, 10 aa, Homo sapiens
  misc_feature: Table A; Target 58413; HLA-A*03:01; PASD1; ENSG00000166049; CTA
KLQEQKMQEK

SEQ ID NO: 58414 - protein, 10 aa, Homo sapiens
  misc_feature: Table A; Target 58414; HLA-A*03:02; PASD1; ENSG00000166049; CTA
KLQEQKMQEK

SEQ ID NO: 58415 - protein, 10 aa, Homo sapiens
  misc_feature: Table A; Target 58415; HLA-A*03:02; PASD1; ENSG00000166049; CTA
KQQLQEQPLK

SEQ ID NO: 58416 - protein, 9 aa, Homo sapiens
  misc_feature: Table A; Target 58416; HLA-A*03:01; PASD1; ENSG00000166049; CTA
KVNPKSSQR

SEQ ID NO: 58417 - protein, 9 aa, Homo sapiens
  misc_feature: Table A; Target 58417; HLA-A*03:02; PASD1; ENSG00000166049; CTA
KVNPKSSQR

SEQ ID NO: 58418 - protein, 9 aa, Homo sapiens
  misc_feature: Table A; Target 58418; HLA-A*31:01; PASD1; ENSG00000166049; CTA
KVNPKSSQR

SEQ ID NO: 58419 - protein, 9 aa, Homo sapiens
  misc_feature: Table A; Target 58419; HLA-A*32:01; PASD1; ENSG00000166049; CTA
KVNPKSSQR

SEQ ID NO: 58420 - protein, 9 aa, Homo sapiens
  misc_feature: Table A; Target 58420; HLA-A*33:03; PASD1; ENSG00000166049; CTA
KVNPKSSQR

SEQ ID NO: 58421 - protein, 10 aa, Homo sapiens
  misc_feature: Table A; Target 58421; HLA-A*03:01; PASD1; ENSG00000166049; CTA
KVNPKSSQRK

SEQ ID NO: 58422 - protein, 10 aa, Homo sapiens
  misc_feature: Table A; Target 58422; HLA-A*03:02; PASD1; ENSG00000166049; CTA
KVNPKSSQRK

SEQ ID NO: 58423 - protein, 8 aa, Homo sapiens
  misc_feature: Table A; Target 58423; HLA-B*18:01; PASD1; ENSG00000166049; CTA
LEFSVDQV

SEQ ID NO: 58424 - protein, 8 aa, Homo sapiens
  misc_feature: Table A; Target 58424; HLA-B*49:01; PASD1; ENSG00000166049; CTA
LEFSVDQV

SEQ ID NO: 58425 - protein, 11 aa, Homo sapiens
  misc_feature: Table A; Target 58425; HLA-B*49:01; PASD1; ENSG00000166049; CTA
LEFSVDQVDSV

SEQ ID NO: 58426 - protein, 8 aa, Homo sapiens
  misc_feature: Table A; Target 58426; HLA-B*49:01; PASD1; ENSG00000166049; CTA
LETPQDYI

SEQ ID NO: 58427 - protein, 11 aa, Homo sapiens
  misc_feature: Table A; Target 58427; HLA-B*44:02; PASD1; ENSG00000166049; CTA
LETPQDYIRLW

SEQ ID NO: 58428 - protein, 11 aa, Homo sapiens
  misc_feature: Table A; Target 58428; HLA-B*44:03; PASD1; ENSG00000166049; CTA
LETPQDYIRLW

SEQ ID NO: 58429 - protein, 11 aa, Homo sapiens
  misc_feature: Table A; Target 58429; HLA-B*57:01; PASD1; ENSG00000166049; CTA
LETPQDYIRLW

SEQ ID NO: 58430 - protein, 11 aa, Homo sapiens
  misc_feature: Table A; Target 58430; HLA-B*27:02; PASD1; ENSG00000166049; CTA
LGHLPAEIVGK

SEQ ID NO: 58431 - protein, 10 aa, Homo sapiens
  misc_feature: Table A; Target 58431; HLA-B*57:01; PASD1; ENSG00000166049; CTA
LGPVVQVNTW

SEQ ID NO: 58432 - protein, 10 aa, Homo sapiens
  misc_feature: Table A; Target 58432; HLA-B*58:01; PASD1; ENSG00000166049; CTA
LGPVVQVNTW

SEQ ID NO: 58433 - protein, 9 aa, Homo sapiens
  misc_feature: Table A; Target 58433; HLA-C*05:01; PASD1; ENSG00000166049; CTA
LIDTSNSEA

SEQ ID NO: 58434 - protein, 9 aa, Homo sapiens
  misc_feature: Table A; Target 58434; HLA-A*02:01; PASD1; ENSG00000166049; CTA
LLDGFMITL

SEQ ID NO: 58435 - protein, 9 aa, Homo sapiens
  misc_feature: Table A; Target 58435; HLA-A*02:04; PASD1; ENSG00000166049; CTA
LLDGFMITL

SEQ ID NO: 58436 - protein, 9 aa, Homo sapiens
  misc_feature: Table A; Target 58436; HLA-A*02:07; PASD1; ENSG00000166049; CTA
LLDGFMITL

SEQ ID NO: 58437 - protein, 9 aa, Homo sapiens
  misc_feature: Table A; Target 58437; HLA-B*38:01; PASD1; ENSG00000166049; CTA
LLDGFMITL

SEQ ID NO: 58438 - protein, 9 aa, Homo sapiens
  misc_feature: Table A; Target 58438; HLA-A*02:01; PASD1; ENSG00000166049; CTA
LLGHLPAEI

SEQ ID NO: 58439 - protein, 9 aa, Homo sapiens
  misc_feature: Table A; Target 58439; HLA-A*02:03; PASD1; ENSG00000166049; CTA
LLGHLPAEI

SEQ ID NO: 58440 - protein, 9 aa, Homo sapiens
  misc_feature: Table A; Target 58440; HLA-A*02:04; PASD1; ENSG00000166049; CTA
LLGHLPAEI

SEQ ID NO: 58441 - protein, 10 aa, Homo sapiens
  misc_feature: Table A; Target 58441; HLA-A*32:01; PASD1; ENSG00000166049; CTA
LLNSETHIEF

SEQ ID NO: 58442 - protein, 10 aa, Homo sapiens
  misc_feature: Table A; Target 58442; HLA-B*15:01; PASD1; ENSG00000166049; CTA
LLNSETHIEF

SEQ ID NO: 58443 - protein, 11 aa, Homo sapiens
  misc_feature: Table A; Target 58443; HLA-B*15:01; PASD1; ENSG00000166049; CTA
LLPDEEKDEVY

SEQ ID NO: 58444 - protein, 9 aa, Homo sapiens
  misc_feature: Table A; Target 58444; HLA-A*03:02; PASD1; ENSG00000166049; CTA
LLQQLYTSK

SEQ ID NO: 58445 - protein, 9 aa, Homo sapiens
  misc_feature: Table A; Target 58445; HLA-A*11:01; PASD1; ENSG00000166049; CTA
LLQQLYTSK

SEQ ID NO: 58446 - protein, 11 aa, Homo sapiens
  misc_feature: Table A; Target 58446; HLA-A*02:07; PASD1; ENSG00000166049; CTA
LMDPVDPEDSV

SEQ ID NO: 58447 - protein, 10 aa, Homo sapiens
  misc_feature: Table A; Target 58447; HLA-C*04:01; PASD1; ENSG00000166049; CTA
LMMDHLQKQP

SEQ ID NO: 58448 - protein, 9 aa, Homo sapiens
  misc_feature: Table A; Target 58448; HLA-A*29:02; PASD1; ENSG00000166049; CTA
LNSETHIEF

SEQ ID NO: 58449 - protein, 9 aa, Homo sapiens
  misc_feature: Table A; Target 58449; HLA-C*12:03; PASD1; ENSG00000166049; CTA
LNSETHIEF

SEQ ID NO: 58450 - protein, 9 aa, Homo sapiens
  misc_feature: Table A; Target 58450; HLA-C*16:01; PASD1; ENSG00000166049; CTA
LNSETHIEF

SEQ ID NO: 58451 - protein, 9 aa, Homo sapiens
  misc_feature: Table A; Target 58451; HLA-B*51:01; PASD1; ENSG00000166049; CTA
LPAEIVGKK

SEQ ID NO: 58452 - protein, 10 aa, Homo sapiens
  misc_feature: Table A; Target 58452; HLA-B*07:02; PASD1; ENSG00000166049; CTA
LPAEIVGKKL

SEQ ID NO: 58453 - protein, 10 aa, Homo sapiens
  misc_feature: Table A; Target 58453; HLA-B*35:01; PASD1; ENSG00000166049; CTA
LPAEIVGKKL

SEQ ID NO: 58454 - protein, 10 aa, Homo sapiens
  misc_feature: Table A; Target 58454; HLA-B*35:03; PASD1; ENSG00000166049; CTA
LPAEIVGKKL

SEQ ID NO: 58455 - protein, 10 aa, Homo sapiens
  misc_feature: Table A; Target 58455; HLA-B*51:01; PASD1; ENSG00000166049; CTA
LPAEIVGKKL

SEQ ID NO: 58456 - protein, 10 aa, Homo sapiens
  misc_feature: Table A; Target 58456; HLA-B*56:01; PASD1; ENSG00000166049; CTA
LPAEIVGKKL

SEQ ID NO: 58457 - protein, 10 aa, Homo sapiens
  misc_feature: Table A; Target 58457; HLA-C*07:02; PASD1; ENSG00000166049; CTA
LPAEIVGKKL

SEQ ID NO: 58458 - protein, 9 aa, Homo sapiens
  misc_feature: Table A; Target 58458; HLA-B*35:03; PASD1; ENSG00000166049; CTA
LPDEEKDEV

SEQ ID NO: 58459 - protein, 9 aa, Homo sapiens
  misc_feature: Table A; Target 58459; HLA-B*51:01; PASD1; ENSG00000166049; CTA
LPDEEKDEV

SEQ ID NO: 58460 - protein, 9 aa, Homo sapiens
  misc_feature: Table A; Target 58460; HLA-B*55:01; PASD1; ENSG00000166049; CTA
LPDEEKDEV

SEQ ID NO: 58461 - protein, 9 aa, Homo sapiens
  misc_feature: Table A; Target 58461; HLA-C*03:03; PASD1; ENSG00000166049; CTA
LPDEEKDEV

SEQ ID NO: 58462 - protein, 10 aa, Homo sapiens
  misc_feature: Table A; Target 58462; HLA-A*01:01; PASD1; ENSG00000166049; CTA
LPDEEKDEVY

SEQ ID NO: 58463 - protein, 10 aa, Homo sapiens
  misc_feature: Table A; Target 58463; HLA-B*35:01; PASD1; ENSG00000166049; CTA
LPDEEKDEVY

SEQ ID NO: 58464 - protein, 10 aa, Homo sapiens
  misc_feature: Table A; Target 58464; HLA-B*35:03; PASD1; ENSG00000166049; CTA
LPDEEKDEVY

SEQ ID NO: 58465 - protein, 10 aa, Homo sapiens
  misc_feature: Table A; Target 58465; HLA-B*55:01; PASD1; ENSG00000166049; CTA
LPDEEKDEVY

SEQ ID NO: 58466 - protein, 10 aa, Homo sapiens
  misc_feature: Table A; Target 58466; HLA-C*03:03; PASD1; ENSG00000166049; CTA
LPDEEKDEVY

SEQ ID NO: 58467 - protein, 11 aa, Homo sapiens
  misc_feature: Table A; Target 58467; HLA-B*54:01; PASD1; ENSG00000166049; CTA
LPLIDTSNSEA

SEQ ID NO: 58468 - protein, 11 aa, Homo sapiens
  misc_feature: Table A; Target 58468; HLA-B*56:01; PASD1; ENSG00000166049; CTA
LPLIDTSNSEA

SEQ ID NO: 58469 - protein, 9 aa, Homo sapiens
  misc_feature: Table A; Target 58469; HLA-A*02:01; PASD1; ENSG00000166049; CTA
LQAQPIVPV

SEQ ID NO: 58470 - protein, 9 aa, Homo sapiens
  misc_feature: Table A; Target 58470; HLA-A*02:03; PASD1; ENSG00000166049; CTA
LQAQPIVPV

SEQ ID NO: 58471 - protein, 9 aa, Homo sapiens
  misc_feature: Table A; Target 58471; HLA-B*13:02; PASD1; ENSG00000166049; CTA
LQAQPIVPV

SEQ ID NO: 58472 - protein, 11 aa, Homo sapiens
  misc_feature: Table A; Target 58472; HLA-A*31:01; PASD1; ENSG00000166049; CTA
LQAQPIVPVQR

SEQ ID NO: 58473 - protein, 11 aa, Homo sapiens
  misc_feature: Table A; Target 58473; HLA-A*68:01; PASD1; ENSG00000166049; CTA
LQAQPIVPVQR

SEQ ID NO: 58474 - protein, 11 aa, Homo sapiens
  misc_feature: Table A; Target 58474; HLA-C*07:06; PASD1; ENSG00000166049; CTA
LQAQPIVPVQR

SEQ ID NO: 58475 - protein, 8 aa, Homo sapiens
  misc_feature: Table A; Target 58475; HLA-B*08:01; PASD1; ENSG00000166049; CTA
LQKQPNTL

SEQ ID NO: 58476 - protein, 9 aa, Homo sapiens
  misc_feature: Table A; Target 58476; HLA-A*31:01; PASD1; ENSG00000166049; CTA
LQKQPNTLR

SEQ ID NO: 58477 - protein, 9 aa, Homo sapiens
  misc_feature: Table A; Target 58477; HLA-A*02:01; PASD1; ENSG00000166049; CTA
LQNPRDVSV

SEQ ID NO: 58478 - protein, 9 aa, Homo sapiens
  misc_feature: Table A; Target 58478; HLA-A*32:01; PASD1; ENSG00000166049; CTA
LQNPRDVSV

SEQ ID NO: 58479 - protein, 9 aa, Homo sapiens
  misc_feature: Table A; Target 58479; HLA-B*08:01; PASD1; ENSG00000166049; CTA
LQNPRDVSV

SEQ ID NO: 58480 - protein, 9 aa, Homo sapiens
  misc_feature: Table A; Target 58480; HLA-B*13:02; PASD1; ENSG00000166049; CTA
LQNPRDVSV

SEQ ID NO: 58481 - protein, 9 aa, Homo sapiens
  misc_feature: Table A; Target 58481; HLA-B*37:01; PASD1; ENSG00000166049; CTA
LQNPRDVSV

SEQ ID NO: 58482 - protein, 9 aa, Homo sapiens
  misc_feature: Table A; Target 58482; HLA-C*03:04; PASD1; ENSG00000166049; CTA
LQNPRDVSV

SEQ ID NO: 58483 - protein, 9 aa, Homo sapiens
  misc_feature: Table A; Target 58483; HLA-C*16:01; PASD1; ENSG00000166049; CTA
LQNPRDVSV

SEQ ID NO: 58484 - protein, 9 aa, Homo sapiens
  misc_feature: Table A; Target 58484; HLA-C*16:02; PASD1; ENSG00000166049; CTA
LQNPRDVSV

SEQ ID NO: 58485 - protein, 9 aa, Homo sapiens
  misc_feature: Table A; Target 58485; HLA-A*01:01; PASD1; ENSG00000166049; CTA
LQPSSPVAY

SEQ ID NO: 58486 - protein, 9 aa, Homo sapiens
  misc_feature: Table A; Target 58486; HLA-A*29:02; PASD1; ENSG00000166049; CTA
LQPSSPVAY

SEQ ID NO: 58487 - protein, 9 aa, Homo sapiens
  misc_feature: Table A; Target 58487; HLA-A*30:02; PASD1; ENSG00000166049; CTA
LQPSSPVAY

SEQ ID NO: 58488 - protein, 9 aa, Homo sapiens
  misc_feature: Table A; Target 58488; HLA-A*32:01; PASD1; ENSG00000166049; CTA
LQPSSPVAY

SEQ ID NO: 58489 - protein, 9 aa, Homo sapiens
  misc_feature: Table A; Target 58489; HLA-B*15:01; PASD1; ENSG00000166049; CTA
LQPSSPVAY

SEQ ID NO: 58490 - protein, 9 aa, Homo sapiens
  misc_feature: Table A; Target 58490; HLA-B*15:03; PASD1; ENSG00000166049; CTA
LQPSSPVAY

SEQ ID NO: 58491 - protein, 9 aa, Homo sapiens
  misc_feature: Table A; Target 58491; HLA-B*46:01; PASD1; ENSG00000166049; CTA
LQPSSPVAY

SEQ ID NO: 58492 - protein, 9 aa, Homo sapiens
  misc_feature: Table A; Target 58492; HLA-C*01:02; PASD1; ENSG00000166049; CTA
LQPSSPVAY

SEQ ID NO: 58493 - protein, 9 aa, Homo sapiens
  misc_feature: Table A; Target 58493; HLA-C*02:02; PASD1; ENSG00000166049; CTA
LQPSSPVAY

SEQ ID NO: 58494 - protein, 9 aa, Homo sapiens
  misc_feature: Table A; Target 58494; HLA-C*07:04; PASD1; ENSG00000166049; CTA
LQPSSPVAY

SEQ ID NO: 58495 - protein, 9 aa, Homo sapiens
  misc_feature: Table A; Target 58495; HLA-C*14:02; PASD1; ENSG00000166049; CTA
LQPSSPVAY

SEQ ID NO: 58496 - protein, 9 aa, Homo sapiens
  misc_feature: Table A; Target 58496; HLA-C*16:04; PASD1; ENSG00000166049; CTA
LQPSSPVAY

SEQ ID NO: 58497 - protein, 9 aa, Homo sapiens
  misc_feature: Table A; Target 58497; HLA-B*27:05; PASD1; ENSG00000166049; CTA
LRTQLLQQL

SEQ ID NO: 58498 - protein, 9 aa, Homo sapiens
  misc_feature: Table A; Target 58498; HLA-A*01:01; PASD1; ENSG00000166049; CTA
LSDSLGPVV

SEQ ID NO: 58499 - protein, 9 aa, Homo sapiens
  misc_feature: Table A; Target 58499; HLA-C*05:01; PASD1; ENSG00000166049; CTA
LSDSLGPVV

SEQ ID NO: 58500 - protein, 9 aa, Homo sapiens
  misc_feature: Table A; Target 58500; HLA-A*03:02; PASD1; ENSG00000166049; CTA
LVQQEQHLK

SEQ ID NO: 58501 - protein, 9 aa, Homo sapiens
  misc_feature: Table A; Target 58501; HLA-A*11:01; PASD1; ENSG00000166049; CTA
LVQQEQHLK

SEQ ID NO: 58502 - protein, 8 aa, Homo sapiens
  misc_feature: Table A; Target 58502; HLA-C*14:02; PASD1; ENSG00000166049; CTA
LYLVGNVC

SEQ ID NO: 58503 - protein, 9 aa, Homo sapiens
  misc_feature: Table A; Target 58503; HLA-A*23:01; PASD1; ENSG00000166049; CTA
LYLVGNVCI

SEQ ID NO: 58504 - protein, 9 aa, Homo sapiens
  misc_feature: Table A; Target 58504; HLA-A*24:02; PASD1; ENSG00000166049; CTA
LYLVGNVCI

SEQ ID NO: 58505 - protein, 9 aa, Homo sapiens
  misc_feature: Table A; Target 58505; HLA-C*14:02; PASD1; ENSG00000166049; CTA
LYRADPVDL

SEQ ID NO: 58506 - protein, 11 aa, Homo sapiens
  misc_feature: Table A; Target 58506; HLA-A*23:01; PASD1; ENSG00000166049; CTA
LYRADPVDLEF

SEQ ID NO: 58507 - protein, 11 aa, Homo sapiens
  misc_feature: Table A; Target 58507; HLA-A*24:02; PASD1; ENSG00000166049; CTA
LYRADPVDLEF

SEQ ID NO: 58508 - protein, 9 aa, Homo sapiens
  misc_feature: Table A; Target 58508; HLA-A*23:01; PASD1; ENSG00000166049; CTA
MFVDSDSTY

SEQ ID NO: 58509 - protein, 9 aa, Homo sapiens
  misc_feature: Table A; Target 58509; HLA-A*29:02; PASD1; ENSG00000166049; CTA
MFVDSDSTY

SEQ ID NO: 58510 - protein, 9 aa, Homo sapiens
  misc_feature: Table A; Target 58510; HLA-A*30:02; PASD1; ENSG00000166049; CTA
MFVDSDSTY

SEQ ID NO: 58511 - protein, 9 aa, Homo sapiens
  misc_feature: Table A; Target 58511; HLA-B*15:01; PASD1; ENSG00000166049; CTA
MFVDSDSTY

SEQ ID NO: 58512 - protein, 9 aa, Homo sapiens
  misc_feature: Table A; Target 58512; HLA-B*15:03; PASD1; ENSG00000166049; CTA
MFVDSDSTY

SEQ ID NO: 58513 - protein, 9 aa, Homo sapiens
  misc_feature: Table A; Target 58513; HLA-B*35:01; PASD1; ENSG00000166049; CTA
MFVDSDSTY

SEQ ID NO: 58514 - protein, 9 aa, Homo sapiens
  misc_feature: Table A; Target 58514; HLA-B*35:03; PASD1; ENSG00000166049; CTA
MFVDSDSTY

SEQ ID NO: 58515 - protein, 9 aa, Homo sapiens
  misc_feature: Table A; Target 58515; HLA-B*39:01; PASD1; ENSG00000166049; CTA
MFVDSDSTY

SEQ ID NO: 58516 - protein, 9 aa, Homo sapiens
  misc_feature: Table A; Target 58516; HLA-B*46:01; PASD1; ENSG00000166049; CTA
MFVDSDSTY

SEQ ID NO: 58517 - protein, 9 aa, Homo sapiens
  misc_feature: Table A; Target 58517; HLA-B*55:01; PASD1; ENSG00000166049; CTA
MFVDSDSTY

SEQ ID NO: 58518 - protein, 9 aa, Homo sapiens
  misc_feature: Table A; Target 58518; HLA-C*01:02; PASD1; ENSG00000166049; CTA
MFVDSDSTY

SEQ ID NO: 58519 - protein, 9 aa, Homo sapiens
  misc_feature: Table A; Target 58519; HLA-C*04:01; PASD1; ENSG00000166049; CTA
MFVDSDSTY

SEQ ID NO: 58520 - protein, 9 aa, Homo sapiens
  misc_feature: Table A; Target 58520; HLA-C*07:04; PASD1; ENSG00000166049; CTA
MFVDSDSTY

SEQ ID NO: 58521 - protein, 9 aa, Homo sapiens
  misc_feature: Table A; Target 58521; HLA-C*14:02; PASD1; ENSG00000166049; CTA
MFVDSDSTY

SEQ ID NO: 58522 - protein, 11 aa, Homo sapiens
  misc_feature: Table A; Target 58522; HLA-B*55:01; PASD1; ENSG00000166049; CTA
MPAEQRDSNKP

SEQ ID NO: 58523 - protein, 9 aa, Homo sapiens
  misc_feature: Table A; Target 58523; HLA-B*07:02; PASD1; ENSG00000166049; CTA
MPESPALSL

SEQ ID NO: 58524 - protein, 9 aa, Homo sapiens
  misc_feature: Table A; Target 58524; HLA-B*08:01; PASD1; ENSG00000166049; CTA
MPESPALSL

SEQ ID NO: 58525 - protein, 9 aa, Homo sapiens
  misc_feature: Table A; Target 58525; HLA-B*35:01; PASD1; ENSG00000166049; CTA
MPESPALSL

SEQ ID NO: 58526 - protein, 9 aa, Homo sapiens
  misc_feature: Table A; Target 58526; HLA-B*35:03; PASD1; ENSG00000166049; CTA
MPESPALSL

SEQ ID NO: 58527 - protein, 9 aa, Homo sapiens
  misc_feature: Table A; Target 58527; HLA-B*51:01; PASD1; ENSG00000166049; CTA
MPESPALSL

SEQ ID NO: 58528 - protein, 9 aa, Homo sapiens
  misc_feature: Table A; Target 58528; HLA-B*54:01; PASD1; ENSG00000166049; CTA
MPESPALSL

SEQ ID NO: 58529 - protein, 9 aa, Homo sapiens
  misc_feature: Table A; Target 58529; HLA-B*55:01; PASD1; ENSG00000166049; CTA
MPESPALSL

SEQ ID NO: 58530 - protein, 9 aa, Homo sapiens
  misc_feature: Table A; Target 58530; HLA-B*56:01; PASD1; ENSG00000166049; CTA
MPESPALSL

SEQ ID NO: 58531 - protein, 9 aa, Homo sapiens
  misc_feature: Table A; Target 58531; HLA-C*01:02; PASD1; ENSG00000166049; CTA
MPESPALSL

SEQ ID NO: 58532 - protein, 9 aa, Homo sapiens
  misc_feature: Table A; Target 58532; HLA-C*03:03; PASD1; ENSG00000166049; CTA
MPESPALSL

SEQ ID NO: 58533 - protein, 9 aa, Homo sapiens
  misc_feature: Table A; Target 58533; HLA-C*03:04; PASD1; ENSG00000166049; CTA
MPESPALSL

SEQ ID NO: 58534 - protein, 9 aa, Homo sapiens
  misc_feature: Table A; Target 58534; HLA-C*05:01; PASD1; ENSG00000166049; CTA
MPESPALSL

SEQ ID NO: 58535 - protein, 9 aa, Homo sapiens
  misc_feature: Table A; Target 58535; HLA-C*07:02; PASD1; ENSG00000166049; CTA
MPESPALSL

SEQ ID NO: 58536 - protein, 9 aa, Homo sapiens
  misc_feature: Table A; Target 58536; HLA-C*14:02; PASD1; ENSG00000166049; CTA
MPESPALSL

SEQ ID NO: 58537 - protein, 9 aa, Homo sapiens
  misc_feature: Table A; Target 58537; HLA-B*27:05; PASD1; ENSG00000166049; CTA
MRSAEQTRL

SEQ ID NO: 58538 - protein, 8 aa, Homo sapiens
  misc_feature: Table A; Target 58538; HLA-B*18:01; PASD1; ENSG00000166049; CTA
NEFPVVFS

SEQ ID NO: 58539 - protein, 9 aa, Homo sapiens
  misc_feature: Table A; Target 58539; HLA-B*18:01; PASD1; ENSG00000166049; CTA
NEFPVVFSG

SEQ ID NO: 58540 - protein, 10 aa, Homo sapiens
  misc_feature: Table A; Target 58540; HLA-A*30:01; PASD1; ENSG00000166049; CTA
NEFPVVFSGL

SEQ ID NO: 58541 - protein, 10 aa, Homo sapiens
  misc_feature: Table A; Target 58541; HLA-B*18:01; PASD1; ENSG00000166049; CTA
NEFPVVFSGL

SEQ ID NO: 58542 - protein, 10 aa, Homo sapiens
  misc_feature: Table A; Target 58542; HLA-B*40:01; PASD1; ENSG00000166049; CTA
NEFPVVFSGL

SEQ ID NO: 58543 - protein, 10 aa, Homo sapiens
  misc_feature: Table A; Target 58543; HLA-B*44:02; PASD1; ENSG00000166049; CTA
NEFPVVFSGL

SEQ ID NO: 58544 - protein, 10 aa, Homo sapiens
  misc_feature: Table A; Target 58544; HLA-B*44:03; PASD1; ENSG00000166049; CTA
NEFPVVFSGL

SEQ ID NO: 58545 - protein, 10 aa, Homo sapiens
  misc_feature: Table A; Target 58545; HLA-B*49:01; PASD1; ENSG00000166049; CTA
NEFPVVFSGL

SEQ ID NO: 58546 - protein, 11 aa, Homo sapiens
  misc_feature: Table A; Target 58546; HLA-B*44:02; PASD1; ENSG00000166049; CTA
NEFPVVFSGLF

SEQ ID NO: 58547 - protein, 11 aa, Homo sapiens
  misc_feature: Table A; Target 58547; HLA-B*44:03; PASD1; ENSG00000166049; CTA
NEFPVVFSGLF

SEQ ID NO: 58548 - protein, 9 aa, Homo sapiens
  misc_feature: Table A; Target 58548; HLA-B*07:02; PASD1; ENSG00000166049; CTA
NPKSSQRKL

SEQ ID NO: 58549 - protein, 9 aa, Homo sapiens
  misc_feature: Table A; Target 58549; HLA-B*07:02; PASD1; ENSG00000166049; CTA
NPRDVSVPL

SEQ ID NO: 58550 - protein, 9 aa, Homo sapiens
  misc_feature: Table A; Target 58550; HLA-B*35:01; PASD1; ENSG00000166049; CTA
NPRDVSVPL

SEQ ID NO: 58551 - protein, 9 aa, Homo sapiens
  misc_feature: Table A; Target 58551; HLA-B*35:03; PASD1; ENSG00000166049; CTA
NPRDVSVPL

SEQ ID NO: 58552 - protein, 9 aa, Homo sapiens
  misc_feature: Table A; Target 58552; HLA-B*56:01; PASD1; ENSG00000166049; CTA
NPRDVSVPL

SEQ ID NO: 58553 - protein, 9 aa, Homo sapiens
  misc_feature: Table A; Target 58553; HLA-C*07:02; PASD1; ENSG00000166049; CTA
NPRDVSVPL

SEQ ID NO: 58554 - protein, 9 aa, Homo sapiens
  misc_feature: Table A; Target 58554; HLA-B*54:01; PASD1; ENSG00000166049; CTA
NPVAPLDQA

SEQ ID NO: 58555 - protein, 9 aa, Homo sapiens
  misc_feature: Table A; Target 58555; HLA-B*55:01; PASD1; ENSG00000166049; CTA
NPVAPLDQA

SEQ ID NO: 58556 - protein, 9 aa, Homo sapiens
  misc_feature: Table A; Target 58556; HLA-B*56:01; PASD1; ENSG00000166049; CTA
NPVAPLDQA

SEQ ID NO: 58557 - protein, 11 aa, Homo sapiens
  misc_feature: Table A; Target 58557; HLA-B*35:03; PASD1; ENSG00000166049; CTA
NPVAPLDQAGL

SEQ ID NO: 58558 - protein, 8 aa, Homo sapiens
  misc_feature: Table A; Target 58558; HLA-B*39:01; PASD1; ENSG00000166049; CTA
NQQNALEL

SEQ ID NO: 58559 - protein, 8 aa, Homo sapiens
  misc_feature: Table A; Target 58559; HLA-C*14:02; PASD1; ENSG00000166049; CTA
NQQNALEL

SEQ ID NO: 58560 - protein, 8 aa, Homo sapiens
  misc_feature: Table A; Target 58560; HLA-C*05:01; PASD1; ENSG00000166049; CTA
NSETHIEF

SEQ ID NO: 58561 - protein, 8 aa, Homo sapiens
  misc_feature: Table A; Target 58561; HLA-C*16:01; PASD1; ENSG00000166049; CTA
NSETHIEF

SEQ ID NO: 58562 - protein, 10 aa, Homo sapiens
  misc_feature: Table A; Target 58562; HLA-A*01:01; PASD1; ENSG00000166049; CTA
NVEHGDSSAY

SEQ ID NO: 58563 - protein, 8 aa, Homo sapiens
  misc_feature: Table A; Target 58563; HLA-A*68:01; PASD1; ENSG00000166049; CTA
NVIVGNER

SEQ ID NO: 58564 - protein, 9 aa, Homo sapiens
  misc_feature: Table A; Target 58564; HLA-A*31:01; PASD1; ENSG00000166049; CTA
NVKFIVNVR

SEQ ID NO: 58565 - protein, 9 aa, Homo sapiens
  misc_feature: Table A; Target 58565; HLA-A*33:01; PASD1; ENSG00000166049; CTA
NVKFIVNVR

SEQ ID NO: 58566 - protein, 9 aa, Homo sapiens
  misc_feature: Table A; Target 58566; HLA-A*33:03; PASD1; ENSG00000166049; CTA
NVKFIVNVR

SEQ ID NO: 58567 - protein, 9 aa, Homo sapiens
  misc_feature: Table A; Target 58567; HLA-A*68:01; PASD1; ENSG00000166049; CTA
NVKFIVNVR

SEQ ID NO: 58568 - protein, 9 aa, Homo sapiens
  misc_feature: Table A; Target 58568; HLA-C*07:06; PASD1; ENSG00000166049; CTA
NVKFIVNVR

SEQ ID NO: 58569 - protein, 9 aa, Homo sapiens
  misc_feature: Table A; Target 58569; HLA-A*23:01; PASD1; ENSG00000166049; CTA
NWIPSFPTY

SEQ ID NO: 58570 - protein, 9 aa, Homo sapiens
  misc_feature: Table A; Target 58570; HLA-A*24:02; PASD1; ENSG00000166049; CTA
NWIPSFPTY

SEQ ID NO: 58571 - protein, 9 aa, Homo sapiens
  misc_feature: Table A; Target 58571; HLA-A*29:02; PASD1; ENSG00000166049; CTA
NWIPSFPTY

SEQ ID NO: 58572 - protein, 10 aa, Homo sapiens
  misc_feature: Table A; Target 58572; HLA-B*07:02; PASD1; ENSG00000166049; CTA
PAAAAAAAAI

SEQ ID NO: 58573 - protein, 10 aa, Homo sapiens
  misc_feature: Table A; Target 58573; HLA-B*07:02; PASD1; ENSG00000166049; CTA
PAEIVGKKLL

SEQ ID NO: 58574 - protein, 11 aa, Homo sapiens
  misc_feature: Table A; Target 58574; HLA-A*03:02; PASD1; ENSG00000166049; CTA
PDLQSSEAVPK

SEQ ID NO: 58575 - protein, 11 aa, Homo sapiens
  misc_feature: Table A; Target 58575; HLA-A*11:01; PASD1; ENSG00000166049; CTA
PDLQSSEAVPK

SEQ ID NO: 58576 - protein, 11 aa, Homo sapiens
  misc_feature: Table A; Target 58576; HLA-B*27:02; PASD1; ENSG00000166049; CTA
PDLQSSEAVPK

SEQ ID NO: 58577 - protein, 10 aa, Homo sapiens
  misc_feature: Table A; Target 58577; HLA-B*40:01; PASD1; ENSG00000166049; CTA
PEEEQQKQQL

SEQ ID NO: 58578 - protein, 8 aa, Homo sapiens
  misc_feature: Table A; Target 58578; HLA-B*37:01; PASD1; ENSG00000166049; CTA
PESPALSL

SEQ ID NO: 58579 - protein, 10 aa, Homo sapiens
  misc_feature: Table A; Target 58579; HLA-A*30:02; PASD1; ENSG00000166049; CTA
PLQPSSPVAY

SEQ ID NO: 58580 - protein, 10 aa, Homo sapiens
  misc_feature: Table A; Target 58580; HLA-B*15:01; PASD1; ENSG00000166049; CTA
PLQPSSPVAY

SEQ ID NO: 58581 - protein, 10 aa, Homo sapiens
  misc_feature: Table A; Target 58581; HLA-A*30:02; PASD1; ENSG00000166049; CTA
PQAFQGPAAY

SEQ ID NO: 58582 - protein, 9 aa, Homo sapiens
  misc_feature: Table A; Target 58582; HLA-A*68:02; PASD1; ENSG00000166049; CTA
PTYDYFNQV

SEQ ID NO: 58583 - protein, 8 aa, Homo sapiens
  misc_feature: Table A; Target 58583; HLA-C*05:01; PASD1; ENSG00000166049; CTA
PVDPEDSV

SEQ ID NO: 58584 - protein, 8 aa, Homo sapiens
  misc_feature: Table A; Target 58584; HLA-B*58:01; PASD1; ENSG00000166049; CTA
PVVQVNTW

SEQ ID NO: 58585 - protein, 8 aa, Homo sapiens
  misc_feature: Table A; Target 58585; HLA-B*54:01; PASD1; ENSG00000166049; CTA
QAFQGPAA

SEQ ID NO: 58586 - protein, 9 aa, Homo sapiens
  misc_feature: Table A; Target 58586; HLA-A*01:01; PASD1; ENSG00000166049; CTA
QAFQGPAAY

SEQ ID NO: 58587 - protein, 9 aa, Homo sapiens
  misc_feature: Table A; Target 58587; HLA-A*25:01; PASD1; ENSG00000166049; CTA
QAFQGPAAY

SEQ ID NO: 58588 - protein, 9 aa, Homo sapiens
  misc_feature: Table A; Target 58588; HLA-A*26:01; PASD1; ENSG00000166049; CTA
QAFQGPAAY

SEQ ID NO: 58589 - protein, 9 aa, Homo sapiens
  misc_feature: Table A; Target 58589; HLA-A*29:02; PASD1; ENSG00000166049; CTA
QAFQGPAAY

SEQ ID NO: 58590 - protein, 9 aa, Homo sapiens
  misc_feature: Table A; Target 58590; HLA-A*30:02; PASD1; ENSG00000166049; CTA
QAFQGPAAY

SEQ ID NO: 58591 - protein, 9 aa, Homo sapiens
  misc_feature: Table A; Target 58591; HLA-A*32:01; PASD1; ENSG00000166049; CTA
QAFQGPAAY

SEQ ID NO: 58592 - protein, 9 aa, Homo sapiens
  misc_feature: Table A; Target 58592; HLA-B*15:01; PASD1; ENSG00000166049; CTA
QAFQGPAAY

SEQ ID NO: 58593 - protein, 9 aa, Homo sapiens
  misc_feature: Table A; Target 58593; HLA-B*15:03; PASD1; ENSG00000166049; CTA
QAFQGPAAY

SEQ ID NO: 58594 - protein, 9 aa, Homo sapiens
  misc_feature: Table A; Target 58594; HLA-B*18:01; PASD1; ENSG00000166049; CTA
QAFQGPAAY

SEQ ID NO: 58595 - protein, 9 aa, Homo sapiens
  misc_feature: Table A; Target 58595; HLA-B*35:01; PASD1; ENSG00000166049; CTA
QAFQGPAAY

SEQ ID NO: 58596 - protein, 9 aa, Homo sapiens
  misc_feature: Table A; Target 58596; HLA-B*39:01; PASD1; ENSG00000166049; CTA
QAFQGPAAY

SEQ ID NO: 58597 - protein, 9 aa, Homo sapiens
  misc_feature: Table A; Target 58597; HLA-B*46:01; PASD1; ENSG00000166049; CTA
QAFQGPAAY

SEQ ID NO: 58598 - protein, 9 aa, Homo sapiens
  misc_feature: Table A; Target 58598; HLA-B*58:01; PASD1; ENSG00000166049; CTA
QAFQGPAAY

SEQ ID NO: 58599 - protein, 9 aa, Homo sapiens
  misc_feature: Table A; Target 58599; HLA-C*02:02; PASD1; ENSG00000166049; CTA
QAFQGPAAY

SEQ ID NO: 58600 - protein, 9 aa, Homo sapiens
  misc_feature: Table A; Target 58600; HLA-C*03:03; PASD1; ENSG00000166049; CTA
QAFQGPAAY

SEQ ID NO: 58601 - protein, 9 aa, Homo sapiens
  misc_feature: Table A; Target 58601; HLA-C*03:04; PASD1; ENSG00000166049; CTA
QAFQGPAAY

SEQ ID NO: 58602 - protein, 9 aa, Homo sapiens
  misc_feature: Table A; Target 58602; HLA-C*07:04; PASD1; ENSG00000166049; CTA
QAFQGPAAY

SEQ ID NO: 58603 - protein, 9 aa, Homo sapiens
  misc_feature: Table A; Target 58603; HLA-C*07:06; PASD1; ENSG00000166049; CTA
QAFQGPAAY

SEQ ID NO: 58604 - protein, 9 aa, Homo sapiens
  misc_feature: Table A; Target 58604; HLA-C*12:03; PASD1; ENSG00000166049; CTA
QAFQGPAAY

SEQ ID NO: 58605 - protein, 9 aa, Homo sapiens
  misc_feature: Table A; Target 58605; HLA-C*14:02; PASD1; ENSG00000166049; CTA
QAFQGPAAY

SEQ ID NO: 58606 - protein, 9 aa, Homo sapiens
  misc_feature: Table A; Target 58606; HLA-C*16:01; PASD1; ENSG00000166049; CTA
QAFQGPAAY

SEQ ID NO: 58607 - protein, 9 aa, Homo sapiens
  misc_feature: Table A; Target 58607; HLA-C*16:04; PASD1; ENSG00000166049; CTA
QAFQGPAAY

SEQ ID NO: 58608 - protein, 9 aa, Homo sapiens
  misc_feature: Table A; Target 58608; HLA-A*32:01; PASD1; ENSG00000166049; CTA
QAQPIVPVQ

SEQ ID NO: 58609 - protein, 9 aa, Homo sapiens
  misc_feature: Table A; Target 58609; HLA-C*06:02; PASD1; ENSG00000166049; CTA
QAQPIVPVQ

SEQ ID NO: 58610 - protein, 9 aa, Homo sapiens
  misc_feature: Table A; Target 58610; HLA-C*12:03; PASD1; ENSG00000166049; CTA
QAQPIVPVQ

SEQ ID NO: 58611 - protein, 9 aa, Homo sapiens
  misc_feature: Table A; Target 58611; HLA-C*16:01; PASD1; ENSG00000166049; CTA
QAQPIVPVQ

SEQ ID NO: 58612 - protein, 10 aa, Homo sapiens
  misc_feature: Table A; Target 58612; HLA-A*03:02; PASD1; ENSG00000166049; CTA
QAQPIVPVQR

SEQ ID NO: 58613 - protein, 10 aa, Homo sapiens
  misc_feature: Table A; Target 58613; HLA-A*11:01; PASD1; ENSG00000166049; CTA
QAQPIVPVQR

SEQ ID NO: 58614 - protein, 10 aa, Homo sapiens
  misc_feature: Table A; Target 58614; HLA-A*31:01; PASD1; ENSG00000166049; CTA
QAQPIVPVQR

SEQ ID NO: 58615 - protein, 10 aa, Homo sapiens
  misc_feature: Table A; Target 58615; HLA-A*33:01; PASD1; ENSG00000166049; CTA
QAQPIVPVQR

SEQ ID NO: 58616 - protein, 10 aa, Homo sapiens
  misc_feature: Table A; Target 58616; HLA-A*33:03; PASD1; ENSG00000166049; CTA
QAQPIVPVQR

SEQ ID NO: 58617 - protein, 10 aa, Homo sapiens
  misc_feature: Table A; Target 58617; HLA-A*68:01; PASD1; ENSG00000166049; CTA
QAQPIVPVQR

SEQ ID NO: 58618 - protein, 10 aa, Homo sapiens
  misc_feature: Table A; Target 58618; HLA-A*68:02; PASD1; ENSG00000166049; CTA
QAQPIVPVQR

SEQ ID NO: 58619 - protein, 10 aa, Homo sapiens
  misc_feature: Table A; Target 58619; HLA-B*57:01; PASD1; ENSG00000166049; CTA
QAQPIVPVQR

SEQ ID NO: 58620 - protein, 10 aa, Homo sapiens
  misc_feature: Table A; Target 58620; HLA-C*07:06; PASD1; ENSG00000166049; CTA
QAQPIVPVQR

SEQ ID NO: 58621 - protein, 9 aa, Homo sapiens
  misc_feature: Table A; Target 58621; HLA-A*30:01; PASD1; ENSG00000166049; CTA
QDFRGEPEV

SEQ ID NO: 58622 - protein, 9 aa, Homo sapiens
  misc_feature: Table A; Target 58622; HLA-B*37:01; PASD1; ENSG00000166049; CTA
QDFRGEPEV

SEQ ID NO: 58623 - protein, 8 aa, Homo sapiens
  misc_feature: Table A; Target 58623; HLA-B*18:01; PASD1; ENSG00000166049; CTA
QEDESQSF

SEQ ID NO: 58624 - protein, 8 aa, Homo sapiens
  misc_feature: Table A; Target 58624; HLA-B*37:01; PASD1; ENSG00000166049; CTA
QEDESQSF

SEQ ID NO: 58625 - protein, 8 aa, Homo sapiens
  misc_feature: Table A; Target 58625; HLA-B*44:02; PASD1; ENSG00000166049; CTA
QEDESQSF

SEQ ID NO: 58626 - protein, 9 aa, Homo sapiens
  misc_feature: Table A; Target 58626; HLA-A*01:01; PASD1; ENSG00000166049; CTA
QEDESQSFY

SEQ ID NO: 58627 - protein, 9 aa, Homo sapiens
  misc_feature: Table A; Target 58627; HLA-B*18:01; PASD1; ENSG00000166049; CTA
QEDESQSFY

SEQ ID NO: 58628 - protein, 9 aa, Homo sapiens
  misc_feature: Table A; Target 58628; HLA-B*44:02; PASD1; ENSG00000166049; CTA
QEDESQSFY

SEQ ID NO: 58629 - protein, 9 aa, Homo sapiens
  misc_feature: Table A; Target 58629; HLA-B*44:03; PASD1; ENSG00000166049; CTA
QEDESQSFY

SEQ ID NO: 58630 - protein, 9 aa, Homo sapiens
  misc_feature: Table A; Target 58630; HLA-A*30:01; PASD1; ENSG00000166049; CTA
QELELMKKL

SEQ ID NO: 58631 - protein, 9 aa, Homo sapiens
  misc_feature: Table A; Target 58631; HLA-B*18:01; PASD1; ENSG00000166049; CTA
QELELMKKL

SEQ ID NO: 58632 - protein, 9 aa, Homo sapiens
  misc_feature: Table A; Target 58632; HLA-B*37:01; PASD1; ENSG00000166049; CTA
QELELMKKL

SEQ ID NO: 58633 - protein, 9 aa, Homo sapiens
  misc_feature: Table A; Target 58633; HLA-B*40:01; PASD1; ENSG00000166049; CTA
QELELMKKL

SEQ ID NO: 58634 - protein, 9 aa, Homo sapiens
  misc_feature: Table A; Target 58634; HLA-B*44:02; PASD1; ENSG00000166049; CTA
QELELMKKL

SEQ ID NO: 58635 - protein, 9 aa, Homo sapiens
  misc_feature: Table A; Target 58635; HLA-B*44:03; PASD1; ENSG00000166049; CTA
QELELMKKL

SEQ ID NO: 58636 - protein, 9 aa, Homo sapiens
  misc_feature: Table A; Target 58636; HLA-B*49:01; PASD1; ENSG00000166049; CTA
QELELMKKL

SEQ ID NO: 58637 - protein, 10 aa, Homo sapiens
  misc_feature: Table A; Target 58637; HLA-B*49:01; PASD1; ENSG00000166049; CTA
QELSDSLGPV

SEQ ID NO: 58638 - protein, 11 aa, Homo sapiens
  misc_feature: Table A; Target 58638; HLA-B*49:01; PASD1; ENSG00000166049; CTA
QELSDSLGPVV

SEQ ID NO: 58639 - protein, 8 aa, Homo sapiens
  misc_feature: Table A; Target 58639; HLA-B*49:01; PASD1; ENSG00000166049; CTA
QENVHMFV

SEQ ID NO: 58640 - protein, 9 aa, Homo sapiens
  misc_feature: Table A; Target 58640; HLA-B*37:01; PASD1; ENSG00000166049; CTA
QEQPLKHNV

SEQ ID NO: 58641 - protein, 9 aa, Homo sapiens
  misc_feature: Table A; Target 58641; HLA-B*44:02; PASD1; ENSG00000166049; CTA
QEQPLKHNV

SEQ ID NO: 58642 - protein, 9 aa, Homo sapiens
  misc_feature: Table A; Target 58642; HLA-B*44:03; PASD1; ENSG00000166049; CTA
QEQPLKHNV

SEQ ID NO: 58643 - protein, 9 aa, Homo sapiens
  misc_feature: Table A; Target 58643; HLA-B*49:01; PASD1; ENSG00000166049; CTA
QEQPLKHNV

SEQ ID NO: 58644 - protein, 10 aa, Homo sapiens
  misc_feature: Table A; Target 58644; HLA-B*44:02; PASD1; ENSG00000166049; CTA
QEQPLKHNVI

SEQ ID NO: 58645 - protein, 10 aa, Homo sapiens
  misc_feature: Table A; Target 58645; HLA-B*44:03; PASD1; ENSG00000166049; CTA
QEQPLKHNVI

SEQ ID NO: 58646 - protein, 10 aa, Homo sapiens
  misc_feature: Table A; Target 58646; HLA-B*49:01; PASD1; ENSG00000166049; CTA
QEQPLKHNVI

SEQ ID NO: 58647 - protein, 8 aa, Homo sapiens
  misc_feature: Table A; Target 58647; HLA-C*01:02; PASD1; ENSG00000166049; CTA
QGPPVNQL

SEQ ID NO: 58648 - protein, 9 aa, Homo sapiens
  misc_feature: Table A; Target 58648; HLA-C*14:02; PASD1; ENSG00000166049; CTA
QGQRGHTSM

SEQ ID NO: 58649 - protein, 10 aa, Homo sapiens
  misc_feature: Table A; Target 58649; HLA-A*01:01; PASD1; ENSG00000166049; CTA
QIDIAEVEQY

SEQ ID NO: 58650 - protein, 9 aa, Homo sapiens
  misc_feature: Table A; Target 58650; HLA-A*01:01; PASD1; ENSG00000166049; CTA
QLEERTWLL

SEQ ID NO: 58651 - protein, 9 aa, Homo sapiens
  misc_feature: Table A; Target 58651; HLA-A*02:01; PASD1; ENSG00000166049; CTA
QLEERTWLL

SEQ ID NO: 58652 - protein, 9 aa, Homo sapiens
  misc_feature: Table A; Target 58652; HLA-A*02:04; PASD1; ENSG00000166049; CTA
QLEERTWLL

SEQ ID NO: 58653 - protein, 9 aa, Homo sapiens
  misc_feature: Table A; Target 58653; HLA-A*02:07; PASD1; ENSG00000166049; CTA
QLEERTWLL

SEQ ID NO: 58654 - protein, 10 aa, Homo sapiens
  misc_feature: Table A; Target 58654; HLA-A*02:01; PASD1; ENSG00000166049; CTA
QLLDGFMITL

SEQ ID NO: 58655 - protein, 10 aa, Homo sapiens
  misc_feature: Table A; Target 58655; HLA-A*02:03; PASD1; ENSG00000166049; CTA
QLLDGFMITL

SEQ ID NO: 58656 - protein, 10 aa, Homo sapiens
  misc_feature: Table A; Target 58656; HLA-A*02:04; PASD1; ENSG00000166049; CTA
QLLDGFMITL

SEQ ID NO: 58657 - protein, 10 aa, Homo sapiens
  misc_feature: Table A; Target 58657; HLA-A*02:07; PASD1; ENSG00000166049; CTA
QLLDGFMITL

SEQ ID NO: 58658 - protein, 10 aa, Homo sapiens
  misc_feature: Table A; Target 58658; HLA-A*03:01; PASD1; ENSG00000166049; CTA
QLLDGFMITL

SEQ ID NO: 58659 - protein, 10 aa, Homo sapiens
  misc_feature: Table A; Target 58659; HLA-A*03:01; PASD1; ENSG00000166049; CTA
QLLQQLYTSK

SEQ ID NO: 58660 - protein, 10 aa, Homo sapiens
  misc_feature: Table A; Target 58660; HLA-A*03:02; PASD1; ENSG00000166049; CTA
QLLQQLYTSK

SEQ ID NO: 58661 - protein, 10 aa, Homo sapiens
  misc_feature: Table A; Target 58661; HLA-A*11:01; PASD1; ENSG00000166049; CTA
QLLQQLYTSK

SEQ ID NO: 58662 - protein, 10 aa, Homo sapiens
  misc_feature: Table A; Target 58662; HLA-B*27:02; PASD1; ENSG00000166049; CTA
QLLQQLYTSK

SEQ ID NO: 58663 - protein, 8 aa, Homo sapiens
  misc_feature: Table A; Target 58663; HLA-A*03:02; PASD1; ENSG00000166049; CTA
QLQEQPLK

SEQ ID NO: 58664 - protein, 9 aa, Homo sapiens
  misc_feature: Table A; Target 58664; HLA-A*01:01; PASD1; ENSG00000166049; CTA
QLQEQPLKH

SEQ ID NO: 58665 - protein, 9 aa, Homo sapiens
  misc_feature: Table A; Target 58665; HLA-A*03:01; PASD1; ENSG00000166049; CTA
QLQEQPLKH

SEQ ID NO: 58666 - protein, 9 aa, Homo sapiens
  misc_feature: Table A; Target 58666; HLA-A*03:02; PASD1; ENSG00000166049; CTA
QLQEQPLKH

SEQ ID NO: 58667 - protein, 9 aa, Homo sapiens
  misc_feature: Table A; Target 58667; HLA-C*16:02; PASD1; ENSG00000166049; CTA
QLQEQPLKH

SEQ ID NO: 58668 - protein, 9 aa, Homo sapiens
  misc_feature: Table A; Target 58668; HLA-A*02:03; PASD1; ENSG00000166049; CTA
QLREQLQQL

SEQ ID NO: 58669 - protein, 9 aa, Homo sapiens
  misc_feature: Table A; Target 58669; HLA-A*02:04; PASD1; ENSG00000166049; CTA
QLREQLQQL

SEQ ID NO: 58670 - protein, 9 aa, Homo sapiens
  misc_feature: Table A; Target 58670; HLA-B*07:02; PASD1; ENSG00000166049; CTA
QLREQLQQL

SEQ ID NO: 58671 - protein, 9 aa, Homo sapiens
  misc_feature: Table A; Target 58671; HLA-B*08:01; PASD1; ENSG00000166049; CTA
QLREQLQQL

SEQ ID NO: 58672 - protein, 9 aa, Homo sapiens
  misc_feature: Table A; Target 58672; HLA-B*38:01; PASD1; ENSG00000166049; CTA
QLVQQEQHL

SEQ ID NO: 58673 - protein, 10 aa, Homo sapiens
  misc_feature: Table A; Target 58673; HLA-A*03:02; PASD1; ENSG00000166049; CTA
QLVQQEQHLK

SEQ ID NO: 58674 - protein, 8 aa, Homo sapiens
  misc_feature: Table A; Target 58674; HLA-B*08:01; PASD1; ENSG00000166049; CTA
QLYTSKAV

SEQ ID NO: 58675 - protein, 10 aa, Homo sapiens
  misc_feature: Table A; Target 58675; HLA-C*07:02; PASD1; ENSG00000166049; CTA
QNPRDVSVPL

SEQ ID NO: 58676 - protein, 8 aa, Homo sapiens
  misc_feature: Table A; Target 58676; HLA-B*55:01; PASD1; ENSG00000166049; CTA
QPDQMRSA

SEQ ID NO: 58677 - protein, 8 aa, Homo sapiens
  misc_feature: Table A; Target 58677; HLA-B*56:01; PASD1; ENSG00000166049; CTA
QPDQMRSA

SEQ ID NO: 58678 - protein, 8 aa, Homo sapiens
  misc_feature: Table A; Target 58678; HLA-A*31:01; PASD1; ENSG00000166049; CTA
QPIVPVQR

SEQ ID NO: 58679 - protein, 8 aa, Homo sapiens
  misc_feature: Table A; Target 58679; HLA-A*33:01; PASD1; ENSG00000166049; CTA
QPIVPVQR

SEQ ID NO: 58680 - protein, 8 aa, Homo sapiens
  misc_feature: Table A; Target 58680; HLA-A*33:03; PASD1; ENSG00000166049; CTA
QPIVPVQR

SEQ ID NO: 58681 - protein, 8 aa, Homo sapiens
  misc_feature: Table A; Target 58681; HLA-A*68:01; PASD1; ENSG00000166049; CTA
QPIVPVQR

SEQ ID NO: 58682 - protein, 9 aa, Homo sapiens
  misc_feature: Table A; Target 58682; HLA-B*07:02; PASD1; ENSG00000166049; CTA
QPIVPVQRA

SEQ ID NO: 58683 - protein, 9 aa, Homo sapiens
  misc_feature: Table A; Target 58683; HLA-B*51:01; PASD1; ENSG00000166049; CTA
QPIVPVQRA

SEQ ID NO: 58684 - protein, 9 aa, Homo sapiens
  misc_feature: Table A; Target 58684; HLA-B*54:01; PASD1; ENSG00000166049; CTA
QPIVPVQRA

SEQ ID NO: 58685 - protein, 9 aa, Homo sapiens
  misc_feature: Table A; Target 58685; HLA-B*55:01; PASD1; ENSG00000166049; CTA
QPIVPVQRA

SEQ ID NO: 58686 - protein, 9 aa, Homo sapiens
  misc_feature: Table A; Target 58686; HLA-B*56:01; PASD1; ENSG00000166049; CTA
QPIVPVQRA

SEQ ID NO: 58687 - protein, 9 aa, Homo sapiens
  misc_feature: Table A; Target 58687; HLA-C*07:02; PASD1; ENSG00000166049; CTA
QPIVPVQRA

SEQ ID NO: 58688 - protein, 10 aa, Homo sapiens
  misc_feature: Table A; Target 58688; HLA-B*54:01; PASD1; ENSG00000166049; CTA
QPIVPVQRAA

SEQ ID NO: 58689 - protein, 10 aa, Homo sapiens
  misc_feature: Table A; Target 58689; HLA-B*56:01; PASD1; ENSG00000166049; CTA
QPIVPVQRAA

SEQ ID NO: 58690 - protein, 8 aa, Homo sapiens
  misc_feature: Table A; Target 58690; HLA-B*07:02; PASD1; ENSG00000166049; CTA
QPLKHNVI

SEQ ID NO: 58691 - protein, 8 aa, Homo sapiens
  misc_feature: Table A; Target 58691; HLA-B*08:01; PASD1; ENSG00000166049; CTA
QPLKHNVI

SEQ ID NO: 58692 - protein, 8 aa, Homo sapiens
  misc_feature: Table A; Target 58692; HLA-B*51:01; PASD1; ENSG00000166049; CTA
QPLKHNVI

SEQ ID NO: 58693 - protein, 9 aa, Homo sapiens
  misc_feature: Table A; Target 58693; HLA-B*07:02; PASD1; ENSG00000166049; CTA
QPLQPSSPV

SEQ ID NO: 58694 - protein, 9 aa, Homo sapiens
  misc_feature: Table A; Target 58694; HLA-B*51:01; PASD1; ENSG00000166049; CTA
QPLQPSSPV

SEQ ID NO: 58695 - protein, 9 aa, Homo sapiens
  misc_feature: Table A; Target 58695; HLA-B*54:01; PASD1; ENSG00000166049; CTA
QPLQPSSPV

SEQ ID NO: 58696 - protein, 9 aa, Homo sapiens
  misc_feature: Table A; Target 58696; HLA-B*56:01; PASD1; ENSG00000166049; CTA
QPLQPSSPV

SEQ ID NO: 58697 - protein, 9 aa, Homo sapiens
  misc_feature: Table A; Target 58697; HLA-C*07:02; PASD1; ENSG00000166049; CTA
QPLQPSSPV

SEQ ID NO: 58698 - protein, 10 aa, Homo sapiens
  misc_feature: Table A; Target 58698; HLA-B*54:01; PASD1; ENSG00000166049; CTA
QPLQPSSPVA

SEQ ID NO: 58699 - protein, 10 aa, Homo sapiens
  misc_feature: Table A; Target 58699; HLA-B*55:01; PASD1; ENSG00000166049; CTA
QPLQPSSPVA

SEQ ID NO: 58700 - protein, 10 aa, Homo sapiens
  misc_feature: Table A; Target 58700; HLA-B*56:01; PASD1; ENSG00000166049; CTA
QPLQPSSPVA

SEQ ID NO: 58701 - protein, 11 aa, Homo sapiens
  misc_feature: Table A; Target 58701; HLA-A*29:02; PASD1; ENSG00000166049; CTA
QPLQPSSPVAY

SEQ ID NO: 58702 - protein, 11 aa, Homo sapiens
  misc_feature: Table A; Target 58702; HLA-A*30:02; PASD1; ENSG00000166049; CTA
QPLQPSSPVAY

SEQ ID NO: 58703 - protein, 11 aa, Homo sapiens
  misc_feature: Table A; Target 58703; HLA-B*15:03; PASD1; ENSG00000166049; CTA
QPLQPSSPVAY

SEQ ID NO: 58704 - protein, 11 aa, Homo sapiens
  misc_feature: Table A; Target 58704; HLA-B*35:01; PASD1; ENSG00000166049; CTA
QPLQPSSPVAY

SEQ ID NO: 58705 - protein, 11 aa, Homo sapiens
  misc_feature: Table A; Target 58705; HLA-B*55:01; PASD1; ENSG00000166049; CTA
QPLQPSSPVAY

SEQ ID NO: 58706 - protein, 11 aa, Homo sapiens
  misc_feature: Table A; Target 58706; HLA-C*03:03; PASD1; ENSG00000166049; CTA
QPLQPSSPVAY

SEQ ID NO: 58707 - protein, 9 aa, Homo sapiens
  misc_feature: Table A; Target 58707; HLA-B*07:02; PASD1; ENSG00000166049; CTA
QPNTLRHVV

SEQ ID NO: 58708 - protein, 9 aa, Homo sapiens
  misc_feature: Table A; Target 58708; HLA-B*08:01; PASD1; ENSG00000166049; CTA
QPNTLRHVV

SEQ ID NO: 58709 - protein, 9 aa, Homo sapiens
  misc_feature: Table A; Target 58709; HLA-B*56:01; PASD1; ENSG00000166049; CTA
QPNTLRHVV

SEQ ID NO: 58710 - protein, 9 aa, Homo sapiens
  misc_feature: Table A; Target 58710; HLA-C*07:02; PASD1; ENSG00000166049; CTA
QPNTLRHVV

SEQ ID NO: 58711 - protein, 8 aa, Homo sapiens
  misc_feature: Table A; Target 58711; HLA-B*35:01; PASD1; ENSG00000166049; CTA
QPSSPVAY

SEQ ID NO: 58712 - protein, 9 aa, Homo sapiens
  misc_feature: Table A; Target 58712; HLA-B*07:02; PASD1; ENSG00000166049; CTA
QPTYHQVQV

SEQ ID NO: 58713 - protein, 9 aa, Homo sapiens
  misc_feature: Table A; Target 58713; HLA-B*35:03; PASD1; ENSG00000166049; CTA
QPTYHQVQV

SEQ ID NO: 58714 - protein, 9 aa, Homo sapiens
  misc_feature: Table A; Target 58714; HLA-B*51:01; PASD1; ENSG00000166049; CTA
QPTYHQVQV

SEQ ID NO: 58715 - protein, 9 aa, Homo sapiens
  misc_feature: Table A; Target 58715; HLA-B*54:01; PASD1; ENSG00000166049; CTA
QPTYHQVQV

SEQ ID NO: 58716 - protein, 9 aa, Homo sapiens
  misc_feature: Table A; Target 58716; HLA-B*55:01; PASD1; ENSG00000166049; CTA
QPTYHQVQV

SEQ ID NO: 58717 - protein, 9 aa, Homo sapiens
  misc_feature: Table A; Target 58717; HLA-B*56:01; PASD1; ENSG00000166049; CTA
QPTYHQVQV

SEQ ID NO: 58718 - protein, 9 aa, Homo sapiens
  misc_feature: Table A; Target 58718; HLA-C*16:02; PASD1; ENSG00000166049; CTA
QPTYHQVQV

SEQ ID NO: 58719 - protein, 9 aa, Homo sapiens
  misc_feature: Table A; Target 58719; HLA-B*38:01; PASD1; ENSG00000166049; CTA
QQDPENPVA

SEQ ID NO: 58720 - protein, 9 aa, Homo sapiens
  misc_feature: Table A; Target 58720; HLA-B*39:01; PASD1; ENSG00000166049; CTA
QQDPENPVA

SEQ ID NO: 58721 - protein, 10 aa, Homo sapiens
  misc_feature: Table A; Target 58721; HLA-B*39:01; PASD1; ENSG00000166049; CTA
QQDPENPVAP

SEQ ID NO: 58722 - protein, 11 aa, Homo sapiens
  misc_feature: Table A; Target 58722; HLA-B*27:05; PASD1; ENSG00000166049; CTA
QQDPENPVAPL

SEQ ID NO: 58723 - protein, 11 aa, Homo sapiens
  misc_feature: Table A; Target 58723; HLA-B*38:01; PASD1; ENSG00000166049; CTA
QQDPENPVAPL

SEQ ID NO: 58724 - protein, 11 aa, Homo sapiens
  misc_feature: Table A; Target 58724; HLA-B*39:01; PASD1; ENSG00000166049; CTA
QQDPENPVAPL

SEQ ID NO: 58725 - protein, 11 aa, Homo sapiens
  misc_feature: Table A; Target 58725; HLA-C*05:01; PASD1; ENSG00000166049; CTA
QQDPENPVAPL

SEQ ID NO: 58726 - protein, 9 aa, Homo sapiens
  misc_feature: Table A; Target 58726; HLA-B*15:01; PASD1; ENSG00000166049; CTA
QQEDESQSF

SEQ ID NO: 58727 - protein, 9 aa, Homo sapiens
  misc_feature: Table A; Target 58727; HLA-B*15:03; PASD1; ENSG00000166049; CTA
QQEDESQSF

SEQ ID NO: 58728 - protein, 9 aa, Homo sapiens
  misc_feature: Table A; Target 58728; HLA-B*38:01; PASD1; ENSG00000166049; CTA
QQEDESQSF

SEQ ID NO: 58729 - protein, 9 aa, Homo sapiens
  misc_feature: Table A; Target 58729; HLA-B*39:01; PASD1; ENSG00000166049; CTA
QQEDESQSF

SEQ ID NO: 58730 - protein, 9 aa, Homo sapiens
  misc_feature: Table A; Target 58730; HLA-C*05:01; PASD1; ENSG00000166049; CTA
QQEDESQSF

SEQ ID NO: 58731 - protein, 10 aa, Homo sapiens
  misc_feature: Table A; Target 58731; HLA-A*01:01; PASD1; ENSG00000166049; CTA
QQEDESQSFY

SEQ ID NO: 58732 - protein, 10 aa, Homo sapiens
  misc_feature: Table A; Target 58732; HLA-A*30:02; PASD1; ENSG00000166049; CTA
QQEDESQSFY

SEQ ID NO: 58733 - protein, 9 aa, Homo sapiens
  misc_feature: Table A; Target 58733; HLA-A*03:02; PASD1; ENSG00000166049; CTA
QQLQEQPLK

SEQ ID NO: 58734 - protein, 9 aa, Homo sapiens
  misc_feature: Table A; Target 58734; HLA-A*11:01; PASD1; ENSG00000166049; CTA
QQLQEQPLK

SEQ ID NO: 58735 - protein, 9 aa, Homo sapiens
  misc_feature: Table A; Target 58735; HLA-B*13:02; PASD1; ENSG00000166049; CTA
QQLYTSKAV

SEQ ID NO: 58736 - protein, 9 aa, Homo sapiens
  misc_feature: Table A; Target 58736; HLA-B*13:02; PASD1; ENSG00000166049; CTA
QQNALELMM

SEQ ID NO: 58737 - protein, 9 aa, Homo sapiens
  misc_feature: Table A; Target 58737; HLA-B*38:01; PASD1; ENSG00000166049; CTA
QQNALELMM

SEQ ID NO: 58738 - protein, 11 aa, Homo sapiens
  misc_feature: Table A; Target 58738; HLA-B*27:05; PASD1; ENSG00000166049; CTA
QQQLVQQEQHL

SEQ ID NO: 58739 - protein, 11 aa, Homo sapiens
  misc_feature: Table A; Target 58739; HLA-B*38:01; PASD1; ENSG00000166049; CTA
QQQLVQQEQHL

SEQ ID NO: 58740 - protein, 11 aa, Homo sapiens
  misc_feature: Table A; Target 58740; HLA-B*39:01; PASD1; ENSG00000166049; CTA
QRAAEQQPSGF

SEQ ID NO: 58741 - protein, 8 aa, Homo sapiens
  misc_feature: Table A; Target 58741; HLA-A*01:01; PASD1; ENSG00000166049; CTA
QSFYPEAY

SEQ ID NO: 58742 - protein, 8 aa, Homo sapiens
  misc_feature: Table A; Target 58742; HLA-A*30:02; PASD1; ENSG00000166049; CTA
QSFYPEAY

SEQ ID NO: 58743 - protein, 9 aa, Homo sapiens
  misc_feature: Table A; Target 58743; HLA-A*03:01; PASD1; ENSG00000166049; CTA
QSSEAVPKK

SEQ ID NO: 58744 - protein, 9 aa, Homo sapiens
  misc_feature: Table A; Target 58744; HLA-A*03:02; PASD1; ENSG00000166049; CTA
QSSEAVPKK

SEQ ID NO: 58745 - protein, 9 aa, Homo sapiens
  misc_feature: Table A; Target 58745; HLA-A*11:01; PASD1; ENSG00000166049; CTA
QSSEAVPKK

SEQ ID NO: 58746 - protein, 9 aa, Homo sapiens
  misc_feature: Table A; Target 58746; HLA-A*68:01; PASD1; ENSG00000166049; CTA
QSSEAVPKK

SEQ ID NO: 58747 - protein, 9 aa, Homo sapiens
  misc_feature: Table A; Target 58747; HLA-C*07:06; PASD1; ENSG00000166049; CTA
QSSEAVPKK

SEQ ID NO: 58748 - protein, 10 aa, Homo sapiens
  misc_feature: Table A; Target 58748; HLA-A*31:01; PASD1; ENSG00000166049; CTA
QTRLMPAEQR

SEQ ID NO: 58749 - protein, 10 aa, Homo sapiens
  misc_feature: Table A; Target 58749; HLA-A*33:03; PASD1; ENSG00000166049; CTA
QTRLMPAEQR

SEQ ID NO: 58750 - protein, 11 aa, Homo sapiens
  misc_feature: Table A; Target 58750; HLA-A*23:01; PASD1; ENSG00000166049; CTA
QYGPQENVHMF

SEQ ID NO: 58751 - protein, 11 aa, Homo sapiens
  misc_feature: Table A; Target 58751; HLA-A*24:02; PASD1; ENSG00000166049; CTA
QYGPQENVHMF

SEQ ID NO: 58752 - protein, 11 aa, Homo sapiens
  misc_feature: Table A; Target 58752; HLA-A*30:02; PASD1; ENSG00000166049; CTA
RAAEQQPSGFY

SEQ ID NO: 58753 - protein, 11 aa, Homo sapiens
  misc_feature: Table A; Target 58753; HLA-B*15:01; PASD1; ENSG00000166049; CTA
RAAEQQPSGFY

SEQ ID NO: 58754 - protein, 9 aa, Homo sapiens
  misc_feature: Table A; Target 58754; HLA-A*01:01; PASD1; ENSG00000166049; CTA
RADPVDLEF

SEQ ID NO: 58755 - protein, 9 aa, Homo sapiens
  misc_feature: Table A; Target 58755; HLA-A*02:07; PASD1; ENSG00000166049; CTA
RADPVDLEF

SEQ ID NO: 58756 - protein, 9 aa, Homo sapiens
  misc_feature: Table A; Target 58756; HLA-A*23:01; PASD1; ENSG00000166049; CTA
RADPVDLEF

SEQ ID NO: 58757 - protein, 9 aa, Homo sapiens
  misc_feature: Table A; Target 58757; HLA-A*32:01; PASD1; ENSG00000166049; CTA
RADPVDLEF

SEQ ID NO: 58758 - protein, 9 aa, Homo sapiens
  misc_feature: Table A; Target 58758; HLA-B*35:01; PASD1; ENSG00000166049; CTA
RADPVDLEF

SEQ ID NO: 58759 - protein, 9 aa, Homo sapiens
  misc_feature: Table A; Target 58759; HLA-B*35:03; PASD1; ENSG00000166049; CTA
RADPVDLEF

SEQ ID NO: 58760 - protein, 9 aa, Homo sapiens
  misc_feature: Table A; Target 58760; HLA-B*38:01; PASD1; ENSG00000166049; CTA
RADPVDLEF

SEQ ID NO: 58761 - protein, 9 aa, Homo sapiens
  misc_feature: Table A; Target 58761; HLA-B*55:01; PASD1; ENSG00000166049; CTA
RADPVDLEF

SEQ ID NO: 58762 - protein, 9 aa, Homo sapiens
  misc_feature: Table A; Target 58762; HLA-B*57:01; PASD1; ENSG00000166049; CTA
RADPVDLEF

SEQ ID NO: 58763 - protein, 9 aa, Homo sapiens
  misc_feature: Table A; Target 58763; HLA-B*58:01; PASD1; ENSG00000166049; CTA
RADPVDLEF

SEQ ID NO: 58764 - protein, 9 aa, Homo sapiens
  misc_feature: Table A; Target 58764; HLA-C*02:02; PASD1; ENSG00000166049; CTA
RADPVDLEF

SEQ ID NO: 58765 - protein, 9 aa, Homo sapiens
  misc_feature: Table A; Target 58765; HLA-C*03:03; PASD1; ENSG00000166049; CTA
RADPVDLEF

SEQ ID NO: 58766 - protein, 9 aa, Homo sapiens
  misc_feature: Table A; Target 58766; HLA-C*03:04; PASD1; ENSG00000166049; CTA
RADPVDLEF

SEQ ID NO: 58767 - protein, 9 aa, Homo sapiens
  misc_feature: Table A; Target 58767; HLA-C*05:01; PASD1; ENSG00000166049; CTA
RADPVDLEF

SEQ ID NO: 58768 - protein, 9 aa, Homo sapiens
  misc_feature: Table A; Target 58768; HLA-C*16:02; PASD1; ENSG00000166049; CTA
RADPVDLEF

SEQ ID NO: 58769 - protein, 10 aa, Homo sapiens
  misc_feature: Table A; Target 58769; HLA-A*01:01; PASD1; ENSG00000166049; CTA
RGEPEVNPLY

SEQ ID NO: 58770 - protein, 10 aa, Homo sapiens
  misc_feature: Table A; Target 58770; HLA-A*30:02; PASD1; ENSG00000166049; CTA
RGEPEVNPLY

SEQ ID NO: 58771 - protein, 10 aa, Homo sapiens
  misc_feature: Table A; Target 58771; HLA-B*57:01; PASD1; ENSG00000166049; CTA
RGEPEVNPLY

SEQ ID NO: 58772 - protein, 10 aa, Homo sapiens
  misc_feature: Table A; Target 58772; HLA-B*58:01; PASD1; ENSG00000166049; CTA
RGEPEVNPLY

SEQ ID NO: 58773 - protein, 11 aa, Homo sapiens
  misc_feature: Table A; Target 58773; HLA-A*31:01; PASD1; ENSG00000166049; CTA
RGEPEVNPLYR

SEQ ID NO: 58774 - protein, 10 aa, Homo sapiens
  misc_feature: Table A; Target 58774; HLA-A*30:02; PASD1; ENSG00000166049; CTA
RGHTSMKAVY

SEQ ID NO: 58775 - protein, 9 aa, Homo sapiens
  misc_feature: Table A; Target 58775; HLA-B*57:01; PASD1; ENSG00000166049; CTA
RSAEQTRLM

SEQ ID NO: 58776 - protein, 9 aa, Homo sapiens
  misc_feature: Table A; Target 58776; HLA-B*58:01; PASD1; ENSG00000166049; CTA
RSAEQTRLM

SEQ ID NO: 58777 - protein, 9 aa, Homo sapiens
  misc_feature: Table A; Target 58777; HLA-C*16:01; PASD1; ENSG00000166049; CTA
RSAEQTRLM

SEQ ID NO: 58778 - protein, 9 aa, Homo sapiens
  misc_feature: Table A; Target 58778; HLA-C*16:02; PASD1; ENSG00000166049; CTA
RSAEQTRLM

SEQ ID NO: 58779 - protein, 9 aa, Homo sapiens
  misc_feature: Table A; Target 58779; HLA-A*01:01; PASD1; ENSG00000166049; CTA
RTQLLQQLY

SEQ ID NO: 58780 - protein, 9 aa, Homo sapiens
  misc_feature: Table A; Target 58780; HLA-A*29:02; PASD1; ENSG00000166049; CTA
RTQLLQQLY

SEQ ID NO: 58781 - protein, 9 aa, Homo sapiens
  misc_feature: Table A; Target 58781; HLA-A*30:02; PASD1; ENSG00000166049; CTA
RTQLLQQLY

SEQ ID NO: 58782 - protein, 9 aa, Homo sapiens
  misc_feature: Table A; Target 58782; HLA-A*32:01; PASD1; ENSG00000166049; CTA
RTQLLQQLY

SEQ ID NO: 58783 - protein, 9 aa, Homo sapiens
  misc_feature: Table A; Target 58783; HLA-B*15:01; PASD1; ENSG00000166049; CTA
RTQLLQQLY

SEQ ID NO: 58784 - protein, 9 aa, Homo sapiens
  misc_feature: Table A; Target 58784; HLA-B*57:01; PASD1; ENSG00000166049; CTA
RTQLLQQLY

SEQ ID NO: 58785 - protein, 9 aa, Homo sapiens
  misc_feature: Table A; Target 58785; HLA-B*58:01; PASD1; ENSG00000166049; CTA
RTQLLQQLY

SEQ ID NO: 58786 - protein, 8 aa, Homo sapiens
  misc_feature: Table A; Target 58786; HLA-C*16:01; PASD1; ENSG00000166049; CTA
SAEQTRLM

SEQ ID NO: 58787 - protein, 8 aa, Homo sapiens
  misc_feature: Table A; Target 58787; HLA-B*08:01; PASD1; ENSG00000166049; CTA
SAYENVKF

SEQ ID NO: 58788 - protein, 8 aa, Homo sapiens
  misc_feature: Table A; Target 58788; HLA-B*37:01; PASD1; ENSG00000166049; CTA
SAYENVKF

SEQ ID NO: 58789 - protein, 8 aa, Homo sapiens
  misc_feature: Table A; Target 58789; HLA-B*46:01; PASD1; ENSG00000166049; CTA
SAYENVKF

SEQ ID NO: 58790 - protein, 8 aa, Homo sapiens
  misc_feature: Table A; Target 58790; HLA-B*58:01; PASD1; ENSG00000166049; CTA
SAYENVKF

SEQ ID NO: 58791 - protein, 8 aa, Homo sapiens
  misc_feature: Table A; Target 58791; HLA-C*02:02; PASD1; ENSG00000166049; CTA
SAYENVKF

SEQ ID NO: 58792 - protein, 8 aa, Homo sapiens
  misc_feature: Table A; Target 58792; HLA-C*05:01; PASD1; ENSG00000166049; CTA
SAYENVKF

SEQ ID NO: 58793 - protein, 8 aa, Homo sapiens
  misc_feature: Table A; Target 58793; HLA-C*12:03; PASD1; ENSG00000166049; CTA
SAYENVKF

SEQ ID NO: 58794 - protein, 8 aa, Homo sapiens
  misc_feature: Table A; Target 58794; HLA-C*16:01; PASD1; ENSG00000166049; CTA
SAYENVKF

SEQ ID NO: 58795 - protein, 9 aa, Homo sapiens
  misc_feature: Table A; Target 58795; HLA-A*02:01; PASD1; ENSG00000166049; CTA
SAYENVKFI

SEQ ID NO: 58796 - protein, 9 aa, Homo sapiens
  misc_feature: Table A; Target 58796; HLA-A*02:03; PASD1; ENSG00000166049; CTA
SAYENVKFI

SEQ ID NO: 58797 - protein, 9 aa, Homo sapiens
  misc_feature: Table A; Target 58797; HLA-A*68:02; PASD1; ENSG00000166049; CTA
SAYENVKFI

SEQ ID NO: 58798 - protein, 9 aa, Homo sapiens
  misc_feature: Table A; Target 58798; HLA-B*13:02; PASD1; ENSG00000166049; CTA
SAYENVKFI

SEQ ID NO: 58799 - protein, 9 aa, Homo sapiens
  misc_feature: Table A; Target 58799; HLA-B*49:01; PASD1; ENSG00000166049; CTA
SAYENVKFI

SEQ ID NO: 58800 - protein, 9 aa, Homo sapiens
  misc_feature: Table A; Target 58800; HLA-B*51:01; PASD1; ENSG00000166049; CTA
SAYENVKFI

SEQ ID NO: 58801 - protein, 9 aa, Homo sapiens
  misc_feature: Table A; Target 58801; HLA-C*02:02; PASD1; ENSG00000166049; CTA
SAYENVKFI

SEQ ID NO: 58802 - protein, 9 aa, Homo sapiens
  misc_feature: Table A; Target 58802; HLA-C*12:03; PASD1; ENSG00000166049; CTA
SAYENVKFI

SEQ ID NO: 58803 - protein, 9 aa, Homo sapiens
  misc_feature: Table A; Target 58803; HLA-C*16:02; PASD1; ENSG00000166049; CTA
SAYENVKFI

SEQ ID NO: 58804 - protein, 9 aa, Homo sapiens
  misc_feature: Table A; Target 58804; HLA-C*16:04; PASD1; ENSG00000166049; CTA
SAYENVKFI

SEQ ID NO: 58805 - protein, 8 aa, Homo sapiens
  misc_feature: Table A; Target 58805; HLA-C*05:01; PASD1; ENSG00000166049; CTA
SCDEQGTL

SEQ ID NO: 58806 - protein, 8 aa, Homo sapiens
  misc_feature: Table A; Target 58806; HLA-B*37:01; PASD1; ENSG00000166049; CTA
SDSLGPVV

SEQ ID NO: 58807 - protein, 8 aa, Homo sapiens
  misc_feature: Table A; Target 58807; HLA-B*40:02; PASD1; ENSG00000166049; CTA
SDSLGPVV

SEQ ID NO: 58808 - protein, 10 aa, Homo sapiens
  misc_feature: Table A; Target 58808; HLA-B*37:01; PASD1; ENSG00000166049; CTA
SDSLGPVVQV

SEQ ID NO: 58809 - protein, 8 aa, Homo sapiens
  misc_feature: Table A; Target 58809; HLA-B*37:01; PASD1; ENSG00000166049; CTA
SDSTISTL

SEQ ID NO: 58810 - protein, 9 aa, Homo sapiens
  misc_feature: Table A; Target 58810; HLA-A*30:01; PASD1; ENSG00000166049; CTA
SEAISSSSI

SEQ ID NO: 58811 - protein, 9 aa, Homo sapiens
  misc_feature: Table A; Target 58811; HLA-B*13:02; PASD1; ENSG00000166049; CTA
SEAISSSSI

SEQ ID NO: 58812 - protein, 9 aa, Homo sapiens
  misc_feature: Table A; Target 58812; HLA-B*37:01; PASD1; ENSG00000166049; CTA
SEAISSSSI

SEQ ID NO: 58813 - protein, 9 aa, Homo sapiens
  misc_feature: Table A; Target 58813; HLA-B*40:01; PASD1; ENSG00000166049; CTA
SEAISSSSI

SEQ ID NO: 58814 - protein, 9 aa, Homo sapiens
  misc_feature: Table A; Target 58814; HLA-B*40:02; PASD1; ENSG00000166049; CTA
SEAISSSSI

SEQ ID NO: 58815 - protein, 9 aa, Homo sapiens
  misc_feature: Table A; Target 58815; HLA-B*44:02; PASD1; ENSG00000166049; CTA
SEAISSSSI

SEQ ID NO: 58816 - protein, 9 aa, Homo sapiens
  misc_feature: Table A; Target 58816; HLA-B*44:03; PASD1; ENSG00000166049; CTA
SEAISSSSI

SEQ ID NO: 58817 - protein, 9 aa, Homo sapiens
  misc_feature: Table A; Target 58817; HLA-B*49:01; PASD1; ENSG00000166049; CTA
SEAISSSSI

SEQ ID NO: 58818 - protein, 9 aa, Homo sapiens
  misc_feature: Table A; Target 58818; HLA-C*16:04; PASD1; ENSG00000166049; CTA
SEAISSSSI

SEQ ID NO: 58819 - protein, 9 aa, Homo sapiens
  misc_feature: Table A; Target 58819; HLA-B*44:03; PASD1; ENSG00000166049; CTA
SEAVPKKQQ

SEQ ID NO: 58820 - protein, 8 aa, Homo sapiens
  misc_feature: Table A; Target 58820; HLA-A*02:03; PASD1; ENSG00000166049; CTA
SLGPVVQV

SEQ ID NO: 58821 - protein, 8 aa, Homo sapiens
  misc_feature: Table A; Target 58821; HLA-A*02:04; PASD1; ENSG00000166049; CTA
SLGPVVQV

SEQ ID NO: 58822 - protein, 8 aa, Homo sapiens
  misc_feature: Table A; Target 58822; HLA-A*02:07; PASD1; ENSG00000166049; CTA
SLGPVVQV

SEQ ID NO: 58823 - protein, 8 aa, Homo sapiens
  misc_feature: Table A; Target 58823; HLA-B*13:02; PASD1; ENSG00000166049; CTA
SLGPVVQV

SEQ ID NO: 58824 - protein, 8 aa, Homo sapiens
  misc_feature: Table A; Target 58824; HLA-B*37:01; PASD1; ENSG00000166049; CTA
SLGPVVQV

SEQ ID NO: 58825 - protein, 8 aa, Homo sapiens
  misc_feature: Table A; Target 58825; HLA-B*55:01; PASD1; ENSG00000166049; CTA
SLGPVVQV

SEQ ID NO: 58826 - protein, 8 aa, Homo sapiens
  misc_feature: Table A; Target 58826; HLA-C*06:02; PASD1; ENSG00000166049; CTA
SLGPVVQV

SEQ ID NO: 58827 - protein, 8 aa, Homo sapiens
  misc_feature: Table A; Target 58827; HLA-C*16:02; PASD1; ENSG00000166049; CTA
SLGPVVQV

SEQ ID NO: 58828 - protein, 9 aa, Homo sapiens
  misc_feature: Table A; Target 58828; HLA-A*32:01; PASD1; ENSG00000166049; CTA
SLGPVVQVN

SEQ ID NO: 58829 - protein, 9 aa, Homo sapiens
  misc_feature: Table A; Target 58829; HLA-C*06:02; PASD1; ENSG00000166049; CTA
SLGPVVQVN

SEQ ID NO: 58830 - protein, 9 aa, Homo sapiens
  misc_feature: Table A; Target 58830; HLA-C*07:04; PASD1; ENSG00000166049; CTA
SLGPVVQVN

SEQ ID NO: 58831 - protein, 9 aa, Homo sapiens
  misc_feature: Table A; Target 58831; HLA-C*12:03; PASD1; ENSG00000166049; CTA
SLGPVVQVN

SEQ ID NO: 58832 - protein, 11 aa, Homo sapiens
  misc_feature: Table A; Target 58832; HLA-A*25:01; PASD1; ENSG00000166049; CTA
SLGPVVQVNTW

SEQ ID NO: 58833 - protein, 11 aa, Homo sapiens
  misc_feature: Table A; Target 58833; HLA-A*32:01; PASD1; ENSG00000166049; CTA
SLGPVVQVNTW

SEQ ID NO: 58834 - protein, 11 aa, Homo sapiens
  misc_feature: Table A; Target 58834; HLA-B*44:02; PASD1; ENSG00000166049; CTA
SLGPVVQVNTW

SEQ ID NO: 58835 - protein, 11 aa, Homo sapiens
  misc_feature: Table A; Target 58835; HLA-B*44:03; PASD1; ENSG00000166049; CTA
SLGPVVQVNTW

SEQ ID NO: 58836 - protein, 11 aa, Homo sapiens
  misc_feature: Table A; Target 58836; HLA-B*57:01; PASD1; ENSG00000166049; CTA
SLGPVVQVNTW

SEQ ID NO: 58837 - protein, 11 aa, Homo sapiens
  misc_feature: Table A; Target 58837; HLA-B*58:01; PASD1; ENSG00000166049; CTA
SLGPVVQVNTW

SEQ ID NO: 58838 - protein, 8 aa, Homo sapiens
  misc_feature: Table A; Target 58838; HLA-B*08:01; PASD1; ENSG00000166049; CTA
SLKNTGEL

SEQ ID NO: 58839 - protein, 10 aa, Homo sapiens
  misc_feature: Table A; Target 58839; HLA-A*02:01; PASD1; ENSG00000166049; CTA
SLLGHLPAEI

SEQ ID NO: 58840 - protein, 10 aa, Homo sapiens
  misc_feature: Table A; Target 58840; HLA-A*02:03; PASD1; ENSG00000166049; CTA
SLLGHLPAEI

SEQ ID NO: 58841 - protein, 10 aa, Homo sapiens
  misc_feature: Table A; Target 58841; HLA-A*02:04; PASD1; ENSG00000166049; CTA
SLLGHLPAEI

SEQ ID NO: 58842 - protein, 9 aa, Homo sapiens
  misc_feature: Table A; Target 58842; HLA-B*07:02; PASD1; ENSG00000166049; CTA
SPALSLQDF

SEQ ID NO: 58843 - protein, 9 aa, Homo sapiens
  misc_feature: Table A; Target 58843; HLA-B*35:01; PASD1; ENSG00000166049; CTA
SPALSLQDF

SEQ ID NO: 58844 - protein, 9 aa, Homo sapiens
  misc_feature: Table A; Target 58844; HLA-C*07:02; PASD1; ENSG00000166049; CTA
SPALSLQDF

SEQ ID NO: 58845 - protein, 9 aa, Homo sapiens
  misc_feature: Table A; Target 58845; HLA-A*30:02; PASD1; ENSG00000166049; CTA
SQSFYPEAY

SEQ ID NO: 58846 - protein, 9 aa, Homo sapiens
  misc_feature: Table A; Target 58846; HLA-B*15:01; PASD1; ENSG00000166049; CTA
SQSFYPEAY

SEQ ID NO: 58847 - protein, 9 aa, Homo sapiens
  misc_feature: Table A; Target 58847; HLA-B*15:03; PASD1; ENSG00000166049; CTA
SQSFYPEAY

SEQ ID NO: 58848 - protein, 9 aa, Homo sapiens
  misc_feature: Table A; Target 58848; HLA-B*18:01; PASD1; ENSG00000166049; CTA
SQSFYPEAY

SEQ ID NO: 58849 - protein, 9 aa, Homo sapiens
  misc_feature: Table A; Target 58849; HLA-B*27:02; PASD1; ENSG00000166049; CTA
SQSFYPEAY

SEQ ID NO: 58850 - protein, 9 aa, Homo sapiens
  misc_feature: Table A; Target 58850; HLA-B*27:05; PASD1; ENSG00000166049; CTA
SQSFYPEAY

SEQ ID NO: 58851 - protein, 9 aa, Homo sapiens
  misc_feature: Table A; Target 58851; HLA-C*02:02; PASD1; ENSG00000166049; CTA
SQSFYPEAY

SEQ ID NO: 58852 - protein, 9 aa, Homo sapiens
  misc_feature: Table A; Target 58852; HLA-C*04:01; PASD1; ENSG00000166049; CTA
SQSFYPEAY

SEQ ID NO: 58853 - protein, 9 aa, Homo sapiens
  misc_feature: Table A; Target 58853; HLA-C*07:04; PASD1; ENSG00000166049; CTA
SQSFYPEAY

SEQ ID NO: 58854 - protein, 9 aa, Homo sapiens
  misc_feature: Table A; Target 58854; HLA-C*16:04; PASD1; ENSG00000166049; CTA
SQSFYPEAY

SEQ ID NO: 58855 - protein, 9 aa, Homo sapiens
  misc_feature: Table A; Target 58855; HLA-B*58:01; PASD1; ENSG00000166049; CTA
SSAYENVKF

SEQ ID NO: 58856 - protein, 8 aa, Homo sapiens
  misc_feature: Table A; Target 58856; HLA-A*11:01; PASD1; ENSG00000166049; CTA
SSEAVPKK

SEQ ID NO: 58857 - protein, 9 aa, Homo sapiens
  misc_feature: Table A; Target 58857; HLA-A*01:01; PASD1; ENSG00000166049; CTA
STDGVIICV

SEQ ID NO: 58858 - protein, 9 aa, Homo sapiens
  misc_feature: Table A; Target 58858; HLA-A*02:01; PASD1; ENSG00000166049; CTA
STDGVIICV

SEQ ID NO: 58859 - protein, 9 aa, Homo sapiens
  misc_feature: Table A; Target 58859; HLA-A*02:04; PASD1; ENSG00000166049; CTA
STDGVIICV

SEQ ID NO: 58860 - protein, 9 aa, Homo sapiens
  misc_feature: Table A; Target 58860; HLA-A*02:07; PASD1; ENSG00000166049; CTA
STDGVIICV

SEQ ID NO: 58861 - protein, 9 aa, Homo sapiens
  misc_feature: Table A; Target 58861; HLA-A*03:01; PASD1; ENSG00000166049; CTA
STDGVIICV

SEQ ID NO: 58862 - protein, 9 aa, Homo sapiens
  misc_feature: Table A; Target 58862; HLA-A*11:01; PASD1; ENSG00000166049; CTA
STDGVIICV

SEQ ID NO: 58863 - protein, 9 aa, Homo sapiens
  misc_feature: Table A; Target 58863; HLA-A*30:01; PASD1; ENSG00000166049; CTA
STDGVIICV

SEQ ID NO: 58864 - protein, 9 aa, Homo sapiens
  misc_feature: Table A; Target 58864; HLA-A*68:01; PASD1; ENSG00000166049; CTA
STDGVIICV

SEQ ID NO: 58865 - protein, 9 aa, Homo sapiens
  misc_feature: Table A; Target 58865; HLA-A*68:02; PASD1; ENSG00000166049; CTA
STDGVIICV

SEQ ID NO: 58866 - protein, 9 aa, Homo sapiens
  misc_feature: Table A; Target 58866; HLA-B*13:02; PASD1; ENSG00000166049; CTA
STDGVIICV

SEQ ID NO: 58867 - protein, 9 aa, Homo sapiens
  misc_feature: Table A; Target 58867; HLA-B*35:01; PASD1; ENSG00000166049; CTA
STDGVIICV

SEQ ID NO: 58868 - protein, 9 aa, Homo sapiens
  misc_feature: Table A; Target 58868; HLA-B*35:03; PASD1; ENSG00000166049; CTA
STDGVIICV

SEQ ID NO: 58869 - protein, 9 aa, Homo sapiens
  misc_feature: Table A; Target 58869; HLA-B*38:01; PASD1; ENSG00000166049; CTA
STDGVIICV

SEQ ID NO: 58870 - protein, 9 aa, Homo sapiens
  misc_feature: Table A; Target 58870; HLA-B*55:01; PASD1; ENSG00000166049; CTA
STDGVIICV

SEQ ID NO: 58871 - protein, 9 aa, Homo sapiens
  misc_feature: Table A; Target 58871; HLA-C*02:02; PASD1; ENSG00000166049; CTA
STDGVIICV

SEQ ID NO: 58872 - protein, 9 aa, Homo sapiens
  misc_feature: Table A; Target 58872; HLA-C*04:01; PASD1; ENSG00000166049; CTA
STDGVIICV

SEQ ID NO: 58873 - protein, 9 aa, Homo sapiens
  misc_feature: Table A; Target 58873; HLA-C*05:01; PASD1; ENSG00000166049; CTA
STDGVIICV

SEQ ID NO: 58874 - protein, 9 aa, Homo sapiens
  misc_feature: Table A; Target 58874; HLA-C*07:04; PASD1; ENSG00000166049; CTA
STDGVIICV

SEQ ID NO: 58875 - protein, 9 aa, Homo sapiens
  misc_feature: Table A; Target 58875; HLA-C*07:06; PASD1; ENSG00000166049; CTA
STDGVIICV

SEQ ID NO: 58876 - protein, 9 aa, Homo sapiens
  misc_feature: Table A; Target 58876; HLA-A*01:01; PASD1; ENSG00000166049; CTA
STLETPQDY

SEQ ID NO: 58877 - protein, 9 aa, Homo sapiens
  misc_feature: Table A; Target 58877; HLA-A*29:02; PASD1; ENSG00000166049; CTA
STLETPQDY

SEQ ID NO: 58878 - protein, 9 aa, Homo sapiens
  misc_feature: Table A; Target 58878; HLA-A*30:02; PASD1; ENSG00000166049; CTA
STLETPQDY

SEQ ID NO: 58879 - protein, 9 aa, Homo sapiens
  misc_feature: Table A; Target 58879; HLA-A*25:01; PASD1; ENSG00000166049; CTA
STYCSSTVF

SEQ ID NO: 58880 - protein, 9 aa, Homo sapiens
  misc_feature: Table A; Target 58880; HLA-A*26:01; PASD1; ENSG00000166049; CTA
STYCSSTVF

SEQ ID NO: 58881 - protein, 9 aa, Homo sapiens
  misc_feature: Table A; Target 58881; HLA-B*15:01; PASD1; ENSG00000166049; CTA
STYCSSTVF

SEQ ID NO: 58882 - protein, 9 aa, Homo sapiens
  misc_feature: Table A; Target 58882; HLA-B*15:03; PASD1; ENSG00000166049; CTA
STYCSSTVF

SEQ ID NO: 58883 - protein, 9 aa, Homo sapiens
  misc_feature: Table A; Target 58883; HLA-B*46:01; PASD1; ENSG00000166049; CTA
STYCSSTVF

SEQ ID NO: 58884 - protein, 9 aa, Homo sapiens
  misc_feature: Table A; Target 58884; HLA-C*07:04; PASD1; ENSG00000166049; CTA
STYCSSTVF

SEQ ID NO: 58885 - protein, 8 aa, Homo sapiens
  misc_feature: Table A; Target 58885; HLA-C*05:01; PASD1; ENSG00000166049; CTA
SVDQEGPM

SEQ ID NO: 58886 - protein, 8 aa, Homo sapiens
  misc_feature: Table A; Target 58886; HLA-C*05:01; PASD1; ENSG00000166049; CTA
SVDQVDSV

SEQ ID NO: 58887 - protein, 8 aa, Homo sapiens
  misc_feature: Table A; Target 58887; HLA-A*30:01; PASD1; ENSG00000166049; CTA
TDGVIICV

SEQ ID NO: 58888 - protein, 9 aa, Homo sapiens
  misc_feature: Table A; Target 58888; HLA-C*05:01; PASD1; ENSG00000166049; CTA
TLETPQDYI

SEQ ID NO: 58889 - protein, 8 aa, Homo sapiens
  misc_feature: Table A; Target 58889; HLA-A*30:02; PASD1; ENSG00000166049; CTA
TLHGQPTY

SEQ ID NO: 58890 - protein, 8 aa, Homo sapiens
  misc_feature: Table A; Target 58890; HLA-B*15:03; PASD1; ENSG00000166049; CTA
TLHGQPTY

SEQ ID NO: 58891 - protein, 8 aa, Homo sapiens
  misc_feature: Table A; Target 58891; HLA-B*39:01; PASD1; ENSG00000166049; CTA
TLHGQPTY

SEQ ID NO: 58892 - protein, 9 aa, Homo sapiens
  misc_feature: Table A; Target 58892; HLA-B*38:01; PASD1; ENSG00000166049; CTA
TLSTDGVII

SEQ ID NO: 58893 - protein, 11 aa, Homo sapiens
  misc_feature: Table A; Target 58893; HLA-A*02:01; PASD1; ENSG00000166049; CTA
TLSTDGVIICV

SEQ ID NO: 58894 - protein, 8 aa, Homo sapiens
  misc_feature: Table A; Target 58894; HLA-A*02:07; PASD1; ENSG00000166049; CTA
TMPESPAL

SEQ ID NO: 58895 - protein, 8 aa, Homo sapiens
  misc_feature: Table A; Target 58895; HLA-B*08:01; PASD1; ENSG00000166049; CTA
TMPESPAL

SEQ ID NO: 58896 - protein, 8 aa, Homo sapiens
  misc_feature: Table A; Target 58896; HLA-B*37:01; PASD1; ENSG00000166049; CTA
TMPESPAL

SEQ ID NO: 58897 - protein, 8 aa, Homo sapiens
  misc_feature: Table A; Target 58897; HLA-C*01:02; PASD1; ENSG00000166049; CTA
TMPESPAL

SEQ ID NO: 58898 - protein, 10 aa, Homo sapiens
  misc_feature: Table A; Target 58898; HLA-A*02:07; PASD1; ENSG00000166049; CTA
TMPESPALSL

SEQ ID NO: 58899 - protein, 10 aa, Homo sapiens
  misc_feature: Table A; Target 58899; HLA-C*01:02; PASD1; ENSG00000166049; CTA
TMPESPALSL

SEQ ID NO: 58900 - protein, 9 aa, Homo sapiens
  misc_feature: Table A; Target 58900; HLA-B*44:02; PASD1; ENSG00000166049; CTA
TPQDYIRLW

SEQ ID NO: 58901 - protein, 9 aa, Homo sapiens
  misc_feature: Table A; Target 58901; HLA-B*57:01; PASD1; ENSG00000166049; CTA
TPQDYIRLW

SEQ ID NO: 58902 - protein, 9 aa, Homo sapiens
  misc_feature: Table A; Target 58902; HLA-B*38:01; PASD1; ENSG00000166049; CTA
TQDSDEEPF

SEQ ID NO: 58903 - protein, 9 aa, Homo sapiens
  misc_feature: Table A; Target 58903; HLA-C*05:01; PASD1; ENSG00000166049; CTA
TQDSDEEPF

SEQ ID NO: 58904 - protein, 8 aa, Homo sapiens
  misc_feature: Table A; Target 58904; HLA-B*15:01; PASD1; ENSG00000166049; CTA
TQLLQQLY

SEQ ID NO: 58905 - protein, 8 aa, Homo sapiens
  misc_feature: Table A; Target 58905; HLA-B*15:03; PASD1; ENSG00000166049; CTA
TQLLQQLY

SEQ ID NO: 58906 - protein, 8 aa, Homo sapiens
  misc_feature: Table A; Target 58906; HLA-B*39:01; PASD1; ENSG00000166049; CTA
TQLLQQLY

SEQ ID NO: 58907 - protein, 9 aa, Homo sapiens
  misc_feature: Table A; Target 58907; HLA-B*13:02; PASD1; ENSG00000166049; CTA
TQLLQQLYT

SEQ ID NO: 58908 - protein, 11 aa, Homo sapiens
  misc_feature: Table A; Target 58908; HLA-A*11:01; PASD1; ENSG00000166049; CTA
TQLLQQLYTSK

SEQ ID NO: 58909 - protein, 11 aa, Homo sapiens
  misc_feature: Table A; Target 58909; HLA-B*27:02; PASD1; ENSG00000166049; CTA
TQLLQQLYTSK

SEQ ID NO: 58910 - protein, 9 aa, Homo sapiens
  misc_feature: Table A; Target 58910; HLA-B*27:02; PASD1; ENSG00000166049; CTA
TRLMPAEQR

SEQ ID NO: 58911 - protein, 9 aa, Homo sapiens
  misc_feature: Table A; Target 58911; HLA-B*27:05; PASD1; ENSG00000166049; CTA
TRLMPAEQR

SEQ ID NO: 58912 - protein, 9 aa, Homo sapiens
  misc_feature: Table A; Target 58912; HLA-C*05:01; PASD1; ENSG00000166049; CTA
TSDSTISTL

SEQ ID NO: 58913 - protein, 8 aa, Homo sapiens
  misc_feature: Table A; Target 58913; HLA-C*14:02; PASD1; ENSG00000166049; CTA
TYCSSTVF

SEQ ID NO: 58914 - protein, 9 aa, Homo sapiens
  misc_feature: Table A; Target 58914; HLA-A*23:01; PASD1; ENSG00000166049; CTA
TYCSSTVFL

SEQ ID NO: 58915 - protein, 9 aa, Homo sapiens
  misc_feature: Table A; Target 58915; HLA-A*24:02; PASD1; ENSG00000166049; CTA
TYCSSTVFL

SEQ ID NO: 58916 - protein, 10 aa, Homo sapiens
  misc_feature: Table A; Target 58916; HLA-A*23:01; PASD1; ENSG00000166049; CTA
TYDYFNQVTL

SEQ ID NO: 58917 - protein, 10 aa, Homo sapiens
  misc_feature: Table A; Target 58917; HLA-A*24:02; PASD1; ENSG00000166049; CTA
TYDYFNQVTL

SEQ ID NO: 58918 - protein, 10 aa, Homo sapiens
  misc_feature: Table A; Target 58918; HLA-B*35:03; PASD1; ENSG00000166049; CTA
TYDYFNQVTL

SEQ ID NO: 58919 - protein, 8 aa, Homo sapiens
  misc_feature: Table A; Target 58919; HLA-C*03:04; PASD1; ENSG00000166049; CTA
VAENISSL

SEQ ID NO: 58920 - protein, 8 aa, Homo sapiens
  misc_feature: Table A; Target 58920; HLA-C*05:01; PASD1; ENSG00000166049; CTA
VAENISSL

SEQ ID NO: 58921 - protein, 9 aa, Homo sapiens
  misc_feature: Table A; Target 58921; HLA-A*23:01; PASD1; ENSG00000166049; CTA
VAENISSLL

SEQ ID NO: 58922 - protein, 9 aa, Homo sapiens
  misc_feature: Table A; Target 58922; HLA-B*38:01; PASD1; ENSG00000166049; CTA
VAENISSLL

SEQ ID NO: 58923 - protein, 9 aa, Homo sapiens
  misc_feature: Table A; Target 58923; HLA-C*03:03; PASD1; ENSG00000166049; CTA
VAENISSLL

SEQ ID NO: 58924 - protein, 9 aa, Homo sapiens
  misc_feature: Table A; Target 58924; HLA-C*03:04; PASD1; ENSG00000166049; CTA
VAENISSLL

SEQ ID NO: 58925 - protein, 9 aa, Homo sapiens
  misc_feature: Table A; Target 58925; HLA-C*05:01; PASD1; ENSG00000166049; CTA
VAENISSLL

SEQ ID NO: 58926 - protein, 8 aa, Homo sapiens
  misc_feature: Table A; Target 58926; HLA-B*58:01; PASD1; ENSG00000166049; CTA
VAFNQQQL

SEQ ID NO: 58927 - protein, 8 aa, Homo sapiens
  misc_feature: Table A; Target 58927; HLA-C*03:03; PASD1; ENSG00000166049; CTA
VAFNQQQL

SEQ ID NO: 58928 - protein, 8 aa, Homo sapiens
  misc_feature: Table A; Target 58928; HLA-C*03:04; PASD1; ENSG00000166049; CTA
VAFNQQQL

SEQ ID NO: 58929 - protein, 8 aa, Homo sapiens
  misc_feature: Table A; Target 58929; HLA-C*16:01; PASD1; ENSG00000166049; CTA
VAFNQQQL

SEQ ID NO: 58930 - protein, 9 aa, Homo sapiens
  misc_feature: Table A; Target 58930; HLA-B*13:02; PASD1; ENSG00000166049; CTA
VAFNQQQLV

SEQ ID NO: 58931 - protein, 9 aa, Homo sapiens
  misc_feature: Table A; Target 58931; HLA-B*51:01; PASD1; ENSG00000166049; CTA
VAFNQQQLV

SEQ ID NO: 58932 - protein, 9 aa, Homo sapiens
  misc_feature: Table A; Target 58932; HLA-C*02:02; PASD1; ENSG00000166049; CTA
VAFNQQQLV

SEQ ID NO: 58933 - protein, 9 aa, Homo sapiens
  misc_feature: Table A; Target 58933; HLA-C*12:03; PASD1; ENSG00000166049; CTA
VAFNQQQLV

SEQ ID NO: 58934 - protein, 9 aa, Homo sapiens
  misc_feature: Table A; Target 58934; HLA-C*16:02; PASD1; ENSG00000166049; CTA
VAFNQQQLV

SEQ ID NO: 58935 - protein, 9 aa, Homo sapiens
  misc_feature: Table A; Target 58935; HLA-C*16:04; PASD1; ENSG00000166049; CTA
VAFNQQQLV

SEQ ID NO: 58936 - protein, 9 aa, Homo sapiens
  misc_feature: Table A; Target 58936; HLA-C*01:02; PASD1; ENSG00000166049; CTA
VAPLDQAGL

SEQ ID NO: 58937 - protein, 9 aa, Homo sapiens
  misc_feature: Table A; Target 58937; HLA-C*12:03; PASD1; ENSG00000166049; CTA
VAYDIISQE

SEQ ID NO: 58938 - protein, 10 aa, Homo sapiens
  misc_feature: Table A; Target 58938; HLA-A*23:01; PASD1; ENSG00000166049; CTA
VAYDIISQEL

SEQ ID NO: 58939 - protein, 10 aa, Homo sapiens
  misc_feature: Table A; Target 58939; HLA-A*25:01; PASD1; ENSG00000166049; CTA
VAYDIISQEL

SEQ ID NO: 58940 - protein, 10 aa, Homo sapiens
  misc_feature: Table A; Target 58940; HLA-A*30:01; PASD1; ENSG00000166049; CTA
VAYDIISQEL

SEQ ID NO: 58941 - protein, 10 aa, Homo sapiens
  misc_feature: Table A; Target 58941; HLA-B*35:03; PASD1; ENSG00000166049; CTA
VAYDIISQEL

SEQ ID NO: 58942 - protein, 10 aa, Homo sapiens
  misc_feature: Table A; Target 58942; HLA-C*02:02; PASD1; ENSG00000166049; CTA
VAYDIISQEL

SEQ ID NO: 58943 - protein, 10 aa, Homo sapiens
  misc_feature: Table A; Target 58943; HLA-C*03:03; PASD1; ENSG00000166049; CTA
VAYDIISQEL

SEQ ID NO: 58944 - protein, 10 aa, Homo sapiens
  misc_feature: Table A; Target 58944; HLA-C*03:04; PASD1; ENSG00000166049; CTA
VAYDIISQEL

SEQ ID NO: 58945 - protein, 10 aa, Homo sapiens
  misc_feature: Table A; Target 58945; HLA-C*12:03; PASD1; ENSG00000166049; CTA
VAYDIISQEL

SEQ ID NO: 58946 - protein, 10 aa, Homo sapiens
  misc_feature: Table A; Target 58946; HLA-C*16:04; PASD1; ENSG00000166049; CTA
VAYDIISQEL

SEQ ID NO: 58947 - protein, 9 aa, Homo sapiens
  misc_feature: Table A; Target 58947; HLA-A*24:02; PASD1; ENSG00000166049; CTA
VCILRTQLL

SEQ ID NO: 58948 - protein, 9 aa, Homo sapiens
  misc_feature: Table A; Target 58948; HLA-B*08:01; PASD1; ENSG00000166049; CTA
VCILRTQLL

SEQ ID NO: 58949 - protein, 9 aa, Homo sapiens
  misc_feature: Table A; Target 58949; HLA-A*30:01; PASD1; ENSG00000166049; CTA
VEGPPDPQA

SEQ ID NO: 58950 - protein, 9 aa, Homo sapiens
  misc_feature: Table A; Target 58950; HLA-B*18:01; PASD1; ENSG00000166049; CTA
VEGPPDPQA

SEQ ID NO: 58951 - protein, 9 aa, Homo sapiens
  misc_feature: Table A; Target 58951; HLA-B*40:01; PASD1; ENSG00000166049; CTA
VEGPPDPQA

SEQ ID NO: 58952 - protein, 9 aa, Homo sapiens
  misc_feature: Table A; Target 58952; HLA-B*40:02; PASD1; ENSG00000166049; CTA
VEGPPDPQA

SEQ ID NO: 58953 - protein, 9 aa, Homo sapiens
  misc_feature: Table A; Target 58953; HLA-B*49:01; PASD1; ENSG00000166049; CTA
VEGPPDPQA

SEQ ID NO: 58954 - protein, 10 aa, Homo sapiens
  misc_feature: Table A; Target 58954; HLA-A*23:01; PASD1; ENSG00000166049; CTA
VEGPPDPQAF

SEQ ID NO: 58955 - protein, 10 aa, Homo sapiens
  misc_feature: Table A; Target 58955; HLA-A*24:02; PASD1; ENSG00000166049; CTA
VEGPPDPQAF

SEQ ID NO: 58956 - protein, 10 aa, Homo sapiens
  misc_feature: Table A; Target 58956; HLA-A*30:01; PASD1; ENSG00000166049; CTA
VEGPPDPQAF

SEQ ID NO: 58957 - protein, 10 aa, Homo sapiens
  misc_feature: Table A; Target 58957; HLA-A*32:01; PASD1; ENSG00000166049; CTA
VEGPPDPQAF

SEQ ID NO: 58958 - protein, 10 aa, Homo sapiens
  misc_feature: Table A; Target 58958; HLA-B*18:01; PASD1; ENSG00000166049; CTA
VEGPPDPQAF

SEQ ID NO: 58959 - protein, 10 aa, Homo sapiens
  misc_feature: Table A; Target 58959; HLA-B*27:02; PASD1; ENSG00000166049; CTA
VEGPPDPQAF

SEQ ID NO: 58960 - protein, 10 aa, Homo sapiens
  misc_feature: Table A; Target 58960; HLA-B*27:05; PASD1; ENSG00000166049; CTA
VEGPPDPQAF

SEQ ID NO: 58961 - protein, 10 aa, Homo sapiens
  misc_feature: Table A; Target 58961; HLA-B*37:01; PASD1; ENSG00000166049; CTA
VEGPPDPQAF

SEQ ID NO: 58962 - protein, 10 aa, Homo sapiens
  misc_feature: Table A; Target 58962; HLA-B*38:01; PASD1; ENSG00000166049; CTA
VEGPPDPQAF

SEQ ID NO: 58963 - protein, 10 aa, Homo sapiens
  misc_feature: Table A; Target 58963; HLA-B*39:01; PASD1; ENSG00000166049; CTA
VEGPPDPQAF

SEQ ID NO: 58964 - protein, 10 aa, Homo sapiens
  misc_feature: Table A; Target 58964; HLA-B*40:01; PASD1; ENSG00000166049; CTA
VEGPPDPQAF

SEQ ID NO: 58965 - protein, 10 aa, Homo sapiens
  misc_feature: Table A; Target 58965; HLA-B*40:02; PASD1; ENSG00000166049; CTA
VEGPPDPQAF

SEQ ID NO: 58966 - protein, 10 aa, Homo sapiens
  misc_feature: Table A; Target 58966; HLA-B*44:02; PASD1; ENSG00000166049; CTA
VEGPPDPQAF

SEQ ID NO: 58967 - protein, 10 aa, Homo sapiens
  misc_feature: Table A; Target 58967; HLA-B*44:03; PASD1; ENSG00000166049; CTA
VEGPPDPQAF

SEQ ID NO: 58968 - protein, 10 aa, Homo sapiens
  misc_feature: Table A; Target 58968; HLA-B*49:01; PASD1; ENSG00000166049; CTA
VEGPPDPQAF

SEQ ID NO: 58969 - protein, 10 aa, Homo sapiens
  misc_feature: Table A; Target 58969; HLA-C*02:02; PASD1; ENSG00000166049; CTA
VEGPPDPQAF

SEQ ID NO: 58970 - protein, 10 aa, Homo sapiens
  misc_feature: Table A; Target 58970; HLA-C*16:04; PASD1; ENSG00000166049; CTA
VEGPPDPQAF

SEQ ID NO: 58971 - protein, 9 aa, Homo sapiens
  misc_feature: Table A; Target 58971; HLA-A*30:02; PASD1; ENSG00000166049; CTA
VEHGDSSAY

SEQ ID NO: 58972 - protein, 9 aa, Homo sapiens
  misc_feature: Table A; Target 58972; HLA-A*32:01; PASD1; ENSG00000166049; CTA
VEHGDSSAY

SEQ ID NO: 58973 - protein, 9 aa, Homo sapiens
  misc_feature: Table A; Target 58973; HLA-B*15:01; PASD1; ENSG00000166049; CTA
VEHGDSSAY

SEQ ID NO: 58974 - protein, 9 aa, Homo sapiens
  misc_feature: Table A; Target 58974; HLA-B*15:03; PASD1; ENSG00000166049; CTA
VEHGDSSAY

SEQ ID NO: 58975 - protein, 9 aa, Homo sapiens
  misc_feature: Table A; Target 58975; HLA-B*18:01; PASD1; ENSG00000166049; CTA
VEHGDSSAY

SEQ ID NO: 58976 - protein, 9 aa, Homo sapiens
  misc_feature: Table A; Target 58976; HLA-B*37:01; PASD1; ENSG00000166049; CTA
VEHGDSSAY

SEQ ID NO: 58977 - protein, 9 aa, Homo sapiens
  misc_feature: Table A; Target 58977; HLA-B*40:01; PASD1; ENSG00000166049; CTA
VEHGDSSAY

SEQ ID NO: 58978 - protein, 9 aa, Homo sapiens
  misc_feature: Table A; Target 58978; HLA-B*44:02; PASD1; ENSG00000166049; CTA
VEHGDSSAY

SEQ ID NO: 58979 - protein, 9 aa, Homo sapiens
  misc_feature: Table A; Target 58979; HLA-B*44:03; PASD1; ENSG00000166049; CTA
VEHGDSSAY

SEQ ID NO: 58980 - protein, 9 aa, Homo sapiens
  misc_feature: Table A; Target 58980; HLA-B*46:01; PASD1; ENSG00000166049; CTA
VEHGDSSAY

SEQ ID NO: 58981 - protein, 9 aa, Homo sapiens
  misc_feature: Table A; Target 58981; HLA-C*14:02; PASD1; ENSG00000166049; CTA
VEHGDSSAY

SEQ ID NO: 58982 - protein, 9 aa, Homo sapiens
  misc_feature: Table A; Target 58982; HLA-C*16:04; PASD1; ENSG00000166049; CTA
VEHGDSSAY

SEQ ID NO: 58983 - protein, 9 aa, Homo sapiens
  misc_feature: Table A; Target 58983; HLA-C*01:02; PASD1; ENSG00000166049; CTA
VEPAAAAAA

SEQ ID NO: 58984 - protein, 10 aa, Homo sapiens
  misc_feature: Table A; Target 58984; HLA-B*49:01; PASD1; ENSG00000166049; CTA
VEQYGPQENV

SEQ ID NO: 58985 - protein, 8 aa, Homo sapiens
  misc_feature: Table A; Target 58985; HLA-B*08:01; PASD1; ENSG00000166049; CTA
VGNERVQI

SEQ ID NO: 58986 - protein, 8 aa, Homo sapiens
  misc_feature: Table A; Target 58986; HLA-C*16:01; PASD1; ENSG00000166049; CTA
VGNERVQI

SEQ ID NO: 58987 - protein, 9 aa, Homo sapiens
  misc_feature: Table A; Target 58987; HLA-C*12:03; PASD1; ENSG00000166049; CTA
VGNERVQIC

SEQ ID NO: 58988 - protein, 9 aa, Homo sapiens
  misc_feature: Table A; Target 58988; HLA-B*13:02; PASD1; ENSG00000166049; CTA
VIICVAENI

SEQ ID NO: 58989 - protein, 10 aa, Homo sapiens
  misc_feature: Table A; Target 58989; HLA-C*01:02; PASD1; ENSG00000166049; CTA
VIPDLQSSEA

SEQ ID NO: 58990 - protein, 11 aa, Homo sapiens
  misc_feature: Table A; Target 58990; HLA-A*02:07; PASD1; ENSG00000166049; CTA
VIPDLQSSEAV

SEQ ID NO: 58991 - protein, 11 aa, Homo sapiens
  misc_feature: Table A; Target 58991; HLA-C*01:02; PASD1; ENSG00000166049; CTA
VIPDLQSSEAV

SEQ ID NO: 58992 - protein, 8 aa, Homo sapiens
  misc_feature: Table A; Target 58992; HLA-C*03:03; PASD1; ENSG00000166049; CTA
VPQEDRLY

SEQ ID NO: 58993 - protein, 9 aa, Homo sapiens
  misc_feature: Table A; Target 58993; HLA-A*23:01; PASD1; ENSG00000166049; CTA
VPQEDRLYL

SEQ ID NO: 58994 - protein, 9 aa, Homo sapiens
  misc_feature: Table A; Target 58994; HLA-B*07:02; PASD1; ENSG00000166049; CTA
VPQEDRLYL

SEQ ID NO: 58995 - protein, 9 aa, Homo sapiens
  misc_feature: Table A; Target 58995; HLA-B*08:01; PASD1; ENSG00000166049; CTA
VPQEDRLYL

SEQ ID NO: 58996 - protein, 9 aa, Homo sapiens
  misc_feature: Table A; Target 58996; HLA-B*35:01; PASD1; ENSG00000166049; CTA
VPQEDRLYL

SEQ ID NO: 58997 - protein, 9 aa, Homo sapiens
  misc_feature: Table A; Target 58997; HLA-B*35:03; PASD1; ENSG00000166049; CTA
VPQEDRLYL

SEQ ID NO: 58998 - protein, 9 aa, Homo sapiens
  misc_feature: Table A; Target 58998; HLA-B*51:01; PASD1; ENSG00000166049; CTA
VPQEDRLYL

SEQ ID NO: 58999 - protein, 9 aa, Homo sapiens
  misc_feature: Table A; Target 58999; HLA-B*55:01; PASD1; ENSG00000166049; CTA
VPQEDRLYL

SEQ ID NO: 59000 - protein, 9 aa, Homo sapiens
  misc_feature: Table A; Target 59000; HLA-B*56:01; PASD1; ENSG00000166049; CTA
VPQEDRLYL

SEQ ID NO: 59001 - protein, 9 aa, Homo sapiens
  misc_feature: Table A; Target 59001; HLA-C*03:03; PASD1; ENSG00000166049; CTA
VPQEDRLYL

SEQ ID NO: 59002 - protein, 9 aa, Homo sapiens
  misc_feature: Table A; Target 59002; HLA-C*07:02; PASD1; ENSG00000166049; CTA
VPQEDRLYL

SEQ ID NO: 59003 - protein, 9 aa, Homo sapiens
  misc_feature: Table A; Target 59003; HLA-C*16:01; PASD1; ENSG00000166049; CTA
VPQEDRLYL

SEQ ID NO: 59004 - protein, 10 aa, Homo sapiens
  misc_feature: Table A; Target 59004; HLA-B*55:01; PASD1; ENSG00000166049; CTA
VPQEDRLYLV

SEQ ID NO: 59005 - protein, 10 aa, Homo sapiens
  misc_feature: Table A; Target 59005; HLA-B*56:01; PASD1; ENSG00000166049; CTA
VPQEDRLYLV

SEQ ID NO: 59006 - protein, 8 aa, Homo sapiens
  misc_feature: Table A; Target 59006; HLA-B*13:02; PASD1; ENSG00000166049; CTA
VQVSEVGV

SEQ ID NO: 59007 - protein, 8 aa, Homo sapiens
  misc_feature: Table A; Target 59007; HLA-C*05:01; PASD1; ENSG00000166049; CTA
VSDEAVLT

SEQ ID NO: 59008 - protein, 9 aa, Homo sapiens
  misc_feature: Table A; Target 59008; HLA-B*57:01; PASD1; ENSG00000166049; CTA
VTLQLLDGF

SEQ ID NO: 59009 - protein, 9 aa, Homo sapiens
  misc_feature: Table A; Target 59009; HLA-A*23:01; PASD1; ENSG00000166049; CTA
VYQKIILKF

SEQ ID NO: 59010 - protein, 9 aa, Homo sapiens
  misc_feature: Table A; Target 59010; HLA-A*29:02; PASD1; ENSG00000166049; CTA
VYQKIILKF

SEQ ID NO: 59011 - protein, 8 aa, Homo sapiens
  misc_feature: Table A; Target 59011; HLA-B*39:01; PASD1; ENSG00000166049; CTA
VYVEPAAA

SEQ ID NO: 59012 - protein, 8 aa, Homo sapiens
  misc_feature: Table A; Target 59012; HLA-C*14:02; PASD1; ENSG00000166049; CTA
VYVEPAAA

SEQ ID NO: 59013 - protein, 9 aa, Homo sapiens
  misc_feature: Table A; Target 59013; HLA-A*23:01; PASD1; ENSG00000166049; CTA
VYVEPAAAA

SEQ ID NO: 59014 - protein, 9 aa, Homo sapiens
  misc_feature: Table A; Target 59014; HLA-A*24:02; PASD1; ENSG00000166049; CTA
VYVEPAAAA

SEQ ID NO: 59015 - protein, 9 aa, Homo sapiens
  misc_feature: Table A; Target 59015; HLA-B*39:01; PASD1; ENSG00000166049; CTA
VYVEPAAAA

SEQ ID NO: 59016 - protein, 9 aa, Homo sapiens
  misc_feature: Table A; Target 59016; HLA-B*46:01; PASD1; ENSG00000166049; CTA
VYVEPAAAA

SEQ ID NO: 59017 - protein, 9 aa, Homo sapiens
  misc_feature: Table A; Target 59017; HLA-B*54:01; PASD1; ENSG00000166049; CTA
VYVEPAAAA

SEQ ID NO: 59018 - protein, 9 aa, Homo sapiens
  misc_feature: Table A; Target 59018; HLA-B*56:01; PASD1; ENSG00000166049; CTA
VYVEPAAAA

SEQ ID NO: 59019 - protein, 9 aa, Homo sapiens
  misc_feature: Table A; Target 59019; HLA-C*01:02; PASD1; ENSG00000166049; CTA
VYVEPAAAA

SEQ ID NO: 59020 - protein, 9 aa, Homo sapiens
  misc_feature: Table A; Target 59020; HLA-C*03:03; PASD1; ENSG00000166049; CTA
VYVEPAAAA

SEQ ID NO: 59021 - protein, 9 aa, Homo sapiens
  misc_feature: Table A; Target 59021; HLA-C*03:04; PASD1; ENSG00000166049; CTA
VYVEPAAAA

SEQ ID NO: 59022 - protein, 9 aa, Homo sapiens
  misc_feature: Table A; Target 59022; HLA-C*14:02; PASD1; ENSG00000166049; CTA
VYVEPAAAA

SEQ ID NO: 59023 - protein, 10 aa, Homo sapiens
  misc_feature: Table A; Target 59023; HLA-C*14:02; PASD1; ENSG00000166049; CTA
VYVEPAAAAA

SEQ ID NO: 59024 - protein, 11 aa, Homo sapiens
  misc_feature: Table A; Target 59024; HLA-C*14:02; PASD1; ENSG00000166049; CTA
VYVEPAAAAAA

SEQ ID NO: 59025 - protein, 10 aa, Homo sapiens
  misc_feature: Table A; Target 59025; HLA-A*29:02; PASD1; ENSG00000166049; CTA
WIPSFPTYDY

SEQ ID NO: 59026 - protein, 8 aa, Homo sapiens
  misc_feature: Table A; Target 59026; HLA-A*30:01; PASD1; ENSG00000166049; CTA
YDIISQEL

SEQ ID NO: 59027 - protein, 8 aa, Homo sapiens
  misc_feature: Table A; Target 59027; HLA-B*13:02; PASD1; ENSG00000166049; CTA
YDIISQEL

SEQ ID NO: 59028 - protein, 8 aa, Homo sapiens
  misc_feature: Table A; Target 59028; HLA-B*18:01; PASD1; ENSG00000166049; CTA
YDIISQEL

SEQ ID NO: 59029 - protein, 8 aa, Homo sapiens
  misc_feature: Table A; Target 59029; HLA-B*37:01; PASD1; ENSG00000166049; CTA
YDIISQEL

SEQ ID NO: 59030 - protein, 8 aa, Homo sapiens
  misc_feature: Table A; Target 59030; HLA-B*38:01; PASD1; ENSG00000166049; CTA
YDIISQEL

SEQ ID NO: 59031 - protein, 8 aa, Homo sapiens
  misc_feature: Table A; Target 59031; HLA-B*40:01; PASD1; ENSG00000166049; CTA
YDIISQEL

SEQ ID NO: 59032 - protein, 8 aa, Homo sapiens
  misc_feature: Table A; Target 59032; HLA-B*40:02; PASD1; ENSG00000166049; CTA
YDIISQEL

SEQ ID NO: 59033 - protein, 8 aa, Homo sapiens
  misc_feature: Table A; Target 59033; HLA-B*49:01; PASD1; ENSG00000166049; CTA
YDIISQEL

SEQ ID NO: 59034 - protein, 8 aa, Homo sapiens
  misc_feature: Table A; Target 59034; HLA-C*03:03; PASD1; ENSG00000166049; CTA
YDIISQEL

SEQ ID NO: 59035 - protein, 8 aa, Homo sapiens
  misc_feature: Table A; Target 59035; HLA-C*03:04; PASD1; ENSG00000166049; CTA
YDIISQEL

SEQ ID NO: 59036 - protein, 8 aa, Homo sapiens
  misc_feature: Table A; Target 59036; HLA-C*07:04; PASD1; ENSG00000166049; CTA
YDIISQEL

SEQ ID NO: 59037 - protein, 8 aa, Homo sapiens
  misc_feature: Table A; Target 59037; HLA-C*12:03; PASD1; ENSG00000166049; CTA
YDIISQEL

SEQ ID NO: 59038 - protein, 8 aa, Homo sapiens
  misc_feature: Table A; Target 59038; HLA-C*16:02; PASD1; ENSG00000166049; CTA
YDIISQEL

SEQ ID NO: 59039 - protein, 9 aa, Homo sapiens
  misc_feature: Table A; Target 59039; HLA-A*30:01; PASD1; ENSG00000166049; CTA
YDYFNQVTL

SEQ ID NO: 59040 - protein, 9 aa, Homo sapiens
  misc_feature: Table A; Target 59040; HLA-B*37:01; PASD1; ENSG00000166049; CTA
YDYFNQVTL

SEQ ID NO: 59041 - protein, 9 aa, Homo sapiens
  misc_feature: Table A; Target 59041; HLA-B*40:01; PASD1; ENSG00000166049; CTA
YDYFNQVTL

SEQ ID NO: 59042 - protein, 9 aa, Homo sapiens
  misc_feature: Table A; Target 59042; HLA-B*40:02; PASD1; ENSG00000166049; CTA
YDYFNQVTL

SEQ ID NO: 59043 - protein, 8 aa, Homo sapiens
  misc_feature: Table A; Target 59043; HLA-B*37:01; PASD1; ENSG00000166049; CTA
YENVKFIV

SEQ ID NO: 59044 - protein, 8 aa, Homo sapiens
  misc_feature: Table A; Target 59044; HLA-B*49:01; PASD1; ENSG00000166049; CTA
YENVKFIV

SEQ ID NO: 59045 - protein, 10 aa, Homo sapiens
  misc_feature: Table A; Target 59045; HLA-B*49:01; PASD1; ENSG00000166049; CTA
YENVKFIVNV

SEQ ID NO: 59046 - protein, 9 aa, Homo sapiens
  misc_feature: Table A; Target 59046; HLA-A*23:01; PASD1; ENSG00000166049; CTA
YFNQVTLQL

SEQ ID NO: 59047 - protein, 9 aa, Homo sapiens
  misc_feature: Table A; Target 59047; HLA-A*24:02; PASD1; ENSG00000166049; CTA
YFNQVTLQL

SEQ ID NO: 59048 - protein, 9 aa, Homo sapiens
  misc_feature: Table A; Target 59048; HLA-A*29:02; PASD1; ENSG00000166049; CTA
YFNQVTLQL

SEQ ID NO: 59049 - protein, 9 aa, Homo sapiens
  misc_feature: Table A; Target 59049; HLA-C*14:02; PASD1; ENSG00000166049; CTA
YFNQVTLQL

SEQ ID NO: 59050 - protein, 9 aa, Homo sapiens
  misc_feature: Table A; Target 59050; HLA-B*38:01; PASD1; ENSG00000166049; CTA
YHQVQVSEV

SEQ ID NO: 59051 - protein, 9 aa, Homo sapiens
  misc_feature: Table A; Target 59051; HLA-B*39:01; PASD1; ENSG00000166049; CTA
YHQVQVSEV

SEQ ID NO: 59052 - protein, 9 aa, Homo sapiens
  misc_feature: Table A; Target 59052; HLA-A*02:01; PASD1; ENSG00000166049; CTA
YLVGNVCIL

SEQ ID NO: 59053 - protein, 9 aa, Homo sapiens
  misc_feature: Table A; Target 59053; HLA-A*02:03; PASD1; ENSG00000166049; CTA
YLVGNVCIL

SEQ ID NO: 59054 - protein, 9 aa, Homo sapiens
  misc_feature: Table A; Target 59054; HLA-A*02:04; PASD1; ENSG00000166049; CTA
YLVGNVCIL

SEQ ID NO: 59055 - protein, 9 aa, Homo sapiens
  misc_feature: Table A; Target 59055; HLA-C*07:04; PASD1; ENSG00000166049; CTA
YLVGNVCIL

SEQ ID NO: 59056 - protein, 10 aa, Homo sapiens
  misc_feature: Table A; Target 59056; HLA-B*51:01; PASD1; ENSG00000166049; CTA
YPEAYQGPPV

SEQ ID NO: 59057 - protein, 10 aa, Homo sapiens
  misc_feature: Table A; Target 59057; HLA-B*54:01; PASD1; ENSG00000166049; CTA
YPEAYQGPPV

SEQ ID NO: 59058 - protein, 9 aa, Homo sapiens
  misc_feature: Table A; Target 59058; HLA-A*02:01; PASD1; ENSG00000166049; CTA
YQGPPVNQL

SEQ ID NO: 59059 - protein, 9 aa, Homo sapiens
  misc_feature: Table A; Target 59059; HLA-A*02:03; PASD1; ENSG00000166049; CTA
YQGPPVNQL

SEQ ID NO: 59060 - protein, 9 aa, Homo sapiens
  misc_feature: Table A; Target 59060; HLA-A*02:04; PASD1; ENSG00000166049; CTA
YQGPPVNQL

SEQ ID NO: 59061 - protein, 9 aa, Homo sapiens
  misc_feature: Table A; Target 59061; HLA-A*23:01; PASD1; ENSG00000166049; CTA
YQGPPVNQL

SEQ ID NO: 59062 - protein, 9 aa, Homo sapiens
  misc_feature: Table A; Target 59062; HLA-A*24:02; PASD1; ENSG00000166049; CTA
YQGPPVNQL

SEQ ID NO: 59063 - protein, 9 aa, Homo sapiens
  misc_feature: Table A; Target 59063; HLA-A*30:01; PASD1; ENSG00000166049; CTA
YQGPPVNQL

SEQ ID NO: 59064 - protein, 9 aa, Homo sapiens
  misc_feature: Table A; Target 59064; HLA-A*32:01; PASD1; ENSG00000166049; CTA
YQGPPVNQL

SEQ ID NO: 59065 - protein, 9 aa, Homo sapiens
  misc_feature: Table A; Target 59065; HLA-B*13:02; PASD1; ENSG00000166049; CTA
YQGPPVNQL

SEQ ID NO: 59066 - protein, 9 aa, Homo sapiens
  misc_feature: Table A; Target 59066; HLA-B*15:01; PASD1; ENSG00000166049; CTA
YQGPPVNQL

SEQ ID NO: 59067 - protein, 9 aa, Homo sapiens
  misc_feature: Table A; Target 59067; HLA-B*15:03; PASD1; ENSG00000166049; CTA
YQGPPVNQL

SEQ ID NO: 59068 - protein, 9 aa, Homo sapiens
  misc_feature: Table A; Target 59068; HLA-B*27:05; PASD1; ENSG00000166049; CTA
YQGPPVNQL

SEQ ID NO: 59069 - protein, 9 aa, Homo sapiens
  misc_feature: Table A; Target 59069; HLA-B*37:01; PASD1; ENSG00000166049; CTA
YQGPPVNQL

SEQ ID NO: 59070 - protein, 9 aa, Homo sapiens
  misc_feature: Table A; Target 59070; HLA-B*38:01; PASD1; ENSG00000166049; CTA
YQGPPVNQL

SEQ ID NO: 59071 - protein, 9 aa, Homo sapiens
  misc_feature: Table A; Target 59071; HLA-B*39:01; PASD1; ENSG00000166049; CTA
YQGPPVNQL

SEQ ID NO: 59072 - protein, 9 aa, Homo sapiens
  misc_feature: Table A; Target 59072; HLA-B*40:01; PASD1; ENSG00000166049; CTA
YQGPPVNQL

SEQ ID NO: 59073 - protein, 9 aa, Homo sapiens
  misc_feature: Table A; Target 59073; HLA-B*40:02; PASD1; ENSG00000166049; CTA
YQGPPVNQL

SEQ ID NO: 59074 - protein, 9 aa, Homo sapiens
  misc_feature: Table A; Target 59074; HLA-B*58:01; PASD1; ENSG00000166049; CTA
YQGPPVNQL

SEQ ID NO: 59075 - protein, 9 aa, Homo sapiens
  misc_feature: Table A; Target 59075; HLA-C*02:02; PASD1; ENSG00000166049; CTA
YQGPPVNQL

SEQ ID NO: 59076 - protein, 9 aa, Homo sapiens
  misc_feature: Table A; Target 59076; HLA-C*03:03; PASD1; ENSG00000166049; CTA
YQGPPVNQL

SEQ ID NO: 59077 - protein, 9 aa, Homo sapiens
  misc_feature: Table A; Target 59077; HLA-C*03:04; PASD1; ENSG00000166049; CTA
YQGPPVNQL

SEQ ID NO: 59078 - protein, 9 aa, Homo sapiens
  misc_feature: Table A; Target 59078; HLA-C*05:01; PASD1; ENSG00000166049; CTA
YQGPPVNQL

SEQ ID NO: 59079 - protein, 9 aa, Homo sapiens
  misc_feature: Table A; Target 59079; HLA-C*07:04; PASD1; ENSG00000166049; CTA
YQGPPVNQL

SEQ ID NO: 59080 - protein, 9 aa, Homo sapiens
  misc_feature: Table A; Target 59080; HLA-C*12:03; PASD1; ENSG00000166049; CTA
YQGPPVNQL

SEQ ID NO: 59081 - protein, 9 aa, Homo sapiens
  misc_feature: Table A; Target 59081; HLA-C*14:02; PASD1; ENSG00000166049; CTA
YQGPPVNQL

SEQ ID NO: 59082 - protein, 9 aa, Homo sapiens
  misc_feature: Table A; Target 59082; HLA-C*16:02; PASD1; ENSG00000166049; CTA
YQGPPVNQL

SEQ ID NO: 59083 - protein, 9 aa, Homo sapiens
  misc_feature: Table A; Target 59083; HLA-C*16:04; PASD1; ENSG00000166049; CTA
YQGPPVNQL

SEQ ID NO: 59084 - protein, 8 aa, Homo sapiens
  misc_feature: Table A; Target 59084; HLA-B*08:01; PASD1; ENSG00000166049; CTA
YQKIILKF

SEQ ID NO: 59085 - protein, 10 aa, Homo sapiens
  misc_feature: Table A; Target 59085; HLA-B*27:02; PASD1; ENSG00000166049; CTA
YRADPVDLEF

SEQ ID NO: 59086 - protein, 10 aa, Homo sapiens
  misc_feature: Table A; Target 59086; HLA-B*27:05; PASD1; ENSG00000166049; CTA
YRADPVDLEF

SEQ ID NO: 59087 - protein, 10 aa, Homo sapiens
  misc_feature: Table A; Target 59087; HLA-B*38:01; PASD1; ENSG00000166049; CTA
YRADPVDLEF

SEQ ID NO: 59088 - protein, 10 aa, Homo sapiens
  misc_feature: Table A; Target 59088; HLA-C*16:04; PASD1; ENSG00000166049; CTA
YRADPVDLEF

SEQ ID NO: 59089 - protein, 8 aa, Homo sapiens
  misc_feature: Table A; Target 59089; HLA-B*39:01; PASD1; ENSG00000166049; CTA
YVEPAAAA

SEQ ID NO: 59090 - protein, 9 aa, Homo sapiens
  misc_feature: Table A; Target 59090; HLA-B*35:03; PASD1; ENSG00000166049; CTA
YVEPAAAAA

SEQ ID NO: 59091 - protein, 9 aa, Homo sapiens
  misc_feature: Table A; Target 59091; HLA-B*39:01; PASD1; ENSG00000166049; CTA
YVEPAAAAA

SEQ ID NO: 59092 - protein, 9 aa, Homo sapiens
  misc_feature: Table A; Target 59092; HLA-B*54:01; PASD1; ENSG00000166049; CTA
YVEPAAAAA

SEQ ID NO: 59093 - protein, 9 aa, Homo sapiens
  misc_feature: Table A; Target 59093; HLA-B*56:01; PASD1; ENSG00000166049; CTA
YVEPAAAAA

SEQ ID NO: 59094 - protein, 9 aa, Homo sapiens
  misc_feature: Table A; Target 59094; HLA-C*01:02; PASD1; ENSG00000166049; CTA
YVEPAAAAA

SEQ ID NO: 59095 - protein, 9 aa, Homo sapiens
  misc_feature: Table A; Target 59095; HLA-C*03:03; PASD1; ENSG00000166049; CTA
YVEPAAAAA

SEQ ID NO: 59096 - protein, 9 aa, Homo sapiens
  misc_feature: Table A; Target 59096; HLA-C*03:04; PASD1; ENSG00000166049; CTA
YVEPAAAAA

SEQ ID NO: 59097 - protein, 9 aa, Homo sapiens
  misc_feature: Table A; Target 59097; HLA-C*05:01; PASD1; ENSG00000166049; CTA
YVEPAAAAA

SEQ ID NO: 59098 - protein, 11 aa, Homo sapiens
  misc_feature: Table A; Target 59098; HLA-A*30:01; PAX3; ENSG00000135903; TAA
AEQLEELERAF

SEQ ID NO: 59099 - protein, 11 aa, Homo sapiens
  misc_feature: Table A; Target 59099; HLA-B*27:02; PAX3; ENSG00000135903; TAA
AEQLEELERAF

SEQ ID NO: 59100 - protein, 11 aa, Homo sapiens
  misc_feature: Table A; Target 59100; HLA-B*37:01; PAX3; ENSG00000135903; TAA
AEQLEELERAF

SEQ ID NO: 59101 - protein, 11 aa, Homo sapiens
  misc_feature: Table A; Target 59101; HLA-B*44:02; PAX3; ENSG00000135903; TAA
AEQLEELERAF

SEQ ID NO: 59102 - protein, 11 aa, Homo sapiens
  misc_feature: Table A; Target 59102; HLA-B*44:03; PAX3; ENSG00000135903; TAA
AEQLEELERAF

SEQ ID NO: 59103 - protein, 11 aa, Homo sapiens
  misc_feature: Table A; Target 59103; HLA-C*16:04; PAX3; ENSG00000135903; TAA
AEQLEELERAF

SEQ ID NO: 59104 - protein, 9 aa, Homo sapiens
  misc_feature: Table A; Target 59104; HLA-A*23:01; PAX3; ENSG00000135903; TAA
AGANQLMAF

SEQ ID NO: 59105 - protein, 9 aa, Homo sapiens
  misc_feature: Table A; Target 59105; HLA-B*15:01; PAX3; ENSG00000135903; TAA
AGANQLMAF

SEQ ID NO: 59106 - protein, 9 aa, Homo sapiens
  misc_feature: Table A; Target 59106; HLA-B*15:03; PAX3; ENSG00000135903; TAA
AGANQLMAF

SEQ ID NO: 59107 - protein, 9 aa, Homo sapiens
  misc_feature: Table A; Target 59107; HLA-B*46:01; PAX3; ENSG00000135903; TAA
AGANQLMAF

SEQ ID NO: 59108 - protein, 9 aa, Homo sapiens
  misc_feature: Table A; Target 59108; HLA-C*02:02; PAX3; ENSG00000135903; TAA
AGANQLMAF

SEQ ID NO: 59109 - protein, 9 aa, Homo sapiens
  misc_feature: Table A; Target 59109; HLA-C*14:02; PAX3; ENSG00000135903; TAA
AGANQLMAF

SEQ ID NO: 59110 - protein, 9 aa, Homo sapiens
  misc_feature: Table A; Target 59110; HLA-C*16:01; PAX3; ENSG00000135903; TAA
AGANQLMAF

SEQ ID NO: 59111 - protein, 9 aa, Homo sapiens
  misc_feature: Table A; Target 59111; HLA-C*16:04; PAX3; ENSG00000135903; TAA
AGANQLMAF

SEQ ID NO: 59112 - protein, 8 aa, Homo sapiens
  misc_feature: Table A; Target 59112; HLA-C*16:01; PAX3; ENSG00000135903; TAA
AGAVPRMM

SEQ ID NO: 59113 - protein, 9 aa, Homo sapiens
  misc_feature: Table A; Target 59113; HLA-A*02:01; PAX3; ENSG00000135903; TAA
ALSPLTGGL

SEQ ID NO: 59114 - protein, 9 aa, Homo sapiens
  misc_feature: Table A; Target 59114; HLA-A*02:03; PAX3; ENSG00000135903; TAA
ALSPLTGGL

SEQ ID NO: 59115 - protein, 9 aa, Homo sapiens
  misc_feature: Table A; Target 59115; HLA-A*02:04; PAX3; ENSG00000135903; TAA
ALSPLTGGL

SEQ ID NO: 59116 - protein, 9 aa, Homo sapiens
  misc_feature: Table A; Target 59116; HLA-A*32:01; PAX3; ENSG00000135903; TAA
ALSPLTGGL

SEQ ID NO: 59117 - protein, 9 aa, Homo sapiens
  misc_feature: Table A; Target 59117; HLA-B*15:01; PAX3; ENSG00000135903; TAA
ALSPLTGGL

SEQ ID NO: 59118 - protein, 9 aa, Homo sapiens
  misc_feature: Table A; Target 59118; HLA-B*37:01; PAX3; ENSG00000135903; TAA
ALSPLTGGL

SEQ ID NO: 59119 - protein, 8 aa, Homo sapiens
  misc_feature: Table A; Target 59119; HLA-B*15:03; PAX3; ENSG00000135903; TAA
AMPTLPTY

SEQ ID NO: 59120 - protein, 10 aa, Homo sapiens
  misc_feature: Table A; Target 59120; HLA-A*02:07; PAX3; ENSG00000135903; TAA
AMPTLPTYQL

SEQ ID NO: 59121 - protein, 9 aa, Homo sapiens
  misc_feature: Table A; Target 59121; HLA-A*02:03; PAX3; ENSG00000135903; TAA
AQRAKLTEA

SEQ ID NO: 59122 - protein, 9 aa, Homo sapiens
  misc_feature: Table A; Target 59122; HLA-A*02:01; PAX3; ENSG00000135903; TAA
AVSDPSSTV

SEQ ID NO: 59123 - protein, 9 aa, Homo sapiens
  misc_feature: Table A; Target 59123; HLA-A*02:03; PAX3; ENSG00000135903; TAA
AVSDPSSTV

SEQ ID NO: 59124 - protein, 9 aa, Homo sapiens
  misc_feature: Table A; Target 59124; HLA-A*25:01; PAX3; ENSG00000135903; TAA
AVSDPSSTV

SEQ ID NO: 59125 - protein, 9 aa, Homo sapiens
  misc_feature: Table A; Target 59125; HLA-A*26:01; PAX3; ENSG00000135903; TAA
AVSDPSSTV

SEQ ID NO: 59126 - protein, 9 aa, Homo sapiens
  misc_feature: Table A; Target 59126; HLA-A*32:01; PAX3; ENSG00000135903; TAA
AVSDPSSTV

SEQ ID NO: 59127 - protein, 9 aa, Homo sapiens
  misc_feature: Table A; Target 59127; HLA-B*13:02; PAX3; ENSG00000135903; TAA
AVSDPSSTV

SEQ ID NO: 59128 - protein, 9 aa, Homo sapiens
  misc_feature: Table A; Target 59128; HLA-B*15:01; PAX3; ENSG00000135903; TAA
AVSDPSSTV

SEQ ID NO: 59129 - protein, 9 aa, Homo sapiens
  misc_feature: Table A; Target 59129; HLA-B*27:05; PAX3; ENSG00000135903; TAA
AVSDPSSTV

SEQ ID NO: 59130 - protein, 9 aa, Homo sapiens
  misc_feature: Table A; Target 59130; HLA-B*46:01; PAX3; ENSG00000135903; TAA
AVSDPSSTV

SEQ ID NO: 59131 - protein, 9 aa, Homo sapiens
  misc_feature: Table A; Target 59131; HLA-B*55:01; PAX3; ENSG00000135903; TAA
AVSDPSSTV

SEQ ID NO: 59132 - protein, 9 aa, Homo sapiens
  misc_feature: Table A; Target 59132; HLA-B*56:01; PAX3; ENSG00000135903; TAA
AVSDPSSTV

SEQ ID NO: 59133 - protein, 9 aa, Homo sapiens
  misc_feature: Table A; Target 59133; HLA-C*01:02; PAX3; ENSG00000135903; TAA
AVSDPSSTV

SEQ ID NO: 59134 - protein, 9 aa, Homo sapiens
  misc_feature: Table A; Target 59134; HLA-C*03:04; PAX3; ENSG00000135903; TAA
AVSDPSSTV

SEQ ID NO: 59135 - protein, 9 aa, Homo sapiens
  misc_feature: Table A; Target 59135; HLA-C*05:01; PAX3; ENSG00000135903; TAA
AVSDPSSTV

SEQ ID NO: 59136 - protein, 10 aa, Homo sapiens
  misc_feature: Table A; Target 59136; HLA-A*03:02; PAX3; ENSG00000135903; TAA
AVSDPSSTVH

SEQ ID NO: 59137 - protein, 10 aa, Homo sapiens
  misc_feature: Table A; Target 59137; HLA-A*11:01; PAX3; ENSG00000135903; TAA
AVSDPSSTVH

SEQ ID NO: 59138 - protein, 10 aa, Homo sapiens
  misc_feature: Table A; Target 59138; HLA-C*07:06; PAX3; ENSG00000135903; TAA
AVSDPSSTVH

SEQ ID NO: 59139 - protein, 11 aa, Homo sapiens
  misc_feature: Table A; Target 59139; HLA-A*03:01; PAX3; ENSG00000135903; TAA
AVSDPSSTVHR

SEQ ID NO: 59140 - protein, 11 aa, Homo sapiens
  misc_feature: Table A; Target 59140; HLA-A*03:02; PAX3; ENSG00000135903; TAA
AVSDPSSTVHR

SEQ ID NO: 59141 - protein, 11 aa, Homo sapiens
  misc_feature: Table A; Target 59141; HLA-A*11:01; PAX3; ENSG00000135903; TAA
AVSDPSSTVHR

SEQ ID NO: 59142 - protein, 11 aa, Homo sapiens
  misc_feature: Table A; Target 59142; HLA-A*31:01; PAX3; ENSG00000135903; TAA
AVSDPSSTVHR

SEQ ID NO: 59143 - protein, 11 aa, Homo sapiens
  misc_feature: Table A; Target 59143; HLA-A*33:03; PAX3; ENSG00000135903; TAA
AVSDPSSTVHR

SEQ ID NO: 59144 - protein, 11 aa, Homo sapiens
  misc_feature: Table A; Target 59144; HLA-A*68:01; PAX3; ENSG00000135903; TAA
AVSDPSSTVHR

SEQ ID NO: 59145 - protein, 11 aa, Homo sapiens
  misc_feature: Table A; Target 59145; HLA-C*07:06; PAX3; ENSG00000135903; TAA
AVSDPSSTVHR

SEQ ID NO: 59146 - protein, 9 aa, Homo sapiens
  misc_feature: Table A; Target 59146; HLA-A*32:01; PAX3; ENSG00000135903; TAA
CLPSTRHGF

SEQ ID NO: 59147 - protein, 9 aa, Homo sapiens
  misc_feature: Table A; Target 59147; HLA-B*51:01; PAX3; ENSG00000135903; TAA
DAVCDRNTV

SEQ ID NO: 59148 - protein, 9 aa, Homo sapiens
  misc_feature: Table A; Target 59148; HLA-B*27:05; PAX3; ENSG00000135903; TAA
DHMKSLDSL

SEQ ID NO: 59149 - protein, 9 aa, Homo sapiens
  misc_feature: Table A; Target 59149; HLA-B*38:01; PAX3; ENSG00000135903; TAA
DHMKSLDSL

SEQ ID NO: 59150 - protein, 9 aa, Homo sapiens
  misc_feature: Table A; Target 59150; HLA-B*39:01; PAX3; ENSG00000135903; TAA
DHMKSLDSL

SEQ ID NO: 59151 - protein, 8 aa, Homo sapiens
  misc_feature: Table A; Target 59151; HLA-C*05:01; PAX3; ENSG00000135903; TAA
DIDSEPDL

SEQ ID NO: 59152 - protein, 10 aa, Homo sapiens
  misc_feature: Table A; Target 59152; HLA-C*05:01; PAX3; ENSG00000135903; TAA
DIDSEPDLPL

SEQ ID NO: 59153 - protein, 11 aa, Homo sapiens
  misc_feature: Table A; Target 59153; HLA-A*01:01; PAX3; ENSG00000135903; TAA
DIDSEPDLPLK

SEQ ID NO: 59154 - protein, 11 aa, Homo sapiens
  misc_feature: Table A; Target 59154; HLA-B*27:02; PAX3; ENSG00000135903; TAA
DIDSEPDLPLK

SEQ ID NO: 59155 - protein, 8 aa, Homo sapiens
  misc_feature: Table A; Target 59155; HLA-A*33:01; PAX3; ENSG00000135903; TAA
DPSSTVHR

SEQ ID NO: 59156 - protein, 8 aa, Homo sapiens
  misc_feature: Table A; Target 59156; HLA-A*33:03; PAX3; ENSG00000135903; TAA
DPSSTVHR

SEQ ID NO: 59157 - protein, 8 aa, Homo sapiens
  misc_feature: Table A; Target 59157; HLA-A*68:01; PAX3; ENSG00000135903; TAA
DPSSTVHR

SEQ ID NO: 59158 - protein, 8 aa, Homo sapiens
  misc_feature: Table A; Target 59158; HLA-A*26:01; PAX3; ENSG00000135903; TAA
DPVTGYQY

SEQ ID NO: 59159 - protein, 8 aa, Homo sapiens
  misc_feature: Table A; Target 59159; HLA-B*18:01; PAX3; ENSG00000135903; TAA
DPVTGYQY

SEQ ID NO: 59160 - protein, 8 aa, Homo sapiens
  misc_feature: Table A; Target 59160; HLA-B*35:01; PAX3; ENSG00000135903; TAA
DPVTGYQY

SEQ ID NO: 59161 - protein, 8 aa, Homo sapiens
  misc_feature: Table A; Target 59161; HLA-B*35:03; PAX3; ENSG00000135903; TAA
DPVTGYQY

SEQ ID NO: 59162 - protein, 8 aa, Homo sapiens
  misc_feature: Table A; Target 59162; HLA-B*39:01; PAX3; ENSG00000135903; TAA
DPVTGYQY

SEQ ID NO: 59163 - protein, 8 aa, Homo sapiens
  misc_feature: Table A; Target 59163; HLA-B*55:01; PAX3; ENSG00000135903; TAA
DPVTGYQY

SEQ ID NO: 59164 - protein, 8 aa, Homo sapiens
  misc_feature: Table A; Target 59164; HLA-C*07:01; PAX3; ENSG00000135903; TAA
DPVTGYQY

SEQ ID NO: 59165 - protein, 11 aa, Homo sapiens
  misc_feature: Table A; Target 59165; HLA-A*25:01; PAX3; ENSG00000135903; TAA
DPVTGYQYGQY

SEQ ID NO: 59166 - protein, 11 aa, Homo sapiens
  misc_feature: Table A; Target 59166; HLA-A*26:01; PAX3; ENSG00000135903; TAA
DPVTGYQYGQY

SEQ ID NO: 59167 - protein, 11 aa, Homo sapiens
  misc_feature: Table A; Target 59167; HLA-A*68:01; PAX3; ENSG00000135903; TAA
DPVTGYQYGQY

SEQ ID NO: 59168 - protein, 11 aa, Homo sapiens
  misc_feature: Table A; Target 59168; HLA-B*35:01; PAX3; ENSG00000135903; TAA
DPVTGYQYGQY

SEQ ID NO: 59169 - protein, 9 aa, Homo sapiens
  misc_feature: Table A; Target 59169; HLA-A*01:01; PAX3; ENSG00000135903; TAA
DSEPDLPLK

SEQ ID NO: 59170 - protein, 9 aa, Homo sapiens
  misc_feature: Table A; Target 59170; HLA-A*11:01; PAX3; ENSG00000135903; TAA
DSEPDLPLK

SEQ ID NO: 59171 - protein, 9 aa, Homo sapiens
  misc_feature: Table A; Target 59171; HLA-A*33:01; PAX3; ENSG00000135903; TAA
DSEPDLPLK

SEQ ID NO: 59172 - protein, 9 aa, Homo sapiens
  misc_feature: Table A; Target 59172; HLA-A*68:01; PAX3; ENSG00000135903; TAA
DSEPDLPLK

SEQ ID NO: 59173 - protein, 10 aa, Homo sapiens
  misc_feature: Table A; Target 59173; HLA-A*01:01; PAX3; ENSG00000135903; TAA
DSEPDLPLKR

SEQ ID NO: 59174 - protein, 10 aa, Homo sapiens
  misc_feature: Table A; Target 59174; HLA-A*33:01; PAX3; ENSG00000135903; TAA
DSEPDLPLKR

SEQ ID NO: 59175 - protein, 10 aa, Homo sapiens
  misc_feature: Table A; Target 59175; HLA-A*33:03; PAX3; ENSG00000135903; TAA
DSEPDLPLKR

SEQ ID NO: 59176 - protein, 10 aa, Homo sapiens
  misc_feature: Table A; Target 59176; HLA-A*68:01; PAX3; ENSG00000135903; TAA
DSEPDLPLKR

SEQ ID NO: 59177 - protein, 10 aa, Homo sapiens
  misc_feature: Table A; Target 59177; HLA-C*07:06; PAX3; ENSG00000135903; TAA
DSEPDLPLKR

SEQ ID NO: 59178 - protein, 9 aa, Homo sapiens
  misc_feature: Table A; Target 59178; HLA-A*01:01; PAX3; ENSG00000135903; TAA
DSLPTSQSY

SEQ ID NO: 59179 - protein, 9 aa, Homo sapiens
  misc_feature: Table A; Target 59179; HLA-A*25:01; PAX3; ENSG00000135903; TAA
DSLPTSQSY

SEQ ID NO: 59180 - protein, 9 aa, Homo sapiens
  misc_feature: Table A; Target 59180; HLA-A*26:01; PAX3; ENSG00000135903; TAA
DSLPTSQSY

SEQ ID NO: 59181 - protein, 9 aa, Homo sapiens
  misc_feature: Table A; Target 59181; HLA-A*29:02; PAX3; ENSG00000135903; TAA
DSLPTSQSY

SEQ ID NO: 59182 - protein, 9 aa, Homo sapiens
  misc_feature: Table A; Target 59182; HLA-A*30:02; PAX3; ENSG00000135903; TAA
DSLPTSQSY

SEQ ID NO: 59183 - protein, 9 aa, Homo sapiens
  misc_feature: Table A; Target 59183; HLA-A*32:01; PAX3; ENSG00000135903; TAA
DSLPTSQSY

SEQ ID NO: 59184 - protein, 9 aa, Homo sapiens
  misc_feature: Table A; Target 59184; HLA-A*33:01; PAX3; ENSG00000135903; TAA
DSLPTSQSY

SEQ ID NO: 59185 - protein, 9 aa, Homo sapiens
  misc_feature: Table A; Target 59185; HLA-A*33:03; PAX3; ENSG00000135903; TAA
DSLPTSQSY

SEQ ID NO: 59186 - protein, 9 aa, Homo sapiens
  misc_feature: Table A; Target 59186; HLA-A*68:01; PAX3; ENSG00000135903; TAA
DSLPTSQSY

SEQ ID NO: 59187 - protein, 9 aa, Homo sapiens
  misc_feature: Table A; Target 59187; HLA-B*15:01; PAX3; ENSG00000135903; TAA
DSLPTSQSY

SEQ ID NO: 59188 - protein, 9 aa, Homo sapiens
  misc_feature: Table A; Target 59188; HLA-B*15:03; PAX3; ENSG00000135903; TAA
DSLPTSQSY

SEQ ID NO: 59189 - protein, 9 aa, Homo sapiens
  misc_feature: Table A; Target 59189; HLA-B*18:01; PAX3; ENSG00000135903; TAA
DSLPTSQSY

SEQ ID NO: 59190 - protein, 9 aa, Homo sapiens
  misc_feature: Table A; Target 59190; HLA-B*35:01; PAX3; ENSG00000135903; TAA
DSLPTSQSY

SEQ ID NO: 59191 - protein, 9 aa, Homo sapiens
  misc_feature: Table A; Target 59191; HLA-B*39:01; PAX3; ENSG00000135903; TAA
DSLPTSQSY

SEQ ID NO: 59192 - protein, 9 aa, Homo sapiens
  misc_feature: Table A; Target 59192; HLA-B*44:02; PAX3; ENSG00000135903; TAA
DSLPTSQSY

SEQ ID NO: 59193 - protein, 9 aa, Homo sapiens
  misc_feature: Table A; Target 59193; HLA-B*44:03; PAX3; ENSG00000135903; TAA
DSLPTSQSY

SEQ ID NO: 59194 - protein, 9 aa, Homo sapiens
  misc_feature: Table A; Target 59194; HLA-B*46:01; PAX3; ENSG00000135903; TAA
DSLPTSQSY

SEQ ID NO: 59195 - protein, 9 aa, Homo sapiens
  misc_feature: Table A; Target 59195; HLA-B*57:01; PAX3; ENSG00000135903; TAA
DSLPTSQSY

SEQ ID NO: 59196 - protein, 9 aa, Homo sapiens
  misc_feature: Table A; Target 59196; HLA-B*58:01; PAX3; ENSG00000135903; TAA
DSLPTSQSY

SEQ ID NO: 59197 - protein, 9 aa, Homo sapiens
  misc_feature: Table A; Target 59197; HLA-C*01:02; PAX3; ENSG00000135903; TAA
DSLPTSQSY

SEQ ID NO: 59198 - protein, 9 aa, Homo sapiens
  misc_feature: Table A; Target 59198; HLA-C*03:03; PAX3; ENSG00000135903; TAA
DSLPTSQSY

SEQ ID NO: 59199 - protein, 9 aa, Homo sapiens
  misc_feature: Table A; Target 59199; HLA-C*07:01; PAX3; ENSG00000135903; TAA
DSLPTSQSY

SEQ ID NO: 59200 - protein, 9 aa, Homo sapiens
  misc_feature: Table A; Target 59200; HLA-C*07:04; PAX3; ENSG00000135903; TAA
DSLPTSQSY

SEQ ID NO: 59201 - protein, 9 aa, Homo sapiens
  misc_feature: Table A; Target 59201; HLA-C*07:06; PAX3; ENSG00000135903; TAA
DSLPTSQSY

SEQ ID NO: 59202 - protein, 9 aa, Homo sapiens
  misc_feature: Table A; Target 59202; HLA-C*14:02; PAX3; ENSG00000135903; TAA
DSLPTSQSY

SEQ ID NO: 59203 - protein, 9 aa, Homo sapiens
  misc_feature: Table A; Target 59203; HLA-C*16:04; PAX3; ENSG00000135903; TAA
DSLPTSQSY

SEQ ID NO: 59204 - protein, 9 aa, Homo sapiens
  misc_feature: Table A; Target 59204; HLA-B*18:01; PAX3; ENSG00000135903; TAA
EELAQRAKL

SEQ ID NO: 59205 - protein, 9 aa, Homo sapiens
  misc_feature: Table A; Target 59205; HLA-B*37:01; PAX3; ENSG00000135903; TAA
EELAQRAKL

SEQ ID NO: 59206 - protein, 9 aa, Homo sapiens
  misc_feature: Table A; Target 59206; HLA-B*40:01; PAX3; ENSG00000135903; TAA
EELAQRAKL

SEQ ID NO: 59207 - protein, 9 aa, Homo sapiens
  misc_feature: Table A; Target 59207; HLA-B*40:02; PAX3; ENSG00000135903; TAA
EELAQRAKL

SEQ ID NO: 59208 - protein, 9 aa, Homo sapiens
  misc_feature: Table A; Target 59208; HLA-B*44:02; PAX3; ENSG00000135903; TAA
EELAQRAKL

SEQ ID NO: 59209 - protein, 9 aa, Homo sapiens
  misc_feature: Table A; Target 59209; HLA-B*44:03; PAX3; ENSG00000135903; TAA
EELAQRAKL

SEQ ID NO: 59210 - protein, 9 aa, Homo sapiens
  misc_feature: Table A; Target 59210; HLA-A*33:01; PAX3; ENSG00000135903; TAA
EELERAFER

SEQ ID NO: 59211 - protein, 9 aa, Homo sapiens
  misc_feature: Table A; Target 59211; HLA-A*33:03; PAX3; ENSG00000135903; TAA
EELERAFER

SEQ ID NO: 59212 - protein, 8 aa, Homo sapiens
  misc_feature: Table A; Target 59212; HLA-B*08:01; PAX3; ENSG00000135903; TAA
ELAQRAKL

SEQ ID NO: 59213 - protein, 8 aa, Homo sapiens
  misc_feature: Table A; Target 59213; HLA-B*54:01; PAX3; ENSG00000135903; TAA
EPTTTVSA

SEQ ID NO: 59214 - protein, 8 aa, Homo sapiens
  misc_feature: Table A; Target 59214; HLA-B*55:01; PAX3; ENSG00000135903; TAA
EPTTTVSA

SEQ ID NO: 59215 - protein, 8 aa, Homo sapiens
  misc_feature: Table A; Target 59215; HLA-B*56:01; PAX3; ENSG00000135903; TAA
EPTTTVSA

SEQ ID NO: 59216 - protein, 10 aa, Homo sapiens
  misc_feature: Table A; Target 59216; HLA-A*25:01; PAX3; ENSG00000135903; TAA
EQLEELERAF

SEQ ID NO: 59217 - protein, 10 aa, Homo sapiens
  misc_feature: Table A; Target 59217; HLA-B*44:02; PAX3; ENSG00000135903; TAA
EQLEELERAF

SEQ ID NO: 59218 - protein, 10 aa, Homo sapiens
  misc_feature: Table A; Target 59218; HLA-B*44:03; PAX3; ENSG00000135903; TAA
EQLEELERAF

SEQ ID NO: 59219 - protein, 9 aa, Homo sapiens
  misc_feature: Table A; Target 59219; HLA-A*25:01; PAX3; ENSG00000135903; TAA
ETSYQPTSI

SEQ ID NO: 59220 - protein, 9 aa, Homo sapiens
  misc_feature: Table A; Target 59220; HLA-A*26:01; PAX3; ENSG00000135903; TAA
ETSYQPTSI

SEQ ID NO: 59221 - protein, 9 aa, Homo sapiens
  misc_feature: Table A; Target 59221; HLA-A*33:03; PAX3; ENSG00000135903; TAA
ETSYQPTSI

SEQ ID NO: 59222 - protein, 9 aa, Homo sapiens
  misc_feature: Table A; Target 59222; HLA-A*68:01; PAX3; ENSG00000135903; TAA
ETSYQPTSI

SEQ ID NO: 59223 - protein, 9 aa, Homo sapiens
  misc_feature: Table A; Target 59223; HLA-A*68:02; PAX3; ENSG00000135903; TAA
ETSYQPTSI

SEQ ID NO: 59224 - protein, 9 aa, Homo sapiens
  misc_feature: Table A; Target 59224; HLA-A*23:01; PAX3; ENSG00000135903; TAA
FPPTAMPTL

SEQ ID NO: 59225 - protein, 9 aa, Homo sapiens
  misc_feature: Table A; Target 59225; HLA-A*24:02; PAX3; ENSG00000135903; TAA
FPPTAMPTL

SEQ ID NO: 59226 - protein, 9 aa, Homo sapiens
  misc_feature: Table A; Target 59226; HLA-B*07:02; PAX3; ENSG00000135903; TAA
FPPTAMPTL

SEQ ID NO: 59227 - protein, 9 aa, Homo sapiens
  misc_feature: Table A; Target 59227; HLA-B*35:01; PAX3; ENSG00000135903; TAA
FPPTAMPTL

SEQ ID NO: 59228 - protein, 9 aa, Homo sapiens
  misc_feature: Table A; Target 59228; HLA-B*35:03; PAX3; ENSG00000135903; TAA
FPPTAMPTL

SEQ ID NO: 59229 - protein, 9 aa, Homo sapiens
  misc_feature: Table A; Target 59229; HLA-B*51:01; PAX3; ENSG00000135903; TAA
FPPTAMPTL

SEQ ID NO: 59230 - protein, 9 aa, Homo sapiens
  misc_feature: Table A; Target 59230; HLA-B*54:01; PAX3; ENSG00000135903; TAA
FPPTAMPTL

SEQ ID NO: 59231 - protein, 9 aa, Homo sapiens
  misc_feature: Table A; Target 59231; HLA-B*56:01; PAX3; ENSG00000135903; TAA
FPPTAMPTL

SEQ ID NO: 59232 - protein, 9 aa, Homo sapiens
  misc_feature: Table A; Target 59232; HLA-C*01:02; PAX3; ENSG00000135903; TAA
FPPTAMPTL

SEQ ID NO: 59233 - protein, 9 aa, Homo sapiens
  misc_feature: Table A; Target 59233; HLA-C*07:02; PAX3; ENSG00000135903; TAA
FPPTAMPTL

SEQ ID NO: 59234 - protein, 11 aa, Homo sapiens
  misc_feature: Table A; Target 59234; HLA-A*68:01; PAX3; ENSG00000135903; TAA
FTAEQLEELER

SEQ ID NO: 59235 - protein, 11 aa, Homo sapiens
  misc_feature: Table A; Target 59235; HLA-B*27:02; PAX3; ENSG00000135903; TAA
FTAEQLEELER

SEQ ID NO: 59236 - protein, 11 aa, Homo sapiens
  misc_feature: Table A; Target 59236; HLA-C*07:06; PAX3; ENSG00000135903; TAA
FTAEQLEELER

SEQ ID NO: 59237 - protein, 9 aa, Homo sapiens
  misc_feature: Table A; Target 59237; HLA-C*01:02; PAX3; ENSG00000135903; TAA
FVPPSGPSN

SEQ ID NO: 59238 - protein, 11 aa, Homo sapiens
  misc_feature: Table A; Target 59238; HLA-A*02:07; PAX3; ENSG00000135903; TAA
FVPPSGPSNPM

SEQ ID NO: 59239 - protein, 11 aa, Homo sapiens
  misc_feature: Table A; Target 59239; HLA-A*26:01; PAX3; ENSG00000135903; TAA
FVPPSGPSNPM

SEQ ID NO: 59240 - protein, 11 aa, Homo sapiens
  misc_feature: Table A; Target 59240; HLA-B*27:05; PAX3; ENSG00000135903; TAA
FVPPSGPSNPM

SEQ ID NO: 59241 - protein, 11 aa, Homo sapiens
  misc_feature: Table A; Target 59241; HLA-B*35:01; PAX3; ENSG00000135903; TAA
FVPPSGPSNPM

SEQ ID NO: 59242 - protein, 11 aa, Homo sapiens
  misc_feature: Table A; Target 59242; HLA-B*46:01; PAX3; ENSG00000135903; TAA
FVPPSGPSNPM

SEQ ID NO: 59243 - protein, 11 aa, Homo sapiens
  misc_feature: Table A; Target 59243; HLA-C*07:02; PAX3; ENSG00000135903; TAA
FVPPSGPSNPM

SEQ ID NO: 59244 - protein, 11 aa, Homo sapiens
  misc_feature: Table A; Target 59244; HLA-C*07:04; PAX3; ENSG00000135903; TAA
FVPPSGPSNPM

SEQ ID NO: 59245 - protein, 9 aa, Homo sapiens
  misc_feature: Table A; Target 59245; HLA-A*03:01; PAX3; ENSG00000135903; TAA
GAIGGSKPK

SEQ ID NO: 59246 - protein, 9 aa, Homo sapiens
  misc_feature: Table A; Target 59246; HLA-A*03:02; PAX3; ENSG00000135903; TAA
GAIGGSKPK

SEQ ID NO: 59247 - protein, 9 aa, Homo sapiens
  misc_feature: Table A; Target 59247; HLA-A*11:01; PAX3; ENSG00000135903; TAA
GAIGGSKPK

SEQ ID NO: 59248 - protein, 8 aa, Homo sapiens
  misc_feature: Table A; Target 59248; HLA-B*46:01; PAX3; ENSG00000135903; TAA
GANQLMAF

SEQ ID NO: 59249 - protein, 9 aa, Homo sapiens
  misc_feature: Table A; Target 59249; HLA-A*23:01; PAX3; ENSG00000135903; TAA
GFSSYTDSF

SEQ ID NO: 59250 - protein, 9 aa, Homo sapiens
  misc_feature: Table A; Target 59250; HLA-A*29:02; PAX3; ENSG00000135903; TAA
GFSSYTDSF

SEQ ID NO: 59251 - protein, 9 aa, Homo sapiens
  misc_feature: Table A; Target 59251; HLA-C*14:02; PAX3; ENSG00000135903; TAA
GFSSYTDSF

SEQ ID NO: 59252 - protein, 9 aa, Homo sapiens
  misc_feature: Table A; Target 59252; HLA-A*02:01; PAX3; ENSG00000135903; TAA
GGLEPTTTV

SEQ ID NO: 59253 - protein, 9 aa, Homo sapiens
  misc_feature: Table A; Target 59253; HLA-A*02:03; PAX3; ENSG00000135903; TAA
GGLEPTTTV

SEQ ID NO: 59254 - protein, 9 aa, Homo sapiens
  misc_feature: Table A; Target 59254; HLA-B*13:02; PAX3; ENSG00000135903; TAA
GGLEPTTTV

SEQ ID NO: 59255 - protein, 9 aa, Homo sapiens
  misc_feature: Table A; Target 59255; HLA-B*49:01; PAX3; ENSG00000135903; TAA
GGLEPTTTV

SEQ ID NO: 59256 - protein, 9 aa, Homo sapiens
  misc_feature: Table A; Target 59256; HLA-C*05:01; PAX3; ENSG00000135903; TAA
GGLEPTTTV

SEQ ID NO: 59257 - protein, 11 aa, Homo sapiens
  misc_feature: Table A; Target 59257; HLA-A*30:02; PAX3; ENSG00000135903; TAA
GGVPHQPQTDY

SEQ ID NO: 59258 - protein, 11 aa, Homo sapiens
  misc_feature: Table A; Target 59258; HLA-B*15:01; PAX3; ENSG00000135903; TAA
GGVPHQPQTDY

SEQ ID NO: 59259 - protein, 11 aa, Homo sapiens
  misc_feature: Table A; Target 59259; HLA-B*15:03; PAX3; ENSG00000135903; TAA
GGVPHQPQTDY

SEQ ID NO: 59260 - protein, 11 aa, Homo sapiens
  misc_feature: Table A; Target 59260; HLA-B*39:01; PAX3; ENSG00000135903; TAA
GGVPHQPQTDY

SEQ ID NO: 59261 - protein, 9 aa, Homo sapiens
  misc_feature: Table A; Target 59261; HLA-A*02:01; PAX3; ENSG00000135903; TAA
GLSPQVMGL

SEQ ID NO: 59262 - protein, 9 aa, Homo sapiens
  misc_feature: Table A; Target 59262; HLA-A*02:03; PAX3; ENSG00000135903; TAA
GLSPQVMGL

SEQ ID NO: 59263 - protein, 9 aa, Homo sapiens
  misc_feature: Table A; Target 59263; HLA-A*02:04; PAX3; ENSG00000135903; TAA
GLSPQVMGL

SEQ ID NO: 59264 - protein, 9 aa, Homo sapiens
  misc_feature: Table A; Target 59264; HLA-A*02:07; PAX3; ENSG00000135903; TAA
GLSPQVMGL

SEQ ID NO: 59265 - protein, 9 aa, Homo sapiens
  misc_feature: Table A; Target 59265; HLA-B*13:02; PAX3; ENSG00000135903; TAA
GLSPQVMGL

SEQ ID NO: 59266 - protein, 9 aa, Homo sapiens
  misc_feature: Table A; Target 59266; HLA-B*37:01; PAX3; ENSG00000135903; TAA
GLSPQVMGL

SEQ ID NO: 59267 - protein, 9 aa, Homo sapiens
  misc_feature: Table A; Target 59267; HLA-B*55:01; PAX3; ENSG00000135903; TAA
GLSPQVMGL

SEQ ID NO: 59268 - protein, 10 aa, Homo sapiens
  misc_feature: Table A; Target 59268; HLA-A*02:03; PAX3; ENSG00000135903; TAA
GLSPQVMGLL

SEQ ID NO: 59269 - protein, 10 aa, Homo sapiens
  misc_feature: Table A; Target 59269; HLA-B*56:01; PAX3; ENSG00000135903; TAA
GPSNPMNPTI

SEQ ID NO: 59270 - protein, 9 aa, Homo sapiens
  misc_feature: Table A; Target 59270; HLA-A*30:02; PAX3; ENSG00000135903; TAA
GQNYPRSGF

SEQ ID NO: 59271 - protein, 9 aa, Homo sapiens
  misc_feature: Table A; Target 59271; HLA-A*32:01; PAX3; ENSG00000135903; TAA
GQNYPRSGF

SEQ ID NO: 59272 - protein, 9 aa, Homo sapiens
  misc_feature: Table A; Target 59272; HLA-B*15:01; PAX3; ENSG00000135903; TAA
GQNYPRSGF

SEQ ID NO: 59273 - protein, 9 aa, Homo sapiens
  misc_feature: Table A; Target 59273; HLA-B*15:03; PAX3; ENSG00000135903; TAA
GQNYPRSGF

SEQ ID NO: 59274 - protein, 9 aa, Homo sapiens
  misc_feature: Table A; Target 59274; HLA-B*37:01; PAX3; ENSG00000135903; TAA
GQNYPRSGF

SEQ ID NO: 59275 - protein, 9 aa, Homo sapiens
  misc_feature: Table A; Target 59275; HLA-C*16:04; PAX3; ENSG00000135903; TAA
GQNYPRSGF

SEQ ID NO: 59276 - protein, 8 aa, Homo sapiens
  misc_feature: Table A; Target 59276; HLA-B*13:02; PAX3; ENSG00000135903; TAA
GQSKPWTF

SEQ ID NO: 59277 - protein, 8 aa, Homo sapiens
  misc_feature: Table A; Target 59277; HLA-B*15:01; PAX3; ENSG00000135903; TAA
GQSKPWTF

SEQ ID NO: 59278 - protein, 8 aa, Homo sapiens
  misc_feature: Table A; Target 59278; HLA-B*15:03; PAX3; ENSG00000135903; TAA
GQSKPWTF

SEQ ID NO: 59279 - protein, 8 aa, Homo sapiens
  misc_feature: Table A; Target 59279; HLA-B*38:01; PAX3; ENSG00000135903; TAA
GQSKPWTF

SEQ ID NO: 59280 - protein, 9 aa, Homo sapiens
  misc_feature: Table A; Target 59280; HLA-A*25:01; PAX3; ENSG00000135903; TAA
GQYGQSKPW

SEQ ID NO: 59281 - protein, 9 aa, Homo sapiens
  misc_feature: Table A; Target 59281; HLA-A*32:01; PAX3; ENSG00000135903; TAA
GQYGQSKPW

SEQ ID NO: 59282 - protein, 9 aa, Homo sapiens
  misc_feature: Table A; Target 59282; HLA-B*15:01; PAX3; ENSG00000135903; TAA
GQYGQSKPW

SEQ ID NO: 59283 - protein, 9 aa, Homo sapiens
  misc_feature: Table A; Target 59283; HLA-B*15:03; PAX3; ENSG00000135903; TAA
GQYGQSKPW

SEQ ID NO: 59284 - protein, 9 aa, Homo sapiens
  misc_feature: Table A; Target 59284; HLA-C*16:04; PAX3; ENSG00000135903; TAA
GQYGQSKPW

SEQ ID NO: 59285 - protein, 11 aa, Homo sapiens
  misc_feature: Table A; Target 59285; HLA-A*02:01; PAX3; ENSG00000135903; TAA
GQYGQSKPWTF

SEQ ID NO: 59286 - protein, 11 aa, Homo sapiens
  misc_feature: Table A; Target 59286; HLA-A*02:03; PAX3; ENSG00000135903; TAA
GQYGQSKPWTF

SEQ ID NO: 59287 - protein, 11 aa, Homo sapiens
  misc_feature: Table A; Target 59287; HLA-A*02:04; PAX3; ENSG00000135903; TAA
GQYGQSKPWTF

SEQ ID NO: 59288 - protein, 11 aa, Homo sapiens
  misc_feature: Table A; Target 59288; HLA-A*02:07; PAX3; ENSG00000135903; TAA
GQYGQSKPWTF

SEQ ID NO: 59289 - protein, 11 aa, Homo sapiens
  misc_feature: Table A; Target 59289; HLA-A*03:01; PAX3; ENSG00000135903; TAA
GQYGQSKPWTF

SEQ ID NO: 59290 - protein, 11 aa, Homo sapiens
  misc_feature: Table A; Target 59290; HLA-A*03:02; PAX3; ENSG00000135903; TAA
GQYGQSKPWTF

SEQ ID NO: 59291 - protein, 11 aa, Homo sapiens
  misc_feature: Table A; Target 59291; HLA-A*11:01; PAX3; ENSG00000135903; TAA
GQYGQSKPWTF

SEQ ID NO: 59292 - protein, 11 aa, Homo sapiens
  misc_feature: Table A; Target 59292; HLA-A*23:01; PAX3; ENSG00000135903; TAA
GQYGQSKPWTF

SEQ ID NO: 59293 - protein, 11 aa, Homo sapiens
  misc_feature: Table A; Target 59293; HLA-A*24:02; PAX3; ENSG00000135903; TAA
GQYGQSKPWTF

SEQ ID NO: 59294 - protein, 11 aa, Homo sapiens
  misc_feature: Table A; Target 59294; HLA-A*29:02; PAX3; ENSG00000135903; TAA
GQYGQSKPWTF

SEQ ID NO: 59295 - protein, 11 aa, Homo sapiens
  misc_feature: Table A; Target 59295; HLA-A*30:01; PAX3; ENSG00000135903; TAA
GQYGQSKPWTF

SEQ ID NO: 59296 - protein, 11 aa, Homo sapiens
  misc_feature: Table A; Target 59296; HLA-A*30:02; PAX3; ENSG00000135903; TAA
GQYGQSKPWTF

SEQ ID NO: 59297 - protein, 11 aa, Homo sapiens
  misc_feature: Table A; Target 59297; HLA-A*31:01; PAX3; ENSG00000135903; TAA
GQYGQSKPWTF

SEQ ID NO: 59298 - protein, 11 aa, Homo sapiens
  misc_feature: Table A; Target 59298; HLA-A*32:01; PAX3; ENSG00000135903; TAA
GQYGQSKPWTF

SEQ ID NO: 59299 - protein, 11 aa, Homo sapiens
  misc_feature: Table A; Target 59299; HLA-B*13:02; PAX3; ENSG00000135903; TAA
GQYGQSKPWTF

SEQ ID NO: 59300 - protein, 11 aa, Homo sapiens
  misc_feature: Table A; Target 59300; HLA-B*15:01; PAX3; ENSG00000135903; TAA
GQYGQSKPWTF

SEQ ID NO: 59301 - protein, 11 aa, Homo sapiens
  misc_feature: Table A; Target 59301; HLA-B*15:03; PAX3; ENSG00000135903; TAA
GQYGQSKPWTF

SEQ ID NO: 59302 - protein, 11 aa, Homo sapiens
  misc_feature: Table A; Target 59302; HLA-B*27:02; PAX3; ENSG00000135903; TAA
GQYGQSKPWTF

SEQ ID NO: 59303 - protein, 11 aa, Homo sapiens
  misc_feature: Table A; Target 59303; HLA-B*27:05; PAX3; ENSG00000135903; TAA
GQYGQSKPWTF

SEQ ID NO: 59304 - protein, 11 aa, Homo sapiens
  misc_feature: Table A; Target 59304; HLA-B*38:01; PAX3; ENSG00000135903; TAA
GQYGQSKPWTF

SEQ ID NO: 59305 - protein, 11 aa, Homo sapiens
  misc_feature: Table A; Target 59305; HLA-B*40:02; PAX3; ENSG00000135903; TAA
GQYGQSKPWTF

SEQ ID NO: 59306 - protein, 11 aa, Homo sapiens
  misc_feature: Table A; Target 59306; HLA-B*44:02; PAX3; ENSG00000135903; TAA
GQYGQSKPWTF

SEQ ID NO: 59307 - protein, 11 aa, Homo sapiens
  misc_feature: Table A; Target 59307; HLA-B*44:03; PAX3; ENSG00000135903; TAA
GQYGQSKPWTF

SEQ ID NO: 59308 - protein, 11 aa, Homo sapiens
  misc_feature: Table A; Target 59308; HLA-B*55:01; PAX3; ENSG00000135903; TAA
GQYGQSKPWTF

SEQ ID NO: 59309 - protein, 11 aa, Homo sapiens
  misc_feature: Table A; Target 59309; HLA-B*57:01; PAX3; ENSG00000135903; TAA
GQYGQSKPWTF

SEQ ID NO: 59310 - protein, 11 aa, Homo sapiens
  misc_feature: Table A; Target 59310; HLA-B*58:01; PAX3; ENSG00000135903; TAA
GQYGQSKPWTF

SEQ ID NO: 59311 - protein, 11 aa, Homo sapiens
  misc_feature: Table A; Target 59311; HLA-C*02:02; PAX3; ENSG00000135903; TAA
GQYGQSKPWTF

SEQ ID NO: 59312 - protein, 11 aa, Homo sapiens
  misc_feature: Table A; Target 59312; HLA-C*04:01; PAX3; ENSG00000135903; TAA
GQYGQSKPWTF

SEQ ID NO: 59313 - protein, 11 aa, Homo sapiens
  misc_feature: Table A; Target 59313; HLA-C*06:02; PAX3; ENSG00000135903; TAA
GQYGQSKPWTF

SEQ ID NO: 59314 - protein, 11 aa, Homo sapiens
  misc_feature: Table A; Target 59314; HLA-C*07:01; PAX3; ENSG00000135903; TAA
GQYGQSKPWTF

SEQ ID NO: 59315 - protein, 11 aa, Homo sapiens
  misc_feature: Table A; Target 59315; HLA-C*07:04; PAX3; ENSG00000135903; TAA
GQYGQSKPWTF

SEQ ID NO: 59316 - protein, 11 aa, Homo sapiens
  misc_feature: Table A; Target 59316; HLA-C*12:03; PAX3; ENSG00000135903; TAA
GQYGQSKPWTF

SEQ ID NO: 59317 - protein, 11 aa, Homo sapiens
  misc_feature: Table A; Target 59317; HLA-C*16:01; PAX3; ENSG00000135903; TAA
GQYGQSKPWTF

SEQ ID NO: 59318 - protein, 11 aa, Homo sapiens
  misc_feature: Table A; Target 59318; HLA-C*16:02; PAX3; ENSG00000135903; TAA
GQYGQSKPWTF

SEQ ID NO: 59319 - protein, 11 aa, Homo sapiens
  misc_feature: Table A; Target 59319; HLA-C*16:04; PAX3; ENSG00000135903; TAA
GQYGQSKPWTF

SEQ ID NO: 59320 - protein, 10 aa, Homo sapiens
  misc_feature: Table A; Target 59320; HLA-A*29:02; PAX3; ENSG00000135903; TAA
GVPHQPQTDY

SEQ ID NO: 59321 - protein, 10 aa, Homo sapiens
  misc_feature: Table A; Target 59321; HLA-A*30:02; PAX3; ENSG00000135903; TAA
GVPHQPQTDY

SEQ ID NO: 59322 - protein, 10 aa, Homo sapiens
  misc_feature: Table A; Target 59322; HLA-B*15:01; PAX3; ENSG00000135903; TAA
GVPHQPQTDY

SEQ ID NO: 59323 - protein, 10 aa, Homo sapiens
  misc_feature: Table A; Target 59323; HLA-A*29:02; PAX3; ENSG00000135903; TAA
GYSMDPVTGY

SEQ ID NO: 59324 - protein, 10 aa, Homo sapiens
  misc_feature: Table A; Target 59324; HLA-A*30:02; PAX3; ENSG00000135903; TAA
GYSMDPVTGY

SEQ ID NO: 59325 - protein, 10 aa, Homo sapiens
  misc_feature: Table A; Target 59325; HLA-B*15:01; PAX3; ENSG00000135903; TAA
GYSMDPVTGY

SEQ ID NO: 59326 - protein, 10 aa, Homo sapiens
  misc_feature: Table A; Target 59326; HLA-C*14:02; PAX3; ENSG00000135903; TAA
GYSMDPVTGY

SEQ ID NO: 59327 - protein, 10 aa, Homo sapiens
  misc_feature: Table A; Target 59327; HLA-C*16:04; PAX3; ENSG00000135903; TAA
GYSMDPVTGY

SEQ ID NO: 59328 - protein, 10 aa, Homo sapiens
  misc_feature: Table A; Target 59328; HLA-B*35:01; PAX3; ENSG00000135903; TAA
HGFSSYTDSF

SEQ ID NO: 59329 - protein, 9 aa, Homo sapiens
  misc_feature: Table A; Target 59329; HLA-B*54:01; PAX3; ENSG00000135903; TAA
HLIPGGFPP

SEQ ID NO: 59330 - protein, 11 aa, Homo sapiens
  misc_feature: Table A; Target 59330; HLA-A*02:01; PAX3; ENSG00000135903; TAA
HLIPGGFPPTA

SEQ ID NO: 59331 - protein, 11 aa, Homo sapiens
  misc_feature: Table A; Target 59331; HLA-A*02:03; PAX3; ENSG00000135903; TAA
HLIPGGFPPTA

SEQ ID NO: 59332 - protein, 11 aa, Homo sapiens
  misc_feature: Table A; Target 59332; HLA-B*54:01; PAX3; ENSG00000135903; TAA
HLIPGGFPPTA

SEQ ID NO: 59333 - protein, 8 aa, Homo sapiens
  misc_feature: Table A; Target 59333; HLA-B*08:01; PAX3; ENSG00000135903; TAA
HMKSLDSL

SEQ ID NO: 59334 - protein, 9 aa, Homo sapiens
  misc_feature: Table A; Target 59334; HLA-B*13:02; PAX3; ENSG00000135903; TAA
HQPQTDYAL

SEQ ID NO: 59335 - protein, 9 aa, Homo sapiens
  misc_feature: Table A; Target 59335; HLA-B*27:05; PAX3; ENSG00000135903; TAA
HQPQTDYAL

SEQ ID NO: 59336 - protein, 9 aa, Homo sapiens
  misc_feature: Table A; Target 59336; HLA-B*35:03; PAX3; ENSG00000135903; TAA
HQPQTDYAL

SEQ ID NO: 59337 - protein, 9 aa, Homo sapiens
  misc_feature: Table A; Target 59337; HLA-B*38:01; PAX3; ENSG00000135903; TAA
HQPQTDYAL

SEQ ID NO: 59338 - protein, 9 aa, Homo sapiens
  misc_feature: Table A; Target 59338; HLA-B*39:01; PAX3; ENSG00000135903; TAA
HQPQTDYAL

SEQ ID NO: 59339 - protein, 10 aa, Homo sapiens
  misc_feature: Table A; Target 59339; HLA-A*03:01; PAX3; ENSG00000135903; TAA
HSIDGILSER

SEQ ID NO: 59340 - protein, 10 aa, Homo sapiens
  misc_feature: Table A; Target 59340; HLA-A*03:02; PAX3; ENSG00000135903; TAA
HSIDGILSER

SEQ ID NO: 59341 - protein, 10 aa, Homo sapiens
  misc_feature: Table A; Target 59341; HLA-A*11:01; PAX3; ENSG00000135903; TAA
HSIDGILSER

SEQ ID NO: 59342 - protein, 10 aa, Homo sapiens
  misc_feature: Table A; Target 59342; HLA-A*25:01; PAX3; ENSG00000135903; TAA
HSIDGILSER

SEQ ID NO: 59343 - protein, 10 aa, Homo sapiens
  misc_feature: Table A; Target 59343; HLA-A*26:01; PAX3; ENSG00000135903; TAA
HSIDGILSER

SEQ ID NO: 59344 - protein, 10 aa, Homo sapiens
  misc_feature: Table A; Target 59344; HLA-A*31:01; PAX3; ENSG00000135903; TAA
HSIDGILSER

SEQ ID NO: 59345 - protein, 10 aa, Homo sapiens
  misc_feature: Table A; Target 59345; HLA-A*33:01; PAX3; ENSG00000135903; TAA
HSIDGILSER

SEQ ID NO: 59346 - protein, 10 aa, Homo sapiens
  misc_feature: Table A; Target 59346; HLA-A*33:03; PAX3; ENSG00000135903; TAA
HSIDGILSER

SEQ ID NO: 59347 - protein, 10 aa, Homo sapiens
  misc_feature: Table A; Target 59347; HLA-A*68:01; PAX3; ENSG00000135903; TAA
HSIDGILSER

SEQ ID NO: 59348 - protein, 10 aa, Homo sapiens
  misc_feature: Table A; Target 59348; HLA-A*68:02; PAX3; ENSG00000135903; TAA
HSIDGILSER

SEQ ID NO: 59349 - protein, 10 aa, Homo sapiens
  misc_feature: Table A; Target 59349; HLA-B*27:02; PAX3; ENSG00000135903; TAA
HSIDGILSER

SEQ ID NO: 59350 - protein, 10 aa, Homo sapiens
  misc_feature: Table A; Target 59350; HLA-B*46:01; PAX3; ENSG00000135903; TAA
HSIDGILSER

SEQ ID NO: 59351 - protein, 10 aa, Homo sapiens
  misc_feature: Table A; Target 59351; HLA-B*54:01; PAX3; ENSG00000135903; TAA
HSIDGILSER

SEQ ID NO: 59352 - protein, 10 aa, Homo sapiens
  misc_feature: Table A; Target 59352; HLA-B*57:01; PAX3; ENSG00000135903; TAA
HSIDGILSER

SEQ ID NO: 59353 - protein, 10 aa, Homo sapiens
  misc_feature: Table A; Target 59353; HLA-C*07:06; PAX3; ENSG00000135903; TAA
HSIDGILSER

SEQ ID NO: 59354 - protein, 11 aa, Homo sapiens
  misc_feature: Table A; Target 59354; HLA-A*68:02; PAX3; ENSG00000135903; TAA
HSIDGILSERA

SEQ ID NO: 59355 - protein, 8 aa, Homo sapiens
  misc_feature: Table A; Target 59355; HLA-B*27:02; PAX3; ENSG00000135903; TAA
IDGILSER

SEQ ID NO: 59356 - protein, 10 aa, Homo sapiens
  misc_feature: Table A; Target 59356; HLA-C*07:01; PAX3; ENSG00000135903; TAA
IDGILSERAS

SEQ ID NO: 59357 - protein, 9 aa, Homo sapiens
  misc_feature: Table A; Target 59357; HLA-B*35:03; PAX3; ENSG00000135903; TAA
IDSEPDLPL

SEQ ID NO: 59358 - protein, 9 aa, Homo sapiens
  misc_feature: Table A; Target 59358; HLA-B*37:01; PAX3; ENSG00000135903; TAA
IDSEPDLPL

SEQ ID NO: 59359 - protein, 10 aa, Homo sapiens
  misc_feature: Table A; Target 59359; HLA-A*11:01; PAX3; ENSG00000135903; TAA
IDSEPDLPLK

SEQ ID NO: 59360 - protein, 10 aa, Homo sapiens
  misc_feature: Table A; Target 59360; HLA-B*27:02; PAX3; ENSG00000135903; TAA
IDSEPDLPLK

SEQ ID NO: 59361 - protein, 11 aa, Homo sapiens
  misc_feature: Table A; Target 59361; HLA-A*68:01; PAX3; ENSG00000135903; TAA
IDSEPDLPLKR

SEQ ID NO: 59362 - protein, 11 aa, Homo sapiens
  misc_feature: Table A; Target 59362; HLA-C*07:06; PAX3; ENSG00000135903; TAA
IDSEPDLPLKR

SEQ ID NO: 59363 - protein, 9 aa, Homo sapiens
  misc_feature: Table A; Target 59363; HLA-C*16:02; PAX3; ENSG00000135903; TAA
IGGSKPKQV

SEQ ID NO: 59364 - protein, 9 aa, Homo sapiens
  misc_feature: Table A; Target 59364; HLA-B*13:02; PAX3; ENSG00000135903; TAA
IGNGLSPQV

SEQ ID NO: 59365 - protein, 9 aa, Homo sapiens
  misc_feature: Table A; Target 59365; HLA-C*06:02; PAX3; ENSG00000135903; TAA
IGNGLSPQV

SEQ ID NO: 59366 - protein, 9 aa, Homo sapiens
  misc_feature: Table A; Target 59366; HLA-C*16:02; PAX3; ENSG00000135903; TAA
IGNGLSPQV

SEQ ID NO: 59367 - protein, 9 aa, Homo sapiens
  misc_feature: Table A; Target 59367; HLA-C*16:01; PAX3; ENSG00000135903; TAA
ILSERASAP

SEQ ID NO: 59368 - protein, 9 aa, Homo sapiens
  misc_feature: Table A; Target 59368; HLA-C*16:02; PAX3; ENSG00000135903; TAA
ILSERASAP

SEQ ID NO: 59369 - protein, 10 aa, Homo sapiens
  misc_feature: Table A; Target 59369; HLA-C*04:01; PAX3; ENSG00000135903; TAA
ILSERASAPQ

SEQ ID NO: 59370 - protein, 9 aa, Homo sapiens
  misc_feature: Table A; Target 59370; HLA-B*07:02; PAX3; ENSG00000135903; TAA
IPGGFPPTA

SEQ ID NO: 59371 - protein, 9 aa, Homo sapiens
  misc_feature: Table A; Target 59371; HLA-B*35:03; PAX3; ENSG00000135903; TAA
IPGGFPPTA

SEQ ID NO: 59372 - protein, 9 aa, Homo sapiens
  misc_feature: Table A; Target 59372; HLA-B*51:01; PAX3; ENSG00000135903; TAA
IPGGFPPTA

SEQ ID NO: 59373 - protein, 9 aa, Homo sapiens
  misc_feature: Table A; Target 59373; HLA-B*54:01; PAX3; ENSG00000135903; TAA
IPGGFPPTA

SEQ ID NO: 59374 - protein, 9 aa, Homo sapiens
  misc_feature: Table A; Target 59374; HLA-B*55:01; PAX3; ENSG00000135903; TAA
IPGGFPPTA

SEQ ID NO: 59375 - protein, 9 aa, Homo sapiens
  misc_feature: Table A; Target 59375; HLA-B*56:01; PAX3; ENSG00000135903; TAA
IPGGFPPTA

SEQ ID NO: 59376 - protein, 10 aa, Homo sapiens
  misc_feature: Table A; Target 59376; HLA-B*07:02; PAX3; ENSG00000135903; TAA
IPGGFPPTAM

SEQ ID NO: 59377 - protein, 10 aa, Homo sapiens
  misc_feature: Table A; Target 59377; HLA-B*35:01; PAX3; ENSG00000135903; TAA
IPGGFPPTAM

SEQ ID NO: 59378 - protein, 10 aa, Homo sapiens
  misc_feature: Table A; Target 59378; HLA-B*35:03; PAX3; ENSG00000135903; TAA
IPGGFPPTAM

SEQ ID NO: 59379 - protein, 10 aa, Homo sapiens
  misc_feature: Table A; Target 59379; HLA-B*56:01; PAX3; ENSG00000135903; TAA
IPGGFPPTAM

SEQ ID NO: 59380 - protein, 10 aa, Homo sapiens
  misc_feature: Table A; Target 59380; HLA-C*07:02; PAX3; ENSG00000135903; TAA
IPGGFPPTAM

SEQ ID NO: 59381 - protein, 10 aa, Homo sapiens
  misc_feature: Table A; Target 59381; HLA-B*56:01; PAX3; ENSG00000135903; TAA
IPSNPDSSSA

SEQ ID NO: 59382 - protein, 11 aa, Homo sapiens
  misc_feature: Table A; Target 59382; HLA-A*01:01; PAX3; ENSG00000135903; TAA
IPSNPDSSSAY

SEQ ID NO: 59383 - protein, 11 aa, Homo sapiens
  misc_feature: Table A; Target 59383; HLA-A*26:01; PAX3; ENSG00000135903; TAA
IPSNPDSSSAY

SEQ ID NO: 59384 - protein, 11 aa, Homo sapiens
  misc_feature: Table A; Target 59384; HLA-A*30:02; PAX3; ENSG00000135903; TAA
IPSNPDSSSAY

SEQ ID NO: 59385 - protein, 11 aa, Homo sapiens
  misc_feature: Table A; Target 59385; HLA-B*15:01; PAX3; ENSG00000135903; TAA
IPSNPDSSSAY

SEQ ID NO: 59386 - protein, 11 aa, Homo sapiens
  misc_feature: Table A; Target 59386; HLA-B*15:03; PAX3; ENSG00000135903; TAA
IPSNPDSSSAY

SEQ ID NO: 59387 - protein, 11 aa, Homo sapiens
  misc_feature: Table A; Target 59387; HLA-B*35:01; PAX3; ENSG00000135903; TAA
IPSNPDSSSAY

SEQ ID NO: 59388 - protein, 11 aa, Homo sapiens
  misc_feature: Table A; Target 59388; HLA-B*39:01; PAX3; ENSG00000135903; TAA
IPSNPDSSSAY

SEQ ID NO: 59389 - protein, 11 aa, Homo sapiens
  misc_feature: Table A; Target 59389; HLA-B*46:01; PAX3; ENSG00000135903; TAA
IPSNPDSSSAY

SEQ ID NO: 59390 - protein, 11 aa, Homo sapiens
  misc_feature: Table A; Target 59390; HLA-B*55:01; PAX3; ENSG00000135903; TAA
IPSNPDSSSAY

SEQ ID NO: 59391 - protein, 11 aa, Homo sapiens
  misc_feature: Table A; Target 59391; HLA-C*02:02; PAX3; ENSG00000135903; TAA
IPSNPDSSSAY

SEQ ID NO: 59392 - protein, 11 aa, Homo sapiens
  misc_feature: Table A; Target 59392; HLA-C*03:03; PAX3; ENSG00000135903; TAA
IPSNPDSSSAY

SEQ ID NO: 59393 - protein, 11 aa, Homo sapiens
  misc_feature: Table A; Target 59393; HLA-C*04:01; PAX3; ENSG00000135903; TAA
IPSNPDSSSAY

SEQ ID NO: 59394 - protein, 11 aa, Homo sapiens
  misc_feature: Table A; Target 59394; HLA-C*05:01; PAX3; ENSG00000135903; TAA
IPSNPDSSSAY

SEQ ID NO: 59395 - protein, 11 aa, Homo sapiens
  misc_feature: Table A; Target 59395; HLA-C*07:04; PAX3; ENSG00000135903; TAA
IPSNPDSSSAY

SEQ ID NO: 59396 - protein, 11 aa, Homo sapiens
  misc_feature: Table A; Target 59396; HLA-C*07:06; PAX3; ENSG00000135903; TAA
IPSNPDSSSAY

SEQ ID NO: 59397 - protein, 11 aa, Homo sapiens
  misc_feature: Table A; Target 59397; HLA-C*14:02; PAX3; ENSG00000135903; TAA
IPSNPDSSSAY

SEQ ID NO: 59398 - protein, 9 aa, Homo sapiens
  misc_feature: Table A; Target 59398; HLA-A*32:01; PAX3; ENSG00000135903; TAA
KQAGANQLM

SEQ ID NO: 59399 - protein, 9 aa, Homo sapiens
  misc_feature: Table A; Target 59399; HLA-B*13:02; PAX3; ENSG00000135903; TAA
KQAGANQLM

SEQ ID NO: 59400 - protein, 9 aa, Homo sapiens
  misc_feature: Table A; Target 59400; HLA-B*15:01; PAX3; ENSG00000135903; TAA
KQAGANQLM

SEQ ID NO: 59401 - protein, 9 aa, Homo sapiens
  misc_feature: Table A; Target 59401; HLA-B*15:03; PAX3; ENSG00000135903; TAA
KQAGANQLM

SEQ ID NO: 59402 - protein, 9 aa, Homo sapiens
  misc_feature: Table A; Target 59402; HLA-B*27:05; PAX3; ENSG00000135903; TAA
KQAGANQLM

SEQ ID NO: 59403 - protein, 9 aa, Homo sapiens
  misc_feature: Table A; Target 59403; HLA-B*38:01; PAX3; ENSG00000135903; TAA
KQAGANQLM

SEQ ID NO: 59404 - protein, 9 aa, Homo sapiens
  misc_feature: Table A; Target 59404; HLA-B*58:01; PAX3; ENSG00000135903; TAA
KQAGANQLM

SEQ ID NO: 59405 - protein, 9 aa, Homo sapiens
  misc_feature: Table A; Target 59405; HLA-C*06:02; PAX3; ENSG00000135903; TAA
KQAGANQLM

SEQ ID NO: 59406 - protein, 9 aa, Homo sapiens
  misc_feature: Table A; Target 59406; HLA-C*07:04; PAX3; ENSG00000135903; TAA
KQAGANQLM

SEQ ID NO: 59407 - protein, 9 aa, Homo sapiens
  misc_feature: Table A; Target 59407; HLA-C*12:03; PAX3; ENSG00000135903; TAA
KQAGANQLM

SEQ ID NO: 59408 - protein, 10 aa, Homo sapiens
  misc_feature: Table A; Target 59408; HLA-C*06:02; PAX3; ENSG00000135903; TAA
KQAGANQLMA

SEQ ID NO: 59409 - protein, 11 aa, Homo sapiens
  misc_feature: Table A; Target 59409; HLA-A*24:02; PAX3; ENSG00000135903; TAA
KQAGANQLMAF

SEQ ID NO: 59410 - protein, 11 aa, Homo sapiens
  misc_feature: Table A; Target 59410; HLA-A*26:01; PAX3; ENSG00000135903; TAA
KQAGANQLMAF

SEQ ID NO: 59411 - protein, 11 aa, Homo sapiens
  misc_feature: Table A; Target 59411; HLA-A*30:02; PAX3; ENSG00000135903; TAA
KQAGANQLMAF

SEQ ID NO: 59412 - protein, 11 aa, Homo sapiens
  misc_feature: Table A; Target 59412; HLA-A*32:01; PAX3; ENSG00000135903; TAA
KQAGANQLMAF

SEQ ID NO: 59413 - protein, 11 aa, Homo sapiens
  misc_feature: Table A; Target 59413; HLA-B*15:01; PAX3; ENSG00000135903; TAA
KQAGANQLMAF

SEQ ID NO: 59414 - protein, 11 aa, Homo sapiens
  misc_feature: Table A; Target 59414; HLA-B*15:03; PAX3; ENSG00000135903; TAA
KQAGANQLMAF

SEQ ID NO: 59415 - protein, 11 aa, Homo sapiens
  misc_feature: Table A; Target 59415; HLA-B*46:01; PAX3; ENSG00000135903; TAA
KQAGANQLMAF

SEQ ID NO: 59416 - protein, 11 aa, Homo sapiens
  misc_feature: Table A; Target 59416; HLA-C*02:02; PAX3; ENSG00000135903; TAA
KQAGANQLMAF

SEQ ID NO: 59417 - protein, 11 aa, Homo sapiens
  misc_feature: Table A; Target 59417; HLA-C*16:04; PAX3; ENSG00000135903; TAA
KQAGANQLMAF

SEQ ID NO: 59418 - protein, 8 aa, Homo sapiens
  misc_feature: Table A; Target 59418; HLA-B*13:02; PAX3; ENSG00000135903; TAA
KQVTTPDV

SEQ ID NO: 59419 - protein, 10 aa, Homo sapiens
  misc_feature: Table A; Target 59419; HLA-A*03:02; PAX3; ENSG00000135903; TAA
KQVTTPDVEK

SEQ ID NO: 59420 - protein, 10 aa, Homo sapiens
  misc_feature: Table A; Target 59420; HLA-A*11:01; PAX3; ENSG00000135903; TAA
KQVTTPDVEK

SEQ ID NO: 59421 - protein, 10 aa, Homo sapiens
  misc_feature: Table A; Target 59421; HLA-A*30:02; PAX3; ENSG00000135903; TAA
KSLDSLPTSQ

SEQ ID NO: 59422 - protein, 10 aa, Homo sapiens
  misc_feature: Table A; Target 59422; HLA-A*32:01; PAX3; ENSG00000135903; TAA
KSLDSLPTSQ

SEQ ID NO: 59423 - protein, 10 aa, Homo sapiens
  misc_feature: Table A; Target 59423; HLA-B*58:01; PAX3; ENSG00000135903; TAA
KSLDSLPTSQ

SEQ ID NO: 59424 - protein, 10 aa, Homo sapiens
  misc_feature: Table A; Target 59424; HLA-C*06:02; PAX3; ENSG00000135903; TAA
KSLDSLPTSQ

SEQ ID NO: 59425 - protein, 10 aa, Homo sapiens
  misc_feature: Table A; Target 59425; HLA-C*07:02; PAX3; ENSG00000135903; TAA
KSLDSLPTSQ

SEQ ID NO: 59426 - protein, 10 aa, Homo sapiens
  misc_feature: Table A; Target 59426; HLA-C*12:03; PAX3; ENSG00000135903; TAA
KSLDSLPTSQ

SEQ ID NO: 59427 - protein, 8 aa, Homo sapiens
  misc_feature: Table A; Target 59427; HLA-B*51:01; PAX3; ENSG00000135903; TAA
LAGAVPRM

SEQ ID NO: 59428 - protein, 8 aa, Homo sapiens
  misc_feature: Table A; Target 59428; HLA-B*58:01; PAX3; ENSG00000135903; TAA
LAGAVPRM

SEQ ID NO: 59429 - protein, 8 aa, Homo sapiens
  misc_feature: Table A; Target 59429; HLA-C*12:03; PAX3; ENSG00000135903; TAA
LAGAVPRM

SEQ ID NO: 59430 - protein, 8 aa, Homo sapiens
  misc_feature: Table A; Target 59430; HLA-C*16:01; PAX3; ENSG00000135903; TAA
LAGAVPRM

SEQ ID NO: 59431 - protein, 9 aa, Homo sapiens
  misc_feature: Table A; Target 59431; HLA-C*02:02; PAX3; ENSG00000135903; TAA
LAGAVPRMM

SEQ ID NO: 59432 - protein, 9 aa, Homo sapiens
  misc_feature: Table A; Target 59432; HLA-C*12:03; PAX3; ENSG00000135903; TAA
LAGAVPRMM

SEQ ID NO: 59433 - protein, 9 aa, Homo sapiens
  misc_feature: Table A; Target 59433; HLA-C*16:01; PAX3; ENSG00000135903; TAA
LAGAVPRMM

SEQ ID NO: 59434 - protein, 10 aa, Homo sapiens
  misc_feature: Table A; Target 59434; HLA-A*30:02; PAX3; ENSG00000135903; TAA
LDSLPTSQSY

SEQ ID NO: 59435 - protein, 10 aa, Homo sapiens
  misc_feature: Table A; Target 59435; HLA-B*15:03; PAX3; ENSG00000135903; TAA
LDSLPTSQSY

SEQ ID NO: 59436 - protein, 10 aa, Homo sapiens
  misc_feature: Table A; Target 59436; HLA-B*18:01; PAX3; ENSG00000135903; TAA
LDSLPTSQSY

SEQ ID NO: 59437 - protein, 10 aa, Homo sapiens
  misc_feature: Table A; Target 59437; HLA-B*27:02; PAX3; ENSG00000135903; TAA
LDSLPTSQSY

SEQ ID NO: 59438 - protein, 10 aa, Homo sapiens
  misc_feature: Table A; Target 59438; HLA-B*44:02; PAX3; ENSG00000135903; TAA
LDSLPTSQSY

SEQ ID NO: 59439 - protein, 10 aa, Homo sapiens
  misc_feature: Table A; Target 59439; HLA-B*44:03; PAX3; ENSG00000135903; TAA
LDSLPTSQSY

SEQ ID NO: 59440 - protein, 10 aa, Homo sapiens
  misc_feature: Table A; Target 59440; HLA-C*04:01; PAX3; ENSG00000135903; TAA
LDSLPTSQSY

SEQ ID NO: 59441 - protein, 10 aa, Homo sapiens
  misc_feature: Table A; Target 59441; HLA-C*07:01; PAX3; ENSG00000135903; TAA
LDSLPTSQSY

SEQ ID NO: 59442 - protein, 10 aa, Homo sapiens
  misc_feature: Table A; Target 59442; HLA-C*07:02; PAX3; ENSG00000135903; TAA
LDSLPTSQSY

SEQ ID NO: 59443 - protein, 10 aa, Homo sapiens
  misc_feature: Table A; Target 59443; HLA-C*16:02; PAX3; ENSG00000135903; TAA
LDSLPTSQSY

SEQ ID NO: 59444 - protein, 10 aa, Homo sapiens
  misc_feature: Table A; Target 59444; HLA-C*16:04; PAX3; ENSG00000135903; TAA
LDSLPTSQSY

SEQ ID NO: 59445 - protein, 8 aa, Homo sapiens
  misc_feature: Table A; Target 59445; HLA-B*18:01; PAX3; ENSG00000135903; TAA
LEELERAF

SEQ ID NO: 59446 - protein, 9 aa, Homo sapiens
  misc_feature: Table A; Target 59446; HLA-A*30:01; PAX3; ENSG00000135903; TAA
LEPTTTVSA

SEQ ID NO: 59447 - protein, 9 aa, Homo sapiens
  misc_feature: Table A; Target 59447; HLA-B*40:01; PAX3; ENSG00000135903; TAA
LEPTTTVSA

SEQ ID NO: 59448 - protein, 9 aa, Homo sapiens
  misc_feature: Table A; Target 59448; HLA-B*40:02; PAX3; ENSG00000135903; TAA
LEPTTTVSA

SEQ ID NO: 59449 - protein, 9 aa, Homo sapiens
  misc_feature: Table A; Target 59449; HLA-B*49:01; PAX3; ENSG00000135903; TAA
LEPTTTVSA

SEQ ID NO: 59450 - protein, 9 aa, Homo sapiens
  misc_feature: Table A; Target 59450; HLA-B*56:01; PAX3; ENSG00000135903; TAA
LEPTTTVSA

SEQ ID NO: 59451 - protein, 9 aa, Homo sapiens
  misc_feature: Table A; Target 59451; HLA-C*01:02; PAX3; ENSG00000135903; TAA
LEPTTTVSA

SEQ ID NO: 59452 - protein, 9 aa, Homo sapiens
  misc_feature: Table A; Target 59452; HLA-C*14:02; PAX3; ENSG00000135903; TAA
LEPTTTVSA

SEQ ID NO: 59453 - protein, 10 aa, Homo sapiens
  misc_feature: Table A; Target 59453; HLA-A*02:01; PAX3; ENSG00000135903; TAA
LIPGGFPPTA

SEQ ID NO: 59454 - protein, 10 aa, Homo sapiens
  misc_feature: Table A; Target 59454; HLA-A*02:07; PAX3; ENSG00000135903; TAA
LIPGGFPPTA

SEQ ID NO: 59455 - protein, 11 aa, Homo sapiens
  misc_feature: Table A; Target 59455; HLA-B*51:01; PAX3; ENSG00000135903; TAA
LPPSTVHQSTI

SEQ ID NO: 59456 - protein, 8 aa, Homo sapiens
  misc_feature: Table A; Target 59456; HLA-B*08:01; PAX3; ENSG00000135903; TAA
LPSTRHGF

SEQ ID NO: 59457 - protein, 8 aa, Homo sapiens
  misc_feature: Table A; Target 59457; HLA-C*16:01; PAX3; ENSG00000135903; TAA
LPSTRHGF

SEQ ID NO: 59458 - protein, 9 aa, Homo sapiens
  misc_feature: Table A; Target 59458; HLA-B*07:02; PAX3; ENSG00000135903; TAA
LPTSQSYCP

SEQ ID NO: 59459 - protein, 9 aa, Homo sapiens
  misc_feature: Table A; Target 59459; HLA-B*54:01; PAX3; ENSG00000135903; TAA
LPTSQSYCP

SEQ ID NO: 59460 - protein, 9 aa, Homo sapiens
  misc_feature: Table A; Target 59460; HLA-B*56:01; PAX3; ENSG00000135903; TAA
LPTSQSYCP

SEQ ID NO: 59461 - protein, 9 aa, Homo sapiens
  misc_feature: Table A; Target 59461; HLA-B*54:01; PAX3; ENSG00000135903; TAA
LPTYQLSET

SEQ ID NO: 59462 - protein, 11 aa, Homo sapiens
  misc_feature: Table A; Target 59462; HLA-B*35:01; PAX3; ENSG00000135903; TAA
LPTYQLSETSY

SEQ ID NO: 59463 - protein, 11 aa, Homo sapiens
  misc_feature: Table A; Target 59463; HLA-B*55:01; PAX3; ENSG00000135903; TAA
LPTYQLSETSY

SEQ ID NO: 59464 - protein, 8 aa, Homo sapiens
  misc_feature: Table A; Target 59464; HLA-C*01:02; PAX3; ENSG00000135903; TAA
LSPLTGGL

SEQ ID NO: 59465 - protein, 9 aa, Homo sapiens
  misc_feature: Table A; Target 59465; HLA-B*54:01; PAX3; ENSG00000135903; TAA
MAFNHLIPG

SEQ ID NO: 59466 - protein, 8 aa, Homo sapiens
  misc_feature: Table A; Target 59466; HLA-C*06:02; PAX3; ENSG00000135903; TAA
MDPVTGYQ

SEQ ID NO: 59467 - protein, 9 aa, Homo sapiens
  misc_feature: Table A; Target 59467; HLA-A*29:02; PAX3; ENSG00000135903; TAA
MDPVTGYQY

SEQ ID NO: 59468 - protein, 9 aa, Homo sapiens
  misc_feature: Table A; Target 59468; HLA-B*15:03; PAX3; ENSG00000135903; TAA
MDPVTGYQY

SEQ ID NO: 59469 - protein, 9 aa, Homo sapiens
  misc_feature: Table A; Target 59469; HLA-B*18:01; PAX3; ENSG00000135903; TAA
MDPVTGYQY

SEQ ID NO: 59470 - protein, 9 aa, Homo sapiens
  misc_feature: Table A; Target 59470; HLA-B*35:01; PAX3; ENSG00000135903; TAA
MDPVTGYQY

SEQ ID NO: 59471 - protein, 9 aa, Homo sapiens
  misc_feature: Table A; Target 59471; HLA-C*01:02; PAX3; ENSG00000135903; TAA
MDPVTGYQY

SEQ ID NO: 59472 - protein, 9 aa, Homo sapiens
  misc_feature: Table A; Target 59472; HLA-C*04:01; PAX3; ENSG00000135903; TAA
MDPVTGYQY

SEQ ID NO: 59473 - protein, 9 aa, Homo sapiens
  misc_feature: Table A; Target 59473; HLA-C*07:01; PAX3; ENSG00000135903; TAA
MDPVTGYQY

SEQ ID NO: 59474 - protein, 9 aa, Homo sapiens
  misc_feature: Table A; Target 59474; HLA-C*07:04; PAX3; ENSG00000135903; TAA
MDPVTGYQY

SEQ ID NO: 59475 - protein, 9 aa, Homo sapiens
  misc_feature: Table A; Target 59475; HLA-C*14:02; PAX3; ENSG00000135903; TAA
MDPVTGYQY

SEQ ID NO: 59476 - protein, 10 aa, Homo sapiens
  misc_feature: Table A; Target 59476; HLA-C*04:01; PAX3; ENSG00000135903; TAA
MDPVTGYQYG

SEQ ID NO: 59477 - protein, 10 aa, Homo sapiens
  misc_feature: Table A; Target 59477; HLA-A*29:02; PAX3; ENSG00000135903; TAA
MMRPGPGQNY

SEQ ID NO: 59478 - protein, 10 aa, Homo sapiens
  misc_feature: Table A; Target 59478; HLA-A*30:02; PAX3; ENSG00000135903; TAA
MMRPGPGQNY

SEQ ID NO: 59479 - protein, 10 aa, Homo sapiens
  misc_feature: Table A; Target 59479; HLA-A*32:01; PAX3; ENSG00000135903; TAA
MMRPGPGQNY

SEQ ID NO: 59480 - protein, 10 aa, Homo sapiens
  misc_feature: Table A; Target 59480; HLA-B*15:01; PAX3; ENSG00000135903; TAA
MMRPGPGQNY

SEQ ID NO: 59481 - protein, 10 aa, Homo sapiens
  misc_feature: Table A; Target 59481; HLA-B*15:03; PAX3; ENSG00000135903; TAA
MMRPGPGQNY

SEQ ID NO: 59482 - protein, 10 aa, Homo sapiens
  misc_feature: Table A; Target 59482; HLA-B*46:01; PAX3; ENSG00000135903; TAA
MMRPGPGQNY

SEQ ID NO: 59483 - protein, 10 aa, Homo sapiens
  misc_feature: Table A; Target 59483; HLA-B*58:01; PAX3; ENSG00000135903; TAA
MMRPGPGQNY

SEQ ID NO: 59484 - protein, 10 aa, Homo sapiens
  misc_feature: Table A; Target 59484; HLA-C*07:04; PAX3; ENSG00000135903; TAA
MMRPGPGQNY

SEQ ID NO: 59485 - protein, 10 aa, Homo sapiens
  misc_feature: Table A; Target 59485; HLA-C*14:02; PAX3; ENSG00000135903; TAA
MMRPGPGQNY

SEQ ID NO: 59486 - protein, 9 aa, Homo sapiens
  misc_feature: Table A; Target 59486; HLA-C*01:02; PAX3; ENSG00000135903; TAA
MNPTIGNGL

SEQ ID NO: 59487 - protein, 9 aa, Homo sapiens
  misc_feature: Table A; Target 59487; HLA-A*23:01; PAX3; ENSG00000135903; TAA
MPTLPTYQL

SEQ ID NO: 59488 - protein, 9 aa, Homo sapiens
  misc_feature: Table A; Target 59488; HLA-B*07:02; PAX3; ENSG00000135903; TAA
MPTLPTYQL

SEQ ID NO: 59489 - protein, 9 aa, Homo sapiens
  misc_feature: Table A; Target 59489; HLA-B*08:01; PAX3; ENSG00000135903; TAA
MPTLPTYQL

SEQ ID NO: 59490 - protein, 9 aa, Homo sapiens
  misc_feature: Table A; Target 59490; HLA-B*35:01; PAX3; ENSG00000135903; TAA
MPTLPTYQL

SEQ ID NO: 59491 - protein, 9 aa, Homo sapiens
  misc_feature: Table A; Target 59491; HLA-B*35:03; PAX3; ENSG00000135903; TAA
MPTLPTYQL

SEQ ID NO: 59492 - protein, 9 aa, Homo sapiens
  misc_feature: Table A; Target 59492; HLA-B*51:01; PAX3; ENSG00000135903; TAA
MPTLPTYQL

SEQ ID NO: 59493 - protein, 9 aa, Homo sapiens
  misc_feature: Table A; Target 59493; HLA-B*54:01; PAX3; ENSG00000135903; TAA
MPTLPTYQL

SEQ ID NO: 59494 - protein, 9 aa, Homo sapiens
  misc_feature: Table A; Target 59494; HLA-B*55:01; PAX3; ENSG00000135903; TAA
MPTLPTYQL

SEQ ID NO: 59495 - protein, 9 aa, Homo sapiens
  misc_feature: Table A; Target 59495; HLA-B*56:01; PAX3; ENSG00000135903; TAA
MPTLPTYQL

SEQ ID NO: 59496 - protein, 9 aa, Homo sapiens
  misc_feature: Table A; Target 59496; HLA-C*03:04; PAX3; ENSG00000135903; TAA
MPTLPTYQL

SEQ ID NO: 59497 - protein, 9 aa, Homo sapiens
  misc_feature: Table A; Target 59497; HLA-C*04:01; PAX3; ENSG00000135903; TAA
MPTLPTYQL

SEQ ID NO: 59498 - protein, 9 aa, Homo sapiens
  misc_feature: Table A; Target 59498; HLA-C*07:02; PAX3; ENSG00000135903; TAA
MPTLPTYQL

SEQ ID NO: 59499 - protein, 9 aa, Homo sapiens
  misc_feature: Table A; Target 59499; HLA-B*07:02; PAX3; ENSG00000135903; TAA
MRPGPGQNY

SEQ ID NO: 59500 - protein, 9 aa, Homo sapiens
  misc_feature: Table A; Target 59500; HLA-B*15:03; PAX3; ENSG00000135903; TAA
MRPGPGQNY

SEQ ID NO: 59501 - protein, 9 aa, Homo sapiens
  misc_feature: Table A; Target 59501; HLA-B*27:05; PAX3; ENSG00000135903; TAA
MRPGPGQNY

SEQ ID NO: 59502 - protein, 9 aa, Homo sapiens
  misc_feature: Table A; Target 59502; HLA-B*39:01; PAX3; ENSG00000135903; TAA
MRPGPGQNY

SEQ ID NO: 59503 - protein, 9 aa, Homo sapiens
  misc_feature: Table A; Target 59503; HLA-C*01:02; PAX3; ENSG00000135903; TAA
MRPGPGQNY

SEQ ID NO: 59504 - protein, 9 aa, Homo sapiens
  misc_feature: Table A; Target 59504; HLA-C*06:02; PAX3; ENSG00000135903; TAA
MRPGPGQNY

SEQ ID NO: 59505 - protein, 9 aa, Homo sapiens
  misc_feature: Table A; Target 59505; HLA-C*07:01; PAX3; ENSG00000135903; TAA
MRPGPGQNY

SEQ ID NO: 59506 - protein, 9 aa, Homo sapiens
  misc_feature: Table A; Target 59506; HLA-C*07:04; PAX3; ENSG00000135903; TAA
MRPGPGQNY

SEQ ID NO: 59507 - protein, 9 aa, Homo sapiens
  misc_feature: Table A; Target 59507; HLA-C*16:01; PAX3; ENSG00000135903; TAA
MRPGPGQNY

SEQ ID NO: 59508 - protein, 9 aa, Homo sapiens
  misc_feature: Table A; Target 59508; HLA-C*16:04; PAX3; ENSG00000135903; TAA
MRPGPGQNY

SEQ ID NO: 59509 - protein, 10 aa, Homo sapiens
  misc_feature: Table A; Target 59509; HLA-C*06:02; PAX3; ENSG00000135903; TAA
MRPGPGQNYP

SEQ ID NO: 59510 - protein, 10 aa, Homo sapiens
  misc_feature: Table A; Target 59510; HLA-A*33:03; PAX3; ENSG00000135903; TAA
MTTLAGAVPR

SEQ ID NO: 59511 - protein, 10 aa, Homo sapiens
  misc_feature: Table A; Target 59511; HLA-A*68:01; PAX3; ENSG00000135903; TAA
MTTLAGAVPR

SEQ ID NO: 59512 - protein, 10 aa, Homo sapiens
  misc_feature: Table A; Target 59512; HLA-B*27:02; PAX3; ENSG00000135903; TAA
MTTLAGAVPR

SEQ ID NO: 59513 - protein, 10 aa, Homo sapiens
  misc_feature: Table A; Target 59513; HLA-C*07:06; PAX3; ENSG00000135903; TAA
MTTLAGAVPR

SEQ ID NO: 59514 - protein, 8 aa, Homo sapiens
  misc_feature: Table A; Target 59514; HLA-B*35:01; PAX3; ENSG00000135903; TAA
NPDSSSAY

SEQ ID NO: 59515 - protein, 8 aa, Homo sapiens
  misc_feature: Table A; Target 59515; HLA-B*55:01; PAX3; ENSG00000135903; TAA
NPDSSSAY

SEQ ID NO: 59516 - protein, 8 aa, Homo sapiens
  misc_feature: Table A; Target 59516; HLA-C*03:03; PAX3; ENSG00000135903; TAA
NPDSSSAY

SEQ ID NO: 59517 - protein, 8 aa, Homo sapiens
  misc_feature: Table A; Target 59517; HLA-C*05:01; PAX3; ENSG00000135903; TAA
NPDSSSAY

SEQ ID NO: 59518 - protein, 9 aa, Homo sapiens
  misc_feature: Table A; Target 59518; HLA-B*35:03; PAX3; ENSG00000135903; TAA
NPDSSSAYC

SEQ ID NO: 59519 - protein, 10 aa, Homo sapiens
  misc_feature: Table A; Target 59519; HLA-B*07:02; PAX3; ENSG00000135903; TAA
NPDSSSAYCL

SEQ ID NO: 59520 - protein, 10 aa, Homo sapiens
  misc_feature: Table A; Target 59520; HLA-B*35:01; PAX3; ENSG00000135903; TAA
NPDSSSAYCL

SEQ ID NO: 59521 - protein, 10 aa, Homo sapiens
  misc_feature: Table A; Target 59521; HLA-B*35:03; PAX3; ENSG00000135903; TAA
NPDSSSAYCL

SEQ ID NO: 59522 - protein, 10 aa, Homo sapiens
  misc_feature: Table A; Target 59522; HLA-B*55:01; PAX3; ENSG00000135903; TAA
NPDSSSAYCL

SEQ ID NO: 59523 - protein, 11 aa, Homo sapiens
  misc_feature: Table A; Target 59523; HLA-B*07:02; PAX3; ENSG00000135903; TAA
NPMNPTIGNGL

SEQ ID NO: 59524 - protein, 11 aa, Homo sapiens
  misc_feature: Table A; Target 59524; HLA-B*35:01; PAX3; ENSG00000135903; TAA
NPMNPTIGNGL

SEQ ID NO: 59525 - protein, 11 aa, Homo sapiens
  misc_feature: Table A; Target 59525; HLA-B*35:03; PAX3; ENSG00000135903; TAA
NPMNPTIGNGL

SEQ ID NO: 59526 - protein, 11 aa, Homo sapiens
  misc_feature: Table A; Target 59526; HLA-B*38:01; PAX3; ENSG00000135903; TAA
NPMNPTIGNGL

SEQ ID NO: 59527 - protein, 11 aa, Homo sapiens
  misc_feature: Table A; Target 59527; HLA-C*07:02; PAX3; ENSG00000135903; TAA
NPMNPTIGNGL

SEQ ID NO: 59528 - protein, 8 aa, Homo sapiens
  misc_feature: Table A; Target 59528; HLA-B*07:02; PAX3; ENSG00000135903; TAA
NPTIGNGL

SEQ ID NO: 59529 - protein, 8 aa, Homo sapiens
  misc_feature: Table A; Target 59529; HLA-B*08:01; PAX3; ENSG00000135903; TAA
NPTIGNGL

SEQ ID NO: 59530 - protein, 8 aa, Homo sapiens
  misc_feature: Table A; Target 59530; HLA-B*35:03; PAX3; ENSG00000135903; TAA
NPTIGNGL

SEQ ID NO: 59531 - protein, 8 aa, Homo sapiens
  misc_feature: Table A; Target 59531; HLA-C*07:02; PAX3; ENSG00000135903; TAA
NPTIGNGL

SEQ ID NO: 59532 - protein, 9 aa, Homo sapiens
  misc_feature: Table A; Target 59532; HLA-A*02:03; PAX3; ENSG00000135903; TAA
NTVPSVSSI

SEQ ID NO: 59533 - protein, 9 aa, Homo sapiens
  misc_feature: Table A; Target 59533; HLA-A*23:01; PAX3; ENSG00000135903; TAA
NTVPSVSSI

SEQ ID NO: 59534 - protein, 9 aa, Homo sapiens
  misc_feature: Table A; Target 59534; HLA-A*24:02; PAX3; ENSG00000135903; TAA
NTVPSVSSI

SEQ ID NO: 59535 - protein, 9 aa, Homo sapiens
  misc_feature: Table A; Target 59535; HLA-A*25:01; PAX3; ENSG00000135903; TAA
NTVPSVSSI

SEQ ID NO: 59536 - protein, 9 aa, Homo sapiens
  misc_feature: Table A; Target 59536; HLA-A*26:01; PAX3; ENSG00000135903; TAA
NTVPSVSSI

SEQ ID NO: 59537 - protein, 9 aa, Homo sapiens
  misc_feature: Table A; Target 59537; HLA-A*32:01; PAX3; ENSG00000135903; TAA
NTVPSVSSI

SEQ ID NO: 59538 - protein, 9 aa, Homo sapiens
  misc_feature: Table A; Target 59538; HLA-A*68:02; PAX3; ENSG00000135903; TAA
NTVPSVSSI

SEQ ID NO: 59539 - protein, 9 aa, Homo sapiens
  misc_feature: Table A; Target 59539; HLA-B*46:01; PAX3; ENSG00000135903; TAA
NTVPSVSSI

SEQ ID NO: 59540 - protein, 9 aa, Homo sapiens
  misc_feature: Table A; Target 59540; HLA-B*51:01; PAX3; ENSG00000135903; TAA
NTVPSVSSI

SEQ ID NO: 59541 - protein, 9 aa, Homo sapiens
  misc_feature: Table A; Target 59541; HLA-B*58:01; PAX3; ENSG00000135903; TAA
NTVPSVSSI

SEQ ID NO: 59542 - protein, 9 aa, Homo sapiens
  misc_feature: Table A; Target 59542; HLA-C*01:02; PAX3; ENSG00000135903; TAA
NTVPSVSSI

SEQ ID NO: 59543 - protein, 9 aa, Homo sapiens
  misc_feature: Table A; Target 59543; HLA-C*03:03; PAX3; ENSG00000135903; TAA
NTVPSVSSI

SEQ ID NO: 59544 - protein, 9 aa, Homo sapiens
  misc_feature: Table A; Target 59544; HLA-C*03:04; PAX3; ENSG00000135903; TAA
NTVPSVSSI

SEQ ID NO: 59545 - protein, 9 aa, Homo sapiens
  misc_feature: Table A; Target 59545; HLA-C*12:03; PAX3; ENSG00000135903; TAA
NTVPSVSSI

SEQ ID NO: 59546 - protein, 9 aa, Homo sapiens
  misc_feature: Table A; Target 59546; HLA-C*14:02; PAX3; ENSG00000135903; TAA
NTVPSVSSI

SEQ ID NO: 59547 - protein, 9 aa, Homo sapiens
  misc_feature: Table A; Target 59547; HLA-C*16:02; PAX3; ENSG00000135903; TAA
NTVPSVSSI

SEQ ID NO: 59548 - protein, 11 aa, Homo sapiens
  misc_feature: Table A; Target 59548; HLA-A*31:01; PAX3; ENSG00000135903; TAA
NTVPSVSSISR

SEQ ID NO: 59549 - protein, 11 aa, Homo sapiens
  misc_feature: Table A; Target 59549; HLA-A*33:01; PAX3; ENSG00000135903; TAA
NTVPSVSSISR

SEQ ID NO: 59550 - protein, 11 aa, Homo sapiens
  misc_feature: Table A; Target 59550; HLA-A*33:03; PAX3; ENSG00000135903; TAA
NTVPSVSSISR

SEQ ID NO: 59551 - protein, 11 aa, Homo sapiens
  misc_feature: Table A; Target 59551; HLA-A*68:01; PAX3; ENSG00000135903; TAA
NTVPSVSSISR

SEQ ID NO: 59552 - protein, 11 aa, Homo sapiens
  misc_feature: Table A; Target 59552; HLA-C*07:06; PAX3; ENSG00000135903; TAA
NTVPSVSSISR

SEQ ID NO: 59553 - protein, 9 aa, Homo sapiens
  misc_feature: Table A; Target 59553; HLA-A*24:02; PAX3; ENSG00000135903; TAA
NYPRSGFPL

SEQ ID NO: 59554 - protein, 9 aa, Homo sapiens
  misc_feature: Table A; Target 59554; HLA-C*01:02; PAX3; ENSG00000135903; TAA
NYPRSGFPL

SEQ ID NO: 59555 - protein, 9 aa, Homo sapiens
  misc_feature: Table A; Target 59555; HLA-B*07:02; PAX3; ENSG00000135903; TAA
PDSSSAYCL

SEQ ID NO: 59556 - protein, 9 aa, Homo sapiens
  misc_feature: Table A; Target 59556; HLA-B*07:02; PAX3; ENSG00000135903; TAA
PGPGQNYPR

SEQ ID NO: 59557 - protein, 10 aa, Homo sapiens
  misc_feature: Table A; Target 59557; HLA-A*30:02; PAX3; ENSG00000135903; TAA
PSNPDSSSAY

SEQ ID NO: 59558 - protein, 9 aa, Homo sapiens
  misc_feature: Table A; Target 59558; HLA-A*24:02; PAX3; ENSG00000135903; TAA
PSNPMNPTI

SEQ ID NO: 59559 - protein, 9 aa, Homo sapiens
  misc_feature: Table A; Target 59559; HLA-B*58:01; PAX3; ENSG00000135903; TAA
PSNPMNPTI

SEQ ID NO: 59560 - protein, 9 aa, Homo sapiens
  misc_feature: Table A; Target 59560; HLA-C*06:02; PAX3; ENSG00000135903; TAA
PSNPMNPTI

SEQ ID NO: 59561 - protein, 9 aa, Homo sapiens
  misc_feature: Table A; Target 59561; HLA-C*07:02; PAX3; ENSG00000135903; TAA
PSNPMNPTI

SEQ ID NO: 59562 - protein, 9 aa, Homo sapiens
  misc_feature: Table A; Target 59562; HLA-C*16:02; PAX3; ENSG00000135903; TAA
PSNPMNPTI

SEQ ID NO: 59563 - protein, 10 aa, Homo sapiens
  misc_feature: Table A; Target 59563; HLA-B*07:02; PAX3; ENSG00000135903; TAA
PSVSSISRIL

SEQ ID NO: 59564 - protein, 10 aa, Homo sapiens
  misc_feature: Table A; Target 59564; HLA-A*01:01; PAX3; ENSG00000135903; TAA
PTAMPTLPTY

SEQ ID NO: 59565 - protein, 8 aa, Homo sapiens
  misc_feature: Table A; Target 59565; HLA-A*23:01; PAX3; ENSG00000135903; TAA
PTLPTYQL

SEQ ID NO: 59566 - protein, 10 aa, Homo sapiens
  misc_feature: Table A; Target 59566; HLA-A*26:01; PAX3; ENSG00000135903; TAA
PTYQLSETSY

SEQ ID NO: 59567 - protein, 10 aa, Homo sapiens
  misc_feature: Table A; Target 59567; HLA-A*30:02; PAX3; ENSG00000135903; TAA
PTYQLSETSY

SEQ ID NO: 59568 - protein, 9 aa, Homo sapiens
  misc_feature: Table A; Target 59568; HLA-B*15:01; PAX3; ENSG00000135903; TAA
QLEELERAF

SEQ ID NO: 59569 - protein, 9 aa, Homo sapiens
  misc_feature: Table A; Target 59569; HLA-B*44:02; PAX3; ENSG00000135903; TAA
QLEELERAF

SEQ ID NO: 59570 - protein, 9 aa, Homo sapiens
  misc_feature: Table A; Target 59570; HLA-B*44:03; PAX3; ENSG00000135903; TAA
QLEELERAF

SEQ ID NO: 59571 - protein, 9 aa, Homo sapiens
  misc_feature: Table A; Target 59571; HLA-C*03:03; PAX3; ENSG00000135903; TAA
QLEELERAF

SEQ ID NO: 59572 - protein, 8 aa, Homo sapiens
  misc_feature: Table A; Target 59572; HLA-B*08:01; PAX3; ENSG00000135903; TAA
QLMAFNHL

SEQ ID NO: 59573 - protein, 9 aa, Homo sapiens
  misc_feature: Table A; Target 59573; HLA-A*02:01; PAX3; ENSG00000135903; TAA
QLMAFNHLI

SEQ ID NO: 59574 - protein, 9 aa, Homo sapiens
  misc_feature: Table A; Target 59574; HLA-A*02:04; PAX3; ENSG00000135903; TAA
QLMAFNHLI

SEQ ID NO: 59575 - protein, 9 aa, Homo sapiens
  misc_feature: Table A; Target 59575; HLA-B*13:02; PAX3; ENSG00000135903; TAA
QLMAFNHLI

SEQ ID NO: 59576 - protein, 8 aa, Homo sapiens
  misc_feature: Table A; Target 59576; HLA-B*51:01; PAX3; ENSG00000135903; TAA
QPLPPSTV

SEQ ID NO: 59577 - protein, 8 aa, Homo sapiens
  misc_feature: Table A; Target 59577; HLA-B*56:01; PAX3; ENSG00000135903; TAA
QPLPPSTV

SEQ ID NO: 59578 - protein, 9 aa, Homo sapiens
  misc_feature: Table A; Target 59578; HLA-B*35:01; PAX3; ENSG00000135903; TAA
QPLPPSTVH

SEQ ID NO: 59579 - protein, 8 aa, Homo sapiens
  misc_feature: Table A; Target 59579; HLA-B*35:03; PAX3; ENSG00000135903; TAA
QPQTDYAL

SEQ ID NO: 59580 - protein, 8 aa, Homo sapiens
  misc_feature: Table A; Target 59580; HLA-B*54:01; PAX3; ENSG00000135903; TAA
QPTSIPQA

SEQ ID NO: 59581 - protein, 8 aa, Homo sapiens
  misc_feature: Table A; Target 59581; HLA-B*55:01; PAX3; ENSG00000135903; TAA
QPTSIPQA

SEQ ID NO: 59582 - protein, 8 aa, Homo sapiens
  misc_feature: Table A; Target 59582; HLA-B*56:01; PAX3; ENSG00000135903; TAA
QPTSIPQA

SEQ ID NO: 59583 - protein, 9 aa, Homo sapiens
  misc_feature: Table A; Target 59583; HLA-A*68:02; PAX3; ENSG00000135903; TAA
QPTSIPQAV

SEQ ID NO: 59584 - protein, 9 aa, Homo sapiens
  misc_feature: Table A; Target 59584; HLA-B*07:02; PAX3; ENSG00000135903; TAA
QPTSIPQAV

SEQ ID NO: 59585 - protein, 9 aa, Homo sapiens
  misc_feature: Table A; Target 59585; HLA-B*13:02; PAX3; ENSG00000135903; TAA
QPTSIPQAV

SEQ ID NO: 59586 - protein, 9 aa, Homo sapiens
  misc_feature: Table A; Target 59586; HLA-B*35:01; PAX3; ENSG00000135903; TAA
QPTSIPQAV

SEQ ID NO: 59587 - protein, 9 aa, Homo sapiens
  misc_feature: Table A; Target 59587; HLA-B*35:03; PAX3; ENSG00000135903; TAA
QPTSIPQAV

SEQ ID NO: 59588 - protein, 9 aa, Homo sapiens
  misc_feature: Table A; Target 59588; HLA-B*51:01; PAX3; ENSG00000135903; TAA
QPTSIPQAV

SEQ ID NO: 59589 - protein, 9 aa, Homo sapiens
  misc_feature: Table A; Target 59589; HLA-B*54:01; PAX3; ENSG00000135903; TAA
QPTSIPQAV

SEQ ID NO: 59590 - protein, 9 aa, Homo sapiens
  misc_feature: Table A; Target 59590; HLA-B*55:01; PAX3; ENSG00000135903; TAA
QPTSIPQAV

SEQ ID NO: 59591 - protein, 9 aa, Homo sapiens
  misc_feature: Table A; Target 59591; HLA-B*56:01; PAX3; ENSG00000135903; TAA
QPTSIPQAV

SEQ ID NO: 59592 - protein, 9 aa, Homo sapiens
  misc_feature: Table A; Target 59592; HLA-C*07:02; PAX3; ENSG00000135903; TAA
QPTSIPQAV

SEQ ID NO: 59593 - protein, 9 aa, Homo sapiens
  misc_feature: Table A; Target 59593; HLA-C*06:02; PAX3; ENSG00000135903; TAA
QRLDHMKSL

SEQ ID NO: 59594 - protein, 8 aa, Homo sapiens
  misc_feature: Table A; Target 59594; HLA-C*05:01; PAX3; ENSG00000135903; TAA
QSDEGSDI

SEQ ID NO: 59595 - protein, 8 aa, Homo sapiens
  misc_feature: Table A; Target 59595; HLA-A*30:02; PAX3; ENSG00000135903; TAA
QSYCPPTY

SEQ ID NO: 59596 - protein, 8 aa, Homo sapiens
  misc_feature: Table A; Target 59596; HLA-B*15:03; PAX3; ENSG00000135903; TAA
QSYCPPTY

SEQ ID NO: 59597 - protein, 8 aa, Homo sapiens
  misc_feature: Table A; Target 59597; HLA-B*58:01; PAX3; ENSG00000135903; TAA
QSYCPPTY

SEQ ID NO: 59598 - protein, 9 aa, Homo sapiens
  misc_feature: Table A; Target 59598; HLA-A*03:01; PAX3; ENSG00000135903; TAA
QVMGLLTNH

SEQ ID NO: 59599 - protein, 9 aa, Homo sapiens
  misc_feature: Table A; Target 59599; HLA-A*03:02; PAX3; ENSG00000135903; TAA
QVMGLLTNH

SEQ ID NO: 59600 - protein, 9 aa, Homo sapiens
  misc_feature: Table A; Target 59600; HLA-A*11:01; PAX3; ENSG00000135903; TAA
QVMGLLTNH

SEQ ID NO: 59601 - protein, 9 aa, Homo sapiens
  misc_feature: Table A; Target 59601; HLA-A*31:01; PAX3; ENSG00000135903; TAA
QVMGLLTNH

SEQ ID NO: 59602 - protein, 9 aa, Homo sapiens
  misc_feature: Table A; Target 59602; HLA-C*07:06; PAX3; ENSG00000135903; TAA
QVMGLLTNH

SEQ ID NO: 59603 - protein, 9 aa, Homo sapiens
  misc_feature: Table A; Target 59603; HLA-A*03:01; PAX3; ENSG00000135903; TAA
QVTTPDVEK

SEQ ID NO: 59604 - protein, 9 aa, Homo sapiens
  misc_feature: Table A; Target 59604; HLA-A*03:02; PAX3; ENSG00000135903; TAA
QVTTPDVEK

SEQ ID NO: 59605 - protein, 9 aa, Homo sapiens
  misc_feature: Table A; Target 59605; HLA-A*11:01; PAX3; ENSG00000135903; TAA
QVTTPDVEK

SEQ ID NO: 59606 - protein, 9 aa, Homo sapiens
  misc_feature: Table A; Target 59606; HLA-A*68:01; PAX3; ENSG00000135903; TAA
QVTTPDVEK

SEQ ID NO: 59607 - protein, 9 aa, Homo sapiens
  misc_feature: Table A; Target 59607; HLA-C*07:06; PAX3; ENSG00000135903; TAA
QVTTPDVEK

SEQ ID NO: 59608 - protein, 10 aa, Homo sapiens
  misc_feature: Table A; Target 59608; HLA-A*23:01; PAX3; ENSG00000135903; TAA
QYGQSKPWTF

SEQ ID NO: 59609 - protein, 10 aa, Homo sapiens
  misc_feature: Table A; Target 59609; HLA-A*24:02; PAX3; ENSG00000135903; TAA
QYGQSKPWTF

SEQ ID NO: 59610 - protein, 10 aa, Homo sapiens
  misc_feature: Table A; Target 59610; HLA-B*07:02; PAX3; ENSG00000135903; TAA
QYGQSKPWTF

SEQ ID NO: 59611 - protein, 10 aa, Homo sapiens
  misc_feature: Table A; Target 59611; HLA-C*04:01; PAX3; ENSG00000135903; TAA
QYGQSKPWTF

SEQ ID NO: 59612 - protein, 10 aa, Homo sapiens
  misc_feature: Table A; Target 59612; HLA-C*07:01; PAX3; ENSG00000135903; TAA
QYGQSKPWTF

SEQ ID NO: 59613 - protein, 10 aa, Homo sapiens
  misc_feature: Table A; Target 59613; HLA-C*07:02; PAX3; ENSG00000135903; TAA
QYGQSKPWTF

SEQ ID NO: 59614 - protein, 9 aa, Homo sapiens
  misc_feature: Table A; Target 59614; HLA-A*33:03; PAX3; ENSG00000135903; TAA
QYGQYGQSK

SEQ ID NO: 59615 - protein, 9 aa, Homo sapiens
  misc_feature: Table A; Target 59615; HLA-C*14:02; PAX3; ENSG00000135903; TAA
QYGQYGQSK

SEQ ID NO: 59616 - protein, 10 aa, Homo sapiens
  misc_feature: Table A; Target 59616; HLA-B*37:01; PAX3; ENSG00000135903; TAA
REELAQRAKL

SEQ ID NO: 59617 - protein, 10 aa, Homo sapiens
  misc_feature: Table A; Target 59617; HLA-B*40:01; PAX3; ENSG00000135903; TAA
REELAQRAKL

SEQ ID NO: 59618 - protein, 10 aa, Homo sapiens
  misc_feature: Table A; Target 59618; HLA-B*15:03; PAX3; ENSG00000135903; TAA
RKQAGANQLM

SEQ ID NO: 59619 - protein, 11 aa, Homo sapiens
  misc_feature: Table A; Target 59619; HLA-A*30:02; PAX3; ENSG00000135903; TAA
RMMRPGPGQNY

SEQ ID NO: 59620 - protein, 11 aa, Homo sapiens
  misc_feature: Table A; Target 59620; HLA-B*15:01; PAX3; ENSG00000135903; TAA
RMMRPGPGQNY

SEQ ID NO: 59621 - protein, 8 aa, Homo sapiens
  misc_feature: Table A; Target 59621; HLA-A*30:02; PAX3; ENSG00000135903; TAA
RPGPGQNY

SEQ ID NO: 59622 - protein, 8 aa, Homo sapiens
  misc_feature: Table A; Target 59622; HLA-B*07:02; PAX3; ENSG00000135903; TAA
RPGPGQNY

SEQ ID NO: 59623 - protein, 8 aa, Homo sapiens
  misc_feature: Table A; Target 59623; HLA-C*01:02; PAX3; ENSG00000135903; TAA
RPGPGQNY

SEQ ID NO: 59624 - protein, 10 aa, Homo sapiens
  misc_feature: Table A; Target 59624; HLA-A*31:01; PAX3; ENSG00000135903; TAA
RPGPGQNYPR

SEQ ID NO: 59625 - protein, 10 aa, Homo sapiens
  misc_feature: Table A; Target 59625; HLA-B*07:02; PAX3; ENSG00000135903; TAA
RPQPLPPSTV

SEQ ID NO: 59626 - protein, 10 aa, Homo sapiens
  misc_feature: Table A; Target 59626; HLA-B*51:01; PAX3; ENSG00000135903; TAA
RPQPLPPSTV

SEQ ID NO: 59627 - protein, 10 aa, Homo sapiens
  misc_feature: Table A; Target 59627; HLA-B*54:01; PAX3; ENSG00000135903; TAA
RPQPLPPSTV

SEQ ID NO: 59628 - protein, 10 aa, Homo sapiens
  misc_feature: Table A; Target 59628; HLA-B*55:01; PAX3; ENSG00000135903; TAA
RPQPLPPSTV

SEQ ID NO: 59629 - protein, 10 aa, Homo sapiens
  misc_feature: Table A; Target 59629; HLA-B*56:01; PAX3; ENSG00000135903; TAA
RPQPLPPSTV

SEQ ID NO: 59630 - protein, 10 aa, Homo sapiens
  misc_feature: Table A; Target 59630; HLA-C*07:02; PAX3; ENSG00000135903; TAA
RPQPLPPSTV

SEQ ID NO: 59631 - protein, 9 aa, Homo sapiens
  misc_feature: Table A; Target 59631; HLA-A*03:01; PAX3; ENSG00000135903; TAA
SAYCLPSTR

SEQ ID NO: 59632 - protein, 9 aa, Homo sapiens
  misc_feature: Table A; Target 59632; HLA-A*31:01; PAX3; ENSG00000135903; TAA
SAYCLPSTR

SEQ ID NO: 59633 - protein, 9 aa, Homo sapiens
  misc_feature: Table A; Target 59633; HLA-A*33:01; PAX3; ENSG00000135903; TAA
SAYCLPSTR

SEQ ID NO: 59634 - protein, 9 aa, Homo sapiens
  misc_feature: Table A; Target 59634; HLA-A*33:03; PAX3; ENSG00000135903; TAA
SAYCLPSTR

SEQ ID NO: 59635 - protein, 9 aa, Homo sapiens
  misc_feature: Table A; Target 59635; HLA-A*68:01; PAX3; ENSG00000135903; TAA
SAYCLPSTR

SEQ ID NO: 59636 - protein, 9 aa, Homo sapiens
  misc_feature: Table A; Target 59636; HLA-C*07:06; PAX3; ENSG00000135903; TAA
SAYCLPSTR

SEQ ID NO: 59637 - protein, 9 aa, Homo sapiens
  misc_feature: Table A; Target 59637; HLA-C*12:03; PAX3; ENSG00000135903; TAA
SAYCLPSTR

SEQ ID NO: 59638 - protein, 9 aa, Homo sapiens
  misc_feature: Table A; Target 59638; HLA-A*30:01; PAX3; ENSG00000135903; TAA
SDIDSEPDL

SEQ ID NO: 59639 - protein, 9 aa, Homo sapiens
  misc_feature: Table A; Target 59639; HLA-B*39:01; PAX3; ENSG00000135903; TAA
SDIDSEPDL

SEQ ID NO: 59640 - protein, 9 aa, Homo sapiens
  misc_feature: Table A; Target 59640; HLA-B*40:01; PAX3; ENSG00000135903; TAA
SDIDSEPDL

SEQ ID NO: 59641 - protein, 10 aa, Homo sapiens
  misc_feature: Table A; Target 59641; HLA-A*30:01; PAX3; ENSG00000135903; TAA
SETSYQPTSI

SEQ ID NO: 59642 - protein, 10 aa, Homo sapiens
  misc_feature: Table A; Target 59642; HLA-B*40:01; PAX3; ENSG00000135903; TAA
SETSYQPTSI

SEQ ID NO: 59643 - protein, 10 aa, Homo sapiens
  misc_feature: Table A; Target 59643; HLA-B*40:02; PAX3; ENSG00000135903; TAA
SETSYQPTSI

SEQ ID NO: 59644 - protein, 10 aa, Homo sapiens
  misc_feature: Table A; Target 59644; HLA-B*44:02; PAX3; ENSG00000135903; TAA
SETSYQPTSI

SEQ ID NO: 59645 - protein, 10 aa, Homo sapiens
  misc_feature: Table A; Target 59645; HLA-B*44:03; PAX3; ENSG00000135903; TAA
SETSYQPTSI

SEQ ID NO: 59646 - protein, 10 aa, Homo sapiens
  misc_feature: Table A; Target 59646; HLA-B*49:01; PAX3; ENSG00000135903; TAA
SETSYQPTSI

SEQ ID NO: 59647 - protein, 11 aa, Homo sapiens
  misc_feature: Table A; Target 59647; HLA-A*31:01; PAX3; ENSG00000135903; TAA
SGFPLEVSTPL

SEQ ID NO: 59648 - protein, 9 aa, Homo sapiens
  misc_feature: Table A; Target 59648; HLA-A*01:01; PAX3; ENSG00000135903; TAA
SIDGILSER

SEQ ID NO: 59649 - protein, 9 aa, Homo sapiens
  misc_feature: Table A; Target 59649; HLA-A*02:07; PAX3; ENSG00000135903; TAA
SIDGILSER

SEQ ID NO: 59650 - protein, 9 aa, Homo sapiens
  misc_feature: Table A; Target 59650; HLA-A*03:01; PAX3; ENSG00000135903; TAA
SIDGILSER

SEQ ID NO: 59651 - protein, 9 aa, Homo sapiens
  misc_feature: Table A; Target 59651; HLA-A*03:02; PAX3; ENSG00000135903; TAA
SIDGILSER

SEQ ID NO: 59652 - protein, 9 aa, Homo sapiens
  misc_feature: Table A; Target 59652; HLA-A*11:01; PAX3; ENSG00000135903; TAA
SIDGILSER

SEQ ID NO: 59653 - protein, 9 aa, Homo sapiens
  misc_feature: Table A; Target 59653; HLA-A*31:01; PAX3; ENSG00000135903; TAA
SIDGILSER

SEQ ID NO: 59654 - protein, 9 aa, Homo sapiens
  misc_feature: Table A; Target 59654; HLA-A*33:01; PAX3; ENSG00000135903; TAA
SIDGILSER

SEQ ID NO: 59655 - protein, 9 aa, Homo sapiens
  misc_feature: Table A; Target 59655; HLA-A*33:03; PAX3; ENSG00000135903; TAA
SIDGILSER

SEQ ID NO: 59656 - protein, 9 aa, Homo sapiens
  misc_feature: Table A; Target 59656; HLA-A*68:01; PAX3; ENSG00000135903; TAA
SIDGILSER

SEQ ID NO: 59657 - protein, 9 aa, Homo sapiens
  misc_feature: Table A; Target 59657; HLA-C*05:01; PAX3; ENSG00000135903; TAA
SIDGILSER

SEQ ID NO: 59658 - protein, 9 aa, Homo sapiens
  misc_feature: Table A; Target 59658; HLA-C*07:06; PAX3; ENSG00000135903; TAA
SIDGILSER

SEQ ID NO: 59659 - protein, 9 aa, Homo sapiens
  misc_feature: Table A; Target 59659; HLA-A*03:01; PAX3; ENSG00000135903; TAA
SISRILRSK

SEQ ID NO: 59660 - protein, 9 aa, Homo sapiens
  misc_feature: Table A; Target 59660; HLA-A*03:02; PAX3; ENSG00000135903; TAA
SISRILRSK

SEQ ID NO: 59661 - protein, 9 aa, Homo sapiens
  misc_feature: Table A; Target 59661; HLA-A*11:01; PAX3; ENSG00000135903; TAA
SISRILRSK

SEQ ID NO: 59662 - protein, 9 aa, Homo sapiens
  misc_feature: Table A; Target 59662; HLA-C*05:01; PAX3; ENSG00000135903; TAA
SLDSLPTSQ

SEQ ID NO: 59663 - protein, 11 aa, Homo sapiens
  misc_feature: Table A; Target 59663; HLA-A*01:01; PAX3; ENSG00000135903; TAA
SLDSLPTSQSY

SEQ ID NO: 59664 - protein, 11 aa, Homo sapiens
  misc_feature: Table A; Target 59664; HLA-A*29:02; PAX3; ENSG00000135903; TAA
SLDSLPTSQSY

SEQ ID NO: 59665 - protein, 11 aa, Homo sapiens
  misc_feature: Table A; Target 59665; HLA-A*30:02; PAX3; ENSG00000135903; TAA
SLDSLPTSQSY

SEQ ID NO: 59666 - protein, 11 aa, Homo sapiens
  misc_feature: Table A; Target 59666; HLA-A*32:01; PAX3; ENSG00000135903; TAA
SLDSLPTSQSY

SEQ ID NO: 59667 - protein, 11 aa, Homo sapiens
  misc_feature: Table A; Target 59667; HLA-B*15:01; PAX3; ENSG00000135903; TAA
SLDSLPTSQSY

SEQ ID NO: 59668 - protein, 11 aa, Homo sapiens
  misc_feature: Table A; Target 59668; HLA-B*44:03; PAX3; ENSG00000135903; TAA
SLDSLPTSQSY

SEQ ID NO: 59669 - protein, 11 aa, Homo sapiens
  misc_feature: Table A; Target 59669; HLA-B*55:01; PAX3; ENSG00000135903; TAA
SLDSLPTSQSY

SEQ ID NO: 59670 - protein, 11 aa, Homo sapiens
  misc_feature: Table A; Target 59670; HLA-C*16:02; PAX3; ENSG00000135903; TAA
SLDSLPTSQSY

SEQ ID NO: 59671 - protein, 8 aa, Homo sapiens
  misc_feature: Table A; Target 59671; HLA-A*32:01; PAX3; ENSG00000135903; TAA
SLPTSQSY

SEQ ID NO: 59672 - protein, 8 aa, Homo sapiens
  misc_feature: Table A; Target 59672; HLA-B*15:01; PAX3; ENSG00000135903; TAA
SLPTSQSY

SEQ ID NO: 59673 - protein, 8 aa, Homo sapiens
  misc_feature: Table A; Target 59673; HLA-B*15:03; PAX3; ENSG00000135903; TAA
SLPTSQSY

SEQ ID NO: 59674 - protein, 8 aa, Homo sapiens
  misc_feature: Table A; Target 59674; HLA-B*46:01; PAX3; ENSG00000135903; TAA
SLPTSQSY

SEQ ID NO: 59675 - protein, 8 aa, Homo sapiens
  misc_feature: Table A; Target 59675; HLA-C*01:02; PAX3; ENSG00000135903; TAA
SLPTSQSY

SEQ ID NO: 59676 - protein, 8 aa, Homo sapiens
  misc_feature: Table A; Target 59676; HLA-C*14:02; PAX3; ENSG00000135903; TAA
SLPTSQSY

SEQ ID NO: 59677 - protein, 9 aa, Homo sapiens
  misc_feature: Table A; Target 59677; HLA-C*01:02; PAX3; ENSG00000135903; TAA
SLPTSQSYC

SEQ ID NO: 59678 - protein, 8 aa, Homo sapiens
  misc_feature: Table A; Target 59678; HLA-A*01:01; PAX3; ENSG00000135903; TAA
SMDPVTGY

SEQ ID NO: 59679 - protein, 8 aa, Homo sapiens
  misc_feature: Table A; Target 59679; HLA-A*30:02; PAX3; ENSG00000135903; TAA
SMDPVTGY

SEQ ID NO: 59680 - protein, 8 aa, Homo sapiens
  misc_feature: Table A; Target 59680; HLA-A*32:01; PAX3; ENSG00000135903; TAA
SMDPVTGY

SEQ ID NO: 59681 - protein, 8 aa, Homo sapiens
  misc_feature: Table A; Target 59681; HLA-B*15:01; PAX3; ENSG00000135903; TAA
SMDPVTGY

SEQ ID NO: 59682 - protein, 8 aa, Homo sapiens
  misc_feature: Table A; Target 59682; HLA-B*15:03; PAX3; ENSG00000135903; TAA
SMDPVTGY

SEQ ID NO: 59683 - protein, 8 aa, Homo sapiens
  misc_feature: Table A; Target 59683; HLA-B*18:01; PAX3; ENSG00000135903; TAA
SMDPVTGY

SEQ ID NO: 59684 - protein, 8 aa, Homo sapiens
  misc_feature: Table A; Target 59684; HLA-B*35:01; PAX3; ENSG00000135903; TAA
SMDPVTGY

SEQ ID NO: 59685 - protein, 8 aa, Homo sapiens
  misc_feature: Table A; Target 59685; HLA-B*39:01; PAX3; ENSG00000135903; TAA
SMDPVTGY

SEQ ID NO: 59686 - protein, 8 aa, Homo sapiens
  misc_feature: Table A; Target 59686; HLA-B*46:01; PAX3; ENSG00000135903; TAA
SMDPVTGY

SEQ ID NO: 59687 - protein, 8 aa, Homo sapiens
  misc_feature: Table A; Target 59687; HLA-C*04:01; PAX3; ENSG00000135903; TAA
SMDPVTGY

SEQ ID NO: 59688 - protein, 8 aa, Homo sapiens
  misc_feature: Table A; Target 59688; HLA-C*05:01; PAX3; ENSG00000135903; TAA
SMDPVTGY

SEQ ID NO: 59689 - protein, 8 aa, Homo sapiens
  misc_feature: Table A; Target 59689; HLA-C*07:04; PAX3; ENSG00000135903; TAA
SMDPVTGY

SEQ ID NO: 59690 - protein, 8 aa, Homo sapiens
  misc_feature: Table A; Target 59690; HLA-C*16:02; PAX3; ENSG00000135903; TAA
SMDPVTGY

SEQ ID NO: 59691 - protein, 10 aa, Homo sapiens
  misc_feature: Table A; Target 59691; HLA-A*01:01; PAX3; ENSG00000135903; TAA
SMDPVTGYQY

SEQ ID NO: 59692 - protein, 10 aa, Homo sapiens
  misc_feature: Table A; Target 59692; HLA-A*02:07; PAX3; ENSG00000135903; TAA
SMDPVTGYQY

SEQ ID NO: 59693 - protein, 10 aa, Homo sapiens
  misc_feature: Table A; Target 59693; HLA-A*03:01; PAX3; ENSG00000135903; TAA
SMDPVTGYQY

SEQ ID NO: 59694 - protein, 10 aa, Homo sapiens
  misc_feature: Table A; Target 59694; HLA-A*03:02; PAX3; ENSG00000135903; TAA
SMDPVTGYQY

SEQ ID NO: 59695 - protein, 10 aa, Homo sapiens
  misc_feature: Table A; Target 59695; HLA-A*11:01; PAX3; ENSG00000135903; TAA
SMDPVTGYQY

SEQ ID NO: 59696 - protein, 10 aa, Homo sapiens
  misc_feature: Table A; Target 59696; HLA-A*23:01; PAX3; ENSG00000135903; TAA
SMDPVTGYQY

SEQ ID NO: 59697 - protein, 10 aa, Homo sapiens
  misc_feature: Table A; Target 59697; HLA-A*25:01; PAX3; ENSG00000135903; TAA
SMDPVTGYQY

SEQ ID NO: 59698 - protein, 10 aa, Homo sapiens
  misc_feature: Table A; Target 59698; HLA-A*26:01; PAX3; ENSG00000135903; TAA
SMDPVTGYQY

SEQ ID NO: 59699 - protein, 10 aa, Homo sapiens
  misc_feature: Table A; Target 59699; HLA-A*29:02; PAX3; ENSG00000135903; TAA
SMDPVTGYQY

SEQ ID NO: 59700 - protein, 10 aa, Homo sapiens
  misc_feature: Table A; Target 59700; HLA-A*30:02; PAX3; ENSG00000135903; TAA
SMDPVTGYQY

SEQ ID NO: 59701 - protein, 10 aa, Homo sapiens
  misc_feature: Table A; Target 59701; HLA-A*32:01; PAX3; ENSG00000135903; TAA
SMDPVTGYQY

SEQ ID NO: 59702 - protein, 10 aa, Homo sapiens
  misc_feature: Table A; Target 59702; HLA-A*33:03; PAX3; ENSG00000135903; TAA
SMDPVTGYQY

SEQ ID NO: 59703 - protein, 10 aa, Homo sapiens
  misc_feature: Table A; Target 59703; HLA-A*68:01; PAX3; ENSG00000135903; TAA
SMDPVTGYQY

SEQ ID NO: 59704 - protein, 10 aa, Homo sapiens
  misc_feature: Table A; Target 59704; HLA-B*15:01; PAX3; ENSG00000135903; TAA
SMDPVTGYQY

SEQ ID NO: 59705 - protein, 10 aa, Homo sapiens
  misc_feature: Table A; Target 59705; HLA-B*15:03; PAX3; ENSG00000135903; TAA
SMDPVTGYQY

SEQ ID NO: 59706 - protein, 10 aa, Homo sapiens
  misc_feature: Table A; Target 59706; HLA-B*18:01; PAX3; ENSG00000135903; TAA
SMDPVTGYQY

SEQ ID NO: 59707 - protein, 10 aa, Homo sapiens
  misc_feature: Table A; Target 59707; HLA-B*27:02; PAX3; ENSG00000135903; TAA
SMDPVTGYQY

SEQ ID NO: 59708 - protein, 10 aa, Homo sapiens
  misc_feature: Table A; Target 59708; HLA-B*27:05; PAX3; ENSG00000135903; TAA
SMDPVTGYQY

SEQ ID NO: 59709 - protein, 10 aa, Homo sapiens
  misc_feature: Table A; Target 59709; HLA-B*35:01; PAX3; ENSG00000135903; TAA
SMDPVTGYQY

SEQ ID NO: 59710 - protein, 10 aa, Homo sapiens
  misc_feature: Table A; Target 59710; HLA-B*35:03; PAX3; ENSG00000135903; TAA
SMDPVTGYQY

SEQ ID NO: 59711 - protein, 10 aa, Homo sapiens
  misc_feature: Table A; Target 59711; HLA-B*38:01; PAX3; ENSG00000135903; TAA
SMDPVTGYQY

SEQ ID NO: 59712 - protein, 10 aa, Homo sapiens
  misc_feature: Table A; Target 59712; HLA-B*39:01; PAX3; ENSG00000135903; TAA
SMDPVTGYQY

SEQ ID NO: 59713 - protein, 10 aa, Homo sapiens
  misc_feature: Table A; Target 59713; HLA-B*44:03; PAX3; ENSG00000135903; TAA
SMDPVTGYQY

SEQ ID NO: 59714 - protein, 10 aa, Homo sapiens
  misc_feature: Table A; Target 59714; HLA-B*46:01; PAX3; ENSG00000135903; TAA
SMDPVTGYQY

SEQ ID NO: 59715 - protein, 10 aa, Homo sapiens
  misc_feature: Table A; Target 59715; HLA-B*55:01; PAX3; ENSG00000135903; TAA
SMDPVTGYQY

SEQ ID NO: 59716 - protein, 10 aa, Homo sapiens
  misc_feature: Table A; Target 59716; HLA-B*57:01; PAX3; ENSG00000135903; TAA
SMDPVTGYQY

SEQ ID NO: 59717 - protein, 10 aa, Homo sapiens
  misc_feature: Table A; Target 59717; HLA-B*58:01; PAX3; ENSG00000135903; TAA
SMDPVTGYQY

SEQ ID NO: 59718 - protein, 10 aa, Homo sapiens
  misc_feature: Table A; Target 59718; HLA-C*02:02; PAX3; ENSG00000135903; TAA
SMDPVTGYQY

SEQ ID NO: 59719 - protein, 10 aa, Homo sapiens
  misc_feature: Table A; Target 59719; HLA-C*04:01; PAX3; ENSG00000135903; TAA
SMDPVTGYQY

SEQ ID NO: 59720 - protein, 10 aa, Homo sapiens
  misc_feature: Table A; Target 59720; HLA-C*05:01; PAX3; ENSG00000135903; TAA
SMDPVTGYQY

SEQ ID NO: 59721 - protein, 10 aa, Homo sapiens
  misc_feature: Table A; Target 59721; HLA-C*07:01; PAX3; ENSG00000135903; TAA
SMDPVTGYQY

SEQ ID NO: 59722 - protein, 10 aa, Homo sapiens
  misc_feature: Table A; Target 59722; HLA-C*07:04; PAX3; ENSG00000135903; TAA
SMDPVTGYQY

SEQ ID NO: 59723 - protein, 10 aa, Homo sapiens
  misc_feature: Table A; Target 59723; HLA-C*07:06; PAX3; ENSG00000135903; TAA
SMDPVTGYQY

SEQ ID NO: 59724 - protein, 10 aa, Homo sapiens
  misc_feature: Table A; Target 59724; HLA-C*12:03; PAX3; ENSG00000135903; TAA
SMDPVTGYQY

SEQ ID NO: 59725 - protein, 10 aa, Homo sapiens
  misc_feature: Table A; Target 59725; HLA-C*14:02; PAX3; ENSG00000135903; TAA
SMDPVTGYQY

SEQ ID NO: 59726 - protein, 10 aa, Homo sapiens
  misc_feature: Table A; Target 59726; HLA-C*16:01; PAX3; ENSG00000135903; TAA
SMDPVTGYQY

SEQ ID NO: 59727 - protein, 10 aa, Homo sapiens
  misc_feature: Table A; Target 59727; HLA-C*16:02; PAX3; ENSG00000135903; TAA
SMDPVTGYQY

SEQ ID NO: 59728 - protein, 10 aa, Homo sapiens
  misc_feature: Table A; Target 59728; HLA-C*16:04; PAX3; ENSG00000135903; TAA
SMDPVTGYQY

SEQ ID NO: 59729 - protein, 11 aa, Homo sapiens
  misc_feature: Table A; Target 59729; HLA-A*01:01; PAX3; ENSG00000135903; TAA
SMDPVTGYQYG

SEQ ID NO: 59730 - protein, 11 aa, Homo sapiens
  misc_feature: Table A; Target 59730; HLA-A*02:07; PAX3; ENSG00000135903; TAA
SMDPVTGYQYG

SEQ ID NO: 59731 - protein, 11 aa, Homo sapiens
  misc_feature: Table A; Target 59731; HLA-C*04:01; PAX3; ENSG00000135903; TAA
SMDPVTGYQYG

SEQ ID NO: 59732 - protein, 9 aa, Homo sapiens
  misc_feature: Table A; Target 59732; HLA-A*26:01; PAX3; ENSG00000135903; TAA
SNPDSSSAY

SEQ ID NO: 59733 - protein, 9 aa, Homo sapiens
  misc_feature: Table A; Target 59733; HLA-A*30:02; PAX3; ENSG00000135903; TAA
SNPDSSSAY

SEQ ID NO: 59734 - protein, 9 aa, Homo sapiens
  misc_feature: Table A; Target 59734; HLA-C*01:02; PAX3; ENSG00000135903; TAA
SNPDSSSAY

SEQ ID NO: 59735 - protein, 9 aa, Homo sapiens
  misc_feature: Table A; Target 59735; HLA-C*14:02; PAX3; ENSG00000135903; TAA
SNPDSSSAY

SEQ ID NO: 59736 - protein, 9 aa, Homo sapiens
  misc_feature: Table A; Target 59736; HLA-B*56:01; PAX3; ENSG00000135903; TAA
SPLTGGLEP

SEQ ID NO: 59737 - protein, 8 aa, Homo sapiens
  misc_feature: Table A; Target 59737; HLA-B*07:02; PAX3; ENSG00000135903; TAA
SPQVMGLL

SEQ ID NO: 59738 - protein, 8 aa, Homo sapiens
  misc_feature: Table A; Target 59738; HLA-C*07:02; PAX3; ENSG00000135903; TAA
SPQVMGLL

SEQ ID NO: 59739 - protein, 9 aa, Homo sapiens
  misc_feature: Table A; Target 59739; HLA-A*30:02; PAX3; ENSG00000135903; TAA
SQSYCPPTY

SEQ ID NO: 59740 - protein, 9 aa, Homo sapiens
  misc_feature: Table A; Target 59740; HLA-A*32:01; PAX3; ENSG00000135903; TAA
SQSYCPPTY

SEQ ID NO: 59741 - protein, 9 aa, Homo sapiens
  misc_feature: Table A; Target 59741; HLA-B*15:01; PAX3; ENSG00000135903; TAA
SQSYCPPTY

SEQ ID NO: 59742 - protein, 9 aa, Homo sapiens
  misc_feature: Table A; Target 59742; HLA-B*15:03; PAX3; ENSG00000135903; TAA
SQSYCPPTY

SEQ ID NO: 59743 - protein, 9 aa, Homo sapiens
  misc_feature: Table A; Target 59743; HLA-B*39:01; PAX3; ENSG00000135903; TAA
SQSYCPPTY

SEQ ID NO: 59744 - protein, 9 aa, Homo sapiens
  misc_feature: Table A; Target 59744; HLA-C*07:04; PAX3; ENSG00000135903; TAA
SQSYCPPTY

SEQ ID NO: 59745 - protein, 10 aa, Homo sapiens
  misc_feature: Table A; Target 59745; HLA-A*68:01; PAX3; ENSG00000135903; TAA
SSAYCLPSTR

SEQ ID NO: 59746 - protein, 8 aa, Homo sapiens
  misc_feature: Table A; Target 59746; HLA-A*31:01; PAX3; ENSG00000135903; TAA
SSISRILR

SEQ ID NO: 59747 - protein, 9 aa, Homo sapiens
  misc_feature: Table A; Target 59747; HLA-A*25:01; PAX3; ENSG00000135903; TAA
STRHGFSSY

SEQ ID NO: 59748 - protein, 9 aa, Homo sapiens
  misc_feature: Table A; Target 59748; HLA-A*26:01; PAX3; ENSG00000135903; TAA
STRHGFSSY

SEQ ID NO: 59749 - protein, 9 aa, Homo sapiens
  misc_feature: Table A; Target 59749; HLA-A*30:02; PAX3; ENSG00000135903; TAA
STRHGFSSY

SEQ ID NO: 59750 - protein, 9 aa, Homo sapiens
  misc_feature: Table A; Target 59750; HLA-A*32:01; PAX3; ENSG00000135903; TAA
STRHGFSSY

SEQ ID NO: 59751 - protein, 9 aa, Homo sapiens
  misc_feature: Table A; Target 59751; HLA-B*46:01; PAX3; ENSG00000135903; TAA
STRHGFSSY

SEQ ID NO: 59752 - protein, 9 aa, Homo sapiens
  misc_feature: Table A; Target 59752; HLA-B*57:01; PAX3; ENSG00000135903; TAA
STRHGFSSY

SEQ ID NO: 59753 - protein, 9 aa, Homo sapiens
  misc_feature: Table A; Target 59753; HLA-A*32:01; PAX3; ENSG00000135903; TAA
SVSSISRIL

SEQ ID NO: 59754 - protein, 9 aa, Homo sapiens
  misc_feature: Table A; Target 59754; HLA-A*68:02; PAX3; ENSG00000135903; TAA
SVSSISRIL

SEQ ID NO: 59755 - protein, 9 aa, Homo sapiens
  misc_feature: Table A; Target 59755; HLA-B*07:02; PAX3; ENSG00000135903; TAA
SVSSISRIL

SEQ ID NO: 59756 - protein, 9 aa, Homo sapiens
  misc_feature: Table A; Target 59756; HLA-B*27:05; PAX3; ENSG00000135903; TAA
SVSSISRIL

SEQ ID NO: 59757 - protein, 9 aa, Homo sapiens
  misc_feature: Table A; Target 59757; HLA-C*03:03; PAX3; ENSG00000135903; TAA
SVSSISRIL

SEQ ID NO: 59758 - protein, 9 aa, Homo sapiens
  misc_feature: Table A; Target 59758; HLA-C*03:04; PAX3; ENSG00000135903; TAA
SVSSISRIL

SEQ ID NO: 59759 - protein, 9 aa, Homo sapiens
  misc_feature: Table A; Target 59759; HLA-C*06:02; PAX3; ENSG00000135903; TAA
SVSSISRIL

SEQ ID NO: 59760 - protein, 9 aa, Homo sapiens
  misc_feature: Table A; Target 59760; HLA-C*12:03; PAX3; ENSG00000135903; TAA
SVSSISRIL

SEQ ID NO: 59761 - protein, 9 aa, Homo sapiens
  misc_feature: Table A; Target 59761; HLA-C*16:01; PAX3; ENSG00000135903; TAA
SVSSISRIL

SEQ ID NO: 59762 - protein, 9 aa, Homo sapiens
  misc_feature: Table A; Target 59762; HLA-C*16:02; PAX3; ENSG00000135903; TAA
SVSSISRIL

SEQ ID NO: 59763 - protein, 10 aa, Homo sapiens
  misc_feature: Table A; Target 59763; HLA-A*11:01; PAX3; ENSG00000135903; TAA
SVSSISRILR

SEQ ID NO: 59764 - protein, 10 aa, Homo sapiens
  misc_feature: Table A; Target 59764; HLA-A*31:01; PAX3; ENSG00000135903; TAA
SVSSISRILR

SEQ ID NO: 59765 - protein, 10 aa, Homo sapiens
  misc_feature: Table A; Target 59765; HLA-A*33:03; PAX3; ENSG00000135903; TAA
SVSSISRILR

SEQ ID NO: 59766 - protein, 10 aa, Homo sapiens
  misc_feature: Table A; Target 59766; HLA-A*68:01; PAX3; ENSG00000135903; TAA
SVSSISRILR

SEQ ID NO: 59767 - protein, 10 aa, Homo sapiens
  misc_feature: Table A; Target 59767; HLA-C*07:06; PAX3; ENSG00000135903; TAA
SVSSISRILR

SEQ ID NO: 59768 - protein, 9 aa, Homo sapiens
  misc_feature: Table A; Target 59768; HLA-C*06:02; PAX3; ENSG00000135903; TAA
SYQPTSIPQ

SEQ ID NO: 59769 - protein, 11 aa, Homo sapiens
  misc_feature: Table A; Target 59769; HLA-A*23:01; PAX3; ENSG00000135903; TAA
SYQPTSIPQAV

SEQ ID NO: 59770 - protein, 11 aa, Homo sapiens
  misc_feature: Table A; Target 59770; HLA-A*24:02; PAX3; ENSG00000135903; TAA
SYQPTSIPQAV

SEQ ID NO: 59771 - protein, 11 aa, Homo sapiens
  misc_feature: Table A; Target 59771; HLA-C*14:02; PAX3; ENSG00000135903; TAA
SYQPTSIPQAV

SEQ ID NO: 59772 - protein, 10 aa, Homo sapiens
  misc_feature: Table A; Target 59772; HLA-A*68:01; PAX3; ENSG00000135903; TAA
TAEQLEELER

SEQ ID NO: 59773 - protein, 10 aa, Homo sapiens
  misc_feature: Table A; Target 59773; HLA-B*27:02; PAX3; ENSG00000135903; TAA
TAEQLEELER

SEQ ID NO: 59774 - protein, 10 aa, Homo sapiens
  misc_feature: Table A; Target 59774; HLA-C*07:06; PAX3; ENSG00000135903; TAA
TAEQLEELER

SEQ ID NO: 59775 - protein, 9 aa, Homo sapiens
  misc_feature: Table A; Target 59775; HLA-A*23:01; PAX3; ENSG00000135903; TAA
TAMPTLPTY

SEQ ID NO: 59776 - protein, 9 aa, Homo sapiens
  misc_feature: Table A; Target 59776; HLA-A*25:01; PAX3; ENSG00000135903; TAA
TAMPTLPTY

SEQ ID NO: 59777 - protein, 9 aa, Homo sapiens
  misc_feature: Table A; Target 59777; HLA-A*26:01; PAX3; ENSG00000135903; TAA
TAMPTLPTY

SEQ ID NO: 59778 - protein, 9 aa, Homo sapiens
  misc_feature: Table A; Target 59778; HLA-A*29:02; PAX3; ENSG00000135903; TAA
TAMPTLPTY

SEQ ID NO: 59779 - protein, 9 aa, Homo sapiens
  misc_feature: Table A; Target 59779; HLA-A*30:02; PAX3; ENSG00000135903; TAA
TAMPTLPTY

SEQ ID NO: 59780 - protein, 9 aa, Homo sapiens
  misc_feature: Table A; Target 59780; HLA-A*32:01; PAX3; ENSG00000135903; TAA
TAMPTLPTY

SEQ ID NO: 59781 - protein, 9 aa, Homo sapiens
  misc_feature: Table A; Target 59781; HLA-B*15:01; PAX3; ENSG00000135903; TAA
TAMPTLPTY

SEQ ID NO: 59782 - protein, 9 aa, Homo sapiens
  misc_feature: Table A; Target 59782; HLA-B*15:03; PAX3; ENSG00000135903; TAA
TAMPTLPTY

SEQ ID NO: 59783 - protein, 9 aa, Homo sapiens
  misc_feature: Table A; Target 59783; HLA-B*18:01; PAX3; ENSG00000135903; TAA
TAMPTLPTY

SEQ ID NO: 59784 - protein, 9 aa, Homo sapiens
  misc_feature: Table A; Target 59784; HLA-B*35:01; PAX3; ENSG00000135903; TAA
TAMPTLPTY

SEQ ID NO: 59785 - protein, 9 aa, Homo sapiens
  misc_feature: Table A; Target 59785; HLA-B*35:03; PAX3; ENSG00000135903; TAA
TAMPTLPTY

SEQ ID NO: 59786 - protein, 9 aa, Homo sapiens
  misc_feature: Table A; Target 59786; HLA-B*39:01; PAX3; ENSG00000135903; TAA
TAMPTLPTY

SEQ ID NO: 59787 - protein, 9 aa, Homo sapiens
  misc_feature: Table A; Target 59787; HLA-B*46:01; PAX3; ENSG00000135903; TAA
TAMPTLPTY

SEQ ID NO: 59788 - protein, 9 aa, Homo sapiens
  misc_feature: Table A; Target 59788; HLA-B*51:01; PAX3; ENSG00000135903; TAA
TAMPTLPTY

SEQ ID NO: 59789 - protein, 9 aa, Homo sapiens
  misc_feature: Table A; Target 59789; HLA-B*54:01; PAX3; ENSG00000135903; TAA
TAMPTLPTY

SEQ ID NO: 59790 - protein, 9 aa, Homo sapiens
  misc_feature: Table A; Target 59790; HLA-B*55:01; PAX3; ENSG00000135903; TAA
TAMPTLPTY

SEQ ID NO: 59791 - protein, 9 aa, Homo sapiens
  misc_feature: Table A; Target 59791; HLA-B*56:01; PAX3; ENSG00000135903; TAA
TAMPTLPTY

SEQ ID NO: 59792 - protein, 9 aa, Homo sapiens
  misc_feature: Table A; Target 59792; HLA-B*57:01; PAX3; ENSG00000135903; TAA
TAMPTLPTY

SEQ ID NO: 59793 - protein, 9 aa, Homo sapiens
  misc_feature: Table A; Target 59793; HLA-B*58:01; PAX3; ENSG00000135903; TAA
TAMPTLPTY

SEQ ID NO: 59794 - protein, 9 aa, Homo sapiens
  misc_feature: Table A; Target 59794; HLA-C*01:02; PAX3; ENSG00000135903; TAA
TAMPTLPTY

SEQ ID NO: 59795 - protein, 9 aa, Homo sapiens
  misc_feature: Table A; Target 59795; HLA-C*02:02; PAX3; ENSG00000135903; TAA
TAMPTLPTY

SEQ ID NO: 59796 - protein, 9 aa, Homo sapiens
  misc_feature: Table A; Target 59796; HLA-C*03:03; PAX3; ENSG00000135903; TAA
TAMPTLPTY

SEQ ID NO: 59797 - protein, 9 aa, Homo sapiens
  misc_feature: Table A; Target 59797; HLA-C*03:04; PAX3; ENSG00000135903; TAA
TAMPTLPTY

SEQ ID NO: 59798 - protein, 9 aa, Homo sapiens
  misc_feature: Table A; Target 59798; HLA-C*07:04; PAX3; ENSG00000135903; TAA
TAMPTLPTY

SEQ ID NO: 59799 - protein, 9 aa, Homo sapiens
  misc_feature: Table A; Target 59799; HLA-C*07:06; PAX3; ENSG00000135903; TAA
TAMPTLPTY

SEQ ID NO: 59800 - protein, 9 aa, Homo sapiens
  misc_feature: Table A; Target 59800; HLA-C*12:03; PAX3; ENSG00000135903; TAA
TAMPTLPTY

SEQ ID NO: 59801 - protein, 9 aa, Homo sapiens
  misc_feature: Table A; Target 59801; HLA-C*14:02; PAX3; ENSG00000135903; TAA
TAMPTLPTY

SEQ ID NO: 59802 - protein, 9 aa, Homo sapiens
  misc_feature: Table A; Target 59802; HLA-C*16:01; PAX3; ENSG00000135903; TAA
TAMPTLPTY

SEQ ID NO: 59803 - protein, 9 aa, Homo sapiens
  misc_feature: Table A; Target 59803; HLA-C*16:02; PAX3; ENSG00000135903; TAA
TAMPTLPTY

SEQ ID NO: 59804 - protein, 9 aa, Homo sapiens
  misc_feature: Table A; Target 59804; HLA-C*16:04; PAX3; ENSG00000135903; TAA
TAMPTLPTY

SEQ ID NO: 59805 - protein, 10 aa, Homo sapiens
  misc_feature: Table A; Target 59805; HLA-C*06:02; PAX3; ENSG00000135903; TAA
TDSFVPPSGP

SEQ ID NO: 59806 - protein, 10 aa, Homo sapiens
  misc_feature: Table A; Target 59806; HLA-C*07:02; PAX3; ENSG00000135903; TAA
TDSFVPPSGP

SEQ ID NO: 59807 - protein, 11 aa, Homo sapiens
  misc_feature: Table A; Target 59807; HLA-C*06:02; PAX3; ENSG00000135903; TAA
TDSFVPPSGPS

SEQ ID NO: 59808 - protein, 8 aa, Homo sapiens
  misc_feature: Table A; Target 59808; HLA-B*37:01; PAX3; ENSG00000135903; TAA
TDYALSPL

SEQ ID NO: 59809 - protein, 10 aa, Homo sapiens
  misc_feature: Table A; Target 59809; HLA-C*12:03; PAX3; ENSG00000135903; TAA
TDYALSPLTG

SEQ ID NO: 59810 - protein, 11 aa, Homo sapiens
  misc_feature: Table A; Target 59810; HLA-A*26:01; PAX3; ENSG00000135903; TAA
TGYSMDPVTGY

SEQ ID NO: 59811 - protein, 11 aa, Homo sapiens
  misc_feature: Table A; Target 59811; HLA-A*30:02; PAX3; ENSG00000135903; TAA
TGYSMDPVTGY

SEQ ID NO: 59812 - protein, 11 aa, Homo sapiens
  misc_feature: Table A; Target 59812; HLA-B*15:03; PAX3; ENSG00000135903; TAA
TGYSMDPVTGY

SEQ ID NO: 59813 - protein, 11 aa, Homo sapiens
  misc_feature: Table A; Target 59813; HLA-B*39:01; PAX3; ENSG00000135903; TAA
TGYSMDPVTGY

SEQ ID NO: 59814 - protein, 11 aa, Homo sapiens
  misc_feature: Table A; Target 59814; HLA-C*12:03; PAX3; ENSG00000135903; TAA
TGYSMDPVTGY

SEQ ID NO: 59815 - protein, 11 aa, Homo sapiens
  misc_feature: Table A; Target 59815; HLA-C*07:04; PAX3; ENSG00000135903; TAA
TIGNGLSPQVM

SEQ ID NO: 59816 - protein, 8 aa, Homo sapiens
  misc_feature: Table A; Target 59816; HLA-A*68:01; PAX3; ENSG00000135903; TAA
TLAGAVPR

SEQ ID NO: 59817 - protein, 8 aa, Homo sapiens
  misc_feature: Table A; Target 59817; HLA-C*07:06; PAX3; ENSG00000135903; TAA
TLAGAVPR

SEQ ID NO: 59818 - protein, 9 aa, Homo sapiens
  misc_feature: Table A; Target 59818; HLA-A*02:01; PAX3; ENSG00000135903; TAA
TLAGAVPRM

SEQ ID NO: 59819 - protein, 9 aa, Homo sapiens
  misc_feature: Table A; Target 59819; HLA-A*02:03; PAX3; ENSG00000135903; TAA
TLAGAVPRM

SEQ ID NO: 59820 - protein, 9 aa, Homo sapiens
  misc_feature: Table A; Target 59820; HLA-A*02:04; PAX3; ENSG00000135903; TAA
TLAGAVPRM

SEQ ID NO: 59821 - protein, 9 aa, Homo sapiens
  misc_feature: Table A; Target 59821; HLA-A*02:07; PAX3; ENSG00000135903; TAA
TLAGAVPRM

SEQ ID NO: 59822 - protein, 9 aa, Homo sapiens
  misc_feature: Table A; Target 59822; HLA-A*03:02; PAX3; ENSG00000135903; TAA
TLAGAVPRM

SEQ ID NO: 59823 - protein, 9 aa, Homo sapiens
  misc_feature: Table A; Target 59823; HLA-A*26:01; PAX3; ENSG00000135903; TAA
TLAGAVPRM

SEQ ID NO: 59824 - protein, 9 aa, Homo sapiens
  misc_feature: Table A; Target 59824; HLA-A*32:01; PAX3; ENSG00000135903; TAA
TLAGAVPRM

SEQ ID NO: 59825 - protein, 9 aa, Homo sapiens
  misc_feature: Table A; Target 59825; HLA-B*13:02; PAX3; ENSG00000135903; TAA
TLAGAVPRM

SEQ ID NO: 59826 - protein, 9 aa, Homo sapiens
  misc_feature: Table A; Target 59826; HLA-B*27:05; PAX3; ENSG00000135903; TAA
TLAGAVPRM

SEQ ID NO: 59827 - protein, 9 aa, Homo sapiens
  misc_feature: Table A; Target 59827; HLA-B*38:01; PAX3; ENSG00000135903; TAA
TLAGAVPRM

SEQ ID NO: 59828 - protein, 9 aa, Homo sapiens
  misc_feature: Table A; Target 59828; HLA-B*39:01; PAX3; ENSG00000135903; TAA
TLAGAVPRM

SEQ ID NO: 59829 - protein, 9 aa, Homo sapiens
  misc_feature: Table A; Target 59829; HLA-B*55:01; PAX3; ENSG00000135903; TAA
TLAGAVPRM

SEQ ID NO: 59830 - protein, 9 aa, Homo sapiens
  misc_feature: Table A; Target 59830; HLA-C*07:04; PAX3; ENSG00000135903; TAA
TLAGAVPRM

SEQ ID NO: 59831 - protein, 9 aa, Homo sapiens
  misc_feature: Table A; Target 59831; HLA-C*16:01; PAX3; ENSG00000135903; TAA
TLAGAVPRM

SEQ ID NO: 59832 - protein, 9 aa, Homo sapiens
  misc_feature: Table A; Target 59832; HLA-C*16:02; PAX3; ENSG00000135903; TAA
TLAGAVPRM

SEQ ID NO: 59833 - protein, 10 aa, Homo sapiens
  misc_feature: Table A; Target 59833; HLA-A*30:02; PAX3; ENSG00000135903; TAA
TSQSYCPPTY

SEQ ID NO: 59834 - protein, 10 aa, Homo sapiens
  misc_feature: Table A; Target 59834; HLA-B*39:01; PAX3; ENSG00000135903; TAA
TSQSYCPPTY

SEQ ID NO: 59835 - protein, 10 aa, Homo sapiens
  misc_feature: Table A; Target 59835; HLA-C*07:01; PAX3; ENSG00000135903; TAA
TSQSYCPPTY

SEQ ID NO: 59836 - protein, 8 aa, Homo sapiens
  misc_feature: Table A; Target 59836; HLA-B*13:02; PAX3; ENSG00000135903; TAA
TSYQPTSI

SEQ ID NO: 59837 - protein, 8 aa, Homo sapiens
  misc_feature: Table A; Target 59837; HLA-B*51:01; PAX3; ENSG00000135903; TAA
TSYQPTSI

SEQ ID NO: 59838 - protein, 8 aa, Homo sapiens
  misc_feature: Table A; Target 59838; HLA-C*05:01; PAX3; ENSG00000135903; TAA
TSYQPTSI

SEQ ID NO: 59839 - protein, 9 aa, Homo sapiens
  misc_feature: Table A; Target 59839; HLA-A*03:01; PAX3; ENSG00000135903; TAA
TTLAGAVPR

SEQ ID NO: 59840 - protein, 9 aa, Homo sapiens
  misc_feature: Table A; Target 59840; HLA-A*03:02; PAX3; ENSG00000135903; TAA
TTLAGAVPR

SEQ ID NO: 59841 - protein, 9 aa, Homo sapiens
  misc_feature: Table A; Target 59841; HLA-A*11:01; PAX3; ENSG00000135903; TAA
TTLAGAVPR

SEQ ID NO: 59842 - protein, 9 aa, Homo sapiens
  misc_feature: Table A; Target 59842; HLA-A*31:01; PAX3; ENSG00000135903; TAA
TTLAGAVPR

SEQ ID NO: 59843 - protein, 9 aa, Homo sapiens
  misc_feature: Table A; Target 59843; HLA-A*33:01; PAX3; ENSG00000135903; TAA
TTLAGAVPR

SEQ ID NO: 59844 - protein, 9 aa, Homo sapiens
  misc_feature: Table A; Target 59844; HLA-A*33:03; PAX3; ENSG00000135903; TAA
TTLAGAVPR

SEQ ID NO: 59845 - protein, 9 aa, Homo sapiens
  misc_feature: Table A; Target 59845; HLA-A*68:01; PAX3; ENSG00000135903; TAA
TTLAGAVPR

SEQ ID NO: 59846 - protein, 9 aa, Homo sapiens
  misc_feature: Table A; Target 59846; HLA-B*27:02; PAX3; ENSG00000135903; TAA
TTLAGAVPR

SEQ ID NO: 59847 - protein, 9 aa, Homo sapiens
  misc_feature: Table A; Target 59847; HLA-B*27:05; PAX3; ENSG00000135903; TAA
TTLAGAVPR

SEQ ID NO: 59848 - protein, 9 aa, Homo sapiens
  misc_feature: Table A; Target 59848; HLA-C*07:06; PAX3; ENSG00000135903; TAA
TTLAGAVPR

SEQ ID NO: 59849 - protein, 10 aa, Homo sapiens
  misc_feature: Table A; Target 59849; HLA-A*02:01; PAX3; ENSG00000135903; TAA
TTLAGAVPRM

SEQ ID NO: 59850 - protein, 10 aa, Homo sapiens
  misc_feature: Table A; Target 59850; HLA-A*02:04; PAX3; ENSG00000135903; TAA
TTLAGAVPRM

SEQ ID NO: 59851 - protein, 10 aa, Homo sapiens
  misc_feature: Table A; Target 59851; HLA-A*03:02; PAX3; ENSG00000135903; TAA
TTLAGAVPRM

SEQ ID NO: 59852 - protein, 10 aa, Homo sapiens
  misc_feature: Table A; Target 59852; HLA-A*11:01; PAX3; ENSG00000135903; TAA
TTLAGAVPRM

SEQ ID NO: 59853 - protein, 10 aa, Homo sapiens
  misc_feature: Table A; Target 59853; HLA-A*26:01; PAX3; ENSG00000135903; TAA
TTLAGAVPRM

SEQ ID NO: 59854 - protein, 10 aa, Homo sapiens
  misc_feature: Table A; Target 59854; HLA-A*68:01; PAX3; ENSG00000135903; TAA
TTVSASCSQR

SEQ ID NO: 59855 - protein, 10 aa, Homo sapiens
  misc_feature: Table A; Target 59855; HLA-C*07:06; PAX3; ENSG00000135903; TAA
TTVSASCSQR

SEQ ID NO: 59856 - protein, 8 aa, Homo sapiens
  misc_feature: Table A; Target 59856; HLA-B*51:01; PAX3; ENSG00000135903; TAA
TVPSVSSI

SEQ ID NO: 59857 - protein, 8 aa, Homo sapiens
  misc_feature: Table A; Target 59857; HLA-C*01:02; PAX3; ENSG00000135903; TAA
TVPSVSSI

SEQ ID NO: 59858 - protein, 10 aa, Homo sapiens
  misc_feature: Table A; Target 59858; HLA-A*31:01; PAX3; ENSG00000135903; TAA
TVPSVSSISR

SEQ ID NO: 59859 - protein, 10 aa, Homo sapiens
  misc_feature: Table A; Target 59859; HLA-A*33:03; PAX3; ENSG00000135903; TAA
TVPSVSSISR

SEQ ID NO: 59860 - protein, 10 aa, Homo sapiens
  misc_feature: Table A; Target 59860; HLA-A*68:01; PAX3; ENSG00000135903; TAA
TVPSVSSISR

SEQ ID NO: 59861 - protein, 10 aa, Homo sapiens
  misc_feature: Table A; Target 59861; HLA-C*07:06; PAX3; ENSG00000135903; TAA
TVPSVSSISR

SEQ ID NO: 59862 - protein, 11 aa, Homo sapiens
  misc_feature: Table A; Target 59862; HLA-A*02:07; PAX3; ENSG00000135903; TAA
TVPSVSSISRI

SEQ ID NO: 59863 - protein, 11 aa, Homo sapiens
  misc_feature: Table A; Target 59863; HLA-A*68:02; PAX3; ENSG00000135903; TAA
TVPSVSSISRI

SEQ ID NO: 59864 - protein, 9 aa, Homo sapiens
  misc_feature: Table A; Target 59864; HLA-A*33:03; PAX3; ENSG00000135903; TAA
TVSASCSQR

SEQ ID NO: 59865 - protein, 9 aa, Homo sapiens
  misc_feature: Table A; Target 59865; HLA-A*68:01; PAX3; ENSG00000135903; TAA
TVSASCSQR

SEQ ID NO: 59866 - protein, 9 aa, Homo sapiens
  misc_feature: Table A; Target 59866; HLA-C*07:06; PAX3; ENSG00000135903; TAA
TVSASCSQR

SEQ ID NO: 59867 - protein, 9 aa, Homo sapiens
  misc_feature: Table A; Target 59867; HLA-A*23:01; PAX3; ENSG00000135903; TAA
TYQLSETSY

SEQ ID NO: 59868 - protein, 9 aa, Homo sapiens
  misc_feature: Table A; Target 59868; HLA-A*30:02; PAX3; ENSG00000135903; TAA
TYQLSETSY

SEQ ID NO: 59869 - protein, 9 aa, Homo sapiens
  misc_feature: Table A; Target 59869; HLA-A*32:01; PAX3; ENSG00000135903; TAA
TYQLSETSY

SEQ ID NO: 59870 - protein, 9 aa, Homo sapiens
  misc_feature: Table A; Target 59870; HLA-B*15:01; PAX3; ENSG00000135903; TAA
TYQLSETSY

SEQ ID NO: 59871 - protein, 9 aa, Homo sapiens
  misc_feature: Table A; Target 59871; HLA-B*15:03; PAX3; ENSG00000135903; TAA
TYQLSETSY

SEQ ID NO: 59872 - protein, 9 aa, Homo sapiens
  misc_feature: Table A; Target 59872; HLA-C*01:02; PAX3; ENSG00000135903; TAA
TYQLSETSY

SEQ ID NO: 59873 - protein, 9 aa, Homo sapiens
  misc_feature: Table A; Target 59873; HLA-C*04:01; PAX3; ENSG00000135903; TAA
TYQLSETSY

SEQ ID NO: 59874 - protein, 9 aa, Homo sapiens
  misc_feature: Table A; Target 59874; HLA-C*07:04; PAX3; ENSG00000135903; TAA
TYQLSETSY

SEQ ID NO: 59875 - protein, 9 aa, Homo sapiens
  misc_feature: Table A; Target 59875; HLA-C*14:02; PAX3; ENSG00000135903; TAA
TYQLSETSY

SEQ ID NO: 59876 - protein, 9 aa, Homo sapiens
  misc_feature: Table A; Target 59876; HLA-A*23:01; PAX3; ENSG00000135903; TAA
TYSTTGYSM

SEQ ID NO: 59877 - protein, 9 aa, Homo sapiens
  misc_feature: Table A; Target 59877; HLA-A*24:02; PAX3; ENSG00000135903; TAA
TYSTTGYSM

SEQ ID NO: 59878 - protein, 9 aa, Homo sapiens
  misc_feature: Table A; Target 59878; HLA-C*14:02; PAX3; ENSG00000135903; TAA
TYSTTGYSM

SEQ ID NO: 59879 - protein, 9 aa, Homo sapiens
  misc_feature: Table A; Target 59879; HLA-A*30:02; PAX3; ENSG00000135903; TAA
VPHQPQTDY

SEQ ID NO: 59880 - protein, 9 aa, Homo sapiens
  misc_feature: Table A; Target 59880; HLA-B*07:02; PAX3; ENSG00000135903; TAA
VPHQPQTDY

SEQ ID NO: 59881 - protein, 9 aa, Homo sapiens
  misc_feature: Table A; Target 59881; HLA-B*15:01; PAX3; ENSG00000135903; TAA
VPHQPQTDY

SEQ ID NO: 59882 - protein, 9 aa, Homo sapiens
  misc_feature: Table A; Target 59882; HLA-B*15:03; PAX3; ENSG00000135903; TAA
VPHQPQTDY

SEQ ID NO: 59883 - protein, 9 aa, Homo sapiens
  misc_feature: Table A; Target 59883; HLA-B*35:01; PAX3; ENSG00000135903; TAA
VPHQPQTDY

SEQ ID NO: 59884 - protein, 9 aa, Homo sapiens
  misc_feature: Table A; Target 59884; HLA-B*46:01; PAX3; ENSG00000135903; TAA
VPHQPQTDY

SEQ ID NO: 59885 - protein, 9 aa, Homo sapiens
  misc_feature: Table A; Target 59885; HLA-B*55:01; PAX3; ENSG00000135903; TAA
VPHQPQTDY

SEQ ID NO: 59886 - protein, 9 aa, Homo sapiens
  misc_feature: Table A; Target 59886; HLA-C*07:02; PAX3; ENSG00000135903; TAA
VPHQPQTDY

SEQ ID NO: 59887 - protein, 11 aa, Homo sapiens
  misc_feature: Table A; Target 59887; HLA-B*35:03; PAX3; ENSG00000135903; TAA
VPHQPQTDYAL

SEQ ID NO: 59888 - protein, 11 aa, Homo sapiens
  misc_feature: Table A; Target 59888; HLA-B*55:01; PAX3; ENSG00000135903; TAA
VPHQPQTDYAL

SEQ ID NO: 59889 - protein, 10 aa, Homo sapiens
  misc_feature: Table A; Target 59889; HLA-B*07:02; PAX3; ENSG00000135903; TAA
VPPSGPSNPM

SEQ ID NO: 59890 - protein, 10 aa, Homo sapiens
  misc_feature: Table A; Target 59890; HLA-B*35:01; PAX3; ENSG00000135903; TAA
VPPSGPSNPM

SEQ ID NO: 59891 - protein, 10 aa, Homo sapiens
  misc_feature: Table A; Target 59891; HLA-B*35:03; PAX3; ENSG00000135903; TAA
VPPSGPSNPM

SEQ ID NO: 59892 - protein, 10 aa, Homo sapiens
  misc_feature: Table A; Target 59892; HLA-B*51:01; PAX3; ENSG00000135903; TAA
VPPSGPSNPM

SEQ ID NO: 59893 - protein, 10 aa, Homo sapiens
  misc_feature: Table A; Target 59893; HLA-B*56:01; PAX3; ENSG00000135903; TAA
VPPSGPSNPM

SEQ ID NO: 59894 - protein, 10 aa, Homo sapiens
  misc_feature: Table A; Target 59894; HLA-C*01:02; PAX3; ENSG00000135903; TAA
VPPSGPSNPM

SEQ ID NO: 59895 - protein, 10 aa, Homo sapiens
  misc_feature: Table A; Target 59895; HLA-C*05:01; PAX3; ENSG00000135903; TAA
VPPSGPSNPM

SEQ ID NO: 59896 - protein, 10 aa, Homo sapiens
  misc_feature: Table A; Target 59896; HLA-C*07:02; PAX3; ENSG00000135903; TAA
VPPSGPSNPM

SEQ ID NO: 59897 - protein, 9 aa, Homo sapiens
  misc_feature: Table A; Target 59897; HLA-A*68:01; PAX3; ENSG00000135903; TAA
VPSVSSISR

SEQ ID NO: 59898 - protein, 9 aa, Homo sapiens
  misc_feature: Table A; Target 59898; HLA-C*07:06; PAX3; ENSG00000135903; TAA
VPSVSSISR

SEQ ID NO: 59899 - protein, 10 aa, Homo sapiens
  misc_feature: Table A; Target 59899; HLA-B*07:02; PAX3; ENSG00000135903; TAA
VPSVSSISRI

SEQ ID NO: 59900 - protein, 11 aa, Homo sapiens
  misc_feature: Table A; Target 59900; HLA-B*07:02; PAX3; ENSG00000135903; TAA
VPSVSSISRIL

SEQ ID NO: 59901 - protein, 11 aa, Homo sapiens
  misc_feature: Table A; Target 59901; HLA-C*07:02; PAX3; ENSG00000135903; TAA
VPSVSSISRIL

SEQ ID NO: 59902 - protein, 9 aa, Homo sapiens
  misc_feature: Table A; Target 59902; HLA-C*03:04; PAX3; ENSG00000135903; TAA
VSASCSQRL

SEQ ID NO: 59903 - protein, 9 aa, Homo sapiens
  misc_feature: Table A; Target 59903; HLA-C*16:01; PAX3; ENSG00000135903; TAA
VSASCSQRL

SEQ ID NO: 59904 - protein, 8 aa, Homo sapiens
  misc_feature: Table A; Target 59904; HLA-C*05:01; PAX3; ENSG00000135903; TAA
VSDPSSTV

SEQ ID NO: 59905 - protein, 9 aa, Homo sapiens
  misc_feature: Table A; Target 59905; HLA-A*01:01; PAX3; ENSG00000135903; TAA
VSDPSSTVH

SEQ ID NO: 59906 - protein, 9 aa, Homo sapiens
  misc_feature: Table A; Target 59906; HLA-C*03:03; PAX3; ENSG00000135903; TAA
VSDPSSTVH

SEQ ID NO: 59907 - protein, 9 aa, Homo sapiens
  misc_feature: Table A; Target 59907; HLA-C*05:01; PAX3; ENSG00000135903; TAA
VSDPSSTVH

SEQ ID NO: 59908 - protein, 10 aa, Homo sapiens
  misc_feature: Table A; Target 59908; HLA-A*01:01; PAX3; ENSG00000135903; TAA
VSDPSSTVHR

SEQ ID NO: 59909 - protein, 10 aa, Homo sapiens
  misc_feature: Table A; Target 59909; HLA-A*11:01; PAX3; ENSG00000135903; TAA
VSDPSSTVHR

SEQ ID NO: 59910 - protein, 10 aa, Homo sapiens
  misc_feature: Table A; Target 59910; HLA-A*68:01; PAX3; ENSG00000135903; TAA
VSDPSSTVHR

SEQ ID NO: 59911 - protein, 10 aa, Homo sapiens
  misc_feature: Table A; Target 59911; HLA-C*07:06; PAX3; ENSG00000135903; TAA
VSDPSSTVHR

SEQ ID NO: 59912 - protein, 8 aa, Homo sapiens
  misc_feature: Table A; Target 59912; HLA-C*03:04; PAX3; ENSG00000135903; TAA
VSSISRIL

SEQ ID NO: 59913 - protein, 8 aa, Homo sapiens
  misc_feature: Table A; Target 59913; HLA-C*16:01; PAX3; ENSG00000135903; TAA
VSSISRIL

SEQ ID NO: 59914 - protein, 9 aa, Homo sapiens
  misc_feature: Table A; Target 59914; HLA-A*31:01; PAX3; ENSG00000135903; TAA
VSSISRILR

SEQ ID NO: 59915 - protein, 9 aa, Homo sapiens
  misc_feature: Table A; Target 59915; HLA-A*01:01; PAX3; ENSG00000135903; TAA
VTGYQYGQY

SEQ ID NO: 59916 - protein, 9 aa, Homo sapiens
  misc_feature: Table A; Target 59916; HLA-A*26:01; PAX3; ENSG00000135903; TAA
VTGYQYGQY

SEQ ID NO: 59917 - protein, 9 aa, Homo sapiens
  misc_feature: Table A; Target 59917; HLA-A*30:02; PAX3; ENSG00000135903; TAA
VTGYQYGQY

SEQ ID NO: 59918 - protein, 9 aa, Homo sapiens
  misc_feature: Table A; Target 59918; HLA-A*03:02; PAX3; ENSG00000135903; TAA
VTTPDVEKK

SEQ ID NO: 59919 - protein, 9 aa, Homo sapiens
  misc_feature: Table A; Target 59919; HLA-A*11:01; PAX3; ENSG00000135903; TAA
VTTPDVEKK

SEQ ID NO: 59920 - protein, 10 aa, Homo sapiens
  misc_feature: Table A; Target 59920; HLA-B*57:01; PAX3; ENSG00000135903; TAA
YCLPSTRHGF

SEQ ID NO: 59921 - protein, 10 aa, Homo sapiens
  misc_feature: Table A; Target 59921; HLA-C*07:02; PAX3; ENSG00000135903; TAA
YCPPTYSTTG

SEQ ID NO: 59922 - protein, 9 aa, Homo sapiens
  misc_feature: Table A; Target 59922; HLA-A*02:04; PAX3; ENSG00000135903; TAA
YGQSKPWTF

SEQ ID NO: 59923 - protein, 9 aa, Homo sapiens
  misc_feature: Table A; Target 59923; HLA-A*23:01; PAX3; ENSG00000135903; TAA
YGQSKPWTF

SEQ ID NO: 59924 - protein, 9 aa, Homo sapiens
  misc_feature: Table A; Target 59924; HLA-A*24:02; PAX3; ENSG00000135903; TAA
YGQSKPWTF

SEQ ID NO: 59925 - protein, 9 aa, Homo sapiens
  misc_feature: Table A; Target 59925; HLA-A*31:01; PAX3; ENSG00000135903; TAA
YGQSKPWTF

SEQ ID NO: 59926 - protein, 9 aa, Homo sapiens
  misc_feature: Table A; Target 59926; HLA-A*32:01; PAX3; ENSG00000135903; TAA
YGQSKPWTF

SEQ ID NO: 59927 - protein, 9 aa, Homo sapiens
  misc_feature: Table A; Target 59927; HLA-B*08:01; PAX3; ENSG00000135903; TAA
YGQSKPWTF

SEQ ID NO: 59928 - protein, 9 aa, Homo sapiens
  misc_feature: Table A; Target 59928; HLA-B*54:01; PAX3; ENSG00000135903; TAA
YGQSKPWTF

SEQ ID NO: 59929 - protein, 9 aa, Homo sapiens
  misc_feature: Table A; Target 59929; HLA-B*57:01; PAX3; ENSG00000135903; TAA
YGQSKPWTF

SEQ ID NO: 59930 - protein, 9 aa, Homo sapiens
  misc_feature: Table A; Target 59930; HLA-B*58:01; PAX3; ENSG00000135903; TAA
YGQSKPWTF

SEQ ID NO: 59931 - protein, 9 aa, Homo sapiens
  misc_feature: Table A; Target 59931; HLA-C*02:02; PAX3; ENSG00000135903; TAA
YGQSKPWTF

SEQ ID NO: 59932 - protein, 9 aa, Homo sapiens
  misc_feature: Table A; Target 59932; HLA-C*04:01; PAX3; ENSG00000135903; TAA
YGQSKPWTF

SEQ ID NO: 59933 - protein, 9 aa, Homo sapiens
  misc_feature: Table A; Target 59933; HLA-C*06:02; PAX3; ENSG00000135903; TAA
YGQSKPWTF

SEQ ID NO: 59934 - protein, 9 aa, Homo sapiens
  misc_feature: Table A; Target 59934; HLA-C*07:01; PAX3; ENSG00000135903; TAA
YGQSKPWTF

SEQ ID NO: 59935 - protein, 9 aa, Homo sapiens
  misc_feature: Table A; Target 59935; HLA-C*07:02; PAX3; ENSG00000135903; TAA
YGQSKPWTF

SEQ ID NO: 59936 - protein, 9 aa, Homo sapiens
  misc_feature: Table A; Target 59936; HLA-C*07:04; PAX3; ENSG00000135903; TAA
YGQSKPWTF

SEQ ID NO: 59937 - protein, 9 aa, Homo sapiens
  misc_feature: Table A; Target 59937; HLA-C*12:03; PAX3; ENSG00000135903; TAA
YGQSKPWTF

SEQ ID NO: 59938 - protein, 9 aa, Homo sapiens
  misc_feature: Table A; Target 59938; HLA-C*16:01; PAX3; ENSG00000135903; TAA
YGQSKPWTF

SEQ ID NO: 59939 - protein, 9 aa, Homo sapiens
  misc_feature: Table A; Target 59939; HLA-C*16:02; PAX3; ENSG00000135903; TAA
YGQSKPWTF

SEQ ID NO: 59940 - protein, 8 aa, Homo sapiens
  misc_feature: Table A; Target 59940; HLA-B*07:02; PAX3; ENSG00000135903; TAA
YPRSGFPL

SEQ ID NO: 59941 - protein, 10 aa, Homo sapiens
  misc_feature: Table A; Target 59941; HLA-B*07:02; PAX3; ENSG00000135903; TAA
YPRSGFPLEV

SEQ ID NO: 59942 - protein, 10 aa, Homo sapiens
  misc_feature: Table A; Target 59942; HLA-B*51:01; PAX3; ENSG00000135903; TAA
YPRSGFPLEV

SEQ ID NO: 59943 - protein, 10 aa, Homo sapiens
  misc_feature: Table A; Target 59943; HLA-B*54:01; PAX3; ENSG00000135903; TAA
YPRSGFPLEV

SEQ ID NO: 59944 - protein, 10 aa, Homo sapiens
  misc_feature: Table A; Target 59944; HLA-B*56:01; PAX3; ENSG00000135903; TAA
YPRSGFPLEV

SEQ ID NO: 59945 - protein, 10 aa, Homo sapiens
  misc_feature: Table A; Target 59945; HLA-C*07:02; PAX3; ENSG00000135903; TAA
YPRSGFPLEV

SEQ ID NO: 59946 - protein, 8 aa, Homo sapiens
  misc_feature: Table A; Target 59946; HLA-B*15:01; PAX3; ENSG00000135903; TAA
YQLSETSY

SEQ ID NO: 59947 - protein, 8 aa, Homo sapiens
  misc_feature: Table A; Target 59947; HLA-B*15:03; PAX3; ENSG00000135903; TAA
YQLSETSY

SEQ ID NO: 59948 - protein, 8 aa, Homo sapiens
  misc_feature: Table A; Target 59948; HLA-B*39:01; PAX3; ENSG00000135903; TAA
YQLSETSY

SEQ ID NO: 59949 - protein, 10 aa, Homo sapiens
  misc_feature: Table A; Target 59949; HLA-B*27:05; PAX3; ENSG00000135903; TAA
YQLSETSYQP

SEQ ID NO: 59950 - protein, 9 aa, Homo sapiens
  misc_feature: Table A; Target 59950; HLA-A*02:01; PAX3; ENSG00000135903; TAA
YQPTSIPQA

SEQ ID NO: 59951 - protein, 9 aa, Homo sapiens
  misc_feature: Table A; Target 59951; HLA-A*02:03; PAX3; ENSG00000135903; TAA
YQPTSIPQA

SEQ ID NO: 59952 - protein, 9 aa, Homo sapiens
  misc_feature: Table A; Target 59952; HLA-A*02:04; PAX3; ENSG00000135903; TAA
YQPTSIPQA

SEQ ID NO: 59953 - protein, 9 aa, Homo sapiens
  misc_feature: Table A; Target 59953; HLA-A*02:07; PAX3; ENSG00000135903; TAA
YQPTSIPQA

SEQ ID NO: 59954 - protein, 9 aa, Homo sapiens
  misc_feature: Table A; Target 59954; HLA-B*13:02; PAX3; ENSG00000135903; TAA
YQPTSIPQA

SEQ ID NO: 59955 - protein, 10 aa, Homo sapiens
  misc_feature: Table A; Target 59955; HLA-A*02:01; PAX3; ENSG00000135903; TAA
YQPTSIPQAV

SEQ ID NO: 59956 - protein, 10 aa, Homo sapiens
  misc_feature: Table A; Target 59956; HLA-A*02:03; PAX3; ENSG00000135903; TAA
YQPTSIPQAV

SEQ ID NO: 59957 - protein, 10 aa, Homo sapiens
  misc_feature: Table A; Target 59957; HLA-A*02:07; PAX3; ENSG00000135903; TAA
YQPTSIPQAV

SEQ ID NO: 59958 - protein, 10 aa, Homo sapiens
  misc_feature: Table A; Target 59958; HLA-A*26:01; PAX3; ENSG00000135903; TAA
YQPTSIPQAV

SEQ ID NO: 59959 - protein, 10 aa, Homo sapiens
  misc_feature: Table A; Target 59959; HLA-A*30:01; PAX3; ENSG00000135903; TAA
YQPTSIPQAV

SEQ ID NO: 59960 - protein, 10 aa, Homo sapiens
  misc_feature: Table A; Target 59960; HLA-B*13:02; PAX3; ENSG00000135903; TAA
YQPTSIPQAV

SEQ ID NO: 59961 - protein, 10 aa, Homo sapiens
  misc_feature: Table A; Target 59961; HLA-C*06:02; PAX3; ENSG00000135903; TAA
YQPTSIPQAV

SEQ ID NO: 59962 - protein, 10 aa, Homo sapiens
  misc_feature: Table A; Target 59962; HLA-A*03:01; PAX3; ENSG00000135903; TAA
YQYGQYGQSK

SEQ ID NO: 59963 - protein, 10 aa, Homo sapiens
  misc_feature: Table A; Target 59963; HLA-A*03:02; PAX3; ENSG00000135903; TAA
YQYGQYGQSK

SEQ ID NO: 59964 - protein, 10 aa, Homo sapiens
  misc_feature: Table A; Target 59964; HLA-A*11:01; PAX3; ENSG00000135903; TAA
YQYGQYGQSK

SEQ ID NO: 59965 - protein, 10 aa, Homo sapiens
  misc_feature: Table A; Target 59965; HLA-B*13:02; PAX3; ENSG00000135903; TAA
YQYGQYGQSK

SEQ ID NO: 59966 - protein, 10 aa, Homo sapiens
  misc_feature: Table A; Target 59966; HLA-B*15:03; PAX3; ENSG00000135903; TAA
YQYGQYGQSK

SEQ ID NO: 59967 - protein, 10 aa, Homo sapiens
  misc_feature: Table A; Target 59967; HLA-B*27:02; PAX3; ENSG00000135903; TAA
YQYGQYGQSK

SEQ ID NO: 59968 - protein, 10 aa, Homo sapiens
  misc_feature: Table A; Target 59968; HLA-B*27:05; PAX3; ENSG00000135903; TAA
YQYGQYGQSK

SEQ ID NO: 59969 - protein, 10 aa, Homo sapiens
  misc_feature: Table A; Target 59969; HLA-B*39:01; PAX3; ENSG00000135903; TAA
YQYGQYGQSK

SEQ ID NO: 59970 - protein, 10 aa, Homo sapiens
  misc_feature: Table A; Target 59970; HLA-B*40:02; PAX3; ENSG00000135903; TAA
YQYGQYGQSK

SEQ ID NO: 59971 - protein, 10 aa, Homo sapiens
  misc_feature: Table A; Target 59971; HLA-C*02:02; PAX3; ENSG00000135903; TAA
YQYGQYGQSK

SEQ ID NO: 59972 - protein, 10 aa, Homo sapiens
  misc_feature: Table A; Target 59972; HLA-C*03:03; PAX3; ENSG00000135903; TAA
YQYGQYGQSK

SEQ ID NO: 59973 - protein, 9 aa, Homo sapiens
  misc_feature: Table A; Target 59973; HLA-A*01:01; PAX3; ENSG00000135903; TAA
YSMDPVTGY

SEQ ID NO: 59974 - protein, 9 aa, Homo sapiens
  misc_feature: Table A; Target 59974; HLA-A*02:03; PAX3; ENSG00000135903; TAA
YSMDPVTGY

SEQ ID NO: 59975 - protein, 9 aa, Homo sapiens
  misc_feature: Table A; Target 59975; HLA-A*02:07; PAX3; ENSG00000135903; TAA
YSMDPVTGY

SEQ ID NO: 59976 - protein, 9 aa, Homo sapiens
  misc_feature: Table A; Target 59976; HLA-A*03:01; PAX3; ENSG00000135903; TAA
YSMDPVTGY

SEQ ID NO: 59977 - protein, 9 aa, Homo sapiens
  misc_feature: Table A; Target 59977; HLA-A*03:02; PAX3; ENSG00000135903; TAA
YSMDPVTGY

SEQ ID NO: 59978 - protein, 9 aa, Homo sapiens
  misc_feature: Table A; Target 59978; HLA-A*11:01; PAX3; ENSG00000135903; TAA
YSMDPVTGY

SEQ ID NO: 59979 - protein, 9 aa, Homo sapiens
  misc_feature: Table A; Target 59979; HLA-A*23:01; PAX3; ENSG00000135903; TAA
YSMDPVTGY

SEQ ID NO: 59980 - protein, 9 aa, Homo sapiens
  misc_feature: Table A; Target 59980; HLA-A*25:01; PAX3; ENSG00000135903; TAA
YSMDPVTGY

SEQ ID NO: 59981 - protein, 9 aa, Homo sapiens
  misc_feature: Table A; Target 59981; HLA-A*26:01; PAX3; ENSG00000135903; TAA
YSMDPVTGY

SEQ ID NO: 59982 - protein, 9 aa, Homo sapiens
  misc_feature: Table A; Target 59982; HLA-A*29:02; PAX3; ENSG00000135903; TAA
YSMDPVTGY

SEQ ID NO: 59983 - protein, 9 aa, Homo sapiens
  misc_feature: Table A; Target 59983; HLA-A*30:02; PAX3; ENSG00000135903; TAA
YSMDPVTGY

SEQ ID NO: 59984 - protein, 9 aa, Homo sapiens
  misc_feature: Table A; Target 59984; HLA-A*31:01; PAX3; ENSG00000135903; TAA
YSMDPVTGY

SEQ ID NO: 59985 - protein, 9 aa, Homo sapiens
  misc_feature: Table A; Target 59985; HLA-A*32:01; PAX3; ENSG00000135903; TAA
YSMDPVTGY

SEQ ID NO: 59986 - protein, 9 aa, Homo sapiens
  misc_feature: Table A; Target 59986; HLA-A*33:01; PAX3; ENSG00000135903; TAA
YSMDPVTGY

SEQ ID NO: 59987 - protein, 9 aa, Homo sapiens
  misc_feature: Table A; Target 59987; HLA-A*33:03; PAX3; ENSG00000135903; TAA
YSMDPVTGY

SEQ ID NO: 59988 - protein, 9 aa, Homo sapiens
  misc_feature: Table A; Target 59988; HLA-A*68:01; PAX3; ENSG00000135903; TAA
YSMDPVTGY

SEQ ID NO: 59989 - protein, 9 aa, Homo sapiens
  misc_feature: Table A; Target 59989; HLA-B*13:02; PAX3; ENSG00000135903; TAA
YSMDPVTGY

SEQ ID NO: 59990 - protein, 9 aa, Homo sapiens
  misc_feature: Table A; Target 59990; HLA-B*15:01; PAX3; ENSG00000135903; TAA
YSMDPVTGY

SEQ ID NO: 59991 - protein, 9 aa, Homo sapiens
  misc_feature: Table A; Target 59991; HLA-B*15:03; PAX3; ENSG00000135903; TAA
YSMDPVTGY

SEQ ID NO: 59992 - protein, 9 aa, Homo sapiens
  misc_feature: Table A; Target 59992; HLA-B*18:01; PAX3; ENSG00000135903; TAA
YSMDPVTGY

SEQ ID NO: 59993 - protein, 9 aa, Homo sapiens
  misc_feature: Table A; Target 59993; HLA-B*27:02; PAX3; ENSG00000135903; TAA
YSMDPVTGY

SEQ ID NO: 59994 - protein, 9 aa, Homo sapiens
  misc_feature: Table A; Target 59994; HLA-B*27:05; PAX3; ENSG00000135903; TAA
YSMDPVTGY

SEQ ID NO: 59995 - protein, 9 aa, Homo sapiens
  misc_feature: Table A; Target 59995; HLA-B*35:01; PAX3; ENSG00000135903; TAA
YSMDPVTGY

SEQ ID NO: 59996 - protein, 9 aa, Homo sapiens
  misc_feature: Table A; Target 59996; HLA-B*37:01; PAX3; ENSG00000135903; TAA
YSMDPVTGY

SEQ ID NO: 59997 - protein, 9 aa, Homo sapiens
  misc_feature: Table A; Target 59997; HLA-B*38:01; PAX3; ENSG00000135903; TAA
YSMDPVTGY

SEQ ID NO: 59998 - protein, 9 aa, Homo sapiens
  misc_feature: Table A; Target 59998; HLA-B*39:01; PAX3; ENSG00000135903; TAA
YSMDPVTGY

SEQ ID NO: 59999 - protein, 9 aa, Homo sapiens
  misc_feature: Table A; Target 59999; HLA-B*44:02; PAX3; ENSG00000135903; TAA
YSMDPVTGY

SEQ ID NO: 60000 - protein, 9 aa, Homo sapiens
  misc_feature: Table A; Target 60000; HLA-B*44:03; PAX3; ENSG00000135903; TAA
YSMDPVTGY

SEQ ID NO: 60001 - protein, 9 aa, Homo sapiens
  misc_feature: Table A; Target 60001; HLA-B*46:01; PAX3; ENSG00000135903; TAA
YSMDPVTGY

SEQ ID NO: 60002 - protein, 9 aa, Homo sapiens
  misc_feature: Table A; Target 60002; HLA-B*55:01; PAX3; ENSG00000135903; TAA
YSMDPVTGY

SEQ ID NO: 60003 - protein, 9 aa, Homo sapiens
  misc_feature: Table A; Target 60003; HLA-B*57:01; PAX3; ENSG00000135903; TAA
YSMDPVTGY

SEQ ID NO: 60004 - protein, 9 aa, Homo sapiens
  misc_feature: Table A; Target 60004; HLA-B*58:01; PAX3; ENSG00000135903; TAA
YSMDPVTGY

SEQ ID NO: 60005 - protein, 9 aa, Homo sapiens
  misc_feature: Table A; Target 60005; HLA-C*01:02; PAX3; ENSG00000135903; TAA
YSMDPVTGY

SEQ ID NO: 60006 - protein, 9 aa, Homo sapiens
  misc_feature: Table A; Target 60006; HLA-C*02:02; PAX3; ENSG00000135903; TAA
YSMDPVTGY

SEQ ID NO: 60007 - protein, 9 aa, Homo sapiens
  misc_feature: Table A; Target 60007; HLA-C*03:03; PAX3; ENSG00000135903; TAA
YSMDPVTGY

SEQ ID NO: 60008 - protein, 9 aa, Homo sapiens
  misc_feature: Table A; Target 60008; HLA-C*03:04; PAX3; ENSG00000135903; TAA
YSMDPVTGY

SEQ ID NO: 60009 - protein, 9 aa, Homo sapiens
  misc_feature: Table A; Target 60009; HLA-C*04:01; PAX3; ENSG00000135903; TAA
YSMDPVTGY

SEQ ID NO: 60010 - protein, 9 aa, Homo sapiens
  misc_feature: Table A; Target 60010; HLA-C*05:01; PAX3; ENSG00000135903; TAA
YSMDPVTGY

SEQ ID NO: 60011 - protein, 9 aa, Homo sapiens
  misc_feature: Table A; Target 60011; HLA-C*07:01; PAX3; ENSG00000135903; TAA
YSMDPVTGY

SEQ ID NO: 60012 - protein, 9 aa, Homo sapiens
  misc_feature: Table A; Target 60012; HLA-C*07:04; PAX3; ENSG00000135903; TAA
YSMDPVTGY

SEQ ID NO: 60013 - protein, 9 aa, Homo sapiens
  misc_feature: Table A; Target 60013; HLA-C*07:06; PAX3; ENSG00000135903; TAA
YSMDPVTGY

SEQ ID NO: 60014 - protein, 9 aa, Homo sapiens
  misc_feature: Table A; Target 60014; HLA-C*12:03; PAX3; ENSG00000135903; TAA
YSMDPVTGY

SEQ ID NO: 60015 - protein, 9 aa, Homo sapiens
  misc_feature: Table A; Target 60015; HLA-C*14:02; PAX3; ENSG00000135903; TAA
YSMDPVTGY

SEQ ID NO: 60016 - protein, 9 aa, Homo sapiens
  misc_feature: Table A; Target 60016; HLA-C*16:01; PAX3; ENSG00000135903; TAA
YSMDPVTGY

SEQ ID NO: 60017 - protein, 9 aa, Homo sapiens
  misc_feature: Table A; Target 60017; HLA-C*16:02; PAX3; ENSG00000135903; TAA
YSMDPVTGY

SEQ ID NO: 60018 - protein, 9 aa, Homo sapiens
  misc_feature: Table A; Target 60018; HLA-C*16:04; PAX3; ENSG00000135903; TAA
YSMDPVTGY

SEQ ID NO: 60019 - protein, 10 aa, Homo sapiens
  misc_feature: Table A; Target 60019; HLA-A*01:01; PAX3; ENSG00000135903; TAA
YSMDPVTGYQ

SEQ ID NO: 60020 - protein, 11 aa, Homo sapiens
  misc_feature: Table A; Target 60020; HLA-A*01:01; PAX3; ENSG00000135903; TAA
YSMDPVTGYQY

SEQ ID NO: 60021 - protein, 11 aa, Homo sapiens
  misc_feature: Table A; Target 60021; HLA-A*03:01; PAX3; ENSG00000135903; TAA
YSMDPVTGYQY

SEQ ID NO: 60022 - protein, 11 aa, Homo sapiens
  misc_feature: Table A; Target 60022; HLA-A*03:02; PAX3; ENSG00000135903; TAA
YSMDPVTGYQY

SEQ ID NO: 60023 - protein, 11 aa, Homo sapiens
  misc_feature: Table A; Target 60023; HLA-A*11:01; PAX3; ENSG00000135903; TAA
YSMDPVTGYQY

SEQ ID NO: 60024 - protein, 11 aa, Homo sapiens
  misc_feature: Table A; Target 60024; HLA-A*23:01; PAX3; ENSG00000135903; TAA
YSMDPVTGYQY

SEQ ID NO: 60025 - protein, 11 aa, Homo sapiens
  misc_feature: Table A; Target 60025; HLA-A*25:01; PAX3; ENSG00000135903; TAA
YSMDPVTGYQY

SEQ ID NO: 60026 - protein, 11 aa, Homo sapiens
  misc_feature: Table A; Target 60026; HLA-A*26:01; PAX3; ENSG00000135903; TAA
YSMDPVTGYQY

SEQ ID NO: 60027 - protein, 11 aa, Homo sapiens
  misc_feature: Table A; Target 60027; HLA-A*29:02; PAX3; ENSG00000135903; TAA
YSMDPVTGYQY

SEQ ID NO: 60028 - protein, 11 aa, Homo sapiens
  misc_feature: Table A; Target 60028; HLA-A*30:02; PAX3; ENSG00000135903; TAA
YSMDPVTGYQY

SEQ ID NO: 60029 - protein, 11 aa, Homo sapiens
  misc_feature: Table A; Target 60029; HLA-A*31:01; PAX3; ENSG00000135903; TAA
YSMDPVTGYQY

SEQ ID NO: 60030 - protein, 11 aa, Homo sapiens
  misc_feature: Table A; Target 60030; HLA-A*32:01; PAX3; ENSG00000135903; TAA
YSMDPVTGYQY

SEQ ID NO: 60031 - protein, 11 aa, Homo sapiens
  misc_feature: Table A; Target 60031; HLA-A*33:01; PAX3; ENSG00000135903; TAA
YSMDPVTGYQY

SEQ ID NO: 60032 - protein, 11 aa, Homo sapiens
  misc_feature: Table A; Target 60032; HLA-A*33:03; PAX3; ENSG00000135903; TAA
YSMDPVTGYQY

SEQ ID NO: 60033 - protein, 11 aa, Homo sapiens
  misc_feature: Table A; Target 60033; HLA-A*68:01; PAX3; ENSG00000135903; TAA
YSMDPVTGYQY

SEQ ID NO: 60034 - protein, 11 aa, Homo sapiens
  misc_feature: Table A; Target 60034; HLA-A*68:02; PAX3; ENSG00000135903; TAA
YSMDPVTGYQY

SEQ ID NO: 60035 - protein, 11 aa, Homo sapiens
  misc_feature: Table A; Target 60035; HLA-B*13:02; PAX3; ENSG00000135903; TAA
YSMDPVTGYQY

SEQ ID NO: 60036 - protein, 11 aa, Homo sapiens
  misc_feature: Table A; Target 60036; HLA-B*15:01; PAX3; ENSG00000135903; TAA
YSMDPVTGYQY

SEQ ID NO: 60037 - protein, 11 aa, Homo sapiens
  misc_feature: Table A; Target 60037; HLA-B*15:03; PAX3; ENSG00000135903; TAA
YSMDPVTGYQY

SEQ ID NO: 60038 - protein, 11 aa, Homo sapiens
  misc_feature: Table A; Target 60038; HLA-B*18:01; PAX3; ENSG00000135903; TAA
YSMDPVTGYQY

SEQ ID NO: 60039 - protein, 11 aa, Homo sapiens
  misc_feature: Table A; Target 60039; HLA-B*27:02; PAX3; ENSG00000135903; TAA
YSMDPVTGYQY

SEQ ID NO: 60040 - protein, 11 aa, Homo sapiens
  misc_feature: Table A; Target 60040; HLA-B*27:05; PAX3; ENSG00000135903; TAA
YSMDPVTGYQY

SEQ ID NO: 60041 - protein, 11 aa, Homo sapiens
  misc_feature: Table A; Target 60041; HLA-B*35:01; PAX3; ENSG00000135903; TAA
YSMDPVTGYQY

SEQ ID NO: 60042 - protein, 11 aa, Homo sapiens
  misc_feature: Table A; Target 60042; HLA-B*39:01; PAX3; ENSG00000135903; TAA
YSMDPVTGYQY

SEQ ID NO: 60043 - protein, 11 aa, Homo sapiens
  misc_feature: Table A; Target 60043; HLA-B*44:03; PAX3; ENSG00000135903; TAA
YSMDPVTGYQY

SEQ ID NO: 60044 - protein, 11 aa, Homo sapiens
  misc_feature: Table A; Target 60044; HLA-B*46:01; PAX3; ENSG00000135903; TAA
YSMDPVTGYQY

SEQ ID NO: 60045 - protein, 11 aa, Homo sapiens
  misc_feature: Table A; Target 60045; HLA-B*57:01; PAX3; ENSG00000135903; TAA
YSMDPVTGYQY

SEQ ID NO: 60046 - protein, 11 aa, Homo sapiens
  misc_feature: Table A; Target 60046; HLA-B*58:01; PAX3; ENSG00000135903; TAA
YSMDPVTGYQY

SEQ ID NO: 60047 - protein, 11 aa, Homo sapiens
  misc_feature: Table A; Target 60047; HLA-C*01:02; PAX3; ENSG00000135903; TAA
YSMDPVTGYQY

SEQ ID NO: 60048 - protein, 11 aa, Homo sapiens
  misc_feature: Table A; Target 60048; HLA-C*02:02; PAX3; ENSG00000135903; TAA
YSMDPVTGYQY

SEQ ID NO: 60049 - protein, 11 aa, Homo sapiens
  misc_feature: Table A; Target 60049; HLA-C*03:03; PAX3; ENSG00000135903; TAA
YSMDPVTGYQY

SEQ ID NO: 60050 - protein, 11 aa, Homo sapiens
  misc_feature: Table A; Target 60050; HLA-C*03:04; PAX3; ENSG00000135903; TAA
YSMDPVTGYQY

SEQ ID NO: 60051 - protein, 11 aa, Homo sapiens
  misc_feature: Table A; Target 60051; HLA-C*04:01; PAX3; ENSG00000135903; TAA
YSMDPVTGYQY

SEQ ID NO: 60052 - protein, 11 aa, Homo sapiens
  misc_feature: Table A; Target 60052; HLA-C*05:01; PAX3; ENSG00000135903; TAA
YSMDPVTGYQY

SEQ ID NO: 60053 - protein, 11 aa, Homo sapiens
  misc_feature: Table A; Target 60053; HLA-C*06:02; PAX3; ENSG00000135903; TAA
YSMDPVTGYQY

SEQ ID NO: 60054 - protein, 11 aa, Homo sapiens
  misc_feature: Table A; Target 60054; HLA-C*07:01; PAX3; ENSG00000135903; TAA
YSMDPVTGYQY

SEQ ID NO: 60055 - protein, 11 aa, Homo sapiens
  misc_feature: Table A; Target 60055; HLA-C*07:04; PAX3; ENSG00000135903; TAA
YSMDPVTGYQY

SEQ ID NO: 60056 - protein, 11 aa, Homo sapiens
  misc_feature: Table A; Target 60056; HLA-C*07:06; PAX3; ENSG00000135903; TAA
YSMDPVTGYQY

SEQ ID NO: 60057 - protein, 11 aa, Homo sapiens
  misc_feature: Table A; Target 60057; HLA-C*12:03; PAX3; ENSG00000135903; TAA
YSMDPVTGYQY

SEQ ID NO: 60058 - protein, 11 aa, Homo sapiens
  misc_feature: Table A; Target 60058; HLA-C*14:02; PAX3; ENSG00000135903; TAA
YSMDPVTGYQY

SEQ ID NO: 60059 - protein, 11 aa, Homo sapiens
  misc_feature: Table A; Target 60059; HLA-C*16:01; PAX3; ENSG00000135903; TAA
YSMDPVTGYQY

SEQ ID NO: 60060 - protein, 11 aa, Homo sapiens
  misc_feature: Table A; Target 60060; HLA-C*16:02; PAX3; ENSG00000135903; TAA
YSMDPVTGYQY

SEQ ID NO: 60061 - protein, 11 aa, Homo sapiens
  misc_feature: Table A; Target 60061; HLA-C*16:04; PAX3; ENSG00000135903; TAA
YSMDPVTGYQY

SEQ ID NO: 60062 - protein, 8 aa, Homo sapiens
  misc_feature: Table A; Target 60062; HLA-C*03:03; PAX3; ENSG00000135903; TAA
YSTTGYSM

SEQ ID NO: 60063 - protein, 8 aa, Homo sapiens
  misc_feature: Table A; Target 60063; HLA-C*03:04; PAX3; ENSG00000135903; TAA
YSTTGYSM

SEQ ID NO: 60064 - protein, 8 aa, Homo sapiens
  misc_feature: Table A; Target 60064; HLA-C*14:02; PAX3; ENSG00000135903; TAA
YSTTGYSM

SEQ ID NO: 60065 - protein, 8 aa, Homo sapiens
  misc_feature: Table A; Target 60065; HLA-C*16:01; PAX3; ENSG00000135903; TAA
YSTTGYSM

SEQ ID NO: 60066 - protein, 10 aa, Homo sapiens
  misc_feature: Table A; Target 60066; HLA-A*01:01; PAX3; ENSG00000135903; TAA
YTDSFVPPSG

SEQ ID NO: 60067 - protein, 11 aa, Homo sapiens
  misc_feature: Table A; Target 60067; HLA-A*01:01; PAX3; ENSG00000135903; TAA
YTDSFVPPSGP

SEQ ID NO: 60068 - protein, 10 aa, Homo sapiens
  misc_feature: Table A; Target 60068; HLA-B*35:01; PAX3,PAX7; ENSG00000135903,ENSG00000009709; TAA,TAA
CPPTYSTTGY

SEQ ID NO: 60069 - protein, 10 aa, Homo sapiens
  misc_feature: Table A; Target 60069; HLA-C*04:01; PAX3,PAX7; ENSG00000135903,ENSG00000009709; TAA,TAA
CPPTYSTTGY

SEQ ID NO: 60070 - protein, 10 aa, Homo sapiens
  misc_feature: Table A; Target 60070; HLA-C*07:01; PAX3,PAX7; ENSG00000135903,ENSG00000009709; TAA,TAA
CPPTYSTTGY

SEQ ID NO: 60071 - protein, 9 aa, Homo sapiens
  misc_feature: Table A; Target 60071; HLA-A*29:02; PAX3,PAX7; ENSG00000135903,ENSG00000009709; TAA,TAA
CVSKILCRY

SEQ ID NO: 60072 - protein, 8 aa, Homo sapiens
  misc_feature: Table A; Target 60072; HLA-B*08:01; PAX3,PAX7; ENSG00000135903,ENSG00000009709; TAA,TAA
DIYTREEL

SEQ ID NO: 60073 - protein, 8 aa, Homo sapiens
  misc_feature: Table A; Target 60073; HLA-B*51:01; PAX3,PAX7; ENSG00000135903,ENSG00000009709; TAA,TAA
DIYTREEL

SEQ ID NO: 60074 - protein, 8 aa, Homo sapiens
  misc_feature: Table A; Target 60074; HLA-C*16:01; PAX3,PAX7; ENSG00000135903,ENSG00000009709; TAA,TAA
DIYTREEL

SEQ ID NO: 60075 - protein, 11 aa, Homo sapiens
  misc_feature: Table A; Target 60075; HLA-A*33:01; PAX3,PAX7; ENSG00000135903,ENSG00000009709; TAA,TAA
DIYTREELAQR

SEQ ID NO: 60076 - protein, 11 aa, Homo sapiens
  misc_feature: Table A; Target 60076; HLA-A*33:03; PAX3,PAX7; ENSG00000135903,ENSG00000009709; TAA,TAA
DIYTREELAQR

SEQ ID NO: 60077 - protein, 11 aa, Homo sapiens
  misc_feature: Table A; Target 60077; HLA-A*68:01; PAX3,PAX7; ENSG00000135903,ENSG00000009709; TAA,TAA
DIYTREELAQR

SEQ ID NO: 60078 - protein, 9 aa, Homo sapiens
  misc_feature: Table A; Target 60078; HLA-A*01:01; PAX3,PAX7; ENSG00000135903,ENSG00000009709; TAA,TAA
DVEKKIEEY

SEQ ID NO: 60079 - protein, 9 aa, Homo sapiens
  misc_feature: Table A; Target 60079; HLA-A*25:01; PAX3,PAX7; ENSG00000135903,ENSG00000009709; TAA,TAA
DVEKKIEEY

SEQ ID NO: 60080 - protein, 9 aa, Homo sapiens
  misc_feature: Table A; Target 60080; HLA-A*26:01; PAX3,PAX7; ENSG00000135903,ENSG00000009709; TAA,TAA
DVEKKIEEY

SEQ ID NO: 60081 - protein, 9 aa, Homo sapiens
  misc_feature: Table A; Target 60081; HLA-A*33:01; PAX3,PAX7; ENSG00000135903,ENSG00000009709; TAA,TAA
DVEKKIEEY

SEQ ID NO: 60082 - protein, 9 aa, Homo sapiens
  misc_feature: Table A; Target 60082; HLA-B*18:01; PAX3,PAX7; ENSG00000135903,ENSG00000009709; TAA,TAA
DVEKKIEEY

SEQ ID NO: 60083 - protein, 9 aa, Homo sapiens
  misc_feature: Table A; Target 60083; HLA-B*35:01; PAX3,PAX7; ENSG00000135903,ENSG00000009709; TAA,TAA
DVEKKIEEY

SEQ ID NO: 60084 - protein, 9 aa, Homo sapiens
  misc_feature: Table A; Target 60084; HLA-C*07:04; PAX3,PAX7; ENSG00000135903,ENSG00000009709; TAA,TAA
DVEKKIEEY

SEQ ID NO: 60085 - protein, 11 aa, Homo sapiens
  misc_feature: Table A; Target 60085; HLA-A*33:01; PAX3,PAX7; ENSG00000135903,ENSG00000009709; TAA,TAA
DVEKKIEEYKR

SEQ ID NO: 60086 - protein, 10 aa, Homo sapiens
  misc_feature: Table A; Target 60086; HLA-A*30:01; PAX3,PAX7; ENSG00000135903,ENSG00000009709; TAA,TAA
EEYKRENPGM

SEQ ID NO: 60087 - protein, 10 aa, Homo sapiens
  misc_feature: Table A; Target 60087; HLA-B*40:02; PAX3,PAX7; ENSG00000135903,ENSG00000009709; TAA,TAA
EEYKRENPGM

SEQ ID NO: 60088 - protein, 9 aa, Homo sapiens
  misc_feature: Table A; Target 60088; HLA-A*26:01; PAX3,PAX7; ENSG00000135903,ENSG00000009709; TAA,TAA
ETGSIRPGA

SEQ ID NO: 60089 - protein, 10 aa, Homo sapiens
  misc_feature: Table A; Target 60089; HLA-A*25:01; PAX3,PAX7; ENSG00000135903,ENSG00000009709; TAA,TAA
ETGSIRPGAI

SEQ ID NO: 60090 - protein, 10 aa, Homo sapiens
  misc_feature: Table A; Target 60090; HLA-A*26:01; PAX3,PAX7; ENSG00000135903,ENSG00000009709; TAA,TAA
ETGSIRPGAI

SEQ ID NO: 60091 - protein, 10 aa, Homo sapiens
  misc_feature: Table A; Target 60091; HLA-A*68:02; PAX3,PAX7; ENSG00000135903,ENSG00000009709; TAA,TAA
ETGSIRPGAI

SEQ ID NO: 60092 - protein, 10 aa, Homo sapiens
  misc_feature: Table A; Target 60092; HLA-A*26:01; PAX3,PAX7; ENSG00000135903,ENSG00000009709; TAA,TAA
EVSTPLGQGR

SEQ ID NO: 60093 - protein, 10 aa, Homo sapiens
  misc_feature: Table A; Target 60093; HLA-A*33:01; PAX3,PAX7; ENSG00000135903,ENSG00000009709; TAA,TAA
EVSTPLGQGR

SEQ ID NO: 60094 - protein, 10 aa, Homo sapiens
  misc_feature: Table A; Target 60094; HLA-A*33:03; PAX3,PAX7; ENSG00000135903,ENSG00000009709; TAA,TAA
EVSTPLGQGR

SEQ ID NO: 60095 - protein, 10 aa, Homo sapiens
  misc_feature: Table A; Target 60095; HLA-A*68:01; PAX3,PAX7; ENSG00000135903,ENSG00000009709; TAA,TAA
EVSTPLGQGR

SEQ ID NO: 60096 - protein, 10 aa, Homo sapiens
  misc_feature: Table A; Target 60096; HLA-C*07:06; PAX3,PAX7; ENSG00000135903,ENSG00000009709; TAA,TAA
EVSTPLGQGR

SEQ ID NO: 60097 - protein, 11 aa, Homo sapiens
  misc_feature: Table A; Target 60097; HLA-A*68:02; PAX3,PAX7; ENSG00000135903,ENSG00000009709; TAA,TAA
EVSTPLGQGRV

SEQ ID NO: 60098 - protein, 8 aa, Homo sapiens
  misc_feature: Table A; Target 60098; HLA-B*54:01; PAX3,PAX7; ENSG00000135903,ENSG00000009709; TAA,TAA
FPLEVSTP

SEQ ID NO: 60099 - protein, 8 aa, Homo sapiens
  misc_feature: Table A; Target 60099; HLA-B*56:01; PAX3,PAX7; ENSG00000135903,ENSG00000009709; TAA,TAA
FPLEVSTP

SEQ ID NO: 60100 - protein, 9 aa, Homo sapiens
  misc_feature: Table A; Target 60100; HLA-A*02:01; PAX3,PAX7; ENSG00000135903,ENSG00000009709; TAA,TAA
FPLEVSTPL

SEQ ID NO: 60101 - protein, 9 aa, Homo sapiens
  misc_feature: Table A; Target 60101; HLA-A*23:01; PAX3,PAX7; ENSG00000135903,ENSG00000009709; TAA,TAA
FPLEVSTPL

SEQ ID NO: 60102 - protein, 9 aa, Homo sapiens
  misc_feature: Table A; Target 60102; HLA-A*68:02; PAX3,PAX7; ENSG00000135903,ENSG00000009709; TAA,TAA
FPLEVSTPL

SEQ ID NO: 60103 - protein, 9 aa, Homo sapiens
  misc_feature: Table A; Target 60103; HLA-B*07:02; PAX3,PAX7; ENSG00000135903,ENSG00000009709; TAA,TAA
FPLEVSTPL

SEQ ID NO: 60104 - protein, 9 aa, Homo sapiens
  misc_feature: Table A; Target 60104; HLA-B*08:01; PAX3,PAX7; ENSG00000135903,ENSG00000009709; TAA,TAA
FPLEVSTPL

SEQ ID NO: 60105 - protein, 9 aa, Homo sapiens
  misc_feature: Table A; Target 60105; HLA-B*15:03; PAX3,PAX7; ENSG00000135903,ENSG00000009709; TAA,TAA
FPLEVSTPL

SEQ ID NO: 60106 - protein, 9 aa, Homo sapiens
  misc_feature: Table A; Target 60106; HLA-B*27:02; PAX3,PAX7; ENSG00000135903,ENSG00000009709; TAA,TAA
FPLEVSTPL

SEQ ID NO: 60107 - protein, 9 aa, Homo sapiens
  misc_feature: Table A; Target 60107; HLA-B*27:05; PAX3,PAX7; ENSG00000135903,ENSG00000009709; TAA,TAA
FPLEVSTPL

SEQ ID NO: 60108 - protein, 9 aa, Homo sapiens
  misc_feature: Table A; Target 60108; HLA-B*35:01; PAX3,PAX7; ENSG00000135903,ENSG00000009709; TAA,TAA
FPLEVSTPL

SEQ ID NO: 60109 - protein, 9 aa, Homo sapiens
  misc_feature: Table A; Target 60109; HLA-B*35:03; PAX3,PAX7; ENSG00000135903,ENSG00000009709; TAA,TAA
FPLEVSTPL

SEQ ID NO: 60110 - protein, 9 aa, Homo sapiens
  misc_feature: Table A; Target 60110; HLA-B*46:01; PAX3,PAX7; ENSG00000135903,ENSG00000009709; TAA,TAA
FPLEVSTPL

SEQ ID NO: 60111 - protein, 9 aa, Homo sapiens
  misc_feature: Table A; Target 60111; HLA-B*51:01; PAX3,PAX7; ENSG00000135903,ENSG00000009709; TAA,TAA
FPLEVSTPL

SEQ ID NO: 60112 - protein, 9 aa, Homo sapiens
  misc_feature: Table A; Target 60112; HLA-B*54:01; PAX3,PAX7; ENSG00000135903,ENSG00000009709; TAA,TAA
FPLEVSTPL

SEQ ID NO: 60113 - protein, 9 aa, Homo sapiens
  misc_feature: Table A; Target 60113; HLA-B*55:01; PAX3,PAX7; ENSG00000135903,ENSG00000009709; TAA,TAA
FPLEVSTPL

SEQ ID NO: 60114 - protein, 9 aa, Homo sapiens
  misc_feature: Table A; Target 60114; HLA-B*56:01; PAX3,PAX7; ENSG00000135903,ENSG00000009709; TAA,TAA
FPLEVSTPL

SEQ ID NO: 60115 - protein, 9 aa, Homo sapiens
  misc_feature: Table A; Target 60115; HLA-C*02:02; PAX3,PAX7; ENSG00000135903,ENSG00000009709; TAA,TAA
FPLEVSTPL

SEQ ID NO: 60116 - protein, 9 aa, Homo sapiens
  misc_feature: Table A; Target 60116; HLA-C*03:03; PAX3,PAX7; ENSG00000135903,ENSG00000009709; TAA,TAA
FPLEVSTPL

SEQ ID NO: 60117 - protein, 9 aa, Homo sapiens
  misc_feature: Table A; Target 60117; HLA-C*03:04; PAX3,PAX7; ENSG00000135903,ENSG00000009709; TAA,TAA
FPLEVSTPL

SEQ ID NO: 60118 - protein, 9 aa, Homo sapiens
  misc_feature: Table A; Target 60118; HLA-C*04:01; PAX3,PAX7; ENSG00000135903,ENSG00000009709; TAA,TAA
FPLEVSTPL

SEQ ID NO: 60119 - protein, 9 aa, Homo sapiens
  misc_feature: Table A; Target 60119; HLA-C*05:01; PAX3,PAX7; ENSG00000135903,ENSG00000009709; TAA,TAA
FPLEVSTPL

SEQ ID NO: 60120 - protein, 9 aa, Homo sapiens
  misc_feature: Table A; Target 60120; HLA-C*07:01; PAX3,PAX7; ENSG00000135903,ENSG00000009709; TAA,TAA
FPLEVSTPL

SEQ ID NO: 60121 - protein, 9 aa, Homo sapiens
  misc_feature: Table A; Target 60121; HLA-C*07:02; PAX3,PAX7; ENSG00000135903,ENSG00000009709; TAA,TAA
FPLEVSTPL

SEQ ID NO: 60122 - protein, 9 aa, Homo sapiens
  misc_feature: Table A; Target 60122; HLA-C*07:04; PAX3,PAX7; ENSG00000135903,ENSG00000009709; TAA,TAA
FPLEVSTPL

SEQ ID NO: 60123 - protein, 9 aa, Homo sapiens
  misc_feature: Table A; Target 60123; HLA-C*07:06; PAX3,PAX7; ENSG00000135903,ENSG00000009709; TAA,TAA
FPLEVSTPL

SEQ ID NO: 60124 - protein, 9 aa, Homo sapiens
  misc_feature: Table A; Target 60124; HLA-C*14:02; PAX3,PAX7; ENSG00000135903,ENSG00000009709; TAA,TAA
FPLEVSTPL

SEQ ID NO: 60125 - protein, 10 aa, Homo sapiens
  misc_feature: Table A; Target 60125; HLA-B*27:02; PAX3,PAX7; ENSG00000135903,ENSG00000009709; TAA,TAA
FPLEVSTPLG

SEQ ID NO: 60126 - protein, 10 aa, Homo sapiens
  misc_feature: Table A; Target 60126; HLA-B*54:01; PAX3,PAX7; ENSG00000135903,ENSG00000009709; TAA,TAA
FPLEVSTPLG

SEQ ID NO: 60127 - protein, 10 aa, Homo sapiens
  misc_feature: Table A; Target 60127; HLA-B*56:01; PAX3,PAX7; ENSG00000135903,ENSG00000009709; TAA,TAA
FPLEVSTPLG

SEQ ID NO: 60128 - protein, 11 aa, Homo sapiens
  misc_feature: Table A; Target 60128; HLA-B*54:01; PAX3,PAX7; ENSG00000135903,ENSG00000009709; TAA,TAA
FPLEVSTPLGQ

SEQ ID NO: 60129 - protein, 9 aa, Homo sapiens
  misc_feature: Table A; Target 60129; HLA-A*01:01; PAX3,PAX7; ENSG00000135903,ENSG00000009709; TAA,TAA
FTAEQLEEL

SEQ ID NO: 60130 - protein, 9 aa, Homo sapiens
  misc_feature: Table A; Target 60130; HLA-A*02:01; PAX3,PAX7; ENSG00000135903,ENSG00000009709; TAA,TAA
FTAEQLEEL

SEQ ID NO: 60131 - protein, 9 aa, Homo sapiens
  misc_feature: Table A; Target 60131; HLA-A*02:03; PAX3,PAX7; ENSG00000135903,ENSG00000009709; TAA,TAA
FTAEQLEEL

SEQ ID NO: 60132 - protein, 9 aa, Homo sapiens
  misc_feature: Table A; Target 60132; HLA-A*02:04; PAX3,PAX7; ENSG00000135903,ENSG00000009709; TAA,TAA
FTAEQLEEL

SEQ ID NO: 60133 - protein, 9 aa, Homo sapiens
  misc_feature: Table A; Target 60133; HLA-A*02:07; PAX3,PAX7; ENSG00000135903,ENSG00000009709; TAA,TAA
FTAEQLEEL

SEQ ID NO: 60134 - protein, 9 aa, Homo sapiens
  misc_feature: Table A; Target 60134; HLA-A*25:01; PAX3,PAX7; ENSG00000135903,ENSG00000009709; TAA,TAA
FTAEQLEEL

SEQ ID NO: 60135 - protein, 9 aa, Homo sapiens
  misc_feature: Table A; Target 60135; HLA-A*68:02; PAX3,PAX7; ENSG00000135903,ENSG00000009709; TAA,TAA
FTAEQLEEL

SEQ ID NO: 60136 - protein, 9 aa, Homo sapiens
  misc_feature: Table A; Target 60136; HLA-B*27:05; PAX3,PAX7; ENSG00000135903,ENSG00000009709; TAA,TAA
FTAEQLEEL

SEQ ID NO: 60137 - protein, 9 aa, Homo sapiens
  misc_feature: Table A; Target 60137; HLA-B*35:03; PAX3,PAX7; ENSG00000135903,ENSG00000009709; TAA,TAA
FTAEQLEEL

SEQ ID NO: 60138 - protein, 9 aa, Homo sapiens
  misc_feature: Table A; Target 60138; HLA-B*39:01; PAX3,PAX7; ENSG00000135903,ENSG00000009709; TAA,TAA
FTAEQLEEL

SEQ ID NO: 60139 - protein, 9 aa, Homo sapiens
  misc_feature: Table A; Target 60139; HLA-B*46:01; PAX3,PAX7; ENSG00000135903,ENSG00000009709; TAA,TAA
FTAEQLEEL

SEQ ID NO: 60140 - protein, 9 aa, Homo sapiens
  misc_feature: Table A; Target 60140; HLA-B*58:01; PAX3,PAX7; ENSG00000135903,ENSG00000009709; TAA,TAA
FTAEQLEEL

SEQ ID NO: 60141 - protein, 9 aa, Homo sapiens
  misc_feature: Table A; Target 60141; HLA-C*01:02; PAX3,PAX7; ENSG00000135903,ENSG00000009709; TAA,TAA
FTAEQLEEL

SEQ ID NO: 60142 - protein, 9 aa, Homo sapiens
  misc_feature: Table A; Target 60142; HLA-C*02:02; PAX3,PAX7; ENSG00000135903,ENSG00000009709; TAA,TAA
FTAEQLEEL

SEQ ID NO: 60143 - protein, 9 aa, Homo sapiens
  misc_feature: Table A; Target 60143; HLA-C*03:03; PAX3,PAX7; ENSG00000135903,ENSG00000009709; TAA,TAA
FTAEQLEEL

SEQ ID NO: 60144 - protein, 9 aa, Homo sapiens
  misc_feature: Table A; Target 60144; HLA-C*03:04; PAX3,PAX7; ENSG00000135903,ENSG00000009709; TAA,TAA
FTAEQLEEL

SEQ ID NO: 60145 - protein, 9 aa, Homo sapiens
  misc_feature: Table A; Target 60145; HLA-C*05:01; PAX3,PAX7; ENSG00000135903,ENSG00000009709; TAA,TAA
FTAEQLEEL

SEQ ID NO: 60146 - protein, 9 aa, Homo sapiens
  misc_feature: Table A; Target 60146; HLA-C*07:04; PAX3,PAX7; ENSG00000135903,ENSG00000009709; TAA,TAA
FTAEQLEEL

SEQ ID NO: 60147 - protein, 9 aa, Homo sapiens
  misc_feature: Table A; Target 60147; HLA-C*07:06; PAX3,PAX7; ENSG00000135903,ENSG00000009709; TAA,TAA
FTAEQLEEL

SEQ ID NO: 60148 - protein, 9 aa, Homo sapiens
  misc_feature: Table A; Target 60148; HLA-C*16:02; PAX3,PAX7; ENSG00000135903,ENSG00000009709; TAA,TAA
FTAEQLEEL

SEQ ID NO: 60149 - protein, 9 aa, Homo sapiens
  misc_feature: Table A; Target 60149; HLA-A*03:01; PAX3,PAX7; ENSG00000135903,ENSG00000009709; TAA,TAA
GIRPCVISR

SEQ ID NO: 60150 - protein, 9 aa, Homo sapiens
  misc_feature: Table A; Target 60150; HLA-A*31:01; PAX3,PAX7; ENSG00000135903,ENSG00000009709; TAA,TAA
GIRPCVISR

SEQ ID NO: 60151 - protein, 8 aa, Homo sapiens
  misc_feature: Table A; Target 60151; HLA-B*15:01; PAX3,PAX7; ENSG00000135903,ENSG00000009709; TAA,TAA
GQGRVNQL

SEQ ID NO: 60152 - protein, 9 aa, Homo sapiens
  misc_feature: Table A; Target 60152; HLA-B*27:05; PAX3,PAX7; ENSG00000135903,ENSG00000009709; TAA,TAA
GRVNQLGGV

SEQ ID NO: 60153 - protein, 10 aa, Homo sapiens
  misc_feature: Table A; Target 60153; HLA-B*27:02; PAX3,PAX7; ENSG00000135903,ENSG00000009709; TAA,TAA
GRVNQLGGVF

SEQ ID NO: 60154 - protein, 10 aa, Homo sapiens
  misc_feature: Table A; Target 60154; HLA-B*27:05; PAX3,PAX7; ENSG00000135903,ENSG00000009709; TAA,TAA
GRVNQLGGVF

SEQ ID NO: 60155 - protein, 10 aa, Homo sapiens
  misc_feature: Table A; Target 60155; HLA-C*16:04; PAX3,PAX7; ENSG00000135903,ENSG00000009709; TAA,TAA
GRVNQLGGVF

SEQ ID NO: 60156 - protein, 9 aa, Homo sapiens
  misc_feature: Table A; Target 60156; HLA-B*08:01; PAX3,PAX7; ENSG00000135903,ENSG00000009709; TAA,TAA
HIRHKIVEM

SEQ ID NO: 60157 - protein, 8 aa, Homo sapiens
  misc_feature: Table A; Target 60157; HLA-A*33:01; PAX3,PAX7; ENSG00000135903,ENSG00000009709; TAA,TAA
HYPDIYTR

SEQ ID NO: 60158 - protein, 8 aa, Homo sapiens
  misc_feature: Table A; Target 60158; HLA-A*33:03; PAX3,PAX7; ENSG00000135903,ENSG00000009709; TAA,TAA
HYPDIYTR

SEQ ID NO: 60159 - protein, 11 aa, Homo sapiens
  misc_feature: Table A; Target 60159; HLA-A*24:02; PAX3,PAX7; ENSG00000135903,ENSG00000009709; TAA,TAA
HYPDIYTREEL

SEQ ID NO: 60160 - protein, 10 aa, Homo sapiens
  misc_feature: Table A; Target 60160; HLA-B*27:05; PAX3,PAX7; ENSG00000135903,ENSG00000009709; TAA,TAA
IRPGAIGGSK

SEQ ID NO: 60161 - protein, 10 aa, Homo sapiens
  misc_feature: Table A; Target 60161; HLA-A*33:03; PAX3,PAX7; ENSG00000135903,ENSG00000009709; TAA,TAA
IYTREELAQR

SEQ ID NO: 60162 - protein, 8 aa, Homo sapiens
  misc_feature: Table A; Target 60162; HLA-C*16:02; PAX3,PAX7; ENSG00000135903,ENSG00000009709; TAA,TAA
KLTEARVQ

SEQ ID NO: 60163 - protein, 9 aa, Homo sapiens
  misc_feature: Table A; Target 60163; HLA-A*02:01; PAX3,PAX7; ENSG00000135903,ENSG00000009709; TAA,TAA
KLTEARVQV

SEQ ID NO: 60164 - protein, 9 aa, Homo sapiens
  misc_feature: Table A; Target 60164; HLA-A*02:03; PAX3,PAX7; ENSG00000135903,ENSG00000009709; TAA,TAA
KLTEARVQV

SEQ ID NO: 60165 - protein, 9 aa, Homo sapiens
  misc_feature: Table A; Target 60165; HLA-A*02:04; PAX3,PAX7; ENSG00000135903,ENSG00000009709; TAA,TAA
KLTEARVQV

SEQ ID NO: 60166 - protein, 9 aa, Homo sapiens
  misc_feature: Table A; Target 60166; HLA-A*32:01; PAX3,PAX7; ENSG00000135903,ENSG00000009709; TAA,TAA
KLTEARVQV

SEQ ID NO: 60167 - protein, 9 aa, Homo sapiens
  misc_feature: Table A; Target 60167; HLA-B*55:01; PAX3,PAX7; ENSG00000135903,ENSG00000009709; TAA,TAA
KLTEARVQV

SEQ ID NO: 60168 - protein, 9 aa, Homo sapiens
  misc_feature: Table A; Target 60168; HLA-C*16:02; PAX3,PAX7; ENSG00000135903,ENSG00000009709; TAA,TAA
KLTEARVQV

SEQ ID NO: 60169 - protein, 10 aa, Homo sapiens
  misc_feature: Table A; Target 60169; HLA-A*24:02; PAX3,PAX7; ENSG00000135903,ENSG00000009709; TAA,TAA
KLTEARVQVW

SEQ ID NO: 60170 - protein, 10 aa, Homo sapiens
  misc_feature: Table A; Target 60170; HLA-A*25:01; PAX3,PAX7; ENSG00000135903,ENSG00000009709; TAA,TAA
KLTEARVQVW

SEQ ID NO: 60171 - protein, 10 aa, Homo sapiens
  misc_feature: Table A; Target 60171; HLA-A*32:01; PAX3,PAX7; ENSG00000135903,ENSG00000009709; TAA,TAA
KLTEARVQVW

SEQ ID NO: 60172 - protein, 10 aa, Homo sapiens
  misc_feature: Table A; Target 60172; HLA-B*44:02; PAX3,PAX7; ENSG00000135903,ENSG00000009709; TAA,TAA
KLTEARVQVW

SEQ ID NO: 60173 - protein, 10 aa, Homo sapiens
  misc_feature: Table A; Target 60173; HLA-B*57:01; PAX3,PAX7; ENSG00000135903,ENSG00000009709; TAA,TAA
KLTEARVQVW

SEQ ID NO: 60174 - protein, 10 aa, Homo sapiens
  misc_feature: Table A; Target 60174; HLA-B*58:01; PAX3,PAX7; ENSG00000135903,ENSG00000009709; TAA,TAA
KLTEARVQVW

SEQ ID NO: 60175 - protein, 9 aa, Homo sapiens
  misc_feature: Table A; Target 60175; HLA-B*08:01; PAX3,PAX7; ENSG00000135903,ENSG00000009709; TAA,TAA
LGQGRVNQL

SEQ ID NO: 60176 - protein, 9 aa, Homo sapiens
  misc_feature: Table A; Target 60176; HLA-B*37:01; PAX3,PAX7; ENSG00000135903,ENSG00000009709; TAA,TAA
LGQGRVNQL

SEQ ID NO: 60177 - protein, 9 aa, Homo sapiens
  misc_feature: Table A; Target 60177; HLA-C*01:02; PAX3,PAX7; ENSG00000135903,ENSG00000009709; TAA,TAA
LGQGRVNQL

SEQ ID NO: 60178 - protein, 9 aa, Homo sapiens
  misc_feature: Table A; Target 60178; HLA-C*14:02; PAX3,PAX7; ENSG00000135903,ENSG00000009709; TAA,TAA
LGQGRVNQL

SEQ ID NO: 60179 - protein, 9 aa, Homo sapiens
  misc_feature: Table A; Target 60179; HLA-C*16:01; PAX3,PAX7; ENSG00000135903,ENSG00000009709; TAA,TAA
LGQGRVNQL

SEQ ID NO: 60180 - protein, 9 aa, Homo sapiens
  misc_feature: Table A; Target 60180; HLA-C*16:02; PAX3,PAX7; ENSG00000135903,ENSG00000009709; TAA,TAA
LGQGRVNQL

SEQ ID NO: 60181 - protein, 9 aa, Homo sapiens
  misc_feature: Table A; Target 60181; HLA-A*01:01; PAX3,PAX7; ENSG00000135903,ENSG00000009709; TAA,TAA
LTEARVQVW

SEQ ID NO: 60182 - protein, 9 aa, Homo sapiens
  misc_feature: Table A; Target 60182; HLA-A*25:01; PAX3,PAX7; ENSG00000135903,ENSG00000009709; TAA,TAA
LTEARVQVW

SEQ ID NO: 60183 - protein, 9 aa, Homo sapiens
  misc_feature: Table A; Target 60183; HLA-A*32:01; PAX3,PAX7; ENSG00000135903,ENSG00000009709; TAA,TAA
LTEARVQVW

SEQ ID NO: 60184 - protein, 9 aa, Homo sapiens
  misc_feature: Table A; Target 60184; HLA-B*44:02; PAX3,PAX7; ENSG00000135903,ENSG00000009709; TAA,TAA
LTEARVQVW

SEQ ID NO: 60185 - protein, 9 aa, Homo sapiens
  misc_feature: Table A; Target 60185; HLA-B*57:01; PAX3,PAX7; ENSG00000135903,ENSG00000009709; TAA,TAA
LTEARVQVW

SEQ ID NO: 60186 - protein, 9 aa, Homo sapiens
  misc_feature: Table A; Target 60186; HLA-B*58:01; PAX3,PAX7; ENSG00000135903,ENSG00000009709; TAA,TAA
LTEARVQVW

SEQ ID NO: 60187 - protein, 8 aa, Homo sapiens
  misc_feature: Table A; Target 60187; HLA-B*13:02; PAX3,PAX7; ENSG00000135903,ENSG00000009709; TAA,TAA
NQLGGVFI

SEQ ID NO: 60188 - protein, 8 aa, Homo sapiens
  misc_feature: Table A; Target 60188; HLA-B*39:01; PAX3,PAX7; ENSG00000135903,ENSG00000009709; TAA,TAA
NQLGGVFI

SEQ ID NO: 60189 - protein, 11 aa, Homo sapiens
  misc_feature: Table A; Target 60189; HLA-A*31:01; PAX3,PAX7; ENSG00000135903,ENSG00000009709; TAA,TAA
NQLGGVFINGR

SEQ ID NO: 60190 - protein, 11 aa, Homo sapiens
  misc_feature: Table A; Target 60190; HLA-C*07:06; PAX3,PAX7; ENSG00000135903,ENSG00000009709; TAA,TAA
NQLGGVFINGR

SEQ ID NO: 60191 - protein, 9 aa, Homo sapiens
  misc_feature: Table A; Target 60191; HLA-B*07:02; PAX3,PAX7; ENSG00000135903,ENSG00000009709; TAA,TAA
PDIYTREEL

SEQ ID NO: 60192 - protein, 8 aa, Homo sapiens
  misc_feature: Table A; Target 60192; HLA-A*30:02; PAX3,PAX7; ENSG00000135903,ENSG00000009709; TAA,TAA
PTYSTTGY

SEQ ID NO: 60193 - protein, 8 aa, Homo sapiens
  misc_feature: Table A; Target 60193; HLA-C*07:01; PAX3,PAX7; ENSG00000135903,ENSG00000009709; TAA,TAA
PTYSTTGY

SEQ ID NO: 60194 - protein, 9 aa, Homo sapiens
  misc_feature: Table A; Target 60194; HLA-C*04:01; PAX3,PAX7; ENSG00000135903,ENSG00000009709; TAA,TAA
QETGSIRPG

SEQ ID NO: 60195 - protein, 9 aa, Homo sapiens
  misc_feature: Table A; Target 60195; HLA-C*06:02; PAX3,PAX7; ENSG00000135903,ENSG00000009709; TAA,TAA
QETGSIRPG

SEQ ID NO: 60196 - protein, 9 aa, Homo sapiens
  misc_feature: Table A; Target 60196; HLA-C*07:01; PAX3,PAX7; ENSG00000135903,ENSG00000009709; TAA,TAA
QETGSIRPG

SEQ ID NO: 60197 - protein, 9 aa, Homo sapiens
  misc_feature: Table A; Target 60197; HLA-C*12:03; PAX3,PAX7; ENSG00000135903,ENSG00000009709; TAA,TAA
QETGSIRPG

SEQ ID NO: 60198 - protein, 9 aa, Homo sapiens
  misc_feature: Table A; Target 60198; HLA-C*16:02; PAX3,PAX7; ENSG00000135903,ENSG00000009709; TAA,TAA
QETGSIRPG

SEQ ID NO: 60199 - protein, 11 aa, Homo sapiens
  misc_feature: Table A; Target 60199; HLA-B*49:01; PAX3,PAX7; ENSG00000135903,ENSG00000009709; TAA,TAA
QETGSIRPGAI

SEQ ID NO: 60200 - protein, 9 aa, Homo sapiens
  misc_feature: Table A; Target 60200; HLA-A*24:02; PAX3,PAX7; ENSG00000135903,ENSG00000009709; TAA,TAA
RENPGMFSW

SEQ ID NO: 60201 - protein, 9 aa, Homo sapiens
  misc_feature: Table A; Target 60201; HLA-B*37:01; PAX3,PAX7; ENSG00000135903,ENSG00000009709; TAA,TAA
RENPGMFSW

SEQ ID NO: 60202 - protein, 9 aa, Homo sapiens
  misc_feature: Table A; Target 60202; HLA-B*44:02; PAX3,PAX7; ENSG00000135903,ENSG00000009709; TAA,TAA
RENPGMFSW

SEQ ID NO: 60203 - protein, 9 aa, Homo sapiens
  misc_feature: Table A; Target 60203; HLA-B*44:03; PAX3,PAX7; ENSG00000135903,ENSG00000009709; TAA,TAA
RENPGMFSW

SEQ ID NO: 60204 - protein, 9 aa, Homo sapiens
  misc_feature: Table A; Target 60204; HLA-B*57:01; PAX3,PAX7; ENSG00000135903,ENSG00000009709; TAA,TAA
RENPGMFSW

SEQ ID NO: 60205 - protein, 9 aa, Homo sapiens
  misc_feature: Table A; Target 60205; HLA-C*16:04; PAX3,PAX7; ENSG00000135903,ENSG00000009709; TAA,TAA
RENPGMFSW

SEQ ID NO: 60206 - protein, 9 aa, Homo sapiens
  misc_feature: Table A; Target 60206; HLA-B*07:02; PAX3,PAX7; ENSG00000135903,ENSG00000009709; TAA,TAA
RPCVISRQL

SEQ ID NO: 60207 - protein, 9 aa, Homo sapiens
  misc_feature: Table A; Target 60207; HLA-C*07:02; PAX3,PAX7; ENSG00000135903,ENSG00000009709; TAA,TAA
RPCVISRQL

SEQ ID NO: 60208 - protein, 9 aa, Homo sapiens
  misc_feature: Table A; Target 60208; HLA-B*07:02; PAX3,PAX7; ENSG00000135903,ENSG00000009709; TAA,TAA
RPQPLPPST

SEQ ID NO: 60209 - protein, 9 aa, Homo sapiens
  misc_feature: Table A; Target 60209; HLA-B*56:01; PAX3,PAX7; ENSG00000135903,ENSG00000009709; TAA,TAA
RPQPLPPST

SEQ ID NO: 60210 - protein, 10 aa, Homo sapiens
  misc_feature: Table A; Target 60210; HLA-A*31:01; PAX3,PAX7; ENSG00000135903,ENSG00000009709; TAA,TAA
RTHYPDIYTR

SEQ ID NO: 60211 - protein, 10 aa, Homo sapiens
  misc_feature: Table A; Target 60211; HLA-B*57:01; PAX3,PAX7; ENSG00000135903,ENSG00000009709; TAA,TAA
RTHYPDIYTR

SEQ ID NO: 60212 - protein, 9 aa, Homo sapiens
  misc_feature: Table A; Target 60212; HLA-B*58:01; PAX3,PAX7; ENSG00000135903,ENSG00000009709; TAA,TAA
RTTFTAEQL

SEQ ID NO: 60213 - protein, 9 aa, Homo sapiens
  misc_feature: Table A; Target 60213; HLA-A*25:01; PAX3,PAX7; ENSG00000135903,ENSG00000009709; TAA,TAA
RVNQLGGVF

SEQ ID NO: 60214 - protein, 9 aa, Homo sapiens
  misc_feature: Table A; Target 60214; HLA-A*30:02; PAX3,PAX7; ENSG00000135903,ENSG00000009709; TAA,TAA
RVNQLGGVF

SEQ ID NO: 60215 - protein, 9 aa, Homo sapiens
  misc_feature: Table A; Target 60215; HLA-A*32:01; PAX3,PAX7; ENSG00000135903,ENSG00000009709; TAA,TAA
RVNQLGGVF

SEQ ID NO: 60216 - protein, 9 aa, Homo sapiens
  misc_feature: Table A; Target 60216; HLA-B*15:01; PAX3,PAX7; ENSG00000135903,ENSG00000009709; TAA,TAA
RVNQLGGVF

SEQ ID NO: 60217 - protein, 9 aa, Homo sapiens
  misc_feature: Table A; Target 60217; HLA-B*15:03; PAX3,PAX7; ENSG00000135903,ENSG00000009709; TAA,TAA
RVNQLGGVF

SEQ ID NO: 60218 - protein, 9 aa, Homo sapiens
  misc_feature: Table A; Target 60218; HLA-B*46:01; PAX3,PAX7; ENSG00000135903,ENSG00000009709; TAA,TAA
RVNQLGGVF

SEQ ID NO: 60219 - protein, 9 aa, Homo sapiens
  misc_feature: Table A; Target 60219; HLA-B*57:01; PAX3,PAX7; ENSG00000135903,ENSG00000009709; TAA,TAA
RVNQLGGVF

SEQ ID NO: 60220 - protein, 9 aa, Homo sapiens
  misc_feature: Table A; Target 60220; HLA-B*58:01; PAX3,PAX7; ENSG00000135903,ENSG00000009709; TAA,TAA
RVNQLGGVF

SEQ ID NO: 60221 - protein, 9 aa, Homo sapiens
  misc_feature: Table A; Target 60221; HLA-C*07:04; PAX3,PAX7; ENSG00000135903,ENSG00000009709; TAA,TAA
RVNQLGGVF

SEQ ID NO: 60222 - protein, 9 aa, Homo sapiens
  misc_feature: Table A; Target 60222; HLA-A*03:01; PAX3,PAX7; ENSG00000135903,ENSG00000009709; TAA,TAA
RVQVWFSNR

SEQ ID NO: 60223 - protein, 9 aa, Homo sapiens
  misc_feature: Table A; Target 60223; HLA-A*31:01; PAX3,PAX7; ENSG00000135903,ENSG00000009709; TAA,TAA
RVQVWFSNR

SEQ ID NO: 60224 - protein, 10 aa, Homo sapiens
  misc_feature: Table A; Target 60224; HLA-A*31:01; PAX3,PAX7; ENSG00000135903,ENSG00000009709; TAA,TAA
RVQVWFSNRR

SEQ ID NO: 60225 - protein, 9 aa, Homo sapiens
  misc_feature: Table A; Target 60225; HLA-A*03:02; PAX3,PAX7; ENSG00000135903,ENSG00000009709; TAA,TAA
RVSHGCVSK

SEQ ID NO: 60226 - protein, 8 aa, Homo sapiens
  misc_feature: Table A; Target 60226; HLA-C*14:02; PAX3,PAX7; ENSG00000135903,ENSG00000009709; TAA,TAA
RYQETGSI

SEQ ID NO: 60227 - protein, 9 aa, Homo sapiens
  misc_feature: Table A; Target 60227; HLA-A*31:01; PAX3,PAX7; ENSG00000135903,ENSG00000009709; TAA,TAA
RYQETGSIR

SEQ ID NO: 60228 - protein, 9 aa, Homo sapiens
  misc_feature: Table A; Target 60228; HLA-A*33:01; PAX3,PAX7; ENSG00000135903,ENSG00000009709; TAA,TAA
RYQETGSIR

SEQ ID NO: 60229 - protein, 9 aa, Homo sapiens
  misc_feature: Table A; Target 60229; HLA-A*33:03; PAX3,PAX7; ENSG00000135903,ENSG00000009709; TAA,TAA
RYQETGSIR

SEQ ID NO: 60230 - protein, 9 aa, Homo sapiens
  misc_feature: Table A; Target 60230; HLA-C*14:02; PAX3,PAX7; ENSG00000135903,ENSG00000009709; TAA,TAA
RYQETGSIR

SEQ ID NO: 60231 - protein, 11 aa, Homo sapiens
  misc_feature: Table A; Target 60231; HLA-A*31:01; PAX3,PAX7; ENSG00000135903,ENSG00000009709; TAA,TAA
RYQETGSIRPG

SEQ ID NO: 60232 - protein, 11 aa, Homo sapiens
  misc_feature: Table A; Target 60232; HLA-C*04:01; PAX3,PAX7; ENSG00000135903,ENSG00000009709; TAA,TAA
RYQETGSIRPG

SEQ ID NO: 60233 - protein, 9 aa, Homo sapiens
  misc_feature: Table A; Target 60233; HLA-A*29:02; PAX3,PAX7; ENSG00000135903,ENSG00000009709; TAA,TAA
SEPDLPLKR

SEQ ID NO: 60234 - protein, 9 aa, Homo sapiens
  misc_feature: Table A; Target 60234; HLA-A*68:01; PAX3,PAX7; ENSG00000135903,ENSG00000009709; TAA,TAA
SEPDLPLKR

SEQ ID NO: 60235 - protein, 9 aa, Homo sapiens
  misc_feature: Table A; Target 60235; HLA-B*44:02; PAX3,PAX7; ENSG00000135903,ENSG00000009709; TAA,TAA
SEPDLPLKR

SEQ ID NO: 60236 - protein, 9 aa, Homo sapiens
  misc_feature: Table A; Target 60236; HLA-B*44:03; PAX3,PAX7; ENSG00000135903,ENSG00000009709; TAA,TAA
SEPDLPLKR

SEQ ID NO: 60237 - protein, 9 aa, Homo sapiens
  misc_feature: Table A; Target 60237; HLA-C*06:02; PAX3,PAX7; ENSG00000135903,ENSG00000009709; TAA,TAA
SEPDLPLKR

SEQ ID NO: 60238 - protein, 9 aa, Homo sapiens
  misc_feature: Table A; Target 60238; HLA-C*07:06; PAX3,PAX7; ENSG00000135903,ENSG00000009709; TAA,TAA
SEPDLPLKR

SEQ ID NO: 60239 - protein, 9 aa, Homo sapiens
  misc_feature: Table A; Target 60239; HLA-C*12:03; PAX3,PAX7; ENSG00000135903,ENSG00000009709; TAA,TAA
SEPDLPLKR

SEQ ID NO: 60240 - protein, 9 aa, Homo sapiens
  misc_feature: Table A; Target 60240; HLA-C*16:04; PAX3,PAX7; ENSG00000135903,ENSG00000009709; TAA,TAA
SEPDLPLKR

SEQ ID NO: 60241 - protein, 11 aa, Homo sapiens
  misc_feature: Table A; Target 60241; HLA-A*03:01; PAX3,PAX7; ENSG00000135903,ENSG00000009709; TAA,TAA
SIRPGAIGGSK

SEQ ID NO: 60242 - protein, 11 aa, Homo sapiens
  misc_feature: Table A; Target 60242; HLA-A*03:02; PAX3,PAX7; ENSG00000135903,ENSG00000009709; TAA,TAA
SIRPGAIGGSK

SEQ ID NO: 60243 - protein, 11 aa, Homo sapiens
  misc_feature: Table A; Target 60243; HLA-A*31:01; PAX3,PAX7; ENSG00000135903,ENSG00000009709; TAA,TAA
SIRPGAIGGSK

SEQ ID NO: 60244 - protein, 8 aa, Homo sapiens
  misc_feature: Table A; Target 60244; HLA-C*05:01; PAX3,PAX7; ENSG00000135903,ENSG00000009709; TAA,TAA
TAEQLEEL

SEQ ID NO: 60245 - protein, 8 aa, Homo sapiens
  misc_feature: Table A; Target 60245; HLA-B*18:01; PAX3,PAX7; ENSG00000135903,ENSG00000009709; TAA,TAA
TEARVQVW

SEQ ID NO: 60246 - protein, 8 aa, Homo sapiens
  misc_feature: Table A; Target 60246; HLA-B*37:01; PAX3,PAX7; ENSG00000135903,ENSG00000009709; TAA,TAA
TEARVQVW

SEQ ID NO: 60247 - protein, 8 aa, Homo sapiens
  misc_feature: Table A; Target 60247; HLA-B*44:02; PAX3,PAX7; ENSG00000135903,ENSG00000009709; TAA,TAA
TEARVQVW

SEQ ID NO: 60248 - protein, 8 aa, Homo sapiens
  misc_feature: Table A; Target 60248; HLA-B*44:03; PAX3,PAX7; ENSG00000135903,ENSG00000009709; TAA,TAA
TEARVQVW

SEQ ID NO: 60249 - protein, 9 aa, Homo sapiens
  misc_feature: Table A; Target 60249; HLA-B*44:02; PAX3,PAX7; ENSG00000135903,ENSG00000009709; TAA,TAA
TEARVQVWF

SEQ ID NO: 60250 - protein, 9 aa, Homo sapiens
  misc_feature: Table A; Target 60250; HLA-B*44:03; PAX3,PAX7; ENSG00000135903,ENSG00000009709; TAA,TAA
TEARVQVWF

SEQ ID NO: 60251 - protein, 9 aa, Homo sapiens
  misc_feature: Table A; Target 60251; HLA-B*57:01; PAX3,PAX7; ENSG00000135903,ENSG00000009709; TAA,TAA
TEARVQVWF

SEQ ID NO: 60252 - protein, 9 aa, Homo sapiens
  misc_feature: Table A; Target 60252; HLA-B*08:01; PAX3,PAX7; ENSG00000135903,ENSG00000009709; TAA,TAA
TGSIRPGAI

SEQ ID NO: 60253 - protein, 9 aa, Homo sapiens
  misc_feature: Table A; Target 60253; HLA-A*31:01; PAX3,PAX7; ENSG00000135903,ENSG00000009709; TAA,TAA
THYPDIYTR

SEQ ID NO: 60254 - protein, 9 aa, Homo sapiens
  misc_feature: Table A; Target 60254; HLA-A*33:01; PAX3,PAX7; ENSG00000135903,ENSG00000009709; TAA,TAA
THYPDIYTR

SEQ ID NO: 60255 - protein, 9 aa, Homo sapiens
  misc_feature: Table A; Target 60255; HLA-A*33:03; PAX3,PAX7; ENSG00000135903,ENSG00000009709; TAA,TAA
THYPDIYTR

SEQ ID NO: 60256 - protein, 9 aa, Homo sapiens
  misc_feature: Table A; Target 60256; HLA-B*27:05; PAX3,PAX7; ENSG00000135903,ENSG00000009709; TAA,TAA
THYPDIYTR

SEQ ID NO: 60257 - protein, 9 aa, Homo sapiens
  misc_feature: Table A; Target 60257; HLA-B*38:01; PAX3,PAX7; ENSG00000135903,ENSG00000009709; TAA,TAA
THYPDIYTR

SEQ ID NO: 60258 - protein, 11 aa, Homo sapiens
  misc_feature: Table A; Target 60258; HLA-B*35:01; PAX3,PAX7; ENSG00000135903,ENSG00000009709; TAA,TAA
TPDVEKKIEEY

SEQ ID NO: 60259 - protein, 11 aa, Homo sapiens
  misc_feature: Table A; Target 60259; HLA-B*55:01; PAX3,PAX7; ENSG00000135903,ENSG00000009709; TAA,TAA
TPDVEKKIEEY

SEQ ID NO: 60260 - protein, 11 aa, Homo sapiens
  misc_feature: Table A; Target 60260; HLA-C*03:03; PAX3,PAX7; ENSG00000135903,ENSG00000009709; TAA,TAA
TPDVEKKIEEY

SEQ ID NO: 60261 - protein, 11 aa, Homo sapiens
  misc_feature: Table A; Target 60261; HLA-B*07:02; PAX3,PAX7; ENSG00000135903,ENSG00000009709; TAA,TAA
TPLGQGRVNQL

SEQ ID NO: 60262 - protein, 11 aa, Homo sapiens
  misc_feature: Table A; Target 60262; HLA-B*08:01; PAX3,PAX7; ENSG00000135903,ENSG00000009709; TAA,TAA
TPLGQGRVNQL

SEQ ID NO: 60263 - protein, 11 aa, Homo sapiens
  misc_feature: Table A; Target 60263; HLA-B*35:03; PAX3,PAX7; ENSG00000135903,ENSG00000009709; TAA,TAA
TPLGQGRVNQL

SEQ ID NO: 60264 - protein, 11 aa, Homo sapiens
  misc_feature: Table A; Target 60264; HLA-B*55:01; PAX3,PAX7; ENSG00000135903,ENSG00000009709; TAA,TAA
TPLGQGRVNQL

SEQ ID NO: 60265 - protein, 11 aa, Homo sapiens
  misc_feature: Table A; Target 60265; HLA-C*07:02; PAX3,PAX7; ENSG00000135903,ENSG00000009709; TAA,TAA
TPLGQGRVNQL

SEQ ID NO: 60266 - protein, 8 aa, Homo sapiens
  misc_feature: Table A; Target 60266; HLA-B*18:01; PAX3,PAX7; ENSG00000135903,ENSG00000009709; TAA,TAA
TTFTAEQL

SEQ ID NO: 60267 - protein, 11 aa, Homo sapiens
  misc_feature: Table A; Target 60267; HLA-A*68:02; PAX3,PAX7; ENSG00000135903,ENSG00000009709; TAA,TAA
TTFTAEQLEEL

SEQ ID NO: 60268 - protein, 8 aa, Homo sapiens
  misc_feature: Table A; Target 60268; HLA-A*30:02; PAX3,PAX7; ENSG00000135903,ENSG00000009709; TAA,TAA
VEKKIEEY

SEQ ID NO: 60269 - protein, 8 aa, Homo sapiens
  misc_feature: Table A; Target 60269; HLA-B*08:01; PAX3,PAX7; ENSG00000135903,ENSG00000009709; TAA,TAA
VEKKIEEY

SEQ ID NO: 60270 - protein, 8 aa, Homo sapiens
  misc_feature: Table A; Target 60270; HLA-B*15:01; PAX3,PAX7; ENSG00000135903,ENSG00000009709; TAA,TAA
VEKKIEEY

SEQ ID NO: 60271 - protein, 8 aa, Homo sapiens
  misc_feature: Table A; Target 60271; HLA-B*15:03; PAX3,PAX7; ENSG00000135903,ENSG00000009709; TAA,TAA
VEKKIEEY

SEQ ID NO: 60272 - protein, 8 aa, Homo sapiens
  misc_feature: Table A; Target 60272; HLA-B*18:01; PAX3,PAX7; ENSG00000135903,ENSG00000009709; TAA,TAA
VEKKIEEY

SEQ ID NO: 60273 - protein, 8 aa, Homo sapiens
  misc_feature: Table A; Target 60273; HLA-B*37:01; PAX3,PAX7; ENSG00000135903,ENSG00000009709; TAA,TAA
VEKKIEEY

SEQ ID NO: 60274 - protein, 8 aa, Homo sapiens
  misc_feature: Table A; Target 60274; HLA-B*40:02; PAX3,PAX7; ENSG00000135903,ENSG00000009709; TAA,TAA
VEKKIEEY

SEQ ID NO: 60275 - protein, 8 aa, Homo sapiens
  misc_feature: Table A; Target 60275; HLA-B*44:02; PAX3,PAX7; ENSG00000135903,ENSG00000009709; TAA,TAA
VEKKIEEY

SEQ ID NO: 60276 - protein, 8 aa, Homo sapiens
  misc_feature: Table A; Target 60276; HLA-B*46:01; PAX3,PAX7; ENSG00000135903,ENSG00000009709; TAA,TAA
VEKKIEEY

SEQ ID NO: 60277 - protein, 8 aa, Homo sapiens
  misc_feature: Table A; Target 60277; HLA-C*04:01; PAX3,PAX7; ENSG00000135903,ENSG00000009709; TAA,TAA
VEKKIEEY

SEQ ID NO: 60278 - protein, 8 aa, Homo sapiens
  misc_feature: Table A; Target 60278; HLA-C*07:01; PAX3,PAX7; ENSG00000135903,ENSG00000009709; TAA,TAA
VEKKIEEY

SEQ ID NO: 60279 - protein, 8 aa, Homo sapiens
  misc_feature: Table A; Target 60279; HLA-C*07:04; PAX3,PAX7; ENSG00000135903,ENSG00000009709; TAA,TAA
VEKKIEEY

SEQ ID NO: 60280 - protein, 8 aa, Homo sapiens
  misc_feature: Table A; Target 60280; HLA-C*12:03; PAX3,PAX7; ENSG00000135903,ENSG00000009709; TAA,TAA
VEKKIEEY

SEQ ID NO: 60281 - protein, 8 aa, Homo sapiens
  misc_feature: Table A; Target 60281; HLA-C*16:04; PAX3,PAX7; ENSG00000135903,ENSG00000009709; TAA,TAA
VEKKIEEY

SEQ ID NO: 60282 - protein, 8 aa, Homo sapiens
  misc_feature: Table A; Target 60282; HLA-B*37:01; PAX3,PAX7; ENSG00000135903,ENSG00000009709; TAA,TAA
VEMAHHGI

SEQ ID NO: 60283 - protein, 8 aa, Homo sapiens
  misc_feature: Table A; Target 60283; HLA-B*44:02; PAX3,PAX7; ENSG00000135903,ENSG00000009709; TAA,TAA
VEMAHHGI

SEQ ID NO: 60284 - protein, 8 aa, Homo sapiens
  misc_feature: Table A; Target 60284; HLA-B*49:01; PAX3,PAX7; ENSG00000135903,ENSG00000009709; TAA,TAA
VEMAHHGI

SEQ ID NO: 60285 - protein, 8 aa, Homo sapiens
  misc_feature: Table A; Target 60285; HLA-C*01:02; PAX3,PAX7; ENSG00000135903,ENSG00000009709; TAA,TAA
VFINGRPL

SEQ ID NO: 60286 - protein, 8 aa, Homo sapiens
  misc_feature: Table A; Target 60286; HLA-C*14:02; PAX3,PAX7; ENSG00000135903,ENSG00000009709; TAA,TAA
VFINGRPL

SEQ ID NO: 60287 - protein, 9 aa, Homo sapiens
  misc_feature: Table A; Target 60287; HLA-C*06:02; PAX3,PAX7; ENSG00000135903,ENSG00000009709; TAA,TAA
VHRPQPLPP

SEQ ID NO: 60288 - protein, 8 aa, Homo sapiens
  misc_feature: Table A; Target 60288; HLA-C*14:02; PAX3,PAX7; ENSG00000135903,ENSG00000009709; TAA,TAA
VNQLGGVF

SEQ ID NO: 60289 - protein, 8 aa, Homo sapiens
  misc_feature: Table A; Target 60289; HLA-A*31:01; PAX3,PAX7; ENSG00000135903,ENSG00000009709; TAA,TAA
VQVWFSNR

SEQ ID NO: 60290 - protein, 9 aa, Homo sapiens
  misc_feature: Table A; Target 60290; HLA-A*31:01; PAX3,PAX7; ENSG00000135903,ENSG00000009709; TAA,TAA
VSTPLGQGR

SEQ ID NO: 60291 - protein, 9 aa, Homo sapiens
  misc_feature: Table A; Target 60291; HLA-A*33:01; PAX3,PAX7; ENSG00000135903,ENSG00000009709; TAA,TAA
VSTPLGQGR

SEQ ID NO: 60292 - protein, 9 aa, Homo sapiens
  misc_feature: Table A; Target 60292; HLA-A*33:03; PAX3,PAX7; ENSG00000135903,ENSG00000009709; TAA,TAA
VSTPLGQGR

SEQ ID NO: 60293 - protein, 9 aa, Homo sapiens
  misc_feature: Table A; Target 60293; HLA-A*68:01; PAX3,PAX7; ENSG00000135903,ENSG00000009709; TAA,TAA
VSTPLGQGR

SEQ ID NO: 60294 - protein, 9 aa, Homo sapiens
  misc_feature: Table A; Target 60294; HLA-B*57:01; PAX3,PAX7; ENSG00000135903,ENSG00000009709; TAA,TAA
VSTPLGQGR

SEQ ID NO: 60295 - protein, 9 aa, Homo sapiens
  misc_feature: Table A; Target 60295; HLA-C*07:06; PAX3,PAX7; ENSG00000135903,ENSG00000009709; TAA,TAA
VSTPLGQGR

SEQ ID NO: 60296 - protein, 11 aa, Homo sapiens
  misc_feature: Table A; Target 60296; HLA-A*01:01; PAX3,PAX7; ENSG00000135903,ENSG00000009709; TAA,TAA
YCPPTYSTTGY

SEQ ID NO: 60297 - protein, 11 aa, Homo sapiens
  misc_feature: Table A; Target 60297; HLA-A*26:01; PAX3,PAX7; ENSG00000135903,ENSG00000009709; TAA,TAA
YCPPTYSTTGY

SEQ ID NO: 60298 - protein, 11 aa, Homo sapiens
  misc_feature: Table A; Target 60298; HLA-A*29:02; PAX3,PAX7; ENSG00000135903,ENSG00000009709; TAA,TAA
YCPPTYSTTGY

SEQ ID NO: 60299 - protein, 11 aa, Homo sapiens
  misc_feature: Table A; Target 60299; HLA-B*46:01; PAX3,PAX7; ENSG00000135903,ENSG00000009709; TAA,TAA
YCPPTYSTTGY

SEQ ID NO: 60300 - protein, 11 aa, Homo sapiens
  misc_feature: Table A; Target 60300; HLA-C*07:01; PAX3,PAX7; ENSG00000135903,ENSG00000009709; TAA,TAA
YCPPTYSTTGY

SEQ ID NO: 60301 - protein, 11 aa, Homo sapiens
  misc_feature: Table A; Target 60301; HLA-C*07:04; PAX3,PAX7; ENSG00000135903,ENSG00000009709; TAA,TAA
YCPPTYSTTGY

SEQ ID NO: 60302 - protein, 10 aa, Homo sapiens
  misc_feature: Table A; Target 60302; HLA-B*07:02; PAX3,PAX7; ENSG00000135903,ENSG00000009709; TAA,TAA
YPDIYTREEL

SEQ ID NO: 60303 - protein, 10 aa, Homo sapiens
  misc_feature: Table A; Target 60303; HLA-B*35:01; PAX3,PAX7; ENSG00000135903,ENSG00000009709; TAA,TAA
YPDIYTREEL

SEQ ID NO: 60304 - protein, 10 aa, Homo sapiens
  misc_feature: Table A; Target 60304; HLA-B*35:03; PAX3,PAX7; ENSG00000135903,ENSG00000009709; TAA,TAA
YPDIYTREEL

SEQ ID NO: 60305 - protein, 10 aa, Homo sapiens
  misc_feature: Table A; Target 60305; HLA-B*54:01; PAX3,PAX7; ENSG00000135903,ENSG00000009709; TAA,TAA
YPDIYTREEL

SEQ ID NO: 60306 - protein, 10 aa, Homo sapiens
  misc_feature: Table A; Target 60306; HLA-B*55:01; PAX3,PAX7; ENSG00000135903,ENSG00000009709; TAA,TAA
YPDIYTREEL

SEQ ID NO: 60307 - protein, 10 aa, Homo sapiens
  misc_feature: Table A; Target 60307; HLA-C*03:03; PAX3,PAX7; ENSG00000135903,ENSG00000009709; TAA,TAA
YPDIYTREEL

SEQ ID NO: 60308 - protein, 10 aa, Homo sapiens
  misc_feature: Table A; Target 60308; HLA-C*07:02; PAX3,PAX7; ENSG00000135903,ENSG00000009709; TAA,TAA
YPDIYTREEL

SEQ ID NO: 60309 - protein, 11 aa, Homo sapiens
  misc_feature: Table A; Target 60309; HLA-B*54:01; PAX3,PAX7; ENSG00000135903,ENSG00000009709; TAA,TAA
YPDIYTREELA

SEQ ID NO: 60310 - protein, 8 aa, Homo sapiens
  misc_feature: Table A; Target 60310; HLA-C*05:01; PAX3,PAX7; ENSG00000135903,ENSG00000009709; TAA,TAA
YQETGSIR

SEQ ID NO: 60311 - protein, 9 aa, Homo sapiens
  misc_feature: Table A; Target 60311; HLA-B*27:05; PAX3,PAX7; ENSG00000135903,ENSG00000009709; TAA,TAA
YQETGSIRP

SEQ ID NO: 60312 - protein, 9 aa, Homo sapiens
  misc_feature: Table A; Target 60312; HLA-C*05:01; PAX3,PAX7; ENSG00000135903,ENSG00000009709; TAA,TAA
YQETGSIRP

SEQ ID NO: 60313 - protein, 9 aa, Homo sapiens
  misc_feature: Table A; Target 60313; HLA-C*07:04; PAX3,PAX7; ENSG00000135903,ENSG00000009709; TAA,TAA
YQETGSIRP

SEQ ID NO: 60314 - protein, 10 aa, Homo sapiens
  misc_feature: Table A; Target 60314; HLA-B*07:02; PAX3,PAX7; ENSG00000135903,ENSG00000009709; TAA,TAA
YQETGSIRPG

SEQ ID NO: 60315 - protein, 10 aa, Homo sapiens
  misc_feature: Table A; Target 60315; HLA-B*27:05; PAX3,PAX7; ENSG00000135903,ENSG00000009709; TAA,TAA
YQETGSIRPG

SEQ ID NO: 60316 - protein, 10 aa, Homo sapiens
  misc_feature: Table A; Target 60316; HLA-B*39:01; PAX3,PAX7; ENSG00000135903,ENSG00000009709; TAA,TAA
YQETGSIRPG

SEQ ID NO: 60317 - protein, 10 aa, Homo sapiens
  misc_feature: Table A; Target 60317; HLA-B*40:02; PAX3,PAX7; ENSG00000135903,ENSG00000009709; TAA,TAA
YQETGSIRPG

SEQ ID NO: 60318 - protein, 10 aa, Homo sapiens
  misc_feature: Table A; Target 60318; HLA-C*04:01; PAX3,PAX7; ENSG00000135903,ENSG00000009709; TAA,TAA
YQETGSIRPG

SEQ ID NO: 60319 - protein, 10 aa, Homo sapiens
  misc_feature: Table A; Target 60319; HLA-C*06:02; PAX3,PAX7; ENSG00000135903,ENSG00000009709; TAA,TAA
YQETGSIRPG

SEQ ID NO: 60320 - protein, 10 aa, Homo sapiens
  misc_feature: Table A; Target 60320; HLA-C*07:01; PAX3,PAX7; ENSG00000135903,ENSG00000009709; TAA,TAA
YQETGSIRPG

SEQ ID NO: 60321 - protein, 10 aa, Homo sapiens
  misc_feature: Table A; Target 60321; HLA-C*07:02; PAX3,PAX7; ENSG00000135903,ENSG00000009709; TAA,TAA
YQETGSIRPG

SEQ ID NO: 60322 - protein, 10 aa, Homo sapiens
  misc_feature: Table A; Target 60322; HLA-C*07:04; PAX3,PAX7; ENSG00000135903,ENSG00000009709; TAA,TAA
YQETGSIRPG

SEQ ID NO: 60323 - protein, 10 aa, Homo sapiens
  misc_feature: Table A; Target 60323; HLA-C*12:03; PAX3,PAX7; ENSG00000135903,ENSG00000009709; TAA,TAA
YQETGSIRPG

SEQ ID NO: 60324 - protein, 8 aa, Homo sapiens
  misc_feature: Table A; Target 60324; HLA-B*13:02; PAX3,PAX7; ENSG00000135903,ENSG00000009709; TAA,TAA
YQYGQYGQ

SEQ ID NO: 60325 - protein, 9 aa, Homo sapiens
  misc_feature: Table A; Target 60325; HLA-A*31:01; PAX3,PAX7; ENSG00000135903,ENSG00000009709; TAA,TAA
YTREELAQR

SEQ ID NO: 60326 - protein, 9 aa, Homo sapiens
  misc_feature: Table A; Target 60326; HLA-A*33:01; PAX3,PAX7; ENSG00000135903,ENSG00000009709; TAA,TAA
YTREELAQR

SEQ ID NO: 60327 - protein, 9 aa, Homo sapiens
  misc_feature: Table A; Target 60327; HLA-A*33:03; PAX3,PAX7; ENSG00000135903,ENSG00000009709; TAA,TAA
YTREELAQR

SEQ ID NO: 60328 - protein, 9 aa, Homo sapiens
  misc_feature: Table A; Target 60328; HLA-A*68:01; PAX3,PAX7; ENSG00000135903,ENSG00000009709; TAA,TAA
YTREELAQR

SEQ ID NO: 60329 - protein, 9 aa, Homo sapiens
  misc_feature: Table A; Target 60329; HLA-C*07:06; PAX3,PAX7; ENSG00000135903,ENSG00000009709; TAA,TAA
YTREELAQR

SEQ ID NO: 60330 - protein, 11 aa, Homo sapiens
  misc_feature: Table A; Target 60330; HLA-B*56:01; PAX7; ENSG00000009709; TAA
AAAAAADTSSA

SEQ ID NO: 60331 - protein, 10 aa, Homo sapiens
  misc_feature: Table A; Target 60331; HLA-B*56:01; PAX7; ENSG00000009709; TAA
AAAAADTSSA

SEQ ID NO: 60332 - protein, 11 aa, Homo sapiens
  misc_feature: Table A; Target 60332; HLA-A*01:01; PAX7; ENSG00000009709; TAA
AAAAADTSSAY

SEQ ID NO: 60333 - protein, 11 aa, Homo sapiens
  misc_feature: Table A; Target 60333; HLA-A*25:01; PAX7; ENSG00000009709; TAA
AAAAADTSSAY

SEQ ID NO: 60334 - protein, 11 aa, Homo sapiens
  misc_feature: Table A; Target 60334; HLA-A*26:01; PAX7; ENSG00000009709; TAA
AAAAADTSSAY

SEQ ID NO: 60335 - protein, 11 aa, Homo sapiens
  misc_feature: Table A; Target 60335; HLA-A*29:02; PAX7; ENSG00000009709; TAA
AAAAADTSSAY

SEQ ID NO: 60336 - protein, 11 aa, Homo sapiens
  misc_feature: Table A; Target 60336; HLA-A*30:02; PAX7; ENSG00000009709; TAA
AAAAADTSSAY

SEQ ID NO: 60337 - protein, 11 aa, Homo sapiens
  misc_feature: Table A; Target 60337; HLA-A*32:01; PAX7; ENSG00000009709; TAA
AAAAADTSSAY

SEQ ID NO: 60338 - protein, 11 aa, Homo sapiens
  misc_feature: Table A; Target 60338; HLA-B*15:01; PAX7; ENSG00000009709; TAA
AAAAADTSSAY

SEQ ID NO: 60339 - protein, 11 aa, Homo sapiens
  misc_feature: Table A; Target 60339; HLA-B*15:03; PAX7; ENSG00000009709; TAA
AAAAADTSSAY

SEQ ID NO: 60340 - protein, 11 aa, Homo sapiens
  misc_feature: Table A; Target 60340; HLA-B*27:02; PAX7; ENSG00000009709; TAA
AAAAADTSSAY

SEQ ID NO: 60341 - protein, 11 aa, Homo sapiens
  misc_feature: Table A; Target 60341; HLA-B*27:05; PAX7; ENSG00000009709; TAA
AAAAADTSSAY

SEQ ID NO: 60342 - protein, 11 aa, Homo sapiens
  misc_feature: Table A; Target 60342; HLA-B*35:01; PAX7; ENSG00000009709; TAA
AAAAADTSSAY

SEQ ID NO: 60343 - protein, 11 aa, Homo sapiens
  misc_feature: Table A; Target 60343; HLA-B*39:01; PAX7; ENSG00000009709; TAA
AAAAADTSSAY

SEQ ID NO: 60344 - protein, 11 aa, Homo sapiens
  misc_feature: Table A; Target 60344; HLA-B*44:03; PAX7; ENSG00000009709; TAA
AAAAADTSSAY

SEQ ID NO: 60345 - protein, 11 aa, Homo sapiens
  misc_feature: Table A; Target 60345; HLA-B*46:01; PAX7; ENSG00000009709; TAA
AAAAADTSSAY

SEQ ID NO: 60346 - protein, 11 aa, Homo sapiens
  misc_feature: Table A; Target 60346; HLA-B*55:01; PAX7; ENSG00000009709; TAA
AAAAADTSSAY

SEQ ID NO: 60347 - protein, 11 aa, Homo sapiens
  misc_feature: Table A; Target 60347; HLA-B*58:01; PAX7; ENSG00000009709; TAA
AAAAADTSSAY

SEQ ID NO: 60348 - protein, 11 aa, Homo sapiens
  misc_feature: Table A; Target 60348; HLA-C*01:02; PAX7; ENSG00000009709; TAA
AAAAADTSSAY

SEQ ID NO: 60349 - protein, 11 aa, Homo sapiens
  misc_feature: Table A; Target 60349; HLA-C*02:02; PAX7; ENSG00000009709; TAA
AAAAADTSSAY

SEQ ID NO: 60350 - protein, 11 aa, Homo sapiens
  misc_feature: Table A; Target 60350; HLA-C*03:03; PAX7; ENSG00000009709; TAA
AAAAADTSSAY

SEQ ID NO: 60351 - protein, 11 aa, Homo sapiens
  misc_feature: Table A; Target 60351; HLA-C*03:04; PAX7; ENSG00000009709; TAA
AAAAADTSSAY

SEQ ID NO: 60352 - protein, 11 aa, Homo sapiens
  misc_feature: Table A; Target 60352; HLA-C*04:01; PAX7; ENSG00000009709; TAA
AAAAADTSSAY

SEQ ID NO: 60353 - protein, 11 aa, Homo sapiens
  misc_feature: Table A; Target 60353; HLA-C*07:04; PAX7; ENSG00000009709; TAA
AAAAADTSSAY

SEQ ID NO: 60354 - protein, 11 aa, Homo sapiens
  misc_feature: Table A; Target 60354; HLA-C*07:06; PAX7; ENSG00000009709; TAA
AAAAADTSSAY

SEQ ID NO: 60355 - protein, 11 aa, Homo sapiens
  misc_feature: Table A; Target 60355; HLA-C*14:02; PAX7; ENSG00000009709; TAA
AAAAADTSSAY

SEQ ID NO: 60356 - protein, 11 aa, Homo sapiens
  misc_feature: Table A; Target 60356; HLA-C*16:02; PAX7; ENSG00000009709; TAA
AAAAADTSSAY

SEQ ID NO: 60357 - protein, 11 aa, Homo sapiens
  misc_feature: Table A; Target 60357; HLA-C*16:04; PAX7; ENSG00000009709; TAA
AAAAADTSSAY

SEQ ID NO: 60358 - protein, 9 aa, Homo sapiens
  misc_feature: Table A; Target 60358; HLA-B*54:01; PAX7; ENSG00000009709; TAA
AAAADTSSA

SEQ ID NO: 60359 - protein, 9 aa, Homo sapiens
  misc_feature: Table A; Target 60359; HLA-B*55:01; PAX7; ENSG00000009709; TAA
AAAADTSSA

SEQ ID NO: 60360 - protein, 9 aa, Homo sapiens
  misc_feature: Table A; Target 60360; HLA-B*56:01; PAX7; ENSG00000009709; TAA
AAAADTSSA

SEQ ID NO: 60361 - protein, 9 aa, Homo sapiens
  misc_feature: Table A; Target 60361; HLA-C*03:03; PAX7; ENSG00000009709; TAA
AAAADTSSA

SEQ ID NO: 60362 - protein, 9 aa, Homo sapiens
  misc_feature: Table A; Target 60362; HLA-C*03:04; PAX7; ENSG00000009709; TAA
AAAADTSSA

SEQ ID NO: 60363 - protein, 9 aa, Homo sapiens
  misc_feature: Table A; Target 60363; HLA-C*14:02; PAX7; ENSG00000009709; TAA
AAAADTSSA

SEQ ID NO: 60364 - protein, 10 aa, Homo sapiens
  misc_feature: Table A; Target 60364; HLA-A*01:01; PAX7; ENSG00000009709; TAA
AAAADTSSAY

SEQ ID NO: 60365 - protein, 10 aa, Homo sapiens
  misc_feature: Table A; Target 60365; HLA-A*25:01; PAX7; ENSG00000009709; TAA
AAAADTSSAY

SEQ ID NO: 60366 - protein, 10 aa, Homo sapiens
  misc_feature: Table A; Target 60366; HLA-A*26:01; PAX7; ENSG00000009709; TAA
AAAADTSSAY

SEQ ID NO: 60367 - protein, 10 aa, Homo sapiens
  misc_feature: Table A; Target 60367; HLA-A*29:02; PAX7; ENSG00000009709; TAA
AAAADTSSAY

SEQ ID NO: 60368 - protein, 10 aa, Homo sapiens
  misc_feature: Table A; Target 60368; HLA-A*30:02; PAX7; ENSG00000009709; TAA
AAAADTSSAY

SEQ ID NO: 60369 - protein, 10 aa, Homo sapiens
  misc_feature: Table A; Target 60369; HLA-A*32:01; PAX7; ENSG00000009709; TAA
AAAADTSSAY

SEQ ID NO: 60370 - protein, 10 aa, Homo sapiens
  misc_feature: Table A; Target 60370; HLA-A*68:01; PAX7; ENSG00000009709; TAA
AAAADTSSAY

SEQ ID NO: 60371 - protein, 10 aa, Homo sapiens
  misc_feature: Table A; Target 60371; HLA-B*15:01; PAX7; ENSG00000009709; TAA
AAAADTSSAY

SEQ ID NO: 60372 - protein, 10 aa, Homo sapiens
  misc_feature: Table A; Target 60372; HLA-B*15:03; PAX7; ENSG00000009709; TAA
AAAADTSSAY

SEQ ID NO: 60373 - protein, 10 aa, Homo sapiens
  misc_feature: Table A; Target 60373; HLA-B*35:01; PAX7; ENSG00000009709; TAA
AAAADTSSAY

SEQ ID NO: 60374 - protein, 10 aa, Homo sapiens
  misc_feature: Table A; Target 60374; HLA-B*39:01; PAX7; ENSG00000009709; TAA
AAAADTSSAY

SEQ ID NO: 60375 - protein, 10 aa, Homo sapiens
  misc_feature: Table A; Target 60375; HLA-B*44:03; PAX7; ENSG00000009709; TAA
AAAADTSSAY

SEQ ID NO: 60376 - protein, 10 aa, Homo sapiens
  misc_feature: Table A; Target 60376; HLA-B*46:01; PAX7; ENSG00000009709; TAA
AAAADTSSAY

SEQ ID NO: 60377 - protein, 10 aa, Homo sapiens
  misc_feature: Table A; Target 60377; HLA-B*55:01; PAX7; ENSG00000009709; TAA
AAAADTSSAY

SEQ ID NO: 60378 - protein, 10 aa, Homo sapiens
  misc_feature: Table A; Target 60378; HLA-B*58:01; PAX7; ENSG00000009709; TAA
AAAADTSSAY

SEQ ID NO: 60379 - protein, 10 aa, Homo sapiens
  misc_feature: Table A; Target 60379; HLA-C*01:02; PAX7; ENSG00000009709; TAA
AAAADTSSAY

SEQ ID NO: 60380 - protein, 10 aa, Homo sapiens
  misc_feature: Table A; Target 60380; HLA-C*02:02; PAX7; ENSG00000009709; TAA
AAAADTSSAY

SEQ ID NO: 60381 - protein, 10 aa, Homo sapiens
  misc_feature: Table A; Target 60381; HLA-C*03:03; PAX7; ENSG00000009709; TAA
AAAADTSSAY

SEQ ID NO: 60382 - protein, 10 aa, Homo sapiens
  misc_feature: Table A; Target 60382; HLA-C*03:04; PAX7; ENSG00000009709; TAA
AAAADTSSAY

SEQ ID NO: 60383 - protein, 10 aa, Homo sapiens
  misc_feature: Table A; Target 60383; HLA-C*07:04; PAX7; ENSG00000009709; TAA
AAAADTSSAY

SEQ ID NO: 60384 - protein, 10 aa, Homo sapiens
  misc_feature: Table A; Target 60384; HLA-C*07:06; PAX7; ENSG00000009709; TAA
AAAADTSSAY

SEQ ID NO: 60385 - protein, 10 aa, Homo sapiens
  misc_feature: Table A; Target 60385; HLA-C*14:02; PAX7; ENSG00000009709; TAA
AAAADTSSAY

SEQ ID NO: 60386 - protein, 10 aa, Homo sapiens
  misc_feature: Table A; Target 60386; HLA-C*16:02; PAX7; ENSG00000009709; TAA
AAAADTSSAY

SEQ ID NO: 60387 - protein, 10 aa, Homo sapiens
  misc_feature: Table A; Target 60387; HLA-C*16:04; PAX7; ENSG00000009709; TAA
AAAADTSSAY

SEQ ID NO: 60388 - protein, 11 aa, Homo sapiens
  misc_feature: Table A; Target 60388; HLA-B*39:01; PAX7; ENSG00000009709; TAA
AAAADTSSAYG

SEQ ID NO: 60389 - protein, 11 aa, Homo sapiens
  misc_feature: Table A; Target 60389; HLA-C*04:01; PAX7; ENSG00000009709; TAA
AAAADTSSAYG

SEQ ID NO: 60390 - protein, 9 aa, Homo sapiens
  misc_feature: Table A; Target 60390; HLA-A*01:01; PAX7; ENSG00000009709; TAA
AAADTSSAY

SEQ ID NO: 60391 - protein, 9 aa, Homo sapiens
  misc_feature: Table A; Target 60391; HLA-A*03:01; PAX7; ENSG00000009709; TAA
AAADTSSAY

SEQ ID NO: 60392 - protein, 9 aa, Homo sapiens
  misc_feature: Table A; Target 60392; HLA-A*03:02; PAX7; ENSG00000009709; TAA
AAADTSSAY

SEQ ID NO: 60393 - protein, 9 aa, Homo sapiens
  misc_feature: Table A; Target 60393; HLA-A*11:01; PAX7; ENSG00000009709; TAA
AAADTSSAY

SEQ ID NO: 60394 - protein, 9 aa, Homo sapiens
  misc_feature: Table A; Target 60394; HLA-A*25:01; PAX7; ENSG00000009709; TAA
AAADTSSAY

SEQ ID NO: 60395 - protein, 9 aa, Homo sapiens
  misc_feature: Table A; Target 60395; HLA-A*26:01; PAX7; ENSG00000009709; TAA
AAADTSSAY

SEQ ID NO: 60396 - protein, 9 aa, Homo sapiens
  misc_feature: Table A; Target 60396; HLA-A*29:02; PAX7; ENSG00000009709; TAA
AAADTSSAY

SEQ ID NO: 60397 - protein, 9 aa, Homo sapiens
  misc_feature: Table A; Target 60397; HLA-A*30:02; PAX7; ENSG00000009709; TAA
AAADTSSAY

SEQ ID NO: 60398 - protein, 9 aa, Homo sapiens
  misc_feature: Table A; Target 60398; HLA-A*32:01; PAX7; ENSG00000009709; TAA
AAADTSSAY

SEQ ID NO: 60399 - protein, 9 aa, Homo sapiens
  misc_feature: Table A; Target 60399; HLA-A*68:01; PAX7; ENSG00000009709; TAA
AAADTSSAY

SEQ ID NO: 60400 - protein, 9 aa, Homo sapiens
  misc_feature: Table A; Target 60400; HLA-B*13:02; PAX7; ENSG00000009709; TAA
AAADTSSAY

SEQ ID NO: 60401 - protein, 9 aa, Homo sapiens
  misc_feature: Table A; Target 60401; HLA-B*15:01; PAX7; ENSG00000009709; TAA
AAADTSSAY

SEQ ID NO: 60402 - protein, 9 aa, Homo sapiens
  misc_feature: Table A; Target 60402; HLA-B*15:03; PAX7; ENSG00000009709; TAA
AAADTSSAY

SEQ ID NO: 60403 - protein, 9 aa, Homo sapiens
  misc_feature: Table A; Target 60403; HLA-B*18:01; PAX7; ENSG00000009709; TAA
AAADTSSAY

SEQ ID NO: 60404 - protein, 9 aa, Homo sapiens
  misc_feature: Table A; Target 60404; HLA-B*27:02; PAX7; ENSG00000009709; TAA
AAADTSSAY

SEQ ID NO: 60405 - protein, 9 aa, Homo sapiens
  misc_feature: Table A; Target 60405; HLA-B*27:05; PAX7; ENSG00000009709; TAA
AAADTSSAY

SEQ ID NO: 60406 - protein, 9 aa, Homo sapiens
  misc_feature: Table A; Target 60406; HLA-B*35:01; PAX7; ENSG00000009709; TAA
AAADTSSAY

SEQ ID NO: 60407 - protein, 9 aa, Homo sapiens
  misc_feature: Table A; Target 60407; HLA-B*35:03; PAX7; ENSG00000009709; TAA
AAADTSSAY

SEQ ID NO: 60408 - protein, 9 aa, Homo sapiens
  misc_feature: Table A; Target 60408; HLA-B*39:01; PAX7; ENSG00000009709; TAA
AAADTSSAY

SEQ ID NO: 60409 - protein, 9 aa, Homo sapiens
  misc_feature: Table A; Target 60409; HLA-B*44:02; PAX7; ENSG00000009709; TAA
AAADTSSAY

SEQ ID NO: 60410 - protein, 9 aa, Homo sapiens
  misc_feature: Table A; Target 60410; HLA-B*44:03; PAX7; ENSG00000009709; TAA
AAADTSSAY

SEQ ID NO: 60411 - protein, 9 aa, Homo sapiens
  misc_feature: Table A; Target 60411; HLA-B*46:01; PAX7; ENSG00000009709; TAA
AAADTSSAY

SEQ ID NO: 60412 - protein, 9 aa, Homo sapiens
  misc_feature: Table A; Target 60412; HLA-B*55:01; PAX7; ENSG00000009709; TAA
AAADTSSAY

SEQ ID NO: 60413 - protein, 9 aa, Homo sapiens
  misc_feature: Table A; Target 60413; HLA-B*57:01; PAX7; ENSG00000009709; TAA
AAADTSSAY

SEQ ID NO: 60414 - protein, 9 aa, Homo sapiens
  misc_feature: Table A; Target 60414; HLA-B*58:01; PAX7; ENSG00000009709; TAA
AAADTSSAY

SEQ ID NO: 60415 - protein, 9 aa, Homo sapiens
  misc_feature: Table A; Target 60415; HLA-C*01:02; PAX7; ENSG00000009709; TAA
AAADTSSAY

SEQ ID NO: 60416 - protein, 9 aa, Homo sapiens
  misc_feature: Table A; Target 60416; HLA-C*02:02; PAX7; ENSG00000009709; TAA
AAADTSSAY

SEQ ID NO: 60417 - protein, 9 aa, Homo sapiens
  misc_feature: Table A; Target 60417; HLA-C*03:03; PAX7; ENSG00000009709; TAA
AAADTSSAY

SEQ ID NO: 60418 - protein, 9 aa, Homo sapiens
  misc_feature: Table A; Target 60418; HLA-C*03:04; PAX7; ENSG00000009709; TAA
AAADTSSAY

SEQ ID NO: 60419 - protein, 9 aa, Homo sapiens
  misc_feature: Table A; Target 60419; HLA-C*04:01; PAX7; ENSG00000009709; TAA
AAADTSSAY

SEQ ID NO: 60420 - protein, 9 aa, Homo sapiens
  misc_feature: Table A; Target 60420; HLA-C*05:01; PAX7; ENSG00000009709; TAA
AAADTSSAY

SEQ ID NO: 60421 - protein, 9 aa, Homo sapiens
  misc_feature: Table A; Target 60421; HLA-C*07:02; PAX7; ENSG00000009709; TAA
AAADTSSAY

SEQ ID NO: 60422 - protein, 9 aa, Homo sapiens
  misc_feature: Table A; Target 60422; HLA-C*07:04; PAX7; ENSG00000009709; TAA
AAADTSSAY

SEQ ID NO: 60423 - protein, 9 aa, Homo sapiens
  misc_feature: Table A; Target 60423; HLA-C*07:06; PAX7; ENSG00000009709; TAA
AAADTSSAY

SEQ ID NO: 60424 - protein, 9 aa, Homo sapiens
  misc_feature: Table A; Target 60424; HLA-C*12:03; PAX7; ENSG00000009709; TAA
AAADTSSAY

SEQ ID NO: 60425 - protein, 9 aa, Homo sapiens
  misc_feature: Table A; Target 60425; HLA-C*14:02; PAX7; ENSG00000009709; TAA
AAADTSSAY

SEQ ID NO: 60426 - protein, 9 aa, Homo sapiens
  misc_feature: Table A; Target 60426; HLA-C*16:01; PAX7; ENSG00000009709; TAA
AAADTSSAY

SEQ ID NO: 60427 - protein, 9 aa, Homo sapiens
  misc_feature: Table A; Target 60427; HLA-C*16:02; PAX7; ENSG00000009709; TAA
AAADTSSAY

SEQ ID NO: 60428 - protein, 9 aa, Homo sapiens
  misc_feature: Table A; Target 60428; HLA-C*16:04; PAX7; ENSG00000009709; TAA
AAADTSSAY

SEQ ID NO: 60429 - protein, 10 aa, Homo sapiens
  misc_feature: Table A; Target 60429; HLA-C*01:02; PAX7; ENSG00000009709; TAA
AAADTSSAYG

SEQ ID NO: 60430 - protein, 10 aa, Homo sapiens
  misc_feature: Table A; Target 60430; HLA-C*04:01; PAX7; ENSG00000009709; TAA
AAADTSSAYG

SEQ ID NO: 60431 - protein, 10 aa, Homo sapiens
  misc_feature: Table A; Target 60431; HLA-C*06:02; PAX7; ENSG00000009709; TAA
AAADTSSAYG

SEQ ID NO: 60432 - protein, 10 aa, Homo sapiens
  misc_feature: Table A; Target 60432; HLA-C*07:01; PAX7; ENSG00000009709; TAA
AAADTSSAYG

SEQ ID NO: 60433 - protein, 10 aa, Homo sapiens
  misc_feature: Table A; Target 60433; HLA-C*07:02; PAX7; ENSG00000009709; TAA
AAADTSSAYG

SEQ ID NO: 60434 - protein, 10 aa, Homo sapiens
  misc_feature: Table A; Target 60434; HLA-C*07:04; PAX7; ENSG00000009709; TAA
AAADTSSAYG

SEQ ID NO: 60435 - protein, 10 aa, Homo sapiens
  misc_feature: Table A; Target 60435; HLA-C*12:03; PAX7; ENSG00000009709; TAA
AAADTSSAYG

SEQ ID NO: 60436 - protein, 10 aa, Homo sapiens
  misc_feature: Table A; Target 60436; HLA-C*16:02; PAX7; ENSG00000009709; TAA
AAADTSSAYG

SEQ ID NO: 60437 - protein, 11 aa, Homo sapiens
  misc_feature: Table A; Target 60437; HLA-A*03:02; PAX7; ENSG00000009709; TAA
AAADTSSAYGA

SEQ ID NO: 60438 - protein, 11 aa, Homo sapiens
  misc_feature: Table A; Target 60438; HLA-A*11:01; PAX7; ENSG00000009709; TAA
AAADTSSAYGA

SEQ ID NO: 60439 - protein, 11 aa, Homo sapiens
  misc_feature: Table A; Target 60439; HLA-B*56:01; PAX7; ENSG00000009709; TAA
AAADTSSAYGA

SEQ ID NO: 60440 - protein, 8 aa, Homo sapiens
  misc_feature: Table A; Target 60440; HLA-A*01:01; PAX7; ENSG00000009709; TAA
AADTSSAY

SEQ ID NO: 60441 - protein, 8 aa, Homo sapiens
  misc_feature: Table A; Target 60441; HLA-A*30:02; PAX7; ENSG00000009709; TAA
AADTSSAY

SEQ ID NO: 60442 - protein, 8 aa, Homo sapiens
  misc_feature: Table A; Target 60442; HLA-A*32:01; PAX7; ENSG00000009709; TAA
AADTSSAY

SEQ ID NO: 60443 - protein, 8 aa, Homo sapiens
  misc_feature: Table A; Target 60443; HLA-B*15:01; PAX7; ENSG00000009709; TAA
AADTSSAY

SEQ ID NO: 60444 - protein, 8 aa, Homo sapiens
  misc_feature: Table A; Target 60444; HLA-B*15:03; PAX7; ENSG00000009709; TAA
AADTSSAY

SEQ ID NO: 60445 - protein, 8 aa, Homo sapiens
  misc_feature: Table A; Target 60445; HLA-B*35:01; PAX7; ENSG00000009709; TAA
AADTSSAY

SEQ ID NO: 60446 - protein, 8 aa, Homo sapiens
  misc_feature: Table A; Target 60446; HLA-B*39:01; PAX7; ENSG00000009709; TAA
AADTSSAY

SEQ ID NO: 60447 - protein, 8 aa, Homo sapiens
  misc_feature: Table A; Target 60447; HLA-B*46:01; PAX7; ENSG00000009709; TAA
AADTSSAY

SEQ ID NO: 60448 - protein, 8 aa, Homo sapiens
  misc_feature: Table A; Target 60448; HLA-B*55:01; PAX7; ENSG00000009709; TAA
AADTSSAY

SEQ ID NO: 60449 - protein, 8 aa, Homo sapiens
  misc_feature: Table A; Target 60449; HLA-B*58:01; PAX7; ENSG00000009709; TAA
AADTSSAY

SEQ ID NO: 60450 - protein, 8 aa, Homo sapiens
  misc_feature: Table A; Target 60450; HLA-C*01:02; PAX7; ENSG00000009709; TAA
AADTSSAY

SEQ ID NO: 60451 - protein, 8 aa, Homo sapiens
  misc_feature: Table A; Target 60451; HLA-C*03:03; PAX7; ENSG00000009709; TAA
AADTSSAY

SEQ ID NO: 60452 - protein, 8 aa, Homo sapiens
  misc_feature: Table A; Target 60452; HLA-C*03:04; PAX7; ENSG00000009709; TAA
AADTSSAY

SEQ ID NO: 60453 - protein, 8 aa, Homo sapiens
  misc_feature: Table A; Target 60453; HLA-C*04:01; PAX7; ENSG00000009709; TAA
AADTSSAY

SEQ ID NO: 60454 - protein, 8 aa, Homo sapiens
  misc_feature: Table A; Target 60454; HLA-C*05:01; PAX7; ENSG00000009709; TAA
AADTSSAY

SEQ ID NO: 60455 - protein, 8 aa, Homo sapiens
  misc_feature: Table A; Target 60455; HLA-C*07:01; PAX7; ENSG00000009709; TAA
AADTSSAY

SEQ ID NO: 60456 - protein, 8 aa, Homo sapiens
  misc_feature: Table A; Target 60456; HLA-C*07:04; PAX7; ENSG00000009709; TAA
AADTSSAY

SEQ ID NO: 60457 - protein, 8 aa, Homo sapiens
  misc_feature: Table A; Target 60457; HLA-C*14:02; PAX7; ENSG00000009709; TAA
AADTSSAY

SEQ ID NO: 60458 - protein, 8 aa, Homo sapiens
  misc_feature: Table A; Target 60458; HLA-C*16:01; PAX7; ENSG00000009709; TAA
AADTSSAY

SEQ ID NO: 60459 - protein, 8 aa, Homo sapiens
  misc_feature: Table A; Target 60459; HLA-C*16:02; PAX7; ENSG00000009709; TAA
AADTSSAY

SEQ ID NO: 60460 - protein, 8 aa, Homo sapiens
  misc_feature: Table A; Target 60460; HLA-C*16:04; PAX7; ENSG00000009709; TAA
AADTSSAY

SEQ ID NO: 60461 - protein, 9 aa, Homo sapiens
  misc_feature: Table A; Target 60461; HLA-C*05:01; PAX7; ENSG00000009709; TAA
AADTSSAYG

SEQ ID NO: 60462 - protein, 11 aa, Homo sapiens
  misc_feature: Table A; Target 60462; HLA-A*01:01; PAX7; ENSG00000009709; TAA
AADTSSAYGAR

SEQ ID NO: 60463 - protein, 11 aa, Homo sapiens
  misc_feature: Table A; Target 60463; HLA-A*11:01; PAX7; ENSG00000009709; TAA
AADTSSAYGAR

SEQ ID NO: 60464 - protein, 11 aa, Homo sapiens
  misc_feature: Table A; Target 60464; HLA-A*31:01; PAX7; ENSG00000009709; TAA
AADTSSAYGAR

SEQ ID NO: 60465 - protein, 11 aa, Homo sapiens
  misc_feature: Table A; Target 60465; HLA-A*68:01; PAX7; ENSG00000009709; TAA
AADTSSAYGAR

SEQ ID NO: 60466 - protein, 11 aa, Homo sapiens
  misc_feature: Table A; Target 60466; HLA-C*05:01; PAX7; ENSG00000009709; TAA
AADTSSAYGAR

SEQ ID NO: 60467 - protein, 11 aa, Homo sapiens
  misc_feature: Table A; Target 60467; HLA-C*07:06; PAX7; ENSG00000009709; TAA
AADTSSAYGAR

SEQ ID NO: 60468 - protein, 9 aa, Homo sapiens
  misc_feature: Table A; Target 60468; HLA-A*03:01; PAX7; ENSG00000009709; TAA
AALPGTVPR

SEQ ID NO: 60469 - protein, 9 aa, Homo sapiens
  misc_feature: Table A; Target 60469; HLA-A*03:02; PAX7; ENSG00000009709; TAA
AALPGTVPR

SEQ ID NO: 60470 - protein, 9 aa, Homo sapiens
  misc_feature: Table A; Target 60470; HLA-A*11:01; PAX7; ENSG00000009709; TAA
AALPGTVPR

SEQ ID NO: 60471 - protein, 9 aa, Homo sapiens
  misc_feature: Table A; Target 60471; HLA-A*29:02; PAX7; ENSG00000009709; TAA
AALPGTVPR

SEQ ID NO: 60472 - protein, 9 aa, Homo sapiens
  misc_feature: Table A; Target 60472; HLA-A*30:02; PAX7; ENSG00000009709; TAA
AALPGTVPR

SEQ ID NO: 60473 - protein, 9 aa, Homo sapiens
  misc_feature: Table A; Target 60473; HLA-A*31:01; PAX7; ENSG00000009709; TAA
AALPGTVPR

SEQ ID NO: 60474 - protein, 9 aa, Homo sapiens
  misc_feature: Table A; Target 60474; HLA-A*33:01; PAX7; ENSG00000009709; TAA
AALPGTVPR

SEQ ID NO: 60475 - protein, 9 aa, Homo sapiens
  misc_feature: Table A; Target 60475; HLA-A*33:03; PAX7; ENSG00000009709; TAA
AALPGTVPR

SEQ ID NO: 60476 - protein, 9 aa, Homo sapiens
  misc_feature: Table A; Target 60476; HLA-A*68:01; PAX7; ENSG00000009709; TAA
AALPGTVPR

SEQ ID NO: 60477 - protein, 9 aa, Homo sapiens
  misc_feature: Table A; Target 60477; HLA-B*27:02; PAX7; ENSG00000009709; TAA
AALPGTVPR

SEQ ID NO: 60478 - protein, 9 aa, Homo sapiens
  misc_feature: Table A; Target 60478; HLA-B*27:05; PAX7; ENSG00000009709; TAA
AALPGTVPR

SEQ ID NO: 60479 - protein, 9 aa, Homo sapiens
  misc_feature: Table A; Target 60479; HLA-B*35:01; PAX7; ENSG00000009709; TAA
AALPGTVPR

SEQ ID NO: 60480 - protein, 9 aa, Homo sapiens
  misc_feature: Table A; Target 60480; HLA-B*46:01; PAX7; ENSG00000009709; TAA
AALPGTVPR

SEQ ID NO: 60481 - protein, 9 aa, Homo sapiens
  misc_feature: Table A; Target 60481; HLA-B*56:01; PAX7; ENSG00000009709; TAA
AALPGTVPR

SEQ ID NO: 60482 - protein, 9 aa, Homo sapiens
  misc_feature: Table A; Target 60482; HLA-B*57:01; PAX7; ENSG00000009709; TAA
AALPGTVPR

SEQ ID NO: 60483 - protein, 9 aa, Homo sapiens
  misc_feature: Table A; Target 60483; HLA-B*58:01; PAX7; ENSG00000009709; TAA
AALPGTVPR

SEQ ID NO: 60484 - protein, 9 aa, Homo sapiens
  misc_feature: Table A; Target 60484; HLA-C*01:02; PAX7; ENSG00000009709; TAA
AALPGTVPR

SEQ ID NO: 60485 - protein, 9 aa, Homo sapiens
  misc_feature: Table A; Target 60485; HLA-C*02:02; PAX7; ENSG00000009709; TAA
AALPGTVPR

SEQ ID NO: 60486 - protein, 9 aa, Homo sapiens
  misc_feature: Table A; Target 60486; HLA-C*03:03; PAX7; ENSG00000009709; TAA
AALPGTVPR

SEQ ID NO: 60487 - protein, 9 aa, Homo sapiens
  misc_feature: Table A; Target 60487; HLA-C*03:04; PAX7; ENSG00000009709; TAA
AALPGTVPR

SEQ ID NO: 60488 - protein, 9 aa, Homo sapiens
  misc_feature: Table A; Target 60488; HLA-C*07:06; PAX7; ENSG00000009709; TAA
AALPGTVPR

SEQ ID NO: 60489 - protein, 9 aa, Homo sapiens
  misc_feature: Table A; Target 60489; HLA-C*16:01; PAX7; ENSG00000009709; TAA
AALPGTVPR

SEQ ID NO: 60490 - protein, 9 aa, Homo sapiens
  misc_feature: Table A; Target 60490; HLA-C*16:04; PAX7; ENSG00000009709; TAA
AALPGTVPR

SEQ ID NO: 60491 - protein, 10 aa, Homo sapiens
  misc_feature: Table A; Target 60491; HLA-A*02:01; PAX7; ENSG00000009709; TAA
AALPGTVPRM

SEQ ID NO: 60492 - protein, 10 aa, Homo sapiens
  misc_feature: Table A; Target 60492; HLA-A*02:04; PAX7; ENSG00000009709; TAA
AALPGTVPRM

SEQ ID NO: 60493 - protein, 10 aa, Homo sapiens
  misc_feature: Table A; Target 60493; HLA-A*11:01; PAX7; ENSG00000009709; TAA
AALPGTVPRM

SEQ ID NO: 60494 - protein, 10 aa, Homo sapiens
  misc_feature: Table A; Target 60494; HLA-A*23:01; PAX7; ENSG00000009709; TAA
AALPGTVPRM

SEQ ID NO: 60495 - protein, 10 aa, Homo sapiens
  misc_feature: Table A; Target 60495; HLA-A*26:01; PAX7; ENSG00000009709; TAA
AALPGTVPRM

SEQ ID NO: 60496 - protein, 10 aa, Homo sapiens
  misc_feature: Table A; Target 60496; HLA-B*57:01; PAX7; ENSG00000009709; TAA
AALPGTVPRM

SEQ ID NO: 60497 - protein, 10 aa, Homo sapiens
  misc_feature: Table A; Target 60497; HLA-B*58:01; PAX7; ENSG00000009709; TAA
AALPGTVPRM

SEQ ID NO: 60498 - protein, 10 aa, Homo sapiens
  misc_feature: Table A; Target 60498; HLA-C*02:02; PAX7; ENSG00000009709; TAA
AALPGTVPRM

SEQ ID NO: 60499 - protein, 11 aa, Homo sapiens
  misc_feature: Table A; Target 60499; HLA-C*02:02; PAX7; ENSG00000009709; TAA
AALPGTVPRMM

SEQ ID NO: 60500 - protein, 9 aa, Homo sapiens
  misc_feature: Table A; Target 60500; HLA-C*01:02; PAX7; ENSG00000009709; TAA
AAPSNHMNP

SEQ ID NO: 60501 - protein, 10 aa, Homo sapiens
  misc_feature: Table A; Target 60501; HLA-C*16:02; PAX7; ENSG00000009709; TAA
AAPSNHMNPV

SEQ ID NO: 60502 - protein, 8 aa, Homo sapiens
  misc_feature: Table A; Target 60502; HLA-B*37:01; PAX7; ENSG00000009709; TAA
ADFSISPL

SEQ ID NO: 60503 - protein, 10 aa, Homo sapiens
  misc_feature: Table A; Target 60503; HLA-B*37:01; PAX7; ENSG00000009709; TAA
ADSIKPGDSL

SEQ ID NO: 60504 - protein, 8 aa, Homo sapiens
  misc_feature: Table A; Target 60504; HLA-C*04:01; PAX7; ENSG00000009709; TAA
ADTSSAYG

SEQ ID NO: 60505 - protein, 11 aa, Homo sapiens
  misc_feature: Table A; Target 60505; HLA-A*30:01; PAX7; ENSG00000009709; TAA
AEQLEELEKAF

SEQ ID NO: 60506 - protein, 11 aa, Homo sapiens
  misc_feature: Table A; Target 60506; HLA-B*27:02; PAX7; ENSG00000009709; TAA
AEQLEELEKAF

SEQ ID NO: 60507 - protein, 11 aa, Homo sapiens
  misc_feature: Table A; Target 60507; HLA-B*44:02; PAX7; ENSG00000009709; TAA
AEQLEELEKAF

SEQ ID NO: 60508 - protein, 11 aa, Homo sapiens
  misc_feature: Table A; Target 60508; HLA-B*44:03; PAX7; ENSG00000009709; TAA
AEQLEELEKAF

SEQ ID NO: 60509 - protein, 11 aa, Homo sapiens
  misc_feature: Table A; Target 60509; HLA-C*16:04; PAX7; ENSG00000009709; TAA
AEQLEELEKAF

SEQ ID NO: 60510 - protein, 9 aa, Homo sapiens
  misc_feature: Table A; Target 60510; HLA-A*30:02; PAX7; ENSG00000009709; TAA
AGANQLAAF

SEQ ID NO: 60511 - protein, 9 aa, Homo sapiens
  misc_feature: Table A; Target 60511; HLA-A*32:01; PAX7; ENSG00000009709; TAA
AGANQLAAF

SEQ ID NO: 60512 - protein, 9 aa, Homo sapiens
  misc_feature: Table A; Target 60512; HLA-B*15:01; PAX7; ENSG00000009709; TAA
AGANQLAAF

SEQ ID NO: 60513 - protein, 9 aa, Homo sapiens
  misc_feature: Table A; Target 60513; HLA-B*15:03; PAX7; ENSG00000009709; TAA
AGANQLAAF

SEQ ID NO: 60514 - protein, 9 aa, Homo sapiens
  misc_feature: Table A; Target 60514; HLA-B*27:05; PAX7; ENSG00000009709; TAA
AGANQLAAF

SEQ ID NO: 60515 - protein, 9 aa, Homo sapiens
  misc_feature: Table A; Target 60515; HLA-B*46:01; PAX7; ENSG00000009709; TAA
AGANQLAAF

SEQ ID NO: 60516 - protein, 9 aa, Homo sapiens
  misc_feature: Table A; Target 60516; HLA-B*58:01; PAX7; ENSG00000009709; TAA
AGANQLAAF

SEQ ID NO: 60517 - protein, 9 aa, Homo sapiens
  misc_feature: Table A; Target 60517; HLA-C*02:02; PAX7; ENSG00000009709; TAA
AGANQLAAF

SEQ ID NO: 60518 - protein, 9 aa, Homo sapiens
  misc_feature: Table A; Target 60518; HLA-C*03:03; PAX7; ENSG00000009709; TAA
AGANQLAAF

SEQ ID NO: 60519 - protein, 9 aa, Homo sapiens
  misc_feature: Table A; Target 60519; HLA-C*03:04; PAX7; ENSG00000009709; TAA
AGANQLAAF

SEQ ID NO: 60520 - protein, 9 aa, Homo sapiens
  misc_feature: Table A; Target 60520; HLA-C*14:02; PAX7; ENSG00000009709; TAA
AGANQLAAF

SEQ ID NO: 60521 - protein, 9 aa, Homo sapiens
  misc_feature: Table A; Target 60521; HLA-C*16:01; PAX7; ENSG00000009709; TAA
AGANQLAAF

SEQ ID NO: 60522 - protein, 9 aa, Homo sapiens
  misc_feature: Table A; Target 60522; HLA-C*16:04; PAX7; ENSG00000009709; TAA
AGANQLAAF

SEQ ID NO: 60523 - protein, 8 aa, Homo sapiens
  misc_feature: Table A; Target 60523; HLA-A*30:02; PAX7; ENSG00000009709; TAA
AGYQYGQY

SEQ ID NO: 60524 - protein, 10 aa, Homo sapiens
  misc_feature: Table A; Target 60524; HLA-A*02:03; PAX7; ENSG00000009709; TAA
AIGGSKPRQV

SEQ ID NO: 60525 - protein, 9 aa, Homo sapiens
  misc_feature: Table A; Target 60525; HLA-A*02:01; PAX7; ENSG00000009709; TAA
ALPGTVPRM

SEQ ID NO: 60526 - protein, 9 aa, Homo sapiens
  misc_feature: Table A; Target 60526; HLA-A*02:03; PAX7; ENSG00000009709; TAA
ALPGTVPRM

SEQ ID NO: 60527 - protein, 9 aa, Homo sapiens
  misc_feature: Table A; Target 60527; HLA-A*02:04; PAX7; ENSG00000009709; TAA
ALPGTVPRM

SEQ ID NO: 60528 - protein, 9 aa, Homo sapiens
  misc_feature: Table A; Target 60528; HLA-A*02:07; PAX7; ENSG00000009709; TAA
ALPGTVPRM

SEQ ID NO: 60529 - protein, 9 aa, Homo sapiens
  misc_feature: Table A; Target 60529; HLA-A*03:02; PAX7; ENSG00000009709; TAA
ALPGTVPRM

SEQ ID NO: 60530 - protein, 9 aa, Homo sapiens
  misc_feature: Table A; Target 60530; HLA-A*24:02; PAX7; ENSG00000009709; TAA
ALPGTVPRM

SEQ ID NO: 60531 - protein, 9 aa, Homo sapiens
  misc_feature: Table A; Target 60531; HLA-A*26:01; PAX7; ENSG00000009709; TAA
ALPGTVPRM

SEQ ID NO: 60532 - protein, 9 aa, Homo sapiens
  misc_feature: Table A; Target 60532; HLA-A*29:02; PAX7; ENSG00000009709; TAA
ALPGTVPRM

SEQ ID NO: 60533 - protein, 9 aa, Homo sapiens
  misc_feature: Table A; Target 60533; HLA-B*13:02; PAX7; ENSG00000009709; TAA
ALPGTVPRM

SEQ ID NO: 60534 - protein, 9 aa, Homo sapiens
  misc_feature: Table A; Target 60534; HLA-B*55:01; PAX7; ENSG00000009709; TAA
ALPGTVPRM

SEQ ID NO: 60535 - protein, 9 aa, Homo sapiens
  misc_feature: Table A; Target 60535; HLA-C*01:02; PAX7; ENSG00000009709; TAA
ALPGTVPRM

SEQ ID NO: 60536 - protein, 9 aa, Homo sapiens
  misc_feature: Table A; Target 60536; HLA-C*07:04; PAX7; ENSG00000009709; TAA
ALPGTVPRM

SEQ ID NO: 60537 - protein, 10 aa, Homo sapiens
  misc_feature: Table A; Target 60537; HLA-C*07:02; PAX7; ENSG00000009709; TAA
ALPGTVPRMM

SEQ ID NO: 60538 - protein, 11 aa, Homo sapiens
  misc_feature: Table A; Target 60538; HLA-B*07:02; PAX7; ENSG00000009709; TAA
APGQNYPRTGF

SEQ ID NO: 60539 - protein, 11 aa, Homo sapiens
  misc_feature: Table A; Target 60539; HLA-C*07:02; PAX7; ENSG00000009709; TAA
APGQNYPRTGF

SEQ ID NO: 60540 - protein, 9 aa, Homo sapiens
  misc_feature: Table A; Target 60540; HLA-B*07:02; PAX7; ENSG00000009709; TAA
APSNHMNPV

SEQ ID NO: 60541 - protein, 9 aa, Homo sapiens
  misc_feature: Table A; Target 60541; HLA-B*37:01; PAX7; ENSG00000009709; TAA
APSNHMNPV

SEQ ID NO: 60542 - protein, 9 aa, Homo sapiens
  misc_feature: Table A; Target 60542; HLA-B*55:01; PAX7; ENSG00000009709; TAA
APSNHMNPV

SEQ ID NO: 60543 - protein, 9 aa, Homo sapiens
  misc_feature: Table A; Target 60543; HLA-B*56:01; PAX7; ENSG00000009709; TAA
APSNHMNPV

SEQ ID NO: 60544 - protein, 9 aa, Homo sapiens
  misc_feature: Table A; Target 60544; HLA-C*07:02; PAX7; ENSG00000009709; TAA
APSNHMNPV

SEQ ID NO: 60545 - protein, 9 aa, Homo sapiens
  misc_feature: Table A; Target 60545; HLA-A*02:03; PAX7; ENSG00000009709; TAA
AQRTKLTEA

SEQ ID NO: 60546 - protein, 9 aa, Homo sapiens
  misc_feature: Table A; Target 60546; HLA-B*40:02; PAX7; ENSG00000009709; TAA
AQRTKLTEA

SEQ ID NO: 60547 - protein, 8 aa, Homo sapiens
  misc_feature: Table A; Target 60547; HLA-B*27:02; PAX7; ENSG00000009709; TAA
ARHSFSSY

SEQ ID NO: 60548 - protein, 8 aa, Homo sapiens
  misc_feature: Table A; Target 60548; HLA-C*16:04; PAX7; ENSG00000009709; TAA
ARHSFSSY

SEQ ID NO: 60549 - protein, 9 aa, Homo sapiens
  misc_feature: Table A; Target 60549; HLA-A*02:07; PAX7; ENSG00000009709; TAA
ATPDVEKKI

SEQ ID NO: 60550 - protein, 9 aa, Homo sapiens
  misc_feature: Table A; Target 60550; HLA-A*32:01; PAX7; ENSG00000009709; TAA
ATPDVEKKI

SEQ ID NO: 60551 - protein, 9 aa, Homo sapiens
  misc_feature: Table A; Target 60551; HLA-C*16:02; PAX7; ENSG00000009709; TAA
ATPDVEKKI

SEQ ID NO: 60552 - protein, 9 aa, Homo sapiens
  misc_feature: Table A; Target 60552; HLA-A*02:07; PAX7; ENSG00000009709; TAA
AVDYLAKNV

SEQ ID NO: 60553 - protein, 9 aa, Homo sapiens
  misc_feature: Table A; Target 60553; HLA-B*13:02; PAX7; ENSG00000009709; TAA
AVDYLAKNV

SEQ ID NO: 60554 - protein, 9 aa, Homo sapiens
  misc_feature: Table A; Target 60554; HLA-B*55:01; PAX7; ENSG00000009709; TAA
AVDYLAKNV

SEQ ID NO: 60555 - protein, 9 aa, Homo sapiens
  misc_feature: Table A; Target 60555; HLA-C*04:01; PAX7; ENSG00000009709; TAA
AVDYLAKNV

SEQ ID NO: 60556 - protein, 9 aa, Homo sapiens
  misc_feature: Table A; Target 60556; HLA-C*05:01; PAX7; ENSG00000009709; TAA
AVDYLAKNV

SEQ ID NO: 60557 - protein, 9 aa, Homo sapiens
  misc_feature: Table A; Target 60557; HLA-C*06:02; PAX7; ENSG00000009709; TAA
AVDYLAKNV

SEQ ID NO: 60558 - protein, 9 aa, Homo sapiens
  misc_feature: Table A; Target 60558; HLA-C*16:02; PAX7; ENSG00000009709; TAA
AVDYLAKNV

SEQ ID NO: 60559 - protein, 11 aa, Homo sapiens
  misc_feature: Table A; Target 60559; HLA-A*02:07; PAX7; ENSG00000009709; TAA
AVDYLAKNVSL

SEQ ID NO: 60560 - protein, 10 aa, Homo sapiens
  misc_feature: Table A; Target 60560; HLA-A*29:02; PAX7; ENSG00000009709; TAA
AVPPQPQADF

SEQ ID NO: 60561 - protein, 10 aa, Homo sapiens
  misc_feature: Table A; Target 60561; HLA-A*30:02; PAX7; ENSG00000009709; TAA
AVPPQPQADF

SEQ ID NO: 60562 - protein, 8 aa, Homo sapiens
  misc_feature: Table A; Target 60562; HLA-A*24:02; PAX7; ENSG00000009709; TAA
AYGARHSF

SEQ ID NO: 60563 - protein, 8 aa, Homo sapiens
  misc_feature: Table A; Target 60563; HLA-A*32:01; PAX7; ENSG00000009709; TAA
AYGARHSF

SEQ ID NO: 60564 - protein, 8 aa, Homo sapiens
  misc_feature: Table A; Target 60564; HLA-C*14:02; PAX7; ENSG00000009709; TAA
AYGARHSF

SEQ ID NO: 60565 - protein, 8 aa, Homo sapiens
  misc_feature: Table A; Target 60565; HLA-C*16:01; PAX7; ENSG00000009709; TAA
AYGARHSF

SEQ ID NO: 60566 - protein, 8 aa, Homo sapiens
  misc_feature: Table A; Target 60566; HLA-A*33:01; PAX7; ENSG00000009709; TAA
DGGSTVHR

SEQ ID NO: 60567 - protein, 8 aa, Homo sapiens
  misc_feature: Table A; Target 60567; HLA-A*33:03; PAX7; ENSG00000009709; TAA
DGGSTVHR

SEQ ID NO: 60568 - protein, 10 aa, Homo sapiens
  misc_feature: Table A; Target 60568; HLA-A*33:01; PAX7; ENSG00000009709; TAA
DGILGDKGNR

SEQ ID NO: 60569 - protein, 8 aa, Homo sapiens
  misc_feature: Table A; Target 60569; HLA-C*07:01; PAX7; ENSG00000009709; TAA
DIYTREEL

SEQ ID NO: 60570 - protein, 8 aa, Homo sapiens
  misc_feature: Table A; Target 60570; HLA-B*18:01; PAX7; ENSG00000009709; TAA
DPVAGYQY

SEQ ID NO: 60571 - protein, 8 aa, Homo sapiens
  misc_feature: Table A; Target 60571; HLA-B*35:01; PAX7; ENSG00000009709; TAA
DPVAGYQY

SEQ ID NO: 60572 - protein, 8 aa, Homo sapiens
  misc_feature: Table A; Target 60572; HLA-B*55:01; PAX7; ENSG00000009709; TAA
DPVAGYQY

SEQ ID NO: 60573 - protein, 8 aa, Homo sapiens
  misc_feature: Table A; Target 60573; HLA-C*03:03; PAX7; ENSG00000009709; TAA
DPVAGYQY

SEQ ID NO: 60574 - protein, 8 aa, Homo sapiens
  misc_feature: Table A; Target 60574; HLA-C*07:01; PAX7; ENSG00000009709; TAA
DPVAGYQY

SEQ ID NO: 60575 - protein, 11 aa, Homo sapiens
  misc_feature: Table A; Target 60575; HLA-A*25:01; PAX7; ENSG00000009709; TAA
DPVAGYQYGQY

SEQ ID NO: 60576 - protein, 11 aa, Homo sapiens
  misc_feature: Table A; Target 60576; HLA-A*26:01; PAX7; ENSG00000009709; TAA
DPVAGYQYGQY

SEQ ID NO: 60577 - protein, 11 aa, Homo sapiens
  misc_feature: Table A; Target 60577; HLA-A*68:01; PAX7; ENSG00000009709; TAA
DPVAGYQYGQY

SEQ ID NO: 60578 - protein, 11 aa, Homo sapiens
  misc_feature: Table A; Target 60578; HLA-B*35:01; PAX7; ENSG00000009709; TAA
DPVAGYQYGQY

SEQ ID NO: 60579 - protein, 9 aa, Homo sapiens
  misc_feature: Table A; Target 60579; HLA-B*27:05; PAX7; ENSG00000009709; TAA
DRSTVPSGL

SEQ ID NO: 60580 - protein, 9 aa, Homo sapiens
  misc_feature: Table A; Target 60580; HLA-B*38:01; PAX7; ENSG00000009709; TAA
DRSTVPSGL

SEQ ID NO: 60581 - protein, 9 aa, Homo sapiens
  misc_feature: Table A; Target 60581; HLA-B*39:01; PAX7; ENSG00000009709; TAA
DRSTVPSGL

SEQ ID NO: 60582 - protein, 8 aa, Homo sapiens
  misc_feature: Table A; Target 60582; HLA-B*54:01; PAX7; ENSG00000009709; TAA
DSFMNPAA

SEQ ID NO: 60583 - protein, 9 aa, Homo sapiens
  misc_feature: Table A; Target 60583; HLA-A*33:01; PAX7; ENSG00000009709; TAA
DSFMNPAAP

SEQ ID NO: 60584 - protein, 9 aa, Homo sapiens
  misc_feature: Table A; Target 60584; HLA-A*68:01; PAX7; ENSG00000009709; TAA
DSFMNPAAP

SEQ ID NO: 60585 - protein, 9 aa, Homo sapiens
  misc_feature: Table A; Target 60585; HLA-A*25:01; PAX7; ENSG00000009709; TAA
DSIKPGDSL

SEQ ID NO: 60586 - protein, 9 aa, Homo sapiens
  misc_feature: Table A; Target 60586; HLA-B*07:02; PAX7; ENSG00000009709; TAA
DSIKPGDSL

SEQ ID NO: 60587 - protein, 9 aa, Homo sapiens
  misc_feature: Table A; Target 60587; HLA-B*35:03; PAX7; ENSG00000009709; TAA
DSIKPGDSL

SEQ ID NO: 60588 - protein, 9 aa, Homo sapiens
  misc_feature: Table A; Target 60588; HLA-B*38:01; PAX7; ENSG00000009709; TAA
DSIKPGDSL

SEQ ID NO: 60589 - protein, 9 aa, Homo sapiens
  misc_feature: Table A; Target 60589; HLA-B*39:01; PAX7; ENSG00000009709; TAA
DSIKPGDSL

SEQ ID NO: 60590 - protein, 9 aa, Homo sapiens
  misc_feature: Table A; Target 60590; HLA-B*40:02; PAX7; ENSG00000009709; TAA
DSIKPGDSL

SEQ ID NO: 60591 - protein, 9 aa, Homo sapiens
  misc_feature: Table A; Target 60591; HLA-B*51:01; PAX7; ENSG00000009709; TAA
DSIKPGDSL

SEQ ID NO: 60592 - protein, 9 aa, Homo sapiens
  misc_feature: Table A; Target 60592; HLA-C*01:02; PAX7; ENSG00000009709; TAA
DSIKPGDSL

SEQ ID NO: 60593 - protein, 9 aa, Homo sapiens
  misc_feature: Table A; Target 60593; HLA-C*03:03; PAX7; ENSG00000009709; TAA
DSIKPGDSL

SEQ ID NO: 60594 - protein, 9 aa, Homo sapiens
  misc_feature: Table A; Target 60594; HLA-C*03:04; PAX7; ENSG00000009709; TAA
DSIKPGDSL

SEQ ID NO: 60595 - protein, 9 aa, Homo sapiens
  misc_feature: Table A; Target 60595; HLA-C*05:01; PAX7; ENSG00000009709; TAA
DSIKPGDSL

SEQ ID NO: 60596 - protein, 9 aa, Homo sapiens
  misc_feature: Table A; Target 60596; HLA-C*07:06; PAX7; ENSG00000009709; TAA
DSIKPGDSL

SEQ ID NO: 60597 - protein, 9 aa, Homo sapiens
  misc_feature: Table A; Target 60597; HLA-A*01:01; PAX7; ENSG00000009709; TAA
DSLPTSQAY

SEQ ID NO: 60598 - protein, 9 aa, Homo sapiens
  misc_feature: Table A; Target 60598; HLA-A*25:01; PAX7; ENSG00000009709; TAA
DSLPTSQAY

SEQ ID NO: 60599 - protein, 9 aa, Homo sapiens
  misc_feature: Table A; Target 60599; HLA-A*26:01; PAX7; ENSG00000009709; TAA
DSLPTSQAY

SEQ ID NO: 60600 - protein, 9 aa, Homo sapiens
  misc_feature: Table A; Target 60600; HLA-A*29:02; PAX7; ENSG00000009709; TAA
DSLPTSQAY

SEQ ID NO: 60601 - protein, 9 aa, Homo sapiens
  misc_feature: Table A; Target 60601; HLA-A*30:02; PAX7; ENSG00000009709; TAA
DSLPTSQAY

SEQ ID NO: 60602 - protein, 9 aa, Homo sapiens
  misc_feature: Table A; Target 60602; HLA-A*32:01; PAX7; ENSG00000009709; TAA
DSLPTSQAY

SEQ ID NO: 60603 - protein, 9 aa, Homo sapiens
  misc_feature: Table A; Target 60603; HLA-A*33:01; PAX7; ENSG00000009709; TAA
DSLPTSQAY

SEQ ID NO: 60604 - protein, 9 aa, Homo sapiens
  misc_feature: Table A; Target 60604; HLA-A*33:03; PAX7; ENSG00000009709; TAA
DSLPTSQAY

SEQ ID NO: 60605 - protein, 9 aa, Homo sapiens
  misc_feature: Table A; Target 60605; HLA-B*15:01; PAX7; ENSG00000009709; TAA
DSLPTSQAY

SEQ ID NO: 60606 - protein, 9 aa, Homo sapiens
  misc_feature: Table A; Target 60606; HLA-B*15:03; PAX7; ENSG00000009709; TAA
DSLPTSQAY

SEQ ID NO: 60607 - protein, 9 aa, Homo sapiens
  misc_feature: Table A; Target 60607; HLA-B*18:01; PAX7; ENSG00000009709; TAA
DSLPTSQAY

SEQ ID NO: 60608 - protein, 9 aa, Homo sapiens
  misc_feature: Table A; Target 60608; HLA-B*35:01; PAX7; ENSG00000009709; TAA
DSLPTSQAY

SEQ ID NO: 60609 - protein, 9 aa, Homo sapiens
  misc_feature: Table A; Target 60609; HLA-B*46:01; PAX7; ENSG00000009709; TAA
DSLPTSQAY

SEQ ID NO: 60610 - protein, 9 aa, Homo sapiens
  misc_feature: Table A; Target 60610; HLA-B*58:01; PAX7; ENSG00000009709; TAA
DSLPTSQAY

SEQ ID NO: 60611 - protein, 9 aa, Homo sapiens
  misc_feature: Table A; Target 60611; HLA-C*03:03; PAX7; ENSG00000009709; TAA
DSLPTSQAY

SEQ ID NO: 60612 - protein, 9 aa, Homo sapiens
  misc_feature: Table A; Target 60612; HLA-C*07:04; PAX7; ENSG00000009709; TAA
DSLPTSQAY

SEQ ID NO: 60613 - protein, 9 aa, Homo sapiens
  misc_feature: Table A; Target 60613; HLA-C*07:06; PAX7; ENSG00000009709; TAA
DSLPTSQAY

SEQ ID NO: 60614 - protein, 9 aa, Homo sapiens
  misc_feature: Table A; Target 60614; HLA-C*14:02; PAX7; ENSG00000009709; TAA
DSLPTSQAY

SEQ ID NO: 60615 - protein, 9 aa, Homo sapiens
  misc_feature: Table A; Target 60615; HLA-A*25:01; PAX7; ENSG00000009709; TAA
DSTYPTTTI

SEQ ID NO: 60616 - protein, 9 aa, Homo sapiens
  misc_feature: Table A; Target 60616; HLA-A*33:01; PAX7; ENSG00000009709; TAA
DSTYPTTTI

SEQ ID NO: 60617 - protein, 9 aa, Homo sapiens
  misc_feature: Table A; Target 60617; HLA-A*68:02; PAX7; ENSG00000009709; TAA
DSTYPTTTI

SEQ ID NO: 60618 - protein, 9 aa, Homo sapiens
  misc_feature: Table A; Target 60618; HLA-B*38:01; PAX7; ENSG00000009709; TAA
DSTYPTTTI

SEQ ID NO: 60619 - protein, 9 aa, Homo sapiens
  misc_feature: Table A; Target 60619; HLA-B*51:01; PAX7; ENSG00000009709; TAA
DSTYPTTTI

SEQ ID NO: 60620 - protein, 9 aa, Homo sapiens
  misc_feature: Table A; Target 60620; HLA-A*26:01; PAX7; ENSG00000009709; TAA
DTSSAYGAR

SEQ ID NO: 60621 - protein, 9 aa, Homo sapiens
  misc_feature: Table A; Target 60621; HLA-A*33:01; PAX7; ENSG00000009709; TAA
DTSSAYGAR

SEQ ID NO: 60622 - protein, 9 aa, Homo sapiens
  misc_feature: Table A; Target 60622; HLA-A*33:03; PAX7; ENSG00000009709; TAA
DTSSAYGAR

SEQ ID NO: 60623 - protein, 9 aa, Homo sapiens
  misc_feature: Table A; Target 60623; HLA-A*68:01; PAX7; ENSG00000009709; TAA
DTSSAYGAR

SEQ ID NO: 60624 - protein, 9 aa, Homo sapiens
  misc_feature: Table A; Target 60624; HLA-C*07:06; PAX7; ENSG00000009709; TAA
DTSSAYGAR

SEQ ID NO: 60625 - protein, 10 aa, Homo sapiens
  misc_feature: Table A; Target 60625; HLA-A*68:01; PAX7; ENSG00000009709; TAA
DTSSAYGARH

SEQ ID NO: 60626 - protein, 11 aa, Homo sapiens
  misc_feature: Table A; Target 60626; HLA-A*01:01; PAX7; ENSG00000009709; TAA
DVESEPDLPLK

SEQ ID NO: 60627 - protein, 11 aa, Homo sapiens
  misc_feature: Table A; Target 60627; HLA-A*03:02; PAX7; ENSG00000009709; TAA
DVESEPDLPLK

SEQ ID NO: 60628 - protein, 11 aa, Homo sapiens
  misc_feature: Table A; Target 60628; HLA-A*11:01; PAX7; ENSG00000009709; TAA
DVESEPDLPLK

SEQ ID NO: 60629 - protein, 11 aa, Homo sapiens
  misc_feature: Table A; Target 60629; HLA-A*33:01; PAX7; ENSG00000009709; TAA
DVESEPDLPLK

SEQ ID NO: 60630 - protein, 11 aa, Homo sapiens
  misc_feature: Table A; Target 60630; HLA-A*68:01; PAX7; ENSG00000009709; TAA
DVESEPDLPLK

SEQ ID NO: 60631 - protein, 11 aa, Homo sapiens
  misc_feature: Table A; Target 60631; HLA-B*27:02; PAX7; ENSG00000009709; TAA
DVESEPDLPLK

SEQ ID NO: 60632 - protein, 9 aa, Homo sapiens
  misc_feature: Table A; Target 60632; HLA-A*23:01; PAX7; ENSG00000009709; TAA
DYLAKNVSL

SEQ ID NO: 60633 - protein, 9 aa, Homo sapiens
  misc_feature: Table A; Target 60633; HLA-A*24:02; PAX7; ENSG00000009709; TAA
DYLAKNVSL

SEQ ID NO: 60634 - protein, 9 aa, Homo sapiens
  misc_feature: Table A; Target 60634; HLA-A*33:01; PAX7; ENSG00000009709; TAA
DYLAKNVSL

SEQ ID NO: 60635 - protein, 9 aa, Homo sapiens
  misc_feature: Table A; Target 60635; HLA-A*33:03; PAX7; ENSG00000009709; TAA
DYLAKNVSL

SEQ ID NO: 60636 - protein, 9 aa, Homo sapiens
  misc_feature: Table A; Target 60636; HLA-B*08:01; PAX7; ENSG00000009709; TAA
DYLAKNVSL

SEQ ID NO: 60637 - protein, 9 aa, Homo sapiens
  misc_feature: Table A; Target 60637; HLA-B*35:01; PAX7; ENSG00000009709; TAA
DYLAKNVSL

SEQ ID NO: 60638 - protein, 9 aa, Homo sapiens
  misc_feature: Table A; Target 60638; HLA-B*35:03; PAX7; ENSG00000009709; TAA
DYLAKNVSL

SEQ ID NO: 60639 - protein, 9 aa, Homo sapiens
  misc_feature: Table A; Target 60639; HLA-B*40:02; PAX7; ENSG00000009709; TAA
DYLAKNVSL

SEQ ID NO: 60640 - protein, 9 aa, Homo sapiens
  misc_feature: Table A; Target 60640; HLA-C*01:02; PAX7; ENSG00000009709; TAA
DYLAKNVSL

SEQ ID NO: 60641 - protein, 9 aa, Homo sapiens
  misc_feature: Table A; Target 60641; HLA-C*14:02; PAX7; ENSG00000009709; TAA
DYLAKNVSL

SEQ ID NO: 60642 - protein, 10 aa, Homo sapiens
  misc_feature: Table A; Target 60642; HLA-A*33:01; PAX7; ENSG00000009709; TAA
DYLAKNVSLS

SEQ ID NO: 60643 - protein, 9 aa, Homo sapiens
  misc_feature: Table A; Target 60643; HLA-A*30:01; PAX7; ENSG00000009709; TAA
EELAQRTKL

SEQ ID NO: 60644 - protein, 9 aa, Homo sapiens
  misc_feature: Table A; Target 60644; HLA-B*18:01; PAX7; ENSG00000009709; TAA
EELAQRTKL

SEQ ID NO: 60645 - protein, 9 aa, Homo sapiens
  misc_feature: Table A; Target 60645; HLA-B*37:01; PAX7; ENSG00000009709; TAA
EELAQRTKL

SEQ ID NO: 60646 - protein, 9 aa, Homo sapiens
  misc_feature: Table A; Target 60646; HLA-B*40:01; PAX7; ENSG00000009709; TAA
EELAQRTKL

SEQ ID NO: 60647 - protein, 9 aa, Homo sapiens
  misc_feature: Table A; Target 60647; HLA-B*40:02; PAX7; ENSG00000009709; TAA
EELAQRTKL

SEQ ID NO: 60648 - protein, 9 aa, Homo sapiens
  misc_feature: Table A; Target 60648; HLA-B*44:02; PAX7; ENSG00000009709; TAA
EELAQRTKL

SEQ ID NO: 60649 - protein, 9 aa, Homo sapiens
  misc_feature: Table A; Target 60649; HLA-B*44:03; PAX7; ENSG00000009709; TAA
EELAQRTKL

SEQ ID NO: 60650 - protein, 9 aa, Homo sapiens
  misc_feature: Table A; Target 60650; HLA-B*49:01; PAX7; ENSG00000009709; TAA
EELAQRTKL

SEQ ID NO: 60651 - protein, 9 aa, Homo sapiens
  misc_feature: Table A; Target 60651; HLA-A*33:01; PAX7; ENSG00000009709; TAA
EELEKAFER

SEQ ID NO: 60652 - protein, 9 aa, Homo sapiens
  misc_feature: Table A; Target 60652; HLA-A*33:03; PAX7; ENSG00000009709; TAA
EELEKAFER

SEQ ID NO: 60653 - protein, 9 aa, Homo sapiens
  misc_feature: Table A; Target 60653; HLA-C*07:06; PAX7; ENSG00000009709; TAA
EELEKAFER

SEQ ID NO: 60654 - protein, 8 aa, Homo sapiens
  misc_feature: Table A; Target 60654; HLA-B*38:01; PAX7; ENSG00000009709; TAA
EHSAVLGL

SEQ ID NO: 60655 - protein, 8 aa, Homo sapiens
  misc_feature: Table A; Target 60655; HLA-B*39:01; PAX7; ENSG00000009709; TAA
EHSAVLGL

SEQ ID NO: 60656 - protein, 9 aa, Homo sapiens
  misc_feature: Table A; Target 60656; HLA-B*27:05; PAX7; ENSG00000009709; TAA
EHSAVLGLL

SEQ ID NO: 60657 - protein, 9 aa, Homo sapiens
  misc_feature: Table A; Target 60657; HLA-B*38:01; PAX7; ENSG00000009709; TAA
EHSAVLGLL

SEQ ID NO: 60658 - protein, 9 aa, Homo sapiens
  misc_feature: Table A; Target 60658; HLA-B*39:01; PAX7; ENSG00000009709; TAA
EHSAVLGLL

SEQ ID NO: 60659 - protein, 8 aa, Homo sapiens
  misc_feature: Table A; Target 60659; HLA-B*07:02; PAX7; ENSG00000009709; TAA
ELAQRTKL

SEQ ID NO: 60660 - protein, 8 aa, Homo sapiens
  misc_feature: Table A; Target 60660; HLA-B*08:01; PAX7; ENSG00000009709; TAA
ELAQRTKL

SEQ ID NO: 60661 - protein, 8 aa, Homo sapiens
  misc_feature: Table A; Target 60661; HLA-A*33:01; PAX7; ENSG00000009709; TAA
ELEKAFER

SEQ ID NO: 60662 - protein, 8 aa, Homo sapiens
  misc_feature: Table A; Target 60662; HLA-A*33:03; PAX7; ENSG00000009709; TAA
ELEKAFER

SEQ ID NO: 60663 - protein, 8 aa, Homo sapiens
  misc_feature: Table A; Target 60663; HLA-A*33:03; PAX7; ENSG00000009709; TAA
EPDLPLKR

SEQ ID NO: 60664 - protein, 10 aa, Homo sapiens
  misc_feature: Table A; Target 60664; HLA-B*44:02; PAX7; ENSG00000009709; TAA
EQLEELEKAF

SEQ ID NO: 60665 - protein, 10 aa, Homo sapiens
  misc_feature: Table A; Target 60665; HLA-B*44:03; PAX7; ENSG00000009709; TAA
EQLEELEKAF

SEQ ID NO: 60666 - protein, 9 aa, Homo sapiens
  misc_feature: Table A; Target 60666; HLA-A*01:01; PAX7; ENSG00000009709; TAA
ESEPDLPLK

SEQ ID NO: 60667 - protein, 9 aa, Homo sapiens
  misc_feature: Table A; Target 60667; HLA-A*03:02; PAX7; ENSG00000009709; TAA
ESEPDLPLK

SEQ ID NO: 60668 - protein, 9 aa, Homo sapiens
  misc_feature: Table A; Target 60668; HLA-A*11:01; PAX7; ENSG00000009709; TAA
ESEPDLPLK

SEQ ID NO: 60669 - protein, 9 aa, Homo sapiens
  misc_feature: Table A; Target 60669; HLA-A*33:03; PAX7; ENSG00000009709; TAA
ESEPDLPLK

SEQ ID NO: 60670 - protein, 9 aa, Homo sapiens
  misc_feature: Table A; Target 60670; HLA-A*68:01; PAX7; ENSG00000009709; TAA
ESEPDLPLK

SEQ ID NO: 60671 - protein, 9 aa, Homo sapiens
  misc_feature: Table A; Target 60671; HLA-B*27:02; PAX7; ENSG00000009709; TAA
ESEPDLPLK

SEQ ID NO: 60672 - protein, 9 aa, Homo sapiens
  misc_feature: Table A; Target 60672; HLA-C*07:06; PAX7; ENSG00000009709; TAA
ESEPDLPLK

SEQ ID NO: 60673 - protein, 10 aa, Homo sapiens
  misc_feature: Table A; Target 60673; HLA-A*01:01; PAX7; ENSG00000009709; TAA
ESEPDLPLKR

SEQ ID NO: 60674 - protein, 10 aa, Homo sapiens
  misc_feature: Table A; Target 60674; HLA-A*33:01; PAX7; ENSG00000009709; TAA
ESEPDLPLKR

SEQ ID NO: 60675 - protein, 10 aa, Homo sapiens
  misc_feature: Table A; Target 60675; HLA-A*33:03; PAX7; ENSG00000009709; TAA
ESEPDLPLKR

SEQ ID NO: 60676 - protein, 10 aa, Homo sapiens
  misc_feature: Table A; Target 60676; HLA-A*68:01; PAX7; ENSG00000009709; TAA
ESEPDLPLKR

SEQ ID NO: 60677 - protein, 10 aa, Homo sapiens
  misc_feature: Table A; Target 60677; HLA-C*07:06; PAX7; ENSG00000009709; TAA
ESEPDLPLKR

SEQ ID NO: 60678 - protein, 9 aa, Homo sapiens
  misc_feature: Table A; Target 60678; HLA-A*32:01; PAX7; ENSG00000009709; TAA
FMNPAAPSN

SEQ ID NO: 60679 - protein, 9 aa, Homo sapiens
  misc_feature: Table A; Target 60679; HLA-B*46:01; PAX7; ENSG00000009709; TAA
FMNPAAPSN

SEQ ID NO: 60680 - protein, 9 aa, Homo sapiens
  misc_feature: Table A; Target 60680; HLA-C*07:01; PAX7; ENSG00000009709; TAA
FMNPAAPSN

SEQ ID NO: 60681 - protein, 9 aa, Homo sapiens
  misc_feature: Table A; Target 60681; HLA-C*12:03; PAX7; ENSG00000009709; TAA
FMNPAAPSN

SEQ ID NO: 60682 - protein, 8 aa, Homo sapiens
  misc_feature: Table A; Target 60682; HLA-B*51:01; PAX7; ENSG00000009709; TAA
FPLEVSTP

SEQ ID NO: 60683 - protein, 10 aa, Homo sapiens
  misc_feature: Table A; Target 60683; HLA-B*35:01; PAX7; ENSG00000009709; TAA
FPLEVSTPLG

SEQ ID NO: 60684 - protein, 10 aa, Homo sapiens
  misc_feature: Table A; Target 60684; HLA-C*07:02; PAX7; ENSG00000009709; TAA
FPLEVSTPLG

SEQ ID NO: 60685 - protein, 9 aa, Homo sapiens
  misc_feature: Table A; Target 60685; HLA-A*23:01; PAX7; ENSG00000009709; TAA
FPPTGMPTL

SEQ ID NO: 60686 - protein, 9 aa, Homo sapiens
  misc_feature: Table A; Target 60686; HLA-A*24:02; PAX7; ENSG00000009709; TAA
FPPTGMPTL

SEQ ID NO: 60687 - protein, 9 aa, Homo sapiens
  misc_feature: Table A; Target 60687; HLA-B*07:02; PAX7; ENSG00000009709; TAA
FPPTGMPTL

SEQ ID NO: 60688 - protein, 9 aa, Homo sapiens
  misc_feature: Table A; Target 60688; HLA-B*35:01; PAX7; ENSG00000009709; TAA
FPPTGMPTL

SEQ ID NO: 60689 - protein, 9 aa, Homo sapiens
  misc_feature: Table A; Target 60689; HLA-B*35:03; PAX7; ENSG00000009709; TAA
FPPTGMPTL

SEQ ID NO: 60690 - protein, 9 aa, Homo sapiens
  misc_feature: Table A; Target 60690; HLA-B*51:01; PAX7; ENSG00000009709; TAA
FPPTGMPTL

SEQ ID NO: 60691 - protein, 9 aa, Homo sapiens
  misc_feature: Table A; Target 60691; HLA-B*54:01; PAX7; ENSG00000009709; TAA
FPPTGMPTL

SEQ ID NO: 60692 - protein, 9 aa, Homo sapiens
  misc_feature: Table A; Target 60692; HLA-B*55:01; PAX7; ENSG00000009709; TAA
FPPTGMPTL

SEQ ID NO: 60693 - protein, 9 aa, Homo sapiens
  misc_feature: Table A; Target 60693; HLA-B*56:01; PAX7; ENSG00000009709; TAA
FPPTGMPTL

SEQ ID NO: 60694 - protein, 9 aa, Homo sapiens
  misc_feature: Table A; Target 60694; HLA-C*01:02; PAX7; ENSG00000009709; TAA
FPPTGMPTL

SEQ ID NO: 60695 - protein, 9 aa, Homo sapiens
  misc_feature: Table A; Target 60695; HLA-C*03:03; PAX7; ENSG00000009709; TAA
FPPTGMPTL

SEQ ID NO: 60696 - protein, 9 aa, Homo sapiens
  misc_feature: Table A; Target 60696; HLA-C*03:04; PAX7; ENSG00000009709; TAA
FPPTGMPTL

SEQ ID NO: 60697 - protein, 9 aa, Homo sapiens
  misc_feature: Table A; Target 60697; HLA-C*07:02; PAX7; ENSG00000009709; TAA
FPPTGMPTL

SEQ ID NO: 60698 - protein, 10 aa, Homo sapiens
  misc_feature: Table A; Target 60698; HLA-C*06:02; PAX7; ENSG00000009709; TAA
FSISPLHGGL

SEQ ID NO: 60699 - protein, 8 aa, Homo sapiens
  misc_feature: Table A; Target 60699; HLA-C*03:04; PAX7; ENSG00000009709; TAA
FSSYSDSF

SEQ ID NO: 60700 - protein, 9 aa, Homo sapiens
  misc_feature: Table A; Target 60700; HLA-A*01:01; PAX7; ENSG00000009709; TAA
FSSYSDSFM

SEQ ID NO: 60701 - protein, 9 aa, Homo sapiens
  misc_feature: Table A; Target 60701; HLA-A*26:01; PAX7; ENSG00000009709; TAA
FTAEQLEEL

SEQ ID NO: 60702 - protein, 9 aa, Homo sapiens
  misc_feature: Table A; Target 60702; HLA-C*12:03; PAX7; ENSG00000009709; TAA
FTAEQLEEL

SEQ ID NO: 60703 - protein, 9 aa, Homo sapiens
  misc_feature: Table A; Target 60703; HLA-C*14:02; PAX7; ENSG00000009709; TAA
FTAEQLEEL

SEQ ID NO: 60704 - protein, 11 aa, Homo sapiens
  misc_feature: Table A; Target 60704; HLA-B*27:02; PAX7; ENSG00000009709; TAA
FTAEQLEELEK

SEQ ID NO: 60705 - protein, 9 aa, Homo sapiens
  misc_feature: Table A; Target 60705; HLA-A*11:01; PAX7; ENSG00000009709; TAA
GAIGGSKPR

SEQ ID NO: 60706 - protein, 9 aa, Homo sapiens
  misc_feature: Table A; Target 60706; HLA-A*31:01; PAX7; ENSG00000009709; TAA
GAIGGSKPR

SEQ ID NO: 60707 - protein, 9 aa, Homo sapiens
  misc_feature: Table A; Target 60707; HLA-A*68:01; PAX7; ENSG00000009709; TAA
GAIGGSKPR

SEQ ID NO: 60708 - protein, 9 aa, Homo sapiens
  misc_feature: Table A; Target 60708; HLA-C*07:06; PAX7; ENSG00000009709; TAA
GAIGGSKPR

SEQ ID NO: 60709 - protein, 9 aa, Homo sapiens
  misc_feature: Table A; Target 60709; HLA-C*16:02; PAX7; ENSG00000009709; TAA
GAIGGSKPR

SEQ ID NO: 60710 - protein, 11 aa, Homo sapiens
  misc_feature: Table A; Target 60710; HLA-C*12:03; PAX7; ENSG00000009709; TAA
GAIGGSKPRQV

SEQ ID NO: 60711 - protein, 11 aa, Homo sapiens
  misc_feature: Table A; Target 60711; HLA-C*16:02; PAX7; ENSG00000009709; TAA
GAIGGSKPRQV

SEQ ID NO: 60712 - protein, 8 aa, Homo sapiens
  misc_feature: Table A; Target 60712; HLA-B*46:01; PAX7; ENSG00000009709; TAA
GANQLAAF

SEQ ID NO: 60713 - protein, 9 aa, Homo sapiens
  misc_feature: Table A; Target 60713; HLA-A*30:02; PAX7; ENSG00000009709; TAA
GARHSFSSY

SEQ ID NO: 60714 - protein, 9 aa, Homo sapiens
  misc_feature: Table A; Target 60714; HLA-B*15:01; PAX7; ENSG00000009709; TAA
GARHSFSSY

SEQ ID NO: 60715 - protein, 9 aa, Homo sapiens
  misc_feature: Table A; Target 60715; HLA-B*15:03; PAX7; ENSG00000009709; TAA
GARHSFSSY

SEQ ID NO: 60716 - protein, 9 aa, Homo sapiens
  misc_feature: Table A; Target 60716; HLA-B*46:01; PAX7; ENSG00000009709; TAA
GARHSFSSY

SEQ ID NO: 60717 - protein, 9 aa, Homo sapiens
  misc_feature: Table A; Target 60717; HLA-C*02:02; PAX7; ENSG00000009709; TAA
GARHSFSSY

SEQ ID NO: 60718 - protein, 10 aa, Homo sapiens
  misc_feature: Table A; Target 60718; HLA-C*16:04; PAX7; ENSG00000009709; TAA
GDSLPTSQAY

SEQ ID NO: 60719 - protein, 9 aa, Homo sapiens
  misc_feature: Table A; Target 60719; HLA-A*30:01; PAX7; ENSG00000009709; TAA
GEHSAVLGL

SEQ ID NO: 60720 - protein, 9 aa, Homo sapiens
  misc_feature: Table A; Target 60720; HLA-B*27:02; PAX7; ENSG00000009709; TAA
GEHSAVLGL

SEQ ID NO: 60721 - protein, 9 aa, Homo sapiens
  misc_feature: Table A; Target 60721; HLA-B*37:01; PAX7; ENSG00000009709; TAA
GEHSAVLGL

SEQ ID NO: 60722 - protein, 9 aa, Homo sapiens
  misc_feature: Table A; Target 60722; HLA-B*40:01; PAX7; ENSG00000009709; TAA
GEHSAVLGL

SEQ ID NO: 60723 - protein, 9 aa, Homo sapiens
  misc_feature: Table A; Target 60723; HLA-B*40:02; PAX7; ENSG00000009709; TAA
GEHSAVLGL

SEQ ID NO: 60724 - protein, 9 aa, Homo sapiens
  misc_feature: Table A; Target 60724; HLA-B*44:02; PAX7; ENSG00000009709; TAA
GEHSAVLGL

SEQ ID NO: 60725 - protein, 9 aa, Homo sapiens
  misc_feature: Table A; Target 60725; HLA-B*44:03; PAX7; ENSG00000009709; TAA
GEHSAVLGL

SEQ ID NO: 60726 - protein, 9 aa, Homo sapiens
  misc_feature: Table A; Target 60726; HLA-B*49:01; PAX7; ENSG00000009709; TAA
GEHSAVLGL

SEQ ID NO: 60727 - protein, 9 aa, Homo sapiens
  misc_feature: Table A; Target 60727; HLA-C*16:04; PAX7; ENSG00000009709; TAA
GEHSAVLGL

SEQ ID NO: 60728 - protein, 10 aa, Homo sapiens
  misc_feature: Table A; Target 60728; HLA-A*30:01; PAX7; ENSG00000009709; TAA
GEHSAVLGLL

SEQ ID NO: 60729 - protein, 10 aa, Homo sapiens
  misc_feature: Table A; Target 60729; HLA-B*40:01; PAX7; ENSG00000009709; TAA
GEHSAVLGLL

SEQ ID NO: 60730 - protein, 10 aa, Homo sapiens
  misc_feature: Table A; Target 60730; HLA-B*40:02; PAX7; ENSG00000009709; TAA
GEHSAVLGLL

SEQ ID NO: 60731 - protein, 10 aa, Homo sapiens
  misc_feature: Table A; Target 60731; HLA-B*49:01; PAX7; ENSG00000009709; TAA
GEHSAVLGLL

SEQ ID NO: 60732 - protein, 9 aa, Homo sapiens
  misc_feature: Table A; Target 60732; HLA-B*13:02; PAX7; ENSG00000009709; TAA
GGLDSATSI

SEQ ID NO: 60733 - protein, 9 aa, Homo sapiens
  misc_feature: Table A; Target 60733; HLA-B*15:03; PAX7; ENSG00000009709; TAA
GGLDSATSI

SEQ ID NO: 60734 - protein, 9 aa, Homo sapiens
  misc_feature: Table A; Target 60734; HLA-C*01:02; PAX7; ENSG00000009709; TAA
GGLDSATSI

SEQ ID NO: 60735 - protein, 9 aa, Homo sapiens
  misc_feature: Table A; Target 60735; HLA-C*14:02; PAX7; ENSG00000009709; TAA
GGLDSATSI

SEQ ID NO: 60736 - protein, 9 aa, Homo sapiens
  misc_feature: Table A; Target 60736; HLA-A*33:03; PAX7; ENSG00000009709; TAA
GIRPCVISR

SEQ ID NO: 60737 - protein, 9 aa, Homo sapiens
  misc_feature: Table A; Target 60737; HLA-A*02:01; PAX7; ENSG00000009709; TAA
GLAAAAAAA

SEQ ID NO: 60738 - protein, 9 aa, Homo sapiens
  misc_feature: Table A; Target 60738; HLA-A*02:03; PAX7; ENSG00000009709; TAA
GLAAAAAAA

SEQ ID NO: 60739 - protein, 9 aa, Homo sapiens
  misc_feature: Table A; Target 60739; HLA-B*13:02; PAX7; ENSG00000009709; TAA
GLAAAAAAA

SEQ ID NO: 60740 - protein, 9 aa, Homo sapiens
  misc_feature: Table A; Target 60740; HLA-B*55:01; PAX7; ENSG00000009709; TAA
GLAAAAAAA

SEQ ID NO: 60741 - protein, 8 aa, Homo sapiens
  misc_feature: Table A; Target 60741; HLA-A*02:01; PAX7; ENSG00000009709; TAA
GLDSATSI

SEQ ID NO: 60742 - protein, 8 aa, Homo sapiens
  misc_feature: Table A; Target 60742; HLA-B*13:02; PAX7; ENSG00000009709; TAA
GLDSATSI

SEQ ID NO: 60743 - protein, 8 aa, Homo sapiens
  misc_feature: Table A; Target 60743; HLA-C*05:01; PAX7; ENSG00000009709; TAA
GLDSATSI

SEQ ID NO: 60744 - protein, 10 aa, Homo sapiens
  misc_feature: Table A; Target 60744; HLA-A*02:01; PAX7; ENSG00000009709; TAA
GLDSATSISA

SEQ ID NO: 60745 - protein, 10 aa, Homo sapiens
  misc_feature: Table A; Target 60745; HLA-A*02:07; PAX7; ENSG00000009709; TAA
GLDSATSISA

SEQ ID NO: 60746 - protein, 10 aa, Homo sapiens
  misc_feature: Table A; Target 60746; HLA-B*55:01; PAX7; ENSG00000009709; TAA
GLDSATSISA

SEQ ID NO: 60747 - protein, 10 aa, Homo sapiens
  misc_feature: Table A; Target 60747; HLA-A*02:01; PAX7; ENSG00000009709; TAA
GLLPVETGQA

SEQ ID NO: 60748 - protein, 10 aa, Homo sapiens
  misc_feature: Table A; Target 60748; HLA-A*02:03; PAX7; ENSG00000009709; TAA
GLLPVETGQA

SEQ ID NO: 60749 - protein, 11 aa, Homo sapiens
  misc_feature: Table A; Target 60749; HLA-A*01:01; PAX7; ENSG00000009709; TAA
GLLPVETGQAY

SEQ ID NO: 60750 - protein, 11 aa, Homo sapiens
  misc_feature: Table A; Target 60750; HLA-A*02:07; PAX7; ENSG00000009709; TAA
GLLPVETGQAY

SEQ ID NO: 60751 - protein, 11 aa, Homo sapiens
  misc_feature: Table A; Target 60751; HLA-A*03:01; PAX7; ENSG00000009709; TAA
GLLPVETGQAY

SEQ ID NO: 60752 - protein, 11 aa, Homo sapiens
  misc_feature: Table A; Target 60752; HLA-A*03:02; PAX7; ENSG00000009709; TAA
GLLPVETGQAY

SEQ ID NO: 60753 - protein, 11 aa, Homo sapiens
  misc_feature: Table A; Target 60753; HLA-A*11:01; PAX7; ENSG00000009709; TAA
GLLPVETGQAY

SEQ ID NO: 60754 - protein, 11 aa, Homo sapiens
  misc_feature: Table A; Target 60754; HLA-A*23:01; PAX7; ENSG00000009709; TAA
GLLPVETGQAY

SEQ ID NO: 60755 - protein, 11 aa, Homo sapiens
  misc_feature: Table A; Target 60755; HLA-A*25:01; PAX7; ENSG00000009709; TAA
GLLPVETGQAY

SEQ ID NO: 60756 - protein, 11 aa, Homo sapiens
  misc_feature: Table A; Target 60756; HLA-A*26:01; PAX7; ENSG00000009709; TAA
GLLPVETGQAY

SEQ ID NO: 60757 - protein, 11 aa, Homo sapiens
  misc_feature: Table A; Target 60757; HLA-A*29:02; PAX7; ENSG00000009709; TAA
GLLPVETGQAY

SEQ ID NO: 60758 - protein, 11 aa, Homo sapiens
  misc_feature: Table A; Target 60758; HLA-A*30:02; PAX7; ENSG00000009709; TAA
GLLPVETGQAY

SEQ ID NO: 60759 - protein, 11 aa, Homo sapiens
  misc_feature: Table A; Target 60759; HLA-A*31:01; PAX7; ENSG00000009709; TAA
GLLPVETGQAY

SEQ ID NO: 60760 - protein, 11 aa, Homo sapiens
  misc_feature: Table A; Target 60760; HLA-A*32:01; PAX7; ENSG00000009709; TAA
GLLPVETGQAY

SEQ ID NO: 60761 - protein, 11 aa, Homo sapiens
  misc_feature: Table A; Target 60761; HLA-B*07:02; PAX7; ENSG00000009709; TAA
GLLPVETGQAY

SEQ ID NO: 60762 - protein, 11 aa, Homo sapiens
  misc_feature: Table A; Target 60762; HLA-B*13:02; PAX7; ENSG00000009709; TAA
GLLPVETGQAY

SEQ ID NO: 60763 - protein, 11 aa, Homo sapiens
  misc_feature: Table A; Target 60763; HLA-B*15:01; PAX7; ENSG00000009709; TAA
GLLPVETGQAY

SEQ ID NO: 60764 - protein, 11 aa, Homo sapiens
  misc_feature: Table A; Target 60764; HLA-B*15:03; PAX7; ENSG00000009709; TAA
GLLPVETGQAY

SEQ ID NO: 60765 - protein, 11 aa, Homo sapiens
  misc_feature: Table A; Target 60765; HLA-B*18:01; PAX7; ENSG00000009709; TAA
GLLPVETGQAY

SEQ ID NO: 60766 - protein, 11 aa, Homo sapiens
  misc_feature: Table A; Target 60766; HLA-B*27:02; PAX7; ENSG00000009709; TAA
GLLPVETGQAY

SEQ ID NO: 60767 - protein, 11 aa, Homo sapiens
  misc_feature: Table A; Target 60767; HLA-B*27:05; PAX7; ENSG00000009709; TAA
GLLPVETGQAY

SEQ ID NO: 60768 - protein, 11 aa, Homo sapiens
  misc_feature: Table A; Target 60768; HLA-B*35:01; PAX7; ENSG00000009709; TAA
GLLPVETGQAY

SEQ ID NO: 60769 - protein, 11 aa, Homo sapiens
  misc_feature: Table A; Target 60769; HLA-B*39:01; PAX7; ENSG00000009709; TAA
GLLPVETGQAY

SEQ ID NO: 60770 - protein, 11 aa, Homo sapiens
  misc_feature: Table A; Target 60770; HLA-B*44:02; PAX7; ENSG00000009709; TAA
GLLPVETGQAY

SEQ ID NO: 60771 - protein, 11 aa, Homo sapiens
  misc_feature: Table A; Target 60771; HLA-B*44:03; PAX7; ENSG00000009709; TAA
GLLPVETGQAY

SEQ ID NO: 60772 - protein, 11 aa, Homo sapiens
  misc_feature: Table A; Target 60772; HLA-B*46:01; PAX7; ENSG00000009709; TAA
GLLPVETGQAY

SEQ ID NO: 60773 - protein, 11 aa, Homo sapiens
  misc_feature: Table A; Target 60773; HLA-B*55:01; PAX7; ENSG00000009709; TAA
GLLPVETGQAY

SEQ ID NO: 60774 - protein, 11 aa, Homo sapiens
  misc_feature: Table A; Target 60774; HLA-B*57:01; PAX7; ENSG00000009709; TAA
GLLPVETGQAY

SEQ ID NO: 60775 - protein, 11 aa, Homo sapiens
  misc_feature: Table A; Target 60775; HLA-B*58:01; PAX7; ENSG00000009709; TAA
GLLPVETGQAY

SEQ ID NO: 60776 - protein, 11 aa, Homo sapiens
  misc_feature: Table A; Target 60776; HLA-C*01:02; PAX7; ENSG00000009709; TAA
GLLPVETGQAY

SEQ ID NO: 60777 - protein, 11 aa, Homo sapiens
  misc_feature: Table A; Target 60777; HLA-C*02:02; PAX7; ENSG00000009709; TAA
GLLPVETGQAY

SEQ ID NO: 60778 - protein, 11 aa, Homo sapiens
  misc_feature: Table A; Target 60778; HLA-C*04:01; PAX7; ENSG00000009709; TAA
GLLPVETGQAY

SEQ ID NO: 60779 - protein, 11 aa, Homo sapiens
  misc_feature: Table A; Target 60779; HLA-C*06:02; PAX7; ENSG00000009709; TAA
GLLPVETGQAY

SEQ ID NO: 60780 - protein, 11 aa, Homo sapiens
  misc_feature: Table A; Target 60780; HLA-C*07:01; PAX7; ENSG00000009709; TAA
GLLPVETGQAY

SEQ ID NO: 60781 - protein, 11 aa, Homo sapiens
  misc_feature: Table A; Target 60781; HLA-C*07:02; PAX7; ENSG00000009709; TAA
GLLPVETGQAY

SEQ ID NO: 60782 - protein, 11 aa, Homo sapiens
  misc_feature: Table A; Target 60782; HLA-C*07:04; PAX7; ENSG00000009709; TAA
GLLPVETGQAY

SEQ ID NO: 60783 - protein, 11 aa, Homo sapiens
  misc_feature: Table A; Target 60783; HLA-C*12:03; PAX7; ENSG00000009709; TAA
GLLPVETGQAY

SEQ ID NO: 60784 - protein, 11 aa, Homo sapiens
  misc_feature: Table A; Target 60784; HLA-C*14:02; PAX7; ENSG00000009709; TAA
GLLPVETGQAY

SEQ ID NO: 60785 - protein, 11 aa, Homo sapiens
  misc_feature: Table A; Target 60785; HLA-C*16:01; PAX7; ENSG00000009709; TAA
GLLPVETGQAY

SEQ ID NO: 60786 - protein, 11 aa, Homo sapiens
  misc_feature: Table A; Target 60786; HLA-C*16:04; PAX7; ENSG00000009709; TAA
GLLPVETGQAY

SEQ ID NO: 60787 - protein, 9 aa, Homo sapiens
  misc_feature: Table A; Target 60787; HLA-A*02:01; PAX7; ENSG00000009709; TAA
GLSPQVMSI

SEQ ID NO: 60788 - protein, 9 aa, Homo sapiens
  misc_feature: Table A; Target 60788; HLA-A*02:03; PAX7; ENSG00000009709; TAA
GLSPQVMSI

SEQ ID NO: 60789 - protein, 9 aa, Homo sapiens
  misc_feature: Table A; Target 60789; HLA-A*02:04; PAX7; ENSG00000009709; TAA
GLSPQVMSI

SEQ ID NO: 60790 - protein, 9 aa, Homo sapiens
  misc_feature: Table A; Target 60790; HLA-A*02:07; PAX7; ENSG00000009709; TAA
GLSPQVMSI

SEQ ID NO: 60791 - protein, 9 aa, Homo sapiens
  misc_feature: Table A; Target 60791; HLA-A*30:01; PAX7; ENSG00000009709; TAA
GLSPQVMSI

SEQ ID NO: 60792 - protein, 9 aa, Homo sapiens
  misc_feature: Table A; Target 60792; HLA-A*32:01; PAX7; ENSG00000009709; TAA
GLSPQVMSI

SEQ ID NO: 60793 - protein, 9 aa, Homo sapiens
  misc_feature: Table A; Target 60793; HLA-B*13:02; PAX7; ENSG00000009709; TAA
GLSPQVMSI

SEQ ID NO: 60794 - protein, 9 aa, Homo sapiens
  misc_feature: Table A; Target 60794; HLA-B*15:01; PAX7; ENSG00000009709; TAA
GLSPQVMSI

SEQ ID NO: 60795 - protein, 9 aa, Homo sapiens
  misc_feature: Table A; Target 60795; HLA-B*37:01; PAX7; ENSG00000009709; TAA
GLSPQVMSI

SEQ ID NO: 60796 - protein, 9 aa, Homo sapiens
  misc_feature: Table A; Target 60796; HLA-B*49:01; PAX7; ENSG00000009709; TAA
GLSPQVMSI

SEQ ID NO: 60797 - protein, 9 aa, Homo sapiens
  misc_feature: Table A; Target 60797; HLA-B*55:01; PAX7; ENSG00000009709; TAA
GLSPQVMSI

SEQ ID NO: 60798 - protein, 9 aa, Homo sapiens
  misc_feature: Table A; Target 60798; HLA-C*02:02; PAX7; ENSG00000009709; TAA
GLSPQVMSI

SEQ ID NO: 60799 - protein, 9 aa, Homo sapiens
  misc_feature: Table A; Target 60799; HLA-C*06:02; PAX7; ENSG00000009709; TAA
GLSPQVMSI

SEQ ID NO: 60800 - protein, 9 aa, Homo sapiens
  misc_feature: Table A; Target 60800; HLA-C*16:02; PAX7; ENSG00000009709; TAA
GLSPQVMSI

SEQ ID NO: 60801 - protein, 10 aa, Homo sapiens
  misc_feature: Table A; Target 60801; HLA-A*02:03; PAX7; ENSG00000009709; TAA
GLSPQVMSIL

SEQ ID NO: 60802 - protein, 9 aa, Homo sapiens
  misc_feature: Table A; Target 60802; HLA-A*02:01; PAX7; ENSG00000009709; TAA
GLVSSISRV

SEQ ID NO: 60803 - protein, 9 aa, Homo sapiens
  misc_feature: Table A; Target 60803; HLA-A*02:03; PAX7; ENSG00000009709; TAA
GLVSSISRV

SEQ ID NO: 60804 - protein, 9 aa, Homo sapiens
  misc_feature: Table A; Target 60804; HLA-A*02:04; PAX7; ENSG00000009709; TAA
GLVSSISRV

SEQ ID NO: 60805 - protein, 9 aa, Homo sapiens
  misc_feature: Table A; Target 60805; HLA-A*02:07; PAX7; ENSG00000009709; TAA
GLVSSISRV

SEQ ID NO: 60806 - protein, 9 aa, Homo sapiens
  misc_feature: Table A; Target 60806; HLA-B*13:02; PAX7; ENSG00000009709; TAA
GLVSSISRV

SEQ ID NO: 60807 - protein, 9 aa, Homo sapiens
  misc_feature: Table A; Target 60807; HLA-B*55:01; PAX7; ENSG00000009709; TAA
GLVSSISRV

SEQ ID NO: 60808 - protein, 9 aa, Homo sapiens
  misc_feature: Table A; Target 60808; HLA-A*30:02; PAX7; ENSG00000009709; TAA
GQNYPRTGF

SEQ ID NO: 60809 - protein, 9 aa, Homo sapiens
  misc_feature: Table A; Target 60809; HLA-A*32:01; PAX7; ENSG00000009709; TAA
GQNYPRTGF

SEQ ID NO: 60810 - protein, 9 aa, Homo sapiens
  misc_feature: Table A; Target 60810; HLA-B*13:02; PAX7; ENSG00000009709; TAA
GQNYPRTGF

SEQ ID NO: 60811 - protein, 9 aa, Homo sapiens
  misc_feature: Table A; Target 60811; HLA-B*15:01; PAX7; ENSG00000009709; TAA
GQNYPRTGF

SEQ ID NO: 60812 - protein, 9 aa, Homo sapiens
  misc_feature: Table A; Target 60812; HLA-B*15:03; PAX7; ENSG00000009709; TAA
GQNYPRTGF

SEQ ID NO: 60813 - protein, 9 aa, Homo sapiens
  misc_feature: Table A; Target 60813; HLA-B*27:02; PAX7; ENSG00000009709; TAA
GQNYPRTGF

SEQ ID NO: 60814 - protein, 9 aa, Homo sapiens
  misc_feature: Table A; Target 60814; HLA-B*27:05; PAX7; ENSG00000009709; TAA
GQNYPRTGF

SEQ ID NO: 60815 - protein, 9 aa, Homo sapiens
  misc_feature: Table A; Target 60815; HLA-B*37:01; PAX7; ENSG00000009709; TAA
GQNYPRTGF

SEQ ID NO: 60816 - protein, 9 aa, Homo sapiens
  misc_feature: Table A; Target 60816; HLA-B*46:01; PAX7; ENSG00000009709; TAA
GQNYPRTGF

SEQ ID NO: 60817 - protein, 9 aa, Homo sapiens
  misc_feature: Table A; Target 60817; HLA-B*58:01; PAX7; ENSG00000009709; TAA
GQNYPRTGF

SEQ ID NO: 60818 - protein, 9 aa, Homo sapiens
  misc_feature: Table A; Target 60818; HLA-C*02:02; PAX7; ENSG00000009709; TAA
GQNYPRTGF

SEQ ID NO: 60819 - protein, 9 aa, Homo sapiens
  misc_feature: Table A; Target 60819; HLA-C*07:04; PAX7; ENSG00000009709; TAA
GQNYPRTGF

SEQ ID NO: 60820 - protein, 9 aa, Homo sapiens
  misc_feature: Table A; Target 60820; HLA-C*14:02; PAX7; ENSG00000009709; TAA
GQNYPRTGF

SEQ ID NO: 60821 - protein, 9 aa, Homo sapiens
  misc_feature: Table A; Target 60821; HLA-C*16:01; PAX7; ENSG00000009709; TAA
GQNYPRTGF

SEQ ID NO: 60822 - protein, 9 aa, Homo sapiens
  misc_feature: Table A; Target 60822; HLA-C*16:04; PAX7; ENSG00000009709; TAA
GQNYPRTGF

SEQ ID NO: 60823 - protein, 8 aa, Homo sapiens
  misc_feature: Table A; Target 60823; HLA-B*13:02; PAX7; ENSG00000009709; TAA
GQTAVDYL

SEQ ID NO: 60824 - protein, 8 aa, Homo sapiens
  misc_feature: Table A; Target 60824; HLA-B*15:01; PAX7; ENSG00000009709; TAA
GQTAVDYL

SEQ ID NO: 60825 - protein, 8 aa, Homo sapiens
  misc_feature: Table A; Target 60825; HLA-B*27:05; PAX7; ENSG00000009709; TAA
GQTAVDYL

SEQ ID NO: 60826 - protein, 8 aa, Homo sapiens
  misc_feature: Table A; Target 60826; HLA-B*39:01; PAX7; ENSG00000009709; TAA
GQTAVDYL

SEQ ID NO: 60827 - protein, 8 aa, Homo sapiens
  misc_feature: Table A; Target 60827; HLA-C*07:04; PAX7; ENSG00000009709; TAA
GQTAVDYL

SEQ ID NO: 60828 - protein, 9 aa, Homo sapiens
  misc_feature: Table A; Target 60828; HLA-A*30:01; PAX7; ENSG00000009709; TAA
GQTAVDYLA

SEQ ID NO: 60829 - protein, 9 aa, Homo sapiens
  misc_feature: Table A; Target 60829; HLA-B*13:02; PAX7; ENSG00000009709; TAA
GQTAVDYLA

SEQ ID NO: 60830 - protein, 9 aa, Homo sapiens
  misc_feature: Table A; Target 60830; HLA-B*27:05; PAX7; ENSG00000009709; TAA
GQTAVDYLA

SEQ ID NO: 60831 - protein, 9 aa, Homo sapiens
  misc_feature: Table A; Target 60831; HLA-C*06:02; PAX7; ENSG00000009709; TAA
GQTAVDYLA

SEQ ID NO: 60832 - protein, 10 aa, Homo sapiens
  misc_feature: Table A; Target 60832; HLA-B*27:02; PAX7; ENSG00000009709; TAA
GQTAVDYLAK

SEQ ID NO: 60833 - protein, 10 aa, Homo sapiens
  misc_feature: Table A; Target 60833; HLA-B*27:05; PAX7; ENSG00000009709; TAA
GQTAVDYLAK

SEQ ID NO: 60834 - protein, 8 aa, Homo sapiens
  misc_feature: Table A; Target 60834; HLA-B*13:02; PAX7; ENSG00000009709; TAA
GQYGQTAV

SEQ ID NO: 60835 - protein, 8 aa, Homo sapiens
  misc_feature: Table A; Target 60835; HLA-B*15:01; PAX7; ENSG00000009709; TAA
GQYGQTAV

SEQ ID NO: 60836 - protein, 8 aa, Homo sapiens
  misc_feature: Table A; Target 60836; HLA-B*15:03; PAX7; ENSG00000009709; TAA
GQYGQTAV

SEQ ID NO: 60837 - protein, 8 aa, Homo sapiens
  misc_feature: Table A; Target 60837; HLA-B*39:01; PAX7; ENSG00000009709; TAA
GQYGQTAV

SEQ ID NO: 60838 - protein, 10 aa, Homo sapiens
  misc_feature: Table A; Target 60838; HLA-A*03:01; PAX7; ENSG00000009709; TAA
GQYGQTAVDY

SEQ ID NO: 60839 - protein, 10 aa, Homo sapiens
  misc_feature: Table A; Target 60839; HLA-A*11:01; PAX7; ENSG00000009709; TAA
GQYGQTAVDY

SEQ ID NO: 60840 - protein, 10 aa, Homo sapiens
  misc_feature: Table A; Target 60840; HLA-A*26:01; PAX7; ENSG00000009709; TAA
GQYGQTAVDY

SEQ ID NO: 60841 - protein, 10 aa, Homo sapiens
  misc_feature: Table A; Target 60841; HLA-A*29:02; PAX7; ENSG00000009709; TAA
GQYGQTAVDY

SEQ ID NO: 60842 - protein, 10 aa, Homo sapiens
  misc_feature: Table A; Target 60842; HLA-A*30:02; PAX7; ENSG00000009709; TAA
GQYGQTAVDY

SEQ ID NO: 60843 - protein, 10 aa, Homo sapiens
  misc_feature: Table A; Target 60843; HLA-A*32:01; PAX7; ENSG00000009709; TAA
GQYGQTAVDY

SEQ ID NO: 60844 - protein, 10 aa, Homo sapiens
  misc_feature: Table A; Target 60844; HLA-B*13:02; PAX7; ENSG00000009709; TAA
GQYGQTAVDY

SEQ ID NO: 60845 - protein, 10 aa, Homo sapiens
  misc_feature: Table A; Target 60845; HLA-B*15:01; PAX7; ENSG00000009709; TAA
GQYGQTAVDY

SEQ ID NO: 60846 - protein, 10 aa, Homo sapiens
  misc_feature: Table A; Target 60846; HLA-B*15:03; PAX7; ENSG00000009709; TAA
GQYGQTAVDY

SEQ ID NO: 60847 - protein, 10 aa, Homo sapiens
  misc_feature: Table A; Target 60847; HLA-B*27:02; PAX7; ENSG00000009709; TAA
GQYGQTAVDY

SEQ ID NO: 60848 - protein, 10 aa, Homo sapiens
  misc_feature: Table A; Target 60848; HLA-B*27:05; PAX7; ENSG00000009709; TAA
GQYGQTAVDY

SEQ ID NO: 60849 - protein, 10 aa, Homo sapiens
  misc_feature: Table A; Target 60849; HLA-B*39:01; PAX7; ENSG00000009709; TAA
GQYGQTAVDY

SEQ ID NO: 60850 - protein, 10 aa, Homo sapiens
  misc_feature: Table A; Target 60850; HLA-B*44:03; PAX7; ENSG00000009709; TAA
GQYGQTAVDY

SEQ ID NO: 60851 - protein, 10 aa, Homo sapiens
  misc_feature: Table A; Target 60851; HLA-B*46:01; PAX7; ENSG00000009709; TAA
GQYGQTAVDY

SEQ ID NO: 60852 - protein, 10 aa, Homo sapiens
  misc_feature: Table A; Target 60852; HLA-C*02:02; PAX7; ENSG00000009709; TAA
GQYGQTAVDY

SEQ ID NO: 60853 - protein, 10 aa, Homo sapiens
  misc_feature: Table A; Target 60853; HLA-C*04:01; PAX7; ENSG00000009709; TAA
GQYGQTAVDY

SEQ ID NO: 60854 - protein, 10 aa, Homo sapiens
  misc_feature: Table A; Target 60854; HLA-C*07:01; PAX7; ENSG00000009709; TAA
GQYGQTAVDY

SEQ ID NO: 60855 - protein, 10 aa, Homo sapiens
  misc_feature: Table A; Target 60855; HLA-C*07:04; PAX7; ENSG00000009709; TAA
GQYGQTAVDY

SEQ ID NO: 60856 - protein, 10 aa, Homo sapiens
  misc_feature: Table A; Target 60856; HLA-C*12:03; PAX7; ENSG00000009709; TAA
GQYGQTAVDY

SEQ ID NO: 60857 - protein, 10 aa, Homo sapiens
  misc_feature: Table A; Target 60857; HLA-C*14:02; PAX7; ENSG00000009709; TAA
GQYGQTAVDY

SEQ ID NO: 60858 - protein, 10 aa, Homo sapiens
  misc_feature: Table A; Target 60858; HLA-C*16:04; PAX7; ENSG00000009709; TAA
GQYGQTAVDY

SEQ ID NO: 60859 - protein, 11 aa, Homo sapiens
  misc_feature: Table A; Target 60859; HLA-A*02:03; PAX7; ENSG00000009709; TAA
GQYGQTAVDYL

SEQ ID NO: 60860 - protein, 11 aa, Homo sapiens
  misc_feature: Table A; Target 60860; HLA-A*03:02; PAX7; ENSG00000009709; TAA
GQYGQTAVDYL

SEQ ID NO: 60861 - protein, 11 aa, Homo sapiens
  misc_feature: Table A; Target 60861; HLA-A*30:01; PAX7; ENSG00000009709; TAA
GQYGQTAVDYL

SEQ ID NO: 60862 - protein, 11 aa, Homo sapiens
  misc_feature: Table A; Target 60862; HLA-A*30:02; PAX7; ENSG00000009709; TAA
GQYGQTAVDYL

SEQ ID NO: 60863 - protein, 11 aa, Homo sapiens
  misc_feature: Table A; Target 60863; HLA-B*13:02; PAX7; ENSG00000009709; TAA
GQYGQTAVDYL

SEQ ID NO: 60864 - protein, 11 aa, Homo sapiens
  misc_feature: Table A; Target 60864; HLA-B*15:01; PAX7; ENSG00000009709; TAA
GQYGQTAVDYL

SEQ ID NO: 60865 - protein, 11 aa, Homo sapiens
  misc_feature: Table A; Target 60865; HLA-B*15:03; PAX7; ENSG00000009709; TAA
GQYGQTAVDYL

SEQ ID NO: 60866 - protein, 11 aa, Homo sapiens
  misc_feature: Table A; Target 60866; HLA-B*27:05; PAX7; ENSG00000009709; TAA
GQYGQTAVDYL

SEQ ID NO: 60867 - protein, 11 aa, Homo sapiens
  misc_feature: Table A; Target 60867; HLA-B*38:01; PAX7; ENSG00000009709; TAA
GQYGQTAVDYL

SEQ ID NO: 60868 - protein, 11 aa, Homo sapiens
  misc_feature: Table A; Target 60868; HLA-B*39:01; PAX7; ENSG00000009709; TAA
GQYGQTAVDYL

SEQ ID NO: 60869 - protein, 11 aa, Homo sapiens
  misc_feature: Table A; Target 60869; HLA-B*40:01; PAX7; ENSG00000009709; TAA
GQYGQTAVDYL

SEQ ID NO: 60870 - protein, 11 aa, Homo sapiens
  misc_feature: Table A; Target 60870; HLA-B*40:02; PAX7; ENSG00000009709; TAA
GQYGQTAVDYL

SEQ ID NO: 60871 - protein, 11 aa, Homo sapiens
  misc_feature: Table A; Target 60871; HLA-C*06:02; PAX7; ENSG00000009709; TAA
GQYGQTAVDYL

SEQ ID NO: 60872 - protein, 11 aa, Homo sapiens
  misc_feature: Table A; Target 60872; HLA-C*07:04; PAX7; ENSG00000009709; TAA
GQYGQTAVDYL

SEQ ID NO: 60873 - protein, 11 aa, Homo sapiens
  misc_feature: Table A; Target 60873; HLA-C*16:04; PAX7; ENSG00000009709; TAA
GQYGQTAVDYL

SEQ ID NO: 60874 - protein, 9 aa, Homo sapiens
  misc_feature: Table A; Target 60874; HLA-B*07:02; PAX7; ENSG00000009709; TAA
GVFINGRPL

SEQ ID NO: 60875 - protein, 11 aa, Homo sapiens
  misc_feature: Table A; Target 60875; HLA-C*14:02; PAX7; ENSG00000009709; TAA
GYQYGQYGQTA

SEQ ID NO: 60876 - protein, 10 aa, Homo sapiens
  misc_feature: Table A; Target 60876; HLA-A*29:02; PAX7; ENSG00000009709; TAA
GYSVDPVAGY

SEQ ID NO: 60877 - protein, 10 aa, Homo sapiens
  misc_feature: Table A; Target 60877; HLA-A*30:02; PAX7; ENSG00000009709; TAA
GYSVDPVAGY

SEQ ID NO: 60878 - protein, 10 aa, Homo sapiens
  misc_feature: Table A; Target 60878; HLA-C*14:02; PAX7; ENSG00000009709; TAA
GYSVDPVAGY

SEQ ID NO: 60879 - protein, 9 aa, Homo sapiens
  misc_feature: Table A; Target 60879; HLA-A*02:01; PAX7; ENSG00000009709; TAA
HMNPVSNGL

SEQ ID NO: 60880 - protein, 9 aa, Homo sapiens
  misc_feature: Table A; Target 60880; HLA-A*02:03; PAX7; ENSG00000009709; TAA
HMNPVSNGL

SEQ ID NO: 60881 - protein, 9 aa, Homo sapiens
  misc_feature: Table A; Target 60881; HLA-A*02:04; PAX7; ENSG00000009709; TAA
HMNPVSNGL

SEQ ID NO: 60882 - protein, 9 aa, Homo sapiens
  misc_feature: Table A; Target 60882; HLA-A*02:07; PAX7; ENSG00000009709; TAA
HMNPVSNGL

SEQ ID NO: 60883 - protein, 9 aa, Homo sapiens
  misc_feature: Table A; Target 60883; HLA-A*03:01; PAX7; ENSG00000009709; TAA
HMNPVSNGL

SEQ ID NO: 60884 - protein, 9 aa, Homo sapiens
  misc_feature: Table A; Target 60884; HLA-A*03:02; PAX7; ENSG00000009709; TAA
HMNPVSNGL

SEQ ID NO: 60885 - protein, 9 aa, Homo sapiens
  misc_feature: Table A; Target 60885; HLA-A*23:01; PAX7; ENSG00000009709; TAA
HMNPVSNGL

SEQ ID NO: 60886 - protein, 9 aa, Homo sapiens
  misc_feature: Table A; Target 60886; HLA-A*24:02; PAX7; ENSG00000009709; TAA
HMNPVSNGL

SEQ ID NO: 60887 - protein, 9 aa, Homo sapiens
  misc_feature: Table A; Target 60887; HLA-A*25:01; PAX7; ENSG00000009709; TAA
HMNPVSNGL

SEQ ID NO: 60888 - protein, 9 aa, Homo sapiens
  misc_feature: Table A; Target 60888; HLA-A*26:01; PAX7; ENSG00000009709; TAA
HMNPVSNGL

SEQ ID NO: 60889 - protein, 9 aa, Homo sapiens
  misc_feature: Table A; Target 60889; HLA-A*29:02; PAX7; ENSG00000009709; TAA
HMNPVSNGL

SEQ ID NO: 60890 - protein, 9 aa, Homo sapiens
  misc_feature: Table A; Target 60890; HLA-A*30:01; PAX7; ENSG00000009709; TAA
HMNPVSNGL

SEQ ID NO: 60891 - protein, 9 aa, Homo sapiens
  misc_feature: Table A; Target 60891; HLA-A*30:02; PAX7; ENSG00000009709; TAA
HMNPVSNGL

SEQ ID NO: 60892 - protein, 9 aa, Homo sapiens
  misc_feature: Table A; Target 60892; HLA-A*31:01; PAX7; ENSG00000009709; TAA
HMNPVSNGL

SEQ ID NO: 60893 - protein, 9 aa, Homo sapiens
  misc_feature: Table A; Target 60893; HLA-A*32:01; PAX7; ENSG00000009709; TAA
HMNPVSNGL

SEQ ID NO: 60894 - protein, 9 aa, Homo sapiens
  misc_feature: Table A; Target 60894; HLA-B*07:02; PAX7; ENSG00000009709; TAA
HMNPVSNGL

SEQ ID NO: 60895 - protein, 9 aa, Homo sapiens
  misc_feature: Table A; Target 60895; HLA-B*08:01; PAX7; ENSG00000009709; TAA
HMNPVSNGL

SEQ ID NO: 60896 - protein, 9 aa, Homo sapiens
  misc_feature: Table A; Target 60896; HLA-B*13:02; PAX7; ENSG00000009709; TAA
HMNPVSNGL

SEQ ID NO: 60897 - protein, 9 aa, Homo sapiens
  misc_feature: Table A; Target 60897; HLA-B*15:01; PAX7; ENSG00000009709; TAA
HMNPVSNGL

SEQ ID NO: 60898 - protein, 9 aa, Homo sapiens
  misc_feature: Table A; Target 60898; HLA-B*15:03; PAX7; ENSG00000009709; TAA
HMNPVSNGL

SEQ ID NO: 60899 - protein, 9 aa, Homo sapiens
  misc_feature: Table A; Target 60899; HLA-B*27:05; PAX7; ENSG00000009709; TAA
HMNPVSNGL

SEQ ID NO: 60900 - protein, 9 aa, Homo sapiens
  misc_feature: Table A; Target 60900; HLA-B*35:01; PAX7; ENSG00000009709; TAA
HMNPVSNGL

SEQ ID NO: 60901 - protein, 9 aa, Homo sapiens
  misc_feature: Table A; Target 60901; HLA-B*35:03; PAX7; ENSG00000009709; TAA
HMNPVSNGL

SEQ ID NO: 60902 - protein, 9 aa, Homo sapiens
  misc_feature: Table A; Target 60902; HLA-B*37:01; PAX7; ENSG00000009709; TAA
HMNPVSNGL

SEQ ID NO: 60903 - protein, 9 aa, Homo sapiens
  misc_feature: Table A; Target 60903; HLA-B*38:01; PAX7; ENSG00000009709; TAA
HMNPVSNGL

SEQ ID NO: 60904 - protein, 9 aa, Homo sapiens
  misc_feature: Table A; Target 60904; HLA-B*39:01; PAX7; ENSG00000009709; TAA
HMNPVSNGL

SEQ ID NO: 60905 - protein, 9 aa, Homo sapiens
  misc_feature: Table A; Target 60905; HLA-B*40:01; PAX7; ENSG00000009709; TAA
HMNPVSNGL

SEQ ID NO: 60906 - protein, 9 aa, Homo sapiens
  misc_feature: Table A; Target 60906; HLA-B*40:02; PAX7; ENSG00000009709; TAA
HMNPVSNGL

SEQ ID NO: 60907 - protein, 9 aa, Homo sapiens
  misc_feature: Table A; Target 60907; HLA-B*46:01; PAX7; ENSG00000009709; TAA
HMNPVSNGL

SEQ ID NO: 60908 - protein, 9 aa, Homo sapiens
  misc_feature: Table A; Target 60908; HLA-B*55:01; PAX7; ENSG00000009709; TAA
HMNPVSNGL

SEQ ID NO: 60909 - protein, 9 aa, Homo sapiens
  misc_feature: Table A; Target 60909; HLA-B*58:01; PAX7; ENSG00000009709; TAA
HMNPVSNGL

SEQ ID NO: 60910 - protein, 9 aa, Homo sapiens
  misc_feature: Table A; Target 60910; HLA-C*01:02; PAX7; ENSG00000009709; TAA
HMNPVSNGL

SEQ ID NO: 60911 - protein, 9 aa, Homo sapiens
  misc_feature: Table A; Target 60911; HLA-C*02:02; PAX7; ENSG00000009709; TAA
HMNPVSNGL

SEQ ID NO: 60912 - protein, 9 aa, Homo sapiens
  misc_feature: Table A; Target 60912; HLA-C*03:03; PAX7; ENSG00000009709; TAA
HMNPVSNGL

SEQ ID NO: 60913 - protein, 9 aa, Homo sapiens
  misc_feature: Table A; Target 60913; HLA-C*03:04; PAX7; ENSG00000009709; TAA
HMNPVSNGL

SEQ ID NO: 60914 - protein, 9 aa, Homo sapiens
  misc_feature: Table A; Target 60914; HLA-C*04:01; PAX7; ENSG00000009709; TAA
HMNPVSNGL

SEQ ID NO: 60915 - protein, 9 aa, Homo sapiens
  misc_feature: Table A; Target 60915; HLA-C*06:02; PAX7; ENSG00000009709; TAA
HMNPVSNGL

SEQ ID NO: 60916 - protein, 9 aa, Homo sapiens
  misc_feature: Table A; Target 60916; HLA-C*07:02; PAX7; ENSG00000009709; TAA
HMNPVSNGL

SEQ ID NO: 60917 - protein, 9 aa, Homo sapiens
  misc_feature: Table A; Target 60917; HLA-C*07:04; PAX7; ENSG00000009709; TAA
HMNPVSNGL

SEQ ID NO: 60918 - protein, 9 aa, Homo sapiens
  misc_feature: Table A; Target 60918; HLA-C*07:06; PAX7; ENSG00000009709; TAA
HMNPVSNGL

SEQ ID NO: 60919 - protein, 9 aa, Homo sapiens
  misc_feature: Table A; Target 60919; HLA-C*12:03; PAX7; ENSG00000009709; TAA
HMNPVSNGL

SEQ ID NO: 60920 - protein, 9 aa, Homo sapiens
  misc_feature: Table A; Target 60920; HLA-C*14:02; PAX7; ENSG00000009709; TAA
HMNPVSNGL

SEQ ID NO: 60921 - protein, 9 aa, Homo sapiens
  misc_feature: Table A; Target 60921; HLA-C*16:01; PAX7; ENSG00000009709; TAA
HMNPVSNGL

SEQ ID NO: 60922 - protein, 9 aa, Homo sapiens
  misc_feature: Table A; Target 60922; HLA-C*16:02; PAX7; ENSG00000009709; TAA
HMNPVSNGL

SEQ ID NO: 60923 - protein, 9 aa, Homo sapiens
  misc_feature: Table A; Target 60923; HLA-C*16:04; PAX7; ENSG00000009709; TAA
HMNPVSNGL

SEQ ID NO: 60924 - protein, 9 aa, Homo sapiens
  misc_feature: Table A; Target 60924; HLA-B*13:02; PAX7; ENSG00000009709; TAA
HQGGLAAAA

SEQ ID NO: 60925 - protein, 9 aa, Homo sapiens
  misc_feature: Table A; Target 60925; HLA-B*39:01; PAX7; ENSG00000009709; TAA
HQGGLAAAA

SEQ ID NO: 60926 - protein, 9 aa, Homo sapiens
  misc_feature: Table A; Target 60926; HLA-C*06:02; PAX7; ENSG00000009709; TAA
HQGGLAAAA

SEQ ID NO: 60927 - protein, 9 aa, Homo sapiens
  misc_feature: Table A; Target 60927; HLA-C*07:04; PAX7; ENSG00000009709; TAA
HQGGLAAAA

SEQ ID NO: 60928 - protein, 10 aa, Homo sapiens
  misc_feature: Table A; Target 60928; HLA-C*07:04; PAX7; ENSG00000009709; TAA
HQGGLAAAAA

SEQ ID NO: 60929 - protein, 10 aa, Homo sapiens
  misc_feature: Table A; Target 60929; HLA-A*25:01; PAX7; ENSG00000009709; TAA
HSFSSYSDSF

SEQ ID NO: 60930 - protein, 10 aa, Homo sapiens
  misc_feature: Table A; Target 60930; HLA-B*35:01; PAX7; ENSG00000009709; TAA
HSFSSYSDSF

SEQ ID NO: 60931 - protein, 10 aa, Homo sapiens
  misc_feature: Table A; Target 60931; HLA-B*57:01; PAX7; ENSG00000009709; TAA
HSFSSYSDSF

SEQ ID NO: 60932 - protein, 10 aa, Homo sapiens
  misc_feature: Table A; Target 60932; HLA-C*02:02; PAX7; ENSG00000009709; TAA
HSFSSYSDSF

SEQ ID NO: 60933 - protein, 10 aa, Homo sapiens
  misc_feature: Table A; Target 60933; HLA-A*03:01; PAX7; ENSG00000009709; TAA
HSIDGILGDK

SEQ ID NO: 60934 - protein, 10 aa, Homo sapiens
  misc_feature: Table A; Target 60934; HLA-A*03:02; PAX7; ENSG00000009709; TAA
HSIDGILGDK

SEQ ID NO: 60935 - protein, 10 aa, Homo sapiens
  misc_feature: Table A; Target 60935; HLA-A*11:01; PAX7; ENSG00000009709; TAA
HSIDGILGDK

SEQ ID NO: 60936 - protein, 10 aa, Homo sapiens
  misc_feature: Table A; Target 60936; HLA-A*68:01; PAX7; ENSG00000009709; TAA
HSIDGILGDK

SEQ ID NO: 60937 - protein, 10 aa, Homo sapiens
  misc_feature: Table A; Target 60937; HLA-B*27:02; PAX7; ENSG00000009709; TAA
HSIDGILGDK

SEQ ID NO: 60938 - protein, 8 aa, Homo sapiens
  misc_feature: Table A; Target 60938; HLA-B*27:02; PAX7; ENSG00000009709; TAA
IDGILGDK

SEQ ID NO: 60939 - protein, 9 aa, Homo sapiens
  misc_feature: Table A; Target 60939; HLA-C*16:02; PAX7; ENSG00000009709; TAA
IGGSKPRQV

SEQ ID NO: 60940 - protein, 8 aa, Homo sapiens
  misc_feature: Table A; Target 60940; HLA-A*02:01; PAX7; ENSG00000009709; TAA
ILGNPSAV

SEQ ID NO: 60941 - protein, 8 aa, Homo sapiens
  misc_feature: Table A; Target 60941; HLA-A*02:03; PAX7; ENSG00000009709; TAA
ILGNPSAV

SEQ ID NO: 60942 - protein, 8 aa, Homo sapiens
  misc_feature: Table A; Target 60942; HLA-C*05:01; PAX7; ENSG00000009709; TAA
ILGNPSAV

SEQ ID NO: 60943 - protein, 8 aa, Homo sapiens
  misc_feature: Table A; Target 60943; HLA-C*06:02; PAX7; ENSG00000009709; TAA
ILGNPSAV

SEQ ID NO: 60944 - protein, 8 aa, Homo sapiens
  misc_feature: Table A; Target 60944; HLA-C*14:02; PAX7; ENSG00000009709; TAA
ILGNPSAV

SEQ ID NO: 60945 - protein, 8 aa, Homo sapiens
  misc_feature: Table A; Target 60945; HLA-C*01:02; PAX7; ENSG00000009709; TAA
ISPLHGGL

SEQ ID NO: 60946 - protein, 9 aa, Homo sapiens
  misc_feature: Table A; Target 60946; HLA-A*02:03; PAX7; ENSG00000009709; TAA
ISQDGGSTV

SEQ ID NO: 60947 - protein, 9 aa, Homo sapiens
  misc_feature: Table A; Target 60947; HLA-B*46:01; PAX7; ENSG00000009709; TAA
ISQDGGSTV

SEQ ID NO: 60948 - protein, 9 aa, Homo sapiens
  misc_feature: Table A; Target 60948; HLA-B*51:01; PAX7; ENSG00000009709; TAA
ISQDGGSTV

SEQ ID NO: 60949 - protein, 9 aa, Homo sapiens
  misc_feature: Table A; Target 60949; HLA-C*01:02; PAX7; ENSG00000009709; TAA
ISQDGGSTV

SEQ ID NO: 60950 - protein, 9 aa, Homo sapiens
  misc_feature: Table A; Target 60950; HLA-C*03:03; PAX7; ENSG00000009709; TAA
ISQDGGSTV

SEQ ID NO: 60951 - protein, 9 aa, Homo sapiens
  misc_feature: Table A; Target 60951; HLA-C*03:04; PAX7; ENSG00000009709; TAA
ISQDGGSTV

SEQ ID NO: 60952 - protein, 9 aa, Homo sapiens
  misc_feature: Table A; Target 60952; HLA-C*05:01; PAX7; ENSG00000009709; TAA
ISQDGGSTV

SEQ ID NO: 60953 - protein, 9 aa, Homo sapiens
  misc_feature: Table A; Target 60953; HLA-C*14:02; PAX7; ENSG00000009709; TAA
ISQDGGSTV

SEQ ID NO: 60954 - protein, 10 aa, Homo sapiens
  misc_feature: Table A; Target 60954; HLA-B*39:01; PAX7; ENSG00000009709; TAA
ISQDGGSTVH

SEQ ID NO: 60955 - protein, 11 aa, Homo sapiens
  misc_feature: Table A; Target 60955; HLA-A*11:01; PAX7; ENSG00000009709; TAA
ISQDGGSTVHR

SEQ ID NO: 60956 - protein, 11 aa, Homo sapiens
  misc_feature: Table A; Target 60956; HLA-A*31:01; PAX7; ENSG00000009709; TAA
ISQDGGSTVHR

SEQ ID NO: 60957 - protein, 11 aa, Homo sapiens
  misc_feature: Table A; Target 60957; HLA-A*33:01; PAX7; ENSG00000009709; TAA
ISQDGGSTVHR

SEQ ID NO: 60958 - protein, 11 aa, Homo sapiens
  misc_feature: Table A; Target 60958; HLA-A*33:03; PAX7; ENSG00000009709; TAA
ISQDGGSTVHR

SEQ ID NO: 60959 - protein, 11 aa, Homo sapiens
  misc_feature: Table A; Target 60959; HLA-A*68:01; PAX7; ENSG00000009709; TAA
ISQDGGSTVHR

SEQ ID NO: 60960 - protein, 11 aa, Homo sapiens
  misc_feature: Table A; Target 60960; HLA-C*07:06; PAX7; ENSG00000009709; TAA
ISQDGGSTVHR

SEQ ID NO: 60961 - protein, 9 aa, Homo sapiens
  misc_feature: Table A; Target 60961; HLA-B*57:01; PAX7; ENSG00000009709; TAA
ISRVLRIKF

SEQ ID NO: 60962 - protein, 9 aa, Homo sapiens
  misc_feature: Table A; Target 60962; HLA-A*02:01; PAX7; ENSG00000009709; TAA
KLGEHSAVL

SEQ ID NO: 60963 - protein, 9 aa, Homo sapiens
  misc_feature: Table A; Target 60963; HLA-A*02:03; PAX7; ENSG00000009709; TAA
KLGEHSAVL

SEQ ID NO: 60964 - protein, 9 aa, Homo sapiens
  misc_feature: Table A; Target 60964; HLA-A*02:04; PAX7; ENSG00000009709; TAA
KLGEHSAVL

SEQ ID NO: 60965 - protein, 9 aa, Homo sapiens
  misc_feature: Table A; Target 60965; HLA-A*02:07; PAX7; ENSG00000009709; TAA
KLGEHSAVL

SEQ ID NO: 60966 - protein, 9 aa, Homo sapiens
  misc_feature: Table A; Target 60966; HLA-A*03:01; PAX7; ENSG00000009709; TAA
KLGEHSAVL

SEQ ID NO: 60967 - protein, 9 aa, Homo sapiens
  misc_feature: Table A; Target 60967; HLA-A*03:02; PAX7; ENSG00000009709; TAA
KLGEHSAVL

SEQ ID NO: 60968 - protein, 9 aa, Homo sapiens
  misc_feature: Table A; Target 60968; HLA-A*32:01; PAX7; ENSG00000009709; TAA
KLGEHSAVL

SEQ ID NO: 60969 - protein, 9 aa, Homo sapiens
  misc_feature: Table A; Target 60969; HLA-B*08:01; PAX7; ENSG00000009709; TAA
KLGEHSAVL

SEQ ID NO: 60970 - protein, 9 aa, Homo sapiens
  misc_feature: Table A; Target 60970; HLA-B*15:01; PAX7; ENSG00000009709; TAA
KLGEHSAVL

SEQ ID NO: 60971 - protein, 9 aa, Homo sapiens
  misc_feature: Table A; Target 60971; HLA-B*37:01; PAX7; ENSG00000009709; TAA
KLGEHSAVL

SEQ ID NO: 60972 - protein, 9 aa, Homo sapiens
  misc_feature: Table A; Target 60972; HLA-B*40:01; PAX7; ENSG00000009709; TAA
KLGEHSAVL

SEQ ID NO: 60973 - protein, 9 aa, Homo sapiens
  misc_feature: Table A; Target 60973; HLA-B*40:02; PAX7; ENSG00000009709; TAA
KLGEHSAVL

SEQ ID NO: 60974 - protein, 9 aa, Homo sapiens
  misc_feature: Table A; Target 60974; HLA-B*46:01; PAX7; ENSG00000009709; TAA
KLGEHSAVL

SEQ ID NO: 60975 - protein, 9 aa, Homo sapiens
  misc_feature: Table A; Target 60975; HLA-B*55:01; PAX7; ENSG00000009709; TAA
KLGEHSAVL

SEQ ID NO: 60976 - protein, 11 aa, Homo sapiens
  misc_feature: Table A; Target 60976; HLA-A*03:01; PAX7; ENSG00000009709; TAA
KLGEHSAVLGL

SEQ ID NO: 60977 - protein, 9 aa, Homo sapiens
  misc_feature: Table A; Target 60977; HLA-A*29:02; PAX7; ENSG00000009709; TAA
KNVSLSTQR

SEQ ID NO: 60978 - protein, 9 aa, Homo sapiens
  misc_feature: Table A; Target 60978; HLA-A*31:01; PAX7; ENSG00000009709; TAA
KNVSLSTQR

SEQ ID NO: 60979 - protein, 9 aa, Homo sapiens
  misc_feature: Table A; Target 60979; HLA-A*33:01; PAX7; ENSG00000009709; TAA
KNVSLSTQR

SEQ ID NO: 60980 - protein, 9 aa, Homo sapiens
  misc_feature: Table A; Target 60980; HLA-A*33:03; PAX7; ENSG00000009709; TAA
KNVSLSTQR

SEQ ID NO: 60981 - protein, 9 aa, Homo sapiens
  misc_feature: Table A; Target 60981; HLA-A*68:01; PAX7; ENSG00000009709; TAA
KNVSLSTQR

SEQ ID NO: 60982 - protein, 9 aa, Homo sapiens
  misc_feature: Table A; Target 60982; HLA-B*27:05; PAX7; ENSG00000009709; TAA
KNVSLSTQR

SEQ ID NO: 60983 - protein, 9 aa, Homo sapiens
  misc_feature: Table A; Target 60983; HLA-C*07:06; PAX7; ENSG00000009709; TAA
KNVSLSTQR

SEQ ID NO: 60984 - protein, 11 aa, Homo sapiens
  misc_feature: Table A; Target 60984; HLA-B*55:01; PAX7; ENSG00000009709; TAA
KPGDSLPTSQA

SEQ ID NO: 60985 - protein, 11 aa, Homo sapiens
  misc_feature: Table A; Target 60985; HLA-B*56:01; PAX7; ENSG00000009709; TAA
KPGDSLPTSQA

SEQ ID NO: 60986 - protein, 8 aa, Homo sapiens
  misc_feature: Table A; Target 60986; HLA-B*07:02; PAX7; ENSG00000009709; TAA
KPRQVATP

SEQ ID NO: 60987 - protein, 10 aa, Homo sapiens
  misc_feature: Table A; Target 60987; HLA-B*07:02; PAX7; ENSG00000009709; TAA
KPRQVATPDV

SEQ ID NO: 60988 - protein, 10 aa, Homo sapiens
  misc_feature: Table A; Target 60988; HLA-B*56:01; PAX7; ENSG00000009709; TAA
KPRQVATPDV

SEQ ID NO: 60989 - protein, 9 aa, Homo sapiens
  misc_feature: Table A; Target 60989; HLA-C*06:02; PAX7; ENSG00000009709; TAA
KQAGANQLA

SEQ ID NO: 60990 - protein, 11 aa, Homo sapiens
  misc_feature: Table A; Target 60990; HLA-A*30:02; PAX7; ENSG00000009709; TAA
KQAGANQLAAF

SEQ ID NO: 60991 - protein, 11 aa, Homo sapiens
  misc_feature: Table A; Target 60991; HLA-A*32:01; PAX7; ENSG00000009709; TAA
KQAGANQLAAF

SEQ ID NO: 60992 - protein, 11 aa, Homo sapiens
  misc_feature: Table A; Target 60992; HLA-B*15:01; PAX7; ENSG00000009709; TAA
KQAGANQLAAF

SEQ ID NO: 60993 - protein, 11 aa, Homo sapiens
  misc_feature: Table A; Target 60993; HLA-B*15:03; PAX7; ENSG00000009709; TAA
KQAGANQLAAF

SEQ ID NO: 60994 - protein, 11 aa, Homo sapiens
  misc_feature: Table A; Target 60994; HLA-B*27:05; PAX7; ENSG00000009709; TAA
KQAGANQLAAF

SEQ ID NO: 60995 - protein, 11 aa, Homo sapiens
  misc_feature: Table A; Target 60995; HLA-B*39:01; PAX7; ENSG00000009709; TAA
KQAGANQLAAF

SEQ ID NO: 60996 - protein, 11 aa, Homo sapiens
  misc_feature: Table A; Target 60996; HLA-B*46:01; PAX7; ENSG00000009709; TAA
KQAGANQLAAF

SEQ ID NO: 60997 - protein, 11 aa, Homo sapiens
  misc_feature: Table A; Target 60997; HLA-C*07:04; PAX7; ENSG00000009709; TAA
KQAGANQLAAF

SEQ ID NO: 60998 - protein, 11 aa, Homo sapiens
  misc_feature: Table A; Target 60998; HLA-C*16:04; PAX7; ENSG00000009709; TAA
KQAGANQLAAF

SEQ ID NO: 60999 - protein, 10 aa, Homo sapiens
  misc_feature: Table A; Target 60999; HLA-C*16:04; PAX7; ENSG00000009709; TAA
KRENPGMFSW

SEQ ID NO: 61000 - protein, 8 aa, Homo sapiens
  misc_feature: Table A; Target 61000; HLA-B*08:01; PAX7; ENSG00000009709; TAA
LAAFNHLL

SEQ ID NO: 61001 - protein, 11 aa, Homo sapiens
  misc_feature: Table A; Target 61001; HLA-A*31:01; PAX7; ENSG00000009709; TAA
LAKNVSLSTQR

SEQ ID NO: 61002 - protein, 11 aa, Homo sapiens
  misc_feature: Table A; Target 61002; HLA-A*33:01; PAX7; ENSG00000009709; TAA
LAKNVSLSTQR

SEQ ID NO: 61003 - protein, 11 aa, Homo sapiens
  misc_feature: Table A; Target 61003; HLA-A*33:03; PAX7; ENSG00000009709; TAA
LAKNVSLSTQR

SEQ ID NO: 61004 - protein, 11 aa, Homo sapiens
  misc_feature: Table A; Target 61004; HLA-A*68:01; PAX7; ENSG00000009709; TAA
LAKNVSLSTQR

SEQ ID NO: 61005 - protein, 11 aa, Homo sapiens
  misc_feature: Table A; Target 61005; HLA-C*07:06; PAX7; ENSG00000009709; TAA
LAKNVSLSTQR

SEQ ID NO: 61006 - protein, 10 aa, Homo sapiens
  misc_feature: Table A; Target 61006; HLA-B*07:02; PAX7; ENSG00000009709; TAA
LDSATSISAS

SEQ ID NO: 61007 - protein, 10 aa, Homo sapiens
  misc_feature: Table A; Target 61007; HLA-B*27:02; PAX7; ENSG00000009709; TAA
LDSATSISAS

SEQ ID NO: 61008 - protein, 8 aa, Homo sapiens
  misc_feature: Table A; Target 61008; HLA-B*18:01; PAX7; ENSG00000009709; TAA
LEELEKAF

SEQ ID NO: 61009 - protein, 8 aa, Homo sapiens
  misc_feature: Table A; Target 61009; HLA-C*05:01; PAX7; ENSG00000009709; TAA
LGDKGNRL

SEQ ID NO: 61010 - protein, 8 aa, Homo sapiens
  misc_feature: Table A; Target 61010; HLA-C*03:04; PAX7; ENSG00000009709; TAA
LGEHSAVL

SEQ ID NO: 61011 - protein, 9 aa, Homo sapiens
  misc_feature: Table A; Target 61011; HLA-C*07:04; PAX7; ENSG00000009709; TAA
LGNPSAVPP

SEQ ID NO: 61012 - protein, 9 aa, Homo sapiens
  misc_feature: Table A; Target 61012; HLA-C*07:04; PAX7; ENSG00000009709; TAA
LGQGRVNQL

SEQ ID NO: 61013 - protein, 9 aa, Homo sapiens
  misc_feature: Table A; Target 61013; HLA-A*02:07; PAX7; ENSG00000009709; TAA
LLPGGFPPT

SEQ ID NO: 61014 - protein, 11 aa, Homo sapiens
  misc_feature: Table A; Target 61014; HLA-A*02:07; PAX7; ENSG00000009709; TAA
LLPGGFPPTGM

SEQ ID NO: 61015 - protein, 10 aa, Homo sapiens
  misc_feature: Table A; Target 61015; HLA-A*01:01; PAX7; ENSG00000009709; TAA
LLPVETGQAY

SEQ ID NO: 61016 - protein, 10 aa, Homo sapiens
  misc_feature: Table A; Target 61016; HLA-A*02:07; PAX7; ENSG00000009709; TAA
LLPVETGQAY

SEQ ID NO: 61017 - protein, 10 aa, Homo sapiens
  misc_feature: Table A; Target 61017; HLA-A*03:01; PAX7; ENSG00000009709; TAA
LLPVETGQAY

SEQ ID NO: 61018 - protein, 10 aa, Homo sapiens
  misc_feature: Table A; Target 61018; HLA-A*25:01; PAX7; ENSG00000009709; TAA
LLPVETGQAY

SEQ ID NO: 61019 - protein, 10 aa, Homo sapiens
  misc_feature: Table A; Target 61019; HLA-A*26:01; PAX7; ENSG00000009709; TAA
LLPVETGQAY

SEQ ID NO: 61020 - protein, 10 aa, Homo sapiens
  misc_feature: Table A; Target 61020; HLA-A*29:02; PAX7; ENSG00000009709; TAA
LLPVETGQAY

SEQ ID NO: 61021 - protein, 10 aa, Homo sapiens
  misc_feature: Table A; Target 61021; HLA-A*30:02; PAX7; ENSG00000009709; TAA
LLPVETGQAY

SEQ ID NO: 61022 - protein, 10 aa, Homo sapiens
  misc_feature: Table A; Target 61022; HLA-A*32:01; PAX7; ENSG00000009709; TAA
LLPVETGQAY

SEQ ID NO: 61023 - protein, 10 aa, Homo sapiens
  misc_feature: Table A; Target 61023; HLA-B*07:02; PAX7; ENSG00000009709; TAA
LLPVETGQAY

SEQ ID NO: 61024 - protein, 10 aa, Homo sapiens
  misc_feature: Table A; Target 61024; HLA-B*15:01; PAX7; ENSG00000009709; TAA
LLPVETGQAY

SEQ ID NO: 61025 - protein, 10 aa, Homo sapiens
  misc_feature: Table A; Target 61025; HLA-B*15:03; PAX7; ENSG00000009709; TAA
LLPVETGQAY

SEQ ID NO: 61026 - protein, 10 aa, Homo sapiens
  misc_feature: Table A; Target 61026; HLA-B*27:02; PAX7; ENSG00000009709; TAA
LLPVETGQAY

SEQ ID NO: 61027 - protein, 10 aa, Homo sapiens
  misc_feature: Table A; Target 61027; HLA-B*27:05; PAX7; ENSG00000009709; TAA
LLPVETGQAY

SEQ ID NO: 61028 - protein, 10 aa, Homo sapiens
  misc_feature: Table A; Target 61028; HLA-B*35:01; PAX7; ENSG00000009709; TAA
LLPVETGQAY

SEQ ID NO: 61029 - protein, 10 aa, Homo sapiens
  misc_feature: Table A; Target 61029; HLA-B*39:01; PAX7; ENSG00000009709; TAA
LLPVETGQAY

SEQ ID NO: 61030 - protein, 10 aa, Homo sapiens
  misc_feature: Table A; Target 61030; HLA-B*44:03; PAX7; ENSG00000009709; TAA
LLPVETGQAY

SEQ ID NO: 61031 - protein, 10 aa, Homo sapiens
  misc_feature: Table A; Target 61031; HLA-B*46:01; PAX7; ENSG00000009709; TAA
LLPVETGQAY

SEQ ID NO: 61032 - protein, 10 aa, Homo sapiens
  misc_feature: Table A; Target 61032; HLA-B*55:01; PAX7; ENSG00000009709; TAA
LLPVETGQAY

SEQ ID NO: 61033 - protein, 10 aa, Homo sapiens
  misc_feature: Table A; Target 61033; HLA-B*57:01; PAX7; ENSG00000009709; TAA
LLPVETGQAY

SEQ ID NO: 61034 - protein, 10 aa, Homo sapiens
  misc_feature: Table A; Target 61034; HLA-B*58:01; PAX7; ENSG00000009709; TAA
LLPVETGQAY

SEQ ID NO: 61035 - protein, 10 aa, Homo sapiens
  misc_feature: Table A; Target 61035; HLA-C*01:02; PAX7; ENSG00000009709; TAA
LLPVETGQAY

SEQ ID NO: 61036 - protein, 10 aa, Homo sapiens
  misc_feature: Table A; Target 61036; HLA-C*02:02; PAX7; ENSG00000009709; TAA
LLPVETGQAY

SEQ ID NO: 61037 - protein, 10 aa, Homo sapiens
  misc_feature: Table A; Target 61037; HLA-C*03:03; PAX7; ENSG00000009709; TAA
LLPVETGQAY

SEQ ID NO: 61038 - protein, 10 aa, Homo sapiens
  misc_feature: Table A; Target 61038; HLA-C*04:01; PAX7; ENSG00000009709; TAA
LLPVETGQAY

SEQ ID NO: 61039 - protein, 10 aa, Homo sapiens
  misc_feature: Table A; Target 61039; HLA-C*07:01; PAX7; ENSG00000009709; TAA
LLPVETGQAY

SEQ ID NO: 61040 - protein, 10 aa, Homo sapiens
  misc_feature: Table A; Target 61040; HLA-C*07:02; PAX7; ENSG00000009709; TAA
LLPVETGQAY

SEQ ID NO: 61041 - protein, 10 aa, Homo sapiens
  misc_feature: Table A; Target 61041; HLA-C*07:04; PAX7; ENSG00000009709; TAA
LLPVETGQAY

SEQ ID NO: 61042 - protein, 10 aa, Homo sapiens
  misc_feature: Table A; Target 61042; HLA-C*14:02; PAX7; ENSG00000009709; TAA
LLPVETGQAY

SEQ ID NO: 61043 - protein, 10 aa, Homo sapiens
  misc_feature: Table A; Target 61043; HLA-C*16:01; PAX7; ENSG00000009709; TAA
LLPVETGQAY

SEQ ID NO: 61044 - protein, 10 aa, Homo sapiens
  misc_feature: Table A; Target 61044; HLA-C*16:02; PAX7; ENSG00000009709; TAA
LLPVETGQAY

SEQ ID NO: 61045 - protein, 10 aa, Homo sapiens
  misc_feature: Table A; Target 61045; HLA-C*16:04; PAX7; ENSG00000009709; TAA
LLPVETGQAY

SEQ ID NO: 61046 - protein, 9 aa, Homo sapiens
  misc_feature: Table A; Target 61046; HLA-B*35:01; PAX7; ENSG00000009709; TAA
LPDSTYPTT

SEQ ID NO: 61047 - protein, 9 aa, Homo sapiens
  misc_feature: Table A; Target 61047; HLA-B*35:03; PAX7; ENSG00000009709; TAA
LPDSTYPTT

SEQ ID NO: 61048 - protein, 9 aa, Homo sapiens
  misc_feature: Table A; Target 61048; HLA-B*51:01; PAX7; ENSG00000009709; TAA
LPDSTYPTT

SEQ ID NO: 61049 - protein, 9 aa, Homo sapiens
  misc_feature: Table A; Target 61049; HLA-B*54:01; PAX7; ENSG00000009709; TAA
LPDSTYPTT

SEQ ID NO: 61050 - protein, 9 aa, Homo sapiens
  misc_feature: Table A; Target 61050; HLA-B*55:01; PAX7; ENSG00000009709; TAA
LPDSTYPTT

SEQ ID NO: 61051 - protein, 9 aa, Homo sapiens
  misc_feature: Table A; Target 61051; HLA-B*56:01; PAX7; ENSG00000009709; TAA
LPDSTYPTT

SEQ ID NO: 61052 - protein, 10 aa, Homo sapiens
  misc_feature: Table A; Target 61052; HLA-B*35:03; PAX7; ENSG00000009709; TAA
LPDSTYPTTT

SEQ ID NO: 61053 - protein, 11 aa, Homo sapiens
  misc_feature: Table A; Target 61053; HLA-B*35:03; PAX7; ENSG00000009709; TAA
LPDSTYPTTTI

SEQ ID NO: 61054 - protein, 11 aa, Homo sapiens
  misc_feature: Table A; Target 61054; HLA-B*38:01; PAX7; ENSG00000009709; TAA
LPDSTYPTTTI

SEQ ID NO: 61055 - protein, 11 aa, Homo sapiens
  misc_feature: Table A; Target 61055; HLA-B*51:01; PAX7; ENSG00000009709; TAA
LPDSTYPTTTI

SEQ ID NO: 61056 - protein, 11 aa, Homo sapiens
  misc_feature: Table A; Target 61056; HLA-C*05:01; PAX7; ENSG00000009709; TAA
LPDSTYPTTTI

SEQ ID NO: 61057 - protein, 11 aa, Homo sapiens
  misc_feature: Table A; Target 61057; HLA-C*07:02; PAX7; ENSG00000009709; TAA
LPDSTYPTTTI

SEQ ID NO: 61058 - protein, 9 aa, Homo sapiens
  misc_feature: Table A; Target 61058; HLA-B*54:01; PAX7; ENSG00000009709; TAA
LPGGFPPTG

SEQ ID NO: 61059 - protein, 9 aa, Homo sapiens
  misc_feature: Table A; Target 61059; HLA-B*56:01; PAX7; ENSG00000009709; TAA
LPGGFPPTG

SEQ ID NO: 61060 - protein, 10 aa, Homo sapiens
  misc_feature: Table A; Target 61060; HLA-B*07:02; PAX7; ENSG00000009709; TAA
LPGGFPPTGM

SEQ ID NO: 61061 - protein, 10 aa, Homo sapiens
  misc_feature: Table A; Target 61061; HLA-B*35:01; PAX7; ENSG00000009709; TAA
LPGGFPPTGM

SEQ ID NO: 61062 - protein, 10 aa, Homo sapiens
  misc_feature: Table A; Target 61062; HLA-B*35:03; PAX7; ENSG00000009709; TAA
LPGGFPPTGM

SEQ ID NO: 61063 - protein, 10 aa, Homo sapiens
  misc_feature: Table A; Target 61063; HLA-B*56:01; PAX7; ENSG00000009709; TAA
LPGGFPPTGM

SEQ ID NO: 61064 - protein, 8 aa, Homo sapiens
  misc_feature: Table A; Target 61064; HLA-B*35:01; PAX7; ENSG00000009709; TAA
LPGTVPRM

SEQ ID NO: 61065 - protein, 8 aa, Homo sapiens
  misc_feature: Table A; Target 61065; HLA-B*35:03; PAX7; ENSG00000009709; TAA
LPGTVPRM

SEQ ID NO: 61066 - protein, 8 aa, Homo sapiens
  misc_feature: Table A; Target 61066; HLA-B*51:01; PAX7; ENSG00000009709; TAA
LPGTVPRM

SEQ ID NO: 61067 - protein, 8 aa, Homo sapiens
  misc_feature: Table A; Target 61067; HLA-B*55:01; PAX7; ENSG00000009709; TAA
LPGTVPRM

SEQ ID NO: 61068 - protein, 9 aa, Homo sapiens
  misc_feature: Table A; Target 61068; HLA-B*35:03; PAX7; ENSG00000009709; TAA
LPGTVPRMM

SEQ ID NO: 61069 - protein, 11 aa, Homo sapiens
  misc_feature: Table A; Target 61069; HLA-B*35:01; PAX7; ENSG00000009709; TAA
LPPYQLPDSTY

SEQ ID NO: 61070 - protein, 11 aa, Homo sapiens
  misc_feature: Table A; Target 61070; HLA-B*55:01; PAX7; ENSG00000009709; TAA
LPPYQLPDSTY

SEQ ID NO: 61071 - protein, 11 aa, Homo sapiens
  misc_feature: Table A; Target 61071; HLA-C*03:03; PAX7; ENSG00000009709; TAA
LPPYQLPDSTY

SEQ ID NO: 61072 - protein, 9 aa, Homo sapiens
  misc_feature: Table A; Target 61072; HLA-B*54:01; PAX7; ENSG00000009709; TAA
LPTSQAYCP

SEQ ID NO: 61073 - protein, 9 aa, Homo sapiens
  misc_feature: Table A; Target 61073; HLA-B*56:01; PAX7; ENSG00000009709; TAA
LPTSQAYCP

SEQ ID NO: 61074 - protein, 8 aa, Homo sapiens
  misc_feature: Table A; Target 61074; HLA-B*54:01; PAX7; ENSG00000009709; TAA
LPVETGQA

SEQ ID NO: 61075 - protein, 8 aa, Homo sapiens
  misc_feature: Table A; Target 61075; HLA-B*55:01; PAX7; ENSG00000009709; TAA
LPVETGQA

SEQ ID NO: 61076 - protein, 8 aa, Homo sapiens
  misc_feature: Table A; Target 61076; HLA-B*56:01; PAX7; ENSG00000009709; TAA
LPVETGQA

SEQ ID NO: 61077 - protein, 9 aa, Homo sapiens
  misc_feature: Table A; Target 61077; HLA-A*01:01; PAX7; ENSG00000009709; TAA
LPVETGQAY

SEQ ID NO: 61078 - protein, 9 aa, Homo sapiens
  misc_feature: Table A; Target 61078; HLA-A*03:02; PAX7; ENSG00000009709; TAA
LPVETGQAY

SEQ ID NO: 61079 - protein, 9 aa, Homo sapiens
  misc_feature: Table A; Target 61079; HLA-A*11:01; PAX7; ENSG00000009709; TAA
LPVETGQAY

SEQ ID NO: 61080 - protein, 9 aa, Homo sapiens
  misc_feature: Table A; Target 61080; HLA-A*23:01; PAX7; ENSG00000009709; TAA
LPVETGQAY

SEQ ID NO: 61081 - protein, 9 aa, Homo sapiens
  misc_feature: Table A; Target 61081; HLA-A*24:02; PAX7; ENSG00000009709; TAA
LPVETGQAY

SEQ ID NO: 61082 - protein, 9 aa, Homo sapiens
  misc_feature: Table A; Target 61082; HLA-A*25:01; PAX7; ENSG00000009709; TAA
LPVETGQAY

SEQ ID NO: 61083 - protein, 9 aa, Homo sapiens
  misc_feature: Table A; Target 61083; HLA-A*26:01; PAX7; ENSG00000009709; TAA
LPVETGQAY

SEQ ID NO: 61084 - protein, 9 aa, Homo sapiens
  misc_feature: Table A; Target 61084; HLA-A*29:02; PAX7; ENSG00000009709; TAA
LPVETGQAY

SEQ ID NO: 61085 - protein, 9 aa, Homo sapiens
  misc_feature: Table A; Target 61085; HLA-A*30:01; PAX7; ENSG00000009709; TAA
LPVETGQAY

SEQ ID NO: 61086 - protein, 9 aa, Homo sapiens
  misc_feature: Table A; Target 61086; HLA-A*30:02; PAX7; ENSG00000009709; TAA
LPVETGQAY

SEQ ID NO: 61087 - protein, 9 aa, Homo sapiens
  misc_feature: Table A; Target 61087; HLA-A*32:01; PAX7; ENSG00000009709; TAA
LPVETGQAY

SEQ ID NO: 61088 - protein, 9 aa, Homo sapiens
  misc_feature: Table A; Target 61088; HLA-A*33:01; PAX7; ENSG00000009709; TAA
LPVETGQAY
